United States Patent Application Publication US 2018/0236103 A1 - sequence listing, part 5

SEQ ID NO: 113776 - RNA, 24 nt, Artificial Sequence
  Synthetic
acgaaggucucaaucgccgcgucg

SEQ ID NO: 113777 - RNA, 18 nt, Artificial Sequence
  Synthetic
cauuuguucagugguucg

SEQ ID NO: 113778 - RNA, 19 nt, Artificial Sequence
  Synthetic
ccauuuguucagugguucg

SEQ ID NO: 113779 - RNA, 20 nt, Artificial Sequence
  Synthetic
gccauuuguucagugguucg

SEQ ID NO: 113780 - RNA, 21 nt, Artificial Sequence
  Synthetic
ugccauuuguucagugguucg

SEQ ID NO: 113781 - RNA, 22 nt, Artificial Sequence
  Synthetic
gugccauuuguucagugguucg

SEQ ID NO: 113782 - RNA, 23 nt, Artificial Sequence
  Synthetic
agugccauuuguucagugguucg

SEQ ID NO: 113783 - RNA, 24 nt, Artificial Sequence
  Synthetic
uagugccauuuguucagugguucg

SEQ ID NO: 113784 - RNA, 18 nt, Artificial Sequence
  Synthetic
ggccggacgccaacaagg

SEQ ID NO: 113785 - RNA, 19 nt, Artificial Sequence
  Synthetic
uggccggacgccaacaagg

SEQ ID NO: 113786 - RNA, 20 nt, Artificial Sequence
  Synthetic
cuggccggacgccaacaagg

SEQ ID NO: 113787 - RNA, 21 nt, Artificial Sequence
  Synthetic
acuggccggacgccaacaagg

SEQ ID NO: 113788 - RNA, 22 nt, Artificial Sequence
  Synthetic
aacuggccggacgccaacaagg

SEQ ID NO: 113789 - RNA, 23 nt, Artificial Sequence
  Synthetic
caacuggccggacgccaacaagg

SEQ ID NO: 113790 - RNA, 24 nt, Artificial Sequence
  Synthetic
acaacuggccggacgccaacaagg

SEQ ID NO: 113791 - RNA, 18 nt, Artificial Sequence
  Synthetic
  misc_feature (11)..(11): n is a, c, g, or u
uuccuuggacncauaagg

SEQ ID NO: 113792 - RNA, 19 nt, Artificial Sequence
  Synthetic
  misc_feature (12)..(12): n is a, c, g, or u
auuccuuggacncauaagg

SEQ ID NO: 113793 - RNA, 20 nt, Artificial Sequence
  Synthetic
  misc_feature (13)..(13): n is a, c, g, or u
uauuccuuggacncauaagg

SEQ ID NO: 113794 - RNA, 21 nt, Artificial Sequence
  Synthetic
  misc_feature (14)..(14): n is a, c, g, or u
guauuccuuggacncauaagg

SEQ ID NO: 113795 - RNA, 22 nt, Artificial Sequence
  Synthetic
  misc_feature (15)..(15): n is a, c, g, or u
aguauuccuuggacncauaagg

SEQ ID NO: 113796 - RNA, 23 nt, Artificial Sequence
  Synthetic
  misc_feature (16)..(16): n is a, c, g, or u
uaguauuccuuggacncauaagg

SEQ ID NO: 113797 - RNA, 24 nt, Artificial Sequence
  Synthetic
  misc_feature (17)..(17): n is a, c, g, or u
uuaguauuccuuggacncauaagg

SEQ ID NO: 113798 - RNA, 18 nt, Artificial Sequence
  Synthetic
gcuguacaaaaccuacgg

SEQ ID NO: 113799 - RNA, 19 nt, Artificial Sequence
  Synthetic
ugcuguacaaaaccuacgg

SEQ ID NO: 113800 - RNA, 20 nt, Artificial Sequence
  Synthetic
uugcuguacaaaaccuacgg

SEQ ID NO: 113801 - RNA, 21 nt, Artificial Sequence
  Synthetic
guugcuguacaaaaccuacgg

SEQ ID NO: 113802 - RNA, 22 nt, Artificial Sequence
  Synthetic
uguugcuguacaaaaccuacgg

SEQ ID NO: 113803 - RNA, 23 nt, Artificial Sequence
  Synthetic
auguugcuguacaaaaccuacgg

SEQ ID NO: 113804 - RNA, 24 nt, Artificial Sequence
  Synthetic
cauguugcuguacaaaaccuacgg

SEQ ID NO: 113805 - RNA, 18 nt, Artificial Sequence
  Synthetic
agugggaggaguuggggg

SEQ ID NO: 113806 - RNA, 19 nt, Artificial Sequence
  Synthetic
gagugggaggaguuggggg

SEQ ID NO: 113807 - RNA, 20 nt, Artificial Sequence
  Synthetic
ugagugggaggaguuggggg

SEQ ID NO: 113808 - RNA, 21 nt, Artificial Sequence
  Synthetic
  misc_feature (1)..(1): n is a, c, g, or u
nugagugggaggaguuggggg

SEQ ID NO: 113809 - RNA, 22 nt, Artificial Sequence
  Synthetic
  misc_feature (2)..(2): n is a, c, g, or u
anugagugggaggaguuggggg

SEQ ID NO: 113810 - RNA, 23 nt, Artificial Sequence
  Synthetic
  misc_feature (3)..(3): n is a, c, g, or u
uanugagugggaggaguuggggg

SEQ ID NO: 113811 - RNA, 24 nt, Artificial Sequence
  Synthetic
  misc_feature (4)..(4): n is a, c, g, or u
uuanugagugggaggaguuggggg

SEQ ID NO: 113812 - RNA, 18 nt, Artificial Sequence
  Synthetic
gagugggaggaguugggg

SEQ ID NO: 113813 - RNA, 19 nt, Artificial Sequence
  Synthetic
ugagugggaggaguugggg

SEQ ID NO: 113814 - RNA, 20 nt, Artificial Sequence
  Synthetic
  misc_feature (1)..(1): n is a, c, g, or u
nugagugggaggaguugggg

SEQ ID NO: 113815 - RNA, 21 nt, Artificial Sequence
  Synthetic
  misc_feature (2)..(2): n is a, c, g, or u
anugagugggaggaguugggg

SEQ ID NO: 113816 - RNA, 22 nt, Artificial Sequence
  Synthetic
  misc_feature (3)..(3): n is a, c, g, or u
uanugagugggaggaguugggg

SEQ ID NO: 113817 - RNA, 23 nt, Artificial Sequence
  Synthetic
  misc_feature (4)..(4): n is a, c, g, or u
uuanugagugggaggaguugggg

SEQ ID NO: 113818 - RNA, 24 nt, Artificial Sequence
  Synthetic
  misc_feature (5)..(5): n is a, c, g, or u
uuuanugagugggaggaguugggg

SEQ ID NO: 113819 - RNA, 18 nt, Artificial Sequence
  Synthetic
caugggggacuguugggg

SEQ ID NO: 113820 - RNA, 19 nt, Artificial Sequence
  Synthetic
ccaugggggacuguugggg

SEQ ID NO: 113821 - RNA, 20 nt, Artificial Sequence
  Synthetic
cccaugggggacuguugggg

SEQ ID NO: 113822 - RNA, 21 nt, Artificial Sequence
  Synthetic
ccccaugggggacuguugggg

SEQ ID NO: 113823 - RNA, 22 nt, Artificial Sequence
  Synthetic
uccccaugggggacuguugggg

SEQ ID NO: 113824 - RNA, 23 nt, Artificial Sequence
  Synthetic
cuccccaugggggacuguugggg

SEQ ID NO: 113825 - RNA, 24 nt, Artificial Sequence
  Synthetic
ccuccccaugggggacuguugggg

SEQ ID NO: 113826 - RNA, 18 nt, Artificial Sequence
  Synthetic
ugaaucuagccaccuggg

SEQ ID NO: 113827 - RNA, 19 nt, Artificial Sequence
  Synthetic
augaaucuagccaccuggg

SEQ ID NO: 113828 - RNA, 20 nt, Artificial Sequence
  Synthetic
  misc_feature (1)..(1): n is a, c, g, or u
naugaaucuagccaccuggg

SEQ ID NO: 113829 - RNA, 21 nt, Artificial Sequence
  Synthetic
  misc_feature (2)..(2): n is a, c, g, or u
unaugaaucuagccaccuggg

SEQ ID NO: 113830 - RNA, 22 nt, Artificial Sequence
  Synthetic
  misc_feature (3)..(3): n is a, c, g, or u
uunaugaaucuagccaccuggg

SEQ ID NO: 113831 - RNA, 23 nt, Artificial Sequence
  Synthetic
  misc_feature (4)..(4): n is a, c, g, or u
guunaugaaucuagccaccuggg

SEQ ID NO: 113832 - RNA, 24 nt, Artificial Sequence
  Synthetic
  misc_feature (5)..(5): n is a, c, g, or u
aguunaugaaucuagccaccuggg

SEQ ID NO: 113833 - RNA, 18 nt, Artificial Sequence
  Synthetic
ccaugggggacuguuggg

SEQ ID NO: 113834 - RNA, 19 nt, Artificial Sequence
  Synthetic
cccaugggggacuguuggg

SEQ ID NO: 113835 - RNA, 20 nt, Artificial Sequence
  Synthetic
ccccaugggggacuguuggg

SEQ ID NO: 113836 - RNA, 21 nt, Artificial Sequence
  Synthetic
uccccaugggggacuguuggg

SEQ ID NO: 113837 - RNA, 22 nt, Artificial Sequence
  Synthetic
cuccccaugggggacuguuggg

SEQ ID NO: 113838 - RNA, 23 nt, Artificial Sequence
  Synthetic
ccuccccaugggggacuguuggg

SEQ ID NO: 113839 - RNA, 24 nt, Artificial Sequence
  Synthetic
  misc_feature (1)..(1): n is a, c, g, or u
nccuccccaugggggacuguuggg

SEQ ID NO: 113840 - RNA, 18 nt, Artificial Sequence
  Synthetic
  misc_feature (3)..(3): n is a, c, g, or u
ccncacaaggacaacugg

SEQ ID NO: 113841 - RNA, 19 nt, Artificial Sequence
  Synthetic
  misc_feature (4)..(4): n is a, c, g, or u
cccncacaaggacaacugg

SEQ ID NO: 113842 - RNA, 20 nt, Artificial Sequence
  Synthetic
  misc_feature (5)..(5): n is a, c, g, or u
acccncacaaggacaacugg

SEQ ID NO: 113843 - RNA, 21 nt, Artificial Sequence
  Synthetic
  misc_feature (6)..(6): n is a, c, g, or u
aacccncacaaggacaacugg

SEQ ID NO: 113844 - RNA, 22 nt, Artificial Sequence
  Synthetic
  misc_feature (7)..(7): n is a, c, g, or u
caacccncacaaggacaacugg

SEQ ID NO: 113845 - RNA, 23 nt, Artificial Sequence
  Synthetic
  misc_feature (8)..(8): n is a, c, g, or u
ucaacccncacaaggacaacugg

SEQ ID NO: 113846 - RNA, 24 nt, Artificial Sequence
  Synthetic
  misc_feature (9)..(9): n is a, c, g, or u
cucaacccncacaaggacaacugg

SEQ ID NO: 113847 - RNA, 18 nt, Artificial Sequence
  Synthetic
ugacgcaacccccacugg

SEQ ID NO: 113848 - RNA, 19 nt, Artificial Sequence
  Synthetic
cugacgcaacccccacugg

SEQ ID NO: 113849 - RNA, 20 nt, Artificial Sequence
  Synthetic
gcugacgcaacccccacugg

SEQ ID NO: 113850 - RNA, 21 nt, Artificial Sequence
  Synthetic
ugcugacgcaacccccacugg

SEQ ID NO: 113851 - RNA, 22 nt, Artificial Sequence
  Synthetic
uugcugacgcaacccccacugg

SEQ ID NO: 113852 - RNA, 23 nt, Artificial Sequence
  Synthetic
uuugcugacgcaacccccacugg

SEQ ID NO: 113853 - RNA, 24 nt, Artificial Sequence
  Synthetic
guuugcugacgcaacccccacugg

SEQ ID NO: 113854 - RNA, 18 nt, Artificial Sequence
  Synthetic
augaaucuagccaccugg

SEQ ID NO: 113855 - RNA, 19 nt, Artificial Sequence
  Synthetic
  misc_feature (1)..(1): n is a, c, g, or u
naugaaucuagccaccugg

SEQ ID NO: 113856 - RNA, 20 nt, Artificial Sequence
  Synthetic
  misc_feature (2)..(2): n is a, c, g, or u
unaugaaucuagccaccugg

SEQ ID NO: 113857 - RNA, 21 nt, Artificial Sequence
  Synthetic
  misc_feature (3)..(3): n is a, c, g, or u
uunaugaaucuagccaccugg

SEQ ID NO: 113858 - RNA, 22 nt, Artificial Sequence
  Synthetic
  misc_feature (4)..(4): n is a, c, g, or u
guunaugaaucuagccaccugg

SEQ ID NO: 113859 - RNA, 23 nt, Artificial Sequence
  Synthetic
  misc_feature (5)..(5): n is a, c, g, or u
aguunaugaaucuagccaccugg

SEQ ID NO: 113860 - RNA, 24 nt, Artificial Sequence
  Synthetic
  misc_feature (6)..(6): n is a, c, g, or u
gaguunaugaaucuagccaccugg

SEQ ID NO: 113861 - RNA, 18 nt, Artificial Sequence
  Synthetic
  misc_feature (11)..(11): n is a, c, g, or u
uguguguuuanugagugg

SEQ ID NO: 113862 - RNA, 19 nt, Artificial Sequence
  Synthetic
  misc_feature (12)..(12): n is a, c, g, or u
cuguguguuuanugagugg

SEQ ID NO: 113863 - RNA, 20 nt, Artificial Sequence
  Synthetic
  misc_feature (13)..(13): n is a, c, g, or u
acuguguguuuanugagugg

SEQ ID NO: 113864 - RNA, 21 nt, Artificial Sequence
  Synthetic
  misc_feature (14)..(14): n is a, c, g, or u
gacuguguguuuanugagugg

SEQ ID NO: 113865 - RNA, 22 nt, Artificial Sequence
  Synthetic
  misc_feature (15)..(15): n is a, c, g, or u
agacuguguguuuanugagugg

SEQ ID NO: 113866 - RNA, 23 nt, Artificial Sequence
  Synthetic
  misc_feature (16)..(16): n is a, c, g, or u
aagacuguguguuuanugagugg

SEQ ID NO: 113867 - RNA, 24 nt, Artificial Sequence
  Synthetic
  misc_feature (17)..(17): n is a, c, g, or u
aaagacuguguguuuanugagugg

SEQ ID NO: 113868 - RNA, 18 nt, Artificial Sequence
  Synthetic
  misc_feature (1)..(1): n is a, c, g, or u
nugagugggaggaguugg

SEQ ID NO: 113869 - RNA, 19 nt, Artificial Sequence
  Synthetic
  misc_feature (2)..(2): n is a, c, g, or u
anugagugggaggaguugg

SEQ ID NO: 113870 - RNA, 20 nt, Artificial Sequence
  Synthetic
  misc_feature (3)..(3): n is a, c, g, or u
uanugagugggaggaguugg

SEQ ID NO: 113871 - RNA, 21 nt, Artificial Sequence
  Synthetic
  misc_feature (4)..(4): n is a, c, g, or u
uuanugagugggaggaguugg

SEQ ID NO: 113872 - RNA, 22 nt, Artificial Sequence
  Synthetic
  misc_feature (5)..(5): n is a, c, g, or u
uuuanugagugggaggaguugg

SEQ ID NO: 113873 - RNA, 23 nt, Artificial Sequence
  Synthetic
  misc_feature (6)..(6): n is a, c, g, or u
guuuanugagugggaggaguugg

SEQ ID NO: 113874 - RNA, 24 nt, Artificial Sequence
  Synthetic
  misc_feature (7)..(7): n is a, c, g, or u
uguuuanugagugggaggaguugg

SEQ ID NO: 113875 - RNA, 18 nt, Artificial Sequence
  Synthetic
uuccugucuuacuuuugg

SEQ ID NO: 113876 - RNA, 19 nt, Artificial Sequence
  Synthetic
uuuccugucuuacuuuugg

SEQ ID NO: 113877 - RNA, 20 nt, Artificial Sequence
  Synthetic
auuuccugucuuacuuuugg

SEQ ID NO: 113878 - RNA, 21 nt, Artificial Sequence
  Synthetic
cauuuccugucuuacuuuugg

SEQ ID NO: 113879 - RNA, 22 nt, Artificial Sequence
  Synthetic
acauuuccugucuuacuuuugg

SEQ ID NO: 113880 - RNA, 23 nt, Artificial Sequence
  Synthetic
cacauuuccugucuuacuuuugg

SEQ ID NO: 113881 - RNA, 24 nt, Artificial Sequence
  Synthetic
ucacauuuccugucuuacuuuugg

SEQ ID NO: 113882 - RNA, 18 nt, Artificial Sequence
  Synthetic
  misc_feature (16)..(17): n is a, c, g, or u
gggauauguaauuggnng

SEQ ID NO: 113883 - RNA, 19 nt, Artificial Sequence
  Synthetic
  misc_feature (17)..(18): n is a, c, g, or u
ugggauauguaauuggnng

SEQ ID NO: 113884 - RNA, 20 nt, Artificial Sequence
  Synthetic
  misc_feature (18)..(19): n is a, c, g, or u
augggauauguaauuggnng

SEQ ID NO: 113885 - RNA, 21 nt, Artificial Sequence
  Synthetic
  misc_feature (19)..(20): n is a, c, g, or u
caugggauauguaauuggnng

SEQ ID NO: 113886 - RNA, 22 nt, Artificial Sequence
  Synthetic
  misc_feature (20)..(21): n is a, c, g, or u
ucaugggauauguaauuggnng

SEQ ID NO: 113887 - RNA, 23 nt, Artificial Sequence
  Synthetic
  misc_feature (21)..(22): n is a, c, g, or u
uucaugggauauguaauuggnng

SEQ ID NO: 113888 - RNA, 24 nt, Artificial Sequence
  Synthetic
  misc_feature (22)..(23): n is a, c, g, or u
cuucaugggauauguaauuggnng

SEQ ID NO: 113889 - RNA, 18 nt, Artificial Sequence
  Synthetic
gacccuguaccgaacaug

SEQ ID NO: 113890 - RNA, 19 nt, Artificial Sequence
  Synthetic
ggacccuguaccgaacaug

SEQ ID NO: 113891 - RNA, 20 nt, Artificial Sequence
  Synthetic
gggacccuguaccgaacaug

SEQ ID NO: 113892 - RNA, 21 nt, Artificial Sequence
  Synthetic
ggggacccuguaccgaacaug

SEQ ID NO: 113893 - RNA, 22 nt, Artificial Sequence
  Synthetic
uggggacccuguaccgaacaug

SEQ ID NO: 113894 - RNA, 23 nt, Artificial Sequence
  Synthetic
cuggggacccuguaccgaacaug

SEQ ID NO: 113895 - RNA, 24 nt, Artificial Sequence
  Synthetic
acuggggacccuguaccgaacaug

SEQ ID NO: 113896 - RNA, 18 nt, Artificial Sequence
  Synthetic
  misc_feature (7)..(8): n is a, c, g, or u
gguucannccuccccaug

SEQ ID NO: 113897 - RNA, 19 nt, Artificial Sequence
  Synthetic
  misc_feature (8)..(9): n is a, c, g, or u
ggguucannccuccccaug

SEQ ID NO: 113898 - RNA, 20 nt, Artificial Sequence
  Synthetic
  misc_feature (9)..(10): n is a, c, g, or u
aggguucannccuccccaug

SEQ ID NO: 113899 - RNA, 21 nt, Artificial Sequence
  Synthetic
  misc_feature (10)..(11): n is a, c, g, or u
caggguucannccuccccaug

SEQ ID NO: 113900 - RNA, 22 nt, Artificial Sequence
  Synthetic
  misc_feature (11)..(12): n is a, c, g, or u
ccaggguucannccuccccaug

SEQ ID NO: 113901 - RNA, 23 nt, Artificial Sequence
  Synthetic
  misc_feature (12)..(13): n is a, c, g, or u
gccaggguucannccuccccaug

SEQ ID NO: 113902 - RNA, 24 nt, Artificial Sequence
  Synthetic
  misc_feature (13)..(14): n is a, c, g, or u
ggccaggguucannccuccccaug

SEQ ID NO: 113903 - RNA, 18 nt, Artificial Sequence
  Synthetic
ccuccccaugggggacug

SEQ ID NO: 113904 - RNA, 19 nt, Artificial Sequence
  Synthetic
  misc_feature (1)..(1): n is a, c, g, or u
nccuccccaugggggacug

SEQ ID NO: 113905 - RNA, 20 nt, Artificial Sequence
  Synthetic
  misc_feature (1)..(2): n is a, c, g, or u
nnccuccccaugggggacug

SEQ ID NO: 113906 - RNA, 21 nt, Artificial Sequence
  Synthetic
  misc_feature (2)..(3): n is a, c, g, or u
annccuccccaugggggacug

SEQ ID NO: 113907 - RNA, 22 nt, Artificial Sequence
  Synthetic
  misc_feature (3)..(4): n is a, c, g, or u
cannccuccccaugggggacug

SEQ ID NO: 113908 - RNA, 23 nt, Artificial Sequence
  Synthetic
  misc_feature (4)..(5): n is a, c, g, or u
ucannccuccccaugggggacug

SEQ ID NO: 113909 - RNA, 24 nt, Artificial Sequence
  Synthetic
  misc_feature (5)..(6): n is a, c, g, or u
uucannccuccccaugggggacug

SEQ ID NO: 113910 - RNA, 18 nt, Artificial Sequence
  Synthetic
cucugccgauccauacug

SEQ ID NO: 113911 - RNA, 19 nt, Artificial Sequence
  Synthetic
ccucugccgauccauacug

SEQ ID NO: 113912 - RNA, 20 nt, Artificial Sequence
  Synthetic
uccucugccgauccauacug

SEQ ID NO: 113913 - RNA, 21 nt, Artificial Sequence
  Synthetic
cuccucugccgauccauacug

SEQ ID NO: 113914 - RNA, 22 nt, Artificial Sequence
  Synthetic
ucuccucugccgauccauacug

SEQ ID NO: 113915 - RNA, 23 nt, Artificial Sequence
  Synthetic
gucuccucugccgauccauacug

SEQ ID NO: 113916 - RNA, 24 nt, Artificial Sequence
  Synthetic
ugucuccucugccgauccauacug

SEQ ID NO: 113917 - RNA, 18 nt, Artificial Sequence
  Synthetic
acagagucuagacucgug

SEQ ID NO: 113918 - RNA, 19 nt, Artificial Sequence
  Synthetic
cacagagucuagacucgug

SEQ ID NO: 113919 - RNA, 20 nt, Artificial Sequence
  Synthetic
ccacagagucuagacucgug

SEQ ID NO: 113920 - RNA, 21 nt, Artificial Sequence
  Synthetic
accacagagucuagacucgug

SEQ ID NO: 113921 - RNA, 22 nt, Artificial Sequence
  Synthetic
uaccacagagucuagacucgug

SEQ ID NO: 113922 - RNA, 23 nt, Artificial Sequence
  Synthetic
auaccacagagucuagacucgug

SEQ ID NO: 113923 - RNA, 24 nt, Artificial Sequence
  Synthetic
aauaccacagagucuagacucgug

SEQ ID NO: 113924 - RNA, 18 nt, Artificial Sequence
  Synthetic
caggcaagcuauucugug

SEQ ID NO: 113925 - RNA, 19 nt, Artificial Sequence
  Synthetic
ucaggcaagcuauucugug

SEQ ID NO: 113926 - RNA, 20 nt, Artificial Sequence
  Synthetic
cucaggcaagcuauucugug

SEQ ID NO: 113927 - RNA, 21 nt, Artificial Sequence
  Synthetic
acucaggcaagcuauucugug

SEQ ID NO: 113928 - RNA, 22 nt, Artificial Sequence
  Synthetic
cacucaggcaagcuauucugug

SEQ ID NO: 113929 - RNA, 23 nt, Artificial Sequence
  Synthetic
gcacucaggcaagcuauucugug

SEQ ID NO: 113930 - RNA, 24 nt, Artificial Sequence
  Synthetic
ggcacucaggcaagcuauucugug

SEQ ID NO: 113931 - RNA, 18 nt, Artificial Sequence
  Synthetic
  misc_feature (2)..(2): n is a, c, g, or u
anugagugggaggaguug

SEQ ID NO: 113932 - RNA, 19 nt, Artificial Sequence
  Synthetic
  misc_feature (3)..(3): n is a, c, g, or u
uanugagugggaggaguug

SEQ ID NO: 113933 - RNA, 20 nt, Artificial Sequence
  Synthetic
  misc_feature (4)..(4): n is a, c, g, or u
uuanugagugggaggaguug

SEQ ID NO: 113934 - RNA, 21 nt, Artificial Sequence
  Synthetic
  misc_feature (5)..(5): n is a, c, g, or u
uuuanugagugggaggaguug

SEQ ID NO: 113935 - RNA, 22 nt, Artificial Sequence
  Synthetic
  misc_feature (6)..(6): n is a, c, g, or u
guuuanugagugggaggaguug

SEQ ID NO: 113936 - RNA, 23 nt, Artificial Sequence
  Synthetic
  misc_feature (7)..(7): n is a, c, g, or u
uguuuanugagugggaggaguug

SEQ ID NO: 113937 - RNA, 24 nt, Artificial Sequence
  Synthetic
  misc_feature (8)..(8): n is a, c, g, or u
guguuuanugagugggaggaguug

SEQ ID NO: 113938 - RNA, 18 nt, Artificial Sequence
  Synthetic
uuuccugacauucauuug

SEQ ID NO: 113939 - RNA, 19 nt, Artificial Sequence
  Synthetic
uuuuccugacauucauuug

SEQ ID NO: 113940 - RNA, 20 nt, Artificial Sequence
  Synthetic
cuuuuccugacauucauuug

SEQ ID NO: 113941 - RNA, 21 nt, Artificial Sequence
  Synthetic
ucuuuuccugacauucauuug

SEQ ID NO: 113942 - RNA, 22 nt, Artificial Sequence
  Synthetic
uucuuuuccugacauucauuug

SEQ ID NO: 113943 - RNA, 23 nt, Artificial Sequence
  Synthetic
cuucuuuuccugacauucauuug

SEQ ID NO: 113944 - RNA, 24 nt, Artificial Sequence
  Synthetic
ccuucuuuuccugacauucauuug

SEQ ID NO: 113945 - RNA, 18 nt, Artificial Sequence
  Synthetic
  misc_feature (18)..(18): n is a, c, g, or u
cuuucuguccccaauccn

SEQ ID NO: 113946 - RNA, 19 nt, Artificial Sequence
  Synthetic
  misc_feature (19)..(19): n is a, c, g, or u
ucuuucuguccccaauccn

SEQ ID NO: 113947 - RNA, 20 nt, Artificial Sequence
  Synthetic
  misc_feature (20)..(20): n is a, c, g, or u
aucuuucuguccccaauccn

SEQ ID NO: 113948 - RNA, 21 nt, Artificial Sequence
  Synthetic
  misc_feature (21)..(21): n is a, c, g, or u
aaucuuucuguccccaauccn

SEQ ID NO: 113949 - RNA, 22 nt, Artificial Sequence
  Synthetic
  misc_feature (22)..(22): n is a, c, g, or u
aaaucuuucuguccccaauccn

SEQ ID NO: 113950 - RNA, 23 nt, Artificial Sequence
  Synthetic
  misc_feature (23)..(23): n is a, c, g, or u
caaaucuuucuguccccaauccn

SEQ ID NO: 113951 - RNA, 24 nt, Artificial Sequence
  Synthetic
  misc_feature (24)..(24): n is a, c, g, or u
acaaaucuuucuguccccaauccn

SEQ ID NO: 113952 - RNA, 18 nt, Artificial Sequence
  Synthetic
  misc_feature (18)..(18): n is a, c, g, or u
ucugugccuucucaucun

SEQ ID NO: 113953 - RNA, 19 nt, Artificial Sequence
  Synthetic
  misc_feature (19)..(19): n is a, c, g, or u
gucugugccuucucaucun

SEQ ID NO: 113954 - RNA, 20 nt, Artificial Sequence
  Synthetic
  misc_feature (20)..(20): n is a, c, g, or u
cgucugugccuucucaucun

SEQ ID NO: 113955 - RNA, 21 nt, Artificial Sequence
  Synthetic
  misc_feature (21)..(21): n is a, c, g, or u
ccgucugugccuucucaucun

SEQ ID NO: 113956 - RNA, 22 nt, Artificial Sequence
  Synthetic
  misc_feature (22)..(22): n is a, c, g, or u
cccgucugugccuucucaucun

SEQ ID NO: 113957 - RNA, 23 nt, Artificial Sequence
  Synthetic
  misc_feature (23)..(23): n is a, c, g, or u
ccccgucugugccuucucaucun

SEQ ID NO: 113958 - RNA, 24 nt, Artificial Sequence
  Synthetic
  misc_feature (24)..(24): n is a, c, g, or u
uccccgucugugccuucucaucun

SEQ ID NO: 113959 - RNA, 18 nt, Artificial Sequence
  Synthetic
  misc_feature (18)..(18): n is a, c, g, or u
uauauggaugauguggun

SEQ ID NO: 113960 - RNA, 19 nt, Artificial Sequence
  Synthetic
  misc_feature (19)..(19): n is a, c, g, or u
uuauauggaugauguggun

SEQ ID NO: 113961 - RNA, 20 nt, Artificial Sequence
  Synthetic
  misc_feature (20)..(20): n is a, c, g, or u
guuauauggaugauguggun

SEQ ID NO: 113962 - RNA, 21 nt, Artificial Sequence
  Synthetic
  misc_feature (21)..(21): n is a, c, g, or u
aguuauauggaugauguggun

SEQ ID NO: 113963 - RNA, 22 nt, Artificial Sequence
  Synthetic
  misc_feature (22)..(22): n is a, c, g, or u
caguuauauggaugauguggun

SEQ ID NO: 113964 - RNA, 23 nt, Artificial Sequence
  Synthetic
  misc_feature (23)..(23): n is a, c, g, or u
ucaguuauauggaugauguggun

SEQ ID NO: 113965 - RNA, 24 nt, Artificial Sequence
  Synthetic
  misc_feature (24)..(24): n is a, c, g, or u
uucaguuauauggaugauguggun

SEQ ID NO: 113966 - RNA, 18 nt, Artificial Sequence
  Synthetic
  misc_feature (8)..(8): n is a, c, g, or u
uugacccnuauaaagaau

SEQ ID NO: 113967 - RNA, 19 nt, Artificial Sequence
  Synthetic
  misc_feature (9)..(9): n is a, c, g, or u
auugacccnuauaaagaau

SEQ ID NO: 113968 - RNA, 20 nt, Artificial Sequence
  Synthetic
  misc_feature (10)..(10): n is a, c, g, or u
cauugacccnuauaaagaau

SEQ ID NO: 113969 - RNA, 21 nt, Artificial Sequence
  Synthetic
  misc_feature (11)..(11): n is a, c, g, or u
acauugacccnuauaaagaau

SEQ ID NO: 113970 - RNA, 22 nt, Artificial Sequence
  Synthetic
  misc_feature (12)..(12): n is a, c, g, or u
gacauugacccnuauaaagaau

SEQ ID NO: 113971 - RNA, 23 nt, Artificial Sequence
  Synthetic
  misc_feature (13)..(13): n is a, c, g, or u
ggacauugacccnuauaaagaau

SEQ ID NO: 113972 - RNA, 24 nt, Artificial Sequence
  Synthetic
  misc_feature (14)..(14): n is a, c, g, or u
uggacauugacccnuauaaagaau

SEQ ID NO: 113973 - RNA, 18 nt, Artificial Sequence
  Synthetic
accugggugggaaguaau

SEQ ID NO: 113974 - RNA, 19 nt, Artificial Sequence
  Synthetic
caccugggugggaaguaau

SEQ ID NO: 113975 - RNA, 20 nt, Artificial Sequence
  Synthetic
ccaccugggugggaaguaau

SEQ ID NO: 113976 - RNA, 21 nt, Artificial Sequence
  Synthetic
gccaccugggugggaaguaau

SEQ ID NO: 113977 - RNA, 22 nt, Artificial Sequence
  Synthetic
agccaccugggugggaaguaau

SEQ ID NO: 113978 - RNA, 23 nt, Artificial Sequence
  Synthetic
uagccaccugggugggaaguaau

SEQ ID NO: 113979 - RNA, 24 nt, Artificial Sequence
  Synthetic
cuagccaccugggugggaaguaau

SEQ ID NO: 113980 - RNA, 18 nt, Artificial Sequence
  Synthetic
  misc_feature (12)..(12): n is a, c, g, or u
agcuaugucaanguuaau

SEQ ID NO: 113981 - RNA, 19 nt, Artificial Sequence
  Synthetic
  misc_feature (13)..(13): n is a, c, g, or u
cagcuaugucaanguuaau

SEQ ID NO: 113982 - RNA, 20 nt, Artificial Sequence
  Synthetic
  misc_feature (14)..(14): n is a, c, g, or u
ucagcuaugucaanguuaau

SEQ ID NO: 113983 - RNA, 21 nt, Artificial Sequence
  Synthetic
  misc_feature (15)..(15): n is a, c, g, or u
gucagcuaugucaanguuaau

SEQ ID NO: 113984 - RNA, 22 nt, Artificial Sequence
  Synthetic
  misc_feature (16)..(16): n is a, c, g, or u
agucagcuaugucaanguuaau

SEQ ID NO: 113985 - RNA, 23 nt, Artificial Sequence
  Synthetic
  misc_feature (17)..(17): n is a, c, g, or u
uagucagcuaugucaanguuaau

SEQ ID NO: 113986 - RNA, 24 nt, Artificial Sequence
  Synthetic
  misc_feature (18)..(18): n is a, c, g, or u
guagucagcuaugucaanguuaau

SEQ ID NO: 113987 - RNA, 18 nt, Artificial Sequence
  Synthetic
  misc_feature (8)..(9): n is a, c, g, or u
ggguucannccuccccau

SEQ ID NO: 113988 - RNA, 19 nt, Artificial Sequence
  Synthetic
  misc_feature (9)..(10): n is a, c, g, or u
aggguucannccuccccau

SEQ ID NO: 113989 - RNA, 20 nt, Artificial Sequence
  Synthetic
  misc_feature (10)..(11): n is a, c, g, or u
caggguucannccuccccau

SEQ ID NO: 113990 - RNA, 21 nt, Artificial Sequence
  Synthetic
  misc_feature (11)..(12): n is a, c, g, or u
ccaggguucannccuccccau

SEQ ID NO: 113991 - RNA, 22 nt, Artificial Sequence
  Synthetic
  misc_feature (12)..(13): n is a, c, g, or u
gccaggguucannccuccccau

SEQ ID NO: 113992 - RNA, 23 nt, Artificial Sequence
  Synthetic
  misc_feature (13)..(14): n is a, c, g, or u
ggccaggguucannccuccccau

SEQ ID NO: 113993 - RNA, 24 nt, Artificial Sequence
  Synthetic
  misc_feature (14)..(15): n is a, c, g, or u
gggccaggguucannccuccccau

SEQ ID NO: 113994 - RNA, 18 nt, Artificial Sequence
  Synthetic
  misc_feature (9)..(9): n is a, c, g, or u
gaacaagancuacagcau

SEQ ID NO: 113995 - RNA, 19 nt, Artificial Sequence
  Synthetic
  misc_feature (10)..(10): n is a, c, g, or u
ggaacaagancuacagcau

SEQ ID NO: 113996 - RNA, 20 nt, Artificial Sequence
  Synthetic
  misc_feature (11)..(11): n is a, c, g, or u
gggaacaagancuacagcau

SEQ ID NO: 113997 - RNA, 21 nt, Artificial Sequence
  Synthetic
  misc_feature (12)..(12): n is a, c, g, or u
ugggaacaagancuacagcau

SEQ ID NO: 113998 - RNA, 22 nt, Artificial Sequence
  Synthetic
  misc_feature (13)..(13): n is a, c, g, or u
uugggaacaagancuacagcau

SEQ ID NO: 113999 - RNA, 23 nt, Artificial Sequence
  Synthetic
  misc_feature (14)..(14): n is a, c, g, or u
cuugggaacaagancuacagcau

SEQ ID NO: 114000 - RNA, 24 nt, Artificial Sequence
  Synthetic
  misc_feature (15)..(15): n is a, c, g, or u
ucuugggaacaagancuacagcau

SEQ ID NO: 114001 - RNA, 18 nt, Artificial Sequence
  Synthetic
aggugggagugggagcau

SEQ ID NO: 114002 - RNA, 19 nt, Artificial Sequence
  Synthetic
aaggugggagugggagcau

SEQ ID NO: 114003 - RNA, 20 nt, Artificial Sequence
  Synthetic
caaggugggagugggagcau

SEQ ID NO: 114004 - RNA, 21 nt, Artificial Sequence
  Synthetic
acaaggugggagugggagcau

SEQ ID NO: 114005 - RNA, 22 nt, Artificial Sequence
  Synthetic
aacaaggugggagugggagcau

SEQ ID NO: 114006 - RNA, 23 nt, Artificial Sequence
  Synthetic
caacaaggugggagugggagcau

SEQ ID NO: 114007 - RNA, 24 nt, Artificial Sequence
  Synthetic
ccaacaaggugggagugggagcau

SEQ ID NO: 114008 - RNA, 18 nt, Artificial Sequence
  Synthetic
acauggagaacaucgcau

SEQ ID NO: 114009 - RNA, 19 nt, Artificial Sequence
  Synthetic
aacauggagaacaucgcau

SEQ ID NO: 114010 - RNA, 20 nt, Artificial Sequence
  Synthetic
gaacauggagaacaucgcau

SEQ ID NO: 114011 - RNA, 21 nt, Artificial Sequence
  Synthetic
cgaacauggagaacaucgcau

SEQ ID NO: 114012 - RNA, 22 nt, Artificial Sequence
  Synthetic
ccgaacauggagaacaucgcau

SEQ ID NO: 114013 - RNA, 23 nt, Artificial Sequence
  Synthetic
accgaacauggagaacaucgcau

SEQ ID NO: 114014 - RNA, 24 nt, Artificial Sequence
  Synthetic
uaccgaacauggagaacaucgcau

SEQ ID NO: 114015 - RNA, 18 nt, Artificial Sequence
  Synthetic
caaaccucgaaaaggcau

SEQ ID NO: 114016 - RNA, 19 nt, Artificial Sequence
  Synthetic
ccaaaccucgaaaaggcau

SEQ ID NO: 114017 - RNA, 20 nt, Artificial Sequence
  Synthetic
uccaaaccucgaaaaggcau

SEQ ID NO: 114018 - RNA, 21 nt, Artificial Sequence
  Synthetic
uuccaaaccucgaaaaggcau

SEQ ID NO: 114019 - RNA, 22 nt, Artificial Sequence
  Synthetic
cuuccaaaccucgaaaaggcau

SEQ ID NO: 114020 - RNA, 23 nt, Artificial Sequence
  Synthetic
ucuuccaaaccucgaaaaggcau

SEQ ID NO: 114021 - RNA, 24 nt, Artificial Sequence
  Synthetic
gucuuccaaaccucgaaaaggcau

SEQ ID NO: 114022 - RNA, 18 nt, Artificial Sequence
  Synthetic
cugcccaaggucuugcau

SEQ ID NO: 114023 - RNA, 19 nt, Artificial Sequence
  Synthetic
ccugcccaaggucuugcau

SEQ ID NO: 114024 - RNA, 20 nt, Artificial Sequence
  Synthetic
accugcccaaggucuugcau

SEQ ID NO: 114025 - RNA, 21 nt, Artificial Sequence
  Synthetic
aaccugcccaaggucuugcau

SEQ ID NO: 114026 - RNA, 22 nt, Artificial Sequence
  Synthetic
gaaccugcccaaggucuugcau

SEQ ID NO: 114027 - RNA, 23 nt, Artificial Sequence
  Synthetic
ggaaccugcccaaggucuugcau

SEQ ID NO: 114028 - RNA, 24 nt, Artificial Sequence
  Synthetic
  misc_feature (1)..(1): n is a, c, g, or u
nggaaccugcccaaggucuugcau

SEQ ID NO: 114029 - RNA, 18 nt, Artificial Sequence
  Synthetic
  misc_feature (7)..(7): n is a, c, g, or u
  misc_feature (10)..(10): n is a, c, g, or u
gucuggngcnaaacucau

SEQ ID NO: 114030 - RNA, 19 nt, Artificial Sequence
  Synthetic
  misc_feature (8)..(8): n is a, c, g, or u
  misc_feature (11)..(11): n is a, c, g, or u
ggucuggngcnaaacucau

SEQ ID NO: 114031 - RNA, 20 nt, Artificial Sequence
  Synthetic
  misc_feature (1)..(1): n is a, c, g, or u
  misc_feature (9)..(9): n is a, c, g, or u
  misc_feature (12)..(12): n is a, c, g, or u
nggucuggngcnaaacucau

SEQ ID NO: 114032 - RNA, 21 nt, Artificial Sequence
  Synthetic
  misc_feature (2)..(2): n is a, c, g, or u
  misc_feature (10)..(10): n is a, c, g, or u
  misc_feature (13)..(13): n is a, c, g, or u
cnggucuggngcnaaacucau

SEQ ID NO: 114033 - RNA, 22 nt, Artificial Sequence
  Synthetic
  misc_feature (3)..(3): n is a, c, g, or u
  misc_feature (11)..(11): n is a, c, g, or u
  misc_feature (14)..(14): n is a, c, g, or u
gcnggucuggngcnaaacucau

SEQ ID NO: 114034 - RNA, 23 nt, Artificial Sequence
  Synthetic
  misc_feature (4)..(4): n is a, c, g, or u
  misc_feature (12)..(12): n is a, c, g, or u
  misc_feature (15)..(15): n is a, c, g, or u
agcnggucuggngcnaaacucau

SEQ ID NO: 114035 - RNA, 24 nt, Artificial Sequence
  Synthetic
  misc_feature (5)..(5): n is a, c, g, or u
  misc_feature (13)..(13): n is a, c, g, or u
  misc_feature (16)..(16): n is a, c, g, or u
cagcnggucuggngcnaaacucau

SEQ ID NO: 114036 - RNA, 18 nt, Artificial Sequence
  Synthetic
aacucagaaaauccagau

SEQ ID NO: 114037 - RNA, 19 nt, Artificial Sequence
  Synthetic
caacucagaaaauccagau

SEQ ID NO: 114038 - RNA, 20 nt, Artificial Sequence
  Synthetic
ccaacucagaaaauccagau

SEQ ID NO: 114039 - RNA, 21 nt, Artificial Sequence
  Synthetic
gccaacucagaaaauccagau

SEQ ID NO: 114040 - RNA, 22 nt, Artificial Sequence
  Synthetic
agccaacucagaaaauccagau

SEQ ID NO: 114041 - RNA, 23 nt, Artificial Sequence
  Synthetic
aagccaacucagaaaauccagau

SEQ ID NO: 114042 - RNA, 24 nt, Artificial Sequence
  Synthetic
aaagccaacucagaaaauccagau

SEQ ID NO: 114043 - RNA, 18 nt, Artificial Sequence
  Synthetic
  misc_feature (9)..(9): n is a, c, g, or u
guaaacagnccuauugau

SEQ ID NO: 114044 - RNA, 19 nt, Artificial Sequence
  Synthetic
  misc_feature (10)..(10): n is a, c, g, or u
uguaaacagnccuauugau

SEQ ID NO: 114045 - RNA, 20 nt, Artificial Sequence
  Synthetic
  misc_feature (11)..(11): n is a, c, g, or u
cuguaaacagnccuauugau

SEQ ID NO: 114046 - RNA, 21 nt, Artificial Sequence
  Synthetic
  misc_feature (12)..(12): n is a, c, g, or u
ccuguaaacagnccuauugau

SEQ ID NO: 114047 - RNA, 22 nt, Artificial Sequence
  Synthetic
  misc_feature (13)..(13): n is a, c, g, or u
uccuguaaacagnccuauugau

SEQ ID NO: 114048 - RNA, 23 nt, Artificial Sequence
  Synthetic
  misc_feature (14)..(14): n is a, c, g, or u
uuccuguaaacagnccuauugau

SEQ ID NO: 114049 - RNA, 24 nt, Artificial Sequence
  Synthetic
  misc_feature (15)..(15): n is a, c, g, or u
cuuccuguaaacagnccuauugau

SEQ ID NO: 114050 - RNA, 18 nt, Artificial Sequence
  Synthetic
accgccucugcucuguau

SEQ ID NO: 114051 - RNA, 19 nt, Artificial Sequence
  Synthetic
caccgccucugcucuguau

SEQ ID NO: 114052 - RNA, 20 nt, Artificial Sequence
  Synthetic
acaccgccucugcucuguau

SEQ ID NO: 114053 - RNA, 21 nt, Artificial Sequence
  Synthetic
gacaccgccucugcucuguau

SEQ ID NO: 114054 - RNA, 22 nt, Artificial Sequence
  Synthetic
cgacaccgccucugcucuguau

SEQ ID NO: 114055 - RNA, 23 nt, Artificial Sequence
  Synthetic
ucgacaccgccucugcucuguau

SEQ ID NO: 114056 - RNA, 24 nt, Artificial Sequence
  Synthetic
cucgacaccgccucugcucuguau

SEQ ID NO: 114057 - RNA, 18 nt, Artificial Sequence
  Synthetic
  misc_feature (9)..(9): n is a, c, g, or u
  misc_feature (15)..(15): n is a, c, g, or u
uuucuaagnaaacanuau

SEQ ID NO: 114058 - RNA, 19 nt, Artificial Sequence
  Synthetic
  misc_feature (10)..(10): n is a, c, g, or u
  misc_feature (16)..(16): n is a, c, g, or u
cuuucuaagnaaacanuau

SEQ ID NO: 114059 - RNA, 20 nt, Artificial Sequence
  Synthetic
  misc_feature (11)..(11): n is a, c, g, or u
  misc_feature (17)..(17): n is a, c, g, or u
ccuuucuaagnaaacanuau

SEQ ID NO: 114060 - RNA, 21 nt, Artificial Sequence
  Synthetic
  misc_feature (12)..(12): n is a, c, g, or u
  misc_feature (18)..(18): n is a, c, g, or u
gccuuucuaagnaaacanuau

SEQ ID NO: 114061 - RNA, 22 nt, Artificial Sequence
  Synthetic
  misc_feature (13)..(13): n is a, c, g, or u
  misc_feature (19)..(19): n is a, c, g, or u
ggccuuucuaagnaaacanuau

SEQ ID NO: 114062 - RNA, 23 nt, Artificial Sequence
  Synthetic
  misc_feature (14)..(14): n is a, c, g, or u
  misc_feature (20)..(20): n is a, c, g, or u
aggccuuucuaagnaaacanuau

SEQ ID NO: 114063 - RNA, 24 nt, Artificial Sequence
  Synthetic
  misc_feature (15)..(15): n is a, c, g, or u
  misc_feature (21)..(21): n is a, c, g, or u
aaggccuuucuaagnaaacanuau

SEQ ID NO: 114064 - RNA, 18 nt, Artificial Sequence
  Synthetic
cugcauucaaagccaacu

SEQ ID NO: 114065 - RNA, 19 nt, Artificial Sequence
  Synthetic
ccugcauucaaagccaacu

SEQ ID NO: 114066 - RNA, 20 nt, Artificial Sequence
  Synthetic
cccugcauucaaagccaacu

SEQ ID NO: 114067 - RNA, 21 nt, Artificial Sequence
  Synthetic
acccugcauucaaagccaacu

SEQ ID NO: 114068 - RNA, 22 nt, Artificial Sequence
  Synthetic
gacccugcauucaaagccaacu

SEQ ID NO: 114069 - RNA, 23 nt, Artificial Sequence
  Synthetic
ggacccugcauucaaagccaacu

SEQ ID NO: 114070 - RNA, 24 nt, Artificial Sequence
  Synthetic
uggacccugcauucaaagccaacu

SEQ ID NO: 114071 - RNA, 18 nt, Artificial Sequence
  Synthetic
ucaaucuuaucgaagacu

SEQ ID NO: 114072 - RNA, 19 nt, Artificial Sequence
  Synthetic
gucaaucuuaucgaagacu

SEQ ID NO: 114073 - RNA, 20 nt, Artificial Sequence
  Synthetic
cgucaaucuuaucgaagacu

SEQ ID NO: 114074 - RNA, 21 nt, Artificial Sequence
  Synthetic
ucgucaaucuuaucgaagacu

SEQ ID NO: 114075 - RNA, 22 nt, Artificial Sequence
  Synthetic
aucgucaaucuuaucgaagacu

SEQ ID NO: 114076 - RNA, 23 nt, Artificial Sequence
  Synthetic
uaucgucaaucuuaucgaagacu

SEQ ID NO: 114077 - RNA, 24 nt, Artificial Sequence
  Synthetic
auaucgucaaucuuaucgaagacu

SEQ ID NO: 114078 - RNA, 18 nt, Artificial Sequence
  Synthetic
ccucugccgauccauacu

SEQ ID NO: 114079 - RNA, 19 nt, Artificial Sequence
  Synthetic
uccucugccgauccauacu

SEQ ID NO: 114080 - RNA, 20 nt, Artificial Sequence
  Synthetic
cuccucugccgauccauacu

SEQ ID NO: 114081 - RNA, 21 nt, Artificial Sequence
  Synthetic
ucuccucugccgauccauacu

SEQ ID NO: 114082 - RNA, 22 nt, Artificial Sequence
  Synthetic
gucuccucugccgauccauacu

SEQ ID NO: 114083 - RNA, 23 nt, Artificial Sequence
  Synthetic
ugucuccucugccgauccauacu

SEQ ID NO: 114084 - RNA, 24 nt, Artificial Sequence
  Synthetic
gugucuccucugccgauccauacu

SEQ ID NO: 114085 - RNA, 18 nt, Artificial Sequence
  Synthetic
  misc_feature (6)..(6): n is a, c, g, or u
  misc_feature (8)..(8): n is a, c, g, or u
guuaangnucuuuguacu

SEQ ID NO: 114086 - RNA, 19 nt, Artificial Sequence
  Synthetic
  misc_feature (7)..(7): n is a, c, g, or u
  misc_feature (9)..(9): n is a, c, g, or u
gguuaangnucuuuguacu

SEQ ID NO: 114087 - RNA, 20 nt, Artificial Sequence
  Synthetic
  misc_feature (8)..(8): n is a, c, g, or u
  misc_feature (10)..(10): n is a, c, g, or u
agguuaangnucuuuguacu

SEQ ID NO: 114088 - RNA, 21 nt, Artificial Sequence
  Synthetic
  misc_feature (9)..(9): n is a, c, g, or u
  misc_feature (11)..(11): n is a, c, g, or u
uagguuaangnucuuuguacu

SEQ ID NO: 114089 - RNA, 22 nt, Artificial Sequence
  Synthetic
  misc_feature (10)..(10): n is a, c, g, or u
  misc_feature (12)..(12): n is a, c, g, or u
uuagguuaangnucuuuguacu

SEQ ID NO: 114090 - RNA, 23 nt, Artificial Sequence
  Synthetic
  misc_feature (1)..(1): n is a, c, g, or u
  misc_feature (11)..(11): n is a, c, g, or u
  misc_feature (13)..(13): n is a, c, g, or u
nuuagguuaangnucuuuguacu

SEQ ID NO: 114091 - RNA, 24 nt, Artificial Sequence
  Synthetic
  misc_feature (2)..(2): n is a, c, g, or u
  misc_feature (12)..(12): n is a, c, g, or u
  misc_feature (14)..(14): n is a, c, g, or u
gnuuagguuaangnucuuuguacu

SEQ ID NO: 114092 - RNA, 18 nt, Artificial Sequence
  Synthetic
uguugcuguacaaaaccu

SEQ ID NO: 114093 - RNA, 19 nt, Artificial Sequence
  Synthetic
auguugcuguacaaaaccu

SEQ ID NO: 114094 - RNA, 20 nt, Artificial Sequence
  Synthetic
cauguugcuguacaaaaccu

SEQ ID NO: 114095 - RNA, 21 nt, Artificial Sequence
  Synthetic
ucauguugcuguacaaaaccu

SEQ ID NO: 114096 - RNA, 22 nt, Artificial Sequence
  Synthetic
cucauguugcuguacaaaaccu

SEQ ID NO: 114097 - RNA, 23 nt, Artificial Sequence
  Synthetic
ccucauguugcuguacaaaaccu

SEQ ID NO: 114098 - RNA, 24 nt, Artificial Sequence
  Synthetic
cccucauguugcuguacaaaaccu

SEQ ID NO: 114099 - RNA, 18 nt, Artificial Sequence
  Synthetic
ggcuuucgcaaaauaccu

SEQ ID NO: 114100 - RNA, 19 nt, Artificial Sequence
  Synthetic
gggcuuucgcaaaauaccu

SEQ ID NO: 114101 - RNA, 20 nt, Artificial Sequence
  Synthetic
ugggcuuucgcaaaauaccu

SEQ ID NO: 114102 - RNA, 21 nt, Artificial Sequence
  Synthetic
uugggcuuucgcaaaauaccu

SEQ ID NO: 114103 - RNA, 22 nt, Artificial Sequence
  Synthetic
cuugggcuuucgcaaaauaccu

SEQ ID NO: 114104 - RNA, 23 nt, Artificial Sequence
  Synthetic
ucuugggcuuucgcaaaauaccu

SEQ ID NO: 114105 - RNA, 24 nt, Artificial Sequence
  Synthetic
aucuugggcuuucgcaaaauaccu

SEQ ID NO: 114106 - RNA, 18 nt, Artificial Sequence
  Synthetic
accccucccggggccgcu

SEQ ID NO: 114107 - RNA, 19 nt, Artificial Sequence
  Synthetic
gaccccucccggggccgcu

SEQ ID NO: 114108 - RNA, 20 nt, Artificial Sequence
  Synthetic
cgaccccucccggggccgcu

SEQ ID NO: 114109 - RNA, 21 nt, Artificial Sequence
  Synthetic
acgaccccucccggggccgcu

SEQ ID NO: 114110 - RNA, 22 nt, Artificial Sequence
  Synthetic
gacgaccccucccggggccgcu

SEQ ID NO: 114111 - RNA, 23 nt, Artificial Sequence
  Synthetic
ggacgaccccucccggggccgcu

SEQ ID NO: 114112 - RNA, 24 nt, Artificial Sequence
  Synthetic
cggacgaccccucccggggccgcu

SEQ ID NO: 114113 - RNA, 18 nt, Artificial Sequence
  Synthetic
ggguggagcccucaggcu

SEQ ID NO: 114114 - RNA, 19 nt, Artificial Sequence
  Synthetic
gggguggagcccucaggcu

SEQ ID NO: 114115 - RNA, 20 nt, Artificial Sequence
  Synthetic
ugggguggagcccucaggcu

SEQ ID NO: 114116 - RNA, 21 nt, Artificial Sequence
  Synthetic
uugggguggagcccucaggcu

SEQ ID NO: 114117 - RNA, 22 nt, Artificial Sequence
  Synthetic
guugggguggagcccucaggcu

SEQ ID NO: 114118 - RNA, 23 nt, Artificial Sequence
  Synthetic
uguugggguggagcccucaggcu

SEQ ID NO: 114119 - RNA, 24 nt, Artificial Sequence
  Synthetic
cuguugggguggagcccucaggcu

SEQ ID NO: 114120 - RNA, 18 nt, Artificial Sequence
  Synthetic
cgcagaagaucucaaucu

SEQ ID NO: 114121 - RNA, 19 nt, Artificial Sequence
  Synthetic
ucgcagaagaucucaaucu

SEQ ID NO: 114122 - RNA, 20 nt, Artificial Sequence
  Synthetic
gucgcagaagaucucaaucu

SEQ ID NO: 114123 - RNA, 21 nt, Artificial Sequence
  Synthetic
cgucgcagaagaucucaaucu

SEQ ID NO: 114124 - RNA, 22 nt, Artificial Sequence
  Synthetic
gcgucgcagaagaucucaaucu

SEQ ID NO: 114125 - RNA, 23 nt, Artificial Sequence
  Synthetic
cgcgucgcagaagaucucaaucu

SEQ ID NO: 114126 - RNA, 24 nt, Artificial Sequence
  Synthetic
ccgcgucgcagaagaucucaaucu

SEQ ID NO: 114127 - RNA, 18 nt, Artificial Sequence
  Synthetic
  misc_feature (13)..(13): n is a, c, g, or u
acauuauuuacanacucu

SEQ ID NO: 114128 - RNA, 19 nt, Artificial Sequence
  Synthetic
  misc_feature (14)..(14): n is a, c, g, or u
gacauuauuuacanacucu

SEQ ID NO: 114129 - RNA, 20 nt, Artificial Sequence
  Synthetic
  misc_feature (1)..(1): n is a, c, g, or u
  misc_feature (15)..(15): n is a, c, g, or u
ngacauuauuuacanacucu

SEQ ID NO: 114130 - RNA, 21 nt, Artificial Sequence
  Synthetic
  misc_feature (1)..(2): n is a, c, g, or u
  misc_feature (16)..(16): n is a, c, g, or u
nngacauuauuuacanacucu

SEQ ID NO: 114131 - RNA, 22 nt, Artificial Sequence
  Synthetic
  misc_feature (2)..(3): n is a, c, g, or u
  misc_feature (17)..(17): n is a, c, g, or u
cnngacauuauuuacanacucu

SEQ ID NO: 114132 - RNA, 23 nt, Artificial Sequence
  Synthetic
  misc_feature (3)..(4): n is a, c, g, or u
  misc_feature (18)..(18): n is a, c, g, or u
acnngacauuauuuacanacucu

SEQ ID NO: 114133 - RNA, 24 nt, Artificial Sequence
  Synthetic
  misc_feature (4)..(5): n is a, c, g, or u
  misc_feature (19)..(19): n is a, c, g, or u
gacnngacauuauuuacanacucu

SEQ ID NO: 114134 - RNA, 18 nt, Artificial Sequence
  Synthetic
cgggaggccuuagagucu

SEQ ID NO: 114135 - RNA, 19 nt, Artificial Sequence
  Synthetic
ucgggaggccuuagagucu

SEQ ID NO: 114136 - RNA, 20 nt, Artificial Sequence
  Synthetic
aucgggaggccuuagagucu

SEQ ID NO: 114137 - RNA, 21 nt, Artificial Sequence
  Synthetic
uaucgggaggccuuagagucu

SEQ ID NO: 114138 - RNA, 22 nt, Artificial Sequence
  Synthetic
guaucgggaggccuuagagucu

SEQ ID NO: 114139 - RNA, 23 nt, Artificial Sequence
  Synthetic
uguaucgggaggccuuagagucu

SEQ ID NO: 114140 - RNA, 24 nt, Artificial Sequence
  Synthetic
cuguaucgggaggccuuagagucu

SEQ ID NO: 114141 - RNA, 18 nt, Artificial Sequence
  Synthetic
ugcgggucaccauauucu

SEQ ID NO: 114142 - RNA, 19 nt, Artificial Sequence
  Synthetic
uugcgggucaccauauucu

SEQ ID NO: 114143 - RNA, 20 nt, Artificial Sequence
  Synthetic
uuugcgggucaccauauucu

SEQ ID NO: 114144 - RNA, 21 nt, Artificial Sequence
  Synthetic
uuuugcgggucaccauauucu

SEQ ID NO: 114145 - RNA, 22 nt, Artificial Sequence
  Synthetic
auuuugcgggucaccauauucu

SEQ ID NO: 114146 - RNA, 23 nt, Artificial Sequence
  Synthetic
cauuuugcgggucaccauauucu

SEQ ID NO: 114147 - RNA, 24 nt, Artificial Sequence
  Synthetic
ucauuuugcgggucaccauauucu

SEQ ID NO: 114148 - RNA, 18 nt, Artificial Sequence
  Synthetic
aaagaauuuggagcuucu

SEQ ID NO: 114149 - RNA, 19 nt, Artificial Sequence
  Synthetic
uaaagaauuuggagcuucu

SEQ ID NO: 114150 - RNA, 20 nt, Artificial Sequence
  Synthetic
auaaagaauuuggagcuucu

SEQ ID NO: 114151 - RNA, 21 nt, Artificial Sequence
  Synthetic
uauaaagaauuuggagcuucu

SEQ ID NO: 114152 - RNA, 22 nt, Artificial Sequence
  Synthetic
  misc_feature (1)..(1): n is a, c, g, or u
nuauaaagaauuuggagcuucu

SEQ ID NO: 114153 - RNA, 23 nt, Artificial Sequence
  Synthetic
  misc_feature (2)..(2): n is a, c, g, or u
cnuauaaagaauuuggagcuucu

SEQ ID NO: 114154 - RNA, 24 nt, Artificial Sequence
  Synthetic
  misc_feature (3)..(3): n is a, c, g, or u
ccnuauaaagaauuuggagcuucu

SEQ ID NO: 114155 - RNA, 18 nt, Artificial Sequence
  Synthetic
gacuucucucaauuuucu

SEQ ID NO: 114156 - RNA, 19 nt, Artificial Sequence
  Synthetic
ggacuucucucaauuuucu

SEQ ID NO: 114157 - RNA, 20 nt, Artificial Sequence
  Synthetic
uggacuucucucaauuuucu

SEQ ID NO: 114158 - RNA, 21 nt, Artificial Sequence
  Synthetic
guggacuucucucaauuuucu

SEQ ID NO: 114159 - RNA, 22 nt, Artificial Sequence
  Synthetic
gguggacuucucucaauuuucu

SEQ ID NO: 114160 - RNA, 23 nt, Artificial Sequence
  Synthetic
ugguggacuucucucaauuuucu

SEQ ID NO: 114161 - RNA, 24 nt, Artificial Sequence
  Synthetic
gugguggacuucucucaauuuucu

SEQ ID NO: 114162 - RNA, 18 nt, Artificial Sequence
  Synthetic
ccuccaccaaucggcagu

SEQ ID NO: 114163 - RNA, 19 nt, Artificial Sequence
  Synthetic
gccuccaccaaucggcagu

SEQ ID NO: 114164 - RNA, 20 nt, Artificial Sequence
  Synthetic
ugccuccaccaaucggcagu

SEQ ID NO: 114165 - RNA, 21 nt, Artificial Sequence
  Synthetic
cugccuccaccaaucggcagu

SEQ ID NO: 114166 - RNA, 22 nt, Artificial Sequence
  Synthetic
ccugccuccaccaaucggcagu

SEQ ID NO: 114167 - RNA, 23 nt, Artificial Sequence
  Synthetic
uccugccuccaccaaucggcagu

SEQ ID NO: 114168 - RNA, 24 nt, Artificial Sequence
  Synthetic
cuccugccuccaccaaucggcagu

SEQ ID NO: 114169 - RNA, 18 nt, Artificial Sequence
  Synthetic
ucuucaagaucccagagu

SEQ ID NO: 114170 - RNA, 19 nt, Artificial Sequence
  Synthetic
cucuucaagaucccagagu

SEQ ID NO: 114171 - RNA, 20 nt, Artificial Sequence
  Synthetic
acucuucaagaucccagagu

SEQ ID NO: 114172 - RNA, 21 nt, Artificial Sequence
  Synthetic
aacucuucaagaucccagagu

SEQ ID NO: 114173 - RNA, 22 nt, Artificial Sequence
  Synthetic
aaacucuucaagaucccagagu

SEQ ID NO: 114174 - RNA, 23 nt, Artificial Sequence
  Synthetic
caaacucuucaagaucccagagu

SEQ ID NO: 114175 - RNA, 24 nt, Artificial Sequence
  Synthetic
ccaaacucuucaagaucccagagu

SEQ ID NO: 114176 - RNA, 18 nt, Artificial Sequence
  Synthetic
  misc_feature (4)..(4): n is a, c, g, or u
uuanugagugggaggagu

SEQ ID NO: 114177 - RNA, 19 nt, Artificial Sequence
  Synthetic
  misc_feature (5)..(5): n is a, c, g, or u
uuuanugagugggaggagu

SEQ ID NO: 114178 - RNA, 20 nt, Artificial Sequence
  Synthetic
  misc_feature (6)..(6): n is a, c, g, or u
guuuanugagugggaggagu

SEQ ID NO: 114179 - RNA, 21 nt, Artificial Sequence
  Synthetic
  misc_feature (7)..(7): n is a, c, g, or u
uguuuanugagugggaggagu

SEQ ID NO: 114180 - RNA, 22 nt, Artificial Sequence
  Synthetic
  misc_feature (8)..(8): n is a, c, g, or u
guguuuanugagugggaggagu

SEQ ID NO: 114181 - RNA, 23 nt, Artificial Sequence
  Synthetic
  misc_feature (9)..(9): n is a, c, g, or u
uguguuuanugagugggaggagu

SEQ ID NO: 114182 - RNA, 24 nt, Artificial Sequence
  Synthetic
  misc_feature (10)..(10): n is a, c, g, or u
guguguuuanugagugggaggagu

SEQ ID NO: 114183 - RNA, 18 nt, Artificial Sequence
  Synthetic
cgccaacaaggugggagu

SEQ ID NO: 114184 - RNA, 19 nt, Artificial Sequence
  Synthetic
acgccaacaaggugggagu

SEQ ID NO: 114185 - RNA, 20 nt, Artificial Sequence
  Synthetic
gacgccaacaaggugggagu

SEQ ID NO: 114186 - RNA, 21 nt, Artificial Sequence
  Synthetic
ggacgccaacaaggugggagu

SEQ ID NO: 114187 - RNA, 22 nt, Artificial Sequence
  Synthetic
cggacgccaacaaggugggagu

SEQ ID NO: 114188 - RNA, 23 nt, Artificial Sequence
  Synthetic
ccggacgccaacaaggugggagu

SEQ ID NO: 114189 - RNA, 24 nt, Artificial Sequence
  Synthetic
gccggacgccaacaaggugggagu

SEQ ID NO: 114190 - RNA, 18 nt, Artificial Sequence
  Synthetic
  misc_feature (13)..(13): n is a, c, g, or u
acuguguguuuanugagu

SEQ ID NO: 114191 - RNA, 19 nt, Artificial Sequence
  Synthetic
  misc_feature (14)..(14): n is a, c, g, or u
gacuguguguuuanugagu

SEQ ID NO: 114192 - RNA, 20 nt, Artificial Sequence
  Synthetic
  misc_feature (15)..(15): n is a, c, g, or u
agacuguguguuuanugagu

SEQ ID NO: 114193 - RNA, 21 nt, Artificial Sequence
  Synthetic
  misc_feature (16)..(16): n is a, c, g, or u
aagacuguguguuuanugagu

SEQ ID NO: 114194 - RNA, 22 nt, Artificial Sequence
  Synthetic
  misc_feature (17)..(17): n is a, c, g, or u
aaagacuguguguuuanugagu

SEQ ID NO: 114195 - RNA, 23 nt, Artificial Sequence
  Synthetic
  misc_feature (18)..(18): n is a, c, g, or u
caaagacuguguguuuanugagu

SEQ ID NO: 114196 - RNA, 24 nt, Artificial Sequence
  Synthetic
  misc_feature (19)..(19): n is a, c, g, or u
ucaaagacuguguguuuanugagu

SEQ ID NO: 114197 - RNA, 18 nt, Artificial Sequence
  Synthetic
  misc_feature (10)..(10): n is a, c, g, or u
uccuuggacncauaaggu

SEQ ID NO: 114198 - RNA, 19 nt, Artificial Sequence
  Synthetic
  misc_feature (11)..(11): n is a, c, g, or u
uuccuuggacncauaaggu

SEQ ID NO: 114199 - RNA, 20 nt, Artificial Sequence
  Synthetic
  misc_feature (12)..(12): n is a, c, g, or u
auuccuuggacncauaaggu

SEQ ID NO: 114200 - RNA, 21 nt, Artificial Sequence
  Synthetic
  misc_feature (13)..(13): n is a, c, g, or u
uauuccuuggacncauaaggu

SEQ ID NO: 114201 - RNA, 22 nt, Artificial Sequence
  Synthetic
  misc_feature (14)..(14): n is a, c, g, or u
guauuccuuggacncauaaggu

SEQ ID NO: 114202 - RNA, 23 nt, Artificial Sequence
  Synthetic
  misc_feature (15)..(15): n is a, c, g, or u
aguauuccuuggacncauaaggu

SEQ ID NO: 114203 - RNA, 24 nt, Artificial Sequence
  Synthetic
  misc_feature (16)..(16): n is a, c, g, or u
uaguauuccuuggacncauaaggu

SEQ ID NO: 114204 - RNA, 18 nt, Artificial Sequence
  Synthetic
gaaucuagccaccugggu

SEQ ID NO: 114205 - RNA, 19 nt, Artificial Sequence
  Synthetic
ugaaucuagccaccugggu

SEQ ID NO: 114206 - RNA, 20 nt, Artificial Sequence
  Synthetic
augaaucuagccaccugggu

SEQ ID NO: 114207 - RNA, 21 nt, Artificial Sequence
  Synthetic
  misc_feature (1)..(1): n is a, c, g, or u
naugaaucuagccaccugggu

SEQ ID NO: 114208 - RNA, 22 nt, Artificial Sequence
  Synthetic
  misc_feature (2)..(2): n is a, c, g, or u
unaugaaucuagccaccugggu

SEQ ID NO: 114209 - RNA, 23 nt, Artificial Sequence
  Synthetic
  misc_feature (3)..(3): n is a, c, g, or u
uunaugaaucuagccaccugggu

SEQ ID NO: 114210 - RNA, 24 nt, Artificial Sequence
  Synthetic
  misc_feature (4)..(4): n is a, c, g, or u
guunaugaaucuagccaccugggu

SEQ ID NO: 114211 - RNA, 18 nt, Artificial Sequence
  Synthetic
gacgcaacccccacuggu

SEQ ID NO: 114212 - RNA, 19 nt, Artificial Sequence
  Synthetic
ugacgcaacccccacuggu

SEQ ID NO: 114213 - RNA, 20 nt, Artificial Sequence
  Synthetic
cugacgcaacccccacuggu

SEQ ID NO: 114214 - RNA, 21 nt, Artificial Sequence
  Synthetic
gcugacgcaacccccacuggu

SEQ ID NO: 114215 - RNA, 22 nt, Artificial Sequence
  Synthetic
ugcugacgcaacccccacuggu

SEQ ID NO: 114216 - RNA, 23 nt, Artificial Sequence
  Synthetic
uugcugacgcaacccccacuggu

SEQ ID NO: 114217 - RNA, 24 nt, Artificial Sequence
  Synthetic
uuugcugacgcaacccccacuggu

SEQ ID NO: 114218 - RNA, 18 nt, Artificial Sequence
  Synthetic
  misc_feature (15)..(16): n is a, c, g, or u
ggauauguaauuggnngu

SEQ ID NO: 114219 - RNA, 19 nt, Artificial Sequence
  Synthetic
  misc_feature (16)..(17): n is a, c, g, or u
gggauauguaauuggnngu

SEQ ID NO: 114220 - RNA, 20 nt, Artificial Sequence
  Synthetic
  misc_feature (17)..(18): n is a, c, g, or u
ugggauauguaauuggnngu

SEQ ID NO: 114221 - RNA, 21 nt, Artificial Sequence
  Synthetic
  misc_feature (18)..(19): n is a, c, g, or u
augggauauguaauuggnngu

SEQ ID NO: 114222 - RNA, 22 nt, Artificial Sequence
  Synthetic
  misc_feature (19)..(20): n is a, c, g, or u
caugggauauguaauuggnngu

SEQ ID NO: 114223 - RNA, 23 nt, Artificial Sequence
  Synthetic
  misc_feature (20)..(21): n is a, c, g, or u
ucaugggauauguaauuggnngu

SEQ ID NO: 114224 - RNA, 24 nt, Artificial Sequence
  Synthetic
  misc_feature (21)..(22): n is a, c, g, or u
uucaugggauauguaauuggnngu

SEQ ID NO: 114225 - RNA, 18 nt, Artificial Sequence
  Synthetic
  misc_feature (17)..(17): n is a, c, g, or u
ugacuucuuuccuucunu

SEQ ID NO: 114226 - RNA, 19 nt, Artificial Sequence
  Synthetic
  misc_feature (18)..(18): n is a, c, g, or u
cugacuucuuuccuucunu

SEQ ID NO: 114227 - RNA, 20 nt, Artificial Sequence
  Synthetic
  misc_feature (19)..(19): n is a, c, g, or u
ucugacuucuuuccuucunu

SEQ ID NO: 114228 - RNA, 21 nt, Artificial Sequence
  Synthetic
  misc_feature (20)..(20): n is a, c, g, or u
uucugacuucuuuccuucunu

SEQ ID NO: 114229 - RNA, 22 nt, Artificial Sequence
  Synthetic
  misc_feature (21)..(21): n is a, c, g, or u
cuucugacuucuuuccuucunu

SEQ ID NO: 114230 - RNA, 23 nt, Artificial Sequence
  Synthetic
  misc_feature (22)..(22): n is a, c, g, or u
ccuucugacuucuuuccuucunu

SEQ ID NO: 114231 - RNA, 24 nt, Artificial Sequence
  Synthetic
  misc_feature (23)..(23): n is a, c, g, or u
gccuucugacuucuuuccuucunu

SEQ ID NO: 114232 - RNA, 18 nt, Artificial Sequence
  Synthetic
  misc_feature (17)..(17): n is a, c, g, or u
auauggaugauguggunu

SEQ ID NO: 114233 - RNA, 19 nt, Artificial Sequence
  Synthetic
  misc_feature (18)..(18): n is a, c, g, or u
uauauggaugauguggunu

SEQ ID NO: 114234 - RNA, 20 nt, Artificial Sequence
  Synthetic
  misc_feature (19)..(19): n is a, c, g, or u
uuauauggaugauguggunu

SEQ ID NO: 114235 - RNA, 21 nt, Artificial Sequence
  Synthetic
  misc_feature (20)..(20): n is a, c, g, or u
guuauauggaugauguggunu

SEQ ID NO: 114236 - RNA, 22 nt, Artificial Sequence
  Synthetic
  misc_feature (21)..(21): n is a, c, g, or u
aguuauauggaugauguggunu

SEQ ID NO: 114237 - RNA, 23 nt, Artificial Sequence
  Synthetic
  misc_feature (22)..(22): n is a, c, g, or u
caguuauauggaugauguggunu

SEQ ID NO: 114238 - RNA, 24 nt, Artificial Sequence
  Synthetic
  misc_feature (23)..(23): n is a, c, g, or u
ucaguuauauggaugauguggunu

SEQ ID NO: 114239 - RNA, 18 nt, Artificial Sequence
  Synthetic
  misc_feature (7)..(7): n is a, c, g, or u
ugacccnuauaaagaauu

SEQ ID NO: 114240 - RNA, 19 nt, Artificial Sequence
  Synthetic
  misc_feature (8)..(8): n is a, c, g, or u
uugacccnuauaaagaauu

SEQ ID NO: 114241 - RNA, 20 nt, Artificial Sequence
  Synthetic
  misc_feature (9)..(9): n is a, c, g, or u
auugacccnuauaaagaauu

SEQ ID NO: 114242 - RNA, 21 nt, Artificial Sequence
  Synthetic
  misc_feature (10)..(10): n is a, c, g, or u
cauugacccnuauaaagaauu

SEQ ID NO: 114243 - RNA, 22 nt, Artificial Sequence
  Synthetic
  misc_feature (11)..(11): n is a, c, g, or u
acauugacccnuauaaagaauu

SEQ ID NO: 114244 - RNA, 23 nt, Artificial Sequence
  Synthetic
  misc_feature (12)..(12): n is a, c, g, or u
gacauugacccnuauaaagaauu

SEQ ID NO: 114245 - RNA, 24 nt, Artificial Sequence
  Synthetic
  misc_feature (13)..(13): n is a, c, g, or u
ggacauugacccnuauaaagaauu

SEQ ID NO: 114246 - RNA, 18 nt, Artificial Sequence
  Synthetic
ccugggugggaaguaauu

SEQ ID NO: 114247 - RNA, 19 nt, Artificial Sequence
  Synthetic
accugggugggaaguaauu

SEQ ID NO: 114248 - RNA, 20 nt, Artificial Sequence
  Synthetic
caccugggugggaaguaauu

SEQ ID NO: 114249 - RNA, 21 nt, Artificial Sequence
  Synthetic
ccaccugggugggaaguaauu

SEQ ID NO: 114250 - RNA, 22 nt, Artificial Sequence
  Synthetic
gccaccugggugggaaguaauu

SEQ ID NO: 114251 - RNA, 23 nt, Artificial Sequence
  Synthetic
agccaccugggugggaaguaauu

SEQ ID NO: 114252 - RNA, 24 nt, Artificial Sequence
  Synthetic
uagccaccugggugggaaguaauu

SEQ ID NO: 114253 - RNA, 18 nt, Artificial Sequence
  Synthetic
ccuaucuuaucaacacuu

SEQ ID NO: 114254 - RNA, 19 nt, Artificial Sequence
  Synthetic
cccuaucuuaucaacacuu

SEQ ID NO: 114255 - RNA, 20 nt, Artificial Sequence
  Synthetic
ccccuaucuuaucaacacuu

SEQ ID NO: 114256 - RNA, 21 nt, Artificial Sequence
  Synthetic
gccccuaucuuaucaacacuu

SEQ ID NO: 114257 - RNA, 22 nt, Artificial Sequence
  Synthetic
ugccccuaucuuaucaacacuu

SEQ ID NO: 114258 - RNA, 23 nt, Artificial Sequence
  Synthetic
augccccuaucuuaucaacacuu

SEQ ID NO: 114259 - RNA, 24 nt, Artificial Sequence
  Synthetic
aaugccccuaucuuaucaacacuu

SEQ ID NO: 114260 - RNA, 18 nt, Artificial Sequence
  Synthetic
cugugccuuggguggcuu

SEQ ID NO: 114261 - RNA, 19 nt, Artificial Sequence
  Synthetic
gcugugccuuggguggcuu

SEQ ID NO: 114262 - RNA, 20 nt, Artificial Sequence
  Synthetic
agcugugccuuggguggcuu

SEQ ID NO: 114263 - RNA, 21 nt, Artificial Sequence
  Synthetic
aagcugugccuuggguggcuu

SEQ ID NO: 114264 - RNA, 22 nt, Artificial Sequence
  Synthetic
caagcugugccuuggguggcuu

SEQ ID NO: 114265 - RNA, 23 nt, Artificial Sequence
  Synthetic
ccaagcugugccuuggguggcuu

SEQ ID NO: 114266 - RNA, 24 nt, Artificial Sequence
  Synthetic
uccaagcugugccuuggguggcuu

SEQ ID NO: 114267 - RNA, 18 nt, Artificial Sequence
  Synthetic
  misc_feature (12)..(12): n is a, c, g, or u
cauuauuuacanacucuu

SEQ ID NO: 114268 - RNA, 19 nt, Artificial Sequence
  Synthetic
  misc_feature (13)..(13): n is a, c, g, or u
acauuauuuacanacucuu

SEQ ID NO: 114269 - RNA, 20 nt, Artificial Sequence
  Synthetic
  misc_feature (14)..(14): n is a, c, g, or u
gacauuauuuacanacucuu

SEQ ID NO: 114270 - RNA, 21 nt, Artificial Sequence
  Synthetic
  misc_feature (1)..(1): n is a, c, g, or u
  misc_feature (15)..(15): n is a, c, g, or u
ngacauuauuuacanacucuu

SEQ ID NO: 114271 - RNA, 22 nt, Artificial Sequence
  Synthetic
  misc_feature (1)..(2): n is a, c, g, or u
  misc_feature (16)..(16): n is a, c, g, or u
nngacauuauuuacanacucuu

SEQ ID NO: 114272 - RNA, 23 nt, Artificial Sequence
  Synthetic
  misc_feature (2)..(3): n is a, c, g, or u
  misc_feature (17)..(17): n is a, c, g, or u
cnngacauuauuuacanacucuu

SEQ ID NO: 114273 - RNA, 24 nt, Artificial Sequence
  Synthetic
  misc_feature (3)..(4): n is a, c, g, or u
  misc_feature (18)..(18): n is a, c, g, or u
acnngacauuauuuacanacucuu

SEQ ID NO: 114274 - RNA, 18 nt, Artificial Sequence
  Synthetic
caacgaauugugggucuu

SEQ ID NO: 114275 - RNA, 19 nt, Artificial Sequence
  Synthetic
ucaacgaauugugggucuu

SEQ ID NO: 114276 - RNA, 20 nt, Artificial Sequence
  Synthetic
gucaacgaauugugggucuu

SEQ ID NO: 114277 - RNA, 21 nt, Artificial Sequence
  Synthetic
ugucaacgaauugugggucuu

SEQ ID NO: 114278 - RNA, 22 nt, Artificial Sequence
  Synthetic
  misc_feature (1)..(1): n is a, c, g, or u
nugucaacgaauugugggucuu

SEQ ID NO: 114279 - RNA, 23 nt, Artificial Sequence
  Synthetic
  misc_feature (2)..(2): n is a, c, g, or u
unugucaacgaauugugggucuu

SEQ ID NO: 114280 - RNA, 24 nt, Artificial Sequence
  Synthetic
  misc_feature (3)..(3): n is a, c, g, or u
gunugucaacgaauugugggucuu

SEQ ID NO: 114281 - RNA, 18 nt, Artificial Sequence
  Synthetic
  misc_feature (14)..(14): n is a, c, g, or u
uugaauauuuggunucuu

SEQ ID NO: 114282 - RNA, 19 nt, Artificial Sequence
  Synthetic
  misc_feature (15)..(15): n is a, c, g, or u
cuugaauauuuggunucuu

SEQ ID NO: 114283 - RNA, 20 nt, Artificial Sequence
  Synthetic
  misc_feature (16)..(16): n is a, c, g, or u
ucuugaauauuuggunucuu

SEQ ID NO: 114284 - RNA, 21 nt, Artificial Sequence
  Synthetic
  misc_feature (17)..(17): n is a, c, g, or u
uucuugaauauuuggunucuu

SEQ ID NO: 114285 - RNA, 22 nt, Artificial Sequence
  Synthetic
  misc_feature (18)..(18): n is a, c, g, or u
guucuugaauauuuggunucuu

SEQ ID NO: 114286 - RNA, 23 nt, Artificial Sequence
  Synthetic
  misc_feature (19)..(19): n is a, c, g, or u
uguucuugaauauuuggunucuu

SEQ ID NO: 114287 - RNA, 24 nt, Artificial Sequence
  Synthetic
  misc_feature (20)..(20): n is a, c, g, or u
cuguucuugaauauuuggunucuu

SEQ ID NO: 114288 - RNA, 18 nt, Artificial Sequence
  Synthetic
gcgggucaccauauucuu

SEQ ID NO: 114289 - RNA, 19 nt, Artificial Sequence
  Synthetic
ugcgggucaccauauucuu

SEQ ID NO: 114290 - RNA, 20 nt, Artificial Sequence
  Synthetic
uugcgggucaccauauucuu

SEQ ID NO: 114291 - RNA, 21 nt, Artificial Sequence
  Synthetic
uuugcgggucaccauauucuu

SEQ ID NO: 114292 - RNA, 22 nt, Artificial Sequence
  Synthetic
uuuugcgggucaccauauucuu

SEQ ID NO: 114293 - RNA, 23 nt, Artificial Sequence
  Synthetic
auuuugcgggucaccauauucuu

SEQ ID NO: 114294 - RNA, 24 nt, Artificial Sequence
  Synthetic
cauuuugcgggucaccauauucuu

SEQ ID NO: 114295 - RNA, 18 nt, Artificial Sequence
  Synthetic
aucuucuuguugguucuu

SEQ ID NO: 114296 - RNA, 19 nt, Artificial Sequence
  Synthetic
caucuucuuguugguucuu

SEQ ID NO: 114297 - RNA, 20 nt, Artificial Sequence
  Synthetic
ucaucuucuuguugguucuu

SEQ ID NO: 114298 - RNA, 21 nt, Artificial Sequence
  Synthetic
cucaucuucuuguugguucuu

SEQ ID NO: 114299 - RNA, 22 nt, Artificial Sequence
  Synthetic
ccucaucuucuuguugguucuu

SEQ ID NO: 114300 - RNA, 23 nt, Artificial Sequence
  Synthetic
gccucaucuucuuguugguucuu

SEQ ID NO: 114301 - RNA, 24 nt, Artificial Sequence
  Synthetic
ugccucaucuucuuguugguucuu

SEQ ID NO: 114302 - RNA, 18 nt, Artificial Sequence
  Synthetic
cugcugguggcuccaguu

SEQ ID NO: 114303 - RNA, 19 nt, Artificial Sequence
  Synthetic
ccugcugguggcuccaguu

SEQ ID NO: 114304 - RNA, 20 nt, Artificial Sequence
  Synthetic
uccugcugguggcuccaguu

SEQ ID NO: 114305 - RNA, 21 nt, Artificial Sequence
  Synthetic
uuccugcugguggcuccaguu

SEQ ID NO: 114306 - RNA, 22 nt, Artificial Sequence
  Synthetic
uuuccugcugguggcuccaguu

SEQ ID NO: 114307 - RNA, 23 nt, Artificial Sequence
  Synthetic
cuuuccugcugguggcuccaguu

SEQ ID NO: 114308 - RNA, 24 nt, Artificial Sequence
  Synthetic
acuuuccugcugguggcuccaguu

SEQ ID NO: 114309 - RNA, 18 nt, Artificial Sequence
  Synthetic
  misc_feature (3)..(3): n is a, c, g, or u
uanugagugggaggaguu

SEQ ID NO: 114310 - RNA, 19 nt, Artificial Sequence
  Synthetic
  misc_feature (4)..(4): n is a, c, g, or u
uuanugagugggaggaguu

SEQ ID NO: 114311 - RNA, 20 nt, Artificial Sequence
  Synthetic
  misc_feature (5)..(5): n is a, c, g, or u
uuuanugagugggaggaguu

SEQ ID NO: 114312 - RNA, 21 nt, Artificial Sequence
  Synthetic
  misc_feature (6)..(6): n is a, c, g, or u
guuuanugagugggaggaguu

SEQ ID NO: 114313 - RNA, 22 nt, Artificial Sequence
  Synthetic
  misc_feature (7)..(7): n is a, c, g, or u
uguuuanugagugggaggaguu

SEQ ID NO: 114314 - RNA, 23 nt, Artificial Sequence
  Synthetic
  misc_feature (8)..(8): n is a, c, g, or u
guguuuanugagugggaggaguu

SEQ ID NO: 114315 - RNA, 24 nt, Artificial Sequence
  Synthetic
  misc_feature (9)..(9): n is a, c, g, or u
uguguuuanugagugggaggaguu

SEQ ID NO: 114316 - RNA, 18 nt, Artificial Sequence
  Synthetic
  misc_feature (16)..(16): n is a, c, g, or u
uauggaugauguggunuu

SEQ ID NO: 114317 - RNA, 19 nt, Artificial Sequence
  Synthetic
  misc_feature (17)..(17): n is a, c, g, or u
auauggaugauguggunuu

SEQ ID NO: 114318 - RNA, 20 nt, Artificial Sequence
  Synthetic
  misc_feature (18)..(18): n is a, c, g, or u
uauauggaugauguggunuu

SEQ ID NO: 114319 - RNA, 21 nt, Artificial Sequence
  Synthetic
  misc_feature (19)..(19): n is a, c, g, or u
uuauauggaugauguggunuu

SEQ ID NO: 114320 - RNA, 22 nt, Artificial Sequence
  Synthetic
  misc_feature (20)..(20): n is a, c, g, or u
guuauauggaugauguggunuu

SEQ ID NO: 114321 - RNA, 23 nt, Artificial Sequence
  Synthetic
  misc_feature (21)..(21): n is a, c, g, or u
aguuauauggaugauguggunuu

SEQ ID NO: 114322 - RNA, 24 nt, Artificial Sequence
  Synthetic
  misc_feature (22)..(22): n is a, c, g, or u
caguuauauggaugauguggunuu

SEQ ID NO: 114323 - RNA, 18 nt, Artificial Sequence
  Synthetic
  misc_feature (6)..(6): n is a, c, g, or u
  misc_feature (12)..(12): n is a, c, g, or u
gauagnuguaancaauuu

SEQ ID NO: 114324 - RNA, 19 nt, Artificial Sequence
  Synthetic
  misc_feature (7)..(7): n is a, c, g, or u
  misc_feature (13)..(13): n is a, c, g, or u
ugauagnuguaancaauuu

SEQ ID NO: 114325 - RNA, 20 nt, Artificial Sequence
  Synthetic
  misc_feature (8)..(8): n is a, c, g, or u
  misc_feature (14)..(14): n is a, c, g, or u
uugauagnuguaancaauuu

SEQ ID NO: 114326 - RNA, 21 nt, Artificial Sequence
  Synthetic
  misc_feature (9)..(9): n is a, c, g, or u
  misc_feature (15)..(15): n is a, c, g, or u
guugauagnuguaancaauuu

SEQ ID NO: 114327 - RNA, 22 nt, Artificial Sequence
  Synthetic
  misc_feature (10)..(10): n is a, c, g, or u
  misc_feature (16)..(16): n is a, c, g, or u
uguugauagnuguaancaauuu

SEQ ID NO: 114328 - RNA, 23 nt, Artificial Sequence
  Synthetic
  misc_feature (11)..(11): n is a, c, g, or u
  misc_feature (17)..(17): n is a, c, g, or u
uuguugauagnuguaancaauuu

SEQ ID NO: 114329 - RNA, 24 nt, Artificial Sequence
  Synthetic
  misc_feature (12)..(12): n is a, c, g, or u
  misc_feature (18)..(18): n is a, c, g, or u
auuguugauagnuguaancaauuu

SEQ ID NO: 114330 - RNA, 18 nt, Artificial Sequence
  Synthetic
cauaaggugggaaacuuu

SEQ ID NO: 114331 - RNA, 19 nt, Artificial Sequence
  Synthetic
  misc_feature (1)..(1): n is a, c, g, or u
ncauaaggugggaaacuuu

SEQ ID NO: 114332 - RNA, 20 nt, Artificial Sequence
  Synthetic
  misc_feature (2)..(2): n is a, c, g, or u
cncauaaggugggaaacuuu

SEQ ID NO: 114333 - RNA, 21 nt, Artificial Sequence
  Synthetic
  misc_feature (3)..(3): n is a, c, g, or u
acncauaaggugggaaacuuu

SEQ ID NO: 114334 - RNA, 22 nt, Artificial Sequence
  Synthetic
  misc_feature (4)..(4): n is a, c, g, or u
gacncauaaggugggaaacuuu

SEQ ID NO: 114335 - RNA, 23 nt, Artificial Sequence
  Synthetic
  misc_feature (5)..(5): n is a, c, g, or u
ggacncauaaggugggaaacuuu

SEQ ID NO: 114336 - RNA, 24 nt, Artificial Sequence
  Synthetic
  misc_feature (6)..(6): n is a, c, g, or u
uggacncauaaggugggaaacuuu

SEQ ID NO: 114337 - RNA, 18 nt, Artificial Sequence
  Synthetic
  misc_feature (11)..(13): n is a, c, g, or u
aaaaaucaaannnuguuu

SEQ ID NO: 114338 - RNA, 19 nt, Artificial Sequence
  Synthetic
  misc_feature (12)..(14): n is a, c, g, or u
aaaaaaucaaannnuguuu

SEQ ID NO: 114339 - RNA, 20 nt, Artificial Sequence
  Synthetic
  misc_feature (13)..(15): n is a, c, g, or u
caaaaaaucaaannnuguuu

SEQ ID NO: 114340 - RNA, 21 nt, Artificial Sequence
  Synthetic
  misc_feature (1)..(1): n is a, c, g, or u
  misc_feature (14)..(16): n is a, c, g, or u
ncaaaaaaucaaannnuguuu

SEQ ID NO: 114341 - RNA, 22 nt, Artificial Sequence
  Synthetic
  misc_feature (2)..(2): n is a, c, g, or u
  misc_feature (15)..(17): n is a, c, g, or u
uncaaaaaaucaaannnuguuu

SEQ ID NO: 114342 - RNA, 23 nt, Artificial Sequence
  Synthetic
  misc_feature (3)..(3): n is a, c, g, or u
  misc_feature (16)..(18): n is a, c, g, or u
guncaaaaaaucaaannnuguuu

SEQ ID NO: 114343 - RNA, 24 nt, Artificial Sequence
  Synthetic
  misc_feature (4)..(4): n is a, c, g, or u
  misc_feature (17)..(19): n is a, c, g, or u
uguncaaaaaaucaaannnuguuu

SEQ ID NO: 114344 - RNA, 18 nt, Artificial Sequence
  Synthetic
  misc_feature (10)..(12): n is a, c, g, or u
aaaaucaaannnuguuuu

SEQ ID NO: 114345 - RNA, 19 nt, Artificial Sequence
  Synthetic
  misc_feature (11)..(13): n is a, c, g, or u
aaaaaucaaannnuguuuu

SEQ ID NO: 114346 - RNA, 20 nt, Artificial Sequence
  Synthetic
  misc_feature (12)..(14): n is a, c, g, or u
aaaaaaucaaannnuguuuu

SEQ ID NO: 114347 - RNA, 21 nt, Artificial Sequence
  Synthetic
  misc_feature (13)..(15): n is a, c, g, or u
caaaaaaucaaannnuguuuu

SEQ ID NO: 114348 - RNA, 22 nt, Artificial Sequence
  Synthetic
  misc_feature (1)..(1): n is a, c, g, or u
  misc_feature (14)..(16): n is a, c, g, or u
ncaaaaaaucaaannnuguuuu

SEQ ID NO: 114349 - RNA, 23 nt, Artificial Sequence
  Synthetic
  misc_feature (2)..(2): n is a, c, g, or u
  misc_feature (15)..(17): n is a, c, g, or u
uncaaaaaaucaaannnuguuuu

SEQ ID NO: 114350 - RNA, 24 nt, Artificial Sequence
  Synthetic
  misc_feature (3)..(3): n is a, c, g, or u
  misc_feature (16)..(18): n is a, c, g, or u
guncaaaaaaucaaannnuguuuu

SEQ ID NO: 114351 - RNA, 22 nt, Artificial Sequence
  Synthetic
gauaguccagaagaaccaacaa

SEQ ID NO: 114352 - RNA, 21 nt, Artificial Sequence
  Synthetic
  misc_feature (7)..(7): n is a, c, g, or u
gaccagnccguugccgagcaa

SEQ ID NO: 114353 - RNA, 22 nt, Artificial Sequence
  Synthetic
gaucuugaagaguuugguggaa

SEQ ID NO: 114354 - RNA, 23 nt, Artificial Sequence
  Synthetic
ggaucuugaagaguuugguggaa

SEQ ID NO: 114355 - RNA, 24 nt, Artificial Sequence
  Synthetic
gggaucuugaagaguuugguggaa

SEQ ID NO: 114356 - RNA, 23 nt, Artificial Sequence
  Synthetic
gcuugaacaguaggacaugaaca

SEQ ID NO: 114357 - RNA, 24 nt, Artificial Sequence
  Synthetic
ggcuugaacaguaggacaugaaca

SEQ ID NO: 114358 - RNA, 23 nt, Artificial Sequence
  Synthetic
guuggcuuugaaugcagggucca

SEQ ID NO: 114359 - RNA, 21 nt, Artificial Sequence
  Synthetic
gcagaggugaagcgaagugca

SEQ ID NO: 114360 - RNA, 23 nt, Artificial Sequence
  Synthetic
gugcagaggugaagcgaagugca

SEQ ID NO: 114361 - RNA, 21 nt, Artificial Sequence
  Synthetic
ggccucccgauacagagcaga

SEQ ID NO: 114362 - RNA, 22 nt, Artificial Sequence
  Synthetic
gagaccuucgucugcgaggcga

SEQ ID NO: 114363 - RNA, 18 nt, Artificial Sequence
  Synthetic
ggccuuguaaguuggcga

SEQ ID NO: 114364 - RNA, 22 nt, Artificial Sequence
  Synthetic
gaaaggccuuguaaguuggcga

SEQ ID NO: 114365 - RNA, 24 nt, Artificial Sequence
  Synthetic
gauacagagcagaggcggugucga

SEQ ID NO: 114366 - RNA, 22 nt, Artificial Sequence
  Synthetic
guacaggguccccagucuucga

SEQ ID NO: 114367 - RNA, 23 nt, Artificial Sequence
  Synthetic
gguacaggguccccagucuucga

SEQ ID NO: 114368 - RNA, 21 nt, Artificial Sequence
  Synthetic
gcacagccuagcagccaugga

SEQ ID NO: 114369 - RNA, 24 nt, Artificial Sequence
  Synthetic
gcagcacagccuagcagccaugga

SEQ ID NO: 114370 - RNA, 24 nt, Artificial Sequence
  Synthetic
guauuuugcgaaagcccaagauga

SEQ ID NO: 114371 - RNA, 21 nt, Artificial Sequence
  Synthetic
gaaagcccuacgaaccacuga

SEQ ID NO: 114372 - RNA, 22 nt, Artificial Sequence
  Synthetic
ggaaagcccuacgaaccacuga

SEQ ID NO: 114373 - RNA, 23 nt, Artificial Sequence
  Synthetic
gggaaagcccuacgaaccacuga

SEQ ID NO: 114374 - RNA, 24 nt, Artificial Sequence
  Synthetic
ggggaaagcccuacgaaccacuga

SEQ ID NO: 114375 - RNA, 21 nt, Artificial Sequence
  Synthetic
  misc_feature (20)..(20): n is a, c, g, or u
gaauccacacuccaaaagana

SEQ ID NO: 114376 - RNA, 23 nt, Artificial Sequence
  Synthetic
  misc_feature (22)..(22): n is a, c, g, or u
gcgaauccacacuccaaaagana

SEQ ID NO: 114377 - RNA, 21 nt, Artificial Sequence
  Synthetic
  misc_feature (15)..(15): n is a, c, g, or u
gacacacggguguunccccua

SEQ ID NO: 114378 - RNA, 20 nt, Artificial Sequence
  Synthetic
gauguucuccauguucggua

SEQ ID NO: 114379 - RNA, 21 nt, Artificial Sequence
  Synthetic
  misc_feature (12)..(12): n is a, c, g, or u
ggaccugccucnucgucuaac

SEQ ID NO: 114380 - RNA, 22 nt, Artificial Sequence
  Synthetic
  misc_feature (13)..(13): n is a, c, g, or u
gggaccugccucnucgucuaac

SEQ ID NO: 114381 - RNA, 23 nt, Artificial Sequence
  Synthetic
  misc_feature (14)..(14): n is a, c, g, or u
ggggaccugccucnucgucuaac

SEQ ID NO: 114382 - RNA, 24 nt, Artificial Sequence
  Synthetic
gacugcgaauuuuggccaagacac

SEQ ID NO: 114383 - RNA, 23 nt, Artificial Sequence
  Synthetic
guauggaucggcagaggagacac

SEQ ID NO: 114384 - RNA, 21 nt, Artificial Sequence
  Synthetic
gaaaauugagagaaguccacc

SEQ ID NO: 114385 - RNA, 24 nt, Artificial Sequence
  Synthetic
guccgcguaaagagaggugcgccc

SEQ ID NO: 114386 - RNA, 23 nt, Artificial Sequence
  Synthetic
gauaaaacgccgcagacacaucc

SEQ ID NO: 114387 - RNA, 21 nt, Artificial Sequence
  Synthetic
  misc_feature (10)..(10): n is a, c, g, or u
ggugcuggunguugaugaucc

SEQ ID NO: 114388 - RNA, 23 nt, Artificial Sequence
  Synthetic
gucguugacauugcugaaagucc

SEQ ID NO: 114389 - RNA, 24 nt, Artificial Sequence
  Synthetic
ggucguugacauugcugaaagucc

SEQ ID NO: 114390 - RNA, 23 nt, Artificial Sequence
  Synthetic
gaauacaggugcaguuuccgucc

SEQ ID NO: 114391 - RNA, 24 nt, Artificial Sequence
  Synthetic
ggaauacaggugcaguuuccgucc

SEQ ID NO: 114392 - RNA, 22 nt, Artificial Sequence
  Synthetic
gaaacauagagguuccuugagc

SEQ ID NO: 114393 - RNA, 23 nt, Artificial Sequence
  Synthetic
ggaaacauagagguuccuugagc

SEQ ID NO: 114394 - RNA, 24 nt, Artificial Sequence
  Synthetic
gggaaacauagagguuccuugagc

SEQ ID NO: 114395 - RNA, 19 nt, Artificial Sequence
  Synthetic
gaaccacugaacaaauggc

SEQ ID NO: 114396 - RNA, 22 nt, Artificial Sequence
  Synthetic
gacacaaagguuccacgcaugc

SEQ ID NO: 114397 - RNA, 24 nt, Artificial Sequence
  Synthetic
gagacacaaagguuccacgcaugc

SEQ ID NO: 114398 - RNA, 18 nt, Artificial Sequence
  Synthetic
ggucuccaugcgacgugc

SEQ ID NO: 114399 - RNA, 20 nt, Artificial Sequence
  Synthetic
guggucuccaugcgacgugc

SEQ ID NO: 114400 - RNA, 22 nt, Artificial Sequence
  Synthetic
guucgguacaggguccccaguc

SEQ ID NO: 114401 - RNA, 24 nt, Artificial Sequence
  Synthetic
guucuccauguucgguacaggguc

SEQ ID NO: 114402 - RNA, 23 nt, Artificial Sequence
  Synthetic
gcaaaacaagcggcuaggaguuc

SEQ ID NO: 114403 - RNA, 20 nt, Artificial Sequence
  Synthetic
gacggggaguccgcguaaag

SEQ ID NO: 114404 - RNA, 19 nt, Artificial Sequence
  Synthetic
gcgacgugcagaggugaag

SEQ ID NO: 114405 - RNA, 21 nt, Artificial Sequence
  Synthetic
  misc_feature (2)..(2): n is a, c, g, or u
gnagaugagaaggcacagacg

SEQ ID NO: 114406 - RNA, 22 nt, Artificial Sequence
  Synthetic
  misc_feature (3)..(3): n is a, c, g, or u
ggnagaugagaaggcacagacg

SEQ ID NO: 114407 - RNA, 19 nt, Artificial Sequence
  Synthetic
gacagaauugucagucccg

SEQ ID NO: 114408 - RNA, 23 nt, Artificial Sequence
  Synthetic
  misc_feature (2)..(2): n is a, c, g, or u
gnacgacagaauugucagucccg

SEQ ID NO: 114409 - RNA, 23 nt, Artificial Sequence
  Synthetic
guaggcugccuuccugacugccg

SEQ ID NO: 114410 - RNA, 21 nt, Artificial Sequence
  Synthetic
gaauagcuugccugagugccg

SEQ ID NO: 114411 - RNA, 21 nt, Artificial Sequence
  Synthetic
ggccccgggaggggucguccg

SEQ ID NO: 114412 - RNA, 23 nt, Artificial Sequence
  Synthetic
gcggccccgggaggggucguccg

SEQ ID NO: 114413 - RNA, 19 nt, Artificial Sequence
  Synthetic
gcgaagugcacacgguccg

SEQ ID NO: 114414 - RNA, 22 nt, Artificial Sequence
  Synthetic
gaagcgaagugcacacgguccg

SEQ ID NO: 114415 - RNA, 24 nt, Artificial Sequence
  Synthetic
gugaagcgaagugcacacgguccg

SEQ ID NO: 114416 - RNA, 19 nt, Artificial Sequence
  Synthetic
gaggugcgccccguggucg

SEQ ID NO: 114417 - RNA, 21 nt, Artificial Sequence
  Synthetic
gagaggugcgccccguggucg

SEQ ID NO: 114418 - RNA, 22 nt, Artificial Sequence
  Synthetic
gacacauccagcgauaaccagg

SEQ ID NO: 114419 - RNA, 23 nt, Artificial Sequence
  Synthetic
gcauuugguggucuauaugcagg

SEQ ID NO: 114420 - RNA, 24 nt, Artificial Sequence
  Synthetic
ggcauuugguggucuauaugcagg

SEQ ID NO: 114421 - RNA, 23 nt, Artificial Sequence
  Synthetic
guagagccccaagcggccccggg

SEQ ID NO: 114422 - RNA, 24 nt, Artificial Sequence
  Synthetic
gguagagccccaagcggccccggg

SEQ ID NO: 114423 - RNA, 22 nt, Artificial Sequence
  Synthetic
guccucuuaugcaagaccuugg

SEQ ID NO: 114424 - RNA, 24 nt, Artificial Sequence
  Synthetic
gaguccucuuaugcaagaccuugg

SEQ ID NO: 114425 - RNA, 18 nt, Artificial Sequence
  Synthetic
gaugcgauguucuccaug

SEQ ID NO: 114426 - RNA, 23 nt, Artificial Sequence
  Synthetic
guccugaugcgauguucuccaug

SEQ ID NO: 114427 - RNA, 24 nt, Artificial Sequence
  Synthetic
gccugagugccguauggugaggug

SEQ ID NO: 114428 - RNA, 19 nt, Artificial Sequence
  Synthetic
  misc_feature (19)..(19): n is a, c, g, or u
guccaacugaugaucgggn

SEQ ID NO: 114429 - RNA, 20 nt, Artificial Sequence
  Synthetic
  misc_feature (20)..(20): n is a, c, g, or u
gguccaacugaugaucgggn

SEQ ID NO: 114430 - RNA, 22 nt, Artificial Sequence
  Synthetic
gcuuugaaugcaggguccaacu

SEQ ID NO: 114431 - RNA, 23 nt, Artificial Sequence
  Synthetic
ggcuuugaaugcaggguccaacu

SEQ ID NO: 114432 - RNA, 22 nt, Artificial Sequence
  Synthetic
gagugacuggagauuugggacu

SEQ ID NO: 114433 - RNA, 24 nt, Artificial Sequence
  Synthetic
gugagugacuggagauuugggacu

SEQ ID NO: 114434 - RNA, 21 nt, Artificial Sequence
  Synthetic
guuccggagacucuaaggccu

SEQ ID NO: 114435 - RNA, 20 nt, Artificial Sequence
  Synthetic
guaacacgagcagggguccu

SEQ ID NO: 114436 - RNA, 24 nt, Artificial Sequence
  Synthetic
gccuguaacacgagcagggguccu

SEQ ID NO: 114437 - RNA, 19 nt, Artificial Sequence
  Synthetic
gcgagcaaaacaagcggcu

SEQ ID NO: 114438 - RNA, 22 nt, Artificial Sequence
  Synthetic
gcugcgagcaaaacaagcggcu

SEQ ID NO: 114439 - RNA, 19 nt, Artificial Sequence
  Synthetic
gucggucguugacauugcu

SEQ ID NO: 114440 - RNA, 20 nt, Artificial Sequence
  Synthetic
ggucggucguugacauugcu

SEQ ID NO: 114441 - RNA, 24 nt, Artificial Sequence
  Synthetic
  misc_feature (4)..(4): n is a, c, g, or u
gccnauggccaagccccaaccagu

SEQ ID NO: 114442 - RNA, 19 nt, Artificial Sequence
  Synthetic
gagcagggguccuaggagu

SEQ ID NO: 114443 - RNA, 18 nt, Artificial Sequence
  Synthetic
gagcaacgggguaaaggu

SEQ ID NO: 114444 - RNA, 21 nt, Artificial Sequence
  Synthetic
gccgagcaacgggguaaaggu

SEQ ID NO: 114445 - RNA, 24 nt, Artificial Sequence
  Synthetic
guugccgagcaacgggguaaaggu

SEQ ID NO: 114446 - RNA, 18 nt, Artificial Sequence
  Synthetic
guugccgagcaacggggu

SEQ ID NO: 114447 - RNA, 22 nt, Artificial Sequence
  Synthetic
  misc_feature (2)..(2): n is a, c, g, or u
gnccguugccgagcaacggggu

SEQ ID NO: 114448 - RNA, 21 nt, Artificial Sequence
  Synthetic
  misc_feature (17)..(17): n is a, c, g, or u
gccaguuguccuugugngggu

SEQ ID NO: 114449 - RNA, 22 nt, Artificial Sequence
  Synthetic
  misc_feature (18)..(18): n is a, c, g, or u
ggccaguuguccuugugngggu

SEQ ID NO: 114450 - RNA, 21 nt, Artificial Sequence
  Synthetic
gaggugaaaaaguugcauggu

SEQ ID NO: 114451 - RNA, 24 nt, Artificial Sequence
  Synthetic
gcagaggugaaaaaguugcauggu

SEQ ID NO: 114452 - RNA, 21 nt, Artificial Sequence
  Synthetic
gucuagacucugugguauugu

SEQ ID NO: 114453 - RNA, 23 nt, Artificial Sequence
  Synthetic
gagucuagacucugugguauugu

SEQ ID NO: 114454 - RNA, 22 nt, Artificial Sequence
  Synthetic
gcguccggccaguuguccuugu

SEQ ID NO: 114455 - RNA, 23 nt, Artificial Sequence
  Synthetic
ggcguccggccaguuguccuugu

SEQ ID NO: 114456 - RNA, 24 nt, Artificial Sequence
  Synthetic
  misc_feature (20)..(20): n is a, c, g, or u
gacccacaauucguugacanacuu

SEQ ID NO: 114457 - RNA, 22 nt, Artificial Sequence
  Synthetic
  misc_feature (19)..(19): n is a, c, g, or u
gcaugguccggugcuggunguu

SEQ ID NO: 114458 - RNA, 21 nt, Artificial Sequence
  Synthetic
guugauaagauaggggcauuu

SEQ ID NO: 114459 - RNA, 23 nt, Artificial Sequence
  Synthetic
guguugauaagauaggggcauuu

SEQ ID NO: 114460 - RNA, 20 nt, Artificial Sequence
  Synthetic
gacaacuggccggacgccaa

SEQ ID NO: 114461 - RNA, 21 nt, Artificial Sequence
  Synthetic
gcugcuaggcugugcugccaa

SEQ ID NO: 114462 - RNA, 22 nt, Artificial Sequence
  Synthetic
ggcugcuaggcugugcugccaa

SEQ ID NO: 114463 - RNA, 23 nt, Artificial Sequence
  Synthetic
guacuaggaggcuguaggcauaa

SEQ ID NO: 114464 - RNA, 21 nt, Artificial Sequence
  Synthetic
  misc_feature (2)..(2): n is a, c, g, or u
gngacacucauccucaggcca

SEQ ID NO: 114465 - RNA, 19 nt, Artificial Sequence
  Synthetic
gccgcuuguuuugcucgca

SEQ ID NO: 114466 - RNA, 20 nt, Artificial Sequence
  Synthetic
gucucaaucgccgcgucgca

SEQ ID NO: 114467 - RNA, 24 nt, Artificial Sequence
  Synthetic
gacccugcauucaaagccaacuca

SEQ ID NO: 114468 - RNA, 21 nt, Artificial Sequence
  Synthetic
ggggauauucccuuaacuuca

SEQ ID NO: 114469 - RNA, 24 nt, Artificial Sequence
  Synthetic
gauggggauauucccuuaacuuca

SEQ ID NO: 114470 - RNA, 21 nt, Artificial Sequence
  Synthetic
ggaagauccagcauccaggga

SEQ ID NO: 114471 - RNA, 22 nt, Artificial Sequence
  Synthetic
gaaucuagccaccuggguggga

SEQ ID NO: 114472 - RNA, 21 nt, Artificial Sequence
  Synthetic
gaacucccucgccucgcagac

SEQ ID NO: 114473 - RNA, 24 nt, Artificial Sequence
  Synthetic
gaagaacucccucgccucgcagac

SEQ ID NO: 114474 - RNA, 18 nt, Artificial Sequence
  Synthetic
gggguuuuucuuguugac

SEQ ID NO: 114475 - RNA, 20 nt, Artificial Sequence
  Synthetic
gcgggguuuuucuuguugac

SEQ ID NO: 114476 - RNA, 21 nt, Artificial Sequence
  Synthetic
ggcgggguuuuucuuguugac

SEQ ID NO: 114477 - RNA, 21 nt, Artificial Sequence
  Synthetic
guguuugcugacgcaaccccc

SEQ ID NO: 114478 - RNA, 21 nt, Artificial Sequence
  Synthetic
  misc_feature (11)..(11): n is a, c, g, or u
gaacgcccacnggaaccugcc

SEQ ID NO: 114479 - RNA, 23 nt, Artificial Sequence
  Synthetic
  misc_feature (13)..(13): n is a, c, g, or u
gugaacgcccacnggaaccugcc

SEQ ID NO: 114480 - RNA, 22 nt, Artificial Sequence
  Synthetic
guucaagccuccaagcugugcc

SEQ ID NO: 114481 - RNA, 23 nt, Artificial Sequence
  Synthetic
gcaaaauaccuaugggagugggc

SEQ ID NO: 114482 - RNA, 23 nt, Artificial Sequence
  Synthetic
gccaaaauucgcagucccaaauc

SEQ ID NO: 114483 - RNA, 24 nt, Artificial Sequence
  Synthetic
ggccaaaauucgcagucccaaauc

SEQ ID NO: 114484 - RNA, 21 nt, Artificial Sequence
  Synthetic
gggccaagucuguacaacauc

SEQ ID NO: 114485 - RNA, 22 nt, Artificial Sequence
  Synthetic
ggggccaagucuguacaacauc

SEQ ID NO: 114486 - RNA, 23 nt, Artificial Sequence
  Synthetic
gggggccaagucuguacaacauc

SEQ ID NO: 114487 - RNA, 22 nt, Artificial Sequence
  Synthetic
gucuuggccaaaauucgcaguc

SEQ ID NO: 114488 - RNA, 24 nt, Artificial Sequence
  Synthetic
gugucuuggccaaaauucgcaguc

SEQ ID NO: 114489 - RNA, 23 nt, Artificial Sequence
  Synthetic
gcauggggacaaaucuuucuguc

SEQ ID NO: 114490 - RNA, 24 nt, Artificial Sequence
  Synthetic
ggcauggggacaaaucuuucuguc

SEQ ID NO: 114491 - RNA, 24 nt, Artificial Sequence
  Synthetic
gcauaagaggacucuuggacuuuc

SEQ ID NO: 114492 - RNA, 18 nt, Artificial Sequence
  Synthetic
guuuacgucccgucggcg

SEQ ID NO: 114493 - RNA, 21 nt, Artificial Sequence
  Synthetic
gaccccugcucguguuacagg

SEQ ID NO: 114494 - RNA, 22 nt, Artificial Sequence
  Synthetic
ggaccccugcucguguuacagg

SEQ ID NO: 114495 - RNA, 21 nt, Artificial Sequence
  Synthetic
gccucaguccguuucucuugg

SEQ ID NO: 114496 - RNA, 22 nt, Artificial Sequence
  Synthetic
ggccucaguccguuucucuugg

SEQ ID NO: 114497 - RNA, 23 nt, Artificial Sequence
  Synthetic
gggccucaguccguuucucuugg

SEQ ID NO: 114498 - RNA, 21 nt, Artificial Sequence
  Synthetic
gacuaaaauuaauuaugccug

SEQ ID NO: 114499 - RNA, 23 nt, Artificial Sequence
  Synthetic
gagacuaaaauuaauuaugccug

SEQ ID NO: 114500 - RNA, 24 nt, Artificial Sequence
  Synthetic
ggagacuaaaauuaauuaugccug

SEQ ID NO: 114501 - RNA, 23 nt, Artificial Sequence
  Synthetic
  misc_feature (13)..(13): n is a, c, g, or u
gcucggcaacggncuggucugug

SEQ ID NO: 114502 - RNA, 24 nt, Artificial Sequence
  Synthetic
gccaccugggugggaaguaauuug

SEQ ID NO: 114503 - RNA, 24 nt, Artificial Sequence
  Synthetic
gaucucaaucucgggaaucucaau

SEQ ID NO: 114504 - RNA, 21 nt, Artificial Sequence
  Synthetic
gaagaucucaaucucgggaau

SEQ ID NO: 114505 - RNA, 24 nt, Artificial Sequence
  Synthetic
gcagaagaucucaaucucgggaau

SEQ ID NO: 114506 - RNA, 21 nt, Artificial Sequence
  Synthetic
gggcuuucgcaaaauaccuau

SEQ ID NO: 114507 - RNA, 19 nt, Artificial Sequence
  Synthetic
gcucuguaucgggaggccu

SEQ ID NO: 114508 - RNA, 21 nt, Artificial Sequence
  Synthetic
gcuuucccccacugucuggcu

SEQ ID NO: 114509 - RNA, 22 nt, Artificial Sequence
  Synthetic
ggcuuucccccacugucuggcu

SEQ ID NO: 114510 - RNA, 23 nt, Artificial Sequence
  Synthetic
gggcuuucccccacugucuggcu

SEQ ID NO: 114511 - RNA, 23 nt, Artificial Sequence
  Synthetic
guucaggaacagugagcccugcu

SEQ ID NO: 114512 - RNA, 22 nt, Artificial Sequence
  Synthetic
guggaaccuuugugucuccucu

SEQ ID NO: 114513 - RNA, 24 nt, Artificial Sequence
  Synthetic
gcguggaaccuuugugucuccucu

SEQ ID NO: 114514 - RNA, 18 nt, Artificial Sequence
  Synthetic
gacucgugguggacuucu

SEQ ID NO: 114515 - RNA, 23 nt, Artificial Sequence
  Synthetic
gucuagacucgugguggacuucu

SEQ ID NO: 114516 - RNA, 18 nt, Artificial Sequence
  Synthetic
gccggacgccaacaaggu

SEQ ID NO: 114517 - RNA, 19 nt, Artificial Sequence
  Synthetic
ggccggacgccaacaaggu

SEQ ID NO: 114518 - RNA, 24 nt, Artificial Sequence
  Synthetic
gcacucaggcaagcuauucugugu

SEQ ID NO: 114519 - RNA, 23 nt, Artificial Sequence
  Synthetic
gaagauccagcauccagggaauu

SEQ ID NO: 114520 - RNA, 24 nt, Artificial Sequence
  Synthetic
ggaagauccagcauccagggaauu

SEQ ID NO: 114521 - RNA, 21 nt, Artificial Sequence
  Synthetic
gcugcuaugccucaucuucuu

SEQ ID NO: 114522 - RNA, 23 nt, Artificial Sequence
  Synthetic
guccguuucucuuggcucaguuu

SEQ ID NO: 114523 - RNA, 21 nt, Artificial Sequence
  Synthetic
auaguccagaagaaccaacaa

SEQ ID NO: 114524 - RNA, 23 nt, Artificial Sequence
  Synthetic
ugauaguccagaagaaccaacaa

SEQ ID NO: 114525 - RNA, 24 nt, Artificial Sequence
  Synthetic
uugauaguccagaagaaccaacaa

SEQ ID NO: 114526 - RNA, 21 nt, Artificial Sequence
  Synthetic
agguauuuugcgaaagcccaa

SEQ ID NO: 114527 - RNA, 22 nt, Artificial Sequence
  Synthetic
uagguauuuugcgaaagcccaa

SEQ ID NO: 114528 - RNA, 23 nt, Artificial Sequence
  Synthetic
auagguauuuugcgaaagcccaa

SEQ ID NO: 114529 - RNA, 24 nt, Artificial Sequence
  Synthetic
cauagguauuuugcgaaagcccaa

SEQ ID NO: 114530 - RNA, 22 nt, Artificial Sequence
  Synthetic
  misc_feature (8)..(8): n is a, c, g, or u
agaccagnccguugccgagcaa

SEQ ID NO: 114531 - RNA, 23 nt, Artificial Sequence
  Synthetic
  misc_feature (9)..(9): n is a, c, g, or u
cagaccagnccguugccgagcaa

SEQ ID NO: 114532 - RNA, 24 nt, Artificial Sequence
  Synthetic
  misc_feature (10)..(10): n is a, c, g, or u
acagaccagnccguugccgagcaa

SEQ ID NO: 114533 - RNA, 21 nt, Artificial Sequence
  Synthetic
aucuugaagaguuugguggaa

SEQ ID NO: 114534 - RNA, 21 nt, Artificial Sequence
  Synthetic
uuacauaucccaugaaguuaa

SEQ ID NO: 114535 - RNA, 22 nt, Artificial Sequence
  Synthetic
auuacauaucccaugaaguuaa

SEQ ID NO: 114536 - RNA, 23 nt, Artificial Sequence
  Synthetic
aauuacauaucccaugaaguuaa

SEQ ID NO: 114537 - RNA, 24 nt, Artificial Sequence
  Synthetic
caauuacauaucccaugaaguuaa

SEQ ID NO: 114538 - RNA, 21 nt, Artificial Sequence
  Synthetic
uugaacaguaggacaugaaca

SEQ ID NO: 114539 - RNA, 22 nt, Artificial Sequence
  Synthetic
cuugaacaguaggacaugaaca

SEQ ID NO: 114540 - RNA, 21 nt, Artificial Sequence
  Synthetic
cauccauauaacugaaagcca

SEQ ID NO: 114541 - RNA, 22 nt, Artificial Sequence
  Synthetic
ucauccauauaacugaaagcca

SEQ ID NO: 114542 - RNA, 23 nt, Artificial Sequence
  Synthetic
aucauccauauaacugaaagcca

SEQ ID NO: 114543 - RNA, 24 nt, Artificial Sequence
  Synthetic
caucauccauauaacugaaagcca

SEQ ID NO: 114544 - RNA, 21 nt, Artificial Sequence
  Synthetic
uggcuuugaaugcagggucca

SEQ ID NO: 114545 - RNA, 22 nt, Artificial Sequence
  Synthetic
uuggcuuugaaugcagggucca

SEQ ID NO: 114546 - RNA, 24 nt, Artificial Sequence
  Synthetic
aguuggcuuugaaugcagggucca

SEQ ID NO: 114547 - RNA, 21 nt, Artificial Sequence
  Synthetic
  misc_feature (10)..(10): n is a, c, g, or u
auauaagauncccgccuucca

SEQ ID NO: 114548 - RNA, 22 nt, Artificial Sequence
  Synthetic
  misc_feature (11)..(11): n is a, c, g, or u
uauauaagauncccgccuucca

SEQ ID NO: 114549 - RNA, 23 nt, Artificial Sequence
  Synthetic
  misc_feature (12)..(12): n is a, c, g, or u
uuauauaagauncccgccuucca

SEQ ID NO: 114550 - RNA, 24 nt, Artificial Sequence
  Synthetic
  misc_feature (13)..(13): n is a, c, g, or u
uuuauauaagauncccgccuucca

SEQ ID NO: 114551 - RNA, 22 nt, Artificial Sequence
  Synthetic
ugcagaggugaagcgaagugca

SEQ ID NO: 114552 - RNA, 24 nt, Artificial Sequence
  Synthetic
cgugcagaggugaagcgaagugca

SEQ ID NO: 114553 - RNA, 22 nt, Artificial Sequence
  Synthetic
aggccucccgauacagagcaga

SEQ ID NO: 114554 - RNA, 23 nt, Artificial Sequence
  Synthetic
aaggccucccgauacagagcaga

SEQ ID NO: 114555 - RNA, 24 nt, Artificial Sequence
  Synthetic
uaaggccucccgauacagagcaga

SEQ ID NO: 114556 - RNA, 21 nt, Artificial Sequence
  Synthetic
agaccuucgucugcgaggcga

SEQ ID NO: 114557 - RNA, 23 nt, Artificial Sequence
  Synthetic
ugagaccuucgucugcgaggcga

SEQ ID NO: 114558 - RNA, 24 nt, Artificial Sequence
  Synthetic
uugagaccuucgucugcgaggcga

SEQ ID NO: 114559 - RNA, 19 nt, Artificial Sequence
  Synthetic
aggccuuguaaguuggcga

SEQ ID NO: 114560 - RNA, 20 nt, Artificial Sequence
  Synthetic
aaggccuuguaaguuggcga

SEQ ID NO: 114561 - RNA, 21 nt, Artificial Sequence
  Synthetic
aaaggccuuguaaguuggcga

SEQ ID NO: 114562 - RNA, 23 nt, Artificial Sequence
  Synthetic
agaaaggccuuguaaguuggcga

SEQ ID NO: 114563 - RNA, 24 nt, Artificial Sequence
  Synthetic
uagaaaggccuuguaaguuggcga

SEQ ID NO: 114564 - RNA, 21 nt, Artificial Sequence
  Synthetic
acagagcagaggcggugucga

SEQ ID NO: 114565 - RNA, 22 nt, Artificial Sequence
  Synthetic
uacagagcagaggcggugucga

SEQ ID NO: 114566 - RNA, 23 nt, Artificial Sequence
  Synthetic
auacagagcagaggcggugucga

SEQ ID NO: 114567 - RNA, 21 nt, Artificial Sequence
  Synthetic
uacaggguccccagucuucga

SEQ ID NO: 114568 - RNA, 24 nt, Artificial Sequence
  Synthetic
cgguacaggguccccagucuucga

SEQ ID NO: 114569 - RNA, 18 nt, Artificial Sequence
  Synthetic
aggacgucccgcgcagga

SEQ ID NO: 114570 - RNA, 19 nt, Artificial Sequence
  Synthetic
aaggacgucccgcgcagga

SEQ ID NO: 114571 - RNA, 20 nt, Artificial Sequence
  Synthetic
aaaggacgucccgcgcagga

SEQ ID NO: 114572 - RNA, 22 nt, Artificial Sequence
  Synthetic
agcacagccuagcagccaugga

SEQ ID NO: 114573 - RNA, 23 nt, Artificial Sequence
  Synthetic
cagcacagccuagcagccaugga

SEQ ID NO: 114574 - RNA, 18 nt, Artificial Sequence
  Synthetic
ugcgaaagcccaagauga

SEQ ID NO: 114575 - RNA, 19 nt, Artificial Sequence
  Synthetic
uugcgaaagcccaagauga

SEQ ID NO: 114576 - RNA, 20 nt, Artificial Sequence
  Synthetic
uuugcgaaagcccaagauga

SEQ ID NO: 114577 - RNA, 21 nt, Artificial Sequence
  Synthetic
uuuugcgaaagcccaagauga

SEQ ID NO: 114578 - RNA, 22 nt, Artificial Sequence
  Synthetic
auuuugcgaaagcccaagauga

SEQ ID NO: 114579 - RNA, 23 nt, Artificial Sequence
  Synthetic
uauuuugcgaaagcccaagauga

SEQ ID NO: 114580 - RNA, 21 nt, Artificial Sequence
  Synthetic
aguaguuuccggaaguguuga

SEQ ID NO: 114581 - RNA, 22 nt, Artificial Sequence
  Synthetic
caguaguuuccggaaguguuga

SEQ ID NO: 114582 - RNA, 23 nt, Artificial Sequence
  Synthetic
acaguaguuuccggaaguguuga

SEQ ID NO: 114583 - RNA, 24 nt, Artificial Sequence
  Synthetic
aacaguaguuuccggaaguguuga

SEQ ID NO: 114584 - RNA, 22 nt, Artificial Sequence
  Synthetic
  misc_feature (21)..(21): n is a, c, g, or u
cgaauccacacuccaaaagana

SEQ ID NO: 114585 - RNA, 24 nt, Artificial Sequence
  Synthetic
  misc_feature (23)..(23): n is a, c, g, or u
ugcgaauccacacuccaaaagana

SEQ ID NO: 114586 - RNA, 22 nt, Artificial Sequence
  Synthetic
  misc_feature (16)..(16): n is a, c, g, or u
agacacacggguguunccccua

SEQ ID NO: 114587 - RNA, 23 nt, Artificial Sequence
  Synthetic
  misc_feature (17)..(17): n is a, c, g, or u
aagacacacggguguunccccua

SEQ ID NO: 114588 - RNA, 24 nt, Artificial Sequence
  Synthetic
  misc_feature (18)..(18): n is a, c, g, or u
caagacacacggguguunccccua

SEQ ID NO: 114589 - RNA, 18 nt, Artificial Sequence
  Synthetic
uguucuccauguucggua

SEQ ID NO: 114590 - RNA, 19 nt, Artificial Sequence
  Synthetic
auguucuccauguucggua

SEQ ID NO: 114591 - RNA, 24 nt, Artificial Sequence
  Synthetic
  misc_feature (15)..(15): n is a, c, g, or u
aggggaccugccucnucgucuaac

SEQ ID NO: 114592 - RNA, 21 nt, Artificial Sequence
  Synthetic
ugcgaauuuuggccaagacac

SEQ ID NO: 114593 - RNA, 22 nt, Artificial Sequence
  Synthetic
cugcgaauuuuggccaagacac

SEQ ID NO: 114594 - RNA, 23 nt, Artificial Sequence
  Synthetic
acugcgaauuuuggccaagacac

SEQ ID NO: 114595 - RNA, 21 nt, Artificial Sequence
  Synthetic
auggaucggcagaggagacac

SEQ ID NO: 114596 - RNA, 22 nt, Artificial Sequence
  Synthetic
uauggaucggcagaggagacac

SEQ ID NO: 114597 - RNA, 24 nt, Artificial Sequence
  Synthetic
aguauggaucggcagaggagacac

SEQ ID NO: 114598 - RNA, 22 nt, Artificial Sequence
  Synthetic
agaaaauugagagaaguccacc

SEQ ID NO: 114599 - RNA, 23 nt, Artificial Sequence
  Synthetic
uagaaaauugagagaaguccacc

SEQ ID NO: 114600 - RNA, 24 nt, Artificial Sequence
  Synthetic
cuagaaaauugagagaaguccacc

SEQ ID NO: 114601 - RNA, 21 nt, Artificial Sequence
  Synthetic
ugagccugagggcuccacccc

SEQ ID NO: 114602 - RNA, 22 nt, Artificial Sequence
  Synthetic
cugagccugagggcuccacccc

SEQ ID NO: 114603 - RNA, 23 nt, Artificial Sequence
  Synthetic
ccugagccugagggcuccacccc

SEQ ID NO: 114604 - RNA, 24 nt, Artificial Sequence
  Synthetic
cccugagccugagggcuccacccc

SEQ ID NO: 114605 - RNA, 21 nt, Artificial Sequence
  Synthetic
cgcguaaagagaggugcgccc

SEQ ID NO: 114606 - RNA, 22 nt, Artificial Sequence
  Synthetic
ccgcguaaagagaggugcgccc

SEQ ID NO: 114607 - RNA, 23 nt, Artificial Sequence
  Synthetic
uccgcguaaagagaggugcgccc

SEQ ID NO: 114608 - RNA, 21 nt, Artificial Sequence
  Synthetic
cauagguauuuugcgaaagcc

SEQ ID NO: 114609 - RNA, 22 nt, Artificial Sequence
  Synthetic
ccauagguauuuugcgaaagcc

SEQ ID NO: 114610 - RNA, 23 nt, Artificial Sequence
  Synthetic
cccauagguauuuugcgaaagcc

SEQ ID NO: 114611 - RNA, 24 nt, Artificial Sequence
  Synthetic
ucccauagguauuuugcgaaagcc

SEQ ID NO: 114612 - RNA, 18 nt, Artificial Sequence
  Synthetic
aacgccgcagacacaucc

SEQ ID NO: 114613 - RNA, 19 nt, Artificial Sequence
  Synthetic
aaacgccgcagacacaucc

SEQ ID NO: 114614 - RNA, 20 nt, Artificial Sequence
  Synthetic
aaaacgccgcagacacaucc

SEQ ID NO: 114615 - RNA, 21 nt, Artificial Sequence
  Synthetic
uaaaacgccgcagacacaucc

SEQ ID NO: 114616 - RNA, 22 nt, Artificial Sequence
  Synthetic
auaaaacgccgcagacacaucc

SEQ ID NO: 114617 - RNA, 24 nt, Artificial Sequence
  Synthetic
ugauaaaacgccgcagacacaucc

SEQ ID NO: 114618 - RNA, 22 nt, Artificial Sequence
  Synthetic
  misc_feature (11)..(11): n is a, c, g, or u
cggugcuggunguugaugaucc

SEQ ID NO: 114619 - RNA, 23 nt, Artificial Sequence
  Synthetic
  misc_feature (12)..(12): n is a, c, g, or u
ccggugcuggunguugaugaucc

SEQ ID NO: 114620 - RNA, 24 nt, Artificial Sequence
  Synthetic
  misc_feature (13)..(13): n is a, c, g, or u
uccggugcuggunguugaugaucc

SEQ ID NO: 114621 - RNA, 21 nt, Artificial Sequence
  Synthetic
cguugacauugcugaaagucc

SEQ ID NO: 114622 - RNA, 22 nt, Artificial Sequence
  Synthetic
ucguugacauugcugaaagucc

SEQ ID NO: 114623 - RNA, 21 nt, Artificial Sequence
  Synthetic
auacaggugcaguuuccgucc

SEQ ID NO: 114624 - RNA, 22 nt, Artificial Sequence
  Synthetic
aauacaggugcaguuuccgucc

SEQ ID NO: 114625 - RNA, 21 nt, Artificial Sequence
  Synthetic
cgucuaacaacaguaguuucc

SEQ ID NO: 114626 - RNA, 22 nt, Artificial Sequence
  Synthetic
ucgucuaacaacaguaguuucc

SEQ ID NO: 114627 - RNA, 23 nt, Artificial Sequence
  Synthetic
  misc_feature (1)..(1): n is a, c, g, or u
nucgucuaacaacaguaguuucc

SEQ ID NO: 114628 - RNA, 24 nt, Artificial Sequence
  Synthetic
  misc_feature (2)..(2): n is a, c, g, or u
cnucgucuaacaacaguaguuucc

SEQ ID NO: 114629 - RNA, 18 nt, Artificial Sequence
  Synthetic
cccgccuguaacacgagc

SEQ ID NO: 114630 - RNA, 19 nt, Artificial Sequence
  Synthetic
ccccgccuguaacacgagc

SEQ ID NO: 114631 - RNA, 20 nt, Artificial Sequence
  Synthetic
accccgccuguaacacgagc

SEQ ID NO: 114632 - RNA, 21 nt, Artificial Sequence
  Synthetic
aaacauagagguuccuugagc

SEQ ID NO: 114633 - RNA, 18 nt, Artificial Sequence
  Synthetic
ugagaucuucugcgacgc

SEQ ID NO: 114634 - RNA, 19 nt, Artificial Sequence
  Synthetic
uugagaucuucugcgacgc

SEQ ID NO: 114635 - RNA, 20 nt, Artificial Sequence
  Synthetic
auugagaucuucugcgacgc

SEQ ID NO: 114636 - RNA, 18 nt, Artificial Sequence
  Synthetic
aaccacugaacaaauggc

SEQ ID NO: 114637 - RNA, 20 nt, Artificial Sequence
  Synthetic
cgaaccacugaacaaauggc

SEQ ID NO: 114638 - RNA, 21 nt, Artificial Sequence
  Synthetic
acgaaccacugaacaaauggc

SEQ ID NO: 114639 - RNA, 22 nt, Artificial Sequence
  Synthetic
uacgaaccacugaacaaauggc

SEQ ID NO: 114640 - RNA, 23 nt, Artificial Sequence
  Synthetic
cuacgaaccacugaacaaauggc

SEQ ID NO: 114641 - RNA, 24 nt, Artificial Sequence
  Synthetic
ccuacgaaccacugaacaaauggc

SEQ ID NO: 114642 - RNA, 18 nt, Artificial Sequence
  Synthetic
caaagguuccacgcaugc

SEQ ID NO: 114643 - RNA, 19 nt, Artificial Sequence
  Synthetic
acaaagguuccacgcaugc

SEQ ID NO: 114644 - RNA, 20 nt, Artificial Sequence
  Synthetic
cacaaagguuccacgcaugc

SEQ ID NO: 114645 - RNA, 21 nt, Artificial Sequence
  Synthetic
acacaaagguuccacgcaugc

SEQ ID NO: 114646 - RNA, 23 nt, Artificial Sequence
  Synthetic
agacacaaagguuccacgcaugc

SEQ ID NO: 114647 - RNA, 19 nt, Artificial Sequence
  Synthetic
uggucuccaugcgacgugc

SEQ ID NO: 114648 - RNA, 18 nt, Artificial Sequence
  Synthetic
caacacagaauagcuugc

SEQ ID NO: 114649 - RNA, 19 nt, Artificial Sequence
  Synthetic
ccaacacagaauagcuugc

SEQ ID NO: 114650 - RNA, 20 nt, Artificial Sequence
  Synthetic
cccaacacagaauagcuugc

SEQ ID NO: 114651 - RNA, 21 nt, Artificial Sequence
  Synthetic
ccccaacacagaauagcuugc

SEQ ID NO: 114652 - RNA, 22 nt, Artificial Sequence
  Synthetic
accccaacacagaauagcuugc

SEQ ID NO: 114653 - RNA, 23 nt, Artificial Sequence
  Synthetic
caccccaacacagaauagcuugc

SEQ ID NO: 114654 - RNA, 24 nt, Artificial Sequence
  Synthetic
ucaccccaacacagaauagcuugc

SEQ ID NO: 114655 - RNA, 18 nt, Artificial Sequence
  Synthetic
caccacgagucuagacuc

SEQ ID NO: 114656 - RNA, 19 nt, Artificial Sequence
  Synthetic
ccaccacgagucuagacuc

SEQ ID NO: 114657 - RNA, 20 nt, Artificial Sequence
  Synthetic
uccaccacgagucuagacuc

SEQ ID NO: 114658 - RNA, 21 nt, Artificial Sequence
  Synthetic
uucgguacaggguccccaguc

SEQ ID NO: 114659 - RNA, 23 nt, Artificial Sequence
  Synthetic
uguucgguacaggguccccaguc

SEQ ID NO: 114660 - RNA, 24 nt, Artificial Sequence
  Synthetic
auguucgguacaggguccccaguc

SEQ ID NO: 114661 - RNA, 18 nt, Artificial Sequence
  Synthetic
cauguucgguacaggguc

SEQ ID NO: 114662 - RNA, 19 nt, Artificial Sequence
  Synthetic
ccauguucgguacaggguc

SEQ ID NO: 114663 - RNA, 20 nt, Artificial Sequence
  Synthetic
uccauguucgguacaggguc

SEQ ID NO: 114664 - RNA, 21 nt, Artificial Sequence
  Synthetic
cuccauguucgguacaggguc

SEQ ID NO: 114665 - RNA, 22 nt, Artificial Sequence
  Synthetic
ucuccauguucgguacaggguc

SEQ ID NO: 114666 - RNA, 23 nt, Artificial Sequence
  Synthetic
uucuccauguucgguacaggguc

SEQ ID NO: 114667 - RNA, 21 nt, Artificial Sequence
  Synthetic
aaaacaagcggcuaggaguuc

SEQ ID NO: 114668 - RNA, 22 nt, Artificial Sequence
  Synthetic
caaaacaagcggcuaggaguuc

SEQ ID NO: 114669 - RNA, 24 nt, Artificial Sequence
  Synthetic
agcaaaacaagcggcuaggaguuc

SEQ ID NO: 114670 - RNA, 18 nt, Artificial Sequence
  Synthetic
cggggaguccgcguaaag

SEQ ID NO: 114671 - RNA, 19 nt, Artificial Sequence
  Synthetic
acggggaguccgcguaaag

SEQ ID NO: 114672 - RNA, 18 nt, Artificial Sequence
  Synthetic
cgacgugcagaggugaag

SEQ ID NO: 114673 - RNA, 20 nt, Artificial Sequence
  Synthetic
ugcgacgugcagaggugaag

SEQ ID NO: 114674 - RNA, 21 nt, Artificial Sequence
  Synthetic
augcgacgugcagaggugaag

SEQ ID NO: 114675 - RNA, 22 nt, Artificial Sequence
  Synthetic
caugcgacgugcagaggugaag

SEQ ID NO: 114676 - RNA, 23 nt, Artificial Sequence
  Synthetic
ccaugcgacgugcagaggugaag

SEQ ID NO: 114677 - RNA, 24 nt, Artificial Sequence
  Synthetic
uccaugcgacgugcagaggugaag

SEQ ID NO: 114678 - RNA, 21 nt, Artificial Sequence
  Synthetic
caagaagaugaggcauagcag

SEQ ID NO: 114679 - RNA, 22 nt, Artificial Sequence
  Synthetic
acaagaagaugaggcauagcag

SEQ ID NO: 114680 - RNA, 23 nt, Artificial Sequence
  Synthetic
aacaagaagaugaggcauagcag

SEQ ID NO: 114681 - RNA, 24 nt, Artificial Sequence
  Synthetic
caacaagaagaugaggcauagcag

SEQ ID NO: 114682 - RNA, 21 nt, Artificial Sequence
  Synthetic
ugacucugggaucuugaagag

SEQ ID NO: 114683 - RNA, 22 nt, Artificial Sequence
  Synthetic
cugacucugggaucuugaagag

SEQ ID NO: 114684 - RNA, 23 nt, Artificial Sequence
  Synthetic
ccugacucugggaucuugaagag

SEQ ID NO: 114685 - RNA, 24 nt, Artificial Sequence
  Synthetic
cccugacucugggaucuugaagag

SEQ ID NO: 114686 - RNA, 23 nt, Artificial Sequence
  Synthetic
  misc_feature (4)..(4): n is a, c, g, or u
cggnagaugagaaggcacagacg

SEQ ID NO: 114687 - RNA, 24 nt, Artificial Sequence
  Synthetic
  misc_feature (5)..(5): n is a, c, g, or u
ccggnagaugagaaggcacagacg

SEQ ID NO: 114688 - RNA, 18 nt, Artificial Sequence
  Synthetic
acagaauugucagucccg

SEQ ID NO: 114689 - RNA, 20 nt, Artificial Sequence
  Synthetic
cgacagaauugucagucccg

SEQ ID NO: 114690 - RNA, 21 nt, Artificial Sequence
  Synthetic
acgacagaauugucagucccg

SEQ ID NO: 114691 - RNA, 22 nt, Artificial Sequence
  Synthetic
  misc_feature (1)..(1): n is a, c, g, or u
nacgacagaauugucagucccg

SEQ ID NO: 114692 - RNA, 24 nt, Artificial Sequence
  Synthetic
  misc_feature (3)..(3): n is a, c, g, or u
agnacgacagaauugucagucccg

SEQ ID NO: 114693 - RNA, 21 nt, Artificial Sequence
  Synthetic
aggcugccuuccugacugccg

SEQ ID NO: 114694 - RNA, 22 nt, Artificial Sequence
  Synthetic
uaggcugccuuccugacugccg

SEQ ID NO: 114695 - RNA, 24 nt, Artificial Sequence
  Synthetic
aguaggcugccuuccugacugccg

SEQ ID NO: 114696 - RNA, 22 nt, Artificial Sequence
  Synthetic
agaauagcuugccugagugccg

SEQ ID NO: 114697 - RNA, 23 nt, Artificial Sequence
  Synthetic
cagaauagcuugccugagugccg

SEQ ID NO: 114698 - RNA, 24 nt, Artificial Sequence
  Synthetic
acagaauagcuugccugagugccg

SEQ ID NO: 114699 - RNA, 18 nt, Artificial Sequence
  Synthetic
ccaccuuguuggcguccg

SEQ ID NO: 114700 - RNA, 19 nt, Artificial Sequence
  Synthetic
cccaccuuguuggcguccg

SEQ ID NO: 114701 - RNA, 20 nt, Artificial Sequence
  Synthetic
ucccaccuuguuggcguccg

SEQ ID NO: 114702 - RNA, 21 nt, Artificial Sequence
  Synthetic
cucccaccuuguuggcguccg

SEQ ID NO: 114703 - RNA, 22 nt, Artificial Sequence
  Synthetic
acucccaccuuguuggcguccg

SEQ ID NO: 114704 - RNA, 23 nt, Artificial Sequence
  Synthetic
cacucccaccuuguuggcguccg

SEQ ID NO: 114705 - RNA, 24 nt, Artificial Sequence
  Synthetic
ccacucccaccuuguuggcguccg

SEQ ID NO: 114706 - RNA, 22 nt, Artificial Sequence
  Synthetic
cggccccgggaggggucguccg

SEQ ID NO: 114707 - RNA, 24 nt, Artificial Sequence
  Synthetic
agcggccccgggaggggucguccg

SEQ ID NO: 114708 - RNA, 18 nt, Artificial Sequence
  Synthetic
cgaagugcacacgguccg

SEQ ID NO: 114709 - RNA, 20 nt, Artificial Sequence
  Synthetic
agcgaagugcacacgguccg

SEQ ID NO: 114710 - RNA, 21 nt, Artificial Sequence
  Synthetic
aagcgaagugcacacgguccg

SEQ ID NO: 114711 - RNA, 23 nt, Artificial Sequence
  Synthetic
ugaagcgaagugcacacgguccg

SEQ ID NO: 114712 - RNA, 18 nt, Artificial Sequence
  Synthetic
aacaaaggacgucccgcg

SEQ ID NO: 114713 - RNA, 19 nt, Artificial Sequence
  Synthetic
aaacaaaggacgucccgcg

SEQ ID NO: 114714 - RNA, 20 nt, Artificial Sequence
  Synthetic
uaaacaaaggacgucccgcg

SEQ ID NO: 114715 - RNA, 18 nt, Artificial Sequence
  Synthetic
aggugcgccccguggucg

SEQ ID NO: 114716 - RNA, 20 nt, Artificial Sequence
  Synthetic
agaggugcgccccguggucg

SEQ ID NO: 114717 - RNA, 22 nt, Artificial Sequence
  Synthetic
agagaggugcgccccguggucg

SEQ ID NO: 114718 - RNA, 23 nt, Artificial Sequence
  Synthetic
aagagaggugcgccccguggucg

SEQ ID NO: 114719 - RNA, 24 nt, Artificial Sequence
  Synthetic
aaagagaggugcgccccguggucg

SEQ ID NO: 114720 - RNA, 18 nt, Artificial Sequence
  Synthetic
cauccagcgauaaccagg

SEQ ID NO: 114721 - RNA, 19 nt, Artificial Sequence
  Synthetic
acauccagcgauaaccagg

SEQ ID NO: 114722 - RNA, 20 nt, Artificial Sequence
  Synthetic
cacauccagcgauaaccagg

SEQ ID NO: 114723 - RNA, 21 nt, Artificial Sequence
  Synthetic
acacauccagcgauaaccagg

SEQ ID NO: 114724 - RNA, 23 nt, Artificial Sequence
  Synthetic
agacacauccagcgauaaccagg

SEQ ID NO: 114725 - RNA, 24 nt, Artificial Sequence
  Synthetic
cagacacauccagcgauaaccagg

SEQ ID NO: 114726 - RNA, 21 nt, Artificial Sequence
  Synthetic
auuugguggucuauaugcagg

SEQ ID NO: 114727 - RNA, 22 nt, Artificial Sequence
  Synthetic
cauuugguggucuauaugcagg

SEQ ID NO: 114728 - RNA, 21 nt, Artificial Sequence
  Synthetic
agagccccaagcggccccggg

SEQ ID NO: 114729 - RNA, 22 nt, Artificial Sequence
  Synthetic
uagagccccaagcggccccggg

SEQ ID NO: 114730 - RNA, 18 nt, Artificial Sequence
  Synthetic
ugccugagugccguaugg

SEQ ID NO: 114731 - RNA, 19 nt, Artificial Sequence
  Synthetic
uugccugagugccguaugg

SEQ ID NO: 114732 - RNA, 20 nt, Artificial Sequence
  Synthetic
cuugccugagugccguaugg

SEQ ID NO: 114733 - RNA, 21 nt, Artificial Sequence
  Synthetic
aauuacuucccacccaggugg

SEQ ID NO: 114734 - RNA, 22 nt, Artificial Sequence
  Synthetic
aaauuacuucccacccaggugg

SEQ ID NO: 114735 - RNA, 23 nt, Artificial Sequence
  Synthetic
caaauuacuucccacccaggugg

SEQ ID NO: 114736 - RNA, 24 nt, Artificial Sequence
  Synthetic
ccaaauuacuucccacccaggugg

SEQ ID NO: 114737 - RNA, 21 nt, Artificial Sequence
  Synthetic
uccucuuaugcaagaccuugg

SEQ ID NO: 114738 - RNA, 23 nt, Artificial Sequence
  Synthetic
aguccucuuaugcaagaccuugg

SEQ ID NO: 114739 - RNA, 19 nt, Artificial Sequence
  Synthetic
ugaugcgauguucuccaug

SEQ ID NO: 114740 - RNA, 20 nt, Artificial Sequence
  Synthetic
cugaugcgauguucuccaug

SEQ ID NO: 114741 - RNA, 21 nt, Artificial Sequence
  Synthetic
ccugaugcgauguucuccaug

SEQ ID NO: 114742 - RNA, 22 nt, Artificial Sequence
  Synthetic
uccugaugcgauguucuccaug

SEQ ID NO: 114743 - RNA, 24 nt, Artificial Sequence
  Synthetic
aguccugaugcgauguucuccaug

SEQ ID NO: 114744 - RNA, 21 nt, Artificial Sequence
  Synthetic
ugagugccguauggugaggug

SEQ ID NO: 114745 - RNA, 22 nt, Artificial Sequence
  Synthetic
cugagugccguauggugaggug

SEQ ID NO: 114746 - RNA, 23 nt, Artificial Sequence
  Synthetic
ccugagugccguauggugaggug

SEQ ID NO: 114747 - RNA, 18 nt, Artificial Sequence
  Synthetic
  misc_feature (18)..(18): n is a, c, g, or u
uccaacugaugaucgggn

SEQ ID NO: 114748 - RNA, 21 nt, Artificial Sequence
  Synthetic
uaacauugagauucccgagau

SEQ ID NO: 114749 - RNA, 22 nt, Artificial Sequence
  Synthetic
cuaacauugagauucccgagau

SEQ ID NO: 114750 - RNA, 23 nt, Artificial Sequence
  Synthetic
acuaacauugagauucccgagau

SEQ ID NO: 114751 - RNA, 24 nt, Artificial Sequence
  Synthetic
uacuaacauugagauucccgagau

SEQ ID NO: 114752 - RNA, 21 nt, Artificial Sequence
  Synthetic
cagaagcuccaaauucuuuau

SEQ ID NO: 114753 - RNA, 22 nt, Artificial Sequence
  Synthetic
acagaagcuccaaauucuuuau

SEQ ID NO: 114754 - RNA, 23 nt, Artificial Sequence
  Synthetic
cacagaagcuccaaauucuuuau

SEQ ID NO: 114755 - RNA, 24 nt, Artificial Sequence
  Synthetic
ccacagaagcuccaaauucuuuau

SEQ ID NO: 114756 - RNA, 21 nt, Artificial Sequence
  Synthetic
cuuugaaugcaggguccaacu

SEQ ID NO: 114757 - RNA, 24 nt, Artificial Sequence
  Synthetic
uggcuuugaaugcaggguccaacu

SEQ ID NO: 114758 - RNA, 21 nt, Artificial Sequence
  Synthetic
agugacuggagauuugggacu

SEQ ID NO: 114759 - RNA, 23 nt, Artificial Sequence
  Synthetic
ugagugacuggagauuugggacu

SEQ ID NO: 114760 - RNA, 18 nt, Artificial Sequence
  Synthetic
aauuuaugccuacagccu

SEQ ID NO: 114761 - RNA, 19 nt, Artificial Sequence
  Synthetic
caauuuaugccuacagccu

SEQ ID NO: 114762 - RNA, 20 nt, Artificial Sequence
  Synthetic
ccaauuuaugccuacagccu

SEQ ID NO: 114763 - RNA, 18 nt, Artificial Sequence
  Synthetic
ccggagacucuaaggccu

SEQ ID NO: 114764 - RNA, 19 nt, Artificial Sequence
  Synthetic
uccggagacucuaaggccu

SEQ ID NO: 114765 - RNA, 20 nt, Artificial Sequence
  Synthetic
uuccggagacucuaaggccu

SEQ ID NO: 114766 - RNA, 22 nt, Artificial Sequence
  Synthetic
uguuccggagacucuaaggccu

SEQ ID NO: 114767 - RNA, 23 nt, Artificial Sequence
  Synthetic
auguuccggagacucuaaggccu

SEQ ID NO: 114768 - RNA, 24 nt, Artificial Sequence
  Synthetic
aauguuccggagacucuaaggccu

SEQ ID NO: 114769 - RNA, 21 nt, Artificial Sequence
  Synthetic
cacagucuuugaaguaugccu

SEQ ID NO: 114770 - RNA, 22 nt, Artificial Sequence
  Synthetic
acacagucuuugaaguaugccu

SEQ ID NO: 114771 - RNA, 23 nt, Artificial Sequence
  Synthetic
cacacagucuuugaaguaugccu

SEQ ID NO: 114772 - RNA, 24 nt, Artificial Sequence
  Synthetic
acacacagucuuugaaguaugccu

SEQ ID NO: 114773 - RNA, 21 nt, Artificial Sequence
  Synthetic
  misc_feature (2)..(2): n is a, c, g, or u
ancuaucaacaauguccuccu

SEQ ID NO: 114774 - RNA, 22 nt, Artificial Sequence
  Synthetic
  misc_feature (3)..(3): n is a, c, g, or u
cancuaucaacaauguccuccu

SEQ ID NO: 114775 - RNA, 23 nt, Artificial Sequence
  Synthetic
  misc_feature (4)..(4): n is a, c, g, or u
acancuaucaacaauguccuccu

SEQ ID NO: 114776 - RNA, 24 nt, Artificial Sequence
  Synthetic
  misc_feature (5)..(5): n is a, c, g, or u
uacancuaucaacaauguccuccu

SEQ ID NO: 114777 - RNA, 18 nt, Artificial Sequence
  Synthetic
aacacgagcagggguccu

SEQ ID NO: 114778 - RNA, 19 nt, Artificial Sequence
  Synthetic
uaacacgagcagggguccu

SEQ ID NO: 114779 - RNA, 21 nt, Artificial Sequence
  Synthetic
uguaacacgagcagggguccu

SEQ ID NO: 114780 - RNA, 22 nt, Artificial Sequence
  Synthetic
cuguaacacgagcagggguccu

SEQ ID NO: 114781 - RNA, 23 nt, Artificial Sequence
  Synthetic
ccuguaacacgagcagggguccu

SEQ ID NO: 114782 - RNA, 18 nt, Artificial Sequence
  Synthetic
cgagcaaaacaagcggcu

SEQ ID NO: 114783 - RNA, 20 nt, Artificial Sequence
  Synthetic
ugcgagcaaaacaagcggcu

SEQ ID NO: 114784 - RNA, 21 nt, Artificial Sequence
  Synthetic
cugcgagcaaaacaagcggcu

SEQ ID NO: 114785 - RNA, 23 nt, Artificial Sequence
  Synthetic
  misc_feature (1)..(1): n is a, c, g, or u
ngcugcgagcaaaacaagcggcu

SEQ ID NO: 114786 - RNA, 24 nt, Artificial Sequence
  Synthetic
  misc_feature (2)..(2): n is a, c, g, or u
cngcugcgagcaaaacaagcggcu

SEQ ID NO: 114787 - RNA, 21 nt, Artificial Sequence
  Synthetic
ucuggauuuucugaguuggcu

SEQ ID NO: 114788 - RNA, 22 nt, Artificial Sequence
  Synthetic
aucuggauuuucugaguuggcu

SEQ ID NO: 114789 - RNA, 23 nt, Artificial Sequence
  Synthetic
aaucuggauuuucugaguuggcu

SEQ ID NO: 114790 - RNA, 24 nt, Artificial Sequence
  Synthetic
caaucuggauuuucugaguuggcu

SEQ ID NO: 114791 - RNA, 18 nt, Artificial Sequence
  Synthetic
ucggucguugacauugcu

SEQ ID NO: 114792 - RNA, 21 nt, Artificial Sequence
  Synthetic
aggucggucguugacauugcu

SEQ ID NO: 114793 - RNA, 22 nt, Artificial Sequence
  Synthetic
aaggucggucguugacauugcu

SEQ ID NO: 114794 - RNA, 23 nt, Artificial Sequence
  Synthetic
caaggucggucguugacauugcu

SEQ ID NO: 114795 - RNA, 24 nt, Artificial Sequence
  Synthetic
ucaaggucggucguugacauugcu

SEQ ID NO: 114796 - RNA, 18 nt, Artificial Sequence
  Synthetic
acaguaguuuccggaagu

SEQ ID NO: 114797 - RNA, 19 nt, Artificial Sequence
  Synthetic
aacaguaguuuccggaagu

SEQ ID NO: 114798 - RNA, 20 nt, Artificial Sequence
  Synthetic
caacaguaguuuccggaagu

SEQ ID NO: 114799 - RNA, 21 nt, Artificial Sequence
  Synthetic
acaacaguaguuuccggaagu

SEQ ID NO: 114800 - RNA, 22 nt, Artificial Sequence
  Synthetic
aacaacaguaguuuccggaagu

SEQ ID NO: 114801 - RNA, 23 nt, Artificial Sequence
  Synthetic
uaacaacaguaguuuccggaagu

SEQ ID NO: 114802 - RNA, 24 nt, Artificial Sequence
  Synthetic
cuaacaacaguaguuuccggaagu

SEQ ID NO: 114803 - RNA, 21 nt, Artificial Sequence
  Synthetic
  misc_feature (1)..(1): n is a, c, g, or u
nauggccaagccccaaccagu

SEQ ID NO: 114804 - RNA, 22 nt, Artificial Sequence
  Synthetic
  misc_feature (2)..(2): n is a, c, g, or u
cnauggccaagccccaaccagu

SEQ ID NO: 114805 - RNA, 23 nt, Artificial Sequence
  Synthetic
  misc_feature (3)..(3): n is a, c, g, or u
ccnauggccaagccccaaccagu

SEQ ID NO: 114806 - RNA, 18 nt, Artificial Sequence
  Synthetic
agcagggguccuaggagu

SEQ ID NO: 114807 - RNA, 20 nt, Artificial Sequence
  Synthetic
cgagcagggguccuaggagu

SEQ ID NO: 114808 - RNA, 21 nt, Artificial Sequence
  Synthetic
acgagcagggguccuaggagu

SEQ ID NO: 114809 - RNA, 22 nt, Artificial Sequence
  Synthetic
cacgagcagggguccuaggagu

SEQ ID NO: 114810 - RNA, 23 nt, Artificial Sequence
  Synthetic
acacgagcagggguccuaggagu

SEQ ID NO: 114811 - RNA, 24 nt, Artificial Sequence
  Synthetic
aacacgagcagggguccuaggagu

SEQ ID NO: 114812 - RNA, 19 nt, Artificial Sequence
  Synthetic
cgagcaacgggguaaaggu

SEQ ID NO: 114813 - RNA, 20 nt, Artificial Sequence
  Synthetic
ccgagcaacgggguaaaggu

SEQ ID NO: 114814 - RNA, 22 nt, Artificial Sequence
  Synthetic
ugccgagcaacgggguaaaggu

SEQ ID NO: 114815 - RNA, 23 nt, Artificial Sequence
  Synthetic
uugccgagcaacgggguaaaggu

SEQ ID NO: 114816 - RNA, 19 nt, Artificial Sequence
  Synthetic
cguugccgagcaacggggu

SEQ ID NO: 114817 - RNA, 20 nt, Artificial Sequence
  Synthetic
ccguugccgagcaacggggu

SEQ ID NO: 114818 - RNA, 21 nt, Artificial Sequence
  Synthetic
  misc_feature (1)..(1): n is a, c, g, or u
nccguugccgagcaacggggu

SEQ ID NO: 114819 - RNA, 23 nt, Artificial Sequence
  Synthetic
  misc_feature (3)..(3): n is a, c, g, or u
agnccguugccgagcaacggggu

SEQ ID NO: 114820 - RNA, 24 nt, Artificial Sequence
  Synthetic
  misc_feature (4)..(4): n is a, c, g, or u
cagnccguugccgagcaacggggu

SEQ ID NO: 114821 - RNA, 23 nt, Artificial Sequence
  Synthetic
  misc_feature (19)..(19): n is a, c, g, or u
cggccaguuguccuugugngggu

SEQ ID NO: 114822 - RNA, 24 nt, Artificial Sequence
  Synthetic
  misc_feature (20)..(20): n is a, c, g, or u
ccggccaguuguccuugugngggu

SEQ ID NO: 114823 - RNA, 22 nt, Artificial Sequence
  Synthetic
agaggugaaaaaguugcauggu

SEQ ID NO: 114824 - RNA, 23 nt, Artificial Sequence
  Synthetic
cagaggugaaaaaguugcauggu

SEQ ID NO: 114825 - RNA, 22 nt, Artificial Sequence
  Synthetic
agucuagacucugugguauugu

SEQ ID NO: 114826 - RNA, 24 nt, Artificial Sequence
  Synthetic
cgagucuagacucugugguauugu

SEQ ID NO: 114827 - RNA, 21 nt, Artificial Sequence
  Synthetic
cguccggccaguuguccuugu

SEQ ID NO: 114828 - RNA, 24 nt, Artificial Sequence
  Synthetic
uggcguccggccaguuguccuugu

SEQ ID NO: 114829 - RNA, 18 nt, Artificial Sequence
  Synthetic
ccagucuucgauaagauu

SEQ ID NO: 114830 - RNA, 19 nt, Artificial Sequence
  Synthetic
cccagucuucgauaagauu

SEQ ID NO: 114831 - RNA, 20 nt, Artificial Sequence
  Synthetic
ccccagucuucgauaagauu

SEQ ID NO: 114832 - RNA, 21 nt, Artificial Sequence
  Synthetic
  misc_feature (17)..(17): n is a, c, g, or u
ccacaauucguugacanacuu

SEQ ID NO: 114833 - RNA, 22 nt, Artificial Sequence
  Synthetic
  misc_feature (18)..(18): n is a, c, g, or u
cccacaauucguugacanacuu

SEQ ID NO: 114834 - RNA, 23 nt, Artificial Sequence
  Synthetic
  misc_feature (19)..(19): n is a, c, g, or u
acccacaauucguugacanacuu

SEQ ID NO: 114835 - RNA, 18 nt, Artificial Sequence
  Synthetic
aaacgggcaacauaccuu

SEQ ID NO: 114836 - RNA, 19 nt, Artificial Sequence
  Synthetic
caaacgggcaacauaccuu

SEQ ID NO: 114837 - RNA, 20 nt, Artificial Sequence
  Synthetic
acaaacgggcaacauaccuu

SEQ ID NO: 114838 - RNA, 21 nt, Artificial Sequence
  Synthetic
auucccuggaugcuggaucuu

SEQ ID NO: 114839 - RNA, 22 nt, Artificial Sequence
  Synthetic
aauucccuggaugcuggaucuu

SEQ ID NO: 114840 - RNA, 23 nt, Artificial Sequence
  Synthetic
uaauucccuggaugcuggaucuu

SEQ ID NO: 114841 - RNA, 24 nt, Artificial Sequence
  Synthetic
cuaauucccuggaugcuggaucuu

SEQ ID NO: 114842 - RNA, 21 nt, Artificial Sequence
  Synthetic
  misc_feature (18)..(18): n is a, c, g, or u
caugguccggugcuggunguu

SEQ ID NO: 114843 - RNA, 23 nt, Artificial Sequence
  Synthetic
  misc_feature (20)..(20): n is a, c, g, or u
ugcaugguccggugcuggunguu

SEQ ID NO: 114844 - RNA, 24 nt, Artificial Sequence
  Synthetic
  misc_feature (21)..(21): n is a, c, g, or u
uugcaugguccggugcuggunguu

SEQ ID NO: 114845 - RNA, 22 nt, Artificial Sequence
  Synthetic
uguugauaagauaggggcauuu

SEQ ID NO: 114846 - RNA, 24 nt, Artificial Sequence
  Synthetic
aguguugauaagauaggggcauuu

SEQ ID NO: 114847 - RNA, 18 nt, Artificial Sequence
  Synthetic
caacuggccggacgccaa

SEQ ID NO: 114848 - RNA, 19 nt, Artificial Sequence
  Synthetic
acaacuggccggacgccaa

SEQ ID NO: 114849 - RNA, 23 nt, Artificial Sequence
  Synthetic
uggcugcuaggcugugcugccaa

SEQ ID NO: 114850 - RNA, 24 nt, Artificial Sequence
  Synthetic
auggcugcuaggcugugcugccaa

SEQ ID NO: 114851 - RNA, 21 nt, Artificial Sequence
  Synthetic
acuaggaggcuguaggcauaa

SEQ ID NO: 114852 - RNA, 22 nt, Artificial Sequence
  Synthetic
uacuaggaggcuguaggcauaa

SEQ ID NO: 114853 - RNA, 24 nt, Artificial Sequence
  Synthetic
uguacuaggaggcuguaggcauaa

SEQ ID NO: 114854 - RNA, 22 nt, Artificial Sequence
  Synthetic
  misc_feature (3)..(3): n is a, c, g, or u
agngacacucauccucaggcca

SEQ ID NO: 114855 - RNA, 23 nt, Artificial Sequence
  Synthetic
  misc_feature (4)..(4): n is a, c, g, or u
aagngacacucauccucaggcca

SEQ ID NO: 114856 - RNA, 24 nt, Artificial Sequence
  Synthetic
  misc_feature (5)..(5): n is a, c, g, or u
uaagngacacucauccucaggcca

SEQ ID NO: 114857 - RNA, 18 nt, Artificial Sequence
  Synthetic
ccgcuuguuuugcucgca

SEQ ID NO: 114858 - RNA, 20 nt, Artificial Sequence
  Synthetic
agccgcuuguuuugcucgca

SEQ ID NO: 114859 - RNA, 21 nt, Artificial Sequence
  Synthetic
uagccgcuuguuuugcucgca

SEQ ID NO: 114860 - RNA, 22 nt, Artificial Sequence
  Synthetic
cuagccgcuuguuuugcucgca

SEQ ID NO: 114861 - RNA, 23 nt, Artificial Sequence
  Synthetic
ccuagccgcuuguuuugcucgca

SEQ ID NO: 114862 - RNA, 24 nt, Artificial Sequence
  Synthetic
uccuagccgcuuguuuugcucgca

SEQ ID NO: 114863 - RNA, 18 nt, Artificial Sequence
  Synthetic
cucaaucgccgcgucgca

SEQ ID NO: 114864 - RNA, 19 nt, Artificial Sequence
  Synthetic
ucucaaucgccgcgucgca

SEQ ID NO: 114865 - RNA, 21 nt, Artificial Sequence
  Synthetic
ccugcauucaaagccaacuca

SEQ ID NO: 114866 - RNA, 22 nt, Artificial Sequence
  Synthetic
cccugcauucaaagccaacuca

SEQ ID NO: 114867 - RNA, 23 nt, Artificial Sequence
  Synthetic
acccugcauucaaagccaacuca

SEQ ID NO: 114868 - RNA, 22 nt, Artificial Sequence
  Synthetic
uggggauauucccuuaacuuca

SEQ ID NO: 114869 - RNA, 23 nt, Artificial Sequence
  Synthetic
auggggauauucccuuaacuuca

SEQ ID NO: 114870 - RNA, 22 nt, Artificial Sequence
  Synthetic
uggaagauccagcauccaggga

SEQ ID NO: 114871 - RNA, 23 nt, Artificial Sequence
  Synthetic
uuggaagauccagcauccaggga

SEQ ID NO: 114872 - RNA, 24 nt, Artificial Sequence
  Synthetic
uuuggaagauccagcauccaggga

SEQ ID NO: 114873 - RNA, 21 nt, Artificial Sequence
  Synthetic
aaucuagccaccuggguggga

SEQ ID NO: 114874 - RNA, 23 nt, Artificial Sequence
  Synthetic
ugaaucuagccaccuggguggga

SEQ ID NO: 114875 - RNA, 24 nt, Artificial Sequence
  Synthetic
augaaucuagccaccuggguggga

SEQ ID NO: 114876 - RNA, 18 nt, Artificial Sequence
  Synthetic
cucccucgccucgcagac

SEQ ID NO: 114877 - RNA, 19 nt, Artificial Sequence
  Synthetic
acucccucgccucgcagac

SEQ ID NO: 114878 - RNA, 20 nt, Artificial Sequence
  Synthetic
aacucccucgccucgcagac

SEQ ID NO: 114879 - RNA, 22 nt, Artificial Sequence
  Synthetic
agaacucccucgccucgcagac

SEQ ID NO: 114880 - RNA, 23 nt, Artificial Sequence
  Synthetic
aagaacucccucgccucgcagac

SEQ ID NO: 114881 - RNA, 19 nt, Artificial Sequence
  Synthetic
cgggguuuuucuuguugac

SEQ ID NO: 114882 - RNA, 22 nt, Artificial Sequence
  Synthetic
aggcgggguuuuucuuguugac

SEQ ID NO: 114883 - RNA, 23 nt, Artificial Sequence
  Synthetic
caggcgggguuuuucuuguugac

SEQ ID NO: 114884 - RNA, 24 nt, Artificial Sequence
  Synthetic
acaggcgggguuuuucuuguugac

SEQ ID NO: 114885 - RNA, 22 nt, Artificial Sequence
  Synthetic
aguguuugcugacgcaaccccc

SEQ ID NO: 114886 - RNA, 23 nt, Artificial Sequence
  Synthetic
aaguguuugcugacgcaaccccc

SEQ ID NO: 114887 - RNA, 24 nt, Artificial Sequence
  Synthetic
caaguguuugcugacgcaaccccc

SEQ ID NO: 114888 - RNA, 22 nt, Artificial Sequence
  Synthetic
  misc_feature (12)..(12): n is a, c, g, or u
ugaacgcccacnggaaccugcc

SEQ ID NO: 114889 - RNA, 24 nt, Artificial Sequence
  Synthetic
  misc_feature (14)..(14): n is a, c, g, or u
cgugaacgcccacnggaaccugcc

SEQ ID NO: 114890 - RNA, 21 nt, Artificial Sequence
  Synthetic
uucaagccuccaagcugugcc

SEQ ID NO: 114891 - RNA, 23 nt, Artificial Sequence
  Synthetic
uguucaagccuccaagcugugcc

SEQ ID NO: 114892 - RNA, 24 nt, Artificial Sequence
  Synthetic
cuguucaagccuccaagcugugcc

SEQ ID NO: 114893 - RNA, 21 nt, Artificial Sequence
  Synthetic
agguauguugcccguuugucc

SEQ ID NO: 114894 - RNA, 22 nt, Artificial Sequence
  Synthetic
aagguauguugcccguuugucc

SEQ ID NO: 114895 - RNA, 23 nt, Artificial Sequence
  Synthetic
caagguauguugcccguuugucc

SEQ ID NO: 114896 - RNA, 24 nt, Artificial Sequence
  Synthetic
ucaagguauguugcccguuugucc

SEQ ID NO: 114897 - RNA, 21 nt, Artificial Sequence
  Synthetic
uuguacuaggaggcuguaggc

SEQ ID NO: 114898 - RNA, 22 nt, Artificial Sequence
  Synthetic
uuuguacuaggaggcuguaggc

SEQ ID NO: 114899 - RNA, 23 nt, Artificial Sequence
  Synthetic
cuuuguacuaggaggcuguaggc

SEQ ID NO: 114900 - RNA, 24 nt, Artificial Sequence
  Synthetic
ucuuuguacuaggaggcuguaggc

SEQ ID NO: 114901 - RNA, 21 nt, Artificial Sequence
  Synthetic
aaaauaccuaugggagugggc

SEQ ID NO: 114902 - RNA, 22 nt, Artificial Sequence
  Synthetic
caaaauaccuaugggagugggc

SEQ ID NO: 114903 - RNA, 24 nt, Artificial Sequence
  Synthetic
cgcaaaauaccuaugggagugggc

SEQ ID NO: 114904 - RNA, 21 nt, Artificial Sequence
  Synthetic
caaaauucgcagucccaaauc

SEQ ID NO: 114905 - RNA, 22 nt, Artificial Sequence
  Synthetic
ccaaaauucgcagucccaaauc

SEQ ID NO: 114906 - RNA, 24 nt, Artificial Sequence
  Synthetic
ugggggccaagucuguacaacauc

SEQ ID NO: 114907 - RNA, 18 nt, Artificial Sequence
  Synthetic
uggccaaaauucgcaguc

SEQ ID NO: 114908 - RNA, 19 nt, Artificial Sequence
  Synthetic
uuggccaaaauucgcaguc

SEQ ID NO: 114909 - RNA, 20 nt, Artificial Sequence
  Synthetic
cuuggccaaaauucgcaguc

SEQ ID NO: 114910 - RNA, 21 nt, Artificial Sequence
  Synthetic
ucuuggccaaaauucgcaguc

SEQ ID NO: 114911 - RNA, 23 nt, Artificial Sequence
  Synthetic
ugucuuggccaaaauucgcaguc

SEQ ID NO: 114912 - RNA, 21 nt, Artificial Sequence
  Synthetic
auggggacaaaucuuucuguc

SEQ ID NO: 114913 - RNA, 22 nt, Artificial Sequence
  Synthetic
cauggggacaaaucuuucuguc

SEQ ID NO: 114914 - RNA, 21 nt, Artificial Sequence
  Synthetic
cuuuacggggcuuuauucuuc

SEQ ID NO: 114915 - RNA, 22 nt, Artificial Sequence
  Synthetic
acuuuacggggcuuuauucuuc

SEQ ID NO: 114916 - RNA, 23 nt, Artificial Sequence
  Synthetic
aacuuuacggggcuuuauucuuc

SEQ ID NO: 114917 - RNA, 24 nt, Artificial Sequence
  Synthetic
aaacuuuacggggcuuuauucuuc

SEQ ID NO: 114918 - RNA, 21 nt, Artificial Sequence
  Synthetic
uaagaggacucuuggacuuuc

SEQ ID NO: 114919 - RNA, 22 nt, Artificial Sequence
  Synthetic
auaagaggacucuuggacuuuc

SEQ ID NO: 114920 - RNA, 23 nt, Artificial Sequence
  Synthetic
cauaagaggacucuuggacuuuc

SEQ ID NO: 114921 - RNA, 19 nt, Artificial Sequence
  Synthetic
uguuuacgucccgucggcg

SEQ ID NO: 114922 - RNA, 20 nt, Artificial Sequence
  Synthetic
uuguuuacgucccgucggcg

SEQ ID NO: 114923 - RNA, 21 nt, Artificial Sequence
  Synthetic
uccaauuuguccugguuaucg

SEQ ID NO: 114924 - RNA, 22 nt, Artificial Sequence
  Synthetic
cuccaauuuguccugguuaucg

SEQ ID NO: 114925 - RNA, 23 nt, Artificial Sequence
  Synthetic
ccuccaauuuguccugguuaucg

SEQ ID NO: 114926 - RNA, 24 nt, Artificial Sequence
  Synthetic
uccuccaauuuguccugguuaucg

SEQ ID NO: 114927 - RNA, 18 nt, Artificial Sequence
  Synthetic
caucaucuugggcuuucg

SEQ ID NO: 114928 - RNA, 19 nt, Artificial Sequence
  Synthetic
ccaucaucuugggcuuucg

SEQ ID NO: 114929 - RNA, 20 nt, Artificial Sequence
  Synthetic
cccaucaucuugggcuuucg

SEQ ID NO: 114930 - RNA, 21 nt, Artificial Sequence
  Synthetic
ucccaucaucuugggcuuucg

SEQ ID NO: 114931 - RNA, 22 nt, Artificial Sequence
  Synthetic
aucccaucaucuugggcuuucg

SEQ ID NO: 114932 - RNA, 23 nt, Artificial Sequence
  Synthetic
caucccaucaucuugggcuuucg

SEQ ID NO: 114933 - RNA, 24 nt, Artificial Sequence
  Synthetic
ccaucccaucaucuugggcuuucg

SEQ ID NO: 114934 - RNA, 23 nt, Artificial Sequence
  Synthetic
aggaccccugcucguguuacagg

SEQ ID NO: 114935 - RNA, 24 nt, Artificial Sequence
  Synthetic
uaggaccccugcucguguuacagg

SEQ ID NO: 114936 - RNA, 21 nt, Artificial Sequence
  Synthetic
ugcugguggcuccaguucagg

SEQ ID NO: 114937 - RNA, 22 nt, Artificial Sequence
  Synthetic
cugcugguggcuccaguucagg

SEQ ID NO: 114938 - RNA, 23 nt, Artificial Sequence
  Synthetic
ccugcugguggcuccaguucagg

SEQ ID NO: 114939 - RNA, 24 nt, Artificial Sequence
  Synthetic
uccugcugguggcuccaguucagg

SEQ ID NO: 114940 - RNA, 18 nt, Artificial Sequence
  Synthetic
cccguugcucggcaacgg

SEQ ID NO: 114941 - RNA, 19 nt, Artificial Sequence
  Synthetic
ccccguugcucggcaacgg

SEQ ID NO: 114942 - RNA, 20 nt, Artificial Sequence
  Synthetic
accccguugcucggcaacgg

SEQ ID NO: 114943 - RNA, 21 nt, Artificial Sequence
  Synthetic
aaaccucgaaaaggcaugggg

SEQ ID NO: 114944 - RNA, 22 nt, Artificial Sequence
  Synthetic
caaaccucgaaaaggcaugggg

SEQ ID NO: 114945 - RNA, 23 nt, Artificial Sequence
  Synthetic
ccaaaccucgaaaaggcaugggg

SEQ ID NO: 114946 - RNA, 24 nt, Artificial Sequence
  Synthetic
uccaaaccucgaaaaggcaugggg

SEQ ID NO: 114947 - RNA, 18 nt, Artificial Sequence
  Synthetic
ucaguccguuucucuugg

SEQ ID NO: 114948 - RNA, 19 nt, Artificial Sequence
  Synthetic
cucaguccguuucucuugg

SEQ ID NO: 114949 - RNA, 20 nt, Artificial Sequence
  Synthetic
ccucaguccguuucucuugg

SEQ ID NO: 114950 - RNA, 24 nt, Artificial Sequence
  Synthetic
ugggccucaguccguuucucuugg

SEQ ID NO: 114951 - RNA, 22 nt, Artificial Sequence
  Synthetic
agacuaaaauuaauuaugccug

SEQ ID NO: 114952 - RNA, 21 nt, Artificial Sequence
  Synthetic
caugcaacuuuuucaccucug

SEQ ID NO: 114953 - RNA, 22 nt, Artificial Sequence
  Synthetic
ccaugcaacuuuuucaccucug

SEQ ID NO: 114954 - RNA, 23 nt, Artificial Sequence
  Synthetic
accaugcaacuuuuucaccucug

SEQ ID NO: 114955 - RNA, 24 nt, Artificial Sequence
  Synthetic
caccaugcaacuuuuucaccucug

SEQ ID NO: 114956 - RNA, 21 nt, Artificial Sequence
  Synthetic
  misc_feature (11)..(11): n is a, c, g, or u
ucggcaacggncuggucugug

SEQ ID NO: 114957 - RNA, 22 nt, Artificial Sequence
  Synthetic
  misc_feature (12)..(12): n is a, c, g, or u
cucggcaacggncuggucugug

SEQ ID NO: 114958 - RNA, 24 nt, Artificial Sequence
  Synthetic
  misc_feature (14)..(14): n is a, c, g, or u
ugcucggcaacggncuggucugug

SEQ ID NO: 114959 - RNA, 21 nt, Artificial Sequence
  Synthetic
accugggugggaaguaauuug

SEQ ID NO: 114960 - RNA, 22 nt, Artificial Sequence
  Synthetic
caccugggugggaaguaauuug

SEQ ID NO: 114961 - RNA, 23 nt, Artificial Sequence
  Synthetic
ccaccugggugggaaguaauuug

SEQ ID NO: 114962 - RNA, 18 nt, Artificial Sequence
  Synthetic
aaucucgggaaucucaau

SEQ ID NO: 114963 - RNA, 19 nt, Artificial Sequence
  Synthetic
caaucucgggaaucucaau

SEQ ID NO: 114964 - RNA, 20 nt, Artificial Sequence
  Synthetic
ucaaucucgggaaucucaau

SEQ ID NO: 114965 - RNA, 21 nt, Artificial Sequence
  Synthetic
cucaaucucgggaaucucaau

SEQ ID NO: 114966 - RNA, 22 nt, Artificial Sequence
  Synthetic
ucucaaucucgggaaucucaau

SEQ ID NO: 114967 - RNA, 23 nt, Artificial Sequence
  Synthetic
aucucaaucucgggaaucucaau

SEQ ID NO: 114968 - RNA, 22 nt, Artificial Sequence
  Synthetic
agaagaucucaaucucgggaau

SEQ ID NO: 114969 - RNA, 23 nt, Artificial Sequence
  Synthetic
cagaagaucucaaucucgggaau

SEQ ID NO: 114970 - RNA, 18 nt, Artificial Sequence
  Synthetic
cgccgcgucgcagaagau

SEQ ID NO: 114971 - RNA, 19 nt, Artificial Sequence
  Synthetic
ucgccgcgucgcagaagau

SEQ ID NO: 114972 - RNA, 20 nt, Artificial Sequence
  Synthetic
aucgccgcgucgcagaagau

SEQ ID NO: 114973 - RNA, 22 nt, Artificial Sequence
  Synthetic
ugggcuuucgcaaaauaccuau

SEQ ID NO: 114974 - RNA, 23 nt, Artificial Sequence
  Synthetic
uugggcuuucgcaaaauaccuau

SEQ ID NO: 114975 - RNA, 24 nt, Artificial Sequence
  Synthetic
cuugggcuuucgcaaaauaccuau

SEQ ID NO: 114976 - RNA, 21 nt, Artificial Sequence
  Synthetic
caauaccacagagucuagacu

SEQ ID NO: 114977 - RNA, 22 nt, Artificial Sequence
  Synthetic
acaauaccacagagucuagacu

SEQ ID NO: 114978 - RNA, 23 nt, Artificial Sequence
  Synthetic
cacaauaccacagagucuagacu

SEQ ID NO: 114979 - RNA, 24 nt, Artificial Sequence
  Synthetic
ucacaauaccacagagucuagacu

SEQ ID NO: 114980 - RNA, 18 nt, Artificial Sequence
  Synthetic
cucuguaucgggaggccu

SEQ ID NO: 114981 - RNA, 20 nt, Artificial Sequence
  Synthetic
ugcucuguaucgggaggccu

SEQ ID NO: 114982 - RNA, 21 nt, Artificial Sequence
  Synthetic
cugcucuguaucgggaggccu

SEQ ID NO: 114983 - RNA, 22 nt, Artificial Sequence
  Synthetic
ucugcucuguaucgggaggccu

SEQ ID NO: 114984 - RNA, 23 nt, Artificial Sequence
  Synthetic
cucugcucuguaucgggaggccu

SEQ ID NO: 114985 - RNA, 24 nt, Artificial Sequence
  Synthetic
ccucugcucuguaucgggaggccu

SEQ ID NO: 114986 - RNA, 24 nt, Artificial Sequence
  Synthetic
agggcuuucccccacugucuggcu

SEQ ID NO: 114987 - RNA, 21 nt, Artificial Sequence
  Synthetic
ucaggaacagugagcccugcu

SEQ ID NO: 114988 - RNA, 22 nt, Artificial Sequence
  Synthetic
uucaggaacagugagcccugcu

SEQ ID NO: 114989 - RNA, 24 nt, Artificial Sequence
  Synthetic
aguucaggaacagugagcccugcu

SEQ ID NO: 114990 - RNA, 21 nt, Artificial Sequence
  Synthetic
uggaaccuuugugucuccucu

SEQ ID NO: 114991 - RNA, 23 nt, Artificial Sequence
  Synthetic
cguggaaccuuugugucuccucu

SEQ ID NO: 114992 - RNA, 19 nt, Artificial Sequence
  Synthetic
agacucgugguggacuucu

SEQ ID NO: 114993 - RNA, 20 nt, Artificial Sequence
  Synthetic
uagacucgugguggacuucu

SEQ ID NO: 114994 - RNA, 21 nt, Artificial Sequence
  Synthetic
cuagacucgugguggacuucu

SEQ ID NO: 114995 - RNA, 22 nt, Artificial Sequence
  Synthetic
ucuagacucgugguggacuucu

SEQ ID NO: 114996 - RNA, 24 nt, Artificial Sequence
  Synthetic
agucuagacucgugguggacuucu

SEQ ID NO: 114997 - RNA, 20 nt, Artificial Sequence
  Synthetic
uggccggacgccaacaaggu

SEQ ID NO: 114998 - RNA, 21 nt, Artificial Sequence
  Synthetic
cuggccggacgccaacaaggu

SEQ ID NO: 114999 - RNA, 22 nt, Artificial Sequence
  Synthetic
acuggccggacgccaacaaggu

SEQ ID NO: 115000 - RNA, 23 nt, Artificial Sequence
  Synthetic
aacuggccggacgccaacaaggu

SEQ ID NO: 115001 - RNA, 24 nt, Artificial Sequence
  Synthetic
caacuggccggacgccaacaaggu

SEQ ID NO: 115002 - RNA, 18 nt, Artificial Sequence
  Synthetic
cgccucgcagacgaaggu

SEQ ID NO: 115003 - RNA, 19 nt, Artificial Sequence
  Synthetic
ucgccucgcagacgaaggu

SEQ ID NO: 115004 - RNA, 20 nt, Artificial Sequence
  Synthetic
cucgccucgcagacgaaggu

SEQ ID NO: 115005 - RNA, 21 nt, Artificial Sequence
  Synthetic
cucaggcaagcuauucugugu

SEQ ID NO: 115006 - RNA, 22 nt, Artificial Sequence
  Synthetic
acucaggcaagcuauucugugu

SEQ ID NO: 115007 - RNA, 23 nt, Artificial Sequence
  Synthetic
cacucaggcaagcuauucugugu

SEQ ID NO: 115008 - RNA, 21 nt, Artificial Sequence
  Synthetic
ccgugugucuuggccaaaauu

SEQ ID NO: 115009 - RNA, 22 nt, Artificial Sequence
  Synthetic
cccgugugucuuggccaaaauu

SEQ ID NO: 115010 - RNA, 23 nt, Artificial Sequence
  Synthetic
acccgugugucuuggccaaaauu

SEQ ID NO: 115011 - RNA, 24 nt, Artificial Sequence
  Synthetic
cacccgugugucuuggccaaaauu

SEQ ID NO: 115012 - RNA, 21 nt, Artificial Sequence
  Synthetic
agauccagcauccagggaauu

SEQ ID NO: 115013 - RNA, 22 nt, Artificial Sequence
  Synthetic
aagauccagcauccagggaauu

SEQ ID NO: 115014 - RNA, 22 nt, Artificial Sequence
  Synthetic
ugcugcuaugccucaucuucuu

SEQ ID NO: 115015 - RNA, 23 nt, Artificial Sequence
  Synthetic
cugcugcuaugccucaucuucuu

SEQ ID NO: 115016 - RNA, 24 nt, Artificial Sequence
  Synthetic
ccugcugcuaugccucaucuucuu

SEQ ID NO: 115017 - RNA, 21 nt, Artificial Sequence
  Synthetic
ccguuucucuuggcucaguuu

SEQ ID NO: 115018 - RNA, 22 nt, Artificial Sequence
  Synthetic
uccguuucucuuggcucaguuu

SEQ ID NO: 115019 - RNA, 24 nt, Artificial Sequence
  Synthetic
aguccguuucucuuggcucaguuu

SEQ ID NO: 115020 - RNA, 19 nt, Artificial Sequence
  Synthetic
gaagucagaaggcaaaaaa

SEQ ID NO: 115021 - RNA, 23 nt, Artificial Sequence
  Synthetic
gaaagaagucagaaggcaaaaaa

SEQ ID NO: 115022 - RNA, 24 nt, Artificial Sequence
  Synthetic
ggaaagaagucagaaggcaaaaaa

SEQ ID NO: 115023 - RNA, 18 nt, Artificial Sequence
  Synthetic
guauacccaaagacaaaa

SEQ ID NO: 115024 - RNA, 22 nt, Artificial Sequence
  Synthetic
guauacccaaagacaaaagaaa

SEQ ID NO: 115025 - RNA, 18 nt, Artificial Sequence
  Synthetic
guccagaagaaccaacaa

SEQ ID NO: 115026 - RNA, 19 nt, Artificial Sequence
  Synthetic
guauuuugcgaaagcccaa

SEQ ID NO: 115027 - RNA, 20 nt, Artificial Sequence
  Synthetic
gguauuuugcgaaagcccaa

SEQ ID NO: 115028 - RNA, 20 nt, Artificial Sequence
  Synthetic
  misc_feature (5)..(5): n is a, c, g, or u
guagnucuuguucccaagaa

SEQ ID NO: 115029 - RNA, 23 nt, Artificial Sequence
  Synthetic
  misc_feature (8)..(8): n is a, c, g, or u
gcuguagnucuuguucccaagaa

SEQ ID NO: 115030 - RNA, 18 nt, Artificial Sequence
  Synthetic
  misc_feature (10)..(10): n is a, c, g, or u
gaucucgaanagaaggaa

SEQ ID NO: 115031 - RNA, 21 nt, Artificial Sequence
  Synthetic
  misc_feature (2)..(2): n is a, c, g, or u
  misc_feature (13)..(13): n is a, c, g, or u
gnagaucucgaanagaaggaa

SEQ ID NO: 115032 - RNA, 23 nt, Artificial Sequence
  Synthetic
  misc_feature (4)..(4): n is a, c, g, or u
  misc_feature (15)..(15): n is a, c, g, or u
gagnagaucucgaanagaaggaa

SEQ ID NO: 115033 - RNA, 19 nt, Artificial Sequence
  Synthetic
gcagcaggaugcagaggaa

SEQ ID NO: 115034 - RNA, 24 nt, Artificial Sequence
  Synthetic
gcauagcagcaggaugcagaggaa

SEQ ID NO: 115035 - RNA, 23 nt, Artificial Sequence
  Synthetic
  misc_feature (13)..(13): n is a, c, g, or u
gauuaacuacauncucuggauaa

SEQ ID NO: 115036 - RNA, 22 nt, Artificial Sequence
  Synthetic
  misc_feature (8)..(8): n is a, c, g, or u
gauucaunaacucaccccaaca

SEQ ID NO: 115037 - RNA, 19 nt, Artificial Sequence
  Synthetic
gaacaguaggacaugaaca

SEQ ID NO: 115038 - RNA, 23 nt, Artificial Sequence
  Synthetic
  misc_feature (9)..(9): n is a, c, g, or u
guuucucunccaaaaguaagaca

SEQ ID NO: 115039 - RNA, 18 nt, Artificial Sequence
  Synthetic
  misc_feature (4)..(4): n is a, c, g, or u
gccnauggccaagcccca

SEQ ID NO: 115040 - RNA, 19 nt, Artificial Sequence
  Synthetic
  misc_feature (5)..(5): n is a, c, g, or u
ggccnauggccaagcccca

SEQ ID NO: 115041 - RNA, 22 nt, Artificial Sequence
  Synthetic
  misc_feature (8)..(8): n is a, c, g, or u
gauggccnauggccaagcccca

SEQ ID NO: 115042 - RNA, 18 nt, Artificial Sequence
  Synthetic
  misc_feature (8)..(8): n is a, c, g, or u
gaucgggnaagaauccca

SEQ ID NO: 115043 - RNA, 21 nt, Artificial Sequence
  Synthetic
  misc_feature (11)..(11): n is a, c, g, or u
gaugaucgggnaagaauccca

SEQ ID NO: 115044 - RNA, 19 nt, Artificial Sequence
  Synthetic
gcuuugaaugcagggucca

SEQ ID NO: 115045 - RNA, 20 nt, Artificial Sequence
  Synthetic
ggcuuugaaugcagggucca

SEQ ID NO: 115046 - RNA, 21 nt, Artificial Sequence
  Synthetic
  misc_feature (16)..(16): n is a, c, g, or u
guuucccaccuuaugngucca

SEQ ID NO: 115047 - RNA, 18 nt, Artificial Sequence
  Synthetic
guugauaagauaggggca

SEQ ID NO: 115048 - RNA, 20 nt, Artificial Sequence
  Synthetic
guguugauaagauaggggca

SEQ ID NO: 115049 - RNA, 23 nt, Artificial Sequence
  Synthetic
gaaguguugauaagauaggggca

SEQ ID NO: 115050 - RNA, 24 nt, Artificial Sequence
  Synthetic
ggaaguguugauaagauaggggca

SEQ ID NO: 115051 - RNA, 18 nt, Artificial Sequence
  Synthetic
gaggugaagcgaagugca

SEQ ID NO: 115052 - RNA, 22 nt, Artificial Sequence
  Synthetic
gcaaaugaaugucaggaaaaga

SEQ ID NO: 115053 - RNA, 20 nt, Artificial Sequence
  Synthetic
gccucccgauacagagcaga

SEQ ID NO: 115054 - RNA, 18 nt, Artificial Sequence
  Synthetic
  misc_feature (15)..(15): n is a, c, g, or u
gauugacgauauggnaga

SEQ ID NO: 115055 - RNA, 23 nt, Artificial Sequence
  Synthetic
  misc_feature (20)..(20): n is a, c, g, or u
gauaagauugacgauauggnaga

SEQ ID NO: 115056 - RNA, 22 nt, Artificial Sequence
  Synthetic
  misc_feature (6)..(6): n is a, c, g, or u
  misc_feature (15)..(15): n is a, c, g, or u
  misc_feature (18)..(18): n is a, c, g, or u
guauanuugcggganagnacga

SEQ ID NO: 115057 - RNA, 20 nt, Artificial Sequence
  Synthetic
gaccuucgucugcgaggcga

SEQ ID NO: 115058 - RNA, 18 nt, Artificial Sequence
  Synthetic
gagcagaggcggugucga

SEQ ID NO: 115059 - RNA, 21 nt, Artificial Sequence
  Synthetic
  misc_feature (13)..(14): n is a, c, g, or u
guaaauaaugucnngucugga

SEQ ID NO: 115060 - RNA, 22 nt, Artificial Sequence
  Synthetic
  misc_feature (20)..(20): n is a, c, g, or u
gaacaguaggacaugaacanga

SEQ ID NO: 115061 - RNA, 18 nt, Artificial Sequence
  Synthetic
ggguccuaggaguccuga

SEQ ID NO: 115062 - RNA, 19 nt, Artificial Sequence
  Synthetic
gggguccuaggaguccuga

SEQ ID NO: 115063 - RNA, 22 nt, Artificial Sequence
  Synthetic
gcagggguccuaggaguccuga

SEQ ID NO: 115064 - RNA, 24 nt, Artificial Sequence
  Synthetic
gagcagggguccuaggaguccuga

SEQ ID NO: 115065 - RNA, 19 nt, Artificial Sequence
  Synthetic
gaugauuaggcagagguga

SEQ ID NO: 115066 - RNA, 21 nt, Artificial Sequence
  Synthetic
gagaugauuaggcagagguga

SEQ ID NO: 115067 - RNA, 20 nt, Artificial Sequence
  Synthetic
guaguuuccggaaguguuga

SEQ ID NO: 115068 - RNA, 24 nt, Artificial Sequence
  Synthetic
  misc_feature (4)..(4): n is a, c, g, or u
gaunccuuuaucuaagggcaaaua

SEQ ID NO: 115069 - RNA, 20 nt, Artificial Sequence
  Synthetic
gauaaaaccuagcaggcaua

SEQ ID NO: 115070 - RNA, 21 nt, Artificial Sequence
  Synthetic
ggauaaaaccuagcaggcaua

SEQ ID NO: 115071 - RNA, 19 nt, Artificial Sequence
  Synthetic
  misc_feature (5)..(5): n is a, c, g, or u
  misc_feature (7)..(7): n is a, c, g, or u
gugungncucucuuuuaua

SEQ ID NO: 115072 - RNA, 24 nt, Artificial Sequence
  Synthetic
  misc_feature (10)..(10): n is a, c, g, or u
  misc_feature (12)..(12): n is a, c, g, or u
gcuacgugungncucucuuuuaua

SEQ ID NO: 115073 - RNA, 19 nt, Artificial Sequence
  Synthetic
  misc_feature (15)..(15): n is a, c, g, or u
gccuuccaaagagunugua

SEQ ID NO: 115074 - RNA, 21 nt, Artificial Sequence
  Synthetic
guaagacaggaaaugugaaac

SEQ ID NO: 115075 - RNA, 18 nt, Artificial Sequence
  Synthetic
  misc_feature (6)..(6): n is a, c, g, or u
gccucnucgucuaacaac

SEQ ID NO: 115076 - RNA, 23 nt, Artificial Sequence
  Synthetic
  misc_feature (11)..(11): n is a, c, g, or u
gaccugccucnucgucuaacaac

SEQ ID NO: 115077 - RNA, 24 nt, Artificial Sequence
  Synthetic
  misc_feature (12)..(12): n is a, c, g, or u
ggaccugccucnucgucuaacaac

SEQ ID NO: 115078 - RNA, 20 nt, Artificial Sequence
  Synthetic
  misc_feature (11)..(11): n is a, c, g, or u
gaccugccucnucgucuaac

SEQ ID NO: 115079 - RNA, 18 nt, Artificial Sequence
  Synthetic
gaauuuuggccaagacac

SEQ ID NO: 115080 - RNA, 20 nt, Artificial Sequence
  Synthetic
gcgaauuuuggccaagacac

SEQ ID NO: 115081 - RNA, 18 nt, Artificial Sequence
  Synthetic
gaucggcagaggagacac

SEQ ID NO: 115082 - RNA, 19 nt, Artificial Sequence
  Synthetic
ggaucggcagaggagacac

SEQ ID NO: 115083 - RNA, 22 nt, Artificial Sequence
  Synthetic
gaucuuccaaauuacuucccac

SEQ ID NO: 115084 - RNA, 23 nt, Artificial Sequence
  Synthetic
ggaucuuccaaauuacuucccac

SEQ ID NO: 115085 - RNA, 18 nt, Artificial Sequence
  Synthetic
  misc_feature (6)..(6): n is a, c, g, or u
guuccngugggcguucac

SEQ ID NO: 115086 - RNA, 19 nt, Artificial Sequence
  Synthetic
  misc_feature (7)..(7): n is a, c, g, or u
gguuccngugggcguucac

SEQ ID NO: 115087 - RNA, 22 nt, Artificial Sequence
  Synthetic
  misc_feature (10)..(10): n is a, c, g, or u
gcagguuccngugggcguucac

SEQ ID NO: 115088 - RNA, 23 nt, Artificial Sequence
  Synthetic
  misc_feature (11)..(11): n is a, c, g, or u
ggcagguuccngugggcguucac

SEQ ID NO: 115089 - RNA, 24 nt, Artificial Sequence
  Synthetic
  misc_feature (12)..(12): n is a, c, g, or u
gggcagguuccngugggcguucac

SEQ ID NO: 115090 - RNA, 18 nt, Artificial Sequence
  Synthetic
gacaaacgggcaacauac

SEQ ID NO: 115091 - RNA, 19 nt, Artificial Sequence
  Synthetic
ggacaaacgggcaacauac

SEQ ID NO: 115092 - RNA, 21 nt, Artificial Sequence
  Synthetic
gaggacaaacgggcaacauac

SEQ ID NO: 115093 - RNA, 20 nt, Artificial Sequence
  Synthetic
  misc_feature (3)..(3): n is a, c, g, or u
gcngcaaaccccaaaagacc

SEQ ID NO: 115094 - RNA, 21 nt, Artificial Sequence
  Synthetic
  misc_feature (4)..(4): n is a, c, g, or u
ggcngcaaaccccaaaagacc

SEQ ID NO: 115095 - RNA, 22 nt, Artificial Sequence
  Synthetic
  misc_feature (5)..(5): n is a, c, g, or u
gggcngcaaaccccaaaagacc

SEQ ID NO: 115096 - RNA, 23 nt, Artificial Sequence
  Synthetic
  misc_feature (6)..(6): n is a, c, g, or u
ggggcngcaaaccccaaaagacc

SEQ ID NO: 115097 - RNA, 18 nt, Artificial Sequence
  Synthetic
gccugagggcuccacccc

SEQ ID NO: 115098 - RNA, 20 nt, Artificial Sequence
  Synthetic
gagccugagggcuccacccc

SEQ ID NO: 115099 - RNA, 18 nt, Artificial Sequence
  Synthetic
guaaagagaggugcgccc

SEQ ID NO: 115100 - RNA, 20 nt, Artificial Sequence
  Synthetic
gcguaaagagaggugcgccc

SEQ ID NO: 115101 - RNA, 18 nt, Artificial Sequence
  Synthetic
ggacugaggcccacuccc

SEQ ID NO: 115102 - RNA, 23 nt, Artificial Sequence
  Synthetic
gaaacggacugaggcccacuccc

SEQ ID NO: 115103 - RNA, 18 nt, Artificial Sequence
  Synthetic
  misc_feature (8)..(8): n is a, c, g, or u
gcuguagnucuuguuccc

SEQ ID NO: 115104 - RNA, 18 nt, Artificial Sequence
  Synthetic
  misc_feature (7)..(7): n is a, c, g, or u
gcuggunguugaugaucc

SEQ ID NO: 115105 - RNA, 20 nt, Artificial Sequence
  Synthetic
  misc_feature (9)..(9): n is a, c, g, or u
gugcuggunguugaugaucc

SEQ ID NO: 115106 - RNA, 20 nt, Artificial Sequence
  Synthetic
guugacauugcugaaagucc

SEQ ID NO: 115107 - RNA, 22 nt, Artificial Sequence
  Synthetic
gacauagcugacuacuaauucc

SEQ ID NO: 115108 - RNA, 21 nt, Artificial Sequence
  Synthetic
gaauacuaacauugagauucc

SEQ ID NO: 115109 - RNA, 22 nt, Artificial Sequence
  Synthetic
ggaauacuaacauugagauucc

SEQ ID NO: 115110 - RNA, 20 nt, Artificial Sequence
  Synthetic
gucuaacaacaguaguuucc

SEQ ID NO: 115111 - RNA, 19 nt, Artificial Sequence
  Synthetic
  misc_feature (6)..(6): n is a, c, g, or u
gaacangagaugauuaggc

SEQ ID NO: 115112 - RNA, 24 nt, Artificial Sequence
  Synthetic
  misc_feature (11)..(11): n is a, c, g, or u
gacaugaacangagaugauuaggc

SEQ ID NO: 115113 - RNA, 18 nt, Artificial Sequence
  Synthetic
  misc_feature (6)..(7): n is a, c, g, or u
ggaggnnugaacccuggc

SEQ ID NO: 115114 - RNA, 19 nt, Artificial Sequence
  Synthetic
  misc_feature (7)..(8): n is a, c, g, or u
gggaggnnugaacccuggc

SEQ ID NO: 115115 - RNA, 20 nt, Artificial Sequence
  Synthetic
  misc_feature (8)..(9): n is a, c, g, or u
ggggaggnnugaacccuggc

SEQ ID NO: 115116 - RNA, 21 nt, Artificial Sequence
  Synthetic
  misc_feature (11)..(11): n is a, c, g, or u
gaaaguacagngcccugacuc

SEQ ID NO: 115117 - RNA, 22 nt, Artificial Sequence
  Synthetic
  misc_feature (12)..(12): n is a, c, g, or u
ggaaaguacagngcccugacuc

SEQ ID NO: 115118 - RNA, 18 nt, Artificial Sequence
  Synthetic
gguacaggguccccaguc

SEQ ID NO: 115119 - RNA, 19 nt, Artificial Sequence
  Synthetic
gcauauaaaggcauuaaag

SEQ ID NO: 115120 - RNA, 21 nt, Artificial Sequence
  Synthetic
  misc_feature (9)..(9): n is a, c, g, or u
  misc_feature (11)..(11): n is a, c, g, or u
guuugccanunaggauuaaag

SEQ ID NO: 115121 - RNA, 23 nt, Artificial Sequence
  Synthetic
  misc_feature (11)..(11): n is a, c, g, or u
  misc_feature (13)..(13): n is a, c, g, or u
gaguuugccanunaggauuaaag

SEQ ID NO: 115122 - RNA, 24 nt, Artificial Sequence
  Synthetic
  misc_feature (12)..(12): n is a, c, g, or u
  misc_feature (14)..(14): n is a, c, g, or u
ggaguuugccanunaggauuaaag

SEQ ID NO: 115123 - RNA, 21 nt, Artificial Sequence
  Synthetic
gucuuugaaguaugccucaag

SEQ ID NO: 115124 - RNA, 23 nt, Artificial Sequence
  Synthetic
  misc_feature (10)..(10): n is a, c, g, or u
gaaucccagnggauuggggacag

SEQ ID NO: 115125 - RNA, 19 nt, Artificial Sequence
  Synthetic
gaacuggagccaccagcag

SEQ ID NO: 115126 - RNA, 18 nt, Artificial Sequence
  Synthetic
gaagaugaggcauagcag

SEQ ID NO: 115127 - RNA, 20 nt, Artificial Sequence
  Synthetic
gacucugggaucuugaagag

SEQ ID NO: 115128 - RNA, 21 nt, Artificial Sequence
  Synthetic
gcauagcagcaggaugcagag

SEQ ID NO: 115129 - RNA, 22 nt, Artificial Sequence
  Synthetic
ggcauagcagcaggaugcagag

SEQ ID NO: 115130 - RNA, 24 nt, Artificial Sequence
  Synthetic
gaggcauagcagcaggaugcagag

SEQ ID NO: 115131 - RNA, 20 nt, Artificial Sequence
  Synthetic
  misc_feature (4)..(4): n is a, c, g, or u
guunccccuagaaaauugag

SEQ ID NO: 115132 - RNA, 22 nt, Artificial Sequence
  Synthetic
  misc_feature (6)..(6): n is a, c, g, or u
guguunccccuagaaaauugag

SEQ ID NO: 115133 - RNA, 23 nt, Artificial Sequence
  Synthetic
  misc_feature (7)..(7): n is a, c, g, or u
gguguunccccuagaaaauugag

SEQ ID NO: 115134 - RNA, 24 nt, Artificial Sequence
  Synthetic
  misc_feature (8)..(8): n is a, c, g, or u
ggguguunccccuagaaaauugag

SEQ ID NO: 115135 - RNA, 21 nt, Artificial Sequence
  Synthetic
  misc_feature (9)..(10): n is a, c, g, or u
gauuaaagnnagguaccguag

SEQ ID NO: 115136 - RNA, 22 nt, Artificial Sequence
  Synthetic
  misc_feature (10)..(11): n is a, c, g, or u
ggauuaaagnnagguaccguag

SEQ ID NO: 115137 - RNA, 18 nt, Artificial Sequence
  Synthetic
gaugagaaggcacagacg

SEQ ID NO: 115138 - RNA, 23 nt, Artificial Sequence
  Synthetic
guucccaagaauauggugacccg

SEQ ID NO: 115139 - RNA, 19 nt, Artificial Sequence
  Synthetic
guagaagaauaaagccccg

SEQ ID NO: 115140 - RNA, 19 nt, Artificial Sequence
  Synthetic
gcugccuuccugacugccg

SEQ ID NO: 115141 - RNA, 20 nt, Artificial Sequence
  Synthetic
ggcugccuuccugacugccg

SEQ ID NO: 115142 - RNA, 20 nt, Artificial Sequence
  Synthetic
gccccgggaggggucguccg

SEQ ID NO: 115143 - RNA, 20 nt, Artificial Sequence
  Synthetic
  misc_feature (5)..(6): n is a, c, g, or u
  misc_feature (10)..(10): n is a, c, g, or u
guacnncagncggagaagcg

SEQ ID NO: 115144 - RNA, 21 nt, Artificial Sequence
  Synthetic
  misc_feature (6)..(7): n is a, c, g, or u
  misc_feature (11)..(11): n is a, c, g, or u
gguacnncagncggagaagcg

SEQ ID NO: 115145 - RNA, 24 nt, Artificial Sequence
  Synthetic
  misc_feature (9)..(10): n is a, c, g, or u
  misc_feature (14)..(14): n is a, c, g, or u
gucgguacnncagncggagaagcg

SEQ ID NO: 115146 - RNA, 21 nt, Artificial Sequence
  Synthetic
  misc_feature (8)..(8): n is a, c, g, or u
guuugaunccuuuaucuaagg

SEQ ID NO: 115147 - RNA, 22 nt, Artificial Sequence
  Synthetic
  misc_feature (9)..(9): n is a, c, g, or u
gguuugaunccuuuaucuaagg

SEQ ID NO: 115148 - RNA, 19 nt, Artificial Sequence
  Synthetic
gaugggaugggaauacagg

SEQ ID NO: 115149 - RNA, 22 nt, Artificial Sequence
  Synthetic
gaugaugggaugggaauacagg

SEQ ID NO: 115150 - RNA, 18 nt, Artificial Sequence
  Synthetic
gccccaagcggccccggg

SEQ ID NO: 115151 - RNA, 20 nt, Artificial Sequence
  Synthetic
gagccccaagcggccccggg

SEQ ID NO: 115152 - RNA, 20 nt, Artificial Sequence
  Synthetic
  misc_feature (18)..(18): n is a, c, g, or u
gcuccaaauucuuuauangg

SEQ ID NO: 115153 - RNA, 23 nt, Artificial Sequence
  Synthetic
  misc_feature (21)..(21): n is a, c, g, or u
gaagcuccaaauucuuuauangg

SEQ ID NO: 115154 - RNA, 20 nt, Artificial Sequence
  Synthetic
  misc_feature (3)..(3): n is a, c, g, or u
gungugcagguuuugcaugg

SEQ ID NO: 115155 - RNA, 22 nt, Artificial Sequence
  Synthetic
  misc_feature (5)..(5): n is a, c, g, or u
gagungugcagguuuugcaugg

SEQ ID NO: 115156 - RNA, 23 nt, Artificial Sequence
  Synthetic
  misc_feature (6)..(6): n is a, c, g, or u
ggagungugcagguuuugcaugg

SEQ ID NO: 115157 - RNA, 20 nt, Artificial Sequence
  Synthetic
gcaggaggaggagcugcugg

SEQ ID NO: 115158 - RNA, 21 nt, Artificial Sequence
  Synthetic
ggcaggaggaggagcugcugg

SEQ ID NO: 115159 - RNA, 23 nt, Artificial Sequence
  Synthetic
gaggcaggaggaggagcugcugg

SEQ ID NO: 115160 - RNA, 24 nt, Artificial Sequence
  Synthetic
ggaggcaggaggaggagcugcugg

SEQ ID NO: 115161 - RNA, 24 nt, Artificial Sequence
  Synthetic
gauuuucugaguuggcuuugaaug

SEQ ID NO: 115162 - RNA, 20 nt, Artificial Sequence
  Synthetic
gacuacuaauucccuggaug

SEQ ID NO: 115163 - RNA, 23 nt, Artificial Sequence
  Synthetic
gcugacuacuaauucccuggaug

SEQ ID NO: 115164 - RNA, 18 nt, Artificial Sequence
  Synthetic
  misc_feature (13)..(13): n is a, c, g, or u
gauuaacuacauncucug

SEQ ID NO: 115165 - RNA, 23 nt, Artificial Sequence
  Synthetic
  misc_feature (18)..(18): n is a, c, g, or u
guaaugauuaacuacauncucug

SEQ ID NO: 115166 - RNA, 18 nt, Artificial Sequence
  Synthetic
gugccguauggugaggug

SEQ ID NO: 115167 - RNA, 20 nt, Artificial Sequence
  Synthetic
gagugccguauggugaggug

SEQ ID NO: 115168 - RNA, 18 nt, Artificial Sequence
  Synthetic
gcacagcuuggaggcuug

SEQ ID NO: 115169 - RNA, 19 nt, Artificial Sequence
  Synthetic
ggcacagcuuggaggcuug

SEQ ID NO: 115170 - RNA, 20 nt, Artificial Sequence
  Synthetic
gcccugacucugggaucuug

SEQ ID NO: 115171 - RNA, 22 nt, Artificial Sequence
  Synthetic
  misc_feature (2)..(2): n is a, c, g, or u
gngcccugacucugggaucuug

SEQ ID NO: 115172 - RNA, 18 nt, Artificial Sequence
  Synthetic
gcagaggugaaaaaguug

SEQ ID NO: 115173 - RNA, 19 nt, Artificial Sequence
  Synthetic
ggcagaggugaaaaaguug

SEQ ID NO: 115174 - RNA, 24 nt, Artificial Sequence
  Synthetic
gauuaggcagaggugaaaaaguug

SEQ ID NO: 115175 - RNA, 24 nt, Artificial Sequence
  Synthetic
  misc_feature (20)..(20): n is a, c, g, or u
gacaaauuggaggacaacanguug

SEQ ID NO: 115176 - RNA, 18 nt, Artificial Sequence
  Synthetic
  misc_feature (15)..(15): n is a, c, g, or u
gugaaaccacaauanuug

SEQ ID NO: 115177 - RNA, 23 nt, Artificial Sequence
  Synthetic
  misc_feature (20)..(20): n is a, c, g, or u
gaaaugugaaaccacaauanuug

SEQ ID NO: 115178 - RNA, 24 nt, Artificial Sequence
  Synthetic
  misc_feature (21)..(21): n is a, c, g, or u
ggaaaugugaaaccacaauanuug

SEQ ID NO: 115179 - RNA, 18 nt, Artificial Sequence
  Synthetic
  misc_feature (6)..(6): n is a, c, g, or u
ggagungugcagguuuug

SEQ ID NO: 115180 - RNA, 21 nt, Artificial Sequence
  Synthetic
  misc_feature (9)..(9): n is a, c, g, or u
gcaggagungugcagguuuug

SEQ ID NO: 115181 - RNA, 23 nt, Artificial Sequence
  Synthetic
  misc_feature (11)..(11): n is a, c, g, or u
gagcaggagungugcagguuuug

SEQ ID NO: 115182 - RNA, 20 nt, Artificial Sequence
  Synthetic
  misc_feature (20)..(20): n is a, c, g, or u
gacaaauuggaggacaacan

SEQ ID NO: 115183 - RNA, 21 nt, Artificial Sequence
  Synthetic
  misc_feature (21)..(21): n is a, c, g, or u
ggacaaauuggaggacaacan

SEQ ID NO: 115184 - RNA, 19 nt, Artificial Sequence
  Synthetic
  misc_feature (19)..(19): n is a, c, g, or u
gcauggugcuggugaacan

SEQ ID NO: 115185 - RNA, 22 nt, Artificial Sequence
  Synthetic
  misc_feature (22)..(22): n is a, c, g, or u
guugcauggugcuggugaacan

SEQ ID NO: 115186 - RNA, 21 nt, Artificial Sequence
  Synthetic
  misc_feature (4)..(4): n is a, c, g, or u
  misc_feature (19)..(19): n is a, c, g, or u
  misc_feature (21)..(21): n is a, c, g, or u
gucncuuagagguggaganan

SEQ ID NO: 115187 - RNA, 23 nt, Artificial Sequence
  Synthetic
  misc_feature (6)..(6): n is a, c, g, or u
  misc_feature (21)..(21): n is a, c, g, or u
  misc_feature (23)..(23): n is a, c, g, or u
gugucncuuagagguggaganan

SEQ ID NO: 115188 - RNA, 19 nt, Artificial Sequence
  Synthetic
  misc_feature (2)..(2): n is a, c, g, or u
  misc_feature (8)..(8): n is a, c, g, or u
  misc_feature (19)..(19): n is a, c, g, or u
gnggcaangugccccaacn

SEQ ID NO: 115189 - RNA, 21 nt, Artificial Sequence
  Synthetic
  misc_feature (21)..(21): n is a, c, g, or u
ggguccaacugaugaucgggn

SEQ ID NO: 115190 - RNA, 24 nt, Artificial Sequence
  Synthetic
  misc_feature (24)..(24): n is a, c, g, or u
gcaggguccaacugaugaucgggn

SEQ ID NO: 115191 - RNA, 19 nt, Artificial Sequence
  Synthetic
  misc_feature (17)..(19): n is a, c, g, or u
gaaguuuccuaaaacannn

SEQ ID NO: 115192 - RNA, 20 nt, Artificial Sequence
  Synthetic
  misc_feature (18)..(20): n is a, c, g, or u
ggaaguuuccuaaaacannn

SEQ ID NO: 115193 - RNA, 19 nt, Artificial Sequence
  Synthetic
  misc_feature (19)..(19): n is a, c, g, or u
gcaugguccggugcuggun

SEQ ID NO: 115194 - RNA, 24 nt, Artificial Sequence
  Synthetic
  misc_feature (24)..(24): n is a, c, g, or u
guuuugcaugguccggugcuggun

SEQ ID NO: 115195 - RNA, 18 nt, Artificial Sequence
  Synthetic
  misc_feature (2)..(2): n is a, c, g, or u
gnggguugaggucccaau

SEQ ID NO: 115196 - RNA, 20 nt, Artificial Sequence
  Synthetic
  misc_feature (4)..(4): n is a, c, g, or u
gugnggguugaggucccaau

SEQ ID NO: 115197 - RNA, 23 nt, Artificial Sequence
  Synthetic
gcccaagaugaugggaugggaau

SEQ ID NO: 115198 - RNA, 18 nt, Artificial Sequence
  Synthetic
gcaacaugagggaaacau

SEQ ID NO: 115199 - RNA, 23 nt, Artificial Sequence
  Synthetic
guacagcaacaugagggaaacau

SEQ ID NO: 115200 - RNA, 19 nt, Artificial Sequence
  Synthetic
guccaaggaauacuaacau

SEQ ID NO: 115201 - RNA, 21 nt, Artificial Sequence
  Synthetic
  misc_feature (2)..(2): n is a, c, g, or u
gnguccaaggaauacuaacau

SEQ ID NO: 115202 - RNA, 18 nt, Artificial Sequence
  Synthetic
gcaaauauuuaguaacau

SEQ ID NO: 115203 - RNA, 19 nt, Artificial Sequence
  Synthetic
ggcaaauauuuaguaacau

SEQ ID NO: 115204 - RNA, 20 nt, Artificial Sequence
  Synthetic
gggcaaauauuuaguaacau

SEQ ID NO: 115205 - RNA, 21 nt, Artificial Sequence
  Synthetic
gaaagcccaagaugaugggau

SEQ ID NO: 115206 - RNA, 23 nt, Artificial Sequence
  Synthetic
gcgaaagcccaagaugaugggau

SEQ ID NO: 115207 - RNA, 19 nt, Artificial Sequence
  Synthetic
gaagcuccaaauucuuuau

SEQ ID NO: 115208 - RNA, 22 nt, Artificial Sequence
  Synthetic
  misc_feature (11)..(11): n is a, c, g, or u
guaacagcggnauaaagggacu

SEQ ID NO: 115209 - RNA, 23 nt, Artificial Sequence
  Synthetic
  misc_feature (12)..(12): n is a, c, g, or u
gguaacagcggnauaaagggacu

SEQ ID NO: 115210 - RNA, 18 nt, Artificial Sequence
  Synthetic
gacuggagauuugggacu

SEQ ID NO: 115211 - RNA, 20 nt, Artificial Sequence
  Synthetic
gugacuggagauuugggacu

SEQ ID NO: 115212 - RNA, 19 nt, Artificial Sequence
  Synthetic
guaggcugccuuccugacu

SEQ ID NO: 115213 - RNA, 21 nt, Artificial Sequence
  Synthetic
gaguaggcugccuuccugacu

SEQ ID NO: 115214 - RNA, 22 nt, Artificial Sequence
  Synthetic
ggaguaggcugccuuccugacu

SEQ ID NO: 115215 - RNA, 23 nt, Artificial Sequence
  Synthetic
gggaguaggcugccuuccugacu

SEQ ID NO: 115216 - RNA, 22 nt, Artificial Sequence
  Synthetic
  misc_feature (8)..(8): n is a, c, g, or u
gacaacanguuggugagugacu

SEQ ID NO: 115217 - RNA, 23 nt, Artificial Sequence
  Synthetic
  misc_feature (9)..(9): n is a, c, g, or u
ggacaacanguuggugagugacu

SEQ ID NO: 115218 - RNA, 19 nt, Artificial Sequence
  Synthetic
gaguaacuccacagaagcu

SEQ ID NO: 115219 - RNA, 21 nt, Artificial Sequence
  Synthetic
gagaguaacuccacagaagcu

SEQ ID NO: 115220 - RNA, 18 nt, Artificial Sequence
  Synthetic
ggauuuucugaguuggcu

SEQ ID NO: 115221 - RNA, 20 nt, Artificial Sequence
  Synthetic
  misc_feature (18)..(18): n is a, c, g, or u
guaaugauuaacuacauncu

SEQ ID NO: 115222 - RNA, 23 nt, Artificial Sequence
  Synthetic
  misc_feature (21)..(21): n is a, c, g, or u
gaaguaaugauuaacuacauncu

SEQ ID NO: 115223 - RNA, 24 nt, Artificial Sequence
  Synthetic
  misc_feature (22)..(22): n is a, c, g, or u
ggaaguaaugauuaacuacauncu

SEQ ID NO: 115224 - RNA, 18 nt, Artificial Sequence
  Synthetic
  misc_feature (13)..(14): n is a, c, g, or u
guaaauaaugucnngucu

SEQ ID NO: 115225 - RNA, 22 nt, Artificial Sequence
  Synthetic
  misc_feature (3)..(3): n is a, c, g, or u
  misc_feature (17)..(18): n is a, c, g, or u
gunuguaaauaaugucnngucu

SEQ ID NO: 115226 - RNA, 24 nt, Artificial Sequence
  Synthetic
  misc_feature (5)..(5): n is a, c, g, or u
  misc_feature (19)..(20): n is a, c, g, or u
gagunuguaaauaaugucnngucu

SEQ ID NO: 115227 - RNA, 24 nt, Artificial Sequence
  Synthetic
  misc_feature (13)..(14): n is a, c, g, or u
guaaauaaugucnngucuggaagu

SEQ ID NO: 115228 - RNA, 18 nt, Artificial Sequence
  Synthetic
ggccaagccccaaccagu

SEQ ID NO: 115229 - RNA, 18 nt, Artificial Sequence
  Synthetic
ggcuaggaguuccgcagu

SEQ ID NO: 115230 - RNA, 20 nt, Artificial Sequence
  Synthetic
gcggcuaggaguuccgcagu

SEQ ID NO: 115231 - RNA, 19 nt, Artificial Sequence
  Synthetic
  misc_feature (2)..(2): n is a, c, g, or u
gnacgacagaauugucagu

SEQ ID NO: 115232 - RNA, 23 nt, Artificial Sequence
  Synthetic
  misc_feature (3)..(3): n is a, c, g, or u
  misc_feature (6)..(6): n is a, c, g, or u
ganagnacgacagaauugucagu

SEQ ID NO: 115233 - RNA, 24 nt, Artificial Sequence
  Synthetic
  misc_feature (4)..(4): n is a, c, g, or u
  misc_feature (7)..(7): n is a, c, g, or u
gganagnacgacagaauugucagu

SEQ ID NO: 115234 - RNA, 19 nt, Artificial Sequence
  Synthetic
gucuauaugcaggaggagu

SEQ ID NO: 115235 - RNA, 20 nt, Artificial Sequence
  Synthetic
ggucuauaugcaggaggagu

SEQ ID NO: 115236 - RNA, 22 nt, Artificial Sequence
  Synthetic
guggucuauaugcaggaggagu

SEQ ID NO: 115237 - RNA, 23 nt, Artificial Sequence
  Synthetic
gguggucuauaugcaggaggagu

SEQ ID NO: 115238 - RNA, 20 nt, Artificial Sequence
  Synthetic
  misc_feature (10)..(10): n is a, c, g, or u
guccuugugnggguugaggu

SEQ ID NO: 115239 - RNA, 23 nt, Artificial Sequence
  Synthetic
  misc_feature (13)..(13): n is a, c, g, or u
guuguccuugugnggguugaggu

SEQ ID NO: 115240 - RNA, 18 nt, Artificial Sequence
  Synthetic
gguuuugcaugguccggu

SEQ ID NO: 115241 - RNA, 21 nt, Artificial Sequence
  Synthetic
gcagguuuugcaugguccggu

SEQ ID NO: 115242 - RNA, 23 nt, Artificial Sequence
  Synthetic
gugcagguuuugcaugguccggu

SEQ ID NO: 115243 - RNA, 18 nt, Artificial Sequence
  Synthetic
gugaaaaaguugcauggu

SEQ ID NO: 115244 - RNA, 19 nt, Artificial Sequence
  Synthetic
ggugaaaaaguugcauggu

SEQ ID NO: 115245 - RNA, 20 nt, Artificial Sequence
  Synthetic
  misc_feature (18)..(18): n is a, c, g, or u
guuccuugagcaggagungu

SEQ ID NO: 115246 - RNA, 21 nt, Artificial Sequence
  Synthetic
  misc_feature (19)..(19): n is a, c, g, or u
gguuccuugagcaggagungu

SEQ ID NO: 115247 - RNA, 23 nt, Artificial Sequence
  Synthetic
  misc_feature (21)..(21): n is a, c, g, or u
gagguuccuugagcaggagungu

SEQ ID NO: 115248 - RNA, 20 nt, Artificial Sequence
  Synthetic
guccggccaguuguccuugu

SEQ ID NO: 115249 - RNA, 21 nt, Artificial Sequence
  Synthetic
  misc_feature (20)..(20): n is a, c, g, or u
gaaaagaaggaguuugccanu

SEQ ID NO: 115250 - RNA, 22 nt, Artificial Sequence
  Synthetic
  misc_feature (21)..(21): n is a, c, g, or u
ggaaaagaaggaguuugccanu

SEQ ID NO: 115251 - RNA, 23 nt, Artificial Sequence
  Synthetic
  misc_feature (4)..(4): n is a, c, g, or u
  misc_feature (22)..(22): n is a, c, g, or u
gauncccgccuuccaaagagunu

SEQ ID NO: 115252 - RNA, 18 nt, Artificial Sequence
  Synthetic
  misc_feature (4)..(4): n is a, c, g, or u
  misc_feature (7)..(7): n is a, c, g, or u
gganagnacgacagaauu

SEQ ID NO: 115253 - RNA, 19 nt, Artificial Sequence
  Synthetic
  misc_feature (5)..(5): n is a, c, g, or u
  misc_feature (8)..(8): n is a, c, g, or u
ggganagnacgacagaauu

SEQ ID NO: 115254 - RNA, 21 nt, Artificial Sequence
  Synthetic
  misc_feature (7)..(7): n is a, c, g, or u
  misc_feature (10)..(10): n is a, c, g, or u
gcggganagnacgacagaauu

SEQ ID NO: 115255 - RNA, 21 nt, Artificial Sequence
  Synthetic
gacaaacgggcaacauaccuu

SEQ ID NO: 115256 - RNA, 22 nt, Artificial Sequence
  Synthetic
ggacaaacgggcaacauaccuu

SEQ ID NO: 115257 - RNA, 24 nt, Artificial Sequence
  Synthetic
gaggacaaacgggcaacauaccuu

SEQ ID NO: 115258 - RNA, 19 nt, Artificial Sequence
  Synthetic
  misc_feature (5)..(5): n is a, c, g, or u
guuuncuuagaaaggccuu

SEQ ID NO: 115259 - RNA, 21 nt, Artificial Sequence
  Synthetic
  misc_feature (18)..(18): n is a, c, g, or u
gccugaggaugagugucncuu

SEQ ID NO: 115260 - RNA, 22 nt, Artificial Sequence
  Synthetic
  misc_feature (19)..(19): n is a, c, g, or u
ggccugaggaugagugucncuu

SEQ ID NO: 115261 - RNA, 18 nt, Artificial Sequence
  Synthetic
ggagcugcuggcacaguu

SEQ ID NO: 115262 - RNA, 20 nt, Artificial Sequence
  Synthetic
gaggagcugcuggcacaguu

SEQ ID NO: 115263 - RNA, 21 nt, Artificial Sequence
  Synthetic
ggaggagcugcuggcacaguu

SEQ ID NO: 115264 - RNA, 23 nt, Artificial Sequence
  Synthetic
gaggaggagcugcuggcacaguu

SEQ ID NO: 115265 - RNA, 24 nt, Artificial Sequence
  Synthetic
ggaggaggagcugcuggcacaguu

SEQ ID NO: 115266 - RNA, 19 nt, Artificial Sequence
  Synthetic
  misc_feature (10)..(10): n is a, c, g, or u
gcagguuccngugggcguu

SEQ ID NO: 115267 - RNA, 20 nt, Artificial Sequence
  Synthetic
  misc_feature (11)..(11): n is a, c, g, or u
ggcagguuccngugggcguu

SEQ ID NO: 115268 - RNA, 21 nt, Artificial Sequence
  Synthetic
  misc_feature (12)..(12): n is a, c, g, or u
gggcagguuccngugggcguu

SEQ ID NO: 115269 - RNA, 18 nt, Artificial Sequence
  Synthetic
  misc_feature (15)..(15): n is a, c, g, or u
gguccggugcuggunguu

SEQ ID NO: 115270 - RNA, 18 nt, Artificial Sequence
  Synthetic
gauaagauaggggcauuu

SEQ ID NO: 115271 - RNA, 18 nt, Artificial Sequence
  Synthetic
ggucccaaucuggauuuu

SEQ ID NO: 115272 - RNA, 20 nt, Artificial Sequence
  Synthetic
gaggucccaaucuggauuuu

SEQ ID NO: 115273 - RNA, 23 nt, Artificial Sequence
  Synthetic
guugaggucccaaucuggauuuu

SEQ ID NO: 115274 - RNA, 24 nt, Artificial Sequence
  Synthetic
gguugaggucccaaucuggauuuu

SEQ ID NO: 115275 - RNA, 20 nt, Artificial Sequence
  Synthetic
gauuuguccccaugccuuuu

SEQ ID NO: 115276 - RNA, 24 nt, Artificial Sequence
  Synthetic
gaaagauuuguccccaugccuuuu

SEQ ID NO: 115277 - RNA, 23 nt, Artificial Sequence
  Synthetic
guaaaugaaaacaggagacuaaa

SEQ ID NO: 115278 - RNA, 18 nt, Artificial Sequence
  Synthetic
gcuaggcugugcugccaa

SEQ ID NO: 115279 - RNA, 22 nt, Artificial Sequence
  Synthetic
gacaaaaauccucacaauacca

SEQ ID NO: 115280 - RNA, 19 nt, Artificial Sequence
  Synthetic
gacacucauccucaggcca

SEQ ID NO: 115281 - RNA, 24 nt, Artificial Sequence
  Synthetic
guaauuuggaagauccagcaucca

SEQ ID NO: 115282 - RNA, 20 nt, Artificial Sequence
  Synthetic
  misc_feature (18)..(18): n is a, c, g, or u
guuaguauuccuuggacnca

SEQ ID NO: 115283 - RNA, 21 nt, Artificial Sequence
  Synthetic
  misc_feature (4)..(4): n is a, c, g, or u
  misc_feature (7)..(7): n is a, c, g, or u
  misc_feature (19)..(19): n is a, c, g, or u
gccncangaacauauugunca

SEQ ID NO: 115284 - RNA, 18 nt, Artificial Sequence
  Synthetic
gcauucaaagccaacuca

SEQ ID NO: 115285 - RNA, 18 nt, Artificial Sequence
  Synthetic
gauauucccuuaacuuca

SEQ ID NO: 115286 - RNA, 19 nt, Artificial Sequence
  Synthetic
ggauauucccuuaacuuca

SEQ ID NO: 115287 - RNA, 20 nt, Artificial Sequence
  Synthetic
gggauauucccuuaacuuca

SEQ ID NO: 115288 - RNA, 20 nt, Artificial Sequence
  Synthetic
gaagauccagcauccaggga

SEQ ID NO: 115289 - RNA, 20 nt, Artificial Sequence
  Synthetic
gcuuucaguuauauggauga

SEQ ID NO: 115290 - RNA, 21 nt, Artificial Sequence
  Synthetic
ggcuuucaguuauauggauga

SEQ ID NO: 115291 - RNA, 18 nt, Artificial Sequence
  Synthetic
  misc_feature (8)..(8): n is a, c, g, or u
  misc_feature (17)..(17): n is a, c, g, or u
gguuugcngccccuuuna

SEQ ID NO: 115292 - RNA, 19 nt, Artificial Sequence
  Synthetic
  misc_feature (9)..(9): n is a, c, g, or u
  misc_feature (18)..(18): n is a, c, g, or u
ggguuugcngccccuuuna

SEQ ID NO: 115293 - RNA, 20 nt, Artificial Sequence
  Synthetic
  misc_feature (10)..(10): n is a, c, g, or u
  misc_feature (19)..(19): n is a, c, g, or u
gggguuugcngccccuuuna

SEQ ID NO: 115294 - RNA, 19 nt, Artificial Sequence
  Synthetic
gagaaacuguucuugaaua

SEQ ID NO: 115295 - RNA, 22 nt, Artificial Sequence
  Synthetic
  misc_feature (2)..(2): n is a, c, g, or u
gnagagaaacuguucuugaaua

SEQ ID NO: 115296 - RNA, 23 nt, Artificial Sequence
  Synthetic
  misc_feature (3)..(3): n is a, c, g, or u
ggnagagaaacuguucuugaaua

SEQ ID NO: 115297 - RNA, 21 nt, Artificial Sequence
  Synthetic
  misc_feature (17)..(17): n is a, c, g, or u
gcauggacauugacccnuaua

SEQ ID NO: 115298 - RNA, 22 nt, Artificial Sequence
  Synthetic
  misc_feature (18)..(18): n is a, c, g, or u
ggcauggacauugacccnuaua

SEQ ID NO: 115299 - RNA, 23 nt, Artificial Sequence
  Synthetic
  misc_feature (19)..(19): n is a, c, g, or u
gggcauggacauugacccnuaua

SEQ ID NO: 115300 - RNA, 19 nt, Artificial Sequence
  Synthetic
  misc_feature (15)..(15): n is a, c, g, or u
gacauuguugauagnugua

SEQ ID NO: 115301 - RNA, 20 nt, Artificial Sequence
  Synthetic
  misc_feature (16)..(16): n is a, c, g, or u
ggacauuguugauagnugua

SEQ ID NO: 115302 - RNA, 22 nt, Artificial Sequence
  Synthetic
  misc_feature (18)..(18): n is a, c, g, or u
gaggacauuguugauagnugua

SEQ ID NO: 115303 - RNA, 23 nt, Artificial Sequence
  Synthetic
  misc_feature (19)..(19): n is a, c, g, or u
ggaggacauuguugauagnugua

SEQ ID NO: 115304 - RNA, 18 nt, Artificial Sequence
  Synthetic
  misc_feature (11)..(11): n is a, c, g, or u
gguuuuauccnaauguua

SEQ ID NO: 115305 - RNA, 22 nt, Artificial Sequence
  Synthetic
  misc_feature (15)..(15): n is a, c, g, or u
gcuagguuuuauccnaauguua

SEQ ID NO: 115306 - RNA, 18 nt, Artificial Sequence
  Synthetic
  misc_feature (4)..(4): n is a, c, g, or u
guunaugaaucuagccac

SEQ ID NO: 115307 - RNA, 20 nt, Artificial Sequence
  Synthetic
  misc_feature (6)..(6): n is a, c, g, or u
gaguunaugaaucuagccac

SEQ ID NO: 115308 - RNA, 22 nt, Artificial Sequence
  Synthetic
  misc_feature (8)..(8): n is a, c, g, or u
gugaguunaugaaucuagccac

SEQ ID NO: 115309 - RNA, 23 nt, Artificial Sequence
  Synthetic
  misc_feature (9)..(9): n is a, c, g, or u
ggugaguunaugaaucuagccac

SEQ ID NO: 115310 - RNA, 24 nt, Artificial Sequence
  Synthetic
  misc_feature (10)..(10): n is a, c, g, or u
gggugaguunaugaaucuagccac

SEQ ID NO: 115311 - RNA, 19 nt, Artificial Sequence
  Synthetic
guaaaugaaaacaggagac

SEQ ID NO: 115312 - RNA, 19 nt, Artificial Sequence
  Synthetic
guuugcugacgcaaccccc

SEQ ID NO: 115313 - RNA, 18 nt, Artificial Sequence
  Synthetic
guuacuaaauauuugccc

SEQ ID NO: 115314 - RNA, 18 nt, Artificial Sequence
  Synthetic
gcuccuccuccugccucc

SEQ ID NO: 115315 - RNA, 21 nt, Artificial Sequence
  Synthetic
gcagcuccuccuccugccucc

SEQ ID NO: 115316 - RNA, 22 nt, Artificial Sequence
  Synthetic
  misc_feature (14)..(14): n is a, c, g, or u
gucacucaccaacnuguugucc

SEQ ID NO: 115317 - RNA, 19 nt, Artificial Sequence
  Synthetic
guauguugcccguuugucc

SEQ ID NO: 115318 - RNA, 20 nt, Artificial Sequence
  Synthetic
gguauguugcccguuugucc

SEQ ID NO: 115319 - RNA, 19 nt, Artificial Sequence
  Synthetic
guacuaggaggcuguaggc

SEQ ID NO: 115320 - RNA, 18 nt, Artificial Sequence
  Synthetic
gagugggagcauucgggc

SEQ ID NO: 115321 - RNA, 19 nt, Artificial Sequence
  Synthetic
ggagugggagcauucgggc

SEQ ID NO: 115322 - RNA, 20 nt, Artificial Sequence
  Synthetic
gggagugggagcauucgggc

SEQ ID NO: 115323 - RNA, 22 nt, Artificial Sequence
  Synthetic
gugggagugggagcauucgggc

SEQ ID NO: 115324 - RNA, 23 nt, Artificial Sequence
  Synthetic
ggugggagugggagcauucgggc

SEQ ID NO: 115325 - RNA, 19 nt, Artificial Sequence
  Synthetic
guacuuuccugcugguggc

SEQ ID NO: 115326 - RNA, 24 nt, Artificial Sequence
  Synthetic
  misc_feature (3)..(3): n is a, c, g, or u
gcncuguacuuuccugcugguggc

SEQ ID NO: 115327 - RNA, 21 nt, Artificial Sequence
  Synthetic
  misc_feature (2)..(2): n is a, c, g, or u
gnaacacccgugugucuuggc

SEQ ID NO: 115328 - RNA, 22 nt, Artificial Sequence
  Synthetic
  misc_feature (3)..(3): n is a, c, g, or u
ggnaacacccgugugucuuggc

SEQ ID NO: 115329 - RNA, 23 nt, Artificial Sequence
  Synthetic
  misc_feature (4)..(4): n is a, c, g, or u
gggnaacacccgugugucuuggc

SEQ ID NO: 115330 - RNA, 24 nt, Artificial Sequence
  Synthetic
  misc_feature (5)..(5): n is a, c, g, or u
ggggnaacacccgugugucuuggc

SEQ ID NO: 115331 - RNA, 19 nt, Artificial Sequence
  Synthetic
gccaagucuguacaacauc

SEQ ID NO: 115332 - RNA, 20 nt, Artificial Sequence
  Synthetic
ggccaagucuguacaacauc

SEQ ID NO: 115333 - RNA, 21 nt, Artificial Sequence
  Synthetic
  misc_feature (9)..(9): n is a, c, g, or u
  misc_feature (14)..(14): n is a, c, g, or u
gaauacugncucunccauauc

SEQ ID NO: 115334 - RNA, 18 nt, Artificial Sequence
  Synthetic
gcagaagaucucaaucuc

SEQ ID NO: 115335 - RNA, 18 nt, Artificial Sequence
  Synthetic
gggacaaaucuuucuguc

SEQ ID NO: 115336 - RNA, 19 nt, Artificial Sequence
  Synthetic
ggggacaaaucuuucuguc

SEQ ID NO: 115337 - RNA, 20 nt, Artificial Sequence
  Synthetic
gcccguuuguccucuaauuc

SEQ ID NO: 115338 - RNA, 23 nt, Artificial Sequence
  Synthetic
guugcccguuuguccucuaauuc

SEQ ID NO: 115339 - RNA, 21 nt, Artificial Sequence
  Synthetic
guuuacuagugccauuuguuc

SEQ ID NO: 115340 - RNA, 18 nt, Artificial Sequence
  Synthetic
gaggacucuuggacuuuc

SEQ ID NO: 115341 - RNA, 23 nt, Artificial Sequence
  Synthetic
  misc_feature (9)..(9): n is a, c, g, or u
gaacaagancuacagcaugggag

SEQ ID NO: 115342 - RNA, 24 nt, Artificial Sequence
  Synthetic
  misc_feature (10)..(10): n is a, c, g, or u
ggaacaagancuacagcaugggag

SEQ ID NO: 115343 - RNA, 20 nt, Artificial Sequence
  Synthetic
gcugguggcuccaguucagg

SEQ ID NO: 115344 - RNA, 19 nt, Artificial Sequence
  Synthetic
  misc_feature (12)..(12): n is a, c, g, or u
gaugauguggunuuggggg

SEQ ID NO: 115345 - RNA, 20 nt, Artificial Sequence
  Synthetic
  misc_feature (13)..(13): n is a, c, g, or u
ggaugauguggunuuggggg

SEQ ID NO: 115346 - RNA, 18 nt, Artificial Sequence
  Synthetic
  misc_feature (10)..(10): n is a, c, g, or u
guguguuuanugaguggg

SEQ ID NO: 115347 - RNA, 22 nt, Artificial Sequence
  Synthetic
  misc_feature (14)..(14): n is a, c, g, or u
gacuguguguuuanugaguggg

SEQ ID NO: 115348 - RNA, 20 nt, Artificial Sequence
  Synthetic
gcaagcuauucuguguuggg

SEQ ID NO: 115349 - RNA, 21 nt, Artificial Sequence
  Synthetic
ggcaagcuauucuguguuggg

SEQ ID NO: 115350 - RNA, 19 nt, Artificial Sequence
  Synthetic
  misc_feature (9)..(9): n is a, c, g, or u
gaacaagancuacagcaug

SEQ ID NO: 115351 - RNA, 20 nt, Artificial Sequence
  Synthetic
  misc_feature (10)..(10): n is a, c, g, or u
ggaacaagancuacagcaug

SEQ ID NO: 115352 - RNA, 21 nt, Artificial Sequence
  Synthetic
  misc_feature (11)..(11): n is a, c, g, or u
gggaacaagancuacagcaug

SEQ ID NO: 115353 - RNA, 20 nt, Artificial Sequence
  Synthetic
gucuggcuuucaguuauaug

SEQ ID NO: 115354 - RNA, 18 nt, Artificial Sequence
  Synthetic
gcaacuuuuucaccucug

SEQ ID NO: 115355 - RNA, 19 nt, Artificial Sequence
  Synthetic
gaaucuagccaccugggug

SEQ ID NO: 115356 - RNA, 18 nt, Artificial Sequence
  Synthetic
  misc_feature (8)..(8): n is a, c, g, or u
gcaacggncuggucugug

SEQ ID NO: 115357 - RNA, 19 nt, Artificial Sequence
  Synthetic
  misc_feature (9)..(9): n is a, c, g, or u
ggcaacggncuggucugug

SEQ ID NO: 115358 - RNA, 20 nt, Artificial Sequence
  Synthetic
  misc_feature (9)..(9): n is a, c, g, or u
guaaacagnccuauugauug

SEQ ID NO: 115359 - RNA, 18 nt, Artificial Sequence
  Synthetic
guuuacuagugccauuug

SEQ ID NO: 115360 - RNA, 23 nt, Artificial Sequence
  Synthetic
gcucaguuuacuagugccauuug

SEQ ID NO: 115361 - RNA, 24 nt, Artificial Sequence
  Synthetic
ggcucaguuuacuagugccauuug

SEQ ID NO: 115362 - RNA, 18 nt, Artificial Sequence
  Synthetic
  misc_feature (18)..(18): n is a, c, g, or u
guagucagcuaugucaan

SEQ ID NO: 115363 - RNA, 24 nt, Artificial Sequence
  Synthetic
  misc_feature (24)..(24): n is a, c, g, or u
gaauuaguagucagcuaugucaan

SEQ ID NO: 115364 - RNA, 19 nt, Artificial Sequence
  Synthetic
  misc_feature (19)..(19): n is a, c, g, or u
gaggaguugggggaggagn

SEQ ID NO: 115365 - RNA, 20 nt, Artificial Sequence
  Synthetic
  misc_feature (20)..(20): n is a, c, g, or u
ggaggaguugggggaggagn

SEQ ID NO: 115366 - RNA, 21 nt, Artificial Sequence
  Synthetic
  misc_feature (21)..(21): n is a, c, g, or u
gggaggaguugggggaggagn

SEQ ID NO: 115367 - RNA, 23 nt, Artificial Sequence
  Synthetic
  misc_feature (23)..(23): n is a, c, g, or u
gugggaggaguugggggaggagn

SEQ ID NO: 115368 - RNA, 24 nt, Artificial Sequence
  Synthetic
  misc_feature (12)..(12): n is a, c, g, or u
  misc_feature (24)..(24): n is a, c, g, or u
guccccaauccncugggauucuun

SEQ ID NO: 115369 - RNA, 24 nt, Artificial Sequence
  Synthetic
  misc_feature (24)..(24): n is a, c, g, or u
gcuauucuguguuggggugaguun

SEQ ID NO: 115370 - RNA, 24 nt, Artificial Sequence
  Synthetic
gcauucaaagccaacucagaaaau

SEQ ID NO: 115371 - RNA, 18 nt, Artificial Sequence
  Synthetic
gaucucaaucucgggaau

SEQ ID NO: 115372 - RNA, 19 nt, Artificial Sequence
  Synthetic
guugguucuucuggacuau

SEQ ID NO: 115373 - RNA, 19 nt, Artificial Sequence
  Synthetic
gcuuucgcaaaauaccuau

SEQ ID NO: 115374 - RNA, 20 nt, Artificial Sequence
  Synthetic
ggcuuucgcaaaauaccuau

SEQ ID NO: 115375 - RNA, 21 nt, Artificial Sequence
  Synthetic
  misc_feature (18)..(18): n is a, c, g, or u
gccuaaaaaucagacaanuau

SEQ ID NO: 115376 - RNA, 22 nt, Artificial Sequence
  Synthetic
  misc_feature (19)..(19): n is a, c, g, or u
ggccuaaaaaucagacaanuau

SEQ ID NO: 115377 - RNA, 23 nt, Artificial Sequence
  Synthetic
  misc_feature (20)..(20): n is a, c, g, or u
gggccuaaaaaucagacaanuau

SEQ ID NO: 115378 - RNA, 18 nt, Artificial Sequence
  Synthetic
  misc_feature (3)..(3): n is a, c, g, or u
gcnaaacucaucgggacu

SEQ ID NO: 115379 - RNA, 20 nt, Artificial Sequence
  Synthetic
  misc_feature (2)..(2): n is a, c, g, or u
  misc_feature (5)..(5): n is a, c, g, or u
gngcnaaacucaucgggacu

SEQ ID NO: 115380 - RNA, 21 nt, Artificial Sequence
  Synthetic
  misc_feature (3)..(3): n is a, c, g, or u
  misc_feature (6)..(6): n is a, c, g, or u
ggngcnaaacucaucgggacu

SEQ ID NO: 115381 - RNA, 22 nt, Artificial Sequence
  Synthetic
  misc_feature (5)..(5): n is a, c, g, or u
  misc_feature (17)..(17): n is a, c, g, or u
guaancaauuugugggnccccu

SEQ ID NO: 115382 - RNA, 20 nt, Artificial Sequence
  Synthetic
  misc_feature (6)..(6): n is a, c, g, or u
gucaanguuaauaugggccu

SEQ ID NO: 115383 - RNA, 22 nt, Artificial Sequence
  Synthetic
  misc_feature (19)..(19): n is a, c, g, or u
gaaacuuccuguaaacagnccu

SEQ ID NO: 115384 - RNA, 23 nt, Artificial Sequence
  Synthetic
  misc_feature (20)..(20): n is a, c, g, or u
ggaaacuuccuguaaacagnccu

SEQ ID NO: 115385 - RNA, 24 nt, Artificial Sequence
  Synthetic
guuuuucuuguugacaaaaauccu

SEQ ID NO: 115386 - RNA, 21 nt, Artificial Sequence
  Synthetic
  misc_feature (9)..(9): n is a, c, g, or u
gucagggcncuguacuuuccu

SEQ ID NO: 115387 - RNA, 23 nt, Artificial Sequence
  Synthetic
  misc_feature (11)..(11): n is a, c, g, or u
gagucagggcncuguacuuuccu

SEQ ID NO: 115388 - RNA, 18 nt, Artificial Sequence
  Synthetic
ggaacagugagcccugcu

SEQ ID NO: 115389 - RNA, 19 nt, Artificial Sequence
  Synthetic
gaaccuuugugucuccucu

SEQ ID NO: 115390 - RNA, 20 nt, Artificial Sequence
  Synthetic
ggaaccuuugugucuccucu

SEQ ID NO: 115391 - RNA, 21 nt, Artificial Sequence
  Synthetic
guuaccaauuuucuuuugucu

SEQ ID NO: 115392 - RNA, 24 nt, Artificial Sequence
  Synthetic
gcuguuaccaauuuucuuuugucu

SEQ ID NO: 115393 - RNA, 23 nt, Artificial Sequence
  Synthetic
  misc_feature (12)..(12): n is a, c, g, or u
gaauauuuggunucuuuuggagu

SEQ ID NO: 115394 - RNA, 19 nt, Artificial Sequence
  Synthetic
gugugucuuggccaaaauu

SEQ ID NO: 115395 - RNA, 19 nt, Artificial Sequence
  Synthetic
  misc_feature (7)..(7): n is a, c, g, or u
gaaagunugucaacgaauu

SEQ ID NO: 115396 - RNA, 20 nt, Artificial Sequence
  Synthetic
  misc_feature (8)..(8): n is a, c, g, or u
ggaaagunugucaacgaauu

SEQ ID NO: 115397 - RNA, 24 nt, Artificial Sequence
  Synthetic
  misc_feature (12)..(12): n is a, c, g, or u
gauuggaaagunugucaacgaauu

SEQ ID NO: 115398 - RNA, 20 nt, Artificial Sequence
  Synthetic
gauccagcauccagggaauu

SEQ ID NO: 115399 - RNA, 24 nt, Artificial Sequence
  Synthetic
gacauucauuugcaggaggacauu

SEQ ID NO: 115400 - RNA, 18 nt, Artificial Sequence
  Synthetic
gcuaugccucaucuucuu

SEQ ID NO: 115401 - RNA, 19 nt, Artificial Sequence
  Synthetic
  misc_feature (11)..(11): n is a, c, g, or u
gucccuuuaunccgcuguu

SEQ ID NO: 115402 - RNA, 21 nt, Artificial Sequence
  Synthetic
  misc_feature (13)..(13): n is a, c, g, or u
gagucccuuuaunccgcuguu

SEQ ID NO: 115403 - RNA, 18 nt, Artificial Sequence
  Synthetic
  misc_feature (16)..(16): n is a, c, g, or u
gacuucuuuccuucunuu

SEQ ID NO: 115404 - RNA, 21 nt, Artificial Sequence
  Synthetic
gucaacgaauugugggucuuu

SEQ ID NO: 115405 - RNA, 23 nt, Artificial Sequence
  Synthetic
  misc_feature (18)..(18): n is a, c, g, or u
guucuugaauauuuggunucuuu

SEQ ID NO: 115406 - RNA, 19 nt, Artificial Sequence
  Synthetic
guuucucuuggcucaguuu

SEQ ID NO: 115407 - RNA, 23 nt, Artificial Sequence
  Synthetic
  misc_feature (2)..(2): n is a, c, g, or u
  misc_feature (4)..(4): n is a, c, g, or u
gncnacacguagcgccucauuuu

SEQ ID NO: 115408 - RNA, 18 nt, Artificial Sequence
  Synthetic
aagucagaaggcaaaaaa

SEQ ID NO: 115409 - RNA, 20 nt, Artificial Sequence
  Synthetic
agaagucagaaggcaaaaaa

SEQ ID NO: 115410 - RNA, 21 nt, Artificial Sequence
  Synthetic
aagaagucagaaggcaaaaaa

SEQ ID NO: 115411 - RNA, 22 nt, Artificial Sequence
  Synthetic
aaagaagucagaaggcaaaaaa

SEQ ID NO: 115412 - RNA, 19 nt, Artificial Sequence
  Synthetic
uguauacccaaagacaaaa

SEQ ID NO: 115413 - RNA, 20 nt, Artificial Sequence
  Synthetic
auguauacccaaagacaaaa

SEQ ID NO: 115414 - RNA, 21 nt, Artificial Sequence
  Synthetic
aauguauacccaaagacaaaa

SEQ ID NO: 115415 - RNA, 22 nt, Artificial Sequence
  Synthetic
aaauguauacccaaagacaaaa

SEQ ID NO: 115416 - RNA, 23 nt, Artificial Sequence
  Synthetic
uaaauguauacccaaagacaaaa

SEQ ID NO: 115417 - RNA, 24 nt, Artificial Sequence
  Synthetic
uuaaauguauacccaaagacaaaa

SEQ ID NO: 115418 - RNA, 18 nt, Artificial Sequence
  Synthetic
acccaaagacaaaagaaa

SEQ ID NO: 115419 - RNA, 19 nt, Artificial Sequence
  Synthetic
uacccaaagacaaaagaaa

SEQ ID NO: 115420 - RNA, 20 nt, Artificial Sequence
  Synthetic
auacccaaagacaaaagaaa

SEQ ID NO: 115421 - RNA, 21 nt, Artificial Sequence
  Synthetic
uauacccaaagacaaaagaaa

SEQ ID NO: 115422 - RNA, 23 nt, Artificial Sequence
  Synthetic
uguauacccaaagacaaaagaaa

SEQ ID NO: 115423 - RNA, 24 nt, Artificial Sequence
  Synthetic
auguauacccaaagacaaaagaaa

SEQ ID NO: 115424 - RNA, 19 nt, Artificial Sequence
  Synthetic
aguccagaagaaccaacaa

SEQ ID NO: 115425 - RNA, 20 nt, Artificial Sequence
  Synthetic
uaguccagaagaaccaacaa

SEQ ID NO: 115426 - RNA, 18 nt, Artificial Sequence
  Synthetic
uauuuugcgaaagcccaa

SEQ ID NO: 115427 - RNA, 18 nt, Artificial Sequence
  Synthetic
  misc_feature (4)..(4): n is a, c, g, or u
cagnccguugccgagcaa

SEQ ID NO: 115428 - RNA, 19 nt, Artificial Sequence
  Synthetic
  misc_feature (5)..(5): n is a, c, g, or u
ccagnccguugccgagcaa

SEQ ID NO: 115429 - RNA, 20 nt, Artificial Sequence
  Synthetic
  misc_feature (6)..(6): n is a, c, g, or u
accagnccguugccgagcaa

SEQ ID NO: 115430 - RNA, 18 nt, Artificial Sequence
  Synthetic
aacaauguccuccugcaa

SEQ ID NO: 115431 - RNA, 19 nt, Artificial Sequence
  Synthetic
caacaauguccuccugcaa

SEQ ID NO: 115432 - RNA, 20 nt, Artificial Sequence
  Synthetic
ucaacaauguccuccugcaa

SEQ ID NO: 115433 - RNA, 21 nt, Artificial Sequence
  Synthetic
aucaacaauguccuccugcaa

SEQ ID NO: 115434 - RNA, 22 nt, Artificial Sequence
  Synthetic
uaucaacaauguccuccugcaa

SEQ ID NO: 115435 - RNA, 23 nt, Artificial Sequence
  Synthetic
cuaucaacaauguccuccugcaa

SEQ ID NO: 115436 - RNA, 24 nt, Artificial Sequence
  Synthetic
  misc_feature (1)..(1): n is a, c, g, or u
ncuaucaacaauguccuccugcaa

SEQ ID NO: 115437 - RNA, 18 nt, Artificial Sequence
  Synthetic
  misc_feature (3)..(3): n is a, c, g, or u
agnucuuguucccaagaa

SEQ ID NO: 115438 - RNA, 19 nt, Artificial Sequence
  Synthetic
  misc_feature (4)..(4): n is a, c, g, or u
uagnucuuguucccaagaa

SEQ ID NO: 115439 - RNA, 21 nt, Artificial Sequence
  Synthetic
  misc_feature (6)..(6): n is a, c, g, or u
uguagnucuuguucccaagaa

SEQ ID NO: 115440 - RNA, 22 nt, Artificial Sequence
  Synthetic
  misc_feature (7)..(7): n is a, c, g, or u
cuguagnucuuguucccaagaa

SEQ ID NO: 115441 - RNA, 24 nt, Artificial Sequence
  Synthetic
  misc_feature (9)..(9): n is a, c, g, or u
ugcuguagnucuuguucccaagaa

SEQ ID NO: 115442 - RNA, 19 nt, Artificial Sequence
  Synthetic
  misc_feature (11)..(11): n is a, c, g, or u
agaucucgaanagaaggaa

SEQ ID NO: 115443 - RNA, 20 nt, Artificial Sequence
  Synthetic
  misc_feature (1)..(1): n is a, c, g, or u
  misc_feature (12)..(12): n is a, c, g, or u
nagaucucgaanagaaggaa

SEQ ID NO: 115444 - RNA, 22 nt, Artificial Sequence
  Synthetic
  misc_feature (3)..(3): n is a, c, g, or u
  misc_feature (14)..(14): n is a, c, g, or u
agnagaucucgaanagaaggaa

SEQ ID NO: 115445 - RNA, 24 nt, Artificial Sequence
  Synthetic
  misc_feature (5)..(5): n is a, c, g, or u
  misc_feature (16)..(16): n is a, c, g, or u
cgagnagaucucgaanagaaggaa

SEQ ID NO: 115446 - RNA, 18 nt, Artificial Sequence
  Synthetic
cagcaggaugcagaggaa

SEQ ID NO: 115447 - RNA, 20 nt, Artificial Sequence
  Synthetic
agcagcaggaugcagaggaa

SEQ ID NO: 115448 - RNA, 21 nt, Artificial Sequence
  Synthetic
uagcagcaggaugcagaggaa

SEQ ID NO: 115449 - RNA, 22 nt, Artificial Sequence
  Synthetic
auagcagcaggaugcagaggaa

SEQ ID NO: 115450 - RNA, 23 nt, Artificial Sequence
  Synthetic
cauagcagcaggaugcagaggaa

SEQ ID NO: 115451 - RNA, 18 nt, Artificial Sequence
  Synthetic
uugaagaguuugguggaa

SEQ ID NO: 115452 - RNA, 19 nt, Artificial Sequence
  Synthetic
cuugaagaguuugguggaa

SEQ ID NO: 115453 - RNA, 20 nt, Artificial Sequence
  Synthetic
ucuugaagaguuugguggaa

SEQ ID NO: 115454 - RNA, 18 nt, Artificial Sequence
  Synthetic
  misc_feature (8)..(8): n is a, c, g, or u
acuacauncucuggauaa

SEQ ID NO: 115455 - RNA, 19 nt, Artificial Sequence
  Synthetic
  misc_feature (9)..(9): n is a, c, g, or u
aacuacauncucuggauaa

SEQ ID NO: 115456 - RNA, 20 nt, Artificial Sequence
  Synthetic
  misc_feature (10)..(10): n is a, c, g, or u
uaacuacauncucuggauaa

SEQ ID NO: 115457 - RNA, 21 nt, Artificial Sequence
  Synthetic
  misc_feature (11)..(11): n is a, c, g, or u
uuaacuacauncucuggauaa

SEQ ID NO: 115458 - RNA, 22 nt, Artificial Sequence
  Synthetic
  misc_feature (12)..(12): n is a, c, g, or u
auuaacuacauncucuggauaa

SEQ ID NO: 115459 - RNA, 24 nt, Artificial Sequence
  Synthetic
  misc_feature (14)..(14): n is a, c, g, or u
ugauuaacuacauncucuggauaa

SEQ ID NO: 115460 - RNA, 18 nt, Artificial Sequence
  Synthetic
cauaucccaugaaguuaa

SEQ ID NO: 115461 - RNA, 19 nt, Artificial Sequence
  Synthetic
acauaucccaugaaguuaa

SEQ ID NO: 115462 - RNA, 20 nt, Artificial Sequence
  Synthetic
uacauaucccaugaaguuaa

SEQ ID NO: 115463 - RNA, 18 nt, Artificial Sequence
  Synthetic
  misc_feature (12)..(12): n is a, c, g, or u
ccucccacucanuaaaca

SEQ ID NO: 115464 - RNA, 19 nt, Artificial Sequence
  Synthetic
  misc_feature (13)..(13): n is a, c, g, or u
uccucccacucanuaaaca

SEQ ID NO: 115465 - RNA, 20 nt, Artificial Sequence
  Synthetic
  misc_feature (14)..(14): n is a, c, g, or u
cuccucccacucanuaaaca

SEQ ID NO: 115466 - RNA, 21 nt, Artificial Sequence
  Synthetic
  misc_feature (15)..(15): n is a, c, g, or u
acuccucccacucanuaaaca

SEQ ID NO: 115467 - RNA, 22 nt, Artificial Sequence
  Synthetic
  misc_feature (16)..(16): n is a, c, g, or u
aacuccucccacucanuaaaca

SEQ ID NO: 115468 - RNA, 23 nt, Artificial Sequence
  Synthetic
  misc_feature (17)..(17): n is a, c, g, or u
caacuccucccacucanuaaaca

SEQ ID NO: 115469 - RNA, 24 nt, Artificial Sequence
  Synthetic
  misc_feature (18)..(18): n is a, c, g, or u
ccaacuccucccacucanuaaaca

SEQ ID NO: 115470 - RNA, 18 nt, Artificial Sequence
  Synthetic
  misc_feature (4)..(4): n is a, c, g, or u
caunaacucaccccaaca

SEQ ID NO: 115471 - RNA, 19 nt, Artificial Sequence
  Synthetic
  misc_feature (5)..(5): n is a, c, g, or u
ucaunaacucaccccaaca

SEQ ID NO: 115472 - RNA, 20 nt, Artificial Sequence
  Synthetic
  misc_feature (6)..(6): n is a, c, g, or u
uucaunaacucaccccaaca

SEQ ID NO: 115473 - RNA, 21 nt, Artificial Sequence
  Synthetic
  misc_feature (7)..(7): n is a, c, g, or u
auucaunaacucaccccaaca

SEQ ID NO: 115474 - RNA, 23 nt, Artificial Sequence
  Synthetic
  misc_feature (9)..(9): n is a, c, g, or u
agauucaunaacucaccccaaca

SEQ ID NO: 115475 - RNA, 24 nt, Artificial Sequence
  Synthetic
  misc_feature (10)..(10): n is a, c, g, or u
uagauucaunaacucaccccaaca

SEQ ID NO: 115476 - RNA, 18 nt, Artificial Sequence
  Synthetic
aacaguaggacaugaaca

SEQ ID NO: 115477 - RNA, 20 nt, Artificial Sequence
  Synthetic
ugaacaguaggacaugaaca

SEQ ID NO: 115478 - RNA, 18 nt, Artificial Sequence
  Synthetic
  misc_feature (4)..(4): n is a, c, g, or u
ucunccaaaaguaagaca

SEQ ID NO: 115479 - RNA, 19 nt, Artificial Sequence
  Synthetic
  misc_feature (5)..(5): n is a, c, g, or u
cucunccaaaaguaagaca

SEQ ID NO: 115480 - RNA, 20 nt, Artificial Sequence
  Synthetic
  misc_feature (6)..(6): n is a, c, g, or u
ucucunccaaaaguaagaca

SEQ ID NO: 115481 - RNA, 21 nt, Artificial Sequence
  Synthetic
  misc_feature (7)..(7): n is a, c, g, or u
uucucunccaaaaguaagaca

SEQ ID NO: 115482 - RNA, 22 nt, Artificial Sequence
  Synthetic
  misc_feature (8)..(8): n is a, c, g, or u
uuucucunccaaaaguaagaca

SEQ ID NO: 115483 - RNA, 24 nt, Artificial Sequence
  Synthetic
  misc_feature (10)..(10): n is a, c, g, or u
aguuucucunccaaaaguaagaca

SEQ ID NO: 115484 - RNA, 18 nt, Artificial Sequence
  Synthetic
  misc_feature (9)..(9): n is a, c, g, or u
ucaauaggncuguuuaca

SEQ ID NO: 115485 - RNA, 19 nt, Artificial Sequence
  Synthetic
  misc_feature (10)..(10): n is a, c, g, or u
aucaauaggncuguuuaca

SEQ ID NO: 115486 - RNA, 20 nt, Artificial Sequence
  Synthetic
  misc_feature (11)..(11): n is a, c, g, or u
aaucaauaggncuguuuaca

SEQ ID NO: 115487 - RNA, 21 nt, Artificial Sequence
  Synthetic
  misc_feature (12)..(12): n is a, c, g, or u
caaucaauaggncuguuuaca

SEQ ID NO: 115488 - RNA, 22 nt, Artificial Sequence
  Synthetic
  misc_feature (13)..(13): n is a, c, g, or u
ccaaucaauaggncuguuuaca

SEQ ID NO: 115489 - RNA, 23 nt, Artificial Sequence
  Synthetic
  misc_feature (14)..(14): n is a, c, g, or u
uccaaucaauaggncuguuuaca

SEQ ID NO: 115490 - RNA, 24 nt, Artificial Sequence
  Synthetic
  misc_feature (15)..(15): n is a, c, g, or u
uuccaaucaauaggncuguuuaca

SEQ ID NO: 115491 - RNA, 20 nt, Artificial Sequence
  Synthetic
  misc_feature (6)..(6): n is a, c, g, or u
uggccnauggccaagcccca

SEQ ID NO: 115492 - RNA, 21 nt, Artificial Sequence
  Synthetic
  misc_feature (7)..(7): n is a, c, g, or u
auggccnauggccaagcccca

SEQ ID NO: 115493 - RNA, 23 nt, Artificial Sequence
  Synthetic
  misc_feature (9)..(9): n is a, c, g, or u
ugauggccnauggccaagcccca

SEQ ID NO: 115494 - RNA, 24 nt, Artificial Sequence
  Synthetic
  misc_feature (10)..(10): n is a, c, g, or u
cugauggccnauggccaagcccca

SEQ ID NO: 115495 - RNA, 19 nt, Artificial Sequence
  Synthetic
  misc_feature (9)..(9): n is a, c, g, or u
ugaucgggnaagaauccca

SEQ ID NO: 115496 - RNA, 20 nt, Artificial Sequence
  Synthetic
  misc_feature (10)..(10): n is a, c, g, or u
augaucgggnaagaauccca

SEQ ID NO: 115497 - RNA, 22 nt, Artificial Sequence
  Synthetic
  misc_feature (12)..(12): n is a, c, g, or u
ugaugaucgggnaagaauccca

SEQ ID NO: 115498 - RNA, 23 nt, Artificial Sequence
  Synthetic
  misc_feature (13)..(13): n is a, c, g, or u
cugaugaucgggnaagaauccca

SEQ ID NO: 115499 - RNA, 24 nt, Artificial Sequence
  Synthetic
  misc_feature (14)..(14): n is a, c, g, or u
acugaugaucgggnaagaauccca

SEQ ID NO: 115500 - RNA, 18 nt, Artificial Sequence
  Synthetic
  misc_feature (1)..(2): n is a, c, g, or u
nnccaauuacauauccca

SEQ ID NO: 115501 - RNA, 19 nt, Artificial Sequence
  Synthetic
  misc_feature (2)..(3): n is a, c, g, or u
cnnccaauuacauauccca

SEQ ID NO: 115502 - RNA, 20 nt, Artificial Sequence
  Synthetic
  misc_feature (3)..(4): n is a, c, g, or u
acnnccaauuacauauccca

SEQ ID NO: 115503 - RNA, 21 nt, Artificial Sequence
  Synthetic
  misc_feature (4)..(5): n is a, c, g, or u
aacnnccaauuacauauccca

SEQ ID NO: 115504 - RNA, 22 nt, Artificial Sequence
  Synthetic
  misc_feature (5)..(6): n is a, c, g, or u
caacnnccaauuacauauccca

SEQ ID NO: 115505 - RNA, 23 nt, Artificial Sequence
  Synthetic
  misc_feature (6)..(7): n is a, c, g, or u
ccaacnnccaauuacauauccca

SEQ ID NO: 115506 - RNA, 24 nt, Artificial Sequence
  Synthetic
  misc_feature (7)..(8): n is a, c, g, or u
cccaacnnccaauuacauauccca

SEQ ID NO: 115507 - RNA, 18 nt, Artificial Sequence
  Synthetic
ccauauaacugaaagcca

SEQ ID NO: 115508 - RNA, 19 nt, Artificial Sequence
  Synthetic
uccauauaacugaaagcca

SEQ ID NO: 115509 - RNA, 20 nt, Artificial Sequence
  Synthetic
auccauauaacugaaagcca

SEQ ID NO: 115510 - RNA, 18 nt, Artificial Sequence
  Synthetic
cuuugaaugcagggucca

SEQ ID NO: 115511 - RNA, 18 nt, Artificial Sequence
  Synthetic
  misc_feature (13)..(13): n is a, c, g, or u
ucccaccuuaugngucca

SEQ ID NO: 115512 - RNA, 19 nt, Artificial Sequence
  Synthetic
  misc_feature (14)..(14): n is a, c, g, or u
uucccaccuuaugngucca

SEQ ID NO: 115513 - RNA, 20 nt, Artificial Sequence
  Synthetic
  misc_feature (15)..(15): n is a, c, g, or u
uuucccaccuuaugngucca

SEQ ID NO: 115514 - RNA, 22 nt, Artificial Sequence
  Synthetic
  misc_feature (17)..(17): n is a, c, g, or u
aguuucccaccuuaugngucca

SEQ ID NO: 115515 - RNA, 23 nt, Artificial Sequence
  Synthetic
  misc_feature (18)..(18): n is a, c, g, or u
aaguuucccaccuuaugngucca

SEQ ID NO: 115516 - RNA, 24 nt, Artificial Sequence
  Synthetic
  misc_feature (19)..(19): n is a, c, g, or u
aaaguuucccaccuuaugngucca

SEQ ID NO: 115517 - RNA, 18 nt, Artificial Sequence
  Synthetic
  misc_feature (7)..(7): n is a, c, g, or u
uaagauncccgccuucca

SEQ ID NO: 115518 - RNA, 19 nt, Artificial Sequence
  Synthetic
  misc_feature (8)..(8): n is a, c, g, or u
auaagauncccgccuucca

SEQ ID NO: 115519 - RNA, 20 nt, Artificial Sequence
  Synthetic
  misc_feature (9)..(9): n is a, c, g, or u
uauaagauncccgccuucca

SEQ ID NO: 115520 - RNA, 18 nt, Artificial Sequence
  Synthetic
  misc_feature (10)..(10): n is a, c, g, or u
ucguugacanacuuucca

SEQ ID NO: 115521 - RNA, 19 nt, Artificial Sequence
  Synthetic
  misc_feature (11)..(11): n is a, c, g, or u
uucguugacanacuuucca

SEQ ID NO: 115522 - RNA, 20 nt, Artificial Sequence
  Synthetic
  misc_feature (12)..(12): n is a, c, g, or u
auucguugacanacuuucca

SEQ ID NO: 115523 - RNA, 21 nt, Artificial Sequence
  Synthetic
  misc_feature (13)..(13): n is a, c, g, or u
aauucguugacanacuuucca

SEQ ID NO: 115524 - RNA, 22 nt, Artificial Sequence
  Synthetic
  misc_feature (14)..(14): n is a, c, g, or u
caauucguugacanacuuucca

SEQ ID NO: 115525 - RNA, 23 nt, Artificial Sequence
  Synthetic
  misc_feature (15)..(15): n is a, c, g, or u
acaauucguugacanacuuucca

SEQ ID NO: 115526 - RNA, 24 nt, Artificial Sequence
  Synthetic
  misc_feature (16)..(16): n is a, c, g, or u
cacaauucguugacanacuuucca

SEQ ID NO: 115527 - RNA, 19 nt, Artificial Sequence
  Synthetic
uguugauaagauaggggca

SEQ ID NO: 115528 - RNA, 21 nt, Artificial Sequence
  Synthetic
aguguugauaagauaggggca

SEQ ID NO: 115529 - RNA, 22 nt, Artificial Sequence
  Synthetic
aaguguugauaagauaggggca

SEQ ID NO: 115530 - RNA, 19 nt, Artificial Sequence
  Synthetic
agaggugaagcgaagugca

SEQ ID NO: 115531 - RNA, 20 nt, Artificial Sequence
  Synthetic
cagaggugaagcgaagugca

SEQ ID NO: 115532 - RNA, 18 nt, Artificial Sequence
  Synthetic
augaaugucaggaaaaga

SEQ ID NO: 115533 - RNA, 19 nt, Artificial Sequence
  Synthetic
aaugaaugucaggaaaaga

SEQ ID NO: 115534 - RNA, 20 nt, Artificial Sequence
  Synthetic
aaaugaaugucaggaaaaga

SEQ ID NO: 115535 - RNA, 21 nt, Artificial Sequence
  Synthetic
caaaugaaugucaggaaaaga

SEQ ID NO: 115536 - RNA, 23 nt, Artificial Sequence
  Synthetic
ugcaaaugaaugucaggaaaaga

SEQ ID NO: 115537 - RNA, 24 nt, Artificial Sequence
  Synthetic
cugcaaaugaaugucaggaaaaga

SEQ ID NO: 115538 - RNA, 18 nt, Artificial Sequence
  Synthetic
cucccgauacagagcaga

SEQ ID NO: 115539 - RNA, 19 nt, Artificial Sequence
  Synthetic
ccucccgauacagagcaga

SEQ ID NO: 115540 - RNA, 19 nt, Artificial Sequence
  Synthetic
  misc_feature (16)..(16): n is a, c, g, or u
agauugacgauauggnaga

SEQ ID NO: 115541 - RNA, 20 nt, Artificial Sequence
  Synthetic
  misc_feature (17)..(17): n is a, c, g, or u
aagauugacgauauggnaga

SEQ ID NO: 115542 - RNA, 21 nt, Artificial Sequence
  Synthetic
  misc_feature (18)..(18): n is a, c, g, or u
uaagauugacgauauggnaga

SEQ ID NO: 115543 - RNA, 22 nt, Artificial Sequence
  Synthetic
  misc_feature (19)..(19): n is a, c, g, or u
auaagauugacgauauggnaga

SEQ ID NO: 115544 - RNA, 24 nt, Artificial Sequence
  Synthetic
  misc_feature (21)..(21): n is a, c, g, or u
cgauaagauugacgauauggnaga

SEQ ID NO: 115545 - RNA, 18 nt, Artificial Sequence
  Synthetic
  misc_feature (2)..(2): n is a, c, g, or u
  misc_feature (11)..(11): n is a, c, g, or u
  misc_feature (14)..(14): n is a, c, g, or u
anuugcggganagnacga

SEQ ID NO: 115546 - RNA, 19 nt, Artificial Sequence
  Synthetic
  misc_feature (3)..(3): n is a, c, g, or u
  misc_feature (12)..(12): n is a, c, g, or u
  misc_feature (15)..(15): n is a, c, g, or u
uanuugcggganagnacga

SEQ ID NO: 115547 - RNA, 20 nt, Artificial Sequence
  Synthetic
  misc_feature (4)..(4): n is a, c, g, or u
  misc_feature (13)..(13): n is a, c, g, or u
  misc_feature (16)..(16): n is a, c, g, or u
auanuugcggganagnacga

SEQ ID NO: 115548 - RNA, 21 nt, Artificial Sequence
  Synthetic
  misc_feature (5)..(5): n is a, c, g, or u
  misc_feature (14)..(14): n is a, c, g, or u
  misc_feature (17)..(17): n is a, c, g, or u
uauanuugcggganagnacga

SEQ ID NO: 115549 - RNA, 23 nt, Artificial Sequence
  Synthetic
  misc_feature (7)..(7): n is a, c, g, or u
  misc_feature (16)..(16): n is a, c, g, or u
  misc_feature (19)..(19): n is a, c, g, or u
uguauanuugcggganagnacga

SEQ ID NO: 115550 - RNA, 24 nt, Artificial Sequence
  Synthetic
  misc_feature (8)..(8): n is a, c, g, or u
  misc_feature (17)..(17): n is a, c, g, or u
  misc_feature (20)..(20): n is a, c, g, or u
auguauanuugcggganagnacga

SEQ ID NO: 115551 - RNA, 18 nt, Artificial Sequence
  Synthetic
ccuucgucugcgaggcga

SEQ ID NO: 115552 - RNA, 19 nt, Artificial Sequence
  Synthetic
accuucgucugcgaggcga

SEQ ID NO: 115553 - RNA, 19 nt, Artificial Sequence
  Synthetic
agagcagaggcggugucga

SEQ ID NO: 115554 - RNA, 20 nt, Artificial Sequence
  Synthetic
cagagcagaggcggugucga

SEQ ID NO: 115555 - RNA, 18 nt, Artificial Sequence
  Synthetic
aggguccccagucuucga

SEQ ID NO: 115556 - RNA, 19 nt, Artificial Sequence
  Synthetic
caggguccccagucuucga

SEQ ID NO: 115557 - RNA, 20 nt, Artificial Sequence
  Synthetic
acaggguccccagucuucga

SEQ ID NO: 115558 - RNA, 18 nt, Artificial Sequence
  Synthetic
cagccuagcagccaugga

SEQ ID NO: 115559 - RNA, 19 nt, Artificial Sequence
  Synthetic
acagccuagcagccaugga

SEQ ID NO: 115560 - RNA, 20 nt, Artificial Sequence
  Synthetic
cacagccuagcagccaugga

SEQ ID NO: 115561 - RNA, 18 nt, Artificial Sequence
  Synthetic
  misc_feature (10)..(11): n is a, c, g, or u
aauaaugucnngucugga

SEQ ID NO: 115562 - RNA, 19 nt, Artificial Sequence
  Synthetic
  misc_feature (11)..(12): n is a, c, g, or u
aaauaaugucnngucugga

SEQ ID NO: 115563 - RNA, 20 nt, Artificial Sequence
  Synthetic
  misc_feature (12)..(13): n is a, c, g, or u
uaaauaaugucnngucugga

SEQ ID NO: 115564 - RNA, 22 nt, Artificial Sequence
  Synthetic
  misc_feature (14)..(15): n is a, c, g, or u
uguaaauaaugucnngucugga

SEQ ID NO: 115565 - RNA, 23 nt, Artificial Sequence
  Synthetic
  misc_feature (1)..(1): n is a, c, g, or u
  misc_feature (15)..(16): n is a, c, g, or u
nuguaaauaaugucnngucugga

SEQ ID NO: 115566 - RNA, 24 nt, Artificial Sequence
  Synthetic
  misc_feature (2)..(2): n is a, c, g, or u
  misc_feature (16)..(17): n is a, c, g, or u
unuguaaauaaugucnngucugga

SEQ ID NO: 115567 - RNA, 18 nt, Artificial Sequence
  Synthetic
  misc_feature (16)..(16): n is a, c, g, or u
aguaggacaugaacanga

SEQ ID NO: 115568 - RNA, 19 nt, Artificial Sequence
  Synthetic
  misc_feature (17)..(17): n is a, c, g, or u
caguaggacaugaacanga

SEQ ID NO: 115569 - RNA, 20 nt, Artificial Sequence
  Synthetic
  misc_feature (18)..(18): n is a, c, g, or u
acaguaggacaugaacanga

SEQ ID NO: 115570 - RNA, 21 nt, Artificial Sequence
  Synthetic
  misc_feature (19)..(19): n is a, c, g, or u
aacaguaggacaugaacanga

SEQ ID NO: 115571 - RNA, 23 nt, Artificial Sequence
  Synthetic
  misc_feature (21)..(21): n is a, c, g, or u
ugaacaguaggacaugaacanga

SEQ ID NO: 115572 - RNA, 24 nt, Artificial Sequence
  Synthetic
  misc_feature (22)..(22): n is a, c, g, or u
uugaacaguaggacaugaacanga

SEQ ID NO: 115573 - RNA, 18 nt, Artificial Sequence
  Synthetic
agcccuacgaaccacuga

SEQ ID NO: 115574 - RNA, 19 nt, Artificial Sequence
  Synthetic
aagcccuacgaaccacuga

SEQ ID NO: 115575 - RNA, 20 nt, Artificial Sequence
  Synthetic
aaagcccuacgaaccacuga

SEQ ID NO: 115576 - RNA, 20 nt, Artificial Sequence
  Synthetic
agggguccuaggaguccuga

SEQ ID NO: 115577 - RNA, 21 nt, Artificial Sequence
  Synthetic
cagggguccuaggaguccuga

SEQ ID NO: 115578 - RNA, 23 nt, Artificial Sequence
  Synthetic
agcagggguccuaggaguccuga

SEQ ID NO: 115579 - RNA, 18 nt, Artificial Sequence
  Synthetic
augauuaggcagagguga

SEQ ID NO: 115580 - RNA, 20 nt, Artificial Sequence
  Synthetic
agaugauuaggcagagguga

SEQ ID NO: 115581 - RNA, 22 nt, Artificial Sequence
  Synthetic
  misc_feature (1)..(1): n is a, c, g, or u
ngagaugauuaggcagagguga

SEQ ID NO: 115582 - RNA, 23 nt, Artificial Sequence
  Synthetic
  misc_feature (2)..(2): n is a, c, g, or u
angagaugauuaggcagagguga

SEQ ID NO: 115583 - RNA, 24 nt, Artificial Sequence
  Synthetic
  misc_feature (3)..(3): n is a, c, g, or u
cangagaugauuaggcagagguga

SEQ ID NO: 115584 - RNA, 18 nt, Artificial Sequence
  Synthetic
aguuuccggaaguguuga

SEQ ID NO: 115585 - RNA, 19 nt, Artificial Sequence
  Synthetic
uaguuuccggaaguguuga

SEQ ID NO: 115586 - RNA, 18 nt, Artificial Sequence
  Synthetic
  misc_feature (17)..(17): n is a, c, g, or u
uccacacuccaaaagana

SEQ ID NO: 115587 - RNA, 19 nt, Artificial Sequence
  Synthetic
  misc_feature (18)..(18): n is a, c, g, or u
auccacacuccaaaagana

SEQ ID NO: 115588 - RNA, 20 nt, Artificial Sequence
  Synthetic
  misc_feature (19)..(19): n is a, c, g, or u
aauccacacuccaaaagana

SEQ ID NO: 115589 - RNA, 18 nt, Artificial Sequence
  Synthetic
uuuaucuaagggcaaaua

SEQ ID NO: 115590 - RNA, 19 nt, Artificial Sequence
  Synthetic
cuuuaucuaagggcaaaua

SEQ ID NO: 115591 - RNA, 20 nt, Artificial Sequence
  Synthetic
ccuuuaucuaagggcaaaua

SEQ ID NO: 115592 - RNA, 21 nt, Artificial Sequence
  Synthetic
  misc_feature (1)..(1): n is a, c, g, or u
nccuuuaucuaagggcaaaua

SEQ ID NO: 115593 - RNA, 22 nt, Artificial Sequence
  Synthetic
  misc_feature (2)..(2): n is a, c, g, or u
unccuuuaucuaagggcaaaua

SEQ ID NO: 115594 - RNA, 23 nt, Artificial Sequence
  Synthetic
  misc_feature (3)..(3): n is a, c, g, or u
aunccuuuaucuaagggcaaaua

SEQ ID NO: 115595 - RNA, 18 nt, Artificial Sequence
  Synthetic
uaaaaccuagcaggcaua

SEQ ID NO: 115596 - RNA, 19 nt, Artificial Sequence
  Synthetic
auaaaaccuagcaggcaua

SEQ ID NO: 115597 - RNA, 22 nt, Artificial Sequence
  Synthetic
  misc_feature (1)..(1): n is a, c, g, or u
nggauaaaaccuagcaggcaua

SEQ ID NO: 115598 - RNA, 23 nt, Artificial Sequence
  Synthetic
  misc_feature (2)..(2): n is a, c, g, or u
unggauaaaaccuagcaggcaua

SEQ ID NO: 115599 - RNA, 24 nt, Artificial Sequence
  Synthetic
  misc_feature (3)..(3): n is a, c, g, or u
uunggauaaaaccuagcaggcaua

SEQ ID NO: 115600 - RNA, 18 nt, Artificial Sequence
  Synthetic
  misc_feature (4)..(4): n is a, c, g, or u
  misc_feature (6)..(6): n is a, c, g, or u
ugungncucucuuuuaua

SEQ ID NO: 115601 - RNA, 20 nt, Artificial Sequence
  Synthetic
  misc_feature (6)..(6): n is a, c, g, or u
  misc_feature (8)..(8): n is a, c, g, or u
cgugungncucucuuuuaua

SEQ ID NO: 115602 - RNA, 21 nt, Artificial Sequence
  Synthetic
  misc_feature (7)..(7): n is a, c, g, or u
  misc_feature (9)..(9): n is a, c, g, or u
acgugungncucucuuuuaua

SEQ ID NO: 115603 - RNA, 22 nt, Artificial Sequence
  Synthetic
  misc_feature (8)..(8): n is a, c, g, or u
  misc_feature (10)..(10): n is a, c, g, or u
uacgugungncucucuuuuaua

SEQ ID NO: 115604 - RNA, 23 nt, Artificial Sequence
  Synthetic
  misc_feature (9)..(9): n is a, c, g, or u
  misc_feature (11)..(11): n is a, c, g, or u
cuacgugungncucucuuuuaua

SEQ ID NO: 115605 - RNA, 18 nt, Artificial Sequence
  Synthetic
  misc_feature (12)..(12): n is a, c, g, or u
acacggguguunccccua

SEQ ID NO: 115606 - RNA, 19 nt, Artificial Sequence
  Synthetic
  misc_feature (13)..(13): n is a, c, g, or u
cacacggguguunccccua

SEQ ID NO: 115607 - RNA, 20 nt, Artificial Sequence
  Synthetic
  misc_feature (14)..(14): n is a, c, g, or u
acacacggguguunccccua

SEQ ID NO: 115608 - RNA, 18 nt, Artificial Sequence
  Synthetic
  misc_feature (14)..(14): n is a, c, g, or u
ccuuccaaagagunugua

SEQ ID NO: 115609 - RNA, 20 nt, Artificial Sequence
  Synthetic
  misc_feature (16)..(16): n is a, c, g, or u
cgccuuccaaagagunugua

SEQ ID NO: 115610 - RNA, 21 nt, Artificial Sequence
  Synthetic
  misc_feature (17)..(17): n is a, c, g, or u
ccgccuuccaaagagunugua

SEQ ID NO: 115611 - RNA, 22 nt, Artificial Sequence
  Synthetic
  misc_feature (18)..(18): n is a, c, g, or u
cccgccuuccaaagagunugua

SEQ ID NO: 115612 - RNA, 23 nt, Artificial Sequence
  Synthetic
  misc_feature (1)..(1): n is a, c, g, or u
  misc_feature (19)..(19): n is a, c, g, or u
ncccgccuuccaaagagunugua

SEQ ID NO: 115613 - RNA, 24 nt, Artificial Sequence
  Synthetic
  misc_feature (2)..(2): n is a, c, g, or u
  misc_feature (20)..(20): n is a, c, g, or u
uncccgccuuccaaagagunugua

SEQ ID NO: 115614 - RNA, 18 nt, Artificial Sequence
  Synthetic
agacaggaaaugugaaac

SEQ ID NO: 115615 - RNA, 19 nt, Artificial Sequence
  Synthetic
aagacaggaaaugugaaac

SEQ ID NO: 115616 - RNA, 20 nt, Artificial Sequence
  Synthetic
uaagacaggaaaugugaaac

SEQ ID NO: 115617 - RNA, 22 nt, Artificial Sequence
  Synthetic
aguaagacaggaaaugugaaac

SEQ ID NO: 115618 - RNA, 23 nt, Artificial Sequence
  Synthetic
aaguaagacaggaaaugugaaac

SEQ ID NO: 115619 - RNA, 24 nt, Artificial Sequence
  Synthetic
aaaguaagacaggaaaugugaaac

SEQ ID NO: 115620 - RNA, 19 nt, Artificial Sequence
  Synthetic
  misc_feature (7)..(7): n is a, c, g, or u
ugccucnucgucuaacaac

SEQ ID NO: 115621 - RNA, 20 nt, Artificial Sequence
  Synthetic
  misc_feature (8)..(8): n is a, c, g, or u
cugccucnucgucuaacaac

SEQ ID NO: 115622 - RNA, 21 nt, Artificial Sequence
  Synthetic
  misc_feature (9)..(9): n is a, c, g, or u
ccugccucnucgucuaacaac

SEQ ID NO: 115623 - RNA, 22 nt, Artificial Sequence
  Synthetic
  misc_feature (10)..(10): n is a, c, g, or u
accugccucnucgucuaacaac

SEQ ID NO: 115624 - RNA, 18 nt, Artificial Sequence
  Synthetic
  misc_feature (9)..(9): n is a, c, g, or u
ccugccucnucgucuaac

SEQ ID NO: 115625 - RNA, 19 nt, Artificial Sequence
  Synthetic
  misc_feature (10)..(10): n is a, c, g, or u
accugccucnucgucuaac

SEQ ID NO: 115626 - RNA, 19 nt, Artificial Sequence
  Synthetic
cgaauuuuggccaagacac

SEQ ID NO: 115627 - RNA, 20 nt, Artificial Sequence
  Synthetic
uggaucggcagaggagacac

SEQ ID NO: 115628 - RNA, 18 nt, Artificial Sequence
  Synthetic
uuccaaauuacuucccac

SEQ ID NO: 115629 - RNA, 19 nt, Artificial Sequence
  Synthetic
cuuccaaauuacuucccac

SEQ ID NO: 115630 - RNA, 20 nt, Artificial Sequence
  Synthetic
ucuuccaaauuacuucccac

SEQ ID NO: 115631 - RNA, 21 nt, Artificial Sequence
  Synthetic
aucuuccaaauuacuucccac

SEQ ID NO: 115632 - RNA, 24 nt, Artificial Sequence
  Synthetic
uggaucuuccaaauuacuucccac

SEQ ID NO: 115633 - RNA, 20 nt, Artificial Sequence
  Synthetic
  misc_feature (8)..(8): n is a, c, g, or u
agguuccngugggcguucac

SEQ ID NO: 115634 - RNA, 21 nt, Artificial Sequence
  Synthetic
  misc_feature (9)..(9): n is a, c, g, or u
cagguuccngugggcguucac

SEQ ID NO: 115635 - RNA, 20 nt, Artificial Sequence
  Synthetic
aggacaaacgggcaacauac

SEQ ID NO: 115636 - RNA, 22 nt, Artificial Sequence
  Synthetic
agaggacaaacgggcaacauac

SEQ ID NO: 115637 - RNA, 23 nt, Artificial Sequence
  Synthetic
uagaggacaaacgggcaacauac

SEQ ID NO: 115638 - RNA, 24 nt, Artificial Sequence
  Synthetic
uuagaggacaaacgggcaacauac

SEQ ID NO: 115639 - RNA, 18 nt, Artificial Sequence
  Synthetic
aauugagagaaguccacc

SEQ ID NO: 115640 - RNA, 19 nt, Artificial Sequence
  Synthetic
aaauugagagaaguccacc

SEQ ID NO: 115641 - RNA, 20 nt, Artificial Sequence
  Synthetic
aaaauugagagaaguccacc

SEQ ID NO: 115642 - RNA, 18 nt, Artificial Sequence
  Synthetic
  misc_feature (1)..(1): n is a, c, g, or u
ngcaaaccccaaaagacc

SEQ ID NO: 115643 - RNA, 19 nt, Artificial Sequence
  Synthetic
  misc_feature (2)..(2): n is a, c, g, or u
cngcaaaccccaaaagacc

SEQ ID NO: 115644 - RNA, 24 nt, Artificial Sequence
  Synthetic
  misc_feature (7)..(7): n is a, c, g, or u
aggggcngcaaaccccaaaagacc

SEQ ID NO: 115645 - RNA, 19 nt, Artificial Sequence
  Synthetic
agccugagggcuccacccc

SEQ ID NO: 115646 - RNA, 19 nt, Artificial Sequence
  Synthetic
cguaaagagaggugcgccc

SEQ ID NO: 115647 - RNA, 18 nt, Artificial Sequence
  Synthetic
  misc_feature (9)..(9): n is a, c, g, or u
  misc_feature (15)..(15): n is a, c, g, or u
uuuacugunaggggnccc

SEQ ID NO: 115648 - RNA, 19 nt, Artificial Sequence
  Synthetic
  misc_feature (10)..(10): n is a, c, g, or u
  misc_feature (16)..(16): n is a, c, g, or u
auuuacugunaggggnccc

SEQ ID NO: 115649 - RNA, 20 nt, Artificial Sequence
  Synthetic
  misc_feature (11)..(11): n is a, c, g, or u
  misc_feature (17)..(17): n is a, c, g, or u
cauuuacugunaggggnccc

SEQ ID NO: 115650 - RNA, 21 nt, Artificial Sequence
  Synthetic
  misc_feature (12)..(12): n is a, c, g, or u
  misc_feature (18)..(18): n is a, c, g, or u
ucauuuacugunaggggnccc

SEQ ID NO: 115651 - RNA, 22 nt, Artificial Sequence
  Synthetic
  misc_feature (13)..(13): n is a, c, g, or u
  misc_feature (19)..(19): n is a, c, g, or u
uucauuuacugunaggggnccc

SEQ ID NO: 115652 - RNA, 23 nt, Artificial Sequence
  Synthetic
  misc_feature (14)..(14): n is a, c, g, or u
  misc_feature (20)..(20): n is a, c, g, or u
uuucauuuacugunaggggnccc

SEQ ID NO: 115653 - RNA, 24 nt, Artificial Sequence
  Synthetic
  misc_feature (15)..(15): n is a, c, g, or u
  misc_feature (21)..(21): n is a, c, g, or u
uuuucauuuacugunaggggnccc

SEQ ID NO: 115654 - RNA, 19 nt, Artificial Sequence
  Synthetic
cggacugaggcccacuccc

SEQ ID NO: 115655 - RNA, 20 nt, Artificial Sequence
  Synthetic
acggacugaggcccacuccc

SEQ ID NO: 115656 - RNA, 21 nt, Artificial Sequence
  Synthetic
aacggacugaggcccacuccc

SEQ ID NO: 115657 - RNA, 22 nt, Artificial Sequence
  Synthetic
aaacggacugaggcccacuccc

SEQ ID NO: 115658 - RNA, 24 nt, Artificial Sequence
  Synthetic
agaaacggacugaggcccacuccc

SEQ ID NO: 115659 - RNA, 19 nt, Artificial Sequence
  Synthetic
  misc_feature (9)..(9): n is a, c, g, or u
ugcuguagnucuuguuccc

SEQ ID NO: 115660 - RNA, 20 nt, Artificial Sequence
  Synthetic
  misc_feature (10)..(10): n is a, c, g, or u
augcuguagnucuuguuccc

SEQ ID NO: 115661 - RNA, 21 nt, Artificial Sequence
  Synthetic
  misc_feature (11)..(11): n is a, c, g, or u
caugcuguagnucuuguuccc

SEQ ID NO: 115662 - RNA, 22 nt, Artificial Sequence
  Synthetic
  misc_feature (12)..(12): n is a, c, g, or u
ccaugcuguagnucuuguuccc

SEQ ID NO: 115663 - RNA, 23 nt, Artificial Sequence
  Synthetic
  misc_feature (13)..(13): n is a, c, g, or u
cccaugcuguagnucuuguuccc

SEQ ID NO: 115664 - RNA, 24 nt, Artificial Sequence
  Synthetic
  misc_feature (14)..(14): n is a, c, g, or u
ucccaugcuguagnucuuguuccc

SEQ ID NO: 115665 - RNA, 18 nt, Artificial Sequence
  Synthetic
agguauuuugcgaaagcc

SEQ ID NO: 115666 - RNA, 19 nt, Artificial Sequence
  Synthetic
uagguauuuugcgaaagcc

SEQ ID NO: 115667 - RNA, 20 nt, Artificial Sequence
  Synthetic
auagguauuuugcgaaagcc

SEQ ID NO: 115668 - RNA, 18 nt, Artificial Sequence
  Synthetic
  misc_feature (16)..(16): n is a, c, g, or u
aagaacaguuucucuncc

SEQ ID NO: 115669 - RNA, 19 nt, Artificial Sequence
  Synthetic
  misc_feature (17)..(17): n is a, c, g, or u
caagaacaguuucucuncc

SEQ ID NO: 115670 - RNA, 20 nt, Artificial Sequence
  Synthetic
  misc_feature (18)..(18): n is a, c, g, or u
ucaagaacaguuucucuncc

SEQ ID NO: 115671 - RNA, 21 nt, Artificial Sequence
  Synthetic
  misc_feature (19)..(19): n is a, c, g, or u
uucaagaacaguuucucuncc

SEQ ID NO: 115672 - RNA, 22 nt, Artificial Sequence
  Synthetic
  misc_feature (20)..(20): n is a, c, g, or u
auucaagaacaguuucucuncc

SEQ ID NO: 115673 - RNA, 23 nt, Artificial Sequence
  Synthetic
  misc_feature (21)..(21): n is a, c, g, or u
uauucaagaacaguuucucuncc

SEQ ID NO: 115674 - RNA, 24 nt, Artificial Sequence
  Synthetic
  misc_feature (22)..(22): n is a, c, g, or u
auauucaagaacaguuucucuncc

SEQ ID NO: 115675 - RNA, 19 nt, Artificial Sequence
  Synthetic
  misc_feature (8)..(8): n is a, c, g, or u
ugcuggunguugaugaucc

SEQ ID NO: 115676 - RNA, 18 nt, Artificial Sequence
  Synthetic
ugacauugcugaaagucc

SEQ ID NO: 115677 - RNA, 19 nt, Artificial Sequence
  Synthetic
uugacauugcugaaagucc

SEQ ID NO: 115678 - RNA, 18 nt, Artificial Sequence
  Synthetic
caggugcaguuuccgucc

SEQ ID NO: 115679 - RNA, 19 nt, Artificial Sequence
  Synthetic
acaggugcaguuuccgucc

SEQ ID NO: 115680 - RNA, 20 nt, Artificial Sequence
  Synthetic
uacaggugcaguuuccgucc

SEQ ID NO: 115681 - RNA, 18 nt, Artificial Sequence
  Synthetic
uagcugacuacuaauucc

SEQ ID NO: 115682 - RNA, 19 nt, Artificial Sequence
  Synthetic
auagcugacuacuaauucc

SEQ ID NO: 115683 - RNA, 20 nt, Artificial Sequence
  Synthetic
cauagcugacuacuaauucc

SEQ ID NO: 115684 - RNA, 21 nt, Artificial Sequence
  Synthetic
acauagcugacuacuaauucc

SEQ ID NO: 115685 - RNA, 23 nt, Artificial Sequence
  Synthetic
ugacauagcugacuacuaauucc

SEQ ID NO: 115686 - RNA, 24 nt, Artificial Sequence
  Synthetic
uugacauagcugacuacuaauucc

SEQ ID NO: 115687 - RNA, 18 nt, Artificial Sequence
  Synthetic
uacuaacauugagauucc

SEQ ID NO: 115688 - RNA, 19 nt, Artificial Sequence
  Synthetic
auacuaacauugagauucc

SEQ ID NO: 115689 - RNA, 20 nt, Artificial Sequence
  Synthetic
aauacuaacauugagauucc

SEQ ID NO: 115690 - RNA, 23 nt, Artificial Sequence
  Synthetic
aggaauacuaacauugagauucc

SEQ ID NO: 115691 - RNA, 24 nt, Artificial Sequence
  Synthetic
aaggaauacuaacauugagauucc

SEQ ID NO: 115692 - RNA, 18 nt, Artificial Sequence
  Synthetic
cuaacaacaguaguuucc

SEQ ID NO: 115693 - RNA, 19 nt, Artificial Sequence
  Synthetic
ucuaacaacaguaguuucc

SEQ ID NO: 115694 - RNA, 18 nt, Artificial Sequence
  Synthetic
cauagagguuccuugagc

SEQ ID NO: 115695 - RNA, 19 nt, Artificial Sequence
  Synthetic
acauagagguuccuugagc

SEQ ID NO: 115696 - RNA, 20 nt, Artificial Sequence
  Synthetic
aacauagagguuccuugagc

SEQ ID NO: 115697 - RNA, 18 nt, Artificial Sequence
  Synthetic
  misc_feature (5)..(5): n is a, c, g, or u
aacangagaugauuaggc

SEQ ID NO: 115698 - RNA, 20 nt, Artificial Sequence
  Synthetic
  misc_feature (7)..(7): n is a, c, g, or u
ugaacangagaugauuaggc

SEQ ID NO: 115699 - RNA, 21 nt, Artificial Sequence
  Synthetic
  misc_feature (8)..(8): n is a, c, g, or u
augaacangagaugauuaggc

SEQ ID NO: 115700 - RNA, 22 nt, Artificial Sequence
  Synthetic
  misc_feature (9)..(9): n is a, c, g, or u
caugaacangagaugauuaggc

SEQ ID NO: 115701 - RNA, 23 nt, Artificial Sequence
  Synthetic
  misc_feature (10)..(10): n is a, c, g, or u
acaugaacangagaugauuaggc

SEQ ID NO: 115702 - RNA, 21 nt, Artificial Sequence
  Synthetic
  misc_feature (9)..(10): n is a, c, g, or u
uggggaggnnugaacccuggc

SEQ ID NO: 115703 - RNA, 22 nt, Artificial Sequence
  Synthetic
  misc_feature (10)..(11): n is a, c, g, or u
auggggaggnnugaacccuggc

SEQ ID NO: 115704 - RNA, 23 nt, Artificial Sequence
  Synthetic
  misc_feature (11)..(12): n is a, c, g, or u
cauggggaggnnugaacccuggc

SEQ ID NO: 115705 - RNA, 24 nt, Artificial Sequence
  Synthetic
  misc_feature (12)..(13): n is a, c, g, or u
ccauggggaggnnugaacccuggc

SEQ ID NO: 115706 - RNA, 18 nt, Artificial Sequence
  Synthetic
  misc_feature (7)..(7): n is a, c, g, or u
  misc_feature (13)..(13): n is a, c, g, or u
aaauugnuuacancuauc

SEQ ID NO: 115707 - RNA, 19 nt, Artificial Sequence
  Synthetic
  misc_feature (8)..(8): n is a, c, g, or u
  misc_feature (14)..(14): n is a, c, g, or u
caaauugnuuacancuauc

SEQ ID NO: 115708 - RNA, 20 nt, Artificial Sequence
  Synthetic
  misc_feature (9)..(9): n is a, c, g, or u
  misc_feature (15)..(15): n is a, c, g, or u
acaaauugnuuacancuauc

SEQ ID NO: 115709 - RNA, 21 nt, Artificial Sequence
  Synthetic
  misc_feature (10)..(10): n is a, c, g, or u
  misc_feature (16)..(16): n is a, c, g, or u
cacaaauugnuuacancuauc

SEQ ID NO: 115710 - RNA, 22 nt, Artificial Sequence
  Synthetic
  misc_feature (11)..(11): n is a, c, g, or u
  misc_feature (17)..(17): n is a, c, g, or u
ccacaaauugnuuacancuauc

SEQ ID NO: 115711 - RNA, 23 nt, Artificial Sequence
  Synthetic
  misc_feature (12)..(12): n is a, c, g, or u
  misc_feature (18)..(18): n is a, c, g, or u
cccacaaauugnuuacancuauc

SEQ ID NO: 115712 - RNA, 24 nt, Artificial Sequence
  Synthetic
  misc_feature (1)..(1): n is a, c, g, or u
  misc_feature (13)..(13): n is a, c, g, or u
  misc_feature (19)..(19): n is a, c, g, or u
ncccacaaauugnuuacancuauc

SEQ ID NO: 115713 - RNA, 18 nt, Artificial Sequence
  Synthetic
  misc_feature (8)..(8): n is a, c, g, or u
aguacagngcccugacuc

SEQ ID NO: 115714 - RNA, 19 nt, Artificial Sequence
  Synthetic
  misc_feature (9)..(9): n is a, c, g, or u
aaguacagngcccugacuc

SEQ ID NO: 115715 - RNA, 20 nt, Artificial Sequence
  Synthetic
  misc_feature (10)..(10): n is a, c, g, or u
aaaguacagngcccugacuc

SEQ ID NO: 115716 - RNA, 23 nt, Artificial Sequence
  Synthetic
  misc_feature (13)..(13): n is a, c, g, or u
aggaaaguacagngcccugacuc

SEQ ID NO: 115717 - RNA, 24 nt, Artificial Sequence
  Synthetic
  misc_feature (14)..(14): n is a, c, g, or u
caggaaaguacagngcccugacuc

SEQ ID NO: 115718 - RNA, 19 nt, Artificial Sequence
  Synthetic
cgguacaggguccccaguc

SEQ ID NO: 115719 - RNA, 20 nt, Artificial Sequence
  Synthetic
ucgguacaggguccccaguc

SEQ ID NO: 115720 - RNA, 18 nt, Artificial Sequence
  Synthetic
acaagcggcuaggaguuc

SEQ ID NO: 115721 - RNA, 19 nt, Artificial Sequence
  Synthetic
aacaagcggcuaggaguuc

SEQ ID NO: 115722 - RNA, 20 nt, Artificial Sequence
  Synthetic
aaacaagcggcuaggaguuc

SEQ ID NO: 115723 - RNA, 18 nt, Artificial Sequence
  Synthetic
cauauaaaggcauuaaag

SEQ ID NO: 115724 - RNA, 20 nt, Artificial Sequence
  Synthetic
ugcauauaaaggcauuaaag

SEQ ID NO: 115725 - RNA, 21 nt, Artificial Sequence
  Synthetic
augcauauaaaggcauuaaag

SEQ ID NO: 115726 - RNA, 22 nt, Artificial Sequence
  Synthetic
caugcauauaaaggcauuaaag

SEQ ID NO: 115727 - RNA, 23 nt, Artificial Sequence
  Synthetic
acaugcauauaaaggcauuaaag

SEQ ID NO: 115728 - RNA, 24 nt, Artificial Sequence
  Synthetic
uacaugcauauaaaggcauuaaag

SEQ ID NO: 115729 - RNA, 18 nt, Artificial Sequence
  Synthetic
  misc_feature (6)..(6): n is a, c, g, or u
  misc_feature (8)..(8): n is a, c, g, or u
ugccanunaggauuaaag

SEQ ID NO: 115730 - RNA, 19 nt, Artificial Sequence
  Synthetic
  misc_feature (7)..(7): n is a, c, g, or u
  misc_feature (9)..(9): n is a, c, g, or u
uugccanunaggauuaaag

SEQ ID NO: 115731 - RNA, 20 nt, Artificial Sequence
  Synthetic
  misc_feature (8)..(8): n is a, c, g, or u
  misc_feature (10)..(10): n is a, c, g, or u
uuugccanunaggauuaaag

SEQ ID NO: 115732 - RNA, 22 nt, Artificial Sequence
  Synthetic
  misc_feature (10)..(10): n is a, c, g, or u
  misc_feature (12)..(12): n is a, c, g, or u
aguuugccanunaggauuaaag

SEQ ID NO: 115733 - RNA, 18 nt, Artificial Sequence
  Synthetic
uuugaaguaugccucaag

SEQ ID NO: 115734 - RNA, 19 nt, Artificial Sequence
  Synthetic
cuuugaaguaugccucaag

SEQ ID NO: 115735 - RNA, 20 nt, Artificial Sequence
  Synthetic
ucuuugaaguaugccucaag

SEQ ID NO: 115736 - RNA, 22 nt, Artificial Sequence
  Synthetic
agucuuugaaguaugccucaag

SEQ ID NO: 115737 - RNA, 23 nt, Artificial Sequence
  Synthetic
cagucuuugaaguaugccucaag

SEQ ID NO: 115738 - RNA, 24 nt, Artificial Sequence
  Synthetic
acagucuuugaaguaugccucaag

SEQ ID NO: 115739 - RNA, 18 nt, Artificial Sequence
  Synthetic
  misc_feature (4)..(4): n is a, c, g, or u
aganaccaaauauucaag

SEQ ID NO: 115740 - RNA, 19 nt, Artificial Sequence
  Synthetic
  misc_feature (5)..(5): n is a, c, g, or u
aaganaccaaauauucaag

SEQ ID NO: 115741 - RNA, 20 nt, Artificial Sequence
  Synthetic
  misc_feature (6)..(6): n is a, c, g, or u
aaaganaccaaauauucaag

SEQ ID NO: 115742 - RNA, 21 nt, Artificial Sequence
  Synthetic
  misc_feature (7)..(7): n is a, c, g, or u
aaaaganaccaaauauucaag

SEQ ID NO: 115743 - RNA, 22 nt, Artificial Sequence
  Synthetic
  misc_feature (8)..(8): n is a, c, g, or u
caaaaganaccaaauauucaag

SEQ ID NO: 115744 - RNA, 23 nt, Artificial Sequence
  Synthetic
  misc_feature (9)..(9): n is a, c, g, or u
ccaaaaganaccaaauauucaag

SEQ ID NO: 115745 - RNA, 24 nt, Artificial Sequence
  Synthetic
  misc_feature (10)..(10): n is a, c, g, or u
uccaaaaganaccaaauauucaag

SEQ ID NO: 115746 - RNA, 18 nt, Artificial Sequence
  Synthetic
  misc_feature (5)..(5): n is a, c, g, or u
ccagnggauuggggacag

SEQ ID NO: 115747 - RNA, 19 nt, Artificial Sequence
  Synthetic
  misc_feature (6)..(6): n is a, c, g, or u
cccagnggauuggggacag

SEQ ID NO: 115748 - RNA, 20 nt, Artificial Sequence
  Synthetic
  misc_feature (7)..(7): n is a, c, g, or u
ucccagnggauuggggacag

SEQ ID NO: 115749 - RNA, 21 nt, Artificial Sequence
  Synthetic
  misc_feature (8)..(8): n is a, c, g, or u
aucccagnggauuggggacag

SEQ ID NO: 115750 - RNA, 22 nt, Artificial Sequence
  Synthetic
  misc_feature (9)..(9): n is a, c, g, or u
aaucccagnggauuggggacag

SEQ ID NO: 115751 - RNA, 24 nt, Artificial Sequence
  Synthetic
  misc_feature (11)..(11): n is a, c, g, or u
agaaucccagnggauuggggacag

SEQ ID NO: 115752 - RNA, 18 nt, Artificial Sequence
  Synthetic
aacuggagccaccagcag

SEQ ID NO: 115753 - RNA, 20 nt, Artificial Sequence
  Synthetic
ugaacuggagccaccagcag

SEQ ID NO: 115754 - RNA, 21 nt, Artificial Sequence
  Synthetic
cugaacuggagccaccagcag

SEQ ID NO: 115755 - RNA, 22 nt, Artificial Sequence
  Synthetic
ccugaacuggagccaccagcag

SEQ ID NO: 115756 - RNA, 23 nt, Artificial Sequence
  Synthetic
uccugaacuggagccaccagcag

SEQ ID NO: 115757 - RNA, 24 nt, Artificial Sequence
  Synthetic
uuccugaacuggagccaccagcag

SEQ ID NO: 115758 - RNA, 19 nt, Artificial Sequence
  Synthetic
agaagaugaggcauagcag

SEQ ID NO: 115759 - RNA, 20 nt, Artificial Sequence
  Synthetic
aagaagaugaggcauagcag

SEQ ID NO: 115760 - RNA, 18 nt, Artificial Sequence
  Synthetic
cucugggaucuugaagag

SEQ ID NO: 115761 - RNA, 19 nt, Artificial Sequence
  Synthetic
acucugggaucuugaagag

SEQ ID NO: 115762 - RNA, 18 nt, Artificial Sequence
  Synthetic
uagcagcaggaugcagag

SEQ ID NO: 115763 - RNA, 19 nt, Artificial Sequence
  Synthetic
auagcagcaggaugcagag

SEQ ID NO: 115764 - RNA, 20 nt, Artificial Sequence
  Synthetic
cauagcagcaggaugcagag

SEQ ID NO: 115765 - RNA, 23 nt, Artificial Sequence
  Synthetic
aggcauagcagcaggaugcagag

SEQ ID NO: 115766 - RNA, 18 nt, Artificial Sequence
  Synthetic
  misc_feature (2)..(2): n is a, c, g, or u
unccccuagaaaauugag

SEQ ID NO: 115767 - RNA, 19 nt, Artificial Sequence
  Synthetic
  misc_feature (3)..(3): n is a, c, g, or u
uunccccuagaaaauugag

SEQ ID NO: 115768 - RNA, 21 nt, Artificial Sequence
  Synthetic
  misc_feature (5)..(5): n is a, c, g, or u
uguunccccuagaaaauugag

SEQ ID NO: 115769 - RNA, 18 nt, Artificial Sequence
  Synthetic
  misc_feature (6)..(7): n is a, c, g, or u
uaaagnnagguaccguag

SEQ ID NO: 115770 - RNA, 19 nt, Artificial Sequence
  Synthetic
  misc_feature (7)..(8): n is a, c, g, or u
uuaaagnnagguaccguag

SEQ ID NO: 115771 - RNA, 20 nt, Artificial Sequence
  Synthetic
  misc_feature (8)..(9): n is a, c, g, or u
auuaaagnnagguaccguag

SEQ ID NO: 115772 - RNA, 23 nt, Artificial Sequence
  Synthetic
  misc_feature (11)..(12): n is a, c, g, or u
aggauuaaagnnagguaccguag

SEQ ID NO: 115773 - RNA, 24 nt, Artificial Sequence
  Synthetic
  misc_feature (1)..(1): n is a, c, g, or u
  misc_feature (12)..(13): n is a, c, g, or u
naggauuaaagnnagguaccguag

SEQ ID NO: 115774 - RNA, 19 nt, Artificial Sequence
  Synthetic
agaugagaaggcacagacg

SEQ ID NO: 115775 - RNA, 20 nt, Artificial Sequence
  Synthetic
  misc_feature (1)..(1): n is a, c, g, or u
nagaugagaaggcacagacg

SEQ ID NO: 115776 - RNA, 18 nt, Artificial Sequence
  Synthetic
caagaauauggugacccg

SEQ ID NO: 115777 - RNA, 19 nt, Artificial Sequence
  Synthetic
ccaagaauauggugacccg

SEQ ID NO: 115778 - RNA, 20 nt, Artificial Sequence
  Synthetic
cccaagaauauggugacccg

SEQ ID NO: 115779 - RNA, 21 nt, Artificial Sequence
  Synthetic
ucccaagaauauggugacccg

SEQ ID NO: 115780 - RNA, 22 nt, Artificial Sequence
  Synthetic
uucccaagaauauggugacccg

SEQ ID NO: 115781 - RNA, 24 nt, Artificial Sequence
  Synthetic
uguucccaagaauauggugacccg

SEQ ID NO: 115782 - RNA, 18 nt, Artificial Sequence
  Synthetic
uagaagaauaaagccccg

SEQ ID NO: 115783 - RNA, 20 nt, Artificial Sequence
  Synthetic
cguagaagaauaaagccccg

SEQ ID NO: 115784 - RNA, 18 nt, Artificial Sequence
  Synthetic
cugccuuccugacugccg

SEQ ID NO: 115785 - RNA, 18 nt, Artificial Sequence
  Synthetic
uagcuugccugagugccg

SEQ ID NO: 115786 - RNA, 19 nt, Artificial Sequence
  Synthetic
auagcuugccugagugccg

SEQ ID NO: 115787 - RNA, 20 nt, Artificial Sequence
  Synthetic
aauagcuugccugagugccg

SEQ ID NO: 115788 - RNA, 18 nt, Artificial Sequence
  Synthetic
cccgggaggggucguccg

SEQ ID NO: 115789 - RNA, 19 nt, Artificial Sequence
  Synthetic
ccccgggaggggucguccg

SEQ ID NO: 115790 - RNA, 18 nt, Artificial Sequence
  Synthetic
  misc_feature (3)..(4): n is a, c, g, or u
  misc_feature (8)..(8): n is a, c, g, or u
acnncagncggagaagcg

SEQ ID NO: 115791 - RNA, 19 nt, Artificial Sequence
  Synthetic
  misc_feature (4)..(5): n is a, c, g, or u
  misc_feature (9)..(9): n is a, c, g, or u
uacnncagncggagaagcg

SEQ ID NO: 115792 - RNA, 22 nt, Artificial Sequence
  Synthetic
  misc_feature (7)..(8): n is a, c, g, or u
  misc_feature (12)..(12): n is a, c, g, or u
cgguacnncagncggagaagcg

SEQ ID NO: 115793 - RNA, 23 nt, Artificial Sequence
  Synthetic
  misc_feature (8)..(9): n is a, c, g, or u
  misc_feature (13)..(13): n is a, c, g, or u
ucgguacnncagncggagaagcg

SEQ ID NO: 115794 - RNA, 18 nt, Artificial Sequence
  Synthetic
  misc_feature (5)..(5): n is a, c, g, or u
ugaunccuuuaucuaagg

SEQ ID NO: 115795 - RNA, 19 nt, Artificial Sequence
  Synthetic
  misc_feature (6)..(6): n is a, c, g, or u
uugaunccuuuaucuaagg

SEQ ID NO: 115796 - RNA, 20 nt, Artificial Sequence
  Synthetic
  misc_feature (7)..(7): n is a, c, g, or u
uuugaunccuuuaucuaagg

SEQ ID NO: 115797 - RNA, 23 nt, Artificial Sequence
  Synthetic
  misc_feature (1)..(1): n is a, c, g, or u
  misc_feature (10)..(10): n is a, c, g, or u
ngguuugaunccuuuaucuaagg

SEQ ID NO: 115798 - RNA, 24 nt, Artificial Sequence
  Synthetic
  misc_feature (2)..(2): n is a, c, g, or u
  misc_feature (11)..(11): n is a, c, g, or u
angguuugaunccuuuaucuaagg

SEQ ID NO: 115799 - RNA, 18 nt, Artificial Sequence
  Synthetic
augggaugggaauacagg

SEQ ID NO: 115800 - RNA, 20 nt, Artificial Sequence
  Synthetic
ugaugggaugggaauacagg

SEQ ID NO: 115801 - RNA, 21 nt, Artificial Sequence
  Synthetic
augaugggaugggaauacagg

SEQ ID NO: 115802 - RNA, 23 nt, Artificial Sequence
  Synthetic
agaugaugggaugggaauacagg

SEQ ID NO: 115803 - RNA, 24 nt, Artificial Sequence
  Synthetic
aagaugaugggaugggaauacagg

SEQ ID NO: 115804 - RNA, 18 nt, Artificial Sequence
  Synthetic
  misc_feature (1)..(1): n is a, c, g, or u
nggauaaaaccuagcagg

SEQ ID NO: 115805 - RNA, 19 nt, Artificial Sequence
  Synthetic
  misc_feature (2)..(2): n is a, c, g, or u
unggauaaaaccuagcagg

SEQ ID NO: 115806 - RNA, 20 nt, Artificial Sequence
  Synthetic
  misc_feature (3)..(3): n is a, c, g, or u
uunggauaaaaccuagcagg

SEQ ID NO: 115807 - RNA, 21 nt, Artificial Sequence
  Synthetic
  misc_feature (4)..(4): n is a, c, g, or u
auunggauaaaaccuagcagg

SEQ ID NO: 115808 - RNA, 22 nt, Artificial Sequence
  Synthetic
  misc_feature (5)..(5): n is a, c, g, or u
cauunggauaaaaccuagcagg

SEQ ID NO: 115809 - RNA, 23 nt, Artificial Sequence
  Synthetic
  misc_feature (6)..(6): n is a, c, g, or u
acauunggauaaaaccuagcagg

SEQ ID NO: 115810 - RNA, 24 nt, Artificial Sequence
  Synthetic
  misc_feature (7)..(7): n is a, c, g, or u
aacauunggauaaaaccuagcagg

SEQ ID NO: 115811 - RNA, 18 nt, Artificial Sequence
  Synthetic
ugguggucuauaugcagg

SEQ ID NO: 115812 - RNA, 19 nt, Artificial Sequence
  Synthetic
uugguggucuauaugcagg

SEQ ID NO: 115813 - RNA, 20 nt, Artificial Sequence
  Synthetic
uuugguggucuauaugcagg

SEQ ID NO: 115814 - RNA, 18 nt, Artificial Sequence
  Synthetic
ccacugcauggccugagg

SEQ ID NO: 115815 - RNA, 19 nt, Artificial Sequence
  Synthetic
uccacugcauggccugagg

SEQ ID NO: 115816 - RNA, 20 nt, Artificial Sequence
  Synthetic
uuccacugcauggccugagg

SEQ ID NO: 115817 - RNA, 19 nt, Artificial Sequence
  Synthetic
agccccaagcggccccggg

SEQ ID NO: 115818 - RNA, 18 nt, Artificial Sequence
  Synthetic
  misc_feature (3)..(3): n is a, c, g, or u
  misc_feature (16)..(16): n is a, c, g, or u
auncucuggauaauangg

SEQ ID NO: 115819 - RNA, 19 nt, Artificial Sequence
  Synthetic
  misc_feature (4)..(4): n is a, c, g, or u
  misc_feature (17)..(17): n is a, c, g, or u
cauncucuggauaauangg

SEQ ID NO: 115820 - RNA, 20 nt, Artificial Sequence
  Synthetic
  misc_feature (5)..(5): n is a, c, g, or u
  misc_feature (18)..(18): n is a, c, g, or u
acauncucuggauaauangg

SEQ ID NO: 115821 - RNA, 21 nt, Artificial Sequence
  Synthetic
  misc_feature (6)..(6): n is a, c, g, or u
  misc_feature (19)..(19): n is a, c, g, or u
uacauncucuggauaauangg

SEQ ID NO: 115822 - RNA, 22 nt, Artificial Sequence
  Synthetic
  misc_feature (7)..(7): n is a, c, g, or u
  misc_feature (20)..(20): n is a, c, g, or u
cuacauncucuggauaauangg

SEQ ID NO: 115823 - RNA, 23 nt, Artificial Sequence
  Synthetic
  misc_feature (8)..(8): n is a, c, g, or u
  misc_feature (21)..(21): n is a, c, g, or u
acuacauncucuggauaauangg

SEQ ID NO: 115824 - RNA, 24 nt, Artificial Sequence
  Synthetic
  misc_feature (9)..(9): n is a, c, g, or u
  misc_feature (22)..(22): n is a, c, g, or u
aacuacauncucuggauaauangg

SEQ ID NO: 115825 - RNA, 18 nt, Artificial Sequence
  Synthetic
  misc_feature (16)..(16): n is a, c, g, or u
uccaaauucuuuauangg

SEQ ID NO: 115826 - RNA, 19 nt, Artificial Sequence
  Synthetic
  misc_feature (17)..(17): n is a, c, g, or u
cuccaaauucuuuauangg

SEQ ID NO: 115827 - RNA, 21 nt, Artificial Sequence
  Synthetic
  misc_feature (19)..(19): n is a, c, g, or u
agcuccaaauucuuuauangg

SEQ ID NO: 115828 - RNA, 22 nt, Artificial Sequence
  Synthetic
  misc_feature (20)..(20): n is a, c, g, or u
aagcuccaaauucuuuauangg

SEQ ID NO: 115829 - RNA, 24 nt, Artificial Sequence
  Synthetic
  misc_feature (22)..(22): n is a, c, g, or u
agaagcuccaaauucuuuauangg

SEQ ID NO: 115830 - RNA, 18 nt, Artificial Sequence
  Synthetic
  misc_feature (1)..(1): n is a, c, g, or u
ngugcagguuuugcaugg

SEQ ID NO: 115831 - RNA, 19 nt, Artificial Sequence
  Synthetic
  misc_feature (2)..(2): n is a, c, g, or u
ungugcagguuuugcaugg

SEQ ID NO: 115832 - RNA, 21 nt, Artificial Sequence
  Synthetic
  misc_feature (4)..(4): n is a, c, g, or u
agungugcagguuuugcaugg

SEQ ID NO: 115833 - RNA, 24 nt, Artificial Sequence
  Synthetic
  misc_feature (7)..(7): n is a, c, g, or u
aggagungugcagguuuugcaugg

SEQ ID NO: 115834 - RNA, 18 nt, Artificial Sequence
  Synthetic
aggaggaggagcugcugg

SEQ ID NO: 115835 - RNA, 19 nt, Artificial Sequence
  Synthetic
caggaggaggagcugcugg

SEQ ID NO: 115836 - RNA, 22 nt, Artificial Sequence
  Synthetic
aggcaggaggaggagcugcugg

SEQ ID NO: 115837 - RNA, 18 nt, Artificial Sequence
  Synthetic
uacuucccacccaggugg

SEQ ID NO: 115838 - RNA, 19 nt, Artificial Sequence
  Synthetic
uuacuucccacccaggugg

SEQ ID NO: 115839 - RNA, 20 nt, Artificial Sequence
  Synthetic
auuacuucccacccaggugg

SEQ ID NO: 115840 - RNA, 18 nt, Artificial Sequence
  Synthetic
ucuuaugcaagaccuugg

SEQ ID NO: 115841 - RNA, 19 nt, Artificial Sequence
  Synthetic
cucuuaugcaagaccuugg

SEQ ID NO: 115842 - RNA, 20 nt, Artificial Sequence
  Synthetic
ccucuuaugcaagaccuugg

SEQ ID NO: 115843 - RNA, 18 nt, Artificial Sequence
  Synthetic
cugaguuggcuuugaaug

SEQ ID NO: 115844 - RNA, 19 nt, Artificial Sequence
  Synthetic
ucugaguuggcuuugaaug

SEQ ID NO: 115845 - RNA, 20 nt, Artificial Sequence
  Synthetic
uucugaguuggcuuugaaug

SEQ ID NO: 115846 - RNA, 21 nt, Artificial Sequence
  Synthetic
uuucugaguuggcuuugaaug

SEQ ID NO: 115847 - RNA, 22 nt, Artificial Sequence
  Synthetic
uuuucugaguuggcuuugaaug

SEQ ID NO: 115848 - RNA, 23 nt, Artificial Sequence
  Synthetic
auuuucugaguuggcuuugaaug

SEQ ID NO: 115849 - RNA, 18 nt, Artificial Sequence
  Synthetic
cuacuaauucccuggaug

SEQ ID NO: 115850 - RNA, 19 nt, Artificial Sequence
  Synthetic
acuacuaauucccuggaug

SEQ ID NO: 115851 - RNA, 21 nt, Artificial Sequence
  Synthetic
ugacuacuaauucccuggaug

SEQ ID NO: 115852 - RNA, 22 nt, Artificial Sequence
  Synthetic
cugacuacuaauucccuggaug

SEQ ID NO: 115853 - RNA, 24 nt, Artificial Sequence
  Synthetic
agcugacuacuaauucccuggaug

SEQ ID NO: 115854 - RNA, 19 nt, Artificial Sequence
  Synthetic
  misc_feature (14)..(14): n is a, c, g, or u
ugauuaacuacauncucug

SEQ ID NO: 115855 - RNA, 20 nt, Artificial Sequence
  Synthetic
  misc_feature (15)..(15): n is a, c, g, or u
augauuaacuacauncucug

SEQ ID NO: 115856 - RNA, 21 nt, Artificial Sequence
  Synthetic
  misc_feature (16)..(16): n is a, c, g, or u
aaugauuaacuacauncucug

SEQ ID NO: 115857 - RNA, 22 nt, Artificial Sequence
  Synthetic
  misc_feature (17)..(17): n is a, c, g, or u
uaaugauuaacuacauncucug

SEQ ID NO: 115858 - RNA, 24 nt, Artificial Sequence
  Synthetic
  misc_feature (19)..(19): n is a, c, g, or u
aguaaugauuaacuacauncucug

SEQ ID NO: 115859 - RNA, 18 nt, Artificial Sequence
  Synthetic
agagaggugcgccccgug

SEQ ID NO: 115860 - RNA, 19 nt, Artificial Sequence
  Synthetic
aagagaggugcgccccgug

SEQ ID NO: 115861 - RNA, 20 nt, Artificial Sequence
  Synthetic
aaagagaggugcgccccgug

SEQ ID NO: 115862 - RNA, 19 nt, Artificial Sequence
  Synthetic
agugccguauggugaggug

SEQ ID NO: 115863 - RNA, 20 nt, Artificial Sequence
  Synthetic
aggcacagcuuggaggcuug

SEQ ID NO: 115864 - RNA, 21 nt, Artificial Sequence
  Synthetic
aaggcacagcuuggaggcuug

SEQ ID NO: 115865 - RNA, 22 nt, Artificial Sequence
  Synthetic
caaggcacagcuuggaggcuug

SEQ ID NO: 115866 - RNA, 23 nt, Artificial Sequence
  Synthetic
ccaaggcacagcuuggaggcuug

SEQ ID NO: 115867 - RNA, 24 nt, Artificial Sequence
  Synthetic
cccaaggcacagcuuggaggcuug

SEQ ID NO: 115868 - RNA, 18 nt, Artificial Sequence
  Synthetic
ccugacucugggaucuug

SEQ ID NO: 115869 - RNA, 19 nt, Artificial Sequence
  Synthetic
cccugacucugggaucuug

SEQ ID NO: 115870 - RNA, 21 nt, Artificial Sequence
  Synthetic
  misc_feature (1)..(1): n is a, c, g, or u
ngcccugacucugggaucuug

SEQ ID NO: 115871 - RNA, 23 nt, Artificial Sequence
  Synthetic
  misc_feature (3)..(3): n is a, c, g, or u
agngcccugacucugggaucuug

SEQ ID NO: 115872 - RNA, 24 nt, Artificial Sequence
  Synthetic
  misc_feature (4)..(4): n is a, c, g, or u
cagngcccugacucugggaucuug

SEQ ID NO: 115873 - RNA, 20 nt, Artificial Sequence
  Synthetic
aggcagaggugaaaaaguug

SEQ ID NO: 115874 - RNA, 21 nt, Artificial Sequence
  Synthetic
uaggcagaggugaaaaaguug

SEQ ID NO: 115875 - RNA, 22 nt, Artificial Sequence
  Synthetic
uuaggcagaggugaaaaaguug

SEQ ID NO: 115876 - RNA, 23 nt, Artificial Sequence
  Synthetic
auuaggcagaggugaaaaaguug

SEQ ID NO: 115877 - RNA, 18 nt, Artificial Sequence
  Synthetic
  misc_feature (14)..(14): n is a, c, g, or u
uuggaggacaacanguug

SEQ ID NO: 115878 - RNA, 19 nt, Artificial Sequence
  Synthetic
  misc_feature (15)..(15): n is a, c, g, or u
auuggaggacaacanguug

SEQ ID NO: 115879 - RNA, 20 nt, Artificial Sequence
  Synthetic
  misc_feature (16)..(16): n is a, c, g, or u
aauuggaggacaacanguug

SEQ ID NO: 115880 - RNA, 21 nt, Artificial Sequence
  Synthetic
  misc_feature (17)..(17): n is a, c, g, or u
aaauuggaggacaacanguug

SEQ ID NO: 115881 - RNA, 22 nt, Artificial Sequence
  Synthetic
  misc_feature (18)..(18): n is a, c, g, or u
caaauuggaggacaacanguug

SEQ ID NO: 115882 - RNA, 23 nt, Artificial Sequence
  Synthetic
  misc_feature (19)..(19): n is a, c, g, or u
acaaauuggaggacaacanguug

SEQ ID NO: 115883 - RNA, 19 nt, Artificial Sequence
  Synthetic
  misc_feature (16)..(16): n is a, c, g, or u
ugugaaaccacaauanuug

SEQ ID NO: 115884 - RNA, 20 nt, Artificial Sequence
  Synthetic
  misc_feature (17)..(17): n is a, c, g, or u
augugaaaccacaauanuug

SEQ ID NO: 115885 - RNA, 21 nt, Artificial Sequence
  Synthetic
  misc_feature (18)..(18): n is a, c, g, or u
aaugugaaaccacaauanuug

SEQ ID NO: 115886 - RNA, 22 nt, Artificial Sequence
  Synthetic
  misc_feature (19)..(19): n is a, c, g, or u
aaaugugaaaccacaauanuug

SEQ ID NO: 115887 - RNA, 19 nt, Artificial Sequence
  Synthetic
  misc_feature (7)..(7): n is a, c, g, or u
aggagungugcagguuuug

SEQ ID NO: 115888 - RNA, 20 nt, Artificial Sequence
  Synthetic
  misc_feature (8)..(8): n is a, c, g, or u
caggagungugcagguuuug

SEQ ID NO: 115889 - RNA, 22 nt, Artificial Sequence
  Synthetic
  misc_feature (10)..(10): n is a, c, g, or u
agcaggagungugcagguuuug

SEQ ID NO: 115890 - RNA, 24 nt, Artificial Sequence
  Synthetic
  misc_feature (12)..(12): n is a, c, g, or u
ugagcaggagungugcagguuuug

SEQ ID NO: 115891 - RNA, 18 nt, Artificial Sequence
  Synthetic
  misc_feature (4)..(6): n is a, c, g, or u
acannnuuugauuuuuug

SEQ ID NO: 115892 - RNA, 19 nt, Artificial Sequence
  Synthetic
  misc_feature (5)..(7): n is a, c, g, or u
aacannnuuugauuuuuug

SEQ ID NO: 115893 - RNA, 20 nt, Artificial Sequence
  Synthetic
  misc_feature (6)..(8): n is a, c, g, or u
aaacannnuuugauuuuuug

SEQ ID NO: 115894 - RNA, 21 nt, Artificial Sequence
  Synthetic
  misc_feature (7)..(9): n is a, c, g, or u
aaaacannnuuugauuuuuug

SEQ ID NO: 115895 - RNA, 22 nt, Artificial Sequence
  Synthetic
  misc_feature (8)..(10): n is a, c, g, or u
uaaaacannnuuugauuuuuug

SEQ ID NO: 115896 - RNA, 23 nt, Artificial Sequence
  Synthetic
  misc_feature (9)..(11): n is a, c, g, or u
cuaaaacannnuuugauuuuuug

SEQ ID NO: 115897 - RNA, 24 nt, Artificial Sequence
  Synthetic
  misc_feature (10)..(12): n is a, c, g, or u
ccuaaaacannnuuugauuuuuug

SEQ ID NO: 115898 - RNA, 18 nt, Artificial Sequence
  Synthetic
  misc_feature (18)..(18): n is a, c, g, or u
caaauuggaggacaacan

SEQ ID NO: 115899 - RNA, 19 nt, Artificial Sequence
  Synthetic
  misc_feature (19)..(19): n is a, c, g, or u
acaaauuggaggacaacan

SEQ ID NO: 115900 - RNA, 22 nt, Artificial Sequence
  Synthetic
  misc_feature (22)..(22): n is a, c, g, or u
aggacaaauuggaggacaacan

SEQ ID NO: 115901 - RNA, 23 nt, Artificial Sequence
  Synthetic
  misc_feature (23)..(23): n is a, c, g, or u
caggacaaauuggaggacaacan

SEQ ID NO: 115902 - RNA, 24 nt, Artificial Sequence
  Synthetic
  misc_feature (24)..(24): n is a, c, g, or u
ccaggacaaauuggaggacaacan

SEQ ID NO: 115903 - RNA, 18 nt, Artificial Sequence
  Synthetic
  misc_feature (18)..(18): n is a, c, g, or u
cauggugcuggugaacan

SEQ ID NO: 115904 - RNA, 20 nt, Artificial Sequence
  Synthetic
  misc_feature (20)..(20): n is a, c, g, or u
ugcauggugcuggugaacan

SEQ ID NO: 115905 - RNA, 21 nt, Artificial Sequence
  Synthetic
  misc_feature (21)..(21): n is a, c, g, or u
uugcauggugcuggugaacan

SEQ ID NO: 115906 - RNA, 23 nt, Artificial Sequence
  Synthetic
  misc_feature (23)..(23): n is a, c, g, or u
aguugcauggugcuggugaacan

SEQ ID NO: 115907 - RNA, 24 nt, Artificial Sequence
  Synthetic
  misc_feature (24)..(24): n is a, c, g, or u
aaguugcauggugcuggugaacan

SEQ ID NO: 115908 - RNA, 18 nt, Artificial Sequence
  Synthetic
  misc_feature (1)..(1): n is a, c, g, or u
  misc_feature (16)..(16): n is a, c, g, or u
  misc_feature (18)..(18): n is a, c, g, or u
ncuuagagguggaganan

SEQ ID NO: 115909 - RNA, 19 nt, Artificial Sequence
  Synthetic
  misc_feature (2)..(2): n is a, c, g, or u
  misc_feature (17)..(17): n is a, c, g, or u
  misc_feature (19)..(19): n is a, c, g, or u
cncuuagagguggaganan

SEQ ID NO: 115910 - RNA, 20 nt, Artificial Sequence
  Synthetic
  misc_feature (3)..(3): n is a, c, g, or u
  misc_feature (18)..(18): n is a, c, g, or u
  misc_feature (20)..(20): n is a, c, g, or u
ucncuuagagguggaganan

SEQ ID NO: 115911 - RNA, 22 nt, Artificial Sequence
  Synthetic
  misc_feature (5)..(5): n is a, c, g, or u
  misc_feature (20)..(20): n is a, c, g, or u
  misc_feature (22)..(22): n is a, c, g, or u
ugucncuuagagguggaganan

SEQ ID NO: 115912 - RNA, 24 nt, Artificial Sequence
  Synthetic
  misc_feature (7)..(7): n is a, c, g, or u
  misc_feature (22)..(22): n is a, c, g, or u
  misc_feature (24)..(24): n is a, c, g, or u
agugucncuuagagguggaganan

SEQ ID NO: 115913 - RNA, 18 nt, Artificial Sequence
  Synthetic
  misc_feature (1)..(1): n is a, c, g, or u
  misc_feature (7)..(7): n is a, c, g, or u
  misc_feature (18)..(18): n is a, c, g, or u
nggcaangugccccaacn

SEQ ID NO: 115914 - RNA, 20 nt, Artificial Sequence
  Synthetic
  misc_feature (3)..(3): n is a, c, g, or u
  misc_feature (9)..(9): n is a, c, g, or u
  misc_feature (20)..(20): n is a, c, g, or u
ugnggcaangugccccaacn

SEQ ID NO: 115915 - RNA, 21 nt, Artificial Sequence
  Synthetic
  misc_feature (1)..(1): n is a, c, g, or u
  misc_feature (4)..(4): n is a, c, g, or u
  misc_feature (10)..(10): n is a, c, g, or u
  misc_feature (21)..(21): n is a, c, g, or u
nugnggcaangugccccaacn

SEQ ID NO: 115916 - RNA, 22 nt, Artificial Sequence
  Synthetic
  misc_feature (2)..(2): n is a, c, g, or u
  misc_feature (5)..(5): n is a, c, g, or u
  misc_feature (11)..(11): n is a, c, g, or u
  misc_feature (22)..(22): n is a, c, g, or u
cnugnggcaangugccccaacn

SEQ ID NO: 115917 - RNA, 23 nt, Artificial Sequence
  Synthetic
  misc_feature (3)..(3): n is a, c, g, or u
  misc_feature (6)..(6): n is a, c, g, or u
  misc_feature (12)..(12): n is a, c, g, or u
  misc_feature (23)..(23): n is a, c, g, or u
ucnugnggcaangugccccaacn

SEQ ID NO: 115918 - RNA, 24 nt, Artificial Sequence
  Synthetic
  misc_feature (4)..(4): n is a, c, g, or u
  misc_feature (7)..(7): n is a, c, g, or u
  misc_feature (13)..(13): n is a, c, g, or u
  misc_feature (24)..(24): n is a, c, g, or u
uucnugnggcaangugccccaacn

SEQ ID NO: 115919 - RNA, 22 nt, Artificial Sequence
  Synthetic
  misc_feature (22)..(22): n is a, c, g, or u
aggguccaacugaugaucgggn

SEQ ID NO: 115920 - RNA, 23 nt, Artificial Sequence
  Synthetic
  misc_feature (23)..(23): n is a, c, g, or u
caggguccaacugaugaucgggn

SEQ ID NO: 115921 - RNA, 18 nt, Artificial Sequence
  Synthetic
  misc_feature (16)..(18): n is a, c, g, or u
aaguuuccuaaaacannn

SEQ ID NO: 115922 - RNA, 21 nt, Artificial Sequence
  Synthetic
  misc_feature (19)..(21): n is a, c, g, or u
aggaaguuuccuaaaacannn

SEQ ID NO: 115923 - RNA, 22 nt, Artificial Sequence
  Synthetic
  misc_feature (20)..(22): n is a, c, g, or u
caggaaguuuccuaaaacannn

SEQ ID NO: 115924 - RNA, 23 nt, Artificial Sequence
  Synthetic
  misc_feature (21)..(23): n is a, c, g, or u
acaggaaguuuccuaaaacannn

SEQ ID NO: 115925 - RNA, 24 nt, Artificial Sequence
  Synthetic
  misc_feature (22)..(24): n is a, c, g, or u
uacaggaaguuuccuaaaacannn

SEQ ID NO: 115926 - RNA, 18 nt, Artificial Sequence
  Synthetic
  misc_feature (18)..(18): n is a, c, g, or u
caugguccggugcuggun

SEQ ID NO: 115927 - RNA, 20 nt, Artificial Sequence
  Synthetic
  misc_feature (20)..(20): n is a, c, g, or u
ugcaugguccggugcuggun

SEQ ID NO: 115928 - RNA, 21 nt, Artificial Sequence
  Synthetic
  misc_feature (21)..(21): n is a, c, g, or u
uugcaugguccggugcuggun

SEQ ID NO: 115929 - RNA, 22 nt, Artificial Sequence
  Synthetic
  misc_feature (22)..(22): n is a, c, g, or u
uuugcaugguccggugcuggun

SEQ ID NO: 115930 - RNA, 23 nt, Artificial Sequence
  Synthetic
  misc_feature (23)..(23): n is a, c, g, or u
uuuugcaugguccggugcuggun

SEQ ID NO: 115931 - RNA, 19 nt, Artificial Sequence
  Synthetic
  misc_feature (3)..(3): n is a, c, g, or u
ugnggguugaggucccaau

SEQ ID NO: 115932 - RNA, 21 nt, Artificial Sequence
  Synthetic
  misc_feature (5)..(5): n is a, c, g, or u
ugugnggguugaggucccaau

SEQ ID NO: 115933 - RNA, 22 nt, Artificial Sequence
  Synthetic
  misc_feature (6)..(6): n is a, c, g, or u
uugugnggguugaggucccaau

SEQ ID NO: 115934 - RNA, 23 nt, Artificial Sequence
  Synthetic
  misc_feature (7)..(7): n is a, c, g, or u
cuugugnggguugaggucccaau

SEQ ID NO: 115935 - RNA, 24 nt, Artificial Sequence
  Synthetic
  misc_feature (8)..(8): n is a, c, g, or u
ccuugugnggguugaggucccaau

SEQ ID NO: 115936 - RNA, 18 nt, Artificial Sequence
  Synthetic
agaugaugggaugggaau

SEQ ID NO: 115937 - RNA, 19 nt, Artificial Sequence
  Synthetic
aagaugaugggaugggaau

SEQ ID NO: 115938 - RNA, 20 nt, Artificial Sequence
  Synthetic
caagaugaugggaugggaau

SEQ ID NO: 115939 - RNA, 21 nt, Artificial Sequence
  Synthetic
ccaagaugaugggaugggaau

SEQ ID NO: 115940 - RNA, 22 nt, Artificial Sequence
  Synthetic
cccaagaugaugggaugggaau

SEQ ID NO: 115941 - RNA, 24 nt, Artificial Sequence
  Synthetic
agcccaagaugaugggaugggaau

SEQ ID NO: 115942 - RNA, 18 nt, Artificial Sequence
  Synthetic
cuagcaggcauaauuaau

SEQ ID NO: 115943 - RNA, 19 nt, Artificial Sequence
  Synthetic
ccuagcaggcauaauuaau

SEQ ID NO: 115944 - RNA, 20 nt, Artificial Sequence
  Synthetic
accuagcaggcauaauuaau

SEQ ID NO: 115945 - RNA, 21 nt, Artificial Sequence
  Synthetic
aaccuagcaggcauaauuaau

SEQ ID NO: 115946 - RNA, 22 nt, Artificial Sequence
  Synthetic
aaaccuagcaggcauaauuaau

SEQ ID NO: 115947 - RNA, 23 nt, Artificial Sequence
  Synthetic
aaaaccuagcaggcauaauuaau

SEQ ID NO: 115948 - RNA, 24 nt, Artificial Sequence
  Synthetic
uaaaaccuagcaggcauaauuaau

SEQ ID NO: 115949 - RNA, 19 nt, Artificial Sequence
  Synthetic
agcaacaugagggaaacau

SEQ ID NO: 115950 - RNA, 20 nt, Artificial Sequence
  Synthetic
cagcaacaugagggaaacau

SEQ ID NO: 115951 - RNA, 21 nt, Artificial Sequence
  Synthetic
acagcaacaugagggaaacau

SEQ ID NO: 115952 - RNA, 22 nt, Artificial Sequence
  Synthetic
uacagcaacaugagggaaacau

SEQ ID NO: 115953 - RNA, 24 nt, Artificial Sequence
  Synthetic
uguacagcaacaugagggaaacau

SEQ ID NO: 115954 - RNA, 18 nt, Artificial Sequence
  Synthetic
uccaaggaauacuaacau

SEQ ID NO: 115955 - RNA, 20 nt, Artificial Sequence
  Synthetic
  misc_feature (1)..(1): n is a, c, g, or u
nguccaaggaauacuaacau

SEQ ID NO: 115956 - RNA, 22 nt, Artificial Sequence
  Synthetic
  misc_feature (3)..(3): n is a, c, g, or u
ugnguccaaggaauacuaacau

SEQ ID NO: 115957 - RNA, 23 nt, Artificial Sequence
  Synthetic
  misc_feature (4)..(4): n is a, c, g, or u
augnguccaaggaauacuaacau

SEQ ID NO: 115958 - RNA, 24 nt, Artificial Sequence
  Synthetic
  misc_feature (5)..(5): n is a, c, g, or u
uaugnguccaaggaauacuaacau

SEQ ID NO: 115959 - RNA, 21 nt, Artificial Sequence
  Synthetic
agggcaaauauuuaguaacau

SEQ ID NO: 115960 - RNA, 22 nt, Artificial Sequence
  Synthetic
aagggcaaauauuuaguaacau

SEQ ID NO: 115961 - RNA, 23 nt, Artificial Sequence
  Synthetic
uaagggcaaauauuuaguaacau

SEQ ID NO: 115962 - RNA, 24 nt, Artificial Sequence
  Synthetic
cuaagggcaaauauuuaguaacau

SEQ ID NO: 115963 - RNA, 18 nt, Artificial Sequence
  Synthetic
cauugagauucccgagau

SEQ ID NO: 115964 - RNA, 19 nt, Artificial Sequence
  Synthetic
acauugagauucccgagau

SEQ ID NO: 115965 - RNA, 20 nt, Artificial Sequence
  Synthetic
aacauugagauucccgagau

SEQ ID NO: 115966 - RNA, 18 nt, Artificial Sequence
  Synthetic
agcccaagaugaugggau

SEQ ID NO: 115967 - RNA, 19 nt, Artificial Sequence
  Synthetic
aagcccaagaugaugggau

SEQ ID NO: 115968 - RNA, 20 nt, Artificial Sequence
  Synthetic
aaagcccaagaugaugggau

SEQ ID NO: 115969 - RNA, 22 nt, Artificial Sequence
  Synthetic
cgaaagcccaagaugaugggau

SEQ ID NO: 115970 - RNA, 24 nt, Artificial Sequence
  Synthetic
ugcgaaagcccaagaugaugggau

SEQ ID NO: 115971 - RNA, 18 nt, Artificial Sequence
  Synthetic
aagcuccaaauucuuuau

SEQ ID NO: 115972 - RNA, 20 nt, Artificial Sequence
  Synthetic
agaagcuccaaauucuuuau

SEQ ID NO: 115973 - RNA, 18 nt, Artificial Sequence
  Synthetic
ugaaugcaggguccaacu

SEQ ID NO: 115974 - RNA, 19 nt, Artificial Sequence
  Synthetic
uugaaugcaggguccaacu

SEQ ID NO: 115975 - RNA, 20 nt, Artificial Sequence
  Synthetic
uuugaaugcaggguccaacu

SEQ ID NO: 115976 - RNA, 18 nt, Artificial Sequence
  Synthetic
  misc_feature (7)..(7): n is a, c, g, or u
cagcggnauaaagggacu

SEQ ID NO: 115977 - RNA, 19 nt, Artificial Sequence
  Synthetic
  misc_feature (8)..(8): n is a, c, g, or u
acagcggnauaaagggacu

SEQ ID NO: 115978 - RNA, 20 nt, Artificial Sequence
  Synthetic
  misc_feature (9)..(9): n is a, c, g, or u
aacagcggnauaaagggacu

SEQ ID NO: 115979 - RNA, 21 nt, Artificial Sequence
  Synthetic
  misc_feature (10)..(10): n is a, c, g, or u
uaacagcggnauaaagggacu

SEQ ID NO: 115980 - RNA, 24 nt, Artificial Sequence
  Synthetic
  misc_feature (13)..(13): n is a, c, g, or u
ugguaacagcggnauaaagggacu

SEQ ID NO: 115981 - RNA, 19 nt, Artificial Sequence
  Synthetic
ugacuggagauuugggacu

SEQ ID NO: 115982 - RNA, 18 nt, Artificial Sequence
  Synthetic
uaggcugccuuccugacu

SEQ ID NO: 115983 - RNA, 20 nt, Artificial Sequence
  Synthetic
aguaggcugccuuccugacu

SEQ ID NO: 115984 - RNA, 24 nt, Artificial Sequence
  Synthetic
  misc_feature (1)..(1): n is a, c, g, or u
ngggaguaggcugccuuccugacu

SEQ ID NO: 115985 - RNA, 18 nt, Artificial Sequence
  Synthetic
  misc_feature (3)..(3): n is a, c, g, or u
acnuugacauagcugacu

SEQ ID NO: 115986 - RNA, 19 nt, Artificial Sequence
  Synthetic
  misc_feature (4)..(4): n is a, c, g, or u
aacnuugacauagcugacu

SEQ ID NO: 115987 - RNA, 20 nt, Artificial Sequence
  Synthetic
  misc_feature (5)..(5): n is a, c, g, or u
uaacnuugacauagcugacu

SEQ ID NO: 115988 - RNA, 21 nt, Artificial Sequence
  Synthetic
  misc_feature (6)..(6): n is a, c, g, or u
uuaacnuugacauagcugacu

SEQ ID NO: 115989 - RNA, 22 nt, Artificial Sequence
  Synthetic
  misc_feature (7)..(7): n is a, c, g, or u
auuaacnuugacauagcugacu

SEQ ID NO: 115990 - RNA, 23 nt, Artificial Sequence
  Synthetic
  misc_feature (8)..(8): n is a, c, g, or u
uauuaacnuugacauagcugacu

SEQ ID NO: 115991 - RNA, 24 nt, Artificial Sequence
  Synthetic
  misc_feature (9)..(9): n is a, c, g, or u
auauuaacnuugacauagcugacu

SEQ ID NO: 115992 - RNA, 18 nt, Artificial Sequence
  Synthetic
  misc_feature (4)..(4): n is a, c, g, or u
acanguuggugagugacu

SEQ ID NO: 115993 - RNA, 19 nt, Artificial Sequence
  Synthetic
  misc_feature (5)..(5): n is a, c, g, or u
aacanguuggugagugacu

SEQ ID NO: 115994 - RNA, 20 nt, Artificial Sequence
  Synthetic
  misc_feature (6)..(6): n is a, c, g, or u
caacanguuggugagugacu

SEQ ID NO: 115995 - RNA, 21 nt, Artificial Sequence
  Synthetic
  misc_feature (7)..(7): n is a, c, g, or u
acaacanguuggugagugacu

SEQ ID NO: 115996 - RNA, 24 nt, Artificial Sequence
  Synthetic
  misc_feature (10)..(10): n is a, c, g, or u
aggacaacanguuggugagugacu

SEQ ID NO: 115997 - RNA, 21 nt, Artificial Sequence
  Synthetic
accaauuuaugccuacagccu

SEQ ID NO: 115998 - RNA, 22 nt, Artificial Sequence
  Synthetic
  misc_feature (1)..(1): n is a, c, g, or u
naccaauuuaugccuacagccu

SEQ ID NO: 115999 - RNA, 23 nt, Artificial Sequence
  Synthetic
  misc_feature (2)..(2): n is a, c, g, or u
anaccaauuuaugccuacagccu

SEQ ID NO: 116000 - RNA, 24 nt, Artificial Sequence
  Synthetic
  misc_feature (3)..(3): n is a, c, g, or u
canaccaauuuaugccuacagccu

SEQ ID NO: 116001 - RNA, 18 nt, Artificial Sequence
  Synthetic
agucuuugaaguaugccu

SEQ ID NO: 116002 - RNA, 19 nt, Artificial Sequence
  Synthetic
cagucuuugaaguaugccu

SEQ ID NO: 116003 - RNA, 20 nt, Artificial Sequence
  Synthetic
acagucuuugaaguaugccu

SEQ ID NO: 116004 - RNA, 18 nt, Artificial Sequence
  Synthetic
uaucaacaauguccuccu

SEQ ID NO: 116005 - RNA, 19 nt, Artificial Sequence
  Synthetic
cuaucaacaauguccuccu

SEQ ID NO: 116006 - RNA, 20 nt, Artificial Sequence
  Synthetic
  misc_feature (1)..(1): n is a, c, g, or u
ncuaucaacaauguccuccu

SEQ ID NO: 116007 - RNA, 18 nt, Artificial Sequence
  Synthetic
aguaacuccacagaagcu

SEQ ID NO: 116008 - RNA, 20 nt, Artificial Sequence
  Synthetic
agaguaacuccacagaagcu

SEQ ID NO: 116009 - RNA, 22 nt, Artificial Sequence
  Synthetic
agagaguaacuccacagaagcu

SEQ ID NO: 116010 - RNA, 23 nt, Artificial Sequence
  Synthetic
aagagaguaacuccacagaagcu

SEQ ID NO: 116011 - RNA, 24 nt, Artificial Sequence
  Synthetic
aaagagaguaacuccacagaagcu

SEQ ID NO: 116012 - RNA, 19 nt, Artificial Sequence
  Synthetic
uggauuuucugaguuggcu

SEQ ID NO: 116013 - RNA, 20 nt, Artificial Sequence
  Synthetic
cuggauuuucugaguuggcu

SEQ ID NO: 116014 - RNA, 18 nt, Artificial Sequence
  Synthetic
  misc_feature (16)..(16): n is a, c, g, or u
aaugauuaacuacauncu

SEQ ID NO: 116015 - RNA, 19 nt, Artificial Sequence
  Synthetic
  misc_feature (17)..(17): n is a, c, g, or u
uaaugauuaacuacauncu

SEQ ID NO: 116016 - RNA, 21 nt, Artificial Sequence
  Synthetic
  misc_feature (19)..(19): n is a, c, g, or u
aguaaugauuaacuacauncu

SEQ ID NO: 116017 - RNA, 22 nt, Artificial Sequence
  Synthetic
  misc_feature (20)..(20): n is a, c, g, or u
aaguaaugauuaacuacauncu

SEQ ID NO: 116018 - RNA, 19 nt, Artificial Sequence
  Synthetic
  misc_feature (14)..(15): n is a, c, g, or u
uguaaauaaugucnngucu

SEQ ID NO: 116019 - RNA, 20 nt, Artificial Sequence
  Synthetic
  misc_feature (1)..(1): n is a, c, g, or u
  misc_feature (15)..(16): n is a, c, g, or u
nuguaaauaaugucnngucu

SEQ ID NO: 116020 - RNA, 21 nt, Artificial Sequence
  Synthetic
  misc_feature (2)..(2): n is a, c, g, or u
  misc_feature (16)..(17): n is a, c, g, or u
unuguaaauaaugucnngucu

SEQ ID NO: 116021 - RNA, 23 nt, Artificial Sequence
  Synthetic
  misc_feature (4)..(4): n is a, c, g, or u
  misc_feature (18)..(19): n is a, c, g, or u
agunuguaaauaaugucnngucu

SEQ ID NO: 116022 - RNA, 18 nt, Artificial Sequence
  Synthetic
  misc_feature (7)..(8): n is a, c, g, or u
aaugucnngucuggaagu

SEQ ID NO: 116023 - RNA, 19 nt, Artificial Sequence
  Synthetic
  misc_feature (8)..(9): n is a, c, g, or u
uaaugucnngucuggaagu

SEQ ID NO: 116024 - RNA, 20 nt, Artificial Sequence
  Synthetic
  misc_feature (9)..(10): n is a, c, g, or u
auaaugucnngucuggaagu

SEQ ID NO: 116025 - RNA, 21 nt, Artificial Sequence
  Synthetic
  misc_feature (10)..(11): n is a, c, g, or u
aauaaugucnngucuggaagu

SEQ ID NO: 116026 - RNA, 22 nt, Artificial Sequence
  Synthetic
  misc_feature (11)..(12): n is a, c, g, or u
aaauaaugucnngucuggaagu

SEQ ID NO: 116027 - RNA, 23 nt, Artificial Sequence
  Synthetic
  misc_feature (12)..(13): n is a, c, g, or u
uaaauaaugucnngucuggaagu

SEQ ID NO: 116028 - RNA, 19 nt, Artificial Sequence
  Synthetic
uggccaagccccaaccagu

SEQ ID NO: 116029 - RNA, 20 nt, Artificial Sequence
  Synthetic
auggccaagccccaaccagu

SEQ ID NO: 116030 - RNA, 19 nt, Artificial Sequence
  Synthetic
cggcuaggaguuccgcagu

SEQ ID NO: 116031 - RNA, 18 nt, Artificial Sequence
  Synthetic
  misc_feature (1)..(1): n is a, c, g, or u
nacgacagaauugucagu

SEQ ID NO: 116032 - RNA, 20 nt, Artificial Sequence
  Synthetic
  misc_feature (3)..(3): n is a, c, g, or u
agnacgacagaauugucagu

SEQ ID NO: 116033 - RNA, 21 nt, Artificial Sequence
  Synthetic
  misc_feature (1)..(1): n is a, c, g, or u
  misc_feature (4)..(4): n is a, c, g, or u
nagnacgacagaauugucagu

SEQ ID NO: 116034 - RNA, 22 nt, Artificial Sequence
  Synthetic
  misc_feature (2)..(2): n is a, c, g, or u
  misc_feature (5)..(5): n is a, c, g, or u
anagnacgacagaauugucagu

SEQ ID NO: 116035 - RNA, 18 nt, Artificial Sequence
  Synthetic
ucuauaugcaggaggagu

SEQ ID NO: 116036 - RNA, 21 nt, Artificial Sequence
  Synthetic
uggucuauaugcaggaggagu

SEQ ID NO: 116037 - RNA, 24 nt, Artificial Sequence
  Synthetic
ugguggucuauaugcaggaggagu

SEQ ID NO: 116038 - RNA, 18 nt, Artificial Sequence
  Synthetic
  misc_feature (8)..(8): n is a, c, g, or u
ccuugugnggguugaggu

SEQ ID NO: 116039 - RNA, 19 nt, Artificial Sequence
  Synthetic
  misc_feature (9)..(9): n is a, c, g, or u
uccuugugnggguugaggu

SEQ ID NO: 116040 - RNA, 21 nt, Artificial Sequence
  Synthetic
  misc_feature (11)..(11): n is a, c, g, or u
uguccuugugnggguugaggu

SEQ ID NO: 116041 - RNA, 22 nt, Artificial Sequence
  Synthetic
  misc_feature (12)..(12): n is a, c, g, or u
uuguccuugugnggguugaggu

SEQ ID NO: 116042 - RNA, 24 nt, Artificial Sequence
  Synthetic
  misc_feature (14)..(14): n is a, c, g, or u
aguuguccuugugnggguugaggu

SEQ ID NO: 116043 - RNA, 19 nt, Artificial Sequence
  Synthetic
agguuuugcaugguccggu

SEQ ID NO: 116044 - RNA, 20 nt, Artificial Sequence
  Synthetic
cagguuuugcaugguccggu

SEQ ID NO: 116045 - RNA, 22 nt, Artificial Sequence
  Synthetic
ugcagguuuugcaugguccggu

SEQ ID NO: 116046 - RNA, 24 nt, Artificial Sequence
  Synthetic
  misc_feature (1)..(1): n is a, c, g, or u
ngugcagguuuugcaugguccggu

SEQ ID NO: 116047 - RNA, 18 nt, Artificial Sequence
  Synthetic
  misc_feature (11)..(11): n is a, c, g, or u
uuuuuguuuunugagggu

SEQ ID NO: 116048 - RNA, 19 nt, Artificial Sequence
  Synthetic
  misc_feature (12)..(12): n is a, c, g, or u
cuuuuuguuuunugagggu

SEQ ID NO: 116049 - RNA, 20 nt, Artificial Sequence
  Synthetic
  misc_feature (13)..(13): n is a, c, g, or u
ucuuuuuguuuunugagggu

SEQ ID NO: 116050 - RNA, 21 nt, Artificial Sequence
  Synthetic
  misc_feature (14)..(14): n is a, c, g, or u
aucuuuuuguuuunugagggu

SEQ ID NO: 116051 - RNA, 22 nt, Artificial Sequence
  Synthetic
  misc_feature (15)..(15): n is a, c, g, or u
caucuuuuuguuuunugagggu

SEQ ID NO: 116052 - RNA, 23 nt, Artificial Sequence
  Synthetic
  misc_feature (16)..(16): n is a, c, g, or u
ccaucuuuuuguuuunugagggu

SEQ ID NO: 116053 - RNA, 24 nt, Artificial Sequence
  Synthetic
  misc_feature (17)..(17): n is a, c, g, or u
cccaucuuuuuguuuunugagggu

SEQ ID NO: 116054 - RNA, 18 nt, Artificial Sequence
  Synthetic
  misc_feature (14)..(14): n is a, c, g, or u
aguuguccuugugngggu

SEQ ID NO: 116055 - RNA, 19 nt, Artificial Sequence
  Synthetic
  misc_feature (15)..(15): n is a, c, g, or u
caguuguccuugugngggu

SEQ ID NO: 116056 - RNA, 20 nt, Artificial Sequence
  Synthetic
  misc_feature (16)..(16): n is a, c, g, or u
ccaguuguccuugugngggu

SEQ ID NO: 116057 - RNA, 20 nt, Artificial Sequence
  Synthetic
aggugaaaaaguugcauggu

SEQ ID NO: 116058 - RNA, 18 nt, Artificial Sequence
  Synthetic
  misc_feature (16)..(16): n is a, c, g, or u
uccuugagcaggagungu

SEQ ID NO: 116059 - RNA, 19 nt, Artificial Sequence
  Synthetic
  misc_feature (17)..(17): n is a, c, g, or u
uuccuugagcaggagungu

SEQ ID NO: 116060 - RNA, 22 nt, Artificial Sequence
  Synthetic
  misc_feature (20)..(20): n is a, c, g, or u
agguuccuugagcaggagungu

SEQ ID NO: 116061 - RNA, 24 nt, Artificial Sequence
  Synthetic
  misc_feature (22)..(22): n is a, c, g, or u
agagguuccuugagcaggagungu

SEQ ID NO: 116062 - RNA, 18 nt, Artificial Sequence
  Synthetic
uagacucugugguauugu

SEQ ID NO: 116063 - RNA, 19 nt, Artificial Sequence
  Synthetic
cuagacucugugguauugu

SEQ ID NO: 116064 - RNA, 20 nt, Artificial Sequence
  Synthetic
ucuagacucugugguauugu

SEQ ID NO: 116065 - RNA, 18 nt, Artificial Sequence
  Synthetic
ccggccaguuguccuugu

SEQ ID NO: 116066 - RNA, 19 nt, Artificial Sequence
  Synthetic
uccggccaguuguccuugu

SEQ ID NO: 116067 - RNA, 18 nt, Artificial Sequence
  Synthetic
  misc_feature (17)..(17): n is a, c, g, or u
aagaaggaguuugccanu

SEQ ID NO: 116068 - RNA, 19 nt, Artificial Sequence
  Synthetic
  misc_feature (18)..(18): n is a, c, g, or u
aaagaaggaguuugccanu

SEQ ID NO: 116069 - RNA, 20 nt, Artificial Sequence
  Synthetic
  misc_feature (19)..(19): n is a, c, g, or u
aaaagaaggaguuugccanu

SEQ ID NO: 116070 - RNA, 23 nt, Artificial Sequence
  Synthetic
  misc_feature (22)..(22): n is a, c, g, or u
aggaaaagaaggaguuugccanu

SEQ ID NO: 116071 - RNA, 24 nt, Artificial Sequence
  Synthetic
  misc_feature (23)..(23): n is a, c, g, or u
caggaaaagaaggaguuugccanu

SEQ ID NO: 116072 - RNA, 18 nt, Artificial Sequence
  Synthetic
  misc_feature (17)..(17): n is a, c, g, or u
ccgccuuccaaagagunu

SEQ ID NO: 116073 - RNA, 19 nt, Artificial Sequence
  Synthetic
  misc_feature (18)..(18): n is a, c, g, or u
cccgccuuccaaagagunu

SEQ ID NO: 116074 - RNA, 20 nt, Artificial Sequence
  Synthetic
  misc_feature (1)..(1): n is a, c, g, or u
  misc_feature (19)..(19): n is a, c, g, or u
ncccgccuuccaaagagunu

SEQ ID NO: 116075 - RNA, 21 nt, Artificial Sequence
  Synthetic
  misc_feature (2)..(2): n is a, c, g, or u
  misc_feature (20)..(20): n is a, c, g, or u
uncccgccuuccaaagagunu

SEQ ID NO: 116076 - RNA, 22 nt, Artificial Sequence
  Synthetic
  misc_feature (3)..(3): n is a, c, g, or u
  misc_feature (21)..(21): n is a, c, g, or u
auncccgccuuccaaagagunu

SEQ ID NO: 116077 - RNA, 24 nt, Artificial Sequence
  Synthetic
  misc_feature (5)..(5): n is a, c, g, or u
  misc_feature (23)..(23): n is a, c, g, or u
agauncccgccuuccaaagagunu

SEQ ID NO: 116078 - RNA, 18 nt, Artificial Sequence
  Synthetic
  misc_feature (17)..(17): n is a, c, g, or u
cccaucuuuuuguuuunu

SEQ ID NO: 116079 - RNA, 19 nt, Artificial Sequence
  Synthetic
  misc_feature (18)..(18): n is a, c, g, or u
ccccaucuuuuuguuuunu

SEQ ID NO: 116080 - RNA, 20 nt, Artificial Sequence
  Synthetic
  misc_feature (19)..(19): n is a, c, g, or u
uccccaucuuuuuguuuunu

SEQ ID NO: 116081 - RNA, 21 nt, Artificial Sequence
  Synthetic
  misc_feature (20)..(20): n is a, c, g, or u
auccccaucuuuuuguuuunu

SEQ ID NO: 116082 - RNA, 22 nt, Artificial Sequence
  Synthetic
  misc_feature (21)..(21): n is a, c, g, or u
uauccccaucuuuuuguuuunu

SEQ ID NO: 116083 - RNA, 23 nt, Artificial Sequence
  Synthetic
  misc_feature (22)..(22): n is a, c, g, or u
auauccccaucuuuuuguuuunu

SEQ ID NO: 116084 - RNA, 24 nt, Artificial Sequence
  Synthetic
  misc_feature (23)..(23): n is a, c, g, or u
aauauccccaucuuuuuguuuunu

SEQ ID NO: 116085 - RNA, 20 nt, Artificial Sequence
  Synthetic
  misc_feature (6)..(6): n is a, c, g, or u
  misc_feature (9)..(9): n is a, c, g, or u
cggganagnacgacagaauu

SEQ ID NO: 116086 - RNA, 22 nt, Artificial Sequence
  Synthetic
  misc_feature (8)..(8): n is a, c, g, or u
  misc_feature (11)..(11): n is a, c, g, or u
ugcggganagnacgacagaauu

SEQ ID NO: 116087 - RNA, 23 nt, Artificial Sequence
  Synthetic
  misc_feature (9)..(9): n is a, c, g, or u
  misc_feature (12)..(12): n is a, c, g, or u
uugcggganagnacgacagaauu

SEQ ID NO: 116088 - RNA, 24 nt, Artificial Sequence
  Synthetic
  misc_feature (1)..(1): n is a, c, g, or u
  misc_feature (10)..(10): n is a, c, g, or u
  misc_feature (13)..(13): n is a, c, g, or u
nuugcggganagnacgacagaauu

SEQ ID NO: 116089 - RNA, 18 nt, Artificial Sequence
  Synthetic
  misc_feature (14)..(14): n is a, c, g, or u
caauucguugacanacuu

SEQ ID NO: 116090 - RNA, 19 nt, Artificial Sequence
  Synthetic
  misc_feature (15)..(15): n is a, c, g, or u
acaauucguugacanacuu

SEQ ID NO: 116091 - RNA, 20 nt, Artificial Sequence
  Synthetic
  misc_feature (16)..(16): n is a, c, g, or u
cacaauucguugacanacuu

SEQ ID NO: 116092 - RNA, 23 nt, Artificial Sequence
  Synthetic
aggacaaacgggcaacauaccuu

SEQ ID NO: 116093 - RNA, 18 nt, Artificial Sequence
  Synthetic
  misc_feature (4)..(4): n is a, c, g, or u
uuuncuuagaaaggccuu

SEQ ID NO: 116094 - RNA, 20 nt, Artificial Sequence
  Synthetic
  misc_feature (6)..(6): n is a, c, g, or u
uguuuncuuagaaaggccuu

SEQ ID NO: 116095 - RNA, 21 nt, Artificial Sequence
  Synthetic
  misc_feature (1)..(1): n is a, c, g, or u
  misc_feature (7)..(7): n is a, c, g, or u
nuguuuncuuagaaaggccuu

SEQ ID NO: 116096 - RNA, 22 nt, Artificial Sequence
  Synthetic
  misc_feature (2)..(2): n is a, c, g, or u
  misc_feature (8)..(8): n is a, c, g, or u
anuguuuncuuagaaaggccuu

SEQ ID NO: 116097 - RNA, 23 nt, Artificial Sequence
  Synthetic
  misc_feature (3)..(3): n is a, c, g, or u
  misc_feature (9)..(9): n is a, c, g, or u
uanuguuuncuuagaaaggccuu

SEQ ID NO: 116098 - RNA, 24 nt, Artificial Sequence
  Synthetic
  misc_feature (4)..(4): n is a, c, g, or u
  misc_feature (10)..(10): n is a, c, g, or u
auanuguuuncuuagaaaggccuu

SEQ ID NO: 116099 - RNA, 18 nt, Artificial Sequence
  Synthetic
  misc_feature (15)..(15): n is a, c, g, or u
ugaggaugagugucncuu

SEQ ID NO: 116100 - RNA, 19 nt, Artificial Sequence
  Synthetic
  misc_feature (16)..(16): n is a, c, g, or u
cugaggaugagugucncuu

SEQ ID NO: 116101 - RNA, 20 nt, Artificial Sequence
  Synthetic
  misc_feature (17)..(17): n is a, c, g, or u
ccugaggaugagugucncuu

SEQ ID NO: 116102 - RNA, 23 nt, Artificial Sequence
  Synthetic
  misc_feature (20)..(20): n is a, c, g, or u
uggccugaggaugagugucncuu

SEQ ID NO: 116103 - RNA, 24 nt, Artificial Sequence
  Synthetic
  misc_feature (21)..(21): n is a, c, g, or u
auggccugaggaugagugucncuu

SEQ ID NO: 116104 - RNA, 18 nt, Artificial Sequence
  Synthetic
cccuggaugcuggaucuu

SEQ ID NO: 116105 - RNA, 19 nt, Artificial Sequence
  Synthetic
ucccuggaugcuggaucuu

SEQ ID NO: 116106 - RNA, 20 nt, Artificial Sequence
  Synthetic
uucccuggaugcuggaucuu

SEQ ID NO: 116107 - RNA, 18 nt, Artificial Sequence
  Synthetic
  misc_feature (3)..(3): n is a, c, g, or u
canuaaacacacagucuu

SEQ ID NO: 116108 - RNA, 19 nt, Artificial Sequence
  Synthetic
  misc_feature (4)..(4): n is a, c, g, or u
ucanuaaacacacagucuu

SEQ ID NO: 116109 - RNA, 20 nt, Artificial Sequence
  Synthetic
  misc_feature (5)..(5): n is a, c, g, or u
cucanuaaacacacagucuu

SEQ ID NO: 116110 - RNA, 21 nt, Artificial Sequence
  Synthetic
  misc_feature (6)..(6): n is a, c, g, or u
acucanuaaacacacagucuu

SEQ ID NO: 116111 - RNA, 22 nt, Artificial Sequence
  Synthetic
  misc_feature (7)..(7): n is a, c, g, or u
cacucanuaaacacacagucuu

SEQ ID NO: 116112 - RNA, 23 nt, Artificial Sequence
  Synthetic
  misc_feature (8)..(8): n is a, c, g, or u
ccacucanuaaacacacagucuu

SEQ ID NO: 116113 - RNA, 24 nt, Artificial Sequence
  Synthetic
  misc_feature (9)..(9): n is a, c, g, or u
cccacucanuaaacacacagucuu

SEQ ID NO: 116114 - RNA, 19 nt, Artificial Sequence
  Synthetic
aggagcugcuggcacaguu

SEQ ID NO: 116115 - RNA, 22 nt, Artificial Sequence
  Synthetic
aggaggagcugcuggcacaguu

SEQ ID NO: 116116 - RNA, 18 nt, Artificial Sequence
  Synthetic
  misc_feature (9)..(9): n is a, c, g, or u
cagguuccngugggcguu

SEQ ID NO: 116117 - RNA, 22 nt, Artificial Sequence
  Synthetic
  misc_feature (13)..(13): n is a, c, g, or u
ugggcagguuccngugggcguu

SEQ ID NO: 116118 - RNA, 23 nt, Artificial Sequence
  Synthetic
  misc_feature (14)..(14): n is a, c, g, or u
uugggcagguuccngugggcguu

SEQ ID NO: 116119 - RNA, 24 nt, Artificial Sequence
  Synthetic
  misc_feature (15)..(15): n is a, c, g, or u
cuugggcagguuccngugggcguu

SEQ ID NO: 116120 - RNA, 19 nt, Artificial Sequence
  Synthetic
  misc_feature (16)..(16): n is a, c, g, or u
ugguccggugcuggunguu

SEQ ID NO: 116121 - RNA, 20 nt, Artificial Sequence
  Synthetic
  misc_feature (17)..(17): n is a, c, g, or u
augguccggugcuggunguu

SEQ ID NO: 116122 - RNA, 19 nt, Artificial Sequence
  Synthetic
ugauaagauaggggcauuu

SEQ ID NO: 116123 - RNA, 20 nt, Artificial Sequence
  Synthetic
uugauaagauaggggcauuu

SEQ ID NO: 116124 - RNA, 19 nt, Artificial Sequence
  Synthetic
aggucccaaucuggauuuu

SEQ ID NO: 116125 - RNA, 21 nt, Artificial Sequence
  Synthetic
ugaggucccaaucuggauuuu

SEQ ID NO: 116126 - RNA, 22 nt, Artificial Sequence
  Synthetic
uugaggucccaaucuggauuuu

SEQ ID NO: 116127 - RNA, 18 nt, Artificial Sequence
  Synthetic
uuuguccccaugccuuuu

SEQ ID NO: 116128 - RNA, 19 nt, Artificial Sequence
  Synthetic
auuuguccccaugccuuuu

SEQ ID NO: 116129 - RNA, 21 nt, Artificial Sequence
  Synthetic
agauuuguccccaugccuuuu

SEQ ID NO: 116130 - RNA, 22 nt, Artificial Sequence
  Synthetic
aagauuuguccccaugccuuuu

SEQ ID NO: 116131 - RNA, 23 nt, Artificial Sequence
  Synthetic
aaagauuuguccccaugccuuuu

SEQ ID NO: 116132 - RNA, 18 nt, Artificial Sequence
  Synthetic
ugaaaacaggagacuaaa

SEQ ID NO: 116133 - RNA, 19 nt, Artificial Sequence
  Synthetic
augaaaacaggagacuaaa

SEQ ID NO: 116134 - RNA, 20 nt, Artificial Sequence
  Synthetic
aaugaaaacaggagacuaaa

SEQ ID NO: 116135 - RNA, 21 nt, Artificial Sequence
  Synthetic
aaaugaaaacaggagacuaaa

SEQ ID NO: 116136 - RNA, 22 nt, Artificial Sequence
  Synthetic
uaaaugaaaacaggagacuaaa

SEQ ID NO: 116137 - RNA, 24 nt, Artificial Sequence
  Synthetic
aguaaaugaaaacaggagacuaaa

SEQ ID NO: 116138 - RNA, 18 nt, Artificial Sequence
  Synthetic
  misc_feature (11)..(11): n is a, c, g, or u
uaaacccucanaaaacaa

SEQ ID NO: 116139 - RNA, 19 nt, Artificial Sequence
  Synthetic
  misc_feature (12)..(12): n is a, c, g, or u
uuaaacccucanaaaacaa

SEQ ID NO: 116140 - RNA, 20 nt, Artificial Sequence
  Synthetic
  misc_feature (13)..(13): n is a, c, g, or u
uuuaaacccucanaaaacaa

SEQ ID NO: 116141 - RNA, 21 nt, Artificial Sequence
  Synthetic
  misc_feature (14)..(14): n is a, c, g, or u
auuuaaacccucanaaaacaa

SEQ ID NO: 116142 - RNA, 22 nt, Artificial Sequence
  Synthetic
  misc_feature (15)..(15): n is a, c, g, or u
cauuuaaacccucanaaaacaa

SEQ ID NO: 116143 - RNA, 23 nt, Artificial Sequence
  Synthetic
  misc_feature (16)..(16): n is a, c, g, or u
acauuuaaacccucanaaaacaa

SEQ ID NO: 116144 - RNA, 24 nt, Artificial Sequence
  Synthetic
  misc_feature (17)..(17): n is a, c, g, or u
uacauuuaaacccucanaaaacaa

SEQ ID NO: 116145 - RNA, 19 nt, Artificial Sequence
  Synthetic
ugcuaggcugugcugccaa

SEQ ID NO: 116146 - RNA, 20 nt, Artificial Sequence
  Synthetic
cugcuaggcugugcugccaa

SEQ ID NO: 116147 - RNA, 18 nt, Artificial Sequence
  Synthetic
aggaggcuguaggcauaa

SEQ ID NO: 116148 - RNA, 19 nt, Artificial Sequence
  Synthetic
uaggaggcuguaggcauaa

SEQ ID NO: 116149 - RNA, 20 nt, Artificial Sequence
  Synthetic
cuaggaggcuguaggcauaa

SEQ ID NO: 116150 - RNA, 18 nt, Artificial Sequence
  Synthetic
  misc_feature (9)..(9): n is a, c, g, or u
  misc_feature (15)..(15): n is a, c, g, or u
uuugugggnccccunaca

SEQ ID NO: 116151 - RNA, 19 nt, Artificial Sequence
  Synthetic
  misc_feature (10)..(10): n is a, c, g, or u
  misc_feature (16)..(16): n is a, c, g, or u
auuugugggnccccunaca

SEQ ID NO: 116152 - RNA, 20 nt, Artificial Sequence
  Synthetic
  misc_feature (11)..(11): n is a, c, g, or u
  misc_feature (17)..(17): n is a, c, g, or u
aauuugugggnccccunaca

SEQ ID NO: 116153 - RNA, 21 nt, Artificial Sequence
  Synthetic
  misc_feature (12)..(12): n is a, c, g, or u
  misc_feature (18)..(18): n is a, c, g, or u
caauuugugggnccccunaca

SEQ ID NO: 116154 - RNA, 22 nt, Artificial Sequence
  Synthetic
  misc_feature (1)..(1): n is a, c, g, or u
  misc_feature (13)..(13): n is a, c, g, or u
  misc_feature (19)..(19): n is a, c, g, or u
ncaauuugugggnccccunaca

SEQ ID NO: 116155 - RNA, 23 nt, Artificial Sequence
  Synthetic
  misc_feature (2)..(2): n is a, c, g, or u
  misc_feature (14)..(14): n is a, c, g, or u
  misc_feature (20)..(20): n is a, c, g, or u
ancaauuugugggnccccunaca

SEQ ID NO: 116156 - RNA, 24 nt, Artificial Sequence
  Synthetic
  misc_feature (3)..(3): n is a, c, g, or u
  misc_feature (15)..(15): n is a, c, g, or u
  misc_feature (21)..(21): n is a, c, g, or u
aancaauuugugggnccccunaca

SEQ ID NO: 116157 - RNA, 18 nt, Artificial Sequence
  Synthetic
ccuccugcauauagacca

SEQ ID NO: 116158 - RNA, 19 nt, Artificial Sequence
  Synthetic
uccuccugcauauagacca

SEQ ID NO: 116159 - RNA, 20 nt, Artificial Sequence
  Synthetic
cuccuccugcauauagacca

SEQ ID NO: 116160 - RNA, 18 nt, Artificial Sequence
  Synthetic
aaaauccucacaauacca

SEQ ID NO: 116161 - RNA, 19 nt, Artificial Sequence
  Synthetic
aaaaauccucacaauacca

SEQ ID NO: 116162 - RNA, 20 nt, Artificial Sequence
  Synthetic
caaaaauccucacaauacca

SEQ ID NO: 116163 - RNA, 21 nt, Artificial Sequence
  Synthetic
acaaaaauccucacaauacca

SEQ ID NO: 116164 - RNA, 23 nt, Artificial Sequence
  Synthetic
ugacaaaaauccucacaauacca

SEQ ID NO: 116165 - RNA, 24 nt, Artificial Sequence
  Synthetic
uugacaaaaauccucacaauacca

SEQ ID NO: 116166 - RNA, 18 nt, Artificial Sequence
  Synthetic
acacucauccucaggcca

SEQ ID NO: 116167 - RNA, 20 nt, Artificial Sequence
  Synthetic
  misc_feature (1)..(1): n is a, c, g, or u
ngacacucauccucaggcca

SEQ ID NO: 116168 - RNA, 18 nt, Artificial Sequence
  Synthetic
uggaagauccagcaucca

SEQ ID NO: 116169 - RNA, 19 nt, Artificial Sequence
  Synthetic
uuggaagauccagcaucca

SEQ ID NO: 116170 - RNA, 20 nt, Artificial Sequence
  Synthetic
uuuggaagauccagcaucca

SEQ ID NO: 116171 - RNA, 21 nt, Artificial Sequence
  Synthetic
auuuggaagauccagcaucca

SEQ ID NO: 116172 - RNA, 22 nt, Artificial Sequence
  Synthetic
aauuuggaagauccagcaucca

SEQ ID NO: 116173 - RNA, 23 nt, Artificial Sequence
  Synthetic
uaauuuggaagauccagcaucca

SEQ ID NO: 116174 - RNA, 18 nt, Artificial Sequence
  Synthetic
  misc_feature (16)..(16): n is a, c, g, or u
uaguauuccuuggacnca

SEQ ID NO: 116175 - RNA, 19 nt, Artificial Sequence
  Synthetic
  misc_feature (17)..(17): n is a, c, g, or u
uuaguauuccuuggacnca

SEQ ID NO: 116176 - RNA, 21 nt, Artificial Sequence
  Synthetic
  misc_feature (19)..(19): n is a, c, g, or u
uguuaguauuccuuggacnca

SEQ ID NO: 116177 - RNA, 22 nt, Artificial Sequence
  Synthetic
  misc_feature (20)..(20): n is a, c, g, or u
auguuaguauuccuuggacnca

SEQ ID NO: 116178 - RNA, 23 nt, Artificial Sequence
  Synthetic
  misc_feature (21)..(21): n is a, c, g, or u
aauguuaguauuccuuggacnca

SEQ ID NO: 116179 - RNA, 24 nt, Artificial Sequence
  Synthetic
  misc_feature (22)..(22): n is a, c, g, or u
caauguuaguauuccuuggacnca

SEQ ID NO: 116180 - RNA, 18 nt, Artificial Sequence
  Synthetic
  misc_feature (1)..(1): n is a, c, g, or u
  misc_feature (4)..(4): n is a, c, g, or u
  misc_feature (16)..(16): n is a, c, g, or u
ncangaacauauugunca

SEQ ID NO: 116181 - RNA, 19 nt, Artificial Sequence
  Synthetic
  misc_feature (2)..(2): n is a, c, g, or u
  misc_feature (5)..(5): n is a, c, g, or u
  misc_feature (17)..(17): n is a, c, g, or u
cncangaacauauugunca

SEQ ID NO: 116182 - RNA, 20 nt, Artificial Sequence
  Synthetic
  misc_feature (3)..(3): n is a, c, g, or u
  misc_feature (6)..(6): n is a, c, g, or u
  misc_feature (18)..(18): n is a, c, g, or u
ccncangaacauauugunca

SEQ ID NO: 116183 - RNA, 22 nt, Artificial Sequence
  Synthetic
  misc_feature (5)..(5): n is a, c, g, or u
  misc_feature (8)..(8): n is a, c, g, or u
  misc_feature (20)..(20): n is a, c, g, or u
ugccncangaacauauugunca

SEQ ID NO: 116184 - RNA, 23 nt, Artificial Sequence
  Synthetic
  misc_feature (6)..(6): n is a, c, g, or u
  misc_feature (9)..(9): n is a, c, g, or u
  misc_feature (21)..(21): n is a, c, g, or u
uugccncangaacauauugunca

SEQ ID NO: 116185 - RNA, 24 nt, Artificial Sequence
  Synthetic
  misc_feature (1)..(1): n is a, c, g, or u
  misc_feature (7)..(7): n is a, c, g, or u
  misc_feature (10)..(10): n is a, c, g, or u
  misc_feature (22)..(22): n is a, c, g, or u
nuugccncangaacauauugunca

SEQ ID NO: 116186 - RNA, 19 nt, Artificial Sequence
  Synthetic
ugcauucaaagccaacuca

SEQ ID NO: 116187 - RNA, 20 nt, Artificial Sequence
  Synthetic
cugcauucaaagccaacuca

SEQ ID NO: 116188 - RNA, 18 nt, Artificial Sequence
  Synthetic
  misc_feature (13)..(13): n is a, c, g, or u
ugauuggaaagunuguca

SEQ ID NO: 116189 - RNA, 19 nt, Artificial Sequence
  Synthetic
  misc_feature (14)..(14): n is a, c, g, or u
uugauuggaaagunuguca

SEQ ID NO: 116190 - RNA, 20 nt, Artificial Sequence
  Synthetic
  misc_feature (15)..(15): n is a, c, g, or u
auugauuggaaagunuguca

SEQ ID NO: 116191 - RNA, 21 nt, Artificial Sequence
  Synthetic
  misc_feature (16)..(16): n is a, c, g, or u
uauugauuggaaagunuguca

SEQ ID NO: 116192 - RNA, 22 nt, Artificial Sequence
  Synthetic
  misc_feature (17)..(17): n is a, c, g, or u
cuauugauuggaaagunuguca

SEQ ID NO: 116193 - RNA, 23 nt, Artificial Sequence
  Synthetic
  misc_feature (18)..(18): n is a, c, g, or u
ccuauugauuggaaagunuguca

SEQ ID NO: 116194 - RNA, 24 nt, Artificial Sequence
  Synthetic
  misc_feature (1)..(1): n is a, c, g, or u
  misc_feature (19)..(19): n is a, c, g, or u
nccuauugauuggaaagunuguca

SEQ ID NO: 116195 - RNA, 18 nt, Artificial Sequence
  Synthetic
agauccagcauccaggga

SEQ ID NO: 116196 - RNA, 19 nt, Artificial Sequence
  Synthetic
aagauccagcauccaggga

SEQ ID NO: 116197 - RNA, 18 nt, Artificial Sequence
  Synthetic
cuagccaccuggguggga

SEQ ID NO: 116198 - RNA, 19 nt, Artificial Sequence
  Synthetic
ucuagccaccuggguggga

SEQ ID NO: 116199 - RNA, 20 nt, Artificial Sequence
  Synthetic
aucuagccaccuggguggga

SEQ ID NO: 116200 - RNA, 18 nt, Artificial Sequence
  Synthetic
uuucaguuauauggauga

SEQ ID NO: 116201 - RNA, 19 nt, Artificial Sequence
  Synthetic
cuuucaguuauauggauga

SEQ ID NO: 116202 - RNA, 22 nt, Artificial Sequence
  Synthetic
uggcuuucaguuauauggauga

SEQ ID NO: 116203 - RNA, 23 nt, Artificial Sequence
  Synthetic
cuggcuuucaguuauauggauga

SEQ ID NO: 116204 - RNA, 24 nt, Artificial Sequence
  Synthetic
ucuggcuuucaguuauauggauga

SEQ ID NO: 116205 - RNA, 18 nt, Artificial Sequence
  Synthetic
  misc_feature (4)..(4): n is a, c, g, or u
  misc_feature (17)..(17): n is a, c, g, or u
accnuauuauccagagna

SEQ ID NO: 116206 - RNA, 19 nt, Artificial Sequence
  Synthetic
  misc_feature (5)..(5): n is a, c, g, or u
  misc_feature (18)..(18): n is a, c, g, or u
aaccnuauuauccagagna

SEQ ID NO: 116207 - RNA, 20 nt, Artificial Sequence
  Synthetic
  misc_feature (6)..(6): n is a, c, g, or u
  misc_feature (19)..(19): n is a, c, g, or u
aaaccnuauuauccagagna

SEQ ID NO: 116208 - RNA, 21 nt, Artificial Sequence
  Synthetic
  misc_feature (7)..(7): n is a, c, g, or u
  misc_feature (20)..(20): n is a, c, g, or u
caaaccnuauuauccagagna

SEQ ID NO: 116209 - RNA, 22 nt, Artificial Sequence
  Synthetic
  misc_feature (8)..(8): n is a, c, g, or u
  misc_feature (21)..(21): n is a, c, g, or u
ucaaaccnuauuauccagagna

SEQ ID NO: 116210 - RNA, 23 nt, Artificial Sequence
  Synthetic
  misc_feature (9)..(9): n is a, c, g, or u
  misc_feature (22)..(22): n is a, c, g, or u
aucaaaccnuauuauccagagna

SEQ ID NO: 116211 - RNA, 24 nt, Artificial Sequence
  Synthetic
  misc_feature (1)..(1): n is a, c, g, or u
  misc_feature (10)..(10): n is a, c, g, or u
  misc_feature (23)..(23): n is a, c, g, or u
naucaaaccnuauuauccagagna

SEQ ID NO: 116212 - RNA, 21 nt, Artificial Sequence
  Synthetic
  misc_feature (11)..(11): n is a, c, g, or u
  misc_feature (20)..(20): n is a, c, g, or u
ugggguuugcngccccuuuna

SEQ ID NO: 116213 - RNA, 22 nt, Artificial Sequence
  Synthetic
  misc_feature (12)..(12): n is a, c, g, or u
  misc_feature (21)..(21): n is a, c, g, or u
uugggguuugcngccccuuuna

SEQ ID NO: 116214 - RNA, 23 nt, Artificial Sequence
  Synthetic
  misc_feature (13)..(13): n is a, c, g, or u
  misc_feature (22)..(22): n is a, c, g, or u
uuugggguuugcngccccuuuna

SEQ ID NO: 116215 - RNA, 24 nt, Artificial Sequence
  Synthetic
  misc_feature (14)..(14): n is a, c, g, or u
  misc_feature (23)..(23): n is a, c, g, or u
uuuugggguuugcngccccuuuna

SEQ ID NO: 116216 - RNA, 18 nt, Artificial Sequence
  Synthetic
agaaacuguucuugaaua

SEQ ID NO: 116217 - RNA, 20 nt, Artificial Sequence
  Synthetic
agagaaacuguucuugaaua

SEQ ID NO: 116218 - RNA, 21 nt, Artificial Sequence
  Synthetic
  misc_feature (1)..(1): n is a, c, g, or u
nagagaaacuguucuugaaua

SEQ ID NO: 116219 - RNA, 24 nt, Artificial Sequence
  Synthetic
  misc_feature (4)..(4): n is a, c, g, or u
uggnagagaaacuguucuugaaua

SEQ ID NO: 116220 - RNA, 18 nt, Artificial Sequence
  Synthetic
ccuuaacuucaugggaua

SEQ ID NO: 116221 - RNA, 19 nt, Artificial Sequence
  Synthetic
cccuuaacuucaugggaua

SEQ ID NO: 116222 - RNA, 20 nt, Artificial Sequence
  Synthetic
ucccuuaacuucaugggaua

SEQ ID NO: 116223 - RNA, 21 nt, Artificial Sequence
  Synthetic
uucccuuaacuucaugggaua

SEQ ID NO: 116224 - RNA, 22 nt, Artificial Sequence
  Synthetic
auucccuuaacuucaugggaua

SEQ ID NO: 116225 - RNA, 23 nt, Artificial Sequence
  Synthetic
uauucccuuaacuucaugggaua

SEQ ID NO: 116226 - RNA, 24 nt, Artificial Sequence
  Synthetic
auauucccuuaacuucaugggaua

SEQ ID NO: 116227 - RNA, 18 nt, Artificial Sequence
  Synthetic
  misc_feature (14)..(14): n is a, c, g, or u
uggacauugacccnuaua

SEQ ID NO: 116228 - RNA, 19 nt, Artificial Sequence
  Synthetic
  misc_feature (15)..(15): n is a, c, g, or u
auggacauugacccnuaua

SEQ ID NO: 116229 - RNA, 20 nt, Artificial Sequence
  Synthetic
  misc_feature (16)..(16): n is a, c, g, or u
cauggacauugacccnuaua

SEQ ID NO: 116230 - RNA, 24 nt, Artificial Sequence
  Synthetic
  misc_feature (1)..(1): n is a, c, g, or u
  misc_feature (20)..(20): n is a, c, g, or u
ngggcauggacauugacccnuaua

SEQ ID NO: 116231 - RNA, 18 nt, Artificial Sequence
  Synthetic
  misc_feature (13)..(13): n is a, c, g, or u
uauuauccagagnaugua

SEQ ID NO: 116232 - RNA, 19 nt, Artificial Sequence
  Synthetic
  misc_feature (1)..(1): n is a, c, g, or u
  misc_feature (14)..(14): n is a, c, g, or u
nuauuauccagagnaugua

SEQ ID NO: 116233 - RNA, 20 nt, Artificial Sequence
  Synthetic
  misc_feature (2)..(2): n is a, c, g, or u
  misc_feature (15)..(15): n is a, c, g, or u
cnuauuauccagagnaugua

SEQ ID NO: 116234 - RNA, 21 nt, Artificial Sequence
  Synthetic
  misc_feature (3)..(3): n is a, c, g, or u
  misc_feature (16)..(16): n is a, c, g, or u
ccnuauuauccagagnaugua

SEQ ID NO: 116235 - RNA, 22 nt, Artificial Sequence
  Synthetic
  misc_feature (4)..(4): n is a, c, g, or u
  misc_feature (17)..(17): n is a, c, g, or u
accnuauuauccagagnaugua

SEQ ID NO: 116236 - RNA, 23 nt, Artificial Sequence
  Synthetic
  misc_feature (5)..(5): n is a, c, g, or u
  misc_feature (18)..(18): n is a, c, g, or u
aaccnuauuauccagagnaugua

SEQ ID NO: 116237 - RNA, 24 nt, Artificial Sequence
  Synthetic
  misc_feature (6)..(6): n is a, c, g, or u
  misc_feature (19)..(19): n is a, c, g, or u
aaaccnuauuauccagagnaugua

SEQ ID NO: 116238 - RNA, 18 nt, Artificial Sequence
  Synthetic
  misc_feature (14)..(14): n is a, c, g, or u
acauuguugauagnugua

SEQ ID NO: 116239 - RNA, 21 nt, Artificial Sequence
  Synthetic
  misc_feature (17)..(17): n is a, c, g, or u
aggacauuguugauagnugua

SEQ ID NO: 116240 - RNA, 24 nt, Artificial Sequence
  Synthetic
  misc_feature (20)..(20): n is a, c, g, or u
aggaggacauuguugauagnugua

SEQ ID NO: 116241 - RNA, 19 nt, Artificial Sequence
  Synthetic
  misc_feature (12)..(12): n is a, c, g, or u
agguuuuauccnaauguua

SEQ ID NO: 116242 - RNA, 20 nt, Artificial Sequence
  Synthetic
  misc_feature (13)..(13): n is a, c, g, or u
uagguuuuauccnaauguua

SEQ ID NO: 116243 - RNA, 21 nt, Artificial Sequence
  Synthetic
  misc_feature (14)..(14): n is a, c, g, or u
cuagguuuuauccnaauguua

SEQ ID NO: 116244 - RNA, 23 nt, Artificial Sequence
  Synthetic
  misc_feature (16)..(16): n is a, c, g, or u
ugcuagguuuuauccnaauguua

SEQ ID NO: 116245 - RNA, 24 nt, Artificial Sequence
  Synthetic
  misc_feature (17)..(17): n is a, c, g, or u
cugcuagguuuuauccnaauguua

SEQ ID NO: 116246 - RNA, 18 nt, Artificial Sequence
  Synthetic
ucaaagacuguguguuua

SEQ ID NO: 116247 - RNA, 19 nt, Artificial Sequence
  Synthetic
uucaaagacuguguguuua

SEQ ID NO: 116248 - RNA, 20 nt, Artificial Sequence
  Synthetic
cuucaaagacuguguguuua

SEQ ID NO: 116249 - RNA, 21 nt, Artificial Sequence
  Synthetic
acuucaaagacuguguguuua

SEQ ID NO: 116250 - RNA, 22 nt, Artificial Sequence
  Synthetic
uacuucaaagacuguguguuua

SEQ ID NO: 116251 - RNA, 23 nt, Artificial Sequence
  Synthetic
auacuucaaagacuguguguuua

SEQ ID NO: 116252 - RNA, 24 nt, Artificial Sequence
  Synthetic
cauacuucaaagacuguguguuua

SEQ ID NO: 116253 - RNA, 19 nt, Artificial Sequence
  Synthetic
  misc_feature (5)..(5): n is a, c, g, or u
aguunaugaaucuagccac

SEQ ID NO: 116254 - RNA, 21 nt, Artificial Sequence
  Synthetic
  misc_feature (7)..(7): n is a, c, g, or u
ugaguunaugaaucuagccac

SEQ ID NO: 116255 - RNA, 18 nt, Artificial Sequence
  Synthetic
uaaaugaaaacaggagac

SEQ ID NO: 116256 - RNA, 20 nt, Artificial Sequence
  Synthetic
aguaaaugaaaacaggagac

SEQ ID NO: 116257 - RNA, 21 nt, Artificial Sequence
  Synthetic
caguaaaugaaaacaggagac

SEQ ID NO: 116258 - RNA, 22 nt, Artificial Sequence
  Synthetic
acaguaaaugaaaacaggagac

SEQ ID NO: 116259 - RNA, 23 nt, Artificial Sequence
  Synthetic
  misc_feature (1)..(1): n is a, c, g, or u
nacaguaaaugaaaacaggagac

SEQ ID NO: 116260 - RNA, 24 nt, Artificial Sequence
  Synthetic
  misc_feature (2)..(2): n is a, c, g, or u
unacaguaaaugaaaacaggagac

SEQ ID NO: 116261 - RNA, 18 nt, Artificial Sequence
  Synthetic
uuugcugacgcaaccccc

SEQ ID NO: 116262 - RNA, 20 nt, Artificial Sequence
  Synthetic
uguuugcugacgcaaccccc

SEQ ID NO: 116263 - RNA, 19 nt, Artificial Sequence
  Synthetic
uguuacuaaauauuugccc

SEQ ID NO: 116264 - RNA, 20 nt, Artificial Sequence
  Synthetic
auguuacuaaauauuugccc

SEQ ID NO: 116265 - RNA, 21 nt, Artificial Sequence
  Synthetic
aauguuacuaaauauuugccc

SEQ ID NO: 116266 - RNA, 22 nt, Artificial Sequence
  Synthetic
  misc_feature (1)..(1): n is a, c, g, or u
naauguuacuaaauauuugccc

SEQ ID NO: 116267 - RNA, 23 nt, Artificial Sequence
  Synthetic
  misc_feature (2)..(2): n is a, c, g, or u
cnaauguuacuaaauauuugccc

SEQ ID NO: 116268 - RNA, 24 nt, Artificial Sequence
  Synthetic
  misc_feature (3)..(3): n is a, c, g, or u
ccnaauguuacuaaauauuugccc

SEQ ID NO: 116269 - RNA, 18 nt, Artificial Sequence
  Synthetic
  misc_feature (8)..(8): n is a, c, g, or u
cgcccacnggaaccugcc

SEQ ID NO: 116270 - RNA, 19 nt, Artificial Sequence
  Synthetic
  misc_feature (9)..(9): n is a, c, g, or u
acgcccacnggaaccugcc

SEQ ID NO: 116271 - RNA, 20 nt, Artificial Sequence
  Synthetic
  misc_feature (10)..(10): n is a, c, g, or u
aacgcccacnggaaccugcc

SEQ ID NO: 116272 - RNA, 18 nt, Artificial Sequence
  Synthetic
aagccuccaagcugugcc

SEQ ID NO: 116273 - RNA, 19 nt, Artificial Sequence
  Synthetic
caagccuccaagcugugcc

SEQ ID NO: 116274 - RNA, 20 nt, Artificial Sequence
  Synthetic
ucaagccuccaagcugugcc

SEQ ID NO: 116275 - RNA, 18 nt, Artificial Sequence
  Synthetic
ccaaacucuucaagaucc

SEQ ID NO: 116276 - RNA, 19 nt, Artificial Sequence
  Synthetic
accaaacucuucaagaucc

SEQ ID NO: 116277 - RNA, 20 nt, Artificial Sequence
  Synthetic
caccaaacucuucaagaucc

SEQ ID NO: 116278 - RNA, 21 nt, Artificial Sequence
  Synthetic
ccaccaaacucuucaagaucc

SEQ ID NO: 116279 - RNA, 22 nt, Artificial Sequence
  Synthetic
uccaccaaacucuucaagaucc

SEQ ID NO: 116280 - RNA, 23 nt, Artificial Sequence
  Synthetic
uuccaccaaacucuucaagaucc

SEQ ID NO: 116281 - RNA, 24 nt, Artificial Sequence
  Synthetic
  misc_feature (1)..(1): n is a, c, g, or u
nuuccaccaaacucuucaagaucc

SEQ ID NO: 116282 - RNA, 19 nt, Artificial Sequence
  Synthetic
agcuccuccuccugccucc

SEQ ID NO: 116283 - RNA, 20 nt, Artificial Sequence
  Synthetic
cagcuccuccuccugccucc

SEQ ID NO: 116284 - RNA, 22 nt, Artificial Sequence
  Synthetic
agcagcuccuccuccugccucc

SEQ ID NO: 116285 - RNA, 23 nt, Artificial Sequence
  Synthetic
cagcagcuccuccuccugccucc

SEQ ID NO: 116286 - RNA, 24 nt, Artificial Sequence
  Synthetic
ccagcagcuccuccuccugccucc

SEQ ID NO: 116287 - RNA, 18 nt, Artificial Sequence
  Synthetic
  misc_feature (10)..(10): n is a, c, g, or u
cucaccaacnuguugucc

SEQ ID NO: 116288 - RNA, 19 nt, Artificial Sequence
  Synthetic
  misc_feature (11)..(11): n is a, c, g, or u
acucaccaacnuguugucc

SEQ ID NO: 116289 - RNA, 20 nt, Artificial Sequence
  Synthetic
  misc_feature (12)..(12): n is a, c, g, or u
cacucaccaacnuguugucc

SEQ ID NO: 116290 - RNA, 21 nt, Artificial Sequence
  Synthetic
  misc_feature (13)..(13): n is a, c, g, or u
ucacucaccaacnuguugucc

SEQ ID NO: 116291 - RNA, 23 nt, Artificial Sequence
  Synthetic
  misc_feature (15)..(15): n is a, c, g, or u
agucacucaccaacnuguugucc

SEQ ID NO: 116292 - RNA, 24 nt, Artificial Sequence
  Synthetic
  misc_feature (16)..(16): n is a, c, g, or u
cagucacucaccaacnuguugucc

SEQ ID NO: 116293 - RNA, 18 nt, Artificial Sequence
  Synthetic
uauguugcccguuugucc

SEQ ID NO: 116294 - RNA, 18 nt, Artificial Sequence
  Synthetic
uacuaggaggcuguaggc

SEQ ID NO: 116295 - RNA, 20 nt, Artificial Sequence
  Synthetic
uguacuaggaggcuguaggc

SEQ ID NO: 116296 - RNA, 21 nt, Artificial Sequence
  Synthetic
ugggagugggagcauucgggc

SEQ ID NO: 116297 - RNA, 24 nt, Artificial Sequence
  Synthetic
aggugggagugggagcauucgggc

SEQ ID NO: 116298 - RNA, 18 nt, Artificial Sequence
  Synthetic
auaccuaugggagugggc

SEQ ID NO: 116299 - RNA, 19 nt, Artificial Sequence
  Synthetic
aauaccuaugggagugggc

SEQ ID NO: 116300 - RNA, 20 nt, Artificial Sequence
  Synthetic
aaauaccuaugggagugggc

SEQ ID NO: 116301 - RNA, 18 nt, Artificial Sequence
  Synthetic
uacuuuccugcugguggc

SEQ ID NO: 116302 - RNA, 20 nt, Artificial Sequence
  Synthetic
uguacuuuccugcugguggc

SEQ ID NO: 116303 - RNA, 21 nt, Artificial Sequence
  Synthetic
cuguacuuuccugcugguggc

SEQ ID NO: 116304 - RNA, 22 nt, Artificial Sequence
  Synthetic
  misc_feature (1)..(1): n is a, c, g, or u
ncuguacuuuccugcugguggc

SEQ ID NO: 116305 - RNA, 23 nt, Artificial Sequence
  Synthetic
  misc_feature (2)..(2): n is a, c, g, or u
cncuguacuuuccugcugguggc

SEQ ID NO: 116306 - RNA, 18 nt, Artificial Sequence
  Synthetic
acacccgugugucuuggc

SEQ ID NO: 116307 - RNA, 19 nt, Artificial Sequence
  Synthetic
aacacccgugugucuuggc

SEQ ID NO: 116308 - RNA, 20 nt, Artificial Sequence
  Synthetic
  misc_feature (1)..(1): n is a, c, g, or u
naacacccgugugucuuggc

SEQ ID NO: 116309 - RNA, 18 nt, Artificial Sequence
  Synthetic
  misc_feature (1)..(1): n is a, c, g, or u
  misc_feature (10)..(10): n is a, c, g, or u
ncaauguggnuauccugc

SEQ ID NO: 116310 - RNA, 19 nt, Artificial Sequence
  Synthetic
  misc_feature (2)..(2): n is a, c, g, or u
  misc_feature (11)..(11): n is a, c, g, or u
cncaauguggnuauccugc

SEQ ID NO: 116311 - RNA, 20 nt, Artificial Sequence
  Synthetic
  misc_feature (3)..(3): n is a, c, g, or u
  misc_feature (12)..(12): n is a, c, g, or u
acncaauguggnuauccugc

SEQ ID NO: 116312 - RNA, 21 nt, Artificial Sequence
  Synthetic
  misc_feature (1)..(1): n is a, c, g, or u
  misc_feature (4)..(4): n is a, c, g, or u
  misc_feature (13)..(13): n is a, c, g, or u
nacncaauguggnuauccugc

SEQ ID NO: 116313 - RNA, 22 nt, Artificial Sequence
  Synthetic
  misc_feature (2)..(2): n is a, c, g, or u
  misc_feature (5)..(5): n is a, c, g, or u
  misc_feature (14)..(14): n is a, c, g, or u
unacncaauguggnuauccugc

SEQ ID NO: 116314 - RNA, 23 nt, Artificial Sequence
  Synthetic
  misc_feature (3)..(3): n is a, c, g, or u
  misc_feature (6)..(6): n is a, c, g, or u
  misc_feature (15)..(15): n is a, c, g, or u
uunacncaauguggnuauccugc

SEQ ID NO: 116315 - RNA, 24 nt, Artificial Sequence
  Synthetic
  misc_feature (4)..(4): n is a, c, g, or u
  misc_feature (7)..(7): n is a, c, g, or u
  misc_feature (16)..(16): n is a, c, g, or u
uuunacncaauguggnuauccugc

SEQ ID NO: 116316 - RNA, 18 nt, Artificial Sequence
  Synthetic
  misc_feature (17)..(17): n is a, c, g, or u
uuucuguccccaauccnc

SEQ ID NO: 116317 - RNA, 19 nt, Artificial Sequence
  Synthetic
  misc_feature (18)..(18): n is a, c, g, or u
cuuucuguccccaauccnc

SEQ ID NO: 116318 - RNA, 20 nt, Artificial Sequence
  Synthetic
  misc_feature (19)..(19): n is a, c, g, or u
ucuuucuguccccaauccnc

SEQ ID NO: 116319 - RNA, 21 nt, Artificial Sequence
  Synthetic
  misc_feature (20)..(20): n is a, c, g, or u
aucuuucuguccccaauccnc

SEQ ID NO: 116320 - RNA, 22 nt, Artificial Sequence
  Synthetic
  misc_feature (21)..(21): n is a, c, g, or u
aaucuuucuguccccaauccnc

SEQ ID NO: 116321 - RNA, 23 nt, Artificial Sequence
  Synthetic
  misc_feature (22)..(22): n is a, c, g, or u
aaaucuuucuguccccaauccnc

SEQ ID NO: 116322 - RNA, 24 nt, Artificial Sequence
  Synthetic
  misc_feature (23)..(23): n is a, c, g, or u
caaaucuuucuguccccaauccnc

SEQ ID NO: 116323 - RNA, 18 nt, Artificial Sequence
  Synthetic
  misc_feature (16)..(17): n is a, c, g, or u
ucuucuacgguaccunnc

SEQ ID NO: 116324 - RNA, 19 nt, Artificial Sequence
  Synthetic
  misc_feature (17)..(18): n is a, c, g, or u
uucuucuacgguaccunnc

SEQ ID NO: 116325 - RNA, 20 nt, Artificial Sequence
  Synthetic
  misc_feature (18)..(19): n is a, c, g, or u
auucuucuacgguaccunnc

SEQ ID NO: 116326 - RNA, 21 nt, Artificial Sequence
  Synthetic
  misc_feature (19)..(20): n is a, c, g, or u
uauucuucuacgguaccunnc

SEQ ID NO: 116327 - RNA, 22 nt, Artificial Sequence
  Synthetic
  misc_feature (20)..(21): n is a, c, g, or u
uuauucuucuacgguaccunnc

SEQ ID NO: 116328 - RNA, 23 nt, Artificial Sequence
  Synthetic
  misc_feature (21)..(22): n is a, c, g, or u
uuuauucuucuacgguaccunnc

SEQ ID NO: 116329 - RNA, 24 nt, Artificial Sequence
  Synthetic
  misc_feature (22)..(23): n is a, c, g, or u
cuuuauucuucuacgguaccunnc

SEQ ID NO: 116330 - RNA, 18 nt, Artificial Sequence
  Synthetic
aauucgcagucccaaauc

SEQ ID NO: 116331 - RNA, 19 nt, Artificial Sequence
  Synthetic
aaauucgcagucccaaauc

SEQ ID NO: 116332 - RNA, 20 nt, Artificial Sequence
  Synthetic
aaaauucgcagucccaaauc

SEQ ID NO: 116333 - RNA, 18 nt, Artificial Sequence
  Synthetic
cuccugccuccaccaauc

SEQ ID NO: 116334 - RNA, 19 nt, Artificial Sequence
  Synthetic
ccuccugccuccaccaauc

SEQ ID NO: 116335 - RNA, 20 nt, Artificial Sequence
  Synthetic
uccuccugccuccaccaauc

SEQ ID NO: 116336 - RNA, 21 nt, Artificial Sequence
  Synthetic
cuccuccugccuccaccaauc

SEQ ID NO: 116337 - RNA, 22 nt, Artificial Sequence
  Synthetic
ccuccuccugccuccaccaauc

SEQ ID NO: 116338 - RNA, 23 nt, Artificial Sequence
  Synthetic
uccuccuccugccuccaccaauc

SEQ ID NO: 116339 - RNA, 24 nt, Artificial Sequence
  Synthetic
cuccuccuccugccuccaccaauc

SEQ ID NO: 116340 - RNA, 18 nt, Artificial Sequence
  Synthetic
ccaagucuguacaacauc

SEQ ID NO: 116341 - RNA, 18 nt, Artificial Sequence
  Synthetic
  misc_feature (11)..(11): n is a, c, g, or u
ugggauucuuncccgauc

SEQ ID NO: 116342 - RNA, 19 nt, Artificial Sequence
  Synthetic
  misc_feature (12)..(12): n is a, c, g, or u
cugggauucuuncccgauc

SEQ ID NO: 116343 - RNA, 20 nt, Artificial Sequence
  Synthetic
  misc_feature (1)..(1): n is a, c, g, or u
  misc_feature (13)..(13): n is a, c, g, or u
ncugggauucuuncccgauc

SEQ ID NO: 116344 - RNA, 21 nt, Artificial Sequence
  Synthetic
  misc_feature (2)..(2): n is a, c, g, or u
  misc_feature (14)..(14): n is a, c, g, or u
cncugggauucuuncccgauc

SEQ ID NO: 116345 - RNA, 22 nt, Artificial Sequence
  Synthetic
  misc_feature (3)..(3): n is a, c, g, or u
  misc_feature (15)..(15): n is a, c, g, or u
ccncugggauucuuncccgauc

SEQ ID NO: 116346 - RNA, 23 nt, Artificial Sequence
  Synthetic
  misc_feature (4)..(4): n is a, c, g, or u
  misc_feature (16)..(16): n is a, c, g, or u
uccncugggauucuuncccgauc

SEQ ID NO: 116347 - RNA, 24 nt, Artificial Sequence
  Synthetic
  misc_feature (5)..(5): n is a, c, g, or u
  misc_feature (17)..(17): n is a, c, g, or u
auccncugggauucuuncccgauc

SEQ ID NO: 116348 - RNA, 18 nt, Artificial Sequence
  Synthetic
  misc_feature (6)..(6): n is a, c, g, or u
  misc_feature (11)..(11): n is a, c, g, or u
uacugncucunccauauc

SEQ ID NO: 116349 - RNA, 19 nt, Artificial Sequence
  Synthetic
  misc_feature (7)..(7): n is a, c, g, or u
  misc_feature (12)..(12): n is a, c, g, or u
auacugncucunccauauc

SEQ ID NO: 116350 - RNA, 20 nt, Artificial Sequence
  Synthetic
  misc_feature (8)..(8): n is a, c, g, or u
  misc_feature (13)..(13): n is a, c, g, or u
aauacugncucunccauauc

SEQ ID NO: 116351 - RNA, 22 nt, Artificial Sequence
  Synthetic
  misc_feature (10)..(10): n is a, c, g, or u
  misc_feature (15)..(15): n is a, c, g, or u
agaauacugncucunccauauc

SEQ ID NO: 116352 - RNA, 23 nt, Artificial Sequence
  Synthetic
  misc_feature (11)..(11): n is a, c, g, or u
  misc_feature (16)..(16): n is a, c, g, or u
cagaauacugncucunccauauc

SEQ ID NO: 116353 - RNA, 24 nt, Artificial Sequence
  Synthetic
  misc_feature (12)..(12): n is a, c, g, or u
  misc_feature (17)..(17): n is a, c, g, or u
ucagaauacugncucunccauauc

SEQ ID NO: 116354 - RNA, 19 nt, Artificial Sequence
  Synthetic
cgcagaagaucucaaucuc

SEQ ID NO: 116355 - RNA, 20 nt, Artificial Sequence
  Synthetic
ucgcagaagaucucaaucuc

SEQ ID NO: 116356 - RNA, 20 nt, Artificial Sequence
  Synthetic
uggggacaaaucuuucuguc

SEQ ID NO: 116357 - RNA, 18 nt, Artificial Sequence
  Synthetic
ccguuuguccucuaauuc

SEQ ID NO: 116358 - RNA, 19 nt, Artificial Sequence
  Synthetic
cccguuuguccucuaauuc

SEQ ID NO: 116359 - RNA, 21 nt, Artificial Sequence
  Synthetic
ugcccguuuguccucuaauuc

SEQ ID NO: 116360 - RNA, 22 nt, Artificial Sequence
  Synthetic
uugcccguuuguccucuaauuc

SEQ ID NO: 116361 - RNA, 24 nt, Artificial Sequence
  Synthetic
uguugcccguuuguccucuaauuc

SEQ ID NO: 116362 - RNA, 18 nt, Artificial Sequence
  Synthetic
uacggggcuuuauucuuc

SEQ ID NO: 116363 - RNA, 19 nt, Artificial Sequence
  Synthetic
uuacggggcuuuauucuuc

SEQ ID NO: 116364 - RNA, 20 nt, Artificial Sequence
  Synthetic
uuuacggggcuuuauucuuc

SEQ ID NO: 116365 - RNA, 18 nt, Artificial Sequence
  Synthetic
  misc_feature (5)..(5): n is a, c, g, or u
uuggnagagaaacuguuc

SEQ ID NO: 116366 - RNA, 19 nt, Artificial Sequence
  Synthetic
  misc_feature (6)..(6): n is a, c, g, or u
uuuggnagagaaacuguuc

SEQ ID NO: 116367 - RNA, 20 nt, Artificial Sequence
  Synthetic
  misc_feature (7)..(7): n is a, c, g, or u
uuuuggnagagaaacuguuc

SEQ ID NO: 116368 - RNA, 21 nt, Artificial Sequence
  Synthetic
  misc_feature (8)..(8): n is a, c, g, or u
cuuuuggnagagaaacuguuc

SEQ ID NO: 116369 - RNA, 22 nt, Artificial Sequence
  Synthetic
  misc_feature (9)..(9): n is a, c, g, or u
acuuuuggnagagaaacuguuc

SEQ ID NO: 116370 - RNA, 23 nt, Artificial Sequence
  Synthetic
  misc_feature (10)..(10): n is a, c, g, or u
uacuuuuggnagagaaacuguuc

SEQ ID NO: 116371 - RNA, 24 nt, Artificial Sequence
  Synthetic
  misc_feature (11)..(11): n is a, c, g, or u
uuacuuuuggnagagaaacuguuc

SEQ ID NO: 116372 - RNA, 18 nt, Artificial Sequence
  Synthetic
uacuagugccauuuguuc

SEQ ID NO: 116373 - RNA, 19 nt, Artificial Sequence
  Synthetic
uuacuagugccauuuguuc

SEQ ID NO: 116374 - RNA, 20 nt, Artificial Sequence
  Synthetic
uuuacuagugccauuuguuc

SEQ ID NO: 116375 - RNA, 22 nt, Artificial Sequence
  Synthetic
aguuuacuagugccauuuguuc

SEQ ID NO: 116376 - RNA, 23 nt, Artificial Sequence
  Synthetic
caguuuacuagugccauuuguuc

SEQ ID NO: 116377 - RNA, 24 nt, Artificial Sequence
  Synthetic
ucaguuuacuagugccauuuguuc

SEQ ID NO: 116378 - RNA, 19 nt, Artificial Sequence
  Synthetic
agaggacucuuggacuuuc

SEQ ID NO: 116379 - RNA, 20 nt, Artificial Sequence
  Synthetic
aagaggacucuuggacuuuc

SEQ ID NO: 116380 - RNA, 18 nt, Artificial Sequence
  Synthetic
  misc_feature (4)..(4): n is a, c, g, or u
agancuacagcaugggag

SEQ ID NO: 116381 - RNA, 19 nt, Artificial Sequence
  Synthetic
  misc_feature (5)..(5): n is a, c, g, or u
aagancuacagcaugggag

SEQ ID NO: 116382 - RNA, 20 nt, Artificial Sequence
  Synthetic
  misc_feature (6)..(6): n is a, c, g, or u
caagancuacagcaugggag

SEQ ID NO: 116383 - RNA, 21 nt, Artificial Sequence
  Synthetic
  misc_feature (7)..(7): n is a, c, g, or u
acaagancuacagcaugggag

SEQ ID NO: 116384 - RNA, 22 nt, Artificial Sequence
  Synthetic
  misc_feature (8)..(8): n is a, c, g, or u
aacaagancuacagcaugggag

SEQ ID NO: 116385 - RNA, 18 nt, Artificial Sequence
  Synthetic
  misc_feature (15)..(15): n is a, c, g, or u
cuguuguuagacgangag

SEQ ID NO: 116386 - RNA, 19 nt, Artificial Sequence
  Synthetic
  misc_feature (16)..(16): n is a, c, g, or u
acuguuguuagacgangag

SEQ ID NO: 116387 - RNA, 20 nt, Artificial Sequence
  Synthetic
  misc_feature (17)..(17): n is a, c, g, or u
uacuguuguuagacgangag

SEQ ID NO: 116388 - RNA, 21 nt, Artificial Sequence
  Synthetic
  misc_feature (18)..(18): n is a, c, g, or u
cuacuguuguuagacgangag

SEQ ID NO: 116389 - RNA, 22 nt, Artificial Sequence
  Synthetic
  misc_feature (19)..(19): n is a, c, g, or u
acuacuguuguuagacgangag

SEQ ID NO: 116390 - RNA, 23 nt, Artificial Sequence
  Synthetic
  misc_feature (20)..(20): n is a, c, g, or u
aacuacuguuguuagacgangag

SEQ ID NO: 116391 - RNA, 24 nt, Artificial Sequence
  Synthetic
  misc_feature (21)..(21): n is a, c, g, or u
aaacuacuguuguuagacgangag

SEQ ID NO: 116392 - RNA, 18 nt, Artificial Sequence
  Synthetic
aauuuguccugguuaucg

SEQ ID NO: 116393 - RNA, 19 nt, Artificial Sequence
  Synthetic
caauuuguccugguuaucg

SEQ ID NO: 116394 - RNA, 20 nt, Artificial Sequence
  Synthetic
ccaauuuguccugguuaucg

SEQ ID NO: 116395 - RNA, 18 nt, Artificial Sequence
  Synthetic
cccugcucguguuacagg

SEQ ID NO: 116396 - RNA, 19 nt, Artificial Sequence
  Synthetic
ccccugcucguguuacagg

SEQ ID NO: 116397 - RNA, 20 nt, Artificial Sequence
  Synthetic
accccugcucguguuacagg

SEQ ID NO: 116398 - RNA, 18 nt, Artificial Sequence
  Synthetic
ugguggcuccaguucagg

SEQ ID NO: 116399 - RNA, 19 nt, Artificial Sequence
  Synthetic
cugguggcuccaguucagg

SEQ ID NO: 116400 - RNA, 18 nt, Artificial Sequence
  Synthetic
  misc_feature (11)..(11): n is a, c, g, or u
augauguggunuuggggg

SEQ ID NO: 116401 - RNA, 21 nt, Artificial Sequence
  Synthetic
  misc_feature (14)..(14): n is a, c, g, or u
uggaugauguggunuuggggg

SEQ ID NO: 116402 - RNA, 22 nt, Artificial Sequence
  Synthetic
  misc_feature (15)..(15): n is a, c, g, or u
auggaugauguggunuuggggg

SEQ ID NO: 116403 - RNA, 23 nt, Artificial Sequence
  Synthetic
  misc_feature (16)..(16): n is a, c, g, or u
uauggaugauguggunuuggggg

SEQ ID NO: 116404 - RNA, 24 nt, Artificial Sequence
  Synthetic
  misc_feature (17)..(17): n is a, c, g, or u
auauggaugauguggunuuggggg

SEQ ID NO: 116405 - RNA, 18 nt, Artificial Sequence
  Synthetic
ccucgaaaaggcaugggg

SEQ ID NO: 116406 - RNA, 19 nt, Artificial Sequence
  Synthetic
accucgaaaaggcaugggg

SEQ ID NO: 116407 - RNA, 20 nt, Artificial Sequence
  Synthetic
aaccucgaaaaggcaugggg

SEQ ID NO: 116408 - RNA, 19 nt, Artificial Sequence
  Synthetic
  misc_feature (11)..(11): n is a, c, g, or u
uguguguuuanugaguggg

SEQ ID NO: 116409 - RNA, 20 nt, Artificial Sequence
  Synthetic
  misc_feature (12)..(12): n is a, c, g, or u
cuguguguuuanugaguggg

SEQ ID NO: 116410 - RNA, 21 nt, Artificial Sequence
  Synthetic
  misc_feature (13)..(13): n is a, c, g, or u
acuguguguuuanugaguggg

SEQ ID NO: 116411 - RNA, 23 nt, Artificial Sequence
  Synthetic
  misc_feature (15)..(15): n is a, c, g, or u
agacuguguguuuanugaguggg

SEQ ID NO: 116412 - RNA, 24 nt, Artificial Sequence
  Synthetic
  misc_feature (16)..(16): n is a, c, g, or u
aagacuguguguuuanugaguggg

SEQ ID NO: 116413 - RNA, 18 nt, Artificial Sequence
  Synthetic
aagcuauucuguguuggg

SEQ ID NO: 116414 - RNA, 19 nt, Artificial Sequence
  Synthetic
caagcuauucuguguuggg

SEQ ID NO: 116415 - RNA, 22 nt, Artificial Sequence
  Synthetic
aggcaagcuauucuguguuggg

SEQ ID NO: 116416 - RNA, 23 nt, Artificial Sequence
  Synthetic
caggcaagcuauucuguguuggg

SEQ ID NO: 116417 - RNA, 24 nt, Artificial Sequence
  Synthetic
ucaggcaagcuauucuguguuggg

SEQ ID NO: 116418 - RNA, 18 nt, Artificial Sequence
  Synthetic
  misc_feature (8)..(8): n is a, c, g, or u
aacaagancuacagcaug

SEQ ID NO: 116419 - RNA, 22 nt, Artificial Sequence
  Synthetic
  misc_feature (12)..(12): n is a, c, g, or u
ugggaacaagancuacagcaug

SEQ ID NO: 116420 - RNA, 23 nt, Artificial Sequence
  Synthetic
  misc_feature (13)..(13): n is a, c, g, or u
uugggaacaagancuacagcaug

SEQ ID NO: 116421 - RNA, 24 nt, Artificial Sequence
  Synthetic
  misc_feature (14)..(14): n is a, c, g, or u
cuugggaacaagancuacagcaug

SEQ ID NO: 116422 - RNA, 18 nt, Artificial Sequence
  Synthetic
cuggcuuucaguuauaug

SEQ ID NO: 116423 - RNA, 19 nt, Artificial Sequence
  Synthetic
ucuggcuuucaguuauaug

SEQ ID NO: 116424 - RNA, 21 nt, Artificial Sequence
  Synthetic
ugucuggcuuucaguuauaug

SEQ ID NO: 116425 - RNA, 22 nt, Artificial Sequence
  Synthetic
cugucuggcuuucaguuauaug

SEQ ID NO: 116426 - RNA, 23 nt, Artificial Sequence
  Synthetic
acugucuggcuuucaguuauaug

SEQ ID NO: 116427 - RNA, 24 nt, Artificial Sequence
  Synthetic
cacugucuggcuuucaguuauaug

SEQ ID NO: 116428 - RNA, 18 nt, Artificial Sequence
  Synthetic
uaaaauuaauuaugccug

SEQ ID NO: 116429 - RNA, 19 nt, Artificial Sequence
  Synthetic
cuaaaauuaauuaugccug

SEQ ID NO: 116430 - RNA, 20 nt, Artificial Sequence
  Synthetic
acuaaaauuaauuaugccug

SEQ ID NO: 116431 - RNA, 19 nt, Artificial Sequence
  Synthetic
ugcaacuuuuucaccucug

SEQ ID NO: 116432 - RNA, 20 nt, Artificial Sequence
  Synthetic
augcaacuuuuucaccucug

SEQ ID NO: 116433 - RNA, 18 nt, Artificial Sequence
  Synthetic
aagaauuuggagcuucug

SEQ ID NO: 116434 - RNA, 19 nt, Artificial Sequence
  Synthetic
aaagaauuuggagcuucug

SEQ ID NO: 116435 - RNA, 20 nt, Artificial Sequence
  Synthetic
uaaagaauuuggagcuucug

SEQ ID NO: 116436 - RNA, 21 nt, Artificial Sequence
  Synthetic
auaaagaauuuggagcuucug

SEQ ID NO: 116437 - RNA, 22 nt, Artificial Sequence
  Synthetic
uauaaagaauuuggagcuucug

SEQ ID NO: 116438 - RNA, 23 nt, Artificial Sequence
  Synthetic
  misc_feature (1)..(1): n is a, c, g, or u
nuauaaagaauuuggagcuucug

SEQ ID NO: 116439 - RNA, 24 nt, Artificial Sequence
  Synthetic
  misc_feature (2)..(2): n is a, c, g, or u
cnuauaaagaauuuggagcuucug

SEQ ID NO: 116440 - RNA, 18 nt, Artificial Sequence
  Synthetic
aaucuagccaccugggug

SEQ ID NO: 116441 - RNA, 20 nt, Artificial Sequence
  Synthetic
ugaaucuagccaccugggug

SEQ ID NO: 116442 - RNA, 21 nt, Artificial Sequence
  Synthetic
augaaucuagccaccugggug

SEQ ID NO: 116443 - RNA, 22 nt, Artificial Sequence
  Synthetic
  misc_feature (1)..(1): n is a, c, g, or u
naugaaucuagccaccugggug

SEQ ID NO: 116444 - RNA, 23 nt, Artificial Sequence
  Synthetic
  misc_feature (2)..(2): n is a, c, g, or u
unaugaaucuagccaccugggug

SEQ ID NO: 116445 - RNA, 24 nt, Artificial Sequence
  Synthetic
  misc_feature (3)..(3): n is a, c, g, or u
uunaugaaucuagccaccugggug

SEQ ID NO: 116446 - RNA, 20 nt, Artificial Sequence
  Synthetic
  misc_feature (10)..(10): n is a, c, g, or u
cggcaacggncuggucugug

SEQ ID NO: 116447 - RNA, 18 nt, Artificial Sequence
  Synthetic
  misc_feature (7)..(7): n is a, c, g, or u
aaacagnccuauugauug

SEQ ID NO: 116448 - RNA, 19 nt, Artificial Sequence
  Synthetic
  misc_feature (8)..(8): n is a, c, g, or u
uaaacagnccuauugauug

SEQ ID NO: 116449 - RNA, 21 nt, Artificial Sequence
  Synthetic
  misc_feature (10)..(10): n is a, c, g, or u
uguaaacagnccuauugauug

SEQ ID NO: 116450 - RNA, 22 nt, Artificial Sequence
  Synthetic
  misc_feature (11)..(11): n is a, c, g, or u
cuguaaacagnccuauugauug

SEQ ID NO: 116451 - RNA, 23 nt, Artificial Sequence
  Synthetic
  misc_feature (12)..(12): n is a, c, g, or u
ccuguaaacagnccuauugauug

SEQ ID NO: 116452 - RNA, 24 nt, Artificial Sequence
  Synthetic
  misc_feature (13)..(13): n is a, c, g, or u
uccuguaaacagnccuauugauug

SEQ ID NO: 116453 - RNA, 18 nt, Artificial Sequence
  Synthetic
ugggugggaaguaauuug

SEQ ID NO: 116454 - RNA, 19 nt, Artificial Sequence
  Synthetic
cugggugggaaguaauuug

SEQ ID NO: 116455 - RNA, 20 nt, Artificial Sequence
  Synthetic
ccugggugggaaguaauuug

SEQ ID NO: 116456 - RNA, 19 nt, Artificial Sequence
  Synthetic
aguuuacuagugccauuug

SEQ ID NO: 116457 - RNA, 20 nt, Artificial Sequence
  Synthetic
caguuuacuagugccauuug

SEQ ID NO: 116458 - RNA, 21 nt, Artificial Sequence
  Synthetic
ucaguuuacuagugccauuug

SEQ ID NO: 116459 - RNA, 22 nt, Artificial Sequence
  Synthetic
cucaguuuacuagugccauuug

SEQ ID NO: 116460 - RNA, 19 nt, Artificial Sequence
  Synthetic
  misc_feature (19)..(19): n is a, c, g, or u
aguagucagcuaugucaan

SEQ ID NO: 116461 - RNA, 20 nt, Artificial Sequence
  Synthetic
  misc_feature (20)..(20): n is a, c, g, or u
uaguagucagcuaugucaan

SEQ ID NO: 116462 - RNA, 21 nt, Artificial Sequence
  Synthetic
  misc_feature (21)..(21): n is a, c, g, or u
uuaguagucagcuaugucaan

SEQ ID NO: 116463 - RNA, 22 nt, Artificial Sequence
  Synthetic
  misc_feature (22)..(22): n is a, c, g, or u
auuaguagucagcuaugucaan

SEQ ID NO: 116464 - RNA, 23 nt, Artificial Sequence
  Synthetic
  misc_feature (23)..(23): n is a, c, g, or u
aauuaguagucagcuaugucaan

SEQ ID NO: 116465 - RNA, 18 nt, Artificial Sequence
  Synthetic
  misc_feature (18)..(18): n is a, c, g, or u
aggaguugggggaggagn

SEQ ID NO: 116466 - RNA, 22 nt, Artificial Sequence
  Synthetic
  misc_feature (22)..(22): n is a, c, g, or u
ugggaggaguugggggaggagn

SEQ ID NO: 116467 - RNA, 24 nt, Artificial Sequence
  Synthetic
  misc_feature (24)..(24): n is a, c, g, or u
agugggaggaguugggggaggagn

SEQ ID NO: 116468 - RNA, 18 nt, Artificial Sequence
  Synthetic
  misc_feature (6)..(6): n is a, c, g, or u
  misc_feature (18)..(18): n is a, c, g, or u
aauccncugggauucuun

SEQ ID NO: 116469 - RNA, 19 nt, Artificial Sequence
  Synthetic
  misc_feature (7)..(7): n is a, c, g, or u
  misc_feature (19)..(19): n is a, c, g, or u
caauccncugggauucuun

SEQ ID NO: 116470 - RNA, 20 nt, Artificial Sequence
  Synthetic
  misc_feature (8)..(8): n is a, c, g, or u
  misc_feature (20)..(20): n is a, c, g, or u
ccaauccncugggauucuun

SEQ ID NO: 116471 - RNA, 21 nt, Artificial Sequence
  Synthetic
  misc_feature (9)..(9): n is a, c, g, or u
  misc_feature (21)..(21): n is a, c, g, or u
cccaauccncugggauucuun

SEQ ID NO: 116472 - RNA, 22 nt, Artificial Sequence
  Synthetic
  misc_feature (10)..(10): n is a, c, g, or u
  misc_feature (22)..(22): n is a, c, g, or u
ccccaauccncugggauucuun

SEQ ID NO: 116473 - RNA, 23 nt, Artificial Sequence
  Synthetic
  misc_feature (11)..(11): n is a, c, g, or u
  misc_feature (23)..(23): n is a, c, g, or u
uccccaauccncugggauucuun

SEQ ID NO: 116474 - RNA, 18 nt, Artificial Sequence
  Synthetic
  misc_feature (18)..(18): n is a, c, g, or u
cuguguuggggugaguun

SEQ ID NO: 116475 - RNA, 19 nt, Artificial Sequence
  Synthetic
  misc_feature (19)..(19): n is a, c, g, or u
ucuguguuggggugaguun

SEQ ID NO: 116476 - RNA, 20 nt, Artificial Sequence
  Synthetic
  misc_feature (20)..(20): n is a, c, g, or u
uucuguguuggggugaguun

SEQ ID NO: 116477 - RNA, 21 nt, Artificial Sequence
  Synthetic
  misc_feature (21)..(21): n is a, c, g, or u
auucuguguuggggugaguun

SEQ ID NO: 116478 - RNA, 22 nt, Artificial Sequence
  Synthetic
  misc_feature (22)..(22): n is a, c, g, or u
uauucuguguuggggugaguun

SEQ ID NO: 116479 - RNA, 23 nt, Artificial Sequence
  Synthetic
  misc_feature (23)..(23): n is a, c, g, or u
cuauucuguguuggggugaguun

SEQ ID NO: 116480 - RNA, 18 nt, Artificial Sequence
  Synthetic
aaagccaacucagaaaau

SEQ ID NO: 116481 - RNA, 19 nt, Artificial Sequence
  Synthetic
caaagccaacucagaaaau

SEQ ID NO: 116482 - RNA, 20 nt, Artificial Sequence
  Synthetic
ucaaagccaacucagaaaau

SEQ ID NO: 116483 - RNA, 21 nt, Artificial Sequence
  Synthetic
uucaaagccaacucagaaaau

SEQ ID NO: 116484 - RNA, 22 nt, Artificial Sequence
  Synthetic
auucaaagccaacucagaaaau

SEQ ID NO: 116485 - RNA, 23 nt, Artificial Sequence
  Synthetic
cauucaaagccaacucagaaaau

SEQ ID NO: 116486 - RNA, 19 nt, Artificial Sequence
  Synthetic
agaucucaaucucgggaau

SEQ ID NO: 116487 - RNA, 20 nt, Artificial Sequence
  Synthetic
aagaucucaaucucgggaau

SEQ ID NO: 116488 - RNA, 18 nt, Artificial Sequence
  Synthetic
  misc_feature (5)..(5): n is a, c, g, or u
cucanaaaacaaaaagau

SEQ ID NO: 116489 - RNA, 19 nt, Artificial Sequence
  Synthetic
  misc_feature (6)..(6): n is a, c, g, or u
ccucanaaaacaaaaagau

SEQ ID NO: 116490 - RNA, 20 nt, Artificial Sequence
  Synthetic
  misc_feature (7)..(7): n is a, c, g, or u
cccucanaaaacaaaaagau

SEQ ID NO: 116491 - RNA, 21 nt, Artificial Sequence
  Synthetic
  misc_feature (8)..(8): n is a, c, g, or u
acccucanaaaacaaaaagau

SEQ ID NO: 116492 - RNA, 22 nt, Artificial Sequence
  Synthetic
  misc_feature (9)..(9): n is a, c, g, or u
aacccucanaaaacaaaaagau

SEQ ID NO: 116493 - RNA, 23 nt, Artificial Sequence
  Synthetic
  misc_feature (10)..(10): n is a, c, g, or u
aaacccucanaaaacaaaaagau

SEQ ID NO: 116494 - RNA, 24 nt, Artificial Sequence
  Synthetic
  misc_feature (11)..(11): n is a, c, g, or u
uaaacccucanaaaacaaaaagau

SEQ ID NO: 116495 - RNA, 18 nt, Artificial Sequence
  Synthetic
uugguucuucuggacuau

SEQ ID NO: 116496 - RNA, 20 nt, Artificial Sequence
  Synthetic
uguugguucuucuggacuau

SEQ ID NO: 116497 - RNA, 21 nt, Artificial Sequence
  Synthetic
uuguugguucuucuggacuau

SEQ ID NO: 116498 - RNA, 22 nt, Artificial Sequence
  Synthetic
cuuguugguucuucuggacuau

SEQ ID NO: 116499 - RNA, 23 nt, Artificial Sequence
  Synthetic
ucuuguugguucuucuggacuau

SEQ ID NO: 116500 - RNA, 24 nt, Artificial Sequence
  Synthetic
uucuuguugguucuucuggacuau

SEQ ID NO: 116501 - RNA, 18 nt, Artificial Sequence
  Synthetic
cuuucgcaaaauaccuau

SEQ ID NO: 116502 - RNA, 18 nt, Artificial Sequence
  Synthetic
  misc_feature (15)..(15): n is a, c, g, or u
uaaaaaucagacaanuau

SEQ ID NO: 116503 - RNA, 19 nt, Artificial Sequence
  Synthetic
  misc_feature (16)..(16): n is a, c, g, or u
cuaaaaaucagacaanuau

SEQ ID NO: 116504 - RNA, 20 nt, Artificial Sequence
  Synthetic
  misc_feature (17)..(17): n is a, c, g, or u
ccuaaaaaucagacaanuau

SEQ ID NO: 116505 - RNA, 24 nt, Artificial Sequence
  Synthetic
  misc_feature (21)..(21): n is a, c, g, or u
ugggccuaaaaaucagacaanuau

SEQ ID NO: 116506 - RNA, 18 nt, Artificial Sequence
  Synthetic
ugucuggcuuucaguuau

SEQ ID NO: 116507 - RNA, 19 nt, Artificial Sequence
  Synthetic
cugucuggcuuucaguuau

SEQ ID NO: 116508 - RNA, 20 nt, Artificial Sequence
  Synthetic
acugucuggcuuucaguuau

SEQ ID NO: 116509 - RNA, 21 nt, Artificial Sequence
  Synthetic
cacugucuggcuuucaguuau

SEQ ID NO: 116510 - RNA, 22 nt, Artificial Sequence
  Synthetic
ccacugucuggcuuucaguuau

SEQ ID NO: 116511 - RNA, 23 nt, Artificial Sequence
  Synthetic
cccacugucuggcuuucaguuau

SEQ ID NO: 116512 - RNA, 24 nt, Artificial Sequence
  Synthetic
ccccacugucuggcuuucaguuau

SEQ ID NO: 116513 - RNA, 18 nt, Artificial Sequence
  Synthetic
augccugcuagguuuuau

SEQ ID NO: 116514 - RNA, 19 nt, Artificial Sequence
  Synthetic
uaugccugcuagguuuuau

SEQ ID NO: 116515 - RNA, 20 nt, Artificial Sequence
  Synthetic
uuaugccugcuagguuuuau

SEQ ID NO: 116516 - RNA, 21 nt, Artificial Sequence
  Synthetic
auuaugccugcuagguuuuau

SEQ ID NO: 116517 - RNA, 22 nt, Artificial Sequence
  Synthetic
aauuaugccugcuagguuuuau

SEQ ID NO: 116518 - RNA, 23 nt, Artificial Sequence
  Synthetic
uaauuaugccugcuagguuuuau

SEQ ID NO: 116519 - RNA, 24 nt, Artificial Sequence
  Synthetic
uuaauuaugccugcuagguuuuau

SEQ ID NO: 116520 - RNA, 18 nt, Artificial Sequence
  Synthetic
uaccacagagucuagacu

SEQ ID NO: 116521 - RNA, 19 nt, Artificial Sequence
  Synthetic
auaccacagagucuagacu

SEQ ID NO: 116522 - RNA, 20 nt, Artificial Sequence
  Synthetic
aauaccacagagucuagacu

SEQ ID NO: 116523 - RNA, 19 nt, Artificial Sequence
  Synthetic
  misc_feature (1)..(1): n is a, c, g, or u
  misc_feature (4)..(4): n is a, c, g, or u
ngcnaaacucaucgggacu

SEQ ID NO: 116524 - RNA, 22 nt, Artificial Sequence
  Synthetic
  misc_feature (4)..(4): n is a, c, g, or u
  misc_feature (7)..(7): n is a, c, g, or u
uggngcnaaacucaucgggacu

SEQ ID NO: 116525 - RNA, 23 nt, Artificial Sequence
  Synthetic
  misc_feature (5)..(5): n is a, c, g, or u
  misc_feature (8)..(8): n is a, c, g, or u
cuggngcnaaacucaucgggacu

SEQ ID NO: 116526 - RNA, 24 nt, Artificial Sequence
  Synthetic
  misc_feature (6)..(6): n is a, c, g, or u
  misc_feature (9)..(9): n is a, c, g, or u
ucuggngcnaaacucaucgggacu

SEQ ID NO: 116527 - RNA, 18 nt, Artificial Sequence
  Synthetic
  misc_feature (1)..(1): n is a, c, g, or u
  misc_feature (13)..(13): n is a, c, g, or u
ncaauuugugggnccccu

SEQ ID NO: 116528 - RNA, 19 nt, Artificial Sequence
  Synthetic
  misc_feature (2)..(2): n is a, c, g, or u
  misc_feature (14)..(14): n is a, c, g, or u
ancaauuugugggnccccu

SEQ ID NO: 116529 - RNA, 20 nt, Artificial Sequence
  Synthetic
  misc_feature (3)..(3): n is a, c, g, or u
  misc_feature (15)..(15): n is a, c, g, or u
aancaauuugugggnccccu

SEQ ID NO: 116530 - RNA, 21 nt, Artificial Sequence
  Synthetic
  misc_feature (4)..(4): n is a, c, g, or u
  misc_feature (16)..(16): n is a, c, g, or u
uaancaauuugugggnccccu

SEQ ID NO: 116531 - RNA, 23 nt, Artificial Sequence
  Synthetic
  misc_feature (6)..(6): n is a, c, g, or u
  misc_feature (18)..(18): n is a, c, g, or u
uguaancaauuugugggnccccu

SEQ ID NO: 116532 - RNA, 24 nt, Artificial Sequence
  Synthetic
  misc_feature (1)..(1): n is a, c, g, or u
  misc_feature (7)..(7): n is a, c, g, or u
  misc_feature (19)..(19): n is a, c, g, or u
nuguaancaauuugugggnccccu

SEQ ID NO: 116533 - RNA, 18 nt, Artificial Sequence
  Synthetic
  misc_feature (4)..(4): n is a, c, g, or u
caanguuaauaugggccu

SEQ ID NO: 116534 - RNA, 19 nt, Artificial Sequence
  Synthetic
  misc_feature (5)..(5): n is a, c, g, or u
ucaanguuaauaugggccu

SEQ ID NO: 116535 - RNA, 21 nt, Artificial Sequence
  Synthetic
  misc_feature (7)..(7): n is a, c, g, or u
ugucaanguuaauaugggccu

SEQ ID NO: 116536 - RNA, 22 nt, Artificial Sequence
  Synthetic
  misc_feature (8)..(8): n is a, c, g, or u
augucaanguuaauaugggccu

SEQ ID NO: 116537 - RNA, 23 nt, Artificial Sequence
  Synthetic
  misc_feature (9)..(9): n is a, c, g, or u
uaugucaanguuaauaugggccu

SEQ ID NO: 116538 - RNA, 24 nt, Artificial Sequence
  Synthetic
  misc_feature (10)..(10): n is a, c, g, or u
cuaugucaanguuaauaugggccu

SEQ ID NO: 116539 - RNA, 18 nt, Artificial Sequence
  Synthetic
  misc_feature (15)..(15): n is a, c, g, or u
cuuccuguaaacagnccu

SEQ ID NO: 116540 - RNA, 19 nt, Artificial Sequence
  Synthetic
  misc_feature (16)..(16): n is a, c, g, or u
acuuccuguaaacagnccu

SEQ ID NO: 116541 - RNA, 20 nt, Artificial Sequence
  Synthetic
  misc_feature (17)..(17): n is a, c, g, or u
aacuuccuguaaacagnccu

SEQ ID NO: 116542 - RNA, 21 nt, Artificial Sequence
  Synthetic
  misc_feature (18)..(18): n is a, c, g, or u
aaacuuccuguaaacagnccu

SEQ ID NO: 116543 - RNA, 24 nt, Artificial Sequence
  Synthetic
  misc_feature (21)..(21): n is a, c, g, or u
aggaaacuuccuguaaacagnccu

SEQ ID NO: 116544 - RNA, 18 nt, Artificial Sequence
  Synthetic
cuuguugacaaaaauccu

SEQ ID NO: 116545 - RNA, 19 nt, Artificial Sequence
  Synthetic
ucuuguugacaaaaauccu

SEQ ID NO: 116546 - RNA, 20 nt, Artificial Sequence
  Synthetic
uucuuguugacaaaaauccu

SEQ ID NO: 116547 - RNA, 21 nt, Artificial Sequence
  Synthetic
uuucuuguugacaaaaauccu

SEQ ID NO: 116548 - RNA, 22 nt, Artificial Sequence
  Synthetic
uuuucuuguugacaaaaauccu

SEQ ID NO: 116549 - RNA, 23 nt, Artificial Sequence
  Synthetic
uuuuucuuguugacaaaaauccu

SEQ ID NO: 116550 - RNA, 18 nt, Artificial Sequence
  Synthetic
  misc_feature (6)..(6): n is a, c, g, or u
agggcncuguacuuuccu

SEQ ID NO: 116551 - RNA, 19 nt, Artificial Sequence
  Synthetic
  misc_feature (7)..(7): n is a, c, g, or u
cagggcncuguacuuuccu

SEQ ID NO: 116552 - RNA, 20 nt, Artificial Sequence
  Synthetic
  misc_feature (8)..(8): n is a, c, g, or u
ucagggcncuguacuuuccu

SEQ ID NO: 116553 - RNA, 22 nt, Artificial Sequence
  Synthetic
  misc_feature (10)..(10): n is a, c, g, or u
agucagggcncuguacuuuccu

SEQ ID NO: 116554 - RNA, 24 nt, Artificial Sequence
  Synthetic
  misc_feature (12)..(12): n is a, c, g, or u
agagucagggcncuguacuuuccu

SEQ ID NO: 116555 - RNA, 18 nt, Artificial Sequence
  Synthetic
uucccccacugucuggcu

SEQ ID NO: 116556 - RNA, 19 nt, Artificial Sequence
  Synthetic
uuucccccacugucuggcu

SEQ ID NO: 116557 - RNA, 20 nt, Artificial Sequence
  Synthetic
cuuucccccacugucuggcu

SEQ ID NO: 116558 - RNA, 19 nt, Artificial Sequence
  Synthetic
aggaacagugagcccugcu

SEQ ID NO: 116559 - RNA, 20 nt, Artificial Sequence
  Synthetic
caggaacagugagcccugcu

SEQ ID NO: 116560 - RNA, 18 nt, Artificial Sequence
  Synthetic
aaccuuugugucuccucu

SEQ ID NO: 116561 - RNA, 18 nt, Artificial Sequence
  Synthetic
accaauuuucuuuugucu

SEQ ID NO: 116562 - RNA, 19 nt, Artificial Sequence
  Synthetic
uaccaauuuucuuuugucu

SEQ ID NO: 116563 - RNA, 20 nt, Artificial Sequence
  Synthetic
uuaccaauuuucuuuugucu

SEQ ID NO: 116564 - RNA, 22 nt, Artificial Sequence
  Synthetic
uguuaccaauuuucuuuugucu

SEQ ID NO: 116565 - RNA, 23 nt, Artificial Sequence
  Synthetic
cuguuaccaauuuucuuuugucu

SEQ ID NO: 116566 - RNA, 18 nt, Artificial Sequence
  Synthetic
  misc_feature (7)..(7): n is a, c, g, or u
uuuggunucuuuuggagu

SEQ ID NO: 116567 - RNA, 19 nt, Artificial Sequence
  Synthetic
  misc_feature (8)..(8): n is a, c, g, or u
auuuggunucuuuuggagu

SEQ ID NO: 116568 - RNA, 20 nt, Artificial Sequence
  Synthetic
  misc_feature (9)..(9): n is a, c, g, or u
uauuuggunucuuuuggagu

SEQ ID NO: 116569 - RNA, 21 nt, Artificial Sequence
  Synthetic
  misc_feature (10)..(10): n is a, c, g, or u
auauuuggunucuuuuggagu

SEQ ID NO: 116570 - RNA, 22 nt, Artificial Sequence
  Synthetic
  misc_feature (11)..(11): n is a, c, g, or u
aauauuuggunucuuuuggagu

SEQ ID NO: 116571 - RNA, 24 nt, Artificial Sequence
  Synthetic
  misc_feature (13)..(13): n is a, c, g, or u
ugaauauuuggunucuuuuggagu

SEQ ID NO: 116572 - RNA, 18 nt, Artificial Sequence
  Synthetic
cuccccaugggggacugu

SEQ ID NO: 116573 - RNA, 19 nt, Artificial Sequence
  Synthetic
ccuccccaugggggacugu

SEQ ID NO: 116574 - RNA, 20 nt, Artificial Sequence
  Synthetic
  misc_feature (1)..(1): n is a, c, g, or u
nccuccccaugggggacugu

SEQ ID NO: 116575 - RNA, 21 nt, Artificial Sequence
  Synthetic
  misc_feature (1)..(2): n is a, c, g, or u
nnccuccccaugggggacugu

SEQ ID NO: 116576 - RNA, 22 nt, Artificial Sequence
  Synthetic
  misc_feature (2)..(3): n is a, c, g, or u
annccuccccaugggggacugu

SEQ ID NO: 116577 - RNA, 23 nt, Artificial Sequence
  Synthetic
  misc_feature (3)..(4): n is a, c, g, or u
cannccuccccaugggggacugu

SEQ ID NO: 116578 - RNA, 24 nt, Artificial Sequence
  Synthetic
  misc_feature (4)..(5): n is a, c, g, or u
ucannccuccccaugggggacugu

SEQ ID NO: 116579 - RNA, 18 nt, Artificial Sequence
  Synthetic
aggcaagcuauucugugu

SEQ ID NO: 116580 - RNA, 19 nt, Artificial Sequence
  Synthetic
caggcaagcuauucugugu

SEQ ID NO: 116581 - RNA, 20 nt, Artificial Sequence
  Synthetic
ucaggcaagcuauucugugu

SEQ ID NO: 116582 - RNA, 18 nt, Artificial Sequence
  Synthetic
uguuguccuccaauuugu

SEQ ID NO: 116583 - RNA, 19 nt, Artificial Sequence
  Synthetic
  misc_feature (1)..(1): n is a, c, g, or u
nuguuguccuccaauuugu

SEQ ID NO: 116584 - RNA, 20 nt, Artificial Sequence
  Synthetic
  misc_feature (2)..(2): n is a, c, g, or u
cnuguuguccuccaauuugu

SEQ ID NO: 116585 - RNA, 21 nt, Artificial Sequence
  Synthetic
  misc_feature (3)..(3): n is a, c, g, or u
acnuguuguccuccaauuugu

SEQ ID NO: 116586 - RNA, 22 nt, Artificial Sequence
  Synthetic
  misc_feature (4)..(4): n is a, c, g, or u
aacnuguuguccuccaauuugu

SEQ ID NO: 116587 - RNA, 23 nt, Artificial Sequence
  Synthetic
  misc_feature (5)..(5): n is a, c, g, or u
caacnuguuguccuccaauuugu

SEQ ID NO: 116588 - RNA, 24 nt, Artificial Sequence
  Synthetic
  misc_feature (6)..(6): n is a, c, g, or u
ccaacnuguuguccuccaauuugu

SEQ ID NO: 116589 - RNA, 18 nt, Artificial Sequence
  Synthetic
ugugucuuggccaaaauu

SEQ ID NO: 116590 - RNA, 20 nt, Artificial Sequence
  Synthetic
cgugugucuuggccaaaauu

SEQ ID NO: 116591 - RNA, 18 nt, Artificial Sequence
  Synthetic
  misc_feature (6)..(6): n is a, c, g, or u
aaagunugucaacgaauu

SEQ ID NO: 116592 - RNA, 21 nt, Artificial Sequence
  Synthetic
  misc_feature (9)..(9): n is a, c, g, or u
uggaaagunugucaacgaauu

SEQ ID NO: 116593 - RNA, 22 nt, Artificial Sequence
  Synthetic
  misc_feature (10)..(10): n is a, c, g, or u
uuggaaagunugucaacgaauu

SEQ ID NO: 116594 - RNA, 23 nt, Artificial Sequence
  Synthetic
  misc_feature (11)..(11): n is a, c, g, or u
auuggaaagunugucaacgaauu

SEQ ID NO: 116595 - RNA, 18 nt, Artificial Sequence
  Synthetic
uccagcauccagggaauu

SEQ ID NO: 116596 - RNA, 19 nt, Artificial Sequence
  Synthetic
auccagcauccagggaauu

SEQ ID NO: 116597 - RNA, 18 nt, Artificial Sequence
  Synthetic
cauuugcaggaggacauu

SEQ ID NO: 116598 - RNA, 19 nt, Artificial Sequence
  Synthetic
ucauuugcaggaggacauu

SEQ ID NO: 116599 - RNA, 20 nt, Artificial Sequence
  Synthetic
uucauuugcaggaggacauu

SEQ ID NO: 116600 - RNA, 21 nt, Artificial Sequence
  Synthetic
auucauuugcaggaggacauu

SEQ ID NO: 116601 - RNA, 22 nt, Artificial Sequence
  Synthetic
cauucauuugcaggaggacauu

SEQ ID NO: 116602 - RNA, 23 nt, Artificial Sequence
  Synthetic
acauucauuugcaggaggacauu

SEQ ID NO: 116603 - RNA, 18 nt, Artificial Sequence
  Synthetic
  misc_feature (3)..(3): n is a, c, g, or u
acnuuccaccaaacucuu

SEQ ID NO: 116604 - RNA, 19 nt, Artificial Sequence
  Synthetic
  misc_feature (4)..(4): n is a, c, g, or u
cacnuuccaccaaacucuu

SEQ ID NO: 116605 - RNA, 20 nt, Artificial Sequence
  Synthetic
  misc_feature (5)..(5): n is a, c, g, or u
ccacnuuccaccaaacucuu

SEQ ID NO: 116606 - RNA, 21 nt, Artificial Sequence
  Synthetic
  misc_feature (6)..(6): n is a, c, g, or u
accacnuuccaccaaacucuu

SEQ ID NO: 116607 - RNA, 22 nt, Artificial Sequence
  Synthetic
  misc_feature (7)..(7): n is a, c, g, or u
caccacnuuccaccaaacucuu

SEQ ID NO: 116608 - RNA, 23 nt, Artificial Sequence
  Synthetic
  misc_feature (8)..(8): n is a, c, g, or u
ccaccacnuuccaccaaacucuu

SEQ ID NO: 116609 - RNA, 24 nt, Artificial Sequence
  Synthetic
  misc_feature (9)..(9): n is a, c, g, or u
uccaccacnuuccaccaaacucuu

SEQ ID NO: 116610 - RNA, 19 nt, Artificial Sequence
  Synthetic
ugcuaugccucaucuucuu

SEQ ID NO: 116611 - RNA, 20 nt, Artificial Sequence
  Synthetic
cugcuaugccucaucuucuu

SEQ ID NO: 116612 - RNA, 18 nt, Artificial Sequence
  Synthetic
  misc_feature (10)..(10): n is a, c, g, or u
ucccuuuaunccgcuguu

SEQ ID NO: 116613 - RNA, 20 nt, Artificial Sequence
  Synthetic
  misc_feature (12)..(12): n is a, c, g, or u
agucccuuuaunccgcuguu

SEQ ID NO: 116614 - RNA, 22 nt, Artificial Sequence
  Synthetic
  misc_feature (14)..(14): n is a, c, g, or u
ugagucccuuuaunccgcuguu

SEQ ID NO: 116615 - RNA, 23 nt, Artificial Sequence
  Synthetic
  misc_feature (15)..(15): n is a, c, g, or u
uugagucccuuuaunccgcuguu

SEQ ID NO: 116616 - RNA, 24 nt, Artificial Sequence
  Synthetic
  misc_feature (16)..(16): n is a, c, g, or u
cuugagucccuuuaunccgcuguu

SEQ ID NO: 116617 - RNA, 19 nt, Artificial Sequence
  Synthetic
  misc_feature (17)..(17): n is a, c, g, or u
ugacuucuuuccuucunuu

SEQ ID NO: 116618 - RNA, 20 nt, Artificial Sequence
  Synthetic
  misc_feature (18)..(18): n is a, c, g, or u
cugacuucuuuccuucunuu

SEQ ID NO: 116619 - RNA, 21 nt, Artificial Sequence
  Synthetic
  misc_feature (19)..(19): n is a, c, g, or u
ucugacuucuuuccuucunuu

SEQ ID NO: 116620 - RNA, 22 nt, Artificial Sequence
  Synthetic
  misc_feature (20)..(20): n is a, c, g, or u
uucugacuucuuuccuucunuu

SEQ ID NO: 116621 - RNA, 23 nt, Artificial Sequence
  Synthetic
  misc_feature (21)..(21): n is a, c, g, or u
cuucugacuucuuuccuucunuu

SEQ ID NO: 116622 - RNA, 24 nt, Artificial Sequence
  Synthetic
  misc_feature (22)..(22): n is a, c, g, or u
ccuucugacuucuuuccuucunuu

SEQ ID NO: 116623 - RNA, 18 nt, Artificial Sequence
  Synthetic
aacgaauugugggucuuu

SEQ ID NO: 116624 - RNA, 19 nt, Artificial Sequence
  Synthetic
caacgaauugugggucuuu

SEQ ID NO: 116625 - RNA, 20 nt, Artificial Sequence
  Synthetic
ucaacgaauugugggucuuu

SEQ ID NO: 116626 - RNA, 22 nt, Artificial Sequence
  Synthetic
ugucaacgaauugugggucuuu

SEQ ID NO: 116627 - RNA, 23 nt, Artificial Sequence
  Synthetic
  misc_feature (1)..(1): n is a, c, g, or u
nugucaacgaauugugggucuuu

SEQ ID NO: 116628 - RNA, 24 nt, Artificial Sequence
  Synthetic
  misc_feature (2)..(2): n is a, c, g, or u
unugucaacgaauugugggucuuu

SEQ ID NO: 116629 - RNA, 18 nt, Artificial Sequence
  Synthetic
  misc_feature (13)..(13): n is a, c, g, or u
ugaauauuuggunucuuu

SEQ ID NO: 116630 - RNA, 19 nt, Artificial Sequence
  Synthetic
  misc_feature (14)..(14): n is a, c, g, or u
uugaauauuuggunucuuu

SEQ ID NO: 116631 - RNA, 20 nt, Artificial Sequence
  Synthetic
  misc_feature (15)..(15): n is a, c, g, or u
cuugaauauuuggunucuuu

SEQ ID NO: 116632 - RNA, 21 nt, Artificial Sequence
  Synthetic
  misc_feature (16)..(16): n is a, c, g, or u
ucuugaauauuuggunucuuu

SEQ ID NO: 116633 - RNA, 22 nt, Artificial Sequence
  Synthetic
  misc_feature (17)..(17): n is a, c, g, or u
uucuugaauauuuggunucuuu

SEQ ID NO: 116634 - RNA, 24 nt, Artificial Sequence
  Synthetic
  misc_feature (19)..(19): n is a, c, g, or u
uguucuugaauauuuggunucuuu

SEQ ID NO: 116635 - RNA, 18 nt, Artificial Sequence
  Synthetic
uuucucuuggcucaguuu

SEQ ID NO: 116636 - RNA, 20 nt, Artificial Sequence
  Synthetic
cguuucucuuggcucaguuu

SEQ ID NO: 116637 - RNA, 18 nt, Artificial Sequence
  Synthetic
cacguagcgccucauuuu

SEQ ID NO: 116638 - RNA, 19 nt, Artificial Sequence
  Synthetic
acacguagcgccucauuuu

SEQ ID NO: 116639 - RNA, 20 nt, Artificial Sequence
  Synthetic
  misc_feature (1)..(1): n is a, c, g, or u
nacacguagcgccucauuuu

SEQ ID NO: 116640 - RNA, 21 nt, Artificial Sequence
  Synthetic
  misc_feature (2)..(2): n is a, c, g, or u
cnacacguagcgccucauuuu

SEQ ID NO: 116641 - RNA, 22 nt, Artificial Sequence
  Synthetic
  misc_feature (1)..(1): n is a, c, g, or u
  misc_feature (3)..(3): n is a, c, g, or u
ncnacacguagcgccucauuuu

SEQ ID NO: 116642 - RNA, 24 nt, Artificial Sequence
  Synthetic
  misc_feature (3)..(3): n is a, c, g, or u
  misc_feature (5)..(5): n is a, c, g, or u
agncnacacguagcgccucauuuu

SEQ ID NO: 116643 - RNA, 18 nt, Artificial Sequence
  Synthetic
gaagucagaaggcaaaaa

SEQ ID NO: 116644 - RNA, 19 nt, Artificial Sequence
  Synthetic
agaagucagaaggcaaaaa

SEQ ID NO: 116645 - RNA, 20 nt, Artificial Sequence
  Synthetic
aagaagucagaaggcaaaaa

SEQ ID NO: 116646 - RNA, 21 nt, Artificial Sequence
  Synthetic
aaagaagucagaaggcaaaaa

SEQ ID NO: 116647 - RNA, 22 nt, Artificial Sequence
  Synthetic
gaaagaagucagaaggcaaaaa

SEQ ID NO: 116648 - RNA, 23 nt, Artificial Sequence
  Synthetic
ggaaagaagucagaaggcaaaaa

SEQ ID NO: 116649 - RNA, 24 nt, Artificial Sequence
  Synthetic
aggaaagaagucagaaggcaaaaa

SEQ ID NO: 116650 - RNA, 18 nt, Artificial Sequence
  Synthetic
  misc_feature (12)..(12): n is a, c, g, or u
acaguuucucunccaaaa

SEQ ID NO: 116651 - RNA, 19 nt, Artificial Sequence
  Synthetic
  misc_feature (13)..(13): n is a, c, g, or u
aacaguuucucunccaaaa

SEQ ID NO: 116652 - RNA, 20 nt, Artificial Sequence
  Synthetic
  misc_feature (14)..(14): n is a, c, g, or u
gaacaguuucucunccaaaa

SEQ ID NO: 116653 - RNA, 21 nt, Artificial Sequence
  Synthetic
  misc_feature (15)..(15): n is a, c, g, or u
agaacaguuucucunccaaaa

SEQ ID NO: 116654 - RNA, 22 nt, Artificial Sequence
  Synthetic
  misc_feature (16)..(16): n is a, c, g, or u
aagaacaguuucucunccaaaa

SEQ ID NO: 116655 - RNA, 23 nt, Artificial Sequence
  Synthetic
  misc_feature (17)..(17): n is a, c, g, or u
caagaacaguuucucunccaaaa

SEQ ID NO: 116656 - RNA, 24 nt, Artificial Sequence
  Synthetic
  misc_feature (18)..(18): n is a, c, g, or u
ucaagaacaguuucucunccaaaa

SEQ ID NO: 116657 - RNA, 18 nt, Artificial Sequence
  Synthetic
auauggugacccgcaaaa

SEQ ID NO: 116658 - RNA, 19 nt, Artificial Sequence
  Synthetic
aauauggugacccgcaaaa

SEQ ID NO: 116659 - RNA, 20 nt, Artificial Sequence
  Synthetic
gaauauggugacccgcaaaa

SEQ ID NO: 116660 - RNA, 21 nt, Artificial Sequence
  Synthetic
agaauauggugacccgcaaaa

SEQ ID NO: 116661 - RNA, 22 nt, Artificial Sequence
  Synthetic
aagaauauggugacccgcaaaa

SEQ ID NO: 116662 - RNA, 23 nt, Artificial Sequence
  Synthetic
caagaauauggugacccgcaaaa

SEQ ID NO: 116663 - RNA, 24 nt, Artificial Sequence
  Synthetic
ccaagaauauggugacccgcaaaa

SEQ ID NO: 116664 - RNA, 18 nt, Artificial Sequence
  Synthetic
agaagucagaaggcaaaa

SEQ ID NO: 116665 - RNA, 19 nt, Artificial Sequence
  Synthetic
aagaagucagaaggcaaaa

SEQ ID NO: 116666 - RNA, 20 nt, Artificial Sequence
  Synthetic
aaagaagucagaaggcaaaa

SEQ ID NO: 116667 - RNA, 21 nt, Artificial Sequence
  Synthetic
gaaagaagucagaaggcaaaa

SEQ ID NO: 116668 - RNA, 22 nt, Artificial Sequence
  Synthetic
ggaaagaagucagaaggcaaaa

SEQ ID NO: 116669 - RNA, 23 nt, Artificial Sequence
  Synthetic
aggaaagaagucagaaggcaaaa

SEQ ID NO: 116670 - RNA, 24 nt, Artificial Sequence
  Synthetic
aaggaaagaagucagaaggcaaaa

SEQ ID NO: 116671 - RNA, 18 nt, Artificial Sequence
  Synthetic
  misc_feature (7)..(7): n is a, c, g, or u
gguguunccccuagaaaa

SEQ ID NO: 116672 - RNA, 19 nt, Artificial Sequence
  Synthetic
  misc_feature (8)..(8): n is a, c, g, or u
ggguguunccccuagaaaa

SEQ ID NO: 116673 - RNA, 20 nt, Artificial Sequence
  Synthetic
  misc_feature (9)..(9): n is a, c, g, or u
cggguguunccccuagaaaa

SEQ ID NO: 116674 - RNA, 21 nt, Artificial Sequence
  Synthetic
  misc_feature (10)..(10): n is a, c, g, or u
acggguguunccccuagaaaa

SEQ ID NO: 116675 - RNA, 22 nt, Artificial Sequence
  Synthetic
  misc_feature (11)..(11): n is a, c, g, or u
cacggguguunccccuagaaaa

SEQ ID NO: 116676 - RNA, 23 nt, Artificial Sequence
  Synthetic
  misc_feature (12)..(12): n is a, c, g, or u
acacggguguunccccuagaaaa

SEQ ID NO: 116677 - RNA, 24 nt, Artificial Sequence
  Synthetic
  misc_feature (13)..(13): n is a, c, g, or u
cacacggguguunccccuagaaaa

SEQ ID NO: 116678 - RNA, 18 nt, Artificial Sequence
  Synthetic
aaaugaaugucaggaaaa

SEQ ID NO: 116679 - RNA, 19 nt, Artificial Sequence
  Synthetic
caaaugaaugucaggaaaa

SEQ ID NO: 116680 - RNA, 20 nt, Artificial Sequence
  Synthetic
gcaaaugaaugucaggaaaa

SEQ ID NO: 116681 - RNA, 21 nt, Artificial Sequence
  Synthetic
ugcaaaugaaugucaggaaaa

SEQ ID NO: 116682 - RNA, 22 nt, Artificial Sequence
  Synthetic
cugcaaaugaaugucaggaaaa

SEQ ID NO: 116683 - RNA, 23 nt, Artificial Sequence
  Synthetic
ccugcaaaugaaugucaggaaaa

SEQ ID NO: 116684 - RNA, 24 nt, Artificial Sequence
  Synthetic
uccugcaaaugaaugucaggaaaa

SEQ ID NO: 116685 - RNA, 18 nt, Artificial Sequence
  Synthetic
  misc_feature (10)..(10): n is a, c, g, or u
aguaacauunggauaaaa

SEQ ID NO: 116686 - RNA, 19 nt, Artificial Sequence
  Synthetic
  misc_feature (11)..(11): n is a, c, g, or u
uaguaacauunggauaaaa

SEQ ID NO: 116687 - RNA, 20 nt, Artificial Sequence
  Synthetic
  misc_feature (12)..(12): n is a, c, g, or u
uuaguaacauunggauaaaa

SEQ ID NO: 116688 - RNA, 21 nt, Artificial Sequence
  Synthetic
  misc_feature (13)..(13): n is a, c, g, or u
uuuaguaacauunggauaaaa

SEQ ID NO: 116689 - RNA, 22 nt, Artificial Sequence
  Synthetic
  misc_feature (14)..(14): n is a, c, g, or u
auuuaguaacauunggauaaaa

SEQ ID NO: 116690 - RNA, 23 nt, Artificial Sequence
  Synthetic
  misc_feature (15)..(15): n is a, c, g, or u
uauuuaguaacauunggauaaaa

SEQ ID NO: 116691 - RNA, 24 nt, Artificial Sequence
  Synthetic
  misc_feature (16)..(16): n is a, c, g, or u
auauuuaguaacauunggauaaaa

SEQ ID NO: 116692 - RNA, 18 nt, Artificial Sequence
  Synthetic
uguauacccaaagacaaa

SEQ ID NO: 116693 - RNA, 19 nt, Artificial Sequence
  Synthetic
auguauacccaaagacaaa

SEQ ID NO: 116694 - RNA, 20 nt, Artificial Sequence
  Synthetic
aauguauacccaaagacaaa

SEQ ID NO: 116695 - RNA, 21 nt, Artificial Sequence
  Synthetic
aaauguauacccaaagacaaa

SEQ ID NO: 116696 - RNA, 22 nt, Artificial Sequence
  Synthetic
uaaauguauacccaaagacaaa

SEQ ID NO: 116697 - RNA, 23 nt, Artificial Sequence
  Synthetic
uuaaauguauacccaaagacaaa

SEQ ID NO: 116698 - RNA, 24 nt, Artificial Sequence
  Synthetic
uuuaaauguauacccaaagacaaa

SEQ ID NO: 116699 - RNA, 18 nt, Artificial Sequence
  Synthetic
agcgauaaccaggacaaa

SEQ ID NO: 116700 - RNA, 19 nt, Artificial Sequence
  Synthetic
cagcgauaaccaggacaaa

SEQ ID NO: 116701 - RNA, 20 nt, Artificial Sequence
  Synthetic
ccagcgauaaccaggacaaa

SEQ ID NO: 116702 - RNA, 21 nt, Artificial Sequence
  Synthetic
uccagcgauaaccaggacaaa

SEQ ID NO: 116703 - RNA, 22 nt, Artificial Sequence
  Synthetic
auccagcgauaaccaggacaaa

SEQ ID NO: 116704 - RNA, 23 nt, Artificial Sequence
  Synthetic
cauccagcgauaaccaggacaaa

SEQ ID NO: 116705 - RNA, 24 nt, Artificial Sequence
  Synthetic
acauccagcgauaaccaggacaaa

SEQ ID NO: 116706 - RNA, 18 nt, Artificial Sequence
  Synthetic
uuuaaauguauacccaaa

SEQ ID NO: 116707 - RNA, 19 nt, Artificial Sequence
  Synthetic
guuuaaauguauacccaaa

SEQ ID NO: 116708 - RNA, 20 nt, Artificial Sequence
  Synthetic
gguuuaaauguauacccaaa

SEQ ID NO: 116709 - RNA, 21 nt, Artificial Sequence
  Synthetic
ggguuuaaauguauacccaaa

SEQ ID NO: 116710 - RNA, 22 nt, Artificial Sequence
  Synthetic
aggguuuaaauguauacccaaa

SEQ ID NO: 116711 - RNA, 23 nt, Artificial Sequence
  Synthetic
gaggguuuaaauguauacccaaa

SEQ ID NO: 116712 - RNA, 24 nt, Artificial Sequence
  Synthetic
ugaggguuuaaauguauacccaaa

SEQ ID NO: 116713 - RNA, 18 nt, Artificial Sequence
  Synthetic
  misc_feature (13)..(13): n is a, c, g, or u
aacaguuucucunccaaa

SEQ ID NO: 116714 - RNA, 19 nt, Artificial Sequence
  Synthetic
  misc_feature (14)..(14): n is a, c, g, or u
gaacaguuucucunccaaa

SEQ ID NO: 116715 - RNA, 20 nt, Artificial Sequence
  Synthetic
  misc_feature (15)..(15): n is a, c, g, or u
agaacaguuucucunccaaa

SEQ ID NO: 116716 - RNA, 21 nt, Artificial Sequence
  Synthetic
  misc_feature (16)..(16): n is a, c, g, or u
aagaacaguuucucunccaaa

SEQ ID NO: 116717 - RNA, 22 nt, Artificial Sequence
  Synthetic
  misc_feature (17)..(17): n is a, c, g, or u
caagaacaguuucucunccaaa

SEQ ID NO: 116718 - RNA, 23 nt, Artificial Sequence
  Synthetic
  misc_feature (18)..(18): n is a, c, g, or u
ucaagaacaguuucucunccaaa

SEQ ID NO: 116719 - RNA, 24 nt, Artificial Sequence
  Synthetic
  misc_feature (19)..(19): n is a, c, g, or u
uucaagaacaguuucucunccaaa

SEQ ID NO: 116720 - RNA, 18 nt, Artificial Sequence
  Synthetic
  misc_feature (6)..(6): n is a, c, g, or u
agaccngcugcgagcaaa

SEQ ID NO: 116721 - RNA, 19 nt, Artificial Sequence
  Synthetic
  misc_feature (7)..(7): n is a, c, g, or u
cagaccngcugcgagcaaa

SEQ ID NO: 116722 - RNA, 20 nt, Artificial Sequence
  Synthetic
  misc_feature (8)..(8): n is a, c, g, or u
ccagaccngcugcgagcaaa

SEQ ID NO: 116723 - RNA, 21 nt, Artificial Sequence
  Synthetic
  misc_feature (1)..(1): n is a, c, g, or u
  misc_feature (9)..(9): n is a, c, g, or u
nccagaccngcugcgagcaaa

SEQ ID NO: 116724 - RNA, 22 nt, Artificial Sequence
  Synthetic
  misc_feature (2)..(2): n is a, c, g, or u
  misc_feature (10)..(10): n is a, c, g, or u
cnccagaccngcugcgagcaaa

SEQ ID NO: 116725 - RNA, 23 nt, Artificial Sequence
  Synthetic
  misc_feature (3)..(3): n is a, c, g, or u
  misc_feature (11)..(11): n is a, c, g, or u
gcnccagaccngcugcgagcaaa

SEQ ID NO: 116726 - RNA, 24 nt, Artificial Sequence
  Synthetic
  misc_feature (1)..(1): n is a, c, g, or u
  misc_feature (4)..(4): n is a, c, g, or u
  misc_feature (12)..(12): n is a, c, g, or u
ngcnccagaccngcugcgagcaaa

SEQ ID NO: 116727 - RNA, 18 nt, Artificial Sequence
  Synthetic
aauauggugacccgcaaa

SEQ ID NO: 116728 - RNA, 19 nt, Artificial Sequence
  Synthetic
gaauauggugacccgcaaa

SEQ ID NO: 116729 - RNA, 20 nt, Artificial Sequence
  Synthetic
agaauauggugacccgcaaa

SEQ ID NO: 116730 - RNA, 21 nt, Artificial Sequence
  Synthetic
aagaauauggugacccgcaaa

SEQ ID NO: 116731 - RNA, 22 nt, Artificial Sequence
  Synthetic
caagaauauggugacccgcaaa

SEQ ID NO: 116732 - RNA, 23 nt, Artificial Sequence
  Synthetic
ccaagaauauggugacccgcaaa

SEQ ID NO: 116733 - RNA, 24 nt, Artificial Sequence
  Synthetic
cccaagaauauggugacccgcaaa

SEQ ID NO: 116734 - RNA, 18 nt, Artificial Sequence
  Synthetic
aagaagucagaaggcaaa

SEQ ID NO: 116735 - RNA, 19 nt, Artificial Sequence
  Synthetic
aaagaagucagaaggcaaa

SEQ ID NO: 116736 - RNA, 20 nt, Artificial Sequence
  Synthetic
gaaagaagucagaaggcaaa

SEQ ID NO: 116737 - RNA, 21 nt, Artificial Sequence
  Synthetic
ggaaagaagucagaaggcaaa

SEQ ID NO: 116738 - RNA, 22 nt, Artificial Sequence
  Synthetic
aggaaagaagucagaaggcaaa

SEQ ID NO: 116739 - RNA, 23 nt, Artificial Sequence
  Synthetic
aaggaaagaagucagaaggcaaa

SEQ ID NO: 116740 - RNA, 24 nt, Artificial Sequence
  Synthetic
gaaggaaagaagucagaaggcaaa

SEQ ID NO: 116741 - RNA, 18 nt, Artificial Sequence
  Synthetic
uuguaaguuggcgagaaa

SEQ ID NO: 116742 - RNA, 19 nt, Artificial Sequence
  Synthetic
cuuguaaguuggcgagaaa

SEQ ID NO: 116743 - RNA, 20 nt, Artificial Sequence
  Synthetic
ccuuguaaguuggcgagaaa

SEQ ID NO: 116744 - RNA, 21 nt, Artificial Sequence
  Synthetic
gccuuguaaguuggcgagaaa

SEQ ID NO: 116745 - RNA, 22 nt, Artificial Sequence
  Synthetic
ggccuuguaaguuggcgagaaa

SEQ ID NO: 116746 - RNA, 23 nt, Artificial Sequence
  Synthetic
aggccuuguaaguuggcgagaaa

SEQ ID NO: 116747 - RNA, 24 nt, Artificial Sequence
  Synthetic
aaggccuuguaaguuggcgagaaa

SEQ ID NO: 116748 - RNA, 18 nt, Artificial Sequence
  Synthetic
  misc_feature (8)..(8): n is a, c, g, or u
ggguguunccccuagaaa

SEQ ID NO: 116749 - RNA, 19 nt, Artificial Sequence
  Synthetic
  misc_feature (9)..(9): n is a, c, g, or u
cggguguunccccuagaaa

SEQ ID NO: 116750 - RNA, 20 nt, Artificial Sequence
  Synthetic
  misc_feature (10)..(10): n is a, c, g, or u
acggguguunccccuagaaa

SEQ ID NO: 116751 - RNA, 21 nt, Artificial Sequence
  Synthetic
  misc_feature (11)..(11): n is a, c, g, or u
cacggguguunccccuagaaa

SEQ ID NO: 116752 - RNA, 22 nt, Artificial Sequence
  Synthetic
  misc_feature (12)..(12): n is a, c, g, or u
acacggguguunccccuagaaa

SEQ ID NO: 116753 - RNA, 23 nt, Artificial Sequence
  Synthetic
  misc_feature (13)..(13): n is a, c, g, or u
cacacggguguunccccuagaaa

SEQ ID NO: 116754 - RNA, 24 nt, Artificial Sequence
  Synthetic
  misc_feature (14)..(14): n is a, c, g, or u
acacacggguguunccccuagaaa

SEQ ID NO: 116755 - RNA, 18 nt, Artificial Sequence
  Synthetic
caaaaguaagacaggaaa

SEQ ID NO: 116756 - RNA, 19 nt, Artificial Sequence
  Synthetic
ccaaaaguaagacaggaaa

SEQ ID NO: 116757 - RNA, 20 nt, Artificial Sequence
  Synthetic
  misc_feature (1)..(1): n is a, c, g, or u
nccaaaaguaagacaggaaa

SEQ ID NO: 116758 - RNA, 21 nt, Artificial Sequence
  Synthetic
  misc_feature (2)..(2): n is a, c, g, or u
unccaaaaguaagacaggaaa

SEQ ID NO: 116759 - RNA, 22 nt, Artificial Sequence
  Synthetic
  misc_feature (3)..(3): n is a, c, g, or u
cunccaaaaguaagacaggaaa

SEQ ID NO: 116760 - RNA, 23 nt, Artificial Sequence
  Synthetic
  misc_feature (4)..(4): n is a, c, g, or u
ucunccaaaaguaagacaggaaa

SEQ ID NO: 116761 - RNA, 24 nt, Artificial Sequence
  Synthetic
  misc_feature (5)..(5): n is a, c, g, or u
cucunccaaaaguaagacaggaaa

SEQ ID NO: 116762 - RNA, 18 nt, Artificial Sequence
  Synthetic
caaaugaaugucaggaaa

SEQ ID NO: 116763 - RNA, 19 nt, Artificial Sequence
  Synthetic
gcaaaugaaugucaggaaa

SEQ ID NO: 116764 - RNA, 20 nt, Artificial Sequence
  Synthetic
ugcaaaugaaugucaggaaa

SEQ ID NO: 116765 - RNA, 21 nt, Artificial Sequence
  Synthetic
cugcaaaugaaugucaggaaa

SEQ ID NO: 116766 - RNA, 22 nt, Artificial Sequence
  Synthetic
ccugcaaaugaaugucaggaaa

SEQ ID NO: 116767 - RNA, 23 nt, Artificial Sequence
  Synthetic
uccugcaaaugaaugucaggaaa

SEQ ID NO: 116768 - RNA, 24 nt, Artificial Sequence
  Synthetic
cuccugcaaaugaaugucaggaaa

SEQ ID NO: 116769 - RNA, 18 nt, Artificial Sequence
  Synthetic
acagcaacaugagggaaa

SEQ ID NO: 116770 - RNA, 19 nt, Artificial Sequence
  Synthetic
uacagcaacaugagggaaa

SEQ ID NO: 116771 - RNA, 20 nt, Artificial Sequence
  Synthetic
guacagcaacaugagggaaa

SEQ ID NO: 116772 - RNA, 21 nt, Artificial Sequence
  Synthetic
uguacagcaacaugagggaaa

SEQ ID NO: 116773 - RNA, 22 nt, Artificial Sequence
  Synthetic
uuguacagcaacaugagggaaa

SEQ ID NO: 116774 - RNA, 23 nt, Artificial Sequence
  Synthetic
uuuguacagcaacaugagggaaa

SEQ ID NO: 116775 - RNA, 24 nt, Artificial Sequence
  Synthetic
uuuuguacagcaacaugagggaaa

SEQ ID NO: 116776 - RNA, 18 nt, Artificial Sequence
  Synthetic
ucauccauauaacugaaa

SEQ ID NO: 116777 - RNA, 19 nt, Artificial Sequence
  Synthetic
aucauccauauaacugaaa

SEQ ID NO: 116778 - RNA, 20 nt, Artificial Sequence
  Synthetic
caucauccauauaacugaaa

SEQ ID NO: 116779 - RNA, 21 nt, Artificial Sequence
  Synthetic
acaucauccauauaacugaaa

SEQ ID NO: 116780 - RNA, 22 nt, Artificial Sequence
  Synthetic
cacaucauccauauaacugaaa

SEQ ID NO: 116781 - RNA, 23 nt, Artificial Sequence
  Synthetic
ccacaucauccauauaacugaaa

SEQ ID NO: 116782 - RNA, 24 nt, Artificial Sequence
  Synthetic
accacaucauccauauaacugaaa

SEQ ID NO: 116783 - RNA, 18 nt, Artificial Sequence
  Synthetic
acaaauggcacuaguaaa

SEQ ID NO: 116784 - RNA, 19 nt, Artificial Sequence
  Synthetic
aacaaauggcacuaguaaa

SEQ ID NO: 116785 - RNA, 20 nt, Artificial Sequence
  Synthetic
gaacaaauggcacuaguaaa

SEQ ID NO: 116786 - RNA, 21 nt, Artificial Sequence
  Synthetic
ugaacaaauggcacuaguaaa

SEQ ID NO: 116787 - RNA, 22 nt, Artificial Sequence
  Synthetic
cugaacaaauggcacuaguaaa

SEQ ID NO: 116788 - RNA, 23 nt, Artificial Sequence
  Synthetic
acugaacaaauggcacuaguaaa

SEQ ID NO: 116789 - RNA, 24 nt, Artificial Sequence
  Synthetic
cacugaacaaauggcacuaguaaa

SEQ ID NO: 116790 - RNA, 18 nt, Artificial Sequence
  Synthetic
gcgccgacgggacguaaa

SEQ ID NO: 116791 - RNA, 19 nt, Artificial Sequence
  Synthetic
agcgccgacgggacguaaa

SEQ ID NO: 116792 - RNA, 20 nt, Artificial Sequence
  Synthetic
cagcgccgacgggacguaaa

SEQ ID NO: 116793 - RNA, 18 nt, Artificial Sequence
  Synthetic
acggggaguccgcguaaa

SEQ ID NO: 116794 - RNA, 19 nt, Artificial Sequence
  Synthetic
gacggggaguccgcguaaa

SEQ ID NO: 116795 - RNA, 20 nt, Artificial Sequence
  Synthetic
agacggggaguccgcguaaa

SEQ ID NO: 116796 - RNA, 18 nt, Artificial Sequence
  Synthetic
gcauauaaaggcauuaaa

SEQ ID NO: 116797 - RNA, 19 nt, Artificial Sequence
  Synthetic
ugcauauaaaggcauuaaa

SEQ ID NO: 116798 - RNA, 20 nt, Artificial Sequence
  Synthetic
augcauauaaaggcauuaaa

SEQ ID NO: 116799 - RNA, 21 nt, Artificial Sequence
  Synthetic
caugcauauaaaggcauuaaa

SEQ ID NO: 116800 - RNA, 22 nt, Artificial Sequence
  Synthetic
acaugcauauaaaggcauuaaa

SEQ ID NO: 116801 - RNA, 23 nt, Artificial Sequence
  Synthetic
uacaugcauauaaaggcauuaaa

SEQ ID NO: 116802 - RNA, 24 nt, Artificial Sequence
  Synthetic
auacaugcauauaaaggcauuaaa

SEQ ID NO: 116803 - RNA, 18 nt, Artificial Sequence
  Synthetic
  misc_feature (7)..(7): n is a, c, g, or u
  misc_feature (9)..(9): n is a, c, g, or u
uugccanunaggauuaaa

SEQ ID NO: 116804 - RNA, 19 nt, Artificial Sequence
  Synthetic
  misc_feature (8)..(8): n is a, c, g, or u
  misc_feature (10)..(10): n is a, c, g, or u
uuugccanunaggauuaaa

SEQ ID NO: 116805 - RNA, 20 nt, Artificial Sequence
  Synthetic
  misc_feature (9)..(9): n is a, c, g, or u
  misc_feature (11)..(11): n is a, c, g, or u
guuugccanunaggauuaaa

SEQ ID NO: 116806 - RNA, 21 nt, Artificial Sequence
  Synthetic
  misc_feature (10)..(10): n is a, c, g, or u
  misc_feature (12)..(12): n is a, c, g, or u
aguuugccanunaggauuaaa

SEQ ID NO: 116807 - RNA, 22 nt, Artificial Sequence
  Synthetic
  misc_feature (11)..(11): n is a, c, g, or u
  misc_feature (13)..(13): n is a, c, g, or u
gaguuugccanunaggauuaaa

SEQ ID NO: 116808 - RNA, 23 nt, Artificial Sequence
  Synthetic
  misc_feature (12)..(12): n is a, c, g, or u
  misc_feature (14)..(14): n is a, c, g, or u
ggaguuugccanunaggauuaaa

SEQ ID NO: 116809 - RNA, 24 nt, Artificial Sequence
  Synthetic
  misc_feature (13)..(13): n is a, c, g, or u
  misc_feature (15)..(15): n is a, c, g, or u
aggaguuugccanunaggauuaaa

SEQ ID NO: 116810 - RNA, 18 nt, Artificial Sequence
  Synthetic
gaggauuuuugucaacaa

SEQ ID NO: 116811 - RNA, 19 nt, Artificial Sequence
  Synthetic
ugaggauuuuugucaacaa

SEQ ID NO: 116812 - RNA, 20 nt, Artificial Sequence
  Synthetic
gugaggauuuuugucaacaa

SEQ ID NO: 116813 - RNA, 21 nt, Artificial Sequence
  Synthetic
ugugaggauuuuugucaacaa

SEQ ID NO: 116814 - RNA, 22 nt, Artificial Sequence
  Synthetic
uugugaggauuuuugucaacaa

SEQ ID NO: 116815 - RNA, 23 nt, Artificial Sequence
  Synthetic
auugugaggauuuuugucaacaa

SEQ ID NO: 116816 - RNA, 24 nt, Artificial Sequence
  Synthetic
uauugugaggauuuuugucaacaa

SEQ ID NO: 116817 - RNA, 18 nt, Artificial Sequence
  Synthetic
auguauacccaaagacaa

SEQ ID NO: 116818 - RNA, 19 nt, Artificial Sequence
  Synthetic
aauguauacccaaagacaa

SEQ ID NO: 116819 - RNA, 20 nt, Artificial Sequence
  Synthetic
aaauguauacccaaagacaa

SEQ ID NO: 116820 - RNA, 21 nt, Artificial Sequence
  Synthetic
uaaauguauacccaaagacaa

SEQ ID NO: 116821 - RNA, 22 nt, Artificial Sequence
  Synthetic
uuaaauguauacccaaagacaa

SEQ ID NO: 116822 - RNA, 23 nt, Artificial Sequence
  Synthetic
uuuaaauguauacccaaagacaa

SEQ ID NO: 116823 - RNA, 24 nt, Artificial Sequence
  Synthetic
guuuaaauguauacccaaagacaa

SEQ ID NO: 116824 - RNA, 18 nt, Artificial Sequence
  Synthetic
cagcgauaaccaggacaa

SEQ ID NO: 116825 - RNA, 19 nt, Artificial Sequence
  Synthetic
ccagcgauaaccaggacaa

SEQ ID NO: 116826 - RNA, 20 nt, Artificial Sequence
  Synthetic
uccagcgauaaccaggacaa

SEQ ID NO: 116827 - RNA, 21 nt, Artificial Sequence
  Synthetic
auccagcgauaaccaggacaa

SEQ ID NO: 116828 - RNA, 22 nt, Artificial Sequence
  Synthetic
cauccagcgauaaccaggacaa

SEQ ID NO: 116829 - RNA, 23 nt, Artificial Sequence
  Synthetic
acauccagcgauaaccaggacaa

SEQ ID NO: 116830 - RNA, 24 nt, Artificial Sequence
  Synthetic
cacauccagcgauaaccaggacaa

SEQ ID NO: 116831 - RNA, 18 nt, Artificial Sequence
  Synthetic
ccuggaauuagaggacaa

SEQ ID NO: 116832 - RNA, 19 nt, Artificial Sequence
  Synthetic
uccuggaauuagaggacaa

SEQ ID NO: 116833 - RNA, 20 nt, Artificial Sequence
  Synthetic
auccuggaauuagaggacaa

SEQ ID NO: 116834 - RNA, 21 nt, Artificial Sequence
  Synthetic
gauccuggaauuagaggacaa

SEQ ID NO: 116835 - RNA, 22 nt, Artificial Sequence
  Synthetic
ugauccuggaauuagaggacaa

SEQ ID NO: 116836 - RNA, 23 nt, Artificial Sequence
  Synthetic
augauccuggaauuagaggacaa

SEQ ID NO: 116837 - RNA, 24 nt, Artificial Sequence
  Synthetic
gaugauccuggaauuagaggacaa

SEQ ID NO: 116838 - RNA, 18 nt, Artificial Sequence
  Synthetic
auaguccagaagaaccaa

SEQ ID NO: 116839 - RNA, 19 nt, Artificial Sequence
  Synthetic
gauaguccagaagaaccaa

SEQ ID NO: 116840 - RNA, 20 nt, Artificial Sequence
  Synthetic
ugauaguccagaagaaccaa

SEQ ID NO: 116841 - RNA, 21 nt, Artificial Sequence
  Synthetic
uugauaguccagaagaaccaa

SEQ ID NO: 116842 - RNA, 22 nt, Artificial Sequence
  Synthetic
cuugauaguccagaagaaccaa

SEQ ID NO: 116843 - RNA, 23 nt, Artificial Sequence
  Synthetic
ccuugauaguccagaagaaccaa

SEQ ID NO: 116844 - RNA, 24 nt, Artificial Sequence
  Synthetic
accuugauaguccagaagaaccaa

SEQ ID NO: 116845 - RNA, 18 nt, Artificial Sequence
  Synthetic
  misc_feature (6)..(6): n is a, c, g, or u
uucaunaacucaccccaa

SEQ ID NO: 116846 - RNA, 19 nt, Artificial Sequence
  Synthetic
  misc_feature (7)..(7): n is a, c, g, or u
auucaunaacucaccccaa

SEQ ID NO: 116847 - RNA, 20 nt, Artificial Sequence
  Synthetic
  misc_feature (8)..(8): n is a, c, g, or u
gauucaunaacucaccccaa

SEQ ID NO: 116848 - RNA, 21 nt, Artificial Sequence
  Synthetic
  misc_feature (9)..(9): n is a, c, g, or u
agauucaunaacucaccccaa

SEQ ID NO: 116849 - RNA, 22 nt, Artificial Sequence
  Synthetic
  misc_feature (10)..(10): n is a, c, g, or u
uagauucaunaacucaccccaa

SEQ ID NO: 116850 - RNA, 23 nt, Artificial Sequence
  Synthetic
  misc_feature (11)..(11): n is a, c, g, or u
cuagauucaunaacucaccccaa

SEQ ID NO: 116851 - RNA, 24 nt, Artificial Sequence
  Synthetic
  misc_feature (12)..(12): n is a, c, g, or u
gcuagauucaunaacucaccccaa

SEQ ID NO: 116852 - RNA, 18 nt, Artificial Sequence
  Synthetic
  misc_feature (3)..(3): n is a, c, g, or u
ugnggguugaggucccaa

SEQ ID NO: 116853 - RNA, 19 nt, Artificial Sequence
  Synthetic
  misc_feature (4)..(4): n is a, c, g, or u
gugnggguugaggucccaa

SEQ ID NO: 116854 - RNA, 20 nt, Artificial Sequence
  Synthetic
  misc_feature (5)..(5): n is a, c, g, or u
ugugnggguugaggucccaa

SEQ ID NO: 116855 - RNA, 21 nt, Artificial Sequence
  Synthetic
  misc_feature (6)..(6): n is a, c, g, or u
uugugnggguugaggucccaa

SEQ ID NO: 116856 - RNA, 22 nt, Artificial Sequence
  Synthetic
  misc_feature (7)..(7): n is a, c, g, or u
cuugugnggguugaggucccaa

SEQ ID NO: 116857 - RNA, 23 nt, Artificial Sequence
  Synthetic
  misc_feature (8)..(8): n is a, c, g, or u
ccuugugnggguugaggucccaa

SEQ ID NO: 116858 - RNA, 24 nt, Artificial Sequence
  Synthetic
  misc_feature (9)..(9): n is a, c, g, or u
uccuugugnggguugaggucccaa

SEQ ID NO: 116859 - RNA, 18 nt, Artificial Sequence
  Synthetic
acuaguaaacugagccaa

SEQ ID NO: 116860 - RNA, 19 nt, Artificial Sequence
  Synthetic
cacuaguaaacugagccaa

SEQ ID NO: 116861 - RNA, 20 nt, Artificial Sequence
  Synthetic
gcacuaguaaacugagccaa

SEQ ID NO: 116862 - RNA, 21 nt, Artificial Sequence
  Synthetic
ggcacuaguaaacugagccaa

SEQ ID NO: 116863 - RNA, 22 nt, Artificial Sequence
  Synthetic
uggcacuaguaaacugagccaa

SEQ ID NO: 116864 - RNA, 23 nt, Artificial Sequence
  Synthetic
auggcacuaguaaacugagccaa

SEQ ID NO: 116865 - RNA, 24 nt, Artificial Sequence
  Synthetic
aauggcacuaguaaacugagccaa

SEQ ID NO: 116866 - RNA, 18 nt, Artificial Sequence
  Synthetic
guagguuuuguacagcaa

SEQ ID NO: 116867 - RNA, 19 nt, Artificial Sequence
  Synthetic
cguagguuuuguacagcaa

SEQ ID NO: 116868 - RNA, 20 nt, Artificial Sequence
  Synthetic
ccguagguuuuguacagcaa

SEQ ID NO: 116869 - RNA, 18 nt, Artificial Sequence
  Synthetic
  misc_feature (7)..(7): n is a, c, g, or u
cagaccngcugcgagcaa

SEQ ID NO: 116870 - RNA, 19 nt, Artificial Sequence
  Synthetic
  misc_feature (8)..(8): n is a, c, g, or u
ccagaccngcugcgagcaa

SEQ ID NO: 116871 - RNA, 20 nt, Artificial Sequence
  Synthetic
  misc_feature (1)..(1): n is a, c, g, or u
  misc_feature (9)..(9): n is a, c, g, or u
nccagaccngcugcgagcaa

SEQ ID NO: 116872 - RNA, 21 nt, Artificial Sequence
  Synthetic
  misc_feature (2)..(2): n is a, c, g, or u
  misc_feature (10)..(10): n is a, c, g, or u
cnccagaccngcugcgagcaa

SEQ ID NO: 116873 - RNA, 22 nt, Artificial Sequence
  Synthetic
  misc_feature (3)..(3): n is a, c, g, or u
  misc_feature (11)..(11): n is a, c, g, or u
gcnccagaccngcugcgagcaa

SEQ ID NO: 116874 - RNA, 23 nt, Artificial Sequence
  Synthetic
  misc_feature (1)..(1): n is a, c, g, or u
  misc_feature (4)..(4): n is a, c, g, or u
  misc_feature (12)..(12): n is a, c, g, or u
ngcnccagaccngcugcgagcaa

SEQ ID NO: 116875 - RNA, 24 nt, Artificial Sequence
  Synthetic
  misc_feature (2)..(2): n is a, c, g, or u
  misc_feature (5)..(5): n is a, c, g, or u
  misc_feature (13)..(13): n is a, c, g, or u
ungcnccagaccngcugcgagcaa

SEQ ID NO: 116876 - RNA, 18 nt, Artificial Sequence
  Synthetic
gaauauggugacccgcaa

SEQ ID NO: 116877 - RNA, 19 nt, Artificial Sequence
  Synthetic
agaauauggugacccgcaa

SEQ ID NO: 116878 - RNA, 20 nt, Artificial Sequence
  Synthetic
aagaauauggugacccgcaa

SEQ ID NO: 116879 - RNA, 18 nt, Artificial Sequence
  Synthetic
aaagaagucagaaggcaa

SEQ ID NO: 116880 - RNA, 19 nt, Artificial Sequence
  Synthetic
gaaagaagucagaaggcaa

SEQ ID NO: 116881 - RNA, 20 nt, Artificial Sequence
  Synthetic
ggaaagaagucagaaggcaa

SEQ ID NO: 116882 - RNA, 21 nt, Artificial Sequence
  Synthetic
aggaaagaagucagaaggcaa

SEQ ID NO: 116883 - RNA, 22 nt, Artificial Sequence
  Synthetic
aaggaaagaagucagaaggcaa

SEQ ID NO: 116884 - RNA, 23 nt, Artificial Sequence
  Synthetic
gaaggaaagaagucagaaggcaa

SEQ ID NO: 116885 - RNA, 24 nt, Artificial Sequence
  Synthetic
agaaggaaagaagucagaaggcaa

SEQ ID NO: 116886 - RNA, 18 nt, Artificial Sequence
  Synthetic
ugugaggauuuuugucaa

SEQ ID NO: 116887 - RNA, 19 nt, Artificial Sequence
  Synthetic
uugugaggauuuuugucaa

SEQ ID NO: 116888 - RNA, 20 nt, Artificial Sequence
  Synthetic
auugugaggauuuuugucaa

SEQ ID NO: 116889 - RNA, 21 nt, Artificial Sequence
  Synthetic
uauugugaggauuuuugucaa

SEQ ID NO: 116890 - RNA, 22 nt, Artificial Sequence
  Synthetic
guauugugaggauuuuugucaa

SEQ ID NO: 116891 - RNA, 23 nt, Artificial Sequence
  Synthetic
gguauugugaggauuuuugucaa

SEQ ID NO: 116892 - RNA, 24 nt, Artificial Sequence
  Synthetic
ugguauugugaggauuuuugucaa

SEQ ID NO: 116893 - RNA, 18 nt, Artificial Sequence
  Synthetic
  misc_feature (6)..(6): n is a, c, g, or u
ucgaanagaaggaaagaa

SEQ ID NO: 116894 - RNA, 19 nt, Artificial Sequence
  Synthetic
  misc_feature (7)..(7): n is a, c, g, or u
cucgaanagaaggaaagaa

SEQ ID NO: 116895 - RNA, 20 nt, Artificial Sequence
  Synthetic
  misc_feature (8)..(8): n is a, c, g, or u
ucucgaanagaaggaaagaa

SEQ ID NO: 116896 - RNA, 21 nt, Artificial Sequence
  Synthetic
  misc_feature (9)..(9): n is a, c, g, or u
aucucgaanagaaggaaagaa

SEQ ID NO: 116897 - RNA, 22 nt, Artificial Sequence
  Synthetic
  misc_feature (10)..(10): n is a, c, g, or u
gaucucgaanagaaggaaagaa

SEQ ID NO: 116898 - RNA, 23 nt, Artificial Sequence
  Synthetic
  misc_feature (11)..(11): n is a, c, g, or u
agaucucgaanagaaggaaagaa

SEQ ID NO: 116899 - RNA, 24 nt, Artificial Sequence
  Synthetic
  misc_feature (1)..(1): n is a, c, g, or u
  misc_feature (12)..(12): n is a, c, g, or u
nagaucucgaanagaaggaaagaa

SEQ ID NO: 116900 - RNA, 18 nt, Artificial Sequence
  Synthetic
cagaagaaccaacaagaa

SEQ ID NO: 116901 - RNA, 19 nt, Artificial Sequence
  Synthetic
ccagaagaaccaacaagaa

SEQ ID NO: 116902 - RNA, 20 nt, Artificial Sequence
  Synthetic
uccagaagaaccaacaagaa

SEQ ID NO: 116903 - RNA, 21 nt, Artificial Sequence
  Synthetic
guccagaagaaccaacaagaa

SEQ ID NO: 116904 - RNA, 22 nt, Artificial Sequence
  Synthetic
aguccagaagaaccaacaagaa

SEQ ID NO: 116905 - RNA, 23 nt, Artificial Sequence
  Synthetic
uaguccagaagaaccaacaagaa

SEQ ID NO: 116906 - RNA, 24 nt, Artificial Sequence
  Synthetic
auaguccagaagaaccaacaagaa

SEQ ID NO: 116907 - RNA, 18 nt, Artificial Sequence
  Synthetic
  misc_feature (1)..(2): n is a, c, g, or u
nnagguaccguagaagaa

SEQ ID NO: 116908 - RNA, 19 nt, Artificial Sequence
  Synthetic
  misc_feature (2)..(3): n is a, c, g, or u
gnnagguaccguagaagaa

SEQ ID NO: 116909 - RNA, 20 nt, Artificial Sequence
  Synthetic
  misc_feature (3)..(4): n is a, c, g, or u
agnnagguaccguagaagaa

SEQ ID NO: 116910 - RNA, 21 nt, Artificial Sequence
  Synthetic
  misc_feature (4)..(5): n is a, c, g, or u
aagnnagguaccguagaagaa

SEQ ID NO: 116911 - RNA, 22 nt, Artificial Sequence
  Synthetic
  misc_feature (5)..(6): n is a, c, g, or u
aaagnnagguaccguagaagaa

SEQ ID NO: 116912 - RNA, 23 nt, Artificial Sequence
  Synthetic
  misc_feature (6)..(7): n is a, c, g, or u
uaaagnnagguaccguagaagaa

SEQ ID NO: 116913 - RNA, 24 nt, Artificial Sequence
  Synthetic
  misc_feature (7)..(8): n is a, c, g, or u
uuaaagnnagguaccguagaagaa

SEQ ID NO: 116914 - RNA, 18 nt, Artificial Sequence
  Synthetic
gaaggaaagaagucagaa

SEQ ID NO: 116915 - RNA, 19 nt, Artificial Sequence
  Synthetic
agaaggaaagaagucagaa

SEQ ID NO: 116916 - RNA, 20 nt, Artificial Sequence
  Synthetic
  misc_feature (1)..(1): n is a, c, g, or u
nagaaggaaagaagucagaa

SEQ ID NO: 116917 - RNA, 21 nt, Artificial Sequence
  Synthetic
  misc_feature (2)..(2): n is a, c, g, or u
anagaaggaaagaagucagaa

SEQ ID NO: 116918 - RNA, 22 nt, Artificial Sequence
  Synthetic
  misc_feature (3)..(3): n is a, c, g, or u
aanagaaggaaagaagucagaa

SEQ ID NO: 116919 - RNA, 23 nt, Artificial Sequence
  Synthetic
  misc_feature (4)..(4): n is a, c, g, or u
gaanagaaggaaagaagucagaa

SEQ ID NO: 116920 - RNA, 24 nt, Artificial Sequence
  Synthetic
  misc_feature (5)..(5): n is a, c, g, or u
cgaanagaaggaaagaagucagaa

SEQ ID NO: 116921 - RNA, 18 nt, Artificial Sequence
  Synthetic
uaaacugagccaagagaa

SEQ ID NO: 116922 - RNA, 19 nt, Artificial Sequence
  Synthetic
guaaacugagccaagagaa

SEQ ID NO: 116923 - RNA, 20 nt, Artificial Sequence
  Synthetic
aguaaacugagccaagagaa

SEQ ID NO: 116924 - RNA, 21 nt, Artificial Sequence
  Synthetic
uaguaaacugagccaagagaa

SEQ ID NO: 116925 - RNA, 22 nt, Artificial Sequence
  Synthetic
cuaguaaacugagccaagagaa

SEQ ID NO: 116926 - RNA, 23 nt, Artificial Sequence
  Synthetic
acuaguaaacugagccaagagaa

SEQ ID NO: 116927 - RNA, 24 nt, Artificial Sequence
  Synthetic
cacuaguaaacugagccaagagaa

SEQ ID NO: 116928 - RNA, 18 nt, Artificial Sequence
  Synthetic
cuuguaaguuggcgagaa

SEQ ID NO: 116929 - RNA, 19 nt, Artificial Sequence
  Synthetic
ccuuguaaguuggcgagaa

SEQ ID NO: 116930 - RNA, 20 nt, Artificial Sequence
  Synthetic
gccuuguaaguuggcgagaa

SEQ ID NO: 116931 - RNA, 21 nt, Artificial Sequence
  Synthetic
ggccuuguaaguuggcgagaa

SEQ ID NO: 116932 - RNA, 22 nt, Artificial Sequence
  Synthetic
aggccuuguaaguuggcgagaa

SEQ ID NO: 116933 - RNA, 23 nt, Artificial Sequence
  Synthetic
aaggccuuguaaguuggcgagaa

SEQ ID NO: 116934 - RNA, 24 nt, Artificial Sequence
  Synthetic
aaaggccuuguaaguuggcgagaa

SEQ ID NO: 116935 - RNA, 18 nt, Artificial Sequence
  Synthetic
  misc_feature (6)..(7): n is a, c, g, or u
  misc_feature (11)..(11): n is a, c, g, or u
gguacnncagncggagaa

SEQ ID NO: 116936 - RNA, 19 nt, Artificial Sequence
  Synthetic
  misc_feature (7)..(8): n is a, c, g, or u
  misc_feature (12)..(12): n is a, c, g, or u
cgguacnncagncggagaa

SEQ ID NO: 116937 - RNA, 20 nt, Artificial Sequence
  Synthetic
  misc_feature (8)..(9): n is a, c, g, or u
  misc_feature (13)..(13): n is a, c, g, or u
ucgguacnncagncggagaa

SEQ ID NO: 116938 - RNA, 21 nt, Artificial Sequence
  Synthetic
  misc_feature (9)..(10): n is a, c, g, or u
  misc_feature (14)..(14): n is a, c, g, or u
gucgguacnncagncggagaa

SEQ ID NO: 116939 - RNA, 22 nt, Artificial Sequence
  Synthetic
  misc_feature (10)..(11): n is a, c, g, or u
  misc_feature (15)..(15): n is a, c, g, or u
ggucgguacnncagncggagaa

SEQ ID NO: 116940 - RNA, 23 nt, Artificial Sequence
  Synthetic
  misc_feature (11)..(12): n is a, c, g, or u
  misc_feature (16)..(16): n is a, c, g, or u
cggucgguacnncagncggagaa

SEQ ID NO: 116941 - RNA, 24 nt, Artificial Sequence
  Synthetic
  misc_feature (12)..(13): n is a, c, g, or u
  misc_feature (17)..(17): n is a, c, g, or u
ucggucgguacnncagncggagaa

SEQ ID NO: 116942 - RNA, 18 nt, Artificial Sequence
  Synthetic
  misc_feature (3)..(3): n is a, c, g, or u
  misc_feature (14)..(14): n is a, c, g, or u
agnagaucucgaanagaa

SEQ ID NO: 116943 - RNA, 19 nt, Artificial Sequence
  Synthetic
  misc_feature (4)..(4): n is a, c, g, or u
  misc_feature (15)..(15): n is a, c, g, or u
gagnagaucucgaanagaa

SEQ ID NO: 116944 - RNA, 20 nt, Artificial Sequence
  Synthetic
  misc_feature (5)..(5): n is a, c, g, or u
  misc_feature (16)..(16): n is a, c, g, or u
cgagnagaucucgaanagaa

SEQ ID NO: 116945 - RNA, 21 nt, Artificial Sequence
  Synthetic
  misc_feature (6)..(6): n is a, c, g, or u
  misc_feature (17)..(17): n is a, c, g, or u
ucgagnagaucucgaanagaa

SEQ ID NO: 116946 - RNA, 22 nt, Artificial Sequence
  Synthetic
  misc_feature (7)..(7): n is a, c, g, or u
  misc_feature (18)..(18): n is a, c, g, or u
gucgagnagaucucgaanagaa

SEQ ID NO: 116947 - RNA, 23 nt, Artificial Sequence
  Synthetic
  misc_feature (8)..(8): n is a, c, g, or u
  misc_feature (19)..(19): n is a, c, g, or u
ugucgagnagaucucgaanagaa

SEQ ID NO: 116948 - RNA, 24 nt, Artificial Sequence
  Synthetic
  misc_feature (9)..(9): n is a, c, g, or u
  misc_feature (20)..(20): n is a, c, g, or u
gugucgagnagaucucgaanagaa

SEQ ID NO: 116949 - RNA, 18 nt, Artificial Sequence
  Synthetic
  misc_feature (8)..(8): n is a, c, g, or u
ugucgagnagaucucgaa

SEQ ID NO: 116950 - RNA, 19 nt, Artificial Sequence
  Synthetic
  misc_feature (9)..(9): n is a, c, g, or u
gugucgagnagaucucgaa

SEQ ID NO: 116951 - RNA, 20 nt, Artificial Sequence
  Synthetic
  misc_feature (10)..(10): n is a, c, g, or u
ggugucgagnagaucucgaa

SEQ ID NO: 116952 - RNA, 21 nt, Artificial Sequence
  Synthetic
  misc_feature (11)..(11): n is a, c, g, or u
cggugucgagnagaucucgaa

SEQ ID NO: 116953 - RNA, 22 nt, Artificial Sequence
  Synthetic
  misc_feature (12)..(12): n is a, c, g, or u
gcggugucgagnagaucucgaa

SEQ ID NO: 116954 - RNA, 23 nt, Artificial Sequence
  Synthetic
  misc_feature (13)..(13): n is a, c, g, or u
ggcggugucgagnagaucucgaa

SEQ ID NO: 116955 - RNA, 24 nt, Artificial Sequence
  Synthetic
  misc_feature (14)..(14): n is a, c, g, or u
aggcggugucgagnagaucucgaa

SEQ ID NO: 116956 - RNA, 18 nt, Artificial Sequence
  Synthetic
gcaaaugaaugucaggaa

SEQ ID NO: 116957 - RNA, 19 nt, Artificial Sequence
  Synthetic
ugcaaaugaaugucaggaa

SEQ ID NO: 116958 - RNA, 20 nt, Artificial Sequence
  Synthetic
cugcaaaugaaugucaggaa

SEQ ID NO: 116959 - RNA, 21 nt, Artificial Sequence
  Synthetic
ccugcaaaugaaugucaggaa

SEQ ID NO: 116960 - RNA, 22 nt, Artificial Sequence
  Synthetic
uccugcaaaugaaugucaggaa

SEQ ID NO: 116961 - RNA, 23 nt, Artificial Sequence
  Synthetic
cuccugcaaaugaaugucaggaa

SEQ ID NO: 116962 - RNA, 24 nt, Artificial Sequence
  Synthetic
ccuccugcaaaugaaugucaggaa

SEQ ID NO: 116963 - RNA, 18 nt, Artificial Sequence
  Synthetic
aagaugaugggaugggaa

SEQ ID NO: 116964 - RNA, 19 nt, Artificial Sequence
  Synthetic
caagaugaugggaugggaa

SEQ ID NO: 116965 - RNA, 20 nt, Artificial Sequence
  Synthetic
ccaagaugaugggaugggaa

SEQ ID NO: 116966 - RNA, 21 nt, Artificial Sequence
  Synthetic
cccaagaugaugggaugggaa

SEQ ID NO: 116967 - RNA, 22 nt, Artificial Sequence
  Synthetic
gcccaagaugaugggaugggaa

SEQ ID NO: 116968 - RNA, 23 nt, Artificial Sequence
  Synthetic
agcccaagaugaugggaugggaa

SEQ ID NO: 116969 - RNA, 24 nt, Artificial Sequence
  Synthetic
aagcccaagaugaugggaugggaa

SEQ ID NO: 116970 - RNA, 18 nt, Artificial Sequence
  Synthetic
  misc_feature (2)..(2): n is a, c, g, or u
unguugaugauccuggaa

SEQ ID NO: 116971 - RNA, 19 nt, Artificial Sequence
  Synthetic
  misc_feature (3)..(3): n is a, c, g, or u
gunguugaugauccuggaa

SEQ ID NO: 116972 - RNA, 20 nt, Artificial Sequence
  Synthetic
  misc_feature (4)..(4): n is a, c, g, or u
ggunguugaugauccuggaa

SEQ ID NO: 116973 - RNA, 21 nt, Artificial Sequence
  Synthetic
  misc_feature (5)..(5): n is a, c, g, or u
uggunguugaugauccuggaa

SEQ ID NO: 116974 - RNA, 22 nt, Artificial Sequence
  Synthetic
  misc_feature (6)..(6): n is a, c, g, or u
cuggunguugaugauccuggaa

SEQ ID NO: 116975 - RNA, 23 nt, Artificial Sequence
  Synthetic
  misc_feature (7)..(7): n is a, c, g, or u
gcuggunguugaugauccuggaa

SEQ ID NO: 116976 - RNA, 24 nt, Artificial Sequence
  Synthetic
  misc_feature (8)..(8): n is a, c, g, or u
ugcuggunguugaugauccuggaa

SEQ ID NO: 116977 - RNA, 18 nt, Artificial Sequence
  Synthetic
ugaacaguaggacaugaa

SEQ ID NO: 116978 - RNA, 19 nt, Artificial Sequence
  Synthetic
uugaacaguaggacaugaa

SEQ ID NO: 116979 - RNA, 20 nt, Artificial Sequence
  Synthetic
cuugaacaguaggacaugaa

SEQ ID NO: 116980 - RNA, 21 nt, Artificial Sequence
  Synthetic
gcuugaacaguaggacaugaa

SEQ ID NO: 116981 - RNA, 22 nt, Artificial Sequence
  Synthetic
ggcuugaacaguaggacaugaa

SEQ ID NO: 116982 - RNA, 23 nt, Artificial Sequence
  Synthetic
aggcuugaacaguaggacaugaa

SEQ ID NO: 116983 - RNA, 24 nt, Artificial Sequence
  Synthetic
gaggcuugaacaguaggacaugaa

SEQ ID NO: 116984 - RNA, 18 nt, Artificial Sequence
  Synthetic
aauuacauaucccaugaa

SEQ ID NO: 116985 - RNA, 19 nt, Artificial Sequence
  Synthetic
caauuacauaucccaugaa

SEQ ID NO: 116986 - RNA, 20 nt, Artificial Sequence
  Synthetic
ccaauuacauaucccaugaa

SEQ ID NO: 116987 - RNA, 21 nt, Artificial Sequence
  Synthetic
  misc_feature (1)..(1): n is a, c, g, or u
nccaauuacauaucccaugaa

SEQ ID NO: 116988 - RNA, 22 nt, Artificial Sequence
  Synthetic
  misc_feature (1)..(2): n is a, c, g, or u
nnccaauuacauaucccaugaa

SEQ ID NO: 116989 - RNA, 23 nt, Artificial Sequence
  Synthetic
  misc_feature (2)..(3): n is a, c, g, or u
cnnccaauuacauaucccaugaa

SEQ ID NO: 116990 - RNA, 24 nt, Artificial Sequence
  Synthetic
  misc_feature (3)..(4): n is a, c, g, or u
acnnccaauuacauaucccaugaa

SEQ ID NO: 116991 - RNA, 18 nt, Artificial Sequence
  Synthetic
gggcucacuguuccugaa

SEQ ID NO: 116992 - RNA, 19 nt, Artificial Sequence
  Synthetic
agggcucacuguuccugaa

SEQ ID NO: 116993 - RNA, 20 nt, Artificial Sequence
  Synthetic
cagggcucacuguuccugaa

SEQ ID NO: 116994 - RNA, 21 nt, Artificial Sequence
  Synthetic
gcagggcucacuguuccugaa

SEQ ID NO: 116995 - RNA, 22 nt, Artificial Sequence
  Synthetic
agcagggcucacuguuccugaa

SEQ ID NO: 116996 - RNA, 23 nt, Artificial Sequence
  Synthetic
gagcagggcucacuguuccugaa

SEQ ID NO: 116997 - RNA, 24 nt, Artificial Sequence
  Synthetic
ugagcagggcucacuguuccugaa

SEQ ID NO: 116998 - RNA, 18 nt, Artificial Sequence
  Synthetic
gcgacgugcagaggugaa

SEQ ID NO: 116999 - RNA, 19 nt, Artificial Sequence
  Synthetic
ugcgacgugcagaggugaa

SEQ ID NO: 117000 - RNA, 20 nt, Artificial Sequence
  Synthetic
augcgacgugcagaggugaa

SEQ ID NO: 117001 - RNA, 21 nt, Artificial Sequence
  Synthetic
caugcgacgugcagaggugaa

SEQ ID NO: 117002 - RNA, 22 nt, Artificial Sequence
  Synthetic
ccaugcgacgugcagaggugaa

SEQ ID NO: 117003 - RNA, 23 nt, Artificial Sequence
  Synthetic
uccaugcgacgugcagaggugaa

SEQ ID NO: 117004 - RNA, 24 nt, Artificial Sequence
  Synthetic
cuccaugcgacgugcagaggugaa

SEQ ID NO: 117005 - RNA, 18 nt, Artificial Sequence
  Synthetic
uucugaguuggcuuugaa

SEQ ID NO: 117006 - RNA, 19 nt, Artificial Sequence
  Synthetic
uuucugaguuggcuuugaa

SEQ ID NO: 117007 - RNA, 20 nt, Artificial Sequence
  Synthetic
uuuucugaguuggcuuugaa

SEQ ID NO: 117008 - RNA, 21 nt, Artificial Sequence
  Synthetic
auuuucugaguuggcuuugaa

SEQ ID NO: 117009 - RNA, 22 nt, Artificial Sequence
  Synthetic
gauuuucugaguuggcuuugaa

SEQ ID NO: 117010 - RNA, 23 nt, Artificial Sequence
  Synthetic
ggauuuucugaguuggcuuugaa

SEQ ID NO: 117011 - RNA, 24 nt, Artificial Sequence
  Synthetic
uggauuuucugaguuggcuuugaa

SEQ ID NO: 117012 - RNA, 18 nt, Artificial Sequence
  Synthetic
  misc_feature (4)..(4): n is a, c, g, or u
  misc_feature (13)..(13): n is a, c, g, or u
  misc_feature (16)..(16): n is a, c, g, or u
auanccacauugngunaa

SEQ ID NO: 117013 - RNA, 19 nt, Artificial Sequence
  Synthetic
  misc_feature (5)..(5): n is a, c, g, or u
  misc_feature (14)..(14): n is a, c, g, or u
  misc_feature (17)..(17): n is a, c, g, or u
gauanccacauugngunaa

SEQ ID NO: 117014 - RNA, 20 nt, Artificial Sequence
  Synthetic
  misc_feature (6)..(6): n is a, c, g, or u
  misc_feature (15)..(15): n is a, c, g, or u
  misc_feature (18)..(18): n is a, c, g, or u
ggauanccacauugngunaa

SEQ ID NO: 117015 - RNA, 21 nt, Artificial Sequence
  Synthetic
  misc_feature (7)..(7): n is a, c, g, or u
  misc_feature (16)..(16): n is a, c, g, or u
  misc_feature (19)..(19): n is a, c, g, or u
aggauanccacauugngunaa

SEQ ID NO: 117016 - RNA, 22 nt, Artificial Sequence
  Synthetic
  misc_feature (8)..(8): n is a, c, g, or u
  misc_feature (17)..(17): n is a, c, g, or u
  misc_feature (20)..(20): n is a, c, g, or u
caggauanccacauugngunaa

SEQ ID NO: 117017 - RNA, 23 nt, Artificial Sequence
  Synthetic
  misc_feature (9)..(9): n is a, c, g, or u
  misc_feature (18)..(18): n is a, c, g, or u
  misc_feature (21)..(21): n is a, c, g, or u
gcaggauanccacauugngunaa

SEQ ID NO: 117018 - RNA, 24 nt, Artificial Sequence
  Synthetic
  misc_feature (10)..(10): n is a, c, g, or u
  misc_feature (19)..(19): n is a, c, g, or u
  misc_feature (22)..(22): n is a, c, g, or u
agcaggauanccacauugngunaa

SEQ ID NO: 117019 - RNA, 18 nt, Artificial Sequence
  Synthetic
agacacauccagcgauaa

SEQ ID NO: 117020 - RNA, 19 nt, Artificial Sequence
  Synthetic
cagacacauccagcgauaa

SEQ ID NO: 117021 - RNA, 20 nt, Artificial Sequence
  Synthetic
gcagacacauccagcgauaa

SEQ ID NO: 117022 - RNA, 21 nt, Artificial Sequence
  Synthetic
cgcagacacauccagcgauaa

SEQ ID NO: 117023 - RNA, 22 nt, Artificial Sequence
  Synthetic
ccgcagacacauccagcgauaa

SEQ ID NO: 117024 - RNA, 23 nt, Artificial Sequence
  Synthetic
gccgcagacacauccagcgauaa

SEQ ID NO: 117025 - RNA, 24 nt, Artificial Sequence
  Synthetic
cgccgcagacacauccagcgauaa

SEQ ID NO: 117026 - RNA, 18 nt, Artificial Sequence
  Synthetic
uuccggaaguguugauaa

SEQ ID NO: 117027 - RNA, 19 nt, Artificial Sequence
  Synthetic
uuuccggaaguguugauaa

SEQ ID NO: 117028 - RNA, 20 nt, Artificial Sequence
  Synthetic
guuuccggaaguguugauaa

SEQ ID NO: 117029 - RNA, 21 nt, Artificial Sequence
  Synthetic
aguuuccggaaguguugauaa

SEQ ID NO: 117030 - RNA, 22 nt, Artificial Sequence
  Synthetic
uaguuuccggaaguguugauaa

SEQ ID NO: 117031 - RNA, 23 nt, Artificial Sequence
  Synthetic
guaguuuccggaaguguugauaa

SEQ ID NO: 117032 - RNA, 24 nt, Artificial Sequence
  Synthetic
aguaguuuccggaaguguugauaa

SEQ ID NO: 117033 - RNA, 18 nt, Artificial Sequence
  Synthetic
  misc_feature (14)..(14): n is a, c, g, or u
uugguaacagcggnauaa

SEQ ID NO: 117034 - RNA, 19 nt, Artificial Sequence
  Synthetic
  misc_feature (15)..(15): n is a, c, g, or u
auugguaacagcggnauaa

SEQ ID NO: 117035 - RNA, 20 nt, Artificial Sequence
  Synthetic
  misc_feature (16)..(16): n is a, c, g, or u
aauugguaacagcggnauaa

SEQ ID NO: 117036 - RNA, 21 nt, Artificial Sequence
  Synthetic
  misc_feature (17)..(17): n is a, c, g, or u
aaauugguaacagcggnauaa

SEQ ID NO: 117037 - RNA, 22 nt, Artificial Sequence
  Synthetic
  misc_feature (18)..(18): n is a, c, g, or u
aaaauugguaacagcggnauaa

SEQ ID NO: 117038 - RNA, 23 nt, Artificial Sequence
  Synthetic
  misc_feature (19)..(19): n is a, c, g, or u
gaaaauugguaacagcggnauaa

SEQ ID NO: 117039 - RNA, 24 nt, Artificial Sequence
  Synthetic
  misc_feature (20)..(20): n is a, c, g, or u
agaaaauugguaacagcggnauaa

SEQ ID NO: 117040 - RNA, 18 nt, Artificial Sequence
  Synthetic
accacaucauccauauaa

SEQ ID NO: 117041 - RNA, 19 nt, Artificial Sequence
  Synthetic
  misc_feature (1)..(1): n is a, c, g, or u
naccacaucauccauauaa

SEQ ID NO: 117042 - RNA, 20 nt, Artificial Sequence
  Synthetic
  misc_feature (2)..(2): n is a, c, g, or u
anaccacaucauccauauaa

SEQ ID NO: 117043 - RNA, 21 nt, Artificial Sequence
  Synthetic
  misc_feature (3)..(3): n is a, c, g, or u
aanaccacaucauccauauaa

SEQ ID NO: 117044 - RNA, 22 nt, Artificial Sequence
  Synthetic
  misc_feature (4)..(4): n is a, c, g, or u
caanaccacaucauccauauaa

SEQ ID NO: 117045 - RNA, 23 nt, Artificial Sequence
  Synthetic
  misc_feature (5)..(5): n is a, c, g, or u
ccaanaccacaucauccauauaa

SEQ ID NO: 117046 - RNA, 24 nt, Artificial Sequence
  Synthetic
  misc_feature (6)..(6): n is a, c, g, or u
cccaanaccacaucauccauauaa

SEQ ID NO: 117047 - RNA, 18 nt, Artificial Sequence
  Synthetic
  misc_feature (8)..(8): n is a, c, g, or u
uuucucunccaaaaguaa

SEQ ID NO: 117048 - RNA, 19 nt, Artificial Sequence
  Synthetic
  misc_feature (9)..(9): n is a, c, g, or u
guuucucunccaaaaguaa

SEQ ID NO: 117049 - RNA, 20 nt, Artificial Sequence
  Synthetic
  misc_feature (10)..(10): n is a, c, g, or u
aguuucucunccaaaaguaa

SEQ ID NO: 117050 - RNA, 21 nt, Artificial Sequence
  Synthetic
  misc_feature (11)..(11): n is a, c, g, or u
caguuucucunccaaaaguaa

SEQ ID NO: 117051 - RNA, 22 nt, Artificial Sequence
  Synthetic
  misc_feature (12)..(12): n is a, c, g, or u
acaguuucucunccaaaaguaa

SEQ ID NO: 117052 - RNA, 23 nt, Artificial Sequence
  Synthetic
  misc_feature (13)..(13): n is a, c, g, or u
aacaguuucucunccaaaaguaa

SEQ ID NO: 117053 - RNA, 24 nt, Artificial Sequence
  Synthetic
  misc_feature (14)..(14): n is a, c, g, or u
gaacaguuucucunccaaaaguaa

SEQ ID NO: 117054 - RNA, 18 nt, Artificial Sequence
  Synthetic
aacaaauggcacuaguaa

SEQ ID NO: 117055 - RNA, 19 nt, Artificial Sequence
  Synthetic
gaacaaauggcacuaguaa

SEQ ID NO: 117056 - RNA, 20 nt, Artificial Sequence
  Synthetic
ugaacaaauggcacuaguaa

SEQ ID NO: 117057 - RNA, 21 nt, Artificial Sequence
  Synthetic
cugaacaaauggcacuaguaa

SEQ ID NO: 117058 - RNA, 22 nt, Artificial Sequence
  Synthetic
acugaacaaauggcacuaguaa

SEQ ID NO: 117059 - RNA, 23 nt, Artificial Sequence
  Synthetic
cacugaacaaauggcacuaguaa

SEQ ID NO: 117060 - RNA, 24 nt, Artificial Sequence
  Synthetic
ccacugaacaaauggcacuaguaa

SEQ ID NO: 117061 - RNA, 18 nt, Artificial Sequence
  Synthetic
agcgccgacgggacguaa

SEQ ID NO: 117062 - RNA, 19 nt, Artificial Sequence
  Synthetic
cagcgccgacgggacguaa

SEQ ID NO: 117063 - RNA, 20 nt, Artificial Sequence
  Synthetic
ucagcgccgacgggacguaa

SEQ ID NO: 117064 - RNA, 18 nt, Artificial Sequence
  Synthetic
gacggggaguccgcguaa

SEQ ID NO: 117065 - RNA, 19 nt, Artificial Sequence
  Synthetic
agacggggaguccgcguaa

SEQ ID NO: 117066 - RNA, 20 nt, Artificial Sequence
  Synthetic
cagacggggaguccgcguaa

SEQ ID NO: 117067 - RNA, 18 nt, Artificial Sequence
  Synthetic
gaaaaaccccgccuguaa

SEQ ID NO: 117068 - RNA, 19 nt, Artificial Sequence
  Synthetic
agaaaaaccccgccuguaa

SEQ ID NO: 117069 - RNA, 20 nt, Artificial Sequence
  Synthetic
aagaaaaaccccgccuguaa

SEQ ID NO: 117070 - RNA, 21 nt, Artificial Sequence
  Synthetic
caagaaaaaccccgccuguaa

SEQ ID NO: 117071 - RNA, 22 nt, Artificial Sequence
  Synthetic
acaagaaaaaccccgccuguaa

SEQ ID NO: 117072 - RNA, 23 nt, Artificial Sequence
  Synthetic
aacaagaaaaaccccgccuguaa

SEQ ID NO: 117073 - RNA, 24 nt, Artificial Sequence
  Synthetic
caacaagaaaaaccccgccuguaa

SEQ ID NO: 117074 - RNA, 18 nt, Artificial Sequence
  Synthetic
cuuagaaaggccuuguaa

SEQ ID NO: 117075 - RNA, 19 nt, Artificial Sequence
  Synthetic
  misc_feature (1)..(1): n is a, c, g, or u
ncuuagaaaggccuuguaa

SEQ ID NO: 117076 - RNA, 20 nt, Artificial Sequence
  Synthetic
  misc_feature (2)..(2): n is a, c, g, or u
uncuuagaaaggccuuguaa

SEQ ID NO: 117077 - RNA, 21 nt, Artificial Sequence
  Synthetic
  misc_feature (3)..(3): n is a, c, g, or u
uuncuuagaaaggccuuguaa

SEQ ID NO: 117078 - RNA, 22 nt, Artificial Sequence
  Synthetic
  misc_feature (4)..(4): n is a, c, g, or u
uuuncuuagaaaggccuuguaa

SEQ ID NO: 117079 - RNA, 23 nt, Artificial Sequence
  Synthetic
  misc_feature (5)..(5): n is a, c, g, or u
guuuncuuagaaaggccuuguaa

SEQ ID NO: 117080 - RNA, 24 nt, Artificial Sequence
  Synthetic
  misc_feature (6)..(6): n is a, c, g, or u
uguuuncuuagaaaggccuuguaa

SEQ ID NO: 117081 - RNA, 18 nt, Artificial Sequence
  Synthetic
ugcauauaaaggcauuaa

SEQ ID NO: 117082 - RNA, 19 nt, Artificial Sequence
  Synthetic
augcauauaaaggcauuaa

SEQ ID NO: 117083 - RNA, 20 nt, Artificial Sequence
  Synthetic
caugcauauaaaggcauuaa

SEQ ID NO: 117084 - RNA, 21 nt, Artificial Sequence
  Synthetic
acaugcauauaaaggcauuaa

SEQ ID NO: 117085 - RNA, 22 nt, Artificial Sequence
  Synthetic
uacaugcauauaaaggcauuaa

SEQ ID NO: 117086 - RNA, 23 nt, Artificial Sequence
  Synthetic
auacaugcauauaaaggcauuaa

SEQ ID NO: 117087 - RNA, 24 nt, Artificial Sequence
  Synthetic
uauacaugcauauaaaggcauuaa

SEQ ID NO: 117088 - RNA, 18 nt, Artificial Sequence
  Synthetic
  misc_feature (12)..(12): n is a, c, g, or u
  misc_feature (14)..(14): n is a, c, g, or u
uaguacaaagancnuuaa

SEQ ID NO: 117089 - RNA, 19 nt, Artificial Sequence
  Synthetic
  misc_feature (13)..(13): n is a, c, g, or u
  misc_feature (15)..(15): n is a, c, g, or u
cuaguacaaagancnuuaa

SEQ ID NO: 117090 - RNA, 20 nt, Artificial Sequence
  Synthetic
  misc_feature (14)..(14): n is a, c, g, or u
  misc_feature (16)..(16): n is a, c, g, or u
ccuaguacaaagancnuuaa

SEQ ID NO: 117091 - RNA, 21 nt, Artificial Sequence
  Synthetic
  misc_feature (15)..(15): n is a, c, g, or u
  misc_feature (17)..(17): n is a, c, g, or u
uccuaguacaaagancnuuaa

SEQ ID NO: 117092 - RNA, 22 nt, Artificial Sequence
  Synthetic
  misc_feature (16)..(16): n is a, c, g, or u
  misc_feature (18)..(18): n is a, c, g, or u
cuccuaguacaaagancnuuaa

SEQ ID NO: 117093 - RNA, 23 nt, Artificial Sequence
  Synthetic
  misc_feature (17)..(17): n is a, c, g, or u
  misc_feature (19)..(19): n is a, c, g, or u
ccuccuaguacaaagancnuuaa

SEQ ID NO: 117094 - RNA, 24 nt, Artificial Sequence
  Synthetic
  misc_feature (18)..(18): n is a, c, g, or u
  misc_feature (20)..(20): n is a, c, g, or u
gccuccuaguacaaagancnuuaa

SEQ ID NO: 117095 - RNA, 18 nt, Artificial Sequence
  Synthetic
  misc_feature (3)..(3): n is a, c, g, or u
ccngcugcgagcaaaaca

SEQ ID NO: 117096 - RNA, 19 nt, Artificial Sequence
  Synthetic
  misc_feature (4)..(4): n is a, c, g, or u
accngcugcgagcaaaaca

SEQ ID NO: 117097 - RNA, 20 nt, Artificial Sequence
  Synthetic
  misc_feature (5)..(5): n is a, c, g, or u
gaccngcugcgagcaaaaca

SEQ ID NO: 117098 - RNA, 21 nt, Artificial Sequence
  Synthetic
  misc_feature (6)..(6): n is a, c, g, or u
agaccngcugcgagcaaaaca

SEQ ID NO: 117099 - RNA, 22 nt, Artificial Sequence
  Synthetic
  misc_feature (7)..(7): n is a, c, g, or u
cagaccngcugcgagcaaaaca

SEQ ID NO: 117100 - RNA, 23 nt, Artificial Sequence
  Synthetic
  misc_feature (8)..(8): n is a, c, g, or u
ccagaccngcugcgagcaaaaca

SEQ ID NO: 117101 - RNA, 24 nt, Artificial Sequence
  Synthetic
  misc_feature (1)..(1): n is a, c, g, or u
  misc_feature (9)..(9): n is a, c, g, or u
nccagaccngcugcgagcaaaaca

SEQ ID NO: 117102 - RNA, 18 nt, Artificial Sequence
  Synthetic
ggguugcgucagcaaaca

SEQ ID NO: 117103 - RNA, 19 nt, Artificial Sequence
  Synthetic
gggguugcgucagcaaaca

SEQ ID NO: 117104 - RNA, 20 nt, Artificial Sequence
  Synthetic
ggggguugcgucagcaaaca

SEQ ID NO: 117105 - RNA, 21 nt, Artificial Sequence
  Synthetic
uggggguugcgucagcaaaca

SEQ ID NO: 117106 - RNA, 22 nt, Artificial Sequence
  Synthetic
guggggguugcgucagcaaaca

SEQ ID NO: 117107 - RNA, 23 nt, Artificial Sequence
  Synthetic
aguggggguugcgucagcaaaca

SEQ ID NO: 117108 - RNA, 24 nt, Artificial Sequence
  Synthetic
caguggggguugcgucagcaaaca

SEQ ID NO: 117109 - RNA, 18 nt, Artificial Sequence
  Synthetic
agcaacaugagggaaaca

SEQ ID NO: 117110 - RNA, 19 nt, Artificial Sequence
  Synthetic
cagcaacaugagggaaaca

SEQ ID NO: 117111 - RNA, 20 nt, Artificial Sequence
  Synthetic
acagcaacaugagggaaaca

SEQ ID NO: 117112 - RNA, 21 nt, Artificial Sequence
  Synthetic
uacagcaacaugagggaaaca

SEQ ID NO: 117113 - RNA, 22 nt, Artificial Sequence
  Synthetic
guacagcaacaugagggaaaca

SEQ ID NO: 117114 - RNA, 23 nt, Artificial Sequence
  Synthetic
uguacagcaacaugagggaaaca

SEQ ID NO: 117115 - RNA, 24 nt, Artificial Sequence
  Synthetic
uuguacagcaacaugagggaaaca

SEQ ID NO: 117116 - RNA, 18 nt, Artificial Sequence
  Synthetic
gccgacgggacguaaaca

SEQ ID NO: 117117 - RNA, 19 nt, Artificial Sequence
  Synthetic
cgccgacgggacguaaaca

SEQ ID NO: 117118 - RNA, 20 nt, Artificial Sequence
  Synthetic
gcgccgacgggacguaaaca

SEQ ID NO: 117119 - RNA, 18 nt, Artificial Sequence
  Synthetic
aguccagaagaaccaaca

SEQ ID NO: 117120 - RNA, 19 nt, Artificial Sequence
  Synthetic
uaguccagaagaaccaaca

SEQ ID NO: 117121 - RNA, 20 nt, Artificial Sequence
  Synthetic
auaguccagaagaaccaaca

SEQ ID NO: 117122 - RNA, 21 nt, Artificial Sequence
  Synthetic
gauaguccagaagaaccaaca

SEQ ID NO: 117123 - RNA, 22 nt, Artificial Sequence
  Synthetic
ugauaguccagaagaaccaaca

SEQ ID NO: 117124 - RNA, 23 nt, Artificial Sequence
  Synthetic
uugauaguccagaagaaccaaca

SEQ ID NO: 117125 - RNA, 24 nt, Artificial Sequence
  Synthetic
cuugauaguccagaagaaccaaca

SEQ ID NO: 117126 - RNA, 18 nt, Artificial Sequence
  Synthetic
agguuuuguacagcaaca

SEQ ID NO: 117127 - RNA, 19 nt, Artificial Sequence
  Synthetic
uagguuuuguacagcaaca

SEQ ID NO: 117128 - RNA, 20 nt, Artificial Sequence
  Synthetic
guagguuuuguacagcaaca

SEQ ID NO: 117129 - RNA, 21 nt, Artificial Sequence
  Synthetic
cguagguuuuguacagcaaca

SEQ ID NO: 117130 - RNA, 22 nt, Artificial Sequence
  Synthetic
ccguagguuuuguacagcaaca

SEQ ID NO: 117131 - RNA, 23 nt, Artificial Sequence
  Synthetic
uccguagguuuuguacagcaaca

SEQ ID NO: 117132 - RNA, 24 nt, Artificial Sequence
  Synthetic
guccguagguuuuguacagcaaca

SEQ ID NO: 117133 - RNA, 18 nt, Artificial Sequence
  Synthetic
ugaggauuuuugucaaca

SEQ ID NO: 117134 - RNA, 19 nt, Artificial Sequence
  Synthetic
gugaggauuuuugucaaca

SEQ ID NO: 117135 - RNA, 20 nt, Artificial Sequence
  Synthetic
ugugaggauuuuugucaaca

SEQ ID NO: 117136 - RNA, 21 nt, Artificial Sequence
  Synthetic
uugugaggauuuuugucaaca

SEQ ID NO: 117137 - RNA, 22 nt, Artificial Sequence
  Synthetic
auugugaggauuuuugucaaca

SEQ ID NO: 117138 - RNA, 23 nt, Artificial Sequence
  Synthetic
uauugugaggauuuuugucaaca

SEQ ID NO: 117139 - RNA, 24 nt, Artificial Sequence
  Synthetic
guauugugaggauuuuugucaaca

SEQ ID NO: 117140 - RNA, 18 nt, Artificial Sequence
  Synthetic
ccuacgaaccacugaaca

SEQ ID NO: 117141 - RNA, 19 nt, Artificial Sequence
  Synthetic
cccuacgaaccacugaaca

SEQ ID NO: 117142 - RNA, 20 nt, Artificial Sequence
  Synthetic
gcccuacgaaccacugaaca

SEQ ID NO: 117143 - RNA, 18 nt, Artificial Sequence
  Synthetic
agcuuggaggcuugaaca

SEQ ID NO: 117144 - RNA, 19 nt, Artificial Sequence
  Synthetic
cagcuuggaggcuugaaca

SEQ ID NO: 117145 - RNA, 20 nt, Artificial Sequence
  Synthetic
acagcuuggaggcuugaaca

SEQ ID NO: 117146 - RNA, 21 nt, Artificial Sequence
  Synthetic
cacagcuuggaggcuugaaca

SEQ ID NO: 117147 - RNA, 22 nt, Artificial Sequence
  Synthetic
gcacagcuuggaggcuugaaca

SEQ ID NO: 117148 - RNA, 23 nt, Artificial Sequence
  Synthetic
ggcacagcuuggaggcuugaaca

SEQ ID NO: 117149 - RNA, 24 nt, Artificial Sequence
  Synthetic
aggcacagcuuggaggcuugaaca

SEQ ID NO: 117150 - RNA, 18 nt, Artificial Sequence
  Synthetic
guccaaggaauacuaaca

SEQ ID NO: 117151 - RNA, 19 nt, Artificial Sequence
  Synthetic
  misc_feature (1)..(1): n is a, c, g, or u
nguccaaggaauacuaaca

SEQ ID NO: 117152 - RNA, 20 nt, Artificial Sequence
  Synthetic
  misc_feature (2)..(2): n is a, c, g, or u
gnguccaaggaauacuaaca

SEQ ID NO: 117153 - RNA, 21 nt, Artificial Sequence
  Synthetic
  misc_feature (3)..(3): n is a, c, g, or u
ugnguccaaggaauacuaaca

SEQ ID NO: 117154 - RNA, 22 nt, Artificial Sequence
  Synthetic
  misc_feature (4)..(4): n is a, c, g, or u
augnguccaaggaauacuaaca

SEQ ID NO: 117155 - RNA, 23 nt, Artificial Sequence
  Synthetic
  misc_feature (5)..(5): n is a, c, g, or u
uaugnguccaaggaauacuaaca

SEQ ID NO: 117156 - RNA, 24 nt, Artificial Sequence
  Synthetic
  misc_feature (6)..(6): n is a, c, g, or u
uuaugnguccaaggaauacuaaca

SEQ ID NO: 117157 - RNA, 18 nt, Artificial Sequence
  Synthetic
ggcaaauauuuaguaaca

SEQ ID NO: 117158 - RNA, 19 nt, Artificial Sequence
  Synthetic
gggcaaauauuuaguaaca

SEQ ID NO: 117159 - RNA, 20 nt, Artificial Sequence
  Synthetic
agggcaaauauuuaguaaca

SEQ ID NO: 117160 - RNA, 21 nt, Artificial Sequence
  Synthetic
aagggcaaauauuuaguaaca

SEQ ID NO: 117161 - RNA, 22 nt, Artificial Sequence
  Synthetic
uaagggcaaauauuuaguaaca

SEQ ID NO: 117162 - RNA, 23 nt, Artificial Sequence
  Synthetic
cuaagggcaaauauuuaguaaca

SEQ ID NO: 117163 - RNA, 24 nt, Artificial Sequence
  Synthetic
ucuaagggcaaauauuuaguaaca

SEQ ID NO: 117164 - RNA, 18 nt, Artificial Sequence
  Synthetic
uaaaacgccgcagacaca

SEQ ID NO: 117165 - RNA, 19 nt, Artificial Sequence
  Synthetic
auaaaacgccgcagacaca

SEQ ID NO: 117166 - RNA, 20 nt, Artificial Sequence
  Synthetic
gauaaaacgccgcagacaca

SEQ ID NO: 117167 - RNA, 21 nt, Artificial Sequence
  Synthetic
ugauaaaacgccgcagacaca

SEQ ID NO: 117168 - RNA, 22 nt, Artificial Sequence
  Synthetic
augauaaaacgccgcagacaca

SEQ ID NO: 117169 - RNA, 23 nt, Artificial Sequence
  Synthetic
gaugauaaaacgccgcagacaca

SEQ ID NO: 117170 - RNA, 24 nt, Artificial Sequence
  Synthetic
agaugauaaaacgccgcagacaca

SEQ ID NO: 117171 - RNA, 18 nt, Artificial Sequence
  Synthetic
  misc_feature (3)..(3): n is a, c, g, or u
ggnagaugagaaggcaca

SEQ ID NO: 117172 - RNA, 19 nt, Artificial Sequence
  Synthetic
  misc_feature (4)..(4): n is a, c, g, or u
cggnagaugagaaggcaca

SEQ ID NO: 117173 - RNA, 20 nt, Artificial Sequence
  Synthetic
  misc_feature (5)..(5): n is a, c, g, or u
ccggnagaugagaaggcaca

SEQ ID NO: 117174 - RNA, 21 nt, Artificial Sequence
  Synthetic
  misc_feature (6)..(6): n is a, c, g, or u
uccggnagaugagaaggcaca

SEQ ID NO: 117175 - RNA, 22 nt, Artificial Sequence
  Synthetic
  misc_feature (7)..(7): n is a, c, g, or u
guccggnagaugagaaggcaca

SEQ ID NO: 117176 - RNA, 23 nt, Artificial Sequence
  Synthetic
  misc_feature (8)..(8): n is a, c, g, or u
gguccggnagaugagaaggcaca

SEQ ID NO: 117177 - RNA, 24 nt, Artificial Sequence
  Synthetic
  misc_feature (9)..(9): n is a, c, g, or u
cgguccggnagaugagaaggcaca

SEQ ID NO: 117178 - RNA, 18 nt, Artificial Sequence
  Synthetic
aauguauacccaaagaca

SEQ ID NO: 117179 - RNA, 19 nt, Artificial Sequence
  Synthetic
aaauguauacccaaagaca

SEQ ID NO: 117180 - RNA, 20 nt, Artificial Sequence
  Synthetic
uaaauguauacccaaagaca

SEQ ID NO: 117181 - RNA, 21 nt, Artificial Sequence
  Synthetic
uuaaauguauacccaaagaca

SEQ ID NO: 117182 - RNA, 22 nt, Artificial Sequence
  Synthetic
uuuaaauguauacccaaagaca

SEQ ID NO: 117183 - RNA, 23 nt, Artificial Sequence
  Synthetic
guuuaaauguauacccaaagaca

SEQ ID NO: 117184 - RNA, 24 nt, Artificial Sequence
  Synthetic
gguuuaaauguauacccaaagaca

SEQ ID NO: 117185 - RNA, 18 nt, Artificial Sequence
  Synthetic
cgaauuuuggccaagaca

SEQ ID NO: 117186 - RNA, 19 nt, Artificial Sequence
  Synthetic
gcgaauuuuggccaagaca

SEQ ID NO: 117187 - RNA, 20 nt, Artificial Sequence
  Synthetic
ugcgaauuuuggccaagaca

SEQ ID NO: 117188 - RNA, 21 nt, Artificial Sequence
  Synthetic
cugcgaauuuuggccaagaca

SEQ ID NO: 117189 - RNA, 22 nt, Artificial Sequence
  Synthetic
acugcgaauuuuggccaagaca

SEQ ID NO: 117190 - RNA, 23 nt, Artificial Sequence
  Synthetic
gacugcgaauuuuggccaagaca

SEQ ID NO: 117191 - RNA, 24 nt, Artificial Sequence
  Synthetic
ggacugcgaauuuuggccaagaca

SEQ ID NO: 117192 - RNA, 18 nt, Artificial Sequence
  Synthetic
auaacugaaagccagaca

SEQ ID NO: 117193 - RNA, 19 nt, Artificial Sequence
  Synthetic
uauaacugaaagccagaca

SEQ ID NO: 117194 - RNA, 20 nt, Artificial Sequence
  Synthetic
auauaacugaaagccagaca

SEQ ID NO: 117195 - RNA, 21 nt, Artificial Sequence
  Synthetic
cauauaacugaaagccagaca

SEQ ID NO: 117196 - RNA, 22 nt, Artificial Sequence
  Synthetic
ccauauaacugaaagccagaca

SEQ ID NO: 117197 - RNA, 23 nt, Artificial Sequence
  Synthetic
uccauauaacugaaagccagaca

SEQ ID NO: 117198 - RNA, 24 nt, Artificial Sequence
  Synthetic
auccauauaacugaaagccagaca

SEQ ID NO: 117199 - RNA, 18 nt, Artificial Sequence
  Synthetic
ggaucggcagaggagaca

SEQ ID NO: 117200 - RNA, 19 nt, Artificial Sequence
  Synthetic
uggaucggcagaggagaca

SEQ ID NO: 117201 - RNA, 20 nt, Artificial Sequence
  Synthetic
auggaucggcagaggagaca

SEQ ID NO: 117202 - RNA, 21 nt, Artificial Sequence
  Synthetic
uauggaucggcagaggagaca

SEQ ID NO: 117203 - RNA, 22 nt, Artificial Sequence
  Synthetic
guauggaucggcagaggagaca

SEQ ID NO: 117204 - RNA, 23 nt, Artificial Sequence
  Synthetic
aguauggaucggcagaggagaca

SEQ ID NO: 117205 - RNA, 24 nt, Artificial Sequence
  Synthetic
caguauggaucggcagaggagaca

SEQ ID NO: 117206 - RNA, 18 nt, Artificial Sequence
  Synthetic
uccuggaauuagaggaca

SEQ ID NO: 117207 - RNA, 19 nt, Artificial Sequence
  Synthetic
auccuggaauuagaggaca

SEQ ID NO: 117208 - RNA, 20 nt, Artificial Sequence
  Synthetic
gauccuggaauuagaggaca

SEQ ID NO: 117209 - RNA, 21 nt, Artificial Sequence
  Synthetic
ugauccuggaauuagaggaca

SEQ ID NO: 117210 - RNA, 22 nt, Artificial Sequence
  Synthetic
augauccuggaauuagaggaca

SEQ ID NO: 117211 - RNA, 23 nt, Artificial Sequence
  Synthetic
gaugauccuggaauuagaggaca

SEQ ID NO: 117212 - RNA, 24 nt, Artificial Sequence
  Synthetic
ugaugauccuggaauuagaggaca

SEQ ID NO: 117213 - RNA, 18 nt, Artificial Sequence
  Synthetic
  misc_feature (6)..(6): n is a, c, g, or u
cccagnggauuggggaca

SEQ ID NO: 117214 - RNA, 19 nt, Artificial Sequence
  Synthetic
  misc_feature (7)..(7): n is a, c, g, or u
ucccagnggauuggggaca

SEQ ID NO: 117215 - RNA, 20 nt, Artificial Sequence
  Synthetic
  misc_feature (8)..(8): n is a, c, g, or u
aucccagnggauuggggaca

SEQ ID NO: 117216 - RNA, 21 nt, Artificial Sequence
  Synthetic
  misc_feature (9)..(9): n is a, c, g, or u
aaucccagnggauuggggaca

SEQ ID NO: 117217 - RNA, 22 nt, Artificial Sequence
  Synthetic
  misc_feature (10)..(10): n is a, c, g, or u
gaaucccagnggauuggggaca

SEQ ID NO: 117218 - RNA, 23 nt, Artificial Sequence
  Synthetic
  misc_feature (11)..(11): n is a, c, g, or u
agaaucccagnggauuggggaca

SEQ ID NO: 117219 - RNA, 24 nt, Artificial Sequence
  Synthetic
  misc_feature (12)..(12): n is a, c, g, or u
aagaaucccagnggauuggggaca

SEQ ID NO: 117220 - RNA, 18 nt, Artificial Sequence
  Synthetic
auggccaagccccaacca

SEQ ID NO: 117221 - RNA, 19 nt, Artificial Sequence
  Synthetic
  misc_feature (1)..(1): n is a, c, g, or u
nauggccaagccccaacca

SEQ ID NO: 117222 - RNA, 20 nt, Artificial Sequence
  Synthetic
  misc_feature (2)..(2): n is a, c, g, or u
cnauggccaagccccaacca

SEQ ID NO: 117223 - RNA, 21 nt, Artificial Sequence
  Synthetic
  misc_feature (3)..(3): n is a, c, g, or u
ccnauggccaagccccaacca

SEQ ID NO: 117224 - RNA, 22 nt, Artificial Sequence
  Synthetic
  misc_feature (4)..(4): n is a, c, g, or u
gccnauggccaagccccaacca

SEQ ID NO: 117225 - RNA, 23 nt, Artificial Sequence
  Synthetic
  misc_feature (5)..(5): n is a, c, g, or u
ggccnauggccaagccccaacca

SEQ ID NO: 117226 - RNA, 24 nt, Artificial Sequence
  Synthetic
  misc_feature (6)..(6): n is a, c, g, or u
uggccnauggccaagccccaacca

SEQ ID NO: 117227 - RNA, 18 nt, Artificial Sequence
  Synthetic
gauaguccagaagaacca

SEQ ID NO: 117228 - RNA, 19 nt, Artificial Sequence
  Synthetic
ugauaguccagaagaacca

SEQ ID NO: 117229 - RNA, 20 nt, Artificial Sequence
  Synthetic
uugauaguccagaagaacca

SEQ ID NO: 117230 - RNA, 21 nt, Artificial Sequence
  Synthetic
cuugauaguccagaagaacca

SEQ ID NO: 117231 - RNA, 22 nt, Artificial Sequence
  Synthetic
ccuugauaguccagaagaacca

SEQ ID NO: 117232 - RNA, 23 nt, Artificial Sequence
  Synthetic
accuugauaguccagaagaacca

SEQ ID NO: 117233 - RNA, 24 nt, Artificial Sequence
  Synthetic
uaccuugauaguccagaagaacca

SEQ ID NO: 117234 - RNA, 18 nt, Artificial Sequence
  Synthetic
ggaaagcccuacgaacca

SEQ ID NO: 117235 - RNA, 19 nt, Artificial Sequence
  Synthetic
gggaaagcccuacgaacca

SEQ ID NO: 117236 - RNA, 20 nt, Artificial Sequence
  Synthetic
ggggaaagcccuacgaacca

SEQ ID NO: 117237 - RNA, 21 nt, Artificial Sequence
  Synthetic
gggggaaagcccuacgaacca

SEQ ID NO: 117238 - RNA, 22 nt, Artificial Sequence
  Synthetic
ugggggaaagcccuacgaacca

SEQ ID NO: 117239 - RNA, 23 nt, Artificial Sequence
  Synthetic
gugggggaaagcccuacgaacca

SEQ ID NO: 117240 - RNA, 24 nt, Artificial Sequence
  Synthetic
agugggggaaagcccuacgaacca

SEQ ID NO: 117241 - RNA, 18 nt, Artificial Sequence
  Synthetic
ccugaacuggagccacca

SEQ ID NO: 117242 - RNA, 19 nt, Artificial Sequence
  Synthetic
uccugaacuggagccacca

SEQ ID NO: 117243 - RNA, 20 nt, Artificial Sequence
  Synthetic
uuccugaacuggagccacca

SEQ ID NO: 117244 - RNA, 21 nt, Artificial Sequence
  Synthetic
guuccugaacuggagccacca

SEQ ID NO: 117245 - RNA, 22 nt, Artificial Sequence
  Synthetic
uguuccugaacuggagccacca

SEQ ID NO: 117246 - RNA, 23 nt, Artificial Sequence
  Synthetic
cuguuccugaacuggagccacca

SEQ ID NO: 117247 - RNA, 24 nt, Artificial Sequence
  Synthetic
acuguuccugaacuggagccacca

SEQ ID NO: 117248 - RNA, 18 nt, Artificial Sequence
  Synthetic
caaauuacuucccaccca

SEQ ID NO: 117249 - RNA, 19 nt, Artificial Sequence
  Synthetic
ccaaauuacuucccaccca

SEQ ID NO: 117250 - RNA, 20 nt, Artificial Sequence
  Synthetic
uccaaauuacuucccaccca

SEQ ID NO: 117251 - RNA, 21 nt, Artificial Sequence
  Synthetic
uuccaaauuacuucccaccca

SEQ ID NO: 117252 - RNA, 22 nt, Artificial Sequence
  Synthetic
cuuccaaauuacuucccaccca

SEQ ID NO: 117253 - RNA, 23 nt, Artificial Sequence
  Synthetic
ucuuccaaauuacuucccaccca

SEQ ID NO: 117254 - RNA, 24 nt, Artificial Sequence
  Synthetic
aucuuccaaauuacuucccaccca

SEQ ID NO: 117255 - RNA, 18 nt, Artificial Sequence
  Synthetic
  misc_feature (8)..(8): n is a, c, g, or u
aaggggcngcaaacccca

SEQ ID NO: 117256 - RNA, 19 nt, Artificial Sequence
  Synthetic
  misc_feature (9)..(9): n is a, c, g, or u
aaaggggcngcaaacccca

SEQ ID NO: 117257 - RNA, 20 nt, Artificial Sequence
  Synthetic
  misc_feature (1)..(1): n is a, c, g, or u
  misc_feature (10)..(10): n is a, c, g, or u
naaaggggcngcaaacccca

SEQ ID NO: 117258 - RNA, 21 nt, Artificial Sequence
  Synthetic
  misc_feature (2)..(2): n is a, c, g, or u
  misc_feature (11)..(11): n is a, c, g, or u
unaaaggggcngcaaacccca

SEQ ID NO: 117259 - RNA, 22 nt, Artificial Sequence
  Synthetic
  misc_feature (3)..(3): n is a, c, g, or u
  misc_feature (12)..(12): n is a, c, g, or u
gunaaaggggcngcaaacccca

SEQ ID NO: 117260 - RNA, 23 nt, Artificial Sequence
  Synthetic
  misc_feature (1)..(1): n is a, c, g, or u
  misc_feature (4)..(4): n is a, c, g, or u
  misc_feature (13)..(13): n is a, c, g, or u
ngunaaaggggcngcaaacccca

SEQ ID NO: 117261 - RNA, 24 nt, Artificial Sequence
  Synthetic
  misc_feature (2)..(2): n is a, c, g, or u
  misc_feature (5)..(5): n is a, c, g, or u
  misc_feature (14)..(14): n is a, c, g, or u
gngunaaaggggcngcaaacccca

SEQ ID NO: 117262 - RNA, 18 nt, Artificial Sequence
  Synthetic
caccccaacaguccccca

SEQ ID NO: 117263 - RNA, 19 nt, Artificial Sequence
  Synthetic
ccaccccaacaguccccca

SEQ ID NO: 117264 - RNA, 20 nt, Artificial Sequence
  Synthetic
uccaccccaacaguccccca

SEQ ID NO: 117265 - RNA, 21 nt, Artificial Sequence
  Synthetic
cuccaccccaacaguccccca

SEQ ID NO: 117266 - RNA, 22 nt, Artificial Sequence
  Synthetic
gcuccaccccaacaguccccca

SEQ ID NO: 117267 - RNA, 23 nt, Artificial Sequence
  Synthetic
ggcuccaccccaacaguccccca

SEQ ID NO: 117268 - RNA, 24 nt, Artificial Sequence
  Synthetic
gggcuccaccccaacaguccccca

SEQ ID NO: 117269 - RNA, 18 nt, Artificial Sequence
  Synthetic
gcgggcgguagagcccca

SEQ ID NO: 117270 - RNA, 19 nt, Artificial Sequence
  Synthetic
agcgggcgguagagcccca

SEQ ID NO: 117271 - RNA, 20 nt, Artificial Sequence
  Synthetic
aagcgggcgguagagcccca

SEQ ID NO: 117272 - RNA, 21 nt, Artificial Sequence
  Synthetic
gaagcgggcgguagagcccca

SEQ ID NO: 117273 - RNA, 22 nt, Artificial Sequence
  Synthetic
agaagcgggcgguagagcccca

SEQ ID NO: 117274 - RNA, 23 nt, Artificial Sequence
  Synthetic
gagaagcgggcgguagagcccca

SEQ ID NO: 117275 - RNA, 24 nt, Artificial Sequence
  Synthetic
ggagaagcgggcgguagagcccca

SEQ ID NO: 117276 - RNA, 18 nt, Artificial Sequence
  Synthetic
cuuccaaauuacuuccca

SEQ ID NO: 117277 - RNA, 19 nt, Artificial Sequence
  Synthetic
ucuuccaaauuacuuccca

SEQ ID NO: 117278 - RNA, 20 nt, Artificial Sequence
  Synthetic
aucuuccaaauuacuuccca

SEQ ID NO: 117279 - RNA, 21 nt, Artificial Sequence
  Synthetic
gaucuuccaaauuacuuccca

SEQ ID NO: 117280 - RNA, 22 nt, Artificial Sequence
  Synthetic
ggaucuuccaaauuacuuccca

SEQ ID NO: 117281 - RNA, 23 nt, Artificial Sequence
  Synthetic
uggaucuuccaaauuacuuccca

SEQ ID NO: 117282 - RNA, 24 nt, Artificial Sequence
  Synthetic
cuggaucuuccaaauuacuuccca

SEQ ID NO: 117283 - RNA, 18 nt, Artificial Sequence
  Synthetic
  misc_feature (11)..(11): n is a, c, g, or u
guccaugcccnaaagcca

SEQ ID NO: 117284 - RNA, 19 nt, Artificial Sequence
  Synthetic
  misc_feature (12)..(12): n is a, c, g, or u
uguccaugcccnaaagcca

SEQ ID NO: 117285 - RNA, 20 nt, Artificial Sequence
  Synthetic
  misc_feature (13)..(13): n is a, c, g, or u
auguccaugcccnaaagcca

SEQ ID NO: 117286 - RNA, 21 nt, Artificial Sequence
  Synthetic
  misc_feature (14)..(14): n is a, c, g, or u
aauguccaugcccnaaagcca

SEQ ID NO: 117287 - RNA, 22 nt, Artificial Sequence
  Synthetic
  misc_feature (15)..(15): n is a, c, g, or u
caauguccaugcccnaaagcca

SEQ ID NO: 117288 - RNA, 23 nt, Artificial Sequence
  Synthetic
  misc_feature (16)..(16): n is a, c, g, or u
ucaauguccaugcccnaaagcca

SEQ ID NO: 117289 - RNA, 24 nt, Artificial Sequence
  Synthetic
  misc_feature (17)..(17): n is a, c, g, or u
gucaauguccaugcccnaaagcca

SEQ ID NO: 117290 - RNA, 18 nt, Artificial Sequence
  Synthetic
agcacagccuagcagcca

SEQ ID NO: 117291 - RNA, 19 nt, Artificial Sequence
  Synthetic
cagcacagccuagcagcca

SEQ ID NO: 117292 - RNA, 20 nt, Artificial Sequence
  Synthetic
gcagcacagccuagcagcca

SEQ ID NO: 117293 - RNA, 21 nt, Artificial Sequence
  Synthetic
ggcagcacagccuagcagcca

SEQ ID NO: 117294 - RNA, 22 nt, Artificial Sequence
  Synthetic
uggcagcacagccuagcagcca

SEQ ID NO: 117295 - RNA, 23 nt, Artificial Sequence
  Synthetic
uuggcagcacagccuagcagcca

SEQ ID NO: 117296 - RNA, 24 nt, Artificial Sequence
  Synthetic
guuggcagcacagccuagcagcca

SEQ ID NO: 117297 - RNA, 18 nt, Artificial Sequence
  Synthetic
cacuaguaaacugagcca

SEQ ID NO: 117298 - RNA, 19 nt, Artificial Sequence
  Synthetic
gcacuaguaaacugagcca

SEQ ID NO: 117299 - RNA, 20 nt, Artificial Sequence
  Synthetic
ggcacuaguaaacugagcca

SEQ ID NO: 117300 - RNA, 21 nt, Artificial Sequence
  Synthetic
uggcacuaguaaacugagcca

SEQ ID NO: 117301 - RNA, 22 nt, Artificial Sequence
  Synthetic
auggcacuaguaaacugagcca

SEQ ID NO: 117302 - RNA, 23 nt, Artificial Sequence
  Synthetic
aauggcacuaguaaacugagcca

SEQ ID NO: 117303 - RNA, 24 nt, Artificial Sequence
  Synthetic
aaauggcacuaguaaacugagcca

SEQ ID NO: 117304 - RNA, 18 nt, Artificial Sequence
  Synthetic
aaaagaaggaguuugcca

SEQ ID NO: 117305 - RNA, 19 nt, Artificial Sequence
  Synthetic
gaaaagaaggaguuugcca

SEQ ID NO: 117306 - RNA, 20 nt, Artificial Sequence
  Synthetic
ggaaaagaaggaguuugcca

SEQ ID NO: 117307 - RNA, 21 nt, Artificial Sequence
  Synthetic
aggaaaagaaggaguuugcca

SEQ ID NO: 117308 - RNA, 22 nt, Artificial Sequence
  Synthetic
caggaaaagaaggaguuugcca

SEQ ID NO: 117309 - RNA, 23 nt, Artificial Sequence
  Synthetic
ucaggaaaagaaggaguuugcca

SEQ ID NO: 117310 - RNA, 24 nt, Artificial Sequence
  Synthetic
gucaggaaaagaaggaguuugcca

SEQ ID NO: 117311 - RNA, 18 nt, Artificial Sequence
  Synthetic
  misc_feature (5)..(5): n is a, c, g, or u
ccaanaccacaucaucca

SEQ ID NO: 117312 - RNA, 19 nt, Artificial Sequence
  Synthetic
  misc_feature (6)..(6): n is a, c, g, or u
cccaanaccacaucaucca

SEQ ID NO: 117313 - RNA, 20 nt, Artificial Sequence
  Synthetic
  misc_feature (7)..(7): n is a, c, g, or u
ccccaanaccacaucaucca

SEQ ID NO: 117314 - RNA, 21 nt, Artificial Sequence
  Synthetic
  misc_feature (8)..(8): n is a, c, g, or u
cccccaanaccacaucaucca

SEQ ID NO: 117315 - RNA, 22 nt, Artificial Sequence
  Synthetic
  misc_feature (9)..(9): n is a, c, g, or u
gcccccaanaccacaucaucca

SEQ ID NO: 117316 - RNA, 23 nt, Artificial Sequence
  Synthetic
  misc_feature (10)..(10): n is a, c, g, or u
ggcccccaanaccacaucaucca

SEQ ID NO: 117317 - RNA, 24 nt, Artificial Sequence
  Synthetic
  misc_feature (11)..(11): n is a, c, g, or u
uggcccccaanaccacaucaucca

SEQ ID NO: 117318 - RNA, 18 nt, Artificial Sequence
  Synthetic
cgucccgcgcaggaucca

SEQ ID NO: 117319 - RNA, 19 nt, Artificial Sequence
  Synthetic
acgucccgcgcaggaucca

SEQ ID NO: 117320 - RNA, 20 nt, Artificial Sequence
  Synthetic
gacgucccgcgcaggaucca

SEQ ID NO: 117321 - RNA, 18 nt, Artificial Sequence
  Synthetic
aaaaagagaguaacucca

SEQ ID NO: 117322 - RNA, 19 nt, Artificial Sequence
  Synthetic
aaaaaagagaguaacucca

SEQ ID NO: 117323 - RNA, 20 nt, Artificial Sequence
  Synthetic
caaaaaagagaguaacucca

SEQ ID NO: 117324 - RNA, 21 nt, Artificial Sequence
  Synthetic
gcaaaaaagagaguaacucca

SEQ ID NO: 117325 - RNA, 22 nt, Artificial Sequence
  Synthetic
ggcaaaaaagagaguaacucca

SEQ ID NO: 117326 - RNA, 23 nt, Artificial Sequence
  Synthetic
aggcaaaaaagagaguaacucca

SEQ ID NO: 117327 - RNA, 24 nt, Artificial Sequence
  Synthetic
aaggcaaaaaagagaguaacucca

SEQ ID NO: 117328 - RNA, 18 nt, Artificial Sequence
  Synthetic
gugcgaauccacacucca

SEQ ID NO: 117329 - RNA, 19 nt, Artificial Sequence
  Synthetic
agugcgaauccacacucca

SEQ ID NO: 117330 - RNA, 20 nt, Artificial Sequence
  Synthetic
gagugcgaauccacacucca

SEQ ID NO: 117331 - RNA, 21 nt, Artificial Sequence
  Synthetic
ggagugcgaauccacacucca

SEQ ID NO: 117332 - RNA, 22 nt, Artificial Sequence
  Synthetic
aggagugcgaauccacacucca

SEQ ID NO: 117333 - RNA, 23 nt, Artificial Sequence
  Synthetic
gaggagugcgaauccacacucca

SEQ ID NO: 117334 - RNA, 24 nt, Artificial Sequence
  Synthetic
ggaggagugcgaauccacacucca

SEQ ID NO: 117335 - RNA, 18 nt, Artificial Sequence
  Synthetic
cguucacgguggucucca

SEQ ID NO: 117336 - RNA, 19 nt, Artificial Sequence
  Synthetic
gcguucacgguggucucca

SEQ ID NO: 117337 - RNA, 20 nt, Artificial Sequence
  Synthetic
ggcguucacgguggucucca

SEQ ID NO: 117338 - RNA, 21 nt, Artificial Sequence
  Synthetic
gggcguucacgguggucucca

SEQ ID NO: 117339 - RNA, 22 nt, Artificial Sequence
  Synthetic
ugggcguucacgguggucucca

SEQ ID NO: 117340 - RNA, 23 nt, Artificial Sequence
  Synthetic
gugggcguucacgguggucucca

SEQ ID NO: 117341 - RNA, 24 nt, Artificial Sequence
  Synthetic
  misc_feature (1)..(1): n is a, c, g, or u
ngugggcguucacgguggucucca

SEQ ID NO: 117342 - RNA, 18 nt, Artificial Sequence
  Synthetic
acauaccuugauagucca

SEQ ID NO: 117343 - RNA, 19 nt, Artificial Sequence
  Synthetic
aacauaccuugauagucca

SEQ ID NO: 117344 - RNA, 20 nt, Artificial Sequence
  Synthetic
caacauaccuugauagucca

SEQ ID NO: 117345 - RNA, 21 nt, Artificial Sequence
  Synthetic
gcaacauaccuugauagucca

SEQ ID NO: 117346 - RNA, 22 nt, Artificial Sequence
  Synthetic
ggcaacauaccuugauagucca

SEQ ID NO: 117347 - RNA, 23 nt, Artificial Sequence
  Synthetic
gggcaacauaccuugauagucca

SEQ ID NO: 117348 - RNA, 24 nt, Artificial Sequence
  Synthetic
cgggcaacauaccuugauagucca

SEQ ID NO: 117349 - RNA, 18 nt, Artificial Sequence
  Synthetic
gaacuggagccaccagca

SEQ ID NO: 117350 - RNA, 19 nt, Artificial Sequence
  Synthetic
ugaacuggagccaccagca

SEQ ID NO: 117351 - RNA, 20 nt, Artificial Sequence
  Synthetic
cugaacuggagccaccagca

SEQ ID NO: 117352 - RNA, 21 nt, Artificial Sequence
  Synthetic
ccugaacuggagccaccagca

SEQ ID NO: 117353 - RNA, 22 nt, Artificial Sequence
  Synthetic
uccugaacuggagccaccagca

SEQ ID NO: 117354 - RNA, 23 nt, Artificial Sequence
  Synthetic
uuccugaacuggagccaccagca

SEQ ID NO: 117355 - RNA, 24 nt, Artificial Sequence
  Synthetic
guuccugaacuggagccaccagca

SEQ ID NO: 117356 - RNA, 18 nt, Artificial Sequence
  Synthetic
  misc_feature (5)..(5): n is a, c, g, or u
ccagnccguugccgagca

SEQ ID NO: 117357 - RNA, 19 nt, Artificial Sequence
  Synthetic
  misc_feature (6)..(6): n is a, c, g, or u
accagnccguugccgagca

SEQ ID NO: 117358 - RNA, 20 nt, Artificial Sequence
  Synthetic
  misc_feature (7)..(7): n is a, c, g, or u
gaccagnccguugccgagca

SEQ ID NO: 117359 - RNA, 21 nt, Artificial Sequence
  Synthetic
  misc_feature (8)..(8): n is a, c, g, or u
agaccagnccguugccgagca

SEQ ID NO: 117360 - RNA, 22 nt, Artificial Sequence
  Synthetic
  misc_feature (9)..(9): n is a, c, g, or u
cagaccagnccguugccgagca

SEQ ID NO: 117361 - RNA, 23 nt, Artificial Sequence
  Synthetic
  misc_feature (10)..(10): n is a, c, g, or u
acagaccagnccguugccgagca

SEQ ID NO: 117362 - RNA, 24 nt, Artificial Sequence
  Synthetic
  misc_feature (11)..(11): n is a, c, g, or u
cacagaccagnccguugccgagca

SEQ ID NO: 117363 - RNA, 18 nt, Artificial Sequence
  Synthetic
agaagaugaggcauagca

SEQ ID NO: 117364 - RNA, 19 nt, Artificial Sequence
  Synthetic
aagaagaugaggcauagca

SEQ ID NO: 117365 - RNA, 20 nt, Artificial Sequence
  Synthetic
caagaagaugaggcauagca

SEQ ID NO: 117366 - RNA, 21 nt, Artificial Sequence
  Synthetic
acaagaagaugaggcauagca

SEQ ID NO: 117367 - RNA, 22 nt, Artificial Sequence
  Synthetic
aacaagaagaugaggcauagca

SEQ ID NO: 117368 - RNA, 23 nt, Artificial Sequence
  Synthetic
caacaagaagaugaggcauagca

SEQ ID NO: 117369 - RNA, 24 nt, Artificial Sequence
  Synthetic
ccaacaagaagaugaggcauagca

SEQ ID NO: 117370 - RNA, 18 nt, Artificial Sequence
  Synthetic
uacaugcauauaaaggca

SEQ ID NO: 117371 - RNA, 19 nt, Artificial Sequence
  Synthetic
auacaugcauauaaaggca

SEQ ID NO: 117372 - RNA, 20 nt, Artificial Sequence
  Synthetic
uauacaugcauauaaaggca

SEQ ID NO: 117373 - RNA, 21 nt, Artificial Sequence
  Synthetic
guauacaugcauauaaaggca

SEQ ID NO: 117374 - RNA, 22 nt, Artificial Sequence
  Synthetic
uguauacaugcauauaaaggca

SEQ ID NO: 117375 - RNA, 23 nt, Artificial Sequence
  Synthetic
uuguauacaugcauauaaaggca

SEQ ID NO: 117376 - RNA, 24 nt, Artificial Sequence
  Synthetic
cuuguauacaugcauauaaaggca

SEQ ID NO: 117377 - RNA, 18 nt, Artificial Sequence
  Synthetic
gaaagaagucagaaggca

SEQ ID NO: 117378 - RNA, 19 nt, Artificial Sequence
  Synthetic
ggaaagaagucagaaggca

SEQ ID NO: 117379 - RNA, 20 nt, Artificial Sequence
  Synthetic
aggaaagaagucagaaggca

SEQ ID NO: 117380 - RNA, 21 nt, Artificial Sequence
  Synthetic
aaggaaagaagucagaaggca

SEQ ID NO: 117381 - RNA, 22 nt, Artificial Sequence
  Synthetic
gaaggaaagaagucagaaggca

SEQ ID NO: 117382 - RNA, 23 nt, Artificial Sequence
  Synthetic
agaaggaaagaagucagaaggca

SEQ ID NO: 117383 - RNA, 24 nt, Artificial Sequence
  Synthetic
  misc_feature (1)..(1): n is a, c, g, or u
nagaaggaaagaagucagaaggca

SEQ ID NO: 117384 - RNA, 18 nt, Artificial Sequence
  Synthetic
ugccgauugguggaggca

SEQ ID NO: 117385 - RNA, 19 nt, Artificial Sequence
  Synthetic
cugccgauugguggaggca

SEQ ID NO: 117386 - RNA, 20 nt, Artificial Sequence
  Synthetic
acugccgauugguggaggca

SEQ ID NO: 117387 - RNA, 21 nt, Artificial Sequence
  Synthetic
gacugccgauugguggaggca

SEQ ID NO: 117388 - RNA, 22 nt, Artificial Sequence
  Synthetic
ugacugccgauugguggaggca

SEQ ID NO: 117389 - RNA, 23 nt, Artificial Sequence
  Synthetic
cugacugccgauugguggaggca

SEQ ID NO: 117390 - RNA, 24 nt, Artificial Sequence
  Synthetic
ccugacugccgauugguggaggca

SEQ ID NO: 117391 - RNA, 18 nt, Artificial Sequence
  Synthetic
ccgcaguauggaucggca

SEQ ID NO: 117392 - RNA, 19 nt, Artificial Sequence
  Synthetic
uccgcaguauggaucggca

SEQ ID NO: 117393 - RNA, 20 nt, Artificial Sequence
  Synthetic
uuccgcaguauggaucggca

SEQ ID NO: 117394 - RNA, 21 nt, Artificial Sequence
  Synthetic
guuccgcaguauggaucggca

SEQ ID NO: 117395 - RNA, 22 nt, Artificial Sequence
  Synthetic
aguuccgcaguauggaucggca

SEQ ID NO: 117396 - RNA, 23 nt, Artificial Sequence
  Synthetic
gaguuccgcaguauggaucggca

SEQ ID NO: 117397 - RNA, 24 nt, Artificial Sequence
  Synthetic
ggaguuccgcaguauggaucggca

SEQ ID NO: 117398 - RNA, 18 nt, Artificial Sequence
  Synthetic
  misc_feature (3)..(3): n is a, c, g, or u
uungcuuguauacaugca

SEQ ID NO: 117399 - RNA, 19 nt, Artificial Sequence
  Synthetic
  misc_feature (4)..(4): n is a, c, g, or u
uuungcuuguauacaugca

SEQ ID NO: 117400 - RNA, 20 nt, Artificial Sequence
  Synthetic
  misc_feature (5)..(5): n is a, c, g, or u
guuungcuuguauacaugca

SEQ ID NO: 117401 - RNA, 21 nt, Artificial Sequence
  Synthetic
  misc_feature (6)..(6): n is a, c, g, or u
uguuungcuuguauacaugca

SEQ ID NO: 117402 - RNA, 22 nt, Artificial Sequence
  Synthetic
  misc_feature (7)..(7): n is a, c, g, or u
cuguuungcuuguauacaugca

SEQ ID NO: 117403 - RNA, 23 nt, Artificial Sequence
  Synthetic
  misc_feature (8)..(8): n is a, c, g, or u
ccuguuungcuuguauacaugca

SEQ ID NO: 117404 - RNA, 24 nt, Artificial Sequence
  Synthetic
  misc_feature (9)..(9): n is a, c, g, or u
gccuguuungcuuguauacaugca

SEQ ID NO: 117405 - RNA, 18 nt, Artificial Sequence
  Synthetic
gcauagcagcaggaugca

SEQ ID NO: 117406 - RNA, 19 nt, Artificial Sequence
  Synthetic
ggcauagcagcaggaugca

SEQ ID NO: 117407 - RNA, 20 nt, Artificial Sequence
  Synthetic
aggcauagcagcaggaugca

SEQ ID NO: 117408 - RNA, 21 nt, Artificial Sequence
  Synthetic
gaggcauagcagcaggaugca

SEQ ID NO: 117409 - RNA, 22 nt, Artificial Sequence
  Synthetic
ugaggcauagcagcaggaugca

SEQ ID NO: 117410 - RNA, 23 nt, Artificial Sequence
  Synthetic
augaggcauagcagcaggaugca

SEQ ID NO: 117411 - RNA, 24 nt, Artificial Sequence
  Synthetic
gaugaggcauagcagcaggaugca

SEQ ID NO: 117412 - RNA, 18 nt, Artificial Sequence
  Synthetic
uuugguggucuauaugca

SEQ ID NO: 117413 - RNA, 19 nt, Artificial Sequence
  Synthetic
auuugguggucuauaugca

SEQ ID NO: 117414 - RNA, 20 nt, Artificial Sequence
  Synthetic
cauuugguggucuauaugca

SEQ ID NO: 117415 - RNA, 21 nt, Artificial Sequence
  Synthetic
gcauuugguggucuauaugca

SEQ ID NO: 117416 - RNA, 22 nt, Artificial Sequence
  Synthetic
ggcauuugguggucuauaugca

SEQ ID NO: 117417 - RNA, 23 nt, Artificial Sequence
  Synthetic
gggcauuugguggucuauaugca

SEQ ID NO: 117418 - RNA, 24 nt, Artificial Sequence
  Synthetic
ggggcauuugguggucuauaugca

SEQ ID NO: 117419 - RNA, 18 nt, Artificial Sequence
  Synthetic
caacaauguccuccugca

SEQ ID NO: 117420 - RNA, 19 nt, Artificial Sequence
  Synthetic
ucaacaauguccuccugca

SEQ ID NO: 117421 - RNA, 20 nt, Artificial Sequence
  Synthetic
aucaacaauguccuccugca

SEQ ID NO: 117422 - RNA, 21 nt, Artificial Sequence
  Synthetic
uaucaacaauguccuccugca

SEQ ID NO: 117423 - RNA, 22 nt, Artificial Sequence
  Synthetic
cuaucaacaauguccuccugca

SEQ ID NO: 117424 - RNA, 23 nt, Artificial Sequence
  Synthetic
  misc_feature (1)..(1): n is a, c, g, or u
ncuaucaacaauguccuccugca

SEQ ID NO: 117425 - RNA, 24 nt, Artificial Sequence
  Synthetic
  misc_feature (2)..(2): n is a, c, g, or u
ancuaucaacaauguccuccugca

SEQ ID NO: 117426 - RNA, 18 nt, Artificial Sequence
  Synthetic
  misc_feature (15)..(16): n is a, c, g, or u
uggucggucgguacnnca

SEQ ID NO: 117427 - RNA, 19 nt, Artificial Sequence
  Synthetic
  misc_feature (16)..(17): n is a, c, g, or u
guggucggucgguacnnca

SEQ ID NO: 117428 - RNA, 20 nt, Artificial Sequence
  Synthetic
  misc_feature (17)..(18): n is a, c, g, or u
cguggucggucgguacnnca

SEQ ID NO: 117429 - RNA, 21 nt, Artificial Sequence
  Synthetic
  misc_feature (18)..(19): n is a, c, g, or u
ccguggucggucgguacnnca

SEQ ID NO: 117430 - RNA, 22 nt, Artificial Sequence
  Synthetic
  misc_feature (19)..(20): n is a, c, g, or u
cccguggucggucgguacnnca

SEQ ID NO: 117431 - RNA, 23 nt, Artificial Sequence
  Synthetic
  misc_feature (20)..(21): n is a, c, g, or u
ccccguggucggucgguacnnca

SEQ ID NO: 117432 - RNA, 24 nt, Artificial Sequence
  Synthetic
  misc_feature (21)..(22): n is a, c, g, or u
gccccguggucggucgguacnnca

SEQ ID NO: 117433 - RNA, 18 nt, Artificial Sequence
  Synthetic
  misc_feature (6)..(6): n is a, c, g, or u
ugacanacuuuccaauca

SEQ ID NO: 117434 - RNA, 19 nt, Artificial Sequence
  Synthetic
  misc_feature (7)..(7): n is a, c, g, or u
uugacanacuuuccaauca

SEQ ID NO: 117435 - RNA, 20 nt, Artificial Sequence
  Synthetic
  misc_feature (8)..(8): n is a, c, g, or u
guugacanacuuuccaauca

SEQ ID NO: 117436 - RNA, 21 nt, Artificial Sequence
  Synthetic
  misc_feature (9)..(9): n is a, c, g, or u
cguugacanacuuuccaauca

SEQ ID NO: 117437 - RNA, 22 nt, Artificial Sequence
  Synthetic
  misc_feature (10)..(10): n is a, c, g, or u
ucguugacanacuuuccaauca

SEQ ID NO: 117438 - RNA, 23 nt, Artificial Sequence
  Synthetic
  misc_feature (11)..(11): n is a, c, g, or u
uucguugacanacuuuccaauca

SEQ ID NO: 117439 - RNA, 24 nt, Artificial Sequence
  Synthetic
  misc_feature (12)..(12): n is a, c, g, or u
auucguugacanacuuuccaauca

SEQ ID NO: 117440 - RNA, 18 nt, Artificial Sequence
  Synthetic
cccaacuccucccacuca

SEQ ID NO: 117441 - RNA, 19 nt, Artificial Sequence
  Synthetic
ccccaacuccucccacuca

SEQ ID NO: 117442 - RNA, 20 nt, Artificial Sequence
  Synthetic
cccccaacuccucccacuca

SEQ ID NO: 117443 - RNA, 21 nt, Artificial Sequence
  Synthetic
ucccccaacuccucccacuca

SEQ ID NO: 117444 - RNA, 22 nt, Artificial Sequence
  Synthetic
cucccccaacuccucccacuca

SEQ ID NO: 117445 - RNA, 23 nt, Artificial Sequence
  Synthetic
ccucccccaacuccucccacuca

SEQ ID NO: 117446 - RNA, 24 nt, Artificial Sequence
  Synthetic
uccucccccaacuccucccacuca

SEQ ID NO: 117447 - RNA, 18 nt, Artificial Sequence
  Synthetic
  misc_feature (2)..(2): n is a, c, g, or u
anagaaggaaagaaguca

SEQ ID NO: 117448 - RNA, 19 nt, Artificial Sequence
  Synthetic
  misc_feature (3)..(3): n is a, c, g, or u
aanagaaggaaagaaguca

SEQ ID NO: 117449 - RNA, 20 nt, Artificial Sequence
  Synthetic
  misc_feature (4)..(4): n is a, c, g, or u
gaanagaaggaaagaaguca

SEQ ID NO: 117450 - RNA, 21 nt, Artificial Sequence
  Synthetic
  misc_feature (5)..(5): n is a, c, g, or u
cgaanagaaggaaagaaguca

SEQ ID NO: 117451 - RNA, 22 nt, Artificial Sequence
  Synthetic
  misc_feature (6)..(6): n is a, c, g, or u
ucgaanagaaggaaagaaguca

SEQ ID NO: 117452 - RNA, 23 nt, Artificial Sequence
  Synthetic
  misc_feature (7)..(7): n is a, c, g, or u
cucgaanagaaggaaagaaguca

SEQ ID NO: 117453 - RNA, 24 nt, Artificial Sequence
  Synthetic
  misc_feature (8)..(8): n is a, c, g, or u
ucucgaanagaaggaaagaaguca

SEQ ID NO: 117454 - RNA, 18 nt, Artificial Sequence
  Synthetic
ccaguggggguugcguca

SEQ ID NO: 117455 - RNA, 19 nt, Artificial Sequence
  Synthetic
accaguggggguugcguca

SEQ ID NO: 117456 - RNA, 20 nt, Artificial Sequence
  Synthetic
aaccaguggggguugcguca

SEQ ID NO: 117457 - RNA, 21 nt, Artificial Sequence
  Synthetic
caaccaguggggguugcguca

SEQ ID NO: 117458 - RNA, 22 nt, Artificial Sequence
  Synthetic
ccaaccaguggggguugcguca

SEQ ID NO: 117459 - RNA, 23 nt, Artificial Sequence
  Synthetic
cccaaccaguggggguugcguca

SEQ ID NO: 117460 - RNA, 24 nt, Artificial Sequence
  Synthetic
ccccaaccaguggggguugcguca

SEQ ID NO: 117461 - RNA, 18 nt, Artificial Sequence
  Synthetic
uccugcaaaugaauguca

SEQ ID NO: 117462 - RNA, 19 nt, Artificial Sequence
  Synthetic
cuccugcaaaugaauguca

SEQ ID NO: 117463 - RNA, 20 nt, Artificial Sequence
  Synthetic
ccuccugcaaaugaauguca

SEQ ID NO: 117464 - RNA, 21 nt, Artificial Sequence
  Synthetic
uccuccugcaaaugaauguca

SEQ ID NO: 117465 - RNA, 22 nt, Artificial Sequence
  Synthetic
guccuccugcaaaugaauguca

SEQ ID NO: 117466 - RNA, 23 nt, Artificial Sequence
  Synthetic
uguccuccugcaaaugaauguca

SEQ ID NO: 117467 - RNA, 24 nt, Artificial Sequence
  Synthetic
auguccuccugcaaaugaauguca

SEQ ID NO: 117468 - RNA, 18 nt, Artificial Sequence
  Synthetic
uugugaggauuuuuguca

SEQ ID NO: 117469 - RNA, 19 nt, Artificial Sequence
  Synthetic
auugugaggauuuuuguca

SEQ ID NO: 117470 - RNA, 20 nt, Artificial Sequence
  Synthetic
uauugugaggauuuuuguca

SEQ ID NO: 117471 - RNA, 21 nt, Artificial Sequence
  Synthetic
guauugugaggauuuuuguca

SEQ ID NO: 117472 - RNA, 22 nt, Artificial Sequence
  Synthetic
gguauugugaggauuuuuguca

SEQ ID NO: 117473 - RNA, 23 nt, Artificial Sequence
  Synthetic
ugguauugugaggauuuuuguca

SEQ ID NO: 117474 - RNA, 24 nt, Artificial Sequence
  Synthetic
gugguauugugaggauuuuuguca

SEQ ID NO: 117475 - RNA, 18 nt, Artificial Sequence
  Synthetic
uaaauguauacccaaaga

SEQ ID NO: 117476 - RNA, 19 nt, Artificial Sequence
  Synthetic
uuaaauguauacccaaaga

SEQ ID NO: 117477 - RNA, 20 nt, Artificial Sequence
  Synthetic
uuuaaauguauacccaaaga

SEQ ID NO: 117478 - RNA, 21 nt, Artificial Sequence
  Synthetic
guuuaaauguauacccaaaga

SEQ ID NO: 117479 - RNA, 22 nt, Artificial Sequence
  Synthetic
gguuuaaauguauacccaaaga

SEQ ID NO: 117480 - RNA, 23 nt, Artificial Sequence
  Synthetic
ggguuuaaauguauacccaaaga

SEQ ID NO: 117481 - RNA, 24 nt, Artificial Sequence
  Synthetic
aggguuuaaauguauacccaaaga

SEQ ID NO: 117482 - RNA, 18 nt, Artificial Sequence
  Synthetic
gaagaaccaacaagaaga

SEQ ID NO: 117483 - RNA, 19 nt, Artificial Sequence
  Synthetic
agaagaaccaacaagaaga

SEQ ID NO: 117484 - RNA, 20 nt, Artificial Sequence
  Synthetic
cagaagaaccaacaagaaga

SEQ ID NO: 117485 - RNA, 21 nt, Artificial Sequence
  Synthetic
ccagaagaaccaacaagaaga

SEQ ID NO: 117486 - RNA, 22 nt, Artificial Sequence
  Synthetic
uccagaagaaccaacaagaaga

SEQ ID NO: 117487 - RNA, 23 nt, Artificial Sequence
  Synthetic
guccagaagaaccaacaagaaga

SEQ ID NO: 117488 - RNA, 24 nt, Artificial Sequence
  Synthetic
aguccagaagaaccaacaagaaga

SEQ ID NO: 117489 - RNA, 18 nt, Artificial Sequence
  Synthetic
ccuugauaguccagaaga

SEQ ID NO: 117490 - RNA, 19 nt, Artificial Sequence
  Synthetic
accuugauaguccagaaga

SEQ ID NO: 117491 - RNA, 20 nt, Artificial Sequence
  Synthetic
uaccuugauaguccagaaga

SEQ ID NO: 117492 - RNA, 21 nt, Artificial Sequence
  Synthetic
auaccuugauaguccagaaga

SEQ ID NO: 117493 - RNA, 22 nt, Artificial Sequence
  Synthetic
cauaccuugauaguccagaaga

SEQ ID NO: 117494 - RNA, 23 nt, Artificial Sequence
  Synthetic
acauaccuugauaguccagaaga

SEQ ID NO: 117495 - RNA, 24 nt, Artificial Sequence
  Synthetic
aacauaccuugauaguccagaaga

SEQ ID NO: 117496 - RNA, 18 nt, Artificial Sequence
  Synthetic
  misc_feature (2)..(3): n is a, c, g, or u
gnnagguaccguagaaga

SEQ ID NO: 117497 - RNA, 19 nt, Artificial Sequence
  Synthetic
  misc_feature (3)..(4): n is a, c, g, or u
agnnagguaccguagaaga

SEQ ID NO: 117498 - RNA, 20 nt, Artificial Sequence
  Synthetic
  misc_feature (4)..(5): n is a, c, g, or u
aagnnagguaccguagaaga

SEQ ID NO: 117499 - RNA, 21 nt, Artificial Sequence
  Synthetic
  misc_feature (5)..(6): n is a, c, g, or u
aaagnnagguaccguagaaga

SEQ ID NO: 117500 - RNA, 22 nt, Artificial Sequence
  Synthetic
  misc_feature (6)..(7): n is a, c, g, or u
uaaagnnagguaccguagaaga

SEQ ID NO: 117501 - RNA, 23 nt, Artificial Sequence
  Synthetic
  misc_feature (7)..(8): n is a, c, g, or u
uuaaagnnagguaccguagaaga

SEQ ID NO: 117502 - RNA, 24 nt, Artificial Sequence
  Synthetic
  misc_feature (8)..(9): n is a, c, g, or u
auuaaagnnagguaccguagaaga

SEQ ID NO: 117503 - RNA, 18 nt, Artificial Sequence
  Synthetic
ccggaaguguugauaaga

SEQ ID NO: 117504 - RNA, 19 nt, Artificial Sequence
  Synthetic
uccggaaguguugauaaga

SEQ ID NO: 117505 - RNA, 20 nt, Artificial Sequence
  Synthetic
uuccggaaguguugauaaga

SEQ ID NO: 117506 - RNA, 21 nt, Artificial Sequence
  Synthetic
uuuccggaaguguugauaaga

SEQ ID NO: 117507 - RNA, 22 nt, Artificial Sequence
  Synthetic
guuuccggaaguguugauaaga

SEQ ID NO: 117508 - RNA, 23 nt, Artificial Sequence
  Synthetic
aguuuccggaaguguugauaaga

SEQ ID NO: 117509 - RNA, 24 nt, Artificial Sequence
  Synthetic
uaguuuccggaaguguugauaaga

SEQ ID NO: 117510 - RNA, 18 nt, Artificial Sequence
  Synthetic
  misc_feature (6)..(6): n is a, c, g, or u
ucucunccaaaaguaaga

SEQ ID NO: 117511 - RNA, 19 nt, Artificial Sequence
  Synthetic
  misc_feature (7)..(7): n is a, c, g, or u
uucucunccaaaaguaaga

SEQ ID NO: 117512 - RNA, 20 nt, Artificial Sequence
  Synthetic
  misc_feature (8)..(8): n is a, c, g, or u
uuucucunccaaaaguaaga

SEQ ID NO: 117513 - RNA, 21 nt, Artificial Sequence
  Synthetic
  misc_feature (9)..(9): n is a, c, g, or u
guuucucunccaaaaguaaga

SEQ ID NO: 117514 - RNA, 22 nt, Artificial Sequence
  Synthetic
  misc_feature (10)..(10): n is a, c, g, or u
aguuucucunccaaaaguaaga

SEQ ID NO: 117515 - RNA, 23 nt, Artificial Sequence
  Synthetic
  misc_feature (11)..(11): n is a, c, g, or u
caguuucucunccaaaaguaaga

SEQ ID NO: 117516 - RNA, 24 nt, Artificial Sequence
  Synthetic
  misc_feature (12)..(12): n is a, c, g, or u
acaguuucucunccaaaaguaaga

SEQ ID NO: 117517 - RNA, 18 nt, Artificial Sequence
  Synthetic
  misc_feature (1)..(1): n is a, c, g, or u
nagaugagaaggcacaga

SEQ ID NO: 117518 - RNA, 19 nt, Artificial Sequence
  Synthetic
  misc_feature (2)..(2): n is a, c, g, or u
gnagaugagaaggcacaga

SEQ ID NO: 117519 - RNA, 20 nt, Artificial Sequence
  Synthetic
  misc_feature (3)..(3): n is a, c, g, or u
ggnagaugagaaggcacaga

SEQ ID NO: 117520 - RNA, 21 nt, Artificial Sequence
  Synthetic
  misc_feature (4)..(4): n is a, c, g, or u
cggnagaugagaaggcacaga

SEQ ID NO: 117521 - RNA, 22 nt, Artificial Sequence
  Synthetic
  misc_feature (5)..(5): n is a, c, g, or u
ccggnagaugagaaggcacaga

SEQ ID NO: 117522 - RNA, 23 nt, Artificial Sequence
  Synthetic
  misc_feature (6)..(6): n is a, c, g, or u
uccggnagaugagaaggcacaga

SEQ ID NO: 117523 - RNA, 24 nt, Artificial Sequence
  Synthetic
  misc_feature (7)..(7): n is a, c, g, or u
guccggnagaugagaaggcacaga

SEQ ID NO: 117524 - RNA, 18 nt, Artificial Sequence
  Synthetic
aaggccucccgauacaga

SEQ ID NO: 117525 - RNA, 19 nt, Artificial Sequence
  Synthetic
uaaggccucccgauacaga

SEQ ID NO: 117526 - RNA, 20 nt, Artificial Sequence
  Synthetic
cuaaggccucccgauacaga

SEQ ID NO: 117527 - RNA, 21 nt, Artificial Sequence
  Synthetic
ucuaaggccucccgauacaga

SEQ ID NO: 117528 - RNA, 22 nt, Artificial Sequence
  Synthetic
cucuaaggccucccgauacaga

SEQ ID NO: 117529 - RNA, 23 nt, Artificial Sequence
  Synthetic
acucuaaggccucccgauacaga

SEQ ID NO: 117530 - RNA, 24 nt, Artificial Sequence
  Synthetic
gacucuaaggccucccgauacaga

SEQ ID NO: 117531 - RNA, 18 nt, Artificial Sequence
  Synthetic
cucaagauguuguacaga

SEQ ID NO: 117532 - RNA, 19 nt, Artificial Sequence
  Synthetic
acucaagauguuguacaga

SEQ ID NO: 117533 - RNA, 20 nt, Artificial Sequence
  Synthetic
gacucaagauguuguacaga

SEQ ID NO: 117534 - RNA, 21 nt, Artificial Sequence
  Synthetic
ggacucaagauguuguacaga

SEQ ID NO: 117535 - RNA, 22 nt, Artificial Sequence
  Synthetic
gggacucaagauguuguacaga

SEQ ID NO: 117536 - RNA, 23 nt, Artificial Sequence
  Synthetic
agggacucaagauguuguacaga

SEQ ID NO: 117537 - RNA, 24 nt, Artificial Sequence
  Synthetic
aagggacucaagauguuguacaga

SEQ ID NO: 117538 - RNA, 18 nt, Artificial Sequence
  Synthetic
  misc_feature (2)..(2): n is a, c, g, or u
angagaugauuaggcaga

SEQ ID NO: 117539 - RNA, 19 nt, Artificial Sequence
  Synthetic
  misc_feature (3)..(3): n is a, c, g, or u
cangagaugauuaggcaga

SEQ ID NO: 117540 - RNA, 20 nt, Artificial Sequence
  Synthetic
  misc_feature (4)..(4): n is a, c, g, or u
acangagaugauuaggcaga

SEQ ID NO: 117541 - RNA, 21 nt, Artificial Sequence
  Synthetic
  misc_feature (5)..(5): n is a, c, g, or u
aacangagaugauuaggcaga

SEQ ID NO: 117542 - RNA, 22 nt, Artificial Sequence
  Synthetic
  misc_feature (6)..(6): n is a, c, g, or u
gaacangagaugauuaggcaga

SEQ ID NO: 117543 - RNA, 23 nt, Artificial Sequence
  Synthetic
  misc_feature (7)..(7): n is a, c, g, or u
ugaacangagaugauuaggcaga

SEQ ID NO: 117544 - RNA, 24 nt, Artificial Sequence
  Synthetic
  misc_feature (8)..(8): n is a, c, g, or u
augaacangagaugauuaggcaga

SEQ ID NO: 117545 - RNA, 18 nt, Artificial Sequence
  Synthetic
gcaguauggaucggcaga

SEQ ID NO: 117546 - RNA, 19 nt, Artificial Sequence
  Synthetic
cgcaguauggaucggcaga

SEQ ID NO: 117547 - RNA, 20 nt, Artificial Sequence
  Synthetic
ccgcaguauggaucggcaga

SEQ ID NO: 117548 - RNA, 21 nt, Artificial Sequence
  Synthetic
uccgcaguauggaucggcaga

SEQ ID NO: 117549 - RNA, 22 nt, Artificial Sequence
  Synthetic
uuccgcaguauggaucggcaga

SEQ ID NO: 117550 - RNA, 23 nt, Artificial Sequence
  Synthetic
guuccgcaguauggaucggcaga

SEQ ID NO: 117551 - RNA, 24 nt, Artificial Sequence
  Synthetic
aguuccgcaguauggaucggcaga

SEQ ID NO: 117552 - RNA, 18 nt, Artificial Sequence
  Synthetic
auagcagcaggaugcaga

SEQ ID NO: 117553 - RNA, 19 nt, Artificial Sequence
  Synthetic
cauagcagcaggaugcaga

SEQ ID NO: 117554 - RNA, 20 nt, Artificial Sequence
  Synthetic
gcauagcagcaggaugcaga

SEQ ID NO: 117555 - RNA, 21 nt, Artificial Sequence
  Synthetic
ggcauagcagcaggaugcaga

SEQ ID NO: 117556 - RNA, 22 nt, Artificial Sequence
  Synthetic
aggcauagcagcaggaugcaga

SEQ ID NO: 117557 - RNA, 23 nt, Artificial Sequence
  Synthetic
gaggcauagcagcaggaugcaga

SEQ ID NO: 117558 - RNA, 24 nt, Artificial Sequence
  Synthetic
ugaggcauagcagcaggaugcaga

SEQ ID NO: 117559 - RNA, 18 nt, Artificial Sequence
  Synthetic
cuccaugcgacgugcaga

SEQ ID NO: 117560 - RNA, 19 nt, Artificial Sequence
  Synthetic
ucuccaugcgacgugcaga

SEQ ID NO: 117561 - RNA, 20 nt, Artificial Sequence
  Synthetic
gucuccaugcgacgugcaga

SEQ ID NO: 117562 - RNA, 21 nt, Artificial Sequence
  Synthetic
ggucuccaugcgacgugcaga

SEQ ID NO: 117563 - RNA, 22 nt, Artificial Sequence
  Synthetic
uggucuccaugcgacgugcaga

SEQ ID NO: 117564 - RNA, 23 nt, Artificial Sequence
  Synthetic
guggucuccaugcgacgugcaga

SEQ ID NO: 117565 - RNA, 24 nt, Artificial Sequence
  Synthetic
gguggucuccaugcgacgugcaga

SEQ ID NO: 117566 - RNA, 18 nt, Artificial Sequence
  Synthetic
guaaacugagccaagaga

SEQ ID NO: 117567 - RNA, 19 nt, Artificial Sequence
  Synthetic
aguaaacugagccaagaga

SEQ ID NO: 117568 - RNA, 20 nt, Artificial Sequence
  Synthetic
uaguaaacugagccaagaga

SEQ ID NO: 117569 - RNA, 21 nt, Artificial Sequence
  Synthetic
cuaguaaacugagccaagaga

SEQ ID NO: 117570 - RNA, 22 nt, Artificial Sequence
  Synthetic
acuaguaaacugagccaagaga

SEQ ID NO: 117571 - RNA, 23 nt, Artificial Sequence
  Synthetic
cacuaguaaacugagccaagaga

SEQ ID NO: 117572 - RNA, 24 nt, Artificial Sequence
  Synthetic
gcacuaguaaacugagccaagaga

SEQ ID NO: 117573 - RNA, 18 nt, Artificial Sequence
  Synthetic
acauugagauucccgaga

SEQ ID NO: 117574 - RNA, 19 nt, Artificial Sequence
  Synthetic
aacauugagauucccgaga

SEQ ID NO: 117575 - RNA, 20 nt, Artificial Sequence
  Synthetic
uaacauugagauucccgaga

SEQ ID NO: 117576 - RNA, 21 nt, Artificial Sequence
  Synthetic
cuaacauugagauucccgaga

SEQ ID NO: 117577 - RNA, 22 nt, Artificial Sequence
  Synthetic
acuaacauugagauucccgaga

SEQ ID NO: 117578 - RNA, 23 nt, Artificial Sequence
  Synthetic
uacuaacauugagauucccgaga

SEQ ID NO: 117579 - RNA, 24 nt, Artificial Sequence
  Synthetic
auacuaacauugagauucccgaga

SEQ ID NO: 117580 - RNA, 18 nt, Artificial Sequence
  Synthetic
auggaucggcagaggaga

SEQ ID NO: 117581 - RNA, 19 nt, Artificial Sequence
  Synthetic
uauggaucggcagaggaga

SEQ ID NO: 117582 - RNA, 20 nt, Artificial Sequence
  Synthetic
guauggaucggcagaggaga

SEQ ID NO: 117583 - RNA, 21 nt, Artificial Sequence
  Synthetic
aguauggaucggcagaggaga

SEQ ID NO: 117584 - RNA, 22 nt, Artificial Sequence
  Synthetic
caguauggaucggcagaggaga

SEQ ID NO: 117585 - RNA, 23 nt, Artificial Sequence
  Synthetic
gcaguauggaucggcagaggaga

SEQ ID NO: 117586 - RNA, 24 nt, Artificial Sequence
  Synthetic
cgcaguauggaucggcagaggaga

SEQ ID NO: 117587 - RNA, 18 nt, Artificial Sequence
  Synthetic
  misc_feature (7)..(8): n is a, c, g, or u
  misc_feature (12)..(12): n is a, c, g, or u
cgguacnncagncggaga

SEQ ID NO: 117588 - RNA, 19 nt, Artificial Sequence
  Synthetic
  misc_feature (8)..(9): n is a, c, g, or u
  misc_feature (13)..(13): n is a, c, g, or u
ucgguacnncagncggaga

SEQ ID NO: 117589 - RNA, 20 nt, Artificial Sequence
  Synthetic
  misc_feature (9)..(10): n is a, c, g, or u
  misc_feature (14)..(14): n is a, c, g, or u
gucgguacnncagncggaga

SEQ ID NO: 117590 - RNA, 21 nt, Artificial Sequence
  Synthetic
  misc_feature (10)..(11): n is a, c, g, or u
  misc_feature (15)..(15): n is a, c, g, or u
ggucgguacnncagncggaga

SEQ ID NO: 117591 - RNA, 22 nt, Artificial Sequence
  Synthetic
  misc_feature (11)..(12): n is a, c, g, or u
  misc_feature (16)..(16): n is a, c, g, or u
cggucgguacnncagncggaga

SEQ ID NO: 117592 - RNA, 23 nt, Artificial Sequence
  Synthetic
  misc_feature (12)..(13): n is a, c, g, or u
  misc_feature (17)..(17): n is a, c, g, or u
ucggucgguacnncagncggaga

SEQ ID NO: 117593 - RNA, 24 nt, Artificial Sequence
  Synthetic
  misc_feature (13)..(14): n is a, c, g, or u
  misc_feature (18)..(18): n is a, c, g, or u
gucggucgguacnncagncggaga

SEQ ID NO: 117594 - RNA, 18 nt, Artificial Sequence
  Synthetic
uuggugagugacuggaga

SEQ ID NO: 117595 - RNA, 19 nt, Artificial Sequence
  Synthetic
guuggugagugacuggaga

SEQ ID NO: 117596 - RNA, 20 nt, Artificial Sequence
  Synthetic
  misc_feature (1)..(1): n is a, c, g, or u
nguuggugagugacuggaga

SEQ ID NO: 117597 - RNA, 21 nt, Artificial Sequence
  Synthetic
  misc_feature (2)..(2): n is a, c, g, or u
anguuggugagugacuggaga

SEQ ID NO: 117598 - RNA, 22 nt, Artificial Sequence
  Synthetic
  misc_feature (3)..(3): n is a, c, g, or u
canguuggugagugacuggaga

SEQ ID NO: 117599 - RNA, 23 nt, Artificial Sequence
  Synthetic
  misc_feature (4)..(4): n is a, c, g, or u
acanguuggugagugacuggaga

SEQ ID NO: 117600 - RNA, 24 nt, Artificial Sequence
  Synthetic
  misc_feature (5)..(5): n is a, c, g, or u
aacanguuggugagugacuggaga

SEQ ID NO: 117601 - RNA, 18 nt, Artificial Sequence
  Synthetic
  misc_feature (4)..(4): n is a, c, g, or u
gucncuuagagguggaga

SEQ ID NO: 117602 - RNA, 19 nt, Artificial Sequence
  Synthetic
  misc_feature (5)..(5): n is a, c, g, or u
ugucncuuagagguggaga

SEQ ID NO: 117603 - RNA, 20 nt, Artificial Sequence
  Synthetic
  misc_feature (6)..(6): n is a, c, g, or u
gugucncuuagagguggaga

SEQ ID NO: 117604 - RNA, 21 nt, Artificial Sequence
  Synthetic
  misc_feature (7)..(7): n is a, c, g, or u
agugucncuuagagguggaga

SEQ ID NO: 117605 - RNA, 22 nt, Artificial Sequence
  Synthetic
  misc_feature (8)..(8): n is a, c, g, or u
gagugucncuuagagguggaga

SEQ ID NO: 117606 - RNA, 23 nt, Artificial Sequence
  Synthetic
  misc_feature (9)..(9): n is a, c, g, or u
ugagugucncuuagagguggaga

SEQ ID NO: 117607 - RNA, 24 nt, Artificial Sequence
  Synthetic
  misc_feature (10)..(10): n is a, c, g, or u
augagugucncuuagagguggaga

SEQ ID NO: 117608 - RNA, 18 nt, Artificial Sequence
  Synthetic
  misc_feature (4)..(4): n is a, c, g, or u
  misc_feature (15)..(15): n is a, c, g, or u
gagnagaucucgaanaga

SEQ ID NO: 117609 - RNA, 19 nt, Artificial Sequence
  Synthetic
  misc_feature (5)..(5): n is a, c, g, or u
  misc_feature (16)..(16): n is a, c, g, or u
cgagnagaucucgaanaga

SEQ ID NO: 117610 - RNA, 20 nt, Artificial Sequence
  Synthetic
  misc_feature (6)..(6): n is a, c, g, or u
  misc_feature (17)..(17): n is a, c, g, or u
ucgagnagaucucgaanaga

SEQ ID NO: 117611 - RNA, 21 nt, Artificial Sequence
  Synthetic
  misc_feature (7)..(7): n is a, c, g, or u
  misc_feature (18)..(18): n is a, c, g, or u
gucgagnagaucucgaanaga

SEQ ID NO: 117612 - RNA, 22 nt, Artificial Sequence
  Synthetic
  misc_feature (8)..(8): n is a, c, g, or u
  misc_feature (19)..(19): n is a, c, g, or u
ugucgagnagaucucgaanaga

SEQ ID NO: 117613 - RNA, 23 nt, Artificial Sequence
  Synthetic
  misc_feature (9)..(9): n is a, c, g, or u
  misc_feature (20)..(20): n is a, c, g, or u
gugucgagnagaucucgaanaga

SEQ ID NO: 117614 - RNA, 24 nt, Artificial Sequence
  Synthetic
  misc_feature (10)..(10): n is a, c, g, or u
  misc_feature (21)..(21): n is a, c, g, or u
ggugucgagnagaucucgaanaga

SEQ ID NO: 117615 - RNA, 18 nt, Artificial Sequence
  Synthetic
  misc_feature (15)..(15): n is a, c, g, or u
ugcacacgguccggnaga

SEQ ID NO: 117616 - RNA, 19 nt, Artificial Sequence
  Synthetic
  misc_feature (16)..(16): n is a, c, g, or u
gugcacacgguccggnaga

SEQ ID NO: 117617 - RNA, 20 nt, Artificial Sequence
  Synthetic
  misc_feature (17)..(17): n is a, c, g, or u
agugcacacgguccggnaga

SEQ ID NO: 117618 - RNA, 21 nt, Artificial Sequence
  Synthetic
  misc_feature (18)..(18): n is a, c, g, or u
aagugcacacgguccggnaga

SEQ ID NO: 117619 - RNA, 22 nt, Artificial Sequence
  Synthetic
  misc_feature (19)..(19): n is a, c, g, or u
gaagugcacacgguccggnaga

SEQ ID NO: 117620 - RNA, 23 nt, Artificial Sequence
  Synthetic
  misc_feature (20)..(20): n is a, c, g, or u
cgaagugcacacgguccggnaga

SEQ ID NO: 117621 - RNA, 24 nt, Artificial Sequence
  Synthetic
  misc_feature (21)..(21): n is a, c, g, or u
gcgaagugcacacgguccggnaga

SEQ ID NO: 117622 - RNA, 18 nt, Artificial Sequence
  Synthetic
  misc_feature (12)..(12): n is a, c, g, or u
ggaugagugucncuuaga

SEQ ID NO: 117623 - RNA, 19 nt, Artificial Sequence
  Synthetic
  misc_feature (13)..(13): n is a, c, g, or u
aggaugagugucncuuaga

SEQ ID NO: 117624 - RNA, 20 nt, Artificial Sequence
  Synthetic
  misc_feature (14)..(14): n is a, c, g, or u
gaggaugagugucncuuaga

SEQ ID NO: 117625 - RNA, 21 nt, Artificial Sequence
  Synthetic
  misc_feature (15)..(15): n is a, c, g, or u
ugaggaugagugucncuuaga

SEQ ID NO: 117626 - RNA, 22 nt, Artificial Sequence
  Synthetic
  misc_feature (16)..(16): n is a, c, g, or u
cugaggaugagugucncuuaga

SEQ ID NO: 117627 - RNA, 23 nt, Artificial Sequence
  Synthetic
  misc_feature (17)..(17): n is a, c, g, or u
ccugaggaugagugucncuuaga

SEQ ID NO: 117628 - RNA, 24 nt, Artificial Sequence
  Synthetic
  misc_feature (18)..(18): n is a, c, g, or u
gccugaggaugagugucncuuaga

SEQ ID NO: 117629 - RNA, 18 nt, Artificial Sequence
  Synthetic
accccgccuguaacacga

SEQ ID NO: 117630 - RNA, 19 nt, Artificial Sequence
  Synthetic
aaccccgccuguaacacga

SEQ ID NO: 117631 - RNA, 20 nt, Artificial Sequence
  Synthetic
aaaccccgccuguaacacga

SEQ ID NO: 117632 - RNA, 21 nt, Artificial Sequence
  Synthetic
aaaaccccgccuguaacacga

SEQ ID NO: 117633 - RNA, 22 nt, Artificial Sequence
  Synthetic
aaaaaccccgccuguaacacga

SEQ ID NO: 117634 - RNA, 23 nt, Artificial Sequence
  Synthetic
gaaaaaccccgccuguaacacga

SEQ ID NO: 117635 - RNA, 24 nt, Artificial Sequence
  Synthetic
agaaaaaccccgccuguaacacga

SEQ ID NO: 117636 - RNA, 18 nt, Artificial Sequence
  Synthetic
cuucgauaagauugacga

SEQ ID NO: 117637 - RNA, 19 nt, Artificial Sequence
  Synthetic
ucuucgauaagauugacga

SEQ ID NO: 117638 - RNA, 20 nt, Artificial Sequence
  Synthetic
gucuucgauaagauugacga

SEQ ID NO: 117639 - RNA, 18 nt, Artificial Sequence
  Synthetic
gacucuaaggccucccga

SEQ ID NO: 117640 - RNA, 19 nt, Artificial Sequence
  Synthetic
agacucuaaggccucccga

SEQ ID NO: 117641 - RNA, 20 nt, Artificial Sequence
  Synthetic
gagacucuaaggccucccga

SEQ ID NO: 117642 - RNA, 18 nt, Artificial Sequence
  Synthetic
cgcgggauucagcgccga

SEQ ID NO: 117643 - RNA, 19 nt, Artificial Sequence
  Synthetic
ccgcgggauucagcgccga

SEQ ID NO: 117644 - RNA, 20 nt, Artificial Sequence
  Synthetic
uccgcgggauucagcgccga

SEQ ID NO: 117645 - RNA, 18 nt, Artificial Sequence
  Synthetic
ucuucugcgacgcggcga

SEQ ID NO: 117646 - RNA, 19 nt, Artificial Sequence
  Synthetic
aucuucugcgacgcggcga

SEQ ID NO: 117647 - RNA, 20 nt, Artificial Sequence
  Synthetic
gaucuucugcgacgcggcga

SEQ ID NO: 117648 - RNA, 18 nt, Artificial Sequence
  Synthetic
  misc_feature (3)..(3): n is a, c, g, or u
  misc_feature (11)..(11): n is a, c, g, or u
gcnccagaccngcugcga

SEQ ID NO: 117649 - RNA, 19 nt, Artificial Sequence
  Synthetic
  misc_feature (1)..(1): n is a, c, g, or u
  misc_feature (4)..(4): n is a, c, g, or u
  misc_feature (12)..(12): n is a, c, g, or u
ngcnccagaccngcugcga

SEQ ID NO: 117650 - RNA, 20 nt, Artificial Sequence
  Synthetic
  misc_feature (2)..(2): n is a, c, g, or u
  misc_feature (5)..(5): n is a, c, g, or u
  misc_feature (13)..(13): n is a, c, g, or u
ungcnccagaccngcugcga

SEQ ID NO: 117651 - RNA, 21 nt, Artificial Sequence
  Synthetic
  misc_feature (3)..(3): n is a, c, g, or u
  misc_feature (6)..(6): n is a, c, g, or u
  misc_feature (14)..(14): n is a, c, g, or u
uungcnccagaccngcugcga

SEQ ID NO: 117652 - RNA, 22 nt, Artificial Sequence
  Synthetic
  misc_feature (4)..(4): n is a, c, g, or u
  misc_feature (7)..(7): n is a, c, g, or u
  misc_feature (15)..(15): n is a, c, g, or u
uuungcnccagaccngcugcga

SEQ ID NO: 117653 - RNA, 23 nt, Artificial Sequence
  Synthetic
  misc_feature (5)..(5): n is a, c, g, or u
  misc_feature (8)..(8): n is a, c, g, or u
  misc_feature (16)..(16): n is a, c, g, or u
guuungcnccagaccngcugcga

SEQ ID NO: 117654 - RNA, 24 nt, Artificial Sequence
  Synthetic
  misc_feature (6)..(6): n is a, c, g, or u
  misc_feature (9)..(9): n is a, c, g, or u
  misc_feature (17)..(17): n is a, c, g, or u
aguuungcnccagaccngcugcga

SEQ ID NO: 117655 - RNA, 18 nt, Artificial Sequence
  Synthetic
ugagaccuucgucugcga

SEQ ID NO: 117656 - RNA, 19 nt, Artificial Sequence
  Synthetic
uugagaccuucgucugcga

SEQ ID NO: 117657 - RNA, 20 nt, Artificial Sequence
  Synthetic
auugagaccuucgucugcga

SEQ ID NO: 117658 - RNA, 18 nt, Artificial Sequence
  Synthetic
gauugagaucuucugcga

SEQ ID NO: 117659 - RNA, 19 nt, Artificial Sequence
  Synthetic
agauugagaucuucugcga

SEQ ID NO: 117660 - RNA, 20 nt, Artificial Sequence
  Synthetic
gagauugagaucuucugcga

SEQ ID NO: 117661 - RNA, 21 nt, Artificial Sequence
  Synthetic
cgagauugagaucuucugcga

SEQ ID NO: 117662 - RNA, 22 nt, Artificial Sequence
  Synthetic
ccgagauugagaucuucugcga

SEQ ID NO: 117663 - RNA, 23 nt, Artificial Sequence
  Synthetic
cccgagauugagaucuucugcga

SEQ ID NO: 117664 - RNA, 24 nt, Artificial Sequence
  Synthetic
ucccgagauugagaucuucugcga

SEQ ID NO: 117665 - RNA, 18 nt, Artificial Sequence
  Synthetic
  misc_feature (9)..(9): n is a, c, g, or u
gugucgagnagaucucga

SEQ ID NO: 117666 - RNA, 19 nt, Artificial Sequence
  Synthetic
  misc_feature (10)..(10): n is a, c, g, or u
ggugucgagnagaucucga

SEQ ID NO: 117667 - RNA, 20 nt, Artificial Sequence
  Synthetic
  misc_feature (11)..(11): n is a, c, g, or u
cggugucgagnagaucucga

SEQ ID NO: 117668 - RNA, 21 nt, Artificial Sequence
  Synthetic
  misc_feature (12)..(12): n is a, c, g, or u
gcggugucgagnagaucucga

SEQ ID NO: 117669 - RNA, 22 nt, Artificial Sequence
  Synthetic
  misc_feature (13)..(13): n is a, c, g, or u
ggcggugucgagnagaucucga

SEQ ID NO: 117670 - RNA, 23 nt, Artificial Sequence
  Synthetic
  misc_feature (14)..(14): n is a, c, g, or u
aggcggugucgagnagaucucga

SEQ ID NO: 117671 - RNA, 24 nt, Artificial Sequence
  Synthetic
  misc_feature (15)..(15): n is a, c, g, or u
gaggcggugucgagnagaucucga

SEQ ID NO: 117672 - RNA, 18 nt, Artificial Sequence
  Synthetic
  misc_feature (11)..(11): n is a, c, g, or u
agaucucgaanagaagga

SEQ ID NO: 117673 - RNA, 19 nt, Artificial Sequence
  Synthetic
  misc_feature (1)..(1): n is a, c, g, or u
  misc_feature (12)..(12): n is a, c, g, or u
nagaucucgaanagaagga

SEQ ID NO: 117674 - RNA, 20 nt, Artificial Sequence
  Synthetic
  misc_feature (2)..(2): n is a, c, g, or u
  misc_feature (13)..(13): n is a, c, g, or u
gnagaucucgaanagaagga

SEQ ID NO: 117675 - RNA, 21 nt, Artificial Sequence
  Synthetic
  misc_feature (3)..(3): n is a, c, g, or u
  misc_feature (14)..(14): n is a, c, g, or u
agnagaucucgaanagaagga

SEQ ID NO: 117676 - RNA, 22 nt, Artificial Sequence
  Synthetic
  misc_feature (4)..(4): n is a, c, g, or u
  misc_feature (15)..(15): n is a, c, g, or u
gagnagaucucgaanagaagga

SEQ ID NO: 117677 - RNA, 23 nt, Artificial Sequence
  Synthetic
  misc_feature (5)..(5): n is a, c, g, or u
  misc_feature (16)..(16): n is a, c, g, or u
cgagnagaucucgaanagaagga

SEQ ID NO: 117678 - RNA, 24 nt, Artificial Sequence
  Synthetic
  misc_feature (6)..(6): n is a, c, g, or u
  misc_feature (17)..(17): n is a, c, g, or u
ucgagnagaucucgaanagaagga

SEQ ID NO: 117679 - RNA, 18 nt, Artificial Sequence
  Synthetic
ugaggcauagcagcagga

SEQ ID NO: 117680 - RNA, 19 nt, Artificial Sequence
  Synthetic
augaggcauagcagcagga

SEQ ID NO: 117681 - RNA, 20 nt, Artificial Sequence
  Synthetic
gaugaggcauagcagcagga

SEQ ID NO: 117682 - RNA, 21 nt, Artificial Sequence
  Synthetic
agaugaggcauagcagcagga

SEQ ID NO: 117683 - RNA, 22 nt, Artificial Sequence
  Synthetic
aagaugaggcauagcagcagga

SEQ ID NO: 117684 - RNA, 23 nt, Artificial Sequence
  Synthetic
gaagaugaggcauagcagcagga

SEQ ID NO: 117685 - RNA, 24 nt, Artificial Sequence
  Synthetic
agaagaugaggcauagcagcagga

SEQ ID NO: 117686 - RNA, 18 nt, Artificial Sequence
  Synthetic
cgauugguggaggcagga

SEQ ID NO: 117687 - RNA, 19 nt, Artificial Sequence
  Synthetic
ccgauugguggaggcagga

SEQ ID NO: 117688 - RNA, 20 nt, Artificial Sequence
  Synthetic
gccgauugguggaggcagga

SEQ ID NO: 117689 - RNA, 21 nt, Artificial Sequence
  Synthetic
ugccgauugguggaggcagga

SEQ ID NO: 117690 - RNA, 22 nt, Artificial Sequence
  Synthetic
cugccgauugguggaggcagga

SEQ ID NO: 117691 - RNA, 23 nt, Artificial Sequence
  Synthetic
acugccgauugguggaggcagga

SEQ ID NO: 117692 - RNA, 24 nt, Artificial Sequence
  Synthetic
gacugccgauugguggaggcagga

SEQ ID NO: 117693 - RNA, 18 nt, Artificial Sequence
  Synthetic
ugcaaaugaaugucagga

SEQ ID NO: 117694 - RNA, 19 nt, Artificial Sequence
  Synthetic
cugcaaaugaaugucagga

SEQ ID NO: 117695 - RNA, 20 nt, Artificial Sequence
  Synthetic
ccugcaaaugaaugucagga

SEQ ID NO: 117696 - RNA, 21 nt, Artificial Sequence
  Synthetic
uccugcaaaugaaugucagga

SEQ ID NO: 117697 - RNA, 22 nt, Artificial Sequence
  Synthetic
cuccugcaaaugaaugucagga

SEQ ID NO: 117698 - RNA, 23 nt, Artificial Sequence
  Synthetic
ccuccugcaaaugaaugucagga

SEQ ID NO: 117699 - RNA, 24 nt, Artificial Sequence
  Synthetic
uccuccugcaaaugaaugucagga

SEQ ID NO: 117700 - RNA, 18 nt, Artificial Sequence
  Synthetic
  misc_feature (12)..(12): n is a, c, g, or u
  misc_feature (14)..(14): n is a, c, g, or u
ggaguuugccanunagga

SEQ ID NO: 117701 - RNA, 19 nt, Artificial Sequence
  Synthetic
  misc_feature (13)..(13): n is a, c, g, or u
  misc_feature (15)..(15): n is a, c, g, or u
aggaguuugccanunagga

SEQ ID NO: 117702 - RNA, 20 nt, Artificial Sequence
  Synthetic
  misc_feature (14)..(14): n is a, c, g, or u
  misc_feature (16)..(16): n is a, c, g, or u
aaggaguuugccanunagga

SEQ ID NO: 117703 - RNA, 21 nt, Artificial Sequence
  Synthetic
  misc_feature (15)..(15): n is a, c, g, or u
  misc_feature (17)..(17): n is a, c, g, or u
gaaggaguuugccanunagga

SEQ ID NO: 117704 - RNA, 22 nt, Artificial Sequence
  Synthetic
  misc_feature (16)..(16): n is a, c, g, or u
  misc_feature (18)..(18): n is a, c, g, or u
agaaggaguuugccanunagga

SEQ ID NO: 117705 - RNA, 23 nt, Artificial Sequence
  Synthetic
  misc_feature (17)..(17): n is a, c, g, or u
  misc_feature (19)..(19): n is a, c, g, or u
aagaaggaguuugccanunagga

SEQ ID NO: 117706 - RNA, 24 nt, Artificial Sequence
  Synthetic
  misc_feature (18)..(18): n is a, c, g, or u
  misc_feature (20)..(20): n is a, c, g, or u
aaagaaggaguuugccanunagga

SEQ ID NO: 117707 - RNA, 18 nt, Artificial Sequence
  Synthetic
gaggcuugaacaguagga

SEQ ID NO: 117708 - RNA, 19 nt, Artificial Sequence
  Synthetic
ggaggcuugaacaguagga

SEQ ID NO: 117709 - RNA, 20 nt, Artificial Sequence
  Synthetic
uggaggcuugaacaguagga

SEQ ID NO: 117710 - RNA, 21 nt, Artificial Sequence
  Synthetic
uuggaggcuugaacaguagga

SEQ ID NO: 117711 - RNA, 22 nt, Artificial Sequence
  Synthetic
cuuggaggcuugaacaguagga

SEQ ID NO: 117712 - RNA, 23 nt, Artificial Sequence
  Synthetic
gcuuggaggcuugaacaguagga

SEQ ID NO: 117713 - RNA, 24 nt, Artificial Sequence
  Synthetic
agcuuggaggcuugaacaguagga

SEQ ID NO: 117714 - RNA, 18 nt, Artificial Sequence
  Synthetic
ugagccaagagaaacgga

SEQ ID NO: 117715 - RNA, 19 nt, Artificial Sequence
  Synthetic
cugagccaagagaaacgga

SEQ ID NO: 117716 - RNA, 20 nt, Artificial Sequence
  Synthetic
acugagccaagagaaacgga

SEQ ID NO: 117717 - RNA, 21 nt, Artificial Sequence
  Synthetic
aacugagccaagagaaacgga

SEQ ID NO: 117718 - RNA, 22 nt, Artificial Sequence
  Synthetic
aaacugagccaagagaaacgga

SEQ ID NO: 117719 - RNA, 23 nt, Artificial Sequence
  Synthetic
uaaacugagccaagagaaacgga

SEQ ID NO: 117720 - RNA, 24 nt, Artificial Sequence
  Synthetic
guaaacugagccaagagaaacgga

SEQ ID NO: 117721 - RNA, 18 nt, Artificial Sequence
  Synthetic
  misc_feature (9)..(9): n is a, c, g, or u
aacagcggnauaaaggga

SEQ ID NO: 117722 - RNA, 19 nt, Artificial Sequence
  Synthetic
  misc_feature (10)..(10): n is a, c, g, or u
uaacagcggnauaaaggga

SEQ ID NO: 117723 - RNA, 20 nt, Artificial Sequence
  Synthetic
  misc_feature (11)..(11): n is a, c, g, or u
guaacagcggnauaaaggga

SEQ ID NO: 117724 - RNA, 21 nt, Artificial Sequence
  Synthetic
  misc_feature (12)..(12): n is a, c, g, or u
gguaacagcggnauaaaggga

SEQ ID NO: 117725 - RNA, 22 nt, Artificial Sequence
  Synthetic
  misc_feature (13)..(13): n is a, c, g, or u
ugguaacagcggnauaaaggga

SEQ ID NO: 117726 - RNA, 23 nt, Artificial Sequence
  Synthetic
  misc_feature (14)..(14): n is a, c, g, or u
uugguaacagcggnauaaaggga

SEQ ID NO: 117727 - RNA, 24 nt, Artificial Sequence
  Synthetic
  misc_feature (15)..(15): n is a, c, g, or u
auugguaacagcggnauaaaggga

SEQ ID NO: 117728 - RNA, 18 nt, Artificial Sequence
  Synthetic
gauucagcgccgacggga

SEQ ID NO: 117729 - RNA, 19 nt, Artificial Sequence
  Synthetic
ggauucagcgccgacggga

SEQ ID NO: 117730 - RNA, 20 nt, Artificial Sequence
  Synthetic
gggauucagcgccgacggga

SEQ ID NO: 117731 - RNA, 18 nt, Artificial Sequence
  Synthetic
gaggggucguccgcggga

SEQ ID NO: 117732 - RNA, 19 nt, Artificial Sequence
  Synthetic
ggaggggucguccgcggga

SEQ ID NO: 117733 - RNA, 20 nt, Artificial Sequence
  Synthetic
gggaggggucguccgcggga

SEQ ID NO: 117734 - RNA, 21 nt, Artificial Sequence
  Synthetic
cgggaggggucguccgcggga

SEQ ID NO: 117735 - RNA, 22 nt, Artificial Sequence
  Synthetic
ccgggaggggucguccgcggga

SEQ ID NO: 117736 - RNA, 23 nt, Artificial Sequence
  Synthetic
cccgggaggggucguccgcggga

SEQ ID NO: 117737 - RNA, 24 nt, Artificial Sequence
  Synthetic
ccccgggaggggucguccgcggga

SEQ ID NO: 117738 - RNA, 18 nt, Artificial Sequence
  Synthetic
  misc_feature (8)..(8): n is a, c, g, or u
aucccagnggauugggga

SEQ ID NO: 117739 - RNA, 19 nt, Artificial Sequence
  Synthetic
  misc_feature (9)..(9): n is a, c, g, or u
aaucccagnggauugggga

SEQ ID NO: 117740 - RNA, 20 nt, Artificial Sequence
  Synthetic
  misc_feature (10)..(10): n is a, c, g, or u
gaaucccagnggauugggga

SEQ ID NO: 117741 - RNA, 21 nt, Artificial Sequence
  Synthetic
  misc_feature (11)..(11): n is a, c, g, or u
agaaucccagnggauugggga

SEQ ID NO: 117742 - RNA, 22 nt, Artificial Sequence
  Synthetic
  misc_feature (12)..(12): n is a, c, g, or u
aagaaucccagnggauugggga

SEQ ID NO: 117743 - RNA, 23 nt, Artificial Sequence
  Synthetic
  misc_feature (1)..(1): n is a, c, g, or u
  misc_feature (13)..(13): n is a, c, g, or u
naagaaucccagnggauugggga

SEQ ID NO: 117744 - RNA, 24 nt, Artificial Sequence
  Synthetic
  misc_feature (2)..(2): n is a, c, g, or u
  misc_feature (14)..(14): n is a, c, g, or u
gnaagaaucccagnggauugggga

SEQ ID NO: 117745 - RNA, 18 nt, Artificial Sequence
  Synthetic
  misc_feature (12)..(12): n is a, c, g, or u
  misc_feature (14)..(14): n is a, c, g, or u
agagguggagananggga

SEQ ID NO: 117746 - RNA, 19 nt, Artificial Sequence
  Synthetic
  misc_feature (13)..(13): n is a, c, g, or u
  misc_feature (15)..(15): n is a, c, g, or u
uagagguggagananggga

SEQ ID NO: 117747 - RNA, 20 nt, Artificial Sequence
  Synthetic
  misc_feature (14)..(14): n is a, c, g, or u
  misc_feature (16)..(16): n is a, c, g, or u
uuagagguggagananggga

SEQ ID NO: 117748 - RNA, 21 nt, Artificial Sequence
  Synthetic
  misc_feature (15)..(15): n is a, c, g, or u
  misc_feature (17)..(17): n is a, c, g, or u
cuuagagguggagananggga

SEQ ID NO: 117749 - RNA, 22 nt, Artificial Sequence
  Synthetic
  misc_feature (1)..(1): n is a, c, g, or u
  misc_feature (16)..(16): n is a, c, g, or u
  misc_feature (18)..(18): n is a, c, g, or u
ncuuagagguggagananggga

SEQ ID NO: 117750 - RNA, 23 nt, Artificial Sequence
  Synthetic
  misc_feature (2)..(2): n is a, c, g, or u
  misc_feature (17)..(17): n is a, c, g, or u
  misc_feature (19)..(19): n is a, c, g, or u
cncuuagagguggagananggga

SEQ ID NO: 117751 - RNA, 24 nt, Artificial Sequence
  Synthetic
  misc_feature (3)..(3): n is a, c, g, or u
  misc_feature (18)..(18): n is a, c, g, or u
  misc_feature (20)..(20): n is a, c, g, or u
ucncuuagagguggagananggga

SEQ ID NO: 117752 - RNA, 18 nt, Artificial Sequence
  Synthetic
aagcccaagaugauggga

SEQ ID NO: 117753 - RNA, 19 nt, Artificial Sequence
  Synthetic
aaagcccaagaugauggga

SEQ ID NO: 117754 - RNA, 20 nt, Artificial Sequence
  Synthetic
gaaagcccaagaugauggga

SEQ ID NO: 117755 - RNA, 21 nt, Artificial Sequence
  Synthetic
cgaaagcccaagaugauggga

SEQ ID NO: 117756 - RNA, 22 nt, Artificial Sequence
  Synthetic
gcgaaagcccaagaugauggga

SEQ ID NO: 117757 - RNA, 23 nt, Artificial Sequence
  Synthetic
ugcgaaagcccaagaugauggga

SEQ ID NO: 117758 - RNA, 24 nt, Artificial Sequence
  Synthetic
uugcgaaagcccaagaugauggga

SEQ ID NO: 117759 - RNA, 18 nt, Artificial Sequence
  Synthetic
  misc_feature (3)..(3): n is a, c, g, or u
  misc_feature (15)..(15): n is a, c, g, or u
ggnaagaaucccagngga

SEQ ID NO: 117760 - RNA, 19 nt, Artificial Sequence
  Synthetic
  misc_feature (4)..(4): n is a, c, g, or u
  misc_feature (16)..(16): n is a, c, g, or u
gggnaagaaucccagngga

SEQ ID NO: 117761 - RNA, 20 nt, Artificial Sequence
  Synthetic
  misc_feature (5)..(5): n is a, c, g, or u
  misc_feature (17)..(17): n is a, c, g, or u
cgggnaagaaucccagngga

SEQ ID NO: 117762 - RNA, 21 nt, Artificial Sequence
  Synthetic
  misc_feature (6)..(6): n is a, c, g, or u
  misc_feature (18)..(18): n is a, c, g, or u
ucgggnaagaaucccagngga

SEQ ID NO: 117763 - RNA, 22 nt, Artificial Sequence
  Synthetic
  misc_feature (7)..(7): n is a, c, g, or u
  misc_feature (19)..(19): n is a, c, g, or u
aucgggnaagaaucccagngga

SEQ ID NO: 117764 - RNA, 23 nt, Artificial Sequence
  Synthetic
  misc_feature (8)..(8): n is a, c, g, or u
  misc_feature (20)..(20): n is a, c, g, or u
gaucgggnaagaaucccagngga

SEQ ID NO: 117765 - RNA, 24 nt, Artificial Sequence
  Synthetic
  misc_feature (9)..(9): n is a, c, g, or u
  misc_feature (21)..(21): n is a, c, g, or u
ugaucgggnaagaaucccagngga

SEQ ID NO: 117766 - RNA, 18 nt, Artificial Sequence
  Synthetic
  misc_feature (15)..(15): n is a, c, g, or u
uauuuaguaacauungga

SEQ ID NO: 117767 - RNA, 19 nt, Artificial Sequence
  Synthetic
  misc_feature (16)..(16): n is a, c, g, or u
auauuuaguaacauungga

SEQ ID NO: 117768 - RNA, 20 nt, Artificial Sequence
  Synthetic
  misc_feature (17)..(17): n is a, c, g, or u
aauauuuaguaacauungga

SEQ ID NO: 117769 - RNA, 21 nt, Artificial Sequence
  Synthetic
  misc_feature (18)..(18): n is a, c, g, or u
aaauauuuaguaacauungga

SEQ ID NO: 117770 - RNA, 22 nt, Artificial Sequence
  Synthetic
  misc_feature (19)..(19): n is a, c, g, or u
caaauauuuaguaacauungga

SEQ ID NO: 117771 - RNA, 23 nt, Artificial Sequence
  Synthetic
  misc_feature (20)..(20): n is a, c, g, or u
gcaaauauuuaguaacauungga

SEQ ID NO: 117772 - RNA, 24 nt, Artificial Sequence
  Synthetic
  misc_feature (21)..(21): n is a, c, g, or u
ggcaaauauuuaguaacauungga

SEQ ID NO: 117773 - RNA, 18 nt, Artificial Sequence
  Synthetic
  misc_feature (3)..(3): n is a, c, g, or u
gunguugaugauccugga

SEQ ID NO: 117774 - RNA, 19 nt, Artificial Sequence
  Synthetic
  misc_feature (4)..(4): n is a, c, g, or u
ggunguugaugauccugga

SEQ ID NO: 117775 - RNA, 20 nt, Artificial Sequence
  Synthetic
  misc_feature (5)..(5): n is a, c, g, or u
uggunguugaugauccugga

SEQ ID NO: 117776 - RNA, 21 nt, Artificial Sequence
  Synthetic
  misc_feature (6)..(6): n is a, c, g, or u
cuggunguugaugauccugga

SEQ ID NO: 117777 - RNA, 22 nt, Artificial Sequence
  Synthetic
  misc_feature (7)..(7): n is a, c, g, or u
gcuggunguugaugauccugga

SEQ ID NO: 117778 - RNA, 23 nt, Artificial Sequence
  Synthetic
  misc_feature (8)..(8): n is a, c, g, or u
ugcuggunguugaugauccugga

SEQ ID NO: 117779 - RNA, 24 nt, Artificial Sequence
  Synthetic
  misc_feature (9)..(9): n is a, c, g, or u
gugcuggunguugaugauccugga

SEQ ID NO: 117780 - RNA, 18 nt, Artificial Sequence
  Synthetic
ugacugccgauuggugga

SEQ ID NO: 117781 - RNA, 19 nt, Artificial Sequence
  Synthetic
cugacugccgauuggugga

SEQ ID NO: 117782 - RNA, 20 nt, Artificial Sequence
  Synthetic
ccugacugccgauuggugga

SEQ ID NO: 117783 - RNA, 21 nt, Artificial Sequence
  Synthetic
uccugacugccgauuggugga

SEQ ID NO: 117784 - RNA, 22 nt, Artificial Sequence
  Synthetic
uuccugacugccgauuggugga

SEQ ID NO: 117785 - RNA, 23 nt, Artificial Sequence
  Synthetic
cuuccugacugccgauuggugga

SEQ ID NO: 117786 - RNA, 24 nt, Artificial Sequence
  Synthetic
ccuuccugacugccgauuggugga

SEQ ID NO: 117787 - RNA, 18 nt, Artificial Sequence
  Synthetic
uuuuguacagcaacauga

SEQ ID NO: 117788 - RNA, 19 nt, Artificial Sequence
  Synthetic
guuuuguacagcaacauga

SEQ ID NO: 117789 - RNA, 20 nt, Artificial Sequence
  Synthetic
gguuuuguacagcaacauga

SEQ ID NO: 117790 - RNA, 21 nt, Artificial Sequence
  Synthetic
agguuuuguacagcaacauga

SEQ ID NO: 117791 - RNA, 22 nt, Artificial Sequence
  Synthetic
uagguuuuguacagcaacauga

SEQ ID NO: 117792 - RNA, 23 nt, Artificial Sequence
  Synthetic
guagguuuuguacagcaacauga

SEQ ID NO: 117793 - RNA, 24 nt, Artificial Sequence
  Synthetic
cguagguuuuguacagcaacauga

SEQ ID NO: 117794 - RNA, 18 nt, Artificial Sequence
  Synthetic
ggaugcagaggaagauga

SEQ ID NO: 117795 - RNA, 19 nt, Artificial Sequence
  Synthetic
aggaugcagaggaagauga

SEQ ID NO: 117796 - RNA, 20 nt, Artificial Sequence
  Synthetic
caggaugcagaggaagauga

SEQ ID NO: 117797 - RNA, 21 nt, Artificial Sequence
  Synthetic
gcaggaugcagaggaagauga

SEQ ID NO: 117798 - RNA, 22 nt, Artificial Sequence
  Synthetic
agcaggaugcagaggaagauga

SEQ ID NO: 117799 - RNA, 23 nt, Artificial Sequence
  Synthetic
cagcaggaugcagaggaagauga

SEQ ID NO: 117800 - RNA, 24 nt, Artificial Sequence
  Synthetic
gcagcaggaugcagaggaagauga

SEQ ID NO: 117801 - RNA, 18 nt, Artificial Sequence
  Synthetic
  misc_feature (11)..(11): n is a, c, g, or u
gacaugaacangagauga

SEQ ID NO: 117802 - RNA, 19 nt, Artificial Sequence
  Synthetic
  misc_feature (12)..(12): n is a, c, g, or u
ggacaugaacangagauga

SEQ ID NO: 117803 - RNA, 20 nt, Artificial Sequence
  Synthetic
  misc_feature (13)..(13): n is a, c, g, or u
aggacaugaacangagauga

SEQ ID NO: 117804 - RNA, 21 nt, Artificial Sequence
  Synthetic
  misc_feature (14)..(14): n is a, c, g, or u
uaggacaugaacangagauga

SEQ ID NO: 117805 - RNA, 22 nt, Artificial Sequence
  Synthetic
  misc_feature (15)..(15): n is a, c, g, or u
guaggacaugaacangagauga

SEQ ID NO: 117806 - RNA, 23 nt, Artificial Sequence
  Synthetic
  misc_feature (16)..(16): n is a, c, g, or u
aguaggacaugaacangagauga

SEQ ID NO: 117807 - RNA, 24 nt, Artificial Sequence
  Synthetic
  misc_feature (17)..(17): n is a, c, g, or u
caguaggacaugaacangagauga

SEQ ID NO: 117808 - RNA, 18 nt, Artificial Sequence
  Synthetic
  misc_feature (12)..(12): n is a, c, g, or u
acacgguccggnagauga

SEQ ID NO: 117809 - RNA, 19 nt, Artificial Sequence
  Synthetic
  misc_feature (13)..(13): n is a, c, g, or u
cacacgguccggnagauga

SEQ ID NO: 117810 - RNA, 20 nt, Artificial Sequence
  Synthetic
  misc_feature (14)..(14): n is a, c, g, or u
gcacacgguccggnagauga

SEQ ID NO: 117811 - RNA, 21 nt, Artificial Sequence
  Synthetic
  misc_feature (15)..(15): n is a, c, g, or u
ugcacacgguccggnagauga

SEQ ID NO: 117812 - RNA, 22 nt, Artificial Sequence
  Synthetic
  misc_feature (16)..(16): n is a, c, g, or u
gugcacacgguccggnagauga

SEQ ID NO: 117813 - RNA, 23 nt, Artificial Sequence
  Synthetic
  misc_feature (17)..(17): n is a, c, g, or u
agugcacacgguccggnagauga

SEQ ID NO: 117814 - RNA, 24 nt, Artificial Sequence
  Synthetic
  misc_feature (18)..(18): n is a, c, g, or u
aagugcacacgguccggnagauga

SEQ ID NO: 117815 - RNA, 18 nt, Artificial Sequence
  Synthetic
gcaggguccaacugauga

SEQ ID NO: 117816 - RNA, 19 nt, Artificial Sequence
  Synthetic
ugcaggguccaacugauga

SEQ ID NO: 117817 - RNA, 20 nt, Artificial Sequence
  Synthetic
augcaggguccaacugauga

SEQ ID NO: 117818 - RNA, 21 nt, Artificial Sequence
  Synthetic
aaugcaggguccaacugauga

SEQ ID NO: 117819 - RNA, 22 nt, Artificial Sequence
  Synthetic
gaaugcaggguccaacugauga

SEQ ID NO: 117820 - RNA, 23 nt, Artificial Sequence
  Synthetic
ugaaugcaggguccaacugauga

SEQ ID NO: 117821 - RNA, 24 nt, Artificial Sequence
  Synthetic
uugaaugcaggguccaacugauga

SEQ ID NO: 117822 - RNA, 18 nt, Artificial Sequence
  Synthetic
auggcacuaguaaacuga

SEQ ID NO: 117823 - RNA, 19 nt, Artificial Sequence
  Synthetic
aauggcacuaguaaacuga

SEQ ID NO: 117824 - RNA, 20 nt, Artificial Sequence
  Synthetic
aaauggcacuaguaaacuga

SEQ ID NO: 117825 - RNA, 21 nt, Artificial Sequence
  Synthetic
caaauggcacuaguaaacuga

SEQ ID NO: 117826 - RNA, 22 nt, Artificial Sequence
  Synthetic
acaaauggcacuaguaaacuga

SEQ ID NO: 117827 - RNA, 23 nt, Artificial Sequence
  Synthetic
aacaaauggcacuaguaaacuga

SEQ ID NO: 117828 - RNA, 24 nt, Artificial Sequence
  Synthetic
gaacaaauggcacuaguaaacuga

SEQ ID NO: 117829 - RNA, 18 nt, Artificial Sequence
  Synthetic
agggcucacuguuccuga

SEQ ID NO: 117830 - RNA, 19 nt, Artificial Sequence
  Synthetic
cagggcucacuguuccuga

SEQ ID NO: 117831 - RNA, 20 nt, Artificial Sequence
  Synthetic
gcagggcucacuguuccuga

SEQ ID NO: 117832 - RNA, 21 nt, Artificial Sequence
  Synthetic
agcagggcucacuguuccuga

SEQ ID NO: 117833 - RNA, 22 nt, Artificial Sequence
  Synthetic
gagcagggcucacuguuccuga

SEQ ID NO: 117834 - RNA, 23 nt, Artificial Sequence
  Synthetic
ugagcagggcucacuguuccuga

SEQ ID NO: 117835 - RNA, 24 nt, Artificial Sequence
  Synthetic
cugagcagggcucacuguuccuga

SEQ ID NO: 117836 - RNA, 18 nt, Artificial Sequence
  Synthetic
  misc_feature (2)..(2): n is a, c, g, or u
  misc_feature (7)..(7): n is a, c, g, or u
gnagagncaguauucuga

SEQ ID NO: 117837 - RNA, 19 nt, Artificial Sequence
  Synthetic
  misc_feature (3)..(3): n is a, c, g, or u
  misc_feature (8)..(8): n is a, c, g, or u
ggnagagncaguauucuga

SEQ ID NO: 117838 - RNA, 20 nt, Artificial Sequence
  Synthetic
  misc_feature (4)..(4): n is a, c, g, or u
  misc_feature (9)..(9): n is a, c, g, or u
uggnagagncaguauucuga

SEQ ID NO: 117839 - RNA, 21 nt, Artificial Sequence
  Synthetic
  misc_feature (5)..(5): n is a, c, g, or u
  misc_feature (10)..(10): n is a, c, g, or u
auggnagagncaguauucuga

SEQ ID NO: 117840 - RNA, 22 nt, Artificial Sequence
  Synthetic
  misc_feature (6)..(6): n is a, c, g, or u
  misc_feature (11)..(11): n is a, c, g, or u
uauggnagagncaguauucuga

SEQ ID NO: 117841 - RNA, 23 nt, Artificial Sequence
  Synthetic
  misc_feature (7)..(7): n is a, c, g, or u
  misc_feature (12)..(12): n is a, c, g, or u
auauggnagagncaguauucuga

SEQ ID NO: 117842 - RNA, 24 nt, Artificial Sequence
  Synthetic
  misc_feature (8)..(8): n is a, c, g, or u
  misc_feature (13)..(13): n is a, c, g, or u
gauauggnagagncaguauucuga

SEQ ID NO: 117843 - RNA, 18 nt, Artificial Sequence
  Synthetic
ccaaucuggauuuucuga

SEQ ID NO: 117844 - RNA, 19 nt, Artificial Sequence
  Synthetic
cccaaucuggauuuucuga

SEQ ID NO: 117845 - RNA, 20 nt, Artificial Sequence
  Synthetic
ucccaaucuggauuuucuga

SEQ ID NO: 117846 - RNA, 21 nt, Artificial Sequence
  Synthetic
gucccaaucuggauuuucuga

SEQ ID NO: 117847 - RNA, 22 nt, Artificial Sequence
  Synthetic
ggucccaaucuggauuuucuga

SEQ ID NO: 117848 - RNA, 23 nt, Artificial Sequence
  Synthetic
aggucccaaucuggauuuucuga

SEQ ID NO: 117849 - RNA, 24 nt, Artificial Sequence
  Synthetic
gaggucccaaucuggauuuucuga

SEQ ID NO: 117850 - RNA, 18 nt, Artificial Sequence
  Synthetic
  misc_feature (6)..(6): n is a, c, g, or u
caacanguuggugaguga

SEQ ID NO: 117851 - RNA, 19 nt, Artificial Sequence
  Synthetic
  misc_feature (7)..(7): n is a, c, g, or u
acaacanguuggugaguga

SEQ ID NO: 117852 - RNA, 20 nt, Artificial Sequence
  Synthetic
  misc_feature (8)..(8): n is a, c, g, or u
gacaacanguuggugaguga

SEQ ID NO: 117853 - RNA, 21 nt, Artificial Sequence
  Synthetic
  misc_feature (9)..(9): n is a, c, g, or u
ggacaacanguuggugaguga

SEQ ID NO: 117854 - RNA, 22 nt, Artificial Sequence
  Synthetic
  misc_feature (10)..(10): n is a, c, g, or u
aggacaacanguuggugaguga

SEQ ID NO: 117855 - RNA, 23 nt, Artificial Sequence
  Synthetic
  misc_feature (11)..(11): n is a, c, g, or u
gaggacaacanguuggugaguga

SEQ ID NO: 117856 - RNA, 24 nt, Artificial Sequence
  Synthetic
  misc_feature (12)..(12): n is a, c, g, or u
ggaggacaacanguuggugaguga

SEQ ID NO: 117857 - RNA, 18 nt, Artificial Sequence
  Synthetic
ugcgacgugcagagguga

SEQ ID NO: 117858 - RNA, 19 nt, Artificial Sequence
  Synthetic
augcgacgugcagagguga

SEQ ID NO: 117859 - RNA, 20 nt, Artificial Sequence
  Synthetic
caugcgacgugcagagguga

SEQ ID NO: 117860 - RNA, 21 nt, Artificial Sequence
  Synthetic
ccaugcgacgugcagagguga

SEQ ID NO: 117861 - RNA, 22 nt, Artificial Sequence
  Synthetic
uccaugcgacgugcagagguga

SEQ ID NO: 117862 - RNA, 23 nt, Artificial Sequence
  Synthetic
cuccaugcgacgugcagagguga

SEQ ID NO: 117863 - RNA, 24 nt, Artificial Sequence
  Synthetic
ucuccaugcgacgugcagagguga

SEQ ID NO: 117864 - RNA, 18 nt, Artificial Sequence
  Synthetic
cugagugccguaugguga

SEQ ID NO: 117865 - RNA, 19 nt, Artificial Sequence
  Synthetic
ccugagugccguaugguga

SEQ ID NO: 117866 - RNA, 20 nt, Artificial Sequence
  Synthetic
gccugagugccguaugguga

SEQ ID NO: 117867 - RNA, 21 nt, Artificial Sequence
  Synthetic
ugccugagugccguaugguga

SEQ ID NO: 117868 - RNA, 22 nt, Artificial Sequence
  Synthetic
uugccugagugccguaugguga

SEQ ID NO: 117869 - RNA, 23 nt, Artificial Sequence
  Synthetic
cuugccugagugccguaugguga

SEQ ID NO: 117870 - RNA, 24 nt, Artificial Sequence
  Synthetic
gcuugccugagugccguaugguga

SEQ ID NO: 117871 - RNA, 18 nt, Artificial Sequence
  Synthetic
  misc_feature (3)..(3): n is a, c, g, or u
uunccccuagaaaauuga

SEQ ID NO: 117872 - RNA, 19 nt, Artificial Sequence
  Synthetic
  misc_feature (4)..(4): n is a, c, g, or u
guunccccuagaaaauuga

SEQ ID NO: 117873 - RNA, 20 nt, Artificial Sequence
  Synthetic
  misc_feature (5)..(5): n is a, c, g, or u
uguunccccuagaaaauuga

SEQ ID NO: 117874 - RNA, 21 nt, Artificial Sequence
  Synthetic
  misc_feature (6)..(6): n is a, c, g, or u
guguunccccuagaaaauuga

SEQ ID NO: 117875 - RNA, 22 nt, Artificial Sequence
  Synthetic
  misc_feature (7)..(7): n is a, c, g, or u
gguguunccccuagaaaauuga

SEQ ID NO: 117876 - RNA, 23 nt, Artificial Sequence
  Synthetic
  misc_feature (8)..(8): n is a, c, g, or u
ggguguunccccuagaaaauuga

SEQ ID NO: 117877 - RNA, 24 nt, Artificial Sequence
  Synthetic
  misc_feature (9)..(9): n is a, c, g, or u
cggguguunccccuagaaaauuga

SEQ ID NO: 117878 - RNA, 18 nt, Artificial Sequence
  Synthetic
aacauagagguuccuuga

SEQ ID NO: 117879 - RNA, 19 nt, Artificial Sequence
  Synthetic
aaacauagagguuccuuga

SEQ ID NO: 117880 - RNA, 20 nt, Artificial Sequence
  Synthetic
gaaacauagagguuccuuga

SEQ ID NO: 117881 - RNA, 21 nt, Artificial Sequence
  Synthetic
ggaaacauagagguuccuuga

SEQ ID NO: 117882 - RNA, 22 nt, Artificial Sequence
  Synthetic
gggaaacauagagguuccuuga

SEQ ID NO: 117883 - RNA, 23 nt, Artificial Sequence
  Synthetic
agggaaacauagagguuccuuga

SEQ ID NO: 117884 - RNA, 24 nt, Artificial Sequence
  Synthetic
gagggaaacauagagguuccuuga

SEQ ID NO: 117885 - RNA, 18 nt, Artificial Sequence
  Synthetic
  misc_feature (14)..(14): n is a, c, g, or u
ggcccauauuaacnuuga

SEQ ID NO: 117886 - RNA, 19 nt, Artificial Sequence
  Synthetic
  misc_feature (15)..(15): n is a, c, g, or u
aggcccauauuaacnuuga

SEQ ID NO: 117887 - RNA, 20 nt, Artificial Sequence
  Synthetic
  misc_feature (16)..(16): n is a, c, g, or u
uaggcccauauuaacnuuga

SEQ ID NO: 117888 - RNA, 21 nt, Artificial Sequence
  Synthetic
  misc_feature (17)..(17): n is a, c, g, or u
uuaggcccauauuaacnuuga

SEQ ID NO: 117889 - RNA, 22 nt, Artificial Sequence
  Synthetic
  misc_feature (18)..(18): n is a, c, g, or u
uuuaggcccauauuaacnuuga

SEQ ID NO: 117890 - RNA, 23 nt, Artificial Sequence
  Synthetic
  misc_feature (19)..(19): n is a, c, g, or u
uuuuaggcccauauuaacnuuga

SEQ ID NO: 117891 - RNA, 24 nt, Artificial Sequence
  Synthetic
  misc_feature (20)..(20): n is a, c, g, or u
uuuuuaggcccauauuaacnuuga

SEQ ID NO: 117892 - RNA, 18 nt, Artificial Sequence
  Synthetic
  misc_feature (6)..(6): n is a, c, g, or u
  misc_feature (17)..(17): n is a, c, g, or u
ucgagnagaucucgaana

SEQ ID NO: 117893 - RNA, 19 nt, Artificial Sequence
  Synthetic
  misc_feature (7)..(7): n is a, c, g, or u
  misc_feature (18)..(18): n is a, c, g, or u
gucgagnagaucucgaana

SEQ ID NO: 117894 - RNA, 20 nt, Artificial Sequence
  Synthetic
  misc_feature (8)..(8): n is a, c, g, or u
  misc_feature (19)..(19): n is a, c, g, or u
ugucgagnagaucucgaana

SEQ ID NO: 117895 - RNA, 21 nt, Artificial Sequence
  Synthetic
  misc_feature (9)..(9): n is a, c, g, or u
  misc_feature (20)..(20): n is a, c, g, or u
gugucgagnagaucucgaana

SEQ ID NO: 117896 - RNA, 22 nt, Artificial Sequence
  Synthetic
  misc_feature (10)..(10): n is a, c, g, or u
  misc_feature (21)..(21): n is a, c, g, or u
ggugucgagnagaucucgaana

SEQ ID NO: 117897 - RNA, 23 nt, Artificial Sequence
  Synthetic
  misc_feature (11)..(11): n is a, c, g, or u
  misc_feature (22)..(22): n is a, c, g, or u
cggugucgagnagaucucgaana

SEQ ID NO: 117898 - RNA, 24 nt, Artificial Sequence
  Synthetic
  misc_feature (12)..(12): n is a, c, g, or u
  misc_feature (23)..(23): n is a, c, g, or u
gcggugucgagnagaucucgaana

SEQ ID NO: 117899 - RNA, 18 nt, Artificial Sequence
  Synthetic
  misc_feature (2)..(2): n is a, c, g, or u
  misc_feature (17)..(17): n is a, c, g, or u
cncuuagagguggagana

SEQ ID NO: 117900 - RNA, 19 nt, Artificial Sequence
  Synthetic
  misc_feature (3)..(3): n is a, c, g, or u
  misc_feature (18)..(18): n is a, c, g, or u
ucncuuagagguggagana

SEQ ID NO: 117901 - RNA, 20 nt, Artificial Sequence
  Synthetic
  misc_feature (4)..(4): n is a, c, g, or u
  misc_feature (19)..(19): n is a, c, g, or u
gucncuuagagguggagana

SEQ ID NO: 117902 - RNA, 21 nt, Artificial Sequence
  Synthetic
  misc_feature (5)..(5): n is a, c, g, or u
  misc_feature (20)..(20): n is a, c, g, or u
ugucncuuagagguggagana

SEQ ID NO: 117903 - RNA, 22 nt, Artificial Sequence
  Synthetic
  misc_feature (6)..(6): n is a, c, g, or u
  misc_feature (21)..(21): n is a, c, g, or u
gugucncuuagagguggagana

SEQ ID NO: 117904 - RNA, 23 nt, Artificial Sequence
  Synthetic
  misc_feature (7)..(7): n is a, c, g, or u
  misc_feature (22)..(22): n is a, c, g, or u
agugucncuuagagguggagana

SEQ ID NO: 117905 - RNA, 24 nt, Artificial Sequence
  Synthetic
  misc_feature (8)..(8): n is a, c, g, or u
  misc_feature (23)..(23): n is a, c, g, or u
gagugucncuuagagguggagana

SEQ ID NO: 117906 - RNA, 18 nt, Artificial Sequence
  Synthetic
  misc_feature (17)..(17): n is a, c, g, or u
agugcacacgguccggna

SEQ ID NO: 117907 - RNA, 19 nt, Artificial Sequence
  Synthetic
  misc_feature (18)..(18): n is a, c, g, or u
aagugcacacgguccggna

SEQ ID NO: 117908 - RNA, 20 nt, Artificial Sequence
  Synthetic
  misc_feature (19)..(19): n is a, c, g, or u
gaagugcacacgguccggna

SEQ ID NO: 117909 - RNA, 18 nt, Artificial Sequence
  Synthetic
  misc_feature (17)..(17): n is a, c, g, or u
aaauugguaacagcggna

SEQ ID NO: 117910 - RNA, 19 nt, Artificial Sequence
  Synthetic
  misc_feature (18)..(18): n is a, c, g, or u
aaaauugguaacagcggna

SEQ ID NO: 117911 - RNA, 20 nt, Artificial Sequence
  Synthetic
  misc_feature (19)..(19): n is a, c, g, or u
gaaaauugguaacagcggna

SEQ ID NO: 117912 - RNA, 21 nt, Artificial Sequence
  Synthetic
  misc_feature (20)..(20): n is a, c, g, or u
agaaaauugguaacagcggna

SEQ ID NO: 117913 - RNA, 22 nt, Artificial Sequence
  Synthetic
  misc_feature (21)..(21): n is a, c, g, or u
aagaaaauugguaacagcggna

SEQ ID NO: 117914 - RNA, 23 nt, Artificial Sequence
  Synthetic
  misc_feature (22)..(22): n is a, c, g, or u
aaagaaaauugguaacagcggna

SEQ ID NO: 117915 - RNA, 24 nt, Artificial Sequence
  Synthetic
  misc_feature (23)..(23): n is a, c, g, or u
aaaagaaaauugguaacagcggna

SEQ ID NO: 117916 - RNA, 18 nt, Artificial Sequence
  Synthetic
  misc_feature (5)..(5): n is a, c, g, or u
  misc_feature (14)..(14): n is a, c, g, or u
  misc_feature (17)..(17): n is a, c, g, or u
gauanccacauugnguna

SEQ ID NO: 117917 - RNA, 19 nt, Artificial Sequence
  Synthetic
  misc_feature (6)..(6): n is a, c, g, or u
  misc_feature (15)..(15): n is a, c, g, or u
  misc_feature (18)..(18): n is a, c, g, or u
ggauanccacauugnguna

SEQ ID NO: 117918 - RNA, 20 nt, Artificial Sequence
  Synthetic
  misc_feature (7)..(7): n is a, c, g, or u
  misc_feature (16)..(16): n is a, c, g, or u
  misc_feature (19)..(19): n is a, c, g, or u
aggauanccacauugnguna

SEQ ID NO: 117919 - RNA, 21 nt, Artificial Sequence
  Synthetic
  misc_feature (8)..(8): n is a, c, g, or u
  misc_feature (17)..(17): n is a, c, g, or u
  misc_feature (20)..(20): n is a, c, g, or u
caggauanccacauugnguna

SEQ ID NO: 117920 - RNA, 22 nt, Artificial Sequence
  Synthetic
  misc_feature (9)..(9): n is a, c, g, or u
  misc_feature (18)..(18): n is a, c, g, or u
  misc_feature (21)..(21): n is a, c, g, or u
gcaggauanccacauugnguna

SEQ ID NO: 117921 - RNA, 23 nt, Artificial Sequence
  Synthetic
  misc_feature (10)..(10): n is a, c, g, or u
  misc_feature (19)..(19): n is a, c, g, or u
  misc_feature (22)..(22): n is a, c, g, or u
agcaggauanccacauugnguna

SEQ ID NO: 117922 - RNA, 24 nt, Artificial Sequence
  Synthetic
  misc_feature (11)..(11): n is a, c, g, or u
  misc_feature (20)..(20): n is a, c, g, or u
  misc_feature (23)..(23): n is a, c, g, or u
aagcaggauanccacauugnguna

SEQ ID NO: 117923 - RNA, 18 nt, Artificial Sequence
  Synthetic
  misc_feature (10)..(10): n is a, c, g, or u
uccaaaaganaccaaaua

SEQ ID NO: 117924 - RNA, 19 nt, Artificial Sequence
  Synthetic
  misc_feature (11)..(11): n is a, c, g, or u
cuccaaaaganaccaaaua

SEQ ID NO: 117925 - RNA, 20 nt, Artificial Sequence
  Synthetic
  misc_feature (12)..(12): n is a, c, g, or u
acuccaaaaganaccaaaua

SEQ ID NO: 117926 - RNA, 21 nt, Artificial Sequence
  Synthetic
  misc_feature (13)..(13): n is a, c, g, or u
cacuccaaaaganaccaaaua

SEQ ID NO: 117927 - RNA, 22 nt, Artificial Sequence
  Synthetic
  misc_feature (14)..(14): n is a, c, g, or u
acacuccaaaaganaccaaaua

SEQ ID NO: 117928 - RNA, 23 nt, Artificial Sequence
  Synthetic
  misc_feature (15)..(15): n is a, c, g, or u
cacacuccaaaaganaccaaaua

SEQ ID NO: 117929 - RNA, 24 nt, Artificial Sequence
  Synthetic
  misc_feature (16)..(16): n is a, c, g, or u
ccacacuccaaaaganaccaaaua

SEQ ID NO: 117930 - RNA, 18 nt, Artificial Sequence
  Synthetic
  misc_feature (10)..(10): n is a, c, g, or u
cauauuaacnuugacaua

SEQ ID NO: 117931 - RNA, 19 nt, Artificial Sequence
  Synthetic
  misc_feature (11)..(11): n is a, c, g, or u
ccauauuaacnuugacaua

SEQ ID NO: 117932 - RNA, 20 nt, Artificial Sequence
  Synthetic
  misc_feature (12)..(12): n is a, c, g, or u
cccauauuaacnuugacaua

SEQ ID NO: 117933 - RNA, 21 nt, Artificial Sequence
  Synthetic
  misc_feature (13)..(13): n is a, c, g, or u
gcccauauuaacnuugacaua

SEQ ID NO: 117934 - RNA, 22 nt, Artificial Sequence
  Synthetic
  misc_feature (14)..(14): n is a, c, g, or u
ggcccauauuaacnuugacaua

SEQ ID NO: 117935 - RNA, 23 nt, Artificial Sequence
  Synthetic
  misc_feature (15)..(15): n is a, c, g, or u
aggcccauauuaacnuugacaua

SEQ ID NO: 117936 - RNA, 24 nt, Artificial Sequence
  Synthetic
  misc_feature (16)..(16): n is a, c, g, or u
uaggcccauauuaacnuugacaua

SEQ ID NO: 117937 - RNA, 18 nt, Artificial Sequence
  Synthetic
  misc_feature (1)..(1): n is a, c, g, or u
ngcuuguauacaugcaua

SEQ ID NO: 117938 - RNA, 19 nt, Artificial Sequence
  Synthetic
  misc_feature (2)..(2): n is a, c, g, or u
ungcuuguauacaugcaua

SEQ ID NO: 117939 - RNA, 20 nt, Artificial Sequence
  Synthetic
  misc_feature (3)..(3): n is a, c, g, or u
uungcuuguauacaugcaua

SEQ ID NO: 117940 - RNA, 21 nt, Artificial Sequence
  Synthetic
  misc_feature (4)..(4): n is a, c, g, or u
uuungcuuguauacaugcaua

SEQ ID NO: 117941 - RNA, 22 nt, Artificial Sequence
  Synthetic
  misc_feature (5)..(5): n is a, c, g, or u
guuungcuuguauacaugcaua

SEQ ID NO: 117942 - RNA, 23 nt, Artificial Sequence
  Synthetic
  misc_feature (6)..(6): n is a, c, g, or u
uguuungcuuguauacaugcaua

SEQ ID NO: 117943 - RNA, 24 nt, Artificial Sequence
  Synthetic
  misc_feature (7)..(7): n is a, c, g, or u
cuguuungcuuguauacaugcaua

SEQ ID NO: 117944 - RNA, 18 nt, Artificial Sequence
  Synthetic
cucuaaggccucccgaua

SEQ ID NO: 117945 - RNA, 19 nt, Artificial Sequence
  Synthetic
acucuaaggccucccgaua

SEQ ID NO: 117946 - RNA, 20 nt, Artificial Sequence
  Synthetic
gacucuaaggccucccgaua

SEQ ID NO: 117947 - RNA, 21 nt, Artificial Sequence
  Synthetic
agacucuaaggccucccgaua

SEQ ID NO: 117948 - RNA, 22 nt, Artificial Sequence
  Synthetic
gagacucuaaggccucccgaua

SEQ ID NO: 117949 - RNA, 23 nt, Artificial Sequence
  Synthetic
ggagacucuaaggccucccgaua

SEQ ID NO: 117950 - RNA, 24 nt, Artificial Sequence
  Synthetic
cggagacucuaaggccucccgaua

SEQ ID NO: 117951 - RNA, 18 nt, Artificial Sequence
  Synthetic
cagacacauccagcgaua

SEQ ID NO: 117952 - RNA, 19 nt, Artificial Sequence
  Synthetic
gcagacacauccagcgaua

SEQ ID NO: 117953 - RNA, 20 nt, Artificial Sequence
  Synthetic
cgcagacacauccagcgaua

SEQ ID NO: 117954 - RNA, 21 nt, Artificial Sequence
  Synthetic
ccgcagacacauccagcgaua

SEQ ID NO: 117955 - RNA, 22 nt, Artificial Sequence
  Synthetic
gccgcagacacauccagcgaua

SEQ ID NO: 117956 - RNA, 23 nt, Artificial Sequence
  Synthetic
cgccgcagacacauccagcgaua

SEQ ID NO: 117957 - RNA, 24 nt, Artificial Sequence
  Synthetic
acgccgcagacacauccagcgaua

SEQ ID NO: 117958 - RNA, 18 nt, Artificial Sequence
  Synthetic
  misc_feature (15)..(15): n is a, c, g, or u
auugguaacagcggnaua

SEQ ID NO: 117959 - RNA, 19 nt, Artificial Sequence
  Synthetic
  misc_feature (16)..(16): n is a, c, g, or u
aauugguaacagcggnaua

SEQ ID NO: 117960 - RNA, 20 nt, Artificial Sequence
  Synthetic
  misc_feature (17)..(17): n is a, c, g, or u
aaauugguaacagcggnaua

SEQ ID NO: 117961 - RNA, 21 nt, Artificial Sequence
  Synthetic
  misc_feature (18)..(18): n is a, c, g, or u
aaaauugguaacagcggnaua

SEQ ID NO: 117962 - RNA, 22 nt, Artificial Sequence
  Synthetic
  misc_feature (19)..(19): n is a, c, g, or u
gaaaauugguaacagcggnaua

SEQ ID NO: 117963 - RNA, 23 nt, Artificial Sequence
  Synthetic
  misc_feature (20)..(20): n is a, c, g, or u
agaaaauugguaacagcggnaua

SEQ ID NO: 117964 - RNA, 24 nt, Artificial Sequence
  Synthetic
  misc_feature (21)..(21): n is a, c, g, or u
aagaaaauugguaacagcggnaua

SEQ ID NO: 117965 - RNA, 18 nt, Artificial Sequence
  Synthetic
  misc_feature (1)..(1): n is a, c, g, or u
naccacaucauccauaua

SEQ ID NO: 117966 - RNA, 19 nt, Artificial Sequence
  Synthetic
  misc_feature (2)..(2): n is a, c, g, or u
anaccacaucauccauaua

SEQ ID NO: 117967 - RNA, 20 nt, Artificial Sequence
  Synthetic
  misc_feature (3)..(3): n is a, c, g, or u
aanaccacaucauccauaua

SEQ ID NO: 117968 - RNA, 21 nt, Artificial Sequence
  Synthetic
  misc_feature (4)..(4): n is a, c, g, or u
caanaccacaucauccauaua

SEQ ID NO: 117969 - RNA, 22 nt, Artificial Sequence
  Synthetic
  misc_feature (5)..(5): n is a, c, g, or u
ccaanaccacaucauccauaua

SEQ ID NO: 117970 - RNA, 23 nt, Artificial Sequence
  Synthetic
  misc_feature (6)..(6): n is a, c, g, or u
cccaanaccacaucauccauaua

SEQ ID NO: 117971 - RNA, 24 nt, Artificial Sequence
  Synthetic
  misc_feature (7)..(7): n is a, c, g, or u
ccccaanaccacaucauccauaua

SEQ ID NO: 117972 - RNA, 18 nt, Artificial Sequence
  Synthetic
ggcauuugguggucuaua

SEQ ID NO: 117973 - RNA, 19 nt, Artificial Sequence
  Synthetic
gggcauuugguggucuaua

SEQ ID NO: 117974 - RNA, 20 nt, Artificial Sequence
  Synthetic
ggggcauuugguggucuaua

SEQ ID NO: 117975 - RNA, 21 nt, Artificial Sequence
  Synthetic
aggggcauuugguggucuaua

SEQ ID NO: 117976 - RNA, 22 nt, Artificial Sequence
  Synthetic
uaggggcauuugguggucuaua

SEQ ID NO: 117977 - RNA, 23 nt, Artificial Sequence
  Synthetic
auaggggcauuugguggucuaua

SEQ ID NO: 117978 - RNA, 24 nt, Artificial Sequence
  Synthetic
gauaggggcauuugguggucuaua

SEQ ID NO: 117979 - RNA, 18 nt, Artificial Sequence
  Synthetic
ugaggguuuaaauguaua

SEQ ID NO: 117980 - RNA, 19 nt, Artificial Sequence
  Synthetic
  misc_feature (1)..(1): n is a, c, g, or u
nugaggguuuaaauguaua

SEQ ID NO: 117981 - RNA, 20 nt, Artificial Sequence
  Synthetic
  misc_feature (2)..(2): n is a, c, g, or u
unugaggguuuaaauguaua

SEQ ID NO: 117982 - RNA, 21 nt, Artificial Sequence
  Synthetic
  misc_feature (3)..(3): n is a, c, g, or u
uunugaggguuuaaauguaua

SEQ ID NO: 117983 - RNA, 22 nt, Artificial Sequence
  Synthetic
  misc_feature (4)..(4): n is a, c, g, or u
uuunugaggguuuaaauguaua

SEQ ID NO: 117984 - RNA, 23 nt, Artificial Sequence
  Synthetic
  misc_feature (5)..(5): n is a, c, g, or u
uuuunugaggguuuaaauguaua

SEQ ID NO: 117985 - RNA, 24 nt, Artificial Sequence
  Synthetic
  misc_feature (6)..(6): n is a, c, g, or u
guuuunugaggguuuaaauguaua

SEQ ID NO: 117986 - RNA, 18 nt, Artificial Sequence
  Synthetic
acugaacaaauggcacua

SEQ ID NO: 117987 - RNA, 19 nt, Artificial Sequence
  Synthetic
cacugaacaaauggcacua

SEQ ID NO: 117988 - RNA, 20 nt, Artificial Sequence
  Synthetic
ccacugaacaaauggcacua

SEQ ID NO: 117989 - RNA, 21 nt, Artificial Sequence
  Synthetic
accacugaacaaauggcacua

SEQ ID NO: 117990 - RNA, 22 nt, Artificial Sequence
  Synthetic
aaccacugaacaaauggcacua

SEQ ID NO: 117991 - RNA, 23 nt, Artificial Sequence
  Synthetic
gaaccacugaacaaauggcacua

SEQ ID NO: 117992 - RNA, 24 nt, Artificial Sequence
  Synthetic
cgaaccacugaacaaauggcacua

SEQ ID NO: 117993 - RNA, 18 nt, Artificial Sequence
  Synthetic
  misc_feature (6)..(6): n is a, c, g, or u
acauunggauaaaaccua

SEQ ID NO: 117994 - RNA, 19 nt, Artificial Sequence
  Synthetic
  misc_feature (7)..(7): n is a, c, g, or u
aacauunggauaaaaccua

SEQ ID NO: 117995 - RNA, 20 nt, Artificial Sequence
  Synthetic
  misc_feature (8)..(8): n is a, c, g, or u
uaacauunggauaaaaccua

SEQ ID NO: 117996 - RNA, 21 nt, Artificial Sequence
  Synthetic
  misc_feature (9)..(9): n is a, c, g, or u
guaacauunggauaaaaccua

SEQ ID NO: 117997 - RNA, 22 nt, Artificial Sequence
  Synthetic
  misc_feature (10)..(10): n is a, c, g, or u
aguaacauunggauaaaaccua

SEQ ID NO: 117998 - RNA, 23 nt, Artificial Sequence
  Synthetic
  misc_feature (11)..(11): n is a, c, g, or u
uaguaacauunggauaaaaccua

SEQ ID NO: 117999 - RNA, 24 nt, Artificial Sequence
  Synthetic
  misc_feature (12)..(12): n is a, c, g, or u
uuaguaacauunggauaaaaccua

SEQ ID NO: 118000 - RNA, 18 nt, Artificial Sequence
  Synthetic
gagggaguucuucuucua

SEQ ID NO: 118001 - RNA, 19 nt, Artificial Sequence
  Synthetic
cgagggaguucuucuucua

SEQ ID NO: 118002 - RNA, 20 nt, Artificial Sequence
  Synthetic
gcgagggaguucuucuucua

SEQ ID NO: 118003 - RNA, 18 nt, Artificial Sequence
  Synthetic
gccuacagccuccuagua

SEQ ID NO: 118004 - RNA, 19 nt, Artificial Sequence
  Synthetic
ugccuacagccuccuagua

SEQ ID NO: 118005 - RNA, 20 nt, Artificial Sequence
  Synthetic
augccuacagccuccuagua

SEQ ID NO: 118006 - RNA, 21 nt, Artificial Sequence
  Synthetic
uaugccuacagccuccuagua

SEQ ID NO: 118007 - RNA, 22 nt, Artificial Sequence
  Synthetic
uuaugccuacagccuccuagua

SEQ ID NO: 118008 - RNA, 23 nt, Artificial Sequence
  Synthetic
uuuaugccuacagccuccuagua

SEQ ID NO: 118009 - RNA, 24 nt, Artificial Sequence
  Synthetic
auuuaugccuacagccuccuagua

SEQ ID NO: 118010 - RNA, 18 nt, Artificial Sequence
  Synthetic
cagcgccgacgggacgua

SEQ ID NO: 118011 - RNA, 19 nt, Artificial Sequence
  Synthetic
ucagcgccgacgggacgua

SEQ ID NO: 118012 - RNA, 20 nt, Artificial Sequence
  Synthetic
uucagcgccgacgggacgua

SEQ ID NO: 118013 - RNA, 18 nt, Artificial Sequence
  Synthetic
  misc_feature (7)..(8): n is a, c, g, or u
uuaaagnnagguaccgua

SEQ ID NO: 118014 - RNA, 19 nt, Artificial Sequence
  Synthetic
  misc_feature (8)..(9): n is a, c, g, or u
auuaaagnnagguaccgua

SEQ ID NO: 118015 - RNA, 20 nt, Artificial Sequence
  Synthetic
  misc_feature (9)..(10): n is a, c, g, or u
gauuaaagnnagguaccgua

SEQ ID NO: 118016 - RNA, 21 nt, Artificial Sequence
  Synthetic
  misc_feature (10)..(11): n is a, c, g, or u
ggauuaaagnnagguaccgua

SEQ ID NO: 118017 - RNA, 22 nt, Artificial Sequence
  Synthetic
  misc_feature (11)..(12): n is a, c, g, or u
aggauuaaagnnagguaccgua

SEQ ID NO: 118018 - RNA, 23 nt, Artificial Sequence
  Synthetic
  misc_feature (1)..(1): n is a, c, g, or u
  misc_feature (12)..(13): n is a, c, g, or u
naggauuaaagnnagguaccgua

SEQ ID NO: 118019 - RNA, 24 nt, Artificial Sequence
  Synthetic
  misc_feature (2)..(2): n is a, c, g, or u
  misc_feature (13)..(14): n is a, c, g, or u
unaggauuaaagnnagguaccgua

SEQ ID NO: 118020 - RNA, 18 nt, Artificial Sequence
  Synthetic
agacggggaguccgcgua

SEQ ID NO: 118021 - RNA, 19 nt, Artificial Sequence
  Synthetic
cagacggggaguccgcgua

SEQ ID NO: 118022 - RNA, 20 nt, Artificial Sequence
  Synthetic
acagacggggaguccgcgua

SEQ ID NO: 118023 - RNA, 18 nt, Artificial Sequence
  Synthetic
uugaugauccuggaauua

SEQ ID NO: 118024 - RNA, 19 nt, Artificial Sequence
  Synthetic
guugaugauccuggaauua

SEQ ID NO: 118025 - RNA, 20 nt, Artificial Sequence
  Synthetic
  misc_feature (1)..(1): n is a, c, g, or u
nguugaugauccuggaauua

SEQ ID NO: 118026 - RNA, 21 nt, Artificial Sequence
  Synthetic
  misc_feature (2)..(2): n is a, c, g, or u
unguugaugauccuggaauua

SEQ ID NO: 118027 - RNA, 22 nt, Artificial Sequence
  Synthetic
  misc_feature (3)..(3): n is a, c, g, or u
gunguugaugauccuggaauua

SEQ ID NO: 118028 - RNA, 23 nt, Artificial Sequence
  Synthetic
  misc_feature (4)..(4): n is a, c, g, or u
ggunguugaugauccuggaauua

SEQ ID NO: 118029 - RNA, 24 nt, Artificial Sequence
  Synthetic
  misc_feature (5)..(5): n is a, c, g, or u
uggunguugaugauccuggaauua

SEQ ID NO: 118030 - RNA, 18 nt, Artificial Sequence
  Synthetic
  misc_feature (8)..(8): n is a, c, g, or u
augaacangagaugauua

SEQ ID NO: 118031 - RNA, 19 nt, Artificial Sequence
  Synthetic
  misc_feature (9)..(9): n is a, c, g, or u
caugaacangagaugauua

SEQ ID NO: 118032 - RNA, 20 nt, Artificial Sequence
  Synthetic
  misc_feature (10)..(10): n is a, c, g, or u
acaugaacangagaugauua

SEQ ID NO: 118033 - RNA, 21 nt, Artificial Sequence
  Synthetic
  misc_feature (11)..(11): n is a, c, g, or u
gacaugaacangagaugauua

SEQ ID NO: 118034 - RNA, 22 nt, Artificial Sequence
  Synthetic
  misc_feature (12)..(12): n is a, c, g, or u
ggacaugaacangagaugauua

SEQ ID NO: 118035 - RNA, 23 nt, Artificial Sequence
  Synthetic
  misc_feature (13)..(13): n is a, c, g, or u
aggacaugaacangagaugauua

SEQ ID NO: 118036 - RNA, 24 nt, Artificial Sequence
  Synthetic
  misc_feature (14)..(14): n is a, c, g, or u
uaggacaugaacangagaugauua

SEQ ID NO: 118037 - RNA, 18 nt, Artificial Sequence
  Synthetic
  misc_feature (8)..(8): n is a, c, g, or u
  misc_feature (14)..(14): n is a, c, g, or u
ucagauanuguuuncuua

SEQ ID NO: 118038 - RNA, 19 nt, Artificial Sequence
  Synthetic
  misc_feature (9)..(9): n is a, c, g, or u
  misc_feature (15)..(15): n is a, c, g, or u
uucagauanuguuuncuua

SEQ ID NO: 118039 - RNA, 20 nt, Artificial Sequence
  Synthetic
  misc_feature (10)..(10): n is a, c, g, or u
  misc_feature (16)..(16): n is a, c, g, or u
guucagauanuguuuncuua

SEQ ID NO: 118040 - RNA, 21 nt, Artificial Sequence
  Synthetic
  misc_feature (11)..(11): n is a, c, g, or u
  misc_feature (17)..(17): n is a, c, g, or u
gguucagauanuguuuncuua

SEQ ID NO: 118041 - RNA, 22 nt, Artificial Sequence
  Synthetic
  misc_feature (12)..(12): n is a, c, g, or u
  misc_feature (18)..(18): n is a, c, g, or u
agguucagauanuguuuncuua

SEQ ID NO: 118042 - RNA, 23 nt, Artificial Sequence
  Synthetic
  misc_feature (13)..(13): n is a, c, g, or u
  misc_feature (19)..(19): n is a, c, g, or u
aagguucagauanuguuuncuua

SEQ ID NO: 118043 - RNA, 24 nt, Artificial Sequence
  Synthetic
  misc_feature (14)..(14): n is a, c, g, or u
  misc_feature (20)..(20): n is a, c, g, or u
aaagguucagauanuguuuncuua

SEQ ID NO: 118044 - RNA, 18 nt, Artificial Sequence
  Synthetic
aguccaagaguccucuua

SEQ ID NO: 118045 - RNA, 19 nt, Artificial Sequence
  Synthetic
aaguccaagaguccucuua

SEQ ID NO: 118046 - RNA, 20 nt, Artificial Sequence
  Synthetic
aaaguccaagaguccucuua

SEQ ID NO: 118047 - RNA, 21 nt, Artificial Sequence
  Synthetic
gaaaguccaagaguccucuua

SEQ ID NO: 118048 - RNA, 22 nt, Artificial Sequence
  Synthetic
ugaaaguccaagaguccucuua

SEQ ID NO: 118049 - RNA, 23 nt, Artificial Sequence
  Synthetic
cugaaaguccaagaguccucuua

SEQ ID NO: 118050 - RNA, 24 nt, Artificial Sequence
  Synthetic
gcugaaaguccaagaguccucuua

SEQ ID NO: 118051 - RNA, 18 nt, Artificial Sequence
  Synthetic
acauaucccaugaaguua

SEQ ID NO: 118052 - RNA, 19 nt, Artificial Sequence
  Synthetic
uacauaucccaugaaguua

SEQ ID NO: 118053 - RNA, 20 nt, Artificial Sequence
  Synthetic
uuacauaucccaugaaguua

SEQ ID NO: 118054 - RNA, 21 nt, Artificial Sequence
  Synthetic
auuacauaucccaugaaguua

SEQ ID NO: 118055 - RNA, 22 nt, Artificial Sequence
  Synthetic
aauuacauaucccaugaaguua

SEQ ID NO: 118056 - RNA, 23 nt, Artificial Sequence
  Synthetic
caauuacauaucccaugaaguua

SEQ ID NO: 118057 - RNA, 24 nt, Artificial Sequence
  Synthetic
ccaauuacauaucccaugaaguua

SEQ ID NO: 118058 - RNA, 18 nt, Artificial Sequence
  Synthetic
  misc_feature (3)..(3): n is a, c, g, or u
  misc_feature (12)..(12): n is a, c, g, or u
uangguuugaunccuuua

SEQ ID NO: 118059 - RNA, 19 nt, Artificial Sequence
  Synthetic
  misc_feature (4)..(4): n is a, c, g, or u
  misc_feature (13)..(13): n is a, c, g, or u
auangguuugaunccuuua

SEQ ID NO: 118060 - RNA, 20 nt, Artificial Sequence
  Synthetic
  misc_feature (5)..(5): n is a, c, g, or u
  misc_feature (14)..(14): n is a, c, g, or u
aauangguuugaunccuuua

SEQ ID NO: 118061 - RNA, 21 nt, Artificial Sequence
  Synthetic
  misc_feature (6)..(6): n is a, c, g, or u
  misc_feature (15)..(15): n is a, c, g, or u
uaauangguuugaunccuuua

SEQ ID NO: 118062 - RNA, 22 nt, Artificial Sequence
  Synthetic
  misc_feature (7)..(7): n is a, c, g, or u
  misc_feature (16)..(16): n is a, c, g, or u
auaauangguuugaunccuuua

SEQ ID NO: 118063 - RNA, 23 nt, Artificial Sequence
  Synthetic
  misc_feature (8)..(8): n is a, c, g, or u
  misc_feature (17)..(17): n is a, c, g, or u
gauaauangguuugaunccuuua

SEQ ID NO: 118064 - RNA, 24 nt, Artificial Sequence
  Synthetic
  misc_feature (9)..(9): n is a, c, g, or u
  misc_feature (18)..(18): n is a, c, g, or u
ggauaauangguuugaunccuuua

SEQ ID NO: 118065 - RNA, 18 nt, Artificial Sequence
  Synthetic
gaagcuccaaauucuuua

SEQ ID NO: 118066 - RNA, 19 nt, Artificial Sequence
  Synthetic
agaagcuccaaauucuuua

SEQ ID NO: 118067 - RNA, 20 nt, Artificial Sequence
  Synthetic
cagaagcuccaaauucuuua

SEQ ID NO: 118068 - RNA, 21 nt, Artificial Sequence
  Synthetic
acagaagcuccaaauucuuua

SEQ ID NO: 118069 - RNA, 22 nt, Artificial Sequence
  Synthetic
cacagaagcuccaaauucuuua

SEQ ID NO: 118070 - RNA, 23 nt, Artificial Sequence
  Synthetic
ccacagaagcuccaaauucuuua

SEQ ID NO: 118071 - RNA, 24 nt, Artificial Sequence
  Synthetic
uccacagaagcuccaaauucuuua

SEQ ID NO: 118072 - RNA, 18 nt, Artificial Sequence
  Synthetic
  misc_feature (11)..(11): n is a, c, g, or u
aaucaauaggncuguuua

SEQ ID NO: 118073 - RNA, 19 nt, Artificial Sequence
  Synthetic
  misc_feature (12)..(12): n is a, c, g, or u
caaucaauaggncuguuua

SEQ ID NO: 118074 - RNA, 20 nt, Artificial Sequence
  Synthetic
  misc_feature (13)..(13): n is a, c, g, or u
ccaaucaauaggncuguuua

SEQ ID NO: 118075 - RNA, 21 nt, Artificial Sequence
  Synthetic
  misc_feature (14)..(14): n is a, c, g, or u
uccaaucaauaggncuguuua

SEQ ID NO: 118076 - RNA, 22 nt, Artificial Sequence
  Synthetic
  misc_feature (15)..(15): n is a, c, g, or u
uuccaaucaauaggncuguuua

SEQ ID NO: 118077 - RNA, 23 nt, Artificial Sequence
  Synthetic
  misc_feature (16)..(16): n is a, c, g, or u
uuuccaaucaauaggncuguuua

SEQ ID NO: 118078 - RNA, 24 nt, Artificial Sequence
  Synthetic
  misc_feature (17)..(17): n is a, c, g, or u
cuuuccaaucaauaggncuguuua

SEQ ID NO: 118079 - RNA, 18 nt, Artificial Sequence
  Synthetic
  misc_feature (6)..(6): n is a, c, g, or u
  misc_feature (8)..(8): n is a, c, g, or u
cgugungncucucuuuua

SEQ ID NO: 118080 - RNA, 19 nt, Artificial Sequence
  Synthetic
  misc_feature (7)..(7): n is a, c, g, or u
  misc_feature (9)..(9): n is a, c, g, or u
acgugungncucucuuuua

SEQ ID NO: 118081 - RNA, 20 nt, Artificial Sequence
  Synthetic
  misc_feature (8)..(8): n is a, c, g, or u
  misc_feature (10)..(10): n is a, c, g, or u
uacgugungncucucuuuua

SEQ ID NO: 118082 - RNA, 21 nt, Artificial Sequence
  Synthetic
  misc_feature (9)..(9): n is a, c, g, or u
  misc_feature (11)..(11): n is a, c, g, or u
cuacgugungncucucuuuua

SEQ ID NO: 118083 - RNA, 22 nt, Artificial Sequence
  Synthetic
  misc_feature (10)..(10): n is a, c, g, or u
  misc_feature (12)..(12): n is a, c, g, or u
gcuacgugungncucucuuuua

SEQ ID NO: 118084 - RNA, 23 nt, Artificial Sequence
  Synthetic
  misc_feature (11)..(11): n is a, c, g, or u
  misc_feature (13)..(13): n is a, c, g, or u
cgcuacgugungncucucuuuua

SEQ ID NO: 118085 - RNA, 24 nt, Artificial Sequence
  Synthetic
  misc_feature (12)..(12): n is a, c, g, or u
  misc_feature (14)..(14): n is a, c, g, or u
gcgcuacgugungncucucuuuua

SEQ ID NO: 118086 - RNA, 18 nt, Artificial Sequence
  Synthetic
  misc_feature (3)..(3): n is a, c, g, or u
  misc_feature (12)..(12): n is a, c, g, or u
gunaaaggggcngcaaac

SEQ ID NO: 118087 - RNA, 19 nt, Artificial Sequence
  Synthetic
  misc_feature (1)..(1): n is a, c, g, or u
  misc_feature (4)..(4): n is a, c, g, or u
  misc_feature (13)..(13): n is a, c, g, or u
ngunaaaggggcngcaaac

SEQ ID NO: 118088 - RNA, 20 nt, Artificial Sequence
  Synthetic
  misc_feature (2)..(2): n is a, c, g, or u
  misc_feature (5)..(5): n is a, c, g, or u
  misc_feature (14)..(14): n is a, c, g, or u
gngunaaaggggcngcaaac

SEQ ID NO: 118089 - RNA, 21 nt, Artificial Sequence
  Synthetic
  misc_feature (3)..(3): n is a, c, g, or u
  misc_feature (6)..(6): n is a, c, g, or u
  misc_feature (15)..(15): n is a, c, g, or u
ugngunaaaggggcngcaaac

SEQ ID NO: 118090 - RNA, 22 nt, Artificial Sequence
  Synthetic
  misc_feature (4)..(4): n is a, c, g, or u
  misc_feature (7)..(7): n is a, c, g, or u
  misc_feature (16)..(16): n is a, c, g, or u
uugngunaaaggggcngcaaac

SEQ ID NO: 118091 - RNA, 23 nt, Artificial Sequence
  Synthetic
  misc_feature (5)..(5): n is a, c, g, or u
  misc_feature (8)..(8): n is a, c, g, or u
  misc_feature (17)..(17): n is a, c, g, or u
auugngunaaaggggcngcaaac

SEQ ID NO: 118092 - RNA, 24 nt, Artificial Sequence
  Synthetic
  misc_feature (6)..(6): n is a, c, g, or u
  misc_feature (9)..(9): n is a, c, g, or u
  misc_feature (18)..(18): n is a, c, g, or u
cauugngunaaaggggcngcaaac

SEQ ID NO: 118093 - RNA, 18 nt, Artificial Sequence
  Synthetic
cagcaacaugagggaaac

SEQ ID NO: 118094 - RNA, 19 nt, Artificial Sequence
  Synthetic
acagcaacaugagggaaac

SEQ ID NO: 118095 - RNA, 20 nt, Artificial Sequence
  Synthetic
uacagcaacaugagggaaac

SEQ ID NO: 118096 - RNA, 21 nt, Artificial Sequence
  Synthetic
guacagcaacaugagggaaac

SEQ ID NO: 118097 - RNA, 22 nt, Artificial Sequence
  Synthetic
uguacagcaacaugagggaaac

SEQ ID NO: 118098 - RNA, 23 nt, Artificial Sequence
  Synthetic
uuguacagcaacaugagggaaac

SEQ ID NO: 118099 - RNA, 24 nt, Artificial Sequence
  Synthetic
uuuguacagcaacaugagggaaac

SEQ ID NO: 118100 - RNA, 18 nt, Artificial Sequence
  Synthetic
cgccgacgggacguaaac

SEQ ID NO: 118101 - RNA, 19 nt, Artificial Sequence
  Synthetic
gcgccgacgggacguaaac

SEQ ID NO: 118102 - RNA, 20 nt, Artificial Sequence
  Synthetic
agcgccgacgggacguaaac

SEQ ID NO: 118103 - RNA, 18 nt, Artificial Sequence
  Synthetic
uaguccagaagaaccaac

SEQ ID NO: 118104 - RNA, 19 nt, Artificial Sequence
  Synthetic
auaguccagaagaaccaac

SEQ ID NO: 118105 - RNA, 20 nt, Artificial Sequence
  Synthetic
gauaguccagaagaaccaac

SEQ ID NO: 118106 - RNA, 21 nt, Artificial Sequence
  Synthetic
ugauaguccagaagaaccaac

SEQ ID NO: 118107 - RNA, 22 nt, Artificial Sequence
  Synthetic
uugauaguccagaagaaccaac

SEQ ID NO: 118108 - RNA, 23 nt, Artificial Sequence
  Synthetic
cuugauaguccagaagaaccaac

SEQ ID NO: 118109 - RNA, 24 nt, Artificial Sequence
  Synthetic
ccuugauaguccagaagaaccaac

SEQ ID NO: 118110 - RNA, 18 nt, Artificial Sequence
  Synthetic
  misc_feature (5)..(5): n is a, c, g, or u
ucaunaacucaccccaac

SEQ ID NO: 118111 - RNA, 19 nt, Artificial Sequence
  Synthetic
  misc_feature (6)..(6): n is a, c, g, or u
uucaunaacucaccccaac

SEQ ID NO: 118112 - RNA, 20 nt, Artificial Sequence
  Synthetic
  misc_feature (7)..(7): n is a, c, g, or u
auucaunaacucaccccaac

SEQ ID NO: 118113 - RNA, 21 nt, Artificial Sequence
  Synthetic
  misc_feature (8)..(8): n is a, c, g, or u
gauucaunaacucaccccaac

SEQ ID NO: 118114 - RNA, 22 nt, Artificial Sequence
  Synthetic
  misc_feature (9)..(9): n is a, c, g, or u
agauucaunaacucaccccaac

SEQ ID NO: 118115 - RNA, 23 nt, Artificial Sequence
  Synthetic
  misc_feature (10)..(10): n is a, c, g, or u
uagauucaunaacucaccccaac

SEQ ID NO: 118116 - RNA, 24 nt, Artificial Sequence
  Synthetic
  misc_feature (11)..(11): n is a, c, g, or u
cuagauucaunaacucaccccaac

SEQ ID NO: 118117 - RNA, 18 nt, Artificial Sequence
  Synthetic
uagguuuuguacagcaac

SEQ ID NO: 118118 - RNA, 19 nt, Artificial Sequence
  Synthetic
guagguuuuguacagcaac

SEQ ID NO: 118119 - RNA, 20 nt, Artificial Sequence
  Synthetic
cguagguuuuguacagcaac

SEQ ID NO: 118120 - RNA, 18 nt, Artificial Sequence
  Synthetic
gugaggauuuuugucaac

SEQ ID NO: 118121 - RNA, 19 nt, Artificial Sequence
  Synthetic
ugugaggauuuuugucaac

SEQ ID NO: 118122 - RNA, 20 nt, Artificial Sequence
  Synthetic
uugugaggauuuuugucaac

SEQ ID NO: 118123 - RNA, 21 nt, Artificial Sequence
  Synthetic
auugugaggauuuuugucaac

SEQ ID NO: 118124 - RNA, 22 nt, Artificial Sequence
  Synthetic
uauugugaggauuuuugucaac

SEQ ID NO: 118125 - RNA, 23 nt, Artificial Sequence
  Synthetic
guauugugaggauuuuugucaac

SEQ ID NO: 118126 - RNA, 24 nt, Artificial Sequence
  Synthetic
gguauugugaggauuuuugucaac

SEQ ID NO: 118127 - RNA, 18 nt, Artificial Sequence
  Synthetic
gaacaguaggacaugaac

SEQ ID NO: 118128 - RNA, 19 nt, Artificial Sequence
  Synthetic
ugaacaguaggacaugaac

SEQ ID NO: 118129 - RNA, 20 nt, Artificial Sequence
  Synthetic
uugaacaguaggacaugaac

SEQ ID NO: 118130 - RNA, 21 nt, Artificial Sequence
  Synthetic
cuugaacaguaggacaugaac

SEQ ID NO: 118131 - RNA, 22 nt, Artificial Sequence
  Synthetic
gcuugaacaguaggacaugaac

SEQ ID NO: 118132 - RNA, 23 nt, Artificial Sequence
  Synthetic
ggcuugaacaguaggacaugaac

SEQ ID NO: 118133 - RNA, 24 nt, Artificial Sequence
  Synthetic
aggcuugaacaguaggacaugaac

SEQ ID NO: 118134 - RNA, 18 nt, Artificial Sequence
  Synthetic
ggcucacuguuccugaac

SEQ ID NO: 118135 - RNA, 19 nt, Artificial Sequence
  Synthetic
gggcucacuguuccugaac

SEQ ID NO: 118136 - RNA, 20 nt, Artificial Sequence
  Synthetic
agggcucacuguuccugaac

SEQ ID NO: 118137 - RNA, 21 nt, Artificial Sequence
  Synthetic
cagggcucacuguuccugaac

SEQ ID NO: 118138 - RNA, 22 nt, Artificial Sequence
  Synthetic
gcagggcucacuguuccugaac

SEQ ID NO: 118139 - RNA, 23 nt, Artificial Sequence
  Synthetic
agcagggcucacuguuccugaac

SEQ ID NO: 118140 - RNA, 24 nt, Artificial Sequence
  Synthetic
gagcagggcucacuguuccugaac

SEQ ID NO: 118141 - RNA, 18 nt, Artificial Sequence
  Synthetic
  misc_feature (12)..(13): n is a, c, g, or u
ccauggggaggnnugaac

SEQ ID NO: 118142 - RNA, 19 nt, Artificial Sequence
  Synthetic
  misc_feature (13)..(14): n is a, c, g, or u
cccauggggaggnnugaac

SEQ ID NO: 118143 - RNA, 20 nt, Artificial Sequence
  Synthetic
  misc_feature (14)..(15): n is a, c, g, or u
ccccauggggaggnnugaac

SEQ ID NO: 118144 - RNA, 21 nt, Artificial Sequence
  Synthetic
  misc_feature (15)..(16): n is a, c, g, or u
cccccauggggaggnnugaac

SEQ ID NO: 118145 - RNA, 22 nt, Artificial Sequence
  Synthetic
  misc_feature (16)..(17): n is a, c, g, or u
ucccccauggggaggnnugaac

SEQ ID NO: 118146 - RNA, 23 nt, Artificial Sequence
  Synthetic
  misc_feature (17)..(18): n is a, c, g, or u
gucccccauggggaggnnugaac

SEQ ID NO: 118147 - RNA, 24 nt, Artificial Sequence
  Synthetic
  misc_feature (18)..(19): n is a, c, g, or u
agucccccauggggaggnnugaac

SEQ ID NO: 118148 - RNA, 18 nt, Artificial Sequence
  Synthetic
cagcuuggaggcuugaac

SEQ ID NO: 118149 - RNA, 19 nt, Artificial Sequence
  Synthetic
acagcuuggaggcuugaac

SEQ ID NO: 118150 - RNA, 20 nt, Artificial Sequence
  Synthetic
cacagcuuggaggcuugaac

SEQ ID NO: 118151 - RNA, 21 nt, Artificial Sequence
  Synthetic
gcacagcuuggaggcuugaac

SEQ ID NO: 118152 - RNA, 22 nt, Artificial Sequence
  Synthetic
ggcacagcuuggaggcuugaac

SEQ ID NO: 118153 - RNA, 23 nt, Artificial Sequence
  Synthetic
aggcacagcuuggaggcuugaac

SEQ ID NO: 118154 - RNA, 24 nt, Artificial Sequence
  Synthetic
aaggcacagcuuggaggcuugaac

SEQ ID NO: 118155 - RNA, 18 nt, Artificial Sequence
  Synthetic
gacacauccagcgauaac

SEQ ID NO: 118156 - RNA, 19 nt, Artificial Sequence
  Synthetic
agacacauccagcgauaac

SEQ ID NO: 118157 - RNA, 20 nt, Artificial Sequence
  Synthetic
cagacacauccagcgauaac

SEQ ID NO: 118158 - RNA, 21 nt, Artificial Sequence
  Synthetic
gcagacacauccagcgauaac

SEQ ID NO: 118159 - RNA, 22 nt, Artificial Sequence
  Synthetic
cgcagacacauccagcgauaac

SEQ ID NO: 118160 - RNA, 23 nt, Artificial Sequence
  Synthetic
ccgcagacacauccagcgauaac

SEQ ID NO: 118161 - RNA, 24 nt, Artificial Sequence
  Synthetic
gccgcagacacauccagcgauaac

SEQ ID NO: 118162 - RNA, 18 nt, Artificial Sequence
  Synthetic
ccacaucauccauauaac

SEQ ID NO: 118163 - RNA, 19 nt, Artificial Sequence
  Synthetic
accacaucauccauauaac

SEQ ID NO: 118164 - RNA, 20 nt, Artificial Sequence
  Synthetic
  misc_feature (1)..(1): n is a, c, g, or u
naccacaucauccauauaac

SEQ ID NO: 118165 - RNA, 21 nt, Artificial Sequence
  Synthetic
  misc_feature (2)..(2): n is a, c, g, or u
anaccacaucauccauauaac

SEQ ID NO: 118166 - RNA, 22 nt, Artificial Sequence
  Synthetic
  misc_feature (3)..(3): n is a, c, g, or u
aanaccacaucauccauauaac

SEQ ID NO: 118167 - RNA, 23 nt, Artificial Sequence
  Synthetic
  misc_feature (4)..(4): n is a, c, g, or u
caanaccacaucauccauauaac

SEQ ID NO: 118168 - RNA, 24 nt, Artificial Sequence
  Synthetic
  misc_feature (5)..(5): n is a, c, g, or u
ccaanaccacaucauccauauaac

SEQ ID NO: 118169 - RNA, 18 nt, Artificial Sequence
  Synthetic
  misc_feature (1)..(1): n is a, c, g, or u
nguccaaggaauacuaac

SEQ ID NO: 118170 - RNA, 19 nt, Artificial Sequence
  Synthetic
  misc_feature (2)..(2): n is a, c, g, or u
gnguccaaggaauacuaac

SEQ ID NO: 118171 - RNA, 20 nt, Artificial Sequence
  Synthetic
  misc_feature (3)..(3): n is a, c, g, or u
ugnguccaaggaauacuaac

SEQ ID NO: 118172 - RNA, 21 nt, Artificial Sequence
  Synthetic
  misc_feature (4)..(4): n is a, c, g, or u
augnguccaaggaauacuaac

SEQ ID NO: 118173 - RNA, 22 nt, Artificial Sequence
  Synthetic
  misc_feature (5)..(5): n is a, c, g, or u
uaugnguccaaggaauacuaac

SEQ ID NO: 118174 - RNA, 23 nt, Artificial Sequence
  Synthetic
  misc_feature (6)..(6): n is a, c, g, or u
uuaugnguccaaggaauacuaac

SEQ ID NO: 118175 - RNA, 24 nt, Artificial Sequence
  Synthetic
  misc_feature (7)..(7): n is a, c, g, or u
cuuaugnguccaaggaauacuaac

SEQ ID NO: 118176 - RNA, 18 nt, Artificial Sequence
  Synthetic
caaaagaaaauugguaac

SEQ ID NO: 118177 - RNA, 19 nt, Artificial Sequence
  Synthetic
acaaaagaaaauugguaac

SEQ ID NO: 118178 - RNA, 20 nt, Artificial Sequence
  Synthetic
gacaaaagaaaauugguaac

SEQ ID NO: 118179 - RNA, 21 nt, Artificial Sequence
  Synthetic
agacaaaagaaaauugguaac

SEQ ID NO: 118180 - RNA, 22 nt, Artificial Sequence
  Synthetic
aagacaaaagaaaauugguaac

SEQ ID NO: 118181 - RNA, 23 nt, Artificial Sequence
  Synthetic
aaagacaaaagaaaauugguaac

SEQ ID NO: 118182 - RNA, 24 nt, Artificial Sequence
  Synthetic
caaagacaaaagaaaauugguaac

SEQ ID NO: 118183 - RNA, 18 nt, Artificial Sequence
  Synthetic
aaaaaccccgccuguaac

SEQ ID NO: 118184 - RNA, 19 nt, Artificial Sequence
  Synthetic
gaaaaaccccgccuguaac

SEQ ID NO: 118185 - RNA, 20 nt, Artificial Sequence
  Synthetic
agaaaaaccccgccuguaac

SEQ ID NO: 118186 - RNA, 21 nt, Artificial Sequence
  Synthetic
aagaaaaaccccgccuguaac

SEQ ID NO: 118187 - RNA, 22 nt, Artificial Sequence
  Synthetic
caagaaaaaccccgccuguaac

SEQ ID NO: 118188 - RNA, 23 nt, Artificial Sequence
  Synthetic
acaagaaaaaccccgccuguaac

SEQ ID NO: 118189 - RNA, 24 nt, Artificial Sequence
  Synthetic
aacaagaaaaaccccgccuguaac

SEQ ID NO: 118190 - RNA, 18 nt, Artificial Sequence
  Synthetic
uuuuaggcccauauuaac

SEQ ID NO: 118191 - RNA, 19 nt, Artificial Sequence
  Synthetic
uuuuuaggcccauauuaac

SEQ ID NO: 118192 - RNA, 20 nt, Artificial Sequence
  Synthetic
auuuuuaggcccauauuaac

SEQ ID NO: 118193 - RNA, 21 nt, Artificial Sequence
  Synthetic
gauuuuuaggcccauauuaac

SEQ ID NO: 118194 - RNA, 22 nt, Artificial Sequence
  Synthetic
ugauuuuuaggcccauauuaac

SEQ ID NO: 118195 - RNA, 23 nt, Artificial Sequence
  Synthetic
cugauuuuuaggcccauauuaac

SEQ ID NO: 118196 - RNA, 24 nt, Artificial Sequence
  Synthetic
ucugauuuuuaggcccauauuaac

SEQ ID NO: 118197 - RNA, 18 nt, Artificial Sequence
  Synthetic
aggagugcgaauccacac

SEQ ID NO: 118198 - RNA, 19 nt, Artificial Sequence
  Synthetic
gaggagugcgaauccacac

SEQ ID NO: 118199 - RNA, 20 nt, Artificial Sequence
  Synthetic
ggaggagugcgaauccacac

SEQ ID NO: 118200 - RNA, 21 nt, Artificial Sequence
  Synthetic
aggaggagugcgaauccacac

SEQ ID NO: 118201 - RNA, 22 nt, Artificial Sequence
  Synthetic
caggaggagugcgaauccacac

SEQ ID NO: 118202 - RNA, 23 nt, Artificial Sequence
  Synthetic
gcaggaggagugcgaauccacac

SEQ ID NO: 118203 - RNA, 24 nt, Artificial Sequence
  Synthetic
ugcaggaggagugcgaauccacac

SEQ ID NO: 118204 - RNA, 18 nt, Artificial Sequence
  Synthetic
  misc_feature (10)..(10): n is a, c, g, or u
uccaugcccnaaagccac

SEQ ID NO: 118205 - RNA, 19 nt, Artificial Sequence
  Synthetic
  misc_feature (11)..(11): n is a, c, g, or u
guccaugcccnaaagccac

SEQ ID NO: 118206 - RNA, 20 nt, Artificial Sequence
  Synthetic
  misc_feature (12)..(12): n is a, c, g, or u
uguccaugcccnaaagccac

SEQ ID NO: 118207 - RNA, 21 nt, Artificial Sequence
  Synthetic
  misc_feature (13)..(13): n is a, c, g, or u
auguccaugcccnaaagccac

SEQ ID NO: 118208 - RNA, 22 nt, Artificial Sequence
  Synthetic
  misc_feature (14)..(14): n is a, c, g, or u
aauguccaugcccnaaagccac

SEQ ID NO: 118209 - RNA, 23 nt, Artificial Sequence
  Synthetic
  misc_feature (15)..(15): n is a, c, g, or u
caauguccaugcccnaaagccac

SEQ ID NO: 118210 - RNA, 24 nt, Artificial Sequence
  Synthetic
  misc_feature (16)..(16): n is a, c, g, or u
ucaauguccaugcccnaaagccac

SEQ ID NO: 118211 - RNA, 18 nt, Artificial Sequence
  Synthetic
aaaagagaguaacuccac

SEQ ID NO: 118212 - RNA, 19 nt, Artificial Sequence
  Synthetic
aaaaagagaguaacuccac

SEQ ID NO: 118213 - RNA, 20 nt, Artificial Sequence
  Synthetic
aaaaaagagaguaacuccac

SEQ ID NO: 118214 - RNA, 21 nt, Artificial Sequence
  Synthetic
caaaaaagagaguaacuccac

SEQ ID NO: 118215 - RNA, 22 nt, Artificial Sequence
  Synthetic
gcaaaaaagagaguaacuccac

SEQ ID NO: 118216 - RNA, 23 nt, Artificial Sequence
  Synthetic
ggcaaaaaagagaguaacuccac

SEQ ID NO: 118217 - RNA, 24 nt, Artificial Sequence
  Synthetic
aggcaaaaaagagaguaacuccac

SEQ ID NO: 118218 - RNA, 18 nt, Artificial Sequence
  Synthetic
ugagccugagggcuccac

SEQ ID NO: 118219 - RNA, 19 nt, Artificial Sequence
  Synthetic
cugagccugagggcuccac

SEQ ID NO: 118220 - RNA, 20 nt, Artificial Sequence
  Synthetic
ccugagccugagggcuccac

SEQ ID NO: 118221 - RNA, 21 nt, Artificial Sequence
  Synthetic
cccugagccugagggcuccac

SEQ ID NO: 118222 - RNA, 22 nt, Artificial Sequence
  Synthetic
gcccugagccugagggcuccac

SEQ ID NO: 118223 - RNA, 23 nt, Artificial Sequence
  Synthetic
  misc_feature (1)..(1): n is a, c, g, or u
ngcccugagccugagggcuccac

SEQ ID NO: 118224 - RNA, 24 nt, Artificial Sequence
  Synthetic
  misc_feature (2)..(2): n is a, c, g, or u
angcccugagccugagggcuccac

SEQ ID NO: 118225 - RNA, 18 nt, Artificial Sequence
  Synthetic
aaauugagagaaguccac

SEQ ID NO: 118226 - RNA, 19 nt, Artificial Sequence
  Synthetic
aaaauugagagaaguccac

SEQ ID NO: 118227 - RNA, 20 nt, Artificial Sequence
  Synthetic
gaaaauugagagaaguccac

SEQ ID NO: 118228 - RNA, 21 nt, Artificial Sequence
  Synthetic
agaaaauugagagaaguccac

SEQ ID NO: 118229 - RNA, 22 nt, Artificial Sequence
  Synthetic
uagaaaauugagagaaguccac

SEQ ID NO: 118230 - RNA, 23 nt, Artificial Sequence
  Synthetic
cuagaaaauugagagaaguccac

SEQ ID NO: 118231 - RNA, 24 nt, Artificial Sequence
  Synthetic
ccuagaaaauugagagaaguccac

SEQ ID NO: 118232 - RNA, 18 nt, Artificial Sequence
  Synthetic
  misc_feature (11)..(11): n is a, c, g, or u
cuagauucaunaacucac

SEQ ID NO: 118233 - RNA, 19 nt, Artificial Sequence
  Synthetic
  misc_feature (12)..(12): n is a, c, g, or u
gcuagauucaunaacucac

SEQ ID NO: 118234 - RNA, 20 nt, Artificial Sequence
  Synthetic
  misc_feature (13)..(13): n is a, c, g, or u
ggcuagauucaunaacucac

SEQ ID NO: 118235 - RNA, 21 nt, Artificial Sequence
  Synthetic
  misc_feature (14)..(14): n is a, c, g, or u
uggcuagauucaunaacucac

SEQ ID NO: 118236 - RNA, 22 nt, Artificial Sequence
  Synthetic
  misc_feature (15)..(15): n is a, c, g, or u
guggcuagauucaunaacucac

SEQ ID NO: 118237 - RNA, 23 nt, Artificial Sequence
  Synthetic
  misc_feature (16)..(16): n is a, c, g, or u
gguggcuagauucaunaacucac

SEQ ID NO: 118238 - RNA, 24 nt, Artificial Sequence
  Synthetic
  misc_feature (17)..(17): n is a, c, g, or u
agguggcuagauucaunaacucac

SEQ ID NO: 118239 - RNA, 18 nt, Artificial Sequence
  Synthetic
aaauguauacccaaagac

SEQ ID NO: 118240 - RNA, 19 nt, Artificial Sequence
  Synthetic
uaaauguauacccaaagac

SEQ ID NO: 118241 - RNA, 20 nt, Artificial Sequence
  Synthetic
uuaaauguauacccaaagac

SEQ ID NO: 118242 - RNA, 21 nt, Artificial Sequence
  Synthetic
uuuaaauguauacccaaagac

SEQ ID NO: 118243 - RNA, 22 nt, Artificial Sequence
  Synthetic
guuuaaauguauacccaaagac

SEQ ID NO: 118244 - RNA, 23 nt, Artificial Sequence
  Synthetic
gguuuaaauguauacccaaagac

SEQ ID NO: 118245 - RNA, 24 nt, Artificial Sequence
  Synthetic
ggguuuaaauguauacccaaagac

SEQ ID NO: 118246 - RNA, 18 nt, Artificial Sequence
  Synthetic
aguccucuuaugcaagac

SEQ ID NO: 118247 - RNA, 19 nt, Artificial Sequence
  Synthetic
gaguccucuuaugcaagac

SEQ ID NO: 118248 - RNA, 20 nt, Artificial Sequence
  Synthetic
agaguccucuuaugcaagac

SEQ ID NO: 118249 - RNA, 21 nt, Artificial Sequence
  Synthetic
aagaguccucuuaugcaagac

SEQ ID NO: 118250 - RNA, 22 nt, Artificial Sequence
  Synthetic
caagaguccucuuaugcaagac

SEQ ID NO: 118251 - RNA, 23 nt, Artificial Sequence
  Synthetic
ccaagaguccucuuaugcaagac

SEQ ID NO: 118252 - RNA, 24 nt, Artificial Sequence
  Synthetic
uccaagaguccucuuaugcaagac

SEQ ID NO: 118253 - RNA, 18 nt, Artificial Sequence
  Synthetic
  misc_feature (5)..(5): n is a, c, g, or u
cucunccaaaaguaagac

SEQ ID NO: 118254 - RNA, 19 nt, Artificial Sequence
  Synthetic
  misc_feature (6)..(6): n is a, c, g, or u
ucucunccaaaaguaagac

SEQ ID NO: 118255 - RNA, 20 nt, Artificial Sequence
  Synthetic
  misc_feature (7)..(7): n is a, c, g, or u
uucucunccaaaaguaagac

SEQ ID NO: 118256 - RNA, 21 nt, Artificial Sequence
  Synthetic
  misc_feature (8)..(8): n is a, c, g, or u
uuucucunccaaaaguaagac

SEQ ID NO: 118257 - RNA, 22 nt, Artificial Sequence
  Synthetic
  misc_feature (9)..(9): n is a, c, g, or u
guuucucunccaaaaguaagac

SEQ ID NO: 118258 - RNA, 23 nt, Artificial Sequence
  Synthetic
  misc_feature (10)..(10): n is a, c, g, or u
aguuucucunccaaaaguaagac

SEQ ID NO: 118259 - RNA, 24 nt, Artificial Sequence
  Synthetic
  misc_feature (11)..(11): n is a, c, g, or u
caguuucucunccaaaaguaagac

SEQ ID NO: 118260 - RNA, 18 nt, Artificial Sequence
  Synthetic
agaugagaaggcacagac

SEQ ID NO: 118261 - RNA, 19 nt, Artificial Sequence
  Synthetic
  misc_feature (1)..(1): n is a, c, g, or u
nagaugagaaggcacagac

SEQ ID NO: 118262 - RNA, 20 nt, Artificial Sequence
  Synthetic
  misc_feature (2)..(2): n is a, c, g, or u
gnagaugagaaggcacagac

SEQ ID NO: 118263 - RNA, 21 nt, Artificial Sequence
  Synthetic
  misc_feature (3)..(3): n is a, c, g, or u
ggnagaugagaaggcacagac

SEQ ID NO: 118264 - RNA, 22 nt, Artificial Sequence
  Synthetic
  misc_feature (4)..(4): n is a, c, g, or u
cggnagaugagaaggcacagac

SEQ ID NO: 118265 - RNA, 23 nt, Artificial Sequence
  Synthetic
  misc_feature (5)..(5): n is a, c, g, or u
ccggnagaugagaaggcacagac

SEQ ID NO: 118266 - RNA, 24 nt, Artificial Sequence
  Synthetic
  misc_feature (6)..(6): n is a, c, g, or u
uccggnagaugagaaggcacagac

SEQ ID NO: 118267 - RNA, 18 nt, Artificial Sequence
  Synthetic
uauaacugaaagccagac

SEQ ID NO: 118268 - RNA, 19 nt, Artificial Sequence
  Synthetic
auauaacugaaagccagac

SEQ ID NO: 118269 - RNA, 20 nt, Artificial Sequence
  Synthetic
cauauaacugaaagccagac

SEQ ID NO: 118270 - RNA, 21 nt, Artificial Sequence
  Synthetic
ccauauaacugaaagccagac

SEQ ID NO: 118271 - RNA, 22 nt, Artificial Sequence
  Synthetic
uccauauaacugaaagccagac

SEQ ID NO: 118272 - RNA, 23 nt, Artificial Sequence
  Synthetic
auccauauaacugaaagccagac

SEQ ID NO: 118273 - RNA, 24 nt, Artificial Sequence
  Synthetic
cauccauauaacugaaagccagac

SEQ ID NO: 118274 - RNA, 18 nt, Artificial Sequence
  Synthetic
uggaucggcagaggagac

SEQ ID NO: 118275 - RNA, 19 nt, Artificial Sequence
  Synthetic
auggaucggcagaggagac

SEQ ID NO: 118276 - RNA, 20 nt, Artificial Sequence
  Synthetic
uauggaucggcagaggagac

SEQ ID NO: 118277 - RNA, 21 nt, Artificial Sequence
  Synthetic
guauggaucggcagaggagac

SEQ ID NO: 118278 - RNA, 22 nt, Artificial Sequence
  Synthetic
aguauggaucggcagaggagac

SEQ ID NO: 118279 - RNA, 23 nt, Artificial Sequence
  Synthetic
caguauggaucggcagaggagac

SEQ ID NO: 118280 - RNA, 24 nt, Artificial Sequence
  Synthetic
gcaguauggaucggcagaggagac

SEQ ID NO: 118281 - RNA, 18 nt, Artificial Sequence
  Synthetic
gaacaauguuccggagac

SEQ ID NO: 118282 - RNA, 19 nt, Artificial Sequence
  Synthetic
ugaacaauguuccggagac

SEQ ID NO: 118283 - RNA, 20 nt, Artificial Sequence
  Synthetic
gugaacaauguuccggagac

SEQ ID NO: 118284 - RNA, 21 nt, Artificial Sequence
  Synthetic
ggugaacaauguuccggagac

SEQ ID NO: 118285 - RNA, 22 nt, Artificial Sequence
  Synthetic
aggugaacaauguuccggagac

SEQ ID NO: 118286 - RNA, 23 nt, Artificial Sequence
  Synthetic
gaggugaacaauguuccggagac

SEQ ID NO: 118287 - RNA, 24 nt, Artificial Sequence
  Synthetic
ugaggugaacaauguuccggagac

SEQ ID NO: 118288 - RNA, 18 nt, Artificial Sequence
  Synthetic
aggcuugaacaguaggac

SEQ ID NO: 118289 - RNA, 19 nt, Artificial Sequence
  Synthetic
gaggcuugaacaguaggac

SEQ ID NO: 118290 - RNA, 20 nt, Artificial Sequence
  Synthetic
ggaggcuugaacaguaggac

SEQ ID NO: 118291 - RNA, 21 nt, Artificial Sequence
  Synthetic
uggaggcuugaacaguaggac

SEQ ID NO: 118292 - RNA, 22 nt, Artificial Sequence
  Synthetic
uuggaggcuugaacaguaggac

SEQ ID NO: 118293 - RNA, 23 nt, Artificial Sequence
  Synthetic
cuuggaggcuugaacaguaggac

SEQ ID NO: 118294 - RNA, 24 nt, Artificial Sequence
  Synthetic
gcuuggaggcuugaacaguaggac

SEQ ID NO: 118295 - RNA, 18 nt, Artificial Sequence
  Synthetic
gagccaagagaaacggac

SEQ ID NO: 118296 - RNA, 19 nt, Artificial Sequence
  Synthetic
ugagccaagagaaacggac

SEQ ID NO: 118297 - RNA, 20 nt, Artificial Sequence
  Synthetic
cugagccaagagaaacggac

SEQ ID NO: 118298 - RNA, 21 nt, Artificial Sequence
  Synthetic
acugagccaagagaaacggac

SEQ ID NO: 118299 - RNA, 22 nt, Artificial Sequence
  Synthetic
aacugagccaagagaaacggac

SEQ ID NO: 118300 - RNA, 23 nt, Artificial Sequence
  Synthetic
aaacugagccaagagaaacggac

SEQ ID NO: 118301 - RNA, 24 nt, Artificial Sequence
  Synthetic
uaaacugagccaagagaaacggac

SEQ ID NO: 118302 - RNA, 18 nt, Artificial Sequence
  Synthetic
  misc_feature (8)..(8): n is a, c, g, or u
acagcggnauaaagggac

SEQ ID NO: 118303 - RNA, 19 nt, Artificial Sequence
  Synthetic
  misc_feature (9)..(9): n is a, c, g, or u
aacagcggnauaaagggac

SEQ ID NO: 118304 - RNA, 20 nt, Artificial Sequence
  Synthetic
  misc_feature (10)..(10): n is a, c, g, or u
uaacagcggnauaaagggac

SEQ ID NO: 118305 - RNA, 21 nt, Artificial Sequence
  Synthetic
  misc_feature (11)..(11): n is a, c, g, or u
guaacagcggnauaaagggac

SEQ ID NO: 118306 - RNA, 22 nt, Artificial Sequence
  Synthetic
  misc_feature (12)..(12): n is a, c, g, or u
gguaacagcggnauaaagggac

SEQ ID NO: 118307 - RNA, 23 nt, Artificial Sequence
  Synthetic
  misc_feature (13)..(13): n is a, c, g, or u
ugguaacagcggnauaaagggac

SEQ ID NO: 118308 - RNA, 24 nt, Artificial Sequence
  Synthetic
  misc_feature (14)..(14): n is a, c, g, or u
uugguaacagcggnauaaagggac

SEQ ID NO: 118309 - RNA, 18 nt, Artificial Sequence
  Synthetic
auucagcgccgacgggac

SEQ ID NO: 118310 - RNA, 19 nt, Artificial Sequence
  Synthetic
gauucagcgccgacgggac

SEQ ID NO: 118311 - RNA, 20 nt, Artificial Sequence
  Synthetic
ggauucagcgccgacgggac

SEQ ID NO: 118312 - RNA, 18 nt, Artificial Sequence
  Synthetic
  misc_feature (7)..(7): n is a, c, g, or u
ucccagnggauuggggac

SEQ ID NO: 118313 - RNA, 19 nt, Artificial Sequence
  Synthetic
  misc_feature (8)..(8): n is a, c, g, or u
aucccagnggauuggggac

SEQ ID NO: 118314 - RNA, 20 nt, Artificial Sequence
  Synthetic
  misc_feature (9)..(9): n is a, c, g, or u
aaucccagnggauuggggac

SEQ ID NO: 118315 - RNA, 21 nt, Artificial Sequence
  Synthetic
  misc_feature (10)..(10): n is a, c, g, or u
gaaucccagnggauuggggac

SEQ ID NO: 118316 - RNA, 22 nt, Artificial Sequence
  Synthetic
  misc_feature (11)..(11): n is a, c, g, or u
agaaucccagnggauuggggac

SEQ ID NO: 118317 - RNA, 23 nt, Artificial Sequence
  Synthetic
  misc_feature (12)..(12): n is a, c, g, or u
aagaaucccagnggauuggggac

SEQ ID NO: 118318 - RNA, 24 nt, Artificial Sequence
  Synthetic
  misc_feature (1)..(1): n is a, c, g, or u
  misc_feature (13)..(13): n is a, c, g, or u
naagaaucccagnggauuggggac

SEQ ID NO: 118319 - RNA, 18 nt, Artificial Sequence
  Synthetic
ugacuggagauuugggac

SEQ ID NO: 118320 - RNA, 19 nt, Artificial Sequence
  Synthetic
gugacuggagauuugggac

SEQ ID NO: 118321 - RNA, 20 nt, Artificial Sequence
  Synthetic
agugacuggagauuugggac

SEQ ID NO: 118322 - RNA, 21 nt, Artificial Sequence
  Synthetic
gagugacuggagauuugggac

SEQ ID NO: 118323 - RNA, 22 nt, Artificial Sequence
  Synthetic
ugagugacuggagauuugggac

SEQ ID NO: 118324 - RNA, 23 nt, Artificial Sequence
  Synthetic
gugagugacuggagauuugggac

SEQ ID NO: 118325 - RNA, 24 nt, Artificial Sequence
  Synthetic
ggugagugacuggagauuugggac

SEQ ID NO: 118326 - RNA, 18 nt, Artificial Sequence
  Synthetic
  misc_feature (10)..(10): n is a, c, g, or u
aaaguacagngcccugac

SEQ ID NO: 118327 - RNA, 19 nt, Artificial Sequence
  Synthetic
  misc_feature (11)..(11): n is a, c, g, or u
gaaaguacagngcccugac

SEQ ID NO: 118328 - RNA, 20 nt, Artificial Sequence
  Synthetic
  misc_feature (12)..(12): n is a, c, g, or u
ggaaaguacagngcccugac

SEQ ID NO: 118329 - RNA, 21 nt, Artificial Sequence
  Synthetic
  misc_feature (13)..(13): n is a, c, g, or u
aggaaaguacagngcccugac

SEQ ID NO: 118330 - RNA, 22 nt, Artificial Sequence
  Synthetic
  misc_feature (14)..(14): n is a, c, g, or u
caggaaaguacagngcccugac

SEQ ID NO: 118331 - RNA, 23 nt, Artificial Sequence
  Synthetic
  misc_feature (15)..(15): n is a, c, g, or u
gcaggaaaguacagngcccugac

SEQ ID NO: 118332 - RNA, 24 nt, Artificial Sequence
  Synthetic
  misc_feature (16)..(16): n is a, c, g, or u
agcaggaaaguacagngcccugac

SEQ ID NO: 118333 - RNA, 18 nt, Artificial Sequence
  Synthetic
  misc_feature (5)..(5): n is a, c, g, or u
aacanguuggugagugac

SEQ ID NO: 118334 - RNA, 19 nt, Artificial Sequence
  Synthetic
  misc_feature (6)..(6): n is a, c, g, or u
caacanguuggugagugac

SEQ ID NO: 118335 - RNA, 20 nt, Artificial Sequence
  Synthetic
  misc_feature (7)..(7): n is a, c, g, or u
acaacanguuggugagugac

SEQ ID NO: 118336 - RNA, 21 nt, Artificial Sequence
  Synthetic
  misc_feature (8)..(8): n is a, c, g, or u
gacaacanguuggugagugac

SEQ ID NO: 118337 - RNA, 22 nt, Artificial Sequence
  Synthetic
  misc_feature (9)..(9): n is a, c, g, or u
ggacaacanguuggugagugac

SEQ ID NO: 118338 - RNA, 23 nt, Artificial Sequence
  Synthetic
  misc_feature (10)..(10): n is a, c, g, or u
aggacaacanguuggugagugac

SEQ ID NO: 118339 - RNA, 24 nt, Artificial Sequence
  Synthetic
  misc_feature (11)..(11): n is a, c, g, or u
gaggacaacanguuggugagugac

SEQ ID NO: 118340 - RNA, 18 nt, Artificial Sequence
  Synthetic
  misc_feature (4)..(4): n is a, c, g, or u
  misc_feature (13)..(13): n is a, c, g, or u
  misc_feature (16)..(16): n is a, c, g, or u
auanuugcggganagnac

SEQ ID NO: 118341 - RNA, 19 nt, Artificial Sequence
  Synthetic
  misc_feature (5)..(5): n is a, c, g, or u
  misc_feature (14)..(14): n is a, c, g, or u
  misc_feature (17)..(17): n is a, c, g, or u
uauanuugcggganagnac

SEQ ID NO: 118342 - RNA, 20 nt, Artificial Sequence
  Synthetic
  misc_feature (6)..(6): n is a, c, g, or u
  misc_feature (15)..(15): n is a, c, g, or u
  misc_feature (18)..(18): n is a, c, g, or u
guauanuugcggganagnac

SEQ ID NO: 118343 - RNA, 21 nt, Artificial Sequence
  Synthetic
  misc_feature (7)..(7): n is a, c, g, or u
  misc_feature (16)..(16): n is a, c, g, or u
  misc_feature (19)..(19): n is a, c, g, or u
uguauanuugcggganagnac

SEQ ID NO: 118344 - RNA, 22 nt, Artificial Sequence
  Synthetic
  misc_feature (8)..(8): n is a, c, g, or u
  misc_feature (17)..(17): n is a, c, g, or u
  misc_feature (20)..(20): n is a, c, g, or u
auguauanuugcggganagnac

SEQ ID NO: 118345 - RNA, 23 nt, Artificial Sequence
  Synthetic
  misc_feature (9)..(9): n is a, c, g, or u
  misc_feature (18)..(18): n is a, c, g, or u
  misc_feature (21)..(21): n is a, c, g, or u
gauguauanuugcggganagnac

SEQ ID NO: 118346 - RNA, 24 nt, Artificial Sequence
  Synthetic
  misc_feature (1)..(1): n is a, c, g, or u
  misc_feature (10)..(10): n is a, c, g, or u
  misc_feature (19)..(19): n is a, c, g, or u
  misc_feature (22)..(22): n is a, c, g, or u
ngauguauanuugcggganagnac

SEQ ID NO: 118347 - RNA, 18 nt, Artificial Sequence
  Synthetic
gaggguuuaaauguauac

SEQ ID NO: 118348 - RNA, 19 nt, Artificial Sequence
  Synthetic
ugaggguuuaaauguauac

SEQ ID NO: 118349 - RNA, 20 nt, Artificial Sequence
  Synthetic
  misc_feature (1)..(1): n is a, c, g, or u
nugaggguuuaaauguauac

SEQ ID NO: 118350 - RNA, 21 nt, Artificial Sequence
  Synthetic
  misc_feature (2)..(2): n is a, c, g, or u
unugaggguuuaaauguauac

SEQ ID NO: 118351 - RNA, 22 nt, Artificial Sequence
  Synthetic
  misc_feature (3)..(3): n is a, c, g, or u
uunugaggguuuaaauguauac

SEQ ID NO: 118352 - RNA, 23 nt, Artificial Sequence
  Synthetic
  misc_feature (4)..(4): n is a, c, g, or u
uuunugaggguuuaaauguauac

SEQ ID NO: 118353 - RNA, 24 nt, Artificial Sequence
  Synthetic
  misc_feature (5)..(5): n is a, c, g, or u
uuuunugaggguuuaaauguauac

SEQ ID NO: 118354 - RNA, 18 nt, Artificial Sequence
  Synthetic
ccuacagccuccuaguac

SEQ ID NO: 118355 - RNA, 19 nt, Artificial Sequence
  Synthetic
gccuacagccuccuaguac

SEQ ID NO: 118356 - RNA, 20 nt, Artificial Sequence
  Synthetic
ugccuacagccuccuaguac

SEQ ID NO: 118357 - RNA, 21 nt, Artificial Sequence
  Synthetic
augccuacagccuccuaguac

SEQ ID NO: 118358 - RNA, 22 nt, Artificial Sequence
  Synthetic
uaugccuacagccuccuaguac

SEQ ID NO: 118359 - RNA, 23 nt, Artificial Sequence
  Synthetic
uuaugccuacagccuccuaguac

SEQ ID NO: 118360 - RNA, 24 nt, Artificial Sequence
  Synthetic
uuuaugccuacagccuccuaguac

SEQ ID NO: 118361 - RNA, 18 nt, Artificial Sequence
  Synthetic
  misc_feature (11)..(12): n is a, c, g, or u
aggauuaaagnnagguac

SEQ ID NO: 118362 - RNA, 19 nt, Artificial Sequence
  Synthetic
  misc_feature (1)..(1): n is a, c, g, or u
  misc_feature (12)..(13): n is a, c, g, or u
naggauuaaagnnagguac

SEQ ID NO: 118363 - RNA, 20 nt, Artificial Sequence
  Synthetic
  misc_feature (2)..(2): n is a, c, g, or u
  misc_feature (13)..(14): n is a, c, g, or u
unaggauuaaagnnagguac

SEQ ID NO: 118364 - RNA, 21 nt, Artificial Sequence
  Synthetic
  misc_feature (1)..(1): n is a, c, g, or u
  misc_feature (3)..(3): n is a, c, g, or u
  misc_feature (14)..(15): n is a, c, g, or u
nunaggauuaaagnnagguac

SEQ ID NO: 118365 - RNA, 22 nt, Artificial Sequence
  Synthetic
  misc_feature (2)..(2): n is a, c, g, or u
  misc_feature (4)..(4): n is a, c, g, or u
  misc_feature (15)..(16): n is a, c, g, or u
anunaggauuaaagnnagguac

SEQ ID NO: 118366 - RNA, 23 nt, Artificial Sequence
  Synthetic
  misc_feature (3)..(3): n is a, c, g, or u
  misc_feature (5)..(5): n is a, c, g, or u
  misc_feature (16)..(17): n is a, c, g, or u
canunaggauuaaagnnagguac

SEQ ID NO: 118367 - RNA, 24 nt, Artificial Sequence
  Synthetic
  misc_feature (4)..(4): n is a, c, g, or u
  misc_feature (6)..(6): n is a, c, g, or u
  misc_feature (17)..(18): n is a, c, g, or u
ccanunaggauuaaagnnagguac

SEQ ID NO: 118368 - RNA, 18 nt, Artificial Sequence
  Synthetic
cccguggucggucgguac

SEQ ID NO: 118369 - RNA, 19 nt, Artificial Sequence
  Synthetic
ccccguggucggucgguac

SEQ ID NO: 118370 - RNA, 20 nt, Artificial Sequence
  Synthetic
gccccguggucggucgguac

SEQ ID NO: 118371 - RNA, 18 nt, Artificial Sequence
  Synthetic
cguccguagguuuuguac

SEQ ID NO: 118372 - RNA, 19 nt, Artificial Sequence
  Synthetic
ccguccguagguuuuguac

SEQ ID NO: 118373 - RNA, 20 nt, Artificial Sequence
  Synthetic
uccguccguagguuuuguac

SEQ ID NO: 118374 - RNA, 18 nt, Artificial Sequence
  Synthetic
  misc_feature (10)..(10): n is a, c, g, or u
aucaauaggncuguuuac

SEQ ID NO: 118375 - RNA, 19 nt, Artificial Sequence
  Synthetic
  misc_feature (11)..(11): n is a, c, g, or u
aaucaauaggncuguuuac

SEQ ID NO: 118376 - RNA, 20 nt, Artificial Sequence
  Synthetic
  misc_feature (12)..(12): n is a, c, g, or u
caaucaauaggncuguuuac

SEQ ID NO: 118377 - RNA, 21 nt, Artificial Sequence
  Synthetic
  misc_feature (13)..(13): n is a, c, g, or u
ccaaucaauaggncuguuuac

SEQ ID NO: 118378 - RNA, 22 nt, Artificial Sequence
  Synthetic
  misc_feature (14)..(14): n is a, c, g, or u
uccaaucaauaggncuguuuac

SEQ ID NO: 118379 - RNA, 23 nt, Artificial Sequence
  Synthetic
  misc_feature (15)..(15): n is a, c, g, or u
uuccaaucaauaggncuguuuac

SEQ ID NO: 118380 - RNA, 24 nt, Artificial Sequence
  Synthetic
  misc_feature (16)..(16): n is a, c, g, or u
uuuccaaucaauaggncuguuuac

SEQ ID NO: 118381 - RNA, 18 nt, Artificial Sequence
  Synthetic
  misc_feature (2)..(2): n is a, c, g, or u
  misc_feature (11)..(11): n is a, c, g, or u
unaaaggggcngcaaacc

SEQ ID NO: 118382 - RNA, 19 nt, Artificial Sequence
  Synthetic
  misc_feature (3)..(3): n is a, c, g, or u
  misc_feature (12)..(12): n is a, c, g, or u
gunaaaggggcngcaaacc

SEQ ID NO: 118383 - RNA, 20 nt, Artificial Sequence
  Synthetic
  misc_feature (1)..(1): n is a, c, g, or u
  misc_feature (4)..(4): n is a, c, g, or u
  misc_feature (13)..(13): n is a, c, g, or u
ngunaaaggggcngcaaacc

SEQ ID NO: 118384 - RNA, 21 nt, Artificial Sequence
  Synthetic
  misc_feature (2)..(2): n is a, c, g, or u
  misc_feature (5)..(5): n is a, c, g, or u
  misc_feature (14)..(14): n is a, c, g, or u
gngunaaaggggcngcaaacc

SEQ ID NO: 118385 - RNA, 22 nt, Artificial Sequence
  Synthetic
  misc_feature (3)..(3): n is a, c, g, or u
  misc_feature (6)..(6): n is a, c, g, or u
  misc_feature (15)..(15): n is a, c, g, or u
ugngunaaaggggcngcaaacc

SEQ ID NO: 118386 - RNA, 23 nt, Artificial Sequence
  Synthetic
  misc_feature (4)..(4): n is a, c, g, or u
  misc_feature (7)..(7): n is a, c, g, or u
  misc_feature (16)..(16): n is a, c, g, or u
uugngunaaaggggcngcaaacc

SEQ ID NO: 118387 - RNA, 24 nt, Artificial Sequence
  Synthetic
  misc_feature (5)..(5): n is a, c, g, or u
  misc_feature (8)..(8): n is a, c, g, or u
  misc_feature (17)..(17): n is a, c, g, or u
auugngunaaaggggcngcaaacc

SEQ ID NO: 118388 - RNA, 18 nt, Artificial Sequence
  Synthetic
  misc_feature (1)..(1): n is a, c, g, or u
nauggccaagccccaacc

SEQ ID NO: 118389 - RNA, 19 nt, Artificial Sequence
  Synthetic
  misc_feature (2)..(2): n is a, c, g, or u
cnauggccaagccccaacc

SEQ ID NO: 118390 - RNA, 20 nt, Artificial Sequence
  Synthetic
  misc_feature (3)..(3): n is a, c, g, or u
ccnauggccaagccccaacc

SEQ ID NO: 118391 - RNA, 21 nt, Artificial Sequence
  Synthetic
  misc_feature (4)..(4): n is a, c, g, or u
gccnauggccaagccccaacc

SEQ ID NO: 118392 - RNA, 22 nt, Artificial Sequence
  Synthetic
  misc_feature (5)..(5): n is a, c, g, or u
ggccnauggccaagccccaacc

SEQ ID NO: 118393 - RNA, 23 nt, Artificial Sequence
  Synthetic
  misc_feature (6)..(6): n is a, c, g, or u
uggccnauggccaagccccaacc

SEQ ID NO: 118394 - RNA, 24 nt, Artificial Sequence
  Synthetic
  misc_feature (7)..(7): n is a, c, g, or u
auggccnauggccaagccccaacc

SEQ ID NO: 118395 - RNA, 18 nt, Artificial Sequence
  Synthetic
ugauaguccagaagaacc

SEQ ID NO: 118396 - RNA, 19 nt, Artificial Sequence
  Synthetic
uugauaguccagaagaacc

SEQ ID NO: 118397 - RNA, 20 nt, Artificial Sequence
  Synthetic
cuugauaguccagaagaacc

SEQ ID NO: 118398 - RNA, 21 nt, Artificial Sequence
  Synthetic
ccuugauaguccagaagaacc

SEQ ID NO: 118399 - RNA, 22 nt, Artificial Sequence
  Synthetic
accuugauaguccagaagaacc

SEQ ID NO: 118400 - RNA, 23 nt, Artificial Sequence
  Synthetic
uaccuugauaguccagaagaacc

SEQ ID NO: 118401 - RNA, 24 nt, Artificial Sequence
  Synthetic
auaccuugauaguccagaagaacc

SEQ ID NO: 118402 - RNA, 18 nt, Artificial Sequence
  Synthetic
gggaaagcccuacgaacc

SEQ ID NO: 118403 - RNA, 19 nt, Artificial Sequence
  Synthetic
ggggaaagcccuacgaacc

SEQ ID NO: 118404 - RNA, 20 nt, Artificial Sequence
  Synthetic
gggggaaagcccuacgaacc

SEQ ID NO: 118405 - RNA, 21 nt, Artificial Sequence
  Synthetic
ugggggaaagcccuacgaacc

SEQ ID NO: 118406 - RNA, 22 nt, Artificial Sequence
  Synthetic
gugggggaaagcccuacgaacc

SEQ ID NO: 118407 - RNA, 23 nt, Artificial Sequence
  Synthetic
agugggggaaagcccuacgaacc

SEQ ID NO: 118408 - RNA, 24 nt, Artificial Sequence
  Synthetic
cagugggggaaagcccuacgaacc

SEQ ID NO: 118409 - RNA, 18 nt, Artificial Sequence
  Synthetic
  misc_feature (9)..(9): n is a, c, g, or u
ccaugcccnaaagccacc

SEQ ID NO: 118410 - RNA, 19 nt, Artificial Sequence
  Synthetic
  misc_feature (10)..(10): n is a, c, g, or u
uccaugcccnaaagccacc

SEQ ID NO: 118411 - RNA, 20 nt, Artificial Sequence
  Synthetic
  misc_feature (11)..(11): n is a, c, g, or u
guccaugcccnaaagccacc

SEQ ID NO: 118412 - RNA, 21 nt, Artificial Sequence
  Synthetic
  misc_feature (12)..(12): n is a, c, g, or u
uguccaugcccnaaagccacc

SEQ ID NO: 118413 - RNA, 22 nt, Artificial Sequence
  Synthetic
  misc_feature (13)..(13): n is a, c, g, or u
auguccaugcccnaaagccacc

SEQ ID NO: 118414 - RNA, 23 nt, Artificial Sequence
  Synthetic
  misc_feature (14)..(14): n is a, c, g, or u
aauguccaugcccnaaagccacc

SEQ ID NO: 118415 - RNA, 24 nt, Artificial Sequence
  Synthetic
  misc_feature (15)..(15): n is a, c, g, or u
caauguccaugcccnaaagccacc

SEQ ID NO: 118416 - RNA, 18 nt, Artificial Sequence
  Synthetic
uccugaacuggagccacc

SEQ ID NO: 118417 - RNA, 19 nt, Artificial Sequence
  Synthetic
uuccugaacuggagccacc

SEQ ID NO: 118418 - RNA, 20 nt, Artificial Sequence
  Synthetic
guuccugaacuggagccacc

SEQ ID NO: 118419 - RNA, 21 nt, Artificial Sequence
  Synthetic
uguuccugaacuggagccacc

SEQ ID NO: 118420 - RNA, 22 nt, Artificial Sequence
  Synthetic
cuguuccugaacuggagccacc

SEQ ID NO: 118421 - RNA, 23 nt, Artificial Sequence
  Synthetic
acuguuccugaacuggagccacc

SEQ ID NO: 118422 - RNA, 24 nt, Artificial Sequence
  Synthetic
cacuguuccugaacuggagccacc

SEQ ID NO: 118423 - RNA, 18 nt, Artificial Sequence
  Synthetic
guccucuuaugcaagacc

SEQ ID NO: 118424 - RNA, 19 nt, Artificial Sequence
  Synthetic
aguccucuuaugcaagacc

SEQ ID NO: 118425 - RNA, 20 nt, Artificial Sequence
  Synthetic
gaguccucuuaugcaagacc

SEQ ID NO: 118426 - RNA, 21 nt, Artificial Sequence
  Synthetic
agaguccucuuaugcaagacc

SEQ ID NO: 118427 - RNA, 22 nt, Artificial Sequence
  Synthetic
aagaguccucuuaugcaagacc

SEQ ID NO: 118428 - RNA, 23 nt, Artificial Sequence
  Synthetic
caagaguccucuuaugcaagacc

SEQ ID NO: 118429 - RNA, 24 nt, Artificial Sequence
  Synthetic
ccaagaguccucuuaugcaagacc

SEQ ID NO: 118430 - RNA, 18 nt, Artificial Sequence
  Synthetic
cccaagaauauggugacc

SEQ ID NO: 118431 - RNA, 19 nt, Artificial Sequence
  Synthetic
ucccaagaauauggugacc

SEQ ID NO: 118432 - RNA, 20 nt, Artificial Sequence
  Synthetic
uucccaagaauauggugacc

SEQ ID NO: 118433 - RNA, 21 nt, Artificial Sequence
  Synthetic
guucccaagaauauggugacc

SEQ ID NO: 118434 - RNA, 22 nt, Artificial Sequence
  Synthetic
uguucccaagaauauggugacc

SEQ ID NO: 118435 - RNA, 23 nt, Artificial Sequence
  Synthetic
uuguucccaagaauauggugacc

SEQ ID NO: 118436 - RNA, 24 nt, Artificial Sequence
  Synthetic
cuuguucccaagaauauggugacc

SEQ ID NO: 118437 - RNA, 18 nt, Artificial Sequence
  Synthetic
aggguuuaaauguauacc

SEQ ID NO: 118438 - RNA, 19 nt, Artificial Sequence
  Synthetic
gaggguuuaaauguauacc

SEQ ID NO: 118439 - RNA, 20 nt, Artificial Sequence
  Synthetic
ugaggguuuaaauguauacc

SEQ ID NO: 118440 - RNA, 21 nt, Artificial Sequence
  Synthetic
  misc_feature (1)..(1): n is a, c, g, or u
nugaggguuuaaauguauacc

SEQ ID NO: 118441 - RNA, 22 nt, Artificial Sequence
  Synthetic
  misc_feature (2)..(2): n is a, c, g, or u
unugaggguuuaaauguauacc

SEQ ID NO: 118442 - RNA, 23 nt, Artificial Sequence
  Synthetic
  misc_feature (3)..(3): n is a, c, g, or u
uunugaggguuuaaauguauacc

SEQ ID NO: 118443 - RNA, 24 nt, Artificial Sequence
  Synthetic
  misc_feature (4)..(4): n is a, c, g, or u
uuunugaggguuuaaauguauacc

SEQ ID NO: 118444 - RNA, 18 nt, Artificial Sequence
  Synthetic
  misc_feature (10)..(11): n is a, c, g, or u
ggauuaaagnnagguacc

SEQ ID NO: 118445 - RNA, 19 nt, Artificial Sequence
  Synthetic
  misc_feature (11)..(12): n is a, c, g, or u
aggauuaaagnnagguacc

SEQ ID NO: 118446 - RNA, 20 nt, Artificial Sequence
  Synthetic
  misc_feature (1)..(1): n is a, c, g, or u
  misc_feature (12)..(13): n is a, c, g, or u
naggauuaaagnnagguacc

SEQ ID NO: 118447 - RNA, 21 nt, Artificial Sequence
  Synthetic
  misc_feature (2)..(2): n is a, c, g, or u
  misc_feature (13)..(14): n is a, c, g, or u
unaggauuaaagnnagguacc

SEQ ID NO: 118448 - RNA, 22 nt, Artificial Sequence
  Synthetic
  misc_feature (1)..(1): n is a, c, g, or u
  misc_feature (3)..(3): n is a, c, g, or u
  misc_feature (14)..(15): n is a, c, g, or u
nunaggauuaaagnnagguacc

SEQ ID NO: 118449 - RNA, 23 nt, Artificial Sequence
  Synthetic
  misc_feature (2)..(2): n is a, c, g, or u
  misc_feature (4)..(4): n is a, c, g, or u
  misc_feature (15)..(16): n is a, c, g, or u
anunaggauuaaagnnagguacc

SEQ ID NO: 118450 - RNA, 24 nt, Artificial Sequence
  Synthetic
  misc_feature (3)..(3): n is a, c, g, or u
  misc_feature (5)..(5): n is a, c, g, or u
  misc_feature (16)..(17): n is a, c, g, or u
canunaggauuaaagnnagguacc

SEQ ID NO: 118451 - RNA, 18 nt, Artificial Sequence
  Synthetic
  misc_feature (1)..(1): n is a, c, g, or u
  misc_feature (10)..(10): n is a, c, g, or u
naaaggggcngcaaaccc

SEQ ID NO: 118452 - RNA, 19 nt, Artificial Sequence
  Synthetic
  misc_feature (2)..(2): n is a, c, g, or u
  misc_feature (11)..(11): n is a, c, g, or u
unaaaggggcngcaaaccc

SEQ ID NO: 118453 - RNA, 20 nt, Artificial Sequence
  Synthetic
  misc_feature (3)..(3): n is a, c, g, or u
  misc_feature (12)..(12): n is a, c, g, or u
gunaaaggggcngcaaaccc

SEQ ID NO: 118454 - RNA, 21 nt, Artificial Sequence
  Synthetic
  misc_feature (1)..(1): n is a, c, g, or u
  misc_feature (4)..(4): n is a, c, g, or u
  misc_feature (13)..(13): n is a, c, g, or u
ngunaaaggggcngcaaaccc

SEQ ID NO: 118455 - RNA, 22 nt, Artificial Sequence
  Synthetic
  misc_feature (2)..(2): n is a, c, g, or u
  misc_feature (5)..(5): n is a, c, g, or u
  misc_feature (14)..(14): n is a, c, g, or u
gngunaaaggggcngcaaaccc

SEQ ID NO: 118456 - RNA, 23 nt, Artificial Sequence
  Synthetic
  misc_feature (3)..(3): n is a, c, g, or u
  misc_feature (6)..(6): n is a, c, g, or u
  misc_feature (15)..(15): n is a, c, g, or u
ugngunaaaggggcngcaaaccc

SEQ ID NO: 118457 - RNA, 24 nt, Artificial Sequence
  Synthetic
  misc_feature (4)..(4): n is a, c, g, or u
  misc_feature (7)..(7): n is a, c, g, or u
  misc_feature (16)..(16): n is a, c, g, or u
uugngunaaaggggcngcaaaccc

SEQ ID NO: 118458 - RNA, 18 nt, Artificial Sequence
  Synthetic
ccaagaauauggugaccc

SEQ ID NO: 118459 - RNA, 19 nt, Artificial Sequence
  Synthetic
cccaagaauauggugaccc

SEQ ID NO: 118460 - RNA, 20 nt, Artificial Sequence
  Synthetic
ucccaagaauauggugaccc

SEQ ID NO: 118461 - RNA, 21 nt, Artificial Sequence
  Synthetic
uucccaagaauauggugaccc

SEQ ID NO: 118462 - RNA, 22 nt, Artificial Sequence
  Synthetic
guucccaagaauauggugaccc

SEQ ID NO: 118463 - RNA, 23 nt, Artificial Sequence
  Synthetic
uguucccaagaauauggugaccc

SEQ ID NO: 118464 - RNA, 24 nt, Artificial Sequence
  Synthetic
uuguucccaagaauauggugaccc

SEQ ID NO: 118465 - RNA, 18 nt, Artificial Sequence
  Synthetic
ggguuuaaauguauaccc

SEQ ID NO: 118466 - RNA, 19 nt, Artificial Sequence
  Synthetic
aggguuuaaauguauaccc

SEQ ID NO: 118467 - RNA, 20 nt, Artificial Sequence
  Synthetic
gaggguuuaaauguauaccc

SEQ ID NO: 118468 - RNA, 21 nt, Artificial Sequence
  Synthetic
ugaggguuuaaauguauaccc

SEQ ID NO: 118469 - RNA, 22 nt, Artificial Sequence
  Synthetic
  misc_feature (1)..(1): n is a, c, g, or u
nugaggguuuaaauguauaccc

SEQ ID NO: 118470 - RNA, 23 nt, Artificial Sequence
  Synthetic
  misc_feature (2)..(2): n is a, c, g, or u
unugaggguuuaaauguauaccc

SEQ ID NO: 118471 - RNA, 24 nt, Artificial Sequence
  Synthetic
  misc_feature (3)..(3): n is a, c, g, or u
uunugaggguuuaaauguauaccc

SEQ ID NO: 118472 - RNA, 18 nt, Artificial Sequence
  Synthetic
  misc_feature (9)..(9): n is a, c, g, or u
aaaggggcngcaaacccc

SEQ ID NO: 118473 - RNA, 19 nt, Artificial Sequence
  Synthetic
  misc_feature (1)..(1): n is a, c, g, or u
  misc_feature (10)..(10): n is a, c, g, or u
naaaggggcngcaaacccc

SEQ ID NO: 118474 - RNA, 20 nt, Artificial Sequence
  Synthetic
  misc_feature (2)..(2): n is a, c, g, or u
  misc_feature (11)..(11): n is a, c, g, or u
unaaaggggcngcaaacccc

SEQ ID NO: 118475 - RNA, 21 nt, Artificial Sequence
  Synthetic
  misc_feature (3)..(3): n is a, c, g, or u
  misc_feature (12)..(12): n is a, c, g, or u
gunaaaggggcngcaaacccc

SEQ ID NO: 118476 - RNA, 22 nt, Artificial Sequence
  Synthetic
  misc_feature (1)..(1): n is a, c, g, or u
  misc_feature (4)..(4): n is a, c, g, or u
  misc_feature (13)..(13): n is a, c, g, or u
ngunaaaggggcngcaaacccc

SEQ ID NO: 118477 - RNA, 23 nt, Artificial Sequence
  Synthetic
  misc_feature (2)..(2): n is a, c, g, or u
  misc_feature (5)..(5): n is a, c, g, or u
  misc_feature (14)..(14): n is a, c, g, or u
gngunaaaggggcngcaaacccc

SEQ ID NO: 118478 - RNA, 24 nt, Artificial Sequence
  Synthetic
  misc_feature (3)..(3): n is a, c, g, or u
  misc_feature (6)..(6): n is a, c, g, or u
  misc_feature (15)..(15): n is a, c, g, or u
ugngunaaaggggcngcaaacccc

SEQ ID NO: 118479 - RNA, 18 nt, Artificial Sequence
  Synthetic
ccaccccaacaguccccc

SEQ ID NO: 118480 - RNA, 19 nt, Artificial Sequence
  Synthetic
uccaccccaacaguccccc

SEQ ID NO: 118481 - RNA, 20 nt, Artificial Sequence
  Synthetic
cuccaccccaacaguccccc

SEQ ID NO: 118482 - RNA, 21 nt, Artificial Sequence
  Synthetic
gcuccaccccaacaguccccc

SEQ ID NO: 118483 - RNA, 22 nt, Artificial Sequence
  Synthetic
ggcuccaccccaacaguccccc

SEQ ID NO: 118484 - RNA, 23 nt, Artificial Sequence
  Synthetic
gggcuccaccccaacaguccccc

SEQ ID NO: 118485 - RNA, 24 nt, Artificial Sequence
  Synthetic
agggcuccaccccaacaguccccc

SEQ ID NO: 118486 - RNA, 18 nt, Artificial Sequence
  Synthetic
guagaagaauaaagcccc

SEQ ID NO: 118487 - RNA, 19 nt, Artificial Sequence
  Synthetic
cguagaagaauaaagcccc

SEQ ID NO: 118488 - RNA, 20 nt, Artificial Sequence
  Synthetic
ccguagaagaauaaagcccc

SEQ ID NO: 118489 - RNA, 21 nt, Artificial Sequence
  Synthetic
accguagaagaauaaagcccc

SEQ ID NO: 118490 - RNA, 22 nt, Artificial Sequence
  Synthetic
uaccguagaagaauaaagcccc

SEQ ID NO: 118491 - RNA, 23 nt, Artificial Sequence
  Synthetic
guaccguagaagaauaaagcccc

SEQ ID NO: 118492 - RNA, 24 nt, Artificial Sequence
  Synthetic
gguaccguagaagaauaaagcccc

SEQ ID NO: 118493 - RNA, 18 nt, Artificial Sequence
  Synthetic
agagccccaagcggcccc

SEQ ID NO: 118494 - RNA, 19 nt, Artificial Sequence
  Synthetic
uagagccccaagcggcccc

SEQ ID NO: 118495 - RNA, 20 nt, Artificial Sequence
  Synthetic
guagagccccaagcggcccc

SEQ ID NO: 118496 - RNA, 21 nt, Artificial Sequence
  Synthetic
gguagagccccaagcggcccc

SEQ ID NO: 118497 - RNA, 22 nt, Artificial Sequence
  Synthetic
cgguagagccccaagcggcccc

SEQ ID NO: 118498 - RNA, 23 nt, Artificial Sequence
  Synthetic
gcgguagagccccaagcggcccc

SEQ ID NO: 118499 - RNA, 24 nt, Artificial Sequence
  Synthetic
ggcgguagagccccaagcggcccc

SEQ ID NO: 118500 - RNA, 18 nt, Artificial Sequence
  Synthetic
  misc_feature (14)..(14): n is a, c, g, or u
acacacggguguuncccc

SEQ ID NO: 118501 - RNA, 19 nt, Artificial Sequence
  Synthetic
  misc_feature (15)..(15): n is a, c, g, or u
gacacacggguguuncccc

SEQ ID NO: 118502 - RNA, 20 nt, Artificial Sequence
  Synthetic
  misc_feature (16)..(16): n is a, c, g, or u
agacacacggguguuncccc

SEQ ID NO: 118503 - RNA, 21 nt, Artificial Sequence
  Synthetic
  misc_feature (17)..(17): n is a, c, g, or u
aagacacacggguguuncccc

SEQ ID NO: 118504 - RNA, 22 nt, Artificial Sequence
  Synthetic
  misc_feature (18)..(18): n is a, c, g, or u
caagacacacggguguuncccc

SEQ ID NO: 118505 - RNA, 23 nt, Artificial Sequence
  Synthetic
  misc_feature (19)..(19): n is a, c, g, or u
ccaagacacacggguguuncccc

SEQ ID NO: 118506 - RNA, 24 nt, Artificial Sequence
  Synthetic
  misc_feature (20)..(20): n is a, c, g, or u
gccaagacacacggguguuncccc

SEQ ID NO: 118507 - RNA, 18 nt, Artificial Sequence
  Synthetic
uccaccccaacagucccc

SEQ ID NO: 118508 - RNA, 19 nt, Artificial Sequence
  Synthetic
cuccaccccaacagucccc

SEQ ID NO: 118509 - RNA, 20 nt, Artificial Sequence
  Synthetic
gcuccaccccaacagucccc

SEQ ID NO: 118510 - RNA, 21 nt, Artificial Sequence
  Synthetic
ggcuccaccccaacagucccc

SEQ ID NO: 118511 - RNA, 22 nt, Artificial Sequence
  Synthetic
gggcuccaccccaacagucccc

SEQ ID NO: 118512 - RNA, 23 nt, Artificial Sequence
  Synthetic
agggcuccaccccaacagucccc

SEQ ID NO: 118513 - RNA, 24 nt, Artificial Sequence
  Synthetic
gagggcuccaccccaacagucccc

SEQ ID NO: 118514 - RNA, 18 nt, Artificial Sequence
  Synthetic
gacagugggggaaagccc

SEQ ID NO: 118515 - RNA, 19 nt, Artificial Sequence
  Synthetic
agacagugggggaaagccc

SEQ ID NO: 118516 - RNA, 20 nt, Artificial Sequence
  Synthetic
cagacagugggggaaagccc

SEQ ID NO: 118517 - RNA, 21 nt, Artificial Sequence
  Synthetic
ccagacagugggggaaagccc

SEQ ID NO: 118518 - RNA, 22 nt, Artificial Sequence
  Synthetic
gccagacagugggggaaagccc

SEQ ID NO: 118519 - RNA, 23 nt, Artificial Sequence
  Synthetic
agccagacagugggggaaagccc

SEQ ID NO: 118520 - RNA, 24 nt, Artificial Sequence
  Synthetic
aagccagacagugggggaaagccc

SEQ ID NO: 118521 - RNA, 18 nt, Artificial Sequence
  Synthetic
cguagaagaauaaagccc

SEQ ID NO: 118522 - RNA, 19 nt, Artificial Sequence
  Synthetic
ccguagaagaauaaagccc

SEQ ID NO: 118523 - RNA, 20 nt, Artificial Sequence
  Synthetic
accguagaagaauaaagccc

SEQ ID NO: 118524 - RNA, 21 nt, Artificial Sequence
  Synthetic
uaccguagaagaauaaagccc

SEQ ID NO: 118525 - RNA, 22 nt, Artificial Sequence
  Synthetic
guaccguagaagaauaaagccc

SEQ ID NO: 118526 - RNA, 23 nt, Artificial Sequence
  Synthetic
gguaccguagaagaauaaagccc

SEQ ID NO: 118527 - RNA, 24 nt, Artificial Sequence
  Synthetic
agguaccguagaagaauaaagccc

SEQ ID NO: 118528 - RNA, 18 nt, Artificial Sequence
  Synthetic
uagagccccaagcggccc

SEQ ID NO: 118529 - RNA, 19 nt, Artificial Sequence
  Synthetic
guagagccccaagcggccc

SEQ ID NO: 118530 - RNA, 20 nt, Artificial Sequence
  Synthetic
gguagagccccaagcggccc

SEQ ID NO: 118531 - RNA, 21 nt, Artificial Sequence
  Synthetic
cgguagagccccaagcggccc

SEQ ID NO: 118532 - RNA, 22 nt, Artificial Sequence
  Synthetic
gcgguagagccccaagcggccc

SEQ ID NO: 118533 - RNA, 23 nt, Artificial Sequence
  Synthetic
ggcgguagagccccaagcggccc

SEQ ID NO: 118534 - RNA, 24 nt, Artificial Sequence
  Synthetic
gggcgguagagccccaagcggccc

SEQ ID NO: 118535 - RNA, 18 nt, Artificial Sequence
  Synthetic
gggucaauguccaugccc

SEQ ID NO: 118536 - RNA, 19 nt, Artificial Sequence
  Synthetic
  misc_feature (1)..(1): n is a, c, g, or u
ngggucaauguccaugccc

SEQ ID NO: 118537 - RNA, 20 nt, Artificial Sequence
  Synthetic
  misc_feature (2)..(2): n is a, c, g, or u
angggucaauguccaugccc

SEQ ID NO: 118538 - RNA, 21 nt, Artificial Sequence
  Synthetic
  misc_feature (3)..(3): n is a, c, g, or u
uangggucaauguccaugccc

SEQ ID NO: 118539 - RNA, 22 nt, Artificial Sequence
  Synthetic
  misc_feature (4)..(4): n is a, c, g, or u
auangggucaauguccaugccc

SEQ ID NO: 118540 - RNA, 23 nt, Artificial Sequence
  Synthetic
  misc_feature (5)..(5): n is a, c, g, or u
uauangggucaauguccaugccc

SEQ ID NO: 118541 - RNA, 24 nt, Artificial Sequence
  Synthetic
  misc_feature (6)..(6): n is a, c, g, or u
uuauangggucaauguccaugccc

SEQ ID NO: 118542 - RNA, 18 nt, Artificial Sequence
  Synthetic
  misc_feature (15)..(15): n is a, c, g, or u
gacacacggguguunccc

SEQ ID NO: 118543 - RNA, 19 nt, Artificial Sequence
  Synthetic
  misc_feature (16)..(16): n is a, c, g, or u
agacacacggguguunccc

SEQ ID NO: 118544 - RNA, 20 nt, Artificial Sequence
  Synthetic
  misc_feature (17)..(17): n is a, c, g, or u
aagacacacggguguunccc

SEQ ID NO: 118545 - RNA, 21 nt, Artificial Sequence
  Synthetic
  misc_feature (18)..(18): n is a, c, g, or u
caagacacacggguguunccc

SEQ ID NO: 118546 - RNA, 22 nt, Artificial Sequence
  Synthetic
  misc_feature (19)..(19): n is a, c, g, or u
ccaagacacacggguguunccc

SEQ ID NO: 118547 - RNA, 23 nt, Artificial Sequence
  Synthetic
  misc_feature (20)..(20): n is a, c, g, or u
gccaagacacacggguguunccc

SEQ ID NO: 118548 - RNA, 24 nt, Artificial Sequence
  Synthetic
  misc_feature (21)..(21): n is a, c, g, or u
ggccaagacacacggguguunccc

SEQ ID NO: 118549 - RNA, 18 nt, Artificial Sequence
  Synthetic
  misc_feature (9)..(9): n is a, c, g, or u
ugaucgggnaagaauccc

SEQ ID NO: 118550 - RNA, 19 nt, Artificial Sequence
  Synthetic
  misc_feature (10)..(10): n is a, c, g, or u
augaucgggnaagaauccc

SEQ ID NO: 118551 - RNA, 20 nt, Artificial Sequence
  Synthetic
  misc_feature (11)..(11): n is a, c, g, or u
gaugaucgggnaagaauccc

SEQ ID NO: 118552 - RNA, 21 nt, Artificial Sequence
  Synthetic
  misc_feature (12)..(12): n is a, c, g, or u
ugaugaucgggnaagaauccc

SEQ ID NO: 118553 - RNA, 22 nt, Artificial Sequence
  Synthetic
  misc_feature (13)..(13): n is a, c, g, or u
cugaugaucgggnaagaauccc

SEQ ID NO: 118554 - RNA, 23 nt, Artificial Sequence
  Synthetic
  misc_feature (14)..(14): n is a, c, g, or u
acugaugaucgggnaagaauccc

SEQ ID NO: 118555 - RNA, 24 nt, Artificial Sequence
  Synthetic
  misc_feature (15)..(15): n is a, c, g, or u
aacugaugaucgggnaagaauccc

SEQ ID NO: 118556 - RNA, 18 nt, Artificial Sequence
  Synthetic
  misc_feature (2)..(3): n is a, c, g, or u
cnnccaauuacauauccc

SEQ ID NO: 118557 - RNA, 19 nt, Artificial Sequence
  Synthetic
  misc_feature (3)..(4): n is a, c, g, or u
acnnccaauuacauauccc

SEQ ID NO: 118558 - RNA, 20 nt, Artificial Sequence
  Synthetic
  misc_feature (4)..(5): n is a, c, g, or u
aacnnccaauuacauauccc

SEQ ID NO: 118559 - RNA, 21 nt, Artificial Sequence
  Synthetic
  misc_feature (5)..(6): n is a, c, g, or u
caacnnccaauuacauauccc

SEQ ID NO: 118560 - RNA, 22 nt, Artificial Sequence
  Synthetic
  misc_feature (6)..(7): n is a, c, g, or u
ccaacnnccaauuacauauccc

SEQ ID NO: 118561 - RNA, 23 nt, Artificial Sequence
  Synthetic
  misc_feature (7)..(8): n is a, c, g, or u
cccaacnnccaauuacauauccc

SEQ ID NO: 118562 - RNA, 24 nt, Artificial Sequence
  Synthetic
  misc_feature (8)..(9): n is a, c, g, or u
ccccaacnnccaauuacauauccc

SEQ ID NO: 118563 - RNA, 18 nt, Artificial Sequence
  Synthetic
gacagaauugucaguccc

SEQ ID NO: 118564 - RNA, 19 nt, Artificial Sequence
  Synthetic
cgacagaauugucaguccc

SEQ ID NO: 118565 - RNA, 20 nt, Artificial Sequence
  Synthetic
acgacagaauugucaguccc

SEQ ID NO: 118566 - RNA, 21 nt, Artificial Sequence
  Synthetic
  misc_feature (1)..(1): n is a, c, g, or u
nacgacagaauugucaguccc

SEQ ID NO: 118567 - RNA, 22 nt, Artificial Sequence
  Synthetic
  misc_feature (2)..(2): n is a, c, g, or u
gnacgacagaauugucaguccc

SEQ ID NO: 118568 - RNA, 23 nt, Artificial Sequence
  Synthetic
  misc_feature (3)..(3): n is a, c, g, or u
agnacgacagaauugucaguccc

SEQ ID NO: 118569 - RNA, 24 nt, Artificial Sequence
  Synthetic
  misc_feature (1)..(1): n is a, c, g, or u
  misc_feature (4)..(4): n is a, c, g, or u
nagnacgacagaauugucaguccc

SEQ ID NO: 118570 - RNA, 18 nt, Artificial Sequence
  Synthetic
cagcacagccuagcagcc

SEQ ID NO: 118571 - RNA, 19 nt, Artificial Sequence
  Synthetic
gcagcacagccuagcagcc

SEQ ID NO: 118572 - RNA, 20 nt, Artificial Sequence
  Synthetic
ggcagcacagccuagcagcc

SEQ ID NO: 118573 - RNA, 21 nt, Artificial Sequence
  Synthetic
uggcagcacagccuagcagcc

SEQ ID NO: 118574 - RNA, 22 nt, Artificial Sequence
  Synthetic
uuggcagcacagccuagcagcc

SEQ ID NO: 118575 - RNA, 23 nt, Artificial Sequence
  Synthetic
guuggcagcacagccuagcagcc

SEQ ID NO: 118576 - RNA, 24 nt, Artificial Sequence
  Synthetic
aguuggcagcacagccuagcagcc

SEQ ID NO: 118577 - RNA, 18 nt, Artificial Sequence
  Synthetic
gaagcgggcgguagagcc

SEQ ID NO: 118578 - RNA, 19 nt, Artificial Sequence
  Synthetic
agaagcgggcgguagagcc

SEQ ID NO: 118579 - RNA, 20 nt, Artificial Sequence
  Synthetic
gagaagcgggcgguagagcc

SEQ ID NO: 118580 - RNA, 21 nt, Artificial Sequence
  Synthetic
ggagaagcgggcgguagagcc

SEQ ID NO: 118581 - RNA, 22 nt, Artificial Sequence
  Synthetic
cggagaagcgggcgguagagcc

SEQ ID NO: 118582 - RNA, 23 nt, Artificial Sequence
  Synthetic
  misc_feature (1)..(1): n is a, c, g, or u
ncggagaagcgggcgguagagcc

SEQ ID NO: 118583 - RNA, 24 nt, Artificial Sequence
  Synthetic
  misc_feature (2)..(2): n is a, c, g, or u
gncggagaagcgggcgguagagcc

SEQ ID NO: 118584 - RNA, 18 nt, Artificial Sequence
  Synthetic
uguuccugaacuggagcc

SEQ ID NO: 118585 - RNA, 19 nt, Artificial Sequence
  Synthetic
cuguuccugaacuggagcc

SEQ ID NO: 118586 - RNA, 20 nt, Artificial Sequence
  Synthetic
acuguuccugaacuggagcc

SEQ ID NO: 118587 - RNA, 21 nt, Artificial Sequence
  Synthetic
cacuguuccugaacuggagcc

SEQ ID NO: 118588 - RNA, 22 nt, Artificial Sequence
  Synthetic
ucacuguuccugaacuggagcc

SEQ ID NO: 118589 - RNA, 23 nt, Artificial Sequence
  Synthetic
cucacuguuccugaacuggagcc

SEQ ID NO: 118590 - RNA, 24 nt, Artificial Sequence
  Synthetic
gcucacuguuccugaacuggagcc

SEQ ID NO: 118591 - RNA, 18 nt, Artificial Sequence
  Synthetic
gcacuaguaaacugagcc

SEQ ID NO: 118592 - RNA, 19 nt, Artificial Sequence
  Synthetic
ggcacuaguaaacugagcc

SEQ ID NO: 118593 - RNA, 20 nt, Artificial Sequence
  Synthetic
uggcacuaguaaacugagcc

SEQ ID NO: 118594 - RNA, 21 nt, Artificial Sequence
  Synthetic
auggcacuaguaaacugagcc

SEQ ID NO: 118595 - RNA, 22 nt, Artificial Sequence
  Synthetic
aauggcacuaguaaacugagcc

SEQ ID NO: 118596 - RNA, 23 nt, Artificial Sequence
  Synthetic
aaauggcacuaguaaacugagcc

SEQ ID NO: 118597 - RNA, 24 nt, Artificial Sequence
  Synthetic
caaauggcacuaguaaacugagcc

SEQ ID NO: 118598 - RNA, 18 nt, Artificial Sequence
  Synthetic
  misc_feature (8)..(8): n is a, c, g, or u
gugaguangcccugagcc

SEQ ID NO: 118599 - RNA, 19 nt, Artificial Sequence
  Synthetic
  misc_feature (9)..(9): n is a, c, g, or u
ugugaguangcccugagcc

SEQ ID NO: 118600 - RNA, 20 nt, Artificial Sequence
  Synthetic
  misc_feature (10)..(10): n is a, c, g, or u
uugugaguangcccugagcc

SEQ ID NO: 118601 - RNA, 21 nt, Artificial Sequence
  Synthetic
  misc_feature (11)..(11): n is a, c, g, or u
guugugaguangcccugagcc

SEQ ID NO: 118602 - RNA, 22 nt, Artificial Sequence
  Synthetic
  misc_feature (12)..(12): n is a, c, g, or u
aguugugaguangcccugagcc

SEQ ID NO: 118603 - RNA, 23 nt, Artificial Sequence
  Synthetic
  misc_feature (13)..(13): n is a, c, g, or u
caguugugaguangcccugagcc

SEQ ID NO: 118604 - RNA, 24 nt, Artificial Sequence
  Synthetic
  misc_feature (14)..(14): n is a, c, g, or u
acaguugugaguangcccugagcc

SEQ ID NO: 118605 - RNA, 18 nt, Artificial Sequence
  Synthetic
ggaagaugauaaaacgcc

SEQ ID NO: 118606 - RNA, 19 nt, Artificial Sequence
  Synthetic
aggaagaugauaaaacgcc

SEQ ID NO: 118607 - RNA, 20 nt, Artificial Sequence
  Synthetic
gaggaagaugauaaaacgcc

SEQ ID NO: 118608 - RNA, 21 nt, Artificial Sequence
  Synthetic
agaggaagaugauaaaacgcc

SEQ ID NO: 118609 - RNA, 22 nt, Artificial Sequence
  Synthetic
cagaggaagaugauaaaacgcc

SEQ ID NO: 118610 - RNA, 23 nt, Artificial Sequence
  Synthetic
gcagaggaagaugauaaaacgcc

SEQ ID NO: 118611 - RNA, 24 nt, Artificial Sequence
  Synthetic
ugcagaggaagaugauaaaacgcc

SEQ ID NO: 118612 - RNA, 18 nt, Artificial Sequence
  Synthetic
aacaagaaaaaccccgcc

SEQ ID NO: 118613 - RNA, 19 nt, Artificial Sequence
  Synthetic
caacaagaaaaaccccgcc

SEQ ID NO: 118614 - RNA, 20 nt, Artificial Sequence
  Synthetic
ucaacaagaaaaaccccgcc

SEQ ID NO: 118615 - RNA, 21 nt, Artificial Sequence
  Synthetic
gucaacaagaaaaaccccgcc

SEQ ID NO: 118616 - RNA, 22 nt, Artificial Sequence
  Synthetic
ugucaacaagaaaaaccccgcc

SEQ ID NO: 118617 - RNA, 23 nt, Artificial Sequence
  Synthetic
uugucaacaagaaaaaccccgcc

SEQ ID NO: 118618 - RNA, 24 nt, Artificial Sequence
  Synthetic
uuugucaacaagaaaaaccccgcc

SEQ ID NO: 118619 - RNA, 18 nt, Artificial Sequence
  Synthetic
uccgcgggauucagcgcc

SEQ ID NO: 118620 - RNA, 19 nt, Artificial Sequence
  Synthetic
guccgcgggauucagcgcc

SEQ ID NO: 118621 - RNA, 20 nt, Artificial Sequence
  Synthetic
cguccgcgggauucagcgcc

SEQ ID NO: 118622 - RNA, 21 nt, Artificial Sequence
  Synthetic
ucguccgcgggauucagcgcc

SEQ ID NO: 118623 - RNA, 22 nt, Artificial Sequence
  Synthetic
gucguccgcgggauucagcgcc

SEQ ID NO: 118624 - RNA, 23 nt, Artificial Sequence
  Synthetic
ggucguccgcgggauucagcgcc

SEQ ID NO: 118625 - RNA, 24 nt, Artificial Sequence
  Synthetic
gggucguccgcgggauucagcgcc

SEQ ID NO: 118626 - RNA, 18 nt, Artificial Sequence
  Synthetic
guagagccccaagcggcc

SEQ ID NO: 118627 - RNA, 19 nt, Artificial Sequence
  Synthetic
gguagagccccaagcggcc

SEQ ID NO: 118628 - RNA, 20 nt, Artificial Sequence
  Synthetic
cgguagagccccaagcggcc

SEQ ID NO: 118629 - RNA, 18 nt, Artificial Sequence
  Synthetic
acgcaugcgcugauggcc

SEQ ID NO: 118630 - RNA, 19 nt, Artificial Sequence
  Synthetic
cacgcaugcgcugauggcc

SEQ ID NO: 118631 - RNA, 20 nt, Artificial Sequence
  Synthetic
ccacgcaugcgcugauggcc

SEQ ID NO: 118632 - RNA, 21 nt, Artificial Sequence
  Synthetic
uccacgcaugcgcugauggcc

SEQ ID NO: 118633 - RNA, 22 nt, Artificial Sequence
  Synthetic
uuccacgcaugcgcugauggcc

SEQ ID NO: 118634 - RNA, 23 nt, Artificial Sequence
  Synthetic
guuccacgcaugcgcugauggcc

SEQ ID NO: 118635 - RNA, 24 nt, Artificial Sequence
  Synthetic
gguuccacgcaugcgcugauggcc

SEQ ID NO: 118636 - RNA, 18 nt, Artificial Sequence
  Synthetic
uguuguacagacuuggcc

SEQ ID NO: 118637 - RNA, 19 nt, Artificial Sequence
  Synthetic
auguuguacagacuuggcc

SEQ ID NO: 118638 - RNA, 20 nt, Artificial Sequence
  Synthetic
gauguuguacagacuuggcc

SEQ ID NO: 118639 - RNA, 21 nt, Artificial Sequence
  Synthetic
agauguuguacagacuuggcc

SEQ ID NO: 118640 - RNA, 22 nt, Artificial Sequence
  Synthetic
aagauguuguacagacuuggcc

SEQ ID NO: 118641 - RNA, 23 nt, Artificial Sequence
  Synthetic
caagauguuguacagacuuggcc

SEQ ID NO: 118642 - RNA, 24 nt, Artificial Sequence
  Synthetic
ucaagauguuguacagacuuggcc

SEQ ID NO: 118643 - RNA, 18 nt, Artificial Sequence
  Synthetic
  misc_feature (15)..(15): n is a, c, g, or u
cacaguugugaguangcc

SEQ ID NO: 118644 - RNA, 19 nt, Artificial Sequence
  Synthetic
  misc_feature (16)..(16): n is a, c, g, or u
gcacaguugugaguangcc

SEQ ID NO: 118645 - RNA, 20 nt, Artificial Sequence
  Synthetic
  misc_feature (17)..(17): n is a, c, g, or u
ggcacaguugugaguangcc

SEQ ID NO: 118646 - RNA, 21 nt, Artificial Sequence
  Synthetic
  misc_feature (18)..(18): n is a, c, g, or u
uggcacaguugugaguangcc

SEQ ID NO: 118647 - RNA, 22 nt, Artificial Sequence
  Synthetic
  misc_feature (19)..(19): n is a, c, g, or u
cuggcacaguugugaguangcc

SEQ ID NO: 118648 - RNA, 23 nt, Artificial Sequence
  Synthetic
  misc_feature (20)..(20): n is a, c, g, or u
gcuggcacaguugugaguangcc

SEQ ID NO: 118649 - RNA, 24 nt, Artificial Sequence
  Synthetic
  misc_feature (21)..(21): n is a, c, g, or u
ugcuggcacaguugugaguangcc

SEQ ID NO: 118650 - RNA, 18 nt, Artificial Sequence
  Synthetic
  misc_feature (1)..(1): n is a, c, g, or u
ngggucaauguccaugcc

SEQ ID NO: 118651 - RNA, 19 nt, Artificial Sequence
  Synthetic
  misc_feature (2)..(2): n is a, c, g, or u
angggucaauguccaugcc

SEQ ID NO: 118652 - RNA, 20 nt, Artificial Sequence
  Synthetic
  misc_feature (3)..(3): n is a, c, g, or u
uangggucaauguccaugcc

SEQ ID NO: 118653 - RNA, 21 nt, Artificial Sequence
  Synthetic
  misc_feature (4)..(4): n is a, c, g, or u
auangggucaauguccaugcc

SEQ ID NO: 118654 - RNA, 22 nt, Artificial Sequence
  Synthetic
  misc_feature (5)..(5): n is a, c, g, or u
uauangggucaauguccaugcc

SEQ ID NO: 118655 - RNA, 23 nt, Artificial Sequence
  Synthetic
  misc_feature (6)..(6): n is a, c, g, or u
uuauangggucaauguccaugcc

SEQ ID NO: 118656 - RNA, 24 nt, Artificial Sequence
  Synthetic
  misc_feature (7)..(7): n is a, c, g, or u
uuuauangggucaauguccaugcc

SEQ ID NO: 118657 - RNA, 18 nt, Artificial Sequence
  Synthetic
cagucuuugaaguaugcc

SEQ ID NO: 118658 - RNA, 19 nt, Artificial Sequence
  Synthetic
acagucuuugaaguaugcc

SEQ ID NO: 118659 - RNA, 20 nt, Artificial Sequence
  Synthetic
cacagucuuugaaguaugcc

SEQ ID NO: 118660 - RNA, 21 nt, Artificial Sequence
  Synthetic
acacagucuuugaaguaugcc

SEQ ID NO: 118661 - RNA, 22 nt, Artificial Sequence
  Synthetic
cacacagucuuugaaguaugcc

SEQ ID NO: 118662 - RNA, 23 nt, Artificial Sequence
  Synthetic
acacacagucuuugaaguaugcc

SEQ ID NO: 118663 - RNA, 24 nt, Artificial Sequence
  Synthetic
aacacacagucuuugaaguaugcc

SEQ ID NO: 118664 - RNA, 18 nt, Artificial Sequence
  Synthetic
  misc_feature (5)..(5): n is a, c, g, or u
aacanaccaauuuaugcc

SEQ ID NO: 118665 - RNA, 19 nt, Artificial Sequence
  Synthetic
  misc_feature (6)..(6): n is a, c, g, or u
gaacanaccaauuuaugcc

SEQ ID NO: 118666 - RNA, 20 nt, Artificial Sequence
  Synthetic
  misc_feature (7)..(7): n is a, c, g, or u
ugaacanaccaauuuaugcc

SEQ ID NO: 118667 - RNA, 21 nt, Artificial Sequence
  Synthetic
  misc_feature (8)..(8): n is a, c, g, or u
gugaacanaccaauuuaugcc

SEQ ID NO: 118668 - RNA, 22 nt, Artificial Sequence
  Synthetic
  misc_feature (9)..(9): n is a, c, g, or u
ggugaacanaccaauuuaugcc

SEQ ID NO: 118669 - RNA, 23 nt, Artificial Sequence
  Synthetic
  misc_feature (10)..(10): n is a, c, g, or u
uggugaacanaccaauuuaugcc

SEQ ID NO: 118670 - RNA, 24 nt, Artificial Sequence
  Synthetic
  misc_feature (11)..(11): n is a, c, g, or u
cuggugaacanaccaauuuaugcc

SEQ ID NO: 118671 - RNA, 18 nt, Artificial Sequence
  Synthetic
  misc_feature (10)..(10): n is a, c, g, or u
  misc_feature (16)..(16): n is a, c, g, or u
auuuacugunaggggncc

SEQ ID NO: 118672 - RNA, 19 nt, Artificial Sequence
  Synthetic
  misc_feature (11)..(11): n is a, c, g, or u
  misc_feature (17)..(17): n is a, c, g, or u
cauuuacugunaggggncc

SEQ ID NO: 118673 - RNA, 20 nt, Artificial Sequence
  Synthetic
  misc_feature (12)..(12): n is a, c, g, or u
  misc_feature (18)..(18): n is a, c, g, or u
ucauuuacugunaggggncc

SEQ ID NO: 118674 - RNA, 21 nt, Artificial Sequence
  Synthetic
  misc_feature (13)..(13): n is a, c, g, or u
  misc_feature (19)..(19): n is a, c, g, or u
uucauuuacugunaggggncc

SEQ ID NO: 118675 - RNA, 22 nt, Artificial Sequence
  Synthetic
  misc_feature (14)..(14): n is a, c, g, or u
  misc_feature (20)..(20): n is a, c, g, or u
uuucauuuacugunaggggncc

SEQ ID NO: 118676 - RNA, 23 nt, Artificial Sequence
  Synthetic
  misc_feature (15)..(15): n is a, c, g, or u
  misc_feature (21)..(21): n is a, c, g, or u
uuuucauuuacugunaggggncc

SEQ ID NO: 118677 - RNA, 24 nt, Artificial Sequence
  Synthetic
  misc_feature (16)..(16): n is a, c, g, or u
  misc_feature (22)..(22): n is a, c, g, or u
guuuucauuuacugunaggggncc

SEQ ID NO: 118678 - RNA, 18 nt, Artificial Sequence
  Synthetic
  misc_feature (16)..(16): n is a, c, g, or u
agacacacggguguuncc

SEQ ID NO: 118679 - RNA, 19 nt, Artificial Sequence
  Synthetic
  misc_feature (17)..(17): n is a, c, g, or u
aagacacacggguguuncc

SEQ ID NO: 118680 - RNA, 20 nt, Artificial Sequence
  Synthetic
  misc_feature (18)..(18): n is a, c, g, or u
caagacacacggguguuncc

SEQ ID NO: 118681 - RNA, 21 nt, Artificial Sequence
  Synthetic
  misc_feature (19)..(19): n is a, c, g, or u
ccaagacacacggguguuncc

SEQ ID NO: 118682 - RNA, 22 nt, Artificial Sequence
  Synthetic
  misc_feature (20)..(20): n is a, c, g, or u
gccaagacacacggguguuncc

SEQ ID NO: 118683 - RNA, 23 nt, Artificial Sequence
  Synthetic
  misc_feature (21)..(21): n is a, c, g, or u
ggccaagacacacggguguuncc

SEQ ID NO: 118684 - RNA, 24 nt, Artificial Sequence
  Synthetic
  misc_feature (22)..(22): n is a, c, g, or u
uggccaagacacacggguguuncc

SEQ ID NO: 118685 - RNA, 18 nt, Artificial Sequence
  Synthetic
  misc_feature (3)..(4): n is a, c, g, or u
acnnccaauuacauaucc

SEQ ID NO: 118686 - RNA, 19 nt, Artificial Sequence
  Synthetic
  misc_feature (4)..(5): n is a, c, g, or u
aacnnccaauuacauaucc

SEQ ID NO: 118687 - RNA, 20 nt, Artificial Sequence
  Synthetic
  misc_feature (5)..(6): n is a, c, g, or u
caacnnccaauuacauaucc

SEQ ID NO: 118688 - RNA, 21 nt, Artificial Sequence
  Synthetic
  misc_feature (6)..(7): n is a, c, g, or u
ccaacnnccaauuacauaucc

SEQ ID NO: 118689 - RNA, 22 nt, Artificial Sequence
  Synthetic
  misc_feature (7)..(8): n is a, c, g, or u
cccaacnnccaauuacauaucc

SEQ ID NO: 118690 - RNA, 23 nt, Artificial Sequence
  Synthetic
  misc_feature (8)..(9): n is a, c, g, or u
ccccaacnnccaauuacauaucc

SEQ ID NO: 118691 - RNA, 24 nt, Artificial Sequence
  Synthetic
  misc_feature (9)..(10): n is a, c, g, or u
gccccaacnnccaauuacauaucc

SEQ ID NO: 118692 - RNA, 18 nt, Artificial Sequence
  Synthetic
aaaaaagagaguaacucc

SEQ ID NO: 118693 - RNA, 19 nt, Artificial Sequence
  Synthetic
caaaaaagagaguaacucc

SEQ ID NO: 118694 - RNA, 20 nt, Artificial Sequence
  Synthetic
gcaaaaaagagaguaacucc

SEQ ID NO: 118695 - RNA, 21 nt, Artificial Sequence
  Synthetic
ggcaaaaaagagaguaacucc

SEQ ID NO: 118696 - RNA, 22 nt, Artificial Sequence
  Synthetic
aggcaaaaaagagaguaacucc

SEQ ID NO: 118697 - RNA, 23 nt, Artificial Sequence
  Synthetic
aaggcaaaaaagagaguaacucc

SEQ ID NO: 118698 - RNA, 24 nt, Artificial Sequence
  Synthetic
gaaggcaaaaaagagaguaacucc

SEQ ID NO: 118699 - RNA, 18 nt, Artificial Sequence
  Synthetic
agugcgaauccacacucc

SEQ ID NO: 118700 - RNA, 19 nt, Artificial Sequence
  Synthetic
gagugcgaauccacacucc

SEQ ID NO: 118701 - RNA, 20 nt, Artificial Sequence
  Synthetic
ggagugcgaauccacacucc

SEQ ID NO: 118702 - RNA, 21 nt, Artificial Sequence
  Synthetic
aggagugcgaauccacacucc

SEQ ID NO: 118703 - RNA, 22 nt, Artificial Sequence
  Synthetic
gaggagugcgaauccacacucc

SEQ ID NO: 118704 - RNA, 23 nt, Artificial Sequence
  Synthetic
ggaggagugcgaauccacacucc

SEQ ID NO: 118705 - RNA, 24 nt, Artificial Sequence
  Synthetic
aggaggagugcgaauccacacucc

SEQ ID NO: 118706 - RNA, 18 nt, Artificial Sequence
  Synthetic
cggacugaggcccacucc

SEQ ID NO: 118707 - RNA, 19 nt, Artificial Sequence
  Synthetic
acggacugaggcccacucc

SEQ ID NO: 118708 - RNA, 20 nt, Artificial Sequence
  Synthetic
aacggacugaggcccacucc

SEQ ID NO: 118709 - RNA, 21 nt, Artificial Sequence
  Synthetic
aaacggacugaggcccacucc

SEQ ID NO: 118710 - RNA, 22 nt, Artificial Sequence
  Synthetic
gaaacggacugaggcccacucc

SEQ ID NO: 118711 - RNA, 23 nt, Artificial Sequence
  Synthetic
agaaacggacugaggcccacucc

SEQ ID NO: 118712 - RNA, 24 nt, Artificial Sequence
  Synthetic
gagaaacggacugaggcccacucc

SEQ ID NO: 118713 - RNA, 18 nt, Artificial Sequence
  Synthetic
  misc_feature (1)..(1): n is a, c, g, or u
  misc_feature (11)..(11): n is a, c, g, or u
nuuaaccuaancuccucc

SEQ ID NO: 118714 - RNA, 19 nt, Artificial Sequence
  Synthetic
  misc_feature (2)..(2): n is a, c, g, or u
  misc_feature (12)..(12): n is a, c, g, or u
cnuuaaccuaancuccucc

SEQ ID NO: 118715 - RNA, 20 nt, Artificial Sequence
  Synthetic
  misc_feature (1)..(1): n is a, c, g, or u
  misc_feature (3)..(3): n is a, c, g, or u
  misc_feature (13)..(13): n is a, c, g, or u
ncnuuaaccuaancuccucc

SEQ ID NO: 118716 - RNA, 21 nt, Artificial Sequence
  Synthetic
  misc_feature (2)..(2): n is a, c, g, or u
  misc_feature (4)..(4): n is a, c, g, or u
  misc_feature (14)..(14): n is a, c, g, or u
ancnuuaaccuaancuccucc

SEQ ID NO: 118717 - RNA, 22 nt, Artificial Sequence
  Synthetic
  misc_feature (3)..(3): n is a, c, g, or u
  misc_feature (5)..(5): n is a, c, g, or u
  misc_feature (15)..(15): n is a, c, g, or u
gancnuuaaccuaancuccucc

SEQ ID NO: 118718 - RNA, 23 nt, Artificial Sequence
  Synthetic
  misc_feature (4)..(4): n is a, c, g, or u
  misc_feature (6)..(6): n is a, c, g, or u
  misc_feature (16)..(16): n is a, c, g, or u
agancnuuaaccuaancuccucc

SEQ ID NO: 118719 - RNA, 24 nt, Artificial Sequence
  Synthetic
  misc_feature (5)..(5): n is a, c, g, or u
  misc_feature (7)..(7): n is a, c, g, or u
  misc_feature (17)..(17): n is a, c, g, or u
aagancnuuaaccuaancuccucc

SEQ ID NO: 118720 - RNA, 18 nt, Artificial Sequence
  Synthetic
cuaucaacaauguccucc

SEQ ID NO: 118721 - RNA, 19 nt, Artificial Sequence
  Synthetic
  misc_feature (1)..(1): n is a, c, g, or u
ncuaucaacaauguccucc

SEQ ID NO: 118722 - RNA, 20 nt, Artificial Sequence
  Synthetic
  misc_feature (2)..(2): n is a, c, g, or u
ancuaucaacaauguccucc

SEQ ID NO: 118723 - RNA, 21 nt, Artificial Sequence
  Synthetic
  misc_feature (3)..(3): n is a, c, g, or u
cancuaucaacaauguccucc

SEQ ID NO: 118724 - RNA, 22 nt, Artificial Sequence
  Synthetic
  misc_feature (4)..(4): n is a, c, g, or u
acancuaucaacaauguccucc

SEQ ID NO: 118725 - RNA, 23 nt, Artificial Sequence
  Synthetic
  misc_feature (5)..(5): n is a, c, g, or u
uacancuaucaacaauguccucc

SEQ ID NO: 118726 - RNA, 24 nt, Artificial Sequence
  Synthetic
  misc_feature (6)..(6): n is a, c, g, or u
uuacancuaucaacaauguccucc

SEQ ID NO: 118727 - RNA, 18 nt, Artificial Sequence
  Synthetic
aacauaccuugauagucc

SEQ ID NO: 118728 - RNA, 19 nt, Artificial Sequence
  Synthetic
caacauaccuugauagucc

SEQ ID NO: 118729 - RNA, 20 nt, Artificial Sequence
  Synthetic
gcaacauaccuugauagucc

SEQ ID NO: 118730 - RNA, 18 nt, Artificial Sequence
  Synthetic
ccccgggaggggucgucc

SEQ ID NO: 118731 - RNA, 19 nt, Artificial Sequence
  Synthetic
gccccgggaggggucgucc

SEQ ID NO: 118732 - RNA, 20 nt, Artificial Sequence
  Synthetic
ggccccgggaggggucgucc

SEQ ID NO: 118733 - RNA, 21 nt, Artificial Sequence
  Synthetic
cggccccgggaggggucgucc

SEQ ID NO: 118734 - RNA, 22 nt, Artificial Sequence
  Synthetic
gcggccccgggaggggucgucc

SEQ ID NO: 118735 - RNA, 23 nt, Artificial Sequence
  Synthetic
agcggccccgggaggggucgucc

SEQ ID NO: 118736 - RNA, 24 nt, Artificial Sequence
  Synthetic
aagcggccccgggaggggucgucc

SEQ ID NO: 118737 - RNA, 18 nt, Artificial Sequence
  Synthetic
gcgaagugcacacggucc

SEQ ID NO: 118738 - RNA, 19 nt, Artificial Sequence
  Synthetic
agcgaagugcacacggucc

SEQ ID NO: 118739 - RNA, 20 nt, Artificial Sequence
  Synthetic
aagcgaagugcacacggucc

SEQ ID NO: 118740 - RNA, 21 nt, Artificial Sequence
  Synthetic
gaagcgaagugcacacggucc

SEQ ID NO: 118741 - RNA, 22 nt, Artificial Sequence
  Synthetic
ugaagcgaagugcacacggucc

SEQ ID NO: 118742 - RNA, 23 nt, Artificial Sequence
  Synthetic
gugaagcgaagugcacacggucc

SEQ ID NO: 118743 - RNA, 24 nt, Artificial Sequence
  Synthetic
ggugaagcgaagugcacacggucc

SEQ ID NO: 118744 - RNA, 18 nt, Artificial Sequence
  Synthetic
uaacacgagcaggggucc

SEQ ID NO: 118745 - RNA, 19 nt, Artificial Sequence
  Synthetic
guaacacgagcaggggucc

SEQ ID NO: 118746 - RNA, 20 nt, Artificial Sequence
  Synthetic
uguaacacgagcaggggucc

SEQ ID NO: 118747 - RNA, 21 nt, Artificial Sequence
  Synthetic
cuguaacacgagcaggggucc

SEQ ID NO: 118748 - RNA, 22 nt, Artificial Sequence
  Synthetic
ccuguaacacgagcaggggucc

SEQ ID NO: 118749 - RNA, 23 nt, Artificial Sequence
  Synthetic
gccuguaacacgagcaggggucc

SEQ ID NO: 118750 - RNA, 24 nt, Artificial Sequence
  Synthetic
cgccuguaacacgagcaggggucc

SEQ ID NO: 118751 - RNA, 18 nt, Artificial Sequence
  Synthetic
  misc_feature (14)..(14): n is a, c, g, or u
uucccaccuuaugngucc

SEQ ID NO: 118752 - RNA, 19 nt, Artificial Sequence
  Synthetic
  misc_feature (15)..(15): n is a, c, g, or u
uuucccaccuuaugngucc

SEQ ID NO: 118753 - RNA, 20 nt, Artificial Sequence
  Synthetic
  misc_feature (16)..(16): n is a, c, g, or u
guuucccaccuuaugngucc

SEQ ID NO: 118754 - RNA, 21 nt, Artificial Sequence
  Synthetic
  misc_feature (17)..(17): n is a, c, g, or u
aguuucccaccuuaugngucc

SEQ ID NO: 118755 - RNA, 22 nt, Artificial Sequence
  Synthetic
  misc_feature (18)..(18): n is a, c, g, or u
aaguuucccaccuuaugngucc

SEQ ID NO: 118756 - RNA, 23 nt, Artificial Sequence
  Synthetic
  misc_feature (19)..(19): n is a, c, g, or u
aaaguuucccaccuuaugngucc

SEQ ID NO: 118757 - RNA, 24 nt, Artificial Sequence
  Synthetic
  misc_feature (20)..(20): n is a, c, g, or u
uaaaguuucccaccuuaugngucc

SEQ ID NO: 118758 - RNA, 18 nt, Artificial Sequence
  Synthetic
  misc_feature (8)..(8): n is a, c, g, or u
auaagauncccgccuucc

SEQ ID NO: 118759 - RNA, 19 nt, Artificial Sequence
  Synthetic
  misc_feature (9)..(9): n is a, c, g, or u
uauaagauncccgccuucc

SEQ ID NO: 118760 - RNA, 20 nt, Artificial Sequence
  Synthetic
  misc_feature (10)..(10): n is a, c, g, or u
auauaagauncccgccuucc

SEQ ID NO: 118761 - RNA, 21 nt, Artificial Sequence
  Synthetic
  misc_feature (11)..(11): n is a, c, g, or u
uauauaagauncccgccuucc

SEQ ID NO: 118762 - RNA, 22 nt, Artificial Sequence
  Synthetic
  misc_feature (12)..(12): n is a, c, g, or u
uuauauaagauncccgccuucc

SEQ ID NO: 118763 - RNA, 23 nt, Artificial Sequence
  Synthetic
  misc_feature (13)..(13): n is a, c, g, or u
uuuauauaagauncccgccuucc

SEQ ID NO: 118764 - RNA, 24 nt, Artificial Sequence
  Synthetic
  misc_feature (14)..(14): n is a, c, g, or u
uuuuauauaagauncccgccuucc

SEQ ID NO: 118765 - RNA, 18 nt, Artificial Sequence
  Synthetic
agaccuugggcagguucc

SEQ ID NO: 118766 - RNA, 19 nt, Artificial Sequence
  Synthetic
aagaccuugggcagguucc

SEQ ID NO: 118767 - RNA, 20 nt, Artificial Sequence
  Synthetic
caagaccuugggcagguucc

SEQ ID NO: 118768 - RNA, 21 nt, Artificial Sequence
  Synthetic
gcaagaccuugggcagguucc

SEQ ID NO: 118769 - RNA, 22 nt, Artificial Sequence
  Synthetic
ugcaagaccuugggcagguucc

SEQ ID NO: 118770 - RNA, 23 nt, Artificial Sequence
  Synthetic
augcaagaccuugggcagguucc

SEQ ID NO: 118771 - RNA, 24 nt, Artificial Sequence
  Synthetic
uaugcaagaccuugggcagguucc

SEQ ID NO: 118772 - RNA, 18 nt, Artificial Sequence
  Synthetic
gggaaacauagagguucc

SEQ ID NO: 118773 - RNA, 19 nt, Artificial Sequence
  Synthetic
agggaaacauagagguucc

SEQ ID NO: 118774 - RNA, 20 nt, Artificial Sequence
  Synthetic
gagggaaacauagagguucc

SEQ ID NO: 118775 - RNA, 21 nt, Artificial Sequence
  Synthetic
ugagggaaacauagagguucc

SEQ ID NO: 118776 - RNA, 22 nt, Artificial Sequence
  Synthetic
augagggaaacauagagguucc

SEQ ID NO: 118777 - RNA, 23 nt, Artificial Sequence
  Synthetic
caugagggaaacauagagguucc

SEQ ID NO: 118778 - RNA, 24 nt, Artificial Sequence
  Synthetic
acaugagggaaacauagagguucc

SEQ ID NO: 118779 - RNA, 18 nt, Artificial Sequence
  Synthetic
ugaggugaacaauguucc

SEQ ID NO: 118780 - RNA, 19 nt, Artificial Sequence
  Synthetic
gugaggugaacaauguucc

SEQ ID NO: 118781 - RNA, 20 nt, Artificial Sequence
  Synthetic
ggugaggugaacaauguucc

SEQ ID NO: 118782 - RNA, 21 nt, Artificial Sequence
  Synthetic
uggugaggugaacaauguucc

SEQ ID NO: 118783 - RNA, 22 nt, Artificial Sequence
  Synthetic
auggugaggugaacaauguucc

SEQ ID NO: 118784 - RNA, 23 nt, Artificial Sequence
  Synthetic
uauggugaggugaacaauguucc

SEQ ID NO: 118785 - RNA, 24 nt, Artificial Sequence
  Synthetic
guauggugaggugaacaauguucc

SEQ ID NO: 118786 - RNA, 18 nt, Artificial Sequence
  Synthetic
  misc_feature (9)..(9): n is a, c, g, or u
ugcuguagnucuuguucc

SEQ ID NO: 118787 - RNA, 19 nt, Artificial Sequence
  Synthetic
  misc_feature (10)..(10): n is a, c, g, or u
augcuguagnucuuguucc

SEQ ID NO: 118788 - RNA, 20 nt, Artificial Sequence
  Synthetic
  misc_feature (11)..(11): n is a, c, g, or u
caugcuguagnucuuguucc

SEQ ID NO: 118789 - RNA, 21 nt, Artificial Sequence
  Synthetic
  misc_feature (12)..(12): n is a, c, g, or u
ccaugcuguagnucuuguucc

SEQ ID NO: 118790 - RNA, 22 nt, Artificial Sequence
  Synthetic
  misc_feature (13)..(13): n is a, c, g, or u
cccaugcuguagnucuuguucc

SEQ ID NO: 118791 - RNA, 23 nt, Artificial Sequence
  Synthetic
  misc_feature (14)..(14): n is a, c, g, or u
ucccaugcuguagnucuuguucc

SEQ ID NO: 118792 - RNA, 24 nt, Artificial Sequence
  Synthetic
  misc_feature (15)..(15): n is a, c, g, or u
cucccaugcuguagnucuuguucc

SEQ ID NO: 118793 - RNA, 18 nt, Artificial Sequence
  Synthetic
uguuuacaggaaguuucc

SEQ ID NO: 118794 - RNA, 19 nt, Artificial Sequence
  Synthetic
cuguuuacaggaaguuucc

SEQ ID NO: 118795 - RNA, 20 nt, Artificial Sequence
  Synthetic
  misc_feature (1)..(1): n is a, c, g, or u
ncuguuuacaggaaguuucc

SEQ ID NO: 118796 - RNA, 21 nt, Artificial Sequence
  Synthetic
  misc_feature (2)..(2): n is a, c, g, or u
gncuguuuacaggaaguuucc

SEQ ID NO: 118797 - RNA, 22 nt, Artificial Sequence
  Synthetic
  misc_feature (3)..(3): n is a, c, g, or u
ggncuguuuacaggaaguuucc

SEQ ID NO: 118798 - RNA, 23 nt, Artificial Sequence
  Synthetic
  misc_feature (4)..(4): n is a, c, g, or u
aggncuguuuacaggaaguuucc

SEQ ID NO: 118799 - RNA, 24 nt, Artificial Sequence
  Synthetic
  misc_feature (5)..(5): n is a, c, g, or u
uaggncuguuuacaggaaguuucc

SEQ ID NO: 118800 - RNA, 18 nt, Artificial Sequence
  Synthetic
uagguauuuugcgaaagc

SEQ ID NO: 118801 - RNA, 19 nt, Artificial Sequence
  Synthetic
auagguauuuugcgaaagc

SEQ ID NO: 118802 - RNA, 20 nt, Artificial Sequence
  Synthetic
cauagguauuuugcgaaagc

SEQ ID NO: 118803 - RNA, 21 nt, Artificial Sequence
  Synthetic
ccauagguauuuugcgaaagc

SEQ ID NO: 118804 - RNA, 22 nt, Artificial Sequence
  Synthetic
cccauagguauuuugcgaaagc

SEQ ID NO: 118805 - RNA, 23 nt, Artificial Sequence
  Synthetic
ucccauagguauuuugcgaaagc

SEQ ID NO: 118806 - RNA, 24 nt, Artificial Sequence
  Synthetic
cucccauagguauuuugcgaaagc

SEQ ID NO: 118807 - RNA, 18 nt, Artificial Sequence
  Synthetic
  misc_feature (8)..(8): n is a, c, g, or u
gauggccnauggccaagc

SEQ ID NO: 118808 - RNA, 19 nt, Artificial Sequence
  Synthetic
  misc_feature (9)..(9): n is a, c, g, or u
ugauggccnauggccaagc

SEQ ID NO: 118809 - RNA, 20 nt, Artificial Sequence
  Synthetic
  misc_feature (10)..(10): n is a, c, g, or u
cugauggccnauggccaagc

SEQ ID NO: 118810 - RNA, 21 nt, Artificial Sequence
  Synthetic
  misc_feature (11)..(11): n is a, c, g, or u
gcugauggccnauggccaagc

SEQ ID NO: 118811 - RNA, 22 nt, Artificial Sequence
  Synthetic
  misc_feature (12)..(12): n is a, c, g, or u
cgcugauggccnauggccaagc

SEQ ID NO: 118812 - RNA, 23 nt, Artificial Sequence
  Synthetic
  misc_feature (13)..(13): n is a, c, g, or u
gcgcugauggccnauggccaagc

SEQ ID NO: 118813 - RNA, 24 nt, Artificial Sequence
  Synthetic
  misc_feature (14)..(14): n is a, c, g, or u
ugcgcugauggccnauggccaagc

SEQ ID NO: 118814 - RNA, 18 nt, Artificial Sequence
  Synthetic
gaguaacuccacagaagc

SEQ ID NO: 118815 - RNA, 19 nt, Artificial Sequence
  Synthetic
agaguaacuccacagaagc

SEQ ID NO: 118816 - RNA, 20 nt, Artificial Sequence
  Synthetic
gagaguaacuccacagaagc

SEQ ID NO: 118817 - RNA, 21 nt, Artificial Sequence
  Synthetic
agagaguaacuccacagaagc

SEQ ID NO: 118818 - RNA, 22 nt, Artificial Sequence
  Synthetic
aagagaguaacuccacagaagc

SEQ ID NO: 118819 - RNA, 23 nt, Artificial Sequence
  Synthetic
aaagagaguaacuccacagaagc

SEQ ID NO: 118820 - RNA, 24 nt, Artificial Sequence
  Synthetic
aaaagagaguaacuccacagaagc

SEQ ID NO: 118821 - RNA, 18 nt, Artificial Sequence
  Synthetic
agccacccaaggcacagc

SEQ ID NO: 118822 - RNA, 19 nt, Artificial Sequence
  Synthetic
aagccacccaaggcacagc

SEQ ID NO: 118823 - RNA, 20 nt, Artificial Sequence
  Synthetic
aaagccacccaaggcacagc

SEQ ID NO: 118824 - RNA, 21 nt, Artificial Sequence
  Synthetic
  misc_feature (1)..(1): n is a, c, g, or u
naaagccacccaaggcacagc

SEQ ID NO: 118825 - RNA, 22 nt, Artificial Sequence
  Synthetic
  misc_feature (2)..(2): n is a, c, g, or u
cnaaagccacccaaggcacagc

SEQ ID NO: 118826 - RNA, 23 nt, Artificial Sequence
  Synthetic
  misc_feature (3)..(3): n is a, c, g, or u
ccnaaagccacccaaggcacagc

SEQ ID NO: 118827 - RNA, 24 nt, Artificial Sequence
  Synthetic
  misc_feature (4)..(4): n is a, c, g, or u
cccnaaagccacccaaggcacagc

SEQ ID NO: 118828 - RNA, 18 nt, Artificial Sequence
  Synthetic
ugaacuggagccaccagc

SEQ ID NO: 118829 - RNA, 19 nt, Artificial Sequence
  Synthetic
cugaacuggagccaccagc

SEQ ID NO: 118830 - RNA, 20 nt, Artificial Sequence
  Synthetic
ccugaacuggagccaccagc

SEQ ID NO: 118831 - RNA, 21 nt, Artificial Sequence
  Synthetic
uccugaacuggagccaccagc

SEQ ID NO: 118832 - RNA, 22 nt, Artificial Sequence
  Synthetic
uuccugaacuggagccaccagc

SEQ ID NO: 118833 - RNA, 23 nt, Artificial Sequence
  Synthetic
guuccugaacuggagccaccagc

SEQ ID NO: 118834 - RNA, 24 nt, Artificial Sequence
  Synthetic
uguuccugaacuggagccaccagc

SEQ ID NO: 118835 - RNA, 18 nt, Artificial Sequence
  Synthetic
gccgcagacacauccagc

SEQ ID NO: 118836 - RNA, 19 nt, Artificial Sequence
  Synthetic
cgccgcagacacauccagc

SEQ ID NO: 118837 - RNA, 20 nt, Artificial Sequence
  Synthetic
acgccgcagacacauccagc

SEQ ID NO: 118838 - RNA, 21 nt, Artificial Sequence
  Synthetic
aacgccgcagacacauccagc

SEQ ID NO: 118839 - RNA, 22 nt, Artificial Sequence
  Synthetic
aaacgccgcagacacauccagc

SEQ ID NO: 118840 - RNA, 23 nt, Artificial Sequence
  Synthetic
aaaacgccgcagacacauccagc

SEQ ID NO: 118841 - RNA, 24 nt, Artificial Sequence
  Synthetic
uaaaacgccgcagacacauccagc

SEQ ID NO: 118842 - RNA, 18 nt, Artificial Sequence
  Synthetic
gcagcacagccuagcagc

SEQ ID NO: 118843 - RNA, 19 nt, Artificial Sequence
  Synthetic
ggcagcacagccuagcagc

SEQ ID NO: 118844 - RNA, 20 nt, Artificial Sequence
  Synthetic
uggcagcacagccuagcagc

SEQ ID NO: 118845 - RNA, 21 nt, Artificial Sequence
  Synthetic
uuggcagcacagccuagcagc

SEQ ID NO: 118846 - RNA, 22 nt, Artificial Sequence
  Synthetic
guuggcagcacagccuagcagc

SEQ ID NO: 118847 - RNA, 23 nt, Artificial Sequence
  Synthetic
aguuggcagcacagccuagcagc

SEQ ID NO: 118848 - RNA, 24 nt, Artificial Sequence
  Synthetic
caguuggcagcacagccuagcagc

SEQ ID NO: 118849 - RNA, 18 nt, Artificial Sequence
  Synthetic
ucguccgcgggauucagc

SEQ ID NO: 118850 - RNA, 19 nt, Artificial Sequence
  Synthetic
gucguccgcgggauucagc

SEQ ID NO: 118851 - RNA, 20 nt, Artificial Sequence
  Synthetic
ggucguccgcgggauucagc

SEQ ID NO: 118852 - RNA, 21 nt, Artificial Sequence
  Synthetic
gggucguccgcgggauucagc

SEQ ID NO: 118853 - RNA, 22 nt, Artificial Sequence
  Synthetic
ggggucguccgcgggauucagc

SEQ ID NO: 118854 - RNA, 23 nt, Artificial Sequence
  Synthetic
aggggucguccgcgggauucagc

SEQ ID NO: 118855 - RNA, 24 nt, Artificial Sequence
  Synthetic
gaggggucguccgcgggauucagc

SEQ ID NO: 118856 - RNA, 18 nt, Artificial Sequence
  Synthetic
ggccucccgauacagagc

SEQ ID NO: 118857 - RNA, 19 nt, Artificial Sequence
  Synthetic
aggccucccgauacagagc

SEQ ID NO: 118858 - RNA, 20 nt, Artificial Sequence
  Synthetic
aaggccucccgauacagagc

SEQ ID NO: 118859 - RNA, 21 nt, Artificial Sequence
  Synthetic
uaaggccucccgauacagagc

SEQ ID NO: 118860 - RNA, 22 nt, Artificial Sequence
  Synthetic
cuaaggccucccgauacagagc

SEQ ID NO: 118861 - RNA, 23 nt, Artificial Sequence
  Synthetic
ucuaaggccucccgauacagagc

SEQ ID NO: 118862 - RNA, 24 nt, Artificial Sequence
  Synthetic
cucuaaggccucccgauacagagc

SEQ ID NO: 118863 - RNA, 18 nt, Artificial Sequence
  Synthetic
agaagcgggcgguagagc

SEQ ID NO: 118864 - RNA, 19 nt, Artificial Sequence
  Synthetic
gagaagcgggcgguagagc

SEQ ID NO: 118865 - RNA, 20 nt, Artificial Sequence
  Synthetic
ggagaagcgggcgguagagc

SEQ ID NO: 118866 - RNA, 21 nt, Artificial Sequence
  Synthetic
cggagaagcgggcgguagagc

SEQ ID NO: 118867 - RNA, 22 nt, Artificial Sequence
  Synthetic
  misc_feature (1)..(1): n is a, c, g, or u
ncggagaagcgggcgguagagc

SEQ ID NO: 118868 - RNA, 23 nt, Artificial Sequence
  Synthetic
  misc_feature (2)..(2): n is a, c, g, or u
gncggagaagcgggcgguagagc

SEQ ID NO: 118869 - RNA, 24 nt, Artificial Sequence
  Synthetic
  misc_feature (3)..(3): n is a, c, g, or u
agncggagaagcgggcgguagagc

SEQ ID NO: 118870 - RNA, 18 nt, Artificial Sequence
  Synthetic
  misc_feature (6)..(6): n is a, c, g, or u
accagnccguugccgagc

SEQ ID NO: 118871 - RNA, 19 nt, Artificial Sequence
  Synthetic
  misc_feature (7)..(7): n is a, c, g, or u
gaccagnccguugccgagc

SEQ ID NO: 118872 - RNA, 20 nt, Artificial Sequence
  Synthetic
  misc_feature (8)..(8): n is a, c, g, or u
agaccagnccguugccgagc

SEQ ID NO: 118873 - RNA, 21 nt, Artificial Sequence
  Synthetic
  misc_feature (9)..(9): n is a, c, g, or u
cagaccagnccguugccgagc

SEQ ID NO: 118874 - RNA, 22 nt, Artificial Sequence
  Synthetic
  misc_feature (10)..(10): n is a, c, g, or u
acagaccagnccguugccgagc

SEQ ID NO: 118875 - RNA, 23 nt, Artificial Sequence
  Synthetic
  misc_feature (11)..(11): n is a, c, g, or u
cacagaccagnccguugccgagc

SEQ ID NO: 118876 - RNA, 24 nt, Artificial Sequence
  Synthetic
  misc_feature (12)..(12): n is a, c, g, or u
gcacagaccagnccguugccgagc

SEQ ID NO: 118877 - RNA, 18 nt, Artificial Sequence
  Synthetic
ggcacuaguaaacugagc

SEQ ID NO: 118878 - RNA, 19 nt, Artificial Sequence
  Synthetic
uggcacuaguaaacugagc

SEQ ID NO: 118879 - RNA, 20 nt, Artificial Sequence
  Synthetic
auggcacuaguaaacugagc

SEQ ID NO: 118880 - RNA, 21 nt, Artificial Sequence
  Synthetic
aauggcacuaguaaacugagc

SEQ ID NO: 118881 - RNA, 22 nt, Artificial Sequence
  Synthetic
aaauggcacuaguaaacugagc

SEQ ID NO: 118882 - RNA, 23 nt, Artificial Sequence
  Synthetic
caaauggcacuaguaaacugagc

SEQ ID NO: 118883 - RNA, 24 nt, Artificial Sequence
  Synthetic
acaaauggcacuaguaaacugagc

SEQ ID NO: 118884 - RNA, 18 nt, Artificial Sequence
  Synthetic
  misc_feature (9)..(9): n is a, c, g, or u
ugugaguangcccugagc

SEQ ID NO: 118885 - RNA, 19 nt, Artificial Sequence
  Synthetic
  misc_feature (10)..(10): n is a, c, g, or u
uugugaguangcccugagc

SEQ ID NO: 118886 - RNA, 20 nt, Artificial Sequence
  Synthetic
  misc_feature (11)..(11): n is a, c, g, or u
guugugaguangcccugagc

SEQ ID NO: 118887 - RNA, 21 nt, Artificial Sequence
  Synthetic
  misc_feature (12)..(12): n is a, c, g, or u
aguugugaguangcccugagc

SEQ ID NO: 118888 - RNA, 22 nt, Artificial Sequence
  Synthetic
  misc_feature (13)..(13): n is a, c, g, or u
caguugugaguangcccugagc

SEQ ID NO: 118889 - RNA, 23 nt, Artificial Sequence
  Synthetic
  misc_feature (14)..(14): n is a, c, g, or u
acaguugugaguangcccugagc

SEQ ID NO: 118890 - RNA, 24 nt, Artificial Sequence
  Synthetic
  misc_feature (15)..(15): n is a, c, g, or u
cacaguugugaguangcccugagc

SEQ ID NO: 118891 - RNA, 18 nt, Artificial Sequence
  Synthetic
aagaagaugaggcauagc

SEQ ID NO: 118892 - RNA, 19 nt, Artificial Sequence
  Synthetic
caagaagaugaggcauagc

SEQ ID NO: 118893 - RNA, 20 nt, Artificial Sequence
  Synthetic
acaagaagaugaggcauagc

SEQ ID NO: 118894 - RNA, 21 nt, Artificial Sequence
  Synthetic
aacaagaagaugaggcauagc

SEQ ID NO: 118895 - RNA, 22 nt, Artificial Sequence
  Synthetic
caacaagaagaugaggcauagc

SEQ ID NO: 118896 - RNA, 23 nt, Artificial Sequence
  Synthetic
ccaacaagaagaugaggcauagc

SEQ ID NO: 118897 - RNA, 24 nt, Artificial Sequence
  Synthetic
accaacaagaagaugaggcauagc

SEQ ID NO: 118898 - RNA, 18 nt, Artificial Sequence
  Synthetic
aggaagaugauaaaacgc

SEQ ID NO: 118899 - RNA, 19 nt, Artificial Sequence
  Synthetic
gaggaagaugauaaaacgc

SEQ ID NO: 118900 - RNA, 20 nt, Artificial Sequence
  Synthetic
agaggaagaugauaaaacgc

SEQ ID NO: 118901 - RNA, 21 nt, Artificial Sequence
  Synthetic
cagaggaagaugauaaaacgc

SEQ ID NO: 118902 - RNA, 22 nt, Artificial Sequence
  Synthetic
gcagaggaagaugauaaaacgc

SEQ ID NO: 118903 - RNA, 23 nt, Artificial Sequence
  Synthetic
ugcagaggaagaugauaaaacgc

SEQ ID NO: 118904 - RNA, 24 nt, Artificial Sequence
  Synthetic
augcagaggaagaugauaaaacgc

SEQ ID NO: 118905 - RNA, 18 nt, Artificial Sequence
  Synthetic
aaacaaaggacgucccgc

SEQ ID NO: 118906 - RNA, 19 nt, Artificial Sequence
  Synthetic
uaaacaaaggacgucccgc

SEQ ID NO: 118907 - RNA, 20 nt, Artificial Sequence
  Synthetic
guaaacaaaggacgucccgc

SEQ ID NO: 118908 - RNA, 18 nt, Artificial Sequence
  Synthetic
cacagacggggaguccgc

SEQ ID NO: 118909 - RNA, 19 nt, Artificial Sequence
  Synthetic
gcacagacggggaguccgc

SEQ ID NO: 118910 - RNA, 20 nt, Artificial Sequence
  Synthetic
ggcacagacggggaguccgc

SEQ ID NO: 118911 - RNA, 21 nt, Artificial Sequence
  Synthetic
aggcacagacggggaguccgc

SEQ ID NO: 118912 - RNA, 22 nt, Artificial Sequence
  Synthetic
aaggcacagacggggaguccgc

SEQ ID NO: 118913 - RNA, 23 nt, Artificial Sequence
  Synthetic
gaaggcacagacggggaguccgc

SEQ ID NO: 118914 - RNA, 24 nt, Artificial Sequence
  Synthetic
agaaggcacagacggggaguccgc

SEQ ID NO: 118915 - RNA, 18 nt, Artificial Sequence
  Synthetic
auacaugcauauaaaggc

SEQ ID NO: 118916 - RNA, 19 nt, Artificial Sequence
  Synthetic
uauacaugcauauaaaggc

SEQ ID NO: 118917 - RNA, 20 nt, Artificial Sequence
  Synthetic
guauacaugcauauaaaggc

SEQ ID NO: 118918 - RNA, 21 nt, Artificial Sequence
  Synthetic
uguauacaugcauauaaaggc

SEQ ID NO: 118919 - RNA, 22 nt, Artificial Sequence
  Synthetic
uuguauacaugcauauaaaggc

SEQ ID NO: 118920 - RNA, 23 nt, Artificial Sequence
  Synthetic
cuuguauacaugcauauaaaggc

SEQ ID NO: 118921 - RNA, 24 nt, Artificial Sequence
  Synthetic
gcuuguauacaugcauauaaaggc

SEQ ID NO: 118922 - RNA, 18 nt, Artificial Sequence
  Synthetic
ggaaagaagucagaaggc

SEQ ID NO: 118923 - RNA, 19 nt, Artificial Sequence
  Synthetic
aggaaagaagucagaaggc

SEQ ID NO: 118924 - RNA, 20 nt, Artificial Sequence
  Synthetic
aaggaaagaagucagaaggc

SEQ ID NO: 118925 - RNA, 21 nt, Artificial Sequence
  Synthetic
gaaggaaagaagucagaaggc

SEQ ID NO: 118926 - RNA, 22 nt, Artificial Sequence
  Synthetic
agaaggaaagaagucagaaggc

SEQ ID NO: 118927 - RNA, 23 nt, Artificial Sequence
  Synthetic
  misc_feature (1)..(1): n is a, c, g, or u
nagaaggaaagaagucagaaggc

SEQ ID NO: 118928 - RNA, 24 nt, Artificial Sequence
  Synthetic
  misc_feature (2)..(2): n is a, c, g, or u
anagaaggaaagaagucagaaggc

SEQ ID NO: 118929 - RNA, 18 nt, Artificial Sequence
  Synthetic
  misc_feature (6)..(6): n is a, c, g, or u
uccggnagaugagaaggc

SEQ ID NO: 118930 - RNA, 19 nt, Artificial Sequence
  Synthetic
  misc_feature (7)..(7): n is a, c, g, or u
guccggnagaugagaaggc

SEQ ID NO: 118931 - RNA, 20 nt, Artificial Sequence
  Synthetic
  misc_feature (8)..(8): n is a, c, g, or u
gguccggnagaugagaaggc

SEQ ID NO: 118932 - RNA, 21 nt, Artificial Sequence
  Synthetic
  misc_feature (9)..(9): n is a, c, g, or u
cgguccggnagaugagaaggc

SEQ ID NO: 118933 - RNA, 22 nt, Artificial Sequence
  Synthetic
  misc_feature (10)..(10): n is a, c, g, or u
acgguccggnagaugagaaggc

SEQ ID NO: 118934 - RNA, 23 nt, Artificial Sequence
  Synthetic
  misc_feature (11)..(11): n is a, c, g, or u
cacgguccggnagaugagaaggc

SEQ ID NO: 118935 - RNA, 24 nt, Artificial Sequence
  Synthetic
  misc_feature (12)..(12): n is a, c, g, or u
acacgguccggnagaugagaaggc

SEQ ID NO: 118936 - RNA, 18 nt, Artificial Sequence
  Synthetic
gaccuucgucugcgaggc

SEQ ID NO: 118937 - RNA, 19 nt, Artificial Sequence
  Synthetic
agaccuucgucugcgaggc

SEQ ID NO: 118938 - RNA, 20 nt, Artificial Sequence
  Synthetic
gagaccuucgucugcgaggc

SEQ ID NO: 118939 - RNA, 18 nt, Artificial Sequence
  Synthetic
cugccgauugguggaggc

SEQ ID NO: 118940 - RNA, 19 nt, Artificial Sequence
  Synthetic
acugccgauugguggaggc

SEQ ID NO: 118941 - RNA, 20 nt, Artificial Sequence
  Synthetic
gacugccgauugguggaggc

SEQ ID NO: 118942 - RNA, 21 nt, Artificial Sequence
  Synthetic
ugacugccgauugguggaggc

SEQ ID NO: 118943 - RNA, 22 nt, Artificial Sequence
  Synthetic
cugacugccgauugguggaggc

SEQ ID NO: 118944 - RNA, 23 nt, Artificial Sequence
  Synthetic
ccugacugccgauugguggaggc

SEQ ID NO: 118945 - RNA, 24 nt, Artificial Sequence
  Synthetic
uccugacugccgauugguggaggc

SEQ ID NO: 118946 - RNA, 18 nt, Artificial Sequence
  Synthetic
aaggcacagcuuggaggc

SEQ ID NO: 118947 - RNA, 19 nt, Artificial Sequence
  Synthetic
caaggcacagcuuggaggc

SEQ ID NO: 118948 - RNA, 20 nt, Artificial Sequence
  Synthetic
ccaaggcacagcuuggaggc

SEQ ID NO: 118949 - RNA, 21 nt, Artificial Sequence
  Synthetic
cccaaggcacagcuuggaggc

SEQ ID NO: 118950 - RNA, 22 nt, Artificial Sequence
  Synthetic
acccaaggcacagcuuggaggc

SEQ ID NO: 118951 - RNA, 23 nt, Artificial Sequence
  Synthetic
cacccaaggcacagcuuggaggc

SEQ ID NO: 118952 - RNA, 24 nt, Artificial Sequence
  Synthetic
ccacccaaggcacagcuuggaggc

SEQ ID NO: 118953 - RNA, 18 nt, Artificial Sequence
  Synthetic
gcgagcaaaacaagcggc

SEQ ID NO: 118954 - RNA, 19 nt, Artificial Sequence
  Synthetic
ugcgagcaaaacaagcggc

SEQ ID NO: 118955 - RNA, 20 nt, Artificial Sequence
  Synthetic
cugcgagcaaaacaagcggc

SEQ ID NO: 118956 - RNA, 21 nt, Artificial Sequence
  Synthetic
gcugcgagcaaaacaagcggc

SEQ ID NO: 118957 - RNA, 22 nt, Artificial Sequence
  Synthetic
  misc_feature (1)..(1): n is a, c, g, or u
ngcugcgagcaaaacaagcggc

SEQ ID NO: 118958 - RNA, 23 nt, Artificial Sequence
  Synthetic
  misc_feature (2)..(2): n is a, c, g, or u
cngcugcgagcaaaacaagcggc

SEQ ID NO: 118959 - RNA, 24 nt, Artificial Sequence
  Synthetic
  misc_feature (3)..(3): n is a, c, g, or u
ccngcugcgagcaaaacaagcggc

SEQ ID NO: 118960 - RNA, 18 nt, Artificial Sequence
  Synthetic
gguagagccccaagcggc

SEQ ID NO: 118961 - RNA, 19 nt, Artificial Sequence
  Synthetic
cgguagagccccaagcggc

SEQ ID NO: 118962 - RNA, 20 nt, Artificial Sequence
  Synthetic
gcgguagagccccaagcggc

SEQ ID NO: 118963 - RNA, 21 nt, Artificial Sequence
  Synthetic
ggcgguagagccccaagcggc

SEQ ID NO: 118964 - RNA, 22 nt, Artificial Sequence
  Synthetic
gggcgguagagccccaagcggc

SEQ ID NO: 118965 - RNA, 23 nt, Artificial Sequence
  Synthetic
cgggcgguagagccccaagcggc

SEQ ID NO: 118966 - RNA, 24 nt, Artificial Sequence
  Synthetic
gcgggcgguagagccccaagcggc

SEQ ID NO: 118967 - RNA, 18 nt, Artificial Sequence
  Synthetic
uccgcaguauggaucggc

SEQ ID NO: 118968 - RNA, 19 nt, Artificial Sequence
  Synthetic
uuccgcaguauggaucggc

SEQ ID NO: 118969 - RNA, 20 nt, Artificial Sequence
  Synthetic
guuccgcaguauggaucggc

SEQ ID NO: 118970 - RNA, 21 nt, Artificial Sequence
  Synthetic
aguuccgcaguauggaucggc

SEQ ID NO: 118971 - RNA, 22 nt, Artificial Sequence
  Synthetic
gaguuccgcaguauggaucggc

SEQ ID NO: 118972 - RNA, 23 nt, Artificial Sequence
  Synthetic
ggaguuccgcaguauggaucggc

SEQ ID NO: 118973 - RNA, 24 nt, Artificial Sequence
  Synthetic
aggaguuccgcaguauggaucggc

SEQ ID NO: 118974 - RNA, 18 nt, Artificial Sequence
  Synthetic
  misc_feature (1)..(1): n is a, c, g, or u
  misc_feature (5)..(5): n is a, c, g, or u
ncagncggagaagcgggc

SEQ ID NO: 118975 - RNA, 19 nt, Artificial Sequence
  Synthetic
  misc_feature (1)..(2): n is a, c, g, or u
  misc_feature (6)..(6): n is a, c, g, or u
nncagncggagaagcgggc

SEQ ID NO: 118976 - RNA, 20 nt, Artificial Sequence
  Synthetic
  misc_feature (2)..(3): n is a, c, g, or u
  misc_feature (7)..(7): n is a, c, g, or u
cnncagncggagaagcgggc

SEQ ID NO: 118977 - RNA, 21 nt, Artificial Sequence
  Synthetic
  misc_feature (3)..(4): n is a, c, g, or u
  misc_feature (8)..(8): n is a, c, g, or u
acnncagncggagaagcgggc

SEQ ID NO: 118978 - RNA, 22 nt, Artificial Sequence
  Synthetic
  misc_feature (4)..(5): n is a, c, g, or u
  misc_feature (9)..(9): n is a, c, g, or u
uacnncagncggagaagcgggc

SEQ ID NO: 118979 - RNA, 23 nt, Artificial Sequence
  Synthetic
  misc_feature (5)..(6): n is a, c, g, or u
  misc_feature (10)..(10): n is a, c, g, or u
guacnncagncggagaagcgggc

SEQ ID NO: 118980 - RNA, 24 nt, Artificial Sequence
  Synthetic
  misc_feature (6)..(7): n is a, c, g, or u
  misc_feature (11)..(11): n is a, c, g, or u
gguacnncagncggagaagcgggc

SEQ ID NO: 118981 - RNA, 18 nt, Artificial Sequence
  Synthetic
  misc_feature (7)..(7): n is a, c, g, or u
  misc_feature (10)..(10): n is a, c, g, or u
acauugngunaaaggggc

SEQ ID NO: 118982 - RNA, 19 nt, Artificial Sequence
  Synthetic
  misc_feature (8)..(8): n is a, c, g, or u
  misc_feature (11)..(11): n is a, c, g, or u
cacauugngunaaaggggc

SEQ ID NO: 118983 - RNA, 20 nt, Artificial Sequence
  Synthetic
  misc_feature (9)..(9): n is a, c, g, or u
  misc_feature (12)..(12): n is a, c, g, or u
ccacauugngunaaaggggc

SEQ ID NO: 118984 - RNA, 21 nt, Artificial Sequence
  Synthetic
  misc_feature (1)..(1): n is a, c, g, or u
  misc_feature (10)..(10): n is a, c, g, or u
  misc_feature (13)..(13): n is a, c, g, or u
nccacauugngunaaaggggc

SEQ ID NO: 118985 - RNA, 22 nt, Artificial Sequence
  Synthetic
  misc_feature (2)..(2): n is a, c, g, or u
  misc_feature (11)..(11): n is a, c, g, or u
  misc_feature (14)..(14): n is a, c, g, or u
anccacauugngunaaaggggc

SEQ ID NO: 118986 - RNA, 23 nt, Artificial Sequence
  Synthetic
  misc_feature (3)..(3): n is a, c, g, or u
  misc_feature (12)..(12): n is a, c, g, or u
  misc_feature (15)..(15): n is a, c, g, or u
uanccacauugngunaaaggggc

SEQ ID NO: 118987 - RNA, 24 nt, Artificial Sequence
  Synthetic
  misc_feature (4)..(4): n is a, c, g, or u
  misc_feature (13)..(13): n is a, c, g, or u
  misc_feature (16)..(16): n is a, c, g, or u
auanccacauugngunaaaggggc

SEQ ID NO: 118988 - RNA, 18 nt, Artificial Sequence
  Synthetic
cgucagcaaacacuuggc

SEQ ID NO: 118989 - RNA, 19 nt, Artificial Sequence
  Synthetic
gcgucagcaaacacuuggc

SEQ ID NO: 118990 - RNA, 20 nt, Artificial Sequence
  Synthetic
ugcgucagcaaacacuuggc

SEQ ID NO: 118991 - RNA, 21 nt, Artificial Sequence
  Synthetic
uugcgucagcaaacacuuggc

SEQ ID NO: 118992 - RNA, 22 nt, Artificial Sequence
  Synthetic
guugcgucagcaaacacuuggc

SEQ ID NO: 118993 - RNA, 23 nt, Artificial Sequence
  Synthetic
gguugcgucagcaaacacuuggc

SEQ ID NO: 118994 - RNA, 24 nt, Artificial Sequence
  Synthetic
ggguugcgucagcaaacacuuggc

SEQ ID NO: 118995 - RNA, 18 nt, Artificial Sequence
  Synthetic
aaggccuuguaaguuggc

SEQ ID NO: 118996 - RNA, 19 nt, Artificial Sequence
  Synthetic
aaaggccuuguaaguuggc

SEQ ID NO: 118997 - RNA, 20 nt, Artificial Sequence
  Synthetic
gaaaggccuuguaaguuggc

SEQ ID NO: 118998 - RNA, 21 nt, Artificial Sequence
  Synthetic
agaaaggccuuguaaguuggc

SEQ ID NO: 118999 - RNA, 22 nt, Artificial Sequence
  Synthetic
uagaaaggccuuguaaguuggc

SEQ ID NO: 119000 - RNA, 23 nt, Artificial Sequence
  Synthetic
uuagaaaggccuuguaaguuggc

SEQ ID NO: 119001 - RNA, 24 nt, Artificial Sequence
  Synthetic
cuuagaaaggccuuguaaguuggc

SEQ ID NO: 119002 - RNA, 18 nt, Artificial Sequence
  Synthetic
uggauuuucugaguuggc

SEQ ID NO: 119003 - RNA, 19 nt, Artificial Sequence
  Synthetic
cuggauuuucugaguuggc

SEQ ID NO: 119004 - RNA, 20 nt, Artificial Sequence
  Synthetic
ucuggauuuucugaguuggc

SEQ ID NO: 119005 - RNA, 21 nt, Artificial Sequence
  Synthetic
aucuggauuuucugaguuggc

SEQ ID NO: 119006 - RNA, 22 nt, Artificial Sequence
  Synthetic
aaucuggauuuucugaguuggc

SEQ ID NO: 119007 - RNA, 23 nt, Artificial Sequence
  Synthetic
caaucuggauuuucugaguuggc

SEQ ID NO: 119008 - RNA, 24 nt, Artificial Sequence
  Synthetic
ccaaucuggauuuucugaguuggc

SEQ ID NO: 119009 - RNA, 18 nt, Artificial Sequence
  Synthetic
gggacugcgaauuuuggc

SEQ ID NO: 119010 - RNA, 19 nt, Artificial Sequence
  Synthetic
ugggacugcgaauuuuggc

SEQ ID NO: 119011 - RNA, 20 nt, Artificial Sequence
  Synthetic
uugggacugcgaauuuuggc

SEQ ID NO: 119012 - RNA, 21 nt, Artificial Sequence
  Synthetic
uuugggacugcgaauuuuggc

SEQ ID NO: 119013 - RNA, 22 nt, Artificial Sequence
  Synthetic
auuugggacugcgaauuuuggc

SEQ ID NO: 119014 - RNA, 23 nt, Artificial Sequence
  Synthetic
gauuugggacugcgaauuuuggc

SEQ ID NO: 119015 - RNA, 24 nt, Artificial Sequence
  Synthetic
agauuugggacugcgaauuuuggc

SEQ ID NO: 119016 - RNA, 18 nt, Artificial Sequence
  Synthetic
  misc_feature (16)..(16): n is a, c, g, or u
gcacaguugugaguangc

SEQ ID NO: 119017 - RNA, 19 nt, Artificial Sequence
  Synthetic
  misc_feature (17)..(17): n is a, c, g, or u
ggcacaguugugaguangc

SEQ ID NO: 119018 - RNA, 20 nt, Artificial Sequence
  Synthetic
  misc_feature (18)..(18): n is a, c, g, or u
uggcacaguugugaguangc

SEQ ID NO: 119019 - RNA, 21 nt, Artificial Sequence
  Synthetic
  misc_feature (19)..(19): n is a, c, g, or u
cuggcacaguugugaguangc

SEQ ID NO: 119020 - RNA, 22 nt, Artificial Sequence
  Synthetic
  misc_feature (20)..(20): n is a, c, g, or u
gcuggcacaguugugaguangc

SEQ ID NO: 119021 - RNA, 23 nt, Artificial Sequence
  Synthetic
  misc_feature (21)..(21): n is a, c, g, or u
ugcuggcacaguugugaguangc

SEQ ID NO: 119022 - RNA, 24 nt, Artificial Sequence
  Synthetic
  misc_feature (22)..(22): n is a, c, g, or u
cugcuggcacaguugugaguangc

SEQ ID NO: 119023 - RNA, 18 nt, Artificial Sequence
  Synthetic
  misc_feature (5)..(5): n is a, c, g, or u
  misc_feature (8)..(8): n is a, c, g, or u
  misc_feature (16)..(16): n is a, c, g, or u
guuungcnccagaccngc

SEQ ID NO: 119024 - RNA, 19 nt, Artificial Sequence
  Synthetic
  misc_feature (6)..(6): n is a, c, g, or u
  misc_feature (9)..(9): n is a, c, g, or u
  misc_feature (17)..(17): n is a, c, g, or u
aguuungcnccagaccngc

SEQ ID NO: 119025 - RNA, 20 nt, Artificial Sequence
  Synthetic
  misc_feature (7)..(7): n is a, c, g, or u
  misc_feature (10)..(10): n is a, c, g, or u
  misc_feature (18)..(18): n is a, c, g, or u
gaguuungcnccagaccngc

SEQ ID NO: 119026 - RNA, 21 nt, Artificial Sequence
  Synthetic
  misc_feature (8)..(8): n is a, c, g, or u
  misc_feature (11)..(11): n is a, c, g, or u
  misc_feature (19)..(19): n is a, c, g, or u
ugaguuungcnccagaccngc

SEQ ID NO: 119027 - RNA, 22 nt, Artificial Sequence
  Synthetic
  misc_feature (9)..(9): n is a, c, g, or u
  misc_feature (12)..(12): n is a, c, g, or u
  misc_feature (20)..(20): n is a, c, g, or u
augaguuungcnccagaccngc

SEQ ID NO: 119028 - RNA, 23 nt, Artificial Sequence
  Synthetic
  misc_feature (10)..(10): n is a, c, g, or u
  misc_feature (13)..(13): n is a, c, g, or u
  misc_feature (21)..(21): n is a, c, g, or u
gaugaguuungcnccagaccngc

SEQ ID NO: 119029 - RNA, 24 nt, Artificial Sequence
  Synthetic
  misc_feature (11)..(11): n is a, c, g, or u
  misc_feature (14)..(14): n is a, c, g, or u
  misc_feature (22)..(22): n is a, c, g, or u
cgaugaguuungcnccagaccngc

SEQ ID NO: 119030 - RNA, 18 nt, Artificial Sequence
  Synthetic
  misc_feature (16)..(16): n is a, c, g, or u
agcaggaaaguacagngc

SEQ ID NO: 119031 - RNA, 19 nt, Artificial Sequence
  Synthetic
  misc_feature (17)..(17): n is a, c, g, or u
cagcaggaaaguacagngc

SEQ ID NO: 119032 - RNA, 20 nt, Artificial Sequence
  Synthetic
  misc_feature (18)..(18): n is a, c, g, or u
ccagcaggaaaguacagngc

SEQ ID NO: 119033 - RNA, 21 nt, Artificial Sequence
  Synthetic
  misc_feature (19)..(19): n is a, c, g, or u
accagcaggaaaguacagngc

SEQ ID NO: 119034 - RNA, 22 nt, Artificial Sequence
  Synthetic
  misc_feature (20)..(20): n is a, c, g, or u
caccagcaggaaaguacagngc

SEQ ID NO: 119035 - RNA, 23 nt, Artificial Sequence
  Synthetic
  misc_feature (21)..(21): n is a, c, g, or u
ccaccagcaggaaaguacagngc

SEQ ID NO: 119036 - RNA, 24 nt, Artificial Sequence
  Synthetic
  misc_feature (22)..(22): n is a, c, g, or u
gccaccagcaggaaaguacagngc

SEQ ID NO: 119037 - RNA, 18 nt, Artificial Sequence
  Synthetic
  misc_feature (16)..(16): n is a, c, g, or u
agucccgaugaguuungc

SEQ ID NO: 119038 - RNA, 19 nt, Artificial Sequence
  Synthetic
  misc_feature (17)..(17): n is a, c, g, or u
cagucccgaugaguuungc

SEQ ID NO: 119039 - RNA, 20 nt, Artificial Sequence
  Synthetic
  misc_feature (18)..(18): n is a, c, g, or u
ucagucccgaugaguuungc

SEQ ID NO: 119040 - RNA, 21 nt, Artificial Sequence
  Synthetic
  misc_feature (19)..(19): n is a, c, g, or u
gucagucccgaugaguuungc

SEQ ID NO: 119041 - RNA, 22 nt, Artificial Sequence
  Synthetic
  misc_feature (20)..(20): n is a, c, g, or u
ugucagucccgaugaguuungc

SEQ ID NO: 119042 - RNA, 23 nt, Artificial Sequence
  Synthetic
  misc_feature (21)..(21): n is a, c, g, or u
uugucagucccgaugaguuungc

SEQ ID NO: 119043 - RNA, 24 nt, Artificial Sequence
  Synthetic
  misc_feature (22)..(22): n is a, c, g, or u
auugucagucccgaugaguuungc

SEQ ID NO: 119044 - RNA, 18 nt, Artificial Sequence
  Synthetic
aagaccaaccucccaugc

SEQ ID NO: 119045 - RNA, 19 nt, Artificial Sequence
  Synthetic
gaagaccaaccucccaugc

SEQ ID NO: 119046 - RNA, 20 nt, Artificial Sequence
  Synthetic
ggaagaccaaccucccaugc

SEQ ID NO: 119047 - RNA, 21 nt, Artificial Sequence
  Synthetic
uggaagaccaaccucccaugc

SEQ ID NO: 119048 - RNA, 22 nt, Artificial Sequence
  Synthetic
uuggaagaccaaccucccaugc

SEQ ID NO: 119049 - RNA, 23 nt, Artificial Sequence
  Synthetic
uuuggaagaccaaccucccaugc

SEQ ID NO: 119050 - RNA, 24 nt, Artificial Sequence
  Synthetic
guuuggaagaccaaccucccaugc

SEQ ID NO: 119051 - RNA, 18 nt, Artificial Sequence
  Synthetic
  misc_feature (2)..(2): n is a, c, g, or u
angggucaauguccaugc

SEQ ID NO: 119052 - RNA, 19 nt, Artificial Sequence
  Synthetic
  misc_feature (3)..(3): n is a, c, g, or u
uangggucaauguccaugc

SEQ ID NO: 119053 - RNA, 20 nt, Artificial Sequence
  Synthetic
  misc_feature (4)..(4): n is a, c, g, or u
auangggucaauguccaugc

SEQ ID NO: 119054 - RNA, 21 nt, Artificial Sequence
  Synthetic
  misc_feature (5)..(5): n is a, c, g, or u
uauangggucaauguccaugc

SEQ ID NO: 119055 - RNA, 22 nt, Artificial Sequence
  Synthetic
  misc_feature (6)..(6): n is a, c, g, or u
uuauangggucaauguccaugc

SEQ ID NO: 119056 - RNA, 23 nt, Artificial Sequence
  Synthetic
  misc_feature (7)..(7): n is a, c, g, or u
uuuauangggucaauguccaugc

SEQ ID NO: 119057 - RNA, 24 nt, Artificial Sequence
  Synthetic
  misc_feature (8)..(8): n is a, c, g, or u
cuuuauangggucaauguccaugc

SEQ ID NO: 119058 - RNA, 18 nt, Artificial Sequence
  Synthetic
ggcauagcagcaggaugc

SEQ ID NO: 119059 - RNA, 19 nt, Artificial Sequence
  Synthetic
aggcauagcagcaggaugc

SEQ ID NO: 119060 - RNA, 20 nt, Artificial Sequence
  Synthetic
gaggcauagcagcaggaugc

SEQ ID NO: 119061 - RNA, 21 nt, Artificial Sequence
  Synthetic
ugaggcauagcagcaggaugc

SEQ ID NO: 119062 - RNA, 22 nt, Artificial Sequence
  Synthetic
augaggcauagcagcaggaugc

SEQ ID NO: 119063 - RNA, 23 nt, Artificial Sequence
  Synthetic
gaugaggcauagcagcaggaugc

SEQ ID NO: 119064 - RNA, 24 nt, Artificial Sequence
  Synthetic
agaugaggcauagcagcaggaugc

SEQ ID NO: 119065 - RNA, 18 nt, Artificial Sequence
  Synthetic
auuugguggucuauaugc

SEQ ID NO: 119066 - RNA, 19 nt, Artificial Sequence
  Synthetic
cauuugguggucuauaugc

SEQ ID NO: 119067 - RNA, 20 nt, Artificial Sequence
  Synthetic
gcauuugguggucuauaugc

SEQ ID NO: 119068 - RNA, 21 nt, Artificial Sequence
  Synthetic
ggcauuugguggucuauaugc

SEQ ID NO: 119069 - RNA, 22 nt, Artificial Sequence
  Synthetic
gggcauuugguggucuauaugc

SEQ ID NO: 119070 - RNA, 23 nt, Artificial Sequence
  Synthetic
ggggcauuugguggucuauaugc

SEQ ID NO: 119071 - RNA, 24 nt, Artificial Sequence
  Synthetic
aggggcauuugguggucuauaugc

SEQ ID NO: 119072 - RNA, 18 nt, Artificial Sequence
  Synthetic
acagucuuugaaguaugc

SEQ ID NO: 119073 - RNA, 19 nt, Artificial Sequence
  Synthetic
cacagucuuugaaguaugc

SEQ ID NO: 119074 - RNA, 20 nt, Artificial Sequence
  Synthetic
acacagucuuugaaguaugc

SEQ ID NO: 119075 - RNA, 21 nt, Artificial Sequence
  Synthetic
cacacagucuuugaaguaugc

SEQ ID NO: 119076 - RNA, 22 nt, Artificial Sequence
  Synthetic
acacacagucuuugaaguaugc

SEQ ID NO: 119077 - RNA, 23 nt, Artificial Sequence
  Synthetic
aacacacagucuuugaaguaugc

SEQ ID NO: 119078 - RNA, 24 nt, Artificial Sequence
  Synthetic
aaacacacagucuuugaaguaugc

SEQ ID NO: 119079 - RNA, 18 nt, Artificial Sequence
  Synthetic
  misc_feature (5)..(5): n is a, c, g, or u
  misc_feature (8)..(8): n is a, c, g, or u
  misc_feature (14)..(14): n is a, c, g, or u
guucnugnggcaangugc

SEQ ID NO: 119080 - RNA, 19 nt, Artificial Sequence
  Synthetic
  misc_feature (6)..(6): n is a, c, g, or u
  misc_feature (9)..(9): n is a, c, g, or u
  misc_feature (15)..(15): n is a, c, g, or u
uguucnugnggcaangugc

SEQ ID NO: 119081 - RNA, 20 nt, Artificial Sequence
  Synthetic
  misc_feature (7)..(7): n is a, c, g, or u
  misc_feature (10)..(10): n is a, c, g, or u
  misc_feature (16)..(16): n is a, c, g, or u
auguucnugnggcaangugc

SEQ ID NO: 119082 - RNA, 21 nt, Artificial Sequence
  Synthetic
  misc_feature (8)..(8): n is a, c, g, or u
  misc_feature (11)..(11): n is a, c, g, or u
  misc_feature (17)..(17): n is a, c, g, or u
uauguucnugnggcaangugc

SEQ ID NO: 119083 - RNA, 22 nt, Artificial Sequence
  Synthetic
  misc_feature (9)..(9): n is a, c, g, or u
  misc_feature (12)..(12): n is a, c, g, or u
  misc_feature (18)..(18): n is a, c, g, or u
auauguucnugnggcaangugc

SEQ ID NO: 119084 - RNA, 23 nt, Artificial Sequence
  Synthetic
  misc_feature (10)..(10): n is a, c, g, or u
  misc_feature (13)..(13): n is a, c, g, or u
  misc_feature (19)..(19): n is a, c, g, or u
aauauguucnugnggcaangugc

SEQ ID NO: 119085 - RNA, 24 nt, Artificial Sequence
  Synthetic
  misc_feature (11)..(11): n is a, c, g, or u
  misc_feature (14)..(14): n is a, c, g, or u
  misc_feature (20)..(20): n is a, c, g, or u
caauauguucnugnggcaangugc

SEQ ID NO: 119086 - RNA, 18 nt, Artificial Sequence
  Synthetic
gucggucguugacauugc

SEQ ID NO: 119087 - RNA, 19 nt, Artificial Sequence
  Synthetic
ggucggucguugacauugc

SEQ ID NO: 119088 - RNA, 20 nt, Artificial Sequence
  Synthetic
aggucggucguugacauugc

SEQ ID NO: 119089 - RNA, 18 nt, Artificial Sequence
  Synthetic
ccaaccaguggggguugc

SEQ ID NO: 119090 - RNA, 19 nt, Artificial Sequence
  Synthetic
cccaaccaguggggguugc

SEQ ID NO: 119091 - RNA, 20 nt, Artificial Sequence
  Synthetic
ccccaaccaguggggguugc

SEQ ID NO: 119092 - RNA, 21 nt, Artificial Sequence
  Synthetic
gccccaaccaguggggguugc

SEQ ID NO: 119093 - RNA, 22 nt, Artificial Sequence
  Synthetic
agccccaaccaguggggguugc

SEQ ID NO: 119094 - RNA, 23 nt, Artificial Sequence
  Synthetic
aagccccaaccaguggggguugc

SEQ ID NO: 119095 - RNA, 24 nt, Artificial Sequence
  Synthetic
caagccccaaccaguggggguugc

SEQ ID NO: 119096 - RNA, 18 nt, Artificial Sequence
  Synthetic
cucccauagguauuuugc

SEQ ID NO: 119097 - RNA, 19 nt, Artificial Sequence
  Synthetic
acucccauagguauuuugc

SEQ ID NO: 119098 - RNA, 20 nt, Artificial Sequence
  Synthetic
cacucccauagguauuuugc

SEQ ID NO: 119099 - RNA, 21 nt, Artificial Sequence
  Synthetic
ccacucccauagguauuuugc

SEQ ID NO: 119100 - RNA, 22 nt, Artificial Sequence
  Synthetic
cccacucccauagguauuuugc

SEQ ID NO: 119101 - RNA, 23 nt, Artificial Sequence
  Synthetic
gcccacucccauagguauuuugc

SEQ ID NO: 119102 - RNA, 24 nt, Artificial Sequence
  Synthetic
ggcccacucccauagguauuuugc

SEQ ID NO: 119103 - RNA, 18 nt, Artificial Sequence
  Synthetic
  misc_feature (17)..(17): n is a, c, g, or u
ccuccuaguacaaaganc

SEQ ID NO: 119104 - RNA, 19 nt, Artificial Sequence
  Synthetic
  misc_feature (18)..(18): n is a, c, g, or u
gccuccuaguacaaaganc

SEQ ID NO: 119105 - RNA, 20 nt, Artificial Sequence
  Synthetic
  misc_feature (19)..(19): n is a, c, g, or u
agccuccuaguacaaaganc

SEQ ID NO: 119106 - RNA, 21 nt, Artificial Sequence
  Synthetic
  misc_feature (20)..(20): n is a, c, g, or u
cagccuccuaguacaaaganc

SEQ ID NO: 119107 - RNA, 22 nt, Artificial Sequence
  Synthetic
  misc_feature (21)..(21): n is a, c, g, or u
acagccuccuaguacaaaganc

SEQ ID NO: 119108 - RNA, 23 nt, Artificial Sequence
  Synthetic
  misc_feature (22)..(22): n is a, c, g, or u
uacagccuccuaguacaaaganc

SEQ ID NO: 119109 - RNA, 24 nt, Artificial Sequence
  Synthetic
  misc_feature (23)..(23): n is a, c, g, or u
cuacagccuccuaguacaaaganc

SEQ ID NO: 119110 - RNA, 18 nt, Artificial Sequence
  Synthetic
  misc_feature (17)..(17): n is a, c, g, or u
ccugaggaugagugucnc

SEQ ID NO: 119111 - RNA, 19 nt, Artificial Sequence
  Synthetic
  misc_feature (18)..(18): n is a, c, g, or u
gccugaggaugagugucnc

SEQ ID NO: 119112 - RNA, 20 nt, Artificial Sequence
  Synthetic
  misc_feature (19)..(19): n is a, c, g, or u
ggccugaggaugagugucnc

SEQ ID NO: 119113 - RNA, 21 nt, Artificial Sequence
  Synthetic
  misc_feature (20)..(20): n is a, c, g, or u
uggccugaggaugagugucnc

SEQ ID NO: 119114 - RNA, 22 nt, Artificial Sequence
  Synthetic
  misc_feature (21)..(21): n is a, c, g, or u
auggccugaggaugagugucnc

SEQ ID NO: 119115 - RNA, 23 nt, Artificial Sequence
  Synthetic
  misc_feature (22)..(22): n is a, c, g, or u
cauggccugaggaugagugucnc

SEQ ID NO: 119116 - RNA, 24 nt, Artificial Sequence
  Synthetic
  misc_feature (23)..(23): n is a, c, g, or u
gcauggccugaggaugagugucnc

SEQ ID NO: 119117 - RNA, 18 nt, Artificial Sequence
  Synthetic
  misc_feature (12)..(13): n is a, c, g, or u
  misc_feature (17)..(17): n is a, c, g, or u
ucggucgguacnncagnc

SEQ ID NO: 119118 - RNA, 19 nt, Artificial Sequence
  Synthetic
  misc_feature (13)..(14): n is a, c, g, or u
  misc_feature (18)..(18): n is a, c, g, or u
gucggucgguacnncagnc

SEQ ID NO: 119119 - RNA, 20 nt, Artificial Sequence
  Synthetic
  misc_feature (14)..(15): n is a, c, g, or u
  misc_feature (19)..(19): n is a, c, g, or u
ggucggucgguacnncagnc

SEQ ID NO: 119120 - RNA, 21 nt, Artificial Sequence
  Synthetic
  misc_feature (15)..(16): n is a, c, g, or u
  misc_feature (20)..(20): n is a, c, g, or u
uggucggucgguacnncagnc

SEQ ID NO: 119121 - RNA, 22 nt, Artificial Sequence
  Synthetic
  misc_feature (16)..(17): n is a, c, g, or u
  misc_feature (21)..(21): n is a, c, g, or u
guggucggucgguacnncagnc

SEQ ID NO: 119122 - RNA, 23 nt, Artificial Sequence
  Synthetic
  misc_feature (17)..(18): n is a, c, g, or u
  misc_feature (22)..(22): n is a, c, g, or u
cguggucggucgguacnncagnc

SEQ ID NO: 119123 - RNA, 24 nt, Artificial Sequence
  Synthetic
  misc_feature (18)..(19): n is a, c, g, or u
  misc_feature (23)..(23): n is a, c, g, or u
ccguggucggucgguacnncagnc

SEQ ID NO: 119124 - RNA, 18 nt, Artificial Sequence
  Synthetic
  misc_feature (17)..(17): n is a, c, g, or u
uaaugauuaacuacaunc

SEQ ID NO: 119125 - RNA, 19 nt, Artificial Sequence
  Synthetic
  misc_feature (18)..(18): n is a, c, g, or u
guaaugauuaacuacaunc

SEQ ID NO: 119126 - RNA, 20 nt, Artificial Sequence
  Synthetic
  misc_feature (19)..(19): n is a, c, g, or u
aguaaugauuaacuacaunc

SEQ ID NO: 119127 - RNA, 21 nt, Artificial Sequence
  Synthetic
  misc_feature (20)..(20): n is a, c, g, or u
aaguaaugauuaacuacaunc

SEQ ID NO: 119128 - RNA, 22 nt, Artificial Sequence
  Synthetic
  misc_feature (21)..(21): n is a, c, g, or u
gaaguaaugauuaacuacaunc

SEQ ID NO: 119129 - RNA, 23 nt, Artificial Sequence
  Synthetic
  misc_feature (22)..(22): n is a, c, g, or u
ggaaguaaugauuaacuacaunc

SEQ ID NO: 119130 - RNA, 24 nt, Artificial Sequence
  Synthetic
  misc_feature (23)..(23): n is a, c, g, or u
uggaaguaaugauuaacuacaunc

SEQ ID NO: 119131 - RNA, 18 nt, Artificial Sequence
  Synthetic
  misc_feature (17)..(17): n is a, c, g, or u
caagaacaguuucucunc

SEQ ID NO: 119132 - RNA, 19 nt, Artificial Sequence
  Synthetic
  misc_feature (18)..(18): n is a, c, g, or u
ucaagaacaguuucucunc

SEQ ID NO: 119133 - RNA, 20 nt, Artificial Sequence
  Synthetic
  misc_feature (19)..(19): n is a, c, g, or u
uucaagaacaguuucucunc

SEQ ID NO: 119134 - RNA, 21 nt, Artificial Sequence
  Synthetic
  misc_feature (20)..(20): n is a, c, g, or u
auucaagaacaguuucucunc

SEQ ID NO: 119135 - RNA, 22 nt, Artificial Sequence
  Synthetic
  misc_feature (21)..(21): n is a, c, g, or u
uauucaagaacaguuucucunc

SEQ ID NO: 119136 - RNA, 23 nt, Artificial Sequence
  Synthetic
  misc_feature (22)..(22): n is a, c, g, or u
auauucaagaacaguuucucunc

SEQ ID NO: 119137 - RNA, 24 nt, Artificial Sequence
  Synthetic
  misc_feature (23)..(23): n is a, c, g, or u
aauauucaagaacaguuucucunc

SEQ ID NO: 119138 - RNA, 18 nt, Artificial Sequence
  Synthetic
  misc_feature (11)..(11): n is a, c, g, or u
  misc_feature (17)..(17): n is a, c, g, or u
gguucagauanuguuunc

SEQ ID NO: 119139 - RNA, 19 nt, Artificial Sequence
  Synthetic
  misc_feature (12)..(12): n is a, c, g, or u
  misc_feature (18)..(18): n is a, c, g, or u
agguucagauanuguuunc

SEQ ID NO: 119140 - RNA, 20 nt, Artificial Sequence
  Synthetic
  misc_feature (13)..(13): n is a, c, g, or u
  misc_feature (19)..(19): n is a, c, g, or u
aagguucagauanuguuunc

SEQ ID NO: 119141 - RNA, 21 nt, Artificial Sequence
  Synthetic
  misc_feature (14)..(14): n is a, c, g, or u
  misc_feature (20)..(20): n is a, c, g, or u
aaagguucagauanuguuunc

SEQ ID NO: 119142 - RNA, 22 nt, Artificial Sequence
  Synthetic
  misc_feature (15)..(15): n is a, c, g, or u
  misc_feature (21)..(21): n is a, c, g, or u
uaaagguucagauanuguuunc

SEQ ID NO: 119143 - RNA, 23 nt, Artificial Sequence
  Synthetic
  misc_feature (16)..(16): n is a, c, g, or u
  misc_feature (22)..(22): n is a, c, g, or u
guaaagguucagauanuguuunc

SEQ ID NO: 119144 - RNA, 24 nt, Artificial Sequence
  Synthetic
  misc_feature (17)..(17): n is a, c, g, or u
  misc_feature (23)..(23): n is a, c, g, or u
gguaaagguucagauanuguuunc

SEQ ID NO: 119145 - RNA, 18 nt, Artificial Sequence
  Synthetic
  misc_feature (7)..(7): n is a, c, g, or u
uugacanacuuuccaauc

SEQ ID NO: 119146 - RNA, 19 nt, Artificial Sequence
  Synthetic
  misc_feature (8)..(8): n is a, c, g, or u
guugacanacuuuccaauc

SEQ ID NO: 119147 - RNA, 20 nt, Artificial Sequence
  Synthetic
  misc_feature (9)..(9): n is a, c, g, or u
cguugacanacuuuccaauc

SEQ ID NO: 119148 - RNA, 21 nt, Artificial Sequence
  Synthetic
  misc_feature (10)..(10): n is a, c, g, or u
ucguugacanacuuuccaauc

SEQ ID NO: 119149 - RNA, 22 nt, Artificial Sequence
  Synthetic
  misc_feature (11)..(11): n is a, c, g, or u
uucguugacanacuuuccaauc

SEQ ID NO: 119150 - RNA, 23 nt, Artificial Sequence
  Synthetic
  misc_feature (12)..(12): n is a, c, g, or u
auucguugacanacuuuccaauc

SEQ ID NO: 119151 - RNA, 24 nt, Artificial Sequence
  Synthetic
  misc_feature (13)..(13): n is a, c, g, or u
aauucguugacanacuuuccaauc

SEQ ID NO: 119152 - RNA, 18 nt, Artificial Sequence
  Synthetic
  misc_feature (13)..(13): n is a, c, g, or u
ggcggugucgagnagauc

SEQ ID NO: 119153 - RNA, 19 nt, Artificial Sequence
  Synthetic
  misc_feature (14)..(14): n is a, c, g, or u
aggcggugucgagnagauc

SEQ ID NO: 119154 - RNA, 20 nt, Artificial Sequence
  Synthetic
  misc_feature (15)..(15): n is a, c, g, or u
gaggcggugucgagnagauc

SEQ ID NO: 119155 - RNA, 21 nt, Artificial Sequence
  Synthetic
  misc_feature (16)..(16): n is a, c, g, or u
agaggcggugucgagnagauc

SEQ ID NO: 119156 - RNA, 22 nt, Artificial Sequence
  Synthetic
  misc_feature (17)..(17): n is a, c, g, or u
cagaggcggugucgagnagauc

SEQ ID NO: 119157 - RNA, 23 nt, Artificial Sequence
  Synthetic
  misc_feature (18)..(18): n is a, c, g, or u
gcagaggcggugucgagnagauc

SEQ ID NO: 119158 - RNA, 24 nt, Artificial Sequence
  Synthetic
  misc_feature (19)..(19): n is a, c, g, or u
agcagaggcggugucgagnagauc

SEQ ID NO: 119159 - RNA, 18 nt, Artificial Sequence
  Synthetic
  misc_feature (1)..(1): n is a, c, g, or u
ngcccugacucugggauc

SEQ ID NO: 119160 - RNA, 19 nt, Artificial Sequence
  Synthetic
  misc_feature (2)..(2): n is a, c, g, or u
gngcccugacucugggauc

SEQ ID NO: 119161 - RNA, 20 nt, Artificial Sequence
  Synthetic
  misc_feature (3)..(3): n is a, c, g, or u
agngcccugacucugggauc

SEQ ID NO: 119162 - RNA, 21 nt, Artificial Sequence
  Synthetic
  misc_feature (4)..(4): n is a, c, g, or u
cagngcccugacucugggauc

SEQ ID NO: 119163 - RNA, 22 nt, Artificial Sequence
  Synthetic
  misc_feature (5)..(5): n is a, c, g, or u
acagngcccugacucugggauc

SEQ ID NO: 119164 - RNA, 23 nt, Artificial Sequence
  Synthetic
  misc_feature (6)..(6): n is a, c, g, or u
uacagngcccugacucugggauc

SEQ ID NO: 119165 - RNA, 24 nt, Artificial Sequence
  Synthetic
  misc_feature (7)..(7): n is a, c, g, or u
guacagngcccugacucugggauc

SEQ ID NO: 119166 - RNA, 18 nt, Artificial Sequence
  Synthetic
aguuccgcaguauggauc

SEQ ID NO: 119167 - RNA, 19 nt, Artificial Sequence
  Synthetic
gaguuccgcaguauggauc

SEQ ID NO: 119168 - RNA, 20 nt, Artificial Sequence
  Synthetic
ggaguuccgcaguauggauc

SEQ ID NO: 119169 - RNA, 21 nt, Artificial Sequence
  Synthetic
aggaguuccgcaguauggauc

SEQ ID NO: 119170 - RNA, 22 nt, Artificial Sequence
  Synthetic
uaggaguuccgcaguauggauc

SEQ ID NO: 119171 - RNA, 23 nt, Artificial Sequence
  Synthetic
cuaggaguuccgcaguauggauc

SEQ ID NO: 119172 - RNA, 24 nt, Artificial Sequence
  Synthetic
gcuaggaguuccgcaguauggauc

SEQ ID NO: 119173 - RNA, 18 nt, Artificial Sequence
  Synthetic
  misc_feature (8)..(8): n is a, c, g, or u
ugcuggunguugaugauc

SEQ ID NO: 119174 - RNA, 19 nt, Artificial Sequence
  Synthetic
  misc_feature (9)..(9): n is a, c, g, or u
gugcuggunguugaugauc

SEQ ID NO: 119175 - RNA, 20 nt, Artificial Sequence
  Synthetic
  misc_feature (10)..(10): n is a, c, g, or u
ggugcuggunguugaugauc

SEQ ID NO: 119176 - RNA, 21 nt, Artificial Sequence
  Synthetic
  misc_feature (11)..(11): n is a, c, g, or u
cggugcuggunguugaugauc

SEQ ID NO: 119177 - RNA, 22 nt, Artificial Sequence
  Synthetic
  misc_feature (12)..(12): n is a, c, g, or u
ccggugcuggunguugaugauc

SEQ ID NO: 119178 - RNA, 23 nt, Artificial Sequence
  Synthetic
  misc_feature (13)..(13): n is a, c, g, or u
uccggugcuggunguugaugauc

SEQ ID NO: 119179 - RNA, 24 nt, Artificial Sequence
  Synthetic
  misc_feature (14)..(14): n is a, c, g, or u
guccggugcuggunguugaugauc

SEQ ID NO: 119180 - RNA, 18 nt, Artificial Sequence
  Synthetic
  misc_feature (1)..(1): n is a, c, g, or u
  misc_feature (10)..(10): n is a, c, g, or u
ngguuugaunccuuuauc

SEQ ID NO: 119181 - RNA, 19 nt, Artificial Sequence
  Synthetic
  misc_feature (2)..(2): n is a, c, g, or u
  misc_feature (11)..(11): n is a, c, g, or u
angguuugaunccuuuauc

SEQ ID NO: 119182 - RNA, 20 nt, Artificial Sequence
  Synthetic
  misc_feature (3)..(3): n is a, c, g, or u
  misc_feature (12)..(12): n is a, c, g, or u
uangguuugaunccuuuauc

SEQ ID NO: 119183 - RNA, 21 nt, Artificial Sequence
  Synthetic
  misc_feature (4)..(4): n is a, c, g, or u
  misc_feature (13)..(13): n is a, c, g, or u
auangguuugaunccuuuauc

SEQ ID NO: 119184 - RNA, 22 nt, Artificial Sequence
  Synthetic
  misc_feature (5)..(5): n is a, c, g, or u
  misc_feature (14)..(14): n is a, c, g, or u
aauangguuugaunccuuuauc

SEQ ID NO: 119185 - RNA, 23 nt, Artificial Sequence
  Synthetic
  misc_feature (6)..(6): n is a, c, g, or u
  misc_feature (15)..(15): n is a, c, g, or u
uaauangguuugaunccuuuauc

SEQ ID NO: 119186 - RNA, 24 nt, Artificial Sequence
  Synthetic
  misc_feature (7)..(7): n is a, c, g, or u
  misc_feature (16)..(16): n is a, c, g, or u
auaauangguuugaunccuuuauc

SEQ ID NO: 119187 - RNA, 18 nt, Artificial Sequence
  Synthetic
caaaaaagagaguaacuc

SEQ ID NO: 119188 - RNA, 19 nt, Artificial Sequence
  Synthetic
gcaaaaaagagaguaacuc

SEQ ID NO: 119189 - RNA, 20 nt, Artificial Sequence
  Synthetic
ggcaaaaaagagaguaacuc

SEQ ID NO: 119190 - RNA, 21 nt, Artificial Sequence
  Synthetic
aggcaaaaaagagaguaacuc

SEQ ID NO: 119191 - RNA, 22 nt, Artificial Sequence
  Synthetic
aaggcaaaaaagagaguaacuc

SEQ ID NO: 119192 - RNA, 23 nt, Artificial Sequence
  Synthetic
gaaggcaaaaaagagaguaacuc

SEQ ID NO: 119193 - RNA, 24 nt, Artificial Sequence
  Synthetic
agaaggcaaaaaagagaguaacuc

SEQ ID NO: 119194 - RNA, 18 nt, Artificial Sequence
  Synthetic
gagugcgaauccacacuc

SEQ ID NO: 119195 - RNA, 19 nt, Artificial Sequence
  Synthetic
ggagugcgaauccacacuc

SEQ ID NO: 119196 - RNA, 20 nt, Artificial Sequence
  Synthetic
aggagugcgaauccacacuc

SEQ ID NO: 119197 - RNA, 21 nt, Artificial Sequence
  Synthetic
gaggagugcgaauccacacuc

SEQ ID NO: 119198 - RNA, 22 nt, Artificial Sequence
  Synthetic
ggaggagugcgaauccacacuc

SEQ ID NO: 119199 - RNA, 23 nt, Artificial Sequence
  Synthetic
aggaggagugcgaauccacacuc

SEQ ID NO: 119200 - RNA, 24 nt, Artificial Sequence
  Synthetic
caggaggagugcgaauccacacuc

SEQ ID NO: 119201 - RNA, 18 nt, Artificial Sequence
  Synthetic
ccccaacuccucccacuc

SEQ ID NO: 119202 - RNA, 19 nt, Artificial Sequence
  Synthetic
cccccaacuccucccacuc

SEQ ID NO: 119203 - RNA, 20 nt, Artificial Sequence
  Synthetic
ucccccaacuccucccacuc

SEQ ID NO: 119204 - RNA, 21 nt, Artificial Sequence
  Synthetic
cucccccaacuccucccacuc

SEQ ID NO: 119205 - RNA, 22 nt, Artificial Sequence
  Synthetic
ccucccccaacuccucccacuc

SEQ ID NO: 119206 - RNA, 23 nt, Artificial Sequence
  Synthetic
uccucccccaacuccucccacuc

SEQ ID NO: 119207 - RNA, 24 nt, Artificial Sequence
  Synthetic
cuccucccccaacuccucccacuc

SEQ ID NO: 119208 - RNA, 18 nt, Artificial Sequence
  Synthetic
acaauguuccggagacuc

SEQ ID NO: 119209 - RNA, 19 nt, Artificial Sequence
  Synthetic
aacaauguuccggagacuc

SEQ ID NO: 119210 - RNA, 20 nt, Artificial Sequence
  Synthetic
gaacaauguuccggagacuc

SEQ ID NO: 119211 - RNA, 21 nt, Artificial Sequence
  Synthetic
ugaacaauguuccggagacuc

SEQ ID NO: 119212 - RNA, 22 nt, Artificial Sequence
  Synthetic
gugaacaauguuccggagacuc

SEQ ID NO: 119213 - RNA, 23 nt, Artificial Sequence
  Synthetic
ggugaacaauguuccggagacuc

SEQ ID NO: 119214 - RNA, 24 nt, Artificial Sequence
  Synthetic
aggugaacaauguuccggagacuc

SEQ ID NO: 119215 - RNA, 18 nt, Artificial Sequence
  Synthetic
uugacauugcugaaaguc

SEQ ID NO: 119216 - RNA, 19 nt, Artificial Sequence
  Synthetic
guugacauugcugaaaguc

SEQ ID NO: 119217 - RNA, 20 nt, Artificial Sequence
  Synthetic
cguugacauugcugaaaguc

SEQ ID NO: 119218 - RNA, 18 nt, Artificial Sequence
  Synthetic
  misc_feature (3)..(3): n is a, c, g, or u
aanagaaggaaagaaguc

SEQ ID NO: 119219 - RNA, 19 nt, Artificial Sequence
  Synthetic
  misc_feature (4)..(4): n is a, c, g, or u
gaanagaaggaaagaaguc

SEQ ID NO: 119220 - RNA, 20 nt, Artificial Sequence
  Synthetic
  misc_feature (5)..(5): n is a, c, g, or u
cgaanagaaggaaagaaguc

SEQ ID NO: 119221 - RNA, 21 nt, Artificial Sequence
  Synthetic
  misc_feature (6)..(6): n is a, c, g, or u
ucgaanagaaggaaagaaguc

SEQ ID NO: 119222 - RNA, 22 nt, Artificial Sequence
  Synthetic
  misc_feature (7)..(7): n is a, c, g, or u
cucgaanagaaggaaagaaguc

SEQ ID NO: 119223 - RNA, 23 nt, Artificial Sequence
  Synthetic
  misc_feature (8)..(8): n is a, c, g, or u
ucucgaanagaaggaaagaaguc

SEQ ID NO: 119224 - RNA, 24 nt, Artificial Sequence
  Synthetic
  misc_feature (9)..(9): n is a, c, g, or u
aucucgaanagaaggaaagaaguc

SEQ ID NO: 119225 - RNA, 18 nt, Artificial Sequence
  Synthetic
  misc_feature (5)..(5): n is a, c, g, or u
cucanuaaacacacaguc

SEQ ID NO: 119226 - RNA, 19 nt, Artificial Sequence
  Synthetic
  misc_feature (6)..(6): n is a, c, g, or u
acucanuaaacacacaguc

SEQ ID NO: 119227 - RNA, 20 nt, Artificial Sequence
  Synthetic
  misc_feature (7)..(7): n is a, c, g, or u
cacucanuaaacacacaguc

SEQ ID NO: 119228 - RNA, 21 nt, Artificial Sequence
  Synthetic
  misc_feature (8)..(8): n is a, c, g, or u
ccacucanuaaacacacaguc

SEQ ID NO: 119229 - RNA, 22 nt, Artificial Sequence
  Synthetic
  misc_feature (9)..(9): n is a, c, g, or u
cccacucanuaaacacacaguc

SEQ ID NO: 119230 - RNA, 23 nt, Artificial Sequence
  Synthetic
  misc_feature (10)..(10): n is a, c, g, or u
ucccacucanuaaacacacaguc

SEQ ID NO: 119231 - RNA, 24 nt, Artificial Sequence
  Synthetic
  misc_feature (11)..(11): n is a, c, g, or u
cucccacucanuaaacacacaguc

SEQ ID NO: 119232 - RNA, 18 nt, Artificial Sequence
  Synthetic
caacauaccuugauaguc

SEQ ID NO: 119233 - RNA, 19 nt, Artificial Sequence
  Synthetic
gcaacauaccuugauaguc

SEQ ID NO: 119234 - RNA, 20 nt, Artificial Sequence
  Synthetic
ggcaacauaccuugauaguc

SEQ ID NO: 119235 - RNA, 21 nt, Artificial Sequence
  Synthetic
gggcaacauaccuugauaguc

SEQ ID NO: 119236 - RNA, 22 nt, Artificial Sequence
  Synthetic
cgggcaacauaccuugauaguc

SEQ ID NO: 119237 - RNA, 23 nt, Artificial Sequence
  Synthetic
acgggcaacauaccuugauaguc

SEQ ID NO: 119238 - RNA, 24 nt, Artificial Sequence
  Synthetic
aacgggcaacauaccuugauaguc

SEQ ID NO: 119239 - RNA, 18 nt, Artificial Sequence
  Synthetic
acaggugcaguuuccguc

SEQ ID NO: 119240 - RNA, 19 nt, Artificial Sequence
  Synthetic
uacaggugcaguuuccguc

SEQ ID NO: 119241 - RNA, 20 nt, Artificial Sequence
  Synthetic
auacaggugcaguuuccguc

SEQ ID NO: 119242 - RNA, 21 nt, Artificial Sequence
  Synthetic
aauacaggugcaguuuccguc

SEQ ID NO: 119243 - RNA, 22 nt, Artificial Sequence
  Synthetic
gaauacaggugcaguuuccguc

SEQ ID NO: 119244 - RNA, 23 nt, Artificial Sequence
  Synthetic
ggaauacaggugcaguuuccguc

SEQ ID NO: 119245 - RNA, 24 nt, Artificial Sequence
  Synthetic
gggaauacaggugcaguuuccguc

SEQ ID NO: 119246 - RNA, 18 nt, Artificial Sequence
  Synthetic
accaguggggguugcguc

SEQ ID NO: 119247 - RNA, 19 nt, Artificial Sequence
  Synthetic
aaccaguggggguugcguc

SEQ ID NO: 119248 - RNA, 20 nt, Artificial Sequence
  Synthetic
caaccaguggggguugcguc

SEQ ID NO: 119249 - RNA, 21 nt, Artificial Sequence
  Synthetic
ccaaccaguggggguugcguc

SEQ ID NO: 119250 - RNA, 22 nt, Artificial Sequence
  Synthetic
cccaaccaguggggguugcguc

SEQ ID NO: 119251 - RNA, 23 nt, Artificial Sequence
  Synthetic
ccccaaccaguggggguugcguc

SEQ ID NO: 119252 - RNA, 24 nt, Artificial Sequence
  Synthetic
gccccaaccaguggggguugcguc

SEQ ID NO: 119253 - RNA, 18 nt, Artificial Sequence
  Synthetic
gccccgggaggggucguc

SEQ ID NO: 119254 - RNA, 19 nt, Artificial Sequence
  Synthetic
ggccccgggaggggucguc

SEQ ID NO: 119255 - RNA, 20 nt, Artificial Sequence
  Synthetic
cggccccgggaggggucguc

SEQ ID NO: 119256 - RNA, 21 nt, Artificial Sequence
  Synthetic
gcggccccgggaggggucguc

SEQ ID NO: 119257 - RNA, 22 nt, Artificial Sequence
  Synthetic
agcggccccgggaggggucguc

SEQ ID NO: 119258 - RNA, 23 nt, Artificial Sequence
  Synthetic
aagcggccccgggaggggucguc

SEQ ID NO: 119259 - RNA, 24 nt, Artificial Sequence
  Synthetic
caagcggccccgggaggggucguc

SEQ ID NO: 119260 - RNA, 18 nt, Artificial Sequence
  Synthetic
gcgauugagaccuucguc

SEQ ID NO: 119261 - RNA, 19 nt, Artificial Sequence
  Synthetic
ggcgauugagaccuucguc

SEQ ID NO: 119262 - RNA, 20 nt, Artificial Sequence
  Synthetic
cggcgauugagaccuucguc

SEQ ID NO: 119263 - RNA, 21 nt, Artificial Sequence
  Synthetic
gcggcgauugagaccuucguc

SEQ ID NO: 119264 - RNA, 22 nt, Artificial Sequence
  Synthetic
cgcggcgauugagaccuucguc

SEQ ID NO: 119265 - RNA, 23 nt, Artificial Sequence
  Synthetic
acgcggcgauugagaccuucguc

SEQ ID NO: 119266 - RNA, 24 nt, Artificial Sequence
  Synthetic
gacgcggcgauugagaccuucguc

SEQ ID NO: 119267 - RNA, 18 nt, Artificial Sequence
  Synthetic
uaugccucaaggucgguc

SEQ ID NO: 119268 - RNA, 19 nt, Artificial Sequence
  Synthetic
guaugccucaaggucgguc

SEQ ID NO: 119269 - RNA, 20 nt, Artificial Sequence
  Synthetic
aguaugccucaaggucgguc

SEQ ID NO: 119270 - RNA, 21 nt, Artificial Sequence
  Synthetic
aaguaugccucaaggucgguc

SEQ ID NO: 119271 - RNA, 22 nt, Artificial Sequence
  Synthetic
gaaguaugccucaaggucgguc

SEQ ID NO: 119272 - RNA, 23 nt, Artificial Sequence
  Synthetic
ugaaguaugccucaaggucgguc

SEQ ID NO: 119273 - RNA, 24 nt, Artificial Sequence
  Synthetic
uugaaguaugccucaaggucgguc

SEQ ID NO: 119274 - RNA, 18 nt, Artificial Sequence
  Synthetic
guaacacgagcagggguc

SEQ ID NO: 119275 - RNA, 19 nt, Artificial Sequence
  Synthetic
uguaacacgagcagggguc

SEQ ID NO: 119276 - RNA, 20 nt, Artificial Sequence
  Synthetic
cuguaacacgagcagggguc

SEQ ID NO: 119277 - RNA, 21 nt, Artificial Sequence
  Synthetic
ccuguaacacgagcagggguc

SEQ ID NO: 119278 - RNA, 22 nt, Artificial Sequence
  Synthetic
gccuguaacacgagcagggguc

SEQ ID NO: 119279 - RNA, 23 nt, Artificial Sequence
  Synthetic
cgccuguaacacgagcagggguc

SEQ ID NO: 119280 - RNA, 24 nt, Artificial Sequence
  Synthetic
ccgccuguaacacgagcagggguc

SEQ ID NO: 119281 - RNA, 18 nt, Artificial Sequence
  Synthetic
  misc_feature (15)..(15): n is a, c, g, or u
uuucccaccuuaugnguc

SEQ ID NO: 119282 - RNA, 19 nt, Artificial Sequence
  Synthetic
  misc_feature (16)..(16): n is a, c, g, or u
guuucccaccuuaugnguc

SEQ ID NO: 119283 - RNA, 20 nt, Artificial Sequence
  Synthetic
  misc_feature (17)..(17): n is a, c, g, or u
aguuucccaccuuaugnguc

SEQ ID NO: 119284 - RNA, 21 nt, Artificial Sequence
  Synthetic
  misc_feature (18)..(18): n is a, c, g, or u
aaguuucccaccuuaugnguc

SEQ ID NO: 119285 - RNA, 22 nt, Artificial Sequence
  Synthetic
  misc_feature (19)..(19): n is a, c, g, or u
aaaguuucccaccuuaugnguc

SEQ ID NO: 119286 - RNA, 23 nt, Artificial Sequence
  Synthetic
  misc_feature (20)..(20): n is a, c, g, or u
uaaaguuucccaccuuaugnguc

SEQ ID NO: 119287 - RNA, 24 nt, Artificial Sequence
  Synthetic
  misc_feature (21)..(21): n is a, c, g, or u
guaaaguuucccaccuuaugnguc

SEQ ID NO: 119288 - RNA, 18 nt, Artificial Sequence
  Synthetic
  misc_feature (14)..(15): n is a, c, g, or u
uguaaauaaugucnnguc

SEQ ID NO: 119289 - RNA, 19 nt, Artificial Sequence
  Synthetic
  misc_feature (1)..(1): n is a, c, g, or u
  misc_feature (15)..(16): n is a, c, g, or u
nuguaaauaaugucnnguc

SEQ ID NO: 119290 - RNA, 20 nt, Artificial Sequence
  Synthetic
  misc_feature (2)..(2): n is a, c, g, or u
  misc_feature (16)..(17): n is a, c, g, or u
unuguaaauaaugucnnguc

SEQ ID NO: 119291 - RNA, 21 nt, Artificial Sequence
  Synthetic
  misc_feature (3)..(3): n is a, c, g, or u
  misc_feature (17)..(18): n is a, c, g, or u
gunuguaaauaaugucnnguc

SEQ ID NO: 119292 - RNA, 22 nt, Artificial Sequence
  Synthetic
  misc_feature (4)..(4): n is a, c, g, or u
  misc_feature (18)..(19): n is a, c, g, or u
agunuguaaauaaugucnnguc

SEQ ID NO: 119293 - RNA, 23 nt, Artificial Sequence
  Synthetic
  misc_feature (5)..(5): n is a, c, g, or u
  misc_feature (19)..(20): n is a, c, g, or u
gagunuguaaauaaugucnnguc

SEQ ID NO: 119294 - RNA, 24 nt, Artificial Sequence
  Synthetic
  misc_feature (6)..(6): n is a, c, g, or u
  misc_feature (20)..(21): n is a, c, g, or u
agagunuguaaauaaugucnnguc

SEQ ID NO: 119295 - RNA, 18 nt, Artificial Sequence
  Synthetic
cuccugcaaaugaauguc

SEQ ID NO: 119296 - RNA, 19 nt, Artificial Sequence
  Synthetic
ccuccugcaaaugaauguc

SEQ ID NO: 119297 - RNA, 20 nt, Artificial Sequence
  Synthetic
uccuccugcaaaugaauguc

SEQ ID NO: 119298 - RNA, 21 nt, Artificial Sequence
  Synthetic
guccuccugcaaaugaauguc

SEQ ID NO: 119299 - RNA, 22 nt, Artificial Sequence
  Synthetic
uguccuccugcaaaugaauguc

SEQ ID NO: 119300 - RNA, 23 nt, Artificial Sequence
  Synthetic
auguccuccugcaaaugaauguc

SEQ ID NO: 119301 - RNA, 24 nt, Artificial Sequence
  Synthetic
aauguccuccugcaaaugaauguc

SEQ ID NO: 119302 - RNA, 18 nt, Artificial Sequence
  Synthetic
auugugaggauuuuuguc

SEQ ID NO: 119303 - RNA, 19 nt, Artificial Sequence
  Synthetic
uauugugaggauuuuuguc

SEQ ID NO: 119304 - RNA, 20 nt, Artificial Sequence
  Synthetic
guauugugaggauuuuuguc

SEQ ID NO: 119305 - RNA, 21 nt, Artificial Sequence
  Synthetic
gguauugugaggauuuuuguc

SEQ ID NO: 119306 - RNA, 22 nt, Artificial Sequence
  Synthetic
ugguauugugaggauuuuuguc

SEQ ID NO: 119307 - RNA, 23 nt, Artificial Sequence
  Synthetic
gugguauugugaggauuuuuguc

SEQ ID NO: 119308 - RNA, 24 nt, Artificial Sequence
  Synthetic
ugugguauugugaggauuuuuguc

SEQ ID NO: 119309 - RNA, 18 nt, Artificial Sequence
  Synthetic
ccaaaagacccacaauuc

SEQ ID NO: 119310 - RNA, 19 nt, Artificial Sequence
  Synthetic
cccaaaagacccacaauuc

SEQ ID NO: 119311 - RNA, 20 nt, Artificial Sequence
  Synthetic
ccccaaaagacccacaauuc

SEQ ID NO: 119312 - RNA, 21 nt, Artificial Sequence
  Synthetic
accccaaaagacccacaauuc

SEQ ID NO: 119313 - RNA, 22 nt, Artificial Sequence
  Synthetic
aaccccaaaagacccacaauuc

SEQ ID NO: 119314 - RNA, 23 nt, Artificial Sequence
  Synthetic
aaaccccaaaagacccacaauuc

SEQ ID NO: 119315 - RNA, 24 nt, Artificial Sequence
  Synthetic
caaaccccaaaagacccacaauuc

SEQ ID NO: 119316 - RNA, 18 nt, Artificial Sequence
  Synthetic
auagcugacuacuaauuc

SEQ ID NO: 119317 - RNA, 19 nt, Artificial Sequence
  Synthetic
cauagcugacuacuaauuc

SEQ ID NO: 119318 - RNA, 20 nt, Artificial Sequence
  Synthetic
acauagcugacuacuaauuc

SEQ ID NO: 119319 - RNA, 21 nt, Artificial Sequence
  Synthetic
gacauagcugacuacuaauuc

SEQ ID NO: 119320 - RNA, 22 nt, Artificial Sequence
  Synthetic
ugacauagcugacuacuaauuc

SEQ ID NO: 119321 - RNA, 23 nt, Artificial Sequence
  Synthetic
uugacauagcugacuacuaauuc

SEQ ID NO: 119322 - RNA, 24 nt, Artificial Sequence
  Synthetic
  misc_feature (1)..(1): n is a, c, g, or u
nuugacauagcugacuacuaauuc

SEQ ID NO: 119323 - RNA, 18 nt, Artificial Sequence
  Synthetic
auacuaacauugagauuc

SEQ ID NO: 119324 - RNA, 19 nt, Artificial Sequence
  Synthetic
aauacuaacauugagauuc

SEQ ID NO: 119325 - RNA, 20 nt, Artificial Sequence
  Synthetic
gaauacuaacauugagauuc

SEQ ID NO: 119326 - RNA, 21 nt, Artificial Sequence
  Synthetic
ggaauacuaacauugagauuc

SEQ ID NO: 119327 - RNA, 22 nt, Artificial Sequence
  Synthetic
aggaauacuaacauugagauuc

SEQ ID NO: 119328 - RNA, 23 nt, Artificial Sequence
  Synthetic
aaggaauacuaacauugagauuc

SEQ ID NO: 119329 - RNA, 24 nt, Artificial Sequence
  Synthetic
caaggaauacuaacauugagauuc

SEQ ID NO: 119330 - RNA, 18 nt, Artificial Sequence
  Synthetic
acccagguggcuagauuc

SEQ ID NO: 119331 - RNA, 19 nt, Artificial Sequence
  Synthetic
cacccagguggcuagauuc

SEQ ID NO: 119332 - RNA, 20 nt, Artificial Sequence
  Synthetic
ccacccagguggcuagauuc

SEQ ID NO: 119333 - RNA, 21 nt, Artificial Sequence
  Synthetic
cccacccagguggcuagauuc

SEQ ID NO: 119334 - RNA, 22 nt, Artificial Sequence
  Synthetic
ucccacccagguggcuagauuc

SEQ ID NO: 119335 - RNA, 23 nt, Artificial Sequence
  Synthetic
uucccacccagguggcuagauuc

SEQ ID NO: 119336 - RNA, 24 nt, Artificial Sequence
  Synthetic
cuucccacccagguggcuagauuc

SEQ ID NO: 119337 - RNA, 18 nt, Artificial Sequence
  Synthetic
  misc_feature (7)..(7): n is a, c, g, or u
aaaaganaccaaauauuc

SEQ ID NO: 119338 - RNA, 19 nt, Artificial Sequence
  Synthetic
  misc_feature (8)..(8): n is a, c, g, or u
caaaaganaccaaauauuc

SEQ ID NO: 119339 - RNA, 20 nt, Artificial Sequence
  Synthetic
  misc_feature (9)..(9): n is a, c, g, or u
ccaaaaganaccaaauauuc

SEQ ID NO: 119340 - RNA, 21 nt, Artificial Sequence
  Synthetic
  misc_feature (10)..(10): n is a, c, g, or u
uccaaaaganaccaaauauuc

SEQ ID NO: 119341 - RNA, 22 nt, Artificial Sequence
  Synthetic
  misc_feature (11)..(11): n is a, c, g, or u
cuccaaaaganaccaaauauuc

SEQ ID NO: 119342 - RNA, 23 nt, Artificial Sequence
  Synthetic
  misc_feature (12)..(12): n is a, c, g, or u
acuccaaaaganaccaaauauuc

SEQ ID NO: 119343 - RNA, 24 nt, Artificial Sequence
  Synthetic
  misc_feature (13)..(13): n is a, c, g, or u
cacuccaaaaganaccaaauauuc

SEQ ID NO: 119344 - RNA, 18 nt, Artificial Sequence
  Synthetic
  misc_feature (9)..(9): n is a, c, g, or u
uauaagauncccgccuuc

SEQ ID NO: 119345 - RNA, 19 nt, Artificial Sequence
  Synthetic
  misc_feature (10)..(10): n is a, c, g, or u
auauaagauncccgccuuc

SEQ ID NO: 119346 - RNA, 20 nt, Artificial Sequence
  Synthetic
  misc_feature (11)..(11): n is a, c, g, or u
uauauaagauncccgccuuc

SEQ ID NO: 119347 - RNA, 21 nt, Artificial Sequence
  Synthetic
  misc_feature (12)..(12): n is a, c, g, or u
uuauauaagauncccgccuuc

SEQ ID NO: 119348 - RNA, 22 nt, Artificial Sequence
  Synthetic
  misc_feature (13)..(13): n is a, c, g, or u
uuuauauaagauncccgccuuc

SEQ ID NO: 119349 - RNA, 23 nt, Artificial Sequence
  Synthetic
  misc_feature (14)..(14): n is a, c, g, or u
uuuuauauaagauncccgccuuc

SEQ ID NO: 119350 - RNA, 24 nt, Artificial Sequence
  Synthetic
  misc_feature (15)..(15): n is a, c, g, or u
cuuuuauauaagauncccgccuuc

SEQ ID NO: 119351 - RNA, 18 nt, Artificial Sequence
  Synthetic
cccgagauugagaucuuc

SEQ ID NO: 119352 - RNA, 19 nt, Artificial Sequence
  Synthetic
ucccgagauugagaucuuc

SEQ ID NO: 119353 - RNA, 20 nt, Artificial Sequence
  Synthetic
uucccgagauugagaucuuc

SEQ ID NO: 119354 - RNA, 21 nt, Artificial Sequence
  Synthetic
auucccgagauugagaucuuc

SEQ ID NO: 119355 - RNA, 22 nt, Artificial Sequence
  Synthetic
gauucccgagauugagaucuuc

SEQ ID NO: 119356 - RNA, 23 nt, Artificial Sequence
  Synthetic
agauucccgagauugagaucuuc

SEQ ID NO: 119357 - RNA, 24 nt, Artificial Sequence
  Synthetic
gagauucccgagauugagaucuuc

SEQ ID NO: 119358 - RNA, 18 nt, Artificial Sequence
  Synthetic
acaggguccccagucuuc

SEQ ID NO: 119359 - RNA, 19 nt, Artificial Sequence
  Synthetic
uacaggguccccagucuuc

SEQ ID NO: 119360 - RNA, 20 nt, Artificial Sequence
  Synthetic
guacaggguccccagucuuc

SEQ ID NO: 119361 - RNA, 21 nt, Artificial Sequence
  Synthetic
gguacaggguccccagucuuc

SEQ ID NO: 119362 - RNA, 22 nt, Artificial Sequence
  Synthetic
cgguacaggguccccagucuuc

SEQ ID NO: 119363 - RNA, 23 nt, Artificial Sequence
  Synthetic
ucgguacaggguccccagucuuc

SEQ ID NO: 119364 - RNA, 24 nt, Artificial Sequence
  Synthetic
uucgguacaggguccccagucuuc

SEQ ID NO: 119365 - RNA, 18 nt, Artificial Sequence
  Synthetic
gcgagggaguucuucuuc

SEQ ID NO: 119366 - RNA, 19 nt, Artificial Sequence
  Synthetic
ggcgagggaguucuucuuc

SEQ ID NO: 119367 - RNA, 20 nt, Artificial Sequence
  Synthetic
aggcgagggaguucuucuuc

SEQ ID NO: 119368 - RNA, 21 nt, Artificial Sequence
  Synthetic
gaggcgagggaguucuucuuc

SEQ ID NO: 119369 - RNA, 22 nt, Artificial Sequence
  Synthetic
cgaggcgagggaguucuucuuc

SEQ ID NO: 119370 - RNA, 23 nt, Artificial Sequence
  Synthetic
gcgaggcgagggaguucuucuuc

SEQ ID NO: 119371 - RNA, 24 nt, Artificial Sequence
  Synthetic
ugcgaggcgagggaguucuucuuc

SEQ ID NO: 119372 - RNA, 18 nt, Artificial Sequence
  Synthetic
agggaaacauagagguuc

SEQ ID NO: 119373 - RNA, 19 nt, Artificial Sequence
  Synthetic
gagggaaacauagagguuc

SEQ ID NO: 119374 - RNA, 20 nt, Artificial Sequence
  Synthetic
ugagggaaacauagagguuc

SEQ ID NO: 119375 - RNA, 21 nt, Artificial Sequence
  Synthetic
augagggaaacauagagguuc

SEQ ID NO: 119376 - RNA, 22 nt, Artificial Sequence
  Synthetic
caugagggaaacauagagguuc

SEQ ID NO: 119377 - RNA, 23 nt, Artificial Sequence
  Synthetic
acaugagggaaacauagagguuc

SEQ ID NO: 119378 - RNA, 24 nt, Artificial Sequence
  Synthetic
aacaugagggaaacauagagguuc

SEQ ID NO: 119379 - RNA, 18 nt, Artificial Sequence
  Synthetic
gugaggugaacaauguuc

SEQ ID NO: 119380 - RNA, 19 nt, Artificial Sequence
  Synthetic
ggugaggugaacaauguuc

SEQ ID NO: 119381 - RNA, 20 nt, Artificial Sequence
  Synthetic
uggugaggugaacaauguuc

SEQ ID NO: 119382 - RNA, 18 nt, Artificial Sequence
  Synthetic
gagcagggcucacuguuc

SEQ ID NO: 119383 - RNA, 19 nt, Artificial Sequence
  Synthetic
ugagcagggcucacuguuc

SEQ ID NO: 119384 - RNA, 20 nt, Artificial Sequence
  Synthetic
cugagcagggcucacuguuc

SEQ ID NO: 119385 - RNA, 21 nt, Artificial Sequence
  Synthetic
ucugagcagggcucacuguuc

SEQ ID NO: 119386 - RNA, 22 nt, Artificial Sequence
  Synthetic
uucugagcagggcucacuguuc

SEQ ID NO: 119387 - RNA, 23 nt, Artificial Sequence
  Synthetic
auucugagcagggcucacuguuc

SEQ ID NO: 119388 - RNA, 24 nt, Artificial Sequence
  Synthetic
uauucugagcagggcucacuguuc

SEQ ID NO: 119389 - RNA, 18 nt, Artificial Sequence
  Synthetic
  misc_feature (10)..(10): n is a, c, g, or u
augcuguagnucuuguuc

SEQ ID NO: 119390 - RNA, 19 nt, Artificial Sequence
  Synthetic
  misc_feature (11)..(11): n is a, c, g, or u
caugcuguagnucuuguuc

SEQ ID NO: 119391 - RNA, 20 nt, Artificial Sequence
  Synthetic
  misc_feature (12)..(12): n is a, c, g, or u
ccaugcuguagnucuuguuc

SEQ ID NO: 119392 - RNA, 21 nt, Artificial Sequence
  Synthetic
  misc_feature (13)..(13): n is a, c, g, or u
cccaugcuguagnucuuguuc

SEQ ID NO: 119393 - RNA, 22 nt, Artificial Sequence
  Synthetic
  misc_feature (14)..(14): n is a, c, g, or u
ucccaugcuguagnucuuguuc

SEQ ID NO: 119394 - RNA, 23 nt, Artificial Sequence
  Synthetic
  misc_feature (15)..(15): n is a, c, g, or u
cucccaugcuguagnucuuguuc

SEQ ID NO: 119395 - RNA, 24 nt, Artificial Sequence
  Synthetic
  misc_feature (16)..(16): n is a, c, g, or u
ccucccaugcuguagnucuuguuc

SEQ ID NO: 119396 - RNA, 18 nt, Artificial Sequence
  Synthetic
cuguuuacaggaaguuuc

SEQ ID NO: 119397 - RNA, 19 nt, Artificial Sequence
  Synthetic
  misc_feature (1)..(1): n is a, c, g, or u
ncuguuuacaggaaguuuc

SEQ ID NO: 119398 - RNA, 20 nt, Artificial Sequence
  Synthetic
  misc_feature (2)..(2): n is a, c, g, or u
gncuguuuacaggaaguuuc

SEQ ID NO: 119399 - RNA, 21 nt, Artificial Sequence
  Synthetic
  misc_feature (3)..(3): n is a, c, g, or u
ggncuguuuacaggaaguuuc

SEQ ID NO: 119400 - RNA, 22 nt, Artificial Sequence
  Synthetic
  misc_feature (4)..(4): n is a, c, g, or u
aggncuguuuacaggaaguuuc

SEQ ID NO: 119401 - RNA, 23 nt, Artificial Sequence
  Synthetic
  misc_feature (5)..(5): n is a, c, g, or u
uaggncuguuuacaggaaguuuc

SEQ ID NO: 119402 - RNA, 24 nt, Artificial Sequence
  Synthetic
  misc_feature (6)..(6): n is a, c, g, or u
auaggncuguuuacaggaaguuuc

SEQ ID NO: 119403 - RNA, 18 nt, Artificial Sequence
  Synthetic
ucuaacaacaguaguuuc

SEQ ID NO: 119404 - RNA, 19 nt, Artificial Sequence
  Synthetic
gucuaacaacaguaguuuc

SEQ ID NO: 119405 - RNA, 20 nt, Artificial Sequence
  Synthetic
cgucuaacaacaguaguuuc

SEQ ID NO: 119406 - RNA, 21 nt, Artificial Sequence
  Synthetic
ucgucuaacaacaguaguuuc

SEQ ID NO: 119407 - RNA, 22 nt, Artificial Sequence
  Synthetic
  misc_feature (1)..(1): n is a, c, g, or u
nucgucuaacaacaguaguuuc

SEQ ID NO: 119408 - RNA, 23 nt, Artificial Sequence
  Synthetic
  misc_feature (2)..(2): n is a, c, g, or u
cnucgucuaacaacaguaguuuc

SEQ ID NO: 119409 - RNA, 24 nt, Artificial Sequence
  Synthetic
  misc_feature (3)..(3): n is a, c, g, or u
ucnucgucuaacaacaguaguuuc

SEQ ID NO: 119410 - RNA, 18 nt, Artificial Sequence
  Synthetic
  misc_feature (11)..(11): n is a, c, g, or u
caguuucucunccaaaag

SEQ ID NO: 119411 - RNA, 19 nt, Artificial Sequence
  Synthetic
  misc_feature (12)..(12): n is a, c, g, or u
acaguuucucunccaaaag

SEQ ID NO: 119412 - RNA, 20 nt, Artificial Sequence
  Synthetic
  misc_feature (13)..(13): n is a, c, g, or u
aacaguuucucunccaaaag

SEQ ID NO: 119413 - RNA, 21 nt, Artificial Sequence
  Synthetic
  misc_feature (14)..(14): n is a, c, g, or u
gaacaguuucucunccaaaag

SEQ ID NO: 119414 - RNA, 22 nt, Artificial Sequence
  Synthetic
  misc_feature (15)..(15): n is a, c, g, or u
agaacaguuucucunccaaaag

SEQ ID NO: 119415 - RNA, 23 nt, Artificial Sequence
  Synthetic
  misc_feature (16)..(16): n is a, c, g, or u
aagaacaguuucucunccaaaag

SEQ ID NO: 119416 - RNA, 24 nt, Artificial Sequence
  Synthetic
  misc_feature (17)..(17): n is a, c, g, or u
caagaacaguuucucunccaaaag

SEQ ID NO: 119417 - RNA, 18 nt, Artificial Sequence
  Synthetic
aaugaaugucaggaaaag

SEQ ID NO: 119418 - RNA, 19 nt, Artificial Sequence
  Synthetic
aaaugaaugucaggaaaag

SEQ ID NO: 119419 - RNA, 20 nt, Artificial Sequence
  Synthetic
caaaugaaugucaggaaaag

SEQ ID NO: 119420 - RNA, 21 nt, Artificial Sequence
  Synthetic
gcaaaugaaugucaggaaaag

SEQ ID NO: 119421 - RNA, 22 nt, Artificial Sequence
  Synthetic
ugcaaaugaaugucaggaaaag

SEQ ID NO: 119422 - RNA, 23 nt, Artificial Sequence
  Synthetic
cugcaaaugaaugucaggaaaag

SEQ ID NO: 119423 - RNA, 24 nt, Artificial Sequence
  Synthetic
ccugcaaaugaaugucaggaaaag

SEQ ID NO: 119424 - RNA, 18 nt, Artificial Sequence
  Synthetic
uuaaauguauacccaaag

SEQ ID NO: 119425 - RNA, 19 nt, Artificial Sequence
  Synthetic
uuuaaauguauacccaaag

SEQ ID NO: 119426 - RNA, 20 nt, Artificial Sequence
  Synthetic
guuuaaauguauacccaaag

SEQ ID NO: 119427 - RNA, 21 nt, Artificial Sequence
  Synthetic
gguuuaaauguauacccaaag

SEQ ID NO: 119428 - RNA, 22 nt, Artificial Sequence
  Synthetic
ggguuuaaauguauacccaaag

SEQ ID NO: 119429 - RNA, 23 nt, Artificial Sequence
  Synthetic
aggguuuaaauguauacccaaag

SEQ ID NO: 119430 - RNA, 24 nt, Artificial Sequence
  Synthetic
gaggguuuaaauguauacccaaag

SEQ ID NO: 119431 - RNA, 18 nt, Artificial Sequence
  Synthetic
uguaaguuggcgagaaag

SEQ ID NO: 119432 - RNA, 19 nt, Artificial Sequence
  Synthetic
uuguaaguuggcgagaaag

SEQ ID NO: 119433 - RNA, 20 nt, Artificial Sequence
  Synthetic
cuuguaaguuggcgagaaag

SEQ ID NO: 119434 - RNA, 21 nt, Artificial Sequence
  Synthetic
ccuuguaaguuggcgagaaag

SEQ ID NO: 119435 - RNA, 22 nt, Artificial Sequence
  Synthetic
gccuuguaaguuggcgagaaag

SEQ ID NO: 119436 - RNA, 23 nt, Artificial Sequence
  Synthetic
ggccuuguaaguuggcgagaaag

SEQ ID NO: 119437 - RNA, 24 nt, Artificial Sequence
  Synthetic
aggccuuguaaguuggcgagaaag

SEQ ID NO: 119438 - RNA, 18 nt, Artificial Sequence
  Synthetic
auagguauuuugcgaaag

SEQ ID NO: 119439 - RNA, 19 nt, Artificial Sequence
  Synthetic
cauagguauuuugcgaaag

SEQ ID NO: 119440 - RNA, 20 nt, Artificial Sequence
  Synthetic
ccauagguauuuugcgaaag

SEQ ID NO: 119441 - RNA, 21 nt, Artificial Sequence
  Synthetic
cccauagguauuuugcgaaag

SEQ ID NO: 119442 - RNA, 22 nt, Artificial Sequence
  Synthetic
ucccauagguauuuugcgaaag

SEQ ID NO: 119443 - RNA, 23 nt, Artificial Sequence
  Synthetic
cucccauagguauuuugcgaaag

SEQ ID NO: 119444 - RNA, 24 nt, Artificial Sequence
  Synthetic
acucccauagguauuuugcgaaag

SEQ ID NO: 119445 - RNA, 18 nt, Artificial Sequence
  Synthetic
gagccaccagcaggaaag

SEQ ID NO: 119446 - RNA, 19 nt, Artificial Sequence
  Synthetic
ggagccaccagcaggaaag

SEQ ID NO: 119447 - RNA, 20 nt, Artificial Sequence
  Synthetic
uggagccaccagcaggaaag

SEQ ID NO: 119448 - RNA, 21 nt, Artificial Sequence
  Synthetic
cuggagccaccagcaggaaag

SEQ ID NO: 119449 - RNA, 22 nt, Artificial Sequence
  Synthetic
acuggagccaccagcaggaaag

SEQ ID NO: 119450 - RNA, 23 nt, Artificial Sequence
  Synthetic
aacuggagccaccagcaggaaag

SEQ ID NO: 119451 - RNA, 24 nt, Artificial Sequence
  Synthetic
gaacuggagccaccagcaggaaag

SEQ ID NO: 119452 - RNA, 18 nt, Artificial Sequence
  Synthetic
cauccauauaacugaaag

SEQ ID NO: 119453 - RNA, 19 nt, Artificial Sequence
  Synthetic
ucauccauauaacugaaag

SEQ ID NO: 119454 - RNA, 20 nt, Artificial Sequence
  Synthetic
aucauccauauaacugaaag

SEQ ID NO: 119455 - RNA, 21 nt, Artificial Sequence
  Synthetic
caucauccauauaacugaaag

SEQ ID NO: 119456 - RNA, 22 nt, Artificial Sequence
  Synthetic
acaucauccauauaacugaaag

SEQ ID NO: 119457 - RNA, 23 nt, Artificial Sequence
  Synthetic
cacaucauccauauaacugaaag

SEQ ID NO: 119458 - RNA, 24 nt, Artificial Sequence
  Synthetic
ccacaucauccauauaacugaaag

SEQ ID NO: 119459 - RNA, 18 nt, Artificial Sequence
  Synthetic
cguugacauugcugaaag

SEQ ID NO: 119460 - RNA, 19 nt, Artificial Sequence
  Synthetic
ucguugacauugcugaaag

SEQ ID NO: 119461 - RNA, 20 nt, Artificial Sequence
  Synthetic
gucguugacauugcugaaag

SEQ ID NO: 119462 - RNA, 21 nt, Artificial Sequence
  Synthetic
ggucguugacauugcugaaag

SEQ ID NO: 119463 - RNA, 22 nt, Artificial Sequence
  Synthetic
cggucguugacauugcugaaag

SEQ ID NO: 119464 - RNA, 23 nt, Artificial Sequence
  Synthetic
ucggucguugacauugcugaaag

SEQ ID NO: 119465 - RNA, 24 nt, Artificial Sequence
  Synthetic
gucggucguugacauugcugaaag

SEQ ID NO: 119466 - RNA, 18 nt, Artificial Sequence
  Synthetic
aggauuuuugucaacaag

SEQ ID NO: 119467 - RNA, 19 nt, Artificial Sequence
  Synthetic
gaggauuuuugucaacaag

SEQ ID NO: 119468 - RNA, 20 nt, Artificial Sequence
  Synthetic
ugaggauuuuugucaacaag

SEQ ID NO: 119469 - RNA, 21 nt, Artificial Sequence
  Synthetic
gugaggauuuuugucaacaag

SEQ ID NO: 119470 - RNA, 22 nt, Artificial Sequence
  Synthetic
ugugaggauuuuugucaacaag

SEQ ID NO: 119471 - RNA, 23 nt, Artificial Sequence
  Synthetic
uugugaggauuuuugucaacaag

SEQ ID NO: 119472 - RNA, 24 nt, Artificial Sequence
  Synthetic
auugugaggauuuuugucaacaag

SEQ ID NO: 119473 - RNA, 18 nt, Artificial Sequence
  Synthetic
cuaguaaacugagccaag

SEQ ID NO: 119474 - RNA, 19 nt, Artificial Sequence
  Synthetic
acuaguaaacugagccaag

SEQ ID NO: 119475 - RNA, 20 nt, Artificial Sequence
  Synthetic
cacuaguaaacugagccaag

SEQ ID NO: 119476 - RNA, 21 nt, Artificial Sequence
  Synthetic
gcacuaguaaacugagccaag

SEQ ID NO: 119477 - RNA, 22 nt, Artificial Sequence
  Synthetic
ggcacuaguaaacugagccaag

SEQ ID NO: 119478 - RNA, 23 nt, Artificial Sequence
  Synthetic
uggcacuaguaaacugagccaag

SEQ ID NO: 119479 - RNA, 24 nt, Artificial Sequence
  Synthetic
auggcacuaguaaacugagccaag

SEQ ID NO: 119480 - RNA, 18 nt, Artificial Sequence
  Synthetic
  misc_feature (5)..(5): n is a, c, g, or u
cgaanagaaggaaagaag

SEQ ID NO: 119481 - RNA, 19 nt, Artificial Sequence
  Synthetic
  misc_feature (6)..(6): n is a, c, g, or u
ucgaanagaaggaaagaag

SEQ ID NO: 119482 - RNA, 20 nt, Artificial Sequence
  Synthetic
  misc_feature (7)..(7): n is a, c, g, or u
cucgaanagaaggaaagaag

SEQ ID NO: 119483 - RNA, 21 nt, Artificial Sequence
  Synthetic
  misc_feature (8)..(8): n is a, c, g, or u
ucucgaanagaaggaaagaag

SEQ ID NO: 119484 - RNA, 22 nt, Artificial Sequence
  Synthetic
  misc_feature (9)..(9): n is a, c, g, or u
aucucgaanagaaggaaagaag

SEQ ID NO: 119485 - RNA, 23 nt, Artificial Sequence
  Synthetic
  misc_feature (10)..(10): n is a, c, g, or u
gaucucgaanagaaggaaagaag

SEQ ID NO: 119486 - RNA, 24 nt, Artificial Sequence
  Synthetic
  misc_feature (11)..(11): n is a, c, g, or u
agaucucgaanagaaggaaagaag

SEQ ID NO: 119487 - RNA, 18 nt, Artificial Sequence
  Synthetic
agaagaaccaacaagaag

SEQ ID NO: 119488 - RNA, 19 nt, Artificial Sequence
  Synthetic
cagaagaaccaacaagaag

SEQ ID NO: 119489 - RNA, 20 nt, Artificial Sequence
  Synthetic
ccagaagaaccaacaagaag

SEQ ID NO: 119490 - RNA, 21 nt, Artificial Sequence
  Synthetic
uccagaagaaccaacaagaag

SEQ ID NO: 119491 - RNA, 22 nt, Artificial Sequence
  Synthetic
guccagaagaaccaacaagaag

SEQ ID NO: 119492 - RNA, 23 nt, Artificial Sequence
  Synthetic
aguccagaagaaccaacaagaag

SEQ ID NO: 119493 - RNA, 24 nt, Artificial Sequence
  Synthetic
uaguccagaagaaccaacaagaag

SEQ ID NO: 119494 - RNA, 18 nt, Artificial Sequence
  Synthetic
aaggaaagaagucagaag

SEQ ID NO: 119495 - RNA, 19 nt, Artificial Sequence
  Synthetic
gaaggaaagaagucagaag

SEQ ID NO: 119496 - RNA, 20 nt, Artificial Sequence
  Synthetic
agaaggaaagaagucagaag

SEQ ID NO: 119497 - RNA, 21 nt, Artificial Sequence
  Synthetic
  misc_feature (1)..(1): n is a, c, g, or u
nagaaggaaagaagucagaag

SEQ ID NO: 119498 - RNA, 22 nt, Artificial Sequence
  Synthetic
  misc_feature (2)..(2): n is a, c, g, or u
anagaaggaaagaagucagaag

SEQ ID NO: 119499 - RNA, 23 nt, Artificial Sequence
  Synthetic
  misc_feature (3)..(3): n is a, c, g, or u
aanagaaggaaagaagucagaag

SEQ ID NO: 119500 - RNA, 24 nt, Artificial Sequence
  Synthetic
  misc_feature (4)..(4): n is a, c, g, or u
gaanagaaggaaagaagucagaag

SEQ ID NO: 119501 - RNA, 18 nt, Artificial Sequence
  Synthetic
  misc_feature (2)..(2): n is a, c, g, or u
  misc_feature (13)..(13): n is a, c, g, or u
gnagaucucgaanagaag

SEQ ID NO: 119502 - RNA, 19 nt, Artificial Sequence
  Synthetic
  misc_feature (3)..(3): n is a, c, g, or u
  misc_feature (14)..(14): n is a, c, g, or u
agnagaucucgaanagaag

SEQ ID NO: 119503 - RNA, 20 nt, Artificial Sequence
  Synthetic
  misc_feature (4)..(4): n is a, c, g, or u
  misc_feature (15)..(15): n is a, c, g, or u
gagnagaucucgaanagaag

SEQ ID NO: 119504 - RNA, 21 nt, Artificial Sequence
  Synthetic
  misc_feature (5)..(5): n is a, c, g, or u
  misc_feature (16)..(16): n is a, c, g, or u
cgagnagaucucgaanagaag

SEQ ID NO: 119505 - RNA, 22 nt, Artificial Sequence
  Synthetic
  misc_feature (6)..(6): n is a, c, g, or u
  misc_feature (17)..(17): n is a, c, g, or u
ucgagnagaucucgaanagaag

SEQ ID NO: 119506 - RNA, 23 nt, Artificial Sequence
  Synthetic
  misc_feature (7)..(7): n is a, c, g, or u
  misc_feature (18)..(18): n is a, c, g, or u
gucgagnagaucucgaanagaag

SEQ ID NO: 119507 - RNA, 24 nt, Artificial Sequence
  Synthetic
  misc_feature (8)..(8): n is a, c, g, or u
  misc_feature (19)..(19): n is a, c, g, or u
ugucgagnagaucucgaanagaag

SEQ ID NO: 119508 - RNA, 18 nt, Artificial Sequence
  Synthetic
  misc_feature (3)..(4): n is a, c, g, or u
agnnagguaccguagaag

SEQ ID NO: 119509 - RNA, 19 nt, Artificial Sequence
  Synthetic
  misc_feature (4)..(5): n is a, c, g, or u
aagnnagguaccguagaag

SEQ ID NO: 119510 - RNA, 20 nt, Artificial Sequence
  Synthetic
  misc_feature (5)..(6): n is a, c, g, or u
aaagnnagguaccguagaag

SEQ ID NO: 119511 - RNA, 21 nt, Artificial Sequence
  Synthetic
  misc_feature (6)..(7): n is a, c, g, or u
uaaagnnagguaccguagaag

SEQ ID NO: 119512 - RNA, 22 nt, Artificial Sequence
  Synthetic
  misc_feature (7)..(8): n is a, c, g, or u
uuaaagnnagguaccguagaag

SEQ ID NO: 119513 - RNA, 23 nt, Artificial Sequence
  Synthetic
  misc_feature (8)..(9): n is a, c, g, or u
auuaaagnnagguaccguagaag

SEQ ID NO: 119514 - RNA, 24 nt, Artificial Sequence
  Synthetic
  misc_feature (9)..(10): n is a, c, g, or u
gauuaaagnnagguaccguagaag

SEQ ID NO: 119515 - RNA, 18 nt, Artificial Sequence
  Synthetic
cuuuucgagguuuggaag

SEQ ID NO: 119516 - RNA, 19 nt, Artificial Sequence
  Synthetic
ccuuuucgagguuuggaag

SEQ ID NO: 119517 - RNA, 20 nt, Artificial Sequence
  Synthetic
gccuuuucgagguuuggaag

SEQ ID NO: 119518 - RNA, 21 nt, Artificial Sequence
  Synthetic
ugccuuuucgagguuuggaag

SEQ ID NO: 119519 - RNA, 22 nt, Artificial Sequence
  Synthetic
augccuuuucgagguuuggaag

SEQ ID NO: 119520 - RNA, 23 nt, Artificial Sequence
  Synthetic
caugccuuuucgagguuuggaag

SEQ ID NO: 119521 - RNA, 24 nt, Artificial Sequence
  Synthetic
ccaugccuuuucgagguuuggaag

SEQ ID NO: 119522 - RNA, 18 nt, Artificial Sequence
  Synthetic
auuacauaucccaugaag

SEQ ID NO: 119523 - RNA, 19 nt, Artificial Sequence
  Synthetic
aauuacauaucccaugaag

SEQ ID NO: 119524 - RNA, 20 nt, Artificial Sequence
  Synthetic
caauuacauaucccaugaag

SEQ ID NO: 119525 - RNA, 21 nt, Artificial Sequence
  Synthetic
ccaauuacauaucccaugaag

SEQ ID NO: 119526 - RNA, 22 nt, Artificial Sequence
  Synthetic
  misc_feature (1)..(1): n is a, c, g, or u
nccaauuacauaucccaugaag

SEQ ID NO: 119527 - RNA, 23 nt, Artificial Sequence
  Synthetic
  misc_feature (1)..(2): n is a, c, g, or u
nnccaauuacauaucccaugaag

SEQ ID NO: 119528 - RNA, 24 nt, Artificial Sequence
  Synthetic
  misc_feature (2)..(3): n is a, c, g, or u
cnnccaauuacauaucccaugaag

SEQ ID NO: 119529 - RNA, 18 nt, Artificial Sequence
  Synthetic
uccccagucuucgauaag

SEQ ID NO: 119530 - RNA, 19 nt, Artificial Sequence
  Synthetic
guccccagucuucgauaag

SEQ ID NO: 119531 - RNA, 20 nt, Artificial Sequence
  Synthetic
gguccccagucuucgauaag

SEQ ID NO: 119532 - RNA, 21 nt, Artificial Sequence
  Synthetic
ggguccccagucuucgauaag

SEQ ID NO: 119533 - RNA, 22 nt, Artificial Sequence
  Synthetic
aggguccccagucuucgauaag

SEQ ID NO: 119534 - RNA, 23 nt, Artificial Sequence
  Synthetic
caggguccccagucuucgauaag

SEQ ID NO: 119535 - RNA, 24 nt, Artificial Sequence
  Synthetic
acaggguccccagucuucgauaag

SEQ ID NO: 119536 - RNA, 18 nt, Artificial Sequence
  Synthetic
uccggaaguguugauaag

SEQ ID NO: 119537 - RNA, 19 nt, Artificial Sequence
  Synthetic
uuccggaaguguugauaag

SEQ ID NO: 119538 - RNA, 20 nt, Artificial Sequence
  Synthetic
uuuccggaaguguugauaag

SEQ ID NO: 119539 - RNA, 21 nt, Artificial Sequence
  Synthetic
guuuccggaaguguugauaag

SEQ ID NO: 119540 - RNA, 22 nt, Artificial Sequence
  Synthetic
aguuuccggaaguguugauaag

SEQ ID NO: 119541 - RNA, 23 nt, Artificial Sequence
  Synthetic
uaguuuccggaaguguugauaag

SEQ ID NO: 119542 - RNA, 24 nt, Artificial Sequence
  Synthetic
guaguuuccggaaguguugauaag

SEQ ID NO: 119543 - RNA, 18 nt, Artificial Sequence
  Synthetic
  misc_feature (6)..(6): n is a, c, g, or u
uugaunccuuuaucuaag

SEQ ID NO: 119544 - RNA, 19 nt, Artificial Sequence
  Synthetic
  misc_feature (7)..(7): n is a, c, g, or u
uuugaunccuuuaucuaag

SEQ ID NO: 119545 - RNA, 20 nt, Artificial Sequence
  Synthetic
  misc_feature (8)..(8): n is a, c, g, or u
guuugaunccuuuaucuaag

SEQ ID NO: 119546 - RNA, 21 nt, Artificial Sequence
  Synthetic
  misc_feature (9)..(9): n is a, c, g, or u
gguuugaunccuuuaucuaag

SEQ ID NO: 119547 - RNA, 22 nt, Artificial Sequence
  Synthetic
  misc_feature (1)..(1): n is a, c, g, or u
  misc_feature (10)..(10): n is a, c, g, or u
ngguuugaunccuuuaucuaag

SEQ ID NO: 119548 - RNA, 23 nt, Artificial Sequence
  Synthetic
  misc_feature (2)..(2): n is a, c, g, or u
  misc_feature (11)..(11): n is a, c, g, or u
angguuugaunccuuuaucuaag

SEQ ID NO: 119549 - RNA, 24 nt, Artificial Sequence
  Synthetic
  misc_feature (3)..(3): n is a, c, g, or u
  misc_feature (12)..(12): n is a, c, g, or u
uangguuugaunccuuuaucuaag

SEQ ID NO: 119550 - RNA, 18 nt, Artificial Sequence
  Synthetic
  misc_feature (7)..(7): n is a, c, g, or u
uucucunccaaaaguaag

SEQ ID NO: 119551 - RNA, 19 nt, Artificial Sequence
  Synthetic
  misc_feature (8)..(8): n is a, c, g, or u
uuucucunccaaaaguaag

SEQ ID NO: 119552 - RNA, 20 nt, Artificial Sequence
  Synthetic
  misc_feature (9)..(9): n is a, c, g, or u
guuucucunccaaaaguaag

SEQ ID NO: 119553 - RNA, 21 nt, Artificial Sequence
  Synthetic
  misc_feature (10)..(10): n is a, c, g, or u
aguuucucunccaaaaguaag

SEQ ID NO: 119554 - RNA, 22 nt, Artificial Sequence
  Synthetic
  misc_feature (11)..(11): n is a, c, g, or u
caguuucucunccaaaaguaag

SEQ ID NO: 119555 - RNA, 23 nt, Artificial Sequence
  Synthetic
  misc_feature (12)..(12): n is a, c, g, or u
acaguuucucunccaaaaguaag

SEQ ID NO: 119556 - RNA, 24 nt, Artificial Sequence
  Synthetic
  misc_feature (13)..(13): n is a, c, g, or u
aacaguuucucunccaaaaguaag

SEQ ID NO: 119557 - RNA, 18 nt, Artificial Sequence
  Synthetic
gcuuggaggcuugaacag

SEQ ID NO: 119558 - RNA, 19 nt, Artificial Sequence
  Synthetic
agcuuggaggcuugaacag

SEQ ID NO: 119559 - RNA, 20 nt, Artificial Sequence
  Synthetic
cagcuuggaggcuugaacag

SEQ ID NO: 119560 - RNA, 21 nt, Artificial Sequence
  Synthetic
acagcuuggaggcuugaacag

SEQ ID NO: 119561 - RNA, 22 nt, Artificial Sequence
  Synthetic
cacagcuuggaggcuugaacag

SEQ ID NO: 119562 - RNA, 23 nt, Artificial Sequence
  Synthetic
gcacagcuuggaggcuugaacag

SEQ ID NO: 119563 - RNA, 24 nt, Artificial Sequence
  Synthetic
ggcacagcuuggaggcuugaacag

SEQ ID NO: 119564 - RNA, 18 nt, Artificial Sequence
  Synthetic
  misc_feature (1)..(1): n is a, c, g, or u
naacucaccccaacacag

SEQ ID NO: 119565 - RNA, 19 nt, Artificial Sequence
  Synthetic
  misc_feature (2)..(2): n is a, c, g, or u
unaacucaccccaacacag

SEQ ID NO: 119566 - RNA, 20 nt, Artificial Sequence
  Synthetic
  misc_feature (3)..(3): n is a, c, g, or u
aunaacucaccccaacacag

SEQ ID NO: 119567 - RNA, 21 nt, Artificial Sequence
  Synthetic
  misc_feature (4)..(4): n is a, c, g, or u
caunaacucaccccaacacag

SEQ ID NO: 119568 - RNA, 22 nt, Artificial Sequence
  Synthetic
  misc_feature (5)..(5): n is a, c, g, or u
ucaunaacucaccccaacacag

SEQ ID NO: 119569 - RNA, 23 nt, Artificial Sequence
  Synthetic
  misc_feature (6)..(6): n is a, c, g, or u
uucaunaacucaccccaacacag

SEQ ID NO: 119570 - RNA, 24 nt, Artificial Sequence
  Synthetic
  misc_feature (7)..(7): n is a, c, g, or u
auucaunaacucaccccaacacag

SEQ ID NO: 119571 - RNA, 18 nt, Artificial Sequence
  Synthetic
auccaguuggcagcacag

SEQ ID NO: 119572 - RNA, 19 nt, Artificial Sequence
  Synthetic
gauccaguuggcagcacag

SEQ ID NO: 119573 - RNA, 20 nt, Artificial Sequence
  Synthetic
ggauccaguuggcagcacag

SEQ ID NO: 119574 - RNA, 21 nt, Artificial Sequence
  Synthetic
aggauccaguuggcagcacag

SEQ ID NO: 119575 - RNA, 22 nt, Artificial Sequence
  Synthetic
caggauccaguuggcagcacag

SEQ ID NO: 119576 - RNA, 23 nt, Artificial Sequence
  Synthetic
gcaggauccaguuggcagcacag

SEQ ID NO: 119577 - RNA, 24 nt, Artificial Sequence
  Synthetic
cgcaggauccaguuggcagcacag

SEQ ID NO: 119578 - RNA, 18 nt, Artificial Sequence
  Synthetic
aagccacccaaggcacag

SEQ ID NO: 119579 - RNA, 19 nt, Artificial Sequence
  Synthetic
aaagccacccaaggcacag

SEQ ID NO: 119580 - RNA, 20 nt, Artificial Sequence
  Synthetic
  misc_feature (1)..(1): n is a, c, g, or u
naaagccacccaaggcacag

SEQ ID NO: 119581 - RNA, 21 nt, Artificial Sequence
  Synthetic
  misc_feature (2)..(2): n is a, c, g, or u
cnaaagccacccaaggcacag

SEQ ID NO: 119582 - RNA, 22 nt, Artificial Sequence
  Synthetic
  misc_feature (3)..(3): n is a, c, g, or u
ccnaaagccacccaaggcacag

SEQ ID NO: 119583 - RNA, 23 nt, Artificial Sequence
  Synthetic
  misc_feature (4)..(4): n is a, c, g, or u
cccnaaagccacccaaggcacag

SEQ ID NO: 119584 - RNA, 24 nt, Artificial Sequence
  Synthetic
  misc_feature (5)..(5): n is a, c, g, or u
gcccnaaagccacccaaggcacag

SEQ ID NO: 119585 - RNA, 18 nt, Artificial Sequence
  Synthetic
  misc_feature (2)..(2): n is a, c, g, or u
gnagaugagaaggcacag

SEQ ID NO: 119586 - RNA, 19 nt, Artificial Sequence
  Synthetic
  misc_feature (3)..(3): n is a, c, g, or u
ggnagaugagaaggcacag

SEQ ID NO: 119587 - RNA, 20 nt, Artificial Sequence
  Synthetic
  misc_feature (4)..(4): n is a, c, g, or u
cggnagaugagaaggcacag

SEQ ID NO: 119588 - RNA, 21 nt, Artificial Sequence
  Synthetic
  misc_feature (5)..(5): n is a, c, g, or u
ccggnagaugagaaggcacag

SEQ ID NO: 119589 - RNA, 22 nt, Artificial Sequence
  Synthetic
  misc_feature (6)..(6): n is a, c, g, or u
uccggnagaugagaaggcacag

SEQ ID NO: 119590 - RNA, 23 nt, Artificial Sequence
  Synthetic
  misc_feature (7)..(7): n is a, c, g, or u
guccggnagaugagaaggcacag

SEQ ID NO: 119591 - RNA, 24 nt, Artificial Sequence
  Synthetic
  misc_feature (8)..(8): n is a, c, g, or u
gguccggnagaugagaaggcacag

SEQ ID NO: 119592 - RNA, 18 nt, Artificial Sequence
  Synthetic
agcaaacacuuggcacag

SEQ ID NO: 119593 - RNA, 19 nt, Artificial Sequence
  Synthetic
cagcaaacacuuggcacag

SEQ ID NO: 119594 - RNA, 20 nt, Artificial Sequence
  Synthetic
ucagcaaacacuuggcacag

SEQ ID NO: 119595 - RNA, 21 nt, Artificial Sequence
  Synthetic
gucagcaaacacuuggcacag

SEQ ID NO: 119596 - RNA, 22 nt, Artificial Sequence
  Synthetic
cgucagcaaacacuuggcacag

SEQ ID NO: 119597 - RNA, 23 nt, Artificial Sequence
  Synthetic
gcgucagcaaacacuuggcacag

SEQ ID NO: 119598 - RNA, 24 nt, Artificial Sequence
  Synthetic
ugcgucagcaaacacuuggcacag

SEQ ID NO: 119599 - RNA, 18 nt, Artificial Sequence
  Synthetic
uaacugaaagccagacag

SEQ ID NO: 119600 - RNA, 19 nt, Artificial Sequence
  Synthetic
auaacugaaagccagacag

SEQ ID NO: 119601 - RNA, 20 nt, Artificial Sequence
  Synthetic
uauaacugaaagccagacag

SEQ ID NO: 119602 - RNA, 21 nt, Artificial Sequence
  Synthetic
auauaacugaaagccagacag

SEQ ID NO: 119603 - RNA, 22 nt, Artificial Sequence
  Synthetic
cauauaacugaaagccagacag

SEQ ID NO: 119604 - RNA, 23 nt, Artificial Sequence
  Synthetic
ccauauaacugaaagccagacag

SEQ ID NO: 119605 - RNA, 24 nt, Artificial Sequence
  Synthetic
uccauauaacugaaagccagacag

SEQ ID NO: 119606 - RNA, 18 nt, Artificial Sequence
  Synthetic
uaaggccucccgauacag

SEQ ID NO: 119607 - RNA, 19 nt, Artificial Sequence
  Synthetic
cuaaggccucccgauacag

SEQ ID NO: 119608 - RNA, 20 nt, Artificial Sequence
  Synthetic
ucuaaggccucccgauacag

SEQ ID NO: 119609 - RNA, 21 nt, Artificial Sequence
  Synthetic
cucuaaggccucccgauacag

SEQ ID NO: 119610 - RNA, 22 nt, Artificial Sequence
  Synthetic
acucuaaggccucccgauacag

SEQ ID NO: 119611 - RNA, 23 nt, Artificial Sequence
  Synthetic
gacucuaaggccucccgauacag

SEQ ID NO: 119612 - RNA, 24 nt, Artificial Sequence
  Synthetic
agacucuaaggccucccgauacag

SEQ ID NO: 119613 - RNA, 18 nt, Artificial Sequence
  Synthetic
uggccaagccccaaccag

SEQ ID NO: 119614 - RNA, 19 nt, Artificial Sequence
  Synthetic
auggccaagccccaaccag

SEQ ID NO: 119615 - RNA, 20 nt, Artificial Sequence
  Synthetic
  misc_feature (1)..(1): n is a, c, g, or u
nauggccaagccccaaccag

SEQ ID NO: 119616 - RNA, 21 nt, Artificial Sequence
  Synthetic
  misc_feature (2)..(2): n is a, c, g, or u
cnauggccaagccccaaccag

SEQ ID NO: 119617 - RNA, 22 nt, Artificial Sequence
  Synthetic
  misc_feature (3)..(3): n is a, c, g, or u
ccnauggccaagccccaaccag

SEQ ID NO: 119618 - RNA, 23 nt, Artificial Sequence
  Synthetic
  misc_feature (4)..(4): n is a, c, g, or u
gccnauggccaagccccaaccag

SEQ ID NO: 119619 - RNA, 24 nt, Artificial Sequence
  Synthetic
  misc_feature (5)..(5): n is a, c, g, or u
ggccnauggccaagccccaaccag

SEQ ID NO: 119620 - RNA, 18 nt, Artificial Sequence
  Synthetic
acauccagcgauaaccag

SEQ ID NO: 119621 - RNA, 19 nt, Artificial Sequence
  Synthetic
cacauccagcgauaaccag

SEQ ID NO: 119622 - RNA, 20 nt, Artificial Sequence
  Synthetic
acacauccagcgauaaccag

SEQ ID NO: 119623 - RNA, 21 nt, Artificial Sequence
  Synthetic
gacacauccagcgauaaccag

SEQ ID NO: 119624 - RNA, 22 nt, Artificial Sequence
  Synthetic
agacacauccagcgauaaccag

SEQ ID NO: 119625 - RNA, 23 nt, Artificial Sequence
  Synthetic
cagacacauccagcgauaaccag

SEQ ID NO: 119626 - RNA, 24 nt, Artificial Sequence
  Synthetic
gcagacacauccagcgauaaccag

SEQ ID NO: 119627 - RNA, 18 nt, Artificial Sequence
  Synthetic
cugaacuggagccaccag

SEQ ID NO: 119628 - RNA, 19 nt, Artificial Sequence
  Synthetic
ccugaacuggagccaccag

SEQ ID NO: 119629 - RNA, 20 nt, Artificial Sequence
  Synthetic
uccugaacuggagccaccag

SEQ ID NO: 119630 - RNA, 21 nt, Artificial Sequence
  Synthetic
uuccugaacuggagccaccag

SEQ ID NO: 119631 - RNA, 22 nt, Artificial Sequence
  Synthetic
guuccugaacuggagccaccag

SEQ ID NO: 119632 - RNA, 23 nt, Artificial Sequence
  Synthetic
uguuccugaacuggagccaccag

SEQ ID NO: 119633 - RNA, 24 nt, Artificial Sequence
  Synthetic
cuguuccugaacuggagccaccag

SEQ ID NO: 119634 - RNA, 18 nt, Artificial Sequence
  Synthetic
cauaccuugauaguccag

SEQ ID NO: 119635 - RNA, 19 nt, Artificial Sequence
  Synthetic
acauaccuugauaguccag

SEQ ID NO: 119636 - RNA, 20 nt, Artificial Sequence
  Synthetic
aacauaccuugauaguccag

SEQ ID NO: 119637 - RNA, 21 nt, Artificial Sequence
  Synthetic
caacauaccuugauaguccag

SEQ ID NO: 119638 - RNA, 22 nt, Artificial Sequence
  Synthetic
gcaacauaccuugauaguccag

SEQ ID NO: 119639 - RNA, 23 nt, Artificial Sequence
  Synthetic
ggcaacauaccuugauaguccag

SEQ ID NO: 119640 - RNA, 24 nt, Artificial Sequence
  Synthetic
gggcaacauaccuugauaguccag

SEQ ID NO: 119641 - RNA, 18 nt, Artificial Sequence
  Synthetic
cggcuaggaguuccgcag

SEQ ID NO: 119642 - RNA, 19 nt, Artificial Sequence
  Synthetic
gcggcuaggaguuccgcag

SEQ ID NO: 119643 - RNA, 20 nt, Artificial Sequence
  Synthetic
agcggcuaggaguuccgcag

SEQ ID NO: 119644 - RNA, 21 nt, Artificial Sequence
  Synthetic
aagcggcuaggaguuccgcag

SEQ ID NO: 119645 - RNA, 22 nt, Artificial Sequence
  Synthetic
caagcggcuaggaguuccgcag

SEQ ID NO: 119646 - RNA, 23 nt, Artificial Sequence
  Synthetic
acaagcggcuaggaguuccgcag

SEQ ID NO: 119647 - RNA, 24 nt, Artificial Sequence
  Synthetic
aacaagcggcuaggaguuccgcag

SEQ ID NO: 119648 - RNA, 18 nt, Artificial Sequence
  Synthetic
gccgauugguggaggcag

SEQ ID NO: 119649 - RNA, 19 nt, Artificial Sequence
  Synthetic
ugccgauugguggaggcag

SEQ ID NO: 119650 - RNA, 20 nt, Artificial Sequence
  Synthetic
cugccgauugguggaggcag

SEQ ID NO: 119651 - RNA, 21 nt, Artificial Sequence
  Synthetic
acugccgauugguggaggcag

SEQ ID NO: 119652 - RNA, 22 nt, Artificial Sequence
  Synthetic
gacugccgauugguggaggcag

SEQ ID NO: 119653 - RNA, 23 nt, Artificial Sequence
  Synthetic
ugacugccgauugguggaggcag

SEQ ID NO: 119654 - RNA, 24 nt, Artificial Sequence
  Synthetic
cugacugccgauugguggaggcag

SEQ ID NO: 119655 - RNA, 18 nt, Artificial Sequence
  Synthetic
cgcaguauggaucggcag

SEQ ID NO: 119656 - RNA, 19 nt, Artificial Sequence
  Synthetic
ccgcaguauggaucggcag

SEQ ID NO: 119657 - RNA, 20 nt, Artificial Sequence
  Synthetic
uccgcaguauggaucggcag

SEQ ID NO: 119658 - RNA, 21 nt, Artificial Sequence
  Synthetic
uuccgcaguauggaucggcag

SEQ ID NO: 119659 - RNA, 22 nt, Artificial Sequence
  Synthetic
guuccgcaguauggaucggcag

SEQ ID NO: 119660 - RNA, 23 nt, Artificial Sequence
  Synthetic
aguuccgcaguauggaucggcag

SEQ ID NO: 119661 - RNA, 24 nt, Artificial Sequence
  Synthetic
gaguuccgcaguauggaucggcag

SEQ ID NO: 119662 - RNA, 18 nt, Artificial Sequence
  Synthetic
gcaggauccaguuggcag

SEQ ID NO: 119663 - RNA, 19 nt, Artificial Sequence
  Synthetic
cgcaggauccaguuggcag

SEQ ID NO: 119664 - RNA, 20 nt, Artificial Sequence
  Synthetic
gcgcaggauccaguuggcag

SEQ ID NO: 119665 - RNA, 21 nt, Artificial Sequence
  Synthetic
cgcgcaggauccaguuggcag

SEQ ID NO: 119666 - RNA, 22 nt, Artificial Sequence
  Synthetic
ccgcgcaggauccaguuggcag

SEQ ID NO: 119667 - RNA, 23 nt, Artificial Sequence
  Synthetic
cccgcgcaggauccaguuggcag

SEQ ID NO: 119668 - RNA, 24 nt, Artificial Sequence
  Synthetic
ucccgcgcaggauccaguuggcag

SEQ ID NO: 119669 - RNA, 18 nt, Artificial Sequence
  Synthetic
cauagcagcaggaugcag

SEQ ID NO: 119670 - RNA, 19 nt, Artificial Sequence
  Synthetic
gcauagcagcaggaugcag

SEQ ID NO: 119671 - RNA, 20 nt, Artificial Sequence
  Synthetic
ggcauagcagcaggaugcag

SEQ ID NO: 119672 - RNA, 21 nt, Artificial Sequence
  Synthetic
aggcauagcagcaggaugcag

SEQ ID NO: 119673 - RNA, 22 nt, Artificial Sequence
  Synthetic
gaggcauagcagcaggaugcag

SEQ ID NO: 119674 - RNA, 23 nt, Artificial Sequence
  Synthetic
ugaggcauagcagcaggaugcag

SEQ ID NO: 119675 - RNA, 24 nt, Artificial Sequence
  Synthetic
augaggcauagcagcaggaugcag

SEQ ID NO: 119676 - RNA, 18 nt, Artificial Sequence
  Synthetic
uugguggucuauaugcag

SEQ ID NO: 119677 - RNA, 19 nt, Artificial Sequence
  Synthetic
uuugguggucuauaugcag

SEQ ID NO: 119678 - RNA, 20 nt, Artificial Sequence
  Synthetic
auuugguggucuauaugcag

SEQ ID NO: 119679 - RNA, 21 nt, Artificial Sequence
  Synthetic
cauuugguggucuauaugcag

SEQ ID NO: 119680 - RNA, 22 nt, Artificial Sequence
  Synthetic
gcauuugguggucuauaugcag

SEQ ID NO: 119681 - RNA, 23 nt, Artificial Sequence
  Synthetic
ggcauuugguggucuauaugcag

SEQ ID NO: 119682 - RNA, 24 nt, Artificial Sequence
  Synthetic
gggcauuugguggucuauaugcag

SEQ ID NO: 119683 - RNA, 18 nt, Artificial Sequence
  Synthetic
  misc_feature (14)..(15): n is a, c, g, or u
ggucggucgguacnncag

SEQ ID NO: 119684 - RNA, 19 nt, Artificial Sequence
  Synthetic
  misc_feature (15)..(16): n is a, c, g, or u
uggucggucgguacnncag

SEQ ID NO: 119685 - RNA, 20 nt, Artificial Sequence
  Synthetic
  misc_feature (16)..(17): n is a, c, g, or u
guggucggucgguacnncag

SEQ ID NO: 119686 - RNA, 21 nt, Artificial Sequence
  Synthetic
  misc_feature (17)..(18): n is a, c, g, or u
cguggucggucgguacnncag

SEQ ID NO: 119687 - RNA, 22 nt, Artificial Sequence
  Synthetic
  misc_feature (18)..(19): n is a, c, g, or u
ccguggucggucgguacnncag

SEQ ID NO: 119688 - RNA, 23 nt, Artificial Sequence
  Synthetic
  misc_feature (19)..(20): n is a, c, g, or u
cccguggucggucgguacnncag

SEQ ID NO: 119689 - RNA, 24 nt, Artificial Sequence
  Synthetic
  misc_feature (20)..(21): n is a, c, g, or u
ccccguggucggucgguacnncag

SEQ ID NO: 119690 - RNA, 18 nt, Artificial Sequence
  Synthetic
ccugcaaaugaaugucag

SEQ ID NO: 119691 - RNA, 19 nt, Artificial Sequence
  Synthetic
uccugcaaaugaaugucag

SEQ ID NO: 119692 - RNA, 20 nt, Artificial Sequence
  Synthetic
cuccugcaaaugaaugucag

SEQ ID NO: 119693 - RNA, 21 nt, Artificial Sequence
  Synthetic
ccuccugcaaaugaaugucag

SEQ ID NO: 119694 - RNA, 22 nt, Artificial Sequence
  Synthetic
uccuccugcaaaugaaugucag

SEQ ID NO: 119695 - RNA, 23 nt, Artificial Sequence
  Synthetic
guccuccugcaaaugaaugucag

SEQ ID NO: 119696 - RNA, 24 nt, Artificial Sequence
  Synthetic
uguccuccugcaaaugaaugucag

SEQ ID NO: 119697 - RNA, 18 nt, Artificial Sequence
  Synthetic
ucagaaggcaaaaaagag

SEQ ID NO: 119698 - RNA, 19 nt, Artificial Sequence
  Synthetic
gucagaaggcaaaaaagag

SEQ ID NO: 119699 - RNA, 20 nt, Artificial Sequence
  Synthetic
agucagaaggcaaaaaagag

SEQ ID NO: 119700 - RNA, 21 nt, Artificial Sequence
  Synthetic
aagucagaaggcaaaaaagag

SEQ ID NO: 119701 - RNA, 22 nt, Artificial Sequence
  Synthetic
gaagucagaaggcaaaaaagag

SEQ ID NO: 119702 - RNA, 23 nt, Artificial Sequence
  Synthetic
agaagucagaaggcaaaaaagag

SEQ ID NO: 119703 - RNA, 24 nt, Artificial Sequence
  Synthetic
aagaagucagaaggcaaaaaagag

SEQ ID NO: 119704 - RNA, 18 nt, Artificial Sequence
  Synthetic
aggccucccgauacagag

SEQ ID NO: 119705 - RNA, 19 nt, Artificial Sequence
  Synthetic
aaggccucccgauacagag

SEQ ID NO: 119706 - RNA, 20 nt, Artificial Sequence
  Synthetic
uaaggccucccgauacagag

SEQ ID NO: 119707 - RNA, 21 nt, Artificial Sequence
  Synthetic
cuaaggccucccgauacagag

SEQ ID NO: 119708 - RNA, 22 nt, Artificial Sequence
  Synthetic
ucuaaggccucccgauacagag

SEQ ID NO: 119709 - RNA, 23 nt, Artificial Sequence
  Synthetic
cucuaaggccucccgauacagag

SEQ ID NO: 119710 - RNA, 24 nt, Artificial Sequence
  Synthetic
acucuaaggccucccgauacagag

SEQ ID NO: 119711 - RNA, 18 nt, Artificial Sequence
  Synthetic
  misc_feature (1)..(1): n is a, c, g, or u
ngagaugauuaggcagag

SEQ ID NO: 119712 - RNA, 19 nt, Artificial Sequence
  Synthetic
  misc_feature (2)..(2): n is a, c, g, or u
angagaugauuaggcagag

SEQ ID NO: 119713 - RNA, 20 nt, Artificial Sequence
  Synthetic
  misc_feature (3)..(3): n is a, c, g, or u
cangagaugauuaggcagag

SEQ ID NO: 119714 - RNA, 21 nt, Artificial Sequence
  Synthetic
  misc_feature (4)..(4): n is a, c, g, or u
acangagaugauuaggcagag

SEQ ID NO: 119715 - RNA, 22 nt, Artificial Sequence
  Synthetic
  misc_feature (5)..(5): n is a, c, g, or u
aacangagaugauuaggcagag

SEQ ID NO: 119716 - RNA, 23 nt, Artificial Sequence
  Synthetic
  misc_feature (6)..(6): n is a, c, g, or u
gaacangagaugauuaggcagag

SEQ ID NO: 119717 - RNA, 24 nt, Artificial Sequence
  Synthetic
  misc_feature (7)..(7): n is a, c, g, or u
ugaacangagaugauuaggcagag

SEQ ID NO: 119718 - RNA, 18 nt, Artificial Sequence
  Synthetic
uccaugcgacgugcagag

SEQ ID NO: 119719 - RNA, 19 nt, Artificial Sequence
  Synthetic
cuccaugcgacgugcagag

SEQ ID NO: 119720 - RNA, 20 nt, Artificial Sequence
  Synthetic
ucuccaugcgacgugcagag

SEQ ID NO: 119721 - RNA, 21 nt, Artificial Sequence
  Synthetic
gucuccaugcgacgugcagag

SEQ ID NO: 119722 - RNA, 22 nt, Artificial Sequence
  Synthetic
ggucuccaugcgacgugcagag

SEQ ID NO: 119723 - RNA, 23 nt, Artificial Sequence
  Synthetic
uggucuccaugcgacgugcagag

SEQ ID NO: 119724 - RNA, 24 nt, Artificial Sequence
  Synthetic
guggucuccaugcgacgugcagag

SEQ ID NO: 119725 - RNA, 18 nt, Artificial Sequence
  Synthetic
augauccuggaauuagag

SEQ ID NO: 119726 - RNA, 19 nt, Artificial Sequence
  Synthetic
gaugauccuggaauuagag

SEQ ID NO: 119727 - RNA, 20 nt, Artificial Sequence
  Synthetic
ugaugauccuggaauuagag

SEQ ID NO: 119728 - RNA, 21 nt, Artificial Sequence
  Synthetic
uugaugauccuggaauuagag

SEQ ID NO: 119729 - RNA, 22 nt, Artificial Sequence
  Synthetic
guugaugauccuggaauuagag

SEQ ID NO: 119730 - RNA, 23 nt, Artificial Sequence
  Synthetic
  misc_feature (1)..(1): n is a, c, g, or u
nguugaugauccuggaauuagag

SEQ ID NO: 119731 - RNA, 24 nt, Artificial Sequence
  Synthetic
  misc_feature (2)..(2): n is a, c, g, or u
unguugaugauccuggaauuagag

SEQ ID NO: 119732 - RNA, 18 nt, Artificial Sequence
  Synthetic
  misc_feature (11)..(11): n is a, c, g, or u
gaugagugucncuuagag

SEQ ID NO: 119733 - RNA, 19 nt, Artificial Sequence
  Synthetic
  misc_feature (12)..(12): n is a, c, g, or u
ggaugagugucncuuagag

SEQ ID NO: 119734 - RNA, 20 nt, Artificial Sequence
  Synthetic
  misc_feature (13)..(13): n is a, c, g, or u
aggaugagugucncuuagag

SEQ ID NO: 119735 - RNA, 21 nt, Artificial Sequence
  Synthetic
  misc_feature (14)..(14): n is a, c, g, or u
gaggaugagugucncuuagag

SEQ ID NO: 119736 - RNA, 22 nt, Artificial Sequence
  Synthetic
  misc_feature (15)..(15): n is a, c, g, or u
ugaggaugagugucncuuagag

SEQ ID NO: 119737 - RNA, 23 nt, Artificial Sequence
  Synthetic
  misc_feature (16)..(16): n is a, c, g, or u
cugaggaugagugucncuuagag

SEQ ID NO: 119738 - RNA, 24 nt, Artificial Sequence
  Synthetic
  misc_feature (17)..(17): n is a, c, g, or u
ccugaggaugagugucncuuagag

SEQ ID NO: 119739 - RNA, 18 nt, Artificial Sequence
  Synthetic
ccccgccuguaacacgag

SEQ ID NO: 119740 - RNA, 19 nt, Artificial Sequence
  Synthetic
accccgccuguaacacgag

SEQ ID NO: 119741 - RNA, 20 nt, Artificial Sequence
  Synthetic
aaccccgccuguaacacgag

SEQ ID NO: 119742 - RNA, 18 nt, Artificial Sequence
  Synthetic
agagaaguccaccacgag

SEQ ID NO: 119743 - RNA, 19 nt, Artificial Sequence
  Synthetic
gagagaaguccaccacgag

SEQ ID NO: 119744 - RNA, 20 nt, Artificial Sequence
  Synthetic
ugagagaaguccaccacgag

SEQ ID NO: 119745 - RNA, 21 nt, Artificial Sequence
  Synthetic
uugagagaaguccaccacgag

SEQ ID NO: 119746 - RNA, 22 nt, Artificial Sequence
  Synthetic
auugagagaaguccaccacgag

SEQ ID NO: 119747 - RNA, 23 nt, Artificial Sequence
  Synthetic
aauugagagaaguccaccacgag

SEQ ID NO: 119748 - RNA, 24 nt, Artificial Sequence
  Synthetic
aaauugagagaaguccaccacgag

SEQ ID NO: 119749 - RNA, 18 nt, Artificial Sequence
  Synthetic
aacauugagauucccgag

SEQ ID NO: 119750 - RNA, 19 nt, Artificial Sequence
  Synthetic
uaacauugagauucccgag

SEQ ID NO: 119751 - RNA, 20 nt, Artificial Sequence
  Synthetic
cuaacauugagauucccgag

SEQ ID NO: 119752 - RNA, 21 nt, Artificial Sequence
  Synthetic
acuaacauugagauucccgag

SEQ ID NO: 119753 - RNA, 22 nt, Artificial Sequence
  Synthetic
uacuaacauugagauucccgag

SEQ ID NO: 119754 - RNA, 23 nt, Artificial Sequence
  Synthetic
auacuaacauugagauucccgag

SEQ ID NO: 119755 - RNA, 24 nt, Artificial Sequence
  Synthetic
aauacuaacauugagauucccgag

SEQ ID NO: 119756 - RNA, 18 nt, Artificial Sequence
  Synthetic
  misc_feature (2)..(2): n is a, c, g, or u
  misc_feature (10)..(10): n is a, c, g, or u
cnccagaccngcugcgag

SEQ ID NO: 119757 - RNA, 19 nt, Artificial Sequence
  Synthetic
  misc_feature (3)..(3): n is a, c, g, or u
  misc_feature (11)..(11): n is a, c, g, or u
gcnccagaccngcugcgag

SEQ ID NO: 119758 - RNA, 20 nt, Artificial Sequence
  Synthetic
  misc_feature (1)..(1): n is a, c, g, or u
  misc_feature (4)..(4): n is a, c, g, or u
  misc_feature (12)..(12): n is a, c, g, or u
ngcnccagaccngcugcgag

SEQ ID NO: 119759 - RNA, 21 nt, Artificial Sequence
  Synthetic
  misc_feature (2)..(2): n is a, c, g, or u
  misc_feature (5)..(5): n is a, c, g, or u
  misc_feature (13)..(13): n is a, c, g, or u
ungcnccagaccngcugcgag

SEQ ID NO: 119760 - RNA, 22 nt, Artificial Sequence
  Synthetic
  misc_feature (3)..(3): n is a, c, g, or u
  misc_feature (6)..(6): n is a, c, g, or u
  misc_feature (14)..(14): n is a, c, g, or u
uungcnccagaccngcugcgag

SEQ ID NO: 119761 - RNA, 23 nt, Artificial Sequence
  Synthetic
  misc_feature (4)..(4): n is a, c, g, or u
  misc_feature (7)..(7): n is a, c, g, or u
  misc_feature (15)..(15): n is a, c, g, or u
uuungcnccagaccngcugcgag

SEQ ID NO: 119762 - RNA, 24 nt, Artificial Sequence
  Synthetic
  misc_feature (5)..(5): n is a, c, g, or u
  misc_feature (8)..(8): n is a, c, g, or u
  misc_feature (16)..(16): n is a, c, g, or u
guuungcnccagaccngcugcgag

SEQ ID NO: 119763 - RNA, 18 nt, Artificial Sequence
  Synthetic
gagaccuucgucugcgag

SEQ ID NO: 119764 - RNA, 19 nt, Artificial Sequence
  Synthetic
ugagaccuucgucugcgag

SEQ ID NO: 119765 - RNA, 20 nt, Artificial Sequence
  Synthetic
uugagaccuucgucugcgag

SEQ ID NO: 119766 - RNA, 18 nt, Artificial Sequence
  Synthetic
gauugguggaggcaggag

SEQ ID NO: 119767 - RNA, 19 nt, Artificial Sequence
  Synthetic
cgauugguggaggcaggag

SEQ ID NO: 119768 - RNA, 20 nt, Artificial Sequence
  Synthetic
ccgauugguggaggcaggag

SEQ ID NO: 119769 - RNA, 21 nt, Artificial Sequence
  Synthetic
gccgauugguggaggcaggag

SEQ ID NO: 119770 - RNA, 22 nt, Artificial Sequence
  Synthetic
ugccgauugguggaggcaggag

SEQ ID NO: 119771 - RNA, 23 nt, Artificial Sequence
  Synthetic
cugccgauugguggaggcaggag

SEQ ID NO: 119772 - RNA, 24 nt, Artificial Sequence
  Synthetic
acugccgauugguggaggcaggag

SEQ ID NO: 119773 - RNA, 18 nt, Artificial Sequence
  Synthetic
gucuauaugcaggaggag

SEQ ID NO: 119774 - RNA, 19 nt, Artificial Sequence
  Synthetic
ggucuauaugcaggaggag

SEQ ID NO: 119775 - RNA, 20 nt, Artificial Sequence
  Synthetic
uggucuauaugcaggaggag

SEQ ID NO: 119776 - RNA, 21 nt, Artificial Sequence
  Synthetic
guggucuauaugcaggaggag

SEQ ID NO: 119777 - RNA, 22 nt, Artificial Sequence
  Synthetic
gguggucuauaugcaggaggag

SEQ ID NO: 119778 - RNA, 23 nt, Artificial Sequence
  Synthetic
ugguggucuauaugcaggaggag

SEQ ID NO: 119779 - RNA, 24 nt, Artificial Sequence
  Synthetic
uugguggucuauaugcaggaggag

SEQ ID NO: 119780 - RNA, 18 nt, Artificial Sequence
  Synthetic
gacugccgauugguggag

SEQ ID NO: 119781 - RNA, 19 nt, Artificial Sequence
  Synthetic
ugacugccgauugguggag

SEQ ID NO: 119782 - RNA, 20 nt, Artificial Sequence
  Synthetic
cugacugccgauugguggag

SEQ ID NO: 119783 - RNA, 21 nt, Artificial Sequence
  Synthetic
ccugacugccgauugguggag

SEQ ID NO: 119784 - RNA, 22 nt, Artificial Sequence
  Synthetic
uccugacugccgauugguggag

SEQ ID NO: 119785 - RNA, 23 nt, Artificial Sequence
  Synthetic
uuccugacugccgauugguggag

SEQ ID NO: 119786 - RNA, 24 nt, Artificial Sequence
  Synthetic
cuuccugacugccgauugguggag

SEQ ID NO: 119787 - RNA, 18 nt, Artificial Sequence
  Synthetic
aaccaggacaaauuggag

SEQ ID NO: 119788 - RNA, 19 nt, Artificial Sequence
  Synthetic
uaaccaggacaaauuggag

SEQ ID NO: 119789 - RNA, 20 nt, Artificial Sequence
  Synthetic
auaaccaggacaaauuggag

SEQ ID NO: 119790 - RNA, 21 nt, Artificial Sequence
  Synthetic
gauaaccaggacaaauuggag

SEQ ID NO: 119791 - RNA, 22 nt, Artificial Sequence
  Synthetic
cgauaaccaggacaaauuggag

SEQ ID NO: 119792 - RNA, 23 nt, Artificial Sequence
  Synthetic
gcgauaaccaggacaaauuggag

SEQ ID NO: 119793 - RNA, 24 nt, Artificial Sequence
  Synthetic
agcgauaaccaggacaaauuggag

SEQ ID NO: 119794 - RNA, 18 nt, Artificial Sequence
  Synthetic
uuuguacagcaacaugag

SEQ ID NO: 119795 - RNA, 19 nt, Artificial Sequence
  Synthetic
uuuuguacagcaacaugag

SEQ ID NO: 119796 - RNA, 20 nt, Artificial Sequence
  Synthetic
guuuuguacagcaacaugag

SEQ ID NO: 119797 - RNA, 21 nt, Artificial Sequence
  Synthetic
gguuuuguacagcaacaugag

SEQ ID NO: 119798 - RNA, 22 nt, Artificial Sequence
  Synthetic
agguuuuguacagcaacaugag

SEQ ID NO: 119799 - RNA, 23 nt, Artificial Sequence
  Synthetic
uagguuuuguacagcaacaugag

SEQ ID NO: 119800 - RNA, 24 nt, Artificial Sequence
  Synthetic
guagguuuuguacagcaacaugag

SEQ ID NO: 119801 - RNA, 18 nt, Artificial Sequence
  Synthetic
uggcacuaguaaacugag

SEQ ID NO: 119802 - RNA, 19 nt, Artificial Sequence
  Synthetic
auggcacuaguaaacugag

SEQ ID NO: 119803 - RNA, 20 nt, Artificial Sequence
  Synthetic
aauggcacuaguaaacugag

SEQ ID NO: 119804 - RNA, 21 nt, Artificial Sequence
  Synthetic
aaauggcacuaguaaacugag

SEQ ID NO: 119805 - RNA, 22 nt, Artificial Sequence
  Synthetic
caaauggcacuaguaaacugag

SEQ ID NO: 119806 - RNA, 23 nt, Artificial Sequence
  Synthetic
acaaauggcacuaguaaacugag

SEQ ID NO: 119807 - RNA, 24 nt, Artificial Sequence
  Synthetic
aacaaauggcacuaguaaacugag

SEQ ID NO: 119808 - RNA, 18 nt, Artificial Sequence
  Synthetic
  misc_feature (10)..(10): n is a, c, g, or u
uugugaguangcccugag

SEQ ID NO: 119809 - RNA, 19 nt, Artificial Sequence
  Synthetic
  misc_feature (11)..(11): n is a, c, g, or u
guugugaguangcccugag

SEQ ID NO: 119810 - RNA, 20 nt, Artificial Sequence
  Synthetic
  misc_feature (12)..(12): n is a, c, g, or u
aguugugaguangcccugag

SEQ ID NO: 119811 - RNA, 21 nt, Artificial Sequence
  Synthetic
  misc_feature (13)..(13): n is a, c, g, or u
caguugugaguangcccugag

SEQ ID NO: 119812 - RNA, 22 nt, Artificial Sequence
  Synthetic
  misc_feature (14)..(14): n is a, c, g, or u
acaguugugaguangcccugag

SEQ ID NO: 119813 - RNA, 23 nt, Artificial Sequence
  Synthetic
  misc_feature (15)..(15): n is a, c, g, or u
cacaguugugaguangcccugag

SEQ ID NO: 119814 - RNA, 24 nt, Artificial Sequence
  Synthetic
  misc_feature (16)..(16): n is a, c, g, or u
gcacaguugugaguangcccugag

SEQ ID NO: 119815 - RNA, 18 nt, Artificial Sequence
  Synthetic
  misc_feature (1)..(1): n is a, c, g, or u
  misc_feature (6)..(6): n is a, c, g, or u
nagagncaguauucugag

SEQ ID NO: 119816 - RNA, 19 nt, Artificial Sequence
  Synthetic
  misc_feature (2)..(2): n is a, c, g, or u
  misc_feature (7)..(7): n is a, c, g, or u
gnagagncaguauucugag

SEQ ID NO: 119817 - RNA, 20 nt, Artificial Sequence
  Synthetic
  misc_feature (3)..(3): n is a, c, g, or u
  misc_feature (8)..(8): n is a, c, g, or u
ggnagagncaguauucugag

SEQ ID NO: 119818 - RNA, 21 nt, Artificial Sequence
  Synthetic
  misc_feature (4)..(4): n is a, c, g, or u
  misc_feature (9)..(9): n is a, c, g, or u
uggnagagncaguauucugag

SEQ ID NO: 119819 - RNA, 22 nt, Artificial Sequence
  Synthetic
  misc_feature (5)..(5): n is a, c, g, or u
  misc_feature (10)..(10): n is a, c, g, or u
auggnagagncaguauucugag

SEQ ID NO: 119820 - RNA, 23 nt, Artificial Sequence
  Synthetic
  misc_feature (6)..(6): n is a, c, g, or u
  misc_feature (11)..(11): n is a, c, g, or u
uauggnagagncaguauucugag

SEQ ID NO: 119821 - RNA, 24 nt, Artificial Sequence
  Synthetic
  misc_feature (7)..(7): n is a, c, g, or u
  misc_feature (12)..(12): n is a, c, g, or u
auauggnagagncaguauucugag

SEQ ID NO: 119822 - RNA, 18 nt, Artificial Sequence
  Synthetic
ugagugccguauggugag

SEQ ID NO: 119823 - RNA, 19 nt, Artificial Sequence
  Synthetic
cugagugccguauggugag

SEQ ID NO: 119824 - RNA, 20 nt, Artificial Sequence
  Synthetic
ccugagugccguauggugag

SEQ ID NO: 119825 - RNA, 21 nt, Artificial Sequence
  Synthetic
gccugagugccguauggugag

SEQ ID NO: 119826 - RNA, 22 nt, Artificial Sequence
  Synthetic
ugccugagugccguauggugag

SEQ ID NO: 119827 - RNA, 23 nt, Artificial Sequence
  Synthetic
uugccugagugccguauggugag

SEQ ID NO: 119828 - RNA, 24 nt, Artificial Sequence
  Synthetic
cuugccugagugccguauggugag

SEQ ID NO: 119829 - RNA, 18 nt, Artificial Sequence
  Synthetic
acauagagguuccuugag

SEQ ID NO: 119830 - RNA, 19 nt, Artificial Sequence
  Synthetic
aacauagagguuccuugag

SEQ ID NO: 119831 - RNA, 20 nt, Artificial Sequence
  Synthetic
aaacauagagguuccuugag

SEQ ID NO: 119832 - RNA, 21 nt, Artificial Sequence
  Synthetic
gaaacauagagguuccuugag

SEQ ID NO: 119833 - RNA, 22 nt, Artificial Sequence
  Synthetic
ggaaacauagagguuccuugag

SEQ ID NO: 119834 - RNA, 23 nt, Artificial Sequence
  Synthetic
gggaaacauagagguuccuugag

SEQ ID NO: 119835 - RNA, 24 nt, Artificial Sequence
  Synthetic
agggaaacauagagguuccuugag

SEQ ID NO: 119836 - RNA, 18 nt, Artificial Sequence
  Synthetic
  misc_feature (5)..(5): n is a, c, g, or u
  misc_feature (16)..(16): n is a, c, g, or u
cgagnagaucucgaanag

SEQ ID NO: 119837 - RNA, 19 nt, Artificial Sequence
  Synthetic
  misc_feature (6)..(6): n is a, c, g, or u
  misc_feature (17)..(17): n is a, c, g, or u
ucgagnagaucucgaanag

SEQ ID NO: 119838 - RNA, 20 nt, Artificial Sequence
  Synthetic
  misc_feature (7)..(7): n is a, c, g, or u
  misc_feature (18)..(18): n is a, c, g, or u
gucgagnagaucucgaanag

SEQ ID NO: 119839 - RNA, 21 nt, Artificial Sequence
  Synthetic
  misc_feature (8)..(8): n is a, c, g, or u
  misc_feature (19)..(19): n is a, c, g, or u
ugucgagnagaucucgaanag

SEQ ID NO: 119840 - RNA, 22 nt, Artificial Sequence
  Synthetic
  misc_feature (9)..(9): n is a, c, g, or u
  misc_feature (20)..(20): n is a, c, g, or u
gugucgagnagaucucgaanag

SEQ ID NO: 119841 - RNA, 23 nt, Artificial Sequence
  Synthetic
  misc_feature (10)..(10): n is a, c, g, or u
  misc_feature (21)..(21): n is a, c, g, or u
ggugucgagnagaucucgaanag

SEQ ID NO: 119842 - RNA, 24 nt, Artificial Sequence
  Synthetic
  misc_feature (11)..(11): n is a, c, g, or u
  misc_feature (22)..(22): n is a, c, g, or u
cggugucgagnagaucucgaanag

SEQ ID NO: 119843 - RNA, 18 nt, Artificial Sequence
  Synthetic
  misc_feature (7)..(7): n is a, c, g, or u
  misc_feature (16)..(16): n is a, c, g, or u
uguauanuugcggganag

SEQ ID NO: 119844 - RNA, 19 nt, Artificial Sequence
  Synthetic
  misc_feature (8)..(8): n is a, c, g, or u
  misc_feature (17)..(17): n is a, c, g, or u
auguauanuugcggganag

SEQ ID NO: 119845 - RNA, 20 nt, Artificial Sequence
  Synthetic
  misc_feature (9)..(9): n is a, c, g, or u
  misc_feature (18)..(18): n is a, c, g, or u
gauguauanuugcggganag

SEQ ID NO: 119846 - RNA, 21 nt, Artificial Sequence
  Synthetic
  misc_feature (1)..(1): n is a, c, g, or u
  misc_feature (10)..(10): n is a, c, g, or u
  misc_feature (19)..(19): n is a, c, g, or u
ngauguauanuugcggganag

SEQ ID NO: 119847 - RNA, 22 nt, Artificial Sequence
  Synthetic
  misc_feature (2)..(2): n is a, c, g, or u
  misc_feature (11)..(11): n is a, c, g, or u
  misc_feature (20)..(20): n is a, c, g, or u
angauguauanuugcggganag

SEQ ID NO: 119848 - RNA, 23 nt, Artificial Sequence
  Synthetic
  misc_feature (3)..(3): n is a, c, g, or u
  misc_feature (12)..(12): n is a, c, g, or u
  misc_feature (21)..(21): n is a, c, g, or u
aangauguauanuugcggganag

SEQ ID NO: 119849 - RNA, 24 nt, Artificial Sequence
  Synthetic
  misc_feature (4)..(4): n is a, c, g, or u
  misc_feature (13)..(13): n is a, c, g, or u
  misc_feature (22)..(22): n is a, c, g, or u
aaangauguauanuugcggganag

SEQ ID NO: 119850 - RNA, 18 nt, Artificial Sequence
  Synthetic
  misc_feature (16)..(16): n is a, c, g, or u
gugcacacgguccggnag

SEQ ID NO: 119851 - RNA, 19 nt, Artificial Sequence
  Synthetic
  misc_feature (17)..(17): n is a, c, g, or u
agugcacacgguccggnag

SEQ ID NO: 119852 - RNA, 20 nt, Artificial Sequence
  Synthetic
  misc_feature (18)..(18): n is a, c, g, or u
aagugcacacgguccggnag

SEQ ID NO: 119853 - RNA, 21 nt, Artificial Sequence
  Synthetic
  misc_feature (19)..(19): n is a, c, g, or u
gaagugcacacgguccggnag

SEQ ID NO: 119854 - RNA, 22 nt, Artificial Sequence
  Synthetic
  misc_feature (20)..(20): n is a, c, g, or u
cgaagugcacacgguccggnag

SEQ ID NO: 119855 - RNA, 23 nt, Artificial Sequence
  Synthetic
  misc_feature (21)..(21): n is a, c, g, or u
gcgaagugcacacgguccggnag

SEQ ID NO: 119856 - RNA, 24 nt, Artificial Sequence
  Synthetic
  misc_feature (22)..(22): n is a, c, g, or u
agcgaagugcacacgguccggnag

SEQ ID NO: 119857 - RNA, 18 nt, Artificial Sequence
  Synthetic
ggcaacauaccuugauag

SEQ ID NO: 119858 - RNA, 19 nt, Artificial Sequence
  Synthetic
gggcaacauaccuugauag

SEQ ID NO: 119859 - RNA, 20 nt, Artificial Sequence
  Synthetic
cgggcaacauaccuugauag

SEQ ID NO: 119860 - RNA, 21 nt, Artificial Sequence
  Synthetic
acgggcaacauaccuugauag

SEQ ID NO: 119861 - RNA, 22 nt, Artificial Sequence
  Synthetic
aacgggcaacauaccuugauag

SEQ ID NO: 119862 - RNA, 23 nt, Artificial Sequence
  Synthetic
aaacgggcaacauaccuugauag

SEQ ID NO: 119863 - RNA, 24 nt, Artificial Sequence
  Synthetic
caaacgggcaacauaccuugauag

SEQ ID NO: 119864 - RNA, 18 nt, Artificial Sequence
  Synthetic
augccuacagccuccuag

SEQ ID NO: 119865 - RNA, 19 nt, Artificial Sequence
  Synthetic
uaugccuacagccuccuag

SEQ ID NO: 119866 - RNA, 20 nt, Artificial Sequence
  Synthetic
uuaugccuacagccuccuag

SEQ ID NO: 119867 - RNA, 21 nt, Artificial Sequence
  Synthetic
uuuaugccuacagccuccuag

SEQ ID NO: 119868 - RNA, 22 nt, Artificial Sequence
  Synthetic
auuuaugccuacagccuccuag

SEQ ID NO: 119869 - RNA, 23 nt, Artificial Sequence
  Synthetic
aauuuaugccuacagccuccuag

SEQ ID NO: 119870 - RNA, 24 nt, Artificial Sequence
  Synthetic
caauuuaugccuacagccuccuag

SEQ ID NO: 119871 - RNA, 18 nt, Artificial Sequence
  Synthetic
  misc_feature (7)..(7): n is a, c, g, or u
ugaacangagaugauuag

SEQ ID NO: 119872 - RNA, 19 nt, Artificial Sequence
  Synthetic
  misc_feature (8)..(8): n is a, c, g, or u
augaacangagaugauuag

SEQ ID NO: 119873 - RNA, 20 nt, Artificial Sequence
  Synthetic
  misc_feature (9)..(9): n is a, c, g, or u
caugaacangagaugauuag

SEQ ID NO: 119874 - RNA, 21 nt, Artificial Sequence
  Synthetic
  misc_feature (10)..(10): n is a, c, g, or u
acaugaacangagaugauuag

SEQ ID NO: 119875 - RNA, 22 nt, Artificial Sequence
  Synthetic
  misc_feature (11)..(11): n is a, c, g, or u
gacaugaacangagaugauuag

SEQ ID NO: 119876 - RNA, 23 nt, Artificial Sequence
  Synthetic
  misc_feature (12)..(12): n is a, c, g, or u
ggacaugaacangagaugauuag

SEQ ID NO: 119877 - RNA, 24 nt, Artificial Sequence
  Synthetic
  misc_feature (13)..(13): n is a, c, g, or u
aggacaugaacangagaugauuag

SEQ ID NO: 119878 - RNA, 18 nt, Artificial Sequence
  Synthetic
  misc_feature (7)..(7): n is a, c, g, or u
  misc_feature (13)..(13): n is a, c, g, or u
cagauanuguuuncuuag

SEQ ID NO: 119879 - RNA, 19 nt, Artificial Sequence
  Synthetic
  misc_feature (8)..(8): n is a, c, g, or u
  misc_feature (14)..(14): n is a, c, g, or u
ucagauanuguuuncuuag

SEQ ID NO: 119880 - RNA, 20 nt, Artificial Sequence
  Synthetic
  misc_feature (9)..(9): n is a, c, g, or u
  misc_feature (15)..(15): n is a, c, g, or u
uucagauanuguuuncuuag

SEQ ID NO: 119881 - RNA, 21 nt, Artificial Sequence
  Synthetic
  misc_feature (10)..(10): n is a, c, g, or u
  misc_feature (16)..(16): n is a, c, g, or u
guucagauanuguuuncuuag

SEQ ID NO: 119882 - RNA, 22 nt, Artificial Sequence
  Synthetic
  misc_feature (11)..(11): n is a, c, g, or u
  misc_feature (17)..(17): n is a, c, g, or u
gguucagauanuguuuncuuag

SEQ ID NO: 119883 - RNA, 23 nt, Artificial Sequence
  Synthetic
  misc_feature (12)..(12): n is a, c, g, or u
  misc_feature (18)..(18): n is a, c, g, or u
agguucagauanuguuuncuuag

SEQ ID NO: 119884 - RNA, 24 nt, Artificial Sequence
  Synthetic
  misc_feature (13)..(13): n is a, c, g, or u
  misc_feature (19)..(19): n is a, c, g, or u
aagguucagauanuguuuncuuag

SEQ ID NO: 119885 - RNA, 18 nt, Artificial Sequence
  Synthetic
ggaauuagaggacaaacg

SEQ ID NO: 119886 - RNA, 19 nt, Artificial Sequence
  Synthetic
uggaauuagaggacaaacg

SEQ ID NO: 119887 - RNA, 20 nt, Artificial Sequence
  Synthetic
cuggaauuagaggacaaacg

SEQ ID NO: 119888 - RNA, 21 nt, Artificial Sequence
  Synthetic
ccuggaauuagaggacaaacg

SEQ ID NO: 119889 - RNA, 22 nt, Artificial Sequence
  Synthetic
uccuggaauuagaggacaaacg

SEQ ID NO: 119890 - RNA, 23 nt, Artificial Sequence
  Synthetic
auccuggaauuagaggacaaacg

SEQ ID NO: 119891 - RNA, 24 nt, Artificial Sequence
  Synthetic
gauccuggaauuagaggacaaacg

SEQ ID NO: 119892 - RNA, 18 nt, Artificial Sequence
  Synthetic
aaccccgccuguaacacg

SEQ ID NO: 119893 - RNA, 19 nt, Artificial Sequence
  Synthetic
aaaccccgccuguaacacg

SEQ ID NO: 119894 - RNA, 20 nt, Artificial Sequence
  Synthetic
aaaaccccgccuguaacacg

SEQ ID NO: 119895 - RNA, 21 nt, Artificial Sequence
  Synthetic
aaaaaccccgccuguaacacg

SEQ ID NO: 119896 - RNA, 22 nt, Artificial Sequence
  Synthetic
gaaaaaccccgccuguaacacg

SEQ ID NO: 119897 - RNA, 23 nt, Artificial Sequence
  Synthetic
agaaaaaccccgccuguaacacg

SEQ ID NO: 119898 - RNA, 24 nt, Artificial Sequence
  Synthetic
aagaaaaaccccgccuguaacacg

SEQ ID NO: 119899 - RNA, 18 nt, Artificial Sequence
  Synthetic
gguggucuccaugcgacg

SEQ ID NO: 119900 - RNA, 19 nt, Artificial Sequence
  Synthetic
cgguggucuccaugcgacg

SEQ ID NO: 119901 - RNA, 20 nt, Artificial Sequence
  Synthetic
acgguggucuccaugcgacg

SEQ ID NO: 119902 - RNA, 18 nt, Artificial Sequence
  Synthetic
  misc_feature (3)..(3): n is a, c, g, or u
  misc_feature (12)..(12): n is a, c, g, or u
  misc_feature (15)..(15): n is a, c, g, or u
uanuugcggganagnacg

SEQ ID NO: 119903 - RNA, 19 nt, Artificial Sequence
  Synthetic
  misc_feature (4)..(4): n is a, c, g, or u
  misc_feature (13)..(13): n is a, c, g, or u
  misc_feature (16)..(16): n is a, c, g, or u
auanuugcggganagnacg

SEQ ID NO: 119904 - RNA, 20 nt, Artificial Sequence
  Synthetic
  misc_feature (5)..(5): n is a, c, g, or u
  misc_feature (14)..(14): n is a, c, g, or u
  misc_feature (17)..(17): n is a, c, g, or u
uauanuugcggganagnacg

SEQ ID NO: 119905 - RNA, 21 nt, Artificial Sequence
  Synthetic
  misc_feature (6)..(6): n is a, c, g, or u
  misc_feature (15)..(15): n is a, c, g, or u
  misc_feature (18)..(18): n is a, c, g, or u
guauanuugcggganagnacg

SEQ ID NO: 119906 - RNA, 22 nt, Artificial Sequence
  Synthetic
  misc_feature (7)..(7): n is a, c, g, or u
  misc_feature (16)..(16): n is a, c, g, or u
  misc_feature (19)..(19): n is a, c, g, or u
uguauanuugcggganagnacg

SEQ ID NO: 119907 - RNA, 23 nt, Artificial Sequence
  Synthetic
  misc_feature (8)..(8): n is a, c, g, or u
  misc_feature (17)..(17): n is a, c, g, or u
  misc_feature (20)..(20): n is a, c, g, or u
auguauanuugcggganagnacg

SEQ ID NO: 119908 - RNA, 24 nt, Artificial Sequence
  Synthetic
  misc_feature (9)..(9): n is a, c, g, or u
  misc_feature (18)..(18): n is a, c, g, or u
  misc_feature (21)..(21): n is a, c, g, or u
gauguauanuugcggganagnacg

SEQ ID NO: 119909 - RNA, 18 nt, Artificial Sequence
  Synthetic
  misc_feature (9)..(10): n is a, c, g, or u
gauuaaagnnagguaccg

SEQ ID NO: 119910 - RNA, 19 nt, Artificial Sequence
  Synthetic
  misc_feature (10)..(11): n is a, c, g, or u
ggauuaaagnnagguaccg

SEQ ID NO: 119911 - RNA, 20 nt, Artificial Sequence
  Synthetic
  misc_feature (11)..(12): n is a, c, g, or u
aggauuaaagnnagguaccg

SEQ ID NO: 119912 - RNA, 21 nt, Artificial Sequence
  Synthetic
  misc_feature (1)..(1): n is a, c, g, or u
  misc_feature (12)..(13): n is a, c, g, or u
naggauuaaagnnagguaccg

SEQ ID NO: 119913 - RNA, 22 nt, Artificial Sequence
  Synthetic
  misc_feature (2)..(2): n is a, c, g, or u
  misc_feature (13)..(14): n is a, c, g, or u
unaggauuaaagnnagguaccg

SEQ ID NO: 119914 - RNA, 23 nt, Artificial Sequence
  Synthetic
  misc_feature (1)..(1): n is a, c, g, or u
  misc_feature (3)..(3): n is a, c, g, or u
  misc_feature (14)..(15): n is a, c, g, or u
nunaggauuaaagnnagguaccg

SEQ ID NO: 119915 - RNA, 24 nt, Artificial Sequence
  Synthetic
  misc_feature (2)..(2): n is a, c, g, or u
  misc_feature (4)..(4): n is a, c, g, or u
  misc_feature (15)..(16): n is a, c, g, or u
anunaggauuaaagnnagguaccg

SEQ ID NO: 119916 - RNA, 18 nt, Artificial Sequence
  Synthetic
gagccccaagcggccccg

SEQ ID NO: 119917 - RNA, 19 nt, Artificial Sequence
  Synthetic
agagccccaagcggccccg

SEQ ID NO: 119918 - RNA, 20 nt, Artificial Sequence
  Synthetic
uagagccccaagcggccccg

SEQ ID NO: 119919 - RNA, 21 nt, Artificial Sequence
  Synthetic
guagagccccaagcggccccg

SEQ ID NO: 119920 - RNA, 22 nt, Artificial Sequence
  Synthetic
gguagagccccaagcggccccg

SEQ ID NO: 119921 - RNA, 23 nt, Artificial Sequence
  Synthetic
cgguagagccccaagcggccccg

SEQ ID NO: 119922 - RNA, 24 nt, Artificial Sequence
  Synthetic
gcgguagagccccaagcggccccg

SEQ ID NO: 119923 - RNA, 18 nt, Artificial Sequence
  Synthetic
uaaacaaaggacgucccg

SEQ ID NO: 119924 - RNA, 19 nt, Artificial Sequence
  Synthetic
guaaacaaaggacgucccg

SEQ ID NO: 119925 - RNA, 20 nt, Artificial Sequence
  Synthetic
cguaaacaaaggacgucccg

SEQ ID NO: 119926 - RNA, 21 nt, Artificial Sequence
  Synthetic
acguaaacaaaggacgucccg

SEQ ID NO: 119927 - RNA, 22 nt, Artificial Sequence
  Synthetic
gacguaaacaaaggacgucccg

SEQ ID NO: 119928 - RNA, 23 nt, Artificial Sequence
  Synthetic
ggacguaaacaaaggacgucccg

SEQ ID NO: 119929 - RNA, 24 nt, Artificial Sequence
  Synthetic
gggacguaaacaaaggacgucccg

SEQ ID NO: 119930 - RNA, 18 nt, Artificial Sequence
  Synthetic
ccgcgggauucagcgccg

SEQ ID NO: 119931 - RNA, 19 nt, Artificial Sequence
  Synthetic
uccgcgggauucagcgccg

SEQ ID NO: 119932 - RNA, 20 nt, Artificial Sequence
  Synthetic
guccgcgggauucagcgccg

SEQ ID NO: 119933 - RNA, 21 nt, Artificial Sequence
  Synthetic
cguccgcgggauucagcgccg

SEQ ID NO: 119934 - RNA, 22 nt, Artificial Sequence
  Synthetic
ucguccgcgggauucagcgccg

SEQ ID NO: 119935 - RNA, 23 nt, Artificial Sequence
  Synthetic
gucguccgcgggauucagcgccg

SEQ ID NO: 119936 - RNA, 24 nt, Artificial Sequence
  Synthetic
ggucguccgcgggauucagcgccg

SEQ ID NO: 119937 - RNA, 18 nt, Artificial Sequence
  Synthetic
  misc_feature (9)..(9): n is a, c, g, or u
cagaccagnccguugccg

SEQ ID NO: 119938 - RNA, 19 nt, Artificial Sequence
  Synthetic
  misc_feature (10)..(10): n is a, c, g, or u
acagaccagnccguugccg

SEQ ID NO: 119939 - RNA, 20 nt, Artificial Sequence
  Synthetic
  misc_feature (11)..(11): n is a, c, g, or u
cacagaccagnccguugccg

SEQ ID NO: 119940 - RNA, 21 nt, Artificial Sequence
  Synthetic
  misc_feature (12)..(12): n is a, c, g, or u
gcacagaccagnccguugccg

SEQ ID NO: 119941 - RNA, 22 nt, Artificial Sequence
  Synthetic
  misc_feature (13)..(13): n is a, c, g, or u
ggcacagaccagnccguugccg

SEQ ID NO: 119942 - RNA, 23 nt, Artificial Sequence
  Synthetic
  misc_feature (14)..(14): n is a, c, g, or u
uggcacagaccagnccguugccg

SEQ ID NO: 119943 - RNA, 24 nt, Artificial Sequence
  Synthetic
  misc_feature (15)..(15): n is a, c, g, or u
uuggcacagaccagnccguugccg

SEQ ID NO: 119944 - RNA, 18 nt, Artificial Sequence
  Synthetic
gcacagacggggaguccg

SEQ ID NO: 119945 - RNA, 19 nt, Artificial Sequence
  Synthetic
ggcacagacggggaguccg

SEQ ID NO: 119946 - RNA, 20 nt, Artificial Sequence
  Synthetic
aggcacagacggggaguccg

SEQ ID NO: 119947 - RNA, 21 nt, Artificial Sequence
  Synthetic
aaggcacagacggggaguccg

SEQ ID NO: 119948 - RNA, 22 nt, Artificial Sequence
  Synthetic
gaaggcacagacggggaguccg

SEQ ID NO: 119949 - RNA, 23 nt, Artificial Sequence
  Synthetic
agaaggcacagacggggaguccg

SEQ ID NO: 119950 - RNA, 24 nt, Artificial Sequence
  Synthetic
gagaaggcacagacggggaguccg

SEQ ID NO: 119951 - RNA, 18 nt, Artificial Sequence
  Synthetic
cugcgagcaaaacaagcg

SEQ ID NO: 119952 - RNA, 19 nt, Artificial Sequence
  Synthetic
gcugcgagcaaaacaagcg

SEQ ID NO: 119953 - RNA, 20 nt, Artificial Sequence
  Synthetic
  misc_feature (1)..(1): n is a, c, g, or u
ngcugcgagcaaaacaagcg

SEQ ID NO: 119954 - RNA, 21 nt, Artificial Sequence
  Synthetic
  misc_feature (2)..(2): n is a, c, g, or u
cngcugcgagcaaaacaagcg

SEQ ID NO: 119955 - RNA, 22 nt, Artificial Sequence
  Synthetic
  misc_feature (3)..(3): n is a, c, g, or u
ccngcugcgagcaaaacaagcg

SEQ ID NO: 119956 - RNA, 23 nt, Artificial Sequence
  Synthetic
  misc_feature (4)..(4): n is a, c, g, or u
accngcugcgagcaaaacaagcg

SEQ ID NO: 119957 - RNA, 24 nt, Artificial Sequence
  Synthetic
  misc_feature (5)..(5): n is a, c, g, or u
gaccngcugcgagcaaaacaagcg

SEQ ID NO: 119958 - RNA, 18 nt, Artificial Sequence
  Synthetic
acagacggggaguccgcg

SEQ ID NO: 119959 - RNA, 19 nt, Artificial Sequence
  Synthetic
cacagacggggaguccgcg

SEQ ID NO: 119960 - RNA, 20 nt, Artificial Sequence
  Synthetic
gcacagacggggaguccgcg

SEQ ID NO: 119961 - RNA, 21 nt, Artificial Sequence
  Synthetic
ggcacagacggggaguccgcg

SEQ ID NO: 119962 - RNA, 22 nt, Artificial Sequence
  Synthetic
aggcacagacggggaguccgcg

SEQ ID NO: 119963 - RNA, 23 nt, Artificial Sequence
  Synthetic
aaggcacagacggggaguccgcg

SEQ ID NO: 119964 - RNA, 24 nt, Artificial Sequence
  Synthetic
gaaggcacagacggggaguccgcg

SEQ ID NO: 119965 - RNA, 18 nt, Artificial Sequence
  Synthetic
accuucgucugcgaggcg

SEQ ID NO: 119966 - RNA, 19 nt, Artificial Sequence
  Synthetic
gaccuucgucugcgaggcg

SEQ ID NO: 119967 - RNA, 20 nt, Artificial Sequence
  Synthetic
agaccuucgucugcgaggcg

SEQ ID NO: 119968 - RNA, 18 nt, Artificial Sequence
  Synthetic
aucuucugcgacgcggcg

SEQ ID NO: 119969 - RNA, 19 nt, Artificial Sequence
  Synthetic
gaucuucugcgacgcggcg

SEQ ID NO: 119970 - RNA, 20 nt, Artificial Sequence
  Synthetic
agaucuucugcgacgcggcg

SEQ ID NO: 119971 - RNA, 18 nt, Artificial Sequence
  Synthetic
  misc_feature (4)..(4): n is a, c, g, or u
cagncggagaagcgggcg

SEQ ID NO: 119972 - RNA, 19 nt, Artificial Sequence
  Synthetic
  misc_feature (1)..(1): n is a, c, g, or u
  misc_feature (5)..(5): n is a, c, g, or u
ncagncggagaagcgggcg

SEQ ID NO: 119973 - RNA, 20 nt, Artificial Sequence
  Synthetic
  misc_feature (1)..(2): n is a, c, g, or u
  misc_feature (6)..(6): n is a, c, g, or u
nncagncggagaagcgggcg

SEQ ID NO: 119974 - RNA, 21 nt, Artificial Sequence
  Synthetic
  misc_feature (2)..(3): n is a, c, g, or u
  misc_feature (7)..(7): n is a, c, g, or u
cnncagncggagaagcgggcg

SEQ ID NO: 119975 - RNA, 22 nt, Artificial Sequence
  Synthetic
  misc_feature (3)..(4): n is a, c, g, or u
  misc_feature (8)..(8): n is a, c, g, or u
acnncagncggagaagcgggcg

SEQ ID NO: 119976 - RNA, 23 nt, Artificial Sequence
  Synthetic
  misc_feature (4)..(5): n is a, c, g, or u
  misc_feature (9)..(9): n is a, c, g, or u
uacnncagncggagaagcgggcg

SEQ ID NO: 119977 - RNA, 24 nt, Artificial Sequence
  Synthetic
  misc_feature (5)..(6): n is a, c, g, or u
  misc_feature (10)..(10): n is a, c, g, or u
guacnncagncggagaagcgggcg

SEQ ID NO: 119978 - RNA, 18 nt, Artificial Sequence
  Synthetic
aggccuuguaaguuggcg

SEQ ID NO: 119979 - RNA, 19 nt, Artificial Sequence
  Synthetic
aaggccuuguaaguuggcg

SEQ ID NO: 119980 - RNA, 20 nt, Artificial Sequence
  Synthetic
aaaggccuuguaaguuggcg

SEQ ID NO: 119981 - RNA, 21 nt, Artificial Sequence
  Synthetic
gaaaggccuuguaaguuggcg

SEQ ID NO: 119982 - RNA, 22 nt, Artificial Sequence
  Synthetic
agaaaggccuuguaaguuggcg

SEQ ID NO: 119983 - RNA, 23 nt, Artificial Sequence
  Synthetic
uagaaaggccuuguaaguuggcg

SEQ ID NO: 119984 - RNA, 24 nt, Artificial Sequence
  Synthetic
uuagaaaggccuuguaaguuggcg

SEQ ID NO: 119985 - RNA, 18 nt, Artificial Sequence
  Synthetic
acucccaccuuguuggcg

SEQ ID NO: 119986 - RNA, 19 nt, Artificial Sequence
  Synthetic
cacucccaccuuguuggcg

SEQ ID NO: 119987 - RNA, 20 nt, Artificial Sequence
  Synthetic
ccacucccaccuuguuggcg

SEQ ID NO: 119988 - RNA, 21 nt, Artificial Sequence
  Synthetic
cccacucccaccuuguuggcg

SEQ ID NO: 119989 - RNA, 22 nt, Artificial Sequence
  Synthetic
ucccacucccaccuuguuggcg

SEQ ID NO: 119990 - RNA, 23 nt, Artificial Sequence
  Synthetic
cucccacucccaccuuguuggcg

SEQ ID NO: 119991 - RNA, 24 nt, Artificial Sequence
  Synthetic
gcucccacucccaccuuguuggcg

SEQ ID NO: 119992 - RNA, 18 nt, Artificial Sequence
  Synthetic
  misc_feature (1)..(1): n is a, c, g, or u
  misc_feature (4)..(4): n is a, c, g, or u
  misc_feature (12)..(12): n is a, c, g, or u
ngcnccagaccngcugcg

SEQ ID NO: 119993 - RNA, 19 nt, Artificial Sequence
  Synthetic
  misc_feature (2)..(2): n is a, c, g, or u
  misc_feature (5)..(5): n is a, c, g, or u
  misc_feature (13)..(13): n is a, c, g, or u
ungcnccagaccngcugcg

SEQ ID NO: 119994 - RNA, 20 nt, Artificial Sequence
  Synthetic
  misc_feature (3)..(3): n is a, c, g, or u
  misc_feature (6)..(6): n is a, c, g, or u
  misc_feature (14)..(14): n is a, c, g, or u
uungcnccagaccngcugcg

SEQ ID NO: 119995 - RNA, 21 nt, Artificial Sequence
  Synthetic
  misc_feature (4)..(4): n is a, c, g, or u
  misc_feature (7)..(7): n is a, c, g, or u
  misc_feature (15)..(15): n is a, c, g, or u
uuungcnccagaccngcugcg

SEQ ID NO: 119996 - RNA, 22 nt, Artificial Sequence
  Synthetic
  misc_feature (5)..(5): n is a, c, g, or u
  misc_feature (8)..(8): n is a, c, g, or u
  misc_feature (16)..(16): n is a, c, g, or u
guuungcnccagaccngcugcg

SEQ ID NO: 119997 - RNA, 23 nt, Artificial Sequence
  Synthetic
  misc_feature (6)..(6): n is a, c, g, or u
  misc_feature (9)..(9): n is a, c, g, or u
  misc_feature (17)..(17): n is a, c, g, or u
aguuungcnccagaccngcugcg

SEQ ID NO: 119998 - RNA, 24 nt, Artificial Sequence
  Synthetic
  misc_feature (7)..(7): n is a, c, g, or u
  misc_feature (10)..(10): n is a, c, g, or u
  misc_feature (18)..(18): n is a, c, g, or u
gaguuungcnccagaccngcugcg

SEQ ID NO: 119999 - RNA, 18 nt, Artificial Sequence
  Synthetic
  misc_feature (11)..(12): n is a, c, g, or u
  misc_feature (16)..(16): n is a, c, g, or u
cggucgguacnncagncg

SEQ ID NO: 120000 - RNA, 19 nt, Artificial Sequence
  Synthetic
  misc_feature (12)..(13): n is a, c, g, or u
  misc_feature (17)..(17): n is a, c, g, or u
ucggucgguacnncagncg

SEQ ID NO: 120001 - RNA, 20 nt, Artificial Sequence
  Synthetic
  misc_feature (13)..(14): n is a, c, g, or u
  misc_feature (18)..(18): n is a, c, g, or u
gucggucgguacnncagncg

SEQ ID NO: 120002 - RNA, 21 nt, Artificial Sequence
  Synthetic
  misc_feature (14)..(15): n is a, c, g, or u
  misc_feature (19)..(19): n is a, c, g, or u
ggucggucgguacnncagncg

SEQ ID NO: 120003 - RNA, 22 nt, Artificial Sequence
  Synthetic
  misc_feature (15)..(16): n is a, c, g, or u
  misc_feature (20)..(20): n is a, c, g, or u
uggucggucgguacnncagncg

SEQ ID NO: 120004 - RNA, 23 nt, Artificial Sequence
  Synthetic
  misc_feature (16)..(17): n is a, c, g, or u
  misc_feature (21)..(21): n is a, c, g, or u
guggucggucgguacnncagncg

SEQ ID NO: 120005 - RNA, 24 nt, Artificial Sequence
  Synthetic
  misc_feature (17)..(18): n is a, c, g, or u
  misc_feature (22)..(22): n is a, c, g, or u
cguggucggucgguacnncagncg

SEQ ID NO: 120006 - RNA, 18 nt, Artificial Sequence
  Synthetic
guuccgcaguauggaucg

SEQ ID NO: 120007 - RNA, 19 nt, Artificial Sequence
  Synthetic
aguuccgcaguauggaucg

SEQ ID NO: 120008 - RNA, 20 nt, Artificial Sequence
  Synthetic
gaguuccgcaguauggaucg

SEQ ID NO: 120009 - RNA, 21 nt, Artificial Sequence
  Synthetic
ggaguuccgcaguauggaucg

SEQ ID NO: 120010 - RNA, 22 nt, Artificial Sequence
  Synthetic
aggaguuccgcaguauggaucg

SEQ ID NO: 120011 - RNA, 23 nt, Artificial Sequence
  Synthetic
uaggaguuccgcaguauggaucg

SEQ ID NO: 120012 - RNA, 24 nt, Artificial Sequence
  Synthetic
cuaggaguuccgcaguauggaucg

SEQ ID NO: 120013 - RNA, 18 nt, Artificial Sequence
  Synthetic
ggguccaacugaugaucg

SEQ ID NO: 120014 - RNA, 19 nt, Artificial Sequence
  Synthetic
aggguccaacugaugaucg

SEQ ID NO: 120015 - RNA, 20 nt, Artificial Sequence
  Synthetic
caggguccaacugaugaucg

SEQ ID NO: 120016 - RNA, 21 nt, Artificial Sequence
  Synthetic
gcaggguccaacugaugaucg

SEQ ID NO: 120017 - RNA, 22 nt, Artificial Sequence
  Synthetic
ugcaggguccaacugaugaucg

SEQ ID NO: 120018 - RNA, 23 nt, Artificial Sequence
  Synthetic
augcaggguccaacugaugaucg

SEQ ID NO: 120019 - RNA, 24 nt, Artificial Sequence
  Synthetic
aaugcaggguccaacugaugaucg

SEQ ID NO: 120020 - RNA, 18 nt, Artificial Sequence
  Synthetic
  misc_feature (10)..(10): n is a, c, g, or u
ggugucgagnagaucucg

SEQ ID NO: 120021 - RNA, 19 nt, Artificial Sequence
  Synthetic
  misc_feature (11)..(11): n is a, c, g, or u
cggugucgagnagaucucg

SEQ ID NO: 120022 - RNA, 20 nt, Artificial Sequence
  Synthetic
  misc_feature (12)..(12): n is a, c, g, or u
gcggugucgagnagaucucg

SEQ ID NO: 120023 - RNA, 21 nt, Artificial Sequence
  Synthetic
  misc_feature (13)..(13): n is a, c, g, or u
ggcggugucgagnagaucucg

SEQ ID NO: 120024 - RNA, 22 nt, Artificial Sequence
  Synthetic
  misc_feature (14)..(14): n is a, c, g, or u
aggcggugucgagnagaucucg

SEQ ID NO: 120025 - RNA, 23 nt, Artificial Sequence
  Synthetic
  misc_feature (15)..(15): n is a, c, g, or u
gaggcggugucgagnagaucucg

SEQ ID NO: 120026 - RNA, 24 nt, Artificial Sequence
  Synthetic
  misc_feature (16)..(16): n is a, c, g, or u
agaggcggugucgagnagaucucg

SEQ ID NO: 120027 - RNA, 18 nt, Artificial Sequence
  Synthetic
agagcagaggcggugucg

SEQ ID NO: 120028 - RNA, 19 nt, Artificial Sequence
  Synthetic
cagagcagaggcggugucg

SEQ ID NO: 120029 - RNA, 20 nt, Artificial Sequence
  Synthetic
acagagcagaggcggugucg

SEQ ID NO: 120030 - RNA, 21 nt, Artificial Sequence
  Synthetic
uacagagcagaggcggugucg

SEQ ID NO: 120031 - RNA, 22 nt, Artificial Sequence
  Synthetic
auacagagcagaggcggugucg

SEQ ID NO: 120032 - RNA, 23 nt, Artificial Sequence
  Synthetic
gauacagagcagaggcggugucg

SEQ ID NO: 120033 - RNA, 24 nt, Artificial Sequence
  Synthetic
cgauacagagcagaggcggugucg

SEQ ID NO: 120034 - RNA, 18 nt, Artificial Sequence
  Synthetic
  misc_feature (15)..(15): n is a, c, g, or u
aggggaccugccucnucg

SEQ ID NO: 120035 - RNA, 19 nt, Artificial Sequence
  Synthetic
  misc_feature (16)..(16): n is a, c, g, or u
uaggggaccugccucnucg

SEQ ID NO: 120036 - RNA, 20 nt, Artificial Sequence
  Synthetic
  misc_feature (17)..(17): n is a, c, g, or u
cuaggggaccugccucnucg

SEQ ID NO: 120037 - RNA, 21 nt, Artificial Sequence
  Synthetic
  misc_feature (18)..(18): n is a, c, g, or u
ucuaggggaccugccucnucg

SEQ ID NO: 120038 - RNA, 22 nt, Artificial Sequence
  Synthetic
  misc_feature (19)..(19): n is a, c, g, or u
uucuaggggaccugccucnucg

SEQ ID NO: 120039 - RNA, 23 nt, Artificial Sequence
  Synthetic
  misc_feature (20)..(20): n is a, c, g, or u
cuucuaggggaccugccucnucg

SEQ ID NO: 120040 - RNA, 24 nt, Artificial Sequence
  Synthetic
  misc_feature (21)..(21): n is a, c, g, or u
ucuucuaggggaccugccucnucg

SEQ ID NO: 120041 - RNA, 18 nt, Artificial Sequence
  Synthetic
caggguccccagucuucg

SEQ ID NO: 120042 - RNA, 19 nt, Artificial Sequence
  Synthetic
acaggguccccagucuucg

SEQ ID NO: 120043 - RNA, 20 nt, Artificial Sequence
  Synthetic
uacaggguccccagucuucg

SEQ ID NO: 120044 - RNA, 18 nt, Artificial Sequence
  Synthetic
cgagcaacgggguaaagg

SEQ ID NO: 120045 - RNA, 19 nt, Artificial Sequence
  Synthetic
ccgagcaacgggguaaagg

SEQ ID NO: 120046 - RNA, 20 nt, Artificial Sequence
  Synthetic
gccgagcaacgggguaaagg

SEQ ID NO: 120047 - RNA, 21 nt, Artificial Sequence
  Synthetic
ugccgagcaacgggguaaagg

SEQ ID NO: 120048 - RNA, 22 nt, Artificial Sequence
  Synthetic
uugccgagcaacgggguaaagg

SEQ ID NO: 120049 - RNA, 23 nt, Artificial Sequence
  Synthetic
guugccgagcaacgggguaaagg

SEQ ID NO: 120050 - RNA, 24 nt, Artificial Sequence
  Synthetic
cguugccgagcaacgggguaaagg

SEQ ID NO: 120051 - RNA, 18 nt, Artificial Sequence
  Synthetic
  misc_feature (4)..(4): n is a, c, g, or u
cccnaaagccacccaagg

SEQ ID NO: 120052 - RNA, 19 nt, Artificial Sequence
  Synthetic
  misc_feature (5)..(5): n is a, c, g, or u
gcccnaaagccacccaagg

SEQ ID NO: 120053 - RNA, 20 nt, Artificial Sequence
  Synthetic
  misc_feature (6)..(6): n is a, c, g, or u
ugcccnaaagccacccaagg

SEQ ID NO: 120054 - RNA, 21 nt, Artificial Sequence
  Synthetic
  misc_feature (7)..(7): n is a, c, g, or u
augcccnaaagccacccaagg

SEQ ID NO: 120055 - RNA, 22 nt, Artificial Sequence
  Synthetic
  misc_feature (8)..(8): n is a, c, g, or u
caugcccnaaagccacccaagg

SEQ ID NO: 120056 - RNA, 23 nt, Artificial Sequence
  Synthetic
  misc_feature (9)..(9): n is a, c, g, or u
ccaugcccnaaagccacccaagg

SEQ ID NO: 120057 - RNA, 24 nt, Artificial Sequence
  Synthetic
  misc_feature (10)..(10): n is a, c, g, or u
uccaugcccnaaagccacccaagg

SEQ ID NO: 120058 - RNA, 18 nt, Artificial Sequence
  Synthetic
aggaaagaagucagaagg

SEQ ID NO: 120059 - RNA, 19 nt, Artificial Sequence
  Synthetic
aaggaaagaagucagaagg

SEQ ID NO: 120060 - RNA, 20 nt, Artificial Sequence
  Synthetic
gaaggaaagaagucagaagg

SEQ ID NO: 120061 - RNA, 21 nt, Artificial Sequence
  Synthetic
agaaggaaagaagucagaagg

SEQ ID NO: 120062 - RNA, 22 nt, Artificial Sequence
  Synthetic
  misc_feature (1)..(1): n is a, c, g, or u
nagaaggaaagaagucagaagg

SEQ ID NO: 120063 - RNA, 23 nt, Artificial Sequence
  Synthetic
  misc_feature (2)..(2): n is a, c, g, or u
anagaaggaaagaagucagaagg

SEQ ID NO: 120064 - RNA, 24 nt, Artificial Sequence
  Synthetic
  misc_feature (3)..(3): n is a, c, g, or u
aanagaaggaaagaagucagaagg

SEQ ID NO: 120065 - RNA, 18 nt, Artificial Sequence
  Synthetic
  misc_feature (7)..(7): n is a, c, g, or u
guccggnagaugagaagg

SEQ ID NO: 120066 - RNA, 19 nt, Artificial Sequence
  Synthetic
  misc_feature (8)..(8): n is a, c, g, or u
gguccggnagaugagaagg

SEQ ID NO: 120067 - RNA, 20 nt, Artificial Sequence
  Synthetic
  misc_feature (9)..(9): n is a, c, g, or u
cgguccggnagaugagaagg

SEQ ID NO: 120068 - RNA, 21 nt, Artificial Sequence
  Synthetic
  misc_feature (10)..(10): n is a, c, g, or u
acgguccggnagaugagaagg

SEQ ID NO: 120069 - RNA, 22 nt, Artificial Sequence
  Synthetic
  misc_feature (11)..(11): n is a, c, g, or u
cacgguccggnagaugagaagg

SEQ ID NO: 120070 - RNA, 23 nt, Artificial Sequence
  Synthetic
  misc_feature (12)..(12): n is a, c, g, or u
acacgguccggnagaugagaagg

SEQ ID NO: 120071 - RNA, 24 nt, Artificial Sequence
  Synthetic
  misc_feature (13)..(13): n is a, c, g, or u
cacacgguccggnagaugagaagg

SEQ ID NO: 120072 - RNA, 18 nt, Artificial Sequence
  Synthetic
  misc_feature (1)..(1): n is a, c, g, or u
  misc_feature (12)..(12): n is a, c, g, or u
nagaucucgaanagaagg

SEQ ID NO: 120073 - RNA, 19 nt, Artificial Sequence
  Synthetic
  misc_feature (2)..(2): n is a, c, g, or u
  misc_feature (13)..(13): n is a, c, g, or u
gnagaucucgaanagaagg

SEQ ID NO: 120074 - RNA, 20 nt, Artificial Sequence
  Synthetic
  misc_feature (3)..(3): n is a, c, g, or u
  misc_feature (14)..(14): n is a, c, g, or u
agnagaucucgaanagaagg

SEQ ID NO: 120075 - RNA, 21 nt, Artificial Sequence
  Synthetic
  misc_feature (4)..(4): n is a, c, g, or u
  misc_feature (15)..(15): n is a, c, g, or u
gagnagaucucgaanagaagg

SEQ ID NO: 120076 - RNA, 22 nt, Artificial Sequence
  Synthetic
  misc_feature (5)..(5): n is a, c, g, or u
  misc_feature (16)..(16): n is a, c, g, or u
cgagnagaucucgaanagaagg

SEQ ID NO: 120077 - RNA, 23 nt, Artificial Sequence
  Synthetic
  misc_feature (6)..(6): n is a, c, g, or u
  misc_feature (17)..(17): n is a, c, g, or u
ucgagnagaucucgaanagaagg

SEQ ID NO: 120078 - RNA, 24 nt, Artificial Sequence
  Synthetic
  misc_feature (7)..(7): n is a, c, g, or u
  misc_feature (18)..(18): n is a, c, g, or u
gucgagnagaucucgaanagaagg

SEQ ID NO: 120079 - RNA, 18 nt, Artificial Sequence
  Synthetic
ccgauugguggaggcagg

SEQ ID NO: 120080 - RNA, 19 nt, Artificial Sequence
  Synthetic
gccgauugguggaggcagg

SEQ ID NO: 120081 - RNA, 20 nt, Artificial Sequence
  Synthetic
ugccgauugguggaggcagg

SEQ ID NO: 120082 - RNA, 21 nt, Artificial Sequence
  Synthetic
cugccgauugguggaggcagg

SEQ ID NO: 120083 - RNA, 22 nt, Artificial Sequence
  Synthetic
acugccgauugguggaggcagg

SEQ ID NO: 120084 - RNA, 23 nt, Artificial Sequence
  Synthetic
gacugccgauugguggaggcagg

SEQ ID NO: 120085 - RNA, 24 nt, Artificial Sequence
  Synthetic
ugacugccgauugguggaggcagg

SEQ ID NO: 120086 - RNA, 18 nt, Artificial Sequence
  Synthetic
cugcaaaugaaugucagg

SEQ ID NO: 120087 - RNA, 19 nt, Artificial Sequence
  Synthetic
ccugcaaaugaaugucagg

SEQ ID NO: 120088 - RNA, 20 nt, Artificial Sequence
  Synthetic
uccugcaaaugaaugucagg

SEQ ID NO: 120089 - RNA, 21 nt, Artificial Sequence
  Synthetic
cuccugcaaaugaaugucagg

SEQ ID NO: 120090 - RNA, 22 nt, Artificial Sequence
  Synthetic
ccuccugcaaaugaaugucagg

SEQ ID NO: 120091 - RNA, 23 nt, Artificial Sequence
  Synthetic
uccuccugcaaaugaaugucagg

SEQ ID NO: 120092 - RNA, 24 nt, Artificial Sequence
  Synthetic
guccuccugcaaaugaaugucagg

SEQ ID NO: 120093 - RNA, 18 nt, Artificial Sequence
  Synthetic
gagaugauuaggcagagg

SEQ ID NO: 120094 - RNA, 19 nt, Artificial Sequence
  Synthetic
  misc_feature (1)..(1): n is a, c, g, or u
ngagaugauuaggcagagg

SEQ ID NO: 120095 - RNA, 20 nt, Artificial Sequence
  Synthetic
  misc_feature (2)..(2): n is a, c, g, or u
angagaugauuaggcagagg

SEQ ID NO: 120096 - RNA, 21 nt, Artificial Sequence
  Synthetic
  misc_feature (3)..(3): n is a, c, g, or u
cangagaugauuaggcagagg

SEQ ID NO: 120097 - RNA, 22 nt, Artificial Sequence
  Synthetic
  misc_feature (4)..(4): n is a, c, g, or u
acangagaugauuaggcagagg

SEQ ID NO: 120098 - RNA, 23 nt, Artificial Sequence
  Synthetic
  misc_feature (5)..(5): n is a, c, g, or u
aacangagaugauuaggcagagg

SEQ ID NO: 120099 - RNA, 24 nt, Artificial Sequence
  Synthetic
  misc_feature (6)..(6): n is a, c, g, or u
gaacangagaugauuaggcagagg

SEQ ID NO: 120100 - RNA, 18 nt, Artificial Sequence
  Synthetic
ccaugcgacgugcagagg

SEQ ID NO: 120101 - RNA, 19 nt, Artificial Sequence
  Synthetic
uccaugcgacgugcagagg

SEQ ID NO: 120102 - RNA, 20 nt, Artificial Sequence
  Synthetic
cuccaugcgacgugcagagg

SEQ ID NO: 120103 - RNA, 21 nt, Artificial Sequence
  Synthetic
ucuccaugcgacgugcagagg

SEQ ID NO: 120104 - RNA, 22 nt, Artificial Sequence
  Synthetic
gucuccaugcgacgugcagagg

SEQ ID NO: 120105 - RNA, 23 nt, Artificial Sequence
  Synthetic
ggucuccaugcgacgugcagagg

SEQ ID NO: 120106 - RNA, 24 nt, Artificial Sequence
  Synthetic
uggucuccaugcgacgugcagagg

SEQ ID NO: 120107 - RNA, 18 nt, Artificial Sequence
  Synthetic
ugauccuggaauuagagg

SEQ ID NO: 120108 - RNA, 19 nt, Artificial Sequence
  Synthetic
augauccuggaauuagagg

SEQ ID NO: 120109 - RNA, 20 nt, Artificial Sequence
  Synthetic
gaugauccuggaauuagagg

SEQ ID NO: 120110 - RNA, 21 nt, Artificial Sequence
  Synthetic
ugaugauccuggaauuagagg

SEQ ID NO: 120111 - RNA, 22 nt, Artificial Sequence
  Synthetic
uugaugauccuggaauuagagg

SEQ ID NO: 120112 - RNA, 23 nt, Artificial Sequence
  Synthetic
guugaugauccuggaauuagagg

SEQ ID NO: 120113 - RNA, 24 nt, Artificial Sequence
  Synthetic
  misc_feature (1)..(1): n is a, c, g, or u
nguugaugauccuggaauuagagg

SEQ ID NO: 120114 - RNA, 18 nt, Artificial Sequence
  Synthetic
  misc_feature (10)..(10): n is a, c, g, or u
augagugucncuuagagg

SEQ ID NO: 120115 - RNA, 19 nt, Artificial Sequence
  Synthetic
  misc_feature (11)..(11): n is a, c, g, or u
gaugagugucncuuagagg

SEQ ID NO: 120116 - RNA, 20 nt, Artificial Sequence
  Synthetic
  misc_feature (12)..(12): n is a, c, g, or u
ggaugagugucncuuagagg

SEQ ID NO: 120117 - RNA, 21 nt, Artificial Sequence
  Synthetic
  misc_feature (13)..(13): n is a, c, g, or u
aggaugagugucncuuagagg

SEQ ID NO: 120118 - RNA, 22 nt, Artificial Sequence
  Synthetic
  misc_feature (14)..(14): n is a, c, g, or u
gaggaugagugucncuuagagg

SEQ ID NO: 120119 - RNA, 23 nt, Artificial Sequence
  Synthetic
  misc_feature (15)..(15): n is a, c, g, or u
ugaggaugagugucncuuagagg

SEQ ID NO: 120120 - RNA, 24 nt, Artificial Sequence
  Synthetic
  misc_feature (16)..(16): n is a, c, g, or u
cugaggaugagugucncuuagagg

SEQ ID NO: 120121 - RNA, 18 nt, Artificial Sequence
  Synthetic
agaccuucgucugcgagg

SEQ ID NO: 120122 - RNA, 19 nt, Artificial Sequence
  Synthetic
gagaccuucgucugcgagg

SEQ ID NO: 120123 - RNA, 20 nt, Artificial Sequence
  Synthetic
ugagaccuucgucugcgagg

SEQ ID NO: 120124 - RNA, 18 nt, Artificial Sequence
  Synthetic
ccccaugccuuuucgagg

SEQ ID NO: 120125 - RNA, 19 nt, Artificial Sequence
  Synthetic
uccccaugccuuuucgagg

SEQ ID NO: 120126 - RNA, 20 nt, Artificial Sequence
  Synthetic
guccccaugccuuuucgagg

SEQ ID NO: 120127 - RNA, 21 nt, Artificial Sequence
  Synthetic
uguccccaugccuuuucgagg

SEQ ID NO: 120128 - RNA, 22 nt, Artificial Sequence
  Synthetic
uuguccccaugccuuuucgagg

SEQ ID NO: 120129 - RNA, 23 nt, Artificial Sequence
  Synthetic
uuuguccccaugccuuuucgagg

SEQ ID NO: 120130 - RNA, 24 nt, Artificial Sequence
  Synthetic
auuuguccccaugccuuuucgagg

SEQ ID NO: 120131 - RNA, 18 nt, Artificial Sequence
  Synthetic
auugguggaggcaggagg

SEQ ID NO: 120132 - RNA, 19 nt, Artificial Sequence
  Synthetic
gauugguggaggcaggagg

SEQ ID NO: 120133 - RNA, 20 nt, Artificial Sequence
  Synthetic
cgauugguggaggcaggagg

SEQ ID NO: 120134 - RNA, 21 nt, Artificial Sequence
  Synthetic
ccgauugguggaggcaggagg

SEQ ID NO: 120135 - RNA, 22 nt, Artificial Sequence
  Synthetic
gccgauugguggaggcaggagg

SEQ ID NO: 120136 - RNA, 23 nt, Artificial Sequence
  Synthetic
ugccgauugguggaggcaggagg

SEQ ID NO: 120137 - RNA, 24 nt, Artificial Sequence
  Synthetic
cugccgauugguggaggcaggagg

SEQ ID NO: 120138 - RNA, 18 nt, Artificial Sequence
  Synthetic
cagucccccauggggagg

SEQ ID NO: 120139 - RNA, 19 nt, Artificial Sequence
  Synthetic
acagucccccauggggagg

SEQ ID NO: 120140 - RNA, 20 nt, Artificial Sequence
  Synthetic
aacagucccccauggggagg

SEQ ID NO: 120141 - RNA, 21 nt, Artificial Sequence
  Synthetic
caacagucccccauggggagg

SEQ ID NO: 120142 - RNA, 22 nt, Artificial Sequence
  Synthetic
ccaacagucccccauggggagg

SEQ ID NO: 120143 - RNA, 23 nt, Artificial Sequence
  Synthetic
cccaacagucccccauggggagg

SEQ ID NO: 120144 - RNA, 24 nt, Artificial Sequence
  Synthetic
ccccaacagucccccauggggagg

SEQ ID NO: 120145 - RNA, 18 nt, Artificial Sequence
  Synthetic
acugccgauugguggagg

SEQ ID NO: 120146 - RNA, 19 nt, Artificial Sequence
  Synthetic
gacugccgauugguggagg

SEQ ID NO: 120147 - RNA, 20 nt, Artificial Sequence
  Synthetic
ugacugccgauugguggagg

SEQ ID NO: 120148 - RNA, 21 nt, Artificial Sequence
  Synthetic
cugacugccgauugguggagg

SEQ ID NO: 120149 - RNA, 22 nt, Artificial Sequence
  Synthetic
ccugacugccgauugguggagg

SEQ ID NO: 120150 - RNA, 23 nt, Artificial Sequence
  Synthetic
uccugacugccgauugguggagg

SEQ ID NO: 120151 - RNA, 24 nt, Artificial Sequence
  Synthetic
uuccugacugccgauugguggagg

SEQ ID NO: 120152 - RNA, 18 nt, Artificial Sequence
  Synthetic
caaggcacagcuuggagg

SEQ ID NO: 120153 - RNA, 19 nt, Artificial Sequence
  Synthetic
ccaaggcacagcuuggagg

SEQ ID NO: 120154 - RNA, 20 nt, Artificial Sequence
  Synthetic
cccaaggcacagcuuggagg

SEQ ID NO: 120155 - RNA, 21 nt, Artificial Sequence
  Synthetic
acccaaggcacagcuuggagg

SEQ ID NO: 120156 - RNA, 22 nt, Artificial Sequence
  Synthetic
cacccaaggcacagcuuggagg

SEQ ID NO: 120157 - RNA, 23 nt, Artificial Sequence
  Synthetic
ccacccaaggcacagcuuggagg

SEQ ID NO: 120158 - RNA, 24 nt, Artificial Sequence
  Synthetic
gccacccaaggcacagcuuggagg

SEQ ID NO: 120159 - RNA, 18 nt, Artificial Sequence
  Synthetic
accaacaagaagaugagg

SEQ ID NO: 120160 - RNA, 19 nt, Artificial Sequence
  Synthetic
aaccaacaagaagaugagg

SEQ ID NO: 120161 - RNA, 20 nt, Artificial Sequence
  Synthetic
gaaccaacaagaagaugagg

SEQ ID NO: 120162 - RNA, 21 nt, Artificial Sequence
  Synthetic
agaaccaacaagaagaugagg

SEQ ID NO: 120163 - RNA, 22 nt, Artificial Sequence
  Synthetic
aagaaccaacaagaagaugagg

SEQ ID NO: 120164 - RNA, 23 nt, Artificial Sequence
  Synthetic
gaagaaccaacaagaagaugagg

SEQ ID NO: 120165 - RNA, 24 nt, Artificial Sequence
  Synthetic
agaagaaccaacaagaagaugagg

SEQ ID NO: 120166 - RNA, 18 nt, Artificial Sequence
  Synthetic
  misc_feature (13)..(13): n is a, c, g, or u
  misc_feature (15)..(15): n is a, c, g, or u
aggaguuugccanunagg

SEQ ID NO: 120167 - RNA, 19 nt, Artificial Sequence
  Synthetic
  misc_feature (14)..(14): n is a, c, g, or u
  misc_feature (16)..(16): n is a, c, g, or u
aaggaguuugccanunagg

SEQ ID NO: 120168 - RNA, 20 nt, Artificial Sequence
  Synthetic
  misc_feature (15)..(15): n is a, c, g, or u
  misc_feature (17)..(17): n is a, c, g, or u
gaaggaguuugccanunagg

SEQ ID NO: 120169 - RNA, 21 nt, Artificial Sequence
  Synthetic
  misc_feature (16)..(16): n is a, c, g, or u
  misc_feature (18)..(18): n is a, c, g, or u
agaaggaguuugccanunagg

SEQ ID NO: 120170 - RNA, 22 nt, Artificial Sequence
  Synthetic
  misc_feature (17)..(17): n is a, c, g, or u
  misc_feature (19)..(19): n is a, c, g, or u
aagaaggaguuugccanunagg

SEQ ID NO: 120171 - RNA, 23 nt, Artificial Sequence
  Synthetic
  misc_feature (18)..(18): n is a, c, g, or u
  misc_feature (20)..(20): n is a, c, g, or u
aaagaaggaguuugccanunagg

SEQ ID NO: 120172 - RNA, 24 nt, Artificial Sequence
  Synthetic
  misc_feature (19)..(19): n is a, c, g, or u
  misc_feature (21)..(21): n is a, c, g, or u
aaaagaaggaguuugccanunagg

SEQ ID NO: 120173 - RNA, 18 nt, Artificial Sequence
  Synthetic
  misc_feature (6)..(6): n is a, c, g, or u
gaacangagaugauuagg

SEQ ID NO: 120174 - RNA, 19 nt, Artificial Sequence
  Synthetic
  misc_feature (7)..(7): n is a, c, g, or u
ugaacangagaugauuagg

SEQ ID NO: 120175 - RNA, 20 nt, Artificial Sequence
  Synthetic
  misc_feature (8)..(8): n is a, c, g, or u
augaacangagaugauuagg

SEQ ID NO: 120176 - RNA, 21 nt, Artificial Sequence
  Synthetic
  misc_feature (9)..(9): n is a, c, g, or u
caugaacangagaugauuagg

SEQ ID NO: 120177 - RNA, 22 nt, Artificial Sequence
  Synthetic
  misc_feature (10)..(10): n is a, c, g, or u
acaugaacangagaugauuagg

SEQ ID NO: 120178 - RNA, 23 nt, Artificial Sequence
  Synthetic
  misc_feature (11)..(11): n is a, c, g, or u
gacaugaacangagaugauuagg

SEQ ID NO: 120179 - RNA, 24 nt, Artificial Sequence
  Synthetic
  misc_feature (12)..(12): n is a, c, g, or u
ggacaugaacangagaugauuagg

SEQ ID NO: 120180 - RNA, 18 nt, Artificial Sequence
  Synthetic
cugagccaagagaaacgg

SEQ ID NO: 120181 - RNA, 19 nt, Artificial Sequence
  Synthetic
acugagccaagagaaacgg

SEQ ID NO: 120182 - RNA, 20 nt, Artificial Sequence
  Synthetic
aacugagccaagagaaacgg

SEQ ID NO: 120183 - RNA, 21 nt, Artificial Sequence
  Synthetic
aaacugagccaagagaaacgg

SEQ ID NO: 120184 - RNA, 22 nt, Artificial Sequence
  Synthetic
uaaacugagccaagagaaacgg

SEQ ID NO: 120185 - RNA, 23 nt, Artificial Sequence
  Synthetic
guaaacugagccaagagaaacgg

SEQ ID NO: 120186 - RNA, 24 nt, Artificial Sequence
  Synthetic
aguaaacugagccaagagaaacgg

SEQ ID NO: 120187 - RNA, 18 nt, Artificial Sequence
  Synthetic
  misc_feature (1)..(1): n is a, c, g, or u
nccguugccgagcaacgg

SEQ ID NO: 120188 - RNA, 19 nt, Artificial Sequence
  Synthetic
  misc_feature (2)..(2): n is a, c, g, or u
gnccguugccgagcaacgg

SEQ ID NO: 120189 - RNA, 20 nt, Artificial Sequence
  Synthetic
  misc_feature (3)..(3): n is a, c, g, or u
agnccguugccgagcaacgg

SEQ ID NO: 120190 - RNA, 21 nt, Artificial Sequence
  Synthetic
  misc_feature (4)..(4): n is a, c, g, or u
cagnccguugccgagcaacgg

SEQ ID NO: 120191 - RNA, 22 nt, Artificial Sequence
  Synthetic
  misc_feature (5)..(5): n is a, c, g, or u
ccagnccguugccgagcaacgg

SEQ ID NO: 120192 - RNA, 23 nt, Artificial Sequence
  Synthetic
  misc_feature (6)..(6): n is a, c, g, or u
accagnccguugccgagcaacgg

SEQ ID NO: 120193 - RNA, 24 nt, Artificial Sequence
  Synthetic
  misc_feature (7)..(7): n is a, c, g, or u
gaccagnccguugccgagcaacgg

SEQ ID NO: 120194 - RNA, 18 nt, Artificial Sequence
  Synthetic
gaagcgaagugcacacgg

SEQ ID NO: 120195 - RNA, 19 nt, Artificial Sequence
  Synthetic
ugaagcgaagugcacacgg

SEQ ID NO: 120196 - RNA, 20 nt, Artificial Sequence
  Synthetic
gugaagcgaagugcacacgg

SEQ ID NO: 120197 - RNA, 21 nt, Artificial Sequence
  Synthetic
ggugaagcgaagugcacacgg

SEQ ID NO: 120198 - RNA, 22 nt, Artificial Sequence
  Synthetic
aggugaagcgaagugcacacgg

SEQ ID NO: 120199 - RNA, 23 nt, Artificial Sequence
  Synthetic
gaggugaagcgaagugcacacgg

SEQ ID NO: 120200 - RNA, 24 nt, Artificial Sequence
  Synthetic
agaggugaagcgaagugcacacgg

SEQ ID NO: 120201 - RNA, 18 nt, Artificial Sequence
  Synthetic
agccccaagcggccccgg

SEQ ID NO: 120202 - RNA, 19 nt, Artificial Sequence
  Synthetic
gagccccaagcggccccgg

SEQ ID NO: 120203 - RNA, 20 nt, Artificial Sequence
  Synthetic
agagccccaagcggccccgg

SEQ ID NO: 120204 - RNA, 21 nt, Artificial Sequence
  Synthetic
uagagccccaagcggccccgg

SEQ ID NO: 120205 - RNA, 22 nt, Artificial Sequence
  Synthetic
guagagccccaagcggccccgg

SEQ ID NO: 120206 - RNA, 23 nt, Artificial Sequence
  Synthetic
gguagagccccaagcggccccgg

SEQ ID NO: 120207 - RNA, 24 nt, Artificial Sequence
  Synthetic
cgguagagccccaagcggccccgg

SEQ ID NO: 120208 - RNA, 18 nt, Artificial Sequence
  Synthetic
ugcgagcaaaacaagcgg

SEQ ID NO: 120209 - RNA, 19 nt, Artificial Sequence
  Synthetic
cugcgagcaaaacaagcgg

SEQ ID NO: 120210 - RNA, 20 nt, Artificial Sequence
  Synthetic
gcugcgagcaaaacaagcgg

SEQ ID NO: 120211 - RNA, 21 nt, Artificial Sequence
  Synthetic
  misc_feature (1)..(1): n is a, c, g, or u
ngcugcgagcaaaacaagcgg

SEQ ID NO: 120212 - RNA, 22 nt, Artificial Sequence
  Synthetic
  misc_feature (2)..(2): n is a, c, g, or u
cngcugcgagcaaaacaagcgg

SEQ ID NO: 120213 - RNA, 23 nt, Artificial Sequence
  Synthetic
  misc_feature (3)..(3): n is a, c, g, or u
ccngcugcgagcaaaacaagcgg

SEQ ID NO: 120214 - RNA, 24 nt, Artificial Sequence
  Synthetic
  misc_feature (4)..(4): n is a, c, g, or u
accngcugcgagcaaaacaagcgg

SEQ ID NO: 120215 - RNA, 18 nt, Artificial Sequence
  Synthetic
gaaaauugguaacagcgg

SEQ ID NO: 120216 - RNA, 19 nt, Artificial Sequence
  Synthetic
agaaaauugguaacagcgg

SEQ ID NO: 120217 - RNA, 20 nt, Artificial Sequence
  Synthetic
aagaaaauugguaacagcgg

SEQ ID NO: 120218 - RNA, 21 nt, Artificial Sequence
  Synthetic
aaagaaaauugguaacagcgg

SEQ ID NO: 120219 - RNA, 22 nt, Artificial Sequence
  Synthetic
aaaagaaaauugguaacagcgg

SEQ ID NO: 120220 - RNA, 23 nt, Artificial Sequence
  Synthetic
caaaagaaaauugguaacagcgg

SEQ ID NO: 120221 - RNA, 24 nt, Artificial Sequence
  Synthetic
acaaaagaaaauugguaacagcgg

SEQ ID NO: 120222 - RNA, 18 nt, Artificial Sequence
  Synthetic
  misc_feature (3)..(3): n is a, c, g, or u
agncggagaagcgggcgg

SEQ ID NO: 120223 - RNA, 19 nt, Artificial Sequence
  Synthetic
  misc_feature (4)..(4): n is a, c, g, or u
cagncggagaagcgggcgg

SEQ ID NO: 120224 - RNA, 20 nt, Artificial Sequence
  Synthetic
  misc_feature (1)..(1): n is a, c, g, or u
  misc_feature (5)..(5): n is a, c, g, or u
ncagncggagaagcgggcgg

SEQ ID NO: 120225 - RNA, 21 nt, Artificial Sequence
  Synthetic
  misc_feature (1)..(2): n is a, c, g, or u
  misc_feature (6)..(6): n is a, c, g, or u
nncagncggagaagcgggcgg

SEQ ID NO: 120226 - RNA, 22 nt, Artificial Sequence
  Synthetic
  misc_feature (2)..(3): n is a, c, g, or u
  misc_feature (7)..(7): n is a, c, g, or u
cnncagncggagaagcgggcgg

SEQ ID NO: 120227 - RNA, 23 nt, Artificial Sequence
  Synthetic
  misc_feature (3)..(4): n is a, c, g, or u
  misc_feature (8)..(8): n is a, c, g, or u
acnncagncggagaagcgggcgg

SEQ ID NO: 120228 - RNA, 24 nt, Artificial Sequence
  Synthetic
  misc_feature (4)..(5): n is a, c, g, or u
  misc_feature (9)..(9): n is a, c, g, or u
uacnncagncggagaagcgggcgg

SEQ ID NO: 120229 - RNA, 18 nt, Artificial Sequence
  Synthetic
  misc_feature (3)..(3): n is a, c, g, or u
  misc_feature (12)..(12): n is a, c, g, or u
aangauguauanuugcgg

SEQ ID NO: 120230 - RNA, 19 nt, Artificial Sequence
  Synthetic
  misc_feature (4)..(4): n is a, c, g, or u
  misc_feature (13)..(13): n is a, c, g, or u
aaangauguauanuugcgg

SEQ ID NO: 120231 - RNA, 20 nt, Artificial Sequence
  Synthetic
  misc_feature (5)..(5): n is a, c, g, or u
  misc_feature (14)..(14): n is a, c, g, or u
gaaangauguauanuugcgg

SEQ ID NO: 120232 - RNA, 21 nt, Artificial Sequence
  Synthetic
  misc_feature (6)..(6): n is a, c, g, or u
  misc_feature (15)..(15): n is a, c, g, or u
ggaaangauguauanuugcgg

SEQ ID NO: 120233 - RNA, 22 nt, Artificial Sequence
  Synthetic
  misc_feature (7)..(7): n is a, c, g, or u
  misc_feature (16)..(16): n is a, c, g, or u
uggaaangauguauanuugcgg

SEQ ID NO: 120234 - RNA, 23 nt, Artificial Sequence
  Synthetic
  misc_feature (8)..(8): n is a, c, g, or u
  misc_feature (17)..(17): n is a, c, g, or u
auggaaangauguauanuugcgg

SEQ ID NO: 120235 - RNA, 24 nt, Artificial Sequence
  Synthetic
  misc_feature (9)..(9): n is a, c, g, or u
  misc_feature (18)..(18): n is a, c, g, or u
cauggaaangauguauanuugcgg

SEQ ID NO: 120236 - RNA, 18 nt, Artificial Sequence
  Synthetic
  misc_feature (10)..(11): n is a, c, g, or u
  misc_feature (15)..(15): n is a, c, g, or u
ggucgguacnncagncgg

SEQ ID NO: 120237 - RNA, 19 nt, Artificial Sequence
  Synthetic
  misc_feature (11)..(12): n is a, c, g, or u
  misc_feature (16)..(16): n is a, c, g, or u
cggucgguacnncagncgg

SEQ ID NO: 120238 - RNA, 20 nt, Artificial Sequence
  Synthetic
  misc_feature (12)..(13): n is a, c, g, or u
  misc_feature (17)..(17): n is a, c, g, or u
ucggucgguacnncagncgg

SEQ ID NO: 120239 - RNA, 21 nt, Artificial Sequence
  Synthetic
  misc_feature (13)..(14): n is a, c, g, or u
  misc_feature (18)..(18): n is a, c, g, or u
gucggucgguacnncagncgg

SEQ ID NO: 120240 - RNA, 22 nt, Artificial Sequence
  Synthetic
  misc_feature (14)..(15): n is a, c, g, or u
  misc_feature (19)..(19): n is a, c, g, or u
ggucggucgguacnncagncgg

SEQ ID NO: 120241 - RNA, 23 nt, Artificial Sequence
  Synthetic
  misc_feature (15)..(16): n is a, c, g, or u
  misc_feature (20)..(20): n is a, c, g, or u
uggucggucgguacnncagncgg

SEQ ID NO: 120242 - RNA, 24 nt, Artificial Sequence
  Synthetic
  misc_feature (16)..(17): n is a, c, g, or u
  misc_feature (21)..(21): n is a, c, g, or u
guggucggucgguacnncagncgg

SEQ ID NO: 120243 - RNA, 18 nt, Artificial Sequence
  Synthetic
uuccgcaguauggaucgg

SEQ ID NO: 120244 - RNA, 19 nt, Artificial Sequence
  Synthetic
guuccgcaguauggaucgg

SEQ ID NO: 120245 - RNA, 20 nt, Artificial Sequence
  Synthetic
aguuccgcaguauggaucgg

SEQ ID NO: 120246 - RNA, 18 nt, Artificial Sequence
  Synthetic
gguccaacugaugaucgg

SEQ ID NO: 120247 - RNA, 19 nt, Artificial Sequence
  Synthetic
ggguccaacugaugaucgg

SEQ ID NO: 120248 - RNA, 20 nt, Artificial Sequence
  Synthetic
aggguccaacugaugaucgg

SEQ ID NO: 120249 - RNA, 21 nt, Artificial Sequence
  Synthetic
caggguccaacugaugaucgg

SEQ ID NO: 120250 - RNA, 22 nt, Artificial Sequence
  Synthetic
gcaggguccaacugaugaucgg

SEQ ID NO: 120251 - RNA, 23 nt, Artificial Sequence
  Synthetic
ugcaggguccaacugaugaucgg

SEQ ID NO: 120252 - RNA, 24 nt, Artificial Sequence
  Synthetic
augcaggguccaacugaugaucgg

SEQ ID NO: 120253 - RNA, 18 nt, Artificial Sequence
  Synthetic
gauguucuccauguucgg

SEQ ID NO: 120254 - RNA, 19 nt, Artificial Sequence
  Synthetic
cgauguucuccauguucgg

SEQ ID NO: 120255 - RNA, 20 nt, Artificial Sequence
  Synthetic
gcgauguucuccauguucgg

SEQ ID NO: 120256 - RNA, 18 nt, Artificial Sequence
  Synthetic
uuggcuuugaaugcaggg

SEQ ID NO: 120257 - RNA, 19 nt, Artificial Sequence
  Synthetic
guuggcuuugaaugcaggg

SEQ ID NO: 120258 - RNA, 20 nt, Artificial Sequence
  Synthetic
aguuggcuuugaaugcaggg

SEQ ID NO: 120259 - RNA, 21 nt, Artificial Sequence
  Synthetic
gaguuggcuuugaaugcaggg

SEQ ID NO: 120260 - RNA, 22 nt, Artificial Sequence
  Synthetic
ugaguuggcuuugaaugcaggg

SEQ ID NO: 120261 - RNA, 23 nt, Artificial Sequence
  Synthetic
cugaguuggcuuugaaugcaggg

SEQ ID NO: 120262 - RNA, 24 nt, Artificial Sequence
  Synthetic
ucugaguuggcuuugaaugcaggg

SEQ ID NO: 120263 - RNA, 18 nt, Artificial Sequence
  Synthetic
  misc_feature (12)..(12): n is a, c, g, or u
cuuuuuguuuunugaggg

SEQ ID NO: 120264 - RNA, 19 nt, Artificial Sequence
  Synthetic
  misc_feature (13)..(13): n is a, c, g, or u
ucuuuuuguuuunugaggg

SEQ ID NO: 120265 - RNA, 20 nt, Artificial Sequence
  Synthetic
  misc_feature (14)..(14): n is a, c, g, or u
aucuuuuuguuuunugaggg

SEQ ID NO: 120266 - RNA, 21 nt, Artificial Sequence
  Synthetic
  misc_feature (15)..(15): n is a, c, g, or u
caucuuuuuguuuunugaggg

SEQ ID NO: 120267 - RNA, 22 nt, Artificial Sequence
  Synthetic
  misc_feature (16)..(16): n is a, c, g, or u
ccaucuuuuuguuuunugaggg

SEQ ID NO: 120268 - RNA, 23 nt, Artificial Sequence
  Synthetic
  misc_feature (17)..(17): n is a, c, g, or u
cccaucuuuuuguuuunugaggg

SEQ ID NO: 120269 - RNA, 24 nt, Artificial Sequence
  Synthetic
  misc_feature (18)..(18): n is a, c, g, or u
ccccaucuuuuuguuuunugaggg

SEQ ID NO: 120270 - RNA, 18 nt, Artificial Sequence
  Synthetic
ccguugccgagcaacggg

SEQ ID NO: 120271 - RNA, 19 nt, Artificial Sequence
  Synthetic
  misc_feature (1)..(1): n is a, c, g, or u
nccguugccgagcaacggg

SEQ ID NO: 120272 - RNA, 20 nt, Artificial Sequence
  Synthetic
  misc_feature (2)..(2): n is a, c, g, or u
gnccguugccgagcaacggg

SEQ ID NO: 120273 - RNA, 21 nt, Artificial Sequence
  Synthetic
  misc_feature (3)..(3): n is a, c, g, or u
agnccguugccgagcaacggg

SEQ ID NO: 120274 - RNA, 22 nt, Artificial Sequence
  Synthetic
  misc_feature (4)..(4): n is a, c, g, or u
cagnccguugccgagcaacggg

SEQ ID NO: 120275 - RNA, 23 nt, Artificial Sequence
  Synthetic
  misc_feature (5)..(5): n is a, c, g, or u
ccagnccguugccgagcaacggg

SEQ ID NO: 120276 - RNA, 24 nt, Artificial Sequence
  Synthetic
  misc_feature (6)..(6): n is a, c, g, or u
accagnccguugccgagcaacggg

SEQ ID NO: 120277 - RNA, 18 nt, Artificial Sequence
  Synthetic
guccaacugaugaucggg

SEQ ID NO: 120278 - RNA, 19 nt, Artificial Sequence
  Synthetic
gguccaacugaugaucggg

SEQ ID NO: 120279 - RNA, 20 nt, Artificial Sequence
  Synthetic
ggguccaacugaugaucggg

SEQ ID NO: 120280 - RNA, 21 nt, Artificial Sequence
  Synthetic
aggguccaacugaugaucggg

SEQ ID NO: 120281 - RNA, 22 nt, Artificial Sequence
  Synthetic
caggguccaacugaugaucggg

SEQ ID NO: 120282 - RNA, 23 nt, Artificial Sequence
  Synthetic
gcaggguccaacugaugaucggg

SEQ ID NO: 120283 - RNA, 24 nt, Artificial Sequence
  Synthetic
ugcaggguccaacugaugaucggg

SEQ ID NO: 120284 - RNA, 18 nt, Artificial Sequence
  Synthetic
cguugccgagcaacgggg

SEQ ID NO: 120285 - RNA, 19 nt, Artificial Sequence
  Synthetic
ccguugccgagcaacgggg

SEQ ID NO: 120286 - RNA, 20 nt, Artificial Sequence
  Synthetic
  misc_feature (1)..(1): n is a, c, g, or u
nccguugccgagcaacgggg

SEQ ID NO: 120287 - RNA, 21 nt, Artificial Sequence
  Synthetic
  misc_feature (2)..(2): n is a, c, g, or u
gnccguugccgagcaacgggg

SEQ ID NO: 120288 - RNA, 22 nt, Artificial Sequence
  Synthetic
  misc_feature (3)..(3): n is a, c, g, or u
agnccguugccgagcaacgggg

SEQ ID NO: 120289 - RNA, 23 nt, Artificial Sequence
  Synthetic
  misc_feature (4)..(4): n is a, c, g, or u
cagnccguugccgagcaacgggg

SEQ ID NO: 120290 - RNA, 24 nt, Artificial Sequence
  Synthetic
  misc_feature (5)..(5): n is a, c, g, or u
ccagnccguugccgagcaacgggg

SEQ ID NO: 120291 - RNA, 18 nt, Artificial Sequence
  Synthetic
gaaagccagacagugggg

SEQ ID NO: 120292 - RNA, 19 nt, Artificial Sequence
  Synthetic
ugaaagccagacagugggg

SEQ ID NO: 120293 - RNA, 20 nt, Artificial Sequence
  Synthetic
cugaaagccagacagugggg

SEQ ID NO: 120294 - RNA, 21 nt, Artificial Sequence
  Synthetic
acugaaagccagacagugggg

SEQ ID NO: 120295 - RNA, 22 nt, Artificial Sequence
  Synthetic
aacugaaagccagacagugggg

SEQ ID NO: 120296 - RNA, 23 nt, Artificial Sequence
  Synthetic
uaacugaaagccagacagugggg

SEQ ID NO: 120297 - RNA, 24 nt, Artificial Sequence
  Synthetic
auaacugaaagccagacagugggg

SEQ ID NO: 120298 - RNA, 18 nt, Artificial Sequence
  Synthetic
  misc_feature (9)..(9): n is a, c, g, or u
aaucccagnggauugggg

SEQ ID NO: 120299 - RNA, 19 nt, Artificial Sequence
  Synthetic
  misc_feature (10)..(10): n is a, c, g, or u
gaaucccagnggauugggg

SEQ ID NO: 120300 - RNA, 20 nt, Artificial Sequence
  Synthetic
  misc_feature (11)..(11): n is a, c, g, or u
agaaucccagnggauugggg

SEQ ID NO: 120301 - RNA, 21 nt, Artificial Sequence
  Synthetic
  misc_feature (12)..(12): n is a, c, g, or u
aagaaucccagnggauugggg

SEQ ID NO: 120302 - RNA, 22 nt, Artificial Sequence
  Synthetic
  misc_feature (1)..(1): n is a, c, g, or u
  misc_feature (13)..(13): n is a, c, g, or u
naagaaucccagnggauugggg

SEQ ID NO: 120303 - RNA, 23 nt, Artificial Sequence
  Synthetic
  misc_feature (2)..(2): n is a, c, g, or u
  misc_feature (14)..(14): n is a, c, g, or u
gnaagaaucccagnggauugggg

SEQ ID NO: 120304 - RNA, 24 nt, Artificial Sequence
  Synthetic
  misc_feature (3)..(3): n is a, c, g, or u
  misc_feature (15)..(15): n is a, c, g, or u
ggnaagaaucccagnggauugggg

SEQ ID NO: 120305 - RNA, 18 nt, Artificial Sequence
  Synthetic
  misc_feature (13)..(13): n is a, c, g, or u
  misc_feature (15)..(15): n is a, c, g, or u
uagagguggagananggg

SEQ ID NO: 120306 - RNA, 19 nt, Artificial Sequence
  Synthetic
  misc_feature (14)..(14): n is a, c, g, or u
  misc_feature (16)..(16): n is a, c, g, or u
uuagagguggagananggg

SEQ ID NO: 120307 - RNA, 20 nt, Artificial Sequence
  Synthetic
  misc_feature (15)..(15): n is a, c, g, or u
  misc_feature (17)..(17): n is a, c, g, or u
cuuagagguggagananggg

SEQ ID NO: 120308 - RNA, 21 nt, Artificial Sequence
  Synthetic
  misc_feature (1)..(1): n is a, c, g, or u
  misc_feature (16)..(16): n is a, c, g, or u
  misc_feature (18)..(18): n is a, c, g, or u
ncuuagagguggagananggg

SEQ ID NO: 120309 - RNA, 22 nt, Artificial Sequence
  Synthetic
  misc_feature (2)..(2): n is a, c, g, or u
  misc_feature (17)..(17): n is a, c, g, or u
  misc_feature (19)..(19): n is a, c, g, or u
cncuuagagguggagananggg

SEQ ID NO: 120310 - RNA, 23 nt, Artificial Sequence
  Synthetic
  misc_feature (3)..(3): n is a, c, g, or u
  misc_feature (18)..(18): n is a, c, g, or u
  misc_feature (20)..(20): n is a, c, g, or u
ucncuuagagguggagananggg

SEQ ID NO: 120311 - RNA, 24 nt, Artificial Sequence
  Synthetic
  misc_feature (4)..(4): n is a, c, g, or u
  misc_feature (19)..(19): n is a, c, g, or u
  misc_feature (21)..(21): n is a, c, g, or u
gucncuuagagguggagananggg

SEQ ID NO: 120312 - RNA, 18 nt, Artificial Sequence
  Synthetic
  misc_feature (15)..(15): n is a, c, g, or u
caguuguccuugugnggg

SEQ ID NO: 120313 - RNA, 19 nt, Artificial Sequence
  Synthetic
  misc_feature (16)..(16): n is a, c, g, or u
ccaguuguccuugugnggg

SEQ ID NO: 120314 - RNA, 20 nt, Artificial Sequence
  Synthetic
  misc_feature (17)..(17): n is a, c, g, or u
gccaguuguccuugugnggg

SEQ ID NO: 120315 - RNA, 21 nt, Artificial Sequence
  Synthetic
  misc_feature (18)..(18): n is a, c, g, or u
ggccaguuguccuugugnggg

SEQ ID NO: 120316 - RNA, 22 nt, Artificial Sequence
  Synthetic
  misc_feature (19)..(19): n is a, c, g, or u
cggccaguuguccuugugnggg

SEQ ID NO: 120317 - RNA, 23 nt, Artificial Sequence
  Synthetic
  misc_feature (20)..(20): n is a, c, g, or u
ccggccaguuguccuugugnggg

SEQ ID NO: 120318 - RNA, 24 nt, Artificial Sequence
  Synthetic
  misc_feature (21)..(21): n is a, c, g, or u
uccggccaguuguccuugugnggg

SEQ ID NO: 120319 - RNA, 18 nt, Artificial Sequence
  Synthetic
aaagcccaagaugauggg

SEQ ID NO: 120320 - RNA, 19 nt, Artificial Sequence
  Synthetic
gaaagcccaagaugauggg

SEQ ID NO: 120321 - RNA, 20 nt, Artificial Sequence
  Synthetic
cgaaagcccaagaugauggg

SEQ ID NO: 120322 - RNA, 21 nt, Artificial Sequence
  Synthetic
gcgaaagcccaagaugauggg

SEQ ID NO: 120323 - RNA, 22 nt, Artificial Sequence
  Synthetic
ugcgaaagcccaagaugauggg

SEQ ID NO: 120324 - RNA, 23 nt, Artificial Sequence
  Synthetic
uugcgaaagcccaagaugauggg

SEQ ID NO: 120325 - RNA, 24 nt, Artificial Sequence
  Synthetic
uuugcgaaagcccaagaugauggg

SEQ ID NO: 120326 - RNA, 18 nt, Artificial Sequence
  Synthetic
ugaaagccagacaguggg

SEQ ID NO: 120327 - RNA, 19 nt, Artificial Sequence
  Synthetic
cugaaagccagacaguggg

SEQ ID NO: 120328 - RNA, 20 nt, Artificial Sequence
  Synthetic
acugaaagccagacaguggg

SEQ ID NO: 120329 - RNA, 21 nt, Artificial Sequence
  Synthetic
aacugaaagccagacaguggg

SEQ ID NO: 120330 - RNA, 22 nt, Artificial Sequence
  Synthetic
uaacugaaagccagacaguggg

SEQ ID NO: 120331 - RNA, 23 nt, Artificial Sequence
  Synthetic
auaacugaaagccagacaguggg

SEQ ID NO: 120332 - RNA, 24 nt, Artificial Sequence
  Synthetic
uauaacugaaagccagacaguggg

SEQ ID NO: 120333 - RNA, 18 nt, Artificial Sequence
  Synthetic
  misc_feature (10)..(10): n is a, c, g, or u
gaaucccagnggauuggg

SEQ ID NO: 120334 - RNA, 19 nt, Artificial Sequence
  Synthetic
  misc_feature (11)..(11): n is a, c, g, or u
agaaucccagnggauuggg

SEQ ID NO: 120335 - RNA, 20 nt, Artificial Sequence
  Synthetic
  misc_feature (12)..(12): n is a, c, g, or u
aagaaucccagnggauuggg

SEQ ID NO: 120336 - RNA, 21 nt, Artificial Sequence
  Synthetic
  misc_feature (1)..(1): n is a, c, g, or u
  misc_feature (13)..(13): n is a, c, g, or u
naagaaucccagnggauuggg

SEQ ID NO: 120337 - RNA, 22 nt, Artificial Sequence
  Synthetic
  misc_feature (2)..(2): n is a, c, g, or u
  misc_feature (14)..(14): n is a, c, g, or u
gnaagaaucccagnggauuggg

SEQ ID NO: 120338 - RNA, 23 nt, Artificial Sequence
  Synthetic
  misc_feature (3)..(3): n is a, c, g, or u
  misc_feature (15)..(15): n is a, c, g, or u
ggnaagaaucccagnggauuggg

SEQ ID NO: 120339 - RNA, 24 nt, Artificial Sequence
  Synthetic
  misc_feature (4)..(4): n is a, c, g, or u
  misc_feature (16)..(16): n is a, c, g, or u
gggnaagaaucccagnggauuggg

SEQ ID NO: 120340 - RNA, 18 nt, Artificial Sequence
  Synthetic
  misc_feature (4)..(4): n is a, c, g, or u
  misc_feature (16)..(16): n is a, c, g, or u
gggnaagaaucccagngg

SEQ ID NO: 120341 - RNA, 19 nt, Artificial Sequence
  Synthetic
  misc_feature (5)..(5): n is a, c, g, or u
  misc_feature (17)..(17): n is a, c, g, or u
cgggnaagaaucccagngg

SEQ ID NO: 120342 - RNA, 20 nt, Artificial Sequence
  Synthetic
  misc_feature (6)..(6): n is a, c, g, or u
  misc_feature (18)..(18): n is a, c, g, or u
ucgggnaagaaucccagngg

SEQ ID NO: 120343 - RNA, 21 nt, Artificial Sequence
  Synthetic
  misc_feature (7)..(7): n is a, c, g, or u
  misc_feature (19)..(19): n is a, c, g, or u
aucgggnaagaaucccagngg

SEQ ID NO: 120344 - RNA, 22 nt, Artificial Sequence
  Synthetic
  misc_feature (8)..(8): n is a, c, g, or u
  misc_feature (20)..(20): n is a, c, g, or u
gaucgggnaagaaucccagngg

SEQ ID NO: 120345 - RNA, 23 nt, Artificial Sequence
  Synthetic
  misc_feature (9)..(9): n is a, c, g, or u
  misc_feature (21)..(21): n is a, c, g, or u
ugaucgggnaagaaucccagngg

SEQ ID NO: 120346 - RNA, 24 nt, Artificial Sequence
  Synthetic
  misc_feature (10)..(10): n is a, c, g, or u
  misc_feature (22)..(22): n is a, c, g, or u
augaucgggnaagaaucccagngg

SEQ ID NO: 120347 - RNA, 18 nt, Artificial Sequence
  Synthetic
  misc_feature (16)..(16): n is a, c, g, or u
ccaguuguccuugugngg

SEQ ID NO: 120348 - RNA, 19 nt, Artificial Sequence
  Synthetic
  misc_feature (17)..(17): n is a, c, g, or u
gccaguuguccuugugngg

SEQ ID NO: 120349 - RNA, 20 nt, Artificial Sequence
  Synthetic
  misc_feature (18)..(18): n is a, c, g, or u
ggccaguuguccuugugngg

SEQ ID NO: 120350 - RNA, 21 nt, Artificial Sequence
  Synthetic
  misc_feature (19)..(19): n is a, c, g, or u
cggccaguuguccuugugngg

SEQ ID NO: 120351 - RNA, 22 nt, Artificial Sequence
  Synthetic
  misc_feature (20)..(20): n is a, c, g, or u
ccggccaguuguccuugugngg

SEQ ID NO: 120352 - RNA, 23 nt, Artificial Sequence
  Synthetic
  misc_feature (21)..(21): n is a, c, g, or u
uccggccaguuguccuugugngg

SEQ ID NO: 120353 - RNA, 24 nt, Artificial Sequence
  Synthetic
  misc_feature (22)..(22): n is a, c, g, or u
guccggccaguuguccuugugngg

SEQ ID NO: 120354 - RNA, 18 nt, Artificial Sequence
  Synthetic
  misc_feature (16)..(16): n is a, c, g, or u
auauuuaguaacauungg

SEQ ID NO: 120355 - RNA, 19 nt, Artificial Sequence
  Synthetic
  misc_feature (17)..(17): n is a, c, g, or u
aauauuuaguaacauungg

SEQ ID NO: 120356 - RNA, 20 nt, Artificial Sequence
  Synthetic
  misc_feature (18)..(18): n is a, c, g, or u
aaauauuuaguaacauungg

SEQ ID NO: 120357 - RNA, 21 nt, Artificial Sequence
  Synthetic
  misc_feature (19)..(19): n is a, c, g, or u
caaauauuuaguaacauungg

SEQ ID NO: 120358 - RNA, 22 nt, Artificial Sequence
  Synthetic
  misc_feature (20)..(20): n is a, c, g, or u
gcaaauauuuaguaacauungg

SEQ ID NO: 120359 - RNA, 23 nt, Artificial Sequence
  Synthetic
  misc_feature (21)..(21): n is a, c, g, or u
ggcaaauauuuaguaacauungg

SEQ ID NO: 120360 - RNA, 24 nt, Artificial Sequence
  Synthetic
  misc_feature (22)..(22): n is a, c, g, or u
gggcaaauauuuaguaacauungg

SEQ ID NO: 120361 - RNA, 18 nt, Artificial Sequence
  Synthetic
cccaacagucccccaugg

SEQ ID NO: 120362 - RNA, 19 nt, Artificial Sequence
  Synthetic
ccccaacagucccccaugg

SEQ ID NO: 120363 - RNA, 20 nt, Artificial Sequence
  Synthetic
accccaacagucccccaugg

SEQ ID NO: 120364 - RNA, 21 nt, Artificial Sequence
  Synthetic
caccccaacagucccccaugg

SEQ ID NO: 120365 - RNA, 22 nt, Artificial Sequence
  Synthetic
ccaccccaacagucccccaugg

SEQ ID NO: 120366 - RNA, 23 nt, Artificial Sequence
  Synthetic
uccaccccaacagucccccaugg

SEQ ID NO: 120367 - RNA, 24 nt, Artificial Sequence
  Synthetic
cuccaccccaacagucccccaugg

SEQ ID NO: 120368 - RNA, 18 nt, Artificial Sequence
  Synthetic
gaaagcccaagaugaugg

SEQ ID NO: 120369 - RNA, 19 nt, Artificial Sequence
  Synthetic
cgaaagcccaagaugaugg

SEQ ID NO: 120370 - RNA, 20 nt, Artificial Sequence
  Synthetic
gcgaaagcccaagaugaugg

SEQ ID NO: 120371 - RNA, 21 nt, Artificial Sequence
  Synthetic
ugcgaaagcccaagaugaugg

SEQ ID NO: 120372 - RNA, 22 nt, Artificial Sequence
  Synthetic
uugcgaaagcccaagaugaugg

SEQ ID NO: 120373 - RNA, 23 nt, Artificial Sequence
  Synthetic
uuugcgaaagcccaagaugaugg

SEQ ID NO: 120374 - RNA, 24 nt, Artificial Sequence
  Synthetic
uuuugcgaaagcccaagaugaugg

SEQ ID NO: 120375 - RNA, 18 nt, Artificial Sequence
  Synthetic
  misc_feature (14)..(14): n is a, c, g, or u
ugcgcugauggccnaugg

SEQ ID NO: 120376 - RNA, 19 nt, Artificial Sequence
  Synthetic
  misc_feature (15)..(15): n is a, c, g, or u
augcgcugauggccnaugg

SEQ ID NO: 120377 - RNA, 20 nt, Artificial Sequence
  Synthetic
  misc_feature (16)..(16): n is a, c, g, or u
caugcgcugauggccnaugg

SEQ ID NO: 120378 - RNA, 21 nt, Artificial Sequence
  Synthetic
  misc_feature (17)..(17): n is a, c, g, or u
gcaugcgcugauggccnaugg

SEQ ID NO: 120379 - RNA, 22 nt, Artificial Sequence
  Synthetic
  misc_feature (18)..(18): n is a, c, g, or u
cgcaugcgcugauggccnaugg

SEQ ID NO: 120380 - RNA, 23 nt, Artificial Sequence
  Synthetic
  misc_feature (19)..(19): n is a, c, g, or u
acgcaugcgcugauggccnaugg

SEQ ID NO: 120381 - RNA, 24 nt, Artificial Sequence
  Synthetic
  misc_feature (20)..(20): n is a, c, g, or u
cacgcaugcgcugauggccnaugg

SEQ ID NO: 120382 - RNA, 18 nt, Artificial Sequence
  Synthetic
auaagauugacgauaugg

SEQ ID NO: 120383 - RNA, 19 nt, Artificial Sequence
  Synthetic
gauaagauugacgauaugg

SEQ ID NO: 120384 - RNA, 20 nt, Artificial Sequence
  Synthetic
cgauaagauugacgauaugg

SEQ ID NO: 120385 - RNA, 21 nt, Artificial Sequence
  Synthetic
ucgauaagauugacgauaugg

SEQ ID NO: 120386 - RNA, 22 nt, Artificial Sequence
  Synthetic
uucgauaagauugacgauaugg

SEQ ID NO: 120387 - RNA, 23 nt, Artificial Sequence
  Synthetic
cuucgauaagauugacgauaugg

SEQ ID NO: 120388 - RNA, 24 nt, Artificial Sequence
  Synthetic
ucuucgauaagauugacgauaugg

SEQ ID NO: 120389 - RNA, 18 nt, Artificial Sequence
  Synthetic
aggaguuccgcaguaugg

SEQ ID NO: 120390 - RNA, 19 nt, Artificial Sequence
  Synthetic
uaggaguuccgcaguaugg

SEQ ID NO: 120391 - RNA, 20 nt, Artificial Sequence
  Synthetic
cuaggaguuccgcaguaugg

SEQ ID NO: 120392 - RNA, 18 nt, Artificial Sequence
  Synthetic
  misc_feature (7)..(8): n is a, c, g, or u
gggaggnnugaacccugg

SEQ ID NO: 120393 - RNA, 19 nt, Artificial Sequence
  Synthetic
  misc_feature (8)..(9): n is a, c, g, or u
ggggaggnnugaacccugg

SEQ ID NO: 120394 - RNA, 20 nt, Artificial Sequence
  Synthetic
  misc_feature (9)..(10): n is a, c, g, or u
uggggaggnnugaacccugg

SEQ ID NO: 120395 - RNA, 21 nt, Artificial Sequence
  Synthetic
  misc_feature (10)..(11): n is a, c, g, or u
auggggaggnnugaacccugg

SEQ ID NO: 120396 - RNA, 22 nt, Artificial Sequence
  Synthetic
  misc_feature (11)..(12): n is a, c, g, or u
cauggggaggnnugaacccugg

SEQ ID NO: 120397 - RNA, 23 nt, Artificial Sequence
  Synthetic
  misc_feature (12)..(13): n is a, c, g, or u
ccauggggaggnnugaacccugg

SEQ ID NO: 120398 - RNA, 24 nt, Artificial Sequence
  Synthetic
  misc_feature (13)..(14): n is a, c, g, or u
cccauggggaggnnugaacccugg

SEQ ID NO: 120399 - RNA, 18 nt, Artificial Sequence
  Synthetic
cugaaagccagacagugg

SEQ ID NO: 120400 - RNA, 19 nt, Artificial Sequence
  Synthetic
acugaaagccagacagugg

SEQ ID NO: 120401 - RNA, 20 nt, Artificial Sequence
  Synthetic
aacugaaagccagacagugg

SEQ ID NO: 120402 - RNA, 21 nt, Artificial Sequence
  Synthetic
uaacugaaagccagacagugg

SEQ ID NO: 120403 - RNA, 22 nt, Artificial Sequence
  Synthetic
auaacugaaagccagacagugg

SEQ ID NO: 120404 - RNA, 23 nt, Artificial Sequence
  Synthetic
uauaacugaaagccagacagugg

SEQ ID NO: 120405 - RNA, 24 nt, Artificial Sequence
  Synthetic
auauaacugaaagccagacagugg

SEQ ID NO: 120406 - RNA, 18 nt, Artificial Sequence
  Synthetic
  misc_feature (14)..(14): n is a, c, g, or u
gaguuugguggaangugg

SEQ ID NO: 120407 - RNA, 19 nt, Artificial Sequence
  Synthetic
  misc_feature (15)..(15): n is a, c, g, or u
agaguuugguggaangugg

SEQ ID NO: 120408 - RNA, 20 nt, Artificial Sequence
  Synthetic
  misc_feature (16)..(16): n is a, c, g, or u
aagaguuugguggaangugg

SEQ ID NO: 120409 - RNA, 21 nt, Artificial Sequence
  Synthetic
  misc_feature (17)..(17): n is a, c, g, or u
gaagaguuugguggaangugg

SEQ ID NO: 120410 - RNA, 22 nt, Artificial Sequence
  Synthetic
  misc_feature (18)..(18): n is a, c, g, or u
ugaagaguuugguggaangugg

SEQ ID NO: 120411 - RNA, 23 nt, Artificial Sequence
  Synthetic
  misc_feature (19)..(19): n is a, c, g, or u
uugaagaguuugguggaangugg

SEQ ID NO: 120412 - RNA, 24 nt, Artificial Sequence
  Synthetic
  misc_feature (20)..(20): n is a, c, g, or u
cuugaagaguuugguggaangugg

SEQ ID NO: 120413 - RNA, 18 nt, Artificial Sequence
  Synthetic
uuccugacugccgauugg

SEQ ID NO: 120414 - RNA, 19 nt, Artificial Sequence
  Synthetic
cuuccugacugccgauugg

SEQ ID NO: 120415 - RNA, 20 nt, Artificial Sequence
  Synthetic
ccuuccugacugccgauugg

SEQ ID NO: 120416 - RNA, 21 nt, Artificial Sequence
  Synthetic
gccuuccugacugccgauugg

SEQ ID NO: 120417 - RNA, 22 nt, Artificial Sequence
  Synthetic
ugccuuccugacugccgauugg

SEQ ID NO: 120418 - RNA, 23 nt, Artificial Sequence
  Synthetic
cugccuuccugacugccgauugg

SEQ ID NO: 120419 - RNA, 24 nt, Artificial Sequence
  Synthetic
gcugccuuccugacugccgauugg

SEQ ID NO: 120420 - RNA, 18 nt, Artificial Sequence
  Synthetic
gcgucagcaaacacuugg

SEQ ID NO: 120421 - RNA, 19 nt, Artificial Sequence
  Synthetic
ugcgucagcaaacacuugg

SEQ ID NO: 120422 - RNA, 20 nt, Artificial Sequence
  Synthetic
uugcgucagcaaacacuugg

SEQ ID NO: 120423 - RNA, 21 nt, Artificial Sequence
  Synthetic
guugcgucagcaaacacuugg

SEQ ID NO: 120424 - RNA, 22 nt, Artificial Sequence
  Synthetic
gguugcgucagcaaacacuugg

SEQ ID NO: 120425 - RNA, 23 nt, Artificial Sequence
  Synthetic
ggguugcgucagcaaacacuugg

SEQ ID NO: 120426 - RNA, 24 nt, Artificial Sequence
  Synthetic
gggguugcgucagcaaacacuugg

SEQ ID NO: 120427 - RNA, 18 nt, Artificial Sequence
  Synthetic
aaaggccuuguaaguugg

SEQ ID NO: 120428 - RNA, 19 nt, Artificial Sequence
  Synthetic
gaaaggccuuguaaguugg

SEQ ID NO: 120429 - RNA, 20 nt, Artificial Sequence
  Synthetic
agaaaggccuuguaaguugg

SEQ ID NO: 120430 - RNA, 21 nt, Artificial Sequence
  Synthetic
uagaaaggccuuguaaguugg

SEQ ID NO: 120431 - RNA, 22 nt, Artificial Sequence
  Synthetic
uuagaaaggccuuguaaguugg

SEQ ID NO: 120432 - RNA, 23 nt, Artificial Sequence
  Synthetic
cuuagaaaggccuuguaaguugg

SEQ ID NO: 120433 - RNA, 24 nt, Artificial Sequence
  Synthetic
  misc_feature (1)..(1): n is a, c, g, or u
ncuuagaaaggccuuguaaguugg

SEQ ID NO: 120434 - RNA, 18 nt, Artificial Sequence
  Synthetic
ggaucuugaagaguuugg

SEQ ID NO: 120435 - RNA, 19 nt, Artificial Sequence
  Synthetic
gggaucuugaagaguuugg

SEQ ID NO: 120436 - RNA, 20 nt, Artificial Sequence
  Synthetic
ugggaucuugaagaguuugg

SEQ ID NO: 120437 - RNA, 21 nt, Artificial Sequence
  Synthetic
cugggaucuugaagaguuugg

SEQ ID NO: 120438 - RNA, 22 nt, Artificial Sequence
  Synthetic
ucugggaucuugaagaguuugg

SEQ ID NO: 120439 - RNA, 23 nt, Artificial Sequence
  Synthetic
cucugggaucuugaagaguuugg

SEQ ID NO: 120440 - RNA, 24 nt, Artificial Sequence
  Synthetic
acucugggaucuugaagaguuugg

SEQ ID NO: 120441 - RNA, 18 nt, Artificial Sequence
  Synthetic
ugggacugcgaauuuugg

SEQ ID NO: 120442 - RNA, 19 nt, Artificial Sequence
  Synthetic
uugggacugcgaauuuugg

SEQ ID NO: 120443 - RNA, 20 nt, Artificial Sequence
  Synthetic
uuugggacugcgaauuuugg

SEQ ID NO: 120444 - RNA, 21 nt, Artificial Sequence
  Synthetic
auuugggacugcgaauuuugg

SEQ ID NO: 120445 - RNA, 22 nt, Artificial Sequence
  Synthetic
gauuugggacugcgaauuuugg

SEQ ID NO: 120446 - RNA, 23 nt, Artificial Sequence
  Synthetic
agauuugggacugcgaauuuugg

SEQ ID NO: 120447 - RNA, 24 nt, Artificial Sequence
  Synthetic
gagauuugggacugcgaauuuugg

SEQ ID NO: 120448 - RNA, 18 nt, Artificial Sequence
  Synthetic
  misc_feature (17)..(17): n is a, c, g, or u
aguuucccaccuuaugng

SEQ ID NO: 120449 - RNA, 19 nt, Artificial Sequence
  Synthetic
  misc_feature (18)..(18): n is a, c, g, or u
aaguuucccaccuuaugng

SEQ ID NO: 120450 - RNA, 20 nt, Artificial Sequence
  Synthetic
  misc_feature (19)..(19): n is a, c, g, or u
aaaguuucccaccuuaugng

SEQ ID NO: 120451 - RNA, 21 nt, Artificial Sequence
  Synthetic
  misc_feature (20)..(20): n is a, c, g, or u
uaaaguuucccaccuuaugng

SEQ ID NO: 120452 - RNA, 22 nt, Artificial Sequence
  Synthetic
  misc_feature (21)..(21): n is a, c, g, or u
guaaaguuucccaccuuaugng

SEQ ID NO: 120453 - RNA, 23 nt, Artificial Sequence
  Synthetic
  misc_feature (22)..(22): n is a, c, g, or u
cguaaaguuucccaccuuaugng

SEQ ID NO: 120454 - RNA, 24 nt, Artificial Sequence
  Synthetic
  misc_feature (23)..(23): n is a, c, g, or u
ccguaaaguuucccaccuuaugng

SEQ ID NO: 120455 - RNA, 18 nt, Artificial Sequence
  Synthetic
  misc_feature (8)..(8): n is a, c, g, or u
  misc_feature (17)..(17): n is a, c, g, or u
caggauanccacauugng

SEQ ID NO: 120456 - RNA, 19 nt, Artificial Sequence
  Synthetic
  misc_feature (9)..(9): n is a, c, g, or u
  misc_feature (18)..(18): n is a, c, g, or u
gcaggauanccacauugng

SEQ ID NO: 120457 - RNA, 20 nt, Artificial Sequence
  Synthetic
  misc_feature (10)..(10): n is a, c, g, or u
  misc_feature (19)..(19): n is a, c, g, or u
agcaggauanccacauugng

SEQ ID NO: 120458 - RNA, 21 nt, Artificial Sequence
  Synthetic
  misc_feature (11)..(11): n is a, c, g, or u
  misc_feature (20)..(20): n is a, c, g, or u
aagcaggauanccacauugng

SEQ ID NO: 120459 - RNA, 22 nt, Artificial Sequence
  Synthetic
  misc_feature (12)..(12): n is a, c, g, or u
  misc_feature (21)..(21): n is a, c, g, or u
aaagcaggauanccacauugng

SEQ ID NO: 120460 - RNA, 23 nt, Artificial Sequence
  Synthetic
  misc_feature (13)..(13): n is a, c, g, or u
  misc_feature (22)..(22): n is a, c, g, or u
uaaagcaggauanccacauugng

SEQ ID NO: 120461 - RNA, 24 nt, Artificial Sequence
  Synthetic
  misc_feature (14)..(14): n is a, c, g, or u
  misc_feature (23)..(23): n is a, c, g, or u
uuaaagcaggauanccacauugng

SEQ ID NO: 120462 - RNA, 18 nt, Artificial Sequence
  Synthetic
  misc_feature (2)..(2): n is a, c, g, or u
  misc_feature (16)..(17): n is a, c, g, or u
unuguaaauaaugucnng

SEQ ID NO: 120463 - RNA, 19 nt, Artificial Sequence
  Synthetic
  misc_feature (3)..(3): n is a, c, g, or u
  misc_feature (17)..(18): n is a, c, g, or u
gunuguaaauaaugucnng

SEQ ID NO: 120464 - RNA, 20 nt, Artificial Sequence
  Synthetic
  misc_feature (4)..(4): n is a, c, g, or u
  misc_feature (18)..(19): n is a, c, g, or u
agunuguaaauaaugucnng

SEQ ID NO: 120465 - RNA, 21 nt, Artificial Sequence
  Synthetic
  misc_feature (5)..(5): n is a, c, g, or u
  misc_feature (19)..(20): n is a, c, g, or u
gagunuguaaauaaugucnng

SEQ ID NO: 120466 - RNA, 22 nt, Artificial Sequence
  Synthetic
  misc_feature (6)..(6): n is a, c, g, or u
  misc_feature (20)..(21): n is a, c, g, or u
agagunuguaaauaaugucnng

SEQ ID NO: 120467 - RNA, 23 nt, Artificial Sequence
  Synthetic
  misc_feature (7)..(7): n is a, c, g, or u
  misc_feature (21)..(22): n is a, c, g, or u
aagagunuguaaauaaugucnng

SEQ ID NO: 120468 - RNA, 24 nt, Artificial Sequence
  Synthetic
  misc_feature (8)..(8): n is a, c, g, or u
  misc_feature (22)..(23): n is a, c, g, or u
aaagagunuguaaauaaugucnng

SEQ ID NO: 120469 - RNA, 18 nt, Artificial Sequence
  Synthetic
  misc_feature (17)..(17): n is a, c, g, or u
uuccuugagcaggagung

SEQ ID NO: 120470 - RNA, 19 nt, Artificial Sequence
  Synthetic
  misc_feature (18)..(18): n is a, c, g, or u
guuccuugagcaggagung

SEQ ID NO: 120471 - RNA, 20 nt, Artificial Sequence
  Synthetic
  misc_feature (19)..(19): n is a, c, g, or u
gguuccuugagcaggagung

SEQ ID NO: 120472 - RNA, 21 nt, Artificial Sequence
  Synthetic
  misc_feature (20)..(20): n is a, c, g, or u
agguuccuugagcaggagung

SEQ ID NO: 120473 - RNA, 22 nt, Artificial Sequence
  Synthetic
  misc_feature (21)..(21): n is a, c, g, or u
gagguuccuugagcaggagung

SEQ ID NO: 120474 - RNA, 23 nt, Artificial Sequence
  Synthetic
  misc_feature (22)..(22): n is a, c, g, or u
agagguuccuugagcaggagung

SEQ ID NO: 120475 - RNA, 24 nt, Artificial Sequence
  Synthetic
  misc_feature (23)..(23): n is a, c, g, or u
uagagguuccuugagcaggagung

SEQ ID NO: 120476 - RNA, 18 nt, Artificial Sequence
  Synthetic
  misc_feature (17)..(17): n is a, c, g, or u
aauauuuaguaacauung

SEQ ID NO: 120477 - RNA, 19 nt, Artificial Sequence
  Synthetic
  misc_feature (18)..(18): n is a, c, g, or u
aaauauuuaguaacauung

SEQ ID NO: 120478 - RNA, 20 nt, Artificial Sequence
  Synthetic
  misc_feature (19)..(19): n is a, c, g, or u
caaauauuuaguaacauung

SEQ ID NO: 120479 - RNA, 21 nt, Artificial Sequence
  Synthetic
  misc_feature (20)..(20): n is a, c, g, or u
gcaaauauuuaguaacauung

SEQ ID NO: 120480 - RNA, 22 nt, Artificial Sequence
  Synthetic
  misc_feature (21)..(21): n is a, c, g, or u
ggcaaauauuuaguaacauung

SEQ ID NO: 120481 - RNA, 23 nt, Artificial Sequence
  Synthetic
  misc_feature (22)..(22): n is a, c, g, or u
gggcaaauauuuaguaacauung

SEQ ID NO: 120482 - RNA, 24 nt, Artificial Sequence
  Synthetic
  misc_feature (23)..(23): n is a, c, g, or u
agggcaaauauuuaguaacauung

SEQ ID NO: 120483 - RNA, 18 nt, Artificial Sequence
  Synthetic
aaaguaagacaggaaaug

SEQ ID NO: 120484 - RNA, 19 nt, Artificial Sequence
  Synthetic
aaaaguaagacaggaaaug

SEQ ID NO: 120485 - RNA, 20 nt, Artificial Sequence
  Synthetic
caaaaguaagacaggaaaug

SEQ ID NO: 120486 - RNA, 21 nt, Artificial Sequence
  Synthetic
ccaaaaguaagacaggaaaug

SEQ ID NO: 120487 - RNA, 22 nt, Artificial Sequence
  Synthetic
  misc_feature (1)..(1): n is a, c, g, or u
nccaaaaguaagacaggaaaug

SEQ ID NO: 120488 - RNA, 23 nt, Artificial Sequence
  Synthetic
  misc_feature (2)..(2): n is a, c, g, or u
unccaaaaguaagacaggaaaug

SEQ ID NO: 120489 - RNA, 24 nt, Artificial Sequence
  Synthetic
  misc_feature (3)..(3): n is a, c, g, or u
cunccaaaaguaagacaggaaaug

SEQ ID NO: 120490 - RNA, 18 nt, Artificial Sequence
  Synthetic
uccuccugcaaaugaaug

SEQ ID NO: 120491 - RNA, 19 nt, Artificial Sequence
  Synthetic
guccuccugcaaaugaaug

SEQ ID NO: 120492 - RNA, 20 nt, Artificial Sequence
  Synthetic
uguccuccugcaaaugaaug

SEQ ID NO: 120493 - RNA, 21 nt, Artificial Sequence
  Synthetic
auguccuccugcaaaugaaug

SEQ ID NO: 120494 - RNA, 22 nt, Artificial Sequence
  Synthetic
aauguccuccugcaaaugaaug

SEQ ID NO: 120495 - RNA, 23 nt, Artificial Sequence
  Synthetic
caauguccuccugcaaaugaaug

SEQ ID NO: 120496 - RNA, 24 nt, Artificial Sequence
  Synthetic
acaauguccuccugcaaaugaaug

SEQ ID NO: 120497 - RNA, 18 nt, Artificial Sequence
  Synthetic
  misc_feature (3)..(4): n is a, c, g, or u
ucnngucuggaaguaaug

SEQ ID NO: 120498 - RNA, 19 nt, Artificial Sequence
  Synthetic
  misc_feature (4)..(5): n is a, c, g, or u
gucnngucuggaaguaaug

SEQ ID NO: 120499 - RNA, 20 nt, Artificial Sequence
  Synthetic
  misc_feature (5)..(6): n is a, c, g, or u
ugucnngucuggaaguaaug

SEQ ID NO: 120500 - RNA, 21 nt, Artificial Sequence
  Synthetic
  misc_feature (6)..(7): n is a, c, g, or u
augucnngucuggaaguaaug

SEQ ID NO: 120501 - RNA, 22 nt, Artificial Sequence
  Synthetic
  misc_feature (7)..(8): n is a, c, g, or u
aaugucnngucuggaaguaaug

SEQ ID NO: 120502 - RNA, 23 nt, Artificial Sequence
  Synthetic
  misc_feature (8)..(9): n is a, c, g, or u
uaaugucnngucuggaaguaaug

SEQ ID NO: 120503 - RNA, 24 nt, Artificial Sequence
  Synthetic
  misc_feature (9)..(10): n is a, c, g, or u
auaaugucnngucuggaaguaaug

SEQ ID NO: 120504 - RNA, 18 nt, Artificial Sequence
  Synthetic
guuuuguacagcaacaug

SEQ ID NO: 120505 - RNA, 19 nt, Artificial Sequence
  Synthetic
gguuuuguacagcaacaug

SEQ ID NO: 120506 - RNA, 20 nt, Artificial Sequence
  Synthetic
agguuuuguacagcaacaug

SEQ ID NO: 120507 - RNA, 18 nt, Artificial Sequence
  Synthetic
ccccaacagucccccaug

SEQ ID NO: 120508 - RNA, 19 nt, Artificial Sequence
  Synthetic
accccaacagucccccaug

SEQ ID NO: 120509 - RNA, 20 nt, Artificial Sequence
  Synthetic
caccccaacagucccccaug

SEQ ID NO: 120510 - RNA, 21 nt, Artificial Sequence
  Synthetic
ccaccccaacagucccccaug

SEQ ID NO: 120511 - RNA, 22 nt, Artificial Sequence
  Synthetic
uccaccccaacagucccccaug

SEQ ID NO: 120512 - RNA, 23 nt, Artificial Sequence
  Synthetic
cuccaccccaacagucccccaug

SEQ ID NO: 120513 - RNA, 24 nt, Artificial Sequence
  Synthetic
gcuccaccccaacagucccccaug

SEQ ID NO: 120514 - RNA, 18 nt, Artificial Sequence
  Synthetic
uugcgaaagcccaagaug

SEQ ID NO: 120515 - RNA, 19 nt, Artificial Sequence
  Synthetic
uuugcgaaagcccaagaug

SEQ ID NO: 120516 - RNA, 20 nt, Artificial Sequence
  Synthetic
uuuugcgaaagcccaagaug

SEQ ID NO: 120517 - RNA, 21 nt, Artificial Sequence
  Synthetic
auuuugcgaaagcccaagaug

SEQ ID NO: 120518 - RNA, 22 nt, Artificial Sequence
  Synthetic
uauuuugcgaaagcccaagaug

SEQ ID NO: 120519 - RNA, 23 nt, Artificial Sequence
  Synthetic
guauuuugcgaaagcccaagaug

SEQ ID NO: 120520 - RNA, 24 nt, Artificial Sequence
  Synthetic
gguauuuugcgaaagcccaagaug

SEQ ID NO: 120521 - RNA, 18 nt, Artificial Sequence
  Synthetic
aggaugcagaggaagaug

SEQ ID NO: 120522 - RNA, 19 nt, Artificial Sequence
  Synthetic
caggaugcagaggaagaug

SEQ ID NO: 120523 - RNA, 20 nt, Artificial Sequence
  Synthetic
gcaggaugcagaggaagaug

SEQ ID NO: 120524 - RNA, 21 nt, Artificial Sequence
  Synthetic
agcaggaugcagaggaagaug

SEQ ID NO: 120525 - RNA, 22 nt, Artificial Sequence
  Synthetic
cagcaggaugcagaggaagaug

SEQ ID NO: 120526 - RNA, 23 nt, Artificial Sequence
  Synthetic
gcagcaggaugcagaggaagaug

SEQ ID NO: 120527 - RNA, 24 nt, Artificial Sequence
  Synthetic
agcagcaggaugcagaggaagaug

SEQ ID NO: 120528 - RNA, 18 nt, Artificial Sequence
  Synthetic
  misc_feature (12)..(12): n is a, c, g, or u
ggacaugaacangagaug

SEQ ID NO: 120529 - RNA, 19 nt, Artificial Sequence
  Synthetic
  misc_feature (13)..(13): n is a, c, g, or u
aggacaugaacangagaug

SEQ ID NO: 120530 - RNA, 20 nt, Artificial Sequence
  Synthetic
  misc_feature (14)..(14): n is a, c, g, or u
uaggacaugaacangagaug

SEQ ID NO: 120531 - RNA, 21 nt, Artificial Sequence
  Synthetic
  misc_feature (15)..(15): n is a, c, g, or u
guaggacaugaacangagaug

SEQ ID NO: 120532 - RNA, 22 nt, Artificial Sequence
  Synthetic
  misc_feature (16)..(16): n is a, c, g, or u
aguaggacaugaacangagaug

SEQ ID NO: 120533 - RNA, 23 nt, Artificial Sequence
  Synthetic
  misc_feature (17)..(17): n is a, c, g, or u
caguaggacaugaacangagaug

SEQ ID NO: 120534 - RNA, 24 nt, Artificial Sequence
  Synthetic
  misc_feature (18)..(18): n is a, c, g, or u
acaguaggacaugaacangagaug

SEQ ID NO: 120535 - RNA, 18 nt, Artificial Sequence
  Synthetic
  misc_feature (13)..(13): n is a, c, g, or u
cacacgguccggnagaug

SEQ ID NO: 120536 - RNA, 19 nt, Artificial Sequence
  Synthetic
  misc_feature (14)..(14): n is a, c, g, or u
gcacacgguccggnagaug

SEQ ID NO: 120537 - RNA, 20 nt, Artificial Sequence
  Synthetic
  misc_feature (15)..(15): n is a, c, g, or u
ugcacacgguccggnagaug

SEQ ID NO: 120538 - RNA, 21 nt, Artificial Sequence
  Synthetic
  misc_feature (16)..(16): n is a, c, g, or u
gugcacacgguccggnagaug

SEQ ID NO: 120539 - RNA, 22 nt, Artificial Sequence
  Synthetic
  misc_feature (17)..(17): n is a, c, g, or u
agugcacacgguccggnagaug

SEQ ID NO: 120540 - RNA, 23 nt, Artificial Sequence
  Synthetic
  misc_feature (18)..(18): n is a, c, g, or u
aagugcacacgguccggnagaug

SEQ ID NO: 120541 - RNA, 24 nt, Artificial Sequence
  Synthetic
  misc_feature (19)..(19): n is a, c, g, or u
gaagugcacacgguccggnagaug

SEQ ID NO: 120542 - RNA, 18 nt, Artificial Sequence
  Synthetic
aggcauagcagcaggaug

SEQ ID NO: 120543 - RNA, 19 nt, Artificial Sequence
  Synthetic
gaggcauagcagcaggaug

SEQ ID NO: 120544 - RNA, 20 nt, Artificial Sequence
  Synthetic
ugaggcauagcagcaggaug

SEQ ID NO: 120545 - RNA, 21 nt, Artificial Sequence
  Synthetic
augaggcauagcagcaggaug

SEQ ID NO: 120546 - RNA, 22 nt, Artificial Sequence
  Synthetic
gaugaggcauagcagcaggaug

SEQ ID NO: 120547 - RNA, 23 nt, Artificial Sequence
  Synthetic
agaugaggcauagcagcaggaug

SEQ ID NO: 120548 - RNA, 24 nt, Artificial Sequence
  Synthetic
aagaugaggcauagcagcaggaug

SEQ ID NO: 120549 - RNA, 18 nt, Artificial Sequence
  Synthetic
ugcaggguccaacugaug

SEQ ID NO: 120550 - RNA, 19 nt, Artificial Sequence
  Synthetic
augcaggguccaacugaug

SEQ ID NO: 120551 - RNA, 20 nt, Artificial Sequence
  Synthetic
aaugcaggguccaacugaug

SEQ ID NO: 120552 - RNA, 21 nt, Artificial Sequence
  Synthetic
gaaugcaggguccaacugaug

SEQ ID NO: 120553 - RNA, 22 nt, Artificial Sequence
  Synthetic
ugaaugcaggguccaacugaug

SEQ ID NO: 120554 - RNA, 23 nt, Artificial Sequence
  Synthetic
uugaaugcaggguccaacugaug

SEQ ID NO: 120555 - RNA, 24 nt, Artificial Sequence
  Synthetic
uuugaaugcaggguccaacugaug

SEQ ID NO: 120556 - RNA, 18 nt, Artificial Sequence
  Synthetic
  misc_feature (15)..(15): n is a, c, g, or u
augcgcugauggccnaug

SEQ ID NO: 120557 - RNA, 19 nt, Artificial Sequence
  Synthetic
  misc_feature (16)..(16): n is a, c, g, or u
caugcgcugauggccnaug

SEQ ID NO: 120558 - RNA, 20 nt, Artificial Sequence
  Synthetic
  misc_feature (17)..(17): n is a, c, g, or u
gcaugcgcugauggccnaug

SEQ ID NO: 120559 - RNA, 21 nt, Artificial Sequence
  Synthetic
  misc_feature (18)..(18): n is a, c, g, or u
cgcaugcgcugauggccnaug

SEQ ID NO: 120560 - RNA, 22 nt, Artificial Sequence
  Synthetic
  misc_feature (19)..(19): n is a, c, g, or u
acgcaugcgcugauggccnaug

SEQ ID NO: 120561 - RNA, 23 nt, Artificial Sequence
  Synthetic
  misc_feature (20)..(20): n is a, c, g, or u
cacgcaugcgcugauggccnaug

SEQ ID NO: 120562 - RNA, 24 nt, Artificial Sequence
  Synthetic
  misc_feature (21)..(21): n is a, c, g, or u
ccacgcaugcgcugauggccnaug

SEQ ID NO: 120563 - RNA, 18 nt, Artificial Sequence
  Synthetic
gauaagauugacgauaug

SEQ ID NO: 120564 - RNA, 19 nt, Artificial Sequence
  Synthetic
cgauaagauugacgauaug

SEQ ID NO: 120565 - RNA, 20 nt, Artificial Sequence
  Synthetic
ucgauaagauugacgauaug

SEQ ID NO: 120566 - RNA, 21 nt, Artificial Sequence
  Synthetic
uucgauaagauugacgauaug

SEQ ID NO: 120567 - RNA, 22 nt, Artificial Sequence
  Synthetic
cuucgauaagauugacgauaug

SEQ ID NO: 120568 - RNA, 23 nt, Artificial Sequence
  Synthetic
ucuucgauaagauugacgauaug

SEQ ID NO: 120569 - RNA, 24 nt, Artificial Sequence
  Synthetic
gucuucgauaagauugacgauaug

SEQ ID NO: 120570 - RNA, 18 nt, Artificial Sequence
  Synthetic
cauuugguggucuauaug

SEQ ID NO: 120571 - RNA, 19 nt, Artificial Sequence
  Synthetic
gcauuugguggucuauaug

SEQ ID NO: 120572 - RNA, 20 nt, Artificial Sequence
  Synthetic
ggcauuugguggucuauaug

SEQ ID NO: 120573 - RNA, 21 nt, Artificial Sequence
  Synthetic
gggcauuugguggucuauaug

SEQ ID NO: 120574 - RNA, 22 nt, Artificial Sequence
  Synthetic
ggggcauuugguggucuauaug

SEQ ID NO: 120575 - RNA, 23 nt, Artificial Sequence
  Synthetic
aggggcauuugguggucuauaug

SEQ ID NO: 120576 - RNA, 24 nt, Artificial Sequence
  Synthetic
uaggggcauuugguggucuauaug

SEQ ID NO: 120577 - RNA, 18 nt, Artificial Sequence
  Synthetic
uugccugagugccguaug

SEQ ID NO: 120578 - RNA, 19 nt, Artificial Sequence
  Synthetic
cuugccugagugccguaug

SEQ ID NO: 120579 - RNA, 20 nt, Artificial Sequence
  Synthetic
gcuugccugagugccguaug

SEQ ID NO: 120580 - RNA, 21 nt, Artificial Sequence
  Synthetic
agcuugccugagugccguaug

SEQ ID NO: 120581 - RNA, 22 nt, Artificial Sequence
  Synthetic
uagcuugccugagugccguaug

SEQ ID NO: 120582 - RNA, 23 nt, Artificial Sequence
  Synthetic
auagcuugccugagugccguaug

SEQ ID NO: 120583 - RNA, 24 nt, Artificial Sequence
  Synthetic
aauagcuugccugagugccguaug

SEQ ID NO: 120584 - RNA, 18 nt, Artificial Sequence
  Synthetic
uccaagaguccucuuaug

SEQ ID NO: 120585 - RNA, 19 nt, Artificial Sequence
  Synthetic
guccaagaguccucuuaug

SEQ ID NO: 120586 - RNA, 20 nt, Artificial Sequence
  Synthetic
aguccaagaguccucuuaug

SEQ ID NO: 120587 - RNA, 21 nt, Artificial Sequence
  Synthetic
aaguccaagaguccucuuaug

SEQ ID NO: 120588 - RNA, 22 nt, Artificial Sequence
  Synthetic
aaaguccaagaguccucuuaug

SEQ ID NO: 120589 - RNA, 23 nt, Artificial Sequence
  Synthetic
gaaaguccaagaguccucuuaug

SEQ ID NO: 120590 - RNA, 24 nt, Artificial Sequence
  Synthetic
ugaaaguccaagaguccucuuaug

SEQ ID NO: 120591 - RNA, 18 nt, Artificial Sequence
  Synthetic
aagcccuacgaaccacug

SEQ ID NO: 120592 - RNA, 19 nt, Artificial Sequence
  Synthetic
aaagcccuacgaaccacug

SEQ ID NO: 120593 - RNA, 20 nt, Artificial Sequence
  Synthetic
gaaagcccuacgaaccacug

SEQ ID NO: 120594 - RNA, 21 nt, Artificial Sequence
  Synthetic
ggaaagcccuacgaaccacug

SEQ ID NO: 120595 - RNA, 22 nt, Artificial Sequence
  Synthetic
gggaaagcccuacgaaccacug

SEQ ID NO: 120596 - RNA, 23 nt, Artificial Sequence
  Synthetic
ggggaaagcccuacgaaccacug

SEQ ID NO: 120597 - RNA, 24 nt, Artificial Sequence
  Synthetic
gggggaaagcccuacgaaccacug

SEQ ID NO: 120598 - RNA, 18 nt, Artificial Sequence
  Synthetic
uccuguuuucauuuacug

SEQ ID NO: 120599 - RNA, 19 nt, Artificial Sequence
  Synthetic
cuccuguuuucauuuacug

SEQ ID NO: 120600 - RNA, 20 nt, Artificial Sequence
  Synthetic
ucuccuguuuucauuuacug

SEQ ID NO: 120601 - RNA, 21 nt, Artificial Sequence
  Synthetic
gucuccuguuuucauuuacug

SEQ ID NO: 120602 - RNA, 22 nt, Artificial Sequence
  Synthetic
agucuccuguuuucauuuacug

SEQ ID NO: 120603 - RNA, 23 nt, Artificial Sequence
  Synthetic
uagucuccuguuuucauuuacug

SEQ ID NO: 120604 - RNA, 24 nt, Artificial Sequence
  Synthetic
uuagucuccuguuuucauuuacug

SEQ ID NO: 120605 - RNA, 18 nt, Artificial Sequence
  Synthetic
aaaaguugcauggugcug

SEQ ID NO: 120606 - RNA, 19 nt, Artificial Sequence
  Synthetic
aaaaaguugcauggugcug

SEQ ID NO: 120607 - RNA, 20 nt, Artificial Sequence
  Synthetic
gaaaaaguugcauggugcug

SEQ ID NO: 120608 - RNA, 21 nt, Artificial Sequence
  Synthetic
ugaaaaaguugcauggugcug

SEQ ID NO: 120609 - RNA, 22 nt, Artificial Sequence
  Synthetic
gugaaaaaguugcauggugcug

SEQ ID NO: 120610 - RNA, 23 nt, Artificial Sequence
  Synthetic
ggugaaaaaguugcauggugcug

SEQ ID NO: 120611 - RNA, 24 nt, Artificial Sequence
  Synthetic
aggugaaaaaguugcauggugcug

SEQ ID NO: 120612 - RNA, 18 nt, Artificial Sequence
  Synthetic
gauugagaccuucgucug

SEQ ID NO: 120613 - RNA, 19 nt, Artificial Sequence
  Synthetic
cgauugagaccuucgucug

SEQ ID NO: 120614 - RNA, 20 nt, Artificial Sequence
  Synthetic
gcgauugagaccuucgucug

SEQ ID NO: 120615 - RNA, 18 nt, Artificial Sequence
  Synthetic
  misc_feature (3)..(3): n is a, c, g, or u
  misc_feature (8)..(8): n is a, c, g, or u
ggnagagncaguauucug

SEQ ID NO: 120616 - RNA, 19 nt, Artificial Sequence
  Synthetic
  misc_feature (4)..(4): n is a, c, g, or u
  misc_feature (9)..(9): n is a, c, g, or u
uggnagagncaguauucug

SEQ ID NO: 120617 - RNA, 20 nt, Artificial Sequence
  Synthetic
  misc_feature (5)..(5): n is a, c, g, or u
  misc_feature (10)..(10): n is a, c, g, or u
auggnagagncaguauucug

SEQ ID NO: 120618 - RNA, 21 nt, Artificial Sequence
  Synthetic
  misc_feature (6)..(6): n is a, c, g, or u
  misc_feature (11)..(11): n is a, c, g, or u
uauggnagagncaguauucug

SEQ ID NO: 120619 - RNA, 22 nt, Artificial Sequence
  Synthetic
  misc_feature (7)..(7): n is a, c, g, or u
  misc_feature (12)..(12): n is a, c, g, or u
auauggnagagncaguauucug

SEQ ID NO: 120620 - RNA, 23 nt, Artificial Sequence
  Synthetic
  misc_feature (8)..(8): n is a, c, g, or u
  misc_feature (13)..(13): n is a, c, g, or u
gauauggnagagncaguauucug

SEQ ID NO: 120621 - RNA, 24 nt, Artificial Sequence
  Synthetic
  misc_feature (9)..(9): n is a, c, g, or u
  misc_feature (14)..(14): n is a, c, g, or u
cgauauggnagagncaguauucug

SEQ ID NO: 120622 - RNA, 18 nt, Artificial Sequence
  Synthetic
acugaaagccagacagug

SEQ ID NO: 120623 - RNA, 19 nt, Artificial Sequence
  Synthetic
aacugaaagccagacagug

SEQ ID NO: 120624 - RNA, 20 nt, Artificial Sequence
  Synthetic
uaacugaaagccagacagug

SEQ ID NO: 120625 - RNA, 21 nt, Artificial Sequence
  Synthetic
auaacugaaagccagacagug

SEQ ID NO: 120626 - RNA, 22 nt, Artificial Sequence
  Synthetic
uauaacugaaagccagacagug

SEQ ID NO: 120627 - RNA, 23 nt, Artificial Sequence
  Synthetic
auauaacugaaagccagacagug

SEQ ID NO: 120628 - RNA, 24 nt, Artificial Sequence
  Synthetic
cauauaacugaaagccagacagug

SEQ ID NO: 120629 - RNA, 18 nt, Artificial Sequence
  Synthetic
  misc_feature (7)..(7): n is a, c, g, or u
acaacanguuggugagug

SEQ ID NO: 120630 - RNA, 19 nt, Artificial Sequence
  Synthetic
  misc_feature (8)..(8): n is a, c, g, or u
gacaacanguuggugagug

SEQ ID NO: 120631 - RNA, 20 nt, Artificial Sequence
  Synthetic
  misc_feature (9)..(9): n is a, c, g, or u
ggacaacanguuggugagug

SEQ ID NO: 120632 - RNA, 21 nt, Artificial Sequence
  Synthetic
  misc_feature (10)..(10): n is a, c, g, or u
aggacaacanguuggugagug

SEQ ID NO: 120633 - RNA, 22 nt, Artificial Sequence
  Synthetic
  misc_feature (11)..(11): n is a, c, g, or u
gaggacaacanguuggugagug

SEQ ID NO: 120634 - RNA, 23 nt, Artificial Sequence
  Synthetic
  misc_feature (12)..(12): n is a, c, g, or u
ggaggacaacanguuggugagug

SEQ ID NO: 120635 - RNA, 24 nt, Artificial Sequence
  Synthetic
  misc_feature (13)..(13): n is a, c, g, or u
uggaggacaacanguuggugagug

SEQ ID NO: 120636 - RNA, 18 nt, Artificial Sequence
  Synthetic
uggucuccaugcgacgug

SEQ ID NO: 120637 - RNA, 19 nt, Artificial Sequence
  Synthetic
guggucuccaugcgacgug

SEQ ID NO: 120638 - RNA, 20 nt, Artificial Sequence
  Synthetic
gguggucuccaugcgacgug

SEQ ID NO: 120639 - RNA, 21 nt, Artificial Sequence
  Synthetic
cgguggucuccaugcgacgug

SEQ ID NO: 120640 - RNA, 22 nt, Artificial Sequence
  Synthetic
acgguggucuccaugcgacgug

SEQ ID NO: 120641 - RNA, 23 nt, Artificial Sequence
  Synthetic
cacgguggucuccaugcgacgug

SEQ ID NO: 120642 - RNA, 24 nt, Artificial Sequence
  Synthetic
ucacgguggucuccaugcgacgug

SEQ ID NO: 120643 - RNA, 18 nt, Artificial Sequence
  Synthetic
uuacuucccacccaggug

SEQ ID NO: 120644 - RNA, 19 nt, Artificial Sequence
  Synthetic
auuacuucccacccaggug

SEQ ID NO: 120645 - RNA, 20 nt, Artificial Sequence
  Synthetic
aauuacuucccacccaggug

SEQ ID NO: 120646 - RNA, 21 nt, Artificial Sequence
  Synthetic
aaauuacuucccacccaggug

SEQ ID NO: 120647 - RNA, 22 nt, Artificial Sequence
  Synthetic
caaauuacuucccacccaggug

SEQ ID NO: 120648 - RNA, 23 nt, Artificial Sequence
  Synthetic
ccaaauuacuucccacccaggug

SEQ ID NO: 120649 - RNA, 24 nt, Artificial Sequence
  Synthetic
uccaaauuacuucccacccaggug

SEQ ID NO: 120650 - RNA, 18 nt, Artificial Sequence
  Synthetic
gaugauuaggcagaggug

SEQ ID NO: 120651 - RNA, 19 nt, Artificial Sequence
  Synthetic
agaugauuaggcagaggug

SEQ ID NO: 120652 - RNA, 20 nt, Artificial Sequence
  Synthetic
gagaugauuaggcagaggug

SEQ ID NO: 120653 - RNA, 21 nt, Artificial Sequence
  Synthetic
  misc_feature (1)..(1): n is a, c, g, or u
ngagaugauuaggcagaggug

SEQ ID NO: 120654 - RNA, 22 nt, Artificial Sequence
  Synthetic
  misc_feature (2)..(2): n is a, c, g, or u
angagaugauuaggcagaggug

SEQ ID NO: 120655 - RNA, 23 nt, Artificial Sequence
  Synthetic
  misc_feature (3)..(3): n is a, c, g, or u
cangagaugauuaggcagaggug

SEQ ID NO: 120656 - RNA, 24 nt, Artificial Sequence
  Synthetic
  misc_feature (4)..(4): n is a, c, g, or u
acangagaugauuaggcagaggug

SEQ ID NO: 120657 - RNA, 18 nt, Artificial Sequence
  Synthetic
uacagagcagaggcggug

SEQ ID NO: 120658 - RNA, 19 nt, Artificial Sequence
  Synthetic
auacagagcagaggcggug

SEQ ID NO: 120659 - RNA, 20 nt, Artificial Sequence
  Synthetic
gauacagagcagaggcggug

SEQ ID NO: 120660 - RNA, 21 nt, Artificial Sequence
  Synthetic
cgauacagagcagaggcggug

SEQ ID NO: 120661 - RNA, 22 nt, Artificial Sequence
  Synthetic
ccgauacagagcagaggcggug

SEQ ID NO: 120662 - RNA, 23 nt, Artificial Sequence
  Synthetic
cccgauacagagcagaggcggug

SEQ ID NO: 120663 - RNA, 24 nt, Artificial Sequence
  Synthetic
ucccgauacagagcagaggcggug

SEQ ID NO: 120664 - RNA, 18 nt, Artificial Sequence
  Synthetic
  misc_feature (11)..(11): n is a, c, g, or u
gaggacaacanguuggug

SEQ ID NO: 120665 - RNA, 19 nt, Artificial Sequence
  Synthetic
  misc_feature (12)..(12): n is a, c, g, or u
ggaggacaacanguuggug

SEQ ID NO: 120666 - RNA, 20 nt, Artificial Sequence
  Synthetic
  misc_feature (13)..(13): n is a, c, g, or u
uggaggacaacanguuggug

SEQ ID NO: 120667 - RNA, 21 nt, Artificial Sequence
  Synthetic
  misc_feature (14)..(14): n is a, c, g, or u
uuggaggacaacanguuggug

SEQ ID NO: 120668 - RNA, 22 nt, Artificial Sequence
  Synthetic
  misc_feature (15)..(15): n is a, c, g, or u
auuggaggacaacanguuggug

SEQ ID NO: 120669 - RNA, 23 nt, Artificial Sequence
  Synthetic
  misc_feature (16)..(16): n is a, c, g, or u
aauuggaggacaacanguuggug

SEQ ID NO: 120670 - RNA, 24 nt, Artificial Sequence
  Synthetic
  misc_feature (17)..(17): n is a, c, g, or u
aaauuggaggacaacanguuggug

SEQ ID NO: 120671 - RNA, 18 nt, Artificial Sequence
  Synthetic
  misc_feature (15)..(15): n is a, c, g, or u
agaguuugguggaangug

SEQ ID NO: 120672 - RNA, 19 nt, Artificial Sequence
  Synthetic
  misc_feature (16)..(16): n is a, c, g, or u
aagaguuugguggaangug

SEQ ID NO: 120673 - RNA, 20 nt, Artificial Sequence
  Synthetic
  misc_feature (17)..(17): n is a, c, g, or u
gaagaguuugguggaangug

SEQ ID NO: 120674 - RNA, 21 nt, Artificial Sequence
  Synthetic
  misc_feature (18)..(18): n is a, c, g, or u
ugaagaguuugguggaangug

SEQ ID NO: 120675 - RNA, 22 nt, Artificial Sequence
  Synthetic
  misc_feature (19)..(19): n is a, c, g, or u
uugaagaguuugguggaangug

SEQ ID NO: 120676 - RNA, 23 nt, Artificial Sequence
  Synthetic
  misc_feature (20)..(20): n is a, c, g, or u
cuugaagaguuugguggaangug

SEQ ID NO: 120677 - RNA, 24 nt, Artificial Sequence
  Synthetic
  misc_feature (21)..(21): n is a, c, g, or u
ucuugaagaguuugguggaangug

SEQ ID NO: 120678 - RNA, 18 nt, Artificial Sequence
  Synthetic
  misc_feature (4)..(4): n is a, c, g, or u
guunccccuagaaaauug

SEQ ID NO: 120679 - RNA, 19 nt, Artificial Sequence
  Synthetic
  misc_feature (5)..(5): n is a, c, g, or u
uguunccccuagaaaauug

SEQ ID NO: 120680 - RNA, 20 nt, Artificial Sequence
  Synthetic
  misc_feature (6)..(6): n is a, c, g, or u
guguunccccuagaaaauug

SEQ ID NO: 120681 - RNA, 21 nt, Artificial Sequence
  Synthetic
  misc_feature (7)..(7): n is a, c, g, or u
gguguunccccuagaaaauug

SEQ ID NO: 120682 - RNA, 22 nt, Artificial Sequence
  Synthetic
  misc_feature (8)..(8): n is a, c, g, or u
ggguguunccccuagaaaauug

SEQ ID NO: 120683 - RNA, 23 nt, Artificial Sequence
  Synthetic
  misc_feature (9)..(9): n is a, c, g, or u
cggguguunccccuagaaaauug

SEQ ID NO: 120684 - RNA, 24 nt, Artificial Sequence
  Synthetic
  misc_feature (10)..(10): n is a, c, g, or u
acggguguunccccuagaaaauug

SEQ ID NO: 120685 - RNA, 18 nt, Artificial Sequence
  Synthetic
gauaaccaggacaaauug

SEQ ID NO: 120686 - RNA, 19 nt, Artificial Sequence
  Synthetic
cgauaaccaggacaaauug

SEQ ID NO: 120687 - RNA, 20 nt, Artificial Sequence
  Synthetic
gcgauaaccaggacaaauug

SEQ ID NO: 120688 - RNA, 21 nt, Artificial Sequence
  Synthetic
agcgauaaccaggacaaauug

SEQ ID NO: 120689 - RNA, 22 nt, Artificial Sequence
  Synthetic
cagcgauaaccaggacaaauug

SEQ ID NO: 120690 - RNA, 23 nt, Artificial Sequence
  Synthetic
ccagcgauaaccaggacaaauug

SEQ ID NO: 120691 - RNA, 24 nt, Artificial Sequence
  Synthetic
uccagcgauaaccaggacaaauug

SEQ ID NO: 120692 - RNA, 18 nt, Artificial Sequence
  Synthetic
ggucggucguugacauug

SEQ ID NO: 120693 - RNA, 19 nt, Artificial Sequence
  Synthetic
aggucggucguugacauug

SEQ ID NO: 120694 - RNA, 20 nt, Artificial Sequence
  Synthetic
aaggucggucguugacauug

SEQ ID NO: 120695 - RNA, 18 nt, Artificial Sequence
  Synthetic
cuuccugacugccgauug

SEQ ID NO: 120696 - RNA, 19 nt, Artificial Sequence
  Synthetic
ccuuccugacugccgauug

SEQ ID NO: 120697 - RNA, 20 nt, Artificial Sequence
  Synthetic
gccuuccugacugccgauug

SEQ ID NO: 120698 - RNA, 21 nt, Artificial Sequence
  Synthetic
ugccuuccugacugccgauug

SEQ ID NO: 120699 - RNA, 22 nt, Artificial Sequence
  Synthetic
cugccuuccugacugccgauug

SEQ ID NO: 120700 - RNA, 23 nt, Artificial Sequence
  Synthetic
gcugccuuccugacugccgauug

SEQ ID NO: 120701 - RNA, 24 nt, Artificial Sequence
  Synthetic
ggcugccuuccugacugccgauug

SEQ ID NO: 120702 - RNA, 18 nt, Artificial Sequence
  Synthetic
cuagacucugugguauug

SEQ ID NO: 120703 - RNA, 19 nt, Artificial Sequence
  Synthetic
ucuagacucugugguauug

SEQ ID NO: 120704 - RNA, 20 nt, Artificial Sequence
  Synthetic
gucuagacucugugguauug

SEQ ID NO: 120705 - RNA, 21 nt, Artificial Sequence
  Synthetic
agucuagacucugugguauug

SEQ ID NO: 120706 - RNA, 22 nt, Artificial Sequence
  Synthetic
gagucuagacucugugguauug

SEQ ID NO: 120707 - RNA, 23 nt, Artificial Sequence
  Synthetic
cgagucuagacucugugguauug

SEQ ID NO: 120708 - RNA, 24 nt, Artificial Sequence
  Synthetic
acgagucuagacucugugguauug

SEQ ID NO: 120709 - RNA, 18 nt, Artificial Sequence
  Synthetic
cucuuaugcaagaccuug

SEQ ID NO: 120710 - RNA, 19 nt, Artificial Sequence
  Synthetic
ccucuuaugcaagaccuug

SEQ ID NO: 120711 - RNA, 20 nt, Artificial Sequence
  Synthetic
uccucuuaugcaagaccuug

SEQ ID NO: 120712 - RNA, 21 nt, Artificial Sequence
  Synthetic
guccucuuaugcaagaccuug

SEQ ID NO: 120713 - RNA, 22 nt, Artificial Sequence
  Synthetic
aguccucuuaugcaagaccuug

SEQ ID NO: 120714 - RNA, 23 nt, Artificial Sequence
  Synthetic
gaguccucuuaugcaagaccuug

SEQ ID NO: 120715 - RNA, 24 nt, Artificial Sequence
  Synthetic
agaguccucuuaugcaagaccuug

SEQ ID NO: 120716 - RNA, 18 nt, Artificial Sequence
  Synthetic
uccggccaguuguccuug

SEQ ID NO: 120717 - RNA, 19 nt, Artificial Sequence
  Synthetic
guccggccaguuguccuug

SEQ ID NO: 120718 - RNA, 20 nt, Artificial Sequence
  Synthetic
cguccggccaguuguccuug

SEQ ID NO: 120719 - RNA, 18 nt, Artificial Sequence
  Synthetic
aaacauagagguuccuug

SEQ ID NO: 120720 - RNA, 19 nt, Artificial Sequence
  Synthetic
gaaacauagagguuccuug

SEQ ID NO: 120721 - RNA, 20 nt, Artificial Sequence
  Synthetic
ggaaacauagagguuccuug

SEQ ID NO: 120722 - RNA, 21 nt, Artificial Sequence
  Synthetic
gggaaacauagagguuccuug

SEQ ID NO: 120723 - RNA, 22 nt, Artificial Sequence
  Synthetic
agggaaacauagagguuccuug

SEQ ID NO: 120724 - RNA, 23 nt, Artificial Sequence
  Synthetic
gagggaaacauagagguuccuug

SEQ ID NO: 120725 - RNA, 24 nt, Artificial Sequence
  Synthetic
ugagggaaacauagagguuccuug

SEQ ID NO: 120726 - RNA, 18 nt, Artificial Sequence
  Synthetic
ccaacacagaauagcuug

SEQ ID NO: 120727 - RNA, 19 nt, Artificial Sequence
  Synthetic
cccaacacagaauagcuug

SEQ ID NO: 120728 - RNA, 20 nt, Artificial Sequence
  Synthetic
ccccaacacagaauagcuug

SEQ ID NO: 120729 - RNA, 21 nt, Artificial Sequence
  Synthetic
accccaacacagaauagcuug

SEQ ID NO: 120730 - RNA, 22 nt, Artificial Sequence
  Synthetic
caccccaacacagaauagcuug

SEQ ID NO: 120731 - RNA, 23 nt, Artificial Sequence
  Synthetic
ucaccccaacacagaauagcuug

SEQ ID NO: 120732 - RNA, 24 nt, Artificial Sequence
  Synthetic
cucaccccaacacagaauagcuug

SEQ ID NO: 120733 - RNA, 18 nt, Artificial Sequence
  Synthetic
gaaaggccuuguaaguug

SEQ ID NO: 120734 - RNA, 19 nt, Artificial Sequence
  Synthetic
agaaaggccuuguaaguug

SEQ ID NO: 120735 - RNA, 20 nt, Artificial Sequence
  Synthetic
uagaaaggccuuguaaguug

SEQ ID NO: 120736 - RNA, 21 nt, Artificial Sequence
  Synthetic
uuagaaaggccuuguaaguug

SEQ ID NO: 120737 - RNA, 22 nt, Artificial Sequence
  Synthetic
cuuagaaaggccuuguaaguug

SEQ ID NO: 120738 - RNA, 23 nt, Artificial Sequence
  Synthetic
  misc_feature (1)..(1): n is a, c, g, or u
ncuuagaaaggccuuguaaguug

SEQ ID NO: 120739 - RNA, 24 nt, Artificial Sequence
  Synthetic
  misc_feature (2)..(2): n is a, c, g, or u
uncuuagaaaggccuuguaaguug

SEQ ID NO: 120740 - RNA, 18 nt, Artificial Sequence
  Synthetic
  misc_feature (12)..(12): n is a, c, g, or u
gcacagaccagnccguug

SEQ ID NO: 120741 - RNA, 19 nt, Artificial Sequence
  Synthetic
  misc_feature (13)..(13): n is a, c, g, or u
ggcacagaccagnccguug

SEQ ID NO: 120742 - RNA, 20 nt, Artificial Sequence
  Synthetic
  misc_feature (14)..(14): n is a, c, g, or u
uggcacagaccagnccguug

SEQ ID NO: 120743 - RNA, 21 nt, Artificial Sequence
  Synthetic
  misc_feature (15)..(15): n is a, c, g, or u
uuggcacagaccagnccguug

SEQ ID NO: 120744 - RNA, 22 nt, Artificial Sequence
  Synthetic
  misc_feature (16)..(16): n is a, c, g, or u
cuuggcacagaccagnccguug

SEQ ID NO: 120745 - RNA, 23 nt, Artificial Sequence
  Synthetic
  misc_feature (17)..(17): n is a, c, g, or u
acuuggcacagaccagnccguug

SEQ ID NO: 120746 - RNA, 24 nt, Artificial Sequence
  Synthetic
  misc_feature (18)..(18): n is a, c, g, or u
cacuuggcacagaccagnccguug

SEQ ID NO: 120747 - RNA, 18 nt, Artificial Sequence
  Synthetic
aagggacucaagauguug

SEQ ID NO: 120748 - RNA, 19 nt, Artificial Sequence
  Synthetic
aaagggacucaagauguug

SEQ ID NO: 120749 - RNA, 20 nt, Artificial Sequence
  Synthetic
uaaagggacucaagauguug

SEQ ID NO: 120750 - RNA, 21 nt, Artificial Sequence
  Synthetic
auaaagggacucaagauguug

SEQ ID NO: 120751 - RNA, 22 nt, Artificial Sequence
  Synthetic
  misc_feature (1)..(1): n is a, c, g, or u
nauaaagggacucaagauguug

SEQ ID NO: 120752 - RNA, 23 nt, Artificial Sequence
  Synthetic
  misc_feature (2)..(2): n is a, c, g, or u
gnauaaagggacucaagauguug

SEQ ID NO: 120753 - RNA, 24 nt, Artificial Sequence
  Synthetic
  misc_feature (3)..(3): n is a, c, g, or u
ggnauaaagggacucaagauguug

SEQ ID NO: 120754 - RNA, 18 nt, Artificial Sequence
  Synthetic
uaguuuccggaaguguug

SEQ ID NO: 120755 - RNA, 19 nt, Artificial Sequence
  Synthetic
guaguuuccggaaguguug

SEQ ID NO: 120756 - RNA, 20 nt, Artificial Sequence
  Synthetic
aguaguuuccggaaguguug

SEQ ID NO: 120757 - RNA, 21 nt, Artificial Sequence
  Synthetic
caguaguuuccggaaguguug

SEQ ID NO: 120758 - RNA, 22 nt, Artificial Sequence
  Synthetic
acaguaguuuccggaaguguug

SEQ ID NO: 120759 - RNA, 23 nt, Artificial Sequence
  Synthetic
aacaguaguuuccggaaguguug

SEQ ID NO: 120760 - RNA, 24 nt, Artificial Sequence
  Synthetic
caacaguaguuuccggaaguguug

SEQ ID NO: 120761 - RNA, 18 nt, Artificial Sequence
  Synthetic
  misc_feature (6)..(6): n is a, c, g, or u
  misc_feature (15)..(15): n is a, c, g, or u
ggaaangauguauanuug

SEQ ID NO: 120762 - RNA, 19 nt, Artificial Sequence
  Synthetic
  misc_feature (7)..(7): n is a, c, g, or u
  misc_feature (16)..(16): n is a, c, g, or u
uggaaangauguauanuug

SEQ ID NO: 120763 - RNA, 20 nt, Artificial Sequence
  Synthetic
  misc_feature (8)..(8): n is a, c, g, or u
  misc_feature (17)..(17): n is a, c, g, or u
auggaaangauguauanuug

SEQ ID NO: 120764 - RNA, 21 nt, Artificial Sequence
  Synthetic
  misc_feature (9)..(9): n is a, c, g, or u
  misc_feature (18)..(18): n is a, c, g, or u
cauggaaangauguauanuug

SEQ ID NO: 120765 - RNA, 22 nt, Artificial Sequence
  Synthetic
  misc_feature (10)..(10): n is a, c, g, or u
  misc_feature (19)..(19): n is a, c, g, or u
ccauggaaangauguauanuug

SEQ ID NO: 120766 - RNA, 23 nt, Artificial Sequence
  Synthetic
  misc_feature (11)..(11): n is a, c, g, or u
  misc_feature (20)..(20): n is a, c, g, or u
gccauggaaangauguauanuug

SEQ ID NO: 120767 - RNA, 24 nt, Artificial Sequence
  Synthetic
  misc_feature (12)..(12): n is a, c, g, or u
  misc_feature (21)..(21): n is a, c, g, or u
agccauggaaangauguauanuug

SEQ ID NO: 120768 - RNA, 18 nt, Artificial Sequence
  Synthetic
gggaucuugaagaguuug

SEQ ID NO: 120769 - RNA, 19 nt, Artificial Sequence
  Synthetic
ugggaucuugaagaguuug

SEQ ID NO: 120770 - RNA, 20 nt, Artificial Sequence
  Synthetic
cugggaucuugaagaguuug

SEQ ID NO: 120771 - RNA, 21 nt, Artificial Sequence
  Synthetic
ucugggaucuugaagaguuug

SEQ ID NO: 120772 - RNA, 22 nt, Artificial Sequence
  Synthetic
cucugggaucuugaagaguuug

SEQ ID NO: 120773 - RNA, 23 nt, Artificial Sequence
  Synthetic
acucugggaucuugaagaguuug

SEQ ID NO: 120774 - RNA, 24 nt, Artificial Sequence
  Synthetic
gacucugggaucuugaagaguuug

SEQ ID NO: 120775 - RNA, 18 nt, Artificial Sequence
  Synthetic
augccuuuucgagguuug

SEQ ID NO: 120776 - RNA, 19 nt, Artificial Sequence
  Synthetic
caugccuuuucgagguuug

SEQ ID NO: 120777 - RNA, 20 nt, Artificial Sequence
  Synthetic
ccaugccuuuucgagguuug

SEQ ID NO: 120778 - RNA, 21 nt, Artificial Sequence
  Synthetic
cccaugccuuuucgagguuug

SEQ ID NO: 120779 - RNA, 22 nt, Artificial Sequence
  Synthetic
ccccaugccuuuucgagguuug

SEQ ID NO: 120780 - RNA, 23 nt, Artificial Sequence
  Synthetic
uccccaugccuuuucgagguuug

SEQ ID NO: 120781 - RNA, 24 nt, Artificial Sequence
  Synthetic
guccccaugccuuuucgagguuug

SEQ ID NO: 120782 - RNA, 18 nt, Artificial Sequence
  Synthetic
uugggacugcgaauuuug

SEQ ID NO: 120783 - RNA, 19 nt, Artificial Sequence
  Synthetic
uuugggacugcgaauuuug

SEQ ID NO: 120784 - RNA, 20 nt, Artificial Sequence
  Synthetic
auuugggacugcgaauuuug

SEQ ID NO: 120785 - RNA, 21 nt, Artificial Sequence
  Synthetic
gauuugggacugcgaauuuug

SEQ ID NO: 120786 - RNA, 22 nt, Artificial Sequence
  Synthetic
agauuugggacugcgaauuuug

SEQ ID NO: 120787 - RNA, 23 nt, Artificial Sequence
  Synthetic
gagauuugggacugcgaauuuug

SEQ ID NO: 120788 - RNA, 24 nt, Artificial Sequence
  Synthetic
ggagauuugggacugcgaauuuug

SEQ ID NO: 120789 - RNA, 18 nt, Artificial Sequence
  Synthetic
acucccauagguauuuug

SEQ ID NO: 120790 - RNA, 19 nt, Artificial Sequence
  Synthetic
cacucccauagguauuuug

SEQ ID NO: 120791 - RNA, 20 nt, Artificial Sequence
  Synthetic
ccacucccauagguauuuug

SEQ ID NO: 120792 - RNA, 21 nt, Artificial Sequence
  Synthetic
cccacucccauagguauuuug

SEQ ID NO: 120793 - RNA, 22 nt, Artificial Sequence
  Synthetic
gcccacucccauagguauuuug

SEQ ID NO: 120794 - RNA, 23 nt, Artificial Sequence
  Synthetic
ggcccacucccauagguauuuug

SEQ ID NO: 120795 - RNA, 24 nt, Artificial Sequence
  Synthetic
aggcccacucccauagguauuuug

SEQ ID NO: 120796 - RNA, 18 nt, Artificial Sequence
  Synthetic
uuccguccguagguuuug

SEQ ID NO: 120797 - RNA, 19 nt, Artificial Sequence
  Synthetic
uuuccguccguagguuuug

SEQ ID NO: 120798 - RNA, 20 nt, Artificial Sequence
  Synthetic
guuuccguccguagguuuug

SEQ ID NO: 120799 - RNA, 18 nt, Artificial Sequence
  Synthetic
  misc_feature (7)..(7): n is a, c, g, or u
  misc_feature (18)..(18): n is a, c, g, or u
gucgagnagaucucgaan

SEQ ID NO: 120800 - RNA, 19 nt, Artificial Sequence
  Synthetic
  misc_feature (8)..(8): n is a, c, g, or u
  misc_feature (19)..(19): n is a, c, g, or u
ugucgagnagaucucgaan

SEQ ID NO: 120801 - RNA, 20 nt, Artificial Sequence
  Synthetic
  misc_feature (9)..(9): n is a, c, g, or u
  misc_feature (20)..(20): n is a, c, g, or u
gugucgagnagaucucgaan

SEQ ID NO: 120802 - RNA, 21 nt, Artificial Sequence
  Synthetic
  misc_feature (10)..(10): n is a, c, g, or u
  misc_feature (21)..(21): n is a, c, g, or u
ggugucgagnagaucucgaan

SEQ ID NO: 120803 - RNA, 22 nt, Artificial Sequence
  Synthetic
  misc_feature (11)..(11): n is a, c, g, or u
  misc_feature (22)..(22): n is a, c, g, or u
cggugucgagnagaucucgaan

SEQ ID NO: 120804 - RNA, 23 nt, Artificial Sequence
  Synthetic
  misc_feature (12)..(12): n is a, c, g, or u
  misc_feature (23)..(23): n is a, c, g, or u
gcggugucgagnagaucucgaan

SEQ ID NO: 120805 - RNA, 24 nt, Artificial Sequence
  Synthetic
  misc_feature (13)..(13): n is a, c, g, or u
  misc_feature (24)..(24): n is a, c, g, or u
ggcggugucgagnagaucucgaan

SEQ ID NO: 120806 - RNA, 18 nt, Artificial Sequence
  Synthetic
  misc_feature (18)..(18): n is a, c, g, or u
aaagaaggaguuugccan

SEQ ID NO: 120807 - RNA, 19 nt, Artificial Sequence
  Synthetic
  misc_feature (19)..(19): n is a, c, g, or u
aaaagaaggaguuugccan

SEQ ID NO: 120808 - RNA, 20 nt, Artificial Sequence
  Synthetic
  misc_feature (20)..(20): n is a, c, g, or u
gaaaagaaggaguuugccan

SEQ ID NO: 120809 - RNA, 21 nt, Artificial Sequence
  Synthetic
  misc_feature (21)..(21): n is a, c, g, or u
ggaaaagaaggaguuugccan

SEQ ID NO: 120810 - RNA, 22 nt, Artificial Sequence
  Synthetic
  misc_feature (22)..(22): n is a, c, g, or u
aggaaaagaaggaguuugccan

SEQ ID NO: 120811 - RNA, 23 nt, Artificial Sequence
  Synthetic
  misc_feature (23)..(23): n is a, c, g, or u
caggaaaagaaggaguuugccan

SEQ ID NO: 120812 - RNA, 24 nt, Artificial Sequence
  Synthetic
  misc_feature (24)..(24): n is a, c, g, or u
ucaggaaaagaaggaguuugccan

SEQ ID NO: 120813 - RNA, 18 nt, Artificial Sequence
  Synthetic
  misc_feature (18)..(18): n is a, c, g, or u
auccacacuccaaaagan

SEQ ID NO: 120814 - RNA, 19 nt, Artificial Sequence
  Synthetic
  misc_feature (19)..(19): n is a, c, g, or u
aauccacacuccaaaagan

SEQ ID NO: 120815 - RNA, 20 nt, Artificial Sequence
  Synthetic
  misc_feature (20)..(20): n is a, c, g, or u
gaauccacacuccaaaagan

SEQ ID NO: 120816 - RNA, 21 nt, Artificial Sequence
  Synthetic
  misc_feature (21)..(21): n is a, c, g, or u
cgaauccacacuccaaaagan

SEQ ID NO: 120817 - RNA, 22 nt, Artificial Sequence
  Synthetic
  misc_feature (22)..(22): n is a, c, g, or u
gcgaauccacacuccaaaagan

SEQ ID NO: 120818 - RNA, 23 nt, Artificial Sequence
  Synthetic
  misc_feature (23)..(23): n is a, c, g, or u
ugcgaauccacacuccaaaagan

SEQ ID NO: 120819 - RNA, 24 nt, Artificial Sequence
  Synthetic
  misc_feature (24)..(24): n is a, c, g, or u
gugcgaauccacacuccaaaagan

SEQ ID NO: 120820 - RNA, 18 nt, Artificial Sequence
  Synthetic
  misc_feature (3)..(3): n is a, c, g, or u
  misc_feature (18)..(18): n is a, c, g, or u
ucncuuagagguggagan

SEQ ID NO: 120821 - RNA, 19 nt, Artificial Sequence
  Synthetic
  misc_feature (4)..(4): n is a, c, g, or u
  misc_feature (19)..(19): n is a, c, g, or u
gucncuuagagguggagan

SEQ ID NO: 120822 - RNA, 20 nt, Artificial Sequence
  Synthetic
  misc_feature (5)..(5): n is a, c, g, or u
  misc_feature (20)..(20): n is a, c, g, or u
ugucncuuagagguggagan

SEQ ID NO: 120823 - RNA, 21 nt, Artificial Sequence
  Synthetic
  misc_feature (6)..(6): n is a, c, g, or u
  misc_feature (21)..(21): n is a, c, g, or u
gugucncuuagagguggagan

SEQ ID NO: 120824 - RNA, 22 nt, Artificial Sequence
  Synthetic
  misc_feature (7)..(7): n is a, c, g, or u
  misc_feature (22)..(22): n is a, c, g, or u
agugucncuuagagguggagan

SEQ ID NO: 120825 - RNA, 23 nt, Artificial Sequence
  Synthetic
  misc_feature (8)..(8): n is a, c, g, or u
  misc_feature (23)..(23): n is a, c, g, or u
gagugucncuuagagguggagan

SEQ ID NO: 120826 - RNA, 24 nt, Artificial Sequence
  Synthetic
  misc_feature (9)..(9): n is a, c, g, or u
  misc_feature (24)..(24): n is a, c, g, or u
ugagugucncuuagagguggagan

SEQ ID NO: 120827 - RNA, 18 nt, Artificial Sequence
  Synthetic
  misc_feature (18)..(18): n is a, c, g, or u
gaccuugggcagguuccn

SEQ ID NO: 120828 - RNA, 19 nt, Artificial Sequence
  Synthetic
  misc_feature (19)..(19): n is a, c, g, or u
agaccuugggcagguuccn

SEQ ID NO: 120829 - RNA, 20 nt, Artificial Sequence
  Synthetic
  misc_feature (20)..(20): n is a, c, g, or u
aagaccuugggcagguuccn

SEQ ID NO: 120830 - RNA, 21 nt, Artificial Sequence
  Synthetic
  misc_feature (21)..(21): n is a, c, g, or u
caagaccuugggcagguuccn

SEQ ID NO: 120831 - RNA, 22 nt, Artificial Sequence
  Synthetic
  misc_feature (22)..(22): n is a, c, g, or u
gcaagaccuugggcagguuccn

SEQ ID NO: 120832 - RNA, 23 nt, Artificial Sequence
  Synthetic
  misc_feature (23)..(23): n is a, c, g, or u
ugcaagaccuugggcagguuccn

SEQ ID NO: 120833 - RNA, 24 nt, Artificial Sequence
  Synthetic
  misc_feature (24)..(24): n is a, c, g, or u
augcaagaccuugggcagguuccn

SEQ ID NO: 120834 - RNA, 18 nt, Artificial Sequence
  Synthetic
  misc_feature (6)..(6): n is a, c, g, or u
  misc_feature (9)..(9): n is a, c, g, or u
  misc_feature (18)..(18): n is a, c, g, or u
cauugngunaaaggggcn

SEQ ID NO: 120835 - RNA, 19 nt, Artificial Sequence
  Synthetic
  misc_feature (7)..(7): n is a, c, g, or u
  misc_feature (10)..(10): n is a, c, g, or u
  misc_feature (19)..(19): n is a, c, g, or u
acauugngunaaaggggcn

SEQ ID NO: 120836 - RNA, 20 nt, Artificial Sequence
  Synthetic
  misc_feature (8)..(8): n is a, c, g, or u
  misc_feature (11)..(11): n is a, c, g, or u
  misc_feature (20)..(20): n is a, c, g, or u
cacauugngunaaaggggcn

SEQ ID NO: 120837 - RNA, 21 nt, Artificial Sequence
  Synthetic
  misc_feature (9)..(9): n is a, c, g, or u
  misc_feature (12)..(12): n is a, c, g, or u
  misc_feature (21)..(21): n is a, c, g, or u
ccacauugngunaaaggggcn

SEQ ID NO: 120838 - RNA, 22 nt, Artificial Sequence
  Synthetic
  misc_feature (1)..(1): n is a, c, g, or u
  misc_feature (10)..(10): n is a, c, g, or u
  misc_feature (13)..(13): n is a, c, g, or u
  misc_feature (22)..(22): n is a, c, g, or u
nccacauugngunaaaggggcn

SEQ ID NO: 120839 - RNA, 23 nt, Artificial Sequence
  Synthetic
  misc_feature (2)..(2): n is a, c, g, or u
  misc_feature (11)..(11): n is a, c, g, or u
  misc_feature (14)..(14): n is a, c, g, or u
  misc_feature (23)..(23): n is a, c, g, or u
anccacauugngunaaaggggcn

SEQ ID NO: 120840 - RNA, 24 nt, Artificial Sequence
  Synthetic
  misc_feature (3)..(3): n is a, c, g, or u
  misc_feature (12)..(12): n is a, c, g, or u
  misc_feature (15)..(15): n is a, c, g, or u
  misc_feature (24)..(24): n is a, c, g, or u
uanccacauugngunaaaggggcn

SEQ ID NO: 120841 - RNA, 18 nt, Artificial Sequence
  Synthetic
  misc_feature (15)..(15): n is a, c, g, or u
  misc_feature (18)..(18): n is a, c, g, or u
gucccgaugaguuungcn

SEQ ID NO: 120842 - RNA, 19 nt, Artificial Sequence
  Synthetic
  misc_feature (16)..(16): n is a, c, g, or u
  misc_feature (19)..(19): n is a, c, g, or u
agucccgaugaguuungcn

SEQ ID NO: 120843 - RNA, 20 nt, Artificial Sequence
  Synthetic
  misc_feature (17)..(17): n is a, c, g, or u
  misc_feature (20)..(20): n is a, c, g, or u
cagucccgaugaguuungcn

SEQ ID NO: 120844 - RNA, 21 nt, Artificial Sequence
  Synthetic
  misc_feature (18)..(18): n is a, c, g, or u
  misc_feature (21)..(21): n is a, c, g, or u
ucagucccgaugaguuungcn

SEQ ID NO: 120845 - RNA, 22 nt, Artificial Sequence
  Synthetic
  misc_feature (19)..(19): n is a, c, g, or u
  misc_feature (22)..(22): n is a, c, g, or u
gucagucccgaugaguuungcn

SEQ ID NO: 120846 - RNA, 23 nt, Artificial Sequence
  Synthetic
  misc_feature (20)..(20): n is a, c, g, or u
  misc_feature (23)..(23): n is a, c, g, or u
ugucagucccgaugaguuungcn

SEQ ID NO: 120847 - RNA, 24 nt, Artificial Sequence
  Synthetic
  misc_feature (21)..(21): n is a, c, g, or u
  misc_feature (24)..(24): n is a, c, g, or u
uugucagucccgaugaguuungcn

SEQ ID NO: 120848 - RNA, 18 nt, Artificial Sequence
  Synthetic
  misc_feature (18)..(18): n is a, c, g, or u
gccugaggaugagugucn

SEQ ID NO: 120849 - RNA, 19 nt, Artificial Sequence
  Synthetic
  misc_feature (19)..(19): n is a, c, g, or u
ggccugaggaugagugucn

SEQ ID NO: 120850 - RNA, 20 nt, Artificial Sequence
  Synthetic
  misc_feature (20)..(20): n is a, c, g, or u
uggccugaggaugagugucn

SEQ ID NO: 120851 - RNA, 21 nt, Artificial Sequence
  Synthetic
  misc_feature (21)..(21): n is a, c, g, or u
auggccugaggaugagugucn

SEQ ID NO: 120852 - RNA, 22 nt, Artificial Sequence
  Synthetic
  misc_feature (22)..(22): n is a, c, g, or u
cauggccugaggaugagugucn

SEQ ID NO: 120853 - RNA, 23 nt, Artificial Sequence
  Synthetic
  misc_feature (23)..(23): n is a, c, g, or u
gcauggccugaggaugagugucn

SEQ ID NO: 120854 - RNA, 24 nt, Artificial Sequence
  Synthetic
  misc_feature (24)..(24): n is a, c, g, or u
ugcauggccugaggaugagugucn

SEQ ID NO: 120855 - RNA, 18 nt, Artificial Sequence
  Synthetic
  misc_feature (6)..(6): n is a, c, g, or u
  misc_feature (18)..(18): n is a, c, g, or u
uuuugnacaauauguucn

SEQ ID NO: 120856 - RNA, 19 nt, Artificial Sequence
  Synthetic
  misc_feature (7)..(7): n is a, c, g, or u
  misc_feature (19)..(19): n is a, c, g, or u
uuuuugnacaauauguucn

SEQ ID NO: 120857 - RNA, 20 nt, Artificial Sequence
  Synthetic
  misc_feature (8)..(8): n is a, c, g, or u
  misc_feature (20)..(20): n is a, c, g, or u
uuuuuugnacaauauguucn

SEQ ID NO: 120858 - RNA, 21 nt, Artificial Sequence
  Synthetic
  misc_feature (9)..(9): n is a, c, g, or u
  misc_feature (21)..(21): n is a, c, g, or u
auuuuuugnacaauauguucn

SEQ ID NO: 120859 - RNA, 22 nt, Artificial Sequence
  Synthetic
  misc_feature (10)..(10): n is a, c, g, or u
  misc_feature (22)..(22): n is a, c, g, or u
gauuuuuugnacaauauguucn

SEQ ID NO: 120860 - RNA, 23 nt, Artificial Sequence
  Synthetic
  misc_feature (11)..(11): n is a, c, g, or u
  misc_feature (23)..(23): n is a, c, g, or u
ugauuuuuugnacaauauguucn

SEQ ID NO: 120861 - RNA, 24 nt, Artificial Sequence
  Synthetic
  misc_feature (12)..(12): n is a, c, g, or u
  misc_feature (24)..(24): n is a, c, g, or u
uugauuuuuugnacaauauguucn

SEQ ID NO: 120862 - RNA, 18 nt, Artificial Sequence
  Synthetic
  misc_feature (13)..(14): n is a, c, g, or u
  misc_feature (18)..(18): n is a, c, g, or u
gucggucgguacnncagn

SEQ ID NO: 120863 - RNA, 19 nt, Artificial Sequence
  Synthetic
  misc_feature (14)..(15): n is a, c, g, or u
  misc_feature (19)..(19): n is a, c, g, or u
ggucggucgguacnncagn

SEQ ID NO: 120864 - RNA, 20 nt, Artificial Sequence
  Synthetic
  misc_feature (15)..(16): n is a, c, g, or u
  misc_feature (20)..(20): n is a, c, g, or u
uggucggucgguacnncagn

SEQ ID NO: 120865 - RNA, 21 nt, Artificial Sequence
  Synthetic
  misc_feature (16)..(17): n is a, c, g, or u
  misc_feature (21)..(21): n is a, c, g, or u
guggucggucgguacnncagn

SEQ ID NO: 120866 - RNA, 22 nt, Artificial Sequence
  Synthetic
  misc_feature (17)..(18): n is a, c, g, or u
  misc_feature (22)..(22): n is a, c, g, or u
cguggucggucgguacnncagn

SEQ ID NO: 120867 - RNA, 23 nt, Artificial Sequence
  Synthetic
  misc_feature (18)..(19): n is a, c, g, or u
  misc_feature (23)..(23): n is a, c, g, or u
ccguggucggucgguacnncagn

SEQ ID NO: 120868 - RNA, 24 nt, Artificial Sequence
  Synthetic
  misc_feature (19)..(20): n is a, c, g, or u
  misc_feature (24)..(24): n is a, c, g, or u
cccguggucggucgguacnncagn

SEQ ID NO: 120869 - RNA, 18 nt, Artificial Sequence
  Synthetic
  misc_feature (18)..(18): n is a, c, g, or u
agucccccauggggaggn

SEQ ID NO: 120870 - RNA, 19 nt, Artificial Sequence
  Synthetic
  misc_feature (19)..(19): n is a, c, g, or u
cagucccccauggggaggn

SEQ ID NO: 120871 - RNA, 20 nt, Artificial Sequence
  Synthetic
  misc_feature (20)..(20): n is a, c, g, or u
acagucccccauggggaggn

SEQ ID NO: 120872 - RNA, 21 nt, Artificial Sequence
  Synthetic
  misc_feature (21)..(21): n is a, c, g, or u
aacagucccccauggggaggn

SEQ ID NO: 120873 - RNA, 22 nt, Artificial Sequence
  Synthetic
  misc_feature (22)..(22): n is a, c, g, or u
caacagucccccauggggaggn

SEQ ID NO: 120874 - RNA, 23 nt, Artificial Sequence
  Synthetic
  misc_feature (23)..(23): n is a, c, g, or u
ccaacagucccccauggggaggn

SEQ ID NO: 120875 - RNA, 24 nt, Artificial Sequence
  Synthetic
  misc_feature (24)..(24): n is a, c, g, or u
cccaacagucccccauggggaggn

SEQ ID NO: 120876 - RNA, 18 nt, Artificial Sequence
  Synthetic
  misc_feature (18)..(18): n is a, c, g, or u
aaaauugguaacagcggn

SEQ ID NO: 120877 - RNA, 19 nt, Artificial Sequence
  Synthetic
  misc_feature (19)..(19): n is a, c, g, or u
gaaaauugguaacagcggn

SEQ ID NO: 120878 - RNA, 20 nt, Artificial Sequence
  Synthetic
  misc_feature (20)..(20): n is a, c, g, or u
agaaaauugguaacagcggn

SEQ ID NO: 120879 - RNA, 21 nt, Artificial Sequence
  Synthetic
  misc_feature (21)..(21): n is a, c, g, or u
aagaaaauugguaacagcggn

SEQ ID NO: 120880 - RNA, 22 nt, Artificial Sequence
  Synthetic
  misc_feature (22)..(22): n is a, c, g, or u
aaagaaaauugguaacagcggn

SEQ ID NO: 120881 - RNA, 23 nt, Artificial Sequence
  Synthetic
  misc_feature (23)..(23): n is a, c, g, or u
aaaagaaaauugguaacagcggn

SEQ ID NO: 120882 - RNA, 24 nt, Artificial Sequence
  Synthetic
  misc_feature (24)..(24): n is a, c, g, or u
caaaagaaaauugguaacagcggn

SEQ ID NO: 120883 - RNA, 18 nt, Artificial Sequence
  Synthetic
  misc_feature (3)..(3): n is a, c, g, or u
  misc_feature (15)..(15): n is a, c, g, or u
  misc_feature (18)..(18): n is a, c, g, or u
ugnacaauauguucnugn

SEQ ID NO: 120884 - RNA, 19 nt, Artificial Sequence
  Synthetic
  misc_feature (4)..(4): n is a, c, g, or u
  misc_feature (16)..(16): n is a, c, g, or u
  misc_feature (19)..(19): n is a, c, g, or u
uugnacaauauguucnugn

SEQ ID NO: 120885 - RNA, 20 nt, Artificial Sequence
  Synthetic
  misc_feature (5)..(5): n is a, c, g, or u
  misc_feature (17)..(17): n is a, c, g, or u
  misc_feature (20)..(20): n is a, c, g, or u
uuugnacaauauguucnugn

SEQ ID NO: 120886 - RNA, 21 nt, Artificial Sequence
  Synthetic
  misc_feature (6)..(6): n is a, c, g, or u
  misc_feature (18)..(18): n is a, c, g, or u
  misc_feature (21)..(21): n is a, c, g, or u
uuuugnacaauauguucnugn

SEQ ID NO: 120887 - RNA, 22 nt, Artificial Sequence
  Synthetic
  misc_feature (7)..(7): n is a, c, g, or u
  misc_feature (19)..(19): n is a, c, g, or u
  misc_feature (22)..(22): n is a, c, g, or u
uuuuugnacaauauguucnugn

SEQ ID NO: 120888 - RNA, 23 nt, Artificial Sequence
  Synthetic
  misc_feature (8)..(8): n is a, c, g, or u
  misc_feature (20)..(20): n is a, c, g, or u
  misc_feature (23)..(23): n is a, c, g, or u
uuuuuugnacaauauguucnugn

SEQ ID NO: 120889 - RNA, 24 nt, Artificial Sequence
  Synthetic
  misc_feature (9)..(9): n is a, c, g, or u
  misc_feature (21)..(21): n is a, c, g, or u
  misc_feature (24)..(24): n is a, c, g, or u
auuuuuugnacaauauguucnugn

SEQ ID NO: 120890 - RNA, 18 nt, Artificial Sequence
  Synthetic
  misc_feature (9)..(9): n is a, c, g, or u
  misc_feature (18)..(18): n is a, c, g, or u
gcaggauanccacauugn

SEQ ID NO: 120891 - RNA, 19 nt, Artificial Sequence
  Synthetic
  misc_feature (10)..(10): n is a, c, g, or u
  misc_feature (19)..(19): n is a, c, g, or u
agcaggauanccacauugn

SEQ ID NO: 120892 - RNA, 20 nt, Artificial Sequence
  Synthetic
  misc_feature (11)..(11): n is a, c, g, or u
  misc_feature (20)..(20): n is a, c, g, or u
aagcaggauanccacauugn

SEQ ID NO: 120893 - RNA, 21 nt, Artificial Sequence
  Synthetic
  misc_feature (12)..(12): n is a, c, g, or u
  misc_feature (21)..(21): n is a, c, g, or u
aaagcaggauanccacauugn

SEQ ID NO: 120894 - RNA, 22 nt, Artificial Sequence
  Synthetic
  misc_feature (13)..(13): n is a, c, g, or u
  misc_feature (22)..(22): n is a, c, g, or u
uaaagcaggauanccacauugn

SEQ ID NO: 120895 - RNA, 23 nt, Artificial Sequence
  Synthetic
  misc_feature (14)..(14): n is a, c, g, or u
  misc_feature (23)..(23): n is a, c, g, or u
uuaaagcaggauanccacauugn

SEQ ID NO: 120896 - RNA, 24 nt, Artificial Sequence
  Synthetic
  misc_feature (15)..(15): n is a, c, g, or u
  misc_feature (24)..(24): n is a, c, g, or u
auuaaagcaggauanccacauugn

SEQ ID NO: 120897 - RNA, 18 nt, Artificial Sequence
  Synthetic
  misc_feature (18)..(18): n is a, c, g, or u
ucaagaacaguuucucun

SEQ ID NO: 120898 - RNA, 19 nt, Artificial Sequence
  Synthetic
  misc_feature (19)..(19): n is a, c, g, or u
uucaagaacaguuucucun

SEQ ID NO: 120899 - RNA, 20 nt, Artificial Sequence
  Synthetic
  misc_feature (20)..(20): n is a, c, g, or u
auucaagaacaguuucucun

SEQ ID NO: 120900 - RNA, 21 nt, Artificial Sequence
  Synthetic
  misc_feature (21)..(21): n is a, c, g, or u
uauucaagaacaguuucucun

SEQ ID NO: 120901 - RNA, 22 nt, Artificial Sequence
  Synthetic
  misc_feature (22)..(22): n is a, c, g, or u
auauucaagaacaguuucucun

SEQ ID NO: 120902 - RNA, 23 nt, Artificial Sequence
  Synthetic
  misc_feature (23)..(23): n is a, c, g, or u
aauauucaagaacaguuucucun

SEQ ID NO: 120903 - RNA, 24 nt, Artificial Sequence
  Synthetic
  misc_feature (24)..(24): n is a, c, g, or u
aaauauucaagaacaguuucucun

SEQ ID NO: 120904 - RNA, 18 nt, Artificial Sequence
  Synthetic
  misc_feature (18)..(18): n is a, c, g, or u
cccgccuuccaaagagun

SEQ ID NO: 120905 - RNA, 19 nt, Artificial Sequence
  Synthetic
  misc_feature (1)..(1): n is a, c, g, or u
  misc_feature (19)..(19): n is a, c, g, or u
ncccgccuuccaaagagun

SEQ ID NO: 120906 - RNA, 20 nt, Artificial Sequence
  Synthetic
  misc_feature (2)..(2): n is a, c, g, or u
  misc_feature (20)..(20): n is a, c, g, or u
uncccgccuuccaaagagun

SEQ ID NO: 120907 - RNA, 21 nt, Artificial Sequence
  Synthetic
  misc_feature (3)..(3): n is a, c, g, or u
  misc_feature (21)..(21): n is a, c, g, or u
auncccgccuuccaaagagun

SEQ ID NO: 120908 - RNA, 22 nt, Artificial Sequence
  Synthetic
  misc_feature (4)..(4): n is a, c, g, or u
  misc_feature (22)..(22): n is a, c, g, or u
gauncccgccuuccaaagagun

SEQ ID NO: 120909 - RNA, 23 nt, Artificial Sequence
  Synthetic
  misc_feature (5)..(5): n is a, c, g, or u
  misc_feature (23)..(23): n is a, c, g, or u
agauncccgccuuccaaagagun

SEQ ID NO: 120910 - RNA, 24 nt, Artificial Sequence
  Synthetic
  misc_feature (6)..(6): n is a, c, g, or u
  misc_feature (24)..(24): n is a, c, g, or u
aagauncccgccuuccaaagagun

SEQ ID NO: 120911 - RNA, 18 nt, Artificial Sequence
  Synthetic
  misc_feature (6)..(6): n is a, c, g, or u
  misc_feature (15)..(15): n is a, c, g, or u
  misc_feature (18)..(18): n is a, c, g, or u
ggauanccacauugngun

SEQ ID NO: 120912 - RNA, 19 nt, Artificial Sequence
  Synthetic
  misc_feature (7)..(7): n is a, c, g, or u
  misc_feature (16)..(16): n is a, c, g, or u
  misc_feature (19)..(19): n is a, c, g, or u
aggauanccacauugngun

SEQ ID NO: 120913 - RNA, 20 nt, Artificial Sequence
  Synthetic
  misc_feature (8)..(8): n is a, c, g, or u
  misc_feature (17)..(17): n is a, c, g, or u
  misc_feature (20)..(20): n is a, c, g, or u
caggauanccacauugngun

SEQ ID NO: 120914 - RNA, 21 nt, Artificial Sequence
  Synthetic
  misc_feature (9)..(9): n is a, c, g, or u
  misc_feature (18)..(18): n is a, c, g, or u
  misc_feature (21)..(21): n is a, c, g, or u
gcaggauanccacauugngun

SEQ ID NO: 120915 - RNA, 22 nt, Artificial Sequence
  Synthetic
  misc_feature (10)..(10): n is a, c, g, or u
  misc_feature (19)..(19): n is a, c, g, or u
  misc_feature (22)..(22): n is a, c, g, or u
agcaggauanccacauugngun

SEQ ID NO: 120916 - RNA, 23 nt, Artificial Sequence
  Synthetic
  misc_feature (11)..(11): n is a, c, g, or u
  misc_feature (20)..(20): n is a, c, g, or u
  misc_feature (23)..(23): n is a, c, g, or u
aagcaggauanccacauugngun

SEQ ID NO: 120917 - RNA, 24 nt, Artificial Sequence
  Synthetic
  misc_feature (12)..(12): n is a, c, g, or u
  misc_feature (21)..(21): n is a, c, g, or u
  misc_feature (24)..(24): n is a, c, g, or u
aaagcaggauanccacauugngun

SEQ ID NO: 120918 - RNA, 18 nt, Artificial Sequence
  Synthetic
  misc_feature (18)..(18): n is a, c, g, or u
cuguuuucauuuacugun

SEQ ID NO: 120919 - RNA, 19 nt, Artificial Sequence
  Synthetic
  misc_feature (19)..(19): n is a, c, g, or u
ccuguuuucauuuacugun

SEQ ID NO: 120920 - RNA, 20 nt, Artificial Sequence
  Synthetic
  misc_feature (20)..(20): n is a, c, g, or u
uccuguuuucauuuacugun

SEQ ID NO: 120921 - RNA, 21 nt, Artificial Sequence
  Synthetic
  misc_feature (21)..(21): n is a, c, g, or u
cuccuguuuucauuuacugun

SEQ ID NO: 120922 - RNA, 22 nt, Artificial Sequence
  Synthetic
  misc_feature (22)..(22): n is a, c, g, or u
ucuccuguuuucauuuacugun

SEQ ID NO: 120923 - RNA, 23 nt, Artificial Sequence
  Synthetic
  misc_feature (23)..(23): n is a, c, g, or u
gucuccuguuuucauuuacugun

SEQ ID NO: 120924 - RNA, 24 nt, Artificial Sequence
  Synthetic
  misc_feature (24)..(24): n is a, c, g, or u
agucuccuguuuucauuuacugun

SEQ ID NO: 120925 - RNA, 18 nt, Artificial Sequence
  Synthetic
  misc_feature (12)..(12): n is a, c, g, or u
  misc_feature (18)..(18): n is a, c, g, or u
agguucagauanuguuun

SEQ ID NO: 120926 - RNA, 19 nt, Artificial Sequence
  Synthetic
  misc_feature (13)..(13): n is a, c, g, or u
  misc_feature (19)..(19): n is a, c, g, or u
aagguucagauanuguuun

SEQ ID NO: 120927 - RNA, 20 nt, Artificial Sequence
  Synthetic
  misc_feature (14)..(14): n is a, c, g, or u
  misc_feature (20)..(20): n is a, c, g, or u
aaagguucagauanuguuun

SEQ ID NO: 120928 - RNA, 21 nt, Artificial Sequence
  Synthetic
  misc_feature (15)..(15): n is a, c, g, or u
  misc_feature (21)..(21): n is a, c, g, or u
uaaagguucagauanuguuun

SEQ ID NO: 120929 - RNA, 22 nt, Artificial Sequence
  Synthetic
  misc_feature (16)..(16): n is a, c, g, or u
  misc_feature (22)..(22): n is a, c, g, or u
guaaagguucagauanuguuun

SEQ ID NO: 120930 - RNA, 23 nt, Artificial Sequence
  Synthetic
  misc_feature (17)..(17): n is a, c, g, or u
  misc_feature (23)..(23): n is a, c, g, or u
gguaaagguucagauanuguuun

SEQ ID NO: 120931 - RNA, 24 nt, Artificial Sequence
  Synthetic
  misc_feature (18)..(18): n is a, c, g, or u
  misc_feature (24)..(24): n is a, c, g, or u
ggguaaagguucagauanuguuun

SEQ ID NO: 120932 - RNA, 18 nt, Artificial Sequence
  Synthetic
  misc_feature (18)..(18): n is a, c, g, or u
ccccaucuuuuuguuuun

SEQ ID NO: 120933 - RNA, 19 nt, Artificial Sequence
  Synthetic
  misc_feature (19)..(19): n is a, c, g, or u
uccccaucuuuuuguuuun

SEQ ID NO: 120934 - RNA, 20 nt, Artificial Sequence
  Synthetic
  misc_feature (20)..(20): n is a, c, g, or u
auccccaucuuuuuguuuun

SEQ ID NO: 120935 - RNA, 21 nt, Artificial Sequence
  Synthetic
  misc_feature (21)..(21): n is a, c, g, or u
uauccccaucuuuuuguuuun

SEQ ID NO: 120936 - RNA, 22 nt, Artificial Sequence
  Synthetic
  misc_feature (22)..(22): n is a, c, g, or u
auauccccaucuuuuuguuuun

SEQ ID NO: 120937 - RNA, 23 nt, Artificial Sequence
  Synthetic
  misc_feature (23)..(23): n is a, c, g, or u
aauauccccaucuuuuuguuuun

SEQ ID NO: 120938 - RNA, 24 nt, Artificial Sequence
  Synthetic
  misc_feature (24)..(24): n is a, c, g, or u
gaauauccccaucuuuuuguuuun

SEQ ID NO: 120939 - RNA, 18 nt, Artificial Sequence
  Synthetic
  misc_feature (6)..(6): n is a, c, g, or u
guguunccccuagaaaau

SEQ ID NO: 120940 - RNA, 19 nt, Artificial Sequence
  Synthetic
  misc_feature (7)..(7): n is a, c, g, or u
gguguunccccuagaaaau

SEQ ID NO: 120941 - RNA, 20 nt, Artificial Sequence
  Synthetic
  misc_feature (8)..(8): n is a, c, g, or u
ggguguunccccuagaaaau

SEQ ID NO: 120942 - RNA, 21 nt, Artificial Sequence
  Synthetic
  misc_feature (9)..(9): n is a, c, g, or u
cggguguunccccuagaaaau

SEQ ID NO: 120943 - RNA, 22 nt, Artificial Sequence
  Synthetic
  misc_feature (10)..(10): n is a, c, g, or u
acggguguunccccuagaaaau

SEQ ID NO: 120944 - RNA, 23 nt, Artificial Sequence
  Synthetic
  misc_feature (11)..(11): n is a, c, g, or u
cacggguguunccccuagaaaau

SEQ ID NO: 120945 - RNA, 24 nt, Artificial Sequence
  Synthetic
  misc_feature (12)..(12): n is a, c, g, or u
acacggguguunccccuagaaaau

SEQ ID NO: 120946 - RNA, 18 nt, Artificial Sequence
  Synthetic
gcgauaaccaggacaaau

SEQ ID NO: 120947 - RNA, 19 nt, Artificial Sequence
  Synthetic
agcgauaaccaggacaaau

SEQ ID NO: 120948 - RNA, 20 nt, Artificial Sequence
  Synthetic
cagcgauaaccaggacaaau

SEQ ID NO: 120949 - RNA, 21 nt, Artificial Sequence
  Synthetic
ccagcgauaaccaggacaaau

SEQ ID NO: 120950 - RNA, 22 nt, Artificial Sequence
  Synthetic
uccagcgauaaccaggacaaau

SEQ ID NO: 120951 - RNA, 23 nt, Artificial Sequence
  Synthetic
auccagcgauaaccaggacaaau

SEQ ID NO: 120952 - RNA, 24 nt, Artificial Sequence
  Synthetic
cauccagcgauaaccaggacaaau

SEQ ID NO: 120953 - RNA, 18 nt, Artificial Sequence
  Synthetic
aaaaguaagacaggaaau

SEQ ID NO: 120954 - RNA, 19 nt, Artificial Sequence
  Synthetic
caaaaguaagacaggaaau

SEQ ID NO: 120955 - RNA, 20 nt, Artificial Sequence
  Synthetic
ccaaaaguaagacaggaaau

SEQ ID NO: 120956 - RNA, 21 nt, Artificial Sequence
  Synthetic
  misc_feature (1)..(1): n is a, c, g, or u
nccaaaaguaagacaggaaau

SEQ ID NO: 120957 - RNA, 22 nt, Artificial Sequence
  Synthetic
  misc_feature (2)..(2): n is a, c, g, or u
unccaaaaguaagacaggaaau

SEQ ID NO: 120958 - RNA, 23 nt, Artificial Sequence
  Synthetic
  misc_feature (3)..(3): n is a, c, g, or u
cunccaaaaguaagacaggaaau

SEQ ID NO: 120959 - RNA, 24 nt, Artificial Sequence
  Synthetic
  misc_feature (4)..(4): n is a, c, g, or u
ucunccaaaaguaagacaggaaau

SEQ ID NO: 120960 - RNA, 18 nt, Artificial Sequence
  Synthetic
  misc_feature (12)..(12): n is a, c, g, or u
ugaugaucgggnaagaau

SEQ ID NO: 120961 - RNA, 19 nt, Artificial Sequence
  Synthetic
  misc_feature (13)..(13): n is a, c, g, or u
cugaugaucgggnaagaau

SEQ ID NO: 120962 - RNA, 20 nt, Artificial Sequence
  Synthetic
  misc_feature (14)..(14): n is a, c, g, or u
acugaugaucgggnaagaau

SEQ ID NO: 120963 - RNA, 21 nt, Artificial Sequence
  Synthetic
  misc_feature (15)..(15): n is a, c, g, or u
aacugaugaucgggnaagaau

SEQ ID NO: 120964 - RNA, 22 nt, Artificial Sequence
  Synthetic
  misc_feature (16)..(16): n is a, c, g, or u
caacugaugaucgggnaagaau

SEQ ID NO: 120965 - RNA, 23 nt, Artificial Sequence
  Synthetic
  misc_feature (17)..(17): n is a, c, g, or u
ccaacugaugaucgggnaagaau

SEQ ID NO: 120966 - RNA, 24 nt, Artificial Sequence
  Synthetic
  misc_feature (18)..(18): n is a, c, g, or u
uccaacugaugaucgggnaagaau

SEQ ID NO: 120967 - RNA, 18 nt, Artificial Sequence
  Synthetic
agauuugggacugcgaau

SEQ ID NO: 120968 - RNA, 19 nt, Artificial Sequence
  Synthetic
gagauuugggacugcgaau

SEQ ID NO: 120969 - RNA, 20 nt, Artificial Sequence
  Synthetic
ggagauuugggacugcgaau

SEQ ID NO: 120970 - RNA, 21 nt, Artificial Sequence
  Synthetic
uggagauuugggacugcgaau

SEQ ID NO: 120971 - RNA, 22 nt, Artificial Sequence
  Synthetic
cuggagauuugggacugcgaau

SEQ ID NO: 120972 - RNA, 23 nt, Artificial Sequence
  Synthetic
acuggagauuugggacugcgaau

SEQ ID NO: 120973 - RNA, 24 nt, Artificial Sequence
  Synthetic
gacuggagauuugggacugcgaau

SEQ ID NO: 120974 - RNA, 18 nt, Artificial Sequence
  Synthetic
  misc_feature (7)..(7): n is a, c, g, or u
cuuaugnguccaaggaau

SEQ ID NO: 120975 - RNA, 19 nt, Artificial Sequence
  Synthetic
  misc_feature (8)..(8): n is a, c, g, or u
ccuuaugnguccaaggaau

SEQ ID NO: 120976 - RNA, 20 nt, Artificial Sequence
  Synthetic
  misc_feature (9)..(9): n is a, c, g, or u
accuuaugnguccaaggaau

SEQ ID NO: 120977 - RNA, 21 nt, Artificial Sequence
  Synthetic
  misc_feature (10)..(10): n is a, c, g, or u
caccuuaugnguccaaggaau

SEQ ID NO: 120978 - RNA, 22 nt, Artificial Sequence
  Synthetic
  misc_feature (11)..(11): n is a, c, g, or u
ccaccuuaugnguccaaggaau

SEQ ID NO: 120979 - RNA, 23 nt, Artificial Sequence
  Synthetic
  misc_feature (12)..(12): n is a, c, g, or u
cccaccuuaugnguccaaggaau

SEQ ID NO: 120980 - RNA, 24 nt, Artificial Sequence
  Synthetic
  misc_feature (13)..(13): n is a, c, g, or u
ucccaccuuaugnguccaaggaau

SEQ ID NO: 120981 - RNA, 18 nt, Artificial Sequence
  Synthetic
  misc_feature (1)..(1): n is a, c, g, or u
nguugaugauccuggaau

SEQ ID NO: 120982 - RNA, 19 nt, Artificial Sequence
  Synthetic
  misc_feature (2)..(2): n is a, c, g, or u
unguugaugauccuggaau

SEQ ID NO: 120983 - RNA, 20 nt, Artificial Sequence
  Synthetic
  misc_feature (3)..(3): n is a, c, g, or u
gunguugaugauccuggaau

SEQ ID NO: 120984 - RNA, 21 nt, Artificial Sequence
  Synthetic
  misc_feature (4)..(4): n is a, c, g, or u
ggunguugaugauccuggaau

SEQ ID NO: 120985 - RNA, 22 nt, Artificial Sequence
  Synthetic
  misc_feature (5)..(5): n is a, c, g, or u
uggunguugaugauccuggaau

SEQ ID NO: 120986 - RNA, 23 nt, Artificial Sequence
  Synthetic
  misc_feature (6)..(6): n is a, c, g, or u
cuggunguugaugauccuggaau

SEQ ID NO: 120987 - RNA, 24 nt, Artificial Sequence
  Synthetic
  misc_feature (7)..(7): n is a, c, g, or u
gcuggunguugaugauccuggaau

SEQ ID NO: 120988 - RNA, 18 nt, Artificial Sequence
  Synthetic
guccuccugcaaaugaau

SEQ ID NO: 120989 - RNA, 19 nt, Artificial Sequence
  Synthetic
uguccuccugcaaaugaau

SEQ ID NO: 120990 - RNA, 20 nt, Artificial Sequence
  Synthetic
auguccuccugcaaaugaau

SEQ ID NO: 120991 - RNA, 21 nt, Artificial Sequence
  Synthetic
aauguccuccugcaaaugaau

SEQ ID NO: 120992 - RNA, 22 nt, Artificial Sequence
  Synthetic
caauguccuccugcaaaugaau

SEQ ID NO: 120993 - RNA, 23 nt, Artificial Sequence
  Synthetic
acaauguccuccugcaaaugaau

SEQ ID NO: 120994 - RNA, 24 nt, Artificial Sequence
  Synthetic
aacaauguccuccugcaaaugaau

SEQ ID NO: 120995 - RNA, 18 nt, Artificial Sequence
  Synthetic
ucugaguuggcuuugaau

SEQ ID NO: 120996 - RNA, 19 nt, Artificial Sequence
  Synthetic
uucugaguuggcuuugaau

SEQ ID NO: 120997 - RNA, 20 nt, Artificial Sequence
  Synthetic
uuucugaguuggcuuugaau

SEQ ID NO: 120998 - RNA, 21 nt, Artificial Sequence
  Synthetic
uuuucugaguuggcuuugaau

SEQ ID NO: 120999 - RNA, 22 nt, Artificial Sequence
  Synthetic
auuuucugaguuggcuuugaau

SEQ ID NO: 121000 - RNA, 23 nt, Artificial Sequence
  Synthetic
gauuuucugaguuggcuuugaau

SEQ ID NO: 121001 - RNA, 24 nt, Artificial Sequence
  Synthetic
ggauuuucugaguuggcuuugaau

SEQ ID NO: 121002 - RNA, 18 nt, Artificial Sequence
  Synthetic
gguuuuguacagcaacau

SEQ ID NO: 121003 - RNA, 19 nt, Artificial Sequence
  Synthetic
agguuuuguacagcaacau

SEQ ID NO: 121004 - RNA, 20 nt, Artificial Sequence
  Synthetic
uagguuuuguacagcaacau

SEQ ID NO: 121005 - RNA, 21 nt, Artificial Sequence
  Synthetic
guagguuuuguacagcaacau

SEQ ID NO: 121006 - RNA, 22 nt, Artificial Sequence
  Synthetic
cguagguuuuguacagcaacau

SEQ ID NO: 121007 - RNA, 23 nt, Artificial Sequence
  Synthetic
ccguagguuuuguacagcaacau

SEQ ID NO: 121008 - RNA, 24 nt, Artificial Sequence
  Synthetic
uccguagguuuuguacagcaacau

SEQ ID NO: 121009 - RNA, 18 nt, Artificial Sequence
  Synthetic
accccaacagucccccau

SEQ ID NO: 121010 - RNA, 19 nt, Artificial Sequence
  Synthetic
caccccaacagucccccau

SEQ ID NO: 121011 - RNA, 20 nt, Artificial Sequence
  Synthetic
ccaccccaacagucccccau

SEQ ID NO: 121012 - RNA, 21 nt, Artificial Sequence
  Synthetic
uccaccccaacagucccccau

SEQ ID NO: 121013 - RNA, 22 nt, Artificial Sequence
  Synthetic
cuccaccccaacagucccccau

SEQ ID NO: 121014 - RNA, 23 nt, Artificial Sequence
  Synthetic
gcuccaccccaacagucccccau

SEQ ID NO: 121015 - RNA, 24 nt, Artificial Sequence
  Synthetic
ggcuccaccccaacagucccccau

SEQ ID NO: 121016 - RNA, 18 nt, Artificial Sequence
  Synthetic
ucugauuuuuaggcccau

SEQ ID NO: 121017 - RNA, 19 nt, Artificial Sequence
  Synthetic
gucugauuuuuaggcccau

SEQ ID NO: 121018 - RNA, 20 nt, Artificial Sequence
  Synthetic
ugucugauuuuuaggcccau

SEQ ID NO: 121019 - RNA, 21 nt, Artificial Sequence
  Synthetic
uugucugauuuuuaggcccau

SEQ ID NO: 121020 - RNA, 22 nt, Artificial Sequence
  Synthetic
  misc_feature (1)..(1): n is a, c, g, or u
nuugucugauuuuuaggcccau

SEQ ID NO: 121021 - RNA, 23 nt, Artificial Sequence
  Synthetic
  misc_feature (2)..(2): n is a, c, g, or u
anuugucugauuuuuaggcccau

SEQ ID NO: 121022 - RNA, 24 nt, Artificial Sequence
  Synthetic
  misc_feature (3)..(3): n is a, c, g, or u
uanuugucugauuuuuaggcccau

SEQ ID NO: 121023 - RNA, 18 nt, Artificial Sequence
  Synthetic
gcacagccuagcagccau

SEQ ID NO: 121024 - RNA, 19 nt, Artificial Sequence
  Synthetic
agcacagccuagcagccau

SEQ ID NO: 121025 - RNA, 20 nt, Artificial Sequence
  Synthetic
cagcacagccuagcagccau

SEQ ID NO: 121026 - RNA, 21 nt, Artificial Sequence
  Synthetic
gcagcacagccuagcagccau

SEQ ID NO: 121027 - RNA, 22 nt, Artificial Sequence
  Synthetic
ggcagcacagccuagcagccau

SEQ ID NO: 121028 - RNA, 23 nt, Artificial Sequence
  Synthetic
uggcagcacagccuagcagccau

SEQ ID NO: 121029 - RNA, 24 nt, Artificial Sequence
  Synthetic
uuggcagcacagccuagcagccau

SEQ ID NO: 121030 - RNA, 18 nt, Artificial Sequence
  Synthetic
acaugcauauaaaggcau

SEQ ID NO: 121031 - RNA, 19 nt, Artificial Sequence
  Synthetic
uacaugcauauaaaggcau

SEQ ID NO: 121032 - RNA, 20 nt, Artificial Sequence
  Synthetic
auacaugcauauaaaggcau

SEQ ID NO: 121033 - RNA, 21 nt, Artificial Sequence
  Synthetic
uauacaugcauauaaaggcau

SEQ ID NO: 121034 - RNA, 22 nt, Artificial Sequence
  Synthetic
guauacaugcauauaaaggcau

SEQ ID NO: 121035 - RNA, 23 nt, Artificial Sequence
  Synthetic
uguauacaugcauauaaaggcau

SEQ ID NO: 121036 - RNA, 24 nt, Artificial Sequence
  Synthetic
uuguauacaugcauauaaaggcau

SEQ ID NO: 121037 - RNA, 18 nt, Artificial Sequence
  Synthetic
aacaagaagaugaggcau

SEQ ID NO: 121038 - RNA, 19 nt, Artificial Sequence
  Synthetic
caacaagaagaugaggcau

SEQ ID NO: 121039 - RNA, 20 nt, Artificial Sequence
  Synthetic
ccaacaagaagaugaggcau

SEQ ID NO: 121040 - RNA, 21 nt, Artificial Sequence
  Synthetic
accaacaagaagaugaggcau

SEQ ID NO: 121041 - RNA, 22 nt, Artificial Sequence
  Synthetic
aaccaacaagaagaugaggcau

SEQ ID NO: 121042 - RNA, 23 nt, Artificial Sequence
  Synthetic
gaaccaacaagaagaugaggcau

SEQ ID NO: 121043 - RNA, 24 nt, Artificial Sequence
  Synthetic
agaaccaacaagaagaugaggcau

SEQ ID NO: 121044 - RNA, 18 nt, Artificial Sequence
  Synthetic
  misc_feature (2)..(2): n is a, c, g, or u
ungcuuguauacaugcau

SEQ ID NO: 121045 - RNA, 19 nt, Artificial Sequence
  Synthetic
  misc_feature (3)..(3): n is a, c, g, or u
uungcuuguauacaugcau

SEQ ID NO: 121046 - RNA, 20 nt, Artificial Sequence
  Synthetic
  misc_feature (4)..(4): n is a, c, g, or u
uuungcuuguauacaugcau

SEQ ID NO: 121047 - RNA, 21 nt, Artificial Sequence
  Synthetic
  misc_feature (5)..(5): n is a, c, g, or u
guuungcuuguauacaugcau

SEQ ID NO: 121048 - RNA, 22 nt, Artificial Sequence
  Synthetic
  misc_feature (6)..(6): n is a, c, g, or u
uguuungcuuguauacaugcau

SEQ ID NO: 121049 - RNA, 23 nt, Artificial Sequence
  Synthetic
  misc_feature (7)..(7): n is a, c, g, or u
cuguuungcuuguauacaugcau

SEQ ID NO: 121050 - RNA, 24 nt, Artificial Sequence
  Synthetic
  misc_feature (8)..(8): n is a, c, g, or u
ccuguuungcuuguauacaugcau

SEQ ID NO: 121051 - RNA, 18 nt, Artificial Sequence
  Synthetic
uuugcgaaagcccaagau

SEQ ID NO: 121052 - RNA, 19 nt, Artificial Sequence
  Synthetic
uuuugcgaaagcccaagau

SEQ ID NO: 121053 - RNA, 20 nt, Artificial Sequence
  Synthetic
auuuugcgaaagcccaagau

SEQ ID NO: 121054 - RNA, 21 nt, Artificial Sequence
  Synthetic
uauuuugcgaaagcccaagau

SEQ ID NO: 121055 - RNA, 22 nt, Artificial Sequence
  Synthetic
guauuuugcgaaagcccaagau

SEQ ID NO: 121056 - RNA, 23 nt, Artificial Sequence
  Synthetic
gguauuuugcgaaagcccaagau

SEQ ID NO: 121057 - RNA, 24 nt, Artificial Sequence
  Synthetic
agguauuuugcgaaagcccaagau

SEQ ID NO: 121058 - RNA, 18 nt, Artificial Sequence
  Synthetic
caggaugcagaggaagau

SEQ ID NO: 121059 - RNA, 19 nt, Artificial Sequence
  Synthetic
gcaggaugcagaggaagau

SEQ ID NO: 121060 - RNA, 20 nt, Artificial Sequence
  Synthetic
agcaggaugcagaggaagau

SEQ ID NO: 121061 - RNA, 21 nt, Artificial Sequence
  Synthetic
cagcaggaugcagaggaagau

SEQ ID NO: 121062 - RNA, 22 nt, Artificial Sequence
  Synthetic
gcagcaggaugcagaggaagau

SEQ ID NO: 121063 - RNA, 23 nt, Artificial Sequence
  Synthetic
agcagcaggaugcagaggaagau

SEQ ID NO: 121064 - RNA, 24 nt, Artificial Sequence
  Synthetic
uagcagcaggaugcagaggaagau

SEQ ID NO: 121065 - RNA, 18 nt, Artificial Sequence
  Synthetic
cggaaguguugauaagau

SEQ ID NO: 121066 - RNA, 19 nt, Artificial Sequence
  Synthetic
ccggaaguguugauaagau

SEQ ID NO: 121067 - RNA, 20 nt, Artificial Sequence
  Synthetic
uccggaaguguugauaagau

SEQ ID NO: 121068 - RNA, 21 nt, Artificial Sequence
  Synthetic
uuccggaaguguugauaagau

SEQ ID NO: 121069 - RNA, 22 nt, Artificial Sequence
  Synthetic
uuuccggaaguguugauaagau

SEQ ID NO: 121070 - RNA, 23 nt, Artificial Sequence
  Synthetic
guuuccggaaguguugauaagau

SEQ ID NO: 121071 - RNA, 24 nt, Artificial Sequence
  Synthetic
aguuuccggaaguguugauaagau

SEQ ID NO: 121072 - RNA, 18 nt, Artificial Sequence
  Synthetic
uggugagugacuggagau

SEQ ID NO: 121073 - RNA, 19 nt, Artificial Sequence
  Synthetic
uuggugagugacuggagau

SEQ ID NO: 121074 - RNA, 20 nt, Artificial Sequence
  Synthetic
guuggugagugacuggagau

SEQ ID NO: 121075 - RNA, 21 nt, Artificial Sequence
  Synthetic
  misc_feature (1)..(1): n is a, c, g, or u
nguuggugagugacuggagau

SEQ ID NO: 121076 - RNA, 22 nt, Artificial Sequence
  Synthetic
  misc_feature (2)..(2): n is a, c, g, or u
anguuggugagugacuggagau

SEQ ID NO: 121077 - RNA, 23 nt, Artificial Sequence
  Synthetic
  misc_feature (3)..(3): n is a, c, g, or u
canguuggugagugacuggagau

SEQ ID NO: 121078 - RNA, 24 nt, Artificial Sequence
  Synthetic
  misc_feature (4)..(4): n is a, c, g, or u
acanguuggugagugacuggagau

SEQ ID NO: 121079 - RNA, 18 nt, Artificial Sequence
  Synthetic
  misc_feature (14)..(14): n is a, c, g, or u
aggcggugucgagnagau

SEQ ID NO: 121080 - RNA, 19 nt, Artificial Sequence
  Synthetic
  misc_feature (15)..(15): n is a, c, g, or u
gaggcggugucgagnagau

SEQ ID NO: 121081 - RNA, 20 nt, Artificial Sequence
  Synthetic
  misc_feature (16)..(16): n is a, c, g, or u
agaggcggugucgagnagau

SEQ ID NO: 121082 - RNA, 21 nt, Artificial Sequence
  Synthetic
  misc_feature (17)..(17): n is a, c, g, or u
cagaggcggugucgagnagau

SEQ ID NO: 121083 - RNA, 22 nt, Artificial Sequence
  Synthetic
  misc_feature (18)..(18): n is a, c, g, or u
gcagaggcggugucgagnagau

SEQ ID NO: 121084 - RNA, 23 nt, Artificial Sequence
  Synthetic
  misc_feature (19)..(19): n is a, c, g, or u
agcagaggcggugucgagnagau

SEQ ID NO: 121085 - RNA, 24 nt, Artificial Sequence
  Synthetic
  misc_feature (20)..(20): n is a, c, g, or u
gagcagaggcggugucgagnagau

SEQ ID NO: 121086 - RNA, 18 nt, Artificial Sequence
  Synthetic
  misc_feature (14)..(14): n is a, c, g, or u
gcacacgguccggnagau

SEQ ID NO: 121087 - RNA, 19 nt, Artificial Sequence
  Synthetic
  misc_feature (15)..(15): n is a, c, g, or u
ugcacacgguccggnagau

SEQ ID NO: 121088 - RNA, 20 nt, Artificial Sequence
  Synthetic
  misc_feature (16)..(16): n is a, c, g, or u
gugcacacgguccggnagau

SEQ ID NO: 121089 - RNA, 21 nt, Artificial Sequence
  Synthetic
  misc_feature (17)..(17): n is a, c, g, or u
agugcacacgguccggnagau

SEQ ID NO: 121090 - RNA, 22 nt, Artificial Sequence
  Synthetic
  misc_feature (18)..(18): n is a, c, g, or u
aagugcacacgguccggnagau

SEQ ID NO: 121091 - RNA, 23 nt, Artificial Sequence
  Synthetic
  misc_feature (19)..(19): n is a, c, g, or u
gaagugcacacgguccggnagau

SEQ ID NO: 121092 - RNA, 24 nt, Artificial Sequence
  Synthetic
  misc_feature (20)..(20): n is a, c, g, or u
cgaagugcacacgguccggnagau

SEQ ID NO: 121093 - RNA, 18 nt, Artificial Sequence
  Synthetic
acucuaaggccucccgau

SEQ ID NO: 121094 - RNA, 19 nt, Artificial Sequence
  Synthetic
gacucuaaggccucccgau

SEQ ID NO: 121095 - RNA, 20 nt, Artificial Sequence
  Synthetic
agacucuaaggccucccgau

SEQ ID NO: 121096 - RNA, 21 nt, Artificial Sequence
  Synthetic
gagacucuaaggccucccgau

SEQ ID NO: 121097 - RNA, 22 nt, Artificial Sequence
  Synthetic
ggagacucuaaggccucccgau

SEQ ID NO: 121098 - RNA, 23 nt, Artificial Sequence
  Synthetic
cggagacucuaaggccucccgau

SEQ ID NO: 121099 - RNA, 24 nt, Artificial Sequence
  Synthetic
ccggagacucuaaggccucccgau

SEQ ID NO: 121100 - RNA, 18 nt, Artificial Sequence
  Synthetic
cuucugcgacgcggcgau

SEQ ID NO: 121101 - RNA, 19 nt, Artificial Sequence
  Synthetic
ucuucugcgacgcggcgau

SEQ ID NO: 121102 - RNA, 20 nt, Artificial Sequence
  Synthetic
aucuucugcgacgcggcgau

SEQ ID NO: 121103 - RNA, 18 nt, Artificial Sequence
  Synthetic
gaggcauagcagcaggau

SEQ ID NO: 121104 - RNA, 19 nt, Artificial Sequence
  Synthetic
ugaggcauagcagcaggau

SEQ ID NO: 121105 - RNA, 20 nt, Artificial Sequence
  Synthetic
augaggcauagcagcaggau

SEQ ID NO: 121106 - RNA, 21 nt, Artificial Sequence
  Synthetic
gaugaggcauagcagcaggau

SEQ ID NO: 121107 - RNA, 22 nt, Artificial Sequence
  Synthetic
agaugaggcauagcagcaggau

SEQ ID NO: 121108 - RNA, 23 nt, Artificial Sequence
  Synthetic
aagaugaggcauagcagcaggau

SEQ ID NO: 121109 - RNA, 24 nt, Artificial Sequence
  Synthetic
gaagaugaggcauagcagcaggau

SEQ ID NO: 121110 - RNA, 18 nt, Artificial Sequence
  Synthetic
  misc_feature (11)..(11): n is a, c, g, or u
  misc_feature (13)..(13): n is a, c, g, or u
gaguuugccanunaggau

SEQ ID NO: 121111 - RNA, 19 nt, Artificial Sequence
  Synthetic
  misc_feature (12)..(12): n is a, c, g, or u
  misc_feature (14)..(14): n is a, c, g, or u
ggaguuugccanunaggau

SEQ ID NO: 121112 - RNA, 20 nt, Artificial Sequence
  Synthetic
  misc_feature (13)..(13): n is a, c, g, or u
  misc_feature (15)..(15): n is a, c, g, or u
aggaguuugccanunaggau

SEQ ID NO: 121113 - RNA, 21 nt, Artificial Sequence
  Synthetic
  misc_feature (14)..(14): n is a, c, g, or u
  misc_feature (16)..(16): n is a, c, g, or u
aaggaguuugccanunaggau

SEQ ID NO: 121114 - RNA, 22 nt, Artificial Sequence
  Synthetic
  misc_feature (15)..(15): n is a, c, g, or u
  misc_feature (17)..(17): n is a, c, g, or u
gaaggaguuugccanunaggau

SEQ ID NO: 121115 - RNA, 23 nt, Artificial Sequence
  Synthetic
  misc_feature (16)..(16): n is a, c, g, or u
  misc_feature (18)..(18): n is a, c, g, or u
agaaggaguuugccanunaggau

SEQ ID NO: 121116 - RNA, 24 nt, Artificial Sequence
  Synthetic
  misc_feature (17)..(17): n is a, c, g, or u
  misc_feature (19)..(19): n is a, c, g, or u
aagaaggaguuugccanunaggau

SEQ ID NO: 121117 - RNA, 18 nt, Artificial Sequence
  Synthetic
  misc_feature (2)..(2): n is a, c, g, or u
gngcccugacucugggau

SEQ ID NO: 121118 - RNA, 19 nt, Artificial Sequence
  Synthetic
  misc_feature (3)..(3): n is a, c, g, or u
agngcccugacucugggau

SEQ ID NO: 121119 - RNA, 20 nt, Artificial Sequence
  Synthetic
  misc_feature (4)..(4): n is a, c, g, or u
cagngcccugacucugggau

SEQ ID NO: 121120 - RNA, 21 nt, Artificial Sequence
  Synthetic
  misc_feature (5)..(5): n is a, c, g, or u
acagngcccugacucugggau

SEQ ID NO: 121121 - RNA, 22 nt, Artificial Sequence
  Synthetic
  misc_feature (6)..(6): n is a, c, g, or u
uacagngcccugacucugggau

SEQ ID NO: 121122 - RNA, 23 nt, Artificial Sequence
  Synthetic
  misc_feature (7)..(7): n is a, c, g, or u
guacagngcccugacucugggau

SEQ ID NO: 121123 - RNA, 24 nt, Artificial Sequence
  Synthetic
  misc_feature (8)..(8): n is a, c, g, or u
aguacagngcccugacucugggau

SEQ ID NO: 121124 - RNA, 18 nt, Artificial Sequence
  Synthetic
  misc_feature (2)..(2): n is a, c, g, or u
  misc_feature (14)..(14): n is a, c, g, or u
gnaagaaucccagnggau

SEQ ID NO: 121125 - RNA, 19 nt, Artificial Sequence
  Synthetic
  misc_feature (3)..(3): n is a, c, g, or u
  misc_feature (15)..(15): n is a, c, g, or u
ggnaagaaucccagnggau

SEQ ID NO: 121126 - RNA, 20 nt, Artificial Sequence
  Synthetic
  misc_feature (4)..(4): n is a, c, g, or u
  misc_feature (16)..(16): n is a, c, g, or u
gggnaagaaucccagnggau

SEQ ID NO: 121127 - RNA, 21 nt, Artificial Sequence
  Synthetic
  misc_feature (5)..(5): n is a, c, g, or u
  misc_feature (17)..(17): n is a, c, g, or u
cgggnaagaaucccagnggau

SEQ ID NO: 121128 - RNA, 22 nt, Artificial Sequence
  Synthetic
  misc_feature (6)..(6): n is a, c, g, or u
  misc_feature (18)..(18): n is a, c, g, or u
ucgggnaagaaucccagnggau

SEQ ID NO: 121129 - RNA, 23 nt, Artificial Sequence
  Synthetic
  misc_feature (7)..(7): n is a, c, g, or u
  misc_feature (19)..(19): n is a, c, g, or u
aucgggnaagaaucccagnggau

SEQ ID NO: 121130 - RNA, 24 nt, Artificial Sequence
  Synthetic
  misc_feature (8)..(8): n is a, c, g, or u
  misc_feature (20)..(20): n is a, c, g, or u
gaucgggnaagaaucccagnggau

SEQ ID NO: 121131 - RNA, 18 nt, Artificial Sequence
  Synthetic
acuacuaauucccuggau

SEQ ID NO: 121132 - RNA, 19 nt, Artificial Sequence
  Synthetic
gacuacuaauucccuggau

SEQ ID NO: 121133 - RNA, 20 nt, Artificial Sequence
  Synthetic
ugacuacuaauucccuggau

SEQ ID NO: 121134 - RNA, 21 nt, Artificial Sequence
  Synthetic
cugacuacuaauucccuggau

SEQ ID NO: 121135 - RNA, 22 nt, Artificial Sequence
  Synthetic
gcugacuacuaauucccuggau

SEQ ID NO: 121136 - RNA, 23 nt, Artificial Sequence
  Synthetic
agcugacuacuaauucccuggau

SEQ ID NO: 121137 - RNA, 24 nt, Artificial Sequence
  Synthetic
uagcugacuacuaauucccuggau

SEQ ID NO: 121138 - RNA, 18 nt, Artificial Sequence
  Synthetic
  misc_feature (9)..(9): n is a, c, g, or u
gugcuggunguugaugau

SEQ ID NO: 121139 - RNA, 19 nt, Artificial Sequence
  Synthetic
  misc_feature (10)..(10): n is a, c, g, or u
ggugcuggunguugaugau

SEQ ID NO: 121140 - RNA, 20 nt, Artificial Sequence
  Synthetic
  misc_feature (11)..(11): n is a, c, g, or u
cggugcuggunguugaugau

SEQ ID NO: 121141 - RNA, 21 nt, Artificial Sequence
  Synthetic
  misc_feature (12)..(12): n is a, c, g, or u
ccggugcuggunguugaugau

SEQ ID NO: 121142 - RNA, 22 nt, Artificial Sequence
  Synthetic
  misc_feature (13)..(13): n is a, c, g, or u
uccggugcuggunguugaugau

SEQ ID NO: 121143 - RNA, 23 nt, Artificial Sequence
  Synthetic
  misc_feature (14)..(14): n is a, c, g, or u
guccggugcuggunguugaugau

SEQ ID NO: 121144 - RNA, 24 nt, Artificial Sequence
  Synthetic
  misc_feature (15)..(15): n is a, c, g, or u
gguccggugcuggunguugaugau

SEQ ID NO: 121145 - RNA, 18 nt, Artificial Sequence
  Synthetic
  misc_feature (16)..(16): n is a, c, g, or u
aauugguaacagcggnau

SEQ ID NO: 121146 - RNA, 19 nt, Artificial Sequence
  Synthetic
  misc_feature (17)..(17): n is a, c, g, or u
aaauugguaacagcggnau

SEQ ID NO: 121147 - RNA, 20 nt, Artificial Sequence
  Synthetic
  misc_feature (18)..(18): n is a, c, g, or u
aaaauugguaacagcggnau

SEQ ID NO: 121148 - RNA, 21 nt, Artificial Sequence
  Synthetic
  misc_feature (19)..(19): n is a, c, g, or u
gaaaauugguaacagcggnau

SEQ ID NO: 121149 - RNA, 22 nt, Artificial Sequence
  Synthetic
  misc_feature (20)..(20): n is a, c, g, or u
agaaaauugguaacagcggnau

SEQ ID NO: 121150 - RNA, 23 nt, Artificial Sequence
  Synthetic
  misc_feature (21)..(21): n is a, c, g, or u
aagaaaauugguaacagcggnau

SEQ ID NO: 121151 - RNA, 24 nt, Artificial Sequence
  Synthetic
  misc_feature (22)..(22): n is a, c, g, or u
aaagaaaauugguaacagcggnau

SEQ ID NO: 121152 - RNA, 18 nt, Artificial Sequence
  Synthetic
  misc_feature (9)..(9): n is a, c, g, or u
ccaaaaganaccaaauau

SEQ ID NO: 121153 - RNA, 19 nt, Artificial Sequence
  Synthetic
  misc_feature (10)..(10): n is a, c, g, or u
uccaaaaganaccaaauau

SEQ ID NO: 121154 - RNA, 20 nt, Artificial Sequence
  Synthetic
  misc_feature (11)..(11): n is a, c, g, or u
cuccaaaaganaccaaauau

SEQ ID NO: 121155 - RNA, 21 nt, Artificial Sequence
  Synthetic
  misc_feature (12)..(12): n is a, c, g, or u
acuccaaaaganaccaaauau

SEQ ID NO: 121156 - RNA, 22 nt, Artificial Sequence
  Synthetic
  misc_feature (13)..(13): n is a, c, g, or u
cacuccaaaaganaccaaauau

SEQ ID NO: 121157 - RNA, 23 nt, Artificial Sequence
  Synthetic
  misc_feature (14)..(14): n is a, c, g, or u
acacuccaaaaganaccaaauau

SEQ ID NO: 121158 - RNA, 24 nt, Artificial Sequence
  Synthetic
  misc_feature (15)..(15): n is a, c, g, or u
cacacuccaaaaganaccaaauau

SEQ ID NO: 121159 - RNA, 18 nt, Artificial Sequence
  Synthetic
ucuuguucccaagaauau

SEQ ID NO: 121160 - RNA, 19 nt, Artificial Sequence
  Synthetic
  misc_feature (1)..(1): n is a, c, g, or u
nucuuguucccaagaauau

SEQ ID NO: 121161 - RNA, 20 nt, Artificial Sequence
  Synthetic
  misc_feature (2)..(2): n is a, c, g, or u
gnucuuguucccaagaauau

SEQ ID NO: 121162 - RNA, 21 nt, Artificial Sequence
  Synthetic
  misc_feature (3)..(3): n is a, c, g, or u
agnucuuguucccaagaauau

SEQ ID NO: 121163 - RNA, 22 nt, Artificial Sequence
  Synthetic
  misc_feature (4)..(4): n is a, c, g, or u
uagnucuuguucccaagaauau

SEQ ID NO: 121164 - RNA, 23 nt, Artificial Sequence
  Synthetic
  misc_feature (5)..(5): n is a, c, g, or u
guagnucuuguucccaagaauau

SEQ ID NO: 121165 - RNA, 24 nt, Artificial Sequence
  Synthetic
  misc_feature (6)..(6): n is a, c, g, or u
uguagnucuuguucccaagaauau

SEQ ID NO: 121166 - RNA, 18 nt, Artificial Sequence
  Synthetic
gcuuguauacaugcauau

SEQ ID NO: 121167 - RNA, 19 nt, Artificial Sequence
  Synthetic
  misc_feature (1)..(1): n is a, c, g, or u
ngcuuguauacaugcauau

SEQ ID NO: 121168 - RNA, 20 nt, Artificial Sequence
  Synthetic
  misc_feature (2)..(2): n is a, c, g, or u
ungcuuguauacaugcauau

SEQ ID NO: 121169 - RNA, 21 nt, Artificial Sequence
  Synthetic
  misc_feature (3)..(3): n is a, c, g, or u
uungcuuguauacaugcauau

SEQ ID NO: 121170 - RNA, 22 nt, Artificial Sequence
  Synthetic
  misc_feature (4)..(4): n is a, c, g, or u
uuungcuuguauacaugcauau

SEQ ID NO: 121171 - RNA, 23 nt, Artificial Sequence
  Synthetic
  misc_feature (5)..(5): n is a, c, g, or u
guuungcuuguauacaugcauau

SEQ ID NO: 121172 - RNA, 24 nt, Artificial Sequence
  Synthetic
  misc_feature (6)..(6): n is a, c, g, or u
uguuungcuuguauacaugcauau

SEQ ID NO: 121173 - RNA, 18 nt, Artificial Sequence
  Synthetic
cgauaagauugacgauau

SEQ ID NO: 121174 - RNA, 19 nt, Artificial Sequence
  Synthetic
ucgauaagauugacgauau

SEQ ID NO: 121175 - RNA, 20 nt, Artificial Sequence
  Synthetic
uucgauaagauugacgauau

SEQ ID NO: 121176 - RNA, 21 nt, Artificial Sequence
  Synthetic
cuucgauaagauugacgauau

SEQ ID NO: 121177 - RNA, 22 nt, Artificial Sequence
  Synthetic
ucuucgauaagauugacgauau

SEQ ID NO: 121178 - RNA, 23 nt, Artificial Sequence
  Synthetic
gucuucgauaagauugacgauau

SEQ ID NO: 121179 - RNA, 24 nt, Artificial Sequence
  Synthetic
agucuucgauaagauugacgauau

SEQ ID NO: 121180 - RNA, 18 nt, Artificial Sequence
  Synthetic
gcauuugguggucuauau

SEQ ID NO: 121181 - RNA, 19 nt, Artificial Sequence
  Synthetic
ggcauuugguggucuauau

SEQ ID NO: 121182 - RNA, 20 nt, Artificial Sequence
  Synthetic
gggcauuugguggucuauau

SEQ ID NO: 121183 - RNA, 21 nt, Artificial Sequence
  Synthetic
ggggcauuugguggucuauau

SEQ ID NO: 121184 - RNA, 22 nt, Artificial Sequence
  Synthetic
aggggcauuugguggucuauau

SEQ ID NO: 121185 - RNA, 23 nt, Artificial Sequence
  Synthetic
uaggggcauuugguggucuauau

SEQ ID NO: 121186 - RNA, 24 nt, Artificial Sequence
  Synthetic
auaggggcauuugguggucuauau

SEQ ID NO: 121187 - RNA, 18 nt, Artificial Sequence
  Synthetic
  misc_feature (7)..(7): n is a, c, g, or u
  misc_feature (12)..(12): n is a, c, g, or u
auauggnagagncaguau

SEQ ID NO: 121188 - RNA, 19 nt, Artificial Sequence
  Synthetic
  misc_feature (8)..(8): n is a, c, g, or u
  misc_feature (13)..(13): n is a, c, g, or u
gauauggnagagncaguau

SEQ ID NO: 121189 - RNA, 20 nt, Artificial Sequence
  Synthetic
  misc_feature (9)..(9): n is a, c, g, or u
  misc_feature (14)..(14): n is a, c, g, or u
cgauauggnagagncaguau

SEQ ID NO: 121190 - RNA, 21 nt, Artificial Sequence
  Synthetic
  misc_feature (10)..(10): n is a, c, g, or u
  misc_feature (15)..(15): n is a, c, g, or u
acgauauggnagagncaguau

SEQ ID NO: 121191 - RNA, 22 nt, Artificial Sequence
  Synthetic
  misc_feature (11)..(11): n is a, c, g, or u
  misc_feature (16)..(16): n is a, c, g, or u
gacgauauggnagagncaguau

SEQ ID NO: 121192 - RNA, 23 nt, Artificial Sequence
  Synthetic
  misc_feature (12)..(12): n is a, c, g, or u
  misc_feature (17)..(17): n is a, c, g, or u
ugacgauauggnagagncaguau

SEQ ID NO: 121193 - RNA, 24 nt, Artificial Sequence
  Synthetic
  misc_feature (13)..(13): n is a, c, g, or u
  misc_feature (18)..(18): n is a, c, g, or u
uugacgauauggnagagncaguau

SEQ ID NO: 121194 - RNA, 18 nt, Artificial Sequence
  Synthetic
cuugccugagugccguau

SEQ ID NO: 121195 - RNA, 19 nt, Artificial Sequence
  Synthetic
gcuugccugagugccguau

SEQ ID NO: 121196 - RNA, 20 nt, Artificial Sequence
  Synthetic
agcuugccugagugccguau

SEQ ID NO: 121197 - RNA, 21 nt, Artificial Sequence
  Synthetic
uagcuugccugagugccguau

SEQ ID NO: 121198 - RNA, 22 nt, Artificial Sequence
  Synthetic
auagcuugccugagugccguau

SEQ ID NO: 121199 - RNA, 23 nt, Artificial Sequence
  Synthetic
aauagcuugccugagugccguau

SEQ ID NO: 121200 - RNA, 24 nt, Artificial Sequence
  Synthetic
gaauagcuugccugagugccguau

SEQ ID NO: 121201 - RNA, 18 nt, Artificial Sequence
  Synthetic
gucuagacucugugguau

SEQ ID NO: 121202 - RNA, 19 nt, Artificial Sequence
  Synthetic
agucuagacucugugguau

SEQ ID NO: 121203 - RNA, 20 nt, Artificial Sequence
  Synthetic
gagucuagacucugugguau

SEQ ID NO: 121204 - RNA, 21 nt, Artificial Sequence
  Synthetic
cgagucuagacucugugguau

SEQ ID NO: 121205 - RNA, 22 nt, Artificial Sequence
  Synthetic
acgagucuagacucugugguau

SEQ ID NO: 121206 - RNA, 23 nt, Artificial Sequence
  Synthetic
cacgagucuagacucugugguau

SEQ ID NO: 121207 - RNA, 24 nt, Artificial Sequence
  Synthetic
ccacgagucuagacucugugguau

SEQ ID NO: 121208 - RNA, 18 nt, Artificial Sequence
  Synthetic
guccaagaguccucuuau

SEQ ID NO: 121209 - RNA, 19 nt, Artificial Sequence
  Synthetic
aguccaagaguccucuuau

SEQ ID NO: 121210 - RNA, 20 nt, Artificial Sequence
  Synthetic
aaguccaagaguccucuuau

SEQ ID NO: 121211 - RNA, 21 nt, Artificial Sequence
  Synthetic
aaaguccaagaguccucuuau

SEQ ID NO: 121212 - RNA, 22 nt, Artificial Sequence
  Synthetic
gaaaguccaagaguccucuuau

SEQ ID NO: 121213 - RNA, 23 nt, Artificial Sequence
  Synthetic
ugaaaguccaagaguccucuuau

SEQ ID NO: 121214 - RNA, 24 nt, Artificial Sequence
  Synthetic
cugaaaguccaagaguccucuuau

SEQ ID NO: 121215 - RNA, 18 nt, Artificial Sequence
  Synthetic
  misc_feature (2)..(2): n is a, c, g, or u
  misc_feature (11)..(11): n is a, c, g, or u
angguuugaunccuuuau

SEQ ID NO: 121216 - RNA, 19 nt, Artificial Sequence
  Synthetic
  misc_feature (3)..(3): n is a, c, g, or u
  misc_feature (12)..(12): n is a, c, g, or u
uangguuugaunccuuuau

SEQ ID NO: 121217 - RNA, 20 nt, Artificial Sequence
  Synthetic
  misc_feature (4)..(4): n is a, c, g, or u
  misc_feature (13)..(13): n is a, c, g, or u
auangguuugaunccuuuau

SEQ ID NO: 121218 - RNA, 21 nt, Artificial Sequence
  Synthetic
  misc_feature (5)..(5): n is a, c, g, or u
  misc_feature (14)..(14): n is a, c, g, or u
aauangguuugaunccuuuau

SEQ ID NO: 121219 - RNA, 22 nt, Artificial Sequence
  Synthetic
  misc_feature (6)..(6): n is a, c, g, or u
  misc_feature (15)..(15): n is a, c, g, or u
uaauangguuugaunccuuuau

SEQ ID NO: 121220 - RNA, 23 nt, Artificial Sequence
  Synthetic
  misc_feature (7)..(7): n is a, c, g, or u
  misc_feature (16)..(16): n is a, c, g, or u
auaauangguuugaunccuuuau

SEQ ID NO: 121221 - RNA, 24 nt, Artificial Sequence
  Synthetic
  misc_feature (8)..(8): n is a, c, g, or u
  misc_feature (17)..(17): n is a, c, g, or u
gauaauangguuugaunccuuuau

SEQ ID NO: 121222 - RNA, 18 nt, Artificial Sequence
  Synthetic
  misc_feature (5)..(5): n is a, c, g, or u
  misc_feature (7)..(7): n is a, c, g, or u
gugungncucucuuuuau

SEQ ID NO: 121223 - RNA, 19 nt, Artificial Sequence
  Synthetic
  misc_feature (6)..(6): n is a, c, g, or u
  misc_feature (8)..(8): n is a, c, g, or u
cgugungncucucuuuuau

SEQ ID NO: 121224 - RNA, 20 nt, Artificial Sequence
  Synthetic
  misc_feature (7)..(7): n is a, c, g, or u
  misc_feature (9)..(9): n is a, c, g, or u
acgugungncucucuuuuau

SEQ ID NO: 121225 - RNA, 21 nt, Artificial Sequence
  Synthetic
  misc_feature (8)..(8): n is a, c, g, or u
  misc_feature (10)..(10): n is a, c, g, or u
uacgugungncucucuuuuau

SEQ ID NO: 121226 - RNA, 22 nt, Artificial Sequence
  Synthetic
  misc_feature (9)..(9): n is a, c, g, or u
  misc_feature (11)..(11): n is a, c, g, or u
cuacgugungncucucuuuuau

SEQ ID NO: 121227 - RNA, 23 nt, Artificial Sequence
  Synthetic
  misc_feature (10)..(10): n is a, c, g, or u
  misc_feature (12)..(12): n is a, c, g, or u
gcuacgugungncucucuuuuau

SEQ ID NO: 121228 - RNA, 24 nt, Artificial Sequence
  Synthetic
  misc_feature (11)..(11): n is a, c, g, or u
  misc_feature (13)..(13): n is a, c, g, or u
cgcuacgugungncucucuuuuau

SEQ ID NO: 121229 - RNA, 18 nt, Artificial Sequence
  Synthetic
cacaucauccauauaacu

SEQ ID NO: 121230 - RNA, 19 nt, Artificial Sequence
  Synthetic
ccacaucauccauauaacu

SEQ ID NO: 121231 - RNA, 20 nt, Artificial Sequence
  Synthetic
accacaucauccauauaacu

SEQ ID NO: 121232 - RNA, 21 nt, Artificial Sequence
  Synthetic
  misc_feature (1)..(1): n is a, c, g, or u
naccacaucauccauauaacu

SEQ ID NO: 121233 - RNA, 22 nt, Artificial Sequence
  Synthetic
  misc_feature (2)..(2): n is a, c, g, or u
anaccacaucauccauauaacu

SEQ ID NO: 121234 - RNA, 23 nt, Artificial Sequence
  Synthetic
  misc_feature (3)..(3): n is a, c, g, or u
aanaccacaucauccauauaacu

SEQ ID NO: 121235 - RNA, 24 nt, Artificial Sequence
  Synthetic
  misc_feature (4)..(4): n is a, c, g, or u
caanaccacaucauccauauaacu

SEQ ID NO: 121236 - RNA, 18 nt, Artificial Sequence
  Synthetic
ggagugcgaauccacacu

SEQ ID NO: 121237 - RNA, 19 nt, Artificial Sequence
  Synthetic
aggagugcgaauccacacu

SEQ ID NO: 121238 - RNA, 20 nt, Artificial Sequence
  Synthetic
gaggagugcgaauccacacu

SEQ ID NO: 121239 - RNA, 21 nt, Artificial Sequence
  Synthetic
ggaggagugcgaauccacacu

SEQ ID NO: 121240 - RNA, 22 nt, Artificial Sequence
  Synthetic
aggaggagugcgaauccacacu

SEQ ID NO: 121241 - RNA, 23 nt, Artificial Sequence
  Synthetic
caggaggagugcgaauccacacu

SEQ ID NO: 121242 - RNA, 24 nt, Artificial Sequence
  Synthetic
gcaggaggagugcgaauccacacu

SEQ ID NO: 121243 - RNA, 18 nt, Artificial Sequence
  Synthetic
cacugaacaaauggcacu

SEQ ID NO: 121244 - RNA, 19 nt, Artificial Sequence
  Synthetic
ccacugaacaaauggcacu

SEQ ID NO: 121245 - RNA, 20 nt, Artificial Sequence
  Synthetic
accacugaacaaauggcacu

SEQ ID NO: 121246 - RNA, 21 nt, Artificial Sequence
  Synthetic
aaccacugaacaaauggcacu

SEQ ID NO: 121247 - RNA, 22 nt, Artificial Sequence
  Synthetic
gaaccacugaacaaauggcacu

SEQ ID NO: 121248 - RNA, 23 nt, Artificial Sequence
  Synthetic
cgaaccacugaacaaauggcacu

SEQ ID NO: 121249 - RNA, 24 nt, Artificial Sequence
  Synthetic
acgaaccacugaacaaauggcacu

SEQ ID NO: 121250 - RNA, 18 nt, Artificial Sequence
  Synthetic
aacaauguuccggagacu

SEQ ID NO: 121251 - RNA, 19 nt, Artificial Sequence
  Synthetic
gaacaauguuccggagacu

SEQ ID NO: 121252 - RNA, 20 nt, Artificial Sequence
  Synthetic
ugaacaauguuccggagacu

SEQ ID NO: 121253 - RNA, 21 nt, Artificial Sequence
  Synthetic
gugaacaauguuccggagacu

SEQ ID NO: 121254 - RNA, 22 nt, Artificial Sequence
  Synthetic
ggugaacaauguuccggagacu

SEQ ID NO: 121255 - RNA, 23 nt, Artificial Sequence
  Synthetic
aggugaacaauguuccggagacu

SEQ ID NO: 121256 - RNA, 24 nt, Artificial Sequence
  Synthetic
gaggugaacaauguuccggagacu

SEQ ID NO: 121257 - RNA, 18 nt, Artificial Sequence
  Synthetic
  misc_feature (9)..(9): n is a, c, g, or u
aaguacagngcccugacu

SEQ ID NO: 121258 - RNA, 19 nt, Artificial Sequence
  Synthetic
  misc_feature (10)..(10): n is a, c, g, or u
aaaguacagngcccugacu

SEQ ID NO: 121259 - RNA, 20 nt, Artificial Sequence
  Synthetic
  misc_feature (11)..(11): n is a, c, g, or u
gaaaguacagngcccugacu

SEQ ID NO: 121260 - RNA, 21 nt, Artificial Sequence
  Synthetic
  misc_feature (12)..(12): n is a, c, g, or u
ggaaaguacagngcccugacu

SEQ ID NO: 121261 - RNA, 22 nt, Artificial Sequence
  Synthetic
  misc_feature (13)..(13): n is a, c, g, or u
aggaaaguacagngcccugacu

SEQ ID NO: 121262 - RNA, 23 nt, Artificial Sequence
  Synthetic
  misc_feature (14)..(14): n is a, c, g, or u
caggaaaguacagngcccugacu

SEQ ID NO: 121263 - RNA, 24 nt, Artificial Sequence
  Synthetic
  misc_feature (15)..(15): n is a, c, g, or u
gcaggaaaguacagngcccugacu

SEQ ID NO: 121264 - RNA, 18 nt, Artificial Sequence
  Synthetic
cuccuguuuucauuuacu

SEQ ID NO: 121265 - RNA, 19 nt, Artificial Sequence
  Synthetic
ucuccuguuuucauuuacu

SEQ ID NO: 121266 - RNA, 20 nt, Artificial Sequence
  Synthetic
gucuccuguuuucauuuacu

SEQ ID NO: 121267 - RNA, 21 nt, Artificial Sequence
  Synthetic
agucuccuguuuucauuuacu

SEQ ID NO: 121268 - RNA, 22 nt, Artificial Sequence
  Synthetic
uagucuccuguuuucauuuacu

SEQ ID NO: 121269 - RNA, 23 nt, Artificial Sequence
  Synthetic
uuagucuccuguuuucauuuacu

SEQ ID NO: 121270 - RNA, 24 nt, Artificial Sequence
  Synthetic
uuuagucuccuguuuucauuuacu

SEQ ID NO: 121271 - RNA, 18 nt, Artificial Sequence
  Synthetic
  misc_feature (7)..(7): n is a, c, g, or u
aacauunggauaaaaccu

SEQ ID NO: 121272 - RNA, 19 nt, Artificial Sequence
  Synthetic
  misc_feature (8)..(8): n is a, c, g, or u
uaacauunggauaaaaccu

SEQ ID NO: 121273 - RNA, 20 nt, Artificial Sequence
  Synthetic
  misc_feature (9)..(9): n is a, c, g, or u
guaacauunggauaaaaccu

SEQ ID NO: 121274 - RNA, 21 nt, Artificial Sequence
  Synthetic
  misc_feature (10)..(10): n is a, c, g, or u
aguaacauunggauaaaaccu

SEQ ID NO: 121275 - RNA, 22 nt, Artificial Sequence
  Synthetic
  misc_feature (11)..(11): n is a, c, g, or u
uaguaacauunggauaaaaccu

SEQ ID NO: 121276 - RNA, 23 nt, Artificial Sequence
  Synthetic
  misc_feature (12)..(12): n is a, c, g, or u
uuaguaacauunggauaaaaccu

SEQ ID NO: 121277 - RNA, 24 nt, Artificial Sequence
  Synthetic
  misc_feature (13)..(13): n is a, c, g, or u
uuuaguaacauunggauaaaaccu

SEQ ID NO: 121278 - RNA, 18 nt, Artificial Sequence
  Synthetic
  misc_feature (13)..(13): n is a, c, g, or u
cacacggguguunccccu

SEQ ID NO: 121279 - RNA, 19 nt, Artificial Sequence
  Synthetic
  misc_feature (14)..(14): n is a, c, g, or u
acacacggguguunccccu

SEQ ID NO: 121280 - RNA, 20 nt, Artificial Sequence
  Synthetic
  misc_feature (15)..(15): n is a, c, g, or u
gacacacggguguunccccu

SEQ ID NO: 121281 - RNA, 21 nt, Artificial Sequence
  Synthetic
  misc_feature (16)..(16): n is a, c, g, or u
agacacacggguguunccccu

SEQ ID NO: 121282 - RNA, 22 nt, Artificial Sequence
  Synthetic
  misc_feature (17)..(17): n is a, c, g, or u
aagacacacggguguunccccu

SEQ ID NO: 121283 - RNA, 23 nt, Artificial Sequence
  Synthetic
  misc_feature (18)..(18): n is a, c, g, or u
caagacacacggguguunccccu

SEQ ID NO: 121284 - RNA, 24 nt, Artificial Sequence
  Synthetic
  misc_feature (19)..(19): n is a, c, g, or u
ccaagacacacggguguunccccu

SEQ ID NO: 121285 - RNA, 18 nt, Artificial Sequence
  Synthetic
acagugggggaaagcccu

SEQ ID NO: 121286 - RNA, 19 nt, Artificial Sequence
  Synthetic
gacagugggggaaagcccu

SEQ ID NO: 121287 - RNA, 20 nt, Artificial Sequence
  Synthetic
agacagugggggaaagcccu

SEQ ID NO: 121288 - RNA, 21 nt, Artificial Sequence
  Synthetic
cagacagugggggaaagcccu

SEQ ID NO: 121289 - RNA, 22 nt, Artificial Sequence
  Synthetic
ccagacagugggggaaagcccu

SEQ ID NO: 121290 - RNA, 23 nt, Artificial Sequence
  Synthetic
gccagacagugggggaaagcccu

SEQ ID NO: 121291 - RNA, 24 nt, Artificial Sequence
  Synthetic
agccagacagugggggaaagcccu

SEQ ID NO: 121292 - RNA, 18 nt, Artificial Sequence
  Synthetic
caguuggcagcacagccu

SEQ ID NO: 121293 - RNA, 19 nt, Artificial Sequence
  Synthetic
ccaguuggcagcacagccu

SEQ ID NO: 121294 - RNA, 20 nt, Artificial Sequence
  Synthetic
uccaguuggcagcacagccu

SEQ ID NO: 121295 - RNA, 21 nt, Artificial Sequence
  Synthetic
auccaguuggcagcacagccu

SEQ ID NO: 121296 - RNA, 22 nt, Artificial Sequence
  Synthetic
gauccaguuggcagcacagccu

SEQ ID NO: 121297 - RNA, 23 nt, Artificial Sequence
  Synthetic
ggauccaguuggcagcacagccu

SEQ ID NO: 121298 - RNA, 24 nt, Artificial Sequence
  Synthetic
aggauccaguuggcagcacagccu

SEQ ID NO: 121299 - RNA, 18 nt, Artificial Sequence
  Synthetic
  misc_feature (7)..(7): n is a, c, g, or u
ugaguangcccugagccu

SEQ ID NO: 121300 - RNA, 19 nt, Artificial Sequence
  Synthetic
  misc_feature (8)..(8): n is a, c, g, or u
gugaguangcccugagccu

SEQ ID NO: 121301 - RNA, 20 nt, Artificial Sequence
  Synthetic
  misc_feature (9)..(9): n is a, c, g, or u
ugugaguangcccugagccu

SEQ ID NO: 121302 - RNA, 21 nt, Artificial Sequence
  Synthetic
  misc_feature (10)..(10): n is a, c, g, or u
uugugaguangcccugagccu

SEQ ID NO: 121303 - RNA, 22 nt, Artificial Sequence
  Synthetic
  misc_feature (11)..(11): n is a, c, g, or u
guugugaguangcccugagccu

SEQ ID NO: 121304 - RNA, 23 nt, Artificial Sequence
  Synthetic
  misc_feature (12)..(12): n is a, c, g, or u
aguugugaguangcccugagccu

SEQ ID NO: 121305 - RNA, 24 nt, Artificial Sequence
  Synthetic
  misc_feature (13)..(13): n is a, c, g, or u
caguugugaguangcccugagccu

SEQ ID NO: 121306 - RNA, 18 nt, Artificial Sequence
  Synthetic
  misc_feature (11)..(11): n is a, c, g, or u
uauauaagauncccgccu

SEQ ID NO: 121307 - RNA, 19 nt, Artificial Sequence
  Synthetic
  misc_feature (12)..(12): n is a, c, g, or u
uuauauaagauncccgccu

SEQ ID NO: 121308 - RNA, 20 nt, Artificial Sequence
  Synthetic
  misc_feature (13)..(13): n is a, c, g, or u
uuuauauaagauncccgccu

SEQ ID NO: 121309 - RNA, 21 nt, Artificial Sequence
  Synthetic
  misc_feature (14)..(14): n is a, c, g, or u
uuuuauauaagauncccgccu

SEQ ID NO: 121310 - RNA, 22 nt, Artificial Sequence
  Synthetic
  misc_feature (15)..(15): n is a, c, g, or u
cuuuuauauaagauncccgccu

SEQ ID NO: 121311 - RNA, 23 nt, Artificial Sequence
  Synthetic
  misc_feature (16)..(16): n is a, c, g, or u
ucuuuuauauaagauncccgccu

SEQ ID NO: 121312 - RNA, 24 nt, Artificial Sequence
  Synthetic
  misc_feature (17)..(17): n is a, c, g, or u
cucuuuuauauaagauncccgccu

SEQ ID NO: 121313 - RNA, 18 nt, Artificial Sequence
  Synthetic
  misc_feature (5)..(5): n is a, c, g, or u
guuuncuuagaaaggccu

SEQ ID NO: 121314 - RNA, 19 nt, Artificial Sequence
  Synthetic
  misc_feature (6)..(6): n is a, c, g, or u
uguuuncuuagaaaggccu

SEQ ID NO: 121315 - RNA, 20 nt, Artificial Sequence
  Synthetic
  misc_feature (1)..(1): n is a, c, g, or u
  misc_feature (7)..(7): n is a, c, g, or u
nuguuuncuuagaaaggccu

SEQ ID NO: 121316 - RNA, 21 nt, Artificial Sequence
  Synthetic
  misc_feature (2)..(2): n is a, c, g, or u
  misc_feature (8)..(8): n is a, c, g, or u
anuguuuncuuagaaaggccu

SEQ ID NO: 121317 - RNA, 22 nt, Artificial Sequence
  Synthetic
  misc_feature (3)..(3): n is a, c, g, or u
  misc_feature (9)..(9): n is a, c, g, or u
uanuguuuncuuagaaaggccu

SEQ ID NO: 121318 - RNA, 23 nt, Artificial Sequence
  Synthetic
  misc_feature (4)..(4): n is a, c, g, or u
  misc_feature (10)..(10): n is a, c, g, or u
auanuguuuncuuagaaaggccu

SEQ ID NO: 121319 - RNA, 24 nt, Artificial Sequence
  Synthetic
  misc_feature (5)..(5): n is a, c, g, or u
  misc_feature (11)..(11): n is a, c, g, or u
gauanuguuuncuuagaaaggccu

SEQ ID NO: 121320 - RNA, 18 nt, Artificial Sequence
  Synthetic
gccacccaaggcacagcu

SEQ ID NO: 121321 - RNA, 19 nt, Artificial Sequence
  Synthetic
agccacccaaggcacagcu

SEQ ID NO: 121322 - RNA, 20 nt, Artificial Sequence
  Synthetic
aagccacccaaggcacagcu

SEQ ID NO: 121323 - RNA, 21 nt, Artificial Sequence
  Synthetic
aaagccacccaaggcacagcu

SEQ ID NO: 121324 - RNA, 22 nt, Artificial Sequence
  Synthetic
  misc_feature (1)..(1): n is a, c, g, or u
naaagccacccaaggcacagcu

SEQ ID NO: 121325 - RNA, 23 nt, Artificial Sequence
  Synthetic
  misc_feature (2)..(2): n is a, c, g, or u
cnaaagccacccaaggcacagcu

SEQ ID NO: 121326 - RNA, 24 nt, Artificial Sequence
  Synthetic
  misc_feature (3)..(3): n is a, c, g, or u
ccnaaagccacccaaggcacagcu

SEQ ID NO: 121327 - RNA, 18 nt, Artificial Sequence
  Synthetic
gaggcaggaggaggagcu

SEQ ID NO: 121328 - RNA, 19 nt, Artificial Sequence
  Synthetic
ggaggcaggaggaggagcu

SEQ ID NO: 121329 - RNA, 20 nt, Artificial Sequence
  Synthetic
uggaggcaggaggaggagcu

SEQ ID NO: 121330 - RNA, 21 nt, Artificial Sequence
  Synthetic
guggaggcaggaggaggagcu

SEQ ID NO: 121331 - RNA, 22 nt, Artificial Sequence
  Synthetic
gguggaggcaggaggaggagcu

SEQ ID NO: 121332 - RNA, 23 nt, Artificial Sequence
  Synthetic
ugguggaggcaggaggaggagcu

SEQ ID NO: 121333 - RNA, 24 nt, Artificial Sequence
  Synthetic
uugguggaggcaggaggaggagcu

SEQ ID NO: 121334 - RNA, 18 nt, Artificial Sequence
  Synthetic
agguuccacgcaugcgcu

SEQ ID NO: 121335 - RNA, 19 nt, Artificial Sequence
  Synthetic
aagguuccacgcaugcgcu

SEQ ID NO: 121336 - RNA, 20 nt, Artificial Sequence
  Synthetic
aaagguuccacgcaugcgcu

SEQ ID NO: 121337 - RNA, 21 nt, Artificial Sequence
  Synthetic
caaagguuccacgcaugcgcu

SEQ ID NO: 121338 - RNA, 22 nt, Artificial Sequence
  Synthetic
acaaagguuccacgcaugcgcu

SEQ ID NO: 121339 - RNA, 23 nt, Artificial Sequence
  Synthetic
cacaaagguuccacgcaugcgcu

SEQ ID NO: 121340 - RNA, 24 nt, Artificial Sequence
  Synthetic
acacaaagguuccacgcaugcgcu

SEQ ID NO: 121341 - RNA, 18 nt, Artificial Sequence
  Synthetic
  misc_feature (4)..(4): n is a, c, g, or u
  misc_feature (7)..(7): n is a, c, g, or u
  misc_feature (15)..(15): n is a, c, g, or u
uuungcnccagaccngcu

SEQ ID NO: 121342 - RNA, 19 nt, Artificial Sequence
  Synthetic
  misc_feature (5)..(5): n is a, c, g, or u
  misc_feature (8)..(8): n is a, c, g, or u
  misc_feature (16)..(16): n is a, c, g, or u
guuungcnccagaccngcu

SEQ ID NO: 121343 - RNA, 20 nt, Artificial Sequence
  Synthetic
  misc_feature (6)..(6): n is a, c, g, or u
  misc_feature (9)..(9): n is a, c, g, or u
  misc_feature (17)..(17): n is a, c, g, or u
aguuungcnccagaccngcu

SEQ ID NO: 121344 - RNA, 21 nt, Artificial Sequence
  Synthetic
  misc_feature (7)..(7): n is a, c, g, or u
  misc_feature (10)..(10): n is a, c, g, or u
  misc_feature (18)..(18): n is a, c, g, or u
gaguuungcnccagaccngcu

SEQ ID NO: 121345 - RNA, 22 nt, Artificial Sequence
  Synthetic
  misc_feature (8)..(8): n is a, c, g, or u
  misc_feature (11)..(11): n is a, c, g, or u
  misc_feature (19)..(19): n is a, c, g, or u
ugaguuungcnccagaccngcu

SEQ ID NO: 121346 - RNA, 23 nt, Artificial Sequence
  Synthetic
  misc_feature (9)..(9): n is a, c, g, or u
  misc_feature (12)..(12): n is a, c, g, or u
  misc_feature (20)..(20): n is a, c, g, or u
augaguuungcnccagaccngcu

SEQ ID NO: 121347 - RNA, 24 nt, Artificial Sequence
  Synthetic
  misc_feature (10)..(10): n is a, c, g, or u
  misc_feature (13)..(13): n is a, c, g, or u
  misc_feature (21)..(21): n is a, c, g, or u
gaugaguuungcnccagaccngcu

SEQ ID NO: 121348 - RNA, 18 nt, Artificial Sequence
  Synthetic
aaaaaguugcauggugcu

SEQ ID NO: 121349 - RNA, 19 nt, Artificial Sequence
  Synthetic
gaaaaaguugcauggugcu

SEQ ID NO: 121350 - RNA, 20 nt, Artificial Sequence
  Synthetic
ugaaaaaguugcauggugcu

SEQ ID NO: 121351 - RNA, 21 nt, Artificial Sequence
  Synthetic
gugaaaaaguugcauggugcu

SEQ ID NO: 121352 - RNA, 22 nt, Artificial Sequence
  Synthetic
ggugaaaaaguugcauggugcu

SEQ ID NO: 121353 - RNA, 23 nt, Artificial Sequence
  Synthetic
aggugaaaaaguugcauggugcu

SEQ ID NO: 121354 - RNA, 24 nt, Artificial Sequence
  Synthetic
gaggugaaaaaguugcauggugcu

SEQ ID NO: 121355 - RNA, 18 nt, Artificial Sequence
  Synthetic
  misc_feature (10)..(10): n is a, c, g, or u
  misc_feature (16)..(16): n is a, c, g, or u
cacaaauugnuuacancu

SEQ ID NO: 121356 - RNA, 19 nt, Artificial Sequence
  Synthetic
  misc_feature (11)..(11): n is a, c, g, or u
  misc_feature (17)..(17): n is a, c, g, or u
ccacaaauugnuuacancu

SEQ ID NO: 121357 - RNA, 20 nt, Artificial Sequence
  Synthetic
  misc_feature (12)..(12): n is a, c, g, or u
  misc_feature (18)..(18): n is a, c, g, or u
cccacaaauugnuuacancu

SEQ ID NO: 121358 - RNA, 21 nt, Artificial Sequence
  Synthetic
  misc_feature (1)..(1): n is a, c, g, or u
  misc_feature (13)..(13): n is a, c, g, or u
  misc_feature (19)..(19): n is a, c, g, or u
ncccacaaauugnuuacancu

SEQ ID NO: 121359 - RNA, 22 nt, Artificial Sequence
  Synthetic
  misc_feature (2)..(2): n is a, c, g, or u
  misc_feature (14)..(14): n is a, c, g, or u
  misc_feature (20)..(20): n is a, c, g, or u
gncccacaaauugnuuacancu

SEQ ID NO: 121360 - RNA, 23 nt, Artificial Sequence
  Synthetic
  misc_feature (3)..(3): n is a, c, g, or u
  misc_feature (15)..(15): n is a, c, g, or u
  misc_feature (21)..(21): n is a, c, g, or u
ggncccacaaauugnuuacancu

SEQ ID NO: 121361 - RNA, 24 nt, Artificial Sequence
  Synthetic
  misc_feature (4)..(4): n is a, c, g, or u
  misc_feature (16)..(16): n is a, c, g, or u
  misc_feature (22)..(22): n is a, c, g, or u
gggncccacaaauugnuuacancu

SEQ ID NO: 121362 - RNA, 18 nt, Artificial Sequence
  Synthetic
  misc_feature (16)..(16): n is a, c, g, or u
cugaggaugagugucncu

SEQ ID NO: 121363 - RNA, 19 nt, Artificial Sequence
  Synthetic
  misc_feature (17)..(17): n is a, c, g, or u
ccugaggaugagugucncu

SEQ ID NO: 121364 - RNA, 20 nt, Artificial Sequence
  Synthetic
  misc_feature (18)..(18): n is a, c, g, or u
gccugaggaugagugucncu

SEQ ID NO: 121365 - RNA, 21 nt, Artificial Sequence
  Synthetic
  misc_feature (19)..(19): n is a, c, g, or u
ggccugaggaugagugucncu

SEQ ID NO: 121366 - RNA, 22 nt, Artificial Sequence
  Synthetic
  misc_feature (20)..(20): n is a, c, g, or u
uggccugaggaugagugucncu

SEQ ID NO: 121367 - RNA, 23 nt, Artificial Sequence
  Synthetic
  misc_feature (21)..(21): n is a, c, g, or u
auggccugaggaugagugucncu

SEQ ID NO: 121368 - RNA, 24 nt, Artificial Sequence
  Synthetic
  misc_feature (22)..(22): n is a, c, g, or u
cauggccugaggaugagugucncu

SEQ ID NO: 121369 - RNA, 18 nt, Artificial Sequence
  Synthetic
  misc_feature (10)..(10): n is a, c, g, or u
  misc_feature (16)..(16): n is a, c, g, or u
guucagauanuguuuncu

SEQ ID NO: 121370 - RNA, 19 nt, Artificial Sequence
  Synthetic
  misc_feature (11)..(11): n is a, c, g, or u
  misc_feature (17)..(17): n is a, c, g, or u
gguucagauanuguuuncu

SEQ ID NO: 121371 - RNA, 20 nt, Artificial Sequence
  Synthetic
  misc_feature (12)..(12): n is a, c, g, or u
  misc_feature (18)..(18): n is a, c, g, or u
agguucagauanuguuuncu

SEQ ID NO: 121372 - RNA, 21 nt, Artificial Sequence
  Synthetic
  misc_feature (13)..(13): n is a, c, g, or u
  misc_feature (19)..(19): n is a, c, g, or u
aagguucagauanuguuuncu

SEQ ID NO: 121373 - RNA, 22 nt, Artificial Sequence
  Synthetic
  misc_feature (14)..(14): n is a, c, g, or u
  misc_feature (20)..(20): n is a, c, g, or u
aaagguucagauanuguuuncu

SEQ ID NO: 121374 - RNA, 23 nt, Artificial Sequence
  Synthetic
  misc_feature (15)..(15): n is a, c, g, or u
  misc_feature (21)..(21): n is a, c, g, or u
uaaagguucagauanuguuuncu

SEQ ID NO: 121375 - RNA, 24 nt, Artificial Sequence
  Synthetic
  misc_feature (16)..(16): n is a, c, g, or u
  misc_feature (22)..(22): n is a, c, g, or u
guaaagguucagauanuguuuncu

SEQ ID NO: 121376 - RNA, 18 nt, Artificial Sequence
  Synthetic
gcccugacucugggaucu

SEQ ID NO: 121377 - RNA, 19 nt, Artificial Sequence
  Synthetic
  misc_feature (1)..(1): n is a, c, g, or u
ngcccugacucugggaucu

SEQ ID NO: 121378 - RNA, 20 nt, Artificial Sequence
  Synthetic
  misc_feature (2)..(2): n is a, c, g, or u
gngcccugacucugggaucu

SEQ ID NO: 121379 - RNA, 21 nt, Artificial Sequence
  Synthetic
  misc_feature (3)..(3): n is a, c, g, or u
agngcccugacucugggaucu

SEQ ID NO: 121380 - RNA, 22 nt, Artificial Sequence
  Synthetic
  misc_feature (4)..(4): n is a, c, g, or u
cagngcccugacucugggaucu

SEQ ID NO: 121381 - RNA, 23 nt, Artificial Sequence
  Synthetic
  misc_feature (5)..(5): n is a, c, g, or u
acagngcccugacucugggaucu

SEQ ID NO: 121382 - RNA, 24 nt, Artificial Sequence
  Synthetic
  misc_feature (6)..(6): n is a, c, g, or u
uacagngcccugacucugggaucu

SEQ ID NO: 121383 - RNA, 18 nt, Artificial Sequence
  Synthetic
ucccuggaugcuggaucu

SEQ ID NO: 121384 - RNA, 19 nt, Artificial Sequence
  Synthetic
uucccuggaugcuggaucu

SEQ ID NO: 121385 - RNA, 20 nt, Artificial Sequence
  Synthetic
auucccuggaugcuggaucu

SEQ ID NO: 121386 - RNA, 21 nt, Artificial Sequence
  Synthetic
aauucccuggaugcuggaucu

SEQ ID NO: 121387 - RNA, 22 nt, Artificial Sequence
  Synthetic
uaauucccuggaugcuggaucu

SEQ ID NO: 121388 - RNA, 23 nt, Artificial Sequence
  Synthetic
cuaauucccuggaugcuggaucu

SEQ ID NO: 121389 - RNA, 24 nt, Artificial Sequence
  Synthetic
acuaauucccuggaugcuggaucu

SEQ ID NO: 121390 - RNA, 18 nt, Artificial Sequence
  Synthetic
  misc_feature (9)..(9): n is a, c, g, or u
gguuugaunccuuuaucu

SEQ ID NO: 121391 - RNA, 19 nt, Artificial Sequence
  Synthetic
  misc_feature (1)..(1): n is a, c, g, or u
  misc_feature (10)..(10): n is a, c, g, or u
ngguuugaunccuuuaucu

SEQ ID NO: 121392 - RNA, 20 nt, Artificial Sequence
  Synthetic
  misc_feature (2)..(2): n is a, c, g, or u
  misc_feature (11)..(11): n is a, c, g, or u
angguuugaunccuuuaucu

SEQ ID NO: 121393 - RNA, 21 nt, Artificial Sequence
  Synthetic
  misc_feature (3)..(3): n is a, c, g, or u
  misc_feature (12)..(12): n is a, c, g, or u
uangguuugaunccuuuaucu

SEQ ID NO: 121394 - RNA, 22 nt, Artificial Sequence
  Synthetic
  misc_feature (4)..(4): n is a, c, g, or u
  misc_feature (13)..(13): n is a, c, g, or u
auangguuugaunccuuuaucu

SEQ ID NO: 121395 - RNA, 23 nt, Artificial Sequence
  Synthetic
  misc_feature (5)..(5): n is a, c, g, or u
  misc_feature (14)..(14): n is a, c, g, or u
aauangguuugaunccuuuaucu

SEQ ID NO: 121396 - RNA, 24 nt, Artificial Sequence
  Synthetic
  misc_feature (6)..(6): n is a, c, g, or u
  misc_feature (15)..(15): n is a, c, g, or u
uaauangguuugaunccuuuaucu

SEQ ID NO: 121397 - RNA, 18 nt, Artificial Sequence
  Synthetic
uucaagaacaguuucucu

SEQ ID NO: 121398 - RNA, 19 nt, Artificial Sequence
  Synthetic
auucaagaacaguuucucu

SEQ ID NO: 121399 - RNA, 20 nt, Artificial Sequence
  Synthetic
uauucaagaacaguuucucu

SEQ ID NO: 121400 - RNA, 21 nt, Artificial Sequence
  Synthetic
auauucaagaacaguuucucu

SEQ ID NO: 121401 - RNA, 22 nt, Artificial Sequence
  Synthetic
aauauucaagaacaguuucucu

SEQ ID NO: 121402 - RNA, 23 nt, Artificial Sequence
  Synthetic
aaauauucaagaacaguuucucu

SEQ ID NO: 121403 - RNA, 24 nt, Artificial Sequence
  Synthetic
caaauauucaagaacaguuucucu

SEQ ID NO: 121404 - RNA, 18 nt, Artificial Sequence
  Synthetic
  misc_feature (4)..(4): n is a, c, g, or u
ucanuaaacacacagucu

SEQ ID NO: 121405 - RNA, 19 nt, Artificial Sequence
  Synthetic
  misc_feature (5)..(5): n is a, c, g, or u
cucanuaaacacacagucu

SEQ ID NO: 121406 - RNA, 20 nt, Artificial Sequence
  Synthetic
  misc_feature (6)..(6): n is a, c, g, or u
acucanuaaacacacagucu

SEQ ID NO: 121407 - RNA, 21 nt, Artificial Sequence
  Synthetic
  misc_feature (7)..(7): n is a, c, g, or u
cacucanuaaacacacagucu

SEQ ID NO: 121408 - RNA, 22 nt, Artificial Sequence
  Synthetic
  misc_feature (8)..(8): n is a, c, g, or u
ccacucanuaaacacacagucu

SEQ ID NO: 121409 - RNA, 23 nt, Artificial Sequence
  Synthetic
  misc_feature (9)..(9): n is a, c, g, or u
cccacucanuaaacacacagucu

SEQ ID NO: 121410 - RNA, 24 nt, Artificial Sequence
  Synthetic
  misc_feature (10)..(10): n is a, c, g, or u
ucccacucanuaaacacacagucu

SEQ ID NO: 121411 - RNA, 18 nt, Artificial Sequence
  Synthetic
  misc_feature (12)..(12): n is a, c, g, or u
ggaccugccucnucgucu

SEQ ID NO: 121412 - RNA, 19 nt, Artificial Sequence
  Synthetic
  misc_feature (13)..(13): n is a, c, g, or u
gggaccugccucnucgucu

SEQ ID NO: 121413 - RNA, 20 nt, Artificial Sequence
  Synthetic
  misc_feature (14)..(14): n is a, c, g, or u
ggggaccugccucnucgucu

SEQ ID NO: 121414 - RNA, 21 nt, Artificial Sequence
  Synthetic
  misc_feature (15)..(15): n is a, c, g, or u
aggggaccugccucnucgucu

SEQ ID NO: 121415 - RNA, 22 nt, Artificial Sequence
  Synthetic
  misc_feature (16)..(16): n is a, c, g, or u
uaggggaccugccucnucgucu

SEQ ID NO: 121416 - RNA, 23 nt, Artificial Sequence
  Synthetic
  misc_feature (17)..(17): n is a, c, g, or u
cuaggggaccugccucnucgucu

SEQ ID NO: 121417 - RNA, 24 nt, Artificial Sequence
  Synthetic
  misc_feature (18)..(18): n is a, c, g, or u
ucuaggggaccugccucnucgucu

SEQ ID NO: 121418 - RNA, 18 nt, Artificial Sequence
  Synthetic
cgauugagaccuucgucu

SEQ ID NO: 121419 - RNA, 19 nt, Artificial Sequence
  Synthetic
gcgauugagaccuucgucu

SEQ ID NO: 121420 - RNA, 20 nt, Artificial Sequence
  Synthetic
ggcgauugagaccuucgucu

SEQ ID NO: 121421 - RNA, 18 nt, Artificial Sequence
  Synthetic
cgagggaguucuucuucu

SEQ ID NO: 121422 - RNA, 19 nt, Artificial Sequence
  Synthetic
gcgagggaguucuucuucu

SEQ ID NO: 121423 - RNA, 20 nt, Artificial Sequence
  Synthetic
ggcgagggaguucuucuucu

SEQ ID NO: 121424 - RNA, 21 nt, Artificial Sequence
  Synthetic
aggcgagggaguucuucuucu

SEQ ID NO: 121425 - RNA, 22 nt, Artificial Sequence
  Synthetic
gaggcgagggaguucuucuucu

SEQ ID NO: 121426 - RNA, 23 nt, Artificial Sequence
  Synthetic
cgaggcgagggaguucuucuucu

SEQ ID NO: 121427 - RNA, 24 nt, Artificial Sequence
  Synthetic
gcgaggcgagggaguucuucuucu

SEQ ID NO: 121428 - RNA, 18 nt, Artificial Sequence
  Synthetic
aggcgagggaguucuucu

SEQ ID NO: 121429 - RNA, 19 nt, Artificial Sequence
  Synthetic
gaggcgagggaguucuucu

SEQ ID NO: 121430 - RNA, 20 nt, Artificial Sequence
  Synthetic
cgaggcgagggaguucuucu

SEQ ID NO: 121431 - RNA, 21 nt, Artificial Sequence
  Synthetic
gcgaggcgagggaguucuucu

SEQ ID NO: 121432 - RNA, 22 nt, Artificial Sequence
  Synthetic
ugcgaggcgagggaguucuucu

SEQ ID NO: 121433 - RNA, 23 nt, Artificial Sequence
  Synthetic
cugcgaggcgagggaguucuucu

SEQ ID NO: 121434 - RNA, 24 nt, Artificial Sequence
  Synthetic
ucugcgaggcgagggaguucuucu

SEQ ID NO: 121435 - RNA, 18 nt, Artificial Sequence
  Synthetic
guaaguuggcgagaaagu

SEQ ID NO: 121436 - RNA, 19 nt, Artificial Sequence
  Synthetic
uguaaguuggcgagaaagu

SEQ ID NO: 121437 - RNA, 20 nt, Artificial Sequence
  Synthetic
uuguaaguuggcgagaaagu

SEQ ID NO: 121438 - RNA, 21 nt, Artificial Sequence
  Synthetic
cuuguaaguuggcgagaaagu

SEQ ID NO: 121439 - RNA, 22 nt, Artificial Sequence
  Synthetic
ccuuguaaguuggcgagaaagu

SEQ ID NO: 121440 - RNA, 23 nt, Artificial Sequence
  Synthetic
gccuuguaaguuggcgagaaagu

SEQ ID NO: 121441 - RNA, 24 nt, Artificial Sequence
  Synthetic
ggccuuguaaguuggcgagaaagu

SEQ ID NO: 121442 - RNA, 18 nt, Artificial Sequence
  Synthetic
guugacauugcugaaagu

SEQ ID NO: 121443 - RNA, 19 nt, Artificial Sequence
  Synthetic
cguugacauugcugaaagu

SEQ ID NO: 121444 - RNA, 20 nt, Artificial Sequence
  Synthetic
ucguugacauugcugaaagu

SEQ ID NO: 121445 - RNA, 21 nt, Artificial Sequence
  Synthetic
gucguugacauugcugaaagu

SEQ ID NO: 121446 - RNA, 22 nt, Artificial Sequence
  Synthetic
ggucguugacauugcugaaagu

SEQ ID NO: 121447 - RNA, 23 nt, Artificial Sequence
  Synthetic
cggucguugacauugcugaaagu

SEQ ID NO: 121448 - RNA, 24 nt, Artificial Sequence
  Synthetic
ucggucguugacauugcugaaagu

SEQ ID NO: 121449 - RNA, 18 nt, Artificial Sequence
  Synthetic
  misc_feature (4)..(4): n is a, c, g, or u
gaanagaaggaaagaagu

SEQ ID NO: 121450 - RNA, 19 nt, Artificial Sequence
  Synthetic
  misc_feature (5)..(5): n is a, c, g, or u
cgaanagaaggaaagaagu

SEQ ID NO: 121451 - RNA, 20 nt, Artificial Sequence
  Synthetic
  misc_feature (6)..(6): n is a, c, g, or u
ucgaanagaaggaaagaagu

SEQ ID NO: 121452 - RNA, 21 nt, Artificial Sequence
  Synthetic
  misc_feature (7)..(7): n is a, c, g, or u
cucgaanagaaggaaagaagu

SEQ ID NO: 121453 - RNA, 22 nt, Artificial Sequence
  Synthetic
  misc_feature (8)..(8): n is a, c, g, or u
ucucgaanagaaggaaagaagu

SEQ ID NO: 121454 - RNA, 23 nt, Artificial Sequence
  Synthetic
  misc_feature (9)..(9): n is a, c, g, or u
aucucgaanagaaggaaagaagu

SEQ ID NO: 121455 - RNA, 24 nt, Artificial Sequence
  Synthetic
  misc_feature (10)..(10): n is a, c, g, or u
gaucucgaanagaaggaaagaagu

SEQ ID NO: 121456 - RNA, 18 nt, Artificial Sequence
  Synthetic
uuacauaucccaugaagu

SEQ ID NO: 121457 - RNA, 19 nt, Artificial Sequence
  Synthetic
auuacauaucccaugaagu

SEQ ID NO: 121458 - RNA, 20 nt, Artificial Sequence
  Synthetic
aauuacauaucccaugaagu

SEQ ID NO: 121459 - RNA, 21 nt, Artificial Sequence
  Synthetic
caauuacauaucccaugaagu

SEQ ID NO: 121460 - RNA, 22 nt, Artificial Sequence
  Synthetic
ccaauuacauaucccaugaagu

SEQ ID NO: 121461 - RNA, 23 nt, Artificial Sequence
  Synthetic
  misc_feature (1)..(1): n is a, c, g, or u
nccaauuacauaucccaugaagu

SEQ ID NO: 121462 - RNA, 24 nt, Artificial Sequence
  Synthetic
  misc_feature (1)..(2): n is a, c, g, or u
nnccaauuacauaucccaugaagu

SEQ ID NO: 121463 - RNA, 18 nt, Artificial Sequence
  Synthetic
aggagcugcuggcacagu

SEQ ID NO: 121464 - RNA, 19 nt, Artificial Sequence
  Synthetic
gaggagcugcuggcacagu

SEQ ID NO: 121465 - RNA, 20 nt, Artificial Sequence
  Synthetic
ggaggagcugcuggcacagu

SEQ ID NO: 121466 - RNA, 21 nt, Artificial Sequence
  Synthetic
aggaggagcugcuggcacagu

SEQ ID NO: 121467 - RNA, 22 nt, Artificial Sequence
  Synthetic
gaggaggagcugcuggcacagu

SEQ ID NO: 121468 - RNA, 23 nt, Artificial Sequence
  Synthetic
ggaggaggagcugcuggcacagu

SEQ ID NO: 121469 - RNA, 24 nt, Artificial Sequence
  Synthetic
aggaggaggagcugcuggcacagu

SEQ ID NO: 121470 - RNA, 18 nt, Artificial Sequence
  Synthetic
aacugaaagccagacagu

SEQ ID NO: 121471 - RNA, 19 nt, Artificial Sequence
  Synthetic
uaacugaaagccagacagu

SEQ ID NO: 121472 - RNA, 20 nt, Artificial Sequence
  Synthetic
auaacugaaagccagacagu

SEQ ID NO: 121473 - RNA, 21 nt, Artificial Sequence
  Synthetic
uauaacugaaagccagacagu

SEQ ID NO: 121474 - RNA, 22 nt, Artificial Sequence
  Synthetic
auauaacugaaagccagacagu

SEQ ID NO: 121475 - RNA, 23 nt, Artificial Sequence
  Synthetic
cauauaacugaaagccagacagu

SEQ ID NO: 121476 - RNA, 24 nt, Artificial Sequence
  Synthetic
ccauauaacugaaagccagacagu

SEQ ID NO: 121477 - RNA, 18 nt, Artificial Sequence
  Synthetic
gagaaguccaccacgagu

SEQ ID NO: 121478 - RNA, 19 nt, Artificial Sequence
  Synthetic
agagaaguccaccacgagu

SEQ ID NO: 121479 - RNA, 20 nt, Artificial Sequence
  Synthetic
gagagaaguccaccacgagu

SEQ ID NO: 121480 - RNA, 21 nt, Artificial Sequence
  Synthetic
ugagagaaguccaccacgagu

SEQ ID NO: 121481 - RNA, 22 nt, Artificial Sequence
  Synthetic
uugagagaaguccaccacgagu

SEQ ID NO: 121482 - RNA, 23 nt, Artificial Sequence
  Synthetic
auugagagaaguccaccacgagu

SEQ ID NO: 121483 - RNA, 24 nt, Artificial Sequence
  Synthetic
aauugagagaaguccaccacgagu

SEQ ID NO: 121484 - RNA, 18 nt, Artificial Sequence
  Synthetic
gcaacauaccuugauagu

SEQ ID NO: 121485 - RNA, 19 nt, Artificial Sequence
  Synthetic
ggcaacauaccuugauagu

SEQ ID NO: 121486 - RNA, 20 nt, Artificial Sequence
  Synthetic
gggcaacauaccuugauagu

SEQ ID NO: 121487 - RNA, 21 nt, Artificial Sequence
  Synthetic
cgggcaacauaccuugauagu

SEQ ID NO: 121488 - RNA, 22 nt, Artificial Sequence
  Synthetic
acgggcaacauaccuugauagu

SEQ ID NO: 121489 - RNA, 23 nt, Artificial Sequence
  Synthetic
aacgggcaacauaccuugauagu

SEQ ID NO: 121490 - RNA, 24 nt, Artificial Sequence
  Synthetic
aaacgggcaacauaccuugauagu

SEQ ID NO: 121491 - RNA, 18 nt, Artificial Sequence
  Synthetic
ugccuacagccuccuagu

SEQ ID NO: 121492 - RNA, 19 nt, Artificial Sequence
  Synthetic
augccuacagccuccuagu

SEQ ID NO: 121493 - RNA, 20 nt, Artificial Sequence
  Synthetic
uaugccuacagccuccuagu

SEQ ID NO: 121494 - RNA, 21 nt, Artificial Sequence
  Synthetic
uuaugccuacagccuccuagu

SEQ ID NO: 121495 - RNA, 22 nt, Artificial Sequence
  Synthetic
uuuaugccuacagccuccuagu

SEQ ID NO: 121496 - RNA, 23 nt, Artificial Sequence
  Synthetic
auuuaugccuacagccuccuagu

SEQ ID NO: 121497 - RNA, 24 nt, Artificial Sequence
  Synthetic
aauuuaugccuacagccuccuagu

SEQ ID NO: 121498 - RNA, 18 nt, Artificial Sequence
  Synthetic
guggucuccaugcgacgu

SEQ ID NO: 121499 - RNA, 19 nt, Artificial Sequence
  Synthetic
gguggucuccaugcgacgu

SEQ ID NO: 121500 - RNA, 20 nt, Artificial Sequence
  Synthetic
cgguggucuccaugcgacgu

SEQ ID NO: 121501 - RNA, 21 nt, Artificial Sequence
  Synthetic
acgguggucuccaugcgacgu

SEQ ID NO: 121502 - RNA, 22 nt, Artificial Sequence
  Synthetic
cacgguggucuccaugcgacgu

SEQ ID NO: 121503 - RNA, 23 nt, Artificial Sequence
  Synthetic
ucacgguggucuccaugcgacgu

SEQ ID NO: 121504 - RNA, 24 nt, Artificial Sequence
  Synthetic
uucacgguggucuccaugcgacgu

SEQ ID NO: 121505 - RNA, 18 nt, Artificial Sequence
  Synthetic
  misc_feature (8)..(9): n is a, c, g, or u
auuaaagnnagguaccgu

SEQ ID NO: 121506 - RNA, 19 nt, Artificial Sequence
  Synthetic
  misc_feature (9)..(10): n is a, c, g, or u
gauuaaagnnagguaccgu

SEQ ID NO: 121507 - RNA, 20 nt, Artificial Sequence
  Synthetic
  misc_feature (10)..(11): n is a, c, g, or u
ggauuaaagnnagguaccgu

SEQ ID NO: 121508 - RNA, 21 nt, Artificial Sequence
  Synthetic
  misc_feature (11)..(12): n is a, c, g, or u
aggauuaaagnnagguaccgu

SEQ ID NO: 121509 - RNA, 22 nt, Artificial Sequence
  Synthetic
  misc_feature (1)..(1): n is a, c, g, or u
  misc_feature (12)..(13): n is a, c, g, or u
naggauuaaagnnagguaccgu

SEQ ID NO: 121510 - RNA, 23 nt, Artificial Sequence
  Synthetic
  misc_feature (2)..(2): n is a, c, g, or u
  misc_feature (13)..(14): n is a, c, g, or u
unaggauuaaagnnagguaccgu

SEQ ID NO: 121511 - RNA, 24 nt, Artificial Sequence
  Synthetic
  misc_feature (1)..(1): n is a, c, g, or u
  misc_feature (3)..(3): n is a, c, g, or u
  misc_feature (14)..(15): n is a, c, g, or u
nunaggauuaaagnnagguaccgu

SEQ ID NO: 121512 - RNA, 18 nt, Artificial Sequence
  Synthetic
cagacggggaguccgcgu

SEQ ID NO: 121513 - RNA, 19 nt, Artificial Sequence
  Synthetic
acagacggggaguccgcgu

SEQ ID NO: 121514 - RNA, 20 nt, Artificial Sequence
  Synthetic
cacagacggggaguccgcgu

SEQ ID NO: 121515 - RNA, 21 nt, Artificial Sequence
  Synthetic
gcacagacggggaguccgcgu

SEQ ID NO: 121516 - RNA, 22 nt, Artificial Sequence
  Synthetic
ggcacagacggggaguccgcgu

SEQ ID NO: 121517 - RNA, 23 nt, Artificial Sequence
  Synthetic
aggcacagacggggaguccgcgu

SEQ ID NO: 121518 - RNA, 24 nt, Artificial Sequence
  Synthetic
aaggcacagacggggaguccgcgu

SEQ ID NO: 121519 - RNA, 18 nt, Artificial Sequence
  Synthetic
agaugauuaggcagaggu

SEQ ID NO: 121520 - RNA, 19 nt, Artificial Sequence
  Synthetic
gagaugauuaggcagaggu

SEQ ID NO: 121521 - RNA, 20 nt, Artificial Sequence
  Synthetic
  misc_feature (1)..(1): n is a, c, g, or u
ngagaugauuaggcagaggu

SEQ ID NO: 121522 - RNA, 21 nt, Artificial Sequence
  Synthetic
  misc_feature (2)..(2): n is a, c, g, or u
angagaugauuaggcagaggu

SEQ ID NO: 121523 - RNA, 22 nt, Artificial Sequence
  Synthetic
  misc_feature (3)..(3): n is a, c, g, or u
cangagaugauuaggcagaggu

SEQ ID NO: 121524 - RNA, 23 nt, Artificial Sequence
  Synthetic
  misc_feature (4)..(4): n is a, c, g, or u
acangagaugauuaggcagaggu

SEQ ID NO: 121525 - RNA, 24 nt, Artificial Sequence
  Synthetic
  misc_feature (5)..(5): n is a, c, g, or u
aacangagaugauuaggcagaggu

SEQ ID NO: 121526 - RNA, 18 nt, Artificial Sequence
  Synthetic
  misc_feature (9)..(9): n is a, c, g, or u
ugagugucncuuagaggu

SEQ ID NO: 121527 - RNA, 19 nt, Artificial Sequence
  Synthetic
  misc_feature (10)..(10): n is a, c, g, or u
augagugucncuuagaggu

SEQ ID NO: 121528 - RNA, 20 nt, Artificial Sequence
  Synthetic
  misc_feature (11)..(11): n is a, c, g, or u
gaugagugucncuuagaggu

SEQ ID NO: 121529 - RNA, 21 nt, Artificial Sequence
  Synthetic
  misc_feature (12)..(12): n is a, c, g, or u
ggaugagugucncuuagaggu

SEQ ID NO: 121530 - RNA, 22 nt, Artificial Sequence
  Synthetic
  misc_feature (13)..(13): n is a, c, g, or u
aggaugagugucncuuagaggu

SEQ ID NO: 121531 - RNA, 23 nt, Artificial Sequence
  Synthetic
  misc_feature (14)..(14): n is a, c, g, or u
gaggaugagugucncuuagaggu

SEQ ID NO: 121532 - RNA, 24 nt, Artificial Sequence
  Synthetic
  misc_feature (15)..(15): n is a, c, g, or u
ugaggaugagugucncuuagaggu

SEQ ID NO: 121533 - RNA, 18 nt, Artificial Sequence
  Synthetic
cccaugccuuuucgaggu

SEQ ID NO: 121534 - RNA, 19 nt, Artificial Sequence
  Synthetic
ccccaugccuuuucgaggu

SEQ ID NO: 121535 - RNA, 20 nt, Artificial Sequence
  Synthetic
uccccaugccuuuucgaggu

SEQ ID NO: 121536 - RNA, 21 nt, Artificial Sequence
  Synthetic
guccccaugccuuuucgaggu

SEQ ID NO: 121537 - RNA, 22 nt, Artificial Sequence
  Synthetic
uguccccaugccuuuucgaggu

SEQ ID NO: 121538 - RNA, 23 nt, Artificial Sequence
  Synthetic
uuguccccaugccuuuucgaggu

SEQ ID NO: 121539 - RNA, 24 nt, Artificial Sequence
  Synthetic
uuuguccccaugccuuuucgaggu

SEQ ID NO: 121540 - RNA, 18 nt, Artificial Sequence
  Synthetic
auacagagcagaggcggu

SEQ ID NO: 121541 - RNA, 19 nt, Artificial Sequence
  Synthetic
gauacagagcagaggcggu

SEQ ID NO: 121542 - RNA, 20 nt, Artificial Sequence
  Synthetic
cgauacagagcagaggcggu

SEQ ID NO: 121543 - RNA, 21 nt, Artificial Sequence
  Synthetic
ccgauacagagcagaggcggu

SEQ ID NO: 121544 - RNA, 22 nt, Artificial Sequence
  Synthetic
cccgauacagagcagaggcggu

SEQ ID NO: 121545 - RNA, 23 nt, Artificial Sequence
  Synthetic
ucccgauacagagcagaggcggu

SEQ ID NO: 121546 - RNA, 24 nt, Artificial Sequence
  Synthetic
cucccgauacagagcagaggcggu

SEQ ID NO: 121547 - RNA, 18 nt, Artificial Sequence
  Synthetic
auguucuccauguucggu

SEQ ID NO: 121548 - RNA, 19 nt, Artificial Sequence
  Synthetic
gauguucuccauguucggu

SEQ ID NO: 121549 - RNA, 20 nt, Artificial Sequence
  Synthetic
cgauguucuccauguucggu

SEQ ID NO: 121550 - RNA, 21 nt, Artificial Sequence
  Synthetic
gcgauguucuccauguucggu

SEQ ID NO: 121551 - RNA, 22 nt, Artificial Sequence
  Synthetic
ugcgauguucuccauguucggu

SEQ ID NO: 121552 - RNA, 23 nt, Artificial Sequence
  Synthetic
augcgauguucuccauguucggu

SEQ ID NO: 121553 - RNA, 24 nt, Artificial Sequence
  Synthetic
gaugcgauguucuccauguucggu

SEQ ID NO: 121554 - RNA, 18 nt, Artificial Sequence
  Synthetic
uguaacacgagcaggggu

SEQ ID NO: 121555 - RNA, 19 nt, Artificial Sequence
  Synthetic
cuguaacacgagcaggggu

SEQ ID NO: 121556 - RNA, 20 nt, Artificial Sequence
  Synthetic
ccuguaacacgagcaggggu

SEQ ID NO: 121557 - RNA, 21 nt, Artificial Sequence
  Synthetic
gccuguaacacgagcaggggu

SEQ ID NO: 121558 - RNA, 22 nt, Artificial Sequence
  Synthetic
cgccuguaacacgagcaggggu

SEQ ID NO: 121559 - RNA, 23 nt, Artificial Sequence
  Synthetic
ccgccuguaacacgagcaggggu

SEQ ID NO: 121560 - RNA, 24 nt, Artificial Sequence
  Synthetic
cccgccuguaacacgagcaggggu

SEQ ID NO: 121561 - RNA, 18 nt, Artificial Sequence
  Synthetic
agacaaaagaaaauuggu

SEQ ID NO: 121562 - RNA, 19 nt, Artificial Sequence
  Synthetic
aagacaaaagaaaauuggu

SEQ ID NO: 121563 - RNA, 20 nt, Artificial Sequence
  Synthetic
aaagacaaaagaaaauuggu

SEQ ID NO: 121564 - RNA, 21 nt, Artificial Sequence
  Synthetic
caaagacaaaagaaaauuggu

SEQ ID NO: 121565 - RNA, 22 nt, Artificial Sequence
  Synthetic
ccaaagacaaaagaaaauuggu

SEQ ID NO: 121566 - RNA, 23 nt, Artificial Sequence
  Synthetic
cccaaagacaaaagaaaauuggu

SEQ ID NO: 121567 - RNA, 24 nt, Artificial Sequence
  Synthetic
acccaaagacaaaagaaaauuggu

SEQ ID NO: 121568 - RNA, 18 nt, Artificial Sequence
  Synthetic
uccugacugccgauuggu

SEQ ID NO: 121569 - RNA, 19 nt, Artificial Sequence
  Synthetic
uuccugacugccgauuggu

SEQ ID NO: 121570 - RNA, 20 nt, Artificial Sequence
  Synthetic
cuuccugacugccgauuggu

SEQ ID NO: 121571 - RNA, 21 nt, Artificial Sequence
  Synthetic
ccuuccugacugccgauuggu

SEQ ID NO: 121572 - RNA, 22 nt, Artificial Sequence
  Synthetic
gccuuccugacugccgauuggu

SEQ ID NO: 121573 - RNA, 23 nt, Artificial Sequence
  Synthetic
ugccuuccugacugccgauuggu

SEQ ID NO: 121574 - RNA, 24 nt, Artificial Sequence
  Synthetic
cugccuuccugacugccgauuggu

SEQ ID NO: 121575 - RNA, 18 nt, Artificial Sequence
  Synthetic
  misc_feature (16)..(16): n is a, c, g, or u
aagaguuugguggaangu

SEQ ID NO: 121576 - RNA, 19 nt, Artificial Sequence
  Synthetic
  misc_feature (17)..(17): n is a, c, g, or u
gaagaguuugguggaangu

SEQ ID NO: 121577 - RNA, 20 nt, Artificial Sequence
  Synthetic
  misc_feature (18)..(18): n is a, c, g, or u
ugaagaguuugguggaangu

SEQ ID NO: 121578 - RNA, 21 nt, Artificial Sequence
  Synthetic
  misc_feature (19)..(19): n is a, c, g, or u
uugaagaguuugguggaangu

SEQ ID NO: 121579 - RNA, 22 nt, Artificial Sequence
  Synthetic
  misc_feature (20)..(20): n is a, c, g, or u
cuugaagaguuugguggaangu

SEQ ID NO: 121580 - RNA, 23 nt, Artificial Sequence
  Synthetic
  misc_feature (21)..(21): n is a, c, g, or u
ucuugaagaguuugguggaangu

SEQ ID NO: 121581 - RNA, 24 nt, Artificial Sequence
  Synthetic
  misc_feature (22)..(22): n is a, c, g, or u
aucuugaagaguuugguggaangu

SEQ ID NO: 121582 - RNA, 18 nt, Artificial Sequence
  Synthetic
  misc_feature (16)..(16): n is a, c, g, or u
guuucccaccuuaugngu

SEQ ID NO: 121583 - RNA, 19 nt, Artificial Sequence
  Synthetic
  misc_feature (17)..(17): n is a, c, g, or u
aguuucccaccuuaugngu

SEQ ID NO: 121584 - RNA, 20 nt, Artificial Sequence
  Synthetic
  misc_feature (18)..(18): n is a, c, g, or u
aaguuucccaccuuaugngu

SEQ ID NO: 121585 - RNA, 21 nt, Artificial Sequence
  Synthetic
  misc_feature (19)..(19): n is a, c, g, or u
aaaguuucccaccuuaugngu

SEQ ID NO: 121586 - RNA, 22 nt, Artificial Sequence
  Synthetic
  misc_feature (20)..(20): n is a, c, g, or u
uaaaguuucccaccuuaugngu

SEQ ID NO: 121587 - RNA, 23 nt, Artificial Sequence
  Synthetic
  misc_feature (21)..(21): n is a, c, g, or u
guaaaguuucccaccuuaugngu

SEQ ID NO: 121588 - RNA, 24 nt, Artificial Sequence
  Synthetic
  misc_feature (22)..(22): n is a, c, g, or u
cguaaaguuucccaccuuaugngu

SEQ ID NO: 121589 - RNA, 18 nt, Artificial Sequence
  Synthetic
  misc_feature (7)..(7): n is a, c, g, or u
  misc_feature (16)..(16): n is a, c, g, or u
aggauanccacauugngu

SEQ ID NO: 121590 - RNA, 19 nt, Artificial Sequence
  Synthetic
  misc_feature (8)..(8): n is a, c, g, or u
  misc_feature (17)..(17): n is a, c, g, or u
caggauanccacauugngu

SEQ ID NO: 121591 - RNA, 20 nt, Artificial Sequence
  Synthetic
  misc_feature (9)..(9): n is a, c, g, or u
  misc_feature (18)..(18): n is a, c, g, or u
gcaggauanccacauugngu

SEQ ID NO: 121592 - RNA, 21 nt, Artificial Sequence
  Synthetic
  misc_feature (10)..(10): n is a, c, g, or u
  misc_feature (19)..(19): n is a, c, g, or u
agcaggauanccacauugngu

SEQ ID NO: 121593 - RNA, 22 nt, Artificial Sequence
  Synthetic
  misc_feature (11)..(11): n is a, c, g, or u
  misc_feature (20)..(20): n is a, c, g, or u
aagcaggauanccacauugngu

SEQ ID NO: 121594 - RNA, 23 nt, Artificial Sequence
  Synthetic
  misc_feature (12)..(12): n is a, c, g, or u
  misc_feature (21)..(21): n is a, c, g, or u
aaagcaggauanccacauugngu

SEQ ID NO: 121595 - RNA, 24 nt, Artificial Sequence
  Synthetic
  misc_feature (13)..(13): n is a, c, g, or u
  misc_feature (22)..(22): n is a, c, g, or u
uaaagcaggauanccacauugngu

SEQ ID NO: 121596 - RNA, 18 nt, Artificial Sequence
  Synthetic
  misc_feature (1)..(1): n is a, c, g, or u
  misc_feature (15)..(16): n is a, c, g, or u
nuguaaauaaugucnngu

SEQ ID NO: 121597 - RNA, 19 nt, Artificial Sequence
  Synthetic
  misc_feature (2)..(2): n is a, c, g, or u
  misc_feature (16)..(17): n is a, c, g, or u
unuguaaauaaugucnngu

SEQ ID NO: 121598 - RNA, 20 nt, Artificial Sequence
  Synthetic
  misc_feature (3)..(3): n is a, c, g, or u
  misc_feature (17)..(18): n is a, c, g, or u
gunuguaaauaaugucnngu

SEQ ID NO: 121599 - RNA, 21 nt, Artificial Sequence
  Synthetic
  misc_feature (4)..(4): n is a, c, g, or u
  misc_feature (18)..(19): n is a, c, g, or u
agunuguaaauaaugucnngu

SEQ ID NO: 121600 - RNA, 22 nt, Artificial Sequence
  Synthetic
  misc_feature (5)..(5): n is a, c, g, or u
  misc_feature (19)..(20): n is a, c, g, or u
gagunuguaaauaaugucnngu

SEQ ID NO: 121601 - RNA, 23 nt, Artificial Sequence
  Synthetic
  misc_feature (6)..(6): n is a, c, g, or u
  misc_feature (20)..(21): n is a, c, g, or u
agagunuguaaauaaugucnngu

SEQ ID NO: 121602 - RNA, 24 nt, Artificial Sequence
  Synthetic
  misc_feature (7)..(7): n is a, c, g, or u
  misc_feature (21)..(22): n is a, c, g, or u
aagagunuguaaauaaugucnngu

SEQ ID NO: 121603 - RNA, 18 nt, Artificial Sequence
  Synthetic
uggugaggugaacaaugu

SEQ ID NO: 121604 - RNA, 19 nt, Artificial Sequence
  Synthetic
auggugaggugaacaaugu

SEQ ID NO: 121605 - RNA, 20 nt, Artificial Sequence
  Synthetic
uauggugaggugaacaaugu

SEQ ID NO: 121606 - RNA, 21 nt, Artificial Sequence
  Synthetic
guauggugaggugaacaaugu

SEQ ID NO: 121607 - RNA, 22 nt, Artificial Sequence
  Synthetic
cguauggugaggugaacaaugu

SEQ ID NO: 121608 - RNA, 23 nt, Artificial Sequence
  Synthetic
ccguauggugaggugaacaaugu

SEQ ID NO: 121609 - RNA, 24 nt, Artificial Sequence
  Synthetic
gccguauggugaggugaacaaugu

SEQ ID NO: 121610 - RNA, 18 nt, Artificial Sequence
  Synthetic
ccuccugcaaaugaaugu

SEQ ID NO: 121611 - RNA, 19 nt, Artificial Sequence
  Synthetic
uccuccugcaaaugaaugu

SEQ ID NO: 121612 - RNA, 20 nt, Artificial Sequence
  Synthetic
guccuccugcaaaugaaugu

SEQ ID NO: 121613 - RNA, 21 nt, Artificial Sequence
  Synthetic
uguccuccugcaaaugaaugu

SEQ ID NO: 121614 - RNA, 22 nt, Artificial Sequence
  Synthetic
auguccuccugcaaaugaaugu

SEQ ID NO: 121615 - RNA, 23 nt, Artificial Sequence
  Synthetic
aauguccuccugcaaaugaaugu

SEQ ID NO: 121616 - RNA, 24 nt, Artificial Sequence
  Synthetic
caauguccuccugcaaaugaaugu

SEQ ID NO: 121617 - RNA, 18 nt, Artificial Sequence
  Synthetic
ccuguuuucauuuacugu

SEQ ID NO: 121618 - RNA, 19 nt, Artificial Sequence
  Synthetic
uccuguuuucauuuacugu

SEQ ID NO: 121619 - RNA, 20 nt, Artificial Sequence
  Synthetic
cuccuguuuucauuuacugu

SEQ ID NO: 121620 - RNA, 21 nt, Artificial Sequence
  Synthetic
ucuccuguuuucauuuacugu

SEQ ID NO: 121621 - RNA, 22 nt, Artificial Sequence
  Synthetic
gucuccuguuuucauuuacugu

SEQ ID NO: 121622 - RNA, 23 nt, Artificial Sequence
  Synthetic
agucuccuguuuucauuuacugu

SEQ ID NO: 121623 - RNA, 24 nt, Artificial Sequence
  Synthetic
uagucuccuguuuucauuuacugu

SEQ ID NO: 121624 - RNA, 18 nt, Artificial Sequence
  Synthetic
agggacucaagauguugu

SEQ ID NO: 121625 - RNA, 19 nt, Artificial Sequence
  Synthetic
aagggacucaagauguugu

SEQ ID NO: 121626 - RNA, 20 nt, Artificial Sequence
  Synthetic
aaagggacucaagauguugu

SEQ ID NO: 121627 - RNA, 21 nt, Artificial Sequence
  Synthetic
uaaagggacucaagauguugu

SEQ ID NO: 121628 - RNA, 22 nt, Artificial Sequence
  Synthetic
auaaagggacucaagauguugu

SEQ ID NO: 121629 - RNA, 23 nt, Artificial Sequence
  Synthetic
  misc_feature (1)..(1): n is a, c, g, or u
nauaaagggacucaagauguugu

SEQ ID NO: 121630 - RNA, 24 nt, Artificial Sequence
  Synthetic
  misc_feature (2)..(2): n is a, c, g, or u
gnauaaagggacucaagauguugu

SEQ ID NO: 121631 - RNA, 18 nt, Artificial Sequence
  Synthetic
  misc_feature (8)..(8): n is a, c, g, or u
  misc_feature (17)..(17): n is a, c, g, or u
auggaaangauguauanu

SEQ ID NO: 121632 - RNA, 19 nt, Artificial Sequence
  Synthetic
  misc_feature (9)..(9): n is a, c, g, or u
  misc_feature (18)..(18): n is a, c, g, or u
cauggaaangauguauanu

SEQ ID NO: 121633 - RNA, 20 nt, Artificial Sequence
  Synthetic
  misc_feature (10)..(10): n is a, c, g, or u
  misc_feature (19)..(19): n is a, c, g, or u
ccauggaaangauguauanu

SEQ ID NO: 121634 - RNA, 21 nt, Artificial Sequence
  Synthetic
  misc_feature (11)..(11): n is a, c, g, or u
  misc_feature (20)..(20): n is a, c, g, or u
gccauggaaangauguauanu

SEQ ID NO: 121635 - RNA, 22 nt, Artificial Sequence
  Synthetic
  misc_feature (12)..(12): n is a, c, g, or u
  misc_feature (21)..(21): n is a, c, g, or u
agccauggaaangauguauanu

SEQ ID NO: 121636 - RNA, 23 nt, Artificial Sequence
  Synthetic
  misc_feature (13)..(13): n is a, c, g, or u
  misc_feature (22)..(22): n is a, c, g, or u
cagccauggaaangauguauanu

SEQ ID NO: 121637 - RNA, 24 nt, Artificial Sequence
  Synthetic
  misc_feature (14)..(14): n is a, c, g, or u
  misc_feature (23)..(23): n is a, c, g, or u
gcagccauggaaangauguauanu

SEQ ID NO: 121638 - RNA, 18 nt, Artificial Sequence
  Synthetic
caaagacaaaagaaaauu

SEQ ID NO: 121639 - RNA, 19 nt, Artificial Sequence
  Synthetic
ccaaagacaaaagaaaauu

SEQ ID NO: 121640 - RNA, 20 nt, Artificial Sequence
  Synthetic
cccaaagacaaaagaaaauu

SEQ ID NO: 121641 - RNA, 21 nt, Artificial Sequence
  Synthetic
acccaaagacaaaagaaaauu

SEQ ID NO: 121642 - RNA, 22 nt, Artificial Sequence
  Synthetic
uacccaaagacaaaagaaaauu

SEQ ID NO: 121643 - RNA, 23 nt, Artificial Sequence
  Synthetic
auacccaaagacaaaagaaaauu

SEQ ID NO: 121644 - RNA, 24 nt, Artificial Sequence
  Synthetic
uauacccaaagacaaaagaaaauu

SEQ ID NO: 121645 - RNA, 18 nt, Artificial Sequence
  Synthetic
  misc_feature (5)..(5): n is a, c, g, or u
uguunccccuagaaaauu

SEQ ID NO: 121646 - RNA, 19 nt, Artificial Sequence
  Synthetic
  misc_feature (6)..(6): n is a, c, g, or u
guguunccccuagaaaauu

SEQ ID NO: 121647 - RNA, 20 nt, Artificial Sequence
  Synthetic
  misc_feature (7)..(7): n is a, c, g, or u
gguguunccccuagaaaauu

SEQ ID NO: 121648 - RNA, 21 nt, Artificial Sequence
  Synthetic
  misc_feature (8)..(8): n is a, c, g, or u
ggguguunccccuagaaaauu

SEQ ID NO: 121649 - RNA, 22 nt, Artificial Sequence
  Synthetic
  misc_feature (9)..(9): n is a, c, g, or u
cggguguunccccuagaaaauu

SEQ ID NO: 121650 - RNA, 23 nt, Artificial Sequence
  Synthetic
  misc_feature (10)..(10): n is a, c, g, or u
acggguguunccccuagaaaauu

SEQ ID NO: 121651 - RNA, 24 nt, Artificial Sequence
  Synthetic
  misc_feature (11)..(11): n is a, c, g, or u
cacggguguunccccuagaaaauu

SEQ ID NO: 121652 - RNA, 18 nt, Artificial Sequence
  Synthetic
cgauaaccaggacaaauu

SEQ ID NO: 121653 - RNA, 19 nt, Artificial Sequence
  Synthetic
gcgauaaccaggacaaauu

SEQ ID NO: 121654 - RNA, 20 nt, Artificial Sequence
  Synthetic
agcgauaaccaggacaaauu

SEQ ID NO: 121655 - RNA, 21 nt, Artificial Sequence
  Synthetic
cagcgauaaccaggacaaauu

SEQ ID NO: 121656 - RNA, 22 nt, Artificial Sequence
  Synthetic
ccagcgauaaccaggacaaauu

SEQ ID NO: 121657 - RNA, 23 nt, Artificial Sequence
  Synthetic
uccagcgauaaccaggacaaauu

SEQ ID NO: 121658 - RNA, 24 nt, Artificial Sequence
  Synthetic
auccagcgauaaccaggacaaauu

SEQ ID NO: 121659 - RNA, 18 nt, Artificial Sequence
  Synthetic
guugaugauccuggaauu

SEQ ID NO: 121660 - RNA, 19 nt, Artificial Sequence
  Synthetic
  misc_feature (1)..(1): n is a, c, g, or u
nguugaugauccuggaauu

SEQ ID NO: 121661 - RNA, 20 nt, Artificial Sequence
  Synthetic
  misc_feature (2)..(2): n is a, c, g, or u
unguugaugauccuggaauu

SEQ ID NO: 121662 - RNA, 21 nt, Artificial Sequence
  Synthetic
  misc_feature (3)..(3): n is a, c, g, or u
gunguugaugauccuggaauu

SEQ ID NO: 121663 - RNA, 22 nt, Artificial Sequence
  Synthetic
  misc_feature (4)..(4): n is a, c, g, or u
ggunguugaugauccuggaauu

SEQ ID NO: 121664 - RNA, 23 nt, Artificial Sequence
  Synthetic
  misc_feature (5)..(5): n is a, c, g, or u
uggunguugaugauccuggaauu

SEQ ID NO: 121665 - RNA, 24 nt, Artificial Sequence
  Synthetic
  misc_feature (6)..(6): n is a, c, g, or u
cuggunguugaugauccuggaauu

SEQ ID NO: 121666 - RNA, 18 nt, Artificial Sequence
  Synthetic
aggucggucguugacauu

SEQ ID NO: 121667 - RNA, 19 nt, Artificial Sequence
  Synthetic
aaggucggucguugacauu

SEQ ID NO: 121668 - RNA, 20 nt, Artificial Sequence
  Synthetic
caaggucggucguugacauu

SEQ ID NO: 121669 - RNA, 18 nt, Artificial Sequence
  Synthetic
ggugagugacuggagauu

SEQ ID NO: 121670 - RNA, 19 nt, Artificial Sequence
  Synthetic
uggugagugacuggagauu

SEQ ID NO: 121671 - RNA, 20 nt, Artificial Sequence
  Synthetic
uuggugagugacuggagauu

SEQ ID NO: 121672 - RNA, 21 nt, Artificial Sequence
  Synthetic
guuggugagugacuggagauu

SEQ ID NO: 121673 - RNA, 22 nt, Artificial Sequence
  Synthetic
  misc_feature (1)..(1): n is a, c, g, or u
nguuggugagugacuggagauu

SEQ ID NO: 121674 - RNA, 23 nt, Artificial Sequence
  Synthetic
  misc_feature (2)..(2): n is a, c, g, or u
anguuggugagugacuggagauu

SEQ ID NO: 121675 - RNA, 24 nt, Artificial Sequence
  Synthetic
  misc_feature (3)..(3): n is a, c, g, or u
canguuggugagugacuggagauu

SEQ ID NO: 121676 - RNA, 18 nt, Artificial Sequence
  Synthetic
aauacuaacauugagauu

SEQ ID NO: 121677 - RNA, 19 nt, Artificial Sequence
  Synthetic
gaauacuaacauugagauu

SEQ ID NO: 121678 - RNA, 20 nt, Artificial Sequence
  Synthetic
ggaauacuaacauugagauu

SEQ ID NO: 121679 - RNA, 21 nt, Artificial Sequence
  Synthetic
aggaauacuaacauugagauu

SEQ ID NO: 121680 - RNA, 22 nt, Artificial Sequence
  Synthetic
aaggaauacuaacauugagauu

SEQ ID NO: 121681 - RNA, 23 nt, Artificial Sequence
  Synthetic
caaggaauacuaacauugagauu

SEQ ID NO: 121682 - RNA, 24 nt, Artificial Sequence
  Synthetic
ccaaggaauacuaacauugagauu

SEQ ID NO: 121683 - RNA, 18 nt, Artificial Sequence
  Synthetic
ccuuccugacugccgauu

SEQ ID NO: 121684 - RNA, 19 nt, Artificial Sequence
  Synthetic
gccuuccugacugccgauu

SEQ ID NO: 121685 - RNA, 20 nt, Artificial Sequence
  Synthetic
ugccuuccugacugccgauu

SEQ ID NO: 121686 - RNA, 21 nt, Artificial Sequence
  Synthetic
cugccuuccugacugccgauu

SEQ ID NO: 121687 - RNA, 22 nt, Artificial Sequence
  Synthetic
gcugccuuccugacugccgauu

SEQ ID NO: 121688 - RNA, 23 nt, Artificial Sequence
  Synthetic
ggcugccuuccugacugccgauu

SEQ ID NO: 121689 - RNA, 24 nt, Artificial Sequence
  Synthetic
aggcugccuuccugacugccgauu

SEQ ID NO: 121690 - RNA, 18 nt, Artificial Sequence
  Synthetic
  misc_feature (1)..(1): n is a, c, g, or u
  misc_feature (13)..(13): n is a, c, g, or u
naagaaucccagnggauu

SEQ ID NO: 121691 - RNA, 19 nt, Artificial Sequence
  Synthetic
  misc_feature (2)..(2): n is a, c, g, or u
  misc_feature (14)..(14): n is a, c, g, or u
gnaagaaucccagnggauu

SEQ ID NO: 121692 - RNA, 20 nt, Artificial Sequence
  Synthetic
  misc_feature (3)..(3): n is a, c, g, or u
  misc_feature (15)..(15): n is a, c, g, or u
ggnaagaaucccagnggauu

SEQ ID NO: 121693 - RNA, 21 nt, Artificial Sequence
  Synthetic
  misc_feature (4)..(4): n is a, c, g, or u
  misc_feature (16)..(16): n is a, c, g, or u
gggnaagaaucccagnggauu

SEQ ID NO: 121694 - RNA, 22 nt, Artificial Sequence
  Synthetic
  misc_feature (5)..(5): n is a, c, g, or u
  misc_feature (17)..(17): n is a, c, g, or u
cgggnaagaaucccagnggauu

SEQ ID NO: 121695 - RNA, 23 nt, Artificial Sequence
  Synthetic
  misc_feature (6)..(6): n is a, c, g, or u
  misc_feature (18)..(18): n is a, c, g, or u
ucgggnaagaaucccagnggauu

SEQ ID NO: 121696 - RNA, 24 nt, Artificial Sequence
  Synthetic
  misc_feature (7)..(7): n is a, c, g, or u
  misc_feature (19)..(19): n is a, c, g, or u
aucgggnaagaaucccagnggauu

SEQ ID NO: 121697 - RNA, 18 nt, Artificial Sequence
  Synthetic
  misc_feature (8)..(8): n is a, c, g, or u
cacaauanuugucugauu

SEQ ID NO: 121698 - RNA, 19 nt, Artificial Sequence
  Synthetic
  misc_feature (9)..(9): n is a, c, g, or u
ccacaauanuugucugauu

SEQ ID NO: 121699 - RNA, 20 nt, Artificial Sequence
  Synthetic
  misc_feature (10)..(10): n is a, c, g, or u
accacaauanuugucugauu

SEQ ID NO: 121700 - RNA, 21 nt, Artificial Sequence
  Synthetic
  misc_feature (11)..(11): n is a, c, g, or u
aaccacaauanuugucugauu

SEQ ID NO: 121701 - RNA, 22 nt, Artificial Sequence
  Synthetic
  misc_feature (12)..(12): n is a, c, g, or u
aaaccacaauanuugucugauu

SEQ ID NO: 121702 - RNA, 23 nt, Artificial Sequence
  Synthetic
  misc_feature (13)..(13): n is a, c, g, or u
gaaaccacaauanuugucugauu

SEQ ID NO: 121703 - RNA, 24 nt, Artificial Sequence
  Synthetic
  misc_feature (14)..(14): n is a, c, g, or u
ugaaaccacaauanuugucugauu

SEQ ID NO: 121704 - RNA, 18 nt, Artificial Sequence
  Synthetic
  misc_feature (8)..(8): n is a, c, g, or u
caaaaganaccaaauauu

SEQ ID NO: 121705 - RNA, 19 nt, Artificial Sequence
  Synthetic
  misc_feature (9)..(9): n is a, c, g, or u
ccaaaaganaccaaauauu

SEQ ID NO: 121706 - RNA, 20 nt, Artificial Sequence
  Synthetic
  misc_feature (10)..(10): n is a, c, g, or u
uccaaaaganaccaaauauu

SEQ ID NO: 121707 - RNA, 21 nt, Artificial Sequence
  Synthetic
  misc_feature (11)..(11): n is a, c, g, or u
cuccaaaaganaccaaauauu

SEQ ID NO: 121708 - RNA, 22 nt, Artificial Sequence
  Synthetic
  misc_feature (12)..(12): n is a, c, g, or u
acuccaaaaganaccaaauauu

SEQ ID NO: 121709 - RNA, 23 nt, Artificial Sequence
  Synthetic
  misc_feature (13)..(13): n is a, c, g, or u
cacuccaaaaganaccaaauauu

SEQ ID NO: 121710 - RNA, 24 nt, Artificial Sequence
  Synthetic
  misc_feature (14)..(14): n is a, c, g, or u
acacuccaaaaganaccaaauauu

SEQ ID NO: 121711 - RNA, 18 nt, Artificial Sequence
  Synthetic
  misc_feature (6)..(6): n is a, c, g, or u
  misc_feature (11)..(11): n is a, c, g, or u
uauggnagagncaguauu

SEQ ID NO: 121712 - RNA, 19 nt, Artificial Sequence
  Synthetic
  misc_feature (7)..(7): n is a, c, g, or u
  misc_feature (12)..(12): n is a, c, g, or u
auauggnagagncaguauu

SEQ ID NO: 121713 - RNA, 20 nt, Artificial Sequence
  Synthetic
  misc_feature (8)..(8): n is a, c, g, or u
  misc_feature (13)..(13): n is a, c, g, or u
gauauggnagagncaguauu

SEQ ID NO: 121714 - RNA, 21 nt, Artificial Sequence
  Synthetic
  misc_feature (9)..(9): n is a, c, g, or u
  misc_feature (14)..(14): n is a, c, g, or u
cgauauggnagagncaguauu

SEQ ID NO: 121715 - RNA, 22 nt, Artificial Sequence
  Synthetic
  misc_feature (10)..(10): n is a, c, g, or u
  misc_feature (15)..(15): n is a, c, g, or u
acgauauggnagagncaguauu

SEQ ID NO: 121716 - RNA, 23 nt, Artificial Sequence
  Synthetic
  misc_feature (11)..(11): n is a, c, g, or u
  misc_feature (16)..(16): n is a, c, g, or u
gacgauauggnagagncaguauu

SEQ ID NO: 121717 - RNA, 24 nt, Artificial Sequence
  Synthetic
  misc_feature (12)..(12): n is a, c, g, or u
  misc_feature (17)..(17): n is a, c, g, or u
ugacgauauggnagagncaguauu

SEQ ID NO: 121718 - RNA, 18 nt, Artificial Sequence
  Synthetic
ucuagacucugugguauu

SEQ ID NO: 121719 - RNA, 19 nt, Artificial Sequence
  Synthetic
gucuagacucugugguauu

SEQ ID NO: 121720 - RNA, 20 nt, Artificial Sequence
  Synthetic
agucuagacucugugguauu

SEQ ID NO: 121721 - RNA, 21 nt, Artificial Sequence
  Synthetic
gagucuagacucugugguauu

SEQ ID NO: 121722 - RNA, 22 nt, Artificial Sequence
  Synthetic
cgagucuagacucugugguauu

SEQ ID NO: 121723 - RNA, 23 nt, Artificial Sequence
  Synthetic
acgagucuagacucugugguauu

SEQ ID NO: 121724 - RNA, 24 nt, Artificial Sequence
  Synthetic
cacgagucuagacucugugguauu

SEQ ID NO: 121725 - RNA, 18 nt, Artificial Sequence
  Synthetic
ugcucccacucccaccuu

SEQ ID NO: 121726 - RNA, 19 nt, Artificial Sequence
  Synthetic
augcucccacucccaccuu

SEQ ID NO: 121727 - RNA, 20 nt, Artificial Sequence
  Synthetic
aaugcucccacucccaccuu

SEQ ID NO: 121728 - RNA, 21 nt, Artificial Sequence
  Synthetic
gaaugcucccacucccaccuu

SEQ ID NO: 121729 - RNA, 22 nt, Artificial Sequence
  Synthetic
cgaaugcucccacucccaccuu

SEQ ID NO: 121730 - RNA, 23 nt, Artificial Sequence
  Synthetic
ccgaaugcucccacucccaccuu

SEQ ID NO: 121731 - RNA, 24 nt, Artificial Sequence
  Synthetic
cccgaaugcucccacucccaccuu

SEQ ID NO: 121732 - RNA, 18 nt, Artificial Sequence
  Synthetic
  misc_feature (10)..(10): n is a, c, g, or u
auauaagauncccgccuu

SEQ ID NO: 121733 - RNA, 19 nt, Artificial Sequence
  Synthetic
  misc_feature (11)..(11): n is a, c, g, or u
uauauaagauncccgccuu

SEQ ID NO: 121734 - RNA, 20 nt, Artificial Sequence
  Synthetic
  misc_feature (12)..(12): n is a, c, g, or u
uuauauaagauncccgccuu

SEQ ID NO: 121735 - RNA, 21 nt, Artificial Sequence
  Synthetic
  misc_feature (13)..(13): n is a, c, g, or u
uuuauauaagauncccgccuu

SEQ ID NO: 121736 - RNA, 22 nt, Artificial Sequence
  Synthetic
  misc_feature (14)..(14): n is a, c, g, or u
uuuuauauaagauncccgccuu

SEQ ID NO: 121737 - RNA, 23 nt, Artificial Sequence
  Synthetic
  misc_feature (15)..(15): n is a, c, g, or u
cuuuuauauaagauncccgccuu

SEQ ID NO: 121738 - RNA, 24 nt, Artificial Sequence
  Synthetic
  misc_feature (16)..(16): n is a, c, g, or u
ucuuuuauauaagauncccgccuu

SEQ ID NO: 121739 - RNA, 18 nt, Artificial Sequence
  Synthetic
gauuuguccccaugccuu

SEQ ID NO: 121740 - RNA, 19 nt, Artificial Sequence
  Synthetic
agauuuguccccaugccuu

SEQ ID NO: 121741 - RNA, 20 nt, Artificial Sequence
  Synthetic
aagauuuguccccaugccuu

SEQ ID NO: 121742 - RNA, 21 nt, Artificial Sequence
  Synthetic
aaagauuuguccccaugccuu

SEQ ID NO: 121743 - RNA, 22 nt, Artificial Sequence
  Synthetic
gaaagauuuguccccaugccuu

SEQ ID NO: 121744 - RNA, 23 nt, Artificial Sequence
  Synthetic
agaaagauuuguccccaugccuu

SEQ ID NO: 121745 - RNA, 24 nt, Artificial Sequence
  Synthetic
cagaaagauuuguccccaugccuu

SEQ ID NO: 121746 - RNA, 18 nt, Artificial Sequence
  Synthetic
  misc_feature (2)..(2): n is a, c, g, or u
angggaguaggcugccuu

SEQ ID NO: 121747 - RNA, 19 nt, Artificial Sequence
  Synthetic
  misc_feature (1)..(1): n is a, c, g, or u
  misc_feature (3)..(3): n is a, c, g, or u
nangggaguaggcugccuu

SEQ ID NO: 121748 - RNA, 20 nt, Artificial Sequence
  Synthetic
  misc_feature (2)..(2): n is a, c, g, or u
  misc_feature (4)..(4): n is a, c, g, or u
anangggaguaggcugccuu

SEQ ID NO: 121749 - RNA, 21 nt, Artificial Sequence
  Synthetic
  misc_feature (3)..(3): n is a, c, g, or u
  misc_feature (5)..(5): n is a, c, g, or u
ganangggaguaggcugccuu

SEQ ID NO: 121750 - RNA, 22 nt, Artificial Sequence
  Synthetic
  misc_feature (4)..(4): n is a, c, g, or u
  misc_feature (6)..(6): n is a, c, g, or u
aganangggaguaggcugccuu

SEQ ID NO: 121751 - RNA, 23 nt, Artificial Sequence
  Synthetic
  misc_feature (5)..(5): n is a, c, g, or u
  misc_feature (7)..(7): n is a, c, g, or u
gaganangggaguaggcugccuu

SEQ ID NO: 121752 - RNA, 24 nt, Artificial Sequence
  Synthetic
  misc_feature (6)..(6): n is a, c, g, or u
  misc_feature (8)..(8): n is a, c, g, or u
ggaganangggaguaggcugccuu

SEQ ID NO: 121753 - RNA, 18 nt, Artificial Sequence
  Synthetic
ccacccaaggcacagcuu

SEQ ID NO: 121754 - RNA, 19 nt, Artificial Sequence
  Synthetic
gccacccaaggcacagcuu

SEQ ID NO: 121755 - RNA, 20 nt, Artificial Sequence
  Synthetic
agccacccaaggcacagcuu

SEQ ID NO: 121756 - RNA, 21 nt, Artificial Sequence
  Synthetic
aagccacccaaggcacagcuu

SEQ ID NO: 121757 - RNA, 22 nt, Artificial Sequence
  Synthetic
aaagccacccaaggcacagcuu

SEQ ID NO: 121758 - RNA, 23 nt, Artificial Sequence
  Synthetic
  misc_feature (1)..(1): n is a, c, g, or u
naaagccacccaaggcacagcuu

SEQ ID NO: 121759 - RNA, 24 nt, Artificial Sequence
  Synthetic
  misc_feature (2)..(2): n is a, c, g, or u
cnaaagccacccaaggcacagcuu

SEQ ID NO: 121760 - RNA, 18 nt, Artificial Sequence
  Synthetic
  misc_feature (9)..(9): n is a, c, g, or u
  misc_feature (15)..(15): n is a, c, g, or u
uucagauanuguuuncuu

SEQ ID NO: 121761 - RNA, 19 nt, Artificial Sequence
  Synthetic
  misc_feature (10)..(10): n is a, c, g, or u
  misc_feature (16)..(16): n is a, c, g, or u
guucagauanuguuuncuu

SEQ ID NO: 121762 - RNA, 20 nt, Artificial Sequence
  Synthetic
  misc_feature (11)..(11): n is a, c, g, or u
  misc_feature (17)..(17): n is a, c, g, or u
gguucagauanuguuuncuu

SEQ ID NO: 121763 - RNA, 21 nt, Artificial Sequence
  Synthetic
  misc_feature (12)..(12): n is a, c, g, or u
  misc_feature (18)..(18): n is a, c, g, or u
agguucagauanuguuuncuu

SEQ ID NO: 121764 - RNA, 22 nt, Artificial Sequence
  Synthetic
  misc_feature (13)..(13): n is a, c, g, or u
  misc_feature (19)..(19): n is a, c, g, or u
aagguucagauanuguuuncuu

SEQ ID NO: 121765 - RNA, 23 nt, Artificial Sequence
  Synthetic
  misc_feature (14)..(14): n is a, c, g, or u
  misc_feature (20)..(20): n is a, c, g, or u
aaagguucagauanuguuuncuu

SEQ ID NO: 121766 - RNA, 24 nt, Artificial Sequence
  Synthetic
  misc_feature (15)..(15): n is a, c, g, or u
  misc_feature (21)..(21): n is a, c, g, or u
uaaagguucagauanuguuuncuu

SEQ ID NO: 121767 - RNA, 18 nt, Artificial Sequence
  Synthetic
cccugacucugggaucuu

SEQ ID NO: 121768 - RNA, 19 nt, Artificial Sequence
  Synthetic
gcccugacucugggaucuu

SEQ ID NO: 121769 - RNA, 20 nt, Artificial Sequence
  Synthetic
  misc_feature (1)..(1): n is a, c, g, or u
ngcccugacucugggaucuu

SEQ ID NO: 121770 - RNA, 21 nt, Artificial Sequence
  Synthetic
  misc_feature (2)..(2): n is a, c, g, or u
gngcccugacucugggaucuu

SEQ ID NO: 121771 - RNA, 22 nt, Artificial Sequence
  Synthetic
  misc_feature (3)..(3): n is a, c, g, or u
agngcccugacucugggaucuu

SEQ ID NO: 121772 - RNA, 23 nt, Artificial Sequence
  Synthetic
  misc_feature (4)..(4): n is a, c, g, or u
cagngcccugacucugggaucuu

SEQ ID NO: 121773 - RNA, 24 nt, Artificial Sequence
  Synthetic
  misc_feature (5)..(5): n is a, c, g, or u
acagngcccugacucugggaucuu

SEQ ID NO: 121774 - RNA, 18 nt, Artificial Sequence
  Synthetic
ggcgagggaguucuucuu

SEQ ID NO: 121775 - RNA, 19 nt, Artificial Sequence
  Synthetic
aggcgagggaguucuucuu

SEQ ID NO: 121776 - RNA, 20 nt, Artificial Sequence
  Synthetic
gaggcgagggaguucuucuu

SEQ ID NO: 121777 - RNA, 21 nt, Artificial Sequence
  Synthetic
cgaggcgagggaguucuucuu

SEQ ID NO: 121778 - RNA, 22 nt, Artificial Sequence
  Synthetic
gcgaggcgagggaguucuucuu

SEQ ID NO: 121779 - RNA, 23 nt, Artificial Sequence
  Synthetic
ugcgaggcgagggaguucuucuu

SEQ ID NO: 121780 - RNA, 24 nt, Artificial Sequence
  Synthetic
cugcgaggcgagggaguucuucuu

SEQ ID NO: 121781 - RNA, 18 nt, Artificial Sequence
  Synthetic
uacauaucccaugaaguu

SEQ ID NO: 121782 - RNA, 19 nt, Artificial Sequence
  Synthetic
uuacauaucccaugaaguu

SEQ ID NO: 121783 - RNA, 20 nt, Artificial Sequence
  Synthetic
auuacauaucccaugaaguu

SEQ ID NO: 121784 - RNA, 21 nt, Artificial Sequence
  Synthetic
aauuacauaucccaugaaguu

SEQ ID NO: 121785 - RNA, 22 nt, Artificial Sequence
  Synthetic
caauuacauaucccaugaaguu

SEQ ID NO: 121786 - RNA, 23 nt, Artificial Sequence
  Synthetic
ccaauuacauaucccaugaaguu

SEQ ID NO: 121787 - RNA, 24 nt, Artificial Sequence
  Synthetic
  misc_feature (1)..(1): n is a, c, g, or u
nccaauuacauaucccaugaaguu

SEQ ID NO: 121788 - RNA, 18 nt, Artificial Sequence
  Synthetic
agaaaggccuuguaaguu

SEQ ID NO: 121789 - RNA, 19 nt, Artificial Sequence
  Synthetic
uagaaaggccuuguaaguu

SEQ ID NO: 121790 - RNA, 20 nt, Artificial Sequence
  Synthetic
uuagaaaggccuuguaaguu

SEQ ID NO: 121791 - RNA, 21 nt, Artificial Sequence
  Synthetic
cuuagaaaggccuuguaaguu

SEQ ID NO: 121792 - RNA, 22 nt, Artificial Sequence
  Synthetic
  misc_feature (1)..(1): n is a, c, g, or u
ncuuagaaaggccuuguaaguu

SEQ ID NO: 121793 - RNA, 23 nt, Artificial Sequence
  Synthetic
  misc_feature (2)..(2): n is a, c, g, or u
uncuuagaaaggccuuguaaguu

SEQ ID NO: 121794 - RNA, 24 nt, Artificial Sequence
  Synthetic
  misc_feature (3)..(3): n is a, c, g, or u
uuncuuagaaaggccuuguaaguu

SEQ ID NO: 121795 - RNA, 18 nt, Artificial Sequence
  Synthetic
cccgcgcaggauccaguu

SEQ ID NO: 121796 - RNA, 19 nt, Artificial Sequence
  Synthetic
ucccgcgcaggauccaguu

SEQ ID NO: 121797 - RNA, 20 nt, Artificial Sequence
  Synthetic
gucccgcgcaggauccaguu

SEQ ID NO: 121798 - RNA, 18 nt, Artificial Sequence
  Synthetic
cgucuaacaacaguaguu

SEQ ID NO: 121799 - RNA, 19 nt, Artificial Sequence
  Synthetic
ucgucuaacaacaguaguu

SEQ ID NO: 121800 - RNA, 20 nt, Artificial Sequence
  Synthetic
  misc_feature (1)..(1): n is a, c, g, or u
nucgucuaacaacaguaguu

SEQ ID NO: 121801 - RNA, 21 nt, Artificial Sequence
  Synthetic
  misc_feature (2)..(2): n is a, c, g, or u
cnucgucuaacaacaguaguu

SEQ ID NO: 121802 - RNA, 22 nt, Artificial Sequence
  Synthetic
  misc_feature (3)..(3): n is a, c, g, or u
ucnucgucuaacaacaguaguu

SEQ ID NO: 121803 - RNA, 23 nt, Artificial Sequence
  Synthetic
  misc_feature (4)..(4): n is a, c, g, or u
cucnucgucuaacaacaguaguu

SEQ ID NO: 121804 - RNA, 24 nt, Artificial Sequence
  Synthetic
  misc_feature (5)..(5): n is a, c, g, or u
ccucnucgucuaacaacaguaguu

SEQ ID NO: 121805 - RNA, 18 nt, Artificial Sequence
  Synthetic
  misc_feature (13)..(13): n is a, c, g, or u
ggcacagaccagnccguu

SEQ ID NO: 121806 - RNA, 19 nt, Artificial Sequence
  Synthetic
  misc_feature (14)..(14): n is a, c, g, or u
uggcacagaccagnccguu

SEQ ID NO: 121807 - RNA, 20 nt, Artificial Sequence
  Synthetic
  misc_feature (15)..(15): n is a, c, g, or u
uuggcacagaccagnccguu

SEQ ID NO: 121808 - RNA, 21 nt, Artificial Sequence
  Synthetic
  misc_feature (16)..(16): n is a, c, g, or u
cuuggcacagaccagnccguu

SEQ ID NO: 121809 - RNA, 22 nt, Artificial Sequence
  Synthetic
  misc_feature (17)..(17): n is a, c, g, or u
acuuggcacagaccagnccguu

SEQ ID NO: 121810 - RNA, 23 nt, Artificial Sequence
  Synthetic
  misc_feature (18)..(18): n is a, c, g, or u
cacuuggcacagaccagnccguu

SEQ ID NO: 121811 - RNA, 24 nt, Artificial Sequence
  Synthetic
  misc_feature (19)..(19): n is a, c, g, or u
acacuuggcacagaccagnccguu

SEQ ID NO: 121812 - RNA, 18 nt, Artificial Sequence
  Synthetic
ccaugccuuuucgagguu

SEQ ID NO: 121813 - RNA, 19 nt, Artificial Sequence
  Synthetic
cccaugccuuuucgagguu

SEQ ID NO: 121814 - RNA, 20 nt, Artificial Sequence
  Synthetic
ccccaugccuuuucgagguu

SEQ ID NO: 121815 - RNA, 21 nt, Artificial Sequence
  Synthetic
uccccaugccuuuucgagguu

SEQ ID NO: 121816 - RNA, 22 nt, Artificial Sequence
  Synthetic
guccccaugccuuuucgagguu

SEQ ID NO: 121817 - RNA, 23 nt, Artificial Sequence
  Synthetic
uguccccaugccuuuucgagguu

SEQ ID NO: 121818 - RNA, 24 nt, Artificial Sequence
  Synthetic
uuguccccaugccuuuucgagguu

SEQ ID NO: 121819 - RNA, 18 nt, Artificial Sequence
  Synthetic
  misc_feature (15)..(15): n is a, c, g, or u
auuggaggacaacanguu

SEQ ID NO: 121820 - RNA, 19 nt, Artificial Sequence
  Synthetic
  misc_feature (16)..(16): n is a, c, g, or u
aauuggaggacaacanguu

SEQ ID NO: 121821 - RNA, 20 nt, Artificial Sequence
  Synthetic
  misc_feature (17)..(17): n is a, c, g, or u
aaauuggaggacaacanguu

SEQ ID NO: 121822 - RNA, 21 nt, Artificial Sequence
  Synthetic
  misc_feature (18)..(18): n is a, c, g, or u
caaauuggaggacaacanguu

SEQ ID NO: 121823 - RNA, 22 nt, Artificial Sequence
  Synthetic
  misc_feature (19)..(19): n is a, c, g, or u
acaaauuggaggacaacanguu

SEQ ID NO: 121824 - RNA, 23 nt, Artificial Sequence
  Synthetic
  misc_feature (20)..(20): n is a, c, g, or u
gacaaauuggaggacaacanguu

SEQ ID NO: 121825 - RNA, 24 nt, Artificial Sequence
  Synthetic
  misc_feature (21)..(21): n is a, c, g, or u
ggacaaauuggaggacaacanguu

SEQ ID NO: 121826 - RNA, 18 nt, Artificial Sequence
  Synthetic
ggugaggugaacaauguu

SEQ ID NO: 121827 - RNA, 19 nt, Artificial Sequence
  Synthetic
uggugaggugaacaauguu

SEQ ID NO: 121828 - RNA, 20 nt, Artificial Sequence
  Synthetic
auggugaggugaacaauguu

SEQ ID NO: 121829 - RNA, 21 nt, Artificial Sequence
  Synthetic
uauggugaggugaacaauguu

SEQ ID NO: 121830 - RNA, 22 nt, Artificial Sequence
  Synthetic
guauggugaggugaacaauguu

SEQ ID NO: 121831 - RNA, 23 nt, Artificial Sequence
  Synthetic
cguauggugaggugaacaauguu

SEQ ID NO: 121832 - RNA, 24 nt, Artificial Sequence
  Synthetic
ccguauggugaggugaacaauguu

SEQ ID NO: 121833 - RNA, 18 nt, Artificial Sequence
  Synthetic
ugagcagggcucacuguu

SEQ ID NO: 121834 - RNA, 19 nt, Artificial Sequence
  Synthetic
cugagcagggcucacuguu

SEQ ID NO: 121835 - RNA, 20 nt, Artificial Sequence
  Synthetic
ucugagcagggcucacuguu

SEQ ID NO: 121836 - RNA, 21 nt, Artificial Sequence
  Synthetic
uucugagcagggcucacuguu

SEQ ID NO: 121837 - RNA, 22 nt, Artificial Sequence
  Synthetic
auucugagcagggcucacuguu

SEQ ID NO: 121838 - RNA, 23 nt, Artificial Sequence
  Synthetic
uauucugagcagggcucacuguu

SEQ ID NO: 121839 - RNA, 24 nt, Artificial Sequence
  Synthetic
guauucugagcagggcucacuguu

SEQ ID NO: 121840 - RNA, 18 nt, Artificial Sequence
  Synthetic
  misc_feature (13)..(13): n is a, c, g, or u
ccaaucaauaggncuguu

SEQ ID NO: 121841 - RNA, 19 nt, Artificial Sequence
  Synthetic
  misc_feature (14)..(14): n is a, c, g, or u
uccaaucaauaggncuguu

SEQ ID NO: 121842 - RNA, 20 nt, Artificial Sequence
  Synthetic
  misc_feature (15)..(15): n is a, c, g, or u
uuccaaucaauaggncuguu

SEQ ID NO: 121843 - RNA, 21 nt, Artificial Sequence
  Synthetic
  misc_feature (16)..(16): n is a, c, g, or u
uuuccaaucaauaggncuguu

SEQ ID NO: 121844 - RNA, 22 nt, Artificial Sequence
  Synthetic
  misc_feature (17)..(17): n is a, c, g, or u
cuuuccaaucaauaggncuguu

SEQ ID NO: 121845 - RNA, 23 nt, Artificial Sequence
  Synthetic
  misc_feature (18)..(18): n is a, c, g, or u
acuuuccaaucaauaggncuguu

SEQ ID NO: 121846 - RNA, 24 nt, Artificial Sequence
  Synthetic
  misc_feature (1)..(1): n is a, c, g, or u
  misc_feature (19)..(19): n is a, c, g, or u
nacuuuccaaucaauaggncuguu

SEQ ID NO: 121847 - RNA, 18 nt, Artificial Sequence
  Synthetic
guaguuuccggaaguguu

SEQ ID NO: 121848 - RNA, 19 nt, Artificial Sequence
  Synthetic
aguaguuuccggaaguguu

SEQ ID NO: 121849 - RNA, 20 nt, Artificial Sequence
  Synthetic
caguaguuuccggaaguguu

SEQ ID NO: 121850 - RNA, 21 nt, Artificial Sequence
  Synthetic
acaguaguuuccggaaguguu

SEQ ID NO: 121851 - RNA, 22 nt, Artificial Sequence
  Synthetic
aacaguaguuuccggaaguguu

SEQ ID NO: 121852 - RNA, 23 nt, Artificial Sequence
  Synthetic
caacaguaguuuccggaaguguu

SEQ ID NO: 121853 - RNA, 24 nt, Artificial Sequence
  Synthetic
acaacaguaguuuccggaaguguu

SEQ ID NO: 121854 - RNA, 18 nt, Artificial Sequence
  Synthetic
  misc_feature (11)..(11): n is a, c, g, or u
caugcuguagnucuuguu

SEQ ID NO: 121855 - RNA, 19 nt, Artificial Sequence
  Synthetic
  misc_feature (12)..(12): n is a, c, g, or u
ccaugcuguagnucuuguu

SEQ ID NO: 121856 - RNA, 20 nt, Artificial Sequence
  Synthetic
  misc_feature (13)..(13): n is a, c, g, or u
cccaugcuguagnucuuguu

SEQ ID NO: 121857 - RNA, 21 nt, Artificial Sequence
  Synthetic
  misc_feature (14)..(14): n is a, c, g, or u
ucccaugcuguagnucuuguu

SEQ ID NO: 121858 - RNA, 22 nt, Artificial Sequence
  Synthetic
  misc_feature (15)..(15): n is a, c, g, or u
cucccaugcuguagnucuuguu

SEQ ID NO: 121859 - RNA, 23 nt, Artificial Sequence
  Synthetic
  misc_feature (16)..(16): n is a, c, g, or u
ccucccaugcuguagnucuuguu

SEQ ID NO: 121860 - RNA, 24 nt, Artificial Sequence
  Synthetic
  misc_feature (17)..(17): n is a, c, g, or u
accucccaugcuguagnucuuguu

SEQ ID NO: 121861 - RNA, 18 nt, Artificial Sequence
  Synthetic
  misc_feature (7)..(7): n is a, c, g, or u
  misc_feature (16)..(16): n is a, c, g, or u
uggaaangauguauanuu

SEQ ID NO: 121862 - RNA, 19 nt, Artificial Sequence
  Synthetic
  misc_feature (8)..(8): n is a, c, g, or u
  misc_feature (17)..(17): n is a, c, g, or u
auggaaangauguauanuu

SEQ ID NO: 121863 - RNA, 20 nt, Artificial Sequence
  Synthetic
  misc_feature (9)..(9): n is a, c, g, or u
  misc_feature (18)..(18): n is a, c, g, or u
cauggaaangauguauanuu

SEQ ID NO: 121864 - RNA, 21 nt, Artificial Sequence
  Synthetic
  misc_feature (10)..(10): n is a, c, g, or u
  misc_feature (19)..(19): n is a, c, g, or u
ccauggaaangauguauanuu

SEQ ID NO: 121865 - RNA, 22 nt, Artificial Sequence
  Synthetic
  misc_feature (11)..(11): n is a, c, g, or u
  misc_feature (20)..(20): n is a, c, g, or u
gccauggaaangauguauanuu

SEQ ID NO: 121866 - RNA, 23 nt, Artificial Sequence
  Synthetic
  misc_feature (12)..(12): n is a, c, g, or u
  misc_feature (21)..(21): n is a, c, g, or u
agccauggaaangauguauanuu

SEQ ID NO: 121867 - RNA, 24 nt, Artificial Sequence
  Synthetic
  misc_feature (13)..(13): n is a, c, g, or u
  misc_feature (22)..(22): n is a, c, g, or u
cagccauggaaangauguauanuu

SEQ ID NO: 121868 - RNA, 18 nt, Artificial Sequence
  Synthetic
aggucccaaucuggauuu

SEQ ID NO: 121869 - RNA, 19 nt, Artificial Sequence
  Synthetic
gaggucccaaucuggauuu

SEQ ID NO: 121870 - RNA, 20 nt, Artificial Sequence
  Synthetic
ugaggucccaaucuggauuu

SEQ ID NO: 121871 - RNA, 21 nt, Artificial Sequence
  Synthetic
uugaggucccaaucuggauuu

SEQ ID NO: 121872 - RNA, 22 nt, Artificial Sequence
  Synthetic
guugaggucccaaucuggauuu

SEQ ID NO: 121873 - RNA, 23 nt, Artificial Sequence
  Synthetic
gguugaggucccaaucuggauuu

SEQ ID NO: 121874 - RNA, 24 nt, Artificial Sequence
  Synthetic
ggguugaggucccaaucuggauuu

SEQ ID NO: 121875 - RNA, 18 nt, Artificial Sequence
  Synthetic
  misc_feature (7)..(7): n is a, c, g, or u
acaauanuugucugauuu

SEQ ID NO: 121876 - RNA, 19 nt, Artificial Sequence
  Synthetic
  misc_feature (8)..(8): n is a, c, g, or u
cacaauanuugucugauuu

SEQ ID NO: 121877 - RNA, 20 nt, Artificial Sequence
  Synthetic
  misc_feature (9)..(9): n is a, c, g, or u
ccacaauanuugucugauuu

SEQ ID NO: 121878 - RNA, 21 nt, Artificial Sequence
  Synthetic
  misc_feature (10)..(10): n is a, c, g, or u
accacaauanuugucugauuu

SEQ ID NO: 121879 - RNA, 22 nt, Artificial Sequence
  Synthetic
  misc_feature (11)..(11): n is a, c, g, or u
aaccacaauanuugucugauuu

SEQ ID NO: 121880 - RNA, 23 nt, Artificial Sequence
  Synthetic
  misc_feature (12)..(12): n is a, c, g, or u
aaaccacaauanuugucugauuu

SEQ ID NO: 121881 - RNA, 24 nt, Artificial Sequence
  Synthetic
  misc_feature (13)..(13): n is a, c, g, or u
gaaaccacaauanuugucugauuu

SEQ ID NO: 121882 - RNA, 18 nt, Artificial Sequence
  Synthetic
aucuaagggcaaauauuu

SEQ ID NO: 121883 - RNA, 19 nt, Artificial Sequence
  Synthetic
uaucuaagggcaaauauuu

SEQ ID NO: 121884 - RNA, 20 nt, Artificial Sequence
  Synthetic
uuaucuaagggcaaauauuu

SEQ ID NO: 121885 - RNA, 21 nt, Artificial Sequence
  Synthetic
uuuaucuaagggcaaauauuu

SEQ ID NO: 121886 - RNA, 22 nt, Artificial Sequence
  Synthetic
cuuuaucuaagggcaaauauuu

SEQ ID NO: 121887 - RNA, 23 nt, Artificial Sequence
  Synthetic
ccuuuaucuaagggcaaauauuu

SEQ ID NO: 121888 - RNA, 24 nt, Artificial Sequence
  Synthetic
  misc_feature (1)..(1): n is a, c, g, or u
nccuuuaucuaagggcaaauauuu

SEQ ID NO: 121889 - RNA, 18 nt, Artificial Sequence
  Synthetic
ccacucccauagguauuu

SEQ ID NO: 121890 - RNA, 19 nt, Artificial Sequence
  Synthetic
cccacucccauagguauuu

SEQ ID NO: 121891 - RNA, 20 nt, Artificial Sequence
  Synthetic
gcccacucccauagguauuu

SEQ ID NO: 121892 - RNA, 21 nt, Artificial Sequence
  Synthetic
ggcccacucccauagguauuu

SEQ ID NO: 121893 - RNA, 22 nt, Artificial Sequence
  Synthetic
aggcccacucccauagguauuu

SEQ ID NO: 121894 - RNA, 23 nt, Artificial Sequence
  Synthetic
gaggcccacucccauagguauuu

SEQ ID NO: 121895 - RNA, 24 nt, Artificial Sequence
  Synthetic
ugaggcccacucccauagguauuu

SEQ ID NO: 121896 - RNA, 18 nt, Artificial Sequence
  Synthetic
auuuguccccaugccuuu

SEQ ID NO: 121897 - RNA, 19 nt, Artificial Sequence
  Synthetic
gauuuguccccaugccuuu

SEQ ID NO: 121898 - RNA, 20 nt, Artificial Sequence
  Synthetic
agauuuguccccaugccuuu

SEQ ID NO: 121899 - RNA, 21 nt, Artificial Sequence
  Synthetic
aagauuuguccccaugccuuu

SEQ ID NO: 121900 - RNA, 22 nt, Artificial Sequence
  Synthetic
aaagauuuguccccaugccuuu

SEQ ID NO: 121901 - RNA, 23 nt, Artificial Sequence
  Synthetic
gaaagauuuguccccaugccuuu

SEQ ID NO: 121902 - RNA, 24 nt, Artificial Sequence
  Synthetic
agaaagauuuguccccaugccuuu

SEQ ID NO: 121903 - RNA, 18 nt, Artificial Sequence
  Synthetic
  misc_feature (1)..(1): n is a, c, g, or u
ncuguuuacaggaaguuu

SEQ ID NO: 121904 - RNA, 19 nt, Artificial Sequence
  Synthetic
  misc_feature (2)..(2): n is a, c, g, or u
gncuguuuacaggaaguuu

SEQ ID NO: 121905 - RNA, 20 nt, Artificial Sequence
  Synthetic
  misc_feature (3)..(3): n is a, c, g, or u
ggncuguuuacaggaaguuu

SEQ ID NO: 121906 - RNA, 21 nt, Artificial Sequence
  Synthetic
  misc_feature (4)..(4): n is a, c, g, or u
aggncuguuuacaggaaguuu

SEQ ID NO: 121907 - RNA, 22 nt, Artificial Sequence
  Synthetic
  misc_feature (5)..(5): n is a, c, g, or u
uaggncuguuuacaggaaguuu

SEQ ID NO: 121908 - RNA, 23 nt, Artificial Sequence
  Synthetic
  misc_feature (6)..(6): n is a, c, g, or u
auaggncuguuuacaggaaguuu

SEQ ID NO: 121909 - RNA, 24 nt, Artificial Sequence
  Synthetic
  misc_feature (7)..(7): n is a, c, g, or u
aauaggncuguuuacaggaaguuu

SEQ ID NO: 121910 - RNA, 18 nt, Artificial Sequence
  Synthetic
ugggaucuugaagaguuu

SEQ ID NO: 121911 - RNA, 19 nt, Artificial Sequence
  Synthetic
cugggaucuugaagaguuu

SEQ ID NO: 121912 - RNA, 20 nt, Artificial Sequence
  Synthetic
ucugggaucuugaagaguuu

SEQ ID NO: 121913 - RNA, 21 nt, Artificial Sequence
  Synthetic
cucugggaucuugaagaguuu

SEQ ID NO: 121914 - RNA, 22 nt, Artificial Sequence
  Synthetic
acucugggaucuugaagaguuu

SEQ ID NO: 121915 - RNA, 23 nt, Artificial Sequence
  Synthetic
gacucugggaucuugaagaguuu

SEQ ID NO: 121916 - RNA, 24 nt, Artificial Sequence
  Synthetic
ugacucugggaucuugaagaguuu

SEQ ID NO: 121917 - RNA, 18 nt, Artificial Sequence
  Synthetic
gucuaacaacaguaguuu

SEQ ID NO: 121918 - RNA, 19 nt, Artificial Sequence
  Synthetic
cgucuaacaacaguaguuu

SEQ ID NO: 121919 - RNA, 20 nt, Artificial Sequence
  Synthetic
ucgucuaacaacaguaguuu

SEQ ID NO: 121920 - RNA, 21 nt, Artificial Sequence
  Synthetic
  misc_feature (1)..(1): n is a, c, g, or u
nucgucuaacaacaguaguuu

SEQ ID NO: 121921 - RNA, 22 nt, Artificial Sequence
  Synthetic
  misc_feature (2)..(2): n is a, c, g, or u
cnucgucuaacaacaguaguuu

SEQ ID NO: 121922 - RNA, 23 nt, Artificial Sequence
  Synthetic
  misc_feature (3)..(3): n is a, c, g, or u
ucnucgucuaacaacaguaguuu

SEQ ID NO: 121923 - RNA, 24 nt, Artificial Sequence
  Synthetic
  misc_feature (4)..(4): n is a, c, g, or u
cucnucgucuaacaacaguaguuu

SEQ ID NO: 121924 - RNA, 18 nt, Artificial Sequence
  Synthetic
caugccuuuucgagguuu

SEQ ID NO: 121925 - RNA, 19 nt, Artificial Sequence
  Synthetic
ccaugccuuuucgagguuu

SEQ ID NO: 121926 - RNA, 20 nt, Artificial Sequence
  Synthetic
cccaugccuuuucgagguuu

SEQ ID NO: 121927 - RNA, 21 nt, Artificial Sequence
  Synthetic
ccccaugccuuuucgagguuu

SEQ ID NO: 121928 - RNA, 22 nt, Artificial Sequence
  Synthetic
uccccaugccuuuucgagguuu

SEQ ID NO: 121929 - RNA, 23 nt, Artificial Sequence
  Synthetic
guccccaugccuuuucgagguuu

SEQ ID NO: 121930 - RNA, 24 nt, Artificial Sequence
  Synthetic
uguccccaugccuuuucgagguuu

SEQ ID NO: 121931 - RNA, 18 nt, Artificial Sequence
  Synthetic
  misc_feature (12)..(12): n is a, c, g, or u
caaucaauaggncuguuu

SEQ ID NO: 121932 - RNA, 19 nt, Artificial Sequence
  Synthetic
  misc_feature (13)..(13): n is a, c, g, or u
ccaaucaauaggncuguuu

SEQ ID NO: 121933 - RNA, 20 nt, Artificial Sequence
  Synthetic
  misc_feature (14)..(14): n is a, c, g, or u
uccaaucaauaggncuguuu

SEQ ID NO: 121934 - RNA, 21 nt, Artificial Sequence
  Synthetic
  misc_feature (15)..(15): n is a, c, g, or u
uuccaaucaauaggncuguuu

SEQ ID NO: 121935 - RNA, 22 nt, Artificial Sequence
  Synthetic
  misc_feature (16)..(16): n is a, c, g, or u
uuuccaaucaauaggncuguuu

SEQ ID NO: 121936 - RNA, 23 nt, Artificial Sequence
  Synthetic
  misc_feature (17)..(17): n is a, c, g, or u
cuuuccaaucaauaggncuguuu

SEQ ID NO: 121937 - RNA, 24 nt, Artificial Sequence
  Synthetic
  misc_feature (18)..(18): n is a, c, g, or u
acuuuccaaucaauaggncuguuu

SEQ ID NO: 121938 - RNA, 18 nt, Artificial Sequence
  Synthetic
auccccaucuuuuuguuu

SEQ ID NO: 121939 - RNA, 19 nt, Artificial Sequence
  Synthetic
uauccccaucuuuuuguuu

SEQ ID NO: 121940 - RNA, 20 nt, Artificial Sequence
  Synthetic
auauccccaucuuuuuguuu

SEQ ID NO: 121941 - RNA, 21 nt, Artificial Sequence
  Synthetic
aauauccccaucuuuuuguuu

SEQ ID NO: 121942 - RNA, 22 nt, Artificial Sequence
  Synthetic
gaauauccccaucuuuuuguuu

SEQ ID NO: 121943 - RNA, 23 nt, Artificial Sequence
  Synthetic
ggaauauccccaucuuuuuguuu

SEQ ID NO: 121944 - RNA, 24 nt, Artificial Sequence
  Synthetic
gggaauauccccaucuuuuuguuu

SEQ ID NO: 121945 - RNA, 18 nt, Artificial Sequence
  Synthetic
cacucccauagguauuuu

SEQ ID NO: 121946 - RNA, 19 nt, Artificial Sequence
  Synthetic
ccacucccauagguauuuu

SEQ ID NO: 121947 - RNA, 20 nt, Artificial Sequence
  Synthetic
cccacucccauagguauuuu

SEQ ID NO: 121948 - RNA, 21 nt, Artificial Sequence
  Synthetic
gcccacucccauagguauuuu

SEQ ID NO: 121949 - RNA, 22 nt, Artificial Sequence
  Synthetic
ggcccacucccauagguauuuu

SEQ ID NO: 121950 - RNA, 23 nt, Artificial Sequence
  Synthetic
aggcccacucccauagguauuuu

SEQ ID NO: 121951 - RNA, 24 nt, Artificial Sequence
  Synthetic
gaggcccacucccauagguauuuu

SEQ ID NO: 121952 - RNA, 18 nt, Artificial Sequence
  Synthetic
uccccaucuuuuuguuuu

SEQ ID NO: 121953 - RNA, 19 nt, Artificial Sequence
  Synthetic
auccccaucuuuuuguuuu

SEQ ID NO: 121954 - RNA, 20 nt, Artificial Sequence
  Synthetic
uauccccaucuuuuuguuuu

SEQ ID NO: 121955 - RNA, 21 nt, Artificial Sequence
  Synthetic
auauccccaucuuuuuguuuu

SEQ ID NO: 121956 - RNA, 22 nt, Artificial Sequence
  Synthetic
aauauccccaucuuuuuguuuu

SEQ ID NO: 121957 - RNA, 23 nt, Artificial Sequence
  Synthetic
gaauauccccaucuuuuuguuuu

SEQ ID NO: 121958 - RNA, 24 nt, Artificial Sequence
  Synthetic
ggaauauccccaucuuuuuguuuu

SEQ ID NO: 121959 - RNA, 18 nt, Artificial Sequence
  Synthetic
gguauugugaggauuuuu

SEQ ID NO: 121960 - RNA, 19 nt, Artificial Sequence
  Synthetic
ugguauugugaggauuuuu

SEQ ID NO: 121961 - RNA, 20 nt, Artificial Sequence
  Synthetic
gugguauugugaggauuuuu

SEQ ID NO: 121962 - RNA, 21 nt, Artificial Sequence
  Synthetic
ugugguauugugaggauuuuu

SEQ ID NO: 121963 - RNA, 22 nt, Artificial Sequence
  Synthetic
cugugguauugugaggauuuuu

SEQ ID NO: 121964 - RNA, 23 nt, Artificial Sequence
  Synthetic
ucugugguauugugaggauuuuu

SEQ ID NO: 121965 - RNA, 24 nt, Artificial Sequence
  Synthetic
cucugugguauugugaggauuuuu

SEQ ID NO: 121966 - RNA, 18 nt, Artificial Sequence
  Synthetic
  misc_feature (11)..(11): n is a, c, g, or u
aacauauuguncaaaaaa

SEQ ID NO: 121967 - RNA, 19 nt, Artificial Sequence
  Synthetic
  misc_feature (12)..(12): n is a, c, g, or u
gaacauauuguncaaaaaa

SEQ ID NO: 121968 - RNA, 20 nt, Artificial Sequence
  Synthetic
  misc_feature (1)..(1): n is a, c, g, or u
  misc_feature (13)..(13): n is a, c, g, or u
ngaacauauuguncaaaaaa

SEQ ID NO: 121969 - RNA, 21 nt, Artificial Sequence
  Synthetic
  misc_feature (2)..(2): n is a, c, g, or u
  misc_feature (14)..(14): n is a, c, g, or u
angaacauauuguncaaaaaa

SEQ ID NO: 121970 - RNA, 22 nt, Artificial Sequence
  Synthetic
  misc_feature (3)..(3): n is a, c, g, or u
  misc_feature (15)..(15): n is a, c, g, or u
cangaacauauuguncaaaaaa

SEQ ID NO: 121971 - RNA, 23 nt, Artificial Sequence
  Synthetic
  misc_feature (1)..(1): n is a, c, g, or u
  misc_feature (4)..(4): n is a, c, g, or u
  misc_feature (16)..(16): n is a, c, g, or u
ncangaacauauuguncaaaaaa

SEQ ID NO: 121972 - RNA, 24 nt, Artificial Sequence
  Synthetic
  misc_feature (2)..(2): n is a, c, g, or u
  misc_feature (5)..(5): n is a, c, g, or u
  misc_feature (17)..(17): n is a, c, g, or u
cncangaacauauuguncaaaaaa

SEQ ID NO: 121973 - RNA, 18 nt, Artificial Sequence
  Synthetic
  misc_feature (8)..(8): n is a, c, g, or u
acccucanaaaacaaaaa

SEQ ID NO: 121974 - RNA, 19 nt, Artificial Sequence
  Synthetic
  misc_feature (9)..(9): n is a, c, g, or u
aacccucanaaaacaaaaa

SEQ ID NO: 121975 - RNA, 20 nt, Artificial Sequence
  Synthetic
  misc_feature (10)..(10): n is a, c, g, or u
aaacccucanaaaacaaaaa

SEQ ID NO: 121976 - RNA, 21 nt, Artificial Sequence
  Synthetic
  misc_feature (11)..(11): n is a, c, g, or u
uaaacccucanaaaacaaaaa

SEQ ID NO: 121977 - RNA, 22 nt, Artificial Sequence
  Synthetic
  misc_feature (12)..(12): n is a, c, g, or u
uuaaacccucanaaaacaaaaa

SEQ ID NO: 121978 - RNA, 23 nt, Artificial Sequence
  Synthetic
  misc_feature (13)..(13): n is a, c, g, or u
uuuaaacccucanaaaacaaaaa

SEQ ID NO: 121979 - RNA, 24 nt, Artificial Sequence
  Synthetic
  misc_feature (14)..(14): n is a, c, g, or u
auuuaaacccucanaaaacaaaaa

SEQ ID NO: 121980 - RNA, 18 nt, Artificial Sequence
  Synthetic
  misc_feature (12)..(12): n is a, c, g, or u
gaacauauuguncaaaaa

SEQ ID NO: 121981 - RNA, 19 nt, Artificial Sequence
  Synthetic
  misc_feature (1)..(1): n is a, c, g, or u
  misc_feature (13)..(13): n is a, c, g, or u
ngaacauauuguncaaaaa

SEQ ID NO: 121982 - RNA, 20 nt, Artificial Sequence
  Synthetic
  misc_feature (2)..(2): n is a, c, g, or u
  misc_feature (14)..(14): n is a, c, g, or u
angaacauauuguncaaaaa

SEQ ID NO: 121983 - RNA, 21 nt, Artificial Sequence
  Synthetic
  misc_feature (3)..(3): n is a, c, g, or u
  misc_feature (15)..(15): n is a, c, g, or u
cangaacauauuguncaaaaa

SEQ ID NO: 121984 - RNA, 22 nt, Artificial Sequence
  Synthetic
  misc_feature (1)..(1): n is a, c, g, or u
  misc_feature (4)..(4): n is a, c, g, or u
  misc_feature (16)..(16): n is a, c, g, or u
ncangaacauauuguncaaaaa

SEQ ID NO: 121985 - RNA, 23 nt, Artificial Sequence
  Synthetic
  misc_feature (2)..(2): n is a, c, g, or u
  misc_feature (5)..(5): n is a, c, g, or u
  misc_feature (17)..(17): n is a, c, g, or u
cncangaacauauuguncaaaaa

SEQ ID NO: 121986 - RNA, 24 nt, Artificial Sequence
  Synthetic
  misc_feature (3)..(3): n is a, c, g, or u
  misc_feature (6)..(6): n is a, c, g, or u
  misc_feature (18)..(18): n is a, c, g, or u
ccncangaacauauuguncaaaaa

SEQ ID NO: 121987 - RNA, 18 nt, Artificial Sequence
  Synthetic
uuaauaugggccuaaaaa

SEQ ID NO: 121988 - RNA, 19 nt, Artificial Sequence
  Synthetic
guuaauaugggccuaaaaa

SEQ ID NO: 121989 - RNA, 20 nt, Artificial Sequence
  Synthetic
  misc_feature (1)..(1): n is a, c, g, or u
nguuaauaugggccuaaaaa

SEQ ID NO: 121990 - RNA, 21 nt, Artificial Sequence
  Synthetic
  misc_feature (2)..(2): n is a, c, g, or u
anguuaauaugggccuaaaaa

SEQ ID NO: 121991 - RNA, 22 nt, Artificial Sequence
  Synthetic
  misc_feature (3)..(3): n is a, c, g, or u
aanguuaauaugggccuaaaaa

SEQ ID NO: 121992 - RNA, 23 nt, Artificial Sequence
  Synthetic
  misc_feature (4)..(4): n is a, c, g, or u
caanguuaauaugggccuaaaaa

SEQ ID NO: 121993 - RNA, 24 nt, Artificial Sequence
  Synthetic
  misc_feature (5)..(5): n is a, c, g, or u
ucaanguuaauaugggccuaaaaa

SEQ ID NO: 121994 - RNA, 18 nt, Artificial Sequence
  Synthetic
caaagccaacucagaaaa

SEQ ID NO: 121995 - RNA, 19 nt, Artificial Sequence
  Synthetic
ucaaagccaacucagaaaa

SEQ ID NO: 121996 - RNA, 20 nt, Artificial Sequence
  Synthetic
uucaaagccaacucagaaaa

SEQ ID NO: 121997 - RNA, 21 nt, Artificial Sequence
  Synthetic
auucaaagccaacucagaaaa

SEQ ID NO: 121998 - RNA, 22 nt, Artificial Sequence
  Synthetic
cauucaaagccaacucagaaaa

SEQ ID NO: 121999 - RNA, 23 nt, Artificial Sequence
  Synthetic
gcauucaaagccaacucagaaaa

SEQ ID NO: 122000 - RNA, 24 nt, Artificial Sequence
  Synthetic
ugcauucaaagccaacucagaaaa

SEQ ID NO: 122001 - RNA, 18 nt, Artificial Sequence
  Synthetic
  misc_feature (4)..(4): n is a, c, g, or u
ccunacaguaaaugaaaa

SEQ ID NO: 122002 - RNA, 19 nt, Artificial Sequence
  Synthetic
  misc_feature (5)..(5): n is a, c, g, or u
cccunacaguaaaugaaaa

SEQ ID NO: 122003 - RNA, 20 nt, Artificial Sequence
  Synthetic
  misc_feature (6)..(6): n is a, c, g, or u
ccccunacaguaaaugaaaa

SEQ ID NO: 122004 - RNA, 21 nt, Artificial Sequence
  Synthetic
  misc_feature (1)..(1): n is a, c, g, or u
  misc_feature (7)..(7): n is a, c, g, or u
nccccunacaguaaaugaaaa

SEQ ID NO: 122005 - RNA, 22 nt, Artificial Sequence
  Synthetic
  misc_feature (2)..(2): n is a, c, g, or u
  misc_feature (8)..(8): n is a, c, g, or u
gnccccunacaguaaaugaaaa

SEQ ID NO: 122006 - RNA, 23 nt, Artificial Sequence
  Synthetic
  misc_feature (3)..(3): n is a, c, g, or u
  misc_feature (9)..(9): n is a, c, g, or u
ggnccccunacaguaaaugaaaa

SEQ ID NO: 122007 - RNA, 24 nt, Artificial Sequence
  Synthetic
  misc_feature (4)..(4): n is a, c, g, or u
  misc_feature (10)..(10): n is a, c, g, or u
gggnccccunacaguaaaugaaaa

SEQ ID NO: 122008 - RNA, 18 nt, Artificial Sequence
  Synthetic
  misc_feature (14)..(14): n is a, c, g, or u
auuuaaacccucanaaaa

SEQ ID NO: 122009 - RNA, 19 nt, Artificial Sequence
  Synthetic
  misc_feature (15)..(15): n is a, c, g, or u
cauuuaaacccucanaaaa

SEQ ID NO: 122010 - RNA, 20 nt, Artificial Sequence
  Synthetic
  misc_feature (16)..(16): n is a, c, g, or u
acauuuaaacccucanaaaa

SEQ ID NO: 122011 - RNA, 21 nt, Artificial Sequence
  Synthetic
  misc_feature (17)..(17): n is a, c, g, or u
uacauuuaaacccucanaaaa

SEQ ID NO: 122012 - RNA, 22 nt, Artificial Sequence
  Synthetic
  misc_feature (18)..(18): n is a, c, g, or u
auacauuuaaacccucanaaaa

SEQ ID NO: 122013 - RNA, 23 nt, Artificial Sequence
  Synthetic
  misc_feature (19)..(19): n is a, c, g, or u
uauacauuuaaacccucanaaaa

SEQ ID NO: 122014 - RNA, 24 nt, Artificial Sequence
  Synthetic
  misc_feature (20)..(20): n is a, c, g, or u
guauacauuuaaacccucanaaaa

SEQ ID NO: 122015 - RNA, 18 nt, Artificial Sequence
  Synthetic
  misc_feature (5)..(5): n is a, c, g, or u
cgggnaucuuauauaaaa

SEQ ID NO: 122016 - RNA, 19 nt, Artificial Sequence
  Synthetic
  misc_feature (6)..(6): n is a, c, g, or u
gcgggnaucuuauauaaaa

SEQ ID NO: 122017 - RNA, 20 nt, Artificial Sequence
  Synthetic
  misc_feature (7)..(7): n is a, c, g, or u
ggcgggnaucuuauauaaaa

SEQ ID NO: 122018 - RNA, 21 nt, Artificial Sequence
  Synthetic
  misc_feature (8)..(8): n is a, c, g, or u
aggcgggnaucuuauauaaaa

SEQ ID NO: 122019 - RNA, 22 nt, Artificial Sequence
  Synthetic
  misc_feature (9)..(9): n is a, c, g, or u
aaggcgggnaucuuauauaaaa

SEQ ID NO: 122020 - RNA, 23 nt, Artificial Sequence
  Synthetic
  misc_feature (10)..(10): n is a, c, g, or u
gaaggcgggnaucuuauauaaaa

SEQ ID NO: 122021 - RNA, 24 nt, Artificial Sequence
  Synthetic
  misc_feature (11)..(11): n is a, c, g, or u
ggaaggcgggnaucuuauauaaaa

SEQ ID NO: 122022 - RNA, 18 nt, Artificial Sequence
  Synthetic
guuaauaugggccuaaaa

SEQ ID NO: 122023 - RNA, 19 nt, Artificial Sequence
  Synthetic
  misc_feature (1)..(1): n is a, c, g, or u
nguuaauaugggccuaaaa

SEQ ID NO: 122024 - RNA, 20 nt, Artificial Sequence
  Synthetic
  misc_feature (2)..(2): n is a, c, g, or u
anguuaauaugggccuaaaa

SEQ ID NO: 122025 - RNA, 21 nt, Artificial Sequence
  Synthetic
  misc_feature (3)..(3): n is a, c, g, or u
aanguuaauaugggccuaaaa

SEQ ID NO: 122026 - RNA, 22 nt, Artificial Sequence
  Synthetic
  misc_feature (4)..(4): n is a, c, g, or u
caanguuaauaugggccuaaaa

SEQ ID NO: 122027 - RNA, 23 nt, Artificial Sequence
  Synthetic
  misc_feature (5)..(5): n is a, c, g, or u
ucaanguuaauaugggccuaaaa

SEQ ID NO: 122028 - RNA, 24 nt, Artificial Sequence
  Synthetic
  misc_feature (6)..(6): n is a, c, g, or u
gucaanguuaauaugggccuaaaa

SEQ ID NO: 122029 - RNA, 18 nt, Artificial Sequence
  Synthetic
uuggacccugcauucaaa

SEQ ID NO: 122030 - RNA, 19 nt, Artificial Sequence
  Synthetic
guuggacccugcauucaaa

SEQ ID NO: 122031 - RNA, 20 nt, Artificial Sequence
  Synthetic
aguuggacccugcauucaaa

SEQ ID NO: 122032 - RNA, 21 nt, Artificial Sequence
  Synthetic
caguuggacccugcauucaaa

SEQ ID NO: 122033 - RNA, 22 nt, Artificial Sequence
  Synthetic
ucaguuggacccugcauucaaa

SEQ ID NO: 122034 - RNA, 23 nt, Artificial Sequence
  Synthetic
aucaguuggacccugcauucaaa

SEQ ID NO: 122035 - RNA, 24 nt, Artificial Sequence
  Synthetic
caucaguuggacccugcauucaaa

SEQ ID NO: 122036 - RNA, 18 nt, Artificial Sequence
  Synthetic
  misc_feature (5)..(5): n is a, c, g, or u
cccunacaguaaaugaaa

SEQ ID NO: 122037 - RNA, 19 nt, Artificial Sequence
  Synthetic
  misc_feature (6)..(6): n is a, c, g, or u
ccccunacaguaaaugaaa

SEQ ID NO: 122038 - RNA, 20 nt, Artificial Sequence
  Synthetic
  misc_feature (1)..(1): n is a, c, g, or u
  misc_feature (7)..(7): n is a, c, g, or u
nccccunacaguaaaugaaa

SEQ ID NO: 122039 - RNA, 21 nt, Artificial Sequence
  Synthetic
  misc_feature (2)..(2): n is a, c, g, or u
  misc_feature (8)..(8): n is a, c, g, or u
gnccccunacaguaaaugaaa

SEQ ID NO: 122040 - RNA, 22 nt, Artificial Sequence
  Synthetic
  misc_feature (3)..(3): n is a, c, g, or u
  misc_feature (9)..(9): n is a, c, g, or u
ggnccccunacaguaaaugaaa

SEQ ID NO: 122041 - RNA, 23 nt, Artificial Sequence
  Synthetic
  misc_feature (4)..(4): n is a, c, g, or u
  misc_feature (10)..(10): n is a, c, g, or u
gggnccccunacaguaaaugaaa

SEQ ID NO: 122042 - RNA, 24 nt, Artificial Sequence
  Synthetic
  misc_feature (5)..(5): n is a, c, g, or u
  misc_feature (11)..(11): n is a, c, g, or u
ugggnccccunacaguaaaugaaa

SEQ ID NO: 122043 - RNA, 18 nt, Artificial Sequence
  Synthetic
  misc_feature (15)..(15): n is a, c, g, or u
cauuuaaacccucanaaa

SEQ ID NO: 122044 - RNA, 19 nt, Artificial Sequence
  Synthetic
  misc_feature (16)..(16): n is a, c, g, or u
acauuuaaacccucanaaa

SEQ ID NO: 122045 - RNA, 20 nt, Artificial Sequence
  Synthetic
  misc_feature (17)..(17): n is a, c, g, or u
uacauuuaaacccucanaaa

SEQ ID NO: 122046 - RNA, 21 nt, Artificial Sequence
  Synthetic
  misc_feature (18)..(18): n is a, c, g, or u
auacauuuaaacccucanaaa

SEQ ID NO: 122047 - RNA, 22 nt, Artificial Sequence
  Synthetic
  misc_feature (19)..(19): n is a, c, g, or u
uauacauuuaaacccucanaaa

SEQ ID NO: 122048 - RNA, 23 nt, Artificial Sequence
  Synthetic
  misc_feature (20)..(20): n is a, c, g, or u
guauacauuuaaacccucanaaa

SEQ ID NO: 122049 - RNA, 24 nt, Artificial Sequence
  Synthetic
  misc_feature (21)..(21): n is a, c, g, or u
gguauacauuuaaacccucanaaa

SEQ ID NO: 122050 - RNA, 18 nt, Artificial Sequence
  Synthetic
  misc_feature (6)..(6): n is a, c, g, or u
gcgggnaucuuauauaaa

SEQ ID NO: 122051 - RNA, 19 nt, Artificial Sequence
  Synthetic
  misc_feature (7)..(7): n is a, c, g, or u
ggcgggnaucuuauauaaa

SEQ ID NO: 122052 - RNA, 20 nt, Artificial Sequence
  Synthetic
  misc_feature (8)..(8): n is a, c, g, or u
aggcgggnaucuuauauaaa

SEQ ID NO: 122053 - RNA, 21 nt, Artificial Sequence
  Synthetic
  misc_feature (9)..(9): n is a, c, g, or u
aaggcgggnaucuuauauaaa

SEQ ID NO: 122054 - RNA, 22 nt, Artificial Sequence
  Synthetic
  misc_feature (10)..(10): n is a, c, g, or u
gaaggcgggnaucuuauauaaa

SEQ ID NO: 122055 - RNA, 23 nt, Artificial Sequence
  Synthetic
  misc_feature (11)..(11): n is a, c, g, or u
ggaaggcgggnaucuuauauaaa

SEQ ID NO: 122056 - RNA, 24 nt, Artificial Sequence
  Synthetic
  misc_feature (12)..(12): n is a, c, g, or u
uggaaggcgggnaucuuauauaaa

SEQ ID NO: 122057 - RNA, 18 nt, Artificial Sequence
  Synthetic
  misc_feature (4)..(4): n is a, c, g, or u
  misc_feature (10)..(10): n is a, c, g, or u
gggnccccunacaguaaa

SEQ ID NO: 122058 - RNA, 19 nt, Artificial Sequence
  Synthetic
  misc_feature (5)..(5): n is a, c, g, or u
  misc_feature (11)..(11): n is a, c, g, or u
ugggnccccunacaguaaa

SEQ ID NO: 122059 - RNA, 20 nt, Artificial Sequence
  Synthetic
  misc_feature (6)..(6): n is a, c, g, or u
  misc_feature (12)..(12): n is a, c, g, or u
gugggnccccunacaguaaa

SEQ ID NO: 122060 - RNA, 21 nt, Artificial Sequence
  Synthetic
  misc_feature (7)..(7): n is a, c, g, or u
  misc_feature (13)..(13): n is a, c, g, or u
ugugggnccccunacaguaaa

SEQ ID NO: 122061 - RNA, 22 nt, Artificial Sequence
  Synthetic
  misc_feature (8)..(8): n is a, c, g, or u
  misc_feature (14)..(14): n is a, c, g, or u
uugugggnccccunacaguaaa

SEQ ID NO: 122062 - RNA, 23 nt, Artificial Sequence
  Synthetic
  misc_feature (9)..(9): n is a, c, g, or u
  misc_feature (15)..(15): n is a, c, g, or u
uuugugggnccccunacaguaaa

SEQ ID NO: 122063 - RNA, 24 nt, Artificial Sequence
  Synthetic
  misc_feature (10)..(10): n is a, c, g, or u
  misc_feature (16)..(16): n is a, c, g, or u
auuugugggnccccunacaguaaa

SEQ ID NO: 122064 - RNA, 18 nt, Artificial Sequence
  Synthetic
cuggccggacgccaacaa

SEQ ID NO: 122065 - RNA, 19 nt, Artificial Sequence
  Synthetic
acuggccggacgccaacaa

SEQ ID NO: 122066 - RNA, 20 nt, Artificial Sequence
  Synthetic
aacuggccggacgccaacaa

SEQ ID NO: 122067 - RNA, 18 nt, Artificial Sequence
  Synthetic
uuauaugcauguauacaa

SEQ ID NO: 122068 - RNA, 19 nt, Artificial Sequence
  Synthetic
uuuauaugcauguauacaa

SEQ ID NO: 122069 - RNA, 20 nt, Artificial Sequence
  Synthetic
cuuuauaugcauguauacaa

SEQ ID NO: 122070 - RNA, 21 nt, Artificial Sequence
  Synthetic
ccuuuauaugcauguauacaa

SEQ ID NO: 122071 - RNA, 22 nt, Artificial Sequence
  Synthetic
gccuuuauaugcauguauacaa

SEQ ID NO: 122072 - RNA, 23 nt, Artificial Sequence
  Synthetic
ugccuuuauaugcauguauacaa

SEQ ID NO: 122073 - RNA, 24 nt, Artificial Sequence
  Synthetic
augccuuuauaugcauguauacaa

SEQ ID NO: 122074 - RNA, 18 nt, Artificial Sequence
  Synthetic
cccugcauucaaagccaa

SEQ ID NO: 122075 - RNA, 19 nt, Artificial Sequence
  Synthetic
acccugcauucaaagccaa

SEQ ID NO: 122076 - RNA, 20 nt, Artificial Sequence
  Synthetic
gacccugcauucaaagccaa

SEQ ID NO: 122077 - RNA, 21 nt, Artificial Sequence
  Synthetic
ggacccugcauucaaagccaa

SEQ ID NO: 122078 - RNA, 22 nt, Artificial Sequence
  Synthetic
uggacccugcauucaaagccaa

SEQ ID NO: 122079 - RNA, 23 nt, Artificial Sequence
  Synthetic
uuggacccugcauucaaagccaa

SEQ ID NO: 122080 - RNA, 24 nt, Artificial Sequence
  Synthetic
guuggacccugcauucaaagccaa

SEQ ID NO: 122081 - RNA, 18 nt, Artificial Sequence
  Synthetic
  misc_feature (3)..(3): n is a, c, g, or u
  misc_feature (12)..(12): n is a, c, g, or u
  misc_feature (15)..(15): n is a, c, g, or u
gcngccccuuunacncaa

SEQ ID NO: 122082 - RNA, 19 nt, Artificial Sequence
  Synthetic
  misc_feature (4)..(4): n is a, c, g, or u
  misc_feature (13)..(13): n is a, c, g, or u
  misc_feature (16)..(16): n is a, c, g, or u
ugcngccccuuunacncaa

SEQ ID NO: 122083 - RNA, 20 nt, Artificial Sequence
  Synthetic
  misc_feature (5)..(5): n is a, c, g, or u
  misc_feature (14)..(14): n is a, c, g, or u
  misc_feature (17)..(17): n is a, c, g, or u
uugcngccccuuunacncaa

SEQ ID NO: 122084 - RNA, 21 nt, Artificial Sequence
  Synthetic
  misc_feature (6)..(6): n is a, c, g, or u
  misc_feature (15)..(15): n is a, c, g, or u
  misc_feature (18)..(18): n is a, c, g, or u
uuugcngccccuuunacncaa

SEQ ID NO: 122085 - RNA, 22 nt, Artificial Sequence
  Synthetic
  misc_feature (7)..(7): n is a, c, g, or u
  misc_feature (16)..(16): n is a, c, g, or u
  misc_feature (19)..(19): n is a, c, g, or u
guuugcngccccuuunacncaa

SEQ ID NO: 122086 - RNA, 23 nt, Artificial Sequence
  Synthetic
  misc_feature (8)..(8): n is a, c, g, or u
  misc_feature (17)..(17): n is a, c, g, or u
  misc_feature (20)..(20): n is a, c, g, or u
gguuugcngccccuuunacncaa

SEQ ID NO: 122087 - RNA, 24 nt, Artificial Sequence
  Synthetic
  misc_feature (9)..(9): n is a, c, g, or u
  misc_feature (18)..(18): n is a, c, g, or u
  misc_feature (21)..(21): n is a, c, g, or u
ggguuugcngccccuuunacncaa

SEQ ID NO: 122088 - RNA, 18 nt, Artificial Sequence
  Synthetic
  misc_feature (9)..(9): n is a, c, g, or u
auugacccnuauaaagaa

SEQ ID NO: 122089 - RNA, 19 nt, Artificial Sequence
  Synthetic
  misc_feature (10)..(10): n is a, c, g, or u
cauugacccnuauaaagaa

SEQ ID NO: 122090 - RNA, 20 nt, Artificial Sequence
  Synthetic
  misc_feature (11)..(11): n is a, c, g, or u
acauugacccnuauaaagaa

SEQ ID NO: 122091 - RNA, 21 nt, Artificial Sequence
  Synthetic
  misc_feature (12)..(12): n is a, c, g, or u
gacauugacccnuauaaagaa

SEQ ID NO: 122092 - RNA, 22 nt, Artificial Sequence
  Synthetic
  misc_feature (13)..(13): n is a, c, g, or u
ggacauugacccnuauaaagaa

SEQ ID NO: 122093 - RNA, 23 nt, Artificial Sequence
  Synthetic
  misc_feature (14)..(14): n is a, c, g, or u
uggacauugacccnuauaaagaa

SEQ ID NO: 122094 - RNA, 24 nt, Artificial Sequence
  Synthetic
  misc_feature (15)..(15): n is a, c, g, or u
auggacauugacccnuauaaagaa

SEQ ID NO: 122095 - RNA, 18 nt, Artificial Sequence
  Synthetic
gaggcagguccccuagaa

SEQ ID NO: 122096 - RNA, 19 nt, Artificial Sequence
  Synthetic
  misc_feature (1)..(1): n is a, c, g, or u
ngaggcagguccccuagaa

SEQ ID NO: 122097 - RNA, 20 nt, Artificial Sequence
  Synthetic
  misc_feature (2)..(2): n is a, c, g, or u
angaggcagguccccuagaa

SEQ ID NO: 122098 - RNA, 21 nt, Artificial Sequence
  Synthetic
  misc_feature (3)..(3): n is a, c, g, or u
gangaggcagguccccuagaa

SEQ ID NO: 122099 - RNA, 22 nt, Artificial Sequence
  Synthetic
  misc_feature (4)..(4): n is a, c, g, or u
cgangaggcagguccccuagaa

SEQ ID NO: 122100 - RNA, 23 nt, Artificial Sequence
  Synthetic
  misc_feature (5)..(5): n is a, c, g, or u
acgangaggcagguccccuagaa

SEQ ID NO: 122101 - RNA, 24 nt, Artificial Sequence
  Synthetic
  misc_feature (6)..(6): n is a, c, g, or u
gacgangaggcagguccccuagaa

SEQ ID NO: 122102 - RNA, 18 nt, Artificial Sequence
  Synthetic
uggggacccuguaccgaa

SEQ ID NO: 122103 - RNA, 19 nt, Artificial Sequence
  Synthetic
cuggggacccuguaccgaa

SEQ ID NO: 122104 - RNA, 20 nt, Artificial Sequence
  Synthetic
acuggggacccuguaccgaa

SEQ ID NO: 122105 - RNA, 21 nt, Artificial Sequence
  Synthetic
gacuggggacccuguaccgaa

SEQ ID NO: 122106 - RNA, 22 nt, Artificial Sequence
  Synthetic
agacuggggacccuguaccgaa

SEQ ID NO: 122107 - RNA, 23 nt, Artificial Sequence
  Synthetic
aagacuggggacccuguaccgaa

SEQ ID NO: 122108 - RNA, 24 nt, Artificial Sequence
  Synthetic
gaagacuggggacccuguaccgaa

SEQ ID NO: 122109 - RNA, 18 nt, Artificial Sequence
  Synthetic
ccaaucggcagucaggaa

SEQ ID NO: 122110 - RNA, 19 nt, Artificial Sequence
  Synthetic
accaaucggcagucaggaa

SEQ ID NO: 122111 - RNA, 20 nt, Artificial Sequence
  Synthetic
caccaaucggcagucaggaa

SEQ ID NO: 122112 - RNA, 21 nt, Artificial Sequence
  Synthetic
ccaccaaucggcagucaggaa

SEQ ID NO: 122113 - RNA, 22 nt, Artificial Sequence
  Synthetic
uccaccaaucggcagucaggaa

SEQ ID NO: 122114 - RNA, 23 nt, Artificial Sequence
  Synthetic
cuccaccaaucggcagucaggaa

SEQ ID NO: 122115 - RNA, 24 nt, Artificial Sequence
  Synthetic
ccuccaccaaucggcagucaggaa

SEQ ID NO: 122116 - RNA, 18 nt, Artificial Sequence
  Synthetic
ucaccauauucuugggaa

SEQ ID NO: 122117 - RNA, 19 nt, Artificial Sequence
  Synthetic
gucaccauauucuugggaa

SEQ ID NO: 122118 - RNA, 20 nt, Artificial Sequence
  Synthetic
ggucaccauauucuugggaa

SEQ ID NO: 122119 - RNA, 18 nt, Artificial Sequence
  Synthetic
  misc_feature (7)..(7): n is a, c, g, or u
uuuacanacucuuuggaa

SEQ ID NO: 122120 - RNA, 19 nt, Artificial Sequence
  Synthetic
  misc_feature (8)..(8): n is a, c, g, or u
auuuacanacucuuuggaa

SEQ ID NO: 122121 - RNA, 20 nt, Artificial Sequence
  Synthetic
  misc_feature (9)..(9): n is a, c, g, or u
uauuuacanacucuuuggaa

SEQ ID NO: 122122 - RNA, 21 nt, Artificial Sequence
  Synthetic
  misc_feature (10)..(10): n is a, c, g, or u
uuauuuacanacucuuuggaa

SEQ ID NO: 122123 - RNA, 22 nt, Artificial Sequence
  Synthetic
  misc_feature (11)..(11): n is a, c, g, or u
auuauuuacanacucuuuggaa

SEQ ID NO: 122124 - RNA, 23 nt, Artificial Sequence
  Synthetic
  misc_feature (12)..(12): n is a, c, g, or u
cauuauuuacanacucuuuggaa

SEQ ID NO: 122125 - RNA, 24 nt, Artificial Sequence
  Synthetic
  misc_feature (13)..(13): n is a, c, g, or u
acauuauuuacanacucuuuggaa

SEQ ID NO: 122126 - RNA, 18 nt, Artificial Sequence
  Synthetic
  misc_feature (6)..(6): n is a, c, g, or u
ccccunacaguaaaugaa

SEQ ID NO: 122127 - RNA, 19 nt, Artificial Sequence
  Synthetic
  misc_feature (1)..(1): n is a, c, g, or u
  misc_feature (7)..(7): n is a, c, g, or u
nccccunacaguaaaugaa

SEQ ID NO: 122128 - RNA, 20 nt, Artificial Sequence
  Synthetic
  misc_feature (2)..(2): n is a, c, g, or u
  misc_feature (8)..(8): n is a, c, g, or u
gnccccunacaguaaaugaa

SEQ ID NO: 122129 - RNA, 21 nt, Artificial Sequence
  Synthetic
  misc_feature (3)..(3): n is a, c, g, or u
  misc_feature (9)..(9): n is a, c, g, or u
ggnccccunacaguaaaugaa

SEQ ID NO: 122130 - RNA, 22 nt, Artificial Sequence
  Synthetic
  misc_feature (4)..(4): n is a, c, g, or u
  misc_feature (10)..(10): n is a, c, g, or u
gggnccccunacaguaaaugaa

SEQ ID NO: 122131 - RNA, 23 nt, Artificial Sequence
  Synthetic
  misc_feature (5)..(5): n is a, c, g, or u
  misc_feature (11)..(11): n is a, c, g, or u
ugggnccccunacaguaaaugaa

SEQ ID NO: 122132 - RNA, 24 nt, Artificial Sequence
  Synthetic
  misc_feature (6)..(6): n is a, c, g, or u
  misc_feature (12)..(12): n is a, c, g, or u
gugggnccccunacaguaaaugaa

SEQ ID NO: 122133 - RNA, 18 nt, Artificial Sequence
  Synthetic
  misc_feature (13)..(13): n is a, c, g, or u
uuggggugaguunaugaa

SEQ ID NO: 122134 - RNA, 19 nt, Artificial Sequence
  Synthetic
  misc_feature (14)..(14): n is a, c, g, or u
guuggggugaguunaugaa

SEQ ID NO: 122135 - RNA, 20 nt, Artificial Sequence
  Synthetic
  misc_feature (15)..(15): n is a, c, g, or u
uguuggggugaguunaugaa

SEQ ID NO: 122136 - RNA, 21 nt, Artificial Sequence
  Synthetic
  misc_feature (16)..(16): n is a, c, g, or u
guguuggggugaguunaugaa

SEQ ID NO: 122137 - RNA, 22 nt, Artificial Sequence
  Synthetic
  misc_feature (17)..(17): n is a, c, g, or u
uguguuggggugaguunaugaa

SEQ ID NO: 122138 - RNA, 23 nt, Artificial Sequence
  Synthetic
  misc_feature (18)..(18): n is a, c, g, or u
cuguguuggggugaguunaugaa

SEQ ID NO: 122139 - RNA, 24 nt, Artificial Sequence
  Synthetic
  misc_feature (19)..(19): n is a, c, g, or u
ucuguguuggggugaguunaugaa

SEQ ID NO: 122140 - RNA, 18 nt, Artificial Sequence
  Synthetic
  misc_feature (16)..(16): n is a, c, g, or u
acauuuaaacccucanaa

SEQ ID NO: 122141 - RNA, 19 nt, Artificial Sequence
  Synthetic
  misc_feature (17)..(17): n is a, c, g, or u
uacauuuaaacccucanaa

SEQ ID NO: 122142 - RNA, 20 nt, Artificial Sequence
  Synthetic
  misc_feature (18)..(18): n is a, c, g, or u
auacauuuaaacccucanaa

SEQ ID NO: 122143 - RNA, 21 nt, Artificial Sequence
  Synthetic
  misc_feature (19)..(19): n is a, c, g, or u
uauacauuuaaacccucanaa

SEQ ID NO: 122144 - RNA, 22 nt, Artificial Sequence
  Synthetic
  misc_feature (20)..(20): n is a, c, g, or u
guauacauuuaaacccucanaa

SEQ ID NO: 122145 - RNA, 23 nt, Artificial Sequence
  Synthetic
  misc_feature (21)..(21): n is a, c, g, or u
gguauacauuuaaacccucanaa

SEQ ID NO: 122146 - RNA, 24 nt, Artificial Sequence
  Synthetic
  misc_feature (22)..(22): n is a, c, g, or u
ggguauacauuuaaacccucanaa

SEQ ID NO: 122147 - RNA, 18 nt, Artificial Sequence
  Synthetic
  misc_feature (16)..(16): n is a, c, g, or u
ugcauguauacaagcnaa

SEQ ID NO: 122148 - RNA, 19 nt, Artificial Sequence
  Synthetic
  misc_feature (17)..(17): n is a, c, g, or u
augcauguauacaagcnaa

SEQ ID NO: 122149 - RNA, 20 nt, Artificial Sequence
  Synthetic
  misc_feature (18)..(18): n is a, c, g, or u
uaugcauguauacaagcnaa

SEQ ID NO: 122150 - RNA, 21 nt, Artificial Sequence
  Synthetic
  misc_feature (19)..(19): n is a, c, g, or u
auaugcauguauacaagcnaa

SEQ ID NO: 122151 - RNA, 22 nt, Artificial Sequence
  Synthetic
  misc_feature (20)..(20): n is a, c, g, or u
uauaugcauguauacaagcnaa

SEQ ID NO: 122152 - RNA, 23 nt, Artificial Sequence
  Synthetic
  misc_feature (21)..(21): n is a, c, g, or u
uuauaugcauguauacaagcnaa

SEQ ID NO: 122153 - RNA, 24 nt, Artificial Sequence
  Synthetic
  misc_feature (22)..(22): n is a, c, g, or u
uuuauaugcauguauacaagcnaa

SEQ ID NO: 122154 - RNA, 18 nt, Artificial Sequence
  Synthetic
gcccaaggucuugcauaa

SEQ ID NO: 122155 - RNA, 19 nt, Artificial Sequence
  Synthetic
ugcccaaggucuugcauaa

SEQ ID NO: 122156 - RNA, 20 nt, Artificial Sequence
  Synthetic
cugcccaaggucuugcauaa

SEQ ID NO: 122157 - RNA, 21 nt, Artificial Sequence
  Synthetic
ccugcccaaggucuugcauaa

SEQ ID NO: 122158 - RNA, 22 nt, Artificial Sequence
  Synthetic
accugcccaaggucuugcauaa

SEQ ID NO: 122159 - RNA, 23 nt, Artificial Sequence
  Synthetic
aaccugcccaaggucuugcauaa

SEQ ID NO: 122160 - RNA, 24 nt, Artificial Sequence
  Synthetic
gaaccugcccaaggucuugcauaa

SEQ ID NO: 122161 - RNA, 18 nt, Artificial Sequence
  Synthetic
  misc_feature (13)..(13): n is a, c, g, or u
uauuccuuggacncauaa

SEQ ID NO: 122162 - RNA, 19 nt, Artificial Sequence
  Synthetic
  misc_feature (14)..(14): n is a, c, g, or u
guauuccuuggacncauaa

SEQ ID NO: 122163 - RNA, 20 nt, Artificial Sequence
  Synthetic
  misc_feature (15)..(15): n is a, c, g, or u
aguauuccuuggacncauaa

SEQ ID NO: 122164 - RNA, 21 nt, Artificial Sequence
  Synthetic
  misc_feature (16)..(16): n is a, c, g, or u
uaguauuccuuggacncauaa

SEQ ID NO: 122165 - RNA, 22 nt, Artificial Sequence
  Synthetic
  misc_feature (17)..(17): n is a, c, g, or u
uuaguauuccuuggacncauaa

SEQ ID NO: 122166 - RNA, 23 nt, Artificial Sequence
  Synthetic
  misc_feature (18)..(18): n is a, c, g, or u
guuaguauuccuuggacncauaa

SEQ ID NO: 122167 - RNA, 24 nt, Artificial Sequence
  Synthetic
  misc_feature (19)..(19): n is a, c, g, or u
uguuaguauuccuuggacncauaa

SEQ ID NO: 122168 - RNA, 18 nt, Artificial Sequence
  Synthetic
  misc_feature (7)..(7): n is a, c, g, or u
ggcgggnaucuuauauaa

SEQ ID NO: 122169 - RNA, 19 nt, Artificial Sequence
  Synthetic
  misc_feature (8)..(8): n is a, c, g, or u
aggcgggnaucuuauauaa

SEQ ID NO: 122170 - RNA, 20 nt, Artificial Sequence
  Synthetic
  misc_feature (9)..(9): n is a, c, g, or u
aaggcgggnaucuuauauaa

SEQ ID NO: 122171 - RNA, 21 nt, Artificial Sequence
  Synthetic
  misc_feature (10)..(10): n is a, c, g, or u
gaaggcgggnaucuuauauaa

SEQ ID NO: 122172 - RNA, 22 nt, Artificial Sequence
  Synthetic
  misc_feature (11)..(11): n is a, c, g, or u
ggaaggcgggnaucuuauauaa

SEQ ID NO: 122173 - RNA, 23 nt, Artificial Sequence
  Synthetic
  misc_feature (12)..(12): n is a, c, g, or u
uggaaggcgggnaucuuauauaa

SEQ ID NO: 122174 - RNA, 24 nt, Artificial Sequence
  Synthetic
  misc_feature (13)..(13): n is a, c, g, or u
uuggaaggcgggnaucuuauauaa

SEQ ID NO: 122175 - RNA, 18 nt, Artificial Sequence
  Synthetic
cuuacaaggccuuucuaa

SEQ ID NO: 122176 - RNA, 19 nt, Artificial Sequence
  Synthetic
acuuacaaggccuuucuaa

SEQ ID NO: 122177 - RNA, 20 nt, Artificial Sequence
  Synthetic
aacuuacaaggccuuucuaa

SEQ ID NO: 122178 - RNA, 21 nt, Artificial Sequence
  Synthetic
caacuuacaaggccuuucuaa

SEQ ID NO: 122179 - RNA, 22 nt, Artificial Sequence
  Synthetic
ccaacuuacaaggccuuucuaa

SEQ ID NO: 122180 - RNA, 23 nt, Artificial Sequence
  Synthetic
gccaacuuacaaggccuuucuaa

SEQ ID NO: 122181 - RNA, 24 nt, Artificial Sequence
  Synthetic
cgccaacuuacaaggccuuucuaa

SEQ ID NO: 122182 - RNA, 18 nt, Artificial Sequence
  Synthetic
caccugggugggaaguaa

SEQ ID NO: 122183 - RNA, 19 nt, Artificial Sequence
  Synthetic
ccaccugggugggaaguaa

SEQ ID NO: 122184 - RNA, 20 nt, Artificial Sequence
  Synthetic
gccaccugggugggaaguaa

SEQ ID NO: 122185 - RNA, 21 nt, Artificial Sequence
  Synthetic
agccaccugggugggaaguaa

SEQ ID NO: 122186 - RNA, 22 nt, Artificial Sequence
  Synthetic
uagccaccugggugggaaguaa

SEQ ID NO: 122187 - RNA, 23 nt, Artificial Sequence
  Synthetic
cuagccaccugggugggaaguaa

SEQ ID NO: 122188 - RNA, 24 nt, Artificial Sequence
  Synthetic
ucuagccaccugggugggaaguaa

SEQ ID NO: 122189 - RNA, 18 nt, Artificial Sequence
  Synthetic
  misc_feature (5)..(5): n is a, c, g, or u
  misc_feature (11)..(11): n is a, c, g, or u
ugggnccccunacaguaa

SEQ ID NO: 122190 - RNA, 19 nt, Artificial Sequence
  Synthetic
  misc_feature (6)..(6): n is a, c, g, or u
  misc_feature (12)..(12): n is a, c, g, or u
gugggnccccunacaguaa

SEQ ID NO: 122191 - RNA, 20 nt, Artificial Sequence
  Synthetic
  misc_feature (7)..(7): n is a, c, g, or u
  misc_feature (13)..(13): n is a, c, g, or u
ugugggnccccunacaguaa

SEQ ID NO: 122192 - RNA, 21 nt, Artificial Sequence
  Synthetic
  misc_feature (8)..(8): n is a, c, g, or u
  misc_feature (14)..(14): n is a, c, g, or u
uugugggnccccunacaguaa

SEQ ID NO: 122193 - RNA, 22 nt, Artificial Sequence
  Synthetic
  misc_feature (9)..(9): n is a, c, g, or u
  misc_feature (15)..(15): n is a, c, g, or u
uuugugggnccccunacaguaa

SEQ ID NO: 122194 - RNA, 23 nt, Artificial Sequence
  Synthetic
  misc_feature (10)..(10): n is a, c, g, or u
  misc_feature (16)..(16): n is a, c, g, or u
auuugugggnccccunacaguaa

SEQ ID NO: 122195 - RNA, 24 nt, Artificial Sequence
  Synthetic
  misc_feature (11)..(11): n is a, c, g, or u
  misc_feature (17)..(17): n is a, c, g, or u
aauuugugggnccccunacaguaa

SEQ ID NO: 122196 - RNA, 18 nt, Artificial Sequence
  Synthetic
  misc_feature (13)..(13): n is a, c, g, or u
cagcuaugucaanguuaa

SEQ ID NO: 122197 - RNA, 19 nt, Artificial Sequence
  Synthetic
  misc_feature (14)..(14): n is a, c, g, or u
ucagcuaugucaanguuaa

SEQ ID NO: 122198 - RNA, 20 nt, Artificial Sequence
  Synthetic
  misc_feature (15)..(15): n is a, c, g, or u
gucagcuaugucaanguuaa

SEQ ID NO: 122199 - RNA, 21 nt, Artificial Sequence
  Synthetic
  misc_feature (16)..(16): n is a, c, g, or u
agucagcuaugucaanguuaa

SEQ ID NO: 122200 - RNA, 22 nt, Artificial Sequence
  Synthetic
  misc_feature (17)..(17): n is a, c, g, or u
uagucagcuaugucaanguuaa

SEQ ID NO: 122201 - RNA, 23 nt, Artificial Sequence
  Synthetic
  misc_feature (18)..(18): n is a, c, g, or u
guagucagcuaugucaanguuaa

SEQ ID NO: 122202 - RNA, 24 nt, Artificial Sequence
  Synthetic
  misc_feature (19)..(19): n is a, c, g, or u
aguagucagcuaugucaanguuaa

SEQ ID NO: 122203 - RNA, 18 nt, Artificial Sequence
  Synthetic
  misc_feature (2)..(2): n is a, c, g, or u
unacaguaaaugaaaaca

SEQ ID NO: 122204 - RNA, 19 nt, Artificial Sequence
  Synthetic
  misc_feature (3)..(3): n is a, c, g, or u
cunacaguaaaugaaaaca

SEQ ID NO: 122205 - RNA, 20 nt, Artificial Sequence
  Synthetic
  misc_feature (4)..(4): n is a, c, g, or u
ccunacaguaaaugaaaaca

SEQ ID NO: 122206 - RNA, 21 nt, Artificial Sequence
  Synthetic
  misc_feature (5)..(5): n is a, c, g, or u
cccunacaguaaaugaaaaca

SEQ ID NO: 122207 - RNA, 22 nt, Artificial Sequence
  Synthetic
  misc_feature (6)..(6): n is a, c, g, or u
ccccunacaguaaaugaaaaca

SEQ ID NO: 122208 - RNA, 23 nt, Artificial Sequence
  Synthetic
  misc_feature (1)..(1): n is a, c, g, or u
  misc_feature (7)..(7): n is a, c, g, or u
nccccunacaguaaaugaaaaca

SEQ ID NO: 122209 - RNA, 24 nt, Artificial Sequence
  Synthetic
  misc_feature (2)..(2): n is a, c, g, or u
  misc_feature (8)..(8): n is a, c, g, or u
gnccccunacaguaaaugaaaaca

SEQ ID NO: 122210 - RNA, 18 nt, Artificial Sequence
  Synthetic
  misc_feature (12)..(12): n is a, c, g, or u
uuaaacccucanaaaaca

SEQ ID NO: 122211 - RNA, 19 nt, Artificial Sequence
  Synthetic
  misc_feature (13)..(13): n is a, c, g, or u
uuuaaacccucanaaaaca

SEQ ID NO: 122212 - RNA, 20 nt, Artificial Sequence
  Synthetic
  misc_feature (14)..(14): n is a, c, g, or u
auuuaaacccucanaaaaca

SEQ ID NO: 122213 - RNA, 21 nt, Artificial Sequence
  Synthetic
  misc_feature (15)..(15): n is a, c, g, or u
cauuuaaacccucanaaaaca

SEQ ID NO: 122214 - RNA, 22 nt, Artificial Sequence
  Synthetic
  misc_feature (16)..(16): n is a, c, g, or u
acauuuaaacccucanaaaaca

SEQ ID NO: 122215 - RNA, 23 nt, Artificial Sequence
  Synthetic
  misc_feature (17)..(17): n is a, c, g, or u
uacauuuaaacccucanaaaaca

SEQ ID NO: 122216 - RNA, 24 nt, Artificial Sequence
  Synthetic
  misc_feature (18)..(18): n is a, c, g, or u
auacauuuaaacccucanaaaaca

SEQ ID NO: 122217 - RNA, 18 nt, Artificial Sequence
  Synthetic
gggacccuguaccgaaca

SEQ ID NO: 122218 - RNA, 19 nt, Artificial Sequence
  Synthetic
ggggacccuguaccgaaca

SEQ ID NO: 122219 - RNA, 20 nt, Artificial Sequence
  Synthetic
uggggacccuguaccgaaca

SEQ ID NO: 122220 - RNA, 21 nt, Artificial Sequence
  Synthetic
cuggggacccuguaccgaaca

SEQ ID NO: 122221 - RNA, 22 nt, Artificial Sequence
  Synthetic
acuggggacccuguaccgaaca

SEQ ID NO: 122222 - RNA, 23 nt, Artificial Sequence
  Synthetic
gacuggggacccuguaccgaaca

SEQ ID NO: 122223 - RNA, 24 nt, Artificial Sequence
  Synthetic
agacuggggacccuguaccgaaca

SEQ ID NO: 122224 - RNA, 18 nt, Artificial Sequence
  Synthetic
ggcuccaguucaggaaca

SEQ ID NO: 122225 - RNA, 19 nt, Artificial Sequence
  Synthetic
uggcuccaguucaggaaca

SEQ ID NO: 122226 - RNA, 20 nt, Artificial Sequence
  Synthetic
guggcuccaguucaggaaca

SEQ ID NO: 122227 - RNA, 21 nt, Artificial Sequence
  Synthetic
gguggcuccaguucaggaaca

SEQ ID NO: 122228 - RNA, 22 nt, Artificial Sequence
  Synthetic
ugguggcuccaguucaggaaca

SEQ ID NO: 122229 - RNA, 23 nt, Artificial Sequence
  Synthetic
cugguggcuccaguucaggaaca

SEQ ID NO: 122230 - RNA, 24 nt, Artificial Sequence
  Synthetic
gcugguggcuccaguucaggaaca

SEQ ID NO: 122231 - RNA, 18 nt, Artificial Sequence
  Synthetic
  misc_feature (8)..(8): n is a, c, g, or u
ucaacccncacaaggaca

SEQ ID NO: 122232 - RNA, 19 nt, Artificial Sequence
  Synthetic
  misc_feature (9)..(9): n is a, c, g, or u
cucaacccncacaaggaca

SEQ ID NO: 122233 - RNA, 20 nt, Artificial Sequence
  Synthetic
  misc_feature (10)..(10): n is a, c, g, or u
ccucaacccncacaaggaca

SEQ ID NO: 122234 - RNA, 21 nt, Artificial Sequence
  Synthetic
  misc_feature (11)..(11): n is a, c, g, or u
accucaacccncacaaggaca

SEQ ID NO: 122235 - RNA, 22 nt, Artificial Sequence
  Synthetic
  misc_feature (12)..(12): n is a, c, g, or u
gaccucaacccncacaaggaca

SEQ ID NO: 122236 - RNA, 23 nt, Artificial Sequence
  Synthetic
  misc_feature (13)..(13): n is a, c, g, or u
ggaccucaacccncacaaggaca

SEQ ID NO: 122237 - RNA, 24 nt, Artificial Sequence
  Synthetic
  misc_feature (14)..(14): n is a, c, g, or u
gggaccucaacccncacaaggaca

SEQ ID NO: 122238 - RNA, 18 nt, Artificial Sequence
  Synthetic
  misc_feature (13)..(13): n is a, c, g, or u
  misc_feature (15)..(15): n is a, c, g, or u
uauaaaagagagncnaca

SEQ ID NO: 122239 - RNA, 19 nt, Artificial Sequence
  Synthetic
  misc_feature (14)..(14): n is a, c, g, or u
  misc_feature (16)..(16): n is a, c, g, or u
auauaaaagagagncnaca

SEQ ID NO: 122240 - RNA, 20 nt, Artificial Sequence
  Synthetic
  misc_feature (15)..(15): n is a, c, g, or u
  misc_feature (17)..(17): n is a, c, g, or u
uauauaaaagagagncnaca

SEQ ID NO: 122241 - RNA, 21 nt, Artificial Sequence
  Synthetic
  misc_feature (16)..(16): n is a, c, g, or u
  misc_feature (18)..(18): n is a, c, g, or u
uuauauaaaagagagncnaca

SEQ ID NO: 122242 - RNA, 22 nt, Artificial Sequence
  Synthetic
  misc_feature (17)..(17): n is a, c, g, or u
  misc_feature (19)..(19): n is a, c, g, or u
cuuauauaaaagagagncnaca

SEQ ID NO: 122243 - RNA, 23 nt, Artificial Sequence
  Synthetic
  misc_feature (18)..(18): n is a, c, g, or u
  misc_feature (20)..(20): n is a, c, g, or u
ucuuauauaaaagagagncnaca

SEQ ID NO: 122244 - RNA, 24 nt, Artificial Sequence
  Synthetic
  misc_feature (19)..(19): n is a, c, g, or u
  misc_feature (21)..(21): n is a, c, g, or u
aucuuauauaaaagagagncnaca

SEQ ID NO: 122245 - RNA, 18 nt, Artificial Sequence
  Synthetic
uuugucuuuggguauaca

SEQ ID NO: 122246 - RNA, 19 nt, Artificial Sequence
  Synthetic
uuuugucuuuggguauaca

SEQ ID NO: 122247 - RNA, 20 nt, Artificial Sequence
  Synthetic
cuuuugucuuuggguauaca

SEQ ID NO: 122248 - RNA, 21 nt, Artificial Sequence
  Synthetic
ucuuuugucuuuggguauaca

SEQ ID NO: 122249 - RNA, 22 nt, Artificial Sequence
  Synthetic
uucuuuugucuuuggguauaca

SEQ ID NO: 122250 - RNA, 23 nt, Artificial Sequence
  Synthetic
uuucuuuugucuuuggguauaca

SEQ ID NO: 122251 - RNA, 24 nt, Artificial Sequence
  Synthetic
uuuucuuuugucuuuggguauaca

SEQ ID NO: 122252 - RNA, 18 nt, Artificial Sequence
  Synthetic
accccugcucguguuaca

SEQ ID NO: 122253 - RNA, 19 nt, Artificial Sequence
  Synthetic
gaccccugcucguguuaca

SEQ ID NO: 122254 - RNA, 20 nt, Artificial Sequence
  Synthetic
ggaccccugcucguguuaca

SEQ ID NO: 122255 - RNA, 21 nt, Artificial Sequence
  Synthetic
aggaccccugcucguguuaca

SEQ ID NO: 122256 - RNA, 22 nt, Artificial Sequence
  Synthetic
uaggaccccugcucguguuaca

SEQ ID NO: 122257 - RNA, 23 nt, Artificial Sequence
  Synthetic
cuaggaccccugcucguguuaca

SEQ ID NO: 122258 - RNA, 24 nt, Artificial Sequence
  Synthetic
ccuaggaccccugcucguguuaca

SEQ ID NO: 122259 - RNA, 18 nt, Artificial Sequence
  Synthetic
cuccuccugccuccacca

SEQ ID NO: 122260 - RNA, 19 nt, Artificial Sequence
  Synthetic
ccuccuccugccuccacca

SEQ ID NO: 122261 - RNA, 20 nt, Artificial Sequence
  Synthetic
uccuccuccugccuccacca

SEQ ID NO: 122262 - RNA, 21 nt, Artificial Sequence
  Synthetic
cuccuccuccugccuccacca

SEQ ID NO: 122263 - RNA, 22 nt, Artificial Sequence
  Synthetic
gcuccuccuccugccuccacca

SEQ ID NO: 122264 - RNA, 23 nt, Artificial Sequence
  Synthetic
agcuccuccuccugccuccacca

SEQ ID NO: 122265 - RNA, 24 nt, Artificial Sequence
  Synthetic
cagcuccuccuccugccuccacca

SEQ ID NO: 122266 - RNA, 18 nt, Artificial Sequence
  Synthetic
  misc_feature (3)..(3): n is a, c, g, or u
gunuguucaccagcacca

SEQ ID NO: 122267 - RNA, 19 nt, Artificial Sequence
  Synthetic
  misc_feature (4)..(4): n is a, c, g, or u
ggunuguucaccagcacca

SEQ ID NO: 122268 - RNA, 20 nt, Artificial Sequence
  Synthetic
  misc_feature (5)..(5): n is a, c, g, or u
uggunuguucaccagcacca

SEQ ID NO: 122269 - RNA, 21 nt, Artificial Sequence
  Synthetic
  misc_feature (6)..(6): n is a, c, g, or u
uuggunuguucaccagcacca

SEQ ID NO: 122270 - RNA, 22 nt, Artificial Sequence
  Synthetic
  misc_feature (7)..(7): n is a, c, g, or u
auuggunuguucaccagcacca

SEQ ID NO: 122271 - RNA, 23 nt, Artificial Sequence
  Synthetic
  misc_feature (8)..(8): n is a, c, g, or u
aauuggunuguucaccagcacca

SEQ ID NO: 122272 - RNA, 24 nt, Artificial Sequence
  Synthetic
  misc_feature (9)..(9): n is a, c, g, or u
aaauuggunuguucaccagcacca

SEQ ID NO: 122273 - RNA, 18 nt, Artificial Sequence
  Synthetic
acauuguucaccucacca

SEQ ID NO: 122274 - RNA, 19 nt, Artificial Sequence
  Synthetic
aacauuguucaccucacca

SEQ ID NO: 122275 - RNA, 20 nt, Artificial Sequence
  Synthetic
gaacauuguucaccucacca

SEQ ID NO: 122276 - RNA, 21 nt, Artificial Sequence
  Synthetic
ggaacauuguucaccucacca

SEQ ID NO: 122277 - RNA, 22 nt, Artificial Sequence
  Synthetic
cggaacauuguucaccucacca

SEQ ID NO: 122278 - RNA, 23 nt, Artificial Sequence
  Synthetic
ccggaacauuguucaccucacca

SEQ ID NO: 122279 - RNA, 24 nt, Artificial Sequence
  Synthetic
uccggaacauuguucaccucacca

SEQ ID NO: 122280 - RNA, 18 nt, Artificial Sequence
  Synthetic
  misc_feature (3)..(4): n is a, c, g, or u
ugnnguaccgaccgacca

SEQ ID NO: 122281 - RNA, 19 nt, Artificial Sequence
  Synthetic
  misc_feature (4)..(5): n is a, c, g, or u
cugnnguaccgaccgacca

SEQ ID NO: 122282 - RNA, 20 nt, Artificial Sequence
  Synthetic
  misc_feature (1)..(1): n is a, c, g, or u
  misc_feature (5)..(6): n is a, c, g, or u
ncugnnguaccgaccgacca

SEQ ID NO: 122283 - RNA, 21 nt, Artificial Sequence
  Synthetic
  misc_feature (2)..(2): n is a, c, g, or u
  misc_feature (6)..(7): n is a, c, g, or u
gncugnnguaccgaccgacca

SEQ ID NO: 122284 - RNA, 22 nt, Artificial Sequence
  Synthetic
  misc_feature (3)..(3): n is a, c, g, or u
  misc_feature (7)..(8): n is a, c, g, or u
cgncugnnguaccgaccgacca

SEQ ID NO: 122285 - RNA, 23 nt, Artificial Sequence
  Synthetic
  misc_feature (4)..(4): n is a, c, g, or u
  misc_feature (8)..(9): n is a, c, g, or u
ccgncugnnguaccgaccgacca

SEQ ID NO: 122286 - RNA, 24 nt, Artificial Sequence
  Synthetic
  misc_feature (5)..(5): n is a, c, g, or u
  misc_feature (9)..(10): n is a, c, g, or u
uccgncugnnguaccgaccgacca

SEQ ID NO: 122287 - RNA, 18 nt, Artificial Sequence
  Synthetic
  misc_feature (3)..(3): n is a, c, g, or u
acnaccagcaccggacca

SEQ ID NO: 122288 - RNA, 19 nt, Artificial Sequence
  Synthetic
  misc_feature (4)..(4): n is a, c, g, or u
aacnaccagcaccggacca

SEQ ID NO: 122289 - RNA, 20 nt, Artificial Sequence
  Synthetic
  misc_feature (5)..(5): n is a, c, g, or u
caacnaccagcaccggacca

SEQ ID NO: 122290 - RNA, 21 nt, Artificial Sequence
  Synthetic
  misc_feature (6)..(6): n is a, c, g, or u
ucaacnaccagcaccggacca

SEQ ID NO: 122291 - RNA, 22 nt, Artificial Sequence
  Synthetic
  misc_feature (7)..(7): n is a, c, g, or u
aucaacnaccagcaccggacca

SEQ ID NO: 122292 - RNA, 23 nt, Artificial Sequence
  Synthetic
  misc_feature (8)..(8): n is a, c, g, or u
caucaacnaccagcaccggacca

SEQ ID NO: 122293 - RNA, 24 nt, Artificial Sequence
  Synthetic
  misc_feature (9)..(9): n is a, c, g, or u
ucaucaacnaccagcaccggacca

SEQ ID NO: 122294 - RNA, 18 nt, Artificial Sequence
  Synthetic
  misc_feature (9)..(10): n is a, c, g, or u
aggguucannccucccca

SEQ ID NO: 122295 - RNA, 19 nt, Artificial Sequence
  Synthetic
  misc_feature (10)..(11): n is a, c, g, or u
caggguucannccucccca

SEQ ID NO: 122296 - RNA, 20 nt, Artificial Sequence
  Synthetic
  misc_feature (11)..(12): n is a, c, g, or u
ccaggguucannccucccca

SEQ ID NO: 122297 - RNA, 21 nt, Artificial Sequence
  Synthetic
  misc_feature (12)..(13): n is a, c, g, or u
gccaggguucannccucccca

SEQ ID NO: 122298 - RNA, 22 nt, Artificial Sequence
  Synthetic
  misc_feature (13)..(14): n is a, c, g, or u
ggccaggguucannccucccca

SEQ ID NO: 122299 - RNA, 23 nt, Artificial Sequence
  Synthetic
  misc_feature (14)..(15): n is a, c, g, or u
gggccaggguucannccucccca

SEQ ID NO: 122300 - RNA, 24 nt, Artificial Sequence
  Synthetic
  misc_feature (15)..(16): n is a, c, g, or u
cgggccaggguucannccucccca

SEQ ID NO: 122301 - RNA, 18 nt, Artificial Sequence
  Synthetic
gaccaccgugaacgccca

SEQ ID NO: 122302 - RNA, 19 nt, Artificial Sequence
  Synthetic
agaccaccgugaacgccca

SEQ ID NO: 122303 - RNA, 20 nt, Artificial Sequence
  Synthetic
gagaccaccgugaacgccca

SEQ ID NO: 122304 - RNA, 21 nt, Artificial Sequence
  Synthetic
ggagaccaccgugaacgccca

SEQ ID NO: 122305 - RNA, 22 nt, Artificial Sequence
  Synthetic
uggagaccaccgugaacgccca

SEQ ID NO: 122306 - RNA, 23 nt, Artificial Sequence
  Synthetic
auggagaccaccgugaacgccca

SEQ ID NO: 122307 - RNA, 24 nt, Artificial Sequence
  Synthetic
cauggagaccaccgugaacgccca

SEQ ID NO: 122308 - RNA, 18 nt, Artificial Sequence
  Synthetic
  misc_feature (5)..(5): n is a, c, g, or u
aguunaugaaucuagcca

SEQ ID NO: 122309 - RNA, 19 nt, Artificial Sequence
  Synthetic
  misc_feature (6)..(6): n is a, c, g, or u
gaguunaugaaucuagcca

SEQ ID NO: 122310 - RNA, 20 nt, Artificial Sequence
  Synthetic
  misc_feature (7)..(7): n is a, c, g, or u
ugaguunaugaaucuagcca

SEQ ID NO: 122311 - RNA, 21 nt, Artificial Sequence
  Synthetic
  misc_feature (8)..(8): n is a, c, g, or u
gugaguunaugaaucuagcca

SEQ ID NO: 122312 - RNA, 22 nt, Artificial Sequence
  Synthetic
  misc_feature (9)..(9): n is a, c, g, or u
ggugaguunaugaaucuagcca

SEQ ID NO: 122313 - RNA, 23 nt, Artificial Sequence
  Synthetic
  misc_feature (10)..(10): n is a, c, g, or u
gggugaguunaugaaucuagcca

SEQ ID NO: 122314 - RNA, 24 nt, Artificial Sequence
  Synthetic
  misc_feature (11)..(11): n is a, c, g, or u
ggggugaguunaugaaucuagcca

SEQ ID NO: 122315 - RNA, 18 nt, Artificial Sequence
  Synthetic
acaacuggccggacgcca

SEQ ID NO: 122316 - RNA, 19 nt, Artificial Sequence
  Synthetic
gacaacuggccggacgcca

SEQ ID NO: 122317 - RNA, 20 nt, Artificial Sequence
  Synthetic
ggacaacuggccggacgcca

SEQ ID NO: 122318 - RNA, 18 nt, Artificial Sequence
  Synthetic
ugcuaggcugugcugcca

SEQ ID NO: 122319 - RNA, 19 nt, Artificial Sequence
  Synthetic
cugcuaggcugugcugcca

SEQ ID NO: 122320 - RNA, 20 nt, Artificial Sequence
  Synthetic
gcugcuaggcugugcugcca

SEQ ID NO: 122321 - RNA, 21 nt, Artificial Sequence
  Synthetic
ggcugcuaggcugugcugcca

SEQ ID NO: 122322 - RNA, 22 nt, Artificial Sequence
  Synthetic
uggcugcuaggcugugcugcca

SEQ ID NO: 122323 - RNA, 23 nt, Artificial Sequence
  Synthetic
auggcugcuaggcugugcugcca

SEQ ID NO: 122324 - RNA, 24 nt, Artificial Sequence
  Synthetic
cauggcugcuaggcugugcugcca

SEQ ID NO: 122325 - RNA, 18 nt, Artificial Sequence
  Synthetic
  misc_feature (10)..(10): n is a, c, g, or u
ggaacaagancuacagca

SEQ ID NO: 122326 - RNA, 19 nt, Artificial Sequence
  Synthetic
  misc_feature (11)..(11): n is a, c, g, or u
gggaacaagancuacagca

SEQ ID NO: 122327 - RNA, 20 nt, Artificial Sequence
  Synthetic
  misc_feature (12)..(12): n is a, c, g, or u
ugggaacaagancuacagca

SEQ ID NO: 122328 - RNA, 21 nt, Artificial Sequence
  Synthetic
  misc_feature (13)..(13): n is a, c, g, or u
uugggaacaagancuacagca

SEQ ID NO: 122329 - RNA, 22 nt, Artificial Sequence
  Synthetic
  misc_feature (14)..(14): n is a, c, g, or u
cuugggaacaagancuacagca

SEQ ID NO: 122330 - RNA, 23 nt, Artificial Sequence
  Synthetic
  misc_feature (15)..(15): n is a, c, g, or u
ucuugggaacaagancuacagca

SEQ ID NO: 122331 - RNA, 24 nt, Artificial Sequence
  Synthetic
  misc_feature (16)..(16): n is a, c, g, or u
uucuugggaacaagancuacagca

SEQ ID NO: 122332 - RNA, 18 nt, Artificial Sequence
  Synthetic
  misc_feature (11)..(11): n is a, c, g, or u
gaucaucaacnaccagca

SEQ ID NO: 122333 - RNA, 19 nt, Artificial Sequence
  Synthetic
  misc_feature (12)..(12): n is a, c, g, or u
ggaucaucaacnaccagca

SEQ ID NO: 122334 - RNA, 20 nt, Artificial Sequence
  Synthetic
  misc_feature (13)..(13): n is a, c, g, or u
aggaucaucaacnaccagca

SEQ ID NO: 122335 - RNA, 21 nt, Artificial Sequence
  Synthetic
  misc_feature (14)..(14): n is a, c, g, or u
caggaucaucaacnaccagca

SEQ ID NO: 122336 - RNA, 22 nt, Artificial Sequence
  Synthetic
  misc_feature (15)..(15): n is a, c, g, or u
ccaggaucaucaacnaccagca

SEQ ID NO: 122337 - RNA, 23 nt, Artificial Sequence
  Synthetic
  misc_feature (16)..(16): n is a, c, g, or u
uccaggaucaucaacnaccagca

SEQ ID NO: 122338 - RNA, 24 nt, Artificial Sequence
  Synthetic
  misc_feature (17)..(17): n is a, c, g, or u
uuccaggaucaucaacnaccagca

SEQ ID NO: 122339 - RNA, 18 nt, Artificial Sequence
  Synthetic
aauuuggaagauccagca

SEQ ID NO: 122340 - RNA, 19 nt, Artificial Sequence
  Synthetic
uaauuuggaagauccagca

SEQ ID NO: 122341 - RNA, 20 nt, Artificial Sequence
  Synthetic
guaauuuggaagauccagca

SEQ ID NO: 122342 - RNA, 21 nt, Artificial Sequence
  Synthetic
aguaauuuggaagauccagca

SEQ ID NO: 122343 - RNA, 22 nt, Artificial Sequence
  Synthetic
aaguaauuuggaagauccagca

SEQ ID NO: 122344 - RNA, 23 nt, Artificial Sequence
  Synthetic
gaaguaauuuggaagauccagca

SEQ ID NO: 122345 - RNA, 24 nt, Artificial Sequence
  Synthetic
ggaaguaauuuggaagauccagca

SEQ ID NO: 122346 - RNA, 18 nt, Artificial Sequence
  Synthetic
aaggugggagugggagca

SEQ ID NO: 122347 - RNA, 19 nt, Artificial Sequence
  Synthetic
caaggugggagugggagca

SEQ ID NO: 122348 - RNA, 20 nt, Artificial Sequence
  Synthetic
acaaggugggagugggagca

SEQ ID NO: 122349 - RNA, 21 nt, Artificial Sequence
  Synthetic
aacaaggugggagugggagca

SEQ ID NO: 122350 - RNA, 22 nt, Artificial Sequence
  Synthetic
caacaaggugggagugggagca

SEQ ID NO: 122351 - RNA, 23 nt, Artificial Sequence
  Synthetic
ccaacaaggugggagugggagca

SEQ ID NO: 122352 - RNA, 24 nt, Artificial Sequence
  Synthetic
gccaacaaggugggagugggagca

SEQ ID NO: 122353 - RNA, 18 nt, Artificial Sequence
  Synthetic
aacauggagaacaucgca

SEQ ID NO: 122354 - RNA, 19 nt, Artificial Sequence
  Synthetic
gaacauggagaacaucgca

SEQ ID NO: 122355 - RNA, 20 nt, Artificial Sequence
  Synthetic
cgaacauggagaacaucgca

SEQ ID NO: 122356 - RNA, 21 nt, Artificial Sequence
  Synthetic
ccgaacauggagaacaucgca

SEQ ID NO: 122357 - RNA, 22 nt, Artificial Sequence
  Synthetic
accgaacauggagaacaucgca

SEQ ID NO: 122358 - RNA, 23 nt, Artificial Sequence
  Synthetic
uaccgaacauggagaacaucgca

SEQ ID NO: 122359 - RNA, 24 nt, Artificial Sequence
  Synthetic
guaccgaacauggagaacaucgca

SEQ ID NO: 122360 - RNA, 18 nt, Artificial Sequence
  Synthetic
gaacucccucgccucgca

SEQ ID NO: 122361 - RNA, 19 nt, Artificial Sequence
  Synthetic
agaacucccucgccucgca

SEQ ID NO: 122362 - RNA, 20 nt, Artificial Sequence
  Synthetic
aagaacucccucgccucgca

SEQ ID NO: 122363 - RNA, 21 nt, Artificial Sequence
  Synthetic
gaagaacucccucgccucgca

SEQ ID NO: 122364 - RNA, 22 nt, Artificial Sequence
  Synthetic
agaagaacucccucgccucgca

SEQ ID NO: 122365 - RNA, 23 nt, Artificial Sequence
  Synthetic
aagaagaacucccucgccucgca

SEQ ID NO: 122366 - RNA, 24 nt, Artificial Sequence
  Synthetic
gaagaagaacucccucgccucgca

SEQ ID NO: 122367 - RNA, 18 nt, Artificial Sequence
  Synthetic
ucaccucugcacgucgca

SEQ ID NO: 122368 - RNA, 19 nt, Artificial Sequence
  Synthetic
uucaccucugcacgucgca

SEQ ID NO: 122369 - RNA, 20 nt, Artificial Sequence
  Synthetic
cuucaccucugcacgucgca

SEQ ID NO: 122370 - RNA, 21 nt, Artificial Sequence
  Synthetic
gcuucaccucugcacgucgca

SEQ ID NO: 122371 - RNA, 22 nt, Artificial Sequence
  Synthetic
cgcuucaccucugcacgucgca

SEQ ID NO: 122372 - RNA, 23 nt, Artificial Sequence
  Synthetic
ucgcuucaccucugcacgucgca

SEQ ID NO: 122373 - RNA, 24 nt, Artificial Sequence
  Synthetic
uucgcuucaccucugcacgucgca

SEQ ID NO: 122374 - RNA, 18 nt, Artificial Sequence
  Synthetic
ccaaaccucgaaaaggca

SEQ ID NO: 122375 - RNA, 19 nt, Artificial Sequence
  Synthetic
uccaaaccucgaaaaggca

SEQ ID NO: 122376 - RNA, 20 nt, Artificial Sequence
  Synthetic
uuccaaaccucgaaaaggca

SEQ ID NO: 122377 - RNA, 21 nt, Artificial Sequence
  Synthetic
cuuccaaaccucgaaaaggca

SEQ ID NO: 122378 - RNA, 22 nt, Artificial Sequence
  Synthetic
ucuuccaaaccucgaaaaggca

SEQ ID NO: 122379 - RNA, 23 nt, Artificial Sequence
  Synthetic
gucuuccaaaccucgaaaaggca

SEQ ID NO: 122380 - RNA, 24 nt, Artificial Sequence
  Synthetic
ggucuuccaaaccucgaaaaggca

SEQ ID NO: 122381 - RNA, 18 nt, Artificial Sequence
  Synthetic
ucaccucaccauacggca

SEQ ID NO: 122382 - RNA, 19 nt, Artificial Sequence
  Synthetic
uucaccucaccauacggca

SEQ ID NO: 122383 - RNA, 20 nt, Artificial Sequence
  Synthetic
guucaccucaccauacggca

SEQ ID NO: 122384 - RNA, 21 nt, Artificial Sequence
  Synthetic
uguucaccucaccauacggca

SEQ ID NO: 122385 - RNA, 22 nt, Artificial Sequence
  Synthetic
uuguucaccucaccauacggca

SEQ ID NO: 122386 - RNA, 23 nt, Artificial Sequence
  Synthetic
auuguucaccucaccauacggca

SEQ ID NO: 122387 - RNA, 24 nt, Artificial Sequence
  Synthetic
cauuguucaccucaccauacggca

SEQ ID NO: 122388 - RNA, 18 nt, Artificial Sequence
  Synthetic
ugccuccaccaaucggca

SEQ ID NO: 122389 - RNA, 19 nt, Artificial Sequence
  Synthetic
cugccuccaccaaucggca

SEQ ID NO: 122390 - RNA, 20 nt, Artificial Sequence
  Synthetic
ccugccuccaccaaucggca

SEQ ID NO: 122391 - RNA, 21 nt, Artificial Sequence
  Synthetic
uccugccuccaccaaucggca

SEQ ID NO: 122392 - RNA, 22 nt, Artificial Sequence
  Synthetic
cuccugccuccaccaaucggca

SEQ ID NO: 122393 - RNA, 23 nt, Artificial Sequence
  Synthetic
ccuccugccuccaccaaucggca

SEQ ID NO: 122394 - RNA, 24 nt, Artificial Sequence
  Synthetic
uccuccugccuccaccaaucggca

SEQ ID NO: 122395 - RNA, 18 nt, Artificial Sequence
  Synthetic
ucauccucaggccaugca

SEQ ID NO: 122396 - RNA, 19 nt, Artificial Sequence
  Synthetic
cucauccucaggccaugca

SEQ ID NO: 122397 - RNA, 20 nt, Artificial Sequence
  Synthetic
acucauccucaggccaugca

SEQ ID NO: 122398 - RNA, 21 nt, Artificial Sequence
  Synthetic
cacucauccucaggccaugca

SEQ ID NO: 122399 - RNA, 22 nt, Artificial Sequence
  Synthetic
acacucauccucaggccaugca

SEQ ID NO: 122400 - RNA, 23 nt, Artificial Sequence
  Synthetic
gacacucauccucaggccaugca

SEQ ID NO: 122401 - RNA, 24 nt, Artificial Sequence
  Synthetic
  misc_feature (1)..(1): n is a, c, g, or u
ngacacucauccucaggccaugca

SEQ ID NO: 122402 - RNA, 18 nt, Artificial Sequence
  Synthetic
caucaguuggacccugca

SEQ ID NO: 122403 - RNA, 19 nt, Artificial Sequence
  Synthetic
ucaucaguuggacccugca

SEQ ID NO: 122404 - RNA, 20 nt, Artificial Sequence
  Synthetic
aucaucaguuggacccugca

SEQ ID NO: 122405 - RNA, 21 nt, Artificial Sequence
  Synthetic
gaucaucaguuggacccugca

SEQ ID NO: 122406 - RNA, 22 nt, Artificial Sequence
  Synthetic
cgaucaucaguuggacccugca

SEQ ID NO: 122407 - RNA, 23 nt, Artificial Sequence
  Synthetic
ccgaucaucaguuggacccugca

SEQ ID NO: 122408 - RNA, 24 nt, Artificial Sequence
  Synthetic
cccgaucaucaguuggacccugca

SEQ ID NO: 122409 - RNA, 18 nt, Artificial Sequence
  Synthetic
auucgcacuccuccugca

SEQ ID NO: 122410 - RNA, 19 nt, Artificial Sequence
  Synthetic
gauucgcacuccuccugca

SEQ ID NO: 122411 - RNA, 20 nt, Artificial Sequence
  Synthetic
ggauucgcacuccuccugca

SEQ ID NO: 122412 - RNA, 21 nt, Artificial Sequence
  Synthetic
uggauucgcacuccuccugca

SEQ ID NO: 122413 - RNA, 22 nt, Artificial Sequence
  Synthetic
guggauucgcacuccuccugca

SEQ ID NO: 122414 - RNA, 23 nt, Artificial Sequence
  Synthetic
uguggauucgcacuccuccugca

SEQ ID NO: 122415 - RNA, 24 nt, Artificial Sequence
  Synthetic
guguggauucgcacuccuccugca

SEQ ID NO: 122416 - RNA, 18 nt, Artificial Sequence
  Synthetic
ccugcccaaggucuugca

SEQ ID NO: 122417 - RNA, 19 nt, Artificial Sequence
  Synthetic
accugcccaaggucuugca

SEQ ID NO: 122418 - RNA, 20 nt, Artificial Sequence
  Synthetic
aaccugcccaaggucuugca

SEQ ID NO: 122419 - RNA, 21 nt, Artificial Sequence
  Synthetic
gaaccugcccaaggucuugca

SEQ ID NO: 122420 - RNA, 22 nt, Artificial Sequence
  Synthetic
ggaaccugcccaaggucuugca

SEQ ID NO: 122421 - RNA, 23 nt, Artificial Sequence
  Synthetic
  misc_feature (1)..(1): n is a, c, g, or u
nggaaccugcccaaggucuugca

SEQ ID NO: 122422 - RNA, 24 nt, Artificial Sequence
  Synthetic
  misc_feature (2)..(2): n is a, c, g, or u
cnggaaccugcccaaggucuugca

SEQ ID NO: 122423 - RNA, 18 nt, Artificial Sequence
  Synthetic
uccugacauucauuugca

SEQ ID NO: 122424 - RNA, 19 nt, Artificial Sequence
  Synthetic
uuccugacauucauuugca

SEQ ID NO: 122425 - RNA, 20 nt, Artificial Sequence
  Synthetic
uuuccugacauucauuugca

SEQ ID NO: 122426 - RNA, 21 nt, Artificial Sequence
  Synthetic
uuuuccugacauucauuugca

SEQ ID NO: 122427 - RNA, 22 nt, Artificial Sequence
  Synthetic
cuuuuccugacauucauuugca

SEQ ID NO: 122428 - RNA, 23 nt, Artificial Sequence
  Synthetic
ucuuuuccugacauucauuugca

SEQ ID NO: 122429 - RNA, 24 nt, Artificial Sequence
  Synthetic
uucuuuuccugacauucauuugca

SEQ ID NO: 122430 - RNA, 18 nt, Artificial Sequence
  Synthetic
  misc_feature (16)..(16): n is a, c, g, or u
uugggaccucaacccnca

SEQ ID NO: 122431 - RNA, 19 nt, Artificial Sequence
  Synthetic
  misc_feature (17)..(17): n is a, c, g, or u
auugggaccucaacccnca

SEQ ID NO: 122432 - RNA, 20 nt, Artificial Sequence
  Synthetic
  misc_feature (18)..(18): n is a, c, g, or u
gauugggaccucaacccnca

SEQ ID NO: 122433 - RNA, 21 nt, Artificial Sequence
  Synthetic
  misc_feature (19)..(19): n is a, c, g, or u
agauugggaccucaacccnca

SEQ ID NO: 122434 - RNA, 22 nt, Artificial Sequence
  Synthetic
  misc_feature (20)..(20): n is a, c, g, or u
cagauugggaccucaacccnca

SEQ ID NO: 122435 - RNA, 23 nt, Artificial Sequence
  Synthetic
  misc_feature (21)..(21): n is a, c, g, or u
ccagauugggaccucaacccnca

SEQ ID NO: 122436 - RNA, 24 nt, Artificial Sequence
  Synthetic
  misc_feature (22)..(22): n is a, c, g, or u
uccagauugggaccucaacccnca

SEQ ID NO: 122437 - RNA, 18 nt, Artificial Sequence
  Synthetic
auaugggccuaaaaauca

SEQ ID NO: 122438 - RNA, 19 nt, Artificial Sequence
  Synthetic
aauaugggccuaaaaauca

SEQ ID NO: 122439 - RNA, 20 nt, Artificial Sequence
  Synthetic
uaauaugggccuaaaaauca

SEQ ID NO: 122440 - RNA, 21 nt, Artificial Sequence
  Synthetic
uuaauaugggccuaaaaauca

SEQ ID NO: 122441 - RNA, 22 nt, Artificial Sequence
  Synthetic
guuaauaugggccuaaaaauca

SEQ ID NO: 122442 - RNA, 23 nt, Artificial Sequence
  Synthetic
  misc_feature (1)..(1): n is a, c, g, or u
nguuaauaugggccuaaaaauca

SEQ ID NO: 122443 - RNA, 24 nt, Artificial Sequence
  Synthetic
  misc_feature (2)..(2): n is a, c, g, or u
anguuaauaugggccuaaaaauca

SEQ ID NO: 122444 - RNA, 18 nt, Artificial Sequence
  Synthetic
  misc_feature (7)..(7): n is a, c, g, or u
auucuuncccgaucauca

SEQ ID NO: 122445 - RNA, 19 nt, Artificial Sequence
  Synthetic
  misc_feature (8)..(8): n is a, c, g, or u
gauucuuncccgaucauca

SEQ ID NO: 122446 - RNA, 20 nt, Artificial Sequence
  Synthetic
  misc_feature (9)..(9): n is a, c, g, or u
ggauucuuncccgaucauca

SEQ ID NO: 122447 - RNA, 21 nt, Artificial Sequence
  Synthetic
  misc_feature (10)..(10): n is a, c, g, or u
gggauucuuncccgaucauca

SEQ ID NO: 122448 - RNA, 22 nt, Artificial Sequence
  Synthetic
  misc_feature (11)..(11): n is a, c, g, or u
ugggauucuuncccgaucauca

SEQ ID NO: 122449 - RNA, 23 nt, Artificial Sequence
  Synthetic
  misc_feature (12)..(12): n is a, c, g, or u
cugggauucuuncccgaucauca

SEQ ID NO: 122450 - RNA, 24 nt, Artificial Sequence
  Synthetic
  misc_feature (1)..(1): n is a, c, g, or u
  misc_feature (13)..(13): n is a, c, g, or u
ncugggauucuuncccgaucauca

SEQ ID NO: 122451 - RNA, 18 nt, Artificial Sequence
  Synthetic
  misc_feature (8)..(8): n is a, c, g, or u
  misc_feature (11)..(11): n is a, c, g, or u
ggucuggngcnaaacuca

SEQ ID NO: 122452 - RNA, 19 nt, Artificial Sequence
  Synthetic
  misc_feature (1)..(1): n is a, c, g, or u
  misc_feature (9)..(9): n is a, c, g, or u
  misc_feature (12)..(12): n is a, c, g, or u
nggucuggngcnaaacuca

SEQ ID NO: 122453 - RNA, 20 nt, Artificial Sequence
  Synthetic
  misc_feature (2)..(2): n is a, c, g, or u
  misc_feature (10)..(10): n is a, c, g, or u
  misc_feature (13)..(13): n is a, c, g, or u
cnggucuggngcnaaacuca

SEQ ID NO: 122454 - RNA, 21 nt, Artificial Sequence
  Synthetic
  misc_feature (3)..(3): n is a, c, g, or u
  misc_feature (11)..(11): n is a, c, g, or u
  misc_feature (14)..(14): n is a, c, g, or u
gcnggucuggngcnaaacuca

SEQ ID NO: 122455 - RNA, 22 nt, Artificial Sequence
  Synthetic
  misc_feature (4)..(4): n is a, c, g, or u
  misc_feature (12)..(12): n is a, c, g, or u
  misc_feature (15)..(15): n is a, c, g, or u
agcnggucuggngcnaaacuca

SEQ ID NO: 122456 - RNA, 23 nt, Artificial Sequence
  Synthetic
  misc_feature (5)..(5): n is a, c, g, or u
  misc_feature (13)..(13): n is a, c, g, or u
  misc_feature (16)..(16): n is a, c, g, or u
cagcnggucuggngcnaaacuca

SEQ ID NO: 122457 - RNA, 24 nt, Artificial Sequence
  Synthetic
  misc_feature (6)..(6): n is a, c, g, or u
  misc_feature (14)..(14): n is a, c, g, or u
  misc_feature (17)..(17): n is a, c, g, or u
gcagcnggucuggngcnaaacuca

SEQ ID NO: 122458 - RNA, 18 nt, Artificial Sequence
  Synthetic
cucaccauacggcacuca

SEQ ID NO: 122459 - RNA, 19 nt, Artificial Sequence
  Synthetic
ccucaccauacggcacuca

SEQ ID NO: 122460 - RNA, 20 nt, Artificial Sequence
  Synthetic
accucaccauacggcacuca

SEQ ID NO: 122461 - RNA, 18 nt, Artificial Sequence
  Synthetic
uauacauuuaaacccuca

SEQ ID NO: 122462 - RNA, 19 nt, Artificial Sequence
  Synthetic
guauacauuuaaacccuca

SEQ ID NO: 122463 - RNA, 20 nt, Artificial Sequence
  Synthetic
gguauacauuuaaacccuca

SEQ ID NO: 122464 - RNA, 21 nt, Artificial Sequence
  Synthetic
ggguauacauuuaaacccuca

SEQ ID NO: 122465 - RNA, 22 nt, Artificial Sequence
  Synthetic
uggguauacauuuaaacccuca

SEQ ID NO: 122466 - RNA, 23 nt, Artificial Sequence
  Synthetic
uuggguauacauuuaaacccuca

SEQ ID NO: 122467 - RNA, 24 nt, Artificial Sequence
  Synthetic
uuuggguauacauuuaaacccuca

SEQ ID NO: 122468 - RNA, 18 nt, Artificial Sequence
  Synthetic
  misc_feature (7)..(7): n is a, c, g, or u
cugcacnacuccugcuca

SEQ ID NO: 122469 - RNA, 19 nt, Artificial Sequence
  Synthetic
  misc_feature (8)..(8): n is a, c, g, or u
ccugcacnacuccugcuca

SEQ ID NO: 122470 - RNA, 20 nt, Artificial Sequence
  Synthetic
  misc_feature (9)..(9): n is a, c, g, or u
accugcacnacuccugcuca

SEQ ID NO: 122471 - RNA, 21 nt, Artificial Sequence
  Synthetic
  misc_feature (10)..(10): n is a, c, g, or u
aaccugcacnacuccugcuca

SEQ ID NO: 122472 - RNA, 22 nt, Artificial Sequence
  Synthetic
  misc_feature (11)..(11): n is a, c, g, or u
aaaccugcacnacuccugcuca

SEQ ID NO: 122473 - RNA, 23 nt, Artificial Sequence
  Synthetic
  misc_feature (12)..(12): n is a, c, g, or u
aaaaccugcacnacuccugcuca

SEQ ID NO: 122474 - RNA, 24 nt, Artificial Sequence
  Synthetic
  misc_feature (13)..(13): n is a, c, g, or u
caaaaccugcacnacuccugcuca

SEQ ID NO: 122475 - RNA, 18 nt, Artificial Sequence
  Synthetic
uccaccaaucggcaguca

SEQ ID NO: 122476 - RNA, 19 nt, Artificial Sequence
  Synthetic
cuccaccaaucggcaguca

SEQ ID NO: 122477 - RNA, 20 nt, Artificial Sequence
  Synthetic
ccuccaccaaucggcaguca

SEQ ID NO: 122478 - RNA, 21 nt, Artificial Sequence
  Synthetic
gccuccaccaaucggcaguca

SEQ ID NO: 122479 - RNA, 22 nt, Artificial Sequence
  Synthetic
ugccuccaccaaucggcaguca

SEQ ID NO: 122480 - RNA, 23 nt, Artificial Sequence
  Synthetic
cugccuccaccaaucggcaguca

SEQ ID NO: 122481 - RNA, 24 nt, Artificial Sequence
  Synthetic
ccugccuccaccaaucggcaguca

SEQ ID NO: 122482 - RNA, 18 nt, Artificial Sequence
  Synthetic
  misc_feature (6)..(6): n is a, c, g, or u
ccucanaaaacaaaaaga

SEQ ID NO: 122483 - RNA, 19 nt, Artificial Sequence
  Synthetic
  misc_feature (7)..(7): n is a, c, g, or u
cccucanaaaacaaaaaga

SEQ ID NO: 122484 - RNA, 20 nt, Artificial Sequence
  Synthetic
  misc_feature (8)..(8): n is a, c, g, or u
acccucanaaaacaaaaaga

SEQ ID NO: 122485 - RNA, 21 nt, Artificial Sequence
  Synthetic
  misc_feature (9)..(9): n is a, c, g, or u
aacccucanaaaacaaaaaga

SEQ ID NO: 122486 - RNA, 22 nt, Artificial Sequence
  Synthetic
  misc_feature (10)..(10): n is a, c, g, or u
aaacccucanaaaacaaaaaga

SEQ ID NO: 122487 - RNA, 23 nt, Artificial Sequence
  Synthetic
  misc_feature (11)..(11): n is a, c, g, or u
uaaacccucanaaaacaaaaaga

SEQ ID NO: 122488 - RNA, 24 nt, Artificial Sequence
  Synthetic
  misc_feature (12)..(12): n is a, c, g, or u
uuaaacccucanaaaacaaaaaga

SEQ ID NO: 122489 - RNA, 18 nt, Artificial Sequence
  Synthetic
cgucaaucuuaucgaaga

SEQ ID NO: 122490 - RNA, 19 nt, Artificial Sequence
  Synthetic
ucgucaaucuuaucgaaga

SEQ ID NO: 122491 - RNA, 20 nt, Artificial Sequence
  Synthetic
aucgucaaucuuaucgaaga

SEQ ID NO: 122492 - RNA, 21 nt, Artificial Sequence
  Synthetic
uaucgucaaucuuaucgaaga

SEQ ID NO: 122493 - RNA, 22 nt, Artificial Sequence
  Synthetic
auaucgucaaucuuaucgaaga

SEQ ID NO: 122494 - RNA, 23 nt, Artificial Sequence
  Synthetic
cauaucgucaaucuuaucgaaga

SEQ ID NO: 122495 - RNA, 24 nt, Artificial Sequence
  Synthetic
ccauaucgucaaucuuaucgaaga

SEQ ID NO: 122496 - RNA, 18 nt, Artificial Sequence
  Synthetic
gggaaguaauuuggaaga

SEQ ID NO: 122497 - RNA, 19 nt, Artificial Sequence
  Synthetic
ugggaaguaauuuggaaga

SEQ ID NO: 122498 - RNA, 20 nt, Artificial Sequence
  Synthetic
gugggaaguaauuuggaaga

SEQ ID NO: 122499 - RNA, 21 nt, Artificial Sequence
  Synthetic
ggugggaaguaauuuggaaga

SEQ ID NO: 122500 - RNA, 22 nt, Artificial Sequence
  Synthetic
gggugggaaguaauuuggaaga

SEQ ID NO: 122501 - RNA, 23 nt, Artificial Sequence
  Synthetic
ugggugggaaguaauuuggaaga

SEQ ID NO: 122502 - RNA, 24 nt, Artificial Sequence
  Synthetic
cugggugggaaguaauuuggaaga

SEQ ID NO: 122503 - RNA, 18 nt, Artificial Sequence
  Synthetic
acucuucaagaucccaga

SEQ ID NO: 122504 - RNA, 19 nt, Artificial Sequence
  Synthetic
aacucuucaagaucccaga

SEQ ID NO: 122505 - RNA, 20 nt, Artificial Sequence
  Synthetic
aaacucuucaagaucccaga

SEQ ID NO: 122506 - RNA, 21 nt, Artificial Sequence
  Synthetic
caaacucuucaagaucccaga

SEQ ID NO: 122507 - RNA, 22 nt, Artificial Sequence
  Synthetic
ccaaacucuucaagaucccaga

SEQ ID NO: 122508 - RNA, 23 nt, Artificial Sequence
  Synthetic
accaaacucuucaagaucccaga

SEQ ID NO: 122509 - RNA, 24 nt, Artificial Sequence
  Synthetic
caccaaacucuucaagaucccaga

SEQ ID NO: 122510 - RNA, 18 nt, Artificial Sequence
  Synthetic
caacucagaaaauccaga

SEQ ID NO: 122511 - RNA, 19 nt, Artificial Sequence
  Synthetic
ccaacucagaaaauccaga

SEQ ID NO: 122512 - RNA, 20 nt, Artificial Sequence
  Synthetic
gccaacucagaaaauccaga

SEQ ID NO: 122513 - RNA, 21 nt, Artificial Sequence
  Synthetic
agccaacucagaaaauccaga

SEQ ID NO: 122514 - RNA, 22 nt, Artificial Sequence
  Synthetic
aagccaacucagaaaauccaga

SEQ ID NO: 122515 - RNA, 23 nt, Artificial Sequence
  Synthetic
aaagccaacucagaaaauccaga

SEQ ID NO: 122516 - RNA, 24 nt, Artificial Sequence
  Synthetic
caaagccaacucagaaaauccaga

SEQ ID NO: 122517 - RNA, 18 nt, Artificial Sequence
  Synthetic
uuaaucauuacuuccaga

SEQ ID NO: 122518 - RNA, 19 nt, Artificial Sequence
  Synthetic
guuaaucauuacuuccaga

SEQ ID NO: 122519 - RNA, 20 nt, Artificial Sequence
  Synthetic
aguuaaucauuacuuccaga

SEQ ID NO: 122520 - RNA, 21 nt, Artificial Sequence
  Synthetic
uaguuaaucauuacuuccaga

SEQ ID NO: 122521 - RNA, 22 nt, Artificial Sequence
  Synthetic
guaguuaaucauuacuuccaga

SEQ ID NO: 122522 - RNA, 23 nt, Artificial Sequence
  Synthetic
uguaguuaaucauuacuuccaga

SEQ ID NO: 122523 - RNA, 24 nt, Artificial Sequence
  Synthetic
auguaguuaaucauuacuuccaga

SEQ ID NO: 122524 - RNA, 18 nt, Artificial Sequence
  Synthetic
acucccucgccucgcaga

SEQ ID NO: 122525 - RNA, 19 nt, Artificial Sequence
  Synthetic
aacucccucgccucgcaga

SEQ ID NO: 122526 - RNA, 20 nt, Artificial Sequence
  Synthetic
gaacucccucgccucgcaga

SEQ ID NO: 122527 - RNA, 21 nt, Artificial Sequence
  Synthetic
agaacucccucgccucgcaga

SEQ ID NO: 122528 - RNA, 22 nt, Artificial Sequence
  Synthetic
aagaacucccucgccucgcaga

SEQ ID NO: 122529 - RNA, 23 nt, Artificial Sequence
  Synthetic
gaagaacucccucgccucgcaga

SEQ ID NO: 122530 - RNA, 24 nt, Artificial Sequence
  Synthetic
agaagaacucccucgccucgcaga

SEQ ID NO: 122531 - RNA, 18 nt, Artificial Sequence
  Synthetic
guaaaugaaaacaggaga

SEQ ID NO: 122532 - RNA, 19 nt, Artificial Sequence
  Synthetic
aguaaaugaaaacaggaga

SEQ ID NO: 122533 - RNA, 20 nt, Artificial Sequence
  Synthetic
caguaaaugaaaacaggaga

SEQ ID NO: 122534 - RNA, 21 nt, Artificial Sequence
  Synthetic
acaguaaaugaaaacaggaga

SEQ ID NO: 122535 - RNA, 22 nt, Artificial Sequence
  Synthetic
  misc_feature (1)..(1): n is a, c, g, or u
nacaguaaaugaaaacaggaga

SEQ ID NO: 122536 - RNA, 23 nt, Artificial Sequence
  Synthetic
  misc_feature (2)..(2): n is a, c, g, or u
unacaguaaaugaaaacaggaga

SEQ ID NO: 122537 - RNA, 24 nt, Artificial Sequence
  Synthetic
  misc_feature (3)..(3): n is a, c, g, or u
cunacaguaaaugaaaacaggaga

SEQ ID NO: 122538 - RNA, 18 nt, Artificial Sequence
  Synthetic
  misc_feature (1)..(1): n is a, c, g, or u
ngaggcagguccccuaga

SEQ ID NO: 122539 - RNA, 19 nt, Artificial Sequence
  Synthetic
  misc_feature (2)..(2): n is a, c, g, or u
angaggcagguccccuaga

SEQ ID NO: 122540 - RNA, 20 nt, Artificial Sequence
  Synthetic
  misc_feature (3)..(3): n is a, c, g, or u
gangaggcagguccccuaga

SEQ ID NO: 122541 - RNA, 21 nt, Artificial Sequence
  Synthetic
  misc_feature (4)..(4): n is a, c, g, or u
cgangaggcagguccccuaga

SEQ ID NO: 122542 - RNA, 22 nt, Artificial Sequence
  Synthetic
  misc_feature (5)..(5): n is a, c, g, or u
acgangaggcagguccccuaga

SEQ ID NO: 122543 - RNA, 23 nt, Artificial Sequence
  Synthetic
  misc_feature (6)..(6): n is a, c, g, or u
gacgangaggcagguccccuaga

SEQ ID NO: 122544 - RNA, 24 nt, Artificial Sequence
  Synthetic
  misc_feature (7)..(7): n is a, c, g, or u
agacgangaggcagguccccuaga

SEQ ID NO: 122545 - RNA, 18 nt, Artificial Sequence
  Synthetic
uaaauauuugcccuuaga

SEQ ID NO: 122546 - RNA, 19 nt, Artificial Sequence
  Synthetic
cuaaauauuugcccuuaga

SEQ ID NO: 122547 - RNA, 20 nt, Artificial Sequence
  Synthetic
acuaaauauuugcccuuaga

SEQ ID NO: 122548 - RNA, 21 nt, Artificial Sequence
  Synthetic
uacuaaauauuugcccuuaga

SEQ ID NO: 122549 - RNA, 22 nt, Artificial Sequence
  Synthetic
uuacuaaauauuugcccuuaga

SEQ ID NO: 122550 - RNA, 23 nt, Artificial Sequence
  Synthetic
guuacuaaauauuugcccuuaga

SEQ ID NO: 122551 - RNA, 24 nt, Artificial Sequence
  Synthetic
uguuacuaaauauuugcccuuaga

SEQ ID NO: 122552 - RNA, 18 nt, Artificial Sequence
  Synthetic
acuacuguuguuagacga

SEQ ID NO: 122553 - RNA, 19 nt, Artificial Sequence
  Synthetic
aacuacuguuguuagacga

SEQ ID NO: 122554 - RNA, 20 nt, Artificial Sequence
  Synthetic
aaacuacuguuguuagacga

SEQ ID NO: 122555 - RNA, 21 nt, Artificial Sequence
  Synthetic
gaaacuacuguuguuagacga

SEQ ID NO: 122556 - RNA, 22 nt, Artificial Sequence
  Synthetic
ggaaacuacuguuguuagacga

SEQ ID NO: 122557 - RNA, 23 nt, Artificial Sequence
  Synthetic
cggaaacuacuguuguuagacga

SEQ ID NO: 122558 - RNA, 24 nt, Artificial Sequence
  Synthetic
ccggaaacuacuguuguuagacga

SEQ ID NO: 122559 - RNA, 18 nt, Artificial Sequence
  Synthetic
uggucuuccaaaccucga

SEQ ID NO: 122560 - RNA, 19 nt, Artificial Sequence
  Synthetic
uuggucuuccaaaccucga

SEQ ID NO: 122561 - RNA, 20 nt, Artificial Sequence
  Synthetic
guuggucuuccaaaccucga

SEQ ID NO: 122562 - RNA, 21 nt, Artificial Sequence
  Synthetic
gguuggucuuccaaaccucga

SEQ ID NO: 122563 - RNA, 22 nt, Artificial Sequence
  Synthetic
agguuggucuuccaaaccucga

SEQ ID NO: 122564 - RNA, 23 nt, Artificial Sequence
  Synthetic
gagguuggucuuccaaaccucga

SEQ ID NO: 122565 - RNA, 24 nt, Artificial Sequence
  Synthetic
ggagguuggucuuccaaaccucga

SEQ ID NO: 122566 - RNA, 18 nt, Artificial Sequence
  Synthetic
  misc_feature (6)..(6): n is a, c, g, or u
guuuanugagugggagga

SEQ ID NO: 122567 - RNA, 19 nt, Artificial Sequence
  Synthetic
  misc_feature (7)..(7): n is a, c, g, or u
uguuuanugagugggagga

SEQ ID NO: 122568 - RNA, 20 nt, Artificial Sequence
  Synthetic
  misc_feature (8)..(8): n is a, c, g, or u
guguuuanugagugggagga

SEQ ID NO: 122569 - RNA, 21 nt, Artificial Sequence
  Synthetic
  misc_feature (9)..(9): n is a, c, g, or u
uguguuuanugagugggagga

SEQ ID NO: 122570 - RNA, 22 nt, Artificial Sequence
  Synthetic
  misc_feature (10)..(10): n is a, c, g, or u
guguguuuanugagugggagga

SEQ ID NO: 122571 - RNA, 23 nt, Artificial Sequence
  Synthetic
  misc_feature (11)..(11): n is a, c, g, or u
uguguguuuanugagugggagga

SEQ ID NO: 122572 - RNA, 24 nt, Artificial Sequence
  Synthetic
  misc_feature (12)..(12): n is a, c, g, or u
cuguguguuuanugagugggagga

SEQ ID NO: 122573 - RNA, 18 nt, Artificial Sequence
  Synthetic
cuguacaaaaccuacgga

SEQ ID NO: 122574 - RNA, 19 nt, Artificial Sequence
  Synthetic
gcuguacaaaaccuacgga

SEQ ID NO: 122575 - RNA, 20 nt, Artificial Sequence
  Synthetic
ugcuguacaaaaccuacgga

SEQ ID NO: 122576 - RNA, 21 nt, Artificial Sequence
  Synthetic
uugcuguacaaaaccuacgga

SEQ ID NO: 122577 - RNA, 22 nt, Artificial Sequence
  Synthetic
guugcuguacaaaaccuacgga

SEQ ID NO: 122578 - RNA, 23 nt, Artificial Sequence
  Synthetic
uguugcuguacaaaaccuacgga

SEQ ID NO: 122579 - RNA, 24 nt, Artificial Sequence
  Synthetic
auguugcuguacaaaaccuacgga

SEQ ID NO: 122580 - RNA, 18 nt, Artificial Sequence
  Synthetic
cgcaaaauaccuauggga

SEQ ID NO: 122581 - RNA, 19 nt, Artificial Sequence
  Synthetic
ucgcaaaauaccuauggga

SEQ ID NO: 122582 - RNA, 20 nt, Artificial Sequence
  Synthetic
uucgcaaaauaccuauggga

SEQ ID NO: 122583 - RNA, 21 nt, Artificial Sequence
  Synthetic
uuucgcaaaauaccuauggga

SEQ ID NO: 122584 - RNA, 22 nt, Artificial Sequence
  Synthetic
cuuucgcaaaauaccuauggga

SEQ ID NO: 122585 - RNA, 23 nt, Artificial Sequence
  Synthetic
gcuuucgcaaaauaccuauggga

SEQ ID NO: 122586 - RNA, 24 nt, Artificial Sequence
  Synthetic
ggcuuucgcaaaauaccuauggga

SEQ ID NO: 122587 - RNA, 18 nt, Artificial Sequence
  Synthetic
gacgccaacaagguggga

SEQ ID NO: 122588 - RNA, 19 nt, Artificial Sequence
  Synthetic
ggacgccaacaagguggga

SEQ ID NO: 122589 - RNA, 20 nt, Artificial Sequence
  Synthetic
cggacgccaacaagguggga

SEQ ID NO: 122590 - RNA, 21 nt, Artificial Sequence
  Synthetic
ccggacgccaacaagguggga

SEQ ID NO: 122591 - RNA, 22 nt, Artificial Sequence
  Synthetic
gccggacgccaacaagguggga

SEQ ID NO: 122592 - RNA, 23 nt, Artificial Sequence
  Synthetic
ggccggacgccaacaagguggga

SEQ ID NO: 122593 - RNA, 24 nt, Artificial Sequence
  Synthetic
uggccggacgccaacaagguggga

SEQ ID NO: 122594 - RNA, 18 nt, Artificial Sequence
  Synthetic
gucaccauauucuuggga

SEQ ID NO: 122595 - RNA, 19 nt, Artificial Sequence
  Synthetic
ggucaccauauucuuggga

SEQ ID NO: 122596 - RNA, 20 nt, Artificial Sequence
  Synthetic
gggucaccauauucuuggga

SEQ ID NO: 122597 - RNA, 21 nt, Artificial Sequence
  Synthetic
cgggucaccauauucuuggga

SEQ ID NO: 122598 - RNA, 22 nt, Artificial Sequence
  Synthetic
gcgggucaccauauucuuggga

SEQ ID NO: 122599 - RNA, 23 nt, Artificial Sequence
  Synthetic
ugcgggucaccauauucuuggga

SEQ ID NO: 122600 - RNA, 24 nt, Artificial Sequence
  Synthetic
uugcgggucaccauauucuuggga

SEQ ID NO: 122601 - RNA, 18 nt, Artificial Sequence
  Synthetic
  misc_feature (16)..(16): n is a, c, g, or u
acuguuguuagacganga

SEQ ID NO: 122602 - RNA, 19 nt, Artificial Sequence
  Synthetic
  misc_feature (17)..(17): n is a, c, g, or u
uacuguuguuagacganga

SEQ ID NO: 122603 - RNA, 20 nt, Artificial Sequence
  Synthetic
  misc_feature (18)..(18): n is a, c, g, or u
cuacuguuguuagacganga

SEQ ID NO: 122604 - RNA, 21 nt, Artificial Sequence
  Synthetic
  misc_feature (19)..(19): n is a, c, g, or u
acuacuguuguuagacganga

SEQ ID NO: 122605 - RNA, 22 nt, Artificial Sequence
  Synthetic
  misc_feature (20)..(20): n is a, c, g, or u
aacuacuguuguuagacganga

SEQ ID NO: 122606 - RNA, 23 nt, Artificial Sequence
  Synthetic
  misc_feature (21)..(21): n is a, c, g, or u
aaacuacuguuguuagacganga

SEQ ID NO: 122607 - RNA, 24 nt, Artificial Sequence
  Synthetic
  misc_feature (22)..(22): n is a, c, g, or u
gaaacuacuguuguuagacganga

SEQ ID NO: 122608 - RNA, 18 nt, Artificial Sequence
  Synthetic
gugccaaguguuugcuga

SEQ ID NO: 122609 - RNA, 19 nt, Artificial Sequence
  Synthetic
ugugccaaguguuugcuga

SEQ ID NO: 122610 - RNA, 20 nt, Artificial Sequence
  Synthetic
cugugccaaguguuugcuga

SEQ ID NO: 122611 - RNA, 21 nt, Artificial Sequence
  Synthetic
ucugugccaaguguuugcuga

SEQ ID NO: 122612 - RNA, 22 nt, Artificial Sequence
  Synthetic
gucugugccaaguguuugcuga

SEQ ID NO: 122613 - RNA, 23 nt, Artificial Sequence
  Synthetic
ggucugugccaaguguuugcuga

SEQ ID NO: 122614 - RNA, 24 nt, Artificial Sequence
  Synthetic
uggucugugccaaguguuugcuga

SEQ ID NO: 122615 - RNA, 18 nt, Artificial Sequence
  Synthetic
  misc_feature (15)..(15): n is a, c, g, or u
agacuguguguuuanuga

SEQ ID NO: 122616 - RNA, 19 nt, Artificial Sequence
  Synthetic
  misc_feature (16)..(16): n is a, c, g, or u
aagacuguguguuuanuga

SEQ ID NO: 122617 - RNA, 20 nt, Artificial Sequence
  Synthetic
  misc_feature (17)..(17): n is a, c, g, or u
aaagacuguguguuuanuga

SEQ ID NO: 122618 - RNA, 21 nt, Artificial Sequence
  Synthetic
  misc_feature (18)..(18): n is a, c, g, or u
caaagacuguguguuuanuga

SEQ ID NO: 122619 - RNA, 22 nt, Artificial Sequence
  Synthetic
  misc_feature (19)..(19): n is a, c, g, or u
ucaaagacuguguguuuanuga

SEQ ID NO: 122620 - RNA, 23 nt, Artificial Sequence
  Synthetic
  misc_feature (20)..(20): n is a, c, g, or u
uucaaagacuguguguuuanuga

SEQ ID NO: 122621 - RNA, 24 nt, Artificial Sequence
  Synthetic
  misc_feature (21)..(21): n is a, c, g, or u
cuucaaagacuguguguuuanuga

SEQ ID NO: 122622 - RNA, 18 nt, Artificial Sequence
  Synthetic
  misc_feature (10)..(10): n is a, c, g, or u
uguaaacagnccuauuga

SEQ ID NO: 122623 - RNA, 19 nt, Artificial Sequence
  Synthetic
  misc_feature (11)..(11): n is a, c, g, or u
cuguaaacagnccuauuga

SEQ ID NO: 122624 - RNA, 20 nt, Artificial Sequence
  Synthetic
  misc_feature (12)..(12): n is a, c, g, or u
ccuguaaacagnccuauuga

SEQ ID NO: 122625 - RNA, 21 nt, Artificial Sequence
  Synthetic
  misc_feature (13)..(13): n is a, c, g, or u
uccuguaaacagnccuauuga

SEQ ID NO: 122626 - RNA, 22 nt, Artificial Sequence
  Synthetic
  misc_feature (14)..(14): n is a, c, g, or u
uuccuguaaacagnccuauuga

SEQ ID NO: 122627 - RNA, 23 nt, Artificial Sequence
  Synthetic
  misc_feature (15)..(15): n is a, c, g, or u
cuuccuguaaacagnccuauuga

SEQ ID NO: 122628 - RNA, 24 nt, Artificial Sequence
  Synthetic
  misc_feature (16)..(16): n is a, c, g, or u
acuuccuguaaacagnccuauuga

SEQ ID NO: 122629 - RNA, 18 nt, Artificial Sequence
  Synthetic
cgggguuuuucuuguuga

SEQ ID NO: 122630 - RNA, 19 nt, Artificial Sequence
  Synthetic
gcgggguuuuucuuguuga

SEQ ID NO: 122631 - RNA, 20 nt, Artificial Sequence
  Synthetic
ggcgggguuuuucuuguuga

SEQ ID NO: 122632 - RNA, 21 nt, Artificial Sequence
  Synthetic
aggcgggguuuuucuuguuga

SEQ ID NO: 122633 - RNA, 22 nt, Artificial Sequence
  Synthetic
caggcgggguuuuucuuguuga

SEQ ID NO: 122634 - RNA, 23 nt, Artificial Sequence
  Synthetic
acaggcgggguuuuucuuguuga

SEQ ID NO: 122635 - RNA, 24 nt, Artificial Sequence
  Synthetic
uacaggcgggguuuuucuuguuga

SEQ ID NO: 122636 - RNA, 18 nt, Artificial Sequence
  Synthetic
  misc_feature (17)..(17): n is a, c, g, or u
augcauguauacaagcna

SEQ ID NO: 122637 - RNA, 19 nt, Artificial Sequence
  Synthetic
  misc_feature (18)..(18): n is a, c, g, or u
uaugcauguauacaagcna

SEQ ID NO: 122638 - RNA, 20 nt, Artificial Sequence
  Synthetic
  misc_feature (19)..(19): n is a, c, g, or u
auaugcauguauacaagcna

SEQ ID NO: 122639 - RNA, 21 nt, Artificial Sequence
  Synthetic
  misc_feature (20)..(20): n is a, c, g, or u
uauaugcauguauacaagcna

SEQ ID NO: 122640 - RNA, 22 nt, Artificial Sequence
  Synthetic
  misc_feature (21)..(21): n is a, c, g, or u
uuauaugcauguauacaagcna

SEQ ID NO: 122641 - RNA, 23 nt, Artificial Sequence
  Synthetic
  misc_feature (22)..(22): n is a, c, g, or u
uuuauaugcauguauacaagcna

SEQ ID NO: 122642 - RNA, 24 nt, Artificial Sequence
  Synthetic
  misc_feature (23)..(23): n is a, c, g, or u
cuuuauaugcauguauacaagcna

SEQ ID NO: 122643 - RNA, 18 nt, Artificial Sequence
  Synthetic
  misc_feature (17)..(17): n is a, c, g, or u
ugcccuuagauaaaggna

SEQ ID NO: 122644 - RNA, 19 nt, Artificial Sequence
  Synthetic
  misc_feature (18)..(18): n is a, c, g, or u
uugcccuuagauaaaggna

SEQ ID NO: 122645 - RNA, 20 nt, Artificial Sequence
  Synthetic
  misc_feature (19)..(19): n is a, c, g, or u
uuugcccuuagauaaaggna

SEQ ID NO: 122646 - RNA, 21 nt, Artificial Sequence
  Synthetic
  misc_feature (20)..(20): n is a, c, g, or u
auuugcccuuagauaaaggna

SEQ ID NO: 122647 - RNA, 22 nt, Artificial Sequence
  Synthetic
  misc_feature (21)..(21): n is a, c, g, or u
uauuugcccuuagauaaaggna

SEQ ID NO: 122648 - RNA, 23 nt, Artificial Sequence
  Synthetic
  misc_feature (22)..(22): n is a, c, g, or u
auauuugcccuuagauaaaggna

SEQ ID NO: 122649 - RNA, 24 nt, Artificial Sequence
  Synthetic
  misc_feature (23)..(23): n is a, c, g, or u
aauauuugcccuuagauaaaggna

SEQ ID NO: 122650 - RNA, 18 nt, Artificial Sequence
  Synthetic
  misc_feature (17)..(17): n is a, c, g, or u
ccugucuuacuuuuggna

SEQ ID NO: 122651 - RNA, 19 nt, Artificial Sequence
  Synthetic
  misc_feature (18)..(18): n is a, c, g, or u
uccugucuuacuuuuggna

SEQ ID NO: 122652 - RNA, 20 nt, Artificial Sequence
  Synthetic
  misc_feature (19)..(19): n is a, c, g, or u
uuccugucuuacuuuuggna

SEQ ID NO: 122653 - RNA, 21 nt, Artificial Sequence
  Synthetic
  misc_feature (20)..(20): n is a, c, g, or u
uuuccugucuuacuuuuggna

SEQ ID NO: 122654 - RNA, 22 nt, Artificial Sequence
  Synthetic
  misc_feature (21)..(21): n is a, c, g, or u
auuuccugucuuacuuuuggna

SEQ ID NO: 122655 - RNA, 23 nt, Artificial Sequence
  Synthetic
  misc_feature (22)..(22): n is a, c, g, or u
cauuuccugucuuacuuuuggna

SEQ ID NO: 122656 - RNA, 24 nt, Artificial Sequence
  Synthetic
  misc_feature (23)..(23): n is a, c, g, or u
acauuuccugucuuacuuuuggna

SEQ ID NO: 122657 - RNA, 18 nt, Artificial Sequence
  Synthetic
ugcccaaggucuugcaua

SEQ ID NO: 122658 - RNA, 19 nt, Artificial Sequence
  Synthetic
cugcccaaggucuugcaua

SEQ ID NO: 122659 - RNA, 20 nt, Artificial Sequence
  Synthetic
ccugcccaaggucuugcaua

SEQ ID NO: 122660 - RNA, 21 nt, Artificial Sequence
  Synthetic
accugcccaaggucuugcaua

SEQ ID NO: 122661 - RNA, 22 nt, Artificial Sequence
  Synthetic
aaccugcccaaggucuugcaua

SEQ ID NO: 122662 - RNA, 23 nt, Artificial Sequence
  Synthetic
gaaccugcccaaggucuugcaua

SEQ ID NO: 122663 - RNA, 24 nt, Artificial Sequence
  Synthetic
ggaaccugcccaaggucuugcaua

SEQ ID NO: 122664 - RNA, 18 nt, Artificial Sequence
  Synthetic
  misc_feature (8)..(8): n is a, c, g, or u
aggcgggnaucuuauaua

SEQ ID NO: 122665 - RNA, 19 nt, Artificial Sequence
  Synthetic
  misc_feature (9)..(9): n is a, c, g, or u
aaggcgggnaucuuauaua

SEQ ID NO: 122666 - RNA, 20 nt, Artificial Sequence
  Synthetic
  misc_feature (10)..(10): n is a, c, g, or u
gaaggcgggnaucuuauaua

SEQ ID NO: 122667 - RNA, 21 nt, Artificial Sequence
  Synthetic
  misc_feature (11)..(11): n is a, c, g, or u
ggaaggcgggnaucuuauaua

SEQ ID NO: 122668 - RNA, 22 nt, Artificial Sequence
  Synthetic
  misc_feature (12)..(12): n is a, c, g, or u
uggaaggcgggnaucuuauaua

SEQ ID NO: 122669 - RNA, 23 nt, Artificial Sequence
  Synthetic
  misc_feature (13)..(13): n is a, c, g, or u
uuggaaggcgggnaucuuauaua

SEQ ID NO: 122670 - RNA, 24 nt, Artificial Sequence
  Synthetic
  misc_feature (14)..(14): n is a, c, g, or u
uuuggaaggcgggnaucuuauaua

SEQ ID NO: 122671 - RNA, 18 nt, Artificial Sequence
  Synthetic
  misc_feature (10)..(10): n is a, c, g, or u
gaaggcgggnaucuuaua

SEQ ID NO: 122672 - RNA, 19 nt, Artificial Sequence
  Synthetic
  misc_feature (11)..(11): n is a, c, g, or u
ggaaggcgggnaucuuaua

SEQ ID NO: 122673 - RNA, 20 nt, Artificial Sequence
  Synthetic
  misc_feature (12)..(12): n is a, c, g, or u
uggaaggcgggnaucuuaua

SEQ ID NO: 122674 - RNA, 21 nt, Artificial Sequence
  Synthetic
  misc_feature (13)..(13): n is a, c, g, or u
uuggaaggcgggnaucuuaua

SEQ ID NO: 122675 - RNA, 22 nt, Artificial Sequence
  Synthetic
  misc_feature (14)..(14): n is a, c, g, or u
uuuggaaggcgggnaucuuaua

SEQ ID NO: 122676 - RNA, 23 nt, Artificial Sequence
  Synthetic
  misc_feature (15)..(15): n is a, c, g, or u
cuuuggaaggcgggnaucuuaua

SEQ ID NO: 122677 - RNA, 24 nt, Artificial Sequence
  Synthetic
  misc_feature (16)..(16): n is a, c, g, or u
ucuuuggaaggcgggnaucuuaua

SEQ ID NO: 122678 - RNA, 18 nt, Artificial Sequence
  Synthetic
guugguucuucuggacua

SEQ ID NO: 122679 - RNA, 19 nt, Artificial Sequence
  Synthetic
uguugguucuucuggacua

SEQ ID NO: 122680 - RNA, 20 nt, Artificial Sequence
  Synthetic
uuguugguucuucuggacua

SEQ ID NO: 122681 - RNA, 21 nt, Artificial Sequence
  Synthetic
cuuguugguucuucuggacua

SEQ ID NO: 122682 - RNA, 22 nt, Artificial Sequence
  Synthetic
ucuuguugguucuucuggacua

SEQ ID NO: 122683 - RNA, 23 nt, Artificial Sequence
  Synthetic
uucuuguugguucuucuggacua

SEQ ID NO: 122684 - RNA, 24 nt, Artificial Sequence
  Synthetic
cuucuuguugguucuucuggacua

SEQ ID NO: 122685 - RNA, 18 nt, Artificial Sequence
  Synthetic
  misc_feature (5)..(5): n is a, c, g, or u
  misc_feature (7)..(7): n is a, c, g, or u
uuaangnucuuuguacua

SEQ ID NO: 122686 - RNA, 19 nt, Artificial Sequence
  Synthetic
  misc_feature (6)..(6): n is a, c, g, or u
  misc_feature (8)..(8): n is a, c, g, or u
guuaangnucuuuguacua

SEQ ID NO: 122687 - RNA, 20 nt, Artificial Sequence
  Synthetic
  misc_feature (7)..(7): n is a, c, g, or u
  misc_feature (9)..(9): n is a, c, g, or u
gguuaangnucuuuguacua

SEQ ID NO: 122688 - RNA, 21 nt, Artificial Sequence
  Synthetic
  misc_feature (8)..(8): n is a, c, g, or u
  misc_feature (10)..(10): n is a, c, g, or u
agguuaangnucuuuguacua

SEQ ID NO: 122689 - RNA, 22 nt, Artificial Sequence
  Synthetic
  misc_feature (9)..(9): n is a, c, g, or u
  misc_feature (11)..(11): n is a, c, g, or u
uagguuaangnucuuuguacua

SEQ ID NO: 122690 - RNA, 23 nt, Artificial Sequence
  Synthetic
  misc_feature (10)..(10): n is a, c, g, or u
  misc_feature (12)..(12): n is a, c, g, or u
uuagguuaangnucuuuguacua

SEQ ID NO: 122691 - RNA, 24 nt, Artificial Sequence
  Synthetic
  misc_feature (1)..(1): n is a, c, g, or u
  misc_feature (11)..(11): n is a, c, g, or u
  misc_feature (13)..(13): n is a, c, g, or u
nuuagguuaangnucuuuguacua

SEQ ID NO: 122692 - RNA, 18 nt, Artificial Sequence
  Synthetic
gcuuucgcaaaauaccua

SEQ ID NO: 122693 - RNA, 19 nt, Artificial Sequence
  Synthetic
ggcuuucgcaaaauaccua

SEQ ID NO: 122694 - RNA, 20 nt, Artificial Sequence
  Synthetic
gggcuuucgcaaaauaccua

SEQ ID NO: 122695 - RNA, 21 nt, Artificial Sequence
  Synthetic
ugggcuuucgcaaaauaccua

SEQ ID NO: 122696 - RNA, 22 nt, Artificial Sequence
  Synthetic
uugggcuuucgcaaaauaccua

SEQ ID NO: 122697 - RNA, 23 nt, Artificial Sequence
  Synthetic
cuugggcuuucgcaaaauaccua

SEQ ID NO: 122698 - RNA, 24 nt, Artificial Sequence
  Synthetic
ucuugggcuuucgcaaaauaccua

SEQ ID NO: 122699 - RNA, 18 nt, Artificial Sequence
  Synthetic
  misc_feature (3)..(3): n is a, c, g, or u
gangaggcagguccccua

SEQ ID NO: 122700 - RNA, 19 nt, Artificial Sequence
  Synthetic
  misc_feature (4)..(4): n is a, c, g, or u
cgangaggcagguccccua

SEQ ID NO: 122701 - RNA, 20 nt, Artificial Sequence
  Synthetic
  misc_feature (5)..(5): n is a, c, g, or u
acgangaggcagguccccua

SEQ ID NO: 122702 - RNA, 21 nt, Artificial Sequence
  Synthetic
  misc_feature (6)..(6): n is a, c, g, or u
gacgangaggcagguccccua

SEQ ID NO: 122703 - RNA, 22 nt, Artificial Sequence
  Synthetic
  misc_feature (7)..(7): n is a, c, g, or u
agacgangaggcagguccccua

SEQ ID NO: 122704 - RNA, 23 nt, Artificial Sequence
  Synthetic
  misc_feature (8)..(8): n is a, c, g, or u
uagacgangaggcagguccccua

SEQ ID NO: 122705 - RNA, 24 nt, Artificial Sequence
  Synthetic
  misc_feature (9)..(9): n is a, c, g, or u
uuagacgangaggcagguccccua

SEQ ID NO: 122706 - RNA, 18 nt, Artificial Sequence
  Synthetic
  misc_feature (4)..(4): n is a, c, g, or u
  misc_feature (6)..(6): n is a, c, g, or u
cccnunucuccaccucua

SEQ ID NO: 122707 - RNA, 19 nt, Artificial Sequence
  Synthetic
  misc_feature (5)..(5): n is a, c, g, or u
  misc_feature (7)..(7): n is a, c, g, or u
ucccnunucuccaccucua

SEQ ID NO: 122708 - RNA, 20 nt, Artificial Sequence
  Synthetic
  misc_feature (6)..(6): n is a, c, g, or u
  misc_feature (8)..(8): n is a, c, g, or u
cucccnunucuccaccucua

SEQ ID NO: 122709 - RNA, 21 nt, Artificial Sequence
  Synthetic
  misc_feature (7)..(7): n is a, c, g, or u
  misc_feature (9)..(9): n is a, c, g, or u
acucccnunucuccaccucua

SEQ ID NO: 122710 - RNA, 22 nt, Artificial Sequence
  Synthetic
  misc_feature (8)..(8): n is a, c, g, or u
  misc_feature (10)..(10): n is a, c, g, or u
uacucccnunucuccaccucua

SEQ ID NO: 122711 - RNA, 23 nt, Artificial Sequence
  Synthetic
  misc_feature (9)..(9): n is a, c, g, or u
  misc_feature (11)..(11): n is a, c, g, or u
cuacucccnunucuccaccucua

SEQ ID NO: 122712 - RNA, 24 nt, Artificial Sequence
  Synthetic
  misc_feature (10)..(10): n is a, c, g, or u
  misc_feature (12)..(12): n is a, c, g, or u
ccuacucccnunucuccaccucua

SEQ ID NO: 122713 - RNA, 18 nt, Artificial Sequence
  Synthetic
acuuacaaggccuuucua

SEQ ID NO: 122714 - RNA, 19 nt, Artificial Sequence
  Synthetic
aacuuacaaggccuuucua

SEQ ID NO: 122715 - RNA, 20 nt, Artificial Sequence
  Synthetic
caacuuacaaggccuuucua

SEQ ID NO: 122716 - RNA, 21 nt, Artificial Sequence
  Synthetic
ccaacuuacaaggccuuucua

SEQ ID NO: 122717 - RNA, 22 nt, Artificial Sequence
  Synthetic
gccaacuuacaaggccuuucua

SEQ ID NO: 122718 - RNA, 23 nt, Artificial Sequence
  Synthetic
cgccaacuuacaaggccuuucua

SEQ ID NO: 122719 - RNA, 24 nt, Artificial Sequence
  Synthetic
ucgccaacuuacaaggccuuucua

SEQ ID NO: 122720 - RNA, 18 nt, Artificial Sequence
  Synthetic
  misc_feature (6)..(6): n is a, c, g, or u
  misc_feature (12)..(12): n is a, c, g, or u
gugggnccccunacagua

SEQ ID NO: 122721 - RNA, 19 nt, Artificial Sequence
  Synthetic
  misc_feature (7)..(7): n is a, c, g, or u
  misc_feature (13)..(13): n is a, c, g, or u
ugugggnccccunacagua

SEQ ID NO: 122722 - RNA, 20 nt, Artificial Sequence
  Synthetic
  misc_feature (8)..(8): n is a, c, g, or u
  misc_feature (14)..(14): n is a, c, g, or u
uugugggnccccunacagua

SEQ ID NO: 122723 - RNA, 21 nt, Artificial Sequence
  Synthetic
  misc_feature (9)..(9): n is a, c, g, or u
  misc_feature (15)..(15): n is a, c, g, or u
uuugugggnccccunacagua

SEQ ID NO: 122724 - RNA, 22 nt, Artificial Sequence
  Synthetic
  misc_feature (10)..(10): n is a, c, g, or u
  misc_feature (16)..(16): n is a, c, g, or u
auuugugggnccccunacagua

SEQ ID NO: 122725 - RNA, 23 nt, Artificial Sequence
  Synthetic
  misc_feature (11)..(11): n is a, c, g, or u
  misc_feature (17)..(17): n is a, c, g, or u
aauuugugggnccccunacagua

SEQ ID NO: 122726 - RNA, 24 nt, Artificial Sequence
  Synthetic
  misc_feature (12)..(12): n is a, c, g, or u
  misc_feature (18)..(18): n is a, c, g, or u
caauuugugggnccccunacagua

SEQ ID NO: 122727 - RNA, 18 nt, Artificial Sequence
  Synthetic
gcauccagggaauuagua

SEQ ID NO: 122728 - RNA, 19 nt, Artificial Sequence
  Synthetic
agcauccagggaauuagua

SEQ ID NO: 122729 - RNA, 20 nt, Artificial Sequence
  Synthetic
cagcauccagggaauuagua

SEQ ID NO: 122730 - RNA, 21 nt, Artificial Sequence
  Synthetic
ccagcauccagggaauuagua

SEQ ID NO: 122731 - RNA, 22 nt, Artificial Sequence
  Synthetic
uccagcauccagggaauuagua

SEQ ID NO: 122732 - RNA, 23 nt, Artificial Sequence
  Synthetic
auccagcauccagggaauuagua

SEQ ID NO: 122733 - RNA, 24 nt, Artificial Sequence
  Synthetic
gauccagcauccagggaauuagua

SEQ ID NO: 122734 - RNA, 18 nt, Artificial Sequence
  Synthetic
ugccuuuauaugcaugua

SEQ ID NO: 122735 - RNA, 19 nt, Artificial Sequence
  Synthetic
augccuuuauaugcaugua

SEQ ID NO: 122736 - RNA, 20 nt, Artificial Sequence
  Synthetic
aaugccuuuauaugcaugua

SEQ ID NO: 122737 - RNA, 21 nt, Artificial Sequence
  Synthetic
uaaugccuuuauaugcaugua

SEQ ID NO: 122738 - RNA, 22 nt, Artificial Sequence
  Synthetic
uuaaugccuuuauaugcaugua

SEQ ID NO: 122739 - RNA, 23 nt, Artificial Sequence
  Synthetic
uuuaaugccuuuauaugcaugua

SEQ ID NO: 122740 - RNA, 24 nt, Artificial Sequence
  Synthetic
cuuuaaugccuuuauaugcaugua

SEQ ID NO: 122741 - RNA, 18 nt, Artificial Sequence
  Synthetic
aacuucaugggauaugua

SEQ ID NO: 122742 - RNA, 19 nt, Artificial Sequence
  Synthetic
uaacuucaugggauaugua

SEQ ID NO: 122743 - RNA, 20 nt, Artificial Sequence
  Synthetic
uuaacuucaugggauaugua

SEQ ID NO: 122744 - RNA, 21 nt, Artificial Sequence
  Synthetic
cuuaacuucaugggauaugua

SEQ ID NO: 122745 - RNA, 22 nt, Artificial Sequence
  Synthetic
ccuuaacuucaugggauaugua

SEQ ID NO: 122746 - RNA, 23 nt, Artificial Sequence
  Synthetic
cccuuaacuucaugggauaugua

SEQ ID NO: 122747 - RNA, 24 nt, Artificial Sequence
  Synthetic
ucccuuaacuucaugggauaugua

SEQ ID NO: 122748 - RNA, 18 nt, Artificial Sequence
  Synthetic
aagacuggggacccugua

SEQ ID NO: 122749 - RNA, 19 nt, Artificial Sequence
  Synthetic
gaagacuggggacccugua

SEQ ID NO: 122750 - RNA, 20 nt, Artificial Sequence
  Synthetic
cgaagacuggggacccugua

SEQ ID NO: 122751 - RNA, 21 nt, Artificial Sequence
  Synthetic
ucgaagacuggggacccugua

SEQ ID NO: 122752 - RNA, 22 nt, Artificial Sequence
  Synthetic
aucgaagacuggggacccugua

SEQ ID NO: 122753 - RNA, 23 nt, Artificial Sequence
  Synthetic
uaucgaagacuggggacccugua

SEQ ID NO: 122754 - RNA, 24 nt, Artificial Sequence
  Synthetic
uuaucgaagacuggggacccugua

SEQ ID NO: 122755 - RNA, 18 nt, Artificial Sequence
  Synthetic
uuuaggaaacuuccugua

SEQ ID NO: 122756 - RNA, 19 nt, Artificial Sequence
  Synthetic
uuuuaggaaacuuccugua

SEQ ID NO: 122757 - RNA, 20 nt, Artificial Sequence
  Synthetic
guuuuaggaaacuuccugua

SEQ ID NO: 122758 - RNA, 21 nt, Artificial Sequence
  Synthetic
uguuuuaggaaacuuccugua

SEQ ID NO: 122759 - RNA, 22 nt, Artificial Sequence
  Synthetic
  misc_feature (1)..(1): n is a, c, g, or u
nuguuuuaggaaacuuccugua

SEQ ID NO: 122760 - RNA, 23 nt, Artificial Sequence
  Synthetic
  misc_feature (1)..(2): n is a, c, g, or u
nnuguuuuaggaaacuuccugua

SEQ ID NO: 122761 - RNA, 24 nt, Artificial Sequence
  Synthetic
  misc_feature (1)..(3): n is a, c, g, or u
nnnuguuuuaggaaacuuccugua

SEQ ID NO: 122762 - RNA, 18 nt, Artificial Sequence
  Synthetic
uucccucauguugcugua

SEQ ID NO: 122763 - RNA, 19 nt, Artificial Sequence
  Synthetic
uuucccucauguugcugua

SEQ ID NO: 122764 - RNA, 20 nt, Artificial Sequence
  Synthetic
guuucccucauguugcugua

SEQ ID NO: 122765 - RNA, 21 nt, Artificial Sequence
  Synthetic
uguuucccucauguugcugua

SEQ ID NO: 122766 - RNA, 22 nt, Artificial Sequence
  Synthetic
auguuucccucauguugcugua

SEQ ID NO: 122767 - RNA, 23 nt, Artificial Sequence
  Synthetic
uauguuucccucauguugcugua

SEQ ID NO: 122768 - RNA, 24 nt, Artificial Sequence
  Synthetic
cuauguuucccucauguugcugua

SEQ ID NO: 122769 - RNA, 18 nt, Artificial Sequence
  Synthetic
caccgccucugcucugua

SEQ ID NO: 122770 - RNA, 19 nt, Artificial Sequence
  Synthetic
acaccgccucugcucugua

SEQ ID NO: 122771 - RNA, 20 nt, Artificial Sequence
  Synthetic
gacaccgccucugcucugua

SEQ ID NO: 122772 - RNA, 21 nt, Artificial Sequence
  Synthetic
cgacaccgccucugcucugua

SEQ ID NO: 122773 - RNA, 22 nt, Artificial Sequence
  Synthetic
ucgacaccgccucugcucugua

SEQ ID NO: 122774 - RNA, 23 nt, Artificial Sequence
  Synthetic
cucgacaccgccucugcucugua

SEQ ID NO: 122775 - RNA, 24 nt, Artificial Sequence
  Synthetic
  misc_feature (1)..(1): n is a, c, g, or u
ncucgacaccgccucugcucugua

SEQ ID NO: 122776 - RNA, 18 nt, Artificial Sequence
  Synthetic
  misc_feature (8)..(8): n is a, c, g, or u
  misc_feature (10)..(10): n is a, c, g, or u
agguuaangnucuuugua

SEQ ID NO: 122777 - RNA, 19 nt, Artificial Sequence
  Synthetic
  misc_feature (9)..(9): n is a, c, g, or u
  misc_feature (11)..(11): n is a, c, g, or u
uagguuaangnucuuugua

SEQ ID NO: 122778 - RNA, 20 nt, Artificial Sequence
  Synthetic
  misc_feature (10)..(10): n is a, c, g, or u
  misc_feature (12)..(12): n is a, c, g, or u
uuagguuaangnucuuugua

SEQ ID NO: 122779 - RNA, 21 nt, Artificial Sequence
  Synthetic
  misc_feature (1)..(1): n is a, c, g, or u
  misc_feature (11)..(11): n is a, c, g, or u
  misc_feature (13)..(13): n is a, c, g, or u
nuuagguuaangnucuuugua

SEQ ID NO: 122780 - RNA, 22 nt, Artificial Sequence
  Synthetic
  misc_feature (2)..(2): n is a, c, g, or u
  misc_feature (12)..(12): n is a, c, g, or u
  misc_feature (14)..(14): n is a, c, g, or u
gnuuagguuaangnucuuugua

SEQ ID NO: 122781 - RNA, 23 nt, Artificial Sequence
  Synthetic
  misc_feature (3)..(3): n is a, c, g, or u
  misc_feature (13)..(13): n is a, c, g, or u
  misc_feature (15)..(15): n is a, c, g, or u
agnuuagguuaangnucuuugua

SEQ ID NO: 122782 - RNA, 24 nt, Artificial Sequence
  Synthetic
  misc_feature (4)..(4): n is a, c, g, or u
  misc_feature (14)..(14): n is a, c, g, or u
  misc_feature (16)..(16): n is a, c, g, or u
gagnuuagguuaangnucuuugua

SEQ ID NO: 122783 - RNA, 18 nt, Artificial Sequence
  Synthetic
  misc_feature (10)..(10): n is a, c, g, or u
  misc_feature (16)..(16): n is a, c, g, or u
cuuucuaagnaaacanua

SEQ ID NO: 122784 - RNA, 19 nt, Artificial Sequence
  Synthetic
  misc_feature (11)..(11): n is a, c, g, or u
  misc_feature (17)..(17): n is a, c, g, or u
ccuuucuaagnaaacanua

SEQ ID NO: 122785 - RNA, 20 nt, Artificial Sequence
  Synthetic
  misc_feature (12)..(12): n is a, c, g, or u
  misc_feature (18)..(18): n is a, c, g, or u
gccuuucuaagnaaacanua

SEQ ID NO: 122786 - RNA, 21 nt, Artificial Sequence
  Synthetic
  misc_feature (13)..(13): n is a, c, g, or u
  misc_feature (19)..(19): n is a, c, g, or u
ggccuuucuaagnaaacanua

SEQ ID NO: 122787 - RNA, 22 nt, Artificial Sequence
  Synthetic
  misc_feature (14)..(14): n is a, c, g, or u
  misc_feature (20)..(20): n is a, c, g, or u
aggccuuucuaagnaaacanua

SEQ ID NO: 122788 - RNA, 23 nt, Artificial Sequence
  Synthetic
  misc_feature (15)..(15): n is a, c, g, or u
  misc_feature (21)..(21): n is a, c, g, or u
aaggccuuucuaagnaaacanua

SEQ ID NO: 122789 - RNA, 24 nt, Artificial Sequence
  Synthetic
  misc_feature (16)..(16): n is a, c, g, or u
  misc_feature (22)..(22): n is a, c, g, or u
caaggccuuucuaagnaaacanua

SEQ ID NO: 122790 - RNA, 18 nt, Artificial Sequence
  Synthetic
  misc_feature (16)..(16): n is a, c, g, or u
cauggacauugacccnua

SEQ ID NO: 122791 - RNA, 19 nt, Artificial Sequence
  Synthetic
  misc_feature (17)..(17): n is a, c, g, or u
gcauggacauugacccnua

SEQ ID NO: 122792 - RNA, 20 nt, Artificial Sequence
  Synthetic
  misc_feature (18)..(18): n is a, c, g, or u
ggcauggacauugacccnua

SEQ ID NO: 122793 - RNA, 21 nt, Artificial Sequence
  Synthetic
  misc_feature (19)..(19): n is a, c, g, or u
gggcauggacauugacccnua

SEQ ID NO: 122794 - RNA, 22 nt, Artificial Sequence
  Synthetic
  misc_feature (1)..(1): n is a, c, g, or u
  misc_feature (20)..(20): n is a, c, g, or u
ngggcauggacauugacccnua

SEQ ID NO: 122795 - RNA, 23 nt, Artificial Sequence
  Synthetic
  misc_feature (2)..(2): n is a, c, g, or u
  misc_feature (21)..(21): n is a, c, g, or u
ungggcauggacauugacccnua

SEQ ID NO: 122796 - RNA, 24 nt, Artificial Sequence
  Synthetic
  misc_feature (3)..(3): n is a, c, g, or u
  misc_feature (22)..(22): n is a, c, g, or u
uungggcauggacauugacccnua

SEQ ID NO: 122797 - RNA, 18 nt, Artificial Sequence
  Synthetic
  misc_feature (4)..(4): n is a, c, g, or u
  misc_feature (13)..(13): n is a, c, g, or u
aggnaucaaaccnuauua

SEQ ID NO: 122798 - RNA, 19 nt, Artificial Sequence
  Synthetic
  misc_feature (5)..(5): n is a, c, g, or u
  misc_feature (14)..(14): n is a, c, g, or u
aaggnaucaaaccnuauua

SEQ ID NO: 122799 - RNA, 20 nt, Artificial Sequence
  Synthetic
  misc_feature (6)..(6): n is a, c, g, or u
  misc_feature (15)..(15): n is a, c, g, or u
aaaggnaucaaaccnuauua

SEQ ID NO: 122800 - RNA, 21 nt, Artificial Sequence
  Synthetic
  misc_feature (7)..(7): n is a, c, g, or u
  misc_feature (16)..(16): n is a, c, g, or u
uaaaggnaucaaaccnuauua

SEQ ID NO: 122801 - RNA, 22 nt, Artificial Sequence
  Synthetic
  misc_feature (8)..(8): n is a, c, g, or u
  misc_feature (17)..(17): n is a, c, g, or u
auaaaggnaucaaaccnuauua

SEQ ID NO: 122802 - RNA, 23 nt, Artificial Sequence
  Synthetic
  misc_feature (9)..(9): n is a, c, g, or u
  misc_feature (18)..(18): n is a, c, g, or u
gauaaaggnaucaaaccnuauua

SEQ ID NO: 122803 - RNA, 24 nt, Artificial Sequence
  Synthetic
  misc_feature (10)..(10): n is a, c, g, or u
  misc_feature (19)..(19): n is a, c, g, or u
agauaaaggnaucaaaccnuauua

SEQ ID NO: 122804 - RNA, 18 nt, Artificial Sequence
  Synthetic
uacuuucucgccaacuua

SEQ ID NO: 122805 - RNA, 19 nt, Artificial Sequence
  Synthetic
uuacuuucucgccaacuua

SEQ ID NO: 122806 - RNA, 20 nt, Artificial Sequence
  Synthetic
uuuacuuucucgccaacuua

SEQ ID NO: 122807 - RNA, 21 nt, Artificial Sequence
  Synthetic
uuuuacuuucucgccaacuua

SEQ ID NO: 122808 - RNA, 22 nt, Artificial Sequence
  Synthetic
cuuuuacuuucucgccaacuua

SEQ ID NO: 122809 - RNA, 23 nt, Artificial Sequence
  Synthetic
gcuuuuacuuucucgccaacuua

SEQ ID NO: 122810 - RNA, 24 nt, Artificial Sequence
  Synthetic
ggcuuuuacuuucucgccaacuua

SEQ ID NO: 122811 - RNA, 18 nt, Artificial Sequence
  Synthetic
acuaaauauuugcccuua

SEQ ID NO: 122812 - RNA, 19 nt, Artificial Sequence
  Synthetic
uacuaaauauuugcccuua

SEQ ID NO: 122813 - RNA, 20 nt, Artificial Sequence
  Synthetic
uuacuaaauauuugcccuua

SEQ ID NO: 122814 - RNA, 21 nt, Artificial Sequence
  Synthetic
guuacuaaauauuugcccuua

SEQ ID NO: 122815 - RNA, 22 nt, Artificial Sequence
  Synthetic
uguuacuaaauauuugcccuua

SEQ ID NO: 122816 - RNA, 23 nt, Artificial Sequence
  Synthetic
auguuacuaaauauuugcccuua

SEQ ID NO: 122817 - RNA, 24 nt, Artificial Sequence
  Synthetic
aauguuacuaaauauuugcccuua

SEQ ID NO: 122818 - RNA, 18 nt, Artificial Sequence
  Synthetic
  misc_feature (1)..(1): n is a, c, g, or u
nccauaucgucaaucuua

SEQ ID NO: 122819 - RNA, 19 nt, Artificial Sequence
  Synthetic
  misc_feature (2)..(2): n is a, c, g, or u
unccauaucgucaaucuua

SEQ ID NO: 122820 - RNA, 20 nt, Artificial Sequence
  Synthetic
  misc_feature (3)..(3): n is a, c, g, or u
cunccauaucgucaaucuua

SEQ ID NO: 122821 - RNA, 21 nt, Artificial Sequence
  Synthetic
  misc_feature (4)..(4): n is a, c, g, or u
ucunccauaucgucaaucuua

SEQ ID NO: 122822 - RNA, 22 nt, Artificial Sequence
  Synthetic
  misc_feature (5)..(5): n is a, c, g, or u
cucunccauaucgucaaucuua

SEQ ID NO: 122823 - RNA, 23 nt, Artificial Sequence
  Synthetic
  misc_feature (1)..(1): n is a, c, g, or u
  misc_feature (6)..(6): n is a, c, g, or u
ncucunccauaucgucaaucuua

SEQ ID NO: 122824 - RNA, 24 nt, Artificial Sequence
  Synthetic
  misc_feature (2)..(2): n is a, c, g, or u
  misc_feature (7)..(7): n is a, c, g, or u
gncucunccauaucgucaaucuua

SEQ ID NO: 122825 - RNA, 18 nt, Artificial Sequence
  Synthetic
  misc_feature (12)..(12): n is a, c, g, or u
uggaaggcgggnaucuua

SEQ ID NO: 122826 - RNA, 19 nt, Artificial Sequence
  Synthetic
  misc_feature (13)..(13): n is a, c, g, or u
uuggaaggcgggnaucuua

SEQ ID NO: 122827 - RNA, 20 nt, Artificial Sequence
  Synthetic
  misc_feature (14)..(14): n is a, c, g, or u
uuuggaaggcgggnaucuua

SEQ ID NO: 122828 - RNA, 21 nt, Artificial Sequence
  Synthetic
  misc_feature (15)..(15): n is a, c, g, or u
cuuuggaaggcgggnaucuua

SEQ ID NO: 122829 - RNA, 22 nt, Artificial Sequence
  Synthetic
  misc_feature (16)..(16): n is a, c, g, or u
ucuuuggaaggcgggnaucuua

SEQ ID NO: 122830 - RNA, 23 nt, Artificial Sequence
  Synthetic
  misc_feature (17)..(17): n is a, c, g, or u
cucuuuggaaggcgggnaucuua

SEQ ID NO: 122831 - RNA, 24 nt, Artificial Sequence
  Synthetic
  misc_feature (18)..(18): n is a, c, g, or u
acucuuuggaaggcgggnaucuua

SEQ ID NO: 122832 - RNA, 18 nt, Artificial Sequence
  Synthetic
cugucuggcuuucaguua

SEQ ID NO: 122833 - RNA, 19 nt, Artificial Sequence
  Synthetic
acugucuggcuuucaguua

SEQ ID NO: 122834 - RNA, 20 nt, Artificial Sequence
  Synthetic
cacugucuggcuuucaguua

SEQ ID NO: 122835 - RNA, 21 nt, Artificial Sequence
  Synthetic
ccacugucuggcuuucaguua

SEQ ID NO: 122836 - RNA, 22 nt, Artificial Sequence
  Synthetic
cccacugucuggcuuucaguua

SEQ ID NO: 122837 - RNA, 23 nt, Artificial Sequence
  Synthetic
ccccacugucuggcuuucaguua

SEQ ID NO: 122838 - RNA, 24 nt, Artificial Sequence
  Synthetic
cccccacugucuggcuuucaguua

SEQ ID NO: 122839 - RNA, 18 nt, Artificial Sequence
  Synthetic
cggaaacuacuguuguua

SEQ ID NO: 122840 - RNA, 19 nt, Artificial Sequence
  Synthetic
ccggaaacuacuguuguua

SEQ ID NO: 122841 - RNA, 20 nt, Artificial Sequence
  Synthetic
uccggaaacuacuguuguua

SEQ ID NO: 122842 - RNA, 21 nt, Artificial Sequence
  Synthetic
uuccggaaacuacuguuguua

SEQ ID NO: 122843 - RNA, 22 nt, Artificial Sequence
  Synthetic
cuuccggaaacuacuguuguua

SEQ ID NO: 122844 - RNA, 23 nt, Artificial Sequence
  Synthetic
acuuccggaaacuacuguuguua

SEQ ID NO: 122845 - RNA, 24 nt, Artificial Sequence
  Synthetic
cacuuccggaaacuacuguuguua

SEQ ID NO: 122846 - RNA, 18 nt, Artificial Sequence
  Synthetic
auaaggugggaaacuuua

SEQ ID NO: 122847 - RNA, 19 nt, Artificial Sequence
  Synthetic
cauaaggugggaaacuuua

SEQ ID NO: 122848 - RNA, 20 nt, Artificial Sequence
  Synthetic
  misc_feature (1)..(1): n is a, c, g, or u
ncauaaggugggaaacuuua

SEQ ID NO: 122849 - RNA, 21 nt, Artificial Sequence
  Synthetic
  misc_feature (2)..(2): n is a, c, g, or u
cncauaaggugggaaacuuua

SEQ ID NO: 122850 - RNA, 22 nt, Artificial Sequence
  Synthetic
  misc_feature (3)..(3): n is a, c, g, or u
acncauaaggugggaaacuuua

SEQ ID NO: 122851 - RNA, 23 nt, Artificial Sequence
  Synthetic
  misc_feature (4)..(4): n is a, c, g, or u
gacncauaaggugggaaacuuua

SEQ ID NO: 122852 - RNA, 24 nt, Artificial Sequence
  Synthetic
  misc_feature (5)..(5): n is a, c, g, or u
ggacncauaaggugggaaacuuua

SEQ ID NO: 122853 - RNA, 18 nt, Artificial Sequence
  Synthetic
ggggcgcaccucucuuua

SEQ ID NO: 122854 - RNA, 19 nt, Artificial Sequence
  Synthetic
cggggcgcaccucucuuua

SEQ ID NO: 122855 - RNA, 20 nt, Artificial Sequence
  Synthetic
acggggcgcaccucucuuua

SEQ ID NO: 122856 - RNA, 21 nt, Artificial Sequence
  Synthetic
cacggggcgcaccucucuuua

SEQ ID NO: 122857 - RNA, 22 nt, Artificial Sequence
  Synthetic
ccacggggcgcaccucucuuua

SEQ ID NO: 122858 - RNA, 23 nt, Artificial Sequence
  Synthetic
accacggggcgcaccucucuuua

SEQ ID NO: 122859 - RNA, 24 nt, Artificial Sequence
  Synthetic
gaccacggggcgcaccucucuuua

SEQ ID NO: 122860 - RNA, 18 nt, Artificial Sequence
  Synthetic
  misc_feature (9)..(11): n is a, c, g, or u
aaaucaaannnuguuuua

SEQ ID NO: 122861 - RNA, 19 nt, Artificial Sequence
  Synthetic
  misc_feature (10)..(12): n is a, c, g, or u
aaaaucaaannnuguuuua

SEQ ID NO: 122862 - RNA, 20 nt, Artificial Sequence
  Synthetic
  misc_feature (11)..(13): n is a, c, g, or u
aaaaaucaaannnuguuuua

SEQ ID NO: 122863 - RNA, 21 nt, Artificial Sequence
  Synthetic
  misc_feature (12)..(14): n is a, c, g, or u
aaaaaaucaaannnuguuuua

SEQ ID NO: 122864 - RNA, 22 nt, Artificial Sequence
  Synthetic
  misc_feature (13)..(15): n is a, c, g, or u
caaaaaaucaaannnuguuuua

SEQ ID NO: 122865 - RNA, 23 nt, Artificial Sequence
  Synthetic
  misc_feature (1)..(1): n is a, c, g, or u
  misc_feature (14)..(16): n is a, c, g, or u
ncaaaaaaucaaannnuguuuua

SEQ ID NO: 122866 - RNA, 24 nt, Artificial Sequence
  Synthetic
  misc_feature (2)..(2): n is a, c, g, or u
  misc_feature (15)..(17): n is a, c, g, or u
uncaaaaaaucaaannnuguuuua

SEQ ID NO: 122867 - RNA, 18 nt, Artificial Sequence
  Synthetic
  misc_feature (3)..(3): n is a, c, g, or u
cunacaguaaaugaaaac

SEQ ID NO: 122868 - RNA, 19 nt, Artificial Sequence
  Synthetic
  misc_feature (4)..(4): n is a, c, g, or u
ccunacaguaaaugaaaac

SEQ ID NO: 122869 - RNA, 20 nt, Artificial Sequence
  Synthetic
  misc_feature (5)..(5): n is a, c, g, or u
cccunacaguaaaugaaaac

SEQ ID NO: 122870 - RNA, 21 nt, Artificial Sequence
  Synthetic
  misc_feature (6)..(6): n is a, c, g, or u
ccccunacaguaaaugaaaac

SEQ ID NO: 122871 - RNA, 22 nt, Artificial Sequence
  Synthetic
  misc_feature (1)..(1): n is a, c, g, or u
  misc_feature (7)..(7): n is a, c, g, or u
nccccunacaguaaaugaaaac

SEQ ID NO: 122872 - RNA, 23 nt, Artificial Sequence
  Synthetic
  misc_feature (2)..(2): n is a, c, g, or u
  misc_feature (8)..(8): n is a, c, g, or u
gnccccunacaguaaaugaaaac

SEQ ID NO: 122873 - RNA, 24 nt, Artificial Sequence
  Synthetic
  misc_feature (3)..(3): n is a, c, g, or u
  misc_feature (9)..(9): n is a, c, g, or u
ggnccccunacaguaaaugaaaac

SEQ ID NO: 122874 - RNA, 18 nt, Artificial Sequence
  Synthetic
  misc_feature (13)..(13): n is a, c, g, or u
uuuaaacccucanaaaac

SEQ ID NO: 122875 - RNA, 19 nt, Artificial Sequence
  Synthetic
  misc_feature (14)..(14): n is a, c, g, or u
auuuaaacccucanaaaac

SEQ ID NO: 122876 - RNA, 20 nt, Artificial Sequence
  Synthetic
  misc_feature (15)..(15): n is a, c, g, or u
cauuuaaacccucanaaaac

SEQ ID NO: 122877 - RNA, 21 nt, Artificial Sequence
  Synthetic
  misc_feature (16)..(16): n is a, c, g, or u
acauuuaaacccucanaaaac

SEQ ID NO: 122878 - RNA, 22 nt, Artificial Sequence
  Synthetic
  misc_feature (17)..(17): n is a, c, g, or u
uacauuuaaacccucanaaaac

SEQ ID NO: 122879 - RNA, 23 nt, Artificial Sequence
  Synthetic
  misc_feature (18)..(18): n is a, c, g, or u
auacauuuaaacccucanaaaac

SEQ ID NO: 122880 - RNA, 24 nt, Artificial Sequence
  Synthetic
  misc_feature (19)..(19): n is a, c, g, or u
uauacauuuaaacccucanaaaac

SEQ ID NO: 122881 - RNA, 18 nt, Artificial Sequence
  Synthetic
gagguuggucuuccaaac

SEQ ID NO: 122882 - RNA, 19 nt, Artificial Sequence
  Synthetic
ggagguuggucuuccaaac

SEQ ID NO: 122883 - RNA, 20 nt, Artificial Sequence
  Synthetic
gggagguuggucuuccaaac

SEQ ID NO: 122884 - RNA, 21 nt, Artificial Sequence
  Synthetic
ugggagguuggucuuccaaac

SEQ ID NO: 122885 - RNA, 22 nt, Artificial Sequence
  Synthetic
augggagguuggucuuccaaac

SEQ ID NO: 122886 - RNA, 23 nt, Artificial Sequence
  Synthetic
caugggagguuggucuuccaaac

SEQ ID NO: 122887 - RNA, 24 nt, Artificial Sequence
  Synthetic
gcaugggagguuggucuuccaaac

SEQ ID NO: 122888 - RNA, 18 nt, Artificial Sequence
  Synthetic
ccugcauucaaagccaac

SEQ ID NO: 122889 - RNA, 19 nt, Artificial Sequence
  Synthetic
cccugcauucaaagccaac

SEQ ID NO: 122890 - RNA, 20 nt, Artificial Sequence
  Synthetic
acccugcauucaaagccaac

SEQ ID NO: 122891 - RNA, 21 nt, Artificial Sequence
  Synthetic
gacccugcauucaaagccaac

SEQ ID NO: 122892 - RNA, 22 nt, Artificial Sequence
  Synthetic
ggacccugcauucaaagccaac

SEQ ID NO: 122893 - RNA, 23 nt, Artificial Sequence
  Synthetic
uggacccugcauucaaagccaac

SEQ ID NO: 122894 - RNA, 24 nt, Artificial Sequence
  Synthetic
uuggacccugcauucaaagccaac

SEQ ID NO: 122895 - RNA, 18 nt, Artificial Sequence
  Synthetic
ggggacccuguaccgaac

SEQ ID NO: 122896 - RNA, 19 nt, Artificial Sequence
  Synthetic
uggggacccuguaccgaac

SEQ ID NO: 122897 - RNA, 20 nt, Artificial Sequence
  Synthetic
cuggggacccuguaccgaac

SEQ ID NO: 122898 - RNA, 21 nt, Artificial Sequence
  Synthetic
acuggggacccuguaccgaac

SEQ ID NO: 122899 - RNA, 22 nt, Artificial Sequence
  Synthetic
gacuggggacccuguaccgaac

SEQ ID NO: 122900 - RNA, 23 nt, Artificial Sequence
  Synthetic
agacuggggacccuguaccgaac

SEQ ID NO: 122901 - RNA, 24 nt, Artificial Sequence
  Synthetic
aagacuggggacccuguaccgaac

SEQ ID NO: 122902 - RNA, 18 nt, Artificial Sequence
  Synthetic
uggcuccaguucaggaac

SEQ ID NO: 122903 - RNA, 19 nt, Artificial Sequence
  Synthetic
guggcuccaguucaggaac

SEQ ID NO: 122904 - RNA, 20 nt, Artificial Sequence
  Synthetic
gguggcuccaguucaggaac

SEQ ID NO: 122905 - RNA, 21 nt, Artificial Sequence
  Synthetic
ugguggcuccaguucaggaac

SEQ ID NO: 122906 - RNA, 22 nt, Artificial Sequence
  Synthetic
cugguggcuccaguucaggaac

SEQ ID NO: 122907 - RNA, 23 nt, Artificial Sequence
  Synthetic
gcugguggcuccaguucaggaac

SEQ ID NO: 122908 - RNA, 24 nt, Artificial Sequence
  Synthetic
ugcugguggcuccaguucaggaac

SEQ ID NO: 122909 - RNA, 18 nt, Artificial Sequence
  Synthetic
acgucgcauggagaccac

SEQ ID NO: 122910 - RNA, 19 nt, Artificial Sequence
  Synthetic
cacgucgcauggagaccac

SEQ ID NO: 122911 - RNA, 20 nt, Artificial Sequence
  Synthetic
gcacgucgcauggagaccac

SEQ ID NO: 122912 - RNA, 21 nt, Artificial Sequence
  Synthetic
ugcacgucgcauggagaccac

SEQ ID NO: 122913 - RNA, 22 nt, Artificial Sequence
  Synthetic
cugcacgucgcauggagaccac

SEQ ID NO: 122914 - RNA, 23 nt, Artificial Sequence
  Synthetic
ucugcacgucgcauggagaccac

SEQ ID NO: 122915 - RNA, 24 nt, Artificial Sequence
  Synthetic
cucugcacgucgcauggagaccac

SEQ ID NO: 122916 - RNA, 18 nt, Artificial Sequence
  Synthetic
accaccgugaacgcccac

SEQ ID NO: 122917 - RNA, 19 nt, Artificial Sequence
  Synthetic
gaccaccgugaacgcccac

SEQ ID NO: 122918 - RNA, 20 nt, Artificial Sequence
  Synthetic
agaccaccgugaacgcccac

SEQ ID NO: 122919 - RNA, 21 nt, Artificial Sequence
  Synthetic
gagaccaccgugaacgcccac

SEQ ID NO: 122920 - RNA, 22 nt, Artificial Sequence
  Synthetic
ggagaccaccgugaacgcccac

SEQ ID NO: 122921 - RNA, 23 nt, Artificial Sequence
  Synthetic
uggagaccaccgugaacgcccac

SEQ ID NO: 122922 - RNA, 24 nt, Artificial Sequence
  Synthetic
auggagaccaccgugaacgcccac

SEQ ID NO: 122923 - RNA, 18 nt, Artificial Sequence
  Synthetic
caccucaccauacggcac

SEQ ID NO: 122924 - RNA, 19 nt, Artificial Sequence
  Synthetic
ucaccucaccauacggcac

SEQ ID NO: 122925 - RNA, 20 nt, Artificial Sequence
  Synthetic
uucaccucaccauacggcac

SEQ ID NO: 122926 - RNA, 21 nt, Artificial Sequence
  Synthetic
guucaccucaccauacggcac

SEQ ID NO: 122927 - RNA, 22 nt, Artificial Sequence
  Synthetic
uguucaccucaccauacggcac

SEQ ID NO: 122928 - RNA, 23 nt, Artificial Sequence
  Synthetic
uuguucaccucaccauacggcac

SEQ ID NO: 122929 - RNA, 24 nt, Artificial Sequence
  Synthetic
auuguucaccucaccauacggcac

SEQ ID NO: 122930 - RNA, 18 nt, Artificial Sequence
  Synthetic
  misc_feature (15)..(15): n is a, c, g, or u
ugggaccucaacccncac

SEQ ID NO: 122931 - RNA, 19 nt, Artificial Sequence
  Synthetic
  misc_feature (16)..(16): n is a, c, g, or u
uugggaccucaacccncac

SEQ ID NO: 122932 - RNA, 20 nt, Artificial Sequence
  Synthetic
  misc_feature (17)..(17): n is a, c, g, or u
auugggaccucaacccncac

SEQ ID NO: 122933 - RNA, 21 nt, Artificial Sequence
  Synthetic
  misc_feature (18)..(18): n is a, c, g, or u
gauugggaccucaacccncac

SEQ ID NO: 122934 - RNA, 22 nt, Artificial Sequence
  Synthetic
  misc_feature (19)..(19): n is a, c, g, or u
agauugggaccucaacccncac

SEQ ID NO: 122935 - RNA, 23 nt, Artificial Sequence
  Synthetic
  misc_feature (20)..(20): n is a, c, g, or u
cagauugggaccucaacccncac

SEQ ID NO: 122936 - RNA, 24 nt, Artificial Sequence
  Synthetic
  misc_feature (21)..(21): n is a, c, g, or u
ccagauugggaccucaacccncac

SEQ ID NO: 122937 - RNA, 18 nt, Artificial Sequence
  Synthetic
gucaaucuuaucgaagac

SEQ ID NO: 122938 - RNA, 19 nt, Artificial Sequence
  Synthetic
cgucaaucuuaucgaagac

SEQ ID NO: 122939 - RNA, 20 nt, Artificial Sequence
  Synthetic
ucgucaaucuuaucgaagac

SEQ ID NO: 122940 - RNA, 21 nt, Artificial Sequence
  Synthetic
aucgucaaucuuaucgaagac

SEQ ID NO: 122941 - RNA, 22 nt, Artificial Sequence
  Synthetic
uaucgucaaucuuaucgaagac

SEQ ID NO: 122942 - RNA, 23 nt, Artificial Sequence
  Synthetic
auaucgucaaucuuaucgaagac

SEQ ID NO: 122943 - RNA, 24 nt, Artificial Sequence
  Synthetic
cauaucgucaaucuuaucgaagac

SEQ ID NO: 122944 - RNA, 18 nt, Artificial Sequence
  Synthetic
aaacuacuguuguuagac

SEQ ID NO: 122945 - RNA, 19 nt, Artificial Sequence
  Synthetic
gaaacuacuguuguuagac

SEQ ID NO: 122946 - RNA, 20 nt, Artificial Sequence
  Synthetic
ggaaacuacuguuguuagac

SEQ ID NO: 122947 - RNA, 21 nt, Artificial Sequence
  Synthetic
cggaaacuacuguuguuagac

SEQ ID NO: 122948 - RNA, 22 nt, Artificial Sequence
  Synthetic
ccggaaacuacuguuguuagac

SEQ ID NO: 122949 - RNA, 23 nt, Artificial Sequence
  Synthetic
uccggaaacuacuguuguuagac

SEQ ID NO: 122950 - RNA, 24 nt, Artificial Sequence
  Synthetic
uuccggaaacuacuguuguuagac

SEQ ID NO: 122951 - RNA, 18 nt, Artificial Sequence
  Synthetic
gcaaugucaacgaccgac

SEQ ID NO: 122952 - RNA, 19 nt, Artificial Sequence
  Synthetic
agcaaugucaacgaccgac

SEQ ID NO: 122953 - RNA, 20 nt, Artificial Sequence
  Synthetic
cagcaaugucaacgaccgac

SEQ ID NO: 122954 - RNA, 21 nt, Artificial Sequence
  Synthetic
ucagcaaugucaacgaccgac

SEQ ID NO: 122955 - RNA, 22 nt, Artificial Sequence
  Synthetic
uucagcaaugucaacgaccgac

SEQ ID NO: 122956 - RNA, 23 nt, Artificial Sequence
  Synthetic
uuucagcaaugucaacgaccgac

SEQ ID NO: 122957 - RNA, 24 nt, Artificial Sequence
  Synthetic
cuuucagcaaugucaacgaccgac

SEQ ID NO: 122958 - RNA, 18 nt, Artificial Sequence
  Synthetic
  misc_feature (1)..(1): n is a, c, g, or u
  misc_feature (5)..(6): n is a, c, g, or u
ncugnnguaccgaccgac

SEQ ID NO: 122959 - RNA, 19 nt, Artificial Sequence
  Synthetic
  misc_feature (2)..(2): n is a, c, g, or u
  misc_feature (6)..(7): n is a, c, g, or u
gncugnnguaccgaccgac

SEQ ID NO: 122960 - RNA, 20 nt, Artificial Sequence
  Synthetic
  misc_feature (3)..(3): n is a, c, g, or u
  misc_feature (7)..(8): n is a, c, g, or u
cgncugnnguaccgaccgac

SEQ ID NO: 122961 - RNA, 21 nt, Artificial Sequence
  Synthetic
  misc_feature (4)..(4): n is a, c, g, or u
  misc_feature (8)..(9): n is a, c, g, or u
ccgncugnnguaccgaccgac

SEQ ID NO: 122962 - RNA, 22 nt, Artificial Sequence
  Synthetic
  misc_feature (5)..(5): n is a, c, g, or u
  misc_feature (9)..(10): n is a, c, g, or u
uccgncugnnguaccgaccgac

SEQ ID NO: 122963 - RNA, 23 nt, Artificial Sequence
  Synthetic
  misc_feature (6)..(6): n is a, c, g, or u
  misc_feature (10)..(11): n is a, c, g, or u
cuccgncugnnguaccgaccgac

SEQ ID NO: 122964 - RNA, 24 nt, Artificial Sequence
  Synthetic
  misc_feature (7)..(7): n is a, c, g, or u
  misc_feature (11)..(12): n is a, c, g, or u
ucuccgncugnnguaccgaccgac

SEQ ID NO: 122965 - RNA, 18 nt, Artificial Sequence
  Synthetic
uguacaaaaccuacggac

SEQ ID NO: 122966 - RNA, 19 nt, Artificial Sequence
  Synthetic
cuguacaaaaccuacggac

SEQ ID NO: 122967 - RNA, 20 nt, Artificial Sequence
  Synthetic
gcuguacaaaaccuacggac

SEQ ID NO: 122968 - RNA, 18 nt, Artificial Sequence
  Synthetic
aaggacaacuggccggac

SEQ ID NO: 122969 - RNA, 19 nt, Artificial Sequence
  Synthetic
caaggacaacuggccggac

SEQ ID NO: 122970 - RNA, 20 nt, Artificial Sequence
  Synthetic
acaaggacaacuggccggac

SEQ ID NO: 122971 - RNA, 21 nt, Artificial Sequence
  Synthetic
cacaaggacaacuggccggac

SEQ ID NO: 122972 - RNA, 22 nt, Artificial Sequence
  Synthetic
  misc_feature (1)..(1): n is a, c, g, or u
ncacaaggacaacuggccggac

SEQ ID NO: 122973 - RNA, 23 nt, Artificial Sequence
  Synthetic
  misc_feature (2)..(2): n is a, c, g, or u
cncacaaggacaacuggccggac

SEQ ID NO: 122974 - RNA, 24 nt, Artificial Sequence
  Synthetic
  misc_feature (3)..(3): n is a, c, g, or u
ccncacaaggacaacuggccggac

SEQ ID NO: 122975 - RNA, 18 nt, Artificial Sequence
  Synthetic
gaaaauccagauugggac

SEQ ID NO: 122976 - RNA, 19 nt, Artificial Sequence
  Synthetic
agaaaauccagauugggac

SEQ ID NO: 122977 - RNA, 20 nt, Artificial Sequence
  Synthetic
cagaaaauccagauugggac

SEQ ID NO: 122978 - RNA, 21 nt, Artificial Sequence
  Synthetic
ucagaaaauccagauugggac

SEQ ID NO: 122979 - RNA, 22 nt, Artificial Sequence
  Synthetic
cucagaaaauccagauugggac

SEQ ID NO: 122980 - RNA, 23 nt, Artificial Sequence
  Synthetic
acucagaaaauccagauugggac

SEQ ID NO: 122981 - RNA, 24 nt, Artificial Sequence
  Synthetic
aacucagaaaauccagauugggac

SEQ ID NO: 122982 - RNA, 18 nt, Artificial Sequence
  Synthetic
  misc_feature (8)..(8): n is a, c, g, or u
uggcuuungggcauggac

SEQ ID NO: 122983 - RNA, 19 nt, Artificial Sequence
  Synthetic
  misc_feature (9)..(9): n is a, c, g, or u
guggcuuungggcauggac

SEQ ID NO: 122984 - RNA, 20 nt, Artificial Sequence
  Synthetic
  misc_feature (10)..(10): n is a, c, g, or u
gguggcuuungggcauggac

SEQ ID NO: 122985 - RNA, 21 nt, Artificial Sequence
  Synthetic
  misc_feature (11)..(11): n is a, c, g, or u
ggguggcuuungggcauggac

SEQ ID NO: 122986 - RNA, 22 nt, Artificial Sequence
  Synthetic
  misc_feature (12)..(12): n is a, c, g, or u
uggguggcuuungggcauggac

SEQ ID NO: 122987 - RNA, 23 nt, Artificial Sequence
  Synthetic
  misc_feature (13)..(13): n is a, c, g, or u
uuggguggcuuungggcauggac

SEQ ID NO: 122988 - RNA, 24 nt, Artificial Sequence
  Synthetic
  misc_feature (14)..(14): n is a, c, g, or u
cuuggguggcuuungggcauggac

SEQ ID NO: 122989 - RNA, 18 nt, Artificial Sequence
  Synthetic
  misc_feature (10)..(10): n is a, c, g, or u
  misc_feature (16)..(16): n is a, c, g, or u
auuugugggnccccunac

SEQ ID NO: 122990 - RNA, 19 nt, Artificial Sequence
  Synthetic
  misc_feature (11)..(11): n is a, c, g, or u
  misc_feature (17)..(17): n is a, c, g, or u
aauuugugggnccccunac

SEQ ID NO: 122991 - RNA, 20 nt, Artificial Sequence
  Synthetic
  misc_feature (12)..(12): n is a, c, g, or u
  misc_feature (18)..(18): n is a, c, g, or u
caauuugugggnccccunac

SEQ ID NO: 122992 - RNA, 21 nt, Artificial Sequence
  Synthetic
  misc_feature (1)..(1): n is a, c, g, or u
  misc_feature (13)..(13): n is a, c, g, or u
  misc_feature (19)..(19): n is a, c, g, or u
ncaauuugugggnccccunac

SEQ ID NO: 122993 - RNA, 22 nt, Artificial Sequence
  Synthetic
  misc_feature (2)..(2): n is a, c, g, or u
  misc_feature (14)..(14): n is a, c, g, or u
  misc_feature (20)..(20): n is a, c, g, or u
ancaauuugugggnccccunac

SEQ ID NO: 122994 - RNA, 23 nt, Artificial Sequence
  Synthetic
  misc_feature (3)..(3): n is a, c, g, or u
  misc_feature (15)..(15): n is a, c, g, or u
  misc_feature (21)..(21): n is a, c, g, or u
aancaauuugugggnccccunac

SEQ ID NO: 122995 - RNA, 24 nt, Artificial Sequence
  Synthetic
  misc_feature (4)..(4): n is a, c, g, or u
  misc_feature (16)..(16): n is a, c, g, or u
  misc_feature (22)..(22): n is a, c, g, or u
uaancaauuugugggnccccunac

SEQ ID NO: 122996 - RNA, 18 nt, Artificial Sequence
  Synthetic
caaaaauccucacaauac

SEQ ID NO: 122997 - RNA, 19 nt, Artificial Sequence
  Synthetic
acaaaaauccucacaauac

SEQ ID NO: 122998 - RNA, 20 nt, Artificial Sequence
  Synthetic
gacaaaaauccucacaauac

SEQ ID NO: 122999 - RNA, 21 nt, Artificial Sequence
  Synthetic
ugacaaaaauccucacaauac

SEQ ID NO: 123000 - RNA, 22 nt, Artificial Sequence
  Synthetic
uugacaaaaauccucacaauac

SEQ ID NO: 123001 - RNA, 23 nt, Artificial Sequence
  Synthetic
guugacaaaaauccucacaauac

SEQ ID NO: 123002 - RNA, 24 nt, Artificial Sequence
  Synthetic
uguugacaaaaauccucacaauac

SEQ ID NO: 123003 - RNA, 18 nt, Artificial Sequence
  Synthetic
uccucugccgauccauac

SEQ ID NO: 123004 - RNA, 19 nt, Artificial Sequence
  Synthetic
cuccucugccgauccauac

SEQ ID NO: 123005 - RNA, 20 nt, Artificial Sequence
  Synthetic
ucuccucugccgauccauac

SEQ ID NO: 123006 - RNA, 21 nt, Artificial Sequence
  Synthetic
gucuccucugccgauccauac

SEQ ID NO: 123007 - RNA, 22 nt, Artificial Sequence
  Synthetic
ugucuccucugccgauccauac

SEQ ID NO: 123008 - RNA, 23 nt, Artificial Sequence
  Synthetic
gugucuccucugccgauccauac

SEQ ID NO: 123009 - RNA, 24 nt, Artificial Sequence
  Synthetic
ugugucuccucugccgauccauac

SEQ ID NO: 123010 - RNA, 18 nt, Artificial Sequence
  Synthetic
accgaccuugaggcauac

SEQ ID NO: 123011 - RNA, 19 nt, Artificial Sequence
  Synthetic
gaccgaccuugaggcauac

SEQ ID NO: 123012 - RNA, 20 nt, Artificial Sequence
  Synthetic
cgaccgaccuugaggcauac

SEQ ID NO: 123013 - RNA, 18 nt, Artificial Sequence
  Synthetic
  misc_feature (7)..(7): n is a, c, g, or u
  misc_feature (9)..(9): n is a, c, g, or u
gguuaangnucuuuguac

SEQ ID NO: 123014 - RNA, 19 nt, Artificial Sequence
  Synthetic
  misc_feature (8)..(8): n is a, c, g, or u
  misc_feature (10)..(10): n is a, c, g, or u
agguuaangnucuuuguac

SEQ ID NO: 123015 - RNA, 20 nt, Artificial Sequence
  Synthetic
  misc_feature (9)..(9): n is a, c, g, or u
  misc_feature (11)..(11): n is a, c, g, or u
uagguuaangnucuuuguac

SEQ ID NO: 123016 - RNA, 21 nt, Artificial Sequence
  Synthetic
  misc_feature (10)..(10): n is a, c, g, or u
  misc_feature (12)..(12): n is a, c, g, or u
uuagguuaangnucuuuguac

SEQ ID NO: 123017 - RNA, 22 nt, Artificial Sequence
  Synthetic
  misc_feature (1)..(1): n is a, c, g, or u
  misc_feature (11)..(11): n is a, c, g, or u
  misc_feature (13)..(13): n is a, c, g, or u
nuuagguuaangnucuuuguac

SEQ ID NO: 123018 - RNA, 23 nt, Artificial Sequence
  Synthetic
  misc_feature (2)..(2): n is a, c, g, or u
  misc_feature (12)..(12): n is a, c, g, or u
  misc_feature (14)..(14): n is a, c, g, or u
gnuuagguuaangnucuuuguac

SEQ ID NO: 123019 - RNA, 24 nt, Artificial Sequence
  Synthetic
  misc_feature (3)..(3): n is a, c, g, or u
  misc_feature (13)..(13): n is a, c, g, or u
  misc_feature (15)..(15): n is a, c, g, or u
agnuuagguuaangnucuuuguac

SEQ ID NO: 123020 - RNA, 18 nt, Artificial Sequence
  Synthetic
gggcgcaccucucuuuac

SEQ ID NO: 123021 - RNA, 19 nt, Artificial Sequence
  Synthetic
ggggcgcaccucucuuuac

SEQ ID NO: 123022 - RNA, 20 nt, Artificial Sequence
  Synthetic
cggggcgcaccucucuuuac

SEQ ID NO: 123023 - RNA, 18 nt, Artificial Sequence
  Synthetic
auguugcuguacaaaacc

SEQ ID NO: 123024 - RNA, 19 nt, Artificial Sequence
  Synthetic
cauguugcuguacaaaacc

SEQ ID NO: 123025 - RNA, 20 nt, Artificial Sequence
  Synthetic
ucauguugcuguacaaaacc

SEQ ID NO: 123026 - RNA, 21 nt, Artificial Sequence
  Synthetic
cucauguugcuguacaaaacc

SEQ ID NO: 123027 - RNA, 22 nt, Artificial Sequence
  Synthetic
ccucauguugcuguacaaaacc

SEQ ID NO: 123028 - RNA, 23 nt, Artificial Sequence
  Synthetic
cccucauguugcuguacaaaacc

SEQ ID NO: 123029 - RNA, 24 nt, Artificial Sequence
  Synthetic
ucccucauguugcuguacaaaacc

SEQ ID NO: 123030 - RNA, 18 nt, Artificial Sequence
  Synthetic
agguuggucuuccaaacc

SEQ ID NO: 123031 - RNA, 19 nt, Artificial Sequence
  Synthetic
gagguuggucuuccaaacc

SEQ ID NO: 123032 - RNA, 20 nt, Artificial Sequence
  Synthetic
ggagguuggucuuccaaacc

SEQ ID NO: 123033 - RNA, 21 nt, Artificial Sequence
  Synthetic
gggagguuggucuuccaaacc

SEQ ID NO: 123034 - RNA, 22 nt, Artificial Sequence
  Synthetic
ugggagguuggucuuccaaacc

SEQ ID NO: 123035 - RNA, 23 nt, Artificial Sequence
  Synthetic
augggagguuggucuuccaaacc

SEQ ID NO: 123036 - RNA, 24 nt, Artificial Sequence
  Synthetic
caugggagguuggucuuccaaacc

SEQ ID NO: 123037 - RNA, 18 nt, Artificial Sequence
  Synthetic
cgucgcauggagaccacc

SEQ ID NO: 123038 - RNA, 19 nt, Artificial Sequence
  Synthetic
acgucgcauggagaccacc

SEQ ID NO: 123039 - RNA, 20 nt, Artificial Sequence
  Synthetic
cacgucgcauggagaccacc

SEQ ID NO: 123040 - RNA, 21 nt, Artificial Sequence
  Synthetic
gcacgucgcauggagaccacc

SEQ ID NO: 123041 - RNA, 22 nt, Artificial Sequence
  Synthetic
ugcacgucgcauggagaccacc

SEQ ID NO: 123042 - RNA, 23 nt, Artificial Sequence
  Synthetic
cugcacgucgcauggagaccacc

SEQ ID NO: 123043 - RNA, 24 nt, Artificial Sequence
  Synthetic
ucugcacgucgcauggagaccacc

SEQ ID NO: 123044 - RNA, 18 nt, Artificial Sequence
  Synthetic
  misc_feature (8)..(8): n is a, c, g, or u
  misc_feature (10)..(10): n is a, c, g, or u
uacucccnunucuccacc

SEQ ID NO: 123045 - RNA, 19 nt, Artificial Sequence
  Synthetic
  misc_feature (9)..(9): n is a, c, g, or u
  misc_feature (11)..(11): n is a, c, g, or u
cuacucccnunucuccacc

SEQ ID NO: 123046 - RNA, 20 nt, Artificial Sequence
  Synthetic
  misc_feature (10)..(10): n is a, c, g, or u
  misc_feature (12)..(12): n is a, c, g, or u
ccuacucccnunucuccacc

SEQ ID NO: 123047 - RNA, 21 nt, Artificial Sequence
  Synthetic
  misc_feature (11)..(11): n is a, c, g, or u
  misc_feature (13)..(13): n is a, c, g, or u
gccuacucccnunucuccacc

SEQ ID NO: 123048 - RNA, 22 nt, Artificial Sequence
  Synthetic
  misc_feature (12)..(12): n is a, c, g, or u
  misc_feature (14)..(14): n is a, c, g, or u
agccuacucccnunucuccacc

SEQ ID NO: 123049 - RNA, 23 nt, Artificial Sequence
  Synthetic
  misc_feature (13)..(13): n is a, c, g, or u
  misc_feature (15)..(15): n is a, c, g, or u
cagccuacucccnunucuccacc

SEQ ID NO: 123050 - RNA, 24 nt, Artificial Sequence
  Synthetic
  misc_feature (14)..(14): n is a, c, g, or u
  misc_feature (16)..(16): n is a, c, g, or u
gcagccuacucccnunucuccacc

SEQ ID NO: 123051 - RNA, 18 nt, Artificial Sequence
  Synthetic
uccuccugcauauagacc

SEQ ID NO: 123052 - RNA, 19 nt, Artificial Sequence
  Synthetic
cuccuccugcauauagacc

SEQ ID NO: 123053 - RNA, 20 nt, Artificial Sequence
  Synthetic
acuccuccugcauauagacc

SEQ ID NO: 123054 - RNA, 18 nt, Artificial Sequence
  Synthetic
caaugucaacgaccgacc

SEQ ID NO: 123055 - RNA, 19 nt, Artificial Sequence
  Synthetic
gcaaugucaacgaccgacc

SEQ ID NO: 123056 - RNA, 20 nt, Artificial Sequence
  Synthetic
agcaaugucaacgaccgacc

SEQ ID NO: 123057 - RNA, 21 nt, Artificial Sequence
  Synthetic
cagcaaugucaacgaccgacc

SEQ ID NO: 123058 - RNA, 22 nt, Artificial Sequence
  Synthetic
ucagcaaugucaacgaccgacc

SEQ ID NO: 123059 - RNA, 23 nt, Artificial Sequence
  Synthetic
uucagcaaugucaacgaccgacc

SEQ ID NO: 123060 - RNA, 24 nt, Artificial Sequence
  Synthetic
uuucagcaaugucaacgaccgacc

SEQ ID NO: 123061 - RNA, 18 nt, Artificial Sequence
  Synthetic
  misc_feature (4)..(5): n is a, c, g, or u
cugnnguaccgaccgacc

SEQ ID NO: 123062 - RNA, 19 nt, Artificial Sequence
  Synthetic
  misc_feature (1)..(1): n is a, c, g, or u
  misc_feature (5)..(6): n is a, c, g, or u
ncugnnguaccgaccgacc

SEQ ID NO: 123063 - RNA, 20 nt, Artificial Sequence
  Synthetic
  misc_feature (2)..(2): n is a, c, g, or u
  misc_feature (6)..(7): n is a, c, g, or u
gncugnnguaccgaccgacc

SEQ ID NO: 123064 - RNA, 21 nt, Artificial Sequence
  Synthetic
  misc_feature (3)..(3): n is a, c, g, or u
  misc_feature (7)..(8): n is a, c, g, or u
cgncugnnguaccgaccgacc

SEQ ID NO: 123065 - RNA, 22 nt, Artificial Sequence
  Synthetic
  misc_feature (4)..(4): n is a, c, g, or u
  misc_feature (8)..(9): n is a, c, g, or u
ccgncugnnguaccgaccgacc

SEQ ID NO: 123066 - RNA, 23 nt, Artificial Sequence
  Synthetic
  misc_feature (5)..(5): n is a, c, g, or u
  misc_feature (9)..(10): n is a, c, g, or u
uccgncugnnguaccgaccgacc

SEQ ID NO: 123067 - RNA, 24 nt, Artificial Sequence
  Synthetic
  misc_feature (6)..(6): n is a, c, g, or u
  misc_feature (10)..(11): n is a, c, g, or u
cuccgncugnnguaccgaccgacc

SEQ ID NO: 123068 - RNA, 18 nt, Artificial Sequence
  Synthetic
gggcuuucgcaaaauacc

SEQ ID NO: 123069 - RNA, 19 nt, Artificial Sequence
  Synthetic
ugggcuuucgcaaaauacc

SEQ ID NO: 123070 - RNA, 20 nt, Artificial Sequence
  Synthetic
uugggcuuucgcaaaauacc

SEQ ID NO: 123071 - RNA, 21 nt, Artificial Sequence
  Synthetic
cuugggcuuucgcaaaauacc

SEQ ID NO: 123072 - RNA, 22 nt, Artificial Sequence
  Synthetic
ucuugggcuuucgcaaaauacc

SEQ ID NO: 123073 - RNA, 23 nt, Artificial Sequence
  Synthetic
aucuugggcuuucgcaaaauacc

SEQ ID NO: 123074 - RNA, 24 nt, Artificial Sequence
  Synthetic
caucuugggcuuucgcaaaauacc

SEQ ID NO: 123075 - RNA, 18 nt, Artificial Sequence
  Synthetic
aaaaauccucacaauacc

SEQ ID NO: 123076 - RNA, 19 nt, Artificial Sequence
  Synthetic
caaaaauccucacaauacc

SEQ ID NO: 123077 - RNA, 20 nt, Artificial Sequence
  Synthetic
acaaaaauccucacaauacc

SEQ ID NO: 123078 - RNA, 21 nt, Artificial Sequence
  Synthetic
gacaaaaauccucacaauacc

SEQ ID NO: 123079 - RNA, 22 nt, Artificial Sequence
  Synthetic
ugacaaaaauccucacaauacc

SEQ ID NO: 123080 - RNA, 23 nt, Artificial Sequence
  Synthetic
uugacaaaaauccucacaauacc

SEQ ID NO: 123081 - RNA, 24 nt, Artificial Sequence
  Synthetic
guugacaaaaauccucacaauacc

SEQ ID NO: 123082 - RNA, 18 nt, Artificial Sequence
  Synthetic
  misc_feature (10)..(11): n is a, c, g, or u
caggguucannccucccc

SEQ ID NO: 123083 - RNA, 19 nt, Artificial Sequence
  Synthetic
  misc_feature (11)..(12): n is a, c, g, or u
ccaggguucannccucccc

SEQ ID NO: 123084 - RNA, 20 nt, Artificial Sequence
  Synthetic
  misc_feature (12)..(13): n is a, c, g, or u
gccaggguucannccucccc

SEQ ID NO: 123085 - RNA, 21 nt, Artificial Sequence
  Synthetic
  misc_feature (13)..(14): n is a, c, g, or u
ggccaggguucannccucccc

SEQ ID NO: 123086 - RNA, 22 nt, Artificial Sequence
  Synthetic
  misc_feature (14)..(15): n is a, c, g, or u
gggccaggguucannccucccc

SEQ ID NO: 123087 - RNA, 23 nt, Artificial Sequence
  Synthetic
  misc_feature (15)..(16): n is a, c, g, or u
cgggccaggguucannccucccc

SEQ ID NO: 123088 - RNA, 24 nt, Artificial Sequence
  Synthetic
  misc_feature (16)..(17): n is a, c, g, or u
ucgggccaggguucannccucccc

SEQ ID NO: 123089 - RNA, 18 nt, Artificial Sequence
  Synthetic
  misc_feature (5)..(5): n is a, c, g, or u
acgangaggcaggucccc

SEQ ID NO: 123090 - RNA, 19 nt, Artificial Sequence
  Synthetic
  misc_feature (6)..(6): n is a, c, g, or u
gacgangaggcaggucccc

SEQ ID NO: 123091 - RNA, 20 nt, Artificial Sequence
  Synthetic
  misc_feature (7)..(7): n is a, c, g, or u
agacgangaggcaggucccc

SEQ ID NO: 123092 - RNA, 21 nt, Artificial Sequence
  Synthetic
  misc_feature (8)..(8): n is a, c, g, or u
uagacgangaggcaggucccc

SEQ ID NO: 123093 - RNA, 22 nt, Artificial Sequence
  Synthetic
  misc_feature (9)..(9): n is a, c, g, or u
uuagacgangaggcaggucccc

SEQ ID NO: 123094 - RNA, 23 nt, Artificial Sequence
  Synthetic
  misc_feature (10)..(10): n is a, c, g, or u
guuagacgangaggcaggucccc

SEQ ID NO: 123095 - RNA, 24 nt, Artificial Sequence
  Synthetic
  misc_feature (11)..(11): n is a, c, g, or u
uguuagacgangaggcaggucccc

SEQ ID NO: 123096 - RNA, 18 nt, Artificial Sequence
  Synthetic
acuguugggguggagccc

SEQ ID NO: 123097 - RNA, 19 nt, Artificial Sequence
  Synthetic
gacuguugggguggagccc

SEQ ID NO: 123098 - RNA, 20 nt, Artificial Sequence
  Synthetic
ggacuguugggguggagccc

SEQ ID NO: 123099 - RNA, 21 nt, Artificial Sequence
  Synthetic
gggacuguugggguggagccc

SEQ ID NO: 123100 - RNA, 22 nt, Artificial Sequence
  Synthetic
ggggacuguugggguggagccc

SEQ ID NO: 123101 - RNA, 23 nt, Artificial Sequence
  Synthetic
gggggacuguugggguggagccc

SEQ ID NO: 123102 - RNA, 24 nt, Artificial Sequence
  Synthetic
ugggggacuguugggguggagccc

SEQ ID NO: 123103 - RNA, 18 nt, Artificial Sequence
  Synthetic
agaccaccgugaacgccc

SEQ ID NO: 123104 - RNA, 19 nt, Artificial Sequence
  Synthetic
gagaccaccgugaacgccc

SEQ ID NO: 123105 - RNA, 20 nt, Artificial Sequence
  Synthetic
ggagaccaccgugaacgccc

SEQ ID NO: 123106 - RNA, 21 nt, Artificial Sequence
  Synthetic
uggagaccaccgugaacgccc

SEQ ID NO: 123107 - RNA, 22 nt, Artificial Sequence
  Synthetic
auggagaccaccgugaacgccc

SEQ ID NO: 123108 - RNA, 23 nt, Artificial Sequence
  Synthetic
cauggagaccaccgugaacgccc

SEQ ID NO: 123109 - RNA, 24 nt, Artificial Sequence
  Synthetic
gcauggagaccaccgugaacgccc

SEQ ID NO: 123110 - RNA, 18 nt, Artificial Sequence
  Synthetic
ccgucggcgcugaauccc

SEQ ID NO: 123111 - RNA, 19 nt, Artificial Sequence
  Synthetic
cccgucggcgcugaauccc

SEQ ID NO: 123112 - RNA, 20 nt, Artificial Sequence
  Synthetic
ucccgucggcgcugaauccc

SEQ ID NO: 123113 - RNA, 18 nt, Artificial Sequence
  Synthetic
  misc_feature (11)..(12): n is a, c, g, or u
ccaggguucannccuccc

SEQ ID NO: 123114 - RNA, 19 nt, Artificial Sequence
  Synthetic
  misc_feature (12)..(13): n is a, c, g, or u
gccaggguucannccuccc

SEQ ID NO: 123115 - RNA, 20 nt, Artificial Sequence
  Synthetic
  misc_feature (13)..(14): n is a, c, g, or u
ggccaggguucannccuccc

SEQ ID NO: 123116 - RNA, 21 nt, Artificial Sequence
  Synthetic
  misc_feature (14)..(15): n is a, c, g, or u
gggccaggguucannccuccc

SEQ ID NO: 123117 - RNA, 22 nt, Artificial Sequence
  Synthetic
  misc_feature (15)..(16): n is a, c, g, or u
cgggccaggguucannccuccc

SEQ ID NO: 123118 - RNA, 23 nt, Artificial Sequence
  Synthetic
  misc_feature (16)..(17): n is a, c, g, or u
ucgggccaggguucannccuccc

SEQ ID NO: 123119 - RNA, 24 nt, Artificial Sequence
  Synthetic
  misc_feature (17)..(18): n is a, c, g, or u
uucgggccaggguucannccuccc

SEQ ID NO: 123120 - RNA, 18 nt, Artificial Sequence
  Synthetic
guccuuuguuuacguccc

SEQ ID NO: 123121 - RNA, 19 nt, Artificial Sequence
  Synthetic
cguccuuuguuuacguccc

SEQ ID NO: 123122 - RNA, 20 nt, Artificial Sequence
  Synthetic
acguccuuuguuuacguccc

SEQ ID NO: 123123 - RNA, 21 nt, Artificial Sequence
  Synthetic
gacguccuuuguuuacguccc

SEQ ID NO: 123124 - RNA, 22 nt, Artificial Sequence
  Synthetic
ggacguccuuuguuuacguccc

SEQ ID NO: 123125 - RNA, 23 nt, Artificial Sequence
  Synthetic
gggacguccuuuguuuacguccc

SEQ ID NO: 123126 - RNA, 24 nt, Artificial Sequence
  Synthetic
cgggacguccuuuguuuacguccc

SEQ ID NO: 123127 - RNA, 18 nt, Artificial Sequence
  Synthetic
  misc_feature (6)..(6): n is a, c, g, or u
gacgangaggcagguccc

SEQ ID NO: 123128 - RNA, 19 nt, Artificial Sequence
  Synthetic
  misc_feature (7)..(7): n is a, c, g, or u
agacgangaggcagguccc

SEQ ID NO: 123129 - RNA, 20 nt, Artificial Sequence
  Synthetic
  misc_feature (8)..(8): n is a, c, g, or u
uagacgangaggcagguccc

SEQ ID NO: 123130 - RNA, 21 nt, Artificial Sequence
  Synthetic
  misc_feature (9)..(9): n is a, c, g, or u
uuagacgangaggcagguccc

SEQ ID NO: 123131 - RNA, 22 nt, Artificial Sequence
  Synthetic
  misc_feature (10)..(10): n is a, c, g, or u
guuagacgangaggcagguccc

SEQ ID NO: 123132 - RNA, 23 nt, Artificial Sequence
  Synthetic
  misc_feature (11)..(11): n is a, c, g, or u
uguuagacgangaggcagguccc

SEQ ID NO: 123133 - RNA, 24 nt, Artificial Sequence
  Synthetic
  misc_feature (12)..(12): n is a, c, g, or u
uuguuagacgangaggcagguccc

SEQ ID NO: 123134 - RNA, 18 nt, Artificial Sequence
  Synthetic
uguccuacuguucaagcc

SEQ ID NO: 123135 - RNA, 19 nt, Artificial Sequence
  Synthetic
auguccuacuguucaagcc

SEQ ID NO: 123136 - RNA, 20 nt, Artificial Sequence
  Synthetic
cauguccuacuguucaagcc

SEQ ID NO: 123137 - RNA, 21 nt, Artificial Sequence
  Synthetic
ucauguccuacuguucaagcc

SEQ ID NO: 123138 - RNA, 22 nt, Artificial Sequence
  Synthetic
uucauguccuacuguucaagcc

SEQ ID NO: 123139 - RNA, 23 nt, Artificial Sequence
  Synthetic
guucauguccuacuguucaagcc

SEQ ID NO: 123140 - RNA, 24 nt, Artificial Sequence
  Synthetic
uguucauguccuacuguucaagcc

SEQ ID NO: 123141 - RNA, 18 nt, Artificial Sequence
  Synthetic
gacuguugggguggagcc

SEQ ID NO: 123142 - RNA, 19 nt, Artificial Sequence
  Synthetic
ggacuguugggguggagcc

SEQ ID NO: 123143 - RNA, 20 nt, Artificial Sequence
  Synthetic
gggacuguugggguggagcc

SEQ ID NO: 123144 - RNA, 21 nt, Artificial Sequence
  Synthetic
ggggacuguugggguggagcc

SEQ ID NO: 123145 - RNA, 22 nt, Artificial Sequence
  Synthetic
gggggacuguugggguggagcc

SEQ ID NO: 123146 - RNA, 23 nt, Artificial Sequence
  Synthetic
ugggggacuguugggguggagcc

SEQ ID NO: 123147 - RNA, 24 nt, Artificial Sequence
  Synthetic
augggggacuguugggguggagcc

SEQ ID NO: 123148 - RNA, 18 nt, Artificial Sequence
  Synthetic
gacaacuggccggacgcc

SEQ ID NO: 123149 - RNA, 19 nt, Artificial Sequence
  Synthetic
ggacaacuggccggacgcc

SEQ ID NO: 123150 - RNA, 20 nt, Artificial Sequence
  Synthetic
aggacaacuggccggacgcc

SEQ ID NO: 123151 - RNA, 18 nt, Artificial Sequence
  Synthetic
gcucuguaucgggaggcc

SEQ ID NO: 123152 - RNA, 19 nt, Artificial Sequence
  Synthetic
ugcucuguaucgggaggcc

SEQ ID NO: 123153 - RNA, 20 nt, Artificial Sequence
  Synthetic
cugcucuguaucgggaggcc

SEQ ID NO: 123154 - RNA, 21 nt, Artificial Sequence
  Synthetic
ucugcucuguaucgggaggcc

SEQ ID NO: 123155 - RNA, 22 nt, Artificial Sequence
  Synthetic
cucugcucuguaucgggaggcc

SEQ ID NO: 123156 - RNA, 23 nt, Artificial Sequence
  Synthetic
ccucugcucuguaucgggaggcc

SEQ ID NO: 123157 - RNA, 24 nt, Artificial Sequence
  Synthetic
gccucugcucuguaucgggaggcc

SEQ ID NO: 123158 - RNA, 18 nt, Artificial Sequence
  Synthetic
  misc_feature (5)..(5): n is a, c, g, or u
ucaanguuaauaugggcc

SEQ ID NO: 123159 - RNA, 19 nt, Artificial Sequence
  Synthetic
  misc_feature (6)..(6): n is a, c, g, or u
gucaanguuaauaugggcc

SEQ ID NO: 123160 - RNA, 20 nt, Artificial Sequence
  Synthetic
  misc_feature (7)..(7): n is a, c, g, or u
ugucaanguuaauaugggcc

SEQ ID NO: 123161 - RNA, 21 nt, Artificial Sequence
  Synthetic
  misc_feature (8)..(8): n is a, c, g, or u
augucaanguuaauaugggcc

SEQ ID NO: 123162 - RNA, 22 nt, Artificial Sequence
  Synthetic
  misc_feature (9)..(9): n is a, c, g, or u
uaugucaanguuaauaugggcc

SEQ ID NO: 123163 - RNA, 23 nt, Artificial Sequence
  Synthetic
  misc_feature (10)..(10): n is a, c, g, or u
cuaugucaanguuaauaugggcc

SEQ ID NO: 123164 - RNA, 24 nt, Artificial Sequence
  Synthetic
  misc_feature (11)..(11): n is a, c, g, or u
gcuaugucaanguuaauaugggcc

SEQ ID NO: 123165 - RNA, 18 nt, Artificial Sequence
  Synthetic
  misc_feature (14)..(14): n is a, c, g, or u
ggggcuuggccaunggcc

SEQ ID NO: 123166 - RNA, 19 nt, Artificial Sequence
  Synthetic
  misc_feature (15)..(15): n is a, c, g, or u
uggggcuuggccaunggcc

SEQ ID NO: 123167 - RNA, 20 nt, Artificial Sequence
  Synthetic
  misc_feature (16)..(16): n is a, c, g, or u
uuggggcuuggccaunggcc

SEQ ID NO: 123168 - RNA, 21 nt, Artificial Sequence
  Synthetic
  misc_feature (17)..(17): n is a, c, g, or u
guuggggcuuggccaunggcc

SEQ ID NO: 123169 - RNA, 22 nt, Artificial Sequence
  Synthetic
  misc_feature (18)..(18): n is a, c, g, or u
gguuggggcuuggccaunggcc

SEQ ID NO: 123170 - RNA, 23 nt, Artificial Sequence
  Synthetic
  misc_feature (19)..(19): n is a, c, g, or u
ugguuggggcuuggccaunggcc

SEQ ID NO: 123171 - RNA, 24 nt, Artificial Sequence
  Synthetic
  misc_feature (20)..(20): n is a, c, g, or u
cugguuggggcuuggccaunggcc

SEQ ID NO: 123172 - RNA, 18 nt, Artificial Sequence
  Synthetic
acugguuggggcuuggcc

SEQ ID NO: 123173 - RNA, 19 nt, Artificial Sequence
  Synthetic
cacugguuggggcuuggcc

SEQ ID NO: 123174 - RNA, 20 nt, Artificial Sequence
  Synthetic
ccacugguuggggcuuggcc

SEQ ID NO: 123175 - RNA, 18 nt, Artificial Sequence
  Synthetic
  misc_feature (2)..(2): n is a, c, g, or u
cnuacucacaacugugcc

SEQ ID NO: 123176 - RNA, 19 nt, Artificial Sequence
  Synthetic
  misc_feature (3)..(3): n is a, c, g, or u
gcnuacucacaacugugcc

SEQ ID NO: 123177 - RNA, 20 nt, Artificial Sequence
  Synthetic
  misc_feature (4)..(4): n is a, c, g, or u
ggcnuacucacaacugugcc

SEQ ID NO: 123178 - RNA, 21 nt, Artificial Sequence
  Synthetic
  misc_feature (5)..(5): n is a, c, g, or u
gggcnuacucacaacugugcc

SEQ ID NO: 123179 - RNA, 22 nt, Artificial Sequence
  Synthetic
  misc_feature (6)..(6): n is a, c, g, or u
agggcnuacucacaacugugcc

SEQ ID NO: 123180 - RNA, 23 nt, Artificial Sequence
  Synthetic
  misc_feature (7)..(7): n is a, c, g, or u
cagggcnuacucacaacugugcc

SEQ ID NO: 123181 - RNA, 24 nt, Artificial Sequence
  Synthetic
  misc_feature (8)..(8): n is a, c, g, or u
ucagggcnuacucacaacugugcc

SEQ ID NO: 123182 - RNA, 18 nt, Artificial Sequence
  Synthetic
uguuacuaaauauuugcc

SEQ ID NO: 123183 - RNA, 19 nt, Artificial Sequence
  Synthetic
auguuacuaaauauuugcc

SEQ ID NO: 123184 - RNA, 20 nt, Artificial Sequence
  Synthetic
aauguuacuaaauauuugcc

SEQ ID NO: 123185 - RNA, 21 nt, Artificial Sequence
  Synthetic
  misc_feature (1)..(1): n is a, c, g, or u
naauguuacuaaauauuugcc

SEQ ID NO: 123186 - RNA, 22 nt, Artificial Sequence
  Synthetic
  misc_feature (2)..(2): n is a, c, g, or u
cnaauguuacuaaauauuugcc

SEQ ID NO: 123187 - RNA, 23 nt, Artificial Sequence
  Synthetic
  misc_feature (3)..(3): n is a, c, g, or u
ccnaauguuacuaaauauuugcc

SEQ ID NO: 123188 - RNA, 24 nt, Artificial Sequence
  Synthetic
  misc_feature (4)..(4): n is a, c, g, or u
uccnaauguuacuaaauauuugcc

SEQ ID NO: 123189 - RNA, 18 nt, Artificial Sequence
  Synthetic
ucuuucuguccccaaucc

SEQ ID NO: 123190 - RNA, 19 nt, Artificial Sequence
  Synthetic
aucuuucuguccccaaucc

SEQ ID NO: 123191 - RNA, 20 nt, Artificial Sequence
  Synthetic
aaucuuucuguccccaaucc

SEQ ID NO: 123192 - RNA, 21 nt, Artificial Sequence
  Synthetic
aaaucuuucuguccccaaucc

SEQ ID NO: 123193 - RNA, 22 nt, Artificial Sequence
  Synthetic
caaaucuuucuguccccaaucc

SEQ ID NO: 123194 - RNA, 23 nt, Artificial Sequence
  Synthetic
acaaaucuuucuguccccaaucc

SEQ ID NO: 123195 - RNA, 24 nt, Artificial Sequence
  Synthetic
gacaaaucuuucuguccccaaucc

SEQ ID NO: 123196 - RNA, 18 nt, Artificial Sequence
  Synthetic
cccgucggcgcugaaucc

SEQ ID NO: 123197 - RNA, 19 nt, Artificial Sequence
  Synthetic
ucccgucggcgcugaaucc

SEQ ID NO: 123198 - RNA, 20 nt, Artificial Sequence
  Synthetic
gucccgucggcgcugaaucc

SEQ ID NO: 123199 - RNA, 18 nt, Artificial Sequence
  Synthetic
uuggaagauccagcaucc

SEQ ID NO: 123200 - RNA, 19 nt, Artificial Sequence
  Synthetic
uuuggaagauccagcaucc

SEQ ID NO: 123201 - RNA, 20 nt, Artificial Sequence
  Synthetic
auuuggaagauccagcaucc

SEQ ID NO: 123202 - RNA, 21 nt, Artificial Sequence
  Synthetic
aauuuggaagauccagcaucc

SEQ ID NO: 123203 - RNA, 22 nt, Artificial Sequence
  Synthetic
uaauuuggaagauccagcaucc

SEQ ID NO: 123204 - RNA, 23 nt, Artificial Sequence
  Synthetic
guaauuuggaagauccagcaucc

SEQ ID NO: 123205 - RNA, 24 nt, Artificial Sequence
  Synthetic
aguaauuuggaagauccagcaucc

SEQ ID NO: 123206 - RNA, 18 nt, Artificial Sequence
  Synthetic
  misc_feature (7)..(7): n is a, c, g, or u
ucuaagngacacucaucc

SEQ ID NO: 123207 - RNA, 19 nt, Artificial Sequence
  Synthetic
  misc_feature (8)..(8): n is a, c, g, or u
cucuaagngacacucaucc

SEQ ID NO: 123208 - RNA, 20 nt, Artificial Sequence
  Synthetic
  misc_feature (9)..(9): n is a, c, g, or u
ccucuaagngacacucaucc

SEQ ID NO: 123209 - RNA, 21 nt, Artificial Sequence
  Synthetic
  misc_feature (10)..(10): n is a, c, g, or u
accucuaagngacacucaucc

SEQ ID NO: 123210 - RNA, 22 nt, Artificial Sequence
  Synthetic
  misc_feature (11)..(11): n is a, c, g, or u
caccucuaagngacacucaucc

SEQ ID NO: 123211 - RNA, 23 nt, Artificial Sequence
  Synthetic
  misc_feature (12)..(12): n is a, c, g, or u
ccaccucuaagngacacucaucc

SEQ ID NO: 123212 - RNA, 24 nt, Artificial Sequence
  Synthetic
  misc_feature (13)..(13): n is a, c, g, or u
uccaccucuaagngacacucaucc

SEQ ID NO: 123213 - RNA, 18 nt, Artificial Sequence
  Synthetic
acaucgcaucaggacucc

SEQ ID NO: 123214 - RNA, 19 nt, Artificial Sequence
  Synthetic
aacaucgcaucaggacucc

SEQ ID NO: 123215 - RNA, 20 nt, Artificial Sequence
  Synthetic
gaacaucgcaucaggacucc

SEQ ID NO: 123216 - RNA, 21 nt, Artificial Sequence
  Synthetic
agaacaucgcaucaggacucc

SEQ ID NO: 123217 - RNA, 22 nt, Artificial Sequence
  Synthetic
gagaacaucgcaucaggacucc

SEQ ID NO: 123218 - RNA, 23 nt, Artificial Sequence
  Synthetic
ggagaacaucgcaucaggacucc

SEQ ID NO: 123219 - RNA, 24 nt, Artificial Sequence
  Synthetic
uggagaacaucgcaucaggacucc

SEQ ID NO: 123220 - RNA, 18 nt, Artificial Sequence
  Synthetic
cccgcggacgaccccucc

SEQ ID NO: 123221 - RNA, 19 nt, Artificial Sequence
  Synthetic
ucccgcggacgaccccucc

SEQ ID NO: 123222 - RNA, 20 nt, Artificial Sequence
  Synthetic
aucccgcggacgaccccucc

SEQ ID NO: 123223 - RNA, 21 nt, Artificial Sequence
  Synthetic
aaucccgcggacgaccccucc

SEQ ID NO: 123224 - RNA, 22 nt, Artificial Sequence
  Synthetic
gaaucccgcggacgaccccucc

SEQ ID NO: 123225 - RNA, 23 nt, Artificial Sequence
  Synthetic
ugaaucccgcggacgaccccucc

SEQ ID NO: 123226 - RNA, 24 nt, Artificial Sequence
  Synthetic
cugaaucccgcggacgaccccucc

SEQ ID NO: 123227 - RNA, 18 nt, Artificial Sequence
  Synthetic
  misc_feature (7)..(7): n is a, c, g, or u
agacgangaggcaggucc

SEQ ID NO: 123228 - RNA, 19 nt, Artificial Sequence
  Synthetic
  misc_feature (8)..(8): n is a, c, g, or u
uagacgangaggcaggucc

SEQ ID NO: 123229 - RNA, 20 nt, Artificial Sequence
  Synthetic
  misc_feature (9)..(9): n is a, c, g, or u
uuagacgangaggcaggucc

SEQ ID NO: 123230 - RNA, 21 nt, Artificial Sequence
  Synthetic
  misc_feature (10)..(10): n is a, c, g, or u
guuagacgangaggcaggucc

SEQ ID NO: 123231 - RNA, 22 nt, Artificial Sequence
  Synthetic
  misc_feature (11)..(11): n is a, c, g, or u
uguuagacgangaggcaggucc

SEQ ID NO: 123232 - RNA, 23 nt, Artificial Sequence
  Synthetic
  misc_feature (12)..(12): n is a, c, g, or u
uuguuagacgangaggcaggucc

SEQ ID NO: 123233 - RNA, 24 nt, Artificial Sequence
  Synthetic
  misc_feature (13)..(13): n is a, c, g, or u
guuguuagacgangaggcaggucc

SEQ ID NO: 123234 - RNA, 18 nt, Artificial Sequence
  Synthetic
  misc_feature (12)..(12): n is a, c, g, or u
  misc_feature (15)..(15): n is a, c, g, or u
aauucugucguncunucc

SEQ ID NO: 123235 - RNA, 19 nt, Artificial Sequence
  Synthetic
  misc_feature (13)..(13): n is a, c, g, or u
  misc_feature (16)..(16): n is a, c, g, or u
caauucugucguncunucc

SEQ ID NO: 123236 - RNA, 20 nt, Artificial Sequence
  Synthetic
  misc_feature (14)..(14): n is a, c, g, or u
  misc_feature (17)..(17): n is a, c, g, or u
acaauucugucguncunucc

SEQ ID NO: 123237 - RNA, 21 nt, Artificial Sequence
  Synthetic
  misc_feature (15)..(15): n is a, c, g, or u
  misc_feature (18)..(18): n is a, c, g, or u
gacaauucugucguncunucc

SEQ ID NO: 123238 - RNA, 22 nt, Artificial Sequence
  Synthetic
  misc_feature (16)..(16): n is a, c, g, or u
  misc_feature (19)..(19): n is a, c, g, or u
ugacaauucugucguncunucc

SEQ ID NO: 123239 - RNA, 23 nt, Artificial Sequence
  Synthetic
  misc_feature (17)..(17): n is a, c, g, or u
  misc_feature (20)..(20): n is a, c, g, or u
cugacaauucugucguncunucc

SEQ ID NO: 123240 - RNA, 24 nt, Artificial Sequence
  Synthetic
  misc_feature (18)..(18): n is a, c, g, or u
  misc_feature (21)..(21): n is a, c, g, or u
acugacaauucugucguncunucc

SEQ ID NO: 123241 - RNA, 18 nt, Artificial Sequence
  Synthetic
aaaagauggggauauucc

SEQ ID NO: 123242 - RNA, 19 nt, Artificial Sequence
  Synthetic
aaaaagauggggauauucc

SEQ ID NO: 123243 - RNA, 20 nt, Artificial Sequence
  Synthetic
caaaaagauggggauauucc

SEQ ID NO: 123244 - RNA, 21 nt, Artificial Sequence
  Synthetic
acaaaaagauggggauauucc

SEQ ID NO: 123245 - RNA, 22 nt, Artificial Sequence
  Synthetic
aacaaaaagauggggauauucc

SEQ ID NO: 123246 - RNA, 23 nt, Artificial Sequence
  Synthetic
aaacaaaaagauggggauauucc

SEQ ID NO: 123247 - RNA, 24 nt, Artificial Sequence
  Synthetic
aaaacaaaaagauggggauauucc

SEQ ID NO: 123248 - RNA, 18 nt, Artificial Sequence
  Synthetic
ucucaauguuaguauucc

SEQ ID NO: 123249 - RNA, 19 nt, Artificial Sequence
  Synthetic
aucucaauguuaguauucc

SEQ ID NO: 123250 - RNA, 20 nt, Artificial Sequence
  Synthetic
aaucucaauguuaguauucc

SEQ ID NO: 123251 - RNA, 21 nt, Artificial Sequence
  Synthetic
gaaucucaauguuaguauucc

SEQ ID NO: 123252 - RNA, 22 nt, Artificial Sequence
  Synthetic
ggaaucucaauguuaguauucc

SEQ ID NO: 123253 - RNA, 23 nt, Artificial Sequence
  Synthetic
gggaaucucaauguuaguauucc

SEQ ID NO: 123254 - RNA, 24 nt, Artificial Sequence
  Synthetic
cgggaaucucaauguuaguauucc

SEQ ID NO: 123255 - RNA, 18 nt, Artificial Sequence
  Synthetic
  misc_feature (1)..(1): n is a, c, g, or u
nuguuuuaggaaacuucc

SEQ ID NO: 123256 - RNA, 19 nt, Artificial Sequence
  Synthetic
  misc_feature (1)..(2): n is a, c, g, or u
nnuguuuuaggaaacuucc

SEQ ID NO: 123257 - RNA, 20 nt, Artificial Sequence
  Synthetic
  misc_feature (1)..(3): n is a, c, g, or u
nnnuguuuuaggaaacuucc

SEQ ID NO: 123258 - RNA, 21 nt, Artificial Sequence
  Synthetic
  misc_feature (2)..(4): n is a, c, g, or u
annnuguuuuaggaaacuucc

SEQ ID NO: 123259 - RNA, 22 nt, Artificial Sequence
  Synthetic
  misc_feature (3)..(5): n is a, c, g, or u
aannnuguuuuaggaaacuucc

SEQ ID NO: 123260 - RNA, 23 nt, Artificial Sequence
  Synthetic
  misc_feature (4)..(6): n is a, c, g, or u
aaannnuguuuuaggaaacuucc

SEQ ID NO: 123261 - RNA, 24 nt, Artificial Sequence
  Synthetic
  misc_feature (5)..(7): n is a, c, g, or u
caaannnuguuuuaggaaacuucc

SEQ ID NO: 123262 - RNA, 18 nt, Artificial Sequence
  Synthetic
uaucuuaucaacacuucc

SEQ ID NO: 123263 - RNA, 19 nt, Artificial Sequence
  Synthetic
cuaucuuaucaacacuucc

SEQ ID NO: 123264 - RNA, 20 nt, Artificial Sequence
  Synthetic
ccuaucuuaucaacacuucc

SEQ ID NO: 123265 - RNA, 21 nt, Artificial Sequence
  Synthetic
cccuaucuuaucaacacuucc

SEQ ID NO: 123266 - RNA, 22 nt, Artificial Sequence
  Synthetic
ccccuaucuuaucaacacuucc

SEQ ID NO: 123267 - RNA, 23 nt, Artificial Sequence
  Synthetic
gccccuaucuuaucaacacuucc

SEQ ID NO: 123268 - RNA, 24 nt, Artificial Sequence
  Synthetic
ugccccuaucuuaucaacacuucc

SEQ ID NO: 123269 - RNA, 18 nt, Artificial Sequence
  Synthetic
  misc_feature (11)..(11): n is a, c, g, or u
gggaacaagancuacagc

SEQ ID NO: 123270 - RNA, 19 nt, Artificial Sequence
  Synthetic
  misc_feature (12)..(12): n is a, c, g, or u
ugggaacaagancuacagc

SEQ ID NO: 123271 - RNA, 20 nt, Artificial Sequence
  Synthetic
  misc_feature (13)..(13): n is a, c, g, or u
uugggaacaagancuacagc

SEQ ID NO: 123272 - RNA, 21 nt, Artificial Sequence
  Synthetic
  misc_feature (14)..(14): n is a, c, g, or u
cuugggaacaagancuacagc

SEQ ID NO: 123273 - RNA, 22 nt, Artificial Sequence
  Synthetic
  misc_feature (15)..(15): n is a, c, g, or u
ucuugggaacaagancuacagc

SEQ ID NO: 123274 - RNA, 23 nt, Artificial Sequence
  Synthetic
  misc_feature (16)..(16): n is a, c, g, or u
uucuugggaacaagancuacagc

SEQ ID NO: 123275 - RNA, 24 nt, Artificial Sequence
  Synthetic
  misc_feature (17)..(17): n is a, c, g, or u
auucuugggaacaagancuacagc

SEQ ID NO: 123276 - RNA, 18 nt, Artificial Sequence
  Synthetic
  misc_feature (12)..(12): n is a, c, g, or u
ggaucaucaacnaccagc

SEQ ID NO: 123277 - RNA, 19 nt, Artificial Sequence
  Synthetic
  misc_feature (13)..(13): n is a, c, g, or u
aggaucaucaacnaccagc

SEQ ID NO: 123278 - RNA, 20 nt, Artificial Sequence
  Synthetic
  misc_feature (14)..(14): n is a, c, g, or u
caggaucaucaacnaccagc

SEQ ID NO: 123279 - RNA, 21 nt, Artificial Sequence
  Synthetic
  misc_feature (15)..(15): n is a, c, g, or u
ccaggaucaucaacnaccagc

SEQ ID NO: 123280 - RNA, 22 nt, Artificial Sequence
  Synthetic
  misc_feature (16)..(16): n is a, c, g, or u
uccaggaucaucaacnaccagc

SEQ ID NO: 123281 - RNA, 23 nt, Artificial Sequence
  Synthetic
  misc_feature (17)..(17): n is a, c, g, or u
uuccaggaucaucaacnaccagc

SEQ ID NO: 123282 - RNA, 24 nt, Artificial Sequence
  Synthetic
  misc_feature (18)..(18): n is a, c, g, or u
auuccaggaucaucaacnaccagc

SEQ ID NO: 123283 - RNA, 18 nt, Artificial Sequence
  Synthetic
gaccccucccggggccgc

SEQ ID NO: 123284 - RNA, 19 nt, Artificial Sequence
  Synthetic
cgaccccucccggggccgc

SEQ ID NO: 123285 - RNA, 20 nt, Artificial Sequence
  Synthetic
acgaccccucccggggccgc

SEQ ID NO: 123286 - RNA, 21 nt, Artificial Sequence
  Synthetic
gacgaccccucccggggccgc

SEQ ID NO: 123287 - RNA, 22 nt, Artificial Sequence
  Synthetic
ggacgaccccucccggggccgc

SEQ ID NO: 123288 - RNA, 23 nt, Artificial Sequence
  Synthetic
cggacgaccccucccggggccgc

SEQ ID NO: 123289 - RNA, 24 nt, Artificial Sequence
  Synthetic
gcggacgaccccucccggggccgc

SEQ ID NO: 123290 - RNA, 18 nt, Artificial Sequence
  Synthetic
gaacauggagaacaucgc

SEQ ID NO: 123291 - RNA, 19 nt, Artificial Sequence
  Synthetic
cgaacauggagaacaucgc

SEQ ID NO: 123292 - RNA, 20 nt, Artificial Sequence
  Synthetic
ccgaacauggagaacaucgc

SEQ ID NO: 123293 - RNA, 18 nt, Artificial Sequence
  Synthetic
uucaccucugcacgucgc

SEQ ID NO: 123294 - RNA, 19 nt, Artificial Sequence
  Synthetic
cuucaccucugcacgucgc

SEQ ID NO: 123295 - RNA, 20 nt, Artificial Sequence
  Synthetic
gcuucaccucugcacgucgc

SEQ ID NO: 123296 - RNA, 21 nt, Artificial Sequence
  Synthetic
cgcuucaccucugcacgucgc

SEQ ID NO: 123297 - RNA, 22 nt, Artificial Sequence
  Synthetic
ucgcuucaccucugcacgucgc

SEQ ID NO: 123298 - RNA, 23 nt, Artificial Sequence
  Synthetic
uucgcuucaccucugcacgucgc

SEQ ID NO: 123299 - RNA, 24 nt, Artificial Sequence
  Synthetic
cuucgcuucaccucugcacgucgc

SEQ ID NO: 123300 - RNA, 18 nt, Artificial Sequence
  Synthetic
ucucaaucgccgcgucgc

SEQ ID NO: 123301 - RNA, 19 nt, Artificial Sequence
  Synthetic
gucucaaucgccgcgucgc

SEQ ID NO: 123302 - RNA, 20 nt, Artificial Sequence
  Synthetic
ggucucaaucgccgcgucgc

SEQ ID NO: 123303 - RNA, 18 nt, Artificial Sequence
  Synthetic
uccaaaccucgaaaaggc

SEQ ID NO: 123304 - RNA, 19 nt, Artificial Sequence
  Synthetic
uuccaaaccucgaaaaggc

SEQ ID NO: 123305 - RNA, 20 nt, Artificial Sequence
  Synthetic
cuuccaaaccucgaaaaggc

SEQ ID NO: 123306 - RNA, 21 nt, Artificial Sequence
  Synthetic
ucuuccaaaccucgaaaaggc

SEQ ID NO: 123307 - RNA, 22 nt, Artificial Sequence
  Synthetic
gucuuccaaaccucgaaaaggc

SEQ ID NO: 123308 - RNA, 23 nt, Artificial Sequence
  Synthetic
ggucuuccaaaccucgaaaaggc

SEQ ID NO: 123309 - RNA, 24 nt, Artificial Sequence
  Synthetic
uggucuuccaaaccucgaaaaggc

SEQ ID NO: 123310 - RNA, 18 nt, Artificial Sequence
  Synthetic
gggguggagcccucaggc

SEQ ID NO: 123311 - RNA, 19 nt, Artificial Sequence
  Synthetic
ugggguggagcccucaggc

SEQ ID NO: 123312 - RNA, 20 nt, Artificial Sequence
  Synthetic
uugggguggagcccucaggc

SEQ ID NO: 123313 - RNA, 21 nt, Artificial Sequence
  Synthetic
guugggguggagcccucaggc

SEQ ID NO: 123314 - RNA, 22 nt, Artificial Sequence
  Synthetic
uguugggguggagcccucaggc

SEQ ID NO: 123315 - RNA, 23 nt, Artificial Sequence
  Synthetic
cuguugggguggagcccucaggc

SEQ ID NO: 123316 - RNA, 24 nt, Artificial Sequence
  Synthetic
acuguugggguggagcccucaggc

SEQ ID NO: 123317 - RNA, 18 nt, Artificial Sequence
  Synthetic
  misc_feature (1)..(1): n is a, c, g, or u
nucuuuguacuaggaggc

SEQ ID NO: 123318 - RNA, 19 nt, Artificial Sequence
  Synthetic
  misc_feature (2)..(2): n is a, c, g, or u
gnucuuuguacuaggaggc

SEQ ID NO: 123319 - RNA, 20 nt, Artificial Sequence
  Synthetic
  misc_feature (1)..(1): n is a, c, g, or u
  misc_feature (3)..(3): n is a, c, g, or u
ngnucuuuguacuaggaggc

SEQ ID NO: 123320 - RNA, 21 nt, Artificial Sequence
  Synthetic
  misc_feature (2)..(2): n is a, c, g, or u
  misc_feature (4)..(4): n is a, c, g, or u
angnucuuuguacuaggaggc

SEQ ID NO: 123321 - RNA, 22 nt, Artificial Sequence
  Synthetic
  misc_feature (3)..(3): n is a, c, g, or u
  misc_feature (5)..(5): n is a, c, g, or u
aangnucuuuguacuaggaggc

SEQ ID NO: 123322 - RNA, 23 nt, Artificial Sequence
  Synthetic
  misc_feature (4)..(4): n is a, c, g, or u
  misc_feature (6)..(6): n is a, c, g, or u
uaangnucuuuguacuaggaggc

SEQ ID NO: 123323 - RNA, 24 nt, Artificial Sequence
  Synthetic
  misc_feature (5)..(5): n is a, c, g, or u
  misc_feature (7)..(7): n is a, c, g, or u
uuaangnucuuuguacuaggaggc

SEQ ID NO: 123324 - RNA, 18 nt, Artificial Sequence
  Synthetic
ugcucuguaucgggaggc

SEQ ID NO: 123325 - RNA, 19 nt, Artificial Sequence
  Synthetic
cugcucuguaucgggaggc

SEQ ID NO: 123326 - RNA, 20 nt, Artificial Sequence
  Synthetic
ucugcucuguaucgggaggc

SEQ ID NO: 123327 - RNA, 21 nt, Artificial Sequence
  Synthetic
cucugcucuguaucgggaggc

SEQ ID NO: 123328 - RNA, 22 nt, Artificial Sequence
  Synthetic
ccucugcucuguaucgggaggc

SEQ ID NO: 123329 - RNA, 23 nt, Artificial Sequence
  Synthetic
gccucugcucuguaucgggaggc

SEQ ID NO: 123330 - RNA, 24 nt, Artificial Sequence
  Synthetic
cgccucugcucuguaucgggaggc

SEQ ID NO: 123331 - RNA, 18 nt, Artificial Sequence
  Synthetic
uuuaccccguugcucggc

SEQ ID NO: 123332 - RNA, 19 nt, Artificial Sequence
  Synthetic
cuuuaccccguugcucggc

SEQ ID NO: 123333 - RNA, 20 nt, Artificial Sequence
  Synthetic
ccuuuaccccguugcucggc

SEQ ID NO: 123334 - RNA, 18 nt, Artificial Sequence
  Synthetic
uguuuacgucccgucggc

SEQ ID NO: 123335 - RNA, 19 nt, Artificial Sequence
  Synthetic
uuguuuacgucccgucggc

SEQ ID NO: 123336 - RNA, 20 nt, Artificial Sequence
  Synthetic
uuuguuuacgucccgucggc

SEQ ID NO: 123337 - RNA, 21 nt, Artificial Sequence
  Synthetic
cuuuguuuacgucccgucggc

SEQ ID NO: 123338 - RNA, 22 nt, Artificial Sequence
  Synthetic
ccuuuguuuacgucccgucggc

SEQ ID NO: 123339 - RNA, 23 nt, Artificial Sequence
  Synthetic
uccuuuguuuacgucccgucggc

SEQ ID NO: 123340 - RNA, 24 nt, Artificial Sequence
  Synthetic
guccuuuguuuacgucccgucggc

SEQ ID NO: 123341 - RNA, 18 nt, Artificial Sequence
  Synthetic
  misc_feature (14)..(14): n is a, c, g, or u
cuuggguggcuuungggc

SEQ ID NO: 123342 - RNA, 19 nt, Artificial Sequence
  Synthetic
  misc_feature (15)..(15): n is a, c, g, or u
ccuuggguggcuuungggc

SEQ ID NO: 123343 - RNA, 20 nt, Artificial Sequence
  Synthetic
  misc_feature (16)..(16): n is a, c, g, or u
gccuuggguggcuuungggc

SEQ ID NO: 123344 - RNA, 21 nt, Artificial Sequence
  Synthetic
  misc_feature (17)..(17): n is a, c, g, or u
ugccuuggguggcuuungggc

SEQ ID NO: 123345 - RNA, 22 nt, Artificial Sequence
  Synthetic
  misc_feature (18)..(18): n is a, c, g, or u
gugccuuggguggcuuungggc

SEQ ID NO: 123346 - RNA, 23 nt, Artificial Sequence
  Synthetic
  misc_feature (19)..(19): n is a, c, g, or u
ugugccuuggguggcuuungggc

SEQ ID NO: 123347 - RNA, 24 nt, Artificial Sequence
  Synthetic
  misc_feature (20)..(20): n is a, c, g, or u
cugugccuuggguggcuuungggc

SEQ ID NO: 123348 - RNA, 18 nt, Artificial Sequence
  Synthetic
  misc_feature (6)..(6): n is a, c, g, or u
gucaanguuaauaugggc

SEQ ID NO: 123349 - RNA, 19 nt, Artificial Sequence
  Synthetic
  misc_feature (7)..(7): n is a, c, g, or u
ugucaanguuaauaugggc

SEQ ID NO: 123350 - RNA, 20 nt, Artificial Sequence
  Synthetic
  misc_feature (8)..(8): n is a, c, g, or u
augucaanguuaauaugggc

SEQ ID NO: 123351 - RNA, 21 nt, Artificial Sequence
  Synthetic
  misc_feature (9)..(9): n is a, c, g, or u
uaugucaanguuaauaugggc

SEQ ID NO: 123352 - RNA, 22 nt, Artificial Sequence
  Synthetic
  misc_feature (10)..(10): n is a, c, g, or u
cuaugucaanguuaauaugggc

SEQ ID NO: 123353 - RNA, 23 nt, Artificial Sequence
  Synthetic
  misc_feature (11)..(11): n is a, c, g, or u
gcuaugucaanguuaauaugggc

SEQ ID NO: 123354 - RNA, 24 nt, Artificial Sequence
  Synthetic
  misc_feature (12)..(12): n is a, c, g, or u
agcuaugucaanguuaauaugggc

SEQ ID NO: 123355 - RNA, 18 nt, Artificial Sequence
  Synthetic
cucauccucaggccaugc

SEQ ID NO: 123356 - RNA, 19 nt, Artificial Sequence
  Synthetic
acucauccucaggccaugc

SEQ ID NO: 123357 - RNA, 20 nt, Artificial Sequence
  Synthetic
cacucauccucaggccaugc

SEQ ID NO: 123358 - RNA, 21 nt, Artificial Sequence
  Synthetic
acacucauccucaggccaugc

SEQ ID NO: 123359 - RNA, 22 nt, Artificial Sequence
  Synthetic
gacacucauccucaggccaugc

SEQ ID NO: 123360 - RNA, 23 nt, Artificial Sequence
  Synthetic
  misc_feature (1)..(1): n is a, c, g, or u
ngacacucauccucaggccaugc

SEQ ID NO: 123361 - RNA, 24 nt, Artificial Sequence
  Synthetic
  misc_feature (2)..(2): n is a, c, g, or u
gngacacucauccucaggccaugc

SEQ ID NO: 123362 - RNA, 18 nt, Artificial Sequence
  Synthetic
  misc_feature (2)..(2): n is a, c, g, or u
unggccaucagcgcaugc

SEQ ID NO: 123363 - RNA, 19 nt, Artificial Sequence
  Synthetic
  misc_feature (3)..(3): n is a, c, g, or u
aunggccaucagcgcaugc

SEQ ID NO: 123364 - RNA, 20 nt, Artificial Sequence
  Synthetic
  misc_feature (4)..(4): n is a, c, g, or u
caunggccaucagcgcaugc

SEQ ID NO: 123365 - RNA, 21 nt, Artificial Sequence
  Synthetic
  misc_feature (5)..(5): n is a, c, g, or u
ccaunggccaucagcgcaugc

SEQ ID NO: 123366 - RNA, 22 nt, Artificial Sequence
  Synthetic
  misc_feature (6)..(6): n is a, c, g, or u
gccaunggccaucagcgcaugc

SEQ ID NO: 123367 - RNA, 23 nt, Artificial Sequence
  Synthetic
  misc_feature (7)..(7): n is a, c, g, or u
ggccaunggccaucagcgcaugc

SEQ ID NO: 123368 - RNA, 24 nt, Artificial Sequence
  Synthetic
  misc_feature (8)..(8): n is a, c, g, or u
uggccaunggccaucagcgcaugc

SEQ ID NO: 123369 - RNA, 18 nt, Artificial Sequence
  Synthetic
  misc_feature (9)..(9): n is a, c, g, or u
acgcccacnggaaccugc

SEQ ID NO: 123370 - RNA, 19 nt, Artificial Sequence
  Synthetic
  misc_feature (10)..(10): n is a, c, g, or u
aacgcccacnggaaccugc

SEQ ID NO: 123371 - RNA, 20 nt, Artificial Sequence
  Synthetic
  misc_feature (11)..(11): n is a, c, g, or u
gaacgcccacnggaaccugc

SEQ ID NO: 123372 - RNA, 21 nt, Artificial Sequence
  Synthetic
  misc_feature (12)..(12): n is a, c, g, or u
ugaacgcccacnggaaccugc

SEQ ID NO: 123373 - RNA, 22 nt, Artificial Sequence
  Synthetic
  misc_feature (13)..(13): n is a, c, g, or u
gugaacgcccacnggaaccugc

SEQ ID NO: 123374 - RNA, 23 nt, Artificial Sequence
  Synthetic
  misc_feature (14)..(14): n is a, c, g, or u
cgugaacgcccacnggaaccugc

SEQ ID NO: 123375 - RNA, 24 nt, Artificial Sequence
  Synthetic
  misc_feature (15)..(15): n is a, c, g, or u
ccgugaacgcccacnggaaccugc

SEQ ID NO: 123376 - RNA, 18 nt, Artificial Sequence
  Synthetic
aggaacagugagcccugc

SEQ ID NO: 123377 - RNA, 19 nt, Artificial Sequence
  Synthetic
caggaacagugagcccugc

SEQ ID NO: 123378 - RNA, 20 nt, Artificial Sequence
  Synthetic
ucaggaacagugagcccugc

SEQ ID NO: 123379 - RNA, 21 nt, Artificial Sequence
  Synthetic
uucaggaacagugagcccugc

SEQ ID NO: 123380 - RNA, 22 nt, Artificial Sequence
  Synthetic
guucaggaacagugagcccugc

SEQ ID NO: 123381 - RNA, 23 nt, Artificial Sequence
  Synthetic
aguucaggaacagugagcccugc

SEQ ID NO: 123382 - RNA, 24 nt, Artificial Sequence
  Synthetic
caguucaggaacagugagcccugc

SEQ ID NO: 123383 - RNA, 18 nt, Artificial Sequence
  Synthetic
cugccaacuggauccugc

SEQ ID NO: 123384 - RNA, 19 nt, Artificial Sequence
  Synthetic
gcugccaacuggauccugc

SEQ ID NO: 123385 - RNA, 20 nt, Artificial Sequence
  Synthetic
ugcugccaacuggauccugc

SEQ ID NO: 123386 - RNA, 21 nt, Artificial Sequence
  Synthetic
gugcugccaacuggauccugc

SEQ ID NO: 123387 - RNA, 22 nt, Artificial Sequence
  Synthetic
ugugcugccaacuggauccugc

SEQ ID NO: 123388 - RNA, 23 nt, Artificial Sequence
  Synthetic
cugugcugccaacuggauccugc

SEQ ID NO: 123389 - RNA, 24 nt, Artificial Sequence
  Synthetic
gcugugcugccaacuggauccugc

SEQ ID NO: 123390 - RNA, 18 nt, Artificial Sequence
  Synthetic
  misc_feature (10)..(10): n is a, c, g, or u
aaccugcacnacuccugc

SEQ ID NO: 123391 - RNA, 19 nt, Artificial Sequence
  Synthetic
  misc_feature (11)..(11): n is a, c, g, or u
aaaccugcacnacuccugc

SEQ ID NO: 123392 - RNA, 20 nt, Artificial Sequence
  Synthetic
  misc_feature (12)..(12): n is a, c, g, or u
aaaaccugcacnacuccugc

SEQ ID NO: 123393 - RNA, 21 nt, Artificial Sequence
  Synthetic
  misc_feature (13)..(13): n is a, c, g, or u
caaaaccugcacnacuccugc

SEQ ID NO: 123394 - RNA, 22 nt, Artificial Sequence
  Synthetic
  misc_feature (14)..(14): n is a, c, g, or u
gcaaaaccugcacnacuccugc

SEQ ID NO: 123395 - RNA, 23 nt, Artificial Sequence
  Synthetic
  misc_feature (15)..(15): n is a, c, g, or u
ugcaaaaccugcacnacuccugc

SEQ ID NO: 123396 - RNA, 24 nt, Artificial Sequence
  Synthetic
  misc_feature (16)..(16): n is a, c, g, or u
augcaaaaccugcacnacuccugc

SEQ ID NO: 123397 - RNA, 18 nt, Artificial Sequence
  Synthetic
caagccuccaagcugugc

SEQ ID NO: 123398 - RNA, 19 nt, Artificial Sequence
  Synthetic
ucaagccuccaagcugugc

SEQ ID NO: 123399 - RNA, 20 nt, Artificial Sequence
  Synthetic
uucaagccuccaagcugugc

SEQ ID NO: 123400 - RNA, 21 nt, Artificial Sequence
  Synthetic
guucaagccuccaagcugugc

SEQ ID NO: 123401 - RNA, 22 nt, Artificial Sequence
  Synthetic
uguucaagccuccaagcugugc

SEQ ID NO: 123402 - RNA, 23 nt, Artificial Sequence
  Synthetic
cuguucaagccuccaagcugugc

SEQ ID NO: 123403 - RNA, 24 nt, Artificial Sequence
  Synthetic
acuguucaagccuccaagcugugc

SEQ ID NO: 123404 - RNA, 18 nt, Artificial Sequence
  Synthetic
accugcccaaggucuugc

SEQ ID NO: 123405 - RNA, 19 nt, Artificial Sequence
  Synthetic
aaccugcccaaggucuugc

SEQ ID NO: 123406 - RNA, 20 nt, Artificial Sequence
  Synthetic
gaaccugcccaaggucuugc

SEQ ID NO: 123407 - RNA, 21 nt, Artificial Sequence
  Synthetic
ggaaccugcccaaggucuugc

SEQ ID NO: 123408 - RNA, 22 nt, Artificial Sequence
  Synthetic
  misc_feature (1)..(1): n is a, c, g, or u
nggaaccugcccaaggucuugc

SEQ ID NO: 123409 - RNA, 23 nt, Artificial Sequence
  Synthetic
  misc_feature (2)..(2): n is a, c, g, or u
cnggaaccugcccaaggucuugc

SEQ ID NO: 123410 - RNA, 24 nt, Artificial Sequence
  Synthetic
  misc_feature (3)..(3): n is a, c, g, or u
acnggaaccugcccaaggucuugc

SEQ ID NO: 123411 - RNA, 18 nt, Artificial Sequence
  Synthetic
uuccugacauucauuugc

SEQ ID NO: 123412 - RNA, 19 nt, Artificial Sequence
  Synthetic
uuuccugacauucauuugc

SEQ ID NO: 123413 - RNA, 20 nt, Artificial Sequence
  Synthetic
uuuuccugacauucauuugc

SEQ ID NO: 123414 - RNA, 21 nt, Artificial Sequence
  Synthetic
cuuuuccugacauucauuugc

SEQ ID NO: 123415 - RNA, 22 nt, Artificial Sequence
  Synthetic
ucuuuuccugacauucauuugc

SEQ ID NO: 123416 - RNA, 23 nt, Artificial Sequence
  Synthetic
uucuuuuccugacauucauuugc

SEQ ID NO: 123417 - RNA, 24 nt, Artificial Sequence
  Synthetic
cuucuuuuccugacauucauuugc

SEQ ID NO: 123418 - RNA, 18 nt, Artificial Sequence
  Synthetic
  misc_feature (17)..(17): n is a, c, g, or u
auucuugggaacaaganc

SEQ ID NO: 123419 - RNA, 19 nt, Artificial Sequence
  Synthetic
  misc_feature (18)..(18): n is a, c, g, or u
uauucuugggaacaaganc

SEQ ID NO: 123420 - RNA, 20 nt, Artificial Sequence
  Synthetic
  misc_feature (19)..(19): n is a, c, g, or u
auauucuugggaacaaganc

SEQ ID NO: 123421 - RNA, 21 nt, Artificial Sequence
  Synthetic
  misc_feature (20)..(20): n is a, c, g, or u
cauauucuugggaacaaganc

SEQ ID NO: 123422 - RNA, 22 nt, Artificial Sequence
  Synthetic
  misc_feature (21)..(21): n is a, c, g, or u
ccauauucuugggaacaaganc

SEQ ID NO: 123423 - RNA, 23 nt, Artificial Sequence
  Synthetic
  misc_feature (22)..(22): n is a, c, g, or u
accauauucuugggaacaaganc

SEQ ID NO: 123424 - RNA, 24 nt, Artificial Sequence
  Synthetic
  misc_feature (23)..(23): n is a, c, g, or u
caccauauucuugggaacaaganc

SEQ ID NO: 123425 - RNA, 18 nt, Artificial Sequence
  Synthetic
  misc_feature (17)..(17): n is a, c, g, or u
uuaguauuccuuggacnc

SEQ ID NO: 123426 - RNA, 19 nt, Artificial Sequence
  Synthetic
  misc_feature (18)..(18): n is a, c, g, or u
guuaguauuccuuggacnc

SEQ ID NO: 123427 - RNA, 20 nt, Artificial Sequence
  Synthetic
  misc_feature (19)..(19): n is a, c, g, or u
uguuaguauuccuuggacnc

SEQ ID NO: 123428 - RNA, 21 nt, Artificial Sequence
  Synthetic
  misc_feature (20)..(20): n is a, c, g, or u
auguuaguauuccuuggacnc

SEQ ID NO: 123429 - RNA, 22 nt, Artificial Sequence
  Synthetic
  misc_feature (21)..(21): n is a, c, g, or u
aauguuaguauuccuuggacnc

SEQ ID NO: 123430 - RNA, 23 nt, Artificial Sequence
  Synthetic
  misc_feature (22)..(22): n is a, c, g, or u
caauguuaguauuccuuggacnc

SEQ ID NO: 123431 - RNA, 24 nt, Artificial Sequence
  Synthetic
  misc_feature (23)..(23): n is a, c, g, or u
ucaauguuaguauuccuuggacnc

SEQ ID NO: 123432 - RNA, 18 nt, Artificial Sequence
  Synthetic
  misc_feature (17)..(17): n is a, c, g, or u
auugggaccucaacccnc

SEQ ID NO: 123433 - RNA, 19 nt, Artificial Sequence
  Synthetic
  misc_feature (18)..(18): n is a, c, g, or u
gauugggaccucaacccnc

SEQ ID NO: 123434 - RNA, 20 nt, Artificial Sequence
  Synthetic
  misc_feature (19)..(19): n is a, c, g, or u
agauugggaccucaacccnc

SEQ ID NO: 123435 - RNA, 21 nt, Artificial Sequence
  Synthetic
  misc_feature (20)..(20): n is a, c, g, or u
cagauugggaccucaacccnc

SEQ ID NO: 123436 - RNA, 22 nt, Artificial Sequence
  Synthetic
  misc_feature (21)..(21): n is a, c, g, or u
ccagauugggaccucaacccnc

SEQ ID NO: 123437 - RNA, 23 nt, Artificial Sequence
  Synthetic
  misc_feature (22)..(22): n is a, c, g, or u
uccagauugggaccucaacccnc

SEQ ID NO: 123438 - RNA, 24 nt, Artificial Sequence
  Synthetic
  misc_feature (23)..(23): n is a, c, g, or u
auccagauugggaccucaacccnc

SEQ ID NO: 123439 - RNA, 18 nt, Artificial Sequence
  Synthetic
  misc_feature (11)..(11): n is a, c, g, or u
  misc_feature (17)..(17): n is a, c, g, or u
guuggggcacnuugccnc

SEQ ID NO: 123440 - RNA, 19 nt, Artificial Sequence
  Synthetic
  misc_feature (1)..(1): n is a, c, g, or u
  misc_feature (12)..(12): n is a, c, g, or u
  misc_feature (18)..(18): n is a, c, g, or u
nguuggggcacnuugccnc

SEQ ID NO: 123441 - RNA, 20 nt, Artificial Sequence
  Synthetic
  misc_feature (1)..(2): n is a, c, g, or u
  misc_feature (13)..(13): n is a, c, g, or u
  misc_feature (19)..(19): n is a, c, g, or u
nnguuggggcacnuugccnc

SEQ ID NO: 123442 - RNA, 21 nt, Artificial Sequence
  Synthetic
  misc_feature (2)..(3): n is a, c, g, or u
  misc_feature (14)..(14): n is a, c, g, or u
  misc_feature (20)..(20): n is a, c, g, or u
gnnguuggggcacnuugccnc

SEQ ID NO: 123443 - RNA, 22 nt, Artificial Sequence
  Synthetic
  misc_feature (3)..(4): n is a, c, g, or u
  misc_feature (15)..(15): n is a, c, g, or u
  misc_feature (21)..(21): n is a, c, g, or u
ggnnguuggggcacnuugccnc

SEQ ID NO: 123444 - RNA, 23 nt, Artificial Sequence
  Synthetic
  misc_feature (4)..(5): n is a, c, g, or u
  misc_feature (16)..(16): n is a, c, g, or u
  misc_feature (22)..(22): n is a, c, g, or u
uggnnguuggggcacnuugccnc

SEQ ID NO: 123445 - RNA, 24 nt, Artificial Sequence
  Synthetic
  misc_feature (5)..(6): n is a, c, g, or u
  misc_feature (17)..(17): n is a, c, g, or u
  misc_feature (23)..(23): n is a, c, g, or u
uuggnnguuggggcacnuugccnc

SEQ ID NO: 123446 - RNA, 18 nt, Artificial Sequence
  Synthetic
  misc_feature (2)..(2): n is a, c, g, or u
  misc_feature (5)..(5): n is a, c, g, or u
  misc_feature (17)..(17): n is a, c, g, or u
cncangaacauauugunc

SEQ ID NO: 123447 - RNA, 19 nt, Artificial Sequence
  Synthetic
  misc_feature (3)..(3): n is a, c, g, or u
  misc_feature (6)..(6): n is a, c, g, or u
  misc_feature (18)..(18): n is a, c, g, or u
ccncangaacauauugunc

SEQ ID NO: 123448 - RNA, 20 nt, Artificial Sequence
  Synthetic
  misc_feature (4)..(4): n is a, c, g, or u
  misc_feature (7)..(7): n is a, c, g, or u
  misc_feature (19)..(19): n is a, c, g, or u
gccncangaacauauugunc

SEQ ID NO: 123449 - RNA, 21 nt, Artificial Sequence
  Synthetic
  misc_feature (5)..(5): n is a, c, g, or u
  misc_feature (8)..(8): n is a, c, g, or u
  misc_feature (20)..(20): n is a, c, g, or u
ugccncangaacauauugunc

SEQ ID NO: 123450 - RNA, 22 nt, Artificial Sequence
  Synthetic
  misc_feature (6)..(6): n is a, c, g, or u
  misc_feature (9)..(9): n is a, c, g, or u
  misc_feature (21)..(21): n is a, c, g, or u
uugccncangaacauauugunc

SEQ ID NO: 123451 - RNA, 23 nt, Artificial Sequence
  Synthetic
  misc_feature (1)..(1): n is a, c, g, or u
  misc_feature (7)..(7): n is a, c, g, or u
  misc_feature (10)..(10): n is a, c, g, or u
  misc_feature (22)..(22): n is a, c, g, or u
nuugccncangaacauauugunc

SEQ ID NO: 123452 - RNA, 24 nt, Artificial Sequence
  Synthetic
  misc_feature (2)..(2): n is a, c, g, or u
  misc_feature (8)..(8): n is a, c, g, or u
  misc_feature (11)..(11): n is a, c, g, or u
  misc_feature (23)..(23): n is a, c, g, or u
cnuugccncangaacauauugunc

SEQ ID NO: 123453 - RNA, 18 nt, Artificial Sequence
  Synthetic
ucgcagaagaucucaauc

SEQ ID NO: 123454 - RNA, 19 nt, Artificial Sequence
  Synthetic
gucgcagaagaucucaauc

SEQ ID NO: 123455 - RNA, 20 nt, Artificial Sequence
  Synthetic
cgucgcagaagaucucaauc

SEQ ID NO: 123456 - RNA, 18 nt, Artificial Sequence
  Synthetic
uuuggaagauccagcauc

SEQ ID NO: 123457 - RNA, 19 nt, Artificial Sequence
  Synthetic
auuuggaagauccagcauc

SEQ ID NO: 123458 - RNA, 20 nt, Artificial Sequence
  Synthetic
aauuuggaagauccagcauc

SEQ ID NO: 123459 - RNA, 21 nt, Artificial Sequence
  Synthetic
uaauuuggaagauccagcauc

SEQ ID NO: 123460 - RNA, 22 nt, Artificial Sequence
  Synthetic
guaauuuggaagauccagcauc

SEQ ID NO: 123461 - RNA, 23 nt, Artificial Sequence
  Synthetic
aguaauuuggaagauccagcauc

SEQ ID NO: 123462 - RNA, 24 nt, Artificial Sequence
  Synthetic
aaguaauuuggaagauccagcauc

SEQ ID NO: 123463 - RNA, 18 nt, Artificial Sequence
  Synthetic
uauucccaucccaucauc

SEQ ID NO: 123464 - RNA, 19 nt, Artificial Sequence
  Synthetic
guauucccaucccaucauc

SEQ ID NO: 123465 - RNA, 20 nt, Artificial Sequence
  Synthetic
uguauucccaucccaucauc

SEQ ID NO: 123466 - RNA, 21 nt, Artificial Sequence
  Synthetic
cuguauucccaucccaucauc

SEQ ID NO: 123467 - RNA, 22 nt, Artificial Sequence
  Synthetic
ccuguauucccaucccaucauc

SEQ ID NO: 123468 - RNA, 23 nt, Artificial Sequence
  Synthetic
accuguauucccaucccaucauc

SEQ ID NO: 123469 - RNA, 24 nt, Artificial Sequence
  Synthetic
caccuguauucccaucccaucauc

SEQ ID NO: 123470 - RNA, 18 nt, Artificial Sequence
  Synthetic
  misc_feature (8)..(8): n is a, c, g, or u
cucuaagngacacucauc

SEQ ID NO: 123471 - RNA, 19 nt, Artificial Sequence
  Synthetic
  misc_feature (9)..(9): n is a, c, g, or u
ccucuaagngacacucauc

SEQ ID NO: 123472 - RNA, 20 nt, Artificial Sequence
  Synthetic
  misc_feature (10)..(10): n is a, c, g, or u
accucuaagngacacucauc

SEQ ID NO: 123473 - RNA, 21 nt, Artificial Sequence
  Synthetic
  misc_feature (11)..(11): n is a, c, g, or u
caccucuaagngacacucauc

SEQ ID NO: 123474 - RNA, 22 nt, Artificial Sequence
  Synthetic
  misc_feature (12)..(12): n is a, c, g, or u
ccaccucuaagngacacucauc

SEQ ID NO: 123475 - RNA, 23 nt, Artificial Sequence
  Synthetic
  misc_feature (13)..(13): n is a, c, g, or u
uccaccucuaagngacacucauc

SEQ ID NO: 123476 - RNA, 24 nt, Artificial Sequence
  Synthetic
  misc_feature (14)..(14): n is a, c, g, or u
cuccaccucuaagngacacucauc

SEQ ID NO: 123477 - RNA, 18 nt, Artificial Sequence
  Synthetic
accaaacucuucaagauc

SEQ ID NO: 123478 - RNA, 19 nt, Artificial Sequence
  Synthetic
caccaaacucuucaagauc

SEQ ID NO: 123479 - RNA, 20 nt, Artificial Sequence
  Synthetic
ccaccaaacucuucaagauc

SEQ ID NO: 123480 - RNA, 21 nt, Artificial Sequence
  Synthetic
uccaccaaacucuucaagauc

SEQ ID NO: 123481 - RNA, 22 nt, Artificial Sequence
  Synthetic
uuccaccaaacucuucaagauc

SEQ ID NO: 123482 - RNA, 23 nt, Artificial Sequence
  Synthetic
  misc_feature (1)..(1): n is a, c, g, or u
nuuccaccaaacucuucaagauc

SEQ ID NO: 123483 - RNA, 24 nt, Artificial Sequence
  Synthetic
  misc_feature (2)..(2): n is a, c, g, or u
cnuuccaccaaacucuucaagauc

SEQ ID NO: 123484 - RNA, 18 nt, Artificial Sequence
  Synthetic
uccucuaauuccaggauc

SEQ ID NO: 123485 - RNA, 19 nt, Artificial Sequence
  Synthetic
guccucuaauuccaggauc

SEQ ID NO: 123486 - RNA, 20 nt, Artificial Sequence
  Synthetic
uguccucuaauuccaggauc

SEQ ID NO: 123487 - RNA, 21 nt, Artificial Sequence
  Synthetic
uuguccucuaauuccaggauc

SEQ ID NO: 123488 - RNA, 22 nt, Artificial Sequence
  Synthetic
uuuguccucuaauuccaggauc

SEQ ID NO: 123489 - RNA, 23 nt, Artificial Sequence
  Synthetic
guuuguccucuaauuccaggauc

SEQ ID NO: 123490 - RNA, 24 nt, Artificial Sequence
  Synthetic
cguuuguccucuaauuccaggauc

SEQ ID NO: 123491 - RNA, 18 nt, Artificial Sequence
  Synthetic
ccgccucugcucuguauc

SEQ ID NO: 123492 - RNA, 19 nt, Artificial Sequence
  Synthetic
accgccucugcucuguauc

SEQ ID NO: 123493 - RNA, 20 nt, Artificial Sequence
  Synthetic
caccgccucugcucuguauc

SEQ ID NO: 123494 - RNA, 21 nt, Artificial Sequence
  Synthetic
acaccgccucugcucuguauc

SEQ ID NO: 123495 - RNA, 22 nt, Artificial Sequence
  Synthetic
gacaccgccucugcucuguauc

SEQ ID NO: 123496 - RNA, 23 nt, Artificial Sequence
  Synthetic
cgacaccgccucugcucuguauc

SEQ ID NO: 123497 - RNA, 24 nt, Artificial Sequence
  Synthetic
ucgacaccgccucugcucuguauc

SEQ ID NO: 123498 - RNA, 18 nt, Artificial Sequence
  Synthetic
  misc_feature (2)..(2): n is a, c, g, or u
  misc_feature (11)..(11): n is a, c, g, or u
gnaucaaaccnuauuauc

SEQ ID NO: 123499 - RNA, 19 nt, Artificial Sequence
  Synthetic
  misc_feature (3)..(3): n is a, c, g, or u
  misc_feature (12)..(12): n is a, c, g, or u
ggnaucaaaccnuauuauc

SEQ ID NO: 123500 - RNA, 20 nt, Artificial Sequence
  Synthetic
  misc_feature (4)..(4): n is a, c, g, or u
  misc_feature (13)..(13): n is a, c, g, or u
aggnaucaaaccnuauuauc

SEQ ID NO: 123501 - RNA, 21 nt, Artificial Sequence
  Synthetic
  misc_feature (5)..(5): n is a, c, g, or u
  misc_feature (14)..(14): n is a, c, g, or u
aaggnaucaaaccnuauuauc

SEQ ID NO: 123502 - RNA, 22 nt, Artificial Sequence
  Synthetic
  misc_feature (6)..(6): n is a, c, g, or u
  misc_feature (15)..(15): n is a, c, g, or u
aaaggnaucaaaccnuauuauc

SEQ ID NO: 123503 - RNA, 23 nt, Artificial Sequence
  Synthetic
  misc_feature (7)..(7): n is a, c, g, or u
  misc_feature (16)..(16): n is a, c, g, or u
uaaaggnaucaaaccnuauuauc

SEQ ID NO: 123504 - RNA, 24 nt, Artificial Sequence
  Synthetic
  misc_feature (8)..(8): n is a, c, g, or u
  misc_feature (17)..(17): n is a, c, g, or u
auaaaggnaucaaaccnuauuauc

SEQ ID NO: 123505 - RNA, 18 nt, Artificial Sequence
  Synthetic
cauaucgucaaucuuauc

SEQ ID NO: 123506 - RNA, 19 nt, Artificial Sequence
  Synthetic
ccauaucgucaaucuuauc

SEQ ID NO: 123507 - RNA, 20 nt, Artificial Sequence
  Synthetic
  misc_feature (1)..(1): n is a, c, g, or u
nccauaucgucaaucuuauc

SEQ ID NO: 123508 - RNA, 21 nt, Artificial Sequence
  Synthetic
  misc_feature (2)..(2): n is a, c, g, or u
unccauaucgucaaucuuauc

SEQ ID NO: 123509 - RNA, 22 nt, Artificial Sequence
  Synthetic
  misc_feature (3)..(3): n is a, c, g, or u
cunccauaucgucaaucuuauc

SEQ ID NO: 123510 - RNA, 23 nt, Artificial Sequence
  Synthetic
  misc_feature (4)..(4): n is a, c, g, or u
ucunccauaucgucaaucuuauc

SEQ ID NO: 123511 - RNA, 24 nt, Artificial Sequence
  Synthetic
  misc_feature (5)..(5): n is a, c, g, or u
cucunccauaucgucaaucuuauc

SEQ ID NO: 123512 - RNA, 18 nt, Artificial Sequence
  Synthetic
caauuuguccugguuauc

SEQ ID NO: 123513 - RNA, 19 nt, Artificial Sequence
  Synthetic
ccaauuuguccugguuauc

SEQ ID NO: 123514 - RNA, 20 nt, Artificial Sequence
  Synthetic
uccaauuuguccugguuauc

SEQ ID NO: 123515 - RNA, 21 nt, Artificial Sequence
  Synthetic
cuccaauuuguccugguuauc

SEQ ID NO: 123516 - RNA, 22 nt, Artificial Sequence
  Synthetic
ccuccaauuuguccugguuauc

SEQ ID NO: 123517 - RNA, 23 nt, Artificial Sequence
  Synthetic
uccuccaauuuguccugguuauc

SEQ ID NO: 123518 - RNA, 24 nt, Artificial Sequence
  Synthetic
guccuccaauuuguccugguuauc

SEQ ID NO: 123519 - RNA, 18 nt, Artificial Sequence
  Synthetic
  misc_feature (5)..(5): n is a, c, g, or u
ccacnuuccaccaaacuc

SEQ ID NO: 123520 - RNA, 19 nt, Artificial Sequence
  Synthetic
  misc_feature (6)..(6): n is a, c, g, or u
accacnuuccaccaaacuc

SEQ ID NO: 123521 - RNA, 20 nt, Artificial Sequence
  Synthetic
  misc_feature (7)..(7): n is a, c, g, or u
caccacnuuccaccaaacuc

SEQ ID NO: 123522 - RNA, 18 nt, Artificial Sequence
  Synthetic
  misc_feature (1)..(1): n is a, c, g, or u
  misc_feature (9)..(9): n is a, c, g, or u
  misc_feature (12)..(12): n is a, c, g, or u
nggucuggngcnaaacuc

SEQ ID NO: 123523 - RNA, 19 nt, Artificial Sequence
  Synthetic
  misc_feature (2)..(2): n is a, c, g, or u
  misc_feature (10)..(10): n is a, c, g, or u
  misc_feature (13)..(13): n is a, c, g, or u
cnggucuggngcnaaacuc

SEQ ID NO: 123524 - RNA, 20 nt, Artificial Sequence
  Synthetic
  misc_feature (3)..(3): n is a, c, g, or u
  misc_feature (11)..(11): n is a, c, g, or u
  misc_feature (14)..(14): n is a, c, g, or u
gcnggucuggngcnaaacuc

SEQ ID NO: 123525 - RNA, 21 nt, Artificial Sequence
  Synthetic
  misc_feature (4)..(4): n is a, c, g, or u
  misc_feature (12)..(12): n is a, c, g, or u
  misc_feature (15)..(15): n is a, c, g, or u
agcnggucuggngcnaaacuc

SEQ ID NO: 123526 - RNA, 22 nt, Artificial Sequence
  Synthetic
  misc_feature (5)..(5): n is a, c, g, or u
  misc_feature (13)..(13): n is a, c, g, or u
  misc_feature (16)..(16): n is a, c, g, or u
cagcnggucuggngcnaaacuc

SEQ ID NO: 123527 - RNA, 23 nt, Artificial Sequence
  Synthetic
  misc_feature (6)..(6): n is a, c, g, or u
  misc_feature (14)..(14): n is a, c, g, or u
  misc_feature (17)..(17): n is a, c, g, or u
gcagcnggucuggngcnaaacuc

SEQ ID NO: 123528 - RNA, 24 nt, Artificial Sequence
  Synthetic
  misc_feature (7)..(7): n is a, c, g, or u
  misc_feature (15)..(15): n is a, c, g, or u
  misc_feature (18)..(18): n is a, c, g, or u
cgcagcnggucuggngcnaaacuc

SEQ ID NO: 123529 - RNA, 18 nt, Artificial Sequence
  Synthetic
ugcauucaaagccaacuc

SEQ ID NO: 123530 - RNA, 19 nt, Artificial Sequence
  Synthetic
cugcauucaaagccaacuc

SEQ ID NO: 123531 - RNA, 20 nt, Artificial Sequence
  Synthetic
ccugcauucaaagccaacuc

SEQ ID NO: 123532 - RNA, 21 nt, Artificial Sequence
  Synthetic
cccugcauucaaagccaacuc

SEQ ID NO: 123533 - RNA, 22 nt, Artificial Sequence
  Synthetic
acccugcauucaaagccaacuc

SEQ ID NO: 123534 - RNA, 23 nt, Artificial Sequence
  Synthetic
gacccugcauucaaagccaacuc

SEQ ID NO: 123535 - RNA, 24 nt, Artificial Sequence
  Synthetic
ggacccugcauucaaagccaacuc

SEQ ID NO: 123536 - RNA, 18 nt, Artificial Sequence
  Synthetic
ccaaaucuccagucacuc

SEQ ID NO: 123537 - RNA, 19 nt, Artificial Sequence
  Synthetic
cccaaaucuccagucacuc

SEQ ID NO: 123538 - RNA, 20 nt, Artificial Sequence
  Synthetic
ucccaaaucuccagucacuc

SEQ ID NO: 123539 - RNA, 21 nt, Artificial Sequence
  Synthetic
gucccaaaucuccagucacuc

SEQ ID NO: 123540 - RNA, 22 nt, Artificial Sequence
  Synthetic
agucccaaaucuccagucacuc

SEQ ID NO: 123541 - RNA, 23 nt, Artificial Sequence
  Synthetic
cagucccaaaucuccagucacuc

SEQ ID NO: 123542 - RNA, 24 nt, Artificial Sequence
  Synthetic
gcagucccaaaucuccagucacuc

SEQ ID NO: 123543 - RNA, 18 nt, Artificial Sequence
  Synthetic
aacaucgcaucaggacuc

SEQ ID NO: 123544 - RNA, 19 nt, Artificial Sequence
  Synthetic
gaacaucgcaucaggacuc

SEQ ID NO: 123545 - RNA, 20 nt, Artificial Sequence
  Synthetic
agaacaucgcaucaggacuc

SEQ ID NO: 123546 - RNA, 21 nt, Artificial Sequence
  Synthetic
gagaacaucgcaucaggacuc

SEQ ID NO: 123547 - RNA, 22 nt, Artificial Sequence
  Synthetic
ggagaacaucgcaucaggacuc

SEQ ID NO: 123548 - RNA, 23 nt, Artificial Sequence
  Synthetic
uggagaacaucgcaucaggacuc

SEQ ID NO: 123549 - RNA, 24 nt, Artificial Sequence
  Synthetic
auggagaacaucgcaucaggacuc

SEQ ID NO: 123550 - RNA, 18 nt, Artificial Sequence
  Synthetic
ucuugcauaagaggacuc

SEQ ID NO: 123551 - RNA, 19 nt, Artificial Sequence
  Synthetic
gucuugcauaagaggacuc

SEQ ID NO: 123552 - RNA, 20 nt, Artificial Sequence
  Synthetic
ggucuugcauaagaggacuc

SEQ ID NO: 123553 - RNA, 21 nt, Artificial Sequence
  Synthetic
aggucuugcauaagaggacuc

SEQ ID NO: 123554 - RNA, 22 nt, Artificial Sequence
  Synthetic
aaggucuugcauaagaggacuc

SEQ ID NO: 123555 - RNA, 23 nt, Artificial Sequence
  Synthetic
caaggucuugcauaagaggacuc

SEQ ID NO: 123556 - RNA, 24 nt, Artificial Sequence
  Synthetic
ccaaggucuugcauaagaggacuc

SEQ ID NO: 123557 - RNA, 18 nt, Artificial Sequence
  Synthetic
  misc_feature (14)..(14): n is a, c, g, or u
gacauuauuuacanacuc

SEQ ID NO: 123558 - RNA, 19 nt, Artificial Sequence
  Synthetic
  misc_feature (1)..(1): n is a, c, g, or u
  misc_feature (15)..(15): n is a, c, g, or u
ngacauuauuuacanacuc

SEQ ID NO: 123559 - RNA, 20 nt, Artificial Sequence
  Synthetic
  misc_feature (1)..(2): n is a, c, g, or u
  misc_feature (16)..(16): n is a, c, g, or u
nngacauuauuuacanacuc

SEQ ID NO: 123560 - RNA, 21 nt, Artificial Sequence
  Synthetic
  misc_feature (2)..(3): n is a, c, g, or u
  misc_feature (17)..(17): n is a, c, g, or u
cnngacauuauuuacanacuc

SEQ ID NO: 123561 - RNA, 22 nt, Artificial Sequence
  Synthetic
  misc_feature (3)..(4): n is a, c, g, or u
  misc_feature (18)..(18): n is a, c, g, or u
acnngacauuauuuacanacuc

SEQ ID NO: 123562 - RNA, 23 nt, Artificial Sequence
  Synthetic
  misc_feature (4)..(5): n is a, c, g, or u
  misc_feature (19)..(19): n is a, c, g, or u
gacnngacauuauuuacanacuc

SEQ ID NO: 123563 - RNA, 24 nt, Artificial Sequence
  Synthetic
  misc_feature (5)..(6): n is a, c, g, or u
  misc_feature (20)..(20): n is a, c, g, or u
agacnngacauuauuuacanacuc

SEQ ID NO: 123564 - RNA, 18 nt, Artificial Sequence
  Synthetic
guuggucuuccaaaccuc

SEQ ID NO: 123565 - RNA, 19 nt, Artificial Sequence
  Synthetic
gguuggucuuccaaaccuc

SEQ ID NO: 123566 - RNA, 20 nt, Artificial Sequence
  Synthetic
agguuggucuuccaaaccuc

SEQ ID NO: 123567 - RNA, 21 nt, Artificial Sequence
  Synthetic
gagguuggucuuccaaaccuc

SEQ ID NO: 123568 - RNA, 22 nt, Artificial Sequence
  Synthetic
ggagguuggucuuccaaaccuc

SEQ ID NO: 123569 - RNA, 23 nt, Artificial Sequence
  Synthetic
gggagguuggucuuccaaaccuc

SEQ ID NO: 123570 - RNA, 24 nt, Artificial Sequence
  Synthetic
ugggagguuggucuuccaaaccuc

SEQ ID NO: 123571 - RNA, 18 nt, Artificial Sequence
  Synthetic
guauacauuuaaacccuc

SEQ ID NO: 123572 - RNA, 19 nt, Artificial Sequence
  Synthetic
gguauacauuuaaacccuc

SEQ ID NO: 123573 - RNA, 20 nt, Artificial Sequence
  Synthetic
ggguauacauuuaaacccuc

SEQ ID NO: 123574 - RNA, 21 nt, Artificial Sequence
  Synthetic
uggguauacauuuaaacccuc

SEQ ID NO: 123575 - RNA, 22 nt, Artificial Sequence
  Synthetic
uuggguauacauuuaaacccuc

SEQ ID NO: 123576 - RNA, 23 nt, Artificial Sequence
  Synthetic
uuuggguauacauuuaaacccuc

SEQ ID NO: 123577 - RNA, 24 nt, Artificial Sequence
  Synthetic
cuuuggguauacauuuaaacccuc

SEQ ID NO: 123578 - RNA, 18 nt, Artificial Sequence
  Synthetic
ucccgcggacgaccccuc

SEQ ID NO: 123579 - RNA, 19 nt, Artificial Sequence
  Synthetic
aucccgcggacgaccccuc

SEQ ID NO: 123580 - RNA, 20 nt, Artificial Sequence
  Synthetic
aaucccgcggacgaccccuc

SEQ ID NO: 123581 - RNA, 18 nt, Artificial Sequence
  Synthetic
gaagaacucccucgccuc

SEQ ID NO: 123582 - RNA, 19 nt, Artificial Sequence
  Synthetic
agaagaacucccucgccuc

SEQ ID NO: 123583 - RNA, 20 nt, Artificial Sequence
  Synthetic
aagaagaacucccucgccuc

SEQ ID NO: 123584 - RNA, 21 nt, Artificial Sequence
  Synthetic
gaagaagaacucccucgccuc

SEQ ID NO: 123585 - RNA, 22 nt, Artificial Sequence
  Synthetic
agaagaagaacucccucgccuc

SEQ ID NO: 123586 - RNA, 23 nt, Artificial Sequence
  Synthetic
uagaagaagaacucccucgccuc

SEQ ID NO: 123587 - RNA, 24 nt, Artificial Sequence
  Synthetic
cuagaagaagaacucccucgccuc

SEQ ID NO: 123588 - RNA, 18 nt, Artificial Sequence
  Synthetic
  misc_feature (8)..(8): n is a, c, g, or u
ccugcacnacuccugcuc

SEQ ID NO: 123589 - RNA, 19 nt, Artificial Sequence
  Synthetic
  misc_feature (9)..(9): n is a, c, g, or u
accugcacnacuccugcuc

SEQ ID NO: 123590 - RNA, 20 nt, Artificial Sequence
  Synthetic
  misc_feature (10)..(10): n is a, c, g, or u
aaccugcacnacuccugcuc

SEQ ID NO: 123591 - RNA, 21 nt, Artificial Sequence
  Synthetic
  misc_feature (11)..(11): n is a, c, g, or u
aaaccugcacnacuccugcuc

SEQ ID NO: 123592 - RNA, 22 nt, Artificial Sequence
  Synthetic
  misc_feature (12)..(12): n is a, c, g, or u
aaaaccugcacnacuccugcuc

SEQ ID NO: 123593 - RNA, 23 nt, Artificial Sequence
  Synthetic
  misc_feature (13)..(13): n is a, c, g, or u
caaaaccugcacnacuccugcuc

SEQ ID NO: 123594 - RNA, 24 nt, Artificial Sequence
  Synthetic
  misc_feature (14)..(14): n is a, c, g, or u
gcaaaaccugcacnacuccugcuc

SEQ ID NO: 123595 - RNA, 18 nt, Artificial Sequence
  Synthetic
accuuuaccccguugcuc

SEQ ID NO: 123596 - RNA, 19 nt, Artificial Sequence
  Synthetic
aaccuuuaccccguugcuc

SEQ ID NO: 123597 - RNA, 20 nt, Artificial Sequence
  Synthetic
gaaccuuuaccccguugcuc

SEQ ID NO: 123598 - RNA, 18 nt, Artificial Sequence
  Synthetic
gggaggccuuagagucuc

SEQ ID NO: 123599 - RNA, 19 nt, Artificial Sequence
  Synthetic
cgggaggccuuagagucuc

SEQ ID NO: 123600 - RNA, 20 nt, Artificial Sequence
  Synthetic
ucgggaggccuuagagucuc

SEQ ID NO: 123601 - RNA, 21 nt, Artificial Sequence
  Synthetic
aucgggaggccuuagagucuc

SEQ ID NO: 123602 - RNA, 22 nt, Artificial Sequence
  Synthetic
uaucgggaggccuuagagucuc

SEQ ID NO: 123603 - RNA, 23 nt, Artificial Sequence
  Synthetic
guaucgggaggccuuagagucuc

SEQ ID NO: 123604 - RNA, 24 nt, Artificial Sequence
  Synthetic
uguaucgggaggccuuagagucuc

SEQ ID NO: 123605 - RNA, 18 nt, Artificial Sequence
  Synthetic
acaggcuuuuacuuucuc

SEQ ID NO: 123606 - RNA, 19 nt, Artificial Sequence
  Synthetic
aacaggcuuuuacuuucuc

SEQ ID NO: 123607 - RNA, 20 nt, Artificial Sequence
  Synthetic
aaacaggcuuuuacuuucuc

SEQ ID NO: 123608 - RNA, 21 nt, Artificial Sequence
  Synthetic
  misc_feature (1)..(1): n is a, c, g, or u
naaacaggcuuuuacuuucuc

SEQ ID NO: 123609 - RNA, 22 nt, Artificial Sequence
  Synthetic
  misc_feature (2)..(2): n is a, c, g, or u
cnaaacaggcuuuuacuuucuc

SEQ ID NO: 123610 - RNA, 23 nt, Artificial Sequence
  Synthetic
  misc_feature (3)..(3): n is a, c, g, or u
gcnaaacaggcuuuuacuuucuc

SEQ ID NO: 123611 - RNA, 24 nt, Artificial Sequence
  Synthetic
  misc_feature (4)..(4): n is a, c, g, or u
agcnaaacaggcuuuuacuuucuc

SEQ ID NO: 123612 - RNA, 18 nt, Artificial Sequence
  Synthetic
cuccaccaaucggcaguc

SEQ ID NO: 123613 - RNA, 19 nt, Artificial Sequence
  Synthetic
ccuccaccaaucggcaguc

SEQ ID NO: 123614 - RNA, 20 nt, Artificial Sequence
  Synthetic
gccuccaccaaucggcaguc

SEQ ID NO: 123615 - RNA, 21 nt, Artificial Sequence
  Synthetic
ugccuccaccaaucggcaguc

SEQ ID NO: 123616 - RNA, 22 nt, Artificial Sequence
  Synthetic
cugccuccaccaaucggcaguc

SEQ ID NO: 123617 - RNA, 23 nt, Artificial Sequence
  Synthetic
ccugccuccaccaaucggcaguc

SEQ ID NO: 123618 - RNA, 24 nt, Artificial Sequence
  Synthetic
uccugccuccaccaaucggcaguc

SEQ ID NO: 123619 - RNA, 18 nt, Artificial Sequence
  Synthetic
ucgggaggccuuagaguc

SEQ ID NO: 123620 - RNA, 19 nt, Artificial Sequence
  Synthetic
aucgggaggccuuagaguc

SEQ ID NO: 123621 - RNA, 20 nt, Artificial Sequence
  Synthetic
uaucgggaggccuuagaguc

SEQ ID NO: 123622 - RNA, 21 nt, Artificial Sequence
  Synthetic
guaucgggaggccuuagaguc

SEQ ID NO: 123623 - RNA, 22 nt, Artificial Sequence
  Synthetic
uguaucgggaggccuuagaguc

SEQ ID NO: 123624 - RNA, 23 nt, Artificial Sequence
  Synthetic
cuguaucgggaggccuuagaguc

SEQ ID NO: 123625 - RNA, 24 nt, Artificial Sequence
  Synthetic
ucuguaucgggaggccuuagaguc

SEQ ID NO: 123626 - RNA, 18 nt, Artificial Sequence
  Synthetic
ggucucaaucgccgcguc

SEQ ID NO: 123627 - RNA, 19 nt, Artificial Sequence
  Synthetic
aggucucaaucgccgcguc

SEQ ID NO: 123628 - RNA, 20 nt, Artificial Sequence
  Synthetic
aaggucucaaucgccgcguc

SEQ ID NO: 123629 - RNA, 18 nt, Artificial Sequence
  Synthetic
uggacuuucagcaauguc

SEQ ID NO: 123630 - RNA, 19 nt, Artificial Sequence
  Synthetic
uuggacuuucagcaauguc

SEQ ID NO: 123631 - RNA, 20 nt, Artificial Sequence
  Synthetic
cuuggacuuucagcaauguc

SEQ ID NO: 123632 - RNA, 21 nt, Artificial Sequence
  Synthetic
ucuuggacuuucagcaauguc

SEQ ID NO: 123633 - RNA, 22 nt, Artificial Sequence
  Synthetic
cucuuggacuuucagcaauguc

SEQ ID NO: 123634 - RNA, 23 nt, Artificial Sequence
  Synthetic
acucuuggacuuucagcaauguc

SEQ ID NO: 123635 - RNA, 24 nt, Artificial Sequence
  Synthetic
gacucuuggacuuucagcaauguc

SEQ ID NO: 123636 - RNA, 18 nt, Artificial Sequence
  Synthetic
guuaucgcuggauguguc

SEQ ID NO: 123637 - RNA, 19 nt, Artificial Sequence
  Synthetic
gguuaucgcuggauguguc

SEQ ID NO: 123638 - RNA, 20 nt, Artificial Sequence
  Synthetic
ugguuaucgcuggauguguc

SEQ ID NO: 123639 - RNA, 21 nt, Artificial Sequence
  Synthetic
cugguuaucgcuggauguguc

SEQ ID NO: 123640 - RNA, 22 nt, Artificial Sequence
  Synthetic
ccugguuaucgcuggauguguc

SEQ ID NO: 123641 - RNA, 23 nt, Artificial Sequence
  Synthetic
uccugguuaucgcuggauguguc

SEQ ID NO: 123642 - RNA, 24 nt, Artificial Sequence
  Synthetic
guccugguuaucgcuggauguguc

SEQ ID NO: 123643 - RNA, 18 nt, Artificial Sequence
  Synthetic
  misc_feature (14)..(14): n is a, c, g, or u
uugauuggaaagunuguc

SEQ ID NO: 123644 - RNA, 19 nt, Artificial Sequence
  Synthetic
  misc_feature (15)..(15): n is a, c, g, or u
auugauuggaaagunuguc

SEQ ID NO: 123645 - RNA, 20 nt, Artificial Sequence
  Synthetic
  misc_feature (16)..(16): n is a, c, g, or u
uauugauuggaaagunuguc

SEQ ID NO: 123646 - RNA, 21 nt, Artificial Sequence
  Synthetic
  misc_feature (17)..(17): n is a, c, g, or u
cuauugauuggaaagunuguc

SEQ ID NO: 123647 - RNA, 22 nt, Artificial Sequence
  Synthetic
  misc_feature (18)..(18): n is a, c, g, or u
ccuauugauuggaaagunuguc

SEQ ID NO: 123648 - RNA, 23 nt, Artificial Sequence
  Synthetic
  misc_feature (1)..(1): n is a, c, g, or u
  misc_feature (19)..(19): n is a, c, g, or u
nccuauugauuggaaagunuguc

SEQ ID NO: 123649 - RNA, 24 nt, Artificial Sequence
  Synthetic
  misc_feature (2)..(2): n is a, c, g, or u
  misc_feature (20)..(20): n is a, c, g, or u
gnccuauugauuggaaagunuguc

SEQ ID NO: 123650 - RNA, 18 nt, Artificial Sequence
  Synthetic
uaccaauuuucuuuuguc

SEQ ID NO: 123651 - RNA, 19 nt, Artificial Sequence
  Synthetic
uuaccaauuuucuuuuguc

SEQ ID NO: 123652 - RNA, 20 nt, Artificial Sequence
  Synthetic
guuaccaauuuucuuuuguc

SEQ ID NO: 123653 - RNA, 21 nt, Artificial Sequence
  Synthetic
uguuaccaauuuucuuuuguc

SEQ ID NO: 123654 - RNA, 22 nt, Artificial Sequence
  Synthetic
cuguuaccaauuuucuuuuguc

SEQ ID NO: 123655 - RNA, 23 nt, Artificial Sequence
  Synthetic
gcuguuaccaauuuucuuuuguc

SEQ ID NO: 123656 - RNA, 24 nt, Artificial Sequence
  Synthetic
cgcuguuaccaauuuucuuuuguc

SEQ ID NO: 123657 - RNA, 18 nt, Artificial Sequence
  Synthetic
uugcgggucaccauauuc

SEQ ID NO: 123658 - RNA, 19 nt, Artificial Sequence
  Synthetic
uuugcgggucaccauauuc

SEQ ID NO: 123659 - RNA, 20 nt, Artificial Sequence
  Synthetic
uuuugcgggucaccauauuc

SEQ ID NO: 123660 - RNA, 21 nt, Artificial Sequence
  Synthetic
auuuugcgggucaccauauuc

SEQ ID NO: 123661 - RNA, 22 nt, Artificial Sequence
  Synthetic
cauuuugcgggucaccauauuc

SEQ ID NO: 123662 - RNA, 23 nt, Artificial Sequence
  Synthetic
ucauuuugcgggucaccauauuc

SEQ ID NO: 123663 - RNA, 24 nt, Artificial Sequence
  Synthetic
cucauuuugcgggucaccauauuc

SEQ ID NO: 123664 - RNA, 18 nt, Artificial Sequence
  Synthetic
aucucaauguuaguauuc

SEQ ID NO: 123665 - RNA, 19 nt, Artificial Sequence
  Synthetic
aaucucaauguuaguauuc

SEQ ID NO: 123666 - RNA, 20 nt, Artificial Sequence
  Synthetic
gaaucucaauguuaguauuc

SEQ ID NO: 123667 - RNA, 21 nt, Artificial Sequence
  Synthetic
ggaaucucaauguuaguauuc

SEQ ID NO: 123668 - RNA, 22 nt, Artificial Sequence
  Synthetic
gggaaucucaauguuaguauuc

SEQ ID NO: 123669 - RNA, 23 nt, Artificial Sequence
  Synthetic
cgggaaucucaauguuaguauuc

SEQ ID NO: 123670 - RNA, 24 nt, Artificial Sequence
  Synthetic
ucgggaaucucaauguuaguauuc

SEQ ID NO: 123671 - RNA, 18 nt, Artificial Sequence
  Synthetic
ggauauucccuuaacuuc

SEQ ID NO: 123672 - RNA, 19 nt, Artificial Sequence
  Synthetic
gggauauucccuuaacuuc

SEQ ID NO: 123673 - RNA, 20 nt, Artificial Sequence
  Synthetic
ggggauauucccuuaacuuc

SEQ ID NO: 123674 - RNA, 21 nt, Artificial Sequence
  Synthetic
uggggauauucccuuaacuuc

SEQ ID NO: 123675 - RNA, 22 nt, Artificial Sequence
  Synthetic
auggggauauucccuuaacuuc

SEQ ID NO: 123676 - RNA, 23 nt, Artificial Sequence
  Synthetic
gauggggauauucccuuaacuuc

SEQ ID NO: 123677 - RNA, 24 nt, Artificial Sequence
  Synthetic
agauggggauauucccuuaacuuc

SEQ ID NO: 123678 - RNA, 18 nt, Artificial Sequence
  Synthetic
cuaucuuaucaacacuuc

SEQ ID NO: 123679 - RNA, 19 nt, Artificial Sequence
  Synthetic
ccuaucuuaucaacacuuc

SEQ ID NO: 123680 - RNA, 20 nt, Artificial Sequence
  Synthetic
cccuaucuuaucaacacuuc

SEQ ID NO: 123681 - RNA, 21 nt, Artificial Sequence
  Synthetic
ccccuaucuuaucaacacuuc

SEQ ID NO: 123682 - RNA, 22 nt, Artificial Sequence
  Synthetic
gccccuaucuuaucaacacuuc

SEQ ID NO: 123683 - RNA, 23 nt, Artificial Sequence
  Synthetic
ugccccuaucuuaucaacacuuc

SEQ ID NO: 123684 - RNA, 24 nt, Artificial Sequence
  Synthetic
augccccuaucuuaucaacacuuc

SEQ ID NO: 123685 - RNA, 18 nt, Artificial Sequence
  Synthetic
gaccuugaggcauacuuc

SEQ ID NO: 123686 - RNA, 19 nt, Artificial Sequence
  Synthetic
cgaccuugaggcauacuuc

SEQ ID NO: 123687 - RNA, 20 nt, Artificial Sequence
  Synthetic
ccgaccuugaggcauacuuc

SEQ ID NO: 123688 - RNA, 18 nt, Artificial Sequence
  Synthetic
uaaagaauuuggagcuuc

SEQ ID NO: 123689 - RNA, 19 nt, Artificial Sequence
  Synthetic
auaaagaauuuggagcuuc

SEQ ID NO: 123690 - RNA, 20 nt, Artificial Sequence
  Synthetic
uauaaagaauuuggagcuuc

SEQ ID NO: 123691 - RNA, 21 nt, Artificial Sequence
  Synthetic
  misc_feature (1)..(1): n is a, c, g, or u
nuauaaagaauuuggagcuuc

SEQ ID NO: 123692 - RNA, 22 nt, Artificial Sequence
  Synthetic
  misc_feature (2)..(2): n is a, c, g, or u
cnuauaaagaauuuggagcuuc

SEQ ID NO: 123693 - RNA, 23 nt, Artificial Sequence
  Synthetic
  misc_feature (3)..(3): n is a, c, g, or u
ccnuauaaagaauuuggagcuuc

SEQ ID NO: 123694 - RNA, 24 nt, Artificial Sequence
  Synthetic
  misc_feature (4)..(4): n is a, c, g, or u
cccnuauaaagaauuuggagcuuc

SEQ ID NO: 123695 - RNA, 18 nt, Artificial Sequence
  Synthetic
ugcugguggcuccaguuc

SEQ ID NO: 123696 - RNA, 19 nt, Artificial Sequence
  Synthetic
cugcugguggcuccaguuc

SEQ ID NO: 123697 - RNA, 20 nt, Artificial Sequence
  Synthetic
ccugcugguggcuccaguuc

SEQ ID NO: 123698 - RNA, 21 nt, Artificial Sequence
  Synthetic
uccugcugguggcuccaguuc

SEQ ID NO: 123699 - RNA, 22 nt, Artificial Sequence
  Synthetic
uuccugcugguggcuccaguuc

SEQ ID NO: 123700 - RNA, 23 nt, Artificial Sequence
  Synthetic
uuuccugcugguggcuccaguuc

SEQ ID NO: 123701 - RNA, 24 nt, Artificial Sequence
  Synthetic
cuuuccugcugguggcuccaguuc

SEQ ID NO: 123702 - RNA, 18 nt, Artificial Sequence
  Synthetic
ccauuuguucagugguuc

SEQ ID NO: 123703 - RNA, 19 nt, Artificial Sequence
  Synthetic
gccauuuguucagugguuc

SEQ ID NO: 123704 - RNA, 20 nt, Artificial Sequence
  Synthetic
ugccauuuguucagugguuc

SEQ ID NO: 123705 - RNA, 21 nt, Artificial Sequence
  Synthetic
gugccauuuguucagugguuc

SEQ ID NO: 123706 - RNA, 22 nt, Artificial Sequence
  Synthetic
agugccauuuguucagugguuc

SEQ ID NO: 123707 - RNA, 23 nt, Artificial Sequence
  Synthetic
uagugccauuuguucagugguuc

SEQ ID NO: 123708 - RNA, 24 nt, Artificial Sequence
  Synthetic
cuagugccauuuguucagugguuc

SEQ ID NO: 123709 - RNA, 18 nt, Artificial Sequence
  Synthetic
  misc_feature (13)..(13): n is a, c, g, or u
gcauaaauuggunuguuc

SEQ ID NO: 123710 - RNA, 19 nt, Artificial Sequence
  Synthetic
  misc_feature (14)..(14): n is a, c, g, or u
ggcauaaauuggunuguuc

SEQ ID NO: 123711 - RNA, 20 nt, Artificial Sequence
  Synthetic
  misc_feature (15)..(15): n is a, c, g, or u
aggcauaaauuggunuguuc

SEQ ID NO: 123712 - RNA, 21 nt, Artificial Sequence
  Synthetic
  misc_feature (16)..(16): n is a, c, g, or u
uaggcauaaauuggunuguuc

SEQ ID NO: 123713 - RNA, 22 nt, Artificial Sequence
  Synthetic
  misc_feature (17)..(17): n is a, c, g, or u
guaggcauaaauuggunuguuc

SEQ ID NO: 123714 - RNA, 23 nt, Artificial Sequence
  Synthetic
  misc_feature (18)..(18): n is a, c, g, or u
uguaggcauaaauuggunuguuc

SEQ ID NO: 123715 - RNA, 24 nt, Artificial Sequence
  Synthetic
  misc_feature (19)..(19): n is a, c, g, or u
cuguaggcauaaauuggunuguuc

SEQ ID NO: 123716 - RNA, 18 nt, Artificial Sequence
  Synthetic
ccaucaucuugggcuuuc

SEQ ID NO: 123717 - RNA, 19 nt, Artificial Sequence
  Synthetic
cccaucaucuugggcuuuc

SEQ ID NO: 123718 - RNA, 20 nt, Artificial Sequence
  Synthetic
ucccaucaucuugggcuuuc

SEQ ID NO: 123719 - RNA, 21 nt, Artificial Sequence
  Synthetic
aucccaucaucuugggcuuuc

SEQ ID NO: 123720 - RNA, 22 nt, Artificial Sequence
  Synthetic
caucccaucaucuugggcuuuc

SEQ ID NO: 123721 - RNA, 23 nt, Artificial Sequence
  Synthetic
ccaucccaucaucuugggcuuuc

SEQ ID NO: 123722 - RNA, 24 nt, Artificial Sequence
  Synthetic
cccaucccaucaucuugggcuuuc

SEQ ID NO: 123723 - RNA, 18 nt, Artificial Sequence
  Synthetic
  misc_feature (5)..(5): n is a, c, g, or u
  misc_feature (14)..(14): n is a, c, g, or u
gcaanuauacaucnuuuc

SEQ ID NO: 123724 - RNA, 19 nt, Artificial Sequence
  Synthetic
  misc_feature (6)..(6): n is a, c, g, or u
  misc_feature (15)..(15): n is a, c, g, or u
cgcaanuauacaucnuuuc

SEQ ID NO: 123725 - RNA, 20 nt, Artificial Sequence
  Synthetic
  misc_feature (7)..(7): n is a, c, g, or u
  misc_feature (16)..(16): n is a, c, g, or u
ccgcaanuauacaucnuuuc

SEQ ID NO: 123726 - RNA, 21 nt, Artificial Sequence
  Synthetic
  misc_feature (8)..(8): n is a, c, g, or u
  misc_feature (17)..(17): n is a, c, g, or u
cccgcaanuauacaucnuuuc

SEQ ID NO: 123727 - RNA, 22 nt, Artificial Sequence
  Synthetic
  misc_feature (9)..(9): n is a, c, g, or u
  misc_feature (18)..(18): n is a, c, g, or u
ucccgcaanuauacaucnuuuc

SEQ ID NO: 123728 - RNA, 23 nt, Artificial Sequence
  Synthetic
  misc_feature (1)..(1): n is a, c, g, or u
  misc_feature (10)..(10): n is a, c, g, or u
  misc_feature (19)..(19): n is a, c, g, or u
nucccgcaanuauacaucnuuuc

SEQ ID NO: 123729 - RNA, 24 nt, Artificial Sequence
  Synthetic
  misc_feature (2)..(2): n is a, c, g, or u
  misc_feature (11)..(11): n is a, c, g, or u
  misc_feature (20)..(20): n is a, c, g, or u
unucccgcaanuauacaucnuuuc

SEQ ID NO: 123730 - RNA, 18 nt, Artificial Sequence
  Synthetic
ggacuucucucaauuuuc

SEQ ID NO: 123731 - RNA, 19 nt, Artificial Sequence
  Synthetic
uggacuucucucaauuuuc

SEQ ID NO: 123732 - RNA, 20 nt, Artificial Sequence
  Synthetic
guggacuucucucaauuuuc

SEQ ID NO: 123733 - RNA, 21 nt, Artificial Sequence
  Synthetic
gguggacuucucucaauuuuc

SEQ ID NO: 123734 - RNA, 22 nt, Artificial Sequence
  Synthetic
ugguggacuucucucaauuuuc

SEQ ID NO: 123735 - RNA, 23 nt, Artificial Sequence
  Synthetic
gugguggacuucucucaauuuuc

SEQ ID NO: 123736 - RNA, 24 nt, Artificial Sequence
  Synthetic
cgugguggacuucucucaauuuuc

SEQ ID NO: 123737 - RNA, 18 nt, Artificial Sequence
  Synthetic
  misc_feature (7)..(7): n is a, c, g, or u
cccucanaaaacaaaaag

SEQ ID NO: 123738 - RNA, 19 nt, Artificial Sequence
  Synthetic
  misc_feature (8)..(8): n is a, c, g, or u
acccucanaaaacaaaaag

SEQ ID NO: 123739 - RNA, 20 nt, Artificial Sequence
  Synthetic
  misc_feature (9)..(9): n is a, c, g, or u
aacccucanaaaacaaaaag

SEQ ID NO: 123740 - RNA, 21 nt, Artificial Sequence
  Synthetic
  misc_feature (10)..(10): n is a, c, g, or u
aaacccucanaaaacaaaaag

SEQ ID NO: 123741 - RNA, 22 nt, Artificial Sequence
  Synthetic
  misc_feature (11)..(11): n is a, c, g, or u
uaaacccucanaaaacaaaaag

SEQ ID NO: 123742 - RNA, 23 nt, Artificial Sequence
  Synthetic
  misc_feature (12)..(12): n is a, c, g, or u
uuaaacccucanaaaacaaaaag

SEQ ID NO: 123743 - RNA, 24 nt, Artificial Sequence
  Synthetic
  misc_feature (13)..(13): n is a, c, g, or u
uuuaaacccucanaaaacaaaaag

SEQ ID NO: 123744 - RNA, 18 nt, Artificial Sequence
  Synthetic
uggccggacgccaacaag

SEQ ID NO: 123745 - RNA, 19 nt, Artificial Sequence
  Synthetic
cuggccggacgccaacaag

SEQ ID NO: 123746 - RNA, 20 nt, Artificial Sequence
  Synthetic
acuggccggacgccaacaag

SEQ ID NO: 123747 - RNA, 21 nt, Artificial Sequence
  Synthetic
aacuggccggacgccaacaag

SEQ ID NO: 123748 - RNA, 22 nt, Artificial Sequence
  Synthetic
caacuggccggacgccaacaag

SEQ ID NO: 123749 - RNA, 23 nt, Artificial Sequence
  Synthetic
acaacuggccggacgccaacaag

SEQ ID NO: 123750 - RNA, 24 nt, Artificial Sequence
  Synthetic
gacaacuggccggacgccaacaag

SEQ ID NO: 123751 - RNA, 18 nt, Artificial Sequence
  Synthetic
  misc_feature (12)..(12): n is a, c, g, or u
gaccucaacccncacaag

SEQ ID NO: 123752 - RNA, 19 nt, Artificial Sequence
  Synthetic
  misc_feature (13)..(13): n is a, c, g, or u
ggaccucaacccncacaag

SEQ ID NO: 123753 - RNA, 20 nt, Artificial Sequence
  Synthetic
  misc_feature (14)..(14): n is a, c, g, or u
gggaccucaacccncacaag

SEQ ID NO: 123754 - RNA, 21 nt, Artificial Sequence
  Synthetic
  misc_feature (15)..(15): n is a, c, g, or u
ugggaccucaacccncacaag

SEQ ID NO: 123755 - RNA, 22 nt, Artificial Sequence
  Synthetic
  misc_feature (16)..(16): n is a, c, g, or u
uugggaccucaacccncacaag

SEQ ID NO: 123756 - RNA, 23 nt, Artificial Sequence
  Synthetic
  misc_feature (17)..(17): n is a, c, g, or u
auugggaccucaacccncacaag

SEQ ID NO: 123757 - RNA, 24 nt, Artificial Sequence
  Synthetic
  misc_feature (18)..(18): n is a, c, g, or u
gauugggaccucaacccncacaag

SEQ ID NO: 123758 - RNA, 18 nt, Artificial Sequence
  Synthetic
uauaugcauguauacaag

SEQ ID NO: 123759 - RNA, 19 nt, Artificial Sequence
  Synthetic
uuauaugcauguauacaag

SEQ ID NO: 123760 - RNA, 20 nt, Artificial Sequence
  Synthetic
uuuauaugcauguauacaag

SEQ ID NO: 123761 - RNA, 21 nt, Artificial Sequence
  Synthetic
cuuuauaugcauguauacaag

SEQ ID NO: 123762 - RNA, 22 nt, Artificial Sequence
  Synthetic
ccuuuauaugcauguauacaag

SEQ ID NO: 123763 - RNA, 23 nt, Artificial Sequence
  Synthetic
gccuuuauaugcauguauacaag

SEQ ID NO: 123764 - RNA, 24 nt, Artificial Sequence
  Synthetic
ugccuuuauaugcauguauacaag

SEQ ID NO: 123765 - RNA, 18 nt, Artificial Sequence
  Synthetic
aggcagguccccuagaag

SEQ ID NO: 123766 - RNA, 19 nt, Artificial Sequence
  Synthetic
gaggcagguccccuagaag

SEQ ID NO: 123767 - RNA, 20 nt, Artificial Sequence
  Synthetic
  misc_feature (1)..(1): n is a, c, g, or u
ngaggcagguccccuagaag

SEQ ID NO: 123768 - RNA, 21 nt, Artificial Sequence
  Synthetic
  misc_feature (2)..(2): n is a, c, g, or u
angaggcagguccccuagaag

SEQ ID NO: 123769 - RNA, 22 nt, Artificial Sequence
  Synthetic
  misc_feature (3)..(3): n is a, c, g, or u
gangaggcagguccccuagaag

SEQ ID NO: 123770 - RNA, 23 nt, Artificial Sequence
  Synthetic
  misc_feature (4)..(4): n is a, c, g, or u
cgangaggcagguccccuagaag

SEQ ID NO: 123771 - RNA, 24 nt, Artificial Sequence
  Synthetic
  misc_feature (5)..(5): n is a, c, g, or u
acgangaggcagguccccuagaag

SEQ ID NO: 123772 - RNA, 18 nt, Artificial Sequence
  Synthetic
ucgucaaucuuaucgaag

SEQ ID NO: 123773 - RNA, 19 nt, Artificial Sequence
  Synthetic
aucgucaaucuuaucgaag

SEQ ID NO: 123774 - RNA, 20 nt, Artificial Sequence
  Synthetic
uaucgucaaucuuaucgaag

SEQ ID NO: 123775 - RNA, 21 nt, Artificial Sequence
  Synthetic
auaucgucaaucuuaucgaag

SEQ ID NO: 123776 - RNA, 22 nt, Artificial Sequence
  Synthetic
cauaucgucaaucuuaucgaag

SEQ ID NO: 123777 - RNA, 23 nt, Artificial Sequence
  Synthetic
ccauaucgucaaucuuaucgaag

SEQ ID NO: 123778 - RNA, 24 nt, Artificial Sequence
  Synthetic
  misc_feature (1)..(1): n is a, c, g, or u
nccauaucgucaaucuuaucgaag

SEQ ID NO: 123779 - RNA, 18 nt, Artificial Sequence
  Synthetic
  misc_feature (6)..(6): n is a, c, g, or u
uuacanacucuuuggaag

SEQ ID NO: 123780 - RNA, 19 nt, Artificial Sequence
  Synthetic
  misc_feature (7)..(7): n is a, c, g, or u
uuuacanacucuuuggaag

SEQ ID NO: 123781 - RNA, 20 nt, Artificial Sequence
  Synthetic
  misc_feature (8)..(8): n is a, c, g, or u
auuuacanacucuuuggaag

SEQ ID NO: 123782 - RNA, 21 nt, Artificial Sequence
  Synthetic
  misc_feature (9)..(9): n is a, c, g, or u
uauuuacanacucuuuggaag

SEQ ID NO: 123783 - RNA, 22 nt, Artificial Sequence
  Synthetic
  misc_feature (10)..(10): n is a, c, g, or u
uuauuuacanacucuuuggaag

SEQ ID NO: 123784 - RNA, 23 nt, Artificial Sequence
  Synthetic
  misc_feature (11)..(11): n is a, c, g, or u
auuauuuacanacucuuuggaag

SEQ ID NO: 123785 - RNA, 24 nt, Artificial Sequence
  Synthetic
  misc_feature (12)..(12): n is a, c, g, or u
cauuauuuacanacucuuuggaag

SEQ ID NO: 123786 - RNA, 18 nt, Artificial Sequence
  Synthetic
  misc_feature (12)..(12): n is a, c, g, or u
auuccuuggacncauaag

SEQ ID NO: 123787 - RNA, 19 nt, Artificial Sequence
  Synthetic
  misc_feature (13)..(13): n is a, c, g, or u
uauuccuuggacncauaag

SEQ ID NO: 123788 - RNA, 20 nt, Artificial Sequence
  Synthetic
  misc_feature (14)..(14): n is a, c, g, or u
guauuccuuggacncauaag

SEQ ID NO: 123789 - RNA, 21 nt, Artificial Sequence
  Synthetic
  misc_feature (15)..(15): n is a, c, g, or u
aguauuccuuggacncauaag

SEQ ID NO: 123790 - RNA, 22 nt, Artificial Sequence
  Synthetic
  misc_feature (16)..(16): n is a, c, g, or u
uaguauuccuuggacncauaag

SEQ ID NO: 123791 - RNA, 23 nt, Artificial Sequence
  Synthetic
  misc_feature (17)..(17): n is a, c, g, or u
uuaguauuccuuggacncauaag

SEQ ID NO: 123792 - RNA, 24 nt, Artificial Sequence
  Synthetic
  misc_feature (18)..(18): n is a, c, g, or u
guuaguauuccuuggacncauaag

SEQ ID NO: 123793 - RNA, 18 nt, Artificial Sequence
  Synthetic
  misc_feature (12)..(12): n is a, c, g, or u
ugggaacaagancuacag

SEQ ID NO: 123794 - RNA, 19 nt, Artificial Sequence
  Synthetic
  misc_feature (13)..(13): n is a, c, g, or u
uugggaacaagancuacag

SEQ ID NO: 123795 - RNA, 20 nt, Artificial Sequence
  Synthetic
  misc_feature (14)..(14): n is a, c, g, or u
cuugggaacaagancuacag

SEQ ID NO: 123796 - RNA, 21 nt, Artificial Sequence
  Synthetic
  misc_feature (15)..(15): n is a, c, g, or u
ucuugggaacaagancuacag

SEQ ID NO: 123797 - RNA, 22 nt, Artificial Sequence
  Synthetic
  misc_feature (16)..(16): n is a, c, g, or u
uucuugggaacaagancuacag

SEQ ID NO: 123798 - RNA, 23 nt, Artificial Sequence
  Synthetic
  misc_feature (17)..(17): n is a, c, g, or u
auucuugggaacaagancuacag

SEQ ID NO: 123799 - RNA, 24 nt, Artificial Sequence
  Synthetic
  misc_feature (18)..(18): n is a, c, g, or u
uauucuugggaacaagancuacag

SEQ ID NO: 123800 - RNA, 18 nt, Artificial Sequence
  Synthetic
ccccugcucguguuacag

SEQ ID NO: 123801 - RNA, 19 nt, Artificial Sequence
  Synthetic
accccugcucguguuacag

SEQ ID NO: 123802 - RNA, 20 nt, Artificial Sequence
  Synthetic
gaccccugcucguguuacag

SEQ ID NO: 123803 - RNA, 21 nt, Artificial Sequence
  Synthetic
ggaccccugcucguguuacag

SEQ ID NO: 123804 - RNA, 22 nt, Artificial Sequence
  Synthetic
aggaccccugcucguguuacag

SEQ ID NO: 123805 - RNA, 23 nt, Artificial Sequence
  Synthetic
uaggaccccugcucguguuacag

SEQ ID NO: 123806 - RNA, 24 nt, Artificial Sequence
  Synthetic
cuaggaccccugcucguguuacag

SEQ ID NO: 123807 - RNA, 18 nt, Artificial Sequence
  Synthetic
ccaacucagaaaauccag

SEQ ID NO: 123808 - RNA, 19 nt, Artificial Sequence
  Synthetic
gccaacucagaaaauccag

SEQ ID NO: 123809 - RNA, 20 nt, Artificial Sequence
  Synthetic
agccaacucagaaaauccag

SEQ ID NO: 123810 - RNA, 21 nt, Artificial Sequence
  Synthetic
aagccaacucagaaaauccag

SEQ ID NO: 123811 - RNA, 22 nt, Artificial Sequence
  Synthetic
aaagccaacucagaaaauccag

SEQ ID NO: 123812 - RNA, 23 nt, Artificial Sequence
  Synthetic
caaagccaacucagaaaauccag

SEQ ID NO: 123813 - RNA, 24 nt, Artificial Sequence
  Synthetic
ucaaagccaacucagaaaauccag

SEQ ID NO: 123814 - RNA, 18 nt, Artificial Sequence
  Synthetic
uccugcugguggcuccag

SEQ ID NO: 123815 - RNA, 19 nt, Artificial Sequence
  Synthetic
uuccugcugguggcuccag

SEQ ID NO: 123816 - RNA, 20 nt, Artificial Sequence
  Synthetic
uuuccugcugguggcuccag

SEQ ID NO: 123817 - RNA, 21 nt, Artificial Sequence
  Synthetic
cuuuccugcugguggcuccag

SEQ ID NO: 123818 - RNA, 22 nt, Artificial Sequence
  Synthetic
acuuuccugcugguggcuccag

SEQ ID NO: 123819 - RNA, 23 nt, Artificial Sequence
  Synthetic
uacuuuccugcugguggcuccag

SEQ ID NO: 123820 - RNA, 24 nt, Artificial Sequence
  Synthetic
guacuuuccugcugguggcuccag

SEQ ID NO: 123821 - RNA, 18 nt, Artificial Sequence
  Synthetic
aacucccucgccucgcag

SEQ ID NO: 123822 - RNA, 19 nt, Artificial Sequence
  Synthetic
gaacucccucgccucgcag

SEQ ID NO: 123823 - RNA, 20 nt, Artificial Sequence
  Synthetic
agaacucccucgccucgcag

SEQ ID NO: 123824 - RNA, 21 nt, Artificial Sequence
  Synthetic
aagaacucccucgccucgcag

SEQ ID NO: 123825 - RNA, 22 nt, Artificial Sequence
  Synthetic
gaagaacucccucgccucgcag

SEQ ID NO: 123826 - RNA, 23 nt, Artificial Sequence
  Synthetic
agaagaacucccucgccucgcag

SEQ ID NO: 123827 - RNA, 24 nt, Artificial Sequence
  Synthetic
aagaagaacucccucgccucgcag

SEQ ID NO: 123828 - RNA, 18 nt, Artificial Sequence
  Synthetic
gccuccaccaaucggcag

SEQ ID NO: 123829 - RNA, 19 nt, Artificial Sequence
  Synthetic
ugccuccaccaaucggcag

SEQ ID NO: 123830 - RNA, 20 nt, Artificial Sequence
  Synthetic
cugccuccaccaaucggcag

SEQ ID NO: 123831 - RNA, 21 nt, Artificial Sequence
  Synthetic
ccugccuccaccaaucggcag

SEQ ID NO: 123832 - RNA, 22 nt, Artificial Sequence
  Synthetic
uccugccuccaccaaucggcag

SEQ ID NO: 123833 - RNA, 23 nt, Artificial Sequence
  Synthetic
cuccugccuccaccaaucggcag

SEQ ID NO: 123834 - RNA, 24 nt, Artificial Sequence
  Synthetic
ccuccugccuccaccaaucggcag

SEQ ID NO: 123835 - RNA, 18 nt, Artificial Sequence
  Synthetic
cauccucaggccaugcag

SEQ ID NO: 123836 - RNA, 19 nt, Artificial Sequence
  Synthetic
ucauccucaggccaugcag

SEQ ID NO: 123837 - RNA, 20 nt, Artificial Sequence
  Synthetic
cucauccucaggccaugcag

SEQ ID NO: 123838 - RNA, 21 nt, Artificial Sequence
  Synthetic
acucauccucaggccaugcag

SEQ ID NO: 123839 - RNA, 22 nt, Artificial Sequence
  Synthetic
cacucauccucaggccaugcag

SEQ ID NO: 123840 - RNA, 23 nt, Artificial Sequence
  Synthetic
acacucauccucaggccaugcag

SEQ ID NO: 123841 - RNA, 24 nt, Artificial Sequence
  Synthetic
gacacucauccucaggccaugcag

SEQ ID NO: 123842 - RNA, 18 nt, Artificial Sequence
  Synthetic
ccugacauucauuugcag

SEQ ID NO: 123843 - RNA, 19 nt, Artificial Sequence
  Synthetic
uccugacauucauuugcag

SEQ ID NO: 123844 - RNA, 20 nt, Artificial Sequence
  Synthetic
uuccugacauucauuugcag

SEQ ID NO: 123845 - RNA, 21 nt, Artificial Sequence
  Synthetic
uuuccugacauucauuugcag

SEQ ID NO: 123846 - RNA, 22 nt, Artificial Sequence
  Synthetic
uuuuccugacauucauuugcag

SEQ ID NO: 123847 - RNA, 23 nt, Artificial Sequence
  Synthetic
cuuuuccugacauucauuugcag

SEQ ID NO: 123848 - RNA, 24 nt, Artificial Sequence
  Synthetic
ucuuuuccugacauucauuugcag

SEQ ID NO: 123849 - RNA, 18 nt, Artificial Sequence
  Synthetic
  misc_feature (6)..(6): n is a, c, g, or u
uucuuncccgaucaucag

SEQ ID NO: 123850 - RNA, 19 nt, Artificial Sequence
  Synthetic
  misc_feature (7)..(7): n is a, c, g, or u
auucuuncccgaucaucag

SEQ ID NO: 123851 - RNA, 20 nt, Artificial Sequence
  Synthetic
  misc_feature (8)..(8): n is a, c, g, or u
gauucuuncccgaucaucag

SEQ ID NO: 123852 - RNA, 21 nt, Artificial Sequence
  Synthetic
  misc_feature (9)..(9): n is a, c, g, or u
ggauucuuncccgaucaucag

SEQ ID NO: 123853 - RNA, 22 nt, Artificial Sequence
  Synthetic
  misc_feature (10)..(10): n is a, c, g, or u
gggauucuuncccgaucaucag

SEQ ID NO: 123854 - RNA, 23 nt, Artificial Sequence
  Synthetic
  misc_feature (11)..(11): n is a, c, g, or u
ugggauucuuncccgaucaucag

SEQ ID NO: 123855 - RNA, 24 nt, Artificial Sequence
  Synthetic
  misc_feature (12)..(12): n is a, c, g, or u
cugggauucuuncccgaucaucag

SEQ ID NO: 123856 - RNA, 18 nt, Artificial Sequence
  Synthetic
ucaccauacggcacucag

SEQ ID NO: 123857 - RNA, 19 nt, Artificial Sequence
  Synthetic
cucaccauacggcacucag

SEQ ID NO: 123858 - RNA, 20 nt, Artificial Sequence
  Synthetic
ccucaccauacggcacucag

SEQ ID NO: 123859 - RNA, 21 nt, Artificial Sequence
  Synthetic
accucaccauacggcacucag

SEQ ID NO: 123860 - RNA, 22 nt, Artificial Sequence
  Synthetic
caccucaccauacggcacucag

SEQ ID NO: 123861 - RNA, 23 nt, Artificial Sequence
  Synthetic
ucaccucaccauacggcacucag

SEQ ID NO: 123862 - RNA, 24 nt, Artificial Sequence
  Synthetic
uucaccucaccauacggcacucag

SEQ ID NO: 123863 - RNA, 18 nt, Artificial Sequence
  Synthetic
ccaccaaucggcagucag

SEQ ID NO: 123864 - RNA, 19 nt, Artificial Sequence
  Synthetic
uccaccaaucggcagucag

SEQ ID NO: 123865 - RNA, 20 nt, Artificial Sequence
  Synthetic
cuccaccaaucggcagucag

SEQ ID NO: 123866 - RNA, 21 nt, Artificial Sequence
  Synthetic
ccuccaccaaucggcagucag

SEQ ID NO: 123867 - RNA, 22 nt, Artificial Sequence
  Synthetic
gccuccaccaaucggcagucag

SEQ ID NO: 123868 - RNA, 23 nt, Artificial Sequence
  Synthetic
ugccuccaccaaucggcagucag

SEQ ID NO: 123869 - RNA, 24 nt, Artificial Sequence
  Synthetic
cugccuccaccaaucggcagucag

SEQ ID NO: 123870 - RNA, 18 nt, Artificial Sequence
  Synthetic
ccucacaauaccacagag

SEQ ID NO: 123871 - RNA, 19 nt, Artificial Sequence
  Synthetic
uccucacaauaccacagag

SEQ ID NO: 123872 - RNA, 20 nt, Artificial Sequence
  Synthetic
auccucacaauaccacagag

SEQ ID NO: 123873 - RNA, 21 nt, Artificial Sequence
  Synthetic
aauccucacaauaccacagag

SEQ ID NO: 123874 - RNA, 22 nt, Artificial Sequence
  Synthetic
aaauccucacaauaccacagag

SEQ ID NO: 123875 - RNA, 23 nt, Artificial Sequence
  Synthetic
aaaauccucacaauaccacagag

SEQ ID NO: 123876 - RNA, 24 nt, Artificial Sequence
  Synthetic
aaaaauccucacaauaccacagag

SEQ ID NO: 123877 - RNA, 18 nt, Artificial Sequence
  Synthetic
cucuucaagaucccagag

SEQ ID NO: 123878 - RNA, 19 nt, Artificial Sequence
  Synthetic
acucuucaagaucccagag

SEQ ID NO: 123879 - RNA, 20 nt, Artificial Sequence
  Synthetic
aacucuucaagaucccagag

SEQ ID NO: 123880 - RNA, 21 nt, Artificial Sequence
  Synthetic
aaacucuucaagaucccagag

SEQ ID NO: 123881 - RNA, 22 nt, Artificial Sequence
  Synthetic
caaacucuucaagaucccagag

SEQ ID NO: 123882 - RNA, 23 nt, Artificial Sequence
  Synthetic
ccaaacucuucaagaucccagag

SEQ ID NO: 123883 - RNA, 24 nt, Artificial Sequence
  Synthetic
accaaacucuucaagaucccagag

SEQ ID NO: 123884 - RNA, 18 nt, Artificial Sequence
  Synthetic
aguaaaugaaaacaggag

SEQ ID NO: 123885 - RNA, 19 nt, Artificial Sequence
  Synthetic
caguaaaugaaaacaggag

SEQ ID NO: 123886 - RNA, 20 nt, Artificial Sequence
  Synthetic
acaguaaaugaaaacaggag

SEQ ID NO: 123887 - RNA, 21 nt, Artificial Sequence
  Synthetic
  misc_feature (1)..(1): n is a, c, g, or u
nacaguaaaugaaaacaggag

SEQ ID NO: 123888 - RNA, 22 nt, Artificial Sequence
  Synthetic
  misc_feature (2)..(2): n is a, c, g, or u
unacaguaaaugaaaacaggag

SEQ ID NO: 123889 - RNA, 23 nt, Artificial Sequence
  Synthetic
  misc_feature (3)..(3): n is a, c, g, or u
cunacaguaaaugaaaacaggag

SEQ ID NO: 123890 - RNA, 24 nt, Artificial Sequence
  Synthetic
  misc_feature (4)..(4): n is a, c, g, or u
ccunacaguaaaugaaaacaggag

SEQ ID NO: 123891 - RNA, 18 nt, Artificial Sequence
  Synthetic
gaggaguugggggaggag

SEQ ID NO: 123892 - RNA, 19 nt, Artificial Sequence
  Synthetic
ggaggaguugggggaggag

SEQ ID NO: 123893 - RNA, 20 nt, Artificial Sequence
  Synthetic
gggaggaguugggggaggag

SEQ ID NO: 123894 - RNA, 21 nt, Artificial Sequence
  Synthetic
ugggaggaguugggggaggag

SEQ ID NO: 123895 - RNA, 22 nt, Artificial Sequence
  Synthetic
gugggaggaguugggggaggag

SEQ ID NO: 123896 - RNA, 23 nt, Artificial Sequence
  Synthetic
agugggaggaguugggggaggag

SEQ ID NO: 123897 - RNA, 24 nt, Artificial Sequence
  Synthetic
gagugggaggaguugggggaggag

SEQ ID NO: 123898 - RNA, 18 nt, Artificial Sequence
  Synthetic
  misc_feature (5)..(5): n is a, c, g, or u
uuuanugagugggaggag

SEQ ID NO: 123899 - RNA, 19 nt, Artificial Sequence
  Synthetic
  misc_feature (6)..(6): n is a, c, g, or u
guuuanugagugggaggag

SEQ ID NO: 123900 - RNA, 20 nt, Artificial Sequence
  Synthetic
  misc_feature (7)..(7): n is a, c, g, or u
uguuuanugagugggaggag

SEQ ID NO: 123901 - RNA, 21 nt, Artificial Sequence
  Synthetic
  misc_feature (8)..(8): n is a, c, g, or u
guguuuanugagugggaggag

SEQ ID NO: 123902 - RNA, 22 nt, Artificial Sequence
  Synthetic
  misc_feature (9)..(9): n is a, c, g, or u
uguguuuanugagugggaggag

SEQ ID NO: 123903 - RNA, 23 nt, Artificial Sequence
  Synthetic
  misc_feature (10)..(10): n is a, c, g, or u
guguguuuanugagugggaggag

SEQ ID NO: 123904 - RNA, 24 nt, Artificial Sequence
  Synthetic
  misc_feature (11)..(11): n is a, c, g, or u
uguguguuuanugagugggaggag

SEQ ID NO: 123905 - RNA, 18 nt, Artificial Sequence
  Synthetic
acgccaacaaggugggag

SEQ ID NO: 123906 - RNA, 19 nt, Artificial Sequence
  Synthetic
gacgccaacaaggugggag

SEQ ID NO: 123907 - RNA, 20 nt, Artificial Sequence
  Synthetic
ggacgccaacaaggugggag

SEQ ID NO: 123908 - RNA, 21 nt, Artificial Sequence
  Synthetic
cggacgccaacaaggugggag

SEQ ID NO: 123909 - RNA, 22 nt, Artificial Sequence
  Synthetic
ccggacgccaacaaggugggag

SEQ ID NO: 123910 - RNA, 23 nt, Artificial Sequence
  Synthetic
gccggacgccaacaaggugggag

SEQ ID NO: 123911 - RNA, 24 nt, Artificial Sequence
  Synthetic
ggccggacgccaacaaggugggag

SEQ ID NO: 123912 - RNA, 18 nt, Artificial Sequence
  Synthetic
  misc_feature (8)..(8): n is a, c, g, or u
auuuggunucuuuuggag

SEQ ID NO: 123913 - RNA, 19 nt, Artificial Sequence
  Synthetic
  misc_feature (9)..(9): n is a, c, g, or u
uauuuggunucuuuuggag

SEQ ID NO: 123914 - RNA, 20 nt, Artificial Sequence
  Synthetic
  misc_feature (10)..(10): n is a, c, g, or u
auauuuggunucuuuuggag

SEQ ID NO: 123915 - RNA, 21 nt, Artificial Sequence
  Synthetic
  misc_feature (11)..(11): n is a, c, g, or u
aauauuuggunucuuuuggag

SEQ ID NO: 123916 - RNA, 22 nt, Artificial Sequence
  Synthetic
  misc_feature (12)..(12): n is a, c, g, or u
gaauauuuggunucuuuuggag

SEQ ID NO: 123917 - RNA, 23 nt, Artificial Sequence
  Synthetic
  misc_feature (13)..(13): n is a, c, g, or u
ugaauauuuggunucuuuuggag

SEQ ID NO: 123918 - RNA, 24 nt, Artificial Sequence
  Synthetic
  misc_feature (14)..(14): n is a, c, g, or u
uugaauauuuggunucuuuuggag

SEQ ID NO: 123919 - RNA, 18 nt, Artificial Sequence
  Synthetic
  misc_feature (14)..(14): n is a, c, g, or u
gacuguguguuuanugag

SEQ ID NO: 123920 - RNA, 19 nt, Artificial Sequence
  Synthetic
  misc_feature (15)..(15): n is a, c, g, or u
agacuguguguuuanugag

SEQ ID NO: 123921 - RNA, 20 nt, Artificial Sequence
  Synthetic
  misc_feature (16)..(16): n is a, c, g, or u
aagacuguguguuuanugag

SEQ ID NO: 123922 - RNA, 21 nt, Artificial Sequence
  Synthetic
  misc_feature (17)..(17): n is a, c, g, or u
aaagacuguguguuuanugag

SEQ ID NO: 123923 - RNA, 22 nt, Artificial Sequence
  Synthetic
  misc_feature (18)..(18): n is a, c, g, or u
caaagacuguguguuuanugag

SEQ ID NO: 123924 - RNA, 23 nt, Artificial Sequence
  Synthetic
  misc_feature (19)..(19): n is a, c, g, or u
ucaaagacuguguguuuanugag

SEQ ID NO: 123925 - RNA, 24 nt, Artificial Sequence
  Synthetic
  misc_feature (20)..(20): n is a, c, g, or u
uucaaagacuguguguuuanugag

SEQ ID NO: 123926 - RNA, 18 nt, Artificial Sequence
  Synthetic
  misc_feature (16)..(16): n is a, c, g, or u
cugucuuacuuuuggnag

SEQ ID NO: 123927 - RNA, 19 nt, Artificial Sequence
  Synthetic
  misc_feature (17)..(17): n is a, c, g, or u
ccugucuuacuuuuggnag

SEQ ID NO: 123928 - RNA, 20 nt, Artificial Sequence
  Synthetic
  misc_feature (18)..(18): n is a, c, g, or u
uccugucuuacuuuuggnag

SEQ ID NO: 123929 - RNA, 21 nt, Artificial Sequence
  Synthetic
  misc_feature (19)..(19): n is a, c, g, or u
uuccugucuuacuuuuggnag

SEQ ID NO: 123930 - RNA, 22 nt, Artificial Sequence
  Synthetic
  misc_feature (20)..(20): n is a, c, g, or u
uuuccugucuuacuuuuggnag

SEQ ID NO: 123931 - RNA, 23 nt, Artificial Sequence
  Synthetic
  misc_feature (21)..(21): n is a, c, g, or u
auuuccugucuuacuuuuggnag

SEQ ID NO: 123932 - RNA, 24 nt, Artificial Sequence
  Synthetic
  misc_feature (22)..(22): n is a, c, g, or u
cauuuccugucuuacuuuuggnag

SEQ ID NO: 123933 - RNA, 18 nt, Artificial Sequence
  Synthetic
  misc_feature (2)..(2): n is a, c, g, or u
angaggcagguccccuag

SEQ ID NO: 123934 - RNA, 19 nt, Artificial Sequence
  Synthetic
  misc_feature (3)..(3): n is a, c, g, or u
gangaggcagguccccuag

SEQ ID NO: 123935 - RNA, 20 nt, Artificial Sequence
  Synthetic
  misc_feature (4)..(4): n is a, c, g, or u
cgangaggcagguccccuag

SEQ ID NO: 123936 - RNA, 21 nt, Artificial Sequence
  Synthetic
  misc_feature (5)..(5): n is a, c, g, or u
acgangaggcagguccccuag

SEQ ID NO: 123937 - RNA, 22 nt, Artificial Sequence
  Synthetic
  misc_feature (6)..(6): n is a, c, g, or u
gacgangaggcagguccccuag

SEQ ID NO: 123938 - RNA, 23 nt, Artificial Sequence
  Synthetic
  misc_feature (7)..(7): n is a, c, g, or u
agacgangaggcagguccccuag

SEQ ID NO: 123939 - RNA, 24 nt, Artificial Sequence
  Synthetic
  misc_feature (8)..(8): n is a, c, g, or u
uagacgangaggcagguccccuag

SEQ ID NO: 123940 - RNA, 18 nt, Artificial Sequence
  Synthetic
cuaaauauuugcccuuag

SEQ ID NO: 123941 - RNA, 19 nt, Artificial Sequence
  Synthetic
acuaaauauuugcccuuag

SEQ ID NO: 123942 - RNA, 20 nt, Artificial Sequence
  Synthetic
uacuaaauauuugcccuuag

SEQ ID NO: 123943 - RNA, 21 nt, Artificial Sequence
  Synthetic
uuacuaaauauuugcccuuag

SEQ ID NO: 123944 - RNA, 22 nt, Artificial Sequence
  Synthetic
guuacuaaauauuugcccuuag

SEQ ID NO: 123945 - RNA, 23 nt, Artificial Sequence
  Synthetic
uguuacuaaauauuugcccuuag

SEQ ID NO: 123946 - RNA, 24 nt, Artificial Sequence
  Synthetic
auguuacuaaauauuugcccuuag

SEQ ID NO: 123947 - RNA, 18 nt, Artificial Sequence
  Synthetic
  misc_feature (14)..(14): n is a, c, g, or u
guugggggaggagnuuag

SEQ ID NO: 123948 - RNA, 19 nt, Artificial Sequence
  Synthetic
  misc_feature (15)..(15): n is a, c, g, or u
aguugggggaggagnuuag

SEQ ID NO: 123949 - RNA, 20 nt, Artificial Sequence
  Synthetic
  misc_feature (16)..(16): n is a, c, g, or u
gaguugggggaggagnuuag

SEQ ID NO: 123950 - RNA, 21 nt, Artificial Sequence
  Synthetic
  misc_feature (17)..(17): n is a, c, g, or u
ggaguugggggaggagnuuag

SEQ ID NO: 123951 - RNA, 22 nt, Artificial Sequence
  Synthetic
  misc_feature (18)..(18): n is a, c, g, or u
aggaguugggggaggagnuuag

SEQ ID NO: 123952 - RNA, 23 nt, Artificial Sequence
  Synthetic
  misc_feature (19)..(19): n is a, c, g, or u
gaggaguugggggaggagnuuag

SEQ ID NO: 123953 - RNA, 24 nt, Artificial Sequence
  Synthetic
  misc_feature (20)..(20): n is a, c, g, or u
ggaggaguugggggaggagnuuag

SEQ ID NO: 123954 - RNA, 18 nt, Artificial Sequence
  Synthetic
cuuucagcaaugucaacg

SEQ ID NO: 123955 - RNA, 19 nt, Artificial Sequence
  Synthetic
acuuucagcaaugucaacg

SEQ ID NO: 123956 - RNA, 20 nt, Artificial Sequence
  Synthetic
gacuuucagcaaugucaacg

SEQ ID NO: 123957 - RNA, 21 nt, Artificial Sequence
  Synthetic
ggacuuucagcaaugucaacg

SEQ ID NO: 123958 - RNA, 22 nt, Artificial Sequence
  Synthetic
uggacuuucagcaaugucaacg

SEQ ID NO: 123959 - RNA, 23 nt, Artificial Sequence
  Synthetic
uuggacuuucagcaaugucaacg

SEQ ID NO: 123960 - RNA, 24 nt, Artificial Sequence
  Synthetic
cuuggacuuucagcaaugucaacg

SEQ ID NO: 123961 - RNA, 18 nt, Artificial Sequence
  Synthetic
aacuacuguuguuagacg

SEQ ID NO: 123962 - RNA, 19 nt, Artificial Sequence
  Synthetic
aaacuacuguuguuagacg

SEQ ID NO: 123963 - RNA, 20 nt, Artificial Sequence
  Synthetic
gaaacuacuguuguuagacg

SEQ ID NO: 123964 - RNA, 21 nt, Artificial Sequence
  Synthetic
ggaaacuacuguuguuagacg

SEQ ID NO: 123965 - RNA, 22 nt, Artificial Sequence
  Synthetic
cggaaacuacuguuguuagacg

SEQ ID NO: 123966 - RNA, 23 nt, Artificial Sequence
  Synthetic
ccggaaacuacuguuguuagacg

SEQ ID NO: 123967 - RNA, 24 nt, Artificial Sequence
  Synthetic
uccggaaacuacuguuguuagacg

SEQ ID NO: 123968 - RNA, 18 nt, Artificial Sequence
  Synthetic
ugcuguacaaaaccuacg

SEQ ID NO: 123969 - RNA, 19 nt, Artificial Sequence
  Synthetic
uugcuguacaaaaccuacg

SEQ ID NO: 123970 - RNA, 20 nt, Artificial Sequence
  Synthetic
guugcuguacaaaaccuacg

SEQ ID NO: 123971 - RNA, 21 nt, Artificial Sequence
  Synthetic
uguugcuguacaaaaccuacg

SEQ ID NO: 123972 - RNA, 22 nt, Artificial Sequence
  Synthetic
auguugcuguacaaaaccuacg

SEQ ID NO: 123973 - RNA, 23 nt, Artificial Sequence
  Synthetic
cauguugcuguacaaaaccuacg

SEQ ID NO: 123974 - RNA, 24 nt, Artificial Sequence
  Synthetic
ucauguugcuguacaaaaccuacg

SEQ ID NO: 123975 - RNA, 18 nt, Artificial Sequence
  Synthetic
  misc_feature (7)..(7): n is a, c, g, or u
  misc_feature (11)..(12): n is a, c, g, or u
ucuccgncugnnguaccg

SEQ ID NO: 123976 - RNA, 19 nt, Artificial Sequence
  Synthetic
  misc_feature (8)..(8): n is a, c, g, or u
  misc_feature (12)..(13): n is a, c, g, or u
uucuccgncugnnguaccg

SEQ ID NO: 123977 - RNA, 20 nt, Artificial Sequence
  Synthetic
  misc_feature (9)..(9): n is a, c, g, or u
  misc_feature (13)..(14): n is a, c, g, or u
cuucuccgncugnnguaccg

SEQ ID NO: 123978 - RNA, 21 nt, Artificial Sequence
  Synthetic
  misc_feature (10)..(10): n is a, c, g, or u
  misc_feature (14)..(15): n is a, c, g, or u
gcuucuccgncugnnguaccg

SEQ ID NO: 123979 - RNA, 22 nt, Artificial Sequence
  Synthetic
  misc_feature (11)..(11): n is a, c, g, or u
  misc_feature (15)..(16): n is a, c, g, or u
cgcuucuccgncugnnguaccg

SEQ ID NO: 123980 - RNA, 23 nt, Artificial Sequence
  Synthetic
  misc_feature (12)..(12): n is a, c, g, or u
  misc_feature (16)..(17): n is a, c, g, or u
ccgcuucuccgncugnnguaccg

SEQ ID NO: 123981 - RNA, 24 nt, Artificial Sequence
  Synthetic
  misc_feature (13)..(13): n is a, c, g, or u
  misc_feature (17)..(18): n is a, c, g, or u
cccgcuucuccgncugnnguaccg

SEQ ID NO: 123982 - RNA, 18 nt, Artificial Sequence
  Synthetic
cgaccccucccggggccg

SEQ ID NO: 123983 - RNA, 19 nt, Artificial Sequence
  Synthetic
acgaccccucccggggccg

SEQ ID NO: 123984 - RNA, 20 nt, Artificial Sequence
  Synthetic
gacgaccccucccggggccg

SEQ ID NO: 123985 - RNA, 21 nt, Artificial Sequence
  Synthetic
ggacgaccccucccggggccg

SEQ ID NO: 123986 - RNA, 22 nt, Artificial Sequence
  Synthetic
cggacgaccccucccggggccg

SEQ ID NO: 123987 - RNA, 23 nt, Artificial Sequence
  Synthetic
gcggacgaccccucccggggccg

SEQ ID NO: 123988 - RNA, 24 nt, Artificial Sequence
  Synthetic
cgcggacgaccccucccggggccg

SEQ ID NO: 123989 - RNA, 18 nt, Artificial Sequence
  Synthetic
ucggcgcugaaucccgcg

SEQ ID NO: 123990 - RNA, 19 nt, Artificial Sequence
  Synthetic
gucggcgcugaaucccgcg

SEQ ID NO: 123991 - RNA, 20 nt, Artificial Sequence
  Synthetic
cgucggcgcugaaucccgcg

SEQ ID NO: 123992 - RNA, 18 nt, Artificial Sequence
  Synthetic
  misc_feature (1)..(1): n is a, c, g, or u
nggccaucagcgcaugcg

SEQ ID NO: 123993 - RNA, 19 nt, Artificial Sequence
  Synthetic
  misc_feature (2)..(2): n is a, c, g, or u
unggccaucagcgcaugcg

SEQ ID NO: 123994 - RNA, 20 nt, Artificial Sequence
  Synthetic
  misc_feature (3)..(3): n is a, c, g, or u
aunggccaucagcgcaugcg

SEQ ID NO: 123995 - RNA, 21 nt, Artificial Sequence
  Synthetic
  misc_feature (4)..(4): n is a, c, g, or u
caunggccaucagcgcaugcg

SEQ ID NO: 123996 - RNA, 22 nt, Artificial Sequence
  Synthetic
  misc_feature (5)..(5): n is a, c, g, or u
ccaunggccaucagcgcaugcg

SEQ ID NO: 123997 - RNA, 23 nt, Artificial Sequence
  Synthetic
  misc_feature (6)..(6): n is a, c, g, or u
gccaunggccaucagcgcaugcg

SEQ ID NO: 123998 - RNA, 24 nt, Artificial Sequence
  Synthetic
  misc_feature (7)..(7): n is a, c, g, or u
ggccaunggccaucagcgcaugcg

SEQ ID NO: 123999 - RNA, 18 nt, Artificial Sequence
  Synthetic
ugccaacuggauccugcg

SEQ ID NO: 124000 - RNA, 19 nt, Artificial Sequence
  Synthetic
cugccaacuggauccugcg

SEQ ID NO: 124001 - RNA, 20 nt, Artificial Sequence
  Synthetic
gcugccaacuggauccugcg

SEQ ID NO: 124002 - RNA, 21 nt, Artificial Sequence
  Synthetic
ugcugccaacuggauccugcg

SEQ ID NO: 124003 - RNA, 22 nt, Artificial Sequence
  Synthetic
gugcugccaacuggauccugcg

SEQ ID NO: 124004 - RNA, 23 nt, Artificial Sequence
  Synthetic
ugugcugccaacuggauccugcg

SEQ ID NO: 124005 - RNA, 24 nt, Artificial Sequence
  Synthetic
cugugcugccaacuggauccugcg

SEQ ID NO: 124006 - RNA, 18 nt, Artificial Sequence
  Synthetic
cgccucugcucuguaucg

SEQ ID NO: 124007 - RNA, 19 nt, Artificial Sequence
  Synthetic
ccgccucugcucuguaucg

SEQ ID NO: 124008 - RNA, 20 nt, Artificial Sequence
  Synthetic
accgccucugcucuguaucg

SEQ ID NO: 124009 - RNA, 21 nt, Artificial Sequence
  Synthetic
caccgccucugcucuguaucg

SEQ ID NO: 124010 - RNA, 22 nt, Artificial Sequence
  Synthetic
acaccgccucugcucuguaucg

SEQ ID NO: 124011 - RNA, 23 nt, Artificial Sequence
  Synthetic
gacaccgccucugcucuguaucg

SEQ ID NO: 124012 - RNA, 24 nt, Artificial Sequence
  Synthetic
cgacaccgccucugcucuguaucg

SEQ ID NO: 124013 - RNA, 18 nt, Artificial Sequence
  Synthetic
uuggucuuccaaaccucg

SEQ ID NO: 124014 - RNA, 19 nt, Artificial Sequence
  Synthetic
guuggucuuccaaaccucg

SEQ ID NO: 124015 - RNA, 20 nt, Artificial Sequence
  Synthetic
gguuggucuuccaaaccucg

SEQ ID NO: 124016 - RNA, 21 nt, Artificial Sequence
  Synthetic
agguuggucuuccaaaccucg

SEQ ID NO: 124017 - RNA, 22 nt, Artificial Sequence
  Synthetic
gagguuggucuuccaaaccucg

SEQ ID NO: 124018 - RNA, 23 nt, Artificial Sequence
  Synthetic
ggagguuggucuuccaaaccucg

SEQ ID NO: 124019 - RNA, 24 nt, Artificial Sequence
  Synthetic
gggagguuggucuuccaaaccucg

SEQ ID NO: 124020 - RNA, 18 nt, Artificial Sequence
  Synthetic
cuucaccucugcacgucg

SEQ ID NO: 124021 - RNA, 19 nt, Artificial Sequence
  Synthetic
gcuucaccucugcacgucg

SEQ ID NO: 124022 - RNA, 20 nt, Artificial Sequence
  Synthetic
cgcuucaccucugcacgucg

SEQ ID NO: 124023 - RNA, 21 nt, Artificial Sequence
  Synthetic
ucgcuucaccucugcacgucg

SEQ ID NO: 124024 - RNA, 22 nt, Artificial Sequence
  Synthetic
uucgcuucaccucugcacgucg

SEQ ID NO: 124025 - RNA, 23 nt, Artificial Sequence
  Synthetic
cuucgcuucaccucugcacgucg

SEQ ID NO: 124026 - RNA, 24 nt, Artificial Sequence
  Synthetic
acuucgcuucaccucugcacgucg

SEQ ID NO: 124027 - RNA, 18 nt, Artificial Sequence
  Synthetic
gucucaaucgccgcgucg

SEQ ID NO: 124028 - RNA, 19 nt, Artificial Sequence
  Synthetic
ggucucaaucgccgcgucg

SEQ ID NO: 124029 - RNA, 20 nt, Artificial Sequence
  Synthetic
aggucucaaucgccgcgucg

SEQ ID NO: 124030 - RNA, 21 nt, Artificial Sequence
  Synthetic
aaggucucaaucgccgcgucg

SEQ ID NO: 124031 - RNA, 22 nt, Artificial Sequence
  Synthetic
gaaggucucaaucgccgcgucg

SEQ ID NO: 124032 - RNA, 23 nt, Artificial Sequence
  Synthetic
cgaaggucucaaucgccgcgucg

SEQ ID NO: 124033 - RNA, 24 nt, Artificial Sequence
  Synthetic
acgaaggucucaaucgccgcgucg

SEQ ID NO: 124034 - RNA, 18 nt, Artificial Sequence
  Synthetic
cauuuguucagugguucg

SEQ ID NO: 124035 - RNA, 19 nt, Artificial Sequence
  Synthetic
ccauuuguucagugguucg

SEQ ID NO: 124036 - RNA, 20 nt, Artificial Sequence
  Synthetic
gccauuuguucagugguucg

SEQ ID NO: 124037 - RNA, 21 nt, Artificial Sequence
  Synthetic
ugccauuuguucagugguucg

SEQ ID NO: 124038 - RNA, 22 nt, Artificial Sequence
  Synthetic
gugccauuuguucagugguucg

SEQ ID NO: 124039 - RNA, 23 nt, Artificial Sequence
  Synthetic
agugccauuuguucagugguucg

SEQ ID NO: 124040 - RNA, 24 nt, Artificial Sequence
  Synthetic
uagugccauuuguucagugguucg

SEQ ID NO: 124041 - RNA, 18 nt, Artificial Sequence
  Synthetic
uuccaaaccucgaaaagg

SEQ ID NO: 124042 - RNA, 19 nt, Artificial Sequence
  Synthetic
cuuccaaaccucgaaaagg

SEQ ID NO: 124043 - RNA, 20 nt, Artificial Sequence
  Synthetic
ucuuccaaaccucgaaaagg

SEQ ID NO: 124044 - RNA, 21 nt, Artificial Sequence
  Synthetic
gucuuccaaaccucgaaaagg

SEQ ID NO: 124045 - RNA, 22 nt, Artificial Sequence
  Synthetic
ggucuuccaaaccucgaaaagg

SEQ ID NO: 124046 - RNA, 23 nt, Artificial Sequence
  Synthetic
uggucuuccaaaccucgaaaagg

SEQ ID NO: 124047 - RNA, 24 nt, Artificial Sequence
  Synthetic
uuggucuuccaaaccucgaaaagg

SEQ ID NO: 124048 - RNA, 18 nt, Artificial Sequence
  Synthetic
ggccggacgccaacaagg

SEQ ID NO: 124049 - RNA, 19 nt, Artificial Sequence
  Synthetic
uggccggacgccaacaagg

SEQ ID NO: 124050 - RNA, 20 nt, Artificial Sequence
  Synthetic
cuggccggacgccaacaagg

SEQ ID NO: 124051 - RNA, 21 nt, Artificial Sequence
  Synthetic
acuggccggacgccaacaagg

SEQ ID NO: 124052 - RNA, 22 nt, Artificial Sequence
  Synthetic
aacuggccggacgccaacaagg

SEQ ID NO: 124053 - RNA, 23 nt, Artificial Sequence
  Synthetic
caacuggccggacgccaacaagg

SEQ ID NO: 124054 - RNA, 24 nt, Artificial Sequence
  Synthetic
acaacuggccggacgccaacaagg

SEQ ID NO: 124055 - RNA, 18 nt, Artificial Sequence
  Synthetic
  misc_feature (11)..(11): n is a, c, g, or u
uuccuuggacncauaagg

SEQ ID NO: 124056 - RNA, 19 nt, Artificial Sequence
  Synthetic
  misc_feature (12)..(12): n is a, c, g, or u
auuccuuggacncauaagg

SEQ ID NO: 124057 - RNA, 20 nt, Artificial Sequence
  Synthetic
  misc_feature (13)..(13): n is a, c, g, or u
uauuccuuggacncauaagg

SEQ ID NO: 124058 - RNA, 21 nt, Artificial Sequence
  Synthetic
  misc_feature (14)..(14): n is a, c, g, or u
guauuccuuggacncauaagg

SEQ ID NO: 124059 - RNA, 22 nt, Artificial Sequence
  Synthetic
  misc_feature (15)..(15): n is a, c, g, or u
aguauuccuuggacncauaagg

SEQ ID NO: 124060 - RNA, 23 nt, Artificial Sequence
  Synthetic
  misc_feature (16)..(16): n is a, c, g, or u
uaguauuccuuggacncauaagg

SEQ ID NO: 124061 - RNA, 24 nt, Artificial Sequence
  Synthetic
  misc_feature (17)..(17): n is a, c, g, or u
uuaguauuccuuggacncauaagg

SEQ ID NO: 124062 - RNA, 18 nt, Artificial Sequence
  Synthetic
ugggguggagcccucagg

SEQ ID NO: 124063 - RNA, 19 nt, Artificial Sequence
  Synthetic
uugggguggagcccucagg

SEQ ID NO: 124064 - RNA, 20 nt, Artificial Sequence
  Synthetic
guugggguggagcccucagg

SEQ ID NO: 124065 - RNA, 21 nt, Artificial Sequence
  Synthetic
uguugggguggagcccucagg

SEQ ID NO: 124066 - RNA, 22 nt, Artificial Sequence
  Synthetic
cuguugggguggagcccucagg

SEQ ID NO: 124067 - RNA, 23 nt, Artificial Sequence
  Synthetic
acuguugggguggagcccucagg

SEQ ID NO: 124068 - RNA, 24 nt, Artificial Sequence
  Synthetic
gacuguugggguggagcccucagg

SEQ ID NO: 124069 - RNA, 18 nt, Artificial Sequence
  Synthetic
uucucucaauuuucuagg

SEQ ID NO: 124070 - RNA, 19 nt, Artificial Sequence
  Synthetic
cuucucucaauuuucuagg

SEQ ID NO: 124071 - RNA, 20 nt, Artificial Sequence
  Synthetic
acuucucucaauuuucuagg

SEQ ID NO: 124072 - RNA, 21 nt, Artificial Sequence
  Synthetic
gacuucucucaauuuucuagg

SEQ ID NO: 124073 - RNA, 22 nt, Artificial Sequence
  Synthetic
ggacuucucucaauuuucuagg

SEQ ID NO: 124074 - RNA, 23 nt, Artificial Sequence
  Synthetic
uggacuucucucaauuuucuagg

SEQ ID NO: 124075 - RNA, 24 nt, Artificial Sequence
  Synthetic
guggacuucucucaauuuucuagg

SEQ ID NO: 124076 - RNA, 18 nt, Artificial Sequence
  Synthetic
guacuaggaggcuguagg

SEQ ID NO: 124077 - RNA, 19 nt, Artificial Sequence
  Synthetic
uguacuaggaggcuguagg

SEQ ID NO: 124078 - RNA, 20 nt, Artificial Sequence
  Synthetic
uuguacuaggaggcuguagg

SEQ ID NO: 124079 - RNA, 21 nt, Artificial Sequence
  Synthetic
uuuguacuaggaggcuguagg

SEQ ID NO: 124080 - RNA, 22 nt, Artificial Sequence
  Synthetic
cuuuguacuaggaggcuguagg

SEQ ID NO: 124081 - RNA, 23 nt, Artificial Sequence
  Synthetic
ucuuuguacuaggaggcuguagg

SEQ ID NO: 124082 - RNA, 24 nt, Artificial Sequence
  Synthetic
  misc_feature (1)..(1): n is a, c, g, or u
nucuuuguacuaggaggcuguagg

SEQ ID NO: 124083 - RNA, 18 nt, Artificial Sequence
  Synthetic
gcuguacaaaaccuacgg

SEQ ID NO: 124084 - RNA, 19 nt, Artificial Sequence
  Synthetic
ugcuguacaaaaccuacgg

SEQ ID NO: 124085 - RNA, 20 nt, Artificial Sequence
  Synthetic
uugcuguacaaaaccuacgg

SEQ ID NO: 124086 - RNA, 21 nt, Artificial Sequence
  Synthetic
guugcuguacaaaaccuacgg

SEQ ID NO: 124087 - RNA, 22 nt, Artificial Sequence
  Synthetic
uguugcuguacaaaaccuacgg

SEQ ID NO: 124088 - RNA, 23 nt, Artificial Sequence
  Synthetic
auguugcuguacaaaaccuacgg

SEQ ID NO: 124089 - RNA, 24 nt, Artificial Sequence
  Synthetic
cauguugcuguacaaaaccuacgg

SEQ ID NO: 124090 - RNA, 18 nt, Artificial Sequence
  Synthetic
gggagugggagcauucgg

SEQ ID NO: 124091 - RNA, 19 nt, Artificial Sequence
  Synthetic
ugggagugggagcauucgg

SEQ ID NO: 124092 - RNA, 20 nt, Artificial Sequence
  Synthetic
gugggagugggagcauucgg

SEQ ID NO: 124093 - RNA, 21 nt, Artificial Sequence
  Synthetic
ggugggagugggagcauucgg

SEQ ID NO: 124094 - RNA, 22 nt, Artificial Sequence
  Synthetic
aggugggagugggagcauucgg

SEQ ID NO: 124095 - RNA, 23 nt, Artificial Sequence
  Synthetic
aaggugggagugggagcauucgg

SEQ ID NO: 124096 - RNA, 24 nt, Artificial Sequence
  Synthetic
caaggugggagugggagcauucgg

SEQ ID NO: 124097 - RNA, 18 nt, Artificial Sequence
  Synthetic
  misc_feature (3)..(3): n is a, c, g, or u
  misc_feature (6)..(6): n is a, c, g, or u
ggngcnaaacucaucggg

SEQ ID NO: 124098 - RNA, 19 nt, Artificial Sequence
  Synthetic
  misc_feature (4)..(4): n is a, c, g, or u
  misc_feature (7)..(7): n is a, c, g, or u
uggngcnaaacucaucggg

SEQ ID NO: 124099 - RNA, 20 nt, Artificial Sequence
  Synthetic
  misc_feature (5)..(5): n is a, c, g, or u
  misc_feature (8)..(8): n is a, c, g, or u
cuggngcnaaacucaucggg

SEQ ID NO: 124100 - RNA, 21 nt, Artificial Sequence
  Synthetic
  misc_feature (6)..(6): n is a, c, g, or u
  misc_feature (9)..(9): n is a, c, g, or u
ucuggngcnaaacucaucggg

SEQ ID NO: 124101 - RNA, 22 nt, Artificial Sequence
  Synthetic
  misc_feature (7)..(7): n is a, c, g, or u
  misc_feature (10)..(10): n is a, c, g, or u
gucuggngcnaaacucaucggg

SEQ ID NO: 124102 - RNA, 23 nt, Artificial Sequence
  Synthetic
  misc_feature (8)..(8): n is a, c, g, or u
  misc_feature (11)..(11): n is a, c, g, or u
ggucuggngcnaaacucaucggg

SEQ ID NO: 124103 - RNA, 24 nt, Artificial Sequence
  Synthetic
  misc_feature (1)..(1): n is a, c, g, or u
  misc_feature (9)..(9): n is a, c, g, or u
  misc_feature (12)..(12): n is a, c, g, or u
nggucuggngcnaaacucaucggg

SEQ ID NO: 124104 - RNA, 18 nt, Artificial Sequence
  Synthetic
ggagugggagcauucggg

SEQ ID NO: 124105 - RNA, 19 nt, Artificial Sequence
  Synthetic
gggagugggagcauucggg

SEQ ID NO: 124106 - RNA, 20 nt, Artificial Sequence
  Synthetic
ugggagugggagcauucggg

SEQ ID NO: 124107 - RNA, 21 nt, Artificial Sequence
  Synthetic
gugggagugggagcauucggg

SEQ ID NO: 124108 - RNA, 22 nt, Artificial Sequence
  Synthetic
ggugggagugggagcauucggg

SEQ ID NO: 124109 - RNA, 23 nt, Artificial Sequence
  Synthetic
aggugggagugggagcauucggg

SEQ ID NO: 124110 - RNA, 24 nt, Artificial Sequence
  Synthetic
aaggugggagugggagcauucggg

SEQ ID NO: 124111 - RNA, 18 nt, Artificial Sequence
  Synthetic
agugggaggaguuggggg

SEQ ID NO: 124112 - RNA, 19 nt, Artificial Sequence
  Synthetic
gagugggaggaguuggggg

SEQ ID NO: 124113 - RNA, 20 nt, Artificial Sequence
  Synthetic
ugagugggaggaguuggggg

SEQ ID NO: 124114 - RNA, 21 nt, Artificial Sequence
  Synthetic
  misc_feature (1)..(1): n is a, c, g, or u
nugagugggaggaguuggggg

SEQ ID NO: 124115 - RNA, 22 nt, Artificial Sequence
  Synthetic
  misc_feature (2)..(2): n is a, c, g, or u
anugagugggaggaguuggggg

SEQ ID NO: 124116 - RNA, 23 nt, Artificial Sequence
  Synthetic
  misc_feature (3)..(3): n is a, c, g, or u
uanugagugggaggaguuggggg

SEQ ID NO: 124117 - RNA, 24 nt, Artificial Sequence
  Synthetic
  misc_feature (4)..(4): n is a, c, g, or u
uuanugagugggaggaguuggggg

SEQ ID NO: 124118 - RNA, 18 nt, Artificial Sequence
  Synthetic
gagugggaggaguugggg

SEQ ID NO: 124119 - RNA, 19 nt, Artificial Sequence
  Synthetic
ugagugggaggaguugggg

SEQ ID NO: 124120 - RNA, 20 nt, Artificial Sequence
  Synthetic
  misc_feature (1)..(1): n is a, c, g, or u
nugagugggaggaguugggg

SEQ ID NO: 124121 - RNA, 21 nt, Artificial Sequence
  Synthetic
  misc_feature (2)..(2): n is a, c, g, or u
anugagugggaggaguugggg

SEQ ID NO: 124122 - RNA, 22 nt, Artificial Sequence
  Synthetic
  misc_feature (3)..(3): n is a, c, g, or u
uanugagugggaggaguugggg

SEQ ID NO: 124123 - RNA, 23 nt, Artificial Sequence
  Synthetic
  misc_feature (4)..(4): n is a, c, g, or u
uuanugagugggaggaguugggg

SEQ ID NO: 124124 - RNA, 24 nt, Artificial Sequence
  Synthetic
  misc_feature (5)..(5): n is a, c, g, or u
uuuanugagugggaggaguugggg

SEQ ID NO: 124125 - RNA, 18 nt, Artificial Sequence
  Synthetic
aacccccacugguugggg

SEQ ID NO: 124126 - RNA, 19 nt, Artificial Sequence
  Synthetic
caacccccacugguugggg

SEQ ID NO: 124127 - RNA, 20 nt, Artificial Sequence
  Synthetic
gcaacccccacugguugggg

SEQ ID NO: 124128 - RNA, 21 nt, Artificial Sequence
  Synthetic
cgcaacccccacugguugggg

SEQ ID NO: 124129 - RNA, 22 nt, Artificial Sequence
  Synthetic
acgcaacccccacugguugggg

SEQ ID NO: 124130 - RNA, 23 nt, Artificial Sequence
  Synthetic
gacgcaacccccacugguugggg

SEQ ID NO: 124131 - RNA, 24 nt, Artificial Sequence
  Synthetic
ugacgcaacccccacugguugggg

SEQ ID NO: 124132 - RNA, 18 nt, Artificial Sequence
  Synthetic
caugggggacuguugggg

SEQ ID NO: 124133 - RNA, 19 nt, Artificial Sequence
  Synthetic
ccaugggggacuguugggg

SEQ ID NO: 124134 - RNA, 20 nt, Artificial Sequence
  Synthetic
cccaugggggacuguugggg

SEQ ID NO: 124135 - RNA, 21 nt, Artificial Sequence
  Synthetic
ccccaugggggacuguugggg

SEQ ID NO: 124136 - RNA, 22 nt, Artificial Sequence
  Synthetic
uccccaugggggacuguugggg

SEQ ID NO: 124137 - RNA, 23 nt, Artificial Sequence
  Synthetic
cuccccaugggggacuguugggg

SEQ ID NO: 124138 - RNA, 24 nt, Artificial Sequence
  Synthetic
ccuccccaugggggacuguugggg

SEQ ID NO: 124139 - RNA, 18 nt, Artificial Sequence
  Synthetic
  misc_feature (12)..(12): n is a, c, g, or u
gaugauguggunuugggg

SEQ ID NO: 124140 - RNA, 19 nt, Artificial Sequence
  Synthetic
  misc_feature (13)..(13): n is a, c, g, or u
ggaugauguggunuugggg

SEQ ID NO: 124141 - RNA, 20 nt, Artificial Sequence
  Synthetic
  misc_feature (14)..(14): n is a, c, g, or u
uggaugauguggunuugggg

SEQ ID NO: 124142 - RNA, 21 nt, Artificial Sequence
  Synthetic
  misc_feature (15)..(15): n is a, c, g, or u
auggaugauguggunuugggg

SEQ ID NO: 124143 - RNA, 22 nt, Artificial Sequence
  Synthetic
  misc_feature (16)..(16): n is a, c, g, or u
uauggaugauguggunuugggg

SEQ ID NO: 124144 - RNA, 23 nt, Artificial Sequence
  Synthetic
  misc_feature (17)..(17): n is a, c, g, or u
auauggaugauguggunuugggg

SEQ ID NO: 124145 - RNA, 24 nt, Artificial Sequence
  Synthetic
  misc_feature (18)..(18): n is a, c, g, or u
uauauggaugauguggunuugggg

SEQ ID NO: 124146 - RNA, 18 nt, Artificial Sequence
  Synthetic
  misc_feature (15)..(15): n is a, c, g, or u
ccuuggguggcuuunggg

SEQ ID NO: 124147 - RNA, 19 nt, Artificial Sequence
  Synthetic
  misc_feature (16)..(16): n is a, c, g, or u
gccuuggguggcuuunggg

SEQ ID NO: 124148 - RNA, 20 nt, Artificial Sequence
  Synthetic
  misc_feature (17)..(17): n is a, c, g, or u
ugccuuggguggcuuunggg

SEQ ID NO: 124149 - RNA, 21 nt, Artificial Sequence
  Synthetic
  misc_feature (18)..(18): n is a, c, g, or u
gugccuuggguggcuuunggg

SEQ ID NO: 124150 - RNA, 22 nt, Artificial Sequence
  Synthetic
  misc_feature (19)..(19): n is a, c, g, or u
ugugccuuggguggcuuunggg

SEQ ID NO: 124151 - RNA, 23 nt, Artificial Sequence
  Synthetic
  misc_feature (20)..(20): n is a, c, g, or u
cugugccuuggguggcuuunggg

SEQ ID NO: 124152 - RNA, 24 nt, Artificial Sequence
  Synthetic
  misc_feature (21)..(21): n is a, c, g, or u
gcugugccuuggguggcuuunggg

SEQ ID NO: 124153 - RNA, 18 nt, Artificial Sequence
  Synthetic
accucgaaaaggcauggg

SEQ ID NO: 124154 - RNA, 19 nt, Artificial Sequence
  Synthetic
aaccucgaaaaggcauggg

SEQ ID NO: 124155 - RNA, 20 nt, Artificial Sequence
  Synthetic
aaaccucgaaaaggcauggg

SEQ ID NO: 124156 - RNA, 21 nt, Artificial Sequence
  Synthetic
caaaccucgaaaaggcauggg

SEQ ID NO: 124157 - RNA, 22 nt, Artificial Sequence
  Synthetic
ccaaaccucgaaaaggcauggg

SEQ ID NO: 124158 - RNA, 23 nt, Artificial Sequence
  Synthetic
uccaaaccucgaaaaggcauggg

SEQ ID NO: 124159 - RNA, 24 nt, Artificial Sequence
  Synthetic
uuccaaaccucgaaaaggcauggg

SEQ ID NO: 124160 - RNA, 18 nt, Artificial Sequence
  Synthetic
  misc_feature (7)..(7): n is a, c, g, or u
ugucaanguuaauauggg

SEQ ID NO: 124161 - RNA, 19 nt, Artificial Sequence
  Synthetic
  misc_feature (8)..(8): n is a, c, g, or u
augucaanguuaauauggg

SEQ ID NO: 124162 - RNA, 20 nt, Artificial Sequence
  Synthetic
  misc_feature (9)..(9): n is a, c, g, or u
uaugucaanguuaauauggg

SEQ ID NO: 124163 - RNA, 21 nt, Artificial Sequence
  Synthetic
  misc_feature (10)..(10): n is a, c, g, or u
cuaugucaanguuaauauggg

SEQ ID NO: 124164 - RNA, 22 nt, Artificial Sequence
  Synthetic
  misc_feature (11)..(11): n is a, c, g, or u
gcuaugucaanguuaauauggg

SEQ ID NO: 124165 - RNA, 23 nt, Artificial Sequence
  Synthetic
  misc_feature (12)..(12): n is a, c, g, or u
agcuaugucaanguuaauauggg

SEQ ID NO: 124166 - RNA, 24 nt, Artificial Sequence
  Synthetic
  misc_feature (13)..(13): n is a, c, g, or u
cagcuaugucaanguuaauauggg

SEQ ID NO: 124167 - RNA, 18 nt, Artificial Sequence
  Synthetic
ucgcaaaauaccuauggg

SEQ ID NO: 124168 - RNA, 19 nt, Artificial Sequence
  Synthetic
uucgcaaaauaccuauggg

SEQ ID NO: 124169 - RNA, 20 nt, Artificial Sequence
  Synthetic
uuucgcaaaauaccuauggg

SEQ ID NO: 124170 - RNA, 21 nt, Artificial Sequence
  Synthetic
cuuucgcaaaauaccuauggg

SEQ ID NO: 124171 - RNA, 22 nt, Artificial Sequence
  Synthetic
gcuuucgcaaaauaccuauggg

SEQ ID NO: 124172 - RNA, 23 nt, Artificial Sequence
  Synthetic
ggcuuucgcaaaauaccuauggg

SEQ ID NO: 124173 - RNA, 24 nt, Artificial Sequence
  Synthetic
gggcuuucgcaaaauaccuauggg

SEQ ID NO: 124174 - RNA, 18 nt, Artificial Sequence
  Synthetic
ugaaucuagccaccuggg

SEQ ID NO: 124175 - RNA, 19 nt, Artificial Sequence
  Synthetic
augaaucuagccaccuggg

SEQ ID NO: 124176 - RNA, 20 nt, Artificial Sequence
  Synthetic
  misc_feature (1)..(1): n is a, c, g, or u
naugaaucuagccaccuggg

SEQ ID NO: 124177 - RNA, 21 nt, Artificial Sequence
  Synthetic
  misc_feature (2)..(2): n is a, c, g, or u
unaugaaucuagccaccuggg

SEQ ID NO: 124178 - RNA, 22 nt, Artificial Sequence
  Synthetic
  misc_feature (3)..(3): n is a, c, g, or u
uunaugaaucuagccaccuggg

SEQ ID NO: 124179 - RNA, 23 nt, Artificial Sequence
  Synthetic
  misc_feature (4)..(4): n is a, c, g, or u
guunaugaaucuagccaccuggg

SEQ ID NO: 124180 - RNA, 24 nt, Artificial Sequence
  Synthetic
  misc_feature (5)..(5): n is a, c, g, or u
aguunaugaaucuagccaccuggg

SEQ ID NO: 124181 - RNA, 18 nt, Artificial Sequence
  Synthetic
ggacgccaacaagguggg

SEQ ID NO: 124182 - RNA, 19 nt, Artificial Sequence
  Synthetic
cggacgccaacaagguggg

SEQ ID NO: 124183 - RNA, 20 nt, Artificial Sequence
  Synthetic
ccggacgccaacaagguggg

SEQ ID NO: 124184 - RNA, 21 nt, Artificial Sequence
  Synthetic
gccggacgccaacaagguggg

SEQ ID NO: 124185 - RNA, 22 nt, Artificial Sequence
  Synthetic
ggccggacgccaacaagguggg

SEQ ID NO: 124186 - RNA, 23 nt, Artificial Sequence
  Synthetic
uggccggacgccaacaagguggg

SEQ ID NO: 124187 - RNA, 24 nt, Artificial Sequence
  Synthetic
cuggccggacgccaacaagguggg

SEQ ID NO: 124188 - RNA, 18 nt, Artificial Sequence
  Synthetic
ggucaccauauucuuggg

SEQ ID NO: 124189 - RNA, 19 nt, Artificial Sequence
  Synthetic
gggucaccauauucuuggg

SEQ ID NO: 124190 - RNA, 20 nt, Artificial Sequence
  Synthetic
cgggucaccauauucuuggg

SEQ ID NO: 124191 - RNA, 18 nt, Artificial Sequence
  Synthetic
ugagugggaggaguuggg

SEQ ID NO: 124192 - RNA, 19 nt, Artificial Sequence
  Synthetic
  misc_feature (1)..(1): n is a, c, g, or u
nugagugggaggaguuggg

SEQ ID NO: 124193 - RNA, 20 nt, Artificial Sequence
  Synthetic
  misc_feature (2)..(2): n is a, c, g, or u
anugagugggaggaguuggg

SEQ ID NO: 124194 - RNA, 21 nt, Artificial Sequence
  Synthetic
  misc_feature (3)..(3): n is a, c, g, or u
uanugagugggaggaguuggg

SEQ ID NO: 124195 - RNA, 22 nt, Artificial Sequence
  Synthetic
  misc_feature (4)..(4): n is a, c, g, or u
uuanugagugggaggaguuggg

SEQ ID NO: 124196 - RNA, 23 nt, Artificial Sequence
  Synthetic
  misc_feature (5)..(5): n is a, c, g, or u
uuuanugagugggaggaguuggg

SEQ ID NO: 124197 - RNA, 24 nt, Artificial Sequence
  Synthetic
  misc_feature (6)..(6): n is a, c, g, or u
guuuanugagugggaggaguuggg

SEQ ID NO: 124198 - RNA, 18 nt, Artificial Sequence
  Synthetic
ccaugggggacuguuggg

SEQ ID NO: 124199 - RNA, 19 nt, Artificial Sequence
  Synthetic
cccaugggggacuguuggg

SEQ ID NO: 124200 - RNA, 20 nt, Artificial Sequence
  Synthetic
ccccaugggggacuguuggg

SEQ ID NO: 124201 - RNA, 21 nt, Artificial Sequence
  Synthetic
uccccaugggggacuguuggg

SEQ ID NO: 124202 - RNA, 22 nt, Artificial Sequence
  Synthetic
cuccccaugggggacuguuggg

SEQ ID NO: 124203 - RNA, 23 nt, Artificial Sequence
  Synthetic
ccuccccaugggggacuguuggg

SEQ ID NO: 124204 - RNA, 24 nt, Artificial Sequence
  Synthetic
  misc_feature (1)..(1): n is a, c, g, or u
nccuccccaugggggacuguuggg

SEQ ID NO: 124205 - RNA, 18 nt, Artificial Sequence
  Synthetic
  misc_feature (16)..(16): n is a, c, g, or u
uguuuugcucgcagcngg

SEQ ID NO: 124206 - RNA, 19 nt, Artificial Sequence
  Synthetic
  misc_feature (17)..(17): n is a, c, g, or u
uuguuuugcucgcagcngg

SEQ ID NO: 124207 - RNA, 20 nt, Artificial Sequence
  Synthetic
  misc_feature (18)..(18): n is a, c, g, or u
cuuguuuugcucgcagcngg

SEQ ID NO: 124208 - RNA, 21 nt, Artificial Sequence
  Synthetic
  misc_feature (19)..(19): n is a, c, g, or u
gcuuguuuugcucgcagcngg

SEQ ID NO: 124209 - RNA, 22 nt, Artificial Sequence
  Synthetic
  misc_feature (20)..(20): n is a, c, g, or u
cgcuuguuuugcucgcagcngg

SEQ ID NO: 124210 - RNA, 23 nt, Artificial Sequence
  Synthetic
  misc_feature (21)..(21): n is a, c, g, or u
ccgcuuguuuugcucgcagcngg

SEQ ID NO: 124211 - RNA, 24 nt, Artificial Sequence
  Synthetic
  misc_feature (22)..(22): n is a, c, g, or u
gccgcuuguuuugcucgcagcngg

SEQ ID NO: 124212 - RNA, 18 nt, Artificial Sequence
  Synthetic
  misc_feature (3)..(3): n is a, c, g, or u
ccncacaaggacaacugg

SEQ ID NO: 124213 - RNA, 19 nt, Artificial Sequence
  Synthetic
  misc_feature (4)..(4): n is a, c, g, or u
cccncacaaggacaacugg

SEQ ID NO: 124214 - RNA, 20 nt, Artificial Sequence
  Synthetic
  misc_feature (5)..(5): n is a, c, g, or u
acccncacaaggacaacugg

SEQ ID NO: 124215 - RNA, 21 nt, Artificial Sequence
  Synthetic
  misc_feature (6)..(6): n is a, c, g, or u
aacccncacaaggacaacugg

SEQ ID NO: 124216 - RNA, 22 nt, Artificial Sequence
  Synthetic
  misc_feature (7)..(7): n is a, c, g, or u
caacccncacaaggacaacugg

SEQ ID NO: 124217 - RNA, 23 nt, Artificial Sequence
  Synthetic
  misc_feature (8)..(8): n is a, c, g, or u
ucaacccncacaaggacaacugg

SEQ ID NO: 124218 - RNA, 24 nt, Artificial Sequence
  Synthetic
  misc_feature (9)..(9): n is a, c, g, or u
cucaacccncacaaggacaacugg

SEQ ID NO: 124219 - RNA, 18 nt, Artificial Sequence
  Synthetic
ugacgcaacccccacugg

SEQ ID NO: 124220 - RNA, 19 nt, Artificial Sequence
  Synthetic
cugacgcaacccccacugg

SEQ ID NO: 124221 - RNA, 20 nt, Artificial Sequence
  Synthetic
gcugacgcaacccccacugg

SEQ ID NO: 124222 - RNA, 21 nt, Artificial Sequence
  Synthetic
ugcugacgcaacccccacugg

SEQ ID NO: 124223 - RNA, 22 nt, Artificial Sequence
  Synthetic
uugcugacgcaacccccacugg

SEQ ID NO: 124224 - RNA, 23 nt, Artificial Sequence
  Synthetic
uuugcugacgcaacccccacugg

SEQ ID NO: 124225 - RNA, 24 nt, Artificial Sequence
  Synthetic
guuugcugacgcaacccccacugg

SEQ ID NO: 124226 - RNA, 18 nt, Artificial Sequence
  Synthetic
augaaucuagccaccugg

SEQ ID NO: 124227 - RNA, 19 nt, Artificial Sequence
  Synthetic
  misc_feature (1)..(1): n is a, c, g, or u
naugaaucuagccaccugg

SEQ ID NO: 124228 - RNA, 20 nt, Artificial Sequence
  Synthetic
  misc_feature (2)..(2): n is a, c, g, or u
unaugaaucuagccaccugg

SEQ ID NO: 124229 - RNA, 21 nt, Artificial Sequence
  Synthetic
  misc_feature (3)..(3): n is a, c, g, or u
uunaugaaucuagccaccugg

SEQ ID NO: 124230 - RNA, 22 nt, Artificial Sequence
  Synthetic
  misc_feature (4)..(4): n is a, c, g, or u
guunaugaaucuagccaccugg

SEQ ID NO: 124231 - RNA, 23 nt, Artificial Sequence
  Synthetic
  misc_feature (5)..(5): n is a, c, g, or u
aguunaugaaucuagccaccugg

SEQ ID NO: 124232 - RNA, 24 nt, Artificial Sequence
  Synthetic
  misc_feature (6)..(6): n is a, c, g, or u
gaguunaugaaucuagccaccugg

SEQ ID NO: 124233 - RNA, 18 nt, Artificial Sequence
  Synthetic
  misc_feature (11)..(11): n is a, c, g, or u
uguguguuuanugagugg

SEQ ID NO: 124234 - RNA, 19 nt, Artificial Sequence
  Synthetic
  misc_feature (12)..(12): n is a, c, g, or u
cuguguguuuanugagugg

SEQ ID NO: 124235 - RNA, 20 nt, Artificial Sequence
  Synthetic
  misc_feature (13)..(13): n is a, c, g, or u
acuguguguuuanugagugg

SEQ ID NO: 124236 - RNA, 21 nt, Artificial Sequence
  Synthetic
  misc_feature (14)..(14): n is a, c, g, or u
gacuguguguuuanugagugg

SEQ ID NO: 124237 - RNA, 22 nt, Artificial Sequence
  Synthetic
  misc_feature (15)..(15): n is a, c, g, or u
agacuguguguuuanugagugg

SEQ ID NO: 124238 - RNA, 23 nt, Artificial Sequence
  Synthetic
  misc_feature (16)..(16): n is a, c, g, or u
aagacuguguguuuanugagugg

SEQ ID NO: 124239 - RNA, 24 nt, Artificial Sequence
  Synthetic
  misc_feature (17)..(17): n is a, c, g, or u
aaagacuguguguuuanugagugg

SEQ ID NO: 124240 - RNA, 18 nt, Artificial Sequence
  Synthetic
aacacccgugugucuugg

SEQ ID NO: 124241 - RNA, 19 nt, Artificial Sequence
  Synthetic
  misc_feature (1)..(1): n is a, c, g, or u
naacacccgugugucuugg

SEQ ID NO: 124242 - RNA, 20 nt, Artificial Sequence
  Synthetic
  misc_feature (2)..(2): n is a, c, g, or u
gnaacacccgugugucuugg

SEQ ID NO: 124243 - RNA, 21 nt, Artificial Sequence
  Synthetic
  misc_feature (3)..(3): n is a, c, g, or u
ggnaacacccgugugucuugg

SEQ ID NO: 124244 - RNA, 22 nt, Artificial Sequence
  Synthetic
  misc_feature (4)..(4): n is a, c, g, or u
gggnaacacccgugugucuugg

SEQ ID NO: 124245 - RNA, 23 nt, Artificial Sequence
  Synthetic
  misc_feature (5)..(5): n is a, c, g, or u
ggggnaacacccgugugucuugg

SEQ ID NO: 124246 - RNA, 24 nt, Artificial Sequence
  Synthetic
  misc_feature (6)..(6): n is a, c, g, or u
aggggnaacacccgugugucuugg

SEQ ID NO: 124247 - RNA, 18 nt, Artificial Sequence
  Synthetic
  misc_feature (1)..(1): n is a, c, g, or u
nugagugggaggaguugg

SEQ ID NO: 124248 - RNA, 19 nt, Artificial Sequence
  Synthetic
  misc_feature (2)..(2): n is a, c, g, or u
anugagugggaggaguugg

SEQ ID NO: 124249 - RNA, 20 nt, Artificial Sequence
  Synthetic
  misc_feature (3)..(3): n is a, c, g, or u
uanugagugggaggaguugg

SEQ ID NO: 124250 - RNA, 21 nt, Artificial Sequence
  Synthetic
  misc_feature (4)..(4): n is a, c, g, or u
uuanugagugggaggaguugg

SEQ ID NO: 124251 - RNA, 22 nt, Artificial Sequence
  Synthetic
  misc_feature (5)..(5): n is a, c, g, or u
uuuanugagugggaggaguugg

SEQ ID NO: 124252 - RNA, 23 nt, Artificial Sequence
  Synthetic
  misc_feature (6)..(6): n is a, c, g, or u
guuuanugagugggaggaguugg

SEQ ID NO: 124253 - RNA, 24 nt, Artificial Sequence
  Synthetic
  misc_feature (7)..(7): n is a, c, g, or u
uguuuanugagugggaggaguugg

SEQ ID NO: 124254 - RNA, 18 nt, Artificial Sequence
  Synthetic
cccaugggggacuguugg

SEQ ID NO: 124255 - RNA, 19 nt, Artificial Sequence
  Synthetic
ccccaugggggacuguugg

SEQ ID NO: 124256 - RNA, 20 nt, Artificial Sequence
  Synthetic
uccccaugggggacuguugg

SEQ ID NO: 124257 - RNA, 21 nt, Artificial Sequence
  Synthetic
cuccccaugggggacuguugg

SEQ ID NO: 124258 - RNA, 22 nt, Artificial Sequence
  Synthetic
ccuccccaugggggacuguugg

SEQ ID NO: 124259 - RNA, 23 nt, Artificial Sequence
  Synthetic
  misc_feature (1)..(1): n is a, c, g, or u
nccuccccaugggggacuguugg

SEQ ID NO: 124260 - RNA, 24 nt, Artificial Sequence
  Synthetic
  misc_feature (1)..(2): n is a, c, g, or u
nnccuccccaugggggacuguugg

SEQ ID NO: 124261 - RNA, 18 nt, Artificial Sequence
  Synthetic
caagcuauucuguguugg

SEQ ID NO: 124262 - RNA, 19 nt, Artificial Sequence
  Synthetic
gcaagcuauucuguguugg

SEQ ID NO: 124263 - RNA, 20 nt, Artificial Sequence
  Synthetic
ggcaagcuauucuguguugg

SEQ ID NO: 124264 - RNA, 21 nt, Artificial Sequence
  Synthetic
aggcaagcuauucuguguugg

SEQ ID NO: 124265 - RNA, 22 nt, Artificial Sequence
  Synthetic
caggcaagcuauucuguguugg

SEQ ID NO: 124266 - RNA, 23 nt, Artificial Sequence
  Synthetic
ucaggcaagcuauucuguguugg

SEQ ID NO: 124267 - RNA, 24 nt, Artificial Sequence
  Synthetic
cucaggcaagcuauucuguguugg

SEQ ID NO: 124268 - RNA, 18 nt, Artificial Sequence
  Synthetic
uuccugucuuacuuuugg

SEQ ID NO: 124269 - RNA, 19 nt, Artificial Sequence
  Synthetic
uuuccugucuuacuuuugg

SEQ ID NO: 124270 - RNA, 20 nt, Artificial Sequence
  Synthetic
auuuccugucuuacuuuugg

SEQ ID NO: 124271 - RNA, 21 nt, Artificial Sequence
  Synthetic
cauuuccugucuuacuuuugg

SEQ ID NO: 124272 - RNA, 22 nt, Artificial Sequence
  Synthetic
acauuuccugucuuacuuuugg

SEQ ID NO: 124273 - RNA, 23 nt, Artificial Sequence
  Synthetic
cacauuuccugucuuacuuuugg

SEQ ID NO: 124274 - RNA, 24 nt, Artificial Sequence
  Synthetic
ucacauuuccugucuuacuuuugg

SEQ ID NO: 124275 - RNA, 18 nt, Artificial Sequence
  Synthetic
  misc_feature (9)..(9): n is a, c, g, or u
  misc_feature (17)..(17): n is a, c, g, or u
cucgcagcnggucuggng

SEQ ID NO: 124276 - RNA, 19 nt, Artificial Sequence
  Synthetic
  misc_feature (10)..(10): n is a, c, g, or u
  misc_feature (18)..(18): n is a, c, g, or u
gcucgcagcnggucuggng

SEQ ID NO: 124277 - RNA, 20 nt, Artificial Sequence
  Synthetic
  misc_feature (11)..(11): n is a, c, g, or u
  misc_feature (19)..(19): n is a, c, g, or u
ugcucgcagcnggucuggng

SEQ ID NO: 124278 - RNA, 21 nt, Artificial Sequence
  Synthetic
  misc_feature (12)..(12): n is a, c, g, or u
  misc_feature (20)..(20): n is a, c, g, or u
uugcucgcagcnggucuggng

SEQ ID NO: 124279 - RNA, 22 nt, Artificial Sequence
  Synthetic
  misc_feature (13)..(13): n is a, c, g, or u
  misc_feature (21)..(21): n is a, c, g, or u
uuugcucgcagcnggucuggng

SEQ ID NO: 124280 - RNA, 23 nt, Artificial Sequence
  Synthetic
  misc_feature (14)..(14): n is a, c, g, or u
  misc_feature (22)..(22): n is a, c, g, or u
uuuugcucgcagcnggucuggng

SEQ ID NO: 124281 - RNA, 24 nt, Artificial Sequence
  Synthetic
  misc_feature (15)..(15): n is a, c, g, or u
  misc_feature (23)..(23): n is a, c, g, or u
guuuugcucgcagcnggucuggng

SEQ ID NO: 124282 - RNA, 18 nt, Artificial Sequence
  Synthetic
  misc_feature (16)..(17): n is a, c, g, or u
gggauauguaauuggnng

SEQ ID NO: 124283 - RNA, 19 nt, Artificial Sequence
  Synthetic
  misc_feature (17)..(18): n is a, c, g, or u
ugggauauguaauuggnng

SEQ ID NO: 124284 - RNA, 20 nt, Artificial Sequence
  Synthetic
  misc_feature (18)..(19): n is a, c, g, or u
augggauauguaauuggnng

SEQ ID NO: 124285 - RNA, 21 nt, Artificial Sequence
  Synthetic
  misc_feature (19)..(20): n is a, c, g, or u
caugggauauguaauuggnng

SEQ ID NO: 124286 - RNA, 22 nt, Artificial Sequence
  Synthetic
  misc_feature (20)..(21): n is a, c, g, or u
ucaugggauauguaauuggnng

SEQ ID NO: 124287 - RNA, 23 nt, Artificial Sequence
  Synthetic
  misc_feature (21)..(22): n is a, c, g, or u
uucaugggauauguaauuggnng

SEQ ID NO: 124288 - RNA, 24 nt, Artificial Sequence
  Synthetic
  misc_feature (22)..(23): n is a, c, g, or u
cuucaugggauauguaauuggnng

SEQ ID NO: 124289 - RNA, 18 nt, Artificial Sequence
  Synthetic
gacccuguaccgaacaug

SEQ ID NO: 124290 - RNA, 19 nt, Artificial Sequence
  Synthetic
ggacccuguaccgaacaug

SEQ ID NO: 124291 - RNA, 20 nt, Artificial Sequence
  Synthetic
gggacccuguaccgaacaug

SEQ ID NO: 124292 - RNA, 21 nt, Artificial Sequence
  Synthetic
ggggacccuguaccgaacaug

SEQ ID NO: 124293 - RNA, 22 nt, Artificial Sequence
  Synthetic
uggggacccuguaccgaacaug

SEQ ID NO: 124294 - RNA, 23 nt, Artificial Sequence
  Synthetic
cuggggacccuguaccgaacaug

SEQ ID NO: 124295 - RNA, 24 nt, Artificial Sequence
  Synthetic
acuggggacccuguaccgaacaug

SEQ ID NO: 124296 - RNA, 18 nt, Artificial Sequence
  Synthetic
  misc_feature (1)..(1): n is a, c, g, or u
naccagcaccggaccaug

SEQ ID NO: 124297 - RNA, 19 nt, Artificial Sequence
  Synthetic
  misc_feature (2)..(2): n is a, c, g, or u
cnaccagcaccggaccaug

SEQ ID NO: 124298 - RNA, 20 nt, Artificial Sequence
  Synthetic
  misc_feature (3)..(3): n is a, c, g, or u
acnaccagcaccggaccaug

SEQ ID NO: 124299 - RNA, 21 nt, Artificial Sequence
  Synthetic
  misc_feature (4)..(4): n is a, c, g, or u
aacnaccagcaccggaccaug

SEQ ID NO: 124300 - RNA, 22 nt, Artificial Sequence
  Synthetic
  misc_feature (5)..(5): n is a, c, g, or u
caacnaccagcaccggaccaug

SEQ ID NO: 124301 - RNA, 23 nt, Artificial Sequence
  Synthetic
  misc_feature (6)..(6): n is a, c, g, or u
ucaacnaccagcaccggaccaug

SEQ ID NO: 124302 - RNA, 24 nt, Artificial Sequence
  Synthetic
  misc_feature (7)..(7): n is a, c, g, or u
aucaacnaccagcaccggaccaug

SEQ ID NO: 124303 - RNA, 18 nt, Artificial Sequence
  Synthetic
  misc_feature (7)..(8): n is a, c, g, or u
gguucannccuccccaug

SEQ ID NO: 124304 - RNA, 19 nt, Artificial Sequence
  Synthetic
  misc_feature (8)..(9): n is a, c, g, or u
ggguucannccuccccaug

SEQ ID NO: 124305 - RNA, 20 nt, Artificial Sequence
  Synthetic
  misc_feature (9)..(10): n is a, c, g, or u
aggguucannccuccccaug

SEQ ID NO: 124306 - RNA, 21 nt, Artificial Sequence
  Synthetic
  misc_feature (10)..(11): n is a, c, g, or u
caggguucannccuccccaug

SEQ ID NO: 124307 - RNA, 22 nt, Artificial Sequence
  Synthetic
  misc_feature (11)..(12): n is a, c, g, or u
ccaggguucannccuccccaug

SEQ ID NO: 124308 - RNA, 23 nt, Artificial Sequence
  Synthetic
  misc_feature (12)..(13): n is a, c, g, or u
gccaggguucannccuccccaug

SEQ ID NO: 124309 - RNA, 24 nt, Artificial Sequence
  Synthetic
  misc_feature (13)..(14): n is a, c, g, or u
ggccaggguucannccuccccaug

SEQ ID NO: 124310 - RNA, 18 nt, Artificial Sequence
  Synthetic
  misc_feature (3)..(3): n is a, c, g, or u
aunggccaucagcgcaug

SEQ ID NO: 124311 - RNA, 19 nt, Artificial Sequence
  Synthetic
  misc_feature (4)..(4): n is a, c, g, or u
caunggccaucagcgcaug

SEQ ID NO: 124312 - RNA, 20 nt, Artificial Sequence
  Synthetic
  misc_feature (5)..(5): n is a, c, g, or u
ccaunggccaucagcgcaug

SEQ ID NO: 124313 - RNA, 21 nt, Artificial Sequence
  Synthetic
  misc_feature (6)..(6): n is a, c, g, or u
gccaunggccaucagcgcaug

SEQ ID NO: 124314 - RNA, 22 nt, Artificial Sequence
  Synthetic
  misc_feature (7)..(7): n is a, c, g, or u
ggccaunggccaucagcgcaug

SEQ ID NO: 124315 - RNA, 23 nt, Artificial Sequence
  Synthetic
  misc_feature (8)..(8): n is a, c, g, or u
uggccaunggccaucagcgcaug

SEQ ID NO: 124316 - RNA, 24 nt, Artificial Sequence
  Synthetic
  misc_feature (9)..(9): n is a, c, g, or u
uuggccaunggccaucagcgcaug

SEQ ID NO: 124317 - RNA, 18 nt, Artificial Sequence
  Synthetic
  misc_feature (4)..(4): n is a, c, g, or u
cccncacaaggacaacug

SEQ ID NO: 124318 - RNA, 19 nt, Artificial Sequence
  Synthetic
  misc_feature (5)..(5): n is a, c, g, or u
acccncacaaggacaacug

SEQ ID NO: 124319 - RNA, 20 nt, Artificial Sequence
  Synthetic
  misc_feature (6)..(6): n is a, c, g, or u
aacccncacaaggacaacug

SEQ ID NO: 124320 - RNA, 21 nt, Artificial Sequence
  Synthetic
  misc_feature (7)..(7): n is a, c, g, or u
caacccncacaaggacaacug

SEQ ID NO: 124321 - RNA, 22 nt, Artificial Sequence
  Synthetic
  misc_feature (8)..(8): n is a, c, g, or u
ucaacccncacaaggacaacug

SEQ ID NO: 124322 - RNA, 23 nt, Artificial Sequence
  Synthetic
  misc_feature (9)..(9): n is a, c, g, or u
cucaacccncacaaggacaacug

SEQ ID NO: 124323 - RNA, 24 nt, Artificial Sequence
  Synthetic
  misc_feature (10)..(10): n is a, c, g, or u
ccucaacccncacaaggacaacug

SEQ ID NO: 124324 - RNA, 18 nt, Artificial Sequence
  Synthetic
cugacgcaacccccacug

SEQ ID NO: 124325 - RNA, 19 nt, Artificial Sequence
  Synthetic
gcugacgcaacccccacug

SEQ ID NO: 124326 - RNA, 20 nt, Artificial Sequence
  Synthetic
ugcugacgcaacccccacug

SEQ ID NO: 124327 - RNA, 18 nt, Artificial Sequence
  Synthetic
uagggcuuucccccacug

SEQ ID NO: 124328 - RNA, 19 nt, Artificial Sequence
  Synthetic
guagggcuuucccccacug

SEQ ID NO: 124329 - RNA, 20 nt, Artificial Sequence
  Synthetic
cguagggcuuucccccacug

SEQ ID NO: 124330 - RNA, 21 nt, Artificial Sequence
  Synthetic
ucguagggcuuucccccacug

SEQ ID NO: 124331 - RNA, 22 nt, Artificial Sequence
  Synthetic
uucguagggcuuucccccacug

SEQ ID NO: 124332 - RNA, 23 nt, Artificial Sequence
  Synthetic
guucguagggcuuucccccacug

SEQ ID NO: 124333 - RNA, 24 nt, Artificial Sequence
  Synthetic
gguucguagggcuuucccccacug

SEQ ID NO: 124334 - RNA, 18 nt, Artificial Sequence
  Synthetic
ccuccccaugggggacug

SEQ ID NO: 124335 - RNA, 19 nt, Artificial Sequence
  Synthetic
  misc_feature (1)..(1): n is a, c, g, or u
nccuccccaugggggacug

SEQ ID NO: 124336 - RNA, 20 nt, Artificial Sequence
  Synthetic
  misc_feature (1)..(2): n is a, c, g, or u
nnccuccccaugggggacug

SEQ ID NO: 124337 - RNA, 21 nt, Artificial Sequence
  Synthetic
  misc_feature (2)..(3): n is a, c, g, or u
annccuccccaugggggacug

SEQ ID NO: 124338 - RNA, 22 nt, Artificial Sequence
  Synthetic
  misc_feature (3)..(4): n is a, c, g, or u
cannccuccccaugggggacug

SEQ ID NO: 124339 - RNA, 23 nt, Artificial Sequence
  Synthetic
  misc_feature (4)..(5): n is a, c, g, or u
ucannccuccccaugggggacug

SEQ ID NO: 124340 - RNA, 24 nt, Artificial Sequence
  Synthetic
  misc_feature (5)..(6): n is a, c, g, or u
uucannccuccccaugggggacug

SEQ ID NO: 124341 - RNA, 18 nt, Artificial Sequence
  Synthetic
cucugccgauccauacug

SEQ ID NO: 124342 - RNA, 19 nt, Artificial Sequence
  Synthetic
ccucugccgauccauacug

SEQ ID NO: 124343 - RNA, 20 nt, Artificial Sequence
  Synthetic
uccucugccgauccauacug

SEQ ID NO: 124344 - RNA, 21 nt, Artificial Sequence
  Synthetic
cuccucugccgauccauacug

SEQ ID NO: 124345 - RNA, 22 nt, Artificial Sequence
  Synthetic
ucuccucugccgauccauacug

SEQ ID NO: 124346 - RNA, 23 nt, Artificial Sequence
  Synthetic
gucuccucugccgauccauacug

SEQ ID NO: 124347 - RNA, 24 nt, Artificial Sequence
  Synthetic
ugucuccucugccgauccauacug

SEQ ID NO: 124348 - RNA, 18 nt, Artificial Sequence
  Synthetic
  misc_feature (2)..(2): n is a, c, g, or u
cnuguucauguccuacug

SEQ ID NO: 124349 - RNA, 19 nt, Artificial Sequence
  Synthetic
  misc_feature (3)..(3): n is a, c, g, or u
ucnuguucauguccuacug

SEQ ID NO: 124350 - RNA, 20 nt, Artificial Sequence
  Synthetic
  misc_feature (4)..(4): n is a, c, g, or u
cucnuguucauguccuacug

SEQ ID NO: 124351 - RNA, 21 nt, Artificial Sequence
  Synthetic
  misc_feature (5)..(5): n is a, c, g, or u
ucucnuguucauguccuacug

SEQ ID NO: 124352 - RNA, 22 nt, Artificial Sequence
  Synthetic
  misc_feature (6)..(6): n is a, c, g, or u
aucucnuguucauguccuacug

SEQ ID NO: 124353 - RNA, 23 nt, Artificial Sequence
  Synthetic
  misc_feature (7)..(7): n is a, c, g, or u
caucucnuguucauguccuacug

SEQ ID NO: 124354 - RNA, 24 nt, Artificial Sequence
  Synthetic
  misc_feature (8)..(8): n is a, c, g, or u
ucaucucnuguucauguccuacug

SEQ ID NO: 124355 - RNA, 18 nt, Artificial Sequence
  Synthetic
  misc_feature (10)..(10): n is a, c, g, or u
aacgcccacnggaaccug

SEQ ID NO: 124356 - RNA, 19 nt, Artificial Sequence
  Synthetic
  misc_feature (11)..(11): n is a, c, g, or u
gaacgcccacnggaaccug

SEQ ID NO: 124357 - RNA, 20 nt, Artificial Sequence
  Synthetic
  misc_feature (12)..(12): n is a, c, g, or u
ugaacgcccacnggaaccug

SEQ ID NO: 124358 - RNA, 21 nt, Artificial Sequence
  Synthetic
  misc_feature (13)..(13): n is a, c, g, or u
gugaacgcccacnggaaccug

SEQ ID NO: 124359 - RNA, 22 nt, Artificial Sequence
  Synthetic
  misc_feature (14)..(14): n is a, c, g, or u
cgugaacgcccacnggaaccug

SEQ ID NO: 124360 - RNA, 23 nt, Artificial Sequence
  Synthetic
  misc_feature (15)..(15): n is a, c, g, or u
ccgugaacgcccacnggaaccug

SEQ ID NO: 124361 - RNA, 24 nt, Artificial Sequence
  Synthetic
  misc_feature (16)..(16): n is a, c, g, or u
accgugaacgcccacnggaaccug

SEQ ID NO: 124362 - RNA, 18 nt, Artificial Sequence
  Synthetic
  misc_feature (1)..(1): n is a, c, g, or u
naugaaucuagccaccug

SEQ ID NO: 124363 - RNA, 19 nt, Artificial Sequence
  Synthetic
  misc_feature (2)..(2): n is a, c, g, or u
unaugaaucuagccaccug

SEQ ID NO: 124364 - RNA, 20 nt, Artificial Sequence
  Synthetic
  misc_feature (3)..(3): n is a, c, g, or u
uunaugaaucuagccaccug

SEQ ID NO: 124365 - RNA, 21 nt, Artificial Sequence
  Synthetic
  misc_feature (4)..(4): n is a, c, g, or u
guunaugaaucuagccaccug

SEQ ID NO: 124366 - RNA, 22 nt, Artificial Sequence
  Synthetic
  misc_feature (5)..(5): n is a, c, g, or u
aguunaugaaucuagccaccug

SEQ ID NO: 124367 - RNA, 23 nt, Artificial Sequence
  Synthetic
  misc_feature (6)..(6): n is a, c, g, or u
gaguunaugaaucuagccaccug

SEQ ID NO: 124368 - RNA, 24 nt, Artificial Sequence
  Synthetic
  misc_feature (7)..(7): n is a, c, g, or u
ugaguunaugaaucuagccaccug

SEQ ID NO: 124369 - RNA, 18 nt, Artificial Sequence
  Synthetic
caggaacagugagcccug

SEQ ID NO: 124370 - RNA, 19 nt, Artificial Sequence
  Synthetic
ucaggaacagugagcccug

SEQ ID NO: 124371 - RNA, 20 nt, Artificial Sequence
  Synthetic
uucaggaacagugagcccug

SEQ ID NO: 124372 - RNA, 21 nt, Artificial Sequence
  Synthetic
guucaggaacagugagcccug

SEQ ID NO: 124373 - RNA, 22 nt, Artificial Sequence
  Synthetic
aguucaggaacagugagcccug

SEQ ID NO: 124374 - RNA, 23 nt, Artificial Sequence
  Synthetic
caguucaggaacagugagcccug

SEQ ID NO: 124375 - RNA, 24 nt, Artificial Sequence
  Synthetic
ccaguucaggaacagugagcccug

SEQ ID NO: 124376 - RNA, 18 nt, Artificial Sequence
  Synthetic
gcugccaacuggauccug

SEQ ID NO: 124377 - RNA, 19 nt, Artificial Sequence
  Synthetic
ugcugccaacuggauccug

SEQ ID NO: 124378 - RNA, 20 nt, Artificial Sequence
  Synthetic
gugcugccaacuggauccug

SEQ ID NO: 124379 - RNA, 21 nt, Artificial Sequence
  Synthetic
ugugcugccaacuggauccug

SEQ ID NO: 124380 - RNA, 22 nt, Artificial Sequence
  Synthetic
cugugcugccaacuggauccug

SEQ ID NO: 124381 - RNA, 23 nt, Artificial Sequence
  Synthetic
gcugugcugccaacuggauccug

SEQ ID NO: 124382 - RNA, 24 nt, Artificial Sequence
  Synthetic
ggcugugcugccaacuggauccug

SEQ ID NO: 124383 - RNA, 18 nt, Artificial Sequence
  Synthetic
  misc_feature (11)..(11): n is a, c, g, or u
aaaccugcacnacuccug

SEQ ID NO: 124384 - RNA, 19 nt, Artificial Sequence
  Synthetic
  misc_feature (12)..(12): n is a, c, g, or u
aaaaccugcacnacuccug

SEQ ID NO: 124385 - RNA, 20 nt, Artificial Sequence
  Synthetic
  misc_feature (13)..(13): n is a, c, g, or u
caaaaccugcacnacuccug

SEQ ID NO: 124386 - RNA, 21 nt, Artificial Sequence
  Synthetic
  misc_feature (14)..(14): n is a, c, g, or u
gcaaaaccugcacnacuccug

SEQ ID NO: 124387 - RNA, 22 nt, Artificial Sequence
  Synthetic
  misc_feature (15)..(15): n is a, c, g, or u
ugcaaaaccugcacnacuccug

SEQ ID NO: 124388 - RNA, 23 nt, Artificial Sequence
  Synthetic
  misc_feature (16)..(16): n is a, c, g, or u
augcaaaaccugcacnacuccug

SEQ ID NO: 124389 - RNA, 24 nt, Artificial Sequence
  Synthetic
  misc_feature (17)..(17): n is a, c, g, or u
caugcaaaaccugcacnacuccug

SEQ ID NO: 124390 - RNA, 18 nt, Artificial Sequence
  Synthetic
  misc_feature (6)..(6): n is a, c, g, or u
acaucnuuuccauggcug

SEQ ID NO: 124391 - RNA, 19 nt, Artificial Sequence
  Synthetic
  misc_feature (7)..(7): n is a, c, g, or u
uacaucnuuuccauggcug

SEQ ID NO: 124392 - RNA, 20 nt, Artificial Sequence
  Synthetic
  misc_feature (8)..(8): n is a, c, g, or u
auacaucnuuuccauggcug

SEQ ID NO: 124393 - RNA, 21 nt, Artificial Sequence
  Synthetic
  misc_feature (9)..(9): n is a, c, g, or u
uauacaucnuuuccauggcug

SEQ ID NO: 124394 - RNA, 22 nt, Artificial Sequence
  Synthetic
  misc_feature (1)..(1): n is a, c, g, or u
  misc_feature (10)..(10): n is a, c, g, or u
nuauacaucnuuuccauggcug

SEQ ID NO: 124395 - RNA, 23 nt, Artificial Sequence
  Synthetic
  misc_feature (2)..(2): n is a, c, g, or u
  misc_feature (11)..(11): n is a, c, g, or u
anuauacaucnuuuccauggcug

SEQ ID NO: 124396 - RNA, 24 nt, Artificial Sequence
  Synthetic
  misc_feature (3)..(3): n is a, c, g, or u
  misc_feature (12)..(12): n is a, c, g, or u
aanuauacaucnuuuccauggcug

SEQ ID NO: 124397 - RNA, 18 nt, Artificial Sequence
  Synthetic
guuucccucauguugcug

SEQ ID NO: 124398 - RNA, 19 nt, Artificial Sequence
  Synthetic
uguuucccucauguugcug

SEQ ID NO: 124399 - RNA, 20 nt, Artificial Sequence
  Synthetic
auguuucccucauguugcug

SEQ ID NO: 124400 - RNA, 21 nt, Artificial Sequence
  Synthetic
uauguuucccucauguugcug

SEQ ID NO: 124401 - RNA, 22 nt, Artificial Sequence
  Synthetic
cuauguuucccucauguugcug

SEQ ID NO: 124402 - RNA, 23 nt, Artificial Sequence
  Synthetic
ucuauguuucccucauguugcug

SEQ ID NO: 124403 - RNA, 24 nt, Artificial Sequence
  Synthetic
cucuauguuucccucauguugcug

SEQ ID NO: 124404 - RNA, 18 nt, Artificial Sequence
  Synthetic
  misc_feature (2)..(2): n is a, c, g, or u
unuugggggccaagucug

SEQ ID NO: 124405 - RNA, 19 nt, Artificial Sequence
  Synthetic
  misc_feature (3)..(3): n is a, c, g, or u
gunuugggggccaagucug

SEQ ID NO: 124406 - RNA, 20 nt, Artificial Sequence
  Synthetic
  misc_feature (4)..(4): n is a, c, g, or u
ggunuugggggccaagucug

SEQ ID NO: 124407 - RNA, 21 nt, Artificial Sequence
  Synthetic
  misc_feature (5)..(5): n is a, c, g, or u
uggunuugggggccaagucug

SEQ ID NO: 124408 - RNA, 22 nt, Artificial Sequence
  Synthetic
  misc_feature (6)..(6): n is a, c, g, or u
guggunuugggggccaagucug

SEQ ID NO: 124409 - RNA, 23 nt, Artificial Sequence
  Synthetic
  misc_feature (7)..(7): n is a, c, g, or u
uguggunuugggggccaagucug

SEQ ID NO: 124410 - RNA, 24 nt, Artificial Sequence
  Synthetic
  misc_feature (8)..(8): n is a, c, g, or u
auguggunuugggggccaagucug

SEQ ID NO: 124411 - RNA, 18 nt, Artificial Sequence
  Synthetic
  misc_feature (12)..(12): n is a, c, g, or u
cuguguguuuanugagug

SEQ ID NO: 124412 - RNA, 19 nt, Artificial Sequence
  Synthetic
  misc_feature (13)..(13): n is a, c, g, or u
acuguguguuuanugagug

SEQ ID NO: 124413 - RNA, 20 nt, Artificial Sequence
  Synthetic
  misc_feature (14)..(14): n is a, c, g, or u
gacuguguguuuanugagug

SEQ ID NO: 124414 - RNA, 21 nt, Artificial Sequence
  Synthetic
  misc_feature (15)..(15): n is a, c, g, or u
agacuguguguuuanugagug

SEQ ID NO: 124415 - RNA, 22 nt, Artificial Sequence
  Synthetic
  misc_feature (16)..(16): n is a, c, g, or u
aagacuguguguuuanugagug

SEQ ID NO: 124416 - RNA, 23 nt, Artificial Sequence
  Synthetic
  misc_feature (17)..(17): n is a, c, g, or u
aaagacuguguguuuanugagug

SEQ ID NO: 124417 - RNA, 24 nt, Artificial Sequence
  Synthetic
  misc_feature (18)..(18): n is a, c, g, or u
caaagacuguguguuuanugagug

SEQ ID NO: 124418 - RNA, 18 nt, Artificial Sequence
  Synthetic
acagagucuagacucgug

SEQ ID NO: 124419 - RNA, 19 nt, Artificial Sequence
  Synthetic
cacagagucuagacucgug

SEQ ID NO: 124420 - RNA, 20 nt, Artificial Sequence
  Synthetic
ccacagagucuagacucgug

SEQ ID NO: 124421 - RNA, 21 nt, Artificial Sequence
  Synthetic
accacagagucuagacucgug

SEQ ID NO: 124422 - RNA, 22 nt, Artificial Sequence
  Synthetic
uaccacagagucuagacucgug

SEQ ID NO: 124423 - RNA, 23 nt, Artificial Sequence
  Synthetic
auaccacagagucuagacucgug

SEQ ID NO: 124424 - RNA, 24 nt, Artificial Sequence
  Synthetic
aauaccacagagucuagacucgug

SEQ ID NO: 124425 - RNA, 18 nt, Artificial Sequence
  Synthetic
  misc_feature (9)..(9): n is a, c, g, or u
ccuuggacncauaaggug

SEQ ID NO: 124426 - RNA, 19 nt, Artificial Sequence
  Synthetic
  misc_feature (10)..(10): n is a, c, g, or u
uccuuggacncauaaggug

SEQ ID NO: 124427 - RNA, 20 nt, Artificial Sequence
  Synthetic
  misc_feature (11)..(11): n is a, c, g, or u
uuccuuggacncauaaggug

SEQ ID NO: 124428 - RNA, 21 nt, Artificial Sequence
  Synthetic
  misc_feature (12)..(12): n is a, c, g, or u
auuccuuggacncauaaggug

SEQ ID NO: 124429 - RNA, 22 nt, Artificial Sequence
  Synthetic
  misc_feature (13)..(13): n is a, c, g, or u
uauuccuuggacncauaaggug

SEQ ID NO: 124430 - RNA, 23 nt, Artificial Sequence
  Synthetic
  misc_feature (14)..(14): n is a, c, g, or u
guauuccuuggacncauaaggug

SEQ ID NO: 124431 - RNA, 24 nt, Artificial Sequence
  Synthetic
  misc_feature (15)..(15): n is a, c, g, or u
aguauuccuuggacncauaaggug

SEQ ID NO: 124432 - RNA, 18 nt, Artificial Sequence
  Synthetic
caggcaagcuauucugug

SEQ ID NO: 124433 - RNA, 19 nt, Artificial Sequence
  Synthetic
ucaggcaagcuauucugug

SEQ ID NO: 124434 - RNA, 20 nt, Artificial Sequence
  Synthetic
cucaggcaagcuauucugug

SEQ ID NO: 124435 - RNA, 21 nt, Artificial Sequence
  Synthetic
acucaggcaagcuauucugug

SEQ ID NO: 124436 - RNA, 22 nt, Artificial Sequence
  Synthetic
cacucaggcaagcuauucugug

SEQ ID NO: 124437 - RNA, 23 nt, Artificial Sequence
  Synthetic
gcacucaggcaagcuauucugug

SEQ ID NO: 124438 - RNA, 24 nt, Artificial Sequence
  Synthetic
ggcacucaggcaagcuauucugug

SEQ ID NO: 124439 - RNA, 18 nt, Artificial Sequence
  Synthetic
  misc_feature (2)..(3): n is a, c, g, or u
  misc_feature (14)..(14): n is a, c, g, or u
  misc_feature (16)..(16): n is a, c, g, or u
unncuuuaauccunanug

SEQ ID NO: 124440 - RNA, 19 nt, Artificial Sequence
  Synthetic
  misc_feature (3)..(4): n is a, c, g, or u
  misc_feature (15)..(15): n is a, c, g, or u
  misc_feature (17)..(17): n is a, c, g, or u
cunncuuuaauccunanug

SEQ ID NO: 124441 - RNA, 20 nt, Artificial Sequence
  Synthetic
  misc_feature (4)..(5): n is a, c, g, or u
  misc_feature (16)..(16): n is a, c, g, or u
  misc_feature (18)..(18): n is a, c, g, or u
ccunncuuuaauccunanug

SEQ ID NO: 124442 - RNA, 21 nt, Artificial Sequence
  Synthetic
  misc_feature (5)..(6): n is a, c, g, or u
  misc_feature (17)..(17): n is a, c, g, or u
  misc_feature (19)..(19): n is a, c, g, or u
accunncuuuaauccunanug

SEQ ID NO: 124443 - RNA, 22 nt, Artificial Sequence
  Synthetic
  misc_feature (6)..(7): n is a, c, g, or u
  misc_feature (18)..(18): n is a, c, g, or u
  misc_feature (20)..(20): n is a, c, g, or u
uaccunncuuuaauccunanug

SEQ ID NO: 124444 - RNA, 23 nt, Artificial Sequence
  Synthetic
  misc_feature (7)..(8): n is a, c, g, or u
  misc_feature (19)..(19): n is a, c, g, or u
  misc_feature (21)..(21): n is a, c, g, or u
guaccunncuuuaauccunanug

SEQ ID NO: 124445 - RNA, 24 nt, Artificial Sequence
  Synthetic
  misc_feature (8)..(9): n is a, c, g, or u
  misc_feature (20)..(20): n is a, c, g, or u
  misc_feature (22)..(22): n is a, c, g, or u
gguaccunncuuuaauccunanug

SEQ ID NO: 124446 - RNA, 18 nt, Artificial Sequence
  Synthetic
  misc_feature (16)..(16): n is a, c, g, or u
aagacuguguguuuanug

SEQ ID NO: 124447 - RNA, 19 nt, Artificial Sequence
  Synthetic
  misc_feature (17)..(17): n is a, c, g, or u
aaagacuguguguuuanug

SEQ ID NO: 124448 - RNA, 20 nt, Artificial Sequence
  Synthetic
  misc_feature (18)..(18): n is a, c, g, or u
caaagacuguguguuuanug

SEQ ID NO: 124449 - RNA, 21 nt, Artificial Sequence
  Synthetic
  misc_feature (19)..(19): n is a, c, g, or u
ucaaagacuguguguuuanug

SEQ ID NO: 124450 - RNA, 22 nt, Artificial Sequence
  Synthetic
  misc_feature (20)..(20): n is a, c, g, or u
uucaaagacuguguguuuanug

SEQ ID NO: 124451 - RNA, 23 nt, Artificial Sequence
  Synthetic
  misc_feature (21)..(21): n is a, c, g, or u
cuucaaagacuguguguuuanug

SEQ ID NO: 124452 - RNA, 24 nt, Artificial Sequence
  Synthetic
  misc_feature (22)..(22): n is a, c, g, or u
acuucaaagacuguguguuuanug

SEQ ID NO: 124453 - RNA, 18 nt, Artificial Sequence
  Synthetic
  misc_feature (5)..(5): n is a, c, g, or u
  misc_feature (8)..(8): n is a, c, g, or u
ugccncangaacauauug

SEQ ID NO: 124454 - RNA, 19 nt, Artificial Sequence
  Synthetic
  misc_feature (6)..(6): n is a, c, g, or u
  misc_feature (9)..(9): n is a, c, g, or u
uugccncangaacauauug

SEQ ID NO: 124455 - RNA, 20 nt, Artificial Sequence
  Synthetic
  misc_feature (1)..(1): n is a, c, g, or u
  misc_feature (7)..(7): n is a, c, g, or u
  misc_feature (10)..(10): n is a, c, g, or u
nuugccncangaacauauug

SEQ ID NO: 124456 - RNA, 21 nt, Artificial Sequence
  Synthetic
  misc_feature (2)..(2): n is a, c, g, or u
  misc_feature (8)..(8): n is a, c, g, or u
  misc_feature (11)..(11): n is a, c, g, or u
cnuugccncangaacauauug

SEQ ID NO: 124457 - RNA, 22 nt, Artificial Sequence
  Synthetic
  misc_feature (3)..(3): n is a, c, g, or u
  misc_feature (9)..(9): n is a, c, g, or u
  misc_feature (12)..(12): n is a, c, g, or u
acnuugccncangaacauauug

SEQ ID NO: 124458 - RNA, 23 nt, Artificial Sequence
  Synthetic
  misc_feature (4)..(4): n is a, c, g, or u
  misc_feature (10)..(10): n is a, c, g, or u
  misc_feature (13)..(13): n is a, c, g, or u
cacnuugccncangaacauauug

SEQ ID NO: 124459 - RNA, 24 nt, Artificial Sequence
  Synthetic
  misc_feature (5)..(5): n is a, c, g, or u
  misc_feature (11)..(11): n is a, c, g, or u
  misc_feature (14)..(14): n is a, c, g, or u
gcacnuugccncangaacauauug

SEQ ID NO: 124460 - RNA, 18 nt, Artificial Sequence
  Synthetic
  misc_feature (11)..(11): n is a, c, g, or u
cuguaaacagnccuauug

SEQ ID NO: 124461 - RNA, 19 nt, Artificial Sequence
  Synthetic
  misc_feature (12)..(12): n is a, c, g, or u
ccuguaaacagnccuauug

SEQ ID NO: 124462 - RNA, 20 nt, Artificial Sequence
  Synthetic
  misc_feature (13)..(13): n is a, c, g, or u
uccuguaaacagnccuauug

SEQ ID NO: 124463 - RNA, 21 nt, Artificial Sequence
  Synthetic
  misc_feature (14)..(14): n is a, c, g, or u
uuccuguaaacagnccuauug

SEQ ID NO: 124464 - RNA, 22 nt, Artificial Sequence
  Synthetic
  misc_feature (15)..(15): n is a, c, g, or u
cuuccuguaaacagnccuauug

SEQ ID NO: 124465 - RNA, 23 nt, Artificial Sequence
  Synthetic
  misc_feature (16)..(16): n is a, c, g, or u
acuuccuguaaacagnccuauug

SEQ ID NO: 124466 - RNA, 24 nt, Artificial Sequence
  Synthetic
  misc_feature (17)..(17): n is a, c, g, or u
aacuuccuguaaacagnccuauug

SEQ ID NO: 124467 - RNA, 18 nt, Artificial Sequence
  Synthetic
ccuccaagcugugccuug

SEQ ID NO: 124468 - RNA, 19 nt, Artificial Sequence
  Synthetic
gccuccaagcugugccuug

SEQ ID NO: 124469 - RNA, 20 nt, Artificial Sequence
  Synthetic
agccuccaagcugugccuug

SEQ ID NO: 124470 - RNA, 21 nt, Artificial Sequence
  Synthetic
aagccuccaagcugugccuug

SEQ ID NO: 124471 - RNA, 22 nt, Artificial Sequence
  Synthetic
caagccuccaagcugugccuug

SEQ ID NO: 124472 - RNA, 23 nt, Artificial Sequence
  Synthetic
ucaagccuccaagcugugccuug

SEQ ID NO: 124473 - RNA, 24 nt, Artificial Sequence
  Synthetic
uucaagccuccaagcugugccuug

SEQ ID NO: 124474 - RNA, 18 nt, Artificial Sequence
  Synthetic
aaccugcccaaggucuug

SEQ ID NO: 124475 - RNA, 19 nt, Artificial Sequence
  Synthetic
gaaccugcccaaggucuug

SEQ ID NO: 124476 - RNA, 20 nt, Artificial Sequence
  Synthetic
ggaaccugcccaaggucuug

SEQ ID NO: 124477 - RNA, 21 nt, Artificial Sequence
  Synthetic
  misc_feature (1)..(1): n is a, c, g, or u
nggaaccugcccaaggucuug

SEQ ID NO: 124478 - RNA, 22 nt, Artificial Sequence
  Synthetic
  misc_feature (2)..(2): n is a, c, g, or u
cnggaaccugcccaaggucuug

SEQ ID NO: 124479 - RNA, 23 nt, Artificial Sequence
  Synthetic
  misc_feature (3)..(3): n is a, c, g, or u
acnggaaccugcccaaggucuug

SEQ ID NO: 124480 - RNA, 24 nt, Artificial Sequence
  Synthetic
  misc_feature (4)..(4): n is a, c, g, or u
cacnggaaccugcccaaggucuug

SEQ ID NO: 124481 - RNA, 18 nt, Artificial Sequence
  Synthetic
  misc_feature (1)..(1): n is a, c, g, or u
naacacccgugugucuug

SEQ ID NO: 124482 - RNA, 19 nt, Artificial Sequence
  Synthetic
  misc_feature (2)..(2): n is a, c, g, or u
gnaacacccgugugucuug

SEQ ID NO: 124483 - RNA, 20 nt, Artificial Sequence
  Synthetic
  misc_feature (3)..(3): n is a, c, g, or u
ggnaacacccgugugucuug

SEQ ID NO: 124484 - RNA, 21 nt, Artificial Sequence
  Synthetic
  misc_feature (4)..(4): n is a, c, g, or u
gggnaacacccgugugucuug

SEQ ID NO: 124485 - RNA, 22 nt, Artificial Sequence
  Synthetic
  misc_feature (5)..(5): n is a, c, g, or u
ggggnaacacccgugugucuug

SEQ ID NO: 124486 - RNA, 23 nt, Artificial Sequence
  Synthetic
  misc_feature (6)..(6): n is a, c, g, or u
aggggnaacacccgugugucuug

SEQ ID NO: 124487 - RNA, 24 nt, Artificial Sequence
  Synthetic
  misc_feature (7)..(7): n is a, c, g, or u
uaggggnaacacccgugugucuug

SEQ ID NO: 124488 - RNA, 18 nt, Artificial Sequence
  Synthetic
  misc_feature (2)..(2): n is a, c, g, or u
anugagugggaggaguug

SEQ ID NO: 124489 - RNA, 19 nt, Artificial Sequence
  Synthetic
  misc_feature (3)..(3): n is a, c, g, or u
uanugagugggaggaguug

SEQ ID NO: 124490 - RNA, 20 nt, Artificial Sequence
  Synthetic
  misc_feature (4)..(4): n is a, c, g, or u
uuanugagugggaggaguug

SEQ ID NO: 124491 - RNA, 21 nt, Artificial Sequence
  Synthetic
  misc_feature (5)..(5): n is a, c, g, or u
uuuanugagugggaggaguug

SEQ ID NO: 124492 - RNA, 22 nt, Artificial Sequence
  Synthetic
  misc_feature (6)..(6): n is a, c, g, or u
guuuanugagugggaggaguug

SEQ ID NO: 124493 - RNA, 23 nt, Artificial Sequence
  Synthetic
  misc_feature (7)..(7): n is a, c, g, or u
uguuuanugagugggaggaguug

SEQ ID NO: 124494 - RNA, 24 nt, Artificial Sequence
  Synthetic
  misc_feature (8)..(8): n is a, c, g, or u
guguuuanugagugggaggaguug

SEQ ID NO: 124495 - RNA, 18 nt, Artificial Sequence
  Synthetic
ugaaccuuuaccccguug

SEQ ID NO: 124496 - RNA, 19 nt, Artificial Sequence
  Synthetic
cugaaccuuuaccccguug

SEQ ID NO: 124497 - RNA, 20 nt, Artificial Sequence
  Synthetic
ucugaaccuuuaccccguug

SEQ ID NO: 124498 - RNA, 21 nt, Artificial Sequence
  Synthetic
aucugaaccuuuaccccguug

SEQ ID NO: 124499 - RNA, 22 nt, Artificial Sequence
  Synthetic
uaucugaaccuuuaccccguug

SEQ ID NO: 124500 - RNA, 23 nt, Artificial Sequence
  Synthetic
  misc_feature (1)..(1): n is a, c, g, or u
nuaucugaaccuuuaccccguug

SEQ ID NO: 124501 - RNA, 24 nt, Artificial Sequence
  Synthetic
  misc_feature (2)..(2): n is a, c, g, or u
anuaucugaaccuuuaccccguug

SEQ ID NO: 124502 - RNA, 18 nt, Artificial Sequence
  Synthetic
uuccggaaacuacuguug

SEQ ID NO: 124503 - RNA, 19 nt, Artificial Sequence
  Synthetic
cuuccggaaacuacuguug

SEQ ID NO: 124504 - RNA, 20 nt, Artificial Sequence
  Synthetic
acuuccggaaacuacuguug

SEQ ID NO: 124505 - RNA, 21 nt, Artificial Sequence
  Synthetic
cacuuccggaaacuacuguug

SEQ ID NO: 124506 - RNA, 22 nt, Artificial Sequence
  Synthetic
acacuuccggaaacuacuguug

SEQ ID NO: 124507 - RNA, 23 nt, Artificial Sequence
  Synthetic
aacacuuccggaaacuacuguug

SEQ ID NO: 124508 - RNA, 24 nt, Artificial Sequence
  Synthetic
caacacuuccggaaacuacuguug

SEQ ID NO: 124509 - RNA, 18 nt, Artificial Sequence
  Synthetic
gcgggguuuuucuuguug

SEQ ID NO: 124510 - RNA, 19 nt, Artificial Sequence
  Synthetic
ggcgggguuuuucuuguug

SEQ ID NO: 124511 - RNA, 20 nt, Artificial Sequence
  Synthetic
aggcgggguuuuucuuguug

SEQ ID NO: 124512 - RNA, 21 nt, Artificial Sequence
  Synthetic
caggcgggguuuuucuuguug

SEQ ID NO: 124513 - RNA, 22 nt, Artificial Sequence
  Synthetic
acaggcgggguuuuucuuguug

SEQ ID NO: 124514 - RNA, 23 nt, Artificial Sequence
  Synthetic
uacaggcgggguuuuucuuguug

SEQ ID NO: 124515 - RNA, 24 nt, Artificial Sequence
  Synthetic
uuacaggcgggguuuuucuuguug

SEQ ID NO: 124516 - RNA, 18 nt, Artificial Sequence
  Synthetic
uuuccugacauucauuug

SEQ ID NO: 124517 - RNA, 19 nt, Artificial Sequence
  Synthetic
uuuuccugacauucauuug

SEQ ID NO: 124518 - RNA, 20 nt, Artificial Sequence
  Synthetic
cuuuuccugacauucauuug

SEQ ID NO: 124519 - RNA, 21 nt, Artificial Sequence
  Synthetic
ucuuuuccugacauucauuug

SEQ ID NO: 124520 - RNA, 22 nt, Artificial Sequence
  Synthetic
uucuuuuccugacauucauuug

SEQ ID NO: 124521 - RNA, 23 nt, Artificial Sequence
  Synthetic
cuucuuuuccugacauucauuug

SEQ ID NO: 124522 - RNA, 24 nt, Artificial Sequence
  Synthetic
ccuucuuuuccugacauucauuug

SEQ ID NO: 124523 - RNA, 18 nt, Artificial Sequence
  Synthetic
  misc_feature (10)..(10): n is a, c, g, or u
uuauuuacanacucuuug

SEQ ID NO: 124524 - RNA, 19 nt, Artificial Sequence
  Synthetic
  misc_feature (11)..(11): n is a, c, g, or u
auuauuuacanacucuuug

SEQ ID NO: 124525 - RNA, 20 nt, Artificial Sequence
  Synthetic
  misc_feature (12)..(12): n is a, c, g, or u
cauuauuuacanacucuuug

SEQ ID NO: 124526 - RNA, 21 nt, Artificial Sequence
  Synthetic
  misc_feature (13)..(13): n is a, c, g, or u
acauuauuuacanacucuuug

SEQ ID NO: 124527 - RNA, 22 nt, Artificial Sequence
  Synthetic
  misc_feature (14)..(14): n is a, c, g, or u
gacauuauuuacanacucuuug

SEQ ID NO: 124528 - RNA, 23 nt, Artificial Sequence
  Synthetic
  misc_feature (1)..(1): n is a, c, g, or u
  misc_feature (15)..(15): n is a, c, g, or u
ngacauuauuuacanacucuuug

SEQ ID NO: 124529 - RNA, 24 nt, Artificial Sequence
  Synthetic
  misc_feature (1)..(2): n is a, c, g, or u
  misc_feature (16)..(16): n is a, c, g, or u
nngacauuauuuacanacucuuug

SEQ ID NO: 124530 - RNA, 18 nt, Artificial Sequence
  Synthetic
uuuccugucuuacuuuug

SEQ ID NO: 124531 - RNA, 19 nt, Artificial Sequence
  Synthetic
auuuccugucuuacuuuug

SEQ ID NO: 124532 - RNA, 20 nt, Artificial Sequence
  Synthetic
cauuuccugucuuacuuuug

SEQ ID NO: 124533 - RNA, 21 nt, Artificial Sequence
  Synthetic
acauuuccugucuuacuuuug

SEQ ID NO: 124534 - RNA, 22 nt, Artificial Sequence
  Synthetic
cacauuuccugucuuacuuuug

SEQ ID NO: 124535 - RNA, 23 nt, Artificial Sequence
  Synthetic
ucacauuuccugucuuacuuuug

SEQ ID NO: 124536 - RNA, 24 nt, Artificial Sequence
  Synthetic
uucacauuuccugucuuacuuuug

SEQ ID NO: 124537 - RNA, 18 nt, Artificial Sequence
  Synthetic
  misc_feature (18)..(18): n is a, c, g, or u
auuccaggaucaucaacn

SEQ ID NO: 124538 - RNA, 19 nt, Artificial Sequence
  Synthetic
  misc_feature (19)..(19): n is a, c, g, or u
aauuccaggaucaucaacn

SEQ ID NO: 124539 - RNA, 20 nt, Artificial Sequence
  Synthetic
  misc_feature (20)..(20): n is a, c, g, or u
uaauuccaggaucaucaacn

SEQ ID NO: 124540 - RNA, 21 nt, Artificial Sequence
  Synthetic
  misc_feature (21)..(21): n is a, c, g, or u
cuaauuccaggaucaucaacn

SEQ ID NO: 124541 - RNA, 22 nt, Artificial Sequence
  Synthetic
  misc_feature (22)..(22): n is a, c, g, or u
ucuaauuccaggaucaucaacn

SEQ ID NO: 124542 - RNA, 23 nt, Artificial Sequence
  Synthetic
  misc_feature (23)..(23): n is a, c, g, or u
cucuaauuccaggaucaucaacn

SEQ ID NO: 124543 - RNA, 24 nt, Artificial Sequence
  Synthetic
  misc_feature (24)..(24): n is a, c, g, or u
ccucuaauuccaggaucaucaacn

SEQ ID NO: 124544 - RNA, 18 nt, Artificial Sequence
  Synthetic
  misc_feature (18)..(18): n is a, c, g, or u
guuaguauuccuuggacn

SEQ ID NO: 124545 - RNA, 19 nt, Artificial Sequence
  Synthetic
  misc_feature (19)..(19): n is a, c, g, or u
uguuaguauuccuuggacn

SEQ ID NO: 124546 - RNA, 20 nt, Artificial Sequence
  Synthetic
  misc_feature (20)..(20): n is a, c, g, or u
auguuaguauuccuuggacn

SEQ ID NO: 124547 - RNA, 21 nt, Artificial Sequence
  Synthetic
  misc_feature (21)..(21): n is a, c, g, or u
aauguuaguauuccuuggacn

SEQ ID NO: 124548 - RNA, 22 nt, Artificial Sequence
  Synthetic
  misc_feature (22)..(22): n is a, c, g, or u
caauguuaguauuccuuggacn

SEQ ID NO: 124549 - RNA, 23 nt, Artificial Sequence
  Synthetic
  misc_feature (23)..(23): n is a, c, g, or u
ucaauguuaguauuccuuggacn

SEQ ID NO: 124550 - RNA, 24 nt, Artificial Sequence
  Synthetic
  misc_feature (24)..(24): n is a, c, g, or u
cucaauguuaguauuccuuggacn

SEQ ID NO: 124551 - RNA, 18 nt, Artificial Sequence
  Synthetic
  misc_feature (18)..(18): n is a, c, g, or u
gauugggaccucaacccn

SEQ ID NO: 124552 - RNA, 19 nt, Artificial Sequence
  Synthetic
  misc_feature (19)..(19): n is a, c, g, or u
agauugggaccucaacccn

SEQ ID NO: 124553 - RNA, 20 nt, Artificial Sequence
  Synthetic
  misc_feature (20)..(20): n is a, c, g, or u
cagauugggaccucaacccn

SEQ ID NO: 124554 - RNA, 21 nt, Artificial Sequence
  Synthetic
  misc_feature (21)..(21): n is a, c, g, or u
ccagauugggaccucaacccn

SEQ ID NO: 124555 - RNA, 22 nt, Artificial Sequence
  Synthetic
  misc_feature (22)..(22): n is a, c, g, or u
uccagauugggaccucaacccn

SEQ ID NO: 124556 - RNA, 23 nt, Artificial Sequence
  Synthetic
  misc_feature (23)..(23): n is a, c, g, or u
auccagauugggaccucaacccn

SEQ ID NO: 124557 - RNA, 24 nt, Artificial Sequence
  Synthetic
  misc_feature (24)..(24): n is a, c, g, or u
aauccagauugggaccucaacccn

SEQ ID NO: 124558 - RNA, 18 nt, Artificial Sequence
  Synthetic
  misc_feature (18)..(18): n is a, c, g, or u
ggcauggacauugacccn

SEQ ID NO: 124559 - RNA, 19 nt, Artificial Sequence
  Synthetic
  misc_feature (19)..(19): n is a, c, g, or u
gggcauggacauugacccn

SEQ ID NO: 124560 - RNA, 20 nt, Artificial Sequence
  Synthetic
  misc_feature (1)..(1): n is a, c, g, or u
  misc_feature (20)..(20): n is a, c, g, or u
ngggcauggacauugacccn

SEQ ID NO: 124561 - RNA, 21 nt, Artificial Sequence
  Synthetic
  misc_feature (2)..(2): n is a, c, g, or u
  misc_feature (21)..(21): n is a, c, g, or u
ungggcauggacauugacccn

SEQ ID NO: 124562 - RNA, 22 nt, Artificial Sequence
  Synthetic
  misc_feature (3)..(3): n is a, c, g, or u
  misc_feature (22)..(22): n is a, c, g, or u
uungggcauggacauugacccn

SEQ ID NO: 124563 - RNA, 23 nt, Artificial Sequence
  Synthetic
  misc_feature (4)..(4): n is a, c, g, or u
  misc_feature (23)..(23): n is a, c, g, or u
uuungggcauggacauugacccn

SEQ ID NO: 124564 - RNA, 24 nt, Artificial Sequence
  Synthetic
  misc_feature (5)..(5): n is a, c, g, or u
  misc_feature (24)..(24): n is a, c, g, or u
cuuungggcauggacauugacccn

SEQ ID NO: 124565 - RNA, 18 nt, Artificial Sequence
  Synthetic
  misc_feature (1)..(1): n is a, c, g, or u
  misc_feature (12)..(12): n is a, c, g, or u
  misc_feature (18)..(18): n is a, c, g, or u
nguuggggcacnuugccn

SEQ ID NO: 124566 - RNA, 19 nt, Artificial Sequence
  Synthetic
  misc_feature (1)..(2): n is a, c, g, or u
  misc_feature (13)..(13): n is a, c, g, or u
  misc_feature (19)..(19): n is a, c, g, or u
nnguuggggcacnuugccn

SEQ ID NO: 124567 - RNA, 20 nt, Artificial Sequence
  Synthetic
  misc_feature (2)..(3): n is a, c, g, or u
  misc_feature (14)..(14): n is a, c, g, or u
  misc_feature (20)..(20): n is a, c, g, or u
gnnguuggggcacnuugccn

SEQ ID NO: 124568 - RNA, 21 nt, Artificial Sequence
  Synthetic
  misc_feature (3)..(4): n is a, c, g, or u
  misc_feature (15)..(15): n is a, c, g, or u
  misc_feature (21)..(21): n is a, c, g, or u
ggnnguuggggcacnuugccn

SEQ ID NO: 124569 - RNA, 22 nt, Artificial Sequence
  Synthetic
  misc_feature (4)..(5): n is a, c, g, or u
  misc_feature (16)..(16): n is a, c, g, or u
  misc_feature (22)..(22): n is a, c, g, or u
uggnnguuggggcacnuugccn

SEQ ID NO: 124570 - RNA, 23 nt, Artificial Sequence
  Synthetic
  misc_feature (5)..(6): n is a, c, g, or u
  misc_feature (17)..(17): n is a, c, g, or u
  misc_feature (23)..(23): n is a, c, g, or u
uuggnnguuggggcacnuugccn

SEQ ID NO: 124571 - RNA, 24 nt, Artificial Sequence
  Synthetic
  misc_feature (6)..(7): n is a, c, g, or u
  misc_feature (18)..(18): n is a, c, g, or u
  misc_feature (24)..(24): n is a, c, g, or u
auuggnnguuggggcacnuugccn

SEQ ID NO: 124572 - RNA, 18 nt, Artificial Sequence
  Synthetic
  misc_feature (18)..(18): n is a, c, g, or u
cuuucuguccccaauccn

SEQ ID NO: 124573 - RNA, 19 nt, Artificial Sequence
  Synthetic
  misc_feature (19)..(19): n is a, c, g, or u
ucuuucuguccccaauccn

SEQ ID NO: 124574 - RNA, 20 nt, Artificial Sequence
  Synthetic
  misc_feature (20)..(20): n is a, c, g, or u
aucuuucuguccccaauccn

SEQ ID NO: 124575 - RNA, 21 nt, Artificial Sequence
  Synthetic
  misc_feature (21)..(21): n is a, c, g, or u
aaucuuucuguccccaauccn

SEQ ID NO: 124576 - RNA, 22 nt, Artificial Sequence
  Synthetic
  misc_feature (22)..(22): n is a, c, g, or u
aaaucuuucuguccccaauccn

SEQ ID NO: 124577 - RNA, 23 nt, Artificial Sequence
  Synthetic
  misc_feature (23)..(23): n is a, c, g, or u
caaaucuuucuguccccaauccn

SEQ ID NO: 124578 - RNA, 24 nt, Artificial Sequence
  Synthetic
  misc_feature (24)..(24): n is a, c, g, or u
acaaaucuuucuguccccaauccn

SEQ ID NO: 124579 - RNA, 18 nt, Artificial Sequence
  Synthetic
  misc_feature (18)..(18): n is a, c, g, or u
gaggacauuguugauagn

SEQ ID NO: 124580 - RNA, 19 nt, Artificial Sequence
  Synthetic
  misc_feature (19)..(19): n is a, c, g, or u
ggaggacauuguugauagn

SEQ ID NO: 124581 - RNA, 20 nt, Artificial Sequence
  Synthetic
  misc_feature (20)..(20): n is a, c, g, or u
aggaggacauuguugauagn

SEQ ID NO: 124582 - RNA, 21 nt, Artificial Sequence
  Synthetic
  misc_feature (21)..(21): n is a, c, g, or u
caggaggacauuguugauagn

SEQ ID NO: 124583 - RNA, 22 nt, Artificial Sequence
  Synthetic
  misc_feature (22)..(22): n is a, c, g, or u
gcaggaggacauuguugauagn

SEQ ID NO: 124584 - RNA, 23 nt, Artificial Sequence
  Synthetic
  misc_feature (23)..(23): n is a, c, g, or u
ugcaggaggacauuguugauagn

SEQ ID NO: 124585 - RNA, 24 nt, Artificial Sequence
  Synthetic
  misc_feature (24)..(24): n is a, c, g, or u
uugcaggaggacauuguugauagn

SEQ ID NO: 124586 - RNA, 18 nt, Artificial Sequence
  Synthetic
  misc_feature (18)..(18): n is a, c, g, or u
uugcccuuagauaaaggn

SEQ ID NO: 124587 - RNA, 19 nt, Artificial Sequence
  Synthetic
  misc_feature (19)..(19): n is a, c, g, or u
uuugcccuuagauaaaggn

SEQ ID NO: 124588 - RNA, 20 nt, Artificial Sequence
  Synthetic
  misc_feature (20)..(20): n is a, c, g, or u
auuugcccuuagauaaaggn

SEQ ID NO: 124589 - RNA, 21 nt, Artificial Sequence
  Synthetic
  misc_feature (21)..(21): n is a, c, g, or u
uauuugcccuuagauaaaggn

SEQ ID NO: 124590 - RNA, 22 nt, Artificial Sequence
  Synthetic
  misc_feature (22)..(22): n is a, c, g, or u
auauuugcccuuagauaaaggn

SEQ ID NO: 124591 - RNA, 23 nt, Artificial Sequence
  Synthetic
  misc_feature (23)..(23): n is a, c, g, or u
aauauuugcccuuagauaaaggn

SEQ ID NO: 124592 - RNA, 24 nt, Artificial Sequence
  Synthetic
  misc_feature (24)..(24): n is a, c, g, or u
aaauauuugcccuuagauaaaggn

SEQ ID NO: 124593 - RNA, 18 nt, Artificial Sequence
  Synthetic
  misc_feature (10)..(10): n is a, c, g, or u
  misc_feature (18)..(18): n is a, c, g, or u
gcucgcagcnggucuggn

SEQ ID NO: 124594 - RNA, 19 nt, Artificial Sequence
  Synthetic
  misc_feature (11)..(11): n is a, c, g, or u
  misc_feature (19)..(19): n is a, c, g, or u
ugcucgcagcnggucuggn

SEQ ID NO: 124595 - RNA, 20 nt, Artificial Sequence
  Synthetic
  misc_feature (12)..(12): n is a, c, g, or u
  misc_feature (20)..(20): n is a, c, g, or u
uugcucgcagcnggucuggn

SEQ ID NO: 124596 - RNA, 21 nt, Artificial Sequence
  Synthetic
  misc_feature (13)..(13): n is a, c, g, or u
  misc_feature (21)..(21): n is a, c, g, or u
uuugcucgcagcnggucuggn

SEQ ID NO: 124597 - RNA, 22 nt, Artificial Sequence
  Synthetic
  misc_feature (14)..(14): n is a, c, g, or u
  misc_feature (22)..(22): n is a, c, g, or u
uuuugcucgcagcnggucuggn

SEQ ID NO: 124598 - RNA, 23 nt, Artificial Sequence
  Synthetic
  misc_feature (15)..(15): n is a, c, g, or u
  misc_feature (23)..(23): n is a, c, g, or u
guuuugcucgcagcnggucuggn

SEQ ID NO: 124599 - RNA, 24 nt, Artificial Sequence
  Synthetic
  misc_feature (16)..(16): n is a, c, g, or u
  misc_feature (24)..(24): n is a, c, g, or u
uguuuugcucgcagcnggucuggn

SEQ ID NO: 124600 - RNA, 18 nt, Artificial Sequence
  Synthetic
  misc_feature (18)..(18): n is a, c, g, or u
uccugucuuacuuuuggn

SEQ ID NO: 124601 - RNA, 19 nt, Artificial Sequence
  Synthetic
  misc_feature (19)..(19): n is a, c, g, or u
uuccugucuuacuuuuggn

SEQ ID NO: 124602 - RNA, 20 nt, Artificial Sequence
  Synthetic
  misc_feature (20)..(20): n is a, c, g, or u
uuuccugucuuacuuuuggn

SEQ ID NO: 124603 - RNA, 21 nt, Artificial Sequence
  Synthetic
  misc_feature (21)..(21): n is a, c, g, or u
auuuccugucuuacuuuuggn

SEQ ID NO: 124604 - RNA, 22 nt, Artificial Sequence
  Synthetic
  misc_feature (22)..(22): n is a, c, g, or u
cauuuccugucuuacuuuuggn

SEQ ID NO: 124605 - RNA, 23 nt, Artificial Sequence
  Synthetic
  misc_feature (23)..(23): n is a, c, g, or u
acauuuccugucuuacuuuuggn

SEQ ID NO: 124606 - RNA, 24 nt, Artificial Sequence
  Synthetic
  misc_feature (24)..(24): n is a, c, g, or u
cacauuuccugucuuacuuuuggn

SEQ ID NO: 124607 - RNA, 18 nt, Artificial Sequence
  Synthetic
  misc_feature (17)..(18): n is a, c, g, or u
ugggauauguaauuggnn

SEQ ID NO: 124608 - RNA, 19 nt, Artificial Sequence
  Synthetic
  misc_feature (18)..(19): n is a, c, g, or u
augggauauguaauuggnn

SEQ ID NO: 124609 - RNA, 20 nt, Artificial Sequence
  Synthetic
  misc_feature (19)..(20): n is a, c, g, or u
caugggauauguaauuggnn

SEQ ID NO: 124610 - RNA, 21 nt, Artificial Sequence
  Synthetic
  misc_feature (20)..(21): n is a, c, g, or u
ucaugggauauguaauuggnn

SEQ ID NO: 124611 - RNA, 22 nt, Artificial Sequence
  Synthetic
  misc_feature (21)..(22): n is a, c, g, or u
uucaugggauauguaauuggnn

SEQ ID NO: 124612 - RNA, 23 nt, Artificial Sequence
  Synthetic
  misc_feature (22)..(23): n is a, c, g, or u
cuucaugggauauguaauuggnn

SEQ ID NO: 124613 - RNA, 24 nt, Artificial Sequence
  Synthetic
  misc_feature (23)..(24): n is a, c, g, or u
acuucaugggauauguaauuggnn

SEQ ID NO: 124614 - RNA, 18 nt, Artificial Sequence
  Synthetic
  misc_feature (6)..(7): n is a, c, g, or u
  misc_feature (18)..(18): n is a, c, g, or u
uaccunncuuuaauccun

SEQ ID NO: 124615 - RNA, 19 nt, Artificial Sequence
  Synthetic
  misc_feature (7)..(8): n is a, c, g, or u
  misc_feature (19)..(19): n is a, c, g, or u
guaccunncuuuaauccun

SEQ ID NO: 124616 - RNA, 20 nt, Artificial Sequence
  Synthetic
  misc_feature (8)..(9): n is a, c, g, or u
  misc_feature (20)..(20): n is a, c, g, or u
gguaccunncuuuaauccun

SEQ ID NO: 124617 - RNA, 21 nt, Artificial Sequence
  Synthetic
  misc_feature (9)..(10): n is a, c, g, or u
  misc_feature (21)..(21): n is a, c, g, or u
cgguaccunncuuuaauccun

SEQ ID NO: 124618 - RNA, 22 nt, Artificial Sequence
  Synthetic
  misc_feature (10)..(11): n is a, c, g, or u
  misc_feature (22)..(22): n is a, c, g, or u
acgguaccunncuuuaauccun

SEQ ID NO: 124619 - RNA, 23 nt, Artificial Sequence
  Synthetic
  misc_feature (11)..(12): n is a, c, g, or u
  misc_feature (23)..(23): n is a, c, g, or u
uacgguaccunncuuuaauccun

SEQ ID NO: 124620 - RNA, 24 nt, Artificial Sequence
  Synthetic
  misc_feature (12)..(13): n is a, c, g, or u
  misc_feature (24)..(24): n is a, c, g, or u
cuacgguaccunncuuuaauccun

SEQ ID NO: 124621 - RNA, 18 nt, Artificial Sequence
  Synthetic
  misc_feature (18)..(18): n is a, c, g, or u
ucugugccuucucaucun

SEQ ID NO: 124622 - RNA, 19 nt, Artificial Sequence
  Synthetic
  misc_feature (19)..(19): n is a, c, g, or u
gucugugccuucucaucun

SEQ ID NO: 124623 - RNA, 20 nt, Artificial Sequence
  Synthetic
  misc_feature (20)..(20): n is a, c, g, or u
cgucugugccuucucaucun

SEQ ID NO: 124624 - RNA, 21 nt, Artificial Sequence
  Synthetic
  misc_feature (21)..(21): n is a, c, g, or u
ccgucugugccuucucaucun

SEQ ID NO: 124625 - RNA, 22 nt, Artificial Sequence
  Synthetic
  misc_feature (22)..(22): n is a, c, g, or u
cccgucugugccuucucaucun

SEQ ID NO: 124626 - RNA, 23 nt, Artificial Sequence
  Synthetic
  misc_feature (23)..(23): n is a, c, g, or u
ccccgucugugccuucucaucun

SEQ ID NO: 124627 - RNA, 24 nt, Artificial Sequence
  Synthetic
  misc_feature (24)..(24): n is a, c, g, or u
uccccgucugugccuucucaucun

SEQ ID NO: 124628 - RNA, 18 nt, Artificial Sequence
  Synthetic
  misc_feature (7)..(7): n is a, c, g, or u
  misc_feature (18)..(18): n is a, c, g, or u
ccuucunuucgagaucun

SEQ ID NO: 124629 - RNA, 19 nt, Artificial Sequence
  Synthetic
  misc_feature (8)..(8): n is a, c, g, or u
  misc_feature (19)..(19): n is a, c, g, or u
uccuucunuucgagaucun

SEQ ID NO: 124630 - RNA, 20 nt, Artificial Sequence
  Synthetic
  misc_feature (9)..(9): n is a, c, g, or u
  misc_feature (20)..(20): n is a, c, g, or u
uuccuucunuucgagaucun

SEQ ID NO: 124631 - RNA, 21 nt, Artificial Sequence
  Synthetic
  misc_feature (10)..(10): n is a, c, g, or u
  misc_feature (21)..(21): n is a, c, g, or u
uuuccuucunuucgagaucun

SEQ ID NO: 124632 - RNA, 22 nt, Artificial Sequence
  Synthetic
  misc_feature (11)..(11): n is a, c, g, or u
  misc_feature (22)..(22): n is a, c, g, or u
cuuuccuucunuucgagaucun

SEQ ID NO: 124633 - RNA, 23 nt, Artificial Sequence
  Synthetic
  misc_feature (12)..(12): n is a, c, g, or u
  misc_feature (23)..(23): n is a, c, g, or u
ucuuuccuucunuucgagaucun

SEQ ID NO: 124634 - RNA, 24 nt, Artificial Sequence
  Synthetic
  misc_feature (13)..(13): n is a, c, g, or u
  misc_feature (24)..(24): n is a, c, g, or u
uucuuuccuucunuucgagaucun

SEQ ID NO: 124635 - RNA, 18 nt, Artificial Sequence
  Synthetic
  misc_feature (18)..(18): n is a, c, g, or u
cugacuucuuuccuucun

SEQ ID NO: 124636 - RNA, 19 nt, Artificial Sequence
  Synthetic
  misc_feature (19)..(19): n is a, c, g, or u
ucugacuucuuuccuucun

SEQ ID NO: 124637 - RNA, 20 nt, Artificial Sequence
  Synthetic
  misc_feature (20)..(20): n is a, c, g, or u
uucugacuucuuuccuucun

SEQ ID NO: 124638 - RNA, 21 nt, Artificial Sequence
  Synthetic
  misc_feature (21)..(21): n is a, c, g, or u
cuucugacuucuuuccuucun

SEQ ID NO: 124639 - RNA, 22 nt, Artificial Sequence
  Synthetic
  misc_feature (22)..(22): n is a, c, g, or u
ccuucugacuucuuuccuucun

SEQ ID NO: 124640 - RNA, 23 nt, Artificial Sequence
  Synthetic
  misc_feature (23)..(23): n is a, c, g, or u
gccuucugacuucuuuccuucun

SEQ ID NO: 124641 - RNA, 24 nt, Artificial Sequence
  Synthetic
  misc_feature (24)..(24): n is a, c, g, or u
ugccuucugacuucuuuccuucun

SEQ ID NO: 124642 - RNA, 18 nt, Artificial Sequence
  Synthetic
  misc_feature (18)..(18): n is a, c, g, or u
uauauggaugauguggun

SEQ ID NO: 124643 - RNA, 19 nt, Artificial Sequence
  Synthetic
  misc_feature (19)..(19): n is a, c, g, or u
uuauauggaugauguggun

SEQ ID NO: 124644 - RNA, 20 nt, Artificial Sequence
  Synthetic
  misc_feature (20)..(20): n is a, c, g, or u
guuauauggaugauguggun

SEQ ID NO: 124645 - RNA, 21 nt, Artificial Sequence
  Synthetic
  misc_feature (21)..(21): n is a, c, g, or u
aguuauauggaugauguggun

SEQ ID NO: 124646 - RNA, 22 nt, Artificial Sequence
  Synthetic
  misc_feature (22)..(22): n is a, c, g, or u
caguuauauggaugauguggun

SEQ ID NO: 124647 - RNA, 23 nt, Artificial Sequence
  Synthetic
  misc_feature (23)..(23): n is a, c, g, or u
ucaguuauauggaugauguggun

SEQ ID NO: 124648 - RNA, 24 nt, Artificial Sequence
  Synthetic
  misc_feature (24)..(24): n is a, c, g, or u
uucaguuauauggaugauguggun

SEQ ID NO: 124649 - RNA, 18 nt, Artificial Sequence
  Synthetic
  misc_feature (3)..(3): n is a, c, g, or u
  misc_feature (6)..(6): n is a, c, g, or u
  misc_feature (18)..(18): n is a, c, g, or u
ccncangaacauauugun

SEQ ID NO: 124650 - RNA, 19 nt, Artificial Sequence
  Synthetic
  misc_feature (4)..(4): n is a, c, g, or u
  misc_feature (7)..(7): n is a, c, g, or u
  misc_feature (19)..(19): n is a, c, g, or u
gccncangaacauauugun

SEQ ID NO: 124651 - RNA, 20 nt, Artificial Sequence
  Synthetic
  misc_feature (5)..(5): n is a, c, g, or u
  misc_feature (8)..(8): n is a, c, g, or u
  misc_feature (20)..(20): n is a, c, g, or u
ugccncangaacauauugun

SEQ ID NO: 124652 - RNA, 21 nt, Artificial Sequence
  Synthetic
  misc_feature (6)..(6): n is a, c, g, or u
  misc_feature (9)..(9): n is a, c, g, or u
  misc_feature (21)..(21): n is a, c, g, or u
uugccncangaacauauugun

SEQ ID NO: 124653 - RNA, 22 nt, Artificial Sequence
  Synthetic
  misc_feature (1)..(1): n is a, c, g, or u
  misc_feature (7)..(7): n is a, c, g, or u
  misc_feature (10)..(10): n is a, c, g, or u
  misc_feature (22)..(22): n is a, c, g, or u
nuugccncangaacauauugun

SEQ ID NO: 124654 - RNA, 23 nt, Artificial Sequence
  Synthetic
  misc_feature (2)..(2): n is a, c, g, or u
  misc_feature (8)..(8): n is a, c, g, or u
  misc_feature (11)..(11): n is a, c, g, or u
  misc_feature (23)..(23): n is a, c, g, or u
cnuugccncangaacauauugun

SEQ ID NO: 124655 - RNA, 24 nt, Artificial Sequence
  Synthetic
  misc_feature (3)..(3): n is a, c, g, or u
  misc_feature (9)..(9): n is a, c, g, or u
  misc_feature (12)..(12): n is a, c, g, or u
  misc_feature (24)..(24): n is a, c, g, or u
acnuugccncangaacauauugun

SEQ ID NO: 124656 - RNA, 18 nt, Artificial Sequence
  Synthetic
  misc_feature (3)..(3): n is a, c, g, or u
  misc_feature (9)..(9): n is a, c, g, or u
ggnccccunacaguaaau

SEQ ID NO: 124657 - RNA, 19 nt, Artificial Sequence
  Synthetic
  misc_feature (4)..(4): n is a, c, g, or u
  misc_feature (10)..(10): n is a, c, g, or u
gggnccccunacaguaaau

SEQ ID NO: 124658 - RNA, 20 nt, Artificial Sequence
  Synthetic
  misc_feature (5)..(5): n is a, c, g, or u
  misc_feature (11)..(11): n is a, c, g, or u
ugggnccccunacaguaaau

SEQ ID NO: 124659 - RNA, 21 nt, Artificial Sequence
  Synthetic
  misc_feature (6)..(6): n is a, c, g, or u
  misc_feature (12)..(12): n is a, c, g, or u
gugggnccccunacaguaaau

SEQ ID NO: 124660 - RNA, 22 nt, Artificial Sequence
  Synthetic
  misc_feature (7)..(7): n is a, c, g, or u
  misc_feature (13)..(13): n is a, c, g, or u
ugugggnccccunacaguaaau

SEQ ID NO: 124661 - RNA, 23 nt, Artificial Sequence
  Synthetic
  misc_feature (8)..(8): n is a, c, g, or u
  misc_feature (14)..(14): n is a, c, g, or u
uugugggnccccunacaguaaau

SEQ ID NO: 124662 - RNA, 24 nt, Artificial Sequence
  Synthetic
  misc_feature (9)..(9): n is a, c, g, or u
  misc_feature (15)..(15): n is a, c, g, or u
uuugugggnccccunacaguaaau

SEQ ID NO: 124663 - RNA, 18 nt, Artificial Sequence
  Synthetic
ucuuggacuuucagcaau

SEQ ID NO: 124664 - RNA, 19 nt, Artificial Sequence
  Synthetic
cucuuggacuuucagcaau

SEQ ID NO: 124665 - RNA, 20 nt, Artificial Sequence
  Synthetic
acucuuggacuuucagcaau

SEQ ID NO: 124666 - RNA, 21 nt, Artificial Sequence
  Synthetic
gacucuuggacuuucagcaau

SEQ ID NO: 124667 - RNA, 22 nt, Artificial Sequence
  Synthetic
ggacucuuggacuuucagcaau

SEQ ID NO: 124668 - RNA, 23 nt, Artificial Sequence
  Synthetic
aggacucuuggacuuucagcaau

SEQ ID NO: 124669 - RNA, 24 nt, Artificial Sequence
  Synthetic
gaggacucuuggacuuucagcaau

SEQ ID NO: 124670 - RNA, 18 nt, Artificial Sequence
  Synthetic
gucgcagaagaucucaau

SEQ ID NO: 124671 - RNA, 19 nt, Artificial Sequence
  Synthetic
cgucgcagaagaucucaau

SEQ ID NO: 124672 - RNA, 20 nt, Artificial Sequence
  Synthetic
gcgucgcagaagaucucaau

SEQ ID NO: 124673 - RNA, 18 nt, Artificial Sequence
  Synthetic
  misc_feature (8)..(8): n is a, c, g, or u
uugacccnuauaaagaau

SEQ ID NO: 124674 - RNA, 19 nt, Artificial Sequence
  Synthetic
  misc_feature (9)..(9): n is a, c, g, or u
auugacccnuauaaagaau

SEQ ID NO: 124675 - RNA, 20 nt, Artificial Sequence
  Synthetic
  misc_feature (10)..(10): n is a, c, g, or u
cauugacccnuauaaagaau

SEQ ID NO: 124676 - RNA, 21 nt, Artificial Sequence
  Synthetic
  misc_feature (11)..(11): n is a, c, g, or u
acauugacccnuauaaagaau

SEQ ID NO: 124677 - RNA, 22 nt, Artificial Sequence
  Synthetic
  misc_feature (12)..(12): n is a, c, g, or u
gacauugacccnuauaaagaau

SEQ ID NO: 124678 - RNA, 23 nt, Artificial Sequence
  Synthetic
  misc_feature (13)..(13): n is a, c, g, or u
ggacauugacccnuauaaagaau

SEQ ID NO: 124679 - RNA, 24 nt, Artificial Sequence
  Synthetic
  misc_feature (14)..(14): n is a, c, g, or u
uggacauugacccnuauaaagaau

SEQ ID NO: 124680 - RNA, 18 nt, Artificial Sequence
  Synthetic
  misc_feature (7)..(7): n is a, c, g, or u
gaaagunugucaacgaau

SEQ ID NO: 124681 - RNA, 19 nt, Artificial Sequence
  Synthetic
  misc_feature (8)..(8): n is a, c, g, or u
ggaaagunugucaacgaau

SEQ ID NO: 124682 - RNA, 20 nt, Artificial Sequence
  Synthetic
  misc_feature (9)..(9): n is a, c, g, or u
uggaaagunugucaacgaau

SEQ ID NO: 124683 - RNA, 21 nt, Artificial Sequence
  Synthetic
  misc_feature (10)..(10): n is a, c, g, or u
uuggaaagunugucaacgaau

SEQ ID NO: 124684 - RNA, 22 nt, Artificial Sequence
  Synthetic
  misc_feature (11)..(11): n is a, c, g, or u
auuggaaagunugucaacgaau

SEQ ID NO: 124685 - RNA, 23 nt, Artificial Sequence
  Synthetic
  misc_feature (12)..(12): n is a, c, g, or u
gauuggaaagunugucaacgaau

SEQ ID NO: 124686 - RNA, 24 nt, Artificial Sequence
  Synthetic
  misc_feature (13)..(13): n is a, c, g, or u
ugauuggaaagunugucaacgaau

SEQ ID NO: 124687 - RNA, 18 nt, Artificial Sequence
  Synthetic
gcccguuuguccucuaau

SEQ ID NO: 124688 - RNA, 19 nt, Artificial Sequence
  Synthetic
ugcccguuuguccucuaau

SEQ ID NO: 124689 - RNA, 20 nt, Artificial Sequence
  Synthetic
uugcccguuuguccucuaau

SEQ ID NO: 124690 - RNA, 21 nt, Artificial Sequence
  Synthetic
guugcccguuuguccucuaau

SEQ ID NO: 124691 - RNA, 22 nt, Artificial Sequence
  Synthetic
uguugcccguuuguccucuaau

SEQ ID NO: 124692 - RNA, 23 nt, Artificial Sequence
  Synthetic
auguugcccguuuguccucuaau

SEQ ID NO: 124693 - RNA, 24 nt, Artificial Sequence
  Synthetic
uauguugcccguuuguccucuaau

SEQ ID NO: 124694 - RNA, 18 nt, Artificial Sequence
  Synthetic
accugggugggaaguaau

SEQ ID NO: 124695 - RNA, 19 nt, Artificial Sequence
  Synthetic
caccugggugggaaguaau

SEQ ID NO: 124696 - RNA, 20 nt, Artificial Sequence
  Synthetic
ccaccugggugggaaguaau

SEQ ID NO: 124697 - RNA, 21 nt, Artificial Sequence
  Synthetic
gccaccugggugggaaguaau

SEQ ID NO: 124698 - RNA, 22 nt, Artificial Sequence
  Synthetic
agccaccugggugggaaguaau

SEQ ID NO: 124699 - RNA, 23 nt, Artificial Sequence
  Synthetic
uagccaccugggugggaaguaau

SEQ ID NO: 124700 - RNA, 24 nt, Artificial Sequence
  Synthetic
cuagccaccugggugggaaguaau

SEQ ID NO: 124701 - RNA, 18 nt, Artificial Sequence
  Synthetic
  misc_feature (12)..(12): n is a, c, g, or u
agcuaugucaanguuaau

SEQ ID NO: 124702 - RNA, 19 nt, Artificial Sequence
  Synthetic
  misc_feature (13)..(13): n is a, c, g, or u
cagcuaugucaanguuaau

SEQ ID NO: 124703 - RNA, 20 nt, Artificial Sequence
  Synthetic
  misc_feature (14)..(14): n is a, c, g, or u
ucagcuaugucaanguuaau

SEQ ID NO: 124704 - RNA, 21 nt, Artificial Sequence
  Synthetic
  misc_feature (15)..(15): n is a, c, g, or u
gucagcuaugucaanguuaau

SEQ ID NO: 124705 - RNA, 22 nt, Artificial Sequence
  Synthetic
  misc_feature (16)..(16): n is a, c, g, or u
agucagcuaugucaanguuaau

SEQ ID NO: 124706 - RNA, 23 nt, Artificial Sequence
  Synthetic
  misc_feature (17)..(17): n is a, c, g, or u
uagucagcuaugucaanguuaau

SEQ ID NO: 124707 - RNA, 24 nt, Artificial Sequence
  Synthetic
  misc_feature (18)..(18): n is a, c, g, or u
guagucagcuaugucaanguuaau

SEQ ID NO: 124708 - RNA, 18 nt, Artificial Sequence
  Synthetic
gccaagucuguacaacau

SEQ ID NO: 124709 - RNA, 19 nt, Artificial Sequence
  Synthetic
ggccaagucuguacaacau

SEQ ID NO: 124710 - RNA, 20 nt, Artificial Sequence
  Synthetic
gggccaagucuguacaacau

SEQ ID NO: 124711 - RNA, 21 nt, Artificial Sequence
  Synthetic
ggggccaagucuguacaacau

SEQ ID NO: 124712 - RNA, 22 nt, Artificial Sequence
  Synthetic
gggggccaagucuguacaacau

SEQ ID NO: 124713 - RNA, 23 nt, Artificial Sequence
  Synthetic
ugggggccaagucuguacaacau

SEQ ID NO: 124714 - RNA, 24 nt, Artificial Sequence
  Synthetic
uugggggccaagucuguacaacau

SEQ ID NO: 124715 - RNA, 18 nt, Artificial Sequence
  Synthetic
ggacccuguaccgaacau

SEQ ID NO: 124716 - RNA, 19 nt, Artificial Sequence
  Synthetic
gggacccuguaccgaacau

SEQ ID NO: 124717 - RNA, 20 nt, Artificial Sequence
  Synthetic
ggggacccuguaccgaacau

SEQ ID NO: 124718 - RNA, 21 nt, Artificial Sequence
  Synthetic
uggggacccuguaccgaacau

SEQ ID NO: 124719 - RNA, 22 nt, Artificial Sequence
  Synthetic
cuggggacccuguaccgaacau

SEQ ID NO: 124720 - RNA, 23 nt, Artificial Sequence
  Synthetic
acuggggacccuguaccgaacau

SEQ ID NO: 124721 - RNA, 24 nt, Artificial Sequence
  Synthetic
gacuggggacccuguaccgaacau

SEQ ID NO: 124722 - RNA, 18 nt, Artificial Sequence
  Synthetic
uugucuuuggguauacau

SEQ ID NO: 124723 - RNA, 19 nt, Artificial Sequence
  Synthetic
uuugucuuuggguauacau

SEQ ID NO: 124724 - RNA, 20 nt, Artificial Sequence
  Synthetic
uuuugucuuuggguauacau

SEQ ID NO: 124725 - RNA, 21 nt, Artificial Sequence
  Synthetic
cuuuugucuuuggguauacau

SEQ ID NO: 124726 - RNA, 22 nt, Artificial Sequence
  Synthetic
ucuuuugucuuuggguauacau

SEQ ID NO: 124727 - RNA, 23 nt, Artificial Sequence
  Synthetic
uucuuuugucuuuggguauacau

SEQ ID NO: 124728 - RNA, 24 nt, Artificial Sequence
  Synthetic
uuucuuuugucuuuggguauacau

SEQ ID NO: 124729 - RNA, 18 nt, Artificial Sequence
  Synthetic
  misc_feature (2)..(2): n is a, c, g, or u
cnaccagcaccggaccau

SEQ ID NO: 124730 - RNA, 19 nt, Artificial Sequence
  Synthetic
  misc_feature (3)..(3): n is a, c, g, or u
acnaccagcaccggaccau

SEQ ID NO: 124731 - RNA, 20 nt, Artificial Sequence
  Synthetic
  misc_feature (4)..(4): n is a, c, g, or u
aacnaccagcaccggaccau

SEQ ID NO: 124732 - RNA, 21 nt, Artificial Sequence
  Synthetic
  misc_feature (5)..(5): n is a, c, g, or u
caacnaccagcaccggaccau

SEQ ID NO: 124733 - RNA, 22 nt, Artificial Sequence
  Synthetic
  misc_feature (6)..(6): n is a, c, g, or u
ucaacnaccagcaccggaccau

SEQ ID NO: 124734 - RNA, 23 nt, Artificial Sequence
  Synthetic
  misc_feature (7)..(7): n is a, c, g, or u
aucaacnaccagcaccggaccau

SEQ ID NO: 124735 - RNA, 24 nt, Artificial Sequence
  Synthetic
  misc_feature (8)..(8): n is a, c, g, or u
caucaacnaccagcaccggaccau

SEQ ID NO: 124736 - RNA, 18 nt, Artificial Sequence
  Synthetic
  misc_feature (8)..(9): n is a, c, g, or u
ggguucannccuccccau

SEQ ID NO: 124737 - RNA, 19 nt, Artificial Sequence
  Synthetic
  misc_feature (9)..(10): n is a, c, g, or u
aggguucannccuccccau

SEQ ID NO: 124738 - RNA, 20 nt, Artificial Sequence
  Synthetic
  misc_feature (10)..(11): n is a, c, g, or u
caggguucannccuccccau

SEQ ID NO: 124739 - RNA, 21 nt, Artificial Sequence
  Synthetic
  misc_feature (11)..(12): n is a, c, g, or u
ccaggguucannccuccccau

SEQ ID NO: 124740 - RNA, 22 nt, Artificial Sequence
  Synthetic
  misc_feature (12)..(13): n is a, c, g, or u
gccaggguucannccuccccau

SEQ ID NO: 124741 - RNA, 23 nt, Artificial Sequence
  Synthetic
  misc_feature (13)..(14): n is a, c, g, or u
ggccaggguucannccuccccau

SEQ ID NO: 124742 - RNA, 24 nt, Artificial Sequence
  Synthetic
  misc_feature (14)..(15): n is a, c, g, or u
gggccaggguucannccuccccau

SEQ ID NO: 124743 - RNA, 18 nt, Artificial Sequence
  Synthetic
  misc_feature (9)..(9): n is a, c, g, or u
gaacaagancuacagcau

SEQ ID NO: 124744 - RNA, 19 nt, Artificial Sequence
  Synthetic
  misc_feature (10)..(10): n is a, c, g, or u
ggaacaagancuacagcau

SEQ ID NO: 124745 - RNA, 20 nt, Artificial Sequence
  Synthetic
  misc_feature (11)..(11): n is a, c, g, or u
gggaacaagancuacagcau

SEQ ID NO: 124746 - RNA, 21 nt, Artificial Sequence
  Synthetic
  misc_feature (12)..(12): n is a, c, g, or u
ugggaacaagancuacagcau

SEQ ID NO: 124747 - RNA, 22 nt, Artificial Sequence
  Synthetic
  misc_feature (13)..(13): n is a, c, g, or u
uugggaacaagancuacagcau

SEQ ID NO: 124748 - RNA, 23 nt, Artificial Sequence
  Synthetic
  misc_feature (14)..(14): n is a, c, g, or u
cuugggaacaagancuacagcau

SEQ ID NO: 124749 - RNA, 24 nt, Artificial Sequence
  Synthetic
  misc_feature (15)..(15): n is a, c, g, or u
ucuugggaacaagancuacagcau

SEQ ID NO: 124750 - RNA, 18 nt, Artificial Sequence
  Synthetic
auuuggaagauccagcau

SEQ ID NO: 124751 - RNA, 19 nt, Artificial Sequence
  Synthetic
aauuuggaagauccagcau

SEQ ID NO: 124752 - RNA, 20 nt, Artificial Sequence
  Synthetic
uaauuuggaagauccagcau

SEQ ID NO: 124753 - RNA, 21 nt, Artificial Sequence
  Synthetic
guaauuuggaagauccagcau

SEQ ID NO: 124754 - RNA, 22 nt, Artificial Sequence
  Synthetic
aguaauuuggaagauccagcau

SEQ ID NO: 124755 - RNA, 23 nt, Artificial Sequence
  Synthetic
aaguaauuuggaagauccagcau

SEQ ID NO: 124756 - RNA, 24 nt, Artificial Sequence
  Synthetic
gaaguaauuuggaagauccagcau

SEQ ID NO: 124757 - RNA, 18 nt, Artificial Sequence
  Synthetic
aggugggagugggagcau

SEQ ID NO: 124758 - RNA, 19 nt, Artificial Sequence
  Synthetic
aaggugggagugggagcau

SEQ ID NO: 124759 - RNA, 20 nt, Artificial Sequence
  Synthetic
caaggugggagugggagcau

SEQ ID NO: 124760 - RNA, 21 nt, Artificial Sequence
  Synthetic
acaaggugggagugggagcau

SEQ ID NO: 124761 - RNA, 22 nt, Artificial Sequence
  Synthetic
aacaaggugggagugggagcau

SEQ ID NO: 124762 - RNA, 23 nt, Artificial Sequence
  Synthetic
caacaaggugggagugggagcau

SEQ ID NO: 124763 - RNA, 24 nt, Artificial Sequence
  Synthetic
ccaacaaggugggagugggagcau

SEQ ID NO: 124764 - RNA, 18 nt, Artificial Sequence
  Synthetic
acauggagaacaucgcau

SEQ ID NO: 124765 - RNA, 19 nt, Artificial Sequence
  Synthetic
aacauggagaacaucgcau

SEQ ID NO: 124766 - RNA, 20 nt, Artificial Sequence
  Synthetic
gaacauggagaacaucgcau

SEQ ID NO: 124767 - RNA, 18 nt, Artificial Sequence
  Synthetic
caccucugcacgucgcau

SEQ ID NO: 124768 - RNA, 19 nt, Artificial Sequence
  Synthetic
ucaccucugcacgucgcau

SEQ ID NO: 124769 - RNA, 20 nt, Artificial Sequence
  Synthetic
uucaccucugcacgucgcau

SEQ ID NO: 124770 - RNA, 21 nt, Artificial Sequence
  Synthetic
cuucaccucugcacgucgcau

SEQ ID NO: 124771 - RNA, 22 nt, Artificial Sequence
  Synthetic
gcuucaccucugcacgucgcau

SEQ ID NO: 124772 - RNA, 23 nt, Artificial Sequence
  Synthetic
cgcuucaccucugcacgucgcau

SEQ ID NO: 124773 - RNA, 24 nt, Artificial Sequence
  Synthetic
ucgcuucaccucugcacgucgcau

SEQ ID NO: 124774 - RNA, 18 nt, Artificial Sequence
  Synthetic
caaaccucgaaaaggcau

SEQ ID NO: 124775 - RNA, 19 nt, Artificial Sequence
  Synthetic
ccaaaccucgaaaaggcau

SEQ ID NO: 124776 - RNA, 20 nt, Artificial Sequence
  Synthetic
uccaaaccucgaaaaggcau

SEQ ID NO: 124777 - RNA, 21 nt, Artificial Sequence
  Synthetic
uuccaaaccucgaaaaggcau

SEQ ID NO: 124778 - RNA, 22 nt, Artificial Sequence
  Synthetic
cuuccaaaccucgaaaaggcau

SEQ ID NO: 124779 - RNA, 23 nt, Artificial Sequence
  Synthetic
ucuuccaaaccucgaaaaggcau

SEQ ID NO: 124780 - RNA, 24 nt, Artificial Sequence
  Synthetic
gucuuccaaaccucgaaaaggcau

SEQ ID NO: 124781 - RNA, 18 nt, Artificial Sequence
  Synthetic
aucaguuggacccugcau

SEQ ID NO: 124782 - RNA, 19 nt, Artificial Sequence
  Synthetic
caucaguuggacccugcau

SEQ ID NO: 124783 - RNA, 20 nt, Artificial Sequence
  Synthetic
ucaucaguuggacccugcau

SEQ ID NO: 124784 - RNA, 21 nt, Artificial Sequence
  Synthetic
aucaucaguuggacccugcau

SEQ ID NO: 124785 - RNA, 22 nt, Artificial Sequence
  Synthetic
gaucaucaguuggacccugcau

SEQ ID NO: 124786 - RNA, 23 nt, Artificial Sequence
  Synthetic
cgaucaucaguuggacccugcau

SEQ ID NO: 124787 - RNA, 24 nt, Artificial Sequence
  Synthetic
ccgaucaucaguuggacccugcau

SEQ ID NO: 124788 - RNA, 18 nt, Artificial Sequence
  Synthetic
uucgcacuccuccugcau

SEQ ID NO: 124789 - RNA, 19 nt, Artificial Sequence
  Synthetic
auucgcacuccuccugcau

SEQ ID NO: 124790 - RNA, 20 nt, Artificial Sequence
  Synthetic
gauucgcacuccuccugcau

SEQ ID NO: 124791 - RNA, 21 nt, Artificial Sequence
  Synthetic
ggauucgcacuccuccugcau

SEQ ID NO: 124792 - RNA, 22 nt, Artificial Sequence
  Synthetic
uggauucgcacuccuccugcau

SEQ ID NO: 124793 - RNA, 23 nt, Artificial Sequence
  Synthetic
guggauucgcacuccuccugcau

SEQ ID NO: 124794 - RNA, 24 nt, Artificial Sequence
  Synthetic
uguggauucgcacuccuccugcau

SEQ ID NO: 124795 - RNA, 18 nt, Artificial Sequence
  Synthetic
cugcccaaggucuugcau

SEQ ID NO: 124796 - RNA, 19 nt, Artificial Sequence
  Synthetic
ccugcccaaggucuugcau

SEQ ID NO: 124797 - RNA, 20 nt, Artificial Sequence
  Synthetic
accugcccaaggucuugcau

SEQ ID NO: 124798 - RNA, 21 nt, Artificial Sequence
  Synthetic
aaccugcccaaggucuugcau

SEQ ID NO: 124799 - RNA, 22 nt, Artificial Sequence
  Synthetic
gaaccugcccaaggucuugcau

SEQ ID NO: 124800 - RNA, 23 nt, Artificial Sequence
  Synthetic
ggaaccugcccaaggucuugcau

SEQ ID NO: 124801 - RNA, 24 nt, Artificial Sequence
  Synthetic
  misc_feature (1)..(1): n is a, c, g, or u
nggaaccugcccaaggucuugcau

SEQ ID NO: 124802 - RNA, 18 nt, Artificial Sequence
  Synthetic
guauucccaucccaucau

SEQ ID NO: 124803 - RNA, 19 nt, Artificial Sequence
  Synthetic
uguauucccaucccaucau

SEQ ID NO: 124804 - RNA, 20 nt, Artificial Sequence
  Synthetic
cuguauucccaucccaucau

SEQ ID NO: 124805 - RNA, 21 nt, Artificial Sequence
  Synthetic
ccuguauucccaucccaucau

SEQ ID NO: 124806 - RNA, 22 nt, Artificial Sequence
  Synthetic
accuguauucccaucccaucau

SEQ ID NO: 124807 - RNA, 23 nt, Artificial Sequence
  Synthetic
caccuguauucccaucccaucau

SEQ ID NO: 124808 - RNA, 24 nt, Artificial Sequence
  Synthetic
gcaccuguauucccaucccaucau

SEQ ID NO: 124809 - RNA, 18 nt, Artificial Sequence
  Synthetic
  misc_feature (7)..(7): n is a, c, g, or u
  misc_feature (10)..(10): n is a, c, g, or u
gucuggngcnaaacucau

SEQ ID NO: 124810 - RNA, 19 nt, Artificial Sequence
  Synthetic
  misc_feature (8)..(8): n is a, c, g, or u
  misc_feature (11)..(11): n is a, c, g, or u
ggucuggngcnaaacucau

SEQ ID NO: 124811 - RNA, 20 nt, Artificial Sequence
  Synthetic
  misc_feature (1)..(1): n is a, c, g, or u
  misc_feature (9)..(9): n is a, c, g, or u
  misc_feature (12)..(12): n is a, c, g, or u
nggucuggngcnaaacucau

SEQ ID NO: 124812 - RNA, 21 nt, Artificial Sequence
  Synthetic
  misc_feature (2)..(2): n is a, c, g, or u
  misc_feature (10)..(10): n is a, c, g, or u
  misc_feature (13)..(13): n is a, c, g, or u
cnggucuggngcnaaacucau

SEQ ID NO: 124813 - RNA, 22 nt, Artificial Sequence
  Synthetic
  misc_feature (3)..(3): n is a, c, g, or u
  misc_feature (11)..(11): n is a, c, g, or u
  misc_feature (14)..(14): n is a, c, g, or u
gcnggucuggngcnaaacucau

SEQ ID NO: 124814 - RNA, 23 nt, Artificial Sequence
  Synthetic
  misc_feature (4)..(4): n is a, c, g, or u
  misc_feature (12)..(12): n is a, c, g, or u
  misc_feature (15)..(15): n is a, c, g, or u
agcnggucuggngcnaaacucau

SEQ ID NO: 124815 - RNA, 24 nt, Artificial Sequence
  Synthetic
  misc_feature (5)..(5): n is a, c, g, or u
  misc_feature (13)..(13): n is a, c, g, or u
  misc_feature (16)..(16): n is a, c, g, or u
cagcnggucuggngcnaaacucau

SEQ ID NO: 124816 - RNA, 18 nt, Artificial Sequence
  Synthetic
caccaaacucuucaagau

SEQ ID NO: 124817 - RNA, 19 nt, Artificial Sequence
  Synthetic
ccaccaaacucuucaagau

SEQ ID NO: 124818 - RNA, 20 nt, Artificial Sequence
  Synthetic
uccaccaaacucuucaagau

SEQ ID NO: 124819 - RNA, 21 nt, Artificial Sequence
  Synthetic
uuccaccaaacucuucaagau

SEQ ID NO: 124820 - RNA, 22 nt, Artificial Sequence
  Synthetic
  misc_feature (1)..(1): n is a, c, g, or u
nuuccaccaaacucuucaagau

SEQ ID NO: 124821 - RNA, 23 nt, Artificial Sequence
  Synthetic
  misc_feature (2)..(2): n is a, c, g, or u
cnuuccaccaaacucuucaagau

SEQ ID NO: 124822 - RNA, 24 nt, Artificial Sequence
  Synthetic
  misc_feature (3)..(3): n is a, c, g, or u
acnuuccaccaaacucuucaagau

SEQ ID NO: 124823 - RNA, 18 nt, Artificial Sequence
  Synthetic
aacucagaaaauccagau

SEQ ID NO: 124824 - RNA, 19 nt, Artificial Sequence
  Synthetic
caacucagaaaauccagau

SEQ ID NO: 124825 - RNA, 20 nt, Artificial Sequence
  Synthetic
ccaacucagaaaauccagau

SEQ ID NO: 124826 - RNA, 21 nt, Artificial Sequence
  Synthetic
gccaacucagaaaauccagau

SEQ ID NO: 124827 - RNA, 22 nt, Artificial Sequence
  Synthetic
agccaacucagaaaauccagau

SEQ ID NO: 124828 - RNA, 23 nt, Artificial Sequence
  Synthetic
aagccaacucagaaaauccagau

SEQ ID NO: 124829 - RNA, 24 nt, Artificial Sequence
  Synthetic
aaagccaacucagaaaauccagau

SEQ ID NO: 124830 - RNA, 18 nt, Artificial Sequence
  Synthetic
aaauauuugcccuuagau

SEQ ID NO: 124831 - RNA, 19 nt, Artificial Sequence
  Synthetic
uaaauauuugcccuuagau

SEQ ID NO: 124832 - RNA, 20 nt, Artificial Sequence
  Synthetic
cuaaauauuugcccuuagau

SEQ ID NO: 124833 - RNA, 21 nt, Artificial Sequence
  Synthetic
acuaaauauuugcccuuagau

SEQ ID NO: 124834 - RNA, 22 nt, Artificial Sequence
  Synthetic
uacuaaauauuugcccuuagau

SEQ ID NO: 124835 - RNA, 23 nt, Artificial Sequence
  Synthetic
uuacuaaauauuugcccuuagau

SEQ ID NO: 124836 - RNA, 24 nt, Artificial Sequence
  Synthetic
guuacuaaauauuugcccuuagau

SEQ ID NO: 124837 - RNA, 18 nt, Artificial Sequence
  Synthetic
  misc_feature (9)..(9): n is a, c, g, or u
guaaacagnccuauugau

SEQ ID NO: 124838 - RNA, 19 nt, Artificial Sequence
  Synthetic
  misc_feature (10)..(10): n is a, c, g, or u
uguaaacagnccuauugau

SEQ ID NO: 124839 - RNA, 20 nt, Artificial Sequence
  Synthetic
  misc_feature (11)..(11): n is a, c, g, or u
cuguaaacagnccuauugau

SEQ ID NO: 124840 - RNA, 21 nt, Artificial Sequence
  Synthetic
  misc_feature (12)..(12): n is a, c, g, or u
ccuguaaacagnccuauugau

SEQ ID NO: 124841 - RNA, 22 nt, Artificial Sequence
  Synthetic
  misc_feature (13)..(13): n is a, c, g, or u
uccuguaaacagnccuauugau

SEQ ID NO: 124842 - RNA, 23 nt, Artificial Sequence
  Synthetic
  misc_feature (14)..(14): n is a, c, g, or u
uuccuguaaacagnccuauugau

SEQ ID NO: 124843 - RNA, 24 nt, Artificial Sequence
  Synthetic
  misc_feature (15)..(15): n is a, c, g, or u
cuuccuguaaacagnccuauugau

SEQ ID NO: 124844 - RNA, 18 nt, Artificial Sequence
  Synthetic
  misc_feature (9)..(9): n is a, c, g, or u
aaggcgggnaucuuauau

SEQ ID NO: 124845 - RNA, 19 nt, Artificial Sequence
  Synthetic
  misc_feature (10)..(10): n is a, c, g, or u
gaaggcgggnaucuuauau

SEQ ID NO: 124846 - RNA, 20 nt, Artificial Sequence
  Synthetic
  misc_feature (11)..(11): n is a, c, g, or u
ggaaggcgggnaucuuauau

SEQ ID NO: 124847 - RNA, 21 nt, Artificial Sequence
  Synthetic
  misc_feature (12)..(12): n is a, c, g, or u
uggaaggcgggnaucuuauau

SEQ ID NO: 124848 - RNA, 22 nt, Artificial Sequence
  Synthetic
  misc_feature (13)..(13): n is a, c, g, or u
uuggaaggcgggnaucuuauau

SEQ ID NO: 124849 - RNA, 23 nt, Artificial Sequence
  Synthetic
  misc_feature (14)..(14): n is a, c, g, or u
uuuggaaggcgggnaucuuauau

SEQ ID NO: 124850 - RNA, 24 nt, Artificial Sequence
  Synthetic
  misc_feature (15)..(15): n is a, c, g, or u
cuuuggaaggcgggnaucuuauau

SEQ ID NO: 124851 - RNA, 18 nt, Artificial Sequence
  Synthetic
gaauuaguagucagcuau

SEQ ID NO: 124852 - RNA, 19 nt, Artificial Sequence
  Synthetic
ggaauuaguagucagcuau

SEQ ID NO: 124853 - RNA, 20 nt, Artificial Sequence
  Synthetic
gggaauuaguagucagcuau

SEQ ID NO: 124854 - RNA, 21 nt, Artificial Sequence
  Synthetic
agggaauuaguagucagcuau

SEQ ID NO: 124855 - RNA, 22 nt, Artificial Sequence
  Synthetic
cagggaauuaguagucagcuau

SEQ ID NO: 124856 - RNA, 23 nt, Artificial Sequence
  Synthetic
ccagggaauuaguagucagcuau

SEQ ID NO: 124857 - RNA, 24 nt, Artificial Sequence
  Synthetic
uccagggaauuaguagucagcuau

SEQ ID NO: 124858 - RNA, 18 nt, Artificial Sequence
  Synthetic
gccuuuauaugcauguau

SEQ ID NO: 124859 - RNA, 19 nt, Artificial Sequence
  Synthetic
ugccuuuauaugcauguau

SEQ ID NO: 124860 - RNA, 20 nt, Artificial Sequence
  Synthetic
augccuuuauaugcauguau

SEQ ID NO: 124861 - RNA, 21 nt, Artificial Sequence
  Synthetic
aaugccuuuauaugcauguau

SEQ ID NO: 124862 - RNA, 22 nt, Artificial Sequence
  Synthetic
uaaugccuuuauaugcauguau

SEQ ID NO: 124863 - RNA, 23 nt, Artificial Sequence
  Synthetic
uuaaugccuuuauaugcauguau

SEQ ID NO: 124864 - RNA, 24 nt, Artificial Sequence
  Synthetic
uuuaaugccuuuauaugcauguau

SEQ ID NO: 124865 - RNA, 18 nt, Artificial Sequence
  Synthetic
accgccucugcucuguau

SEQ ID NO: 124866 - RNA, 19 nt, Artificial Sequence
  Synthetic
caccgccucugcucuguau

SEQ ID NO: 124867 - RNA, 20 nt, Artificial Sequence
  Synthetic
acaccgccucugcucuguau

SEQ ID NO: 124868 - RNA, 21 nt, Artificial Sequence
  Synthetic
gacaccgccucugcucuguau

SEQ ID NO: 124869 - RNA, 22 nt, Artificial Sequence
  Synthetic
cgacaccgccucugcucuguau

SEQ ID NO: 124870 - RNA, 23 nt, Artificial Sequence
  Synthetic
ucgacaccgccucugcucuguau

SEQ ID NO: 124871 - RNA, 24 nt, Artificial Sequence
  Synthetic
cucgacaccgccucugcucuguau

SEQ ID NO: 124872 - RNA, 18 nt, Artificial Sequence
  Synthetic
  misc_feature (9)..(9): n is a, c, g, or u
  misc_feature (15)..(15): n is a, c, g, or u
uuucuaagnaaacanuau

SEQ ID NO: 124873 - RNA, 19 nt, Artificial Sequence
  Synthetic
  misc_feature (10)..(10): n is a, c, g, or u
  misc_feature (16)..(16): n is a, c, g, or u
cuuucuaagnaaacanuau

SEQ ID NO: 124874 - RNA, 20 nt, Artificial Sequence
  Synthetic
  misc_feature (11)..(11): n is a, c, g, or u
  misc_feature (17)..(17): n is a, c, g, or u
ccuuucuaagnaaacanuau

SEQ ID NO: 124875 - RNA, 21 nt, Artificial Sequence
  Synthetic
  misc_feature (12)..(12): n is a, c, g, or u
  misc_feature (18)..(18): n is a, c, g, or u
gccuuucuaagnaaacanuau

SEQ ID NO: 124876 - RNA, 22 nt, Artificial Sequence
  Synthetic
  misc_feature (13)..(13): n is a, c, g, or u
  misc_feature (19)..(19): n is a, c, g, or u
ggccuuucuaagnaaacanuau

SEQ ID NO: 124877 - RNA, 23 nt, Artificial Sequence
  Synthetic
  misc_feature (14)..(14): n is a, c, g, or u
  misc_feature (20)..(20): n is a, c, g, or u
aggccuuucuaagnaaacanuau

SEQ ID NO: 124878 - RNA, 24 nt, Artificial Sequence
  Synthetic
  misc_feature (15)..(15): n is a, c, g, or u
  misc_feature (21)..(21): n is a, c, g, or u
aaggccuuucuaagnaaacanuau

SEQ ID NO: 124879 - RNA, 18 nt, Artificial Sequence
  Synthetic
  misc_feature (15)..(15): n is a, c, g, or u
auggacauugacccnuau

SEQ ID NO: 124880 - RNA, 19 nt, Artificial Sequence
  Synthetic
  misc_feature (16)..(16): n is a, c, g, or u
cauggacauugacccnuau

SEQ ID NO: 124881 - RNA, 20 nt, Artificial Sequence
  Synthetic
  misc_feature (17)..(17): n is a, c, g, or u
gcauggacauugacccnuau

SEQ ID NO: 124882 - RNA, 21 nt, Artificial Sequence
  Synthetic
  misc_feature (18)..(18): n is a, c, g, or u
ggcauggacauugacccnuau

SEQ ID NO: 124883 - RNA, 22 nt, Artificial Sequence
  Synthetic
  misc_feature (19)..(19): n is a, c, g, or u
gggcauggacauugacccnuau

SEQ ID NO: 124884 - RNA, 23 nt, Artificial Sequence
  Synthetic
  misc_feature (1)..(1): n is a, c, g, or u
  misc_feature (20)..(20): n is a, c, g, or u
ngggcauggacauugacccnuau

SEQ ID NO: 124885 - RNA, 24 nt, Artificial Sequence
  Synthetic
  misc_feature (2)..(2): n is a, c, g, or u
  misc_feature (21)..(21): n is a, c, g, or u
ungggcauggacauugacccnuau

SEQ ID NO: 124886 - RNA, 18 nt, Artificial Sequence
  Synthetic
  misc_feature (3)..(3): n is a, c, g, or u
  misc_feature (12)..(12): n is a, c, g, or u
ggnaucaaaccnuauuau

SEQ ID NO: 124887 - RNA, 19 nt, Artificial Sequence
  Synthetic
  misc_feature (4)..(4): n is a, c, g, or u
  misc_feature (13)..(13): n is a, c, g, or u
aggnaucaaaccnuauuau

SEQ ID NO: 124888 - RNA, 20 nt, Artificial Sequence
  Synthetic
  misc_feature (5)..(5): n is a, c, g, or u
  misc_feature (14)..(14): n is a, c, g, or u
aaggnaucaaaccnuauuau

SEQ ID NO: 124889 - RNA, 21 nt, Artificial Sequence
  Synthetic
  misc_feature (6)..(6): n is a, c, g, or u
  misc_feature (15)..(15): n is a, c, g, or u
aaaggnaucaaaccnuauuau

SEQ ID NO: 124890 - RNA, 22 nt, Artificial Sequence
  Synthetic
  misc_feature (7)..(7): n is a, c, g, or u
  misc_feature (16)..(16): n is a, c, g, or u
uaaaggnaucaaaccnuauuau

SEQ ID NO: 124891 - RNA, 23 nt, Artificial Sequence
  Synthetic
  misc_feature (8)..(8): n is a, c, g, or u
  misc_feature (17)..(17): n is a, c, g, or u
auaaaggnaucaaaccnuauuau

SEQ ID NO: 124892 - RNA, 24 nt, Artificial Sequence
  Synthetic
  misc_feature (9)..(9): n is a, c, g, or u
  misc_feature (18)..(18): n is a, c, g, or u
gauaaaggnaucaaaccnuauuau

SEQ ID NO: 124893 - RNA, 18 nt, Artificial Sequence
  Synthetic
ccauaucgucaaucuuau

SEQ ID NO: 124894 - RNA, 19 nt, Artificial Sequence
  Synthetic
  misc_feature (1)..(1): n is a, c, g, or u
nccauaucgucaaucuuau

SEQ ID NO: 124895 - RNA, 20 nt, Artificial Sequence
  Synthetic
  misc_feature (2)..(2): n is a, c, g, or u
unccauaucgucaaucuuau

SEQ ID NO: 124896 - RNA, 21 nt, Artificial Sequence
  Synthetic
  misc_feature (3)..(3): n is a, c, g, or u
cunccauaucgucaaucuuau

SEQ ID NO: 124897 - RNA, 22 nt, Artificial Sequence
  Synthetic
  misc_feature (4)..(4): n is a, c, g, or u
ucunccauaucgucaaucuuau

SEQ ID NO: 124898 - RNA, 23 nt, Artificial Sequence
  Synthetic
  misc_feature (5)..(5): n is a, c, g, or u
cucunccauaucgucaaucuuau

SEQ ID NO: 124899 - RNA, 24 nt, Artificial Sequence
  Synthetic
  misc_feature (1)..(1): n is a, c, g, or u
  misc_feature (6)..(6): n is a, c, g, or u
ncucunccauaucgucaaucuuau

SEQ ID NO: 124900 - RNA, 18 nt, Artificial Sequence
  Synthetic
  misc_feature (11)..(11): n is a, c, g, or u
ggaaggcgggnaucuuau

SEQ ID NO: 124901 - RNA, 19 nt, Artificial Sequence
  Synthetic
  misc_feature (12)..(12): n is a, c, g, or u
uggaaggcgggnaucuuau

SEQ ID NO: 124902 - RNA, 20 nt, Artificial Sequence
  Synthetic
  misc_feature (13)..(13): n is a, c, g, or u
uuggaaggcgggnaucuuau

SEQ ID NO: 124903 - RNA, 21 nt, Artificial Sequence
  Synthetic
  misc_feature (14)..(14): n is a, c, g, or u
uuuggaaggcgggnaucuuau

SEQ ID NO: 124904 - RNA, 22 nt, Artificial Sequence
  Synthetic
  misc_feature (15)..(15): n is a, c, g, or u
cuuuggaaggcgggnaucuuau

SEQ ID NO: 124905 - RNA, 23 nt, Artificial Sequence
  Synthetic
  misc_feature (16)..(16): n is a, c, g, or u
ucuuuggaaggcgggnaucuuau

SEQ ID NO: 124906 - RNA, 24 nt, Artificial Sequence
  Synthetic
  misc_feature (17)..(17): n is a, c, g, or u
cucuuuggaaggcgggnaucuuau

SEQ ID NO: 124907 - RNA, 18 nt, Artificial Sequence
  Synthetic
cugcauucaaagccaacu

SEQ ID NO: 124908 - RNA, 19 nt, Artificial Sequence
  Synthetic
ccugcauucaaagccaacu

SEQ ID NO: 124909 - RNA, 20 nt, Artificial Sequence
  Synthetic
cccugcauucaaagccaacu

SEQ ID NO: 124910 - RNA, 21 nt, Artificial Sequence
  Synthetic
acccugcauucaaagccaacu

SEQ ID NO: 124911 - RNA, 22 nt, Artificial Sequence
  Synthetic
gacccugcauucaaagccaacu

SEQ ID NO: 124912 - RNA, 23 nt, Artificial Sequence
  Synthetic
ggacccugcauucaaagccaacu

SEQ ID NO: 124913 - RNA, 24 nt, Artificial Sequence
  Synthetic
uggacccugcauucaaagccaacu

SEQ ID NO: 124914 - RNA, 18 nt, Artificial Sequence
  Synthetic
uuuacuuucucgccaacu

SEQ ID NO: 124915 - RNA, 19 nt, Artificial Sequence
  Synthetic
uuuuacuuucucgccaacu

SEQ ID NO: 124916 - RNA, 20 nt, Artificial Sequence
  Synthetic
cuuuuacuuucucgccaacu

SEQ ID NO: 124917 - RNA, 21 nt, Artificial Sequence
  Synthetic
gcuuuuacuuucucgccaacu

SEQ ID NO: 124918 - RNA, 22 nt, Artificial Sequence
  Synthetic
ggcuuuuacuuucucgccaacu

SEQ ID NO: 124919 - RNA, 23 nt, Artificial Sequence
  Synthetic
aggcuuuuacuuucucgccaacu

SEQ ID NO: 124920 - RNA, 24 nt, Artificial Sequence
  Synthetic
caggcuuuuacuuucucgccaacu

SEQ ID NO: 124921 - RNA, 18 nt, Artificial Sequence
  Synthetic
gauccauacugcggaacu

SEQ ID NO: 124922 - RNA, 19 nt, Artificial Sequence
  Synthetic
cgauccauacugcggaacu

SEQ ID NO: 124923 - RNA, 20 nt, Artificial Sequence
  Synthetic
ccgauccauacugcggaacu

SEQ ID NO: 124924 - RNA, 18 nt, Artificial Sequence
  Synthetic
cccuaucuuaucaacacu

SEQ ID NO: 124925 - RNA, 19 nt, Artificial Sequence
  Synthetic
ccccuaucuuaucaacacu

SEQ ID NO: 124926 - RNA, 20 nt, Artificial Sequence
  Synthetic
gccccuaucuuaucaacacu

SEQ ID NO: 124927 - RNA, 21 nt, Artificial Sequence
  Synthetic
ugccccuaucuuaucaacacu

SEQ ID NO: 124928 - RNA, 22 nt, Artificial Sequence
  Synthetic
augccccuaucuuaucaacacu

SEQ ID NO: 124929 - RNA, 23 nt, Artificial Sequence
  Synthetic
aaugccccuaucuuaucaacacu

SEQ ID NO: 124930 - RNA, 24 nt, Artificial Sequence
  Synthetic
aaaugccccuaucuuaucaacacu

SEQ ID NO: 124931 - RNA, 18 nt, Artificial Sequence
  Synthetic
ucaaucuuaucgaagacu

SEQ ID NO: 124932 - RNA, 19 nt, Artificial Sequence
  Synthetic
gucaaucuuaucgaagacu

SEQ ID NO: 124933 - RNA, 20 nt, Artificial Sequence
  Synthetic
cgucaaucuuaucgaagacu

SEQ ID NO: 124934 - RNA, 21 nt, Artificial Sequence
  Synthetic
ucgucaaucuuaucgaagacu

SEQ ID NO: 124935 - RNA, 22 nt, Artificial Sequence
  Synthetic
aucgucaaucuuaucgaagacu

SEQ ID NO: 124936 - RNA, 23 nt, Artificial Sequence
  Synthetic
uaucgucaaucuuaucgaagacu

SEQ ID NO: 124937 - RNA, 24 nt, Artificial Sequence
  Synthetic
auaucgucaaucuuaucgaagacu

SEQ ID NO: 124938 - RNA, 18 nt, Artificial Sequence
  Synthetic
gaacaucgcaucaggacu

SEQ ID NO: 124939 - RNA, 19 nt, Artificial Sequence
  Synthetic
agaacaucgcaucaggacu

SEQ ID NO: 124940 - RNA, 20 nt, Artificial Sequence
  Synthetic
gagaacaucgcaucaggacu

SEQ ID NO: 124941 - RNA, 21 nt, Artificial Sequence
  Synthetic
ggagaacaucgcaucaggacu

SEQ ID NO: 124942 - RNA, 22 nt, Artificial Sequence
  Synthetic
uggagaacaucgcaucaggacu

SEQ ID NO: 124943 - RNA, 23 nt, Artificial Sequence
  Synthetic
auggagaacaucgcaucaggacu

SEQ ID NO: 124944 - RNA, 24 nt, Artificial Sequence
  Synthetic
cauggagaacaucgcaucaggacu

SEQ ID NO: 124945 - RNA, 18 nt, Artificial Sequence
  Synthetic
gucuugcauaagaggacu

SEQ ID NO: 124946 - RNA, 19 nt, Artificial Sequence
  Synthetic
ggucuugcauaagaggacu

SEQ ID NO: 124947 - RNA, 20 nt, Artificial Sequence
  Synthetic
aggucuugcauaagaggacu

SEQ ID NO: 124948 - RNA, 21 nt, Artificial Sequence
  Synthetic
aaggucuugcauaagaggacu

SEQ ID NO: 124949 - RNA, 22 nt, Artificial Sequence
  Synthetic
caaggucuugcauaagaggacu

SEQ ID NO: 124950 - RNA, 23 nt, Artificial Sequence
  Synthetic
ccaaggucuugcauaagaggacu

SEQ ID NO: 124951 - RNA, 24 nt, Artificial Sequence
  Synthetic
cccaaggucuugcauaagaggacu

SEQ ID NO: 124952 - RNA, 18 nt, Artificial Sequence
  Synthetic
  misc_feature (1)..(1): n is a, c, g, or u
nccuccccaugggggacu

SEQ ID NO: 124953 - RNA, 19 nt, Artificial Sequence
  Synthetic
  misc_feature (1)..(2): n is a, c, g, or u
nnccuccccaugggggacu

SEQ ID NO: 124954 - RNA, 20 nt, Artificial Sequence
  Synthetic
  misc_feature (2)..(3): n is a, c, g, or u
annccuccccaugggggacu

SEQ ID NO: 124955 - RNA, 21 nt, Artificial Sequence
  Synthetic
  misc_feature (3)..(4): n is a, c, g, or u
cannccuccccaugggggacu

SEQ ID NO: 124956 - RNA, 22 nt, Artificial Sequence
  Synthetic
  misc_feature (4)..(5): n is a, c, g, or u
ucannccuccccaugggggacu

SEQ ID NO: 124957 - RNA, 23 nt, Artificial Sequence
  Synthetic
  misc_feature (5)..(6): n is a, c, g, or u
uucannccuccccaugggggacu

SEQ ID NO: 124958 - RNA, 24 nt, Artificial Sequence
  Synthetic
  misc_feature (6)..(7): n is a, c, g, or u
guucannccuccccaugggggacu

SEQ ID NO: 124959 - RNA, 18 nt, Artificial Sequence
  Synthetic
uguugguucuucuggacu

SEQ ID NO: 124960 - RNA, 19 nt, Artificial Sequence
  Synthetic
uuguugguucuucuggacu

SEQ ID NO: 124961 - RNA, 20 nt, Artificial Sequence
  Synthetic
cuuguugguucuucuggacu

SEQ ID NO: 124962 - RNA, 21 nt, Artificial Sequence
  Synthetic
ucuuguugguucuucuggacu

SEQ ID NO: 124963 - RNA, 22 nt, Artificial Sequence
  Synthetic
uucuuguugguucuucuggacu

SEQ ID NO: 124964 - RNA, 23 nt, Artificial Sequence
  Synthetic
cuucuuguugguucuucuggacu

SEQ ID NO: 124965 - RNA, 24 nt, Artificial Sequence
  Synthetic
ucuucuuguugguucuucuggacu

SEQ ID NO: 124966 - RNA, 18 nt, Artificial Sequence
  Synthetic
uaagaggacucuuggacu

SEQ ID NO: 124967 - RNA, 19 nt, Artificial Sequence
  Synthetic
auaagaggacucuuggacu

SEQ ID NO: 124968 - RNA, 20 nt, Artificial Sequence
  Synthetic
cauaagaggacucuuggacu

SEQ ID NO: 124969 - RNA, 21 nt, Artificial Sequence
  Synthetic
gcauaagaggacucuuggacu

SEQ ID NO: 124970 - RNA, 22 nt, Artificial Sequence
  Synthetic
ugcauaagaggacucuuggacu

SEQ ID NO: 124971 - RNA, 23 nt, Artificial Sequence
  Synthetic
uugcauaagaggacucuuggacu

SEQ ID NO: 124972 - RNA, 24 nt, Artificial Sequence
  Synthetic
cuugcauaagaggacucuuggacu

SEQ ID NO: 124973 - RNA, 18 nt, Artificial Sequence
  Synthetic
ccucugccgauccauacu

SEQ ID NO: 124974 - RNA, 19 nt, Artificial Sequence
  Synthetic
uccucugccgauccauacu

SEQ ID NO: 124975 - RNA, 20 nt, Artificial Sequence
  Synthetic
cuccucugccgauccauacu

SEQ ID NO: 124976 - RNA, 21 nt, Artificial Sequence
  Synthetic
ucuccucugccgauccauacu

SEQ ID NO: 124977 - RNA, 22 nt, Artificial Sequence
  Synthetic
gucuccucugccgauccauacu

SEQ ID NO: 124978 - RNA, 23 nt, Artificial Sequence
  Synthetic
ugucuccucugccgauccauacu

SEQ ID NO: 124979 - RNA, 24 nt, Artificial Sequence
  Synthetic
gugucuccucugccgauccauacu

SEQ ID NO: 124980 - RNA, 18 nt, Artificial Sequence
  Synthetic
ccgaccuugaggcauacu

SEQ ID NO: 124981 - RNA, 19 nt, Artificial Sequence
  Synthetic
accgaccuugaggcauacu

SEQ ID NO: 124982 - RNA, 20 nt, Artificial Sequence
  Synthetic
gaccgaccuugaggcauacu

SEQ ID NO: 124983 - RNA, 18 nt, Artificial Sequence
  Synthetic
  misc_feature (6)..(6): n is a, c, g, or u
  misc_feature (8)..(8): n is a, c, g, or u
guuaangnucuuuguacu

SEQ ID NO: 124984 - RNA, 19 nt, Artificial Sequence
  Synthetic
  misc_feature (7)..(7): n is a, c, g, or u
  misc_feature (9)..(9): n is a, c, g, or u
gguuaangnucuuuguacu

SEQ ID NO: 124985 - RNA, 20 nt, Artificial Sequence
  Synthetic
  misc_feature (8)..(8): n is a, c, g, or u
  misc_feature (10)..(10): n is a, c, g, or u
agguuaangnucuuuguacu

SEQ ID NO: 124986 - RNA, 21 nt, Artificial Sequence
  Synthetic
  misc_feature (9)..(9): n is a, c, g, or u
  misc_feature (11)..(11): n is a, c, g, or u
uagguuaangnucuuuguacu

SEQ ID NO: 124987 - RNA, 22 nt, Artificial Sequence
  Synthetic
  misc_feature (10)..(10): n is a, c, g, or u
  misc_feature (12)..(12): n is a, c, g, or u
uuagguuaangnucuuuguacu

SEQ ID NO: 124988 - RNA, 23 nt, Artificial Sequence
  Synthetic
  misc_feature (1)..(1): n is a, c, g, or u
  misc_feature (11)..(11): n is a, c, g, or u
  misc_feature (13)..(13): n is a, c, g, or u
nuuagguuaangnucuuuguacu

SEQ ID NO: 124989 - RNA, 24 nt, Artificial Sequence
  Synthetic
  misc_feature (2)..(2): n is a, c, g, or u
  misc_feature (12)..(12): n is a, c, g, or u
  misc_feature (14)..(14): n is a, c, g, or u
gnuuagguuaangnucuuuguacu

SEQ ID NO: 124990 - RNA, 18 nt, Artificial Sequence
  Synthetic
  misc_feature (14)..(14): n is a, c, g, or u
ucaggcucagggcnuacu

SEQ ID NO: 124991 - RNA, 19 nt, Artificial Sequence
  Synthetic
  misc_feature (15)..(15): n is a, c, g, or u
cucaggcucagggcnuacu

SEQ ID NO: 124992 - RNA, 20 nt, Artificial Sequence
  Synthetic
  misc_feature (16)..(16): n is a, c, g, or u
ccucaggcucagggcnuacu

SEQ ID NO: 124993 - RNA, 21 nt, Artificial Sequence
  Synthetic
  misc_feature (17)..(17): n is a, c, g, or u
cccucaggcucagggcnuacu

SEQ ID NO: 124994 - RNA, 22 nt, Artificial Sequence
  Synthetic
  misc_feature (18)..(18): n is a, c, g, or u
gcccucaggcucagggcnuacu

SEQ ID NO: 124995 - RNA, 23 nt, Artificial Sequence
  Synthetic
  misc_feature (19)..(19): n is a, c, g, or u
agcccucaggcucagggcnuacu

SEQ ID NO: 124996 - RNA, 24 nt, Artificial Sequence
  Synthetic
  misc_feature (20)..(20): n is a, c, g, or u
gagcccucaggcucagggcnuacu

SEQ ID NO: 124997 - RNA, 18 nt, Artificial Sequence
  Synthetic
auguaguuaaucauuacu

SEQ ID NO: 124998 - RNA, 19 nt, Artificial Sequence
  Synthetic
  misc_feature (1)..(1): n is a, c, g, or u
nauguaguuaaucauuacu

SEQ ID NO: 124999 - RNA, 20 nt, Artificial Sequence
  Synthetic
  misc_feature (2)..(2): n is a, c, g, or u
gnauguaguuaaucauuacu

SEQ ID NO: 125000 - RNA, 21 nt, Artificial Sequence
  Synthetic
  misc_feature (3)..(3): n is a, c, g, or u
agnauguaguuaaucauuacu

SEQ ID NO: 125001 - RNA, 22 nt, Artificial Sequence
  Synthetic
  misc_feature (4)..(4): n is a, c, g, or u
gagnauguaguuaaucauuacu

SEQ ID NO: 125002 - RNA, 23 nt, Artificial Sequence
  Synthetic
  misc_feature (5)..(5): n is a, c, g, or u
agagnauguaguuaaucauuacu

SEQ ID NO: 125003 - RNA, 24 nt, Artificial Sequence
  Synthetic
  misc_feature (6)..(6): n is a, c, g, or u
cagagnauguaguuaaucauuacu

SEQ ID NO: 125004 - RNA, 18 nt, Artificial Sequence
  Synthetic
cacauuuccugucuuacu

SEQ ID NO: 125005 - RNA, 19 nt, Artificial Sequence
  Synthetic
ucacauuuccugucuuacu

SEQ ID NO: 125006 - RNA, 20 nt, Artificial Sequence
  Synthetic
uucacauuuccugucuuacu

SEQ ID NO: 125007 - RNA, 21 nt, Artificial Sequence
  Synthetic
uuucacauuuccugucuuacu

SEQ ID NO: 125008 - RNA, 22 nt, Artificial Sequence
  Synthetic
guuucacauuuccugucuuacu

SEQ ID NO: 125009 - RNA, 23 nt, Artificial Sequence
  Synthetic
gguuucacauuuccugucuuacu

SEQ ID NO: 125010 - RNA, 24 nt, Artificial Sequence
  Synthetic
ugguuucacauuuccugucuuacu

SEQ ID NO: 125011 - RNA, 18 nt, Artificial Sequence
  Synthetic
uguugcuguacaaaaccu

SEQ ID NO: 125012 - RNA, 19 nt, Artificial Sequence
  Synthetic
auguugcuguacaaaaccu

SEQ ID NO: 125013 - RNA, 20 nt, Artificial Sequence
  Synthetic
cauguugcuguacaaaaccu

SEQ ID NO: 125014 - RNA, 21 nt, Artificial Sequence
  Synthetic
ucauguugcuguacaaaaccu

SEQ ID NO: 125015 - RNA, 22 nt, Artificial Sequence
  Synthetic
cucauguugcuguacaaaaccu

SEQ ID NO: 125016 - RNA, 23 nt, Artificial Sequence
  Synthetic
ccucauguugcuguacaaaaccu

SEQ ID NO: 125017 - RNA, 24 nt, Artificial Sequence
  Synthetic
cccucauguugcuguacaaaaccu

SEQ ID NO: 125018 - RNA, 18 nt, Artificial Sequence
  Synthetic
gguuggucuuccaaaccu

SEQ ID NO: 125019 - RNA, 19 nt, Artificial Sequence
  Synthetic
agguuggucuuccaaaccu

SEQ ID NO: 125020 - RNA, 20 nt, Artificial Sequence
  Synthetic
gagguuggucuuccaaaccu

SEQ ID NO: 125021 - RNA, 21 nt, Artificial Sequence
  Synthetic
ggagguuggucuuccaaaccu

SEQ ID NO: 125022 - RNA, 22 nt, Artificial Sequence
  Synthetic
gggagguuggucuuccaaaccu

SEQ ID NO: 125023 - RNA, 23 nt, Artificial Sequence
  Synthetic
ugggagguuggucuuccaaaccu

SEQ ID NO: 125024 - RNA, 24 nt, Artificial Sequence
  Synthetic
augggagguuggucuuccaaaccu

SEQ ID NO: 125025 - RNA, 18 nt, Artificial Sequence
  Synthetic
  misc_feature (7)..(7): n is a, c, g, or u
  misc_feature (9)..(9): n is a, c, g, or u
acucccnunucuccaccu

SEQ ID NO: 125026 - RNA, 19 nt, Artificial Sequence
  Synthetic
  misc_feature (8)..(8): n is a, c, g, or u
  misc_feature (10)..(10): n is a, c, g, or u
uacucccnunucuccaccu

SEQ ID NO: 125027 - RNA, 20 nt, Artificial Sequence
  Synthetic
  misc_feature (9)..(9): n is a, c, g, or u
  misc_feature (11)..(11): n is a, c, g, or u
cuacucccnunucuccaccu

SEQ ID NO: 125028 - RNA, 21 nt, Artificial Sequence
  Synthetic
  misc_feature (10)..(10): n is a, c, g, or u
  misc_feature (12)..(12): n is a, c, g, or u
ccuacucccnunucuccaccu

SEQ ID NO: 125029 - RNA, 22 nt, Artificial Sequence
  Synthetic
  misc_feature (11)..(11): n is a, c, g, or u
  misc_feature (13)..(13): n is a, c, g, or u
gccuacucccnunucuccaccu

SEQ ID NO: 125030 - RNA, 23 nt, Artificial Sequence
  Synthetic
  misc_feature (12)..(12): n is a, c, g, or u
  misc_feature (14)..(14): n is a, c, g, or u
agccuacucccnunucuccaccu

SEQ ID NO: 125031 - RNA, 24 nt, Artificial Sequence
  Synthetic
  misc_feature (13)..(13): n is a, c, g, or u
  misc_feature (15)..(15): n is a, c, g, or u
cagccuacucccnunucuccaccu

SEQ ID NO: 125032 - RNA, 18 nt, Artificial Sequence
  Synthetic
aaugucaacgaccgaccu

SEQ ID NO: 125033 - RNA, 19 nt, Artificial Sequence
  Synthetic
caaugucaacgaccgaccu

SEQ ID NO: 125034 - RNA, 20 nt, Artificial Sequence
  Synthetic
gcaaugucaacgaccgaccu

SEQ ID NO: 125035 - RNA, 21 nt, Artificial Sequence
  Synthetic
agcaaugucaacgaccgaccu

SEQ ID NO: 125036 - RNA, 22 nt, Artificial Sequence
  Synthetic
cagcaaugucaacgaccgaccu

SEQ ID NO: 125037 - RNA, 23 nt, Artificial Sequence
  Synthetic
ucagcaaugucaacgaccgaccu

SEQ ID NO: 125038 - RNA, 24 nt, Artificial Sequence
  Synthetic
uucagcaaugucaacgaccgaccu

SEQ ID NO: 125039 - RNA, 18 nt, Artificial Sequence
  Synthetic
ggcuuucgcaaaauaccu

SEQ ID NO: 125040 - RNA, 19 nt, Artificial Sequence
  Synthetic
gggcuuucgcaaaauaccu

SEQ ID NO: 125041 - RNA, 20 nt, Artificial Sequence
  Synthetic
ugggcuuucgcaaaauaccu

SEQ ID NO: 125042 - RNA, 21 nt, Artificial Sequence
  Synthetic
uugggcuuucgcaaaauaccu

SEQ ID NO: 125043 - RNA, 22 nt, Artificial Sequence
  Synthetic
cuugggcuuucgcaaaauaccu

SEQ ID NO: 125044 - RNA, 23 nt, Artificial Sequence
  Synthetic
ucuugggcuuucgcaaaauaccu

SEQ ID NO: 125045 - RNA, 24 nt, Artificial Sequence
  Synthetic
aucuugggcuuucgcaaaauaccu

SEQ ID NO: 125046 - RNA, 18 nt, Artificial Sequence
  Synthetic
gguauacauuuaaacccu

SEQ ID NO: 125047 - RNA, 19 nt, Artificial Sequence
  Synthetic
ggguauacauuuaaacccu

SEQ ID NO: 125048 - RNA, 20 nt, Artificial Sequence
  Synthetic
uggguauacauuuaaacccu

SEQ ID NO: 125049 - RNA, 21 nt, Artificial Sequence
  Synthetic
uuggguauacauuuaaacccu

SEQ ID NO: 125050 - RNA, 22 nt, Artificial Sequence
  Synthetic
uuuggguauacauuuaaacccu

SEQ ID NO: 125051 - RNA, 23 nt, Artificial Sequence
  Synthetic
cuuuggguauacauuuaaacccu

SEQ ID NO: 125052 - RNA, 24 nt, Artificial Sequence
  Synthetic
ucuuuggguauacauuuaaacccu

SEQ ID NO: 125053 - RNA, 18 nt, Artificial Sequence
  Synthetic
aucccgcggacgaccccu

SEQ ID NO: 125054 - RNA, 19 nt, Artificial Sequence
  Synthetic
aaucccgcggacgaccccu

SEQ ID NO: 125055 - RNA, 20 nt, Artificial Sequence
  Synthetic
gaaucccgcggacgaccccu

SEQ ID NO: 125056 - RNA, 18 nt, Artificial Sequence
  Synthetic
  misc_feature (4)..(4): n is a, c, g, or u
cgangaggcagguccccu

SEQ ID NO: 125057 - RNA, 19 nt, Artificial Sequence
  Synthetic
  misc_feature (5)..(5): n is a, c, g, or u
acgangaggcagguccccu

SEQ ID NO: 125058 - RNA, 20 nt, Artificial Sequence
  Synthetic
  misc_feature (6)..(6): n is a, c, g, or u
gacgangaggcagguccccu

SEQ ID NO: 125059 - RNA, 21 nt, Artificial Sequence
  Synthetic
  misc_feature (7)..(7): n is a, c, g, or u
agacgangaggcagguccccu

SEQ ID NO: 125060 - RNA, 22 nt, Artificial Sequence
  Synthetic
  misc_feature (8)..(8): n is a, c, g, or u
uagacgangaggcagguccccu

SEQ ID NO: 125061 - RNA, 23 nt, Artificial Sequence
  Synthetic
  misc_feature (9)..(9): n is a, c, g, or u
uuagacgangaggcagguccccu

SEQ ID NO: 125062 - RNA, 24 nt, Artificial Sequence
  Synthetic
  misc_feature (10)..(10): n is a, c, g, or u
guuagacgangaggcagguccccu

SEQ ID NO: 125063 - RNA, 18 nt, Artificial Sequence
  Synthetic
guccuacuguucaagccu

SEQ ID NO: 125064 - RNA, 19 nt, Artificial Sequence
  Synthetic
uguccuacuguucaagccu

SEQ ID NO: 125065 - RNA, 20 nt, Artificial Sequence
  Synthetic
auguccuacuguucaagccu

SEQ ID NO: 125066 - RNA, 21 nt, Artificial Sequence
  Synthetic
cauguccuacuguucaagccu

SEQ ID NO: 125067 - RNA, 22 nt, Artificial Sequence
  Synthetic
ucauguccuacuguucaagccu

SEQ ID NO: 125068 - RNA, 23 nt, Artificial Sequence
  Synthetic
uucauguccuacuguucaagccu

SEQ ID NO: 125069 - RNA, 24 nt, Artificial Sequence
  Synthetic
guucauguccuacuguucaagccu

SEQ ID NO: 125070 - RNA, 18 nt, Artificial Sequence
  Synthetic
agaagaacucccucgccu

SEQ ID NO: 125071 - RNA, 19 nt, Artificial Sequence
  Synthetic
aagaagaacucccucgccu

SEQ ID NO: 125072 - RNA, 20 nt, Artificial Sequence
  Synthetic
gaagaagaacucccucgccu

SEQ ID NO: 125073 - RNA, 21 nt, Artificial Sequence
  Synthetic
agaagaagaacucccucgccu

SEQ ID NO: 125074 - RNA, 22 nt, Artificial Sequence
  Synthetic
uagaagaagaacucccucgccu

SEQ ID NO: 125075 - RNA, 23 nt, Artificial Sequence
  Synthetic
cuagaagaagaacucccucgccu

SEQ ID NO: 125076 - RNA, 24 nt, Artificial Sequence
  Synthetic
ccuagaagaagaacucccucgccu

SEQ ID NO: 125077 - RNA, 18 nt, Artificial Sequence
  Synthetic
cuaaaauuaauuaugccu

SEQ ID NO: 125078 - RNA, 19 nt, Artificial Sequence
  Synthetic
acuaaaauuaauuaugccu

SEQ ID NO: 125079 - RNA, 20 nt, Artificial Sequence
  Synthetic
gacuaaaauuaauuaugccu

SEQ ID NO: 125080 - RNA, 21 nt, Artificial Sequence
  Synthetic
agacuaaaauuaauuaugccu

SEQ ID NO: 125081 - RNA, 22 nt, Artificial Sequence
  Synthetic
gagacuaaaauuaauuaugccu

SEQ ID NO: 125082 - RNA, 23 nt, Artificial Sequence
  Synthetic
ggagacuaaaauuaauuaugccu

SEQ ID NO: 125083 - RNA, 24 nt, Artificial Sequence
  Synthetic
aggagacuaaaauuaauuaugccu

SEQ ID NO: 125084 - RNA, 18 nt, Artificial Sequence
  Synthetic
uuacucucuuuuuugccu

SEQ ID NO: 125085 - RNA, 19 nt, Artificial Sequence
  Synthetic
guuacucucuuuuuugccu

SEQ ID NO: 125086 - RNA, 20 nt, Artificial Sequence
  Synthetic
aguuacucucuuuuuugccu

SEQ ID NO: 125087 - RNA, 21 nt, Artificial Sequence
  Synthetic
gaguuacucucuuuuuugccu

SEQ ID NO: 125088 - RNA, 22 nt, Artificial Sequence
  Synthetic
ggaguuacucucuuuuuugccu

SEQ ID NO: 125089 - RNA, 23 nt, Artificial Sequence
  Synthetic
uggaguuacucucuuuuuugccu

SEQ ID NO: 125090 - RNA, 24 nt, Artificial Sequence
  Synthetic
guggaguuacucucuuuuuugccu

SEQ ID NO: 125091 - RNA, 18 nt, Artificial Sequence
  Synthetic
uguuuuaggaaacuuccu

SEQ ID NO: 125092 - RNA, 19 nt, Artificial Sequence
  Synthetic
  misc_feature (1)..(1): n is a, c, g, or u
nuguuuuaggaaacuuccu

SEQ ID NO: 125093 - RNA, 20 nt, Artificial Sequence
  Synthetic
  misc_feature (1)..(2): n is a, c, g, or u
nnuguuuuaggaaacuuccu

SEQ ID NO: 125094 - RNA, 21 nt, Artificial Sequence
  Synthetic
  misc_feature (1)..(3): n is a, c, g, or u
nnnuguuuuaggaaacuuccu

SEQ ID NO: 125095 - RNA, 22 nt, Artificial Sequence
  Synthetic
  misc_feature (2)..(4): n is a, c, g, or u
annnuguuuuaggaaacuuccu

SEQ ID NO: 125096 - RNA, 23 nt, Artificial Sequence
  Synthetic
  misc_feature (3)..(5): n is a, c, g, or u
aannnuguuuuaggaaacuuccu

SEQ ID NO: 125097 - RNA, 24 nt, Artificial Sequence
  Synthetic
  misc_feature (4)..(6): n is a, c, g, or u
aaannnuguuuuaggaaacuuccu

SEQ ID NO: 125098 - RNA, 18 nt, Artificial Sequence
  Synthetic
accccucccggggccgcu

SEQ ID NO: 125099 - RNA, 19 nt, Artificial Sequence
  Synthetic
gaccccucccggggccgcu

SEQ ID NO: 125100 - RNA, 20 nt, Artificial Sequence
  Synthetic
cgaccccucccggggccgcu

SEQ ID NO: 125101 - RNA, 21 nt, Artificial Sequence
  Synthetic
acgaccccucccggggccgcu

SEQ ID NO: 125102 - RNA, 22 nt, Artificial Sequence
  Synthetic
gacgaccccucccggggccgcu

SEQ ID NO: 125103 - RNA, 23 nt, Artificial Sequence
  Synthetic
ggacgaccccucccggggccgcu

SEQ ID NO: 125104 - RNA, 24 nt, Artificial Sequence
  Synthetic
cggacgaccccucccggggccgcu

SEQ ID NO: 125105 - RNA, 18 nt, Artificial Sequence
  Synthetic
ggguggagcccucaggcu

SEQ ID NO: 125106 - RNA, 19 nt, Artificial Sequence
  Synthetic
gggguggagcccucaggcu

SEQ ID NO: 125107 - RNA, 20 nt, Artificial Sequence
  Synthetic
ugggguggagcccucaggcu

SEQ ID NO: 125108 - RNA, 21 nt, Artificial Sequence
  Synthetic
uugggguggagcccucaggcu

SEQ ID NO: 125109 - RNA, 22 nt, Artificial Sequence
  Synthetic
guugggguggagcccucaggcu

SEQ ID NO: 125110 - RNA, 23 nt, Artificial Sequence
  Synthetic
uguugggguggagcccucaggcu

SEQ ID NO: 125111 - RNA, 24 nt, Artificial Sequence
  Synthetic
cuguugggguggagcccucaggcu

SEQ ID NO: 125112 - RNA, 18 nt, Artificial Sequence
  Synthetic
ucuuuguacuaggaggcu

SEQ ID NO: 125113 - RNA, 19 nt, Artificial Sequence
  Synthetic
  misc_feature (1)..(1): n is a, c, g, or u
nucuuuguacuaggaggcu

SEQ ID NO: 125114 - RNA, 20 nt, Artificial Sequence
  Synthetic
  misc_feature (2)..(2): n is a, c, g, or u
gnucuuuguacuaggaggcu

SEQ ID NO: 125115 - RNA, 21 nt, Artificial Sequence
  Synthetic
  misc_feature (1)..(1): n is a, c, g, or u
  misc_feature (3)..(3): n is a, c, g, or u
ngnucuuuguacuaggaggcu

SEQ ID NO: 125116 - RNA, 22 nt, Artificial Sequence
  Synthetic
  misc_feature (2)..(2): n is a, c, g, or u
  misc_feature (4)..(4): n is a, c, g, or u
angnucuuuguacuaggaggcu

SEQ ID NO: 125117 - RNA, 23 nt, Artificial Sequence
  Synthetic
  misc_feature (3)..(3): n is a, c, g, or u
  misc_feature (5)..(5): n is a, c, g, or u
aangnucuuuguacuaggaggcu

SEQ ID NO: 125118 - RNA, 24 nt, Artificial Sequence
  Synthetic
  misc_feature (4)..(4): n is a, c, g, or u
  misc_feature (6)..(6): n is a, c, g, or u
uaangnucuuuguacuaggaggcu

SEQ ID NO: 125119 - RNA, 18 nt, Artificial Sequence
  Synthetic
  misc_feature (7)..(7): n is a, c, g, or u
uacaucnuuuccauggcu

SEQ ID NO: 125120 - RNA, 19 nt, Artificial Sequence
  Synthetic
  misc_feature (8)..(8): n is a, c, g, or u
auacaucnuuuccauggcu

SEQ ID NO: 125121 - RNA, 20 nt, Artificial Sequence
  Synthetic
  misc_feature (9)..(9): n is a, c, g, or u
uauacaucnuuuccauggcu

SEQ ID NO: 125122 - RNA, 21 nt, Artificial Sequence
  Synthetic
  misc_feature (1)..(1): n is a, c, g, or u
  misc_feature (10)..(10): n is a, c, g, or u
nuauacaucnuuuccauggcu

SEQ ID NO: 125123 - RNA, 22 nt, Artificial Sequence
  Synthetic
  misc_feature (2)..(2): n is a, c, g, or u
  misc_feature (11)..(11): n is a, c, g, or u
anuauacaucnuuuccauggcu

SEQ ID NO: 125124 - RNA, 23 nt, Artificial Sequence
  Synthetic
  misc_feature (3)..(3): n is a, c, g, or u
  misc_feature (12)..(12): n is a, c, g, or u
aanuauacaucnuuuccauggcu

SEQ ID NO: 125125 - RNA, 24 nt, Artificial Sequence
  Synthetic
  misc_feature (4)..(4): n is a, c, g, or u
  misc_feature (13)..(13): n is a, c, g, or u
caanuauacaucnuuuccauggcu

SEQ ID NO: 125126 - RNA, 18 nt, Artificial Sequence
  Synthetic
gcugugccuuggguggcu

SEQ ID NO: 125127 - RNA, 19 nt, Artificial Sequence
  Synthetic
agcugugccuuggguggcu

SEQ ID NO: 125128 - RNA, 20 nt, Artificial Sequence
  Synthetic
aagcugugccuuggguggcu

SEQ ID NO: 125129 - RNA, 21 nt, Artificial Sequence
  Synthetic
caagcugugccuuggguggcu

SEQ ID NO: 125130 - RNA, 22 nt, Artificial Sequence
  Synthetic
ccaagcugugccuuggguggcu

SEQ ID NO: 125131 - RNA, 23 nt, Artificial Sequence
  Synthetic
uccaagcugugccuuggguggcu

SEQ ID NO: 125132 - RNA, 24 nt, Artificial Sequence
  Synthetic
cuccaagcugugccuuggguggcu

SEQ ID NO: 125133 - RNA, 18 nt, Artificial Sequence
  Synthetic
  misc_feature (9)..(9): n is a, c, g, or u
accugcacnacuccugcu

SEQ ID NO: 125134 - RNA, 19 nt, Artificial Sequence
  Synthetic
  misc_feature (10)..(10): n is a, c, g, or u
aaccugcacnacuccugcu

SEQ ID NO: 125135 - RNA, 20 nt, Artificial Sequence
  Synthetic
  misc_feature (11)..(11): n is a, c, g, or u
aaaccugcacnacuccugcu

SEQ ID NO: 125136 - RNA, 21 nt, Artificial Sequence
  Synthetic
  misc_feature (12)..(12): n is a, c, g, or u
aaaaccugcacnacuccugcu

SEQ ID NO: 125137 - RNA, 22 nt, Artificial Sequence
  Synthetic
  misc_feature (13)..(13): n is a, c, g, or u
caaaaccugcacnacuccugcu

SEQ ID NO: 125138 - RNA, 23 nt, Artificial Sequence
  Synthetic
  misc_feature (14)..(14): n is a, c, g, or u
gcaaaaccugcacnacuccugcu

SEQ ID NO: 125139 - RNA, 24 nt, Artificial Sequence
  Synthetic
  misc_feature (15)..(15): n is a, c, g, or u
ugcaaaaccugcacnacuccugcu

SEQ ID NO: 125140 - RNA, 18 nt, Artificial Sequence
  Synthetic
  misc_feature (3)..(3): n is a, c, g, or u
gcncuguacuuuccugcu

SEQ ID NO: 125141 - RNA, 19 nt, Artificial Sequence
  Synthetic
  misc_feature (4)..(4): n is a, c, g, or u
ggcncuguacuuuccugcu

SEQ ID NO: 125142 - RNA, 20 nt, Artificial Sequence
  Synthetic
  misc_feature (5)..(5): n is a, c, g, or u
gggcncuguacuuuccugcu

SEQ ID NO: 125143 - RNA, 21 nt, Artificial Sequence
  Synthetic
  misc_feature (6)..(6): n is a, c, g, or u
agggcncuguacuuuccugcu

SEQ ID NO: 125144 - RNA, 22 nt, Artificial Sequence
  Synthetic
  misc_feature (7)..(7): n is a, c, g, or u
cagggcncuguacuuuccugcu

SEQ ID NO: 125145 - RNA, 23 nt, Artificial Sequence
  Synthetic
  misc_feature (8)..(8): n is a, c, g, or u
ucagggcncuguacuuuccugcu

SEQ ID NO: 125146 - RNA, 24 nt, Artificial Sequence
  Synthetic
  misc_feature (9)..(9): n is a, c, g, or u
gucagggcncuguacuuuccugcu

SEQ ID NO: 125147 - RNA, 18 nt, Artificial Sequence
  Synthetic
uggcugcuaggcugugcu

SEQ ID NO: 125148 - RNA, 19 nt, Artificial Sequence
  Synthetic
auggcugcuaggcugugcu

SEQ ID NO: 125149 - RNA, 20 nt, Artificial Sequence
  Synthetic
cauggcugcuaggcugugcu

SEQ ID NO: 125150 - RNA, 21 nt, Artificial Sequence
  Synthetic
ccauggcugcuaggcugugcu

SEQ ID NO: 125151 - RNA, 22 nt, Artificial Sequence
  Synthetic
uccauggcugcuaggcugugcu

SEQ ID NO: 125152 - RNA, 23 nt, Artificial Sequence
  Synthetic
uuccauggcugcuaggcugugcu

SEQ ID NO: 125153 - RNA, 24 nt, Artificial Sequence
  Synthetic
uuuccauggcugcuaggcugugcu

SEQ ID NO: 125154 - RNA, 18 nt, Artificial Sequence
  Synthetic
cuagccgcuuguuuugcu

SEQ ID NO: 125155 - RNA, 19 nt, Artificial Sequence
  Synthetic
ccuagccgcuuguuuugcu

SEQ ID NO: 125156 - RNA, 20 nt, Artificial Sequence
  Synthetic
uccuagccgcuuguuuugcu

SEQ ID NO: 125157 - RNA, 21 nt, Artificial Sequence
  Synthetic
cuccuagccgcuuguuuugcu

SEQ ID NO: 125158 - RNA, 22 nt, Artificial Sequence
  Synthetic
acuccuagccgcuuguuuugcu

SEQ ID NO: 125159 - RNA, 23 nt, Artificial Sequence
  Synthetic
aacuccuagccgcuuguuuugcu

SEQ ID NO: 125160 - RNA, 24 nt, Artificial Sequence
  Synthetic
gaacuccuagccgcuuguuuugcu

SEQ ID NO: 125161 - RNA, 18 nt, Artificial Sequence
  Synthetic
cgcagaagaucucaaucu

SEQ ID NO: 125162 - RNA, 19 nt, Artificial Sequence
  Synthetic
ucgcagaagaucucaaucu

SEQ ID NO: 125163 - RNA, 20 nt, Artificial Sequence
  Synthetic
gucgcagaagaucucaaucu

SEQ ID NO: 125164 - RNA, 18 nt, Artificial Sequence
  Synthetic
gucugugccuucucaucu

SEQ ID NO: 125165 - RNA, 19 nt, Artificial Sequence
  Synthetic
cgucugugccuucucaucu

SEQ ID NO: 125166 - RNA, 20 nt, Artificial Sequence
  Synthetic
ccgucugugccuucucaucu

SEQ ID NO: 125167 - RNA, 21 nt, Artificial Sequence
  Synthetic
cccgucugugccuucucaucu

SEQ ID NO: 125168 - RNA, 22 nt, Artificial Sequence
  Synthetic
ccccgucugugccuucucaucu

SEQ ID NO: 125169 - RNA, 23 nt, Artificial Sequence
  Synthetic
uccccgucugugccuucucaucu

SEQ ID NO: 125170 - RNA, 24 nt, Artificial Sequence
  Synthetic
cuccccgucugugccuucucaucu

SEQ ID NO: 125171 - RNA, 18 nt, Artificial Sequence
  Synthetic
  misc_feature (4)..(4): n is a, c, g, or u
cacnuuccaccaaacucu

SEQ ID NO: 125172 - RNA, 19 nt, Artificial Sequence
  Synthetic
  misc_feature (5)..(5): n is a, c, g, or u
ccacnuuccaccaaacucu

SEQ ID NO: 125173 - RNA, 20 nt, Artificial Sequence
  Synthetic
  misc_feature (6)..(6): n is a, c, g, or u
accacnuuccaccaaacucu

SEQ ID NO: 125174 - RNA, 21 nt, Artificial Sequence
  Synthetic
  misc_feature (7)..(7): n is a, c, g, or u
caccacnuuccaccaaacucu

SEQ ID NO: 125175 - RNA, 22 nt, Artificial Sequence
  Synthetic
  misc_feature (8)..(8): n is a, c, g, or u
ccaccacnuuccaccaaacucu

SEQ ID NO: 125176 - RNA, 23 nt, Artificial Sequence
  Synthetic
  misc_feature (9)..(9): n is a, c, g, or u
uccaccacnuuccaccaaacucu

SEQ ID NO: 125177 - RNA, 24 nt, Artificial Sequence
  Synthetic
  misc_feature (10)..(10): n is a, c, g, or u
cuccaccacnuuccaccaaacucu

SEQ ID NO: 125178 - RNA, 18 nt, Artificial Sequence
  Synthetic
  misc_feature (13)..(13): n is a, c, g, or u
acauuauuuacanacucu

SEQ ID NO: 125179 - RNA, 19 nt, Artificial Sequence
  Synthetic
  misc_feature (14)..(14): n is a, c, g, or u
gacauuauuuacanacucu

SEQ ID NO: 125180 - RNA, 20 nt, Artificial Sequence
  Synthetic
  misc_feature (1)..(1): n is a, c, g, or u
  misc_feature (15)..(15): n is a, c, g, or u
ngacauuauuuacanacucu

SEQ ID NO: 125181 - RNA, 21 nt, Artificial Sequence
  Synthetic
  misc_feature (1)..(2): n is a, c, g, or u
  misc_feature (16)..(16): n is a, c, g, or u
nngacauuauuuacanacucu

SEQ ID NO: 125182 - RNA, 22 nt, Artificial Sequence
  Synthetic
  misc_feature (2)..(3): n is a, c, g, or u
  misc_feature (17)..(17): n is a, c, g, or u
cnngacauuauuuacanacucu

SEQ ID NO: 125183 - RNA, 23 nt, Artificial Sequence
  Synthetic
  misc_feature (3)..(4): n is a, c, g, or u
  misc_feature (18)..(18): n is a, c, g, or u
acnngacauuauuuacanacucu

SEQ ID NO: 125184 - RNA, 24 nt, Artificial Sequence
  Synthetic
  misc_feature (4)..(5): n is a, c, g, or u
  misc_feature (19)..(19): n is a, c, g, or u
gacnngacauuauuuacanacucu

SEQ ID NO: 125185 - RNA, 18 nt, Artificial Sequence
  Synthetic
cgggaggccuuagagucu

SEQ ID NO: 125186 - RNA, 19 nt, Artificial Sequence
  Synthetic
ucgggaggccuuagagucu

SEQ ID NO: 125187 - RNA, 20 nt, Artificial Sequence
  Synthetic
aucgggaggccuuagagucu

SEQ ID NO: 125188 - RNA, 21 nt, Artificial Sequence
  Synthetic
uaucgggaggccuuagagucu

SEQ ID NO: 125189 - RNA, 22 nt, Artificial Sequence
  Synthetic
guaucgggaggccuuagagucu

SEQ ID NO: 125190 - RNA, 23 nt, Artificial Sequence
  Synthetic
uguaucgggaggccuuagagucu

SEQ ID NO: 125191 - RNA, 24 nt, Artificial Sequence
  Synthetic
cuguaucgggaggccuuagagucu

SEQ ID NO: 125192 - RNA, 18 nt, Artificial Sequence
  Synthetic
ucaacgaauugugggucu

SEQ ID NO: 125193 - RNA, 19 nt, Artificial Sequence
  Synthetic
gucaacgaauugugggucu

SEQ ID NO: 125194 - RNA, 20 nt, Artificial Sequence
  Synthetic
ugucaacgaauugugggucu

SEQ ID NO: 125195 - RNA, 21 nt, Artificial Sequence
  Synthetic
  misc_feature (1)..(1): n is a, c, g, or u
nugucaacgaauugugggucu

SEQ ID NO: 125196 - RNA, 22 nt, Artificial Sequence
  Synthetic
  misc_feature (2)..(2): n is a, c, g, or u
unugucaacgaauugugggucu

SEQ ID NO: 125197 - RNA, 23 nt, Artificial Sequence
  Synthetic
  misc_feature (3)..(3): n is a, c, g, or u
gunugucaacgaauugugggucu

SEQ ID NO: 125198 - RNA, 24 nt, Artificial Sequence
  Synthetic
  misc_feature (4)..(4): n is a, c, g, or u
agunugucaacgaauugugggucu

SEQ ID NO: 125199 - RNA, 18 nt, Artificial Sequence
  Synthetic
agcaugggagguuggucu

SEQ ID NO: 125200 - RNA, 19 nt, Artificial Sequence
  Synthetic
cagcaugggagguuggucu

SEQ ID NO: 125201 - RNA, 20 nt, Artificial Sequence
  Synthetic
acagcaugggagguuggucu

SEQ ID NO: 125202 - RNA, 21 nt, Artificial Sequence
  Synthetic
uacagcaugggagguuggucu

SEQ ID NO: 125203 - RNA, 22 nt, Artificial Sequence
  Synthetic
cuacagcaugggagguuggucu

SEQ ID NO: 125204 - RNA, 23 nt, Artificial Sequence
  Synthetic
  misc_feature (1)..(1): n is a, c, g, or u
ncuacagcaugggagguuggucu

SEQ ID NO: 125205 - RNA, 24 nt, Artificial Sequence
  Synthetic
  misc_feature (2)..(2): n is a, c, g, or u
ancuacagcaugggagguuggucu

SEQ ID NO: 125206 - RNA, 18 nt, Artificial Sequence
  Synthetic
  misc_feature (15)..(15): n is a, c, g, or u
cuugaauauuuggunucu

SEQ ID NO: 125207 - RNA, 19 nt, Artificial Sequence
  Synthetic
  misc_feature (16)..(16): n is a, c, g, or u
ucuugaauauuuggunucu

SEQ ID NO: 125208 - RNA, 20 nt, Artificial Sequence
  Synthetic
  misc_feature (17)..(17): n is a, c, g, or u
uucuugaauauuuggunucu

SEQ ID NO: 125209 - RNA, 21 nt, Artificial Sequence
  Synthetic
  misc_feature (18)..(18): n is a, c, g, or u
guucuugaauauuuggunucu

SEQ ID NO: 125210 - RNA, 22 nt, Artificial Sequence
  Synthetic
  misc_feature (19)..(19): n is a, c, g, or u
uguucuugaauauuuggunucu

SEQ ID NO: 125211 - RNA, 23 nt, Artificial Sequence
  Synthetic
  misc_feature (20)..(20): n is a, c, g, or u
cuguucuugaauauuuggunucu

SEQ ID NO: 125212 - RNA, 24 nt, Artificial Sequence
  Synthetic
  misc_feature (21)..(21): n is a, c, g, or u
acuguucuugaauauuuggunucu

SEQ ID NO: 125213 - RNA, 18 nt, Artificial Sequence
  Synthetic
ugcgggucaccauauucu

SEQ ID NO: 125214 - RNA, 19 nt, Artificial Sequence
  Synthetic
uugcgggucaccauauucu

SEQ ID NO: 125215 - RNA, 20 nt, Artificial Sequence
  Synthetic
uuugcgggucaccauauucu

SEQ ID NO: 125216 - RNA, 21 nt, Artificial Sequence
  Synthetic
uuuugcgggucaccauauucu

SEQ ID NO: 125217 - RNA, 22 nt, Artificial Sequence
  Synthetic
auuuugcgggucaccauauucu

SEQ ID NO: 125218 - RNA, 23 nt, Artificial Sequence
  Synthetic
cauuuugcgggucaccauauucu

SEQ ID NO: 125219 - RNA, 24 nt, Artificial Sequence
  Synthetic
ucauuuugcgggucaccauauucu

SEQ ID NO: 125220 - RNA, 18 nt, Artificial Sequence
  Synthetic
aaagaauuuggagcuucu

SEQ ID NO: 125221 - RNA, 19 nt, Artificial Sequence
  Synthetic
uaaagaauuuggagcuucu

SEQ ID NO: 125222 - RNA, 20 nt, Artificial Sequence
  Synthetic
auaaagaauuuggagcuucu

SEQ ID NO: 125223 - RNA, 21 nt, Artificial Sequence
  Synthetic
uauaaagaauuuggagcuucu

SEQ ID NO: 125224 - RNA, 22 nt, Artificial Sequence
  Synthetic
  misc_feature (1)..(1): n is a, c, g, or u
nuauaaagaauuuggagcuucu

SEQ ID NO: 125225 - RNA, 23 nt, Artificial Sequence
  Synthetic
  misc_feature (2)..(2): n is a, c, g, or u
cnuauaaagaauuuggagcuucu

SEQ ID NO: 125226 - RNA, 24 nt, Artificial Sequence
  Synthetic
  misc_feature (3)..(3): n is a, c, g, or u
ccnuauaaagaauuuggagcuucu

SEQ ID NO: 125227 - RNA, 18 nt, Artificial Sequence
  Synthetic
caucuucuuguugguucu

SEQ ID NO: 125228 - RNA, 19 nt, Artificial Sequence
  Synthetic
ucaucuucuuguugguucu

SEQ ID NO: 125229 - RNA, 20 nt, Artificial Sequence
  Synthetic
cucaucuucuuguugguucu

SEQ ID NO: 125230 - RNA, 21 nt, Artificial Sequence
  Synthetic
ccucaucuucuuguugguucu

SEQ ID NO: 125231 - RNA, 22 nt, Artificial Sequence
  Synthetic
gccucaucuucuuguugguucu

SEQ ID NO: 125232 - RNA, 23 nt, Artificial Sequence
  Synthetic
ugccucaucuucuuguugguucu

SEQ ID NO: 125233 - RNA, 24 nt, Artificial Sequence
  Synthetic
augccucaucuucuuguugguucu

SEQ ID NO: 125234 - RNA, 18 nt, Artificial Sequence
  Synthetic
gggccucaguccguuucu

SEQ ID NO: 125235 - RNA, 19 nt, Artificial Sequence
  Synthetic
ugggccucaguccguuucu

SEQ ID NO: 125236 - RNA, 20 nt, Artificial Sequence
  Synthetic
gugggccucaguccguuucu

SEQ ID NO: 125237 - RNA, 21 nt, Artificial Sequence
  Synthetic
agugggccucaguccguuucu

SEQ ID NO: 125238 - RNA, 22 nt, Artificial Sequence
  Synthetic
gagugggccucaguccguuucu

SEQ ID NO: 125239 - RNA, 23 nt, Artificial Sequence
  Synthetic
ggagugggccucaguccguuucu

SEQ ID NO: 125240 - RNA, 24 nt, Artificial Sequence
  Synthetic
gggagugggccucaguccguuucu

SEQ ID NO: 125241 - RNA, 18 nt, Artificial Sequence
  Synthetic
gacuucucucaauuuucu

SEQ ID NO: 125242 - RNA, 19 nt, Artificial Sequence
  Synthetic
ggacuucucucaauuuucu

SEQ ID NO: 125243 - RNA, 20 nt, Artificial Sequence
  Synthetic
uggacuucucucaauuuucu

SEQ ID NO: 125244 - RNA, 21 nt, Artificial Sequence
  Synthetic
guggacuucucucaauuuucu

SEQ ID NO: 125245 - RNA, 22 nt, Artificial Sequence
  Synthetic
gguggacuucucucaauuuucu

SEQ ID NO: 125246 - RNA, 23 nt, Artificial Sequence
  Synthetic
ugguggacuucucucaauuuucu

SEQ ID NO: 125247 - RNA, 24 nt, Artificial Sequence
  Synthetic
gugguggacuucucucaauuuucu

SEQ ID NO: 125248 - RNA, 18 nt, Artificial Sequence
  Synthetic
ccugcugguggcuccagu

SEQ ID NO: 125249 - RNA, 19 nt, Artificial Sequence
  Synthetic
uccugcugguggcuccagu

SEQ ID NO: 125250 - RNA, 20 nt, Artificial Sequence
  Synthetic
uuccugcugguggcuccagu

SEQ ID NO: 125251 - RNA, 21 nt, Artificial Sequence
  Synthetic
uuuccugcugguggcuccagu

SEQ ID NO: 125252 - RNA, 22 nt, Artificial Sequence
  Synthetic
cuuuccugcugguggcuccagu

SEQ ID NO: 125253 - RNA, 23 nt, Artificial Sequence
  Synthetic
acuuuccugcugguggcuccagu

SEQ ID NO: 125254 - RNA, 24 nt, Artificial Sequence
  Synthetic
uacuuuccugcugguggcuccagu

SEQ ID NO: 125255 - RNA, 18 nt, Artificial Sequence
  Synthetic
uuggccaaaauucgcagu

SEQ ID NO: 125256 - RNA, 19 nt, Artificial Sequence
  Synthetic
cuuggccaaaauucgcagu

SEQ ID NO: 125257 - RNA, 20 nt, Artificial Sequence
  Synthetic
ucuuggccaaaauucgcagu

SEQ ID NO: 125258 - RNA, 21 nt, Artificial Sequence
  Synthetic
gucuuggccaaaauucgcagu

SEQ ID NO: 125259 - RNA, 22 nt, Artificial Sequence
  Synthetic
ugucuuggccaaaauucgcagu

SEQ ID NO: 125260 - RNA, 23 nt, Artificial Sequence
  Synthetic
gugucuuggccaaaauucgcagu

SEQ ID NO: 125261 - RNA, 24 nt, Artificial Sequence
  Synthetic
ugugucuuggccaaaauucgcagu

SEQ ID NO: 125262 - RNA, 18 nt, Artificial Sequence
  Synthetic
ccuccaccaaucggcagu

SEQ ID NO: 125263 - RNA, 19 nt, Artificial Sequence
  Synthetic
gccuccaccaaucggcagu

SEQ ID NO: 125264 - RNA, 20 nt, Artificial Sequence
  Synthetic
ugccuccaccaaucggcagu

SEQ ID NO: 125265 - RNA, 21 nt, Artificial Sequence
  Synthetic
cugccuccaccaaucggcagu

SEQ ID NO: 125266 - RNA, 22 nt, Artificial Sequence
  Synthetic
ccugccuccaccaaucggcagu

SEQ ID NO: 125267 - RNA, 23 nt, Artificial Sequence
  Synthetic
uccugccuccaccaaucggcagu

SEQ ID NO: 125268 - RNA, 24 nt, Artificial Sequence
  Synthetic
cuccugccuccaccaaucggcagu

SEQ ID NO: 125269 - RNA, 18 nt, Artificial Sequence
  Synthetic
cucacaauaccacagagu

SEQ ID NO: 125270 - RNA, 19 nt, Artificial Sequence
  Synthetic
ccucacaauaccacagagu

SEQ ID NO: 125271 - RNA, 20 nt, Artificial Sequence
  Synthetic
uccucacaauaccacagagu

SEQ ID NO: 125272 - RNA, 21 nt, Artificial Sequence
  Synthetic
auccucacaauaccacagagu

SEQ ID NO: 125273 - RNA, 22 nt, Artificial Sequence
  Synthetic
aauccucacaauaccacagagu

SEQ ID NO: 125274 - RNA, 23 nt, Artificial Sequence
  Synthetic
aaauccucacaauaccacagagu

SEQ ID NO: 125275 - RNA, 24 nt, Artificial Sequence
  Synthetic
aaaauccucacaauaccacagagu

SEQ ID NO: 125276 - RNA, 18 nt, Artificial Sequence
  Synthetic
ucuucaagaucccagagu

SEQ ID NO: 125277 - RNA, 19 nt, Artificial Sequence
  Synthetic
cucuucaagaucccagagu

SEQ ID NO: 125278 - RNA, 20 nt, Artificial Sequence
  Synthetic
acucuucaagaucccagagu

SEQ ID NO: 125279 - RNA, 21 nt, Artificial Sequence
  Synthetic
aacucuucaagaucccagagu

SEQ ID NO: 125280 - RNA, 22 nt, Artificial Sequence
  Synthetic
aaacucuucaagaucccagagu

SEQ ID NO: 125281 - RNA, 23 nt, Artificial Sequence
  Synthetic
caaacucuucaagaucccagagu

SEQ ID NO: 125282 - RNA, 24 nt, Artificial Sequence
  Synthetic
ccaaacucuucaagaucccagagu

SEQ ID NO: 125283 - RNA, 18 nt, Artificial Sequence
  Synthetic
  misc_feature (4)..(4): n is a, c, g, or u
uuanugagugggaggagu

SEQ ID NO: 125284 - RNA, 19 nt, Artificial Sequence
  Synthetic
  misc_feature (5)..(5): n is a, c, g, or u
uuuanugagugggaggagu

SEQ ID NO: 125285 - RNA, 20 nt, Artificial Sequence
  Synthetic
  misc_feature (6)..(6): n is a, c, g, or u
guuuanugagugggaggagu

SEQ ID NO: 125286 - RNA, 21 nt, Artificial Sequence
  Synthetic
  misc_feature (7)..(7): n is a, c, g, or u
uguuuanugagugggaggagu

SEQ ID NO: 125287 - RNA, 22 nt, Artificial Sequence
  Synthetic
  misc_feature (8)..(8): n is a, c, g, or u
guguuuanugagugggaggagu

SEQ ID NO: 125288 - RNA, 23 nt, Artificial Sequence
  Synthetic
  misc_feature (9)..(9): n is a, c, g, or u
uguguuuanugagugggaggagu

SEQ ID NO: 125289 - RNA, 24 nt, Artificial Sequence
  Synthetic
  misc_feature (10)..(10): n is a, c, g, or u
guguguuuanugagugggaggagu

SEQ ID NO: 125290 - RNA, 18 nt, Artificial Sequence
  Synthetic
cgccaacaaggugggagu

SEQ ID NO: 125291 - RNA, 19 nt, Artificial Sequence
  Synthetic
acgccaacaaggugggagu

SEQ ID NO: 125292 - RNA, 20 nt, Artificial Sequence
  Synthetic
gacgccaacaaggugggagu

SEQ ID NO: 125293 - RNA, 21 nt, Artificial Sequence
  Synthetic
ggacgccaacaaggugggagu

SEQ ID NO: 125294 - RNA, 22 nt, Artificial Sequence
  Synthetic
cggacgccaacaaggugggagu

SEQ ID NO: 125295 - RNA, 23 nt, Artificial Sequence
  Synthetic
ccggacgccaacaaggugggagu

SEQ ID NO: 125296 - RNA, 24 nt, Artificial Sequence
  Synthetic
gccggacgccaacaaggugggagu

SEQ ID NO: 125297 - RNA, 18 nt, Artificial Sequence
  Synthetic
  misc_feature (13)..(13): n is a, c, g, or u
acuguguguuuanugagu

SEQ ID NO: 125298 - RNA, 19 nt, Artificial Sequence
  Synthetic
  misc_feature (14)..(14): n is a, c, g, or u
gacuguguguuuanugagu

SEQ ID NO: 125299 - RNA, 20 nt, Artificial Sequence
  Synthetic
  misc_feature (15)..(15): n is a, c, g, or u
agacuguguguuuanugagu

SEQ ID NO: 125300 - RNA, 21 nt, Artificial Sequence
  Synthetic
  misc_feature (16)..(16): n is a, c, g, or u
aagacuguguguuuanugagu

SEQ ID NO: 125301 - RNA, 22 nt, Artificial Sequence
  Synthetic
  misc_feature (17)..(17): n is a, c, g, or u
aaagacuguguguuuanugagu

SEQ ID NO: 125302 - RNA, 23 nt, Artificial Sequence
  Synthetic
  misc_feature (18)..(18): n is a, c, g, or u
caaagacuguguguuuanugagu

SEQ ID NO: 125303 - RNA, 24 nt, Artificial Sequence
  Synthetic
  misc_feature (19)..(19): n is a, c, g, or u
ucaaagacuguguguuuanugagu

SEQ ID NO: 125304 - RNA, 18 nt, Artificial Sequence
  Synthetic
aggucucaaucgccgcgu

SEQ ID NO: 125305 - RNA, 19 nt, Artificial Sequence
  Synthetic
aaggucucaaucgccgcgu

SEQ ID NO: 125306 - RNA, 20 nt, Artificial Sequence
  Synthetic
gaaggucucaaucgccgcgu

SEQ ID NO: 125307 - RNA, 18 nt, Artificial Sequence
  Synthetic
cacagagucuagacucgu

SEQ ID NO: 125308 - RNA, 19 nt, Artificial Sequence
  Synthetic
ccacagagucuagacucgu

SEQ ID NO: 125309 - RNA, 20 nt, Artificial Sequence
  Synthetic
accacagagucuagacucgu

SEQ ID NO: 125310 - RNA, 21 nt, Artificial Sequence
  Synthetic
uaccacagagucuagacucgu

SEQ ID NO: 125311 - RNA, 22 nt, Artificial Sequence
  Synthetic
auaccacagagucuagacucgu

SEQ ID NO: 125312 - RNA, 23 nt, Artificial Sequence
  Synthetic
aauaccacagagucuagacucgu

SEQ ID NO: 125313 - RNA, 24 nt, Artificial Sequence
  Synthetic
caauaccacagagucuagacucgu

SEQ ID NO: 125314 - RNA, 18 nt, Artificial Sequence
  Synthetic
  misc_feature (10)..(10): n is a, c, g, or u
uccuuggacncauaaggu

SEQ ID NO: 125315 - RNA, 19 nt, Artificial Sequence
  Synthetic
  misc_feature (11)..(11): n is a, c, g, or u
uuccuuggacncauaaggu

SEQ ID NO: 125316 - RNA, 20 nt, Artificial Sequence
  Synthetic
  misc_feature (12)..(12): n is a, c, g, or u
auuccuuggacncauaaggu

SEQ ID NO: 125317 - RNA, 21 nt, Artificial Sequence
  Synthetic
  misc_feature (13)..(13): n is a, c, g, or u
uauuccuuggacncauaaggu

SEQ ID NO: 125318 - RNA, 22 nt, Artificial Sequence
  Synthetic
  misc_feature (14)..(14): n is a, c, g, or u
guauuccuuggacncauaaggu

SEQ ID NO: 125319 - RNA, 23 nt, Artificial Sequence
  Synthetic
  misc_feature (15)..(15): n is a, c, g, or u
aguauuccuuggacncauaaggu

SEQ ID NO: 125320 - RNA, 24 nt, Artificial Sequence
  Synthetic
  misc_feature (16)..(16): n is a, c, g, or u
uaguauuccuuggacncauaaggu

SEQ ID NO: 125321 - RNA, 18 nt, Artificial Sequence
  Synthetic
gaaucuagccaccugggu

SEQ ID NO: 125322 - RNA, 19 nt, Artificial Sequence
  Synthetic
ugaaucuagccaccugggu

SEQ ID NO: 125323 - RNA, 20 nt, Artificial Sequence
  Synthetic
augaaucuagccaccugggu

SEQ ID NO: 125324 - RNA, 21 nt, Artificial Sequence
  Synthetic
  misc_feature (1)..(1): n is a, c, g, or u
naugaaucuagccaccugggu

SEQ ID NO: 125325 - RNA, 22 nt, Artificial Sequence
  Synthetic
  misc_feature (2)..(2): n is a, c, g, or u
unaugaaucuagccaccugggu

SEQ ID NO: 125326 - RNA, 23 nt, Artificial Sequence
  Synthetic
  misc_feature (3)..(3): n is a, c, g, or u
uunaugaaucuagccaccugggu

SEQ ID NO: 125327 - RNA, 24 nt, Artificial Sequence
  Synthetic
  misc_feature (4)..(4): n is a, c, g, or u
guunaugaaucuagccaccugggu

SEQ ID NO: 125328 - RNA, 18 nt, Artificial Sequence
  Synthetic
gacgcaacccccacuggu

SEQ ID NO: 125329 - RNA, 19 nt, Artificial Sequence
  Synthetic
ugacgcaacccccacuggu

SEQ ID NO: 125330 - RNA, 20 nt, Artificial Sequence
  Synthetic
cugacgcaacccccacuggu

SEQ ID NO: 125331 - RNA, 18 nt, Artificial Sequence
  Synthetic
uuauauggaugauguggu

SEQ ID NO: 125332 - RNA, 19 nt, Artificial Sequence
  Synthetic
guuauauggaugauguggu

SEQ ID NO: 125333 - RNA, 20 nt, Artificial Sequence
  Synthetic
aguuauauggaugauguggu

SEQ ID NO: 125334 - RNA, 21 nt, Artificial Sequence
  Synthetic
caguuauauggaugauguggu

SEQ ID NO: 125335 - RNA, 22 nt, Artificial Sequence
  Synthetic
ucaguuauauggaugauguggu

SEQ ID NO: 125336 - RNA, 23 nt, Artificial Sequence
  Synthetic
uucaguuauauggaugauguggu

SEQ ID NO: 125337 - RNA, 24 nt, Artificial Sequence
  Synthetic
uuucaguuauauggaugauguggu

SEQ ID NO: 125338 - RNA, 18 nt, Artificial Sequence
  Synthetic
  misc_feature (15)..(16): n is a, c, g, or u
ggauauguaauuggnngu

SEQ ID NO: 125339 - RNA, 19 nt, Artificial Sequence
  Synthetic
  misc_feature (16)..(17): n is a, c, g, or u
gggauauguaauuggnngu

SEQ ID NO: 125340 - RNA, 20 nt, Artificial Sequence
  Synthetic
  misc_feature (17)..(18): n is a, c, g, or u
ugggauauguaauuggnngu

SEQ ID NO: 125341 - RNA, 21 nt, Artificial Sequence
  Synthetic
  misc_feature (18)..(19): n is a, c, g, or u
augggauauguaauuggnngu

SEQ ID NO: 125342 - RNA, 22 nt, Artificial Sequence
  Synthetic
  misc_feature (19)..(20): n is a, c, g, or u
caugggauauguaauuggnngu

SEQ ID NO: 125343 - RNA, 23 nt, Artificial Sequence
  Synthetic
  misc_feature (20)..(21): n is a, c, g, or u
ucaugggauauguaauuggnngu

SEQ ID NO: 125344 - RNA, 24 nt, Artificial Sequence
  Synthetic
  misc_feature (21)..(22): n is a, c, g, or u
uucaugggauauguaauuggnngu

SEQ ID NO: 125345 - RNA, 18 nt, Artificial Sequence
  Synthetic
  misc_feature (11)..(11): n is a, c, g, or u
  misc_feature (15)..(16): n is a, c, g, or u
cgcuucuccgncugnngu

SEQ ID NO: 125346 - RNA, 19 nt, Artificial Sequence
  Synthetic
  misc_feature (12)..(12): n is a, c, g, or u
  misc_feature (16)..(17): n is a, c, g, or u
ccgcuucuccgncugnngu

SEQ ID NO: 125347 - RNA, 20 nt, Artificial Sequence
  Synthetic
  misc_feature (13)..(13): n is a, c, g, or u
  misc_feature (17)..(18): n is a, c, g, or u
cccgcuucuccgncugnngu

SEQ ID NO: 125348 - RNA, 21 nt, Artificial Sequence
  Synthetic
  misc_feature (14)..(14): n is a, c, g, or u
  misc_feature (18)..(19): n is a, c, g, or u
gcccgcuucuccgncugnngu

SEQ ID NO: 125349 - RNA, 22 nt, Artificial Sequence
  Synthetic
  misc_feature (15)..(15): n is a, c, g, or u
  misc_feature (19)..(20): n is a, c, g, or u
cgcccgcuucuccgncugnngu

SEQ ID NO: 125350 - RNA, 23 nt, Artificial Sequence
  Synthetic
  misc_feature (16)..(16): n is a, c, g, or u
  misc_feature (20)..(21): n is a, c, g, or u
ccgcccgcuucuccgncugnngu

SEQ ID NO: 125351 - RNA, 24 nt, Artificial Sequence
  Synthetic
  misc_feature (17)..(17): n is a, c, g, or u
  misc_feature (21)..(22): n is a, c, g, or u
accgcccgcuucuccgncugnngu

SEQ ID NO: 125352 - RNA, 18 nt, Artificial Sequence
  Synthetic
  misc_feature (5)..(5): n is a, c, g, or u
gggcnuacucacaacugu

SEQ ID NO: 125353 - RNA, 19 nt, Artificial Sequence
  Synthetic
  misc_feature (6)..(6): n is a, c, g, or u
agggcnuacucacaacugu

SEQ ID NO: 125354 - RNA, 20 nt, Artificial Sequence
  Synthetic
  misc_feature (7)..(7): n is a, c, g, or u
cagggcnuacucacaacugu

SEQ ID NO: 125355 - RNA, 21 nt, Artificial Sequence
  Synthetic
  misc_feature (8)..(8): n is a, c, g, or u
ucagggcnuacucacaacugu

SEQ ID NO: 125356 - RNA, 22 nt, Artificial Sequence
  Synthetic
  misc_feature (9)..(9): n is a, c, g, or u
cucagggcnuacucacaacugu

SEQ ID NO: 125357 - RNA, 23 nt, Artificial Sequence
  Synthetic
  misc_feature (10)..(10): n is a, c, g, or u
gcucagggcnuacucacaacugu

SEQ ID NO: 125358 - RNA, 24 nt, Artificial Sequence
  Synthetic
  misc_feature (11)..(11): n is a, c, g, or u
ggcucagggcnuacucacaacugu

SEQ ID NO: 125359 - RNA, 18 nt, Artificial Sequence
  Synthetic
  misc_feature (1)..(1): n is a, c, g, or u
nuguucauguccuacugu

SEQ ID NO: 125360 - RNA, 19 nt, Artificial Sequence
  Synthetic
  misc_feature (2)..(2): n is a, c, g, or u
cnuguucauguccuacugu

SEQ ID NO: 125361 - RNA, 20 nt, Artificial Sequence
  Synthetic
  misc_feature (3)..(3): n is a, c, g, or u
ucnuguucauguccuacugu

SEQ ID NO: 125362 - RNA, 21 nt, Artificial Sequence
  Synthetic
  misc_feature (4)..(4): n is a, c, g, or u
cucnuguucauguccuacugu

SEQ ID NO: 125363 - RNA, 22 nt, Artificial Sequence
  Synthetic
  misc_feature (5)..(5): n is a, c, g, or u
ucucnuguucauguccuacugu

SEQ ID NO: 125364 - RNA, 23 nt, Artificial Sequence
  Synthetic
  misc_feature (6)..(6): n is a, c, g, or u
aucucnuguucauguccuacugu

SEQ ID NO: 125365 - RNA, 24 nt, Artificial Sequence
  Synthetic
  misc_feature (7)..(7): n is a, c, g, or u
caucucnuguucauguccuacugu

SEQ ID NO: 125366 - RNA, 18 nt, Artificial Sequence
  Synthetic
gaagacuggggacccugu

SEQ ID NO: 125367 - RNA, 19 nt, Artificial Sequence
  Synthetic
cgaagacuggggacccugu

SEQ ID NO: 125368 - RNA, 20 nt, Artificial Sequence
  Synthetic
ucgaagacuggggacccugu

SEQ ID NO: 125369 - RNA, 21 nt, Artificial Sequence
  Synthetic
aucgaagacuggggacccugu

SEQ ID NO: 125370 - RNA, 22 nt, Artificial Sequence
  Synthetic
uaucgaagacuggggacccugu

SEQ ID NO: 125371 - RNA, 23 nt, Artificial Sequence
  Synthetic
uuaucgaagacuggggacccugu

SEQ ID NO: 125372 - RNA, 24 nt, Artificial Sequence
  Synthetic
cuuaucgaagacuggggacccugu

SEQ ID NO: 125373 - RNA, 18 nt, Artificial Sequence
  Synthetic
uuucccucauguugcugu

SEQ ID NO: 125374 - RNA, 19 nt, Artificial Sequence
  Synthetic
guuucccucauguugcugu

SEQ ID NO: 125375 - RNA, 20 nt, Artificial Sequence
  Synthetic
uguuucccucauguugcugu

SEQ ID NO: 125376 - RNA, 21 nt, Artificial Sequence
  Synthetic
auguuucccucauguugcugu

SEQ ID NO: 125377 - RNA, 22 nt, Artificial Sequence
  Synthetic
uauguuucccucauguugcugu

SEQ ID NO: 125378 - RNA, 23 nt, Artificial Sequence
  Synthetic
cuauguuucccucauguugcugu

SEQ ID NO: 125379 - RNA, 24 nt, Artificial Sequence
  Synthetic
ucuauguuucccucauguugcugu

SEQ ID NO: 125380 - RNA, 18 nt, Artificial Sequence
  Synthetic
acaccgccucugcucugu

SEQ ID NO: 125381 - RNA, 19 nt, Artificial Sequence
  Synthetic
gacaccgccucugcucugu

SEQ ID NO: 125382 - RNA, 20 nt, Artificial Sequence
  Synthetic
cgacaccgccucugcucugu

SEQ ID NO: 125383 - RNA, 21 nt, Artificial Sequence
  Synthetic
ucgacaccgccucugcucugu

SEQ ID NO: 125384 - RNA, 22 nt, Artificial Sequence
  Synthetic
cucgacaccgccucugcucugu

SEQ ID NO: 125385 - RNA, 23 nt, Artificial Sequence
  Synthetic
  misc_feature (1)..(1): n is a, c, g, or u
ncucgacaccgccucugcucugu

SEQ ID NO: 125386 - RNA, 24 nt, Artificial Sequence
  Synthetic
  misc_feature (2)..(2): n is a, c, g, or u
uncucgacaccgccucugcucugu

SEQ ID NO: 125387 - RNA, 18 nt, Artificial Sequence
  Synthetic
  misc_feature (9)..(9): n is a, c, g, or u
ggcaacggncuggucugu

SEQ ID NO: 125388 - RNA, 19 nt, Artificial Sequence
  Synthetic
  misc_feature (10)..(10): n is a, c, g, or u
cggcaacggncuggucugu

SEQ ID NO: 125389 - RNA, 20 nt, Artificial Sequence
  Synthetic
  misc_feature (11)..(11): n is a, c, g, or u
ucggcaacggncuggucugu

SEQ ID NO: 125390 - RNA, 21 nt, Artificial Sequence
  Synthetic
  misc_feature (12)..(12): n is a, c, g, or u
cucggcaacggncuggucugu

SEQ ID NO: 125391 - RNA, 22 nt, Artificial Sequence
  Synthetic
  misc_feature (13)..(13): n is a, c, g, or u
gcucggcaacggncuggucugu

SEQ ID NO: 125392 - RNA, 23 nt, Artificial Sequence
  Synthetic
  misc_feature (14)..(14): n is a, c, g, or u
ugcucggcaacggncuggucugu

SEQ ID NO: 125393 - RNA, 24 nt, Artificial Sequence
  Synthetic
  misc_feature (15)..(15): n is a, c, g, or u
uugcucggcaacggncuggucugu

SEQ ID NO: 125394 - RNA, 18 nt, Artificial Sequence
  Synthetic
ucaggcaagcuauucugu

SEQ ID NO: 125395 - RNA, 19 nt, Artificial Sequence
  Synthetic
cucaggcaagcuauucugu

SEQ ID NO: 125396 - RNA, 20 nt, Artificial Sequence
  Synthetic
acucaggcaagcuauucugu

SEQ ID NO: 125397 - RNA, 21 nt, Artificial Sequence
  Synthetic
cacucaggcaagcuauucugu

SEQ ID NO: 125398 - RNA, 22 nt, Artificial Sequence
  Synthetic
gcacucaggcaagcuauucugu

SEQ ID NO: 125399 - RNA, 23 nt, Artificial Sequence
  Synthetic
ggcacucaggcaagcuauucugu

SEQ ID NO: 125400 - RNA, 24 nt, Artificial Sequence
  Synthetic
cggcacucaggcaagcuauucugu

SEQ ID NO: 125401 - RNA, 18 nt, Artificial Sequence
  Synthetic
uaggaccccugcucgugu

SEQ ID NO: 125402 - RNA, 19 nt, Artificial Sequence
  Synthetic
cuaggaccccugcucgugu

SEQ ID NO: 125403 - RNA, 20 nt, Artificial Sequence
  Synthetic
ccuaggaccccugcucgugu

SEQ ID NO: 125404 - RNA, 21 nt, Artificial Sequence
  Synthetic
uccuaggaccccugcucgugu

SEQ ID NO: 125405 - RNA, 22 nt, Artificial Sequence
  Synthetic
cuccuaggaccccugcucgugu

SEQ ID NO: 125406 - RNA, 23 nt, Artificial Sequence
  Synthetic
acuccuaggaccccugcucgugu

SEQ ID NO: 125407 - RNA, 24 nt, Artificial Sequence
  Synthetic
gacuccuaggaccccugcucgugu

SEQ ID NO: 125408 - RNA, 18 nt, Artificial Sequence
  Synthetic
  misc_feature (5)..(5): n is a, c, g, or u
ggggnaacacccgugugu

SEQ ID NO: 125409 - RNA, 19 nt, Artificial Sequence
  Synthetic
  misc_feature (6)..(6): n is a, c, g, or u
aggggnaacacccgugugu

SEQ ID NO: 125410 - RNA, 20 nt, Artificial Sequence
  Synthetic
  misc_feature (7)..(7): n is a, c, g, or u
uaggggnaacacccgugugu

SEQ ID NO: 125411 - RNA, 21 nt, Artificial Sequence
  Synthetic
  misc_feature (8)..(8): n is a, c, g, or u
cuaggggnaacacccgugugu

SEQ ID NO: 125412 - RNA, 22 nt, Artificial Sequence
  Synthetic
  misc_feature (9)..(9): n is a, c, g, or u
ucuaggggnaacacccgugugu

SEQ ID NO: 125413 - RNA, 23 nt, Artificial Sequence
  Synthetic
  misc_feature (10)..(10): n is a, c, g, or u
uucuaggggnaacacccgugugu

SEQ ID NO: 125414 - RNA, 24 nt, Artificial Sequence
  Synthetic
  misc_feature (11)..(11): n is a, c, g, or u
uuucuaggggnaacacccgugugu

SEQ ID NO: 125415 - RNA, 18 nt, Artificial Sequence
  Synthetic
  misc_feature (13)..(15): n is a, c, g, or u
caaaaaaucaaannnugu

SEQ ID NO: 125416 - RNA, 19 nt, Artificial Sequence
  Synthetic
  misc_feature (1)..(1): n is a, c, g, or u
  misc_feature (14)..(16): n is a, c, g, or u
ncaaaaaaucaaannnugu

SEQ ID NO: 125417 - RNA, 20 nt, Artificial Sequence
  Synthetic
  misc_feature (2)..(2): n is a, c, g, or u
  misc_feature (15)..(17): n is a, c, g, or u
uncaaaaaaucaaannnugu

SEQ ID NO: 125418 - RNA, 21 nt, Artificial Sequence
  Synthetic
  misc_feature (3)..(3): n is a, c, g, or u
  misc_feature (16)..(18): n is a, c, g, or u
guncaaaaaaucaaannnugu

SEQ ID NO: 125419 - RNA, 22 nt, Artificial Sequence
  Synthetic
  misc_feature (4)..(4): n is a, c, g, or u
  misc_feature (17)..(19): n is a, c, g, or u
uguncaaaaaaucaaannnugu

SEQ ID NO: 125420 - RNA, 23 nt, Artificial Sequence
  Synthetic
  misc_feature (5)..(5): n is a, c, g, or u
  misc_feature (18)..(20): n is a, c, g, or u
uuguncaaaaaaucaaannnugu

SEQ ID NO: 125421 - RNA, 24 nt, Artificial Sequence
  Synthetic
  misc_feature (6)..(6): n is a, c, g, or u
  misc_feature (19)..(21): n is a, c, g, or u
auuguncaaaaaaucaaannnugu

SEQ ID NO: 125422 - RNA, 18 nt, Artificial Sequence
  Synthetic
  misc_feature (4)..(4): n is a, c, g, or u
  misc_feature (7)..(7): n is a, c, g, or u
gccncangaacauauugu

SEQ ID NO: 125423 - RNA, 19 nt, Artificial Sequence
  Synthetic
  misc_feature (5)..(5): n is a, c, g, or u
  misc_feature (8)..(8): n is a, c, g, or u
ugccncangaacauauugu

SEQ ID NO: 125424 - RNA, 20 nt, Artificial Sequence
  Synthetic
  misc_feature (6)..(6): n is a, c, g, or u
  misc_feature (9)..(9): n is a, c, g, or u
uugccncangaacauauugu

SEQ ID NO: 125425 - RNA, 21 nt, Artificial Sequence
  Synthetic
  misc_feature (1)..(1): n is a, c, g, or u
  misc_feature (7)..(7): n is a, c, g, or u
  misc_feature (10)..(10): n is a, c, g, or u
nuugccncangaacauauugu

SEQ ID NO: 125426 - RNA, 22 nt, Artificial Sequence
  Synthetic
  misc_feature (2)..(2): n is a, c, g, or u
  misc_feature (8)..(8): n is a, c, g, or u
  misc_feature (11)..(11): n is a, c, g, or u
cnuugccncangaacauauugu

SEQ ID NO: 125427 - RNA, 23 nt, Artificial Sequence
  Synthetic
  misc_feature (3)..(3): n is a, c, g, or u
  misc_feature (9)..(9): n is a, c, g, or u
  misc_feature (12)..(12): n is a, c, g, or u
acnuugccncangaacauauugu

SEQ ID NO: 125428 - RNA, 24 nt, Artificial Sequence
  Synthetic
  misc_feature (4)..(4): n is a, c, g, or u
  misc_feature (10)..(10): n is a, c, g, or u
  misc_feature (13)..(13): n is a, c, g, or u
cacnuugccncangaacauauugu

SEQ ID NO: 125429 - RNA, 18 nt, Artificial Sequence
  Synthetic
  misc_feature (9)..(9): n is a, c, g, or u
  misc_feature (11)..(11): n is a, c, g, or u
uagguuaangnucuuugu

SEQ ID NO: 125430 - RNA, 19 nt, Artificial Sequence
  Synthetic
  misc_feature (10)..(10): n is a, c, g, or u
  misc_feature (12)..(12): n is a, c, g, or u
uuagguuaangnucuuugu

SEQ ID NO: 125431 - RNA, 20 nt, Artificial Sequence
  Synthetic
  misc_feature (1)..(1): n is a, c, g, or u
  misc_feature (11)..(11): n is a, c, g, or u
  misc_feature (13)..(13): n is a, c, g, or u
nuuagguuaangnucuuugu

SEQ ID NO: 125432 - RNA, 21 nt, Artificial Sequence
  Synthetic
  misc_feature (2)..(2): n is a, c, g, or u
  misc_feature (12)..(12): n is a, c, g, or u
  misc_feature (14)..(14): n is a, c, g, or u
gnuuagguuaangnucuuugu

SEQ ID NO: 125433 - RNA, 22 nt, Artificial Sequence
  Synthetic
  misc_feature (3)..(3): n is a, c, g, or u
  misc_feature (13)..(13): n is a, c, g, or u
  misc_feature (15)..(15): n is a, c, g, or u
agnuuagguuaangnucuuugu

SEQ ID NO: 125434 - RNA, 23 nt, Artificial Sequence
  Synthetic
  misc_feature (4)..(4): n is a, c, g, or u
  misc_feature (14)..(14): n is a, c, g, or u
  misc_feature (16)..(16): n is a, c, g, or u
gagnuuagguuaangnucuuugu

SEQ ID NO: 125435 - RNA, 24 nt, Artificial Sequence
  Synthetic
  misc_feature (5)..(5): n is a, c, g, or u
  misc_feature (15)..(15): n is a, c, g, or u
  misc_feature (17)..(17): n is a, c, g, or u
ggagnuuagguuaangnucuuugu

SEQ ID NO: 125436 - RNA, 18 nt, Artificial Sequence
  Synthetic
  misc_feature (3)..(4): n is a, c, g, or u
  misc_feature (15)..(15): n is a, c, g, or u
  misc_feature (17)..(17): n is a, c, g, or u
cunncuuuaauccunanu

SEQ ID NO: 125437 - RNA, 19 nt, Artificial Sequence
  Synthetic
  misc_feature (4)..(5): n is a, c, g, or u
  misc_feature (16)..(16): n is a, c, g, or u
  misc_feature (18)..(18): n is a, c, g, or u
ccunncuuuaauccunanu

SEQ ID NO: 125438 - RNA, 20 nt, Artificial Sequence
  Synthetic
  misc_feature (5)..(6): n is a, c, g, or u
  misc_feature (17)..(17): n is a, c, g, or u
  misc_feature (19)..(19): n is a, c, g, or u
accunncuuuaauccunanu

SEQ ID NO: 125439 - RNA, 21 nt, Artificial Sequence
  Synthetic
  misc_feature (6)..(7): n is a, c, g, or u
  misc_feature (18)..(18): n is a, c, g, or u
  misc_feature (20)..(20): n is a, c, g, or u
uaccunncuuuaauccunanu

SEQ ID NO: 125440 - RNA, 22 nt, Artificial Sequence
  Synthetic
  misc_feature (7)..(8): n is a, c, g, or u
  misc_feature (19)..(19): n is a, c, g, or u
  misc_feature (21)..(21): n is a, c, g, or u
guaccunncuuuaauccunanu

SEQ ID NO: 125441 - RNA, 23 nt, Artificial Sequence
  Synthetic
  misc_feature (8)..(9): n is a, c, g, or u
  misc_feature (20)..(20): n is a, c, g, or u
  misc_feature (22)..(22): n is a, c, g, or u
gguaccunncuuuaauccunanu

SEQ ID NO: 125442 - RNA, 24 nt, Artificial Sequence
  Synthetic
  misc_feature (9)..(10): n is a, c, g, or u
  misc_feature (21)..(21): n is a, c, g, or u
  misc_feature (23)..(23): n is a, c, g, or u
cgguaccunncuuuaauccunanu

SEQ ID NO: 125443 - RNA, 18 nt, Artificial Sequence
  Synthetic
  misc_feature (17)..(17): n is a, c, g, or u
gcauggacauugacccnu

SEQ ID NO: 125444 - RNA, 19 nt, Artificial Sequence
  Synthetic
  misc_feature (18)..(18): n is a, c, g, or u
ggcauggacauugacccnu

SEQ ID NO: 125445 - RNA, 20 nt, Artificial Sequence
  Synthetic
  misc_feature (19)..(19): n is a, c, g, or u
gggcauggacauugacccnu

SEQ ID NO: 125446 - RNA, 21 nt, Artificial Sequence
  Synthetic
  misc_feature (1)..(1): n is a, c, g, or u
  misc_feature (20)..(20): n is a, c, g, or u
ngggcauggacauugacccnu

SEQ ID NO: 125447 - RNA, 22 nt, Artificial Sequence
  Synthetic
  misc_feature (2)..(2): n is a, c, g, or u
  misc_feature (21)..(21): n is a, c, g, or u
ungggcauggacauugacccnu

SEQ ID NO: 125448 - RNA, 23 nt, Artificial Sequence
  Synthetic
  misc_feature (3)..(3): n is a, c, g, or u
  misc_feature (22)..(22): n is a, c, g, or u
uungggcauggacauugacccnu

SEQ ID NO: 125449 - RNA, 24 nt, Artificial Sequence
  Synthetic
  misc_feature (4)..(4): n is a, c, g, or u
  misc_feature (23)..(23): n is a, c, g, or u
uuungggcauggacauugacccnu

SEQ ID NO: 125450 - RNA, 18 nt, Artificial Sequence
  Synthetic
  misc_feature (17)..(17): n is a, c, g, or u
ugacuucuuuccuucunu

SEQ ID NO: 125451 - RNA, 19 nt, Artificial Sequence
  Synthetic
  misc_feature (18)..(18): n is a, c, g, or u
cugacuucuuuccuucunu

SEQ ID NO: 125452 - RNA, 20 nt, Artificial Sequence
  Synthetic
  misc_feature (19)..(19): n is a, c, g, or u
ucugacuucuuuccuucunu

SEQ ID NO: 125453 - RNA, 21 nt, Artificial Sequence
  Synthetic
  misc_feature (20)..(20): n is a, c, g, or u
uucugacuucuuuccuucunu

SEQ ID NO: 125454 - RNA, 22 nt, Artificial Sequence
  Synthetic
  misc_feature (21)..(21): n is a, c, g, or u
cuucugacuucuuuccuucunu

SEQ ID NO: 125455 - RNA, 23 nt, Artificial Sequence
  Synthetic
  misc_feature (22)..(22): n is a, c, g, or u
ccuucugacuucuuuccuucunu

SEQ ID NO: 125456 - RNA, 24 nt, Artificial Sequence
  Synthetic
  misc_feature (23)..(23): n is a, c, g, or u
gccuucugacuucuuuccuucunu

SEQ ID NO: 125457 - RNA, 18 nt, Artificial Sequence
  Synthetic
  misc_feature (17)..(17): n is a, c, g, or u
cuauugauuggaaagunu

SEQ ID NO: 125458 - RNA, 19 nt, Artificial Sequence
  Synthetic
  misc_feature (18)..(18): n is a, c, g, or u
ccuauugauuggaaagunu

SEQ ID NO: 125459 - RNA, 20 nt, Artificial Sequence
  Synthetic
  misc_feature (1)..(1): n is a, c, g, or u
  misc_feature (19)..(19): n is a, c, g, or u
nccuauugauuggaaagunu

SEQ ID NO: 125460 - RNA, 21 nt, Artificial Sequence
  Synthetic
  misc_feature (2)..(2): n is a, c, g, or u
  misc_feature (20)..(20): n is a, c, g, or u
gnccuauugauuggaaagunu

SEQ ID NO: 125461 - RNA, 22 nt, Artificial Sequence
  Synthetic
  misc_feature (3)..(3): n is a, c, g, or u
  misc_feature (21)..(21): n is a, c, g, or u
agnccuauugauuggaaagunu

SEQ ID NO: 125462 - RNA, 23 nt, Artificial Sequence
  Synthetic
  misc_feature (4)..(4): n is a, c, g, or u
  misc_feature (22)..(22): n is a, c, g, or u
cagnccuauugauuggaaagunu

SEQ ID NO: 125463 - RNA, 24 nt, Artificial Sequence
  Synthetic
  misc_feature (5)..(5): n is a, c, g, or u
  misc_feature (23)..(23): n is a, c, g, or u
acagnccuauugauuggaaagunu

SEQ ID NO: 125464 - RNA, 18 nt, Artificial Sequence
  Synthetic
  misc_feature (17)..(17): n is a, c, g, or u
auauggaugauguggunu

SEQ ID NO: 125465 - RNA, 19 nt, Artificial Sequence
  Synthetic
  misc_feature (18)..(18): n is a, c, g, or u
uauauggaugauguggunu

SEQ ID NO: 125466 - RNA, 20 nt, Artificial Sequence
  Synthetic
  misc_feature (19)..(19): n is a, c, g, or u
uuauauggaugauguggunu

SEQ ID NO: 125467 - RNA, 21 nt, Artificial Sequence
  Synthetic
  misc_feature (20)..(20): n is a, c, g, or u
guuauauggaugauguggunu

SEQ ID NO: 125468 - RNA, 22 nt, Artificial Sequence
  Synthetic
  misc_feature (21)..(21): n is a, c, g, or u
aguuauauggaugauguggunu

SEQ ID NO: 125469 - RNA, 23 nt, Artificial Sequence
  Synthetic
  misc_feature (22)..(22): n is a, c, g, or u
caguuauauggaugauguggunu

SEQ ID NO: 125470 - RNA, 24 nt, Artificial Sequence
  Synthetic
  misc_feature (23)..(23): n is a, c, g, or u
ucaguuauauggaugauguggunu

SEQ ID NO: 125471 - RNA, 18 nt, Artificial Sequence
  Synthetic
  misc_feature (7)..(7): n is a, c, g, or u
  misc_feature (13)..(13): n is a, c, g, or u
ugauagnuguaancaauu

SEQ ID NO: 125472 - RNA, 19 nt, Artificial Sequence
  Synthetic
  misc_feature (8)..(8): n is a, c, g, or u
  misc_feature (14)..(14): n is a, c, g, or u
uugauagnuguaancaauu

SEQ ID NO: 125473 - RNA, 20 nt, Artificial Sequence
  Synthetic
  misc_feature (9)..(9): n is a, c, g, or u
  misc_feature (15)..(15): n is a, c, g, or u
guugauagnuguaancaauu

SEQ ID NO: 125474 - RNA, 21 nt, Artificial Sequence
  Synthetic
  misc_feature (10)..(10): n is a, c, g, or u
  misc_feature (16)..(16): n is a, c, g, or u
uguugauagnuguaancaauu

SEQ ID NO: 125475 - RNA, 22 nt, Artificial Sequence
  Synthetic
  misc_feature (11)..(11): n is a, c, g, or u
  misc_feature (17)..(17): n is a, c, g, or u
uuguugauagnuguaancaauu

SEQ ID NO: 125476 - RNA, 23 nt, Artificial Sequence
  Synthetic
  misc_feature (12)..(12): n is a, c, g, or u
  misc_feature (18)..(18): n is a, c, g, or u
auuguugauagnuguaancaauu

SEQ ID NO: 125477 - RNA, 24 nt, Artificial Sequence
  Synthetic
  misc_feature (13)..(13): n is a, c, g, or u
  misc_feature (19)..(19): n is a, c, g, or u
cauuguugauagnuguaancaauu

SEQ ID NO: 125478 - RNA, 18 nt, Artificial Sequence
  Synthetic
  misc_feature (7)..(7): n is a, c, g, or u
ugacccnuauaaagaauu

SEQ ID NO: 125479 - RNA, 19 nt, Artificial Sequence
  Synthetic
  misc_feature (8)..(8): n is a, c, g, or u
uugacccnuauaaagaauu

SEQ ID NO: 125480 - RNA, 20 nt, Artificial Sequence
  Synthetic
  misc_feature (9)..(9): n is a, c, g, or u
auugacccnuauaaagaauu

SEQ ID NO: 125481 - RNA, 21 nt, Artificial Sequence
  Synthetic
  misc_feature (10)..(10): n is a, c, g, or u
cauugacccnuauaaagaauu

SEQ ID NO: 125482 - RNA, 22 nt, Artificial Sequence
  Synthetic
  misc_feature (11)..(11): n is a, c, g, or u
acauugacccnuauaaagaauu

SEQ ID NO: 125483 - RNA, 23 nt, Artificial Sequence
  Synthetic
  misc_feature (12)..(12): n is a, c, g, or u
gacauugacccnuauaaagaauu

SEQ ID NO: 125484 - RNA, 24 nt, Artificial Sequence
  Synthetic
  misc_feature (13)..(13): n is a, c, g, or u
ggacauugacccnuauaaagaauu

SEQ ID NO: 125485 - RNA, 18 nt, Artificial Sequence
  Synthetic
cccguuuguccucuaauu

SEQ ID NO: 125486 - RNA, 19 nt, Artificial Sequence
  Synthetic
gcccguuuguccucuaauu

SEQ ID NO: 125487 - RNA, 20 nt, Artificial Sequence
  Synthetic
ugcccguuuguccucuaauu

SEQ ID NO: 125488 - RNA, 21 nt, Artificial Sequence
  Synthetic
uugcccguuuguccucuaauu

SEQ ID NO: 125489 - RNA, 22 nt, Artificial Sequence
  Synthetic
guugcccguuuguccucuaauu

SEQ ID NO: 125490 - RNA, 23 nt, Artificial Sequence
  Synthetic
uguugcccguuuguccucuaauu

SEQ ID NO: 125491 - RNA, 24 nt, Artificial Sequence
  Synthetic
auguugcccguuuguccucuaauu

SEQ ID NO: 125492 - RNA, 18 nt, Artificial Sequence
  Synthetic
ccugggugggaaguaauu

SEQ ID NO: 125493 - RNA, 19 nt, Artificial Sequence
  Synthetic
accugggugggaaguaauu

SEQ ID NO: 125494 - RNA, 20 nt, Artificial Sequence
  Synthetic
caccugggugggaaguaauu

SEQ ID NO: 125495 - RNA, 21 nt, Artificial Sequence
  Synthetic
ccaccugggugggaaguaauu

SEQ ID NO: 125496 - RNA, 22 nt, Artificial Sequence
  Synthetic
gccaccugggugggaaguaauu

SEQ ID NO: 125497 - RNA, 23 nt, Artificial Sequence
  Synthetic
agccaccugggugggaaguaauu

SEQ ID NO: 125498 - RNA, 24 nt, Artificial Sequence
  Synthetic
uagccaccugggugggaaguaauu

SEQ ID NO: 125499 - RNA, 18 nt, Artificial Sequence
  Synthetic
ucaguuggacccugcauu

SEQ ID NO: 125500 - RNA, 19 nt, Artificial Sequence
  Synthetic
aucaguuggacccugcauu

SEQ ID NO: 125501 - RNA, 20 nt, Artificial Sequence
  Synthetic
caucaguuggacccugcauu

SEQ ID NO: 125502 - RNA, 21 nt, Artificial Sequence
  Synthetic
ucaucaguuggacccugcauu

SEQ ID NO: 125503 - RNA, 22 nt, Artificial Sequence
  Synthetic
aucaucaguuggacccugcauu

SEQ ID NO: 125504 - RNA, 23 nt, Artificial Sequence
  Synthetic
gaucaucaguuggacccugcauu

SEQ ID NO: 125505 - RNA, 24 nt, Artificial Sequence
  Synthetic
cgaucaucaguuggacccugcauu

SEQ ID NO: 125506 - RNA, 18 nt, Artificial Sequence
  Synthetic
cuuuuccugacauucauu

SEQ ID NO: 125507 - RNA, 19 nt, Artificial Sequence
  Synthetic
ucuuuuccugacauucauu

SEQ ID NO: 125508 - RNA, 20 nt, Artificial Sequence
  Synthetic
uucuuuuccugacauucauu

SEQ ID NO: 125509 - RNA, 21 nt, Artificial Sequence
  Synthetic
cuucuuuuccugacauucauu

SEQ ID NO: 125510 - RNA, 22 nt, Artificial Sequence
  Synthetic
ccuucuuuuccugacauucauu

SEQ ID NO: 125511 - RNA, 23 nt, Artificial Sequence
  Synthetic
uccuucuuuuccugacauucauu

SEQ ID NO: 125512 - RNA, 24 nt, Artificial Sequence
  Synthetic
cuccuucuuuuccugacauucauu

SEQ ID NO: 125513 - RNA, 18 nt, Artificial Sequence
  Synthetic
  misc_feature (8)..(8): n is a, c, g, or u
uaaacagnccuauugauu

SEQ ID NO: 125514 - RNA, 19 nt, Artificial Sequence
  Synthetic
  misc_feature (9)..(9): n is a, c, g, or u
guaaacagnccuauugauu

SEQ ID NO: 125515 - RNA, 20 nt, Artificial Sequence
  Synthetic
  misc_feature (10)..(10): n is a, c, g, or u
uguaaacagnccuauugauu

SEQ ID NO: 125516 - RNA, 21 nt, Artificial Sequence
  Synthetic
  misc_feature (11)..(11): n is a, c, g, or u
cuguaaacagnccuauugauu

SEQ ID NO: 125517 - RNA, 22 nt, Artificial Sequence
  Synthetic
  misc_feature (12)..(12): n is a, c, g, or u
ccuguaaacagnccuauugauu

SEQ ID NO: 125518 - RNA, 23 nt, Artificial Sequence
  Synthetic
  misc_feature (13)..(13): n is a, c, g, or u
uccuguaaacagnccuauugauu

SEQ ID NO: 125519 - RNA, 24 nt, Artificial Sequence
  Synthetic
  misc_feature (14)..(14): n is a, c, g, or u
uuccuguaaacagnccuauugauu

SEQ ID NO: 125520 - RNA, 18 nt, Artificial Sequence
  Synthetic
uuugcgggucaccauauu

SEQ ID NO: 125521 - RNA, 19 nt, Artificial Sequence
  Synthetic
uuuugcgggucaccauauu

SEQ ID NO: 125522 - RNA, 20 nt, Artificial Sequence
  Synthetic
auuuugcgggucaccauauu

SEQ ID NO: 125523 - RNA, 21 nt, Artificial Sequence
  Synthetic
cauuuugcgggucaccauauu

SEQ ID NO: 125524 - RNA, 22 nt, Artificial Sequence
  Synthetic
ucauuuugcgggucaccauauu

SEQ ID NO: 125525 - RNA, 23 nt, Artificial Sequence
  Synthetic
cucauuuugcgggucaccauauu

SEQ ID NO: 125526 - RNA, 24 nt, Artificial Sequence
  Synthetic
ccucauuuugcgggucaccauauu

SEQ ID NO: 125527 - RNA, 18 nt, Artificial Sequence
  Synthetic
  misc_feature (1)..(1): n is a, c, g, or u
ncauaaggugggaaacuu

SEQ ID NO: 125528 - RNA, 19 nt, Artificial Sequence
  Synthetic
  misc_feature (2)..(2): n is a, c, g, or u
cncauaaggugggaaacuu

SEQ ID NO: 125529 - RNA, 20 nt, Artificial Sequence
  Synthetic
  misc_feature (3)..(3): n is a, c, g, or u
acncauaaggugggaaacuu

SEQ ID NO: 125530 - RNA, 21 nt, Artificial Sequence
  Synthetic
  misc_feature (4)..(4): n is a, c, g, or u
gacncauaaggugggaaacuu

SEQ ID NO: 125531 - RNA, 22 nt, Artificial Sequence
  Synthetic
  misc_feature (5)..(5): n is a, c, g, or u
ggacncauaaggugggaaacuu

SEQ ID NO: 125532 - RNA, 23 nt, Artificial Sequence
  Synthetic
  misc_feature (6)..(6): n is a, c, g, or u
uggacncauaaggugggaaacuu

SEQ ID NO: 125533 - RNA, 24 nt, Artificial Sequence
  Synthetic
  misc_feature (7)..(7): n is a, c, g, or u
uuggacncauaaggugggaaacuu

SEQ ID NO: 125534 - RNA, 18 nt, Artificial Sequence
  Synthetic
uuacuuucucgccaacuu

SEQ ID NO: 125535 - RNA, 19 nt, Artificial Sequence
  Synthetic
uuuacuuucucgccaacuu

SEQ ID NO: 125536 - RNA, 20 nt, Artificial Sequence
  Synthetic
uuuuacuuucucgccaacuu

SEQ ID NO: 125537 - RNA, 21 nt, Artificial Sequence
  Synthetic
cuuuuacuuucucgccaacuu

SEQ ID NO: 125538 - RNA, 22 nt, Artificial Sequence
  Synthetic
gcuuuuacuuucucgccaacuu

SEQ ID NO: 125539 - RNA, 23 nt, Artificial Sequence
  Synthetic
ggcuuuuacuuucucgccaacuu

SEQ ID NO: 125540 - RNA, 24 nt, Artificial Sequence
  Synthetic
aggcuuuuacuuucucgccaacuu

SEQ ID NO: 125541 - RNA, 18 nt, Artificial Sequence
  Synthetic
gggauauucccuuaacuu

SEQ ID NO: 125542 - RNA, 19 nt, Artificial Sequence
  Synthetic
ggggauauucccuuaacuu

SEQ ID NO: 125543 - RNA, 20 nt, Artificial Sequence
  Synthetic
uggggauauucccuuaacuu

SEQ ID NO: 125544 - RNA, 21 nt, Artificial Sequence
  Synthetic
auggggauauucccuuaacuu

SEQ ID NO: 125545 - RNA, 22 nt, Artificial Sequence
  Synthetic
gauggggauauucccuuaacuu

SEQ ID NO: 125546 - RNA, 23 nt, Artificial Sequence
  Synthetic
agauggggauauucccuuaacuu

SEQ ID NO: 125547 - RNA, 24 nt, Artificial Sequence
  Synthetic
aagauggggauauucccuuaacuu

SEQ ID NO: 125548 - RNA, 18 nt, Artificial Sequence
  Synthetic
ccuaucuuaucaacacuu

SEQ ID NO: 125549 - RNA, 19 nt, Artificial Sequence
  Synthetic
cccuaucuuaucaacacuu

SEQ ID NO: 125550 - RNA, 20 nt, Artificial Sequence
  Synthetic
ccccuaucuuaucaacacuu

SEQ ID NO: 125551 - RNA, 21 nt, Artificial Sequence
  Synthetic
gccccuaucuuaucaacacuu

SEQ ID NO: 125552 - RNA, 22 nt, Artificial Sequence
  Synthetic
ugccccuaucuuaucaacacuu

SEQ ID NO: 125553 - RNA, 23 nt, Artificial Sequence
  Synthetic
augccccuaucuuaucaacacuu

SEQ ID NO: 125554 - RNA, 24 nt, Artificial Sequence
  Synthetic
aaugccccuaucuuaucaacacuu

SEQ ID NO: 125555 - RNA, 18 nt, Artificial Sequence
  Synthetic
cgaccuugaggcauacuu

SEQ ID NO: 125556 - RNA, 19 nt, Artificial Sequence
  Synthetic
ccgaccuugaggcauacuu

SEQ ID NO: 125557 - RNA, 20 nt, Artificial Sequence
  Synthetic
accgaccuugaggcauacuu

SEQ ID NO: 125558 - RNA, 21 nt, Artificial Sequence
  Synthetic
gaccgaccuugaggcauacuu

SEQ ID NO: 125559 - RNA, 22 nt, Artificial Sequence
  Synthetic
cgaccgaccuugaggcauacuu

SEQ ID NO: 125560 - RNA, 23 nt, Artificial Sequence
  Synthetic
acgaccgaccuugaggcauacuu

SEQ ID NO: 125561 - RNA, 24 nt, Artificial Sequence
  Synthetic
aacgaccgaccuugaggcauacuu

SEQ ID NO: 125562 - RNA, 18 nt, Artificial Sequence
  Synthetic
uguaguuaaucauuacuu

SEQ ID NO: 125563 - RNA, 19 nt, Artificial Sequence
  Synthetic
auguaguuaaucauuacuu

SEQ ID NO: 125564 - RNA, 20 nt, Artificial Sequence
  Synthetic
  misc_feature (1)..(1): n is a, c, g, or u
nauguaguuaaucauuacuu

SEQ ID NO: 125565 - RNA, 21 nt, Artificial Sequence
  Synthetic
  misc_feature (2)..(2): n is a, c, g, or u
gnauguaguuaaucauuacuu

SEQ ID NO: 125566 - RNA, 22 nt, Artificial Sequence
  Synthetic
  misc_feature (3)..(3): n is a, c, g, or u
agnauguaguuaaucauuacuu

SEQ ID NO: 125567 - RNA, 23 nt, Artificial Sequence
  Synthetic
  misc_feature (4)..(4): n is a, c, g, or u
gagnauguaguuaaucauuacuu

SEQ ID NO: 125568 - RNA, 24 nt, Artificial Sequence
  Synthetic
  misc_feature (5)..(5): n is a, c, g, or u
agagnauguaguuaaucauuacuu

SEQ ID NO: 125569 - RNA, 18 nt, Artificial Sequence
  Synthetic
gccaacuuacaaggccuu

SEQ ID NO: 125570 - RNA, 19 nt, Artificial Sequence
  Synthetic
cgccaacuuacaaggccuu

SEQ ID NO: 125571 - RNA, 20 nt, Artificial Sequence
  Synthetic
ucgccaacuuacaaggccuu

SEQ ID NO: 125572 - RNA, 21 nt, Artificial Sequence
  Synthetic
cucgccaacuuacaaggccuu

SEQ ID NO: 125573 - RNA, 22 nt, Artificial Sequence
  Synthetic
ucucgccaacuuacaaggccuu

SEQ ID NO: 125574 - RNA, 23 nt, Artificial Sequence
  Synthetic
uucucgccaacuuacaaggccuu

SEQ ID NO: 125575 - RNA, 24 nt, Artificial Sequence
  Synthetic
uuucucgccaacuuacaaggccuu

SEQ ID NO: 125576 - RNA, 18 nt, Artificial Sequence
  Synthetic
cugugccuuggguggcuu

SEQ ID NO: 125577 - RNA, 19 nt, Artificial Sequence
  Synthetic
gcugugccuuggguggcuu

SEQ ID NO: 125578 - RNA, 20 nt, Artificial Sequence
  Synthetic
agcugugccuuggguggcuu

SEQ ID NO: 125579 - RNA, 21 nt, Artificial Sequence
  Synthetic
aagcugugccuuggguggcuu

SEQ ID NO: 125580 - RNA, 22 nt, Artificial Sequence
  Synthetic
caagcugugccuuggguggcuu

SEQ ID NO: 125581 - RNA, 23 nt, Artificial Sequence
  Synthetic
ccaagcugugccuuggguggcuu

SEQ ID NO: 125582 - RNA, 24 nt, Artificial Sequence
  Synthetic
uccaagcugugccuuggguggcuu

SEQ ID NO: 125583 - RNA, 18 nt, Artificial Sequence
  Synthetic
  misc_feature (2)..(2): n is a, c, g, or u
unccauaucgucaaucuu

SEQ ID NO: 125584 - RNA, 19 nt, Artificial Sequence
  Synthetic
  misc_feature (3)..(3): n is a, c, g, or u
cunccauaucgucaaucuu

SEQ ID NO: 125585 - RNA, 20 nt, Artificial Sequence
  Synthetic
  misc_feature (4)..(4): n is a, c, g, or u
ucunccauaucgucaaucuu

SEQ ID NO: 125586 - RNA, 21 nt, Artificial Sequence
  Synthetic
  misc_feature (5)..(5): n is a, c, g, or u
cucunccauaucgucaaucuu

SEQ ID NO: 125587 - RNA, 22 nt, Artificial Sequence
  Synthetic
  misc_feature (1)..(1): n is a, c, g, or u
  misc_feature (6)..(6): n is a, c, g, or u
ncucunccauaucgucaaucuu

SEQ ID NO: 125588 - RNA, 23 nt, Artificial Sequence
  Synthetic
  misc_feature (2)..(2): n is a, c, g, or u
  misc_feature (7)..(7): n is a, c, g, or u
gncucunccauaucgucaaucuu

SEQ ID NO: 125589 - RNA, 24 nt, Artificial Sequence
  Synthetic
  misc_feature (3)..(3): n is a, c, g, or u
  misc_feature (8)..(8): n is a, c, g, or u
ugncucunccauaucgucaaucuu

SEQ ID NO: 125590 - RNA, 18 nt, Artificial Sequence
  Synthetic
accaaaugccccuaucuu

SEQ ID NO: 125591 - RNA, 19 nt, Artificial Sequence
  Synthetic
caccaaaugccccuaucuu

SEQ ID NO: 125592 - RNA, 20 nt, Artificial Sequence
  Synthetic
ccaccaaaugccccuaucuu

SEQ ID NO: 125593 - RNA, 21 nt, Artificial Sequence
  Synthetic
accaccaaaugccccuaucuu

SEQ ID NO: 125594 - RNA, 22 nt, Artificial Sequence
  Synthetic
gaccaccaaaugccccuaucuu

SEQ ID NO: 125595 - RNA, 23 nt, Artificial Sequence
  Synthetic
agaccaccaaaugccccuaucuu

SEQ ID NO: 125596 - RNA, 24 nt, Artificial Sequence
  Synthetic
uagaccaccaaaugccccuaucuu

SEQ ID NO: 125597 - RNA, 18 nt, Artificial Sequence
  Synthetic
  misc_feature (12)..(12): n is a, c, g, or u
cauuauuuacanacucuu

SEQ ID NO: 125598 - RNA, 19 nt, Artificial Sequence
  Synthetic
  misc_feature (13)..(13): n is a, c, g, or u
acauuauuuacanacucuu

SEQ ID NO: 125599 - RNA, 20 nt, Artificial Sequence
  Synthetic
  misc_feature (14)..(14): n is a, c, g, or u
gacauuauuuacanacucuu

SEQ ID NO: 125600 - RNA, 21 nt, Artificial Sequence
  Synthetic
  misc_feature (1)..(1): n is a, c, g, or u
  misc_feature (15)..(15): n is a, c, g, or u
ngacauuauuuacanacucuu

SEQ ID NO: 125601 - RNA, 22 nt, Artificial Sequence
  Synthetic
  misc_feature (1)..(2): n is a, c, g, or u
  misc_feature (16)..(16): n is a, c, g, or u
nngacauuauuuacanacucuu

SEQ ID NO: 125602 - RNA, 23 nt, Artificial Sequence
  Synthetic
  misc_feature (2)..(3): n is a, c, g, or u
  misc_feature (17)..(17): n is a, c, g, or u
cnngacauuauuuacanacucuu

SEQ ID NO: 125603 - RNA, 24 nt, Artificial Sequence
  Synthetic
  misc_feature (3)..(4): n is a, c, g, or u
  misc_feature (18)..(18): n is a, c, g, or u
acnngacauuauuuacanacucuu

SEQ ID NO: 125604 - RNA, 18 nt, Artificial Sequence
  Synthetic
caacgaauugugggucuu

SEQ ID NO: 125605 - RNA, 19 nt, Artificial Sequence
  Synthetic
ucaacgaauugugggucuu

SEQ ID NO: 125606 - RNA, 20 nt, Artificial Sequence
  Synthetic
gucaacgaauugugggucuu

SEQ ID NO: 125607 - RNA, 21 nt, Artificial Sequence
  Synthetic
ugucaacgaauugugggucuu

SEQ ID NO: 125608 - RNA, 22 nt, Artificial Sequence
  Synthetic
  misc_feature (1)..(1): n is a, c, g, or u
nugucaacgaauugugggucuu

SEQ ID NO: 125609 - RNA, 23 nt, Artificial Sequence
  Synthetic
  misc_feature (2)..(2): n is a, c, g, or u
unugucaacgaauugugggucuu

SEQ ID NO: 125610 - RNA, 24 nt, Artificial Sequence
  Synthetic
  misc_feature (3)..(3): n is a, c, g, or u
gunugucaacgaauugugggucuu

SEQ ID NO: 125611 - RNA, 18 nt, Artificial Sequence
  Synthetic
gcaugggagguuggucuu

SEQ ID NO: 125612 - RNA, 19 nt, Artificial Sequence
  Synthetic
agcaugggagguuggucuu

SEQ ID NO: 125613 - RNA, 20 nt, Artificial Sequence
  Synthetic
cagcaugggagguuggucuu

SEQ ID NO: 125614 - RNA, 21 nt, Artificial Sequence
  Synthetic
acagcaugggagguuggucuu

SEQ ID NO: 125615 - RNA, 22 nt, Artificial Sequence
  Synthetic
uacagcaugggagguuggucuu

SEQ ID NO: 125616 - RNA, 23 nt, Artificial Sequence
  Synthetic
cuacagcaugggagguuggucuu

SEQ ID NO: 125617 - RNA, 24 nt, Artificial Sequence
  Synthetic
  misc_feature (1)..(1): n is a, c, g, or u
ncuacagcaugggagguuggucuu

SEQ ID NO: 125618 - RNA, 18 nt, Artificial Sequence
  Synthetic
  misc_feature (14)..(14): n is a, c, g, or u
uugaauauuuggunucuu

SEQ ID NO: 125619 - RNA, 19 nt, Artificial Sequence
  Synthetic
  misc_feature (15)..(15): n is a, c, g, or u
cuugaauauuuggunucuu

SEQ ID NO: 125620 - RNA, 20 nt, Artificial Sequence
  Synthetic
  misc_feature (16)..(16): n is a, c, g, or u
ucuugaauauuuggunucuu

SEQ ID NO: 125621 - RNA, 21 nt, Artificial Sequence
  Synthetic
  misc_feature (17)..(17): n is a, c, g, or u
uucuugaauauuuggunucuu

SEQ ID NO: 125622 - RNA, 22 nt, Artificial Sequence
  Synthetic
  misc_feature (18)..(18): n is a, c, g, or u
guucuugaauauuuggunucuu

SEQ ID NO: 125623 - RNA, 23 nt, Artificial Sequence
  Synthetic
  misc_feature (19)..(19): n is a, c, g, or u
uguucuugaauauuuggunucuu

SEQ ID NO: 125624 - RNA, 24 nt, Artificial Sequence
  Synthetic
  misc_feature (20)..(20): n is a, c, g, or u
cuguucuugaauauuuggunucuu

SEQ ID NO: 125625 - RNA, 18 nt, Artificial Sequence
  Synthetic
gcgggucaccauauucuu

SEQ ID NO: 125626 - RNA, 19 nt, Artificial Sequence
  Synthetic
ugcgggucaccauauucuu

SEQ ID NO: 125627 - RNA, 20 nt, Artificial Sequence
  Synthetic
uugcgggucaccauauucuu

SEQ ID NO: 125628 - RNA, 21 nt, Artificial Sequence
  Synthetic
uuugcgggucaccauauucuu

SEQ ID NO: 125629 - RNA, 22 nt, Artificial Sequence
  Synthetic
uuuugcgggucaccauauucuu

SEQ ID NO: 125630 - RNA, 23 nt, Artificial Sequence
  Synthetic
auuuugcgggucaccauauucuu

SEQ ID NO: 125631 - RNA, 24 nt, Artificial Sequence
  Synthetic
cauuuugcgggucaccauauucuu

SEQ ID NO: 125632 - RNA, 18 nt, Artificial Sequence
  Synthetic
aucuucuuguugguucuu

SEQ ID NO: 125633 - RNA, 19 nt, Artificial Sequence
  Synthetic
caucuucuuguugguucuu

SEQ ID NO: 125634 - RNA, 20 nt, Artificial Sequence
  Synthetic
ucaucuucuuguugguucuu

SEQ ID NO: 125635 - RNA, 21 nt, Artificial Sequence
  Synthetic
cucaucuucuuguugguucuu

SEQ ID NO: 125636 - RNA, 22 nt, Artificial Sequence
  Synthetic
ccucaucuucuuguugguucuu

SEQ ID NO: 125637 - RNA, 23 nt, Artificial Sequence
  Synthetic
gccucaucuucuuguugguucuu

SEQ ID NO: 125638 - RNA, 24 nt, Artificial Sequence
  Synthetic
ugccucaucuucuuguugguucuu

SEQ ID NO: 125639 - RNA, 18 nt, Artificial Sequence
  Synthetic
acaggcgggguuuuucuu

SEQ ID NO: 125640 - RNA, 19 nt, Artificial Sequence
  Synthetic
uacaggcgggguuuuucuu

SEQ ID NO: 125641 - RNA, 20 nt, Artificial Sequence
  Synthetic
uuacaggcgggguuuuucuu

SEQ ID NO: 125642 - RNA, 21 nt, Artificial Sequence
  Synthetic
guuacaggcgggguuuuucuu

SEQ ID NO: 125643 - RNA, 22 nt, Artificial Sequence
  Synthetic
uguuacaggcgggguuuuucuu

SEQ ID NO: 125644 - RNA, 23 nt, Artificial Sequence
  Synthetic
guguuacaggcgggguuuuucuu

SEQ ID NO: 125645 - RNA, 24 nt, Artificial Sequence
  Synthetic
cguguuacaggcgggguuuuucuu

SEQ ID NO: 125646 - RNA, 18 nt, Artificial Sequence
  Synthetic
cugcugguggcuccaguu

SEQ ID NO: 125647 - RNA, 19 nt, Artificial Sequence
  Synthetic
ccugcugguggcuccaguu

SEQ ID NO: 125648 - RNA, 20 nt, Artificial Sequence
  Synthetic
uccugcugguggcuccaguu

SEQ ID NO: 125649 - RNA, 21 nt, Artificial Sequence
  Synthetic
uuccugcugguggcuccaguu

SEQ ID NO: 125650 - RNA, 22 nt, Artificial Sequence
  Synthetic
uuuccugcugguggcuccaguu

SEQ ID NO: 125651 - RNA, 23 nt, Artificial Sequence
  Synthetic
cuuuccugcugguggcuccaguu

SEQ ID NO: 125652 - RNA, 24 nt, Artificial Sequence
  Synthetic
acuuuccugcugguggcuccaguu

SEQ ID NO: 125653 - RNA, 18 nt, Artificial Sequence
  Synthetic
  misc_feature (3)..(3): n is a, c, g, or u
uanugagugggaggaguu

SEQ ID NO: 125654 - RNA, 19 nt, Artificial Sequence
  Synthetic
  misc_feature (4)..(4): n is a, c, g, or u
uuanugagugggaggaguu

SEQ ID NO: 125655 - RNA, 20 nt, Artificial Sequence
  Synthetic
  misc_feature (5)..(5): n is a, c, g, or u
uuuanugagugggaggaguu

SEQ ID NO: 125656 - RNA, 21 nt, Artificial Sequence
  Synthetic
  misc_feature (6)..(6): n is a, c, g, or u
guuuanugagugggaggaguu

SEQ ID NO: 125657 - RNA, 22 nt, Artificial Sequence
  Synthetic
  misc_feature (7)..(7): n is a, c, g, or u
uguuuanugagugggaggaguu

SEQ ID NO: 125658 - RNA, 23 nt, Artificial Sequence
  Synthetic
  misc_feature (8)..(8): n is a, c, g, or u
guguuuanugagugggaggaguu

SEQ ID NO: 125659 - RNA, 24 nt, Artificial Sequence
  Synthetic
  misc_feature (9)..(9): n is a, c, g, or u
uguguuuanugagugggaggaguu

SEQ ID NO: 125660 - RNA, 18 nt, Artificial Sequence
  Synthetic
ucuguguuggggugaguu

SEQ ID NO: 125661 - RNA, 19 nt, Artificial Sequence
  Synthetic
uucuguguuggggugaguu

SEQ ID NO: 125662 - RNA, 20 nt, Artificial Sequence
  Synthetic
auucuguguuggggugaguu

SEQ ID NO: 125663 - RNA, 21 nt, Artificial Sequence
  Synthetic
uauucuguguuggggugaguu

SEQ ID NO: 125664 - RNA, 22 nt, Artificial Sequence
  Synthetic
cuauucuguguuggggugaguu

SEQ ID NO: 125665 - RNA, 23 nt, Artificial Sequence
  Synthetic
gcuauucuguguuggggugaguu

SEQ ID NO: 125666 - RNA, 24 nt, Artificial Sequence
  Synthetic
agcuauucuguguuggggugaguu

SEQ ID NO: 125667 - RNA, 18 nt, Artificial Sequence
  Synthetic
gccauuuguucagugguu

SEQ ID NO: 125668 - RNA, 19 nt, Artificial Sequence
  Synthetic
ugccauuuguucagugguu

SEQ ID NO: 125669 - RNA, 20 nt, Artificial Sequence
  Synthetic
gugccauuuguucagugguu

SEQ ID NO: 125670 - RNA, 21 nt, Artificial Sequence
  Synthetic
agugccauuuguucagugguu

SEQ ID NO: 125671 - RNA, 22 nt, Artificial Sequence
  Synthetic
uagugccauuuguucagugguu

SEQ ID NO: 125672 - RNA, 23 nt, Artificial Sequence
  Synthetic
cuagugccauuuguucagugguu

SEQ ID NO: 125673 - RNA, 24 nt, Artificial Sequence
  Synthetic
acuagugccauuuguucagugguu

SEQ ID NO: 125674 - RNA, 18 nt, Artificial Sequence
  Synthetic
  misc_feature (12)..(12): n is a, c, g, or u
agguuuuauccnaauguu

SEQ ID NO: 125675 - RNA, 19 nt, Artificial Sequence
  Synthetic
  misc_feature (13)..(13): n is a, c, g, or u
uagguuuuauccnaauguu

SEQ ID NO: 125676 - RNA, 20 nt, Artificial Sequence
  Synthetic
  misc_feature (14)..(14): n is a, c, g, or u
cuagguuuuauccnaauguu

SEQ ID NO: 125677 - RNA, 21 nt, Artificial Sequence
  Synthetic
  misc_feature (15)..(15): n is a, c, g, or u
gcuagguuuuauccnaauguu

SEQ ID NO: 125678 - RNA, 22 nt, Artificial Sequence
  Synthetic
  misc_feature (16)..(16): n is a, c, g, or u
ugcuagguuuuauccnaauguu

SEQ ID NO: 125679 - RNA, 23 nt, Artificial Sequence
  Synthetic
  misc_feature (17)..(17): n is a, c, g, or u
cugcuagguuuuauccnaauguu

SEQ ID NO: 125680 - RNA, 24 nt, Artificial Sequence
  Synthetic
  misc_feature (18)..(18): n is a, c, g, or u
ccugcuagguuuuauccnaauguu

SEQ ID NO: 125681 - RNA, 18 nt, Artificial Sequence
  Synthetic
  misc_feature (6)..(6): n is a, c, g, or u
uuuggnagagaaacuguu

SEQ ID NO: 125682 - RNA, 19 nt, Artificial Sequence
  Synthetic
  misc_feature (7)..(7): n is a, c, g, or u
uuuuggnagagaaacuguu

SEQ ID NO: 125683 - RNA, 20 nt, Artificial Sequence
  Synthetic
  misc_feature (8)..(8): n is a, c, g, or u
cuuuuggnagagaaacuguu

SEQ ID NO: 125684 - RNA, 21 nt, Artificial Sequence
  Synthetic
  misc_feature (9)..(9): n is a, c, g, or u
acuuuuggnagagaaacuguu

SEQ ID NO: 125685 - RNA, 22 nt, Artificial Sequence
  Synthetic
  misc_feature (10)..(10): n is a, c, g, or u
uacuuuuggnagagaaacuguu

SEQ ID NO: 125686 - RNA, 23 nt, Artificial Sequence
  Synthetic
  misc_feature (11)..(11): n is a, c, g, or u
uuacuuuuggnagagaaacuguu

SEQ ID NO: 125687 - RNA, 24 nt, Artificial Sequence
  Synthetic
  misc_feature (12)..(12): n is a, c, g, or u
cuuacuuuuggnagagaaacuguu

SEQ ID NO: 125688 - RNA, 18 nt, Artificial Sequence
  Synthetic
cuuccggaaacuacuguu

SEQ ID NO: 125689 - RNA, 19 nt, Artificial Sequence
  Synthetic
acuuccggaaacuacuguu

SEQ ID NO: 125690 - RNA, 20 nt, Artificial Sequence
  Synthetic
cacuuccggaaacuacuguu

SEQ ID NO: 125691 - RNA, 21 nt, Artificial Sequence
  Synthetic
acacuuccggaaacuacuguu

SEQ ID NO: 125692 - RNA, 22 nt, Artificial Sequence
  Synthetic
aacacuuccggaaacuacuguu

SEQ ID NO: 125693 - RNA, 23 nt, Artificial Sequence
  Synthetic
caacacuuccggaaacuacuguu

SEQ ID NO: 125694 - RNA, 24 nt, Artificial Sequence
  Synthetic
ucaacacuuccggaaacuacuguu

SEQ ID NO: 125695 - RNA, 18 nt, Artificial Sequence
  Synthetic
aggaccccugcucguguu

SEQ ID NO: 125696 - RNA, 19 nt, Artificial Sequence
  Synthetic
uaggaccccugcucguguu

SEQ ID NO: 125697 - RNA, 20 nt, Artificial Sequence
  Synthetic
cuaggaccccugcucguguu

SEQ ID NO: 125698 - RNA, 21 nt, Artificial Sequence
  Synthetic
ccuaggaccccugcucguguu

SEQ ID NO: 125699 - RNA, 22 nt, Artificial Sequence
  Synthetic
uccuaggaccccugcucguguu

SEQ ID NO: 125700 - RNA, 23 nt, Artificial Sequence
  Synthetic
cuccuaggaccccugcucguguu

SEQ ID NO: 125701 - RNA, 24 nt, Artificial Sequence
  Synthetic
acuccuaggaccccugcucguguu

SEQ ID NO: 125702 - RNA, 18 nt, Artificial Sequence
  Synthetic
  misc_feature (12)..(14): n is a, c, g, or u
aaaaaaucaaannnuguu

SEQ ID NO: 125703 - RNA, 19 nt, Artificial Sequence
  Synthetic
  misc_feature (13)..(15): n is a, c, g, or u
caaaaaaucaaannnuguu

SEQ ID NO: 125704 - RNA, 20 nt, Artificial Sequence
  Synthetic
  misc_feature (1)..(1): n is a, c, g, or u
  misc_feature (14)..(16): n is a, c, g, or u
ncaaaaaaucaaannnuguu

SEQ ID NO: 125705 - RNA, 21 nt, Artificial Sequence
  Synthetic
  misc_feature (2)..(2): n is a, c, g, or u
  misc_feature (15)..(17): n is a, c, g, or u
uncaaaaaaucaaannnuguu

SEQ ID NO: 125706 - RNA, 22 nt, Artificial Sequence
  Synthetic
  misc_feature (3)..(3): n is a, c, g, or u
  misc_feature (16)..(18): n is a, c, g, or u
guncaaaaaaucaaannnuguu

SEQ ID NO: 125707 - RNA, 23 nt, Artificial Sequence
  Synthetic
  misc_feature (4)..(4): n is a, c, g, or u
  misc_feature (17)..(19): n is a, c, g, or u
uguncaaaaaaucaaannnuguu

SEQ ID NO: 125708 - RNA, 24 nt, Artificial Sequence
  Synthetic
  misc_feature (5)..(5): n is a, c, g, or u
  misc_feature (18)..(20): n is a, c, g, or u
uuguncaaaaaaucaaannnuguu

SEQ ID NO: 125709 - RNA, 18 nt, Artificial Sequence
  Synthetic
uugcaggaggacauuguu

SEQ ID NO: 125710 - RNA, 19 nt, Artificial Sequence
  Synthetic
uuugcaggaggacauuguu

SEQ ID NO: 125711 - RNA, 20 nt, Artificial Sequence
  Synthetic
auuugcaggaggacauuguu

SEQ ID NO: 125712 - RNA, 21 nt, Artificial Sequence
  Synthetic
cauuugcaggaggacauuguu

SEQ ID NO: 125713 - RNA, 22 nt, Artificial Sequence
  Synthetic
ucauuugcaggaggacauuguu

SEQ ID NO: 125714 - RNA, 23 nt, Artificial Sequence
  Synthetic
uucauuugcaggaggacauuguu

SEQ ID NO: 125715 - RNA, 24 nt, Artificial Sequence
  Synthetic
auucauuugcaggaggacauuguu

SEQ ID NO: 125716 - RNA, 18 nt, Artificial Sequence
  Synthetic
ggcgggguuuuucuuguu

SEQ ID NO: 125717 - RNA, 19 nt, Artificial Sequence
  Synthetic
aggcgggguuuuucuuguu

SEQ ID NO: 125718 - RNA, 20 nt, Artificial Sequence
  Synthetic
caggcgggguuuuucuuguu

SEQ ID NO: 125719 - RNA, 21 nt, Artificial Sequence
  Synthetic
acaggcgggguuuuucuuguu

SEQ ID NO: 125720 - RNA, 22 nt, Artificial Sequence
  Synthetic
uacaggcgggguuuuucuuguu

SEQ ID NO: 125721 - RNA, 23 nt, Artificial Sequence
  Synthetic
uuacaggcgggguuuuucuuguu

SEQ ID NO: 125722 - RNA, 24 nt, Artificial Sequence
  Synthetic
guuacaggcgggguuuuucuuguu

SEQ ID NO: 125723 - RNA, 18 nt, Artificial Sequence
  Synthetic
  misc_feature (16)..(16): n is a, c, g, or u
uauggaugauguggunuu

SEQ ID NO: 125724 - RNA, 19 nt, Artificial Sequence
  Synthetic
  misc_feature (17)..(17): n is a, c, g, or u
auauggaugauguggunuu

SEQ ID NO: 125725 - RNA, 20 nt, Artificial Sequence
  Synthetic
  misc_feature (18)..(18): n is a, c, g, or u
uauauggaugauguggunuu

SEQ ID NO: 125726 - RNA, 21 nt, Artificial Sequence
  Synthetic
  misc_feature (19)..(19): n is a, c, g, or u
uuauauggaugauguggunuu

SEQ ID NO: 125727 - RNA, 22 nt, Artificial Sequence
  Synthetic
  misc_feature (20)..(20): n is a, c, g, or u
guuauauggaugauguggunuu

SEQ ID NO: 125728 - RNA, 23 nt, Artificial Sequence
  Synthetic
  misc_feature (21)..(21): n is a, c, g, or u
aguuauauggaugauguggunuu

SEQ ID NO: 125729 - RNA, 24 nt, Artificial Sequence
  Synthetic
  misc_feature (22)..(22): n is a, c, g, or u
caguuauauggaugauguggunuu

SEQ ID NO: 125730 - RNA, 18 nt, Artificial Sequence
  Synthetic
  misc_feature (6)..(6): n is a, c, g, or u
  misc_feature (12)..(12): n is a, c, g, or u
gauagnuguaancaauuu

SEQ ID NO: 125731 - RNA, 19 nt, Artificial Sequence
  Synthetic
  misc_feature (7)..(7): n is a, c, g, or u
  misc_feature (13)..(13): n is a, c, g, or u
ugauagnuguaancaauuu

SEQ ID NO: 125732 - RNA, 20 nt, Artificial Sequence
  Synthetic
  misc_feature (8)..(8): n is a, c, g, or u
  misc_feature (14)..(14): n is a, c, g, or u
uugauagnuguaancaauuu

SEQ ID NO: 125733 - RNA, 21 nt, Artificial Sequence
  Synthetic
  misc_feature (9)..(9): n is a, c, g, or u
  misc_feature (15)..(15): n is a, c, g, or u
guugauagnuguaancaauuu

SEQ ID NO: 125734 - RNA, 22 nt, Artificial Sequence
  Synthetic
  misc_feature (10)..(10): n is a, c, g, or u
  misc_feature (16)..(16): n is a, c, g, or u
uguugauagnuguaancaauuu

SEQ ID NO: 125735 - RNA, 23 nt, Artificial Sequence
  Synthetic
  misc_feature (11)..(11): n is a, c, g, or u
  misc_feature (17)..(17): n is a, c, g, or u
uuguugauagnuguaancaauuu

SEQ ID NO: 125736 - RNA, 24 nt, Artificial Sequence
  Synthetic
  misc_feature (12)..(12): n is a, c, g, or u
  misc_feature (18)..(18): n is a, c, g, or u
auuguugauagnuguaancaauuu

SEQ ID NO: 125737 - RNA, 18 nt, Artificial Sequence
  Synthetic
guggacuucucucaauuu

SEQ ID NO: 125738 - RNA, 19 nt, Artificial Sequence
  Synthetic
gguggacuucucucaauuu

SEQ ID NO: 125739 - RNA, 20 nt, Artificial Sequence
  Synthetic
ugguggacuucucucaauuu

SEQ ID NO: 125740 - RNA, 21 nt, Artificial Sequence
  Synthetic
gugguggacuucucucaauuu

SEQ ID NO: 125741 - RNA, 22 nt, Artificial Sequence
  Synthetic
cgugguggacuucucucaauuu

SEQ ID NO: 125742 - RNA, 23 nt, Artificial Sequence
  Synthetic
ucgugguggacuucucucaauuu

SEQ ID NO: 125743 - RNA, 24 nt, Artificial Sequence
  Synthetic
cucgugguggacuucucucaauuu

SEQ ID NO: 125744 - RNA, 18 nt, Artificial Sequence
  Synthetic
cugggugggaaguaauuu

SEQ ID NO: 125745 - RNA, 19 nt, Artificial Sequence
  Synthetic
ccugggugggaaguaauuu

SEQ ID NO: 125746 - RNA, 20 nt, Artificial Sequence
  Synthetic
accugggugggaaguaauuu

SEQ ID NO: 125747 - RNA, 21 nt, Artificial Sequence
  Synthetic
caccugggugggaaguaauuu

SEQ ID NO: 125748 - RNA, 22 nt, Artificial Sequence
  Synthetic
ccaccugggugggaaguaauuu

SEQ ID NO: 125749 - RNA, 23 nt, Artificial Sequence
  Synthetic
gccaccugggugggaaguaauuu

SEQ ID NO: 125750 - RNA, 24 nt, Artificial Sequence
  Synthetic
agccaccugggugggaaguaauuu

SEQ ID NO: 125751 - RNA, 18 nt, Artificial Sequence
  Synthetic
acacguagcgccucauuu

SEQ ID NO: 125752 - RNA, 19 nt, Artificial Sequence
  Synthetic
  misc_feature (1)..(1): n is a, c, g, or u
nacacguagcgccucauuu

SEQ ID NO: 125753 - RNA, 20 nt, Artificial Sequence
  Synthetic
  misc_feature (2)..(2): n is a, c, g, or u
cnacacguagcgccucauuu

SEQ ID NO: 125754 - RNA, 21 nt, Artificial Sequence
  Synthetic
  misc_feature (1)..(1): n is a, c, g, or u
  misc_feature (3)..(3): n is a, c, g, or u
ncnacacguagcgccucauuu

SEQ ID NO: 125755 - RNA, 22 nt, Artificial Sequence
  Synthetic
  misc_feature (2)..(2): n is a, c, g, or u
  misc_feature (4)..(4): n is a, c, g, or u
gncnacacguagcgccucauuu

SEQ ID NO: 125756 - RNA, 23 nt, Artificial Sequence
  Synthetic
  misc_feature (3)..(3): n is a, c, g, or u
  misc_feature (5)..(5): n is a, c, g, or u
agncnacacguagcgccucauuu

SEQ ID NO: 125757 - RNA, 24 nt, Artificial Sequence
  Synthetic
  misc_feature (4)..(4): n is a, c, g, or u
  misc_feature (6)..(6): n is a, c, g, or u
gagncnacacguagcgccucauuu

SEQ ID NO: 125758 - RNA, 18 nt, Artificial Sequence
  Synthetic
uuuuccugacauucauuu

SEQ ID NO: 125759 - RNA, 19 nt, Artificial Sequence
  Synthetic
cuuuuccugacauucauuu

SEQ ID NO: 125760 - RNA, 20 nt, Artificial Sequence
  Synthetic
ucuuuuccugacauucauuu

SEQ ID NO: 125761 - RNA, 21 nt, Artificial Sequence
  Synthetic
uucuuuuccugacauucauuu

SEQ ID NO: 125762 - RNA, 22 nt, Artificial Sequence
  Synthetic
cuucuuuuccugacauucauuu

SEQ ID NO: 125763 - RNA, 23 nt, Artificial Sequence
  Synthetic
ccuucuuuuccugacauucauuu

SEQ ID NO: 125764 - RNA, 24 nt, Artificial Sequence
  Synthetic
uccuucuuuuccugacauucauuu

SEQ ID NO: 125765 - RNA, 18 nt, Artificial Sequence
  Synthetic
cauaaggugggaaacuuu

SEQ ID NO: 125766 - RNA, 19 nt, Artificial Sequence
  Synthetic
  misc_feature (1)..(1): n is a, c, g, or u
ncauaaggugggaaacuuu

SEQ ID NO: 125767 - RNA, 20 nt, Artificial Sequence
  Synthetic
  misc_feature (2)..(2): n is a, c, g, or u
cncauaaggugggaaacuuu

SEQ ID NO: 125768 - RNA, 21 nt, Artificial Sequence
  Synthetic
  misc_feature (3)..(3): n is a, c, g, or u
acncauaaggugggaaacuuu

SEQ ID NO: 125769 - RNA, 22 nt, Artificial Sequence
  Synthetic
  misc_feature (4)..(4): n is a, c, g, or u
gacncauaaggugggaaacuuu

SEQ ID NO: 125770 - RNA, 23 nt, Artificial Sequence
  Synthetic
  misc_feature (5)..(5): n is a, c, g, or u
ggacncauaaggugggaaacuuu

SEQ ID NO: 125771 - RNA, 24 nt, Artificial Sequence
  Synthetic
  misc_feature (6)..(6): n is a, c, g, or u
uggacncauaaggugggaaacuuu

SEQ ID NO: 125772 - RNA, 18 nt, Artificial Sequence
  Synthetic
ccaacuuacaaggccuuu

SEQ ID NO: 125773 - RNA, 19 nt, Artificial Sequence
  Synthetic
gccaacuuacaaggccuuu

SEQ ID NO: 125774 - RNA, 20 nt, Artificial Sequence
  Synthetic
cgccaacuuacaaggccuuu

SEQ ID NO: 125775 - RNA, 21 nt, Artificial Sequence
  Synthetic
ucgccaacuuacaaggccuuu

SEQ ID NO: 125776 - RNA, 22 nt, Artificial Sequence
  Synthetic
cucgccaacuuacaaggccuuu

SEQ ID NO: 125777 - RNA, 23 nt, Artificial Sequence
  Synthetic
ucucgccaacuuacaaggccuuu

SEQ ID NO: 125778 - RNA, 24 nt, Artificial Sequence
  Synthetic
uucucgccaacuuacaaggccuuu

SEQ ID NO: 125779 - RNA, 18 nt, Artificial Sequence
  Synthetic
cccaucaucuugggcuuu

SEQ ID NO: 125780 - RNA, 19 nt, Artificial Sequence
  Synthetic
ucccaucaucuugggcuuu

SEQ ID NO: 125781 - RNA, 20 nt, Artificial Sequence
  Synthetic
aucccaucaucuugggcuuu

SEQ ID NO: 125782 - RNA, 21 nt, Artificial Sequence
  Synthetic
caucccaucaucuugggcuuu

SEQ ID NO: 125783 - RNA, 22 nt, Artificial Sequence
  Synthetic
ccaucccaucaucuugggcuuu

SEQ ID NO: 125784 - RNA, 23 nt, Artificial Sequence
  Synthetic
cccaucccaucaucuugggcuuu

SEQ ID NO: 125785 - RNA, 24 nt, Artificial Sequence
  Synthetic
ucccaucccaucaucuugggcuuu

SEQ ID NO: 125786 - RNA, 18 nt, Artificial Sequence
  Synthetic
  misc_feature (11)..(11): n is a, c, g, or u
auuauuuacanacucuuu

SEQ ID NO: 125787 - RNA, 19 nt, Artificial Sequence
  Synthetic
  misc_feature (12)..(12): n is a, c, g, or u
cauuauuuacanacucuuu

SEQ ID NO: 125788 - RNA, 20 nt, Artificial Sequence
  Synthetic
  misc_feature (13)..(13): n is a, c, g, or u
acauuauuuacanacucuuu

SEQ ID NO: 125789 - RNA, 21 nt, Artificial Sequence
  Synthetic
  misc_feature (14)..(14): n is a, c, g, or u
gacauuauuuacanacucuuu

SEQ ID NO: 125790 - RNA, 22 nt, Artificial Sequence
  Synthetic
  misc_feature (1)..(1): n is a, c, g, or u
  misc_feature (15)..(15): n is a, c, g, or u
ngacauuauuuacanacucuuu

SEQ ID NO: 125791 - RNA, 23 nt, Artificial Sequence
  Synthetic
  misc_feature (1)..(2): n is a, c, g, or u
  misc_feature (16)..(16): n is a, c, g, or u
nngacauuauuuacanacucuuu

SEQ ID NO: 125792 - RNA, 24 nt, Artificial Sequence
  Synthetic
  misc_feature (2)..(3): n is a, c, g, or u
  misc_feature (17)..(17): n is a, c, g, or u
cnngacauuauuuacanacucuuu

SEQ ID NO: 125793 - RNA, 18 nt, Artificial Sequence
  Synthetic
ggucugugccaaguguuu

SEQ ID NO: 125794 - RNA, 19 nt, Artificial Sequence
  Synthetic
uggucugugccaaguguuu

SEQ ID NO: 125795 - RNA, 20 nt, Artificial Sequence
  Synthetic
cuggucugugccaaguguuu

SEQ ID NO: 125796 - RNA, 21 nt, Artificial Sequence
  Synthetic
  misc_feature (1)..(1): n is a, c, g, or u
ncuggucugugccaaguguuu

SEQ ID NO: 125797 - RNA, 22 nt, Artificial Sequence
  Synthetic
  misc_feature (2)..(2): n is a, c, g, or u
gncuggucugugccaaguguuu

SEQ ID NO: 125798 - RNA, 23 nt, Artificial Sequence
  Synthetic
  misc_feature (3)..(3): n is a, c, g, or u
ggncuggucugugccaaguguuu

SEQ ID NO: 125799 - RNA, 24 nt, Artificial Sequence
  Synthetic
  misc_feature (4)..(4): n is a, c, g, or u
cggncuggucugugccaaguguuu

SEQ ID NO: 125800 - RNA, 18 nt, Artificial Sequence
  Synthetic
uucaaagacuguguguuu

SEQ ID NO: 125801 - RNA, 19 nt, Artificial Sequence
  Synthetic
cuucaaagacuguguguuu

SEQ ID NO: 125802 - RNA, 20 nt, Artificial Sequence
  Synthetic
acuucaaagacuguguguuu

SEQ ID NO: 125803 - RNA, 21 nt, Artificial Sequence
  Synthetic
uacuucaaagacuguguguuu

SEQ ID NO: 125804 - RNA, 22 nt, Artificial Sequence
  Synthetic
auacuucaaagacuguguguuu

SEQ ID NO: 125805 - RNA, 23 nt, Artificial Sequence
  Synthetic
cauacuucaaagacuguguguuu

SEQ ID NO: 125806 - RNA, 24 nt, Artificial Sequence
  Synthetic
gcauacuucaaagacuguguguuu

SEQ ID NO: 125807 - RNA, 18 nt, Artificial Sequence
  Synthetic
  misc_feature (11)..(13): n is a, c, g, or u
aaaaaucaaannnuguuu

SEQ ID NO: 125808 - RNA, 19 nt, Artificial Sequence
  Synthetic
  misc_feature (12)..(14): n is a, c, g, or u
aaaaaaucaaannnuguuu

SEQ ID NO: 125809 - RNA, 20 nt, Artificial Sequence
  Synthetic
  misc_feature (13)..(15): n is a, c, g, or u
caaaaaaucaaannnuguuu

SEQ ID NO: 125810 - RNA, 21 nt, Artificial Sequence
  Synthetic
  misc_feature (1)..(1): n is a, c, g, or u
  misc_feature (14)..(16): n is a, c, g, or u
ncaaaaaaucaaannnuguuu

SEQ ID NO: 125811 - RNA, 22 nt, Artificial Sequence
  Synthetic
  misc_feature (2)..(2): n is a, c, g, or u
  misc_feature (15)..(17): n is a, c, g, or u
uncaaaaaaucaaannnuguuu

SEQ ID NO: 125812 - RNA, 23 nt, Artificial Sequence
  Synthetic
  misc_feature (3)..(3): n is a, c, g, or u
  misc_feature (16)..(18): n is a, c, g, or u
guncaaaaaaucaaannnuguuu

SEQ ID NO: 125813 - RNA, 24 nt, Artificial Sequence
  Synthetic
  misc_feature (4)..(4): n is a, c, g, or u
  misc_feature (17)..(19): n is a, c, g, or u
uguncaaaaaaucaaannnuguuu

SEQ ID NO: 125814 - RNA, 18 nt, Artificial Sequence
  Synthetic
uggacuucucucaauuuu

SEQ ID NO: 125815 - RNA, 19 nt, Artificial Sequence
  Synthetic
guggacuucucucaauuuu

SEQ ID NO: 125816 - RNA, 20 nt, Artificial Sequence
  Synthetic
gguggacuucucucaauuuu

SEQ ID NO: 125817 - RNA, 21 nt, Artificial Sequence
  Synthetic
ugguggacuucucucaauuuu

SEQ ID NO: 125818 - RNA, 22 nt, Artificial Sequence
  Synthetic
gugguggacuucucucaauuuu

SEQ ID NO: 125819 - RNA, 23 nt, Artificial Sequence
  Synthetic
cgugguggacuucucucaauuuu

SEQ ID NO: 125820 - RNA, 24 nt, Artificial Sequence
  Synthetic
ucgugguggacuucucucaauuuu

SEQ ID NO: 125821 - RNA, 18 nt, Artificial Sequence
  Synthetic
auuuccugucuuacuuuu

SEQ ID NO: 125822 - RNA, 19 nt, Artificial Sequence
  Synthetic
cauuuccugucuuacuuuu

SEQ ID NO: 125823 - RNA, 20 nt, Artificial Sequence
  Synthetic
acauuuccugucuuacuuuu

SEQ ID NO: 125824 - RNA, 21 nt, Artificial Sequence
  Synthetic
cacauuuccugucuuacuuuu

SEQ ID NO: 125825 - RNA, 22 nt, Artificial Sequence
  Synthetic
ucacauuuccugucuuacuuuu

SEQ ID NO: 125826 - RNA, 23 nt, Artificial Sequence
  Synthetic
uucacauuuccugucuuacuuuu

SEQ ID NO: 125827 - RNA, 24 nt, Artificial Sequence
  Synthetic
uuucacauuuccugucuuacuuuu

SEQ ID NO: 125828 - RNA, 18 nt, Artificial Sequence
  Synthetic
uggcaaacuccuucuuuu

SEQ ID NO: 125829 - RNA, 19 nt, Artificial Sequence
  Synthetic
  misc_feature (1)..(1): n is a, c, g, or u
nuggcaaacuccuucuuuu

SEQ ID NO: 125830 - RNA, 20 nt, Artificial Sequence
  Synthetic
  misc_feature (2)..(2): n is a, c, g, or u
anuggcaaacuccuucuuuu

SEQ ID NO: 125831 - RNA, 21 nt, Artificial Sequence
  Synthetic
  misc_feature (1)..(1): n is a, c, g, or u
  misc_feature (3)..(3): n is a, c, g, or u
nanuggcaaacuccuucuuuu

SEQ ID NO: 125832 - RNA, 22 nt, Artificial Sequence
  Synthetic
  misc_feature (2)..(2): n is a, c, g, or u
  misc_feature (4)..(4): n is a, c, g, or u
unanuggcaaacuccuucuuuu

SEQ ID NO: 125833 - RNA, 23 nt, Artificial Sequence
  Synthetic
  misc_feature (3)..(3): n is a, c, g, or u
  misc_feature (5)..(5): n is a, c, g, or u
cunanuggcaaacuccuucuuuu

SEQ ID NO: 125834 - RNA, 24 nt, Artificial Sequence
  Synthetic
  misc_feature (4)..(4): n is a, c, g, or u
  misc_feature (6)..(6): n is a, c, g, or u
ccunanuggcaaacuccuucuuuu

SEQ ID NO: 125835 - RNA, 18 nt, Artificial Sequence
  Synthetic
  misc_feature (10)..(12): n is a, c, g, or u
aaaaucaaannnuguuuu

SEQ ID NO: 125836 - RNA, 19 nt, Artificial Sequence
  Synthetic
  misc_feature (11)..(13): n is a, c, g, or u
aaaaaucaaannnuguuuu

SEQ ID NO: 125837 - RNA, 20 nt, Artificial Sequence
  Synthetic
  misc_feature (12)..(14): n is a, c, g, or u
aaaaaaucaaannnuguuuu

SEQ ID NO: 125838 - RNA, 21 nt, Artificial Sequence
  Synthetic
  misc_feature (13)..(15): n is a, c, g, or u
caaaaaaucaaannnuguuuu

SEQ ID NO: 125839 - RNA, 22 nt, Artificial Sequence
  Synthetic
  misc_feature (1)..(1): n is a, c, g, or u
  misc_feature (14)..(16): n is a, c, g, or u
ncaaaaaaucaaannnuguuuu

SEQ ID NO: 125840 - RNA, 23 nt, Artificial Sequence
  Synthetic
  misc_feature (2)..(2): n is a, c, g, or u
  misc_feature (15)..(17): n is a, c, g, or u
uncaaaaaaucaaannnuguuuu

SEQ ID NO: 125841 - RNA, 24 nt, Artificial Sequence
  Synthetic
  misc_feature (3)..(3): n is a, c, g, or u
  misc_feature (16)..(18): n is a, c, g, or u
guncaaaaaaucaaannnuguuuu

SEQ ID NO: 125842 - RNA, 17 nt, Artificial Sequence
  Synthetic
gucgugcagguuuugca

SEQ ID NO: 125843 - RNA, 17 nt, Artificial Sequence
  Synthetic
gcgggauucagcgccga

SEQ ID NO: 125844 - RNA, 17 nt, Artificial Sequence
  Synthetic
gcugacgcaacccccac

SEQ ID NO: 125845 - RNA, 17 nt, Artificial Sequence
  Synthetic
gcgaagugcacacggac

SEQ ID NO: 125846 - RNA, 17 nt, Artificial Sequence
  Synthetic
gugggagcauucgggcc

SEQ ID NO: 125847 - RNA, 17 nt, Artificial Sequence
  Synthetic
gcaguauggaucggcag

SEQ ID NO: 125848 - RNA, 17 nt, Artificial Sequence
  Synthetic
gcgcaccucucuuuacg

SEQ ID NO: 125849 - RNA, 17 nt, Artificial Sequence
  Synthetic
  misc_feature (12)..(12): n is a, c, g, or u
guuagacgacgngaccg

SEQ ID NO: 125850 - RNA, 17 nt, Artificial Sequence
  Synthetic
gucggcgcugaaucccg

SEQ ID NO: 125851 - RNA, 17 nt, Artificial Sequence
  Synthetic
ggccaucagcgcaugcg

SEQ ID NO: 125852 - RNA, 17 nt, Artificial Sequence
  Synthetic
  misc_feature (15)..(15): n is a, c, g, or u
gcggacgaccccucncg

SEQ ID NO: 125853 - RNA, 17 nt, Artificial Sequence
  Synthetic
gacucugcgguauugug

SEQ ID NO: 125854 - RNA, 17 nt, Artificial Sequence
  Synthetic
gucaacgaccgaccuug

SEQ ID NO: 125855 - RNA, 17 nt, Artificial Sequence
  Synthetic
gcgggucaccauauucu

SEQ ID NO: 125856 - RNA, 17 nt, Artificial Sequence
  Synthetic
gugcaauuuccauccgu

SEQ ID NO: 125857 - RNA, 17 nt, Artificial Sequence
  Synthetic
ggcuuucccccacuguu

SEQ ID NO: 125858 - RNA, 20 nt, Artificial Sequence
  Synthetic
gaucggcagaggagccacaa

SEQ ID NO: 125859 - RNA, 20 nt, Artificial Sequence
  Synthetic
gcuuguauacaugcauacaa

SEQ ID NO: 125860 - RNA, 20 nt, Artificial Sequence
  Synthetic
  misc_feature (8)..(8): n is a, c, g, or u
guugccgngcaacgggguaa

SEQ ID NO: 125861 - RNA, 20 nt, Artificial Sequence
  Synthetic
gagugggagcauucgggcca

SEQ ID NO: 125862 - RNA, 20 nt, Artificial Sequence
  Synthetic
ggagucgugcagguuuugca

SEQ ID NO: 125863 - RNA, 20 nt, Artificial Sequence
  Synthetic
  misc_feature (6)..(6): n is a, c, g, or u
gaucuncgucugcgaggcga

SEQ ID NO: 125864 - RNA, 20 nt, Artificial Sequence
  Synthetic
guagcuccaaauucuuuaua

SEQ ID NO: 125865 - RNA, 20 nt, Artificial Sequence
  Synthetic
gggcuuucgcaaaauaccua

SEQ ID NO: 125866 - RNA, 20 nt, Artificial Sequence
  Synthetic
gcgagggaguucuucuucua

SEQ ID NO: 125867 - RNA, 20 nt, Artificial Sequence
  Synthetic
ggacuucucucaauuuucua

SEQ ID NO: 125868 - RNA, 20 nt, Artificial Sequence
  Synthetic
gaagcgaagugcacacggac

SEQ ID NO: 125869 - RNA, 20 nt, Artificial Sequence
  Synthetic
  misc_feature (10)..(10): n is a, c, g, or u
gguuuugcanggucccguac

SEQ ID NO: 125870 - RNA, 20 nt, Artificial Sequence
  Synthetic
gcauuugguggucuauaggc

SEQ ID NO: 125871 - RNA, 20 nt, Artificial Sequence
  Synthetic
gccuugagcaggagucgugc

SEQ ID NO: 125872 - RNA, 20 nt, Artificial Sequence
  Synthetic
gcaggguccaacugaugauc

SEQ ID NO: 125873 - RNA, 20 nt, Artificial Sequence
  Synthetic
ggucuccaugcaacgugcag

SEQ ID NO: 125874 - RNA, 20 nt, Artificial Sequence
  Synthetic
gauugagaucuucugcgacg

SEQ ID NO: 125875 - RNA, 20 nt, Artificial Sequence
  Synthetic
ggggcgcaccucucuuuacg

SEQ ID NO: 125876 - RNA, 20 nt, Artificial Sequence
  Synthetic
  misc_feature (15)..(15): n is a, c, g, or u
guuguuagacgacgngaccg

SEQ ID NO: 125877 - RNA, 20 nt, Artificial Sequence
  Synthetic
guaaagagaggugcgccccg

SEQ ID NO: 125878 - RNA, 20 nt, Artificial Sequence
  Synthetic
ggaugacugucucuuagagg

SEQ ID NO: 125879 - RNA, 20 nt, Artificial Sequence
  Synthetic
gaucugaugggcguucacgg

SEQ ID NO: 125880 - RNA, 20 nt, Artificial Sequence
  Synthetic
gacgcaacccccacuggcug

SEQ ID NO: 125881 - RNA, 20 nt, Artificial Sequence
  Synthetic
guuaucgcuggaugugucug

SEQ ID NO: 125882 - RNA, 20 nt, Artificial Sequence
  Synthetic
gcgcaugcguggaaccuuug

SEQ ID NO: 125883 - RNA, 20 nt, Artificial Sequence
  Synthetic
gaccuugggcaggaucugau

SEQ ID NO: 125884 - RNA, 20 nt, Artificial Sequence
  Synthetic
ggcuuucgcaaaauaccuau

SEQ ID NO: 125885 - RNA, 20 nt, Artificial Sequence
  Synthetic
ggguugcgucagcaaacacu

SEQ ID NO: 125886 - RNA, 20 nt, Artificial Sequence
  Synthetic
guaacacgagcagggguccu

SEQ ID NO: 125887 - RNA, 20 nt, Artificial Sequence
  Synthetic
ggucggucguugacauugcu

SEQ ID NO: 125888 - RNA, 20 nt, Artificial Sequence
  Synthetic
gucgcagaagaucucaaucu

SEQ ID NO: 125889 - RNA, 20 nt, Artificial Sequence
  Synthetic
guccuuuguuuacgucccgu

SEQ ID NO: 125890 - RNA, 20 nt, Artificial Sequence
  Synthetic
guccucuuauguaagaccuu

SEQ ID NO: 125891 - RNA, 17 nt, Artificial Sequence
  Synthetic
cgacgggacguaaacaa

SEQ ID NO: 125892 - RNA, 17 nt, Artificial Sequence
  Synthetic
  misc_feature (13)..(13): n is a, c, g, or u
aggccguugccgngcaa

SEQ ID NO: 125893 - RNA, 17 nt, Artificial Sequence
  Synthetic
ugguaacagcgguauaa

SEQ ID NO: 125894 - RNA, 17 nt, Artificial Sequence
  Synthetic
ugggagcauucgggcca

SEQ ID NO: 125895 - RNA, 17 nt, Artificial Sequence
  Synthetic
cgccuguaacacgagca

SEQ ID NO: 125896 - RNA, 17 nt, Artificial Sequence
  Synthetic
uguacaaaaccuacgga

SEQ ID NO: 125897 - RNA, 17 nt, Artificial Sequence
  Synthetic
cuuucgcaaaauaccua

SEQ ID NO: 125898 - RNA, 17 nt, Artificial Sequence
  Synthetic
cuaggaguuccgcagua

SEQ ID NO: 125899 - RNA, 17 nt, Artificial Sequence
  Synthetic
uuguucagugguucgua

SEQ ID NO: 125900 - RNA, 17 nt, Artificial Sequence
  Synthetic
cgggauucagcgccgac

SEQ ID NO: 125901 - RNA, 17 nt, Artificial Sequence
  Synthetic
  misc_feature (7)..(7): n is a, c, g, or u
uuugcanggucccguac

SEQ ID NO: 125902 - RNA, 17 nt, Artificial Sequence
  Synthetic
accccugcucguguuac

SEQ ID NO: 125903 - RNA, 17 nt, Artificial Sequence
  Synthetic
  misc_feature (3)..(3): n is a, c, g, or u
cgngaggggucguccgc

SEQ ID NO: 125904 - RNA, 17 nt, Artificial Sequence
  Synthetic
acgcaacccccacuggc

SEQ ID NO: 125905 - RNA, 17 nt, Artificial Sequence
  Synthetic
ucggucguugacauugc

SEQ ID NO: 125906 - RNA, 17 nt, Artificial Sequence
  Synthetic
  misc_feature (16)..(16): n is a, c, g, or u
cgcggacgaccccucnc

SEQ ID NO: 125907 - RNA, 17 nt, Artificial Sequence
  Synthetic
uccaccaaucggcaguc

SEQ ID NO: 125908 - RNA, 17 nt, Artificial Sequence
  Synthetic
uuugcucgcagccgguc

SEQ ID NO: 125909 - RNA, 17 nt, Artificial Sequence
  Synthetic
ccaaggucuuacauaag

SEQ ID NO: 125910 - RNA, 17 nt, Artificial Sequence
  Synthetic
ugagaucuucugcgacg

SEQ ID NO: 125911 - RNA, 17 nt, Artificial Sequence
  Synthetic
aagagaggugcgccccg

SEQ ID NO: 125912 - RNA, 17 nt, Artificial Sequence
  Synthetic
cgcagagucuagacucg

SEQ ID NO: 125913 - RNA, 17 nt, Artificial Sequence
  Synthetic
cugaugggcguucacgg

SEQ ID NO: 125914 - RNA, 17 nt, Artificial Sequence
  Synthetic
agagucuagacucgugg

SEQ ID NO: 125915 - RNA, 17 nt, Artificial Sequence
  Synthetic
ugacugccgauuggugg

SEQ ID NO: 125916 - RNA, 17 nt, Artificial Sequence
  Synthetic
ucugccgauccauacug

SEQ ID NO: 125917 - RNA, 17 nt, Artificial Sequence
  Synthetic
cacgagucuagacucug

SEQ ID NO: 125918 - RNA, 17 nt, Artificial Sequence
  Synthetic
  misc_feature (9)..(9): n is a, c, g, or u
cguagcgcnucauuuug

SEQ ID NO: 125919 - RNA, 17 nt, Artificial Sequence
  Synthetic
cgauaaccaggacaaau

SEQ ID NO: 125920 - RNA, 17 nt, Artificial Sequence
  Synthetic
aaaccucgcaaaggcau

SEQ ID NO: 125921 - RNA, 17 nt, Artificial Sequence
  Synthetic
aguuccgcaguauggau

SEQ ID NO: 125922 - RNA, 17 nt, Artificial Sequence
  Synthetic
aggguccaacugaugau

SEQ ID NO: 125923 - RNA, 17 nt, Artificial Sequence
  Synthetic
uugcgucagcaaacacu

SEQ ID NO: 125924 - RNA, 17 nt, Artificial Sequence
  Synthetic
cggucguugacauugcu

SEQ ID NO: 125925 - RNA, 17 nt, Artificial Sequence
  Synthetic
  misc_feature (10)..(10): n is a, c, g, or u
cccgcgaagnauccagu

SEQ ID NO: 125926 - RNA, 17 nt, Artificial Sequence
  Synthetic
cuuuguuuacgucccgu

SEQ ID NO: 125927 - RNA, 17 nt, Artificial Sequence
  Synthetic
cgggucaccauauucuu

SEQ ID NO: 125928 - RNA, 20 nt, Artificial Sequence
  Synthetic
ccuacgaaccacugaacaaa

SEQ ID NO: 125929 - RNA, 20 nt, Artificial Sequence
  Synthetic
auugguaacagcgguauaaa

SEQ ID NO: 125930 - RNA, 20 nt, Artificial Sequence
  Synthetic
cgccgacgggacguaaacaa

SEQ ID NO: 125931 - RNA, 20 nt, Artificial Sequence
  Synthetic
uggucaucaaaaccucgcaa

SEQ ID NO: 125932 - RNA, 20 nt, Artificial Sequence
  Synthetic
  misc_feature (16)..(16): n is a, c, g, or u
accaggccguugccgngcaa

SEQ ID NO: 125933 - RNA, 20 nt, Artificial Sequence
  Synthetic
aauugguaacagcgguauaa

SEQ ID NO: 125934 - RNA, 20 nt, Artificial Sequence
  Synthetic
ccccgccuguaacacgagca

SEQ ID NO: 125935 - RNA, 20 nt, Artificial Sequence
  Synthetic
acacggaccggcagaugaga

SEQ ID NO: 125936 - RNA, 20 nt, Artificial Sequence
  Synthetic
uccgcgggauucagcgccga

SEQ ID NO: 125937 - RNA, 20 nt, Artificial Sequence
  Synthetic
ugcuguacaaaaccuacgga

SEQ ID NO: 125938 - RNA, 20 nt, Artificial Sequence
  Synthetic
agguuccacgcaugcgcuga

SEQ ID NO: 125939 - RNA, 20 nt, Artificial Sequence
  Synthetic
agcucuuguucccaagaaua

SEQ ID NO: 125940 - RNA, 20 nt, Artificial Sequence
  Synthetic
ccggaaguguugauaagaua

SEQ ID NO: 125941 - RNA, 20 nt, Artificial Sequence
  Synthetic
auguugcuguacaaaaccua

SEQ ID NO: 125942 - RNA, 20 nt, Artificial Sequence
  Synthetic
cggcuaggaguuccgcagua

SEQ ID NO: 125943 - RNA, 20 nt, Artificial Sequence
  Synthetic
cauuuguucagugguucgua

SEQ ID NO: 125944 - RNA, 20 nt, Artificial Sequence
  Synthetic
uuugcugacgcaacccccac

SEQ ID NO: 125945 - RNA, 20 nt, Artificial Sequence
  Synthetic
ccgcgggauucagcgccgac

SEQ ID NO: 125946 - RNA, 20 nt, Artificial Sequence
  Synthetic
  misc_feature (13)..(13): n is a, c, g, or u
ucgucaaucuccncgaggac

SEQ ID NO: 125947 - RNA, 20 nt, Artificial Sequence
  Synthetic
accaggacaaauuggaggac

SEQ ID NO: 125948 - RNA, 20 nt, Artificial Sequence
  Synthetic
aggaccccugcucguguuac

SEQ ID NO: 125949 - RNA, 20 nt, Artificial Sequence
  Synthetic
  misc_feature (9)..(9): n is a, c, g, or u
cccguugcncggcaacggcc

SEQ ID NO: 125950 - RNA, 20 nt, Artificial Sequence
  Synthetic
uccuguccuccaauuugucc

SEQ ID NO: 125951 - RNA, 20 nt, Artificial Sequence
  Synthetic
accccgccuguaacacgagc

SEQ ID NO: 125952 - RNA, 20 nt, Artificial Sequence
  Synthetic
caauuuguccugguuaucgc

SEQ ID NO: 125953 - RNA, 20 nt, Artificial Sequence
  Synthetic
  misc_feature (11)..(11): n is a, c, g, or u
uuagacgacgngaccgaggc

SEQ ID NO: 125954 - RNA, 20 nt, Artificial Sequence
  Synthetic
cugacgcaacccccacuggc

SEQ ID NO: 125955 - RNA, 20 nt, Artificial Sequence
  Synthetic
  misc_feature (15)..(15): n is a, c, g, or u
acuacuagaucccungaugc

SEQ ID NO: 125956 - RNA, 20 nt, Artificial Sequence
  Synthetic
aggucggucguugacauugc

SEQ ID NO: 125957 - RNA, 20 nt, Artificial Sequence
  Synthetic
  misc_feature (11)..(11): n is a, c, g, or u
cacguagcgcnucauuuugc

SEQ ID NO: 125958 - RNA, 20 nt, Artificial Sequence
  Synthetic
ucgcagaagaucucaaucuc

SEQ ID NO: 125959 - RNA, 20 nt, Artificial Sequence
  Synthetic
ccggcugcgagcaaaacaag

SEQ ID NO: 125960 - RNA, 20 nt, Artificial Sequence
  Synthetic
uccgcaguauggaucggcag

SEQ ID NO: 125961 - RNA, 20 nt, Artificial Sequence
  Synthetic
ucgcaaaauaccuaugggag

SEQ ID NO: 125962 - RNA, 20 nt, Artificial Sequence
  Synthetic
cggaaguguugauaagauag

SEQ ID NO: 125963 - RNA, 20 nt, Artificial Sequence
  Synthetic
cccgucggcgcugaaucccg

SEQ ID NO: 125964 - RNA, 20 nt, Artificial Sequence
  Synthetic
  misc_feature (7)..(7): n is a, c, g, or u
agaucuncgucugcgaggcg

SEQ ID NO: 125965 - RNA, 20 nt, Artificial Sequence
  Synthetic
uucguccccaugccuuugcg

SEQ ID NO: 125966 - RNA, 20 nt, Artificial Sequence
  Synthetic
  misc_feature (18)..(18): n is a, c, g, or u
cccgcggacgaccccucncg

SEQ ID NO: 125967 - RNA, 20 nt, Artificial Sequence
  Synthetic
uaccgcagagucuagacucg

SEQ ID NO: 125968 - RNA, 20 nt, Artificial Sequence
  Synthetic
accccugcucguguuacagg

SEQ ID NO: 125969 - RNA, 20 nt, Artificial Sequence
  Synthetic
acuucucucaauuuucuagg

SEQ ID NO: 125970 - RNA, 20 nt, Artificial Sequence
  Synthetic
cgcagagucuagacucgugg

SEQ ID NO: 125971 - RNA, 20 nt, Artificial Sequence
  Synthetic
uccugacugccgauuggugg

SEQ ID NO: 125972 - RNA, 20 nt, Artificial Sequence
  Synthetic
cgauaaccaggacaaauugg

SEQ ID NO: 125973 - RNA, 20 nt, Artificial Sequence
  Synthetic
uccucugccgauccauacug

SEQ ID NO: 125974 - RNA, 20 nt, Artificial Sequence
  Synthetic
caccacgagucuagacucug

SEQ ID NO: 125975 - RNA, 20 nt, Artificial Sequence
  Synthetic
auuuggucucuuucggagug

SEQ ID NO: 125976 - RNA, 20 nt, Artificial Sequence
  Synthetic
cuagacucugcgguauugug

SEQ ID NO: 125977 - RNA, 20 nt, Artificial Sequence
  Synthetic
aaugucaacgaccgaccuug

SEQ ID NO: 125978 - RNA, 20 nt, Artificial Sequence
  Synthetic
  misc_feature (12)..(12): n is a, c, g, or u
acacguagcgcnucauuuug

SEQ ID NO: 125979 - RNA, 20 nt, Artificial Sequence
  Synthetic
  misc_feature (20)..(20): n is a, c, g, or u
ugaaccuuuaccccguugcn

SEQ ID NO: 125980 - RNA, 20 nt, Artificial Sequence
  Synthetic
  misc_feature (20)..(20): n is a, c, g, or u
aggugcgccccguggucggn

SEQ ID NO: 125981 - RNA, 20 nt, Artificial Sequence
  Synthetic
cagcgauaaccaggacaaau

SEQ ID NO: 125982 - RNA, 20 nt, Artificial Sequence
  Synthetic
  misc_feature (15)..(15): n is a, c, g, or u
cggucuggagcaaancucau

SEQ ID NO: 125983 - RNA, 20 nt, Artificial Sequence
  Synthetic
aggaguuccgcaguauggau

SEQ ID NO: 125984 - RNA, 20 nt, Artificial Sequence
  Synthetic
ugcaggguccaacugaugau

SEQ ID NO: 125985 - RNA, 20 nt, Artificial Sequence
  Synthetic
acaggagguuggugagugau

SEQ ID NO: 125986 - RNA, 20 nt, Artificial Sequence
  Synthetic
  misc_feature (12)..(12): n is a, c, g, or u
cgucaaucuccncgaggacu

SEQ ID NO: 125987 - RNA, 20 nt, Artificial Sequence
  Synthetic
ugcgagcaaaacaagcggcu

SEQ ID NO: 125988 - RNA, 20 nt, Artificial Sequence
  Synthetic
ugacgcaacccccacuggcu

SEQ ID NO: 125989 - RNA, 20 nt, Artificial Sequence
  Synthetic
uuugcgggucaccauauucu

SEQ ID NO: 125990 - RNA, 20 nt, Artificial Sequence
  Synthetic
  misc_feature (13)..(13): n is a, c, g, or u
cgucccgcgaagnauccagu

SEQ ID NO: 125991 - RNA, 20 nt, Artificial Sequence
  Synthetic
ccauuuguucagugguucgu

SEQ ID NO: 125992 - RNA, 20 nt, Artificial Sequence
  Synthetic
uuugaaguaggccucaaggu

SEQ ID NO: 125993 - RNA, 20 nt, Artificial Sequence
  Synthetic
auuccuuggacucauaaggu

SEQ ID NO: 125994 - RNA, 20 nt, Artificial Sequence
  Synthetic
ucuuuguauuaggaggcugu

SEQ ID NO: 125995 - RNA, 20 nt, Artificial Sequence
  Synthetic
uugcgggucaccauauucuu

SEQ ID NO: 125996 - RNA, 20 nt, Artificial Sequence
  Synthetic
uagggcuuucccccacuguu

SEQ ID NO: 125997 - RNA, 17 nt, Artificial Sequence
  Synthetic
gguaacagcgguauaaa

SEQ ID NO: 125998 - RNA, 17 nt, Artificial Sequence
  Synthetic
  misc_feature (2)..(2): n is a, c, g, or u
gnacggcagacggagaa

SEQ ID NO: 125999 - RNA, 17 nt, Artificial Sequence
  Synthetic
  misc_feature (5)..(5): n is a, c, g, or u
gccgngcaacgggguaa

SEQ ID NO: 126000 - RNA, 17 nt, Artificial Sequence
  Synthetic
  misc_feature (9)..(9): n is a, c, g, or u
  misc_feature (11)..(11): n is a, c, g, or u
ggacccugngncgaaca

SEQ ID NO: 126001 - RNA, 17 nt, Artificial Sequence
  Synthetic
  misc_feature (4)..(4): n is a, c, g, or u
  misc_feature (9)..(9): n is a, c, g, or u
  misc_feature (12)..(12): n is a, c, g, or u
gggnucacnccnccaca

SEQ ID NO: 126002 - RNA, 17 nt, Artificial Sequence
  Synthetic
gugaagcgaagugcaca

SEQ ID NO: 126003 - RNA, 17 nt, Artificial Sequence
  Synthetic
  misc_feature (6)..(6): n is a, c, g, or u
  misc_feature (9)..(10): n is a, c, g, or u
gccgunccnnccgacca

SEQ ID NO: 126004 - RNA, 17 nt, Artificial Sequence
  Synthetic
  misc_feature (6)..(6): n is a, c, g, or u
guacanccuagcagcca

SEQ ID NO: 126005 - RNA, 17 nt, Artificial Sequence
  Synthetic
  misc_feature (15)..(15): n is a, c, g, or u
gaacaagagcuacanca

SEQ ID NO: 126006 - RNA, 17 nt, Artificial Sequence
  Synthetic
ggacuucaaccccauca

SEQ ID NO: 126007 - RNA, 17 nt, Artificial Sequence
  Synthetic
guucuucuggauuauca

SEQ ID NO: 126008 - RNA, 17 nt, Artificial Sequence
  Synthetic
  misc_feature (4)..(4): n is a, c, g, or u
gcangaucccagaguca

SEQ ID NO: 126009 - RNA, 17 nt, Artificial Sequence
  Synthetic
gaucugaugggcguuca

SEQ ID NO: 126010 - RNA, 17 nt, Artificial Sequence
  Synthetic
gaaggaaagaagucaga

SEQ ID NO: 126011 - RNA, 17 nt, Artificial Sequence
  Synthetic
  misc_feature (3)..(3): n is a, c, g, or u
ggnacggcagacggaga

SEQ ID NO: 126012 - RNA, 17 nt, Artificial Sequence
  Synthetic
  misc_feature (12)..(12): n is a, c, g, or u
  misc_feature (15)..(15): n is a, c, g, or u
gcgaaagcccanganga

SEQ ID NO: 126013 - RNA, 17 nt, Artificial Sequence
  Synthetic
  misc_feature (2)..(2): n is a, c, g, or u
  misc_feature (16)..(16): n is a, c, g, or u
gnaagauccagcaucna

SEQ ID NO: 126014 - RNA, 17 nt, Artificial Sequence
  Synthetic
gaaguguugauaagaua

SEQ ID NO: 126015 - RNA, 17 nt, Artificial Sequence
  Synthetic
gcuccaaauucuuuaua

SEQ ID NO: 126016 - RNA, 17 nt, Artificial Sequence
  Synthetic
ggaauuagaggacaaac

SEQ ID NO: 126017 - RNA, 17 nt, Artificial Sequence
  Synthetic
  misc_feature (12)..(12): n is a, c, g, or u
ggccguugccgngcaac

SEQ ID NO: 126018 - RNA, 17 nt, Artificial Sequence
  Synthetic
  misc_feature (4)..(4): n is a, c, g, or u
  misc_feature (6)..(6): n is a, c, g, or u
guunanuguuccugaac

SEQ ID NO: 126019 - RNA, 17 nt, Artificial Sequence
  Synthetic
gaugagaaggcacagac

SEQ ID NO: 126020 - RNA, 17 nt, Artificial Sequence
  Synthetic
  misc_feature (6)..(6): n is a, c, g, or u
guugcncggcaacggcc

SEQ ID NO: 126021 - RNA, 17 nt, Artificial Sequence
  Synthetic
guuuguccucuaauucc

SEQ ID NO: 126022 - RNA, 17 nt, Artificial Sequence
  Synthetic
gaacuggagccaccagc

SEQ ID NO: 126023 - RNA, 17 nt, Artificial Sequence
  Synthetic
  misc_feature (8)..(8): n is a, c, g, or u
gacgacgngaccgaggc

SEQ ID NO: 126024 - RNA, 17 nt, Artificial Sequence
  Synthetic
  misc_feature (3)..(3): n is a, c, g, or u
ganuuggcuccgaaugc

SEQ ID NO: 126025 - RNA, 17 nt, Artificial Sequence
  Synthetic
  misc_feature (3)..(3): n is a, c, g, or u
ggncuguauuuuccugc

SEQ ID NO: 126026 - RNA, 17 nt, Artificial Sequence
  Synthetic
ggcaagccauucucugc

SEQ ID NO: 126027 - RNA, 17 nt, Artificial Sequence
  Synthetic
  misc_feature (8)..(8): n is a, c, g, or u
guagcgcnucauuuugc

SEQ ID NO: 126028 - RNA, 17 nt, Artificial Sequence
  Synthetic
  misc_feature (12)..(12): n is a, c, g, or u
  misc_feature (16)..(16): n is a, c, g, or u
gaggcaauauungganc

SEQ ID NO: 126029 - RNA, 17 nt, Artificial Sequence
  Synthetic
ggguugaagucccaauc

SEQ ID NO: 126030 - RNA, 17 nt, Artificial Sequence
  Synthetic
ggguccaacugaugauc

SEQ ID NO: 126031 - RNA, 17 nt, Artificial Sequence
  Synthetic
guggagcccucaggcuc

SEQ ID NO: 126032 - RNA, 17 nt, Artificial Sequence
  Synthetic
gaaggaguuugccauuc

SEQ ID NO: 126033 - RNA, 17 nt, Artificial Sequence
  Synthetic
gcugguggcuccaguuc

SEQ ID NO: 126034 - RNA, 17 nt, Artificial Sequence
  Synthetic
gcugcgagcaaaacaag

SEQ ID NO: 126035 - RNA, 17 nt, Artificial Sequence
  Synthetic
  misc_feature (6)..(6): n is a, c, g, or u
gacganagagucccaag

SEQ ID NO: 126036 - RNA, 17 nt, Artificial Sequence
  Synthetic
  misc_feature (9)..(10): n is a, c, g, or u
gguuggcunnuggccag

SEQ ID NO: 126037 - RNA, 17 nt, Artificial Sequence
  Synthetic
gccuguaacacgagcag

SEQ ID NO: 126038 - RNA, 17 nt, Artificial Sequence
  Synthetic
ggagaccgcguaaagag

SEQ ID NO: 126039 - RNA, 17 nt, Artificial Sequence
  Synthetic
gauugacgagaugugag

SEQ ID NO: 126040 - RNA, 17 nt, Artificial Sequence
  Synthetic
gggaguucuucuucuag

SEQ ID NO: 126041 - RNA, 17 nt, Artificial Sequence
  Synthetic
  misc_feature (3)..(3): n is a, c, g, or u
gungauccuggaauuag

SEQ ID NO: 126042 - RNA, 17 nt, Artificial Sequence
  Synthetic
ggaugacugucucuuag

SEQ ID NO: 126043 - RNA, 17 nt, Artificial Sequence
  Synthetic
  misc_feature (11)..(11): n is a, c, g, or u
gccguugccgngcaacg

SEQ ID NO: 126044 - RNA, 17 nt, Artificial Sequence
  Synthetic
guccccaugccuuugcg

SEQ ID NO: 126045 - RNA, 17 nt, Artificial Sequence
  Synthetic
  misc_feature (12)..(12): n is a, c, g, or u
gccaacuggauncuucg

SEQ ID NO: 126046 - RNA, 17 nt, Artificial Sequence
  Synthetic
gacucuagcuaccuggg

SEQ ID NO: 126047 - RNA, 17 nt, Artificial Sequence
  Synthetic
gguggucuauaggcugg

SEQ ID NO: 126048 - RNA, 17 nt, Artificial Sequence
  Synthetic
gguuggugagugauugg

SEQ ID NO: 126049 - RNA, 17 nt, Artificial Sequence
  Synthetic
ggaugaugugguauugg

SEQ ID NO: 126050 - RNA, 17 nt, Artificial Sequence
  Synthetic
  misc_feature (5)..(5): n is a, c, g, or u
gaucnugcagagcuugg

SEQ ID NO: 126051 - RNA, 17 nt, Artificial Sequence
  Synthetic
gcuccauuuacacaaug

SEQ ID NO: 126052 - RNA, 17 nt, Artificial Sequence
  Synthetic
gaaccaauaagaagaug

SEQ ID NO: 126053 - RNA, 17 nt, Artificial Sequence
  Synthetic
gccagugguccuugaug

SEQ ID NO: 126054 - RNA, 17 nt, Artificial Sequence
  Synthetic
gcaacccccacuggcug

SEQ ID NO: 126055 - RNA, 17 nt, Artificial Sequence
  Synthetic
ggaaguguugauaagau

SEQ ID NO: 126056 - RNA, 17 nt, Artificial Sequence
  Synthetic
  misc_feature (6)..(6): n is a, c, g, or u
  misc_feature (9)..(9): n is a, c, g, or u
gcccangangaugggau

SEQ ID NO: 126057 - RNA, 17 nt, Artificial Sequence
  Synthetic
ggagguuggugagugau

SEQ ID NO: 126058 - RNA, 17 nt, Artificial Sequence
  Synthetic
ggccagugguccuugau

SEQ ID NO: 126059 - RNA, 17 nt, Artificial Sequence
  Synthetic
  misc_feature (15)..(15): n is a, c, g, or u
ggcuggggcuuggcnau

SEQ ID NO: 126060 - RNA, 17 nt, Artificial Sequence
  Synthetic
ggcauuugguggucuau

SEQ ID NO: 126061 - RNA, 17 nt, Artificial Sequence
  Synthetic
gccuccaagcugugccu

SEQ ID NO: 126062 - RNA, 17 nt, Artificial Sequence
  Synthetic
gagcaaaacaagcggcu

SEQ ID NO: 126063 - RNA, 17 nt, Artificial Sequence
  Synthetic
gcaagccauucucugcu

SEQ ID NO: 126064 - RNA, 17 nt, Artificial Sequence
  Synthetic
gcagaagaucucaaucu

SEQ ID NO: 126065 - RNA, 17 nt, Artificial Sequence
  Synthetic
  misc_feature (4)..(4): n is a, c, g, or u
ggancacccgugugucu

SEQ ID NO: 126066 - RNA, 17 nt, Artificial Sequence
  Synthetic
gagggaguucuucuucu

SEQ ID NO: 126067 - RNA, 17 nt, Artificial Sequence
  Synthetic
  misc_feature (2)..(2): n is a, c, g, or u
  misc_feature (5)..(6): n is a, c, g, or u
gnuannuaauuggaagu

SEQ ID NO: 126068 - RNA, 17 nt, Artificial Sequence
  Synthetic
gccaagccccagccagu

SEQ ID NO: 126069 - RNA, 17 nt, Artificial Sequence
  Synthetic
gccaaccagguaggagu

SEQ ID NO: 126070 - RNA, 17 nt, Artificial Sequence
  Synthetic
gguggagagaugggagu

SEQ ID NO: 126071 - RNA, 17 nt, Artificial Sequence
  Synthetic
gaaguaggccucaaggu

SEQ ID NO: 126072 - RNA, 17 nt, Artificial Sequence
  Synthetic
  misc_feature (7)..(7): n is a, c, g, or u
gcuacancaugggaggu

SEQ ID NO: 126073 - RNA, 17 nt, Artificial Sequence
  Synthetic
ggugagugauuggaggu

SEQ ID NO: 126074 - RNA, 17 nt, Artificial Sequence
  Synthetic
gaggugcgccccguggu

SEQ ID NO: 126075 - RNA, 17 nt, Artificial Sequence
  Synthetic
  misc_feature (12)..(12): n is a, c, g, or u
guaugucaaagnauugu

SEQ ID NO: 126076 - RNA, 17 nt, Artificial Sequence
  Synthetic
gacccuuauaaagaauu

SEQ ID NO: 126077 - RNA, 17 nt, Artificial Sequence
  Synthetic
guaggagugggagcauu

SEQ ID NO: 126078 - RNA, 17 nt, Artificial Sequence
  Synthetic
gauaagauaggggcauu

SEQ ID NO: 126079 - RNA, 17 nt, Artificial Sequence
  Synthetic
gugagugauuggagguu

SEQ ID NO: 126080 - RNA, 17 nt, Artificial Sequence
  Synthetic
  misc_feature (10)..(10): n is a, c, g, or u
gugccuuggnuggcuuu

SEQ ID NO: 126081 - RNA, 17 nt, Artificial Sequence
  Synthetic
  misc_feature (3)..(3): n is a, c, g, or u
ganuauuuggucucuuu

SEQ ID NO: 126082 - RNA, 20 nt, Artificial Sequence
  Synthetic
  misc_feature (14)..(14): n is a, c, g, or u
guaaacugagccangagaaa

SEQ ID NO: 126083 - RNA, 20 nt, Artificial Sequence
  Synthetic
  misc_feature (3)..(3): n is a, c, g, or u
  misc_feature (6)..(6): n is a, c, g, or u
ggnuanccacauuguguaaa

SEQ ID NO: 126084 - RNA, 20 nt, Artificial Sequence
  Synthetic
gaggugaagcgaagugcaca

SEQ ID NO: 126085 - RNA, 20 nt, Artificial Sequence
  Synthetic
  misc_feature (9)..(9): n is a, c, g, or u
gcaguacanccuagcagcca

SEQ ID NO: 126086 - RNA, 20 nt, Artificial Sequence
  Synthetic
  misc_feature (14)..(14): n is a, c, g, or u
ggaaauauacaucnuuucca

SEQ ID NO: 126087 - RNA, 20 nt, Artificial Sequence
  Synthetic
  misc_feature (14)..(14): n is a, c, g, or u
  misc_feature (18)..(18): n is a, c, g, or u
gagaggcaauauungganca

SEQ ID NO: 126088 - RNA, 20 nt, Artificial Sequence
  Synthetic
ggguggagcccucaggcuca

SEQ ID NO: 126089 - RNA, 20 nt, Artificial Sequence
  Synthetic
  misc_feature (16)..(16): n is a, c, g, or u
ggguuauucccuaaanuuca

SEQ ID NO: 126090 - RNA, 20 nt, Artificial Sequence
  Synthetic
  misc_feature (7)..(7): n is a, c, g, or u
ggcuggnauucuauauaaga

SEQ ID NO: 126091 - RNA, 20 nt, Artificial Sequence
  Synthetic
ggcagaugagaaggcacaga

SEQ ID NO: 126092 - RNA, 20 nt, Artificial Sequence
  Synthetic
gucucuuagagguggagaga

SEQ ID NO: 126093 - RNA, 20 nt, Artificial Sequence
  Synthetic
  misc_feature (2)..(3): n is a, c, g, or u
  misc_feature (6)..(6): n is a, c, g, or u
gnnggnacggcagacggaga

SEQ ID NO: 126094 - RNA, 20 nt, Artificial Sequence
  Synthetic
  misc_feature (10)..(10): n is a, c, g, or u
  misc_feature (13)..(13): n is a, c, g, or u
gaaagcccangangauggga

SEQ ID NO: 126095 - RNA, 20 nt, Artificial Sequence
  Synthetic
gguuuuguacagcaacauga

SEQ ID NO: 126096 - RNA, 20 nt, Artificial Sequence
  Synthetic
gcaaugcucaggagacucua

SEQ ID NO: 126097 - RNA, 20 nt, Artificial Sequence
  Synthetic
gaauuuuggccaagacacac

SEQ ID NO: 126098 - RNA, 20 nt, Artificial Sequence
  Synthetic
gcagaugagaaggcacagac

SEQ ID NO: 126099 - RNA, 20 nt, Artificial Sequence
  Synthetic
  misc_feature (6)..(6): n is a, c, g, or u
ggaucnacaacaaccaguac

SEQ ID NO: 126100 - RNA, 20 nt, Artificial Sequence
  Synthetic
gcaaacacuuggcacagacc

SEQ ID NO: 126101 - RNA, 20 nt, Artificial Sequence
  Synthetic
ggagugggagcauucgggcc

SEQ ID NO: 126102 - RNA, 20 nt, Artificial Sequence
  Synthetic
  misc_feature (15)..(15): n is a, c, g, or u
guacugguuguugungaucc

SEQ ID NO: 126103 - RNA, 20 nt, Artificial Sequence
  Synthetic
gacugccgauugguggaggc

SEQ ID NO: 126104 - RNA, 20 nt, Artificial Sequence
  Synthetic
  misc_feature (18)..(18): n is a, c, g, or u
gcauacaaaggcauuaangc

SEQ ID NO: 126105 - RNA, 20 nt, Artificial Sequence
  Synthetic
gucugugccuucucaucugc

SEQ ID NO: 126106 - RNA, 20 nt, Artificial Sequence
  Synthetic
gggguggagcccucaggcuc

SEQ ID NO: 126107 - RNA, 20 nt, Artificial Sequence
  Synthetic
gccuccaccaaucggcaguc

SEQ ID NO: 126108 - RNA, 20 nt, Artificial Sequence
  Synthetic
  misc_feature (9)..(9): n is a, c, g, or u
ggggacganagagucccaag

SEQ ID NO: 126109 - RNA, 20 nt, Artificial Sequence
  Synthetic
ggcauagcagcaggaugaag

SEQ ID NO: 126110 - RNA, 20 nt, Artificial Sequence
  Synthetic
gucauccucaggccaugcag

SEQ ID NO: 126111 - RNA, 20 nt, Artificial Sequence
  Synthetic
  misc_feature (17)..(17): n is a, c, g, or u
gucccaagcggccccgngag

SEQ ID NO: 126112 - RNA, 20 nt, Artificial Sequence
  Synthetic
ggagauugacgagaugugag

SEQ ID NO: 126113 - RNA, 20 nt, Artificial Sequence
  Synthetic
gacuucucucaauuuucuag

SEQ ID NO: 126114 - RNA, 20 nt, Artificial Sequence
  Synthetic
  misc_feature (6)..(6): n is a, c, g, or u
guugungauccuggaauuag

SEQ ID NO: 126115 - RNA, 20 nt, Artificial Sequence
  Synthetic
  misc_feature (7)..(7): n is a, c, g, or u
gccccgngaggggucguccg

SEQ ID NO: 126116 - RNA, 20 nt, Artificial Sequence
  Synthetic
  misc_feature (12)..(12): n is a, c, g, or u
gauugagaucuncgucugcg

SEQ ID NO: 126117 - RNA, 20 nt, Artificial Sequence
  Synthetic
  misc_feature (4)..(4): n is a, c, g, or u
  misc_feature (9)..(9): n is a, c, g, or u
  misc_feature (12)..(12): n is a, c, g, or u
gggnucacnccnccacacgg

SEQ ID NO: 126118 - RNA, 20 nt, Artificial Sequence
  Synthetic
gcaagccauucucugcuggg

SEQ ID NO: 126119 - RNA, 20 nt, Artificial Sequence
  Synthetic
  misc_feature (3)..(3): n is a, c, g, or u
ggncuguauuuuccugcugg

SEQ ID NO: 126120 - RNA, 20 nt, Artificial Sequence
  Synthetic
ggcaagccauucucugcugg

SEQ ID NO: 126121 - RNA, 20 nt, Artificial Sequence
  Synthetic
ggagguuggugagugauugg

SEQ ID NO: 126122 - RNA, 20 nt, Artificial Sequence
  Synthetic
gauaagauaggggcauuugg

SEQ ID NO: 126123 - RNA, 20 nt, Artificial Sequence
  Synthetic
  misc_feature (19)..(19): n is a, c, g, or u
gagucccaagcggccccgng

SEQ ID NO: 126124 - RNA, 20 nt, Artificial Sequence
  Synthetic
  misc_feature (3)..(3): n is a, c, g, or u
gcngcuccauuuacacaaug

SEQ ID NO: 126125 - RNA, 20 nt, Artificial Sequence
  Synthetic
gaagaaccaauaagaagaug

SEQ ID NO: 126126 - RNA, 20 nt, Artificial Sequence
  Synthetic
  misc_feature (11)..(11): n is a, c, g, or u
gucaaucuccncgaggacug

SEQ ID NO: 126127 - RNA, 20 nt, Artificial Sequence
  Synthetic
  misc_feature (7)..(7): n is a, c, g, or u
gagccangagaaacggacug

SEQ ID NO: 126128 - RNA, 20 nt, Artificial Sequence
  Synthetic
  misc_feature (2)..(2): n is a, c, g, or u
gncaauaugcccugagccug

SEQ ID NO: 126129 - RNA, 20 nt, Artificial Sequence
  Synthetic
  misc_feature (7)..(7): n is a, c, g, or u
ggcuucncgauacagagcug

SEQ ID NO: 126130 - RNA, 20 nt, Artificial Sequence
  Synthetic
  misc_feature (16)..(16): n is a, c, g, or u
gaaaguaugucaaagnauug

SEQ ID NO: 126131 - RNA, 20 nt, Artificial Sequence
  Synthetic
  misc_feature (3)..(3): n is a, c, g, or u
  misc_feature (6)..(7): n is a, c, g, or u
ggnuannuaauuggaaguug

SEQ ID NO: 126132 - RNA, 20 nt, Artificial Sequence
  Synthetic
  misc_feature (9)..(9): n is a, c, g, or u
  misc_feature (20)..(20): n is a, c, g, or u
gguuuaaunccuuugucuan

SEQ ID NO: 126133 - RNA, 20 nt, Artificial Sequence
  Synthetic
  misc_feature (20)..(20): n is a, c, g, or u
gggccucaguccguuucucn

SEQ ID NO: 126134 - RNA, 20 nt, Artificial Sequence
  Synthetic
  misc_feature (17)..(17): n is a, c, g, or u
  misc_feature (20)..(20): n is a, c, g, or u
guauucccaucccaucnucn

SEQ ID NO: 126135 - RNA, 20 nt, Artificial Sequence
  Synthetic
  misc_feature (7)..(7): n is a, c, g, or u
  misc_feature (20)..(20): n is a, c, g, or u
guuuaangacugggaggagn

SEQ ID NO: 126136 - RNA, 20 nt, Artificial Sequence
  Synthetic
  misc_feature (17)..(17): n is a, c, g, or u
  misc_feature (20)..(20): n is a, c, g, or u
gugaaaaaguugcaugnugn

SEQ ID NO: 126137 - RNA, 20 nt, Artificial Sequence
  Synthetic
ggacugaggcccacucccau

SEQ ID NO: 126138 - RNA, 20 nt, Artificial Sequence
  Synthetic
  misc_feature (17)..(17): n is a, c, g, or u
gggaacaagagcuacancau

SEQ ID NO: 126139 - RNA, 20 nt, Artificial Sequence
  Synthetic
  misc_feature (15)..(15): n is a, c, g, or u
gguuauucccuaaanuucau

SEQ ID NO: 126140 - RNA, 20 nt, Artificial Sequence
  Synthetic
gcuaugccucaucuucuuau

SEQ ID NO: 126141 - RNA, 20 nt, Artificial Sequence
  Synthetic
gucuuacauaagaggacucu

SEQ ID NO: 126142 - RNA, 20 nt, Artificial Sequence
  Synthetic
  misc_feature (7)..(7): n is a, c, g, or u
gggggancacccgugugucu

SEQ ID NO: 126143 - RNA, 20 nt, Artificial Sequence
  Synthetic
ggcgagggaguucuucuucu

SEQ ID NO: 126144 - RNA, 20 nt, Artificial Sequence
  Synthetic
guuggugagugauuggaggu

SEQ ID NO: 126145 - RNA, 20 nt, Artificial Sequence
  Synthetic
  misc_feature (19)..(19): n is a, c, g, or u
gggaaagaaucccagaggnu

SEQ ID NO: 126146 - RNA, 20 nt, Artificial Sequence
  Synthetic
  misc_feature (3)..(3): n is a, c, g, or u
  misc_feature (16)..(17): n is a, c, g, or u
  misc_feature (19)..(19): n is a, c, g, or u
ggnaaauauuuagugnngnu

SEQ ID NO: 126147 - RNA, 20 nt, Artificial Sequence
  Synthetic
guugauaagauaggggcauu

SEQ ID NO: 126148 - RNA, 20 nt, Artificial Sequence
  Synthetic
  misc_feature (7)..(7): n is a, c, g, or u
gacaugnacaagagaugauu

SEQ ID NO: 126149 - RNA, 20 nt, Artificial Sequence
  Synthetic
gagaugugagaggcaauauu

SEQ ID NO: 126150 - RNA, 20 nt, Artificial Sequence
  Synthetic
  misc_feature (9)..(9): n is a, c, g, or u
gaccccucncggggccgcuu

SEQ ID NO: 126151 - RNA, 20 nt, Artificial Sequence
  Synthetic
gacauuauuuacauacucuu

SEQ ID NO: 126152 - RNA, 20 nt, Artificial Sequence
  Synthetic
  misc_feature (4)..(4): n is a, c, g, or u
  misc_feature (7)..(8): n is a, c, g, or u
gggnuannuaauuggaaguu

SEQ ID NO: 126153 - RNA, 20 nt, Artificial Sequence
  Synthetic
  misc_feature (18)..(18): n is a, c, g, or u
ggaaagaaucccagaggnuu

SEQ ID NO: 126154 - RNA, 20 nt, Artificial Sequence
  Synthetic
  misc_feature (13)..(13): n is a, c, g, or u
gcugugccuuggnuggcuuu

SEQ ID NO: 126155 - RNA, 17 nt, Artificial Sequence
  Synthetic
acgaaccacugaacaaa

SEQ ID NO: 126156 - RNA, 17 nt, Artificial Sequence
  Synthetic
uggaauuagaggacaaa

SEQ ID NO: 126157 - RNA, 17 nt, Artificial Sequence
  Synthetic
  misc_feature (11)..(11): n is a, c, g, or u
aacugagccangagaaa

SEQ ID NO: 126158 - RNA, 17 nt, Artificial Sequence
  Synthetic
  misc_feature (3)..(3): n is a, c, g, or u
uanccacauuguguaaa

SEQ ID NO: 126159 - RNA, 17 nt, Artificial Sequence
  Synthetic
cggcagaggagccacaa

SEQ ID NO: 126160 - RNA, 17 nt, Artificial Sequence
  Synthetic
  misc_feature (6)..(6): n is a, c, g, or u
  misc_feature (9)..(10): n is a, c, g, or u
uauuunccnnuagacaa

SEQ ID NO: 126161 - RNA, 17 nt, Artificial Sequence
  Synthetic
uguauacaugcauacaa

SEQ ID NO: 126162 - RNA, 17 nt, Artificial Sequence
  Synthetic
ucaucaaaaccucgcaa

SEQ ID NO: 126163 - RNA, 17 nt, Artificial Sequence
  Synthetic
  misc_feature (11)..(11): n is a, c, g, or u
accccguugcncggcaa

SEQ ID NO: 126164 - RNA, 17 nt, Artificial Sequence
  Synthetic
uuccccccagcagagaa

SEQ ID NO: 126165 - RNA, 17 nt, Artificial Sequence
  Synthetic
  misc_feature (1)..(1): n is a, c, g, or u
nuacuguuuacuuagaa

SEQ ID NO: 126166 - RNA, 17 nt, Artificial Sequence
  Synthetic
cuaucuuuaauccugaa

SEQ ID NO: 126167 - RNA, 17 nt, Artificial Sequence
  Synthetic
cuccaaauucuuuauaa

SEQ ID NO: 126168 - RNA, 17 nt, Artificial Sequence
  Synthetic
uuauguuaauacuaaca

SEQ ID NO: 126169 - RNA, 17 nt, Artificial Sequence
  Synthetic
auuuuggccaagacaca

SEQ ID NO: 126170 - RNA, 17 nt, Artificial Sequence
  Synthetic
uuucucgccaacuuaca

SEQ ID NO: 126171 - RNA, 17 nt, Artificial Sequence
  Synthetic
ccaucagauccugccca

SEQ ID NO: 126172 - RNA, 17 nt, Artificial Sequence
  Synthetic
  misc_feature (14)..(14): n is a, c, g, or u
ugccccaaagccancca

SEQ ID NO: 126173 - RNA, 17 nt, Artificial Sequence
  Synthetic
cccaccuuaugagucca

SEQ ID NO: 126174 - RNA, 17 nt, Artificial Sequence
  Synthetic
  misc_feature (11)..(11): n is a, c, g, or u
aauauacaucnuuucca

SEQ ID NO: 126175 - RNA, 17 nt, Artificial Sequence
  Synthetic
aaaaccucgcaaaggca

SEQ ID NO: 126176 - RNA, 17 nt, Artificial Sequence
  Synthetic
  misc_feature (4)..(4): n is a, c, g, or u
uggnuggcuuuggggca

SEQ ID NO: 126177 - RNA, 17 nt, Artificial Sequence
  Synthetic
  misc_feature (2)..(2): n is a, c, g, or u
anuuggcuccgaaugca

SEQ ID NO: 126178 - RNA, 17 nt, Artificial Sequence
  Synthetic
caccucugcacguugca

SEQ ID NO: 126179 - RNA, 17 nt, Artificial Sequence
  Synthetic
  misc_feature (11)..(11): n is a, c, g, or u
  misc_feature (15)..(15): n is a, c, g, or u
aggcaauauungganca

SEQ ID NO: 126180 - RNA, 17 nt, Artificial Sequence
  Synthetic
  misc_feature (13)..(13): n is a, c, g, or u
  misc_feature (15)..(15): n is a, c, g, or u
ucuccauguucgncnca

SEQ ID NO: 126181 - RNA, 17 nt, Artificial Sequence
  Synthetic
cuuugaaguaggccuca

SEQ ID NO: 126182 - RNA, 17 nt, Artificial Sequence
  Synthetic
uggagcccucaggcuca

SEQ ID NO: 126183 - RNA, 17 nt, Artificial Sequence
  Synthetic
ugcacgacuccugcuca

SEQ ID NO: 126184 - RNA, 17 nt, Artificial Sequence
  Synthetic
  misc_feature (13)..(13): n is a, c, g, or u
uuauucccuaaanuuca

SEQ ID NO: 126185 - RNA, 17 nt, Artificial Sequence
  Synthetic
  misc_feature (4)..(4): n is a, c, g, or u
uggnauucuauauaaga

SEQ ID NO: 126186 - RNA, 17 nt, Artificial Sequence
  Synthetic
agaugagaaggcacaga

SEQ ID NO: 126187 - RNA, 17 nt, Artificial Sequence
  Synthetic
  misc_feature (5)..(6): n is a, c, g, or u
  misc_feature (9)..(9): n is a, c, g, or u
ucggnnggnacggcaga

SEQ ID NO: 126188 - RNA, 17 nt, Artificial Sequence
  Synthetic
ucuuagagguggagaga

SEQ ID NO: 126189 - RNA, 17 nt, Artificial Sequence
  Synthetic
cggaccggcagaugaga

SEQ ID NO: 126190 - RNA, 17 nt, Artificial Sequence
  Synthetic
uuucauuuacagugaga

SEQ ID NO: 126191 - RNA, 17 nt, Artificial Sequence
  Synthetic
  misc_feature (14)..(14): n is a, c, g, or u
cuaacaaaacaaanaga

SEQ ID NO: 126192 - RNA, 17 nt, Artificial Sequence
  Synthetic
  misc_feature (3)..(3): n is a, c, g, or u
cuncgucugcgaggcga

SEQ ID NO: 126193 - RNA, 17 nt, Artificial Sequence
  Synthetic
ccaaucggcagucagga

SEQ ID NO: 126194 - RNA, 17 nt, Artificial Sequence
  Synthetic
  misc_feature (3)..(3): n is a, c, g, or u
  misc_feature (9)..(9): n is a, c, g, or u
  misc_feature (11)..(11): n is a, c, g, or u
agnagaucncngacgga

SEQ ID NO: 126195 - RNA, 17 nt, Artificial Sequence
  Synthetic
  misc_feature (7)..(7): n is a, c, g, or u
  misc_feature (10)..(10): n is a, c, g, or u
agcccangangauggga

SEQ ID NO: 126196 - RNA, 17 nt, Artificial Sequence
  Synthetic
uuuacauacucuuugga

SEQ ID NO: 126197 - RNA, 17 nt, Artificial Sequence
  Synthetic
  misc_feature (6)..(6): n is a, c, g, or u
  misc_feature (15)..(15): n is a, c, g, or u
ugaaunuuaggaaanga

SEQ ID NO: 126198 - RNA, 17 nt, Artificial Sequence
  Synthetic
  misc_feature (1)..(1): n is a, c, g, or u
  misc_feature (4)..(4): n is a, c, g, or u
  misc_feature (7)..(7): n is a, c, g, or u
  misc_feature (13)..(13): n is a, c, g, or u
  misc_feature (15)..(15): n is a, c, g, or u
nucnagnagaucncnga

SEQ ID NO: 126199 - RNA, 17 nt, Artificial Sequence
  Synthetic
  misc_feature (15)..(15): n is a, c, g, or u
cccaagcggccccgnga

SEQ ID NO: 126200 - RNA, 17 nt, Artificial Sequence
  Synthetic
uuuguacagcaacauga

SEQ ID NO: 126201 - RNA, 17 nt, Artificial Sequence
  Synthetic
auaugcccugagccuga

SEQ ID NO: 126202 - RNA, 17 nt, Artificial Sequence
  Synthetic
uuccacgcaugcgcuga

SEQ ID NO: 126203 - RNA, 17 nt, Artificial Sequence
  Synthetic
ccuugggcaggaucuga

SEQ ID NO: 126204 - RNA, 17 nt, Artificial Sequence
  Synthetic
uggccagugguccuuga

SEQ ID NO: 126205 - RNA, 17 nt, Artificial Sequence
  Synthetic
  misc_feature (12)..(13): n is a, c, g, or u
  misc_feature (16)..(16): n is a, c, g, or u
cccguggucggnnggna

SEQ ID NO: 126206 - RNA, 17 nt, Artificial Sequence
  Synthetic
ucuuguucccaagaaua

SEQ ID NO: 126207 - RNA, 17 nt, Artificial Sequence
  Synthetic
  misc_feature (3)..(3): n is a, c, g, or u
  misc_feature (9)..(9): n is a, c, g, or u
acnugaucnggauaaua

SEQ ID NO: 126208 - RNA, 17 nt, Artificial Sequence
  Synthetic
uauuccuuggacucaua

SEQ ID NO: 126209 - RNA, 17 nt, Artificial Sequence
  Synthetic
  misc_feature (13)..(13): n is a, c, g, or u
uuuggcuuucagnuaua

SEQ ID NO: 126210 - RNA, 17 nt, Artificial Sequence
  Synthetic
uugcuguacaaaaccua

SEQ ID NO: 126211 - RNA, 17 nt, Artificial Sequence
  Synthetic
augcucaggagacucua

SEQ ID NO: 126212 - RNA, 17 nt, Artificial Sequence
  Synthetic
agggaguucuucuucua

SEQ ID NO: 126213 - RNA, 17 nt, Artificial Sequence
  Synthetic
cuucucucaauuuucua

SEQ ID NO: 126214 - RNA, 17 nt, Artificial Sequence
  Synthetic
  misc_feature (2)..(2): n is a, c, g, or u
unucucuuccaaaagua

SEQ ID NO: 126215 - RNA, 17 nt, Artificial Sequence
  Synthetic
  misc_feature (4)..(4): n is a, c, g, or u
aucnacaacaaccagua

SEQ ID NO: 126216 - RNA, 17 nt, Artificial Sequence
  Synthetic
  misc_feature (14)..(14): n is a, c, g, or u
cuugccugagugcngua

SEQ ID NO: 126217 - RNA, 17 nt, Artificial Sequence
  Synthetic
  misc_feature (5)..(5): n is a, c, g, or u
aucunuuuguuuuguua

SEQ ID NO: 126218 - RNA, 17 nt, Artificial Sequence
  Synthetic
  misc_feature (1)..(1): n is a, c, g, or u
  misc_feature (4)..(4): n is a, c, g, or u
  misc_feature (13)..(13): n is a, c, g, or u
nuancccaugaanuuua

SEQ ID NO: 126219 - RNA, 17 nt, Artificial Sequence
  Synthetic
  misc_feature (13)..(13): n is a, c, g, or u
auguauacaagcnaaac

SEQ ID NO: 126220 - RNA, 17 nt, Artificial Sequence
  Synthetic
  misc_feature (5)..(5): n is a, c, g, or u
uaggnuguacugccaac

SEQ ID NO: 126221 - RNA, 17 nt, Artificial Sequence
  Synthetic
uuuuggccaagacacac

SEQ ID NO: 126222 - RNA, 17 nt, Artificial Sequence
  Synthetic
  misc_feature (5)..(5): n is a, c, g, or u
  misc_feature (8)..(9): n is a, c, g, or u
ccgunccnnccgaccac

SEQ ID NO: 126223 - RNA, 17 nt, Artificial Sequence
  Synthetic
accccaucaaggaccac

SEQ ID NO: 126224 - RNA, 17 nt, Artificial Sequence
  Synthetic
  misc_feature (5)..(5): n is a, c, g, or u
ugagnuuugcuccagac

SEQ ID NO: 126225 - RNA, 17 nt, Artificial Sequence
  Synthetic
  misc_feature (10)..(10): n is a, c, g, or u
ucaaucuccncgaggac

SEQ ID NO: 126226 - RNA, 17 nt, Artificial Sequence
  Synthetic
aggacaaauuggaggac

SEQ ID NO: 126227 - RNA, 17 nt, Artificial Sequence
  Synthetic
  misc_feature (14)..(14): n is a, c, g, or u
acuguguguuuaangac

SEQ ID NO: 126228 - RNA, 17 nt, Artificial Sequence
  Synthetic
  misc_feature (12)..(12): n is a, c, g, or u
  misc_feature (15)..(15): n is a, c, g, or u
aaggugggaaanuunac

SEQ ID NO: 126229 - RNA, 17 nt, Artificial Sequence
  Synthetic
  misc_feature (9)..(9): n is a, c, g, or u
  misc_feature (11)..(12): n is a, c, g, or u
  misc_feature (15)..(15): n is a, c, g, or u
ucaauaggncnnuunac

SEQ ID NO: 126230 - RNA, 17 nt, Artificial Sequence
  Synthetic
  misc_feature (1)..(1): n is a, c, g, or u
ngaugggaugggaauac

SEQ ID NO: 126231 - RNA, 17 nt, Artificial Sequence
  Synthetic
  misc_feature (3)..(3): n is a, c, g, or u
ucnacaacaaccaguac

SEQ ID NO: 126232 - RNA, 17 nt, Artificial Sequence
  Synthetic
  misc_feature (8)..(9): n is a, c, g, or u
cuggccannagccaacc

SEQ ID NO: 126233 - RNA, 17 nt, Artificial Sequence
  Synthetic
cacauccagcgauaacc

SEQ ID NO: 126234 - RNA, 17 nt, Artificial Sequence
  Synthetic
aacacuuggcacagacc

SEQ ID NO: 126235 - RNA, 17 nt, Artificial Sequence
  Synthetic
augcucccacuccuacc

SEQ ID NO: 126236 - RNA, 17 nt, Artificial Sequence
  Synthetic
  misc_feature (2)..(2): n is a, c, g, or u
unaugacucuagcuacc

SEQ ID NO: 126237 - RNA, 17 nt, Artificial Sequence
  Synthetic
caaauuauuacccaccc

SEQ ID NO: 126238 - RNA, 17 nt, Artificial Sequence
  Synthetic
  misc_feature (6)..(6): n is a, c, g, or u
  misc_feature (9)..(9): n is a, c, g, or u
  misc_feature (14)..(14): n is a, c, g, or u
uguggnggnguganccc

SEQ ID NO: 126239 - RNA, 17 nt, Artificial Sequence
  Synthetic
  misc_feature (12)..(12): n is a, c, g, or u
cugguuguugungaucc

SEQ ID NO: 126240 - RNA, 17 nt, Artificial Sequence
  Synthetic
uguccuccaauuugucc

SEQ ID NO: 126241 - RNA, 17 nt, Artificial Sequence
  Synthetic
agaugaggcauagcagc

SEQ ID NO: 126242 - RNA, 17 nt, Artificial Sequence
  Synthetic
cuuguuuugcucgcagc

SEQ ID NO: 126243 - RNA, 17 nt, Artificial Sequence
  Synthetic
ccgccuguaacacgagc

SEQ ID NO: 126244 - RNA, 17 nt, Artificial Sequence
  Synthetic
auagaguugccuugagc

SEQ ID NO: 126245 - RNA, 17 nt, Artificial Sequence
  Synthetic
  misc_feature (1)..(1): n is a, c, g, or u
  misc_feature (9)..(9): n is a, c, g, or u
nuaggauanaaucuagc

SEQ ID NO: 126246 - RNA, 17 nt, Artificial Sequence
  Synthetic
uuuguccugguuaucgc

SEQ ID NO: 126247 - RNA, 17 nt, Artificial Sequence
  Synthetic
  misc_feature (11)..(11): n is a, c, g, or u
ccaacuggauncuucgc

SEQ ID NO: 126248 - RNA, 17 nt, Artificial Sequence
  Synthetic
cauacucuuuggaaggc

SEQ ID NO: 126249 - RNA, 17 nt, Artificial Sequence
  Synthetic
cugcucguguuacaggc

SEQ ID NO: 126250 - RNA, 17 nt, Artificial Sequence
  Synthetic
ugccgauugguggaggc

SEQ ID NO: 126251 - RNA, 17 nt, Artificial Sequence
  Synthetic
uuugguggucuauaggc

SEQ ID NO: 126252 - RNA, 17 nt, Artificial Sequence
  Synthetic
uauguaagaccuugggc

SEQ ID NO: 126253 - RNA, 17 nt, Artificial Sequence
  Synthetic
  misc_feature (15)..(15): n is a, c, g, or u
uacaaaggcauuaangc

SEQ ID NO: 126254 - RNA, 17 nt, Artificial Sequence
  Synthetic
  misc_feature (12)..(12): n is a, c, g, or u
acuagaucccungaugc

SEQ ID NO: 126255 - RNA, 17 nt, Artificial Sequence
  Synthetic
ugugccuucucaucugc

SEQ ID NO: 126256 - RNA, 17 nt, Artificial Sequence
  Synthetic
uugagcaggagucgugc

SEQ ID NO: 126257 - RNA, 17 nt, Artificial Sequence
  Synthetic
  misc_feature (14)..(14): n is a, c, g, or u
  misc_feature (16)..(16): n is a, c, g, or u
uucuccauguucgncnc

SEQ ID NO: 126258 - RNA, 17 nt, Artificial Sequence
  Synthetic
auggagaacaucacauc

SEQ ID NO: 126259 - RNA, 17 nt, Artificial Sequence
  Synthetic
  misc_feature (12)..(12): n is a, c, g, or u
ugauuaacuacnugauc

SEQ ID NO: 126260 - RNA, 17 nt, Artificial Sequence
  Synthetic
  misc_feature (11)..(11): n is a, c, g, or u
cucaccauacngcacuc

SEQ ID NO: 126261 - RNA, 17 nt, Artificial Sequence
  Synthetic
  misc_feature (7)..(7): n is a, c, g, or u
auacagnccccugacuc

SEQ ID NO: 126262 - RNA, 17 nt, Artificial Sequence
  Synthetic
uuugggguggagcccuc

SEQ ID NO: 126263 - RNA, 17 nt, Artificial Sequence
  Synthetic
  misc_feature (13)..(13): n is a, c, g, or u
uucuguucccaanccuc

SEQ ID NO: 126264 - RNA, 17 nt, Artificial Sequence
  Synthetic
aagagacagucauccuc

SEQ ID NO: 126265 - RNA, 17 nt, Artificial Sequence
  Synthetic
ugaggugagcaaugcuc

SEQ ID NO: 126266 - RNA, 17 nt, Artificial Sequence
  Synthetic
cagaagaucucaaucuc

SEQ ID NO: 126267 - RNA, 17 nt, Artificial Sequence
  Synthetic
  misc_feature (5)..(5): n is a, c, g, or u
ugcangaucccagaguc

SEQ ID NO: 126268 - RNA, 17 nt, Artificial Sequence
  Synthetic
aguauguaaauaauguc

SEQ ID NO: 126269 - RNA, 17 nt, Artificial Sequence
  Synthetic
uaggagugggagcauuc

SEQ ID NO: 126270 - RNA, 17 nt, Artificial Sequence
  Synthetic
uaucuuaucaacacuuc

SEQ ID NO: 126271 - RNA, 17 nt, Artificial Sequence
  Synthetic
cuucuuauugguucuuc

SEQ ID NO: 126272 - RNA, 17 nt, Artificial Sequence
  Synthetic
cuaacaacaguaguuuc

SEQ ID NO: 126273 - RNA, 17 nt, Artificial Sequence
  Synthetic
  misc_feature (1)..(1): n is a, c, g, or u
nacggcagacggagaag

SEQ ID NO: 126274 - RNA, 17 nt, Artificial Sequence
  Synthetic
auagcagcaggaugaag

SEQ ID NO: 126275 - RNA, 17 nt, Artificial Sequence
  Synthetic
  misc_feature (5)..(5): n is a, c, g, or u
cuggnauucuauauaag

SEQ ID NO: 126276 - RNA, 17 nt, Artificial Sequence
  Synthetic
  misc_feature (2)..(2): n is a, c, g, or u
ancugaaagccaaacag

SEQ ID NO: 126277 - RNA, 17 nt, Artificial Sequence
  Synthetic
aagaaaauugguaacag

SEQ ID NO: 126278 - RNA, 17 nt, Artificial Sequence
  Synthetic
ucgggaaagaaucccag

SEQ ID NO: 126279 - RNA, 17 nt, Artificial Sequence
  Synthetic
  misc_feature (1)..(1): n is a, c, g, or u
ngccaagccccagccag

SEQ ID NO: 126280 - RNA, 17 nt, Artificial Sequence
  Synthetic
aagagaugauuaggcag

SEQ ID NO: 126281 - RNA, 17 nt, Artificial Sequence
  Synthetic
auccucaggccaugcag

SEQ ID NO: 126282 - RNA, 17 nt, Artificial Sequence
  Synthetic
cuccaugcaacgugcag

SEQ ID NO: 126283 - RNA, 17 nt, Artificial Sequence
  Synthetic
  misc_feature (3)..(3): n is a, c, g, or u
cangaucccagagucag

SEQ ID NO: 126284 - RNA, 17 nt, Artificial Sequence
  Synthetic
uagugccauuuguucag

SEQ ID NO: 126285 - RNA, 17 nt, Artificial Sequence
  Synthetic
agccaaccagguaggag

SEQ ID NO: 126286 - RNA, 17 nt, Artificial Sequence
  Synthetic
caaaauaccuaugggag

SEQ ID NO: 126287 - RNA, 17 nt, Artificial Sequence
  Synthetic
  misc_feature (14)..(14): n is a, c, g, or u
ccaagcggccccgngag

SEQ ID NO: 126288 - RNA, 17 nt, Artificial Sequence
  Synthetic
uuuucauuuacagugag

SEQ ID NO: 126289 - RNA, 17 nt, Artificial Sequence
  Synthetic
  misc_feature (15)..(15): n is a, c, g, or u
cuuggaggcuugaanag

SEQ ID NO: 126290 - RNA, 17 nt, Artificial Sequence
  Synthetic
aaguguugauaagauag

SEQ ID NO: 126291 - RNA, 17 nt, Artificial Sequence
  Synthetic
uucucucaauuuucuag

SEQ ID NO: 126292 - RNA, 17 nt, Artificial Sequence
  Synthetic
  misc_feature (4)..(4): n is a, c, g, or u
  misc_feature (7)..(8): n is a, c, g, or u
cgunccnnccgaccacg

SEQ ID NO: 126293 - RNA, 17 nt, Artificial Sequence
  Synthetic
augagaaggcacagacg

SEQ ID NO: 126294 - RNA, 17 nt, Artificial Sequence
  Synthetic
  misc_feature (4)..(4): n is a, c, g, or u
ccgngaggggucguccg

SEQ ID NO: 126295 - RNA, 17 nt, Artificial Sequence
  Synthetic
ugcucguguuacaggcg

SEQ ID NO: 126296 - RNA, 17 nt, Artificial Sequence
  Synthetic
  misc_feature (4)..(4): n is a, c, g, or u
ucuncgucugcgaggcg

SEQ ID NO: 126297 - RNA, 17 nt, Artificial Sequence
  Synthetic
  misc_feature (9)..(9): n is a, c, g, or u
ugagaucuncgucugcg

SEQ ID NO: 126298 - RNA, 17 nt, Artificial Sequence
  Synthetic
  misc_feature (15)..(15): n is a, c, g, or u
ucucgucaaucuccncg

SEQ ID NO: 126299 - RNA, 17 nt, Artificial Sequence
  Synthetic
aggguccccaguccucg

SEQ ID NO: 126300 - RNA, 17 nt, Artificial Sequence
  Synthetic
uccuuggacucauaagg

SEQ ID NO: 126301 - RNA, 17 nt, Artificial Sequence
  Synthetic
acaaauuggaggacagg

SEQ ID NO: 126302 - RNA, 17 nt, Artificial Sequence
  Synthetic
ccugcucguguuacagg

SEQ ID NO: 126303 - RNA, 17 nt, Artificial Sequence
  Synthetic
cgauugguggaggcagg

SEQ ID NO: 126304 - RNA, 17 nt, Artificial Sequence
  Synthetic
ugacugucucuuagagg

SEQ ID NO: 126305 - RNA, 17 nt, Artificial Sequence
  Synthetic
uugguggaggcaggagg

SEQ ID NO: 126306 - RNA, 17 nt, Artificial Sequence
  Synthetic
ucucucaauuuucuagg

SEQ ID NO: 126307 - RNA, 17 nt, Artificial Sequence
  Synthetic
  misc_feature (2)..(2): n is a, c, g, or u
  misc_feature (4)..(4): n is a, c, g, or u
angnucuuuguauuagg

SEQ ID NO: 126308 - RNA, 17 nt, Artificial Sequence
  Synthetic
  misc_feature (1)..(1): n is a, c, g, or u
  misc_feature (6)..(6): n is a, c, g, or u
  misc_feature (9)..(9): n is a, c, g, or u
nucacnccnccacacgg

SEQ ID NO: 126309 - RNA, 17 nt, Artificial Sequence
  Synthetic
  misc_feature (11)..(11): n is a, c, g, or u
cugggaggagnuggggg

SEQ ID NO: 126310 - RNA, 17 nt, Artificial Sequence
  Synthetic
  misc_feature (5)..(5): n is a, c, g, or u
  misc_feature (9)..(9): n is a, c, g, or u
acggnggunuuuugggg

SEQ ID NO: 126311 - RNA, 17 nt, Artificial Sequence
  Synthetic
  misc_feature (11)..(11): n is a, c, g, or u
aagagcuacancauggg

SEQ ID NO: 126312 - RNA, 17 nt, Artificial Sequence
  Synthetic
  misc_feature (10)..(10): n is a, c, g, or u
uguguuuaangacuggg

SEQ ID NO: 126313 - RNA, 17 nt, Artificial Sequence
  Synthetic
agccauucucugcuggg

SEQ ID NO: 126314 - RNA, 17 nt, Artificial Sequence
  Synthetic
cuguauuuuccugcugg

SEQ ID NO: 126315 - RNA, 17 nt, Artificial Sequence
  Synthetic
aagccauucucugcugg

SEQ ID NO: 126316 - RNA, 17 nt, Artificial Sequence
  Synthetic
ugaaagccaaacagugg

SEQ ID NO: 126317 - RNA, 17 nt, Artificial Sequence
  Synthetic
caagccccagccagugg

SEQ ID NO: 126318 - RNA, 17 nt, Artificial Sequence
  Synthetic
  misc_feature (5)..(5): n is a, c, g, or u
  misc_feature (9)..(9): n is a, c, g, or u
aaaanaccnccgugugg

SEQ ID NO: 126319 - RNA, 17 nt, Artificial Sequence
  Synthetic
  misc_feature (1)..(1): n is a, c, g, or u
  misc_feature (14)..(14): n is a, c, g, or u
ngacugggaggagnugg

SEQ ID NO: 126320 - RNA, 17 nt, Artificial Sequence
  Synthetic
uaaccaggacaaauugg

SEQ ID NO: 126321 - RNA, 17 nt, Artificial Sequence
  Synthetic
uccugacugccgauugg

SEQ ID NO: 126322 - RNA, 17 nt, Artificial Sequence
  Synthetic
  misc_feature (1)..(1): n is a, c, g, or u
nccaaggcacagcuugg

SEQ ID NO: 126323 - RNA, 17 nt, Artificial Sequence
  Synthetic
aagauaggggcauuugg

SEQ ID NO: 126324 - RNA, 17 nt, Artificial Sequence
  Synthetic
  misc_feature (13)..(13): n is a, c, g, or u
  misc_feature (16)..(16): n is a, c, g, or u
agcuugguggaangcng

SEQ ID NO: 126325 - RNA, 17 nt, Artificial Sequence
  Synthetic
  misc_feature (16)..(16): n is a, c, g, or u
ucccaagcggccccgng

SEQ ID NO: 126326 - RNA, 17 nt, Artificial Sequence
  Synthetic
uuuuguacagcaacaug

SEQ ID NO: 126327 - RNA, 17 nt, Artificial Sequence
  Synthetic
aaccucgcaaaggcaug

SEQ ID NO: 126328 - RNA, 17 nt, Artificial Sequence
  Synthetic
  misc_feature (12)..(12): n is a, c, g, or u
aacaaaacaaanagaug

SEQ ID NO: 126329 - RNA, 17 nt, Artificial Sequence
  Synthetic
  misc_feature (4)..(4): n is a, c, g, or u
cagnuauauggaugaug

SEQ ID NO: 126330 - RNA, 17 nt, Artificial Sequence
  Synthetic
  misc_feature (8)..(8): n is a, c, g, or u
aaucuccncgaggacug

SEQ ID NO: 126331 - RNA, 17 nt, Artificial Sequence
  Synthetic
  misc_feature (4)..(4): n is a, c, g, or u
ccangagaaacggacug

SEQ ID NO: 126332 - RNA, 17 nt, Artificial Sequence
  Synthetic
agaauuuggagcuacug

SEQ ID NO: 126333 - RNA, 17 nt, Artificial Sequence
  Synthetic
aauaugcccugagccug

SEQ ID NO: 126334 - RNA, 17 nt, Artificial Sequence
  Synthetic
uuccacugcauggccug

SEQ ID NO: 126335 - RNA, 17 nt, Artificial Sequence
  Synthetic
  misc_feature (4)..(4): n is a, c, g, or u
uucncgauacagagcug

SEQ ID NO: 126336 - RNA, 17 nt, Artificial Sequence
  Synthetic
caagccauucucugcug

SEQ ID NO: 126337 - RNA, 17 nt, Artificial Sequence
  Synthetic
aucgcuggaugugucug

SEQ ID NO: 126338 - RNA, 17 nt, Artificial Sequence
  Synthetic
cugaaagccaaacagug

SEQ ID NO: 126339 - RNA, 17 nt, Artificial Sequence
  Synthetic
ccaagccccagccagug

SEQ ID NO: 126340 - RNA, 17 nt, Artificial Sequence
  Synthetic
uggucucuuucggagug

SEQ ID NO: 126341 - RNA, 17 nt, Artificial Sequence
  Synthetic
  misc_feature (8)..(8): n is a, c, g, or u
  misc_feature (12)..(12): n is a, c, g, or u
cccaaaanaccnccgug

SEQ ID NO: 126342 - RNA, 17 nt, Artificial Sequence
  Synthetic
  misc_feature (9)..(9): n is a, c, g, or u
cugagugcnguauggug

SEQ ID NO: 126343 - RNA, 17 nt, Artificial Sequence
  Synthetic
  misc_feature (15)..(15): n is a, c, g, or u
uguacaauaugaucnug

SEQ ID NO: 126344 - RNA, 17 nt, Artificial Sequence
  Synthetic
  misc_feature (2)..(2): n is a, c, g, or u
  misc_feature (15)..(15): n is a, c, g, or u
angacugggaggagnug

SEQ ID NO: 126345 - RNA, 17 nt, Artificial Sequence
  Synthetic
  misc_feature (13)..(13): n is a, c, g, or u
aguaugucaaagnauug

SEQ ID NO: 126346 - RNA, 17 nt, Artificial Sequence
  Synthetic
  misc_feature (2)..(2): n is a, c, g, or u
  misc_feature (5)..(5): n is a, c, g, or u
anaunaggcaacuauug

SEQ ID NO: 126347 - RNA, 17 nt, Artificial Sequence
  Synthetic
uggaugaugugguauug

SEQ ID NO: 126348 - RNA, 17 nt, Artificial Sequence
  Synthetic
  misc_feature (3)..(4): n is a, c, g, or u
uannuaauuggaaguug

SEQ ID NO: 126349 - RNA, 17 nt, Artificial Sequence
  Synthetic
ugagugauuggagguug

SEQ ID NO: 126350 - RNA, 17 nt, Artificial Sequence
  Synthetic
caugcguggaaccuuug

SEQ ID NO: 126351 - RNA, 17 nt, Artificial Sequence
  Synthetic
  misc_feature (9)..(9): n is a, c, g, or u
ugccuuggnuggcuuug

SEQ ID NO: 126352 - RNA, 17 nt, Artificial Sequence
  Synthetic
  misc_feature (8)..(8): n is a, c, g, or u
  misc_feature (12)..(12): n is a, c, g, or u
cacacggnggunuuuug

SEQ ID NO: 126353 - RNA, 17 nt, Artificial Sequence
  Synthetic
  misc_feature (14)..(14): n is a, c, g, or u
  misc_feature (17)..(17): n is a, c, g, or u
auguauauuuccgngan

SEQ ID NO: 126354 - RNA, 17 nt, Artificial Sequence
  Synthetic
  misc_feature (6)..(6): n is a, c, g, or u
  misc_feature (17)..(17): n is a, c, g, or u
uuaaunccuuugucuan

SEQ ID NO: 126355 - RNA, 17 nt, Artificial Sequence
  Synthetic
  misc_feature (11)..(11): n is a, c, g, or u
  misc_feature (14)..(14): n is a, c, g, or u
  misc_feature (17)..(17): n is a, c, g, or u
aggugggaaanuunacn

SEQ ID NO: 126356 - RNA, 17 nt, Artificial Sequence
  Synthetic
  misc_feature (17)..(17): n is a, c, g, or u
accuuuaccccguugcn

SEQ ID NO: 126357 - RNA, 17 nt, Artificial Sequence
  Synthetic
  misc_feature (3)..(3): n is a, c, g, or u
  misc_feature (17)..(17): n is a, c, g, or u
ugnaagauccagcaucn

SEQ ID NO: 126358 - RNA, 17 nt, Artificial Sequence
  Synthetic
  misc_feature (17)..(17): n is a, c, g, or u
ccgcggacgaccccucn

SEQ ID NO: 126359 - RNA, 17 nt, Artificial Sequence
  Synthetic
  misc_feature (17)..(17): n is a, c, g, or u
ccucaguccguuucucn

SEQ ID NO: 126360 - RNA, 17 nt, Artificial Sequence
  Synthetic
  misc_feature (14)..(14): n is a, c, g, or u
  misc_feature (17)..(17): n is a, c, g, or u
uucccaucccaucnucn

SEQ ID NO: 126361 - RNA, 17 nt, Artificial Sequence
  Synthetic
  misc_feature (14)..(14): n is a, c, g, or u
  misc_feature (17)..(17): n is a, c, g, or u
auucugucguccunucn

SEQ ID NO: 126362 - RNA, 17 nt, Artificial Sequence
  Synthetic
  misc_feature (4)..(4): n is a, c, g, or u
  misc_feature (17)..(17): n is a, c, g, or u
uaangacugggaggagn

SEQ ID NO: 126363 - RNA, 17 nt, Artificial Sequence
  Synthetic
  misc_feature (17)..(17): n is a, c, g, or u
ugcgccccguggucggn

SEQ ID NO: 126364 - RNA, 17 nt, Artificial Sequence
  Synthetic
  misc_feature (17)..(17): n is a, c, g, or u
ccaagcugugccuuggn

SEQ ID NO: 126365 - RNA, 17 nt, Artificial Sequence
  Synthetic
  misc_feature (14)..(14): n is a, c, g, or u
  misc_feature (17)..(17): n is a, c, g, or u
aaaaaguugcaugnugn

SEQ ID NO: 126366 - RNA, 17 nt, Artificial Sequence
  Synthetic
  misc_feature (16)..(17): n is a, c, g, or u
ccuaccugguuggcunn

SEQ ID NO: 126367 - RNA, 17 nt, Artificial Sequence
  Synthetic
  misc_feature (8)..(9): n is a, c, g, or u
  misc_feature (14)..(14): n is a, c, g, or u
  misc_feature (17)..(17): n is a, c, g, or u
acaugggnnuaaanaun

SEQ ID NO: 126368 - RNA, 17 nt, Artificial Sequence
  Synthetic
  misc_feature (17)..(17): n is a, c, g, or u
caauuuucuuuugucun

SEQ ID NO: 126369 - RNA, 17 nt, Artificial Sequence
  Synthetic
  misc_feature (3)..(3): n is a, c, g, or u
canagacaaaagaaaau

SEQ ID NO: 126370 - RNA, 17 nt, Artificial Sequence
  Synthetic
  misc_feature (13)..(13): n is a, c, g, or u
aggcuguaggcanaaau

SEQ ID NO: 126371 - RNA, 17 nt, Artificial Sequence
  Synthetic
cuccugccuccaccaau

SEQ ID NO: 126372 - RNA, 17 nt, Artificial Sequence
  Synthetic
cauacuuuccaaucaau

SEQ ID NO: 126373 - RNA, 17 nt, Artificial Sequence
  Synthetic
  misc_feature (9)..(9): n is a, c, g, or u
  misc_feature (12)..(13): n is a, c, g, or u
uucaugggnuannuaau

SEQ ID NO: 126374 - RNA, 17 nt, Artificial Sequence
  Synthetic
  misc_feature (2)..(2): n is a, c, g, or u
  misc_feature (5)..(5): n is a, c, g, or u
angangacauuauuaau

SEQ ID NO: 126375 - RNA, 17 nt, Artificial Sequence
  Synthetic
uauguuaauacuaacau

SEQ ID NO: 126376 - RNA, 17 nt, Artificial Sequence
  Synthetic
cugaggcccacucccau

SEQ ID NO: 126377 - RNA, 17 nt, Artificial Sequence
  Synthetic
  misc_feature (14)..(14): n is a, c, g, or u
aacaagagcuacancau

SEQ ID NO: 126378 - RNA, 17 nt, Artificial Sequence
  Synthetic
  misc_feature (12)..(12): n is a, c, g, or u
ucuggagcaaancucau

SEQ ID NO: 126379 - RNA, 17 nt, Artificial Sequence
  Synthetic
  misc_feature (12)..(12): n is a, c, g, or u
uauucccuaaanuucau

SEQ ID NO: 126380 - RNA, 17 nt, Artificial Sequence
  Synthetic
cauucaggauuaaagau

SEQ ID NO: 126381 - RNA, 17 nt, Artificial Sequence
  Synthetic
  misc_feature (2)..(2): n is a, c, g, or u
anucaaacaauccagau

SEQ ID NO: 126382 - RNA, 17 nt, Artificial Sequence
  Synthetic
cuuagagguggagagau

SEQ ID NO: 126383 - RNA, 17 nt, Artificial Sequence
  Synthetic
  misc_feature (13)..(13): n is a, c, g, or u
uaacaaaacaaanagau

SEQ ID NO: 126384 - RNA, 17 nt, Artificial Sequence
  Synthetic
ccuuccugacugccgau

SEQ ID NO: 126385 - RNA, 17 nt, Artificial Sequence
  Synthetic
  misc_feature (11)..(11): n is a, c, g, or u
  misc_feature (14)..(14): n is a, c, g, or u
cgaaagcccangangau

SEQ ID NO: 126386 - RNA, 17 nt, Artificial Sequence
  Synthetic
cuugggcaggaucugau

SEQ ID NO: 126387 - RNA, 17 nt, Artificial Sequence
  Synthetic
  misc_feature (2)..(2): n is a, c, g, or u
  misc_feature (5)..(6): n is a, c, g, or u
  misc_feature (8)..(8): n is a, c, g, or u
unaanngnccuauugau

SEQ ID NO: 126388 - RNA, 17 nt, Artificial Sequence
  Synthetic
uuucgcaaaauaccuau

SEQ ID NO: 126389 - RNA, 17 nt, Artificial Sequence
  Synthetic
uauggaugaugugguau

SEQ ID NO: 126390 - RNA, 17 nt, Artificial Sequence
  Synthetic
augccucaucuucuuau

SEQ ID NO: 126391 - RNA, 17 nt, Artificial Sequence
  Synthetic
  misc_feature (2)..(2): n is a, c, g, or u
  misc_feature (7)..(7): n is a, c, g, or u
angaugnuguacagacu

SEQ ID NO: 126392 - RNA, 17 nt, Artificial Sequence
  Synthetic
  misc_feature (9)..(9): n is a, c, g, or u
caaucuccncgaggacu

SEQ ID NO: 126393 - RNA, 17 nt, Artificial Sequence
  Synthetic
  misc_feature (13)..(13): n is a, c, g, or u
cuguguguuuaangacu

SEQ ID NO: 126394 - RNA, 17 nt, Artificial Sequence
  Synthetic
ccucuuauguaagaccu

SEQ ID NO: 126395 - RNA, 17 nt, Artificial Sequence
  Synthetic
  misc_feature (1)..(1): n is a, c, g, or u
naugacucuagcuaccu

SEQ ID NO: 126396 - RNA, 17 nt, Artificial Sequence
  Synthetic
uucuaggggaccugccu

SEQ ID NO: 126397 - RNA, 17 nt, Artificial Sequence
  Synthetic
acacgagcagggguccu

SEQ ID NO: 126398 - RNA, 17 nt, Artificial Sequence
  Synthetic
aucacaucaggauuccu

SEQ ID NO: 126399 - RNA, 17 nt, Artificial Sequence
  Synthetic
ucaauguuaguauuccu

SEQ ID NO: 126400 - RNA, 17 nt, Artificial Sequence
  Synthetic
  misc_feature (4)..(4): n is a, c, g, or u
ccanccaaggcacagcu

SEQ ID NO: 126401 - RNA, 17 nt, Artificial Sequence
  Synthetic
  misc_feature (8)..(8): n is a, c, g, or u
ugggaucnugcagagcu

SEQ ID NO: 126402 - RNA, 17 nt, Artificial Sequence
  Synthetic
  misc_feature (7)..(7): n is a, c, g, or u
ccccucncggggccgcu

SEQ ID NO: 126403 - RNA, 17 nt, Artificial Sequence
  Synthetic
ccccacuggcuggggcu

SEQ ID NO: 126404 - RNA, 17 nt, Artificial Sequence
  Synthetic
cgcaacccccacuggcu

SEQ ID NO: 126405 - RNA, 17 nt, Artificial Sequence
  Synthetic
  misc_feature (3)..(3): n is a, c, g, or u
ucnuuuccauggcugcu

SEQ ID NO: 126406 - RNA, 17 nt, Artificial Sequence
  Synthetic
uuacauaagaggacucu

SEQ ID NO: 126407 - RNA, 17 nt, Artificial Sequence
  Synthetic
  misc_feature (6)..(6): n is a, c, g, or u
uacagnccccugacucu

SEQ ID NO: 126408 - RNA, 17 nt, Artificial Sequence
  Synthetic
  misc_feature (12)..(12): n is a, c, g, or u
ucuguucccaanccucu

SEQ ID NO: 126409 - RNA, 17 nt, Artificial Sequence
  Synthetic
acuucucucaauuuucu

SEQ ID NO: 126410 - RNA, 17 nt, Artificial Sequence
  Synthetic
cacacagucuuugaagu

SEQ ID NO: 126411 - RNA, 17 nt, Artificial Sequence
  Synthetic
agaaaggccuuguaagu

SEQ ID NO: 126412 - RNA, 17 nt, Artificial Sequence
  Synthetic
  misc_feature (1)..(1): n is a, c, g, or u
ncugaaagccaaacagu

SEQ ID NO: 126413 - RNA, 17 nt, Artificial Sequence
  Synthetic
cuuucccgaucaucagu

SEQ ID NO: 126414 - RNA, 17 nt, Artificial Sequence
  Synthetic
aaaauaccuaugggagu

SEQ ID NO: 126415 - RNA, 17 nt, Artificial Sequence
  Synthetic
  misc_feature (14)..(14): n is a, c, g, or u
uuggaggcuugaanagu

SEQ ID NO: 126416 - RNA, 17 nt, Artificial Sequence
  Synthetic
uuuguucagugguucgu

SEQ ID NO: 126417 - RNA, 17 nt, Artificial Sequence
  Synthetic
ccuuggacucauaaggu

SEQ ID NO: 126418 - RNA, 17 nt, Artificial Sequence
  Synthetic
  misc_feature (4)..(5): n is a, c, g, or u
ccannagccaaccaggu

SEQ ID NO: 126419 - RNA, 17 nt, Artificial Sequence
  Synthetic
auuggaggacaggaggu

SEQ ID NO: 126420 - RNA, 17 nt, Artificial Sequence
  Synthetic
acucuagcuaccugggu

SEQ ID NO: 126421 - RNA, 17 nt, Artificial Sequence
  Synthetic
ucccacuccuaccuggu

SEQ ID NO: 126422 - RNA, 17 nt, Artificial Sequence
  Synthetic
uuguauuaggaggcugu

SEQ ID NO: 126423 - RNA, 17 nt, Artificial Sequence
  Synthetic
  misc_feature (9)..(9): n is a, c, g, or u
aggugucancaauuugu

SEQ ID NO: 126424 - RNA, 17 nt, Artificial Sequence
  Synthetic
  misc_feature (16)..(16): n is a, c, g, or u
aucuggauuguuuganu

SEQ ID NO: 126425 - RNA, 17 nt, Artificial Sequence
  Synthetic
  misc_feature (13)..(13): n is a, c, g, or u
  misc_feature (16)..(16): n is a, c, g, or u
ucccaucccaucnucnu

SEQ ID NO: 126426 - RNA, 17 nt, Artificial Sequence
  Synthetic
  misc_feature (3)..(3): n is a, c, g, or u
  misc_feature (16)..(16): n is a, c, g, or u
aangacugggaggagnu

SEQ ID NO: 126427 - RNA, 17 nt, Artificial Sequence
  Synthetic
  misc_feature (16)..(16): n is a, c, g, or u
aaagaaucccagaggnu

SEQ ID NO: 126428 - RNA, 17 nt, Artificial Sequence
  Synthetic
  misc_feature (13)..(14): n is a, c, g, or u
  misc_feature (16)..(16): n is a, c, g, or u
aaauauuuagugnngnu

SEQ ID NO: 126429 - RNA, 17 nt, Artificial Sequence
  Synthetic
  misc_feature (16)..(16): n is a, c, g, or u
aauuuucuuuugucunu

SEQ ID NO: 126430 - RNA, 17 nt, Artificial Sequence
  Synthetic
caguuggacccugcauu

SEQ ID NO: 126431 - RNA, 17 nt, Artificial Sequence
  Synthetic
  misc_feature (1)..(1): n is a, c, g, or u
nucaaacaauccagauu

SEQ ID NO: 126432 - RNA, 17 nt, Artificial Sequence
  Synthetic
  misc_feature (3)..(3): n is a, c, g, or u
agnugggggaggagauu

SEQ ID NO: 126433 - RNA, 17 nt, Artificial Sequence
  Synthetic
  misc_feature (4)..(4): n is a, c, g, or u
augnacaagagaugauu

SEQ ID NO: 126434 - RNA, 17 nt, Artificial Sequence
  Synthetic
augugagaggcaauauu

SEQ ID NO: 126435 - RNA, 17 nt, Artificial Sequence
  Synthetic
auggaugaugugguauu

SEQ ID NO: 126436 - RNA, 17 nt, Artificial Sequence
  Synthetic
  misc_feature (5)..(5): n is a, c, g, or u
  misc_feature (7)..(7): n is a, c, g, or u
uuaangnucuuuguauu

SEQ ID NO: 126437 - RNA, 17 nt, Artificial Sequence
  Synthetic
  misc_feature (1)..(1): n is a, c, g, or u
  misc_feature (7)..(7): n is a, c, g, or u
  misc_feature (13)..(13): n is a, c, g, or u
nacuguncuuganuauu

SEQ ID NO: 126438 - RNA, 17 nt, Artificial Sequence
  Synthetic
cucuuauguaagaccuu

SEQ ID NO: 126439 - RNA, 17 nt, Artificial Sequence
  Synthetic
  misc_feature (6)..(6): n is a, c, g, or u
cccucncggggccgcuu

SEQ ID NO: 126440 - RNA, 17 nt, Artificial Sequence
  Synthetic
  misc_feature (11)..(11): n is a, c, g, or u
ugugccuuggnuggcuu

SEQ ID NO: 126441 - RNA, 17 nt, Artificial Sequence
  Synthetic
auuauuuacauacucuu

SEQ ID NO: 126442 - RNA, 17 nt, Artificial Sequence
  Synthetic
  misc_feature (1)..(1): n is a, c, g, or u
  misc_feature (4)..(5): n is a, c, g, or u
nuannuaauuggaaguu

SEQ ID NO: 126443 - RNA, 17 nt, Artificial Sequence
  Synthetic
  misc_feature (6)..(6): n is a, c, g, or u
caucunuuuguuuuguu

SEQ ID NO: 126444 - RNA, 17 nt, Artificial Sequence
  Synthetic
  misc_feature (15)..(15): n is a, c, g, or u
aagaaucccagaggnuu

SEQ ID NO: 126445 - RNA, 17 nt, Artificial Sequence
  Synthetic
  misc_feature (3)..(3): n is a, c, g, or u
  misc_feature (15)..(15): n is a, c, g, or u
ucnuguaaaugaaunuu

SEQ ID NO: 126446 - RNA, 17 nt, Artificial Sequence
  Synthetic
uuggggacugcgaauuu

SEQ ID NO: 126447 - RNA, 17 nt, Artificial Sequence
  Synthetic
  misc_feature (3)..(3): n is a, c, g, or u
aunucuugccuuacuuu

SEQ ID NO: 126448 - RNA, 17 nt, Artificial Sequence
  Synthetic
  misc_feature (4)..(4): n is a, c, g, or u
aagnauugugggucuuu

SEQ ID NO: 126449 - RNA, 17 nt, Artificial Sequence
  Synthetic
  misc_feature (1)..(2): n is a, c, g, or u
  misc_feature (5)..(5): n is a, c, g, or u
  misc_feature (14)..(14): n is a, c, g, or u
nnuancccaugaanuuu

SEQ ID NO: 126450 - RNA, 17 nt, Artificial Sequence
  Synthetic
  misc_feature (1)..(1): n is a, c, g, or u
  misc_feature (10)..(10): n is a, c, g, or u
  misc_feature (14)..(14): n is a, c, g, or u
nccacacggnggunuuu

SEQ ID NO: 126451 - RNA, 17 nt, Artificial Sequence
  Synthetic
  misc_feature (3)..(3): n is a, c, g, or u
agnauugugggucuuuu

SEQ ID NO: 126452 - RNA, 17 nt, Artificial Sequence
  Synthetic
  misc_feature (9)..(9): n is a, c, g, or u
  misc_feature (13)..(13): n is a, c, g, or u
ccacacggnggunuuuu

SEQ ID NO: 126453 - RNA, 20 nt, Artificial Sequence
  Synthetic
uccuggaauuagaggacaaa

SEQ ID NO: 126454 - RNA, 20 nt, Artificial Sequence
  Synthetic
  misc_feature (9)..(9): n is a, c, g, or u
  misc_feature (12)..(13): n is a, c, g, or u
aaauauuunccnnuagacaa

SEQ ID NO: 126455 - RNA, 20 nt, Artificial Sequence
  Synthetic
  misc_feature (14)..(14): n is a, c, g, or u
uuuaccccguugcncggcaa

SEQ ID NO: 126456 - RNA, 20 nt, Artificial Sequence
  Synthetic
  misc_feature (1)..(1): n is a, c, g, or u
naauuccccccagcagagaa

SEQ ID NO: 126457 - RNA, 20 nt, Artificial Sequence
  Synthetic
  misc_feature (1)..(2): n is a, c, g, or u
  misc_feature (5)..(5): n is a, c, g, or u
nnggnacggcagacggagaa

SEQ ID NO: 126458 - RNA, 20 nt, Artificial Sequence
  Synthetic
  misc_feature (4)..(4): n is a, c, g, or u
caunuacuguuuacuuagaa

SEQ ID NO: 126459 - RNA, 20 nt, Artificial Sequence
  Synthetic
  misc_feature (2)..(2): n is a, c, g, or u
unccuaucuuuaauccugaa

SEQ ID NO: 126460 - RNA, 20 nt, Artificial Sequence
  Synthetic
uagcuccaaauucuuuauaa

SEQ ID NO: 126461 - RNA, 20 nt, Artificial Sequence
  Synthetic
  misc_feature (12)..(12): n is a, c, g, or u
  misc_feature (14)..(14): n is a, c, g, or u
uggggacccugngncgaaca

SEQ ID NO: 126462 - RNA, 20 nt, Artificial Sequence
  Synthetic
caauuauguuaauacuaaca

SEQ ID NO: 126463 - RNA, 20 nt, Artificial Sequence
  Synthetic
cgaauuuuggccaagacaca

SEQ ID NO: 126464 - RNA, 20 nt, Artificial Sequence
  Synthetic
  misc_feature (7)..(7): n is a, c, g, or u
  misc_feature (12)..(12): n is a, c, g, or u
  misc_feature (15)..(15): n is a, c, g, or u
ccagggnucacnccnccaca

SEQ ID NO: 126465 - RNA, 20 nt, Artificial Sequence
  Synthetic
  misc_feature (1)..(1): n is a, c, g, or u
nacuuucucgccaacuuaca

SEQ ID NO: 126466 - RNA, 20 nt, Artificial Sequence
  Synthetic
  misc_feature (9)..(9): n is a, c, g, or u
  misc_feature (12)..(13): n is a, c, g, or u
ucugccgunccnnccgacca

SEQ ID NO: 126467 - RNA, 20 nt, Artificial Sequence
  Synthetic
cgcccaucagauccugccca

SEQ ID NO: 126468 - RNA, 20 nt, Artificial Sequence
  Synthetic
  misc_feature (17)..(17): n is a, c, g, or u
ccaugccccaaagccancca

SEQ ID NO: 126469 - RNA, 20 nt, Artificial Sequence
  Synthetic
uuucccaccuuaugagucca

SEQ ID NO: 126470 - RNA, 20 nt, Artificial Sequence
  Synthetic
aucaaaaccucgcaaaggca

SEQ ID NO: 126471 - RNA, 20 nt, Artificial Sequence
  Synthetic
  misc_feature (7)..(7): n is a, c, g, or u
ccuuggnuggcuuuggggca

SEQ ID NO: 126472 - RNA, 20 nt, Artificial Sequence
  Synthetic
  misc_feature (5)..(5): n is a, c, g, or u
uuganuuggcuccgaaugca

SEQ ID NO: 126473 - RNA, 20 nt, Artificial Sequence
  Synthetic
cuucaccucugcacguugca

SEQ ID NO: 126474 - RNA, 20 nt, Artificial Sequence
  Synthetic
  misc_feature (18)..(18): n is a, c, g, or u
ugggaacaagagcuacanca

SEQ ID NO: 126475 - RNA, 20 nt, Artificial Sequence
  Synthetic
  misc_feature (16)..(16): n is a, c, g, or u
  misc_feature (18)..(18): n is a, c, g, or u
uguucuccauguucgncnca

SEQ ID NO: 126476 - RNA, 20 nt, Artificial Sequence
  Synthetic
uugggacuucaaccccauca

SEQ ID NO: 126477 - RNA, 20 nt, Artificial Sequence
  Synthetic
uugguucuucuggauuauca

SEQ ID NO: 126478 - RNA, 20 nt, Artificial Sequence
  Synthetic
agucuuugaaguaggccuca

SEQ ID NO: 126479 - RNA, 20 nt, Artificial Sequence
  Synthetic
accugcacgacuccugcuca

SEQ ID NO: 126480 - RNA, 20 nt, Artificial Sequence
  Synthetic
  misc_feature (7)..(7): n is a, c, g, or u
ucugcangaucccagaguca

SEQ ID NO: 126481 - RNA, 20 nt, Artificial Sequence
  Synthetic
caggaucugaugggcguuca

SEQ ID NO: 126482 - RNA, 20 nt, Artificial Sequence
  Synthetic
  misc_feature (8)..(9): n is a, c, g, or u
  misc_feature (12)..(12): n is a, c, g, or u
uggucggnnggnacggcaga

SEQ ID NO: 126483 - RNA, 20 nt, Artificial Sequence
  Synthetic
acggaaggaaagaagucaga

SEQ ID NO: 126484 - RNA, 20 nt, Artificial Sequence
  Synthetic
  misc_feature (2)..(2): n is a, c, g, or u
unuuuucauuuacagugaga

SEQ ID NO: 126485 - RNA, 20 nt, Artificial Sequence
  Synthetic
  misc_feature (17)..(17): n is a, c, g, or u
acccuaacaaaacaaanaga

SEQ ID NO: 126486 - RNA, 20 nt, Artificial Sequence
  Synthetic
ccaccaaucggcagucagga

SEQ ID NO: 126487 - RNA, 20 nt, Artificial Sequence
  Synthetic
  misc_feature (3)..(3): n is a, c, g, or u
  misc_feature (6)..(6): n is a, c, g, or u
  misc_feature (12)..(12): n is a, c, g, or u
  misc_feature (14)..(14): n is a, c, g, or u
ucnagnagaucncngacgga

SEQ ID NO: 126488 - RNA, 20 nt, Artificial Sequence
  Synthetic
uuauuuacauacucuuugga

SEQ ID NO: 126489 - RNA, 20 nt, Artificial Sequence
  Synthetic
  misc_feature (9)..(9): n is a, c, g, or u
  misc_feature (18)..(18): n is a, c, g, or u
aaaugaaunuuaggaaanga

SEQ ID NO: 126490 - RNA, 20 nt, Artificial Sequence
  Synthetic
  misc_feature (15)..(15): n is a, c, g, or u
  misc_feature (18)..(18): n is a, c, g, or u
uuugcgaaagcccanganga

SEQ ID NO: 126491 - RNA, 20 nt, Artificial Sequence
  Synthetic
  misc_feature (1)..(1): n is a, c, g, or u
  misc_feature (4)..(4): n is a, c, g, or u
  misc_feature (7)..(7): n is a, c, g, or u
  misc_feature (10)..(10): n is a, c, g, or u
  misc_feature (16)..(16): n is a, c, g, or u
  misc_feature (18)..(18): n is a, c, g, or u
ngunucnagnagaucncnga

SEQ ID NO: 126492 - RNA, 20 nt, Artificial Sequence
  Synthetic
  misc_feature (18)..(18): n is a, c, g, or u
agucccaagcggccccgnga

SEQ ID NO: 126493 - RNA, 20 nt, Artificial Sequence
  Synthetic
  misc_feature (1)..(1): n is a, c, g, or u
ncaauaugcccugagccuga

SEQ ID NO: 126494 - RNA, 20 nt, Artificial Sequence
  Synthetic
agaccuugggcaggaucuga

SEQ ID NO: 126495 - RNA, 20 nt, Artificial Sequence
  Synthetic
  misc_feature (2)..(3): n is a, c, g, or u
unnuggccagugguccuuga

SEQ ID NO: 126496 - RNA, 20 nt, Artificial Sequence
  Synthetic
  misc_feature (5)..(5): n is a, c, g, or u
  misc_feature (19)..(19): n is a, c, g, or u
uuugnaagauccagcaucna

SEQ ID NO: 126497 - RNA, 20 nt, Artificial Sequence
  Synthetic
  misc_feature (15)..(16): n is a, c, g, or u
  misc_feature (19)..(19): n is a, c, g, or u
cgccccguggucggnnggna

SEQ ID NO: 126498 - RNA, 20 nt, Artificial Sequence
  Synthetic
  misc_feature (6)..(6): n is a, c, g, or u
  misc_feature (12)..(12): n is a, c, g, or u
acuacnugaucnggauaaua

SEQ ID NO: 126499 - RNA, 20 nt, Artificial Sequence
  Synthetic
uaguauuccuuggacucaua

SEQ ID NO: 126500 - RNA, 20 nt, Artificial Sequence
  Synthetic
  misc_feature (16)..(16): n is a, c, g, or u
cuguuuggcuuucagnuaua

SEQ ID NO: 126501 - RNA, 20 nt, Artificial Sequence
  Synthetic
  misc_feature (5)..(5): n is a, c, g, or u
cagunucucuuccaaaagua

SEQ ID NO: 126502 - RNA, 20 nt, Artificial Sequence
  Synthetic
  misc_feature (7)..(7): n is a, c, g, or u
aggaucnacaacaaccagua

SEQ ID NO: 126503 - RNA, 20 nt, Artificial Sequence
  Synthetic
  misc_feature (17)..(17): n is a, c, g, or u
uggcuugccugagugcngua

SEQ ID NO: 126504 - RNA, 20 nt, Artificial Sequence
  Synthetic
  misc_feature (8)..(8): n is a, c, g, or u
cccaucunuuuguuuuguua

SEQ ID NO: 126505 - RNA, 20 nt, Artificial Sequence
  Synthetic
  misc_feature (3)..(4): n is a, c, g, or u
  misc_feature (7)..(7): n is a, c, g, or u
  misc_feature (16)..(16): n is a, c, g, or u
uannuancccaugaanuuua

SEQ ID NO: 126506 - RNA, 20 nt, Artificial Sequence
  Synthetic
ccuggaauuagaggacaaac

SEQ ID NO: 126507 - RNA, 20 nt, Artificial Sequence
  Synthetic
  misc_feature (16)..(16): n is a, c, g, or u
ugcauguauacaagcnaaac

SEQ ID NO: 126508 - RNA, 20 nt, Artificial Sequence
  Synthetic
  misc_feature (8)..(8): n is a, c, g, or u
ugcuaggnuguacugccaac

SEQ ID NO: 126509 - RNA, 20 nt, Artificial Sequence
  Synthetic
  misc_feature (15)..(15): n is a, c, g, or u
ccaggccguugccgngcaac

SEQ ID NO: 126510 - RNA, 20 nt, Artificial Sequence
  Synthetic
  misc_feature (7)..(7): n is a, c, g, or u
  misc_feature (9)..(9): n is a, c, g, or u
aggguunanuguuccugaac

SEQ ID NO: 126511 - RNA, 20 nt, Artificial Sequence
  Synthetic
  misc_feature (8)..(8): n is a, c, g, or u
  misc_feature (11)..(12): n is a, c, g, or u
cugccgunccnnccgaccac

SEQ ID NO: 126512 - RNA, 20 nt, Artificial Sequence
  Synthetic
ucaaccccaucaaggaccac

SEQ ID NO: 126513 - RNA, 20 nt, Artificial Sequence
  Synthetic
  misc_feature (2)..(2): n is a, c, g, or u
  misc_feature (8)..(8): n is a, c, g, or u
cnaugagnuuugcuccagac

SEQ ID NO: 126514 - RNA, 20 nt, Artificial Sequence
  Synthetic
  misc_feature (17)..(17): n is a, c, g, or u
aagacuguguguuuaangac

SEQ ID NO: 126515 - RNA, 20 nt, Artificial Sequence
  Synthetic
  misc_feature (15)..(15): n is a, c, g, or u
  misc_feature (18)..(18): n is a, c, g, or u
cauaaggugggaaanuunac

SEQ ID NO: 126516 - RNA, 20 nt, Artificial Sequence
  Synthetic
  misc_feature (12)..(12): n is a, c, g, or u
  misc_feature (14)..(15): n is a, c, g, or u
  misc_feature (18)..(18): n is a, c, g, or u
caaucaauaggncnnuunac

SEQ ID NO: 126517 - RNA, 20 nt, Artificial Sequence
  Synthetic
  misc_feature (1)..(1): n is a, c, g, or u
  misc_feature (4)..(4): n is a, c, g, or u
ngangaugggaugggaauac

SEQ ID NO: 126518 - RNA, 20 nt, Artificial Sequence
  Synthetic
  misc_feature (11)..(12): n is a, c, g, or u
ccacuggccannagccaacc

SEQ ID NO: 126519 - RNA, 20 nt, Artificial Sequence
  Synthetic
agacacauccagcgauaacc

SEQ ID NO: 126520 - RNA, 20 nt, Artificial Sequence
  Synthetic
cgaaugcucccacuccuacc

SEQ ID NO: 126521 - RNA, 20 nt, Artificial Sequence
  Synthetic
  misc_feature (5)..(5): n is a, c, g, or u
aauunaugacucuagcuacc

SEQ ID NO: 126522 - RNA, 20 nt, Artificial Sequence
  Synthetic
  misc_feature (3)..(3): n is a, c, g, or u
uuncaaauuauuacccaccc

SEQ ID NO: 126523 - RNA, 20 nt, Artificial Sequence
  Synthetic
  misc_feature (9)..(9): n is a, c, g, or u
  misc_feature (12)..(12): n is a, c, g, or u
  misc_feature (17)..(17): n is a, c, g, or u
ccguguggnggnguganccc

SEQ ID NO: 126524 - RNA, 20 nt, Artificial Sequence
  Synthetic
cccguuuguccucuaauucc

SEQ ID NO: 126525 - RNA, 20 nt, Artificial Sequence
  Synthetic
ccugaacuggagccaccagc

SEQ ID NO: 126526 - RNA, 20 nt, Artificial Sequence
  Synthetic
agaagaugaggcauagcagc

SEQ ID NO: 126527 - RNA, 20 nt, Artificial Sequence
  Synthetic
ccgcuuguuuugcucgcagc

SEQ ID NO: 126528 - RNA, 20 nt, Artificial Sequence
  Synthetic
aacauagaguugccuugagc

SEQ ID NO: 126529 - RNA, 20 nt, Artificial Sequence
  Synthetic
  misc_feature (1)..(2): n is a, c, g, or u
  misc_feature (4)..(4): n is a, c, g, or u
  misc_feature (12)..(12): n is a, c, g, or u
nngnuaggauanaaucuagc

SEQ ID NO: 126530 - RNA, 20 nt, Artificial Sequence
  Synthetic
  misc_feature (6)..(6): n is a, c, g, or u
ccccgngaggggucguccgc

SEQ ID NO: 126531 - RNA, 20 nt, Artificial Sequence
  Synthetic
  misc_feature (14)..(14): n is a, c, g, or u
cugccaacuggauncuucgc

SEQ ID NO: 126532 - RNA, 20 nt, Artificial Sequence
  Synthetic
uuacauacucuuuggaaggc

SEQ ID NO: 126533 - RNA, 20 nt, Artificial Sequence
  Synthetic
ccccugcucguguuacaggc

SEQ ID NO: 126534 - RNA, 20 nt, Artificial Sequence
  Synthetic
ucuuauguaagaccuugggc

SEQ ID NO: 126535 - RNA, 20 nt, Artificial Sequence
  Synthetic
  misc_feature (6)..(6): n is a, c, g, or u
uuuganuuggcuccgaaugc

SEQ ID NO: 126536 - RNA, 20 nt, Artificial Sequence
  Synthetic
  misc_feature (6)..(6): n is a, c, g, or u
aggggncuguauuuuccugc

SEQ ID NO: 126537 - RNA, 20 nt, Artificial Sequence
  Synthetic
ucaggcaagccauucucugc

SEQ ID NO: 126538 - RNA, 20 nt, Artificial Sequence
  Synthetic
  misc_feature (15)..(15): n is a, c, g, or u
  misc_feature (19)..(19): n is a, c, g, or u
ugagaggcaauauungganc

SEQ ID NO: 126539 - RNA, 20 nt, Artificial Sequence
  Synthetic
  misc_feature (17)..(17): n is a, c, g, or u
  misc_feature (19)..(19): n is a, c, g, or u
auguucuccauguucgncnc

SEQ ID NO: 126540 - RNA, 20 nt, Artificial Sequence
  Synthetic
  misc_feature (19)..(19): n is a, c, g, or u
ucccgcggacgaccccucnc

SEQ ID NO: 126541 - RNA, 20 nt, Artificial Sequence
  Synthetic
augggguugaagucccaauc

SEQ ID NO: 126542 - RNA, 20 nt, Artificial Sequence
  Synthetic
aacauggagaacaucacauc

SEQ ID NO: 126543 - RNA, 20 nt, Artificial Sequence
  Synthetic
  misc_feature (15)..(15): n is a, c, g, or u
uaaugauuaacuacnugauc

SEQ ID NO: 126544 - RNA, 20 nt, Artificial Sequence
  Synthetic
  misc_feature (14)..(14): n is a, c, g, or u
caccucaccauacngcacuc

SEQ ID NO: 126545 - RNA, 20 nt, Artificial Sequence
  Synthetic
  misc_feature (10)..(10): n is a, c, g, or u
aaaauacagnccccugacuc

SEQ ID NO: 126546 - RNA, 20 nt, Artificial Sequence
  Synthetic
  misc_feature (2)..(2): n is a, c, g, or u
unuuuugggguggagcccuc

SEQ ID NO: 126547 - RNA, 20 nt, Artificial Sequence
  Synthetic
  misc_feature (16)..(16): n is a, c, g, or u
ucuuucuguucccaanccuc

SEQ ID NO: 126548 - RNA, 20 nt, Artificial Sequence
  Synthetic
ucuaagagacagucauccuc

SEQ ID NO: 126549 - RNA, 20 nt, Artificial Sequence
  Synthetic
uggugaggugagcaaugcuc

SEQ ID NO: 126550 - RNA, 20 nt, Artificial Sequence
  Synthetic
  misc_feature (8)..(8): n is a, c, g, or u
cucugcangaucccagaguc

SEQ ID NO: 126551 - RNA, 20 nt, Artificial Sequence
  Synthetic
uguuuugcucgcagccgguc

SEQ ID NO: 126552 - RNA, 20 nt, Artificial Sequence
  Synthetic
aagaguauguaaauaauguc

SEQ ID NO: 126553 - RNA, 20 nt, Artificial Sequence
  Synthetic
  misc_feature (3)..(3): n is a, c, g, or u
aangaaggaguuugccauuc

SEQ ID NO: 126554 - RNA, 20 nt, Artificial Sequence
  Synthetic
agguaggagugggagcauuc

SEQ ID NO: 126555 - RNA, 20 nt, Artificial Sequence
  Synthetic
cccuaucuuaucaacacuuc

SEQ ID NO: 126556 - RNA, 20 nt, Artificial Sequence
  Synthetic
caucuucuuauugguucuuc

SEQ ID NO: 126557 - RNA, 20 nt, Artificial Sequence
  Synthetic
ccugcugguggcuccaguuc

SEQ ID NO: 126558 - RNA, 20 nt, Artificial Sequence
  Synthetic
cgucuaacaacaguaguuuc

SEQ ID NO: 126559 - RNA, 20 nt, Artificial Sequence
  Synthetic
  misc_feature (1)..(1): n is a, c, g, or u
  misc_feature (4)..(4): n is a, c, g, or u
nggnacggcagacggagaag

SEQ ID NO: 126560 - RNA, 20 nt, Artificial Sequence
  Synthetic
ugcccaaggucuuacauaag

SEQ ID NO: 126561 - RNA, 20 nt, Artificial Sequence
  Synthetic
  misc_feature (8)..(8): n is a, c, g, or u
aggcuggnauucuauauaag

SEQ ID NO: 126562 - RNA, 20 nt, Artificial Sequence
  Synthetic
  misc_feature (5)..(5): n is a, c, g, or u
uauancugaaagccaaacag

SEQ ID NO: 126563 - RNA, 20 nt, Artificial Sequence
  Synthetic
caaaagaaaauugguaacag

SEQ ID NO: 126564 - RNA, 20 nt, Artificial Sequence
  Synthetic
ugaucgggaaagaaucccag

SEQ ID NO: 126565 - RNA, 20 nt, Artificial Sequence
  Synthetic
  misc_feature (1)..(1): n is a, c, g, or u
  misc_feature (4)..(4): n is a, c, g, or u
naungccaagccccagccag

SEQ ID NO: 126566 - RNA, 20 nt, Artificial Sequence
  Synthetic
  misc_feature (12)..(13): n is a, c, g, or u
ccugguuggcunnuggccag

SEQ ID NO: 126567 - RNA, 20 nt, Artificial Sequence
  Synthetic
cccgccuguaacacgagcag

SEQ ID NO: 126568 - RNA, 20 nt, Artificial Sequence
  Synthetic
  misc_feature (1)..(1): n is a, c, g, or u
nacaagagaugauuaggcag

SEQ ID NO: 126569 - RNA, 20 nt, Artificial Sequence
  Synthetic
  misc_feature (6)..(6): n is a, c, g, or u
cugcangaucccagagucag

SEQ ID NO: 126570 - RNA, 20 nt, Artificial Sequence
  Synthetic
uacuagugccauuuguucag

SEQ ID NO: 126571 - RNA, 20 nt, Artificial Sequence
  Synthetic
cggggagaccgcguaaagag

SEQ ID NO: 126572 - RNA, 20 nt, Artificial Sequence
  Synthetic
  misc_feature (2)..(3): n is a, c, g, or u
annagccaaccagguaggag

SEQ ID NO: 126573 - RNA, 20 nt, Artificial Sequence
  Synthetic
  misc_feature (3)..(3): n is a, c, g, or u
cunuuuucauuuacagugag

SEQ ID NO: 126574 - RNA, 20 nt, Artificial Sequence
  Synthetic
  misc_feature (18)..(18): n is a, c, g, or u
cagcuuggaggcuugaanag

SEQ ID NO: 126575 - RNA, 20 nt, Artificial Sequence
  Synthetic
cgagggaguucuucuucuag

SEQ ID NO: 126576 - RNA, 20 nt, Artificial Sequence
  Synthetic
ugaggaugacugucucuuag

SEQ ID NO: 126577 - RNA, 20 nt, Artificial Sequence
  Synthetic
  misc_feature (14)..(14): n is a, c, g, or u
caggccguugccgngcaacg

SEQ ID NO: 126578 - RNA, 20 nt, Artificial Sequence
  Synthetic
  misc_feature (7)..(7): n is a, c, g, or u
  misc_feature (10)..(11): n is a, c, g, or u
ugccgunccnnccgaccacg

SEQ ID NO: 126579 - RNA, 20 nt, Artificial Sequence
  Synthetic
cagaugagaaggcacagacg

SEQ ID NO: 126580 - RNA, 20 nt, Artificial Sequence
  Synthetic
cccugcucguguuacaggcg

SEQ ID NO: 126581 - RNA, 20 nt, Artificial Sequence
  Synthetic
  misc_feature (3)..(3): n is a, c, g, or u
aunggccaucagcgcaugcg

SEQ ID NO: 126582 - RNA, 20 nt, Artificial Sequence
  Synthetic
  misc_feature (18)..(18): n is a, c, g, or u
acaucucgucaaucuccncg

SEQ ID NO: 126583 - RNA, 20 nt, Artificial Sequence
  Synthetic
  misc_feature (2)..(2): n is a, c, g, or u
cncaggguccccaguccucg

SEQ ID NO: 126584 - RNA, 20 nt, Artificial Sequence
  Synthetic
  misc_feature (15)..(15): n is a, c, g, or u
acugccaacuggauncuucg

SEQ ID NO: 126585 - RNA, 20 nt, Artificial Sequence
  Synthetic
uauuccuuggacucauaagg

SEQ ID NO: 126586 - RNA, 20 nt, Artificial Sequence
  Synthetic
aggacaaauuggaggacagg

SEQ ID NO: 126587 - RNA, 20 nt, Artificial Sequence
  Synthetic
ugccgauugguggaggcagg

SEQ ID NO: 126588 - RNA, 20 nt, Artificial Sequence
  Synthetic
cgauugguggaggcaggagg

SEQ ID NO: 126589 - RNA, 20 nt, Artificial Sequence
  Synthetic
  misc_feature (5)..(5): n is a, c, g, or u
  misc_feature (7)..(7): n is a, c, g, or u
uuaangnucuuuguauuagg

SEQ ID NO: 126590 - RNA, 20 nt, Artificial Sequence
  Synthetic
  misc_feature (1)..(1): n is a, c, g, or u
  misc_feature (14)..(14): n is a, c, g, or u
ngacugggaggagnuggggg

SEQ ID NO: 126591 - RNA, 20 nt, Artificial Sequence
  Synthetic
  misc_feature (8)..(8): n is a, c, g, or u
  misc_feature (12)..(12): n is a, c, g, or u
cacacggnggunuuuugggg

SEQ ID NO: 126592 - RNA, 20 nt, Artificial Sequence
  Synthetic
  misc_feature (14)..(14): n is a, c, g, or u
aacaagagcuacancauggg

SEQ ID NO: 126593 - RNA, 20 nt, Artificial Sequence
  Synthetic
  misc_feature (13)..(13): n is a, c, g, or u
cuguguguuuaangacuggg

SEQ ID NO: 126594 - RNA, 20 nt, Artificial Sequence
  Synthetic
  misc_feature (1)..(1): n is a, c, g, or u
naugacucuagcuaccuggg

SEQ ID NO: 126595 - RNA, 20 nt, Artificial Sequence
  Synthetic
uuugguggucuauaggcugg

SEQ ID NO: 126596 - RNA, 20 nt, Artificial Sequence
  Synthetic
  misc_feature (2)..(2): n is a, c, g, or u
ancugaaagccaaacagugg

SEQ ID NO: 126597 - RNA, 20 nt, Artificial Sequence
  Synthetic
  misc_feature (1)..(1): n is a, c, g, or u
ngccaagccccagccagugg

SEQ ID NO: 126598 - RNA, 20 nt, Artificial Sequence
  Synthetic
  misc_feature (8)..(8): n is a, c, g, or u
  misc_feature (12)..(12): n is a, c, g, or u
cccaaaanaccnccgugugg

SEQ ID NO: 126599 - RNA, 20 nt, Artificial Sequence
  Synthetic
  misc_feature (4)..(4): n is a, c, g, or u
  misc_feature (17)..(17): n is a, c, g, or u
uaangacugggaggagnugg

SEQ ID NO: 126600 - RNA, 20 nt, Artificial Sequence
  Synthetic
ccuuccugacugccgauugg

SEQ ID NO: 126601 - RNA, 20 nt, Artificial Sequence
  Synthetic
uauggaugaugugguauugg

SEQ ID NO: 126602 - RNA, 20 nt, Artificial Sequence
  Synthetic
  misc_feature (4)..(4): n is a, c, g, or u
ccanccaaggcacagcuugg

SEQ ID NO: 126603 - RNA, 20 nt, Artificial Sequence
  Synthetic
  misc_feature (8)..(8): n is a, c, g, or u
ugggaucnugcagagcuugg

SEQ ID NO: 126604 - RNA, 20 nt, Artificial Sequence
  Synthetic
  misc_feature (16)..(16): n is a, c, g, or u
  misc_feature (19)..(19): n is a, c, g, or u
cagagcuugguggaangcng

SEQ ID NO: 126605 - RNA, 20 nt, Artificial Sequence
  Synthetic
agguuuuguacagcaacaug

SEQ ID NO: 126606 - RNA, 20 nt, Artificial Sequence
  Synthetic
caaaaccucgcaaaggcaug

SEQ ID NO: 126607 - RNA, 20 nt, Artificial Sequence
  Synthetic
  misc_feature (15)..(15): n is a, c, g, or u
ccuaacaaaacaaanagaug

SEQ ID NO: 126608 - RNA, 20 nt, Artificial Sequence
  Synthetic
  misc_feature (7)..(7): n is a, c, g, or u
uuucagnuauauggaugaug

SEQ ID NO: 126609 - RNA, 20 nt, Artificial Sequence
  Synthetic
  misc_feature (1)..(1): n is a, c, g, or u
nuggccagugguccuugaug

SEQ ID NO: 126610 - RNA, 20 nt, Artificial Sequence
  Synthetic
uaaagaauuuggagcuacug

SEQ ID NO: 126611 - RNA, 20 nt, Artificial Sequence
  Synthetic
aggcaagccauucucugcug

SEQ ID NO: 126612 - RNA, 20 nt, Artificial Sequence
  Synthetic
  misc_feature (3)..(3): n is a, c, g, or u
uancugaaagccaaacagug

SEQ ID NO: 126613 - RNA, 20 nt, Artificial Sequence
  Synthetic
  misc_feature (2)..(2): n is a, c, g, or u
ungccaagccccagccagug

SEQ ID NO: 126614 - RNA, 20 nt, Artificial Sequence
  Synthetic
  misc_feature (11)..(11): n is a, c, g, or u
  misc_feature (15)..(15): n is a, c, g, or u
caccccaaaanaccnccgug

SEQ ID NO: 126615 - RNA, 20 nt, Artificial Sequence
  Synthetic
  misc_feature (12)..(12): n is a, c, g, or u
ugccugagugcnguauggug

SEQ ID NO: 126616 - RNA, 20 nt, Artificial Sequence
  Synthetic
  misc_feature (18)..(18): n is a, c, g, or u
uuuuguacaauaugaucnug

SEQ ID NO: 126617 - RNA, 20 nt, Artificial Sequence
  Synthetic
  misc_feature (5)..(5): n is a, c, g, or u
  misc_feature (18)..(18): n is a, c, g, or u
uuaangacugggaggagnug

SEQ ID NO: 126618 - RNA, 20 nt, Artificial Sequence
  Synthetic
  misc_feature (5)..(5): n is a, c, g, or u
  misc_feature (8)..(8): n is a, c, g, or u
uaaanaunaggcaacuauug

SEQ ID NO: 126619 - RNA, 20 nt, Artificial Sequence
  Synthetic
auauggaugaugugguauug

SEQ ID NO: 126620 - RNA, 20 nt, Artificial Sequence
  Synthetic
uggugagugauuggagguug

SEQ ID NO: 126621 - RNA, 20 nt, Artificial Sequence
  Synthetic
  misc_feature (12)..(12): n is a, c, g, or u
cugugccuuggnuggcuuug

SEQ ID NO: 126622 - RNA, 20 nt, Artificial Sequence
  Synthetic
  misc_feature (2)..(2): n is a, c, g, or u
  misc_feature (11)..(11): n is a, c, g, or u
  misc_feature (15)..(15): n is a, c, g, or u
cnccacacggnggunuuuug

SEQ ID NO: 126623 - RNA, 20 nt, Artificial Sequence
  Synthetic
  misc_feature (2)..(2): n is a, c, g, or u
  misc_feature (17)..(17): n is a, c, g, or u
  misc_feature (20)..(20): n is a, c, g, or u
angauguauauuuccgngan

SEQ ID NO: 126624 - RNA, 20 nt, Artificial Sequence
  Synthetic
  misc_feature (14)..(14): n is a, c, g, or u
  misc_feature (17)..(17): n is a, c, g, or u
  misc_feature (20)..(20): n is a, c, g, or u
auaaggugggaaanuunacn

SEQ ID NO: 126625 - RNA, 20 nt, Artificial Sequence
  Synthetic
  misc_feature (6)..(6): n is a, c, g, or u
  misc_feature (20)..(20): n is a, c, g, or u
auuugnaagauccagcaucn

SEQ ID NO: 126626 - RNA, 20 nt, Artificial Sequence
  Synthetic
  misc_feature (20)..(20): n is a, c, g, or u
aucccgcggacgaccccucn

SEQ ID NO: 126627 - RNA, 20 nt, Artificial Sequence
  Synthetic
  misc_feature (2)..(2): n is a, c, g, or u
  misc_feature (17)..(17): n is a, c, g, or u
  misc_feature (20)..(20): n is a, c, g, or u
anaauucugucguccunucn

SEQ ID NO: 126628 - RNA, 20 nt, Artificial Sequence
  Synthetic
  misc_feature (20)..(20): n is a, c, g, or u
ccuccaagcugugccuuggn

SEQ ID NO: 126629 - RNA, 20 nt, Artificial Sequence
  Synthetic
  misc_feature (19)..(20): n is a, c, g, or u
acuccuaccugguuggcunn

SEQ ID NO: 126630 - RNA, 20 nt, Artificial Sequence
  Synthetic
  misc_feature (11)..(12): n is a, c, g, or u
  misc_feature (17)..(17): n is a, c, g, or u
  misc_feature (20)..(20): n is a, c, g, or u
cuaacaugggnnuaaanaun

SEQ ID NO: 126631 - RNA, 20 nt, Artificial Sequence
  Synthetic
  misc_feature (20)..(20): n is a, c, g, or u
uaccaauuuucuuuugucun

SEQ ID NO: 126632 - RNA, 20 nt, Artificial Sequence
  Synthetic
  misc_feature (6)..(6): n is a, c, g, or u
acccanagacaaaagaaaau

SEQ ID NO: 126633 - RNA, 20 nt, Artificial Sequence
  Synthetic
  misc_feature (16)..(16): n is a, c, g, or u
aggaggcuguaggcanaaau

SEQ ID NO: 126634 - RNA, 20 nt, Artificial Sequence
  Synthetic
cuccuccugccuccaccaau

SEQ ID NO: 126635 - RNA, 20 nt, Artificial Sequence
  Synthetic
ugacauacuuuccaaucaau

SEQ ID NO: 126636 - RNA, 20 nt, Artificial Sequence
  Synthetic
  misc_feature (3)..(3): n is a, c, g, or u
  misc_feature (12)..(12): n is a, c, g, or u
  misc_feature (15)..(16): n is a, c, g, or u
aanuucaugggnuannuaau

SEQ ID NO: 126637 - RNA, 20 nt, Artificial Sequence
  Synthetic
  misc_feature (5)..(5): n is a, c, g, or u
  misc_feature (8)..(8): n is a, c, g, or u
uacangangacauuauuaau

SEQ ID NO: 126638 - RNA, 20 nt, Artificial Sequence
  Synthetic
aauuauguuaauacuaacau

SEQ ID NO: 126639 - RNA, 20 nt, Artificial Sequence
  Synthetic
ucaaaaccucgcaaaggcau

SEQ ID NO: 126640 - RNA, 20 nt, Artificial Sequence
  Synthetic
ugccauucaggauuaaagau

SEQ ID NO: 126641 - RNA, 20 nt, Artificial Sequence
  Synthetic
uccggaaguguugauaagau

SEQ ID NO: 126642 - RNA, 20 nt, Artificial Sequence
  Synthetic
  misc_feature (5)..(5): n is a, c, g, or u
ccaanucaaacaauccagau

SEQ ID NO: 126643 - RNA, 20 nt, Artificial Sequence
  Synthetic
ucucuuagagguggagagau

SEQ ID NO: 126644 - RNA, 20 nt, Artificial Sequence
  Synthetic
  misc_feature (16)..(16): n is a, c, g, or u
cccuaacaaaacaaanagau

SEQ ID NO: 126645 - RNA, 20 nt, Artificial Sequence
  Synthetic
cugccuuccugacugccgau

SEQ ID NO: 126646 - RNA, 20 nt, Artificial Sequence
  Synthetic
  misc_feature (9)..(9): n is a, c, g, or u
  misc_feature (12)..(12): n is a, c, g, or u
aaagcccangangaugggau

SEQ ID NO: 126647 - RNA, 20 nt, Artificial Sequence
  Synthetic
  misc_feature (14)..(14): n is a, c, g, or u
  misc_feature (17)..(17): n is a, c, g, or u
uugcgaaagcccangangau

SEQ ID NO: 126648 - RNA, 20 nt, Artificial Sequence
  Synthetic
  misc_feature (5)..(5): n is a, c, g, or u
  misc_feature (8)..(9): n is a, c, g, or u
  misc_feature (11)..(11): n is a, c, g, or u
cugunaanngnccuauugau

SEQ ID NO: 126649 - RNA, 20 nt, Artificial Sequence
  Synthetic
  misc_feature (1)..(2): n is a, c, g, or u
nnuggccagugguccuugau

SEQ ID NO: 126650 - RNA, 20 nt, Artificial Sequence
  Synthetic
  misc_feature (18)..(18): n is a, c, g, or u
acuggcuggggcuuggcnau

SEQ ID NO: 126651 - RNA, 20 nt, Artificial Sequence
  Synthetic
aggggcauuugguggucuau

SEQ ID NO: 126652 - RNA, 20 nt, Artificial Sequence
  Synthetic
  misc_feature (1)..(1): n is a, c, g, or u
nuauauggaugaugugguau

SEQ ID NO: 126653 - RNA, 20 nt, Artificial Sequence
  Synthetic
  misc_feature (5)..(5): n is a, c, g, or u
  misc_feature (10)..(10): n is a, c, g, or u
cucangaugnuguacagacu

SEQ ID NO: 126654 - RNA, 20 nt, Artificial Sequence
  Synthetic
  misc_feature (16)..(16): n is a, c, g, or u
agacuguguguuuaangacu

SEQ ID NO: 126655 - RNA, 20 nt, Artificial Sequence
  Synthetic
aguccucuuauguaagaccu

SEQ ID NO: 126656 - RNA, 20 nt, Artificial Sequence
  Synthetic
  misc_feature (4)..(4): n is a, c, g, or u
auunaugacucuagcuaccu

SEQ ID NO: 126657 - RNA, 20 nt, Artificial Sequence
  Synthetic
uucuucuaggggaccugccu

SEQ ID NO: 126658 - RNA, 20 nt, Artificial Sequence
  Synthetic
caagccuccaagcugugccu

SEQ ID NO: 126659 - RNA, 20 nt, Artificial Sequence
  Synthetic
aacaucacaucaggauuccu

SEQ ID NO: 126660 - RNA, 20 nt, Artificial Sequence
  Synthetic
aucucaauguuaguauuccu

SEQ ID NO: 126661 - RNA, 20 nt, Artificial Sequence
  Synthetic
  misc_feature (7)..(7): n is a, c, g, or u
aagccanccaaggcacagcu

SEQ ID NO: 126662 - RNA, 20 nt, Artificial Sequence
  Synthetic
  misc_feature (11)..(11): n is a, c, g, or u
cucugggaucnugcagagcu

SEQ ID NO: 126663 - RNA, 20 nt, Artificial Sequence
  Synthetic
  misc_feature (10)..(10): n is a, c, g, or u
cgaccccucncggggccgcu

SEQ ID NO: 126664 - RNA, 20 nt, Artificial Sequence
  Synthetic
aacccccacuggcuggggcu

SEQ ID NO: 126665 - RNA, 20 nt, Artificial Sequence
  Synthetic
  misc_feature (6)..(6): n is a, c, g, or u
acaucnuuuccauggcugcu

SEQ ID NO: 126666 - RNA, 20 nt, Artificial Sequence
  Synthetic
caggcaagccauucucugcu

SEQ ID NO: 126667 - RNA, 20 nt, Artificial Sequence
  Synthetic
  misc_feature (9)..(9): n is a, c, g, or u
aaauacagnccccugacucu

SEQ ID NO: 126668 - RNA, 20 nt, Artificial Sequence
  Synthetic
  misc_feature (15)..(15): n is a, c, g, or u
cuuucuguucccaanccucu

SEQ ID NO: 126669 - RNA, 20 nt, Artificial Sequence
  Synthetic
uggacuucucucaauuuucu

SEQ ID NO: 126670 - RNA, 20 nt, Artificial Sequence
  Synthetic
  misc_feature (5)..(5): n is a, c, g, or u
  misc_feature (8)..(9): n is a, c, g, or u
ugggnuannuaauuggaagu

SEQ ID NO: 126671 - RNA, 20 nt, Artificial Sequence
  Synthetic
aaacacacagucuuugaagu

SEQ ID NO: 126672 - RNA, 20 nt, Artificial Sequence
  Synthetic
cuuagaaaggccuuguaagu

SEQ ID NO: 126673 - RNA, 20 nt, Artificial Sequence
  Synthetic
  misc_feature (4)..(4): n is a, c, g, or u
auancugaaagccaaacagu

SEQ ID NO: 126674 - RNA, 20 nt, Artificial Sequence
  Synthetic
  misc_feature (3)..(3): n is a, c, g, or u
aungccaagccccagccagu

SEQ ID NO: 126675 - RNA, 20 nt, Artificial Sequence
  Synthetic
auucuuucccgaucaucagu

SEQ ID NO: 126676 - RNA, 20 nt, Artificial Sequence
  Synthetic
  misc_feature (1)..(2): n is a, c, g, or u
nnagccaaccagguaggagu

SEQ ID NO: 126677 - RNA, 20 nt, Artificial Sequence
  Synthetic
agagguggagagaugggagu

SEQ ID NO: 126678 - RNA, 20 nt, Artificial Sequence
  Synthetic
cgcaaaauaccuaugggagu

SEQ ID NO: 126679 - RNA, 20 nt, Artificial Sequence
  Synthetic
  misc_feature (17)..(17): n is a, c, g, or u
agcuuggaggcuugaanagu

SEQ ID NO: 126680 - RNA, 20 nt, Artificial Sequence
  Synthetic
caggugcaauuuccauccgu

SEQ ID NO: 126681 - RNA, 20 nt, Artificial Sequence
  Synthetic
  misc_feature (7)..(8): n is a, c, g, or u
uggccannagccaaccaggu

SEQ ID NO: 126682 - RNA, 20 nt, Artificial Sequence
  Synthetic
caaauuggaggacaggaggu

SEQ ID NO: 126683 - RNA, 20 nt, Artificial Sequence
  Synthetic
  misc_feature (10)..(10): n is a, c, g, or u
agagcuacancaugggaggu

SEQ ID NO: 126684 - RNA, 20 nt, Artificial Sequence
  Synthetic
augacucuagcuaccugggu

SEQ ID NO: 126685 - RNA, 20 nt, Artificial Sequence
  Synthetic
ugcucccacuccuaccuggu

SEQ ID NO: 126686 - RNA, 20 nt, Artificial Sequence
  Synthetic
agagaggugcgccccguggu

SEQ ID NO: 126687 - RNA, 20 nt, Artificial Sequence
  Synthetic
  misc_feature (15)..(15): n is a, c, g, or u
aaaguaugucaaagnauugu

SEQ ID NO: 126688 - RNA, 20 nt, Artificial Sequence
  Synthetic
  misc_feature (12)..(12): n is a, c, g, or u
aauaggugucancaauuugu

SEQ ID NO: 126689 - RNA, 20 nt, Artificial Sequence
  Synthetic
  misc_feature (19)..(19): n is a, c, g, or u
ccaaucuggauuguuuganu

SEQ ID NO: 126690 - RNA, 20 nt, Artificial Sequence
  Synthetic
  misc_feature (16)..(16): n is a, c, g, or u
  misc_feature (19)..(19): n is a, c, g, or u
uauucccaucccaucnucnu

SEQ ID NO: 126691 - RNA, 20 nt, Artificial Sequence
  Synthetic
  misc_feature (6)..(6): n is a, c, g, or u
  misc_feature (19)..(19): n is a, c, g, or u
uuuaangacugggaggagnu

SEQ ID NO: 126692 - RNA, 20 nt, Artificial Sequence
  Synthetic
  misc_feature (19)..(19): n is a, c, g, or u
accaauuuucuuuugucunu

SEQ ID NO: 126693 - RNA, 20 nt, Artificial Sequence
  Synthetic
auugacccuuauaaagaauu

SEQ ID NO: 126694 - RNA, 20 nt, Artificial Sequence
  Synthetic
cagguaggagugggagcauu

SEQ ID NO: 126695 - RNA, 20 nt, Artificial Sequence
  Synthetic
caucaguuggacccugcauu

SEQ ID NO: 126696 - RNA, 20 nt, Artificial Sequence
  Synthetic
  misc_feature (4)..(4): n is a, c, g, or u
caanucaaacaauccagauu

SEQ ID NO: 126697 - RNA, 20 nt, Artificial Sequence
  Synthetic
  misc_feature (6)..(6): n is a, c, g, or u
aggagnugggggaggagauu

SEQ ID NO: 126698 - RNA, 20 nt, Artificial Sequence
  Synthetic
uauauggaugaugugguauu

SEQ ID NO: 126699 - RNA, 20 nt, Artificial Sequence
  Synthetic
  misc_feature (8)..(8): n is a, c, g, or u
  misc_feature (10)..(10): n is a, c, g, or u
agguuaangnucuuuguauu

SEQ ID NO: 126700 - RNA, 20 nt, Artificial Sequence
  Synthetic
  misc_feature (4)..(4): n is a, c, g, or u
  misc_feature (10)..(10): n is a, c, g, or u
  misc_feature (16)..(16): n is a, c, g, or u
aganacuguncuuganuauu

SEQ ID NO: 126701 - RNA, 20 nt, Artificial Sequence
  Synthetic
  misc_feature (14)..(14): n is a, c, g, or u
agcugugccuuggnuggcuu

SEQ ID NO: 126702 - RNA, 20 nt, Artificial Sequence
  Synthetic
uuggugagugauuggagguu

SEQ ID NO: 126703 - RNA, 20 nt, Artificial Sequence
  Synthetic
  misc_feature (9)..(9): n is a, c, g, or u
ccccaucunuuuguuuuguu

SEQ ID NO: 126704 - RNA, 20 nt, Artificial Sequence
  Synthetic
  misc_feature (3)..(3): n is a, c, g, or u
  misc_feature (6)..(6): n is a, c, g, or u
  misc_feature (18)..(18): n is a, c, g, or u
ucnucnuguaaaugaaunuu

SEQ ID NO: 126705 - RNA, 20 nt, Artificial Sequence
  Synthetic
agguuggggacugcgaauuu

SEQ ID NO: 126706 - RNA, 20 nt, Artificial Sequence
  Synthetic
  misc_feature (6)..(6): n is a, c, g, or u
cauaunucuugccuuacuuu

SEQ ID NO: 126707 - RNA, 20 nt, Artificial Sequence
  Synthetic
  misc_feature (6)..(6): n is a, c, g, or u
cuuganuauuuggucucuuu

SEQ ID NO: 126708 - RNA, 20 nt, Artificial Sequence
  Synthetic
  misc_feature (7)..(7): n is a, c, g, or u
ucaaagnauugugggucuuu

SEQ ID NO: 126709 - RNA, 20 nt, Artificial Sequence
  Synthetic
  misc_feature (4)..(5): n is a, c, g, or u
  misc_feature (8)..(8): n is a, c, g, or u
  misc_feature (17)..(17): n is a, c, g, or u
uuannuancccaugaanuuu

SEQ ID NO: 126710 - RNA, 20 nt, Artificial Sequence
  Synthetic
  misc_feature (1)..(1): n is a, c, g, or u
  misc_feature (4)..(4): n is a, c, g, or u
  misc_feature (13)..(13): n is a, c, g, or u
  misc_feature (17)..(17): n is a, c, g, or u
nccnccacacggnggunuuu

SEQ ID NO: 126711 - RNA, 20 nt, Artificial Sequence
  Synthetic
  misc_feature (6)..(6): n is a, c, g, or u
caaagnauugugggucuuuu

SEQ ID NO: 126712 - RNA, 20 nt, Artificial Sequence
  Synthetic
  misc_feature (3)..(3): n is a, c, g, or u
  misc_feature (12)..(12): n is a, c, g, or u
  misc_feature (16)..(16): n is a, c, g, or u
ccnccacacggnggunuuuu

SEQ ID NO: 126713 - RNA, 21 nt, Artificial Sequence
  Synthetic
  misc_feature (17)..(17): n is a, c, g, or u
gaccaggccguugccgngcaa

SEQ ID NO: 126714 - RNA, 22 nt, Artificial Sequence
  Synthetic
guacagcaacaugagggaaaca

SEQ ID NO: 126715 - RNA, 22 nt, Artificial Sequence
  Synthetic
  misc_feature (8)..(8): n is a, c, g, or u
gagucaunaauuccccccagca

SEQ ID NO: 126716 - RNA, 22 nt, Artificial Sequence
  Synthetic
  misc_feature (12)..(12): n is a, c, g, or u
  misc_feature (15)..(15): n is a, c, g, or u
guauauuuccgnganaggacga

SEQ ID NO: 126717 - RNA, 21 nt, Artificial Sequence
  Synthetic
ggcagacggagaaggggacga

SEQ ID NO: 126718 - RNA, 20 nt, Artificial Sequence
  Synthetic
  misc_feature (6)..(6): n is a, c, g, or u
gaucuncgucugcgaggcga

SEQ ID NO: 126719 - RNA, 22 nt, Artificial Sequence
  Synthetic
  misc_feature (8)..(8): n is a, c, g, or u
gagaucuncgucugcgaggcga

SEQ ID NO: 126720 - RNA, 19 nt, Artificial Sequence
  Synthetic
guccaacugaugaucggga

SEQ ID NO: 126721 - RNA, 20 nt, Artificial Sequence
  Synthetic
gguccaacugaugaucggga

SEQ ID NO: 126722 - RNA, 21 nt, Artificial Sequence
  Synthetic
ggguccaacugaugaucggga

SEQ ID NO: 126723 - RNA, 24 nt, Artificial Sequence
  Synthetic
gcaggguccaacugaugaucggga

SEQ ID NO: 126724 - RNA, 24 nt, Artificial Sequence
  Synthetic
  misc_feature (19)..(19): n is a, c, g, or u
  misc_feature (22)..(22): n is a, c, g, or u
guauuuugcgaaagcccanganga

SEQ ID NO: 126725 - RNA, 22 nt, Artificial Sequence
  Synthetic
  misc_feature (4)..(5): n is a, c, g, or u
gcunnuggccagugguccuuga

SEQ ID NO: 126726 - RNA, 23 nt, Artificial Sequence
  Synthetic
  misc_feature (5)..(6): n is a, c, g, or u
ggcunnuggccagugguccuuga

SEQ ID NO: 126727 - RNA, 24 nt, Artificial Sequence
  Synthetic
  misc_feature (10)..(10): n is a, c, g, or u
gcuacgugunguuucccucuuaua

SEQ ID NO: 126728 - RNA, 18 nt, Artificial Sequence
  Synthetic
gaauuuuggccaagacac

SEQ ID NO: 126729 - RNA, 20 nt, Artificial Sequence
  Synthetic
gcgaauuuuggccaagacac

SEQ ID NO: 126730 - RNA, 24 nt, Artificial Sequence
  Synthetic
gacugcgaauuuuggccaagacac

SEQ ID NO: 126731 - RNA, 21 nt, Artificial Sequence
  Synthetic
gaaaauugagagaaguccacc

SEQ ID NO: 126732 - RNA, 23 nt, Artificial Sequence
  Synthetic
gucguugacauugcugggagucc

SEQ ID NO: 126733 - RNA, 24 nt, Artificial Sequence
  Synthetic
ggucguugacauugcugggagucc

SEQ ID NO: 126734 - RNA, 22 nt, Artificial Sequence
  Synthetic
gaaacauagaguugccuugagc

SEQ ID NO: 126735 - RNA, 23 nt, Artificial Sequence
  Synthetic
ggaaacauagaguugccuugagc

SEQ ID NO: 126736 - RNA, 24 nt, Artificial Sequence
  Synthetic
gggaaacauagaguugccuugagc

SEQ ID NO: 126737 - RNA, 22 nt, Artificial Sequence
  Synthetic
  misc_feature (7)..(7): n is a, c, g, or u
  misc_feature (10)..(10): n is a, c, g, or u
  misc_feature (15)..(15): n is a, c, g, or u
guguggnggngugancccuggc

SEQ ID NO: 126738 - RNA, 21 nt, Artificial Sequence
  Synthetic
  misc_feature (11)..(11): n is a, c, g, or u
gaaaauacagnccccugacuc

SEQ ID NO: 126739 - RNA, 22 nt, Artificial Sequence
  Synthetic
  misc_feature (12)..(12): n is a, c, g, or u
ggaaaauacagnccccugacuc

SEQ ID NO: 126740 - RNA, 22 nt, Artificial Sequence
  Synthetic
gaggcauagcagcaggaugaag

SEQ ID NO: 126741 - RNA, 21 nt, Artificial Sequence
  Synthetic
  misc_feature (14)..(14): n is a, c, g, or u
  misc_feature (17)..(17): n is a, c, g, or u
gauuaaagauaggnacnguag

SEQ ID NO: 126742 - RNA, 22 nt, Artificial Sequence
  Synthetic
  misc_feature (15)..(15): n is a, c, g, or u
  misc_feature (18)..(18): n is a, c, g, or u
ggauuaaagauaggnacnguag

SEQ ID NO: 126743 - RNA, 21 nt, Artificial Sequence
  Synthetic
  misc_feature (8)..(8): n is a, c, g, or u
ggccccgngaggggucguccg

SEQ ID NO: 126744 - RNA, 23 nt, Artificial Sequence
  Synthetic
  misc_feature (10)..(10): n is a, c, g, or u
gcggccccgngaggggucguccg

SEQ ID NO: 126745 - RNA, 23 nt, Artificial Sequence
  Synthetic
guccucuuauguaagaccuuggg

SEQ ID NO: 126746 - RNA, 23 nt, Artificial Sequence
  Synthetic
gcauuugguggucuauaggcugg

SEQ ID NO: 126747 - RNA, 24 nt, Artificial Sequence
  Synthetic
ggcauuugguggucuauaggcugg

SEQ ID NO: 126748 - RNA, 24 nt, Artificial Sequence
  Synthetic
  misc_feature (3)..(3): n is a, c, g, or u
  misc_feature (23)..(23): n is a, c, g, or u
ganagagucccaagcggccccgng

SEQ ID NO: 126749 - RNA, 20 nt, Artificial Sequence
  Synthetic
  misc_feature (7)..(7): n is a, c, g, or u
guuuganuuggcuccgaaug

SEQ ID NO: 126750 - RNA, 24 nt, Artificial Sequence
  Synthetic
  misc_feature (11)..(11): n is a, c, g, or u
gauuguuuganuuggcuccgaaug

SEQ ID NO: 126751 - RNA, 24 nt, Artificial Sequence
  Synthetic
gacaaauuggaggacaggagguug

SEQ ID NO: 126752 - RNA, 23 nt, Artificial Sequence
  Synthetic
  misc_feature (23)..(23): n is a, c, g, or u
gaaagaagucagaaggcaaaaan

SEQ ID NO: 126753 - RNA, 24 nt, Artificial Sequence
  Synthetic
  misc_feature (24)..(24): n is a, c, g, or u
ggaaagaagucagaaggcaaaaan

SEQ ID NO: 126754 - RNA, 23 nt, Artificial Sequence
  Synthetic
  misc_feature (19)..(19): n is a, c, g, or u
  misc_feature (23)..(23): n is a, c, g, or u
gaugugagaggcaauauunggan

SEQ ID NO: 126755 - RNA, 22 nt, Artificial Sequence
  Synthetic
  misc_feature (20)..(20): n is a, c, g, or u
  misc_feature (22)..(22): n is a, c, g, or u
gugauguucuccauguucgncn

SEQ ID NO: 126756 - RNA, 20 nt, Artificial Sequence
  Synthetic
gaugggguugaagucccaau

SEQ ID NO: 126757 - RNA, 21 nt, Artificial Sequence
  Synthetic
gucucuuagagguggagagau

SEQ ID NO: 126758 - RNA, 21 nt, Artificial Sequence
  Synthetic
  misc_feature (10)..(10): n is a, c, g, or u
  misc_feature (13)..(13): n is a, c, g, or u
gaaagcccangangaugggau

SEQ ID NO: 126759 - RNA, 23 nt, Artificial Sequence
  Synthetic
  misc_feature (12)..(12): n is a, c, g, or u
  misc_feature (15)..(15): n is a, c, g, or u
gcgaaagcccangangaugggau

SEQ ID NO: 126760 - RNA, 24 nt, Artificial Sequence
  Synthetic
  misc_feature (2)..(2): n is a, c, g, or u
  misc_feature (20)..(20): n is a, c, g, or u
gnaaguaaugauuaacuacnugau

SEQ ID NO: 126761 - RNA, 22 nt, Artificial Sequence
  Synthetic
gagugauuggagguuggggacu

SEQ ID NO: 126762 - RNA, 24 nt, Artificial Sequence
  Synthetic
gugagugauuggagguuggggacu

SEQ ID NO: 126763 - RNA, 20 nt, Artificial Sequence
  Synthetic
guaacacgagcagggguccu

SEQ ID NO: 126764 - RNA, 24 nt, Artificial Sequence
  Synthetic
gccuguaacacgagcagggguccu

SEQ ID NO: 126765 - RNA, 19 nt, Artificial Sequence
  Synthetic
gcgagcaaaacaagcggcu

SEQ ID NO: 126766 - RNA, 22 nt, Artificial Sequence
  Synthetic
gcugcgagcaaaacaagcggcu

SEQ ID NO: 126767 - RNA, 23 nt, Artificial Sequence
  Synthetic
ggcugcgagcaaaacaagcggcu

SEQ ID NO: 126768 - RNA, 19 nt, Artificial Sequence
  Synthetic
gucggucguugacauugcu

SEQ ID NO: 126769 - RNA, 20 nt, Artificial Sequence
  Synthetic
ggucggucguugacauugcu

SEQ ID NO: 126770 - RNA, 24 nt, Artificial Sequence
  Synthetic
  misc_feature (4)..(4): n is a, c, g, or u
  misc_feature (7)..(7): n is a, c, g, or u
gccnaungccaagccccagccagu

SEQ ID NO: 126771 - RNA, 19 nt, Artificial Sequence
  Synthetic
gucuauaggcuggaggagu

SEQ ID NO: 126772 - RNA, 20 nt, Artificial Sequence
  Synthetic
ggucuauaggcuggaggagu

SEQ ID NO: 126773 - RNA, 22 nt, Artificial Sequence
  Synthetic
guggucuauaggcuggaggagu

SEQ ID NO: 126774 - RNA, 23 nt, Artificial Sequence
  Synthetic
gguggucuauaggcuggaggagu

SEQ ID NO: 126775 - RNA, 21 nt, Artificial Sequence
  Synthetic
gucuagacucugcgguauugu

SEQ ID NO: 126776 - RNA, 23 nt, Artificial Sequence
  Synthetic
gagucuagacucugcgguauugu

SEQ ID NO: 126777 - RNA, 21 nt, Artificial Sequence
  Synthetic
  misc_feature (5)..(5): n is a, c, g, or u
gaaangaaggaguuugccauu

SEQ ID NO: 126778 - RNA, 22 nt, Artificial Sequence
  Synthetic
  misc_feature (6)..(6): n is a, c, g, or u
ggaaangaaggaguuugccauu

SEQ ID NO: 126779 - RNA, 21 nt, Artificial Sequence
  Synthetic
  misc_feature (10)..(10): n is a, c, g, or u
gcugcuaggnuguacugccaa

SEQ ID NO: 126780 - RNA, 22 nt, Artificial Sequence
  Synthetic
  misc_feature (11)..(11): n is a, c, g, or u
ggcugcuaggnuguacugccaa

SEQ ID NO: 126781 - RNA, 21 nt, Artificial Sequence
  Synthetic
gcauggacauugacccuuaua

SEQ ID NO: 126782 - RNA, 22 nt, Artificial Sequence
  Synthetic
ggcauggacauugacccuuaua

SEQ ID NO: 126783 - RNA, 23 nt, Artificial Sequence
  Synthetic
gggcauggacauugacccuuaua

SEQ ID NO: 126784 - RNA, 24 nt, Artificial Sequence
  Synthetic
ggggcauggacauugacccuuaua

SEQ ID NO: 126785 - RNA, 18 nt, Artificial Sequence
  Synthetic
gggguuuuucuuguugac

SEQ ID NO: 126786 - RNA, 20 nt, Artificial Sequence
  Synthetic
gcgggguuuuucuuguugac

SEQ ID NO: 126787 - RNA, 21 nt, Artificial Sequence
  Synthetic
ggcgggguuuuucuuguugac

SEQ ID NO: 126788 - RNA, 21 nt, Artificial Sequence
  Synthetic
  misc_feature (7)..(7): n is a, c, g, or u
ggaauunaugacucuagcuac

SEQ ID NO: 126789 - RNA, 22 nt, Artificial Sequence
  Synthetic
  misc_feature (8)..(8): n is a, c, g, or u
gggaauunaugacucuagcuac

SEQ ID NO: 126790 - RNA, 23 nt, Artificial Sequence
  Synthetic
  misc_feature (9)..(9): n is a, c, g, or u
ggggaauunaugacucuagcuac

SEQ ID NO: 126791 - RNA, 24 nt, Artificial Sequence
  Synthetic
  misc_feature (10)..(10): n is a, c, g, or u
gggggaauunaugacucuagcuac

SEQ ID NO: 126792 - RNA, 23 nt, Artificial Sequence
  Synthetic
  misc_feature (19)..(19): n is a, c, g, or u
gaaucuuucuguucccaanccuc

SEQ ID NO: 126793 - RNA, 18 nt, Artificial Sequence
  Synthetic
gcagaagaucucaaucuc

SEQ ID NO: 126794 - RNA, 21 nt, Artificial Sequence
  Synthetic
gucgcagaagaucucaaucuc

SEQ ID NO: 126795 - RNA, 23 nt, Artificial Sequence
  Synthetic
gcgucgcagaagaucucaaucuc

SEQ ID NO: 126796 - RNA, 20 nt, Artificial Sequence
  Synthetic
gcccguuuguccucuaauuc

SEQ ID NO: 126797 - RNA, 23 nt, Artificial Sequence
  Synthetic
guugcccguuuguccucuaauuc

SEQ ID NO: 126798 - RNA, 22 nt, Artificial Sequence
  Synthetic
gacaagaauccucacaauaccg

SEQ ID NO: 126799 - RNA, 18 nt, Artificial Sequence
  Synthetic
guuuacgucccgucggcg

SEQ ID NO: 126800 - RNA, 21 nt, Artificial Sequence
  Synthetic
gaccccugcucguguuacagg

SEQ ID NO: 126801 - RNA, 22 nt, Artificial Sequence
  Synthetic
ggaccccugcucguguuacagg

SEQ ID NO: 126802 - RNA, 21 nt, Artificial Sequence
  Synthetic
ggcaagccauucucugcuggg

SEQ ID NO: 126803 - RNA, 24 nt, Artificial Sequence
  Synthetic
  misc_feature (6)..(6): n is a, c, g, or u
gaauunaugacucuagcuaccugg

SEQ ID NO: 126804 - RNA, 23 nt, Artificial Sequence
  Synthetic
  misc_feature (2)..(2): n is a, c, g, or u
gncgaacauggagaacaucacau

SEQ ID NO: 126805 - RNA, 19 nt, Artificial Sequence
  Synthetic
gcuuucgcaaaauaccuau

SEQ ID NO: 126806 - RNA, 20 nt, Artificial Sequence
  Synthetic
ggcuuucgcaaaauaccuau

SEQ ID NO: 126807 - RNA, 21 nt, Artificial Sequence
  Synthetic
gggcuuucgcaaaauaccuau

SEQ ID NO: 126808 - RNA, 19 nt, Artificial Sequence
  Synthetic
  misc_feature (12)..(12): n is a, c, g, or u
gcucuguaucgngaagccu

SEQ ID NO: 126809 - RNA, 21 nt, Artificial Sequence
  Synthetic
guuaccaauuuucuuuugucu

SEQ ID NO: 126810 - RNA, 24 nt, Artificial Sequence
  Synthetic
gcuguuaccaauuuucuuuugucu

SEQ ID NO: 126811 - RNA, 23 nt, Artificial Sequence
  Synthetic
  misc_feature (3)..(3): n is a, c, g, or u
ganuauuuggucucuuucggagu

SEQ ID NO: 126812 - RNA, 24 nt, Artificial Sequence
  Synthetic
  misc_feature (21)..(21): n is a, c, g, or u
gauuggaaaguaugucaaagnauu

SEQ ID NO: 126813 - RNA, 23 nt, Artificial Sequence
  Synthetic
gccucaucuucuuauugguucuu

SEQ ID NO: 126814 - RNA, 22 nt, Artificial Sequence
  Synthetic
  misc_feature (18)..(18): n is a, c, g, or u
agaccaggccguugccgngcaa

SEQ ID NO: 126815 - RNA, 23 nt, Artificial Sequence
  Synthetic
  misc_feature (19)..(19): n is a, c, g, or u
cagaccaggccguugccgngcaa

SEQ ID NO: 126816 - RNA, 24 nt, Artificial Sequence
  Synthetic
  misc_feature (20)..(20): n is a, c, g, or u
acagaccaggccguugccgngcaa

SEQ ID NO: 126817 - RNA, 21 nt, Artificial Sequence
  Synthetic
  misc_feature (13)..(13): n is a, c, g, or u
  misc_feature (16)..(16): n is a, c, g, or u
auuaauaaugucnucnuguaa

SEQ ID NO: 126818 - RNA, 22 nt, Artificial Sequence
  Synthetic
  misc_feature (14)..(14): n is a, c, g, or u
  misc_feature (17)..(17): n is a, c, g, or u
uauuaauaaugucnucnuguaa

SEQ ID NO: 126819 - RNA, 23 nt, Artificial Sequence
  Synthetic
  misc_feature (15)..(15): n is a, c, g, or u
  misc_feature (18)..(18): n is a, c, g, or u
cuauuaauaaugucnucnuguaa

SEQ ID NO: 126820 - RNA, 24 nt, Artificial Sequence
  Synthetic
  misc_feature (16)..(16): n is a, c, g, or u
  misc_feature (19)..(19): n is a, c, g, or u
ccuauuaauaaugucnucnuguaa

SEQ ID NO: 126821 - RNA, 21 nt, Artificial Sequence
  Synthetic
uacagcaacaugagggaaaca

SEQ ID NO: 126822 - RNA, 23 nt, Artificial Sequence
  Synthetic
uguacagcaacaugagggaaaca

SEQ ID NO: 126823 - RNA, 24 nt, Artificial Sequence
  Synthetic
uuguacagcaacaugagggaaaca

SEQ ID NO: 126824 - RNA, 21 nt, Artificial Sequence
  Synthetic
  misc_feature (1)..(1): n is a, c, g, or u
nuuucccaccuuaugagucca

SEQ ID NO: 126825 - RNA, 22 nt, Artificial Sequence
  Synthetic
  misc_feature (2)..(2): n is a, c, g, or u
anuuucccaccuuaugagucca

SEQ ID NO: 126826 - RNA, 23 nt, Artificial Sequence
  Synthetic
  misc_feature (3)..(3): n is a, c, g, or u
aanuuucccaccuuaugagucca

SEQ ID NO: 126827 - RNA, 24 nt, Artificial Sequence
  Synthetic
  misc_feature (1)..(1): n is a, c, g, or u
  misc_feature (4)..(4): n is a, c, g, or u
naanuuucccaccuuaugagucca

SEQ ID NO: 126828 - RNA, 21 nt, Artificial Sequence
  Synthetic
  misc_feature (10)..(10): n is a, c, g, or u
auauagaaunccagccuucca

SEQ ID NO: 126829 - RNA, 22 nt, Artificial Sequence
  Synthetic
  misc_feature (11)..(11): n is a, c, g, or u
uauauagaaunccagccuucca

SEQ ID NO: 126830 - RNA, 23 nt, Artificial Sequence
  Synthetic
  misc_feature (12)..(12): n is a, c, g, or u
uuauauagaaunccagccuucca

SEQ ID NO: 126831 - RNA, 24 nt, Artificial Sequence
  Synthetic
  misc_feature (13)..(13): n is a, c, g, or u
cuuauauagaaunccagccuucca

SEQ ID NO: 126832 - RNA, 21 nt, Artificial Sequence
  Synthetic
  misc_feature (7)..(7): n is a, c, g, or u
agucaunaauuccccccagca

SEQ ID NO: 126833 - RNA, 23 nt, Artificial Sequence
  Synthetic
  misc_feature (9)..(9): n is a, c, g, or u
agagucaunaauuccccccagca

SEQ ID NO: 126834 - RNA, 24 nt, Artificial Sequence
  Synthetic
  misc_feature (10)..(10): n is a, c, g, or u
uagagucaunaauuccccccagca

SEQ ID NO: 126835 - RNA, 18 nt, Artificial Sequence
  Synthetic
  misc_feature (8)..(8): n is a, c, g, or u
  misc_feature (11)..(11): n is a, c, g, or u
auuuccgnganaggacga

SEQ ID NO: 126836 - RNA, 19 nt, Artificial Sequence
  Synthetic
  misc_feature (9)..(9): n is a, c, g, or u
  misc_feature (12)..(12): n is a, c, g, or u
uauuuccgnganaggacga

SEQ ID NO: 126837 - RNA, 20 nt, Artificial Sequence
  Synthetic
  misc_feature (10)..(10): n is a, c, g, or u
  misc_feature (13)..(13): n is a, c, g, or u
auauuuccgnganaggacga

SEQ ID NO: 126838 - RNA, 21 nt, Artificial Sequence
  Synthetic
  misc_feature (11)..(11): n is a, c, g, or u
  misc_feature (14)..(14): n is a, c, g, or u
uauauuuccgnganaggacga

SEQ ID NO: 126839 - RNA, 23 nt, Artificial Sequence
  Synthetic
  misc_feature (13)..(13): n is a, c, g, or u
  misc_feature (16)..(16): n is a, c, g, or u
uguauauuuccgnganaggacga

SEQ ID NO: 126840 - RNA, 24 nt, Artificial Sequence
  Synthetic
  misc_feature (14)..(14): n is a, c, g, or u
  misc_feature (17)..(17): n is a, c, g, or u
auguauauuuccgnganaggacga

SEQ ID NO: 126841 - RNA, 22 nt, Artificial Sequence
  Synthetic
cggcagacggagaaggggacga

SEQ ID NO: 126842 - RNA, 23 nt, Artificial Sequence
  Synthetic
acggcagacggagaaggggacga

SEQ ID NO: 126843 - RNA, 24 nt, Artificial Sequence
  Synthetic
  misc_feature (1)..(1): n is a, c, g, or u
nacggcagacggagaaggggacga

SEQ ID NO: 126844 - RNA, 18 nt, Artificial Sequence
  Synthetic
  misc_feature (4)..(4): n is a, c, g, or u
ucuncgucugcgaggcga

SEQ ID NO: 126845 - RNA, 19 nt, Artificial Sequence
  Synthetic
  misc_feature (5)..(5): n is a, c, g, or u
aucuncgucugcgaggcga

SEQ ID NO: 126846 - RNA, 21 nt, Artificial Sequence
  Synthetic
  misc_feature (7)..(7): n is a, c, g, or u
agaucuncgucugcgaggcga

SEQ ID NO: 126847 - RNA, 23 nt, Artificial Sequence
  Synthetic
  misc_feature (9)..(9): n is a, c, g, or u
ugagaucuncgucugcgaggcga

SEQ ID NO: 126848 - RNA, 24 nt, Artificial Sequence
  Synthetic
  misc_feature (10)..(10): n is a, c, g, or u
uugagaucuncgucugcgaggcga

SEQ ID NO: 126849 - RNA, 18 nt, Artificial Sequence
  Synthetic
uccaacugaugaucggga

SEQ ID NO: 126850 - RNA, 22 nt, Artificial Sequence
  Synthetic
aggguccaacugaugaucggga

SEQ ID NO: 126851 - RNA, 23 nt, Artificial Sequence
  Synthetic
caggguccaacugaugaucggga

SEQ ID NO: 126852 - RNA, 21 nt, Artificial Sequence
  Synthetic
  misc_feature (16)..(16): n is a, c, g, or u
  misc_feature (19)..(19): n is a, c, g, or u
uuuugcgaaagcccanganga

SEQ ID NO: 126853 - RNA, 22 nt, Artificial Sequence
  Synthetic
  misc_feature (17)..(17): n is a, c, g, or u
  misc_feature (20)..(20): n is a, c, g, or u
auuuugcgaaagcccanganga

SEQ ID NO: 126854 - RNA, 23 nt, Artificial Sequence
  Synthetic
  misc_feature (18)..(18): n is a, c, g, or u
  misc_feature (21)..(21): n is a, c, g, or u
uauuuugcgaaagcccanganga

SEQ ID NO: 126855 - RNA, 21 nt, Artificial Sequence
  Synthetic
  misc_feature (3)..(4): n is a, c, g, or u
cunnuggccagugguccuuga

SEQ ID NO: 126856 - RNA, 24 nt, Artificial Sequence
  Synthetic
  misc_feature (6)..(7): n is a, c, g, or u
uggcunnuggccagugguccuuga

SEQ ID NO: 126857 - RNA, 21 nt, Artificial Sequence
  Synthetic
  misc_feature (7)..(7): n is a, c, g, or u
acgugunguuucccucuuaua

SEQ ID NO: 126858 - RNA, 22 nt, Artificial Sequence
  Synthetic
  misc_feature (8)..(8): n is a, c, g, or u
uacgugunguuucccucuuaua

SEQ ID NO: 126859 - RNA, 23 nt, Artificial Sequence
  Synthetic
  misc_feature (9)..(9): n is a, c, g, or u
cuacgugunguuucccucuuaua

SEQ ID NO: 126860 - RNA, 19 nt, Artificial Sequence
  Synthetic
cgaauuuuggccaagacac

SEQ ID NO: 126861 - RNA, 21 nt, Artificial Sequence
  Synthetic
ugcgaauuuuggccaagacac

SEQ ID NO: 126862 - RNA, 22 nt, Artificial Sequence
  Synthetic
cugcgaauuuuggccaagacac

SEQ ID NO: 126863 - RNA, 23 nt, Artificial Sequence
  Synthetic
acugcgaauuuuggccaagacac

SEQ ID NO: 126864 - RNA, 22 nt, Artificial Sequence
  Synthetic
agaaaauugagagaaguccacc

SEQ ID NO: 126865 - RNA, 23 nt, Artificial Sequence
  Synthetic
uagaaaauugagagaaguccacc

SEQ ID NO: 126866 - RNA, 24 nt, Artificial Sequence
  Synthetic
cuagaaaauugagagaaguccacc

SEQ ID NO: 126867 - RNA, 21 nt, Artificial Sequence
  Synthetic
  misc_feature (5)..(5): n is a, c, g, or u
caugnuguagcucuuguuccc

SEQ ID NO: 126868 - RNA, 22 nt, Artificial Sequence
  Synthetic
  misc_feature (6)..(6): n is a, c, g, or u
ccaugnuguagcucuuguuccc

SEQ ID NO: 126869 - RNA, 23 nt, Artificial Sequence
  Synthetic
  misc_feature (7)..(7): n is a, c, g, or u
cccaugnuguagcucuuguuccc

SEQ ID NO: 126870 - RNA, 24 nt, Artificial Sequence
  Synthetic
  misc_feature (8)..(8): n is a, c, g, or u
ucccaugnuguagcucuuguuccc

SEQ ID NO: 126871 - RNA, 21 nt, Artificial Sequence
  Synthetic
  misc_feature (16)..(16): n is a, c, g, or u
cguacugguuguugungaucc

SEQ ID NO: 126872 - RNA, 22 nt, Artificial Sequence
  Synthetic
  misc_feature (17)..(17): n is a, c, g, or u
ccguacugguuguugungaucc

SEQ ID NO: 126873 - RNA, 23 nt, Artificial Sequence
  Synthetic
  misc_feature (18)..(18): n is a, c, g, or u
cccguacugguuguugungaucc

SEQ ID NO: 126874 - RNA, 24 nt, Artificial Sequence
  Synthetic
  misc_feature (19)..(19): n is a, c, g, or u
ucccguacugguuguugungaucc

SEQ ID NO: 126875 - RNA, 21 nt, Artificial Sequence
  Synthetic
cguugacauugcugggagucc

SEQ ID NO: 126876 - RNA, 22 nt, Artificial Sequence
  Synthetic
ucguugacauugcugggagucc

SEQ ID NO: 126877 - RNA, 18 nt, Artificial Sequence
  Synthetic
cccgccuguaacacgagc

SEQ ID NO: 126878 - RNA, 19 nt, Artificial Sequence
  Synthetic
ccccgccuguaacacgagc

SEQ ID NO: 126879 - RNA, 20 nt, Artificial Sequence
  Synthetic
accccgccuguaacacgagc

SEQ ID NO: 126880 - RNA, 21 nt, Artificial Sequence
  Synthetic
aaccccgccuguaacacgagc

SEQ ID NO: 126881 - RNA, 22 nt, Artificial Sequence
  Synthetic
aaaccccgccuguaacacgagc

SEQ ID NO: 126882 - RNA, 23 nt, Artificial Sequence
  Synthetic
aaaaccccgccuguaacacgagc

SEQ ID NO: 126883 - RNA, 24 nt, Artificial Sequence
  Synthetic
aaaaaccccgccuguaacacgagc

SEQ ID NO: 126884 - RNA, 21 nt, Artificial Sequence
  Synthetic
aaacauagaguugccuugagc

SEQ ID NO: 126885 - RNA, 18 nt, Artificial Sequence
  Synthetic
auuacccacccagguagc

SEQ ID NO: 126886 - RNA, 19 nt, Artificial Sequence
  Synthetic
uauuacccacccagguagc

SEQ ID NO: 126887 - RNA, 20 nt, Artificial Sequence
  Synthetic
uuauuacccacccagguagc

SEQ ID NO: 126888 - RNA, 21 nt, Artificial Sequence
  Synthetic
auuauuacccacccagguagc

SEQ ID NO: 126889 - RNA, 22 nt, Artificial Sequence
  Synthetic
aauuauuacccacccagguagc

SEQ ID NO: 126890 - RNA, 23 nt, Artificial Sequence
  Synthetic
aaauuauuacccacccagguagc

SEQ ID NO: 126891 - RNA, 24 nt, Artificial Sequence
  Synthetic
caaauuauuacccacccagguagc

SEQ ID NO: 126892 - RNA, 21 nt, Artificial Sequence
  Synthetic
  misc_feature (6)..(6): n is a, c, g, or u
  misc_feature (9)..(9): n is a, c, g, or u
  misc_feature (14)..(14): n is a, c, g, or u
uguggnggngugancccuggc

SEQ ID NO: 126893 - RNA, 23 nt, Artificial Sequence
  Synthetic
  misc_feature (8)..(8): n is a, c, g, or u
  misc_feature (11)..(11): n is a, c, g, or u
  misc_feature (16)..(16): n is a, c, g, or u
cguguggnggngugancccuggc

SEQ ID NO: 126894 - RNA, 24 nt, Artificial Sequence
  Synthetic
  misc_feature (9)..(9): n is a, c, g, or u
  misc_feature (12)..(12): n is a, c, g, or u
  misc_feature (17)..(17): n is a, c, g, or u
ccguguggnggngugancccuggc

SEQ ID NO: 126895 - RNA, 21 nt, Artificial Sequence
  Synthetic
ccccagcagagaauggcuugc

SEQ ID NO: 126896 - RNA, 22 nt, Artificial Sequence
  Synthetic
cccccagcagagaauggcuugc

SEQ ID NO: 126897 - RNA, 23 nt, Artificial Sequence
  Synthetic
ccccccagcagagaauggcuugc

SEQ ID NO: 126898 - RNA, 24 nt, Artificial Sequence
  Synthetic
uccccccagcagagaauggcuugc

SEQ ID NO: 126899 - RNA, 23 nt, Artificial Sequence
  Synthetic
  misc_feature (13)..(13): n is a, c, g, or u
aggaaaauacagnccccugacuc

SEQ ID NO: 126900 - RNA, 24 nt, Artificial Sequence
  Synthetic
  misc_feature (14)..(14): n is a, c, g, or u
caggaaaauacagnccccugacuc

SEQ ID NO: 126901 - RNA, 21 nt, Artificial Sequence
  Synthetic
aggcauagcagcaggaugaag

SEQ ID NO: 126902 - RNA, 23 nt, Artificial Sequence
  Synthetic
ugaggcauagcagcaggaugaag

SEQ ID NO: 126903 - RNA, 24 nt, Artificial Sequence
  Synthetic
augaggcauagcagcaggaugaag

SEQ ID NO: 126904 - RNA, 21 nt, Artificial Sequence
  Synthetic
uaagaagaugaggcauagcag

SEQ ID NO: 126905 - RNA, 22 nt, Artificial Sequence
  Synthetic
auaagaagaugaggcauagcag

SEQ ID NO: 126906 - RNA, 23 nt, Artificial Sequence
  Synthetic
aauaagaagaugaggcauagcag

SEQ ID NO: 126907 - RNA, 24 nt, Artificial Sequence
  Synthetic
caauaagaagaugaggcauagcag

SEQ ID NO: 126908 - RNA, 23 nt, Artificial Sequence
  Synthetic
  misc_feature (16)..(16): n is a, c, g, or u
  misc_feature (19)..(19): n is a, c, g, or u
aggauuaaagauaggnacnguag

SEQ ID NO: 126909 - RNA, 24 nt, Artificial Sequence
  Synthetic
  misc_feature (17)..(17): n is a, c, g, or u
  misc_feature (20)..(20): n is a, c, g, or u
caggauuaaagauaggnacnguag

SEQ ID NO: 126910 - RNA, 22 nt, Artificial Sequence
  Synthetic
  misc_feature (9)..(9): n is a, c, g, or u
cggccccgngaggggucguccg

SEQ ID NO: 126911 - RNA, 24 nt, Artificial Sequence
  Synthetic
  misc_feature (11)..(11): n is a, c, g, or u
agcggccccgngaggggucguccg

SEQ ID NO: 126912 - RNA, 18 nt, Artificial Sequence
  Synthetic
cuuauguaagaccuuggg

SEQ ID NO: 126913 - RNA, 19 nt, Artificial Sequence
  Synthetic
ucuuauguaagaccuuggg

SEQ ID NO: 126914 - RNA, 20 nt, Artificial Sequence
  Synthetic
cucuuauguaagaccuuggg

SEQ ID NO: 126915 - RNA, 21 nt, Artificial Sequence
  Synthetic
ccucuuauguaagaccuuggg

SEQ ID NO: 126916 - RNA, 22 nt, Artificial Sequence
  Synthetic
uccucuuauguaagaccuuggg

SEQ ID NO: 126917 - RNA, 24 nt, Artificial Sequence
  Synthetic
aguccucuuauguaagaccuuggg

SEQ ID NO: 126918 - RNA, 21 nt, Artificial Sequence
  Synthetic
auuugguggucuauaggcugg

SEQ ID NO: 126919 - RNA, 22 nt, Artificial Sequence
  Synthetic
cauuugguggucuauaggcugg

SEQ ID NO: 126920 - RNA, 21 nt, Artificial Sequence
  Synthetic
  misc_feature (20)..(20): n is a, c, g, or u
agagucccaagcggccccgng

SEQ ID NO: 126921 - RNA, 22 nt, Artificial Sequence
  Synthetic
  misc_feature (1)..(1): n is a, c, g, or u
  misc_feature (21)..(21): n is a, c, g, or u
nagagucccaagcggccccgng

SEQ ID NO: 126922 - RNA, 23 nt, Artificial Sequence
  Synthetic
  misc_feature (2)..(2): n is a, c, g, or u
  misc_feature (22)..(22): n is a, c, g, or u
anagagucccaagcggccccgng

SEQ ID NO: 126923 - RNA, 18 nt, Artificial Sequence
  Synthetic
  misc_feature (5)..(5): n is a, c, g, or u
uuganuuggcuccgaaug

SEQ ID NO: 126924 - RNA, 19 nt, Artificial Sequence
  Synthetic
  misc_feature (6)..(6): n is a, c, g, or u
uuuganuuggcuccgaaug

SEQ ID NO: 126925 - RNA, 21 nt, Artificial Sequence
  Synthetic
  misc_feature (8)..(8): n is a, c, g, or u
uguuuganuuggcuccgaaug

SEQ ID NO: 126926 - RNA, 22 nt, Artificial Sequence
  Synthetic
  misc_feature (9)..(9): n is a, c, g, or u
uuguuuganuuggcuccgaaug

SEQ ID NO: 126927 - RNA, 23 nt, Artificial Sequence
  Synthetic
  misc_feature (10)..(10): n is a, c, g, or u
auuguuuganuuggcuccgaaug

SEQ ID NO: 126928 - RNA, 21 nt, Artificial Sequence
  Synthetic
aaauuggaggacaggagguug

SEQ ID NO: 126929 - RNA, 22 nt, Artificial Sequence
  Synthetic
caaauuggaggacaggagguug

SEQ ID NO: 126930 - RNA, 23 nt, Artificial Sequence
  Synthetic
acaaauuggaggacaggagguug

SEQ ID NO: 126931 - RNA, 21 nt, Artificial Sequence
  Synthetic
  misc_feature (21)..(21): n is a, c, g, or u
aagaagucagaaggcaaaaan

SEQ ID NO: 126932 - RNA, 22 nt, Artificial Sequence
  Synthetic
  misc_feature (22)..(22): n is a, c, g, or u
aaagaagucagaaggcaaaaan

SEQ ID NO: 126933 - RNA, 21 nt, Artificial Sequence
  Synthetic
  misc_feature (17)..(17): n is a, c, g, or u
  misc_feature (21)..(21): n is a, c, g, or u
ugugagaggcaauauunggan

SEQ ID NO: 126934 - RNA, 22 nt, Artificial Sequence
  Synthetic
  misc_feature (18)..(18): n is a, c, g, or u
  misc_feature (22)..(22): n is a, c, g, or u
augugagaggcaauauunggan

SEQ ID NO: 126935 - RNA, 24 nt, Artificial Sequence
  Synthetic
  misc_feature (20)..(20): n is a, c, g, or u
  misc_feature (24)..(24): n is a, c, g, or u
agaugugagaggcaauauunggan

SEQ ID NO: 126936 - RNA, 21 nt, Artificial Sequence
  Synthetic
  misc_feature (19)..(19): n is a, c, g, or u
  misc_feature (21)..(21): n is a, c, g, or u
ugauguucuccauguucgncn

SEQ ID NO: 126937 - RNA, 23 nt, Artificial Sequence
  Synthetic
  misc_feature (21)..(21): n is a, c, g, or u
  misc_feature (23)..(23): n is a, c, g, or u
ugugauguucuccauguucgncn

SEQ ID NO: 126938 - RNA, 24 nt, Artificial Sequence
  Synthetic
  misc_feature (22)..(22): n is a, c, g, or u
  misc_feature (24)..(24): n is a, c, g, or u
augugauguucuccauguucgncn

SEQ ID NO: 126939 - RNA, 18 nt, Artificial Sequence
  Synthetic
ugggguugaagucccaau

SEQ ID NO: 126940 - RNA, 19 nt, Artificial Sequence
  Synthetic
augggguugaagucccaau

SEQ ID NO: 126941 - RNA, 21 nt, Artificial Sequence
  Synthetic
ugaugggguugaagucccaau

SEQ ID NO: 126942 - RNA, 22 nt, Artificial Sequence
  Synthetic
uugaugggguugaagucccaau

SEQ ID NO: 126943 - RNA, 23 nt, Artificial Sequence
  Synthetic
cuugaugggguugaagucccaau

SEQ ID NO: 126944 - RNA, 24 nt, Artificial Sequence
  Synthetic
ccuugaugggguugaagucccaau

SEQ ID NO: 126945 - RNA, 22 nt, Artificial Sequence
  Synthetic
ugucucuuagagguggagagau

SEQ ID NO: 126946 - RNA, 23 nt, Artificial Sequence
  Synthetic
cugucucuuagagguggagagau

SEQ ID NO: 126947 - RNA, 24 nt, Artificial Sequence
  Synthetic
acugucucuuagagguggagagau

SEQ ID NO: 126948 - RNA, 22 nt, Artificial Sequence
  Synthetic
  misc_feature (11)..(11): n is a, c, g, or u
  misc_feature (14)..(14): n is a, c, g, or u
cgaaagcccangangaugggau

SEQ ID NO: 126949 - RNA, 24 nt, Artificial Sequence
  Synthetic
  misc_feature (13)..(13): n is a, c, g, or u
  misc_feature (16)..(16): n is a, c, g, or u
ugcgaaagcccangangaugggau

SEQ ID NO: 126950 - RNA, 21 nt, Artificial Sequence
  Synthetic
  misc_feature (17)..(17): n is a, c, g, or u
aguaaugauuaacuacnugau

SEQ ID NO: 126951 - RNA, 22 nt, Artificial Sequence
  Synthetic
  misc_feature (18)..(18): n is a, c, g, or u
aaguaaugauuaacuacnugau

SEQ ID NO: 126952 - RNA, 23 nt, Artificial Sequence
  Synthetic
  misc_feature (1)..(1): n is a, c, g, or u
  misc_feature (19)..(19): n is a, c, g, or u
naaguaaugauuaacuacnugau

SEQ ID NO: 126953 - RNA, 21 nt, Artificial Sequence
  Synthetic
caguagcuccaaauucuuuau

SEQ ID NO: 126954 - RNA, 22 nt, Artificial Sequence
  Synthetic
acaguagcuccaaauucuuuau

SEQ ID NO: 126955 - RNA, 23 nt, Artificial Sequence
  Synthetic
cacaguagcuccaaauucuuuau

SEQ ID NO: 126956 - RNA, 24 nt, Artificial Sequence
  Synthetic
ccacaguagcuccaaauucuuuau

SEQ ID NO: 126957 - RNA, 21 nt, Artificial Sequence
  Synthetic
agugauuggagguuggggacu

SEQ ID NO: 126958 - RNA, 23 nt, Artificial Sequence
  Synthetic
ugagugauuggagguuggggacu

SEQ ID NO: 126959 - RNA, 18 nt, Artificial Sequence
  Synthetic
aacacgagcagggguccu

SEQ ID NO: 126960 - RNA, 19 nt, Artificial Sequence
  Synthetic
uaacacgagcagggguccu

SEQ ID NO: 126961 - RNA, 21 nt, Artificial Sequence
  Synthetic
uguaacacgagcagggguccu

SEQ ID NO: 126962 - RNA, 22 nt, Artificial Sequence
  Synthetic
cuguaacacgagcagggguccu

SEQ ID NO: 126963 - RNA, 23 nt, Artificial Sequence
  Synthetic
ccuguaacacgagcagggguccu

SEQ ID NO: 126964 - RNA, 18 nt, Artificial Sequence
  Synthetic
cgagcaaaacaagcggcu

SEQ ID NO: 126965 - RNA, 20 nt, Artificial Sequence
  Synthetic
ugcgagcaaaacaagcggcu

SEQ ID NO: 126966 - RNA, 21 nt, Artificial Sequence
  Synthetic
cugcgagcaaaacaagcggcu

SEQ ID NO: 126967 - RNA, 24 nt, Artificial Sequence
  Synthetic
cggcugcgagcaaaacaagcggcu

SEQ ID NO: 126968 - RNA, 21 nt, Artificial Sequence
  Synthetic
  misc_feature (15)..(15): n is a, c, g, or u
ucuggauuguuuganuuggcu

SEQ ID NO: 126969 - RNA, 22 nt, Artificial Sequence
  Synthetic
  misc_feature (16)..(16): n is a, c, g, or u
aucuggauuguuuganuuggcu

SEQ ID NO: 126970 - RNA, 23 nt, Artificial Sequence
  Synthetic
  misc_feature (17)..(17): n is a, c, g, or u
aaucuggauuguuuganuuggcu

SEQ ID NO: 126971 - RNA, 24 nt, Artificial Sequence
  Synthetic
  misc_feature (18)..(18): n is a, c, g, or u
caaucuggauuguuuganuuggcu

SEQ ID NO: 126972 - RNA, 18 nt, Artificial Sequence
  Synthetic
ucggucguugacauugcu

SEQ ID NO: 126973 - RNA, 21 nt, Artificial Sequence
  Synthetic
aggucggucguugacauugcu

SEQ ID NO: 126974 - RNA, 22 nt, Artificial Sequence
  Synthetic
aaggucggucguugacauugcu

SEQ ID NO: 126975 - RNA, 23 nt, Artificial Sequence
  Synthetic
caaggucggucguugacauugcu

SEQ ID NO: 126976 - RNA, 24 nt, Artificial Sequence
  Synthetic
ucaaggucggucguugacauugcu

SEQ ID NO: 126977 - RNA, 21 nt, Artificial Sequence
  Synthetic
  misc_feature (1)..(1): n is a, c, g, or u
  misc_feature (4)..(4): n is a, c, g, or u
naungccaagccccagccagu

SEQ ID NO: 126978 - RNA, 22 nt, Artificial Sequence
  Synthetic
  misc_feature (2)..(2): n is a, c, g, or u
  misc_feature (5)..(5): n is a, c, g, or u
cnaungccaagccccagccagu

SEQ ID NO: 126979 - RNA, 23 nt, Artificial Sequence
  Synthetic
  misc_feature (3)..(3): n is a, c, g, or u
  misc_feature (6)..(6): n is a, c, g, or u
ccnaungccaagccccagccagu

SEQ ID NO: 126980 - RNA, 21 nt, Artificial Sequence
  Synthetic
agcggcuaggaguuccgcagu

SEQ ID NO: 126981 - RNA, 22 nt, Artificial Sequence
  Synthetic
aagcggcuaggaguuccgcagu

SEQ ID NO: 126982 - RNA, 23 nt, Artificial Sequence
  Synthetic
caagcggcuaggaguuccgcagu

SEQ ID NO: 126983 - RNA, 24 nt, Artificial Sequence
  Synthetic
acaagcggcuaggaguuccgcagu

SEQ ID NO: 126984 - RNA, 18 nt, Artificial Sequence
  Synthetic
ucuauaggcuggaggagu

SEQ ID NO: 126985 - RNA, 21 nt, Artificial Sequence
  Synthetic
uggucuauaggcuggaggagu

SEQ ID NO: 126986 - RNA, 24 nt, Artificial Sequence
  Synthetic
ugguggucuauaggcuggaggagu

SEQ ID NO: 126987 - RNA, 18 nt, Artificial Sequence
  Synthetic
uagacucugcgguauugu

SEQ ID NO: 126988 - RNA, 19 nt, Artificial Sequence
  Synthetic
cuagacucugcgguauugu

SEQ ID NO: 126989 - RNA, 20 nt, Artificial Sequence
  Synthetic
ucuagacucugcgguauugu

SEQ ID NO: 126990 - RNA, 22 nt, Artificial Sequence
  Synthetic
agucuagacucugcgguauugu

SEQ ID NO: 126991 - RNA, 24 nt, Artificial Sequence
  Synthetic
cgagucuagacucugcgguauugu

SEQ ID NO: 126992 - RNA, 21 nt, Artificial Sequence
  Synthetic
  misc_feature (11)..(11): n is a, c, g, or u
aaccccaucunuuuguuuugu

SEQ ID NO: 126993 - RNA, 22 nt, Artificial Sequence
  Synthetic
  misc_feature (12)..(12): n is a, c, g, or u
uaaccccaucunuuuguuuugu

SEQ ID NO: 126994 - RNA, 23 nt, Artificial Sequence
  Synthetic
  misc_feature (13)..(13): n is a, c, g, or u
auaaccccaucunuuuguuuugu

SEQ ID NO: 126995 - RNA, 24 nt, Artificial Sequence
  Synthetic
  misc_feature (14)..(14): n is a, c, g, or u
aauaaccccaucunuuuguuuugu

SEQ ID NO: 126996 - RNA, 23 nt, Artificial Sequence
  Synthetic
  misc_feature (7)..(7): n is a, c, g, or u
aggaaangaaggaguuugccauu

SEQ ID NO: 126997 - RNA, 24 nt, Artificial Sequence
  Synthetic
  misc_feature (8)..(8): n is a, c, g, or u
uaggaaangaaggaguuugccauu

SEQ ID NO: 126998 - RNA, 23 nt, Artificial Sequence
  Synthetic
  misc_feature (12)..(12): n is a, c, g, or u
uggcugcuaggnuguacugccaa

SEQ ID NO: 126999 - RNA, 24 nt, Artificial Sequence
  Synthetic
  misc_feature (13)..(13): n is a, c, g, or u
auggcugcuaggnuguacugccaa

SEQ ID NO: 127000 - RNA, 21 nt, Artificial Sequence
  Synthetic
  misc_feature (18)..(18): n is a, c, g, or u
aacccuaacaaaacaaanaga

SEQ ID NO: 127001 - RNA, 22 nt, Artificial Sequence
  Synthetic
  misc_feature (19)..(19): n is a, c, g, or u
aaacccuaacaaaacaaanaga

SEQ ID NO: 127002 - RNA, 23 nt, Artificial Sequence
  Synthetic
  misc_feature (20)..(20): n is a, c, g, or u
uaaacccuaacaaaacaaanaga

SEQ ID NO: 127003 - RNA, 24 nt, Artificial Sequence
  Synthetic
  misc_feature (21)..(21): n is a, c, g, or u
uuaaacccuaacaaaacaaanaga

SEQ ID NO: 127004 - RNA, 18 nt, Artificial Sequence
  Synthetic
uggacauugacccuuaua

SEQ ID NO: 127005 - RNA, 19 nt, Artificial Sequence
  Synthetic
auggacauugacccuuaua

SEQ ID NO: 127006 - RNA, 20 nt, Artificial Sequence
  Synthetic
cauggacauugacccuuaua

SEQ ID NO: 127007 - RNA, 19 nt, Artificial Sequence
  Synthetic
cgggguuuuucuuguugac

SEQ ID NO: 127008 - RNA, 22 nt, Artificial Sequence
  Synthetic
aggcgggguuuuucuuguugac

SEQ ID NO: 127009 - RNA, 23 nt, Artificial Sequence
  Synthetic
caggcgggguuuuucuuguugac

SEQ ID NO: 127010 - RNA, 24 nt, Artificial Sequence
  Synthetic
acaggcgggguuuuucuuguugac

SEQ ID NO: 127011 - RNA, 21 nt, Artificial Sequence
  Synthetic
  misc_feature (16)..(16): n is a, c, g, or u
ccaccaagcucugcangaucc

SEQ ID NO: 127012 - RNA, 22 nt, Artificial Sequence
  Synthetic
  misc_feature (17)..(17): n is a, c, g, or u
uccaccaagcucugcangaucc

SEQ ID NO: 127013 - RNA, 23 nt, Artificial Sequence
  Synthetic
  misc_feature (18)..(18): n is a, c, g, or u
uuccaccaagcucugcangaucc

SEQ ID NO: 127014 - RNA, 24 nt, Artificial Sequence
  Synthetic
  misc_feature (1)..(1): n is a, c, g, or u
  misc_feature (19)..(19): n is a, c, g, or u
nuuccaccaagcucugcangaucc

SEQ ID NO: 127015 - RNA, 21 nt, Artificial Sequence
  Synthetic
  misc_feature (5)..(5): n is a, c, g, or u
  misc_feature (8)..(8): n is a, c, g, or u
cuacngunccuaucuuuaauc

SEQ ID NO: 127016 - RNA, 22 nt, Artificial Sequence
  Synthetic
  misc_feature (6)..(6): n is a, c, g, or u
  misc_feature (9)..(9): n is a, c, g, or u
ucuacngunccuaucuuuaauc

SEQ ID NO: 127017 - RNA, 23 nt, Artificial Sequence
  Synthetic
  misc_feature (1)..(1): n is a, c, g, or u
  misc_feature (7)..(7): n is a, c, g, or u
  misc_feature (10)..(10): n is a, c, g, or u
nucuacngunccuaucuuuaauc

SEQ ID NO: 127018 - RNA, 24 nt, Artificial Sequence
  Synthetic
  misc_feature (2)..(2): n is a, c, g, or u
  misc_feature (8)..(8): n is a, c, g, or u
  misc_feature (11)..(11): n is a, c, g, or u
cnucuacngunccuaucuuuaauc

SEQ ID NO: 127019 - RNA, 21 nt, Artificial Sequence
  Synthetic
  misc_feature (17)..(17): n is a, c, g, or u
aucuuucuguucccaanccuc

SEQ ID NO: 127020 - RNA, 22 nt, Artificial Sequence
  Synthetic
  misc_feature (18)..(18): n is a, c, g, or u
aaucuuucuguucccaanccuc

SEQ ID NO: 127021 - RNA, 24 nt, Artificial Sequence
  Synthetic
  misc_feature (20)..(20): n is a, c, g, or u
cgaaucuuucuguucccaanccuc

SEQ ID NO: 127022 - RNA, 19 nt, Artificial Sequence
  Synthetic
cgcagaagaucucaaucuc

SEQ ID NO: 127023 - RNA, 20 nt, Artificial Sequence
  Synthetic
ucgcagaagaucucaaucuc

SEQ ID NO: 127024 - RNA, 22 nt, Artificial Sequence
  Synthetic
cgucgcagaagaucucaaucuc

SEQ ID NO: 127025 - RNA, 24 nt, Artificial Sequence
  Synthetic
cgcgucgcagaagaucucaaucuc

SEQ ID NO: 127026 - RNA, 18 nt, Artificial Sequence
  Synthetic
ccguuuguccucuaauuc

SEQ ID NO: 127027 - RNA, 19 nt, Artificial Sequence
  Synthetic
cccguuuguccucuaauuc

SEQ ID NO: 127028 - RNA, 21 nt, Artificial Sequence
  Synthetic
ugcccguuuguccucuaauuc

SEQ ID NO: 127029 - RNA, 22 nt, Artificial Sequence
  Synthetic
uugcccguuuguccucuaauuc

SEQ ID NO: 127030 - RNA, 24 nt, Artificial Sequence
  Synthetic
uguugcccguuuguccucuaauuc

SEQ ID NO: 127031 - RNA, 18 nt, Artificial Sequence
  Synthetic
agaauccucacaauaccg

SEQ ID NO: 127032 - RNA, 19 nt, Artificial Sequence
  Synthetic
aagaauccucacaauaccg

SEQ ID NO: 127033 - RNA, 20 nt, Artificial Sequence
  Synthetic
caagaauccucacaauaccg

SEQ ID NO: 127034 - RNA, 21 nt, Artificial Sequence
  Synthetic
acaagaauccucacaauaccg

SEQ ID NO: 127035 - RNA, 23 nt, Artificial Sequence
  Synthetic
ugacaagaauccucacaauaccg

SEQ ID NO: 127036 - RNA, 24 nt, Artificial Sequence
  Synthetic
uugacaagaauccucacaauaccg

SEQ ID NO: 127037 - RNA, 19 nt, Artificial Sequence
  Synthetic
uguuuacgucccgucggcg

SEQ ID NO: 127038 - RNA, 20 nt, Artificial Sequence
  Synthetic
uuguuuacgucccgucggcg

SEQ ID NO: 127039 - RNA, 21 nt, Artificial Sequence
  Synthetic
uuuguuuacgucccgucggcg

SEQ ID NO: 127040 - RNA, 22 nt, Artificial Sequence
  Synthetic
cuuuguuuacgucccgucggcg

SEQ ID NO: 127041 - RNA, 23 nt, Artificial Sequence
  Synthetic
ccuuuguuuacgucccgucggcg

SEQ ID NO: 127042 - RNA, 24 nt, Artificial Sequence
  Synthetic
uccuuuguuuacgucccgucggcg

SEQ ID NO: 127043 - RNA, 21 nt, Artificial Sequence
  Synthetic
uccaauuuguccugguuaucg

SEQ ID NO: 127044 - RNA, 22 nt, Artificial Sequence
  Synthetic
cuccaauuuguccugguuaucg

SEQ ID NO: 127045 - RNA, 23 nt, Artificial Sequence
  Synthetic
ccuccaauuuguccugguuaucg

SEQ ID NO: 127046 - RNA, 24 nt, Artificial Sequence
  Synthetic
uccuccaauuuguccugguuaucg

SEQ ID NO: 127047 - RNA, 18 nt, Artificial Sequence
  Synthetic
cccugcucguguuacagg

SEQ ID NO: 127048 - RNA, 19 nt, Artificial Sequence
  Synthetic
ccccugcucguguuacagg

SEQ ID NO: 127049 - RNA, 20 nt, Artificial Sequence
  Synthetic
accccugcucguguuacagg

SEQ ID NO: 127050 - RNA, 23 nt, Artificial Sequence
  Synthetic
aggaccccugcucguguuacagg

SEQ ID NO: 127051 - RNA, 24 nt, Artificial Sequence
  Synthetic
uaggaccccugcucguguuacagg

SEQ ID NO: 127052 - RNA, 18 nt, Artificial Sequence
  Synthetic
ccucgcaaaggcaugggg

SEQ ID NO: 127053 - RNA, 19 nt, Artificial Sequence
  Synthetic
accucgcaaaggcaugggg

SEQ ID NO: 127054 - RNA, 20 nt, Artificial Sequence
  Synthetic
aaccucgcaaaggcaugggg

SEQ ID NO: 127055 - RNA, 21 nt, Artificial Sequence
  Synthetic
aaaccucgcaaaggcaugggg

SEQ ID NO: 127056 - RNA, 22 nt, Artificial Sequence
  Synthetic
aaaaccucgcaaaggcaugggg

SEQ ID NO: 127057 - RNA, 23 nt, Artificial Sequence
  Synthetic
caaaaccucgcaaaggcaugggg

SEQ ID NO: 127058 - RNA, 24 nt, Artificial Sequence
  Synthetic
ucaaaaccucgcaaaggcaugggg

SEQ ID NO: 127059 - RNA, 22 nt, Artificial Sequence
  Synthetic
aggcaagccauucucugcuggg

SEQ ID NO: 127060 - RNA, 23 nt, Artificial Sequence
  Synthetic
caggcaagccauucucugcuggg

SEQ ID NO: 127061 - RNA, 24 nt, Artificial Sequence
  Synthetic
ucaggcaagccauucucugcuggg

SEQ ID NO: 127062 - RNA, 21 nt, Artificial Sequence
  Synthetic
  misc_feature (3)..(3): n is a, c, g, or u
uunaugacucuagcuaccugg

SEQ ID NO: 127063 - RNA, 22 nt, Artificial Sequence
  Synthetic
  misc_feature (4)..(4): n is a, c, g, or u
auunaugacucuagcuaccugg

SEQ ID NO: 127064 - RNA, 23 nt, Artificial Sequence
  Synthetic
  misc_feature (5)..(5): n is a, c, g, or u
aauunaugacucuagcuaccugg

SEQ ID NO: 127065 - RNA, 21 nt, Artificial Sequence
  Synthetic
auaaagaauuuggagcuacug

SEQ ID NO: 127066 - RNA, 22 nt, Artificial Sequence
  Synthetic
uauaaagaauuuggagcuacug

SEQ ID NO: 127067 - RNA, 23 nt, Artificial Sequence
  Synthetic
uuauaaagaauuuggagcuacug

SEQ ID NO: 127068 - RNA, 24 nt, Artificial Sequence
  Synthetic
cuuauaaagaauuuggagcuacug

SEQ ID NO: 127069 - RNA, 21 nt, Artificial Sequence
  Synthetic
  misc_feature (7)..(7): n is a, c, g, or u
  misc_feature (21)..(21): n is a, c, g, or u
aauuugnaagauccagcaucn

SEQ ID NO: 127070 - RNA, 22 nt, Artificial Sequence
  Synthetic
  misc_feature (8)..(8): n is a, c, g, or u
  misc_feature (22)..(22): n is a, c, g, or u
uaauuugnaagauccagcaucn

SEQ ID NO: 127071 - RNA, 23 nt, Artificial Sequence
  Synthetic
  misc_feature (9)..(9): n is a, c, g, or u
  misc_feature (23)..(23): n is a, c, g, or u
auaauuugnaagauccagcaucn

SEQ ID NO: 127072 - RNA, 24 nt, Artificial Sequence
  Synthetic
  misc_feature (10)..(10): n is a, c, g, or u
  misc_feature (24)..(24): n is a, c, g, or u
aauaauuugnaagauccagcaucn

SEQ ID NO: 127073 - RNA, 21 nt, Artificial Sequence
  Synthetic
cgaacauggagaacaucacau

SEQ ID NO: 127074 - RNA, 22 nt, Artificial Sequence
  Synthetic
  misc_feature (1)..(1): n is a, c, g, or u
ncgaacauggagaacaucacau

SEQ ID NO: 127075 - RNA, 24 nt, Artificial Sequence
  Synthetic
  misc_feature (1)..(1): n is a, c, g, or u
  misc_feature (3)..(3): n is a, c, g, or u
ngncgaacauggagaacaucacau

SEQ ID NO: 127076 - RNA, 18 nt, Artificial Sequence
  Synthetic
cuuucgcaaaauaccuau

SEQ ID NO: 127077 - RNA, 22 nt, Artificial Sequence
  Synthetic
ugggcuuucgcaaaauaccuau

SEQ ID NO: 127078 - RNA, 23 nt, Artificial Sequence
  Synthetic
  misc_feature (1)..(1): n is a, c, g, or u
nugggcuuucgcaaaauaccuau

SEQ ID NO: 127079 - RNA, 24 nt, Artificial Sequence
  Synthetic
  misc_feature (2)..(2): n is a, c, g, or u
cnugggcuuucgcaaaauaccuau

SEQ ID NO: 127080 - RNA, 21 nt, Artificial Sequence
  Synthetic
  misc_feature (18)..(18): n is a, c, g, or u
cacuguuuggcuuucagnuau

SEQ ID NO: 127081 - RNA, 22 nt, Artificial Sequence
  Synthetic
  misc_feature (19)..(19): n is a, c, g, or u
ccacuguuuggcuuucagnuau

SEQ ID NO: 127082 - RNA, 23 nt, Artificial Sequence
  Synthetic
  misc_feature (20)..(20): n is a, c, g, or u
cccacuguuuggcuuucagnuau

SEQ ID NO: 127083 - RNA, 24 nt, Artificial Sequence
  Synthetic
  misc_feature (21)..(21): n is a, c, g, or u
ccccacuguuuggcuuucagnuau

SEQ ID NO: 127084 - RNA, 21 nt, Artificial Sequence
  Synthetic
ucauguugcuguacaaaaccu

SEQ ID NO: 127085 - RNA, 22 nt, Artificial Sequence
  Synthetic
cucauguugcuguacaaaaccu

SEQ ID NO: 127086 - RNA, 23 nt, Artificial Sequence
  Synthetic
ccucauguugcuguacaaaaccu

SEQ ID NO: 127087 - RNA, 24 nt, Artificial Sequence
  Synthetic
cccucauguugcuguacaaaaccu

SEQ ID NO: 127088 - RNA, 18 nt, Artificial Sequence
  Synthetic
  misc_feature (11)..(11): n is a, c, g, or u
cucuguaucgngaagccu

SEQ ID NO: 127089 - RNA, 20 nt, Artificial Sequence
  Synthetic
  misc_feature (13)..(13): n is a, c, g, or u
agcucuguaucgngaagccu

SEQ ID NO: 127090 - RNA, 21 nt, Artificial Sequence
  Synthetic
  misc_feature (14)..(14): n is a, c, g, or u
cagcucuguaucgngaagccu

SEQ ID NO: 127091 - RNA, 22 nt, Artificial Sequence
  Synthetic
  misc_feature (15)..(15): n is a, c, g, or u
ucagcucuguaucgngaagccu

SEQ ID NO: 127092 - RNA, 23 nt, Artificial Sequence
  Synthetic
  misc_feature (16)..(16): n is a, c, g, or u
cucagcucuguaucgngaagccu

SEQ ID NO: 127093 - RNA, 24 nt, Artificial Sequence
  Synthetic
  misc_feature (17)..(17): n is a, c, g, or u
ccucagcucuguaucgngaagccu

SEQ ID NO: 127094 - RNA, 22 nt, Artificial Sequence
  Synthetic
uguuaccaauuuucuuuugucu

SEQ ID NO: 127095 - RNA, 23 nt, Artificial Sequence
  Synthetic
cuguuaccaauuuucuuuugucu

SEQ ID NO: 127096 - RNA, 18 nt, Artificial Sequence
  Synthetic
uuuggucucuuucggagu

SEQ ID NO: 127097 - RNA, 19 nt, Artificial Sequence
  Synthetic
auuuggucucuuucggagu

SEQ ID NO: 127098 - RNA, 20 nt, Artificial Sequence
  Synthetic
uauuuggucucuuucggagu

SEQ ID NO: 127099 - RNA, 21 nt, Artificial Sequence
  Synthetic
  misc_feature (1)..(1): n is a, c, g, or u
nuauuuggucucuuucggagu

SEQ ID NO: 127100 - RNA, 22 nt, Artificial Sequence
  Synthetic
  misc_feature (2)..(2): n is a, c, g, or u
anuauuuggucucuuucggagu

SEQ ID NO: 127101 - RNA, 24 nt, Artificial Sequence
  Synthetic
  misc_feature (4)..(4): n is a, c, g, or u
uganuauuuggucucuuucggagu

SEQ ID NO: 127102 - RNA, 21 nt, Artificial Sequence
  Synthetic
  misc_feature (8)..(9): n is a, c, g, or u
cuggccannagccaaccaggu

SEQ ID NO: 127103 - RNA, 22 nt, Artificial Sequence
  Synthetic
  misc_feature (9)..(10): n is a, c, g, or u
acuggccannagccaaccaggu

SEQ ID NO: 127104 - RNA, 23 nt, Artificial Sequence
  Synthetic
  misc_feature (10)..(11): n is a, c, g, or u
cacuggccannagccaaccaggu

SEQ ID NO: 127105 - RNA, 24 nt, Artificial Sequence
  Synthetic
  misc_feature (11)..(12): n is a, c, g, or u
ccacuggccannagccaaccaggu

SEQ ID NO: 127106 - RNA, 21 nt, Artificial Sequence
  Synthetic
  misc_feature (18)..(18): n is a, c, g, or u
uggaaaguaugucaaagnauu

SEQ ID NO: 127107 - RNA, 22 nt, Artificial Sequence
  Synthetic
  misc_feature (19)..(19): n is a, c, g, or u
uuggaaaguaugucaaagnauu

SEQ ID NO: 127108 - RNA, 23 nt, Artificial Sequence
  Synthetic
  misc_feature (20)..(20): n is a, c, g, or u
auuggaaaguaugucaaagnauu

SEQ ID NO: 127109 - RNA, 21 nt, Artificial Sequence
  Synthetic
cucaucuucuuauugguucuu

SEQ ID NO: 127110 - RNA, 22 nt, Artificial Sequence
  Synthetic
ccucaucuucuuauugguucuu

SEQ ID NO: 127111 - RNA, 24 nt, Artificial Sequence
  Synthetic
ugccucaucuucuuauugguucuu

SEQ ID NO: 127112 - RNA, 21 nt, Artificial Sequence
  Synthetic
  misc_feature (2)..(2): n is a, c, g, or u
  misc_feature (14)..(14): n is a, c, g, or u
cnacacguagcgcnucauuuu

SEQ ID NO: 127113 - RNA, 22 nt, Artificial Sequence
  Synthetic
  misc_feature (3)..(3): n is a, c, g, or u
  misc_feature (15)..(15): n is a, c, g, or u
acnacacguagcgcnucauuuu

SEQ ID NO: 127114 - RNA, 23 nt, Artificial Sequence
  Synthetic
  misc_feature (4)..(4): n is a, c, g, or u
  misc_feature (16)..(16): n is a, c, g, or u
aacnacacguagcgcnucauuuu

SEQ ID NO: 127115 - RNA, 24 nt, Artificial Sequence
  Synthetic
  misc_feature (5)..(5): n is a, c, g, or u
  misc_feature (17)..(17): n is a, c, g, or u
aaacnacacguagcgcnucauuuu

SEQ ID NO: 127116 - RNA, 18 nt, Artificial Sequence
  Synthetic
  misc_feature (14)..(14): n is a, c, g, or u
caggccguugccgngcaa

SEQ ID NO: 127117 - RNA, 19 nt, Artificial Sequence
  Synthetic
  misc_feature (15)..(15): n is a, c, g, or u
ccaggccguugccgngcaa

SEQ ID NO: 127118 - RNA, 20 nt, Artificial Sequence
  Synthetic
  misc_feature (16)..(16): n is a, c, g, or u
accaggccguugccgngcaa

SEQ ID NO: 127119 - RNA, 18 nt, Artificial Sequence
  Synthetic
  misc_feature (10)..(10): n is a, c, g, or u
  misc_feature (13)..(13): n is a, c, g, or u
aauaaugucnucnuguaa

SEQ ID NO: 127120 - RNA, 19 nt, Artificial Sequence
  Synthetic
  misc_feature (11)..(11): n is a, c, g, or u
  misc_feature (14)..(14): n is a, c, g, or u
uaauaaugucnucnuguaa

SEQ ID NO: 127121 - RNA, 20 nt, Artificial Sequence
  Synthetic
  misc_feature (12)..(12): n is a, c, g, or u
  misc_feature (15)..(15): n is a, c, g, or u
uuaauaaugucnucnuguaa

SEQ ID NO: 127122 - RNA, 18 nt, Artificial Sequence
  Synthetic
agcaacaugagggaaaca

SEQ ID NO: 127123 - RNA, 19 nt, Artificial Sequence
  Synthetic
cagcaacaugagggaaaca

SEQ ID NO: 127124 - RNA, 20 nt, Artificial Sequence
  Synthetic
acagcaacaugagggaaaca

SEQ ID NO: 127125 - RNA, 18 nt, Artificial Sequence
  Synthetic
ucccaccuuaugagucca

SEQ ID NO: 127126 - RNA, 19 nt, Artificial Sequence
  Synthetic
uucccaccuuaugagucca

SEQ ID NO: 127127 - RNA, 20 nt, Artificial Sequence
  Synthetic
uuucccaccuuaugagucca

SEQ ID NO: 127128 - RNA, 18 nt, Artificial Sequence
  Synthetic
  misc_feature (7)..(7): n is a, c, g, or u
uagaaunccagccuucca

SEQ ID NO: 127129 - RNA, 19 nt, Artificial Sequence
  Synthetic
  misc_feature (8)..(8): n is a, c, g, or u
auagaaunccagccuucca

SEQ ID NO: 127130 - RNA, 20 nt, Artificial Sequence
  Synthetic
  misc_feature (9)..(9): n is a, c, g, or u
uauagaaunccagccuucca

SEQ ID NO: 127131 - RNA, 18 nt, Artificial Sequence
  Synthetic
  misc_feature (4)..(4): n is a, c, g, or u
caunaauuccccccagca

SEQ ID NO: 127132 - RNA, 19 nt, Artificial Sequence
  Synthetic
  misc_feature (5)..(5): n is a, c, g, or u
ucaunaauuccccccagca

SEQ ID NO: 127133 - RNA, 20 nt, Artificial Sequence
  Synthetic
  misc_feature (6)..(6): n is a, c, g, or u
gucaunaauuccccccagca

SEQ ID NO: 127134 - RNA, 18 nt, Artificial Sequence
  Synthetic
agacggagaaggggacga

SEQ ID NO: 127135 - RNA, 19 nt, Artificial Sequence
  Synthetic
cagacggagaaggggacga

SEQ ID NO: 127136 - RNA, 20 nt, Artificial Sequence
  Synthetic
gcagacggagaaggggacga

SEQ ID NO: 127137 - RNA, 18 nt, Artificial Sequence
  Synthetic
  misc_feature (7)..(7): n is a, c, g, or u
  misc_feature (16)..(16): n is a, c, g, or u
augaaunuuaggaaanga

SEQ ID NO: 127138 - RNA, 19 nt, Artificial Sequence
  Synthetic
  misc_feature (8)..(8): n is a, c, g, or u
  misc_feature (17)..(17): n is a, c, g, or u
aaugaaunuuaggaaanga

SEQ ID NO: 127139 - RNA, 20 nt, Artificial Sequence
  Synthetic
  misc_feature (9)..(9): n is a, c, g, or u
  misc_feature (18)..(18): n is a, c, g, or u
aaaugaaunuuaggaaanga

SEQ ID NO: 127140 - RNA, 21 nt, Artificial Sequence
  Synthetic
  misc_feature (10)..(10): n is a, c, g, or u
  misc_feature (19)..(19): n is a, c, g, or u
uaaaugaaunuuaggaaanga

SEQ ID NO: 127141 - RNA, 22 nt, Artificial Sequence
  Synthetic
  misc_feature (11)..(11): n is a, c, g, or u
  misc_feature (20)..(20): n is a, c, g, or u
guaaaugaaunuuaggaaanga

SEQ ID NO: 127142 - RNA, 23 nt, Artificial Sequence
  Synthetic
  misc_feature (12)..(12): n is a, c, g, or u
  misc_feature (21)..(21): n is a, c, g, or u
uguaaaugaaunuuaggaaanga

SEQ ID NO: 127143 - RNA, 24 nt, Artificial Sequence
  Synthetic
  misc_feature (1)..(1): n is a, c, g, or u
  misc_feature (13)..(13): n is a, c, g, or u
  misc_feature (22)..(22): n is a, c, g, or u
nuguaaaugaaunuuaggaaanga

SEQ ID NO: 127144 - RNA, 18 nt, Artificial Sequence
  Synthetic
  misc_feature (13)..(13): n is a, c, g, or u
  misc_feature (16)..(16): n is a, c, g, or u
ugcgaaagcccanganga

SEQ ID NO: 127145 - RNA, 19 nt, Artificial Sequence
  Synthetic
  misc_feature (14)..(14): n is a, c, g, or u
  misc_feature (17)..(17): n is a, c, g, or u
uugcgaaagcccanganga

SEQ ID NO: 127146 - RNA, 20 nt, Artificial Sequence
  Synthetic
  misc_feature (15)..(15): n is a, c, g, or u
  misc_feature (18)..(18): n is a, c, g, or u
uuugcgaaagcccanganga

SEQ ID NO: 127147 - RNA, 18 nt, Artificial Sequence
  Synthetic
  misc_feature (1)..(1): n is a, c, g, or u
nuggccagugguccuuga

SEQ ID NO: 127148 - RNA, 19 nt, Artificial Sequence
  Synthetic
  misc_feature (1)..(2): n is a, c, g, or u
nnuggccagugguccuuga

SEQ ID NO: 127149 - RNA, 20 nt, Artificial Sequence
  Synthetic
  misc_feature (2)..(3): n is a, c, g, or u
unnuggccagugguccuuga

SEQ ID NO: 127150 - RNA, 18 nt, Artificial Sequence
  Synthetic
  misc_feature (4)..(4): n is a, c, g, or u
ugunguuucccucuuaua

SEQ ID NO: 127151 - RNA, 19 nt, Artificial Sequence
  Synthetic
  misc_feature (5)..(5): n is a, c, g, or u
gugunguuucccucuuaua

SEQ ID NO: 127152 - RNA, 20 nt, Artificial Sequence
  Synthetic
  misc_feature (6)..(6): n is a, c, g, or u
cgugunguuucccucuuaua

SEQ ID NO: 127153 - RNA, 18 nt, Artificial Sequence
  Synthetic
  misc_feature (1)..(2): n is a, c, g, or u
  misc_feature (5)..(5): n is a, c, g, or u
  misc_feature (14)..(14): n is a, c, g, or u
nnuancccaugaanuuua

SEQ ID NO: 127154 - RNA, 19 nt, Artificial Sequence
  Synthetic
  misc_feature (2)..(3): n is a, c, g, or u
  misc_feature (6)..(6): n is a, c, g, or u
  misc_feature (15)..(15): n is a, c, g, or u
annuancccaugaanuuua

SEQ ID NO: 127155 - RNA, 20 nt, Artificial Sequence
  Synthetic
  misc_feature (3)..(4): n is a, c, g, or u
  misc_feature (7)..(7): n is a, c, g, or u
  misc_feature (16)..(16): n is a, c, g, or u
uannuancccaugaanuuua

SEQ ID NO: 127156 - RNA, 21 nt, Artificial Sequence
  Synthetic
  misc_feature (4)..(5): n is a, c, g, or u
  misc_feature (8)..(8): n is a, c, g, or u
  misc_feature (17)..(17): n is a, c, g, or u
uuannuancccaugaanuuua

SEQ ID NO: 127157 - RNA, 22 nt, Artificial Sequence
  Synthetic
  misc_feature (5)..(6): n is a, c, g, or u
  misc_feature (9)..(9): n is a, c, g, or u
  misc_feature (18)..(18): n is a, c, g, or u
auuannuancccaugaanuuua

SEQ ID NO: 127158 - RNA, 23 nt, Artificial Sequence
  Synthetic
  misc_feature (6)..(7): n is a, c, g, or u
  misc_feature (10)..(10): n is a, c, g, or u
  misc_feature (19)..(19): n is a, c, g, or u
aauuannuancccaugaanuuua

SEQ ID NO: 127159 - RNA, 24 nt, Artificial Sequence
  Synthetic
  misc_feature (7)..(8): n is a, c, g, or u
  misc_feature (11)..(11): n is a, c, g, or u
  misc_feature (20)..(20): n is a, c, g, or u
caauuannuancccaugaanuuua

SEQ ID NO: 127160 - RNA, 18 nt, Artificial Sequence
  Synthetic
aauugagagaaguccacc

SEQ ID NO: 127161 - RNA, 19 nt, Artificial Sequence
  Synthetic
aaauugagagaaguccacc

SEQ ID NO: 127162 - RNA, 20 nt, Artificial Sequence
  Synthetic
aaaauugagagaaguccacc

SEQ ID NO: 127163 - RNA, 18 nt, Artificial Sequence
  Synthetic
  misc_feature (2)..(2): n is a, c, g, or u
gnuguagcucuuguuccc

SEQ ID NO: 127164 - RNA, 19 nt, Artificial Sequence
  Synthetic
  misc_feature (3)..(3): n is a, c, g, or u
ugnuguagcucuuguuccc

SEQ ID NO: 127165 - RNA, 20 nt, Artificial Sequence
  Synthetic
  misc_feature (4)..(4): n is a, c, g, or u
augnuguagcucuuguuccc

SEQ ID NO: 127166 - RNA, 18 nt, Artificial Sequence
  Synthetic
  misc_feature (13)..(13): n is a, c, g, or u
acugguuguugungaucc

SEQ ID NO: 127167 - RNA, 19 nt, Artificial Sequence
  Synthetic
  misc_feature (14)..(14): n is a, c, g, or u
uacugguuguugungaucc

SEQ ID NO: 127168 - RNA, 20 nt, Artificial Sequence
  Synthetic
  misc_feature (15)..(15): n is a, c, g, or u
guacugguuguugungaucc

SEQ ID NO: 127169 - RNA, 18 nt, Artificial Sequence
  Synthetic
ugacauugcugggagucc

SEQ ID NO: 127170 - RNA, 19 nt, Artificial Sequence
  Synthetic
uugacauugcugggagucc

SEQ ID NO: 127171 - RNA, 20 nt, Artificial Sequence
  Synthetic
guugacauugcugggagucc

SEQ ID NO: 127172 - RNA, 18 nt, Artificial Sequence
  Synthetic
cauagaguugccuugagc

SEQ ID NO: 127173 - RNA, 19 nt, Artificial Sequence
  Synthetic
acauagaguugccuugagc

SEQ ID NO: 127174 - RNA, 20 nt, Artificial Sequence
  Synthetic
aacauagaguugccuugagc

SEQ ID NO: 127175 - RNA, 18 nt, Artificial Sequence
  Synthetic
  misc_feature (3)..(3): n is a, c, g, or u
  misc_feature (6)..(6): n is a, c, g, or u
  misc_feature (11)..(11): n is a, c, g, or u
ggnggngugancccuggc

SEQ ID NO: 127176 - RNA, 19 nt, Artificial Sequence
  Synthetic
  misc_feature (4)..(4): n is a, c, g, or u
  misc_feature (7)..(7): n is a, c, g, or u
  misc_feature (12)..(12): n is a, c, g, or u
uggnggngugancccuggc

SEQ ID NO: 127177 - RNA, 20 nt, Artificial Sequence
  Synthetic
  misc_feature (5)..(5): n is a, c, g, or u
  misc_feature (8)..(8): n is a, c, g, or u
  misc_feature (13)..(13): n is a, c, g, or u
guggnggngugancccuggc

SEQ ID NO: 127178 - RNA, 18 nt, Artificial Sequence
  Synthetic
cagcagagaauggcuugc

SEQ ID NO: 127179 - RNA, 19 nt, Artificial Sequence
  Synthetic
ccagcagagaauggcuugc

SEQ ID NO: 127180 - RNA, 20 nt, Artificial Sequence
  Synthetic
cccagcagagaauggcuugc

SEQ ID NO: 127181 - RNA, 18 nt, Artificial Sequence
  Synthetic
  misc_feature (8)..(8): n is a, c, g, or u
aauacagnccccugacuc

SEQ ID NO: 127182 - RNA, 19 nt, Artificial Sequence
  Synthetic
  misc_feature (9)..(9): n is a, c, g, or u
aaauacagnccccugacuc

SEQ ID NO: 127183 - RNA, 20 nt, Artificial Sequence
  Synthetic
  misc_feature (10)..(10): n is a, c, g, or u
aaaauacagnccccugacuc

SEQ ID NO: 127184 - RNA, 18 nt, Artificial Sequence
  Synthetic
cauagcagcaggaugaag

SEQ ID NO: 127185 - RNA, 19 nt, Artificial Sequence
  Synthetic
gcauagcagcaggaugaag

SEQ ID NO: 127186 - RNA, 20 nt, Artificial Sequence
  Synthetic
ggcauagcagcaggaugaag

SEQ ID NO: 127187 - RNA, 18 nt, Artificial Sequence
  Synthetic
gaagaugaggcauagcag

SEQ ID NO: 127188 - RNA, 19 nt, Artificial Sequence
  Synthetic
agaagaugaggcauagcag

SEQ ID NO: 127189 - RNA, 20 nt, Artificial Sequence
  Synthetic
aagaagaugaggcauagcag

SEQ ID NO: 127190 - RNA, 18 nt, Artificial Sequence
  Synthetic
  misc_feature (11)..(11): n is a, c, g, or u
  misc_feature (14)..(14): n is a, c, g, or u
uaaagauaggnacnguag

SEQ ID NO: 127191 - RNA, 19 nt, Artificial Sequence
  Synthetic
  misc_feature (12)..(12): n is a, c, g, or u
  misc_feature (15)..(15): n is a, c, g, or u
uuaaagauaggnacnguag

SEQ ID NO: 127192 - RNA, 20 nt, Artificial Sequence
  Synthetic
  misc_feature (13)..(13): n is a, c, g, or u
  misc_feature (16)..(16): n is a, c, g, or u
auuaaagauaggnacnguag

SEQ ID NO: 127193 - RNA, 18 nt, Artificial Sequence
  Synthetic
  misc_feature (5)..(5): n is a, c, g, or u
cccgngaggggucguccg

SEQ ID NO: 127194 - RNA, 19 nt, Artificial Sequence
  Synthetic
  misc_feature (6)..(6): n is a, c, g, or u
ccccgngaggggucguccg

SEQ ID NO: 127195 - RNA, 20 nt, Artificial Sequence
  Synthetic
  misc_feature (7)..(7): n is a, c, g, or u
gccccgngaggggucguccg

SEQ ID NO: 127196 - RNA, 18 nt, Artificial Sequence
  Synthetic
ugguggucuauaggcugg

SEQ ID NO: 127197 - RNA, 19 nt, Artificial Sequence
  Synthetic
uugguggucuauaggcugg

SEQ ID NO: 127198 - RNA, 20 nt, Artificial Sequence
  Synthetic
uuugguggucuauaggcugg

SEQ ID NO: 127199 - RNA, 18 nt, Artificial Sequence
  Synthetic
  misc_feature (17)..(17): n is a, c, g, or u
gucccaagcggccccgng

SEQ ID NO: 127200 - RNA, 19 nt, Artificial Sequence
  Synthetic
  misc_feature (18)..(18): n is a, c, g, or u
agucccaagcggccccgng

SEQ ID NO: 127201 - RNA, 20 nt, Artificial Sequence
  Synthetic
  misc_feature (19)..(19): n is a, c, g, or u
gagucccaagcggccccgng

SEQ ID NO: 127202 - RNA, 18 nt, Artificial Sequence
  Synthetic
  misc_feature (14)..(14): n is a, c, g, or u
cuacuagaucccungaug

SEQ ID NO: 127203 - RNA, 19 nt, Artificial Sequence
  Synthetic
  misc_feature (15)..(15): n is a, c, g, or u
acuacuagaucccungaug

SEQ ID NO: 127204 - RNA, 20 nt, Artificial Sequence
  Synthetic
  misc_feature (16)..(16): n is a, c, g, or u
gacuacuagaucccungaug

SEQ ID NO: 127205 - RNA, 21 nt, Artificial Sequence
  Synthetic
  misc_feature (17)..(17): n is a, c, g, or u
ugacuacuagaucccungaug

SEQ ID NO: 127206 - RNA, 22 nt, Artificial Sequence
  Synthetic
  misc_feature (18)..(18): n is a, c, g, or u
uugacuacuagaucccungaug

SEQ ID NO: 127207 - RNA, 23 nt, Artificial Sequence
  Synthetic
  misc_feature (19)..(19): n is a, c, g, or u
auugacuacuagaucccungaug

SEQ ID NO: 127208 - RNA, 24 nt, Artificial Sequence
  Synthetic
  misc_feature (20)..(20): n is a, c, g, or u
aauugacuacuagaucccungaug

SEQ ID NO: 127209 - RNA, 18 nt, Artificial Sequence
  Synthetic
uuggaggacaggagguug

SEQ ID NO: 127210 - RNA, 19 nt, Artificial Sequence
  Synthetic
auuggaggacaggagguug

SEQ ID NO: 127211 - RNA, 20 nt, Artificial Sequence
  Synthetic
aauuggaggacaggagguug

SEQ ID NO: 127212 - RNA, 18 nt, Artificial Sequence
  Synthetic
  misc_feature (18)..(18): n is a, c, g, or u
aagucagaaggcaaaaan

SEQ ID NO: 127213 - RNA, 19 nt, Artificial Sequence
  Synthetic
  misc_feature (19)..(19): n is a, c, g, or u
gaagucagaaggcaaaaan

SEQ ID NO: 127214 - RNA, 20 nt, Artificial Sequence
  Synthetic
  misc_feature (20)..(20): n is a, c, g, or u
agaagucagaaggcaaaaan

SEQ ID NO: 127215 - RNA, 18 nt, Artificial Sequence
  Synthetic
  misc_feature (14)..(14): n is a, c, g, or u
  misc_feature (18)..(18): n is a, c, g, or u
gagaggcaauauunggan

SEQ ID NO: 127216 - RNA, 19 nt, Artificial Sequence
  Synthetic
  misc_feature (15)..(15): n is a, c, g, or u
  misc_feature (19)..(19): n is a, c, g, or u
ugagaggcaauauunggan

SEQ ID NO: 127217 - RNA, 20 nt, Artificial Sequence
  Synthetic
  misc_feature (16)..(16): n is a, c, g, or u
  misc_feature (20)..(20): n is a, c, g, or u
gugagaggcaauauunggan

SEQ ID NO: 127218 - RNA, 18 nt, Artificial Sequence
  Synthetic
  misc_feature (16)..(16): n is a, c, g, or u
  misc_feature (18)..(18): n is a, c, g, or u
uguucuccauguucgncn

SEQ ID NO: 127219 - RNA, 19 nt, Artificial Sequence
  Synthetic
  misc_feature (17)..(17): n is a, c, g, or u
  misc_feature (19)..(19): n is a, c, g, or u
auguucuccauguucgncn

SEQ ID NO: 127220 - RNA, 20 nt, Artificial Sequence
  Synthetic
  misc_feature (18)..(18): n is a, c, g, or u
  misc_feature (20)..(20): n is a, c, g, or u
gauguucuccauguucgncn

SEQ ID NO: 127221 - RNA, 18 nt, Artificial Sequence
  Synthetic
  misc_feature (2)..(2): n is a, c, g, or u
  misc_feature (15)..(16): n is a, c, g, or u
  misc_feature (18)..(18): n is a, c, g, or u
gnaaauauuuagugnngn

SEQ ID NO: 127222 - RNA, 19 nt, Artificial Sequence
  Synthetic
  misc_feature (3)..(3): n is a, c, g, or u
  misc_feature (16)..(17): n is a, c, g, or u
  misc_feature (19)..(19): n is a, c, g, or u
ggnaaauauuuagugnngn

SEQ ID NO: 127223 - RNA, 20 nt, Artificial Sequence
  Synthetic
  misc_feature (1)..(1): n is a, c, g, or u
  misc_feature (4)..(4): n is a, c, g, or u
  misc_feature (17)..(18): n is a, c, g, or u
  misc_feature (20)..(20): n is a, c, g, or u
nggnaaauauuuagugnngn

SEQ ID NO: 127224 - RNA, 21 nt, Artificial Sequence
  Synthetic
  misc_feature (1)..(2): n is a, c, g, or u
  misc_feature (5)..(5): n is a, c, g, or u
  misc_feature (18)..(19): n is a, c, g, or u
  misc_feature (21)..(21): n is a, c, g, or u
nnggnaaauauuuagugnngn

SEQ ID NO: 127225 - RNA, 22 nt, Artificial Sequence
  Synthetic
  misc_feature (2)..(3): n is a, c, g, or u
  misc_feature (6)..(6): n is a, c, g, or u
  misc_feature (19)..(20): n is a, c, g, or u
  misc_feature (22)..(22): n is a, c, g, or u
annggnaaauauuuagugnngn

SEQ ID NO: 127226 - RNA, 23 nt, Artificial Sequence
  Synthetic
  misc_feature (3)..(4): n is a, c, g, or u
  misc_feature (7)..(7): n is a, c, g, or u
  misc_feature (20)..(21): n is a, c, g, or u
  misc_feature (23)..(23): n is a, c, g, or u
uannggnaaauauuuagugnngn

SEQ ID NO: 127227 - RNA, 24 nt, Artificial Sequence
  Synthetic
  misc_feature (4)..(5): n is a, c, g, or u
  misc_feature (8)..(8): n is a, c, g, or u
  misc_feature (21)..(22): n is a, c, g, or u
  misc_feature (24)..(24): n is a, c, g, or u
cuannggnaaauauuuagugnngn

SEQ ID NO: 127228 - RNA, 18 nt, Artificial Sequence
  Synthetic
ucuuagagguggagagau

SEQ ID NO: 127229 - RNA, 19 nt, Artificial Sequence
  Synthetic
cucuuagagguggagagau

SEQ ID NO: 127230 - RNA, 20 nt, Artificial Sequence
  Synthetic
ucucuuagagguggagagau

SEQ ID NO: 127231 - RNA, 18 nt, Artificial Sequence
  Synthetic
  misc_feature (7)..(7): n is a, c, g, or u
  misc_feature (10)..(10): n is a, c, g, or u
agcccangangaugggau

SEQ ID NO: 127232 - RNA, 19 nt, Artificial Sequence
  Synthetic
  misc_feature (8)..(8): n is a, c, g, or u
  misc_feature (11)..(11): n is a, c, g, or u
aagcccangangaugggau

SEQ ID NO: 127233 - RNA, 20 nt, Artificial Sequence
  Synthetic
  misc_feature (9)..(9): n is a, c, g, or u
  misc_feature (12)..(12): n is a, c, g, or u
aaagcccangangaugggau

SEQ ID NO: 127234 - RNA, 18 nt, Artificial Sequence
  Synthetic
  misc_feature (14)..(14): n is a, c, g, or u
aaugauuaacuacnugau

SEQ ID NO: 127235 - RNA, 19 nt, Artificial Sequence
  Synthetic
  misc_feature (15)..(15): n is a, c, g, or u
uaaugauuaacuacnugau

SEQ ID NO: 127236 - RNA, 20 nt, Artificial Sequence
  Synthetic
  misc_feature (16)..(16): n is a, c, g, or u
guaaugauuaacuacnugau

SEQ ID NO: 127237 - RNA, 18 nt, Artificial Sequence
  Synthetic
uagcuccaaauucuuuau

SEQ ID NO: 127238 - RNA, 19 nt, Artificial Sequence
  Synthetic
guagcuccaaauucuuuau

SEQ ID NO: 127239 - RNA, 20 nt, Artificial Sequence
  Synthetic
aguagcuccaaauucuuuau

SEQ ID NO: 127240 - RNA, 18 nt, Artificial Sequence
  Synthetic
gauuggagguuggggacu

SEQ ID NO: 127241 - RNA, 19 nt, Artificial Sequence
  Synthetic
ugauuggagguuggggacu

SEQ ID NO: 127242 - RNA, 20 nt, Artificial Sequence
  Synthetic
gugauuggagguuggggacu

SEQ ID NO: 127243 - RNA, 18 nt, Artificial Sequence
  Synthetic
  misc_feature (12)..(12): n is a, c, g, or u
ggauuguuuganuuggcu

SEQ ID NO: 127244 - RNA, 19 nt, Artificial Sequence
  Synthetic
  misc_feature (13)..(13): n is a, c, g, or u
uggauuguuuganuuggcu

SEQ ID NO: 127245 - RNA, 20 nt, Artificial Sequence
  Synthetic
  misc_feature (14)..(14): n is a, c, g, or u
cuggauuguuuganuuggcu

SEQ ID NO: 127246 - RNA, 18 nt, Artificial Sequence
  Synthetic
  misc_feature (1)..(1): n is a, c, g, or u
ngccaagccccagccagu

SEQ ID NO: 127247 - RNA, 19 nt, Artificial Sequence
  Synthetic
  misc_feature (2)..(2): n is a, c, g, or u
ungccaagccccagccagu

SEQ ID NO: 127248 - RNA, 20 nt, Artificial Sequence
  Synthetic
  misc_feature (3)..(3): n is a, c, g, or u
aungccaagccccagccagu

SEQ ID NO: 127249 - RNA, 18 nt, Artificial Sequence
  Synthetic
ggcuaggaguuccgcagu

SEQ ID NO: 127250 - RNA, 19 nt, Artificial Sequence
  Synthetic
cggcuaggaguuccgcagu

SEQ ID NO: 127251 - RNA, 20 nt, Artificial Sequence
  Synthetic
gcggcuaggaguuccgcagu

SEQ ID NO: 127252 - RNA, 18 nt, Artificial Sequence
  Synthetic
  misc_feature (8)..(8): n is a, c, g, or u
cccaucunuuuguuuugu

SEQ ID NO: 127253 - RNA, 19 nt, Artificial Sequence
  Synthetic
  misc_feature (9)..(9): n is a, c, g, or u
ccccaucunuuuguuuugu

SEQ ID NO: 127254 - RNA, 20 nt, Artificial Sequence
  Synthetic
  misc_feature (10)..(10): n is a, c, g, or u
accccaucunuuuguuuugu

SEQ ID NO: 127255 - RNA, 18 nt, Artificial Sequence
  Synthetic
  misc_feature (2)..(2): n is a, c, g, or u
angaaggaguuugccauu

SEQ ID NO: 127256 - RNA, 19 nt, Artificial Sequence
  Synthetic
  misc_feature (3)..(3): n is a, c, g, or u
aangaaggaguuugccauu

SEQ ID NO: 127257 - RNA, 20 nt, Artificial Sequence
  Synthetic
  misc_feature (4)..(4): n is a, c, g, or u
aaangaaggaguuugccauu

SEQ ID NO: 127258 - RNA, 18 nt, Artificial Sequence
  Synthetic
  misc_feature (1)..(1): n is a, c, g, or u
  misc_feature (4)..(4): n is a, c, g, or u
  misc_feature (7)..(7): n is a, c, g, or u
ngunaanuuucccaccuu

SEQ ID NO: 127259 - RNA, 19 nt, Artificial Sequence
  Synthetic
  misc_feature (2)..(2): n is a, c, g, or u
  misc_feature (5)..(5): n is a, c, g, or u
  misc_feature (8)..(8): n is a, c, g, or u
cngunaanuuucccaccuu

SEQ ID NO: 127260 - RNA, 20 nt, Artificial Sequence
  Synthetic
  misc_feature (3)..(3): n is a, c, g, or u
  misc_feature (6)..(6): n is a, c, g, or u
  misc_feature (9)..(9): n is a, c, g, or u
ccngunaanuuucccaccuu

SEQ ID NO: 127261 - RNA, 21 nt, Artificial Sequence
  Synthetic
  misc_feature (4)..(4): n is a, c, g, or u
  misc_feature (7)..(7): n is a, c, g, or u
  misc_feature (10)..(10): n is a, c, g, or u
cccngunaanuuucccaccuu

SEQ ID NO: 127262 - RNA, 22 nt, Artificial Sequence
  Synthetic
  misc_feature (5)..(5): n is a, c, g, or u
  misc_feature (8)..(8): n is a, c, g, or u
  misc_feature (11)..(11): n is a, c, g, or u
gcccngunaanuuucccaccuu

SEQ ID NO: 127263 - RNA, 23 nt, Artificial Sequence
  Synthetic
  misc_feature (6)..(6): n is a, c, g, or u
  misc_feature (9)..(9): n is a, c, g, or u
  misc_feature (12)..(12): n is a, c, g, or u
agcccngunaanuuucccaccuu

SEQ ID NO: 127264 - RNA, 24 nt, Artificial Sequence
  Synthetic
  misc_feature (7)..(7): n is a, c, g, or u
  misc_feature (10)..(10): n is a, c, g, or u
  misc_feature (13)..(13): n is a, c, g, or u
aagcccngunaanuuucccaccuu

SEQ ID NO: 127265 - RNA, 18 nt, Artificial Sequence
  Synthetic
  misc_feature (7)..(7): n is a, c, g, or u
gcuaggnuguacugccaa

SEQ ID NO: 127266 - RNA, 19 nt, Artificial Sequence
  Synthetic
  misc_feature (8)..(8): n is a, c, g, or u
ugcuaggnuguacugccaa

SEQ ID NO: 127267 - RNA, 20 nt, Artificial Sequence
  Synthetic
  misc_feature (9)..(9): n is a, c, g, or u
cugcuaggnuguacugccaa

SEQ ID NO: 127268 - RNA, 18 nt, Artificial Sequence
  Synthetic
  misc_feature (15)..(15): n is a, c, g, or u
ccuaacaaaacaaanaga

SEQ ID NO: 127269 - RNA, 19 nt, Artificial Sequence
  Synthetic
  misc_feature (16)..(16): n is a, c, g, or u
cccuaacaaaacaaanaga

SEQ ID NO: 127270 - RNA, 20 nt, Artificial Sequence
  Synthetic
  misc_feature (17)..(17): n is a, c, g, or u
acccuaacaaaacaaanaga

SEQ ID NO: 127271 - RNA, 18 nt, Artificial Sequence
  Synthetic
  misc_feature (4)..(4): n is a, c, g, or u
auunaugacucuagcuac

SEQ ID NO: 127272 - RNA, 19 nt, Artificial Sequence
  Synthetic
  misc_feature (5)..(5): n is a, c, g, or u
aauunaugacucuagcuac

SEQ ID NO: 127273 - RNA, 20 nt, Artificial Sequence
  Synthetic
  misc_feature (6)..(6): n is a, c, g, or u
gaauunaugacucuagcuac

SEQ ID NO: 127274 - RNA, 18 nt, Artificial Sequence
  Synthetic
  misc_feature (13)..(13): n is a, c, g, or u
ccaagcucugcangaucc

SEQ ID NO: 127275 - RNA, 19 nt, Artificial Sequence
  Synthetic
  misc_feature (14)..(14): n is a, c, g, or u
accaagcucugcangaucc

SEQ ID NO: 127276 - RNA, 20 nt, Artificial Sequence
  Synthetic
  misc_feature (15)..(15): n is a, c, g, or u
caccaagcucugcangaucc

SEQ ID NO: 127277 - RNA, 18 nt, Artificial Sequence
  Synthetic
  misc_feature (2)..(2): n is a, c, g, or u
  misc_feature (5)..(5): n is a, c, g, or u
cngunccuaucuuuaauc

SEQ ID NO: 127278 - RNA, 19 nt, Artificial Sequence
  Synthetic
  misc_feature (3)..(3): n is a, c, g, or u
  misc_feature (6)..(6): n is a, c, g, or u
acngunccuaucuuuaauc

SEQ ID NO: 127279 - RNA, 20 nt, Artificial Sequence
  Synthetic
  misc_feature (4)..(4): n is a, c, g, or u
  misc_feature (7)..(7): n is a, c, g, or u
uacngunccuaucuuuaauc

SEQ ID NO: 127280 - RNA, 18 nt, Artificial Sequence
  Synthetic
  misc_feature (14)..(14): n is a, c, g, or u
uuucuguucccaanccuc

SEQ ID NO: 127281 - RNA, 19 nt, Artificial Sequence
  Synthetic
  misc_feature (15)..(15): n is a, c, g, or u
cuuucuguucccaanccuc

SEQ ID NO: 127282 - RNA, 20 nt, Artificial Sequence
  Synthetic
  misc_feature (16)..(16): n is a, c, g, or u
ucuuucuguucccaanccuc

SEQ ID NO: 127283 - RNA, 18 nt, Artificial Sequence
  Synthetic
aauuuguccugguuaucg

SEQ ID NO: 127284 - RNA, 19 nt, Artificial Sequence
  Synthetic
caauuuguccugguuaucg

SEQ ID NO: 127285 - RNA, 20 nt, Artificial Sequence
  Synthetic
ccaauuuguccugguuaucg

SEQ ID NO: 127286 - RNA, 18 nt, Artificial Sequence
  Synthetic
aagccauucucugcuggg

SEQ ID NO: 127287 - RNA, 19 nt, Artificial Sequence
  Synthetic
caagccauucucugcuggg

SEQ ID NO: 127288 - RNA, 20 nt, Artificial Sequence
  Synthetic
gcaagccauucucugcuggg

SEQ ID NO: 127289 - RNA, 18 nt, Artificial Sequence
  Synthetic
augacucuagcuaccugg

SEQ ID NO: 127290 - RNA, 19 nt, Artificial Sequence
  Synthetic
  misc_feature (1)..(1): n is a, c, g, or u
naugacucuagcuaccugg

SEQ ID NO: 127291 - RNA, 20 nt, Artificial Sequence
  Synthetic
  misc_feature (2)..(2): n is a, c, g, or u
unaugacucuagcuaccugg

SEQ ID NO: 127292 - RNA, 18 nt, Artificial Sequence
  Synthetic
aagaauuuggagcuacug

SEQ ID NO: 127293 - RNA, 19 nt, Artificial Sequence
  Synthetic
aaagaauuuggagcuacug

SEQ ID NO: 127294 - RNA, 20 nt, Artificial Sequence
  Synthetic
uaaagaauuuggagcuacug

SEQ ID NO: 127295 - RNA, 18 nt, Artificial Sequence
  Synthetic
  misc_feature (4)..(4): n is a, c, g, or u
  misc_feature (18)..(18): n is a, c, g, or u
uugnaagauccagcaucn

SEQ ID NO: 127296 - RNA, 19 nt, Artificial Sequence
  Synthetic
  misc_feature (5)..(5): n is a, c, g, or u
  misc_feature (19)..(19): n is a, c, g, or u
uuugnaagauccagcaucn

SEQ ID NO: 127297 - RNA, 20 nt, Artificial Sequence
  Synthetic
  misc_feature (6)..(6): n is a, c, g, or u
  misc_feature (20)..(20): n is a, c, g, or u
auuugnaagauccagcaucn

SEQ ID NO: 127298 - RNA, 18 nt, Artificial Sequence
  Synthetic
acauggagaacaucacau

SEQ ID NO: 127299 - RNA, 19 nt, Artificial Sequence
  Synthetic
aacauggagaacaucacau

SEQ ID NO: 127300 - RNA, 20 nt, Artificial Sequence
  Synthetic
gaacauggagaacaucacau

SEQ ID NO: 127301 - RNA, 18 nt, Artificial Sequence
  Synthetic
  misc_feature (15)..(15): n is a, c, g, or u
uguuuggcuuucagnuau

SEQ ID NO: 127302 - RNA, 19 nt, Artificial Sequence
  Synthetic
  misc_feature (16)..(16): n is a, c, g, or u
cuguuuggcuuucagnuau

SEQ ID NO: 127303 - RNA, 20 nt, Artificial Sequence
  Synthetic
  misc_feature (17)..(17): n is a, c, g, or u
acuguuuggcuuucagnuau

SEQ ID NO: 127304 - RNA, 18 nt, Artificial Sequence
  Synthetic
uguugcuguacaaaaccu

SEQ ID NO: 127305 - RNA, 19 nt, Artificial Sequence
  Synthetic
auguugcuguacaaaaccu

SEQ ID NO: 127306 - RNA, 20 nt, Artificial Sequence
  Synthetic
cauguugcuguacaaaaccu

SEQ ID NO: 127307 - RNA, 18 nt, Artificial Sequence
  Synthetic
accaauuuucuuuugucu

SEQ ID NO: 127308 - RNA, 19 nt, Artificial Sequence
  Synthetic
uaccaauuuucuuuugucu

SEQ ID NO: 127309 - RNA, 20 nt, Artificial Sequence
  Synthetic
uuaccaauuuucuuuugucu

SEQ ID NO: 127310 - RNA, 18 nt, Artificial Sequence
  Synthetic
  misc_feature (5)..(6): n is a, c, g, or u
gccannagccaaccaggu

SEQ ID NO: 127311 - RNA, 19 nt, Artificial Sequence
  Synthetic
  misc_feature (6)..(7): n is a, c, g, or u
ggccannagccaaccaggu

SEQ ID NO: 127312 - RNA, 20 nt, Artificial Sequence
  Synthetic
  misc_feature (7)..(8): n is a, c, g, or u
uggccannagccaaccaggu

SEQ ID NO: 127313 - RNA, 18 nt, Artificial Sequence
  Synthetic
  misc_feature (15)..(15): n is a, c, g, or u
aaaguaugucaaagnauu

SEQ ID NO: 127314 - RNA, 19 nt, Artificial Sequence
  Synthetic
  misc_feature (16)..(16): n is a, c, g, or u
gaaaguaugucaaagnauu

SEQ ID NO: 127315 - RNA, 20 nt, Artificial Sequence
  Synthetic
  misc_feature (17)..(17): n is a, c, g, or u
ggaaaguaugucaaagnauu

SEQ ID NO: 127316 - RNA, 18 nt, Artificial Sequence
  Synthetic
aucuucuuauugguucuu

SEQ ID NO: 127317 - RNA, 19 nt, Artificial Sequence
  Synthetic
caucuucuuauugguucuu

SEQ ID NO: 127318 - RNA, 20 nt, Artificial Sequence
  Synthetic
ucaucuucuuauugguucuu

SEQ ID NO: 127319 - RNA, 18 nt, Artificial Sequence
  Synthetic
  misc_feature (4)..(4): n is a, c, g, or u
uganuauuuggucucuuu

SEQ ID NO: 127320 - RNA, 19 nt, Artificial Sequence
  Synthetic
  misc_feature (5)..(5): n is a, c, g, or u
uuganuauuuggucucuuu

SEQ ID NO: 127321 - RNA, 20 nt, Artificial Sequence
  Synthetic
  misc_feature (6)..(6): n is a, c, g, or u
cuuganuauuuggucucuuu

SEQ ID NO: 127322 - RNA, 21 nt, Artificial Sequence
  Synthetic
  misc_feature (1)..(1): n is a, c, g, or u
  misc_feature (7)..(7): n is a, c, g, or u
ncuuganuauuuggucucuuu

SEQ ID NO: 127323 - RNA, 22 nt, Artificial Sequence
  Synthetic
  misc_feature (2)..(2): n is a, c, g, or u
  misc_feature (8)..(8): n is a, c, g, or u
uncuuganuauuuggucucuuu

SEQ ID NO: 127324 - RNA, 23 nt, Artificial Sequence
  Synthetic
  misc_feature (3)..(3): n is a, c, g, or u
  misc_feature (9)..(9): n is a, c, g, or u
guncuuganuauuuggucucuuu

SEQ ID NO: 127325 - RNA, 24 nt, Artificial Sequence
  Synthetic
  misc_feature (4)..(4): n is a, c, g, or u
  misc_feature (10)..(10): n is a, c, g, or u
uguncuuganuauuuggucucuuu

SEQ ID NO: 127326 - RNA, 18 nt, Artificial Sequence
  Synthetic
  misc_feature (2)..(2): n is a, c, g, or u
  misc_feature (11)..(11): n is a, c, g, or u
  misc_feature (15)..(15): n is a, c, g, or u
cnccacacggnggunuuu

SEQ ID NO: 127327 - RNA, 19 nt, Artificial Sequence
  Synthetic
  misc_feature (3)..(3): n is a, c, g, or u
  misc_feature (12)..(12): n is a, c, g, or u
  misc_feature (16)..(16): n is a, c, g, or u
ccnccacacggnggunuuu

SEQ ID NO: 127328 - RNA, 20 nt, Artificial Sequence
  Synthetic
  misc_feature (1)..(1): n is a, c, g, or u
  misc_feature (4)..(4): n is a, c, g, or u
  misc_feature (13)..(13): n is a, c, g, or u
  misc_feature (17)..(17): n is a, c, g, or u
nccnccacacggnggunuuu

SEQ ID NO: 127329 - RNA, 21 nt, Artificial Sequence
  Synthetic
  misc_feature (2)..(2): n is a, c, g, or u
  misc_feature (5)..(5): n is a, c, g, or u
  misc_feature (14)..(14): n is a, c, g, or u
  misc_feature (18)..(18): n is a, c, g, or u
cnccnccacacggnggunuuu

SEQ ID NO: 127330 - RNA, 22 nt, Artificial Sequence
  Synthetic
  misc_feature (3)..(3): n is a, c, g, or u
  misc_feature (6)..(6): n is a, c, g, or u
  misc_feature (15)..(15): n is a, c, g, or u
  misc_feature (19)..(19): n is a, c, g, or u
acnccnccacacggnggunuuu

SEQ ID NO: 127331 - RNA, 23 nt, Artificial Sequence
  Synthetic
  misc_feature (4)..(4): n is a, c, g, or u
  misc_feature (7)..(7): n is a, c, g, or u
  misc_feature (16)..(16): n is a, c, g, or u
  misc_feature (20)..(20): n is a, c, g, or u
cacnccnccacacggnggunuuu

SEQ ID NO: 127332 - RNA, 24 nt, Artificial Sequence
  Synthetic
  misc_feature (5)..(5): n is a, c, g, or u
  misc_feature (8)..(8): n is a, c, g, or u
  misc_feature (17)..(17): n is a, c, g, or u
  misc_feature (21)..(21): n is a, c, g, or u
ucacnccnccacacggnggunuuu

SEQ ID NO: 127333 - RNA, 18 nt, Artificial Sequence
  Synthetic
  misc_feature (11)..(11): n is a, c, g, or u
cacguagcgcnucauuuu

SEQ ID NO: 127334 - RNA, 19 nt, Artificial Sequence
  Synthetic
  misc_feature (12)..(12): n is a, c, g, or u
acacguagcgcnucauuuu

SEQ ID NO: 127335 - RNA, 20 nt, Artificial Sequence
  Synthetic
  misc_feature (1)..(1): n is a, c, g, or u
  misc_feature (13)..(13): n is a, c, g, or u
nacacguagcgcnucauuuu

SEQ ID NO: 127336 - RNA, 18 nt, Artificial Sequence
  Synthetic
agaagucagaaggcaaaa

SEQ ID NO: 127337 - RNA, 19 nt, Artificial Sequence
  Synthetic
aagaagucagaaggcaaaa

SEQ ID NO: 127338 - RNA, 20 nt, Artificial Sequence
  Synthetic
aaagaagucagaaggcaaaa

SEQ ID NO: 127339 - RNA, 21 nt, Artificial Sequence
  Synthetic
gaaagaagucagaaggcaaaa

SEQ ID NO: 127340 - RNA, 22 nt, Artificial Sequence
  Synthetic
ggaaagaagucagaaggcaaaa

SEQ ID NO: 127341 - RNA, 23 nt, Artificial Sequence
  Synthetic
aggaaagaagucagaaggcaaaa

SEQ ID NO: 127342 - RNA, 24 nt, Artificial Sequence
  Synthetic
aaggaaagaagucagaaggcaaaa

SEQ ID NO: 127343 - RNA, 18 nt, Artificial Sequence
  Synthetic
  misc_feature (5)..(5): n is a, c, g, or u
ggugnucccccuagaaaa

SEQ ID NO: 127344 - RNA, 19 nt, Artificial Sequence
  Synthetic
  misc_feature (6)..(6): n is a, c, g, or u
gggugnucccccuagaaaa

SEQ ID NO: 127345 - RNA, 20 nt, Artificial Sequence
  Synthetic
  misc_feature (7)..(7): n is a, c, g, or u
cgggugnucccccuagaaaa

SEQ ID NO: 127346 - RNA, 21 nt, Artificial Sequence
  Synthetic
  misc_feature (8)..(8): n is a, c, g, or u
acgggugnucccccuagaaaa

SEQ ID NO: 127347 - RNA, 22 nt, Artificial Sequence
  Synthetic
  misc_feature (9)..(9): n is a, c, g, or u
cacgggugnucccccuagaaaa

SEQ ID NO: 127348 - RNA, 23 nt, Artificial Sequence
  Synthetic
  misc_feature (10)..(10): n is a, c, g, or u
acacgggugnucccccuagaaaa

SEQ ID NO: 127349 - RNA, 24 nt, Artificial Sequence
  Synthetic
  misc_feature (11)..(11): n is a, c, g, or u
cacacgggugnucccccuagaaaa

SEQ ID NO: 127350 - RNA, 18 nt, Artificial Sequence
  Synthetic
agcgauaaccaggacaaa

SEQ ID NO: 127351 - RNA, 19 nt, Artificial Sequence
  Synthetic
cagcgauaaccaggacaaa

SEQ ID NO: 127352 - RNA, 20 nt, Artificial Sequence
  Synthetic
ccagcgauaaccaggacaaa

SEQ ID NO: 127353 - RNA, 21 nt, Artificial Sequence
  Synthetic
uccagcgauaaccaggacaaa

SEQ ID NO: 127354 - RNA, 22 nt, Artificial Sequence
  Synthetic
auccagcgauaaccaggacaaa

SEQ ID NO: 127355 - RNA, 23 nt, Artificial Sequence
  Synthetic
cauccagcgauaaccaggacaaa

SEQ ID NO: 127356 - RNA, 24 nt, Artificial Sequence
  Synthetic
acauccagcgauaaccaggacaaa

SEQ ID NO: 127357 - RNA, 18 nt, Artificial Sequence
  Synthetic
acaaauggcacuaguaaa

SEQ ID NO: 127358 - RNA, 19 nt, Artificial Sequence
  Synthetic
aacaaauggcacuaguaaa

SEQ ID NO: 127359 - RNA, 20 nt, Artificial Sequence
  Synthetic
gaacaaauggcacuaguaaa

SEQ ID NO: 127360 - RNA, 21 nt, Artificial Sequence
  Synthetic
ugaacaaauggcacuaguaaa

SEQ ID NO: 127361 - RNA, 22 nt, Artificial Sequence
  Synthetic
cugaacaaauggcacuaguaaa

SEQ ID NO: 127362 - RNA, 23 nt, Artificial Sequence
  Synthetic
acugaacaaauggcacuaguaaa

SEQ ID NO: 127363 - RNA, 24 nt, Artificial Sequence
  Synthetic
cacugaacaaauggcacuaguaaa

SEQ ID NO: 127364 - RNA, 18 nt, Artificial Sequence
  Synthetic
acggggagaccgcguaaa

SEQ ID NO: 127365 - RNA, 19 nt, Artificial Sequence
  Synthetic
gacggggagaccgcguaaa

SEQ ID NO: 127366 - RNA, 20 nt, Artificial Sequence
  Synthetic
agacggggagaccgcguaaa

SEQ ID NO: 127367 - RNA, 21 nt, Artificial Sequence
  Synthetic
cagacggggagaccgcguaaa

SEQ ID NO: 127368 - RNA, 22 nt, Artificial Sequence
  Synthetic
acagacggggagaccgcguaaa

SEQ ID NO: 127369 - RNA, 23 nt, Artificial Sequence
  Synthetic
cacagacggggagaccgcguaaa

SEQ ID NO: 127370 - RNA, 24 nt, Artificial Sequence
  Synthetic
gcacagacggggagaccgcguaaa

SEQ ID NO: 127371 - RNA, 18 nt, Artificial Sequence
  Synthetic
  misc_feature (1)..(1): n is a, c, g, or u
  misc_feature (4)..(4): n is a, c, g, or u
nuanccacauuguguaaa

SEQ ID NO: 127372 - RNA, 19 nt, Artificial Sequence
  Synthetic
  misc_feature (2)..(2): n is a, c, g, or u
  misc_feature (5)..(5): n is a, c, g, or u
gnuanccacauuguguaaa

SEQ ID NO: 127373 - RNA, 20 nt, Artificial Sequence
  Synthetic
  misc_feature (3)..(3): n is a, c, g, or u
  misc_feature (6)..(6): n is a, c, g, or u
ggnuanccacauuguguaaa

SEQ ID NO: 127374 - RNA, 21 nt, Artificial Sequence
  Synthetic
  misc_feature (4)..(4): n is a, c, g, or u
  misc_feature (7)..(7): n is a, c, g, or u
aggnuanccacauuguguaaa

SEQ ID NO: 127375 - RNA, 22 nt, Artificial Sequence
  Synthetic
  misc_feature (5)..(5): n is a, c, g, or u
  misc_feature (8)..(8): n is a, c, g, or u
caggnuanccacauuguguaaa

SEQ ID NO: 127376 - RNA, 23 nt, Artificial Sequence
  Synthetic
  misc_feature (6)..(6): n is a, c, g, or u
  misc_feature (9)..(9): n is a, c, g, or u
gcaggnuanccacauuguguaaa

SEQ ID NO: 127377 - RNA, 24 nt, Artificial Sequence
  Synthetic
  misc_feature (1)..(1): n is a, c, g, or u
  misc_feature (7)..(7): n is a, c, g, or u
  misc_feature (10)..(10): n is a, c, g, or u
ngcaggnuanccacauuguguaaa

SEQ ID NO: 127378 - RNA, 18 nt, Artificial Sequence
  Synthetic
  misc_feature (12)..(12): n is a, c, g, or u
auguauacccanagacaa

SEQ ID NO: 127379 - RNA, 19 nt, Artificial Sequence
  Synthetic
  misc_feature (13)..(13): n is a, c, g, or u
aauguauacccanagacaa

SEQ ID NO: 127380 - RNA, 20 nt, Artificial Sequence
  Synthetic
  misc_feature (14)..(14): n is a, c, g, or u
aaauguauacccanagacaa

SEQ ID NO: 127381 - RNA, 21 nt, Artificial Sequence
  Synthetic
  misc_feature (15)..(15): n is a, c, g, or u
uaaauguauacccanagacaa

SEQ ID NO: 127382 - RNA, 22 nt, Artificial Sequence
  Synthetic
  misc_feature (16)..(16): n is a, c, g, or u
uuaaauguauacccanagacaa

SEQ ID NO: 127383 - RNA, 23 nt, Artificial Sequence
  Synthetic
  misc_feature (17)..(17): n is a, c, g, or u
uuuaaauguauacccanagacaa

SEQ ID NO: 127384 - RNA, 24 nt, Artificial Sequence
  Synthetic
  misc_feature (18)..(18): n is a, c, g, or u
guuuaaauguauacccanagacaa

SEQ ID NO: 127385 - RNA, 18 nt, Artificial Sequence
  Synthetic
ccuggaauuagaggacaa

SEQ ID NO: 127386 - RNA, 19 nt, Artificial Sequence
  Synthetic
uccuggaauuagaggacaa

SEQ ID NO: 127387 - RNA, 20 nt, Artificial Sequence
  Synthetic
auccuggaauuagaggacaa

SEQ ID NO: 127388 - RNA, 21 nt, Artificial Sequence
  Synthetic
gauccuggaauuagaggacaa

SEQ ID NO: 127389 - RNA, 22 nt, Artificial Sequence
  Synthetic
  misc_feature (1)..(1): n is a, c, g, or u
ngauccuggaauuagaggacaa

SEQ ID NO: 127390 - RNA, 23 nt, Artificial Sequence
  Synthetic
  misc_feature (2)..(2): n is a, c, g, or u
ungauccuggaauuagaggacaa

SEQ ID NO: 127391 - RNA, 24 nt, Artificial Sequence
  Synthetic
  misc_feature (3)..(3): n is a, c, g, or u
gungauccuggaauuagaggacaa

SEQ ID NO: 127392 - RNA, 18 nt, Artificial Sequence
  Synthetic
  misc_feature (3)..(3): n is a, c, g, or u
ggnacggcagacggagaa

SEQ ID NO: 127393 - RNA, 19 nt, Artificial Sequence
  Synthetic
  misc_feature (1)..(1): n is a, c, g, or u
  misc_feature (4)..(4): n is a, c, g, or u
nggnacggcagacggagaa

SEQ ID NO: 127394 - RNA, 20 nt, Artificial Sequence
  Synthetic
  misc_feature (1)..(2): n is a, c, g, or u
  misc_feature (5)..(5): n is a, c, g, or u
nnggnacggcagacggagaa

SEQ ID NO: 127395 - RNA, 21 nt, Artificial Sequence
  Synthetic
  misc_feature (2)..(3): n is a, c, g, or u
  misc_feature (6)..(6): n is a, c, g, or u
gnnggnacggcagacggagaa

SEQ ID NO: 127396 - RNA, 22 nt, Artificial Sequence
  Synthetic
  misc_feature (3)..(4): n is a, c, g, or u
  misc_feature (7)..(7): n is a, c, g, or u
ggnnggnacggcagacggagaa

SEQ ID NO: 127397 - RNA, 23 nt, Artificial Sequence
  Synthetic
  misc_feature (4)..(5): n is a, c, g, or u
  misc_feature (8)..(8): n is a, c, g, or u
cggnnggnacggcagacggagaa

SEQ ID NO: 127398 - RNA, 24 nt, Artificial Sequence
  Synthetic
  misc_feature (5)..(6): n is a, c, g, or u
  misc_feature (9)..(9): n is a, c, g, or u
ucggnnggnacggcagacggagaa

SEQ ID NO: 127399 - RNA, 18 nt, Artificial Sequence
  Synthetic
  misc_feature (13)..(13): n is a, c, g, or u
uaaacugagccangagaa

SEQ ID NO: 127400 - RNA, 19 nt, Artificial Sequence
  Synthetic
  misc_feature (14)..(14): n is a, c, g, or u
guaaacugagccangagaa

SEQ ID NO: 127401 - RNA, 20 nt, Artificial Sequence
  Synthetic
  misc_feature (15)..(15): n is a, c, g, or u
aguaaacugagccangagaa

SEQ ID NO: 127402 - RNA, 21 nt, Artificial Sequence
  Synthetic
  misc_feature (16)..(16): n is a, c, g, or u
uaguaaacugagccangagaa

SEQ ID NO: 127403 - RNA, 22 nt, Artificial Sequence
  Synthetic
  misc_feature (17)..(17): n is a, c, g, or u
cuaguaaacugagccangagaa

SEQ ID NO: 127404 - RNA, 23 nt, Artificial Sequence
  Synthetic
  misc_feature (18)..(18): n is a, c, g, or u
acuaguaaacugagccangagaa

SEQ ID NO: 127405 - RNA, 24 nt, Artificial Sequence
  Synthetic
  misc_feature (19)..(19): n is a, c, g, or u
cacuaguaaacugagccangagaa

SEQ ID NO: 127406 - RNA, 18 nt, Artificial Sequence
  Synthetic
  misc_feature (11)..(11): n is a, c, g, or u
guaaaugaaunuuaggaa

SEQ ID NO: 127407 - RNA, 19 nt, Artificial Sequence
  Synthetic
  misc_feature (12)..(12): n is a, c, g, or u
uguaaaugaaunuuaggaa

SEQ ID NO: 127408 - RNA, 20 nt, Artificial Sequence
  Synthetic
  misc_feature (1)..(1): n is a, c, g, or u
  misc_feature (13)..(13): n is a, c, g, or u
nuguaaaugaaunuuaggaa

SEQ ID NO: 127409 - RNA, 21 nt, Artificial Sequence
  Synthetic
  misc_feature (2)..(2): n is a, c, g, or u
  misc_feature (14)..(14): n is a, c, g, or u
cnuguaaaugaaunuuaggaa

SEQ ID NO: 127410 - RNA, 22 nt, Artificial Sequence
  Synthetic
  misc_feature (3)..(3): n is a, c, g, or u
  misc_feature (15)..(15): n is a, c, g, or u
ucnuguaaaugaaunuuaggaa

SEQ ID NO: 127411 - RNA, 23 nt, Artificial Sequence
  Synthetic
  misc_feature (1)..(1): n is a, c, g, or u
  misc_feature (4)..(4): n is a, c, g, or u
  misc_feature (16)..(16): n is a, c, g, or u
nucnuguaaaugaaunuuaggaa

SEQ ID NO: 127412 - RNA, 24 nt, Artificial Sequence
  Synthetic
  misc_feature (2)..(2): n is a, c, g, or u
  misc_feature (5)..(5): n is a, c, g, or u
  misc_feature (17)..(17): n is a, c, g, or u
cnucnuguaaaugaaunuuaggaa

SEQ ID NO: 127413 - RNA, 18 nt, Artificial Sequence
  Synthetic
  misc_feature (11)..(11): n is a, c, g, or u
aucccagaggnuugggaa

SEQ ID NO: 127414 - RNA, 19 nt, Artificial Sequence
  Synthetic
  misc_feature (12)..(12): n is a, c, g, or u
aaucccagaggnuugggaa

SEQ ID NO: 127415 - RNA, 20 nt, Artificial Sequence
  Synthetic
  misc_feature (13)..(13): n is a, c, g, or u
gaaucccagaggnuugggaa

SEQ ID NO: 127416 - RNA, 21 nt, Artificial Sequence
  Synthetic
  misc_feature (14)..(14): n is a, c, g, or u
agaaucccagaggnuugggaa

SEQ ID NO: 127417 - RNA, 22 nt, Artificial Sequence
  Synthetic
  misc_feature (15)..(15): n is a, c, g, or u
aagaaucccagaggnuugggaa

SEQ ID NO: 127418 - RNA, 23 nt, Artificial Sequence
  Synthetic
  misc_feature (16)..(16): n is a, c, g, or u
aaagaaucccagaggnuugggaa

SEQ ID NO: 127419 - RNA, 24 nt, Artificial Sequence
  Synthetic
  misc_feature (17)..(17): n is a, c, g, or u
gaaagaaucccagaggnuugggaa

SEQ ID NO: 127420 - RNA, 18 nt, Artificial Sequence
  Synthetic
gcauagcagcaggaugaa

SEQ ID NO: 127421 - RNA, 19 nt, Artificial Sequence
  Synthetic
ggcauagcagcaggaugaa

SEQ ID NO: 127422 - RNA, 20 nt, Artificial Sequence
  Synthetic
aggcauagcagcaggaugaa

SEQ ID NO: 127423 - RNA, 21 nt, Artificial Sequence
  Synthetic
gaggcauagcagcaggaugaa

SEQ ID NO: 127424 - RNA, 22 nt, Artificial Sequence
  Synthetic
ugaggcauagcagcaggaugaa

SEQ ID NO: 127425 - RNA, 23 nt, Artificial Sequence
  Synthetic
augaggcauagcagcaggaugaa

SEQ ID NO: 127426 - RNA, 24 nt, Artificial Sequence
  Synthetic
gaugaggcauagcagcaggaugaa

SEQ ID NO: 127427 - RNA, 18 nt, Artificial Sequence
  Synthetic
  misc_feature (6)..(6): n is a, c, g, or u
  misc_feature (8)..(8): n is a, c, g, or u
ggguunanuguuccugaa

SEQ ID NO: 127428 - RNA, 19 nt, Artificial Sequence
  Synthetic
  misc_feature (7)..(7): n is a, c, g, or u
  misc_feature (9)..(9): n is a, c, g, or u
aggguunanuguuccugaa

SEQ ID NO: 127429 - RNA, 20 nt, Artificial Sequence
  Synthetic
  misc_feature (8)..(8): n is a, c, g, or u
  misc_feature (10)..(10): n is a, c, g, or u
caggguunanuguuccugaa

SEQ ID NO: 127430 - RNA, 21 nt, Artificial Sequence
  Synthetic
  misc_feature (1)..(1): n is a, c, g, or u
  misc_feature (9)..(9): n is a, c, g, or u
  misc_feature (11)..(11): n is a, c, g, or u
ncaggguunanuguuccugaa

SEQ ID NO: 127431 - RNA, 22 nt, Artificial Sequence
  Synthetic
  misc_feature (2)..(2): n is a, c, g, or u
  misc_feature (10)..(10): n is a, c, g, or u
  misc_feature (12)..(12): n is a, c, g, or u
ancaggguunanuguuccugaa

SEQ ID NO: 127432 - RNA, 23 nt, Artificial Sequence
  Synthetic
  misc_feature (3)..(3): n is a, c, g, or u
  misc_feature (11)..(11): n is a, c, g, or u
  misc_feature (13)..(13): n is a, c, g, or u
gancaggguunanuguuccugaa

SEQ ID NO: 127433 - RNA, 24 nt, Artificial Sequence
  Synthetic
  misc_feature (4)..(4): n is a, c, g, or u
  misc_feature (12)..(12): n is a, c, g, or u
  misc_feature (14)..(14): n is a, c, g, or u
ggancaggguunanuguuccugaa

SEQ ID NO: 127434 - RNA, 18 nt, Artificial Sequence
  Synthetic
gcaacgugcagaggugaa

SEQ ID NO: 127435 - RNA, 19 nt, Artificial Sequence
  Synthetic
ugcaacgugcagaggugaa

SEQ ID NO: 127436 - RNA, 20 nt, Artificial Sequence
  Synthetic
augcaacgugcagaggugaa

SEQ ID NO: 127437 - RNA, 21 nt, Artificial Sequence
  Synthetic
caugcaacgugcagaggugaa

SEQ ID NO: 127438 - RNA, 22 nt, Artificial Sequence
  Synthetic
ccaugcaacgugcagaggugaa

SEQ ID NO: 127439 - RNA, 23 nt, Artificial Sequence
  Synthetic
uccaugcaacgugcagaggugaa

SEQ ID NO: 127440 - RNA, 24 nt, Artificial Sequence
  Synthetic
cuccaugcaacgugcagaggugaa

SEQ ID NO: 127441 - RNA, 18 nt, Artificial Sequence
  Synthetic
  misc_feature (2)..(2): n is a, c, g, or u
  misc_feature (5)..(5): n is a, c, g, or u
gnuanccacauuguguaa

SEQ ID NO: 127442 - RNA, 19 nt, Artificial Sequence
  Synthetic
  misc_feature (3)..(3): n is a, c, g, or u
  misc_feature (6)..(6): n is a, c, g, or u
ggnuanccacauuguguaa

SEQ ID NO: 127443 - RNA, 20 nt, Artificial Sequence
  Synthetic
  misc_feature (4)..(4): n is a, c, g, or u
  misc_feature (7)..(7): n is a, c, g, or u
aggnuanccacauuguguaa

SEQ ID NO: 127444 - RNA, 21 nt, Artificial Sequence
  Synthetic
  misc_feature (5)..(5): n is a, c, g, or u
  misc_feature (8)..(8): n is a, c, g, or u
caggnuanccacauuguguaa

SEQ ID NO: 127445 - RNA, 22 nt, Artificial Sequence
  Synthetic
  misc_feature (6)..(6): n is a, c, g, or u
  misc_feature (9)..(9): n is a, c, g, or u
gcaggnuanccacauuguguaa

SEQ ID NO: 127446 - RNA, 23 nt, Artificial Sequence
  Synthetic
  misc_feature (1)..(1): n is a, c, g, or u
  misc_feature (7)..(7): n is a, c, g, or u
  misc_feature (10)..(10): n is a, c, g, or u
ngcaggnuanccacauuguguaa

SEQ ID NO: 127447 - RNA, 24 nt, Artificial Sequence
  Synthetic
  misc_feature (2)..(2): n is a, c, g, or u
  misc_feature (8)..(8): n is a, c, g, or u
  misc_feature (11)..(11): n is a, c, g, or u
angcaggnuanccacauuguguaa

SEQ ID NO: 127448 - RNA, 18 nt, Artificial Sequence
  Synthetic
  misc_feature (4)..(4): n is a, c, g, or u
auancugaaagccaaaca

SEQ ID NO: 127449 - RNA, 19 nt, Artificial Sequence
  Synthetic
  misc_feature (5)..(5): n is a, c, g, or u
uauancugaaagccaaaca

SEQ ID NO: 127450 - RNA, 20 nt, Artificial Sequence
  Synthetic
  misc_feature (6)..(6): n is a, c, g, or u
auauancugaaagccaaaca

SEQ ID NO: 127451 - RNA, 21 nt, Artificial Sequence
  Synthetic
  misc_feature (7)..(7): n is a, c, g, or u
cauauancugaaagccaaaca

SEQ ID NO: 127452 - RNA, 22 nt, Artificial Sequence
  Synthetic
  misc_feature (8)..(8): n is a, c, g, or u
ccauauancugaaagccaaaca

SEQ ID NO: 127453 - RNA, 23 nt, Artificial Sequence
  Synthetic
  misc_feature (9)..(9): n is a, c, g, or u
uccauauancugaaagccaaaca

SEQ ID NO: 127454 - RNA, 24 nt, Artificial Sequence
  Synthetic
  misc_feature (10)..(10): n is a, c, g, or u
auccauauancugaaagccaaaca

SEQ ID NO: 127455 - RNA, 18 nt, Artificial Sequence
  Synthetic
gccgacgggacguaaaca

SEQ ID NO: 127456 - RNA, 19 nt, Artificial Sequence
  Synthetic
cgccgacgggacguaaaca

SEQ ID NO: 127457 - RNA, 20 nt, Artificial Sequence
  Synthetic
gcgccgacgggacguaaaca

SEQ ID NO: 127458 - RNA, 21 nt, Artificial Sequence
  Synthetic
agcgccgacgggacguaaaca

SEQ ID NO: 127459 - RNA, 22 nt, Artificial Sequence
  Synthetic
cagcgccgacgggacguaaaca

SEQ ID NO: 127460 - RNA, 23 nt, Artificial Sequence
  Synthetic
ucagcgccgacgggacguaaaca

SEQ ID NO: 127461 - RNA, 24 nt, Artificial Sequence
  Synthetic
uucagcgccgacgggacguaaaca

SEQ ID NO: 127462 - RNA, 18 nt, Artificial Sequence
  Synthetic
guccaaggaauacuaaca

SEQ ID NO: 127463 - RNA, 19 nt, Artificial Sequence
  Synthetic
aguccaaggaauacuaaca

SEQ ID NO: 127464 - RNA, 20 nt, Artificial Sequence
  Synthetic
gaguccaaggaauacuaaca

SEQ ID NO: 127465 - RNA, 21 nt, Artificial Sequence
  Synthetic
ugaguccaaggaauacuaaca

SEQ ID NO: 127466 - RNA, 22 nt, Artificial Sequence
  Synthetic
augaguccaaggaauacuaaca

SEQ ID NO: 127467 - RNA, 23 nt, Artificial Sequence
  Synthetic
uaugaguccaaggaauacuaaca

SEQ ID NO: 127468 - RNA, 24 nt, Artificial Sequence
  Synthetic
uuaugaguccaaggaauacuaaca

SEQ ID NO: 127469 - RNA, 18 nt, Artificial Sequence
  Synthetic
  misc_feature (6)..(6): n is a, c, g, or u
cuucunuuuucauuuaca

SEQ ID NO: 127470 - RNA, 19 nt, Artificial Sequence
  Synthetic
  misc_feature (7)..(7): n is a, c, g, or u
ucuucunuuuucauuuaca

SEQ ID NO: 127471 - RNA, 20 nt, Artificial Sequence
  Synthetic
  misc_feature (8)..(8): n is a, c, g, or u
aucuucunuuuucauuuaca

SEQ ID NO: 127472 - RNA, 21 nt, Artificial Sequence
  Synthetic
  misc_feature (9)..(9): n is a, c, g, or u
aaucuucunuuuucauuuaca

SEQ ID NO: 127473 - RNA, 22 nt, Artificial Sequence
  Synthetic
  misc_feature (1)..(1): n is a, c, g, or u
  misc_feature (10)..(10): n is a, c, g, or u
naaucuucunuuuucauuuaca

SEQ ID NO: 127474 - RNA, 23 nt, Artificial Sequence
  Synthetic
  misc_feature (2)..(2): n is a, c, g, or u
  misc_feature (11)..(11): n is a, c, g, or u
unaaucuucunuuuucauuuaca

SEQ ID NO: 127475 - RNA, 24 nt, Artificial Sequence
  Synthetic
  misc_feature (3)..(3): n is a, c, g, or u
  misc_feature (12)..(12): n is a, c, g, or u
uunaaucuucunuuuucauuuaca

SEQ ID NO: 127476 - RNA, 18 nt, Artificial Sequence
  Synthetic
ggaaagcccuacgaacca

SEQ ID NO: 127477 - RNA, 19 nt, Artificial Sequence
  Synthetic
gggaaagcccuacgaacca

SEQ ID NO: 127478 - RNA, 20 nt, Artificial Sequence
  Synthetic
ggggaaagcccuacgaacca

SEQ ID NO: 127479 - RNA, 21 nt, Artificial Sequence
  Synthetic
gggggaaagcccuacgaacca

SEQ ID NO: 127480 - RNA, 22 nt, Artificial Sequence
  Synthetic
ugggggaaagcccuacgaacca

SEQ ID NO: 127481 - RNA, 23 nt, Artificial Sequence
  Synthetic
gugggggaaagcccuacgaacca

SEQ ID NO: 127482 - RNA, 24 nt, Artificial Sequence
  Synthetic
agugggggaaagcccuacgaacca

SEQ ID NO: 127483 - RNA, 18 nt, Artificial Sequence
  Synthetic
  misc_feature (3)..(3): n is a, c, g, or u
aungccaagccccagcca

SEQ ID NO: 127484 - RNA, 19 nt, Artificial Sequence
  Synthetic
  misc_feature (1)..(1): n is a, c, g, or u
  misc_feature (4)..(4): n is a, c, g, or u
naungccaagccccagcca

SEQ ID NO: 127485 - RNA, 20 nt, Artificial Sequence
  Synthetic
  misc_feature (2)..(2): n is a, c, g, or u
  misc_feature (5)..(5): n is a, c, g, or u
cnaungccaagccccagcca

SEQ ID NO: 127486 - RNA, 21 nt, Artificial Sequence
  Synthetic
  misc_feature (3)..(3): n is a, c, g, or u
  misc_feature (6)..(6): n is a, c, g, or u
ccnaungccaagccccagcca

SEQ ID NO: 127487 - RNA, 22 nt, Artificial Sequence
  Synthetic
  misc_feature (4)..(4): n is a, c, g, or u
  misc_feature (7)..(7): n is a, c, g, or u
gccnaungccaagccccagcca

SEQ ID NO: 127488 - RNA, 23 nt, Artificial Sequence
  Synthetic
  misc_feature (5)..(5): n is a, c, g, or u
  misc_feature (8)..(8): n is a, c, g, or u
ggccnaungccaagccccagcca

SEQ ID NO: 127489 - RNA, 24 nt, Artificial Sequence
  Synthetic
  misc_feature (6)..(6): n is a, c, g, or u
  misc_feature (9)..(9): n is a, c, g, or u
uggccnaungccaagccccagcca

SEQ ID NO: 127490 - RNA, 18 nt, Artificial Sequence
  Synthetic
  misc_feature (7)..(7): n is a, c, g, or u
aguacanccuagcagcca

SEQ ID NO: 127491 - RNA, 19 nt, Artificial Sequence
  Synthetic
  misc_feature (8)..(8): n is a, c, g, or u
caguacanccuagcagcca

SEQ ID NO: 127492 - RNA, 20 nt, Artificial Sequence
  Synthetic
  misc_feature (9)..(9): n is a, c, g, or u
gcaguacanccuagcagcca

SEQ ID NO: 127493 - RNA, 21 nt, Artificial Sequence
  Synthetic
  misc_feature (10)..(10): n is a, c, g, or u
ggcaguacanccuagcagcca

SEQ ID NO: 127494 - RNA, 22 nt, Artificial Sequence
  Synthetic
  misc_feature (11)..(11): n is a, c, g, or u
uggcaguacanccuagcagcca

SEQ ID NO: 127495 - RNA, 23 nt, Artificial Sequence
  Synthetic
  misc_feature (12)..(12): n is a, c, g, or u
uuggcaguacanccuagcagcca

SEQ ID NO: 127496 - RNA, 24 nt, Artificial Sequence
  Synthetic
  misc_feature (13)..(13): n is a, c, g, or u
guuggcaguacanccuagcagcca

SEQ ID NO: 127497 - RNA, 18 nt, Artificial Sequence
  Synthetic
ccgcaguauggaucggca

SEQ ID NO: 127498 - RNA, 19 nt, Artificial Sequence
  Synthetic
uccgcaguauggaucggca

SEQ ID NO: 127499 - RNA, 20 nt, Artificial Sequence
  Synthetic
uuccgcaguauggaucggca

SEQ ID NO: 127500 - RNA, 21 nt, Artificial Sequence
  Synthetic
guuccgcaguauggaucggca

SEQ ID NO: 127501 - RNA, 22 nt, Artificial Sequence
  Synthetic
aguuccgcaguauggaucggca

SEQ ID NO: 127502 - RNA, 23 nt, Artificial Sequence
  Synthetic
gaguuccgcaguauggaucggca

SEQ ID NO: 127503 - RNA, 24 nt, Artificial Sequence
  Synthetic
ggaguuccgcaguauggaucggca

SEQ ID NO: 127504 - RNA, 18 nt, Artificial Sequence
  Synthetic
  misc_feature (15)..(15): n is a, c, g, or u
ccaggccguugccgngca

SEQ ID NO: 127505 - RNA, 19 nt, Artificial Sequence
  Synthetic
  misc_feature (16)..(16): n is a, c, g, or u
accaggccguugccgngca

SEQ ID NO: 127506 - RNA, 20 nt, Artificial Sequence
  Synthetic
  misc_feature (17)..(17): n is a, c, g, or u
gaccaggccguugccgngca

SEQ ID NO: 127507 - RNA, 21 nt, Artificial Sequence
  Synthetic
  misc_feature (18)..(18): n is a, c, g, or u
agaccaggccguugccgngca

SEQ ID NO: 127508 - RNA, 22 nt, Artificial Sequence
  Synthetic
  misc_feature (19)..(19): n is a, c, g, or u
cagaccaggccguugccgngca

SEQ ID NO: 127509 - RNA, 23 nt, Artificial Sequence
  Synthetic
  misc_feature (20)..(20): n is a, c, g, or u
acagaccaggccguugccgngca

SEQ ID NO: 127510 - RNA, 24 nt, Artificial Sequence
  Synthetic
  misc_feature (21)..(21): n is a, c, g, or u
cacagaccaggccguugccgngca

SEQ ID NO: 127511 - RNA, 18 nt, Artificial Sequence
  Synthetic
ccggaaguguugauaaga

SEQ ID NO: 127512 - RNA, 19 nt, Artificial Sequence
  Synthetic
uccggaaguguugauaaga

SEQ ID NO: 127513 - RNA, 20 nt, Artificial Sequence
  Synthetic
uuccggaaguguugauaaga

SEQ ID NO: 127514 - RNA, 21 nt, Artificial Sequence
  Synthetic
uuuccggaaguguugauaaga

SEQ ID NO: 127515 - RNA, 22 nt, Artificial Sequence
  Synthetic
guuuccggaaguguugauaaga

SEQ ID NO: 127516 - RNA, 23 nt, Artificial Sequence
  Synthetic
aguuuccggaaguguugauaaga

SEQ ID NO: 127517 - RNA, 24 nt, Artificial Sequence
  Synthetic
uaguuuccggaaguguugauaaga

SEQ ID NO: 127518 - RNA, 18 nt, Artificial Sequence
  Synthetic
cagaugagaaggcacaga

SEQ ID NO: 127519 - RNA, 19 nt, Artificial Sequence
  Synthetic
gcagaugagaaggcacaga

SEQ ID NO: 127520 - RNA, 20 nt, Artificial Sequence
  Synthetic
ggcagaugagaaggcacaga

SEQ ID NO: 127521 - RNA, 21 nt, Artificial Sequence
  Synthetic
cggcagaugagaaggcacaga

SEQ ID NO: 127522 - RNA, 22 nt, Artificial Sequence
  Synthetic
ccggcagaugagaaggcacaga

SEQ ID NO: 127523 - RNA, 23 nt, Artificial Sequence
  Synthetic
accggcagaugagaaggcacaga

SEQ ID NO: 127524 - RNA, 24 nt, Artificial Sequence
  Synthetic
gaccggcagaugagaaggcacaga

SEQ ID NO: 127525 - RNA, 18 nt, Artificial Sequence
  Synthetic
  misc_feature (6)..(7): n is a, c, g, or u
  misc_feature (10)..(10): n is a, c, g, or u
gucggnnggnacggcaga

SEQ ID NO: 127526 - RNA, 19 nt, Artificial Sequence
  Synthetic
  misc_feature (7)..(8): n is a, c, g, or u
  misc_feature (11)..(11): n is a, c, g, or u
ggucggnnggnacggcaga

SEQ ID NO: 127527 - RNA, 20 nt, Artificial Sequence
  Synthetic
  misc_feature (8)..(9): n is a, c, g, or u
  misc_feature (12)..(12): n is a, c, g, or u
uggucggnnggnacggcaga

SEQ ID NO: 127528 - RNA, 21 nt, Artificial Sequence
  Synthetic
  misc_feature (9)..(10): n is a, c, g, or u
  misc_feature (13)..(13): n is a, c, g, or u
guggucggnnggnacggcaga

SEQ ID NO: 127529 - RNA, 22 nt, Artificial Sequence
  Synthetic
  misc_feature (10)..(11): n is a, c, g, or u
  misc_feature (14)..(14): n is a, c, g, or u
cguggucggnnggnacggcaga

SEQ ID NO: 127530 - RNA, 23 nt, Artificial Sequence
  Synthetic
  misc_feature (11)..(12): n is a, c, g, or u
  misc_feature (15)..(15): n is a, c, g, or u
ccguggucggnnggnacggcaga

SEQ ID NO: 127531 - RNA, 24 nt, Artificial Sequence
  Synthetic
  misc_feature (12)..(13): n is a, c, g, or u
  misc_feature (16)..(16): n is a, c, g, or u
cccguggucggnnggnacggcaga

SEQ ID NO: 127532 - RNA, 18 nt, Artificial Sequence
  Synthetic
cucuuagagguggagaga

SEQ ID NO: 127533 - RNA, 19 nt, Artificial Sequence
  Synthetic
ucucuuagagguggagaga

SEQ ID NO: 127534 - RNA, 20 nt, Artificial Sequence
  Synthetic
gucucuuagagguggagaga

SEQ ID NO: 127535 - RNA, 21 nt, Artificial Sequence
  Synthetic
ugucucuuagagguggagaga

SEQ ID NO: 127536 - RNA, 22 nt, Artificial Sequence
  Synthetic
cugucucuuagagguggagaga

SEQ ID NO: 127537 - RNA, 23 nt, Artificial Sequence
  Synthetic
acugucucuuagagguggagaga

SEQ ID NO: 127538 - RNA, 24 nt, Artificial Sequence
  Synthetic
gacugucucuuagagguggagaga

SEQ ID NO: 127539 - RNA, 18 nt, Artificial Sequence
  Synthetic
acauugagauucccgaga

SEQ ID NO: 127540 - RNA, 19 nt, Artificial Sequence
  Synthetic
aacauugagauucccgaga

SEQ ID NO: 127541 - RNA, 20 nt, Artificial Sequence
  Synthetic
uaacauugagauucccgaga

SEQ ID NO: 127542 - RNA, 21 nt, Artificial Sequence
  Synthetic
cuaacauugagauucccgaga

SEQ ID NO: 127543 - RNA, 22 nt, Artificial Sequence
  Synthetic
acuaacauugagauucccgaga

SEQ ID NO: 127544 - RNA, 23 nt, Artificial Sequence
  Synthetic
uacuaacauugagauucccgaga

SEQ ID NO: 127545 - RNA, 24 nt, Artificial Sequence
  Synthetic
auacuaacauugagauucccgaga

SEQ ID NO: 127546 - RNA, 18 nt, Artificial Sequence
  Synthetic
  misc_feature (1)..(1): n is a, c, g, or u
  misc_feature (4)..(4): n is a, c, g, or u
nggnacggcagacggaga

SEQ ID NO: 127547 - RNA, 19 nt, Artificial Sequence
  Synthetic
  misc_feature (1)..(2): n is a, c, g, or u
  misc_feature (5)..(5): n is a, c, g, or u
nnggnacggcagacggaga

SEQ ID NO: 127548 - RNA, 20 nt, Artificial Sequence
  Synthetic
  misc_feature (2)..(3): n is a, c, g, or u
  misc_feature (6)..(6): n is a, c, g, or u
gnnggnacggcagacggaga

SEQ ID NO: 127549 - RNA, 21 nt, Artificial Sequence
  Synthetic
  misc_feature (3)..(4): n is a, c, g, or u
  misc_feature (7)..(7): n is a, c, g, or u
ggnnggnacggcagacggaga

SEQ ID NO: 127550 - RNA, 22 nt, Artificial Sequence
  Synthetic
  misc_feature (4)..(5): n is a, c, g, or u
  misc_feature (8)..(8): n is a, c, g, or u
cggnnggnacggcagacggaga

SEQ ID NO: 127551 - RNA, 23 nt, Artificial Sequence
  Synthetic
  misc_feature (5)..(6): n is a, c, g, or u
  misc_feature (9)..(9): n is a, c, g, or u
ucggnnggnacggcagacggaga

SEQ ID NO: 127552 - RNA, 24 nt, Artificial Sequence
  Synthetic
  misc_feature (6)..(7): n is a, c, g, or u
  misc_feature (10)..(10): n is a, c, g, or u
gucggnnggnacggcagacggaga

SEQ ID NO: 127553 - RNA, 18 nt, Artificial Sequence
  Synthetic
cgcgggauucagcgccga

SEQ ID NO: 127554 - RNA, 19 nt, Artificial Sequence
  Synthetic
ccgcgggauucagcgccga

SEQ ID NO: 127555 - RNA, 20 nt, Artificial Sequence
  Synthetic
uccgcgggauucagcgccga

SEQ ID NO: 127556 - RNA, 21 nt, Artificial Sequence
  Synthetic
guccgcgggauucagcgccga

SEQ ID NO: 127557 - RNA, 22 nt, Artificial Sequence
  Synthetic
cguccgcgggauucagcgccga

SEQ ID NO: 127558 - RNA, 23 nt, Artificial Sequence
  Synthetic
ucguccgcgggauucagcgccga

SEQ ID NO: 127559 - RNA, 24 nt, Artificial Sequence
  Synthetic
gucguccgcgggauucagcgccga

SEQ ID NO: 127560 - RNA, 18 nt, Artificial Sequence
  Synthetic
ugcgaauccacacuccga

SEQ ID NO: 127561 - RNA, 19 nt, Artificial Sequence
  Synthetic
gugcgaauccacacuccga

SEQ ID NO: 127562 - RNA, 20 nt, Artificial Sequence
  Synthetic
agugcgaauccacacuccga

SEQ ID NO: 127563 - RNA, 21 nt, Artificial Sequence
  Synthetic
gagugcgaauccacacuccga

SEQ ID NO: 127564 - RNA, 22 nt, Artificial Sequence
  Synthetic
ggagugcgaauccacacuccga

SEQ ID NO: 127565 - RNA, 23 nt, Artificial Sequence
  Synthetic
aggagugcgaauccacacuccga

SEQ ID NO: 127566 - RNA, 24 nt, Artificial Sequence
  Synthetic
gaggagugcgaauccacacuccga

SEQ ID NO: 127567 - RNA, 18 nt, Artificial Sequence
  Synthetic
ucuucugcgacgcggcga

SEQ ID NO: 127568 - RNA, 19 nt, Artificial Sequence
  Synthetic
aucuucugcgacgcggcga

SEQ ID NO: 127569 - RNA, 20 nt, Artificial Sequence
  Synthetic
gaucuucugcgacgcggcga

SEQ ID NO: 127570 - RNA, 21 nt, Artificial Sequence
  Synthetic
agaucuucugcgacgcggcga

SEQ ID NO: 127571 - RNA, 22 nt, Artificial Sequence
  Synthetic
gagaucuucugcgacgcggcga

SEQ ID NO: 127572 - RNA, 23 nt, Artificial Sequence
  Synthetic
ugagaucuucugcgacgcggcga

SEQ ID NO: 127573 - RNA, 24 nt, Artificial Sequence
  Synthetic
uugagaucuucugcgacgcggcga

SEQ ID NO: 127574 - RNA, 18 nt, Artificial Sequence
  Synthetic
  misc_feature (6)..(6): n is a, c, g, or u
  misc_feature (8)..(8): n is a, c, g, or u
agaucncngacggaagga

SEQ ID NO: 127575 - RNA, 19 nt, Artificial Sequence
  Synthetic
  misc_feature (1)..(1): n is a, c, g, or u
  misc_feature (7)..(7): n is a, c, g, or u
  misc_feature (9)..(9): n is a, c, g, or u
nagaucncngacggaagga

SEQ ID NO: 127576 - RNA, 20 nt, Artificial Sequence
  Synthetic
  misc_feature (2)..(2): n is a, c, g, or u
  misc_feature (8)..(8): n is a, c, g, or u
  misc_feature (10)..(10): n is a, c, g, or u
gnagaucncngacggaagga

SEQ ID NO: 127577 - RNA, 21 nt, Artificial Sequence
  Synthetic
  misc_feature (3)..(3): n is a, c, g, or u
  misc_feature (9)..(9): n is a, c, g, or u
  misc_feature (11)..(11): n is a, c, g, or u
agnagaucncngacggaagga

SEQ ID NO: 127578 - RNA, 22 nt, Artificial Sequence
  Synthetic
  misc_feature (1)..(1): n is a, c, g, or u
  misc_feature (4)..(4): n is a, c, g, or u
  misc_feature (10)..(10): n is a, c, g, or u
  misc_feature (12)..(12): n is a, c, g, or u
nagnagaucncngacggaagga

SEQ ID NO: 127579 - RNA, 23 nt, Artificial Sequence
  Synthetic
  misc_feature (2)..(2): n is a, c, g, or u
  misc_feature (5)..(5): n is a, c, g, or u
  misc_feature (11)..(11): n is a, c, g, or u
  misc_feature (13)..(13): n is a, c, g, or u
cnagnagaucncngacggaagga

SEQ ID NO: 127580 - RNA, 24 nt, Artificial Sequence
  Synthetic
  misc_feature (3)..(3): n is a, c, g, or u
  misc_feature (6)..(6): n is a, c, g, or u
  misc_feature (12)..(12): n is a, c, g, or u
  misc_feature (14)..(14): n is a, c, g, or u
ucnagnagaucncngacggaagga

SEQ ID NO: 127581 - RNA, 18 nt, Artificial Sequence
  Synthetic
ccaggacaaauuggagga

SEQ ID NO: 127582 - RNA, 19 nt, Artificial Sequence
  Synthetic
accaggacaaauuggagga

SEQ ID NO: 127583 - RNA, 20 nt, Artificial Sequence
  Synthetic
aaccaggacaaauuggagga

SEQ ID NO: 127584 - RNA, 21 nt, Artificial Sequence
  Synthetic
uaaccaggacaaauuggagga

SEQ ID NO: 127585 - RNA, 22 nt, Artificial Sequence
  Synthetic
auaaccaggacaaauuggagga

SEQ ID NO: 127586 - RNA, 23 nt, Artificial Sequence
  Synthetic
gauaaccaggacaaauuggagga

SEQ ID NO: 127587 - RNA, 24 nt, Artificial Sequence
  Synthetic
cgauaaccaggacaaauuggagga

SEQ ID NO: 127588 - RNA, 18 nt, Artificial Sequence
  Synthetic
  misc_feature (8)..(8): n is a, c, g, or u
ugagccangagaaacgga

SEQ ID NO: 127589 - RNA, 19 nt, Artificial Sequence
  Synthetic
  misc_feature (9)..(9): n is a, c, g, or u
cugagccangagaaacgga

SEQ ID NO: 127590 - RNA, 20 nt, Artificial Sequence
  Synthetic
  misc_feature (10)..(10): n is a, c, g, or u
acugagccangagaaacgga

SEQ ID NO: 127591 - RNA, 21 nt, Artificial Sequence
  Synthetic
  misc_feature (11)..(11): n is a, c, g, or u
aacugagccangagaaacgga

SEQ ID NO: 127592 - RNA, 22 nt, Artificial Sequence
  Synthetic
  misc_feature (12)..(12): n is a, c, g, or u
aaacugagccangagaaacgga

SEQ ID NO: 127593 - RNA, 23 nt, Artificial Sequence
  Synthetic
  misc_feature (13)..(13): n is a, c, g, or u
uaaacugagccangagaaacgga

SEQ ID NO: 127594 - RNA, 24 nt, Artificial Sequence
  Synthetic
  misc_feature (14)..(14): n is a, c, g, or u
guaaacugagccangagaaacgga

SEQ ID NO: 127595 - RNA, 18 nt, Artificial Sequence
  Synthetic
  misc_feature (1)..(1): n is a, c, g, or u
  misc_feature (4)..(4): n is a, c, g, or u
  misc_feature (10)..(10): n is a, c, g, or u
  misc_feature (12)..(12): n is a, c, g, or u
nagnagaucncngacgga

SEQ ID NO: 127596 - RNA, 19 nt, Artificial Sequence
  Synthetic
  misc_feature (2)..(2): n is a, c, g, or u
  misc_feature (5)..(5): n is a, c, g, or u
  misc_feature (11)..(11): n is a, c, g, or u
  misc_feature (13)..(13): n is a, c, g, or u
cnagnagaucncngacgga

SEQ ID NO: 127597 - RNA, 20 nt, Artificial Sequence
  Synthetic
  misc_feature (3)..(3): n is a, c, g, or u
  misc_feature (6)..(6): n is a, c, g, or u
  misc_feature (12)..(12): n is a, c, g, or u
  misc_feature (14)..(14): n is a, c, g, or u
ucnagnagaucncngacgga

SEQ ID NO: 127598 - RNA, 21 nt, Artificial Sequence
  Synthetic
  misc_feature (1)..(1): n is a, c, g, or u
  misc_feature (4)..(4): n is a, c, g, or u
  misc_feature (7)..(7): n is a, c, g, or u
  misc_feature (13)..(13): n is a, c, g, or u
  misc_feature (15)..(15): n is a, c, g, or u
nucnagnagaucncngacgga

SEQ ID NO: 127599 - RNA, 22 nt, Artificial Sequence
  Synthetic
  misc_feature (2)..(2): n is a, c, g, or u
  misc_feature (5)..(5): n is a, c, g, or u
  misc_feature (8)..(8): n is a, c, g, or u
  misc_feature (14)..(14): n is a, c, g, or u
  misc_feature (16)..(16): n is a, c, g, or u
unucnagnagaucncngacgga

SEQ ID NO: 127600 - RNA, 23 nt, Artificial Sequence
  Synthetic
  misc_feature (3)..(3): n is a, c, g, or u
  misc_feature (6)..(6): n is a, c, g, or u
  misc_feature (9)..(9): n is a, c, g, or u
  misc_feature (15)..(15): n is a, c, g, or u
  misc_feature (17)..(17): n is a, c, g, or u
gunucnagnagaucncngacgga

SEQ ID NO: 127601 - RNA, 24 nt, Artificial Sequence
  Synthetic
  misc_feature (1)..(1): n is a, c, g, or u
  misc_feature (4)..(4): n is a, c, g, or u
  misc_feature (7)..(7): n is a, c, g, or u
  misc_feature (10)..(10): n is a, c, g, or u
  misc_feature (16)..(16): n is a, c, g, or u
  misc_feature (18)..(18): n is a, c, g, or u
ngunucnagnagaucncngacgga

SEQ ID NO: 127602 - RNA, 18 nt, Artificial Sequence
  Synthetic
  misc_feature (8)..(8): n is a, c, g, or u
  misc_feature (11)..(11): n is a, c, g, or u
aagcccangangauggga

SEQ ID NO: 127603 - RNA, 19 nt, Artificial Sequence
  Synthetic
  misc_feature (9)..(9): n is a, c, g, or u
  misc_feature (12)..(12): n is a, c, g, or u
aaagcccangangauggga

SEQ ID NO: 127604 - RNA, 20 nt, Artificial Sequence
  Synthetic
  misc_feature (10)..(10): n is a, c, g, or u
  misc_feature (13)..(13): n is a, c, g, or u
gaaagcccangangauggga

SEQ ID NO: 127605 - RNA, 21 nt, Artificial Sequence
  Synthetic
  misc_feature (11)..(11): n is a, c, g, or u
  misc_feature (14)..(14): n is a, c, g, or u
cgaaagcccangangauggga

SEQ ID NO: 127606 - RNA, 22 nt, Artificial Sequence
  Synthetic
  misc_feature (12)..(12): n is a, c, g, or u
  misc_feature (15)..(15): n is a, c, g, or u
gcgaaagcccangangauggga

SEQ ID NO: 127607 - RNA, 23 nt, Artificial Sequence
  Synthetic
  misc_feature (13)..(13): n is a, c, g, or u
  misc_feature (16)..(16): n is a, c, g, or u
ugcgaaagcccangangauggga

SEQ ID NO: 127608 - RNA, 24 nt, Artificial Sequence
  Synthetic
  misc_feature (14)..(14): n is a, c, g, or u
  misc_feature (17)..(17): n is a, c, g, or u
uugcgaaagcccangangauggga

SEQ ID NO: 127609 - RNA, 18 nt, Artificial Sequence
  Synthetic
  misc_feature (2)..(2): n is a, c, g, or u
  misc_feature (5)..(5): n is a, c, g, or u
  misc_feature (8)..(8): n is a, c, g, or u
  misc_feature (14)..(14): n is a, c, g, or u
  misc_feature (16)..(16): n is a, c, g, or u
unucnagnagaucncnga

SEQ ID NO: 127610 - RNA, 19 nt, Artificial Sequence
  Synthetic
  misc_feature (3)..(3): n is a, c, g, or u
  misc_feature (6)..(6): n is a, c, g, or u
  misc_feature (9)..(9): n is a, c, g, or u
  misc_feature (15)..(15): n is a, c, g, or u
  misc_feature (17)..(17): n is a, c, g, or u
gunucnagnagaucncnga

SEQ ID NO: 127611 - RNA, 20 nt, Artificial Sequence
  Synthetic
  misc_feature (1)..(1): n is a, c, g, or u
  misc_feature (4)..(4): n is a, c, g, or u
  misc_feature (7)..(7): n is a, c, g, or u
  misc_feature (10)..(10): n is a, c, g, or u
  misc_feature (16)..(16): n is a, c, g, or u
  misc_feature (18)..(18): n is a, c, g, or u
ngunucnagnagaucncnga

SEQ ID NO: 127612 - RNA, 21 nt, Artificial Sequence
  Synthetic
  misc_feature (2)..(2): n is a, c, g, or u
  misc_feature (5)..(5): n is a, c, g, or u
  misc_feature (8)..(8): n is a, c, g, or u
  misc_feature (11)..(11): n is a, c, g, or u
  misc_feature (17)..(17): n is a, c, g, or u
  misc_feature (19)..(19): n is a, c, g, or u
cngunucnagnagaucncnga

SEQ ID NO: 127613 - RNA, 22 nt, Artificial Sequence
  Synthetic
  misc_feature (3)..(3): n is a, c, g, or u
  misc_feature (6)..(6): n is a, c, g, or u
  misc_feature (9)..(9): n is a, c, g, or u
  misc_feature (12)..(12): n is a, c, g, or u
  misc_feature (18)..(18): n is a, c, g, or u
  misc_feature (20)..(20): n is a, c, g, or u
gcngunucnagnagaucncnga

SEQ ID NO: 127614 - RNA, 23 nt, Artificial Sequence
  Synthetic
  misc_feature (4)..(4): n is a, c, g, or u
  misc_feature (7)..(7): n is a, c, g, or u
  misc_feature (10)..(10): n is a, c, g, or u
  misc_feature (13)..(13): n is a, c, g, or u
  misc_feature (19)..(19): n is a, c, g, or u
  misc_feature (21)..(21): n is a, c, g, or u
ggcngunucnagnagaucncnga

SEQ ID NO: 127615 - RNA, 24 nt, Artificial Sequence
  Synthetic
  misc_feature (5)..(5): n is a, c, g, or u
  misc_feature (8)..(8): n is a, c, g, or u
  misc_feature (11)..(11): n is a, c, g, or u
  misc_feature (14)..(14): n is a, c, g, or u
  misc_feature (20)..(20): n is a, c, g, or u
  misc_feature (22)..(22): n is a, c, g, or u
aggcngunucnagnagaucncnga

SEQ ID NO: 127616 - RNA, 18 nt, Artificial Sequence
  Synthetic
  misc_feature (1)..(1): n is a, c, g, or u
  misc_feature (16)..(16): n is a, c, g, or u
ngauguauauuuccgnga

SEQ ID NO: 127617 - RNA, 19 nt, Artificial Sequence
  Synthetic
  misc_feature (2)..(2): n is a, c, g, or u
  misc_feature (17)..(17): n is a, c, g, or u
angauguauauuuccgnga

SEQ ID NO: 127618 - RNA, 20 nt, Artificial Sequence
  Synthetic
  misc_feature (3)..(3): n is a, c, g, or u
  misc_feature (18)..(18): n is a, c, g, or u
aangauguauauuuccgnga

SEQ ID NO: 127619 - RNA, 21 nt, Artificial Sequence
  Synthetic
  misc_feature (4)..(4): n is a, c, g, or u
  misc_feature (19)..(19): n is a, c, g, or u
aaangauguauauuuccgnga

SEQ ID NO: 127620 - RNA, 22 nt, Artificial Sequence
  Synthetic
  misc_feature (5)..(5): n is a, c, g, or u
  misc_feature (20)..(20): n is a, c, g, or u
gaaangauguauauuuccgnga

SEQ ID NO: 127621 - RNA, 23 nt, Artificial Sequence
  Synthetic
  misc_feature (6)..(6): n is a, c, g, or u
  misc_feature (21)..(21): n is a, c, g, or u
ggaaangauguauauuuccgnga

SEQ ID NO: 127622 - RNA, 24 nt, Artificial Sequence
  Synthetic
  misc_feature (7)..(7): n is a, c, g, or u
  misc_feature (22)..(22): n is a, c, g, or u
uggaaangauguauauuuccgnga

SEQ ID NO: 127623 - RNA, 18 nt, Artificial Sequence
  Synthetic
uuuuguacagcaacauga

SEQ ID NO: 127624 - RNA, 19 nt, Artificial Sequence
  Synthetic
guuuuguacagcaacauga

SEQ ID NO: 127625 - RNA, 20 nt, Artificial Sequence
  Synthetic
gguuuuguacagcaacauga

SEQ ID NO: 127626 - RNA, 21 nt, Artificial Sequence
  Synthetic
agguuuuguacagcaacauga

SEQ ID NO: 127627 - RNA, 22 nt, Artificial Sequence
  Synthetic
uagguuuuguacagcaacauga

SEQ ID NO: 127628 - RNA, 23 nt, Artificial Sequence
  Synthetic
guagguuuuguacagcaacauga

SEQ ID NO: 127629 - RNA, 24 nt, Artificial Sequence
  Synthetic
cguagguuuuguacagcaacauga

SEQ ID NO: 127630 - RNA, 18 nt, Artificial Sequence
  Synthetic
gcaggguccaacugauga

SEQ ID NO: 127631 - RNA, 19 nt, Artificial Sequence
  Synthetic
ugcaggguccaacugauga

SEQ ID NO: 127632 - RNA, 20 nt, Artificial Sequence
  Synthetic
augcaggguccaacugauga

SEQ ID NO: 127633 - RNA, 21 nt, Artificial Sequence
  Synthetic
aaugcaggguccaacugauga

SEQ ID NO: 127634 - RNA, 22 nt, Artificial Sequence
  Synthetic
gaaugcaggguccaacugauga

SEQ ID NO: 127635 - RNA, 23 nt, Artificial Sequence
  Synthetic
cgaaugcaggguccaacugauga

SEQ ID NO: 127636 - RNA, 24 nt, Artificial Sequence
  Synthetic
ccgaaugcaggguccaacugauga

SEQ ID NO: 127637 - RNA, 18 nt, Artificial Sequence
  Synthetic
  misc_feature (2)..(2): n is a, c, g, or u
unuuuucauuuacaguga

SEQ ID NO: 127638 - RNA, 19 nt, Artificial Sequence
  Synthetic
  misc_feature (3)..(3): n is a, c, g, or u
cunuuuucauuuacaguga

SEQ ID NO: 127639 - RNA, 20 nt, Artificial Sequence
  Synthetic
  misc_feature (4)..(4): n is a, c, g, or u
ucunuuuucauuuacaguga

SEQ ID NO: 127640 - RNA, 21 nt, Artificial Sequence
  Synthetic
  misc_feature (5)..(5): n is a, c, g, or u
uucunuuuucauuuacaguga

SEQ ID NO: 127641 - RNA, 22 nt, Artificial Sequence
  Synthetic
  misc_feature (6)..(6): n is a, c, g, or u
cuucunuuuucauuuacaguga

SEQ ID NO: 127642 - RNA, 23 nt, Artificial Sequence
  Synthetic
  misc_feature (7)..(7): n is a, c, g, or u
ucuucunuuuucauuuacaguga

SEQ ID NO: 127643 - RNA, 24 nt, Artificial Sequence
  Synthetic
  misc_feature (8)..(8): n is a, c, g, or u
aucuucunuuuucauuuacaguga

SEQ ID NO: 127644 - RNA, 18 nt, Artificial Sequence
  Synthetic
caggagguuggugaguga

SEQ ID NO: 127645 - RNA, 19 nt, Artificial Sequence
  Synthetic
acaggagguuggugaguga

SEQ ID NO: 127646 - RNA, 20 nt, Artificial Sequence
  Synthetic
gacaggagguuggugaguga

SEQ ID NO: 127647 - RNA, 21 nt, Artificial Sequence
  Synthetic
ggacaggagguuggugaguga

SEQ ID NO: 127648 - RNA, 22 nt, Artificial Sequence
  Synthetic
aggacaggagguuggugaguga

SEQ ID NO: 127649 - RNA, 23 nt, Artificial Sequence
  Synthetic
gaggacaggagguuggugaguga

SEQ ID NO: 127650 - RNA, 24 nt, Artificial Sequence
  Synthetic
ggaggacaggagguuggugaguga

SEQ ID NO: 127651 - RNA, 18 nt, Artificial Sequence
  Synthetic
  misc_feature (1)..(1): n is a, c, g, or u
nucccccuagaaaauuga

SEQ ID NO: 127652 - RNA, 19 nt, Artificial Sequence
  Synthetic
  misc_feature (2)..(2): n is a, c, g, or u
gnucccccuagaaaauuga

SEQ ID NO: 127653 - RNA, 20 nt, Artificial Sequence
  Synthetic
  misc_feature (3)..(3): n is a, c, g, or u
ugnucccccuagaaaauuga

SEQ ID NO: 127654 - RNA, 21 nt, Artificial Sequence
  Synthetic
  misc_feature (4)..(4): n is a, c, g, or u
gugnucccccuagaaaauuga

SEQ ID NO: 127655 - RNA, 22 nt, Artificial Sequence
  Synthetic
  misc_feature (5)..(5): n is a, c, g, or u
ggugnucccccuagaaaauuga

SEQ ID NO: 127656 - RNA, 23 nt, Artificial Sequence
  Synthetic
  misc_feature (6)..(6): n is a, c, g, or u
gggugnucccccuagaaaauuga

SEQ ID NO: 127657 - RNA, 24 nt, Artificial Sequence
  Synthetic
  misc_feature (7)..(7): n is a, c, g, or u
cgggugnucccccuagaaaauuga

SEQ ID NO: 127658 - RNA, 18 nt, Artificial Sequence
  Synthetic
  misc_feature (17)..(17): n is a, c, g, or u
agcuuggaggcuugaana

SEQ ID NO: 127659 - RNA, 19 nt, Artificial Sequence
  Synthetic
  misc_feature (18)..(18): n is a, c, g, or u
cagcuuggaggcuugaana

SEQ ID NO: 127660 - RNA, 20 nt, Artificial Sequence
  Synthetic
  misc_feature (19)..(19): n is a, c, g, or u
acagcuuggaggcuugaana

SEQ ID NO: 127661 - RNA, 21 nt, Artificial Sequence
  Synthetic
  misc_feature (20)..(20): n is a, c, g, or u
cacagcuuggaggcuugaana

SEQ ID NO: 127662 - RNA, 22 nt, Artificial Sequence
  Synthetic
  misc_feature (21)..(21): n is a, c, g, or u
gcacagcuuggaggcuugaana

SEQ ID NO: 127663 - RNA, 23 nt, Artificial Sequence
  Synthetic
  misc_feature (22)..(22): n is a, c, g, or u
ggcacagcuuggaggcuugaana

SEQ ID NO: 127664 - RNA, 24 nt, Artificial Sequence
  Synthetic
  misc_feature (23)..(23): n is a, c, g, or u
aggcacagcuuggaggcuugaana

SEQ ID NO: 127665 - RNA, 18 nt, Artificial Sequence
  Synthetic
  misc_feature (11)..(11): n is a, c, g, or u
  misc_feature (13)..(14): n is a, c, g, or u
  misc_feature (17)..(17): n is a, c, g, or u
aaucaauaggncnnuuna

SEQ ID NO: 127666 - RNA, 19 nt, Artificial Sequence
  Synthetic
  misc_feature (12)..(12): n is a, c, g, or u
  misc_feature (14)..(15): n is a, c, g, or u
  misc_feature (18)..(18): n is a, c, g, or u
caaucaauaggncnnuuna

SEQ ID NO: 127667 - RNA, 20 nt, Artificial Sequence
  Synthetic
  misc_feature (13)..(13): n is a, c, g, or u
  misc_feature (15)..(16): n is a, c, g, or u
  misc_feature (19)..(19): n is a, c, g, or u
ccaaucaauaggncnnuuna

SEQ ID NO: 127668 - RNA, 21 nt, Artificial Sequence
  Synthetic
  misc_feature (14)..(14): n is a, c, g, or u
  misc_feature (16)..(17): n is a, c, g, or u
  misc_feature (20)..(20): n is a, c, g, or u
uccaaucaauaggncnnuuna

SEQ ID NO: 127669 - RNA, 22 nt, Artificial Sequence
  Synthetic
  misc_feature (15)..(15): n is a, c, g, or u
  misc_feature (17)..(18): n is a, c, g, or u
  misc_feature (21)..(21): n is a, c, g, or u
uuccaaucaauaggncnnuuna

SEQ ID NO: 127670 - RNA, 23 nt, Artificial Sequence
  Synthetic
  misc_feature (16)..(16): n is a, c, g, or u
  misc_feature (18)..(19): n is a, c, g, or u
  misc_feature (22)..(22): n is a, c, g, or u
uuuccaaucaauaggncnnuuna

SEQ ID NO: 127671 - RNA, 24 nt, Artificial Sequence
  Synthetic
  misc_feature (17)..(17): n is a, c, g, or u
  misc_feature (19)..(20): n is a, c, g, or u
  misc_feature (23)..(23): n is a, c, g, or u
cuuuccaaucaauaggncnnuuna

SEQ ID NO: 127672 - RNA, 18 nt, Artificial Sequence
  Synthetic
  misc_feature (13)..(13): n is a, c, g, or u
cucuaaggcuucncgaua

SEQ ID NO: 127673 - RNA, 19 nt, Artificial Sequence
  Synthetic
  misc_feature (14)..(14): n is a, c, g, or u
acucuaaggcuucncgaua

SEQ ID NO: 127674 - RNA, 20 nt, Artificial Sequence
  Synthetic
  misc_feature (15)..(15): n is a, c, g, or u
gacucuaaggcuucncgaua

SEQ ID NO: 127675 - RNA, 21 nt, Artificial Sequence
  Synthetic
  misc_feature (16)..(16): n is a, c, g, or u
agacucuaaggcuucncgaua

SEQ ID NO: 127676 - RNA, 22 nt, Artificial Sequence
  Synthetic
  misc_feature (17)..(17): n is a, c, g, or u
gagacucuaaggcuucncgaua

SEQ ID NO: 127677 - RNA, 23 nt, Artificial Sequence
  Synthetic
  misc_feature (18)..(18): n is a, c, g, or u
ggagacucuaaggcuucncgaua

SEQ ID NO: 127678 - RNA, 24 nt, Artificial Sequence
  Synthetic
  misc_feature (19)..(19): n is a, c, g, or u
aggagacucuaaggcuucncgaua

SEQ ID NO: 127679 - RNA, 18 nt, Artificial Sequence
  Synthetic
auugguaacagcgguaua

SEQ ID NO: 127680 - RNA, 19 nt, Artificial Sequence
  Synthetic
aauugguaacagcgguaua

SEQ ID NO: 127681 - RNA, 20 nt, Artificial Sequence
  Synthetic
aaauugguaacagcgguaua

SEQ ID NO: 127682 - RNA, 21 nt, Artificial Sequence
  Synthetic
aaaauugguaacagcgguaua

SEQ ID NO: 127683 - RNA, 22 nt, Artificial Sequence
  Synthetic
gaaaauugguaacagcgguaua

SEQ ID NO: 127684 - RNA, 23 nt, Artificial Sequence
  Synthetic
agaaaauugguaacagcgguaua

SEQ ID NO: 127685 - RNA, 24 nt, Artificial Sequence
  Synthetic
aagaaaauugguaacagcgguaua

SEQ ID NO: 127686 - RNA, 18 nt, Artificial Sequence
  Synthetic
gagggaguucuucuucua

SEQ ID NO: 127687 - RNA, 19 nt, Artificial Sequence
  Synthetic
cgagggaguucuucuucua

SEQ ID NO: 127688 - RNA, 20 nt, Artificial Sequence
  Synthetic
gcgagggaguucuucuucua

SEQ ID NO: 127689 - RNA, 21 nt, Artificial Sequence
  Synthetic
ggcgagggaguucuucuucua

SEQ ID NO: 127690 - RNA, 22 nt, Artificial Sequence
  Synthetic
aggcgagggaguucuucuucua

SEQ ID NO: 127691 - RNA, 23 nt, Artificial Sequence
  Synthetic
gaggcgagggaguucuucuucua

SEQ ID NO: 127692 - RNA, 24 nt, Artificial Sequence
  Synthetic
cgaggcgagggaguucuucuucua

SEQ ID NO: 127693 - RNA, 18 nt, Artificial Sequence
  Synthetic
agacggggagaccgcgua

SEQ ID NO: 127694 - RNA, 19 nt, Artificial Sequence
  Synthetic
cagacggggagaccgcgua

SEQ ID NO: 127695 - RNA, 20 nt, Artificial Sequence
  Synthetic
acagacggggagaccgcgua

SEQ ID NO: 127696 - RNA, 21 nt, Artificial Sequence
  Synthetic
cacagacggggagaccgcgua

SEQ ID NO: 127697 - RNA, 22 nt, Artificial Sequence
  Synthetic
gcacagacggggagaccgcgua

SEQ ID NO: 127698 - RNA, 23 nt, Artificial Sequence
  Synthetic
ggcacagacggggagaccgcgua

SEQ ID NO: 127699 - RNA, 24 nt, Artificial Sequence
  Synthetic
aggcacagacggggagaccgcgua

SEQ ID NO: 127700 - RNA, 18 nt, Artificial Sequence
  Synthetic
  misc_feature (5)..(5): n is a, c, g, or u
uugungauccuggaauua

SEQ ID NO: 127701 - RNA, 19 nt, Artificial Sequence
  Synthetic
  misc_feature (6)..(6): n is a, c, g, or u
guugungauccuggaauua

SEQ ID NO: 127702 - RNA, 20 nt, Artificial Sequence
  Synthetic
  misc_feature (7)..(7): n is a, c, g, or u
uguugungauccuggaauua

SEQ ID NO: 127703 - RNA, 21 nt, Artificial Sequence
  Synthetic
  misc_feature (8)..(8): n is a, c, g, or u
uuguugungauccuggaauua

SEQ ID NO: 127704 - RNA, 22 nt, Artificial Sequence
  Synthetic
  misc_feature (9)..(9): n is a, c, g, or u
guuguugungauccuggaauua

SEQ ID NO: 127705 - RNA, 23 nt, Artificial Sequence
  Synthetic
  misc_feature (10)..(10): n is a, c, g, or u
gguuguugungauccuggaauua

SEQ ID NO: 127706 - RNA, 24 nt, Artificial Sequence
  Synthetic
  misc_feature (11)..(11): n is a, c, g, or u
ugguuguugungauccuggaauua

SEQ ID NO: 127707 - RNA, 18 nt, Artificial Sequence
  Synthetic
uagguuuuguacagcaac

SEQ ID NO: 127708 - RNA, 19 nt, Artificial Sequence
  Synthetic
guagguuuuguacagcaac

SEQ ID NO: 127709 - RNA, 20 nt, Artificial Sequence
  Synthetic
cguagguuuuguacagcaac

SEQ ID NO: 127710 - RNA, 21 nt, Artificial Sequence
  Synthetic
ccguagguuuuguacagcaac

SEQ ID NO: 127711 - RNA, 22 nt, Artificial Sequence
  Synthetic
uccguagguuuuguacagcaac

SEQ ID NO: 127712 - RNA, 23 nt, Artificial Sequence
  Synthetic
auccguagguuuuguacagcaac

SEQ ID NO: 127713 - RNA, 24 nt, Artificial Sequence
  Synthetic
cauccguagguuuuguacagcaac

SEQ ID NO: 127714 - RNA, 18 nt, Artificial Sequence
  Synthetic
gugaggauucuugucaac

SEQ ID NO: 127715 - RNA, 19 nt, Artificial Sequence
  Synthetic
ugugaggauucuugucaac

SEQ ID NO: 127716 - RNA, 20 nt, Artificial Sequence
  Synthetic
uugugaggauucuugucaac

SEQ ID NO: 127717 - RNA, 21 nt, Artificial Sequence
  Synthetic
auugugaggauucuugucaac

SEQ ID NO: 127718 - RNA, 22 nt, Artificial Sequence
  Synthetic
uauugugaggauucuugucaac

SEQ ID NO: 127719 - RNA, 23 nt, Artificial Sequence
  Synthetic
guauugugaggauucuugucaac

SEQ ID NO: 127720 - RNA, 24 nt, Artificial Sequence
  Synthetic
gguauugugaggauucuugucaac

SEQ ID NO: 127721 - RNA, 18 nt, Artificial Sequence
  Synthetic
  misc_feature (5)..(5): n is a, c, g, or u
  misc_feature (7)..(7): n is a, c, g, or u
gguunanuguuccugaac

SEQ ID NO: 127722 - RNA, 19 nt, Artificial Sequence
  Synthetic
  misc_feature (6)..(6): n is a, c, g, or u
  misc_feature (8)..(8): n is a, c, g, or u
ggguunanuguuccugaac

SEQ ID NO: 127723 - RNA, 20 nt, Artificial Sequence
  Synthetic
  misc_feature (7)..(7): n is a, c, g, or u
  misc_feature (9)..(9): n is a, c, g, or u
aggguunanuguuccugaac

SEQ ID NO: 127724 - RNA, 21 nt, Artificial Sequence
  Synthetic
  misc_feature (8)..(8): n is a, c, g, or u
  misc_feature (10)..(10): n is a, c, g, or u
caggguunanuguuccugaac

SEQ ID NO: 127725 - RNA, 22 nt, Artificial Sequence
  Synthetic
  misc_feature (1)..(1): n is a, c, g, or u
  misc_feature (9)..(9): n is a, c, g, or u
  misc_feature (11)..(11): n is a, c, g, or u
ncaggguunanuguuccugaac

SEQ ID NO: 127726 - RNA, 23 nt, Artificial Sequence
  Synthetic
  misc_feature (2)..(2): n is a, c, g, or u
  misc_feature (10)..(10): n is a, c, g, or u
  misc_feature (12)..(12): n is a, c, g, or u
ancaggguunanuguuccugaac

SEQ ID NO: 127727 - RNA, 24 nt, Artificial Sequence
  Synthetic
  misc_feature (3)..(3): n is a, c, g, or u
  misc_feature (11)..(11): n is a, c, g, or u
  misc_feature (13)..(13): n is a, c, g, or u
gancaggguunanuguuccugaac

SEQ ID NO: 127728 - RNA, 18 nt, Artificial Sequence
  Synthetic
gacacauccagcgauaac

SEQ ID NO: 127729 - RNA, 19 nt, Artificial Sequence
  Synthetic
agacacauccagcgauaac

SEQ ID NO: 127730 - RNA, 20 nt, Artificial Sequence
  Synthetic
cagacacauccagcgauaac

SEQ ID NO: 127731 - RNA, 21 nt, Artificial Sequence
  Synthetic
gcagacacauccagcgauaac

SEQ ID NO: 127732 - RNA, 22 nt, Artificial Sequence
  Synthetic
cgcagacacauccagcgauaac

SEQ ID NO: 127733 - RNA, 23 nt, Artificial Sequence
  Synthetic
ccgcagacacauccagcgauaac

SEQ ID NO: 127734 - RNA, 24 nt, Artificial Sequence
  Synthetic
gccgcagacacauccagcgauaac

SEQ ID NO: 127735 - RNA, 18 nt, Artificial Sequence
  Synthetic
aaaaaccccgccuguaac

SEQ ID NO: 127736 - RNA, 19 nt, Artificial Sequence
  Synthetic
gaaaaaccccgccuguaac

SEQ ID NO: 127737 - RNA, 20 nt, Artificial Sequence
  Synthetic
agaaaaaccccgccuguaac

SEQ ID NO: 127738 - RNA, 21 nt, Artificial Sequence
  Synthetic
aagaaaaaccccgccuguaac

SEQ ID NO: 127739 - RNA, 22 nt, Artificial Sequence
  Synthetic
caagaaaaaccccgccuguaac

SEQ ID NO: 127740 - RNA, 23 nt, Artificial Sequence
  Synthetic
acaagaaaaaccccgccuguaac

SEQ ID NO: 127741 - RNA, 24 nt, Artificial Sequence
  Synthetic
aacaagaaaaaccccgccuguaac

SEQ ID NO: 127742 - RNA, 18 nt, Artificial Sequence
  Synthetic
aggugaagcgaagugcac

SEQ ID NO: 127743 - RNA, 19 nt, Artificial Sequence
  Synthetic
gaggugaagcgaagugcac

SEQ ID NO: 127744 - RNA, 20 nt, Artificial Sequence
  Synthetic
agaggugaagcgaagugcac

SEQ ID NO: 127745 - RNA, 21 nt, Artificial Sequence
  Synthetic
cagaggugaagcgaagugcac

SEQ ID NO: 127746 - RNA, 22 nt, Artificial Sequence
  Synthetic
gcagaggugaagcgaagugcac

SEQ ID NO: 127747 - RNA, 23 nt, Artificial Sequence
  Synthetic
ugcagaggugaagcgaagugcac

SEQ ID NO: 127748 - RNA, 24 nt, Artificial Sequence
  Synthetic
gugcagaggugaagcgaagugcac

SEQ ID NO: 127749 - RNA, 18 nt, Artificial Sequence
  Synthetic
agaugagaaggcacagac

SEQ ID NO: 127750 - RNA, 19 nt, Artificial Sequence
  Synthetic
cagaugagaaggcacagac

SEQ ID NO: 127751 - RNA, 20 nt, Artificial Sequence
  Synthetic
gcagaugagaaggcacagac

SEQ ID NO: 127752 - RNA, 21 nt, Artificial Sequence
  Synthetic
ggcagaugagaaggcacagac

SEQ ID NO: 127753 - RNA, 22 nt, Artificial Sequence
  Synthetic
cggcagaugagaaggcacagac

SEQ ID NO: 127754 - RNA, 23 nt, Artificial Sequence
  Synthetic
ccggcagaugagaaggcacagac

SEQ ID NO: 127755 - RNA, 24 nt, Artificial Sequence
  Synthetic
accggcagaugagaaggcacagac

SEQ ID NO: 127756 - RNA, 18 nt, Artificial Sequence
  Synthetic
caggacaaauuggaggac

SEQ ID NO: 127757 - RNA, 19 nt, Artificial Sequence
  Synthetic
ccaggacaaauuggaggac

SEQ ID NO: 127758 - RNA, 20 nt, Artificial Sequence
  Synthetic
accaggacaaauuggaggac

SEQ ID NO: 127759 - RNA, 21 nt, Artificial Sequence
  Synthetic
aaccaggacaaauuggaggac

SEQ ID NO: 127760 - RNA, 22 nt, Artificial Sequence
  Synthetic
uaaccaggacaaauuggaggac

SEQ ID NO: 127761 - RNA, 23 nt, Artificial Sequence
  Synthetic
auaaccaggacaaauuggaggac

SEQ ID NO: 127762 - RNA, 24 nt, Artificial Sequence
  Synthetic
gauaaccaggacaaauuggaggac

SEQ ID NO: 127763 - RNA, 18 nt, Artificial Sequence
  Synthetic
  misc_feature (4)..(4): n is a, c, g, or u
  misc_feature (16)..(16): n is a, c, g, or u
gaanagugggacaugnac

SEQ ID NO: 127764 - RNA, 19 nt, Artificial Sequence
  Synthetic
  misc_feature (5)..(5): n is a, c, g, or u
  misc_feature (17)..(17): n is a, c, g, or u
ugaanagugggacaugnac

SEQ ID NO: 127765 - RNA, 20 nt, Artificial Sequence
  Synthetic
  misc_feature (6)..(6): n is a, c, g, or u
  misc_feature (18)..(18): n is a, c, g, or u
uugaanagugggacaugnac

SEQ ID NO: 127766 - RNA, 21 nt, Artificial Sequence
  Synthetic
  misc_feature (7)..(7): n is a, c, g, or u
  misc_feature (19)..(19): n is a, c, g, or u
cuugaanagugggacaugnac

SEQ ID NO: 127767 - RNA, 22 nt, Artificial Sequence
  Synthetic
  misc_feature (8)..(8): n is a, c, g, or u
  misc_feature (20)..(20): n is a, c, g, or u
gcuugaanagugggacaugnac

SEQ ID NO: 127768 - RNA, 23 nt, Artificial Sequence
  Synthetic
  misc_feature (9)..(9): n is a, c, g, or u
  misc_feature (21)..(21): n is a, c, g, or u
ggcuugaanagugggacaugnac

SEQ ID NO: 127769 - RNA, 24 nt, Artificial Sequence
  Synthetic
  misc_feature (10)..(10): n is a, c, g, or u
  misc_feature (22)..(22): n is a, c, g, or u
aggcuugaanagugggacaugnac

SEQ ID NO: 127770 - RNA, 18 nt, Artificial Sequence
  Synthetic
  misc_feature (10)..(10): n is a, c, g, or u
  misc_feature (12)..(13): n is a, c, g, or u
  misc_feature (16)..(16): n is a, c, g, or u
aucaauaggncnnuunac

SEQ ID NO: 127771 - RNA, 19 nt, Artificial Sequence
  Synthetic
  misc_feature (11)..(11): n is a, c, g, or u
  misc_feature (13)..(14): n is a, c, g, or u
  misc_feature (17)..(17): n is a, c, g, or u
aaucaauaggncnnuunac

SEQ ID NO: 127772 - RNA, 20 nt, Artificial Sequence
  Synthetic
  misc_feature (12)..(12): n is a, c, g, or u
  misc_feature (14)..(15): n is a, c, g, or u
  misc_feature (18)..(18): n is a, c, g, or u
caaucaauaggncnnuunac

SEQ ID NO: 127773 - RNA, 21 nt, Artificial Sequence
  Synthetic
  misc_feature (13)..(13): n is a, c, g, or u
  misc_feature (15)..(16): n is a, c, g, or u
  misc_feature (19)..(19): n is a, c, g, or u
ccaaucaauaggncnnuunac

SEQ ID NO: 127774 - RNA, 22 nt, Artificial Sequence
  Synthetic
  misc_feature (14)..(14): n is a, c, g, or u
  misc_feature (16)..(17): n is a, c, g, or u
  misc_feature (20)..(20): n is a, c, g, or u
uccaaucaauaggncnnuunac

SEQ ID NO: 127775 - RNA, 23 nt, Artificial Sequence
  Synthetic
  misc_feature (15)..(15): n is a, c, g, or u
  misc_feature (17)..(18): n is a, c, g, or u
  misc_feature (21)..(21): n is a, c, g, or u
uuccaaucaauaggncnnuunac

SEQ ID NO: 127776 - RNA, 24 nt, Artificial Sequence
  Synthetic
  misc_feature (16)..(16): n is a, c, g, or u
  misc_feature (18)..(19): n is a, c, g, or u
  misc_feature (22)..(22): n is a, c, g, or u
uuuccaaucaauaggncnnuunac

SEQ ID NO: 127777 - RNA, 18 nt, Artificial Sequence
  Synthetic
guccucuuauguaagacc

SEQ ID NO: 127778 - RNA, 19 nt, Artificial Sequence
  Synthetic
aguccucuuauguaagacc

SEQ ID NO: 127779 - RNA, 20 nt, Artificial Sequence
  Synthetic
gaguccucuuauguaagacc

SEQ ID NO: 127780 - RNA, 21 nt, Artificial Sequence
  Synthetic
agaguccucuuauguaagacc

SEQ ID NO: 127781 - RNA, 22 nt, Artificial Sequence
  Synthetic
aagaguccucuuauguaagacc

SEQ ID NO: 127782 - RNA, 23 nt, Artificial Sequence
  Synthetic
caagaguccucuuauguaagacc

SEQ ID NO: 127783 - RNA, 24 nt, Artificial Sequence
  Synthetic
ccaagaguccucuuauguaagacc

SEQ ID NO: 127784 - RNA, 18 nt, Artificial Sequence
  Synthetic
  misc_feature (12)..(12): n is a, c, g, or u
acacacgggugnuccccc

SEQ ID NO: 127785 - RNA, 19 nt, Artificial Sequence
  Synthetic
  misc_feature (13)..(13): n is a, c, g, or u
gacacacgggugnuccccc

SEQ ID NO: 127786 - RNA, 20 nt, Artificial Sequence
  Synthetic
  misc_feature (14)..(14): n is a, c, g, or u
agacacacgggugnuccccc

SEQ ID NO: 127787 - RNA, 21 nt, Artificial Sequence
  Synthetic
  misc_feature (15)..(15): n is a, c, g, or u
aagacacacgggugnuccccc

SEQ ID NO: 127788 - RNA, 22 nt, Artificial Sequence
  Synthetic
  misc_feature (16)..(16): n is a, c, g, or u
caagacacacgggugnuccccc

SEQ ID NO: 127789 - RNA, 23 nt, Artificial Sequence
  Synthetic
  misc_feature (17)..(17): n is a, c, g, or u
ccaagacacacgggugnuccccc

SEQ ID NO: 127790 - RNA, 24 nt, Artificial Sequence
  Synthetic
  misc_feature (18)..(18): n is a, c, g, or u
gccaagacacacgggugnuccccc

SEQ ID NO: 127791 - RNA, 18 nt, Artificial Sequence
  Synthetic
agagucccaagcggcccc

SEQ ID NO: 127792 - RNA, 19 nt, Artificial Sequence
  Synthetic
  misc_feature (1)..(1): n is a, c, g, or u
nagagucccaagcggcccc

SEQ ID NO: 127793 - RNA, 20 nt, Artificial Sequence
  Synthetic
  misc_feature (2)..(2): n is a, c, g, or u
anagagucccaagcggcccc

SEQ ID NO: 127794 - RNA, 21 nt, Artificial Sequence
  Synthetic
  misc_feature (3)..(3): n is a, c, g, or u
ganagagucccaagcggcccc

SEQ ID NO: 127795 - RNA, 22 nt, Artificial Sequence
  Synthetic
  misc_feature (4)..(4): n is a, c, g, or u
cganagagucccaagcggcccc

SEQ ID NO: 127796 - RNA, 23 nt, Artificial Sequence
  Synthetic
  misc_feature (5)..(5): n is a, c, g, or u
acganagagucccaagcggcccc

SEQ ID NO: 127797 - RNA, 24 nt, Artificial Sequence
  Synthetic
  misc_feature (6)..(6): n is a, c, g, or u
gacganagagucccaagcggcccc

SEQ ID NO: 127798 - RNA, 18 nt, Artificial Sequence
  Synthetic
  misc_feature (11)..(12): n is a, c, g, or u
  misc_feature (15)..(15): n is a, c, g, or u
cuuccaauuannuanccc

SEQ ID NO: 127799 - RNA, 19 nt, Artificial Sequence
  Synthetic
  misc_feature (12)..(13): n is a, c, g, or u
  misc_feature (16)..(16): n is a, c, g, or u
acuuccaauuannuanccc

SEQ ID NO: 127800 - RNA, 20 nt, Artificial Sequence
  Synthetic
  misc_feature (13)..(14): n is a, c, g, or u
  misc_feature (17)..(17): n is a, c, g, or u
aacuuccaauuannuanccc

SEQ ID NO: 127801 - RNA, 21 nt, Artificial Sequence
  Synthetic
  misc_feature (14)..(15): n is a, c, g, or u
  misc_feature (18)..(18): n is a, c, g, or u
caacuuccaauuannuanccc

SEQ ID NO: 127802 - RNA, 22 nt, Artificial Sequence
  Synthetic
  misc_feature (15)..(16): n is a, c, g, or u
  misc_feature (19)..(19): n is a, c, g, or u
ccaacuuccaauuannuanccc

SEQ ID NO: 127803 - RNA, 23 nt, Artificial Sequence
  Synthetic
  misc_feature (16)..(17): n is a, c, g, or u
  misc_feature (20)..(20): n is a, c, g, or u
cccaacuuccaauuannuanccc

SEQ ID NO: 127804 - RNA, 24 nt, Artificial Sequence
  Synthetic
  misc_feature (17)..(18): n is a, c, g, or u
  misc_feature (21)..(21): n is a, c, g, or u
ccccaacuuccaauuannuanccc

SEQ ID NO: 127805 - RNA, 18 nt, Artificial Sequence
  Synthetic
guaaacaaaggacguccc

SEQ ID NO: 127806 - RNA, 19 nt, Artificial Sequence
  Synthetic
cguaaacaaaggacguccc

SEQ ID NO: 127807 - RNA, 20 nt, Artificial Sequence
  Synthetic
acguaaacaaaggacguccc

SEQ ID NO: 127808 - RNA, 21 nt, Artificial Sequence
  Synthetic
gacguaaacaaaggacguccc

SEQ ID NO: 127809 - RNA, 22 nt, Artificial Sequence
  Synthetic
ggacguaaacaaaggacguccc

SEQ ID NO: 127810 - RNA, 23 nt, Artificial Sequence
  Synthetic
gggacguaaacaaaggacguccc

SEQ ID NO: 127811 - RNA, 24 nt, Artificial Sequence
  Synthetic
cgggacguaaacaaaggacguccc

SEQ ID NO: 127812 - RNA, 18 nt, Artificial Sequence
  Synthetic
  misc_feature (8)..(8): n is a, c, g, or u
caguacanccuagcagcc

SEQ ID NO: 127813 - RNA, 19 nt, Artificial Sequence
  Synthetic
  misc_feature (9)..(9): n is a, c, g, or u
gcaguacanccuagcagcc

SEQ ID NO: 127814 - RNA, 20 nt, Artificial Sequence
  Synthetic
  misc_feature (10)..(10): n is a, c, g, or u
ggcaguacanccuagcagcc

SEQ ID NO: 127815 - RNA, 21 nt, Artificial Sequence
  Synthetic
  misc_feature (11)..(11): n is a, c, g, or u
uggcaguacanccuagcagcc

SEQ ID NO: 127816 - RNA, 22 nt, Artificial Sequence
  Synthetic
  misc_feature (12)..(12): n is a, c, g, or u
uuggcaguacanccuagcagcc

SEQ ID NO: 127817 - RNA, 23 nt, Artificial Sequence
  Synthetic
  misc_feature (13)..(13): n is a, c, g, or u
guuggcaguacanccuagcagcc

SEQ ID NO: 127818 - RNA, 24 nt, Artificial Sequence
  Synthetic
  misc_feature (14)..(14): n is a, c, g, or u
aguuggcaguacanccuagcagcc

SEQ ID NO: 127819 - RNA, 18 nt, Artificial Sequence
  Synthetic
gcacuaguaaacugagcc

SEQ ID NO: 127820 - RNA, 19 nt, Artificial Sequence
  Synthetic
ggcacuaguaaacugagcc

SEQ ID NO: 127821 - RNA, 20 nt, Artificial Sequence
  Synthetic
uggcacuaguaaacugagcc

SEQ ID NO: 127822 - RNA, 21 nt, Artificial Sequence
  Synthetic
auggcacuaguaaacugagcc

SEQ ID NO: 127823 - RNA, 22 nt, Artificial Sequence
  Synthetic
aauggcacuaguaaacugagcc

SEQ ID NO: 127824 - RNA, 23 nt, Artificial Sequence
  Synthetic
aaauggcacuaguaaacugagcc

SEQ ID NO: 127825 - RNA, 24 nt, Artificial Sequence
  Synthetic
caaauggcacuaguaaacugagcc

SEQ ID NO: 127826 - RNA, 18 nt, Artificial Sequence
  Synthetic
  misc_feature (7)..(7): n is a, c, g, or u
  misc_feature (9)..(9): n is a, c, g, or u
cacugungncaauaugcc

SEQ ID NO: 127827 - RNA, 19 nt, Artificial Sequence
  Synthetic
  misc_feature (1)..(1): n is a, c, g, or u
  misc_feature (8)..(8): n is a, c, g, or u
  misc_feature (10)..(10): n is a, c, g, or u
ncacugungncaauaugcc

SEQ ID NO: 127828 - RNA, 20 nt, Artificial Sequence
  Synthetic
  misc_feature (2)..(2): n is a, c, g, or u
  misc_feature (9)..(9): n is a, c, g, or u
  misc_feature (11)..(11): n is a, c, g, or u
gncacugungncaauaugcc

SEQ ID NO: 127829 - RNA, 21 nt, Artificial Sequence
  Synthetic
  misc_feature (3)..(3): n is a, c, g, or u
  misc_feature (10)..(10): n is a, c, g, or u
  misc_feature (12)..(12): n is a, c, g, or u
ugncacugungncaauaugcc

SEQ ID NO: 127830 - RNA, 22 nt, Artificial Sequence
  Synthetic
  misc_feature (1)..(1): n is a, c, g, or u
  misc_feature (4)..(4): n is a, c, g, or u
  misc_feature (11)..(11): n is a, c, g, or u
  misc_feature (13)..(13): n is a, c, g, or u
nugncacugungncaauaugcc

SEQ ID NO: 127831 - RNA, 23 nt, Artificial Sequence
  Synthetic
  misc_feature (2)..(2): n is a, c, g, or u
  misc_feature (5)..(5): n is a, c, g, or u
  misc_feature (12)..(12): n is a, c, g, or u
  misc_feature (14)..(14): n is a, c, g, or u
gnugncacugungncaauaugcc

SEQ ID NO: 127832 - RNA, 24 nt, Artificial Sequence
  Synthetic
  misc_feature (3)..(3): n is a, c, g, or u
  misc_feature (6)..(6): n is a, c, g, or u
  misc_feature (13)..(13): n is a, c, g, or u
  misc_feature (15)..(15): n is a, c, g, or u
ugnugncacugungncaauaugcc

SEQ ID NO: 127833 - RNA, 18 nt, Artificial Sequence
  Synthetic
gggaaacauagaguugcc

SEQ ID NO: 127834 - RNA, 19 nt, Artificial Sequence
  Synthetic
agggaaacauagaguugcc

SEQ ID NO: 127835 - RNA, 20 nt, Artificial Sequence
  Synthetic
gagggaaacauagaguugcc

SEQ ID NO: 127836 - RNA, 21 nt, Artificial Sequence
  Synthetic
ugagggaaacauagaguugcc

SEQ ID NO: 127837 - RNA, 22 nt, Artificial Sequence
  Synthetic
augagggaaacauagaguugcc

SEQ ID NO: 127838 - RNA, 23 nt, Artificial Sequence
  Synthetic
caugagggaaacauagaguugcc

SEQ ID NO: 127839 - RNA, 24 nt, Artificial Sequence
  Synthetic
acaugagggaaacauagaguugcc

SEQ ID NO: 127840 - RNA, 18 nt, Artificial Sequence
  Synthetic
augaucgggaaagaaucc

SEQ ID NO: 127841 - RNA, 19 nt, Artificial Sequence
  Synthetic
gaugaucgggaaagaaucc

SEQ ID NO: 127842 - RNA, 20 nt, Artificial Sequence
  Synthetic
ugaugaucgggaaagaaucc

SEQ ID NO: 127843 - RNA, 21 nt, Artificial Sequence
  Synthetic
cugaugaucgggaaagaaucc

SEQ ID NO: 127844 - RNA, 22 nt, Artificial Sequence
  Synthetic
acugaugaucgggaaagaaucc

SEQ ID NO: 127845 - RNA, 23 nt, Artificial Sequence
  Synthetic
aacugaugaucgggaaagaaucc

SEQ ID NO: 127846 - RNA, 24 nt, Artificial Sequence
  Synthetic
caacugaugaucgggaaagaaucc

SEQ ID NO: 127847 - RNA, 18 nt, Artificial Sequence
  Synthetic
uucccaccuuaugagucc

SEQ ID NO: 127848 - RNA, 19 nt, Artificial Sequence
  Synthetic
uuucccaccuuaugagucc

SEQ ID NO: 127849 - RNA, 20 nt, Artificial Sequence
  Synthetic
  misc_feature (1)..(1): n is a, c, g, or u
nuuucccaccuuaugagucc

SEQ ID NO: 127850 - RNA, 21 nt, Artificial Sequence
  Synthetic
  misc_feature (2)..(2): n is a, c, g, or u
anuuucccaccuuaugagucc

SEQ ID NO: 127851 - RNA, 22 nt, Artificial Sequence
  Synthetic
  misc_feature (3)..(3): n is a, c, g, or u
aanuuucccaccuuaugagucc

SEQ ID NO: 127852 - RNA, 23 nt, Artificial Sequence
  Synthetic
  misc_feature (1)..(1): n is a, c, g, or u
  misc_feature (4)..(4): n is a, c, g, or u
naanuuucccaccuuaugagucc

SEQ ID NO: 127853 - RNA, 24 nt, Artificial Sequence
  Synthetic
  misc_feature (2)..(2): n is a, c, g, or u
  misc_feature (5)..(5): n is a, c, g, or u
unaanuuucccaccuuaugagucc

SEQ ID NO: 127854 - RNA, 18 nt, Artificial Sequence
  Synthetic
  misc_feature (6)..(6): n is a, c, g, or u
ccccgngaggggucgucc

SEQ ID NO: 127855 - RNA, 19 nt, Artificial Sequence
  Synthetic
  misc_feature (7)..(7): n is a, c, g, or u
gccccgngaggggucgucc

SEQ ID NO: 127856 - RNA, 20 nt, Artificial Sequence
  Synthetic
  misc_feature (8)..(8): n is a, c, g, or u
ggccccgngaggggucgucc

SEQ ID NO: 127857 - RNA, 21 nt, Artificial Sequence
  Synthetic
  misc_feature (9)..(9): n is a, c, g, or u
cggccccgngaggggucgucc

SEQ ID NO: 127858 - RNA, 22 nt, Artificial Sequence
  Synthetic
  misc_feature (10)..(10): n is a, c, g, or u
gcggccccgngaggggucgucc

SEQ ID NO: 127859 - RNA, 23 nt, Artificial Sequence
  Synthetic
  misc_feature (11)..(11): n is a, c, g, or u
agcggccccgngaggggucgucc

SEQ ID NO: 127860 - RNA, 24 nt, Artificial Sequence
  Synthetic
  misc_feature (12)..(12): n is a, c, g, or u
aagcggccccgngaggggucgucc

SEQ ID NO: 127861 - RNA, 18 nt, Artificial Sequence
  Synthetic
uaacacgagcaggggucc

SEQ ID NO: 127862 - RNA, 19 nt, Artificial Sequence
  Synthetic
guaacacgagcaggggucc

SEQ ID NO: 127863 - RNA, 20 nt, Artificial Sequence
  Synthetic
uguaacacgagcaggggucc

SEQ ID NO: 127864 - RNA, 21 nt, Artificial Sequence
  Synthetic
cuguaacacgagcaggggucc

SEQ ID NO: 127865 - RNA, 22 nt, Artificial Sequence
  Synthetic
ccuguaacacgagcaggggucc

SEQ ID NO: 127866 - RNA, 23 nt, Artificial Sequence
  Synthetic
gccuguaacacgagcaggggucc

SEQ ID NO: 127867 - RNA, 24 nt, Artificial Sequence
  Synthetic
cgccuguaacacgagcaggggucc

SEQ ID NO: 127868 - RNA, 18 nt, Artificial Sequence
  Synthetic
  misc_feature (6)..(6): n is a, c, g, or u
agccanccaaggcacagc

SEQ ID NO: 127869 - RNA, 19 nt, Artificial Sequence
  Synthetic
  misc_feature (7)..(7): n is a, c, g, or u
aagccanccaaggcacagc

SEQ ID NO: 127870 - RNA, 20 nt, Artificial Sequence
  Synthetic
  misc_feature (8)..(8): n is a, c, g, or u
aaagccanccaaggcacagc

SEQ ID NO: 127871 - RNA, 21 nt, Artificial Sequence
  Synthetic
  misc_feature (9)..(9): n is a, c, g, or u
caaagccanccaaggcacagc

SEQ ID NO: 127872 - RNA, 22 nt, Artificial Sequence
  Synthetic
  misc_feature (10)..(10): n is a, c, g, or u
ccaaagccanccaaggcacagc

SEQ ID NO: 127873 - RNA, 23 nt, Artificial Sequence
  Synthetic
  misc_feature (11)..(11): n is a, c, g, or u
cccaaagccanccaaggcacagc

SEQ ID NO: 127874 - RNA, 24 nt, Artificial Sequence
  Synthetic
  misc_feature (12)..(12): n is a, c, g, or u
ccccaaagccanccaaggcacagc

SEQ ID NO: 127875 - RNA, 18 nt, Artificial Sequence
  Synthetic
ugaacuggagccaccagc

SEQ ID NO: 127876 - RNA, 19 nt, Artificial Sequence
  Synthetic
cugaacuggagccaccagc

SEQ ID NO: 127877 - RNA, 20 nt, Artificial Sequence
  Synthetic
ccugaacuggagccaccagc

SEQ ID NO: 127878 - RNA, 21 nt, Artificial Sequence
  Synthetic
uccugaacuggagccaccagc

SEQ ID NO: 127879 - RNA, 22 nt, Artificial Sequence
  Synthetic
uuccugaacuggagccaccagc

SEQ ID NO: 127880 - RNA, 23 nt, Artificial Sequence
  Synthetic
guuccugaacuggagccaccagc

SEQ ID NO: 127881 - RNA, 24 nt, Artificial Sequence
  Synthetic
uguuccugaacuggagccaccagc

SEQ ID NO: 127882 - RNA, 18 nt, Artificial Sequence
  Synthetic
  misc_feature (1)..(1): n is a, c, g, or u
  misc_feature (3)..(3): n is a, c, g, or u
ngncaauaugcccugagc

SEQ ID NO: 127883 - RNA, 19 nt, Artificial Sequence
  Synthetic
  misc_feature (2)..(2): n is a, c, g, or u
  misc_feature (4)..(4): n is a, c, g, or u
ungncaauaugcccugagc

SEQ ID NO: 127884 - RNA, 20 nt, Artificial Sequence
  Synthetic
  misc_feature (3)..(3): n is a, c, g, or u
  misc_feature (5)..(5): n is a, c, g, or u
gungncaauaugcccugagc

SEQ ID NO: 127885 - RNA, 21 nt, Artificial Sequence
  Synthetic
  misc_feature (4)..(4): n is a, c, g, or u
  misc_feature (6)..(6): n is a, c, g, or u
ugungncaauaugcccugagc

SEQ ID NO: 127886 - RNA, 22 nt, Artificial Sequence
  Synthetic
  misc_feature (5)..(5): n is a, c, g, or u
  misc_feature (7)..(7): n is a, c, g, or u
cugungncaauaugcccugagc

SEQ ID NO: 127887 - RNA, 23 nt, Artificial Sequence
  Synthetic
  misc_feature (6)..(6): n is a, c, g, or u
  misc_feature (8)..(8): n is a, c, g, or u
acugungncaauaugcccugagc

SEQ ID NO: 127888 - RNA, 24 nt, Artificial Sequence
  Synthetic
  misc_feature (7)..(7): n is a, c, g, or u
  misc_feature (9)..(9): n is a, c, g, or u
cacugungncaauaugcccugagc

SEQ ID NO: 127889 - RNA, 18 nt, Artificial Sequence
  Synthetic
  misc_feature (6)..(6): n is a, c, g, or u
gaucuncgucugcgaggc

SEQ ID NO: 127890 - RNA, 19 nt, Artificial Sequence
  Synthetic
  misc_feature (7)..(7): n is a, c, g, or u
agaucuncgucugcgaggc

SEQ ID NO: 127891 - RNA, 20 nt, Artificial Sequence
  Synthetic
  misc_feature (8)..(8): n is a, c, g, or u
gagaucuncgucugcgaggc

SEQ ID NO: 127892 - RNA, 21 nt, Artificial Sequence
  Synthetic
  misc_feature (9)..(9): n is a, c, g, or u
ugagaucuncgucugcgaggc

SEQ ID NO: 127893 - RNA, 22 nt, Artificial Sequence
  Synthetic
  misc_feature (10)..(10): n is a, c, g, or u
uugagaucuncgucugcgaggc

SEQ ID NO: 127894 - RNA, 23 nt, Artificial Sequence
  Synthetic
  misc_feature (11)..(11): n is a, c, g, or u
auugagaucuncgucugcgaggc

SEQ ID NO: 127895 - RNA, 24 nt, Artificial Sequence
  Synthetic
  misc_feature (12)..(12): n is a, c, g, or u
gauugagaucuncgucugcgaggc

SEQ ID NO: 127896 - RNA, 18 nt, Artificial Sequence
  Synthetic
cugccgauugguggaggc

SEQ ID NO: 127897 - RNA, 19 nt, Artificial Sequence
  Synthetic
acugccgauugguggaggc

SEQ ID NO: 127898 - RNA, 20 nt, Artificial Sequence
  Synthetic
gacugccgauugguggaggc

SEQ ID NO: 127899 - RNA, 21 nt, Artificial Sequence
  Synthetic
ugacugccgauugguggaggc

SEQ ID NO: 127900 - RNA, 22 nt, Artificial Sequence
  Synthetic
cugacugccgauugguggaggc

SEQ ID NO: 127901 - RNA, 23 nt, Artificial Sequence
  Synthetic
ccugacugccgauugguggaggc

SEQ ID NO: 127902 - RNA, 24 nt, Artificial Sequence
  Synthetic
uccugacugccgauugguggaggc

SEQ ID NO: 127903 - RNA, 18 nt, Artificial Sequence
  Synthetic
aaggcacagcuuggaggc

SEQ ID NO: 127904 - RNA, 19 nt, Artificial Sequence
  Synthetic
caaggcacagcuuggaggc

SEQ ID NO: 127905 - RNA, 20 nt, Artificial Sequence
  Synthetic
ccaaggcacagcuuggaggc

SEQ ID NO: 127906 - RNA, 21 nt, Artificial Sequence
  Synthetic
  misc_feature (1)..(1): n is a, c, g, or u
nccaaggcacagcuuggaggc

SEQ ID NO: 127907 - RNA, 22 nt, Artificial Sequence
  Synthetic
  misc_feature (2)..(2): n is a, c, g, or u
anccaaggcacagcuuggaggc

SEQ ID NO: 127908 - RNA, 23 nt, Artificial Sequence
  Synthetic
  misc_feature (3)..(3): n is a, c, g, or u
canccaaggcacagcuuggaggc

SEQ ID NO: 127909 - RNA, 24 nt, Artificial Sequence
  Synthetic
  misc_feature (4)..(4): n is a, c, g, or u
ccanccaaggcacagcuuggaggc

SEQ ID NO: 127910 - RNA, 18 nt, Artificial Sequence
  Synthetic
auuugguggucuauaggc

SEQ ID NO: 127911 - RNA, 19 nt, Artificial Sequence
  Synthetic
cauuugguggucuauaggc

SEQ ID NO: 127912 - RNA, 20 nt, Artificial Sequence
  Synthetic
gcauuugguggucuauaggc

SEQ ID NO: 127913 - RNA, 21 nt, Artificial Sequence
  Synthetic
ggcauuugguggucuauaggc

SEQ ID NO: 127914 - RNA, 22 nt, Artificial Sequence
  Synthetic
gggcauuugguggucuauaggc

SEQ ID NO: 127915 - RNA, 23 nt, Artificial Sequence
  Synthetic
ggggcauuugguggucuauaggc

SEQ ID NO: 127916 - RNA, 24 nt, Artificial Sequence
  Synthetic
aggggcauuugguggucuauaggc

SEQ ID NO: 127917 - RNA, 18 nt, Artificial Sequence
  Synthetic
gcgagcaaaacaagcggc

SEQ ID NO: 127918 - RNA, 19 nt, Artificial Sequence
  Synthetic
ugcgagcaaaacaagcggc

SEQ ID NO: 127919 - RNA, 20 nt, Artificial Sequence
  Synthetic
cugcgagcaaaacaagcggc

SEQ ID NO: 127920 - RNA, 21 nt, Artificial Sequence
  Synthetic
gcugcgagcaaaacaagcggc

SEQ ID NO: 127921 - RNA, 22 nt, Artificial Sequence
  Synthetic
ggcugcgagcaaaacaagcggc

SEQ ID NO: 127922 - RNA, 23 nt, Artificial Sequence
  Synthetic
cggcugcgagcaaaacaagcggc

SEQ ID NO: 127923 - RNA, 24 nt, Artificial Sequence
  Synthetic
ccggcugcgagcaaaacaagcggc

SEQ ID NO: 127924 - RNA, 18 nt, Artificial Sequence
  Synthetic
aaggccuuguaaguuggc

SEQ ID NO: 127925 - RNA, 19 nt, Artificial Sequence
  Synthetic
aaaggccuuguaaguuggc

SEQ ID NO: 127926 - RNA, 20 nt, Artificial Sequence
  Synthetic
gaaaggccuuguaaguuggc

SEQ ID NO: 127927 - RNA, 21 nt, Artificial Sequence
  Synthetic
agaaaggccuuguaaguuggc

SEQ ID NO: 127928 - RNA, 22 nt, Artificial Sequence
  Synthetic
uagaaaggccuuguaaguuggc

SEQ ID NO: 127929 - RNA, 23 nt, Artificial Sequence
  Synthetic
uuagaaaggccuuguaaguuggc

SEQ ID NO: 127930 - RNA, 24 nt, Artificial Sequence
  Synthetic
cuuagaaaggccuuguaaguuggc

SEQ ID NO: 127931 - RNA, 18 nt, Artificial Sequence
  Synthetic
gucggucguugacauugc

SEQ ID NO: 127932 - RNA, 19 nt, Artificial Sequence
  Synthetic
ggucggucguugacauugc

SEQ ID NO: 127933 - RNA, 20 nt, Artificial Sequence
  Synthetic
aggucggucguugacauugc

SEQ ID NO: 127934 - RNA, 21 nt, Artificial Sequence
  Synthetic
aaggucggucguugacauugc

SEQ ID NO: 127935 - RNA, 22 nt, Artificial Sequence
  Synthetic
caaggucggucguugacauugc

SEQ ID NO: 127936 - RNA, 23 nt, Artificial Sequence
  Synthetic
ucaaggucggucguugacauugc

SEQ ID NO: 127937 - RNA, 24 nt, Artificial Sequence
  Synthetic
cucaaggucggucguugacauugc

SEQ ID NO: 127938 - RNA, 18 nt, Artificial Sequence
  Synthetic
caacauaccuugauaauc

SEQ ID NO: 127939 - RNA, 19 nt, Artificial Sequence
  Synthetic
gcaacauaccuugauaauc

SEQ ID NO: 127940 - RNA, 20 nt, Artificial Sequence
  Synthetic
ggcaacauaccuugauaauc

SEQ ID NO: 127941 - RNA, 21 nt, Artificial Sequence
  Synthetic
gggcaacauaccuugauaauc

SEQ ID NO: 127942 - RNA, 22 nt, Artificial Sequence
  Synthetic
cgggcaacauaccuugauaauc

SEQ ID NO: 127943 - RNA, 23 nt, Artificial Sequence
  Synthetic
acgggcaacauaccuugauaauc

SEQ ID NO: 127944 - RNA, 24 nt, Artificial Sequence
  Synthetic
aacgggcaacauaccuugauaauc

SEQ ID NO: 127945 - RNA, 18 nt, Artificial Sequence
  Synthetic
  misc_feature (14)..(14): n is a, c, g, or u
uacugguuguugungauc

SEQ ID NO: 127946 - RNA, 19 nt, Artificial Sequence
  Synthetic
  misc_feature (15)..(15): n is a, c, g, or u
guacugguuguugungauc

SEQ ID NO: 127947 - RNA, 20 nt, Artificial Sequence
  Synthetic
  misc_feature (16)..(16): n is a, c, g, or u
cguacugguuguugungauc

SEQ ID NO: 127948 - RNA, 21 nt, Artificial Sequence
  Synthetic
  misc_feature (17)..(17): n is a, c, g, or u
ccguacugguuguugungauc

SEQ ID NO: 127949 - RNA, 22 nt, Artificial Sequence
  Synthetic
  misc_feature (18)..(18): n is a, c, g, or u
cccguacugguuguugungauc

SEQ ID NO: 127950 - RNA, 23 nt, Artificial Sequence
  Synthetic
  misc_feature (19)..(19): n is a, c, g, or u
ucccguacugguuguugungauc

SEQ ID NO: 127951 - RNA, 24 nt, Artificial Sequence
  Synthetic
  misc_feature (20)..(20): n is a, c, g, or u
gucccguacugguuguugungauc

SEQ ID NO: 127952 - RNA, 18 nt, Artificial Sequence
  Synthetic
aggguccaacugaugauc

SEQ ID NO: 127953 - RNA, 19 nt, Artificial Sequence
  Synthetic
caggguccaacugaugauc

SEQ ID NO: 127954 - RNA, 20 nt, Artificial Sequence
  Synthetic
gcaggguccaacugaugauc

SEQ ID NO: 127955 - RNA, 21 nt, Artificial Sequence
  Synthetic
ugcaggguccaacugaugauc

SEQ ID NO: 127956 - RNA, 22 nt, Artificial Sequence
  Synthetic
augcaggguccaacugaugauc

SEQ ID NO: 127957 - RNA, 23 nt, Artificial Sequence
  Synthetic
aaugcaggguccaacugaugauc

SEQ ID NO: 127958 - RNA, 24 nt, Artificial Sequence
  Synthetic
gaaugcaggguccaacugaugauc

SEQ ID NO: 127959 - RNA, 18 nt, Artificial Sequence
  Synthetic
  misc_feature (1)..(1): n is a, c, g, or u
ncaggguccccaguccuc

SEQ ID NO: 127960 - RNA, 19 nt, Artificial Sequence
  Synthetic
  misc_feature (2)..(2): n is a, c, g, or u
cncaggguccccaguccuc

SEQ ID NO: 127961 - RNA, 20 nt, Artificial Sequence
  Synthetic
  misc_feature (1)..(1): n is a, c, g, or u
  misc_feature (3)..(3): n is a, c, g, or u
ncncaggguccccaguccuc

SEQ ID NO: 127962 - RNA, 21 nt, Artificial Sequence
  Synthetic
  misc_feature (2)..(2): n is a, c, g, or u
  misc_feature (4)..(4): n is a, c, g, or u
gncncaggguccccaguccuc

SEQ ID NO: 127963 - RNA, 22 nt, Artificial Sequence
  Synthetic
  misc_feature (3)..(3): n is a, c, g, or u
  misc_feature (5)..(5): n is a, c, g, or u
cgncncaggguccccaguccuc

SEQ ID NO: 127964 - RNA, 23 nt, Artificial Sequence
  Synthetic
  misc_feature (4)..(4): n is a, c, g, or u
  misc_feature (6)..(6): n is a, c, g, or u
ucgncncaggguccccaguccuc

SEQ ID NO: 127965 - RNA, 24 nt, Artificial Sequence
  Synthetic
  misc_feature (5)..(5): n is a, c, g, or u
  misc_feature (7)..(7): n is a, c, g, or u
uucgncncaggguccccaguccuc

SEQ ID NO: 127966 - RNA, 18 nt, Artificial Sequence
  Synthetic
gugaggugagcaaugcuc

SEQ ID NO: 127967 - RNA, 19 nt, Artificial Sequence
  Synthetic
ggugaggugagcaaugcuc

SEQ ID NO: 127968 - RNA, 20 nt, Artificial Sequence
  Synthetic
uggugaggugagcaaugcuc

SEQ ID NO: 127969 - RNA, 21 nt, Artificial Sequence
  Synthetic
auggugaggugagcaaugcuc

SEQ ID NO: 127970 - RNA, 22 nt, Artificial Sequence
  Synthetic
uauggugaggugagcaaugcuc

SEQ ID NO: 127971 - RNA, 23 nt, Artificial Sequence
  Synthetic
guauggugaggugagcaaugcuc

SEQ ID NO: 127972 - RNA, 24 nt, Artificial Sequence
  Synthetic
  misc_feature (1)..(1): n is a, c, g, or u
nguauggugaggugagcaaugcuc

SEQ ID NO: 127973 - RNA, 18 nt, Artificial Sequence
  Synthetic
auacuaacauugagauuc

SEQ ID NO: 127974 - RNA, 19 nt, Artificial Sequence
  Synthetic
aauacuaacauugagauuc

SEQ ID NO: 127975 - RNA, 20 nt, Artificial Sequence
  Synthetic
gaauacuaacauugagauuc

SEQ ID NO: 127976 - RNA, 21 nt, Artificial Sequence
  Synthetic
ggaauacuaacauugagauuc

SEQ ID NO: 127977 - RNA, 22 nt, Artificial Sequence
  Synthetic
aggaauacuaacauugagauuc

SEQ ID NO: 127978 - RNA, 23 nt, Artificial Sequence
  Synthetic
aaggaauacuaacauugagauuc

SEQ ID NO: 127979 - RNA, 24 nt, Artificial Sequence
  Synthetic
caaggaauacuaacauugagauuc

SEQ ID NO: 127980 - RNA, 18 nt, Artificial Sequence
  Synthetic
gcgagggaguucuucuuc

SEQ ID NO: 127981 - RNA, 19 nt, Artificial Sequence
  Synthetic
ggcgagggaguucuucuuc

SEQ ID NO: 127982 - RNA, 20 nt, Artificial Sequence
  Synthetic
aggcgagggaguucuucuuc

SEQ ID NO: 127983 - RNA, 21 nt, Artificial Sequence
  Synthetic
gaggcgagggaguucuucuuc

SEQ ID NO: 127984 - RNA, 22 nt, Artificial Sequence
  Synthetic
cgaggcgagggaguucuucuuc

SEQ ID NO: 127985 - RNA, 23 nt, Artificial Sequence
  Synthetic
gcgaggcgagggaguucuucuuc

SEQ ID NO: 127986 - RNA, 24 nt, Artificial Sequence
  Synthetic
ugcgaggcgagggaguucuucuuc

SEQ ID NO: 127987 - RNA, 18 nt, Artificial Sequence
  Synthetic
  misc_feature (3)..(3): n is a, c, g, or u
  misc_feature (11)..(11): n is a, c, g, or u
  misc_feature (13)..(13): n is a, c, g, or u
gancaggguunanuguuc

SEQ ID NO: 127988 - RNA, 19 nt, Artificial Sequence
  Synthetic
  misc_feature (4)..(4): n is a, c, g, or u
  misc_feature (12)..(12): n is a, c, g, or u
  misc_feature (14)..(14): n is a, c, g, or u
ggancaggguunanuguuc

SEQ ID NO: 127989 - RNA, 20 nt, Artificial Sequence
  Synthetic
  misc_feature (1)..(1): n is a, c, g, or u
  misc_feature (5)..(5): n is a, c, g, or u
  misc_feature (13)..(13): n is a, c, g, or u
  misc_feature (15)..(15): n is a, c, g, or u
nggancaggguunanuguuc

SEQ ID NO: 127990 - RNA, 21 nt, Artificial Sequence
  Synthetic
  misc_feature (2)..(2): n is a, c, g, or u
  misc_feature (6)..(6): n is a, c, g, or u
  misc_feature (14)..(14): n is a, c, g, or u
  misc_feature (16)..(16): n is a, c, g, or u
unggancaggguunanuguuc

SEQ ID NO: 127991 - RNA, 22 nt, Artificial Sequence
  Synthetic
  misc_feature (3)..(3): n is a, c, g, or u
  misc_feature (7)..(7): n is a, c, g, or u
  misc_feature (15)..(15): n is a, c, g, or u
  misc_feature (17)..(17): n is a, c, g, or u
uunggancaggguunanuguuc

SEQ ID NO: 127992 - RNA, 23 nt, Artificial Sequence
  Synthetic
  misc_feature (4)..(4): n is a, c, g, or u
  misc_feature (8)..(8): n is a, c, g, or u
  misc_feature (16)..(16): n is a, c, g, or u
  misc_feature (18)..(18): n is a, c, g, or u
auunggancaggguunanuguuc

SEQ ID NO: 127993 - RNA, 24 nt, Artificial Sequence
  Synthetic
  misc_feature (5)..(5): n is a, c, g, or u
  misc_feature (9)..(9): n is a, c, g, or u
  misc_feature (17)..(17): n is a, c, g, or u
  misc_feature (19)..(19): n is a, c, g, or u
uauunggancaggguunanuguuc

SEQ ID NO: 127994 - RNA, 18 nt, Artificial Sequence
  Synthetic
ucuaacaacaguaguuuc

SEQ ID NO: 127995 - RNA, 19 nt, Artificial Sequence
  Synthetic
gucuaacaacaguaguuuc

SEQ ID NO: 127996 - RNA, 20 nt, Artificial Sequence
  Synthetic
cgucuaacaacaguaguuuc

SEQ ID NO: 127997 - RNA, 21 nt, Artificial Sequence
  Synthetic
ucgucuaacaacaguaguuuc

SEQ ID NO: 127998 - RNA, 22 nt, Artificial Sequence
  Synthetic
gucgucuaacaacaguaguuuc

SEQ ID NO: 127999 - RNA, 23 nt, Artificial Sequence
  Synthetic
cgucgucuaacaacaguaguuuc

SEQ ID NO: 128000 - RNA, 24 nt, Artificial Sequence
  Synthetic
  misc_feature (1)..(1): n is a, c, g, or u
ncgucgucuaacaacaguaguuuc

SEQ ID NO: 128001 - RNA, 18 nt, Artificial Sequence
  Synthetic
agaagaaccaauaagaag

SEQ ID NO: 128002 - RNA, 19 nt, Artificial Sequence
  Synthetic
cagaagaaccaauaagaag

SEQ ID NO: 128003 - RNA, 20 nt, Artificial Sequence
  Synthetic
ccagaagaaccaauaagaag

SEQ ID NO: 128004 - RNA, 21 nt, Artificial Sequence
  Synthetic
uccagaagaaccaauaagaag

SEQ ID NO: 128005 - RNA, 22 nt, Artificial Sequence
  Synthetic
auccagaagaaccaauaagaag

SEQ ID NO: 128006 - RNA, 23 nt, Artificial Sequence
  Synthetic
aauccagaagaaccaauaagaag

SEQ ID NO: 128007 - RNA, 24 nt, Artificial Sequence
  Synthetic
uaauccagaagaaccaauaagaag

SEQ ID NO: 128008 - RNA, 18 nt, Artificial Sequence
  Synthetic
  misc_feature (3)..(3): n is a, c, g, or u
uancugaaagccaaacag

SEQ ID NO: 128009 - RNA, 19 nt, Artificial Sequence
  Synthetic
  misc_feature (4)..(4): n is a, c, g, or u
auancugaaagccaaacag

SEQ ID NO: 128010 - RNA, 20 nt, Artificial Sequence
  Synthetic
  misc_feature (5)..(5): n is a, c, g, or u
uauancugaaagccaaacag

SEQ ID NO: 128011 - RNA, 21 nt, Artificial Sequence
  Synthetic
  misc_feature (6)..(6): n is a, c, g, or u
auauancugaaagccaaacag

SEQ ID NO: 128012 - RNA, 22 nt, Artificial Sequence
  Synthetic
  misc_feature (7)..(7): n is a, c, g, or u
cauauancugaaagccaaacag

SEQ ID NO: 128013 - RNA, 23 nt, Artificial Sequence
  Synthetic
  misc_feature (8)..(8): n is a, c, g, or u
ccauauancugaaagccaaacag

SEQ ID NO: 128014 - RNA, 24 nt, Artificial Sequence
  Synthetic
  misc_feature (9)..(9): n is a, c, g, or u
uccauauancugaaagccaaacag

SEQ ID NO: 128015 - RNA, 18 nt, Artificial Sequence
  Synthetic
gcagaugagaaggcacag

SEQ ID NO: 128016 - RNA, 19 nt, Artificial Sequence
  Synthetic
ggcagaugagaaggcacag

SEQ ID NO: 128017 - RNA, 20 nt, Artificial Sequence
  Synthetic
cggcagaugagaaggcacag

SEQ ID NO: 128018 - RNA, 21 nt, Artificial Sequence
  Synthetic
ccggcagaugagaaggcacag

SEQ ID NO: 128019 - RNA, 22 nt, Artificial Sequence
  Synthetic
accggcagaugagaaggcacag

SEQ ID NO: 128020 - RNA, 23 nt, Artificial Sequence
  Synthetic
gaccggcagaugagaaggcacag

SEQ ID NO: 128021 - RNA, 24 nt, Artificial Sequence
  Synthetic
ggaccggcagaugagaaggcacag

SEQ ID NO: 128022 - RNA, 18 nt, Artificial Sequence
  Synthetic
cugaacuggagccaccag

SEQ ID NO: 128023 - RNA, 19 nt, Artificial Sequence
  Synthetic
ccugaacuggagccaccag

SEQ ID NO: 128024 - RNA, 20 nt, Artificial Sequence
  Synthetic
uccugaacuggagccaccag

SEQ ID NO: 128025 - RNA, 21 nt, Artificial Sequence
  Synthetic
uuccugaacuggagccaccag

SEQ ID NO: 128026 - RNA, 22 nt, Artificial Sequence
  Synthetic
guuccugaacuggagccaccag

SEQ ID NO: 128027 - RNA, 23 nt, Artificial Sequence
  Synthetic
uguuccugaacuggagccaccag

SEQ ID NO: 128028 - RNA, 24 nt, Artificial Sequence
  Synthetic
  misc_feature (1)..(1): n is a, c, g, or u
nuguuccugaacuggagccaccag

SEQ ID NO: 128029 - RNA, 18 nt, Artificial Sequence
  Synthetic
  misc_feature (6)..(6): n is a, c, g, or u
gucaunaauuccccccag

SEQ ID NO: 128030 - RNA, 19 nt, Artificial Sequence
  Synthetic
  misc_feature (7)..(7): n is a, c, g, or u
agucaunaauuccccccag

SEQ ID NO: 128031 - RNA, 20 nt, Artificial Sequence
  Synthetic
  misc_feature (8)..(8): n is a, c, g, or u
gagucaunaauuccccccag

SEQ ID NO: 128032 - RNA, 21 nt, Artificial Sequence
  Synthetic
  misc_feature (9)..(9): n is a, c, g, or u
agagucaunaauuccccccag

SEQ ID NO: 128033 - RNA, 22 nt, Artificial Sequence
  Synthetic
  misc_feature (10)..(10): n is a, c, g, or u
uagagucaunaauuccccccag

SEQ ID NO: 128034 - RNA, 23 nt, Artificial Sequence
  Synthetic
  misc_feature (11)..(11): n is a, c, g, or u
cuagagucaunaauuccccccag

SEQ ID NO: 128035 - RNA, 24 nt, Artificial Sequence
  Synthetic
  misc_feature (12)..(12): n is a, c, g, or u
gcuagagucaunaauuccccccag

SEQ ID NO: 128036 - RNA, 18 nt, Artificial Sequence
  Synthetic
  misc_feature (2)..(2): n is a, c, g, or u
ungccaagccccagccag

SEQ ID NO: 128037 - RNA, 19 nt, Artificial Sequence
  Synthetic
  misc_feature (3)..(3): n is a, c, g, or u
aungccaagccccagccag

SEQ ID NO: 128038 - RNA, 20 nt, Artificial Sequence
  Synthetic
  misc_feature (1)..(1): n is a, c, g, or u
  misc_feature (4)..(4): n is a, c, g, or u
naungccaagccccagccag

SEQ ID NO: 128039 - RNA, 21 nt, Artificial Sequence
  Synthetic
  misc_feature (2)..(2): n is a, c, g, or u
  misc_feature (5)..(5): n is a, c, g, or u
cnaungccaagccccagccag

SEQ ID NO: 128040 - RNA, 22 nt, Artificial Sequence
  Synthetic
  misc_feature (3)..(3): n is a, c, g, or u
  misc_feature (6)..(6): n is a, c, g, or u
ccnaungccaagccccagccag

SEQ ID NO: 128041 - RNA, 23 nt, Artificial Sequence
  Synthetic
  misc_feature (4)..(4): n is a, c, g, or u
  misc_feature (7)..(7): n is a, c, g, or u
gccnaungccaagccccagccag

SEQ ID NO: 128042 - RNA, 24 nt, Artificial Sequence
  Synthetic
  misc_feature (5)..(5): n is a, c, g, or u
  misc_feature (8)..(8): n is a, c, g, or u
ggccnaungccaagccccagccag

SEQ ID NO: 128043 - RNA, 18 nt, Artificial Sequence
  Synthetic
cauaccuugauaauccag

SEQ ID NO: 128044 - RNA, 19 nt, Artificial Sequence
  Synthetic
acauaccuugauaauccag

SEQ ID NO: 128045 - RNA, 20 nt, Artificial Sequence
  Synthetic
aacauaccuugauaauccag

SEQ ID NO: 128046 - RNA, 21 nt, Artificial Sequence
  Synthetic
caacauaccuugauaauccag

SEQ ID NO: 128047 - RNA, 22 nt, Artificial Sequence
  Synthetic
gcaacauaccuugauaauccag

SEQ ID NO: 128048 - RNA, 23 nt, Artificial Sequence
  Synthetic
ggcaacauaccuugauaauccag

SEQ ID NO: 128049 - RNA, 24 nt, Artificial Sequence
  Synthetic
gggcaacauaccuugauaauccag

SEQ ID NO: 128050 - RNA, 18 nt, Artificial Sequence
  Synthetic
gccgauugguggaggcag

SEQ ID NO: 128051 - RNA, 19 nt, Artificial Sequence
  Synthetic
ugccgauugguggaggcag

SEQ ID NO: 128052 - RNA, 20 nt, Artificial Sequence
  Synthetic
cugccgauugguggaggcag

SEQ ID NO: 128053 - RNA, 21 nt, Artificial Sequence
  Synthetic
acugccgauugguggaggcag

SEQ ID NO: 128054 - RNA, 22 nt, Artificial Sequence
  Synthetic
gacugccgauugguggaggcag

SEQ ID NO: 128055 - RNA, 23 nt, Artificial Sequence
  Synthetic
ugacugccgauugguggaggcag

SEQ ID NO: 128056 - RNA, 24 nt, Artificial Sequence
  Synthetic
cugacugccgauugguggaggcag

SEQ ID NO: 128057 - RNA, 18 nt, Artificial Sequence
  Synthetic
  misc_feature (7)..(8): n is a, c, g, or u
  misc_feature (11)..(11): n is a, c, g, or u
ggucggnnggnacggcag

SEQ ID NO: 128058 - RNA, 19 nt, Artificial Sequence
  Synthetic
  misc_feature (8)..(9): n is a, c, g, or u
  misc_feature (12)..(12): n is a, c, g, or u
uggucggnnggnacggcag

SEQ ID NO: 128059 - RNA, 20 nt, Artificial Sequence
  Synthetic
  misc_feature (9)..(10): n is a, c, g, or u
  misc_feature (13)..(13): n is a, c, g, or u
guggucggnnggnacggcag

SEQ ID NO: 128060 - RNA, 21 nt, Artificial Sequence
  Synthetic
  misc_feature (10)..(11): n is a, c, g, or u
  misc_feature (14)..(14): n is a, c, g, or u
cguggucggnnggnacggcag

SEQ ID NO: 128061 - RNA, 22 nt, Artificial Sequence
  Synthetic
  misc_feature (11)..(12): n is a, c, g, or u
  misc_feature (15)..(15): n is a, c, g, or u
ccguggucggnnggnacggcag

SEQ ID NO: 128062 - RNA, 23 nt, Artificial Sequence
  Synthetic
  misc_feature (12)..(13): n is a, c, g, or u
  misc_feature (16)..(16): n is a, c, g, or u
cccguggucggnnggnacggcag

SEQ ID NO: 128063 - RNA, 24 nt, Artificial Sequence
  Synthetic
  misc_feature (13)..(14): n is a, c, g, or u
  misc_feature (17)..(17): n is a, c, g, or u
ccccguggucggnnggnacggcag

SEQ ID NO: 128064 - RNA, 18 nt, Artificial Sequence
  Synthetic
gugcacacggaccggcag

SEQ ID NO: 128065 - RNA, 19 nt, Artificial Sequence
  Synthetic
agugcacacggaccggcag

SEQ ID NO: 128066 - RNA, 20 nt, Artificial Sequence
  Synthetic
aagugcacacggaccggcag

SEQ ID NO: 128067 - RNA, 21 nt, Artificial Sequence
  Synthetic
gaagugcacacggaccggcag

SEQ ID NO: 128068 - RNA, 22 nt, Artificial Sequence
  Synthetic
cgaagugcacacggaccggcag

SEQ ID NO: 128069 - RNA, 23 nt, Artificial Sequence
  Synthetic
gcgaagugcacacggaccggcag

SEQ ID NO: 128070 - RNA, 24 nt, Artificial Sequence
  Synthetic
agcgaagugcacacggaccggcag

SEQ ID NO: 128071 - RNA, 18 nt, Artificial Sequence
  Synthetic
cgcaguauggaucggcag

SEQ ID NO: 128072 - RNA, 19 nt, Artificial Sequence
  Synthetic
ccgcaguauggaucggcag

SEQ ID NO: 128073 - RNA, 20 nt, Artificial Sequence
  Synthetic
uccgcaguauggaucggcag

SEQ ID NO: 128074 - RNA, 21 nt, Artificial Sequence
  Synthetic
uuccgcaguauggaucggcag

SEQ ID NO: 128075 - RNA, 22 nt, Artificial Sequence
  Synthetic
guuccgcaguauggaucggcag

SEQ ID NO: 128076 - RNA, 23 nt, Artificial Sequence
  Synthetic
aguuccgcaguauggaucggcag

SEQ ID NO: 128077 - RNA, 24 nt, Artificial Sequence
  Synthetic
gaguuccgcaguauggaucggcag

SEQ ID NO: 128078 - RNA, 18 nt, Artificial Sequence
  Synthetic
  misc_feature (8)..(8): n is a, c, g, or u
aggcuucncgauacagag

SEQ ID NO: 128079 - RNA, 19 nt, Artificial Sequence
  Synthetic
  misc_feature (9)..(9): n is a, c, g, or u
aaggcuucncgauacagag

SEQ ID NO: 128080 - RNA, 20 nt, Artificial Sequence
  Synthetic
  misc_feature (10)..(10): n is a, c, g, or u
uaaggcuucncgauacagag

SEQ ID NO: 128081 - RNA, 21 nt, Artificial Sequence
  Synthetic
  misc_feature (11)..(11): n is a, c, g, or u
cuaaggcuucncgauacagag

SEQ ID NO: 128082 - RNA, 22 nt, Artificial Sequence
  Synthetic
  misc_feature (12)..(12): n is a, c, g, or u
ucuaaggcuucncgauacagag

SEQ ID NO: 128083 - RNA, 23 nt, Artificial Sequence
  Synthetic
  misc_feature (13)..(13): n is a, c, g, or u
cucuaaggcuucncgauacagag

SEQ ID NO: 128084 - RNA, 24 nt, Artificial Sequence
  Synthetic
  misc_feature (14)..(14): n is a, c, g, or u
acucuaaggcuucncgauacagag

SEQ ID NO: 128085 - RNA, 18 nt, Artificial Sequence
  Synthetic
agagaugauuaggcagag

SEQ ID NO: 128086 - RNA, 19 nt, Artificial Sequence
  Synthetic
aagagaugauuaggcagag

SEQ ID NO: 128087 - RNA, 20 nt, Artificial Sequence
  Synthetic
caagagaugauuaggcagag

SEQ ID NO: 128088 - RNA, 21 nt, Artificial Sequence
  Synthetic
acaagagaugauuaggcagag

SEQ ID NO: 128089 - RNA, 22 nt, Artificial Sequence
  Synthetic
  misc_feature (1)..(1): n is a, c, g, or u
nacaagagaugauuaggcagag

SEQ ID NO: 128090 - RNA, 23 nt, Artificial Sequence
  Synthetic
  misc_feature (2)..(2): n is a, c, g, or u
gnacaagagaugauuaggcagag

SEQ ID NO: 128091 - RNA, 24 nt, Artificial Sequence
  Synthetic
  misc_feature (3)..(3): n is a, c, g, or u
ugnacaagagaugauuaggcagag

SEQ ID NO: 128092 - RNA, 18 nt, Artificial Sequence
  Synthetic
uccaugcaacgugcagag

SEQ ID NO: 128093 - RNA, 19 nt, Artificial Sequence
  Synthetic
cuccaugcaacgugcagag

SEQ ID NO: 128094 - RNA, 20 nt, Artificial Sequence
  Synthetic
ucuccaugcaacgugcagag

SEQ ID NO: 128095 - RNA, 21 nt, Artificial Sequence
  Synthetic
gucuccaugcaacgugcagag

SEQ ID NO: 128096 - RNA, 22 nt, Artificial Sequence
  Synthetic
ggucuccaugcaacgugcagag

SEQ ID NO: 128097 - RNA, 23 nt, Artificial Sequence
  Synthetic
uggucuccaugcaacgugcagag

SEQ ID NO: 128098 - RNA, 24 nt, Artificial Sequence
  Synthetic
guggucuccaugcaacgugcagag

SEQ ID NO: 128099 - RNA, 18 nt, Artificial Sequence
  Synthetic
ucucuuagagguggagag

SEQ ID NO: 128100 - RNA, 19 nt, Artificial Sequence
  Synthetic
gucucuuagagguggagag

SEQ ID NO: 128101 - RNA, 20 nt, Artificial Sequence
  Synthetic
ugucucuuagagguggagag

SEQ ID NO: 128102 - RNA, 21 nt, Artificial Sequence
  Synthetic
cugucucuuagagguggagag

SEQ ID NO: 128103 - RNA, 22 nt, Artificial Sequence
  Synthetic
acugucucuuagagguggagag

SEQ ID NO: 128104 - RNA, 23 nt, Artificial Sequence
  Synthetic
gacugucucuuagagguggagag

SEQ ID NO: 128105 - RNA, 24 nt, Artificial Sequence
  Synthetic
ugacugucucuuagagguggagag

SEQ ID NO: 128106 - RNA, 18 nt, Artificial Sequence
  Synthetic
gaugacugucucuuagag

SEQ ID NO: 128107 - RNA, 19 nt, Artificial Sequence
  Synthetic
ggaugacugucucuuagag

SEQ ID NO: 128108 - RNA, 20 nt, Artificial Sequence
  Synthetic
aggaugacugucucuuagag

SEQ ID NO: 128109 - RNA, 21 nt, Artificial Sequence
  Synthetic
gaggaugacugucucuuagag

SEQ ID NO: 128110 - RNA, 22 nt, Artificial Sequence
  Synthetic
ugaggaugacugucucuuagag

SEQ ID NO: 128111 - RNA, 23 nt, Artificial Sequence
  Synthetic
cugaggaugacugucucuuagag

SEQ ID NO: 128112 - RNA, 24 nt, Artificial Sequence
  Synthetic
ccugaggaugacugucucuuagag

SEQ ID NO: 128113 - RNA, 18 nt, Artificial Sequence
  Synthetic
ccccgccuguaacacgag

SEQ ID NO: 128114 - RNA, 19 nt, Artificial Sequence
  Synthetic
accccgccuguaacacgag

SEQ ID NO: 128115 - RNA, 20 nt, Artificial Sequence
  Synthetic
aaccccgccuguaacacgag

SEQ ID NO: 128116 - RNA, 21 nt, Artificial Sequence
  Synthetic
aaaccccgccuguaacacgag

SEQ ID NO: 128117 - RNA, 22 nt, Artificial Sequence
  Synthetic
aaaaccccgccuguaacacgag

SEQ ID NO: 128118 - RNA, 23 nt, Artificial Sequence
  Synthetic
aaaaaccccgccuguaacacgag

SEQ ID NO: 128119 - RNA, 24 nt, Artificial Sequence
  Synthetic
gaaaaaccccgccuguaacacgag

SEQ ID NO: 128120 - RNA, 18 nt, Artificial Sequence
  Synthetic
  misc_feature (8)..(8): n is a, c, g, or u
gagaucuncgucugcgag

SEQ ID NO: 128121 - RNA, 19 nt, Artificial Sequence
  Synthetic
  misc_feature (9)..(9): n is a, c, g, or u
ugagaucuncgucugcgag

SEQ ID NO: 128122 - RNA, 20 nt, Artificial Sequence
  Synthetic
  misc_feature (10)..(10): n is a, c, g, or u
uugagaucuncgucugcgag

SEQ ID NO: 128123 - RNA, 21 nt, Artificial Sequence
  Synthetic
  misc_feature (11)..(11): n is a, c, g, or u
auugagaucuncgucugcgag

SEQ ID NO: 128124 - RNA, 22 nt, Artificial Sequence
  Synthetic
  misc_feature (12)..(12): n is a, c, g, or u
gauugagaucuncgucugcgag

SEQ ID NO: 128125 - RNA, 23 nt, Artificial Sequence
  Synthetic
  misc_feature (13)..(13): n is a, c, g, or u
cgauugagaucuncgucugcgag

SEQ ID NO: 128126 - RNA, 24 nt, Artificial Sequence
  Synthetic
  misc_feature (14)..(14): n is a, c, g, or u
gcgauugagaucuncgucugcgag

SEQ ID NO: 128127 - RNA, 18 nt, Artificial Sequence
  Synthetic
gauugguggaggcaggag

SEQ ID NO: 128128 - RNA, 19 nt, Artificial Sequence
  Synthetic
cgauugguggaggcaggag

SEQ ID NO: 128129 - RNA, 20 nt, Artificial Sequence
  Synthetic
ccgauugguggaggcaggag

SEQ ID NO: 128130 - RNA, 21 nt, Artificial Sequence
  Synthetic
gccgauugguggaggcaggag

SEQ ID NO: 128131 - RNA, 22 nt, Artificial Sequence
  Synthetic
ugccgauugguggaggcaggag

SEQ ID NO: 128132 - RNA, 23 nt, Artificial Sequence
  Synthetic
cugccgauugguggaggcaggag

SEQ ID NO: 128133 - RNA, 24 nt, Artificial Sequence
  Synthetic
acugccgauugguggaggcaggag

SEQ ID NO: 128134 - RNA, 18 nt, Artificial Sequence
  Synthetic
  misc_feature (1)..(2): n is a, c, g, or u
  misc_feature (5)..(5): n is a, c, g, or u
nnggnacggcagacggag

SEQ ID NO: 128135 - RNA, 19 nt, Artificial Sequence
  Synthetic
  misc_feature (2)..(3): n is a, c, g, or u
  misc_feature (6)..(6): n is a, c, g, or u
gnnggnacggcagacggag

SEQ ID NO: 128136 - RNA, 20 nt, Artificial Sequence
  Synthetic
  misc_feature (3)..(4): n is a, c, g, or u
  misc_feature (7)..(7): n is a, c, g, or u
ggnnggnacggcagacggag

SEQ ID NO: 128137 - RNA, 21 nt, Artificial Sequence
  Synthetic
  misc_feature (4)..(5): n is a, c, g, or u
  misc_feature (8)..(8): n is a, c, g, or u
cggnnggnacggcagacggag

SEQ ID NO: 128138 - RNA, 22 nt, Artificial Sequence
  Synthetic
  misc_feature (5)..(6): n is a, c, g, or u
  misc_feature (9)..(9): n is a, c, g, or u
ucggnnggnacggcagacggag

SEQ ID NO: 128139 - RNA, 23 nt, Artificial Sequence
  Synthetic
  misc_feature (6)..(7): n is a, c, g, or u
  misc_feature (10)..(10): n is a, c, g, or u
gucggnnggnacggcagacggag

SEQ ID NO: 128140 - RNA, 24 nt, Artificial Sequence
  Synthetic
  misc_feature (7)..(8): n is a, c, g, or u
  misc_feature (11)..(11): n is a, c, g, or u
ggucggnnggnacggcagacggag

SEQ ID NO: 128141 - RNA, 18 nt, Artificial Sequence
  Synthetic
  misc_feature (8)..(8): n is a, c, g, or u
ugagugcnguauggugag

SEQ ID NO: 128142 - RNA, 19 nt, Artificial Sequence
  Synthetic
  misc_feature (9)..(9): n is a, c, g, or u
cugagugcnguauggugag

SEQ ID NO: 128143 - RNA, 20 nt, Artificial Sequence
  Synthetic
  misc_feature (10)..(10): n is a, c, g, or u
ccugagugcnguauggugag

SEQ ID NO: 128144 - RNA, 21 nt, Artificial Sequence
  Synthetic
  misc_feature (11)..(11): n is a, c, g, or u
gccugagugcnguauggugag

SEQ ID NO: 128145 - RNA, 22 nt, Artificial Sequence
  Synthetic
  misc_feature (12)..(12): n is a, c, g, or u
ugccugagugcnguauggugag

SEQ ID NO: 128146 - RNA, 23 nt, Artificial Sequence
  Synthetic
  misc_feature (13)..(13): n is a, c, g, or u
uugccugagugcnguauggugag

SEQ ID NO: 128147 - RNA, 24 nt, Artificial Sequence
  Synthetic
  misc_feature (14)..(14): n is a, c, g, or u
cuugccugagugcnguauggugag

SEQ ID NO: 128148 - RNA, 18 nt, Artificial Sequence
  Synthetic
acauagaguugccuugag

SEQ ID NO: 128149 - RNA, 19 nt, Artificial Sequence
  Synthetic
aacauagaguugccuugag

SEQ ID NO: 128150 - RNA, 20 nt, Artificial Sequence
  Synthetic
aaacauagaguugccuugag

SEQ ID NO: 128151 - RNA, 21 nt, Artificial Sequence
  Synthetic
gaaacauagaguugccuugag

SEQ ID NO: 128152 - RNA, 22 nt, Artificial Sequence
  Synthetic
ggaaacauagaguugccuugag

SEQ ID NO: 128153 - RNA, 23 nt, Artificial Sequence
  Synthetic
gggaaacauagaguugccuugag

SEQ ID NO: 128154 - RNA, 24 nt, Artificial Sequence
  Synthetic
agggaaacauagaguugccuugag

SEQ ID NO: 128155 - RNA, 18 nt, Artificial Sequence
  Synthetic
  misc_feature (16)..(16): n is a, c, g, or u
gcuuggaggcuugaanag

SEQ ID NO: 128156 - RNA, 19 nt, Artificial Sequence
  Synthetic
  misc_feature (17)..(17): n is a, c, g, or u
agcuuggaggcuugaanag

SEQ ID NO: 128157 - RNA, 20 nt, Artificial Sequence
  Synthetic
  misc_feature (18)..(18): n is a, c, g, or u
cagcuuggaggcuugaanag

SEQ ID NO: 128158 - RNA, 21 nt, Artificial Sequence
  Synthetic
  misc_feature (19)..(19): n is a, c, g, or u
acagcuuggaggcuugaanag

SEQ ID NO: 128159 - RNA, 22 nt, Artificial Sequence
  Synthetic
  misc_feature (20)..(20): n is a, c, g, or u
cacagcuuggaggcuugaanag

SEQ ID NO: 128160 - RNA, 23 nt, Artificial Sequence
  Synthetic
  misc_feature (21)..(21): n is a, c, g, or u
gcacagcuuggaggcuugaanag

SEQ ID NO: 128161 - RNA, 24 nt, Artificial Sequence
  Synthetic
  misc_feature (22)..(22): n is a, c, g, or u
ggcacagcuuggaggcuugaanag

SEQ ID NO: 128162 - RNA, 18 nt, Artificial Sequence
  Synthetic
gaugagaaggcacagacg

SEQ ID NO: 128163 - RNA, 19 nt, Artificial Sequence
  Synthetic
agaugagaaggcacagacg

SEQ ID NO: 128164 - RNA, 20 nt, Artificial Sequence
  Synthetic
cagaugagaaggcacagacg

SEQ ID NO: 128165 - RNA, 21 nt, Artificial Sequence
  Synthetic
gcagaugagaaggcacagacg

SEQ ID NO: 128166 - RNA, 22 nt, Artificial Sequence
  Synthetic
ggcagaugagaaggcacagacg

SEQ ID NO: 128167 - RNA, 23 nt, Artificial Sequence
  Synthetic
cggcagaugagaaggcacagacg

SEQ ID NO: 128168 - RNA, 24 nt, Artificial Sequence
  Synthetic
ccggcagaugagaaggcacagacg

SEQ ID NO: 128169 - RNA, 18 nt, Artificial Sequence
  Synthetic
  misc_feature (4)..(5): n is a, c, g, or u
  misc_feature (8)..(8): n is a, c, g, or u
cggnnggnacggcagacg

SEQ ID NO: 128170 - RNA, 19 nt, Artificial Sequence
  Synthetic
  misc_feature (5)..(6): n is a, c, g, or u
  misc_feature (9)..(9): n is a, c, g, or u
ucggnnggnacggcagacg

SEQ ID NO: 128171 - RNA, 20 nt, Artificial Sequence
  Synthetic
  misc_feature (6)..(7): n is a, c, g, or u
  misc_feature (10)..(10): n is a, c, g, or u
gucggnnggnacggcagacg

SEQ ID NO: 128172 - RNA, 21 nt, Artificial Sequence
  Synthetic
  misc_feature (7)..(8): n is a, c, g, or u
  misc_feature (11)..(11): n is a, c, g, or u
ggucggnnggnacggcagacg

SEQ ID NO: 128173 - RNA, 22 nt, Artificial Sequence
  Synthetic
  misc_feature (8)..(9): n is a, c, g, or u
  misc_feature (12)..(12): n is a, c, g, or u
uggucggnnggnacggcagacg

SEQ ID NO: 128174 - RNA, 23 nt, Artificial Sequence
  Synthetic
  misc_feature (9)..(10): n is a, c, g, or u
  misc_feature (13)..(13): n is a, c, g, or u
guggucggnnggnacggcagacg

SEQ ID NO: 128175 - RNA, 24 nt, Artificial Sequence
  Synthetic
  misc_feature (10)..(11): n is a, c, g, or u
  misc_feature (14)..(14): n is a, c, g, or u
cguggucggnnggnacggcagacg

SEQ ID NO: 128176 - RNA, 18 nt, Artificial Sequence
  Synthetic
ccgcgggauucagcgccg

SEQ ID NO: 128177 - RNA, 19 nt, Artificial Sequence
  Synthetic
uccgcgggauucagcgccg

SEQ ID NO: 128178 - RNA, 20 nt, Artificial Sequence
  Synthetic
guccgcgggauucagcgccg

SEQ ID NO: 128179 - RNA, 21 nt, Artificial Sequence
  Synthetic
cguccgcgggauucagcgccg

SEQ ID NO: 128180 - RNA, 22 nt, Artificial Sequence
  Synthetic
ucguccgcgggauucagcgccg

SEQ ID NO: 128181 - RNA, 23 nt, Artificial Sequence
  Synthetic
gucguccgcgggauucagcgccg

SEQ ID NO: 128182 - RNA, 24 nt, Artificial Sequence
  Synthetic
ggucguccgcgggauucagcgccg

SEQ ID NO: 128183 - RNA, 18 nt, Artificial Sequence
  Synthetic
  misc_feature (5)..(5): n is a, c, g, or u
aucuncgucugcgaggcg

SEQ ID NO: 128184 - RNA, 19 nt, Artificial Sequence
  Synthetic
  misc_feature (6)..(6): n is a, c, g, or u
gaucuncgucugcgaggcg

SEQ ID NO: 128185 - RNA, 20 nt, Artificial Sequence
  Synthetic
  misc_feature (7)..(7): n is a, c, g, or u
agaucuncgucugcgaggcg

SEQ ID NO: 128186 - RNA, 21 nt, Artificial Sequence
  Synthetic
  misc_feature (8)..(8): n is a, c, g, or u
gagaucuncgucugcgaggcg

SEQ ID NO: 128187 - RNA, 22 nt, Artificial Sequence
  Synthetic
  misc_feature (9)..(9): n is a, c, g, or u
ugagaucuncgucugcgaggcg

SEQ ID NO: 128188 - RNA, 23 nt, Artificial Sequence
  Synthetic
  misc_feature (10)..(10): n is a, c, g, or u
uugagaucuncgucugcgaggcg

SEQ ID NO: 128189 - RNA, 24 nt, Artificial Sequence
  Synthetic
  misc_feature (11)..(11): n is a, c, g, or u
auugagaucuncgucugcgaggcg

SEQ ID NO: 128190 - RNA, 18 nt, Artificial Sequence
  Synthetic
caggguccccaguccucg

SEQ ID NO: 128191 - RNA, 19 nt, Artificial Sequence
  Synthetic
  misc_feature (1)..(1): n is a, c, g, or u
ncaggguccccaguccucg

SEQ ID NO: 128192 - RNA, 20 nt, Artificial Sequence
  Synthetic
  misc_feature (2)..(2): n is a, c, g, or u
cncaggguccccaguccucg

SEQ ID NO: 128193 - RNA, 21 nt, Artificial Sequence
  Synthetic
  misc_feature (1)..(1): n is a, c, g, or u
  misc_feature (3)..(3): n is a, c, g, or u
ncncaggguccccaguccucg

SEQ ID NO: 128194 - RNA, 22 nt, Artificial Sequence
  Synthetic
  misc_feature (2)..(2): n is a, c, g, or u
  misc_feature (4)..(4): n is a, c, g, or u
gncncaggguccccaguccucg

SEQ ID NO: 128195 - RNA, 23 nt, Artificial Sequence
  Synthetic
  misc_feature (3)..(3): n is a, c, g, or u
  misc_feature (5)..(5): n is a, c, g, or u
cgncncaggguccccaguccucg

SEQ ID NO: 128196 - RNA, 24 nt, Artificial Sequence
  Synthetic
  misc_feature (4)..(4): n is a, c, g, or u
  misc_feature (6)..(6): n is a, c, g, or u
ucgncncaggguccccaguccucg

SEQ ID NO: 128197 - RNA, 18 nt, Artificial Sequence
  Synthetic
augaggcauagcagcagg

SEQ ID NO: 128198 - RNA, 19 nt, Artificial Sequence
  Synthetic
gaugaggcauagcagcagg

SEQ ID NO: 128199 - RNA, 20 nt, Artificial Sequence
  Synthetic
agaugaggcauagcagcagg

SEQ ID NO: 128200 - RNA, 21 nt, Artificial Sequence
  Synthetic
aagaugaggcauagcagcagg

SEQ ID NO: 128201 - RNA, 22 nt, Artificial Sequence
  Synthetic
gaagaugaggcauagcagcagg

SEQ ID NO: 128202 - RNA, 23 nt, Artificial Sequence
  Synthetic
agaagaugaggcauagcagcagg

SEQ ID NO: 128203 - RNA, 24 nt, Artificial Sequence
  Synthetic
aagaagaugaggcauagcagcagg

SEQ ID NO: 128204 - RNA, 18 nt, Artificial Sequence
  Synthetic
ccgauugguggaggcagg

SEQ ID NO: 128205 - RNA, 19 nt, Artificial Sequence
  Synthetic
gccgauugguggaggcagg

SEQ ID NO: 128206 - RNA, 20 nt, Artificial Sequence
  Synthetic
ugccgauugguggaggcagg

SEQ ID NO: 128207 - RNA, 21 nt, Artificial Sequence
  Synthetic
cugccgauugguggaggcagg

SEQ ID NO: 128208 - RNA, 22 nt, Artificial Sequence
  Synthetic
acugccgauugguggaggcagg

SEQ ID NO: 128209 - RNA, 23 nt, Artificial Sequence
  Synthetic
gacugccgauugguggaggcagg

SEQ ID NO: 128210 - RNA, 24 nt, Artificial Sequence
  Synthetic
ugacugccgauugguggaggcagg

SEQ ID NO: 128211 - RNA, 18 nt, Artificial Sequence
  Synthetic
augacugucucuuagagg

SEQ ID NO: 128212 - RNA, 19 nt, Artificial Sequence
  Synthetic
gaugacugucucuuagagg

SEQ ID NO: 128213 - RNA, 20 nt, Artificial Sequence
  Synthetic
ggaugacugucucuuagagg

SEQ ID NO: 128214 - RNA, 21 nt, Artificial Sequence
  Synthetic
aggaugacugucucuuagagg

SEQ ID NO: 128215 - RNA, 22 nt, Artificial Sequence
  Synthetic
gaggaugacugucucuuagagg

SEQ ID NO: 128216 - RNA, 23 nt, Artificial Sequence
  Synthetic
ugaggaugacugucucuuagagg

SEQ ID NO: 128217 - RNA, 24 nt, Artificial Sequence
  Synthetic
cugaggaugacugucucuuagagg

SEQ ID NO: 128218 - RNA, 18 nt, Artificial Sequence
  Synthetic
auugguggaggcaggagg

SEQ ID NO: 128219 - RNA, 19 nt, Artificial Sequence
  Synthetic
gauugguggaggcaggagg

SEQ ID NO: 128220 - RNA, 20 nt, Artificial Sequence
  Synthetic
cgauugguggaggcaggagg

SEQ ID NO: 128221 - RNA, 21 nt, Artificial Sequence
  Synthetic
ccgauugguggaggcaggagg

SEQ ID NO: 128222 - RNA, 22 nt, Artificial Sequence
  Synthetic
gccgauugguggaggcaggagg

SEQ ID NO: 128223 - RNA, 23 nt, Artificial Sequence
  Synthetic
ugccgauugguggaggcaggagg

SEQ ID NO: 128224 - RNA, 24 nt, Artificial Sequence
  Synthetic
cugccgauugguggaggcaggagg

SEQ ID NO: 128225 - RNA, 18 nt, Artificial Sequence
  Synthetic
acugccgauugguggagg

SEQ ID NO: 128226 - RNA, 19 nt, Artificial Sequence
  Synthetic
gacugccgauugguggagg

SEQ ID NO: 128227 - RNA, 20 nt, Artificial Sequence
  Synthetic
ugacugccgauugguggagg

SEQ ID NO: 128228 - RNA, 21 nt, Artificial Sequence
  Synthetic
cugacugccgauugguggagg

SEQ ID NO: 128229 - RNA, 22 nt, Artificial Sequence
  Synthetic
ccugacugccgauugguggagg

SEQ ID NO: 128230 - RNA, 23 nt, Artificial Sequence
  Synthetic
uccugacugccgauugguggagg

SEQ ID NO: 128231 - RNA, 24 nt, Artificial Sequence
  Synthetic
uuccugacugccgauugguggagg

SEQ ID NO: 128232 - RNA, 18 nt, Artificial Sequence
  Synthetic
uuggugagugauuggagg

SEQ ID NO: 128233 - RNA, 19 nt, Artificial Sequence
  Synthetic
guuggugagugauuggagg

SEQ ID NO: 128234 - RNA, 20 nt, Artificial Sequence
  Synthetic
gguuggugagugauuggagg

SEQ ID NO: 128235 - RNA, 21 nt, Artificial Sequence
  Synthetic
agguuggugagugauuggagg

SEQ ID NO: 128236 - RNA, 22 nt, Artificial Sequence
  Synthetic
gagguuggugagugauuggagg

SEQ ID NO: 128237 - RNA, 23 nt, Artificial Sequence
  Synthetic
ggagguuggugagugauuggagg

SEQ ID NO: 128238 - RNA, 24 nt, Artificial Sequence
  Synthetic
aggagguuggugagugauuggagg

SEQ ID NO: 128239 - RNA, 18 nt, Artificial Sequence
  Synthetic
cauuugguggucuauagg

SEQ ID NO: 128240 - RNA, 19 nt, Artificial Sequence
  Synthetic
gcauuugguggucuauagg

SEQ ID NO: 128241 - RNA, 20 nt, Artificial Sequence
  Synthetic
ggcauuugguggucuauagg

SEQ ID NO: 128242 - RNA, 21 nt, Artificial Sequence
  Synthetic
gggcauuugguggucuauagg

SEQ ID NO: 128243 - RNA, 22 nt, Artificial Sequence
  Synthetic
ggggcauuugguggucuauagg

SEQ ID NO: 128244 - RNA, 23 nt, Artificial Sequence
  Synthetic
aggggcauuugguggucuauagg

SEQ ID NO: 128245 - RNA, 24 nt, Artificial Sequence
  Synthetic
uaggggcauuugguggucuauagg

SEQ ID NO: 128246 - RNA, 18 nt, Artificial Sequence
  Synthetic
  misc_feature (2)..(2): n is a, c, g, or u
gnacaagagaugauuagg

SEQ ID NO: 128247 - RNA, 19 nt, Artificial Sequence
  Synthetic
  misc_feature (3)..(3): n is a, c, g, or u
ugnacaagagaugauuagg

SEQ ID NO: 128248 - RNA, 20 nt, Artificial Sequence
  Synthetic
  misc_feature (4)..(4): n is a, c, g, or u
augnacaagagaugauuagg

SEQ ID NO: 128249 - RNA, 21 nt, Artificial Sequence
  Synthetic
  misc_feature (5)..(5): n is a, c, g, or u
caugnacaagagaugauuagg

SEQ ID NO: 128250 - RNA, 22 nt, Artificial Sequence
  Synthetic
  misc_feature (6)..(6): n is a, c, g, or u
acaugnacaagagaugauuagg

SEQ ID NO: 128251 - RNA, 23 nt, Artificial Sequence
  Synthetic
  misc_feature (7)..(7): n is a, c, g, or u
gacaugnacaagagaugauuagg

SEQ ID NO: 128252 - RNA, 24 nt, Artificial Sequence
  Synthetic
  misc_feature (8)..(8): n is a, c, g, or u
ggacaugnacaagagaugauuagg

SEQ ID NO: 128253 - RNA, 18 nt, Artificial Sequence
  Synthetic
  misc_feature (2)..(2): n is a, c, g, or u
  misc_feature (5)..(5): n is a, c, g, or u
  misc_feature (11)..(11): n is a, c, g, or u
  misc_feature (13)..(13): n is a, c, g, or u
cnagnagaucncngacgg

SEQ ID NO: 128254 - RNA, 19 nt, Artificial Sequence
  Synthetic
  misc_feature (3)..(3): n is a, c, g, or u
  misc_feature (6)..(6): n is a, c, g, or u
  misc_feature (12)..(12): n is a, c, g, or u
  misc_feature (14)..(14): n is a, c, g, or u
ucnagnagaucncngacgg

SEQ ID NO: 128255 - RNA, 20 nt, Artificial Sequence
  Synthetic
  misc_feature (1)..(1): n is a, c, g, or u
  misc_feature (4)..(4): n is a, c, g, or u
  misc_feature (7)..(7): n is a, c, g, or u
  misc_feature (13)..(13): n is a, c, g, or u
  misc_feature (15)..(15): n is a, c, g, or u
nucnagnagaucncngacgg

SEQ ID NO: 128256 - RNA, 21 nt, Artificial Sequence
  Synthetic
  misc_feature (2)..(2): n is a, c, g, or u
  misc_feature (5)..(5): n is a, c, g, or u
  misc_feature (8)..(8): n is a, c, g, or u
  misc_feature (14)..(14): n is a, c, g, or u
  misc_feature (16)..(16): n is a, c, g, or u
unucnagnagaucncngacgg

SEQ ID NO: 128257 - RNA, 22 nt, Artificial Sequence
  Synthetic
  misc_feature (3)..(3): n is a, c, g, or u
  misc_feature (6)..(6): n is a, c, g, or u
  misc_feature (9)..(9): n is a, c, g, or u
  misc_feature (15)..(15): n is a, c, g, or u
  misc_feature (17)..(17): n is a, c, g, or u
gunucnagnagaucncngacgg

SEQ ID NO: 128258 - RNA, 23 nt, Artificial Sequence
  Synthetic
  misc_feature (1)..(1): n is a, c, g, or u
  misc_feature (4)..(4): n is a, c, g, or u
  misc_feature (7)..(7): n is a, c, g, or u
  misc_feature (10)..(10): n is a, c, g, or u
  misc_feature (16)..(16): n is a, c, g, or u
  misc_feature (18)..(18): n is a, c, g, or u
ngunucnagnagaucncngacgg

SEQ ID NO: 128259 - RNA, 24 nt, Artificial Sequence
  Synthetic
  misc_feature (2)..(2): n is a, c, g, or u
  misc_feature (5)..(5): n is a, c, g, or u
  misc_feature (8)..(8): n is a, c, g, or u
  misc_feature (11)..(11): n is a, c, g, or u
  misc_feature (17)..(17): n is a, c, g, or u
  misc_feature (19)..(19): n is a, c, g, or u
cngunucnagnagaucncngacgg

SEQ ID NO: 128260 - RNA, 18 nt, Artificial Sequence
  Synthetic
uuccgcaguauggaucgg

SEQ ID NO: 128261 - RNA, 19 nt, Artificial Sequence
  Synthetic
guuccgcaguauggaucgg

SEQ ID NO: 128262 - RNA, 20 nt, Artificial Sequence
  Synthetic
aguuccgcaguauggaucgg

SEQ ID NO: 128263 - RNA, 21 nt, Artificial Sequence
  Synthetic
gaguuccgcaguauggaucgg

SEQ ID NO: 128264 - RNA, 22 nt, Artificial Sequence
  Synthetic
ggaguuccgcaguauggaucgg

SEQ ID NO: 128265 - RNA, 23 nt, Artificial Sequence
  Synthetic
aggaguuccgcaguauggaucgg

SEQ ID NO: 128266 - RNA, 24 nt, Artificial Sequence
  Synthetic
uaggaguuccgcaguauggaucgg

SEQ ID NO: 128267 - RNA, 18 nt, Artificial Sequence
  Synthetic
cagugguccuugaugggg

SEQ ID NO: 128268 - RNA, 19 nt, Artificial Sequence
  Synthetic
ccagugguccuugaugggg

SEQ ID NO: 128269 - RNA, 20 nt, Artificial Sequence
  Synthetic
gccagugguccuugaugggg

SEQ ID NO: 128270 - RNA, 21 nt, Artificial Sequence
  Synthetic
ggccagugguccuugaugggg

SEQ ID NO: 128271 - RNA, 22 nt, Artificial Sequence
  Synthetic
uggccagugguccuugaugggg

SEQ ID NO: 128272 - RNA, 23 nt, Artificial Sequence
  Synthetic
  misc_feature (1)..(1): n is a, c, g, or u
nuggccagugguccuugaugggg

SEQ ID NO: 128273 - RNA, 24 nt, Artificial Sequence
  Synthetic
  misc_feature (1)..(2): n is a, c, g, or u
nnuggccagugguccuugaugggg

SEQ ID NO: 128274 - RNA, 18 nt, Artificial Sequence
  Synthetic
  misc_feature (9)..(9): n is a, c, g, or u
  misc_feature (12)..(12): n is a, c, g, or u
aaagcccangangauggg

SEQ ID NO: 128275 - RNA, 19 nt, Artificial Sequence
  Synthetic
  misc_feature (10)..(10): n is a, c, g, or u
  misc_feature (13)..(13): n is a, c, g, or u
gaaagcccangangauggg

SEQ ID NO: 128276 - RNA, 20 nt, Artificial Sequence
  Synthetic
  misc_feature (11)..(11): n is a, c, g, or u
  misc_feature (14)..(14): n is a, c, g, or u
cgaaagcccangangauggg

SEQ ID NO: 128277 - RNA, 21 nt, Artificial Sequence
  Synthetic
  misc_feature (12)..(12): n is a, c, g, or u
  misc_feature (15)..(15): n is a, c, g, or u
gcgaaagcccangangauggg

SEQ ID NO: 128278 - RNA, 22 nt, Artificial Sequence
  Synthetic
  misc_feature (13)..(13): n is a, c, g, or u
  misc_feature (16)..(16): n is a, c, g, or u
ugcgaaagcccangangauggg

SEQ ID NO: 128279 - RNA, 23 nt, Artificial Sequence
  Synthetic
  misc_feature (14)..(14): n is a, c, g, or u
  misc_feature (17)..(17): n is a, c, g, or u
uugcgaaagcccangangauggg

SEQ ID NO: 128280 - RNA, 24 nt, Artificial Sequence
  Synthetic
  misc_feature (15)..(15): n is a, c, g, or u
  misc_feature (18)..(18): n is a, c, g, or u
uuugcgaaagcccangangauggg

SEQ ID NO: 128281 - RNA, 18 nt, Artificial Sequence
  Synthetic
cugaaagccaaacagugg

SEQ ID NO: 128282 - RNA, 19 nt, Artificial Sequence
  Synthetic
  misc_feature (1)..(1): n is a, c, g, or u
ncugaaagccaaacagugg

SEQ ID NO: 128283 - RNA, 20 nt, Artificial Sequence
  Synthetic
  misc_feature (2)..(2): n is a, c, g, or u
ancugaaagccaaacagugg

SEQ ID NO: 128284 - RNA, 21 nt, Artificial Sequence
  Synthetic
  misc_feature (3)..(3): n is a, c, g, or u
uancugaaagccaaacagugg

SEQ ID NO: 128285 - RNA, 22 nt, Artificial Sequence
  Synthetic
  misc_feature (4)..(4): n is a, c, g, or u
auancugaaagccaaacagugg

SEQ ID NO: 128286 - RNA, 23 nt, Artificial Sequence
  Synthetic
  misc_feature (5)..(5): n is a, c, g, or u
uauancugaaagccaaacagugg

SEQ ID NO: 128287 - RNA, 24 nt, Artificial Sequence
  Synthetic
  misc_feature (6)..(6): n is a, c, g, or u
auauancugaaagccaaacagugg

SEQ ID NO: 128288 - RNA, 18 nt, Artificial Sequence
  Synthetic
uuccugacugccgauugg

SEQ ID NO: 128289 - RNA, 19 nt, Artificial Sequence
  Synthetic
cuuccugacugccgauugg

SEQ ID NO: 128290 - RNA, 20 nt, Artificial Sequence
  Synthetic
ccuuccugacugccgauugg

SEQ ID NO: 128291 - RNA, 21 nt, Artificial Sequence
  Synthetic
gccuuccugacugccgauugg

SEQ ID NO: 128292 - RNA, 22 nt, Artificial Sequence
  Synthetic
ugccuuccugacugccgauugg

SEQ ID NO: 128293 - RNA, 23 nt, Artificial Sequence
  Synthetic
cugccuuccugacugccgauugg

SEQ ID NO: 128294 - RNA, 24 nt, Artificial Sequence
  Synthetic
gcugccuuccugacugccgauugg

SEQ ID NO: 128295 - RNA, 18 nt, Artificial Sequence
  Synthetic
  misc_feature (6)..(6): n is a, c, g, or u
ggaucnugcagagcuugg

SEQ ID NO: 128296 - RNA, 19 nt, Artificial Sequence
  Synthetic
  misc_feature (7)..(7): n is a, c, g, or u
gggaucnugcagagcuugg

SEQ ID NO: 128297 - RNA, 20 nt, Artificial Sequence
  Synthetic
  misc_feature (8)..(8): n is a, c, g, or u
ugggaucnugcagagcuugg

SEQ ID NO: 128298 - RNA, 21 nt, Artificial Sequence
  Synthetic
  misc_feature (9)..(9): n is a, c, g, or u
cugggaucnugcagagcuugg

SEQ ID NO: 128299 - RNA, 22 nt, Artificial Sequence
  Synthetic
  misc_feature (10)..(10): n is a, c, g, or u
ucugggaucnugcagagcuugg

SEQ ID NO: 128300 - RNA, 23 nt, Artificial Sequence
  Synthetic
  misc_feature (11)..(11): n is a, c, g, or u
cucugggaucnugcagagcuugg

SEQ ID NO: 128301 - RNA, 24 nt, Artificial Sequence
  Synthetic
  misc_feature (12)..(12): n is a, c, g, or u
acucugggaucnugcagagcuugg

SEQ ID NO: 128302 - RNA, 18 nt, Artificial Sequence
  Synthetic
  misc_feature (8)..(8): n is a, c, g, or u
  misc_feature (17)..(17): n is a, c, g, or u
aaugaaunuuaggaaang

SEQ ID NO: 128303 - RNA, 19 nt, Artificial Sequence
  Synthetic
  misc_feature (9)..(9): n is a, c, g, or u
  misc_feature (18)..(18): n is a, c, g, or u
aaaugaaunuuaggaaang

SEQ ID NO: 128304 - RNA, 20 nt, Artificial Sequence
  Synthetic
  misc_feature (10)..(10): n is a, c, g, or u
  misc_feature (19)..(19): n is a, c, g, or u
uaaaugaaunuuaggaaang

SEQ ID NO: 128305 - RNA, 21 nt, Artificial Sequence
  Synthetic
  misc_feature (11)..(11): n is a, c, g, or u
  misc_feature (20)..(20): n is a, c, g, or u
guaaaugaaunuuaggaaang

SEQ ID NO: 128306 - RNA, 22 nt, Artificial Sequence
  Synthetic
  misc_feature (12)..(12): n is a, c, g, or u
  misc_feature (21)..(21): n is a, c, g, or u
uguaaaugaaunuuaggaaang

SEQ ID NO: 128307 - RNA, 23 nt, Artificial Sequence
  Synthetic
  misc_feature (1)..(1): n is a, c, g, or u
  misc_feature (13)..(13): n is a, c, g, or u
  misc_feature (22)..(22): n is a, c, g, or u
nuguaaaugaaunuuaggaaang

SEQ ID NO: 128308 - RNA, 24 nt, Artificial Sequence
  Synthetic
  misc_feature (2)..(2): n is a, c, g, or u
  misc_feature (14)..(14): n is a, c, g, or u
  misc_feature (23)..(23): n is a, c, g, or u
cnuguaaaugaaunuuaggaaang

SEQ ID NO: 128309 - RNA, 18 nt, Artificial Sequence
  Synthetic
  misc_feature (14)..(14): n is a, c, g, or u
  misc_feature (17)..(17): n is a, c, g, or u
uugcgaaagcccangang

SEQ ID NO: 128310 - RNA, 19 nt, Artificial Sequence
  Synthetic
  misc_feature (15)..(15): n is a, c, g, or u
  misc_feature (18)..(18): n is a, c, g, or u
uuugcgaaagcccangang

SEQ ID NO: 128311 - RNA, 20 nt, Artificial Sequence
  Synthetic
  misc_feature (16)..(16): n is a, c, g, or u
  misc_feature (19)..(19): n is a, c, g, or u
uuuugcgaaagcccangang

SEQ ID NO: 128312 - RNA, 21 nt, Artificial Sequence
  Synthetic
  misc_feature (17)..(17): n is a, c, g, or u
  misc_feature (20)..(20): n is a, c, g, or u
auuuugcgaaagcccangang

SEQ ID NO: 128313 - RNA, 22 nt, Artificial Sequence
  Synthetic
  misc_feature (18)..(18): n is a, c, g, or u
  misc_feature (21)..(21): n is a, c, g, or u
uauuuugcgaaagcccangang

SEQ ID NO: 128314 - RNA, 23 nt, Artificial Sequence
  Synthetic
  misc_feature (19)..(19): n is a, c, g, or u
  misc_feature (22)..(22): n is a, c, g, or u
guauuuugcgaaagcccangang

SEQ ID NO: 128315 - RNA, 24 nt, Artificial Sequence
  Synthetic
  misc_feature (20)..(20): n is a, c, g, or u
  misc_feature (23)..(23): n is a, c, g, or u
gguauuuugcgaaagcccangang

SEQ ID NO: 128316 - RNA, 18 nt, Artificial Sequence
  Synthetic
  misc_feature (14)..(14): n is a, c, g, or u
  misc_feature (17)..(17): n is a, c, g, or u
gagcuugguggaangcng

SEQ ID NO: 128317 - RNA, 19 nt, Artificial Sequence
  Synthetic
  misc_feature (15)..(15): n is a, c, g, or u
  misc_feature (18)..(18): n is a, c, g, or u
agagcuugguggaangcng

SEQ ID NO: 128318 - RNA, 20 nt, Artificial Sequence
  Synthetic
  misc_feature (16)..(16): n is a, c, g, or u
  misc_feature (19)..(19): n is a, c, g, or u
cagagcuugguggaangcng

SEQ ID NO: 128319 - RNA, 21 nt, Artificial Sequence
  Synthetic
  misc_feature (17)..(17): n is a, c, g, or u
  misc_feature (20)..(20): n is a, c, g, or u
gcagagcuugguggaangcng

SEQ ID NO: 128320 - RNA, 22 nt, Artificial Sequence
  Synthetic
  misc_feature (18)..(18): n is a, c, g, or u
  misc_feature (21)..(21): n is a, c, g, or u
ugcagagcuugguggaangcng

SEQ ID NO: 128321 - RNA, 23 nt, Artificial Sequence
  Synthetic
  misc_feature (1)..(1): n is a, c, g, or u
  misc_feature (19)..(19): n is a, c, g, or u
  misc_feature (22)..(22): n is a, c, g, or u
nugcagagcuugguggaangcng

SEQ ID NO: 128322 - RNA, 24 nt, Artificial Sequence
  Synthetic
  misc_feature (2)..(2): n is a, c, g, or u
  misc_feature (20)..(20): n is a, c, g, or u
  misc_feature (23)..(23): n is a, c, g, or u
cnugcagagcuugguggaangcng

SEQ ID NO: 128323 - RNA, 18 nt, Artificial Sequence
  Synthetic
  misc_feature (3)..(3): n is a, c, g, or u
  misc_feature (6)..(6): n is a, c, g, or u
  misc_feature (9)..(9): n is a, c, g, or u
  misc_feature (15)..(15): n is a, c, g, or u
  misc_feature (17)..(17): n is a, c, g, or u
gunucnagnagaucncng

SEQ ID NO: 128324 - RNA, 19 nt, Artificial Sequence
  Synthetic
  misc_feature (1)..(1): n is a, c, g, or u
  misc_feature (4)..(4): n is a, c, g, or u
  misc_feature (7)..(7): n is a, c, g, or u
  misc_feature (10)..(10): n is a, c, g, or u
  misc_feature (16)..(16): n is a, c, g, or u
  misc_feature (18)..(18): n is a, c, g, or u
ngunucnagnagaucncng

SEQ ID NO: 128325 - RNA, 20 nt, Artificial Sequence
  Synthetic
  misc_feature (2)..(2): n is a, c, g, or u
  misc_feature (5)..(5): n is a, c, g, or u
  misc_feature (8)..(8): n is a, c, g, or u
  misc_feature (11)..(11): n is a, c, g, or u
  misc_feature (17)..(17): n is a, c, g, or u
  misc_feature (19)..(19): n is a, c, g, or u
cngunucnagnagaucncng

SEQ ID NO: 128326 - RNA, 21 nt, Artificial Sequence
  Synthetic
  misc_feature (3)..(3): n is a, c, g, or u
  misc_feature (6)..(6): n is a, c, g, or u
  misc_feature (9)..(9): n is a, c, g, or u
  misc_feature (12)..(12): n is a, c, g, or u
  misc_feature (18)..(18): n is a, c, g, or u
  misc_feature (20)..(20): n is a, c, g, or u
gcngunucnagnagaucncng

SEQ ID NO: 128327 - RNA, 22 nt, Artificial Sequence
  Synthetic
  misc_feature (4)..(4): n is a, c, g, or u
  misc_feature (7)..(7): n is a, c, g, or u
  misc_feature (10)..(10): n is a, c, g, or u
  misc_feature (13)..(13): n is a, c, g, or u
  misc_feature (19)..(19): n is a, c, g, or u
  misc_feature (21)..(21): n is a, c, g, or u
ggcngunucnagnagaucncng

SEQ ID NO: 128328 - RNA, 23 nt, Artificial Sequence
  Synthetic
  misc_feature (5)..(5): n is a, c, g, or u
  misc_feature (8)..(8): n is a, c, g, or u
  misc_feature (11)..(11): n is a, c, g, or u
  misc_feature (14)..(14): n is a, c, g, or u
  misc_feature (20)..(20): n is a, c, g, or u
  misc_feature (22)..(22): n is a, c, g, or u
aggcngunucnagnagaucncng

SEQ ID NO: 128329 - RNA, 24 nt, Artificial Sequence
  Synthetic
  misc_feature (6)..(6): n is a, c, g, or u
  misc_feature (9)..(9): n is a, c, g, or u
  misc_feature (12)..(12): n is a, c, g, or u
  misc_feature (15)..(15): n is a, c, g, or u
  misc_feature (21)..(21): n is a, c, g, or u
  misc_feature (23)..(23): n is a, c, g, or u
gaggcngunucnagnagaucncng

SEQ ID NO: 128330 - RNA, 18 nt, Artificial Sequence
  Synthetic
guuuuguacagcaacaug

SEQ ID NO: 128331 - RNA, 19 nt, Artificial Sequence
  Synthetic
gguuuuguacagcaacaug

SEQ ID NO: 128332 - RNA, 20 nt, Artificial Sequence
  Synthetic
agguuuuguacagcaacaug

SEQ ID NO: 128333 - RNA, 21 nt, Artificial Sequence
  Synthetic
uagguuuuguacagcaacaug

SEQ ID NO: 128334 - RNA, 22 nt, Artificial Sequence
  Synthetic
guagguuuuguacagcaacaug

SEQ ID NO: 128335 - RNA, 23 nt, Artificial Sequence
  Synthetic
cguagguuuuguacagcaacaug

SEQ ID NO: 128336 - RNA, 24 nt, Artificial Sequence
  Synthetic
ccguagguuuuguacagcaacaug

SEQ ID NO: 128337 - RNA, 18 nt, Artificial Sequence
  Synthetic
aggcauagcagcaggaug

SEQ ID NO: 128338 - RNA, 19 nt, Artificial Sequence
  Synthetic
gaggcauagcagcaggaug

SEQ ID NO: 128339 - RNA, 20 nt, Artificial Sequence
  Synthetic
ugaggcauagcagcaggaug

SEQ ID NO: 128340 - RNA, 21 nt, Artificial Sequence
  Synthetic
augaggcauagcagcaggaug

SEQ ID NO: 128341 - RNA, 22 nt, Artificial Sequence
  Synthetic
gaugaggcauagcagcaggaug

SEQ ID NO: 128342 - RNA, 23 nt, Artificial Sequence
  Synthetic
agaugaggcauagcagcaggaug

SEQ ID NO: 128343 - RNA, 24 nt, Artificial Sequence
  Synthetic
aagaugaggcauagcagcaggaug

SEQ ID NO: 128344 - RNA, 18 nt, Artificial Sequence
  Synthetic
  misc_feature (13)..(13): n is a, c, g, or u
uugccugagugcnguaug

SEQ ID NO: 128345 - RNA, 19 nt, Artificial Sequence
  Synthetic
  misc_feature (14)..(14): n is a, c, g, or u
cuugccugagugcnguaug

SEQ ID NO: 128346 - RNA, 20 nt, Artificial Sequence
  Synthetic
  misc_feature (15)..(15): n is a, c, g, or u
gcuugccugagugcnguaug

SEQ ID NO: 128347 - RNA, 21 nt, Artificial Sequence
  Synthetic
  misc_feature (16)..(16): n is a, c, g, or u
ggcuugccugagugcnguaug

SEQ ID NO: 128348 - RNA, 22 nt, Artificial Sequence
  Synthetic
  misc_feature (17)..(17): n is a, c, g, or u
uggcuugccugagugcnguaug

SEQ ID NO: 128349 - RNA, 23 nt, Artificial Sequence
  Synthetic
  misc_feature (18)..(18): n is a, c, g, or u
auggcuugccugagugcnguaug

SEQ ID NO: 128350 - RNA, 24 nt, Artificial Sequence
  Synthetic
  misc_feature (19)..(19): n is a, c, g, or u
aauggcuugccugagugcnguaug

SEQ ID NO: 128351 - RNA, 18 nt, Artificial Sequence
  Synthetic
uugguggucuauaggcug

SEQ ID NO: 128352 - RNA, 19 nt, Artificial Sequence
  Synthetic
uuugguggucuauaggcug

SEQ ID NO: 128353 - RNA, 20 nt, Artificial Sequence
  Synthetic
auuugguggucuauaggcug

SEQ ID NO: 128354 - RNA, 21 nt, Artificial Sequence
  Synthetic
cauuugguggucuauaggcug

SEQ ID NO: 128355 - RNA, 22 nt, Artificial Sequence
  Synthetic
gcauuugguggucuauaggcug

SEQ ID NO: 128356 - RNA, 23 nt, Artificial Sequence
  Synthetic
ggcauuugguggucuauaggcug

SEQ ID NO: 128357 - RNA, 24 nt, Artificial Sequence
  Synthetic
gggcauuugguggucuauaggcug

SEQ ID NO: 128358 - RNA, 18 nt, Artificial Sequence
  Synthetic
gaccuugggcaggaucug

SEQ ID NO: 128359 - RNA, 19 nt, Artificial Sequence
  Synthetic
agaccuugggcaggaucug

SEQ ID NO: 128360 - RNA, 20 nt, Artificial Sequence
  Synthetic
aagaccuugggcaggaucug

SEQ ID NO: 128361 - RNA, 21 nt, Artificial Sequence
  Synthetic
uaagaccuugggcaggaucug

SEQ ID NO: 128362 - RNA, 22 nt, Artificial Sequence
  Synthetic
guaagaccuugggcaggaucug

SEQ ID NO: 128363 - RNA, 23 nt, Artificial Sequence
  Synthetic
uguaagaccuugggcaggaucug

SEQ ID NO: 128364 - RNA, 24 nt, Artificial Sequence
  Synthetic
auguaagaccuugggcaggaucug

SEQ ID NO: 128365 - RNA, 18 nt, Artificial Sequence
  Synthetic
  misc_feature (1)..(1): n is a, c, g, or u
ncugaaagccaaacagug

SEQ ID NO: 128366 - RNA, 19 nt, Artificial Sequence
  Synthetic
  misc_feature (2)..(2): n is a, c, g, or u
ancugaaagccaaacagug

SEQ ID NO: 128367 - RNA, 20 nt, Artificial Sequence
  Synthetic
  misc_feature (3)..(3): n is a, c, g, or u
uancugaaagccaaacagug

SEQ ID NO: 128368 - RNA, 21 nt, Artificial Sequence
  Synthetic
  misc_feature (4)..(4): n is a, c, g, or u
auancugaaagccaaacagug

SEQ ID NO: 128369 - RNA, 22 nt, Artificial Sequence
  Synthetic
  misc_feature (5)..(5): n is a, c, g, or u
uauancugaaagccaaacagug

SEQ ID NO: 128370 - RNA, 23 nt, Artificial Sequence
  Synthetic
  misc_feature (6)..(6): n is a, c, g, or u
auauancugaaagccaaacagug

SEQ ID NO: 128371 - RNA, 24 nt, Artificial Sequence
  Synthetic
  misc_feature (7)..(7): n is a, c, g, or u
cauauancugaaagccaaacagug

SEQ ID NO: 128372 - RNA, 18 nt, Artificial Sequence
  Synthetic
uggucuccaugcaacgug

SEQ ID NO: 128373 - RNA, 19 nt, Artificial Sequence
  Synthetic
guggucuccaugcaacgug

SEQ ID NO: 128374 - RNA, 20 nt, Artificial Sequence
  Synthetic
gguggucuccaugcaacgug

SEQ ID NO: 128375 - RNA, 21 nt, Artificial Sequence
  Synthetic
cgguggucuccaugcaacgug

SEQ ID NO: 128376 - RNA, 22 nt, Artificial Sequence
  Synthetic
acgguggucuccaugcaacgug

SEQ ID NO: 128377 - RNA, 23 nt, Artificial Sequence
  Synthetic
cacgguggucuccaugcaacgug

SEQ ID NO: 128378 - RNA, 24 nt, Artificial Sequence
  Synthetic
ucacgguggucuccaugcaacgug

SEQ ID NO: 128379 - RNA, 18 nt, Artificial Sequence
  Synthetic
gacugucucuuagaggug

SEQ ID NO: 128380 - RNA, 19 nt, Artificial Sequence
  Synthetic
ugacugucucuuagaggug

SEQ ID NO: 128381 - RNA, 20 nt, Artificial Sequence
  Synthetic
augacugucucuuagaggug

SEQ ID NO: 128382 - RNA, 21 nt, Artificial Sequence
  Synthetic
gaugacugucucuuagaggug

SEQ ID NO: 128383 - RNA, 22 nt, Artificial Sequence
  Synthetic
ggaugacugucucuuagaggug

SEQ ID NO: 128384 - RNA, 23 nt, Artificial Sequence
  Synthetic
aggaugacugucucuuagaggug

SEQ ID NO: 128385 - RNA, 24 nt, Artificial Sequence
  Synthetic
gaggaugacugucucuuagaggug

SEQ ID NO: 128386 - RNA, 18 nt, Artificial Sequence
  Synthetic
  misc_feature (16)..(16): n is a, c, g, or u
ccugacucugggaucnug

SEQ ID NO: 128387 - RNA, 19 nt, Artificial Sequence
  Synthetic
  misc_feature (17)..(17): n is a, c, g, or u
cccugacucugggaucnug

SEQ ID NO: 128388 - RNA, 20 nt, Artificial Sequence
  Synthetic
  misc_feature (18)..(18): n is a, c, g, or u
ccccugacucugggaucnug

SEQ ID NO: 128389 - RNA, 21 nt, Artificial Sequence
  Synthetic
  misc_feature (1)..(1): n is a, c, g, or u
  misc_feature (19)..(19): n is a, c, g, or u
nccccugacucugggaucnug

SEQ ID NO: 128390 - RNA, 22 nt, Artificial Sequence
  Synthetic
  misc_feature (2)..(2): n is a, c, g, or u
  misc_feature (20)..(20): n is a, c, g, or u
gnccccugacucugggaucnug

SEQ ID NO: 128391 - RNA, 23 nt, Artificial Sequence
  Synthetic
  misc_feature (3)..(3): n is a, c, g, or u
  misc_feature (21)..(21): n is a, c, g, or u
agnccccugacucugggaucnug

SEQ ID NO: 128392 - RNA, 24 nt, Artificial Sequence
  Synthetic
  misc_feature (4)..(4): n is a, c, g, or u
  misc_feature (22)..(22): n is a, c, g, or u
cagnccccugacucugggaucnug

SEQ ID NO: 128393 - RNA, 18 nt, Artificial Sequence
  Synthetic
gauaaccaggacaaauug

SEQ ID NO: 128394 - RNA, 19 nt, Artificial Sequence
  Synthetic
cgauaaccaggacaaauug

SEQ ID NO: 128395 - RNA, 20 nt, Artificial Sequence
  Synthetic
gcgauaaccaggacaaauug

SEQ ID NO: 128396 - RNA, 21 nt, Artificial Sequence
  Synthetic
agcgauaaccaggacaaauug

SEQ ID NO: 128397 - RNA, 22 nt, Artificial Sequence
  Synthetic
cagcgauaaccaggacaaauug

SEQ ID NO: 128398 - RNA, 23 nt, Artificial Sequence
  Synthetic
ccagcgauaaccaggacaaauug

SEQ ID NO: 128399 - RNA, 24 nt, Artificial Sequence
  Synthetic
uccagcgauaaccaggacaaauug

SEQ ID NO: 128400 - RNA, 18 nt, Artificial Sequence
  Synthetic
ggucggucguugacauug

SEQ ID NO: 128401 - RNA, 19 nt, Artificial Sequence
  Synthetic
aggucggucguugacauug

SEQ ID NO: 128402 - RNA, 20 nt, Artificial Sequence
  Synthetic
aaggucggucguugacauug

SEQ ID NO: 128403 - RNA, 21 nt, Artificial Sequence
  Synthetic
caaggucggucguugacauug

SEQ ID NO: 128404 - RNA, 22 nt, Artificial Sequence
  Synthetic
ucaaggucggucguugacauug

SEQ ID NO: 128405 - RNA, 23 nt, Artificial Sequence
  Synthetic
cucaaggucggucguugacauug

SEQ ID NO: 128406 - RNA, 24 nt, Artificial Sequence
  Synthetic
ccucaaggucggucguugacauug

SEQ ID NO: 128407 - RNA, 18 nt, Artificial Sequence
  Synthetic
  misc_feature (10)..(10): n is a, c, g, or u
caguccucgnggagauug

SEQ ID NO: 128408 - RNA, 19 nt, Artificial Sequence
  Synthetic
  misc_feature (11)..(11): n is a, c, g, or u
ccaguccucgnggagauug

SEQ ID NO: 128409 - RNA, 20 nt, Artificial Sequence
  Synthetic
  misc_feature (12)..(12): n is a, c, g, or u
cccaguccucgnggagauug

SEQ ID NO: 128410 - RNA, 21 nt, Artificial Sequence
  Synthetic
  misc_feature (13)..(13): n is a, c, g, or u
ccccaguccucgnggagauug

SEQ ID NO: 128411 - RNA, 22 nt, Artificial Sequence
  Synthetic
  misc_feature (14)..(14): n is a, c, g, or u
uccccaguccucgnggagauug

SEQ ID NO: 128412 - RNA, 23 nt, Artificial Sequence
  Synthetic
  misc_feature (15)..(15): n is a, c, g, or u
guccccaguccucgnggagauug

SEQ ID NO: 128413 - RNA, 24 nt, Artificial Sequence
  Synthetic
  misc_feature (16)..(16): n is a, c, g, or u
gguccccaguccucgnggagauug

SEQ ID NO: 128414 - RNA, 18 nt, Artificial Sequence
  Synthetic
cuuccugacugccgauug

SEQ ID NO: 128415 - RNA, 19 nt, Artificial Sequence
  Synthetic
ccuuccugacugccgauug

SEQ ID NO: 128416 - RNA, 20 nt, Artificial Sequence
  Synthetic
gccuuccugacugccgauug

SEQ ID NO: 128417 - RNA, 21 nt, Artificial Sequence
  Synthetic
ugccuuccugacugccgauug

SEQ ID NO: 128418 - RNA, 22 nt, Artificial Sequence
  Synthetic
cugccuuccugacugccgauug

SEQ ID NO: 128419 - RNA, 23 nt, Artificial Sequence
  Synthetic
gcugccuuccugacugccgauug

SEQ ID NO: 128420 - RNA, 24 nt, Artificial Sequence
  Synthetic
ggcugccuuccugacugccgauug

SEQ ID NO: 128421 - RNA, 18 nt, Artificial Sequence
  Synthetic
  misc_feature (1)..(2): n is a, c, g, or u
nnuggccagugguccuug

SEQ ID NO: 128422 - RNA, 19 nt, Artificial Sequence
  Synthetic
  misc_feature (2)..(3): n is a, c, g, or u
unnuggccagugguccuug

SEQ ID NO: 128423 - RNA, 20 nt, Artificial Sequence
  Synthetic
  misc_feature (3)..(4): n is a, c, g, or u
cunnuggccagugguccuug

SEQ ID NO: 128424 - RNA, 21 nt, Artificial Sequence
  Synthetic
  misc_feature (4)..(5): n is a, c, g, or u
gcunnuggccagugguccuug

SEQ ID NO: 128425 - RNA, 22 nt, Artificial Sequence
  Synthetic
  misc_feature (5)..(6): n is a, c, g, or u
ggcunnuggccagugguccuug

SEQ ID NO: 128426 - RNA, 23 nt, Artificial Sequence
  Synthetic
  misc_feature (6)..(7): n is a, c, g, or u
uggcunnuggccagugguccuug

SEQ ID NO: 128427 - RNA, 24 nt, Artificial Sequence
  Synthetic
  misc_feature (7)..(8): n is a, c, g, or u
uuggcunnuggccagugguccuug

SEQ ID NO: 128428 - RNA, 18 nt, Artificial Sequence
  Synthetic
  misc_feature (7)..(7): n is a, c, g, or u
gggaucnugcagagcuug

SEQ ID NO: 128429 - RNA, 19 nt, Artificial Sequence
  Synthetic
  misc_feature (8)..(8): n is a, c, g, or u
ugggaucnugcagagcuug

SEQ ID NO: 128430 - RNA, 20 nt, Artificial Sequence
  Synthetic
  misc_feature (9)..(9): n is a, c, g, or u
cugggaucnugcagagcuug

SEQ ID NO: 128431 - RNA, 21 nt, Artificial Sequence
  Synthetic
  misc_feature (10)..(10): n is a, c, g, or u
ucugggaucnugcagagcuug

SEQ ID NO: 128432 - RNA, 22 nt, Artificial Sequence
  Synthetic
  misc_feature (11)..(11): n is a, c, g, or u
cucugggaucnugcagagcuug

SEQ ID NO: 128433 - RNA, 23 nt, Artificial Sequence
  Synthetic
  misc_feature (12)..(12): n is a, c, g, or u
acucugggaucnugcagagcuug

SEQ ID NO: 128434 - RNA, 24 nt, Artificial Sequence
  Synthetic
  misc_feature (13)..(13): n is a, c, g, or u
gacucugggaucnugcagagcuug

SEQ ID NO: 128435 - RNA, 18 nt, Artificial Sequence
  Synthetic
gaaaggccuuguaaguug

SEQ ID NO: 128436 - RNA, 19 nt, Artificial Sequence
  Synthetic
agaaaggccuuguaaguug

SEQ ID NO: 128437 - RNA, 20 nt, Artificial Sequence
  Synthetic
uagaaaggccuuguaaguug

SEQ ID NO: 128438 - RNA, 21 nt, Artificial Sequence
  Synthetic
uuagaaaggccuuguaaguug

SEQ ID NO: 128439 - RNA, 22 nt, Artificial Sequence
  Synthetic
cuuagaaaggccuuguaaguug

SEQ ID NO: 128440 - RNA, 23 nt, Artificial Sequence
  Synthetic
acuuagaaaggccuuguaaguug

SEQ ID NO: 128441 - RNA, 24 nt, Artificial Sequence
  Synthetic
uacuuagaaaggccuuguaaguug

SEQ ID NO: 128442 - RNA, 18 nt, Artificial Sequence
  Synthetic
  misc_feature (18)..(18): n is a, c, g, or u
acuaguaaacugagccan

SEQ ID NO: 128443 - RNA, 19 nt, Artificial Sequence
  Synthetic
  misc_feature (19)..(19): n is a, c, g, or u
cacuaguaaacugagccan

SEQ ID NO: 128444 - RNA, 20 nt, Artificial Sequence
  Synthetic
  misc_feature (20)..(20): n is a, c, g, or u
gcacuaguaaacugagccan

SEQ ID NO: 128445 - RNA, 21 nt, Artificial Sequence
  Synthetic
  misc_feature (21)..(21): n is a, c, g, or u
ggcacuaguaaacugagccan

SEQ ID NO: 128446 - RNA, 22 nt, Artificial Sequence
  Synthetic
  misc_feature (22)..(22): n is a, c, g, or u
uggcacuaguaaacugagccan

SEQ ID NO: 128447 - RNA, 23 nt, Artificial Sequence
  Synthetic
  misc_feature (23)..(23): n is a, c, g, or u
auggcacuaguaaacugagccan

SEQ ID NO: 128448 - RNA, 24 nt, Artificial Sequence
  Synthetic
  misc_feature (24)..(24): n is a, c, g, or u
aauggcacuaguaaacugagccan

SEQ ID NO: 128449 - RNA, 18 nt, Artificial Sequence
  Synthetic
  misc_feature (18)..(18): n is a, c, g, or u
accacaucauccauauan

SEQ ID NO: 128450 - RNA, 19 nt, Artificial Sequence
  Synthetic
  misc_feature (19)..(19): n is a, c, g, or u
uaccacaucauccauauan

SEQ ID NO: 128451 - RNA, 20 nt, Artificial Sequence
  Synthetic
  misc_feature (20)..(20): n is a, c, g, or u
auaccacaucauccauauan

SEQ ID NO: 128452 - RNA, 21 nt, Artificial Sequence
  Synthetic
  misc_feature (21)..(21): n is a, c, g, or u
aauaccacaucauccauauan

SEQ ID NO: 128453 - RNA, 22 nt, Artificial Sequence
  Synthetic
  misc_feature (22)..(22): n is a, c, g, or u
caauaccacaucauccauauan

SEQ ID NO: 128454 - RNA, 23 nt, Artificial Sequence
  Synthetic
  misc_feature (23)..(23): n is a, c, g, or u
ccaauaccacaucauccauauan

SEQ ID NO: 128455 - RNA, 24 nt, Artificial Sequence
  Synthetic
  misc_feature (24)..(24): n is a, c, g, or u
cccaauaccacaucauccauauan

SEQ ID NO: 128456 - RNA, 18 nt, Artificial Sequence
  Synthetic
  misc_feature (9)..(9): n is a, c, g, or u
  misc_feature (15)..(15): n is a, c, g, or u
  misc_feature (18)..(18): n is a, c, g, or u
acagaauunucagunccn

SEQ ID NO: 128457 - RNA, 19 nt, Artificial Sequence
  Synthetic
  misc_feature (10)..(10): n is a, c, g, or u
  misc_feature (16)..(16): n is a, c, g, or u
  misc_feature (19)..(19): n is a, c, g, or u
gacagaauunucagunccn

SEQ ID NO: 128458 - RNA, 20 nt, Artificial Sequence
  Synthetic
  misc_feature (11)..(11): n is a, c, g, or u
  misc_feature (17)..(17): n is a, c, g, or u
  misc_feature (20)..(20): n is a, c, g, or u
cgacagaauunucagunccn

SEQ ID NO: 128459 - RNA, 21 nt, Artificial Sequence
  Synthetic
  misc_feature (12)..(12): n is a, c, g, or u
  misc_feature (18)..(18): n is a, c, g, or u
  misc_feature (21)..(21): n is a, c, g, or u
acgacagaauunucagunccn

SEQ ID NO: 128460 - RNA, 22 nt, Artificial Sequence
  Synthetic
  misc_feature (13)..(13): n is a, c, g, or u
  misc_feature (19)..(19): n is a, c, g, or u
  misc_feature (22)..(22): n is a, c, g, or u
gacgacagaauunucagunccn

SEQ ID NO: 128461 - RNA, 23 nt, Artificial Sequence
  Synthetic
  misc_feature (14)..(14): n is a, c, g, or u
  misc_feature (20)..(20): n is a, c, g, or u
  misc_feature (23)..(23): n is a, c, g, or u
ggacgacagaauunucagunccn

SEQ ID NO: 128462 - RNA, 24 nt, Artificial Sequence
  Synthetic
  misc_feature (15)..(15): n is a, c, g, or u
  misc_feature (21)..(21): n is a, c, g, or u
  misc_feature (24)..(24): n is a, c, g, or u
aggacgacagaauunucagunccn

SEQ ID NO: 128463 - RNA, 18 nt, Artificial Sequence
  Synthetic
  misc_feature (15)..(15): n is a, c, g, or u
  misc_feature (18)..(18): n is a, c, g, or u
agagcuugguggaangcn

SEQ ID NO: 128464 - RNA, 19 nt, Artificial Sequence
  Synthetic
  misc_feature (16)..(16): n is a, c, g, or u
  misc_feature (19)..(19): n is a, c, g, or u
cagagcuugguggaangcn

SEQ ID NO: 128465 - RNA, 20 nt, Artificial Sequence
  Synthetic
  misc_feature (17)..(17): n is a, c, g, or u
  misc_feature (20)..(20): n is a, c, g, or u
gcagagcuugguggaangcn

SEQ ID NO: 128466 - RNA, 21 nt, Artificial Sequence
  Synthetic
  misc_feature (18)..(18): n is a, c, g, or u
  misc_feature (21)..(21): n is a, c, g, or u
ugcagagcuugguggaangcn

SEQ ID NO: 128467 - RNA, 22 nt, Artificial Sequence
  Synthetic
  misc_feature (1)..(1): n is a, c, g, or u
  misc_feature (19)..(19): n is a, c, g, or u
  misc_feature (22)..(22): n is a, c, g, or u
nugcagagcuugguggaangcn

SEQ ID NO: 128468 - RNA, 23 nt, Artificial Sequence
  Synthetic
  misc_feature (2)..(2): n is a, c, g, or u
  misc_feature (20)..(20): n is a, c, g, or u
  misc_feature (23)..(23): n is a, c, g, or u
cnugcagagcuugguggaangcn

SEQ ID NO: 128469 - RNA, 24 nt, Artificial Sequence
  Synthetic
  misc_feature (3)..(3): n is a, c, g, or u
  misc_feature (21)..(21): n is a, c, g, or u
  misc_feature (24)..(24): n is a, c, g, or u
ucnugcagagcuugguggaangcn

SEQ ID NO: 128470 - RNA, 18 nt, Artificial Sequence
  Synthetic
  misc_feature (18)..(18): n is a, c, g, or u
agucccaagcggccccgn

SEQ ID NO: 128471 - RNA, 19 nt, Artificial Sequence
  Synthetic
  misc_feature (19)..(19): n is a, c, g, or u
gagucccaagcggccccgn

SEQ ID NO: 128472 - RNA, 20 nt, Artificial Sequence
  Synthetic
  misc_feature (20)..(20): n is a, c, g, or u
agagucccaagcggccccgn

SEQ ID NO: 128473 - RNA, 21 nt, Artificial Sequence
  Synthetic
  misc_feature (1)..(1): n is a, c, g, or u
  misc_feature (21)..(21): n is a, c, g, or u
nagagucccaagcggccccgn

SEQ ID NO: 128474 - RNA, 22 nt, Artificial Sequence
  Synthetic
  misc_feature (2)..(2): n is a, c, g, or u
  misc_feature (22)..(22): n is a, c, g, or u
anagagucccaagcggccccgn

SEQ ID NO: 128475 - RNA, 23 nt, Artificial Sequence
  Synthetic
  misc_feature (3)..(3): n is a, c, g, or u
  misc_feature (23)..(23): n is a, c, g, or u
ganagagucccaagcggccccgn

SEQ ID NO: 128476 - RNA, 24 nt, Artificial Sequence
  Synthetic
  misc_feature (4)..(4): n is a, c, g, or u
  misc_feature (24)..(24): n is a, c, g, or u
cganagagucccaagcggccccgn

SEQ ID NO: 128477 - RNA, 18 nt, Artificial Sequence
  Synthetic
  misc_feature (18)..(18): n is a, c, g, or u
ggaaagaaucccagaggn

SEQ ID NO: 128478 - RNA, 19 nt, Artificial Sequence
  Synthetic
  misc_feature (19)..(19): n is a, c, g, or u
gggaaagaaucccagaggn

SEQ ID NO: 128479 - RNA, 20 nt, Artificial Sequence
  Synthetic
  misc_feature (20)..(20): n is a, c, g, or u
cgggaaagaaucccagaggn

SEQ ID NO: 128480 - RNA, 21 nt, Artificial Sequence
  Synthetic
  misc_feature (21)..(21): n is a, c, g, or u
ucgggaaagaaucccagaggn

SEQ ID NO: 128481 - RNA, 22 nt, Artificial Sequence
  Synthetic
  misc_feature (22)..(22): n is a, c, g, or u
aucgggaaagaaucccagaggn

SEQ ID NO: 128482 - RNA, 23 nt, Artificial Sequence
  Synthetic
  misc_feature (23)..(23): n is a, c, g, or u
gaucgggaaagaaucccagaggn

SEQ ID NO: 128483 - RNA, 24 nt, Artificial Sequence
  Synthetic
  misc_feature (24)..(24): n is a, c, g, or u
ugaucgggaaagaaucccagaggn

SEQ ID NO: 128484 - RNA, 18 nt, Artificial Sequence
  Synthetic
gcgauaaccaggacaaau

SEQ ID NO: 128485 - RNA, 19 nt, Artificial Sequence
  Synthetic
agcgauaaccaggacaaau

SEQ ID NO: 128486 - RNA, 20 nt, Artificial Sequence
  Synthetic
cagcgauaaccaggacaaau

SEQ ID NO: 128487 - RNA, 21 nt, Artificial Sequence
  Synthetic
ccagcgauaaccaggacaaau

SEQ ID NO: 128488 - RNA, 22 nt, Artificial Sequence
  Synthetic
uccagcgauaaccaggacaaau

SEQ ID NO: 128489 - RNA, 23 nt, Artificial Sequence
  Synthetic
auccagcgauaaccaggacaaau

SEQ ID NO: 128490 - RNA, 24 nt, Artificial Sequence
  Synthetic
cauccagcgauaaccaggacaaau

SEQ ID NO: 128491 - RNA, 18 nt, Artificial Sequence
  Synthetic
uaauccagaagaaccaau

SEQ ID NO: 128492 - RNA, 19 nt, Artificial Sequence
  Synthetic
auaauccagaagaaccaau

SEQ ID NO: 128493 - RNA, 20 nt, Artificial Sequence
  Synthetic
gauaauccagaagaaccaau

SEQ ID NO: 128494 - RNA, 21 nt, Artificial Sequence
  Synthetic
ugauaauccagaagaaccaau

SEQ ID NO: 128495 - RNA, 22 nt, Artificial Sequence
  Synthetic
uugauaauccagaagaaccaau

SEQ ID NO: 128496 - RNA, 23 nt, Artificial Sequence
  Synthetic
cuugauaauccagaagaaccaau

SEQ ID NO: 128497 - RNA, 24 nt, Artificial Sequence
  Synthetic
ccuugauaauccagaagaaccaau

SEQ ID NO: 128498 - RNA, 18 nt, Artificial Sequence
  Synthetic
  misc_feature (7)..(7): n is a, c, g, or u
uguugungauccuggaau

SEQ ID NO: 128499 - RNA, 19 nt, Artificial Sequence
  Synthetic
  misc_feature (8)..(8): n is a, c, g, or u
uuguugungauccuggaau

SEQ ID NO: 128500 - RNA, 20 nt, Artificial Sequence
  Synthetic
  misc_feature (9)..(9): n is a, c, g, or u
guuguugungauccuggaau

SEQ ID NO: 128501 - RNA, 21 nt, Artificial Sequence
  Synthetic
  misc_feature (10)..(10): n is a, c, g, or u
gguuguugungauccuggaau

SEQ ID NO: 128502 - RNA, 22 nt, Artificial Sequence
  Synthetic
  misc_feature (11)..(11): n is a, c, g, or u
ugguuguugungauccuggaau

SEQ ID NO: 128503 - RNA, 23 nt, Artificial Sequence
  Synthetic
  misc_feature (12)..(12): n is a, c, g, or u
cugguuguugungauccuggaau

SEQ ID NO: 128504 - RNA, 24 nt, Artificial Sequence
  Synthetic
  misc_feature (13)..(13): n is a, c, g, or u
acugguuguugungauccuggaau

SEQ ID NO: 128505 - RNA, 18 nt, Artificial Sequence
  Synthetic
gguuuuguacagcaacau

SEQ ID NO: 128506 - RNA, 19 nt, Artificial Sequence
  Synthetic
agguuuuguacagcaacau

SEQ ID NO: 128507 - RNA, 20 nt, Artificial Sequence
  Synthetic
uagguuuuguacagcaacau

SEQ ID NO: 128508 - RNA, 21 nt, Artificial Sequence
  Synthetic
guagguuuuguacagcaacau

SEQ ID NO: 128509 - RNA, 22 nt, Artificial Sequence
  Synthetic
cguagguuuuguacagcaacau

SEQ ID NO: 128510 - RNA, 23 nt, Artificial Sequence
  Synthetic
ccguagguuuuguacagcaacau

SEQ ID NO: 128511 - RNA, 24 nt, Artificial Sequence
  Synthetic
uccguagguuuuguacagcaacau

SEQ ID NO: 128512 - RNA, 18 nt, Artificial Sequence
  Synthetic
cggaaguguugauaagau

SEQ ID NO: 128513 - RNA, 19 nt, Artificial Sequence
  Synthetic
ccggaaguguugauaagau

SEQ ID NO: 128514 - RNA, 20 nt, Artificial Sequence
  Synthetic
uccggaaguguugauaagau

SEQ ID NO: 128515 - RNA, 21 nt, Artificial Sequence
  Synthetic
uuccggaaguguugauaagau

SEQ ID NO: 128516 - RNA, 22 nt, Artificial Sequence
  Synthetic
uuuccggaaguguugauaagau

SEQ ID NO: 128517 - RNA, 23 nt, Artificial Sequence
  Synthetic
guuuccggaaguguugauaagau

SEQ ID NO: 128518 - RNA, 24 nt, Artificial Sequence
  Synthetic
aguuuccggaaguguugauaagau

SEQ ID NO: 128519 - RNA, 18 nt, Artificial Sequence
  Synthetic
gcacacggaccggcagau

SEQ ID NO: 128520 - RNA, 19 nt, Artificial Sequence
  Synthetic
ugcacacggaccggcagau

SEQ ID NO: 128521 - RNA, 20 nt, Artificial Sequence
  Synthetic
gugcacacggaccggcagau

SEQ ID NO: 128522 - RNA, 21 nt, Artificial Sequence
  Synthetic
agugcacacggaccggcagau

SEQ ID NO: 128523 - RNA, 22 nt, Artificial Sequence
  Synthetic
aagugcacacggaccggcagau

SEQ ID NO: 128524 - RNA, 23 nt, Artificial Sequence
  Synthetic
gaagugcacacggaccggcagau

SEQ ID NO: 128525 - RNA, 24 nt, Artificial Sequence
  Synthetic
cgaagugcacacggaccggcagau

SEQ ID NO: 128526 - RNA, 18 nt, Artificial Sequence
  Synthetic
  misc_feature (3)..(3): n is a, c, g, or u
cgnggagauugacgagau

SEQ ID NO: 128527 - RNA, 19 nt, Artificial Sequence
  Synthetic
  misc_feature (4)..(4): n is a, c, g, or u
ucgnggagauugacgagau

SEQ ID NO: 128528 - RNA, 20 nt, Artificial Sequence
  Synthetic
  misc_feature (5)..(5): n is a, c, g, or u
cucgnggagauugacgagau

SEQ ID NO: 128529 - RNA, 21 nt, Artificial Sequence
  Synthetic
  misc_feature (6)..(6): n is a, c, g, or u
ccucgnggagauugacgagau

SEQ ID NO: 128530 - RNA, 22 nt, Artificial Sequence
  Synthetic
  misc_feature (7)..(7): n is a, c, g, or u
uccucgnggagauugacgagau

SEQ ID NO: 128531 - RNA, 23 nt, Artificial Sequence
  Synthetic
  misc_feature (8)..(8): n is a, c, g, or u
guccucgnggagauugacgagau

SEQ ID NO: 128532 - RNA, 24 nt, Artificial Sequence
  Synthetic
  misc_feature (9)..(9): n is a, c, g, or u
aguccucgnggagauugacgagau

SEQ ID NO: 128533 - RNA, 18 nt, Artificial Sequence
  Synthetic
caggguccaacugaugau

SEQ ID NO: 128534 - RNA, 19 nt, Artificial Sequence
  Synthetic
gcaggguccaacugaugau

SEQ ID NO: 128535 - RNA, 20 nt, Artificial Sequence
  Synthetic
ugcaggguccaacugaugau

SEQ ID NO: 128536 - RNA, 21 nt, Artificial Sequence
  Synthetic
augcaggguccaacugaugau

SEQ ID NO: 128537 - RNA, 22 nt, Artificial Sequence
  Synthetic
aaugcaggguccaacugaugau

SEQ ID NO: 128538 - RNA, 23 nt, Artificial Sequence
  Synthetic
gaaugcaggguccaacugaugau

SEQ ID NO: 128539 - RNA, 24 nt, Artificial Sequence
  Synthetic
cgaaugcaggguccaacugaugau

SEQ ID NO: 128540 - RNA, 18 nt, Artificial Sequence
  Synthetic
aggagguuggugagugau

SEQ ID NO: 128541 - RNA, 19 nt, Artificial Sequence
  Synthetic
caggagguuggugagugau

SEQ ID NO: 128542 - RNA, 20 nt, Artificial Sequence
  Synthetic
acaggagguuggugagugau

SEQ ID NO: 128543 - RNA, 21 nt, Artificial Sequence
  Synthetic
gacaggagguuggugagugau

SEQ ID NO: 128544 - RNA, 22 nt, Artificial Sequence
  Synthetic
ggacaggagguuggugagugau

SEQ ID NO: 128545 - RNA, 23 nt, Artificial Sequence
  Synthetic
aggacaggagguuggugagugau

SEQ ID NO: 128546 - RNA, 24 nt, Artificial Sequence
  Synthetic
gaggacaggagguuggugagugau

SEQ ID NO: 128547 - RNA, 18 nt, Artificial Sequence
  Synthetic
  misc_feature (16)..(16): n is a, c, g, or u
aaaaguaaggcaaganau

SEQ ID NO: 128548 - RNA, 19 nt, Artificial Sequence
  Synthetic
  misc_feature (17)..(17): n is a, c, g, or u
caaaaguaaggcaaganau

SEQ ID NO: 128549 - RNA, 20 nt, Artificial Sequence
  Synthetic
  misc_feature (18)..(18): n is a, c, g, or u
ccaaaaguaaggcaaganau

SEQ ID NO: 128550 - RNA, 21 nt, Artificial Sequence
  Synthetic
  misc_feature (19)..(19): n is a, c, g, or u
uccaaaaguaaggcaaganau

SEQ ID NO: 128551 - RNA, 22 nt, Artificial Sequence
  Synthetic
  misc_feature (20)..(20): n is a, c, g, or u
uuccaaaaguaaggcaaganau

SEQ ID NO: 128552 - RNA, 23 nt, Artificial Sequence
  Synthetic
  misc_feature (21)..(21): n is a, c, g, or u
cuuccaaaaguaaggcaaganau

SEQ ID NO: 128553 - RNA, 24 nt, Artificial Sequence
  Synthetic
  misc_feature (22)..(22): n is a, c, g, or u
ucuuccaaaaguaaggcaaganau

SEQ ID NO: 128554 - RNA, 18 nt, Artificial Sequence
  Synthetic
agaugugagaggcaauau

SEQ ID NO: 128555 - RNA, 19 nt, Artificial Sequence
  Synthetic
gagaugugagaggcaauau

SEQ ID NO: 128556 - RNA, 20 nt, Artificial Sequence
  Synthetic
cgagaugugagaggcaauau

SEQ ID NO: 128557 - RNA, 21 nt, Artificial Sequence
  Synthetic
acgagaugugagaggcaauau

SEQ ID NO: 128558 - RNA, 22 nt, Artificial Sequence
  Synthetic
gacgagaugugagaggcaauau

SEQ ID NO: 128559 - RNA, 23 nt, Artificial Sequence
  Synthetic
ugacgagaugugagaggcaauau

SEQ ID NO: 128560 - RNA, 24 nt, Artificial Sequence
  Synthetic
uugacgagaugugagaggcaauau

SEQ ID NO: 128561 - RNA, 18 nt, Artificial Sequence
  Synthetic
ggagugcgaauccacacu

SEQ ID NO: 128562 - RNA, 19 nt, Artificial Sequence
  Synthetic
aggagugcgaauccacacu

SEQ ID NO: 128563 - RNA, 20 nt, Artificial Sequence
  Synthetic
gaggagugcgaauccacacu

SEQ ID NO: 128564 - RNA, 21 nt, Artificial Sequence
  Synthetic
ggaggagugcgaauccacacu

SEQ ID NO: 128565 - RNA, 22 nt, Artificial Sequence
  Synthetic
uggaggagugcgaauccacacu

SEQ ID NO: 128566 - RNA, 23 nt, Artificial Sequence
  Synthetic
cuggaggagugcgaauccacacu

SEQ ID NO: 128567 - RNA, 24 nt, Artificial Sequence
  Synthetic
gcuggaggagugcgaauccacacu

SEQ ID NO: 128568 - RNA, 18 nt, Artificial Sequence
  Synthetic
  misc_feature (9)..(9): n is a, c, g, or u
aaauacagnccccugacu

SEQ ID NO: 128569 - RNA, 19 nt, Artificial Sequence
  Synthetic
  misc_feature (10)..(10): n is a, c, g, or u
aaaauacagnccccugacu

SEQ ID NO: 128570 - RNA, 20 nt, Artificial Sequence
  Synthetic
  misc_feature (11)..(11): n is a, c, g, or u
gaaaauacagnccccugacu

SEQ ID NO: 128571 - RNA, 21 nt, Artificial Sequence
  Synthetic
  misc_feature (12)..(12): n is a, c, g, or u
ggaaaauacagnccccugacu

SEQ ID NO: 128572 - RNA, 22 nt, Artificial Sequence
  Synthetic
  misc_feature (13)..(13): n is a, c, g, or u
aggaaaauacagnccccugacu

SEQ ID NO: 128573 - RNA, 23 nt, Artificial Sequence
  Synthetic
  misc_feature (14)..(14): n is a, c, g, or u
caggaaaauacagnccccugacu

SEQ ID NO: 128574 - RNA, 24 nt, Artificial Sequence
  Synthetic
  misc_feature (15)..(15): n is a, c, g, or u
gcaggaaaauacagnccccugacu

SEQ ID NO: 128575 - RNA, 18 nt, Artificial Sequence
  Synthetic
  misc_feature (7)..(7): n is a, c, g, or u
guucaunuacuguuuacu

SEQ ID NO: 128576 - RNA, 19 nt, Artificial Sequence
  Synthetic
  misc_feature (8)..(8): n is a, c, g, or u
gguucaunuacuguuuacu

SEQ ID NO: 128577 - RNA, 20 nt, Artificial Sequence
  Synthetic
  misc_feature (9)..(9): n is a, c, g, or u
agguucaunuacuguuuacu

SEQ ID NO: 128578 - RNA, 21 nt, Artificial Sequence
  Synthetic
  misc_feature (10)..(10): n is a, c, g, or u
aagguucaunuacuguuuacu

SEQ ID NO: 128579 - RNA, 22 nt, Artificial Sequence
  Synthetic
  misc_feature (11)..(11): n is a, c, g, or u
aaagguucaunuacuguuuacu

SEQ ID NO: 128580 - RNA, 23 nt, Artificial Sequence
  Synthetic
  misc_feature (12)..(12): n is a, c, g, or u
uaaagguucaunuacuguuuacu

SEQ ID NO: 128581 - RNA, 24 nt, Artificial Sequence
  Synthetic
  misc_feature (13)..(13): n is a, c, g, or u
guaaagguucaunuacuguuuacu

SEQ ID NO: 128582 - RNA, 18 nt, Artificial Sequence
  Synthetic
acagugggggaaagcccu

SEQ ID NO: 128583 - RNA, 19 nt, Artificial Sequence
  Synthetic
aacagugggggaaagcccu

SEQ ID NO: 128584 - RNA, 20 nt, Artificial Sequence
  Synthetic
aaacagugggggaaagcccu

SEQ ID NO: 128585 - RNA, 21 nt, Artificial Sequence
  Synthetic
caaacagugggggaaagcccu

SEQ ID NO: 128586 - RNA, 22 nt, Artificial Sequence
  Synthetic
ccaaacagugggggaaagcccu

SEQ ID NO: 128587 - RNA, 23 nt, Artificial Sequence
  Synthetic
gccaaacagugggggaaagcccu

SEQ ID NO: 128588 - RNA, 24 nt, Artificial Sequence
  Synthetic
agccaaacagugggggaaagcccu

SEQ ID NO: 128589 - RNA, 18 nt, Artificial Sequence
  Synthetic
  misc_feature (1)..(1): n is a, c, g, or u
ncaauaugcccugagccu

SEQ ID NO: 128590 - RNA, 19 nt, Artificial Sequence
  Synthetic
  misc_feature (2)..(2): n is a, c, g, or u
gncaauaugcccugagccu

SEQ ID NO: 128591 - RNA, 20 nt, Artificial Sequence
  Synthetic
  misc_feature (1)..(1): n is a, c, g, or u
  misc_feature (3)..(3): n is a, c, g, or u
ngncaauaugcccugagccu

SEQ ID NO: 128592 - RNA, 21 nt, Artificial Sequence
  Synthetic
  misc_feature (2)..(2): n is a, c, g, or u
  misc_feature (4)..(4): n is a, c, g, or u
ungncaauaugcccugagccu

SEQ ID NO: 128593 - RNA, 22 nt, Artificial Sequence
  Synthetic
  misc_feature (3)..(3): n is a, c, g, or u
  misc_feature (5)..(5): n is a, c, g, or u
gungncaauaugcccugagccu

SEQ ID NO: 128594 - RNA, 23 nt, Artificial Sequence
  Synthetic
  misc_feature (4)..(4): n is a, c, g, or u
  misc_feature (6)..(6): n is a, c, g, or u
ugungncaauaugcccugagccu

SEQ ID NO: 128595 - RNA, 24 nt, Artificial Sequence
  Synthetic
  misc_feature (5)..(5): n is a, c, g, or u
  misc_feature (7)..(7): n is a, c, g, or u
cugungncaauaugcccugagccu

SEQ ID NO: 128596 - RNA, 18 nt, Artificial Sequence
  Synthetic
  misc_feature (5)..(5): n is a, c, g, or u
gccanccaaggcacagcu

SEQ ID NO: 128597 - RNA, 19 nt, Artificial Sequence
  Synthetic
  misc_feature (6)..(6): n is a, c, g, or u
agccanccaaggcacagcu

SEQ ID NO: 128598 - RNA, 20 nt, Artificial Sequence
  Synthetic
  misc_feature (7)..(7): n is a, c, g, or u
aagccanccaaggcacagcu

SEQ ID NO: 128599 - RNA, 21 nt, Artificial Sequence
  Synthetic
  misc_feature (8)..(8): n is a, c, g, or u
aaagccanccaaggcacagcu

SEQ ID NO: 128600 - RNA, 22 nt, Artificial Sequence
  Synthetic
  misc_feature (9)..(9): n is a, c, g, or u
caaagccanccaaggcacagcu

SEQ ID NO: 128601 - RNA, 23 nt, Artificial Sequence
  Synthetic
  misc_feature (10)..(10): n is a, c, g, or u
ccaaagccanccaaggcacagcu

SEQ ID NO: 128602 - RNA, 24 nt, Artificial Sequence
  Synthetic
  misc_feature (11)..(11): n is a, c, g, or u
cccaaagccanccaaggcacagcu

SEQ ID NO: 128603 - RNA, 18 nt, Artificial Sequence
  Synthetic
  misc_feature (1)..(1): n is a, c, g, or u
nuuugcuccagaccggcu

SEQ ID NO: 128604 - RNA, 19 nt, Artificial Sequence
  Synthetic
  misc_feature (2)..(2): n is a, c, g, or u
gnuuugcuccagaccggcu

SEQ ID NO: 128605 - RNA, 20 nt, Artificial Sequence
  Synthetic
  misc_feature (3)..(3): n is a, c, g, or u
agnuuugcuccagaccggcu

SEQ ID NO: 128606 - RNA, 21 nt, Artificial Sequence
  Synthetic
  misc_feature (4)..(4): n is a, c, g, or u
gagnuuugcuccagaccggcu

SEQ ID NO: 128607 - RNA, 22 nt, Artificial Sequence
  Synthetic
  misc_feature (5)..(5): n is a, c, g, or u
ugagnuuugcuccagaccggcu

SEQ ID NO: 128608 - RNA, 23 nt, Artificial Sequence
  Synthetic
  misc_feature (6)..(6): n is a, c, g, or u
augagnuuugcuccagaccggcu

SEQ ID NO: 128609 - RNA, 24 nt, Artificial Sequence
  Synthetic
  misc_feature (1)..(1): n is a, c, g, or u
  misc_feature (7)..(7): n is a, c, g, or u
naugagnuuugcuccagaccggcu

SEQ ID NO: 128610 - RNA, 18 nt, Artificial Sequence
  Synthetic
ggugaggugagcaaugcu

SEQ ID NO: 128611 - RNA, 19 nt, Artificial Sequence
  Synthetic
uggugaggugagcaaugcu

SEQ ID NO: 128612 - RNA, 20 nt, Artificial Sequence
  Synthetic
auggugaggugagcaaugcu

SEQ ID NO: 128613 - RNA, 21 nt, Artificial Sequence
  Synthetic
uauggugaggugagcaaugcu

SEQ ID NO: 128614 - RNA, 22 nt, Artificial Sequence
  Synthetic
guauggugaggugagcaaugcu

SEQ ID NO: 128615 - RNA, 23 nt, Artificial Sequence
  Synthetic
  misc_feature (1)..(1): n is a, c, g, or u
nguauggugaggugagcaaugcu

SEQ ID NO: 128616 - RNA, 24 nt, Artificial Sequence
  Synthetic
  misc_feature (2)..(2): n is a, c, g, or u
cnguauggugaggugagcaaugcu

SEQ ID NO: 128617 - RNA, 18 nt, Artificial Sequence
  Synthetic
cugaggaugacugucucu

SEQ ID NO: 128618 - RNA, 19 nt, Artificial Sequence
  Synthetic
ccugaggaugacugucucu

SEQ ID NO: 128619 - RNA, 20 nt, Artificial Sequence
  Synthetic
gccugaggaugacugucucu

SEQ ID NO: 128620 - RNA, 21 nt, Artificial Sequence
  Synthetic
ggccugaggaugacugucucu

SEQ ID NO: 128621 - RNA, 22 nt, Artificial Sequence
  Synthetic
uggccugaggaugacugucucu

SEQ ID NO: 128622 - RNA, 23 nt, Artificial Sequence
  Synthetic
auggccugaggaugacugucucu

SEQ ID NO: 128623 - RNA, 24 nt, Artificial Sequence
  Synthetic
cauggccugaggaugacugucucu

SEQ ID NO: 128624 - RNA, 18 nt, Artificial Sequence
  Synthetic
  misc_feature (3)..(3): n is a, c, g, or u
ucnuuaaacacacagucu

SEQ ID NO: 128625 - RNA, 19 nt, Artificial Sequence
  Synthetic
  misc_feature (4)..(4): n is a, c, g, or u
gucnuuaaacacacagucu

SEQ ID NO: 128626 - RNA, 20 nt, Artificial Sequence
  Synthetic
  misc_feature (5)..(5): n is a, c, g, or u
agucnuuaaacacacagucu

SEQ ID NO: 128627 - RNA, 21 nt, Artificial Sequence
  Synthetic
  misc_feature (6)..(6): n is a, c, g, or u
cagucnuuaaacacacagucu

SEQ ID NO: 128628 - RNA, 22 nt, Artificial Sequence
  Synthetic
  misc_feature (7)..(7): n is a, c, g, or u
ccagucnuuaaacacacagucu

SEQ ID NO: 128629 - RNA, 23 nt, Artificial Sequence
  Synthetic
  misc_feature (8)..(8): n is a, c, g, or u
cccagucnuuaaacacacagucu

SEQ ID NO: 128630 - RNA, 24 nt, Artificial Sequence
  Synthetic
  misc_feature (9)..(9): n is a, c, g, or u
ucccagucnuuaaacacacagucu

SEQ ID NO: 128631 - RNA, 18 nt, Artificial Sequence
  Synthetic
  misc_feature (13)..(13): n is a, c, g, or u
cgauugagaucuncgucu

SEQ ID NO: 128632 - RNA, 19 nt, Artificial Sequence
  Synthetic
  misc_feature (14)..(14): n is a, c, g, or u
gcgauugagaucuncgucu

SEQ ID NO: 128633 - RNA, 20 nt, Artificial Sequence
  Synthetic
  misc_feature (15)..(15): n is a, c, g, or u
ggcgauugagaucuncgucu

SEQ ID NO: 128634 - RNA, 21 nt, Artificial Sequence
  Synthetic
  misc_feature (16)..(16): n is a, c, g, or u
cggcgauugagaucuncgucu

SEQ ID NO: 128635 - RNA, 22 nt, Artificial Sequence
  Synthetic
  misc_feature (17)..(17): n is a, c, g, or u
gcggcgauugagaucuncgucu

SEQ ID NO: 128636 - RNA, 23 nt, Artificial Sequence
  Synthetic
  misc_feature (18)..(18): n is a, c, g, or u
cgcggcgauugagaucuncgucu

SEQ ID NO: 128637 - RNA, 24 nt, Artificial Sequence
  Synthetic
  misc_feature (19)..(19): n is a, c, g, or u
acgcggcgauugagaucuncgucu

SEQ ID NO: 128638 - RNA, 18 nt, Artificial Sequence
  Synthetic
cgagggaguucuucuucu

SEQ ID NO: 128639 - RNA, 19 nt, Artificial Sequence
  Synthetic
gcgagggaguucuucuucu

SEQ ID NO: 128640 - RNA, 20 nt, Artificial Sequence
  Synthetic
ggcgagggaguucuucuucu

SEQ ID NO: 128641 - RNA, 21 nt, Artificial Sequence
  Synthetic
aggcgagggaguucuucuucu

SEQ ID NO: 128642 - RNA, 22 nt, Artificial Sequence
  Synthetic
gaggcgagggaguucuucuucu

SEQ ID NO: 128643 - RNA, 23 nt, Artificial Sequence
  Synthetic
cgaggcgagggaguucuucuucu

SEQ ID NO: 128644 - RNA, 24 nt, Artificial Sequence
  Synthetic
gcgaggcgagggaguucuucuucu

SEQ ID NO: 128645 - RNA, 18 nt, Artificial Sequence
  Synthetic
  misc_feature (1)..(1): n is a, c, g, or u
ngacggaaggaaagaagu

SEQ ID NO: 128646 - RNA, 19 nt, Artificial Sequence
  Synthetic
  misc_feature (2)..(2): n is a, c, g, or u
cngacggaaggaaagaagu

SEQ ID NO: 128647 - RNA, 20 nt, Artificial Sequence
  Synthetic
  misc_feature (1)..(1): n is a, c, g, or u
  misc_feature (3)..(3): n is a, c, g, or u
ncngacggaaggaaagaagu

SEQ ID NO: 128648 - RNA, 21 nt, Artificial Sequence
  Synthetic
  misc_feature (2)..(2): n is a, c, g, or u
  misc_feature (4)..(4): n is a, c, g, or u
cncngacggaaggaaagaagu

SEQ ID NO: 128649 - RNA, 22 nt, Artificial Sequence
  Synthetic
  misc_feature (3)..(3): n is a, c, g, or u
  misc_feature (5)..(5): n is a, c, g, or u
ucncngacggaaggaaagaagu

SEQ ID NO: 128650 - RNA, 23 nt, Artificial Sequence
  Synthetic
  misc_feature (4)..(4): n is a, c, g, or u
  misc_feature (6)..(6): n is a, c, g, or u
aucncngacggaaggaaagaagu

SEQ ID NO: 128651 - RNA, 24 nt, Artificial Sequence
  Synthetic
  misc_feature (5)..(5): n is a, c, g, or u
  misc_feature (7)..(7): n is a, c, g, or u
gaucncngacggaaggaaagaagu

SEQ ID NO: 128652 - RNA, 18 nt, Artificial Sequence
  Synthetic
  misc_feature (2)..(2): n is a, c, g, or u
ancugaaagccaaacagu

SEQ ID NO: 128653 - RNA, 19 nt, Artificial Sequence
  Synthetic
  misc_feature (3)..(3): n is a, c, g, or u
uancugaaagccaaacagu

SEQ ID NO: 128654 - RNA, 20 nt, Artificial Sequence
  Synthetic
  misc_feature (4)..(4): n is a, c, g, or u
auancugaaagccaaacagu

SEQ ID NO: 128655 - RNA, 21 nt, Artificial Sequence
  Synthetic
  misc_feature (5)..(5): n is a, c, g, or u
uauancugaaagccaaacagu

SEQ ID NO: 128656 - RNA, 22 nt, Artificial Sequence
  Synthetic
  misc_feature (6)..(6): n is a, c, g, or u
auauancugaaagccaaacagu

SEQ ID NO: 128657 - RNA, 23 nt, Artificial Sequence
  Synthetic
  misc_feature (7)..(7): n is a, c, g, or u
cauauancugaaagccaaacagu

SEQ ID NO: 128658 - RNA, 24 nt, Artificial Sequence
  Synthetic
  misc_feature (8)..(8): n is a, c, g, or u
ccauauancugaaagccaaacagu

SEQ ID NO: 128659 - RNA, 18 nt, Artificial Sequence
  Synthetic
  misc_feature (4)..(4): n is a, c, g, or u
ucunuuuucauuuacagu

SEQ ID NO: 128660 - RNA, 19 nt, Artificial Sequence
  Synthetic
  misc_feature (5)..(5): n is a, c, g, or u
uucunuuuucauuuacagu

SEQ ID NO: 128661 - RNA, 20 nt, Artificial Sequence
  Synthetic
  misc_feature (6)..(6): n is a, c, g, or u
cuucunuuuucauuuacagu

SEQ ID NO: 128662 - RNA, 21 nt, Artificial Sequence
  Synthetic
  misc_feature (7)..(7): n is a, c, g, or u
ucuucunuuuucauuuacagu

SEQ ID NO: 128663 - RNA, 22 nt, Artificial Sequence
  Synthetic
  misc_feature (8)..(8): n is a, c, g, or u
aucuucunuuuucauuuacagu

SEQ ID NO: 128664 - RNA, 23 nt, Artificial Sequence
  Synthetic
  misc_feature (9)..(9): n is a, c, g, or u
aaucuucunuuuucauuuacagu

SEQ ID NO: 128665 - RNA, 24 nt, Artificial Sequence
  Synthetic
  misc_feature (1)..(1): n is a, c, g, or u
  misc_feature (10)..(10): n is a, c, g, or u
naaucuucunuuuucauuuacagu

SEQ ID NO: 128666 - RNA, 18 nt, Artificial Sequence
  Synthetic
uggugagugauuggaggu

SEQ ID NO: 128667 - RNA, 19 nt, Artificial Sequence
  Synthetic
uuggugagugauuggaggu

SEQ ID NO: 128668 - RNA, 20 nt, Artificial Sequence
  Synthetic
guuggugagugauuggaggu

SEQ ID NO: 128669 - RNA, 21 nt, Artificial Sequence
  Synthetic
gguuggugagugauuggaggu

SEQ ID NO: 128670 - RNA, 22 nt, Artificial Sequence
  Synthetic
agguuggugagugauuggaggu

SEQ ID NO: 128671 - RNA, 23 nt, Artificial Sequence
  Synthetic
gagguuggugagugauuggaggu

SEQ ID NO: 128672 - RNA, 24 nt, Artificial Sequence
  Synthetic
ggagguuggugagugauuggaggu

SEQ ID NO: 128673 - RNA, 18 nt, Artificial Sequence
  Synthetic
  misc_feature (1)..(1): n is a, c, g, or u
nggagauugacgagaugu

SEQ ID NO: 128674 - RNA, 19 nt, Artificial Sequence
  Synthetic
  misc_feature (2)..(2): n is a, c, g, or u
gnggagauugacgagaugu

SEQ ID NO: 128675 - RNA, 20 nt, Artificial Sequence
  Synthetic
  misc_feature (3)..(3): n is a, c, g, or u
cgnggagauugacgagaugu

SEQ ID NO: 128676 - RNA, 21 nt, Artificial Sequence
  Synthetic
  misc_feature (4)..(4): n is a, c, g, or u
ucgnggagauugacgagaugu

SEQ ID NO: 128677 - RNA, 22 nt, Artificial Sequence
  Synthetic
  misc_feature (5)..(5): n is a, c, g, or u
cucgnggagauugacgagaugu

SEQ ID NO: 128678 - RNA, 23 nt, Artificial Sequence
  Synthetic
  misc_feature (6)..(6): n is a, c, g, or u
ccucgnggagauugacgagaugu

SEQ ID NO: 128679 - RNA, 24 nt, Artificial Sequence
  Synthetic
  misc_feature (7)..(7): n is a, c, g, or u
uccucgnggagauugacgagaugu

SEQ ID NO: 128680 - RNA, 18 nt, Artificial Sequence
  Synthetic
  misc_feature (17)..(17): n is a, c, g, or u
gaaagaaucccagaggnu

SEQ ID NO: 128681 - RNA, 19 nt, Artificial Sequence
  Synthetic
  misc_feature (18)..(18): n is a, c, g, or u
ggaaagaaucccagaggnu

SEQ ID NO: 128682 - RNA, 20 nt, Artificial Sequence
  Synthetic
  misc_feature (19)..(19): n is a, c, g, or u
gggaaagaaucccagaggnu

SEQ ID NO: 128683 - RNA, 21 nt, Artificial Sequence
  Synthetic
  misc_feature (20)..(20): n is a, c, g, or u
cgggaaagaaucccagaggnu

SEQ ID NO: 128684 - RNA, 22 nt, Artificial Sequence
  Synthetic
  misc_feature (21)..(21): n is a, c, g, or u
ucgggaaagaaucccagaggnu

SEQ ID NO: 128685 - RNA, 23 nt, Artificial Sequence
  Synthetic
  misc_feature (22)..(22): n is a, c, g, or u
aucgggaaagaaucccagaggnu

SEQ ID NO: 128686 - RNA, 24 nt, Artificial Sequence
  Synthetic
  misc_feature (23)..(23): n is a, c, g, or u
gaucgggaaagaaucccagaggnu

SEQ ID NO: 128687 - RNA, 18 nt, Artificial Sequence
  Synthetic
  misc_feature (2)..(2): n is a, c, g, or u
  misc_feature (5)..(5): n is a, c, g, or u
  misc_feature (17)..(17): n is a, c, g, or u
cnucnuguaaaugaaunu

SEQ ID NO: 128688 - RNA, 19 nt, Artificial Sequence
  Synthetic
  misc_feature (3)..(3): n is a, c, g, or u
  misc_feature (6)..(6): n is a, c, g, or u
  misc_feature (18)..(18): n is a, c, g, or u
ucnucnuguaaaugaaunu

SEQ ID NO: 128689 - RNA, 20 nt, Artificial Sequence
  Synthetic
  misc_feature (4)..(4): n is a, c, g, or u
  misc_feature (7)..(7): n is a, c, g, or u
  misc_feature (19)..(19): n is a, c, g, or u
gucnucnuguaaaugaaunu

SEQ ID NO: 128690 - RNA, 21 nt, Artificial Sequence
  Synthetic
  misc_feature (5)..(5): n is a, c, g, or u
  misc_feature (8)..(8): n is a, c, g, or u
  misc_feature (20)..(20): n is a, c, g, or u
ugucnucnuguaaaugaaunu

SEQ ID NO: 128691 - RNA, 22 nt, Artificial Sequence
  Synthetic
  misc_feature (6)..(6): n is a, c, g, or u
  misc_feature (9)..(9): n is a, c, g, or u
  misc_feature (21)..(21): n is a, c, g, or u
augucnucnuguaaaugaaunu

SEQ ID NO: 128692 - RNA, 23 nt, Artificial Sequence
  Synthetic
  misc_feature (7)..(7): n is a, c, g, or u
  misc_feature (10)..(10): n is a, c, g, or u
  misc_feature (22)..(22): n is a, c, g, or u
aaugucnucnuguaaaugaaunu

SEQ ID NO: 128693 - RNA, 24 nt, Artificial Sequence
  Synthetic
  misc_feature (8)..(8): n is a, c, g, or u
  misc_feature (11)..(11): n is a, c, g, or u
  misc_feature (23)..(23): n is a, c, g, or u
uaaugucnucnuguaaaugaaunu

SEQ ID NO: 128694 - RNA, 18 nt, Artificial Sequence
  Synthetic
  misc_feature (3)..(3): n is a, c, g, or u
ugnucccccuagaaaauu

SEQ ID NO: 128695 - RNA, 19 nt, Artificial Sequence
  Synthetic
  misc_feature (4)..(4): n is a, c, g, or u
gugnucccccuagaaaauu

SEQ ID NO: 128696 - RNA, 20 nt, Artificial Sequence
  Synthetic
  misc_feature (5)..(5): n is a, c, g, or u
ggugnucccccuagaaaauu

SEQ ID NO: 128697 - RNA, 21 nt, Artificial Sequence
  Synthetic
  misc_feature (6)..(6): n is a, c, g, or u
gggugnucccccuagaaaauu

SEQ ID NO: 128698 - RNA, 22 nt, Artificial Sequence
  Synthetic
  misc_feature (7)..(7): n is a, c, g, or u
cgggugnucccccuagaaaauu

SEQ ID NO: 128699 - RNA, 23 nt, Artificial Sequence
  Synthetic
  misc_feature (8)..(8): n is a, c, g, or u
acgggugnucccccuagaaaauu

SEQ ID NO: 128700 - RNA, 24 nt, Artificial Sequence
  Synthetic
  misc_feature (9)..(9): n is a, c, g, or u
cacgggugnucccccuagaaaauu

SEQ ID NO: 128701 - RNA, 18 nt, Artificial Sequence
  Synthetic
ucuagacucugcgguauu

SEQ ID NO: 128702 - RNA, 19 nt, Artificial Sequence
  Synthetic
gucuagacucugcgguauu

SEQ ID NO: 128703 - RNA, 20 nt, Artificial Sequence
  Synthetic
agucuagacucugcgguauu

SEQ ID NO: 128704 - RNA, 21 nt, Artificial Sequence
  Synthetic
gagucuagacucugcgguauu

SEQ ID NO: 128705 - RNA, 22 nt, Artificial Sequence
  Synthetic
cgagucuagacucugcgguauu

SEQ ID NO: 128706 - RNA, 23 nt, Artificial Sequence
  Synthetic
acgagucuagacucugcgguauu

SEQ ID NO: 128707 - RNA, 24 nt, Artificial Sequence
  Synthetic
cacgagucuagacucugcgguauu

SEQ ID NO: 128708 - RNA, 18 nt, Artificial Sequence
  Synthetic
ggugagugauuggagguu

SEQ ID NO: 128709 - RNA, 19 nt, Artificial Sequence
  Synthetic
uggugagugauuggagguu

SEQ ID NO: 128710 - RNA, 20 nt, Artificial Sequence
  Synthetic
uuggugagugauuggagguu

SEQ ID NO: 128711 - RNA, 21 nt, Artificial Sequence
  Synthetic
guuggugagugauuggagguu

SEQ ID NO: 128712 - RNA, 22 nt, Artificial Sequence
  Synthetic
gguuggugagugauuggagguu

SEQ ID NO: 128713 - RNA, 23 nt, Artificial Sequence
  Synthetic
agguuggugagugauuggagguu

SEQ ID NO: 128714 - RNA, 24 nt, Artificial Sequence
  Synthetic
gagguuggugagugauuggagguu

SEQ ID NO: 128715 - RNA, 18 nt, Artificial Sequence
  Synthetic
  misc_feature (3)..(4): n is a, c, g, or u
  misc_feature (7)..(7): n is a, c, g, or u
  misc_feature (16)..(16): n is a, c, g, or u
uannuancccaugaanuu

SEQ ID NO: 128716 - RNA, 19 nt, Artificial Sequence
  Synthetic
  misc_feature (4)..(5): n is a, c, g, or u
  misc_feature (8)..(8): n is a, c, g, or u
  misc_feature (17)..(17): n is a, c, g, or u
uuannuancccaugaanuu

SEQ ID NO: 128717 - RNA, 20 nt, Artificial Sequence
  Synthetic
  misc_feature (5)..(6): n is a, c, g, or u
  misc_feature (9)..(9): n is a, c, g, or u
  misc_feature (18)..(18): n is a, c, g, or u
auuannuancccaugaanuu

SEQ ID NO: 128718 - RNA, 21 nt, Artificial Sequence
  Synthetic
  misc_feature (6)..(7): n is a, c, g, or u
  misc_feature (10)..(10): n is a, c, g, or u
  misc_feature (19)..(19): n is a, c, g, or u
aauuannuancccaugaanuu

SEQ ID NO: 128719 - RNA, 22 nt, Artificial Sequence
  Synthetic
  misc_feature (7)..(8): n is a, c, g, or u
  misc_feature (11)..(11): n is a, c, g, or u
  misc_feature (20)..(20): n is a, c, g, or u
caauuannuancccaugaanuu

SEQ ID NO: 128720 - RNA, 23 nt, Artificial Sequence
  Synthetic
  misc_feature (8)..(9): n is a, c, g, or u
  misc_feature (12)..(12): n is a, c, g, or u
  misc_feature (21)..(21): n is a, c, g, or u
ccaauuannuancccaugaanuu

SEQ ID NO: 128721 - RNA, 24 nt, Artificial Sequence
  Synthetic
  misc_feature (9)..(10): n is a, c, g, or u
  misc_feature (13)..(13): n is a, c, g, or u
  misc_feature (22)..(22): n is a, c, g, or u
uccaauuannuancccaugaanuu

SEQ ID NO: 128722 - RNA, 18 nt, Artificial Sequence
  Synthetic
  misc_feature (16)..(16): n is a, c, g, or u
aaagaaucccagaggnuu

SEQ ID NO: 128723 - RNA, 19 nt, Artificial Sequence
  Synthetic
  misc_feature (17)..(17): n is a, c, g, or u
gaaagaaucccagaggnuu

SEQ ID NO: 128724 - RNA, 20 nt, Artificial Sequence
  Synthetic
  misc_feature (18)..(18): n is a, c, g, or u
ggaaagaaucccagaggnuu

SEQ ID NO: 128725 - RNA, 21 nt, Artificial Sequence
  Synthetic
  misc_feature (19)..(19): n is a, c, g, or u
gggaaagaaucccagaggnuu

SEQ ID NO: 128726 - RNA, 22 nt, Artificial Sequence
  Synthetic
  misc_feature (20)..(20): n is a, c, g, or u
cgggaaagaaucccagaggnuu

SEQ ID NO: 128727 - RNA, 23 nt, Artificial Sequence
  Synthetic
  misc_feature (21)..(21): n is a, c, g, or u
ucgggaaagaaucccagaggnuu

SEQ ID NO: 128728 - RNA, 24 nt, Artificial Sequence
  Synthetic
  misc_feature (22)..(22): n is a, c, g, or u
aucgggaaagaaucccagaggnuu

SEQ ID NO: 128729 - RNA, 18 nt, Artificial Sequence
  Synthetic
  misc_feature (1)..(1): n is a, c, g, or u
  misc_feature (4)..(4): n is a, c, g, or u
  misc_feature (16)..(16): n is a, c, g, or u
nucnuguaaaugaaunuu

SEQ ID NO: 128730 - RNA, 19 nt, Artificial Sequence
  Synthetic
  misc_feature (2)..(2): n is a, c, g, or u
  misc_feature (5)..(5): n is a, c, g, or u
  misc_feature (17)..(17): n is a, c, g, or u
cnucnuguaaaugaaunuu

SEQ ID NO: 128731 - RNA, 20 nt, Artificial Sequence
  Synthetic
  misc_feature (3)..(3): n is a, c, g, or u
  misc_feature (6)..(6): n is a, c, g, or u
  misc_feature (18)..(18): n is a, c, g, or u
ucnucnuguaaaugaaunuu

SEQ ID NO: 128732 - RNA, 21 nt, Artificial Sequence
  Synthetic
  misc_feature (4)..(4): n is a, c, g, or u
  misc_feature (7)..(7): n is a, c, g, or u
  misc_feature (19)..(19): n is a, c, g, or u
gucnucnuguaaaugaaunuu

SEQ ID NO: 128733 - RNA, 22 nt, Artificial Sequence
  Synthetic
  misc_feature (5)..(5): n is a, c, g, or u
  misc_feature (8)..(8): n is a, c, g, or u
  misc_feature (20)..(20): n is a, c, g, or u
ugucnucnuguaaaugaaunuu

SEQ ID NO: 128734 - RNA, 23 nt, Artificial Sequence
  Synthetic
  misc_feature (6)..(6): n is a, c, g, or u
  misc_feature (9)..(9): n is a, c, g, or u
  misc_feature (21)..(21): n is a, c, g, or u
augucnucnuguaaaugaaunuu

SEQ ID NO: 128735 - RNA, 24 nt, Artificial Sequence
  Synthetic
  misc_feature (7)..(7): n is a, c, g, or u
  misc_feature (10)..(10): n is a, c, g, or u
  misc_feature (22)..(22): n is a, c, g, or u
aaugucnucnuguaaaugaaunuu

SEQ ID NO: 128736 - RNA, 18 nt, Artificial Sequence
  Synthetic
auucguccccaugccuuu

SEQ ID NO: 128737 - RNA, 19 nt, Artificial Sequence
  Synthetic
gauucguccccaugccuuu

SEQ ID NO: 128738 - RNA, 20 nt, Artificial Sequence
  Synthetic
agauucguccccaugccuuu

SEQ ID NO: 128739 - RNA, 21 nt, Artificial Sequence
  Synthetic
aagauucguccccaugccuuu

SEQ ID NO: 128740 - RNA, 22 nt, Artificial Sequence
  Synthetic
aaagauucguccccaugccuuu

SEQ ID NO: 128741 - RNA, 23 nt, Artificial Sequence
  Synthetic
gaaagauucguccccaugccuuu

SEQ ID NO: 128742 - RNA, 24 nt, Artificial Sequence
  Synthetic
agaaagauucguccccaugccuuu

SEQ ID NO: 128743 - RNA, 18 nt, Artificial Sequence
  Synthetic
gucuaacaacaguaguuu

SEQ ID NO: 128744 - RNA, 19 nt, Artificial Sequence
  Synthetic
cgucuaacaacaguaguuu

SEQ ID NO: 128745 - RNA, 20 nt, Artificial Sequence
  Synthetic
ucgucuaacaacaguaguuu

SEQ ID NO: 128746 - RNA, 21 nt, Artificial Sequence
  Synthetic
gucgucuaacaacaguaguuu

SEQ ID NO: 128747 - RNA, 22 nt, Artificial Sequence
  Synthetic
cgucgucuaacaacaguaguuu

SEQ ID NO: 128748 - RNA, 23 nt, Artificial Sequence
  Synthetic
  misc_feature (1)..(1): n is a, c, g, or u
ncgucgucuaacaacaguaguuu

SEQ ID NO: 128749 - RNA, 24 nt, Artificial Sequence
  Synthetic
  misc_feature (2)..(2): n is a, c, g, or u
cncgucgucuaacaacaguaguuu

SEQ ID NO: 128750 - RNA, 18 nt, Artificial Sequence
  Synthetic
  misc_feature (2)..(3): n is a, c, g, or u
  misc_feature (6)..(6): n is a, c, g, or u
  misc_feature (15)..(15): n is a, c, g, or u
annuancccaugaanuuu

SEQ ID NO: 128751 - RNA, 19 nt, Artificial Sequence
  Synthetic
  misc_feature (3)..(4): n is a, c, g, or u
  misc_feature (7)..(7): n is a, c, g, or u
  misc_feature (16)..(16): n is a, c, g, or u
uannuancccaugaanuuu

SEQ ID NO: 128752 - RNA, 20 nt, Artificial Sequence
  Synthetic
  misc_feature (4)..(5): n is a, c, g, or u
  misc_feature (8)..(8): n is a, c, g, or u
  misc_feature (17)..(17): n is a, c, g, or u
uuannuancccaugaanuuu

SEQ ID NO: 128753 - RNA, 21 nt, Artificial Sequence
  Synthetic
  misc_feature (5)..(6): n is a, c, g, or u
  misc_feature (9)..(9): n is a, c, g, or u
  misc_feature (18)..(18): n is a, c, g, or u
auuannuancccaugaanuuu

SEQ ID NO: 128754 - RNA, 22 nt, Artificial Sequence
  Synthetic
  misc_feature (6)..(7): n is a, c, g, or u
  misc_feature (10)..(10): n is a, c, g, or u
  misc_feature (19)..(19): n is a, c, g, or u
aauuannuancccaugaanuuu

SEQ ID NO: 128755 - RNA, 23 nt, Artificial Sequence
  Synthetic
  misc_feature (7)..(8): n is a, c, g, or u
  misc_feature (11)..(11): n is a, c, g, or u
  misc_feature (20)..(20): n is a, c, g, or u
caauuannuancccaugaanuuu

SEQ ID NO: 128756 - RNA, 24 nt, Artificial Sequence
  Synthetic
  misc_feature (8)..(9): n is a, c, g, or u
  misc_feature (12)..(12): n is a, c, g, or u
  misc_feature (21)..(21): n is a, c, g, or u
ccaauuannuancccaugaanuuu

SEQ ID NO: 128757 - RNA, 18 nt, Artificial Sequence
  Synthetic
cacucccauagguauuuu

SEQ ID NO: 128758 - RNA, 19 nt, Artificial Sequence
  Synthetic
ccacucccauagguauuuu

SEQ ID NO: 128759 - RNA, 20 nt, Artificial Sequence
  Synthetic
cccacucccauagguauuuu

SEQ ID NO: 128760 - RNA, 21 nt, Artificial Sequence
  Synthetic
gcccacucccauagguauuuu

SEQ ID NO: 128761 - RNA, 22 nt, Artificial Sequence
  Synthetic
ggcccacucccauagguauuuu

SEQ ID NO: 128762 - RNA, 23 nt, Artificial Sequence
  Synthetic
aggcccacucccauagguauuuu

SEQ ID NO: 128763 - RNA, 24 nt, Artificial Sequence
  Synthetic
gaggcccacucccauagguauuuu

SEQ ID NO: 128764 - RNA, 18 nt, Artificial Sequence
  Synthetic
ucucacuguaaaugaaaa

SEQ ID NO: 128765 - RNA, 19 nt, Artificial Sequence
  Synthetic
cucucacuguaaaugaaaa

SEQ ID NO: 128766 - RNA, 20 nt, Artificial Sequence
  Synthetic
ccucucacuguaaaugaaaa

SEQ ID NO: 128767 - RNA, 21 nt, Artificial Sequence
  Synthetic
cccucucacuguaaaugaaaa

SEQ ID NO: 128768 - RNA, 22 nt, Artificial Sequence
  Synthetic
gcccucucacuguaaaugaaaa

SEQ ID NO: 128769 - RNA, 23 nt, Artificial Sequence
  Synthetic
ggcccucucacuguaaaugaaaa

SEQ ID NO: 128770 - RNA, 24 nt, Artificial Sequence
  Synthetic
  misc_feature (1)..(1): n is a, c, g, or u
nggcccucucacuguaaaugaaaa

SEQ ID NO: 128771 - RNA, 18 nt, Artificial Sequence
  Synthetic
gcccaaggucuuacauaa

SEQ ID NO: 128772 - RNA, 19 nt, Artificial Sequence
  Synthetic
ugcccaaggucuuacauaa

SEQ ID NO: 128773 - RNA, 20 nt, Artificial Sequence
  Synthetic
cugcccaaggucuuacauaa

SEQ ID NO: 128774 - RNA, 21 nt, Artificial Sequence
  Synthetic
ccugcccaaggucuuacauaa

SEQ ID NO: 128775 - RNA, 22 nt, Artificial Sequence
  Synthetic
uccugcccaaggucuuacauaa

SEQ ID NO: 128776 - RNA, 23 nt, Artificial Sequence
  Synthetic
auccugcccaaggucuuacauaa

SEQ ID NO: 128777 - RNA, 24 nt, Artificial Sequence
  Synthetic
gauccugcccaaggucuuacauaa

SEQ ID NO: 128778 - RNA, 18 nt, Artificial Sequence
  Synthetic
  misc_feature (7)..(7): n is a, c, g, or u
ggcuggnauucuauauaa

SEQ ID NO: 128779 - RNA, 19 nt, Artificial Sequence
  Synthetic
  misc_feature (8)..(8): n is a, c, g, or u
aggcuggnauucuauauaa

SEQ ID NO: 128780 - RNA, 20 nt, Artificial Sequence
  Synthetic
  misc_feature (9)..(9): n is a, c, g, or u
aaggcuggnauucuauauaa

SEQ ID NO: 128781 - RNA, 21 nt, Artificial Sequence
  Synthetic
  misc_feature (10)..(10): n is a, c, g, or u
gaaggcuggnauucuauauaa

SEQ ID NO: 128782 - RNA, 22 nt, Artificial Sequence
  Synthetic
  misc_feature (11)..(11): n is a, c, g, or u
ggaaggcuggnauucuauauaa

SEQ ID NO: 128783 - RNA, 23 nt, Artificial Sequence
  Synthetic
  misc_feature (12)..(12): n is a, c, g, or u
uggaaggcuggnauucuauauaa

SEQ ID NO: 128784 - RNA, 24 nt, Artificial Sequence
  Synthetic
  misc_feature (13)..(13): n is a, c, g, or u
uuggaaggcuggnauucuauauaa

SEQ ID NO: 128785 - RNA, 18 nt, Artificial Sequence
  Synthetic
  misc_feature (2)..(2): n is a, c, g, or u
unggcccucucacuguaa

SEQ ID NO: 128786 - RNA, 19 nt, Artificial Sequence
  Synthetic
  misc_feature (3)..(3): n is a, c, g, or u
gunggcccucucacuguaa

SEQ ID NO: 128787 - RNA, 20 nt, Artificial Sequence
  Synthetic
  misc_feature (4)..(4): n is a, c, g, or u
ugunggcccucucacuguaa

SEQ ID NO: 128788 - RNA, 21 nt, Artificial Sequence
  Synthetic
  misc_feature (5)..(5): n is a, c, g, or u
uugunggcccucucacuguaa

SEQ ID NO: 128789 - RNA, 22 nt, Artificial Sequence
  Synthetic
  misc_feature (6)..(6): n is a, c, g, or u
uuugunggcccucucacuguaa

SEQ ID NO: 128790 - RNA, 23 nt, Artificial Sequence
  Synthetic
  misc_feature (7)..(7): n is a, c, g, or u
auuugunggcccucucacuguaa

SEQ ID NO: 128791 - RNA, 24 nt, Artificial Sequence
  Synthetic
  misc_feature (8)..(8): n is a, c, g, or u
aauuugunggcccucucacuguaa

SEQ ID NO: 128792 - RNA, 18 nt, Artificial Sequence
  Synthetic
  misc_feature (2)..(2): n is a, c, g, or u
  misc_feature (11)..(11): n is a, c, g, or u
  misc_feature (14)..(15): n is a, c, g, or u
anuucaugggnuannuaa

SEQ ID NO: 128793 - RNA, 19 nt, Artificial Sequence
  Synthetic
  misc_feature (3)..(3): n is a, c, g, or u
  misc_feature (12)..(12): n is a, c, g, or u
  misc_feature (15)..(16): n is a, c, g, or u
aanuucaugggnuannuaa

SEQ ID NO: 128794 - RNA, 20 nt, Artificial Sequence
  Synthetic
  misc_feature (4)..(4): n is a, c, g, or u
  misc_feature (13)..(13): n is a, c, g, or u
  misc_feature (16)..(17): n is a, c, g, or u
aaanuucaugggnuannuaa

SEQ ID NO: 128795 - RNA, 21 nt, Artificial Sequence
  Synthetic
  misc_feature (5)..(5): n is a, c, g, or u
  misc_feature (14)..(14): n is a, c, g, or u
  misc_feature (17)..(18): n is a, c, g, or u
uaaanuucaugggnuannuaa

SEQ ID NO: 128796 - RNA, 22 nt, Artificial Sequence
  Synthetic
  misc_feature (6)..(6): n is a, c, g, or u
  misc_feature (15)..(15): n is a, c, g, or u
  misc_feature (18)..(19): n is a, c, g, or u
cuaaanuucaugggnuannuaa

SEQ ID NO: 128797 - RNA, 23 nt, Artificial Sequence
  Synthetic
  misc_feature (7)..(7): n is a, c, g, or u
  misc_feature (16)..(16): n is a, c, g, or u
  misc_feature (19)..(20): n is a, c, g, or u
ccuaaanuucaugggnuannuaa

SEQ ID NO: 128798 - RNA, 24 nt, Artificial Sequence
  Synthetic
  misc_feature (8)..(8): n is a, c, g, or u
  misc_feature (17)..(17): n is a, c, g, or u
  misc_feature (20)..(21): n is a, c, g, or u
cccuaaanuucaugggnuannuaa

SEQ ID NO: 128799 - RNA, 18 nt, Artificial Sequence
  Synthetic
  misc_feature (10)..(10): n is a, c, g, or u
  misc_feature (12)..(12): n is a, c, g, or u
gggacccugngncgaaca

SEQ ID NO: 128800 - RNA, 19 nt, Artificial Sequence
  Synthetic
  misc_feature (11)..(11): n is a, c, g, or u
  misc_feature (13)..(13): n is a, c, g, or u
ggggacccugngncgaaca

SEQ ID NO: 128801 - RNA, 20 nt, Artificial Sequence
  Synthetic
  misc_feature (12)..(12): n is a, c, g, or u
  misc_feature (14)..(14): n is a, c, g, or u
uggggacccugngncgaaca

SEQ ID NO: 128802 - RNA, 21 nt, Artificial Sequence
  Synthetic
  misc_feature (13)..(13): n is a, c, g, or u
  misc_feature (15)..(15): n is a, c, g, or u
cuggggacccugngncgaaca

SEQ ID NO: 128803 - RNA, 22 nt, Artificial Sequence
  Synthetic
  misc_feature (14)..(14): n is a, c, g, or u
  misc_feature (16)..(16): n is a, c, g, or u
acuggggacccugngncgaaca

SEQ ID NO: 128804 - RNA, 23 nt, Artificial Sequence
  Synthetic
  misc_feature (15)..(15): n is a, c, g, or u
  misc_feature (17)..(17): n is a, c, g, or u
gacuggggacccugngncgaaca

SEQ ID NO: 128805 - RNA, 24 nt, Artificial Sequence
  Synthetic
  misc_feature (16)..(16): n is a, c, g, or u
  misc_feature (18)..(18): n is a, c, g, or u
ggacuggggacccugngncgaaca

SEQ ID NO: 128806 - RNA, 18 nt, Artificial Sequence
  Synthetic
  misc_feature (7)..(7): n is a, c, g, or u
  misc_feature (10)..(11): n is a, c, g, or u
ugccgunccnnccgacca

SEQ ID NO: 128807 - RNA, 19 nt, Artificial Sequence
  Synthetic
  misc_feature (8)..(8): n is a, c, g, or u
  misc_feature (11)..(12): n is a, c, g, or u
cugccgunccnnccgacca

SEQ ID NO: 128808 - RNA, 20 nt, Artificial Sequence
  Synthetic
  misc_feature (9)..(9): n is a, c, g, or u
  misc_feature (12)..(13): n is a, c, g, or u
ucugccgunccnnccgacca

SEQ ID NO: 128809 - RNA, 21 nt, Artificial Sequence
  Synthetic
  misc_feature (10)..(10): n is a, c, g, or u
  misc_feature (13)..(14): n is a, c, g, or u
gucugccgunccnnccgacca

SEQ ID NO: 128810 - RNA, 22 nt, Artificial Sequence
  Synthetic
  misc_feature (11)..(11): n is a, c, g, or u
  misc_feature (14)..(15): n is a, c, g, or u
cgucugccgunccnnccgacca

SEQ ID NO: 128811 - RNA, 23 nt, Artificial Sequence
  Synthetic
  misc_feature (12)..(12): n is a, c, g, or u
  misc_feature (15)..(16): n is a, c, g, or u
ccgucugccgunccnnccgacca

SEQ ID NO: 128812 - RNA, 24 nt, Artificial Sequence
  Synthetic
  misc_feature (13)..(13): n is a, c, g, or u
  misc_feature (16)..(17): n is a, c, g, or u
uccgucugccgunccnnccgacca

SEQ ID NO: 128813 - RNA, 18 nt, Artificial Sequence
  Synthetic
caaaaccucgcaaaggca

SEQ ID NO: 128814 - RNA, 19 nt, Artificial Sequence
  Synthetic
ucaaaaccucgcaaaggca

SEQ ID NO: 128815 - RNA, 20 nt, Artificial Sequence
  Synthetic
aucaaaaccucgcaaaggca

SEQ ID NO: 128816 - RNA, 21 nt, Artificial Sequence
  Synthetic
caucaaaaccucgcaaaggca

SEQ ID NO: 128817 - RNA, 22 nt, Artificial Sequence
  Synthetic
ucaucaaaaccucgcaaaggca

SEQ ID NO: 128818 - RNA, 23 nt, Artificial Sequence
  Synthetic
gucaucaaaaccucgcaaaggca

SEQ ID NO: 128819 - RNA, 24 nt, Artificial Sequence
  Synthetic
ggucaucaaaaccucgcaaaggca

SEQ ID NO: 128820 - RNA, 18 nt, Artificial Sequence
  Synthetic
ucauccucaggccaugca

SEQ ID NO: 128821 - RNA, 19 nt, Artificial Sequence
  Synthetic
gucauccucaggccaugca

SEQ ID NO: 128822 - RNA, 20 nt, Artificial Sequence
  Synthetic
agucauccucaggccaugca

SEQ ID NO: 128823 - RNA, 21 nt, Artificial Sequence
  Synthetic
cagucauccucaggccaugca

SEQ ID NO: 128824 - RNA, 22 nt, Artificial Sequence
  Synthetic
acagucauccucaggccaugca

SEQ ID NO: 128825 - RNA, 23 nt, Artificial Sequence
  Synthetic
gacagucauccucaggccaugca

SEQ ID NO: 128826 - RNA, 24 nt, Artificial Sequence
  Synthetic
agacagucauccucaggccaugca

SEQ ID NO: 128827 - RNA, 18 nt, Artificial Sequence
  Synthetic
ucaccucugcacguugca

SEQ ID NO: 128828 - RNA, 19 nt, Artificial Sequence
  Synthetic
uucaccucugcacguugca

SEQ ID NO: 128829 - RNA, 20 nt, Artificial Sequence
  Synthetic
cuucaccucugcacguugca

SEQ ID NO: 128830 - RNA, 21 nt, Artificial Sequence
  Synthetic
gcuucaccucugcacguugca

SEQ ID NO: 128831 - RNA, 22 nt, Artificial Sequence
  Synthetic
cgcuucaccucugcacguugca

SEQ ID NO: 128832 - RNA, 23 nt, Artificial Sequence
  Synthetic
ucgcuucaccucugcacguugca

SEQ ID NO: 128833 - RNA, 24 nt, Artificial Sequence
  Synthetic
uucgcuucaccucugcacguugca

SEQ ID NO: 128834 - RNA, 18 nt, Artificial Sequence
  Synthetic
  misc_feature (16)..(16): n is a, c, g, or u
ggaacaagagcuacanca

SEQ ID NO: 128835 - RNA, 19 nt, Artificial Sequence
  Synthetic
  misc_feature (17)..(17): n is a, c, g, or u
gggaacaagagcuacanca

SEQ ID NO: 128836 - RNA, 20 nt, Artificial Sequence
  Synthetic
  misc_feature (18)..(18): n is a, c, g, or u
ugggaacaagagcuacanca

SEQ ID NO: 128837 - RNA, 21 nt, Artificial Sequence
  Synthetic
  misc_feature (19)..(19): n is a, c, g, or u
uugggaacaagagcuacanca

SEQ ID NO: 128838 - RNA, 22 nt, Artificial Sequence
  Synthetic
  misc_feature (20)..(20): n is a, c, g, or u
cuugggaacaagagcuacanca

SEQ ID NO: 128839 - RNA, 23 nt, Artificial Sequence
  Synthetic
  misc_feature (21)..(21): n is a, c, g, or u
ucuugggaacaagagcuacanca

SEQ ID NO: 128840 - RNA, 24 nt, Artificial Sequence
  Synthetic
  misc_feature (22)..(22): n is a, c, g, or u
uucuugggaacaagagcuacanca

SEQ ID NO: 128841 - RNA, 18 nt, Artificial Sequence
  Synthetic
  misc_feature (5)..(5): n is a, c, g, or u
cuggnauucuauauaaga

SEQ ID NO: 128842 - RNA, 19 nt, Artificial Sequence
  Synthetic
  misc_feature (6)..(6): n is a, c, g, or u
gcuggnauucuauauaaga

SEQ ID NO: 128843 - RNA, 20 nt, Artificial Sequence
  Synthetic
  misc_feature (7)..(7): n is a, c, g, or u
ggcuggnauucuauauaaga

SEQ ID NO: 128844 - RNA, 21 nt, Artificial Sequence
  Synthetic
  misc_feature (8)..(8): n is a, c, g, or u
aggcuggnauucuauauaaga

SEQ ID NO: 128845 - RNA, 22 nt, Artificial Sequence
  Synthetic
  misc_feature (9)..(9): n is a, c, g, or u
aaggcuggnauucuauauaaga

SEQ ID NO: 128846 - RNA, 23 nt, Artificial Sequence
  Synthetic
  misc_feature (10)..(10): n is a, c, g, or u
gaaggcuggnauucuauauaaga

SEQ ID NO: 128847 - RNA, 24 nt, Artificial Sequence
  Synthetic
  misc_feature (11)..(11): n is a, c, g, or u
ggaaggcuggnauucuauauaaga

SEQ ID NO: 128848 - RNA, 18 nt, Artificial Sequence
  Synthetic
  misc_feature (4)..(4): n is a, c, g, or u
caanucaaacaauccaga

SEQ ID NO: 128849 - RNA, 19 nt, Artificial Sequence
  Synthetic
  misc_feature (5)..(5): n is a, c, g, or u
ccaanucaaacaauccaga

SEQ ID NO: 128850 - RNA, 20 nt, Artificial Sequence
  Synthetic
  misc_feature (6)..(6): n is a, c, g, or u
gccaanucaaacaauccaga

SEQ ID NO: 128851 - RNA, 21 nt, Artificial Sequence
  Synthetic
  misc_feature (7)..(7): n is a, c, g, or u
agccaanucaaacaauccaga

SEQ ID NO: 128852 - RNA, 22 nt, Artificial Sequence
  Synthetic
  misc_feature (8)..(8): n is a, c, g, or u
gagccaanucaaacaauccaga

SEQ ID NO: 128853 - RNA, 23 nt, Artificial Sequence
  Synthetic
  misc_feature (9)..(9): n is a, c, g, or u
ggagccaanucaaacaauccaga

SEQ ID NO: 128854 - RNA, 24 nt, Artificial Sequence
  Synthetic
  misc_feature (10)..(10): n is a, c, g, or u
cggagccaanucaaacaauccaga

SEQ ID NO: 128855 - RNA, 18 nt, Artificial Sequence
  Synthetic
  misc_feature (12)..(12): n is a, c, g, or u
cgucaaucuccncgagga

SEQ ID NO: 128856 - RNA, 19 nt, Artificial Sequence
  Synthetic
  misc_feature (13)..(13): n is a, c, g, or u
ucgucaaucuccncgagga

SEQ ID NO: 128857 - RNA, 20 nt, Artificial Sequence
  Synthetic
  misc_feature (14)..(14): n is a, c, g, or u
cucgucaaucuccncgagga

SEQ ID NO: 128858 - RNA, 21 nt, Artificial Sequence
  Synthetic
  misc_feature (15)..(15): n is a, c, g, or u
ucucgucaaucuccncgagga

SEQ ID NO: 128859 - RNA, 22 nt, Artificial Sequence
  Synthetic
  misc_feature (16)..(16): n is a, c, g, or u
aucucgucaaucuccncgagga

SEQ ID NO: 128860 - RNA, 23 nt, Artificial Sequence
  Synthetic
  misc_feature (17)..(17): n is a, c, g, or u
caucucgucaaucuccncgagga

SEQ ID NO: 128861 - RNA, 24 nt, Artificial Sequence
  Synthetic
  misc_feature (18)..(18): n is a, c, g, or u
acaucucgucaaucuccncgagga

SEQ ID NO: 128862 - RNA, 18 nt, Artificial Sequence
  Synthetic
  misc_feature (1)..(2): n is a, c, g, or u
nnagccaaccagguagga

SEQ ID NO: 128863 - RNA, 19 nt, Artificial Sequence
  Synthetic
  misc_feature (2)..(3): n is a, c, g, or u
annagccaaccagguagga

SEQ ID NO: 128864 - RNA, 20 nt, Artificial Sequence
  Synthetic
  misc_feature (3)..(4): n is a, c, g, or u
cannagccaaccagguagga

SEQ ID NO: 128865 - RNA, 21 nt, Artificial Sequence
  Synthetic
  misc_feature (4)..(5): n is a, c, g, or u
ccannagccaaccagguagga

SEQ ID NO: 128866 - RNA, 22 nt, Artificial Sequence
  Synthetic
  misc_feature (5)..(6): n is a, c, g, or u
gccannagccaaccagguagga

SEQ ID NO: 128867 - RNA, 23 nt, Artificial Sequence
  Synthetic
  misc_feature (6)..(7): n is a, c, g, or u
ggccannagccaaccagguagga

SEQ ID NO: 128868 - RNA, 24 nt, Artificial Sequence
  Synthetic
  misc_feature (7)..(8): n is a, c, g, or u
uggccannagccaaccagguagga

SEQ ID NO: 128869 - RNA, 18 nt, Artificial Sequence
  Synthetic
cuguacaaaaccuacgga

SEQ ID NO: 128870 - RNA, 19 nt, Artificial Sequence
  Synthetic
gcuguacaaaaccuacgga

SEQ ID NO: 128871 - RNA, 20 nt, Artificial Sequence
  Synthetic
ugcuguacaaaaccuacgga

SEQ ID NO: 128872 - RNA, 21 nt, Artificial Sequence
  Synthetic
uugcuguacaaaaccuacgga

SEQ ID NO: 128873 - RNA, 22 nt, Artificial Sequence
  Synthetic
guugcuguacaaaaccuacgga

SEQ ID NO: 128874 - RNA, 23 nt, Artificial Sequence
  Synthetic
uguugcuguacaaaaccuacgga

SEQ ID NO: 128875 - RNA, 24 nt, Artificial Sequence
  Synthetic
auguugcuguacaaaaccuacgga

SEQ ID NO: 128876 - RNA, 18 nt, Artificial Sequence
  Synthetic
cgcaaaauaccuauggga

SEQ ID NO: 128877 - RNA, 19 nt, Artificial Sequence
  Synthetic
ucgcaaaauaccuauggga

SEQ ID NO: 128878 - RNA, 20 nt, Artificial Sequence
  Synthetic
uucgcaaaauaccuauggga

SEQ ID NO: 128879 - RNA, 21 nt, Artificial Sequence
  Synthetic
uuucgcaaaauaccuauggga

SEQ ID NO: 128880 - RNA, 22 nt, Artificial Sequence
  Synthetic
cuuucgcaaaauaccuauggga

SEQ ID NO: 128881 - RNA, 23 nt, Artificial Sequence
  Synthetic
gcuuucgcaaaauaccuauggga

SEQ ID NO: 128882 - RNA, 24 nt, Artificial Sequence
  Synthetic
ggcuuucgcaaaauaccuauggga

SEQ ID NO: 128883 - RNA, 18 nt, Artificial Sequence
  Synthetic
  misc_feature (16)..(16): n is a, c, g, or u
agacuguguguuuaanga

SEQ ID NO: 128884 - RNA, 19 nt, Artificial Sequence
  Synthetic
  misc_feature (17)..(17): n is a, c, g, or u
aagacuguguguuuaanga

SEQ ID NO: 128885 - RNA, 20 nt, Artificial Sequence
  Synthetic
  misc_feature (18)..(18): n is a, c, g, or u
aaagacuguguguuuaanga

SEQ ID NO: 128886 - RNA, 21 nt, Artificial Sequence
  Synthetic
  misc_feature (19)..(19): n is a, c, g, or u
caaagacuguguguuuaanga

SEQ ID NO: 128887 - RNA, 22 nt, Artificial Sequence
  Synthetic
  misc_feature (20)..(20): n is a, c, g, or u
ucaaagacuguguguuuaanga

SEQ ID NO: 128888 - RNA, 23 nt, Artificial Sequence
  Synthetic
  misc_feature (21)..(21): n is a, c, g, or u
uucaaagacuguguguuuaanga

SEQ ID NO: 128889 - RNA, 24 nt, Artificial Sequence
  Synthetic
  misc_feature (22)..(22): n is a, c, g, or u
cuucaaagacuguguguuuaanga

SEQ ID NO: 128890 - RNA, 18 nt, Artificial Sequence
  Synthetic
  misc_feature (16)..(16): n is a, c, g, or u
uguuguuagacgacgnga

SEQ ID NO: 128891 - RNA, 19 nt, Artificial Sequence
  Synthetic
  misc_feature (17)..(17): n is a, c, g, or u
cuguuguuagacgacgnga

SEQ ID NO: 128892 - RNA, 20 nt, Artificial Sequence
  Synthetic
  misc_feature (18)..(18): n is a, c, g, or u
acuguuguuagacgacgnga

SEQ ID NO: 128893 - RNA, 21 nt, Artificial Sequence
  Synthetic
  misc_feature (19)..(19): n is a, c, g, or u
uacuguuguuagacgacgnga

SEQ ID NO: 128894 - RNA, 22 nt, Artificial Sequence
  Synthetic
  misc_feature (20)..(20): n is a, c, g, or u
cuacuguuguuagacgacgnga

SEQ ID NO: 128895 - RNA, 23 nt, Artificial Sequence
  Synthetic
  misc_feature (21)..(21): n is a, c, g, or u
acuacuguuguuagacgacgnga

SEQ ID NO: 128896 - RNA, 24 nt, Artificial Sequence
  Synthetic
  misc_feature (22)..(22): n is a, c, g, or u
aacuacuguuguuagacgacgnga

SEQ ID NO: 128897 - RNA, 18 nt, Artificial Sequence
  Synthetic
  misc_feature (4)..(4): n is a, c, g, or u
  misc_feature (7)..(8): n is a, c, g, or u
  misc_feature (10)..(10): n is a, c, g, or u
ugunaanngnccuauuga

SEQ ID NO: 128898 - RNA, 19 nt, Artificial Sequence
  Synthetic
  misc_feature (5)..(5): n is a, c, g, or u
  misc_feature (8)..(9): n is a, c, g, or u
  misc_feature (11)..(11): n is a, c, g, or u
cugunaanngnccuauuga

SEQ ID NO: 128899 - RNA, 20 nt, Artificial Sequence
  Synthetic
  misc_feature (6)..(6): n is a, c, g, or u
  misc_feature (9)..(10): n is a, c, g, or u
  misc_feature (12)..(12): n is a, c, g, or u
ccugunaanngnccuauuga

SEQ ID NO: 128900 - RNA, 21 nt, Artificial Sequence
  Synthetic
  misc_feature (7)..(7): n is a, c, g, or u
  misc_feature (10)..(11): n is a, c, g, or u
  misc_feature (13)..(13): n is a, c, g, or u
uccugunaanngnccuauuga

SEQ ID NO: 128901 - RNA, 22 nt, Artificial Sequence
  Synthetic
  misc_feature (8)..(8): n is a, c, g, or u
  misc_feature (11)..(12): n is a, c, g, or u
  misc_feature (14)..(14): n is a, c, g, or u
uuccugunaanngnccuauuga

SEQ ID NO: 128902 - RNA, 23 nt, Artificial Sequence
  Synthetic
  misc_feature (9)..(9): n is a, c, g, or u
  misc_feature (12)..(13): n is a, c, g, or u
  misc_feature (15)..(15): n is a, c, g, or u
cuuccugunaanngnccuauuga

SEQ ID NO: 128903 - RNA, 24 nt, Artificial Sequence
  Synthetic
  misc_feature (10)..(10): n is a, c, g, or u
  misc_feature (13)..(14): n is a, c, g, or u
  misc_feature (16)..(16): n is a, c, g, or u
acuuccugunaanngnccuauuga

SEQ ID NO: 128904 - RNA, 18 nt, Artificial Sequence
  Synthetic
  misc_feature (14)..(14): n is a, c, g, or u
  misc_feature (17)..(17): n is a, c, g, or u
auaaggugggaaanuuna

SEQ ID NO: 128905 - RNA, 19 nt, Artificial Sequence
  Synthetic
  misc_feature (15)..(15): n is a, c, g, or u
  misc_feature (18)..(18): n is a, c, g, or u
cauaaggugggaaanuuna

SEQ ID NO: 128906 - RNA, 20 nt, Artificial Sequence
  Synthetic
  misc_feature (16)..(16): n is a, c, g, or u
  misc_feature (19)..(19): n is a, c, g, or u
ucauaaggugggaaanuuna

SEQ ID NO: 128907 - RNA, 21 nt, Artificial Sequence
  Synthetic
  misc_feature (17)..(17): n is a, c, g, or u
  misc_feature (20)..(20): n is a, c, g, or u
cucauaaggugggaaanuuna

SEQ ID NO: 128908 - RNA, 22 nt, Artificial Sequence
  Synthetic
  misc_feature (18)..(18): n is a, c, g, or u
  misc_feature (21)..(21): n is a, c, g, or u
acucauaaggugggaaanuuna

SEQ ID NO: 128909 - RNA, 23 nt, Artificial Sequence
  Synthetic
  misc_feature (19)..(19): n is a, c, g, or u
  misc_feature (22)..(22): n is a, c, g, or u
gacucauaaggugggaaanuuna

SEQ ID NO: 128910 - RNA, 24 nt, Artificial Sequence
  Synthetic
  misc_feature (20)..(20): n is a, c, g, or u
  misc_feature (23)..(23): n is a, c, g, or u
ggacucauaaggugggaaanuuna

SEQ ID NO: 128911 - RNA, 18 nt, Artificial Sequence
  Synthetic
gcuuucgcaaaauaccua

SEQ ID NO: 128912 - RNA, 19 nt, Artificial Sequence
  Synthetic
ggcuuucgcaaaauaccua

SEQ ID NO: 128913 - RNA, 20 nt, Artificial Sequence
  Synthetic
gggcuuucgcaaaauaccua

SEQ ID NO: 128914 - RNA, 21 nt, Artificial Sequence
  Synthetic
ugggcuuucgcaaaauaccua

SEQ ID NO: 128915 - RNA, 22 nt, Artificial Sequence
  Synthetic
  misc_feature (1)..(1): n is a, c, g, or u
nugggcuuucgcaaaauaccua

SEQ ID NO: 128916 - RNA, 23 nt, Artificial Sequence
  Synthetic
  misc_feature (2)..(2): n is a, c, g, or u
cnugggcuuucgcaaaauaccua

SEQ ID NO: 128917 - RNA, 24 nt, Artificial Sequence
  Synthetic
  misc_feature (3)..(3): n is a, c, g, or u
ucnugggcuuucgcaaaauaccua

SEQ ID NO: 128918 - RNA, 18 nt, Artificial Sequence
  Synthetic
acuucucucaauuuucua

SEQ ID NO: 128919 - RNA, 19 nt, Artificial Sequence
  Synthetic
gacuucucucaauuuucua

SEQ ID NO: 128920 - RNA, 20 nt, Artificial Sequence
  Synthetic
ggacuucucucaauuuucua

SEQ ID NO: 128921 - RNA, 21 nt, Artificial Sequence
  Synthetic
uggacuucucucaauuuucua

SEQ ID NO: 128922 - RNA, 22 nt, Artificial Sequence
  Synthetic
guggacuucucucaauuuucua

SEQ ID NO: 128923 - RNA, 23 nt, Artificial Sequence
  Synthetic
gguggacuucucucaauuuucua

SEQ ID NO: 128924 - RNA, 24 nt, Artificial Sequence
  Synthetic
ugguggacuucucucaauuuucua

SEQ ID NO: 128925 - RNA, 18 nt, Artificial Sequence
  Synthetic
  misc_feature (5)..(5): n is a, c, g, or u
gaucnacaacaaccagua

SEQ ID NO: 128926 - RNA, 19 nt, Artificial Sequence
  Synthetic
  misc_feature (6)..(6): n is a, c, g, or u
ggaucnacaacaaccagua

SEQ ID NO: 128927 - RNA, 20 nt, Artificial Sequence
  Synthetic
  misc_feature (7)..(7): n is a, c, g, or u
aggaucnacaacaaccagua

SEQ ID NO: 128928 - RNA, 21 nt, Artificial Sequence
  Synthetic
  misc_feature (8)..(8): n is a, c, g, or u
caggaucnacaacaaccagua

SEQ ID NO: 128929 - RNA, 22 nt, Artificial Sequence
  Synthetic
  misc_feature (9)..(9): n is a, c, g, or u
ccaggaucnacaacaaccagua

SEQ ID NO: 128930 - RNA, 23 nt, Artificial Sequence
  Synthetic
  misc_feature (10)..(10): n is a, c, g, or u
uccaggaucnacaacaaccagua

SEQ ID NO: 128931 - RNA, 24 nt, Artificial Sequence
  Synthetic
  misc_feature (11)..(11): n is a, c, g, or u
uuccaggaucnacaacaaccagua

SEQ ID NO: 128932 - RNA, 18 nt, Artificial Sequence
  Synthetic
uauauggaugauguggua

SEQ ID NO: 128933 - RNA, 19 nt, Artificial Sequence
  Synthetic
  misc_feature (1)..(1): n is a, c, g, or u
nuauauggaugauguggua

SEQ ID NO: 128934 - RNA, 20 nt, Artificial Sequence
  Synthetic
  misc_feature (2)..(2): n is a, c, g, or u
gnuauauggaugauguggua

SEQ ID NO: 128935 - RNA, 21 nt, Artificial Sequence
  Synthetic
  misc_feature (3)..(3): n is a, c, g, or u
agnuauauggaugauguggua

SEQ ID NO: 128936 - RNA, 22 nt, Artificial Sequence
  Synthetic
  misc_feature (4)..(4): n is a, c, g, or u
cagnuauauggaugauguggua

SEQ ID NO: 128937 - RNA, 23 nt, Artificial Sequence
  Synthetic
  misc_feature (5)..(5): n is a, c, g, or u
ucagnuauauggaugauguggua

SEQ ID NO: 128938 - RNA, 24 nt, Artificial Sequence
  Synthetic
  misc_feature (6)..(6): n is a, c, g, or u
uucagnuauauggaugauguggua

SEQ ID NO: 128939 - RNA, 18 nt, Artificial Sequence
  Synthetic
  misc_feature (11)..(11): n is a, c, g, or u
  misc_feature (13)..(13): n is a, c, g, or u
ggggacccugngncgaac

SEQ ID NO: 128940 - RNA, 19 nt, Artificial Sequence
  Synthetic
  misc_feature (12)..(12): n is a, c, g, or u
  misc_feature (14)..(14): n is a, c, g, or u
uggggacccugngncgaac

SEQ ID NO: 128941 - RNA, 20 nt, Artificial Sequence
  Synthetic
  misc_feature (13)..(13): n is a, c, g, or u
  misc_feature (15)..(15): n is a, c, g, or u
cuggggacccugngncgaac

SEQ ID NO: 128942 - RNA, 21 nt, Artificial Sequence
  Synthetic
  misc_feature (14)..(14): n is a, c, g, or u
  misc_feature (16)..(16): n is a, c, g, or u
acuggggacccugngncgaac

SEQ ID NO: 128943 - RNA, 22 nt, Artificial Sequence
  Synthetic
  misc_feature (15)..(15): n is a, c, g, or u
  misc_feature (17)..(17): n is a, c, g, or u
gacuggggacccugngncgaac

SEQ ID NO: 128944 - RNA, 23 nt, Artificial Sequence
  Synthetic
  misc_feature (16)..(16): n is a, c, g, or u
  misc_feature (18)..(18): n is a, c, g, or u
ggacuggggacccugngncgaac

SEQ ID NO: 128945 - RNA, 24 nt, Artificial Sequence
  Synthetic
  misc_feature (17)..(17): n is a, c, g, or u
  misc_feature (19)..(19): n is a, c, g, or u
aggacuggggacccugngncgaac

SEQ ID NO: 128946 - RNA, 18 nt, Artificial Sequence
  Synthetic
caccauauucuugggaac

SEQ ID NO: 128947 - RNA, 19 nt, Artificial Sequence
  Synthetic
ucaccauauucuugggaac

SEQ ID NO: 128948 - RNA, 20 nt, Artificial Sequence
  Synthetic
gucaccauauucuugggaac

SEQ ID NO: 128949 - RNA, 21 nt, Artificial Sequence
  Synthetic
ggucaccauauucuugggaac

SEQ ID NO: 128950 - RNA, 22 nt, Artificial Sequence
  Synthetic
gggucaccauauucuugggaac

SEQ ID NO: 128951 - RNA, 23 nt, Artificial Sequence
  Synthetic
cgggucaccauauucuugggaac

SEQ ID NO: 128952 - RNA, 24 nt, Artificial Sequence
  Synthetic
gcgggucaccauauucuugggaac

SEQ ID NO: 128953 - RNA, 18 nt, Artificial Sequence
  Synthetic
aauuauguuaauacuaac

SEQ ID NO: 128954 - RNA, 19 nt, Artificial Sequence
  Synthetic
caauuauguuaauacuaac

SEQ ID NO: 128955 - RNA, 20 nt, Artificial Sequence
  Synthetic
ucaauuauguuaauacuaac

SEQ ID NO: 128956 - RNA, 21 nt, Artificial Sequence
  Synthetic
gucaauuauguuaauacuaac

SEQ ID NO: 128957 - RNA, 22 nt, Artificial Sequence
  Synthetic
agucaauuauguuaauacuaac

SEQ ID NO: 128958 - RNA, 23 nt, Artificial Sequence
  Synthetic
uagucaauuauguuaauacuaac

SEQ ID NO: 128959 - RNA, 24 nt, Artificial Sequence
  Synthetic
guagucaauuauguuaauacuaac

SEQ ID NO: 128960 - RNA, 18 nt, Artificial Sequence
  Synthetic
  misc_feature (11)..(11): n is a, c, g, or u
gucaaucuccncgaggac

SEQ ID NO: 128961 - RNA, 19 nt, Artificial Sequence
  Synthetic
  misc_feature (12)..(12): n is a, c, g, or u
cgucaaucuccncgaggac

SEQ ID NO: 128962 - RNA, 20 nt, Artificial Sequence
  Synthetic
  misc_feature (13)..(13): n is a, c, g, or u
ucgucaaucuccncgaggac

SEQ ID NO: 128963 - RNA, 21 nt, Artificial Sequence
  Synthetic
  misc_feature (14)..(14): n is a, c, g, or u
cucgucaaucuccncgaggac

SEQ ID NO: 128964 - RNA, 22 nt, Artificial Sequence
  Synthetic
  misc_feature (15)..(15): n is a, c, g, or u
ucucgucaaucuccncgaggac

SEQ ID NO: 128965 - RNA, 23 nt, Artificial Sequence
  Synthetic
  misc_feature (16)..(16): n is a, c, g, or u
aucucgucaaucuccncgaggac

SEQ ID NO: 128966 - RNA, 24 nt, Artificial Sequence
  Synthetic
  misc_feature (17)..(17): n is a, c, g, or u
caucucgucaaucuccncgaggac

SEQ ID NO: 128967 - RNA, 18 nt, Artificial Sequence
  Synthetic
  misc_feature (15)..(15): n is a, c, g, or u
gacuguguguuuaangac

SEQ ID NO: 128968 - RNA, 19 nt, Artificial Sequence
  Synthetic
  misc_feature (16)..(16): n is a, c, g, or u
agacuguguguuuaangac

SEQ ID NO: 128969 - RNA, 20 nt, Artificial Sequence
  Synthetic
  misc_feature (17)..(17): n is a, c, g, or u
aagacuguguguuuaangac

SEQ ID NO: 128970 - RNA, 21 nt, Artificial Sequence
  Synthetic
  misc_feature (18)..(18): n is a, c, g, or u
aaagacuguguguuuaangac

SEQ ID NO: 128971 - RNA, 22 nt, Artificial Sequence
  Synthetic
  misc_feature (19)..(19): n is a, c, g, or u
caaagacuguguguuuaangac

SEQ ID NO: 128972 - RNA, 23 nt, Artificial Sequence
  Synthetic
  misc_feature (20)..(20): n is a, c, g, or u
ucaaagacuguguguuuaangac

SEQ ID NO: 128973 - RNA, 24 nt, Artificial Sequence
  Synthetic
  misc_feature (21)..(21): n is a, c, g, or u
uucaaagacuguguguuuaangac

SEQ ID NO: 128974 - RNA, 18 nt, Artificial Sequence
  Synthetic
cguugcauggagaccacc

SEQ ID NO: 128975 - RNA, 19 nt, Artificial Sequence
  Synthetic
acguugcauggagaccacc

SEQ ID NO: 128976 - RNA, 20 nt, Artificial Sequence
  Synthetic
cacguugcauggagaccacc

SEQ ID NO: 128977 - RNA, 21 nt, Artificial Sequence
  Synthetic
gcacguugcauggagaccacc

SEQ ID NO: 128978 - RNA, 22 nt, Artificial Sequence
  Synthetic
ugcacguugcauggagaccacc

SEQ ID NO: 128979 - RNA, 23 nt, Artificial Sequence
  Synthetic
cugcacguugcauggagaccacc

SEQ ID NO: 128980 - RNA, 24 nt, Artificial Sequence
  Synthetic
ucugcacguugcauggagaccacc

SEQ ID NO: 128981 - RNA, 18 nt, Artificial Sequence
  Synthetic
caaugucaacgaccgacc

SEQ ID NO: 128982 - RNA, 19 nt, Artificial Sequence
  Synthetic
gcaaugucaacgaccgacc

SEQ ID NO: 128983 - RNA, 20 nt, Artificial Sequence
  Synthetic
agcaaugucaacgaccgacc

SEQ ID NO: 128984 - RNA, 21 nt, Artificial Sequence
  Synthetic
cagcaaugucaacgaccgacc

SEQ ID NO: 128985 - RNA, 22 nt, Artificial Sequence
  Synthetic
ccagcaaugucaacgaccgacc

SEQ ID NO: 128986 - RNA, 23 nt, Artificial Sequence
  Synthetic
cccagcaaugucaacgaccgacc

SEQ ID NO: 128987 - RNA, 24 nt, Artificial Sequence
  Synthetic
ucccagcaaugucaacgaccgacc

SEQ ID NO: 128988 - RNA, 18 nt, Artificial Sequence
  Synthetic
  misc_feature (8)..(8): n is a, c, g, or u
  misc_feature (11)..(12): n is a, c, g, or u
cugccgunccnnccgacc

SEQ ID NO: 128989 - RNA, 19 nt, Artificial Sequence
  Synthetic
  misc_feature (9)..(9): n is a, c, g, or u
  misc_feature (12)..(13): n is a, c, g, or u
ucugccgunccnnccgacc

SEQ ID NO: 128990 - RNA, 20 nt, Artificial Sequence
  Synthetic
  misc_feature (10)..(10): n is a, c, g, or u
  misc_feature (13)..(14): n is a, c, g, or u
gucugccgunccnnccgacc

SEQ ID NO: 128991 - RNA, 21 nt, Artificial Sequence
  Synthetic
  misc_feature (11)..(11): n is a, c, g, or u
  misc_feature (14)..(15): n is a, c, g, or u
cgucugccgunccnnccgacc

SEQ ID NO: 128992 - RNA, 22 nt, Artificial Sequence
  Synthetic
  misc_feature (12)..(12): n is a, c, g, or u
  misc_feature (15)..(16): n is a, c, g, or u
ccgucugccgunccnnccgacc

SEQ ID NO: 128993 - RNA, 23 nt, Artificial Sequence
  Synthetic
  misc_feature (13)..(13): n is a, c, g, or u
  misc_feature (16)..(17): n is a, c, g, or u
uccgucugccgunccnnccgacc

SEQ ID NO: 128994 - RNA, 24 nt, Artificial Sequence
  Synthetic
  misc_feature (14)..(14): n is a, c, g, or u
  misc_feature (17)..(18): n is a, c, g, or u
cuccgucugccgunccnnccgacc

SEQ ID NO: 128995 - RNA, 18 nt, Artificial Sequence
  Synthetic
  misc_feature (1)..(1): n is a, c, g, or u
ngaccgaggcaggucccc

SEQ ID NO: 128996 - RNA, 19 nt, Artificial Sequence
  Synthetic
  misc_feature (2)..(2): n is a, c, g, or u
gngaccgaggcaggucccc

SEQ ID NO: 128997 - RNA, 20 nt, Artificial Sequence
  Synthetic
  misc_feature (3)..(3): n is a, c, g, or u
cgngaccgaggcaggucccc

SEQ ID NO: 128998 - RNA, 21 nt, Artificial Sequence
  Synthetic
  misc_feature (4)..(4): n is a, c, g, or u
acgngaccgaggcaggucccc

SEQ ID NO: 128999 - RNA, 22 nt, Artificial Sequence
  Synthetic
  misc_feature (5)..(5): n is a, c, g, or u
gacgngaccgaggcaggucccc

SEQ ID NO: 129000 - RNA, 23 nt, Artificial Sequence
  Synthetic
  misc_feature (6)..(6): n is a, c, g, or u
cgacgngaccgaggcaggucccc

SEQ ID NO: 129001 - RNA, 24 nt, Artificial Sequence
  Synthetic
  misc_feature (7)..(7): n is a, c, g, or u
acgacgngaccgaggcaggucccc

SEQ ID NO: 129002 - RNA, 18 nt, Artificial Sequence
  Synthetic
ccgucggcgcugaauccc

SEQ ID NO: 129003 - RNA, 19 nt, Artificial Sequence
  Synthetic
cccgucggcgcugaauccc

SEQ ID NO: 129004 - RNA, 20 nt, Artificial Sequence
  Synthetic
ucccgucggcgcugaauccc

SEQ ID NO: 129005 - RNA, 21 nt, Artificial Sequence
  Synthetic
gucccgucggcgcugaauccc

SEQ ID NO: 129006 - RNA, 22 nt, Artificial Sequence
  Synthetic
cgucccgucggcgcugaauccc

SEQ ID NO: 129007 - RNA, 23 nt, Artificial Sequence
  Synthetic
acgucccgucggcgcugaauccc

SEQ ID NO: 129008 - RNA, 24 nt, Artificial Sequence
  Synthetic
uacgucccgucggcgcugaauccc

SEQ ID NO: 129009 - RNA, 18 nt, Artificial Sequence
  Synthetic
cacaucucgucaaucucc

SEQ ID NO: 129010 - RNA, 19 nt, Artificial Sequence
  Synthetic
ucacaucucgucaaucucc

SEQ ID NO: 129011 - RNA, 20 nt, Artificial Sequence
  Synthetic
cucacaucucgucaaucucc

SEQ ID NO: 129012 - RNA, 21 nt, Artificial Sequence
  Synthetic
ucucacaucucgucaaucucc

SEQ ID NO: 129013 - RNA, 22 nt, Artificial Sequence
  Synthetic
cucucacaucucgucaaucucc

SEQ ID NO: 129014 - RNA, 23 nt, Artificial Sequence
  Synthetic
ccucucacaucucgucaaucucc

SEQ ID NO: 129015 - RNA, 24 nt, Artificial Sequence
  Synthetic
gccucucacaucucgucaaucucc

SEQ ID NO: 129016 - RNA, 18 nt, Artificial Sequence
  Synthetic
acaucacaucaggauucc

SEQ ID NO: 129017 - RNA, 19 nt, Artificial Sequence
  Synthetic
aacaucacaucaggauucc

SEQ ID NO: 129018 - RNA, 20 nt, Artificial Sequence
  Synthetic
gaacaucacaucaggauucc

SEQ ID NO: 129019 - RNA, 21 nt, Artificial Sequence
  Synthetic
agaacaucacaucaggauucc

SEQ ID NO: 129020 - RNA, 22 nt, Artificial Sequence
  Synthetic
gagaacaucacaucaggauucc

SEQ ID NO: 129021 - RNA, 23 nt, Artificial Sequence
  Synthetic
ggagaacaucacaucaggauucc

SEQ ID NO: 129022 - RNA, 24 nt, Artificial Sequence
  Synthetic
uggagaacaucacaucaggauucc

SEQ ID NO: 129023 - RNA, 18 nt, Artificial Sequence
  Synthetic
ucucaauguuaguauucc

SEQ ID NO: 129024 - RNA, 19 nt, Artificial Sequence
  Synthetic
aucucaauguuaguauucc

SEQ ID NO: 129025 - RNA, 20 nt, Artificial Sequence
  Synthetic
aaucucaauguuaguauucc

SEQ ID NO: 129026 - RNA, 21 nt, Artificial Sequence
  Synthetic
gaaucucaauguuaguauucc

SEQ ID NO: 129027 - RNA, 22 nt, Artificial Sequence
  Synthetic
ggaaucucaauguuaguauucc

SEQ ID NO: 129028 - RNA, 23 nt, Artificial Sequence
  Synthetic
gggaaucucaauguuaguauucc

SEQ ID NO: 129029 - RNA, 24 nt, Artificial Sequence
  Synthetic
cgggaaucucaauguuaguauucc

SEQ ID NO: 129030 - RNA, 18 nt, Artificial Sequence
  Synthetic
  misc_feature (9)..(9): n is a, c, g, or u
gaccccucncggggccgc

SEQ ID NO: 129031 - RNA, 19 nt, Artificial Sequence
  Synthetic
  misc_feature (10)..(10): n is a, c, g, or u
cgaccccucncggggccgc

SEQ ID NO: 129032 - RNA, 20 nt, Artificial Sequence
  Synthetic
  misc_feature (11)..(11): n is a, c, g, or u
acgaccccucncggggccgc

SEQ ID NO: 129033 - RNA, 21 nt, Artificial Sequence
  Synthetic
  misc_feature (12)..(12): n is a, c, g, or u
gacgaccccucncggggccgc

SEQ ID NO: 129034 - RNA, 22 nt, Artificial Sequence
  Synthetic
  misc_feature (13)..(13): n is a, c, g, or u
ggacgaccccucncggggccgc

SEQ ID NO: 129035 - RNA, 23 nt, Artificial Sequence
  Synthetic
  misc_feature (14)..(14): n is a, c, g, or u
cggacgaccccucncggggccgc

SEQ ID NO: 129036 - RNA, 24 nt, Artificial Sequence
  Synthetic
  misc_feature (15)..(15): n is a, c, g, or u
gcggacgaccccucncggggccgc

SEQ ID NO: 129037 - RNA, 18 nt, Artificial Sequence
  Synthetic
ucaaaaccucgcaaaggc

SEQ ID NO: 129038 - RNA, 19 nt, Artificial Sequence
  Synthetic
aucaaaaccucgcaaaggc

SEQ ID NO: 129039 - RNA, 20 nt, Artificial Sequence
  Synthetic
caucaaaaccucgcaaaggc

SEQ ID NO: 129040 - RNA, 21 nt, Artificial Sequence
  Synthetic
ucaucaaaaccucgcaaaggc

SEQ ID NO: 129041 - RNA, 22 nt, Artificial Sequence
  Synthetic
gucaucaaaaccucgcaaaggc

SEQ ID NO: 129042 - RNA, 23 nt, Artificial Sequence
  Synthetic
ggucaucaaaaccucgcaaaggc

SEQ ID NO: 129043 - RNA, 24 nt, Artificial Sequence
  Synthetic
uggucaucaaaaccucgcaaaggc

SEQ ID NO: 129044 - RNA, 18 nt, Artificial Sequence
  Synthetic
gagugggagcauucgggc

SEQ ID NO: 129045 - RNA, 19 nt, Artificial Sequence
  Synthetic
ggagugggagcauucgggc

SEQ ID NO: 129046 - RNA, 20 nt, Artificial Sequence
  Synthetic
aggagugggagcauucgggc

SEQ ID NO: 129047 - RNA, 21 nt, Artificial Sequence
  Synthetic
uaggagugggagcauucgggc

SEQ ID NO: 129048 - RNA, 22 nt, Artificial Sequence
  Synthetic
guaggagugggagcauucgggc

SEQ ID NO: 129049 - RNA, 23 nt, Artificial Sequence
  Synthetic
gguaggagugggagcauucgggc

SEQ ID NO: 129050 - RNA, 24 nt, Artificial Sequence
  Synthetic
agguaggagugggagcauucgggc

SEQ ID NO: 129051 - RNA, 18 nt, Artificial Sequence
  Synthetic
  misc_feature (6)..(6): n is a, c, g, or u
cuuggnuggcuuuggggc

SEQ ID NO: 129052 - RNA, 19 nt, Artificial Sequence
  Synthetic
  misc_feature (7)..(7): n is a, c, g, or u
ccuuggnuggcuuuggggc

SEQ ID NO: 129053 - RNA, 20 nt, Artificial Sequence
  Synthetic
  misc_feature (8)..(8): n is a, c, g, or u
gccuuggnuggcuuuggggc

SEQ ID NO: 129054 - RNA, 21 nt, Artificial Sequence
  Synthetic
  misc_feature (9)..(9): n is a, c, g, or u
ugccuuggnuggcuuuggggc

SEQ ID NO: 129055 - RNA, 22 nt, Artificial Sequence
  Synthetic
  misc_feature (10)..(10): n is a, c, g, or u
gugccuuggnuggcuuuggggc

SEQ ID NO: 129056 - RNA, 23 nt, Artificial Sequence
  Synthetic
  misc_feature (11)..(11): n is a, c, g, or u
ugugccuuggnuggcuuuggggc

SEQ ID NO: 129057 - RNA, 24 nt, Artificial Sequence
  Synthetic
  misc_feature (12)..(12): n is a, c, g, or u
cugugccuuggnuggcuuuggggc

SEQ ID NO: 129058 - RNA, 18 nt, Artificial Sequence
  Synthetic
gacgcaacccccacuggc

SEQ ID NO: 129059 - RNA, 19 nt, Artificial Sequence
  Synthetic
ugacgcaacccccacuggc

SEQ ID NO: 129060 - RNA, 20 nt, Artificial Sequence
  Synthetic
cugacgcaacccccacuggc

SEQ ID NO: 129061 - RNA, 21 nt, Artificial Sequence
  Synthetic
gcugacgcaacccccacuggc

SEQ ID NO: 129062 - RNA, 22 nt, Artificial Sequence
  Synthetic
ugcugacgcaacccccacuggc

SEQ ID NO: 129063 - RNA, 23 nt, Artificial Sequence
  Synthetic
uugcugacgcaacccccacuggc

SEQ ID NO: 129064 - RNA, 24 nt, Artificial Sequence
  Synthetic
uuugcugacgcaacccccacuggc

SEQ ID NO: 129065 - RNA, 18 nt, Artificial Sequence
  Synthetic
  misc_feature (2)..(2): n is a, c, g, or u
unggccaucagcgcaugc

SEQ ID NO: 129066 - RNA, 19 nt, Artificial Sequence
  Synthetic
  misc_feature (3)..(3): n is a, c, g, or u
aunggccaucagcgcaugc

SEQ ID NO: 129067 - RNA, 20 nt, Artificial Sequence
  Synthetic
  misc_feature (1)..(1): n is a, c, g, or u
  misc_feature (4)..(4): n is a, c, g, or u
naunggccaucagcgcaugc

SEQ ID NO: 129068 - RNA, 21 nt, Artificial Sequence
  Synthetic
  misc_feature (2)..(2): n is a, c, g, or u
  misc_feature (5)..(5): n is a, c, g, or u
cnaunggccaucagcgcaugc

SEQ ID NO: 129069 - RNA, 22 nt, Artificial Sequence
  Synthetic
  misc_feature (3)..(3): n is a, c, g, or u
  misc_feature (6)..(6): n is a, c, g, or u
gcnaunggccaucagcgcaugc

SEQ ID NO: 129070 - RNA, 23 nt, Artificial Sequence
  Synthetic
  misc_feature (4)..(4): n is a, c, g, or u
  misc_feature (7)..(7): n is a, c, g, or u
ggcnaunggccaucagcgcaugc

SEQ ID NO: 129071 - RNA, 24 nt, Artificial Sequence
  Synthetic
  misc_feature (5)..(5): n is a, c, g, or u
  misc_feature (8)..(8): n is a, c, g, or u
uggcnaunggccaucagcgcaugc

SEQ ID NO: 129072 - RNA, 18 nt, Artificial Sequence
  Synthetic
aggcaagccauucucugc

SEQ ID NO: 129073 - RNA, 19 nt, Artificial Sequence
  Synthetic
caggcaagccauucucugc

SEQ ID NO: 129074 - RNA, 20 nt, Artificial Sequence
  Synthetic
ucaggcaagccauucucugc

SEQ ID NO: 129075 - RNA, 21 nt, Artificial Sequence
  Synthetic
cucaggcaagccauucucugc

SEQ ID NO: 129076 - RNA, 22 nt, Artificial Sequence
  Synthetic
acucaggcaagccauucucugc

SEQ ID NO: 129077 - RNA, 23 nt, Artificial Sequence
  Synthetic
cacucaggcaagccauucucugc

SEQ ID NO: 129078 - RNA, 24 nt, Artificial Sequence
  Synthetic
gcacucaggcaagccauucucugc

SEQ ID NO: 129079 - RNA, 18 nt, Artificial Sequence
  Synthetic
uucaccucugcacguugc

SEQ ID NO: 129080 - RNA, 19 nt, Artificial Sequence
  Synthetic
cuucaccucugcacguugc

SEQ ID NO: 129081 - RNA, 20 nt, Artificial Sequence
  Synthetic
gcuucaccucugcacguugc

SEQ ID NO: 129082 - RNA, 21 nt, Artificial Sequence
  Synthetic
cgcuucaccucugcacguugc

SEQ ID NO: 129083 - RNA, 22 nt, Artificial Sequence
  Synthetic
ucgcuucaccucugcacguugc

SEQ ID NO: 129084 - RNA, 23 nt, Artificial Sequence
  Synthetic
uucgcuucaccucugcacguugc

SEQ ID NO: 129085 - RNA, 24 nt, Artificial Sequence
  Synthetic
cuucgcuucaccucugcacguugc

SEQ ID NO: 129086 - RNA, 18 nt, Artificial Sequence
  Synthetic
  misc_feature (17)..(17): n is a, c, g, or u
gggaacaagagcuacanc

SEQ ID NO: 129087 - RNA, 19 nt, Artificial Sequence
  Synthetic
  misc_feature (18)..(18): n is a, c, g, or u
ugggaacaagagcuacanc

SEQ ID NO: 129088 - RNA, 20 nt, Artificial Sequence
  Synthetic
  misc_feature (19)..(19): n is a, c, g, or u
uugggaacaagagcuacanc

SEQ ID NO: 129089 - RNA, 21 nt, Artificial Sequence
  Synthetic
  misc_feature (20)..(20): n is a, c, g, or u
cuugggaacaagagcuacanc

SEQ ID NO: 129090 - RNA, 22 nt, Artificial Sequence
  Synthetic
  misc_feature (21)..(21): n is a, c, g, or u
ucuugggaacaagagcuacanc

SEQ ID NO: 129091 - RNA, 23 nt, Artificial Sequence
  Synthetic
  misc_feature (22)..(22): n is a, c, g, or u
uucuugggaacaagagcuacanc

SEQ ID NO: 129092 - RNA, 24 nt, Artificial Sequence
  Synthetic
  misc_feature (23)..(23): n is a, c, g, or u
auucuugggaacaagagcuacanc

SEQ ID NO: 129093 - RNA, 18 nt, Artificial Sequence
  Synthetic
  misc_feature (17)..(17): n is a, c, g, or u
caucucgucaaucuccnc

SEQ ID NO: 129094 - RNA, 19 nt, Artificial Sequence
  Synthetic
  misc_feature (18)..(18): n is a, c, g, or u
acaucucgucaaucuccnc

SEQ ID NO: 129095 - RNA, 20 nt, Artificial Sequence
  Synthetic
  misc_feature (19)..(19): n is a, c, g, or u
cacaucucgucaaucuccnc

SEQ ID NO: 129096 - RNA, 21 nt, Artificial Sequence
  Synthetic
  misc_feature (20)..(20): n is a, c, g, or u
ucacaucucgucaaucuccnc

SEQ ID NO: 129097 - RNA, 22 nt, Artificial Sequence
  Synthetic
  misc_feature (21)..(21): n is a, c, g, or u
cucacaucucgucaaucuccnc

SEQ ID NO: 129098 - RNA, 23 nt, Artificial Sequence
  Synthetic
  misc_feature (22)..(22): n is a, c, g, or u
ucucacaucucgucaaucuccnc

SEQ ID NO: 129099 - RNA, 24 nt, Artificial Sequence
  Synthetic
  misc_feature (23)..(23): n is a, c, g, or u
cucucacaucucgucaaucuccnc

SEQ ID NO: 129100 - RNA, 18 nt, Artificial Sequence
  Synthetic
ucgcagaagaucucaauc

SEQ ID NO: 129101 - RNA, 19 nt, Artificial Sequence
  Synthetic
gucgcagaagaucucaauc

SEQ ID NO: 129102 - RNA, 20 nt, Artificial Sequence
  Synthetic
cgucgcagaagaucucaauc

SEQ ID NO: 129103 - RNA, 21 nt, Artificial Sequence
  Synthetic
gcgucgcagaagaucucaauc

SEQ ID NO: 129104 - RNA, 22 nt, Artificial Sequence
  Synthetic
cgcgucgcagaagaucucaauc

SEQ ID NO: 129105 - RNA, 23 nt, Artificial Sequence
  Synthetic
ccgcgucgcagaagaucucaauc

SEQ ID NO: 129106 - RNA, 24 nt, Artificial Sequence
  Synthetic
gccgcgucgcagaagaucucaauc

SEQ ID NO: 129107 - RNA, 18 nt, Artificial Sequence
  Synthetic
ugggacuucaaccccauc

SEQ ID NO: 129108 - RNA, 19 nt, Artificial Sequence
  Synthetic
uugggacuucaaccccauc

SEQ ID NO: 129109 - RNA, 20 nt, Artificial Sequence
  Synthetic
auugggacuucaaccccauc

SEQ ID NO: 129110 - RNA, 21 nt, Artificial Sequence
  Synthetic
gauugggacuucaaccccauc

SEQ ID NO: 129111 - RNA, 22 nt, Artificial Sequence
  Synthetic
agauugggacuucaaccccauc

SEQ ID NO: 129112 - RNA, 23 nt, Artificial Sequence
  Synthetic
cagauugggacuucaaccccauc

SEQ ID NO: 129113 - RNA, 24 nt, Artificial Sequence
  Synthetic
ccagauugggacuucaaccccauc

SEQ ID NO: 129114 - RNA, 18 nt, Artificial Sequence
  Synthetic
  misc_feature (5)..(5): n is a, c, g, or u
uuugnaagauccagcauc

SEQ ID NO: 129115 - RNA, 19 nt, Artificial Sequence
  Synthetic
  misc_feature (6)..(6): n is a, c, g, or u
auuugnaagauccagcauc

SEQ ID NO: 129116 - RNA, 20 nt, Artificial Sequence
  Synthetic
  misc_feature (7)..(7): n is a, c, g, or u
aauuugnaagauccagcauc

SEQ ID NO: 129117 - RNA, 21 nt, Artificial Sequence
  Synthetic
  misc_feature (8)..(8): n is a, c, g, or u
uaauuugnaagauccagcauc

SEQ ID NO: 129118 - RNA, 22 nt, Artificial Sequence
  Synthetic
  misc_feature (9)..(9): n is a, c, g, or u
auaauuugnaagauccagcauc

SEQ ID NO: 129119 - RNA, 23 nt, Artificial Sequence
  Synthetic
  misc_feature (10)..(10): n is a, c, g, or u
aauaauuugnaagauccagcauc

SEQ ID NO: 129120 - RNA, 24 nt, Artificial Sequence
  Synthetic
  misc_feature (11)..(11): n is a, c, g, or u
uaauaauuugnaagauccagcauc

SEQ ID NO: 129121 - RNA, 18 nt, Artificial Sequence
  Synthetic
  misc_feature (14)..(14): n is a, c, g, or u
ccaagucuguacancauc

SEQ ID NO: 129122 - RNA, 19 nt, Artificial Sequence
  Synthetic
  misc_feature (15)..(15): n is a, c, g, or u
gccaagucuguacancauc

SEQ ID NO: 129123 - RNA, 20 nt, Artificial Sequence
  Synthetic
  misc_feature (16)..(16): n is a, c, g, or u
ggccaagucuguacancauc

SEQ ID NO: 129124 - RNA, 21 nt, Artificial Sequence
  Synthetic
  misc_feature (17)..(17): n is a, c, g, or u
gggccaagucuguacancauc

SEQ ID NO: 129125 - RNA, 22 nt, Artificial Sequence
  Synthetic
  misc_feature (18)..(18): n is a, c, g, or u
ggggccaagucuguacancauc

SEQ ID NO: 129126 - RNA, 23 nt, Artificial Sequence
  Synthetic
  misc_feature (19)..(19): n is a, c, g, or u
gggggccaagucuguacancauc

SEQ ID NO: 129127 - RNA, 24 nt, Artificial Sequence
  Synthetic
  misc_feature (20)..(20): n is a, c, g, or u
ugggggccaagucuguacancauc

SEQ ID NO: 129128 - RNA, 18 nt, Artificial Sequence
  Synthetic
  misc_feature (2)..(2): n is a, c, g, or u
cngccucagcucuguauc

SEQ ID NO: 129129 - RNA, 19 nt, Artificial Sequence
  Synthetic
  misc_feature (3)..(3): n is a, c, g, or u
acngccucagcucuguauc

SEQ ID NO: 129130 - RNA, 20 nt, Artificial Sequence
  Synthetic
  misc_feature (1)..(1): n is a, c, g, or u
  misc_feature (4)..(4): n is a, c, g, or u
nacngccucagcucuguauc

SEQ ID NO: 129131 - RNA, 21 nt, Artificial Sequence
  Synthetic
  misc_feature (2)..(2): n is a, c, g, or u
  misc_feature (5)..(5): n is a, c, g, or u
anacngccucagcucuguauc

SEQ ID NO: 129132 - RNA, 22 nt, Artificial Sequence
  Synthetic
  misc_feature (3)..(3): n is a, c, g, or u
  misc_feature (6)..(6): n is a, c, g, or u
ganacngccucagcucuguauc

SEQ ID NO: 129133 - RNA, 23 nt, Artificial Sequence
  Synthetic
  misc_feature (1)..(1): n is a, c, g, or u
  misc_feature (4)..(4): n is a, c, g, or u
  misc_feature (7)..(7): n is a, c, g, or u
nganacngccucagcucuguauc

SEQ ID NO: 129134 - RNA, 24 nt, Artificial Sequence
  Synthetic
  misc_feature (2)..(2): n is a, c, g, or u
  misc_feature (5)..(5): n is a, c, g, or u
  misc_feature (8)..(8): n is a, c, g, or u
unganacngccucagcucuguauc

SEQ ID NO: 129135 - RNA, 18 nt, Artificial Sequence
  Synthetic
ucuuacauaagaggacuc

SEQ ID NO: 129136 - RNA, 19 nt, Artificial Sequence
  Synthetic
gucuuacauaagaggacuc

SEQ ID NO: 129137 - RNA, 20 nt, Artificial Sequence
  Synthetic
ggucuuacauaagaggacuc

SEQ ID NO: 129138 - RNA, 21 nt, Artificial Sequence
  Synthetic
aggucuuacauaagaggacuc

SEQ ID NO: 129139 - RNA, 22 nt, Artificial Sequence
  Synthetic
aaggucuuacauaagaggacuc

SEQ ID NO: 129140 - RNA, 23 nt, Artificial Sequence
  Synthetic
caaggucuuacauaagaggacuc

SEQ ID NO: 129141 - RNA, 24 nt, Artificial Sequence
  Synthetic
ccaaggucuuacauaagaggacuc

SEQ ID NO: 129142 - RNA, 18 nt, Artificial Sequence
  Synthetic
ucccgcggacgaccccuc

SEQ ID NO: 129143 - RNA, 19 nt, Artificial Sequence
  Synthetic
aucccgcggacgaccccuc

SEQ ID NO: 129144 - RNA, 20 nt, Artificial Sequence
  Synthetic
aaucccgcggacgaccccuc

SEQ ID NO: 129145 - RNA, 21 nt, Artificial Sequence
  Synthetic
gaaucccgcggacgaccccuc

SEQ ID NO: 129146 - RNA, 22 nt, Artificial Sequence
  Synthetic
ugaaucccgcggacgaccccuc

SEQ ID NO: 129147 - RNA, 23 nt, Artificial Sequence
  Synthetic
cugaaucccgcggacgaccccuc

SEQ ID NO: 129148 - RNA, 24 nt, Artificial Sequence
  Synthetic
gcugaaucccgcggacgaccccuc

SEQ ID NO: 129149 - RNA, 18 nt, Artificial Sequence
  Synthetic
  misc_feature (2)..(2): n is a, c, g, or u
gngaagccuuagagucuc

SEQ ID NO: 129150 - RNA, 19 nt, Artificial Sequence
  Synthetic
  misc_feature (3)..(3): n is a, c, g, or u
cgngaagccuuagagucuc

SEQ ID NO: 129151 - RNA, 20 nt, Artificial Sequence
  Synthetic
  misc_feature (4)..(4): n is a, c, g, or u
ucgngaagccuuagagucuc

SEQ ID NO: 129152 - RNA, 21 nt, Artificial Sequence
  Synthetic
  misc_feature (5)..(5): n is a, c, g, or u
aucgngaagccuuagagucuc

SEQ ID NO: 129153 - RNA, 22 nt, Artificial Sequence
  Synthetic
  misc_feature (6)..(6): n is a, c, g, or u
uaucgngaagccuuagagucuc

SEQ ID NO: 129154 - RNA, 23 nt, Artificial Sequence
  Synthetic
  misc_feature (7)..(7): n is a, c, g, or u
guaucgngaagccuuagagucuc

SEQ ID NO: 129155 - RNA, 24 nt, Artificial Sequence
  Synthetic
  misc_feature (8)..(8): n is a, c, g, or u
uguaucgngaagccuuagagucuc

SEQ ID NO: 129156 - RNA, 18 nt, Artificial Sequence
  Synthetic
cuccaccaaucggcaguc

SEQ ID NO: 129157 - RNA, 19 nt, Artificial Sequence
  Synthetic
ccuccaccaaucggcaguc

SEQ ID NO: 129158 - RNA, 20 nt, Artificial Sequence
  Synthetic
gccuccaccaaucggcaguc

SEQ ID NO: 129159 - RNA, 21 nt, Artificial Sequence
  Synthetic
ugccuccaccaaucggcaguc

SEQ ID NO: 129160 - RNA, 22 nt, Artificial Sequence
  Synthetic
cugccuccaccaaucggcaguc

SEQ ID NO: 129161 - RNA, 23 nt, Artificial Sequence
  Synthetic
ccugccuccaccaaucggcaguc

SEQ ID NO: 129162 - RNA, 24 nt, Artificial Sequence
  Synthetic
uccugccuccaccaaucggcaguc

SEQ ID NO: 129163 - RNA, 18 nt, Artificial Sequence
  Synthetic
  misc_feature (6)..(6): n is a, c, g, or u
cugcangaucccagaguc

SEQ ID NO: 129164 - RNA, 19 nt, Artificial Sequence
  Synthetic
  misc_feature (7)..(7): n is a, c, g, or u
ucugcangaucccagaguc

SEQ ID NO: 129165 - RNA, 20 nt, Artificial Sequence
  Synthetic
  misc_feature (8)..(8): n is a, c, g, or u
cucugcangaucccagaguc

SEQ ID NO: 129166 - RNA, 21 nt, Artificial Sequence
  Synthetic
  misc_feature (9)..(9): n is a, c, g, or u
gcucugcangaucccagaguc

SEQ ID NO: 129167 - RNA, 22 nt, Artificial Sequence
  Synthetic
  misc_feature (10)..(10): n is a, c, g, or u
agcucugcangaucccagaguc

SEQ ID NO: 129168 - RNA, 23 nt, Artificial Sequence
  Synthetic
  misc_feature (11)..(11): n is a, c, g, or u
aagcucugcangaucccagaguc

SEQ ID NO: 129169 - RNA, 24 nt, Artificial Sequence
  Synthetic
  misc_feature (12)..(12): n is a, c, g, or u
caagcucugcangaucccagaguc

SEQ ID NO: 129170 - RNA, 18 nt, Artificial Sequence
  Synthetic
uuuugcucgcagccgguc

SEQ ID NO: 129171 - RNA, 19 nt, Artificial Sequence
  Synthetic
guuuugcucgcagccgguc

SEQ ID NO: 129172 - RNA, 20 nt, Artificial Sequence
  Synthetic
uguuuugcucgcagccgguc

SEQ ID NO: 129173 - RNA, 21 nt, Artificial Sequence
  Synthetic
uuguuuugcucgcagccgguc

SEQ ID NO: 129174 - RNA, 22 nt, Artificial Sequence
  Synthetic
cuuguuuugcucgcagccgguc

SEQ ID NO: 129175 - RNA, 23 nt, Artificial Sequence
  Synthetic
gcuuguuuugcucgcagccgguc

SEQ ID NO: 129176 - RNA, 24 nt, Artificial Sequence
  Synthetic
cgcuuguuuugcucgcagccgguc

SEQ ID NO: 129177 - RNA, 18 nt, Artificial Sequence
  Synthetic
  misc_feature (16)..(16): n is a, c, g, or u
uauucccaucccaucnuc

SEQ ID NO: 129178 - RNA, 19 nt, Artificial Sequence
  Synthetic
  misc_feature (17)..(17): n is a, c, g, or u
guauucccaucccaucnuc

SEQ ID NO: 129179 - RNA, 20 nt, Artificial Sequence
  Synthetic
  misc_feature (18)..(18): n is a, c, g, or u
uguauucccaucccaucnuc

SEQ ID NO: 129180 - RNA, 21 nt, Artificial Sequence
  Synthetic
  misc_feature (19)..(19): n is a, c, g, or u
cuguauucccaucccaucnuc

SEQ ID NO: 129181 - RNA, 22 nt, Artificial Sequence
  Synthetic
  misc_feature (20)..(20): n is a, c, g, or u
ccuguauucccaucccaucnuc

SEQ ID NO: 129182 - RNA, 23 nt, Artificial Sequence
  Synthetic
  misc_feature (21)..(21): n is a, c, g, or u
accuguauucccaucccaucnuc

SEQ ID NO: 129183 - RNA, 24 nt, Artificial Sequence
  Synthetic
  misc_feature (22)..(22): n is a, c, g, or u
caccuguauucccaucccaucnuc

SEQ ID NO: 129184 - RNA, 18 nt, Artificial Sequence
  Synthetic
  misc_feature (1)..(1): n is a, c, g, or u
  misc_feature (16)..(16): n is a, c, g, or u
naauucugucguccunuc

SEQ ID NO: 129185 - RNA, 19 nt, Artificial Sequence
  Synthetic
  misc_feature (2)..(2): n is a, c, g, or u
  misc_feature (17)..(17): n is a, c, g, or u
anaauucugucguccunuc

SEQ ID NO: 129186 - RNA, 20 nt, Artificial Sequence
  Synthetic
  misc_feature (3)..(3): n is a, c, g, or u
  misc_feature (18)..(18): n is a, c, g, or u
ganaauucugucguccunuc

SEQ ID NO: 129187 - RNA, 21 nt, Artificial Sequence
  Synthetic
  misc_feature (4)..(4): n is a, c, g, or u
  misc_feature (19)..(19): n is a, c, g, or u
uganaauucugucguccunuc

SEQ ID NO: 129188 - RNA, 22 nt, Artificial Sequence
  Synthetic
  misc_feature (5)..(5): n is a, c, g, or u
  misc_feature (20)..(20): n is a, c, g, or u
cuganaauucugucguccunuc

SEQ ID NO: 129189 - RNA, 23 nt, Artificial Sequence
  Synthetic
  misc_feature (6)..(6): n is a, c, g, or u
  misc_feature (21)..(21): n is a, c, g, or u
acuganaauucugucguccunuc

SEQ ID NO: 129190 - RNA, 24 nt, Artificial Sequence
  Synthetic
  misc_feature (1)..(1): n is a, c, g, or u
  misc_feature (7)..(7): n is a, c, g, or u
  misc_feature (22)..(22): n is a, c, g, or u
nacuganaauucugucguccunuc

SEQ ID NO: 129191 - RNA, 18 nt, Artificial Sequence
  Synthetic
uugcgggucaccauauuc

SEQ ID NO: 129192 - RNA, 19 nt, Artificial Sequence
  Synthetic
uuugcgggucaccauauuc

SEQ ID NO: 129193 - RNA, 20 nt, Artificial Sequence
  Synthetic
uuuugcgggucaccauauuc

SEQ ID NO: 129194 - RNA, 21 nt, Artificial Sequence
  Synthetic
auuuugcgggucaccauauuc

SEQ ID NO: 129195 - RNA, 22 nt, Artificial Sequence
  Synthetic
cauuuugcgggucaccauauuc

SEQ ID NO: 129196 - RNA, 23 nt, Artificial Sequence
  Synthetic
ucauuuugcgggucaccauauuc

SEQ ID NO: 129197 - RNA, 24 nt, Artificial Sequence
  Synthetic
  misc_feature (1)..(1): n is a, c, g, or u
nucauuuugcgggucaccauauuc

SEQ ID NO: 129198 - RNA, 18 nt, Artificial Sequence
  Synthetic
cuaucuuaucaacacuuc

SEQ ID NO: 129199 - RNA, 19 nt, Artificial Sequence
  Synthetic
ccuaucuuaucaacacuuc

SEQ ID NO: 129200 - RNA, 20 nt, Artificial Sequence
  Synthetic
cccuaucuuaucaacacuuc

SEQ ID NO: 129201 - RNA, 21 nt, Artificial Sequence
  Synthetic
ccccuaucuuaucaacacuuc

SEQ ID NO: 129202 - RNA, 22 nt, Artificial Sequence
  Synthetic
gccccuaucuuaucaacacuuc

SEQ ID NO: 129203 - RNA, 23 nt, Artificial Sequence
  Synthetic
ugccccuaucuuaucaacacuuc

SEQ ID NO: 129204 - RNA, 24 nt, Artificial Sequence
  Synthetic
augccccuaucuuaucaacacuuc

SEQ ID NO: 129205 - RNA, 18 nt, Artificial Sequence
  Synthetic
  misc_feature (14)..(14): n is a, c, g, or u
cugccaacuggauncuuc

SEQ ID NO: 129206 - RNA, 19 nt, Artificial Sequence
  Synthetic
  misc_feature (15)..(15): n is a, c, g, or u
acugccaacuggauncuuc

SEQ ID NO: 129207 - RNA, 20 nt, Artificial Sequence
  Synthetic
  misc_feature (16)..(16): n is a, c, g, or u
uacugccaacuggauncuuc

SEQ ID NO: 129208 - RNA, 21 nt, Artificial Sequence
  Synthetic
  misc_feature (17)..(17): n is a, c, g, or u
guacugccaacuggauncuuc

SEQ ID NO: 129209 - RNA, 22 nt, Artificial Sequence
  Synthetic
  misc_feature (18)..(18): n is a, c, g, or u
uguacugccaacuggauncuuc

SEQ ID NO: 129210 - RNA, 23 nt, Artificial Sequence
  Synthetic
  misc_feature (1)..(1): n is a, c, g, or u
  misc_feature (19)..(19): n is a, c, g, or u
nuguacugccaacuggauncuuc

SEQ ID NO: 129211 - RNA, 24 nt, Artificial Sequence
  Synthetic
  misc_feature (2)..(2): n is a, c, g, or u
  misc_feature (20)..(20): n is a, c, g, or u
gnuguacugccaacuggauncuuc

SEQ ID NO: 129212 - RNA, 18 nt, Artificial Sequence
  Synthetic
ugcugguggcuccaguuc

SEQ ID NO: 129213 - RNA, 19 nt, Artificial Sequence
  Synthetic
cugcugguggcuccaguuc

SEQ ID NO: 129214 - RNA, 20 nt, Artificial Sequence
  Synthetic
ccugcugguggcuccaguuc

SEQ ID NO: 129215 - RNA, 21 nt, Artificial Sequence
  Synthetic
uccugcugguggcuccaguuc

SEQ ID NO: 129216 - RNA, 22 nt, Artificial Sequence
  Synthetic
uuccugcugguggcuccaguuc

SEQ ID NO: 129217 - RNA, 23 nt, Artificial Sequence
  Synthetic
uuuccugcugguggcuccaguuc

SEQ ID NO: 129218 - RNA, 24 nt, Artificial Sequence
  Synthetic
uuuuccugcugguggcuccaguuc

SEQ ID NO: 129219 - RNA, 18 nt, Artificial Sequence
  Synthetic
  misc_feature (15)..(15): n is a, c, g, or u
gguuauucccuaaanuuc

SEQ ID NO: 129220 - RNA, 19 nt, Artificial Sequence
  Synthetic
  misc_feature (16)..(16): n is a, c, g, or u
ggguuauucccuaaanuuc

SEQ ID NO: 129221 - RNA, 20 nt, Artificial Sequence
  Synthetic
  misc_feature (17)..(17): n is a, c, g, or u
gggguuauucccuaaanuuc

SEQ ID NO: 129222 - RNA, 21 nt, Artificial Sequence
  Synthetic
  misc_feature (18)..(18): n is a, c, g, or u
ugggguuauucccuaaanuuc

SEQ ID NO: 129223 - RNA, 22 nt, Artificial Sequence
  Synthetic
  misc_feature (19)..(19): n is a, c, g, or u
augggguuauucccuaaanuuc

SEQ ID NO: 129224 - RNA, 23 nt, Artificial Sequence
  Synthetic
  misc_feature (20)..(20): n is a, c, g, or u
gaugggguuauucccuaaanuuc

SEQ ID NO: 129225 - RNA, 24 nt, Artificial Sequence
  Synthetic
  misc_feature (21)..(21): n is a, c, g, or u
agaugggguuauucccuaaanuuc

SEQ ID NO: 129226 - RNA, 18 nt, Artificial Sequence
  Synthetic
ggacuucucucaauuuuc

SEQ ID NO: 129227 - RNA, 19 nt, Artificial Sequence
  Synthetic
uggacuucucucaauuuuc

SEQ ID NO: 129228 - RNA, 20 nt, Artificial Sequence
  Synthetic
guggacuucucucaauuuuc

SEQ ID NO: 129229 - RNA, 21 nt, Artificial Sequence
  Synthetic
gguggacuucucucaauuuuc

SEQ ID NO: 129230 - RNA, 22 nt, Artificial Sequence
  Synthetic
ugguggacuucucucaauuuuc

SEQ ID NO: 129231 - RNA, 23 nt, Artificial Sequence
  Synthetic
gugguggacuucucucaauuuuc

SEQ ID NO: 129232 - RNA, 24 nt, Artificial Sequence
  Synthetic
cgugguggacuucucucaauuuuc

SEQ ID NO: 129233 - RNA, 18 nt, Artificial Sequence
  Synthetic
aggcagguccccuagaag

SEQ ID NO: 129234 - RNA, 19 nt, Artificial Sequence
  Synthetic
gaggcagguccccuagaag

SEQ ID NO: 129235 - RNA, 20 nt, Artificial Sequence
  Synthetic
cgaggcagguccccuagaag

SEQ ID NO: 129236 - RNA, 21 nt, Artificial Sequence
  Synthetic
ccgaggcagguccccuagaag

SEQ ID NO: 129237 - RNA, 22 nt, Artificial Sequence
  Synthetic
accgaggcagguccccuagaag

SEQ ID NO: 129238 - RNA, 23 nt, Artificial Sequence
  Synthetic
gaccgaggcagguccccuagaag

SEQ ID NO: 129239 - RNA, 24 nt, Artificial Sequence
  Synthetic
  misc_feature (1)..(1): n is a, c, g, or u
ngaccgaggcagguccccuagaag

SEQ ID NO: 129240 - RNA, 18 nt, Artificial Sequence
  Synthetic
  misc_feature (4)..(4): n is a, c, g, or u
  misc_feature (7)..(8): n is a, c, g, or u
gggnuannuaauuggaag

SEQ ID NO: 129241 - RNA, 19 nt, Artificial Sequence
  Synthetic
  misc_feature (5)..(5): n is a, c, g, or u
  misc_feature (8)..(9): n is a, c, g, or u
ugggnuannuaauuggaag

SEQ ID NO: 129242 - RNA, 20 nt, Artificial Sequence
  Synthetic
  misc_feature (6)..(6): n is a, c, g, or u
  misc_feature (9)..(10): n is a, c, g, or u
augggnuannuaauuggaag

SEQ ID NO: 129243 - RNA, 21 nt, Artificial Sequence
  Synthetic
  misc_feature (7)..(7): n is a, c, g, or u
  misc_feature (10)..(11): n is a, c, g, or u
caugggnuannuaauuggaag

SEQ ID NO: 129244 - RNA, 22 nt, Artificial Sequence
  Synthetic
  misc_feature (8)..(8): n is a, c, g, or u
  misc_feature (11)..(12): n is a, c, g, or u
ucaugggnuannuaauuggaag

SEQ ID NO: 129245 - RNA, 23 nt, Artificial Sequence
  Synthetic
  misc_feature (9)..(9): n is a, c, g, or u
  misc_feature (12)..(13): n is a, c, g, or u
uucaugggnuannuaauuggaag

SEQ ID NO: 129246 - RNA, 24 nt, Artificial Sequence
  Synthetic
  misc_feature (1)..(1): n is a, c, g, or u
  misc_feature (10)..(10): n is a, c, g, or u
  misc_feature (13)..(14): n is a, c, g, or u
nuucaugggnuannuaauuggaag

SEQ ID NO: 129247 - RNA, 18 nt, Artificial Sequence
  Synthetic
auuccuuggacucauaag

SEQ ID NO: 129248 - RNA, 19 nt, Artificial Sequence
  Synthetic
uauuccuuggacucauaag

SEQ ID NO: 129249 - RNA, 20 nt, Artificial Sequence
  Synthetic
guauuccuuggacucauaag

SEQ ID NO: 129250 - RNA, 21 nt, Artificial Sequence
  Synthetic
aguauuccuuggacucauaag

SEQ ID NO: 129251 - RNA, 22 nt, Artificial Sequence
  Synthetic
uaguauuccuuggacucauaag

SEQ ID NO: 129252 - RNA, 23 nt, Artificial Sequence
  Synthetic
uuaguauuccuuggacucauaag

SEQ ID NO: 129253 - RNA, 24 nt, Artificial Sequence
  Synthetic
guuaguauuccuuggacucauaag

SEQ ID NO: 129254 - RNA, 18 nt, Artificial Sequence
  Synthetic
  misc_feature (6)..(6): n is a, c, g, or u
gcuggnauucuauauaag

SEQ ID NO: 129255 - RNA, 19 nt, Artificial Sequence
  Synthetic
  misc_feature (7)..(7): n is a, c, g, or u
ggcuggnauucuauauaag

SEQ ID NO: 129256 - RNA, 20 nt, Artificial Sequence
  Synthetic
  misc_feature (8)..(8): n is a, c, g, or u
aggcuggnauucuauauaag

SEQ ID NO: 129257 - RNA, 21 nt, Artificial Sequence
  Synthetic
  misc_feature (9)..(9): n is a, c, g, or u
aaggcuggnauucuauauaag

SEQ ID NO: 129258 - RNA, 22 nt, Artificial Sequence
  Synthetic
  misc_feature (10)..(10): n is a, c, g, or u
gaaggcuggnauucuauauaag

SEQ ID NO: 129259 - RNA, 23 nt, Artificial Sequence
  Synthetic
  misc_feature (11)..(11): n is a, c, g, or u
ggaaggcuggnauucuauauaag

SEQ ID NO: 129260 - RNA, 24 nt, Artificial Sequence
  Synthetic
  misc_feature (12)..(12): n is a, c, g, or u
uggaaggcuggnauucuauauaag

SEQ ID NO: 129261 - RNA, 18 nt, Artificial Sequence
  Synthetic
ccccugcucguguuacag

SEQ ID NO: 129262 - RNA, 19 nt, Artificial Sequence
  Synthetic
accccugcucguguuacag

SEQ ID NO: 129263 - RNA, 20 nt, Artificial Sequence
  Synthetic
gaccccugcucguguuacag

SEQ ID NO: 129264 - RNA, 21 nt, Artificial Sequence
  Synthetic
ggaccccugcucguguuacag

SEQ ID NO: 129265 - RNA, 22 nt, Artificial Sequence
  Synthetic
aggaccccugcucguguuacag

SEQ ID NO: 129266 - RNA, 23 nt, Artificial Sequence
  Synthetic
uaggaccccugcucguguuacag

SEQ ID NO: 129267 - RNA, 24 nt, Artificial Sequence
  Synthetic
cuaggaccccugcucguguuacag

SEQ ID NO: 129268 - RNA, 18 nt, Artificial Sequence
  Synthetic
cauccucaggccaugcag

SEQ ID NO: 129269 - RNA, 19 nt, Artificial Sequence
  Synthetic
ucauccucaggccaugcag

SEQ ID NO: 129270 - RNA, 20 nt, Artificial Sequence
  Synthetic
gucauccucaggccaugcag

SEQ ID NO: 129271 - RNA, 21 nt, Artificial Sequence
  Synthetic
agucauccucaggccaugcag

SEQ ID NO: 129272 - RNA, 22 nt, Artificial Sequence
  Synthetic
cagucauccucaggccaugcag

SEQ ID NO: 129273 - RNA, 23 nt, Artificial Sequence
  Synthetic
acagucauccucaggccaugcag

SEQ ID NO: 129274 - RNA, 24 nt, Artificial Sequence
  Synthetic
gacagucauccucaggccaugcag

SEQ ID NO: 129275 - RNA, 18 nt, Artificial Sequence
  Synthetic
uucuuucccgaucaucag

SEQ ID NO: 129276 - RNA, 19 nt, Artificial Sequence
  Synthetic
auucuuucccgaucaucag

SEQ ID NO: 129277 - RNA, 20 nt, Artificial Sequence
  Synthetic
gauucuuucccgaucaucag

SEQ ID NO: 129278 - RNA, 21 nt, Artificial Sequence
  Synthetic
ggauucuuucccgaucaucag

SEQ ID NO: 129279 - RNA, 22 nt, Artificial Sequence
  Synthetic
gggauucuuucccgaucaucag

SEQ ID NO: 129280 - RNA, 23 nt, Artificial Sequence
  Synthetic
ugggauucuuucccgaucaucag

SEQ ID NO: 129281 - RNA, 24 nt, Artificial Sequence
  Synthetic
cugggauucuuucccgaucaucag

SEQ ID NO: 129282 - RNA, 18 nt, Artificial Sequence
  Synthetic
  misc_feature (6)..(6): n is a, c, g, or u
uuuaangacugggaggag

SEQ ID NO: 129283 - RNA, 19 nt, Artificial Sequence
  Synthetic
  misc_feature (7)..(7): n is a, c, g, or u
guuuaangacugggaggag

SEQ ID NO: 129284 - RNA, 20 nt, Artificial Sequence
  Synthetic
  misc_feature (8)..(8): n is a, c, g, or u
uguuuaangacugggaggag

SEQ ID NO: 129285 - RNA, 21 nt, Artificial Sequence
  Synthetic
  misc_feature (9)..(9): n is a, c, g, or u
guguuuaangacugggaggag

SEQ ID NO: 129286 - RNA, 22 nt, Artificial Sequence
  Synthetic
  misc_feature (10)..(10): n is a, c, g, or u
uguguuuaangacugggaggag

SEQ ID NO: 129287 - RNA, 23 nt, Artificial Sequence
  Synthetic
  misc_feature (11)..(11): n is a, c, g, or u
guguguuuaangacugggaggag

SEQ ID NO: 129288 - RNA, 24 nt, Artificial Sequence
  Synthetic
  misc_feature (12)..(12): n is a, c, g, or u
uguguguuuaangacugggaggag

SEQ ID NO: 129289 - RNA, 18 nt, Artificial Sequence
  Synthetic
  misc_feature (1)..(1): n is a, c, g, or u
nagccaaccagguaggag

SEQ ID NO: 129290 - RNA, 19 nt, Artificial Sequence
  Synthetic
  misc_feature (1)..(2): n is a, c, g, or u
nnagccaaccagguaggag

SEQ ID NO: 129291 - RNA, 20 nt, Artificial Sequence
  Synthetic
  misc_feature (2)..(3): n is a, c, g, or u
annagccaaccagguaggag

SEQ ID NO: 129292 - RNA, 21 nt, Artificial Sequence
  Synthetic
  misc_feature (3)..(4): n is a, c, g, or u
cannagccaaccagguaggag

SEQ ID NO: 129293 - RNA, 22 nt, Artificial Sequence
  Synthetic
  misc_feature (4)..(5): n is a, c, g, or u
ccannagccaaccagguaggag

SEQ ID NO: 129294 - RNA, 23 nt, Artificial Sequence
  Synthetic
  misc_feature (5)..(6): n is a, c, g, or u
gccannagccaaccagguaggag

SEQ ID NO: 129295 - RNA, 24 nt, Artificial Sequence
  Synthetic
  misc_feature (6)..(7): n is a, c, g, or u
ggccannagccaaccagguaggag

SEQ ID NO: 129296 - RNA, 18 nt, Artificial Sequence
  Synthetic
  misc_feature (16)..(16): n is a, c, g, or u
cccuaacaaaacaaanag

SEQ ID NO: 129297 - RNA, 19 nt, Artificial Sequence
  Synthetic
  misc_feature (17)..(17): n is a, c, g, or u
acccuaacaaaacaaanag

SEQ ID NO: 129298 - RNA, 20 nt, Artificial Sequence
  Synthetic
  misc_feature (18)..(18): n is a, c, g, or u
aacccuaacaaaacaaanag

SEQ ID NO: 129299 - RNA, 21 nt, Artificial Sequence
  Synthetic
  misc_feature (19)..(19): n is a, c, g, or u
aaacccuaacaaaacaaanag

SEQ ID NO: 129300 - RNA, 22 nt, Artificial Sequence
  Synthetic
  misc_feature (20)..(20): n is a, c, g, or u
uaaacccuaacaaaacaaanag

SEQ ID NO: 129301 - RNA, 23 nt, Artificial Sequence
  Synthetic
  misc_feature (21)..(21): n is a, c, g, or u
uuaaacccuaacaaaacaaanag

SEQ ID NO: 129302 - RNA, 24 nt, Artificial Sequence
  Synthetic
  misc_feature (22)..(22): n is a, c, g, or u
uuuaaacccuaacaaaacaaanag

SEQ ID NO: 129303 - RNA, 18 nt, Artificial Sequence
  Synthetic
ccgaggcagguccccuag

SEQ ID NO: 129304 - RNA, 19 nt, Artificial Sequence
  Synthetic
accgaggcagguccccuag

SEQ ID NO: 129305 - RNA, 20 nt, Artificial Sequence
  Synthetic
gaccgaggcagguccccuag

SEQ ID NO: 129306 - RNA, 21 nt, Artificial Sequence
  Synthetic
  misc_feature (1)..(1): n is a, c, g, or u
ngaccgaggcagguccccuag

SEQ ID NO: 129307 - RNA, 22 nt, Artificial Sequence
  Synthetic
  misc_feature (2)..(2): n is a, c, g, or u
gngaccgaggcagguccccuag

SEQ ID NO: 129308 - RNA, 23 nt, Artificial Sequence
  Synthetic
  misc_feature (3)..(3): n is a, c, g, or u
cgngaccgaggcagguccccuag

SEQ ID NO: 129309 - RNA, 24 nt, Artificial Sequence
  Synthetic
  misc_feature (4)..(4): n is a, c, g, or u
acgngaccgaggcagguccccuag

SEQ ID NO: 129310 - RNA, 18 nt, Artificial Sequence
  Synthetic
cuucucucaauuuucuag

SEQ ID NO: 129311 - RNA, 19 nt, Artificial Sequence
  Synthetic
acuucucucaauuuucuag

SEQ ID NO: 129312 - RNA, 20 nt, Artificial Sequence
  Synthetic
gacuucucucaauuuucuag

SEQ ID NO: 129313 - RNA, 21 nt, Artificial Sequence
  Synthetic
ggacuucucucaauuuucuag

SEQ ID NO: 129314 - RNA, 22 nt, Artificial Sequence
  Synthetic
uggacuucucucaauuuucuag

SEQ ID NO: 129315 - RNA, 23 nt, Artificial Sequence
  Synthetic
guggacuucucucaauuuucuag

SEQ ID NO: 129316 - RNA, 24 nt, Artificial Sequence
  Synthetic
gguggacuucucucaauuuucuag

SEQ ID NO: 129317 - RNA, 18 nt, Artificial Sequence
  Synthetic
  misc_feature (1)..(1): n is a, c, g, or u
nggccaucagcgcaugcg

SEQ ID NO: 129318 - RNA, 19 nt, Artificial Sequence
  Synthetic
  misc_feature (2)..(2): n is a, c, g, or u
unggccaucagcgcaugcg

SEQ ID NO: 129319 - RNA, 20 nt, Artificial Sequence
  Synthetic
  misc_feature (3)..(3): n is a, c, g, or u
aunggccaucagcgcaugcg

SEQ ID NO: 129320 - RNA, 21 nt, Artificial Sequence
  Synthetic
  misc_feature (1)..(1): n is a, c, g, or u
  misc_feature (4)..(4): n is a, c, g, or u
naunggccaucagcgcaugcg

SEQ ID NO: 129321 - RNA, 22 nt, Artificial Sequence
  Synthetic
  misc_feature (2)..(2): n is a, c, g, or u
  misc_feature (5)..(5): n is a, c, g, or u
cnaunggccaucagcgcaugcg

SEQ ID NO: 129322 - RNA, 23 nt, Artificial Sequence
  Synthetic
  misc_feature (3)..(3): n is a, c, g, or u
  misc_feature (6)..(6): n is a, c, g, or u
gcnaunggccaucagcgcaugcg

SEQ ID NO: 129323 - RNA, 24 nt, Artificial Sequence
  Synthetic
  misc_feature (4)..(4): n is a, c, g, or u
  misc_feature (7)..(7): n is a, c, g, or u
ggcnaunggccaucagcgcaugcg

SEQ ID NO: 129324 - RNA, 18 nt, Artificial Sequence
  Synthetic
aucucaaucgccgcgucg

SEQ ID NO: 129325 - RNA, 19 nt, Artificial Sequence
  Synthetic
gaucucaaucgccgcgucg

SEQ ID NO: 129326 - RNA, 20 nt, Artificial Sequence
  Synthetic
agaucucaaucgccgcgucg

SEQ ID NO: 129327 - RNA, 21 nt, Artificial Sequence
  Synthetic
  misc_feature (1)..(1): n is a, c, g, or u
nagaucucaaucgccgcgucg

SEQ ID NO: 129328 - RNA, 22 nt, Artificial Sequence
  Synthetic
  misc_feature (2)..(2): n is a, c, g, or u
gnagaucucaaucgccgcgucg

SEQ ID NO: 129329 - RNA, 23 nt, Artificial Sequence
  Synthetic
  misc_feature (3)..(3): n is a, c, g, or u
cgnagaucucaaucgccgcgucg

SEQ ID NO: 129330 - RNA, 24 nt, Artificial Sequence
  Synthetic
  misc_feature (4)..(4): n is a, c, g, or u
acgnagaucucaaucgccgcgucg

SEQ ID NO: 129331 - RNA, 18 nt, Artificial Sequence
  Synthetic
  misc_feature (13)..(13): n is a, c, g, or u
ugccaacuggauncuucg

SEQ ID NO: 129332 - RNA, 19 nt, Artificial Sequence
  Synthetic
  misc_feature (14)..(14): n is a, c, g, or u
cugccaacuggauncuucg

SEQ ID NO: 129333 - RNA, 20 nt, Artificial Sequence
  Synthetic
  misc_feature (15)..(15): n is a, c, g, or u
acugccaacuggauncuucg

SEQ ID NO: 129334 - RNA, 21 nt, Artificial Sequence
  Synthetic
  misc_feature (16)..(16): n is a, c, g, or u
uacugccaacuggauncuucg

SEQ ID NO: 129335 - RNA, 22 nt, Artificial Sequence
  Synthetic
  misc_feature (17)..(17): n is a, c, g, or u
guacugccaacuggauncuucg

SEQ ID NO: 129336 - RNA, 23 nt, Artificial Sequence
  Synthetic
  misc_feature (18)..(18): n is a, c, g, or u
uguacugccaacuggauncuucg

SEQ ID NO: 129337 - RNA, 24 nt, Artificial Sequence
  Synthetic
  misc_feature (1)..(1): n is a, c, g, or u
  misc_feature (19)..(19): n is a, c, g, or u
nuguacugccaacuggauncuucg

SEQ ID NO: 129338 - RNA, 18 nt, Artificial Sequence
  Synthetic
cauuuguucagugguucg

SEQ ID NO: 129339 - RNA, 19 nt, Artificial Sequence
  Synthetic
ccauuuguucagugguucg

SEQ ID NO: 129340 - RNA, 20 nt, Artificial Sequence
  Synthetic
gccauuuguucagugguucg

SEQ ID NO: 129341 - RNA, 21 nt, Artificial Sequence
  Synthetic
ugccauuuguucagugguucg

SEQ ID NO: 129342 - RNA, 22 nt, Artificial Sequence
  Synthetic
gugccauuuguucagugguucg

SEQ ID NO: 129343 - RNA, 23 nt, Artificial Sequence
  Synthetic
agugccauuuguucagugguucg

SEQ ID NO: 129344 - RNA, 24 nt, Artificial Sequence
  Synthetic
uagugccauuuguucagugguucg

SEQ ID NO: 129345 - RNA, 18 nt, Artificial Sequence
  Synthetic
uuccuuggacucauaagg

SEQ ID NO: 129346 - RNA, 19 nt, Artificial Sequence
  Synthetic
auuccuuggacucauaagg

SEQ ID NO: 129347 - RNA, 20 nt, Artificial Sequence
  Synthetic
uauuccuuggacucauaagg

SEQ ID NO: 129348 - RNA, 21 nt, Artificial Sequence
  Synthetic
guauuccuuggacucauaagg

SEQ ID NO: 129349 - RNA, 22 nt, Artificial Sequence
  Synthetic
aguauuccuuggacucauaagg

SEQ ID NO: 129350 - RNA, 23 nt, Artificial Sequence
  Synthetic
uaguauuccuuggacucauaagg

SEQ ID NO: 129351 - RNA, 24 nt, Artificial Sequence
  Synthetic
uuaguauuccuuggacucauaagg

SEQ ID NO: 129352 - RNA, 18 nt, Artificial Sequence
  Synthetic
  misc_feature (6)..(7): n is a, c, g, or u
ggccannagccaaccagg

SEQ ID NO: 129353 - RNA, 19 nt, Artificial Sequence
  Synthetic
  misc_feature (7)..(8): n is a, c, g, or u
uggccannagccaaccagg

SEQ ID NO: 129354 - RNA, 20 nt, Artificial Sequence
  Synthetic
  misc_feature (8)..(9): n is a, c, g, or u
cuggccannagccaaccagg

SEQ ID NO: 129355 - RNA, 21 nt, Artificial Sequence
  Synthetic
  misc_feature (9)..(10): n is a, c, g, or u
acuggccannagccaaccagg

SEQ ID NO: 129356 - RNA, 22 nt, Artificial Sequence
  Synthetic
  misc_feature (10)..(11): n is a, c, g, or u
cacuggccannagccaaccagg

SEQ ID NO: 129357 - RNA, 23 nt, Artificial Sequence
  Synthetic
  misc_feature (11)..(12): n is a, c, g, or u
ccacuggccannagccaaccagg

SEQ ID NO: 129358 - RNA, 24 nt, Artificial Sequence
  Synthetic
  misc_feature (12)..(13): n is a, c, g, or u
accacuggccannagccaaccagg

SEQ ID NO: 129359 - RNA, 18 nt, Artificial Sequence
  Synthetic
gcuguacaaaaccuacgg

SEQ ID NO: 129360 - RNA, 19 nt, Artificial Sequence
  Synthetic
ugcuguacaaaaccuacgg

SEQ ID NO: 129361 - RNA, 20 nt, Artificial Sequence
  Synthetic
uugcuguacaaaaccuacgg

SEQ ID NO: 129362 - RNA, 21 nt, Artificial Sequence
  Synthetic
guugcuguacaaaaccuacgg

SEQ ID NO: 129363 - RNA, 22 nt, Artificial Sequence
  Synthetic
uguugcuguacaaaaccuacgg

SEQ ID NO: 129364 - RNA, 23 nt, Artificial Sequence
  Synthetic
auguugcuguacaaaaccuacgg

SEQ ID NO: 129365 - RNA, 24 nt, Artificial Sequence
  Synthetic
cauguugcuguacaaaaccuacgg

SEQ ID NO: 129366 - RNA, 18 nt, Artificial Sequence
  Synthetic
  misc_feature (12)..(12): n is a, c, g, or u
acugggaggagnuggggg

SEQ ID NO: 129367 - RNA, 19 nt, Artificial Sequence
  Synthetic
  misc_feature (13)..(13): n is a, c, g, or u
gacugggaggagnuggggg

SEQ ID NO: 129368 - RNA, 20 nt, Artificial Sequence
  Synthetic
  misc_feature (1)..(1): n is a, c, g, or u
  misc_feature (14)..(14): n is a, c, g, or u
ngacugggaggagnuggggg

SEQ ID NO: 129369 - RNA, 21 nt, Artificial Sequence
  Synthetic
  misc_feature (2)..(2): n is a, c, g, or u
  misc_feature (15)..(15): n is a, c, g, or u
angacugggaggagnuggggg

SEQ ID NO: 129370 - RNA, 22 nt, Artificial Sequence
  Synthetic
  misc_feature (3)..(3): n is a, c, g, or u
  misc_feature (16)..(16): n is a, c, g, or u
aangacugggaggagnuggggg

SEQ ID NO: 129371 - RNA, 23 nt, Artificial Sequence
  Synthetic
  misc_feature (4)..(4): n is a, c, g, or u
  misc_feature (17)..(17): n is a, c, g, or u
uaangacugggaggagnuggggg

SEQ ID NO: 129372 - RNA, 24 nt, Artificial Sequence
  Synthetic
  misc_feature (5)..(5): n is a, c, g, or u
  misc_feature (18)..(18): n is a, c, g, or u
uuaangacugggaggagnuggggg

SEQ ID NO: 129373 - RNA, 18 nt, Artificial Sequence
  Synthetic
  misc_feature (13)..(13): n is a, c, g, or u
gacugggaggagnugggg

SEQ ID NO: 129374 - RNA, 19 nt, Artificial Sequence
  Synthetic
  misc_feature (1)..(1): n is a, c, g, or u
  misc_feature (14)..(14): n is a, c, g, or u
ngacugggaggagnugggg

SEQ ID NO: 129375 - RNA, 20 nt, Artificial Sequence
  Synthetic
  misc_feature (2)..(2): n is a, c, g, or u
  misc_feature (15)..(15): n is a, c, g, or u
angacugggaggagnugggg

SEQ ID NO: 129376 - RNA, 21 nt, Artificial Sequence
  Synthetic
  misc_feature (3)..(3): n is a, c, g, or u
  misc_feature (16)..(16): n is a, c, g, or u
aangacugggaggagnugggg

SEQ ID NO: 129377 - RNA, 22 nt, Artificial Sequence
  Synthetic
  misc_feature (4)..(4): n is a, c, g, or u
  misc_feature (17)..(17): n is a, c, g, or u
uaangacugggaggagnugggg

SEQ ID NO: 129378 - RNA, 23 nt, Artificial Sequence
  Synthetic
  misc_feature (5)..(5): n is a, c, g, or u
  misc_feature (18)..(18): n is a, c, g, or u
uuaangacugggaggagnugggg

SEQ ID NO: 129379 - RNA, 24 nt, Artificial Sequence
  Synthetic
  misc_feature (6)..(6): n is a, c, g, or u
  misc_feature (19)..(19): n is a, c, g, or u
uuuaangacugggaggagnugggg

SEQ ID NO: 129380 - RNA, 18 nt, Artificial Sequence
  Synthetic
  misc_feature (6)..(6): n is a, c, g, or u
  misc_feature (10)..(10): n is a, c, g, or u
cacggnggunuuuugggg

SEQ ID NO: 129381 - RNA, 19 nt, Artificial Sequence
  Synthetic
  misc_feature (7)..(7): n is a, c, g, or u
  misc_feature (11)..(11): n is a, c, g, or u
acacggnggunuuuugggg

SEQ ID NO: 129382 - RNA, 20 nt, Artificial Sequence
  Synthetic
  misc_feature (8)..(8): n is a, c, g, or u
  misc_feature (12)..(12): n is a, c, g, or u
cacacggnggunuuuugggg

SEQ ID NO: 129383 - RNA, 21 nt, Artificial Sequence
  Synthetic
  misc_feature (9)..(9): n is a, c, g, or u
  misc_feature (13)..(13): n is a, c, g, or u
ccacacggnggunuuuugggg

SEQ ID NO: 129384 - RNA, 22 nt, Artificial Sequence
  Synthetic
  misc_feature (1)..(1): n is a, c, g, or u
  misc_feature (10)..(10): n is a, c, g, or u
  misc_feature (14)..(14): n is a, c, g, or u
nccacacggnggunuuuugggg

SEQ ID NO: 129385 - RNA, 23 nt, Artificial Sequence
  Synthetic
  misc_feature (2)..(2): n is a, c, g, or u
  misc_feature (11)..(11): n is a, c, g, or u
  misc_feature (15)..(15): n is a, c, g, or u
cnccacacggnggunuuuugggg

SEQ ID NO: 129386 - RNA, 24 nt, Artificial Sequence
  Synthetic
  misc_feature (3)..(3): n is a, c, g, or u
  misc_feature (12)..(12): n is a, c, g, or u
  misc_feature (16)..(16): n is a, c, g, or u
ccnccacacggnggunuuuugggg

SEQ ID NO: 129387 - RNA, 18 nt, Artificial Sequence
  Synthetic
  misc_feature (11)..(11): n is a, c, g, or u
guguguuuaangacuggg

SEQ ID NO: 129388 - RNA, 19 nt, Artificial Sequence
  Synthetic
  misc_feature (12)..(12): n is a, c, g, or u
uguguguuuaangacuggg

SEQ ID NO: 129389 - RNA, 20 nt, Artificial Sequence
  Synthetic
  misc_feature (13)..(13): n is a, c, g, or u
cuguguguuuaangacuggg

SEQ ID NO: 129390 - RNA, 21 nt, Artificial Sequence
  Synthetic
  misc_feature (14)..(14): n is a, c, g, or u
acuguguguuuaangacuggg

SEQ ID NO: 129391 - RNA, 22 nt, Artificial Sequence
  Synthetic
  misc_feature (15)..(15): n is a, c, g, or u
gacuguguguuuaangacuggg

SEQ ID NO: 129392 - RNA, 23 nt, Artificial Sequence
  Synthetic
  misc_feature (16)..(16): n is a, c, g, or u
agacuguguguuuaangacuggg

SEQ ID NO: 129393 - RNA, 24 nt, Artificial Sequence
  Synthetic
  misc_feature (17)..(17): n is a, c, g, or u
aagacuguguguuuaangacuggg

SEQ ID NO: 129394 - RNA, 18 nt, Artificial Sequence
  Synthetic
  misc_feature (7)..(7): n is a, c, g, or u
  misc_feature (11)..(11): n is a, c, g, or u
acacggnggunuuuuggg

SEQ ID NO: 129395 - RNA, 19 nt, Artificial Sequence
  Synthetic
  misc_feature (8)..(8): n is a, c, g, or u
  misc_feature (12)..(12): n is a, c, g, or u
cacacggnggunuuuuggg

SEQ ID NO: 129396 - RNA, 20 nt, Artificial Sequence
  Synthetic
  misc_feature (9)..(9): n is a, c, g, or u
  misc_feature (13)..(13): n is a, c, g, or u
ccacacggnggunuuuuggg

SEQ ID NO: 129397 - RNA, 21 nt, Artificial Sequence
  Synthetic
  misc_feature (1)..(1): n is a, c, g, or u
  misc_feature (10)..(10): n is a, c, g, or u
  misc_feature (14)..(14): n is a, c, g, or u
nccacacggnggunuuuuggg

SEQ ID NO: 129398 - RNA, 22 nt, Artificial Sequence
  Synthetic
  misc_feature (2)..(2): n is a, c, g, or u
  misc_feature (11)..(11): n is a, c, g, or u
  misc_feature (15)..(15): n is a, c, g, or u
cnccacacggnggunuuuuggg

SEQ ID NO: 129399 - RNA, 23 nt, Artificial Sequence
  Synthetic
  misc_feature (3)..(3): n is a, c, g, or u
  misc_feature (12)..(12): n is a, c, g, or u
  misc_feature (16)..(16): n is a, c, g, or u
ccnccacacggnggunuuuuggg

SEQ ID NO: 129400 - RNA, 24 nt, Artificial Sequence
  Synthetic
  misc_feature (1)..(1): n is a, c, g, or u
  misc_feature (4)..(4): n is a, c, g, or u
  misc_feature (13)..(13): n is a, c, g, or u
  misc_feature (17)..(17): n is a, c, g, or u
nccnccacacggnggunuuuuggg

SEQ ID NO: 129401 - RNA, 18 nt, Artificial Sequence
  Synthetic
ugacgcaacccccacugg

SEQ ID NO: 129402 - RNA, 19 nt, Artificial Sequence
  Synthetic
cugacgcaacccccacugg

SEQ ID NO: 129403 - RNA, 20 nt, Artificial Sequence
  Synthetic
gcugacgcaacccccacugg

SEQ ID NO: 129404 - RNA, 21 nt, Artificial Sequence
  Synthetic
ugcugacgcaacccccacugg

SEQ ID NO: 129405 - RNA, 22 nt, Artificial Sequence
  Synthetic
uugcugacgcaacccccacugg

SEQ ID NO: 129406 - RNA, 23 nt, Artificial Sequence
  Synthetic
uuugcugacgcaacccccacugg

SEQ ID NO: 129407 - RNA, 24 nt, Artificial Sequence
  Synthetic
guuugcugacgcaacccccacugg

SEQ ID NO: 129408 - RNA, 18 nt, Artificial Sequence
  Synthetic
  misc_feature (12)..(12): n is a, c, g, or u
uguguguuuaangacugg

SEQ ID NO: 129409 - RNA, 19 nt, Artificial Sequence
  Synthetic
  misc_feature (13)..(13): n is a, c, g, or u
cuguguguuuaangacugg

SEQ ID NO: 129410 - RNA, 20 nt, Artificial Sequence
  Synthetic
  misc_feature (14)..(14): n is a, c, g, or u
acuguguguuuaangacugg

SEQ ID NO: 129411 - RNA, 21 nt, Artificial Sequence
  Synthetic
  misc_feature (15)..(15): n is a, c, g, or u
gacuguguguuuaangacugg

SEQ ID NO: 129412 - RNA, 22 nt, Artificial Sequence
  Synthetic
  misc_feature (16)..(16): n is a, c, g, or u
agacuguguguuuaangacugg

SEQ ID NO: 129413 - RNA, 23 nt, Artificial Sequence
  Synthetic
  misc_feature (17)..(17): n is a, c, g, or u
aagacuguguguuuaangacugg

SEQ ID NO: 129414 - RNA, 24 nt, Artificial Sequence
  Synthetic
  misc_feature (18)..(18): n is a, c, g, or u
aaagacuguguguuuaangacugg

SEQ ID NO: 129415 - RNA, 18 nt, Artificial Sequence
  Synthetic
caagccauucucugcugg

SEQ ID NO: 129416 - RNA, 19 nt, Artificial Sequence
  Synthetic
gcaagccauucucugcugg

SEQ ID NO: 129417 - RNA, 20 nt, Artificial Sequence
  Synthetic
ggcaagccauucucugcugg

SEQ ID NO: 129418 - RNA, 21 nt, Artificial Sequence
  Synthetic
aggcaagccauucucugcugg

SEQ ID NO: 129419 - RNA, 22 nt, Artificial Sequence
  Synthetic
caggcaagccauucucugcugg

SEQ ID NO: 129420 - RNA, 23 nt, Artificial Sequence
  Synthetic
ucaggcaagccauucucugcugg

SEQ ID NO: 129421 - RNA, 24 nt, Artificial Sequence
  Synthetic
cucaggcaagccauucucugcugg

SEQ ID NO: 129422 - RNA, 18 nt, Artificial Sequence
  Synthetic
  misc_feature (2)..(2): n is a, c, g, or u
  misc_feature (15)..(15): n is a, c, g, or u
angacugggaggagnugg

SEQ ID NO: 129423 - RNA, 19 nt, Artificial Sequence
  Synthetic
  misc_feature (3)..(3): n is a, c, g, or u
  misc_feature (16)..(16): n is a, c, g, or u
aangacugggaggagnugg

SEQ ID NO: 129424 - RNA, 20 nt, Artificial Sequence
  Synthetic
  misc_feature (4)..(4): n is a, c, g, or u
  misc_feature (17)..(17): n is a, c, g, or u
uaangacugggaggagnugg

SEQ ID NO: 129425 - RNA, 21 nt, Artificial Sequence
  Synthetic
  misc_feature (5)..(5): n is a, c, g, or u
  misc_feature (18)..(18): n is a, c, g, or u
uuaangacugggaggagnugg

SEQ ID NO: 129426 - RNA, 22 nt, Artificial Sequence
  Synthetic
  misc_feature (6)..(6): n is a, c, g, or u
  misc_feature (19)..(19): n is a, c, g, or u
uuuaangacugggaggagnugg

SEQ ID NO: 129427 - RNA, 23 nt, Artificial Sequence
  Synthetic
  misc_feature (7)..(7): n is a, c, g, or u
  misc_feature (20)..(20): n is a, c, g, or u
guuuaangacugggaggagnugg

SEQ ID NO: 129428 - RNA, 24 nt, Artificial Sequence
  Synthetic
  misc_feature (8)..(8): n is a, c, g, or u
  misc_feature (21)..(21): n is a, c, g, or u
uguuuaangacugggaggagnugg

SEQ ID NO: 129429 - RNA, 18 nt, Artificial Sequence
  Synthetic
  misc_feature (1)..(1): n is a, c, g, or u
nucuugccuuacuuuugg

SEQ ID NO: 129430 - RNA, 19 nt, Artificial Sequence
  Synthetic
  misc_feature (2)..(2): n is a, c, g, or u
unucuugccuuacuuuugg

SEQ ID NO: 129431 - RNA, 20 nt, Artificial Sequence
  Synthetic
  misc_feature (3)..(3): n is a, c, g, or u
aunucuugccuuacuuuugg

SEQ ID NO: 129432 - RNA, 21 nt, Artificial Sequence
  Synthetic
  misc_feature (4)..(4): n is a, c, g, or u
uaunucuugccuuacuuuugg

SEQ ID NO: 129433 - RNA, 22 nt, Artificial Sequence
  Synthetic
  misc_feature (5)..(5): n is a, c, g, or u
auaunucuugccuuacuuuugg

SEQ ID NO: 129434 - RNA, 23 nt, Artificial Sequence
  Synthetic
  misc_feature (6)..(6): n is a, c, g, or u
cauaunucuugccuuacuuuugg

SEQ ID NO: 129435 - RNA, 24 nt, Artificial Sequence
  Synthetic
  misc_feature (7)..(7): n is a, c, g, or u
ucauaunucuugccuuacuuuugg

SEQ ID NO: 129436 - RNA, 18 nt, Artificial Sequence
  Synthetic
  misc_feature (17)..(17): n is a, c, g, or u
aggacuggggacccugng

SEQ ID NO: 129437 - RNA, 19 nt, Artificial Sequence
  Synthetic
  misc_feature (18)..(18): n is a, c, g, or u
gaggacuggggacccugng

SEQ ID NO: 129438 - RNA, 20 nt, Artificial Sequence
  Synthetic
  misc_feature (19)..(19): n is a, c, g, or u
cgaggacuggggacccugng

SEQ ID NO: 129439 - RNA, 21 nt, Artificial Sequence
  Synthetic
  misc_feature (1)..(1): n is a, c, g, or u
  misc_feature (20)..(20): n is a, c, g, or u
ncgaggacuggggacccugng

SEQ ID NO: 129440 - RNA, 22 nt, Artificial Sequence
  Synthetic
  misc_feature (2)..(2): n is a, c, g, or u
  misc_feature (21)..(21): n is a, c, g, or u
cncgaggacuggggacccugng

SEQ ID NO: 129441 - RNA, 23 nt, Artificial Sequence
  Synthetic
  misc_feature (3)..(3): n is a, c, g, or u
  misc_feature (22)..(22): n is a, c, g, or u
ccncgaggacuggggacccugng

SEQ ID NO: 129442 - RNA, 24 nt, Artificial Sequence
  Synthetic
  misc_feature (4)..(4): n is a, c, g, or u
  misc_feature (23)..(23): n is a, c, g, or u
uccncgaggacuggggacccugng

SEQ ID NO: 129443 - RNA, 18 nt, Artificial Sequence
  Synthetic
  misc_feature (8)..(8): n is a, c, g, or u
  misc_feature (10)..(10): n is a, c, g, or u
gacccugngncgaacaug

SEQ ID NO: 129444 - RNA, 19 nt, Artificial Sequence
  Synthetic
  misc_feature (9)..(9): n is a, c, g, or u
  misc_feature (11)..(11): n is a, c, g, or u
ggacccugngncgaacaug

SEQ ID NO: 129445 - RNA, 20 nt, Artificial Sequence
  Synthetic
  misc_feature (10)..(10): n is a, c, g, or u
  misc_feature (12)..(12): n is a, c, g, or u
gggacccugngncgaacaug

SEQ ID NO: 129446 - RNA, 21 nt, Artificial Sequence
  Synthetic
  misc_feature (11)..(11): n is a, c, g, or u
  misc_feature (13)..(13): n is a, c, g, or u
ggggacccugngncgaacaug

SEQ ID NO: 129447 - RNA, 22 nt, Artificial Sequence
  Synthetic
  misc_feature (12)..(12): n is a, c, g, or u
  misc_feature (14)..(14): n is a, c, g, or u
uggggacccugngncgaacaug

SEQ ID NO: 129448 - RNA, 23 nt, Artificial Sequence
  Synthetic
  misc_feature (13)..(13): n is a, c, g, or u
  misc_feature (15)..(15): n is a, c, g, or u
cuggggacccugngncgaacaug

SEQ ID NO: 129449 - RNA, 24 nt, Artificial Sequence
  Synthetic
  misc_feature (14)..(14): n is a, c, g, or u
  misc_feature (16)..(16): n is a, c, g, or u
acuggggacccugngncgaacaug

SEQ ID NO: 129450 - RNA, 18 nt, Artificial Sequence
  Synthetic
cucugccgauccauacug

SEQ ID NO: 129451 - RNA, 19 nt, Artificial Sequence
  Synthetic
ccucugccgauccauacug

SEQ ID NO: 129452 - RNA, 20 nt, Artificial Sequence
  Synthetic
uccucugccgauccauacug

SEQ ID NO: 129453 - RNA, 21 nt, Artificial Sequence
  Synthetic
cuccucugccgauccauacug

SEQ ID NO: 129454 - RNA, 22 nt, Artificial Sequence
  Synthetic
gcuccucugccgauccauacug

SEQ ID NO: 129455 - RNA, 23 nt, Artificial Sequence
  Synthetic
ggcuccucugccgauccauacug

SEQ ID NO: 129456 - RNA, 24 nt, Artificial Sequence
  Synthetic
uggcuccucugccgauccauacug

SEQ ID NO: 129457 - RNA, 18 nt, Artificial Sequence
  Synthetic
gcaagccauucucugcug

SEQ ID NO: 129458 - RNA, 19 nt, Artificial Sequence
  Synthetic
ggcaagccauucucugcug

SEQ ID NO: 129459 - RNA, 20 nt, Artificial Sequence
  Synthetic
aggcaagccauucucugcug

SEQ ID NO: 129460 - RNA, 21 nt, Artificial Sequence
  Synthetic
caggcaagccauucucugcug

SEQ ID NO: 129461 - RNA, 22 nt, Artificial Sequence
  Synthetic
ucaggcaagccauucucugcug

SEQ ID NO: 129462 - RNA, 23 nt, Artificial Sequence
  Synthetic
cucaggcaagccauucucugcug

SEQ ID NO: 129463 - RNA, 24 nt, Artificial Sequence
  Synthetic
acucaggcaagccauucucugcug

SEQ ID NO: 129464 - RNA, 18 nt, Artificial Sequence
  Synthetic
caggcaagccauucucug

SEQ ID NO: 129465 - RNA, 19 nt, Artificial Sequence
  Synthetic
ucaggcaagccauucucug

SEQ ID NO: 129466 - RNA, 20 nt, Artificial Sequence
  Synthetic
cucaggcaagccauucucug

SEQ ID NO: 129467 - RNA, 21 nt, Artificial Sequence
  Synthetic
acucaggcaagccauucucug

SEQ ID NO: 129468 - RNA, 22 nt, Artificial Sequence
  Synthetic
cacucaggcaagccauucucug

SEQ ID NO: 129469 - RNA, 23 nt, Artificial Sequence
  Synthetic
gcacucaggcaagccauucucug

SEQ ID NO: 129470 - RNA, 24 nt, Artificial Sequence
  Synthetic
  misc_feature (1)..(1): n is a, c, g, or u
ngcacucaggcaagccauucucug

SEQ ID NO: 129471 - RNA, 18 nt, Artificial Sequence
  Synthetic
gcagagucuagacucgug

SEQ ID NO: 129472 - RNA, 19 nt, Artificial Sequence
  Synthetic
cgcagagucuagacucgug

SEQ ID NO: 129473 - RNA, 20 nt, Artificial Sequence
  Synthetic
ccgcagagucuagacucgug

SEQ ID NO: 129474 - RNA, 21 nt, Artificial Sequence
  Synthetic
accgcagagucuagacucgug

SEQ ID NO: 129475 - RNA, 22 nt, Artificial Sequence
  Synthetic
uaccgcagagucuagacucgug

SEQ ID NO: 129476 - RNA, 23 nt, Artificial Sequence
  Synthetic
auaccgcagagucuagacucgug

SEQ ID NO: 129477 - RNA, 24 nt, Artificial Sequence
  Synthetic
aauaccgcagagucuagacucgug

SEQ ID NO: 129478 - RNA, 18 nt, Artificial Sequence
  Synthetic
  misc_feature (3)..(3): n is a, c, g, or u
  misc_feature (16)..(16): n is a, c, g, or u
aangacugggaggagnug

SEQ ID NO: 129479 - RNA, 19 nt, Artificial Sequence
  Synthetic
  misc_feature (4)..(4): n is a, c, g, or u
  misc_feature (17)..(17): n is a, c, g, or u
uaangacugggaggagnug

SEQ ID NO: 129480 - RNA, 20 nt, Artificial Sequence
  Synthetic
  misc_feature (5)..(5): n is a, c, g, or u
  misc_feature (18)..(18): n is a, c, g, or u
uuaangacugggaggagnug

SEQ ID NO: 129481 - RNA, 21 nt, Artificial Sequence
  Synthetic
  misc_feature (6)..(6): n is a, c, g, or u
  misc_feature (19)..(19): n is a, c, g, or u
uuuaangacugggaggagnug

SEQ ID NO: 129482 - RNA, 22 nt, Artificial Sequence
  Synthetic
  misc_feature (7)..(7): n is a, c, g, or u
  misc_feature (20)..(20): n is a, c, g, or u
guuuaangacugggaggagnug

SEQ ID NO: 129483 - RNA, 23 nt, Artificial Sequence
  Synthetic
  misc_feature (8)..(8): n is a, c, g, or u
  misc_feature (21)..(21): n is a, c, g, or u
uguuuaangacugggaggagnug

SEQ ID NO: 129484 - RNA, 24 nt, Artificial Sequence
  Synthetic
  misc_feature (9)..(9): n is a, c, g, or u
  misc_feature (22)..(22): n is a, c, g, or u
guguuuaangacugggaggagnug

SEQ ID NO: 129485 - RNA, 18 nt, Artificial Sequence
  Synthetic
  misc_feature (18)..(18): n is a, c, g, or u
uuucuaaguaaacaguan

SEQ ID NO: 129486 - RNA, 19 nt, Artificial Sequence
  Synthetic
  misc_feature (19)..(19): n is a, c, g, or u
cuuucuaaguaaacaguan

SEQ ID NO: 129487 - RNA, 20 nt, Artificial Sequence
  Synthetic
  misc_feature (20)..(20): n is a, c, g, or u
ccuuucuaaguaaacaguan

SEQ ID NO: 129488 - RNA, 21 nt, Artificial Sequence
  Synthetic
  misc_feature (21)..(21): n is a, c, g, or u
gccuuucuaaguaaacaguan

SEQ ID NO: 129489 - RNA, 22 nt, Artificial Sequence
  Synthetic
  misc_feature (22)..(22): n is a, c, g, or u
ggccuuucuaaguaaacaguan

SEQ ID NO: 129490 - RNA, 23 nt, Artificial Sequence
  Synthetic
  misc_feature (23)..(23): n is a, c, g, or u
aggccuuucuaaguaaacaguan

SEQ ID NO: 129491 - RNA, 24 nt, Artificial Sequence
  Synthetic
  misc_feature (24)..(24): n is a, c, g, or u
aaggccuuucuaaguaaacaguan

SEQ ID NO: 129492 - RNA, 18 nt, Artificial Sequence
  Synthetic
  misc_feature (18)..(18): n is a, c, g, or u
cccgcggacgaccccucn

SEQ ID NO: 129493 - RNA, 19 nt, Artificial Sequence
  Synthetic
  misc_feature (19)..(19): n is a, c, g, or u
ucccgcggacgaccccucn

SEQ ID NO: 129494 - RNA, 20 nt, Artificial Sequence
  Synthetic
  misc_feature (20)..(20): n is a, c, g, or u
aucccgcggacgaccccucn

SEQ ID NO: 129495 - RNA, 21 nt, Artificial Sequence
  Synthetic
  misc_feature (21)..(21): n is a, c, g, or u
aaucccgcggacgaccccucn

SEQ ID NO: 129496 - RNA, 22 nt, Artificial Sequence
  Synthetic
  misc_feature (22)..(22): n is a, c, g, or u
gaaucccgcggacgaccccucn

SEQ ID NO: 129497 - RNA, 23 nt, Artificial Sequence
  Synthetic
  misc_feature (23)..(23): n is a, c, g, or u
ugaaucccgcggacgaccccucn

SEQ ID NO: 129498 - RNA, 24 nt, Artificial Sequence
  Synthetic
  misc_feature (24)..(24): n is a, c, g, or u
cugaaucccgcggacgaccccucn

SEQ ID NO: 129499 - RNA, 18 nt, Artificial Sequence
  Synthetic
  misc_feature (15)..(15): n is a, c, g, or u
  misc_feature (18)..(18): n is a, c, g, or u
aauucugucguccunucn

SEQ ID NO: 129500 - RNA, 19 nt, Artificial Sequence
  Synthetic
  misc_feature (1)..(1): n is a, c, g, or u
  misc_feature (16)..(16): n is a, c, g, or u
  misc_feature (19)..(19): n is a, c, g, or u
naauucugucguccunucn

SEQ ID NO: 129501 - RNA, 20 nt, Artificial Sequence
  Synthetic
  misc_feature (2)..(2): n is a, c, g, or u
  misc_feature (17)..(17): n is a, c, g, or u
  misc_feature (20)..(20): n is a, c, g, or u
anaauucugucguccunucn

SEQ ID NO: 129502 - RNA, 21 nt, Artificial Sequence
  Synthetic
  misc_feature (3)..(3): n is a, c, g, or u
  misc_feature (18)..(18): n is a, c, g, or u
  misc_feature (21)..(21): n is a, c, g, or u
ganaauucugucguccunucn

SEQ ID NO: 129503 - RNA, 22 nt, Artificial Sequence
  Synthetic
  misc_feature (4)..(4): n is a, c, g, or u
  misc_feature (19)..(19): n is a, c, g, or u
  misc_feature (22)..(22): n is a, c, g, or u
uganaauucugucguccunucn

SEQ ID NO: 129504 - RNA, 23 nt, Artificial Sequence
  Synthetic
  misc_feature (5)..(5): n is a, c, g, or u
  misc_feature (20)..(20): n is a, c, g, or u
  misc_feature (23)..(23): n is a, c, g, or u
cuganaauucugucguccunucn

SEQ ID NO: 129505 - RNA, 24 nt, Artificial Sequence
  Synthetic
  misc_feature (6)..(6): n is a, c, g, or u
  misc_feature (21)..(21): n is a, c, g, or u
  misc_feature (24)..(24): n is a, c, g, or u
acuganaauucugucguccunucn

SEQ ID NO: 129506 - RNA, 18 nt, Artificial Sequence
  Synthetic
  misc_feature (5)..(5): n is a, c, g, or u
  misc_feature (18)..(18): n is a, c, g, or u
uuaangacugggaggagn

SEQ ID NO: 129507 - RNA, 19 nt, Artificial Sequence
  Synthetic
  misc_feature (6)..(6): n is a, c, g, or u
  misc_feature (19)..(19): n is a, c, g, or u
uuuaangacugggaggagn

SEQ ID NO: 129508 - RNA, 20 nt, Artificial Sequence
  Synthetic
  misc_feature (7)..(7): n is a, c, g, or u
  misc_feature (20)..(20): n is a, c, g, or u
guuuaangacugggaggagn

SEQ ID NO: 129509 - RNA, 21 nt, Artificial Sequence
  Synthetic
  misc_feature (8)..(8): n is a, c, g, or u
  misc_feature (21)..(21): n is a, c, g, or u
uguuuaangacugggaggagn

SEQ ID NO: 129510 - RNA, 22 nt, Artificial Sequence
  Synthetic
  misc_feature (9)..(9): n is a, c, g, or u
  misc_feature (22)..(22): n is a, c, g, or u
guguuuaangacugggaggagn

SEQ ID NO: 129511 - RNA, 23 nt, Artificial Sequence
  Synthetic
  misc_feature (10)..(10): n is a, c, g, or u
  misc_feature (23)..(23): n is a, c, g, or u
uguguuuaangacugggaggagn

SEQ ID NO: 129512 - RNA, 24 nt, Artificial Sequence
  Synthetic
  misc_feature (11)..(11): n is a, c, g, or u
  misc_feature (24)..(24): n is a, c, g, or u
guguguuuaangacugggaggagn

SEQ ID NO: 129513 - RNA, 18 nt, Artificial Sequence
  Synthetic
uugacccuuauaaagaau

SEQ ID NO: 129514 - RNA, 19 nt, Artificial Sequence
  Synthetic
auugacccuuauaaagaau

SEQ ID NO: 129515 - RNA, 20 nt, Artificial Sequence
  Synthetic
cauugacccuuauaaagaau

SEQ ID NO: 129516 - RNA, 21 nt, Artificial Sequence
  Synthetic
acauugacccuuauaaagaau

SEQ ID NO: 129517 - RNA, 22 nt, Artificial Sequence
  Synthetic
gacauugacccuuauaaagaau

SEQ ID NO: 129518 - RNA, 23 nt, Artificial Sequence
  Synthetic
ggacauugacccuuauaaagaau

SEQ ID NO: 129519 - RNA, 24 nt, Artificial Sequence
  Synthetic
uggacauugacccuuauaaagaau

SEQ ID NO: 129520 - RNA, 18 nt, Artificial Sequence
  Synthetic
  misc_feature (1)..(1): n is a, c, g, or u
  misc_feature (10)..(10): n is a, c, g, or u
  misc_feature (13)..(14): n is a, c, g, or u
nuucaugggnuannuaau

SEQ ID NO: 129521 - RNA, 19 nt, Artificial Sequence
  Synthetic
  misc_feature (2)..(2): n is a, c, g, or u
  misc_feature (11)..(11): n is a, c, g, or u
  misc_feature (14)..(15): n is a, c, g, or u
anuucaugggnuannuaau

SEQ ID NO: 129522 - RNA, 20 nt, Artificial Sequence
  Synthetic
  misc_feature (3)..(3): n is a, c, g, or u
  misc_feature (12)..(12): n is a, c, g, or u
  misc_feature (15)..(16): n is a, c, g, or u
aanuucaugggnuannuaau

SEQ ID NO: 129523 - RNA, 21 nt, Artificial Sequence
  Synthetic
  misc_feature (4)..(4): n is a, c, g, or u
  misc_feature (13)..(13): n is a, c, g, or u
  misc_feature (16)..(17): n is a, c, g, or u
aaanuucaugggnuannuaau

SEQ ID NO: 129524 - RNA, 22 nt, Artificial Sequence
  Synthetic
  misc_feature (5)..(5): n is a, c, g, or u
  misc_feature (14)..(14): n is a, c, g, or u
  misc_feature (17)..(18): n is a, c, g, or u
uaaanuucaugggnuannuaau

SEQ ID NO: 129525 - RNA, 23 nt, Artificial Sequence
  Synthetic
  misc_feature (6)..(6): n is a, c, g, or u
  misc_feature (15)..(15): n is a, c, g, or u
  misc_feature (18)..(19): n is a, c, g, or u
cuaaanuucaugggnuannuaau

SEQ ID NO: 129526 - RNA, 24 nt, Artificial Sequence
  Synthetic
  misc_feature (7)..(7): n is a, c, g, or u
  misc_feature (16)..(16): n is a, c, g, or u
  misc_feature (19)..(20): n is a, c, g, or u
ccuaaanuucaugggnuannuaau

SEQ ID NO: 129527 - RNA, 18 nt, Artificial Sequence
  Synthetic
cugcccaaggucuuacau

SEQ ID NO: 129528 - RNA, 19 nt, Artificial Sequence
  Synthetic
ccugcccaaggucuuacau

SEQ ID NO: 129529 - RNA, 20 nt, Artificial Sequence
  Synthetic
uccugcccaaggucuuacau

SEQ ID NO: 129530 - RNA, 21 nt, Artificial Sequence
  Synthetic
auccugcccaaggucuuacau

SEQ ID NO: 129531 - RNA, 22 nt, Artificial Sequence
  Synthetic
gauccugcccaaggucuuacau

SEQ ID NO: 129532 - RNA, 23 nt, Artificial Sequence
  Synthetic
agauccugcccaaggucuuacau

SEQ ID NO: 129533 - RNA, 24 nt, Artificial Sequence
  Synthetic
cagauccugcccaaggucuuacau

SEQ ID NO: 129534 - RNA, 18 nt, Artificial Sequence
  Synthetic
agguaggagugggagcau

SEQ ID NO: 129535 - RNA, 19 nt, Artificial Sequence
  Synthetic
cagguaggagugggagcau

SEQ ID NO: 129536 - RNA, 20 nt, Artificial Sequence
  Synthetic
ccagguaggagugggagcau

SEQ ID NO: 129537 - RNA, 21 nt, Artificial Sequence
  Synthetic
accagguaggagugggagcau

SEQ ID NO: 129538 - RNA, 22 nt, Artificial Sequence
  Synthetic
aaccagguaggagugggagcau

SEQ ID NO: 129539 - RNA, 23 nt, Artificial Sequence
  Synthetic
caaccagguaggagugggagcau

SEQ ID NO: 129540 - RNA, 24 nt, Artificial Sequence
  Synthetic
ccaaccagguaggagugggagcau

SEQ ID NO: 129541 - RNA, 18 nt, Artificial Sequence
  Synthetic
aaaaccucgcaaaggcau

SEQ ID NO: 129542 - RNA, 19 nt, Artificial Sequence
  Synthetic
caaaaccucgcaaaggcau

SEQ ID NO: 129543 - RNA, 20 nt, Artificial Sequence
  Synthetic
ucaaaaccucgcaaaggcau

SEQ ID NO: 129544 - RNA, 21 nt, Artificial Sequence
  Synthetic
aucaaaaccucgcaaaggcau

SEQ ID NO: 129545 - RNA, 22 nt, Artificial Sequence
  Synthetic
caucaaaaccucgcaaaggcau

SEQ ID NO: 129546 - RNA, 23 nt, Artificial Sequence
  Synthetic
ucaucaaaaccucgcaaaggcau

SEQ ID NO: 129547 - RNA, 24 nt, Artificial Sequence
  Synthetic
gucaucaaaaccucgcaaaggcau

SEQ ID NO: 129548 - RNA, 18 nt, Artificial Sequence
  Synthetic
aucaguuggacccugcau

SEQ ID NO: 129549 - RNA, 19 nt, Artificial Sequence
  Synthetic
caucaguuggacccugcau

SEQ ID NO: 129550 - RNA, 20 nt, Artificial Sequence
  Synthetic
ucaucaguuggacccugcau

SEQ ID NO: 129551 - RNA, 21 nt, Artificial Sequence
  Synthetic
aucaucaguuggacccugcau

SEQ ID NO: 129552 - RNA, 22 nt, Artificial Sequence
  Synthetic
gaucaucaguuggacccugcau

SEQ ID NO: 129553 - RNA, 23 nt, Artificial Sequence
  Synthetic
cgaucaucaguuggacccugcau

SEQ ID NO: 129554 - RNA, 24 nt, Artificial Sequence
  Synthetic
ccgaucaucaguuggacccugcau

SEQ ID NO: 129555 - RNA, 18 nt, Artificial Sequence
  Synthetic
  misc_feature (15)..(15): n is a, c, g, or u
gaacaagagcuacancau

SEQ ID NO: 129556 - RNA, 19 nt, Artificial Sequence
  Synthetic
  misc_feature (16)..(16): n is a, c, g, or u
ggaacaagagcuacancau

SEQ ID NO: 129557 - RNA, 20 nt, Artificial Sequence
  Synthetic
  misc_feature (17)..(17): n is a, c, g, or u
gggaacaagagcuacancau

SEQ ID NO: 129558 - RNA, 21 nt, Artificial Sequence
  Synthetic
  misc_feature (18)..(18): n is a, c, g, or u
ugggaacaagagcuacancau

SEQ ID NO: 129559 - RNA, 22 nt, Artificial Sequence
  Synthetic
  misc_feature (19)..(19): n is a, c, g, or u
uugggaacaagagcuacancau

SEQ ID NO: 129560 - RNA, 23 nt, Artificial Sequence
  Synthetic
  misc_feature (20)..(20): n is a, c, g, or u
cuugggaacaagagcuacancau

SEQ ID NO: 129561 - RNA, 24 nt, Artificial Sequence
  Synthetic
  misc_feature (21)..(21): n is a, c, g, or u
ucuugggaacaagagcuacancau

SEQ ID NO: 129562 - RNA, 18 nt, Artificial Sequence
  Synthetic
  misc_feature (3)..(3): n is a, c, g, or u
aanucaaacaauccagau

SEQ ID NO: 129563 - RNA, 19 nt, Artificial Sequence
  Synthetic
  misc_feature (4)..(4): n is a, c, g, or u
caanucaaacaauccagau

SEQ ID NO: 129564 - RNA, 20 nt, Artificial Sequence
  Synthetic
  misc_feature (5)..(5): n is a, c, g, or u
ccaanucaaacaauccagau

SEQ ID NO: 129565 - RNA, 21 nt, Artificial Sequence
  Synthetic
  misc_feature (6)..(6): n is a, c, g, or u
gccaanucaaacaauccagau

SEQ ID NO: 129566 - RNA, 22 nt, Artificial Sequence
  Synthetic
  misc_feature (7)..(7): n is a, c, g, or u
agccaanucaaacaauccagau

SEQ ID NO: 129567 - RNA, 23 nt, Artificial Sequence
  Synthetic
  misc_feature (8)..(8): n is a, c, g, or u
gagccaanucaaacaauccagau

SEQ ID NO: 129568 - RNA, 24 nt, Artificial Sequence
  Synthetic
  misc_feature (9)..(9): n is a, c, g, or u
ggagccaanucaaacaauccagau

SEQ ID NO: 129569 - RNA, 18 nt, Artificial Sequence
  Synthetic
  misc_feature (3)..(3): n is a, c, g, or u
  misc_feature (6)..(7): n is a, c, g, or u
  misc_feature (9)..(9): n is a, c, g, or u
gunaanngnccuauugau

SEQ ID NO: 129570 - RNA, 19 nt, Artificial Sequence
  Synthetic
  misc_feature (4)..(4): n is a, c, g, or u
  misc_feature (7)..(8): n is a, c, g, or u
  misc_feature (10)..(10): n is a, c, g, or u
ugunaanngnccuauugau

SEQ ID NO: 129571 - RNA, 20 nt, Artificial Sequence
  Synthetic
  misc_feature (5)..(5): n is a, c, g, or u
  misc_feature (8)..(9): n is a, c, g, or u
  misc_feature (11)..(11): n is a, c, g, or u
cugunaanngnccuauugau

SEQ ID NO: 129572 - RNA, 21 nt, Artificial Sequence
  Synthetic
  misc_feature (6)..(6): n is a, c, g, or u
  misc_feature (9)..(10): n is a, c, g, or u
  misc_feature (12)..(12): n is a, c, g, or u
ccugunaanngnccuauugau

SEQ ID NO: 129573 - RNA, 22 nt, Artificial Sequence
  Synthetic
  misc_feature (7)..(7): n is a, c, g, or u
  misc_feature (10)..(11): n is a, c, g, or u
  misc_feature (13)..(13): n is a, c, g, or u
uccugunaanngnccuauugau

SEQ ID NO: 129574 - RNA, 23 nt, Artificial Sequence
  Synthetic
  misc_feature (8)..(8): n is a, c, g, or u
  misc_feature (11)..(12): n is a, c, g, or u
  misc_feature (14)..(14): n is a, c, g, or u
uuccugunaanngnccuauugau

SEQ ID NO: 129575 - RNA, 24 nt, Artificial Sequence
  Synthetic
  misc_feature (9)..(9): n is a, c, g, or u
  misc_feature (12)..(13): n is a, c, g, or u
  misc_feature (15)..(15): n is a, c, g, or u
cuuccugunaanngnccuauugau

SEQ ID NO: 129576 - RNA, 18 nt, Artificial Sequence
  Synthetic
  misc_feature (9)..(9): n is a, c, g, or u
aaggcuggnauucuauau

SEQ ID NO: 129577 - RNA, 19 nt, Artificial Sequence
  Synthetic
  misc_feature (10)..(10): n is a, c, g, or u
gaaggcuggnauucuauau

SEQ ID NO: 129578 - RNA, 20 nt, Artificial Sequence
  Synthetic
  misc_feature (11)..(11): n is a, c, g, or u
ggaaggcuggnauucuauau

SEQ ID NO: 129579 - RNA, 21 nt, Artificial Sequence
  Synthetic
  misc_feature (12)..(12): n is a, c, g, or u
uggaaggcuggnauucuauau

SEQ ID NO: 129580 - RNA, 22 nt, Artificial Sequence
  Synthetic
  misc_feature (13)..(13): n is a, c, g, or u
uuggaaggcuggnauucuauau

SEQ ID NO: 129581 - RNA, 23 nt, Artificial Sequence
  Synthetic
  misc_feature (14)..(14): n is a, c, g, or u
uuuggaaggcuggnauucuauau

SEQ ID NO: 129582 - RNA, 24 nt, Artificial Sequence
  Synthetic
  misc_feature (15)..(15): n is a, c, g, or u
cuuuggaaggcuggnauucuauau

SEQ ID NO: 129583 - RNA, 18 nt, Artificial Sequence
  Synthetic
auauggaugaugugguau

SEQ ID NO: 129584 - RNA, 19 nt, Artificial Sequence
  Synthetic
uauauggaugaugugguau

SEQ ID NO: 129585 - RNA, 20 nt, Artificial Sequence
  Synthetic
  misc_feature (1)..(1): n is a, c, g, or u
nuauauggaugaugugguau

SEQ ID NO: 129586 - RNA, 21 nt, Artificial Sequence
  Synthetic
  misc_feature (2)..(2): n is a, c, g, or u
gnuauauggaugaugugguau

SEQ ID NO: 129587 - RNA, 22 nt, Artificial Sequence
  Synthetic
  misc_feature (3)..(3): n is a, c, g, or u
agnuauauggaugaugugguau

SEQ ID NO: 129588 - RNA, 23 nt, Artificial Sequence
  Synthetic
  misc_feature (4)..(4): n is a, c, g, or u
cagnuauauggaugaugugguau

SEQ ID NO: 129589 - RNA, 24 nt, Artificial Sequence
  Synthetic
  misc_feature (5)..(5): n is a, c, g, or u
ucagnuauauggaugaugugguau

SEQ ID NO: 129590 - RNA, 18 nt, Artificial Sequence
  Synthetic
  misc_feature (7)..(7): n is a, c, g, or u
  misc_feature (9)..(9): n is a, c, g, or u
gguuaangnucuuuguau

SEQ ID NO: 129591 - RNA, 19 nt, Artificial Sequence
  Synthetic
  misc_feature (8)..(8): n is a, c, g, or u
  misc_feature (10)..(10): n is a, c, g, or u
agguuaangnucuuuguau

SEQ ID NO: 129592 - RNA, 20 nt, Artificial Sequence
  Synthetic
  misc_feature (9)..(9): n is a, c, g, or u
  misc_feature (11)..(11): n is a, c, g, or u
uagguuaangnucuuuguau

SEQ ID NO: 129593 - RNA, 21 nt, Artificial Sequence
  Synthetic
  misc_feature (10)..(10): n is a, c, g, or u
  misc_feature (12)..(12): n is a, c, g, or u
uuagguuaangnucuuuguau

SEQ ID NO: 129594 - RNA, 22 nt, Artificial Sequence
  Synthetic
  misc_feature (11)..(11): n is a, c, g, or u
  misc_feature (13)..(13): n is a, c, g, or u
auuagguuaangnucuuuguau

SEQ ID NO: 129595 - RNA, 23 nt, Artificial Sequence
  Synthetic
  misc_feature (12)..(12): n is a, c, g, or u
  misc_feature (14)..(14): n is a, c, g, or u
gauuagguuaangnucuuuguau

SEQ ID NO: 129596 - RNA, 24 nt, Artificial Sequence
  Synthetic
  misc_feature (13)..(13): n is a, c, g, or u
  misc_feature (15)..(15): n is a, c, g, or u
agauuagguuaangnucuuuguau

SEQ ID NO: 129597 - RNA, 18 nt, Artificial Sequence
  Synthetic
  misc_feature (10)..(10): n is a, c, g, or u
ucaaucuccncgaggacu

SEQ ID NO: 129598 - RNA, 19 nt, Artificial Sequence
  Synthetic
  misc_feature (11)..(11): n is a, c, g, or u
gucaaucuccncgaggacu

SEQ ID NO: 129599 - RNA, 20 nt, Artificial Sequence
  Synthetic
  misc_feature (12)..(12): n is a, c, g, or u
cgucaaucuccncgaggacu

SEQ ID NO: 129600 - RNA, 21 nt, Artificial Sequence
  Synthetic
  misc_feature (13)..(13): n is a, c, g, or u
ucgucaaucuccncgaggacu

SEQ ID NO: 129601 - RNA, 22 nt, Artificial Sequence
  Synthetic
  misc_feature (14)..(14): n is a, c, g, or u
cucgucaaucuccncgaggacu

SEQ ID NO: 129602 - RNA, 23 nt, Artificial Sequence
  Synthetic
  misc_feature (15)..(15): n is a, c, g, or u
ucucgucaaucuccncgaggacu

SEQ ID NO: 129603 - RNA, 24 nt, Artificial Sequence
  Synthetic
  misc_feature (16)..(16): n is a, c, g, or u
aucucgucaaucuccncgaggacu

SEQ ID NO: 129604 - RNA, 18 nt, Artificial Sequence
  Synthetic
  misc_feature (14)..(14): n is a, c, g, or u
acuguguguuuaangacu

SEQ ID NO: 129605 - RNA, 19 nt, Artificial Sequence
  Synthetic
  misc_feature (15)..(15): n is a, c, g, or u
gacuguguguuuaangacu

SEQ ID NO: 129606 - RNA, 20 nt, Artificial Sequence
  Synthetic
  misc_feature (16)..(16): n is a, c, g, or u
agacuguguguuuaangacu

SEQ ID NO: 129607 - RNA, 21 nt, Artificial Sequence
  Synthetic
  misc_feature (17)..(17): n is a, c, g, or u
aagacuguguguuuaangacu

SEQ ID NO: 129608 - RNA, 22 nt, Artificial Sequence
  Synthetic
  misc_feature (18)..(18): n is a, c, g, or u
aaagacuguguguuuaangacu

SEQ ID NO: 129609 - RNA, 23 nt, Artificial Sequence
  Synthetic
  misc_feature (19)..(19): n is a, c, g, or u
caaagacuguguguuuaangacu

SEQ ID NO: 129610 - RNA, 24 nt, Artificial Sequence
  Synthetic
  misc_feature (20)..(20): n is a, c, g, or u
ucaaagacuguguguuuaangacu

SEQ ID NO: 129611 - RNA, 18 nt, Artificial Sequence
  Synthetic
ccucugccgauccauacu

SEQ ID NO: 129612 - RNA, 19 nt, Artificial Sequence
  Synthetic
uccucugccgauccauacu

SEQ ID NO: 129613 - RNA, 20 nt, Artificial Sequence
  Synthetic
cuccucugccgauccauacu

SEQ ID NO: 129614 - RNA, 21 nt, Artificial Sequence
  Synthetic
gcuccucugccgauccauacu

SEQ ID NO: 129615 - RNA, 22 nt, Artificial Sequence
  Synthetic
ggcuccucugccgauccauacu

SEQ ID NO: 129616 - RNA, 23 nt, Artificial Sequence
  Synthetic
uggcuccucugccgauccauacu

SEQ ID NO: 129617 - RNA, 24 nt, Artificial Sequence
  Synthetic
guggcuccucugccgauccauacu

SEQ ID NO: 129618 - RNA, 18 nt, Artificial Sequence
  Synthetic
aaagaauuuggagcuacu

SEQ ID NO: 129619 - RNA, 19 nt, Artificial Sequence
  Synthetic
uaaagaauuuggagcuacu

SEQ ID NO: 129620 - RNA, 20 nt, Artificial Sequence
  Synthetic
auaaagaauuuggagcuacu

SEQ ID NO: 129621 - RNA, 21 nt, Artificial Sequence
  Synthetic
uauaaagaauuuggagcuacu

SEQ ID NO: 129622 - RNA, 22 nt, Artificial Sequence
  Synthetic
uuauaaagaauuuggagcuacu

SEQ ID NO: 129623 - RNA, 23 nt, Artificial Sequence
  Synthetic
cuuauaaagaauuuggagcuacu

SEQ ID NO: 129624 - RNA, 24 nt, Artificial Sequence
  Synthetic
ccuuauaaagaauuuggagcuacu

SEQ ID NO: 129625 - RNA, 18 nt, Artificial Sequence
  Synthetic
ggcuuucgcaaaauaccu

SEQ ID NO: 129626 - RNA, 19 nt, Artificial Sequence
  Synthetic
gggcuuucgcaaaauaccu

SEQ ID NO: 129627 - RNA, 20 nt, Artificial Sequence
  Synthetic
ugggcuuucgcaaaauaccu

SEQ ID NO: 129628 - RNA, 21 nt, Artificial Sequence
  Synthetic
  misc_feature (1)..(1): n is a, c, g, or u
nugggcuuucgcaaaauaccu

SEQ ID NO: 129629 - RNA, 22 nt, Artificial Sequence
  Synthetic
  misc_feature (2)..(2): n is a, c, g, or u
cnugggcuuucgcaaaauaccu

SEQ ID NO: 129630 - RNA, 23 nt, Artificial Sequence
  Synthetic
  misc_feature (3)..(3): n is a, c, g, or u
ucnugggcuuucgcaaaauaccu

SEQ ID NO: 129631 - RNA, 24 nt, Artificial Sequence
  Synthetic
  misc_feature (1)..(1): n is a, c, g, or u
  misc_feature (4)..(4): n is a, c, g, or u
nucnugggcuuucgcaaaauaccu

SEQ ID NO: 129632 - RNA, 18 nt, Artificial Sequence
  Synthetic
  misc_feature (15)..(15): n is a, c, g, or u
cuuucuguucccaanccu

SEQ ID NO: 129633 - RNA, 19 nt, Artificial Sequence
  Synthetic
  misc_feature (16)..(16): n is a, c, g, or u
ucuuucuguucccaanccu

SEQ ID NO: 129634 - RNA, 20 nt, Artificial Sequence
  Synthetic
  misc_feature (17)..(17): n is a, c, g, or u
aucuuucuguucccaanccu

SEQ ID NO: 129635 - RNA, 21 nt, Artificial Sequence
  Synthetic
  misc_feature (18)..(18): n is a, c, g, or u
aaucuuucuguucccaanccu

SEQ ID NO: 129636 - RNA, 22 nt, Artificial Sequence
  Synthetic
  misc_feature (19)..(19): n is a, c, g, or u
gaaucuuucuguucccaanccu

SEQ ID NO: 129637 - RNA, 23 nt, Artificial Sequence
  Synthetic
  misc_feature (20)..(20): n is a, c, g, or u
cgaaucuuucuguucccaanccu

SEQ ID NO: 129638 - RNA, 24 nt, Artificial Sequence
  Synthetic
  misc_feature (21)..(21): n is a, c, g, or u
acgaaucuuucuguucccaanccu

SEQ ID NO: 129639 - RNA, 18 nt, Artificial Sequence
  Synthetic
  misc_feature (8)..(8): n is a, c, g, or u
accccucncggggccgcu

SEQ ID NO: 129640 - RNA, 19 nt, Artificial Sequence
  Synthetic
  misc_feature (9)..(9): n is a, c, g, or u
gaccccucncggggccgcu

SEQ ID NO: 129641 - RNA, 20 nt, Artificial Sequence
  Synthetic
  misc_feature (10)..(10): n is a, c, g, or u
cgaccccucncggggccgcu

SEQ ID NO: 129642 - RNA, 21 nt, Artificial Sequence
  Synthetic
  misc_feature (11)..(11): n is a, c, g, or u
acgaccccucncggggccgcu

SEQ ID NO: 129643 - RNA, 22 nt, Artificial Sequence
  Synthetic
  misc_feature (12)..(12): n is a, c, g, or u
gacgaccccucncggggccgcu

SEQ ID NO: 129644 - RNA, 23 nt, Artificial Sequence
  Synthetic
  misc_feature (13)..(13): n is a, c, g, or u
ggacgaccccucncggggccgcu

SEQ ID NO: 129645 - RNA, 24 nt, Artificial Sequence
  Synthetic
  misc_feature (14)..(14): n is a, c, g, or u
cggacgaccccucncggggccgcu

SEQ ID NO: 129646 - RNA, 18 nt, Artificial Sequence
  Synthetic
ggguggagcccucaggcu

SEQ ID NO: 129647 - RNA, 19 nt, Artificial Sequence
  Synthetic
gggguggagcccucaggcu

SEQ ID NO: 129648 - RNA, 20 nt, Artificial Sequence
  Synthetic
ugggguggagcccucaggcu

SEQ ID NO: 129649 - RNA, 21 nt, Artificial Sequence
  Synthetic
uugggguggagcccucaggcu

SEQ ID NO: 129650 - RNA, 22 nt, Artificial Sequence
  Synthetic
uuugggguggagcccucaggcu

SEQ ID NO: 129651 - RNA, 23 nt, Artificial Sequence
  Synthetic
uuuugggguggagcccucaggcu

SEQ ID NO: 129652 - RNA, 24 nt, Artificial Sequence
  Synthetic
  misc_feature (1)..(1): n is a, c, g, or u
nuuuugggguggagcccucaggcu

SEQ ID NO: 129653 - RNA, 18 nt, Artificial Sequence
  Synthetic
  misc_feature (13)..(13): n is a, c, g, or u
gcugugccuuggnuggcu

SEQ ID NO: 129654 - RNA, 19 nt, Artificial Sequence
  Synthetic
  misc_feature (14)..(14): n is a, c, g, or u
agcugugccuuggnuggcu

SEQ ID NO: 129655 - RNA, 20 nt, Artificial Sequence
  Synthetic
  misc_feature (15)..(15): n is a, c, g, or u
aagcugugccuuggnuggcu

SEQ ID NO: 129656 - RNA, 21 nt, Artificial Sequence
  Synthetic
  misc_feature (16)..(16): n is a, c, g, or u
caagcugugccuuggnuggcu

SEQ ID NO: 129657 - RNA, 22 nt, Artificial Sequence
  Synthetic
  misc_feature (17)..(17): n is a, c, g, or u
ccaagcugugccuuggnuggcu

SEQ ID NO: 129658 - RNA, 23 nt, Artificial Sequence
  Synthetic
  misc_feature (18)..(18): n is a, c, g, or u
uccaagcugugccuuggnuggcu

SEQ ID NO: 129659 - RNA, 24 nt, Artificial Sequence
  Synthetic
  misc_feature (19)..(19): n is a, c, g, or u
cuccaagcugugccuuggnuggcu

SEQ ID NO: 129660 - RNA, 18 nt, Artificial Sequence
  Synthetic
ggcaagccauucucugcu

SEQ ID NO: 129661 - RNA, 19 nt, Artificial Sequence
  Synthetic
aggcaagccauucucugcu

SEQ ID NO: 129662 - RNA, 20 nt, Artificial Sequence
  Synthetic
caggcaagccauucucugcu

SEQ ID NO: 129663 - RNA, 21 nt, Artificial Sequence
  Synthetic
ucaggcaagccauucucugcu

SEQ ID NO: 129664 - RNA, 22 nt, Artificial Sequence
  Synthetic
cucaggcaagccauucucugcu

SEQ ID NO: 129665 - RNA, 23 nt, Artificial Sequence
  Synthetic
acucaggcaagccauucucugcu

SEQ ID NO: 129666 - RNA, 24 nt, Artificial Sequence
  Synthetic
cacucaggcaagccauucucugcu

SEQ ID NO: 129667 - RNA, 18 nt, Artificial Sequence
  Synthetic
cgcagaagaucucaaucu

SEQ ID NO: 129668 - RNA, 19 nt, Artificial Sequence
  Synthetic
ucgcagaagaucucaaucu

SEQ ID NO: 129669 - RNA, 20 nt, Artificial Sequence
  Synthetic
gucgcagaagaucucaaucu

SEQ ID NO: 129670 - RNA, 21 nt, Artificial Sequence
  Synthetic
cgucgcagaagaucucaaucu

SEQ ID NO: 129671 - RNA, 22 nt, Artificial Sequence
  Synthetic
gcgucgcagaagaucucaaucu

SEQ ID NO: 129672 - RNA, 23 nt, Artificial Sequence
  Synthetic
cgcgucgcagaagaucucaaucu

SEQ ID NO: 129673 - RNA, 24 nt, Artificial Sequence
  Synthetic
ccgcgucgcagaagaucucaaucu

SEQ ID NO: 129674 - RNA, 18 nt, Artificial Sequence
  Synthetic
acauuauuuacauacucu

SEQ ID NO: 129675 - RNA, 19 nt, Artificial Sequence
  Synthetic
gacauuauuuacauacucu

SEQ ID NO: 129676 - RNA, 20 nt, Artificial Sequence
  Synthetic
  misc_feature (1)..(1): n is a, c, g, or u
ngacauuauuuacauacucu

SEQ ID NO: 129677 - RNA, 21 nt, Artificial Sequence
  Synthetic
  misc_feature (2)..(2): n is a, c, g, or u
cngacauuauuuacauacucu

SEQ ID NO: 129678 - RNA, 22 nt, Artificial Sequence
  Synthetic
  misc_feature (3)..(3): n is a, c, g, or u
ccngacauuauuuacauacucu

SEQ ID NO: 129679 - RNA, 23 nt, Artificial Sequence
  Synthetic
  misc_feature (4)..(4): n is a, c, g, or u
accngacauuauuuacauacucu

SEQ ID NO: 129680 - RNA, 24 nt, Artificial Sequence
  Synthetic
  misc_feature (1)..(1): n is a, c, g, or u
  misc_feature (5)..(5): n is a, c, g, or u
naccngacauuauuuacauacucu

SEQ ID NO: 129681 - RNA, 18 nt, Artificial Sequence
  Synthetic
ucccaucucuccaccucu

SEQ ID NO: 129682 - RNA, 19 nt, Artificial Sequence
  Synthetic
cucccaucucuccaccucu

SEQ ID NO: 129683 - RNA, 20 nt, Artificial Sequence
  Synthetic
acucccaucucuccaccucu

SEQ ID NO: 129684 - RNA, 21 nt, Artificial Sequence
  Synthetic
uacucccaucucuccaccucu

SEQ ID NO: 129685 - RNA, 22 nt, Artificial Sequence
  Synthetic
cuacucccaucucuccaccucu

SEQ ID NO: 129686 - RNA, 23 nt, Artificial Sequence
  Synthetic
ccuacucccaucucuccaccucu

SEQ ID NO: 129687 - RNA, 24 nt, Artificial Sequence
  Synthetic
gccuacucccaucucuccaccucu

SEQ ID NO: 129688 - RNA, 18 nt, Artificial Sequence
  Synthetic
ugcgggucaccauauucu

SEQ ID NO: 129689 - RNA, 19 nt, Artificial Sequence
  Synthetic
uugcgggucaccauauucu

SEQ ID NO: 129690 - RNA, 20 nt, Artificial Sequence
  Synthetic
uuugcgggucaccauauucu

SEQ ID NO: 129691 - RNA, 21 nt, Artificial Sequence
  Synthetic
uuuugcgggucaccauauucu

SEQ ID NO: 129692 - RNA, 22 nt, Artificial Sequence
  Synthetic
auuuugcgggucaccauauucu

SEQ ID NO: 129693 - RNA, 23 nt, Artificial Sequence
  Synthetic
cauuuugcgggucaccauauucu

SEQ ID NO: 129694 - RNA, 24 nt, Artificial Sequence
  Synthetic
ucauuuugcgggucaccauauucu

SEQ ID NO: 129695 - RNA, 18 nt, Artificial Sequence
  Synthetic
gacuucucucaauuuucu

SEQ ID NO: 129696 - RNA, 19 nt, Artificial Sequence
  Synthetic
ggacuucucucaauuuucu

SEQ ID NO: 129697 - RNA, 20 nt, Artificial Sequence
  Synthetic
uggacuucucucaauuuucu

SEQ ID NO: 129698 - RNA, 21 nt, Artificial Sequence
  Synthetic
guggacuucucucaauuuucu

SEQ ID NO: 129699 - RNA, 22 nt, Artificial Sequence
  Synthetic
gguggacuucucucaauuuucu

SEQ ID NO: 129700 - RNA, 23 nt, Artificial Sequence
  Synthetic
ugguggacuucucucaauuuucu

SEQ ID NO: 129701 - RNA, 24 nt, Artificial Sequence
  Synthetic
gugguggacuucucucaauuuucu

SEQ ID NO: 129702 - RNA, 18 nt, Artificial Sequence
  Synthetic
  misc_feature (3)..(3): n is a, c, g, or u
  misc_feature (6)..(7): n is a, c, g, or u
ggnuannuaauuggaagu

SEQ ID NO: 129703 - RNA, 19 nt, Artificial Sequence
  Synthetic
  misc_feature (4)..(4): n is a, c, g, or u
  misc_feature (7)..(8): n is a, c, g, or u
gggnuannuaauuggaagu

SEQ ID NO: 129704 - RNA, 20 nt, Artificial Sequence
  Synthetic
  misc_feature (5)..(5): n is a, c, g, or u
  misc_feature (8)..(9): n is a, c, g, or u
ugggnuannuaauuggaagu

SEQ ID NO: 129705 - RNA, 21 nt, Artificial Sequence
  Synthetic
  misc_feature (6)..(6): n is a, c, g, or u
  misc_feature (9)..(10): n is a, c, g, or u
augggnuannuaauuggaagu

SEQ ID NO: 129706 - RNA, 22 nt, Artificial Sequence
  Synthetic
  misc_feature (7)..(7): n is a, c, g, or u
  misc_feature (10)..(11): n is a, c, g, or u
caugggnuannuaauuggaagu

SEQ ID NO: 129707 - RNA, 23 nt, Artificial Sequence
  Synthetic
  misc_feature (8)..(8): n is a, c, g, or u
  misc_feature (11)..(12): n is a, c, g, or u
ucaugggnuannuaauuggaagu

SEQ ID NO: 129708 - RNA, 24 nt, Artificial Sequence
  Synthetic
  misc_feature (9)..(9): n is a, c, g, or u
  misc_feature (12)..(13): n is a, c, g, or u
uucaugggnuannuaauuggaagu

SEQ ID NO: 129709 - RNA, 18 nt, Artificial Sequence
  Synthetic
  misc_feature (6)..(6): n is a, c, g, or u
ggaucnacaacaaccagu

SEQ ID NO: 129710 - RNA, 19 nt, Artificial Sequence
  Synthetic
  misc_feature (7)..(7): n is a, c, g, or u
aggaucnacaacaaccagu

SEQ ID NO: 129711 - RNA, 20 nt, Artificial Sequence
  Synthetic
  misc_feature (8)..(8): n is a, c, g, or u
caggaucnacaacaaccagu

SEQ ID NO: 129712 - RNA, 21 nt, Artificial Sequence
  Synthetic
  misc_feature (9)..(9): n is a, c, g, or u
ccaggaucnacaacaaccagu

SEQ ID NO: 129713 - RNA, 22 nt, Artificial Sequence
  Synthetic
  misc_feature (10)..(10): n is a, c, g, or u
uccaggaucnacaacaaccagu

SEQ ID NO: 129714 - RNA, 23 nt, Artificial Sequence
  Synthetic
  misc_feature (11)..(11): n is a, c, g, or u
uuccaggaucnacaacaaccagu

SEQ ID NO: 129715 - RNA, 24 nt, Artificial Sequence
  Synthetic
  misc_feature (12)..(12): n is a, c, g, or u
auuccaggaucnacaacaaccagu

SEQ ID NO: 129716 - RNA, 18 nt, Artificial Sequence
  Synthetic
ccuccaccaaucggcagu

SEQ ID NO: 129717 - RNA, 19 nt, Artificial Sequence
  Synthetic
gccuccaccaaucggcagu

SEQ ID NO: 129718 - RNA, 20 nt, Artificial Sequence
  Synthetic
ugccuccaccaaucggcagu

SEQ ID NO: 129719 - RNA, 21 nt, Artificial Sequence
  Synthetic
cugccuccaccaaucggcagu

SEQ ID NO: 129720 - RNA, 22 nt, Artificial Sequence
  Synthetic
ccugccuccaccaaucggcagu

SEQ ID NO: 129721 - RNA, 23 nt, Artificial Sequence
  Synthetic
uccugccuccaccaaucggcagu

SEQ ID NO: 129722 - RNA, 24 nt, Artificial Sequence
  Synthetic
cuccugccuccaccaaucggcagu

SEQ ID NO: 129723 - RNA, 18 nt, Artificial Sequence
  Synthetic
  misc_feature (7)..(7): n is a, c, g, or u
ucugcangaucccagagu

SEQ ID NO: 129724 - RNA, 19 nt, Artificial Sequence
  Synthetic
  misc_feature (8)..(8): n is a, c, g, or u
cucugcangaucccagagu

SEQ ID NO: 129725 - RNA, 20 nt, Artificial Sequence
  Synthetic
  misc_feature (9)..(9): n is a, c, g, or u
gcucugcangaucccagagu

SEQ ID NO: 129726 - RNA, 21 nt, Artificial Sequence
  Synthetic
  misc_feature (10)..(10): n is a, c, g, or u
agcucugcangaucccagagu

SEQ ID NO: 129727 - RNA, 22 nt, Artificial Sequence
  Synthetic
  misc_feature (11)..(11): n is a, c, g, or u
aagcucugcangaucccagagu

SEQ ID NO: 129728 - RNA, 23 nt, Artificial Sequence
  Synthetic
  misc_feature (12)..(12): n is a, c, g, or u
caagcucugcangaucccagagu

SEQ ID NO: 129729 - RNA, 24 nt, Artificial Sequence
  Synthetic
  misc_feature (13)..(13): n is a, c, g, or u
ccaagcucugcangaucccagagu

SEQ ID NO: 129730 - RNA, 18 nt, Artificial Sequence
  Synthetic
agccaaccagguaggagu

SEQ ID NO: 129731 - RNA, 19 nt, Artificial Sequence
  Synthetic
  misc_feature (1)..(1): n is a, c, g, or u
nagccaaccagguaggagu

SEQ ID NO: 129732 - RNA, 20 nt, Artificial Sequence
  Synthetic
  misc_feature (1)..(2): n is a, c, g, or u
nnagccaaccagguaggagu

SEQ ID NO: 129733 - RNA, 21 nt, Artificial Sequence
  Synthetic
  misc_feature (2)..(3): n is a, c, g, or u
annagccaaccagguaggagu

SEQ ID NO: 129734 - RNA, 22 nt, Artificial Sequence
  Synthetic
  misc_feature (3)..(4): n is a, c, g, or u
cannagccaaccagguaggagu

SEQ ID NO: 129735 - RNA, 23 nt, Artificial Sequence
  Synthetic
  misc_feature (4)..(5): n is a, c, g, or u
ccannagccaaccagguaggagu

SEQ ID NO: 129736 - RNA, 24 nt, Artificial Sequence
  Synthetic
  misc_feature (5)..(6): n is a, c, g, or u
gccannagccaaccagguaggagu

SEQ ID NO: 129737 - RNA, 18 nt, Artificial Sequence
  Synthetic
uccuuggacucauaaggu

SEQ ID NO: 129738 - RNA, 19 nt, Artificial Sequence
  Synthetic
uuccuuggacucauaaggu

SEQ ID NO: 129739 - RNA, 20 nt, Artificial Sequence
  Synthetic
auuccuuggacucauaaggu

SEQ ID NO: 129740 - RNA, 21 nt, Artificial Sequence
  Synthetic
uauuccuuggacucauaaggu

SEQ ID NO: 129741 - RNA, 22 nt, Artificial Sequence
  Synthetic
guauuccuuggacucauaaggu

SEQ ID NO: 129742 - RNA, 23 nt, Artificial Sequence
  Synthetic
aguauuccuuggacucauaaggu

SEQ ID NO: 129743 - RNA, 24 nt, Artificial Sequence
  Synthetic
uaguauuccuuggacucauaaggu

SEQ ID NO: 129744 - RNA, 18 nt, Artificial Sequence
  Synthetic
guuuugcucgcagccggu

SEQ ID NO: 129745 - RNA, 19 nt, Artificial Sequence
  Synthetic
uguuuugcucgcagccggu

SEQ ID NO: 129746 - RNA, 20 nt, Artificial Sequence
  Synthetic
uuguuuugcucgcagccggu

SEQ ID NO: 129747 - RNA, 21 nt, Artificial Sequence
  Synthetic
cuuguuuugcucgcagccggu

SEQ ID NO: 129748 - RNA, 22 nt, Artificial Sequence
  Synthetic
gcuuguuuugcucgcagccggu

SEQ ID NO: 129749 - RNA, 23 nt, Artificial Sequence
  Synthetic
cgcuuguuuugcucgcagccggu

SEQ ID NO: 129750 - RNA, 24 nt, Artificial Sequence
  Synthetic
ccgcuuguuuugcucgcagccggu

SEQ ID NO: 129751 - RNA, 18 nt, Artificial Sequence
  Synthetic
  misc_feature (4)..(4): n is a, c, g, or u
  misc_feature (17)..(17): n is a, c, g, or u
uaangacugggaggagnu

SEQ ID NO: 129752 - RNA, 19 nt, Artificial Sequence
  Synthetic
  misc_feature (5)..(5): n is a, c, g, or u
  misc_feature (18)..(18): n is a, c, g, or u
uuaangacugggaggagnu

SEQ ID NO: 129753 - RNA, 20 nt, Artificial Sequence
  Synthetic
  misc_feature (6)..(6): n is a, c, g, or u
  misc_feature (19)..(19): n is a, c, g, or u
uuuaangacugggaggagnu

SEQ ID NO: 129754 - RNA, 21 nt, Artificial Sequence
  Synthetic
  misc_feature (7)..(7): n is a, c, g, or u
  misc_feature (20)..(20): n is a, c, g, or u
guuuaangacugggaggagnu

SEQ ID NO: 129755 - RNA, 22 nt, Artificial Sequence
  Synthetic
  misc_feature (8)..(8): n is a, c, g, or u
  misc_feature (21)..(21): n is a, c, g, or u
uguuuaangacugggaggagnu

SEQ ID NO: 129756 - RNA, 23 nt, Artificial Sequence
  Synthetic
  misc_feature (9)..(9): n is a, c, g, or u
  misc_feature (22)..(22): n is a, c, g, or u
guguuuaangacugggaggagnu

SEQ ID NO: 129757 - RNA, 24 nt, Artificial Sequence
  Synthetic
  misc_feature (10)..(10): n is a, c, g, or u
  misc_feature (23)..(23): n is a, c, g, or u
uguguuuaangacugggaggagnu

SEQ ID NO: 129758 - RNA, 18 nt, Artificial Sequence
  Synthetic
ugacccuuauaaagaauu

SEQ ID NO: 129759 - RNA, 19 nt, Artificial Sequence
  Synthetic
uugacccuuauaaagaauu

SEQ ID NO: 129760 - RNA, 20 nt, Artificial Sequence
  Synthetic
auugacccuuauaaagaauu

SEQ ID NO: 129761 - RNA, 21 nt, Artificial Sequence
  Synthetic
cauugacccuuauaaagaauu

SEQ ID NO: 129762 - RNA, 22 nt, Artificial Sequence
  Synthetic
acauugacccuuauaaagaauu

SEQ ID NO: 129763 - RNA, 23 nt, Artificial Sequence
  Synthetic
gacauugacccuuauaaagaauu

SEQ ID NO: 129764 - RNA, 24 nt, Artificial Sequence
  Synthetic
ggacauugacccuuauaaagaauu

SEQ ID NO: 129765 - RNA, 18 nt, Artificial Sequence
  Synthetic
ucaguuggacccugcauu

SEQ ID NO: 129766 - RNA, 19 nt, Artificial Sequence
  Synthetic
aucaguuggacccugcauu

SEQ ID NO: 129767 - RNA, 20 nt, Artificial Sequence
  Synthetic
caucaguuggacccugcauu

SEQ ID NO: 129768 - RNA, 21 nt, Artificial Sequence
  Synthetic
ucaucaguuggacccugcauu

SEQ ID NO: 129769 - RNA, 22 nt, Artificial Sequence
  Synthetic
aucaucaguuggacccugcauu

SEQ ID NO: 129770 - RNA, 23 nt, Artificial Sequence
  Synthetic
gaucaucaguuggacccugcauu

SEQ ID NO: 129771 - RNA, 24 nt, Artificial Sequence
  Synthetic
cgaucaucaguuggacccugcauu

SEQ ID NO: 129772 - RNA, 18 nt, Artificial Sequence
  Synthetic
uauggaugaugugguauu

SEQ ID NO: 129773 - RNA, 19 nt, Artificial Sequence
  Synthetic
auauggaugaugugguauu

SEQ ID NO: 129774 - RNA, 20 nt, Artificial Sequence
  Synthetic
uauauggaugaugugguauu

SEQ ID NO: 129775 - RNA, 21 nt, Artificial Sequence
  Synthetic
  misc_feature (1)..(1): n is a, c, g, or u
nuauauggaugaugugguauu

SEQ ID NO: 129776 - RNA, 22 nt, Artificial Sequence
  Synthetic
  misc_feature (2)..(2): n is a, c, g, or u
gnuauauggaugaugugguauu

SEQ ID NO: 129777 - RNA, 23 nt, Artificial Sequence
  Synthetic
  misc_feature (3)..(3): n is a, c, g, or u
agnuauauggaugaugugguauu

SEQ ID NO: 129778 - RNA, 24 nt, Artificial Sequence
  Synthetic
  misc_feature (4)..(4): n is a, c, g, or u
cagnuauauggaugaugugguauu

SEQ ID NO: 129779 - RNA, 18 nt, Artificial Sequence
  Synthetic
  misc_feature (6)..(6): n is a, c, g, or u
  misc_feature (8)..(8): n is a, c, g, or u
guuaangnucuuuguauu

SEQ ID NO: 129780 - RNA, 19 nt, Artificial Sequence
  Synthetic
  misc_feature (7)..(7): n is a, c, g, or u
  misc_feature (9)..(9): n is a, c, g, or u
gguuaangnucuuuguauu

SEQ ID NO: 129781 - RNA, 20 nt, Artificial Sequence
  Synthetic
  misc_feature (8)..(8): n is a, c, g, or u
  misc_feature (10)..(10): n is a, c, g, or u
agguuaangnucuuuguauu

SEQ ID NO: 129782 - RNA, 21 nt, Artificial Sequence
  Synthetic
  misc_feature (9)..(9): n is a, c, g, or u
  misc_feature (11)..(11): n is a, c, g, or u
uagguuaangnucuuuguauu

SEQ ID NO: 129783 - RNA, 22 nt, Artificial Sequence
  Synthetic
  misc_feature (10)..(10): n is a, c, g, or u
  misc_feature (12)..(12): n is a, c, g, or u
uuagguuaangnucuuuguauu

SEQ ID NO: 129784 - RNA, 23 nt, Artificial Sequence
  Synthetic
  misc_feature (11)..(11): n is a, c, g, or u
  misc_feature (13)..(13): n is a, c, g, or u
auuagguuaangnucuuuguauu

SEQ ID NO: 129785 - RNA, 24 nt, Artificial Sequence
  Synthetic
  misc_feature (12)..(12): n is a, c, g, or u
  misc_feature (14)..(14): n is a, c, g, or u
gauuagguuaangnucuuuguauu

SEQ ID NO: 129786 - RNA, 18 nt, Artificial Sequence
  Synthetic
ccuaucuuaucaacacuu

SEQ ID NO: 129787 - RNA, 19 nt, Artificial Sequence
  Synthetic
cccuaucuuaucaacacuu

SEQ ID NO: 129788 - RNA, 20 nt, Artificial Sequence
  Synthetic
ccccuaucuuaucaacacuu

SEQ ID NO: 129789 - RNA, 21 nt, Artificial Sequence
  Synthetic
gccccuaucuuaucaacacuu

SEQ ID NO: 129790 - RNA, 22 nt, Artificial Sequence
  Synthetic
ugccccuaucuuaucaacacuu

SEQ ID NO: 129791 - RNA, 23 nt, Artificial Sequence
  Synthetic
augccccuaucuuaucaacacuu

SEQ ID NO: 129792 - RNA, 24 nt, Artificial Sequence
  Synthetic
aaugccccuaucuuaucaacacuu

SEQ ID NO: 129793 - RNA, 18 nt, Artificial Sequence
  Synthetic
  misc_feature (5)..(5): n is a, c, g, or u
auaunucuugccuuacuu

SEQ ID NO: 129794 - RNA, 19 nt, Artificial Sequence
  Synthetic
  misc_feature (6)..(6): n is a, c, g, or u
cauaunucuugccuuacuu

SEQ ID NO: 129795 - RNA, 20 nt, Artificial Sequence
  Synthetic
  misc_feature (7)..(7): n is a, c, g, or u
ucauaunucuugccuuacuu

SEQ ID NO: 129796 - RNA, 21 nt, Artificial Sequence
  Synthetic
  misc_feature (8)..(8): n is a, c, g, or u
uucauaunucuugccuuacuu

SEQ ID NO: 129797 - RNA, 22 nt, Artificial Sequence
  Synthetic
  misc_feature (9)..(9): n is a, c, g, or u
uuucauaunucuugccuuacuu

SEQ ID NO: 129798 - RNA, 23 nt, Artificial Sequence
  Synthetic
  misc_feature (10)..(10): n is a, c, g, or u
guuucauaunucuugccuuacuu

SEQ ID NO: 129799 - RNA, 24 nt, Artificial Sequence
  Synthetic
  misc_feature (11)..(11): n is a, c, g, or u
gguuucauaunucuugccuuacuu

SEQ ID NO: 129800 - RNA, 18 nt, Artificial Sequence
  Synthetic
  misc_feature (12)..(12): n is a, c, g, or u
cugugccuuggnuggcuu

SEQ ID NO: 129801 - RNA, 19 nt, Artificial Sequence
  Synthetic
  misc_feature (13)..(13): n is a, c, g, or u
gcugugccuuggnuggcuu

SEQ ID NO: 129802 - RNA, 20 nt, Artificial Sequence
  Synthetic
  misc_feature (14)..(14): n is a, c, g, or u
agcugugccuuggnuggcuu

SEQ ID NO: 129803 - RNA, 21 nt, Artificial Sequence
  Synthetic
  misc_feature (15)..(15): n is a, c, g, or u
aagcugugccuuggnuggcuu

SEQ ID NO: 129804 - RNA, 22 nt, Artificial Sequence
  Synthetic
  misc_feature (16)..(16): n is a, c, g, or u
caagcugugccuuggnuggcuu

SEQ ID NO: 129805 - RNA, 23 nt, Artificial Sequence
  Synthetic
  misc_feature (17)..(17): n is a, c, g, or u
ccaagcugugccuuggnuggcuu

SEQ ID NO: 129806 - RNA, 24 nt, Artificial Sequence
  Synthetic
  misc_feature (18)..(18): n is a, c, g, or u
uccaagcugugccuuggnuggcuu

SEQ ID NO: 129807 - RNA, 18 nt, Artificial Sequence
  Synthetic
cauuauuuacauacucuu

SEQ ID NO: 129808 - RNA, 19 nt, Artificial Sequence
  Synthetic
acauuauuuacauacucuu

SEQ ID NO: 129809 - RNA, 20 nt, Artificial Sequence
  Synthetic
gacauuauuuacauacucuu

SEQ ID NO: 129810 - RNA, 21 nt, Artificial Sequence
  Synthetic
  misc_feature (1)..(1): n is a, c, g, or u
ngacauuauuuacauacucuu

SEQ ID NO: 129811 - RNA, 22 nt, Artificial Sequence
  Synthetic
  misc_feature (2)..(2): n is a, c, g, or u
cngacauuauuuacauacucuu

SEQ ID NO: 129812 - RNA, 23 nt, Artificial Sequence
  Synthetic
  misc_feature (3)..(3): n is a, c, g, or u
ccngacauuauuuacauacucuu

SEQ ID NO: 129813 - RNA, 24 nt, Artificial Sequence
  Synthetic
  misc_feature (4)..(4): n is a, c, g, or u
accngacauuauuuacauacucuu

SEQ ID NO: 129814 - RNA, 18 nt, Artificial Sequence
  Synthetic
  misc_feature (5)..(5): n is a, c, g, or u
uuganuauuuggucucuu

SEQ ID NO: 129815 - RNA, 19 nt, Artificial Sequence
  Synthetic
  misc_feature (6)..(6): n is a, c, g, or u
cuuganuauuuggucucuu

SEQ ID NO: 129816 - RNA, 20 nt, Artificial Sequence
  Synthetic
  misc_feature (1)..(1): n is a, c, g, or u
  misc_feature (7)..(7): n is a, c, g, or u
ncuuganuauuuggucucuu

SEQ ID NO: 129817 - RNA, 21 nt, Artificial Sequence
  Synthetic
  misc_feature (2)..(2): n is a, c, g, or u
  misc_feature (8)..(8): n is a, c, g, or u
uncuuganuauuuggucucuu

SEQ ID NO: 129818 - RNA, 22 nt, Artificial Sequence
  Synthetic
  misc_feature (3)..(3): n is a, c, g, or u
  misc_feature (9)..(9): n is a, c, g, or u
guncuuganuauuuggucucuu

SEQ ID NO: 129819 - RNA, 23 nt, Artificial Sequence
  Synthetic
  misc_feature (4)..(4): n is a, c, g, or u
  misc_feature (10)..(10): n is a, c, g, or u
uguncuuganuauuuggucucuu

SEQ ID NO: 129820 - RNA, 24 nt, Artificial Sequence
  Synthetic
  misc_feature (5)..(5): n is a, c, g, or u
  misc_feature (11)..(11): n is a, c, g, or u
cuguncuuganuauuuggucucuu

SEQ ID NO: 129821 - RNA, 18 nt, Artificial Sequence
  Synthetic
  misc_feature (6)..(6): n is a, c, g, or u
caaagnauugugggucuu

SEQ ID NO: 129822 - RNA, 19 nt, Artificial Sequence
  Synthetic
  misc_feature (7)..(7): n is a, c, g, or u
ucaaagnauugugggucuu

SEQ ID NO: 129823 - RNA, 20 nt, Artificial Sequence
  Synthetic
  misc_feature (8)..(8): n is a, c, g, or u
gucaaagnauugugggucuu

SEQ ID NO: 129824 - RNA, 21 nt, Artificial Sequence
  Synthetic
  misc_feature (9)..(9): n is a, c, g, or u
ugucaaagnauugugggucuu

SEQ ID NO: 129825 - RNA, 22 nt, Artificial Sequence
  Synthetic
  misc_feature (10)..(10): n is a, c, g, or u
augucaaagnauugugggucuu

SEQ ID NO: 129826 - RNA, 23 nt, Artificial Sequence
  Synthetic
  misc_feature (11)..(11): n is a, c, g, or u
uaugucaaagnauugugggucuu

SEQ ID NO: 129827 - RNA, 24 nt, Artificial Sequence
  Synthetic
  misc_feature (12)..(12): n is a, c, g, or u
guaugucaaagnauugugggucuu

SEQ ID NO: 129828 - RNA, 18 nt, Artificial Sequence
  Synthetic
gcgggucaccauauucuu

SEQ ID NO: 129829 - RNA, 19 nt, Artificial Sequence
  Synthetic
ugcgggucaccauauucuu

SEQ ID NO: 129830 - RNA, 20 nt, Artificial Sequence
  Synthetic
uugcgggucaccauauucuu

SEQ ID NO: 129831 - RNA, 21 nt, Artificial Sequence
  Synthetic
uuugcgggucaccauauucuu

SEQ ID NO: 129832 - RNA, 22 nt, Artificial Sequence
  Synthetic
uuuugcgggucaccauauucuu

SEQ ID NO: 129833 - RNA, 23 nt, Artificial Sequence
  Synthetic
auuuugcgggucaccauauucuu

SEQ ID NO: 129834 - RNA, 24 nt, Artificial Sequence
  Synthetic
cauuuugcgggucaccauauucuu

SEQ ID NO: 129835 - RNA, 18 nt, Artificial Sequence
  Synthetic
cugcugguggcuccaguu

SEQ ID NO: 129836 - RNA, 19 nt, Artificial Sequence
  Synthetic
ccugcugguggcuccaguu

SEQ ID NO: 129837 - RNA, 20 nt, Artificial Sequence
  Synthetic
uccugcugguggcuccaguu

SEQ ID NO: 129838 - RNA, 21 nt, Artificial Sequence
  Synthetic
uuccugcugguggcuccaguu

SEQ ID NO: 129839 - RNA, 22 nt, Artificial Sequence
  Synthetic
uuuccugcugguggcuccaguu

SEQ ID NO: 129840 - RNA, 23 nt, Artificial Sequence
  Synthetic
uuuuccugcugguggcuccaguu

SEQ ID NO: 129841 - RNA, 24 nt, Artificial Sequence
  Synthetic
auuuuccugcugguggcuccaguu

SEQ ID NO: 129842 - RNA, 18 nt, Artificial Sequence
  Synthetic
  misc_feature (3)..(3): n is a, c, g, or u
  misc_feature (12)..(12): n is a, c, g, or u
  misc_feature (16)..(16): n is a, c, g, or u
ccnccacacggnggunuu

SEQ ID NO: 129843 - RNA, 19 nt, Artificial Sequence
  Synthetic
  misc_feature (1)..(1): n is a, c, g, or u
  misc_feature (4)..(4): n is a, c, g, or u
  misc_feature (13)..(13): n is a, c, g, or u
  misc_feature (17)..(17): n is a, c, g, or u
nccnccacacggnggunuu

SEQ ID NO: 129844 - RNA, 20 nt, Artificial Sequence
  Synthetic
  misc_feature (2)..(2): n is a, c, g, or u
  misc_feature (5)..(5): n is a, c, g, or u
  misc_feature (14)..(14): n is a, c, g, or u
  misc_feature (18)..(18): n is a, c, g, or u
cnccnccacacggnggunuu

SEQ ID NO: 129845 - RNA, 21 nt, Artificial Sequence
  Synthetic
  misc_feature (3)..(3): n is a, c, g, or u
  misc_feature (6)..(6): n is a, c, g, or u
  misc_feature (15)..(15): n is a, c, g, or u
  misc_feature (19)..(19): n is a, c, g, or u
acnccnccacacggnggunuu

SEQ ID NO: 129846 - RNA, 22 nt, Artificial Sequence
  Synthetic
  misc_feature (4)..(4): n is a, c, g, or u
  misc_feature (7)..(7): n is a, c, g, or u
  misc_feature (16)..(16): n is a, c, g, or u
  misc_feature (20)..(20): n is a, c, g, or u
cacnccnccacacggnggunuu

SEQ ID NO: 129847 - RNA, 23 nt, Artificial Sequence
  Synthetic
  misc_feature (5)..(5): n is a, c, g, or u
  misc_feature (8)..(8): n is a, c, g, or u
  misc_feature (17)..(17): n is a, c, g, or u
  misc_feature (21)..(21): n is a, c, g, or u
ucacnccnccacacggnggunuu

SEQ ID NO: 129848 - RNA, 24 nt, Artificial Sequence
  Synthetic
  misc_feature (1)..(1): n is a, c, g, or u
  misc_feature (6)..(6): n is a, c, g, or u
  misc_feature (9)..(9): n is a, c, g, or u
  misc_feature (18)..(18): n is a, c, g, or u
  misc_feature (22)..(22): n is a, c, g, or u
nucacnccnccacacggnggunuu

SEQ ID NO: 129849 - RNA, 18 nt, Artificial Sequence
  Synthetic
  misc_feature (4)..(4): n is a, c, g, or u
uaunucuugccuuacuuu

SEQ ID NO: 129850 - RNA, 19 nt, Artificial Sequence
  Synthetic
  misc_feature (5)..(5): n is a, c, g, or u
auaunucuugccuuacuuu

SEQ ID NO: 129851 - RNA, 20 nt, Artificial Sequence
  Synthetic
  misc_feature (6)..(6): n is a, c, g, or u
cauaunucuugccuuacuuu

SEQ ID NO: 129852 - RNA, 21 nt, Artificial Sequence
  Synthetic
  misc_feature (7)..(7): n is a, c, g, or u
ucauaunucuugccuuacuuu

SEQ ID NO: 129853 - RNA, 22 nt, Artificial Sequence
  Synthetic
  misc_feature (8)..(8): n is a, c, g, or u
uucauaunucuugccuuacuuu

SEQ ID NO: 129854 - RNA, 23 nt, Artificial Sequence
  Synthetic
  misc_feature (9)..(9): n is a, c, g, or u
uuucauaunucuugccuuacuuu

SEQ ID NO: 129855 - RNA, 24 nt, Artificial Sequence
  Synthetic
  misc_feature (10)..(10): n is a, c, g, or u
guuucauaunucuugccuuacuuu

SEQ ID NO: 129856 - RNA, 18 nt, Artificial Sequence
  Synthetic
  misc_feature (4)..(4): n is a, c, g, or u
aaanaucaaacacuguuu

SEQ ID NO: 129857 - RNA, 19 nt, Artificial Sequence
  Synthetic
  misc_feature (5)..(5): n is a, c, g, or u
aaaanaucaaacacuguuu

SEQ ID NO: 129858 - RNA, 20 nt, Artificial Sequence
  Synthetic
  misc_feature (6)..(6): n is a, c, g, or u
caaaanaucaaacacuguuu

SEQ ID NO: 129859 - RNA, 21 nt, Artificial Sequence
  Synthetic
  misc_feature (7)..(7): n is a, c, g, or u
acaaaanaucaaacacuguuu

SEQ ID NO: 129860 - RNA, 22 nt, Artificial Sequence
  Synthetic
  misc_feature (8)..(8): n is a, c, g, or u
uacaaaanaucaaacacuguuu

SEQ ID NO: 129861 - RNA, 23 nt, Artificial Sequence
  Synthetic
  misc_feature (9)..(9): n is a, c, g, or u
guacaaaanaucaaacacuguuu

SEQ ID NO: 129862 - RNA, 24 nt, Artificial Sequence
  Synthetic
  misc_feature (10)..(10): n is a, c, g, or u
uguacaaaanaucaaacacuguuu

SEQ ID NO: 129863 - RNA, 21 nt, Artificial Sequence
  Synthetic
  misc_feature (17)..(17): n is a, c, g, or u
gaccaggccguugccgngcaa

SEQ ID NO: 129864 - RNA, 21 nt, Artificial Sequence
  Synthetic
gaauccacacuccgaaagaga

SEQ ID NO: 129865 - RNA, 23 nt, Artificial Sequence
  Synthetic
gcgaauccacacuccgaaagaga

SEQ ID NO: 129866 - RNA, 21 nt, Artificial Sequence
  Synthetic
ggagauugacgagaugugaga

SEQ ID NO: 129867 - RNA, 23 nt, Artificial Sequence
  Synthetic
  misc_feature (2)..(2): n is a, c, g, or u
gnggagauugacgagaugugaga

SEQ ID NO: 129868 - RNA, 22 nt, Artificial Sequence
  Synthetic
  misc_feature (8)..(8): n is a, c, g, or u
gagaucuncgucugcgaggcga

SEQ ID NO: 129869 - RNA, 18 nt, Artificial Sequence
  Synthetic
ggccuuguaaguuggcga

SEQ ID NO: 129870 - RNA, 22 nt, Artificial Sequence
  Synthetic
gaaaggccuuguaaguuggcga

SEQ ID NO: 129871 - RNA, 19 nt, Artificial Sequence
  Synthetic
guccaacugaugaucggga

SEQ ID NO: 129872 - RNA, 20 nt, Artificial Sequence
  Synthetic
gguccaacugaugaucggga

SEQ ID NO: 129873 - RNA, 21 nt, Artificial Sequence
  Synthetic
  misc_feature (6)..(6): n is a, c, g, or u
guacanccuagcagccaugga

SEQ ID NO: 129874 - RNA, 24 nt, Artificial Sequence
  Synthetic
  misc_feature (9)..(9): n is a, c, g, or u
gcaguacanccuagcagccaugga

SEQ ID NO: 129875 - RNA, 21 nt, Artificial Sequence
  Synthetic
gaaagcccuacgaaccacuga

SEQ ID NO: 129876 - RNA, 22 nt, Artificial Sequence
  Synthetic
ggaaagcccuacgaaccacuga

SEQ ID NO: 129877 - RNA, 23 nt, Artificial Sequence
  Synthetic
gggaaagcccuacgaaccacuga

SEQ ID NO: 129878 - RNA, 24 nt, Artificial Sequence
  Synthetic
ggggaaagcccuacgaaccacuga

SEQ ID NO: 129879 - RNA, 24 nt, Artificial Sequence
  Synthetic
  misc_feature (15)..(15): n is a, c, g, or u
guccccaguccucgnggagauuga

SEQ ID NO: 129880 - RNA, 21 nt, Artificial Sequence
  Synthetic
  misc_feature (13)..(13): n is a, c, g, or u
gacacacgggugnucccccua

SEQ ID NO: 129881 - RNA, 21 nt, Artificial Sequence
  Synthetic
gcccgaaugcucccacuccua

SEQ ID NO: 129882 - RNA, 22 nt, Artificial Sequence
  Synthetic
ggcccgaaugcucccacuccua

SEQ ID NO: 129883 - RNA, 18 nt, Artificial Sequence
  Synthetic
  misc_feature (4)..(4): n is a, c, g, or u
gucncgucgucuaacaac

SEQ ID NO: 129884 - RNA, 19 nt, Artificial Sequence
  Synthetic
  misc_feature (5)..(5): n is a, c, g, or u
ggucncgucgucuaacaac

SEQ ID NO: 129885 - RNA, 24 nt, Artificial Sequence
  Synthetic
  misc_feature (10)..(10): n is a, c, g, or u
gccucggucncgucgucuaacaac

SEQ ID NO: 129886 - RNA, 21 nt, Artificial Sequence
  Synthetic
  misc_feature (10)..(10): n is a, c, g, or u
gccucggucncgucgucuaac

SEQ ID NO: 129887 - RNA, 24 nt, Artificial Sequence
  Synthetic
gacugcgaauuuuggccaagacac

SEQ ID NO: 129888 - RNA, 23 nt, Artificial Sequence
  Synthetic
guauggaucggcagaggagccac

SEQ ID NO: 129889 - RNA, 22 nt, Artificial Sequence
  Synthetic
gcaggaucugaugggcguucac

SEQ ID NO: 129890 - RNA, 23 nt, Artificial Sequence
  Synthetic
ggcaggaucugaugggcguucac

SEQ ID NO: 129891 - RNA, 24 nt, Artificial Sequence
  Synthetic
gggcaggaucugaugggcguucac

SEQ ID NO: 129892 - RNA, 21 nt, Artificial Sequence
  Synthetic
gaaaauugagagaaguccacc

SEQ ID NO: 129893 - RNA, 24 nt, Artificial Sequence
  Synthetic
gaccgcguaaagagaggugcgccc

SEQ ID NO: 129894 - RNA, 23 nt, Artificial Sequence
  Synthetic
gauaaaacgccgcagacacaucc

SEQ ID NO: 129895 - RNA, 23 nt, Artificial Sequence
  Synthetic
gucguugacauugcugggagucc

SEQ ID NO: 129896 - RNA, 24 nt, Artificial Sequence
  Synthetic
ggucguugacauugcugggagucc

SEQ ID NO: 129897 - RNA, 22 nt, Artificial Sequence
  Synthetic
gaaacauagaguugccuugagc

SEQ ID NO: 129898 - RNA, 23 nt, Artificial Sequence
  Synthetic
ggaaacauagaguugccuugagc

SEQ ID NO: 129899 - RNA, 24 nt, Artificial Sequence
  Synthetic
gggaaacauagaguugccuugagc

SEQ ID NO: 129900 - RNA, 19 nt, Artificial Sequence
  Synthetic
gaaccacugaacaaauggc

SEQ ID NO: 129901 - RNA, 22 nt, Artificial Sequence
  Synthetic
guucuucuucuaggggaccugc

SEQ ID NO: 129902 - RNA, 24 nt, Artificial Sequence
  Synthetic
gaguucuucuucuaggggaccugc

SEQ ID NO: 129903 - RNA, 21 nt, Artificial Sequence
  Synthetic
gguggucuccaugcaacgugc

SEQ ID NO: 129904 - RNA, 23 nt, Artificial Sequence
  Synthetic
gcaaaacaagcggcuaggaguuc

SEQ ID NO: 129905 - RNA, 20 nt, Artificial Sequence
  Synthetic
gacggggagaccgcguaaag

SEQ ID NO: 129906 - RNA, 19 nt, Artificial Sequence
  Synthetic
gcgaagugcacacggaccg

SEQ ID NO: 129907 - RNA, 22 nt, Artificial Sequence
  Synthetic
gaagcgaagugcacacggaccg

SEQ ID NO: 129908 - RNA, 24 nt, Artificial Sequence
  Synthetic
gugaagcgaagugcacacggaccg

SEQ ID NO: 129909 - RNA, 23 nt, Artificial Sequence
  Synthetic
guaggcugccuuccugacugccg

SEQ ID NO: 129910 - RNA, 21 nt, Artificial Sequence
  Synthetic
  misc_feature (8)..(8): n is a, c, g, or u
ggccccgngaggggucguccg

SEQ ID NO: 129911 - RNA, 23 nt, Artificial Sequence
  Synthetic
  misc_feature (10)..(10): n is a, c, g, or u
gcggccccgngaggggucguccg

SEQ ID NO: 129912 - RNA, 23 nt, Artificial Sequence
  Synthetic
guagcuccaaauucuuuauaagg

SEQ ID NO: 129913 - RNA, 22 nt, Artificial Sequence
  Synthetic
gacacauccagcgauaaccagg

SEQ ID NO: 129914 - RNA, 23 nt, Artificial Sequence
  Synthetic
guccucuuauguaagaccuuggg

SEQ ID NO: 129915 - RNA, 23 nt, Artificial Sequence
  Synthetic
gcauuugguggucuauaggcugg

SEQ ID NO: 129916 - RNA, 24 nt, Artificial Sequence
  Synthetic
ggcauuugguggucuauaggcugg

SEQ ID NO: 129917 - RNA, 22 nt, Artificial Sequence
  Synthetic
gaugacugucucuuagaggugg

SEQ ID NO: 129918 - RNA, 23 nt, Artificial Sequence
  Synthetic
ggaugacugucucuuagaggugg

SEQ ID NO: 129919 - RNA, 24 nt, Artificial Sequence
  Synthetic
  misc_feature (11)..(11): n is a, c, g, or u
gauuguuuganuuggcuccgaaug

SEQ ID NO: 129920 - RNA, 24 nt, Artificial Sequence
  Synthetic
  misc_feature (11)..(11): n is a, c, g, or u
gccugagugcnguauggugaggug

SEQ ID NO: 129921 - RNA, 24 nt, Artificial Sequence
  Synthetic
gacaaauuggaggacaggagguug

SEQ ID NO: 129922 - RNA, 20 nt, Artificial Sequence
  Synthetic
gauucguccccaugccuuug

SEQ ID NO: 129923 - RNA, 24 nt, Artificial Sequence
  Synthetic
gaaagauucguccccaugccuuug

SEQ ID NO: 129924 - RNA, 21 nt, Artificial Sequence
  Synthetic
gcaggagucgugcagguuuug

SEQ ID NO: 129925 - RNA, 23 nt, Artificial Sequence
  Synthetic
gagcaggagucgugcagguuuug

SEQ ID NO: 129926 - RNA, 22 nt, Artificial Sequence
  Synthetic
gcuccgaaugcaggguccaacu

SEQ ID NO: 129927 - RNA, 23 nt, Artificial Sequence
  Synthetic
ggcuccgaaugcaggguccaacu

SEQ ID NO: 129928 - RNA, 21 nt, Artificial Sequence
  Synthetic
gaguaggcugccuuccugacu

SEQ ID NO: 129929 - RNA, 22 nt, Artificial Sequence
  Synthetic
ggaguaggcugccuuccugacu

SEQ ID NO: 129930 - RNA, 23 nt, Artificial Sequence
  Synthetic
gggaguaggcugccuuccugacu

SEQ ID NO: 129931 - RNA, 20 nt, Artificial Sequence
  Synthetic
guaacacgagcagggguccu

SEQ ID NO: 129932 - RNA, 24 nt, Artificial Sequence
  Synthetic
gccuguaacacgagcagggguccu

SEQ ID NO: 129933 - RNA, 19 nt, Artificial Sequence
  Synthetic
gcgagcaaaacaagcggcu

SEQ ID NO: 129934 - RNA, 22 nt, Artificial Sequence
  Synthetic
gcugcgagcaaaacaagcggcu

SEQ ID NO: 129935 - RNA, 23 nt, Artificial Sequence
  Synthetic
ggcugcgagcaaaacaagcggcu

SEQ ID NO: 129936 - RNA, 19 nt, Artificial Sequence
  Synthetic
gucggucguugacauugcu

SEQ ID NO: 129937 - RNA, 20 nt, Artificial Sequence
  Synthetic
ggucggucguugacauugcu

SEQ ID NO: 129938 - RNA, 22 nt, Artificial Sequence
  Synthetic
  misc_feature (20)..(20): n is a, c, g, or u
guaacagcgguauaaagggncu

SEQ ID NO: 129939 - RNA, 23 nt, Artificial Sequence
  Synthetic
  misc_feature (21)..(21): n is a, c, g, or u
gguaacagcgguauaaagggncu

SEQ ID NO: 129940 - RNA, 22 nt, Artificial Sequence
  Synthetic
guggucuauaggcuggaggagu

SEQ ID NO: 129941 - RNA, 23 nt, Artificial Sequence
  Synthetic
gguggucuauaggcuggaggagu

SEQ ID NO: 129942 - RNA, 21 nt, Artificial Sequence
  Synthetic
  misc_feature (13)..(13): n is a, c, g, or u
gcagguuuugcanggucccgu

SEQ ID NO: 129943 - RNA, 23 nt, Artificial Sequence
  Synthetic
  misc_feature (15)..(15): n is a, c, g, or u
gugcagguuuugcanggucccgu

SEQ ID NO: 129944 - RNA, 18 nt, Artificial Sequence
  Synthetic
gccuugagcaggagucgu

SEQ ID NO: 129945 - RNA, 21 nt, Artificial Sequence
  Synthetic
guugccuugagcaggagucgu

SEQ ID NO: 129946 - RNA, 23 nt, Artificial Sequence
  Synthetic
gaguugccuugagcaggagucgu

SEQ ID NO: 129947 - RNA, 21 nt, Artificial Sequence
  Synthetic
guccccaugccuuugcgaggu

SEQ ID NO: 129948 - RNA, 18 nt, Artificial Sequence
  Synthetic
  misc_feature (8)..(8): n is a, c, g, or u
guugccgngcaacggggu

SEQ ID NO: 129949 - RNA, 21 nt, Artificial Sequence
  Synthetic
  misc_feature (11)..(11): n is a, c, g, or u
gccguugccgngcaacggggu

SEQ ID NO: 129950 - RNA, 22 nt, Artificial Sequence
  Synthetic
  misc_feature (12)..(12): n is a, c, g, or u
ggccguugccgngcaacggggu

SEQ ID NO: 129951 - RNA, 21 nt, Artificial Sequence
  Synthetic
gucuagacucugcgguauugu

SEQ ID NO: 129952 - RNA, 23 nt, Artificial Sequence
  Synthetic
gagucuagacucugcgguauugu

SEQ ID NO: 129953 - RNA, 22 nt, Artificial Sequence
  Synthetic
gacaggagguuggugagugauu

SEQ ID NO: 129954 - RNA, 23 nt, Artificial Sequence
  Synthetic
ggacaggagguuggugagugauu

SEQ ID NO: 129955 - RNA, 21 nt, Artificial Sequence
  Synthetic
  misc_feature (8)..(8): n is a, c, g, or u
gaucccungaugcuggaucuu

SEQ ID NO: 129956 - RNA, 21 nt, Artificial Sequence
  Synthetic
gccugaggaugacugucucuu

SEQ ID NO: 129957 - RNA, 22 nt, Artificial Sequence
  Synthetic
ggccugaggaugacugucucuu

SEQ ID NO: 129958 - RNA, 23 nt, Artificial Sequence
  Synthetic
  misc_feature (15)..(15): n is a, c, g, or u
gacgucccgcgaagnauccaguu

SEQ ID NO: 129959 - RNA, 24 nt, Artificial Sequence
  Synthetic
  misc_feature (16)..(16): n is a, c, g, or u
ggacgucccgcgaagnauccaguu

SEQ ID NO: 129960 - RNA, 18 nt, Artificial Sequence
  Synthetic
ggucccguacugguuguu

SEQ ID NO: 129961 - RNA, 22 nt, Artificial Sequence
  Synthetic
  misc_feature (4)..(4): n is a, c, g, or u
gcanggucccguacugguuguu

SEQ ID NO: 129962 - RNA, 21 nt, Artificial Sequence
  Synthetic
guugauaagauaggggcauuu

SEQ ID NO: 129963 - RNA, 23 nt, Artificial Sequence
  Synthetic
guguugauaagauaggggcauuu

SEQ ID NO: 129964 - RNA, 21 nt, Artificial Sequence
  Synthetic
  misc_feature (10)..(10): n is a, c, g, or u
gcugcuaggnuguacugccaa

SEQ ID NO: 129965 - RNA, 22 nt, Artificial Sequence
  Synthetic
  misc_feature (11)..(11): n is a, c, g, or u
ggcugcuaggnuguacugccaa

SEQ ID NO: 129966 - RNA, 23 nt, Artificial Sequence
  Synthetic
gcacuccuccagccuauagacca

SEQ ID NO: 129967 - RNA, 18 nt, Artificial Sequence
  Synthetic
gaccaccgugaacgccca

SEQ ID NO: 129968 - RNA, 20 nt, Artificial Sequence
  Synthetic
gagaccaccgugaacgccca

SEQ ID NO: 129969 - RNA, 21 nt, Artificial Sequence
  Synthetic
ggagaccaccgugaacgccca

SEQ ID NO: 129970 - RNA, 21 nt, Artificial Sequence
  Synthetic
gagacagucauccucaggcca

SEQ ID NO: 129971 - RNA, 19 nt, Artificial Sequence
  Synthetic
gccgcuuguuuugcucgca

SEQ ID NO: 129972 - RNA, 21 nt, Artificial Sequence
  Synthetic
gaucucaaucgccgcgucgca

SEQ ID NO: 129973 - RNA, 24 nt, Artificial Sequence
  Synthetic
  misc_feature (2)..(2): n is a, c, g, or u
gnagaucucaaucgccgcgucgca

SEQ ID NO: 129974 - RNA, 24 nt, Artificial Sequence
  Synthetic
  misc_feature (21)..(21): n is a, c, g, or u
gacccugcauucggagccaanuca

SEQ ID NO: 129975 - RNA, 21 nt, Artificial Sequence
  Synthetic
gcauggacauugacccuuaua

SEQ ID NO: 129976 - RNA, 22 nt, Artificial Sequence
  Synthetic
ggcauggacauugacccuuaua

SEQ ID NO: 129977 - RNA, 23 nt, Artificial Sequence
  Synthetic
gggcauggacauugacccuuaua

SEQ ID NO: 129978 - RNA, 24 nt, Artificial Sequence
  Synthetic
ggggcauggacauugacccuuaua

SEQ ID NO: 129979 - RNA, 24 nt, Artificial Sequence
  Synthetic
  misc_feature (12)..(12): n is a, c, g, or u
gauccagcaucnagggaucuagua

SEQ ID NO: 129980 - RNA, 18 nt, Artificial Sequence
  Synthetic
ggggcgcaccucucuuua

SEQ ID NO: 129981 - RNA, 24 nt, Artificial Sequence
  Synthetic
gaccacggggcgcaccucucuuua

SEQ ID NO: 129982 - RNA, 21 nt, Artificial Sequence
  Synthetic
gaacucccucgccucgcagac

SEQ ID NO: 129983 - RNA, 24 nt, Artificial Sequence
  Synthetic
gaagaacucccucgccucgcagac

SEQ ID NO: 129984 - RNA, 18 nt, Artificial Sequence
  Synthetic
gggguuuuucuuguugac

SEQ ID NO: 129985 - RNA, 20 nt, Artificial Sequence
  Synthetic
gcgggguuuuucuuguugac

SEQ ID NO: 129986 - RNA, 21 nt, Artificial Sequence
  Synthetic
ggcgggguuuuucuuguugac

SEQ ID NO: 129987 - RNA, 23 nt, Artificial Sequence
  Synthetic
gccaaaauucgcaguccccaacc

SEQ ID NO: 129988 - RNA, 24 nt, Artificial Sequence
  Synthetic
ggccaaaauucgcaguccccaacc

SEQ ID NO: 129989 - RNA, 23 nt, Artificial Sequence
  Synthetic
gcaaaauaccuaugggagugggc

SEQ ID NO: 129990 - RNA, 21 nt, Artificial Sequence
  Synthetic
  misc_feature (4)..(4): n is a, c, g, or u
ggancacccgugugucuuggc

SEQ ID NO: 129991 - RNA, 22 nt, Artificial Sequence
  Synthetic
  misc_feature (5)..(5): n is a, c, g, or u
gggancacccgugugucuuggc

SEQ ID NO: 129992 - RNA, 23 nt, Artificial Sequence
  Synthetic
  misc_feature (6)..(6): n is a, c, g, or u
ggggancacccgugugucuuggc

SEQ ID NO: 129993 - RNA, 24 nt, Artificial Sequence
  Synthetic
  misc_feature (7)..(7): n is a, c, g, or u
gggggancacccgugugucuuggc

SEQ ID NO: 129994 - RNA, 23 nt, Artificial Sequence
  Synthetic
  misc_feature (19)..(19): n is a, c, g, or u
gaaucuuucuguucccaanccuc

SEQ ID NO: 129995 - RNA, 19 nt, Artificial Sequence
  Synthetic
  misc_feature (12)..(12): n is a, c, g, or u
guuagacgacgngaccgag

SEQ ID NO: 129996 - RNA, 22 nt, Artificial Sequence
  Synthetic
gacaagaauccucacaauaccg

SEQ ID NO: 129997 - RNA, 18 nt, Artificial Sequence
  Synthetic
guuuacgucccgucggcg

SEQ ID NO: 129998 - RNA, 21 nt, Artificial Sequence
  Synthetic
gaccccugcucguguuacagg

SEQ ID NO: 129999 - RNA, 22 nt, Artificial Sequence
  Synthetic
ggaccccugcucguguuacagg

SEQ ID NO: 130000 - RNA, 23 nt, Artificial Sequence
  Synthetic
  misc_feature (3)..(3): n is a, c, g, or u
gcncggcaacggccuggucugug

SEQ ID NO: 130001 - RNA, 24 nt, Artificial Sequence
  Synthetic
gaucucaaucucgggaaucucaau

SEQ ID NO: 130002 - RNA, 21 nt, Artificial Sequence
  Synthetic
gaagaucucaaucucgggaau

SEQ ID NO: 130003 - RNA, 24 nt, Artificial Sequence
  Synthetic
gcagaagaucucaaucucgggaau

SEQ ID NO: 130004 - RNA, 20 nt, Artificial Sequence
  Synthetic
gcuguacaaaaccuacggau

SEQ ID NO: 130005 - RNA, 23 nt, Artificial Sequence
  Synthetic
guugcuguacaaaaccuacggau

SEQ ID NO: 130006 - RNA, 18 nt, Artificial Sequence
  Synthetic
gacucgugguggacuucu

SEQ ID NO: 130007 - RNA, 23 nt, Artificial Sequence
  Synthetic
gucuagacucgugguggacuucu

SEQ ID NO: 130008 - RNA, 21 nt, Artificial Sequence
  Synthetic
gcugcuaugccucaucuucuu

SEQ ID NO: 130009 - RNA, 22 nt, Artificial Sequence
  Synthetic
  misc_feature (18)..(18): n is a, c, g, or u
agaccaggccguugccgngcaa

SEQ ID NO: 130010 - RNA, 23 nt, Artificial Sequence
  Synthetic
  misc_feature (19)..(19): n is a, c, g, or u
cagaccaggccguugccgngcaa

SEQ ID NO: 130011 - RNA, 24 nt, Artificial Sequence
  Synthetic
  misc_feature (20)..(20): n is a, c, g, or u
acagaccaggccguugccgngcaa

SEQ ID NO: 130012 - RNA, 21 nt, Artificial Sequence
  Synthetic
uggcuccgaaugcagggucca

SEQ ID NO: 130013 - RNA, 22 nt, Artificial Sequence
  Synthetic
uuggcuccgaaugcagggucca

SEQ ID NO: 130014 - RNA, 23 nt, Artificial Sequence
  Synthetic
  misc_feature (1)..(1): n is a, c, g, or u
nuuggcuccgaaugcagggucca

SEQ ID NO: 130015 - RNA, 24 nt, Artificial Sequence
  Synthetic
  misc_feature (2)..(2): n is a, c, g, or u
anuuggcuccgaaugcagggucca

SEQ ID NO: 130016 - RNA, 21 nt, Artificial Sequence
  Synthetic
auaccuugauaauccagaaga

SEQ ID NO: 130017 - RNA, 22 nt, Artificial Sequence
  Synthetic
cauaccuugauaauccagaaga

SEQ ID NO: 130018 - RNA, 23 nt, Artificial Sequence
  Synthetic
acauaccuugauaauccagaaga

SEQ ID NO: 130019 - RNA, 24 nt, Artificial Sequence
  Synthetic
aacauaccuugauaauccagaaga

SEQ ID NO: 130020 - RNA, 22 nt, Artificial Sequence
  Synthetic
cgaauccacacuccgaaagaga

SEQ ID NO: 130021 - RNA, 24 nt, Artificial Sequence
  Synthetic
ugcgaauccacacuccgaaagaga

SEQ ID NO: 130022 - RNA, 22 nt, Artificial Sequence
  Synthetic
  misc_feature (1)..(1): n is a, c, g, or u
nggagauugacgagaugugaga

SEQ ID NO: 130023 - RNA, 24 nt, Artificial Sequence
  Synthetic
  misc_feature (3)..(3): n is a, c, g, or u
cgnggagauugacgagaugugaga

SEQ ID NO: 130024 - RNA, 21 nt, Artificial Sequence
  Synthetic
  misc_feature (7)..(7): n is a, c, g, or u
agaucuncgucugcgaggcga

SEQ ID NO: 130025 - RNA, 23 nt, Artificial Sequence
  Synthetic
  misc_feature (9)..(9): n is a, c, g, or u
ugagaucuncgucugcgaggcga

SEQ ID NO: 130026 - RNA, 24 nt, Artificial Sequence
  Synthetic
  misc_feature (10)..(10): n is a, c, g, or u
uugagaucuncgucugcgaggcga

SEQ ID NO: 130027 - RNA, 19 nt, Artificial Sequence
  Synthetic
aggccuuguaaguuggcga

SEQ ID NO: 130028 - RNA, 20 nt, Artificial Sequence
  Synthetic
aaggccuuguaaguuggcga

SEQ ID NO: 130029 - RNA, 21 nt, Artificial Sequence
  Synthetic
aaaggccuuguaaguuggcga

SEQ ID NO: 130030 - RNA, 23 nt, Artificial Sequence
  Synthetic
agaaaggccuuguaaguuggcga

SEQ ID NO: 130031 - RNA, 24 nt, Artificial Sequence
  Synthetic
uagaaaggccuuguaaguuggcga

SEQ ID NO: 130032 - RNA, 18 nt, Artificial Sequence
  Synthetic
uccaacugaugaucggga

SEQ ID NO: 130033 - RNA, 22 nt, Artificial Sequence
  Synthetic
  misc_feature (7)..(7): n is a, c, g, or u
aguacanccuagcagccaugga

SEQ ID NO: 130034 - RNA, 23 nt, Artificial Sequence
  Synthetic
  misc_feature (8)..(8): n is a, c, g, or u
caguacanccuagcagccaugga

SEQ ID NO: 130035 - RNA, 21 nt, Artificial Sequence
  Synthetic
  misc_feature (12)..(12): n is a, c, g, or u
cccaguccucgnggagauuga

SEQ ID NO: 130036 - RNA, 22 nt, Artificial Sequence
  Synthetic
  misc_feature (13)..(13): n is a, c, g, or u
ccccaguccucgnggagauuga

SEQ ID NO: 130037 - RNA, 23 nt, Artificial Sequence
  Synthetic
  misc_feature (14)..(14): n is a, c, g, or u
uccccaguccucgnggagauuga

SEQ ID NO: 130038 - RNA, 21 nt, Artificial Sequence
  Synthetic
aguaguuuccggaaguguuga

SEQ ID NO: 130039 - RNA, 22 nt, Artificial Sequence
  Synthetic
caguaguuuccggaaguguuga

SEQ ID NO: 130040 - RNA, 23 nt, Artificial Sequence
  Synthetic
acaguaguuuccggaaguguuga

SEQ ID NO: 130041 - RNA, 24 nt, Artificial Sequence
  Synthetic
aacaguaguuuccggaaguguuga

SEQ ID NO: 130042 - RNA, 18 nt, Artificial Sequence
  Synthetic
  misc_feature (17)..(17): n is a, c, g, or u
aggacgucccgcgaagna

SEQ ID NO: 130043 - RNA, 19 nt, Artificial Sequence
  Synthetic
  misc_feature (18)..(18): n is a, c, g, or u
aaggacgucccgcgaagna

SEQ ID NO: 130044 - RNA, 20 nt, Artificial Sequence
  Synthetic
  misc_feature (19)..(19): n is a, c, g, or u
aaaggacgucccgcgaagna

SEQ ID NO: 130045 - RNA, 21 nt, Artificial Sequence
  Synthetic
  misc_feature (20)..(20): n is a, c, g, or u
caaaggacgucccgcgaagna

SEQ ID NO: 130046 - RNA, 22 nt, Artificial Sequence
  Synthetic
  misc_feature (21)..(21): n is a, c, g, or u
acaaaggacgucccgcgaagna

SEQ ID NO: 130047 - RNA, 23 nt, Artificial Sequence
  Synthetic
  misc_feature (22)..(22): n is a, c, g, or u
aacaaaggacgucccgcgaagna

SEQ ID NO: 130048 - RNA, 24 nt, Artificial Sequence
  Synthetic
  misc_feature (23)..(23): n is a, c, g, or u
aaacaaaggacgucccgcgaagna

SEQ ID NO: 130049 - RNA, 22 nt, Artificial Sequence
  Synthetic
  misc_feature (14)..(14): n is a, c, g, or u
agacacacgggugnucccccua

SEQ ID NO: 130050 - RNA, 23 nt, Artificial Sequence
  Synthetic
  misc_feature (15)..(15): n is a, c, g, or u
aagacacacgggugnucccccua

SEQ ID NO: 130051 - RNA, 24 nt, Artificial Sequence
  Synthetic
  misc_feature (16)..(16): n is a, c, g, or u
caagacacacgggugnucccccua

SEQ ID NO: 130052 - RNA, 18 nt, Artificial Sequence
  Synthetic
cgaaugcucccacuccua

SEQ ID NO: 130053 - RNA, 19 nt, Artificial Sequence
  Synthetic
ccgaaugcucccacuccua

SEQ ID NO: 130054 - RNA, 20 nt, Artificial Sequence
  Synthetic
cccgaaugcucccacuccua

SEQ ID NO: 130055 - RNA, 23 nt, Artificial Sequence
  Synthetic
uggcccgaaugcucccacuccua

SEQ ID NO: 130056 - RNA, 24 nt, Artificial Sequence
  Synthetic
cuggcccgaaugcucccacuccua

SEQ ID NO: 130057 - RNA, 20 nt, Artificial Sequence
  Synthetic
  misc_feature (6)..(6): n is a, c, g, or u
cggucncgucgucuaacaac

SEQ ID NO: 130058 - RNA, 21 nt, Artificial Sequence
  Synthetic
  misc_feature (7)..(7): n is a, c, g, or u
ucggucncgucgucuaacaac

SEQ ID NO: 130059 - RNA, 22 nt, Artificial Sequence
  Synthetic
  misc_feature (8)..(8): n is a, c, g, or u
cucggucncgucgucuaacaac

SEQ ID NO: 130060 - RNA, 23 nt, Artificial Sequence
  Synthetic
  misc_feature (9)..(9): n is a, c, g, or u
ccucggucncgucgucuaacaac

SEQ ID NO: 130061 - RNA, 18 nt, Artificial Sequence
  Synthetic
  misc_feature (7)..(7): n is a, c, g, or u
ucggucncgucgucuaac

SEQ ID NO: 130062 - RNA, 19 nt, Artificial Sequence
  Synthetic
  misc_feature (8)..(8): n is a, c, g, or u
cucggucncgucgucuaac

SEQ ID NO: 130063 - RNA, 20 nt, Artificial Sequence
  Synthetic
  misc_feature (9)..(9): n is a, c, g, or u
ccucggucncgucgucuaac

SEQ ID NO: 130064 - RNA, 22 nt, Artificial Sequence
  Synthetic
  misc_feature (11)..(11): n is a, c, g, or u
ugccucggucncgucgucuaac

SEQ ID NO: 130065 - RNA, 23 nt, Artificial Sequence
  Synthetic
  misc_feature (12)..(12): n is a, c, g, or u
cugccucggucncgucgucuaac

SEQ ID NO: 130066 - RNA, 24 nt, Artificial Sequence
  Synthetic
  misc_feature (13)..(13): n is a, c, g, or u
ccugccucggucncgucgucuaac

SEQ ID NO: 130067 - RNA, 21 nt, Artificial Sequence
  Synthetic
ugcgaauuuuggccaagacac

SEQ ID NO: 130068 - RNA, 22 nt, Artificial Sequence
  Synthetic
cugcgaauuuuggccaagacac

SEQ ID NO: 130069 - RNA, 23 nt, Artificial Sequence
  Synthetic
acugcgaauuuuggccaagacac

SEQ ID NO: 130070 - RNA, 21 nt, Artificial Sequence
  Synthetic
auggaucggcagaggagccac

SEQ ID NO: 130071 - RNA, 22 nt, Artificial Sequence
  Synthetic
uauggaucggcagaggagccac

SEQ ID NO: 130072 - RNA, 24 nt, Artificial Sequence
  Synthetic
aguauggaucggcagaggagccac

SEQ ID NO: 130073 - RNA, 21 nt, Artificial Sequence
  Synthetic
caggaucugaugggcguucac

SEQ ID NO: 130074 - RNA, 22 nt, Artificial Sequence
  Synthetic
agaaaauugagagaaguccacc

SEQ ID NO: 130075 - RNA, 23 nt, Artificial Sequence
  Synthetic
uagaaaauugagagaaguccacc

SEQ ID NO: 130076 - RNA, 24 nt, Artificial Sequence
  Synthetic
cuagaaaauugagagaaguccacc

SEQ ID NO: 130077 - RNA, 21 nt, Artificial Sequence
  Synthetic
cgcguaaagagaggugcgccc

SEQ ID NO: 130078 - RNA, 22 nt, Artificial Sequence
  Synthetic
ccgcguaaagagaggugcgccc

SEQ ID NO: 130079 - RNA, 23 nt, Artificial Sequence
  Synthetic
accgcguaaagagaggugcgccc

SEQ ID NO: 130080 - RNA, 18 nt, Artificial Sequence
  Synthetic
aacgccgcagacacaucc

SEQ ID NO: 130081 - RNA, 19 nt, Artificial Sequence
  Synthetic
aaacgccgcagacacaucc

SEQ ID NO: 130082 - RNA, 20 nt, Artificial Sequence
  Synthetic
aaaacgccgcagacacaucc

SEQ ID NO: 130083 - RNA, 21 nt, Artificial Sequence
  Synthetic
uaaaacgccgcagacacaucc

SEQ ID NO: 130084 - RNA, 22 nt, Artificial Sequence
  Synthetic
auaaaacgccgcagacacaucc

SEQ ID NO: 130085 - RNA, 24 nt, Artificial Sequence
  Synthetic
ugauaaaacgccgcagacacaucc

SEQ ID NO: 130086 - RNA, 21 nt, Artificial Sequence
  Synthetic
acauaauugacuacuagaucc

SEQ ID NO: 130087 - RNA, 22 nt, Artificial Sequence
  Synthetic
aacauaauugacuacuagaucc

SEQ ID NO: 130088 - RNA, 23 nt, Artificial Sequence
  Synthetic
uaacauaauugacuacuagaucc

SEQ ID NO: 130089 - RNA, 24 nt, Artificial Sequence
  Synthetic
uuaacauaauugacuacuagaucc

SEQ ID NO: 130090 - RNA, 21 nt, Artificial Sequence
  Synthetic
cguugacauugcugggagucc

SEQ ID NO: 130091 - RNA, 22 nt, Artificial Sequence
  Synthetic
ucguugacauugcugggagucc

SEQ ID NO: 130092 - RNA, 18 nt, Artificial Sequence
  Synthetic
cccgccuguaacacgagc

SEQ ID NO: 130093 - RNA, 19 nt, Artificial Sequence
  Synthetic
ccccgccuguaacacgagc

SEQ ID NO: 130094 - RNA, 20 nt, Artificial Sequence
  Synthetic
accccgccuguaacacgagc

SEQ ID NO: 130095 - RNA, 21 nt, Artificial Sequence
  Synthetic
aaacauagaguugccuugagc

SEQ ID NO: 130096 - RNA, 21 nt, Artificial Sequence
  Synthetic
auuauuacccacccagguagc

SEQ ID NO: 130097 - RNA, 22 nt, Artificial Sequence
  Synthetic
aauuauuacccacccagguagc

SEQ ID NO: 130098 - RNA, 23 nt, Artificial Sequence
  Synthetic
aaauuauuacccacccagguagc

SEQ ID NO: 130099 - RNA, 24 nt, Artificial Sequence
  Synthetic
caaauuauuacccacccagguagc

SEQ ID NO: 130100 - RNA, 18 nt, Artificial Sequence
  Synthetic
ugagaucuucugcgacgc

SEQ ID NO: 130101 - RNA, 19 nt, Artificial Sequence
  Synthetic
uugagaucuucugcgacgc

SEQ ID NO: 130102 - RNA, 20 nt, Artificial Sequence
  Synthetic
auugagaucuucugcgacgc

SEQ ID NO: 130103 - RNA, 18 nt, Artificial Sequence
  Synthetic
aaccacugaacaaauggc

SEQ ID NO: 130104 - RNA, 20 nt, Artificial Sequence
  Synthetic
cgaaccacugaacaaauggc

SEQ ID NO: 130105 - RNA, 21 nt, Artificial Sequence
  Synthetic
acgaaccacugaacaaauggc

SEQ ID NO: 130106 - RNA, 22 nt, Artificial Sequence
  Synthetic
uacgaaccacugaacaaauggc

SEQ ID NO: 130107 - RNA, 23 nt, Artificial Sequence
  Synthetic
cuacgaaccacugaacaaauggc

SEQ ID NO: 130108 - RNA, 24 nt, Artificial Sequence
  Synthetic
ccuacgaaccacugaacaaauggc

SEQ ID NO: 130109 - RNA, 18 nt, Artificial Sequence
  Synthetic
caaagguuccacgcaugc

SEQ ID NO: 130110 - RNA, 19 nt, Artificial Sequence
  Synthetic
acaaagguuccacgcaugc

SEQ ID NO: 130111 - RNA, 20 nt, Artificial Sequence
  Synthetic
cacaaagguuccacgcaugc

SEQ ID NO: 130112 - RNA, 21 nt, Artificial Sequence
  Synthetic
uucuucuucuaggggaccugc

SEQ ID NO: 130113 - RNA, 23 nt, Artificial Sequence
  Synthetic
aguucuucuucuaggggaccugc

SEQ ID NO: 130114 - RNA, 22 nt, Artificial Sequence
  Synthetic
cgguggucuccaugcaacgugc

SEQ ID NO: 130115 - RNA, 23 nt, Artificial Sequence
  Synthetic
acgguggucuccaugcaacgugc

SEQ ID NO: 130116 - RNA, 24 nt, Artificial Sequence
  Synthetic
cacgguggucuccaugcaacgugc

SEQ ID NO: 130117 - RNA, 18 nt, Artificial Sequence
  Synthetic
caccacgagucuagacuc

SEQ ID NO: 130118 - RNA, 19 nt, Artificial Sequence
  Synthetic
ccaccacgagucuagacuc

SEQ ID NO: 130119 - RNA, 20 nt, Artificial Sequence
  Synthetic
uccaccacgagucuagacuc

SEQ ID NO: 130120 - RNA, 21 nt, Artificial Sequence
  Synthetic
aaaacaagcggcuaggaguuc

SEQ ID NO: 130121 - RNA, 22 nt, Artificial Sequence
  Synthetic
caaaacaagcggcuaggaguuc

SEQ ID NO: 130122 - RNA, 24 nt, Artificial Sequence
  Synthetic
agcaaaacaagcggcuaggaguuc

SEQ ID NO: 130123 - RNA, 18 nt, Artificial Sequence
  Synthetic
cggggagaccgcguaaag

SEQ ID NO: 130124 - RNA, 19 nt, Artificial Sequence
  Synthetic
acggggagaccgcguaaag

SEQ ID NO: 130125 - RNA, 21 nt, Artificial Sequence
  Synthetic
agacggggagaccgcguaaag

SEQ ID NO: 130126 - RNA, 22 nt, Artificial Sequence
  Synthetic
cagacggggagaccgcguaaag

SEQ ID NO: 130127 - RNA, 23 nt, Artificial Sequence
  Synthetic
acagacggggagaccgcguaaag

SEQ ID NO: 130128 - RNA, 24 nt, Artificial Sequence
  Synthetic
cacagacggggagaccgcguaaag

SEQ ID NO: 130129 - RNA, 21 nt, Artificial Sequence
  Synthetic
augcaacgugcagaggugaag

SEQ ID NO: 130130 - RNA, 22 nt, Artificial Sequence
  Synthetic
caugcaacgugcagaggugaag

SEQ ID NO: 130131 - RNA, 23 nt, Artificial Sequence
  Synthetic
ccaugcaacgugcagaggugaag

SEQ ID NO: 130132 - RNA, 24 nt, Artificial Sequence
  Synthetic
uccaugcaacgugcagaggugaag

SEQ ID NO: 130133 - RNA, 21 nt, Artificial Sequence
  Synthetic
uaagaagaugaggcauagcag

SEQ ID NO: 130134 - RNA, 22 nt, Artificial Sequence
  Synthetic
auaagaagaugaggcauagcag

SEQ ID NO: 130135 - RNA, 23 nt, Artificial Sequence
  Synthetic
aauaagaagaugaggcauagcag

SEQ ID NO: 130136 - RNA, 24 nt, Artificial Sequence
  Synthetic
caauaagaagaugaggcauagcag

SEQ ID NO: 130137 - RNA, 18 nt, Artificial Sequence
  Synthetic
cgaagugcacacggaccg

SEQ ID NO: 130138 - RNA, 20 nt, Artificial Sequence
  Synthetic
agcgaagugcacacggaccg

SEQ ID NO: 130139 - RNA, 21 nt, Artificial Sequence
  Synthetic
aagcgaagugcacacggaccg

SEQ ID NO: 130140 - RNA, 23 nt, Artificial Sequence
  Synthetic
ugaagcgaagugcacacggaccg

SEQ ID NO: 130141 - RNA, 21 nt, Artificial Sequence
  Synthetic
aggcugccuuccugacugccg

SEQ ID NO: 130142 - RNA, 22 nt, Artificial Sequence
  Synthetic
uaggcugccuuccugacugccg

SEQ ID NO: 130143 - RNA, 24 nt, Artificial Sequence
  Synthetic
aguaggcugccuuccugacugccg

SEQ ID NO: 130144 - RNA, 22 nt, Artificial Sequence
  Synthetic
  misc_feature (9)..(9): n is a, c, g, or u
cggccccgngaggggucguccg

SEQ ID NO: 130145 - RNA, 24 nt, Artificial Sequence
  Synthetic
  misc_feature (11)..(11): n is a, c, g, or u
agcggccccgngaggggucguccg

SEQ ID NO: 130146 - RNA, 21 nt, Artificial Sequence
  Synthetic
agcuccaaauucuuuauaagg

SEQ ID NO: 130147 - RNA, 22 nt, Artificial Sequence
  Synthetic
uagcuccaaauucuuuauaagg

SEQ ID NO: 130148 - RNA, 24 nt, Artificial Sequence
  Synthetic
aguagcuccaaauucuuuauaagg

SEQ ID NO: 130149 - RNA, 18 nt, Artificial Sequence
  Synthetic
cauccagcgauaaccagg

SEQ ID NO: 130150 - RNA, 19 nt, Artificial Sequence
  Synthetic
acauccagcgauaaccagg

SEQ ID NO: 130151 - RNA, 20 nt, Artificial Sequence
  Synthetic
cacauccagcgauaaccagg

SEQ ID NO: 130152 - RNA, 21 nt, Artificial Sequence
  Synthetic
acacauccagcgauaaccagg

SEQ ID NO: 130153 - RNA, 23 nt, Artificial Sequence
  Synthetic
agacacauccagcgauaaccagg

SEQ ID NO: 130154 - RNA, 24 nt, Artificial Sequence
  Synthetic
cagacacauccagcgauaaccagg

SEQ ID NO: 130155 - RNA, 21 nt, Artificial Sequence
  Synthetic
ccucuuauguaagaccuuggg

SEQ ID NO: 130156 - RNA, 22 nt, Artificial Sequence
  Synthetic
uccucuuauguaagaccuuggg

SEQ ID NO: 130157 - RNA, 24 nt, Artificial Sequence
  Synthetic
aguccucuuauguaagaccuuggg

SEQ ID NO: 130158 - RNA, 21 nt, Artificial Sequence
  Synthetic
auuugguggucuauaggcugg

SEQ ID NO: 130159 - RNA, 22 nt, Artificial Sequence
  Synthetic
cauuugguggucuauaggcugg

SEQ ID NO: 130160 - RNA, 21 nt, Artificial Sequence
  Synthetic
augacugucucuuagaggugg

SEQ ID NO: 130161 - RNA, 24 nt, Artificial Sequence
  Synthetic
aggaugacugucucuuagaggugg

SEQ ID NO: 130162 - RNA, 21 nt, Artificial Sequence
  Synthetic
  misc_feature (8)..(8): n is a, c, g, or u
uguuuganuuggcuccgaaug

SEQ ID NO: 130163 - RNA, 22 nt, Artificial Sequence
  Synthetic
  misc_feature (9)..(9): n is a, c, g, or u
uuguuuganuuggcuccgaaug

SEQ ID NO: 130164 - RNA, 23 nt, Artificial Sequence
  Synthetic
  misc_feature (10)..(10): n is a, c, g, or u
auuguuuganuuggcuccgaaug

SEQ ID NO: 130165 - RNA, 21 nt, Artificial Sequence
  Synthetic
  misc_feature (8)..(8): n is a, c, g, or u
ugagugcnguauggugaggug

SEQ ID NO: 130166 - RNA, 22 nt, Artificial Sequence
  Synthetic
  misc_feature (9)..(9): n is a, c, g, or u
cugagugcnguauggugaggug

SEQ ID NO: 130167 - RNA, 23 nt, Artificial Sequence
  Synthetic
  misc_feature (10)..(10): n is a, c, g, or u
ccugagugcnguauggugaggug

SEQ ID NO: 130168 - RNA, 21 nt, Artificial Sequence
  Synthetic
aaauuggaggacaggagguug

SEQ ID NO: 130169 - RNA, 22 nt, Artificial Sequence
  Synthetic
caaauuggaggacaggagguug

SEQ ID NO: 130170 - RNA, 23 nt, Artificial Sequence
  Synthetic
acaaauuggaggacaggagguug

SEQ ID NO: 130171 - RNA, 18 nt, Artificial Sequence
  Synthetic
uucguccccaugccuuug

SEQ ID NO: 130172 - RNA, 19 nt, Artificial Sequence
  Synthetic
auucguccccaugccuuug

SEQ ID NO: 130173 - RNA, 21 nt, Artificial Sequence
  Synthetic
agauucguccccaugccuuug

SEQ ID NO: 130174 - RNA, 22 nt, Artificial Sequence
  Synthetic
aagauucguccccaugccuuug

SEQ ID NO: 130175 - RNA, 23 nt, Artificial Sequence
  Synthetic
aaagauucguccccaugccuuug

SEQ ID NO: 130176 - RNA, 22 nt, Artificial Sequence
  Synthetic
agcaggagucgugcagguuuug

SEQ ID NO: 130177 - RNA, 24 nt, Artificial Sequence
  Synthetic
ugagcaggagucgugcagguuuug

SEQ ID NO: 130178 - RNA, 21 nt, Artificial Sequence
  Synthetic
ugaugggguugaagucccaau

SEQ ID NO: 130179 - RNA, 22 nt, Artificial Sequence
  Synthetic
uugaugggguugaagucccaau

SEQ ID NO: 130180 - RNA, 23 nt, Artificial Sequence
  Synthetic
cuugaugggguugaagucccaau

SEQ ID NO: 130181 - RNA, 24 nt, Artificial Sequence
  Synthetic
ccuugaugggguugaagucccaau

SEQ ID NO: 130182 - RNA, 21 nt, Artificial Sequence
  Synthetic
acgagcagggguccuaggaau

SEQ ID NO: 130183 - RNA, 22 nt, Artificial Sequence
  Synthetic
cacgagcagggguccuaggaau

SEQ ID NO: 130184 - RNA, 23 nt, Artificial Sequence
  Synthetic
acacgagcagggguccuaggaau

SEQ ID NO: 130185 - RNA, 24 nt, Artificial Sequence
  Synthetic
aacacgagcagggguccuaggaau

SEQ ID NO: 130186 - RNA, 21 nt, Artificial Sequence
  Synthetic
uaacauugagauucccgagau

SEQ ID NO: 130187 - RNA, 22 nt, Artificial Sequence
  Synthetic
cuaacauugagauucccgagau

SEQ ID NO: 130188 - RNA, 23 nt, Artificial Sequence
  Synthetic
acuaacauugagauucccgagau

SEQ ID NO: 130189 - RNA, 24 nt, Artificial Sequence
  Synthetic
uacuaacauugagauucccgagau

SEQ ID NO: 130190 - RNA, 18 nt, Artificial Sequence
  Synthetic
cuucugcgacgcggcgau

SEQ ID NO: 130191 - RNA, 19 nt, Artificial Sequence
  Synthetic
ucuucugcgacgcggcgau

SEQ ID NO: 130192 - RNA, 20 nt, Artificial Sequence
  Synthetic
aucuucugcgacgcggcgau

SEQ ID NO: 130193 - RNA, 21 nt, Artificial Sequence
  Synthetic
cuccgaaugcaggguccaacu

SEQ ID NO: 130194 - RNA, 24 nt, Artificial Sequence
  Synthetic
uggcuccgaaugcaggguccaacu

SEQ ID NO: 130195 - RNA, 24 nt, Artificial Sequence
  Synthetic
ugggaguaggcugccuuccugacu

SEQ ID NO: 130196 - RNA, 18 nt, Artificial Sequence
  Synthetic
aacacgagcagggguccu

SEQ ID NO: 130197 - RNA, 19 nt, Artificial Sequence
  Synthetic
uaacacgagcagggguccu

SEQ ID NO: 130198 - RNA, 21 nt, Artificial Sequence
  Synthetic
uguaacacgagcagggguccu

SEQ ID NO: 130199 - RNA, 22 nt, Artificial Sequence
  Synthetic
cuguaacacgagcagggguccu

SEQ ID NO: 130200 - RNA, 23 nt, Artificial Sequence
  Synthetic
ccuguaacacgagcagggguccu

SEQ ID NO: 130201 - RNA, 18 nt, Artificial Sequence
  Synthetic
cgagcaaaacaagcggcu

SEQ ID NO: 130202 - RNA, 20 nt, Artificial Sequence
  Synthetic
ugcgagcaaaacaagcggcu

SEQ ID NO: 130203 - RNA, 21 nt, Artificial Sequence
  Synthetic
cugcgagcaaaacaagcggcu

SEQ ID NO: 130204 - RNA, 24 nt, Artificial Sequence
  Synthetic
cggcugcgagcaaaacaagcggcu

SEQ ID NO: 130205 - RNA, 18 nt, Artificial Sequence
  Synthetic
ucggucguugacauugcu

SEQ ID NO: 130206 - RNA, 21 nt, Artificial Sequence
  Synthetic
aggucggucguugacauugcu

SEQ ID NO: 130207 - RNA, 22 nt, Artificial Sequence
  Synthetic
aaggucggucguugacauugcu

SEQ ID NO: 130208 - RNA, 23 nt, Artificial Sequence
  Synthetic
caaggucggucguugacauugcu

SEQ ID NO: 130209 - RNA, 24 nt, Artificial Sequence
  Synthetic
ucaaggucggucguugacauugcu

SEQ ID NO: 130210 - RNA, 21 nt, Artificial Sequence
  Synthetic
  misc_feature (19)..(19): n is a, c, g, or u
uaacagcgguauaaagggncu

SEQ ID NO: 130211 - RNA, 24 nt, Artificial Sequence
  Synthetic
  misc_feature (22)..(22): n is a, c, g, or u
ugguaacagcgguauaaagggncu

SEQ ID NO: 130212 - RNA, 18 nt, Artificial Sequence
  Synthetic
acaguaguuuccggaagu

SEQ ID NO: 130213 - RNA, 19 nt, Artificial Sequence
  Synthetic
aacaguaguuuccggaagu

SEQ ID NO: 130214 - RNA, 20 nt, Artificial Sequence
  Synthetic
caacaguaguuuccggaagu

SEQ ID NO: 130215 - RNA, 21 nt, Artificial Sequence
  Synthetic
acaacaguaguuuccggaagu

SEQ ID NO: 130216 - RNA, 22 nt, Artificial Sequence
  Synthetic
aacaacaguaguuuccggaagu

SEQ ID NO: 130217 - RNA, 23 nt, Artificial Sequence
  Synthetic
uaacaacaguaguuuccggaagu

SEQ ID NO: 130218 - RNA, 24 nt, Artificial Sequence
  Synthetic
cuaacaacaguaguuuccggaagu

SEQ ID NO: 130219 - RNA, 21 nt, Artificial Sequence
  Synthetic
uggucuauaggcuggaggagu

SEQ ID NO: 130220 - RNA, 24 nt, Artificial Sequence
  Synthetic
ugguggucuauaggcuggaggagu

SEQ ID NO: 130221 - RNA, 22 nt, Artificial Sequence
  Synthetic
  misc_feature (14)..(14): n is a, c, g, or u
ugcagguuuugcanggucccgu

SEQ ID NO: 130222 - RNA, 24 nt, Artificial Sequence
  Synthetic
  misc_feature (16)..(16): n is a, c, g, or u
cgugcagguuuugcanggucccgu

SEQ ID NO: 130223 - RNA, 19 nt, Artificial Sequence
  Synthetic
ugccuugagcaggagucgu

SEQ ID NO: 130224 - RNA, 20 nt, Artificial Sequence
  Synthetic
uugccuugagcaggagucgu

SEQ ID NO: 130225 - RNA, 22 nt, Artificial Sequence
  Synthetic
aguugccuugagcaggagucgu

SEQ ID NO: 130226 - RNA, 24 nt, Artificial Sequence
  Synthetic
agaguugccuugagcaggagucgu

SEQ ID NO: 130227 - RNA, 22 nt, Artificial Sequence
  Synthetic
cguccccaugccuuugcgaggu

SEQ ID NO: 130228 - RNA, 23 nt, Artificial Sequence
  Synthetic
ucguccccaugccuuugcgaggu

SEQ ID NO: 130229 - RNA, 24 nt, Artificial Sequence
  Synthetic
uucguccccaugccuuugcgaggu

SEQ ID NO: 130230 - RNA, 19 nt, Artificial Sequence
  Synthetic
  misc_feature (9)..(9): n is a, c, g, or u
cguugccgngcaacggggu

SEQ ID NO: 130231 - RNA, 20 nt, Artificial Sequence
  Synthetic
  misc_feature (10)..(10): n is a, c, g, or u
ccguugccgngcaacggggu

SEQ ID NO: 130232 - RNA, 23 nt, Artificial Sequence
  Synthetic
  misc_feature (13)..(13): n is a, c, g, or u
aggccguugccgngcaacggggu

SEQ ID NO: 130233 - RNA, 24 nt, Artificial Sequence
  Synthetic
  misc_feature (14)..(14): n is a, c, g, or u
caggccguugccgngcaacggggu

SEQ ID NO: 130234 - RNA, 22 nt, Artificial Sequence
  Synthetic
agucuagacucugcgguauugu

SEQ ID NO: 130235 - RNA, 24 nt, Artificial Sequence
  Synthetic
cgagucuagacucugcgguauugu

SEQ ID NO: 130236 - RNA, 21 nt, Artificial Sequence
  Synthetic
acaggagguuggugagugauu

SEQ ID NO: 130237 - RNA, 24 nt, Artificial Sequence
  Synthetic
aggacaggagguuggugagugauu

SEQ ID NO: 130238 - RNA, 18 nt, Artificial Sequence
  Synthetic
aaacgggcaacauaccuu

SEQ ID NO: 130239 - RNA, 19 nt, Artificial Sequence
  Synthetic
caaacgggcaacauaccuu

SEQ ID NO: 130240 - RNA, 20 nt, Artificial Sequence
  Synthetic
acaaacgggcaacauaccuu

SEQ ID NO: 130241 - RNA, 22 nt, Artificial Sequence
  Synthetic
  misc_feature (9)..(9): n is a, c, g, or u
agaucccungaugcuggaucuu

SEQ ID NO: 130242 - RNA, 23 nt, Artificial Sequence
  Synthetic
  misc_feature (10)..(10): n is a, c, g, or u
uagaucccungaugcuggaucuu

SEQ ID NO: 130243 - RNA, 24 nt, Artificial Sequence
  Synthetic
  misc_feature (11)..(11): n is a, c, g, or u
cuagaucccungaugcuggaucuu

SEQ ID NO: 130244 - RNA, 23 nt, Artificial Sequence
  Synthetic
uggccugaggaugacugucucuu

SEQ ID NO: 130245 - RNA, 24 nt, Artificial Sequence
  Synthetic
auggccugaggaugacugucucuu

SEQ ID NO: 130246 - RNA, 21 nt, Artificial Sequence
  Synthetic
  misc_feature (13)..(13): n is a, c, g, or u
cgucccgcgaagnauccaguu

SEQ ID NO: 130247 - RNA, 22 nt, Artificial Sequence
  Synthetic
  misc_feature (14)..(14): n is a, c, g, or u
acgucccgcgaagnauccaguu

SEQ ID NO: 130248 - RNA, 19 nt, Artificial Sequence
  Synthetic
  misc_feature (1)..(1): n is a, c, g, or u
nggucccguacugguuguu

SEQ ID NO: 130249 - RNA, 20 nt, Artificial Sequence
  Synthetic
  misc_feature (2)..(2): n is a, c, g, or u
anggucccguacugguuguu

SEQ ID NO: 130250 - RNA, 21 nt, Artificial Sequence
  Synthetic
  misc_feature (3)..(3): n is a, c, g, or u
canggucccguacugguuguu

SEQ ID NO: 130251 - RNA, 23 nt, Artificial Sequence
  Synthetic
  misc_feature (5)..(5): n is a, c, g, or u
ugcanggucccguacugguuguu

SEQ ID NO: 130252 - RNA, 24 nt, Artificial Sequence
  Synthetic
  misc_feature (6)..(6): n is a, c, g, or u
uugcanggucccguacugguuguu

SEQ ID NO: 130253 - RNA, 22 nt, Artificial Sequence
  Synthetic
uguugauaagauaggggcauuu

SEQ ID NO: 130254 - RNA, 24 nt, Artificial Sequence
  Synthetic
aguguugauaagauaggggcauuu

SEQ ID NO: 130255 - RNA, 23 nt, Artificial Sequence
  Synthetic
  misc_feature (12)..(12): n is a, c, g, or u
uggcugcuaggnuguacugccaa

SEQ ID NO: 130256 - RNA, 24 nt, Artificial Sequence
  Synthetic
  misc_feature (13)..(13): n is a, c, g, or u
auggcugcuaggnuguacugccaa

SEQ ID NO: 130257 - RNA, 18 nt, Artificial Sequence
  Synthetic
ccuccagccuauagacca

SEQ ID NO: 130258 - RNA, 19 nt, Artificial Sequence
  Synthetic
uccuccagccuauagacca

SEQ ID NO: 130259 - RNA, 20 nt, Artificial Sequence
  Synthetic
cuccuccagccuauagacca

SEQ ID NO: 130260 - RNA, 21 nt, Artificial Sequence
  Synthetic
acuccuccagccuauagacca

SEQ ID NO: 130261 - RNA, 22 nt, Artificial Sequence
  Synthetic
cacuccuccagccuauagacca

SEQ ID NO: 130262 - RNA, 24 nt, Artificial Sequence
  Synthetic
cgcacuccuccagccuauagacca

SEQ ID NO: 130263 - RNA, 19 nt, Artificial Sequence
  Synthetic
agaccaccgugaacgccca

SEQ ID NO: 130264 - RNA, 22 nt, Artificial Sequence
  Synthetic
uggagaccaccgugaacgccca

SEQ ID NO: 130265 - RNA, 23 nt, Artificial Sequence
  Synthetic
auggagaccaccgugaacgccca

SEQ ID NO: 130266 - RNA, 24 nt, Artificial Sequence
  Synthetic
cauggagaccaccgugaacgccca

SEQ ID NO: 130267 - RNA, 22 nt, Artificial Sequence
  Synthetic
agagacagucauccucaggcca

SEQ ID NO: 130268 - RNA, 23 nt, Artificial Sequence
  Synthetic
aagagacagucauccucaggcca

SEQ ID NO: 130269 - RNA, 24 nt, Artificial Sequence
  Synthetic
uaagagacagucauccucaggcca

SEQ ID NO: 130270 - RNA, 18 nt, Artificial Sequence
  Synthetic
ccgcuuguuuugcucgca

SEQ ID NO: 130271 - RNA, 20 nt, Artificial Sequence
  Synthetic
agccgcuuguuuugcucgca

SEQ ID NO: 130272 - RNA, 21 nt, Artificial Sequence
  Synthetic
uagccgcuuguuuugcucgca

SEQ ID NO: 130273 - RNA, 22 nt, Artificial Sequence
  Synthetic
cuagccgcuuguuuugcucgca

SEQ ID NO: 130274 - RNA, 23 nt, Artificial Sequence
  Synthetic
ccuagccgcuuguuuugcucgca

SEQ ID NO: 130275 - RNA, 24 nt, Artificial Sequence
  Synthetic
uccuagccgcuuguuuugcucgca

SEQ ID NO: 130276 - RNA, 18 nt, Artificial Sequence
  Synthetic
cucaaucgccgcgucgca

SEQ ID NO: 130277 - RNA, 19 nt, Artificial Sequence
  Synthetic
ucucaaucgccgcgucgca

SEQ ID NO: 130278 - RNA, 20 nt, Artificial Sequence
  Synthetic
aucucaaucgccgcgucgca

SEQ ID NO: 130279 - RNA, 22 nt, Artificial Sequence
  Synthetic
agaucucaaucgccgcgucgca

SEQ ID NO: 130280 - RNA, 23 nt, Artificial Sequence
  Synthetic
  misc_feature (1)..(1): n is a, c, g, or u
nagaucucaaucgccgcgucgca

SEQ ID NO: 130281 - RNA, 21 nt, Artificial Sequence
  Synthetic
uguuaguauuccuuggacuca

SEQ ID NO: 130282 - RNA, 22 nt, Artificial Sequence
  Synthetic
auguuaguauuccuuggacuca

SEQ ID NO: 130283 - RNA, 23 nt, Artificial Sequence
  Synthetic
aauguuaguauuccuuggacuca

SEQ ID NO: 130284 - RNA, 24 nt, Artificial Sequence
  Synthetic
caauguuaguauuccuuggacuca

SEQ ID NO: 130285 - RNA, 21 nt, Artificial Sequence
  Synthetic
  misc_feature (18)..(18): n is a, c, g, or u
ccugcauucggagccaanuca

SEQ ID NO: 130286 - RNA, 22 nt, Artificial Sequence
  Synthetic
  misc_feature (19)..(19): n is a, c, g, or u
cccugcauucggagccaanuca

SEQ ID NO: 130287 - RNA, 23 nt, Artificial Sequence
  Synthetic
  misc_feature (20)..(20): n is a, c, g, or u
acccugcauucggagccaanuca

SEQ ID NO: 130288 - RNA, 21 nt, Artificial Sequence
  Synthetic
  misc_feature (9)..(9): n is a, c, g, or u
ccagcaucnagggaucuagua

SEQ ID NO: 130289 - RNA, 22 nt, Artificial Sequence
  Synthetic
  misc_feature (10)..(10): n is a, c, g, or u
uccagcaucnagggaucuagua

SEQ ID NO: 130290 - RNA, 23 nt, Artificial Sequence
  Synthetic
  misc_feature (11)..(11): n is a, c, g, or u
auccagcaucnagggaucuagua

SEQ ID NO: 130291 - RNA, 19 nt, Artificial Sequence
  Synthetic
cggggcgcaccucucuuua

SEQ ID NO: 130292 - RNA, 20 nt, Artificial Sequence
  Synthetic
acggggcgcaccucucuuua

SEQ ID NO: 130293 - RNA, 21 nt, Artificial Sequence
  Synthetic
cacggggcgcaccucucuuua

SEQ ID NO: 130294 - RNA, 22 nt, Artificial Sequence
  Synthetic
ccacggggcgcaccucucuuua

SEQ ID NO: 130295 - RNA, 23 nt, Artificial Sequence
  Synthetic
accacggggcgcaccucucuuua

SEQ ID NO: 130296 - RNA, 18 nt, Artificial Sequence
  Synthetic
cucccucgccucgcagac

SEQ ID NO: 130297 - RNA, 19 nt, Artificial Sequence
  Synthetic
acucccucgccucgcagac

SEQ ID NO: 130298 - RNA, 20 nt, Artificial Sequence
  Synthetic
aacucccucgccucgcagac

SEQ ID NO: 130299 - RNA, 22 nt, Artificial Sequence
  Synthetic
agaacucccucgccucgcagac

SEQ ID NO: 130300 - RNA, 23 nt, Artificial Sequence
  Synthetic
aagaacucccucgccucgcagac

SEQ ID NO: 130301 - RNA, 19 nt, Artificial Sequence
  Synthetic
cgggguuuuucuuguugac

SEQ ID NO: 130302 - RNA, 22 nt, Artificial Sequence
  Synthetic
aggcgggguuuuucuuguugac

SEQ ID NO: 130303 - RNA, 23 nt, Artificial Sequence
  Synthetic
caggcgggguuuuucuuguugac

SEQ ID NO: 130304 - RNA, 24 nt, Artificial Sequence
  Synthetic
acaggcgggguuuuucuuguugac

SEQ ID NO: 130305 - RNA, 21 nt, Artificial Sequence
  Synthetic
caaaauucgcaguccccaacc

SEQ ID NO: 130306 - RNA, 22 nt, Artificial Sequence
  Synthetic
ccaaaauucgcaguccccaacc

SEQ ID NO: 130307 - RNA, 21 nt, Artificial Sequence
  Synthetic
uaagaggacucuuggacuccc

SEQ ID NO: 130308 - RNA, 22 nt, Artificial Sequence
  Synthetic
auaagaggacucuuggacuccc

SEQ ID NO: 130309 - RNA, 23 nt, Artificial Sequence
  Synthetic
cauaagaggacucuuggacuccc

SEQ ID NO: 130310 - RNA, 24 nt, Artificial Sequence
  Synthetic
acauaagaggacucuuggacuccc

SEQ ID NO: 130311 - RNA, 21 nt, Artificial Sequence
  Synthetic
ucacucaccaaccuccugucc

SEQ ID NO: 130312 - RNA, 22 nt, Artificial Sequence
  Synthetic
aucacucaccaaccuccugucc

SEQ ID NO: 130313 - RNA, 23 nt, Artificial Sequence
  Synthetic
aaucacucaccaaccuccugucc

SEQ ID NO: 130314 - RNA, 24 nt, Artificial Sequence
  Synthetic
caaucacucaccaaccuccugucc

SEQ ID NO: 130315 - RNA, 21 nt, Artificial Sequence
  Synthetic
agguauguugcccguuugucc

SEQ ID NO: 130316 - RNA, 22 nt, Artificial Sequence
  Synthetic
aagguauguugcccguuugucc

SEQ ID NO: 130317 - RNA, 23 nt, Artificial Sequence
  Synthetic
caagguauguugcccguuugucc

SEQ ID NO: 130318 - RNA, 24 nt, Artificial Sequence
  Synthetic
ucaagguauguugcccguuugucc

SEQ ID NO: 130319 - RNA, 21 nt, Artificial Sequence
  Synthetic
uuguauuaggaggcuguaggc

SEQ ID NO: 130320 - RNA, 22 nt, Artificial Sequence
  Synthetic
uuuguauuaggaggcuguaggc

SEQ ID NO: 130321 - RNA, 23 nt, Artificial Sequence
  Synthetic
cuuuguauuaggaggcuguaggc

SEQ ID NO: 130322 - RNA, 24 nt, Artificial Sequence
  Synthetic
ucuuuguauuaggaggcuguaggc

SEQ ID NO: 130323 - RNA, 21 nt, Artificial Sequence
  Synthetic
aaaauaccuaugggagugggc

SEQ ID NO: 130324 - RNA, 22 nt, Artificial Sequence
  Synthetic
caaaauaccuaugggagugggc

SEQ ID NO: 130325 - RNA, 24 nt, Artificial Sequence
  Synthetic
cgcaaaauaccuaugggagugggc

SEQ ID NO: 130326 - RNA, 21 nt, Artificial Sequence
  Synthetic
  misc_feature (17)..(17): n is a, c, g, or u
aucuuucuguucccaanccuc

SEQ ID NO: 130327 - RNA, 22 nt, Artificial Sequence
  Synthetic
  misc_feature (18)..(18): n is a, c, g, or u
aaucuuucuguucccaanccuc

SEQ ID NO: 130328 - RNA, 24 nt, Artificial Sequence
  Synthetic
  misc_feature (20)..(20): n is a, c, g, or u
cgaaucuuucuguucccaanccuc

SEQ ID NO: 130329 - RNA, 18 nt, Artificial Sequence
  Synthetic
  misc_feature (11)..(11): n is a, c, g, or u
uuagacgacgngaccgag

SEQ ID NO: 130330 - RNA, 20 nt, Artificial Sequence
  Synthetic
  misc_feature (13)..(13): n is a, c, g, or u
uguuagacgacgngaccgag

SEQ ID NO: 130331 - RNA, 18 nt, Artificial Sequence
  Synthetic
agaauccucacaauaccg

SEQ ID NO: 130332 - RNA, 19 nt, Artificial Sequence
  Synthetic
aagaauccucacaauaccg

SEQ ID NO: 130333 - RNA, 20 nt, Artificial Sequence
  Synthetic
caagaauccucacaauaccg

SEQ ID NO: 130334 - RNA, 21 nt, Artificial Sequence
  Synthetic
acaagaauccucacaauaccg

SEQ ID NO: 130335 - RNA, 23 nt, Artificial Sequence
  Synthetic
ugacaagaauccucacaauaccg

SEQ ID NO: 130336 - RNA, 24 nt, Artificial Sequence
  Synthetic
uugacaagaauccucacaauaccg

SEQ ID NO: 130337 - RNA, 19 nt, Artificial Sequence
  Synthetic
uguuuacgucccgucggcg

SEQ ID NO: 130338 - RNA, 20 nt, Artificial Sequence
  Synthetic
uuguuuacgucccgucggcg

SEQ ID NO: 130339 - RNA, 21 nt, Artificial Sequence
  Synthetic
uccaauuuguccugguuaucg

SEQ ID NO: 130340 - RNA, 22 nt, Artificial Sequence
  Synthetic
cuccaauuuguccugguuaucg

SEQ ID NO: 130341 - RNA, 23 nt, Artificial Sequence
  Synthetic
ccuccaauuuguccugguuaucg

SEQ ID NO: 130342 - RNA, 24 nt, Artificial Sequence
  Synthetic
uccuccaauuuguccugguuaucg

SEQ ID NO: 130343 - RNA, 23 nt, Artificial Sequence
  Synthetic
aggaccccugcucguguuacagg

SEQ ID NO: 130344 - RNA, 24 nt, Artificial Sequence
  Synthetic
uaggaccccugcucguguuacagg

SEQ ID NO: 130345 - RNA, 21 nt, Artificial Sequence
  Synthetic
  misc_feature (12)..(12): n is a, c, g, or u
uaccccguugcncggcaacgg

SEQ ID NO: 130346 - RNA, 22 nt, Artificial Sequence
  Synthetic
  misc_feature (13)..(13): n is a, c, g, or u
uuaccccguugcncggcaacgg

SEQ ID NO: 130347 - RNA, 23 nt, Artificial Sequence
  Synthetic
  misc_feature (14)..(14): n is a, c, g, or u
uuuaccccguugcncggcaacgg

SEQ ID NO: 130348 - RNA, 24 nt, Artificial Sequence
  Synthetic
  misc_feature (15)..(15): n is a, c, g, or u
cuuuaccccguugcncggcaacgg

SEQ ID NO: 130349 - RNA, 21 nt, Artificial Sequence
  Synthetic
uggaugaugugguauuggggg

SEQ ID NO: 130350 - RNA, 22 nt, Artificial Sequence
  Synthetic
auggaugaugugguauuggggg

SEQ ID NO: 130351 - RNA, 23 nt, Artificial Sequence
  Synthetic
uauggaugaugugguauuggggg

SEQ ID NO: 130352 - RNA, 24 nt, Artificial Sequence
  Synthetic
auauggaugaugugguauuggggg

SEQ ID NO: 130353 - RNA, 18 nt, Artificial Sequence
  Synthetic
ccucgcaaaggcaugggg

SEQ ID NO: 130354 - RNA, 19 nt, Artificial Sequence
  Synthetic
accucgcaaaggcaugggg

SEQ ID NO: 130355 - RNA, 20 nt, Artificial Sequence
  Synthetic
aaccucgcaaaggcaugggg

SEQ ID NO: 130356 - RNA, 21 nt, Artificial Sequence
  Synthetic
aaaccucgcaaaggcaugggg

SEQ ID NO: 130357 - RNA, 22 nt, Artificial Sequence
  Synthetic
aaaaccucgcaaaggcaugggg

SEQ ID NO: 130358 - RNA, 23 nt, Artificial Sequence
  Synthetic
caaaaccucgcaaaggcaugggg

SEQ ID NO: 130359 - RNA, 24 nt, Artificial Sequence
  Synthetic
ucaaaaccucgcaaaggcaugggg

SEQ ID NO: 130360 - RNA, 21 nt, Artificial Sequence
  Synthetic
  misc_feature (1)..(1): n is a, c, g, or u
ncggcaacggccuggucugug

SEQ ID NO: 130361 - RNA, 22 nt, Artificial Sequence
  Synthetic
  misc_feature (2)..(2): n is a, c, g, or u
cncggcaacggccuggucugug

SEQ ID NO: 130362 - RNA, 24 nt, Artificial Sequence
  Synthetic
  misc_feature (4)..(4): n is a, c, g, or u
ugcncggcaacggccuggucugug

SEQ ID NO: 130363 - RNA, 18 nt, Artificial Sequence
  Synthetic
aaucucgggaaucucaau

SEQ ID NO: 130364 - RNA, 19 nt, Artificial Sequence
  Synthetic
caaucucgggaaucucaau

SEQ ID NO: 130365 - RNA, 20 nt, Artificial Sequence
  Synthetic
ucaaucucgggaaucucaau

SEQ ID NO: 130366 - RNA, 21 nt, Artificial Sequence
  Synthetic
cucaaucucgggaaucucaau

SEQ ID NO: 130367 - RNA, 22 nt, Artificial Sequence
  Synthetic
ucucaaucucgggaaucucaau

SEQ ID NO: 130368 - RNA, 23 nt, Artificial Sequence
  Synthetic
aucucaaucucgggaaucucaau

SEQ ID NO: 130369 - RNA, 22 nt, Artificial Sequence
  Synthetic
agaagaucucaaucucgggaau

SEQ ID NO: 130370 - RNA, 23 nt, Artificial Sequence
  Synthetic
cagaagaucucaaucucgggaau

SEQ ID NO: 130371 - RNA, 18 nt, Artificial Sequence
  Synthetic
cgccgcgucgcagaagau

SEQ ID NO: 130372 - RNA, 19 nt, Artificial Sequence
  Synthetic
ucgccgcgucgcagaagau

SEQ ID NO: 130373 - RNA, 20 nt, Artificial Sequence
  Synthetic
aucgccgcgucgcagaagau

SEQ ID NO: 130374 - RNA, 21 nt, Artificial Sequence
  Synthetic
  misc_feature (17)..(17): n is a, c, g, or u
ccucgccucgcagacgnagau

SEQ ID NO: 130375 - RNA, 22 nt, Artificial Sequence
  Synthetic
  misc_feature (18)..(18): n is a, c, g, or u
cccucgccucgcagacgnagau

SEQ ID NO: 130376 - RNA, 23 nt, Artificial Sequence
  Synthetic
  misc_feature (19)..(19): n is a, c, g, or u
ucccucgccucgcagacgnagau

SEQ ID NO: 130377 - RNA, 24 nt, Artificial Sequence
  Synthetic
  misc_feature (20)..(20): n is a, c, g, or u
cucccucgccucgcagacgnagau

SEQ ID NO: 130378 - RNA, 18 nt, Artificial Sequence
  Synthetic
uguacaaaaccuacggau

SEQ ID NO: 130379 - RNA, 19 nt, Artificial Sequence
  Synthetic
cuguacaaaaccuacggau

SEQ ID NO: 130380 - RNA, 21 nt, Artificial Sequence
  Synthetic
ugcuguacaaaaccuacggau

SEQ ID NO: 130381 - RNA, 22 nt, Artificial Sequence
  Synthetic
uugcuguacaaaaccuacggau

SEQ ID NO: 130382 - RNA, 24 nt, Artificial Sequence
  Synthetic
uguugcuguacaaaaccuacggau

SEQ ID NO: 130383 - RNA, 21 nt, Artificial Sequence
  Synthetic
agggaucuaguagucaauuau

SEQ ID NO: 130384 - RNA, 22 nt, Artificial Sequence
  Synthetic
  misc_feature (1)..(1): n is a, c, g, or u
nagggaucuaguagucaauuau

SEQ ID NO: 130385 - RNA, 23 nt, Artificial Sequence
  Synthetic
  misc_feature (2)..(2): n is a, c, g, or u
cnagggaucuaguagucaauuau

SEQ ID NO: 130386 - RNA, 24 nt, Artificial Sequence
  Synthetic
  misc_feature (3)..(3): n is a, c, g, or u
ucnagggaucuaguagucaauuau

SEQ ID NO: 130387 - RNA, 18 nt, Artificial Sequence
  Synthetic
uaccgcagagucuagacu

SEQ ID NO: 130388 - RNA, 19 nt, Artificial Sequence
  Synthetic
auaccgcagagucuagacu

SEQ ID NO: 130389 - RNA, 20 nt, Artificial Sequence
  Synthetic
aauaccgcagagucuagacu

SEQ ID NO: 130390 - RNA, 21 nt, Artificial Sequence
  Synthetic
  misc_feature (14)..(14): n is a, c, g, or u
cagcucuguaucgngaagccu

SEQ ID NO: 130391 - RNA, 22 nt, Artificial Sequence
  Synthetic
  misc_feature (15)..(15): n is a, c, g, or u
ucagcucuguaucgngaagccu

SEQ ID NO: 130392 - RNA, 23 nt, Artificial Sequence
  Synthetic
  misc_feature (16)..(16): n is a, c, g, or u
cucagcucuguaucgngaagccu

SEQ ID NO: 130393 - RNA, 24 nt, Artificial Sequence
  Synthetic
  misc_feature (17)..(17): n is a, c, g, or u
ccucagcucuguaucgngaagccu

SEQ ID NO: 130394 - RNA, 19 nt, Artificial Sequence
  Synthetic
agacucgugguggacuucu

SEQ ID NO: 130395 - RNA, 20 nt, Artificial Sequence
  Synthetic
uagacucgugguggacuucu

SEQ ID NO: 130396 - RNA, 21 nt, Artificial Sequence
  Synthetic
cuagacucgugguggacuucu

SEQ ID NO: 130397 - RNA, 22 nt, Artificial Sequence
  Synthetic
ucuagacucgugguggacuucu

SEQ ID NO: 130398 - RNA, 24 nt, Artificial Sequence
  Synthetic
agucuagacucgugguggacuucu

SEQ ID NO: 130399 - RNA, 21 nt, Artificial Sequence
  Synthetic
ccgugugucuuggccaaaauu

SEQ ID NO: 130400 - RNA, 22 nt, Artificial Sequence
  Synthetic
cccgugugucuuggccaaaauu

SEQ ID NO: 130401 - RNA, 23 nt, Artificial Sequence
  Synthetic
acccgugugucuuggccaaaauu

SEQ ID NO: 130402 - RNA, 24 nt, Artificial Sequence
  Synthetic
cacccgugugucuuggccaaaauu

SEQ ID NO: 130403 - RNA, 22 nt, Artificial Sequence
  Synthetic
ugcugcuaugccucaucuucuu

SEQ ID NO: 130404 - RNA, 23 nt, Artificial Sequence
  Synthetic
cugcugcuaugccucaucuucuu

SEQ ID NO: 130405 - RNA, 24 nt, Artificial Sequence
  Synthetic
ccugcugcuaugccucaucuucuu

SEQ ID NO: 130406 - RNA, 21 nt, Artificial Sequence
  Synthetic
ucgccaacuuacaaggccuuu

SEQ ID NO: 130407 - RNA, 22 nt, Artificial Sequence
  Synthetic
cucgccaacuuacaaggccuuu

SEQ ID NO: 130408 - RNA, 23 nt, Artificial Sequence
  Synthetic
ucucgccaacuuacaaggccuuu

SEQ ID NO: 130409 - RNA, 24 nt, Artificial Sequence
  Synthetic
uucucgccaacuuacaaggccuuu

SEQ ID NO: 130410 - RNA, 18 nt, Artificial Sequence
  Synthetic
  misc_feature (10)..(10): n is a, c, g, or u
guauacccanagacaaaa

SEQ ID NO: 130411 - RNA, 22 nt, Artificial Sequence
  Synthetic
  misc_feature (10)..(10): n is a, c, g, or u
guauacccanagacaaaagaaa

SEQ ID NO: 130412 - RNA, 18 nt, Artificial Sequence
  Synthetic
  misc_feature (8)..(8): n is a, c, g, or u
guuugaunuuuuguacaa

SEQ ID NO: 130413 - RNA, 20 nt, Artificial Sequence
  Synthetic
  misc_feature (10)..(10): n is a, c, g, or u
guguuugaunuuuuguacaa

SEQ ID NO: 130414 - RNA, 20 nt, Artificial Sequence
  Synthetic
guagcucuuguucccaagaa

SEQ ID NO: 130415 - RNA, 23 nt, Artificial Sequence
  Synthetic
  misc_feature (2)..(2): n is a, c, g, or u
gnuguagcucuuguucccaagaa

SEQ ID NO: 130416 - RNA, 18 nt, Artificial Sequence
  Synthetic
  misc_feature (5)..(5): n is a, c, g, or u
  misc_feature (7)..(7): n is a, c, g, or u
gaucncngacggaaggaa

SEQ ID NO: 130417 - RNA, 21 nt, Artificial Sequence
  Synthetic
  misc_feature (2)..(2): n is a, c, g, or u
  misc_feature (8)..(8): n is a, c, g, or u
  misc_feature (10)..(10): n is a, c, g, or u
gnagaucncngacggaaggaa

SEQ ID NO: 130418 - RNA, 19 nt, Artificial Sequence
  Synthetic
gcagcaggaugaagaggaa

SEQ ID NO: 130419 - RNA, 24 nt, Artificial Sequence
  Synthetic
gcauagcagcaggaugaagaggaa

SEQ ID NO: 130420 - RNA, 22 nt, Artificial Sequence
  Synthetic
gauaauccagaagaaccaauaa

SEQ ID NO: 130421 - RNA, 23 nt, Artificial Sequence
  Synthetic
  misc_feature (11)..(11): n is a, c, g, or u
  misc_feature (17)..(17): n is a, c, g, or u
gauuaacuacnugaucnggauaa

SEQ ID NO: 130422 - RNA, 24 nt, Artificial Sequence
  Synthetic
  misc_feature (2)..(2): n is a, c, g, or u
  misc_feature (4)..(5): n is a, c, g, or u
  misc_feature (8)..(8): n is a, c, g, or u
gncnnuunacaggaaguuuucuaa

SEQ ID NO: 130423 - RNA, 24 nt, Artificial Sequence
  Synthetic
  misc_feature (18)..(18): n is a, c, g, or u
  misc_feature (20)..(20): n is a, c, g, or u
gccuccuaauacaaagancnuuaa

SEQ ID NO: 130424 - RNA, 22 nt, Artificial Sequence
  Synthetic
guacagcaacaugagggaaaca

SEQ ID NO: 130425 - RNA, 19 nt, Artificial Sequence
  Synthetic
  misc_feature (4)..(4): n is a, c, g, or u
  misc_feature (16)..(16): n is a, c, g, or u
gaanagugggacaugnaca

SEQ ID NO: 130426 - RNA, 23 nt, Artificial Sequence
  Synthetic
  misc_feature (8)..(8): n is a, c, g, or u
  misc_feature (20)..(20): n is a, c, g, or u
gcuugaanagugggacaugnaca

SEQ ID NO: 130427 - RNA, 24 nt, Artificial Sequence
  Synthetic
  misc_feature (9)..(9): n is a, c, g, or u
  misc_feature (21)..(21): n is a, c, g, or u
ggcuugaanagugggacaugnaca

SEQ ID NO: 130428 - RNA, 18 nt, Artificial Sequence
  Synthetic
  misc_feature (4)..(4): n is a, c, g, or u
  misc_feature (7)..(7): n is a, c, g, or u
gccnaungccaagcccca

SEQ ID NO: 130429 - RNA, 19 nt, Artificial Sequence
  Synthetic
  misc_feature (5)..(5): n is a, c, g, or u
  misc_feature (8)..(8): n is a, c, g, or u
ggccnaungccaagcccca

SEQ ID NO: 130430 - RNA, 22 nt, Artificial Sequence
  Synthetic
  misc_feature (8)..(8): n is a, c, g, or u
  misc_feature (11)..(11): n is a, c, g, or u
gauggccnaungccaagcccca

SEQ ID NO: 130431 - RNA, 19 nt, Artificial Sequence
  Synthetic
gcuccgaaugcagggucca

SEQ ID NO: 130432 - RNA, 20 nt, Artificial Sequence
  Synthetic
ggcuccgaaugcagggucca

SEQ ID NO: 130433 - RNA, 20 nt, Artificial Sequence
  Synthetic
  misc_feature (6)..(6): n is a, c, g, or u
gucaunaauuccccccagca

SEQ ID NO: 130434 - RNA, 22 nt, Artificial Sequence
  Synthetic
  misc_feature (8)..(8): n is a, c, g, or u
gagucaunaauuccccccagca

SEQ ID NO: 130435 - RNA, 18 nt, Artificial Sequence
  Synthetic
guugauaagauaggggca

SEQ ID NO: 130436 - RNA, 20 nt, Artificial Sequence
  Synthetic
guguugauaagauaggggca

SEQ ID NO: 130437 - RNA, 23 nt, Artificial Sequence
  Synthetic
gaaguguugauaagauaggggca

SEQ ID NO: 130438 - RNA, 24 nt, Artificial Sequence
  Synthetic
ggaaguguugauaagauaggggca

SEQ ID NO: 130439 - RNA, 22 nt, Artificial Sequence
  Synthetic
  misc_feature (4)..(4): n is a, c, g, or u
  misc_feature (16)..(16): n is a, c, g, or u
gaanagugggacaugnacaaga

SEQ ID NO: 130440 - RNA, 18 nt, Artificial Sequence
  Synthetic
gauugacgagaugugaga

SEQ ID NO: 130441 - RNA, 20 nt, Artificial Sequence
  Synthetic
gagauugacgagaugugaga

SEQ ID NO: 130442 - RNA, 22 nt, Artificial Sequence
  Synthetic
  misc_feature (12)..(12): n is a, c, g, or u
  misc_feature (15)..(15): n is a, c, g, or u
guauauuuccgnganaggacga

SEQ ID NO: 130443 - RNA, 20 nt, Artificial Sequence
  Synthetic
gcagacggagaaggggacga

SEQ ID NO: 130444 - RNA, 21 nt, Artificial Sequence
  Synthetic
ggcagacggagaaggggacga

SEQ ID NO: 130445 - RNA, 20 nt, Artificial Sequence
  Synthetic
  misc_feature (6)..(6): n is a, c, g, or u
gaucuncgucugcgaggcga

SEQ ID NO: 130446 - RNA, 18 nt, Artificial Sequence
  Synthetic
guaagaccuugggcagga

SEQ ID NO: 130447 - RNA, 23 nt, Artificial Sequence
  Synthetic
  misc_feature (2)..(2): n is a, c, g, or u
  misc_feature (15)..(16): n is a, c, g, or u
  misc_feature (18)..(18): n is a, c, g, or u
gnaaauauuuagugnngnuagga

SEQ ID NO: 130448 - RNA, 24 nt, Artificial Sequence
  Synthetic
  misc_feature (3)..(3): n is a, c, g, or u
  misc_feature (16)..(17): n is a, c, g, or u
  misc_feature (19)..(19): n is a, c, g, or u
ggnaaauauuuagugnngnuagga

SEQ ID NO: 130449 - RNA, 21 nt, Artificial Sequence
  Synthetic
ggguccaacugaugaucggga

SEQ ID NO: 130450 - RNA, 24 nt, Artificial Sequence
  Synthetic
gcaggguccaacugaugaucggga

SEQ ID NO: 130451 - RNA, 22 nt, Artificial Sequence
  Synthetic
  misc_feature (11)..(11): n is a, c, g, or u
  misc_feature (20)..(20): n is a, c, g, or u
guaaaugaaunuuaggaaanga

SEQ ID NO: 130452 - RNA, 24 nt, Artificial Sequence
  Synthetic
  misc_feature (19)..(19): n is a, c, g, or u
  misc_feature (22)..(22): n is a, c, g, or u
guauuuugcgaaagcccanganga

SEQ ID NO: 130453 - RNA, 18 nt, Artificial Sequence
  Synthetic
ggguccuaggaauccuga

SEQ ID NO: 130454 - RNA, 19 nt, Artificial Sequence
  Synthetic
gggguccuaggaauccuga

SEQ ID NO: 130455 - RNA, 22 nt, Artificial Sequence
  Synthetic
gcagggguccuaggaauccuga

SEQ ID NO: 130456 - RNA, 24 nt, Artificial Sequence
  Synthetic
gagcagggguccuaggaauccuga

SEQ ID NO: 130457 - RNA, 19 nt, Artificial Sequence
  Synthetic
gaugauuaggcagagguga

SEQ ID NO: 130458 - RNA, 21 nt, Artificial Sequence
  Synthetic
gagaugauuaggcagagguga

SEQ ID NO: 130459 - RNA, 22 nt, Artificial Sequence
  Synthetic
  misc_feature (4)..(5): n is a, c, g, or u
gcunnuggccagugguccuuga

SEQ ID NO: 130460 - RNA, 23 nt, Artificial Sequence
  Synthetic
  misc_feature (5)..(6): n is a, c, g, or u
ggcunnuggccagugguccuuga

SEQ ID NO: 130461 - RNA, 20 nt, Artificial Sequence
  Synthetic
guaguuuccggaaguguuga

SEQ ID NO: 130462 - RNA, 18 nt, Artificial Sequence
  Synthetic
  misc_feature (11)..(11): n is a, c, g, or u
  misc_feature (14)..(14): n is a, c, g, or u
  misc_feature (17)..(17): n is a, c, g, or u
gagcugaggcngunucna

SEQ ID NO: 130463 - RNA, 24 nt, Artificial Sequence
  Synthetic
  misc_feature (17)..(17): n is a, c, g, or u
  misc_feature (20)..(20): n is a, c, g, or u
  misc_feature (23)..(23): n is a, c, g, or u
gauacagagcugaggcngunucna

SEQ ID NO: 130464 - RNA, 21 nt, Artificial Sequence
  Synthetic
  misc_feature (13)..(13): n is a, c, g, or u
  misc_feature (17)..(17): n is a, c, g, or u
  misc_feature (20)..(20): n is a, c, g, or u
guaaauaaugucnggunugna

SEQ ID NO: 130465 - RNA, 20 nt, Artificial Sequence
  Synthetic
  misc_feature (5)..(5): n is a, c, g, or u
gauanaaucuagcaggcaua

SEQ ID NO: 130466 - RNA, 21 nt, Artificial Sequence
  Synthetic
  misc_feature (6)..(6): n is a, c, g, or u
ggauanaaucuagcaggcaua

SEQ ID NO: 130467 - RNA, 19 nt, Artificial Sequence
  Synthetic
  misc_feature (5)..(5): n is a, c, g, or u
gugunguuucccucuuaua

SEQ ID NO: 130468 - RNA, 24 nt, Artificial Sequence
  Synthetic
  misc_feature (10)..(10): n is a, c, g, or u
gcuacgugunguuucccucuuaua

SEQ ID NO: 130469 - RNA, 18 nt, Artificial Sequence
  Synthetic
  misc_feature (2)..(2): n is a, c, g, or u
gnaaguaaugauuaacua

SEQ ID NO: 130470 - RNA, 22 nt, Artificial Sequence
  Synthetic
  misc_feature (3)..(3): n is a, c, g, or u
  misc_feature (6)..(6): n is a, c, g, or u
gunugnaaguaaugauuaacua

SEQ ID NO: 130471 - RNA, 23 nt, Artificial Sequence
  Synthetic
  misc_feature (4)..(4): n is a, c, g, or u
  misc_feature (7)..(7): n is a, c, g, or u
ggunugnaaguaaugauuaacua

SEQ ID NO: 130472 - RNA, 19 nt, Artificial Sequence
  Synthetic
guauuaacauaauugacua

SEQ ID NO: 130473 - RNA, 23 nt, Artificial Sequence
  Synthetic
guuaguauuaacauaauugacua

SEQ ID NO: 130474 - RNA, 19 nt, Artificial Sequence
  Synthetic
gccuuccaaagaguaugua

SEQ ID NO: 130475 - RNA, 21 nt, Artificial Sequence
  Synthetic
  misc_feature (12)..(12): n is a, c, g, or u
guaaggcaaganauaugaaac

SEQ ID NO: 130476 - RNA, 20 nt, Artificial Sequence
  Synthetic
gacaaaagaaaauugguaac

SEQ ID NO: 130477 - RNA, 18 nt, Artificial Sequence
  Synthetic
gaauuuuggccaagacac

SEQ ID NO: 130478 - RNA, 20 nt, Artificial Sequence
  Synthetic
gcgaauuuuggccaagacac

SEQ ID NO: 130479 - RNA, 19 nt, Artificial Sequence
  Synthetic
  misc_feature (7)..(7): n is a, c, g, or u
gcaaganauaugaaaccac

SEQ ID NO: 130480 - RNA, 20 nt, Artificial Sequence
  Synthetic
  misc_feature (8)..(8): n is a, c, g, or u
ggcaaganauaugaaaccac

SEQ ID NO: 130481 - RNA, 24 nt, Artificial Sequence
  Synthetic
  misc_feature (12)..(12): n is a, c, g, or u
guaaggcaaganauaugaaaccac

SEQ ID NO: 130482 - RNA, 22 nt, Artificial Sequence
  Synthetic
  misc_feature (7)..(7): n is a, c, g, or u
gaucuuncaaauuauuacccac

SEQ ID NO: 130483 - RNA, 23 nt, Artificial Sequence
  Synthetic
  misc_feature (8)..(8): n is a, c, g, or u
ggaucuuncaaauuauuacccac

SEQ ID NO: 130484 - RNA, 18 nt, Artificial Sequence
  Synthetic
gaucggcagaggagccac

SEQ ID NO: 130485 - RNA, 19 nt, Artificial Sequence
  Synthetic
ggaucggcagaggagccac

SEQ ID NO: 130486 - RNA, 18 nt, Artificial Sequence
  Synthetic
gaucugaugggcguucac

SEQ ID NO: 130487 - RNA, 19 nt, Artificial Sequence
  Synthetic
ggaucugaugggcguucac

SEQ ID NO: 130488 - RNA, 18 nt, Artificial Sequence
  Synthetic
gacaaacgggcaacauac

SEQ ID NO: 130489 - RNA, 19 nt, Artificial Sequence
  Synthetic
ggacaaacgggcaacauac

SEQ ID NO: 130490 - RNA, 21 nt, Artificial Sequence
  Synthetic
gaggacaaacgggcaacauac

SEQ ID NO: 130491 - RNA, 20 nt, Artificial Sequence
  Synthetic
  misc_feature (3)..(3): n is a, c, g, or u
gcngcaaagcccaaaagacc

SEQ ID NO: 130492 - RNA, 22 nt, Artificial Sequence
  Synthetic
  misc_feature (5)..(5): n is a, c, g, or u
gagcngcaaagcccaaaagacc

SEQ ID NO: 130493 - RNA, 23 nt, Artificial Sequence
  Synthetic
  misc_feature (6)..(6): n is a, c, g, or u
ggagcngcaaagcccaaaagacc

SEQ ID NO: 130494 - RNA, 18 nt, Artificial Sequence
  Synthetic
guaaagagaggugcgccc

SEQ ID NO: 130495 - RNA, 20 nt, Artificial Sequence
  Synthetic
gcguaaagagaggugcgccc

SEQ ID NO: 130496 - RNA, 18 nt, Artificial Sequence
  Synthetic
ggacugaggcccacuccc

SEQ ID NO: 130497 - RNA, 23 nt, Artificial Sequence
  Synthetic
gaaacggacugaggcccacuccc

SEQ ID NO: 130498 - RNA, 18 nt, Artificial Sequence
  Synthetic
  misc_feature (2)..(2): n is a, c, g, or u
gnuguagcucuuguuccc

SEQ ID NO: 130499 - RNA, 20 nt, Artificial Sequence
  Synthetic
  misc_feature (5)..(5): n is a, c, g, or u
gaugnuguacagacuuggcc

SEQ ID NO: 130500 - RNA, 23 nt, Artificial Sequence
  Synthetic
gaauacaggugcaauuuccaucc

SEQ ID NO: 130501 - RNA, 24 nt, Artificial Sequence
  Synthetic
ggaauacaggugcaauuuccaucc

SEQ ID NO: 130502 - RNA, 20 nt, Artificial Sequence
  Synthetic
  misc_feature (15)..(15): n is a, c, g, or u
guacugguuguugungaucc

SEQ ID NO: 130503 - RNA, 20 nt, Artificial Sequence
  Synthetic
guugacauugcugggagucc

SEQ ID NO: 130504 - RNA, 21 nt, Artificial Sequence
  Synthetic
gaauacuaacauugagauucc

SEQ ID NO: 130505 - RNA, 22 nt, Artificial Sequence
  Synthetic
ggaauacuaacauugagauucc

SEQ ID NO: 130506 - RNA, 20 nt, Artificial Sequence
  Synthetic
gucuaacaacaguaguuucc

SEQ ID NO: 130507 - RNA, 19 nt, Artificial Sequence
  Synthetic
  misc_feature (2)..(2): n is a, c, g, or u
gnacaagagaugauuaggc

SEQ ID NO: 130508 - RNA, 24 nt, Artificial Sequence
  Synthetic
  misc_feature (7)..(7): n is a, c, g, or u
gacaugnacaagagaugauuaggc

SEQ ID NO: 130509 - RNA, 18 nt, Artificial Sequence
  Synthetic
  misc_feature (3)..(3): n is a, c, g, or u
  misc_feature (6)..(6): n is a, c, g, or u
  misc_feature (11)..(11): n is a, c, g, or u
ggnggngugancccuggc

SEQ ID NO: 130510 - RNA, 20 nt, Artificial Sequence
  Synthetic
  misc_feature (5)..(5): n is a, c, g, or u
  misc_feature (8)..(8): n is a, c, g, or u
  misc_feature (13)..(13): n is a, c, g, or u
guggnggngugancccuggc

SEQ ID NO: 130511 - RNA, 22 nt, Artificial Sequence
  Synthetic
  misc_feature (7)..(7): n is a, c, g, or u
  misc_feature (10)..(10): n is a, c, g, or u
  misc_feature (15)..(15): n is a, c, g, or u
guguggnggngugancccuggc

SEQ ID NO: 130512 - RNA, 18 nt, Artificial Sequence
  Synthetic
ggucuccaugcaacgugc

SEQ ID NO: 130513 - RNA, 20 nt, Artificial Sequence
  Synthetic
guggucuccaugcaacgugc

SEQ ID NO: 130514 - RNA, 19 nt, Artificial Sequence
  Synthetic
  misc_feature (8)..(8): n is a, c, g, or u
gcaaaaangagaguaacuc

SEQ ID NO: 130515 - RNA, 20 nt, Artificial Sequence
  Synthetic
  misc_feature (9)..(9): n is a, c, g, or u
ggcaaaaangagaguaacuc

SEQ ID NO: 130516 - RNA, 23 nt, Artificial Sequence
  Synthetic
  misc_feature (12)..(12): n is a, c, g, or u
gaaggcaaaaangagaguaacuc

SEQ ID NO: 130517 - RNA, 21 nt, Artificial Sequence
  Synthetic
  misc_feature (11)..(11): n is a, c, g, or u
gaaaauacagnccccugacuc

SEQ ID NO: 130518 - RNA, 22 nt, Artificial Sequence
  Synthetic
  misc_feature (12)..(12): n is a, c, g, or u
ggaaaauacagnccccugacuc

SEQ ID NO: 130519 - RNA, 24 nt, Artificial Sequence
  Synthetic
  misc_feature (15)..(15): n is a, c, g, or u
  misc_feature (17)..(17): n is a, c, g, or u
guucuccauguucgncncaggguc

SEQ ID NO: 130520 - RNA, 18 nt, Artificial Sequence
  Synthetic
  misc_feature (5)..(6): n is a, c, g, or u
ggcunnuggccagugguc

SEQ ID NO: 130521 - RNA, 21 nt, Artificial Sequence
  Synthetic
  misc_feature (8)..(9): n is a, c, g, or u
guuggcunnuggccagugguc

SEQ ID NO: 130522 - RNA, 22 nt, Artificial Sequence
  Synthetic
  misc_feature (9)..(10): n is a, c, g, or u
gguuggcunnuggccagugguc

SEQ ID NO: 130523 - RNA, 21 nt, Artificial Sequence
  Synthetic
gucuuugaaguaggccucaag

SEQ ID NO: 130524 - RNA, 21 nt, Artificial Sequence
  Synthetic
  misc_feature (16)..(16): n is a, c, g, or u
gaaagagaccaaauanucaag

SEQ ID NO: 130525 - RNA, 19 nt, Artificial Sequence
  Synthetic
gcauagcagcaggaugaag

SEQ ID NO: 130526 - RNA, 20 nt, Artificial Sequence
  Synthetic
ggcauagcagcaggaugaag

SEQ ID NO: 130527 - RNA, 22 nt, Artificial Sequence
  Synthetic
gaggcauagcagcaggaugaag

SEQ ID NO: 130528 - RNA, 19 nt, Artificial Sequence
  Synthetic
gcaacgugcagaggugaag

SEQ ID NO: 130529 - RNA, 23 nt, Artificial Sequence
  Synthetic
  misc_feature (13)..(13): n is a, c, g, or u
gaaucccagaggnuugggaacag

SEQ ID NO: 130530 - RNA, 19 nt, Artificial Sequence
  Synthetic
gaacuggagccaccagcag

SEQ ID NO: 130531 - RNA, 18 nt, Artificial Sequence
  Synthetic
gaagaugaggcauagcag

SEQ ID NO: 130532 - RNA, 19 nt, Artificial Sequence
  Synthetic
  misc_feature (6)..(6): n is a, c, g, or u
  misc_feature (9)..(9): n is a, c, g, or u
gcaugnugnuggugcgcag

SEQ ID NO: 130533 - RNA, 22 nt, Artificial Sequence
  Synthetic
  misc_feature (9)..(9): n is a, c, g, or u
  misc_feature (12)..(12): n is a, c, g, or u
guugcaugnugnuggugcgcag

SEQ ID NO: 130534 - RNA, 20 nt, Artificial Sequence
  Synthetic
  misc_feature (13)..(13): n is a, c, g, or u
gacucugggaucnugcagag

SEQ ID NO: 130535 - RNA, 20 nt, Artificial Sequence
  Synthetic
gacaaauuggaggacaggag

SEQ ID NO: 130536 - RNA, 21 nt, Artificial Sequence
  Synthetic
ggacaaauuggaggacaggag

SEQ ID NO: 130537 - RNA, 20 nt, Artificial Sequence
  Synthetic
  misc_feature (2)..(2): n is a, c, g, or u
gnucccccuagaaaauugag

SEQ ID NO: 130538 - RNA, 22 nt, Artificial Sequence
  Synthetic
  misc_feature (4)..(4): n is a, c, g, or u
gugnucccccuagaaaauugag

SEQ ID NO: 130539 - RNA, 23 nt, Artificial Sequence
  Synthetic
  misc_feature (5)..(5): n is a, c, g, or u
ggugnucccccuagaaaauugag

SEQ ID NO: 130540 - RNA, 24 nt, Artificial Sequence
  Synthetic
  misc_feature (6)..(6): n is a, c, g, or u
gggugnucccccuagaaaauugag

SEQ ID NO: 130541 - RNA, 21 nt, Artificial Sequence
  Synthetic
  misc_feature (14)..(14): n is a, c, g, or u
  misc_feature (17)..(17): n is a, c, g, or u
gauuaaagauaggnacnguag

SEQ ID NO: 130542 - RNA, 22 nt, Artificial Sequence
  Synthetic
  misc_feature (15)..(15): n is a, c, g, or u
  misc_feature (18)..(18): n is a, c, g, or u
ggauuaaagauaggnacnguag

SEQ ID NO: 130543 - RNA, 23 nt, Artificial Sequence
  Synthetic
guucccaagaauauggugacccg

SEQ ID NO: 130544 - RNA, 19 nt, Artificial Sequence
  Synthetic
gcugccuuccugacugccg

SEQ ID NO: 130545 - RNA, 20 nt, Artificial Sequence
  Synthetic
ggcugccuuccugacugccg

SEQ ID NO: 130546 - RNA, 20 nt, Artificial Sequence
  Synthetic
  misc_feature (7)..(7): n is a, c, g, or u
gccccgngaggggucguccg

SEQ ID NO: 130547 - RNA, 20 nt, Artificial Sequence
  Synthetic
gcuccaaauucuuuauaagg

SEQ ID NO: 130548 - RNA, 19 nt, Artificial Sequence
  Synthetic
gaugggaugggaauacagg

SEQ ID NO: 130549 - RNA, 22 nt, Artificial Sequence
  Synthetic
  misc_feature (3)..(3): n is a, c, g, or u
gangaugggaugggaauacagg

SEQ ID NO: 130550 - RNA, 21 nt, Artificial Sequence
  Synthetic
  misc_feature (2)..(2): n is a, c, g, or u
  misc_feature (10)..(10): n is a, c, g, or u
gnuaggauanaaucuagcagg

SEQ ID NO: 130551 - RNA, 24 nt, Artificial Sequence
  Synthetic
  misc_feature (2)..(3): n is a, c, g, or u
  misc_feature (5)..(5): n is a, c, g, or u
  misc_feature (13)..(13): n is a, c, g, or u
gnngnuaggauanaaucuagcagg

SEQ ID NO: 130552 - RNA, 21 nt, Artificial Sequence
  Synthetic
  misc_feature (15)..(15): n is a, c, g, or u
gcuugccugagugcnguaugg

SEQ ID NO: 130553 - RNA, 22 nt, Artificial Sequence
  Synthetic
  misc_feature (16)..(16): n is a, c, g, or u
ggcuugccugagugcnguaugg

SEQ ID NO: 130554 - RNA, 19 nt, Artificial Sequence
  Synthetic
gacugucucuuagaggugg

SEQ ID NO: 130555 - RNA, 21 nt, Artificial Sequence
  Synthetic
  misc_feature (20)..(20): n is a, c, g, or u
gaauggcuugccugagugcng

SEQ ID NO: 130556 - RNA, 23 nt, Artificial Sequence
  Synthetic
  misc_feature (22)..(22): n is a, c, g, or u
gagaauggcuugccugagugcng

SEQ ID NO: 130557 - RNA, 18 nt, Artificial Sequence
  Synthetic
  misc_feature (11)..(11): n is a, c, g, or u
  misc_feature (17)..(17): n is a, c, g, or u
gauuaacuacnugaucng

SEQ ID NO: 130558 - RNA, 23 nt, Artificial Sequence
  Synthetic
  misc_feature (16)..(16): n is a, c, g, or u
  misc_feature (22)..(22): n is a, c, g, or u
guaaugauuaacuacnugaucng

SEQ ID NO: 130559 - RNA, 18 nt, Artificial Sequence
  Synthetic
  misc_feature (17)..(17): n is a, c, g, or u
gucccaagcggccccgng

SEQ ID NO: 130560 - RNA, 20 nt, Artificial Sequence
  Synthetic
  misc_feature (19)..(19): n is a, c, g, or u
gagucccaagcggccccgng

SEQ ID NO: 130561 - RNA, 24 nt, Artificial Sequence
  Synthetic
  misc_feature (3)..(3): n is a, c, g, or u
  misc_feature (23)..(23): n is a, c, g, or u
ganagagucccaagcggccccgng

SEQ ID NO: 130562 - RNA, 21 nt, Artificial Sequence
  Synthetic
  misc_feature (8)..(8): n is a, c, g, or u
  misc_feature (19)..(20): n is a, c, g, or u
guuuaaunccuuugucuanng

SEQ ID NO: 130563 - RNA, 22 nt, Artificial Sequence
  Synthetic
  misc_feature (9)..(9): n is a, c, g, or u
  misc_feature (20)..(21): n is a, c, g, or u
gguuuaaunccuuugucuanng

SEQ ID NO: 130564 - RNA, 20 nt, Artificial Sequence
  Synthetic
  misc_feature (7)..(7): n is a, c, g, or u
guuuganuuggcuccgaaug

SEQ ID NO: 130565 - RNA, 20 nt, Artificial Sequence
  Synthetic
  misc_feature (16)..(16): n is a, c, g, or u
gacuacuagaucccungaug

SEQ ID NO: 130566 - RNA, 19 nt, Artificial Sequence
  Synthetic
gaaguuuucuaaaacagug

SEQ ID NO: 130567 - RNA, 20 nt, Artificial Sequence
  Synthetic
ggaaguuuucuaaaacagug

SEQ ID NO: 130568 - RNA, 18 nt, Artificial Sequence
  Synthetic
  misc_feature (5)..(5): n is a, c, g, or u
gugcnguauggugaggug

SEQ ID NO: 130569 - RNA, 20 nt, Artificial Sequence
  Synthetic
  misc_feature (7)..(7): n is a, c, g, or u
gagugcnguauggugaggug

SEQ ID NO: 130570 - RNA, 18 nt, Artificial Sequence
  Synthetic
gaggacaggagguuggug

SEQ ID NO: 130571 - RNA, 19 nt, Artificial Sequence
  Synthetic
ggaggacaggagguuggug

SEQ ID NO: 130572 - RNA, 18 nt, Artificial Sequence
  Synthetic
gcacagcuuggaggcuug

SEQ ID NO: 130573 - RNA, 19 nt, Artificial Sequence
  Synthetic
ggcacagcuuggaggcuug

SEQ ID NO: 130574 - RNA, 18 nt, Artificial Sequence
  Synthetic
ggagucgugcagguuuug

SEQ ID NO: 130575 - RNA, 19 nt, Artificial Sequence
  Synthetic
  misc_feature (19)..(19): n is a, c, g, or u
gaagucagaaggcaaaaan

SEQ ID NO: 130576 - RNA, 23 nt, Artificial Sequence
  Synthetic
  misc_feature (23)..(23): n is a, c, g, or u
gaaagaagucagaaggcaaaaan

SEQ ID NO: 130577 - RNA, 24 nt, Artificial Sequence
  Synthetic
  misc_feature (24)..(24): n is a, c, g, or u
ggaaagaagucagaaggcaaaaan

SEQ ID NO: 130578 - RNA, 19 nt, Artificial Sequence
  Synthetic
  misc_feature (19)..(19): n is a, c, g, or u
guauuuugcgaaagcccan

SEQ ID NO: 130579 - RNA, 20 nt, Artificial Sequence
  Synthetic
  misc_feature (20)..(20): n is a, c, g, or u
gguauuuugcgaaagcccan

SEQ ID NO: 130580 - RNA, 18 nt, Artificial Sequence
  Synthetic
  misc_feature (14)..(14): n is a, c, g, or u
  misc_feature (18)..(18): n is a, c, g, or u
gagaggcaauauunggan

SEQ ID NO: 130581 - RNA, 20 nt, Artificial Sequence
  Synthetic
  misc_feature (16)..(16): n is a, c, g, or u
  misc_feature (20)..(20): n is a, c, g, or u
gugagaggcaauauunggan

SEQ ID NO: 130582 - RNA, 23 nt, Artificial Sequence
  Synthetic
  misc_feature (19)..(19): n is a, c, g, or u
  misc_feature (23)..(23): n is a, c, g, or u
gaugugagaggcaauauunggan

SEQ ID NO: 130583 - RNA, 20 nt, Artificial Sequence
  Synthetic
  misc_feature (18)..(18): n is a, c, g, or u
  misc_feature (20)..(20): n is a, c, g, or u
gauguucuccauguucgncn

SEQ ID NO: 130584 - RNA, 22 nt, Artificial Sequence
  Synthetic
  misc_feature (20)..(20): n is a, c, g, or u
  misc_feature (22)..(22): n is a, c, g, or u
gugauguucuccauguucgncn

SEQ ID NO: 130585 - RNA, 23 nt, Artificial Sequence
  Synthetic
  misc_feature (2)..(2): n is a, c, g, or u
  misc_feature (4)..(4): n is a, c, g, or u
  misc_feature (23)..(23): n is a, c, g, or u
gncncaggguccccaguccucgn

SEQ ID NO: 130586 - RNA, 18 nt, Artificial Sequence
  Synthetic
  misc_feature (2)..(2): n is a, c, g, or u
  misc_feature (15)..(16): n is a, c, g, or u
  misc_feature (18)..(18): n is a, c, g, or u
gnaaauauuuagugnngn

SEQ ID NO: 130587 - RNA, 19 nt, Artificial Sequence
  Synthetic
  misc_feature (3)..(3): n is a, c, g, or u
  misc_feature (16)..(17): n is a, c, g, or u
  misc_feature (19)..(19): n is a, c, g, or u
ggnaaauauuuagugnngn

SEQ ID NO: 130588 - RNA, 18 nt, Artificial Sequence
  Synthetic
  misc_feature (5)..(5): n is a, c, g, or u
  misc_feature (8)..(8): n is a, c, g, or u
  misc_feature (11)..(11): n is a, c, g, or u
  misc_feature (18)..(18): n is a, c, g, or u
ggaanugnugncacugun

SEQ ID NO: 130589 - RNA, 20 nt, Artificial Sequence
  Synthetic
  misc_feature (7)..(7): n is a, c, g, or u
  misc_feature (10)..(10): n is a, c, g, or u
  misc_feature (13)..(13): n is a, c, g, or u
  misc_feature (20)..(20): n is a, c, g, or u
gaggaanugnugncacugun

SEQ ID NO: 130590 - RNA, 21 nt, Artificial Sequence
  Synthetic
  misc_feature (8)..(8): n is a, c, g, or u
  misc_feature (11)..(11): n is a, c, g, or u
  misc_feature (14)..(14): n is a, c, g, or u
  misc_feature (21)..(21): n is a, c, g, or u
ggaggaanugnugncacugun

SEQ ID NO: 130591 - RNA, 23 nt, Artificial Sequence
  Synthetic
  misc_feature (10)..(10): n is a, c, g, or u
  misc_feature (13)..(13): n is a, c, g, or u
  misc_feature (16)..(16): n is a, c, g, or u
  misc_feature (23)..(23): n is a, c, g, or u
gaggaggaanugnugncacugun

SEQ ID NO: 130592 - RNA, 24 nt, Artificial Sequence
  Synthetic
  misc_feature (11)..(11): n is a, c, g, or u
  misc_feature (14)..(14): n is a, c, g, or u
  misc_feature (17)..(17): n is a, c, g, or u
  misc_feature (24)..(24): n is a, c, g, or u
ggaggaggaanugnugncacugun

SEQ ID NO: 130593 - RNA, 20 nt, Artificial Sequence
  Synthetic
gaugggguugaagucccaau

SEQ ID NO: 130594 - RNA, 19 nt, Artificial Sequence
  Synthetic
gagcagggguccuaggaau

SEQ ID NO: 130595 - RNA, 23 nt, Artificial Sequence
  Synthetic
  misc_feature (6)..(6): n is a, c, g, or u
  misc_feature (9)..(9): n is a, c, g, or u
gcccangangaugggaugggaau

SEQ ID NO: 130596 - RNA, 19 nt, Artificial Sequence
  Synthetic
guccaaggaauacuaacau

SEQ ID NO: 130597 - RNA, 21 nt, Artificial Sequence
  Synthetic
gaguccaaggaauacuaacau

SEQ ID NO: 130598 - RNA, 19 nt, Artificial Sequence
  Synthetic
  misc_feature (5)..(5): n is a, c, g, or u
  misc_feature (8)..(8): n is a, c, g, or u
  misc_feature (13)..(14): n is a, c, g, or u
gccunaunuuuanncccau

SEQ ID NO: 130599 - RNA, 22 nt, Artificial Sequence
  Synthetic
  misc_feature (8)..(8): n is a, c, g, or u
  misc_feature (11)..(11): n is a, c, g, or u
  misc_feature (16)..(17): n is a, c, g, or u
guugccunaunuuuanncccau

SEQ ID NO: 130600 - RNA, 21 nt, Artificial Sequence
  Synthetic
gucucuuagagguggagagau

SEQ ID NO: 130601 - RNA, 21 nt, Artificial Sequence
  Synthetic
  misc_feature (10)..(10): n is a, c, g, or u
  misc_feature (13)..(13): n is a, c, g, or u
gaaagcccangangaugggau

SEQ ID NO: 130602 - RNA, 23 nt, Artificial Sequence
  Synthetic
  misc_feature (12)..(12): n is a, c, g, or u
  misc_feature (15)..(15): n is a, c, g, or u
gcgaaagcccangangaugggau

SEQ ID NO: 130603 - RNA, 20 nt, Artificial Sequence
  Synthetic
  misc_feature (16)..(16): n is a, c, g, or u
guaaugauuaacuacnugau

SEQ ID NO: 130604 - RNA, 24 nt, Artificial Sequence
  Synthetic
  misc_feature (2)..(2): n is a, c, g, or u
  misc_feature (20)..(20): n is a, c, g, or u
gnaaguaaugauuaacuacnugau

SEQ ID NO: 130605 - RNA, 24 nt, Artificial Sequence
  Synthetic
  misc_feature (5)..(5): n is a, c, g, or u
gaaunccagccuuccaaagaguau

SEQ ID NO: 130606 - RNA, 19 nt, Artificial Sequence
  Synthetic
guagcuccaaauucuuuau

SEQ ID NO: 130607 - RNA, 19 nt, Artificial Sequence
  Synthetic
  misc_feature (8)..(8): n is a, c, g, or u
  misc_feature (11)..(11): n is a, c, g, or u
guggcaangunccccaacu

SEQ ID NO: 130608 - RNA, 18 nt, Artificial Sequence
  Synthetic
gauuggagguuggggacu

SEQ ID NO: 130609 - RNA, 20 nt, Artificial Sequence
  Synthetic
gugauuggagguuggggacu

SEQ ID NO: 130610 - RNA, 22 nt, Artificial Sequence
  Synthetic
gagugauuggagguuggggacu

SEQ ID NO: 130611 - RNA, 24 nt, Artificial Sequence
  Synthetic
gugagugauuggagguuggggacu

SEQ ID NO: 130612 - RNA, 19 nt, Artificial Sequence
  Synthetic
guaggcugccuuccugacu

SEQ ID NO: 130613 - RNA, 21 nt, Artificial Sequence
  Synthetic
  misc_feature (4)..(4): n is a, c, g, or u
  misc_feature (13)..(13): n is a, c, g, or u
gccnacaaauugnugacaccu

SEQ ID NO: 130614 - RNA, 22 nt, Artificial Sequence
  Synthetic
  misc_feature (5)..(5): n is a, c, g, or u
  misc_feature (14)..(14): n is a, c, g, or u
ggccnacaaauugnugacaccu

SEQ ID NO: 130615 - RNA, 23 nt, Artificial Sequence
  Synthetic
  misc_feature (6)..(6): n is a, c, g, or u
  misc_feature (15)..(15): n is a, c, g, or u
gggccnacaaauugnugacaccu

SEQ ID NO: 130616 - RNA, 22 nt, Artificial Sequence
  Synthetic
  misc_feature (10)..(10): n is a, c, g, or u
gaccaauuunugccuacagccu

SEQ ID NO: 130617 - RNA, 19 nt, Artificial Sequence
  Synthetic
gaguaacuccacaguagcu

SEQ ID NO: 130618 - RNA, 21 nt, Artificial Sequence
  Synthetic
gagaguaacuccacaguagcu

SEQ ID NO: 130619 - RNA, 18 nt, Artificial Sequence
  Synthetic
  misc_feature (12)..(12): n is a, c, g, or u
ggauuguuuganuuggcu

SEQ ID NO: 130620 - RNA, 20 nt, Artificial Sequence
  Synthetic
guccuugaugggguugaagu

SEQ ID NO: 130621 - RNA, 21 nt, Artificial Sequence
  Synthetic
gguccuugaugggguugaagu

SEQ ID NO: 130622 - RNA, 23 nt, Artificial Sequence
  Synthetic
gugguccuugaugggguugaagu

SEQ ID NO: 130623 - RNA, 24 nt, Artificial Sequence
  Synthetic
  misc_feature (13)..(13): n is a, c, g, or u
  misc_feature (17)..(17): n is a, c, g, or u
  misc_feature (20)..(20): n is a, c, g, or u
guaaauaaugucnggunugnaagu

SEQ ID NO: 130624 - RNA, 24 nt, Artificial Sequence
  Synthetic
  misc_feature (4)..(4): n is a, c, g, or u
  misc_feature (7)..(7): n is a, c, g, or u
gccnaungccaagccccagccagu

SEQ ID NO: 130625 - RNA, 18 nt, Artificial Sequence
  Synthetic
ggcuaggaguuccgcagu

SEQ ID NO: 130626 - RNA, 20 nt, Artificial Sequence
  Synthetic
gcggcuaggaguuccgcagu

SEQ ID NO: 130627 - RNA, 19 nt, Artificial Sequence
  Synthetic
gucuauaggcuggaggagu

SEQ ID NO: 130628 - RNA, 20 nt, Artificial Sequence
  Synthetic
ggucuauaggcuggaggagu

SEQ ID NO: 130629 - RNA, 18 nt, Artificial Sequence
  Synthetic
  misc_feature (10)..(10): n is a, c, g, or u
gguuuugcanggucccgu

SEQ ID NO: 130630 - RNA, 21 nt, Artificial Sequence
  Synthetic
gccagugguccuugauggggu

SEQ ID NO: 130631 - RNA, 22 nt, Artificial Sequence
  Synthetic
ggccagugguccuugauggggu

SEQ ID NO: 130632 - RNA, 18 nt, Artificial Sequence
  Synthetic
  misc_feature (6)..(6): n is a, c, g, or u
  misc_feature (9)..(9): n is a, c, g, or u
gcaggnuanccacauugu

SEQ ID NO: 130633 - RNA, 24 nt, Artificial Sequence
  Synthetic
  misc_feature (20)..(20): n is a, c, g, or u
  misc_feature (23)..(23): n is a, c, g, or u
gacaccuauuaauaaugucnucnu

SEQ ID NO: 130634 - RNA, 18 nt, Artificial Sequence
  Synthetic
  misc_feature (17)..(17): n is a, c, g, or u
gugaaaaaguugcaugnu

SEQ ID NO: 130635 - RNA, 19 nt, Artificial Sequence
  Synthetic
  misc_feature (18)..(18): n is a, c, g, or u
ggugaaaaaguugcaugnu

SEQ ID NO: 130636 - RNA, 21 nt, Artificial Sequence
  Synthetic
  misc_feature (20)..(20): n is a, c, g, or u
gaggugaaaaaguugcaugnu

SEQ ID NO: 130637 - RNA, 24 nt, Artificial Sequence
  Synthetic
  misc_feature (23)..(23): n is a, c, g, or u
gcagaggugaaaaaguugcaugnu

SEQ ID NO: 130638 - RNA, 18 nt, Artificial Sequence
  Synthetic
  misc_feature (13)..(13): n is a, c, g, or u
  misc_feature (17)..(17): n is a, c, g, or u
guaaauaaugucnggunu

SEQ ID NO: 130639 - RNA, 22 nt, Artificial Sequence
  Synthetic
  misc_feature (17)..(17): n is a, c, g, or u
  misc_feature (21)..(21): n is a, c, g, or u
guauguaaauaaugucnggunu

SEQ ID NO: 130640 - RNA, 24 nt, Artificial Sequence
  Synthetic
  misc_feature (19)..(19): n is a, c, g, or u
  misc_feature (23)..(23): n is a, c, g, or u
gaguauguaaauaaugucnggunu

SEQ ID NO: 130641 - RNA, 19 nt, Artificial Sequence
  Synthetic
  misc_feature (2)..(2): n is a, c, g, or u
  misc_feature (5)..(5): n is a, c, g, or u
gnganaggacgacagaauu

SEQ ID NO: 130642 - RNA, 21 nt, Artificial Sequence
  Synthetic
  misc_feature (5)..(5): n is a, c, g, or u
gaaangaaggaguuugccauu

SEQ ID NO: 130643 - RNA, 22 nt, Artificial Sequence
  Synthetic
  misc_feature (6)..(6): n is a, c, g, or u
ggaaangaaggaguuugccauu

SEQ ID NO: 130644 - RNA, 19 nt, Artificial Sequence
  Synthetic
gaguuugccauucaggauu

SEQ ID NO: 130645 - RNA, 20 nt, Artificial Sequence
  Synthetic
ggaguuugccauucaggauu

SEQ ID NO: 130646 - RNA, 23 nt, Artificial Sequence
  Synthetic
gaaggaguuugccauucaggauu

SEQ ID NO: 130647 - RNA, 18 nt, Artificial Sequence
  Synthetic
ggagguuggugagugauu

SEQ ID NO: 130648 - RNA, 24 nt, Artificial Sequence
  Synthetic
  misc_feature (4)..(4): n is a, c, g, or u
  misc_feature (13)..(13): n is a, c, g, or u
gccnacaaauugnugacaccuauu

SEQ ID NO: 130649 - RNA, 24 nt, Artificial Sequence
  Synthetic
  misc_feature (11)..(11): n is a, c, g, or u
gacccacaauncuuugacauacuu

SEQ ID NO: 130650 - RNA, 22 nt, Artificial Sequence
  Synthetic
  misc_feature (5)..(5): n is a, c, g, or u
  misc_feature (8)..(8): n is a, c, g, or u
  misc_feature (11)..(11): n is a, c, g, or u
gcccngunaanuuucccaccuu

SEQ ID NO: 130651 - RNA, 21 nt, Artificial Sequence
  Synthetic
gacaaacgggcaacauaccuu

SEQ ID NO: 130652 - RNA, 22 nt, Artificial Sequence
  Synthetic
ggacaaacgggcaacauaccuu

SEQ ID NO: 130653 - RNA, 24 nt, Artificial Sequence
  Synthetic
gaggacaaacgggcaacauaccuu

SEQ ID NO: 130654 - RNA, 19 nt, Artificial Sequence
  Synthetic
guuuacuuagaaaggccuu

SEQ ID NO: 130655 - RNA, 21 nt, Artificial Sequence
  Synthetic
gcucaggagacucuaaggcuu

SEQ ID NO: 130656 - RNA, 20 nt, Artificial Sequence
  Synthetic
  misc_feature (4)..(4): n is a, c, g, or u
gucnuuaaacacacagucuu

SEQ ID NO: 130657 - RNA, 20 nt, Artificial Sequence
  Synthetic
  misc_feature (12)..(12): n is a, c, g, or u
gucccgcgaagnauccaguu

SEQ ID NO: 130658 - RNA, 19 nt, Artificial Sequence
  Synthetic
gcaggaucugaugggcguu

SEQ ID NO: 130659 - RNA, 20 nt, Artificial Sequence
  Synthetic
ggcaggaucugaugggcguu

SEQ ID NO: 130660 - RNA, 21 nt, Artificial Sequence
  Synthetic
gggcaggaucugaugggcguu

SEQ ID NO: 130661 - RNA, 18 nt, Artificial Sequence
  Synthetic
gauaagauaggggcauuu

SEQ ID NO: 130662 - RNA, 20 nt, Artificial Sequence
  Synthetic
  misc_feature (13)..(14): n is a, c, g, or u
gaccacuggccannagccaa

SEQ ID NO: 130663 - RNA, 21 nt, Artificial Sequence
  Synthetic
  misc_feature (14)..(15): n is a, c, g, or u
ggaccacuggccannagccaa

SEQ ID NO: 130664 - RNA, 18 nt, Artificial Sequence
  Synthetic
  misc_feature (7)..(7): n is a, c, g, or u
gcuaggnuguacugccaa

SEQ ID NO: 130665 - RNA, 23 nt, Artificial Sequence
  Synthetic
  misc_feature (21)..(21): n is a, c, g, or u
guauuaggaggcuguaggcanaa

SEQ ID NO: 130666 - RNA, 23 nt, Artificial Sequence
  Synthetic
  misc_feature (12)..(12): n is a, c, g, or u
  misc_feature (21)..(21): n is a, c, g, or u
guaaaugaaaanagaagauunaa

SEQ ID NO: 130667 - RNA, 19 nt, Artificial Sequence
  Synthetic
gacagucauccucaggcca

SEQ ID NO: 130668 - RNA, 20 nt, Artificial Sequence
  Synthetic
  misc_feature (11)..(11): n is a, c, g, or u
  misc_feature (14)..(14): n is a, c, g, or u
gaaguuggggnacnuugcca

SEQ ID NO: 130669 - RNA, 21 nt, Artificial Sequence
  Synthetic
  misc_feature (12)..(12): n is a, c, g, or u
  misc_feature (15)..(15): n is a, c, g, or u
ggaaguuggggnacnuugcca

SEQ ID NO: 130670 - RNA, 18 nt, Artificial Sequence
  Synthetic
  misc_feature (5)..(5): n is a, c, g, or u
  misc_feature (13)..(13): n is a, c, g, or u
  misc_feature (15)..(16): n is a, c, g, or u
gauunuauccuancnnca

SEQ ID NO: 130671 - RNA, 22 nt, Artificial Sequence
  Synthetic
  misc_feature (9)..(9): n is a, c, g, or u
  misc_feature (17)..(17): n is a, c, g, or u
  misc_feature (19)..(20): n is a, c, g, or u
gcuagauunuauccuancnnca

SEQ ID NO: 130672 - RNA, 20 nt, Artificial Sequence
  Synthetic
guuaguauuccuuggacuca

SEQ ID NO: 130673 - RNA, 18 nt, Artificial Sequence
  Synthetic
  misc_feature (15)..(15): n is a, c, g, or u
gcauucggagccaanuca

SEQ ID NO: 130674 - RNA, 19 nt, Artificial Sequence
  Synthetic
  misc_feature (7)..(7): n is a, c, g, or u
gaggagnugggggaggaga

SEQ ID NO: 130675 - RNA, 20 nt, Artificial Sequence
  Synthetic
  misc_feature (8)..(8): n is a, c, g, or u
ggaggagnugggggaggaga

SEQ ID NO: 130676 - RNA, 21 nt, Artificial Sequence
  Synthetic
  misc_feature (9)..(9): n is a, c, g, or u
gggaggagnugggggaggaga

SEQ ID NO: 130677 - RNA, 21 nt, Artificial Sequence
  Synthetic
  misc_feature (2)..(2): n is a, c, g, or u
  misc_feature (16)..(16): n is a, c, g, or u
gnaagauccagcaucnaggga

SEQ ID NO: 130678 - RNA, 20 nt, Artificial Sequence
  Synthetic
  misc_feature (13)..(13): n is a, c, g, or u
gacugggaggagnuggggga

SEQ ID NO: 130679 - RNA, 20 nt, Artificial Sequence
  Synthetic
  misc_feature (9)..(9): n is a, c, g, or u
gcuuucagnuauauggauga

SEQ ID NO: 130680 - RNA, 21 nt, Artificial Sequence
  Synthetic
  misc_feature (10)..(10): n is a, c, g, or u
ggcuuucagnuauauggauga

SEQ ID NO: 130681 - RNA, 24 nt, Artificial Sequence
  Synthetic
  misc_feature (23)..(23): n is a, c, g, or u
gcccucucacuguaaaugaaaana

SEQ ID NO: 130682 - RNA, 18 nt, Artificial Sequence
  Synthetic
  misc_feature (6)..(6): n is a, c, g, or u
gcaucnagggaucuagua

SEQ ID NO: 130683 - RNA, 19 nt, Artificial Sequence
  Synthetic
  misc_feature (5)..(5): n is a, c, g, or u
  misc_feature (11)..(11): n is a, c, g, or u
  misc_feature (17)..(17): n is a, c, g, or u
gaganacuguncuuganua

SEQ ID NO: 130684 - RNA, 22 nt, Artificial Sequence
  Synthetic
  misc_feature (8)..(8): n is a, c, g, or u
  misc_feature (14)..(14): n is a, c, g, or u
  misc_feature (20)..(20): n is a, c, g, or u
gaagaganacuguncuuganua

SEQ ID NO: 130685 - RNA, 23 nt, Artificial Sequence
  Synthetic
  misc_feature (9)..(9): n is a, c, g, or u
  misc_feature (15)..(15): n is a, c, g, or u
  misc_feature (21)..(21): n is a, c, g, or u
ggaagaganacuguncuuganua

SEQ ID NO: 130686 - RNA, 18 nt, Artificial Sequence
  Synthetic
  misc_feature (8)..(8): n is a, c, g, or u
gcuuugcngcuccauuua

SEQ ID NO: 130687 - RNA, 19 nt, Artificial Sequence
  Synthetic
  misc_feature (9)..(9): n is a, c, g, or u
ggcuuugcngcuccauuua

SEQ ID NO: 130688 - RNA, 20 nt, Artificial Sequence
  Synthetic
  misc_feature (10)..(10): n is a, c, g, or u
gggcuuugcngcuccauuua

SEQ ID NO: 130689 - RNA, 18 nt, Artificial Sequence
  Synthetic
  misc_feature (4)..(4): n is a, c, g, or u
  misc_feature (9)..(9): n is a, c, g, or u
  misc_feature (12)..(12): n is a, c, g, or u
gggnucacnccnccacac

SEQ ID NO: 130690 - RNA, 22 nt, Artificial Sequence
  Synthetic
  misc_feature (8)..(8): n is a, c, g, or u
  misc_feature (13)..(13): n is a, c, g, or u
  misc_feature (16)..(16): n is a, c, g, or u
gccagggnucacnccnccacac

SEQ ID NO: 130691 - RNA, 23 nt, Artificial Sequence
  Synthetic
  misc_feature (9)..(9): n is a, c, g, or u
  misc_feature (14)..(14): n is a, c, g, or u
  misc_feature (17)..(17): n is a, c, g, or u
ggccagggnucacnccnccacac

SEQ ID NO: 130692 - RNA, 24 nt, Artificial Sequence
  Synthetic
  misc_feature (10)..(10): n is a, c, g, or u
  misc_feature (15)..(15): n is a, c, g, or u
  misc_feature (18)..(18): n is a, c, g, or u
gggccagggnucacnccnccacac

SEQ ID NO: 130693 - RNA, 20 nt, Artificial Sequence
  Synthetic
  misc_feature (6)..(6): n is a, c, g, or u
gaauunaugacucuagcuac

SEQ ID NO: 130694 - RNA, 21 nt, Artificial Sequence
  Synthetic
  misc_feature (7)..(7): n is a, c, g, or u
ggaauunaugacucuagcuac

SEQ ID NO: 130695 - RNA, 22 nt, Artificial Sequence
  Synthetic
  misc_feature (8)..(8): n is a, c, g, or u
gggaauunaugacucuagcuac

SEQ ID NO: 130696 - RNA, 23 nt, Artificial Sequence
  Synthetic
  misc_feature (9)..(9): n is a, c, g, or u
ggggaauunaugacucuagcuac

SEQ ID NO: 130697 - RNA, 24 nt, Artificial Sequence
  Synthetic
  misc_feature (10)..(10): n is a, c, g, or u
gggggaauunaugacucuagcuac

SEQ ID NO: 130698 - RNA, 18 nt, Artificial Sequence
  Synthetic
gaggacucuuggacuccc

SEQ ID NO: 130699 - RNA, 19 nt, Artificial Sequence
  Synthetic
guauguugcccguuugucc

SEQ ID NO: 130700 - RNA, 20 nt, Artificial Sequence
  Synthetic
gguauguugcccguuugucc

SEQ ID NO: 130701 - RNA, 19 nt, Artificial Sequence
  Synthetic
guauuaggaggcuguaggc

SEQ ID NO: 130702 - RNA, 19 nt, Artificial Sequence
  Synthetic
guauuuuccugcugguggc

SEQ ID NO: 130703 - RNA, 23 nt, Artificial Sequence
  Synthetic
  misc_feature (2)..(2): n is a, c, g, or u
gncuguauuuuccugcugguggc

SEQ ID NO: 130704 - RNA, 24 nt, Artificial Sequence
  Synthetic
  misc_feature (3)..(3): n is a, c, g, or u
ggncuguauuuuccugcugguggc

SEQ ID NO: 130705 - RNA, 20 nt, Artificial Sequence
  Synthetic
  misc_feature (3)..(3): n is a, c, g, or u
gancacccgugugucuuggc

SEQ ID NO: 130706 - RNA, 22 nt, Artificial Sequence
  Synthetic
  misc_feature (3)..(3): n is a, c, g, or u
  misc_feature (18)..(18): n is a, c, g, or u
  misc_feature (21)..(21): n is a, c, g, or u
ganaauucugucguccunucnc

SEQ ID NO: 130707 - RNA, 18 nt, Artificial Sequence
  Synthetic
  misc_feature (17)..(17): n is a, c, g, or u
ggcucagggcauauugnc

SEQ ID NO: 130708 - RNA, 18 nt, Artificial Sequence
  Synthetic
gcagaagaucucaaucuc

SEQ ID NO: 130709 - RNA, 18 nt, Artificial Sequence
  Synthetic
gacuucuuuccuuccguc

SEQ ID NO: 130710 - RNA, 19 nt, Artificial Sequence
  Synthetic
gacauuauuaauagguguc

SEQ ID NO: 130711 - RNA, 22 nt, Artificial Sequence
  Synthetic
  misc_feature (3)..(3): n is a, c, g, or u
gangacauuauuaauagguguc

SEQ ID NO: 130712 - RNA, 20 nt, Artificial Sequence
  Synthetic
gcccguuuguccucuaauuc

SEQ ID NO: 130713 - RNA, 23 nt, Artificial Sequence
  Synthetic
guugcccguuuguccucuaauuc

SEQ ID NO: 130714 - RNA, 21 nt, Artificial Sequence
  Synthetic
guuuacuagugccauuuguuc

SEQ ID NO: 130715 - RNA, 23 nt, Artificial Sequence
  Synthetic
  misc_feature (15)..(15): n is a, c, g, or u
gaacaagagcuacancaugggag

SEQ ID NO: 130716 - RNA, 24 nt, Artificial Sequence
  Synthetic
  misc_feature (16)..(16): n is a, c, g, or u
ggaacaagagcuacancaugggag

SEQ ID NO: 130717 - RNA, 19 nt, Artificial Sequence
  Synthetic
gaugaugugguauuggggg

SEQ ID NO: 130718 - RNA, 20 nt, Artificial Sequence
  Synthetic
ggaugaugugguauuggggg

SEQ ID NO: 130719 - RNA, 20 nt, Artificial Sequence
  Synthetic
gcaagccauucucugcuggg

SEQ ID NO: 130720 - RNA, 21 nt, Artificial Sequence
  Synthetic
ggcaagccauucucugcuggg

SEQ ID NO: 130721 - RNA, 24 nt, Artificial Sequence
  Synthetic
  misc_feature (6)..(6): n is a, c, g, or u
gaauunaugacucuagcuaccugg

SEQ ID NO: 130722 - RNA, 21 nt, Artificial Sequence
  Synthetic
  misc_feature (18)..(18): n is a, c, g, or u
gccucaguccguuucucnugg

SEQ ID NO: 130723 - RNA, 22 nt, Artificial Sequence
  Synthetic
  misc_feature (19)..(19): n is a, c, g, or u
ggccucaguccguuucucnugg

SEQ ID NO: 130724 - RNA, 23 nt, Artificial Sequence
  Synthetic
  misc_feature (20)..(20): n is a, c, g, or u
gggccucaguccguuucucnugg

SEQ ID NO: 130725 - RNA, 19 nt, Artificial Sequence
  Synthetic
  misc_feature (15)..(15): n is a, c, g, or u
gaacaagagcuacancaug

SEQ ID NO: 130726 - RNA, 20 nt, Artificial Sequence
  Synthetic
  misc_feature (16)..(16): n is a, c, g, or u
ggaacaagagcuacancaug

SEQ ID NO: 130727 - RNA, 21 nt, Artificial Sequence
  Synthetic
  misc_feature (17)..(17): n is a, c, g, or u
gggaacaagagcuacancaug

SEQ ID NO: 130728 - RNA, 20 nt, Artificial Sequence
  Synthetic
  misc_feature (14)..(14): n is a, c, g, or u
guuuggcuuucagnuauaug

SEQ ID NO: 130729 - RNA, 21 nt, Artificial Sequence
  Synthetic
  misc_feature (5)..(5): n is a, c, g, or u
gauunaaauuaauuaugccug

SEQ ID NO: 130730 - RNA, 24 nt, Artificial Sequence
  Synthetic
  misc_feature (8)..(8): n is a, c, g, or u
gaagauunaaauuaauuaugccug

SEQ ID NO: 130731 - RNA, 18 nt, Artificial Sequence
  Synthetic
gcaacuuuuucaccucug

SEQ ID NO: 130732 - RNA, 18 nt, Artificial Sequence
  Synthetic
  misc_feature (3)..(3): n is a, c, g, or u
gcnuuccaccaagcucug

SEQ ID NO: 130733 - RNA, 19 nt, Artificial Sequence
  Synthetic
gacucuagcuaccugggug

SEQ ID NO: 130734 - RNA, 18 nt, Artificial Sequence
  Synthetic
gcaacggccuggucugug

SEQ ID NO: 130735 - RNA, 19 nt, Artificial Sequence
  Synthetic
ggcaacggccuggucugug

SEQ ID NO: 130736 - RNA, 20 nt, Artificial Sequence
  Synthetic
  misc_feature (3)..(3): n is a, c, g, or u
  misc_feature (6)..(7): n is a, c, g, or u
  misc_feature (9)..(9): n is a, c, g, or u
gunaanngnccuauugauug

SEQ ID NO: 130737 - RNA, 24 nt, Artificial Sequence
  Synthetic
gcuaccuggguggguaauaauuug

SEQ ID NO: 130738 - RNA, 18 nt, Artificial Sequence
  Synthetic
guuuacuagugccauuug

SEQ ID NO: 130739 - RNA, 23 nt, Artificial Sequence
  Synthetic
gcucaguuuacuagugccauuug

SEQ ID NO: 130740 - RNA, 24 nt, Artificial Sequence
  Synthetic
ggcucaguuuacuagugccauuug

SEQ ID NO: 130741 - RNA, 18 nt, Artificial Sequence
  Synthetic
  misc_feature (9)..(9): n is a, c, g, or u
ggagccaanucaaacaau

SEQ ID NO: 130742 - RNA, 24 nt, Artificial Sequence
  Synthetic
  misc_feature (15)..(15): n is a, c, g, or u
gcauucggagccaanucaaacaau

SEQ ID NO: 130743 - RNA, 18 nt, Artificial Sequence
  Synthetic
gaucucaaucucgggaau

SEQ ID NO: 130744 - RNA, 20 nt, Artificial Sequence
  Synthetic
gaacauggagaacaucacau

SEQ ID NO: 130745 - RNA, 23 nt, Artificial Sequence
  Synthetic
  misc_feature (2)..(2): n is a, c, g, or u
gncgaacauggagaacaucacau

SEQ ID NO: 130746 - RNA, 19 nt, Artificial Sequence
  Synthetic
  misc_feature (12)..(12): n is a, c, g, or u
guaaaugaaaanagaagau

SEQ ID NO: 130747 - RNA, 21 nt, Artificial Sequence
  Synthetic
  misc_feature (2)..(3): n is a, c, g, or u
  misc_feature (8)..(8): n is a, c, g, or u
  misc_feature (11)..(11): n is a, c, g, or u
gnnuaaanaunaggcaacuau

SEQ ID NO: 130748 - RNA, 22 nt, Artificial Sequence
  Synthetic
  misc_feature (3)..(4): n is a, c, g, or u
  misc_feature (9)..(9): n is a, c, g, or u
  misc_feature (12)..(12): n is a, c, g, or u
ggnnuaaanaunaggcaacuau

SEQ ID NO: 130749 - RNA, 23 nt, Artificial Sequence
  Synthetic
  misc_feature (4)..(5): n is a, c, g, or u
  misc_feature (10)..(10): n is a, c, g, or u
  misc_feature (13)..(13): n is a, c, g, or u
gggnnuaaanaunaggcaacuau

SEQ ID NO: 130750 - RNA, 19 nt, Artificial Sequence
  Synthetic
gcuuucgcaaaauaccuau

SEQ ID NO: 130751 - RNA, 20 nt, Artificial Sequence
  Synthetic
ggcuuucgcaaaauaccuau

SEQ ID NO: 130752 - RNA, 21 nt, Artificial Sequence
  Synthetic
gggcuuucgcaaaauaccuau

SEQ ID NO: 130753 - RNA, 18 nt, Artificial Sequence
  Synthetic
gaucuaguagucaauuau

SEQ ID NO: 130754 - RNA, 19 nt, Artificial Sequence
  Synthetic
ggaucuaguagucaauuau

SEQ ID NO: 130755 - RNA, 20 nt, Artificial Sequence
  Synthetic
gggaucuaguagucaauuau

SEQ ID NO: 130756 - RNA, 18 nt, Artificial Sequence
  Synthetic
  misc_feature (3)..(3): n is a, c, g, or u
ggnauuaaaccuuauuau

SEQ ID NO: 130757 - RNA, 24 nt, Artificial Sequence
  Synthetic
  misc_feature (9)..(9): n is a, c, g, or u
gacaaaggnauuaaaccuuauuau

SEQ ID NO: 130758 - RNA, 18 nt, Artificial Sequence
  Synthetic
  misc_feature (6)..(6): n is a, c, g, or u
  misc_feature (12)..(12): n is a, c, g, or u
  misc_feature (15)..(15): n is a, c, g, or u
gcaaancucaunggnacu

SEQ ID NO: 130759 - RNA, 20 nt, Artificial Sequence
  Synthetic
  misc_feature (8)..(8): n is a, c, g, or u
  misc_feature (14)..(14): n is a, c, g, or u
  misc_feature (17)..(17): n is a, c, g, or u
gagcaaancucaunggnacu

SEQ ID NO: 130760 - RNA, 21 nt, Artificial Sequence
  Synthetic
  misc_feature (9)..(9): n is a, c, g, or u
  misc_feature (15)..(15): n is a, c, g, or u
  misc_feature (18)..(18): n is a, c, g, or u
ggagcaaancucaunggnacu

SEQ ID NO: 130761 - RNA, 19 nt, Artificial Sequence
  Synthetic
  misc_feature (12)..(12): n is a, c, g, or u
gcucuguaucgngaagccu

SEQ ID NO: 130762 - RNA, 23 nt, Artificial Sequence
  Synthetic
  misc_feature (14)..(14): n is a, c, g, or u
  misc_feature (17)..(18): n is a, c, g, or u
  misc_feature (20)..(20): n is a, c, g, or u
gaaaacuuccugunaanngnccu

SEQ ID NO: 130763 - RNA, 24 nt, Artificial Sequence
  Synthetic
guuuuucuuguugacaagaauccu

SEQ ID NO: 130764 - RNA, 21 nt, Artificial Sequence
  Synthetic
  misc_feature (9)..(9): n is a, c, g, or u
gucaggggncuguauuuuccu

SEQ ID NO: 130765 - RNA, 23 nt, Artificial Sequence
  Synthetic
  misc_feature (11)..(11): n is a, c, g, or u
gagucaggggncuguauuuuccu

SEQ ID NO: 130766 - RNA, 18 nt, Artificial Sequence
  Synthetic
gucugugccuucucaucu

SEQ ID NO: 130767 - RNA, 20 nt, Artificial Sequence
  Synthetic
  misc_feature (12)..(12): n is a, c, g, or u
gauccagcaucnagggaucu

SEQ ID NO: 130768 - RNA, 24 nt, Artificial Sequence
  Synthetic
  misc_feature (2)..(2): n is a, c, g, or u
  misc_feature (16)..(16): n is a, c, g, or u
gnaagauccagcaucnagggaucu

SEQ ID NO: 130769 - RNA, 19 nt, Artificial Sequence
  Synthetic
gaaccuuuguggcuccucu

SEQ ID NO: 130770 - RNA, 20 nt, Artificial Sequence
  Synthetic
ggaaccuuuguggcuccucu

SEQ ID NO: 130771 - RNA, 22 nt, Artificial Sequence
  Synthetic
guggaaccuuuguggcuccucu

SEQ ID NO: 130772 - RNA, 24 nt, Artificial Sequence
  Synthetic
gcguggaaccuuuguggcuccucu

SEQ ID NO: 130773 - RNA, 21 nt, Artificial Sequence
  Synthetic
guuaccaauuuucuuuugucu

SEQ ID NO: 130774 - RNA, 24 nt, Artificial Sequence
  Synthetic
gcuguuaccaauuuucuuuugucu

SEQ ID NO: 130775 - RNA, 23 nt, Artificial Sequence
  Synthetic
  misc_feature (3)..(3): n is a, c, g, or u
ganuauuuggucucuuucggagu

SEQ ID NO: 130776 - RNA, 18 nt, Artificial Sequence
  Synthetic
  misc_feature (5)..(6): n is a, c, g, or u
gccannagccaaccaggu

SEQ ID NO: 130777 - RNA, 19 nt, Artificial Sequence
  Synthetic
  misc_feature (6)..(7): n is a, c, g, or u
ggccannagccaaccaggu

SEQ ID NO: 130778 - RNA, 22 nt, Artificial Sequence
  Synthetic
gacucuagcuaccugggugggu

SEQ ID NO: 130779 - RNA, 18 nt, Artificial Sequence
  Synthetic
  misc_feature (7)..(7): n is a, c, g, or u
  misc_feature (9)..(9): n is a, c, g, or u
  misc_feature (17)..(17): n is a, c, g, or u
ggaacanunaacccugnu

SEQ ID NO: 130780 - RNA, 23 nt, Artificial Sequence
  Synthetic
  misc_feature (12)..(12): n is a, c, g, or u
  misc_feature (14)..(14): n is a, c, g, or u
  misc_feature (22)..(22): n is a, c, g, or u
guucaggaacanunaacccugnu

SEQ ID NO: 130781 - RNA, 19 nt, Artificial Sequence
  Synthetic
gugugucuuggccaaaauu

SEQ ID NO: 130782 - RNA, 19 nt, Artificial Sequence
  Synthetic
  misc_feature (16)..(16): n is a, c, g, or u
gaaaguaugucaaagnauu

SEQ ID NO: 130783 - RNA, 20 nt, Artificial Sequence
  Synthetic
  misc_feature (17)..(17): n is a, c, g, or u
ggaaaguaugucaaagnauu

SEQ ID NO: 130784 - RNA, 24 nt, Artificial Sequence
  Synthetic
  misc_feature (21)..(21): n is a, c, g, or u
gauuggaaaguaugucaaagnauu

SEQ ID NO: 130785 - RNA, 18 nt, Artificial Sequence
  Synthetic
gcuaugccucaucuucuu

SEQ ID NO: 130786 - RNA, 23 nt, Artificial Sequence
  Synthetic
gccucaucuucuuauugguucuu

SEQ ID NO: 130787 - RNA, 19 nt, Artificial Sequence
  Synthetic
  misc_feature (2)..(2): n is a, c, g, or u
gncccuuuauaccgcuguu

SEQ ID NO: 130788 - RNA, 21 nt, Artificial Sequence
  Synthetic
  misc_feature (4)..(4): n is a, c, g, or u
gagncccuuuauaccgcuguu

SEQ ID NO: 130789 - RNA, 19 nt, Artificial Sequence
  Synthetic
gccaacuuacaaggccuuu

SEQ ID NO: 130790 - RNA, 23 nt, Artificial Sequence
  Synthetic
  misc_feature (3)..(3): n is a, c, g, or u
  misc_feature (9)..(9): n is a, c, g, or u
guncuuganuauuuggucucuuu

SEQ ID NO: 130791 - RNA, 24 nt, Artificial Sequence
  Synthetic
  misc_feature (9)..(9): n is a, c, g, or u
guucccaanccucugggauucuuu

SEQ ID NO: 130792 - RNA, 19 nt, Artificial Sequence
  Synthetic
  misc_feature (8)..(8): n is a, c, g, or u
guuucucnuggcucaguuu

SEQ ID NO: 130793 - RNA, 23 nt, Artificial Sequence
  Synthetic
  misc_feature (12)..(12): n is a, c, g, or u
guccguuucucnuggcucaguuu

SEQ ID NO: 130794 - RNA, 19 nt, Artificial Sequence
  Synthetic
  misc_feature (11)..(11): n is a, c, g, or u
uguauacccanagacaaaa

SEQ ID NO: 130795 - RNA, 20 nt, Artificial Sequence
  Synthetic
  misc_feature (12)..(12): n is a, c, g, or u
auguauacccanagacaaaa

SEQ ID NO: 130796 - RNA, 21 nt, Artificial Sequence
  Synthetic
  misc_feature (13)..(13): n is a, c, g, or u
aauguauacccanagacaaaa

SEQ ID NO: 130797 - RNA, 22 nt, Artificial Sequence
  Synthetic
  misc_feature (14)..(14): n is a, c, g, or u
aaauguauacccanagacaaaa

SEQ ID NO: 130798 - RNA, 23 nt, Artificial Sequence
  Synthetic
  misc_feature (15)..(15): n is a, c, g, or u
uaaauguauacccanagacaaaa

SEQ ID NO: 130799 - RNA, 24 nt, Artificial Sequence
  Synthetic
  misc_feature (16)..(16): n is a, c, g, or u
uuaaauguauacccanagacaaaa

SEQ ID NO: 130800 - RNA, 18 nt, Artificial Sequence
  Synthetic
  misc_feature (6)..(6): n is a, c, g, or u
acccanagacaaaagaaa

SEQ ID NO: 130801 - RNA, 19 nt, Artificial Sequence
  Synthetic
  misc_feature (7)..(7): n is a, c, g, or u
uacccanagacaaaagaaa

SEQ ID NO: 130802 - RNA, 20 nt, Artificial Sequence
  Synthetic
  misc_feature (8)..(8): n is a, c, g, or u
auacccanagacaaaagaaa

SEQ ID NO: 130803 - RNA, 21 nt, Artificial Sequence
  Synthetic
  misc_feature (9)..(9): n is a, c, g, or u
uauacccanagacaaaagaaa

SEQ ID NO: 130804 - RNA, 23 nt, Artificial Sequence
  Synthetic
  misc_feature (11)..(11): n is a, c, g, or u
uguauacccanagacaaaagaaa

SEQ ID NO: 130805 - RNA, 24 nt, Artificial Sequence
  Synthetic
  misc_feature (12)..(12): n is a, c, g, or u
auguauacccanagacaaaagaaa

SEQ ID NO: 130806 - RNA, 19 nt, Artificial Sequence
  Synthetic
  misc_feature (9)..(9): n is a, c, g, or u
uguuugaunuuuuguacaa

SEQ ID NO: 130807 - RNA, 21 nt, Artificial Sequence
  Synthetic
  misc_feature (11)..(11): n is a, c, g, or u
aguguuugaunuuuuguacaa

SEQ ID NO: 130808 - RNA, 22 nt, Artificial Sequence
  Synthetic
  misc_feature (12)..(12): n is a, c, g, or u
caguguuugaunuuuuguacaa

SEQ ID NO: 130809 - RNA, 23 nt, Artificial Sequence
  Synthetic
  misc_feature (13)..(13): n is a, c, g, or u
acaguguuugaunuuuuguacaa

SEQ ID NO: 130810 - RNA, 24 nt, Artificial Sequence
  Synthetic
  misc_feature (14)..(14): n is a, c, g, or u
aacaguguuugaunuuuuguacaa

SEQ ID NO: 130811 - RNA, 18 nt, Artificial Sequence
  Synthetic
  misc_feature (14)..(14): n is a, c, g, or u
caggccguugccgngcaa

SEQ ID NO: 130812 - RNA, 19 nt, Artificial Sequence
  Synthetic
  misc_feature (15)..(15): n is a, c, g, or u
ccaggccguugccgngcaa

SEQ ID NO: 130813 - RNA, 20 nt, Artificial Sequence
  Synthetic
  misc_feature (16)..(16): n is a, c, g, or u
accaggccguugccgngcaa

SEQ ID NO: 130814 - RNA, 18 nt, Artificial Sequence
  Synthetic
agcucuuguucccaagaa

SEQ ID NO: 130815 - RNA, 19 nt, Artificial Sequence
  Synthetic
uagcucuuguucccaagaa

SEQ ID NO: 130816 - RNA, 21 nt, Artificial Sequence
  Synthetic
uguagcucuuguucccaagaa

SEQ ID NO: 130817 - RNA, 22 nt, Artificial Sequence
  Synthetic
  misc_feature (1)..(1): n is a, c, g, or u
nuguagcucuuguucccaagaa

SEQ ID NO: 130818 - RNA, 24 nt, Artificial Sequence
  Synthetic
  misc_feature (3)..(3): n is a, c, g, or u
ugnuguagcucuuguucccaagaa

SEQ ID NO: 130819 - RNA, 19 nt, Artificial Sequence
  Synthetic
  misc_feature (6)..(6): n is a, c, g, or u
  misc_feature (8)..(8): n is a, c, g, or u
agaucncngacggaaggaa

SEQ ID NO: 130820 - RNA, 20 nt, Artificial Sequence
  Synthetic
  misc_feature (1)..(1): n is a, c, g, or u
  misc_feature (7)..(7): n is a, c, g, or u
  misc_feature (9)..(9): n is a, c, g, or u
nagaucncngacggaaggaa

SEQ ID NO: 130821 - RNA, 22 nt, Artificial Sequence
  Synthetic
  misc_feature (3)..(3): n is a, c, g, or u
  misc_feature (9)..(9): n is a, c, g, or u
  misc_feature (11)..(11): n is a, c, g, or u
agnagaucncngacggaaggaa

SEQ ID NO: 130822 - RNA, 23 nt, Artificial Sequence
  Synthetic
  misc_feature (1)..(1): n is a, c, g, or u
  misc_feature (4)..(4): n is a, c, g, or u
  misc_feature (10)..(10): n is a, c, g, or u
  misc_feature (12)..(12): n is a, c, g, or u
nagnagaucncngacggaaggaa

SEQ ID NO: 130823 - RNA, 24 nt, Artificial Sequence
  Synthetic
  misc_feature (2)..(2): n is a, c, g, or u
  misc_feature (5)..(5): n is a, c, g, or u
  misc_feature (11)..(11): n is a, c, g, or u
  misc_feature (13)..(13): n is a, c, g, or u
cnagnagaucncngacggaaggaa

SEQ ID NO: 130824 - RNA, 18 nt, Artificial Sequence
  Synthetic
cagcaggaugaagaggaa

SEQ ID NO: 130825 - RNA, 20 nt, Artificial Sequence
  Synthetic
agcagcaggaugaagaggaa

SEQ ID NO: 130826 - RNA, 21 nt, Artificial Sequence
  Synthetic
uagcagcaggaugaagaggaa

SEQ ID NO: 130827 - RNA, 22 nt, Artificial Sequence
  Synthetic
auagcagcaggaugaagaggaa

SEQ ID NO: 130828 - RNA, 23 nt, Artificial Sequence
  Synthetic
cauagcagcaggaugaagaggaa

SEQ ID NO: 130829 - RNA, 18 nt, Artificial Sequence
  Synthetic
auccagaagaaccaauaa

SEQ ID NO: 130830 - RNA, 19 nt, Artificial Sequence
  Synthetic
aauccagaagaaccaauaa

SEQ ID NO: 130831 - RNA, 20 nt, Artificial Sequence
  Synthetic
uaauccagaagaaccaauaa

SEQ ID NO: 130832 - RNA, 21 nt, Artificial Sequence
  Synthetic
auaauccagaagaaccaauaa

SEQ ID NO: 130833 - RNA, 23 nt, Artificial Sequence
  Synthetic
ugauaauccagaagaaccaauaa

SEQ ID NO: 130834 - RNA, 24 nt, Artificial Sequence
  Synthetic
uugauaauccagaagaaccaauaa

SEQ ID NO: 130835 - RNA, 18 nt, Artificial Sequence
  Synthetic
  misc_feature (6)..(6): n is a, c, g, or u
  misc_feature (12)..(12): n is a, c, g, or u
acuacnugaucnggauaa

SEQ ID NO: 130836 - RNA, 19 nt, Artificial Sequence
  Synthetic
  misc_feature (7)..(7): n is a, c, g, or u
  misc_feature (13)..(13): n is a, c, g, or u
aacuacnugaucnggauaa

SEQ ID NO: 130837 - RNA, 20 nt, Artificial Sequence
  Synthetic
  misc_feature (8)..(8): n is a, c, g, or u
  misc_feature (14)..(14): n is a, c, g, or u
uaacuacnugaucnggauaa

SEQ ID NO: 130838 - RNA, 21 nt, Artificial Sequence
  Synthetic
  misc_feature (9)..(9): n is a, c, g, or u
  misc_feature (15)..(15): n is a, c, g, or u
uuaacuacnugaucnggauaa

SEQ ID NO: 130839 - RNA, 22 nt, Artificial Sequence
  Synthetic
  misc_feature (10)..(10): n is a, c, g, or u
  misc_feature (16)..(16): n is a, c, g, or u
auuaacuacnugaucnggauaa

SEQ ID NO: 130840 - RNA, 24 nt, Artificial Sequence
  Synthetic
  misc_feature (12)..(12): n is a, c, g, or u
  misc_feature (18)..(18): n is a, c, g, or u
ugauuaacuacnugaucnggauaa

SEQ ID NO: 130841 - RNA, 18 nt, Artificial Sequence
  Synthetic
  misc_feature (2)..(2): n is a, c, g, or u
unacaggaaguuuucuaa

SEQ ID NO: 130842 - RNA, 19 nt, Artificial Sequence
  Synthetic
  misc_feature (3)..(3): n is a, c, g, or u
uunacaggaaguuuucuaa

SEQ ID NO: 130843 - RNA, 20 nt, Artificial Sequence
  Synthetic
  misc_feature (1)..(1): n is a, c, g, or u
  misc_feature (4)..(4): n is a, c, g, or u
nuunacaggaaguuuucuaa

SEQ ID NO: 130844 - RNA, 21 nt, Artificial Sequence
  Synthetic
  misc_feature (1)..(2): n is a, c, g, or u
  misc_feature (5)..(5): n is a, c, g, or u
nnuunacaggaaguuuucuaa

SEQ ID NO: 130845 - RNA, 22 nt, Artificial Sequence
  Synthetic
  misc_feature (2)..(3): n is a, c, g, or u
  misc_feature (6)..(6): n is a, c, g, or u
cnnuunacaggaaguuuucuaa

SEQ ID NO: 130846 - RNA, 23 nt, Artificial Sequence
  Synthetic
  misc_feature (1)..(1): n is a, c, g, or u
  misc_feature (3)..(4): n is a, c, g, or u
  misc_feature (7)..(7): n is a, c, g, or u
ncnnuunacaggaaguuuucuaa

SEQ ID NO: 130847 - RNA, 18 nt, Artificial Sequence
  Synthetic
  misc_feature (10)..(10): n is a, c, g, or u
  misc_feature (13)..(13): n is a, c, g, or u
aauaaugucnucnuguaa

SEQ ID NO: 130848 - RNA, 19 nt, Artificial Sequence
  Synthetic
  misc_feature (11)..(11): n is a, c, g, or u
  misc_feature (14)..(14): n is a, c, g, or u
uaauaaugucnucnuguaa

SEQ ID NO: 130849 - RNA, 20 nt, Artificial Sequence
  Synthetic
  misc_feature (12)..(12): n is a, c, g, or u
  misc_feature (15)..(15): n is a, c, g, or u
uuaauaaugucnucnuguaa

SEQ ID NO: 130850 - RNA, 21 nt, Artificial Sequence
  Synthetic
  misc_feature (13)..(13): n is a, c, g, or u
  misc_feature (16)..(16): n is a, c, g, or u
auuaauaaugucnucnuguaa

SEQ ID NO: 130851 - RNA, 22 nt, Artificial Sequence
  Synthetic
  misc_feature (14)..(14): n is a, c, g, or u
  misc_feature (17)..(17): n is a, c, g, or u
uauuaauaaugucnucnuguaa

SEQ ID NO: 130852 - RNA, 23 nt, Artificial Sequence
  Synthetic
  misc_feature (15)..(15): n is a, c, g, or u
  misc_feature (18)..(18): n is a, c, g, or u
cuauuaauaaugucnucnuguaa

SEQ ID NO: 130853 - RNA, 24 nt, Artificial Sequence
  Synthetic
  misc_feature (16)..(16): n is a, c, g, or u
  misc_feature (19)..(19): n is a, c, g, or u
ccuauuaauaaugucnucnuguaa

SEQ ID NO: 130854 - RNA, 18 nt, Artificial Sequence
  Synthetic
  misc_feature (1)..(2): n is a, c, g, or u
nncccauguuaguauuaa

SEQ ID NO: 130855 - RNA, 19 nt, Artificial Sequence
  Synthetic
  misc_feature (2)..(3): n is a, c, g, or u
anncccauguuaguauuaa

SEQ ID NO: 130856 - RNA, 20 nt, Artificial Sequence
  Synthetic
  misc_feature (3)..(4): n is a, c, g, or u
uanncccauguuaguauuaa

SEQ ID NO: 130857 - RNA, 21 nt, Artificial Sequence
  Synthetic
  misc_feature (4)..(5): n is a, c, g, or u
uuanncccauguuaguauuaa

SEQ ID NO: 130858 - RNA, 22 nt, Artificial Sequence
  Synthetic
  misc_feature (5)..(6): n is a, c, g, or u
uuuanncccauguuaguauuaa

SEQ ID NO: 130859 - RNA, 23 nt, Artificial Sequence
  Synthetic
  misc_feature (1)..(1): n is a, c, g, or u
  misc_feature (6)..(7): n is a, c, g, or u
nuuuanncccauguuaguauuaa

SEQ ID NO: 130860 - RNA, 24 nt, Artificial Sequence
  Synthetic
  misc_feature (2)..(2): n is a, c, g, or u
  misc_feature (7)..(8): n is a, c, g, or u
unuuuanncccauguuaguauuaa

SEQ ID NO: 130861 - RNA, 18 nt, Artificial Sequence
  Synthetic
  misc_feature (12)..(12): n is a, c, g, or u
  misc_feature (14)..(14): n is a, c, g, or u
uaauacaaagancnuuaa

SEQ ID NO: 130862 - RNA, 19 nt, Artificial Sequence
  Synthetic
  misc_feature (13)..(13): n is a, c, g, or u
  misc_feature (15)..(15): n is a, c, g, or u
cuaauacaaagancnuuaa

SEQ ID NO: 130863 - RNA, 20 nt, Artificial Sequence
  Synthetic
  misc_feature (14)..(14): n is a, c, g, or u
  misc_feature (16)..(16): n is a, c, g, or u
ccuaauacaaagancnuuaa

SEQ ID NO: 130864 - RNA, 21 nt, Artificial Sequence
  Synthetic
  misc_feature (15)..(15): n is a, c, g, or u
  misc_feature (17)..(17): n is a, c, g, or u
uccuaauacaaagancnuuaa

SEQ ID NO: 130865 - RNA, 22 nt, Artificial Sequence
  Synthetic
  misc_feature (16)..(16): n is a, c, g, or u
  misc_feature (18)..(18): n is a, c, g, or u
cuccuaauacaaagancnuuaa

SEQ ID NO: 130866 - RNA, 23 nt, Artificial Sequence
  Synthetic
  misc_feature (17)..(17): n is a, c, g, or u
  misc_feature (19)..(19): n is a, c, g, or u
ccuccuaauacaaagancnuuaa

SEQ ID NO: 130867 - RNA, 18 nt, Artificial Sequence
  Synthetic
agcaacaugagggaaaca

SEQ ID NO: 130868 - RNA, 19 nt, Artificial Sequence
  Synthetic
cagcaacaugagggaaaca

SEQ ID NO: 130869 - RNA, 20 nt, Artificial Sequence
  Synthetic
acagcaacaugagggaaaca

SEQ ID NO: 130870 - RNA, 21 nt, Artificial Sequence
  Synthetic
uacagcaacaugagggaaaca

SEQ ID NO: 130871 - RNA, 23 nt, Artificial Sequence
  Synthetic
uguacagcaacaugagggaaaca

SEQ ID NO: 130872 - RNA, 24 nt, Artificial Sequence
  Synthetic
uuguacagcaacaugagggaaaca

SEQ ID NO: 130873 - RNA, 18 nt, Artificial Sequence
  Synthetic
  misc_feature (11)..(11): n is a, c, g, or u
ccucccagucnuuaaaca

SEQ ID NO: 130874 - RNA, 19 nt, Artificial Sequence
  Synthetic
  misc_feature (12)..(12): n is a, c, g, or u
uccucccagucnuuaaaca

SEQ ID NO: 130875 - RNA, 20 nt, Artificial Sequence
  Synthetic
  misc_feature (13)..(13): n is a, c, g, or u
cuccucccagucnuuaaaca

SEQ ID NO: 130876 - RNA, 21 nt, Artificial Sequence
  Synthetic
  misc_feature (1)..(1): n is a, c, g, or u
  misc_feature (14)..(14): n is a, c, g, or u
ncuccucccagucnuuaaaca

SEQ ID NO: 130877 - RNA, 22 nt, Artificial Sequence
  Synthetic
  misc_feature (2)..(2): n is a, c, g, or u
  misc_feature (15)..(15): n is a, c, g, or u
ancuccucccagucnuuaaaca

SEQ ID NO: 130878 - RNA, 23 nt, Artificial Sequence
  Synthetic
  misc_feature (3)..(3): n is a, c, g, or u
  misc_feature (16)..(16): n is a, c, g, or u
cancuccucccagucnuuaaaca

SEQ ID NO: 130879 - RNA, 24 nt, Artificial Sequence
  Synthetic
  misc_feature (4)..(4): n is a, c, g, or u
  misc_feature (17)..(17): n is a, c, g, or u
ccancuccucccagucnuuaaaca

SEQ ID NO: 130880 - RNA, 18 nt, Artificial Sequence
  Synthetic
aggacaaauuggaggaca

SEQ ID NO: 130881 - RNA, 19 nt, Artificial Sequence
  Synthetic
caggacaaauuggaggaca

SEQ ID NO: 130882 - RNA, 20 nt, Artificial Sequence
  Synthetic
ccaggacaaauuggaggaca

SEQ ID NO: 130883 - RNA, 21 nt, Artificial Sequence
  Synthetic
accaggacaaauuggaggaca

SEQ ID NO: 130884 - RNA, 22 nt, Artificial Sequence
  Synthetic
aaccaggacaaauuggaggaca

SEQ ID NO: 130885 - RNA, 23 nt, Artificial Sequence
  Synthetic
uaaccaggacaaauuggaggaca

SEQ ID NO: 130886 - RNA, 24 nt, Artificial Sequence
  Synthetic
auaaccaggacaaauuggaggaca

SEQ ID NO: 130887 - RNA, 18 nt, Artificial Sequence
  Synthetic
  misc_feature (3)..(3): n is a, c, g, or u
  misc_feature (15)..(15): n is a, c, g, or u
aanagugggacaugnaca

SEQ ID NO: 130888 - RNA, 20 nt, Artificial Sequence
  Synthetic
  misc_feature (5)..(5): n is a, c, g, or u
  misc_feature (17)..(17): n is a, c, g, or u
ugaanagugggacaugnaca

SEQ ID NO: 130889 - RNA, 21 nt, Artificial Sequence
  Synthetic
  misc_feature (6)..(6): n is a, c, g, or u
  misc_feature (18)..(18): n is a, c, g, or u
uugaanagugggacaugnaca

SEQ ID NO: 130890 - RNA, 22 nt, Artificial Sequence
  Synthetic
  misc_feature (7)..(7): n is a, c, g, or u
  misc_feature (19)..(19): n is a, c, g, or u
cuugaanagugggacaugnaca

SEQ ID NO: 130891 - RNA, 18 nt, Artificial Sequence
  Synthetic
  misc_feature (9)..(9): n is a, c, g, or u
  misc_feature (11)..(12): n is a, c, g, or u
  misc_feature (15)..(15): n is a, c, g, or u
ucaauaggncnnuunaca

SEQ ID NO: 130892 - RNA, 19 nt, Artificial Sequence
  Synthetic
  misc_feature (10)..(10): n is a, c, g, or u
  misc_feature (12)..(13): n is a, c, g, or u
  misc_feature (16)..(16): n is a, c, g, or u
aucaauaggncnnuunaca

SEQ ID NO: 130893 - RNA, 20 nt, Artificial Sequence
  Synthetic
  misc_feature (11)..(11): n is a, c, g, or u
  misc_feature (13)..(14): n is a, c, g, or u
  misc_feature (17)..(17): n is a, c, g, or u
aaucaauaggncnnuunaca

SEQ ID NO: 130894 - RNA, 21 nt, Artificial Sequence
  Synthetic
  misc_feature (12)..(12): n is a, c, g, or u
  misc_feature (14)..(15): n is a, c, g, or u
  misc_feature (18)..(18): n is a, c, g, or u
caaucaauaggncnnuunaca

SEQ ID NO: 130895 - RNA, 22 nt, Artificial Sequence
  Synthetic
  misc_feature (13)..(13): n is a, c, g, or u
  misc_feature (15)..(16): n is a, c, g, or u
  misc_feature (19)..(19): n is a, c, g, or u
ccaaucaauaggncnnuunaca

SEQ ID NO: 130896 - RNA, 23 nt, Artificial Sequence
  Synthetic
  misc_feature (14)..(14): n is a, c, g, or u
  misc_feature (16)..(17): n is a, c, g, or u
  misc_feature (20)..(20): n is a, c, g, or u
uccaaucaauaggncnnuunaca

SEQ ID NO: 130897 - RNA, 24 nt, Artificial Sequence
  Synthetic
  misc_feature (15)..(15): n is a, c, g, or u
  misc_feature (17)..(18): n is a, c, g, or u
  misc_feature (21)..(21): n is a, c, g, or u
uuccaaucaauaggncnnuunaca

SEQ ID NO: 130898 - RNA, 20 nt, Artificial Sequence
  Synthetic
  misc_feature (6)..(6): n is a, c, g, or u
  misc_feature (9)..(9): n is a, c, g, or u
uggccnaungccaagcccca

SEQ ID NO: 130899 - RNA, 21 nt, Artificial Sequence
  Synthetic
  misc_feature (7)..(7): n is a, c, g, or u
  misc_feature (10)..(10): n is a, c, g, or u
auggccnaungccaagcccca

SEQ ID NO: 130900 - RNA, 23 nt, Artificial Sequence
  Synthetic
  misc_feature (9)..(9): n is a, c, g, or u
  misc_feature (12)..(12): n is a, c, g, or u
ugauggccnaungccaagcccca

SEQ ID NO: 130901 - RNA, 24 nt, Artificial Sequence
  Synthetic
  misc_feature (10)..(10): n is a, c, g, or u
  misc_feature (13)..(13): n is a, c, g, or u
cugauggccnaungccaagcccca

SEQ ID NO: 130902 - RNA, 18 nt, Artificial Sequence
  Synthetic
  misc_feature (8)..(8): n is a, c, g, or u
ccauauancugaaagcca

SEQ ID NO: 130903 - RNA, 19 nt, Artificial Sequence
  Synthetic
  misc_feature (9)..(9): n is a, c, g, or u
uccauauancugaaagcca

SEQ ID NO: 130904 - RNA, 20 nt, Artificial Sequence
  Synthetic
  misc_feature (10)..(10): n is a, c, g, or u
auccauauancugaaagcca

SEQ ID NO: 130905 - RNA, 21 nt, Artificial Sequence
  Synthetic
  misc_feature (11)..(11): n is a, c, g, or u
cauccauauancugaaagcca

SEQ ID NO: 130906 - RNA, 22 nt, Artificial Sequence
  Synthetic
  misc_feature (12)..(12): n is a, c, g, or u
ucauccauauancugaaagcca

SEQ ID NO: 130907 - RNA, 23 nt, Artificial Sequence
  Synthetic
  misc_feature (13)..(13): n is a, c, g, or u
aucauccauauancugaaagcca

SEQ ID NO: 130908 - RNA, 24 nt, Artificial Sequence
  Synthetic
  misc_feature (14)..(14): n is a, c, g, or u
caucauccauauancugaaagcca

SEQ ID NO: 130909 - RNA, 18 nt, Artificial Sequence
  Synthetic
ucccaccuuaugagucca

SEQ ID NO: 130910 - RNA, 19 nt, Artificial Sequence
  Synthetic
uucccaccuuaugagucca

SEQ ID NO: 130911 - RNA, 20 nt, Artificial Sequence
  Synthetic
uuucccaccuuaugagucca

SEQ ID NO: 130912 - RNA, 21 nt, Artificial Sequence
  Synthetic
  misc_feature (1)..(1): n is a, c, g, or u
nuuucccaccuuaugagucca

SEQ ID NO: 130913 - RNA, 22 nt, Artificial Sequence
  Synthetic
  misc_feature (2)..(2): n is a, c, g, or u
anuuucccaccuuaugagucca

SEQ ID NO: 130914 - RNA, 23 nt, Artificial Sequence
  Synthetic
  misc_feature (3)..(3): n is a, c, g, or u
aanuuucccaccuuaugagucca

SEQ ID NO: 130915 - RNA, 24 nt, Artificial Sequence
  Synthetic
  misc_feature (1)..(1): n is a, c, g, or u
  misc_feature (4)..(4): n is a, c, g, or u
naanuuucccaccuuaugagucca

SEQ ID NO: 130916 - RNA, 18 nt, Artificial Sequence
  Synthetic
cuccgaaugcagggucca

SEQ ID NO: 130917 - RNA, 18 nt, Artificial Sequence
  Synthetic
  misc_feature (7)..(7): n is a, c, g, or u
uagaaunccagccuucca

SEQ ID NO: 130918 - RNA, 19 nt, Artificial Sequence
  Synthetic
  misc_feature (8)..(8): n is a, c, g, or u
auagaaunccagccuucca

SEQ ID NO: 130919 - RNA, 20 nt, Artificial Sequence
  Synthetic
  misc_feature (9)..(9): n is a, c, g, or u
uauagaaunccagccuucca

SEQ ID NO: 130920 - RNA, 21 nt, Artificial Sequence
  Synthetic
  misc_feature (10)..(10): n is a, c, g, or u
auauagaaunccagccuucca

SEQ ID NO: 130921 - RNA, 22 nt, Artificial Sequence
  Synthetic
  misc_feature (11)..(11): n is a, c, g, or u
uauauagaaunccagccuucca

SEQ ID NO: 130922 - RNA, 23 nt, Artificial Sequence
  Synthetic
  misc_feature (12)..(12): n is a, c, g, or u
uuauauagaaunccagccuucca

SEQ ID NO: 130923 - RNA, 24 nt, Artificial Sequence
  Synthetic
  misc_feature (13)..(13): n is a, c, g, or u
cuuauauagaaunccagccuucca

SEQ ID NO: 130924 - RNA, 18 nt, Artificial Sequence
  Synthetic
  misc_feature (1)..(1): n is a, c, g, or u
ncuuugacauacuuucca

SEQ ID NO: 130925 - RNA, 19 nt, Artificial Sequence
  Synthetic
  misc_feature (2)..(2): n is a, c, g, or u
uncuuugacauacuuucca

SEQ ID NO: 130926 - RNA, 20 nt, Artificial Sequence
  Synthetic
  misc_feature (3)..(3): n is a, c, g, or u
auncuuugacauacuuucca

SEQ ID NO: 130927 - RNA, 21 nt, Artificial Sequence
  Synthetic
  misc_feature (4)..(4): n is a, c, g, or u
aauncuuugacauacuuucca

SEQ ID NO: 130928 - RNA, 22 nt, Artificial Sequence
  Synthetic
  misc_feature (5)..(5): n is a, c, g, or u
caauncuuugacauacuuucca

SEQ ID NO: 130929 - RNA, 23 nt, Artificial Sequence
  Synthetic
  misc_feature (6)..(6): n is a, c, g, or u
acaauncuuugacauacuuucca

SEQ ID NO: 130930 - RNA, 24 nt, Artificial Sequence
  Synthetic
  misc_feature (7)..(7): n is a, c, g, or u
cacaauncuuugacauacuuucca

SEQ ID NO: 130931 - RNA, 18 nt, Artificial Sequence
  Synthetic
  misc_feature (4)..(4): n is a, c, g, or u
caunaauuccccccagca

SEQ ID NO: 130932 - RNA, 19 nt, Artificial Sequence
  Synthetic
  misc_feature (5)..(5): n is a, c, g, or u
ucaunaauuccccccagca

SEQ ID NO: 130933 - RNA, 21 nt, Artificial Sequence
  Synthetic
  misc_feature (7)..(7): n is a, c, g, or u
agucaunaauuccccccagca

SEQ ID NO: 130934 - RNA, 23 nt, Artificial Sequence
  Synthetic
  misc_feature (9)..(9): n is a, c, g, or u
agagucaunaauuccccccagca

SEQ ID NO: 130935 - RNA, 24 nt, Artificial Sequence
  Synthetic
  misc_feature (10)..(10): n is a, c, g, or u
uagagucaunaauuccccccagca

SEQ ID NO: 130936 - RNA, 19 nt, Artificial Sequence
  Synthetic
uguugauaagauaggggca

SEQ ID NO: 130937 - RNA, 21 nt, Artificial Sequence
  Synthetic
aguguugauaagauaggggca

SEQ ID NO: 130938 - RNA, 22 nt, Artificial Sequence
  Synthetic
aaguguugauaagauaggggca

SEQ ID NO: 130939 - RNA, 18 nt, Artificial Sequence
  Synthetic
  misc_feature (12)..(12): n is a, c, g, or u
agugggacaugnacaaga

SEQ ID NO: 130940 - RNA, 19 nt, Artificial Sequence
  Synthetic
  misc_feature (1)..(1): n is a, c, g, or u
  misc_feature (13)..(13): n is a, c, g, or u
nagugggacaugnacaaga

SEQ ID NO: 130941 - RNA, 20 nt, Artificial Sequence
  Synthetic
  misc_feature (2)..(2): n is a, c, g, or u
  misc_feature (14)..(14): n is a, c, g, or u
anagugggacaugnacaaga

SEQ ID NO: 130942 - RNA, 21 nt, Artificial Sequence
  Synthetic
  misc_feature (3)..(3): n is a, c, g, or u
  misc_feature (15)..(15): n is a, c, g, or u
aanagugggacaugnacaaga

SEQ ID NO: 130943 - RNA, 23 nt, Artificial Sequence
  Synthetic
  misc_feature (5)..(5): n is a, c, g, or u
  misc_feature (17)..(17): n is a, c, g, or u
ugaanagugggacaugnacaaga

SEQ ID NO: 130944 - RNA, 24 nt, Artificial Sequence
  Synthetic
  misc_feature (6)..(6): n is a, c, g, or u
  misc_feature (18)..(18): n is a, c, g, or u
uugaanagugggacaugnacaaga

SEQ ID NO: 130945 - RNA, 18 nt, Artificial Sequence
  Synthetic
ccuugauaauccagaaga

SEQ ID NO: 130946 - RNA, 19 nt, Artificial Sequence
  Synthetic
accuugauaauccagaaga

SEQ ID NO: 130947 - RNA, 20 nt, Artificial Sequence
  Synthetic
uaccuugauaauccagaaga

SEQ ID NO: 130948 - RNA, 18 nt, Artificial Sequence
  Synthetic
uccacacuccgaaagaga

SEQ ID NO: 130949 - RNA, 19 nt, Artificial Sequence
  Synthetic
auccacacuccgaaagaga

SEQ ID NO: 130950 - RNA, 20 nt, Artificial Sequence
  Synthetic
aauccacacuccgaaagaga

SEQ ID NO: 130951 - RNA, 19 nt, Artificial Sequence
  Synthetic
agauugacgagaugugaga

SEQ ID NO: 130952 - RNA, 18 nt, Artificial Sequence
  Synthetic
  misc_feature (8)..(8): n is a, c, g, or u
  misc_feature (11)..(11): n is a, c, g, or u
auuuccgnganaggacga

SEQ ID NO: 130953 - RNA, 19 nt, Artificial Sequence
  Synthetic
  misc_feature (9)..(9): n is a, c, g, or u
  misc_feature (12)..(12): n is a, c, g, or u
uauuuccgnganaggacga

SEQ ID NO: 130954 - RNA, 20 nt, Artificial Sequence
  Synthetic
  misc_feature (10)..(10): n is a, c, g, or u
  misc_feature (13)..(13): n is a, c, g, or u
auauuuccgnganaggacga

SEQ ID NO: 130955 - RNA, 21 nt, Artificial Sequence
  Synthetic
  misc_feature (11)..(11): n is a, c, g, or u
  misc_feature (14)..(14): n is a, c, g, or u
uauauuuccgnganaggacga

SEQ ID NO: 130956 - RNA, 23 nt, Artificial Sequence
  Synthetic
  misc_feature (13)..(13): n is a, c, g, or u
  misc_feature (16)..(16): n is a, c, g, or u
uguauauuuccgnganaggacga

SEQ ID NO: 130957 - RNA, 24 nt, Artificial Sequence
  Synthetic
  misc_feature (14)..(14): n is a, c, g, or u
  misc_feature (17)..(17): n is a, c, g, or u
auguauauuuccgnganaggacga

SEQ ID NO: 130958 - RNA, 18 nt, Artificial Sequence
  Synthetic
agacggagaaggggacga

SEQ ID NO: 130959 - RNA, 19 nt, Artificial Sequence
  Synthetic
cagacggagaaggggacga

SEQ ID NO: 130960 - RNA, 22 nt, Artificial Sequence
  Synthetic
cggcagacggagaaggggacga

SEQ ID NO: 130961 - RNA, 23 nt, Artificial Sequence
  Synthetic
acggcagacggagaaggggacga

SEQ ID NO: 130962 - RNA, 24 nt, Artificial Sequence
  Synthetic
  misc_feature (1)..(1): n is a, c, g, or u
nacggcagacggagaaggggacga

SEQ ID NO: 130963 - RNA, 18 nt, Artificial Sequence
  Synthetic
  misc_feature (4)..(4): n is a, c, g, or u
ucuncgucugcgaggcga

SEQ ID NO: 130964 - RNA, 19 nt, Artificial Sequence
  Synthetic
  misc_feature (5)..(5): n is a, c, g, or u
aucuncgucugcgaggcga

SEQ ID NO: 130965 - RNA, 19 nt, Artificial Sequence
  Synthetic
uguaagaccuugggcagga

SEQ ID NO: 130966 - RNA, 20 nt, Artificial Sequence
  Synthetic
auguaagaccuugggcagga

SEQ ID NO: 130967 - RNA, 21 nt, Artificial Sequence
  Synthetic
uauguaagaccuugggcagga

SEQ ID NO: 130968 - RNA, 22 nt, Artificial Sequence
  Synthetic
uuauguaagaccuugggcagga

SEQ ID NO: 130969 - RNA, 23 nt, Artificial Sequence
  Synthetic
cuuauguaagaccuugggcagga

SEQ ID NO: 130970 - RNA, 24 nt, Artificial Sequence
  Synthetic
ucuuauguaagaccuugggcagga

SEQ ID NO: 130971 - RNA, 18 nt, Artificial Sequence
  Synthetic
  misc_feature (10)..(11): n is a, c, g, or u
  misc_feature (13)..(13): n is a, c, g, or u
uauuuagugnngnuagga

SEQ ID NO: 130972 - RNA, 19 nt, Artificial Sequence
  Synthetic
  misc_feature (11)..(12): n is a, c, g, or u
  misc_feature (14)..(14): n is a, c, g, or u
auauuuagugnngnuagga

SEQ ID NO: 130973 - RNA, 20 nt, Artificial Sequence
  Synthetic
  misc_feature (12)..(13): n is a, c, g, or u
  misc_feature (15)..(15): n is a, c, g, or u
aauauuuagugnngnuagga

SEQ ID NO: 130974 - RNA, 21 nt, Artificial Sequence
  Synthetic
  misc_feature (13)..(14): n is a, c, g, or u
  misc_feature (16)..(16): n is a, c, g, or u
aaauauuuagugnngnuagga

SEQ ID NO: 130975 - RNA, 22 nt, Artificial Sequence
  Synthetic
  misc_feature (1)..(1): n is a, c, g, or u
  misc_feature (14)..(15): n is a, c, g, or u
  misc_feature (17)..(17): n is a, c, g, or u
naaauauuuagugnngnuagga

SEQ ID NO: 130976 - RNA, 22 nt, Artificial Sequence
  Synthetic
aggguccaacugaugaucggga

SEQ ID NO: 130977 - RNA, 23 nt, Artificial Sequence
  Synthetic
caggguccaacugaugaucggga

SEQ ID NO: 130978 - RNA, 18 nt, Artificial Sequence
  Synthetic
  misc_feature (3)..(3): n is a, c, g, or u
canccuagcagccaugga

SEQ ID NO: 130979 - RNA, 19 nt, Artificial Sequence
  Synthetic
  misc_feature (4)..(4): n is a, c, g, or u
acanccuagcagccaugga

SEQ ID NO: 130980 - RNA, 20 nt, Artificial Sequence
  Synthetic
  misc_feature (5)..(5): n is a, c, g, or u
uacanccuagcagccaugga

SEQ ID NO: 130981 - RNA, 18 nt, Artificial Sequence
  Synthetic
  misc_feature (7)..(7): n is a, c, g, or u
  misc_feature (16)..(16): n is a, c, g, or u
augaaunuuaggaaanga

SEQ ID NO: 130982 - RNA, 19 nt, Artificial Sequence
  Synthetic
  misc_feature (8)..(8): n is a, c, g, or u
  misc_feature (17)..(17): n is a, c, g, or u
aaugaaunuuaggaaanga

SEQ ID NO: 130983 - RNA, 20 nt, Artificial Sequence
  Synthetic
  misc_feature (9)..(9): n is a, c, g, or u
  misc_feature (18)..(18): n is a, c, g, or u
aaaugaaunuuaggaaanga

SEQ ID NO: 130984 - RNA, 21 nt, Artificial Sequence
  Synthetic
  misc_feature (10)..(10): n is a, c, g, or u
  misc_feature (19)..(19): n is a, c, g, or u
uaaaugaaunuuaggaaanga

SEQ ID NO: 130985 - RNA, 23 nt, Artificial Sequence
  Synthetic
  misc_feature (12)..(12): n is a, c, g, or u
  misc_feature (21)..(21): n is a, c, g, or u
uguaaaugaaunuuaggaaanga

SEQ ID NO: 130986 - RNA, 24 nt, Artificial Sequence
  Synthetic
  misc_feature (1)..(1): n is a, c, g, or u
  misc_feature (13)..(13): n is a, c, g, or u
  misc_feature (22)..(22): n is a, c, g, or u
nuguaaaugaaunuuaggaaanga

SEQ ID NO: 130987 - RNA, 18 nt, Artificial Sequence
  Synthetic
  misc_feature (13)..(13): n is a, c, g, or u
  misc_feature (16)..(16): n is a, c, g, or u
ugcgaaagcccanganga

SEQ ID NO: 130988 - RNA, 19 nt, Artificial Sequence
  Synthetic
  misc_feature (14)..(14): n is a, c, g, or u
  misc_feature (17)..(17): n is a, c, g, or u
uugcgaaagcccanganga

SEQ ID NO: 130989 - RNA, 20 nt, Artificial Sequence
  Synthetic
  misc_feature (15)..(15): n is a, c, g, or u
  misc_feature (18)..(18): n is a, c, g, or u
uuugcgaaagcccanganga

SEQ ID NO: 130990 - RNA, 21 nt, Artificial Sequence
  Synthetic
  misc_feature (16)..(16): n is a, c, g, or u
  misc_feature (19)..(19): n is a, c, g, or u
uuuugcgaaagcccanganga

SEQ ID NO: 130991 - RNA, 22 nt, Artificial Sequence
  Synthetic
  misc_feature (17)..(17): n is a, c, g, or u
  misc_feature (20)..(20): n is a, c, g, or u
auuuugcgaaagcccanganga

SEQ ID NO: 130992 - RNA, 23 nt, Artificial Sequence
  Synthetic
  misc_feature (18)..(18): n is a, c, g, or u
  misc_feature (21)..(21): n is a, c, g, or u
uauuuugcgaaagcccanganga

SEQ ID NO: 130993 - RNA, 18 nt, Artificial Sequence
  Synthetic
agcccuacgaaccacuga

SEQ ID NO: 130994 - RNA, 19 nt, Artificial Sequence
  Synthetic
aagcccuacgaaccacuga

SEQ ID NO: 130995 - RNA, 20 nt, Artificial Sequence
  Synthetic
aaagcccuacgaaccacuga

SEQ ID NO: 130996 - RNA, 20 nt, Artificial Sequence
  Synthetic
agggguccuaggaauccuga

SEQ ID NO: 130997 - RNA, 21 nt, Artificial Sequence
  Synthetic
cagggguccuaggaauccuga

SEQ ID NO: 130998 - RNA, 23 nt, Artificial Sequence
  Synthetic
agcagggguccuaggaauccuga

SEQ ID NO: 130999 - RNA, 18 nt, Artificial Sequence
  Synthetic
augauuaggcagagguga

SEQ ID NO: 131000 - RNA, 20 nt, Artificial Sequence
  Synthetic
agaugauuaggcagagguga

SEQ ID NO: 131001 - RNA, 22 nt, Artificial Sequence
  Synthetic
agagaugauuaggcagagguga

SEQ ID NO: 131002 - RNA, 23 nt, Artificial Sequence
  Synthetic
aagagaugauuaggcagagguga

SEQ ID NO: 131003 - RNA, 24 nt, Artificial Sequence
  Synthetic
caagagaugauuaggcagagguga

SEQ ID NO: 131004 - RNA, 18 nt, Artificial Sequence
  Synthetic
  misc_feature (9)..(9): n is a, c, g, or u
aguccucgnggagauuga

SEQ ID NO: 131005 - RNA, 19 nt, Artificial Sequence
  Synthetic
  misc_feature (10)..(10): n is a, c, g, or u
caguccucgnggagauuga

SEQ ID NO: 131006 - RNA, 20 nt, Artificial Sequence
  Synthetic
  misc_feature (11)..(11): n is a, c, g, or u
ccaguccucgnggagauuga

SEQ ID NO: 131007 - RNA, 18 nt, Artificial Sequence
  Synthetic
  misc_feature (1)..(1): n is a, c, g, or u
nuggccagugguccuuga

SEQ ID NO: 131008 - RNA, 19 nt, Artificial Sequence
  Synthetic
  misc_feature (1)..(2): n is a, c, g, or u
nnuggccagugguccuuga

SEQ ID NO: 131009 - RNA, 20 nt, Artificial Sequence
  Synthetic
  misc_feature (2)..(3): n is a, c, g, or u
unnuggccagugguccuuga

SEQ ID NO: 131010 - RNA, 21 nt, Artificial Sequence
  Synthetic
  misc_feature (3)..(4): n is a, c, g, or u
cunnuggccagugguccuuga

SEQ ID NO: 131011 - RNA, 24 nt, Artificial Sequence
  Synthetic
  misc_feature (6)..(7): n is a, c, g, or u
uggcunnuggccagugguccuuga

SEQ ID NO: 131012 - RNA, 18 nt, Artificial Sequence
  Synthetic
aguuuccggaaguguuga

SEQ ID NO: 131013 - RNA, 19 nt, Artificial Sequence
  Synthetic
uaguuuccggaaguguuga

SEQ ID NO: 131014 - RNA, 19 nt, Artificial Sequence
  Synthetic
  misc_feature (12)..(12): n is a, c, g, or u
  misc_feature (15)..(15): n is a, c, g, or u
  misc_feature (18)..(18): n is a, c, g, or u
agagcugaggcngunucna

SEQ ID NO: 131015 - RNA, 20 nt, Artificial Sequence
  Synthetic
  misc_feature (13)..(13): n is a, c, g, or u
  misc_feature (16)..(16): n is a, c, g, or u
  misc_feature (19)..(19): n is a, c, g, or u
cagagcugaggcngunucna

SEQ ID NO: 131016 - RNA, 21 nt, Artificial Sequence
  Synthetic
  misc_feature (14)..(14): n is a, c, g, or u
  misc_feature (17)..(17): n is a, c, g, or u
  misc_feature (20)..(20): n is a, c, g, or u
acagagcugaggcngunucna

SEQ ID NO: 131017 - RNA, 22 nt, Artificial Sequence
  Synthetic
  misc_feature (15)..(15): n is a, c, g, or u
  misc_feature (18)..(18): n is a, c, g, or u
  misc_feature (21)..(21): n is a, c, g, or u
uacagagcugaggcngunucna

SEQ ID NO: 131018 - RNA, 23 nt, Artificial Sequence
  Synthetic
  misc_feature (16)..(16): n is a, c, g, or u
  misc_feature (19)..(19): n is a, c, g, or u
  misc_feature (22)..(22): n is a, c, g, or u
auacagagcugaggcngunucna

SEQ ID NO: 131019 - RNA, 18 nt, Artificial Sequence
  Synthetic
  misc_feature (10)..(10): n is a, c, g, or u
  misc_feature (14)..(14): n is a, c, g, or u
  misc_feature (17)..(17): n is a, c, g, or u
aauaaugucnggunugna

SEQ ID NO: 131020 - RNA, 19 nt, Artificial Sequence
  Synthetic
  misc_feature (11)..(11): n is a, c, g, or u
  misc_feature (15)..(15): n is a, c, g, or u
  misc_feature (18)..(18): n is a, c, g, or u
aaauaaugucnggunugna

SEQ ID NO: 131021 - RNA, 20 nt, Artificial Sequence
  Synthetic
  misc_feature (12)..(12): n is a, c, g, or u
  misc_feature (16)..(16): n is a, c, g, or u
  misc_feature (19)..(19): n is a, c, g, or u
uaaauaaugucnggunugna

SEQ ID NO: 131022 - RNA, 22 nt, Artificial Sequence
  Synthetic
  misc_feature (14)..(14): n is a, c, g, or u
  misc_feature (18)..(18): n is a, c, g, or u
  misc_feature (21)..(21): n is a, c, g, or u
uguaaauaaugucnggunugna

SEQ ID NO: 131023 - RNA, 23 nt, Artificial Sequence
  Synthetic
  misc_feature (15)..(15): n is a, c, g, or u
  misc_feature (19)..(19): n is a, c, g, or u
  misc_feature (22)..(22): n is a, c, g, or u
auguaaauaaugucnggunugna

SEQ ID NO: 131024 - RNA, 24 nt, Artificial Sequence
  Synthetic
  misc_feature (16)..(16): n is a, c, g, or u
  misc_feature (20)..(20): n is a, c, g, or u
  misc_feature (23)..(23): n is a, c, g, or u
uauguaaauaaugucnggunugna

SEQ ID NO: 131025 - RNA, 18 nt, Artificial Sequence
  Synthetic
  misc_feature (9)..(10): n is a, c, g, or u
  misc_feature (13)..(13): n is a, c, g, or u
uuugucuannggnaaaua

SEQ ID NO: 131026 - RNA, 19 nt, Artificial Sequence
  Synthetic
  misc_feature (10)..(11): n is a, c, g, or u
  misc_feature (14)..(14): n is a, c, g, or u
cuuugucuannggnaaaua

SEQ ID NO: 131027 - RNA, 20 nt, Artificial Sequence
  Synthetic
  misc_feature (11)..(12): n is a, c, g, or u
  misc_feature (15)..(15): n is a, c, g, or u
ccuuugucuannggnaaaua

SEQ ID NO: 131028 - RNA, 21 nt, Artificial Sequence
  Synthetic
  misc_feature (1)..(1): n is a, c, g, or u
  misc_feature (12)..(13): n is a, c, g, or u
  misc_feature (16)..(16): n is a, c, g, or u
nccuuugucuannggnaaaua

SEQ ID NO: 131029 - RNA, 22 nt, Artificial Sequence
  Synthetic
  misc_feature (2)..(2): n is a, c, g, or u
  misc_feature (13)..(14): n is a, c, g, or u
  misc_feature (17)..(17): n is a, c, g, or u
unccuuugucuannggnaaaua

SEQ ID NO: 131030 - RNA, 23 nt, Artificial Sequence
  Synthetic
  misc_feature (3)..(3): n is a, c, g, or u
  misc_feature (14)..(15): n is a, c, g, or u
  misc_feature (18)..(18): n is a, c, g, or u
aunccuuugucuannggnaaaua

SEQ ID NO: 131031 - RNA, 24 nt, Artificial Sequence
  Synthetic
  misc_feature (4)..(4): n is a, c, g, or u
  misc_feature (15)..(16): n is a, c, g, or u
  misc_feature (19)..(19): n is a, c, g, or u
aaunccuuugucuannggnaaaua

SEQ ID NO: 131032 - RNA, 18 nt, Artificial Sequence
  Synthetic
  misc_feature (3)..(3): n is a, c, g, or u
uanaaucuagcaggcaua

SEQ ID NO: 131033 - RNA, 19 nt, Artificial Sequence
  Synthetic
  misc_feature (4)..(4): n is a, c, g, or u
auanaaucuagcaggcaua

SEQ ID NO: 131034 - RNA, 22 nt, Artificial Sequence
  Synthetic
  misc_feature (7)..(7): n is a, c, g, or u
aggauanaaucuagcaggcaua

SEQ ID NO: 131035 - RNA, 23 nt, Artificial Sequence
  Synthetic
  misc_feature (8)..(8): n is a, c, g, or u
uaggauanaaucuagcaggcaua

SEQ ID NO: 131036 - RNA, 24 nt, Artificial Sequence
  Synthetic
  misc_feature (1)..(1): n is a, c, g, or u
  misc_feature (9)..(9): n is a, c, g, or u
nuaggauanaaucuagcaggcaua

SEQ ID NO: 131037 - RNA, 18 nt, Artificial Sequence
  Synthetic
  misc_feature (4)..(4): n is a, c, g, or u
ugunguuucccucuuaua

SEQ ID NO: 131038 - RNA, 20 nt, Artificial Sequence
  Synthetic
  misc_feature (6)..(6): n is a, c, g, or u
cgugunguuucccucuuaua

SEQ ID NO: 131039 - RNA, 21 nt, Artificial Sequence
  Synthetic
  misc_feature (7)..(7): n is a, c, g, or u
acgugunguuucccucuuaua

SEQ ID NO: 131040 - RNA, 22 nt, Artificial Sequence
  Synthetic
  misc_feature (8)..(8): n is a, c, g, or u
uacgugunguuucccucuuaua

SEQ ID NO: 131041 - RNA, 23 nt, Artificial Sequence
  Synthetic
  misc_feature (9)..(9): n is a, c, g, or u
cuacgugunguuucccucuuaua

SEQ ID NO: 131042 - RNA, 19 nt, Artificial Sequence
  Synthetic
  misc_feature (3)..(3): n is a, c, g, or u
ugnaaguaaugauuaacua

SEQ ID NO: 131043 - RNA, 20 nt, Artificial Sequence
  Synthetic
  misc_feature (1)..(1): n is a, c, g, or u
  misc_feature (4)..(4): n is a, c, g, or u
nugnaaguaaugauuaacua

SEQ ID NO: 131044 - RNA, 21 nt, Artificial Sequence
  Synthetic
  misc_feature (2)..(2): n is a, c, g, or u
  misc_feature (5)..(5): n is a, c, g, or u
unugnaaguaaugauuaacua

SEQ ID NO: 131045 - RNA, 24 nt, Artificial Sequence
  Synthetic
  misc_feature (1)..(1): n is a, c, g, or u
  misc_feature (5)..(5): n is a, c, g, or u
  misc_feature (8)..(8): n is a, c, g, or u
nggunugnaaguaaugauuaacua

SEQ ID NO: 131046 - RNA, 18 nt, Artificial Sequence
  Synthetic
uauuaacauaauugacua

SEQ ID NO: 131047 - RNA, 20 nt, Artificial Sequence
  Synthetic
aguauuaacauaauugacua

SEQ ID NO: 131048 - RNA, 21 nt, Artificial Sequence
  Synthetic
uaguauuaacauaauugacua

SEQ ID NO: 131049 - RNA, 22 nt, Artificial Sequence
  Synthetic
uuaguauuaacauaauugacua

SEQ ID NO: 131050 - RNA, 24 nt, Artificial Sequence
  Synthetic
uguuaguauuaacauaauugacua

SEQ ID NO: 131051 - RNA, 18 nt, Artificial Sequence
  Synthetic
  misc_feature (10)..(10): n is a, c, g, or u
acacgggugnucccccua

SEQ ID NO: 131052 - RNA, 19 nt, Artificial Sequence
  Synthetic
  misc_feature (11)..(11): n is a, c, g, or u
cacacgggugnucccccua

SEQ ID NO: 131053 - RNA, 20 nt, Artificial Sequence
  Synthetic
  misc_feature (12)..(12): n is a, c, g, or u
acacacgggugnucccccua

SEQ ID NO: 131054 - RNA, 18 nt, Artificial Sequence
  Synthetic
ccuuccaaagaguaugua

SEQ ID NO: 131055 - RNA, 20 nt, Artificial Sequence
  Synthetic
agccuuccaaagaguaugua

SEQ ID NO: 131056 - RNA, 21 nt, Artificial Sequence
  Synthetic
cagccuuccaaagaguaugua

SEQ ID NO: 131057 - RNA, 22 nt, Artificial Sequence
  Synthetic
ccagccuuccaaagaguaugua

SEQ ID NO: 131058 - RNA, 23 nt, Artificial Sequence
  Synthetic
  misc_feature (1)..(1): n is a, c, g, or u
nccagccuuccaaagaguaugua

SEQ ID NO: 131059 - RNA, 24 nt, Artificial Sequence
  Synthetic
  misc_feature (2)..(2): n is a, c, g, or u
unccagccuuccaaagaguaugua

SEQ ID NO: 131060 - RNA, 18 nt, Artificial Sequence
  Synthetic
  misc_feature (1)..(2): n is a, c, g, or u
  misc_feature (5)..(5): n is a, c, g, or u
  misc_feature (14)..(14): n is a, c, g, or u
nnuancccaugaanuuua

SEQ ID NO: 131061 - RNA, 19 nt, Artificial Sequence
  Synthetic
  misc_feature (2)..(3): n is a, c, g, or u
  misc_feature (6)..(6): n is a, c, g, or u
  misc_feature (15)..(15): n is a, c, g, or u
annuancccaugaanuuua

SEQ ID NO: 131062 - RNA, 20 nt, Artificial Sequence
  Synthetic
  misc_feature (3)..(4): n is a, c, g, or u
  misc_feature (7)..(7): n is a, c, g, or u
  misc_feature (16)..(16): n is a, c, g, or u
uannuancccaugaanuuua

SEQ ID NO: 131063 - RNA, 21 nt, Artificial Sequence
  Synthetic
  misc_feature (4)..(5): n is a, c, g, or u
  misc_feature (8)..(8): n is a, c, g, or u
  misc_feature (17)..(17): n is a, c, g, or u
uuannuancccaugaanuuua

SEQ ID NO: 131064 - RNA, 22 nt, Artificial Sequence
  Synthetic
  misc_feature (5)..(6): n is a, c, g, or u
  misc_feature (9)..(9): n is a, c, g, or u
  misc_feature (18)..(18): n is a, c, g, or u
auuannuancccaugaanuuua

SEQ ID NO: 131065 - RNA, 23 nt, Artificial Sequence
  Synthetic
  misc_feature (6)..(7): n is a, c, g, or u
  misc_feature (10)..(10): n is a, c, g, or u
  misc_feature (19)..(19): n is a, c, g, or u
aauuannuancccaugaanuuua

SEQ ID NO: 131066 - RNA, 24 nt, Artificial Sequence
  Synthetic
  misc_feature (7)..(8): n is a, c, g, or u
  misc_feature (11)..(11): n is a, c, g, or u
  misc_feature (20)..(20): n is a, c, g, or u
caauuannuancccaugaanuuua

SEQ ID NO: 131067 - RNA, 18 nt, Artificial Sequence
  Synthetic
  misc_feature (9)..(9): n is a, c, g, or u
aggcaaganauaugaaac

SEQ ID NO: 131068 - RNA, 19 nt, Artificial Sequence
  Synthetic
  misc_feature (10)..(10): n is a, c, g, or u
aaggcaaganauaugaaac

SEQ ID NO: 131069 - RNA, 20 nt, Artificial Sequence
  Synthetic
  misc_feature (11)..(11): n is a, c, g, or u
uaaggcaaganauaugaaac

SEQ ID NO: 131070 - RNA, 22 nt, Artificial Sequence
  Synthetic
  misc_feature (13)..(13): n is a, c, g, or u
aguaaggcaaganauaugaaac

SEQ ID NO: 131071 - RNA, 23 nt, Artificial Sequence
  Synthetic
  misc_feature (14)..(14): n is a, c, g, or u
aaguaaggcaaganauaugaaac

SEQ ID NO: 131072 - RNA, 24 nt, Artificial Sequence
  Synthetic
  misc_feature (15)..(15): n is a, c, g, or u
aaaguaaggcaaganauaugaaac

SEQ ID NO: 131073 - RNA, 18 nt, Artificial Sequence
  Synthetic
caaaagaaaauugguaac

SEQ ID NO: 131074 - RNA, 19 nt, Artificial Sequence
  Synthetic
acaaaagaaaauugguaac

SEQ ID NO: 131075 - RNA, 21 nt, Artificial Sequence
  Synthetic
agacaaaagaaaauugguaac

SEQ ID NO: 131076 - RNA, 22 nt, Artificial Sequence
  Synthetic
  misc_feature (1)..(1): n is a, c, g, or u
nagacaaaagaaaauugguaac

SEQ ID NO: 131077 - RNA, 23 nt, Artificial Sequence
  Synthetic
  misc_feature (2)..(2): n is a, c, g, or u
anagacaaaagaaaauugguaac

SEQ ID NO: 131078 - RNA, 24 nt, Artificial Sequence
  Synthetic
  misc_feature (3)..(3): n is a, c, g, or u
canagacaaaagaaaauugguaac

SEQ ID NO: 131079 - RNA, 19 nt, Artificial Sequence
  Synthetic
cgaauuuuggccaagacac

SEQ ID NO: 131080 - RNA, 18 nt, Artificial Sequence
  Synthetic
  misc_feature (6)..(6): n is a, c, g, or u
caaganauaugaaaccac

SEQ ID NO: 131081 - RNA, 21 nt, Artificial Sequence
  Synthetic
  misc_feature (9)..(9): n is a, c, g, or u
aggcaaganauaugaaaccac

SEQ ID NO: 131082 - RNA, 22 nt, Artificial Sequence
  Synthetic
  misc_feature (10)..(10): n is a, c, g, or u
aaggcaaganauaugaaaccac

SEQ ID NO: 131083 - RNA, 23 nt, Artificial Sequence
  Synthetic
  misc_feature (11)..(11): n is a, c, g, or u
uaaggcaaganauaugaaaccac

SEQ ID NO: 131084 - RNA, 18 nt, Artificial Sequence
  Synthetic
  misc_feature (3)..(3): n is a, c, g, or u
uuncaaauuauuacccac

SEQ ID NO: 131085 - RNA, 19 nt, Artificial Sequence
  Synthetic
  misc_feature (4)..(4): n is a, c, g, or u
cuuncaaauuauuacccac

SEQ ID NO: 131086 - RNA, 20 nt, Artificial Sequence
  Synthetic
  misc_feature (5)..(5): n is a, c, g, or u
ucuuncaaauuauuacccac

SEQ ID NO: 131087 - RNA, 21 nt, Artificial Sequence
  Synthetic
  misc_feature (6)..(6): n is a, c, g, or u
aucuuncaaauuauuacccac

SEQ ID NO: 131088 - RNA, 24 nt, Artificial Sequence
  Synthetic
  misc_feature (9)..(9): n is a, c, g, or u
uggaucuuncaaauuauuacccac

SEQ ID NO: 131089 - RNA, 20 nt, Artificial Sequence
  Synthetic
uggaucggcagaggagccac

SEQ ID NO: 131090 - RNA, 20 nt, Artificial Sequence
  Synthetic
aggaucugaugggcguucac

SEQ ID NO: 131091 - RNA, 20 nt, Artificial Sequence
  Synthetic
aggacaaacgggcaacauac

SEQ ID NO: 131092 - RNA, 22 nt, Artificial Sequence
  Synthetic
agaggacaaacgggcaacauac

SEQ ID NO: 131093 - RNA, 23 nt, Artificial Sequence
  Synthetic
uagaggacaaacgggcaacauac

SEQ ID NO: 131094 - RNA, 24 nt, Artificial Sequence
  Synthetic
uuagaggacaaacgggcaacauac

SEQ ID NO: 131095 - RNA, 18 nt, Artificial Sequence
  Synthetic
aauugagagaaguccacc

SEQ ID NO: 131096 - RNA, 19 nt, Artificial Sequence
  Synthetic
aaauugagagaaguccacc

SEQ ID NO: 131097 - RNA, 20 nt, Artificial Sequence
  Synthetic
aaaauugagagaaguccacc

SEQ ID NO: 131098 - RNA, 18 nt, Artificial Sequence
  Synthetic
  misc_feature (1)..(1): n is a, c, g, or u
ngcaaagcccaaaagacc

SEQ ID NO: 131099 - RNA, 19 nt, Artificial Sequence
  Synthetic
  misc_feature (2)..(2): n is a, c, g, or u
cngcaaagcccaaaagacc

SEQ ID NO: 131100 - RNA, 21 nt, Artificial Sequence
  Synthetic
  misc_feature (4)..(4): n is a, c, g, or u
agcngcaaagcccaaaagacc

SEQ ID NO: 131101 - RNA, 24 nt, Artificial Sequence
  Synthetic
  misc_feature (7)..(7): n is a, c, g, or u
uggagcngcaaagcccaaaagacc

SEQ ID NO: 131102 - RNA, 19 nt, Artificial Sequence
  Synthetic
cguaaagagaggugcgccc

SEQ ID NO: 131103 - RNA, 19 nt, Artificial Sequence
  Synthetic
cggacugaggcccacuccc

SEQ ID NO: 131104 - RNA, 20 nt, Artificial Sequence
  Synthetic
acggacugaggcccacuccc

SEQ ID NO: 131105 - RNA, 21 nt, Artificial Sequence
  Synthetic
aacggacugaggcccacuccc

SEQ ID NO: 131106 - RNA, 22 nt, Artificial Sequence
  Synthetic
aaacggacugaggcccacuccc

SEQ ID NO: 131107 - RNA, 24 nt, Artificial Sequence
  Synthetic
agaaacggacugaggcccacuccc

SEQ ID NO: 131108 - RNA, 19 nt, Artificial Sequence
  Synthetic
  misc_feature (3)..(3): n is a, c, g, or u
ugnuguagcucuuguuccc

SEQ ID NO: 131109 - RNA, 20 nt, Artificial Sequence
  Synthetic
  misc_feature (4)..(4): n is a, c, g, or u
augnuguagcucuuguuccc

SEQ ID NO: 131110 - RNA, 21 nt, Artificial Sequence
  Synthetic
  misc_feature (5)..(5): n is a, c, g, or u
caugnuguagcucuuguuccc

SEQ ID NO: 131111 - RNA, 22 nt, Artificial Sequence
  Synthetic
  misc_feature (6)..(6): n is a, c, g, or u
ccaugnuguagcucuuguuccc

SEQ ID NO: 131112 - RNA, 23 nt, Artificial Sequence
  Synthetic
  misc_feature (7)..(7): n is a, c, g, or u
cccaugnuguagcucuuguuccc

SEQ ID NO: 131113 - RNA, 24 nt, Artificial Sequence
  Synthetic
  misc_feature (8)..(8): n is a, c, g, or u
ucccaugnuguagcucuuguuccc

SEQ ID NO: 131114 - RNA, 18 nt, Artificial Sequence
  Synthetic
  misc_feature (12)..(13): n is a, c, g, or u
ccugguuggcunnuggcc

SEQ ID NO: 131115 - RNA, 19 nt, Artificial Sequence
  Synthetic
  misc_feature (13)..(14): n is a, c, g, or u
accugguuggcunnuggcc

SEQ ID NO: 131116 - RNA, 20 nt, Artificial Sequence
  Synthetic
  misc_feature (14)..(15): n is a, c, g, or u
uaccugguuggcunnuggcc

SEQ ID NO: 131117 - RNA, 21 nt, Artificial Sequence
  Synthetic
  misc_feature (15)..(16): n is a, c, g, or u
cuaccugguuggcunnuggcc

SEQ ID NO: 131118 - RNA, 22 nt, Artificial Sequence
  Synthetic
  misc_feature (16)..(17): n is a, c, g, or u
ccuaccugguuggcunnuggcc

SEQ ID NO: 131119 - RNA, 23 nt, Artificial Sequence
  Synthetic
  misc_feature (17)..(18): n is a, c, g, or u
uccuaccugguuggcunnuggcc

SEQ ID NO: 131120 - RNA, 24 nt, Artificial Sequence
  Synthetic
  misc_feature (18)..(19): n is a, c, g, or u
cuccuaccugguuggcunnuggcc

SEQ ID NO: 131121 - RNA, 18 nt, Artificial Sequence
  Synthetic
  misc_feature (3)..(3): n is a, c, g, or u
ugnuguacagacuuggcc

SEQ ID NO: 131122 - RNA, 19 nt, Artificial Sequence
  Synthetic
  misc_feature (4)..(4): n is a, c, g, or u
augnuguacagacuuggcc

SEQ ID NO: 131123 - RNA, 21 nt, Artificial Sequence
  Synthetic
  misc_feature (1)..(1): n is a, c, g, or u
  misc_feature (6)..(6): n is a, c, g, or u
ngaugnuguacagacuuggcc

SEQ ID NO: 131124 - RNA, 22 nt, Artificial Sequence
  Synthetic
  misc_feature (2)..(2): n is a, c, g, or u
  misc_feature (7)..(7): n is a, c, g, or u
angaugnuguacagacuuggcc

SEQ ID NO: 131125 - RNA, 23 nt, Artificial Sequence
  Synthetic
  misc_feature (3)..(3): n is a, c, g, or u
  misc_feature (8)..(8): n is a, c, g, or u
cangaugnuguacagacuuggcc

SEQ ID NO: 131126 - RNA, 24 nt, Artificial Sequence
  Synthetic
  misc_feature (4)..(4): n is a, c, g, or u
  misc_feature (9)..(9): n is a, c, g, or u
ucangaugnuguacagacuuggcc

SEQ ID NO: 131127 - RNA, 18 nt, Artificial Sequence
  Synthetic
caggugcaauuuccaucc

SEQ ID NO: 131128 - RNA, 19 nt, Artificial Sequence
  Synthetic
acaggugcaauuuccaucc

SEQ ID NO: 131129 - RNA, 20 nt, Artificial Sequence
  Synthetic
uacaggugcaauuuccaucc

SEQ ID NO: 131130 - RNA, 21 nt, Artificial Sequence
  Synthetic
auacaggugcaauuuccaucc

SEQ ID NO: 131131 - RNA, 22 nt, Artificial Sequence
  Synthetic
aauacaggugcaauuuccaucc

SEQ ID NO: 131132 - RNA, 18 nt, Artificial Sequence
  Synthetic
uaauugacuacuagaucc

SEQ ID NO: 131133 - RNA, 19 nt, Artificial Sequence
  Synthetic
auaauugacuacuagaucc

SEQ ID NO: 131134 - RNA, 20 nt, Artificial Sequence
  Synthetic
cauaauugacuacuagaucc

SEQ ID NO: 131135 - RNA, 18 nt, Artificial Sequence
  Synthetic
  misc_feature (13)..(13): n is a, c, g, or u
acugguuguugungaucc

SEQ ID NO: 131136 - RNA, 19 nt, Artificial Sequence
  Synthetic
  misc_feature (14)..(14): n is a, c, g, or u
uacugguuguugungaucc

SEQ ID NO: 131137 - RNA, 21 nt, Artificial Sequence
  Synthetic
  misc_feature (16)..(16): n is a, c, g, or u
cguacugguuguugungaucc

SEQ ID NO: 131138 - RNA, 22 nt, Artificial Sequence
  Synthetic
  misc_feature (17)..(17): n is a, c, g, or u
ccguacugguuguugungaucc

SEQ ID NO: 131139 - RNA, 23 nt, Artificial Sequence
  Synthetic
  misc_feature (18)..(18): n is a, c, g, or u
cccguacugguuguugungaucc

SEQ ID NO: 131140 - RNA, 24 nt, Artificial Sequence
  Synthetic
  misc_feature (19)..(19): n is a, c, g, or u
ucccguacugguuguugungaucc

SEQ ID NO: 131141 - RNA, 18 nt, Artificial Sequence
  Synthetic
ugacauugcugggagucc

SEQ ID NO: 131142 - RNA, 19 nt, Artificial Sequence
  Synthetic
uugacauugcugggagucc

SEQ ID NO: 131143 - RNA, 18 nt, Artificial Sequence
  Synthetic
uacuaacauugagauucc

SEQ ID NO: 131144 - RNA, 19 nt, Artificial Sequence
  Synthetic
auacuaacauugagauucc

SEQ ID NO: 131145 - RNA, 20 nt, Artificial Sequence
  Synthetic
aauacuaacauugagauucc

SEQ ID NO: 131146 - RNA, 23 nt, Artificial Sequence
  Synthetic
aggaauacuaacauugagauucc

SEQ ID NO: 131147 - RNA, 24 nt, Artificial Sequence
  Synthetic
aaggaauacuaacauugagauucc

SEQ ID NO: 131148 - RNA, 18 nt, Artificial Sequence
  Synthetic
  misc_feature (4)..(4): n is a, c, g, or u
  misc_feature (10)..(10): n is a, c, g, or u
aagnacagunucucuucc

SEQ ID NO: 131149 - RNA, 19 nt, Artificial Sequence
  Synthetic
  misc_feature (5)..(5): n is a, c, g, or u
  misc_feature (11)..(11): n is a, c, g, or u
caagnacagunucucuucc

SEQ ID NO: 131150 - RNA, 20 nt, Artificial Sequence
  Synthetic
  misc_feature (6)..(6): n is a, c, g, or u
  misc_feature (12)..(12): n is a, c, g, or u
ucaagnacagunucucuucc

SEQ ID NO: 131151 - RNA, 21 nt, Artificial Sequence
  Synthetic
  misc_feature (1)..(1): n is a, c, g, or u
  misc_feature (7)..(7): n is a, c, g, or u
  misc_feature (13)..(13): n is a, c, g, or u
nucaagnacagunucucuucc

SEQ ID NO: 131152 - RNA, 22 nt, Artificial Sequence
  Synthetic
  misc_feature (2)..(2): n is a, c, g, or u
  misc_feature (8)..(8): n is a, c, g, or u
  misc_feature (14)..(14): n is a, c, g, or u
anucaagnacagunucucuucc

SEQ ID NO: 131153 - RNA, 23 nt, Artificial Sequence
  Synthetic
  misc_feature (3)..(3): n is a, c, g, or u
  misc_feature (9)..(9): n is a, c, g, or u
  misc_feature (15)..(15): n is a, c, g, or u
uanucaagnacagunucucuucc

SEQ ID NO: 131154 - RNA, 24 nt, Artificial Sequence
  Synthetic
  misc_feature (4)..(4): n is a, c, g, or u
  misc_feature (10)..(10): n is a, c, g, or u
  misc_feature (16)..(16): n is a, c, g, or u
auanucaagnacagunucucuucc

SEQ ID NO: 131155 - RNA, 18 nt, Artificial Sequence
  Synthetic
cuaacaacaguaguuucc

SEQ ID NO: 131156 - RNA, 19 nt, Artificial Sequence
  Synthetic
ucuaacaacaguaguuucc

SEQ ID NO: 131157 - RNA, 18 nt, Artificial Sequence
  Synthetic
cauagaguugccuugagc

SEQ ID NO: 131158 - RNA, 19 nt, Artificial Sequence
  Synthetic
acauagaguugccuugagc

SEQ ID NO: 131159 - RNA, 20 nt, Artificial Sequence
  Synthetic
aacauagaguugccuugagc

SEQ ID NO: 131160 - RNA, 18 nt, Artificial Sequence
  Synthetic
auuacccacccagguagc

SEQ ID NO: 131161 - RNA, 19 nt, Artificial Sequence
  Synthetic
uauuacccacccagguagc

SEQ ID NO: 131162 - RNA, 20 nt, Artificial Sequence
  Synthetic
uuauuacccacccagguagc

SEQ ID NO: 131163 - RNA, 18 nt, Artificial Sequence
  Synthetic
  misc_feature (1)..(1): n is a, c, g, or u
nacaagagaugauuaggc

SEQ ID NO: 131164 - RNA, 20 nt, Artificial Sequence
  Synthetic
  misc_feature (3)..(3): n is a, c, g, or u
ugnacaagagaugauuaggc

SEQ ID NO: 131165 - RNA, 21 nt, Artificial Sequence
  Synthetic
  misc_feature (4)..(4): n is a, c, g, or u
augnacaagagaugauuaggc

SEQ ID NO: 131166 - RNA, 22 nt, Artificial Sequence
  Synthetic
  misc_feature (5)..(5): n is a, c, g, or u
caugnacaagagaugauuaggc

SEQ ID NO: 131167 - RNA, 23 nt, Artificial Sequence
  Synthetic
  misc_feature (6)..(6): n is a, c, g, or u
acaugnacaagagaugauuaggc

SEQ ID NO: 131168 - RNA, 19 nt, Artificial Sequence
  Synthetic
  misc_feature (4)..(4): n is a, c, g, or u
  misc_feature (7)..(7): n is a, c, g, or u
  misc_feature (12)..(12): n is a, c, g, or u
uggnggngugancccuggc

SEQ ID NO: 131169 - RNA, 21 nt, Artificial Sequence
  Synthetic
  misc_feature (6)..(6): n is a, c, g, or u
  misc_feature (9)..(9): n is a, c, g, or u
  misc_feature (14)..(14): n is a, c, g, or u
uguggnggngugancccuggc

SEQ ID NO: 131170 - RNA, 23 nt, Artificial Sequence
  Synthetic
  misc_feature (8)..(8): n is a, c, g, or u
  misc_feature (11)..(11): n is a, c, g, or u
  misc_feature (16)..(16): n is a, c, g, or u
cguguggnggngugancccuggc

SEQ ID NO: 131171 - RNA, 24 nt, Artificial Sequence
  Synthetic
  misc_feature (9)..(9): n is a, c, g, or u
  misc_feature (12)..(12): n is a, c, g, or u
  misc_feature (17)..(17): n is a, c, g, or u
ccguguggnggngugancccuggc

SEQ ID NO: 131172 - RNA, 18 nt, Artificial Sequence
  Synthetic
uucuucuaggggaccugc

SEQ ID NO: 131173 - RNA, 19 nt, Artificial Sequence
  Synthetic
cuucuucuaggggaccugc

SEQ ID NO: 131174 - RNA, 20 nt, Artificial Sequence
  Synthetic
ucuucuucuaggggaccugc

SEQ ID NO: 131175 - RNA, 19 nt, Artificial Sequence
  Synthetic
uggucuccaugcaacgugc

SEQ ID NO: 131176 - RNA, 18 nt, Artificial Sequence
  Synthetic
cagcagagaauggcuugc

SEQ ID NO: 131177 - RNA, 19 nt, Artificial Sequence
  Synthetic
ccagcagagaauggcuugc

SEQ ID NO: 131178 - RNA, 20 nt, Artificial Sequence
  Synthetic
cccagcagagaauggcuugc

SEQ ID NO: 131179 - RNA, 21 nt, Artificial Sequence
  Synthetic
ccccagcagagaauggcuugc

SEQ ID NO: 131180 - RNA, 22 nt, Artificial Sequence
  Synthetic
cccccagcagagaauggcuugc

SEQ ID NO: 131181 - RNA, 23 nt, Artificial Sequence
  Synthetic
ccccccagcagagaauggcuugc

SEQ ID NO: 131182 - RNA, 24 nt, Artificial Sequence
  Synthetic
uccccccagcagagaauggcuugc

SEQ ID NO: 131183 - RNA, 18 nt, Artificial Sequence
  Synthetic
  misc_feature (7)..(7): n is a, c, g, or u
caaaaangagaguaacuc

SEQ ID NO: 131184 - RNA, 21 nt, Artificial Sequence
  Synthetic
  misc_feature (10)..(10): n is a, c, g, or u
aggcaaaaangagaguaacuc

SEQ ID NO: 131185 - RNA, 22 nt, Artificial Sequence
  Synthetic
  misc_feature (11)..(11): n is a, c, g, or u
aaggcaaaaangagaguaacuc

SEQ ID NO: 131186 - RNA, 24 nt, Artificial Sequence
  Synthetic
  misc_feature (13)..(13): n is a, c, g, or u
agaaggcaaaaangagaguaacuc

SEQ ID NO: 131187 - RNA, 18 nt, Artificial Sequence
  Synthetic
  misc_feature (8)..(8): n is a, c, g, or u
aauacagnccccugacuc

SEQ ID NO: 131188 - RNA, 19 nt, Artificial Sequence
  Synthetic
  misc_feature (9)..(9): n is a, c, g, or u
aaauacagnccccugacuc

SEQ ID NO: 131189 - RNA, 20 nt, Artificial Sequence
  Synthetic
  misc_feature (10)..(10): n is a, c, g, or u
aaaauacagnccccugacuc

SEQ ID NO: 131190 - RNA, 23 nt, Artificial Sequence
  Synthetic
  misc_feature (13)..(13): n is a, c, g, or u
aggaaaauacagnccccugacuc

SEQ ID NO: 131191 - RNA, 24 nt, Artificial Sequence
  Synthetic
  misc_feature (14)..(14): n is a, c, g, or u
caggaaaauacagnccccugacuc

SEQ ID NO: 131192 - RNA, 18 nt, Artificial Sequence
  Synthetic
acccagguagcuagaguc

SEQ ID NO: 131193 - RNA, 19 nt, Artificial Sequence
  Synthetic
cacccagguagcuagaguc

SEQ ID NO: 131194 - RNA, 20 nt, Artificial Sequence
  Synthetic
ccacccagguagcuagaguc

SEQ ID NO: 131195 - RNA, 21 nt, Artificial Sequence
  Synthetic
cccacccagguagcuagaguc

SEQ ID NO: 131196 - RNA, 22 nt, Artificial Sequence
  Synthetic
acccacccagguagcuagaguc

SEQ ID NO: 131197 - RNA, 23 nt, Artificial Sequence
  Synthetic
uacccacccagguagcuagaguc

SEQ ID NO: 131198 - RNA, 24 nt, Artificial Sequence
  Synthetic
uuacccacccagguagcuagaguc

SEQ ID NO: 131199 - RNA, 18 nt, Artificial Sequence
  Synthetic
  misc_feature (9)..(9): n is a, c, g, or u
  misc_feature (11)..(11): n is a, c, g, or u
cauguucgncncaggguc

SEQ ID NO: 131200 - RNA, 19 nt, Artificial Sequence
  Synthetic
  misc_feature (10)..(10): n is a, c, g, or u
  misc_feature (12)..(12): n is a, c, g, or u
ccauguucgncncaggguc

SEQ ID NO: 131201 - RNA, 20 nt, Artificial Sequence
  Synthetic
  misc_feature (11)..(11): n is a, c, g, or u
  misc_feature (13)..(13): n is a, c, g, or u
uccauguucgncncaggguc

SEQ ID NO: 131202 - RNA, 21 nt, Artificial Sequence
  Synthetic
  misc_feature (12)..(12): n is a, c, g, or u
  misc_feature (14)..(14): n is a, c, g, or u
cuccauguucgncncaggguc

SEQ ID NO: 131203 - RNA, 22 nt, Artificial Sequence
  Synthetic
  misc_feature (13)..(13): n is a, c, g, or u
  misc_feature (15)..(15): n is a, c, g, or u
ucuccauguucgncncaggguc

SEQ ID NO: 131204 - RNA, 23 nt, Artificial Sequence
  Synthetic
  misc_feature (14)..(14): n is a, c, g, or u
  misc_feature (16)..(16): n is a, c, g, or u
uucuccauguucgncncaggguc

SEQ ID NO: 131205 - RNA, 19 nt, Artificial Sequence
  Synthetic
  misc_feature (6)..(7): n is a, c, g, or u
uggcunnuggccagugguc

SEQ ID NO: 131206 - RNA, 20 nt, Artificial Sequence
  Synthetic
  misc_feature (7)..(8): n is a, c, g, or u
uuggcunnuggccagugguc

SEQ ID NO: 131207 - RNA, 23 nt, Artificial Sequence
  Synthetic
  misc_feature (10)..(11): n is a, c, g, or u
ugguuggcunnuggccagugguc

SEQ ID NO: 131208 - RNA, 24 nt, Artificial Sequence
  Synthetic
  misc_feature (11)..(12): n is a, c, g, or u
cugguuggcunnuggccagugguc

SEQ ID NO: 131209 - RNA, 18 nt, Artificial Sequence
  Synthetic
acaagcggcuaggaguuc

SEQ ID NO: 131210 - RNA, 19 nt, Artificial Sequence
  Synthetic
aacaagcggcuaggaguuc

SEQ ID NO: 131211 - RNA, 20 nt, Artificial Sequence
  Synthetic
aaacaagcggcuaggaguuc

SEQ ID NO: 131212 - RNA, 18 nt, Artificial Sequence
  Synthetic
uuugaaguaggccucaag

SEQ ID NO: 131213 - RNA, 19 nt, Artificial Sequence
  Synthetic
cuuugaaguaggccucaag

SEQ ID NO: 131214 - RNA, 20 nt, Artificial Sequence
  Synthetic
ucuuugaaguaggccucaag

SEQ ID NO: 131215 - RNA, 22 nt, Artificial Sequence
  Synthetic
agucuuugaaguaggccucaag

SEQ ID NO: 131216 - RNA, 23 nt, Artificial Sequence
  Synthetic
cagucuuugaaguaggccucaag

SEQ ID NO: 131217 - RNA, 24 nt, Artificial Sequence
  Synthetic
acagucuuugaaguaggccucaag

SEQ ID NO: 131218 - RNA, 18 nt, Artificial Sequence
  Synthetic
  misc_feature (13)..(13): n is a, c, g, or u
agagaccaaauanucaag

SEQ ID NO: 131219 - RNA, 19 nt, Artificial Sequence
  Synthetic
  misc_feature (14)..(14): n is a, c, g, or u
aagagaccaaauanucaag

SEQ ID NO: 131220 - RNA, 20 nt, Artificial Sequence
  Synthetic
  misc_feature (15)..(15): n is a, c, g, or u
aaagagaccaaauanucaag

SEQ ID NO: 131221 - RNA, 22 nt, Artificial Sequence
  Synthetic
  misc_feature (17)..(17): n is a, c, g, or u
cgaaagagaccaaauanucaag

SEQ ID NO: 131222 - RNA, 23 nt, Artificial Sequence
  Synthetic
  misc_feature (18)..(18): n is a, c, g, or u
ccgaaagagaccaaauanucaag

SEQ ID NO: 131223 - RNA, 24 nt, Artificial Sequence
  Synthetic
  misc_feature (19)..(19): n is a, c, g, or u
uccgaaagagaccaaauanucaag

SEQ ID NO: 131224 - RNA, 18 nt, Artificial Sequence
  Synthetic
cauagcagcaggaugaag

SEQ ID NO: 131225 - RNA, 21 nt, Artificial Sequence
  Synthetic
aggcauagcagcaggaugaag

SEQ ID NO: 131226 - RNA, 23 nt, Artificial Sequence
  Synthetic
ugaggcauagcagcaggaugaag

SEQ ID NO: 131227 - RNA, 24 nt, Artificial Sequence
  Synthetic
augaggcauagcagcaggaugaag

SEQ ID NO: 131228 - RNA, 18 nt, Artificial Sequence
  Synthetic
caacgugcagaggugaag

SEQ ID NO: 131229 - RNA, 20 nt, Artificial Sequence
  Synthetic
ugcaacgugcagaggugaag

SEQ ID NO: 131230 - RNA, 18 nt, Artificial Sequence
  Synthetic
  misc_feature (8)..(8): n is a, c, g, or u
ccagaggnuugggaacag

SEQ ID NO: 131231 - RNA, 19 nt, Artificial Sequence
  Synthetic
  misc_feature (9)..(9): n is a, c, g, or u
cccagaggnuugggaacag

SEQ ID NO: 131232 - RNA, 20 nt, Artificial Sequence
  Synthetic
  misc_feature (10)..(10): n is a, c, g, or u
ucccagaggnuugggaacag

SEQ ID NO: 131233 - RNA, 21 nt, Artificial Sequence
  Synthetic
  misc_feature (11)..(11): n is a, c, g, or u
aucccagaggnuugggaacag

SEQ ID NO: 131234 - RNA, 22 nt, Artificial Sequence
  Synthetic
  misc_feature (12)..(12): n is a, c, g, or u
aaucccagaggnuugggaacag

SEQ ID NO: 131235 - RNA, 24 nt, Artificial Sequence
  Synthetic
  misc_feature (14)..(14): n is a, c, g, or u
agaaucccagaggnuugggaacag

SEQ ID NO: 131236 - RNA, 18 nt, Artificial Sequence
  Synthetic
aacuggagccaccagcag

SEQ ID NO: 131237 - RNA, 20 nt, Artificial Sequence
  Synthetic
ugaacuggagccaccagcag

SEQ ID NO: 131238 - RNA, 21 nt, Artificial Sequence
  Synthetic
cugaacuggagccaccagcag

SEQ ID NO: 131239 - RNA, 22 nt, Artificial Sequence
  Synthetic
ccugaacuggagccaccagcag

SEQ ID NO: 131240 - RNA, 23 nt, Artificial Sequence
  Synthetic
uccugaacuggagccaccagcag

SEQ ID NO: 131241 - RNA, 24 nt, Artificial Sequence
  Synthetic
uuccugaacuggagccaccagcag

SEQ ID NO: 131242 - RNA, 19 nt, Artificial Sequence
  Synthetic
agaagaugaggcauagcag

SEQ ID NO: 131243 - RNA, 20 nt, Artificial Sequence
  Synthetic
aagaagaugaggcauagcag

SEQ ID NO: 131244 - RNA, 18 nt, Artificial Sequence
  Synthetic
  misc_feature (5)..(5): n is a, c, g, or u
  misc_feature (8)..(8): n is a, c, g, or u
caugnugnuggugcgcag

SEQ ID NO: 131245 - RNA, 20 nt, Artificial Sequence
  Synthetic
  misc_feature (7)..(7): n is a, c, g, or u
  misc_feature (10)..(10): n is a, c, g, or u
ugcaugnugnuggugcgcag

SEQ ID NO: 131246 - RNA, 21 nt, Artificial Sequence
  Synthetic
  misc_feature (8)..(8): n is a, c, g, or u
  misc_feature (11)..(11): n is a, c, g, or u
uugcaugnugnuggugcgcag

SEQ ID NO: 131247 - RNA, 23 nt, Artificial Sequence
  Synthetic
  misc_feature (10)..(10): n is a, c, g, or u
  misc_feature (13)..(13): n is a, c, g, or u
aguugcaugnugnuggugcgcag

SEQ ID NO: 131248 - RNA, 24 nt, Artificial Sequence
  Synthetic
  misc_feature (11)..(11): n is a, c, g, or u
  misc_feature (14)..(14): n is a, c, g, or u
aaguugcaugnugnuggugcgcag

SEQ ID NO: 131249 - RNA, 18 nt, Artificial Sequence
  Synthetic
  misc_feature (11)..(11): n is a, c, g, or u
cucugggaucnugcagag

SEQ ID NO: 131250 - RNA, 19 nt, Artificial Sequence
  Synthetic
  misc_feature (12)..(12): n is a, c, g, or u
acucugggaucnugcagag

SEQ ID NO: 131251 - RNA, 21 nt, Artificial Sequence
  Synthetic
  misc_feature (14)..(14): n is a, c, g, or u
ugacucugggaucnugcagag

SEQ ID NO: 131252 - RNA, 22 nt, Artificial Sequence
  Synthetic
  misc_feature (15)..(15): n is a, c, g, or u
cugacucugggaucnugcagag

SEQ ID NO: 131253 - RNA, 23 nt, Artificial Sequence
  Synthetic
  misc_feature (16)..(16): n is a, c, g, or u
ccugacucugggaucnugcagag

SEQ ID NO: 131254 - RNA, 24 nt, Artificial Sequence
  Synthetic
  misc_feature (17)..(17): n is a, c, g, or u
cccugacucugggaucnugcagag

SEQ ID NO: 131255 - RNA, 18 nt, Artificial Sequence
  Synthetic
caaauuggaggacaggag

SEQ ID NO: 131256 - RNA, 19 nt, Artificial Sequence
  Synthetic
acaaauuggaggacaggag

SEQ ID NO: 131257 - RNA, 22 nt, Artificial Sequence
  Synthetic
aggacaaauuggaggacaggag

SEQ ID NO: 131258 - RNA, 23 nt, Artificial Sequence
  Synthetic
caggacaaauuggaggacaggag

SEQ ID NO: 131259 - RNA, 24 nt, Artificial Sequence
  Synthetic
ccaggacaaauuggaggacaggag

SEQ ID NO: 131260 - RNA, 18 nt, Artificial Sequence
  Synthetic
ucccccuagaaaauugag

SEQ ID NO: 131261 - RNA, 19 nt, Artificial Sequence
  Synthetic
  misc_feature (1)..(1): n is a, c, g, or u
nucccccuagaaaauugag

SEQ ID NO: 131262 - RNA, 21 nt, Artificial Sequence
  Synthetic
  misc_feature (3)..(3): n is a, c, g, or u
ugnucccccuagaaaauugag

SEQ ID NO: 131263 - RNA, 18 nt, Artificial Sequence
  Synthetic
  misc_feature (11)..(11): n is a, c, g, or u
  misc_feature (14)..(14): n is a, c, g, or u
uaaagauaggnacnguag

SEQ ID NO: 131264 - RNA, 19 nt, Artificial Sequence
  Synthetic
  misc_feature (12)..(12): n is a, c, g, or u
  misc_feature (15)..(15): n is a, c, g, or u
uuaaagauaggnacnguag

SEQ ID NO: 131265 - RNA, 20 nt, Artificial Sequence
  Synthetic
  misc_feature (13)..(13): n is a, c, g, or u
  misc_feature (16)..(16): n is a, c, g, or u
auuaaagauaggnacnguag

SEQ ID NO: 131266 - RNA, 23 nt, Artificial Sequence
  Synthetic
  misc_feature (16)..(16): n is a, c, g, or u
  misc_feature (19)..(19): n is a, c, g, or u
aggauuaaagauaggnacnguag

SEQ ID NO: 131267 - RNA, 24 nt, Artificial Sequence
  Synthetic
  misc_feature (17)..(17): n is a, c, g, or u
  misc_feature (20)..(20): n is a, c, g, or u
caggauuaaagauaggnacnguag

SEQ ID NO: 131268 - RNA, 18 nt, Artificial Sequence
  Synthetic
caagaauauggugacccg

SEQ ID NO: 131269 - RNA, 19 nt, Artificial Sequence
  Synthetic
ccaagaauauggugacccg

SEQ ID NO: 131270 - RNA, 20 nt, Artificial Sequence
  Synthetic
cccaagaauauggugacccg

SEQ ID NO: 131271 - RNA, 21 nt, Artificial Sequence
  Synthetic
ucccaagaauauggugacccg

SEQ ID NO: 131272 - RNA, 22 nt, Artificial Sequence
  Synthetic
uucccaagaauauggugacccg

SEQ ID NO: 131273 - RNA, 24 nt, Artificial Sequence
  Synthetic
uguucccaagaauauggugacccg

SEQ ID NO: 131274 - RNA, 18 nt, Artificial Sequence
  Synthetic
cugccuuccugacugccg

SEQ ID NO: 131275 - RNA, 18 nt, Artificial Sequence
  Synthetic
  misc_feature (5)..(5): n is a, c, g, or u
cccgngaggggucguccg

SEQ ID NO: 131276 - RNA, 19 nt, Artificial Sequence
  Synthetic
  misc_feature (6)..(6): n is a, c, g, or u
ccccgngaggggucguccg

SEQ ID NO: 131277 - RNA, 18 nt, Artificial Sequence
  Synthetic
  misc_feature (1)..(1): n is a, c, g, or u
  misc_feature (7)..(7): n is a, c, g, or u
nugaucnggauaauaagg

SEQ ID NO: 131278 - RNA, 19 nt, Artificial Sequence
  Synthetic
  misc_feature (2)..(2): n is a, c, g, or u
  misc_feature (8)..(8): n is a, c, g, or u
cnugaucnggauaauaagg

SEQ ID NO: 131279 - RNA, 20 nt, Artificial Sequence
  Synthetic
  misc_feature (3)..(3): n is a, c, g, or u
  misc_feature (9)..(9): n is a, c, g, or u
acnugaucnggauaauaagg

SEQ ID NO: 131280 - RNA, 21 nt, Artificial Sequence
  Synthetic
  misc_feature (4)..(4): n is a, c, g, or u
  misc_feature (10)..(10): n is a, c, g, or u
uacnugaucnggauaauaagg

SEQ ID NO: 131281 - RNA, 22 nt, Artificial Sequence
  Synthetic
  misc_feature (5)..(5): n is a, c, g, or u
  misc_feature (11)..(11): n is a, c, g, or u
cuacnugaucnggauaauaagg

SEQ ID NO: 131282 - RNA, 23 nt, Artificial Sequence
  Synthetic
  misc_feature (6)..(6): n is a, c, g, or u
  misc_feature (12)..(12): n is a, c, g, or u
acuacnugaucnggauaauaagg

SEQ ID NO: 131283 - RNA, 24 nt, Artificial Sequence
  Synthetic
  misc_feature (7)..(7): n is a, c, g, or u
  misc_feature (13)..(13): n is a, c, g, or u
aacuacnugaucnggauaauaagg

SEQ ID NO: 131284 - RNA, 18 nt, Artificial Sequence
  Synthetic
uccaaauucuuuauaagg

SEQ ID NO: 131285 - RNA, 19 nt, Artificial Sequence
  Synthetic
cuccaaauucuuuauaagg

SEQ ID NO: 131286 - RNA, 18 nt, Artificial Sequence
  Synthetic
augggaugggaauacagg

SEQ ID NO: 131287 - RNA, 20 nt, Artificial Sequence
  Synthetic
  misc_feature (1)..(1): n is a, c, g, or u
ngaugggaugggaauacagg

SEQ ID NO: 131288 - RNA, 21 nt, Artificial Sequence
  Synthetic
  misc_feature (2)..(2): n is a, c, g, or u
angaugggaugggaauacagg

SEQ ID NO: 131289 - RNA, 23 nt, Artificial Sequence
  Synthetic
  misc_feature (1)..(1): n is a, c, g, or u
  misc_feature (4)..(4): n is a, c, g, or u
ngangaugggaugggaauacagg

SEQ ID NO: 131290 - RNA, 24 nt, Artificial Sequence
  Synthetic
  misc_feature (2)..(2): n is a, c, g, or u
  misc_feature (5)..(5): n is a, c, g, or u
angangaugggaugggaauacagg

SEQ ID NO: 131291 - RNA, 18 nt, Artificial Sequence
  Synthetic
  misc_feature (7)..(7): n is a, c, g, or u
aggauanaaucuagcagg

SEQ ID NO: 131292 - RNA, 19 nt, Artificial Sequence
  Synthetic
  misc_feature (8)..(8): n is a, c, g, or u
uaggauanaaucuagcagg

SEQ ID NO: 131293 - RNA, 20 nt, Artificial Sequence
  Synthetic
  misc_feature (1)..(1): n is a, c, g, or u
  misc_feature (9)..(9): n is a, c, g, or u
nuaggauanaaucuagcagg

SEQ ID NO: 131294 - RNA, 22 nt, Artificial Sequence
  Synthetic
  misc_feature (1)..(1): n is a, c, g, or u
  misc_feature (3)..(3): n is a, c, g, or u
  misc_feature (11)..(11): n is a, c, g, or u
ngnuaggauanaaucuagcagg

SEQ ID NO: 131295 - RNA, 23 nt, Artificial Sequence
  Synthetic
  misc_feature (1)..(2): n is a, c, g, or u
  misc_feature (4)..(4): n is a, c, g, or u
  misc_feature (12)..(12): n is a, c, g, or u
nngnuaggauanaaucuagcagg

SEQ ID NO: 131296 - RNA, 18 nt, Artificial Sequence
  Synthetic
cuuauguaagaccuuggg

SEQ ID NO: 131297 - RNA, 19 nt, Artificial Sequence
  Synthetic
ucuuauguaagaccuuggg

SEQ ID NO: 131298 - RNA, 20 nt, Artificial Sequence
  Synthetic
cucuuauguaagaccuuggg

SEQ ID NO: 131299 - RNA, 18 nt, Artificial Sequence
  Synthetic
  misc_feature (12)..(12): n is a, c, g, or u
ugccugagugcnguaugg

SEQ ID NO: 131300 - RNA, 19 nt, Artificial Sequence
  Synthetic
  misc_feature (13)..(13): n is a, c, g, or u
uugccugagugcnguaugg

SEQ ID NO: 131301 - RNA, 20 nt, Artificial Sequence
  Synthetic
  misc_feature (14)..(14): n is a, c, g, or u
cuugccugagugcnguaugg

SEQ ID NO: 131302 - RNA, 23 nt, Artificial Sequence
  Synthetic
  misc_feature (17)..(17): n is a, c, g, or u
uggcuugccugagugcnguaugg

SEQ ID NO: 131303 - RNA, 24 nt, Artificial Sequence
  Synthetic
  misc_feature (18)..(18): n is a, c, g, or u
auggcuugccugagugcnguaugg

SEQ ID NO: 131304 - RNA, 18 nt, Artificial Sequence
  Synthetic
ugguggucuauaggcugg

SEQ ID NO: 131305 - RNA, 19 nt, Artificial Sequence
  Synthetic
uugguggucuauaggcugg

SEQ ID NO: 131306 - RNA, 20 nt, Artificial Sequence
  Synthetic
uuugguggucuauaggcugg

SEQ ID NO: 131307 - RNA, 18 nt, Artificial Sequence
  Synthetic
acugucucuuagaggugg

SEQ ID NO: 131308 - RNA, 20 nt, Artificial Sequence
  Synthetic
ugacugucucuuagaggugg

SEQ ID NO: 131309 - RNA, 18 nt, Artificial Sequence
  Synthetic
  misc_feature (17)..(17): n is a, c, g, or u
uggcuugccugagugcng

SEQ ID NO: 131310 - RNA, 19 nt, Artificial Sequence
  Synthetic
  misc_feature (18)..(18): n is a, c, g, or u
auggcuugccugagugcng

SEQ ID NO: 131311 - RNA, 20 nt, Artificial Sequence
  Synthetic
  misc_feature (19)..(19): n is a, c, g, or u
aauggcuugccugagugcng

SEQ ID NO: 131312 - RNA, 22 nt, Artificial Sequence
  Synthetic
  misc_feature (21)..(21): n is a, c, g, or u
agaauggcuugccugagugcng

SEQ ID NO: 131313 - RNA, 24 nt, Artificial Sequence
  Synthetic
  misc_feature (23)..(23): n is a, c, g, or u
agagaauggcuugccugagugcng

SEQ ID NO: 131314 - RNA, 19 nt, Artificial Sequence
  Synthetic
  misc_feature (12)..(12): n is a, c, g, or u
  misc_feature (18)..(18): n is a, c, g, or u
ugauuaacuacnugaucng

SEQ ID NO: 131315 - RNA, 20 nt, Artificial Sequence
  Synthetic
  misc_feature (13)..(13): n is a, c, g, or u
  misc_feature (19)..(19): n is a, c, g, or u
augauuaacuacnugaucng

SEQ ID NO: 131316 - RNA, 21 nt, Artificial Sequence
  Synthetic
  misc_feature (14)..(14): n is a, c, g, or u
  misc_feature (20)..(20): n is a, c, g, or u
aaugauuaacuacnugaucng

SEQ ID NO: 131317 - RNA, 22 nt, Artificial Sequence
  Synthetic
  misc_feature (15)..(15): n is a, c, g, or u
  misc_feature (21)..(21): n is a, c, g, or u
uaaugauuaacuacnugaucng

SEQ ID NO: 131318 - RNA, 24 nt, Artificial Sequence
  Synthetic
  misc_feature (17)..(17): n is a, c, g, or u
  misc_feature (23)..(23): n is a, c, g, or u
aguaaugauuaacuacnugaucng

SEQ ID NO: 131319 - RNA, 19 nt, Artificial Sequence
  Synthetic
  misc_feature (18)..(18): n is a, c, g, or u
agucccaagcggccccgng

SEQ ID NO: 131320 - RNA, 21 nt, Artificial Sequence
  Synthetic
  misc_feature (20)..(20): n is a, c, g, or u
agagucccaagcggccccgng

SEQ ID NO: 131321 - RNA, 22 nt, Artificial Sequence
  Synthetic
  misc_feature (1)..(1): n is a, c, g, or u
  misc_feature (21)..(21): n is a, c, g, or u
nagagucccaagcggccccgng

SEQ ID NO: 131322 - RNA, 23 nt, Artificial Sequence
  Synthetic
  misc_feature (2)..(2): n is a, c, g, or u
  misc_feature (22)..(22): n is a, c, g, or u
anagagucccaagcggccccgng

SEQ ID NO: 131323 - RNA, 18 nt, Artificial Sequence
  Synthetic
  misc_feature (5)..(5): n is a, c, g, or u
  misc_feature (16)..(17): n is a, c, g, or u
uaaunccuuugucuanng

SEQ ID NO: 131324 - RNA, 19 nt, Artificial Sequence
  Synthetic
  misc_feature (6)..(6): n is a, c, g, or u
  misc_feature (17)..(18): n is a, c, g, or u
uuaaunccuuugucuanng

SEQ ID NO: 131325 - RNA, 20 nt, Artificial Sequence
  Synthetic
  misc_feature (7)..(7): n is a, c, g, or u
  misc_feature (18)..(19): n is a, c, g, or u
uuuaaunccuuugucuanng

SEQ ID NO: 131326 - RNA, 23 nt, Artificial Sequence
  Synthetic
  misc_feature (10)..(10): n is a, c, g, or u
  misc_feature (21)..(22): n is a, c, g, or u
agguuuaaunccuuugucuanng

SEQ ID NO: 131327 - RNA, 24 nt, Artificial Sequence
  Synthetic
  misc_feature (11)..(11): n is a, c, g, or u
  misc_feature (22)..(23): n is a, c, g, or u
aagguuuaaunccuuugucuanng

SEQ ID NO: 131328 - RNA, 18 nt, Artificial Sequence
  Synthetic
  misc_feature (5)..(5): n is a, c, g, or u
uuganuuggcuccgaaug

SEQ ID NO: 131329 - RNA, 19 nt, Artificial Sequence
  Synthetic
  misc_feature (6)..(6): n is a, c, g, or u
uuuganuuggcuccgaaug

SEQ ID NO: 131330 - RNA, 18 nt, Artificial Sequence
  Synthetic
aagaguauguaaauaaug

SEQ ID NO: 131331 - RNA, 19 nt, Artificial Sequence
  Synthetic
aaagaguauguaaauaaug

SEQ ID NO: 131332 - RNA, 20 nt, Artificial Sequence
  Synthetic
caaagaguauguaaauaaug

SEQ ID NO: 131333 - RNA, 21 nt, Artificial Sequence
  Synthetic
ccaaagaguauguaaauaaug

SEQ ID NO: 131334 - RNA, 22 nt, Artificial Sequence
  Synthetic
uccaaagaguauguaaauaaug

SEQ ID NO: 131335 - RNA, 23 nt, Artificial Sequence
  Synthetic
uuccaaagaguauguaaauaaug

SEQ ID NO: 131336 - RNA, 24 nt, Artificial Sequence
  Synthetic
cuuccaaagaguauguaaauaaug

SEQ ID NO: 131337 - RNA, 18 nt, Artificial Sequence
  Synthetic
  misc_feature (14)..(14): n is a, c, g, or u
cuacuagaucccungaug

SEQ ID NO: 131338 - RNA, 19 nt, Artificial Sequence
  Synthetic
  misc_feature (15)..(15): n is a, c, g, or u
acuacuagaucccungaug

SEQ ID NO: 131339 - RNA, 21 nt, Artificial Sequence
  Synthetic
  misc_feature (17)..(17): n is a, c, g, or u
ugacuacuagaucccungaug

SEQ ID NO: 131340 - RNA, 22 nt, Artificial Sequence
  Synthetic
  misc_feature (18)..(18): n is a, c, g, or u
uugacuacuagaucccungaug

SEQ ID NO: 131341 - RNA, 23 nt, Artificial Sequence
  Synthetic
  misc_feature (19)..(19): n is a, c, g, or u
auugacuacuagaucccungaug

SEQ ID NO: 131342 - RNA, 24 nt, Artificial Sequence
  Synthetic
  misc_feature (20)..(20): n is a, c, g, or u
aauugacuacuagaucccungaug

SEQ ID NO: 131343 - RNA, 18 nt, Artificial Sequence
  Synthetic
aaguuuucuaaaacagug

SEQ ID NO: 131344 - RNA, 21 nt, Artificial Sequence
  Synthetic
aggaaguuuucuaaaacagug

SEQ ID NO: 131345 - RNA, 22 nt, Artificial Sequence
  Synthetic
caggaaguuuucuaaaacagug

SEQ ID NO: 131346 - RNA, 23 nt, Artificial Sequence
  Synthetic
acaggaaguuuucuaaaacagug

SEQ ID NO: 131347 - RNA, 24 nt, Artificial Sequence
  Synthetic
  misc_feature (1)..(1): n is a, c, g, or u
nacaggaaguuuucuaaaacagug

SEQ ID NO: 131348 - RNA, 19 nt, Artificial Sequence
  Synthetic
  misc_feature (6)..(6): n is a, c, g, or u
agugcnguauggugaggug

SEQ ID NO: 131349 - RNA, 20 nt, Artificial Sequence
  Synthetic
uggaggacaggagguuggug

SEQ ID NO: 131350 - RNA, 21 nt, Artificial Sequence
  Synthetic
uuggaggacaggagguuggug

SEQ ID NO: 131351 - RNA, 22 nt, Artificial Sequence
  Synthetic
auuggaggacaggagguuggug

SEQ ID NO: 131352 - RNA, 23 nt, Artificial Sequence
  Synthetic
aauuggaggacaggagguuggug

SEQ ID NO: 131353 - RNA, 24 nt, Artificial Sequence
  Synthetic
aaauuggaggacaggagguuggug

SEQ ID NO: 131354 - RNA, 18 nt, Artificial Sequence
  Synthetic
  misc_feature (15)..(16): n is a, c, g, or u
cuaccugguuggcunnug

SEQ ID NO: 131355 - RNA, 19 nt, Artificial Sequence
  Synthetic
  misc_feature (16)..(17): n is a, c, g, or u
ccuaccugguuggcunnug

SEQ ID NO: 131356 - RNA, 20 nt, Artificial Sequence
  Synthetic
  misc_feature (17)..(18): n is a, c, g, or u
uccuaccugguuggcunnug

SEQ ID NO: 131357 - RNA, 21 nt, Artificial Sequence
  Synthetic
  misc_feature (18)..(19): n is a, c, g, or u
cuccuaccugguuggcunnug

SEQ ID NO: 131358 - RNA, 22 nt, Artificial Sequence
  Synthetic
  misc_feature (19)..(20): n is a, c, g, or u
acuccuaccugguuggcunnug

SEQ ID NO: 131359 - RNA, 23 nt, Artificial Sequence
  Synthetic
  misc_feature (20)..(21): n is a, c, g, or u
cacuccuaccugguuggcunnug

SEQ ID NO: 131360 - RNA, 24 nt, Artificial Sequence
  Synthetic
  misc_feature (21)..(22): n is a, c, g, or u
ccacuccuaccugguuggcunnug

SEQ ID NO: 131361 - RNA, 20 nt, Artificial Sequence
  Synthetic
aggcacagcuuggaggcuug

SEQ ID NO: 131362 - RNA, 21 nt, Artificial Sequence
  Synthetic
aaggcacagcuuggaggcuug

SEQ ID NO: 131363 - RNA, 22 nt, Artificial Sequence
  Synthetic
caaggcacagcuuggaggcuug

SEQ ID NO: 131364 - RNA, 23 nt, Artificial Sequence
  Synthetic
ccaaggcacagcuuggaggcuug

SEQ ID NO: 131365 - RNA, 24 nt, Artificial Sequence
  Synthetic
  misc_feature (1)..(1): n is a, c, g, or u
nccaaggcacagcuuggaggcuug

SEQ ID NO: 131366 - RNA, 18 nt, Artificial Sequence
  Synthetic
uuggaggacaggagguug

SEQ ID NO: 131367 - RNA, 19 nt, Artificial Sequence
  Synthetic
auuggaggacaggagguug

SEQ ID NO: 131368 - RNA, 20 nt, Artificial Sequence
  Synthetic
aauuggaggacaggagguug

SEQ ID NO: 131369 - RNA, 19 nt, Artificial Sequence
  Synthetic
aggagucgugcagguuuug

SEQ ID NO: 131370 - RNA, 20 nt, Artificial Sequence
  Synthetic
caggagucgugcagguuuug

SEQ ID NO: 131371 - RNA, 18 nt, Artificial Sequence
  Synthetic
  misc_feature (13)..(13): n is a, c, g, or u
acaguguuugaunuuuug

SEQ ID NO: 131372 - RNA, 19 nt, Artificial Sequence
  Synthetic
  misc_feature (14)..(14): n is a, c, g, or u
aacaguguuugaunuuuug

SEQ ID NO: 131373 - RNA, 20 nt, Artificial Sequence
  Synthetic
  misc_feature (15)..(15): n is a, c, g, or u
aaacaguguuugaunuuuug

SEQ ID NO: 131374 - RNA, 21 nt, Artificial Sequence
  Synthetic
  misc_feature (16)..(16): n is a, c, g, or u
aaaacaguguuugaunuuuug

SEQ ID NO: 131375 - RNA, 22 nt, Artificial Sequence
  Synthetic
  misc_feature (17)..(17): n is a, c, g, or u
uaaaacaguguuugaunuuuug

SEQ ID NO: 131376 - RNA, 23 nt, Artificial Sequence
  Synthetic
  misc_feature (18)..(18): n is a, c, g, or u
cuaaaacaguguuugaunuuuug

SEQ ID NO: 131377 - RNA, 24 nt, Artificial Sequence
  Synthetic
  misc_feature (19)..(19): n is a, c, g, or u
ucuaaaacaguguuugaunuuuug

SEQ ID NO: 131378 - RNA, 18 nt, Artificial Sequence
  Synthetic
  misc_feature (18)..(18): n is a, c, g, or u
aagucagaaggcaaaaan

SEQ ID NO: 131379 - RNA, 20 nt, Artificial Sequence
  Synthetic
  misc_feature (20)..(20): n is a, c, g, or u
agaagucagaaggcaaaaan

SEQ ID NO: 131380 - RNA, 21 nt, Artificial Sequence
  Synthetic
  misc_feature (21)..(21): n is a, c, g, or u
aagaagucagaaggcaaaaan

SEQ ID NO: 131381 - RNA, 22 nt, Artificial Sequence
  Synthetic
  misc_feature (22)..(22): n is a, c, g, or u
aaagaagucagaaggcaaaaan

SEQ ID NO: 131382 - RNA, 18 nt, Artificial Sequence
  Synthetic
  misc_feature (18)..(18): n is a, c, g, or u
uauuuugcgaaagcccan

SEQ ID NO: 131383 - RNA, 21 nt, Artificial Sequence
  Synthetic
  misc_feature (21)..(21): n is a, c, g, or u
agguauuuugcgaaagcccan

SEQ ID NO: 131384 - RNA, 22 nt, Artificial Sequence
  Synthetic
  misc_feature (22)..(22): n is a, c, g, or u
uagguauuuugcgaaagcccan

SEQ ID NO: 131385 - RNA, 23 nt, Artificial Sequence
  Synthetic
  misc_feature (23)..(23): n is a, c, g, or u
auagguauuuugcgaaagcccan

SEQ ID NO: 131386 - RNA, 24 nt, Artificial Sequence
  Synthetic
  misc_feature (24)..(24): n is a, c, g, or u
cauagguauuuugcgaaagcccan

SEQ ID NO: 131387 - RNA, 19 nt, Artificial Sequence
  Synthetic
  misc_feature (15)..(15): n is a, c, g, or u
  misc_feature (19)..(19): n is a, c, g, or u
ugagaggcaauauunggan

SEQ ID NO: 131388 - RNA, 21 nt, Artificial Sequence
  Synthetic
  misc_feature (17)..(17): n is a, c, g, or u
  misc_feature (21)..(21): n is a, c, g, or u
ugugagaggcaauauunggan

SEQ ID NO: 131389 - RNA, 22 nt, Artificial Sequence
  Synthetic
  misc_feature (18)..(18): n is a, c, g, or u
  misc_feature (22)..(22): n is a, c, g, or u
augugagaggcaauauunggan

SEQ ID NO: 131390 - RNA, 24 nt, Artificial Sequence
  Synthetic
  misc_feature (20)..(20): n is a, c, g, or u
  misc_feature (24)..(24): n is a, c, g, or u
agaugugagaggcaauauunggan

SEQ ID NO: 131391 - RNA, 18 nt, Artificial Sequence
  Synthetic
  misc_feature (18)..(18): n is a, c, g, or u
uuuacagugagagggccn

SEQ ID NO: 131392 - RNA, 19 nt, Artificial Sequence
  Synthetic
  misc_feature (19)..(19): n is a, c, g, or u
auuuacagugagagggccn

SEQ ID NO: 131393 - RNA, 20 nt, Artificial Sequence
  Synthetic
  misc_feature (20)..(20): n is a, c, g, or u
cauuuacagugagagggccn

SEQ ID NO: 131394 - RNA, 21 nt, Artificial Sequence
  Synthetic
  misc_feature (21)..(21): n is a, c, g, or u
ucauuuacagugagagggccn

SEQ ID NO: 131395 - RNA, 22 nt, Artificial Sequence
  Synthetic
  misc_feature (22)..(22): n is a, c, g, or u
uucauuuacagugagagggccn

SEQ ID NO: 131396 - RNA, 23 nt, Artificial Sequence
  Synthetic
  misc_feature (23)..(23): n is a, c, g, or u
uuucauuuacagugagagggccn

SEQ ID NO: 131397 - RNA, 24 nt, Artificial Sequence
  Synthetic
  misc_feature (24)..(24): n is a, c, g, or u
uuuucauuuacagugagagggccn

SEQ ID NO: 131398 - RNA, 18 nt, Artificial Sequence
  Synthetic
  misc_feature (16)..(16): n is a, c, g, or u
  misc_feature (18)..(18): n is a, c, g, or u
uguucuccauguucgncn

SEQ ID NO: 131399 - RNA, 19 nt, Artificial Sequence
  Synthetic
  misc_feature (17)..(17): n is a, c, g, or u
  misc_feature (19)..(19): n is a, c, g, or u
auguucuccauguucgncn

SEQ ID NO: 131400 - RNA, 21 nt, Artificial Sequence
  Synthetic
  misc_feature (19)..(19): n is a, c, g, or u
  misc_feature (21)..(21): n is a, c, g, or u
ugauguucuccauguucgncn

SEQ ID NO: 131401 - RNA, 23 nt, Artificial Sequence
  Synthetic
  misc_feature (21)..(21): n is a, c, g, or u
  misc_feature (23)..(23): n is a, c, g, or u
ugugauguucuccauguucgncn

SEQ ID NO: 131402 - RNA, 24 nt, Artificial Sequence
  Synthetic
  misc_feature (22)..(22): n is a, c, g, or u
  misc_feature (24)..(24): n is a, c, g, or u
augugauguucuccauguucgncn

SEQ ID NO: 131403 - RNA, 18 nt, Artificial Sequence
  Synthetic
  misc_feature (18)..(18): n is a, c, g, or u
aggguccccaguccucgn

SEQ ID NO: 131404 - RNA, 19 nt, Artificial Sequence
  Synthetic
  misc_feature (19)..(19): n is a, c, g, or u
caggguccccaguccucgn

SEQ ID NO: 131405 - RNA, 20 nt, Artificial Sequence
  Synthetic
  misc_feature (1)..(1): n is a, c, g, or u
  misc_feature (20)..(20): n is a, c, g, or u
ncaggguccccaguccucgn

SEQ ID NO: 131406 - RNA, 21 nt, Artificial Sequence
  Synthetic
  misc_feature (2)..(2): n is a, c, g, or u
  misc_feature (21)..(21): n is a, c, g, or u
cncaggguccccaguccucgn

SEQ ID NO: 131407 - RNA, 22 nt, Artificial Sequence
  Synthetic
  misc_feature (1)..(1): n is a, c, g, or u
  misc_feature (3)..(3): n is a, c, g, or u
  misc_feature (22)..(22): n is a, c, g, or u
ncncaggguccccaguccucgn

SEQ ID NO: 131408 - RNA, 24 nt, Artificial Sequence
  Synthetic
  misc_feature (3)..(3): n is a, c, g, or u
  misc_feature (5)..(5): n is a, c, g, or u
  misc_feature (24)..(24): n is a, c, g, or u
cgncncaggguccccaguccucgn

SEQ ID NO: 131409 - RNA, 20 nt, Artificial Sequence
  Synthetic
  misc_feature (1)..(1): n is a, c, g, or u
  misc_feature (4)..(4): n is a, c, g, or u
  misc_feature (17)..(18): n is a, c, g, or u
  misc_feature (20)..(20): n is a, c, g, or u
nggnaaauauuuagugnngn

SEQ ID NO: 131410 - RNA, 21 nt, Artificial Sequence
  Synthetic
  misc_feature (1)..(2): n is a, c, g, or u
  misc_feature (5)..(5): n is a, c, g, or u
  misc_feature (18)..(19): n is a, c, g, or u
  misc_feature (21)..(21): n is a, c, g, or u
nnggnaaauauuuagugnngn

SEQ ID NO: 131411 - RNA, 22 nt, Artificial Sequence
  Synthetic
  misc_feature (2)..(3): n is a, c, g, or u
  misc_feature (6)..(6): n is a, c, g, or u
  misc_feature (19)..(20): n is a, c, g, or u
  misc_feature (22)..(22): n is a, c, g, or u
annggnaaauauuuagugnngn

SEQ ID NO: 131412 - RNA, 23 nt, Artificial Sequence
  Synthetic
  misc_feature (3)..(4): n is a, c, g, or u
  misc_feature (7)..(7): n is a, c, g, or u
  misc_feature (20)..(21): n is a, c, g, or u
  misc_feature (23)..(23): n is a, c, g, or u
uannggnaaauauuuagugnngn

SEQ ID NO: 131413 - RNA, 24 nt, Artificial Sequence
  Synthetic
  misc_feature (4)..(5): n is a, c, g, or u
  misc_feature (8)..(8): n is a, c, g, or u
  misc_feature (21)..(22): n is a, c, g, or u
  misc_feature (24)..(24): n is a, c, g, or u
cuannggnaaauauuuagugnngn

SEQ ID NO: 131414 - RNA, 19 nt, Artificial Sequence
  Synthetic
  misc_feature (6)..(6): n is a, c, g, or u
  misc_feature (9)..(9): n is a, c, g, or u
  misc_feature (12)..(12): n is a, c, g, or u
  misc_feature (19)..(19): n is a, c, g, or u
aggaanugnugncacugun

SEQ ID NO: 131415 - RNA, 22 nt, Artificial Sequence
  Synthetic
  misc_feature (9)..(9): n is a, c, g, or u
  misc_feature (12)..(12): n is a, c, g, or u
  misc_feature (15)..(15): n is a, c, g, or u
  misc_feature (22)..(22): n is a, c, g, or u
aggaggaanugnugncacugun

SEQ ID NO: 131416 - RNA, 18 nt, Artificial Sequence
  Synthetic
ugggguugaagucccaau

SEQ ID NO: 131417 - RNA, 19 nt, Artificial Sequence
  Synthetic
augggguugaagucccaau

SEQ ID NO: 131418 - RNA, 18 nt, Artificial Sequence
  Synthetic
agcagggguccuaggaau

SEQ ID NO: 131419 - RNA, 20 nt, Artificial Sequence
  Synthetic
cgagcagggguccuaggaau

SEQ ID NO: 131420 - RNA, 18 nt, Artificial Sequence
  Synthetic
  misc_feature (1)..(1): n is a, c, g, or u
  misc_feature (4)..(4): n is a, c, g, or u
ngangaugggaugggaau

SEQ ID NO: 131421 - RNA, 19 nt, Artificial Sequence
  Synthetic
  misc_feature (2)..(2): n is a, c, g, or u
  misc_feature (5)..(5): n is a, c, g, or u
angangaugggaugggaau

SEQ ID NO: 131422 - RNA, 20 nt, Artificial Sequence
  Synthetic
  misc_feature (3)..(3): n is a, c, g, or u
  misc_feature (6)..(6): n is a, c, g, or u
cangangaugggaugggaau

SEQ ID NO: 131423 - RNA, 21 nt, Artificial Sequence
  Synthetic
  misc_feature (4)..(4): n is a, c, g, or u
  misc_feature (7)..(7): n is a, c, g, or u
ccangangaugggaugggaau

SEQ ID NO: 131424 - RNA, 22 nt, Artificial Sequence
  Synthetic
  misc_feature (5)..(5): n is a, c, g, or u
  misc_feature (8)..(8): n is a, c, g, or u
cccangangaugggaugggaau

SEQ ID NO: 131425 - RNA, 24 nt, Artificial Sequence
  Synthetic
  misc_feature (7)..(7): n is a, c, g, or u
  misc_feature (10)..(10): n is a, c, g, or u
agcccangangaugggaugggaau

SEQ ID NO: 131426 - RNA, 18 nt, Artificial Sequence
  Synthetic
cuagcaggcauaauuaau

SEQ ID NO: 131427 - RNA, 19 nt, Artificial Sequence
  Synthetic
ucuagcaggcauaauuaau

SEQ ID NO: 131428 - RNA, 20 nt, Artificial Sequence
  Synthetic
aucuagcaggcauaauuaau

SEQ ID NO: 131429 - RNA, 21 nt, Artificial Sequence
  Synthetic
aaucuagcaggcauaauuaau

SEQ ID NO: 131430 - RNA, 22 nt, Artificial Sequence
  Synthetic
  misc_feature (1)..(1): n is a, c, g, or u
naaucuagcaggcauaauuaau

SEQ ID NO: 131431 - RNA, 23 nt, Artificial Sequence
  Synthetic
  misc_feature (2)..(2): n is a, c, g, or u
anaaucuagcaggcauaauuaau

SEQ ID NO: 131432 - RNA, 24 nt, Artificial Sequence
  Synthetic
  misc_feature (3)..(3): n is a, c, g, or u
uanaaucuagcaggcauaauuaau

SEQ ID NO: 131433 - RNA, 18 nt, Artificial Sequence
  Synthetic
uccaaggaauacuaacau

SEQ ID NO: 131434 - RNA, 20 nt, Artificial Sequence
  Synthetic
aguccaaggaauacuaacau

SEQ ID NO: 131435 - RNA, 22 nt, Artificial Sequence
  Synthetic
ugaguccaaggaauacuaacau

SEQ ID NO: 131436 - RNA, 23 nt, Artificial Sequence
  Synthetic
augaguccaaggaauacuaacau

SEQ ID NO: 131437 - RNA, 24 nt, Artificial Sequence
  Synthetic
uaugaguccaaggaauacuaacau

SEQ ID NO: 131438 - RNA, 18 nt, Artificial Sequence
  Synthetic
  misc_feature (4)..(4): n is a, c, g, or u
  misc_feature (7)..(7): n is a, c, g, or u
  misc_feature (12)..(13): n is a, c, g, or u
ccunaunuuuanncccau

SEQ ID NO: 131439 - RNA, 20 nt, Artificial Sequence
  Synthetic
  misc_feature (6)..(6): n is a, c, g, or u
  misc_feature (9)..(9): n is a, c, g, or u
  misc_feature (14)..(15): n is a, c, g, or u
ugccunaunuuuanncccau

SEQ ID NO: 131440 - RNA, 21 nt, Artificial Sequence
  Synthetic
  misc_feature (7)..(7): n is a, c, g, or u
  misc_feature (10)..(10): n is a, c, g, or u
  misc_feature (15)..(16): n is a, c, g, or u
uugccunaunuuuanncccau

SEQ ID NO: 131441 - RNA, 23 nt, Artificial Sequence
  Synthetic
  misc_feature (9)..(9): n is a, c, g, or u
  misc_feature (12)..(12): n is a, c, g, or u
  misc_feature (17)..(18): n is a, c, g, or u
aguugccunaunuuuanncccau

SEQ ID NO: 131442 - RNA, 24 nt, Artificial Sequence
  Synthetic
  misc_feature (10)..(10): n is a, c, g, or u
  misc_feature (13)..(13): n is a, c, g, or u
  misc_feature (18)..(19): n is a, c, g, or u
uaguugccunaunuuuanncccau

SEQ ID NO: 131443 - RNA, 18 nt, Artificial Sequence
  Synthetic
ucuuagagguggagagau

SEQ ID NO: 131444 - RNA, 19 nt, Artificial Sequence
  Synthetic
cucuuagagguggagagau

SEQ ID NO: 131445 - RNA, 20 nt, Artificial Sequence
  Synthetic
ucucuuagagguggagagau

SEQ ID NO: 131446 - RNA, 22 nt, Artificial Sequence
  Synthetic
ugucucuuagagguggagagau

SEQ ID NO: 131447 - RNA, 23 nt, Artificial Sequence
  Synthetic
cugucucuuagagguggagagau

SEQ ID NO: 131448 - RNA, 24 nt, Artificial Sequence
  Synthetic
acugucucuuagagguggagagau

SEQ ID NO: 131449 - RNA, 18 nt, Artificial Sequence
  Synthetic
cauugagauucccgagau

SEQ ID NO: 131450 - RNA, 19 nt, Artificial Sequence
  Synthetic
acauugagauucccgagau

SEQ ID NO: 131451 - RNA, 20 nt, Artificial Sequence
  Synthetic
aacauugagauucccgagau

SEQ ID NO: 131452 - RNA, 18 nt, Artificial Sequence
  Synthetic
  misc_feature (7)..(7): n is a, c, g, or u
  misc_feature (10)..(10): n is a, c, g, or u
agcccangangaugggau

SEQ ID NO: 131453 - RNA, 19 nt, Artificial Sequence
  Synthetic
  misc_feature (8)..(8): n is a, c, g, or u
  misc_feature (11)..(11): n is a, c, g, or u
aagcccangangaugggau

SEQ ID NO: 131454 - RNA, 20 nt, Artificial Sequence
  Synthetic
  misc_feature (9)..(9): n is a, c, g, or u
  misc_feature (12)..(12): n is a, c, g, or u
aaagcccangangaugggau

SEQ ID NO: 131455 - RNA, 22 nt, Artificial Sequence
  Synthetic
  misc_feature (11)..(11): n is a, c, g, or u
  misc_feature (14)..(14): n is a, c, g, or u
cgaaagcccangangaugggau

SEQ ID NO: 131456 - RNA, 24 nt, Artificial Sequence
  Synthetic
  misc_feature (13)..(13): n is a, c, g, or u
  misc_feature (16)..(16): n is a, c, g, or u
ugcgaaagcccangangaugggau

SEQ ID NO: 131457 - RNA, 18 nt, Artificial Sequence
  Synthetic
  misc_feature (14)..(14): n is a, c, g, or u
aaugauuaacuacnugau

SEQ ID NO: 131458 - RNA, 19 nt, Artificial Sequence
  Synthetic
  misc_feature (15)..(15): n is a, c, g, or u
uaaugauuaacuacnugau

SEQ ID NO: 131459 - RNA, 21 nt, Artificial Sequence
  Synthetic
  misc_feature (17)..(17): n is a, c, g, or u
aguaaugauuaacuacnugau

SEQ ID NO: 131460 - RNA, 22 nt, Artificial Sequence
  Synthetic
  misc_feature (18)..(18): n is a, c, g, or u
aaguaaugauuaacuacnugau

SEQ ID NO: 131461 - RNA, 23 nt, Artificial Sequence
  Synthetic
  misc_feature (1)..(1): n is a, c, g, or u
  misc_feature (19)..(19): n is a, c, g, or u
naaguaaugauuaacuacnugau

SEQ ID NO: 131462 - RNA, 18 nt, Artificial Sequence
  Synthetic
cagccuuccaaagaguau

SEQ ID NO: 131463 - RNA, 19 nt, Artificial Sequence
  Synthetic
ccagccuuccaaagaguau

SEQ ID NO: 131464 - RNA, 20 nt, Artificial Sequence
  Synthetic
  misc_feature (1)..(1): n is a, c, g, or u
nccagccuuccaaagaguau

SEQ ID NO: 131465 - RNA, 21 nt, Artificial Sequence
  Synthetic
  misc_feature (2)..(2): n is a, c, g, or u
unccagccuuccaaagaguau

SEQ ID NO: 131466 - RNA, 22 nt, Artificial Sequence
  Synthetic
  misc_feature (3)..(3): n is a, c, g, or u
aunccagccuuccaaagaguau

SEQ ID NO: 131467 - RNA, 23 nt, Artificial Sequence
  Synthetic
  misc_feature (4)..(4): n is a, c, g, or u
aaunccagccuuccaaagaguau

SEQ ID NO: 131468 - RNA, 18 nt, Artificial Sequence
  Synthetic
uagcuccaaauucuuuau

SEQ ID NO: 131469 - RNA, 20 nt, Artificial Sequence
  Synthetic
aguagcuccaaauucuuuau

SEQ ID NO: 131470 - RNA, 21 nt, Artificial Sequence
  Synthetic
caguagcuccaaauucuuuau

SEQ ID NO: 131471 - RNA, 22 nt, Artificial Sequence
  Synthetic
acaguagcuccaaauucuuuau

SEQ ID NO: 131472 - RNA, 23 nt, Artificial Sequence
  Synthetic
cacaguagcuccaaauucuuuau

SEQ ID NO: 131473 - RNA, 24 nt, Artificial Sequence
  Synthetic
ccacaguagcuccaaauucuuuau

SEQ ID NO: 131474 - RNA, 18 nt, Artificial Sequence
  Synthetic
  misc_feature (7)..(7): n is a, c, g, or u
  misc_feature (10)..(10): n is a, c, g, or u
uggcaangunccccaacu

SEQ ID NO: 131475 - RNA, 20 nt, Artificial Sequence
  Synthetic
  misc_feature (9)..(9): n is a, c, g, or u
  misc_feature (12)..(12): n is a, c, g, or u
uguggcaangunccccaacu

SEQ ID NO: 131476 - RNA, 21 nt, Artificial Sequence
  Synthetic
  misc_feature (1)..(1): n is a, c, g, or u
  misc_feature (10)..(10): n is a, c, g, or u
  misc_feature (13)..(13): n is a, c, g, or u
nuguggcaangunccccaacu

SEQ ID NO: 131477 - RNA, 22 nt, Artificial Sequence
  Synthetic
  misc_feature (2)..(2): n is a, c, g, or u
  misc_feature (11)..(11): n is a, c, g, or u
  misc_feature (14)..(14): n is a, c, g, or u
cnuguggcaangunccccaacu

SEQ ID NO: 131478 - RNA, 23 nt, Artificial Sequence
  Synthetic
  misc_feature (3)..(3): n is a, c, g, or u
  misc_feature (12)..(12): n is a, c, g, or u
  misc_feature (15)..(15): n is a, c, g, or u
ucnuguggcaangunccccaacu

SEQ ID NO: 131479 - RNA, 24 nt, Artificial Sequence
  Synthetic
  misc_feature (4)..(4): n is a, c, g, or u
  misc_feature (13)..(13): n is a, c, g, or u
  misc_feature (16)..(16): n is a, c, g, or u
aucnuguggcaangunccccaacu

SEQ ID NO: 131480 - RNA, 18 nt, Artificial Sequence
  Synthetic
cgaaugcaggguccaacu

SEQ ID NO: 131481 - RNA, 19 nt, Artificial Sequence
  Synthetic
ccgaaugcaggguccaacu

SEQ ID NO: 131482 - RNA, 20 nt, Artificial Sequence
  Synthetic
uccgaaugcaggguccaacu

SEQ ID NO: 131483 - RNA, 19 nt, Artificial Sequence
  Synthetic
ugauuggagguuggggacu

SEQ ID NO: 131484 - RNA, 21 nt, Artificial Sequence
  Synthetic
agugauuggagguuggggacu

SEQ ID NO: 131485 - RNA, 23 nt, Artificial Sequence
  Synthetic
ugagugauuggagguuggggacu

SEQ ID NO: 131486 - RNA, 18 nt, Artificial Sequence
  Synthetic
uaggcugccuuccugacu

SEQ ID NO: 131487 - RNA, 20 nt, Artificial Sequence
  Synthetic
aguaggcugccuuccugacu

SEQ ID NO: 131488 - RNA, 18 nt, Artificial Sequence
  Synthetic
  misc_feature (1)..(1): n is a, c, g, or u
  misc_feature (10)..(10): n is a, c, g, or u
nacaaauugnugacaccu

SEQ ID NO: 131489 - RNA, 19 nt, Artificial Sequence
  Synthetic
  misc_feature (2)..(2): n is a, c, g, or u
  misc_feature (11)..(11): n is a, c, g, or u
cnacaaauugnugacaccu

SEQ ID NO: 131490 - RNA, 20 nt, Artificial Sequence
  Synthetic
  misc_feature (3)..(3): n is a, c, g, or u
  misc_feature (12)..(12): n is a, c, g, or u
ccnacaaauugnugacaccu

SEQ ID NO: 131491 - RNA, 24 nt, Artificial Sequence
  Synthetic
  misc_feature (7)..(7): n is a, c, g, or u
  misc_feature (16)..(16): n is a, c, g, or u
agggccnacaaauugnugacaccu

SEQ ID NO: 131492 - RNA, 18 nt, Artificial Sequence
  Synthetic
  misc_feature (6)..(6): n is a, c, g, or u
aauuunugccuacagccu

SEQ ID NO: 131493 - RNA, 19 nt, Artificial Sequence
  Synthetic
  misc_feature (7)..(7): n is a, c, g, or u
caauuunugccuacagccu

SEQ ID NO: 131494 - RNA, 20 nt, Artificial Sequence
  Synthetic
  misc_feature (8)..(8): n is a, c, g, or u
ccaauuunugccuacagccu

SEQ ID NO: 131495 - RNA, 21 nt, Artificial Sequence
  Synthetic
  misc_feature (9)..(9): n is a, c, g, or u
accaauuunugccuacagccu

SEQ ID NO: 131496 - RNA, 23 nt, Artificial Sequence
  Synthetic
  misc_feature (11)..(11): n is a, c, g, or u
agaccaauuunugccuacagccu

SEQ ID NO: 131497 - RNA, 24 nt, Artificial Sequence
  Synthetic
  misc_feature (12)..(12): n is a, c, g, or u
cagaccaauuunugccuacagccu

SEQ ID NO: 131498 - RNA, 18 nt, Artificial Sequence
  Synthetic
agucuuugaaguaggccu

SEQ ID NO: 131499 - RNA, 19 nt, Artificial Sequence
  Synthetic
cagucuuugaaguaggccu

SEQ ID NO: 131500 - RNA, 20 nt, Artificial Sequence
  Synthetic
acagucuuugaaguaggccu

SEQ ID NO: 131501 - RNA, 21 nt, Artificial Sequence
  Synthetic
cacagucuuugaaguaggccu

SEQ ID NO: 131502 - RNA, 22 nt, Artificial Sequence
  Synthetic
acacagucuuugaaguaggccu

SEQ ID NO: 131503 - RNA, 23 nt, Artificial Sequence
  Synthetic
cacacagucuuugaaguaggccu

SEQ ID NO: 131504 - RNA, 24 nt, Artificial Sequence
  Synthetic
acacacagucuuugaaguaggccu

SEQ ID NO: 131505 - RNA, 18 nt, Artificial Sequence
  Synthetic
  misc_feature (13)..(13): n is a, c, g, or u
ucuccucccccancuccu

SEQ ID NO: 131506 - RNA, 19 nt, Artificial Sequence
  Synthetic
  misc_feature (14)..(14): n is a, c, g, or u
aucuccucccccancuccu

SEQ ID NO: 131507 - RNA, 20 nt, Artificial Sequence
  Synthetic
  misc_feature (15)..(15): n is a, c, g, or u
aaucuccucccccancuccu

SEQ ID NO: 131508 - RNA, 21 nt, Artificial Sequence
  Synthetic
  misc_feature (16)..(16): n is a, c, g, or u
uaaucuccucccccancuccu

SEQ ID NO: 131509 - RNA, 22 nt, Artificial Sequence
  Synthetic
  misc_feature (17)..(17): n is a, c, g, or u
cuaaucuccucccccancuccu

SEQ ID NO: 131510 - RNA, 23 nt, Artificial Sequence
  Synthetic
  misc_feature (18)..(18): n is a, c, g, or u
ccuaaucuccucccccancuccu

SEQ ID NO: 131511 - RNA, 24 nt, Artificial Sequence
  Synthetic
  misc_feature (19)..(19): n is a, c, g, or u
accuaaucuccucccccancuccu

SEQ ID NO: 131512 - RNA, 18 nt, Artificial Sequence
  Synthetic
aguaacuccacaguagcu

SEQ ID NO: 131513 - RNA, 20 nt, Artificial Sequence
  Synthetic
agaguaacuccacaguagcu

SEQ ID NO: 131514 - RNA, 22 nt, Artificial Sequence
  Synthetic
  misc_feature (1)..(1): n is a, c, g, or u
ngagaguaacuccacaguagcu

SEQ ID NO: 131515 - RNA, 23 nt, Artificial Sequence
  Synthetic
  misc_feature (2)..(2): n is a, c, g, or u
angagaguaacuccacaguagcu

SEQ ID NO: 131516 - RNA, 24 nt, Artificial Sequence
  Synthetic
  misc_feature (3)..(3): n is a, c, g, or u
aangagaguaacuccacaguagcu

SEQ ID NO: 131517 - RNA, 19 nt, Artificial Sequence
  Synthetic
  misc_feature (13)..(13): n is a, c, g, or u
uggauuguuuganuuggcu

SEQ ID NO: 131518 - RNA, 20 nt, Artificial Sequence
  Synthetic
  misc_feature (14)..(14): n is a, c, g, or u
cuggauuguuuganuuggcu

SEQ ID NO: 131519 - RNA, 21 nt, Artificial Sequence
  Synthetic
  misc_feature (15)..(15): n is a, c, g, or u
ucuggauuguuuganuuggcu

SEQ ID NO: 131520 - RNA, 22 nt, Artificial Sequence
  Synthetic
  misc_feature (16)..(16): n is a, c, g, or u
aucuggauuguuuganuuggcu

SEQ ID NO: 131521 - RNA, 23 nt, Artificial Sequence
  Synthetic
  misc_feature (17)..(17): n is a, c, g, or u
aaucuggauuguuuganuuggcu

SEQ ID NO: 131522 - RNA, 24 nt, Artificial Sequence
  Synthetic
  misc_feature (18)..(18): n is a, c, g, or u
caaucuggauuguuuganuuggcu

SEQ ID NO: 131523 - RNA, 18 nt, Artificial Sequence
  Synthetic
  misc_feature (16)..(16): n is a, c, g, or u
cagcgguauaaagggncu

SEQ ID NO: 131524 - RNA, 19 nt, Artificial Sequence
  Synthetic
  misc_feature (17)..(17): n is a, c, g, or u
acagcgguauaaagggncu

SEQ ID NO: 131525 - RNA, 20 nt, Artificial Sequence
  Synthetic
  misc_feature (18)..(18): n is a, c, g, or u
aacagcgguauaaagggncu

SEQ ID NO: 131526 - RNA, 18 nt, Artificial Sequence
  Synthetic
ccuugaugggguugaagu

SEQ ID NO: 131527 - RNA, 19 nt, Artificial Sequence
  Synthetic
uccuugaugggguugaagu

SEQ ID NO: 131528 - RNA, 22 nt, Artificial Sequence
  Synthetic
ugguccuugaugggguugaagu

SEQ ID NO: 131529 - RNA, 24 nt, Artificial Sequence
  Synthetic
agugguccuugaugggguugaagu

SEQ ID NO: 131530 - RNA, 18 nt, Artificial Sequence
  Synthetic
  misc_feature (7)..(7): n is a, c, g, or u
  misc_feature (11)..(11): n is a, c, g, or u
  misc_feature (14)..(14): n is a, c, g, or u
aaugucnggunugnaagu

SEQ ID NO: 131531 - RNA, 19 nt, Artificial Sequence
  Synthetic
  misc_feature (8)..(8): n is a, c, g, or u
  misc_feature (12)..(12): n is a, c, g, or u
  misc_feature (15)..(15): n is a, c, g, or u
uaaugucnggunugnaagu

SEQ ID NO: 131532 - RNA, 20 nt, Artificial Sequence
  Synthetic
  misc_feature (9)..(9): n is a, c, g, or u
  misc_feature (13)..(13): n is a, c, g, or u
  misc_feature (16)..(16): n is a, c, g, or u
auaaugucnggunugnaagu

SEQ ID NO: 131533 - RNA, 21 nt, Artificial Sequence
  Synthetic
  misc_feature (10)..(10): n is a, c, g, or u
  misc_feature (14)..(14): n is a, c, g, or u
  misc_feature (17)..(17): n is a, c, g, or u
aauaaugucnggunugnaagu

SEQ ID NO: 131534 - RNA, 22 nt, Artificial Sequence
  Synthetic
  misc_feature (11)..(11): n is a, c, g, or u
  misc_feature (15)..(15): n is a, c, g, or u
  misc_feature (18)..(18): n is a, c, g, or u
aaauaaugucnggunugnaagu

SEQ ID NO: 131535 - RNA, 23 nt, Artificial Sequence
  Synthetic
  misc_feature (12)..(12): n is a, c, g, or u
  misc_feature (16)..(16): n is a, c, g, or u
  misc_feature (19)..(19): n is a, c, g, or u
uaaauaaugucnggunugnaagu

SEQ ID NO: 131536 - RNA, 18 nt, Artificial Sequence
  Synthetic
  misc_feature (1)..(1): n is a, c, g, or u
ngccaagccccagccagu

SEQ ID NO: 131537 - RNA, 19 nt, Artificial Sequence
  Synthetic
  misc_feature (2)..(2): n is a, c, g, or u
ungccaagccccagccagu

SEQ ID NO: 131538 - RNA, 20 nt, Artificial Sequence
  Synthetic
  misc_feature (3)..(3): n is a, c, g, or u
aungccaagccccagccagu

SEQ ID NO: 131539 - RNA, 21 nt, Artificial Sequence
  Synthetic
  misc_feature (1)..(1): n is a, c, g, or u
  misc_feature (4)..(4): n is a, c, g, or u
naungccaagccccagccagu

SEQ ID NO: 131540 - RNA, 22 nt, Artificial Sequence
  Synthetic
  misc_feature (2)..(2): n is a, c, g, or u
  misc_feature (5)..(5): n is a, c, g, or u
cnaungccaagccccagccagu

SEQ ID NO: 131541 - RNA, 23 nt, Artificial Sequence
  Synthetic
  misc_feature (3)..(3): n is a, c, g, or u
  misc_feature (6)..(6): n is a, c, g, or u
ccnaungccaagccccagccagu

SEQ ID NO: 131542 - RNA, 19 nt, Artificial Sequence
  Synthetic
cggcuaggaguuccgcagu

SEQ ID NO: 131543 - RNA, 18 nt, Artificial Sequence
  Synthetic
ucuauaggcuggaggagu

SEQ ID NO: 131544 - RNA, 19 nt, Artificial Sequence
  Synthetic
  misc_feature (11)..(11): n is a, c, g, or u
agguuuugcanggucccgu

SEQ ID NO: 131545 - RNA, 20 nt, Artificial Sequence
  Synthetic
  misc_feature (12)..(12): n is a, c, g, or u
cagguuuugcanggucccgu

SEQ ID NO: 131546 - RNA, 18 nt, Artificial Sequence
  Synthetic
cccaugccuuugcgaggu

SEQ ID NO: 131547 - RNA, 19 nt, Artificial Sequence
  Synthetic
ccccaugccuuugcgaggu

SEQ ID NO: 131548 - RNA, 20 nt, Artificial Sequence
  Synthetic
uccccaugccuuugcgaggu

SEQ ID NO: 131549 - RNA, 18 nt, Artificial Sequence
  Synthetic
  misc_feature (2)..(2): n is a, c, g, or u
unuuuguuuuguuagggu

SEQ ID NO: 131550 - RNA, 19 nt, Artificial Sequence
  Synthetic
  misc_feature (3)..(3): n is a, c, g, or u
cunuuuguuuuguuagggu

SEQ ID NO: 131551 - RNA, 20 nt, Artificial Sequence
  Synthetic
  misc_feature (4)..(4): n is a, c, g, or u
ucunuuuguuuuguuagggu

SEQ ID NO: 131552 - RNA, 21 nt, Artificial Sequence
  Synthetic
  misc_feature (5)..(5): n is a, c, g, or u
aucunuuuguuuuguuagggu

SEQ ID NO: 131553 - RNA, 22 nt, Artificial Sequence
  Synthetic
  misc_feature (6)..(6): n is a, c, g, or u
caucunuuuguuuuguuagggu

SEQ ID NO: 131554 - RNA, 23 nt, Artificial Sequence
  Synthetic
  misc_feature (7)..(7): n is a, c, g, or u
ccaucunuuuguuuuguuagggu

SEQ ID NO: 131555 - RNA, 24 nt, Artificial Sequence
  Synthetic
  misc_feature (8)..(8): n is a, c, g, or u
cccaucunuuuguuuuguuagggu

SEQ ID NO: 131556 - RNA, 18 nt, Artificial Sequence
  Synthetic
agugguccuugauggggu

SEQ ID NO: 131557 - RNA, 19 nt, Artificial Sequence
  Synthetic
cagugguccuugauggggu

SEQ ID NO: 131558 - RNA, 20 nt, Artificial Sequence
  Synthetic
ccagugguccuugauggggu

SEQ ID NO: 131559 - RNA, 23 nt, Artificial Sequence
  Synthetic
uggccagugguccuugauggggu

SEQ ID NO: 131560 - RNA, 24 nt, Artificial Sequence
  Synthetic
  misc_feature (1)..(1): n is a, c, g, or u
nuggccagugguccuugauggggu

SEQ ID NO: 131561 - RNA, 19 nt, Artificial Sequence
  Synthetic
  misc_feature (1)..(1): n is a, c, g, or u
  misc_feature (7)..(7): n is a, c, g, or u
  misc_feature (10)..(10): n is a, c, g, or u
ngcaggnuanccacauugu

SEQ ID NO: 131562 - RNA, 20 nt, Artificial Sequence
  Synthetic
  misc_feature (2)..(2): n is a, c, g, or u
  misc_feature (8)..(8): n is a, c, g, or u
  misc_feature (11)..(11): n is a, c, g, or u
angcaggnuanccacauugu

SEQ ID NO: 131563 - RNA, 21 nt, Artificial Sequence
  Synthetic
  misc_feature (3)..(3): n is a, c, g, or u
  misc_feature (9)..(9): n is a, c, g, or u
  misc_feature (12)..(12): n is a, c, g, or u
aangcaggnuanccacauugu

SEQ ID NO: 131564 - RNA, 22 nt, Artificial Sequence
  Synthetic
  misc_feature (4)..(4): n is a, c, g, or u
  misc_feature (10)..(10): n is a, c, g, or u
  misc_feature (13)..(13): n is a, c, g, or u
uaangcaggnuanccacauugu

SEQ ID NO: 131565 - RNA, 23 nt, Artificial Sequence
  Synthetic
  misc_feature (5)..(5): n is a, c, g, or u
  misc_feature (11)..(11): n is a, c, g, or u
  misc_feature (14)..(14): n is a, c, g, or u
uuaangcaggnuanccacauugu

SEQ ID NO: 131566 - RNA, 24 nt, Artificial Sequence
  Synthetic
  misc_feature (6)..(6): n is a, c, g, or u
  misc_feature (12)..(12): n is a, c, g, or u
  misc_feature (15)..(15): n is a, c, g, or u
auuaangcaggnuanccacauugu

SEQ ID NO: 131567 - RNA, 18 nt, Artificial Sequence
  Synthetic
uagacucugcgguauugu

SEQ ID NO: 131568 - RNA, 19 nt, Artificial Sequence
  Synthetic
cuagacucugcgguauugu

SEQ ID NO: 131569 - RNA, 20 nt, Artificial Sequence
  Synthetic
ucuagacucugcgguauugu

SEQ ID NO: 131570 - RNA, 18 nt, Artificial Sequence
  Synthetic
  misc_feature (8)..(8): n is a, c, g, or u
cccaucunuuuguuuugu

SEQ ID NO: 131571 - RNA, 19 nt, Artificial Sequence
  Synthetic
  misc_feature (9)..(9): n is a, c, g, or u
ccccaucunuuuguuuugu

SEQ ID NO: 131572 - RNA, 20 nt, Artificial Sequence
  Synthetic
  misc_feature (10)..(10): n is a, c, g, or u
accccaucunuuuguuuugu

SEQ ID NO: 131573 - RNA, 21 nt, Artificial Sequence
  Synthetic
  misc_feature (11)..(11): n is a, c, g, or u
aaccccaucunuuuguuuugu

SEQ ID NO: 131574 - RNA, 22 nt, Artificial Sequence
  Synthetic
  misc_feature (12)..(12): n is a, c, g, or u
uaaccccaucunuuuguuuugu

SEQ ID NO: 131575 - RNA, 23 nt, Artificial Sequence
  Synthetic
  misc_feature (13)..(13): n is a, c, g, or u
auaaccccaucunuuuguuuugu

SEQ ID NO: 131576 - RNA, 24 nt, Artificial Sequence
  Synthetic
  misc_feature (14)..(14): n is a, c, g, or u
aauaaccccaucunuuuguuuugu

SEQ ID NO: 131577 - RNA, 18 nt, Artificial Sequence
  Synthetic
  misc_feature (14)..(14): n is a, c, g, or u
  misc_feature (17)..(17): n is a, c, g, or u
uauuaauaaugucnucnu

SEQ ID NO: 131578 - RNA, 19 nt, Artificial Sequence
  Synthetic
  misc_feature (15)..(15): n is a, c, g, or u
  misc_feature (18)..(18): n is a, c, g, or u
cuauuaauaaugucnucnu

SEQ ID NO: 131579 - RNA, 20 nt, Artificial Sequence
  Synthetic
  misc_feature (16)..(16): n is a, c, g, or u
  misc_feature (19)..(19): n is a, c, g, or u
ccuauuaauaaugucnucnu

SEQ ID NO: 131580 - RNA, 21 nt, Artificial Sequence
  Synthetic
  misc_feature (17)..(17): n is a, c, g, or u
  misc_feature (20)..(20): n is a, c, g, or u
accuauuaauaaugucnucnu

SEQ ID NO: 131581 - RNA, 22 nt, Artificial Sequence
  Synthetic
  misc_feature (18)..(18): n is a, c, g, or u
  misc_feature (21)..(21): n is a, c, g, or u
caccuauuaauaaugucnucnu

SEQ ID NO: 131582 - RNA, 23 nt, Artificial Sequence
  Synthetic
  misc_feature (19)..(19): n is a, c, g, or u
  misc_feature (22)..(22): n is a, c, g, or u
acaccuauuaauaaugucnucnu

SEQ ID NO: 131583 - RNA, 20 nt, Artificial Sequence
  Synthetic
  misc_feature (19)..(19): n is a, c, g, or u
aggugaaaaaguugcaugnu

SEQ ID NO: 131584 - RNA, 22 nt, Artificial Sequence
  Synthetic
  misc_feature (21)..(21): n is a, c, g, or u
agaggugaaaaaguugcaugnu

SEQ ID NO: 131585 - RNA, 23 nt, Artificial Sequence
  Synthetic
  misc_feature (22)..(22): n is a, c, g, or u
cagaggugaaaaaguugcaugnu

SEQ ID NO: 131586 - RNA, 19 nt, Artificial Sequence
  Synthetic
  misc_feature (14)..(14): n is a, c, g, or u
  misc_feature (18)..(18): n is a, c, g, or u
uguaaauaaugucnggunu

SEQ ID NO: 131587 - RNA, 20 nt, Artificial Sequence
  Synthetic
  misc_feature (15)..(15): n is a, c, g, or u
  misc_feature (19)..(19): n is a, c, g, or u
auguaaauaaugucnggunu

SEQ ID NO: 131588 - RNA, 21 nt, Artificial Sequence
  Synthetic
  misc_feature (16)..(16): n is a, c, g, or u
  misc_feature (20)..(20): n is a, c, g, or u
uauguaaauaaugucnggunu

SEQ ID NO: 131589 - RNA, 23 nt, Artificial Sequence
  Synthetic
  misc_feature (18)..(18): n is a, c, g, or u
  misc_feature (22)..(22): n is a, c, g, or u
aguauguaaauaaugucnggunu

SEQ ID NO: 131590 - RNA, 18 nt, Artificial Sequence
  Synthetic
  misc_feature (1)..(1): n is a, c, g, or u
  misc_feature (4)..(4): n is a, c, g, or u
nganaggacgacagaauu

SEQ ID NO: 131591 - RNA, 20 nt, Artificial Sequence
  Synthetic
  misc_feature (3)..(3): n is a, c, g, or u
  misc_feature (6)..(6): n is a, c, g, or u
cgnganaggacgacagaauu

SEQ ID NO: 131592 - RNA, 21 nt, Artificial Sequence
  Synthetic
  misc_feature (4)..(4): n is a, c, g, or u
  misc_feature (7)..(7): n is a, c, g, or u
ccgnganaggacgacagaauu

SEQ ID NO: 131593 - RNA, 22 nt, Artificial Sequence
  Synthetic
  misc_feature (5)..(5): n is a, c, g, or u
  misc_feature (8)..(8): n is a, c, g, or u
uccgnganaggacgacagaauu

SEQ ID NO: 131594 - RNA, 23 nt, Artificial Sequence
  Synthetic
  misc_feature (6)..(6): n is a, c, g, or u
  misc_feature (9)..(9): n is a, c, g, or u
uuccgnganaggacgacagaauu

SEQ ID NO: 131595 - RNA, 24 nt, Artificial Sequence
  Synthetic
  misc_feature (7)..(7): n is a, c, g, or u
  misc_feature (10)..(10): n is a, c, g, or u
uuuccgnganaggacgacagaauu

SEQ ID NO: 131596 - RNA, 18 nt, Artificial Sequence
  Synthetic
  misc_feature (2)..(2): n is a, c, g, or u
angaaggaguuugccauu

SEQ ID NO: 131597 - RNA, 19 nt, Artificial Sequence
  Synthetic
  misc_feature (3)..(3): n is a, c, g, or u
aangaaggaguuugccauu

SEQ ID NO: 131598 - RNA, 20 nt, Artificial Sequence
  Synthetic
  misc_feature (4)..(4): n is a, c, g, or u
aaangaaggaguuugccauu

SEQ ID NO: 131599 - RNA, 23 nt, Artificial Sequence
  Synthetic
  misc_feature (7)..(7): n is a, c, g, or u
aggaaangaaggaguuugccauu

SEQ ID NO: 131600 - RNA, 24 nt, Artificial Sequence
  Synthetic
  misc_feature (8)..(8): n is a, c, g, or u
uaggaaangaaggaguuugccauu

SEQ ID NO: 131601 - RNA, 18 nt, Artificial Sequence
  Synthetic
  misc_feature (1)..(1): n is a, c, g, or u
  misc_feature (10)..(10): n is a, c, g, or u
naaucuucunuuuucauu

SEQ ID NO: 131602 - RNA, 19 nt, Artificial Sequence
  Synthetic
  misc_feature (2)..(2): n is a, c, g, or u
  misc_feature (11)..(11): n is a, c, g, or u
unaaucuucunuuuucauu

SEQ ID NO: 131603 - RNA, 20 nt, Artificial Sequence
  Synthetic
  misc_feature (3)..(3): n is a, c, g, or u
  misc_feature (12)..(12): n is a, c, g, or u
uunaaucuucunuuuucauu

SEQ ID NO: 131604 - RNA, 21 nt, Artificial Sequence
  Synthetic
  misc_feature (4)..(4): n is a, c, g, or u
  misc_feature (13)..(13): n is a, c, g, or u
uuunaaucuucunuuuucauu

SEQ ID NO: 131605 - RNA, 22 nt, Artificial Sequence
  Synthetic
  misc_feature (5)..(5): n is a, c, g, or u
  misc_feature (14)..(14): n is a, c, g, or u
auuunaaucuucunuuuucauu

SEQ ID NO: 131606 - RNA, 23 nt, Artificial Sequence
  Synthetic
  misc_feature (6)..(6): n is a, c, g, or u
  misc_feature (15)..(15): n is a, c, g, or u
aauuunaaucuucunuuuucauu

SEQ ID NO: 131607 - RNA, 24 nt, Artificial Sequence
  Synthetic
  misc_feature (7)..(7): n is a, c, g, or u
  misc_feature (16)..(16): n is a, c, g, or u
uaauuunaaucuucunuuuucauu

SEQ ID NO: 131608 - RNA, 18 nt, Artificial Sequence
  Synthetic
aguuugccauucaggauu

SEQ ID NO: 131609 - RNA, 21 nt, Artificial Sequence
  Synthetic
aggaguuugccauucaggauu

SEQ ID NO: 131610 - RNA, 22 nt, Artificial Sequence
  Synthetic
aaggaguuugccauucaggauu

SEQ ID NO: 131611 - RNA, 24 nt, Artificial Sequence
  Synthetic
  misc_feature (1)..(1): n is a, c, g, or u
ngaaggaguuugccauucaggauu

SEQ ID NO: 131612 - RNA, 19 nt, Artificial Sequence
  Synthetic
aggagguuggugagugauu

SEQ ID NO: 131613 - RNA, 20 nt, Artificial Sequence
  Synthetic
caggagguuggugagugauu

SEQ ID NO: 131614 - RNA, 18 nt, Artificial Sequence
  Synthetic
  misc_feature (7)..(7): n is a, c, g, or u
aaauugnugacaccuauu

SEQ ID NO: 131615 - RNA, 19 nt, Artificial Sequence
  Synthetic
  misc_feature (8)..(8): n is a, c, g, or u
caaauugnugacaccuauu

SEQ ID NO: 131616 - RNA, 20 nt, Artificial Sequence
  Synthetic
  misc_feature (9)..(9): n is a, c, g, or u
acaaauugnugacaccuauu

SEQ ID NO: 131617 - RNA, 21 nt, Artificial Sequence
  Synthetic
  misc_feature (1)..(1): n is a, c, g, or u
  misc_feature (10)..(10): n is a, c, g, or u
nacaaauugnugacaccuauu

SEQ ID NO: 131618 - RNA, 22 nt, Artificial Sequence
  Synthetic
  misc_feature (2)..(2): n is a, c, g, or u
  misc_feature (11)..(11): n is a, c, g, or u
cnacaaauugnugacaccuauu

SEQ ID NO: 131619 - RNA, 23 nt, Artificial Sequence
  Synthetic
  misc_feature (3)..(3): n is a, c, g, or u
  misc_feature (12)..(12): n is a, c, g, or u
ccnacaaauugnugacaccuauu

SEQ ID NO: 131620 - RNA, 18 nt, Artificial Sequence
  Synthetic
  misc_feature (5)..(5): n is a, c, g, or u
caauncuuugacauacuu

SEQ ID NO: 131621 - RNA, 19 nt, Artificial Sequence
  Synthetic
  misc_feature (6)..(6): n is a, c, g, or u
acaauncuuugacauacuu

SEQ ID NO: 131622 - RNA, 20 nt, Artificial Sequence
  Synthetic
  misc_feature (7)..(7): n is a, c, g, or u
cacaauncuuugacauacuu

SEQ ID NO: 131623 - RNA, 21 nt, Artificial Sequence
  Synthetic
  misc_feature (8)..(8): n is a, c, g, or u
ccacaauncuuugacauacuu

SEQ ID NO: 131624 - RNA, 22 nt, Artificial Sequence
  Synthetic
  misc_feature (9)..(9): n is a, c, g, or u
cccacaauncuuugacauacuu

SEQ ID NO: 131625 - RNA, 23 nt, Artificial Sequence
  Synthetic
  misc_feature (10)..(10): n is a, c, g, or u
acccacaauncuuugacauacuu

SEQ ID NO: 131626 - RNA, 18 nt, Artificial Sequence
  Synthetic
  misc_feature (1)..(1): n is a, c, g, or u
  misc_feature (4)..(4): n is a, c, g, or u
  misc_feature (7)..(7): n is a, c, g, or u
ngunaanuuucccaccuu

SEQ ID NO: 131627 - RNA, 19 nt, Artificial Sequence
  Synthetic
  misc_feature (2)..(2): n is a, c, g, or u
  misc_feature (5)..(5): n is a, c, g, or u
  misc_feature (8)..(8): n is a, c, g, or u
cngunaanuuucccaccuu

SEQ ID NO: 131628 - RNA, 20 nt, Artificial Sequence
  Synthetic
  misc_feature (3)..(3): n is a, c, g, or u
  misc_feature (6)..(6): n is a, c, g, or u
  misc_feature (9)..(9): n is a, c, g, or u
ccngunaanuuucccaccuu

SEQ ID NO: 131629 - RNA, 21 nt, Artificial Sequence
  Synthetic
  misc_feature (4)..(4): n is a, c, g, or u
  misc_feature (7)..(7): n is a, c, g, or u
  misc_feature (10)..(10): n is a, c, g, or u
cccngunaanuuucccaccuu

SEQ ID NO: 131630 - RNA, 23 nt, Artificial Sequence
  Synthetic
  misc_feature (6)..(6): n is a, c, g, or u
  misc_feature (9)..(9): n is a, c, g, or u
  misc_feature (12)..(12): n is a, c, g, or u
agcccngunaanuuucccaccuu

SEQ ID NO: 131631 - RNA, 24 nt, Artificial Sequence
  Synthetic
  misc_feature (7)..(7): n is a, c, g, or u
  misc_feature (10)..(10): n is a, c, g, or u
  misc_feature (13)..(13): n is a, c, g, or u
aagcccngunaanuuucccaccuu

SEQ ID NO: 131632 - RNA, 23 nt, Artificial Sequence
  Synthetic
aggacaaacgggcaacauaccuu

SEQ ID NO: 131633 - RNA, 18 nt, Artificial Sequence
  Synthetic
uuuacuuagaaaggccuu

SEQ ID NO: 131634 - RNA, 20 nt, Artificial Sequence
  Synthetic
uguuuacuuagaaaggccuu

SEQ ID NO: 131635 - RNA, 21 nt, Artificial Sequence
  Synthetic
cuguuuacuuagaaaggccuu

SEQ ID NO: 131636 - RNA, 22 nt, Artificial Sequence
  Synthetic
acuguuuacuuagaaaggccuu

SEQ ID NO: 131637 - RNA, 23 nt, Artificial Sequence
  Synthetic
uacuguuuacuuagaaaggccuu

SEQ ID NO: 131638 - RNA, 24 nt, Artificial Sequence
  Synthetic
  misc_feature (1)..(1): n is a, c, g, or u
nuacuguuuacuuagaaaggccuu

SEQ ID NO: 131639 - RNA, 18 nt, Artificial Sequence
  Synthetic
caggagacucuaaggcuu

SEQ ID NO: 131640 - RNA, 19 nt, Artificial Sequence
  Synthetic
ucaggagacucuaaggcuu

SEQ ID NO: 131641 - RNA, 20 nt, Artificial Sequence
  Synthetic
cucaggagacucuaaggcuu

SEQ ID NO: 131642 - RNA, 22 nt, Artificial Sequence
  Synthetic
ugcucaggagacucuaaggcuu

SEQ ID NO: 131643 - RNA, 23 nt, Artificial Sequence
  Synthetic
augcucaggagacucuaaggcuu

SEQ ID NO: 131644 - RNA, 24 nt, Artificial Sequence
  Synthetic
aaugcucaggagacucuaaggcuu

SEQ ID NO: 131645 - RNA, 18 nt, Artificial Sequence
  Synthetic
  misc_feature (5)..(5): n is a, c, g, or u
cccungaugcuggaucuu

SEQ ID NO: 131646 - RNA, 19 nt, Artificial Sequence
  Synthetic
  misc_feature (6)..(6): n is a, c, g, or u
ucccungaugcuggaucuu

SEQ ID NO: 131647 - RNA, 20 nt, Artificial Sequence
  Synthetic
  misc_feature (7)..(7): n is a, c, g, or u
aucccungaugcuggaucuu

SEQ ID NO: 131648 - RNA, 18 nt, Artificial Sequence
  Synthetic
ugaggaugacugucucuu

SEQ ID NO: 131649 - RNA, 19 nt, Artificial Sequence
  Synthetic
cugaggaugacugucucuu

SEQ ID NO: 131650 - RNA, 20 nt, Artificial Sequence
  Synthetic
ccugaggaugacugucucuu

SEQ ID NO: 131651 - RNA, 18 nt, Artificial Sequence
  Synthetic
  misc_feature (2)..(2): n is a, c, g, or u
cnuuaaacacacagucuu

SEQ ID NO: 131652 - RNA, 19 nt, Artificial Sequence
  Synthetic
  misc_feature (3)..(3): n is a, c, g, or u
ucnuuaaacacacagucuu

SEQ ID NO: 131653 - RNA, 21 nt, Artificial Sequence
  Synthetic
  misc_feature (5)..(5): n is a, c, g, or u
agucnuuaaacacacagucuu

SEQ ID NO: 131654 - RNA, 22 nt, Artificial Sequence
  Synthetic
  misc_feature (6)..(6): n is a, c, g, or u
cagucnuuaaacacacagucuu

SEQ ID NO: 131655 - RNA, 23 nt, Artificial Sequence
  Synthetic
  misc_feature (7)..(7): n is a, c, g, or u
ccagucnuuaaacacacagucuu

SEQ ID NO: 131656 - RNA, 24 nt, Artificial Sequence
  Synthetic
  misc_feature (8)..(8): n is a, c, g, or u
cccagucnuuaaacacacagucuu

SEQ ID NO: 131657 - RNA, 18 nt, Artificial Sequence
  Synthetic
  misc_feature (10)..(10): n is a, c, g, or u
cccgcgaagnauccaguu

SEQ ID NO: 131658 - RNA, 19 nt, Artificial Sequence
  Synthetic
  misc_feature (11)..(11): n is a, c, g, or u
ucccgcgaagnauccaguu

SEQ ID NO: 131659 - RNA, 18 nt, Artificial Sequence
  Synthetic
caggaucugaugggcguu

SEQ ID NO: 131660 - RNA, 22 nt, Artificial Sequence
  Synthetic
ugggcaggaucugaugggcguu

SEQ ID NO: 131661 - RNA, 23 nt, Artificial Sequence
  Synthetic
uugggcaggaucugaugggcguu

SEQ ID NO: 131662 - RNA, 24 nt, Artificial Sequence
  Synthetic
cuugggcaggaucugaugggcguu

SEQ ID NO: 131663 - RNA, 19 nt, Artificial Sequence
  Synthetic
ugauaagauaggggcauuu

SEQ ID NO: 131664 - RNA, 20 nt, Artificial Sequence
  Synthetic
uugauaagauaggggcauuu

SEQ ID NO: 131665 - RNA, 18 nt, Artificial Sequence
  Synthetic
uaaacccuaacaaaacaa

SEQ ID NO: 131666 - RNA, 19 nt, Artificial Sequence
  Synthetic
uuaaacccuaacaaaacaa

SEQ ID NO: 131667 - RNA, 20 nt, Artificial Sequence
  Synthetic
uuuaaacccuaacaaaacaa

SEQ ID NO: 131668 - RNA, 21 nt, Artificial Sequence
  Synthetic
auuuaaacccuaacaaaacaa

SEQ ID NO: 131669 - RNA, 22 nt, Artificial Sequence
  Synthetic
cauuuaaacccuaacaaaacaa

SEQ ID NO: 131670 - RNA, 23 nt, Artificial Sequence
  Synthetic
acauuuaaacccuaacaaaacaa

SEQ ID NO: 131671 - RNA, 24 nt, Artificial Sequence
  Synthetic
uacauuuaaacccuaacaaaacaa

SEQ ID NO: 131672 - RNA, 18 nt, Artificial Sequence
  Synthetic
  misc_feature (11)..(12): n is a, c, g, or u
ccacuggccannagccaa

SEQ ID NO: 131673 - RNA, 19 nt, Artificial Sequence
  Synthetic
  misc_feature (12)..(13): n is a, c, g, or u
accacuggccannagccaa

SEQ ID NO: 131674 - RNA, 22 nt, Artificial Sequence
  Synthetic
  misc_feature (15)..(16): n is a, c, g, or u
aggaccacuggccannagccaa

SEQ ID NO: 131675 - RNA, 23 nt, Artificial Sequence
  Synthetic
  misc_feature (16)..(17): n is a, c, g, or u
aaggaccacuggccannagccaa

SEQ ID NO: 131676 - RNA, 24 nt, Artificial Sequence
  Synthetic
  misc_feature (17)..(18): n is a, c, g, or u
caaggaccacuggccannagccaa

SEQ ID NO: 131677 - RNA, 19 nt, Artificial Sequence
  Synthetic
  misc_feature (8)..(8): n is a, c, g, or u
ugcuaggnuguacugccaa

SEQ ID NO: 131678 - RNA, 20 nt, Artificial Sequence
  Synthetic
  misc_feature (9)..(9): n is a, c, g, or u
cugcuaggnuguacugccaa

SEQ ID NO: 131679 - RNA, 18 nt, Artificial Sequence
  Synthetic
  misc_feature (16)..(16): n is a, c, g, or u
aggaggcuguaggcanaa

SEQ ID NO: 131680 - RNA, 19 nt, Artificial Sequence
  Synthetic
  misc_feature (17)..(17): n is a, c, g, or u
uaggaggcuguaggcanaa

SEQ ID NO: 131681 - RNA, 20 nt, Artificial Sequence
  Synthetic
  misc_feature (18)..(18): n is a, c, g, or u
uuaggaggcuguaggcanaa

SEQ ID NO: 131682 - RNA, 21 nt, Artificial Sequence
  Synthetic
  misc_feature (19)..(19): n is a, c, g, or u
auuaggaggcuguaggcanaa

SEQ ID NO: 131683 - RNA, 22 nt, Artificial Sequence
  Synthetic
  misc_feature (20)..(20): n is a, c, g, or u
uauuaggaggcuguaggcanaa

SEQ ID NO: 131684 - RNA, 24 nt, Artificial Sequence
  Synthetic
  misc_feature (22)..(22): n is a, c, g, or u
uguauuaggaggcuguaggcanaa

SEQ ID NO: 131685 - RNA, 18 nt, Artificial Sequence
  Synthetic
  misc_feature (7)..(7): n is a, c, g, or u
  misc_feature (16)..(16): n is a, c, g, or u
ugaaaanagaagauunaa

SEQ ID NO: 131686 - RNA, 19 nt, Artificial Sequence
  Synthetic
  misc_feature (8)..(8): n is a, c, g, or u
  misc_feature (17)..(17): n is a, c, g, or u
augaaaanagaagauunaa

SEQ ID NO: 131687 - RNA, 20 nt, Artificial Sequence
  Synthetic
  misc_feature (9)..(9): n is a, c, g, or u
  misc_feature (18)..(18): n is a, c, g, or u
aaugaaaanagaagauunaa

SEQ ID NO: 131688 - RNA, 21 nt, Artificial Sequence
  Synthetic
  misc_feature (10)..(10): n is a, c, g, or u
  misc_feature (19)..(19): n is a, c, g, or u
aaaugaaaanagaagauunaa

SEQ ID NO: 131689 - RNA, 22 nt, Artificial Sequence
  Synthetic
  misc_feature (11)..(11): n is a, c, g, or u
  misc_feature (20)..(20): n is a, c, g, or u
uaaaugaaaanagaagauunaa

SEQ ID NO: 131690 - RNA, 24 nt, Artificial Sequence
  Synthetic
  misc_feature (13)..(13): n is a, c, g, or u
  misc_feature (22)..(22): n is a, c, g, or u
uguaaaugaaaanagaagauunaa

SEQ ID NO: 131691 - RNA, 18 nt, Artificial Sequence
  Synthetic
  misc_feature (12)..(12): n is a, c, g, or u
auuccaggaucnacaaca

SEQ ID NO: 131692 - RNA, 19 nt, Artificial Sequence
  Synthetic
  misc_feature (13)..(13): n is a, c, g, or u
aauuccaggaucnacaaca

SEQ ID NO: 131693 - RNA, 20 nt, Artificial Sequence
  Synthetic
  misc_feature (14)..(14): n is a, c, g, or u
uaauuccaggaucnacaaca

SEQ ID NO: 131694 - RNA, 21 nt, Artificial Sequence
  Synthetic
  misc_feature (15)..(15): n is a, c, g, or u
cuaauuccaggaucnacaaca

SEQ ID NO: 131695 - RNA, 22 nt, Artificial Sequence
  Synthetic
  misc_feature (16)..(16): n is a, c, g, or u
ucuaauuccaggaucnacaaca

SEQ ID NO: 131696 - RNA, 23 nt, Artificial Sequence
  Synthetic
  misc_feature (17)..(17): n is a, c, g, or u
cucuaauuccaggaucnacaaca

SEQ ID NO: 131697 - RNA, 24 nt, Artificial Sequence
  Synthetic
  misc_feature (18)..(18): n is a, c, g, or u
ccucuaauuccaggaucnacaaca

SEQ ID NO: 131698 - RNA, 18 nt, Artificial Sequence
  Synthetic
acagucauccucaggcca

SEQ ID NO: 131699 - RNA, 20 nt, Artificial Sequence
  Synthetic
agacagucauccucaggcca

SEQ ID NO: 131700 - RNA, 18 nt, Artificial Sequence
  Synthetic
  misc_feature (9)..(9): n is a, c, g, or u
  misc_feature (12)..(12): n is a, c, g, or u
aguuggggnacnuugcca

SEQ ID NO: 131701 - RNA, 19 nt, Artificial Sequence
  Synthetic
  misc_feature (10)..(10): n is a, c, g, or u
  misc_feature (13)..(13): n is a, c, g, or u
aaguuggggnacnuugcca

SEQ ID NO: 131702 - RNA, 22 nt, Artificial Sequence
  Synthetic
  misc_feature (13)..(13): n is a, c, g, or u
  misc_feature (16)..(16): n is a, c, g, or u
uggaaguuggggnacnuugcca

SEQ ID NO: 131703 - RNA, 23 nt, Artificial Sequence
  Synthetic
  misc_feature (14)..(14): n is a, c, g, or u
  misc_feature (17)..(17): n is a, c, g, or u
uuggaaguuggggnacnuugcca

SEQ ID NO: 131704 - RNA, 24 nt, Artificial Sequence
  Synthetic
  misc_feature (15)..(15): n is a, c, g, or u
  misc_feature (18)..(18): n is a, c, g, or u
auuggaaguuggggnacnuugcca

SEQ ID NO: 131705 - RNA, 19 nt, Artificial Sequence
  Synthetic
  misc_feature (6)..(6): n is a, c, g, or u
  misc_feature (14)..(14): n is a, c, g, or u
  misc_feature (16)..(17): n is a, c, g, or u
agauunuauccuancnnca

SEQ ID NO: 131706 - RNA, 20 nt, Artificial Sequence
  Synthetic
  misc_feature (7)..(7): n is a, c, g, or u
  misc_feature (15)..(15): n is a, c, g, or u
  misc_feature (17)..(18): n is a, c, g, or u
uagauunuauccuancnnca

SEQ ID NO: 131707 - RNA, 21 nt, Artificial Sequence
  Synthetic
  misc_feature (8)..(8): n is a, c, g, or u
  misc_feature (16)..(16): n is a, c, g, or u
  misc_feature (18)..(19): n is a, c, g, or u
cuagauunuauccuancnnca

SEQ ID NO: 131708 - RNA, 23 nt, Artificial Sequence
  Synthetic
  misc_feature (10)..(10): n is a, c, g, or u
  misc_feature (18)..(18): n is a, c, g, or u
  misc_feature (20)..(21): n is a, c, g, or u
ugcuagauunuauccuancnnca

SEQ ID NO: 131709 - RNA, 24 nt, Artificial Sequence
  Synthetic
  misc_feature (11)..(11): n is a, c, g, or u
  misc_feature (19)..(19): n is a, c, g, or u
  misc_feature (21)..(22): n is a, c, g, or u
cugcuagauunuauccuancnnca

SEQ ID NO: 131710 - RNA, 18 nt, Artificial Sequence
  Synthetic
  misc_feature (13)..(13): n is a, c, g, or u
accuuauuauccngauca

SEQ ID NO: 131711 - RNA, 19 nt, Artificial Sequence
  Synthetic
  misc_feature (14)..(14): n is a, c, g, or u
aaccuuauuauccngauca

SEQ ID NO: 131712 - RNA, 20 nt, Artificial Sequence
  Synthetic
  misc_feature (15)..(15): n is a, c, g, or u
aaaccuuauuauccngauca

SEQ ID NO: 131713 - RNA, 21 nt, Artificial Sequence
  Synthetic
  misc_feature (16)..(16): n is a, c, g, or u
uaaaccuuauuauccngauca

SEQ ID NO: 131714 - RNA, 22 nt, Artificial Sequence
  Synthetic
  misc_feature (17)..(17): n is a, c, g, or u
uuaaaccuuauuauccngauca

SEQ ID NO: 131715 - RNA, 23 nt, Artificial Sequence
  Synthetic
  misc_feature (18)..(18): n is a, c, g, or u
auuaaaccuuauuauccngauca

SEQ ID NO: 131716 - RNA, 24 nt, Artificial Sequence
  Synthetic
  misc_feature (1)..(1): n is a, c, g, or u
  misc_feature (19)..(19): n is a, c, g, or u
nauuaaaccuuauuauccngauca

SEQ ID NO: 131717 - RNA, 18 nt, Artificial Sequence
  Synthetic
uaguauuccuuggacuca

SEQ ID NO: 131718 - RNA, 19 nt, Artificial Sequence
  Synthetic
uuaguauuccuuggacuca

SEQ ID NO: 131719 - RNA, 19 nt, Artificial Sequence
  Synthetic
  misc_feature (16)..(16): n is a, c, g, or u
ugcauucggagccaanuca

SEQ ID NO: 131720 - RNA, 20 nt, Artificial Sequence
  Synthetic
  misc_feature (17)..(17): n is a, c, g, or u
cugcauucggagccaanuca

SEQ ID NO: 131721 - RNA, 18 nt, Artificial Sequence
  Synthetic
aucucuccaccucuaaga

SEQ ID NO: 131722 - RNA, 19 nt, Artificial Sequence
  Synthetic
caucucuccaccucuaaga

SEQ ID NO: 131723 - RNA, 20 nt, Artificial Sequence
  Synthetic
ccaucucuccaccucuaaga

SEQ ID NO: 131724 - RNA, 21 nt, Artificial Sequence
  Synthetic
cccaucucuccaccucuaaga

SEQ ID NO: 131725 - RNA, 22 nt, Artificial Sequence
  Synthetic
ucccaucucuccaccucuaaga

SEQ ID NO: 131726 - RNA, 23 nt, Artificial Sequence
  Synthetic
cucccaucucuccaccucuaaga

SEQ ID NO: 131727 - RNA, 24 nt, Artificial Sequence
  Synthetic
acucccaucucuccaccucuaaga

SEQ ID NO: 131728 - RNA, 18 nt, Artificial Sequence
  Synthetic
  misc_feature (6)..(6): n is a, c, g, or u
aggagnugggggaggaga

SEQ ID NO: 131729 - RNA, 22 nt, Artificial Sequence
  Synthetic
  misc_feature (10)..(10): n is a, c, g, or u
ugggaggagnugggggaggaga

SEQ ID NO: 131730 - RNA, 23 nt, Artificial Sequence
  Synthetic
  misc_feature (11)..(11): n is a, c, g, or u
cugggaggagnugggggaggaga

SEQ ID NO: 131731 - RNA, 24 nt, Artificial Sequence
  Synthetic
  misc_feature (12)..(12): n is a, c, g, or u
acugggaggagnugggggaggaga

SEQ ID NO: 131732 - RNA, 18 nt, Artificial Sequence
  Synthetic
  misc_feature (15)..(15): n is a, c, g, or u
ccuaacaaaacaaanaga

SEQ ID NO: 131733 - RNA, 19 nt, Artificial Sequence
  Synthetic
  misc_feature (16)..(16): n is a, c, g, or u
cccuaacaaaacaaanaga

SEQ ID NO: 131734 - RNA, 20 nt, Artificial Sequence
  Synthetic
  misc_feature (17)..(17): n is a, c, g, or u
acccuaacaaaacaaanaga

SEQ ID NO: 131735 - RNA, 21 nt, Artificial Sequence
  Synthetic
  misc_feature (18)..(18): n is a, c, g, or u
aacccuaacaaaacaaanaga

SEQ ID NO: 131736 - RNA, 22 nt, Artificial Sequence
  Synthetic
  misc_feature (19)..(19): n is a, c, g, or u
aaacccuaacaaaacaaanaga

SEQ ID NO: 131737 - RNA, 23 nt, Artificial Sequence
  Synthetic
  misc_feature (20)..(20): n is a, c, g, or u
uaaacccuaacaaaacaaanaga

SEQ ID NO: 131738 - RNA, 24 nt, Artificial Sequence
  Synthetic
  misc_feature (21)..(21): n is a, c, g, or u
uuaaacccuaacaaaacaaanaga

SEQ ID NO: 131739 - RNA, 18 nt, Artificial Sequence
  Synthetic
  misc_feature (13)..(13): n is a, c, g, or u
agauccagcaucnaggga

SEQ ID NO: 131740 - RNA, 19 nt, Artificial Sequence
  Synthetic
  misc_feature (14)..(14): n is a, c, g, or u
aagauccagcaucnaggga

SEQ ID NO: 131741 - RNA, 20 nt, Artificial Sequence
  Synthetic
  misc_feature (1)..(1): n is a, c, g, or u
  misc_feature (15)..(15): n is a, c, g, or u
naagauccagcaucnaggga

SEQ ID NO: 131742 - RNA, 22 nt, Artificial Sequence
  Synthetic
  misc_feature (3)..(3): n is a, c, g, or u
  misc_feature (17)..(17): n is a, c, g, or u
ugnaagauccagcaucnaggga

SEQ ID NO: 131743 - RNA, 23 nt, Artificial Sequence
  Synthetic
  misc_feature (4)..(4): n is a, c, g, or u
  misc_feature (18)..(18): n is a, c, g, or u
uugnaagauccagcaucnaggga

SEQ ID NO: 131744 - RNA, 24 nt, Artificial Sequence
  Synthetic
  misc_feature (5)..(5): n is a, c, g, or u
  misc_feature (19)..(19): n is a, c, g, or u
uuugnaagauccagcaucnaggga

SEQ ID NO: 131745 - RNA, 18 nt, Artificial Sequence
  Synthetic
  misc_feature (11)..(11): n is a, c, g, or u
cugggaggagnuggggga

SEQ ID NO: 131746 - RNA, 19 nt, Artificial Sequence
  Synthetic
  misc_feature (12)..(12): n is a, c, g, or u
acugggaggagnuggggga

SEQ ID NO: 131747 - RNA, 21 nt, Artificial Sequence
  Synthetic
  misc_feature (1)..(1): n is a, c, g, or u
  misc_feature (14)..(14): n is a, c, g, or u
ngacugggaggagnuggggga

SEQ ID NO: 131748 - RNA, 22 nt, Artificial Sequence
  Synthetic
  misc_feature (2)..(2): n is a, c, g, or u
  misc_feature (15)..(15): n is a, c, g, or u
angacugggaggagnuggggga

SEQ ID NO: 131749 - RNA, 23 nt, Artificial Sequence
  Synthetic
  misc_feature (3)..(3): n is a, c, g, or u
  misc_feature (16)..(16): n is a, c, g, or u
aangacugggaggagnuggggga

SEQ ID NO: 131750 - RNA, 24 nt, Artificial Sequence
  Synthetic
  misc_feature (4)..(4): n is a, c, g, or u
  misc_feature (17)..(17): n is a, c, g, or u
uaangacugggaggagnuggggga

SEQ ID NO: 131751 - RNA, 18 nt, Artificial Sequence
  Synthetic
  misc_feature (7)..(7): n is a, c, g, or u
uuucagnuauauggauga

SEQ ID NO: 131752 - RNA, 19 nt, Artificial Sequence
  Synthetic
  misc_feature (8)..(8): n is a, c, g, or u
cuuucagnuauauggauga

SEQ ID NO: 131753 - RNA, 22 nt, Artificial Sequence
  Synthetic
  misc_feature (11)..(11): n is a, c, g, or u
uggcuuucagnuauauggauga

SEQ ID NO: 131754 - RNA, 23 nt, Artificial Sequence
  Synthetic
  misc_feature (12)..(12): n is a, c, g, or u
uuggcuuucagnuauauggauga

SEQ ID NO: 131755 - RNA, 24 nt, Artificial Sequence
  Synthetic
  misc_feature (13)..(13): n is a, c, g, or u
uuuggcuuucagnuauauggauga

SEQ ID NO: 131756 - RNA, 18 nt, Artificial Sequence
  Synthetic
  misc_feature (17)..(17): n is a, c, g, or u
ucacuguaaaugaaaana

SEQ ID NO: 131757 - RNA, 19 nt, Artificial Sequence
  Synthetic
  misc_feature (18)..(18): n is a, c, g, or u
cucacuguaaaugaaaana

SEQ ID NO: 131758 - RNA, 20 nt, Artificial Sequence
  Synthetic
  misc_feature (19)..(19): n is a, c, g, or u
ucucacuguaaaugaaaana

SEQ ID NO: 131759 - RNA, 21 nt, Artificial Sequence
  Synthetic
  misc_feature (20)..(20): n is a, c, g, or u
cucucacuguaaaugaaaana

SEQ ID NO: 131760 - RNA, 22 nt, Artificial Sequence
  Synthetic
  misc_feature (21)..(21): n is a, c, g, or u
ccucucacuguaaaugaaaana

SEQ ID NO: 131761 - RNA, 23 nt, Artificial Sequence
  Synthetic
  misc_feature (22)..(22): n is a, c, g, or u
cccucucacuguaaaugaaaana

SEQ ID NO: 131762 - RNA, 18 nt, Artificial Sequence
  Synthetic
uggacauugacccuuaua

SEQ ID NO: 131763 - RNA, 19 nt, Artificial Sequence
  Synthetic
auggacauugacccuuaua

SEQ ID NO: 131764 - RNA, 20 nt, Artificial Sequence
  Synthetic
cauggacauugacccuuaua

SEQ ID NO: 131765 - RNA, 18 nt, Artificial Sequence
  Synthetic
acaaggccuuucuaagua

SEQ ID NO: 131766 - RNA, 19 nt, Artificial Sequence
  Synthetic
uacaaggccuuucuaagua

SEQ ID NO: 131767 - RNA, 20 nt, Artificial Sequence
  Synthetic
uuacaaggccuuucuaagua

SEQ ID NO: 131768 - RNA, 21 nt, Artificial Sequence
  Synthetic
cuuacaaggccuuucuaagua

SEQ ID NO: 131769 - RNA, 22 nt, Artificial Sequence
  Synthetic
acuuacaaggccuuucuaagua

SEQ ID NO: 131770 - RNA, 23 nt, Artificial Sequence
  Synthetic
aacuuacaaggccuuucuaagua

SEQ ID NO: 131771 - RNA, 24 nt, Artificial Sequence
  Synthetic
caacuuacaaggccuuucuaagua

SEQ ID NO: 131772 - RNA, 19 nt, Artificial Sequence
  Synthetic
  misc_feature (7)..(7): n is a, c, g, or u
agcaucnagggaucuagua

SEQ ID NO: 131773 - RNA, 20 nt, Artificial Sequence
  Synthetic
  misc_feature (8)..(8): n is a, c, g, or u
cagcaucnagggaucuagua

SEQ ID NO: 131774 - RNA, 18 nt, Artificial Sequence
  Synthetic
  misc_feature (9)..(9): n is a, c, g, or u
  misc_feature (15)..(15): n is a, c, g, or u
uauuauccngaucangua

SEQ ID NO: 131775 - RNA, 19 nt, Artificial Sequence
  Synthetic
  misc_feature (10)..(10): n is a, c, g, or u
  misc_feature (16)..(16): n is a, c, g, or u
uuauuauccngaucangua

SEQ ID NO: 131776 - RNA, 20 nt, Artificial Sequence
  Synthetic
  misc_feature (11)..(11): n is a, c, g, or u
  misc_feature (17)..(17): n is a, c, g, or u
cuuauuauccngaucangua

SEQ ID NO: 131777 - RNA, 21 nt, Artificial Sequence
  Synthetic
  misc_feature (12)..(12): n is a, c, g, or u
  misc_feature (18)..(18): n is a, c, g, or u
ccuuauuauccngaucangua

SEQ ID NO: 131778 - RNA, 22 nt, Artificial Sequence
  Synthetic
  misc_feature (13)..(13): n is a, c, g, or u
  misc_feature (19)..(19): n is a, c, g, or u
accuuauuauccngaucangua

SEQ ID NO: 131779 - RNA, 23 nt, Artificial Sequence
  Synthetic
  misc_feature (14)..(14): n is a, c, g, or u
  misc_feature (20)..(20): n is a, c, g, or u
aaccuuauuauccngaucangua

SEQ ID NO: 131780 - RNA, 24 nt, Artificial Sequence
  Synthetic
  misc_feature (15)..(15): n is a, c, g, or u
  misc_feature (21)..(21): n is a, c, g, or u
aaaccuuauuauccngaucangua

SEQ ID NO: 131781 - RNA, 18 nt, Artificial Sequence
  Synthetic
  misc_feature (4)..(4): n is a, c, g, or u
  misc_feature (10)..(10): n is a, c, g, or u
  misc_feature (16)..(16): n is a, c, g, or u
aganacuguncuuganua

SEQ ID NO: 131782 - RNA, 20 nt, Artificial Sequence
  Synthetic
  misc_feature (6)..(6): n is a, c, g, or u
  misc_feature (12)..(12): n is a, c, g, or u
  misc_feature (18)..(18): n is a, c, g, or u
agaganacuguncuuganua

SEQ ID NO: 131783 - RNA, 21 nt, Artificial Sequence
  Synthetic
  misc_feature (7)..(7): n is a, c, g, or u
  misc_feature (13)..(13): n is a, c, g, or u
  misc_feature (19)..(19): n is a, c, g, or u
aagaganacuguncuuganua

SEQ ID NO: 131784 - RNA, 24 nt, Artificial Sequence
  Synthetic
  misc_feature (10)..(10): n is a, c, g, or u
  misc_feature (16)..(16): n is a, c, g, or u
  misc_feature (22)..(22): n is a, c, g, or u
uggaagaganacuguncuuganua

SEQ ID NO: 131785 - RNA, 18 nt, Artificial Sequence
  Synthetic
  misc_feature (7)..(7): n is a, c, g, or u
  misc_feature (16)..(16): n is a, c, g, or u
ccuaaanuucaugggnua

SEQ ID NO: 131786 - RNA, 19 nt, Artificial Sequence
  Synthetic
  misc_feature (8)..(8): n is a, c, g, or u
  misc_feature (17)..(17): n is a, c, g, or u
cccuaaanuucaugggnua

SEQ ID NO: 131787 - RNA, 20 nt, Artificial Sequence
  Synthetic
  misc_feature (9)..(9): n is a, c, g, or u
  misc_feature (18)..(18): n is a, c, g, or u
ucccuaaanuucaugggnua

SEQ ID NO: 131788 - RNA, 21 nt, Artificial Sequence
  Synthetic
  misc_feature (10)..(10): n is a, c, g, or u
  misc_feature (19)..(19): n is a, c, g, or u
uucccuaaanuucaugggnua

SEQ ID NO: 131789 - RNA, 22 nt, Artificial Sequence
  Synthetic
  misc_feature (11)..(11): n is a, c, g, or u
  misc_feature (20)..(20): n is a, c, g, or u
auucccuaaanuucaugggnua

SEQ ID NO: 131790 - RNA, 23 nt, Artificial Sequence
  Synthetic
  misc_feature (12)..(12): n is a, c, g, or u
  misc_feature (21)..(21): n is a, c, g, or u
uauucccuaaanuucaugggnua

SEQ ID NO: 131791 - RNA, 24 nt, Artificial Sequence
  Synthetic
  misc_feature (13)..(13): n is a, c, g, or u
  misc_feature (22)..(22): n is a, c, g, or u
uuauucccuaaanuucaugggnua

SEQ ID NO: 131792 - RNA, 18 nt, Artificial Sequence
  Synthetic
  misc_feature (5)..(5): n is a, c, g, or u
  misc_feature (8)..(8): n is a, c, g, or u
uacangangacauuauua

SEQ ID NO: 131793 - RNA, 19 nt, Artificial Sequence
  Synthetic
  misc_feature (6)..(6): n is a, c, g, or u
  misc_feature (9)..(9): n is a, c, g, or u
uuacangangacauuauua

SEQ ID NO: 131794 - RNA, 20 nt, Artificial Sequence
  Synthetic
  misc_feature (7)..(7): n is a, c, g, or u
  misc_feature (10)..(10): n is a, c, g, or u
uuuacangangacauuauua

SEQ ID NO: 131795 - RNA, 21 nt, Artificial Sequence
  Synthetic
  misc_feature (8)..(8): n is a, c, g, or u
  misc_feature (11)..(11): n is a, c, g, or u
auuuacangangacauuauua

SEQ ID NO: 131796 - RNA, 22 nt, Artificial Sequence
  Synthetic
  misc_feature (9)..(9): n is a, c, g, or u
  misc_feature (12)..(12): n is a, c, g, or u
cauuuacangangacauuauua

SEQ ID NO: 131797 - RNA, 23 nt, Artificial Sequence
  Synthetic
  misc_feature (10)..(10): n is a, c, g, or u
  misc_feature (13)..(13): n is a, c, g, or u
ucauuuacangangacauuauua

SEQ ID NO: 131798 - RNA, 24 nt, Artificial Sequence
  Synthetic
  misc_feature (11)..(11): n is a, c, g, or u
  misc_feature (14)..(14): n is a, c, g, or u
uucauuuacangangacauuauua

SEQ ID NO: 131799 - RNA, 21 nt, Artificial Sequence
  Synthetic
  misc_feature (11)..(11): n is a, c, g, or u
ugggcuuugcngcuccauuua

SEQ ID NO: 131800 - RNA, 22 nt, Artificial Sequence
  Synthetic
  misc_feature (12)..(12): n is a, c, g, or u
uugggcuuugcngcuccauuua

SEQ ID NO: 131801 - RNA, 23 nt, Artificial Sequence
  Synthetic
  misc_feature (13)..(13): n is a, c, g, or u
uuugggcuuugcngcuccauuua

SEQ ID NO: 131802 - RNA, 24 nt, Artificial Sequence
  Synthetic
  misc_feature (14)..(14): n is a, c, g, or u
uuuugggcuuugcngcuccauuua

SEQ ID NO: 131803 - RNA, 19 nt, Artificial Sequence
  Synthetic
  misc_feature (5)..(5): n is a, c, g, or u
  misc_feature (10)..(10): n is a, c, g, or u
  misc_feature (13)..(13): n is a, c, g, or u
agggnucacnccnccacac

SEQ ID NO: 131804 - RNA, 20 nt, Artificial Sequence
  Synthetic
  misc_feature (6)..(6): n is a, c, g, or u
  misc_feature (11)..(11): n is a, c, g, or u
  misc_feature (14)..(14): n is a, c, g, or u
cagggnucacnccnccacac

SEQ ID NO: 131805 - RNA, 21 nt, Artificial Sequence
  Synthetic
  misc_feature (7)..(7): n is a, c, g, or u
  misc_feature (12)..(12): n is a, c, g, or u
  misc_feature (15)..(15): n is a, c, g, or u
ccagggnucacnccnccacac

SEQ ID NO: 131806 - RNA, 18 nt, Artificial Sequence
  Synthetic
  misc_feature (4)..(4): n is a, c, g, or u
auunaugacucuagcuac

SEQ ID NO: 131807 - RNA, 19 nt, Artificial Sequence
  Synthetic
  misc_feature (5)..(5): n is a, c, g, or u
aauunaugacucuagcuac

SEQ ID NO: 131808 - RNA, 18 nt, Artificial Sequence
  Synthetic
aauucgcaguccccaacc

SEQ ID NO: 131809 - RNA, 19 nt, Artificial Sequence
  Synthetic
aaauucgcaguccccaacc

SEQ ID NO: 131810 - RNA, 20 nt, Artificial Sequence
  Synthetic
aaaauucgcaguccccaacc

SEQ ID NO: 131811 - RNA, 19 nt, Artificial Sequence
  Synthetic
agaggacucuuggacuccc

SEQ ID NO: 131812 - RNA, 20 nt, Artificial Sequence
  Synthetic
aagaggacucuuggacuccc

SEQ ID NO: 131813 - RNA, 18 nt, Artificial Sequence
  Synthetic
cgcccaucagauccugcc

SEQ ID NO: 131814 - RNA, 19 nt, Artificial Sequence
  Synthetic
acgcccaucagauccugcc

SEQ ID NO: 131815 - RNA, 20 nt, Artificial Sequence
  Synthetic
aacgcccaucagauccugcc

SEQ ID NO: 131816 - RNA, 18 nt, Artificial Sequence
  Synthetic
  misc_feature (13)..(13): n is a, c, g, or u
ccaagcucugcangaucc

SEQ ID NO: 131817 - RNA, 19 nt, Artificial Sequence
  Synthetic
  misc_feature (14)..(14): n is a, c, g, or u
accaagcucugcangaucc

SEQ ID NO: 131818 - RNA, 20 nt, Artificial Sequence
  Synthetic
  misc_feature (15)..(15): n is a, c, g, or u
caccaagcucugcangaucc

SEQ ID NO: 131819 - RNA, 21 nt, Artificial Sequence
  Synthetic
  misc_feature (16)..(16): n is a, c, g, or u
ccaccaagcucugcangaucc

SEQ ID NO: 131820 - RNA, 22 nt, Artificial Sequence
  Synthetic
  misc_feature (17)..(17): n is a, c, g, or u
uccaccaagcucugcangaucc

SEQ ID NO: 131821 - RNA, 23 nt, Artificial Sequence
  Synthetic
  misc_feature (18)..(18): n is a, c, g, or u
uuccaccaagcucugcangaucc

SEQ ID NO: 131822 - RNA, 24 nt, Artificial Sequence
  Synthetic
  misc_feature (1)..(1): n is a, c, g, or u
  misc_feature (19)..(19): n is a, c, g, or u
nuuccaccaagcucugcangaucc

SEQ ID NO: 131823 - RNA, 18 nt, Artificial Sequence
  Synthetic
  misc_feature (1)..(1): n is a, c, g, or u
nuuccuccuccugccucc

SEQ ID NO: 131824 - RNA, 19 nt, Artificial Sequence
  Synthetic
  misc_feature (2)..(2): n is a, c, g, or u
anuuccuccuccugccucc

SEQ ID NO: 131825 - RNA, 20 nt, Artificial Sequence
  Synthetic
  misc_feature (3)..(3): n is a, c, g, or u
canuuccuccuccugccucc

SEQ ID NO: 131826 - RNA, 21 nt, Artificial Sequence
  Synthetic
  misc_feature (1)..(1): n is a, c, g, or u
  misc_feature (4)..(4): n is a, c, g, or u
ncanuuccuccuccugccucc

SEQ ID NO: 131827 - RNA, 22 nt, Artificial Sequence
  Synthetic
  misc_feature (2)..(2): n is a, c, g, or u
  misc_feature (5)..(5): n is a, c, g, or u
ancanuuccuccuccugccucc

SEQ ID NO: 131828 - RNA, 23 nt, Artificial Sequence
  Synthetic
  misc_feature (3)..(3): n is a, c, g, or u
  misc_feature (6)..(6): n is a, c, g, or u
cancanuuccuccuccugccucc

SEQ ID NO: 131829 - RNA, 24 nt, Artificial Sequence
  Synthetic
  misc_feature (1)..(1): n is a, c, g, or u
  misc_feature (4)..(4): n is a, c, g, or u
  misc_feature (7)..(7): n is a, c, g, or u
ncancanuuccuccuccugccucc

SEQ ID NO: 131830 - RNA, 18 nt, Artificial Sequence
  Synthetic
cucaccaaccuccugucc

SEQ ID NO: 131831 - RNA, 19 nt, Artificial Sequence
  Synthetic
acucaccaaccuccugucc

SEQ ID NO: 131832 - RNA, 20 nt, Artificial Sequence
  Synthetic
cacucaccaaccuccugucc

SEQ ID NO: 131833 - RNA, 18 nt, Artificial Sequence
  Synthetic
uauguugcccguuugucc

SEQ ID NO: 131834 - RNA, 18 nt, Artificial Sequence
  Synthetic
uauuaggaggcuguaggc

SEQ ID NO: 131835 - RNA, 20 nt, Artificial Sequence
  Synthetic
uguauuaggaggcuguaggc

SEQ ID NO: 131836 - RNA, 18 nt, Artificial Sequence
  Synthetic
auaccuaugggagugggc

SEQ ID NO: 131837 - RNA, 19 nt, Artificial Sequence
  Synthetic
aauaccuaugggagugggc

SEQ ID NO: 131838 - RNA, 20 nt, Artificial Sequence
  Synthetic
aaauaccuaugggagugggc

SEQ ID NO: 131839 - RNA, 18 nt, Artificial Sequence
  Synthetic
uauuuuccugcugguggc

SEQ ID NO: 131840 - RNA, 20 nt, Artificial Sequence
  Synthetic
uguauuuuccugcugguggc

SEQ ID NO: 131841 - RNA, 21 nt, Artificial Sequence
  Synthetic
cuguauuuuccugcugguggc

SEQ ID NO: 131842 - RNA, 22 nt, Artificial Sequence
  Synthetic
  misc_feature (1)..(1): n is a, c, g, or u
ncuguauuuuccugcugguggc

SEQ ID NO: 131843 - RNA, 18 nt, Artificial Sequence
  Synthetic
  misc_feature (1)..(1): n is a, c, g, or u
ncacccgugugucuuggc

SEQ ID NO: 131844 - RNA, 19 nt, Artificial Sequence
  Synthetic
  misc_feature (2)..(2): n is a, c, g, or u
ancacccgugugucuuggc

SEQ ID NO: 131845 - RNA, 18 nt, Artificial Sequence
  Synthetic
  misc_feature (10)..(10): n is a, c, g, or u
  misc_feature (13)..(13): n is a, c, g, or u
acaauguggnuanccugc

SEQ ID NO: 131846 - RNA, 19 nt, Artificial Sequence
  Synthetic
  misc_feature (11)..(11): n is a, c, g, or u
  misc_feature (14)..(14): n is a, c, g, or u
cacaauguggnuanccugc

SEQ ID NO: 131847 - RNA, 20 nt, Artificial Sequence
  Synthetic
  misc_feature (12)..(12): n is a, c, g, or u
  misc_feature (15)..(15): n is a, c, g, or u
acacaauguggnuanccugc

SEQ ID NO: 131848 - RNA, 21 nt, Artificial Sequence
  Synthetic
  misc_feature (13)..(13): n is a, c, g, or u
  misc_feature (16)..(16): n is a, c, g, or u
uacacaauguggnuanccugc

SEQ ID NO: 131849 - RNA, 22 nt, Artificial Sequence
  Synthetic
  misc_feature (14)..(14): n is a, c, g, or u
  misc_feature (17)..(17): n is a, c, g, or u
uuacacaauguggnuanccugc

SEQ ID NO: 131850 - RNA, 23 nt, Artificial Sequence
  Synthetic
  misc_feature (15)..(15): n is a, c, g, or u
  misc_feature (18)..(18): n is a, c, g, or u
uuuacacaauguggnuanccugc

SEQ ID NO: 131851 - RNA, 24 nt, Artificial Sequence
  Synthetic
  misc_feature (16)..(16): n is a, c, g, or u
  misc_feature (19)..(19): n is a, c, g, or u
auuuacacaauguggnuanccugc

SEQ ID NO: 131852 - RNA, 18 nt, Artificial Sequence
  Synthetic
  misc_feature (14)..(14): n is a, c, g, or u
  misc_feature (17)..(17): n is a, c, g, or u
auucugucguccunucnc

SEQ ID NO: 131853 - RNA, 19 nt, Artificial Sequence
  Synthetic
  misc_feature (15)..(15): n is a, c, g, or u
  misc_feature (18)..(18): n is a, c, g, or u
aauucugucguccunucnc

SEQ ID NO: 131854 - RNA, 20 nt, Artificial Sequence
  Synthetic
  misc_feature (1)..(1): n is a, c, g, or u
  misc_feature (16)..(16): n is a, c, g, or u
  misc_feature (19)..(19): n is a, c, g, or u
naauucugucguccunucnc

SEQ ID NO: 131855 - RNA, 21 nt, Artificial Sequence
  Synthetic
  misc_feature (2)..(2): n is a, c, g, or u
  misc_feature (17)..(17): n is a, c, g, or u
  misc_feature (20)..(20): n is a, c, g, or u
anaauucugucguccunucnc

SEQ ID NO: 131856 - RNA, 23 nt, Artificial Sequence
  Synthetic
  misc_feature (4)..(4): n is a, c, g, or u
  misc_feature (19)..(19): n is a, c, g, or u
  misc_feature (22)..(22): n is a, c, g, or u
uganaauucugucguccunucnc

SEQ ID NO: 131857 - RNA, 24 nt, Artificial Sequence
  Synthetic
  misc_feature (5)..(5): n is a, c, g, or u
  misc_feature (20)..(20): n is a, c, g, or u
  misc_feature (23)..(23): n is a, c, g, or u
cuganaauucugucguccunucnc

SEQ ID NO: 131858 - RNA, 19 nt, Artificial Sequence
  Synthetic
  misc_feature (18)..(18): n is a, c, g, or u
aggcucagggcauauugnc

SEQ ID NO: 131859 - RNA, 20 nt, Artificial Sequence
  Synthetic
  misc_feature (19)..(19): n is a, c, g, or u
caggcucagggcauauugnc

SEQ ID NO: 131860 - RNA, 21 nt, Artificial Sequence
  Synthetic
  misc_feature (20)..(20): n is a, c, g, or u
ucaggcucagggcauauugnc

SEQ ID NO: 131861 - RNA, 22 nt, Artificial Sequence
  Synthetic
  misc_feature (21)..(21): n is a, c, g, or u
cucaggcucagggcauauugnc

SEQ ID NO: 131862 - RNA, 23 nt, Artificial Sequence
  Synthetic
  misc_feature (22)..(22): n is a, c, g, or u
ccucaggcucagggcauauugnc

SEQ ID NO: 131863 - RNA, 24 nt, Artificial Sequence
  Synthetic
  misc_feature (23)..(23): n is a, c, g, or u
cccucaggcucagggcauauugnc

SEQ ID NO: 131864 - RNA, 18 nt, Artificial Sequence
  Synthetic
cuccugccuccaccaauc

SEQ ID NO: 131865 - RNA, 19 nt, Artificial Sequence
  Synthetic
ccuccugccuccaccaauc

SEQ ID NO: 131866 - RNA, 20 nt, Artificial Sequence
  Synthetic
uccuccugccuccaccaauc

SEQ ID NO: 131867 - RNA, 21 nt, Artificial Sequence
  Synthetic
cuccuccugccuccaccaauc

SEQ ID NO: 131868 - RNA, 22 nt, Artificial Sequence
  Synthetic
ccuccuccugccuccaccaauc

SEQ ID NO: 131869 - RNA, 23 nt, Artificial Sequence
  Synthetic
uccuccuccugccuccaccaauc

SEQ ID NO: 131870 - RNA, 24 nt, Artificial Sequence
  Synthetic
uuccuccuccugccuccaccaauc

SEQ ID NO: 131871 - RNA, 18 nt, Artificial Sequence
  Synthetic
  misc_feature (2)..(2): n is a, c, g, or u
  misc_feature (5)..(5): n is a, c, g, or u
cngunccuaucuuuaauc

SEQ ID NO: 131872 - RNA, 19 nt, Artificial Sequence
  Synthetic
  misc_feature (3)..(3): n is a, c, g, or u
  misc_feature (6)..(6): n is a, c, g, or u
acngunccuaucuuuaauc

SEQ ID NO: 131873 - RNA, 20 nt, Artificial Sequence
  Synthetic
  misc_feature (4)..(4): n is a, c, g, or u
  misc_feature (7)..(7): n is a, c, g, or u
uacngunccuaucuuuaauc

SEQ ID NO: 131874 - RNA, 21 nt, Artificial Sequence
  Synthetic
  misc_feature (5)..(5): n is a, c, g, or u
  misc_feature (8)..(8): n is a, c, g, or u
cuacngunccuaucuuuaauc

SEQ ID NO: 131875 - RNA, 22 nt, Artificial Sequence
  Synthetic
  misc_feature (6)..(6): n is a, c, g, or u
  misc_feature (9)..(9): n is a, c, g, or u
ucuacngunccuaucuuuaauc

SEQ ID NO: 131876 - RNA, 23 nt, Artificial Sequence
  Synthetic
  misc_feature (1)..(1): n is a, c, g, or u
  misc_feature (7)..(7): n is a, c, g, or u
  misc_feature (10)..(10): n is a, c, g, or u
nucuacngunccuaucuuuaauc

SEQ ID NO: 131877 - RNA, 24 nt, Artificial Sequence
  Synthetic
  misc_feature (2)..(2): n is a, c, g, or u
  misc_feature (8)..(8): n is a, c, g, or u
  misc_feature (11)..(11): n is a, c, g, or u
cnucuacngunccuaucuuuaauc

SEQ ID NO: 131878 - RNA, 18 nt, Artificial Sequence
  Synthetic
ugggauucuuucccgauc

SEQ ID NO: 131879 - RNA, 19 nt, Artificial Sequence
  Synthetic
cugggauucuuucccgauc

SEQ ID NO: 131880 - RNA, 20 nt, Artificial Sequence
  Synthetic
ucugggauucuuucccgauc

SEQ ID NO: 131881 - RNA, 21 nt, Artificial Sequence
  Synthetic
cucugggauucuuucccgauc

SEQ ID NO: 131882 - RNA, 22 nt, Artificial Sequence
  Synthetic
ccucugggauucuuucccgauc

SEQ ID NO: 131883 - RNA, 23 nt, Artificial Sequence
  Synthetic
  misc_feature (1)..(1): n is a, c, g, or u
nccucugggauucuuucccgauc

SEQ ID NO: 131884 - RNA, 24 nt, Artificial Sequence
  Synthetic
  misc_feature (2)..(2): n is a, c, g, or u
anccucugggauucuuucccgauc

SEQ ID NO: 131885 - RNA, 18 nt, Artificial Sequence
  Synthetic
  misc_feature (3)..(3): n is a, c, g, or u
  misc_feature (9)..(9): n is a, c, g, or u
  misc_feature (12)..(12): n is a, c, g, or u
ucnucuacngunccuauc

SEQ ID NO: 131886 - RNA, 19 nt, Artificial Sequence
  Synthetic
  misc_feature (4)..(4): n is a, c, g, or u
  misc_feature (10)..(10): n is a, c, g, or u
  misc_feature (13)..(13): n is a, c, g, or u
uucnucuacngunccuauc

SEQ ID NO: 131887 - RNA, 20 nt, Artificial Sequence
  Synthetic
  misc_feature (5)..(5): n is a, c, g, or u
  misc_feature (11)..(11): n is a, c, g, or u
  misc_feature (14)..(14): n is a, c, g, or u
auucnucuacngunccuauc

SEQ ID NO: 131888 - RNA, 21 nt, Artificial Sequence
  Synthetic
  misc_feature (6)..(6): n is a, c, g, or u
  misc_feature (12)..(12): n is a, c, g, or u
  misc_feature (15)..(15): n is a, c, g, or u
uauucnucuacngunccuauc

SEQ ID NO: 131889 - RNA, 22 nt, Artificial Sequence
  Synthetic
  misc_feature (7)..(7): n is a, c, g, or u
  misc_feature (13)..(13): n is a, c, g, or u
  misc_feature (16)..(16): n is a, c, g, or u
uuauucnucuacngunccuauc

SEQ ID NO: 131890 - RNA, 23 nt, Artificial Sequence
  Synthetic
  misc_feature (8)..(8): n is a, c, g, or u
  misc_feature (14)..(14): n is a, c, g, or u
  misc_feature (17)..(17): n is a, c, g, or u
uuuauucnucuacngunccuauc

SEQ ID NO: 131891 - RNA, 24 nt, Artificial Sequence
  Synthetic
  misc_feature (9)..(9): n is a, c, g, or u
  misc_feature (15)..(15): n is a, c, g, or u
  misc_feature (18)..(18): n is a, c, g, or u
cuuuauucnucuacngunccuauc

SEQ ID NO: 131892 - RNA, 18 nt, Artificial Sequence
  Synthetic
  misc_feature (14)..(14): n is a, c, g, or u
uuucuguucccaanccuc

SEQ ID NO: 131893 - RNA, 19 nt, Artificial Sequence
  Synthetic
  misc_feature (15)..(15): n is a, c, g, or u
cuuucuguucccaanccuc

SEQ ID NO: 131894 - RNA, 20 nt, Artificial Sequence
  Synthetic
  misc_feature (16)..(16): n is a, c, g, or u
ucuuucuguucccaanccuc

SEQ ID NO: 131895 - RNA, 19 nt, Artificial Sequence
  Synthetic
cgcagaagaucucaaucuc

SEQ ID NO: 131896 - RNA, 20 nt, Artificial Sequence
  Synthetic
ucgcagaagaucucaaucuc

SEQ ID NO: 131897 - RNA, 18 nt, Artificial Sequence
  Synthetic
uauugccucucacaucuc

SEQ ID NO: 131898 - RNA, 19 nt, Artificial Sequence
  Synthetic
auauugccucucacaucuc

SEQ ID NO: 131899 - RNA, 20 nt, Artificial Sequence
  Synthetic
aauauugccucucacaucuc

SEQ ID NO: 131900 - RNA, 21 nt, Artificial Sequence
  Synthetic
  misc_feature (1)..(1): n is a, c, g, or u
naauauugccucucacaucuc

SEQ ID NO: 131901 - RNA, 22 nt, Artificial Sequence
  Synthetic
  misc_feature (2)..(2): n is a, c, g, or u
cnaauauugccucucacaucuc

SEQ ID NO: 131902 - RNA, 23 nt, Artificial Sequence
  Synthetic
  misc_feature (3)..(3): n is a, c, g, or u
ccnaauauugccucucacaucuc

SEQ ID NO: 131903 - RNA, 24 nt, Artificial Sequence
  Synthetic
  misc_feature (4)..(4): n is a, c, g, or u
uccnaauauugccucucacaucuc

SEQ ID NO: 131904 - RNA, 19 nt, Artificial Sequence
  Synthetic
ugacuucuuuccuuccguc

SEQ ID NO: 131905 - RNA, 20 nt, Artificial Sequence
  Synthetic
cugacuucuuuccuuccguc

SEQ ID NO: 131906 - RNA, 21 nt, Artificial Sequence
  Synthetic
ucugacuucuuuccuuccguc

SEQ ID NO: 131907 - RNA, 22 nt, Artificial Sequence
  Synthetic
uucugacuucuuuccuuccguc

SEQ ID NO: 131908 - RNA, 23 nt, Artificial Sequence
  Synthetic
cuucugacuucuuuccuuccguc

SEQ ID NO: 131909 - RNA, 24 nt, Artificial Sequence
  Synthetic
ccuucugacuucuuuccuuccguc

SEQ ID NO: 131910 - RNA, 18 nt, Artificial Sequence
  Synthetic
acauuauuaauagguguc

SEQ ID NO: 131911 - RNA, 20 nt, Artificial Sequence
  Synthetic
  misc_feature (1)..(1): n is a, c, g, or u
ngacauuauuaauagguguc

SEQ ID NO: 131912 - RNA, 21 nt, Artificial Sequence
  Synthetic
  misc_feature (2)..(2): n is a, c, g, or u
angacauuauuaauagguguc

SEQ ID NO: 131913 - RNA, 23 nt, Artificial Sequence
  Synthetic
  misc_feature (1)..(1): n is a, c, g, or u
  misc_feature (4)..(4): n is a, c, g, or u
ngangacauuauuaauagguguc

SEQ ID NO: 131914 - RNA, 24 nt, Artificial Sequence
  Synthetic
  misc_feature (2)..(2): n is a, c, g, or u
  misc_feature (5)..(5): n is a, c, g, or u
angangacauuauuaauagguguc

SEQ ID NO: 131915 - RNA, 18 nt, Artificial Sequence
  Synthetic
ccguuuguccucuaauuc

SEQ ID NO: 131916 - RNA, 19 nt, Artificial Sequence
  Synthetic
cccguuuguccucuaauuc

SEQ ID NO: 131917 - RNA, 21 nt, Artificial Sequence
  Synthetic
ugcccguuuguccucuaauuc

SEQ ID NO: 131918 - RNA, 22 nt, Artificial Sequence
  Synthetic
uugcccguuuguccucuaauuc

SEQ ID NO: 131919 - RNA, 24 nt, Artificial Sequence
  Synthetic
uguugcccguuuguccucuaauuc

SEQ ID NO: 131920 - RNA, 18 nt, Artificial Sequence
  Synthetic
uacuagugccauuuguuc

SEQ ID NO: 131921 - RNA, 19 nt, Artificial Sequence
  Synthetic
uuacuagugccauuuguuc

SEQ ID NO: 131922 - RNA, 20 nt, Artificial Sequence
  Synthetic
uuuacuagugccauuuguuc

SEQ ID NO: 131923 - RNA, 22 nt, Artificial Sequence
  Synthetic
aguuuacuagugccauuuguuc

SEQ ID NO: 131924 - RNA, 23 nt, Artificial Sequence
  Synthetic
caguuuacuagugccauuuguuc

SEQ ID NO: 131925 - RNA, 24 nt, Artificial Sequence
  Synthetic
ucaguuuacuagugccauuuguuc

SEQ ID NO: 131926 - RNA, 18 nt, Artificial Sequence
  Synthetic
  misc_feature (10)..(10): n is a, c, g, or u
agagcuacancaugggag

SEQ ID NO: 131927 - RNA, 19 nt, Artificial Sequence
  Synthetic
  misc_feature (11)..(11): n is a, c, g, or u
aagagcuacancaugggag

SEQ ID NO: 131928 - RNA, 20 nt, Artificial Sequence
  Synthetic
  misc_feature (12)..(12): n is a, c, g, or u
caagagcuacancaugggag

SEQ ID NO: 131929 - RNA, 21 nt, Artificial Sequence
  Synthetic
  misc_feature (13)..(13): n is a, c, g, or u
acaagagcuacancaugggag

SEQ ID NO: 131930 - RNA, 22 nt, Artificial Sequence
  Synthetic
  misc_feature (14)..(14): n is a, c, g, or u
aacaagagcuacancaugggag

SEQ ID NO: 131931 - RNA, 18 nt, Artificial Sequence
  Synthetic
aauuuguccugguuaucg

SEQ ID NO: 131932 - RNA, 19 nt, Artificial Sequence
  Synthetic
caauuuguccugguuaucg

SEQ ID NO: 131933 - RNA, 20 nt, Artificial Sequence
  Synthetic
ccaauuuguccugguuaucg

SEQ ID NO: 131934 - RNA, 18 nt, Artificial Sequence
  Synthetic
  misc_feature (5)..(5): n is a, c, g, or u
  misc_feature (8)..(8): n is a, c, g, or u
caucnucnugggcuuucg

SEQ ID NO: 131935 - RNA, 19 nt, Artificial Sequence
  Synthetic
  misc_feature (6)..(6): n is a, c, g, or u
  misc_feature (9)..(9): n is a, c, g, or u
ccaucnucnugggcuuucg

SEQ ID NO: 131936 - RNA, 20 nt, Artificial Sequence
  Synthetic
  misc_feature (7)..(7): n is a, c, g, or u
  misc_feature (10)..(10): n is a, c, g, or u
cccaucnucnugggcuuucg

SEQ ID NO: 131937 - RNA, 21 nt, Artificial Sequence
  Synthetic
  misc_feature (8)..(8): n is a, c, g, or u
  misc_feature (11)..(11): n is a, c, g, or u
ucccaucnucnugggcuuucg

SEQ ID NO: 131938 - RNA, 22 nt, Artificial Sequence
  Synthetic
  misc_feature (9)..(9): n is a, c, g, or u
  misc_feature (12)..(12): n is a, c, g, or u
aucccaucnucnugggcuuucg

SEQ ID NO: 131939 - RNA, 23 nt, Artificial Sequence
  Synthetic
  misc_feature (10)..(10): n is a, c, g, or u
  misc_feature (13)..(13): n is a, c, g, or u
caucccaucnucnugggcuuucg

SEQ ID NO: 131940 - RNA, 24 nt, Artificial Sequence
  Synthetic
  misc_feature (11)..(11): n is a, c, g, or u
  misc_feature (14)..(14): n is a, c, g, or u
ccaucccaucnucnugggcuuucg

SEQ ID NO: 131941 - RNA, 18 nt, Artificial Sequence
  Synthetic
cccugcucguguuacagg

SEQ ID NO: 131942 - RNA, 19 nt, Artificial Sequence
  Synthetic
ccccugcucguguuacagg

SEQ ID NO: 131943 - RNA, 20 nt, Artificial Sequence
  Synthetic
accccugcucguguuacagg

SEQ ID NO: 131944 - RNA, 18 nt, Artificial Sequence
  Synthetic
  misc_feature (9)..(9): n is a, c, g, or u
cccguugcncggcaacgg

SEQ ID NO: 131945 - RNA, 19 nt, Artificial Sequence
  Synthetic
  misc_feature (10)..(10): n is a, c, g, or u
ccccguugcncggcaacgg

SEQ ID NO: 131946 - RNA, 20 nt, Artificial Sequence
  Synthetic
  misc_feature (11)..(11): n is a, c, g, or u
accccguugcncggcaacgg

SEQ ID NO: 131947 - RNA, 18 nt, Artificial Sequence
  Synthetic
augaugugguauuggggg

SEQ ID NO: 131948 - RNA, 18 nt, Artificial Sequence
  Synthetic
aagccauucucugcuggg

SEQ ID NO: 131949 - RNA, 19 nt, Artificial Sequence
  Synthetic
caagccauucucugcuggg

SEQ ID NO: 131950 - RNA, 22 nt, Artificial Sequence
  Synthetic
aggcaagccauucucugcuggg

SEQ ID NO: 131951 - RNA, 23 nt, Artificial Sequence
  Synthetic
caggcaagccauucucugcuggg

SEQ ID NO: 131952 - RNA, 24 nt, Artificial Sequence
  Synthetic
ucaggcaagccauucucugcuggg

SEQ ID NO: 131953 - RNA, 18 nt, Artificial Sequence
  Synthetic
augacucuagcuaccugg

SEQ ID NO: 131954 - RNA, 19 nt, Artificial Sequence
  Synthetic
  misc_feature (1)..(1): n is a, c, g, or u
naugacucuagcuaccugg

SEQ ID NO: 131955 - RNA, 20 nt, Artificial Sequence
  Synthetic
  misc_feature (2)..(2): n is a, c, g, or u
unaugacucuagcuaccugg

SEQ ID NO: 131956 - RNA, 21 nt, Artificial Sequence
  Synthetic
  misc_feature (3)..(3): n is a, c, g, or u
uunaugacucuagcuaccugg

SEQ ID NO: 131957 - RNA, 22 nt, Artificial Sequence
  Synthetic
  misc_feature (4)..(4): n is a, c, g, or u
auunaugacucuagcuaccugg

SEQ ID NO: 131958 - RNA, 23 nt, Artificial Sequence
  Synthetic
  misc_feature (5)..(5): n is a, c, g, or u
aauunaugacucuagcuaccugg

SEQ ID NO: 131959 - RNA, 18 nt, Artificial Sequence
  Synthetic
  misc_feature (15)..(15): n is a, c, g, or u
ucaguccguuucucnugg

SEQ ID NO: 131960 - RNA, 19 nt, Artificial Sequence
  Synthetic
  misc_feature (16)..(16): n is a, c, g, or u
cucaguccguuucucnugg

SEQ ID NO: 131961 - RNA, 20 nt, Artificial Sequence
  Synthetic
  misc_feature (17)..(17): n is a, c, g, or u
ccucaguccguuucucnugg

SEQ ID NO: 131962 - RNA, 24 nt, Artificial Sequence
  Synthetic
  misc_feature (21)..(21): n is a, c, g, or u
ugggccucaguccguuucucnugg

SEQ ID NO: 131963 - RNA, 18 nt, Artificial Sequence
  Synthetic
  misc_feature (14)..(14): n is a, c, g, or u
aacaagagcuacancaug

SEQ ID NO: 131964 - RNA, 22 nt, Artificial Sequence
  Synthetic
  misc_feature (18)..(18): n is a, c, g, or u
ugggaacaagagcuacancaug

SEQ ID NO: 131965 - RNA, 23 nt, Artificial Sequence
  Synthetic
  misc_feature (19)..(19): n is a, c, g, or u
uugggaacaagagcuacancaug

SEQ ID NO: 131966 - RNA, 24 nt, Artificial Sequence
  Synthetic
  misc_feature (20)..(20): n is a, c, g, or u
cuugggaacaagagcuacancaug

SEQ ID NO: 131967 - RNA, 18 nt, Artificial Sequence
  Synthetic
  misc_feature (12)..(12): n is a, c, g, or u
uuggcuuucagnuauaug

SEQ ID NO: 131968 - RNA, 19 nt, Artificial Sequence
  Synthetic
  misc_feature (13)..(13): n is a, c, g, or u
uuuggcuuucagnuauaug

SEQ ID NO: 131969 - RNA, 21 nt, Artificial Sequence
  Synthetic
  misc_feature (15)..(15): n is a, c, g, or u
uguuuggcuuucagnuauaug

SEQ ID NO: 131970 - RNA, 22 nt, Artificial Sequence
  Synthetic
  misc_feature (16)..(16): n is a, c, g, or u
cuguuuggcuuucagnuauaug

SEQ ID NO: 131971 - RNA, 23 nt, Artificial Sequence
  Synthetic
  misc_feature (17)..(17): n is a, c, g, or u
acuguuuggcuuucagnuauaug

SEQ ID NO: 131972 - RNA, 24 nt, Artificial Sequence
  Synthetic
  misc_feature (18)..(18): n is a, c, g, or u
cacuguuuggcuuucagnuauaug

SEQ ID NO: 131973 - RNA, 18 nt, Artificial Sequence
  Synthetic
aagaauuuggagcuacug

SEQ ID NO: 131974 - RNA, 19 nt, Artificial Sequence
  Synthetic
aaagaauuuggagcuacug

SEQ ID NO: 131975 - RNA, 20 nt, Artificial Sequence
  Synthetic
uaaagaauuuggagcuacug

SEQ ID NO: 131976 - RNA, 21 nt, Artificial Sequence
  Synthetic
auaaagaauuuggagcuacug

SEQ ID NO: 131977 - RNA, 22 nt, Artificial Sequence
  Synthetic
uauaaagaauuuggagcuacug

SEQ ID NO: 131978 - RNA, 23 nt, Artificial Sequence
  Synthetic
uuauaaagaauuuggagcuacug

SEQ ID NO: 131979 - RNA, 24 nt, Artificial Sequence
  Synthetic
cuuauaaagaauuuggagcuacug

SEQ ID NO: 131980 - RNA, 18 nt, Artificial Sequence
  Synthetic
  misc_feature (2)..(2): n is a, c, g, or u
unaaauuaauuaugccug

SEQ ID NO: 131981 - RNA, 19 nt, Artificial Sequence
  Synthetic
  misc_feature (3)..(3): n is a, c, g, or u
uunaaauuaauuaugccug

SEQ ID NO: 131982 - RNA, 20 nt, Artificial Sequence
  Synthetic
  misc_feature (4)..(4): n is a, c, g, or u
auunaaauuaauuaugccug

SEQ ID NO: 131983 - RNA, 22 nt, Artificial Sequence
  Synthetic
  misc_feature (6)..(6): n is a, c, g, or u
agauunaaauuaauuaugccug

SEQ ID NO: 131984 - RNA, 23 nt, Artificial Sequence
  Synthetic
  misc_feature (7)..(7): n is a, c, g, or u
aagauunaaauuaauuaugccug

SEQ ID NO: 131985 - RNA, 19 nt, Artificial Sequence
  Synthetic
ugcaacuuuuucaccucug

SEQ ID NO: 131986 - RNA, 20 nt, Artificial Sequence
  Synthetic
augcaacuuuuucaccucug

SEQ ID NO: 131987 - RNA, 21 nt, Artificial Sequence
  Synthetic
caugcaacuuuuucaccucug

SEQ ID NO: 131988 - RNA, 22 nt, Artificial Sequence
  Synthetic
  misc_feature (1)..(1): n is a, c, g, or u
ncaugcaacuuuuucaccucug

SEQ ID NO: 131989 - RNA, 23 nt, Artificial Sequence
  Synthetic
  misc_feature (2)..(2): n is a, c, g, or u
ancaugcaacuuuuucaccucug

SEQ ID NO: 131990 - RNA, 24 nt, Artificial Sequence
  Synthetic
  misc_feature (3)..(3): n is a, c, g, or u
cancaugcaacuuuuucaccucug

SEQ ID NO: 131991 - RNA, 19 nt, Artificial Sequence
  Synthetic
  misc_feature (1)..(1): n is a, c, g, or u
  misc_feature (4)..(4): n is a, c, g, or u
ngcnuuccaccaagcucug

SEQ ID NO: 131992 - RNA, 20 nt, Artificial Sequence
  Synthetic
  misc_feature (2)..(2): n is a, c, g, or u
  misc_feature (5)..(5): n is a, c, g, or u
cngcnuuccaccaagcucug

SEQ ID NO: 131993 - RNA, 21 nt, Artificial Sequence
  Synthetic
  misc_feature (3)..(3): n is a, c, g, or u
  misc_feature (6)..(6): n is a, c, g, or u
acngcnuuccaccaagcucug

SEQ ID NO: 131994 - RNA, 22 nt, Artificial Sequence
  Synthetic
  misc_feature (4)..(4): n is a, c, g, or u
  misc_feature (7)..(7): n is a, c, g, or u
cacngcnuuccaccaagcucug

SEQ ID NO: 131995 - RNA, 23 nt, Artificial Sequence
  Synthetic
  misc_feature (5)..(5): n is a, c, g, or u
  misc_feature (8)..(8): n is a, c, g, or u
ccacngcnuuccaccaagcucug

SEQ ID NO: 131996 - RNA, 24 nt, Artificial Sequence
  Synthetic
  misc_feature (6)..(6): n is a, c, g, or u
  misc_feature (9)..(9): n is a, c, g, or u
uccacngcnuuccaccaagcucug

SEQ ID NO: 131997 - RNA, 18 nt, Artificial Sequence
  Synthetic
acucuagcuaccugggug

SEQ ID NO: 131998 - RNA, 20 nt, Artificial Sequence
  Synthetic
ugacucuagcuaccugggug

SEQ ID NO: 131999 - RNA, 21 nt, Artificial Sequence
  Synthetic
augacucuagcuaccugggug

SEQ ID NO: 132000 - RNA, 22 nt, Artificial Sequence
  Synthetic
  misc_feature (1)..(1): n is a, c, g, or u
naugacucuagcuaccugggug

SEQ ID NO: 132001 - RNA, 23 nt, Artificial Sequence
  Synthetic
  misc_feature (2)..(2): n is a, c, g, or u
unaugacucuagcuaccugggug

SEQ ID NO: 132002 - RNA, 24 nt, Artificial Sequence
  Synthetic
  misc_feature (3)..(3): n is a, c, g, or u
uunaugacucuagcuaccugggug

SEQ ID NO: 132003 - RNA, 20 nt, Artificial Sequence
  Synthetic
cggcaacggccuggucugug

SEQ ID NO: 132004 - RNA, 18 nt, Artificial Sequence
  Synthetic
  misc_feature (1)..(1): n is a, c, g, or u
  misc_feature (4)..(5): n is a, c, g, or u
  misc_feature (7)..(7): n is a, c, g, or u
naanngnccuauugauug

SEQ ID NO: 132005 - RNA, 19 nt, Artificial Sequence
  Synthetic
  misc_feature (2)..(2): n is a, c, g, or u
  misc_feature (5)..(6): n is a, c, g, or u
  misc_feature (8)..(8): n is a, c, g, or u
unaanngnccuauugauug

SEQ ID NO: 132006 - RNA, 21 nt, Artificial Sequence
  Synthetic
  misc_feature (4)..(4): n is a, c, g, or u
  misc_feature (7)..(8): n is a, c, g, or u
  misc_feature (10)..(10): n is a, c, g, or u
ugunaanngnccuauugauug

SEQ ID NO: 132007 - RNA, 22 nt, Artificial Sequence
  Synthetic
  misc_feature (5)..(5): n is a, c, g, or u
  misc_feature (8)..(9): n is a, c, g, or u
  misc_feature (11)..(11): n is a, c, g, or u
cugunaanngnccuauugauug

SEQ ID NO: 132008 - RNA, 23 nt, Artificial Sequence
  Synthetic
  misc_feature (6)..(6): n is a, c, g, or u
  misc_feature (9)..(10): n is a, c, g, or u
  misc_feature (12)..(12): n is a, c, g, or u
ccugunaanngnccuauugauug

SEQ ID NO: 132009 - RNA, 24 nt, Artificial Sequence
  Synthetic
  misc_feature (7)..(7): n is a, c, g, or u
  misc_feature (10)..(11): n is a, c, g, or u
  misc_feature (13)..(13): n is a, c, g, or u
uccugunaanngnccuauugauug

SEQ ID NO: 132010 - RNA, 18 nt, Artificial Sequence
  Synthetic
uggguggguaauaauuug

SEQ ID NO: 132011 - RNA, 19 nt, Artificial Sequence
  Synthetic
cuggguggguaauaauuug

SEQ ID NO: 132012 - RNA, 20 nt, Artificial Sequence
  Synthetic
ccuggguggguaauaauuug

SEQ ID NO: 132013 - RNA, 21 nt, Artificial Sequence
  Synthetic
accuggguggguaauaauuug

SEQ ID NO: 132014 - RNA, 22 nt, Artificial Sequence
  Synthetic
uaccuggguggguaauaauuug

SEQ ID NO: 132015 - RNA, 23 nt, Artificial Sequence
  Synthetic
cuaccuggguggguaauaauuug

SEQ ID NO: 132016 - RNA, 19 nt, Artificial Sequence
  Synthetic
aguuuacuagugccauuug

SEQ ID NO: 132017 - RNA, 20 nt, Artificial Sequence
  Synthetic
caguuuacuagugccauuug

SEQ ID NO: 132018 - RNA, 21 nt, Artificial Sequence
  Synthetic
ucaguuuacuagugccauuug

SEQ ID NO: 132019 - RNA, 22 nt, Artificial Sequence
  Synthetic
cucaguuuacuagugccauuug

SEQ ID NO: 132020 - RNA, 18 nt, Artificial Sequence
  Synthetic
  misc_feature (4)..(4): n is a, c, g, or u
  misc_feature (18)..(18): n is a, c, g, or u
uugnaagauccagcaucn

SEQ ID NO: 132021 - RNA, 19 nt, Artificial Sequence
  Synthetic
  misc_feature (5)..(5): n is a, c, g, or u
  misc_feature (19)..(19): n is a, c, g, or u
uuugnaagauccagcaucn

SEQ ID NO: 132022 - RNA, 20 nt, Artificial Sequence
  Synthetic
  misc_feature (6)..(6): n is a, c, g, or u
  misc_feature (20)..(20): n is a, c, g, or u
auuugnaagauccagcaucn

SEQ ID NO: 132023 - RNA, 21 nt, Artificial Sequence
  Synthetic
  misc_feature (7)..(7): n is a, c, g, or u
  misc_feature (21)..(21): n is a, c, g, or u
aauuugnaagauccagcaucn

SEQ ID NO: 132024 - RNA, 22 nt, Artificial Sequence
  Synthetic
  misc_feature (8)..(8): n is a, c, g, or u
  misc_feature (22)..(22): n is a, c, g, or u
uaauuugnaagauccagcaucn

SEQ ID NO: 132025 - RNA, 23 nt, Artificial Sequence
  Synthetic
  misc_feature (9)..(9): n is a, c, g, or u
  misc_feature (23)..(23): n is a, c, g, or u
auaauuugnaagauccagcaucn

SEQ ID NO: 132026 - RNA, 24 nt, Artificial Sequence
  Synthetic
  misc_feature (10)..(10): n is a, c, g, or u
  misc_feature (24)..(24): n is a, c, g, or u
aauaauuugnaagauccagcaucn

SEQ ID NO: 132027 - RNA, 19 nt, Artificial Sequence
  Synthetic
  misc_feature (10)..(10): n is a, c, g, or u
cggagccaanucaaacaau

SEQ ID NO: 132028 - RNA, 20 nt, Artificial Sequence
  Synthetic
  misc_feature (11)..(11): n is a, c, g, or u
ucggagccaanucaaacaau

SEQ ID NO: 132029 - RNA, 21 nt, Artificial Sequence
  Synthetic
  misc_feature (12)..(12): n is a, c, g, or u
uucggagccaanucaaacaau

SEQ ID NO: 132030 - RNA, 22 nt, Artificial Sequence
  Synthetic
  misc_feature (13)..(13): n is a, c, g, or u
auucggagccaanucaaacaau

SEQ ID NO: 132031 - RNA, 23 nt, Artificial Sequence
  Synthetic
  misc_feature (14)..(14): n is a, c, g, or u
cauucggagccaanucaaacaau

SEQ ID NO: 132032 - RNA, 19 nt, Artificial Sequence
  Synthetic
agaucucaaucucgggaau

SEQ ID NO: 132033 - RNA, 20 nt, Artificial Sequence
  Synthetic
aagaucucaaucucgggaau

SEQ ID NO: 132034 - RNA, 18 nt, Artificial Sequence
  Synthetic
acauggagaacaucacau

SEQ ID NO: 132035 - RNA, 19 nt, Artificial Sequence
  Synthetic
aacauggagaacaucacau

SEQ ID NO: 132036 - RNA, 21 nt, Artificial Sequence
  Synthetic
cgaacauggagaacaucacau

SEQ ID NO: 132037 - RNA, 22 nt, Artificial Sequence
  Synthetic
  misc_feature (1)..(1): n is a, c, g, or u
ncgaacauggagaacaucacau

SEQ ID NO: 132038 - RNA, 24 nt, Artificial Sequence
  Synthetic
  misc_feature (1)..(1): n is a, c, g, or u
  misc_feature (3)..(3): n is a, c, g, or u
ngncgaacauggagaacaucacau

SEQ ID NO: 132039 - RNA, 18 nt, Artificial Sequence
  Synthetic
  misc_feature (11)..(11): n is a, c, g, or u
uaaaugaaaanagaagau

SEQ ID NO: 132040 - RNA, 20 nt, Artificial Sequence
  Synthetic
  misc_feature (13)..(13): n is a, c, g, or u
uguaaaugaaaanagaagau

SEQ ID NO: 132041 - RNA, 21 nt, Artificial Sequence
  Synthetic
  misc_feature (14)..(14): n is a, c, g, or u
cuguaaaugaaaanagaagau

SEQ ID NO: 132042 - RNA, 22 nt, Artificial Sequence
  Synthetic
  misc_feature (15)..(15): n is a, c, g, or u
acuguaaaugaaaanagaagau

SEQ ID NO: 132043 - RNA, 23 nt, Artificial Sequence
  Synthetic
  misc_feature (16)..(16): n is a, c, g, or u
cacuguaaaugaaaanagaagau

SEQ ID NO: 132044 - RNA, 24 nt, Artificial Sequence
  Synthetic
  misc_feature (17)..(17): n is a, c, g, or u
ucacuguaaaugaaaanagaagau

SEQ ID NO: 132045 - RNA, 18 nt, Artificial Sequence
  Synthetic
  misc_feature (14)..(14): n is a, c, g, or u
cgccucgcagacgnagau

SEQ ID NO: 132046 - RNA, 19 nt, Artificial Sequence
  Synthetic
  misc_feature (15)..(15): n is a, c, g, or u
ucgccucgcagacgnagau

SEQ ID NO: 132047 - RNA, 20 nt, Artificial Sequence
  Synthetic
  misc_feature (16)..(16): n is a, c, g, or u
cucgccucgcagacgnagau

SEQ ID NO: 132048 - RNA, 18 nt, Artificial Sequence
  Synthetic
  misc_feature (5)..(5): n is a, c, g, or u
  misc_feature (8)..(8): n is a, c, g, or u
uaaanaunaggcaacuau

SEQ ID NO: 132049 - RNA, 19 nt, Artificial Sequence
  Synthetic
  misc_feature (1)..(1): n is a, c, g, or u
  misc_feature (6)..(6): n is a, c, g, or u
  misc_feature (9)..(9): n is a, c, g, or u
nuaaanaunaggcaacuau

SEQ ID NO: 132050 - RNA, 20 nt, Artificial Sequence
  Synthetic
  misc_feature (1)..(2): n is a, c, g, or u
  misc_feature (7)..(7): n is a, c, g, or u
  misc_feature (10)..(10): n is a, c, g, or u
nnuaaanaunaggcaacuau

SEQ ID NO: 132051 - RNA, 24 nt, Artificial Sequence
  Synthetic
  misc_feature (5)..(6): n is a, c, g, or u
  misc_feature (11)..(11): n is a, c, g, or u
  misc_feature (14)..(14): n is a, c, g, or u
ugggnnuaaanaunaggcaacuau

SEQ ID NO: 132052 - RNA, 18 nt, Artificial Sequence
  Synthetic
cuuucgcaaaauaccuau

SEQ ID NO: 132053 - RNA, 22 nt, Artificial Sequence
  Synthetic
ugggcuuucgcaaaauaccuau

SEQ ID NO: 132054 - RNA, 23 nt, Artificial Sequence
  Synthetic
  misc_feature (1)..(1): n is a, c, g, or u
nugggcuuucgcaaaauaccuau

SEQ ID NO: 132055 - RNA, 24 nt, Artificial Sequence
  Synthetic
  misc_feature (2)..(2): n is a, c, g, or u
cnugggcuuucgcaaaauaccuau

SEQ ID NO: 132056 - RNA, 18 nt, Artificial Sequence
  Synthetic
  misc_feature (15)..(15): n is a, c, g, or u
uguuuggcuuucagnuau

SEQ ID NO: 132057 - RNA, 19 nt, Artificial Sequence
  Synthetic
  misc_feature (16)..(16): n is a, c, g, or u
cuguuuggcuuucagnuau

SEQ ID NO: 132058 - RNA, 20 nt, Artificial Sequence
  Synthetic
  misc_feature (17)..(17): n is a, c, g, or u
acuguuuggcuuucagnuau

SEQ ID NO: 132059 - RNA, 21 nt, Artificial Sequence
  Synthetic
  misc_feature (18)..(18): n is a, c, g, or u
cacuguuuggcuuucagnuau

SEQ ID NO: 132060 - RNA, 22 nt, Artificial Sequence
  Synthetic
  misc_feature (19)..(19): n is a, c, g, or u
ccacuguuuggcuuucagnuau

SEQ ID NO: 132061 - RNA, 23 nt, Artificial Sequence
  Synthetic
  misc_feature (20)..(20): n is a, c, g, or u
cccacuguuuggcuuucagnuau

SEQ ID NO: 132062 - RNA, 24 nt, Artificial Sequence
  Synthetic
  misc_feature (21)..(21): n is a, c, g, or u
ccccacuguuuggcuuucagnuau

SEQ ID NO: 132063 - RNA, 18 nt, Artificial Sequence
  Synthetic
uugguucuucuggauuau

SEQ ID NO: 132064 - RNA, 19 nt, Artificial Sequence
  Synthetic
auugguucuucuggauuau

SEQ ID NO: 132065 - RNA, 20 nt, Artificial Sequence
  Synthetic
uauugguucuucuggauuau

SEQ ID NO: 132066 - RNA, 21 nt, Artificial Sequence
  Synthetic
uuauugguucuucuggauuau

SEQ ID NO: 132067 - RNA, 22 nt, Artificial Sequence
  Synthetic
cuuauugguucuucuggauuau

SEQ ID NO: 132068 - RNA, 23 nt, Artificial Sequence
  Synthetic
ucuuauugguucuucuggauuau

SEQ ID NO: 132069 - RNA, 24 nt, Artificial Sequence
  Synthetic
uucuuauugguucuucuggauuau

SEQ ID NO: 132070 - RNA, 19 nt, Artificial Sequence
  Synthetic
  misc_feature (4)..(4): n is a, c, g, or u
aggnauuaaaccuuauuau

SEQ ID NO: 132071 - RNA, 20 nt, Artificial Sequence
  Synthetic
  misc_feature (5)..(5): n is a, c, g, or u
aaggnauuaaaccuuauuau

SEQ ID NO: 132072 - RNA, 21 nt, Artificial Sequence
  Synthetic
  misc_feature (6)..(6): n is a, c, g, or u
aaaggnauuaaaccuuauuau

SEQ ID NO: 132073 - RNA, 22 nt, Artificial Sequence
  Synthetic
  misc_feature (7)..(7): n is a, c, g, or u
caaaggnauuaaaccuuauuau

SEQ ID NO: 132074 - RNA, 23 nt, Artificial Sequence
  Synthetic
  misc_feature (8)..(8): n is a, c, g, or u
acaaaggnauuaaaccuuauuau

SEQ ID NO: 132075 - RNA, 18 nt, Artificial Sequence
  Synthetic
  misc_feature (6)..(6): n is a, c, g, or u
uuugunggcccucucacu

SEQ ID NO: 132076 - RNA, 19 nt, Artificial Sequence
  Synthetic
  misc_feature (7)..(7): n is a, c, g, or u
auuugunggcccucucacu

SEQ ID NO: 132077 - RNA, 20 nt, Artificial Sequence
  Synthetic
  misc_feature (8)..(8): n is a, c, g, or u
aauuugunggcccucucacu

SEQ ID NO: 132078 - RNA, 21 nt, Artificial Sequence
  Synthetic
  misc_feature (9)..(9): n is a, c, g, or u
caauuugunggcccucucacu

SEQ ID NO: 132079 - RNA, 22 nt, Artificial Sequence
  Synthetic
  misc_feature (1)..(1): n is a, c, g, or u
  misc_feature (10)..(10): n is a, c, g, or u
ncaauuugunggcccucucacu

SEQ ID NO: 132080 - RNA, 23 nt, Artificial Sequence
  Synthetic
  misc_feature (2)..(2): n is a, c, g, or u
  misc_feature (11)..(11): n is a, c, g, or u
ancaauuugunggcccucucacu

SEQ ID NO: 132081 - RNA, 24 nt, Artificial Sequence
  Synthetic
  misc_feature (3)..(3): n is a, c, g, or u
  misc_feature (12)..(12): n is a, c, g, or u
cancaauuugunggcccucucacu

SEQ ID NO: 132082 - RNA, 19 nt, Artificial Sequence
  Synthetic
  misc_feature (7)..(7): n is a, c, g, or u
  misc_feature (13)..(13): n is a, c, g, or u
  misc_feature (16)..(16): n is a, c, g, or u
agcaaancucaunggnacu

SEQ ID NO: 132083 - RNA, 22 nt, Artificial Sequence
  Synthetic
  misc_feature (10)..(10): n is a, c, g, or u
  misc_feature (16)..(16): n is a, c, g, or u
  misc_feature (19)..(19): n is a, c, g, or u
uggagcaaancucaunggnacu

SEQ ID NO: 132084 - RNA, 23 nt, Artificial Sequence
  Synthetic
  misc_feature (11)..(11): n is a, c, g, or u
  misc_feature (17)..(17): n is a, c, g, or u
  misc_feature (20)..(20): n is a, c, g, or u
cuggagcaaancucaunggnacu

SEQ ID NO: 132085 - RNA, 24 nt, Artificial Sequence
  Synthetic
  misc_feature (12)..(12): n is a, c, g, or u
  misc_feature (18)..(18): n is a, c, g, or u
  misc_feature (21)..(21): n is a, c, g, or u
ucuggagcaaancucaunggnacu

SEQ ID NO: 132086 - RNA, 18 nt, Artificial Sequence
  Synthetic
uguugcuguacaaaaccu

SEQ ID NO: 132087 - RNA, 19 nt, Artificial Sequence
  Synthetic
auguugcuguacaaaaccu

SEQ ID NO: 132088 - RNA, 20 nt, Artificial Sequence
  Synthetic
cauguugcuguacaaaaccu

SEQ ID NO: 132089 - RNA, 21 nt, Artificial Sequence
  Synthetic
ucauguugcuguacaaaaccu

SEQ ID NO: 132090 - RNA, 22 nt, Artificial Sequence
  Synthetic
cucauguugcuguacaaaaccu

SEQ ID NO: 132091 - RNA, 23 nt, Artificial Sequence
  Synthetic
ccucauguugcuguacaaaaccu

SEQ ID NO: 132092 - RNA, 24 nt, Artificial Sequence
  Synthetic
cccucauguugcuguacaaaaccu

SEQ ID NO: 132093 - RNA, 18 nt, Artificial Sequence
  Synthetic
  misc_feature (11)..(11): n is a, c, g, or u
cucuguaucgngaagccu

SEQ ID NO: 132094 - RNA, 20 nt, Artificial Sequence
  Synthetic
  misc_feature (13)..(13): n is a, c, g, or u
agcucuguaucgngaagccu

SEQ ID NO: 132095 - RNA, 18 nt, Artificial Sequence
  Synthetic
  misc_feature (9)..(9): n is a, c, g, or u
  misc_feature (12)..(13): n is a, c, g, or u
  misc_feature (15)..(15): n is a, c, g, or u
cuuccugunaanngnccu

SEQ ID NO: 132096 - RNA, 19 nt, Artificial Sequence
  Synthetic
  misc_feature (10)..(10): n is a, c, g, or u
  misc_feature (13)..(14): n is a, c, g, or u
  misc_feature (16)..(16): n is a, c, g, or u
acuuccugunaanngnccu

SEQ ID NO: 132097 - RNA, 20 nt, Artificial Sequence
  Synthetic
  misc_feature (11)..(11): n is a, c, g, or u
  misc_feature (14)..(15): n is a, c, g, or u
  misc_feature (17)..(17): n is a, c, g, or u
aacuuccugunaanngnccu

SEQ ID NO: 132098 - RNA, 21 nt, Artificial Sequence
  Synthetic
  misc_feature (12)..(12): n is a, c, g, or u
  misc_feature (15)..(16): n is a, c, g, or u
  misc_feature (18)..(18): n is a, c, g, or u
aaacuuccugunaanngnccu

SEQ ID NO: 132099 - RNA, 22 nt, Artificial Sequence
  Synthetic
  misc_feature (13)..(13): n is a, c, g, or u
  misc_feature (16)..(17): n is a, c, g, or u
  misc_feature (19)..(19): n is a, c, g, or u
aaaacuuccugunaanngnccu

SEQ ID NO: 132100 - RNA, 24 nt, Artificial Sequence
  Synthetic
  misc_feature (15)..(15): n is a, c, g, or u
  misc_feature (18)..(19): n is a, c, g, or u
  misc_feature (21)..(21): n is a, c, g, or u
agaaaacuuccugunaanngnccu

SEQ ID NO: 132101 - RNA, 18 nt, Artificial Sequence
  Synthetic
cuuguugacaagaauccu

SEQ ID NO: 132102 - RNA, 19 nt, Artificial Sequence
  Synthetic
ucuuguugacaagaauccu

SEQ ID NO: 132103 - RNA, 20 nt, Artificial Sequence
  Synthetic
uucuuguugacaagaauccu

SEQ ID NO: 132104 - RNA, 21 nt, Artificial Sequence
  Synthetic
uuucuuguugacaagaauccu

SEQ ID NO: 132105 - RNA, 22 nt, Artificial Sequence
  Synthetic
uuuucuuguugacaagaauccu

SEQ ID NO: 132106 - RNA, 23 nt, Artificial Sequence
  Synthetic
uuuuucuuguugacaagaauccu

SEQ ID NO: 132107 - RNA, 18 nt, Artificial Sequence
  Synthetic
  misc_feature (6)..(6): n is a, c, g, or u
aggggncuguauuuuccu

SEQ ID NO: 132108 - RNA, 19 nt, Artificial Sequence
  Synthetic
  misc_feature (7)..(7): n is a, c, g, or u
caggggncuguauuuuccu

SEQ ID NO: 132109 - RNA, 20 nt, Artificial Sequence
  Synthetic
  misc_feature (8)..(8): n is a, c, g, or u
ucaggggncuguauuuuccu

SEQ ID NO: 132110 - RNA, 22 nt, Artificial Sequence
  Synthetic
  misc_feature (10)..(10): n is a, c, g, or u
agucaggggncuguauuuuccu

SEQ ID NO: 132111 - RNA, 24 nt, Artificial Sequence
  Synthetic
  misc_feature (12)..(12): n is a, c, g, or u
agagucaggggncuguauuuuccu

SEQ ID NO: 132112 - RNA, 19 nt, Artificial Sequence
  Synthetic
cgucugugccuucucaucu

SEQ ID NO: 132113 - RNA, 20 nt, Artificial Sequence
  Synthetic
ccgucugugccuucucaucu

SEQ ID NO: 132114 - RNA, 21 nt, Artificial Sequence
  Synthetic
cccgucugugccuucucaucu

SEQ ID NO: 132115 - RNA, 22 nt, Artificial Sequence
  Synthetic
ccccgucugugccuucucaucu

SEQ ID NO: 132116 - RNA, 23 nt, Artificial Sequence
  Synthetic
uccccgucugugccuucucaucu

SEQ ID NO: 132117 - RNA, 24 nt, Artificial Sequence
  Synthetic
cuccccgucugugccuucucaucu

SEQ ID NO: 132118 - RNA, 18 nt, Artificial Sequence
  Synthetic
  misc_feature (10)..(10): n is a, c, g, or u
uccagcaucnagggaucu

SEQ ID NO: 132119 - RNA, 19 nt, Artificial Sequence
  Synthetic
  misc_feature (11)..(11): n is a, c, g, or u
auccagcaucnagggaucu

SEQ ID NO: 132120 - RNA, 21 nt, Artificial Sequence
  Synthetic
  misc_feature (13)..(13): n is a, c, g, or u
agauccagcaucnagggaucu

SEQ ID NO: 132121 - RNA, 22 nt, Artificial Sequence
  Synthetic
  misc_feature (14)..(14): n is a, c, g, or u
aagauccagcaucnagggaucu

SEQ ID NO: 132122 - RNA, 23 nt, Artificial Sequence
  Synthetic
  misc_feature (1)..(1): n is a, c, g, or u
  misc_feature (15)..(15): n is a, c, g, or u
naagauccagcaucnagggaucu

SEQ ID NO: 132123 - RNA, 18 nt, Artificial Sequence
  Synthetic
aaccuuuguggcuccucu

SEQ ID NO: 132124 - RNA, 21 nt, Artificial Sequence
  Synthetic
uggaaccuuuguggcuccucu

SEQ ID NO: 132125 - RNA, 23 nt, Artificial Sequence
  Synthetic
cguggaaccuuuguggcuccucu

SEQ ID NO: 132126 - RNA, 18 nt, Artificial Sequence
  Synthetic
accaauuuucuuuugucu

SEQ ID NO: 132127 - RNA, 19 nt, Artificial Sequence
  Synthetic
uaccaauuuucuuuugucu

SEQ ID NO: 132128 - RNA, 20 nt, Artificial Sequence
  Synthetic
uuaccaauuuucuuuugucu

SEQ ID NO: 132129 - RNA, 22 nt, Artificial Sequence
  Synthetic
uguuaccaauuuucuuuugucu

SEQ ID NO: 132130 - RNA, 23 nt, Artificial Sequence
  Synthetic
cuguuaccaauuuucuuuugucu

SEQ ID NO: 132131 - RNA, 18 nt, Artificial Sequence
  Synthetic
uuuggucucuuucggagu

SEQ ID NO: 132132 - RNA, 19 nt, Artificial Sequence
  Synthetic
auuuggucucuuucggagu

SEQ ID NO: 132133 - RNA, 20 nt, Artificial Sequence
  Synthetic
uauuuggucucuuucggagu

SEQ ID NO: 132134 - RNA, 21 nt, Artificial Sequence
  Synthetic
  misc_feature (1)..(1): n is a, c, g, or u
nuauuuggucucuuucggagu

SEQ ID NO: 132135 - RNA, 22 nt, Artificial Sequence
  Synthetic
  misc_feature (2)..(2): n is a, c, g, or u
anuauuuggucucuuucggagu

SEQ ID NO: 132136 - RNA, 24 nt, Artificial Sequence
  Synthetic
  misc_feature (4)..(4): n is a, c, g, or u
uganuauuuggucucuuucggagu

SEQ ID NO: 132137 - RNA, 20 nt, Artificial Sequence
  Synthetic
  misc_feature (7)..(8): n is a, c, g, or u
uggccannagccaaccaggu

SEQ ID NO: 132138 - RNA, 21 nt, Artificial Sequence
  Synthetic
  misc_feature (8)..(9): n is a, c, g, or u
cuggccannagccaaccaggu

SEQ ID NO: 132139 - RNA, 22 nt, Artificial Sequence
  Synthetic
  misc_feature (9)..(10): n is a, c, g, or u
acuggccannagccaaccaggu

SEQ ID NO: 132140 - RNA, 23 nt, Artificial Sequence
  Synthetic
  misc_feature (10)..(11): n is a, c, g, or u
cacuggccannagccaaccaggu

SEQ ID NO: 132141 - RNA, 24 nt, Artificial Sequence
  Synthetic
  misc_feature (11)..(12): n is a, c, g, or u
ccacuggccannagccaaccaggu

SEQ ID NO: 132142 - RNA, 18 nt, Artificial Sequence
  Synthetic
cuagcuaccugggugggu

SEQ ID NO: 132143 - RNA, 19 nt, Artificial Sequence
  Synthetic
ucuagcuaccugggugggu

SEQ ID NO: 132144 - RNA, 20 nt, Artificial Sequence
  Synthetic
cucuagcuaccugggugggu

SEQ ID NO: 132145 - RNA, 21 nt, Artificial Sequence
  Synthetic
acucuagcuaccugggugggu

SEQ ID NO: 132146 - RNA, 23 nt, Artificial Sequence
  Synthetic
ugacucuagcuaccugggugggu

SEQ ID NO: 132147 - RNA, 24 nt, Artificial Sequence
  Synthetic
augacucuagcuaccugggugggu

SEQ ID NO: 132148 - RNA, 18 nt, Artificial Sequence
  Synthetic
uccuguccuccaauuugu

SEQ ID NO: 132149 - RNA, 19 nt, Artificial Sequence
  Synthetic
cuccuguccuccaauuugu

SEQ ID NO: 132150 - RNA, 20 nt, Artificial Sequence
  Synthetic
ccuccuguccuccaauuugu

SEQ ID NO: 132151 - RNA, 21 nt, Artificial Sequence
  Synthetic
accuccuguccuccaauuugu

SEQ ID NO: 132152 - RNA, 22 nt, Artificial Sequence
  Synthetic
aaccuccuguccuccaauuugu

SEQ ID NO: 132153 - RNA, 23 nt, Artificial Sequence
  Synthetic
caaccuccuguccuccaauuugu

SEQ ID NO: 132154 - RNA, 24 nt, Artificial Sequence
  Synthetic
ccaaccuccuguccuccaauuugu

SEQ ID NO: 132155 - RNA, 19 nt, Artificial Sequence
  Synthetic
  misc_feature (8)..(8): n is a, c, g, or u
  misc_feature (10)..(10): n is a, c, g, or u
  misc_feature (18)..(18): n is a, c, g, or u
aggaacanunaacccugnu

SEQ ID NO: 132156 - RNA, 20 nt, Artificial Sequence
  Synthetic
  misc_feature (9)..(9): n is a, c, g, or u
  misc_feature (11)..(11): n is a, c, g, or u
  misc_feature (19)..(19): n is a, c, g, or u
caggaacanunaacccugnu

SEQ ID NO: 132157 - RNA, 21 nt, Artificial Sequence
  Synthetic
  misc_feature (10)..(10): n is a, c, g, or u
  misc_feature (12)..(12): n is a, c, g, or u
  misc_feature (20)..(20): n is a, c, g, or u
ucaggaacanunaacccugnu

SEQ ID NO: 132158 - RNA, 22 nt, Artificial Sequence
  Synthetic
  misc_feature (11)..(11): n is a, c, g, or u
  misc_feature (13)..(13): n is a, c, g, or u
  misc_feature (21)..(21): n is a, c, g, or u
uucaggaacanunaacccugnu

SEQ ID NO: 132159 - RNA, 24 nt, Artificial Sequence
  Synthetic
  misc_feature (13)..(13): n is a, c, g, or u
  misc_feature (15)..(15): n is a, c, g, or u
  misc_feature (23)..(23): n is a, c, g, or u
aguucaggaacanunaacccugnu

SEQ ID NO: 132160 - RNA, 18 nt, Artificial Sequence
  Synthetic
ugugucuuggccaaaauu

SEQ ID NO: 132161 - RNA, 20 nt, Artificial Sequence
  Synthetic
cgugugucuuggccaaaauu

SEQ ID NO: 132162 - RNA, 18 nt, Artificial Sequence
  Synthetic
  misc_feature (9)..(9): n is a, c, g, or u
  misc_feature (12)..(13): n is a, c, g, or u
uucaugggnuannuaauu

SEQ ID NO: 132163 - RNA, 19 nt, Artificial Sequence
  Synthetic
  misc_feature (1)..(1): n is a, c, g, or u
  misc_feature (10)..(10): n is a, c, g, or u
  misc_feature (13)..(14): n is a, c, g, or u
nuucaugggnuannuaauu

SEQ ID NO: 132164 - RNA, 20 nt, Artificial Sequence
  Synthetic
  misc_feature (2)..(2): n is a, c, g, or u
  misc_feature (11)..(11): n is a, c, g, or u
  misc_feature (14)..(15): n is a, c, g, or u
anuucaugggnuannuaauu

SEQ ID NO: 132165 - RNA, 21 nt, Artificial Sequence
  Synthetic
  misc_feature (3)..(3): n is a, c, g, or u
  misc_feature (12)..(12): n is a, c, g, or u
  misc_feature (15)..(16): n is a, c, g, or u
aanuucaugggnuannuaauu

SEQ ID NO: 132166 - RNA, 22 nt, Artificial Sequence
  Synthetic
  misc_feature (4)..(4): n is a, c, g, or u
  misc_feature (13)..(13): n is a, c, g, or u
  misc_feature (16)..(17): n is a, c, g, or u
aaanuucaugggnuannuaauu

SEQ ID NO: 132167 - RNA, 23 nt, Artificial Sequence
  Synthetic
  misc_feature (5)..(5): n is a, c, g, or u
  misc_feature (14)..(14): n is a, c, g, or u
  misc_feature (17)..(18): n is a, c, g, or u
uaaanuucaugggnuannuaauu

SEQ ID NO: 132168 - RNA, 24 nt, Artificial Sequence
  Synthetic
  misc_feature (6)..(6): n is a, c, g, or u
  misc_feature (15)..(15): n is a, c, g, or u
  misc_feature (18)..(19): n is a, c, g, or u
cuaaanuucaugggnuannuaauu

SEQ ID NO: 132169 - RNA, 18 nt, Artificial Sequence
  Synthetic
  misc_feature (9)..(9): n is a, c, g, or u
  misc_feature (12)..(12): n is a, c, g, or u
cauuuacangangacauu

SEQ ID NO: 132170 - RNA, 19 nt, Artificial Sequence
  Synthetic
  misc_feature (10)..(10): n is a, c, g, or u
  misc_feature (13)..(13): n is a, c, g, or u
ucauuuacangangacauu

SEQ ID NO: 132171 - RNA, 20 nt, Artificial Sequence
  Synthetic
  misc_feature (11)..(11): n is a, c, g, or u
  misc_feature (14)..(14): n is a, c, g, or u
uucauuuacangangacauu

SEQ ID NO: 132172 - RNA, 21 nt, Artificial Sequence
  Synthetic
  misc_feature (12)..(12): n is a, c, g, or u
  misc_feature (15)..(15): n is a, c, g, or u
auucauuuacangangacauu

SEQ ID NO: 132173 - RNA, 22 nt, Artificial Sequence
  Synthetic
  misc_feature (1)..(1): n is a, c, g, or u
  misc_feature (13)..(13): n is a, c, g, or u
  misc_feature (16)..(16): n is a, c, g, or u
nauucauuuacangangacauu

SEQ ID NO: 132174 - RNA, 23 nt, Artificial Sequence
  Synthetic
  misc_feature (2)..(2): n is a, c, g, or u
  misc_feature (14)..(14): n is a, c, g, or u
  misc_feature (17)..(17): n is a, c, g, or u
anauucauuuacangangacauu

SEQ ID NO: 132175 - RNA, 24 nt, Artificial Sequence
  Synthetic
  misc_feature (3)..(3): n is a, c, g, or u
  misc_feature (15)..(15): n is a, c, g, or u
  misc_feature (18)..(18): n is a, c, g, or u
aanauucauuuacangangacauu

SEQ ID NO: 132176 - RNA, 18 nt, Artificial Sequence
  Synthetic
  misc_feature (15)..(15): n is a, c, g, or u
aaaguaugucaaagnauu

SEQ ID NO: 132177 - RNA, 21 nt, Artificial Sequence
  Synthetic
  misc_feature (18)..(18): n is a, c, g, or u
uggaaaguaugucaaagnauu

SEQ ID NO: 132178 - RNA, 22 nt, Artificial Sequence
  Synthetic
  misc_feature (19)..(19): n is a, c, g, or u
uuggaaaguaugucaaagnauu

SEQ ID NO: 132179 - RNA, 23 nt, Artificial Sequence
  Synthetic
  misc_feature (20)..(20): n is a, c, g, or u
auuggaaaguaugucaaagnauu

SEQ ID NO: 132180 - RNA, 19 nt, Artificial Sequence
  Synthetic
ugcuaugccucaucuucuu

SEQ ID NO: 132181 - RNA, 20 nt, Artificial Sequence
  Synthetic
cugcuaugccucaucuucuu

SEQ ID NO: 132182 - RNA, 18 nt, Artificial Sequence
  Synthetic
aucuucuuauugguucuu

SEQ ID NO: 132183 - RNA, 19 nt, Artificial Sequence
  Synthetic
caucuucuuauugguucuu

SEQ ID NO: 132184 - RNA, 20 nt, Artificial Sequence
  Synthetic
ucaucuucuuauugguucuu

SEQ ID NO: 132185 - RNA, 21 nt, Artificial Sequence
  Synthetic
cucaucuucuuauugguucuu

SEQ ID NO: 132186 - RNA, 22 nt, Artificial Sequence
  Synthetic
ccucaucuucuuauugguucuu

SEQ ID NO: 132187 - RNA, 24 nt, Artificial Sequence
  Synthetic
ugccucaucuucuuauugguucuu

SEQ ID NO: 132188 - RNA, 18 nt, Artificial Sequence
  Synthetic
  misc_feature (1)..(1): n is a, c, g, or u
ncccuuuauaccgcuguu

SEQ ID NO: 132189 - RNA, 20 nt, Artificial Sequence
  Synthetic
  misc_feature (3)..(3): n is a, c, g, or u
agncccuuuauaccgcuguu

SEQ ID NO: 132190 - RNA, 22 nt, Artificial Sequence
  Synthetic
  misc_feature (5)..(5): n is a, c, g, or u
ugagncccuuuauaccgcuguu

SEQ ID NO: 132191 - RNA, 23 nt, Artificial Sequence
  Synthetic
  misc_feature (1)..(1): n is a, c, g, or u
  misc_feature (6)..(6): n is a, c, g, or u
nugagncccuuuauaccgcuguu

SEQ ID NO: 132192 - RNA, 24 nt, Artificial Sequence
  Synthetic
  misc_feature (2)..(2): n is a, c, g, or u
  misc_feature (7)..(7): n is a, c, g, or u
cnugagncccuuuauaccgcuguu

SEQ ID NO: 132193 - RNA, 18 nt, Artificial Sequence
  Synthetic
ccaacuuacaaggccuuu

SEQ ID NO: 132194 - RNA, 20 nt, Artificial Sequence
  Synthetic
cgccaacuuacaaggccuuu

SEQ ID NO: 132195 - RNA, 18 nt, Artificial Sequence
  Synthetic
  misc_feature (4)..(4): n is a, c, g, or u
uganuauuuggucucuuu

SEQ ID NO: 132196 - RNA, 19 nt, Artificial Sequence
  Synthetic
  misc_feature (5)..(5): n is a, c, g, or u
uuganuauuuggucucuuu

SEQ ID NO: 132197 - RNA, 20 nt, Artificial Sequence
  Synthetic
  misc_feature (6)..(6): n is a, c, g, or u
cuuganuauuuggucucuuu

SEQ ID NO: 132198 - RNA, 21 nt, Artificial Sequence
  Synthetic
  misc_feature (1)..(1): n is a, c, g, or u
  misc_feature (7)..(7): n is a, c, g, or u
ncuuganuauuuggucucuuu

SEQ ID NO: 132199 - RNA, 22 nt, Artificial Sequence
  Synthetic
  misc_feature (2)..(2): n is a, c, g, or u
  misc_feature (8)..(8): n is a, c, g, or u
uncuuganuauuuggucucuuu

SEQ ID NO: 132200 - RNA, 24 nt, Artificial Sequence
  Synthetic
  misc_feature (4)..(4): n is a, c, g, or u
  misc_feature (10)..(10): n is a, c, g, or u
uguncuuganuauuuggucucuuu

SEQ ID NO: 132201 - RNA, 18 nt, Artificial Sequence
  Synthetic
  misc_feature (3)..(3): n is a, c, g, or u
aanccucugggauucuuu

SEQ ID NO: 132202 - RNA, 19 nt, Artificial Sequence
  Synthetic
  misc_feature (4)..(4): n is a, c, g, or u
caanccucugggauucuuu

SEQ ID NO: 132203 - RNA, 20 nt, Artificial Sequence
  Synthetic
  misc_feature (5)..(5): n is a, c, g, or u
ccaanccucugggauucuuu

SEQ ID NO: 132204 - RNA, 21 nt, Artificial Sequence
  Synthetic
  misc_feature (6)..(6): n is a, c, g, or u
cccaanccucugggauucuuu

SEQ ID NO: 132205 - RNA, 22 nt, Artificial Sequence
  Synthetic
  misc_feature (7)..(7): n is a, c, g, or u
ucccaanccucugggauucuuu

SEQ ID NO: 132206 - RNA, 23 nt, Artificial Sequence
  Synthetic
  misc_feature (8)..(8): n is a, c, g, or u
uucccaanccucugggauucuuu

SEQ ID NO: 132207 - RNA, 18 nt, Artificial Sequence
  Synthetic
  misc_feature (7)..(7): n is a, c, g, or u
uuucucnuggcucaguuu

SEQ ID NO: 132208 - RNA, 20 nt, Artificial Sequence
  Synthetic
  misc_feature (9)..(9): n is a, c, g, or u
cguuucucnuggcucaguuu

SEQ ID NO: 132209 - RNA, 21 nt, Artificial Sequence
  Synthetic
  misc_feature (10)..(10): n is a, c, g, or u
ccguuucucnuggcucaguuu

SEQ ID NO: 132210 - RNA, 22 nt, Artificial Sequence
  Synthetic
  misc_feature (11)..(11): n is a, c, g, or u
uccguuucucnuggcucaguuu

SEQ ID NO: 132211 - RNA, 24 nt, Artificial Sequence
  Synthetic
  misc_feature (13)..(13): n is a, c, g, or u
aguccguuucucnuggcucaguuu

SEQ ID NO: 132212 - RNA, 18 nt, Artificial Sequence
  Synthetic
  misc_feature (2)..(2): n is a, c, g, or u
  misc_feature (11)..(11): n is a, c, g, or u
  misc_feature (15)..(15): n is a, c, g, or u
cnccacacggnggunuuu

SEQ ID NO: 132213 - RNA, 19 nt, Artificial Sequence
  Synthetic
  misc_feature (3)..(3): n is a, c, g, or u
  misc_feature (12)..(12): n is a, c, g, or u
  misc_feature (16)..(16): n is a, c, g, or u
ccnccacacggnggunuuu

SEQ ID NO: 132214 - RNA, 20 nt, Artificial Sequence
  Synthetic
  misc_feature (1)..(1): n is a, c, g, or u
  misc_feature (4)..(4): n is a, c, g, or u
  misc_feature (13)..(13): n is a, c, g, or u
  misc_feature (17)..(17): n is a, c, g, or u
nccnccacacggnggunuuu

SEQ ID NO: 132215 - RNA, 21 nt, Artificial Sequence
  Synthetic
  misc_feature (2)..(2): n is a, c, g, or u
  misc_feature (5)..(5): n is a, c, g, or u
  misc_feature (14)..(14): n is a, c, g, or u
  misc_feature (18)..(18): n is a, c, g, or u
cnccnccacacggnggunuuu

SEQ ID NO: 132216 - RNA, 22 nt, Artificial Sequence
  Synthetic
  misc_feature (3)..(3): n is a, c, g, or u
  misc_feature (6)..(6): n is a, c, g, or u
  misc_feature (15)..(15): n is a, c, g, or u
  misc_feature (19)..(19): n is a, c, g, or u
acnccnccacacggnggunuuu

SEQ ID NO: 132217 - RNA, 23 nt, Artificial Sequence
  Synthetic
  misc_feature (4)..(4): n is a, c, g, or u
  misc_feature (7)..(7): n is a, c, g, or u
  misc_feature (16)..(16): n is a, c, g, or u
  misc_feature (20)..(20): n is a, c, g, or u
cacnccnccacacggnggunuuu

SEQ ID NO: 132218 - RNA, 24 nt, Artificial Sequence
  Synthetic
  misc_feature (5)..(5): n is a, c, g, or u
  misc_feature (8)..(8): n is a, c, g, or u
  misc_feature (17)..(17): n is a, c, g, or u
  misc_feature (21)..(21): n is a, c, g, or u
ucacnccnccacacggnggunuuu

SEQ ID NO: 132219 - RNA, 18 nt, Artificial Sequence
  Synthetic
  misc_feature (11)..(11): n is a, c, g, or u
cacguagcgcnucauuuu

SEQ ID NO: 132220 - RNA, 19 nt, Artificial Sequence
  Synthetic
  misc_feature (12)..(12): n is a, c, g, or u
acacguagcgcnucauuuu

SEQ ID NO: 132221 - RNA, 20 nt, Artificial Sequence
  Synthetic
  misc_feature (1)..(1): n is a, c, g, or u
  misc_feature (13)..(13): n is a, c, g, or u
nacacguagcgcnucauuuu

SEQ ID NO: 132222 - RNA, 21 nt, Artificial Sequence
  Synthetic
  misc_feature (2)..(2): n is a, c, g, or u
  misc_feature (14)..(14): n is a, c, g, or u
cnacacguagcgcnucauuuu

SEQ ID NO: 132223 - RNA, 22 nt, Artificial Sequence
  Synthetic
  misc_feature (3)..(3): n is a, c, g, or u
  misc_feature (15)..(15): n is a, c, g, or u
acnacacguagcgcnucauuuu

SEQ ID NO: 132224 - RNA, 23 nt, Artificial Sequence
  Synthetic
  misc_feature (4)..(4): n is a, c, g, or u
  misc_feature (16)..(16): n is a, c, g, or u
aacnacacguagcgcnucauuuu

SEQ ID NO: 132225 - RNA, 24 nt, Artificial Sequence
  Synthetic
  misc_feature (5)..(5): n is a, c, g, or u
  misc_feature (17)..(17): n is a, c, g, or u
aaacnacacguagcgcnucauuuu

SEQ ID NO: 132226 - RNA, 18 nt, Artificial Sequence
  Synthetic
gaagucagaaggcaaaaa

SEQ ID NO: 132227 - RNA, 19 nt, Artificial Sequence
  Synthetic
agaagucagaaggcaaaaa

SEQ ID NO: 132228 - RNA, 20 nt, Artificial Sequence
  Synthetic
aagaagucagaaggcaaaaa

SEQ ID NO: 132229 - RNA, 21 nt, Artificial Sequence
  Synthetic
aaagaagucagaaggcaaaaa

SEQ ID NO: 132230 - RNA, 22 nt, Artificial Sequence
  Synthetic
gaaagaagucagaaggcaaaaa

SEQ ID NO: 132231 - RNA, 23 nt, Artificial Sequence
  Synthetic
ggaaagaagucagaaggcaaaaa

SEQ ID NO: 132232 - RNA, 24 nt, Artificial Sequence
  Synthetic
aggaaagaagucagaaggcaaaaa

SEQ ID NO: 132233 - RNA, 18 nt, Artificial Sequence
  Synthetic
  misc_feature (6)..(6): n is a, c, g, or u
acagunucucuuccaaaa

SEQ ID NO: 132234 - RNA, 19 nt, Artificial Sequence
  Synthetic
  misc_feature (1)..(1): n is a, c, g, or u
  misc_feature (7)..(7): n is a, c, g, or u
nacagunucucuuccaaaa

SEQ ID NO: 132235 - RNA, 20 nt, Artificial Sequence
  Synthetic
  misc_feature (2)..(2): n is a, c, g, or u
  misc_feature (8)..(8): n is a, c, g, or u
gnacagunucucuuccaaaa

SEQ ID NO: 132236 - RNA, 21 nt, Artificial Sequence
  Synthetic
  misc_feature (3)..(3): n is a, c, g, or u
  misc_feature (9)..(9): n is a, c, g, or u
agnacagunucucuuccaaaa

SEQ ID NO: 132237 - RNA, 22 nt, Artificial Sequence
  Synthetic
  misc_feature (4)..(4): n is a, c, g, or u
  misc_feature (10)..(10): n is a, c, g, or u
aagnacagunucucuuccaaaa

SEQ ID NO: 132238 - RNA, 23 nt, Artificial Sequence
  Synthetic
  misc_feature (5)..(5): n is a, c, g, or u
  misc_feature (11)..(11): n is a, c, g, or u
caagnacagunucucuuccaaaa

SEQ ID NO: 132239 - RNA, 24 nt, Artificial Sequence
  Synthetic
  misc_feature (6)..(6): n is a, c, g, or u
  misc_feature (12)..(12): n is a, c, g, or u
ucaagnacagunucucuuccaaaa

SEQ ID NO: 132240 - RNA, 18 nt, Artificial Sequence
  Synthetic
agaagucagaaggcaaaa

SEQ ID NO: 132241 - RNA, 19 nt, Artificial Sequence
  Synthetic
aagaagucagaaggcaaaa

SEQ ID NO: 132242 - RNA, 20 nt, Artificial Sequence
  Synthetic
aaagaagucagaaggcaaaa

SEQ ID NO: 132243 - RNA, 21 nt, Artificial Sequence
  Synthetic
gaaagaagucagaaggcaaaa

SEQ ID NO: 132244 - RNA, 22 nt, Artificial Sequence
  Synthetic
ggaaagaagucagaaggcaaaa

SEQ ID NO: 132245 - RNA, 23 nt, Artificial Sequence
  Synthetic
aggaaagaagucagaaggcaaaa

SEQ ID NO: 132246 - RNA, 24 nt, Artificial Sequence
  Synthetic
aaggaaagaagucagaaggcaaaa

SEQ ID NO: 132247 - RNA, 18 nt, Artificial Sequence
  Synthetic
  misc_feature (5)..(5): n is a, c, g, or u
ggugnucccccuagaaaa

SEQ ID NO: 132248 - RNA, 19 nt, Artificial Sequence
  Synthetic
  misc_feature (6)..(6): n is a, c, g, or u
gggugnucccccuagaaaa

SEQ ID NO: 132249 - RNA, 20 nt, Artificial Sequence
  Synthetic
  misc_feature (7)..(7): n is a, c, g, or u
cgggugnucccccuagaaaa

SEQ ID NO: 132250 - RNA, 21 nt, Artificial Sequence
  Synthetic
  misc_feature (8)..(8): n is a, c, g, or u
acgggugnucccccuagaaaa

SEQ ID NO: 132251 - RNA, 22 nt, Artificial Sequence
  Synthetic
  misc_feature (9)..(9): n is a, c, g, or u
cacgggugnucccccuagaaaa

SEQ ID NO: 132252 - RNA, 23 nt, Artificial Sequence
  Synthetic
  misc_feature (10)..(10): n is a, c, g, or u
acacgggugnucccccuagaaaa

SEQ ID NO: 132253 - RNA, 24 nt, Artificial Sequence
  Synthetic
  misc_feature (11)..(11): n is a, c, g, or u
cacacgggugnucccccuagaaaa

SEQ ID NO: 132254 - RNA, 18 nt, Artificial Sequence
  Synthetic
gagccaccagcaggaaaa

SEQ ID NO: 132255 - RNA, 19 nt, Artificial Sequence
  Synthetic
ggagccaccagcaggaaaa

SEQ ID NO: 132256 - RNA, 20 nt, Artificial Sequence
  Synthetic
uggagccaccagcaggaaaa

SEQ ID NO: 132257 - RNA, 21 nt, Artificial Sequence
  Synthetic
cuggagccaccagcaggaaaa

SEQ ID NO: 132258 - RNA, 22 nt, Artificial Sequence
  Synthetic
acuggagccaccagcaggaaaa

SEQ ID NO: 132259 - RNA, 23 nt, Artificial Sequence
  Synthetic
aacuggagccaccagcaggaaaa

SEQ ID NO: 132260 - RNA, 24 nt, Artificial Sequence
  Synthetic
gaacuggagccaccagcaggaaaa

SEQ ID NO: 132261 - RNA, 18 nt, Artificial Sequence
  Synthetic
  misc_feature (11)..(11): n is a, c, g, or u
uguauacccanagacaaa

SEQ ID NO: 132262 - RNA, 19 nt, Artificial Sequence
  Synthetic
  misc_feature (12)..(12): n is a, c, g, or u
auguauacccanagacaaa

SEQ ID NO: 132263 - RNA, 20 nt, Artificial Sequence
  Synthetic
  misc_feature (13)..(13): n is a, c, g, or u
aauguauacccanagacaaa

SEQ ID NO: 132264 - RNA, 21 nt, Artificial Sequence
  Synthetic
  misc_feature (14)..(14): n is a, c, g, or u
aaauguauacccanagacaaa

SEQ ID NO: 132265 - RNA, 22 nt, Artificial Sequence
  Synthetic
  misc_feature (15)..(15): n is a, c, g, or u
uaaauguauacccanagacaaa

SEQ ID NO: 132266 - RNA, 23 nt, Artificial Sequence
  Synthetic
  misc_feature (16)..(16): n is a, c, g, or u
uuaaauguauacccanagacaaa

SEQ ID NO: 132267 - RNA, 24 nt, Artificial Sequence
  Synthetic
  misc_feature (17)..(17): n is a, c, g, or u
uuuaaauguauacccanagacaaa

SEQ ID NO: 132268 - RNA, 18 nt, Artificial Sequence
  Synthetic
agcgauaaccaggacaaa

SEQ ID NO: 132269 - RNA, 19 nt, Artificial Sequence
  Synthetic
cagcgauaaccaggacaaa

SEQ ID NO: 132270 - RNA, 20 nt, Artificial Sequence
  Synthetic
ccagcgauaaccaggacaaa

SEQ ID NO: 132271 - RNA, 21 nt, Artificial Sequence
  Synthetic
uccagcgauaaccaggacaaa

SEQ ID NO: 132272 - RNA, 22 nt, Artificial Sequence
  Synthetic
auccagcgauaaccaggacaaa

SEQ ID NO: 132273 - RNA, 23 nt, Artificial Sequence
  Synthetic
cauccagcgauaaccaggacaaa

SEQ ID NO: 132274 - RNA, 24 nt, Artificial Sequence
  Synthetic
acauccagcgauaaccaggacaaa

SEQ ID NO: 132275 - RNA, 18 nt, Artificial Sequence
  Synthetic
  misc_feature (1)..(1): n is a, c, g, or u
  misc_feature (7)..(7): n is a, c, g, or u
nacagunucucuuccaaa

SEQ ID NO: 132276 - RNA, 19 nt, Artificial Sequence
  Synthetic
  misc_feature (2)..(2): n is a, c, g, or u
  misc_feature (8)..(8): n is a, c, g, or u
gnacagunucucuuccaaa

SEQ ID NO: 132277 - RNA, 20 nt, Artificial Sequence
  Synthetic
  misc_feature (3)..(3): n is a, c, g, or u
  misc_feature (9)..(9): n is a, c, g, or u
agnacagunucucuuccaaa

SEQ ID NO: 132278 - RNA, 21 nt, Artificial Sequence
  Synthetic
  misc_feature (4)..(4): n is a, c, g, or u
  misc_feature (10)..(10): n is a, c, g, or u
aagnacagunucucuuccaaa

SEQ ID NO: 132279 - RNA, 22 nt, Artificial Sequence
  Synthetic
  misc_feature (5)..(5): n is a, c, g, or u
  misc_feature (11)..(11): n is a, c, g, or u
caagnacagunucucuuccaaa

SEQ ID NO: 132280 - RNA, 23 nt, Artificial Sequence
  Synthetic
  misc_feature (6)..(6): n is a, c, g, or u
  misc_feature (12)..(12): n is a, c, g, or u
ucaagnacagunucucuuccaaa

SEQ ID NO: 132281 - RNA, 24 nt, Artificial Sequence
  Synthetic
  misc_feature (1)..(1): n is a, c, g, or u
  misc_feature (7)..(7): n is a, c, g, or u
  misc_feature (13)..(13): n is a, c, g, or u
nucaagnacagunucucuuccaaa

SEQ ID NO: 132282 - RNA, 18 nt, Artificial Sequence
  Synthetic
agaccggcugcgagcaaa

SEQ ID NO: 132283 - RNA, 19 nt, Artificial Sequence
  Synthetic
cagaccggcugcgagcaaa

SEQ ID NO: 132284 - RNA, 20 nt, Artificial Sequence
  Synthetic
ccagaccggcugcgagcaaa

SEQ ID NO: 132285 - RNA, 21 nt, Artificial Sequence
  Synthetic
uccagaccggcugcgagcaaa

SEQ ID NO: 132286 - RNA, 22 nt, Artificial Sequence
  Synthetic
cuccagaccggcugcgagcaaa

SEQ ID NO: 132287 - RNA, 23 nt, Artificial Sequence
  Synthetic
gcuccagaccggcugcgagcaaa

SEQ ID NO: 132288 - RNA, 24 nt, Artificial Sequence
  Synthetic
ugcuccagaccggcugcgagcaaa

SEQ ID NO: 132289 - RNA, 18 nt, Artificial Sequence
  Synthetic
aagaagucagaaggcaaa

SEQ ID NO: 132290 - RNA, 19 nt, Artificial Sequence
  Synthetic
aaagaagucagaaggcaaa

SEQ ID NO: 132291 - RNA, 20 nt, Artificial Sequence
  Synthetic
gaaagaagucagaaggcaaa

SEQ ID NO: 132292 - RNA, 21 nt, Artificial Sequence
  Synthetic
ggaaagaagucagaaggcaaa

SEQ ID NO: 132293 - RNA, 22 nt, Artificial Sequence
  Synthetic
aggaaagaagucagaaggcaaa

SEQ ID NO: 132294 - RNA, 23 nt, Artificial Sequence
  Synthetic
aaggaaagaagucagaaggcaaa

SEQ ID NO: 132295 - RNA, 24 nt, Artificial Sequence
  Synthetic
gaaggaaagaagucagaaggcaaa

SEQ ID NO: 132296 - RNA, 18 nt, Artificial Sequence
  Synthetic
uuguaaguuggcgagaaa

SEQ ID NO: 132297 - RNA, 19 nt, Artificial Sequence
  Synthetic
cuuguaaguuggcgagaaa

SEQ ID NO: 132298 - RNA, 20 nt, Artificial Sequence
  Synthetic
ccuuguaaguuggcgagaaa

SEQ ID NO: 132299 - RNA, 21 nt, Artificial Sequence
  Synthetic
gccuuguaaguuggcgagaaa

SEQ ID NO: 132300 - RNA, 22 nt, Artificial Sequence
  Synthetic
ggccuuguaaguuggcgagaaa

SEQ ID NO: 132301 - RNA, 23 nt, Artificial Sequence
  Synthetic
aggccuuguaaguuggcgagaaa

SEQ ID NO: 132302 - RNA, 24 nt, Artificial Sequence
  Synthetic
aaggccuuguaaguuggcgagaaa

SEQ ID NO: 132303 - RNA, 18 nt, Artificial Sequence
  Synthetic
  misc_feature (6)..(6): n is a, c, g, or u
gggugnucccccuagaaa

SEQ ID NO: 132304 - RNA, 19 nt, Artificial Sequence
  Synthetic
  misc_feature (7)..(7): n is a, c, g, or u
cgggugnucccccuagaaa

SEQ ID NO: 132305 - RNA, 20 nt, Artificial Sequence
  Synthetic
  misc_feature (8)..(8): n is a, c, g, or u
acgggugnucccccuagaaa

SEQ ID NO: 132306 - RNA, 21 nt, Artificial Sequence
  Synthetic
  misc_feature (9)..(9): n is a, c, g, or u
cacgggugnucccccuagaaa

SEQ ID NO: 132307 - RNA, 22 nt, Artificial Sequence
  Synthetic
  misc_feature (10)..(10): n is a, c, g, or u
acacgggugnucccccuagaaa

SEQ ID NO: 132308 - RNA, 23 nt, Artificial Sequence
  Synthetic
  misc_feature (11)..(11): n is a, c, g, or u
cacacgggugnucccccuagaaa

SEQ ID NO: 132309 - RNA, 24 nt, Artificial Sequence
  Synthetic
  misc_feature (12)..(12): n is a, c, g, or u
acacacgggugnucccccuagaaa

SEQ ID NO: 132310 - RNA, 18 nt, Artificial Sequence
  Synthetic
  misc_feature (10)..(10): n is a, c, g, or u
uaaaugaaunuuaggaaa

SEQ ID NO: 132311 - RNA, 19 nt, Artificial Sequence
  Synthetic
  misc_feature (11)..(11): n is a, c, g, or u
guaaaugaaunuuaggaaa

SEQ ID NO: 132312 - RNA, 20 nt, Artificial Sequence
  Synthetic
  misc_feature (12)..(12): n is a, c, g, or u
uguaaaugaaunuuaggaaa

SEQ ID NO: 132313 - RNA, 21 nt, Artificial Sequence
  Synthetic
  misc_feature (1)..(1): n is a, c, g, or u
  misc_feature (13)..(13): n is a, c, g, or u
nuguaaaugaaunuuaggaaa

SEQ ID NO: 132314 - RNA, 22 nt, Artificial Sequence
  Synthetic
  misc_feature (2)..(2): n is a, c, g, or u
  misc_feature (14)..(14): n is a, c, g, or u
cnuguaaaugaaunuuaggaaa

SEQ ID NO: 132315 - RNA, 23 nt, Artificial Sequence
  Synthetic
  misc_feature (3)..(3): n is a, c, g, or u
  misc_feature (15)..(15): n is a, c, g, or u
ucnuguaaaugaaunuuaggaaa

SEQ ID NO: 132316 - RNA, 24 nt, Artificial Sequence
  Synthetic
  misc_feature (1)..(1): n is a, c, g, or u
  misc_feature (4)..(4): n is a, c, g, or u
  misc_feature (16)..(16): n is a, c, g, or u
nucnuguaaaugaaunuuaggaaa

SEQ ID NO: 132317 - RNA, 18 nt, Artificial Sequence
  Synthetic
acagcaacaugagggaaa

SEQ ID NO: 132318 - RNA, 19 nt, Artificial Sequence
  Synthetic
uacagcaacaugagggaaa

SEQ ID NO: 132319 - RNA, 20 nt, Artificial Sequence
  Synthetic
guacagcaacaugagggaaa

SEQ ID NO: 132320 - RNA, 21 nt, Artificial Sequence
  Synthetic
uguacagcaacaugagggaaa

SEQ ID NO: 132321 - RNA, 22 nt, Artificial Sequence
  Synthetic
uuguacagcaacaugagggaaa

SEQ ID NO: 132322 - RNA, 23 nt, Artificial Sequence
  Synthetic
uuuguacagcaacaugagggaaa

SEQ ID NO: 132323 - RNA, 24 nt, Artificial Sequence
  Synthetic
uuuuguacagcaacaugagggaaa

SEQ ID NO: 132324 - RNA, 18 nt, Artificial Sequence
  Synthetic
  misc_feature (12)..(12): n is a, c, g, or u
ucauccauauancugaaa

SEQ ID NO: 132325 - RNA, 19 nt, Artificial Sequence
  Synthetic
  misc_feature (13)..(13): n is a, c, g, or u
aucauccauauancugaaa

SEQ ID NO: 132326 - RNA, 20 nt, Artificial Sequence
  Synthetic
  misc_feature (14)..(14): n is a, c, g, or u
caucauccauauancugaaa

SEQ ID NO: 132327 - RNA, 21 nt, Artificial Sequence
  Synthetic
  misc_feature (15)..(15): n is a, c, g, or u
acaucauccauauancugaaa

SEQ ID NO: 132328 - RNA, 22 nt, Artificial Sequence
  Synthetic
  misc_feature (16)..(16): n is a, c, g, or u
cacaucauccauauancugaaa

SEQ ID NO: 132329 - RNA, 23 nt, Artificial Sequence
  Synthetic
  misc_feature (17)..(17): n is a, c, g, or u
ccacaucauccauauancugaaa

SEQ ID NO: 132330 - RNA, 24 nt, Artificial Sequence
  Synthetic
  misc_feature (18)..(18): n is a, c, g, or u
accacaucauccauauancugaaa

SEQ ID NO: 132331 - RNA, 18 nt, Artificial Sequence
  Synthetic
acaaauggcacuaguaaa

SEQ ID NO: 132332 - RNA, 19 nt, Artificial Sequence
  Synthetic
aacaaauggcacuaguaaa

SEQ ID NO: 132333 - RNA, 20 nt, Artificial Sequence
  Synthetic
gaacaaauggcacuaguaaa

SEQ ID NO: 132334 - RNA, 21 nt, Artificial Sequence
  Synthetic
ugaacaaauggcacuaguaaa

SEQ ID NO: 132335 - RNA, 22 nt, Artificial Sequence
  Synthetic
cugaacaaauggcacuaguaaa

SEQ ID NO: 132336 - RNA, 23 nt, Artificial Sequence
  Synthetic
acugaacaaauggcacuaguaaa

SEQ ID NO: 132337 - RNA, 24 nt, Artificial Sequence
  Synthetic
cacugaacaaauggcacuaguaaa

SEQ ID NO: 132338 - RNA, 18 nt, Artificial Sequence
  Synthetic
gcgccgacgggacguaaa

SEQ ID NO: 132339 - RNA, 19 nt, Artificial Sequence
  Synthetic
agcgccgacgggacguaaa

SEQ ID NO: 132340 - RNA, 20 nt, Artificial Sequence
  Synthetic
cagcgccgacgggacguaaa

SEQ ID NO: 132341 - RNA, 18 nt, Artificial Sequence
  Synthetic
acggggagaccgcguaaa

SEQ ID NO: 132342 - RNA, 19 nt, Artificial Sequence
  Synthetic
gacggggagaccgcguaaa

SEQ ID NO: 132343 - RNA, 20 nt, Artificial Sequence
  Synthetic
agacggggagaccgcguaaa

SEQ ID NO: 132344 - RNA, 21 nt, Artificial Sequence
  Synthetic
cagacggggagaccgcguaaa

SEQ ID NO: 132345 - RNA, 22 nt, Artificial Sequence
  Synthetic
acagacggggagaccgcguaaa

SEQ ID NO: 132346 - RNA, 23 nt, Artificial Sequence
  Synthetic
cacagacggggagaccgcguaaa

SEQ ID NO: 132347 - RNA, 24 nt, Artificial Sequence
  Synthetic
gcacagacggggagaccgcguaaa

SEQ ID NO: 132348 - RNA, 18 nt, Artificial Sequence
  Synthetic
  misc_feature (1)..(1): n is a, c, g, or u
  misc_feature (4)..(4): n is a, c, g, or u
nuanccacauuguguaaa

SEQ ID NO: 132349 - RNA, 19 nt, Artificial Sequence
  Synthetic
  misc_feature (2)..(2): n is a, c, g, or u
  misc_feature (5)..(5): n is a, c, g, or u
gnuanccacauuguguaaa

SEQ ID NO: 132350 - RNA, 20 nt, Artificial Sequence
  Synthetic
  misc_feature (3)..(3): n is a, c, g, or u
  misc_feature (6)..(6): n is a, c, g, or u
ggnuanccacauuguguaaa

SEQ ID NO: 132351 - RNA, 21 nt, Artificial Sequence
  Synthetic
  misc_feature (4)..(4): n is a, c, g, or u
  misc_feature (7)..(7): n is a, c, g, or u
aggnuanccacauuguguaaa

SEQ ID NO: 132352 - RNA, 22 nt, Artificial Sequence
  Synthetic
  misc_feature (5)..(5): n is a, c, g, or u
  misc_feature (8)..(8): n is a, c, g, or u
caggnuanccacauuguguaaa

SEQ ID NO: 132353 - RNA, 23 nt, Artificial Sequence
  Synthetic
  misc_feature (6)..(6): n is a, c, g, or u
  misc_feature (9)..(9): n is a, c, g, or u
gcaggnuanccacauuguguaaa

SEQ ID NO: 132354 - RNA, 24 nt, Artificial Sequence
  Synthetic
  misc_feature (1)..(1): n is a, c, g, or u
  misc_feature (7)..(7): n is a, c, g, or u
  misc_feature (10)..(10): n is a, c, g, or u
ngcaggnuanccacauuguguaaa

SEQ ID NO: 132355 - RNA, 18 nt, Artificial Sequence
  Synthetic
uugccauucaggauuaaa

SEQ ID NO: 132356 - RNA, 19 nt, Artificial Sequence
  Synthetic
uuugccauucaggauuaaa

SEQ ID NO: 132357 - RNA, 20 nt, Artificial Sequence
  Synthetic
guuugccauucaggauuaaa

SEQ ID NO: 132358 - RNA, 21 nt, Artificial Sequence
  Synthetic
aguuugccauucaggauuaaa

SEQ ID NO: 132359 - RNA, 22 nt, Artificial Sequence
  Synthetic
gaguuugccauucaggauuaaa

SEQ ID NO: 132360 - RNA, 23 nt, Artificial Sequence
  Synthetic
ggaguuugccauucaggauuaaa

SEQ ID NO: 132361 - RNA, 24 nt, Artificial Sequence
  Synthetic
aggaguuugccauucaggauuaaa

SEQ ID NO: 132362 - RNA, 18 nt, Artificial Sequence
  Synthetic
gaggauucuugucaacaa

SEQ ID NO: 132363 - RNA, 19 nt, Artificial Sequence
  Synthetic
ugaggauucuugucaacaa

SEQ ID NO: 132364 - RNA, 20 nt, Artificial Sequence
  Synthetic
gugaggauucuugucaacaa

SEQ ID NO: 132365 - RNA, 21 nt, Artificial Sequence
  Synthetic
ugugaggauucuugucaacaa

SEQ ID NO: 132366 - RNA, 22 nt, Artificial Sequence
  Synthetic
uugugaggauucuugucaacaa

SEQ ID NO: 132367 - RNA, 23 nt, Artificial Sequence
  Synthetic
auugugaggauucuugucaacaa

SEQ ID NO: 132368 - RNA, 24 nt, Artificial Sequence
  Synthetic
uauugugaggauucuugucaacaa

SEQ ID NO: 132369 - RNA, 18 nt, Artificial Sequence
  Synthetic
  misc_feature (12)..(12): n is a, c, g, or u
auguauacccanagacaa

SEQ ID NO: 132370 - RNA, 19 nt, Artificial Sequence
  Synthetic
  misc_feature (13)..(13): n is a, c, g, or u
aauguauacccanagacaa

SEQ ID NO: 132371 - RNA, 20 nt, Artificial Sequence
  Synthetic
  misc_feature (14)..(14): n is a, c, g, or u
aaauguauacccanagacaa

SEQ ID NO: 132372 - RNA, 21 nt, Artificial Sequence
  Synthetic
  misc_feature (15)..(15): n is a, c, g, or u
uaaauguauacccanagacaa

SEQ ID NO: 132373 - RNA, 22 nt, Artificial Sequence
  Synthetic
  misc_feature (16)..(16): n is a, c, g, or u
uuaaauguauacccanagacaa

SEQ ID NO: 132374 - RNA, 23 nt, Artificial Sequence
  Synthetic
  misc_feature (17)..(17): n is a, c, g, or u
uuuaaauguauacccanagacaa

SEQ ID NO: 132375 - RNA, 24 nt, Artificial Sequence
  Synthetic
  misc_feature (18)..(18): n is a, c, g, or u
guuuaaauguauacccanagacaa

SEQ ID NO: 132376 - RNA, 18 nt, Artificial Sequence
  Synthetic
cagcgauaaccaggacaa

SEQ ID NO: 132377 - RNA, 19 nt, Artificial Sequence
  Synthetic
ccagcgauaaccaggacaa

SEQ ID NO: 132378 - RNA, 20 nt, Artificial Sequence
  Synthetic
uccagcgauaaccaggacaa

SEQ ID NO: 132379 - RNA, 21 nt, Artificial Sequence
  Synthetic
auccagcgauaaccaggacaa

SEQ ID NO: 132380 - RNA, 22 nt, Artificial Sequence
  Synthetic
cauccagcgauaaccaggacaa

SEQ ID NO: 132381 - RNA, 23 nt, Artificial Sequence
  Synthetic
acauccagcgauaaccaggacaa

SEQ ID NO: 132382 - RNA, 24 nt, Artificial Sequence
  Synthetic
cacauccagcgauaaccaggacaa

SEQ ID NO: 132383 - RNA, 18 nt, Artificial Sequence
  Synthetic
ccuggaauuagaggacaa

SEQ ID NO: 132384 - RNA, 19 nt, Artificial Sequence
  Synthetic
uccuggaauuagaggacaa

SEQ ID NO: 132385 - RNA, 20 nt, Artificial Sequence
  Synthetic
auccuggaauuagaggacaa

SEQ ID NO: 132386 - RNA, 21 nt, Artificial Sequence
  Synthetic
gauccuggaauuagaggacaa

SEQ ID NO: 132387 - RNA, 22 nt, Artificial Sequence
  Synthetic
  misc_feature (1)..(1): n is a, c, g, or u
ngauccuggaauuagaggacaa

SEQ ID NO: 132388 - RNA, 23 nt, Artificial Sequence
  Synthetic
  misc_feature (2)..(2): n is a, c, g, or u
ungauccuggaauuagaggacaa

SEQ ID NO: 132389 - RNA, 24 nt, Artificial Sequence
  Synthetic
  misc_feature (3)..(3): n is a, c, g, or u
gungauccuggaauuagaggacaa

SEQ ID NO: 132390 - RNA, 18 nt, Artificial Sequence
  Synthetic
auaauccagaagaaccaa

SEQ ID NO: 132391 - RNA, 19 nt, Artificial Sequence
  Synthetic
gauaauccagaagaaccaa

SEQ ID NO: 132392 - RNA, 20 nt, Artificial Sequence
  Synthetic
ugauaauccagaagaaccaa

SEQ ID NO: 132393 - RNA, 21 nt, Artificial Sequence
  Synthetic
uugauaauccagaagaaccaa

SEQ ID NO: 132394 - RNA, 22 nt, Artificial Sequence
  Synthetic
cuugauaauccagaagaaccaa

SEQ ID NO: 132395 - RNA, 23 nt, Artificial Sequence
  Synthetic
ccuugauaauccagaagaaccaa

SEQ ID NO: 132396 - RNA, 24 nt, Artificial Sequence
  Synthetic
accuugauaauccagaagaaccaa

SEQ ID NO: 132397 - RNA, 18 nt, Artificial Sequence
  Synthetic
augggguugaagucccaa

SEQ ID NO: 132398 - RNA, 19 nt, Artificial Sequence
  Synthetic
gaugggguugaagucccaa

SEQ ID NO: 132399 - RNA, 20 nt, Artificial Sequence
  Synthetic
ugaugggguugaagucccaa

SEQ ID NO: 132400 - RNA, 21 nt, Artificial Sequence
  Synthetic
uugaugggguugaagucccaa

SEQ ID NO: 132401 - RNA, 22 nt, Artificial Sequence
  Synthetic
cuugaugggguugaagucccaa

SEQ ID NO: 132402 - RNA, 23 nt, Artificial Sequence
  Synthetic
ccuugaugggguugaagucccaa

SEQ ID NO: 132403 - RNA, 24 nt, Artificial Sequence
  Synthetic
uccuugaugggguugaagucccaa

SEQ ID NO: 132404 - RNA, 18 nt, Artificial Sequence
  Synthetic
guagguuuuguacagcaa

SEQ ID NO: 132405 - RNA, 19 nt, Artificial Sequence
  Synthetic
cguagguuuuguacagcaa

SEQ ID NO: 132406 - RNA, 20 nt, Artificial Sequence
  Synthetic
ccguagguuuuguacagcaa

SEQ ID NO: 132407 - RNA, 21 nt, Artificial Sequence
  Synthetic
uccguagguuuuguacagcaa

SEQ ID NO: 132408 - RNA, 22 nt, Artificial Sequence
  Synthetic
auccguagguuuuguacagcaa

SEQ ID NO: 132409 - RNA, 23 nt, Artificial Sequence
  Synthetic
cauccguagguuuuguacagcaa

SEQ ID NO: 132410 - RNA, 24 nt, Artificial Sequence
  Synthetic
ccauccguagguuuuguacagcaa

SEQ ID NO: 132411 - RNA, 18 nt, Artificial Sequence
  Synthetic
cagaccggcugcgagcaa

SEQ ID NO: 132412 - RNA, 19 nt, Artificial Sequence
  Synthetic
ccagaccggcugcgagcaa

SEQ ID NO: 132413 - RNA, 20 nt, Artificial Sequence
  Synthetic
uccagaccggcugcgagcaa

SEQ ID NO: 132414 - RNA, 21 nt, Artificial Sequence
  Synthetic
cuccagaccggcugcgagcaa

SEQ ID NO: 132415 - RNA, 22 nt, Artificial Sequence
  Synthetic
gcuccagaccggcugcgagcaa

SEQ ID NO: 132416 - RNA, 23 nt, Artificial Sequence
  Synthetic
ugcuccagaccggcugcgagcaa

SEQ ID NO: 132417 - RNA, 24 nt, Artificial Sequence
  Synthetic
uugcuccagaccggcugcgagcaa

SEQ ID NO: 132418 - RNA, 18 nt, Artificial Sequence
  Synthetic
gaauauggugacccgcaa

SEQ ID NO: 132419 - RNA, 19 nt, Artificial Sequence
  Synthetic
agaauauggugacccgcaa

SEQ ID NO: 132420 - RNA, 20 nt, Artificial Sequence
  Synthetic
aagaauauggugacccgcaa

SEQ ID NO: 132421 - RNA, 18 nt, Artificial Sequence
  Synthetic
ugugaggauucuugucaa

SEQ ID NO: 132422 - RNA, 19 nt, Artificial Sequence
  Synthetic
uugugaggauucuugucaa

SEQ ID NO: 132423 - RNA, 20 nt, Artificial Sequence
  Synthetic
auugugaggauucuugucaa

SEQ ID NO: 132424 - RNA, 21 nt, Artificial Sequence
  Synthetic
uauugugaggauucuugucaa

SEQ ID NO: 132425 - RNA, 22 nt, Artificial Sequence
  Synthetic
guauugugaggauucuugucaa

SEQ ID NO: 132426 - RNA, 23 nt, Artificial Sequence
  Synthetic
gguauugugaggauucuugucaa

SEQ ID NO: 132427 - RNA, 24 nt, Artificial Sequence
  Synthetic
cgguauugugaggauucuugucaa

SEQ ID NO: 132428 - RNA, 18 nt, Artificial Sequence
  Synthetic
  misc_feature (1)..(1): n is a, c, g, or u
  misc_feature (3)..(3): n is a, c, g, or u
ncngacggaaggaaagaa

SEQ ID NO: 132429 - RNA, 19 nt, Artificial Sequence
  Synthetic
  misc_feature (2)..(2): n is a, c, g, or u
  misc_feature (4)..(4): n is a, c, g, or u
cncngacggaaggaaagaa

SEQ ID NO: 132430 - RNA, 20 nt, Artificial Sequence
  Synthetic
  misc_feature (3)..(3): n is a, c, g, or u
  misc_feature (5)..(5): n is a, c, g, or u
ucncngacggaaggaaagaa

SEQ ID NO: 132431 - RNA, 21 nt, Artificial Sequence
  Synthetic
  misc_feature (4)..(4): n is a, c, g, or u
  misc_feature (6)..(6): n is a, c, g, or u
aucncngacggaaggaaagaa

SEQ ID NO: 132432 - RNA, 22 nt, Artificial Sequence
  Synthetic
  misc_feature (5)..(5): n is a, c, g, or u
  misc_feature (7)..(7): n is a, c, g, or u
gaucncngacggaaggaaagaa

SEQ ID NO: 132433 - RNA, 23 nt, Artificial Sequence
  Synthetic
  misc_feature (6)..(6): n is a, c, g, or u
  misc_feature (8)..(8): n is a, c, g, or u
agaucncngacggaaggaaagaa

SEQ ID NO: 132434 - RNA, 24 nt, Artificial Sequence
  Synthetic
  misc_feature (1)..(1): n is a, c, g, or u
  misc_feature (7)..(7): n is a, c, g, or u
  misc_feature (9)..(9): n is a, c, g, or u
nagaucncngacggaaggaaagaa

SEQ ID NO: 132435 - RNA, 18 nt, Artificial Sequence
  Synthetic
cagaagaaccaauaagaa

SEQ ID NO: 132436 - RNA, 19 nt, Artificial Sequence
  Synthetic
ccagaagaaccaauaagaa

SEQ ID NO: 132437 - RNA, 20 nt, Artificial Sequence
  Synthetic
uccagaagaaccaauaagaa

SEQ ID NO: 132438 - RNA, 21 nt, Artificial Sequence
  Synthetic
auccagaagaaccaauaagaa

SEQ ID NO: 132439 - RNA, 22 nt, Artificial Sequence
  Synthetic
aauccagaagaaccaauaagaa

SEQ ID NO: 132440 - RNA, 23 nt, Artificial Sequence
  Synthetic
uaauccagaagaaccaauaagaa

SEQ ID NO: 132441 - RNA, 24 nt, Artificial Sequence
  Synthetic
auaauccagaagaaccaauaagaa

SEQ ID NO: 132442 - RNA, 18 nt, Artificial Sequence
  Synthetic
gaaggaaagaagucagaa

SEQ ID NO: 132443 - RNA, 19 nt, Artificial Sequence
  Synthetic
ggaaggaaagaagucagaa

SEQ ID NO: 132444 - RNA, 20 nt, Artificial Sequence
  Synthetic
cggaaggaaagaagucagaa

SEQ ID NO: 132445 - RNA, 21 nt, Artificial Sequence
  Synthetic
acggaaggaaagaagucagaa

SEQ ID NO: 132446 - RNA, 22 nt, Artificial Sequence
  Synthetic
gacggaaggaaagaagucagaa

SEQ ID NO: 132447 - RNA, 23 nt, Artificial Sequence
  Synthetic
  misc_feature (1)..(1): n is a, c, g, or u
ngacggaaggaaagaagucagaa

SEQ ID NO: 132448 - RNA, 24 nt, Artificial Sequence
  Synthetic
  misc_feature (2)..(2): n is a, c, g, or u
cngacggaaggaaagaagucagaa

SEQ ID NO: 132449 - RNA, 18 nt, Artificial Sequence
  Synthetic
  misc_feature (3)..(3): n is a, c, g, or u
ggnacggcagacggagaa

SEQ ID NO: 132450 - RNA, 19 nt, Artificial Sequence
  Synthetic
  misc_feature (1)..(1): n is a, c, g, or u
  misc_feature (4)..(4): n is a, c, g, or u
nggnacggcagacggagaa

SEQ ID NO: 132451 - RNA, 20 nt, Artificial Sequence
  Synthetic
  misc_feature (1)..(2): n is a, c, g, or u
  misc_feature (5)..(5): n is a, c, g, or u
nnggnacggcagacggagaa

SEQ ID NO: 132452 - RNA, 21 nt, Artificial Sequence
  Synthetic
  misc_feature (2)..(3): n is a, c, g, or u
  misc_feature (6)..(6): n is a, c, g, or u
gnnggnacggcagacggagaa

SEQ ID NO: 132453 - RNA, 22 nt, Artificial Sequence
  Synthetic
  misc_feature (3)..(4): n is a, c, g, or u
  misc_feature (7)..(7): n is a, c, g, or u
ggnnggnacggcagacggagaa

SEQ ID NO: 132454 - RNA, 23 nt, Artificial Sequence
  Synthetic
  misc_feature (4)..(5): n is a, c, g, or u
  misc_feature (8)..(8): n is a, c, g, or u
cggnnggnacggcagacggagaa

SEQ ID NO: 132455 - RNA, 24 nt, Artificial Sequence
  Synthetic
  misc_feature (5)..(6): n is a, c, g, or u
  misc_feature (9)..(9): n is a, c, g, or u
ucggnnggnacggcagacggagaa

SEQ ID NO: 132456 - RNA, 18 nt, Artificial Sequence
  Synthetic
  misc_feature (13)..(13): n is a, c, g, or u
uaaacugagccangagaa

SEQ ID NO: 132457 - RNA, 19 nt, Artificial Sequence
  Synthetic
  misc_feature (14)..(14): n is a, c, g, or u
guaaacugagccangagaa

SEQ ID NO: 132458 - RNA, 20 nt, Artificial Sequence
  Synthetic
  misc_feature (15)..(15): n is a, c, g, or u
aguaaacugagccangagaa

SEQ ID NO: 132459 - RNA, 21 nt, Artificial Sequence
  Synthetic
  misc_feature (16)..(16): n is a, c, g, or u
uaguaaacugagccangagaa

SEQ ID NO: 132460 - RNA, 22 nt, Artificial Sequence
  Synthetic
  misc_feature (17)..(17): n is a, c, g, or u
cuaguaaacugagccangagaa

SEQ ID NO: 132461 - RNA, 23 nt, Artificial Sequence
  Synthetic
  misc_feature (18)..(18): n is a, c, g, or u
acuaguaaacugagccangagaa

SEQ ID NO: 132462 - RNA, 24 nt, Artificial Sequence
  Synthetic
  misc_feature (19)..(19): n is a, c, g, or u
cacuaguaaacugagccangagaa

SEQ ID NO: 132463 - RNA, 18 nt, Artificial Sequence
  Synthetic
gcgaauccacacuccgaa

SEQ ID NO: 132464 - RNA, 19 nt, Artificial Sequence
  Synthetic
ugcgaauccacacuccgaa

SEQ ID NO: 132465 - RNA, 20 nt, Artificial Sequence
  Synthetic
gugcgaauccacacuccgaa

SEQ ID NO: 132466 - RNA, 21 nt, Artificial Sequence
  Synthetic
agugcgaauccacacuccgaa

SEQ ID NO: 132467 - RNA, 22 nt, Artificial Sequence
  Synthetic
gagugcgaauccacacuccgaa

SEQ ID NO: 132468 - RNA, 23 nt, Artificial Sequence
  Synthetic
ggagugcgaauccacacuccgaa

SEQ ID NO: 132469 - RNA, 24 nt, Artificial Sequence
  Synthetic
aggagugcgaauccacacuccgaa

SEQ ID NO: 132470 - RNA, 18 nt, Artificial Sequence
  Synthetic
  misc_feature (7)..(7): n is a, c, g, or u
guuuganuuggcuccgaa

SEQ ID NO: 132471 - RNA, 19 nt, Artificial Sequence
  Synthetic
  misc_feature (8)..(8): n is a, c, g, or u
uguuuganuuggcuccgaa

SEQ ID NO: 132472 - RNA, 20 nt, Artificial Sequence
  Synthetic
  misc_feature (9)..(9): n is a, c, g, or u
uuguuuganuuggcuccgaa

SEQ ID NO: 132473 - RNA, 21 nt, Artificial Sequence
  Synthetic
  misc_feature (10)..(10): n is a, c, g, or u
auuguuuganuuggcuccgaa

SEQ ID NO: 132474 - RNA, 22 nt, Artificial Sequence
  Synthetic
  misc_feature (11)..(11): n is a, c, g, or u
gauuguuuganuuggcuccgaa

SEQ ID NO: 132475 - RNA, 23 nt, Artificial Sequence
  Synthetic
  misc_feature (12)..(12): n is a, c, g, or u
ggauuguuuganuuggcuccgaa

SEQ ID NO: 132476 - RNA, 24 nt, Artificial Sequence
  Synthetic
  misc_feature (13)..(13): n is a, c, g, or u
uggauuguuuganuuggcuccgaa

SEQ ID NO: 132477 - RNA, 18 nt, Artificial Sequence
  Synthetic
  misc_feature (11)..(11): n is a, c, g, or u
guaaaugaaunuuaggaa

SEQ ID NO: 132478 - RNA, 19 nt, Artificial Sequence
  Synthetic
  misc_feature (12)..(12): n is a, c, g, or u
uguaaaugaaunuuaggaa

SEQ ID NO: 132479 - RNA, 20 nt, Artificial Sequence
  Synthetic
  misc_feature (1)..(1): n is a, c, g, or u
  misc_feature (13)..(13): n is a, c, g, or u
nuguaaaugaaunuuaggaa

SEQ ID NO: 132480 - RNA, 21 nt, Artificial Sequence
  Synthetic
  misc_feature (2)..(2): n is a, c, g, or u
  misc_feature (14)..(14): n is a, c, g, or u
cnuguaaaugaaunuuaggaa

SEQ ID NO: 132481 - RNA, 22 nt, Artificial Sequence
  Synthetic
  misc_feature (3)..(3): n is a, c, g, or u
  misc_feature (15)..(15): n is a, c, g, or u
ucnuguaaaugaaunuuaggaa

SEQ ID NO: 132482 - RNA, 23 nt, Artificial Sequence
  Synthetic
  misc_feature (1)..(1): n is a, c, g, or u
  misc_feature (4)..(4): n is a, c, g, or u
  misc_feature (16)..(16): n is a, c, g, or u
nucnuguaaaugaaunuuaggaa

SEQ ID NO: 132483 - RNA, 24 nt, Artificial Sequence
  Synthetic
  misc_feature (2)..(2): n is a, c, g, or u
  misc_feature (5)..(5): n is a, c, g, or u
  misc_feature (17)..(17): n is a, c, g, or u
cnucnuguaaaugaaunuuaggaa

SEQ ID NO: 132484 - RNA, 18 nt, Artificial Sequence
  Synthetic
  misc_feature (3)..(3): n is a, c, g, or u
  misc_feature (9)..(9): n is a, c, g, or u
  misc_feature (11)..(11): n is a, c, g, or u
agnagaucncngacggaa

SEQ ID NO: 132485 - RNA, 19 nt, Artificial Sequence
  Synthetic
  misc_feature (1)..(1): n is a, c, g, or u
  misc_feature (4)..(4): n is a, c, g, or u
  misc_feature (10)..(10): n is a, c, g, or u
  misc_feature (12)..(12): n is a, c, g, or u
nagnagaucncngacggaa

SEQ ID NO: 132486 - RNA, 20 nt, Artificial Sequence
  Synthetic
  misc_feature (2)..(2): n is a, c, g, or u
  misc_feature (5)..(5): n is a, c, g, or u
  misc_feature (11)..(11): n is a, c, g, or u
  misc_feature (13)..(13): n is a, c, g, or u
cnagnagaucncngacggaa

SEQ ID NO: 132487 - RNA, 21 nt, Artificial Sequence
  Synthetic
  misc_feature (3)..(3): n is a, c, g, or u
  misc_feature (6)..(6): n is a, c, g, or u
  misc_feature (12)..(12): n is a, c, g, or u
  misc_feature (14)..(14): n is a, c, g, or u
ucnagnagaucncngacggaa

SEQ ID NO: 132488 - RNA, 22 nt, Artificial Sequence
  Synthetic
  misc_feature (1)..(1): n is a, c, g, or u
  misc_feature (4)..(4): n is a, c, g, or u
  misc_feature (7)..(7): n is a, c, g, or u
  misc_feature (13)..(13): n is a, c, g, or u
  misc_feature (15)..(15): n is a, c, g, or u
nucnagnagaucncngacggaa

SEQ ID NO: 132489 - RNA, 23 nt, Artificial Sequence
  Synthetic
  misc_feature (2)..(2): n is a, c, g, or u
  misc_feature (5)..(5): n is a, c, g, or u
  misc_feature (8)..(8): n is a, c, g, or u
  misc_feature (14)..(14): n is a, c, g, or u
  misc_feature (16)..(16): n is a, c, g, or u
unucnagnagaucncngacggaa

SEQ ID NO: 132490 - RNA, 24 nt, Artificial Sequence
  Synthetic
  misc_feature (3)..(3): n is a, c, g, or u
  misc_feature (6)..(6): n is a, c, g, or u
  misc_feature (9)..(9): n is a, c, g, or u
  misc_feature (15)..(15): n is a, c, g, or u
  misc_feature (17)..(17): n is a, c, g, or u
gunucnagnagaucncngacggaa

SEQ ID NO: 132491 - RNA, 18 nt, Artificial Sequence
  Synthetic
  misc_feature (2)..(2): n is a, c, g, or u
  misc_feature (5)..(5): n is a, c, g, or u
angangaugggaugggaa

SEQ ID NO: 132492 - RNA, 19 nt, Artificial Sequence
  Synthetic
  misc_feature (3)..(3): n is a, c, g, or u
  misc_feature (6)..(6): n is a, c, g, or u
cangangaugggaugggaa

SEQ ID NO: 132493 - RNA, 20 nt, Artificial Sequence
  Synthetic
  misc_feature (4)..(4): n is a, c, g, or u
  misc_feature (7)..(7): n is a, c, g, or u
ccangangaugggaugggaa

SEQ ID NO: 132494 - RNA, 21 nt, Artificial Sequence
  Synthetic
  misc_feature (5)..(5): n is a, c, g, or u
  misc_feature (8)..(8): n is a, c, g, or u
cccangangaugggaugggaa

SEQ ID NO: 132495 - RNA, 22 nt, Artificial Sequence
  Synthetic
  misc_feature (6)..(6): n is a, c, g, or u
  misc_feature (9)..(9): n is a, c, g, or u
gcccangangaugggaugggaa

SEQ ID NO: 132496 - RNA, 23 nt, Artificial Sequence
  Synthetic
  misc_feature (7)..(7): n is a, c, g, or u
  misc_feature (10)..(10): n is a, c, g, or u
agcccangangaugggaugggaa

SEQ ID NO: 132497 - RNA, 24 nt, Artificial Sequence
  Synthetic
  misc_feature (8)..(8): n is a, c, g, or u
  misc_feature (11)..(11): n is a, c, g, or u
aagcccangangaugggaugggaa

SEQ ID NO: 132498 - RNA, 18 nt, Artificial Sequence
  Synthetic
  misc_feature (11)..(11): n is a, c, g, or u
aucccagaggnuugggaa

SEQ ID NO: 132499 - RNA, 19 nt, Artificial Sequence
  Synthetic
  misc_feature (12)..(12): n is a, c, g, or u
aaucccagaggnuugggaa

SEQ ID NO: 132500 - RNA, 20 nt, Artificial Sequence
  Synthetic
  misc_feature (13)..(13): n is a, c, g, or u
gaaucccagaggnuugggaa

SEQ ID NO: 132501 - RNA, 21 nt, Artificial Sequence
  Synthetic
  misc_feature (14)..(14): n is a, c, g, or u
agaaucccagaggnuugggaa

SEQ ID NO: 132502 - RNA, 22 nt, Artificial Sequence
  Synthetic
  misc_feature (15)..(15): n is a, c, g, or u
aagaaucccagaggnuugggaa

SEQ ID NO: 132503 - RNA, 23 nt, Artificial Sequence
  Synthetic
  misc_feature (16)..(16): n is a, c, g, or u
aaagaaucccagaggnuugggaa

SEQ ID NO: 132504 - RNA, 24 nt, Artificial Sequence
  Synthetic
  misc_feature (17)..(17): n is a, c, g, or u
gaaagaaucccagaggnuugggaa

SEQ ID NO: 132505 - RNA, 18 nt, Artificial Sequence
  Synthetic
  misc_feature (8)..(8): n is a, c, g, or u
uuguugungauccuggaa

SEQ ID NO: 132506 - RNA, 19 nt, Artificial Sequence
  Synthetic
  misc_feature (9)..(9): n is a, c, g, or u
guuguugungauccuggaa

SEQ ID NO: 132507 - RNA, 20 nt, Artificial Sequence
  Synthetic
  misc_feature (10)..(10): n is a, c, g, or u
gguuguugungauccuggaa

SEQ ID NO: 132508 - RNA, 21 nt, Artificial Sequence
  Synthetic
  misc_feature (11)..(11): n is a, c, g, or u
ugguuguugungauccuggaa

SEQ ID NO: 132509 - RNA, 22 nt, Artificial Sequence
  Synthetic
  misc_feature (12)..(12): n is a, c, g, or u
cugguuguugungauccuggaa

SEQ ID NO: 132510 - RNA, 23 nt, Artificial Sequence
  Synthetic
  misc_feature (13)..(13): n is a, c, g, or u
acugguuguugungauccuggaa

SEQ ID NO: 132511 - RNA, 24 nt, Artificial Sequence
  Synthetic
  misc_feature (14)..(14): n is a, c, g, or u
uacugguuguugungauccuggaa

SEQ ID NO: 132512 - RNA, 18 nt, Artificial Sequence
  Synthetic
  misc_feature (6)..(6): n is a, c, g, or u
  misc_feature (9)..(9): n is a, c, g, or u
  misc_feature (15)..(15): n is a, c, g, or u
auaggnacnguagangaa

SEQ ID NO: 132513 - RNA, 19 nt, Artificial Sequence
  Synthetic
  misc_feature (7)..(7): n is a, c, g, or u
  misc_feature (10)..(10): n is a, c, g, or u
  misc_feature (16)..(16): n is a, c, g, or u
gauaggnacnguagangaa

SEQ ID NO: 132514 - RNA, 20 nt, Artificial Sequence
  Synthetic
  misc_feature (8)..(8): n is a, c, g, or u
  misc_feature (11)..(11): n is a, c, g, or u
  misc_feature (17)..(17): n is a, c, g, or u
agauaggnacnguagangaa

SEQ ID NO: 132515 - RNA, 21 nt, Artificial Sequence
  Synthetic
  misc_feature (9)..(9): n is a, c, g, or u
  misc_feature (12)..(12): n is a, c, g, or u
  misc_feature (18)..(18): n is a, c, g, or u
aagauaggnacnguagangaa

SEQ ID NO: 132516 - RNA, 22 nt, Artificial Sequence
  Synthetic
  misc_feature (10)..(10): n is a, c, g, or u
  misc_feature (13)..(13): n is a, c, g, or u
  misc_feature (19)..(19): n is a, c, g, or u
aaagauaggnacnguagangaa

SEQ ID NO: 132517 - RNA, 23 nt, Artificial Sequence
  Synthetic
  misc_feature (11)..(11): n is a, c, g, or u
  misc_feature (14)..(14): n is a, c, g, or u
  misc_feature (20)..(20): n is a, c, g, or u
uaaagauaggnacnguagangaa

SEQ ID NO: 132518 - RNA, 24 nt, Artificial Sequence
  Synthetic
  misc_feature (12)..(12): n is a, c, g, or u
  misc_feature (15)..(15): n is a, c, g, or u
  misc_feature (21)..(21): n is a, c, g, or u
uuaaagauaggnacnguagangaa

SEQ ID NO: 132519 - RNA, 18 nt, Artificial Sequence
  Synthetic
gcauagcagcaggaugaa

SEQ ID NO: 132520 - RNA, 19 nt, Artificial Sequence
  Synthetic
ggcauagcagcaggaugaa

SEQ ID NO: 132521 - RNA, 20 nt, Artificial Sequence
  Synthetic
aggcauagcagcaggaugaa

SEQ ID NO: 132522 - RNA, 21 nt, Artificial Sequence
  Synthetic
gaggcauagcagcaggaugaa

SEQ ID NO: 132523 - RNA, 22 nt, Artificial Sequence
  Synthetic
ugaggcauagcagcaggaugaa

SEQ ID NO: 132524 - RNA, 23 nt, Artificial Sequence
  Synthetic
augaggcauagcagcaggaugaa

SEQ ID NO: 132525 - RNA, 24 nt, Artificial Sequence
  Synthetic
gaugaggcauagcagcaggaugaa

SEQ ID NO: 132526 - RNA, 18 nt, Artificial Sequence
  Synthetic
  misc_feature (6)..(6): n is a, c, g, or u
  misc_feature (8)..(8): n is a, c, g, or u
ggguunanuguuccugaa

SEQ ID NO: 132527 - RNA, 19 nt, Artificial Sequence
  Synthetic
  misc_feature (7)..(7): n is a, c, g, or u
  misc_feature (9)..(9): n is a, c, g, or u
aggguunanuguuccugaa

SEQ ID NO: 132528 - RNA, 20 nt, Artificial Sequence
  Synthetic
  misc_feature (8)..(8): n is a, c, g, or u
  misc_feature (10)..(10): n is a, c, g, or u
caggguunanuguuccugaa

SEQ ID NO: 132529 - RNA, 21 nt, Artificial Sequence
  Synthetic
  misc_feature (1)..(1): n is a, c, g, or u
  misc_feature (9)..(9): n is a, c, g, or u
  misc_feature (11)..(11): n is a, c, g, or u
ncaggguunanuguuccugaa

SEQ ID NO: 132530 - RNA, 22 nt, Artificial Sequence
  Synthetic
  misc_feature (2)..(2): n is a, c, g, or u
  misc_feature (10)..(10): n is a, c, g, or u
  misc_feature (12)..(12): n is a, c, g, or u
ancaggguunanuguuccugaa

SEQ ID NO: 132531 - RNA, 23 nt, Artificial Sequence
  Synthetic
  misc_feature (3)..(3): n is a, c, g, or u
  misc_feature (11)..(11): n is a, c, g, or u
  misc_feature (13)..(13): n is a, c, g, or u
gancaggguunanuguuccugaa

SEQ ID NO: 132532 - RNA, 24 nt, Artificial Sequence
  Synthetic
  misc_feature (4)..(4): n is a, c, g, or u
  misc_feature (12)..(12): n is a, c, g, or u
  misc_feature (14)..(14): n is a, c, g, or u
ggancaggguunanuguuccugaa

SEQ ID NO: 132533 - RNA, 18 nt, Artificial Sequence
  Synthetic
gcaacgugcagaggugaa

SEQ ID NO: 132534 - RNA, 19 nt, Artificial Sequence
  Synthetic
ugcaacgugcagaggugaa

SEQ ID NO: 132535 - RNA, 20 nt, Artificial Sequence
  Synthetic
augcaacgugcagaggugaa

SEQ ID NO: 132536 - RNA, 21 nt, Artificial Sequence
  Synthetic
caugcaacgugcagaggugaa

SEQ ID NO: 132537 - RNA, 22 nt, Artificial Sequence
  Synthetic
ccaugcaacgugcagaggugaa

SEQ ID NO: 132538 - RNA, 23 nt, Artificial Sequence
  Synthetic
uccaugcaacgugcagaggugaa

SEQ ID NO: 132539 - RNA, 24 nt, Artificial Sequence
  Synthetic
cuccaugcaacgugcagaggugaa

SEQ ID NO: 132540 - RNA, 18 nt, Artificial Sequence
  Synthetic
aaacacacagucuuugaa

SEQ ID NO: 132541 - RNA, 19 nt, Artificial Sequence
  Synthetic
uaaacacacagucuuugaa

SEQ ID NO: 132542 - RNA, 20 nt, Artificial Sequence
  Synthetic
uuaaacacacagucuuugaa

SEQ ID NO: 132543 - RNA, 21 nt, Artificial Sequence
  Synthetic
  misc_feature (1)..(1): n is a, c, g, or u
nuuaaacacacagucuuugaa

SEQ ID NO: 132544 - RNA, 22 nt, Artificial Sequence
  Synthetic
  misc_feature (2)..(2): n is a, c, g, or u
cnuuaaacacacagucuuugaa

SEQ ID NO: 132545 - RNA, 23 nt, Artificial Sequence
  Synthetic
  misc_feature (3)..(3): n is a, c, g, or u
ucnuuaaacacacagucuuugaa

SEQ ID NO: 132546 - RNA, 24 nt, Artificial Sequence
  Synthetic
  misc_feature (4)..(4): n is a, c, g, or u
gucnuuaaacacacagucuuugaa

SEQ ID NO: 132547 - RNA, 18 nt, Artificial Sequence
  Synthetic
  misc_feature (5)..(6): n is a, c, g, or u
  misc_feature (8)..(8): n is a, c, g, or u
  misc_feature (16)..(16): n is a, c, g, or u
agugnngnuaggauanaa

SEQ ID NO: 132548 - RNA, 19 nt, Artificial Sequence
  Synthetic
  misc_feature (6)..(7): n is a, c, g, or u
  misc_feature (9)..(9): n is a, c, g, or u
  misc_feature (17)..(17): n is a, c, g, or u
uagugnngnuaggauanaa

SEQ ID NO: 132549 - RNA, 20 nt, Artificial Sequence
  Synthetic
  misc_feature (7)..(8): n is a, c, g, or u
  misc_feature (10)..(10): n is a, c, g, or u
  misc_feature (18)..(18): n is a, c, g, or u
uuagugnngnuaggauanaa

SEQ ID NO: 132550 - RNA, 21 nt, Artificial Sequence
  Synthetic
  misc_feature (8)..(9): n is a, c, g, or u
  misc_feature (11)..(11): n is a, c, g, or u
  misc_feature (19)..(19): n is a, c, g, or u
uuuagugnngnuaggauanaa

SEQ ID NO: 132551 - RNA, 22 nt, Artificial Sequence
  Synthetic
  misc_feature (9)..(10): n is a, c, g, or u
  misc_feature (12)..(12): n is a, c, g, or u
  misc_feature (20)..(20): n is a, c, g, or u
auuuagugnngnuaggauanaa

SEQ ID NO: 132552 - RNA, 23 nt, Artificial Sequence
  Synthetic
  misc_feature (10)..(11): n is a, c, g, or u
  misc_feature (13)..(13): n is a, c, g, or u
  misc_feature (21)..(21): n is a, c, g, or u
uauuuagugnngnuaggauanaa

SEQ ID NO: 132553 - RNA, 24 nt, Artificial Sequence
  Synthetic
  misc_feature (11)..(12): n is a, c, g, or u
  misc_feature (14)..(14): n is a, c, g, or u
  misc_feature (22)..(22): n is a, c, g, or u
auauuuagugnngnuaggauanaa

SEQ ID NO: 132554 - RNA, 18 nt, Artificial Sequence
  Synthetic
agacacauccagcgauaa

SEQ ID NO: 132555 - RNA, 19 nt, Artificial Sequence
  Synthetic
cagacacauccagcgauaa

SEQ ID NO: 132556 - RNA, 20 nt, Artificial Sequence
  Synthetic
gcagacacauccagcgauaa

SEQ ID NO: 132557 - RNA, 21 nt, Artificial Sequence
  Synthetic
cgcagacacauccagcgauaa

SEQ ID NO: 132558 - RNA, 22 nt, Artificial Sequence
  Synthetic
ccgcagacacauccagcgauaa

SEQ ID NO: 132559 - RNA, 23 nt, Artificial Sequence
  Synthetic
gccgcagacacauccagcgauaa

SEQ ID NO: 132560 - RNA, 24 nt, Artificial Sequence
  Synthetic
cgccgcagacacauccagcgauaa

SEQ ID NO: 132561 - RNA, 18 nt, Artificial Sequence
  Synthetic
ggcaacauaccuugauaa

SEQ ID NO: 132562 - RNA, 19 nt, Artificial Sequence
  Synthetic
gggcaacauaccuugauaa

SEQ ID NO: 132563 - RNA, 20 nt, Artificial Sequence
  Synthetic
cgggcaacauaccuugauaa

SEQ ID NO: 132564 - RNA, 21 nt, Artificial Sequence
  Synthetic
acgggcaacauaccuugauaa

SEQ ID NO: 132565 - RNA, 22 nt, Artificial Sequence
  Synthetic
aacgggcaacauaccuugauaa

SEQ ID NO: 132566 - RNA, 23 nt, Artificial Sequence
  Synthetic
aaacgggcaacauaccuugauaa

SEQ ID NO: 132567 - RNA, 24 nt, Artificial Sequence
  Synthetic
caaacgggcaacauaccuugauaa

SEQ ID NO: 132568 - RNA, 18 nt, Artificial Sequence
  Synthetic
uuccggaaguguugauaa

SEQ ID NO: 132569 - RNA, 19 nt, Artificial Sequence
  Synthetic
uuuccggaaguguugauaa

SEQ ID NO: 132570 - RNA, 20 nt, Artificial Sequence
  Synthetic
guuuccggaaguguugauaa

SEQ ID NO: 132571 - RNA, 21 nt, Artificial Sequence
  Synthetic
aguuuccggaaguguugauaa

SEQ ID NO: 132572 - RNA, 22 nt, Artificial Sequence
  Synthetic
uaguuuccggaaguguugauaa

SEQ ID NO: 132573 - RNA, 23 nt, Artificial Sequence
  Synthetic
guaguuuccggaaguguugauaa

SEQ ID NO: 132574 - RNA, 24 nt, Artificial Sequence
  Synthetic
aguaguuuccggaaguguugauaa

SEQ ID NO: 132575 - RNA, 18 nt, Artificial Sequence
  Synthetic
  misc_feature (1)..(1): n is a, c, g, or u
nugccuacagccuccuaa

SEQ ID NO: 132576 - RNA, 19 nt, Artificial Sequence
  Synthetic
  misc_feature (2)..(2): n is a, c, g, or u
unugccuacagccuccuaa

SEQ ID NO: 132577 - RNA, 20 nt, Artificial Sequence
  Synthetic
  misc_feature (3)..(3): n is a, c, g, or u
uunugccuacagccuccuaa

SEQ ID NO: 132578 - RNA, 21 nt, Artificial Sequence
  Synthetic
  misc_feature (4)..(4): n is a, c, g, or u
uuunugccuacagccuccuaa

SEQ ID NO: 132579 - RNA, 22 nt, Artificial Sequence
  Synthetic
  misc_feature (5)..(5): n is a, c, g, or u
auuunugccuacagccuccuaa

SEQ ID NO: 132580 - RNA, 23 nt, Artificial Sequence
  Synthetic
  misc_feature (6)..(6): n is a, c, g, or u
aauuunugccuacagccuccuaa

SEQ ID NO: 132581 - RNA, 24 nt, Artificial Sequence
  Synthetic
  misc_feature (7)..(7): n is a, c, g, or u
caauuunugccuacagccuccuaa

SEQ ID NO: 132582 - RNA, 18 nt, Artificial Sequence
  Synthetic
  misc_feature (2)..(2): n is a, c, g, or u
unucucuuccaaaaguaa

SEQ ID NO: 132583 - RNA, 19 nt, Artificial Sequence
  Synthetic
  misc_feature (3)..(3): n is a, c, g, or u
gunucucuuccaaaaguaa

SEQ ID NO: 132584 - RNA, 20 nt, Artificial Sequence
  Synthetic
  misc_feature (4)..(4): n is a, c, g, or u
agunucucuuccaaaaguaa

SEQ ID NO: 132585 - RNA, 21 nt, Artificial Sequence
  Synthetic
  misc_feature (5)..(5): n is a, c, g, or u
cagunucucuuccaaaaguaa

SEQ ID NO: 132586 - RNA, 22 nt, Artificial Sequence
  Synthetic
  misc_feature (6)..(6): n is a, c, g, or u
acagunucucuuccaaaaguaa

SEQ ID NO: 132587 - RNA, 23 nt, Artificial Sequence
  Synthetic
  misc_feature (1)..(1): n is a, c, g, or u
  misc_feature (7)..(7): n is a, c, g, or u
nacagunucucuuccaaaaguaa

SEQ ID NO: 132588 - RNA, 24 nt, Artificial Sequence
  Synthetic
  misc_feature (2)..(2): n is a, c, g, or u
  misc_feature (8)..(8): n is a, c, g, or u
gnacagunucucuuccaaaaguaa

SEQ ID NO: 132589 - RNA, 18 nt, Artificial Sequence
  Synthetic
aacaaauggcacuaguaa

SEQ ID NO: 132590 - RNA, 19 nt, Artificial Sequence
  Synthetic
gaacaaauggcacuaguaa

SEQ ID NO: 132591 - RNA, 20 nt, Artificial Sequence
  Synthetic
ugaacaaauggcacuaguaa

SEQ ID NO: 132592 - RNA, 21 nt, Artificial Sequence
  Synthetic
cugaacaaauggcacuaguaa

SEQ ID NO: 132593 - RNA, 22 nt, Artificial Sequence
  Synthetic
acugaacaaauggcacuaguaa

SEQ ID NO: 132594 - RNA, 23 nt, Artificial Sequence
  Synthetic
cacugaacaaauggcacuaguaa

SEQ ID NO: 132595 - RNA, 24 nt, Artificial Sequence
  Synthetic
ccacugaacaaauggcacuaguaa

SEQ ID NO: 132596 - RNA, 18 nt, Artificial Sequence
  Synthetic
agcgccgacgggacguaa

SEQ ID NO: 132597 - RNA, 19 nt, Artificial Sequence
  Synthetic
cagcgccgacgggacguaa

SEQ ID NO: 132598 - RNA, 20 nt, Artificial Sequence
  Synthetic
ucagcgccgacgggacguaa

SEQ ID NO: 132599 - RNA, 18 nt, Artificial Sequence
  Synthetic
gacggggagaccgcguaa

SEQ ID NO: 132600 - RNA, 19 nt, Artificial Sequence
  Synthetic
agacggggagaccgcguaa

SEQ ID NO: 132601 - RNA, 20 nt, Artificial Sequence
  Synthetic
cagacggggagaccgcguaa

SEQ ID NO: 132602 - RNA, 21 nt, Artificial Sequence
  Synthetic
acagacggggagaccgcguaa

SEQ ID NO: 132603 - RNA, 22 nt, Artificial Sequence
  Synthetic
cacagacggggagaccgcguaa

SEQ ID NO: 132604 - RNA, 23 nt, Artificial Sequence
  Synthetic
gcacagacggggagaccgcguaa

SEQ ID NO: 132605 - RNA, 24 nt, Artificial Sequence
  Synthetic
ggcacagacggggagaccgcguaa

SEQ ID NO: 132606 - RNA, 18 nt, Artificial Sequence
  Synthetic
gaaaaaccccgccuguaa

SEQ ID NO: 132607 - RNA, 19 nt, Artificial Sequence
  Synthetic
agaaaaaccccgccuguaa

SEQ ID NO: 132608 - RNA, 20 nt, Artificial Sequence
  Synthetic
aagaaaaaccccgccuguaa

SEQ ID NO: 132609 - RNA, 21 nt, Artificial Sequence
  Synthetic
caagaaaaaccccgccuguaa

SEQ ID NO: 132610 - RNA, 22 nt, Artificial Sequence
  Synthetic
acaagaaaaaccccgccuguaa

SEQ ID NO: 132611 - RNA, 23 nt, Artificial Sequence
  Synthetic
aacaagaaaaaccccgccuguaa

SEQ ID NO: 132612 - RNA, 24 nt, Artificial Sequence
  Synthetic
caacaagaaaaaccccgccuguaa

SEQ ID NO: 132613 - RNA, 18 nt, Artificial Sequence
  Synthetic
  misc_feature (2)..(2): n is a, c, g, or u
  misc_feature (5)..(5): n is a, c, g, or u
gnuanccacauuguguaa

SEQ ID NO: 132614 - RNA, 19 nt, Artificial Sequence
  Synthetic
  misc_feature (3)..(3): n is a, c, g, or u
  misc_feature (6)..(6): n is a, c, g, or u
ggnuanccacauuguguaa

SEQ ID NO: 132615 - RNA, 20 nt, Artificial Sequence
  Synthetic
  misc_feature (4)..(4): n is a, c, g, or u
  misc_feature (7)..(7): n is a, c, g, or u
aggnuanccacauuguguaa

SEQ ID NO: 132616 - RNA, 21 nt, Artificial Sequence
  Synthetic
  misc_feature (5)..(5): n is a, c, g, or u
  misc_feature (8)..(8): n is a, c, g, or u
caggnuanccacauuguguaa

SEQ ID NO: 132617 - RNA, 22 nt, Artificial Sequence
  Synthetic
  misc_feature (6)..(6): n is a, c, g, or u
  misc_feature (9)..(9): n is a, c, g, or u
gcaggnuanccacauuguguaa

SEQ ID NO: 132618 - RNA, 23 nt, Artificial Sequence
  Synthetic
  misc_feature (1)..(1): n is a, c, g, or u
  misc_feature (7)..(7): n is a, c, g, or u
  misc_feature (10)..(10): n is a, c, g, or u
ngcaggnuanccacauuguguaa

SEQ ID NO: 132619 - RNA, 24 nt, Artificial Sequence
  Synthetic
  misc_feature (2)..(2): n is a, c, g, or u
  misc_feature (8)..(8): n is a, c, g, or u
  misc_feature (11)..(11): n is a, c, g, or u
angcaggnuanccacauuguguaa

SEQ ID NO: 132620 - RNA, 18 nt, Artificial Sequence
  Synthetic
cuuagaaaggccuuguaa

SEQ ID NO: 132621 - RNA, 19 nt, Artificial Sequence
  Synthetic
acuuagaaaggccuuguaa

SEQ ID NO: 132622 - RNA, 20 nt, Artificial Sequence
  Synthetic
uacuuagaaaggccuuguaa

SEQ ID NO: 132623 - RNA, 21 nt, Artificial Sequence
  Synthetic
uuacuuagaaaggccuuguaa

SEQ ID NO: 132624 - RNA, 22 nt, Artificial Sequence
  Synthetic
uuuacuuagaaaggccuuguaa

SEQ ID NO: 132625 - RNA, 23 nt, Artificial Sequence
  Synthetic
guuuacuuagaaaggccuuguaa

SEQ ID NO: 132626 - RNA, 24 nt, Artificial Sequence
  Synthetic
uguuuacuuagaaaggccuuguaa

SEQ ID NO: 132627 - RNA, 18 nt, Artificial Sequence
  Synthetic
ugcauacaaaggcauuaa

SEQ ID NO: 132628 - RNA, 19 nt, Artificial Sequence
  Synthetic
augcauacaaaggcauuaa

SEQ ID NO: 132629 - RNA, 20 nt, Artificial Sequence
  Synthetic
caugcauacaaaggcauuaa

SEQ ID NO: 132630 - RNA, 21 nt, Artificial Sequence
  Synthetic
acaugcauacaaaggcauuaa

SEQ ID NO: 132631 - RNA, 22 nt, Artificial Sequence
  Synthetic
uacaugcauacaaaggcauuaa

SEQ ID NO: 132632 - RNA, 23 nt, Artificial Sequence
  Synthetic
auacaugcauacaaaggcauuaa

SEQ ID NO: 132633 - RNA, 24 nt, Artificial Sequence
  Synthetic
uauacaugcauacaaaggcauuaa

SEQ ID NO: 132634 - RNA, 18 nt, Artificial Sequence
  Synthetic
ccggcugcgagcaaaaca

SEQ ID NO: 132635 - RNA, 19 nt, Artificial Sequence
  Synthetic
accggcugcgagcaaaaca

SEQ ID NO: 132636 - RNA, 20 nt, Artificial Sequence
  Synthetic
gaccggcugcgagcaaaaca

SEQ ID NO: 132637 - RNA, 21 nt, Artificial Sequence
  Synthetic
agaccggcugcgagcaaaaca

SEQ ID NO: 132638 - RNA, 22 nt, Artificial Sequence
  Synthetic
cagaccggcugcgagcaaaaca

SEQ ID NO: 132639 - RNA, 23 nt, Artificial Sequence
  Synthetic
ccagaccggcugcgagcaaaaca

SEQ ID NO: 132640 - RNA, 24 nt, Artificial Sequence
  Synthetic
uccagaccggcugcgagcaaaaca

SEQ ID NO: 132641 - RNA, 18 nt, Artificial Sequence
  Synthetic
  misc_feature (4)..(4): n is a, c, g, or u
auancugaaagccaaaca

SEQ ID NO: 132642 - RNA, 19 nt, Artificial Sequence
  Synthetic
  misc_feature (5)..(5): n is a, c, g, or u
uauancugaaagccaaaca

SEQ ID NO: 132643 - RNA, 20 nt, Artificial Sequence
  Synthetic
  misc_feature (6)..(6): n is a, c, g, or u
auauancugaaagccaaaca

SEQ ID NO: 132644 - RNA, 21 nt, Artificial Sequence
  Synthetic
  misc_feature (7)..(7): n is a, c, g, or u
cauauancugaaagccaaaca

SEQ ID NO: 132645 - RNA, 22 nt, Artificial Sequence
  Synthetic
  misc_feature (8)..(8): n is a, c, g, or u
ccauauancugaaagccaaaca

SEQ ID NO: 132646 - RNA, 23 nt, Artificial Sequence
  Synthetic
  misc_feature (9)..(9): n is a, c, g, or u
uccauauancugaaagccaaaca

SEQ ID NO: 132647 - RNA, 24 nt, Artificial Sequence
  Synthetic
  misc_feature (10)..(10): n is a, c, g, or u
auccauauancugaaagccaaaca

SEQ ID NO: 132648 - RNA, 18 nt, Artificial Sequence
  Synthetic
ggguugcgucagcaaaca

SEQ ID NO: 132649 - RNA, 19 nt, Artificial Sequence
  Synthetic
gggguugcgucagcaaaca

SEQ ID NO: 132650 - RNA, 20 nt, Artificial Sequence
  Synthetic
ggggguugcgucagcaaaca

SEQ ID NO: 132651 - RNA, 21 nt, Artificial Sequence
  Synthetic
uggggguugcgucagcaaaca

SEQ ID NO: 132652 - RNA, 22 nt, Artificial Sequence
  Synthetic
guggggguugcgucagcaaaca

SEQ ID NO: 132653 - RNA, 23 nt, Artificial Sequence
  Synthetic
aguggggguugcgucagcaaaca

SEQ ID NO: 132654 - RNA, 24 nt, Artificial Sequence
  Synthetic
caguggggguugcgucagcaaaca

SEQ ID NO: 132655 - RNA, 18 nt, Artificial Sequence
  Synthetic
gccgacgggacguaaaca

SEQ ID NO: 132656 - RNA, 19 nt, Artificial Sequence
  Synthetic
cgccgacgggacguaaaca

SEQ ID NO: 132657 - RNA, 20 nt, Artificial Sequence
  Synthetic
gcgccgacgggacguaaaca

SEQ ID NO: 132658 - RNA, 18 nt, Artificial Sequence
  Synthetic
agguuuuguacagcaaca

SEQ ID NO: 132659 - RNA, 19 nt, Artificial Sequence
  Synthetic
uagguuuuguacagcaaca

SEQ ID NO: 132660 - RNA, 20 nt, Artificial Sequence
  Synthetic
guagguuuuguacagcaaca

SEQ ID NO: 132661 - RNA, 21 nt, Artificial Sequence
  Synthetic
cguagguuuuguacagcaaca

SEQ ID NO: 132662 - RNA, 22 nt, Artificial Sequence
  Synthetic
ccguagguuuuguacagcaaca

SEQ ID NO: 132663 - RNA, 23 nt, Artificial Sequence
  Synthetic
uccguagguuuuguacagcaaca

SEQ ID NO: 132664 - RNA, 24 nt, Artificial Sequence
  Synthetic
auccguagguuuuguacagcaaca

SEQ ID NO: 132665 - RNA, 18 nt, Artificial Sequence
  Synthetic
ugaggauucuugucaaca

SEQ ID NO: 132666 - RNA, 19 nt, Artificial Sequence
  Synthetic
gugaggauucuugucaaca

SEQ ID NO: 132667 - RNA, 20 nt, Artificial Sequence
  Synthetic
ugugaggauucuugucaaca

SEQ ID NO: 132668 - RNA, 21 nt, Artificial Sequence
  Synthetic
uugugaggauucuugucaaca

SEQ ID NO: 132669 - RNA, 22 nt, Artificial Sequence
  Synthetic
auugugaggauucuugucaaca

SEQ ID NO: 132670 - RNA, 23 nt, Artificial Sequence
  Synthetic
uauugugaggauucuugucaaca

SEQ ID NO: 132671 - RNA, 24 nt, Artificial Sequence
  Synthetic
guauugugaggauucuugucaaca

SEQ ID NO: 132672 - RNA, 18 nt, Artificial Sequence
  Synthetic
  misc_feature (9)..(9): n is a, c, g, or u
cccagaggnuugggaaca

SEQ ID NO: 132673 - RNA, 19 nt, Artificial Sequence
  Synthetic
  misc_feature (10)..(10): n is a, c, g, or u
ucccagaggnuugggaaca

SEQ ID NO: 132674 - RNA, 20 nt, Artificial Sequence
  Synthetic
  misc_feature (11)..(11): n is a, c, g, or u
aucccagaggnuugggaaca

SEQ ID NO: 132675 - RNA, 21 nt, Artificial Sequence
  Synthetic
  misc_feature (12)..(12): n is a, c, g, or u
aaucccagaggnuugggaaca

SEQ ID NO: 132676 - RNA, 22 nt, Artificial Sequence
  Synthetic
  misc_feature (13)..(13): n is a, c, g, or u
gaaucccagaggnuugggaaca

SEQ ID NO: 132677 - RNA, 23 nt, Artificial Sequence
  Synthetic
  misc_feature (14)..(14): n is a, c, g, or u
agaaucccagaggnuugggaaca

SEQ ID NO: 132678 - RNA, 24 nt, Artificial Sequence
  Synthetic
  misc_feature (15)..(15): n is a, c, g, or u
aagaaucccagaggnuugggaaca

SEQ ID NO: 132679 - RNA, 18 nt, Artificial Sequence
  Synthetic
ccuacgaaccacugaaca

SEQ ID NO: 132680 - RNA, 19 nt, Artificial Sequence
  Synthetic
cccuacgaaccacugaaca

SEQ ID NO: 132681 - RNA, 20 nt, Artificial Sequence
  Synthetic
gcccuacgaaccacugaaca

SEQ ID NO: 132682 - RNA, 18 nt, Artificial Sequence
  Synthetic
guccaaggaauacuaaca

SEQ ID NO: 132683 - RNA, 19 nt, Artificial Sequence
  Synthetic
aguccaaggaauacuaaca

SEQ ID NO: 132684 - RNA, 20 nt, Artificial Sequence
  Synthetic
gaguccaaggaauacuaaca

SEQ ID NO: 132685 - RNA, 21 nt, Artificial Sequence
  Synthetic
ugaguccaaggaauacuaaca

SEQ ID NO: 132686 - RNA, 22 nt, Artificial Sequence
  Synthetic
augaguccaaggaauacuaaca

SEQ ID NO: 132687 - RNA, 23 nt, Artificial Sequence
  Synthetic
uaugaguccaaggaauacuaaca

SEQ ID NO: 132688 - RNA, 24 nt, Artificial Sequence
  Synthetic
uuaugaguccaaggaauacuaaca

SEQ ID NO: 132689 - RNA, 18 nt, Artificial Sequence
  Synthetic
uaaaacgccgcagacaca

SEQ ID NO: 132690 - RNA, 19 nt, Artificial Sequence
  Synthetic
auaaaacgccgcagacaca

SEQ ID NO: 132691 - RNA, 20 nt, Artificial Sequence
  Synthetic
gauaaaacgccgcagacaca

SEQ ID NO: 132692 - RNA, 21 nt, Artificial Sequence
  Synthetic
ugauaaaacgccgcagacaca

SEQ ID NO: 132693 - RNA, 22 nt, Artificial Sequence
  Synthetic
augauaaaacgccgcagacaca

SEQ ID NO: 132694 - RNA, 23 nt, Artificial Sequence
  Synthetic
uaugauaaaacgccgcagacaca

SEQ ID NO: 132695 - RNA, 24 nt, Artificial Sequence
  Synthetic
auaugauaaaacgccgcagacaca

SEQ ID NO: 132696 - RNA, 18 nt, Artificial Sequence
  Synthetic
ggcagaugagaaggcaca

SEQ ID NO: 132697 - RNA, 19 nt, Artificial Sequence
  Synthetic
cggcagaugagaaggcaca

SEQ ID NO: 132698 - RNA, 20 nt, Artificial Sequence
  Synthetic
ccggcagaugagaaggcaca

SEQ ID NO: 132699 - RNA, 21 nt, Artificial Sequence
  Synthetic
accggcagaugagaaggcaca

SEQ ID NO: 132700 - RNA, 22 nt, Artificial Sequence
  Synthetic
gaccggcagaugagaaggcaca

SEQ ID NO: 132701 - RNA, 23 nt, Artificial Sequence
  Synthetic
ggaccggcagaugagaaggcaca

SEQ ID NO: 132702 - RNA, 24 nt, Artificial Sequence
  Synthetic
cggaccggcagaugagaaggcaca

SEQ ID NO: 132703 - RNA, 18 nt, Artificial Sequence
  Synthetic
cgaauuuuggccaagaca

SEQ ID NO: 132704 - RNA, 19 nt, Artificial Sequence
  Synthetic
gcgaauuuuggccaagaca

SEQ ID NO: 132705 - RNA, 20 nt, Artificial Sequence
  Synthetic
ugcgaauuuuggccaagaca

SEQ ID NO: 132706 - RNA, 21 nt, Artificial Sequence
  Synthetic
cugcgaauuuuggccaagaca

SEQ ID NO: 132707 - RNA, 22 nt, Artificial Sequence
  Synthetic
acugcgaauuuuggccaagaca

SEQ ID NO: 132708 - RNA, 23 nt, Artificial Sequence
  Synthetic
gacugcgaauuuuggccaagaca

SEQ ID NO: 132709 - RNA, 24 nt, Artificial Sequence
  Synthetic
ggacugcgaauuuuggccaagaca

SEQ ID NO: 132710 - RNA, 18 nt, Artificial Sequence
  Synthetic
  misc_feature (13)..(13): n is a, c, g, or u
aauguauacccanagaca

SEQ ID NO: 132711 - RNA, 19 nt, Artificial Sequence
  Synthetic
  misc_feature (14)..(14): n is a, c, g, or u
aaauguauacccanagaca

SEQ ID NO: 132712 - RNA, 20 nt, Artificial Sequence
  Synthetic
  misc_feature (15)..(15): n is a, c, g, or u
uaaauguauacccanagaca

SEQ ID NO: 132713 - RNA, 21 nt, Artificial Sequence
  Synthetic
  misc_feature (16)..(16): n is a, c, g, or u
uuaaauguauacccanagaca

SEQ ID NO: 132714 - RNA, 22 nt, Artificial Sequence
  Synthetic
  misc_feature (17)..(17): n is a, c, g, or u
uuuaaauguauacccanagaca

SEQ ID NO: 132715 - RNA, 23 nt, Artificial Sequence
  Synthetic
  misc_feature (18)..(18): n is a, c, g, or u
guuuaaauguauacccanagaca

SEQ ID NO: 132716 - RNA, 24 nt, Artificial Sequence
  Synthetic
  misc_feature (19)..(19): n is a, c, g, or u
gguuuaaauguauacccanagaca

SEQ ID NO: 132717 - RNA, 18 nt, Artificial Sequence
  Synthetic
uccuggaauuagaggaca

SEQ ID NO: 132718 - RNA, 19 nt, Artificial Sequence
  Synthetic
auccuggaauuagaggaca

SEQ ID NO: 132719 - RNA, 20 nt, Artificial Sequence
  Synthetic
gauccuggaauuagaggaca

SEQ ID NO: 132720 - RNA, 21 nt, Artificial Sequence
  Synthetic
  misc_feature (1)..(1): n is a, c, g, or u
ngauccuggaauuagaggaca

SEQ ID NO: 132721 - RNA, 22 nt, Artificial Sequence
  Synthetic
  misc_feature (2)..(2): n is a, c, g, or u
ungauccuggaauuagaggaca

SEQ ID NO: 132722 - RNA, 23 nt, Artificial Sequence
  Synthetic
  misc_feature (3)..(3): n is a, c, g, or u
gungauccuggaauuagaggaca

SEQ ID NO: 132723 - RNA, 24 nt, Artificial Sequence
  Synthetic
  misc_feature (4)..(4): n is a, c, g, or u
ugungauccuggaauuagaggaca

SEQ ID NO: 132724 - RNA, 18 nt, Artificial Sequence
  Synthetic
  misc_feature (6)..(6): n is a, c, g, or u
cuucunuuuucauuuaca

SEQ ID NO: 132725 - RNA, 19 nt, Artificial Sequence
  Synthetic
  misc_feature (7)..(7): n is a, c, g, or u
ucuucunuuuucauuuaca

SEQ ID NO: 132726 - RNA, 20 nt, Artificial Sequence
  Synthetic
  misc_feature (8)..(8): n is a, c, g, or u
aucuucunuuuucauuuaca

SEQ ID NO: 132727 - RNA, 21 nt, Artificial Sequence
  Synthetic
  misc_feature (9)..(9): n is a, c, g, or u
aaucuucunuuuucauuuaca

SEQ ID NO: 132728 - RNA, 22 nt, Artificial Sequence
  Synthetic
  misc_feature (1)..(1): n is a, c, g, or u
  misc_feature (10)..(10): n is a, c, g, or u
naaucuucunuuuucauuuaca

SEQ ID NO: 132729 - RNA, 23 nt, Artificial Sequence
  Synthetic
  misc_feature (2)..(2): n is a, c, g, or u
  misc_feature (11)..(11): n is a, c, g, or u
unaaucuucunuuuucauuuaca

SEQ ID NO: 132730 - RNA, 24 nt, Artificial Sequence
  Synthetic
  misc_feature (3)..(3): n is a, c, g, or u
  misc_feature (12)..(12): n is a, c, g, or u
uunaaucuucunuuuucauuuaca

SEQ ID NO: 132731 - RNA, 18 nt, Artificial Sequence
  Synthetic
gauaauccagaagaacca

SEQ ID NO: 132732 - RNA, 19 nt, Artificial Sequence
  Synthetic
ugauaauccagaagaacca

SEQ ID NO: 132733 - RNA, 20 nt, Artificial Sequence
  Synthetic
uugauaauccagaagaacca

SEQ ID NO: 132734 - RNA, 21 nt, Artificial Sequence
  Synthetic
cuugauaauccagaagaacca

SEQ ID NO: 132735 - RNA, 22 nt, Artificial Sequence
  Synthetic
ccuugauaauccagaagaacca

SEQ ID NO: 132736 - RNA, 23 nt, Artificial Sequence
  Synthetic
accuugauaauccagaagaacca

SEQ ID NO: 132737 - RNA, 24 nt, Artificial Sequence
  Synthetic
uaccuugauaauccagaagaacca

SEQ ID NO: 132738 - RNA, 18 nt, Artificial Sequence
  Synthetic
ggaaagcccuacgaacca

SEQ ID NO: 132739 - RNA, 19 nt, Artificial Sequence
  Synthetic
gggaaagcccuacgaacca

SEQ ID NO: 132740 - RNA, 20 nt, Artificial Sequence
  Synthetic
ggggaaagcccuacgaacca

SEQ ID NO: 132741 - RNA, 21 nt, Artificial Sequence
  Synthetic
gggggaaagcccuacgaacca

SEQ ID NO: 132742 - RNA, 22 nt, Artificial Sequence
  Synthetic
ugggggaaagcccuacgaacca

SEQ ID NO: 132743 - RNA, 23 nt, Artificial Sequence
  Synthetic
gugggggaaagcccuacgaacca

SEQ ID NO: 132744 - RNA, 24 nt, Artificial Sequence
  Synthetic
agugggggaaagcccuacgaacca

SEQ ID NO: 132745 - RNA, 18 nt, Artificial Sequence
  Synthetic
ccugaacuggagccacca

SEQ ID NO: 132746 - RNA, 19 nt, Artificial Sequence
  Synthetic
uccugaacuggagccacca

SEQ ID NO: 132747 - RNA, 20 nt, Artificial Sequence
  Synthetic
uuccugaacuggagccacca

SEQ ID NO: 132748 - RNA, 21 nt, Artificial Sequence
  Synthetic
guuccugaacuggagccacca

SEQ ID NO: 132749 - RNA, 22 nt, Artificial Sequence
  Synthetic
uguuccugaacuggagccacca

SEQ ID NO: 132750 - RNA, 23 nt, Artificial Sequence
  Synthetic
  misc_feature (1)..(1): n is a, c, g, or u
nuguuccugaacuggagccacca

SEQ ID NO: 132751 - RNA, 24 nt, Artificial Sequence
  Synthetic
  misc_feature (2)..(2): n is a, c, g, or u
anuguuccugaacuggagccacca

SEQ ID NO: 132752 - RNA, 18 nt, Artificial Sequence
  Synthetic
caaauuauuacccaccca

SEQ ID NO: 132753 - RNA, 19 nt, Artificial Sequence
  Synthetic
  misc_feature (1)..(1): n is a, c, g, or u
ncaaauuauuacccaccca

SEQ ID NO: 132754 - RNA, 20 nt, Artificial Sequence
  Synthetic
  misc_feature (2)..(2): n is a, c, g, or u
uncaaauuauuacccaccca

SEQ ID NO: 132755 - RNA, 21 nt, Artificial Sequence
  Synthetic
  misc_feature (3)..(3): n is a, c, g, or u
uuncaaauuauuacccaccca

SEQ ID NO: 132756 - RNA, 22 nt, Artificial Sequence
  Synthetic
  misc_feature (4)..(4): n is a, c, g, or u
cuuncaaauuauuacccaccca

SEQ ID NO: 132757 - RNA, 23 nt, Artificial Sequence
  Synthetic
  misc_feature (5)..(5): n is a, c, g, or u
ucuuncaaauuauuacccaccca

SEQ ID NO: 132758 - RNA, 24 nt, Artificial Sequence
  Synthetic
  misc_feature (6)..(6): n is a, c, g, or u
aucuuncaaauuauuacccaccca

SEQ ID NO: 132759 - RNA, 18 nt, Artificial Sequence
  Synthetic
  misc_feature (4)..(4): n is a, c, g, or u
cuuncaaauuauuaccca

SEQ ID NO: 132760 - RNA, 19 nt, Artificial Sequence
  Synthetic
  misc_feature (5)..(5): n is a, c, g, or u
ucuuncaaauuauuaccca

SEQ ID NO: 132761 - RNA, 20 nt, Artificial Sequence
  Synthetic
  misc_feature (6)..(6): n is a, c, g, or u
aucuuncaaauuauuaccca

SEQ ID NO: 132762 - RNA, 21 nt, Artificial Sequence
  Synthetic
  misc_feature (7)..(7): n is a, c, g, or u
gaucuuncaaauuauuaccca

SEQ ID NO: 132763 - RNA, 22 nt, Artificial Sequence
  Synthetic
  misc_feature (8)..(8): n is a, c, g, or u
ggaucuuncaaauuauuaccca

SEQ ID NO: 132764 - RNA, 23 nt, Artificial Sequence
  Synthetic
  misc_feature (9)..(9): n is a, c, g, or u
uggaucuuncaaauuauuaccca

SEQ ID NO: 132765 - RNA, 24 nt, Artificial Sequence
  Synthetic
  misc_feature (10)..(10): n is a, c, g, or u
cuggaucuuncaaauuauuaccca

SEQ ID NO: 132766 - RNA, 18 nt, Artificial Sequence
  Synthetic
  misc_feature (7)..(7): n is a, c, g, or u
agucaunaauucccccca

SEQ ID NO: 132767 - RNA, 19 nt, Artificial Sequence
  Synthetic
  misc_feature (8)..(8): n is a, c, g, or u
gagucaunaauucccccca

SEQ ID NO: 132768 - RNA, 20 nt, Artificial Sequence
  Synthetic
  misc_feature (9)..(9): n is a, c, g, or u
agagucaunaauucccccca

SEQ ID NO: 132769 - RNA, 21 nt, Artificial Sequence
  Synthetic
  misc_feature (10)..(10): n is a, c, g, or u
uagagucaunaauucccccca

SEQ ID NO: 132770 - RNA, 22 nt, Artificial Sequence
  Synthetic
  misc_feature (11)..(11): n is a, c, g, or u
cuagagucaunaauucccccca

SEQ ID NO: 132771 - RNA, 23 nt, Artificial Sequence
  Synthetic
  misc_feature (12)..(12): n is a, c, g, or u
gcuagagucaunaauucccccca

SEQ ID NO: 132772 - RNA, 24 nt, Artificial Sequence
  Synthetic
  misc_feature (13)..(13): n is a, c, g, or u
agcuagagucaunaauucccccca

SEQ ID NO: 132773 - RNA, 18 nt, Artificial Sequence
  Synthetic
  misc_feature (8)..(8): n is a, c, g, or u
auggagcngcaaagccca

SEQ ID NO: 132774 - RNA, 19 nt, Artificial Sequence
  Synthetic
  misc_feature (9)..(9): n is a, c, g, or u
aauggagcngcaaagccca

SEQ ID NO: 132775 - RNA, 20 nt, Artificial Sequence
  Synthetic
  misc_feature (10)..(10): n is a, c, g, or u
aaauggagcngcaaagccca

SEQ ID NO: 132776 - RNA, 21 nt, Artificial Sequence
  Synthetic
  misc_feature (11)..(11): n is a, c, g, or u
uaaauggagcngcaaagccca

SEQ ID NO: 132777 - RNA, 22 nt, Artificial Sequence
  Synthetic
  misc_feature (12)..(12): n is a, c, g, or u
guaaauggagcngcaaagccca

SEQ ID NO: 132778 - RNA, 23 nt, Artificial Sequence
  Synthetic
  misc_feature (13)..(13): n is a, c, g, or u
uguaaauggagcngcaaagccca

SEQ ID NO: 132779 - RNA, 24 nt, Artificial Sequence
  Synthetic
  misc_feature (14)..(14): n is a, c, g, or u
guguaaauggagcngcaaagccca

SEQ ID NO: 132780 - RNA, 18 nt, Artificial Sequence
  Synthetic
  misc_feature (9)..(9): n is a, c, g, or u
ggggacganagaguccca

SEQ ID NO: 132781 - RNA, 19 nt, Artificial Sequence
  Synthetic
  misc_feature (10)..(10): n is a, c, g, or u
aggggacganagaguccca

SEQ ID NO: 132782 - RNA, 20 nt, Artificial Sequence
  Synthetic
  misc_feature (11)..(11): n is a, c, g, or u
aaggggacganagaguccca

SEQ ID NO: 132783 - RNA, 21 nt, Artificial Sequence
  Synthetic
  misc_feature (12)..(12): n is a, c, g, or u
gaaggggacganagaguccca

SEQ ID NO: 132784 - RNA, 22 nt, Artificial Sequence
  Synthetic
  misc_feature (13)..(13): n is a, c, g, or u
agaaggggacganagaguccca

SEQ ID NO: 132785 - RNA, 23 nt, Artificial Sequence
  Synthetic
  misc_feature (14)..(14): n is a, c, g, or u
gagaaggggacganagaguccca

SEQ ID NO: 132786 - RNA, 24 nt, Artificial Sequence
  Synthetic
  misc_feature (15)..(15): n is a, c, g, or u
ggagaaggggacganagaguccca

SEQ ID NO: 132787 - RNA, 18 nt, Artificial Sequence
  Synthetic
guccaugccccaaagcca

SEQ ID NO: 132788 - RNA, 19 nt, Artificial Sequence
  Synthetic
uguccaugccccaaagcca

SEQ ID NO: 132789 - RNA, 20 nt, Artificial Sequence
  Synthetic
auguccaugccccaaagcca

SEQ ID NO: 132790 - RNA, 21 nt, Artificial Sequence
  Synthetic
aauguccaugccccaaagcca

SEQ ID NO: 132791 - RNA, 22 nt, Artificial Sequence
  Synthetic
caauguccaugccccaaagcca

SEQ ID NO: 132792 - RNA, 23 nt, Artificial Sequence
  Synthetic
ucaauguccaugccccaaagcca

SEQ ID NO: 132793 - RNA, 24 nt, Artificial Sequence
  Synthetic
gucaauguccaugccccaaagcca

SEQ ID NO: 132794 - RNA, 18 nt, Artificial Sequence
  Synthetic
  misc_feature (3)..(3): n is a, c, g, or u
aungccaagccccagcca

SEQ ID NO: 132795 - RNA, 19 nt, Artificial Sequence
  Synthetic
  misc_feature (1)..(1): n is a, c, g, or u
  misc_feature (4)..(4): n is a, c, g, or u
naungccaagccccagcca

SEQ ID NO: 132796 - RNA, 20 nt, Artificial Sequence
  Synthetic
  misc_feature (2)..(2): n is a, c, g, or u
  misc_feature (5)..(5): n is a, c, g, or u
cnaungccaagccccagcca

SEQ ID NO: 132797 - RNA, 21 nt, Artificial Sequence
  Synthetic
  misc_feature (3)..(3): n is a, c, g, or u
  misc_feature (6)..(6): n is a, c, g, or u
ccnaungccaagccccagcca

SEQ ID NO: 132798 - RNA, 22 nt, Artificial Sequence
  Synthetic
  misc_feature (4)..(4): n is a, c, g, or u
  misc_feature (7)..(7): n is a, c, g, or u
gccnaungccaagccccagcca

SEQ ID NO: 132799 - RNA, 23 nt, Artificial Sequence
  Synthetic
  misc_feature (5)..(5): n is a, c, g, or u
  misc_feature (8)..(8): n is a, c, g, or u
ggccnaungccaagccccagcca

SEQ ID NO: 132800 - RNA, 24 nt, Artificial Sequence
  Synthetic
  misc_feature (6)..(6): n is a, c, g, or u
  misc_feature (9)..(9): n is a, c, g, or u
uggccnaungccaagccccagcca

SEQ ID NO: 132801 - RNA, 18 nt, Artificial Sequence
  Synthetic
  misc_feature (7)..(7): n is a, c, g, or u
aguacanccuagcagcca

SEQ ID NO: 132802 - RNA, 19 nt, Artificial Sequence
  Synthetic
  misc_feature (8)..(8): n is a, c, g, or u
caguacanccuagcagcca

SEQ ID NO: 132803 - RNA, 20 nt, Artificial Sequence
  Synthetic
  misc_feature (9)..(9): n is a, c, g, or u
gcaguacanccuagcagcca

SEQ ID NO: 132804 - RNA, 21 nt, Artificial Sequence
  Synthetic
  misc_feature (10)..(10): n is a, c, g, or u
ggcaguacanccuagcagcca

SEQ ID NO: 132805 - RNA, 22 nt, Artificial Sequence
  Synthetic
  misc_feature (11)..(11): n is a, c, g, or u
uggcaguacanccuagcagcca

SEQ ID NO: 132806 - RNA, 23 nt, Artificial Sequence
  Synthetic
  misc_feature (12)..(12): n is a, c, g, or u
uuggcaguacanccuagcagcca

SEQ ID NO: 132807 - RNA, 24 nt, Artificial Sequence
  Synthetic
  misc_feature (13)..(13): n is a, c, g, or u
guuggcaguacanccuagcagcca

SEQ ID NO: 132808 - RNA, 18 nt, Artificial Sequence
  Synthetic
ggaucggcagaggagcca

SEQ ID NO: 132809 - RNA, 19 nt, Artificial Sequence
  Synthetic
uggaucggcagaggagcca

SEQ ID NO: 132810 - RNA, 20 nt, Artificial Sequence
  Synthetic
auggaucggcagaggagcca

SEQ ID NO: 132811 - RNA, 21 nt, Artificial Sequence
  Synthetic
uauggaucggcagaggagcca

SEQ ID NO: 132812 - RNA, 22 nt, Artificial Sequence
  Synthetic
guauggaucggcagaggagcca

SEQ ID NO: 132813 - RNA, 23 nt, Artificial Sequence
  Synthetic
aguauggaucggcagaggagcca

SEQ ID NO: 132814 - RNA, 24 nt, Artificial Sequence
  Synthetic
caguauggaucggcagaggagcca

SEQ ID NO: 132815 - RNA, 18 nt, Artificial Sequence
  Synthetic
cacuaguaaacugagcca

SEQ ID NO: 132816 - RNA, 19 nt, Artificial Sequence
  Synthetic
gcacuaguaaacugagcca

SEQ ID NO: 132817 - RNA, 20 nt, Artificial Sequence
  Synthetic
ggcacuaguaaacugagcca

SEQ ID NO: 132818 - RNA, 21 nt, Artificial Sequence
  Synthetic
uggcacuaguaaacugagcca

SEQ ID NO: 132819 - RNA, 22 nt, Artificial Sequence
  Synthetic
auggcacuaguaaacugagcca

SEQ ID NO: 132820 - RNA, 23 nt, Artificial Sequence
  Synthetic
aauggcacuaguaaacugagcca

SEQ ID NO: 132821 - RNA, 24 nt, Artificial Sequence
  Synthetic
aaauggcacuaguaaacugagcca

SEQ ID NO: 132822 - RNA, 18 nt, Artificial Sequence
  Synthetic
  misc_feature (4)..(4): n is a, c, g, or u
aaangaaggaguuugcca

SEQ ID NO: 132823 - RNA, 19 nt, Artificial Sequence
  Synthetic
  misc_feature (5)..(5): n is a, c, g, or u
gaaangaaggaguuugcca

SEQ ID NO: 132824 - RNA, 20 nt, Artificial Sequence
  Synthetic
  misc_feature (6)..(6): n is a, c, g, or u
ggaaangaaggaguuugcca

SEQ ID NO: 132825 - RNA, 21 nt, Artificial Sequence
  Synthetic
  misc_feature (7)..(7): n is a, c, g, or u
aggaaangaaggaguuugcca

SEQ ID NO: 132826 - RNA, 22 nt, Artificial Sequence
  Synthetic
  misc_feature (8)..(8): n is a, c, g, or u
uaggaaangaaggaguuugcca

SEQ ID NO: 132827 - RNA, 23 nt, Artificial Sequence
  Synthetic
  misc_feature (9)..(9): n is a, c, g, or u
uuaggaaangaaggaguuugcca

SEQ ID NO: 132828 - RNA, 24 nt, Artificial Sequence
  Synthetic
  misc_feature (1)..(1): n is a, c, g, or u
  misc_feature (10)..(10): n is a, c, g, or u
nuuaggaaangaaggaguuugcca

SEQ ID NO: 132829 - RNA, 18 nt, Artificial Sequence
  Synthetic
acauaccuugauaaucca

SEQ ID NO: 132830 - RNA, 19 nt, Artificial Sequence
  Synthetic
aacauaccuugauaaucca

SEQ ID NO: 132831 - RNA, 20 nt, Artificial Sequence
  Synthetic
caacauaccuugauaaucca

SEQ ID NO: 132832 - RNA, 21 nt, Artificial Sequence
  Synthetic
gcaacauaccuugauaaucca

SEQ ID NO: 132833 - RNA, 22 nt, Artificial Sequence
  Synthetic
ggcaacauaccuugauaaucca

SEQ ID NO: 132834 - RNA, 23 nt, Artificial Sequence
  Synthetic
gggcaacauaccuugauaaucca

SEQ ID NO: 132835 - RNA, 24 nt, Artificial Sequence
  Synthetic
cgggcaacauaccuugauaaucca

SEQ ID NO: 132836 - RNA, 18 nt, Artificial Sequence
  Synthetic
  misc_feature (13)..(13): n is a, c, g, or u
cgucccgcgaagnaucca

SEQ ID NO: 132837 - RNA, 19 nt, Artificial Sequence
  Synthetic
  misc_feature (14)..(14): n is a, c, g, or u
acgucccgcgaagnaucca

SEQ ID NO: 132838 - RNA, 20 nt, Artificial Sequence
  Synthetic
  misc_feature (15)..(15): n is a, c, g, or u
gacgucccgcgaagnaucca

SEQ ID NO: 132839 - RNA, 18 nt, Artificial Sequence
  Synthetic
cguucacgguggucucca

SEQ ID NO: 132840 - RNA, 19 nt, Artificial Sequence
  Synthetic
gcguucacgguggucucca

SEQ ID NO: 132841 - RNA, 20 nt, Artificial Sequence
  Synthetic
ggcguucacgguggucucca

SEQ ID NO: 132842 - RNA, 21 nt, Artificial Sequence
  Synthetic
gggcguucacgguggucucca

SEQ ID NO: 132843 - RNA, 22 nt, Artificial Sequence
  Synthetic
ugggcguucacgguggucucca

SEQ ID NO: 132844 - RNA, 23 nt, Artificial Sequence
  Synthetic
augggcguucacgguggucucca

SEQ ID NO: 132845 - RNA, 24 nt, Artificial Sequence
  Synthetic
gaugggcguucacgguggucucca

SEQ ID NO: 132846 - RNA, 18 nt, Artificial Sequence
  Synthetic
gaacuggagccaccagca

SEQ ID NO: 132847 - RNA, 19 nt, Artificial Sequence
  Synthetic
ugaacuggagccaccagca

SEQ ID NO: 132848 - RNA, 20 nt, Artificial Sequence
  Synthetic
cugaacuggagccaccagca

SEQ ID NO: 132849 - RNA, 21 nt, Artificial Sequence
  Synthetic
ccugaacuggagccaccagca

SEQ ID NO: 132850 - RNA, 22 nt, Artificial Sequence
  Synthetic
uccugaacuggagccaccagca

SEQ ID NO: 132851 - RNA, 23 nt, Artificial Sequence
  Synthetic
uuccugaacuggagccaccagca

SEQ ID NO: 132852 - RNA, 24 nt, Artificial Sequence
  Synthetic
guuccugaacuggagccaccagca

SEQ ID NO: 132853 - RNA, 18 nt, Artificial Sequence
  Synthetic
agaagaugaggcauagca

SEQ ID NO: 132854 - RNA, 19 nt, Artificial Sequence
  Synthetic
aagaagaugaggcauagca

SEQ ID NO: 132855 - RNA, 20 nt, Artificial Sequence
  Synthetic
uaagaagaugaggcauagca

SEQ ID NO: 132856 - RNA, 21 nt, Artificial Sequence
  Synthetic
auaagaagaugaggcauagca

SEQ ID NO: 132857 - RNA, 22 nt, Artificial Sequence
  Synthetic
aauaagaagaugaggcauagca

SEQ ID NO: 132858 - RNA, 23 nt, Artificial Sequence
  Synthetic
caauaagaagaugaggcauagca

SEQ ID NO: 132859 - RNA, 24 nt, Artificial Sequence
  Synthetic
ccaauaagaagaugaggcauagca

SEQ ID NO: 132860 - RNA, 18 nt, Artificial Sequence
  Synthetic
ugccgauugguggaggca

SEQ ID NO: 132861 - RNA, 19 nt, Artificial Sequence
  Synthetic
cugccgauugguggaggca

SEQ ID NO: 132862 - RNA, 20 nt, Artificial Sequence
  Synthetic
acugccgauugguggaggca

SEQ ID NO: 132863 - RNA, 21 nt, Artificial Sequence
  Synthetic
gacugccgauugguggaggca

SEQ ID NO: 132864 - RNA, 22 nt, Artificial Sequence
  Synthetic
ugacugccgauugguggaggca

SEQ ID NO: 132865 - RNA, 23 nt, Artificial Sequence
  Synthetic
cugacugccgauugguggaggca

SEQ ID NO: 132866 - RNA, 24 nt, Artificial Sequence
  Synthetic
ccugacugccgauugguggaggca

SEQ ID NO: 132867 - RNA, 18 nt, Artificial Sequence
  Synthetic
  misc_feature (8)..(9): n is a, c, g, or u
  misc_feature (12)..(12): n is a, c, g, or u
uggucggnnggnacggca

SEQ ID NO: 132868 - RNA, 19 nt, Artificial Sequence
  Synthetic
  misc_feature (9)..(10): n is a, c, g, or u
  misc_feature (13)..(13): n is a, c, g, or u
guggucggnnggnacggca

SEQ ID NO: 132869 - RNA, 20 nt, Artificial Sequence
  Synthetic
  misc_feature (10)..(11): n is a, c, g, or u
  misc_feature (14)..(14): n is a, c, g, or u
cguggucggnnggnacggca

SEQ ID NO: 132870 - RNA, 21 nt, Artificial Sequence
  Synthetic
  misc_feature (11)..(12): n is a, c, g, or u
  misc_feature (15)..(15): n is a, c, g, or u
ccguggucggnnggnacggca

SEQ ID NO: 132871 - RNA, 22 nt, Artificial Sequence
  Synthetic
  misc_feature (12)..(13): n is a, c, g, or u
  misc_feature (16)..(16): n is a, c, g, or u
cccguggucggnnggnacggca

SEQ ID NO: 132872 - RNA, 23 nt, Artificial Sequence
  Synthetic
  misc_feature (13)..(14): n is a, c, g, or u
  misc_feature (17)..(17): n is a, c, g, or u
ccccguggucggnnggnacggca

SEQ ID NO: 132873 - RNA, 24 nt, Artificial Sequence
  Synthetic
  misc_feature (14)..(15): n is a, c, g, or u
  misc_feature (18)..(18): n is a, c, g, or u
gccccguggucggnnggnacggca

SEQ ID NO: 132874 - RNA, 18 nt, Artificial Sequence
  Synthetic
agugcacacggaccggca

SEQ ID NO: 132875 - RNA, 19 nt, Artificial Sequence
  Synthetic
aagugcacacggaccggca

SEQ ID NO: 132876 - RNA, 20 nt, Artificial Sequence
  Synthetic
gaagugcacacggaccggca

SEQ ID NO: 132877 - RNA, 18 nt, Artificial Sequence
  Synthetic
ccgcaguauggaucggca

SEQ ID NO: 132878 - RNA, 19 nt, Artificial Sequence
  Synthetic
uccgcaguauggaucggca

SEQ ID NO: 132879 - RNA, 20 nt, Artificial Sequence
  Synthetic
uuccgcaguauggaucggca

SEQ ID NO: 132880 - RNA, 21 nt, Artificial Sequence
  Synthetic
guuccgcaguauggaucggca

SEQ ID NO: 132881 - RNA, 22 nt, Artificial Sequence
  Synthetic
aguuccgcaguauggaucggca

SEQ ID NO: 132882 - RNA, 23 nt, Artificial Sequence
  Synthetic
gaguuccgcaguauggaucggca

SEQ ID NO: 132883 - RNA, 24 nt, Artificial Sequence
  Synthetic
ggaguuccgcaguauggaucggca

SEQ ID NO: 132884 - RNA, 18 nt, Artificial Sequence
  Synthetic
  misc_feature (15)..(15): n is a, c, g, or u
ccaggccguugccgngca

SEQ ID NO: 132885 - RNA, 19 nt, Artificial Sequence
  Synthetic
  misc_feature (16)..(16): n is a, c, g, or u
accaggccguugccgngca

SEQ ID NO: 132886 - RNA, 20 nt, Artificial Sequence
  Synthetic
  misc_feature (17)..(17): n is a, c, g, or u
gaccaggccguugccgngca

SEQ ID NO: 132887 - RNA, 21 nt, Artificial Sequence
  Synthetic
  misc_feature (18)..(18): n is a, c, g, or u
agaccaggccguugccgngca

SEQ ID NO: 132888 - RNA, 22 nt, Artificial Sequence
  Synthetic
  misc_feature (19)..(19): n is a, c, g, or u
cagaccaggccguugccgngca

SEQ ID NO: 132889 - RNA, 23 nt, Artificial Sequence
  Synthetic
  misc_feature (20)..(20): n is a, c, g, or u
acagaccaggccguugccgngca

SEQ ID NO: 132890 - RNA, 24 nt, Artificial Sequence
  Synthetic
  misc_feature (21)..(21): n is a, c, g, or u
cacagaccaggccguugccgngca

SEQ ID NO: 132891 - RNA, 18 nt, Artificial Sequence
  Synthetic
  misc_feature (3)..(3): n is a, c, g, or u
uungcuuguauacaugca

SEQ ID NO: 132892 - RNA, 19 nt, Artificial Sequence
  Synthetic
  misc_feature (4)..(4): n is a, c, g, or u
uuungcuuguauacaugca

SEQ ID NO: 132893 - RNA, 20 nt, Artificial Sequence
  Synthetic
  misc_feature (5)..(5): n is a, c, g, or u
guuungcuuguauacaugca

SEQ ID NO: 132894 - RNA, 21 nt, Artificial Sequence
  Synthetic
  misc_feature (6)..(6): n is a, c, g, or u
uguuungcuuguauacaugca

SEQ ID NO: 132895 - RNA, 22 nt, Artificial Sequence
  Synthetic
  misc_feature (7)..(7): n is a, c, g, or u
cuguuungcuuguauacaugca

SEQ ID NO: 132896 - RNA, 23 nt, Artificial Sequence
  Synthetic
  misc_feature (8)..(8): n is a, c, g, or u
ccuguuungcuuguauacaugca

SEQ ID NO: 132897 - RNA, 24 nt, Artificial Sequence
  Synthetic
  misc_feature (9)..(9): n is a, c, g, or u
gccuguuungcuuguauacaugca

SEQ ID NO: 132898 - RNA, 18 nt, Artificial Sequence
  Synthetic
gaggugaagcgaagugca

SEQ ID NO: 132899 - RNA, 19 nt, Artificial Sequence
  Synthetic
agaggugaagcgaagugca

SEQ ID NO: 132900 - RNA, 20 nt, Artificial Sequence
  Synthetic
cagaggugaagcgaagugca

SEQ ID NO: 132901 - RNA, 21 nt, Artificial Sequence
  Synthetic
gcagaggugaagcgaagugca

SEQ ID NO: 132902 - RNA, 22 nt, Artificial Sequence
  Synthetic
ugcagaggugaagcgaagugca

SEQ ID NO: 132903 - RNA, 23 nt, Artificial Sequence
  Synthetic
gugcagaggugaagcgaagugca

SEQ ID NO: 132904 - RNA, 24 nt, Artificial Sequence
  Synthetic
cgugcagaggugaagcgaagugca

SEQ ID NO: 132905 - RNA, 18 nt, Artificial Sequence
  Synthetic
ugacauacuuuccaauca

SEQ ID NO: 132906 - RNA, 19 nt, Artificial Sequence
  Synthetic
uugacauacuuuccaauca

SEQ ID NO: 132907 - RNA, 20 nt, Artificial Sequence
  Synthetic
uuugacauacuuuccaauca

SEQ ID NO: 132908 - RNA, 21 nt, Artificial Sequence
  Synthetic
cuuugacauacuuuccaauca

SEQ ID NO: 132909 - RNA, 22 nt, Artificial Sequence
  Synthetic
  misc_feature (1)..(1): n is a, c, g, or u
ncuuugacauacuuuccaauca

SEQ ID NO: 132910 - RNA, 23 nt, Artificial Sequence
  Synthetic
  misc_feature (2)..(2): n is a, c, g, or u
uncuuugacauacuuuccaauca

SEQ ID NO: 132911 - RNA, 24 nt, Artificial Sequence
  Synthetic
  misc_feature (3)..(3): n is a, c, g, or u
auncuuugacauacuuuccaauca

SEQ ID NO: 132912 - RNA, 18 nt, Artificial Sequence
  Synthetic
ugaggugagcaaugcuca

SEQ ID NO: 132913 - RNA, 19 nt, Artificial Sequence
  Synthetic
gugaggugagcaaugcuca

SEQ ID NO: 132914 - RNA, 20 nt, Artificial Sequence
  Synthetic
ggugaggugagcaaugcuca

SEQ ID NO: 132915 - RNA, 21 nt, Artificial Sequence
  Synthetic
uggugaggugagcaaugcuca

SEQ ID NO: 132916 - RNA, 22 nt, Artificial Sequence
  Synthetic
auggugaggugagcaaugcuca

SEQ ID NO: 132917 - RNA, 23 nt, Artificial Sequence
  Synthetic
uauggugaggugagcaaugcuca

SEQ ID NO: 132918 - RNA, 24 nt, Artificial Sequence
  Synthetic
guauggugaggugagcaaugcuca

SEQ ID NO: 132919 - RNA, 18 nt, Artificial Sequence
  Synthetic
acggaaggaaagaaguca

SEQ ID NO: 132920 - RNA, 19 nt, Artificial Sequence
  Synthetic
gacggaaggaaagaaguca

SEQ ID NO: 132921 - RNA, 20 nt, Artificial Sequence
  Synthetic
  misc_feature (1)..(1): n is a, c, g, or u
ngacggaaggaaagaaguca

SEQ ID NO: 132922 - RNA, 21 nt, Artificial Sequence
  Synthetic
  misc_feature (2)..(2): n is a, c, g, or u
cngacggaaggaaagaaguca

SEQ ID NO: 132923 - RNA, 22 nt, Artificial Sequence
  Synthetic
  misc_feature (1)..(1): n is a, c, g, or u
  misc_feature (3)..(3): n is a, c, g, or u
ncngacggaaggaaagaaguca

SEQ ID NO: 132924 - RNA, 23 nt, Artificial Sequence
  Synthetic
  misc_feature (2)..(2): n is a, c, g, or u
  misc_feature (4)..(4): n is a, c, g, or u
cncngacggaaggaaagaaguca

SEQ ID NO: 132925 - RNA, 24 nt, Artificial Sequence
  Synthetic
  misc_feature (3)..(3): n is a, c, g, or u
  misc_feature (5)..(5): n is a, c, g, or u
ucncngacggaaggaaagaaguca

SEQ ID NO: 132926 - RNA, 18 nt, Artificial Sequence
  Synthetic
ccaguggggguugcguca

SEQ ID NO: 132927 - RNA, 19 nt, Artificial Sequence
  Synthetic
gccaguggggguugcguca

SEQ ID NO: 132928 - RNA, 20 nt, Artificial Sequence
  Synthetic
agccaguggggguugcguca

SEQ ID NO: 132929 - RNA, 21 nt, Artificial Sequence
  Synthetic
cagccaguggggguugcguca

SEQ ID NO: 132930 - RNA, 22 nt, Artificial Sequence
  Synthetic
ccagccaguggggguugcguca

SEQ ID NO: 132931 - RNA, 23 nt, Artificial Sequence
  Synthetic
cccagccaguggggguugcguca

SEQ ID NO: 132932 - RNA, 24 nt, Artificial Sequence
  Synthetic
ccccagccaguggggguugcguca

SEQ ID NO: 132933 - RNA, 18 nt, Artificial Sequence
  Synthetic
uugugaggauucuuguca

SEQ ID NO: 132934 - RNA, 19 nt, Artificial Sequence
  Synthetic
auugugaggauucuuguca

SEQ ID NO: 132935 - RNA, 20 nt, Artificial Sequence
  Synthetic
uauugugaggauucuuguca

SEQ ID NO: 132936 - RNA, 21 nt, Artificial Sequence
  Synthetic
guauugugaggauucuuguca

SEQ ID NO: 132937 - RNA, 22 nt, Artificial Sequence
  Synthetic
gguauugugaggauucuuguca

SEQ ID NO: 132938 - RNA, 23 nt, Artificial Sequence
  Synthetic
cgguauugugaggauucuuguca

SEQ ID NO: 132939 - RNA, 24 nt, Artificial Sequence
  Synthetic
gcgguauugugaggauucuuguca

SEQ ID NO: 132940 - RNA, 18 nt, Artificial Sequence
  Synthetic
gaagaaccaauaagaaga

SEQ ID NO: 132941 - RNA, 19 nt, Artificial Sequence
  Synthetic
agaagaaccaauaagaaga

SEQ ID NO: 132942 - RNA, 20 nt, Artificial Sequence
  Synthetic
cagaagaaccaauaagaaga

SEQ ID NO: 132943 - RNA, 21 nt, Artificial Sequence
  Synthetic
ccagaagaaccaauaagaaga

SEQ ID NO: 132944 - RNA, 22 nt, Artificial Sequence
  Synthetic
uccagaagaaccaauaagaaga

SEQ ID NO: 132945 - RNA, 23 nt, Artificial Sequence
  Synthetic
auccagaagaaccaauaagaaga

SEQ ID NO: 132946 - RNA, 24 nt, Artificial Sequence
  Synthetic
aauccagaagaaccaauaagaaga

SEQ ID NO: 132947 - RNA, 18 nt, Artificial Sequence
  Synthetic
ccggaaguguugauaaga

SEQ ID NO: 132948 - RNA, 19 nt, Artificial Sequence
  Synthetic
uccggaaguguugauaaga

SEQ ID NO: 132949 - RNA, 20 nt, Artificial Sequence
  Synthetic
uuccggaaguguugauaaga

SEQ ID NO: 132950 - RNA, 21 nt, Artificial Sequence
  Synthetic
uuuccggaaguguugauaaga

SEQ ID NO: 132951 - RNA, 22 nt, Artificial Sequence
  Synthetic
guuuccggaaguguugauaaga

SEQ ID NO: 132952 - RNA, 23 nt, Artificial Sequence
  Synthetic
aguuuccggaaguguugauaaga

SEQ ID NO: 132953 - RNA, 24 nt, Artificial Sequence
  Synthetic
uaguuuccggaaguguugauaaga

SEQ ID NO: 132954 - RNA, 18 nt, Artificial Sequence
  Synthetic
cagaugagaaggcacaga

SEQ ID NO: 132955 - RNA, 19 nt, Artificial Sequence
  Synthetic
gcagaugagaaggcacaga

SEQ ID NO: 132956 - RNA, 20 nt, Artificial Sequence
  Synthetic
ggcagaugagaaggcacaga

SEQ ID NO: 132957 - RNA, 21 nt, Artificial Sequence
  Synthetic
cggcagaugagaaggcacaga

SEQ ID NO: 132958 - RNA, 22 nt, Artificial Sequence
  Synthetic
ccggcagaugagaaggcacaga

SEQ ID NO: 132959 - RNA, 23 nt, Artificial Sequence
  Synthetic
accggcagaugagaaggcacaga

SEQ ID NO: 132960 - RNA, 24 nt, Artificial Sequence
  Synthetic
gaccggcagaugagaaggcacaga

SEQ ID NO: 132961 - RNA, 18 nt, Artificial Sequence
  Synthetic
gcaaacacuuggcacaga

SEQ ID NO: 132962 - RNA, 19 nt, Artificial Sequence
  Synthetic
agcaaacacuuggcacaga

SEQ ID NO: 132963 - RNA, 20 nt, Artificial Sequence
  Synthetic
cagcaaacacuuggcacaga

SEQ ID NO: 132964 - RNA, 21 nt, Artificial Sequence
  Synthetic
ucagcaaacacuuggcacaga

SEQ ID NO: 132965 - RNA, 22 nt, Artificial Sequence
  Synthetic
gucagcaaacacuuggcacaga

SEQ ID NO: 132966 - RNA, 23 nt, Artificial Sequence
  Synthetic
cgucagcaaacacuuggcacaga

SEQ ID NO: 132967 - RNA, 24 nt, Artificial Sequence
  Synthetic
gcgucagcaaacacuuggcacaga

SEQ ID NO: 132968 - RNA, 18 nt, Artificial Sequence
  Synthetic
  misc_feature (9)..(9): n is a, c, g, or u
aaggcuucncgauacaga

SEQ ID NO: 132969 - RNA, 19 nt, Artificial Sequence
  Synthetic
  misc_feature (10)..(10): n is a, c, g, or u
uaaggcuucncgauacaga

SEQ ID NO: 132970 - RNA, 20 nt, Artificial Sequence
  Synthetic
  misc_feature (11)..(11): n is a, c, g, or u
cuaaggcuucncgauacaga

SEQ ID NO: 132971 - RNA, 21 nt, Artificial Sequence
  Synthetic
  misc_feature (12)..(12): n is a, c, g, or u
ucuaaggcuucncgauacaga

SEQ ID NO: 132972 - RNA, 22 nt, Artificial Sequence
  Synthetic
  misc_feature (13)..(13): n is a, c, g, or u
cucuaaggcuucncgauacaga

SEQ ID NO: 132973 - RNA, 23 nt, Artificial Sequence
  Synthetic
  misc_feature (14)..(14): n is a, c, g, or u
acucuaaggcuucncgauacaga

SEQ ID NO: 132974 - RNA, 24 nt, Artificial Sequence
  Synthetic
  misc_feature (15)..(15): n is a, c, g, or u
gacucuaaggcuucncgauacaga

SEQ ID NO: 132975 - RNA, 18 nt, Artificial Sequence
  Synthetic
  misc_feature (5)..(5): n is a, c, g, or u
  misc_feature (10)..(10): n is a, c, g, or u
cucangaugnuguacaga

SEQ ID NO: 132976 - RNA, 19 nt, Artificial Sequence
  Synthetic
  misc_feature (1)..(1): n is a, c, g, or u
  misc_feature (6)..(6): n is a, c, g, or u
  misc_feature (11)..(11): n is a, c, g, or u
ncucangaugnuguacaga

SEQ ID NO: 132977 - RNA, 20 nt, Artificial Sequence
  Synthetic
  misc_feature (2)..(2): n is a, c, g, or u
  misc_feature (7)..(7): n is a, c, g, or u
  misc_feature (12)..(12): n is a, c, g, or u
gncucangaugnuguacaga

SEQ ID NO: 132978 - RNA, 21 nt, Artificial Sequence
  Synthetic
  misc_feature (3)..(3): n is a, c, g, or u
  misc_feature (8)..(8): n is a, c, g, or u
  misc_feature (13)..(13): n is a, c, g, or u
ggncucangaugnuguacaga

SEQ ID NO: 132979 - RNA, 22 nt, Artificial Sequence
  Synthetic
  misc_feature (4)..(4): n is a, c, g, or u
  misc_feature (9)..(9): n is a, c, g, or u
  misc_feature (14)..(14): n is a, c, g, or u
gggncucangaugnuguacaga

SEQ ID NO: 132980 - RNA, 23 nt, Artificial Sequence
  Synthetic
  misc_feature (5)..(5): n is a, c, g, or u
  misc_feature (10)..(10): n is a, c, g, or u
  misc_feature (15)..(15): n is a, c, g, or u
agggncucangaugnuguacaga

SEQ ID NO: 132981 - RNA, 24 nt, Artificial Sequence
  Synthetic
  misc_feature (6)..(6): n is a, c, g, or u
  misc_feature (11)..(11): n is a, c, g, or u
  misc_feature (16)..(16): n is a, c, g, or u
aagggncucangaugnuguacaga

SEQ ID NO: 132982 - RNA, 18 nt, Artificial Sequence
  Synthetic
aagagaugauuaggcaga

SEQ ID NO: 132983 - RNA, 19 nt, Artificial Sequence
  Synthetic
caagagaugauuaggcaga

SEQ ID NO: 132984 - RNA, 20 nt, Artificial Sequence
  Synthetic
acaagagaugauuaggcaga

SEQ ID NO: 132985 - RNA, 21 nt, Artificial Sequence
  Synthetic
  misc_feature (1)..(1): n is a, c, g, or u
nacaagagaugauuaggcaga

SEQ ID NO: 132986 - RNA, 22 nt, Artificial Sequence
  Synthetic
  misc_feature (2)..(2): n is a, c, g, or u
gnacaagagaugauuaggcaga

SEQ ID NO: 132987 - RNA, 23 nt, Artificial Sequence
  Synthetic
  misc_feature (3)..(3): n is a, c, g, or u
ugnacaagagaugauuaggcaga

SEQ ID NO: 132988 - RNA, 24 nt, Artificial Sequence
  Synthetic
  misc_feature (4)..(4): n is a, c, g, or u
augnacaagagaugauuaggcaga

SEQ ID NO: 132989 - RNA, 18 nt, Artificial Sequence
  Synthetic
  misc_feature (6)..(7): n is a, c, g, or u
  misc_feature (10)..(10): n is a, c, g, or u
gucggnnggnacggcaga

SEQ ID NO: 132990 - RNA, 19 nt, Artificial Sequence
  Synthetic
  misc_feature (7)..(8): n is a, c, g, or u
  misc_feature (11)..(11): n is a, c, g, or u
ggucggnnggnacggcaga

SEQ ID NO: 132991 - RNA, 20 nt, Artificial Sequence
  Synthetic
  misc_feature (8)..(9): n is a, c, g, or u
  misc_feature (12)..(12): n is a, c, g, or u
uggucggnnggnacggcaga

SEQ ID NO: 132992 - RNA, 21 nt, Artificial Sequence
  Synthetic
  misc_feature (9)..(10): n is a, c, g, or u
  misc_feature (13)..(13): n is a, c, g, or u
guggucggnnggnacggcaga

SEQ ID NO: 132993 - RNA, 22 nt, Artificial Sequence
  Synthetic
  misc_feature (10)..(11): n is a, c, g, or u
  misc_feature (14)..(14): n is a, c, g, or u
cguggucggnnggnacggcaga

SEQ ID NO: 132994 - RNA, 23 nt, Artificial Sequence
  Synthetic
  misc_feature (11)..(12): n is a, c, g, or u
  misc_feature (15)..(15): n is a, c, g, or u
ccguggucggnnggnacggcaga

SEQ ID NO: 132995 - RNA, 24 nt, Artificial Sequence
  Synthetic
  misc_feature (12)..(13): n is a, c, g, or u
  misc_feature (16)..(16): n is a, c, g, or u
cccguggucggnnggnacggcaga

SEQ ID NO: 132996 - RNA, 18 nt, Artificial Sequence
  Synthetic
ugcacacggaccggcaga

SEQ ID NO: 132997 - RNA, 19 nt, Artificial Sequence
  Synthetic
gugcacacggaccggcaga

SEQ ID NO: 132998 - RNA, 20 nt, Artificial Sequence
  Synthetic
agugcacacggaccggcaga

SEQ ID NO: 132999 - RNA, 18 nt, Artificial Sequence
  Synthetic
cuccaugcaacgugcaga

SEQ ID NO: 133000 - RNA, 19 nt, Artificial Sequence
  Synthetic
ucuccaugcaacgugcaga

SEQ ID NO: 133001 - RNA, 20 nt, Artificial Sequence
  Synthetic
gucuccaugcaacgugcaga

SEQ ID NO: 133002 - RNA, 21 nt, Artificial Sequence
  Synthetic
ggucuccaugcaacgugcaga

SEQ ID NO: 133003 - RNA, 22 nt, Artificial Sequence
  Synthetic
uggucuccaugcaacgugcaga

SEQ ID NO: 133004 - RNA, 23 nt, Artificial Sequence
  Synthetic
guggucuccaugcaacgugcaga

SEQ ID NO: 133005 - RNA, 24 nt, Artificial Sequence
  Synthetic
gguggucuccaugcaacgugcaga

SEQ ID NO: 133006 - RNA, 18 nt, Artificial Sequence
  Synthetic
cucuuagagguggagaga

SEQ ID NO: 133007 - RNA, 19 nt, Artificial Sequence
  Synthetic
ucucuuagagguggagaga

SEQ ID NO: 133008 - RNA, 20 nt, Artificial Sequence
  Synthetic
gucucuuagagguggagaga

SEQ ID NO: 133009 - RNA, 21 nt, Artificial Sequence
  Synthetic
ugucucuuagagguggagaga

SEQ ID NO: 133010 - RNA, 22 nt, Artificial Sequence
  Synthetic
cugucucuuagagguggagaga

SEQ ID NO: 133011 - RNA, 23 nt, Artificial Sequence
  Synthetic
acugucucuuagagguggagaga

SEQ ID NO: 133012 - RNA, 24 nt, Artificial Sequence
  Synthetic
gacugucucuuagagguggagaga

SEQ ID NO: 133013 - RNA, 18 nt, Artificial Sequence
  Synthetic
  misc_feature (4)..(4): n is a, c, g, or u
ucgnggagauugacgaga

SEQ ID NO: 133014 - RNA, 19 nt, Artificial Sequence
  Synthetic
  misc_feature (5)..(5): n is a, c, g, or u
cucgnggagauugacgaga

SEQ ID NO: 133015 - RNA, 20 nt, Artificial Sequence
  Synthetic
  misc_feature (6)..(6): n is a, c, g, or u
ccucgnggagauugacgaga

SEQ ID NO: 133016 - RNA, 21 nt, Artificial Sequence
  Synthetic
  misc_feature (7)..(7): n is a, c, g, or u
uccucgnggagauugacgaga

SEQ ID NO: 133017 - RNA, 22 nt, Artificial Sequence
  Synthetic
  misc_feature (8)..(8): n is a, c, g, or u
guccucgnggagauugacgaga

SEQ ID NO: 133018 - RNA, 23 nt, Artificial Sequence
  Synthetic
  misc_feature (9)..(9): n is a, c, g, or u
aguccucgnggagauugacgaga

SEQ ID NO: 133019 - RNA, 24 nt, Artificial Sequence
  Synthetic
  misc_feature (10)..(10): n is a, c, g, or u
caguccucgnggagauugacgaga

SEQ ID NO: 133020 - RNA, 18 nt, Artificial Sequence
  Synthetic
acauugagauucccgaga

SEQ ID NO: 133021 - RNA, 19 nt, Artificial Sequence
  Synthetic
aacauugagauucccgaga

SEQ ID NO: 133022 - RNA, 20 nt, Artificial Sequence
  Synthetic
uaacauugagauucccgaga

SEQ ID NO: 133023 - RNA, 21 nt, Artificial Sequence
  Synthetic
cuaacauugagauucccgaga

SEQ ID NO: 133024 - RNA, 22 nt, Artificial Sequence
  Synthetic
acuaacauugagauucccgaga

SEQ ID NO: 133025 - RNA, 23 nt, Artificial Sequence
  Synthetic
uacuaacauugagauucccgaga

SEQ ID NO: 133026 - RNA, 24 nt, Artificial Sequence
  Synthetic
auacuaacauugagauucccgaga

SEQ ID NO: 133027 - RNA, 18 nt, Artificial Sequence
  Synthetic
  misc_feature (1)..(1): n is a, c, g, or u
  misc_feature (4)..(4): n is a, c, g, or u
nggnacggcagacggaga

SEQ ID NO: 133028 - RNA, 19 nt, Artificial Sequence
  Synthetic
  misc_feature (1)..(2): n is a, c, g, or u
  misc_feature (5)..(5): n is a, c, g, or u
nnggnacggcagacggaga

SEQ ID NO: 133029 - RNA, 20 nt, Artificial Sequence
  Synthetic
  misc_feature (2)..(3): n is a, c, g, or u
  misc_feature (6)..(6): n is a, c, g, or u
gnnggnacggcagacggaga

SEQ ID NO: 133030 - RNA, 21 nt, Artificial Sequence
  Synthetic
  misc_feature (3)..(4): n is a, c, g, or u
  misc_feature (7)..(7): n is a, c, g, or u
ggnnggnacggcagacggaga

SEQ ID NO: 133031 - RNA, 22 nt, Artificial Sequence
  Synthetic
  misc_feature (4)..(5): n is a, c, g, or u
  misc_feature (8)..(8): n is a, c, g, or u
cggnnggnacggcagacggaga

SEQ ID NO: 133032 - RNA, 23 nt, Artificial Sequence
  Synthetic
  misc_feature (5)..(6): n is a, c, g, or u
  misc_feature (9)..(9): n is a, c, g, or u
ucggnnggnacggcagacggaga

SEQ ID NO: 133033 - RNA, 24 nt, Artificial Sequence
  Synthetic
  misc_feature (6)..(7): n is a, c, g, or u
  misc_feature (10)..(10): n is a, c, g, or u
gucggnnggnacggcagacggaga

SEQ ID NO: 133034 - RNA, 18 nt, Artificial Sequence
  Synthetic
gucucuuagagguggaga

SEQ ID NO: 133035 - RNA, 19 nt, Artificial Sequence
  Synthetic
ugucucuuagagguggaga

SEQ ID NO: 133036 - RNA, 20 nt, Artificial Sequence
  Synthetic
cugucucuuagagguggaga

SEQ ID NO: 133037 - RNA, 21 nt, Artificial Sequence
  Synthetic
acugucucuuagagguggaga

SEQ ID NO: 133038 - RNA, 22 nt, Artificial Sequence
  Synthetic
gacugucucuuagagguggaga

SEQ ID NO: 133039 - RNA, 23 nt, Artificial Sequence
  Synthetic
ugacugucucuuagagguggaga

SEQ ID NO: 133040 - RNA, 24 nt, Artificial Sequence
  Synthetic
augacugucucuuagagguggaga

SEQ ID NO: 133041 - RNA, 18 nt, Artificial Sequence
  Synthetic
  misc_feature (14)..(14): n is a, c, g, or u
guaaacugagccangaga

SEQ ID NO: 133042 - RNA, 19 nt, Artificial Sequence
  Synthetic
  misc_feature (15)..(15): n is a, c, g, or u
aguaaacugagccangaga

SEQ ID NO: 133043 - RNA, 20 nt, Artificial Sequence
  Synthetic
  misc_feature (16)..(16): n is a, c, g, or u
uaguaaacugagccangaga

SEQ ID NO: 133044 - RNA, 21 nt, Artificial Sequence
  Synthetic
  misc_feature (17)..(17): n is a, c, g, or u
cuaguaaacugagccangaga

SEQ ID NO: 133045 - RNA, 22 nt, Artificial Sequence
  Synthetic
  misc_feature (18)..(18): n is a, c, g, or u
acuaguaaacugagccangaga

SEQ ID NO: 133046 - RNA, 23 nt, Artificial Sequence
  Synthetic
  misc_feature (19)..(19): n is a, c, g, or u
cacuaguaaacugagccangaga

SEQ ID NO: 133047 - RNA, 24 nt, Artificial Sequence
  Synthetic
  misc_feature (20)..(20): n is a, c, g, or u
gcacuaguaaacugagccangaga

SEQ ID NO: 133048 - RNA, 18 nt, Artificial Sequence
  Synthetic
  misc_feature (15)..(15): n is a, c, g, or u
uaaauguauacccanaga

SEQ ID NO: 133049 - RNA, 19 nt, Artificial Sequence
  Synthetic
  misc_feature (16)..(16): n is a, c, g, or u
uuaaauguauacccanaga

SEQ ID NO: 133050 - RNA, 20 nt, Artificial Sequence
  Synthetic
  misc_feature (17)..(17): n is a, c, g, or u
uuuaaauguauacccanaga

SEQ ID NO: 133051 - RNA, 21 nt, Artificial Sequence
  Synthetic
  misc_feature (18)..(18): n is a, c, g, or u
guuuaaauguauacccanaga

SEQ ID NO: 133052 - RNA, 22 nt, Artificial Sequence
  Synthetic
  misc_feature (19)..(19): n is a, c, g, or u
gguuuaaauguauacccanaga

SEQ ID NO: 133053 - RNA, 23 nt, Artificial Sequence
  Synthetic
  misc_feature (20)..(20): n is a, c, g, or u
ggguuuaaauguauacccanaga

SEQ ID NO: 133054 - RNA, 24 nt, Artificial Sequence
  Synthetic
  misc_feature (21)..(21): n is a, c, g, or u
aggguuuaaauguauacccanaga

SEQ ID NO: 133055 - RNA, 18 nt, Artificial Sequence
  Synthetic
ggaugacugucucuuaga

SEQ ID NO: 133056 - RNA, 19 nt, Artificial Sequence
  Synthetic
aggaugacugucucuuaga

SEQ ID NO: 133057 - RNA, 20 nt, Artificial Sequence
  Synthetic
gaggaugacugucucuuaga

SEQ ID NO: 133058 - RNA, 21 nt, Artificial Sequence
  Synthetic
ugaggaugacugucucuuaga

SEQ ID NO: 133059 - RNA, 22 nt, Artificial Sequence
  Synthetic
cugaggaugacugucucuuaga

SEQ ID NO: 133060 - RNA, 23 nt, Artificial Sequence
  Synthetic
ccugaggaugacugucucuuaga

SEQ ID NO: 133061 - RNA, 24 nt, Artificial Sequence
  Synthetic
gccugaggaugacugucucuuaga

SEQ ID NO: 133062 - RNA, 18 nt, Artificial Sequence
  Synthetic
accccgccuguaacacga

SEQ ID NO: 133063 - RNA, 19 nt, Artificial Sequence
  Synthetic
aaccccgccuguaacacga

SEQ ID NO: 133064 - RNA, 20 nt, Artificial Sequence
  Synthetic
aaaccccgccuguaacacga

SEQ ID NO: 133065 - RNA, 21 nt, Artificial Sequence
  Synthetic
aaaaccccgccuguaacacga

SEQ ID NO: 133066 - RNA, 22 nt, Artificial Sequence
  Synthetic
aaaaaccccgccuguaacacga

SEQ ID NO: 133067 - RNA, 23 nt, Artificial Sequence
  Synthetic
gaaaaaccccgccuguaacacga

SEQ ID NO: 133068 - RNA, 24 nt, Artificial Sequence
  Synthetic
agaaaaaccccgccuguaacacga

SEQ ID NO: 133069 - RNA, 18 nt, Artificial Sequence
  Synthetic
cgcgggauucagcgccga

SEQ ID NO: 133070 - RNA, 19 nt, Artificial Sequence
  Synthetic
ccgcgggauucagcgccga

SEQ ID NO: 133071 - RNA, 20 nt, Artificial Sequence
  Synthetic
uccgcgggauucagcgccga

SEQ ID NO: 133072 - RNA, 18 nt, Artificial Sequence
  Synthetic
ugcgaauccacacuccga

SEQ ID NO: 133073 - RNA, 19 nt, Artificial Sequence
  Synthetic
gugcgaauccacacuccga

SEQ ID NO: 133074 - RNA, 20 nt, Artificial Sequence
  Synthetic
agugcgaauccacacuccga

SEQ ID NO: 133075 - RNA, 21 nt, Artificial Sequence
  Synthetic
gagugcgaauccacacuccga

SEQ ID NO: 133076 - RNA, 22 nt, Artificial Sequence
  Synthetic
ggagugcgaauccacacuccga

SEQ ID NO: 133077 - RNA, 23 nt, Artificial Sequence
  Synthetic
aggagugcgaauccacacuccga

SEQ ID NO: 133078 - RNA, 24 nt, Artificial Sequence
  Synthetic
gaggagugcgaauccacacuccga

SEQ ID NO: 133079 - RNA, 18 nt, Artificial Sequence
  Synthetic
ucuucugcgacgcggcga

SEQ ID NO: 133080 - RNA, 19 nt, Artificial Sequence
  Synthetic
aucuucugcgacgcggcga

SEQ ID NO: 133081 - RNA, 20 nt, Artificial Sequence
  Synthetic
gaucuucugcgacgcggcga

SEQ ID NO: 133082 - RNA, 18 nt, Artificial Sequence
  Synthetic
gcuccagaccggcugcga

SEQ ID NO: 133083 - RNA, 19 nt, Artificial Sequence
  Synthetic
ugcuccagaccggcugcga

SEQ ID NO: 133084 - RNA, 20 nt, Artificial Sequence
  Synthetic
uugcuccagaccggcugcga

SEQ ID NO: 133085 - RNA, 21 nt, Artificial Sequence
  Synthetic
uuugcuccagaccggcugcga

SEQ ID NO: 133086 - RNA, 22 nt, Artificial Sequence
  Synthetic
  misc_feature (1)..(1): n is a, c, g, or u
nuuugcuccagaccggcugcga

SEQ ID NO: 133087 - RNA, 23 nt, Artificial Sequence
  Synthetic
  misc_feature (2)..(2): n is a, c, g, or u
gnuuugcuccagaccggcugcga

SEQ ID NO: 133088 - RNA, 24 nt, Artificial Sequence
  Synthetic
  misc_feature (3)..(3): n is a, c, g, or u
agnuuugcuccagaccggcugcga

SEQ ID NO: 133089 - RNA, 18 nt, Artificial Sequence
  Synthetic
  misc_feature (9)..(9): n is a, c, g, or u
ugagaucuncgucugcga

SEQ ID NO: 133090 - RNA, 19 nt, Artificial Sequence
  Synthetic
  misc_feature (10)..(10): n is a, c, g, or u
uugagaucuncgucugcga

SEQ ID NO: 133091 - RNA, 20 nt, Artificial Sequence
  Synthetic
  misc_feature (11)..(11): n is a, c, g, or u
auugagaucuncgucugcga

SEQ ID NO: 133092 - RNA, 21 nt, Artificial Sequence
  Synthetic
  misc_feature (12)..(12): n is a, c, g, or u
gauugagaucuncgucugcga

SEQ ID NO: 133093 - RNA, 22 nt, Artificial Sequence
  Synthetic
  misc_feature (13)..(13): n is a, c, g, or u
cgauugagaucuncgucugcga

SEQ ID NO: 133094 - RNA, 23 nt, Artificial Sequence
  Synthetic
  misc_feature (14)..(14): n is a, c, g, or u
gcgauugagaucuncgucugcga

SEQ ID NO: 133095 - RNA, 24 nt, Artificial Sequence
  Synthetic
  misc_feature (15)..(15): n is a, c, g, or u
ggcgauugagaucuncgucugcga

SEQ ID NO: 133096 - RNA, 18 nt, Artificial Sequence
  Synthetic
gauugagaucuucugcga

SEQ ID NO: 133097 - RNA, 19 nt, Artificial Sequence
  Synthetic
agauugagaucuucugcga

SEQ ID NO: 133098 - RNA, 20 nt, Artificial Sequence
  Synthetic
gagauugagaucuucugcga

SEQ ID NO: 133099 - RNA, 21 nt, Artificial Sequence
  Synthetic
cgagauugagaucuucugcga

SEQ ID NO: 133100 - RNA, 22 nt, Artificial Sequence
  Synthetic
ccgagauugagaucuucugcga

SEQ ID NO: 133101 - RNA, 23 nt, Artificial Sequence
  Synthetic
cccgagauugagaucuucugcga

SEQ ID NO: 133102 - RNA, 24 nt, Artificial Sequence
  Synthetic
ucccgagauugagaucuucugcga

SEQ ID NO: 133103 - RNA, 18 nt, Artificial Sequence
  Synthetic
  misc_feature (15)..(15): n is a, c, g, or u
gacucuaaggcuucncga

SEQ ID NO: 133104 - RNA, 19 nt, Artificial Sequence
  Synthetic
  misc_feature (16)..(16): n is a, c, g, or u
agacucuaaggcuucncga

SEQ ID NO: 133105 - RNA, 20 nt, Artificial Sequence
  Synthetic
  misc_feature (17)..(17): n is a, c, g, or u
gagacucuaaggcuucncga

SEQ ID NO: 133106 - RNA, 21 nt, Artificial Sequence
  Synthetic
  misc_feature (18)..(18): n is a, c, g, or u
ggagacucuaaggcuucncga

SEQ ID NO: 133107 - RNA, 22 nt, Artificial Sequence
  Synthetic
  misc_feature (19)..(19): n is a, c, g, or u
aggagacucuaaggcuucncga

SEQ ID NO: 133108 - RNA, 23 nt, Artificial Sequence
  Synthetic
  misc_feature (20)..(20): n is a, c, g, or u
caggagacucuaaggcuucncga

SEQ ID NO: 133109 - RNA, 24 nt, Artificial Sequence
  Synthetic
  misc_feature (21)..(21): n is a, c, g, or u
ucaggagacucuaaggcuucncga

SEQ ID NO: 133110 - RNA, 18 nt, Artificial Sequence
  Synthetic
  misc_feature (6)..(6): n is a, c, g, or u
  misc_feature (8)..(8): n is a, c, g, or u
agaucncngacggaagga

SEQ ID NO: 133111 - RNA, 19 nt, Artificial Sequence
  Synthetic
  misc_feature (1)..(1): n is a, c, g, or u
  misc_feature (7)..(7): n is a, c, g, or u
  misc_feature (9)..(9): n is a, c, g, or u
nagaucncngacggaagga

SEQ ID NO: 133112 - RNA, 20 nt, Artificial Sequence
  Synthetic
  misc_feature (2)..(2): n is a, c, g, or u
  misc_feature (8)..(8): n is a, c, g, or u
  misc_feature (10)..(10): n is a, c, g, or u
gnagaucncngacggaagga

SEQ ID NO: 133113 - RNA, 21 nt, Artificial Sequence
  Synthetic
  misc_feature (3)..(3): n is a, c, g, or u
  misc_feature (9)..(9): n is a, c, g, or u
  misc_feature (11)..(11): n is a, c, g, or u
agnagaucncngacggaagga

SEQ ID NO: 133114 - RNA, 22 nt, Artificial Sequence
  Synthetic
  misc_feature (1)..(1): n is a, c, g, or u
  misc_feature (4)..(4): n is a, c, g, or u
  misc_feature (10)..(10): n is a, c, g, or u
  misc_feature (12)..(12): n is a, c, g, or u
nagnagaucncngacggaagga

SEQ ID NO: 133115 - RNA, 23 nt, Artificial Sequence
  Synthetic
  misc_feature (2)..(2): n is a, c, g, or u
  misc_feature (5)..(5): n is a, c, g, or u
  misc_feature (11)..(11): n is a, c, g, or u
  misc_feature (13)..(13): n is a, c, g, or u
cnagnagaucncngacggaagga

SEQ ID NO: 133116 - RNA, 24 nt, Artificial Sequence
  Synthetic
  misc_feature (3)..(3): n is a, c, g, or u
  misc_feature (6)..(6): n is a, c, g, or u
  misc_feature (12)..(12): n is a, c, g, or u
  misc_feature (14)..(14): n is a, c, g, or u
ucnagnagaucncngacggaagga

SEQ ID NO: 133117 - RNA, 18 nt, Artificial Sequence
  Synthetic
ugaggcauagcagcagga

SEQ ID NO: 133118 - RNA, 19 nt, Artificial Sequence
  Synthetic
augaggcauagcagcagga

SEQ ID NO: 133119 - RNA, 20 nt, Artificial Sequence
  Synthetic
gaugaggcauagcagcagga

SEQ ID NO: 133120 - RNA, 21 nt, Artificial Sequence
  Synthetic
agaugaggcauagcagcagga

SEQ ID NO: 133121 - RNA, 22 nt, Artificial Sequence
  Synthetic
aagaugaggcauagcagcagga

SEQ ID NO: 133122 - RNA, 23 nt, Artificial Sequence
  Synthetic
gaagaugaggcauagcagcagga

SEQ ID NO: 133123 - RNA, 24 nt, Artificial Sequence
  Synthetic
agaagaugaggcauagcagcagga

SEQ ID NO: 133124 - RNA, 18 nt, Artificial Sequence
  Synthetic
cgauugguggaggcagga

SEQ ID NO: 133125 - RNA, 19 nt, Artificial Sequence
  Synthetic
ccgauugguggaggcagga

SEQ ID NO: 133126 - RNA, 20 nt, Artificial Sequence
  Synthetic
gccgauugguggaggcagga

SEQ ID NO: 133127 - RNA, 21 nt, Artificial Sequence
  Synthetic
ugccgauugguggaggcagga

SEQ ID NO: 133128 - RNA, 22 nt, Artificial Sequence
  Synthetic
cugccgauugguggaggcagga

SEQ ID NO: 133129 - RNA, 23 nt, Artificial Sequence
  Synthetic
acugccgauugguggaggcagga

SEQ ID NO: 133130 - RNA, 24 nt, Artificial Sequence
  Synthetic
gacugccgauugguggaggcagga

SEQ ID NO: 133131 - RNA, 18 nt, Artificial Sequence
  Synthetic
ggaguuugccauucagga

SEQ ID NO: 133132 - RNA, 19 nt, Artificial Sequence
  Synthetic
aggaguuugccauucagga

SEQ ID NO: 133133 - RNA, 20 nt, Artificial Sequence
  Synthetic
aaggaguuugccauucagga

SEQ ID NO: 133134 - RNA, 21 nt, Artificial Sequence
  Synthetic
gaaggaguuugccauucagga

SEQ ID NO: 133135 - RNA, 22 nt, Artificial Sequence
  Synthetic
  misc_feature (1)..(1): n is a, c, g, or u
ngaaggaguuugccauucagga

SEQ ID NO: 133136 - RNA, 23 nt, Artificial Sequence
  Synthetic
  misc_feature (2)..(2): n is a, c, g, or u
angaaggaguuugccauucagga

SEQ ID NO: 133137 - RNA, 24 nt, Artificial Sequence
  Synthetic
  misc_feature (3)..(3): n is a, c, g, or u
aangaaggaguuugccauucagga

SEQ ID NO: 133138 - RNA, 18 nt, Artificial Sequence
  Synthetic
ccaggacaaauuggagga

SEQ ID NO: 133139 - RNA, 19 nt, Artificial Sequence
  Synthetic
accaggacaaauuggagga

SEQ ID NO: 133140 - RNA, 20 nt, Artificial Sequence
  Synthetic
aaccaggacaaauuggagga

SEQ ID NO: 133141 - RNA, 21 nt, Artificial Sequence
  Synthetic
uaaccaggacaaauuggagga

SEQ ID NO: 133142 - RNA, 22 nt, Artificial Sequence
  Synthetic
auaaccaggacaaauuggagga

SEQ ID NO: 133143 - RNA, 23 nt, Artificial Sequence
  Synthetic
gauaaccaggacaaauuggagga

SEQ ID NO: 133144 - RNA, 24 nt, Artificial Sequence
  Synthetic
cgauaaccaggacaaauuggagga

SEQ ID NO: 133145 - RNA, 18 nt, Artificial Sequence
  Synthetic
  misc_feature (12)..(12): n is a, c, g, or u
uguaaaugaaunuuagga

SEQ ID NO: 133146 - RNA, 19 nt, Artificial Sequence
  Synthetic
  misc_feature (1)..(1): n is a, c, g, or u
  misc_feature (13)..(13): n is a, c, g, or u
nuguaaaugaaunuuagga

SEQ ID NO: 133147 - RNA, 20 nt, Artificial Sequence
  Synthetic
  misc_feature (2)..(2): n is a, c, g, or u
  misc_feature (14)..(14): n is a, c, g, or u
cnuguaaaugaaunuuagga

SEQ ID NO: 133148 - RNA, 21 nt, Artificial Sequence
  Synthetic
  misc_feature (3)..(3): n is a, c, g, or u
  misc_feature (15)..(15): n is a, c, g, or u
ucnuguaaaugaaunuuagga

SEQ ID NO: 133149 - RNA, 22 nt, Artificial Sequence
  Synthetic
  misc_feature (1)..(1): n is a, c, g, or u
  misc_feature (4)..(4): n is a, c, g, or u
  misc_feature (16)..(16): n is a, c, g, or u
nucnuguaaaugaaunuuagga

SEQ ID NO: 133150 - RNA, 23 nt, Artificial Sequence
  Synthetic
  misc_feature (2)..(2): n is a, c, g, or u
  misc_feature (5)..(5): n is a, c, g, or u
  misc_feature (17)..(17): n is a, c, g, or u
cnucnuguaaaugaaunuuagga

SEQ ID NO: 133151 - RNA, 24 nt, Artificial Sequence
  Synthetic
  misc_feature (3)..(3): n is a, c, g, or u
  misc_feature (6)..(6): n is a, c, g, or u
  misc_feature (18)..(18): n is a, c, g, or u
ucnucnuguaaaugaaunuuagga

SEQ ID NO: 133152 - RNA, 18 nt, Artificial Sequence
  Synthetic
  misc_feature (8)..(8): n is a, c, g, or u
ugagccangagaaacgga

SEQ ID NO: 133153 - RNA, 19 nt, Artificial Sequence
  Synthetic
  misc_feature (9)..(9): n is a, c, g, or u
cugagccangagaaacgga

SEQ ID NO: 133154 - RNA, 20 nt, Artificial Sequence
  Synthetic
  misc_feature (10)..(10): n is a, c, g, or u
acugagccangagaaacgga

SEQ ID NO: 133155 - RNA, 21 nt, Artificial Sequence
  Synthetic
  misc_feature (11)..(11): n is a, c, g, or u
aacugagccangagaaacgga

SEQ ID NO: 133156 - RNA, 22 nt, Artificial Sequence
  Synthetic
  misc_feature (12)..(12): n is a, c, g, or u
aaacugagccangagaaacgga

SEQ ID NO: 133157 - RNA, 23 nt, Artificial Sequence
  Synthetic
  misc_feature (13)..(13): n is a, c, g, or u
uaaacugagccangagaaacgga

SEQ ID NO: 133158 - RNA, 24 nt, Artificial Sequence
  Synthetic
  misc_feature (14)..(14): n is a, c, g, or u
guaaacugagccangagaaacgga

SEQ ID NO: 133159 - RNA, 18 nt, Artificial Sequence
  Synthetic
  misc_feature (2)..(3): n is a, c, g, or u
  misc_feature (6)..(6): n is a, c, g, or u
gnnggnacggcagacgga

SEQ ID NO: 133160 - RNA, 19 nt, Artificial Sequence
  Synthetic
  misc_feature (3)..(4): n is a, c, g, or u
  misc_feature (7)..(7): n is a, c, g, or u
ggnnggnacggcagacgga

SEQ ID NO: 133161 - RNA, 20 nt, Artificial Sequence
  Synthetic
  misc_feature (4)..(5): n is a, c, g, or u
  misc_feature (8)..(8): n is a, c, g, or u
cggnnggnacggcagacgga

SEQ ID NO: 133162 - RNA, 21 nt, Artificial Sequence
  Synthetic
  misc_feature (5)..(6): n is a, c, g, or u
  misc_feature (9)..(9): n is a, c, g, or u
ucggnnggnacggcagacgga

SEQ ID NO: 133163 - RNA, 22 nt, Artificial Sequence
  Synthetic
  misc_feature (6)..(7): n is a, c, g, or u
  misc_feature (10)..(10): n is a, c, g, or u
gucggnnggnacggcagacgga

SEQ ID NO: 133164 - RNA, 23 nt, Artificial Sequence
  Synthetic
  misc_feature (7)..(8): n is a, c, g, or u
  misc_feature (11)..(11): n is a, c, g, or u
ggucggnnggnacggcagacgga

SEQ ID NO: 133165 - RNA, 24 nt, Artificial Sequence
  Synthetic
  misc_feature (8)..(9): n is a, c, g, or u
  misc_feature (12)..(12): n is a, c, g, or u
uggucggnnggnacggcagacgga

SEQ ID NO: 133166 - RNA, 18 nt, Artificial Sequence
  Synthetic
  misc_feature (1)..(1): n is a, c, g, or u
  misc_feature (4)..(4): n is a, c, g, or u
  misc_feature (10)..(10): n is a, c, g, or u
  misc_feature (12)..(12): n is a, c, g, or u
nagnagaucncngacgga

SEQ ID NO: 133167 - RNA, 19 nt, Artificial Sequence
  Synthetic
  misc_feature (2)..(2): n is a, c, g, or u
  misc_feature (5)..(5): n is a, c, g, or u
  misc_feature (11)..(11): n is a, c, g, or u
  misc_feature (13)..(13): n is a, c, g, or u
cnagnagaucncngacgga

SEQ ID NO: 133168 - RNA, 20 nt, Artificial Sequence
  Synthetic
  misc_feature (3)..(3): n is a, c, g, or u
  misc_feature (6)..(6): n is a, c, g, or u
  misc_feature (12)..(12): n is a, c, g, or u
  misc_feature (14)..(14): n is a, c, g, or u
ucnagnagaucncngacgga

SEQ ID NO: 133169 - RNA, 21 nt, Artificial Sequence
  Synthetic
  misc_feature (1)..(1): n is a, c, g, or u
  misc_feature (4)..(4): n is a, c, g, or u
  misc_feature (7)..(7): n is a, c, g, or u
  misc_feature (13)..(13): n is a, c, g, or u
  misc_feature (15)..(15): n is a, c, g, or u
nucnagnagaucncngacgga

SEQ ID NO: 133170 - RNA, 22 nt, Artificial Sequence
  Synthetic
  misc_feature (2)..(2): n is a, c, g, or u
  misc_feature (5)..(5): n is a, c, g, or u
  misc_feature (8)..(8): n is a, c, g, or u
  misc_feature (14)..(14): n is a, c, g, or u
  misc_feature (16)..(16): n is a, c, g, or u
unucnagnagaucncngacgga

SEQ ID NO: 133171 - RNA, 23 nt, Artificial Sequence
  Synthetic
  misc_feature (3)..(3): n is a, c, g, or u
  misc_feature (6)..(6): n is a, c, g, or u
  misc_feature (9)..(9): n is a, c, g, or u
  misc_feature (15)..(15): n is a, c, g, or u
  misc_feature (17)..(17): n is a, c, g, or u
gunucnagnagaucncngacgga

SEQ ID NO: 133172 - RNA, 24 nt, Artificial Sequence
  Synthetic
  misc_feature (1)..(1): n is a, c, g, or u
  misc_feature (4)..(4): n is a, c, g, or u
  misc_feature (7)..(7): n is a, c, g, or u
  misc_feature (10)..(10): n is a, c, g, or u
  misc_feature (16)..(16): n is a, c, g, or u
  misc_feature (18)..(18): n is a, c, g, or u
ngunucnagnagaucncngacgga

SEQ ID NO: 133173 - RNA, 18 nt, Artificial Sequence
  Synthetic
gauucagcgccgacggga

SEQ ID NO: 133174 - RNA, 19 nt, Artificial Sequence
  Synthetic
ggauucagcgccgacggga

SEQ ID NO: 133175 - RNA, 20 nt, Artificial Sequence
  Synthetic
gggauucagcgccgacggga

SEQ ID NO: 133176 - RNA, 18 nt, Artificial Sequence
  Synthetic
gaggggucguccgcggga

SEQ ID NO: 133177 - RNA, 19 nt, Artificial Sequence
  Synthetic
  misc_feature (1)..(1): n is a, c, g, or u
ngaggggucguccgcggga

SEQ ID NO: 133178 - RNA, 20 nt, Artificial Sequence
  Synthetic
  misc_feature (2)..(2): n is a, c, g, or u
gngaggggucguccgcggga

SEQ ID NO: 133179 - RNA, 21 nt, Artificial Sequence
  Synthetic
  misc_feature (3)..(3): n is a, c, g, or u
cgngaggggucguccgcggga

SEQ ID NO: 133180 - RNA, 22 nt, Artificial Sequence
  Synthetic
  misc_feature (4)..(4): n is a, c, g, or u
ccgngaggggucguccgcggga

SEQ ID NO: 133181 - RNA, 23 nt, Artificial Sequence
  Synthetic
  misc_feature (5)..(5): n is a, c, g, or u
cccgngaggggucguccgcggga

SEQ ID NO: 133182 - RNA, 24 nt, Artificial Sequence
  Synthetic
  misc_feature (6)..(6): n is a, c, g, or u
ccccgngaggggucguccgcggga

SEQ ID NO: 133183 - RNA, 18 nt, Artificial Sequence
  Synthetic
agagguggagagauggga

SEQ ID NO: 133184 - RNA, 19 nt, Artificial Sequence
  Synthetic
uagagguggagagauggga

SEQ ID NO: 133185 - RNA, 20 nt, Artificial Sequence
  Synthetic
uuagagguggagagauggga

SEQ ID NO: 133186 - RNA, 21 nt, Artificial Sequence
  Synthetic
cuuagagguggagagauggga

SEQ ID NO: 133187 - RNA, 22 nt, Artificial Sequence
  Synthetic
ucuuagagguggagagauggga

SEQ ID NO: 133188 - RNA, 23 nt, Artificial Sequence
  Synthetic
cucuuagagguggagagauggga

SEQ ID NO: 133189 - RNA, 24 nt, Artificial Sequence
  Synthetic
ucucuuagagguggagagauggga

SEQ ID NO: 133190 - RNA, 18 nt, Artificial Sequence
  Synthetic
  misc_feature (8)..(8): n is a, c, g, or u
  misc_feature (11)..(11): n is a, c, g, or u
aagcccangangauggga

SEQ ID NO: 133191 - RNA, 19 nt, Artificial Sequence
  Synthetic
  misc_feature (9)..(9): n is a, c, g, or u
  misc_feature (12)..(12): n is a, c, g, or u
aaagcccangangauggga

SEQ ID NO: 133192 - RNA, 20 nt, Artificial Sequence
  Synthetic
  misc_feature (10)..(10): n is a, c, g, or u
  misc_feature (13)..(13): n is a, c, g, or u
gaaagcccangangauggga

SEQ ID NO: 133193 - RNA, 21 nt, Artificial Sequence
  Synthetic
  misc_feature (11)..(11): n is a, c, g, or u
  misc_feature (14)..(14): n is a, c, g, or u
cgaaagcccangangauggga

SEQ ID NO: 133194 - RNA, 22 nt, Artificial Sequence
  Synthetic
  misc_feature (12)..(12): n is a, c, g, or u
  misc_feature (15)..(15): n is a, c, g, or u
gcgaaagcccangangauggga

SEQ ID NO: 133195 - RNA, 23 nt, Artificial Sequence
  Synthetic
  misc_feature (13)..(13): n is a, c, g, or u
  misc_feature (16)..(16): n is a, c, g, or u
ugcgaaagcccangangauggga

SEQ ID NO: 133196 - RNA, 24 nt, Artificial Sequence
  Synthetic
  misc_feature (14)..(14): n is a, c, g, or u
  misc_feature (17)..(17): n is a, c, g, or u
uugcgaaagcccangangauggga

SEQ ID NO: 133197 - RNA, 18 nt, Artificial Sequence
  Synthetic
  misc_feature (12)..(12): n is a, c, g, or u
aaucccagaggnuuggga

SEQ ID NO: 133198 - RNA, 19 nt, Artificial Sequence
  Synthetic
  misc_feature (13)..(13): n is a, c, g, or u
gaaucccagaggnuuggga

SEQ ID NO: 133199 - RNA, 20 nt, Artificial Sequence
  Synthetic
  misc_feature (14)..(14): n is a, c, g, or u
agaaucccagaggnuuggga

SEQ ID NO: 133200 - RNA, 21 nt, Artificial Sequence
  Synthetic
  misc_feature (15)..(15): n is a, c, g, or u
aagaaucccagaggnuuggga

SEQ ID NO: 133201 - RNA, 22 nt, Artificial Sequence
  Synthetic
  misc_feature (16)..(16): n is a, c, g, or u
aaagaaucccagaggnuuggga

SEQ ID NO: 133202 - RNA, 23 nt, Artificial Sequence
  Synthetic
  misc_feature (17)..(17): n is a, c, g, or u
gaaagaaucccagaggnuuggga

SEQ ID NO: 133203 - RNA, 24 nt, Artificial Sequence
  Synthetic
  misc_feature (18)..(18): n is a, c, g, or u
ggaaagaaucccagaggnuuggga

SEQ ID NO: 133204 - RNA, 18 nt, Artificial Sequence
  Synthetic
  misc_feature (15)..(15): n is a, c, g, or u
ugagaggcaauauungga

SEQ ID NO: 133205 - RNA, 19 nt, Artificial Sequence
  Synthetic
  misc_feature (16)..(16): n is a, c, g, or u
gugagaggcaauauungga

SEQ ID NO: 133206 - RNA, 20 nt, Artificial Sequence
  Synthetic
  misc_feature (17)..(17): n is a, c, g, or u
ugugagaggcaauauungga

SEQ ID NO: 133207 - RNA, 21 nt, Artificial Sequence
  Synthetic
  misc_feature (18)..(18): n is a, c, g, or u
augugagaggcaauauungga

SEQ ID NO: 133208 - RNA, 22 nt, Artificial Sequence
  Synthetic
  misc_feature (19)..(19): n is a, c, g, or u
gaugugagaggcaauauungga

SEQ ID NO: 133209 - RNA, 23 nt, Artificial Sequence
  Synthetic
  misc_feature (20)..(20): n is a, c, g, or u
agaugugagaggcaauauungga

SEQ ID NO: 133210 - RNA, 24 nt, Artificial Sequence
  Synthetic
  misc_feature (21)..(21): n is a, c, g, or u
gagaugugagaggcaauauungga

SEQ ID NO: 133211 - RNA, 18 nt, Artificial Sequence
  Synthetic
  misc_feature (9)..(9): n is a, c, g, or u
guuguugungauccugga

SEQ ID NO: 133212 - RNA, 19 nt, Artificial Sequence
  Synthetic
  misc_feature (10)..(10): n is a, c, g, or u
gguuguugungauccugga

SEQ ID NO: 133213 - RNA, 20 nt, Artificial Sequence
  Synthetic
  misc_feature (11)..(11): n is a, c, g, or u
ugguuguugungauccugga

SEQ ID NO: 133214 - RNA, 21 nt, Artificial Sequence
  Synthetic
  misc_feature (12)..(12): n is a, c, g, or u
cugguuguugungauccugga

SEQ ID NO: 133215 - RNA, 22 nt, Artificial Sequence
  Synthetic
  misc_feature (13)..(13): n is a, c, g, or u
acugguuguugungauccugga

SEQ ID NO: 133216 - RNA, 23 nt, Artificial Sequence
  Synthetic
  misc_feature (14)..(14): n is a, c, g, or u
uacugguuguugungauccugga

SEQ ID NO: 133217 - RNA, 24 nt, Artificial Sequence
  Synthetic
  misc_feature (15)..(15): n is a, c, g, or u
guacugguuguugungauccugga

SEQ ID NO: 133218 - RNA, 18 nt, Artificial Sequence
  Synthetic
ugacugccgauuggugga

SEQ ID NO: 133219 - RNA, 19 nt, Artificial Sequence
  Synthetic
cugacugccgauuggugga

SEQ ID NO: 133220 - RNA, 20 nt, Artificial Sequence
  Synthetic
ccugacugccgauuggugga

SEQ ID NO: 133221 - RNA, 21 nt, Artificial Sequence
  Synthetic
uccugacugccgauuggugga

SEQ ID NO: 133222 - RNA, 22 nt, Artificial Sequence
  Synthetic
uuccugacugccgauuggugga

SEQ ID NO: 133223 - RNA, 23 nt, Artificial Sequence
  Synthetic
cuuccugacugccgauuggugga

SEQ ID NO: 133224 - RNA, 24 nt, Artificial Sequence
  Synthetic
ccuuccugacugccgauuggugga

SEQ ID NO: 133225 - RNA, 18 nt, Artificial Sequence
  Synthetic
  misc_feature (7)..(7): n is a, c, g, or u
  misc_feature (10)..(10): n is a, c, g, or u
  misc_feature (16)..(16): n is a, c, g, or u
gauaggnacnguaganga

SEQ ID NO: 133226 - RNA, 19 nt, Artificial Sequence
  Synthetic
  misc_feature (8)..(8): n is a, c, g, or u
  misc_feature (11)..(11): n is a, c, g, or u
  misc_feature (17)..(17): n is a, c, g, or u
agauaggnacnguaganga

SEQ ID NO: 133227 - RNA, 20 nt, Artificial Sequence
  Synthetic
  misc_feature (9)..(9): n is a, c, g, or u
  misc_feature (12)..(12): n is a, c, g, or u
  misc_feature (18)..(18): n is a, c, g, or u
aagauaggnacnguaganga

SEQ ID NO: 133228 - RNA, 21 nt, Artificial Sequence
  Synthetic
  misc_feature (10)..(10): n is a, c, g, or u
  misc_feature (13)..(13): n is a, c, g, or u
  misc_feature (19)..(19): n is a, c, g, or u
aaagauaggnacnguaganga

SEQ ID NO: 133229 - RNA, 22 nt, Artificial Sequence
  Synthetic
  misc_feature (11)..(11): n is a, c, g, or u
  misc_feature (14)..(14): n is a, c, g, or u
  misc_feature (20)..(20): n is a, c, g, or u
uaaagauaggnacnguaganga

SEQ ID NO: 133230 - RNA, 23 nt, Artificial Sequence
  Synthetic
  misc_feature (12)..(12): n is a, c, g, or u
  misc_feature (15)..(15): n is a, c, g, or u
  misc_feature (21)..(21): n is a, c, g, or u
uuaaagauaggnacnguaganga

SEQ ID NO: 133231 - RNA, 24 nt, Artificial Sequence
  Synthetic
  misc_feature (13)..(13): n is a, c, g, or u
  misc_feature (16)..(16): n is a, c, g, or u
  misc_feature (22)..(22): n is a, c, g, or u
auuaaagauaggnacnguaganga

SEQ ID NO: 133232 - RNA, 18 nt, Artificial Sequence
  Synthetic
  misc_feature (2)..(2): n is a, c, g, or u
  misc_feature (5)..(5): n is a, c, g, or u
  misc_feature (8)..(8): n is a, c, g, or u
  misc_feature (14)..(14): n is a, c, g, or u
  misc_feature (16)..(16): n is a, c, g, or u
unucnagnagaucncnga

SEQ ID NO: 133233 - RNA, 19 nt, Artificial Sequence
  Synthetic
  misc_feature (3)..(3): n is a, c, g, or u
  misc_feature (6)..(6): n is a, c, g, or u
  misc_feature (9)..(9): n is a, c, g, or u
  misc_feature (15)..(15): n is a, c, g, or u
  misc_feature (17)..(17): n is a, c, g, or u
gunucnagnagaucncnga

SEQ ID NO: 133234 - RNA, 20 nt, Artificial Sequence
  Synthetic
  misc_feature (1)..(1): n is a, c, g, or u
  misc_feature (4)..(4): n is a, c, g, or u
  misc_feature (7)..(7): n is a, c, g, or u
  misc_feature (10)..(10): n is a, c, g, or u
  misc_feature (16)..(16): n is a, c, g, or u
  misc_feature (18)..(18): n is a, c, g, or u
ngunucnagnagaucncnga

SEQ ID NO: 133235 - RNA, 21 nt, Artificial Sequence
  Synthetic
  misc_feature (2)..(2): n is a, c, g, or u
  misc_feature (5)..(5): n is a, c, g, or u
  misc_feature (8)..(8): n is a, c, g, or u
  misc_feature (11)..(11): n is a, c, g, or u
  misc_feature (17)..(17): n is a, c, g, or u
  misc_feature (19)..(19): n is a, c, g, or u
cngunucnagnagaucncnga

SEQ ID NO: 133236 - RNA, 22 nt, Artificial Sequence
  Synthetic
  misc_feature (3)..(3): n is a, c, g, or u
  misc_feature (6)..(6): n is a, c, g, or u
  misc_feature (9)..(9): n is a, c, g, or u
  misc_feature (12)..(12): n is a, c, g, or u
  misc_feature (18)..(18): n is a, c, g, or u
  misc_feature (20)..(20): n is a, c, g, or u
gcngunucnagnagaucncnga

SEQ ID NO: 133237 - RNA, 23 nt, Artificial Sequence
  Synthetic
  misc_feature (4)..(4): n is a, c, g, or u
  misc_feature (7)..(7): n is a, c, g, or u
  misc_feature (10)..(10): n is a, c, g, or u
  misc_feature (13)..(13): n is a, c, g, or u
  misc_feature (19)..(19): n is a, c, g, or u
  misc_feature (21)..(21): n is a, c, g, or u
ggcngunucnagnagaucncnga

SEQ ID NO: 133238 - RNA, 24 nt, Artificial Sequence
  Synthetic
  misc_feature (5)..(5): n is a, c, g, or u
  misc_feature (8)..(8): n is a, c, g, or u
  misc_feature (11)..(11): n is a, c, g, or u
  misc_feature (14)..(14): n is a, c, g, or u
  misc_feature (20)..(20): n is a, c, g, or u
  misc_feature (22)..(22): n is a, c, g, or u
aggcngunucnagnagaucncnga

SEQ ID NO: 133239 - RNA, 18 nt, Artificial Sequence
  Synthetic
  misc_feature (1)..(1): n is a, c, g, or u
  misc_feature (16)..(16): n is a, c, g, or u
ngauguauauuuccgnga

SEQ ID NO: 133240 - RNA, 19 nt, Artificial Sequence
  Synthetic
  misc_feature (2)..(2): n is a, c, g, or u
  misc_feature (17)..(17): n is a, c, g, or u
angauguauauuuccgnga

SEQ ID NO: 133241 - RNA, 20 nt, Artificial Sequence
  Synthetic
  misc_feature (3)..(3): n is a, c, g, or u
  misc_feature (18)..(18): n is a, c, g, or u
aangauguauauuuccgnga

SEQ ID NO: 133242 - RNA, 21 nt, Artificial Sequence
  Synthetic
  misc_feature (4)..(4): n is a, c, g, or u
  misc_feature (19)..(19): n is a, c, g, or u
aaangauguauauuuccgnga

SEQ ID NO: 133243 - RNA, 22 nt, Artificial Sequence
  Synthetic
  misc_feature (5)..(5): n is a, c, g, or u
  misc_feature (20)..(20): n is a, c, g, or u
gaaangauguauauuuccgnga

SEQ ID NO: 133244 - RNA, 23 nt, Artificial Sequence
  Synthetic
  misc_feature (6)..(6): n is a, c, g, or u
  misc_feature (21)..(21): n is a, c, g, or u
ggaaangauguauauuuccgnga

SEQ ID NO: 133245 - RNA, 24 nt, Artificial Sequence
  Synthetic
  misc_feature (7)..(7): n is a, c, g, or u
  misc_feature (22)..(22): n is a, c, g, or u
uggaaangauguauauuuccgnga

SEQ ID NO: 133246 - RNA, 18 nt, Artificial Sequence
  Synthetic
uuuuguacagcaacauga

SEQ ID NO: 133247 - RNA, 19 nt, Artificial Sequence
  Synthetic
guuuuguacagcaacauga

SEQ ID NO: 133248 - RNA, 20 nt, Artificial Sequence
  Synthetic
gguuuuguacagcaacauga

SEQ ID NO: 133249 - RNA, 21 nt, Artificial Sequence
  Synthetic
agguuuuguacagcaacauga

SEQ ID NO: 133250 - RNA, 22 nt, Artificial Sequence
  Synthetic
uagguuuuguacagcaacauga

SEQ ID NO: 133251 - RNA, 23 nt, Artificial Sequence
  Synthetic
guagguuuuguacagcaacauga

SEQ ID NO: 133252 - RNA, 24 nt, Artificial Sequence
  Synthetic
cguagguuuuguacagcaacauga

SEQ ID NO: 133253 - RNA, 18 nt, Artificial Sequence
  Synthetic
acacggaccggcagauga

SEQ ID NO: 133254 - RNA, 19 nt, Artificial Sequence
  Synthetic
cacacggaccggcagauga

SEQ ID NO: 133255 - RNA, 20 nt, Artificial Sequence
  Synthetic
gcacacggaccggcagauga

SEQ ID NO: 133256 - RNA, 21 nt, Artificial Sequence
  Synthetic
ugcacacggaccggcagauga

SEQ ID NO: 133257 - RNA, 22 nt, Artificial Sequence
  Synthetic
gugcacacggaccggcagauga

SEQ ID NO: 133258 - RNA, 23 nt, Artificial Sequence
  Synthetic
agugcacacggaccggcagauga

SEQ ID NO: 133259 - RNA, 24 nt, Artificial Sequence
  Synthetic
aagugcacacggaccggcagauga

SEQ ID NO: 133260 - RNA, 18 nt, Artificial Sequence
  Synthetic
  misc_feature (7)..(7): n is a, c, g, or u
gacaugnacaagagauga

SEQ ID NO: 133261 - RNA, 19 nt, Artificial Sequence
  Synthetic
  misc_feature (8)..(8): n is a, c, g, or u
ggacaugnacaagagauga

SEQ ID NO: 133262 - RNA, 20 nt, Artificial Sequence
  Synthetic
  misc_feature (9)..(9): n is a, c, g, or u
gggacaugnacaagagauga

SEQ ID NO: 133263 - RNA, 21 nt, Artificial Sequence
  Synthetic
  misc_feature (10)..(10): n is a, c, g, or u
ugggacaugnacaagagauga

SEQ ID NO: 133264 - RNA, 22 nt, Artificial Sequence
  Synthetic
  misc_feature (11)..(11): n is a, c, g, or u
gugggacaugnacaagagauga

SEQ ID NO: 133265 - RNA, 23 nt, Artificial Sequence
  Synthetic
  misc_feature (12)..(12): n is a, c, g, or u
agugggacaugnacaagagauga

SEQ ID NO: 133266 - RNA, 24 nt, Artificial Sequence
  Synthetic
  misc_feature (1)..(1): n is a, c, g, or u
  misc_feature (13)..(13): n is a, c, g, or u
nagugggacaugnacaagagauga

SEQ ID NO: 133267 - RNA, 18 nt, Artificial Sequence
  Synthetic
ggcauagcagcaggauga

SEQ ID NO: 133268 - RNA, 19 nt, Artificial Sequence
  Synthetic
aggcauagcagcaggauga

SEQ ID NO: 133269 - RNA, 20 nt, Artificial Sequence
  Synthetic
gaggcauagcagcaggauga

SEQ ID NO: 133270 - RNA, 21 nt, Artificial Sequence
  Synthetic
ugaggcauagcagcaggauga

SEQ ID NO: 133271 - RNA, 22 nt, Artificial Sequence
  Synthetic
augaggcauagcagcaggauga

SEQ ID NO: 133272 - RNA, 23 nt, Artificial Sequence
  Synthetic
gaugaggcauagcagcaggauga

SEQ ID NO: 133273 - RNA, 24 nt, Artificial Sequence
  Synthetic
agaugaggcauagcagcaggauga

SEQ ID NO: 133274 - RNA, 18 nt, Artificial Sequence
  Synthetic
gcaggguccaacugauga

SEQ ID NO: 133275 - RNA, 19 nt, Artificial Sequence
  Synthetic
ugcaggguccaacugauga

SEQ ID NO: 133276 - RNA, 20 nt, Artificial Sequence
  Synthetic
augcaggguccaacugauga

SEQ ID NO: 133277 - RNA, 21 nt, Artificial Sequence
  Synthetic
aaugcaggguccaacugauga

SEQ ID NO: 133278 - RNA, 22 nt, Artificial Sequence
  Synthetic
gaaugcaggguccaacugauga

SEQ ID NO: 133279 - RNA, 23 nt, Artificial Sequence
  Synthetic
cgaaugcaggguccaacugauga

SEQ ID NO: 133280 - RNA, 24 nt, Artificial Sequence
  Synthetic
ccgaaugcaggguccaacugauga

SEQ ID NO: 133281 - RNA, 18 nt, Artificial Sequence
  Synthetic
ggaugaagaggaauauga

SEQ ID NO: 133282 - RNA, 19 nt, Artificial Sequence
  Synthetic
aggaugaagaggaauauga

SEQ ID NO: 133283 - RNA, 20 nt, Artificial Sequence
  Synthetic
caggaugaagaggaauauga

SEQ ID NO: 133284 - RNA, 21 nt, Artificial Sequence
  Synthetic
gcaggaugaagaggaauauga

SEQ ID NO: 133285 - RNA, 22 nt, Artificial Sequence
  Synthetic
agcaggaugaagaggaauauga

SEQ ID NO: 133286 - RNA, 23 nt, Artificial Sequence
  Synthetic
cagcaggaugaagaggaauauga

SEQ ID NO: 133287 - RNA, 24 nt, Artificial Sequence
  Synthetic
gcagcaggaugaagaggaauauga

SEQ ID NO: 133288 - RNA, 18 nt, Artificial Sequence
  Synthetic
  misc_feature (7)..(7): n is a, c, g, or u
  misc_feature (9)..(9): n is a, c, g, or u
aggguunanuguuccuga

SEQ ID NO: 133289 - RNA, 19 nt, Artificial Sequence
  Synthetic
  misc_feature (8)..(8): n is a, c, g, or u
  misc_feature (10)..(10): n is a, c, g, or u
caggguunanuguuccuga

SEQ ID NO: 133290 - RNA, 20 nt, Artificial Sequence
  Synthetic
  misc_feature (1)..(1): n is a, c, g, or u
  misc_feature (9)..(9): n is a, c, g, or u
  misc_feature (11)..(11): n is a, c, g, or u
ncaggguunanuguuccuga

SEQ ID NO: 133291 - RNA, 21 nt, Artificial Sequence
  Synthetic
  misc_feature (2)..(2): n is a, c, g, or u
  misc_feature (10)..(10): n is a, c, g, or u
  misc_feature (12)..(12): n is a, c, g, or u
ancaggguunanuguuccuga

SEQ ID NO: 133292 - RNA, 22 nt, Artificial Sequence
  Synthetic
  misc_feature (3)..(3): n is a, c, g, or u
  misc_feature (11)..(11): n is a, c, g, or u
  misc_feature (13)..(13): n is a, c, g, or u
gancaggguunanuguuccuga

SEQ ID NO: 133293 - RNA, 23 nt, Artificial Sequence
  Synthetic
  misc_feature (4)..(4): n is a, c, g, or u
  misc_feature (12)..(12): n is a, c, g, or u
  misc_feature (14)..(14): n is a, c, g, or u
ggancaggguunanuguuccuga

SEQ ID NO: 133294 - RNA, 24 nt, Artificial Sequence
  Synthetic
  misc_feature (1)..(1): n is a, c, g, or u
  misc_feature (5)..(5): n is a, c, g, or u
  misc_feature (13)..(13): n is a, c, g, or u
  misc_feature (15)..(15): n is a, c, g, or u
nggancaggguunanuguuccuga

SEQ ID NO: 133295 - RNA, 18 nt, Artificial Sequence
  Synthetic
  misc_feature (2)..(2): n is a, c, g, or u
unuuuucauuuacaguga

SEQ ID NO: 133296 - RNA, 19 nt, Artificial Sequence
  Synthetic
  misc_feature (3)..(3): n is a, c, g, or u
cunuuuucauuuacaguga

SEQ ID NO: 133297 - RNA, 20 nt, Artificial Sequence
  Synthetic
  misc_feature (4)..(4): n is a, c, g, or u
ucunuuuucauuuacaguga

SEQ ID NO: 133298 - RNA, 21 nt, Artificial Sequence
  Synthetic
  misc_feature (5)..(5): n is a, c, g, or u
uucunuuuucauuuacaguga

SEQ ID NO: 133299 - RNA, 22 nt, Artificial Sequence
  Synthetic
  misc_feature (6)..(6): n is a, c, g, or u
cuucunuuuucauuuacaguga

SEQ ID NO: 133300 - RNA, 23 nt, Artificial Sequence
  Synthetic
  misc_feature (7)..(7): n is a, c, g, or u
ucuucunuuuucauuuacaguga

SEQ ID NO: 133301 - RNA, 24 nt, Artificial Sequence
  Synthetic
  misc_feature (8)..(8): n is a, c, g, or u
aucuucunuuuucauuuacaguga

SEQ ID NO: 133302 - RNA, 18 nt, Artificial Sequence
  Synthetic
caggagguuggugaguga

SEQ ID NO: 133303 - RNA, 19 nt, Artificial Sequence
  Synthetic
acaggagguuggugaguga

SEQ ID NO: 133304 - RNA, 20 nt, Artificial Sequence
  Synthetic
gacaggagguuggugaguga

SEQ ID NO: 133305 - RNA, 21 nt, Artificial Sequence
  Synthetic
ggacaggagguuggugaguga

SEQ ID NO: 133306 - RNA, 22 nt, Artificial Sequence
  Synthetic
aggacaggagguuggugaguga

SEQ ID NO: 133307 - RNA, 23 nt, Artificial Sequence
  Synthetic
gaggacaggagguuggugaguga

SEQ ID NO: 133308 - RNA, 24 nt, Artificial Sequence
  Synthetic
ggaggacaggagguuggugaguga

SEQ ID NO: 133309 - RNA, 18 nt, Artificial Sequence
  Synthetic
ugcaacgugcagagguga

SEQ ID NO: 133310 - RNA, 19 nt, Artificial Sequence
  Synthetic
augcaacgugcagagguga

SEQ ID NO: 133311 - RNA, 20 nt, Artificial Sequence
  Synthetic
caugcaacgugcagagguga

SEQ ID NO: 133312 - RNA, 21 nt, Artificial Sequence
  Synthetic
ccaugcaacgugcagagguga

SEQ ID NO: 133313 - RNA, 22 nt, Artificial Sequence
  Synthetic
uccaugcaacgugcagagguga

SEQ ID NO: 133314 - RNA, 23 nt, Artificial Sequence
  Synthetic
cuccaugcaacgugcagagguga

SEQ ID NO: 133315 - RNA, 24 nt, Artificial Sequence
  Synthetic
ucuccaugcaacgugcagagguga

SEQ ID NO: 133316 - RNA, 18 nt, Artificial Sequence
  Synthetic
  misc_feature (9)..(9): n is a, c, g, or u
cugagugcnguaugguga

SEQ ID NO: 133317 - RNA, 19 nt, Artificial Sequence
  Synthetic
  misc_feature (10)..(10): n is a, c, g, or u
ccugagugcnguaugguga

SEQ ID NO: 133318 - RNA, 20 nt, Artificial Sequence
  Synthetic
  misc_feature (11)..(11): n is a, c, g, or u
gccugagugcnguaugguga

SEQ ID NO: 133319 - RNA, 21 nt, Artificial Sequence
  Synthetic
  misc_feature (12)..(12): n is a, c, g, or u
ugccugagugcnguaugguga

SEQ ID NO: 133320 - RNA, 22 nt, Artificial Sequence
  Synthetic
  misc_feature (13)..(13): n is a, c, g, or u
uugccugagugcnguaugguga

SEQ ID NO: 133321 - RNA, 23 nt, Artificial Sequence
  Synthetic
  misc_feature (14)..(14): n is a, c, g, or u
cuugccugagugcnguaugguga

SEQ ID NO: 133322 - RNA, 24 nt, Artificial Sequence
  Synthetic
  misc_feature (15)..(15): n is a, c, g, or u
gcuugccugagugcnguaugguga

SEQ ID NO: 133323 - RNA, 18 nt, Artificial Sequence
  Synthetic
  misc_feature (15)..(15): n is a, c, g, or u
uaaugauuaacuacnuga

SEQ ID NO: 133324 - RNA, 19 nt, Artificial Sequence
  Synthetic
  misc_feature (16)..(16): n is a, c, g, or u
guaaugauuaacuacnuga

SEQ ID NO: 133325 - RNA, 20 nt, Artificial Sequence
  Synthetic
  misc_feature (17)..(17): n is a, c, g, or u
aguaaugauuaacuacnuga

SEQ ID NO: 133326 - RNA, 21 nt, Artificial Sequence
  Synthetic
  misc_feature (18)..(18): n is a, c, g, or u
aaguaaugauuaacuacnuga

SEQ ID NO: 133327 - RNA, 22 nt, Artificial Sequence
  Synthetic
  misc_feature (1)..(1): n is a, c, g, or u
  misc_feature (19)..(19): n is a, c, g, or u
naaguaaugauuaacuacnuga

SEQ ID NO: 133328 - RNA, 23 nt, Artificial Sequence
  Synthetic
  misc_feature (2)..(2): n is a, c, g, or u
  misc_feature (20)..(20): n is a, c, g, or u
gnaaguaaugauuaacuacnuga

SEQ ID NO: 133329 - RNA, 24 nt, Artificial Sequence
  Synthetic
  misc_feature (3)..(3): n is a, c, g, or u
  misc_feature (21)..(21): n is a, c, g, or u
ugnaaguaaugauuaacuacnuga

SEQ ID NO: 133330 - RNA, 18 nt, Artificial Sequence
  Synthetic
  misc_feature (1)..(1): n is a, c, g, or u
nucccccuagaaaauuga

SEQ ID NO: 133331 - RNA, 19 nt, Artificial Sequence
  Synthetic
  misc_feature (2)..(2): n is a, c, g, or u
gnucccccuagaaaauuga

SEQ ID NO: 133332 - RNA, 20 nt, Artificial Sequence
  Synthetic
  misc_feature (3)..(3): n is a, c, g, or u
ugnucccccuagaaaauuga

SEQ ID NO: 133333 - RNA, 21 nt, Artificial Sequence
  Synthetic
  misc_feature (4)..(4): n is a, c, g, or u
gugnucccccuagaaaauuga

SEQ ID NO: 133334 - RNA, 22 nt, Artificial Sequence
  Synthetic
  misc_feature (5)..(5): n is a, c, g, or u
ggugnucccccuagaaaauuga

SEQ ID NO: 133335 - RNA, 23 nt, Artificial Sequence
  Synthetic
  misc_feature (6)..(6): n is a, c, g, or u
gggugnucccccuagaaaauuga

SEQ ID NO: 133336 - RNA, 24 nt, Artificial Sequence
  Synthetic
  misc_feature (7)..(7): n is a, c, g, or u
cgggugnucccccuagaaaauuga

SEQ ID NO: 133337 - RNA, 18 nt, Artificial Sequence
  Synthetic
aacauagaguugccuuga

SEQ ID NO: 133338 - RNA, 19 nt, Artificial Sequence
  Synthetic
aaacauagaguugccuuga

SEQ ID NO: 133339 - RNA, 20 nt, Artificial Sequence
  Synthetic
gaaacauagaguugccuuga

SEQ ID NO: 133340 - RNA, 21 nt, Artificial Sequence
  Synthetic
ggaaacauagaguugccuuga

SEQ ID NO: 133341 - RNA, 22 nt, Artificial Sequence
  Synthetic
gggaaacauagaguugccuuga

SEQ ID NO: 133342 - RNA, 23 nt, Artificial Sequence
  Synthetic
agggaaacauagaguugccuuga

SEQ ID NO: 133343 - RNA, 24 nt, Artificial Sequence
  Synthetic
gagggaaacauagaguugccuuga

SEQ ID NO: 133344 - RNA, 18 nt, Artificial Sequence
  Synthetic
uaaacacacagucuuuga

SEQ ID NO: 133345 - RNA, 19 nt, Artificial Sequence
  Synthetic
uuaaacacacagucuuuga

SEQ ID NO: 133346 - RNA, 20 nt, Artificial Sequence
  Synthetic
  misc_feature (1)..(1): n is a, c, g, or u
nuuaaacacacagucuuuga

SEQ ID NO: 133347 - RNA, 21 nt, Artificial Sequence
  Synthetic
  misc_feature (2)..(2): n is a, c, g, or u
cnuuaaacacacagucuuuga

SEQ ID NO: 133348 - RNA, 22 nt, Artificial Sequence
  Synthetic
  misc_feature (3)..(3): n is a, c, g, or u
ucnuuaaacacacagucuuuga

SEQ ID NO: 133349 - RNA, 23 nt, Artificial Sequence
  Synthetic
  misc_feature (4)..(4): n is a, c, g, or u
gucnuuaaacacacagucuuuga

SEQ ID NO: 133350 - RNA, 24 nt, Artificial Sequence
  Synthetic
  misc_feature (5)..(5): n is a, c, g, or u
agucnuuaaacacacagucuuuga

SEQ ID NO: 133351 - RNA, 18 nt, Artificial Sequence
  Synthetic
ccaaucuggauuguuuga

SEQ ID NO: 133352 - RNA, 19 nt, Artificial Sequence
  Synthetic
cccaaucuggauuguuuga

SEQ ID NO: 133353 - RNA, 20 nt, Artificial Sequence
  Synthetic
ucccaaucuggauuguuuga

SEQ ID NO: 133354 - RNA, 21 nt, Artificial Sequence
  Synthetic
gucccaaucuggauuguuuga

SEQ ID NO: 133355 - RNA, 22 nt, Artificial Sequence
  Synthetic
agucccaaucuggauuguuuga

SEQ ID NO: 133356 - RNA, 23 nt, Artificial Sequence
  Synthetic
aagucccaaucuggauuguuuga

SEQ ID NO: 133357 - RNA, 24 nt, Artificial Sequence
  Synthetic
gaagucccaaucuggauuguuuga

SEQ ID NO: 133358 - RNA, 18 nt, Artificial Sequence
  Synthetic
  misc_feature (17)..(17): n is a, c, g, or u
agcuuggaggcuugaana

SEQ ID NO: 133359 - RNA, 19 nt, Artificial Sequence
  Synthetic
  misc_feature (18)..(18): n is a, c, g, or u
cagcuuggaggcuugaana

SEQ ID NO: 133360 - RNA, 20 nt, Artificial Sequence
  Synthetic
  misc_feature (19)..(19): n is a, c, g, or u
acagcuuggaggcuugaana

SEQ ID NO: 133361 - RNA, 21 nt, Artificial Sequence
  Synthetic
  misc_feature (20)..(20): n is a, c, g, or u
cacagcuuggaggcuugaana

SEQ ID NO: 133362 - RNA, 22 nt, Artificial Sequence
  Synthetic
  misc_feature (21)..(21): n is a, c, g, or u
gcacagcuuggaggcuugaana

SEQ ID NO: 133363 - RNA, 23 nt, Artificial Sequence
  Synthetic
  misc_feature (22)..(22): n is a, c, g, or u
ggcacagcuuggaggcuugaana

SEQ ID NO: 133364 - RNA, 24 nt, Artificial Sequence
  Synthetic
  misc_feature (23)..(23): n is a, c, g, or u
aggcacagcuuggaggcuugaana

SEQ ID NO: 133365 - RNA, 18 nt, Artificial Sequence
  Synthetic
  misc_feature (17)..(17): n is a, c, g, or u
uuuaaauguauacccana

SEQ ID NO: 133366 - RNA, 19 nt, Artificial Sequence
  Synthetic
  misc_feature (18)..(18): n is a, c, g, or u
guuuaaauguauacccana

SEQ ID NO: 133367 - RNA, 20 nt, Artificial Sequence
  Synthetic
  misc_feature (19)..(19): n is a, c, g, or u
gguuuaaauguauacccana

SEQ ID NO: 133368 - RNA, 21 nt, Artificial Sequence
  Synthetic
  misc_feature (20)..(20): n is a, c, g, or u
ggguuuaaauguauacccana

SEQ ID NO: 133369 - RNA, 22 nt, Artificial Sequence
  Synthetic
  misc_feature (21)..(21): n is a, c, g, or u
aggguuuaaauguauacccana

SEQ ID NO: 133370 - RNA, 23 nt, Artificial Sequence
  Synthetic
  misc_feature (22)..(22): n is a, c, g, or u
uaggguuuaaauguauacccana

SEQ ID NO: 133371 - RNA, 24 nt, Artificial Sequence
  Synthetic
  misc_feature (23)..(23): n is a, c, g, or u
uuaggguuuaaauguauacccana

SEQ ID NO: 133372 - RNA, 18 nt, Artificial Sequence
  Synthetic
  misc_feature (17)..(17): n is a, c, g, or u
caaaaguaaggcaagana

SEQ ID NO: 133373 - RNA, 19 nt, Artificial Sequence
  Synthetic
  misc_feature (18)..(18): n is a, c, g, or u
ccaaaaguaaggcaagana

SEQ ID NO: 133374 - RNA, 20 nt, Artificial Sequence
  Synthetic
  misc_feature (19)..(19): n is a, c, g, or u
uccaaaaguaaggcaagana

SEQ ID NO: 133375 - RNA, 21 nt, Artificial Sequence
  Synthetic
  misc_feature (20)..(20): n is a, c, g, or u
uuccaaaaguaaggcaagana

SEQ ID NO: 133376 - RNA, 22 nt, Artificial Sequence
  Synthetic
  misc_feature (21)..(21): n is a, c, g, or u
cuuccaaaaguaaggcaagana

SEQ ID NO: 133377 - RNA, 23 nt, Artificial Sequence
  Synthetic
  misc_feature (22)..(22): n is a, c, g, or u
ucuuccaaaaguaaggcaagana

SEQ ID NO: 133378 - RNA, 24 nt, Artificial Sequence
  Synthetic
  misc_feature (23)..(23): n is a, c, g, or u
cucuuccaaaaguaaggcaagana

SEQ ID NO: 133379 - RNA, 18 nt, Artificial Sequence
  Synthetic
  misc_feature (5)..(5): n is a, c, g, or u
  misc_feature (17)..(17): n is a, c, g, or u
ugaanagugggacaugna

SEQ ID NO: 133380 - RNA, 19 nt, Artificial Sequence
  Synthetic
  misc_feature (6)..(6): n is a, c, g, or u
  misc_feature (18)..(18): n is a, c, g, or u
uugaanagugggacaugna

SEQ ID NO: 133381 - RNA, 20 nt, Artificial Sequence
  Synthetic
  misc_feature (7)..(7): n is a, c, g, or u
  misc_feature (19)..(19): n is a, c, g, or u
cuugaanagugggacaugna

SEQ ID NO: 133382 - RNA, 21 nt, Artificial Sequence
  Synthetic
  misc_feature (8)..(8): n is a, c, g, or u
  misc_feature (20)..(20): n is a, c, g, or u
gcuugaanagugggacaugna

SEQ ID NO: 133383 - RNA, 22 nt, Artificial Sequence
  Synthetic
  misc_feature (9)..(9): n is a, c, g, or u
  misc_feature (21)..(21): n is a, c, g, or u
ggcuugaanagugggacaugna

SEQ ID NO: 133384 - RNA, 23 nt, Artificial Sequence
  Synthetic
  misc_feature (10)..(10): n is a, c, g, or u
  misc_feature (22)..(22): n is a, c, g, or u
aggcuugaanagugggacaugna

SEQ ID NO: 133385 - RNA, 24 nt, Artificial Sequence
  Synthetic
  misc_feature (11)..(11): n is a, c, g, or u
  misc_feature (23)..(23): n is a, c, g, or u
gaggcuugaanagugggacaugna

SEQ ID NO: 133386 - RNA, 18 nt, Artificial Sequence
  Synthetic
  misc_feature (11)..(11): n is a, c, g, or u
  misc_feature (13)..(14): n is a, c, g, or u
  misc_feature (17)..(17): n is a, c, g, or u
aaucaauaggncnnuuna

SEQ ID NO: 133387 - RNA, 19 nt, Artificial Sequence
  Synthetic
  misc_feature (12)..(12): n is a, c, g, or u
  misc_feature (14)..(15): n is a, c, g, or u
  misc_feature (18)..(18): n is a, c, g, or u
caaucaauaggncnnuuna

SEQ ID NO: 133388 - RNA, 20 nt, Artificial Sequence
  Synthetic
  misc_feature (13)..(13): n is a, c, g, or u
  misc_feature (15)..(16): n is a, c, g, or u
  misc_feature (19)..(19): n is a, c, g, or u
ccaaucaauaggncnnuuna

SEQ ID NO: 133389 - RNA, 21 nt, Artificial Sequence
  Synthetic
  misc_feature (14)..(14): n is a, c, g, or u
  misc_feature (16)..(17): n is a, c, g, or u
  misc_feature (20)..(20): n is a, c, g, or u
uccaaucaauaggncnnuuna

SEQ ID NO: 133390 - RNA, 22 nt, Artificial Sequence
  Synthetic
  misc_feature (15)..(15): n is a, c, g, or u
  misc_feature (17)..(18): n is a, c, g, or u
  misc_feature (21)..(21): n is a, c, g, or u
uuccaaucaauaggncnnuuna

SEQ ID NO: 133391 - RNA, 23 nt, Artificial Sequence
  Synthetic
  misc_feature (16)..(16): n is a, c, g, or u
  misc_feature (18)..(19): n is a, c, g, or u
  misc_feature (22)..(22): n is a, c, g, or u
uuuccaaucaauaggncnnuuna

SEQ ID NO: 133392 - RNA, 24 nt, Artificial Sequence
  Synthetic
  misc_feature (17)..(17): n is a, c, g, or u
  misc_feature (19)..(20): n is a, c, g, or u
  misc_feature (23)..(23): n is a, c, g, or u
cuuuccaaucaauaggncnnuuna

SEQ ID NO: 133393 - RNA, 18 nt, Artificial Sequence
  Synthetic
uccgaaagagaccaaaua

SEQ ID NO: 133394 - RNA, 19 nt, Artificial Sequence
  Synthetic
cuccgaaagagaccaaaua

SEQ ID NO: 133395 - RNA, 20 nt, Artificial Sequence
  Synthetic
acuccgaaagagaccaaaua

SEQ ID NO: 133396 - RNA, 21 nt, Artificial Sequence
  Synthetic
cacuccgaaagagaccaaaua

SEQ ID NO: 133397 - RNA, 22 nt, Artificial Sequence
  Synthetic
acacuccgaaagagaccaaaua

SEQ ID NO: 133398 - RNA, 23 nt, Artificial Sequence
  Synthetic
cacacuccgaaagagaccaaaua

SEQ ID NO: 133399 - RNA, 24 nt, Artificial Sequence
  Synthetic
ccacacuccgaaagagaccaaaua

SEQ ID NO: 133400 - RNA, 18 nt, Artificial Sequence
  Synthetic
aauccagaagaaccaaua

SEQ ID NO: 133401 - RNA, 19 nt, Artificial Sequence
  Synthetic
uaauccagaagaaccaaua

SEQ ID NO: 133402 - RNA, 20 nt, Artificial Sequence
  Synthetic
auaauccagaagaaccaaua

SEQ ID NO: 133403 - RNA, 21 nt, Artificial Sequence
  Synthetic
gauaauccagaagaaccaaua

SEQ ID NO: 133404 - RNA, 22 nt, Artificial Sequence
  Synthetic
ugauaauccagaagaaccaaua

SEQ ID NO: 133405 - RNA, 23 nt, Artificial Sequence
  Synthetic
uugauaauccagaagaaccaaua

SEQ ID NO: 133406 - RNA, 24 nt, Artificial Sequence
  Synthetic
cuugauaauccagaagaaccaaua

SEQ ID NO: 133407 - RNA, 18 nt, Artificial Sequence
  Synthetic
gagaugugagaggcaaua

SEQ ID NO: 133408 - RNA, 19 nt, Artificial Sequence
  Synthetic
cgagaugugagaggcaaua

SEQ ID NO: 133409 - RNA, 20 nt, Artificial Sequence
  Synthetic
acgagaugugagaggcaaua

SEQ ID NO: 133410 - RNA, 21 nt, Artificial Sequence
  Synthetic
gacgagaugugagaggcaaua

SEQ ID NO: 133411 - RNA, 22 nt, Artificial Sequence
  Synthetic
ugacgagaugugagaggcaaua

SEQ ID NO: 133412 - RNA, 23 nt, Artificial Sequence
  Synthetic
uugacgagaugugagaggcaaua

SEQ ID NO: 133413 - RNA, 24 nt, Artificial Sequence
  Synthetic
auugacgagaugugagaggcaaua

SEQ ID NO: 133414 - RNA, 18 nt, Artificial Sequence
  Synthetic
gccuacagccuccuaaua

SEQ ID NO: 133415 - RNA, 19 nt, Artificial Sequence
  Synthetic
ugccuacagccuccuaaua

SEQ ID NO: 133416 - RNA, 20 nt, Artificial Sequence
  Synthetic
  misc_feature (1)..(1): n is a, c, g, or u
nugccuacagccuccuaaua

SEQ ID NO: 133417 - RNA, 21 nt, Artificial Sequence
  Synthetic
  misc_feature (2)..(2): n is a, c, g, or u
unugccuacagccuccuaaua

SEQ ID NO: 133418 - RNA, 22 nt, Artificial Sequence
  Synthetic
  misc_feature (3)..(3): n is a, c, g, or u
uunugccuacagccuccuaaua

SEQ ID NO: 133419 - RNA, 23 nt, Artificial Sequence
  Synthetic
  misc_feature (4)..(4): n is a, c, g, or u
uuunugccuacagccuccuaaua

SEQ ID NO: 133420 - RNA, 24 nt, Artificial Sequence
  Synthetic
  misc_feature (5)..(5): n is a, c, g, or u
auuunugccuacagccuccuaaua

SEQ ID NO: 133421 - RNA, 18 nt, Artificial Sequence
  Synthetic
cauguuaguauuaacaua

SEQ ID NO: 133422 - RNA, 19 nt, Artificial Sequence
  Synthetic
ccauguuaguauuaacaua

SEQ ID NO: 133423 - RNA, 20 nt, Artificial Sequence
  Synthetic
cccauguuaguauuaacaua

SEQ ID NO: 133424 - RNA, 21 nt, Artificial Sequence
  Synthetic
  misc_feature (1)..(1): n is a, c, g, or u
ncccauguuaguauuaacaua

SEQ ID NO: 133425 - RNA, 22 nt, Artificial Sequence
  Synthetic
  misc_feature (1)..(2): n is a, c, g, or u
nncccauguuaguauuaacaua

SEQ ID NO: 133426 - RNA, 23 nt, Artificial Sequence
  Synthetic
  misc_feature (2)..(3): n is a, c, g, or u
anncccauguuaguauuaacaua

SEQ ID NO: 133427 - RNA, 24 nt, Artificial Sequence
  Synthetic
  misc_feature (3)..(4): n is a, c, g, or u
uanncccauguuaguauuaacaua

SEQ ID NO: 133428 - RNA, 18 nt, Artificial Sequence
  Synthetic
  misc_feature (1)..(1): n is a, c, g, or u
ngcuuguauacaugcaua

SEQ ID NO: 133429 - RNA, 19 nt, Artificial Sequence
  Synthetic
  misc_feature (2)..(2): n is a, c, g, or u
ungcuuguauacaugcaua

SEQ ID NO: 133430 - RNA, 20 nt, Artificial Sequence
  Synthetic
  misc_feature (3)..(3): n is a, c, g, or u
uungcuuguauacaugcaua

SEQ ID NO: 133431 - RNA, 21 nt, Artificial Sequence
  Synthetic
  misc_feature (4)..(4): n is a, c, g, or u
uuungcuuguauacaugcaua

SEQ ID NO: 133432 - RNA, 22 nt, Artificial Sequence
  Synthetic
  misc_feature (5)..(5): n is a, c, g, or u
guuungcuuguauacaugcaua

SEQ ID NO: 133433 - RNA, 23 nt, Artificial Sequence
  Synthetic
  misc_feature (6)..(6): n is a, c, g, or u
uguuungcuuguauacaugcaua

SEQ ID NO: 133434 - RNA, 24 nt, Artificial Sequence
  Synthetic
  misc_feature (7)..(7): n is a, c, g, or u
cuguuungcuuguauacaugcaua

SEQ ID NO: 133435 - RNA, 18 nt, Artificial Sequence
  Synthetic
cagacacauccagcgaua

SEQ ID NO: 133436 - RNA, 19 nt, Artificial Sequence
  Synthetic
gcagacacauccagcgaua

SEQ ID NO: 133437 - RNA, 20 nt, Artificial Sequence
  Synthetic
cgcagacacauccagcgaua

SEQ ID NO: 133438 - RNA, 21 nt, Artificial Sequence
  Synthetic
ccgcagacacauccagcgaua

SEQ ID NO: 133439 - RNA, 22 nt, Artificial Sequence
  Synthetic
gccgcagacacauccagcgaua

SEQ ID NO: 133440 - RNA, 23 nt, Artificial Sequence
  Synthetic
cgccgcagacacauccagcgaua

SEQ ID NO: 133441 - RNA, 24 nt, Artificial Sequence
  Synthetic
acgccgcagacacauccagcgaua

SEQ ID NO: 133442 - RNA, 18 nt, Artificial Sequence
  Synthetic
  misc_feature (13)..(13): n is a, c, g, or u
cucuaaggcuucncgaua

SEQ ID NO: 133443 - RNA, 19 nt, Artificial Sequence
  Synthetic
  misc_feature (14)..(14): n is a, c, g, or u
acucuaaggcuucncgaua

SEQ ID NO: 133444 - RNA, 20 nt, Artificial Sequence
  Synthetic
  misc_feature (15)..(15): n is a, c, g, or u
gacucuaaggcuucncgaua

SEQ ID NO: 133445 - RNA, 21 nt, Artificial Sequence
  Synthetic
  misc_feature (16)..(16): n is a, c, g, or u
agacucuaaggcuucncgaua

SEQ ID NO: 133446 - RNA, 22 nt, Artificial Sequence
  Synthetic
  misc_feature (17)..(17): n is a, c, g, or u
gagacucuaaggcuucncgaua

SEQ ID NO: 133447 - RNA, 23 nt, Artificial Sequence
  Synthetic
  misc_feature (18)..(18): n is a, c, g, or u
ggagacucuaaggcuucncgaua

SEQ ID NO: 133448 - RNA, 24 nt, Artificial Sequence
  Synthetic
  misc_feature (19)..(19): n is a, c, g, or u
aggagacucuaaggcuucncgaua

SEQ ID NO: 133449 - RNA, 18 nt, Artificial Sequence
  Synthetic
  misc_feature (7)..(7): n is a, c, g, or u
  misc_feature (13)..(13): n is a, c, g, or u
aacuacnugaucnggaua

SEQ ID NO: 133450 - RNA, 19 nt, Artificial Sequence
  Synthetic
  misc_feature (8)..(8): n is a, c, g, or u
  misc_feature (14)..(14): n is a, c, g, or u
uaacuacnugaucnggaua

SEQ ID NO: 133451 - RNA, 20 nt, Artificial Sequence
  Synthetic
  misc_feature (9)..(9): n is a, c, g, or u
  misc_feature (15)..(15): n is a, c, g, or u
uuaacuacnugaucnggaua

SEQ ID NO: 133452 - RNA, 21 nt, Artificial Sequence
  Synthetic
  misc_feature (10)..(10): n is a, c, g, or u
  misc_feature (16)..(16): n is a, c, g, or u
auuaacuacnugaucnggaua

SEQ ID NO: 133453 - RNA, 22 nt, Artificial Sequence
  Synthetic
  misc_feature (11)..(11): n is a, c, g, or u
  misc_feature (17)..(17): n is a, c, g, or u
gauuaacuacnugaucnggaua

SEQ ID NO: 133454 - RNA, 23 nt, Artificial Sequence
  Synthetic
  misc_feature (12)..(12): n is a, c, g, or u
  misc_feature (18)..(18): n is a, c, g, or u
ugauuaacuacnugaucnggaua

SEQ ID NO: 133455 - RNA, 24 nt, Artificial Sequence
  Synthetic
  misc_feature (13)..(13): n is a, c, g, or u
  misc_feature (19)..(19): n is a, c, g, or u
augauuaacuacnugaucnggaua

SEQ ID NO: 133456 - RNA, 18 nt, Artificial Sequence
  Synthetic
  misc_feature (15)..(15): n is a, c, g, or u
aaaguaaggcaaganaua

SEQ ID NO: 133457 - RNA, 19 nt, Artificial Sequence
  Synthetic
  misc_feature (16)..(16): n is a, c, g, or u
aaaaguaaggcaaganaua

SEQ ID NO: 133458 - RNA, 20 nt, Artificial Sequence
  Synthetic
  misc_feature (17)..(17): n is a, c, g, or u
caaaaguaaggcaaganaua

SEQ ID NO: 133459 - RNA, 21 nt, Artificial Sequence
  Synthetic
  misc_feature (18)..(18): n is a, c, g, or u
ccaaaaguaaggcaaganaua

SEQ ID NO: 133460 - RNA, 22 nt, Artificial Sequence
  Synthetic
  misc_feature (19)..(19): n is a, c, g, or u
uccaaaaguaaggcaaganaua

SEQ ID NO: 133461 - RNA, 23 nt, Artificial Sequence
  Synthetic
  misc_feature (20)..(20): n is a, c, g, or u
uuccaaaaguaaggcaaganaua

SEQ ID NO: 133462 - RNA, 24 nt, Artificial Sequence
  Synthetic
  misc_feature (21)..(21): n is a, c, g, or u
cuuccaaaaguaaggcaaganaua

SEQ ID NO: 133463 - RNA, 18 nt, Artificial Sequence
  Synthetic
uaccacaucauccauaua

SEQ ID NO: 133464 - RNA, 19 nt, Artificial Sequence
  Synthetic
auaccacaucauccauaua

SEQ ID NO: 133465 - RNA, 20 nt, Artificial Sequence
  Synthetic
aauaccacaucauccauaua

SEQ ID NO: 133466 - RNA, 21 nt, Artificial Sequence
  Synthetic
caauaccacaucauccauaua

SEQ ID NO: 133467 - RNA, 22 nt, Artificial Sequence
  Synthetic
ccaauaccacaucauccauaua

SEQ ID NO: 133468 - RNA, 23 nt, Artificial Sequence
  Synthetic
cccaauaccacaucauccauaua

SEQ ID NO: 133469 - RNA, 24 nt, Artificial Sequence
  Synthetic
ccccaauaccacaucauccauaua

SEQ ID NO: 133470 - RNA, 18 nt, Artificial Sequence
  Synthetic
auugguaacagcgguaua

SEQ ID NO: 133471 - RNA, 19 nt, Artificial Sequence
  Synthetic
aauugguaacagcgguaua

SEQ ID NO: 133472 - RNA, 20 nt, Artificial Sequence
  Synthetic
aaauugguaacagcgguaua

SEQ ID NO: 133473 - RNA, 21 nt, Artificial Sequence
  Synthetic
aaaauugguaacagcgguaua

SEQ ID NO: 133474 - RNA, 22 nt, Artificial Sequence
  Synthetic
gaaaauugguaacagcgguaua

SEQ ID NO: 133475 - RNA, 23 nt, Artificial Sequence
  Synthetic
agaaaauugguaacagcgguaua

SEQ ID NO: 133476 - RNA, 24 nt, Artificial Sequence
  Synthetic
aagaaaauugguaacagcgguaua

SEQ ID NO: 133477 - RNA, 18 nt, Artificial Sequence
  Synthetic
acugaacaaauggcacua

SEQ ID NO: 133478 - RNA, 19 nt, Artificial Sequence
  Synthetic
cacugaacaaauggcacua

SEQ ID NO: 133479 - RNA, 20 nt, Artificial Sequence
  Synthetic
ccacugaacaaauggcacua

SEQ ID NO: 133480 - RNA, 21 nt, Artificial Sequence
  Synthetic
accacugaacaaauggcacua

SEQ ID NO: 133481 - RNA, 22 nt, Artificial Sequence
  Synthetic
aaccacugaacaaauggcacua

SEQ ID NO: 133482 - RNA, 23 nt, Artificial Sequence
  Synthetic
gaaccacugaacaaauggcacua

SEQ ID NO: 133483 - RNA, 24 nt, Artificial Sequence
  Synthetic
cgaaccacugaacaaauggcacua

SEQ ID NO: 133484 - RNA, 18 nt, Artificial Sequence
  Synthetic
  misc_feature (1)..(2): n is a, c, g, or u
  misc_feature (4)..(4): n is a, c, g, or u
  misc_feature (12)..(12): n is a, c, g, or u
nngnuaggauanaaucua

SEQ ID NO: 133485 - RNA, 19 nt, Artificial Sequence
  Synthetic
  misc_feature (2)..(3): n is a, c, g, or u
  misc_feature (5)..(5): n is a, c, g, or u
  misc_feature (13)..(13): n is a, c, g, or u
gnngnuaggauanaaucua

SEQ ID NO: 133486 - RNA, 20 nt, Artificial Sequence
  Synthetic
  misc_feature (3)..(4): n is a, c, g, or u
  misc_feature (6)..(6): n is a, c, g, or u
  misc_feature (14)..(14): n is a, c, g, or u
ugnngnuaggauanaaucua

SEQ ID NO: 133487 - RNA, 21 nt, Artificial Sequence
  Synthetic
  misc_feature (4)..(5): n is a, c, g, or u
  misc_feature (7)..(7): n is a, c, g, or u
  misc_feature (15)..(15): n is a, c, g, or u
gugnngnuaggauanaaucua

SEQ ID NO: 133488 - RNA, 22 nt, Artificial Sequence
  Synthetic
  misc_feature (5)..(6): n is a, c, g, or u
  misc_feature (8)..(8): n is a, c, g, or u
  misc_feature (16)..(16): n is a, c, g, or u
agugnngnuaggauanaaucua

SEQ ID NO: 133489 - RNA, 23 nt, Artificial Sequence
  Synthetic
  misc_feature (6)..(7): n is a, c, g, or u
  misc_feature (9)..(9): n is a, c, g, or u
  misc_feature (17)..(17): n is a, c, g, or u
uagugnngnuaggauanaaucua

SEQ ID NO: 133490 - RNA, 24 nt, Artificial Sequence
  Synthetic
  misc_feature (7)..(8): n is a, c, g, or u
  misc_feature (10)..(10): n is a, c, g, or u
  misc_feature (18)..(18): n is a, c, g, or u
uuagugnngnuaggauanaaucua

SEQ ID NO: 133491 - RNA, 18 nt, Artificial Sequence
  Synthetic
gagggaguucuucuucua

SEQ ID NO: 133492 - RNA, 19 nt, Artificial Sequence
  Synthetic
cgagggaguucuucuucua

SEQ ID NO: 133493 - RNA, 20 nt, Artificial Sequence
  Synthetic
gcgagggaguucuucuucua

SEQ ID NO: 133494 - RNA, 18 nt, Artificial Sequence
  Synthetic
ccagccuuccaaagagua

SEQ ID NO: 133495 - RNA, 19 nt, Artificial Sequence
  Synthetic
  misc_feature (1)..(1): n is a, c, g, or u
nccagccuuccaaagagua

SEQ ID NO: 133496 - RNA, 20 nt, Artificial Sequence
  Synthetic
  misc_feature (2)..(2): n is a, c, g, or u
unccagccuuccaaagagua

SEQ ID NO: 133497 - RNA, 21 nt, Artificial Sequence
  Synthetic
  misc_feature (3)..(3): n is a, c, g, or u
aunccagccuuccaaagagua

SEQ ID NO: 133498 - RNA, 22 nt, Artificial Sequence
  Synthetic
  misc_feature (4)..(4): n is a, c, g, or u
aaunccagccuuccaaagagua

SEQ ID NO: 133499 - RNA, 23 nt, Artificial Sequence
  Synthetic
  misc_feature (5)..(5): n is a, c, g, or u
gaaunccagccuuccaaagagua

SEQ ID NO: 133500 - RNA, 24 nt, Artificial Sequence
  Synthetic
  misc_feature (6)..(6): n is a, c, g, or u
agaaunccagccuuccaaagagua

SEQ ID NO: 133501 - RNA, 18 nt, Artificial Sequence
  Synthetic
cagcgccgacgggacgua

SEQ ID NO: 133502 - RNA, 19 nt, Artificial Sequence
  Synthetic
ucagcgccgacgggacgua

SEQ ID NO: 133503 - RNA, 20 nt, Artificial Sequence
  Synthetic
uucagcgccgacgggacgua

SEQ ID NO: 133504 - RNA, 18 nt, Artificial Sequence
  Synthetic
agacggggagaccgcgua

SEQ ID NO: 133505 - RNA, 19 nt, Artificial Sequence
  Synthetic
cagacggggagaccgcgua

SEQ ID NO: 133506 - RNA, 20 nt, Artificial Sequence
  Synthetic
acagacggggagaccgcgua

SEQ ID NO: 133507 - RNA, 18 nt, Artificial Sequence
  Synthetic
uuauuacccacccaggua

SEQ ID NO: 133508 - RNA, 19 nt, Artificial Sequence
  Synthetic
auuauuacccacccaggua

SEQ ID NO: 133509 - RNA, 20 nt, Artificial Sequence
  Synthetic
aauuauuacccacccaggua

SEQ ID NO: 133510 - RNA, 21 nt, Artificial Sequence
  Synthetic
aaauuauuacccacccaggua

SEQ ID NO: 133511 - RNA, 22 nt, Artificial Sequence
  Synthetic
caaauuauuacccacccaggua

SEQ ID NO: 133512 - RNA, 23 nt, Artificial Sequence
  Synthetic
  misc_feature (1)..(1): n is a, c, g, or u
ncaaauuauuacccacccaggua

SEQ ID NO: 133513 - RNA, 24 nt, Artificial Sequence
  Synthetic
  misc_feature (2)..(2): n is a, c, g, or u
uncaaauuauuacccacccaggua

SEQ ID NO: 133514 - RNA, 18 nt, Artificial Sequence
  Synthetic
aaauugguaacagcggua

SEQ ID NO: 133515 - RNA, 19 nt, Artificial Sequence
  Synthetic
aaaauugguaacagcggua

SEQ ID NO: 133516 - RNA, 20 nt, Artificial Sequence
  Synthetic
gaaaauugguaacagcggua

SEQ ID NO: 133517 - RNA, 21 nt, Artificial Sequence
  Synthetic
agaaaauugguaacagcggua

SEQ ID NO: 133518 - RNA, 22 nt, Artificial Sequence
  Synthetic
aagaaaauugguaacagcggua

SEQ ID NO: 133519 - RNA, 23 nt, Artificial Sequence
  Synthetic
aaagaaaauugguaacagcggua

SEQ ID NO: 133520 - RNA, 24 nt, Artificial Sequence
  Synthetic
aaaagaaaauugguaacagcggua

SEQ ID NO: 133521 - RNA, 18 nt, Artificial Sequence
  Synthetic
  misc_feature (12)..(12): n is a, c, g, or u
  misc_feature (15)..(15): n is a, c, g, or u
uuaaagauaggnacngua

SEQ ID NO: 133522 - RNA, 19 nt, Artificial Sequence
  Synthetic
  misc_feature (13)..(13): n is a, c, g, or u
  misc_feature (16)..(16): n is a, c, g, or u
auuaaagauaggnacngua

SEQ ID NO: 133523 - RNA, 20 nt, Artificial Sequence
  Synthetic
  misc_feature (14)..(14): n is a, c, g, or u
  misc_feature (17)..(17): n is a, c, g, or u
gauuaaagauaggnacngua

SEQ ID NO: 133524 - RNA, 21 nt, Artificial Sequence
  Synthetic
  misc_feature (15)..(15): n is a, c, g, or u
  misc_feature (18)..(18): n is a, c, g, or u
ggauuaaagauaggnacngua

SEQ ID NO: 133525 - RNA, 22 nt, Artificial Sequence
  Synthetic
  misc_feature (16)..(16): n is a, c, g, or u
  misc_feature (19)..(19): n is a, c, g, or u
aggauuaaagauaggnacngua

SEQ ID NO: 133526 - RNA, 23 nt, Artificial Sequence
  Synthetic
  misc_feature (17)..(17): n is a, c, g, or u
  misc_feature (20)..(20): n is a, c, g, or u
caggauuaaagauaggnacngua

SEQ ID NO: 133527 - RNA, 24 nt, Artificial Sequence
  Synthetic
  misc_feature (18)..(18): n is a, c, g, or u
  misc_feature (21)..(21): n is a, c, g, or u
ucaggauuaaagauaggnacngua

SEQ ID NO: 133528 - RNA, 18 nt, Artificial Sequence
  Synthetic
  misc_feature (3)..(3): n is a, c, g, or u
  misc_feature (6)..(6): n is a, c, g, or u
ggnuanccacauugugua

SEQ ID NO: 133529 - RNA, 19 nt, Artificial Sequence
  Synthetic
  misc_feature (4)..(4): n is a, c, g, or u
  misc_feature (7)..(7): n is a, c, g, or u
aggnuanccacauugugua

SEQ ID NO: 133530 - RNA, 20 nt, Artificial Sequence
  Synthetic
  misc_feature (5)..(5): n is a, c, g, or u
  misc_feature (8)..(8): n is a, c, g, or u
caggnuanccacauugugua

SEQ ID NO: 133531 - RNA, 21 nt, Artificial Sequence
  Synthetic
  misc_feature (6)..(6): n is a, c, g, or u
  misc_feature (9)..(9): n is a, c, g, or u
gcaggnuanccacauugugua

SEQ ID NO: 133532 - RNA, 22 nt, Artificial Sequence
  Synthetic
  misc_feature (1)..(1): n is a, c, g, or u
  misc_feature (7)..(7): n is a, c, g, or u
  misc_feature (10)..(10): n is a, c, g, or u
ngcaggnuanccacauugugua

SEQ ID NO: 133533 - RNA, 23 nt, Artificial Sequence
  Synthetic
  misc_feature (2)..(2): n is a, c, g, or u
  misc_feature (8)..(8): n is a, c, g, or u
  misc_feature (11)..(11): n is a, c, g, or u
angcaggnuanccacauugugua

SEQ ID NO: 133534 - RNA, 24 nt, Artificial Sequence
  Synthetic
  misc_feature (3)..(3): n is a, c, g, or u
  misc_feature (9)..(9): n is a, c, g, or u
  misc_feature (12)..(12): n is a, c, g, or u
aangcaggnuanccacauugugua

SEQ ID NO: 133535 - RNA, 18 nt, Artificial Sequence
  Synthetic
  misc_feature (11)..(11): n is a, c, g, or u
  misc_feature (14)..(14): n is a, c, g, or u
uaauaaugucnucnugua

SEQ ID NO: 133536 - RNA, 19 nt, Artificial Sequence
  Synthetic
  misc_feature (12)..(12): n is a, c, g, or u
  misc_feature (15)..(15): n is a, c, g, or u
uuaauaaugucnucnugua

SEQ ID NO: 133537 - RNA, 20 nt, Artificial Sequence
  Synthetic
  misc_feature (13)..(13): n is a, c, g, or u
  misc_feature (16)..(16): n is a, c, g, or u
auuaauaaugucnucnugua

SEQ ID NO: 133538 - RNA, 21 nt, Artificial Sequence
  Synthetic
  misc_feature (14)..(14): n is a, c, g, or u
  misc_feature (17)..(17): n is a, c, g, or u
uauuaauaaugucnucnugua

SEQ ID NO: 133539 - RNA, 22 nt, Artificial Sequence
  Synthetic
  misc_feature (15)..(15): n is a, c, g, or u
  misc_feature (18)..(18): n is a, c, g, or u
cuauuaauaaugucnucnugua

SEQ ID NO: 133540 - RNA, 23 nt, Artificial Sequence
  Synthetic
  misc_feature (16)..(16): n is a, c, g, or u
  misc_feature (19)..(19): n is a, c, g, or u
ccuauuaauaaugucnucnugua

SEQ ID NO: 133541 - RNA, 24 nt, Artificial Sequence
  Synthetic
  misc_feature (17)..(17): n is a, c, g, or u
  misc_feature (20)..(20): n is a, c, g, or u
accuauuaauaaugucnucnugua

SEQ ID NO: 133542 - RNA, 18 nt, Artificial Sequence
  Synthetic
  misc_feature (5)..(5): n is a, c, g, or u
uugungauccuggaauua

SEQ ID NO: 133543 - RNA, 19 nt, Artificial Sequence
  Synthetic
  misc_feature (6)..(6): n is a, c, g, or u
guugungauccuggaauua

SEQ ID NO: 133544 - RNA, 20 nt, Artificial Sequence
  Synthetic
  misc_feature (7)..(7): n is a, c, g, or u
uguugungauccuggaauua

SEQ ID NO: 133545 - RNA, 21 nt, Artificial Sequence
  Synthetic
  misc_feature (8)..(8): n is a, c, g, or u
uuguugungauccuggaauua

SEQ ID NO: 133546 - RNA, 22 nt, Artificial Sequence
  Synthetic
  misc_feature (9)..(9): n is a, c, g, or u
guuguugungauccuggaauua

SEQ ID NO: 133547 - RNA, 23 nt, Artificial Sequence
  Synthetic
  misc_feature (10)..(10): n is a, c, g, or u
gguuguugungauccuggaauua

SEQ ID NO: 133548 - RNA, 24 nt, Artificial Sequence
  Synthetic
  misc_feature (11)..(11): n is a, c, g, or u
ugguuguugungauccuggaauua

SEQ ID NO: 133549 - RNA, 18 nt, Artificial Sequence
  Synthetic
  misc_feature (4)..(4): n is a, c, g, or u
augnacaagagaugauua

SEQ ID NO: 133550 - RNA, 19 nt, Artificial Sequence
  Synthetic
  misc_feature (5)..(5): n is a, c, g, or u
caugnacaagagaugauua

SEQ ID NO: 133551 - RNA, 20 nt, Artificial Sequence
  Synthetic
  misc_feature (6)..(6): n is a, c, g, or u
acaugnacaagagaugauua

SEQ ID NO: 133552 - RNA, 21 nt, Artificial Sequence
  Synthetic
  misc_feature (7)..(7): n is a, c, g, or u
gacaugnacaagagaugauua

SEQ ID NO: 133553 - RNA, 22 nt, Artificial Sequence
  Synthetic
  misc_feature (8)..(8): n is a, c, g, or u
ggacaugnacaagagaugauua

SEQ ID NO: 133554 - RNA, 23 nt, Artificial Sequence
  Synthetic
  misc_feature (9)..(9): n is a, c, g, or u
gggacaugnacaagagaugauua

SEQ ID NO: 133555 - RNA, 24 nt, Artificial Sequence
  Synthetic
  misc_feature (10)..(10): n is a, c, g, or u
ugggacaugnacaagagaugauua

SEQ ID NO: 133556 - RNA, 18 nt, Artificial Sequence
  Synthetic
  misc_feature (5)..(5): n is a, c, g, or u
ucaunuacuguuuacuua

SEQ ID NO: 133557 - RNA, 19 nt, Artificial Sequence
  Synthetic
  misc_feature (6)..(6): n is a, c, g, or u
uucaunuacuguuuacuua

SEQ ID NO: 133558 - RNA, 20 nt, Artificial Sequence
  Synthetic
  misc_feature (7)..(7): n is a, c, g, or u
guucaunuacuguuuacuua

SEQ ID NO: 133559 - RNA, 21 nt, Artificial Sequence
  Synthetic
  misc_feature (8)..(8): n is a, c, g, or u
gguucaunuacuguuuacuua

SEQ ID NO: 133560 - RNA, 22 nt, Artificial Sequence
  Synthetic
  misc_feature (9)..(9): n is a, c, g, or u
agguucaunuacuguuuacuua

SEQ ID NO: 133561 - RNA, 23 nt, Artificial Sequence
  Synthetic
  misc_feature (10)..(10): n is a, c, g, or u
aagguucaunuacuguuuacuua

SEQ ID NO: 133562 - RNA, 24 nt, Artificial Sequence
  Synthetic
  misc_feature (11)..(11): n is a, c, g, or u
aaagguucaunuacuguuuacuua

SEQ ID NO: 133563 - RNA, 18 nt, Artificial Sequence
  Synthetic
  misc_feature (6)..(6): n is a, c, g, or u
cgugunguuucccucuua

SEQ ID NO: 133564 - RNA, 19 nt, Artificial Sequence
  Synthetic
  misc_feature (7)..(7): n is a, c, g, or u
acgugunguuucccucuua

SEQ ID NO: 133565 - RNA, 20 nt, Artificial Sequence
  Synthetic
  misc_feature (8)..(8): n is a, c, g, or u
uacgugunguuucccucuua

SEQ ID NO: 133566 - RNA, 21 nt, Artificial Sequence
  Synthetic
  misc_feature (9)..(9): n is a, c, g, or u
cuacgugunguuucccucuua

SEQ ID NO: 133567 - RNA, 22 nt, Artificial Sequence
  Synthetic
  misc_feature (10)..(10): n is a, c, g, or u
gcuacgugunguuucccucuua

SEQ ID NO: 133568 - RNA, 23 nt, Artificial Sequence
  Synthetic
  misc_feature (11)..(11): n is a, c, g, or u
cgcuacgugunguuucccucuua

SEQ ID NO: 133569 - RNA, 24 nt, Artificial Sequence
  Synthetic
  misc_feature (12)..(12): n is a, c, g, or u
gcgcuacgugunguuucccucuua

SEQ ID NO: 133570 - RNA, 18 nt, Artificial Sequence
  Synthetic
aguccaagaguccucuua

SEQ ID NO: 133571 - RNA, 19 nt, Artificial Sequence
  Synthetic
gaguccaagaguccucuua

SEQ ID NO: 133572 - RNA, 20 nt, Artificial Sequence
  Synthetic
ggaguccaagaguccucuua

SEQ ID NO: 133573 - RNA, 21 nt, Artificial Sequence
  Synthetic
gggaguccaagaguccucuua

SEQ ID NO: 133574 - RNA, 22 nt, Artificial Sequence
  Synthetic
ugggaguccaagaguccucuua

SEQ ID NO: 133575 - RNA, 23 nt, Artificial Sequence
  Synthetic
cugggaguccaagaguccucuua

SEQ ID NO: 133576 - RNA, 24 nt, Artificial Sequence
  Synthetic
gcugggaguccaagaguccucuua

SEQ ID NO: 133577 - RNA, 18 nt, Artificial Sequence
  Synthetic
  misc_feature (3)..(3): n is a, c, g, or u
  misc_feature (15)..(15): n is a, c, g, or u
ucnuguaaaugaaunuua

SEQ ID NO: 133578 - RNA, 19 nt, Artificial Sequence
  Synthetic
  misc_feature (1)..(1): n is a, c, g, or u
  misc_feature (4)..(4): n is a, c, g, or u
  misc_feature (16)..(16): n is a, c, g, or u
nucnuguaaaugaaunuua

SEQ ID NO: 133579 - RNA, 20 nt, Artificial Sequence
  Synthetic
  misc_feature (2)..(2): n is a, c, g, or u
  misc_feature (5)..(5): n is a, c, g, or u
  misc_feature (17)..(17): n is a, c, g, or u
cnucnuguaaaugaaunuua

SEQ ID NO: 133580 - RNA, 21 nt, Artificial Sequence
  Synthetic
  misc_feature (3)..(3): n is a, c, g, or u
  misc_feature (6)..(6): n is a, c, g, or u
  misc_feature (18)..(18): n is a, c, g, or u
ucnucnuguaaaugaaunuua

SEQ ID NO: 133581 - RNA, 22 nt, Artificial Sequence
  Synthetic
  misc_feature (4)..(4): n is a, c, g, or u
  misc_feature (7)..(7): n is a, c, g, or u
  misc_feature (19)..(19): n is a, c, g, or u
gucnucnuguaaaugaaunuua

SEQ ID NO: 133582 - RNA, 23 nt, Artificial Sequence
  Synthetic
  misc_feature (5)..(5): n is a, c, g, or u
  misc_feature (8)..(8): n is a, c, g, or u
  misc_feature (20)..(20): n is a, c, g, or u
ugucnucnuguaaaugaaunuua

SEQ ID NO: 133583 - RNA, 24 nt, Artificial Sequence
  Synthetic
  misc_feature (6)..(6): n is a, c, g, or u
  misc_feature (9)..(9): n is a, c, g, or u
  misc_feature (21)..(21): n is a, c, g, or u
augucnucnuguaaaugaaunuua

SEQ ID NO: 133584 - RNA, 18 nt, Artificial Sequence
  Synthetic
guagcuccaaauucuuua

SEQ ID NO: 133585 - RNA, 19 nt, Artificial Sequence
  Synthetic
aguagcuccaaauucuuua

SEQ ID NO: 133586 - RNA, 20 nt, Artificial Sequence
  Synthetic
caguagcuccaaauucuuua

SEQ ID NO: 133587 - RNA, 21 nt, Artificial Sequence
  Synthetic
acaguagcuccaaauucuuua

SEQ ID NO: 133588 - RNA, 22 nt, Artificial Sequence
  Synthetic
cacaguagcuccaaauucuuua

SEQ ID NO: 133589 - RNA, 23 nt, Artificial Sequence
  Synthetic
ccacaguagcuccaaauucuuua

SEQ ID NO: 133590 - RNA, 24 nt, Artificial Sequence
  Synthetic
uccacaguagcuccaaauucuuua

SEQ ID NO: 133591 - RNA, 18 nt, Artificial Sequence
  Synthetic
  misc_feature (9)..(9): n is a, c, g, or u
agguucaunuacuguuua

SEQ ID NO: 133592 - RNA, 19 nt, Artificial Sequence
  Synthetic
  misc_feature (10)..(10): n is a, c, g, or u
aagguucaunuacuguuua

SEQ ID NO: 133593 - RNA, 20 nt, Artificial Sequence
  Synthetic
  misc_feature (11)..(11): n is a, c, g, or u
aaagguucaunuacuguuua

SEQ ID NO: 133594 - RNA, 21 nt, Artificial Sequence
  Synthetic
  misc_feature (12)..(12): n is a, c, g, or u
uaaagguucaunuacuguuua

SEQ ID NO: 133595 - RNA, 22 nt, Artificial Sequence
  Synthetic
  misc_feature (13)..(13): n is a, c, g, or u
guaaagguucaunuacuguuua

SEQ ID NO: 133596 - RNA, 23 nt, Artificial Sequence
  Synthetic
  misc_feature (14)..(14): n is a, c, g, or u
gguaaagguucaunuacuguuua

SEQ ID NO: 133597 - RNA, 24 nt, Artificial Sequence
  Synthetic
  misc_feature (15)..(15): n is a, c, g, or u
ggguaaagguucaunuacuguuua

SEQ ID NO: 133598 - RNA, 18 nt, Artificial Sequence
  Synthetic
  misc_feature (5)..(5): n is a, c, g, or u
uauancugaaagccaaac

SEQ ID NO: 133599 - RNA, 19 nt, Artificial Sequence
  Synthetic
  misc_feature (6)..(6): n is a, c, g, or u
auauancugaaagccaaac

SEQ ID NO: 133600 - RNA, 20 nt, Artificial Sequence
  Synthetic
  misc_feature (7)..(7): n is a, c, g, or u
cauauancugaaagccaaac

SEQ ID NO: 133601 - RNA, 21 nt, Artificial Sequence
  Synthetic
  misc_feature (8)..(8): n is a, c, g, or u
ccauauancugaaagccaaac

SEQ ID NO: 133602 - RNA, 22 nt, Artificial Sequence
  Synthetic
  misc_feature (9)..(9): n is a, c, g, or u
uccauauancugaaagccaaac

SEQ ID NO: 133603 - RNA, 23 nt, Artificial Sequence
  Synthetic
  misc_feature (10)..(10): n is a, c, g, or u
auccauauancugaaagccaaac

SEQ ID NO: 133604 - RNA, 24 nt, Artificial Sequence
  Synthetic
  misc_feature (11)..(11): n is a, c, g, or u
cauccauauancugaaagccaaac

SEQ ID NO: 133605 - RNA, 18 nt, Artificial Sequence
  Synthetic
cagcaacaugagggaaac

SEQ ID NO: 133606 - RNA, 19 nt, Artificial Sequence
  Synthetic
acagcaacaugagggaaac

SEQ ID NO: 133607 - RNA, 20 nt, Artificial Sequence
  Synthetic
uacagcaacaugagggaaac

SEQ ID NO: 133608 - RNA, 21 nt, Artificial Sequence
  Synthetic
guacagcaacaugagggaaac

SEQ ID NO: 133609 - RNA, 22 nt, Artificial Sequence
  Synthetic
uguacagcaacaugagggaaac

SEQ ID NO: 133610 - RNA, 23 nt, Artificial Sequence
  Synthetic
uuguacagcaacaugagggaaac

SEQ ID NO: 133611 - RNA, 24 nt, Artificial Sequence
  Synthetic
uuuguacagcaacaugagggaaac

SEQ ID NO: 133612 - RNA, 18 nt, Artificial Sequence
  Synthetic
cgccgacgggacguaaac

SEQ ID NO: 133613 - RNA, 19 nt, Artificial Sequence
  Synthetic
gcgccgacgggacguaaac

SEQ ID NO: 133614 - RNA, 20 nt, Artificial Sequence
  Synthetic
agcgccgacgggacguaaac

SEQ ID NO: 133615 - RNA, 18 nt, Artificial Sequence
  Synthetic
uagguuuuguacagcaac

SEQ ID NO: 133616 - RNA, 19 nt, Artificial Sequence
  Synthetic
guagguuuuguacagcaac

SEQ ID NO: 133617 - RNA, 20 nt, Artificial Sequence
  Synthetic
cguagguuuuguacagcaac

SEQ ID NO: 133618 - RNA, 21 nt, Artificial Sequence
  Synthetic
ccguagguuuuguacagcaac

SEQ ID NO: 133619 - RNA, 22 nt, Artificial Sequence
  Synthetic
uccguagguuuuguacagcaac

SEQ ID NO: 133620 - RNA, 23 nt, Artificial Sequence
  Synthetic
auccguagguuuuguacagcaac

SEQ ID NO: 133621 - RNA, 24 nt, Artificial Sequence
  Synthetic
cauccguagguuuuguacagcaac

SEQ ID NO: 133622 - RNA, 18 nt, Artificial Sequence
  Synthetic
gugaggauucuugucaac

SEQ ID NO: 133623 - RNA, 19 nt, Artificial Sequence
  Synthetic
ugugaggauucuugucaac

SEQ ID NO: 133624 - RNA, 20 nt, Artificial Sequence
  Synthetic
uugugaggauucuugucaac

SEQ ID NO: 133625 - RNA, 21 nt, Artificial Sequence
  Synthetic
auugugaggauucuugucaac

SEQ ID NO: 133626 - RNA, 22 nt, Artificial Sequence
  Synthetic
uauugugaggauucuugucaac

SEQ ID NO: 133627 - RNA, 23 nt, Artificial Sequence
  Synthetic
guauugugaggauucuugucaac

SEQ ID NO: 133628 - RNA, 24 nt, Artificial Sequence
  Synthetic
gguauugugaggauucuugucaac

SEQ ID NO: 133629 - RNA, 18 nt, Artificial Sequence
  Synthetic
  misc_feature (10)..(10): n is a, c, g, or u
ucccagaggnuugggaac

SEQ ID NO: 133630 - RNA, 19 nt, Artificial Sequence
  Synthetic
  misc_feature (11)..(11): n is a, c, g, or u
aucccagaggnuugggaac

SEQ ID NO: 133631 - RNA, 20 nt, Artificial Sequence
  Synthetic
  misc_feature (12)..(12): n is a, c, g, or u
aaucccagaggnuugggaac

SEQ ID NO: 133632 - RNA, 21 nt, Artificial Sequence
  Synthetic
  misc_feature (13)..(13): n is a, c, g, or u
gaaucccagaggnuugggaac

SEQ ID NO: 133633 - RNA, 22 nt, Artificial Sequence
  Synthetic
  misc_feature (14)..(14): n is a, c, g, or u
agaaucccagaggnuugggaac

SEQ ID NO: 133634 - RNA, 23 nt, Artificial Sequence
  Synthetic
  misc_feature (15)..(15): n is a, c, g, or u
aagaaucccagaggnuugggaac

SEQ ID NO: 133635 - RNA, 24 nt, Artificial Sequence
  Synthetic
  misc_feature (16)..(16): n is a, c, g, or u
aaagaaucccagaggnuugggaac

SEQ ID NO: 133636 - RNA, 18 nt, Artificial Sequence
  Synthetic
  misc_feature (5)..(5): n is a, c, g, or u
  misc_feature (7)..(7): n is a, c, g, or u
gguunanuguuccugaac

SEQ ID NO: 133637 - RNA, 19 nt, Artificial Sequence
  Synthetic
  misc_feature (6)..(6): n is a, c, g, or u
  misc_feature (8)..(8): n is a, c, g, or u
ggguunanuguuccugaac

SEQ ID NO: 133638 - RNA, 20 nt, Artificial Sequence
  Synthetic
  misc_feature (7)..(7): n is a, c, g, or u
  misc_feature (9)..(9): n is a, c, g, or u
aggguunanuguuccugaac

SEQ ID NO: 133639 - RNA, 21 nt, Artificial Sequence
  Synthetic
  misc_feature (8)..(8): n is a, c, g, or u
  misc_feature (10)..(10): n is a, c, g, or u
caggguunanuguuccugaac

SEQ ID NO: 133640 - RNA, 22 nt, Artificial Sequence
  Synthetic
  misc_feature (1)..(1): n is a, c, g, or u
  misc_feature (9)..(9): n is a, c, g, or u
  misc_feature (11)..(11): n is a, c, g, or u
ncaggguunanuguuccugaac

SEQ ID NO: 133641 - RNA, 23 nt, Artificial Sequence
  Synthetic
  misc_feature (2)..(2): n is a, c, g, or u
  misc_feature (10)..(10): n is a, c, g, or u
  misc_feature (12)..(12): n is a, c, g, or u
ancaggguunanuguuccugaac

SEQ ID NO: 133642 - RNA, 24 nt, Artificial Sequence
  Synthetic
  misc_feature (3)..(3): n is a, c, g, or u
  misc_feature (11)..(11): n is a, c, g, or u
  misc_feature (13)..(13): n is a, c, g, or u
gancaggguunanuguuccugaac

SEQ ID NO: 133643 - RNA, 18 nt, Artificial Sequence
  Synthetic
gacacauccagcgauaac

SEQ ID NO: 133644 - RNA, 19 nt, Artificial Sequence
  Synthetic
agacacauccagcgauaac

SEQ ID NO: 133645 - RNA, 20 nt, Artificial Sequence
  Synthetic
cagacacauccagcgauaac

SEQ ID NO: 133646 - RNA, 21 nt, Artificial Sequence
  Synthetic
gcagacacauccagcgauaac

SEQ ID NO: 133647 - RNA, 22 nt, Artificial Sequence
  Synthetic
cgcagacacauccagcgauaac

SEQ ID NO: 133648 - RNA, 23 nt, Artificial Sequence
  Synthetic
ccgcagacacauccagcgauaac

SEQ ID NO: 133649 - RNA, 24 nt, Artificial Sequence
  Synthetic
gccgcagacacauccagcgauaac

SEQ ID NO: 133650 - RNA, 18 nt, Artificial Sequence
  Synthetic
aguccaaggaauacuaac

SEQ ID NO: 133651 - RNA, 19 nt, Artificial Sequence
  Synthetic
gaguccaaggaauacuaac

SEQ ID NO: 133652 - RNA, 20 nt, Artificial Sequence
  Synthetic
ugaguccaaggaauacuaac

SEQ ID NO: 133653 - RNA, 21 nt, Artificial Sequence
  Synthetic
augaguccaaggaauacuaac

SEQ ID NO: 133654 - RNA, 22 nt, Artificial Sequence
  Synthetic
uaugaguccaaggaauacuaac

SEQ ID NO: 133655 - RNA, 23 nt, Artificial Sequence
  Synthetic
uuaugaguccaaggaauacuaac

SEQ ID NO: 133656 - RNA, 24 nt, Artificial Sequence
  Synthetic
cuuaugaguccaaggaauacuaac

SEQ ID NO: 133657 - RNA, 18 nt, Artificial Sequence
  Synthetic
aaaaaccccgccuguaac

SEQ ID NO: 133658 - RNA, 19 nt, Artificial Sequence
  Synthetic
gaaaaaccccgccuguaac

SEQ ID NO: 133659 - RNA, 20 nt, Artificial Sequence
  Synthetic
agaaaaaccccgccuguaac

SEQ ID NO: 133660 - RNA, 21 nt, Artificial Sequence
  Synthetic
aagaaaaaccccgccuguaac

SEQ ID NO: 133661 - RNA, 22 nt, Artificial Sequence
  Synthetic
caagaaaaaccccgccuguaac

SEQ ID NO: 133662 - RNA, 23 nt, Artificial Sequence
  Synthetic
acaagaaaaaccccgccuguaac

SEQ ID NO: 133663 - RNA, 24 nt, Artificial Sequence
  Synthetic
aacaagaaaaaccccgccuguaac

SEQ ID NO: 133664 - RNA, 18 nt, Artificial Sequence
  Synthetic
aggagugcgaauccacac

SEQ ID NO: 133665 - RNA, 19 nt, Artificial Sequence
  Synthetic
gaggagugcgaauccacac

SEQ ID NO: 133666 - RNA, 20 nt, Artificial Sequence
  Synthetic
ggaggagugcgaauccacac

SEQ ID NO: 133667 - RNA, 21 nt, Artificial Sequence
  Synthetic
uggaggagugcgaauccacac

SEQ ID NO: 133668 - RNA, 22 nt, Artificial Sequence
  Synthetic
cuggaggagugcgaauccacac

SEQ ID NO: 133669 - RNA, 23 nt, Artificial Sequence
  Synthetic
gcuggaggagugcgaauccacac

SEQ ID NO: 133670 - RNA, 24 nt, Artificial Sequence
  Synthetic
ggcuggaggagugcgaauccacac

SEQ ID NO: 133671 - RNA, 18 nt, Artificial Sequence
  Synthetic
  misc_feature (4)..(4): n is a, c, g, or u
aaangagaguaacuccac

SEQ ID NO: 133672 - RNA, 19 nt, Artificial Sequence
  Synthetic
  misc_feature (5)..(5): n is a, c, g, or u
aaaangagaguaacuccac

SEQ ID NO: 133673 - RNA, 20 nt, Artificial Sequence
  Synthetic
  misc_feature (6)..(6): n is a, c, g, or u
aaaaangagaguaacuccac

SEQ ID NO: 133674 - RNA, 21 nt, Artificial Sequence
  Synthetic
  misc_feature (7)..(7): n is a, c, g, or u
caaaaangagaguaacuccac

SEQ ID NO: 133675 - RNA, 22 nt, Artificial Sequence
  Synthetic
  misc_feature (8)..(8): n is a, c, g, or u
gcaaaaangagaguaacuccac

SEQ ID NO: 133676 - RNA, 23 nt, Artificial Sequence
  Synthetic
  misc_feature (9)..(9): n is a, c, g, or u
ggcaaaaangagaguaacuccac

SEQ ID NO: 133677 - RNA, 24 nt, Artificial Sequence
  Synthetic
  misc_feature (10)..(10): n is a, c, g, or u
aggcaaaaangagaguaacuccac

SEQ ID NO: 133678 - RNA, 18 nt, Artificial Sequence
  Synthetic
ugagccugagggcuccac

SEQ ID NO: 133679 - RNA, 19 nt, Artificial Sequence
  Synthetic
cugagccugagggcuccac

SEQ ID NO: 133680 - RNA, 20 nt, Artificial Sequence
  Synthetic
ccugagccugagggcuccac

SEQ ID NO: 133681 - RNA, 21 nt, Artificial Sequence
  Synthetic
cccugagccugagggcuccac

SEQ ID NO: 133682 - RNA, 22 nt, Artificial Sequence
  Synthetic
gcccugagccugagggcuccac

SEQ ID NO: 133683 - RNA, 23 nt, Artificial Sequence
  Synthetic
ugcccugagccugagggcuccac

SEQ ID NO: 133684 - RNA, 24 nt, Artificial Sequence
  Synthetic
augcccugagccugagggcuccac

SEQ ID NO: 133685 - RNA, 18 nt, Artificial Sequence
  Synthetic
aaauugagagaaguccac

SEQ ID NO: 133686 - RNA, 19 nt, Artificial Sequence
  Synthetic
aaaauugagagaaguccac

SEQ ID NO: 133687 - RNA, 20 nt, Artificial Sequence
  Synthetic
gaaaauugagagaaguccac

SEQ ID NO: 133688 - RNA, 21 nt, Artificial Sequence
  Synthetic
agaaaauugagagaaguccac

SEQ ID NO: 133689 - RNA, 22 nt, Artificial Sequence
  Synthetic
uagaaaauugagagaaguccac

SEQ ID NO: 133690 - RNA, 23 nt, Artificial Sequence
  Synthetic
cuagaaaauugagagaaguccac

SEQ ID NO: 133691 - RNA, 24 nt, Artificial Sequence
  Synthetic
ccuagaaaauugagagaaguccac

SEQ ID NO: 133692 - RNA, 18 nt, Artificial Sequence
  Synthetic
aggugaagcgaagugcac

SEQ ID NO: 133693 - RNA, 19 nt, Artificial Sequence
  Synthetic
gaggugaagcgaagugcac

SEQ ID NO: 133694 - RNA, 20 nt, Artificial Sequence
  Synthetic
agaggugaagcgaagugcac

SEQ ID NO: 133695 - RNA, 21 nt, Artificial Sequence
  Synthetic
cagaggugaagcgaagugcac

SEQ ID NO: 133696 - RNA, 22 nt, Artificial Sequence
  Synthetic
gcagaggugaagcgaagugcac

SEQ ID NO: 133697 - RNA, 23 nt, Artificial Sequence
  Synthetic
ugcagaggugaagcgaagugcac

SEQ ID NO: 133698 - RNA, 24 nt, Artificial Sequence
  Synthetic
gugcagaggugaagcgaagugcac

SEQ ID NO: 133699 - RNA, 18 nt, Artificial Sequence
  Synthetic
aguccucuuauguaagac

SEQ ID NO: 133700 - RNA, 19 nt, Artificial Sequence
  Synthetic
gaguccucuuauguaagac

SEQ ID NO: 133701 - RNA, 20 nt, Artificial Sequence
  Synthetic
agaguccucuuauguaagac

SEQ ID NO: 133702 - RNA, 21 nt, Artificial Sequence
  Synthetic
aagaguccucuuauguaagac

SEQ ID NO: 133703 - RNA, 22 nt, Artificial Sequence
  Synthetic
caagaguccucuuauguaagac

SEQ ID NO: 133704 - RNA, 23 nt, Artificial Sequence
  Synthetic
ccaagaguccucuuauguaagac

SEQ ID NO: 133705 - RNA, 24 nt, Artificial Sequence
  Synthetic
uccaagaguccucuuauguaagac

SEQ ID NO: 133706 - RNA, 18 nt, Artificial Sequence
  Synthetic
agaugagaaggcacagac

SEQ ID NO: 133707 - RNA, 19 nt, Artificial Sequence
  Synthetic
cagaugagaaggcacagac

SEQ ID NO: 133708 - RNA, 20 nt, Artificial Sequence
  Synthetic
gcagaugagaaggcacagac

SEQ ID NO: 133709 - RNA, 21 nt, Artificial Sequence
  Synthetic
ggcagaugagaaggcacagac

SEQ ID NO: 133710 - RNA, 22 nt, Artificial Sequence
  Synthetic
cggcagaugagaaggcacagac

SEQ ID NO: 133711 - RNA, 23 nt, Artificial Sequence
  Synthetic
ccggcagaugagaaggcacagac

SEQ ID NO: 133712 - RNA, 24 nt, Artificial Sequence
  Synthetic
accggcagaugagaaggcacagac

SEQ ID NO: 133713 - RNA, 18 nt, Artificial Sequence
  Synthetic
  misc_feature (5)..(6): n is a, c, g, or u
  misc_feature (9)..(9): n is a, c, g, or u
ucggnnggnacggcagac

SEQ ID NO: 133714 - RNA, 19 nt, Artificial Sequence
  Synthetic
  misc_feature (6)..(7): n is a, c, g, or u
  misc_feature (10)..(10): n is a, c, g, or u
gucggnnggnacggcagac

SEQ ID NO: 133715 - RNA, 20 nt, Artificial Sequence
  Synthetic
  misc_feature (7)..(8): n is a, c, g, or u
  misc_feature (11)..(11): n is a, c, g, or u
ggucggnnggnacggcagac

SEQ ID NO: 133716 - RNA, 21 nt, Artificial Sequence
  Synthetic
  misc_feature (8)..(9): n is a, c, g, or u
  misc_feature (12)..(12): n is a, c, g, or u
uggucggnnggnacggcagac

SEQ ID NO: 133717 - RNA, 22 nt, Artificial Sequence
  Synthetic
  misc_feature (9)..(10): n is a, c, g, or u
  misc_feature (13)..(13): n is a, c, g, or u
guggucggnnggnacggcagac

SEQ ID NO: 133718 - RNA, 23 nt, Artificial Sequence
  Synthetic
  misc_feature (10)..(11): n is a, c, g, or u
  misc_feature (14)..(14): n is a, c, g, or u
cguggucggnnggnacggcagac

SEQ ID NO: 133719 - RNA, 24 nt, Artificial Sequence
  Synthetic
  misc_feature (11)..(12): n is a, c, g, or u
  misc_feature (15)..(15): n is a, c, g, or u
ccguggucggnnggnacggcagac

SEQ ID NO: 133720 - RNA, 18 nt, Artificial Sequence
  Synthetic
gagcaaugcucaggagac

SEQ ID NO: 133721 - RNA, 19 nt, Artificial Sequence
  Synthetic
ugagcaaugcucaggagac

SEQ ID NO: 133722 - RNA, 20 nt, Artificial Sequence
  Synthetic
gugagcaaugcucaggagac

SEQ ID NO: 133723 - RNA, 21 nt, Artificial Sequence
  Synthetic
ggugagcaaugcucaggagac

SEQ ID NO: 133724 - RNA, 22 nt, Artificial Sequence
  Synthetic
aggugagcaaugcucaggagac

SEQ ID NO: 133725 - RNA, 23 nt, Artificial Sequence
  Synthetic
gaggugagcaaugcucaggagac

SEQ ID NO: 133726 - RNA, 24 nt, Artificial Sequence
  Synthetic
ugaggugagcaaugcucaggagac

SEQ ID NO: 133727 - RNA, 18 nt, Artificial Sequence
  Synthetic
  misc_feature (14)..(14): n is a, c, g, or u
aaauguauacccanagac

SEQ ID NO: 133728 - RNA, 19 nt, Artificial Sequence
  Synthetic
  misc_feature (15)..(15): n is a, c, g, or u
uaaauguauacccanagac

SEQ ID NO: 133729 - RNA, 20 nt, Artificial Sequence
  Synthetic
  misc_feature (16)..(16): n is a, c, g, or u
uuaaauguauacccanagac

SEQ ID NO: 133730 - RNA, 21 nt, Artificial Sequence
  Synthetic
  misc_feature (17)..(17): n is a, c, g, or u
uuuaaauguauacccanagac

SEQ ID NO: 133731 - RNA, 22 nt, Artificial Sequence
  Synthetic
  misc_feature (18)..(18): n is a, c, g, or u
guuuaaauguauacccanagac

SEQ ID NO: 133732 - RNA, 23 nt, Artificial Sequence
  Synthetic
  misc_feature (19)..(19): n is a, c, g, or u
gguuuaaauguauacccanagac

SEQ ID NO: 133733 - RNA, 24 nt, Artificial Sequence
  Synthetic
  misc_feature (20)..(20): n is a, c, g, or u
ggguuuaaauguauacccanagac

SEQ ID NO: 133734 - RNA, 18 nt, Artificial Sequence
  Synthetic
caggacaaauuggaggac

SEQ ID NO: 133735 - RNA, 19 nt, Artificial Sequence
  Synthetic
ccaggacaaauuggaggac

SEQ ID NO: 133736 - RNA, 20 nt, Artificial Sequence
  Synthetic
accaggacaaauuggaggac

SEQ ID NO: 133737 - RNA, 21 nt, Artificial Sequence
  Synthetic
aaccaggacaaauuggaggac

SEQ ID NO: 133738 - RNA, 22 nt, Artificial Sequence
  Synthetic
uaaccaggacaaauuggaggac

SEQ ID NO: 133739 - RNA, 23 nt, Artificial Sequence
  Synthetic
auaaccaggacaaauuggaggac

SEQ ID NO: 133740 - RNA, 24 nt, Artificial Sequence
  Synthetic
gauaaccaggacaaauuggaggac

SEQ ID NO: 133741 - RNA, 18 nt, Artificial Sequence
  Synthetic
  misc_feature (10)..(10): n is a, c, g, or u
  misc_feature (13)..(13): n is a, c, g, or u
auauuuccgnganaggac

SEQ ID NO: 133742 - RNA, 19 nt, Artificial Sequence
  Synthetic
  misc_feature (11)..(11): n is a, c, g, or u
  misc_feature (14)..(14): n is a, c, g, or u
uauauuuccgnganaggac

SEQ ID NO: 133743 - RNA, 20 nt, Artificial Sequence
  Synthetic
  misc_feature (12)..(12): n is a, c, g, or u
  misc_feature (15)..(15): n is a, c, g, or u
guauauuuccgnganaggac

SEQ ID NO: 133744 - RNA, 21 nt, Artificial Sequence
  Synthetic
  misc_feature (13)..(13): n is a, c, g, or u
  misc_feature (16)..(16): n is a, c, g, or u
uguauauuuccgnganaggac

SEQ ID NO: 133745 - RNA, 22 nt, Artificial Sequence
  Synthetic
  misc_feature (14)..(14): n is a, c, g, or u
  misc_feature (17)..(17): n is a, c, g, or u
auguauauuuccgnganaggac

SEQ ID NO: 133746 - RNA, 23 nt, Artificial Sequence
  Synthetic
  misc_feature (15)..(15): n is a, c, g, or u
  misc_feature (18)..(18): n is a, c, g, or u
gauguauauuuccgnganaggac

SEQ ID NO: 133747 - RNA, 24 nt, Artificial Sequence
  Synthetic
  misc_feature (1)..(1): n is a, c, g, or u
  misc_feature (16)..(16): n is a, c, g, or u
  misc_feature (19)..(19): n is a, c, g, or u
ngauguauauuuccgnganaggac

SEQ ID NO: 133748 - RNA, 18 nt, Artificial Sequence
  Synthetic
  misc_feature (7)..(7): n is a, c, g, or u
gagccangagaaacggac

SEQ ID NO: 133749 - RNA, 19 nt, Artificial Sequence
  Synthetic
  misc_feature (8)..(8): n is a, c, g, or u
ugagccangagaaacggac

SEQ ID NO: 133750 - RNA, 20 nt, Artificial Sequence
  Synthetic
  misc_feature (9)..(9): n is a, c, g, or u
cugagccangagaaacggac

SEQ ID NO: 133751 - RNA, 21 nt, Artificial Sequence
  Synthetic
  misc_feature (10)..(10): n is a, c, g, or u
acugagccangagaaacggac

SEQ ID NO: 133752 - RNA, 22 nt, Artificial Sequence
  Synthetic
  misc_feature (11)..(11): n is a, c, g, or u
aacugagccangagaaacggac

SEQ ID NO: 133753 - RNA, 23 nt, Artificial Sequence
  Synthetic
  misc_feature (12)..(12): n is a, c, g, or u
aaacugagccangagaaacggac

SEQ ID NO: 133754 - RNA, 24 nt, Artificial Sequence
  Synthetic
  misc_feature (13)..(13): n is a, c, g, or u
uaaacugagccangagaaacggac

SEQ ID NO: 133755 - RNA, 18 nt, Artificial Sequence
  Synthetic
auucagcgccgacgggac

SEQ ID NO: 133756 - RNA, 19 nt, Artificial Sequence
  Synthetic
gauucagcgccgacgggac

SEQ ID NO: 133757 - RNA, 20 nt, Artificial Sequence
  Synthetic
ggauucagcgccgacgggac

SEQ ID NO: 133758 - RNA, 18 nt, Artificial Sequence
  Synthetic
gcagacggagaaggggac

SEQ ID NO: 133759 - RNA, 19 nt, Artificial Sequence
  Synthetic
ggcagacggagaaggggac

SEQ ID NO: 133760 - RNA, 20 nt, Artificial Sequence
  Synthetic
cggcagacggagaaggggac

SEQ ID NO: 133761 - RNA, 21 nt, Artificial Sequence
  Synthetic
acggcagacggagaaggggac

SEQ ID NO: 133762 - RNA, 22 nt, Artificial Sequence
  Synthetic
  misc_feature (1)..(1): n is a, c, g, or u
nacggcagacggagaaggggac

SEQ ID NO: 133763 - RNA, 23 nt, Artificial Sequence
  Synthetic
  misc_feature (2)..(2): n is a, c, g, or u
gnacggcagacggagaaggggac

SEQ ID NO: 133764 - RNA, 24 nt, Artificial Sequence
  Synthetic
  misc_feature (3)..(3): n is a, c, g, or u
ggnacggcagacggagaaggggac

SEQ ID NO: 133765 - RNA, 18 nt, Artificial Sequence
  Synthetic
ugauuggagguuggggac

SEQ ID NO: 133766 - RNA, 19 nt, Artificial Sequence
  Synthetic
gugauuggagguuggggac

SEQ ID NO: 133767 - RNA, 20 nt, Artificial Sequence
  Synthetic
agugauuggagguuggggac

SEQ ID NO: 133768 - RNA, 21 nt, Artificial Sequence
  Synthetic
gagugauuggagguuggggac

SEQ ID NO: 133769 - RNA, 22 nt, Artificial Sequence
  Synthetic
ugagugauuggagguuggggac

SEQ ID NO: 133770 - RNA, 23 nt, Artificial Sequence
  Synthetic
gugagugauuggagguuggggac

SEQ ID NO: 133771 - RNA, 24 nt, Artificial Sequence
  Synthetic
ggugagugauuggagguuggggac

SEQ ID NO: 133772 - RNA, 18 nt, Artificial Sequence
  Synthetic
  misc_feature (1)..(1): n is a, c, g, or u
  misc_feature (4)..(4): n is a, c, g, or u
  misc_feature (7)..(7): n is a, c, g, or u
  misc_feature (13)..(13): n is a, c, g, or u
  misc_feature (15)..(15): n is a, c, g, or u
nucnagnagaucncngac

SEQ ID NO: 133773 - RNA, 19 nt, Artificial Sequence
  Synthetic
  misc_feature (2)..(2): n is a, c, g, or u
  misc_feature (5)..(5): n is a, c, g, or u
  misc_feature (8)..(8): n is a, c, g, or u
  misc_feature (14)..(14): n is a, c, g, or u
  misc_feature (16)..(16): n is a, c, g, or u
unucnagnagaucncngac

SEQ ID NO: 133774 - RNA, 20 nt, Artificial Sequence
  Synthetic
  misc_feature (3)..(3): n is a, c, g, or u
  misc_feature (6)..(6): n is a, c, g, or u
  misc_feature (9)..(9): n is a, c, g, or u
  misc_feature (15)..(15): n is a, c, g, or u
  misc_feature (17)..(17): n is a, c, g, or u
gunucnagnagaucncngac

SEQ ID NO: 133775 - RNA, 21 nt, Artificial Sequence
  Synthetic
  misc_feature (1)..(1): n is a, c, g, or u
  misc_feature (4)..(4): n is a, c, g, or u
  misc_feature (7)..(7): n is a, c, g, or u
  misc_feature (10)..(10): n is a, c, g, or u
  misc_feature (16)..(16): n is a, c, g, or u
  misc_feature (18)..(18): n is a, c, g, or u
ngunucnagnagaucncngac

SEQ ID NO: 133776 - RNA, 22 nt, Artificial Sequence
  Synthetic
  misc_feature (2)..(2): n is a, c, g, or u
  misc_feature (5)..(5): n is a, c, g, or u
  misc_feature (8)..(8): n is a, c, g, or u
  misc_feature (11)..(11): n is a, c, g, or u
  misc_feature (17)..(17): n is a, c, g, or u
  misc_feature (19)..(19): n is a, c, g, or u
cngunucnagnagaucncngac

SEQ ID NO: 133777 - RNA, 23 nt, Artificial Sequence
  Synthetic
  misc_feature (3)..(3): n is a, c, g, or u
  misc_feature (6)..(6): n is a, c, g, or u
  misc_feature (9)..(9): n is a, c, g, or u
  misc_feature (12)..(12): n is a, c, g, or u
  misc_feature (18)..(18): n is a, c, g, or u
  misc_feature (20)..(20): n is a, c, g, or u
gcngunucnagnagaucncngac

SEQ ID NO: 133778 - RNA, 24 nt, Artificial Sequence
  Synthetic
  misc_feature (4)..(4): n is a, c, g, or u
  misc_feature (7)..(7): n is a, c, g, or u
  misc_feature (10)..(10): n is a, c, g, or u
  misc_feature (13)..(13): n is a, c, g, or u
  misc_feature (19)..(19): n is a, c, g, or u
  misc_feature (21)..(21): n is a, c, g, or u
ggcngunucnagnagaucncngac

SEQ ID NO: 133779 - RNA, 18 nt, Artificial Sequence
  Synthetic
  misc_feature (10)..(10): n is a, c, g, or u
aaaauacagnccccugac

SEQ ID NO: 133780 - RNA, 19 nt, Artificial Sequence
  Synthetic
  misc_feature (11)..(11): n is a, c, g, or u
gaaaauacagnccccugac

SEQ ID NO: 133781 - RNA, 20 nt, Artificial Sequence
  Synthetic
  misc_feature (12)..(12): n is a, c, g, or u
ggaaaauacagnccccugac

SEQ ID NO: 133782 - RNA, 21 nt, Artificial Sequence
  Synthetic
  misc_feature (13)..(13): n is a, c, g, or u
aggaaaauacagnccccugac

SEQ ID NO: 133783 - RNA, 22 nt, Artificial Sequence
  Synthetic
  misc_feature (14)..(14): n is a, c, g, or u
caggaaaauacagnccccugac

SEQ ID NO: 133784 - RNA, 23 nt, Artificial Sequence
  Synthetic
  misc_feature (15)..(15): n is a, c, g, or u
gcaggaaaauacagnccccugac

SEQ ID NO: 133785 - RNA, 24 nt, Artificial Sequence
  Synthetic
  misc_feature (16)..(16): n is a, c, g, or u
agcaggaaaauacagnccccugac

SEQ ID NO: 133786 - RNA, 18 nt, Artificial Sequence
  Synthetic
  misc_feature (16)..(16): n is a, c, g, or u
aggauuaaagauaggnac

SEQ ID NO: 133787 - RNA, 19 nt, Artificial Sequence
  Synthetic
  misc_feature (17)..(17): n is a, c, g, or u
caggauuaaagauaggnac

SEQ ID NO: 133788 - RNA, 20 nt, Artificial Sequence
  Synthetic
  misc_feature (18)..(18): n is a, c, g, or u
ucaggauuaaagauaggnac

SEQ ID NO: 133789 - RNA, 21 nt, Artificial Sequence
  Synthetic
  misc_feature (19)..(19): n is a, c, g, or u
uucaggauuaaagauaggnac

SEQ ID NO: 133790 - RNA, 22 nt, Artificial Sequence
  Synthetic
  misc_feature (20)..(20): n is a, c, g, or u
auucaggauuaaagauaggnac

SEQ ID NO: 133791 - RNA, 23 nt, Artificial Sequence
  Synthetic
  misc_feature (21)..(21): n is a, c, g, or u
cauucaggauuaaagauaggnac

SEQ ID NO: 133792 - RNA, 24 nt, Artificial Sequence
  Synthetic
  misc_feature (22)..(22): n is a, c, g, or u
ccauucaggauuaaagauaggnac

SEQ ID NO: 133793 - RNA, 18 nt, Artificial Sequence
  Synthetic
  misc_feature (12)..(13): n is a, c, g, or u
  misc_feature (16)..(16): n is a, c, g, or u
cccguggucggnnggnac

SEQ ID NO: 133794 - RNA, 19 nt, Artificial Sequence
  Synthetic
  misc_feature (13)..(14): n is a, c, g, or u
  misc_feature (17)..(17): n is a, c, g, or u
ccccguggucggnnggnac

SEQ ID NO: 133795 - RNA, 20 nt, Artificial Sequence
  Synthetic
  misc_feature (14)..(15): n is a, c, g, or u
  misc_feature (18)..(18): n is a, c, g, or u
gccccguggucggnnggnac

SEQ ID NO: 133796 - RNA, 21 nt, Artificial Sequence
  Synthetic
  misc_feature (15)..(16): n is a, c, g, or u
  misc_feature (19)..(19): n is a, c, g, or u
cgccccguggucggnnggnac

SEQ ID NO: 133797 - RNA, 22 nt, Artificial Sequence
  Synthetic
  misc_feature (16)..(17): n is a, c, g, or u
  misc_feature (20)..(20): n is a, c, g, or u
gcgccccguggucggnnggnac

SEQ ID NO: 133798 - RNA, 23 nt, Artificial Sequence
  Synthetic
  misc_feature (17)..(18): n is a, c, g, or u
  misc_feature (21)..(21): n is a, c, g, or u
ugcgccccguggucggnnggnac

SEQ ID NO: 133799 - RNA, 24 nt, Artificial Sequence
  Synthetic
  misc_feature (18)..(19): n is a, c, g, or u
  misc_feature (22)..(22): n is a, c, g, or u
gugcgccccguggucggnnggnac

SEQ ID NO: 133800 - RNA, 18 nt, Artificial Sequence
  Synthetic
  misc_feature (4)..(4): n is a, c, g, or u
  misc_feature (16)..(16): n is a, c, g, or u
gaanagugggacaugnac

SEQ ID NO: 133801 - RNA, 19 nt, Artificial Sequence
  Synthetic
  misc_feature (5)..(5): n is a, c, g, or u
  misc_feature (17)..(17): n is a, c, g, or u
ugaanagugggacaugnac

SEQ ID NO: 133802 - RNA, 20 nt, Artificial Sequence
  Synthetic
  misc_feature (6)..(6): n is a, c, g, or u
  misc_feature (18)..(18): n is a, c, g, or u
uugaanagugggacaugnac

SEQ ID NO: 133803 - RNA, 21 nt, Artificial Sequence
  Synthetic
  misc_feature (7)..(7): n is a, c, g, or u
  misc_feature (19)..(19): n is a, c, g, or u
cuugaanagugggacaugnac

SEQ ID NO: 133804 - RNA, 22 nt, Artificial Sequence
  Synthetic
  misc_feature (8)..(8): n is a, c, g, or u
  misc_feature (20)..(20): n is a, c, g, or u
gcuugaanagugggacaugnac

SEQ ID NO: 133805 - RNA, 23 nt, Artificial Sequence
  Synthetic
  misc_feature (9)..(9): n is a, c, g, or u
  misc_feature (21)..(21): n is a, c, g, or u
ggcuugaanagugggacaugnac

SEQ ID NO: 133806 - RNA, 24 nt, Artificial Sequence
  Synthetic
  misc_feature (10)..(10): n is a, c, g, or u
  misc_feature (22)..(22): n is a, c, g, or u
aggcuugaanagugggacaugnac

SEQ ID NO: 133807 - RNA, 18 nt, Artificial Sequence
  Synthetic
  misc_feature (10)..(10): n is a, c, g, or u
  misc_feature (12)..(13): n is a, c, g, or u
  misc_feature (16)..(16): n is a, c, g, or u
aucaauaggncnnuunac

SEQ ID NO: 133808 - RNA, 19 nt, Artificial Sequence
  Synthetic
  misc_feature (11)..(11): n is a, c, g, or u
  misc_feature (13)..(14): n is a, c, g, or u
  misc_feature (17)..(17): n is a, c, g, or u
aaucaauaggncnnuunac

SEQ ID NO: 133809 - RNA, 20 nt, Artificial Sequence
  Synthetic
  misc_feature (12)..(12): n is a, c, g, or u
  misc_feature (14)..(15): n is a, c, g, or u
  misc_feature (18)..(18): n is a, c, g, or u
caaucaauaggncnnuunac

SEQ ID NO: 133810 - RNA, 21 nt, Artificial Sequence
  Synthetic
  misc_feature (13)..(13): n is a, c, g, or u
  misc_feature (15)..(16): n is a, c, g, or u
  misc_feature (19)..(19): n is a, c, g, or u
ccaaucaauaggncnnuunac

SEQ ID NO: 133811 - RNA, 22 nt, Artificial Sequence
  Synthetic
  misc_feature (14)..(14): n is a, c, g, or u
  misc_feature (16)..(17): n is a, c, g, or u
  misc_feature (20)..(20): n is a, c, g, or u
uccaaucaauaggncnnuunac

SEQ ID NO: 133812 - RNA, 23 nt, Artificial Sequence
  Synthetic
  misc_feature (15)..(15): n is a, c, g, or u
  misc_feature (17)..(18): n is a, c, g, or u
  misc_feature (21)..(21): n is a, c, g, or u
uuccaaucaauaggncnnuunac

SEQ ID NO: 133813 - RNA, 24 nt, Artificial Sequence
  Synthetic
  misc_feature (16)..(16): n is a, c, g, or u
  misc_feature (18)..(19): n is a, c, g, or u
  misc_feature (22)..(22): n is a, c, g, or u
uuuccaaucaauaggncnnuunac

SEQ ID NO: 133814 - RNA, 18 nt, Artificial Sequence
  Synthetic
ccuacagccuccuaauac

SEQ ID NO: 133815 - RNA, 19 nt, Artificial Sequence
  Synthetic
gccuacagccuccuaauac

SEQ ID NO: 133816 - RNA, 20 nt, Artificial Sequence
  Synthetic
ugccuacagccuccuaauac

SEQ ID NO: 133817 - RNA, 21 nt, Artificial Sequence
  Synthetic
  misc_feature (1)..(1): n is a, c, g, or u
nugccuacagccuccuaauac

SEQ ID NO: 133818 - RNA, 22 nt, Artificial Sequence
  Synthetic
  misc_feature (2)..(2): n is a, c, g, or u
unugccuacagccuccuaauac

SEQ ID NO: 133819 - RNA, 23 nt, Artificial Sequence
  Synthetic
  misc_feature (3)..(3): n is a, c, g, or u
uunugccuacagccuccuaauac

SEQ ID NO: 133820 - RNA, 24 nt, Artificial Sequence
  Synthetic
  misc_feature (4)..(4): n is a, c, g, or u
uuunugccuacagccuccuaauac

SEQ ID NO: 133821 - RNA, 18 nt, Artificial Sequence
  Synthetic
gcuuguauacaugcauac

SEQ ID NO: 133822 - RNA, 19 nt, Artificial Sequence
  Synthetic
  misc_feature (1)..(1): n is a, c, g, or u
ngcuuguauacaugcauac

SEQ ID NO: 133823 - RNA, 20 nt, Artificial Sequence
  Synthetic
  misc_feature (2)..(2): n is a, c, g, or u
ungcuuguauacaugcauac

SEQ ID NO: 133824 - RNA, 21 nt, Artificial Sequence
  Synthetic
  misc_feature (3)..(3): n is a, c, g, or u
uungcuuguauacaugcauac

SEQ ID NO: 133825 - RNA, 22 nt, Artificial Sequence
  Synthetic
  misc_feature (4)..(4): n is a, c, g, or u
uuungcuuguauacaugcauac

SEQ ID NO: 133826 - RNA, 23 nt, Artificial Sequence
  Synthetic
  misc_feature (5)..(5): n is a, c, g, or u
guuungcuuguauacaugcauac

SEQ ID NO: 133827 - RNA, 24 nt, Artificial Sequence
  Synthetic
  misc_feature (6)..(6): n is a, c, g, or u
uguuungcuuguauacaugcauac

SEQ ID NO: 133828 - RNA, 18 nt, Artificial Sequence
  Synthetic
cauccguagguuuuguac

SEQ ID NO: 133829 - RNA, 19 nt, Artificial Sequence
  Synthetic
ccauccguagguuuuguac

SEQ ID NO: 133830 - RNA, 20 nt, Artificial Sequence
  Synthetic
uccauccguagguuuuguac

SEQ ID NO: 133831 - RNA, 21 nt, Artificial Sequence
  Synthetic
uuccauccguagguuuuguac

SEQ ID NO: 133832 - RNA, 22 nt, Artificial Sequence
  Synthetic
uuuccauccguagguuuuguac

SEQ ID NO: 133833 - RNA, 23 nt, Artificial Sequence
  Synthetic
auuuccauccguagguuuuguac

SEQ ID NO: 133834 - RNA, 24 nt, Artificial Sequence
  Synthetic
aauuuccauccguagguuuuguac

SEQ ID NO: 133835 - RNA, 18 nt, Artificial Sequence
  Synthetic
  misc_feature (7)..(7): n is a, c, g, or u
ucuucunuuuucauuuac

SEQ ID NO: 133836 - RNA, 19 nt, Artificial Sequence
  Synthetic
  misc_feature (8)..(8): n is a, c, g, or u
aucuucunuuuucauuuac

SEQ ID NO: 133837 - RNA, 20 nt, Artificial Sequence
  Synthetic
  misc_feature (9)..(9): n is a, c, g, or u
aaucuucunuuuucauuuac

SEQ ID NO: 133838 - RNA, 21 nt, Artificial Sequence
  Synthetic
  misc_feature (1)..(1): n is a, c, g, or u
  misc_feature (10)..(10): n is a, c, g, or u
naaucuucunuuuucauuuac

SEQ ID NO: 133839 - RNA, 22 nt, Artificial Sequence
  Synthetic
  misc_feature (2)..(2): n is a, c, g, or u
  misc_feature (11)..(11): n is a, c, g, or u
unaaucuucunuuuucauuuac

SEQ ID NO: 133840 - RNA, 23 nt, Artificial Sequence
  Synthetic
  misc_feature (3)..(3): n is a, c, g, or u
  misc_feature (12)..(12): n is a, c, g, or u
uunaaucuucunuuuucauuuac

SEQ ID NO: 133841 - RNA, 24 nt, Artificial Sequence
  Synthetic
  misc_feature (4)..(4): n is a, c, g, or u
  misc_feature (13)..(13): n is a, c, g, or u
uuunaaucuucunuuuucauuuac

SEQ ID NO: 133842 - RNA, 18 nt, Artificial Sequence
  Synthetic
  misc_feature (8)..(8): n is a, c, g, or u
gguucaunuacuguuuac

SEQ ID NO: 133843 - RNA, 19 nt, Artificial Sequence
  Synthetic
  misc_feature (9)..(9): n is a, c, g, or u
agguucaunuacuguuuac

SEQ ID NO: 133844 - RNA, 20 nt, Artificial Sequence
  Synthetic
  misc_feature (10)..(10): n is a, c, g, or u
aagguucaunuacuguuuac

SEQ ID NO: 133845 - RNA, 21 nt, Artificial Sequence
  Synthetic
  misc_feature (11)..(11): n is a, c, g, or u
aaagguucaunuacuguuuac

SEQ ID NO: 133846 - RNA, 22 nt, Artificial Sequence
  Synthetic
  misc_feature (12)..(12): n is a, c, g, or u
uaaagguucaunuacuguuuac

SEQ ID NO: 133847 - RNA, 23 nt, Artificial Sequence
  Synthetic
  misc_feature (13)..(13): n is a, c, g, or u
guaaagguucaunuacuguuuac

SEQ ID NO: 133848 - RNA, 24 nt, Artificial Sequence
  Synthetic
  misc_feature (14)..(14): n is a, c, g, or u
gguaaagguucaunuacuguuuac

SEQ ID NO: 133849 - RNA, 18 nt, Artificial Sequence
  Synthetic
ugauaauccagaagaacc

SEQ ID NO: 133850 - RNA, 19 nt, Artificial Sequence
  Synthetic
uugauaauccagaagaacc

SEQ ID NO: 133851 - RNA, 20 nt, Artificial Sequence
  Synthetic
cuugauaauccagaagaacc

SEQ ID NO: 133852 - RNA, 21 nt, Artificial Sequence
  Synthetic
ccuugauaauccagaagaacc

SEQ ID NO: 133853 - RNA, 22 nt, Artificial Sequence
  Synthetic
accuugauaauccagaagaacc

SEQ ID NO: 133854 - RNA, 23 nt, Artificial Sequence
  Synthetic
uaccuugauaauccagaagaacc

SEQ ID NO: 133855 - RNA, 24 nt, Artificial Sequence
  Synthetic
auaccuugauaauccagaagaacc

SEQ ID NO: 133856 - RNA, 18 nt, Artificial Sequence
  Synthetic
gggaaagcccuacgaacc

SEQ ID NO: 133857 - RNA, 19 nt, Artificial Sequence
  Synthetic
ggggaaagcccuacgaacc

SEQ ID NO: 133858 - RNA, 20 nt, Artificial Sequence
  Synthetic
gggggaaagcccuacgaacc

SEQ ID NO: 133859 - RNA, 21 nt, Artificial Sequence
  Synthetic
ugggggaaagcccuacgaacc

SEQ ID NO: 133860 - RNA, 22 nt, Artificial Sequence
  Synthetic
gugggggaaagcccuacgaacc

SEQ ID NO: 133861 - RNA, 23 nt, Artificial Sequence
  Synthetic
agugggggaaagcccuacgaacc

SEQ ID NO: 133862 - RNA, 24 nt, Artificial Sequence
  Synthetic
cagugggggaaagcccuacgaacc

SEQ ID NO: 133863 - RNA, 18 nt, Artificial Sequence
  Synthetic
uccugaacuggagccacc

SEQ ID NO: 133864 - RNA, 19 nt, Artificial Sequence
  Synthetic
uuccugaacuggagccacc

SEQ ID NO: 133865 - RNA, 20 nt, Artificial Sequence
  Synthetic
guuccugaacuggagccacc

SEQ ID NO: 133866 - RNA, 21 nt, Artificial Sequence
  Synthetic
uguuccugaacuggagccacc

SEQ ID NO: 133867 - RNA, 22 nt, Artificial Sequence
  Synthetic
  misc_feature (1)..(1): n is a, c, g, or u
nuguuccugaacuggagccacc

SEQ ID NO: 133868 - RNA, 23 nt, Artificial Sequence
  Synthetic
  misc_feature (2)..(2): n is a, c, g, or u
anuguuccugaacuggagccacc

SEQ ID NO: 133869 - RNA, 24 nt, Artificial Sequence
  Synthetic
  misc_feature (1)..(1): n is a, c, g, or u
  misc_feature (3)..(3): n is a, c, g, or u
nanuguuccugaacuggagccacc

SEQ ID NO: 133870 - RNA, 18 nt, Artificial Sequence
  Synthetic
gagccugagggcuccacc

SEQ ID NO: 133871 - RNA, 19 nt, Artificial Sequence
  Synthetic
ugagccugagggcuccacc

SEQ ID NO: 133872 - RNA, 20 nt, Artificial Sequence
  Synthetic
cugagccugagggcuccacc

SEQ ID NO: 133873 - RNA, 21 nt, Artificial Sequence
  Synthetic
ccugagccugagggcuccacc

SEQ ID NO: 133874 - RNA, 22 nt, Artificial Sequence
  Synthetic
cccugagccugagggcuccacc

SEQ ID NO: 133875 - RNA, 23 nt, Artificial Sequence
  Synthetic
gcccugagccugagggcuccacc

SEQ ID NO: 133876 - RNA, 24 nt, Artificial Sequence
  Synthetic
ugcccugagccugagggcuccacc

SEQ ID NO: 133877 - RNA, 18 nt, Artificial Sequence
  Synthetic
guccucuuauguaagacc

SEQ ID NO: 133878 - RNA, 19 nt, Artificial Sequence
  Synthetic
aguccucuuauguaagacc

SEQ ID NO: 133879 - RNA, 20 nt, Artificial Sequence
  Synthetic
gaguccucuuauguaagacc

SEQ ID NO: 133880 - RNA, 21 nt, Artificial Sequence
  Synthetic
agaguccucuuauguaagacc

SEQ ID NO: 133881 - RNA, 22 nt, Artificial Sequence
  Synthetic
aagaguccucuuauguaagacc

SEQ ID NO: 133882 - RNA, 23 nt, Artificial Sequence
  Synthetic
caagaguccucuuauguaagacc

SEQ ID NO: 133883 - RNA, 24 nt, Artificial Sequence
  Synthetic
ccaagaguccucuuauguaagacc

SEQ ID NO: 133884 - RNA, 18 nt, Artificial Sequence
  Synthetic
gcgaagugcacacggacc

SEQ ID NO: 133885 - RNA, 19 nt, Artificial Sequence
  Synthetic
agcgaagugcacacggacc

SEQ ID NO: 133886 - RNA, 20 nt, Artificial Sequence
  Synthetic
aagcgaagugcacacggacc

SEQ ID NO: 133887 - RNA, 21 nt, Artificial Sequence
  Synthetic
gaagcgaagugcacacggacc

SEQ ID NO: 133888 - RNA, 22 nt, Artificial Sequence
  Synthetic
ugaagcgaagugcacacggacc

SEQ ID NO: 133889 - RNA, 23 nt, Artificial Sequence
  Synthetic
gugaagcgaagugcacacggacc

SEQ ID NO: 133890 - RNA, 24 nt, Artificial Sequence
  Synthetic
ggugaagcgaagugcacacggacc

SEQ ID NO: 133891 - RNA, 18 nt, Artificial Sequence
  Synthetic
cccaagaauauggugacc

SEQ ID NO: 133892 - RNA, 19 nt, Artificial Sequence
  Synthetic
ucccaagaauauggugacc

SEQ ID NO: 133893 - RNA, 20 nt, Artificial Sequence
  Synthetic
uucccaagaauauggugacc

SEQ ID NO: 133894 - RNA, 21 nt, Artificial Sequence
  Synthetic
guucccaagaauauggugacc

SEQ ID NO: 133895 - RNA, 22 nt, Artificial Sequence
  Synthetic
uguucccaagaauauggugacc

SEQ ID NO: 133896 - RNA, 23 nt, Artificial Sequence
  Synthetic
uuguucccaagaauauggugacc

SEQ ID NO: 133897 - RNA, 24 nt, Artificial Sequence
  Synthetic
cuuguucccaagaauauggugacc

SEQ ID NO: 133898 - RNA, 18 nt, Artificial Sequence
  Synthetic
aggguuuaaauguauacc

SEQ ID NO: 133899 - RNA, 19 nt, Artificial Sequence
  Synthetic
uaggguuuaaauguauacc

SEQ ID NO: 133900 - RNA, 20 nt, Artificial Sequence
  Synthetic
uuaggguuuaaauguauacc

SEQ ID NO: 133901 - RNA, 21 nt, Artificial Sequence
  Synthetic
guuaggguuuaaauguauacc

SEQ ID NO: 133902 - RNA, 22 nt, Artificial Sequence
  Synthetic
uguuaggguuuaaauguauacc

SEQ ID NO: 133903 - RNA, 23 nt, Artificial Sequence
  Synthetic
uuguuaggguuuaaauguauacc

SEQ ID NO: 133904 - RNA, 24 nt, Artificial Sequence
  Synthetic
uuuguuaggguuuaaauguauacc

SEQ ID NO: 133905 - RNA, 18 nt, Artificial Sequence
  Synthetic
agccugagggcuccaccc

SEQ ID NO: 133906 - RNA, 19 nt, Artificial Sequence
  Synthetic
gagccugagggcuccaccc

SEQ ID NO: 133907 - RNA, 20 nt, Artificial Sequence
  Synthetic
ugagccugagggcuccaccc

SEQ ID NO: 133908 - RNA, 21 nt, Artificial Sequence
  Synthetic
cugagccugagggcuccaccc

SEQ ID NO: 133909 - RNA, 22 nt, Artificial Sequence
  Synthetic
ccugagccugagggcuccaccc

SEQ ID NO: 133910 - RNA, 23 nt, Artificial Sequence
  Synthetic
cccugagccugagggcuccaccc

SEQ ID NO: 133911 - RNA, 24 nt, Artificial Sequence
  Synthetic
gcccugagccugagggcuccaccc

SEQ ID NO: 133912 - RNA, 18 nt, Artificial Sequence
  Synthetic
ccaagaauauggugaccc

SEQ ID NO: 133913 - RNA, 19 nt, Artificial Sequence
  Synthetic
cccaagaauauggugaccc

SEQ ID NO: 133914 - RNA, 20 nt, Artificial Sequence
  Synthetic
ucccaagaauauggugaccc

SEQ ID NO: 133915 - RNA, 21 nt, Artificial Sequence
  Synthetic
uucccaagaauauggugaccc

SEQ ID NO: 133916 - RNA, 22 nt, Artificial Sequence
  Synthetic
guucccaagaauauggugaccc

SEQ ID NO: 133917 - RNA, 23 nt, Artificial Sequence
  Synthetic
uguucccaagaauauggugaccc

SEQ ID NO: 133918 - RNA, 24 nt, Artificial Sequence
  Synthetic
uuguucccaagaauauggugaccc

SEQ ID NO: 133919 - RNA, 18 nt, Artificial Sequence
  Synthetic
ggguuuaaauguauaccc

SEQ ID NO: 133920 - RNA, 19 nt, Artificial Sequence
  Synthetic
aggguuuaaauguauaccc

SEQ ID NO: 133921 - RNA, 20 nt, Artificial Sequence
  Synthetic
uaggguuuaaauguauaccc

SEQ ID NO: 133922 - RNA, 21 nt, Artificial Sequence
  Synthetic
uuaggguuuaaauguauaccc

SEQ ID NO: 133923 - RNA, 22 nt, Artificial Sequence
  Synthetic
guuaggguuuaaauguauaccc

SEQ ID NO: 133924 - RNA, 23 nt, Artificial Sequence
  Synthetic
uguuaggguuuaaauguauaccc

SEQ ID NO: 133925 - RNA, 24 nt, Artificial Sequence
  Synthetic
uuguuaggguuuaaauguauaccc

SEQ ID NO: 133926 - RNA, 18 nt, Artificial Sequence
  Synthetic
  misc_feature (8)..(8): n is a, c, g, or u
gagucaunaauucccccc

SEQ ID NO: 133927 - RNA, 19 nt, Artificial Sequence
  Synthetic
  misc_feature (9)..(9): n is a, c, g, or u
agagucaunaauucccccc

SEQ ID NO: 133928 - RNA, 20 nt, Artificial Sequence
  Synthetic
  misc_feature (10)..(10): n is a, c, g, or u
uagagucaunaauucccccc

SEQ ID NO: 133929 - RNA, 21 nt, Artificial Sequence
  Synthetic
  misc_feature (11)..(11): n is a, c, g, or u
cuagagucaunaauucccccc

SEQ ID NO: 133930 - RNA, 22 nt, Artificial Sequence
  Synthetic
  misc_feature (12)..(12): n is a, c, g, or u
gcuagagucaunaauucccccc

SEQ ID NO: 133931 - RNA, 23 nt, Artificial Sequence
  Synthetic
  misc_feature (13)..(13): n is a, c, g, or u
agcuagagucaunaauucccccc

SEQ ID NO: 133932 - RNA, 24 nt, Artificial Sequence
  Synthetic
  misc_feature (14)..(14): n is a, c, g, or u
uagcuagagucaunaauucccccc

SEQ ID NO: 133933 - RNA, 18 nt, Artificial Sequence
  Synthetic
  misc_feature (12)..(12): n is a, c, g, or u
acacacgggugnuccccc

SEQ ID NO: 133934 - RNA, 19 nt, Artificial Sequence
  Synthetic
  misc_feature (13)..(13): n is a, c, g, or u
gacacacgggugnuccccc

SEQ ID NO: 133935 - RNA, 20 nt, Artificial Sequence
  Synthetic
  misc_feature (14)..(14): n is a, c, g, or u
agacacacgggugnuccccc

SEQ ID NO: 133936 - RNA, 21 nt, Artificial Sequence
  Synthetic
  misc_feature (15)..(15): n is a, c, g, or u
aagacacacgggugnuccccc

SEQ ID NO: 133937 - RNA, 22 nt, Artificial Sequence
  Synthetic
  misc_feature (16)..(16): n is a, c, g, or u
caagacacacgggugnuccccc

SEQ ID NO: 133938 - RNA, 23 nt, Artificial Sequence
  Synthetic
  misc_feature (17)..(17): n is a, c, g, or u
ccaagacacacgggugnuccccc

SEQ ID NO: 133939 - RNA, 24 nt, Artificial Sequence
  Synthetic
  misc_feature (18)..(18): n is a, c, g, or u
gccaagacacacgggugnuccccc

SEQ ID NO: 133940 - RNA, 18 nt, Artificial Sequence
  Synthetic
agagucccaagcggcccc

SEQ ID NO: 133941 - RNA, 19 nt, Artificial Sequence
  Synthetic
  misc_feature (1)..(1): n is a, c, g, or u
nagagucccaagcggcccc

SEQ ID NO: 133942 - RNA, 20 nt, Artificial Sequence
  Synthetic
  misc_feature (2)..(2): n is a, c, g, or u
anagagucccaagcggcccc

SEQ ID NO: 133943 - RNA, 21 nt, Artificial Sequence
  Synthetic
  misc_feature (3)..(3): n is a, c, g, or u
ganagagucccaagcggcccc

SEQ ID NO: 133944 - RNA, 22 nt, Artificial Sequence
  Synthetic
  misc_feature (4)..(4): n is a, c, g, or u
cganagagucccaagcggcccc

SEQ ID NO: 133945 - RNA, 23 nt, Artificial Sequence
  Synthetic
  misc_feature (5)..(5): n is a, c, g, or u
acganagagucccaagcggcccc

SEQ ID NO: 133946 - RNA, 24 nt, Artificial Sequence
  Synthetic
  misc_feature (6)..(6): n is a, c, g, or u
gacganagagucccaagcggcccc

SEQ ID NO: 133947 - RNA, 18 nt, Artificial Sequence
  Synthetic
  misc_feature (13)..(13): n is a, c, g, or u
gacacacgggugnucccc

SEQ ID NO: 133948 - RNA, 19 nt, Artificial Sequence
  Synthetic
  misc_feature (14)..(14): n is a, c, g, or u
agacacacgggugnucccc

SEQ ID NO: 133949 - RNA, 20 nt, Artificial Sequence
  Synthetic
  misc_feature (15)..(15): n is a, c, g, or u
aagacacacgggugnucccc

SEQ ID NO: 133950 - RNA, 21 nt, Artificial Sequence
  Synthetic
  misc_feature (16)..(16): n is a, c, g, or u
caagacacacgggugnucccc

SEQ ID NO: 133951 - RNA, 22 nt, Artificial Sequence
  Synthetic
  misc_feature (17)..(17): n is a, c, g, or u
ccaagacacacgggugnucccc

SEQ ID NO: 133952 - RNA, 23 nt, Artificial Sequence
  Synthetic
  misc_feature (18)..(18): n is a, c, g, or u
gccaagacacacgggugnucccc

SEQ ID NO: 133953 - RNA, 24 nt, Artificial Sequence
  Synthetic
  misc_feature (19)..(19): n is a, c, g, or u
ggccaagacacacgggugnucccc

SEQ ID NO: 133954 - RNA, 18 nt, Artificial Sequence
  Synthetic
  misc_feature (9)..(9): n is a, c, g, or u
aauggagcngcaaagccc

SEQ ID NO: 133955 - RNA, 19 nt, Artificial Sequence
  Synthetic
  misc_feature (10)..(10): n is a, c, g, or u
aaauggagcngcaaagccc

SEQ ID NO: 133956 - RNA, 20 nt, Artificial Sequence
  Synthetic
  misc_feature (11)..(11): n is a, c, g, or u
uaaauggagcngcaaagccc

SEQ ID NO: 133957 - RNA, 21 nt, Artificial Sequence
  Synthetic
  misc_feature (12)..(12): n is a, c, g, or u
guaaauggagcngcaaagccc

SEQ ID NO: 133958 - RNA, 22 nt, Artificial Sequence
  Synthetic
  misc_feature (13)..(13): n is a, c, g, or u
uguaaauggagcngcaaagccc

SEQ ID NO: 133959 - RNA, 23 nt, Artificial Sequence
  Synthetic
  misc_feature (14)..(14): n is a, c, g, or u
guguaaauggagcngcaaagccc

SEQ ID NO: 133960 - RNA, 24 nt, Artificial Sequence
  Synthetic
  misc_feature (15)..(15): n is a, c, g, or u
uguguaaauggagcngcaaagccc

SEQ ID NO: 133961 - RNA, 18 nt, Artificial Sequence
  Synthetic
aacagugggggaaagccc

SEQ ID NO: 133962 - RNA, 19 nt, Artificial Sequence
  Synthetic
aaacagugggggaaagccc

SEQ ID NO: 133963 - RNA, 20 nt, Artificial Sequence
  Synthetic
caaacagugggggaaagccc

SEQ ID NO: 133964 - RNA, 21 nt, Artificial Sequence
  Synthetic
ccaaacagugggggaaagccc

SEQ ID NO: 133965 - RNA, 22 nt, Artificial Sequence
  Synthetic
gccaaacagugggggaaagccc

SEQ ID NO: 133966 - RNA, 23 nt, Artificial Sequence
  Synthetic
agccaaacagugggggaaagccc

SEQ ID NO: 133967 - RNA, 24 nt, Artificial Sequence
  Synthetic
aagccaaacagugggggaaagccc

SEQ ID NO: 133968 - RNA, 18 nt, Artificial Sequence
  Synthetic
  misc_feature (1)..(1): n is a, c, g, or u
nagagucccaagcggccc

SEQ ID NO: 133969 - RNA, 19 nt, Artificial Sequence
  Synthetic
  misc_feature (2)..(2): n is a, c, g, or u
anagagucccaagcggccc

SEQ ID NO: 133970 - RNA, 20 nt, Artificial Sequence
  Synthetic
  misc_feature (3)..(3): n is a, c, g, or u
ganagagucccaagcggccc

SEQ ID NO: 133971 - RNA, 21 nt, Artificial Sequence
  Synthetic
  misc_feature (4)..(4): n is a, c, g, or u
cganagagucccaagcggccc

SEQ ID NO: 133972 - RNA, 22 nt, Artificial Sequence
  Synthetic
  misc_feature (5)..(5): n is a, c, g, or u
acganagagucccaagcggccc

SEQ ID NO: 133973 - RNA, 23 nt, Artificial Sequence
  Synthetic
  misc_feature (6)..(6): n is a, c, g, or u
gacganagagucccaagcggccc

SEQ ID NO: 133974 - RNA, 24 nt, Artificial Sequence
  Synthetic
  misc_feature (7)..(7): n is a, c, g, or u
ggacganagagucccaagcggccc

SEQ ID NO: 133975 - RNA, 18 nt, Artificial Sequence
  Synthetic
gggucaauguccaugccc

SEQ ID NO: 133976 - RNA, 19 nt, Artificial Sequence
  Synthetic
agggucaauguccaugccc

SEQ ID NO: 133977 - RNA, 20 nt, Artificial Sequence
  Synthetic
aagggucaauguccaugccc

SEQ ID NO: 133978 - RNA, 21 nt, Artificial Sequence
  Synthetic
uaagggucaauguccaugccc

SEQ ID NO: 133979 - RNA, 22 nt, Artificial Sequence
  Synthetic
auaagggucaauguccaugccc

SEQ ID NO: 133980 - RNA, 23 nt, Artificial Sequence
  Synthetic
uauaagggucaauguccaugccc

SEQ ID NO: 133981 - RNA, 24 nt, Artificial Sequence
  Synthetic
uuauaagggucaauguccaugccc

SEQ ID NO: 133982 - RNA, 18 nt, Artificial Sequence
  Synthetic
  misc_feature (11)..(12): n is a, c, g, or u
  misc_feature (15)..(15): n is a, c, g, or u
cuuccaauuannuanccc

SEQ ID NO: 133983 - RNA, 19 nt, Artificial Sequence
  Synthetic
  misc_feature (12)..(13): n is a, c, g, or u
  misc_feature (16)..(16): n is a, c, g, or u
acuuccaauuannuanccc

SEQ ID NO: 133984 - RNA, 20 nt, Artificial Sequence
  Synthetic
  misc_feature (13)..(14): n is a, c, g, or u
  misc_feature (17)..(17): n is a, c, g, or u
aacuuccaauuannuanccc

SEQ ID NO: 133985 - RNA, 21 nt, Artificial Sequence
  Synthetic
  misc_feature (14)..(15): n is a, c, g, or u
  misc_feature (18)..(18): n is a, c, g, or u
caacuuccaauuannuanccc

SEQ ID NO: 133986 - RNA, 22 nt, Artificial Sequence
  Synthetic
  misc_feature (15)..(16): n is a, c, g, or u
  misc_feature (19)..(19): n is a, c, g, or u
ccaacuuccaauuannuanccc

SEQ ID NO: 133987 - RNA, 23 nt, Artificial Sequence
  Synthetic
  misc_feature (16)..(17): n is a, c, g, or u
  misc_feature (20)..(20): n is a, c, g, or u
cccaacuuccaauuannuanccc

SEQ ID NO: 133988 - RNA, 24 nt, Artificial Sequence
  Synthetic
  misc_feature (17)..(18): n is a, c, g, or u
  misc_feature (21)..(21): n is a, c, g, or u
ccccaacuuccaauuannuanccc

SEQ ID NO: 133989 - RNA, 18 nt, Artificial Sequence
  Synthetic
ugaucgggaaagaauccc

SEQ ID NO: 133990 - RNA, 19 nt, Artificial Sequence
  Synthetic
augaucgggaaagaauccc

SEQ ID NO: 133991 - RNA, 20 nt, Artificial Sequence
  Synthetic
gaugaucgggaaagaauccc

SEQ ID NO: 133992 - RNA, 21 nt, Artificial Sequence
  Synthetic
ugaugaucgggaaagaauccc

SEQ ID NO: 133993 - RNA, 22 nt, Artificial Sequence
  Synthetic
cugaugaucgggaaagaauccc

SEQ ID NO: 133994 - RNA, 23 nt, Artificial Sequence
  Synthetic
acugaugaucgggaaagaauccc

SEQ ID NO: 133995 - RNA, 24 nt, Artificial Sequence
  Synthetic
aacugaugaucgggaaagaauccc

SEQ ID NO: 133996 - RNA, 18 nt, Artificial Sequence
  Synthetic
guaaacaaaggacguccc

SEQ ID NO: 133997 - RNA, 19 nt, Artificial Sequence
  Synthetic
cguaaacaaaggacguccc

SEQ ID NO: 133998 - RNA, 20 nt, Artificial Sequence
  Synthetic
acguaaacaaaggacguccc

SEQ ID NO: 133999 - RNA, 21 nt, Artificial Sequence
  Synthetic
gacguaaacaaaggacguccc

SEQ ID NO: 134000 - RNA, 22 nt, Artificial Sequence
  Synthetic
ggacguaaacaaaggacguccc

SEQ ID NO: 134001 - RNA, 23 nt, Artificial Sequence
  Synthetic
gggacguaaacaaaggacguccc

SEQ ID NO: 134002 - RNA, 24 nt, Artificial Sequence
  Synthetic
cgggacguaaacaaaggacguccc

SEQ ID NO: 134003 - RNA, 18 nt, Artificial Sequence
  Synthetic
  misc_feature (14)..(14): n is a, c, g, or u
agacacacgggugnuccc

SEQ ID NO: 134004 - RNA, 19 nt, Artificial Sequence
  Synthetic
  misc_feature (15)..(15): n is a, c, g, or u
aagacacacgggugnuccc

SEQ ID NO: 134005 - RNA, 20 nt, Artificial Sequence
  Synthetic
  misc_feature (16)..(16): n is a, c, g, or u
caagacacacgggugnuccc

SEQ ID NO: 134006 - RNA, 21 nt, Artificial Sequence
  Synthetic
  misc_feature (17)..(17): n is a, c, g, or u
ccaagacacacgggugnuccc

SEQ ID NO: 134007 - RNA, 22 nt, Artificial Sequence
  Synthetic
  misc_feature (18)..(18): n is a, c, g, or u
gccaagacacacgggugnuccc

SEQ ID NO: 134008 - RNA, 23 nt, Artificial Sequence
  Synthetic
  misc_feature (19)..(19): n is a, c, g, or u
ggccaagacacacgggugnuccc

SEQ ID NO: 134009 - RNA, 24 nt, Artificial Sequence
  Synthetic
  misc_feature (20)..(20): n is a, c, g, or u
uggccaagacacacgggugnuccc

SEQ ID NO: 134010 - RNA, 18 nt, Artificial Sequence
  Synthetic
  misc_feature (11)..(11): n is a, c, g, or u
cuagagucaunaauuccc

SEQ ID NO: 134011 - RNA, 19 nt, Artificial Sequence
  Synthetic
  misc_feature (12)..(12): n is a, c, g, or u
gcuagagucaunaauuccc

SEQ ID NO: 134012 - RNA, 20 nt, Artificial Sequence
  Synthetic
  misc_feature (13)..(13): n is a, c, g, or u
agcuagagucaunaauuccc

SEQ ID NO: 134013 - RNA, 21 nt, Artificial Sequence
  Synthetic
  misc_feature (14)..(14): n is a, c, g, or u
uagcuagagucaunaauuccc

SEQ ID NO: 134014 - RNA, 22 nt, Artificial Sequence
  Synthetic
  misc_feature (15)..(15): n is a, c, g, or u
guagcuagagucaunaauuccc

SEQ ID NO: 134015 - RNA, 23 nt, Artificial Sequence
  Synthetic
  misc_feature (16)..(16): n is a, c, g, or u
gguagcuagagucaunaauuccc

SEQ ID NO: 134016 - RNA, 24 nt, Artificial Sequence
  Synthetic
  misc_feature (17)..(17): n is a, c, g, or u
agguagcuagagucaunaauuccc

SEQ ID NO: 134017 - RNA, 18 nt, Artificial Sequence
  Synthetic
  misc_feature (10)..(10): n is a, c, g, or u
aaauggagcngcaaagcc

SEQ ID NO: 134018 - RNA, 19 nt, Artificial Sequence
  Synthetic
  misc_feature (11)..(11): n is a, c, g, or u
uaaauggagcngcaaagcc

SEQ ID NO: 134019 - RNA, 20 nt, Artificial Sequence
  Synthetic
  misc_feature (12)..(12): n is a, c, g, or u
guaaauggagcngcaaagcc

SEQ ID NO: 134020 - RNA, 21 nt, Artificial Sequence
  Synthetic
  misc_feature (13)..(13): n is a, c, g, or u
uguaaauggagcngcaaagcc

SEQ ID NO: 134021 - RNA, 22 nt, Artificial Sequence
  Synthetic
  misc_feature (14)..(14): n is a, c, g, or u
guguaaauggagcngcaaagcc

SEQ ID NO: 134022 - RNA, 23 nt, Artificial Sequence
  Synthetic
  misc_feature (15)..(15): n is a, c, g, or u
uguguaaauggagcngcaaagcc

SEQ ID NO: 134023 - RNA, 24 nt, Artificial Sequence
  Synthetic
  misc_feature (16)..(16): n is a, c, g, or u
uuguguaaauggagcngcaaagcc

SEQ ID NO: 134024 - RNA, 18 nt, Artificial Sequence
  Synthetic
agguauuuugcgaaagcc

SEQ ID NO: 134025 - RNA, 19 nt, Artificial Sequence
  Synthetic
uagguauuuugcgaaagcc

SEQ ID NO: 134026 - RNA, 20 nt, Artificial Sequence
  Synthetic
auagguauuuugcgaaagcc

SEQ ID NO: 134027 - RNA, 21 nt, Artificial Sequence
  Synthetic
cauagguauuuugcgaaagcc

SEQ ID NO: 134028 - RNA, 22 nt, Artificial Sequence
  Synthetic
ccauagguauuuugcgaaagcc

SEQ ID NO: 134029 - RNA, 23 nt, Artificial Sequence
  Synthetic
cccauagguauuuugcgaaagcc

SEQ ID NO: 134030 - RNA, 24 nt, Artificial Sequence
  Synthetic
ucccauagguauuuugcgaaagcc

SEQ ID NO: 134031 - RNA, 18 nt, Artificial Sequence
  Synthetic
  misc_feature (1)..(1): n is a, c, g, or u
  misc_feature (4)..(4): n is a, c, g, or u
naungccaagccccagcc

SEQ ID NO: 134032 - RNA, 19 nt, Artificial Sequence
  Synthetic
  misc_feature (2)..(2): n is a, c, g, or u
  misc_feature (5)..(5): n is a, c, g, or u
cnaungccaagccccagcc

SEQ ID NO: 134033 - RNA, 20 nt, Artificial Sequence
  Synthetic
  misc_feature (3)..(3): n is a, c, g, or u
  misc_feature (6)..(6): n is a, c, g, or u
ccnaungccaagccccagcc

SEQ ID NO: 134034 - RNA, 21 nt, Artificial Sequence
  Synthetic
  misc_feature (4)..(4): n is a, c, g, or u
  misc_feature (7)..(7): n is a, c, g, or u
gccnaungccaagccccagcc

SEQ ID NO: 134035 - RNA, 22 nt, Artificial Sequence
  Synthetic
  misc_feature (5)..(5): n is a, c, g, or u
  misc_feature (8)..(8): n is a, c, g, or u
ggccnaungccaagccccagcc

SEQ ID NO: 134036 - RNA, 23 nt, Artificial Sequence
  Synthetic
  misc_feature (6)..(6): n is a, c, g, or u
  misc_feature (9)..(9): n is a, c, g, or u
uggccnaungccaagccccagcc

SEQ ID NO: 134037 - RNA, 24 nt, Artificial Sequence
  Synthetic
  misc_feature (7)..(7): n is a, c, g, or u
  misc_feature (10)..(10): n is a, c, g, or u
auggccnaungccaagccccagcc

SEQ ID NO: 134038 - RNA, 18 nt, Artificial Sequence
  Synthetic
  misc_feature (8)..(8): n is a, c, g, or u
caguacanccuagcagcc

SEQ ID NO: 134039 - RNA, 19 nt, Artificial Sequence
  Synthetic
  misc_feature (9)..(9): n is a, c, g, or u
gcaguacanccuagcagcc

SEQ ID NO: 134040 - RNA, 20 nt, Artificial Sequence
  Synthetic
  misc_feature (10)..(10): n is a, c, g, or u
ggcaguacanccuagcagcc

SEQ ID NO: 134041 - RNA, 21 nt, Artificial Sequence
  Synthetic
  misc_feature (11)..(11): n is a, c, g, or u
uggcaguacanccuagcagcc

SEQ ID NO: 134042 - RNA, 22 nt, Artificial Sequence
  Synthetic
  misc_feature (12)..(12): n is a, c, g, or u
uuggcaguacanccuagcagcc

SEQ ID NO: 134043 - RNA, 23 nt, Artificial Sequence
  Synthetic
  misc_feature (13)..(13): n is a, c, g, or u
guuggcaguacanccuagcagcc

SEQ ID NO: 134044 - RNA, 24 nt, Artificial Sequence
  Synthetic
  misc_feature (14)..(14): n is a, c, g, or u
aguuggcaguacanccuagcagcc

SEQ ID NO: 134045 - RNA, 18 nt, Artificial Sequence
  Synthetic
uggaucggcagaggagcc

SEQ ID NO: 134046 - RNA, 19 nt, Artificial Sequence
  Synthetic
auggaucggcagaggagcc

SEQ ID NO: 134047 - RNA, 20 nt, Artificial Sequence
  Synthetic
uauggaucggcagaggagcc

SEQ ID NO: 134048 - RNA, 21 nt, Artificial Sequence
  Synthetic
guauggaucggcagaggagcc

SEQ ID NO: 134049 - RNA, 22 nt, Artificial Sequence
  Synthetic
aguauggaucggcagaggagcc

SEQ ID NO: 134050 - RNA, 23 nt, Artificial Sequence
  Synthetic
caguauggaucggcagaggagcc

SEQ ID NO: 134051 - RNA, 24 nt, Artificial Sequence
  Synthetic
gcaguauggaucggcagaggagcc

SEQ ID NO: 134052 - RNA, 18 nt, Artificial Sequence
  Synthetic
uguuccugaacuggagcc

SEQ ID NO: 134053 - RNA, 19 nt, Artificial Sequence
  Synthetic
  misc_feature (1)..(1): n is a, c, g, or u
nuguuccugaacuggagcc

SEQ ID NO: 134054 - RNA, 20 nt, Artificial Sequence
  Synthetic
  misc_feature (2)..(2): n is a, c, g, or u
anuguuccugaacuggagcc

SEQ ID NO: 134055 - RNA, 21 nt, Artificial Sequence
  Synthetic
  misc_feature (1)..(1): n is a, c, g, or u
  misc_feature (3)..(3): n is a, c, g, or u
nanuguuccugaacuggagcc

SEQ ID NO: 134056 - RNA, 22 nt, Artificial Sequence
  Synthetic
  misc_feature (2)..(2): n is a, c, g, or u
  misc_feature (4)..(4): n is a, c, g, or u
unanuguuccugaacuggagcc

SEQ ID NO: 134057 - RNA, 23 nt, Artificial Sequence
  Synthetic
  misc_feature (3)..(3): n is a, c, g, or u
  misc_feature (5)..(5): n is a, c, g, or u
uunanuguuccugaacuggagcc

SEQ ID NO: 134058 - RNA, 24 nt, Artificial Sequence
  Synthetic
  misc_feature (4)..(4): n is a, c, g, or u
  misc_feature (6)..(6): n is a, c, g, or u
guunanuguuccugaacuggagcc

SEQ ID NO: 134059 - RNA, 18 nt, Artificial Sequence
  Synthetic
gcacuaguaaacugagcc

SEQ ID NO: 134060 - RNA, 19 nt, Artificial Sequence
  Synthetic
ggcacuaguaaacugagcc

SEQ ID NO: 134061 - RNA, 20 nt, Artificial Sequence
  Synthetic
uggcacuaguaaacugagcc

SEQ ID NO: 134062 - RNA, 21 nt, Artificial Sequence
  Synthetic
auggcacuaguaaacugagcc

SEQ ID NO: 134063 - RNA, 22 nt, Artificial Sequence
  Synthetic
aauggcacuaguaaacugagcc

SEQ ID NO: 134064 - RNA, 23 nt, Artificial Sequence
  Synthetic
aaauggcacuaguaaacugagcc

SEQ ID NO: 134065 - RNA, 24 nt, Artificial Sequence
  Synthetic
caaauggcacuaguaaacugagcc

SEQ ID NO: 134066 - RNA, 18 nt, Artificial Sequence
  Synthetic
  misc_feature (2)..(2): n is a, c, g, or u
gncaauaugcccugagcc

SEQ ID NO: 134067 - RNA, 19 nt, Artificial Sequence
  Synthetic
  misc_feature (1)..(1): n is a, c, g, or u
  misc_feature (3)..(3): n is a, c, g, or u
ngncaauaugcccugagcc

SEQ ID NO: 134068 - RNA, 20 nt, Artificial Sequence
  Synthetic
  misc_feature (2)..(2): n is a, c, g, or u
  misc_feature (4)..(4): n is a, c, g, or u
ungncaauaugcccugagcc

SEQ ID NO: 134069 - RNA, 21 nt, Artificial Sequence
  Synthetic
  misc_feature (3)..(3): n is a, c, g, or u
  misc_feature (5)..(5): n is a, c, g, or u
gungncaauaugcccugagcc

SEQ ID NO: 134070 - RNA, 22 nt, Artificial Sequence
  Synthetic
  misc_feature (4)..(4): n is a, c, g, or u
  misc_feature (6)..(6): n is a, c, g, or u
ugungncaauaugcccugagcc

SEQ ID NO: 134071 - RNA, 23 nt, Artificial Sequence
  Synthetic
  misc_feature (5)..(5): n is a, c, g, or u
  misc_feature (7)..(7): n is a, c, g, or u
cugungncaauaugcccugagcc

SEQ ID NO: 134072 - RNA, 24 nt, Artificial Sequence
  Synthetic
  misc_feature (6)..(6): n is a, c, g, or u
  misc_feature (8)..(8): n is a, c, g, or u
acugungncaauaugcccugagcc

SEQ ID NO: 134073 - RNA, 18 nt, Artificial Sequence
  Synthetic
ggaauaugauaaaacgcc

SEQ ID NO: 134074 - RNA, 19 nt, Artificial Sequence
  Synthetic
aggaauaugauaaaacgcc

SEQ ID NO: 134075 - RNA, 20 nt, Artificial Sequence
  Synthetic
gaggaauaugauaaaacgcc

SEQ ID NO: 134076 - RNA, 21 nt, Artificial Sequence
  Synthetic
agaggaauaugauaaaacgcc

SEQ ID NO: 134077 - RNA, 22 nt, Artificial Sequence
  Synthetic
aagaggaauaugauaaaacgcc

SEQ ID NO: 134078 - RNA, 23 nt, Artificial Sequence
  Synthetic
gaagaggaauaugauaaaacgcc

SEQ ID NO: 134079 - RNA, 24 nt, Artificial Sequence
  Synthetic
ugaagaggaauaugauaaaacgcc

SEQ ID NO: 134080 - RNA, 18 nt, Artificial Sequence
  Synthetic
aacaagaaaaaccccgcc

SEQ ID NO: 134081 - RNA, 19 nt, Artificial Sequence
  Synthetic
caacaagaaaaaccccgcc

SEQ ID NO: 134082 - RNA, 20 nt, Artificial Sequence
  Synthetic
ucaacaagaaaaaccccgcc

SEQ ID NO: 134083 - RNA, 21 nt, Artificial Sequence
  Synthetic
gucaacaagaaaaaccccgcc

SEQ ID NO: 134084 - RNA, 22 nt, Artificial Sequence
  Synthetic
ugucaacaagaaaaaccccgcc

SEQ ID NO: 134085 - RNA, 23 nt, Artificial Sequence
  Synthetic
uugucaacaagaaaaaccccgcc

SEQ ID NO: 134086 - RNA, 24 nt, Artificial Sequence
  Synthetic
cuugucaacaagaaaaaccccgcc

SEQ ID NO: 134087 - RNA, 18 nt, Artificial Sequence
  Synthetic
uccgcgggauucagcgcc

SEQ ID NO: 134088 - RNA, 19 nt, Artificial Sequence
  Synthetic
guccgcgggauucagcgcc

SEQ ID NO: 134089 - RNA, 20 nt, Artificial Sequence
  Synthetic
cguccgcgggauucagcgcc

SEQ ID NO: 134090 - RNA, 21 nt, Artificial Sequence
  Synthetic
ucguccgcgggauucagcgcc

SEQ ID NO: 134091 - RNA, 22 nt, Artificial Sequence
  Synthetic
gucguccgcgggauucagcgcc

SEQ ID NO: 134092 - RNA, 23 nt, Artificial Sequence
  Synthetic
ggucguccgcgggauucagcgcc

SEQ ID NO: 134093 - RNA, 24 nt, Artificial Sequence
  Synthetic
gggucguccgcgggauucagcgcc

SEQ ID NO: 134094 - RNA, 18 nt, Artificial Sequence
  Synthetic
cagucuuugaaguaggcc

SEQ ID NO: 134095 - RNA, 19 nt, Artificial Sequence
  Synthetic
acagucuuugaaguaggcc

SEQ ID NO: 134096 - RNA, 20 nt, Artificial Sequence
  Synthetic
cacagucuuugaaguaggcc

SEQ ID NO: 134097 - RNA, 21 nt, Artificial Sequence
  Synthetic
acacagucuuugaaguaggcc

SEQ ID NO: 134098 - RNA, 22 nt, Artificial Sequence
  Synthetic
cacacagucuuugaaguaggcc

SEQ ID NO: 134099 - RNA, 23 nt, Artificial Sequence
  Synthetic
acacacagucuuugaaguaggcc

SEQ ID NO: 134100 - RNA, 24 nt, Artificial Sequence
  Synthetic
aacacacagucuuugaaguaggcc

SEQ ID NO: 134101 - RNA, 18 nt, Artificial Sequence
  Synthetic
auuuacagugagagggcc

SEQ ID NO: 134102 - RNA, 19 nt, Artificial Sequence
  Synthetic
cauuuacagugagagggcc

SEQ ID NO: 134103 - RNA, 20 nt, Artificial Sequence
  Synthetic
ucauuuacagugagagggcc

SEQ ID NO: 134104 - RNA, 21 nt, Artificial Sequence
  Synthetic
uucauuuacagugagagggcc

SEQ ID NO: 134105 - RNA, 22 nt, Artificial Sequence
  Synthetic
uuucauuuacagugagagggcc

SEQ ID NO: 134106 - RNA, 23 nt, Artificial Sequence
  Synthetic
uuuucauuuacagugagagggcc

SEQ ID NO: 134107 - RNA, 24 nt, Artificial Sequence
  Synthetic
  misc_feature (1)..(1): n is a, c, g, or u
nuuuucauuuacagugagagggcc

SEQ ID NO: 134108 - RNA, 18 nt, Artificial Sequence
  Synthetic
agggucaauguccaugcc

SEQ ID NO: 134109 - RNA, 19 nt, Artificial Sequence
  Synthetic
aagggucaauguccaugcc

SEQ ID NO: 134110 - RNA, 20 nt, Artificial Sequence
  Synthetic
uaagggucaauguccaugcc

SEQ ID NO: 134111 - RNA, 21 nt, Artificial Sequence
  Synthetic
auaagggucaauguccaugcc

SEQ ID NO: 134112 - RNA, 22 nt, Artificial Sequence
  Synthetic
uauaagggucaauguccaugcc

SEQ ID NO: 134113 - RNA, 23 nt, Artificial Sequence
  Synthetic
uuauaagggucaauguccaugcc

SEQ ID NO: 134114 - RNA, 24 nt, Artificial Sequence
  Synthetic
uuuauaagggucaauguccaugcc

SEQ ID NO: 134115 - RNA, 18 nt, Artificial Sequence
  Synthetic
  misc_feature (7)..(7): n is a, c, g, or u
  misc_feature (9)..(9): n is a, c, g, or u
cacugungncaauaugcc

SEQ ID NO: 134116 - RNA, 19 nt, Artificial Sequence
  Synthetic
  misc_feature (1)..(1): n is a, c, g, or u
  misc_feature (8)..(8): n is a, c, g, or u
  misc_feature (10)..(10): n is a, c, g, or u
ncacugungncaauaugcc

SEQ ID NO: 134117 - RNA, 20 nt, Artificial Sequence
  Synthetic
  misc_feature (2)..(2): n is a, c, g, or u
  misc_feature (9)..(9): n is a, c, g, or u
  misc_feature (11)..(11): n is a, c, g, or u
gncacugungncaauaugcc

SEQ ID NO: 134118 - RNA, 21 nt, Artificial Sequence
  Synthetic
  misc_feature (3)..(3): n is a, c, g, or u
  misc_feature (10)..(10): n is a, c, g, or u
  misc_feature (12)..(12): n is a, c, g, or u
ugncacugungncaauaugcc

SEQ ID NO: 134119 - RNA, 22 nt, Artificial Sequence
  Synthetic
  misc_feature (1)..(1): n is a, c, g, or u
  misc_feature (4)..(4): n is a, c, g, or u
  misc_feature (11)..(11): n is a, c, g, or u
  misc_feature (13)..(13): n is a, c, g, or u
nugncacugungncaauaugcc

SEQ ID NO: 134120 - RNA, 23 nt, Artificial Sequence
  Synthetic
  misc_feature (2)..(2): n is a, c, g, or u
  misc_feature (5)..(5): n is a, c, g, or u
  misc_feature (12)..(12): n is a, c, g, or u
  misc_feature (14)..(14): n is a, c, g, or u
gnugncacugungncaauaugcc

SEQ ID NO: 134121 - RNA, 24 nt, Artificial Sequence
  Synthetic
  misc_feature (3)..(3): n is a, c, g, or u
  misc_feature (6)..(6): n is a, c, g, or u
  misc_feature (13)..(13): n is a, c, g, or u
  misc_feature (15)..(15): n is a, c, g, or u
ugnugncacugungncaauaugcc

SEQ ID NO: 134122 - RNA, 18 nt, Artificial Sequence
  Synthetic
  misc_feature (14)..(14): n is a, c, g, or u
cgcagaccaauuunugcc

SEQ ID NO: 134123 - RNA, 19 nt, Artificial Sequence
  Synthetic
  misc_feature (15)..(15): n is a, c, g, or u
gcgcagaccaauuunugcc

SEQ ID NO: 134124 - RNA, 20 nt, Artificial Sequence
  Synthetic
  misc_feature (16)..(16): n is a, c, g, or u
ugcgcagaccaauuunugcc

SEQ ID NO: 134125 - RNA, 21 nt, Artificial Sequence
  Synthetic
  misc_feature (17)..(17): n is a, c, g, or u
gugcgcagaccaauuunugcc

SEQ ID NO: 134126 - RNA, 22 nt, Artificial Sequence
  Synthetic
  misc_feature (18)..(18): n is a, c, g, or u
ggugcgcagaccaauuunugcc

SEQ ID NO: 134127 - RNA, 23 nt, Artificial Sequence
  Synthetic
  misc_feature (19)..(19): n is a, c, g, or u
uggugcgcagaccaauuunugcc

SEQ ID NO: 134128 - RNA, 24 nt, Artificial Sequence
  Synthetic
  misc_feature (1)..(1): n is a, c, g, or u
  misc_feature (20)..(20): n is a, c, g, or u
nuggugcgcagaccaauuunugcc

SEQ ID NO: 134129 - RNA, 18 nt, Artificial Sequence
  Synthetic
gggaaacauagaguugcc

SEQ ID NO: 134130 - RNA, 19 nt, Artificial Sequence
  Synthetic
agggaaacauagaguugcc

SEQ ID NO: 134131 - RNA, 20 nt, Artificial Sequence
  Synthetic
gagggaaacauagaguugcc

SEQ ID NO: 134132 - RNA, 21 nt, Artificial Sequence
  Synthetic
ugagggaaacauagaguugcc

SEQ ID NO: 134133 - RNA, 22 nt, Artificial Sequence
  Synthetic
augagggaaacauagaguugcc

SEQ ID NO: 134134 - RNA, 23 nt, Artificial Sequence
  Synthetic
caugagggaaacauagaguugcc

SEQ ID NO: 134135 - RNA, 24 nt, Artificial Sequence
  Synthetic
acaugagggaaacauagaguugcc

SEQ ID NO: 134136 - RNA, 18 nt, Artificial Sequence
  Synthetic
  misc_feature (12)..(13): n is a, c, g, or u
  misc_feature (16)..(16): n is a, c, g, or u
acuuccaauuannuancc

SEQ ID NO: 134137 - RNA, 19 nt, Artificial Sequence
  Synthetic
  misc_feature (13)..(14): n is a, c, g, or u
  misc_feature (17)..(17): n is a, c, g, or u
aacuuccaauuannuancc

SEQ ID NO: 134138 - RNA, 20 nt, Artificial Sequence
  Synthetic
  misc_feature (14)..(15): n is a, c, g, or u
  misc_feature (18)..(18): n is a, c, g, or u
caacuuccaauuannuancc

SEQ ID NO: 134139 - RNA, 21 nt, Artificial Sequence
  Synthetic
  misc_feature (15)..(16): n is a, c, g, or u
  misc_feature (19)..(19): n is a, c, g, or u
ccaacuuccaauuannuancc

SEQ ID NO: 134140 - RNA, 22 nt, Artificial Sequence
  Synthetic
  misc_feature (16)..(17): n is a, c, g, or u
  misc_feature (20)..(20): n is a, c, g, or u
cccaacuuccaauuannuancc

SEQ ID NO: 134141 - RNA, 23 nt, Artificial Sequence
  Synthetic
  misc_feature (17)..(18): n is a, c, g, or u
  misc_feature (21)..(21): n is a, c, g, or u
ccccaacuuccaauuannuancc

SEQ ID NO: 134142 - RNA, 24 nt, Artificial Sequence
  Synthetic
  misc_feature (1)..(1): n is a, c, g, or u
  misc_feature (18)..(19): n is a, c, g, or u
  misc_feature (22)..(22): n is a, c, g, or u
nccccaacuuccaauuannuancc

SEQ ID NO: 134143 - RNA, 18 nt, Artificial Sequence
  Synthetic
  misc_feature (16)..(16): n is a, c, g, or u
agcaggaaaauacagncc

SEQ ID NO: 134144 - RNA, 19 nt, Artificial Sequence
  Synthetic
  misc_feature (17)..(17): n is a, c, g, or u
cagcaggaaaauacagncc

SEQ ID NO: 134145 - RNA, 20 nt, Artificial Sequence
  Synthetic
  misc_feature (18)..(18): n is a, c, g, or u
ccagcaggaaaauacagncc

SEQ ID NO: 134146 - RNA, 21 nt, Artificial Sequence
  Synthetic
  misc_feature (19)..(19): n is a, c, g, or u
accagcaggaaaauacagncc

SEQ ID NO: 134147 - RNA, 22 nt, Artificial Sequence
  Synthetic
  misc_feature (20)..(20): n is a, c, g, or u
caccagcaggaaaauacagncc

SEQ ID NO: 134148 - RNA, 23 nt, Artificial Sequence
  Synthetic
  misc_feature (21)..(21): n is a, c, g, or u
ccaccagcaggaaaauacagncc

SEQ ID NO: 134149 - RNA, 24 nt, Artificial Sequence
  Synthetic
  misc_feature (22)..(22): n is a, c, g, or u
gccaccagcaggaaaauacagncc

SEQ ID NO: 134150 - RNA, 18 nt, Artificial Sequence
  Synthetic
  misc_feature (10)..(10): n is a, c, g, or u
  misc_feature (16)..(16): n is a, c, g, or u
gacagaauunucaguncc

SEQ ID NO: 134151 - RNA, 19 nt, Artificial Sequence
  Synthetic
  misc_feature (11)..(11): n is a, c, g, or u
  misc_feature (17)..(17): n is a, c, g, or u
cgacagaauunucaguncc

SEQ ID NO: 134152 - RNA, 20 nt, Artificial Sequence
  Synthetic
  misc_feature (12)..(12): n is a, c, g, or u
  misc_feature (18)..(18): n is a, c, g, or u
acgacagaauunucaguncc

SEQ ID NO: 134153 - RNA, 21 nt, Artificial Sequence
  Synthetic
  misc_feature (13)..(13): n is a, c, g, or u
  misc_feature (19)..(19): n is a, c, g, or u
gacgacagaauunucaguncc

SEQ ID NO: 134154 - RNA, 22 nt, Artificial Sequence
  Synthetic
  misc_feature (14)..(14): n is a, c, g, or u
  misc_feature (20)..(20): n is a, c, g, or u
ggacgacagaauunucaguncc

SEQ ID NO: 134155 - RNA, 23 nt, Artificial Sequence
  Synthetic
  misc_feature (15)..(15): n is a, c, g, or u
  misc_feature (21)..(21): n is a, c, g, or u
aggacgacagaauunucaguncc

SEQ ID NO: 134156 - RNA, 24 nt, Artificial Sequence
  Synthetic
  misc_feature (1)..(1): n is a, c, g, or u
  misc_feature (16)..(16): n is a, c, g, or u
  misc_feature (22)..(22): n is a, c, g, or u
naggacgacagaauunucaguncc

SEQ ID NO: 134157 - RNA, 18 nt, Artificial Sequence
  Synthetic
augaucgggaaagaaucc

SEQ ID NO: 134158 - RNA, 19 nt, Artificial Sequence
  Synthetic
gaugaucgggaaagaaucc

SEQ ID NO: 134159 - RNA, 20 nt, Artificial Sequence
  Synthetic
ugaugaucgggaaagaaucc

SEQ ID NO: 134160 - RNA, 21 nt, Artificial Sequence
  Synthetic
cugaugaucgggaaagaaucc

SEQ ID NO: 134161 - RNA, 22 nt, Artificial Sequence
  Synthetic
acugaugaucgggaaagaaucc

SEQ ID NO: 134162 - RNA, 23 nt, Artificial Sequence
  Synthetic
aacugaugaucgggaaagaaucc

SEQ ID NO: 134163 - RNA, 24 nt, Artificial Sequence
  Synthetic
caacugaugaucgggaaagaaucc

SEQ ID NO: 134164 - RNA, 18 nt, Artificial Sequence
  Synthetic
aacauaccuugauaaucc

SEQ ID NO: 134165 - RNA, 19 nt, Artificial Sequence
  Synthetic
caacauaccuugauaaucc

SEQ ID NO: 134166 - RNA, 20 nt, Artificial Sequence
  Synthetic
gcaacauaccuugauaaucc

SEQ ID NO: 134167 - RNA, 21 nt, Artificial Sequence
  Synthetic
ggcaacauaccuugauaaucc

SEQ ID NO: 134168 - RNA, 22 nt, Artificial Sequence
  Synthetic
gggcaacauaccuugauaaucc

SEQ ID NO: 134169 - RNA, 23 nt, Artificial Sequence
  Synthetic
cgggcaacauaccuugauaaucc

SEQ ID NO: 134170 - RNA, 24 nt, Artificial Sequence
  Synthetic
acgggcaacauaccuugauaaucc

SEQ ID NO: 134171 - RNA, 18 nt, Artificial Sequence
  Synthetic
agugcgaauccacacucc

SEQ ID NO: 134172 - RNA, 19 nt, Artificial Sequence
  Synthetic
gagugcgaauccacacucc

SEQ ID NO: 134173 - RNA, 20 nt, Artificial Sequence
  Synthetic
ggagugcgaauccacacucc

SEQ ID NO: 134174 - RNA, 21 nt, Artificial Sequence
  Synthetic
aggagugcgaauccacacucc

SEQ ID NO: 134175 - RNA, 22 nt, Artificial Sequence
  Synthetic
gaggagugcgaauccacacucc

SEQ ID NO: 134176 - RNA, 23 nt, Artificial Sequence
  Synthetic
ggaggagugcgaauccacacucc

SEQ ID NO: 134177 - RNA, 24 nt, Artificial Sequence
  Synthetic
uggaggagugcgaauccacacucc

SEQ ID NO: 134178 - RNA, 18 nt, Artificial Sequence
  Synthetic
cggacugaggcccacucc

SEQ ID NO: 134179 - RNA, 19 nt, Artificial Sequence
  Synthetic
acggacugaggcccacucc

SEQ ID NO: 134180 - RNA, 20 nt, Artificial Sequence
  Synthetic
aacggacugaggcccacucc

SEQ ID NO: 134181 - RNA, 21 nt, Artificial Sequence
  Synthetic
aaacggacugaggcccacucc

SEQ ID NO: 134182 - RNA, 22 nt, Artificial Sequence
  Synthetic
gaaacggacugaggcccacucc

SEQ ID NO: 134183 - RNA, 23 nt, Artificial Sequence
  Synthetic
agaaacggacugaggcccacucc

SEQ ID NO: 134184 - RNA, 24 nt, Artificial Sequence
  Synthetic
gagaaacggacugaggcccacucc

SEQ ID NO: 134185 - RNA, 18 nt, Artificial Sequence
  Synthetic
uucccaccuuaugagucc

SEQ ID NO: 134186 - RNA, 19 nt, Artificial Sequence
  Synthetic
uuucccaccuuaugagucc

SEQ ID NO: 134187 - RNA, 20 nt, Artificial Sequence
  Synthetic
  misc_feature (1)..(1): n is a, c, g, or u
nuuucccaccuuaugagucc

SEQ ID NO: 134188 - RNA, 21 nt, Artificial Sequence
  Synthetic
  misc_feature (2)..(2): n is a, c, g, or u
anuuucccaccuuaugagucc

SEQ ID NO: 134189 - RNA, 22 nt, Artificial Sequence
  Synthetic
  misc_feature (3)..(3): n is a, c, g, or u
aanuuucccaccuuaugagucc

SEQ ID NO: 134190 - RNA, 23 nt, Artificial Sequence
  Synthetic
  misc_feature (1)..(1): n is a, c, g, or u
  misc_feature (4)..(4): n is a, c, g, or u
naanuuucccaccuuaugagucc

SEQ ID NO: 134191 - RNA, 24 nt, Artificial Sequence
  Synthetic
  misc_feature (2)..(2): n is a, c, g, or u
  misc_feature (5)..(5): n is a, c, g, or u
unaanuuucccaccuuaugagucc

SEQ ID NO: 134192 - RNA, 18 nt, Artificial Sequence
  Synthetic
cguaaacaaaggacgucc

SEQ ID NO: 134193 - RNA, 19 nt, Artificial Sequence
  Synthetic
acguaaacaaaggacgucc

SEQ ID NO: 134194 - RNA, 20 nt, Artificial Sequence
  Synthetic
gacguaaacaaaggacgucc

SEQ ID NO: 134195 - RNA, 18 nt, Artificial Sequence
  Synthetic
  misc_feature (6)..(6): n is a, c, g, or u
ccccgngaggggucgucc

SEQ ID NO: 134196 - RNA, 19 nt, Artificial Sequence
  Synthetic
  misc_feature (7)..(7): n is a, c, g, or u
gccccgngaggggucgucc

SEQ ID NO: 134197 - RNA, 20 nt, Artificial Sequence
  Synthetic
  misc_feature (8)..(8): n is a, c, g, or u
ggccccgngaggggucgucc

SEQ ID NO: 134198 - RNA, 21 nt, Artificial Sequence
  Synthetic
  misc_feature (9)..(9): n is a, c, g, or u
cggccccgngaggggucgucc

SEQ ID NO: 134199 - RNA, 22 nt, Artificial Sequence
  Synthetic
  misc_feature (10)..(10): n is a, c, g, or u
gcggccccgngaggggucgucc

SEQ ID NO: 134200 - RNA, 23 nt, Artificial Sequence
  Synthetic
  misc_feature (11)..(11): n is a, c, g, or u
agcggccccgngaggggucgucc

SEQ ID NO: 134201 - RNA, 24 nt, Artificial Sequence
  Synthetic
  misc_feature (12)..(12): n is a, c, g, or u
aagcggccccgngaggggucgucc

SEQ ID NO: 134202 - RNA, 18 nt, Artificial Sequence
  Synthetic
uaacacgagcaggggucc

SEQ ID NO: 134203 - RNA, 19 nt, Artificial Sequence
  Synthetic
guaacacgagcaggggucc

SEQ ID NO: 134204 - RNA, 20 nt, Artificial Sequence
  Synthetic
uguaacacgagcaggggucc

SEQ ID NO: 134205 - RNA, 21 nt, Artificial Sequence
  Synthetic
cuguaacacgagcaggggucc

SEQ ID NO: 134206 - RNA, 22 nt, Artificial Sequence
  Synthetic
ccuguaacacgagcaggggucc

SEQ ID NO: 134207 - RNA, 23 nt, Artificial Sequence
  Synthetic
gccuguaacacgagcaggggucc

SEQ ID NO: 134208 - RNA, 24 nt, Artificial Sequence
  Synthetic
cgccuguaacacgagcaggggucc

SEQ ID NO: 134209 - RNA, 18 nt, Artificial Sequence
  Synthetic
  misc_feature (8)..(8): n is a, c, g, or u
auagaaunccagccuucc

SEQ ID NO: 134210 - RNA, 19 nt, Artificial Sequence
  Synthetic
  misc_feature (9)..(9): n is a, c, g, or u
uauagaaunccagccuucc

SEQ ID NO: 134211 - RNA, 20 nt, Artificial Sequence
  Synthetic
  misc_feature (10)..(10): n is a, c, g, or u
auauagaaunccagccuucc

SEQ ID NO: 134212 - RNA, 21 nt, Artificial Sequence
  Synthetic
  misc_feature (11)..(11): n is a, c, g, or u
uauauagaaunccagccuucc

SEQ ID NO: 134213 - RNA, 22 nt, Artificial Sequence
  Synthetic
  misc_feature (12)..(12): n is a, c, g, or u
uuauauagaaunccagccuucc

SEQ ID NO: 134214 - RNA, 23 nt, Artificial Sequence
  Synthetic
  misc_feature (13)..(13): n is a, c, g, or u
cuuauauagaaunccagccuucc

SEQ ID NO: 134215 - RNA, 24 nt, Artificial Sequence
  Synthetic
  misc_feature (14)..(14): n is a, c, g, or u
ucuuauauagaaunccagccuucc

SEQ ID NO: 134216 - RNA, 18 nt, Artificial Sequence
  Synthetic
  misc_feature (3)..(3): n is a, c, g, or u
ugnuguagcucuuguucc

SEQ ID NO: 134217 - RNA, 19 nt, Artificial Sequence
  Synthetic
  misc_feature (4)..(4): n is a, c, g, or u
augnuguagcucuuguucc

SEQ ID NO: 134218 - RNA, 20 nt, Artificial Sequence
  Synthetic
  misc_feature (5)..(5): n is a, c, g, or u
caugnuguagcucuuguucc

SEQ ID NO: 134219 - RNA, 21 nt, Artificial Sequence
  Synthetic
  misc_feature (6)..(6): n is a, c, g, or u
ccaugnuguagcucuuguucc

SEQ ID NO: 134220 - RNA, 22 nt, Artificial Sequence
  Synthetic
  misc_feature (7)..(7): n is a, c, g, or u
cccaugnuguagcucuuguucc

SEQ ID NO: 134221 - RNA, 23 nt, Artificial Sequence
  Synthetic
  misc_feature (8)..(8): n is a, c, g, or u
ucccaugnuguagcucuuguucc

SEQ ID NO: 134222 - RNA, 24 nt, Artificial Sequence
  Synthetic
  misc_feature (9)..(9): n is a, c, g, or u
cucccaugnuguagcucuuguucc

SEQ ID NO: 134223 - RNA, 18 nt, Artificial Sequence
  Synthetic
  misc_feature (11)..(11): n is a, c, g, or u
uaaauggagcngcaaagc

SEQ ID NO: 134224 - RNA, 19 nt, Artificial Sequence
  Synthetic
  misc_feature (12)..(12): n is a, c, g, or u
guaaauggagcngcaaagc

SEQ ID NO: 134225 - RNA, 20 nt, Artificial Sequence
  Synthetic
  misc_feature (13)..(13): n is a, c, g, or u
uguaaauggagcngcaaagc

SEQ ID NO: 134226 - RNA, 21 nt, Artificial Sequence
  Synthetic
  misc_feature (14)..(14): n is a, c, g, or u
guguaaauggagcngcaaagc

SEQ ID NO: 134227 - RNA, 22 nt, Artificial Sequence
  Synthetic
  misc_feature (15)..(15): n is a, c, g, or u
uguguaaauggagcngcaaagc

SEQ ID NO: 134228 - RNA, 23 nt, Artificial Sequence
  Synthetic
  misc_feature (16)..(16): n is a, c, g, or u
uuguguaaauggagcngcaaagc

SEQ ID NO: 134229 - RNA, 24 nt, Artificial Sequence
  Synthetic
  misc_feature (17)..(17): n is a, c, g, or u
auuguguaaauggagcngcaaagc

SEQ ID NO: 134230 - RNA, 18 nt, Artificial Sequence
  Synthetic
  misc_feature (8)..(8): n is a, c, g, or u
  misc_feature (11)..(11): n is a, c, g, or u
gauggccnaungccaagc

SEQ ID NO: 134231 - RNA, 19 nt, Artificial Sequence
  Synthetic
  misc_feature (9)..(9): n is a, c, g, or u
  misc_feature (12)..(12): n is a, c, g, or u
ugauggccnaungccaagc

SEQ ID NO: 134232 - RNA, 20 nt, Artificial Sequence
  Synthetic
  misc_feature (10)..(10): n is a, c, g, or u
  misc_feature (13)..(13): n is a, c, g, or u
cugauggccnaungccaagc

SEQ ID NO: 134233 - RNA, 21 nt, Artificial Sequence
  Synthetic
  misc_feature (11)..(11): n is a, c, g, or u
  misc_feature (14)..(14): n is a, c, g, or u
gcugauggccnaungccaagc

SEQ ID NO: 134234 - RNA, 22 nt, Artificial Sequence
  Synthetic
  misc_feature (12)..(12): n is a, c, g, or u
  misc_feature (15)..(15): n is a, c, g, or u
cgcugauggccnaungccaagc

SEQ ID NO: 134235 - RNA, 23 nt, Artificial Sequence
  Synthetic
  misc_feature (13)..(13): n is a, c, g, or u
  misc_feature (16)..(16): n is a, c, g, or u
gcgcugauggccnaungccaagc

SEQ ID NO: 134236 - RNA, 24 nt, Artificial Sequence
  Synthetic
  misc_feature (14)..(14): n is a, c, g, or u
  misc_feature (17)..(17): n is a, c, g, or u
ugcgcugauggccnaungccaagc

SEQ ID NO: 134237 - RNA, 18 nt, Artificial Sequence
  Synthetic
  misc_feature (6)..(6): n is a, c, g, or u
agccanccaaggcacagc

SEQ ID NO: 134238 - RNA, 19 nt, Artificial Sequence
  Synthetic
  misc_feature (7)..(7): n is a, c, g, or u
aagccanccaaggcacagc

SEQ ID NO: 134239 - RNA, 20 nt, Artificial Sequence
  Synthetic
  misc_feature (8)..(8): n is a, c, g, or u
aaagccanccaaggcacagc

SEQ ID NO: 134240 - RNA, 21 nt, Artificial Sequence
  Synthetic
  misc_feature (9)..(9): n is a, c, g, or u
caaagccanccaaggcacagc

SEQ ID NO: 134241 - RNA, 22 nt, Artificial Sequence
  Synthetic
  misc_feature (10)..(10): n is a, c, g, or u
ccaaagccanccaaggcacagc

SEQ ID NO: 134242 - RNA, 23 nt, Artificial Sequence
  Synthetic
  misc_feature (11)..(11): n is a, c, g, or u
cccaaagccanccaaggcacagc

SEQ ID NO: 134243 - RNA, 24 nt, Artificial Sequence
  Synthetic
  misc_feature (12)..(12): n is a, c, g, or u
ccccaaagccanccaaggcacagc

SEQ ID NO: 134244 - RNA, 18 nt, Artificial Sequence
  Synthetic
ugaacuggagccaccagc

SEQ ID NO: 134245 - RNA, 19 nt, Artificial Sequence
  Synthetic
cugaacuggagccaccagc

SEQ ID NO: 134246 - RNA, 20 nt, Artificial Sequence
  Synthetic
ccugaacuggagccaccagc

SEQ ID NO: 134247 - RNA, 21 nt, Artificial Sequence
  Synthetic
uccugaacuggagccaccagc

SEQ ID NO: 134248 - RNA, 22 nt, Artificial Sequence
  Synthetic
uuccugaacuggagccaccagc

SEQ ID NO: 134249 - RNA, 23 nt, Artificial Sequence
  Synthetic
guuccugaacuggagccaccagc

SEQ ID NO: 134250 - RNA, 24 nt, Artificial Sequence
  Synthetic
uguuccugaacuggagccaccagc

SEQ ID NO: 134251 - RNA, 18 nt, Artificial Sequence
  Synthetic
  misc_feature (5)..(5): n is a, c, g, or u
ucaunaauuccccccagc

SEQ ID NO: 134252 - RNA, 19 nt, Artificial Sequence
  Synthetic
  misc_feature (6)..(6): n is a, c, g, or u
gucaunaauuccccccagc

SEQ ID NO: 134253 - RNA, 20 nt, Artificial Sequence
  Synthetic
  misc_feature (7)..(7): n is a, c, g, or u
agucaunaauuccccccagc

SEQ ID NO: 134254 - RNA, 21 nt, Artificial Sequence
  Synthetic
  misc_feature (8)..(8): n is a, c, g, or u
gagucaunaauuccccccagc

SEQ ID NO: 134255 - RNA, 22 nt, Artificial Sequence
  Synthetic
  misc_feature (9)..(9): n is a, c, g, or u
agagucaunaauuccccccagc

SEQ ID NO: 134256 - RNA, 23 nt, Artificial Sequence
  Synthetic
  misc_feature (10)..(10): n is a, c, g, or u
uagagucaunaauuccccccagc

SEQ ID NO: 134257 - RNA, 24 nt, Artificial Sequence
  Synthetic
  misc_feature (11)..(11): n is a, c, g, or u
cuagagucaunaauuccccccagc

SEQ ID NO: 134258 - RNA, 18 nt, Artificial Sequence
  Synthetic
gccgcagacacauccagc

SEQ ID NO: 134259 - RNA, 19 nt, Artificial Sequence
  Synthetic
cgccgcagacacauccagc

SEQ ID NO: 134260 - RNA, 20 nt, Artificial Sequence
  Synthetic
acgccgcagacacauccagc

SEQ ID NO: 134261 - RNA, 21 nt, Artificial Sequence
  Synthetic
aacgccgcagacacauccagc

SEQ ID NO: 134262 - RNA, 22 nt, Artificial Sequence
  Synthetic
aaacgccgcagacacauccagc

SEQ ID NO: 134263 - RNA, 23 nt, Artificial Sequence
  Synthetic
aaaacgccgcagacacauccagc

SEQ ID NO: 134264 - RNA, 24 nt, Artificial Sequence
  Synthetic
uaaaacgccgcagacacauccagc

SEQ ID NO: 134265 - RNA, 18 nt, Artificial Sequence
  Synthetic
  misc_feature (9)..(9): n is a, c, g, or u
gcaguacanccuagcagc

SEQ ID NO: 134266 - RNA, 19 nt, Artificial Sequence
  Synthetic
  misc_feature (10)..(10): n is a, c, g, or u
ggcaguacanccuagcagc

SEQ ID NO: 134267 - RNA, 20 nt, Artificial Sequence
  Synthetic
  misc_feature (11)..(11): n is a, c, g, or u
uggcaguacanccuagcagc

SEQ ID NO: 134268 - RNA, 21 nt, Artificial Sequence
  Synthetic
  misc_feature (12)..(12): n is a, c, g, or u
uuggcaguacanccuagcagc

SEQ ID NO: 134269 - RNA, 22 nt, Artificial Sequence
  Synthetic
  misc_feature (13)..(13): n is a, c, g, or u
guuggcaguacanccuagcagc

SEQ ID NO: 134270 - RNA, 23 nt, Artificial Sequence
  Synthetic
  misc_feature (14)..(14): n is a, c, g, or u
aguuggcaguacanccuagcagc

SEQ ID NO: 134271 - RNA, 24 nt, Artificial Sequence
  Synthetic
  misc_feature (15)..(15): n is a, c, g, or u
caguuggcaguacanccuagcagc

SEQ ID NO: 134272 - RNA, 18 nt, Artificial Sequence
  Synthetic
ucguccgcgggauucagc

SEQ ID NO: 134273 - RNA, 19 nt, Artificial Sequence
  Synthetic
gucguccgcgggauucagc

SEQ ID NO: 134274 - RNA, 20 nt, Artificial Sequence
  Synthetic
ggucguccgcgggauucagc

SEQ ID NO: 134275 - RNA, 21 nt, Artificial Sequence
  Synthetic
gggucguccgcgggauucagc

SEQ ID NO: 134276 - RNA, 22 nt, Artificial Sequence
  Synthetic
ggggucguccgcgggauucagc

SEQ ID NO: 134277 - RNA, 23 nt, Artificial Sequence
  Synthetic
aggggucguccgcgggauucagc

SEQ ID NO: 134278 - RNA, 24 nt, Artificial Sequence
  Synthetic
gaggggucguccgcgggauucagc

SEQ ID NO: 134279 - RNA, 18 nt, Artificial Sequence
  Synthetic
  misc_feature (7)..(7): n is a, c, g, or u
ggcuucncgauacagagc

SEQ ID NO: 134280 - RNA, 19 nt, Artificial Sequence
  Synthetic
  misc_feature (8)..(8): n is a, c, g, or u
aggcuucncgauacagagc

SEQ ID NO: 134281 - RNA, 20 nt, Artificial Sequence
  Synthetic
  misc_feature (9)..(9): n is a, c, g, or u
aaggcuucncgauacagagc

SEQ ID NO: 134282 - RNA, 21 nt, Artificial Sequence
  Synthetic
  misc_feature (10)..(10): n is a, c, g, or u
uaaggcuucncgauacagagc

SEQ ID NO: 134283 - RNA, 22 nt, Artificial Sequence
  Synthetic
  misc_feature (11)..(11): n is a, c, g, or u
cuaaggcuucncgauacagagc

SEQ ID NO: 134284 - RNA, 23 nt, Artificial Sequence
  Synthetic
  misc_feature (12)..(12): n is a, c, g, or u
ucuaaggcuucncgauacagagc

SEQ ID NO: 134285 - RNA, 24 nt, Artificial Sequence
  Synthetic
  misc_feature (13)..(13): n is a, c, g, or u
cucuaaggcuucncgauacagagc

SEQ ID NO: 134286 - RNA, 18 nt, Artificial Sequence
  Synthetic
auggaucggcagaggagc

SEQ ID NO: 134287 - RNA, 19 nt, Artificial Sequence
  Synthetic
uauggaucggcagaggagc

SEQ ID NO: 134288 - RNA, 20 nt, Artificial Sequence
  Synthetic
guauggaucggcagaggagc

SEQ ID NO: 134289 - RNA, 21 nt, Artificial Sequence
  Synthetic
aguauggaucggcagaggagc

SEQ ID NO: 134290 - RNA, 22 nt, Artificial Sequence
  Synthetic
caguauggaucggcagaggagc

SEQ ID NO: 134291 - RNA, 23 nt, Artificial Sequence
  Synthetic
gcaguauggaucggcagaggagc

SEQ ID NO: 134292 - RNA, 24 nt, Artificial Sequence
  Synthetic
cgcaguauggaucggcagaggagc

SEQ ID NO: 134293 - RNA, 18 nt, Artificial Sequence
  Synthetic
acauuguguaaauggagc

SEQ ID NO: 134294 - RNA, 19 nt, Artificial Sequence
  Synthetic
cacauuguguaaauggagc

SEQ ID NO: 134295 - RNA, 20 nt, Artificial Sequence
  Synthetic
ccacauuguguaaauggagc

SEQ ID NO: 134296 - RNA, 21 nt, Artificial Sequence
  Synthetic
  misc_feature (1)..(1): n is a, c, g, or u
nccacauuguguaaauggagc

SEQ ID NO: 134297 - RNA, 22 nt, Artificial Sequence
  Synthetic
  misc_feature (2)..(2): n is a, c, g, or u
anccacauuguguaaauggagc

SEQ ID NO: 134298 - RNA, 23 nt, Artificial Sequence
  Synthetic
  misc_feature (3)..(3): n is a, c, g, or u
uanccacauuguguaaauggagc

SEQ ID NO: 134299 - RNA, 24 nt, Artificial Sequence
  Synthetic
  misc_feature (1)..(1): n is a, c, g, or u
  misc_feature (4)..(4): n is a, c, g, or u
nuanccacauuguguaaauggagc

SEQ ID NO: 134300 - RNA, 18 nt, Artificial Sequence
  Synthetic
ggcacuaguaaacugagc

SEQ ID NO: 134301 - RNA, 19 nt, Artificial Sequence
  Synthetic
uggcacuaguaaacugagc

SEQ ID NO: 134302 - RNA, 20 nt, Artificial Sequence
  Synthetic
auggcacuaguaaacugagc

SEQ ID NO: 134303 - RNA, 21 nt, Artificial Sequence
  Synthetic
aauggcacuaguaaacugagc

SEQ ID NO: 134304 - RNA, 22 nt, Artificial Sequence
  Synthetic
aaauggcacuaguaaacugagc

SEQ ID NO: 134305 - RNA, 23 nt, Artificial Sequence
  Synthetic
caaauggcacuaguaaacugagc

SEQ ID NO: 134306 - RNA, 24 nt, Artificial Sequence
  Synthetic
acaaauggcacuaguaaacugagc

SEQ ID NO: 134307 - RNA, 18 nt, Artificial Sequence
  Synthetic
  misc_feature (1)..(1): n is a, c, g, or u
  misc_feature (3)..(3): n is a, c, g, or u
ngncaauaugcccugagc

SEQ ID NO: 134308 - RNA, 19 nt, Artificial Sequence
  Synthetic
  misc_feature (2)..(2): n is a, c, g, or u
  misc_feature (4)..(4): n is a, c, g, or u
ungncaauaugcccugagc

SEQ ID NO: 134309 - RNA, 20 nt, Artificial Sequence
  Synthetic
  misc_feature (3)..(3): n is a, c, g, or u
  misc_feature (5)..(5): n is a, c, g, or u
gungncaauaugcccugagc

SEQ ID NO: 134310 - RNA, 21 nt, Artificial Sequence
  Synthetic
  misc_feature (4)..(4): n is a, c, g, or u
  misc_feature (6)..(6): n is a, c, g, or u
ugungncaauaugcccugagc

SEQ ID NO: 134311 - RNA, 22 nt, Artificial Sequence
  Synthetic
  misc_feature (5)..(5): n is a, c, g, or u
  misc_feature (7)..(7): n is a, c, g, or u
cugungncaauaugcccugagc

SEQ ID NO: 134312 - RNA, 23 nt, Artificial Sequence
  Synthetic
  misc_feature (6)..(6): n is a, c, g, or u
  misc_feature (8)..(8): n is a, c, g, or u
acugungncaauaugcccugagc

SEQ ID NO: 134313 - RNA, 24 nt, Artificial Sequence
  Synthetic
  misc_feature (7)..(7): n is a, c, g, or u
  misc_feature (9)..(9): n is a, c, g, or u
cacugungncaauaugcccugagc

SEQ ID NO: 134314 - RNA, 18 nt, Artificial Sequence
  Synthetic
aagaagaugaggcauagc

SEQ ID NO: 134315 - RNA, 19 nt, Artificial Sequence
  Synthetic
uaagaagaugaggcauagc

SEQ ID NO: 134316 - RNA, 20 nt, Artificial Sequence
  Synthetic
auaagaagaugaggcauagc

SEQ ID NO: 134317 - RNA, 21 nt, Artificial Sequence
  Synthetic
aauaagaagaugaggcauagc

SEQ ID NO: 134318 - RNA, 22 nt, Artificial Sequence
  Synthetic
caauaagaagaugaggcauagc

SEQ ID NO: 134319 - RNA, 23 nt, Artificial Sequence
  Synthetic
ccaauaagaagaugaggcauagc

SEQ ID NO: 134320 - RNA, 24 nt, Artificial Sequence
  Synthetic
accaauaagaagaugaggcauagc

SEQ ID NO: 134321 - RNA, 18 nt, Artificial Sequence
  Synthetic
gaguaacuccacaguagc

SEQ ID NO: 134322 - RNA, 19 nt, Artificial Sequence
  Synthetic
agaguaacuccacaguagc

SEQ ID NO: 134323 - RNA, 20 nt, Artificial Sequence
  Synthetic
gagaguaacuccacaguagc

SEQ ID NO: 134324 - RNA, 21 nt, Artificial Sequence
  Synthetic
  misc_feature (1)..(1): n is a, c, g, or u
ngagaguaacuccacaguagc

SEQ ID NO: 134325 - RNA, 22 nt, Artificial Sequence
  Synthetic
  misc_feature (2)..(2): n is a, c, g, or u
angagaguaacuccacaguagc

SEQ ID NO: 134326 - RNA, 23 nt, Artificial Sequence
  Synthetic
  misc_feature (3)..(3): n is a, c, g, or u
aangagaguaacuccacaguagc

SEQ ID NO: 134327 - RNA, 24 nt, Artificial Sequence
  Synthetic
  misc_feature (4)..(4): n is a, c, g, or u
aaangagaguaacuccacaguagc

SEQ ID NO: 134328 - RNA, 18 nt, Artificial Sequence
  Synthetic
aggaauaugauaaaacgc

SEQ ID NO: 134329 - RNA, 19 nt, Artificial Sequence
  Synthetic
gaggaauaugauaaaacgc

SEQ ID NO: 134330 - RNA, 20 nt, Artificial Sequence
  Synthetic
agaggaauaugauaaaacgc

SEQ ID NO: 134331 - RNA, 21 nt, Artificial Sequence
  Synthetic
aagaggaauaugauaaaacgc

SEQ ID NO: 134332 - RNA, 22 nt, Artificial Sequence
  Synthetic
gaagaggaauaugauaaaacgc

SEQ ID NO: 134333 - RNA, 23 nt, Artificial Sequence
  Synthetic
ugaagaggaauaugauaaaacgc

SEQ ID NO: 134334 - RNA, 24 nt, Artificial Sequence
  Synthetic
augaagaggaauaugauaaaacgc

SEQ ID NO: 134335 - RNA, 18 nt, Artificial Sequence
  Synthetic
cacagacggggagaccgc

SEQ ID NO: 134336 - RNA, 19 nt, Artificial Sequence
  Synthetic
gcacagacggggagaccgc

SEQ ID NO: 134337 - RNA, 20 nt, Artificial Sequence
  Synthetic
ggcacagacggggagaccgc

SEQ ID NO: 134338 - RNA, 21 nt, Artificial Sequence
  Synthetic
aggcacagacggggagaccgc

SEQ ID NO: 134339 - RNA, 22 nt, Artificial Sequence
  Synthetic
aaggcacagacggggagaccgc

SEQ ID NO: 134340 - RNA, 23 nt, Artificial Sequence
  Synthetic
gaaggcacagacggggagaccgc

SEQ ID NO: 134341 - RNA, 24 nt, Artificial Sequence
  Synthetic
agaaggcacagacggggagaccgc

SEQ ID NO: 134342 - RNA, 18 nt, Artificial Sequence
  Synthetic
auacaugcauacaaaggc

SEQ ID NO: 134343 - RNA, 19 nt, Artificial Sequence
  Synthetic
uauacaugcauacaaaggc

SEQ ID NO: 134344 - RNA, 20 nt, Artificial Sequence
  Synthetic
guauacaugcauacaaaggc

SEQ ID NO: 134345 - RNA, 21 nt, Artificial Sequence
  Synthetic
uguauacaugcauacaaaggc

SEQ ID NO: 134346 - RNA, 22 nt, Artificial Sequence
  Synthetic
uuguauacaugcauacaaaggc

SEQ ID NO: 134347 - RNA, 23 nt, Artificial Sequence
  Synthetic
cuuguauacaugcauacaaaggc

SEQ ID NO: 134348 - RNA, 24 nt, Artificial Sequence
  Synthetic
gcuuguauacaugcauacaaaggc

SEQ ID NO: 134349 - RNA, 18 nt, Artificial Sequence
  Synthetic
ggaaagaagucagaaggc

SEQ ID NO: 134350 - RNA, 19 nt, Artificial Sequence
  Synthetic
aggaaagaagucagaaggc

SEQ ID NO: 134351 - RNA, 20 nt, Artificial Sequence
  Synthetic
aaggaaagaagucagaaggc

SEQ ID NO: 134352 - RNA, 21 nt, Artificial Sequence
  Synthetic
gaaggaaagaagucagaaggc

SEQ ID NO: 134353 - RNA, 22 nt, Artificial Sequence
  Synthetic
ggaaggaaagaagucagaaggc

SEQ ID NO: 134354 - RNA, 23 nt, Artificial Sequence
  Synthetic
cggaaggaaagaagucagaaggc

SEQ ID NO: 134355 - RNA, 24 nt, Artificial Sequence
  Synthetic
acggaaggaaagaagucagaaggc

SEQ ID NO: 134356 - RNA, 18 nt, Artificial Sequence
  Synthetic
accggcagaugagaaggc

SEQ ID NO: 134357 - RNA, 19 nt, Artificial Sequence
  Synthetic
gaccggcagaugagaaggc

SEQ ID NO: 134358 - RNA, 20 nt, Artificial Sequence
  Synthetic
ggaccggcagaugagaaggc

SEQ ID NO: 134359 - RNA, 21 nt, Artificial Sequence
  Synthetic
cggaccggcagaugagaaggc

SEQ ID NO: 134360 - RNA, 22 nt, Artificial Sequence
  Synthetic
acggaccggcagaugagaaggc

SEQ ID NO: 134361 - RNA, 23 nt, Artificial Sequence
  Synthetic
cacggaccggcagaugagaaggc

SEQ ID NO: 134362 - RNA, 24 nt, Artificial Sequence
  Synthetic
acacggaccggcagaugagaaggc

SEQ ID NO: 134363 - RNA, 18 nt, Artificial Sequence
  Synthetic
  misc_feature (6)..(6): n is a, c, g, or u
gaucuncgucugcgaggc

SEQ ID NO: 134364 - RNA, 19 nt, Artificial Sequence
  Synthetic
  misc_feature (7)..(7): n is a, c, g, or u
agaucuncgucugcgaggc

SEQ ID NO: 134365 - RNA, 20 nt, Artificial Sequence
  Synthetic
  misc_feature (8)..(8): n is a, c, g, or u
gagaucuncgucugcgaggc

SEQ ID NO: 134366 - RNA, 21 nt, Artificial Sequence
  Synthetic
  misc_feature (9)..(9): n is a, c, g, or u
ugagaucuncgucugcgaggc

SEQ ID NO: 134367 - RNA, 22 nt, Artificial Sequence
  Synthetic
  misc_feature (10)..(10): n is a, c, g, or u
uugagaucuncgucugcgaggc

SEQ ID NO: 134368 - RNA, 23 nt, Artificial Sequence
  Synthetic
  misc_feature (11)..(11): n is a, c, g, or u
auugagaucuncgucugcgaggc

SEQ ID NO: 134369 - RNA, 24 nt, Artificial Sequence
  Synthetic
  misc_feature (12)..(12): n is a, c, g, or u
gauugagaucuncgucugcgaggc

SEQ ID NO: 134370 - RNA, 18 nt, Artificial Sequence
  Synthetic
cugccgauugguggaggc

SEQ ID NO: 134371 - RNA, 19 nt, Artificial Sequence
  Synthetic
acugccgauugguggaggc

SEQ ID NO: 134372 - RNA, 20 nt, Artificial Sequence
  Synthetic
gacugccgauugguggaggc

SEQ ID NO: 134373 - RNA, 21 nt, Artificial Sequence
  Synthetic
ugacugccgauugguggaggc

SEQ ID NO: 134374 - RNA, 22 nt, Artificial Sequence
  Synthetic
cugacugccgauugguggaggc

SEQ ID NO: 134375 - RNA, 23 nt, Artificial Sequence
  Synthetic
ccugacugccgauugguggaggc

SEQ ID NO: 134376 - RNA, 24 nt, Artificial Sequence
  Synthetic
uccugacugccgauugguggaggc

SEQ ID NO: 134377 - RNA, 18 nt, Artificial Sequence
  Synthetic
aaggcacagcuuggaggc

SEQ ID NO: 134378 - RNA, 19 nt, Artificial Sequence
  Synthetic
caaggcacagcuuggaggc

SEQ ID NO: 134379 - RNA, 20 nt, Artificial Sequence
  Synthetic
ccaaggcacagcuuggaggc

SEQ ID NO: 134380 - RNA, 21 nt, Artificial Sequence
  Synthetic
  misc_feature (1)..(1): n is a, c, g, or u
nccaaggcacagcuuggaggc

SEQ ID NO: 134381 - RNA, 22 nt, Artificial Sequence
  Synthetic
  misc_feature (2)..(2): n is a, c, g, or u
anccaaggcacagcuuggaggc

SEQ ID NO: 134382 - RNA, 23 nt, Artificial Sequence
  Synthetic
  misc_feature (3)..(3): n is a, c, g, or u
canccaaggcacagcuuggaggc

SEQ ID NO: 134383 - RNA, 24 nt, Artificial Sequence
  Synthetic
  misc_feature (4)..(4): n is a, c, g, or u
ccanccaaggcacagcuuggaggc

SEQ ID NO: 134384 - RNA, 18 nt, Artificial Sequence
  Synthetic
auuugguggucuauaggc

SEQ ID NO: 134385 - RNA, 19 nt, Artificial Sequence
  Synthetic
cauuugguggucuauaggc

SEQ ID NO: 134386 - RNA, 20 nt, Artificial Sequence
  Synthetic
gcauuugguggucuauaggc

SEQ ID NO: 134387 - RNA, 21 nt, Artificial Sequence
  Synthetic
ggcauuugguggucuauaggc

SEQ ID NO: 134388 - RNA, 22 nt, Artificial Sequence
  Synthetic
gggcauuugguggucuauaggc

SEQ ID NO: 134389 - RNA, 23 nt, Artificial Sequence
  Synthetic
ggggcauuugguggucuauaggc

SEQ ID NO: 134390 - RNA, 24 nt, Artificial Sequence
  Synthetic
aggggcauuugguggucuauaggc

SEQ ID NO: 134391 - RNA, 18 nt, Artificial Sequence
  Synthetic
acagucuuugaaguaggc

SEQ ID NO: 134392 - RNA, 19 nt, Artificial Sequence
  Synthetic
cacagucuuugaaguaggc

SEQ ID NO: 134393 - RNA, 20 nt, Artificial Sequence
  Synthetic
acacagucuuugaaguaggc

SEQ ID NO: 134394 - RNA, 21 nt, Artificial Sequence
  Synthetic
cacacagucuuugaaguaggc

SEQ ID NO: 134395 - RNA, 22 nt, Artificial Sequence
  Synthetic
acacacagucuuugaaguaggc

SEQ ID NO: 134396 - RNA, 23 nt, Artificial Sequence
  Synthetic
aacacacagucuuugaaguaggc

SEQ ID NO: 134397 - RNA, 24 nt, Artificial Sequence
  Synthetic
aaacacacagucuuugaaguaggc

SEQ ID NO: 134398 - RNA, 18 nt, Artificial Sequence
  Synthetic
  misc_feature (2)..(2): n is a, c, g, or u
gnuuugcuccagaccggc

SEQ ID NO: 134399 - RNA, 19 nt, Artificial Sequence
  Synthetic
  misc_feature (3)..(3): n is a, c, g, or u
agnuuugcuccagaccggc

SEQ ID NO: 134400 - RNA, 20 nt, Artificial Sequence
  Synthetic
  misc_feature (4)..(4): n is a, c, g, or u
gagnuuugcuccagaccggc

SEQ ID NO: 134401 - RNA, 21 nt, Artificial Sequence
  Synthetic
  misc_feature (5)..(5): n is a, c, g, or u
ugagnuuugcuccagaccggc

SEQ ID NO: 134402 - RNA, 22 nt, Artificial Sequence
  Synthetic
  misc_feature (6)..(6): n is a, c, g, or u
augagnuuugcuccagaccggc

SEQ ID NO: 134403 - RNA, 23 nt, Artificial Sequence
  Synthetic
  misc_feature (1)..(1): n is a, c, g, or u
  misc_feature (7)..(7): n is a, c, g, or u
naugagnuuugcuccagaccggc

SEQ ID NO: 134404 - RNA, 24 nt, Artificial Sequence
  Synthetic
  misc_feature (2)..(2): n is a, c, g, or u
  misc_feature (8)..(8): n is a, c, g, or u
cnaugagnuuugcuccagaccggc

SEQ ID NO: 134405 - RNA, 18 nt, Artificial Sequence
  Synthetic
gcgagcaaaacaagcggc

SEQ ID NO: 134406 - RNA, 19 nt, Artificial Sequence
  Synthetic
ugcgagcaaaacaagcggc

SEQ ID NO: 134407 - RNA, 20 nt, Artificial Sequence
  Synthetic
cugcgagcaaaacaagcggc

SEQ ID NO: 134408 - RNA, 21 nt, Artificial Sequence
  Synthetic
gcugcgagcaaaacaagcggc

SEQ ID NO: 134409 - RNA, 22 nt, Artificial Sequence
  Synthetic
ggcugcgagcaaaacaagcggc

SEQ ID NO: 134410 - RNA, 23 nt, Artificial Sequence
  Synthetic
cggcugcgagcaaaacaagcggc

SEQ ID NO: 134411 - RNA, 24 nt, Artificial Sequence
  Synthetic
ccggcugcgagcaaaacaagcggc

SEQ ID NO: 134412 - RNA, 18 nt, Artificial Sequence
  Synthetic
uccgcaguauggaucggc

SEQ ID NO: 134413 - RNA, 19 nt, Artificial Sequence
  Synthetic
uuccgcaguauggaucggc

SEQ ID NO: 134414 - RNA, 20 nt, Artificial Sequence
  Synthetic
guuccgcaguauggaucggc

SEQ ID NO: 134415 - RNA, 21 nt, Artificial Sequence
  Synthetic
aguuccgcaguauggaucggc

SEQ ID NO: 134416 - RNA, 22 nt, Artificial Sequence
  Synthetic
gaguuccgcaguauggaucggc

SEQ ID NO: 134417 - RNA, 23 nt, Artificial Sequence
  Synthetic
ggaguuccgcaguauggaucggc

SEQ ID NO: 134418 - RNA, 24 nt, Artificial Sequence
  Synthetic
aggaguuccgcaguauggaucggc

SEQ ID NO: 134419 - RNA, 18 nt, Artificial Sequence
  Synthetic
cgucagcaaacacuuggc

SEQ ID NO: 134420 - RNA, 19 nt, Artificial Sequence
  Synthetic
gcgucagcaaacacuuggc

SEQ ID NO: 134421 - RNA, 20 nt, Artificial Sequence
  Synthetic
ugcgucagcaaacacuuggc

SEQ ID NO: 134422 - RNA, 21 nt, Artificial Sequence
  Synthetic
uugcgucagcaaacacuuggc

SEQ ID NO: 134423 - RNA, 22 nt, Artificial Sequence
  Synthetic
guugcgucagcaaacacuuggc

SEQ ID NO: 134424 - RNA, 23 nt, Artificial Sequence
  Synthetic
gguugcgucagcaaacacuuggc

SEQ ID NO: 134425 - RNA, 24 nt, Artificial Sequence
  Synthetic
ggguugcgucagcaaacacuuggc

SEQ ID NO: 134426 - RNA, 18 nt, Artificial Sequence
  Synthetic
aaggccuuguaaguuggc

SEQ ID NO: 134427 - RNA, 19 nt, Artificial Sequence
  Synthetic
aaaggccuuguaaguuggc

SEQ ID NO: 134428 - RNA, 20 nt, Artificial Sequence
  Synthetic
gaaaggccuuguaaguuggc

SEQ ID NO: 134429 - RNA, 21 nt, Artificial Sequence
  Synthetic
agaaaggccuuguaaguuggc

SEQ ID NO: 134430 - RNA, 22 nt, Artificial Sequence
  Synthetic
uagaaaggccuuguaaguuggc

SEQ ID NO: 134431 - RNA, 23 nt, Artificial Sequence
  Synthetic
uuagaaaggccuuguaaguuggc

SEQ ID NO: 134432 - RNA, 24 nt, Artificial Sequence
  Synthetic
cuuagaaaggccuuguaaguuggc

SEQ ID NO: 134433 - RNA, 18 nt, Artificial Sequence
  Synthetic
  misc_feature (13)..(13): n is a, c, g, or u
uggauuguuuganuuggc

SEQ ID NO: 134434 - RNA, 19 nt, Artificial Sequence
  Synthetic
  misc_feature (14)..(14): n is a, c, g, or u
cuggauuguuuganuuggc

SEQ ID NO: 134435 - RNA, 20 nt, Artificial Sequence
  Synthetic
  misc_feature (15)..(15): n is a, c, g, or u
ucuggauuguuuganuuggc

SEQ ID NO: 134436 - RNA, 21 nt, Artificial Sequence
  Synthetic
  misc_feature (16)..(16): n is a, c, g, or u
aucuggauuguuuganuuggc

SEQ ID NO: 134437 - RNA, 22 nt, Artificial Sequence
  Synthetic
  misc_feature (17)..(17): n is a, c, g, or u
aaucuggauuguuuganuuggc

SEQ ID NO: 134438 - RNA, 23 nt, Artificial Sequence
  Synthetic
  misc_feature (18)..(18): n is a, c, g, or u
caaucuggauuguuuganuuggc

SEQ ID NO: 134439 - RNA, 24 nt, Artificial Sequence
  Synthetic
  misc_feature (19)..(19): n is a, c, g, or u
ccaaucuggauuguuuganuuggc

SEQ ID NO: 134440 - RNA, 18 nt, Artificial Sequence
  Synthetic
gggacugcgaauuuuggc

SEQ ID NO: 134441 - RNA, 19 nt, Artificial Sequence
  Synthetic
ggggacugcgaauuuuggc

SEQ ID NO: 134442 - RNA, 20 nt, Artificial Sequence
  Synthetic
uggggacugcgaauuuuggc

SEQ ID NO: 134443 - RNA, 21 nt, Artificial Sequence
  Synthetic
uuggggacugcgaauuuuggc

SEQ ID NO: 134444 - RNA, 22 nt, Artificial Sequence
  Synthetic
guuggggacugcgaauuuuggc

SEQ ID NO: 134445 - RNA, 23 nt, Artificial Sequence
  Synthetic
gguuggggacugcgaauuuuggc

SEQ ID NO: 134446 - RNA, 24 nt, Artificial Sequence
  Synthetic
agguuggggacugcgaauuuuggc

SEQ ID NO: 134447 - RNA, 18 nt, Artificial Sequence
  Synthetic
  misc_feature (16)..(16): n is a, c, g, or u
cagagcuugguggaangc

SEQ ID NO: 134448 - RNA, 19 nt, Artificial Sequence
  Synthetic
  misc_feature (17)..(17): n is a, c, g, or u
gcagagcuugguggaangc

SEQ ID NO: 134449 - RNA, 20 nt, Artificial Sequence
  Synthetic
  misc_feature (18)..(18): n is a, c, g, or u
ugcagagcuugguggaangc

SEQ ID NO: 134450 - RNA, 21 nt, Artificial Sequence
  Synthetic
  misc_feature (1)..(1): n is a, c, g, or u
  misc_feature (19)..(19): n is a, c, g, or u
nugcagagcuugguggaangc

SEQ ID NO: 134451 - RNA, 22 nt, Artificial Sequence
  Synthetic
  misc_feature (2)..(2): n is a, c, g, or u
  misc_feature (20)..(20): n is a, c, g, or u
cnugcagagcuugguggaangc

SEQ ID NO: 134452 - RNA, 23 nt, Artificial Sequence
  Synthetic
  misc_feature (3)..(3): n is a, c, g, or u
  misc_feature (21)..(21): n is a, c, g, or u
ucnugcagagcuugguggaangc

SEQ ID NO: 134453 - RNA, 24 nt, Artificial Sequence
  Synthetic
  misc_feature (4)..(4): n is a, c, g, or u
  misc_feature (22)..(22): n is a, c, g, or u
aucnugcagagcuugguggaangc

SEQ ID NO: 134454 - RNA, 18 nt, Artificial Sequence
  Synthetic
  misc_feature (16)..(16): n is a, c, g, or u
accaggccguugccgngc

SEQ ID NO: 134455 - RNA, 19 nt, Artificial Sequence
  Synthetic
  misc_feature (17)..(17): n is a, c, g, or u
gaccaggccguugccgngc

SEQ ID NO: 134456 - RNA, 20 nt, Artificial Sequence
  Synthetic
  misc_feature (18)..(18): n is a, c, g, or u
agaccaggccguugccgngc

SEQ ID NO: 134457 - RNA, 21 nt, Artificial Sequence
  Synthetic
  misc_feature (19)..(19): n is a, c, g, or u
cagaccaggccguugccgngc

SEQ ID NO: 134458 - RNA, 22 nt, Artificial Sequence
  Synthetic
  misc_feature (20)..(20): n is a, c, g, or u
acagaccaggccguugccgngc

SEQ ID NO: 134459 - RNA, 23 nt, Artificial Sequence
  Synthetic
  misc_feature (21)..(21): n is a, c, g, or u
cacagaccaggccguugccgngc

SEQ ID NO: 134460 - RNA, 24 nt, Artificial Sequence
  Synthetic
  misc_feature (22)..(22): n is a, c, g, or u
gcacagaccaggccguugccgngc

SEQ ID NO: 134461 - RNA, 18 nt, Artificial Sequence
  Synthetic
uggugaggugagcaaugc

SEQ ID NO: 134462 - RNA, 19 nt, Artificial Sequence
  Synthetic
auggugaggugagcaaugc

SEQ ID NO: 134463 - RNA, 20 nt, Artificial Sequence
  Synthetic
uauggugaggugagcaaugc

SEQ ID NO: 134464 - RNA, 21 nt, Artificial Sequence
  Synthetic
guauggugaggugagcaaugc

SEQ ID NO: 134465 - RNA, 22 nt, Artificial Sequence
  Synthetic
  misc_feature (1)..(1): n is a, c, g, or u
nguauggugaggugagcaaugc

SEQ ID NO: 134466 - RNA, 23 nt, Artificial Sequence
  Synthetic
  misc_feature (2)..(2): n is a, c, g, or u
cnguauggugaggugagcaaugc

SEQ ID NO: 134467 - RNA, 24 nt, Artificial Sequence
  Synthetic
  misc_feature (3)..(3): n is a, c, g, or u
gcnguauggugaggugagcaaugc

SEQ ID NO: 134468 - RNA, 18 nt, Artificial Sequence
  Synthetic
aagggucaauguccaugc

SEQ ID NO: 134469 - RNA, 19 nt, Artificial Sequence
  Synthetic
uaagggucaauguccaugc

SEQ ID NO: 134470 - RNA, 20 nt, Artificial Sequence
  Synthetic
auaagggucaauguccaugc

SEQ ID NO: 134471 - RNA, 21 nt, Artificial Sequence
  Synthetic
uauaagggucaauguccaugc

SEQ ID NO: 134472 - RNA, 22 nt, Artificial Sequence
  Synthetic
uuauaagggucaauguccaugc

SEQ ID NO: 134473 - RNA, 23 nt, Artificial Sequence
  Synthetic
uuuauaagggucaauguccaugc

SEQ ID NO: 134474 - RNA, 24 nt, Artificial Sequence
  Synthetic
cuuuauaagggucaauguccaugc

SEQ ID NO: 134475 - RNA, 18 nt, Artificial Sequence
  Synthetic
  misc_feature (1)..(1): n is a, c, g, or u
  misc_feature (8)..(8): n is a, c, g, or u
  misc_feature (10)..(10): n is a, c, g, or u
ncacugungncaauaugc

SEQ ID NO: 134476 - RNA, 19 nt, Artificial Sequence
  Synthetic
  misc_feature (2)..(2): n is a, c, g, or u
  misc_feature (9)..(9): n is a, c, g, or u
  misc_feature (11)..(11): n is a, c, g, or u
gncacugungncaauaugc

SEQ ID NO: 134477 - RNA, 20 nt, Artificial Sequence
  Synthetic
  misc_feature (3)..(3): n is a, c, g, or u
  misc_feature (10)..(10): n is a, c, g, or u
  misc_feature (12)..(12): n is a, c, g, or u
ugncacugungncaauaugc

SEQ ID NO: 134478 - RNA, 21 nt, Artificial Sequence
  Synthetic
  misc_feature (1)..(1): n is a, c, g, or u
  misc_feature (4)..(4): n is a, c, g, or u
  misc_feature (11)..(11): n is a, c, g, or u
  misc_feature (13)..(13): n is a, c, g, or u
nugncacugungncaauaugc

SEQ ID NO: 134479 - RNA, 22 nt, Artificial Sequence
  Synthetic
  misc_feature (2)..(2): n is a, c, g, or u
  misc_feature (5)..(5): n is a, c, g, or u
  misc_feature (12)..(12): n is a, c, g, or u
  misc_feature (14)..(14): n is a, c, g, or u
gnugncacugungncaauaugc

SEQ ID NO: 134480 - RNA, 23 nt, Artificial Sequence
  Synthetic
  misc_feature (3)..(3): n is a, c, g, or u
  misc_feature (6)..(6): n is a, c, g, or u
  misc_feature (13)..(13): n is a, c, g, or u
  misc_feature (15)..(15): n is a, c, g, or u
ugnugncacugungncaauaugc

SEQ ID NO: 134481 - RNA, 24 nt, Artificial Sequence
  Synthetic
  misc_feature (1)..(1): n is a, c, g, or u
  misc_feature (4)..(4): n is a, c, g, or u
  misc_feature (7)..(7): n is a, c, g, or u
  misc_feature (14)..(14): n is a, c, g, or u
  misc_feature (16)..(16): n is a, c, g, or u
nugnugncacugungncaauaugc

SEQ ID NO: 134482 - RNA, 18 nt, Artificial Sequence
  Synthetic
  misc_feature (9)..(9): n is a, c, g, or u
  misc_feature (12)..(12): n is a, c, g, or u
guugcaugnugnuggugc

SEQ ID NO: 134483 - RNA, 19 nt, Artificial Sequence
  Synthetic
  misc_feature (10)..(10): n is a, c, g, or u
  misc_feature (13)..(13): n is a, c, g, or u
aguugcaugnugnuggugc

SEQ ID NO: 134484 - RNA, 20 nt, Artificial Sequence
  Synthetic
  misc_feature (11)..(11): n is a, c, g, or u
  misc_feature (14)..(14): n is a, c, g, or u
aaguugcaugnugnuggugc

SEQ ID NO: 134485 - RNA, 21 nt, Artificial Sequence
  Synthetic
  misc_feature (12)..(12): n is a, c, g, or u
  misc_feature (15)..(15): n is a, c, g, or u
aaaguugcaugnugnuggugc

SEQ ID NO: 134486 - RNA, 22 nt, Artificial Sequence
  Synthetic
  misc_feature (13)..(13): n is a, c, g, or u
  misc_feature (16)..(16): n is a, c, g, or u
aaaaguugcaugnugnuggugc

SEQ ID NO: 134487 - RNA, 23 nt, Artificial Sequence
  Synthetic
  misc_feature (14)..(14): n is a, c, g, or u
  misc_feature (17)..(17): n is a, c, g, or u
aaaaaguugcaugnugnuggugc

SEQ ID NO: 134488 - RNA, 24 nt, Artificial Sequence
  Synthetic
  misc_feature (15)..(15): n is a, c, g, or u
  misc_feature (18)..(18): n is a, c, g, or u
gaaaaaguugcaugnugnuggugc

SEQ ID NO: 134489 - RNA, 18 nt, Artificial Sequence
  Synthetic
gucggucguugacauugc

SEQ ID NO: 134490 - RNA, 19 nt, Artificial Sequence
  Synthetic
ggucggucguugacauugc

SEQ ID NO: 134491 - RNA, 20 nt, Artificial Sequence
  Synthetic
aggucggucguugacauugc

SEQ ID NO: 134492 - RNA, 18 nt, Artificial Sequence
  Synthetic
agggaaacauagaguugc

SEQ ID NO: 134493 - RNA, 19 nt, Artificial Sequence
  Synthetic
gagggaaacauagaguugc

SEQ ID NO: 134494 - RNA, 20 nt, Artificial Sequence
  Synthetic
ugagggaaacauagaguugc

SEQ ID NO: 134495 - RNA, 21 nt, Artificial Sequence
  Synthetic
augagggaaacauagaguugc

SEQ ID NO: 134496 - RNA, 22 nt, Artificial Sequence
  Synthetic
caugagggaaacauagaguugc

SEQ ID NO: 134497 - RNA, 23 nt, Artificial Sequence
  Synthetic
acaugagggaaacauagaguugc

SEQ ID NO: 134498 - RNA, 24 nt, Artificial Sequence
  Synthetic
aacaugagggaaacauagaguugc

SEQ ID NO: 134499 - RNA, 18 nt, Artificial Sequence
  Synthetic
ccagccaguggggguugc

SEQ ID NO: 134500 - RNA, 19 nt, Artificial Sequence
  Synthetic
cccagccaguggggguugc

SEQ ID NO: 134501 - RNA, 20 nt, Artificial Sequence
  Synthetic
ccccagccaguggggguugc

SEQ ID NO: 134502 - RNA, 21 nt, Artificial Sequence
  Synthetic
gccccagccaguggggguugc

SEQ ID NO: 134503 - RNA, 22 nt, Artificial Sequence
  Synthetic
agccccagccaguggggguugc

SEQ ID NO: 134504 - RNA, 23 nt, Artificial Sequence
  Synthetic
aagccccagccaguggggguugc

SEQ ID NO: 134505 - RNA, 24 nt, Artificial Sequence
  Synthetic
caagccccagccaguggggguugc

SEQ ID NO: 134506 - RNA, 18 nt, Artificial Sequence
  Synthetic
  misc_feature (4)..(4): n is a, c, g, or u
  misc_feature (7)..(7): n is a, c, g, or u
  misc_feature (13)..(13): n is a, c, g, or u
agunccnaugagnuuugc

SEQ ID NO: 134507 - RNA, 19 nt, Artificial Sequence
  Synthetic
  misc_feature (5)..(5): n is a, c, g, or u
  misc_feature (8)..(8): n is a, c, g, or u
  misc_feature (14)..(14): n is a, c, g, or u
cagunccnaugagnuuugc

SEQ ID NO: 134508 - RNA, 20 nt, Artificial Sequence
  Synthetic
  misc_feature (6)..(6): n is a, c, g, or u
  misc_feature (9)..(9): n is a, c, g, or u
  misc_feature (15)..(15): n is a, c, g, or u
ucagunccnaugagnuuugc

SEQ ID NO: 134509 - RNA, 21 nt, Artificial Sequence
  Synthetic
  misc_feature (1)..(1): n is a, c, g, or u
  misc_feature (7)..(7): n is a, c, g, or u
  misc_feature (10)..(10): n is a, c, g, or u
  misc_feature (16)..(16): n is a, c, g, or u
nucagunccnaugagnuuugc

SEQ ID NO: 134510 - RNA, 22 nt, Artificial Sequence
  Synthetic
  misc_feature (2)..(2): n is a, c, g, or u
  misc_feature (8)..(8): n is a, c, g, or u
  misc_feature (11)..(11): n is a, c, g, or u
  misc_feature (17)..(17): n is a, c, g, or u
unucagunccnaugagnuuugc

SEQ ID NO: 134511 - RNA, 23 nt, Artificial Sequence
  Synthetic
  misc_feature (3)..(3): n is a, c, g, or u
  misc_feature (9)..(9): n is a, c, g, or u
  misc_feature (12)..(12): n is a, c, g, or u
  misc_feature (18)..(18): n is a, c, g, or u
uunucagunccnaugagnuuugc

SEQ ID NO: 134512 - RNA, 24 nt, Artificial Sequence
  Synthetic
  misc_feature (4)..(4): n is a, c, g, or u
  misc_feature (10)..(10): n is a, c, g, or u
  misc_feature (13)..(13): n is a, c, g, or u
  misc_feature (19)..(19): n is a, c, g, or u
auunucagunccnaugagnuuugc

SEQ ID NO: 134513 - RNA, 18 nt, Artificial Sequence
  Synthetic
cucccauagguauuuugc

SEQ ID NO: 134514 - RNA, 19 nt, Artificial Sequence
  Synthetic
acucccauagguauuuugc

SEQ ID NO: 134515 - RNA, 20 nt, Artificial Sequence
  Synthetic
cacucccauagguauuuugc

SEQ ID NO: 134516 - RNA, 21 nt, Artificial Sequence
  Synthetic
ccacucccauagguauuuugc

SEQ ID NO: 134517 - RNA, 22 nt, Artificial Sequence
  Synthetic
cccacucccauagguauuuugc

SEQ ID NO: 134518 - RNA, 23 nt, Artificial Sequence
  Synthetic
gcccacucccauagguauuuugc

SEQ ID NO: 134519 - RNA, 24 nt, Artificial Sequence
  Synthetic
ggcccacucccauagguauuuugc

SEQ ID NO: 134520 - RNA, 18 nt, Artificial Sequence
  Synthetic
  misc_feature (17)..(17): n is a, c, g, or u
ccaugccccaaagccanc

SEQ ID NO: 134521 - RNA, 19 nt, Artificial Sequence
  Synthetic
  misc_feature (18)..(18): n is a, c, g, or u
uccaugccccaaagccanc

SEQ ID NO: 134522 - RNA, 20 nt, Artificial Sequence
  Synthetic
  misc_feature (19)..(19): n is a, c, g, or u
guccaugccccaaagccanc

SEQ ID NO: 134523 - RNA, 21 nt, Artificial Sequence
  Synthetic
  misc_feature (20)..(20): n is a, c, g, or u
uguccaugccccaaagccanc

SEQ ID NO: 134524 - RNA, 22 nt, Artificial Sequence
  Synthetic
  misc_feature (21)..(21): n is a, c, g, or u
auguccaugccccaaagccanc

SEQ ID NO: 134525 - RNA, 23 nt, Artificial Sequence
  Synthetic
  misc_feature (22)..(22): n is a, c, g, or u
aauguccaugccccaaagccanc

SEQ ID NO: 134526 - RNA, 24 nt, Artificial Sequence
  Synthetic
  misc_feature (23)..(23): n is a, c, g, or u
caauguccaugccccaaagccanc

SEQ ID NO: 134527 - RNA, 18 nt, Artificial Sequence
  Synthetic
  misc_feature (17)..(17): n is a, c, g, or u
ccuccuaauacaaaganc

SEQ ID NO: 134528 - RNA, 19 nt, Artificial Sequence
  Synthetic
  misc_feature (18)..(18): n is a, c, g, or u
gccuccuaauacaaaganc

SEQ ID NO: 134529 - RNA, 20 nt, Artificial Sequence
  Synthetic
  misc_feature (19)..(19): n is a, c, g, or u
agccuccuaauacaaaganc

SEQ ID NO: 134530 - RNA, 21 nt, Artificial Sequence
  Synthetic
  misc_feature (20)..(20): n is a, c, g, or u
cagccuccuaauacaaaganc

SEQ ID NO: 134531 - RNA, 22 nt, Artificial Sequence
  Synthetic
  misc_feature (21)..(21): n is a, c, g, or u
acagccuccuaauacaaaganc

SEQ ID NO: 134532 - RNA, 23 nt, Artificial Sequence
  Synthetic
  misc_feature (22)..(22): n is a, c, g, or u
uacagccuccuaauacaaaganc

SEQ ID NO: 134533 - RNA, 24 nt, Artificial Sequence
  Synthetic
  misc_feature (23)..(23): n is a, c, g, or u
cuacagccuccuaauacaaaganc

SEQ ID NO: 134534 - RNA, 18 nt, Artificial Sequence
  Synthetic
  misc_feature (9)..(9): n is a, c, g, or u
  misc_feature (12)..(12): n is a, c, g, or u
  misc_feature (17)..(17): n is a, c, g, or u
ccguguggnggnguganc

SEQ ID NO: 134535 - RNA, 19 nt, Artificial Sequence
  Synthetic
  misc_feature (1)..(1): n is a, c, g, or u
  misc_feature (10)..(10): n is a, c, g, or u
  misc_feature (13)..(13): n is a, c, g, or u
  misc_feature (18)..(18): n is a, c, g, or u
nccguguggnggnguganc

SEQ ID NO: 134536 - RNA, 20 nt, Artificial Sequence
  Synthetic
  misc_feature (2)..(2): n is a, c, g, or u
  misc_feature (11)..(11): n is a, c, g, or u
  misc_feature (14)..(14): n is a, c, g, or u
  misc_feature (19)..(19): n is a, c, g, or u
cnccguguggnggnguganc

SEQ ID NO: 134537 - RNA, 21 nt, Artificial Sequence
  Synthetic
  misc_feature (3)..(3): n is a, c, g, or u
  misc_feature (12)..(12): n is a, c, g, or u
  misc_feature (15)..(15): n is a, c, g, or u
  misc_feature (20)..(20): n is a, c, g, or u
ccnccguguggnggnguganc

SEQ ID NO: 134538 - RNA, 22 nt, Artificial Sequence
  Synthetic
  misc_feature (4)..(4): n is a, c, g, or u
  misc_feature (13)..(13): n is a, c, g, or u
  misc_feature (16)..(16): n is a, c, g, or u
  misc_feature (21)..(21): n is a, c, g, or u
accnccguguggnggnguganc

SEQ ID NO: 134539 - RNA, 23 nt, Artificial Sequence
  Synthetic
  misc_feature (1)..(1): n is a, c, g, or u
  misc_feature (5)..(5): n is a, c, g, or u
  misc_feature (14)..(14): n is a, c, g, or u
  misc_feature (17)..(17): n is a, c, g, or u
  misc_feature (22)..(22): n is a, c, g, or u
naccnccguguggnggnguganc

SEQ ID NO: 134540 - RNA, 24 nt, Artificial Sequence
  Synthetic
  misc_feature (2)..(2): n is a, c, g, or u
  misc_feature (6)..(6): n is a, c, g, or u
  misc_feature (15)..(15): n is a, c, g, or u
  misc_feature (18)..(18): n is a, c, g, or u
  misc_feature (23)..(23): n is a, c, g, or u
anaccnccguguggnggnguganc

SEQ ID NO: 134541 - RNA, 18 nt, Artificial Sequence
  Synthetic
  misc_feature (17)..(17): n is a, c, g, or u
ccacaucauccauauanc

SEQ ID NO: 134542 - RNA, 19 nt, Artificial Sequence
  Synthetic
  misc_feature (18)..(18): n is a, c, g, or u
accacaucauccauauanc

SEQ ID NO: 134543 - RNA, 20 nt, Artificial Sequence
  Synthetic
  misc_feature (19)..(19): n is a, c, g, or u
uaccacaucauccauauanc

SEQ ID NO: 134544 - RNA, 21 nt, Artificial Sequence
  Synthetic
  misc_feature (20)..(20): n is a, c, g, or u
auaccacaucauccauauanc

SEQ ID NO: 134545 - RNA, 22 nt, Artificial Sequence
  Synthetic
  misc_feature (21)..(21): n is a, c, g, or u
aauaccacaucauccauauanc

SEQ ID NO: 134546 - RNA, 23 nt, Artificial Sequence
  Synthetic
  misc_feature (22)..(22): n is a, c, g, or u
caauaccacaucauccauauanc

SEQ ID NO: 134547 - RNA, 24 nt, Artificial Sequence
  Synthetic
  misc_feature (23)..(23): n is a, c, g, or u
ccaauaccacaucauccauauanc

SEQ ID NO: 134548 - RNA, 18 nt, Artificial Sequence
  Synthetic
  misc_feature (17)..(17): n is a, c, g, or u
auguucuccauguucgnc

SEQ ID NO: 134549 - RNA, 19 nt, Artificial Sequence
  Synthetic
  misc_feature (18)..(18): n is a, c, g, or u
gauguucuccauguucgnc

SEQ ID NO: 134550 - RNA, 20 nt, Artificial Sequence
  Synthetic
  misc_feature (19)..(19): n is a, c, g, or u
ugauguucuccauguucgnc

SEQ ID NO: 134551 - RNA, 21 nt, Artificial Sequence
  Synthetic
  misc_feature (20)..(20): n is a, c, g, or u
gugauguucuccauguucgnc

SEQ ID NO: 134552 - RNA, 22 nt, Artificial Sequence
  Synthetic
  misc_feature (21)..(21): n is a, c, g, or u
ugugauguucuccauguucgnc

SEQ ID NO: 134553 - RNA, 23 nt, Artificial Sequence
  Synthetic
  misc_feature (22)..(22): n is a, c, g, or u
augugauguucuccauguucgnc

SEQ ID NO: 134554 - RNA, 24 nt, Artificial Sequence
  Synthetic
  misc_feature (23)..(23): n is a, c, g, or u
gaugugauguucuccauguucgnc

SEQ ID NO: 134555 - RNA, 18 nt, Artificial Sequence
  Synthetic
  misc_feature (17)..(17): n is a, c, g, or u
ccaaaagacccacaaunc

SEQ ID NO: 134556 - RNA, 19 nt, Artificial Sequence
  Synthetic
  misc_feature (18)..(18): n is a, c, g, or u
cccaaaagacccacaaunc

SEQ ID NO: 134557 - RNA, 20 nt, Artificial Sequence
  Synthetic
  misc_feature (19)..(19): n is a, c, g, or u
gcccaaaagacccacaaunc

SEQ ID NO: 134558 - RNA, 21 nt, Artificial Sequence
  Synthetic
  misc_feature (20)..(20): n is a, c, g, or u
agcccaaaagacccacaaunc

SEQ ID NO: 134559 - RNA, 22 nt, Artificial Sequence
  Synthetic
  misc_feature (21)..(21): n is a, c, g, or u
aagcccaaaagacccacaaunc

SEQ ID NO: 134560 - RNA, 23 nt, Artificial Sequence
  Synthetic
  misc_feature (22)..(22): n is a, c, g, or u
aaagcccaaaagacccacaaunc

SEQ ID NO: 134561 - RNA, 24 nt, Artificial Sequence
  Synthetic
  misc_feature (23)..(23): n is a, c, g, or u
caaagcccaaaagacccacaaunc

SEQ ID NO: 134562 - RNA, 18 nt, Artificial Sequence
  Synthetic
  misc_feature (5)..(5): n is a, c, g, or u
  misc_feature (14)..(14): n is a, c, g, or u
  misc_feature (17)..(17): n is a, c, g, or u
gaucnuguggcaangunc

SEQ ID NO: 134563 - RNA, 19 nt, Artificial Sequence
  Synthetic
  misc_feature (6)..(6): n is a, c, g, or u
  misc_feature (15)..(15): n is a, c, g, or u
  misc_feature (18)..(18): n is a, c, g, or u
ugaucnuguggcaangunc

SEQ ID NO: 134564 - RNA, 20 nt, Artificial Sequence
  Synthetic
  misc_feature (7)..(7): n is a, c, g, or u
  misc_feature (16)..(16): n is a, c, g, or u
  misc_feature (19)..(19): n is a, c, g, or u
augaucnuguggcaangunc

SEQ ID NO: 134565 - RNA, 21 nt, Artificial Sequence
  Synthetic
  misc_feature (8)..(8): n is a, c, g, or u
  misc_feature (17)..(17): n is a, c, g, or u
  misc_feature (20)..(20): n is a, c, g, or u
uaugaucnuguggcaangunc

SEQ ID NO: 134566 - RNA, 22 nt, Artificial Sequence
  Synthetic
  misc_feature (9)..(9): n is a, c, g, or u
  misc_feature (18)..(18): n is a, c, g, or u
  misc_feature (21)..(21): n is a, c, g, or u
auaugaucnuguggcaangunc

SEQ ID NO: 134567 - RNA, 23 nt, Artificial Sequence
  Synthetic
  misc_feature (10)..(10): n is a, c, g, or u
  misc_feature (19)..(19): n is a, c, g, or u
  misc_feature (22)..(22): n is a, c, g, or u
aauaugaucnuguggcaangunc

SEQ ID NO: 134568 - RNA, 24 nt, Artificial Sequence
  Synthetic
  misc_feature (11)..(11): n is a, c, g, or u
  misc_feature (20)..(20): n is a, c, g, or u
  misc_feature (23)..(23): n is a, c, g, or u
caauaugaucnuguggcaangunc

SEQ ID NO: 134569 - RNA, 18 nt, Artificial Sequence
  Synthetic
uugacauacuuuccaauc

SEQ ID NO: 134570 - RNA, 19 nt, Artificial Sequence
  Synthetic
uuugacauacuuuccaauc

SEQ ID NO: 134571 - RNA, 20 nt, Artificial Sequence
  Synthetic
cuuugacauacuuuccaauc

SEQ ID NO: 134572 - RNA, 21 nt, Artificial Sequence
  Synthetic
  misc_feature (1)..(1): n is a, c, g, or u
ncuuugacauacuuuccaauc

SEQ ID NO: 134573 - RNA, 22 nt, Artificial Sequence
  Synthetic
  misc_feature (2)..(2): n is a, c, g, or u
uncuuugacauacuuuccaauc

SEQ ID NO: 134574 - RNA, 23 nt, Artificial Sequence
  Synthetic
  misc_feature (3)..(3): n is a, c, g, or u
auncuuugacauacuuuccaauc

SEQ ID NO: 134575 - RNA, 24 nt, Artificial Sequence
  Synthetic
  misc_feature (4)..(4): n is a, c, g, or u
aauncuuugacauacuuuccaauc

SEQ ID NO: 134576 - RNA, 18 nt, Artificial Sequence
  Synthetic
gaugaucgggaaagaauc

SEQ ID NO: 134577 - RNA, 19 nt, Artificial Sequence
  Synthetic
ugaugaucgggaaagaauc

SEQ ID NO: 134578 - RNA, 20 nt, Artificial Sequence
  Synthetic
cugaugaucgggaaagaauc

SEQ ID NO: 134579 - RNA, 21 nt, Artificial Sequence
  Synthetic
acugaugaucgggaaagaauc

SEQ ID NO: 134580 - RNA, 22 nt, Artificial Sequence
  Synthetic
aacugaugaucgggaaagaauc

SEQ ID NO: 134581 - RNA, 23 nt, Artificial Sequence
  Synthetic
caacugaugaucgggaaagaauc

SEQ ID NO: 134582 - RNA, 24 nt, Artificial Sequence
  Synthetic
ccaacugaugaucgggaaagaauc

SEQ ID NO: 134583 - RNA, 18 nt, Artificial Sequence
  Synthetic
caacauaccuugauaauc

SEQ ID NO: 134584 - RNA, 19 nt, Artificial Sequence
  Synthetic
gcaacauaccuugauaauc

SEQ ID NO: 134585 - RNA, 20 nt, Artificial Sequence
  Synthetic
ggcaacauaccuugauaauc

SEQ ID NO: 134586 - RNA, 21 nt, Artificial Sequence
  Synthetic
gggcaacauaccuugauaauc

SEQ ID NO: 134587 - RNA, 22 nt, Artificial Sequence
  Synthetic
cgggcaacauaccuugauaauc

SEQ ID NO: 134588 - RNA, 23 nt, Artificial Sequence
  Synthetic
acgggcaacauaccuugauaauc

SEQ ID NO: 134589 - RNA, 24 nt, Artificial Sequence
  Synthetic
aacgggcaacauaccuugauaauc

SEQ ID NO: 134590 - RNA, 18 nt, Artificial Sequence
  Synthetic
acaggugcaauuuccauc

SEQ ID NO: 134591 - RNA, 19 nt, Artificial Sequence
  Synthetic
uacaggugcaauuuccauc

SEQ ID NO: 134592 - RNA, 20 nt, Artificial Sequence
  Synthetic
auacaggugcaauuuccauc

SEQ ID NO: 134593 - RNA, 21 nt, Artificial Sequence
  Synthetic
aauacaggugcaauuuccauc

SEQ ID NO: 134594 - RNA, 22 nt, Artificial Sequence
  Synthetic
gaauacaggugcaauuuccauc

SEQ ID NO: 134595 - RNA, 23 nt, Artificial Sequence
  Synthetic
ggaauacaggugcaauuuccauc

SEQ ID NO: 134596 - RNA, 24 nt, Artificial Sequence
  Synthetic
gggaauacaggugcaauuuccauc

SEQ ID NO: 134597 - RNA, 18 nt, Artificial Sequence
  Synthetic
  misc_feature (4)..(4): n is a, c, g, or u
  misc_feature (7)..(7): n is a, c, g, or u
  misc_feature (10)..(10): n is a, c, g, or u
  misc_feature (13)..(13): n is a, c, g, or u
ggcngunucnagnagauc

SEQ ID NO: 134598 - RNA, 19 nt, Artificial Sequence
  Synthetic
  misc_feature (5)..(5): n is a, c, g, or u
  misc_feature (8)..(8): n is a, c, g, or u
  misc_feature (11)..(11): n is a, c, g, or u
  misc_feature (14)..(14): n is a, c, g, or u
aggcngunucnagnagauc

SEQ ID NO: 134599 - RNA, 20 nt, Artificial Sequence
  Synthetic
  misc_feature (6)..(6): n is a, c, g, or u
  misc_feature (9)..(9): n is a, c, g, or u
  misc_feature (12)..(12): n is a, c, g, or u
  misc_feature (15)..(15): n is a, c, g, or u
gaggcngunucnagnagauc

SEQ ID NO: 134600 - RNA, 21 nt, Artificial Sequence
  Synthetic
  misc_feature (7)..(7): n is a, c, g, or u
  misc_feature (10)..(10): n is a, c, g, or u
  misc_feature (13)..(13): n is a, c, g, or u
  misc_feature (16)..(16): n is a, c, g, or u
ugaggcngunucnagnagauc

SEQ ID NO: 134601 - RNA, 22 nt, Artificial Sequence
  Synthetic
  misc_feature (8)..(8): n is a, c, g, or u
  misc_feature (11)..(11): n is a, c, g, or u
  misc_feature (14)..(14): n is a, c, g, or u
  misc_feature (17)..(17): n is a, c, g, or u
cugaggcngunucnagnagauc

SEQ ID NO: 134602 - RNA, 23 nt, Artificial Sequence
  Synthetic
  misc_feature (9)..(9): n is a, c, g, or u
  misc_feature (12)..(12): n is a, c, g, or u
  misc_feature (15)..(15): n is a, c, g, or u
  misc_feature (18)..(18): n is a, c, g, or u
gcugaggcngunucnagnagauc

SEQ ID NO: 134603 - RNA, 24 nt, Artificial Sequence
  Synthetic
  misc_feature (10)..(10): n is a, c, g, or u
  misc_feature (13)..(13): n is a, c, g, or u
  misc_feature (16)..(16): n is a, c, g, or u
  misc_feature (19)..(19): n is a, c, g, or u
agcugaggcngunucnagnagauc

SEQ ID NO: 134604 - RNA, 18 nt, Artificial Sequence
  Synthetic
aguuccgcaguauggauc

SEQ ID NO: 134605 - RNA, 19 nt, Artificial Sequence
  Synthetic
gaguuccgcaguauggauc

SEQ ID NO: 134606 - RNA, 20 nt, Artificial Sequence
  Synthetic
ggaguuccgcaguauggauc

SEQ ID NO: 134607 - RNA, 21 nt, Artificial Sequence
  Synthetic
aggaguuccgcaguauggauc

SEQ ID NO: 134608 - RNA, 22 nt, Artificial Sequence
  Synthetic
uaggaguuccgcaguauggauc

SEQ ID NO: 134609 - RNA, 23 nt, Artificial Sequence
  Synthetic
cuaggaguuccgcaguauggauc

SEQ ID NO: 134610 - RNA, 24 nt, Artificial Sequence
  Synthetic
gcuaggaguuccgcaguauggauc

SEQ ID NO: 134611 - RNA, 18 nt, Artificial Sequence
  Synthetic
  misc_feature (14)..(14): n is a, c, g, or u
uacugguuguugungauc

SEQ ID NO: 134612 - RNA, 19 nt, Artificial Sequence
  Synthetic
  misc_feature (15)..(15): n is a, c, g, or u
guacugguuguugungauc

SEQ ID NO: 134613 - RNA, 20 nt, Artificial Sequence
  Synthetic
  misc_feature (16)..(16): n is a, c, g, or u
cguacugguuguugungauc

SEQ ID NO: 134614 - RNA, 21 nt, Artificial Sequence
  Synthetic
  misc_feature (17)..(17): n is a, c, g, or u
ccguacugguuguugungauc

SEQ ID NO: 134615 - RNA, 22 nt, Artificial Sequence
  Synthetic
  misc_feature (18)..(18): n is a, c, g, or u
cccguacugguuguugungauc

SEQ ID NO: 134616 - RNA, 23 nt, Artificial Sequence
  Synthetic
  misc_feature (19)..(19): n is a, c, g, or u
ucccguacugguuguugungauc

SEQ ID NO: 134617 - RNA, 24 nt, Artificial Sequence
  Synthetic
  misc_feature (20)..(20): n is a, c, g, or u
gucccguacugguuguugungauc

SEQ ID NO: 134618 - RNA, 18 nt, Artificial Sequence
  Synthetic
aggguccaacugaugauc

SEQ ID NO: 134619 - RNA, 19 nt, Artificial Sequence
  Synthetic
caggguccaacugaugauc

SEQ ID NO: 134620 - RNA, 20 nt, Artificial Sequence
  Synthetic
gcaggguccaacugaugauc

SEQ ID NO: 134621 - RNA, 21 nt, Artificial Sequence
  Synthetic
ugcaggguccaacugaugauc

SEQ ID NO: 134622 - RNA, 22 nt, Artificial Sequence
  Synthetic
augcaggguccaacugaugauc

SEQ ID NO: 134623 - RNA, 23 nt, Artificial Sequence
  Synthetic
aaugcaggguccaacugaugauc

SEQ ID NO: 134624 - RNA, 24 nt, Artificial Sequence
  Synthetic
gaaugcaggguccaacugaugauc

SEQ ID NO: 134625 - RNA, 18 nt, Artificial Sequence
  Synthetic
gagugcgaauccacacuc

SEQ ID NO: 134626 - RNA, 19 nt, Artificial Sequence
  Synthetic
ggagugcgaauccacacuc

SEQ ID NO: 134627 - RNA, 20 nt, Artificial Sequence
  Synthetic
aggagugcgaauccacacuc

SEQ ID NO: 134628 - RNA, 21 nt, Artificial Sequence
  Synthetic
gaggagugcgaauccacacuc

SEQ ID NO: 134629 - RNA, 22 nt, Artificial Sequence
  Synthetic
ggaggagugcgaauccacacuc

SEQ ID NO: 134630 - RNA, 23 nt, Artificial Sequence
  Synthetic
uggaggagugcgaauccacacuc

SEQ ID NO: 134631 - RNA, 24 nt, Artificial Sequence
  Synthetic
cuggaggagugcgaauccacacuc

SEQ ID NO: 134632 - RNA, 18 nt, Artificial Sequence
  Synthetic
gcaaugcucaggagacuc

SEQ ID NO: 134633 - RNA, 19 nt, Artificial Sequence
  Synthetic
agcaaugcucaggagacuc

SEQ ID NO: 134634 - RNA, 20 nt, Artificial Sequence
  Synthetic
gagcaaugcucaggagacuc

SEQ ID NO: 134635 - RNA, 21 nt, Artificial Sequence
  Synthetic
ugagcaaugcucaggagacuc

SEQ ID NO: 134636 - RNA, 22 nt, Artificial Sequence
  Synthetic
gugagcaaugcucaggagacuc

SEQ ID NO: 134637 - RNA, 23 nt, Artificial Sequence
  Synthetic
ggugagcaaugcucaggagacuc

SEQ ID NO: 134638 - RNA, 24 nt, Artificial Sequence
  Synthetic
aggugagcaaugcucaggagacuc

SEQ ID NO: 134639 - RNA, 18 nt, Artificial Sequence
  Synthetic
  misc_feature (1)..(1): n is a, c, g, or u
ncaggguccccaguccuc

SEQ ID NO: 134640 - RNA, 19 nt, Artificial Sequence
  Synthetic
  misc_feature (2)..(2): n is a, c, g, or u
cncaggguccccaguccuc

SEQ ID NO: 134641 - RNA, 20 nt, Artificial Sequence
  Synthetic
  misc_feature (1)..(1): n is a, c, g, or u
  misc_feature (3)..(3): n is a, c, g, or u
ncncaggguccccaguccuc

SEQ ID NO: 134642 - RNA, 21 nt, Artificial Sequence
  Synthetic
  misc_feature (2)..(2): n is a, c, g, or u
  misc_feature (4)..(4): n is a, c, g, or u
gncncaggguccccaguccuc

SEQ ID NO: 134643 - RNA, 22 nt, Artificial Sequence
  Synthetic
  misc_feature (3)..(3): n is a, c, g, or u
  misc_feature (5)..(5): n is a, c, g, or u
cgncncaggguccccaguccuc

SEQ ID NO: 134644 - RNA, 23 nt, Artificial Sequence
  Synthetic
  misc_feature (4)..(4): n is a, c, g, or u
  misc_feature (6)..(6): n is a, c, g, or u
ucgncncaggguccccaguccuc

SEQ ID NO: 134645 - RNA, 24 nt, Artificial Sequence
  Synthetic
  misc_feature (5)..(5): n is a, c, g, or u
  misc_feature (7)..(7): n is a, c, g, or u
uucgncncaggguccccaguccuc

SEQ ID NO: 134646 - RNA, 18 nt, Artificial Sequence
  Synthetic
gugaggugagcaaugcuc

SEQ ID NO: 134647 - RNA, 19 nt, Artificial Sequence
  Synthetic
ggugaggugagcaaugcuc

SEQ ID NO: 134648 - RNA, 20 nt, Artificial Sequence
  Synthetic
uggugaggugagcaaugcuc

SEQ ID NO: 134649 - RNA, 21 nt, Artificial Sequence
  Synthetic
auggugaggugagcaaugcuc

SEQ ID NO: 134650 - RNA, 22 nt, Artificial Sequence
  Synthetic
uauggugaggugagcaaugcuc

SEQ ID NO: 134651 - RNA, 23 nt, Artificial Sequence
  Synthetic
guauggugaggugagcaaugcuc

SEQ ID NO: 134652 - RNA, 24 nt, Artificial Sequence
  Synthetic
  misc_feature (1)..(1): n is a, c, g, or u
nguauggugaggugagcaaugcuc

SEQ ID NO: 134653 - RNA, 18 nt, Artificial Sequence
  Synthetic
ccugaggaugacugucuc

SEQ ID NO: 134654 - RNA, 19 nt, Artificial Sequence
  Synthetic
gccugaggaugacugucuc

SEQ ID NO: 134655 - RNA, 20 nt, Artificial Sequence
  Synthetic
ggccugaggaugacugucuc

SEQ ID NO: 134656 - RNA, 21 nt, Artificial Sequence
  Synthetic
uggccugaggaugacugucuc

SEQ ID NO: 134657 - RNA, 22 nt, Artificial Sequence
  Synthetic
auggccugaggaugacugucuc

SEQ ID NO: 134658 - RNA, 23 nt, Artificial Sequence
  Synthetic
cauggccugaggaugacugucuc

SEQ ID NO: 134659 - RNA, 24 nt, Artificial Sequence
  Synthetic
gcauggccugaggaugacugucuc

SEQ ID NO: 134660 - RNA, 18 nt, Artificial Sequence
  Synthetic
gacggaaggaaagaaguc

SEQ ID NO: 134661 - RNA, 19 nt, Artificial Sequence
  Synthetic
  misc_feature (1)..(1): n is a, c, g, or u
ngacggaaggaaagaaguc

SEQ ID NO: 134662 - RNA, 20 nt, Artificial Sequence
  Synthetic
  misc_feature (2)..(2): n is a, c, g, or u
cngacggaaggaaagaaguc

SEQ ID NO: 134663 - RNA, 21 nt, Artificial Sequence
  Synthetic
  misc_feature (1)..(1): n is a, c, g, or u
  misc_feature (3)..(3): n is a, c, g, or u
ncngacggaaggaaagaaguc

SEQ ID NO: 134664 - RNA, 22 nt, Artificial Sequence
  Synthetic
  misc_feature (2)..(2): n is a, c, g, or u
  misc_feature (4)..(4): n is a, c, g, or u
cncngacggaaggaaagaaguc

SEQ ID NO: 134665 - RNA, 23 nt, Artificial Sequence
  Synthetic
  misc_feature (3)..(3): n is a, c, g, or u
  misc_feature (5)..(5): n is a, c, g, or u
ucncngacggaaggaaagaaguc

SEQ ID NO: 134666 - RNA, 24 nt, Artificial Sequence
  Synthetic
  misc_feature (4)..(4): n is a, c, g, or u
  misc_feature (6)..(6): n is a, c, g, or u
aucncngacggaaggaaagaaguc

SEQ ID NO: 134667 - RNA, 18 nt, Artificial Sequence
  Synthetic
  misc_feature (4)..(4): n is a, c, g, or u
gucnuuaaacacacaguc

SEQ ID NO: 134668 - RNA, 19 nt, Artificial Sequence
  Synthetic
  misc_feature (5)..(5): n is a, c, g, or u
agucnuuaaacacacaguc

SEQ ID NO: 134669 - RNA, 20 nt, Artificial Sequence
  Synthetic
  misc_feature (6)..(6): n is a, c, g, or u
cagucnuuaaacacacaguc

SEQ ID NO: 134670 - RNA, 21 nt, Artificial Sequence
  Synthetic
  misc_feature (7)..(7): n is a, c, g, or u
ccagucnuuaaacacacaguc

SEQ ID NO: 134671 - RNA, 22 nt, Artificial Sequence
  Synthetic
  misc_feature (8)..(8): n is a, c, g, or u
cccagucnuuaaacacacaguc

SEQ ID NO: 134672 - RNA, 23 nt, Artificial Sequence
  Synthetic
  misc_feature (9)..(9): n is a, c, g, or u
ucccagucnuuaaacacacaguc

SEQ ID NO: 134673 - RNA, 24 nt, Artificial Sequence
  Synthetic
  misc_feature (10)..(10): n is a, c, g, or u
cucccagucnuuaaacacacaguc

SEQ ID NO: 134674 - RNA, 18 nt, Artificial Sequence
  Synthetic
  misc_feature (6)..(6): n is a, c, g, or u
ccccancuccucccaguc

SEQ ID NO: 134675 - RNA, 19 nt, Artificial Sequence
  Synthetic
  misc_feature (7)..(7): n is a, c, g, or u
cccccancuccucccaguc

SEQ ID NO: 134676 - RNA, 20 nt, Artificial Sequence
  Synthetic
  misc_feature (8)..(8): n is a, c, g, or u
ucccccancuccucccaguc

SEQ ID NO: 134677 - RNA, 21 nt, Artificial Sequence
  Synthetic
  misc_feature (9)..(9): n is a, c, g, or u
cucccccancuccucccaguc

SEQ ID NO: 134678 - RNA, 22 nt, Artificial Sequence
  Synthetic
  misc_feature (10)..(10): n is a, c, g, or u
ccucccccancuccucccaguc

SEQ ID NO: 134679 - RNA, 23 nt, Artificial Sequence
  Synthetic
  misc_feature (11)..(11): n is a, c, g, or u
uccucccccancuccucccaguc

SEQ ID NO: 134680 - RNA, 24 nt, Artificial Sequence
  Synthetic
  misc_feature (12)..(12): n is a, c, g, or u
cuccucccccancuccucccaguc

SEQ ID NO: 134681 - RNA, 18 nt, Artificial Sequence
  Synthetic
  misc_feature (12)..(12): n is a, c, g, or u
gaaggggacganagaguc

SEQ ID NO: 134682 - RNA, 19 nt, Artificial Sequence
  Synthetic
  misc_feature (13)..(13): n is a, c, g, or u
agaaggggacganagaguc

SEQ ID NO: 134683 - RNA, 20 nt, Artificial Sequence
  Synthetic
  misc_feature (14)..(14): n is a, c, g, or u
gagaaggggacganagaguc

SEQ ID NO: 134684 - RNA, 21 nt, Artificial Sequence
  Synthetic
  misc_feature (15)..(15): n is a, c, g, or u
ggagaaggggacganagaguc

SEQ ID NO: 134685 - RNA, 22 nt, Artificial Sequence
  Synthetic
  misc_feature (16)..(16): n is a, c, g, or u
cggagaaggggacganagaguc

SEQ ID NO: 134686 - RNA, 23 nt, Artificial Sequence
  Synthetic
  misc_feature (17)..(17): n is a, c, g, or u
acggagaaggggacganagaguc

SEQ ID NO: 134687 - RNA, 24 nt, Artificial Sequence
  Synthetic
  misc_feature (18)..(18): n is a, c, g, or u
gacggagaaggggacganagaguc

SEQ ID NO: 134688 - RNA, 18 nt, Artificial Sequence
  Synthetic
uugacauugcugggaguc

SEQ ID NO: 134689 - RNA, 19 nt, Artificial Sequence
  Synthetic
guugacauugcugggaguc

SEQ ID NO: 134690 - RNA, 20 nt, Artificial Sequence
  Synthetic
cguugacauugcugggaguc

SEQ ID NO: 134691 - RNA, 21 nt, Artificial Sequence
  Synthetic
ucguugacauugcugggaguc

SEQ ID NO: 134692 - RNA, 22 nt, Artificial Sequence
  Synthetic
gucguugacauugcugggaguc

SEQ ID NO: 134693 - RNA, 23 nt, Artificial Sequence
  Synthetic
ggucguugacauugcugggaguc

SEQ ID NO: 134694 - RNA, 24 nt, Artificial Sequence
  Synthetic
cggucguugacauugcugggaguc

SEQ ID NO: 134695 - RNA, 18 nt, Artificial Sequence
  Synthetic
uuucccaccuuaugaguc

SEQ ID NO: 134696 - RNA, 19 nt, Artificial Sequence
  Synthetic
  misc_feature (1)..(1): n is a, c, g, or u
nuuucccaccuuaugaguc

SEQ ID NO: 134697 - RNA, 20 nt, Artificial Sequence
  Synthetic
  misc_feature (2)..(2): n is a, c, g, or u
anuuucccaccuuaugaguc

SEQ ID NO: 134698 - RNA, 21 nt, Artificial Sequence
  Synthetic
  misc_feature (3)..(3): n is a, c, g, or u
aanuuucccaccuuaugaguc

SEQ ID NO: 134699 - RNA, 22 nt, Artificial Sequence
  Synthetic
  misc_feature (1)..(1): n is a, c, g, or u
  misc_feature (4)..(4): n is a, c, g, or u
naanuuucccaccuuaugaguc

SEQ ID NO: 134700 - RNA, 23 nt, Artificial Sequence
  Synthetic
  misc_feature (2)..(2): n is a, c, g, or u
  misc_feature (5)..(5): n is a, c, g, or u
unaanuuucccaccuuaugaguc

SEQ ID NO: 134701 - RNA, 24 nt, Artificial Sequence
  Synthetic
  misc_feature (3)..(3): n is a, c, g, or u
  misc_feature (6)..(6): n is a, c, g, or u
gunaanuuucccaccuuaugaguc

SEQ ID NO: 134702 - RNA, 18 nt, Artificial Sequence
  Synthetic
gccaguggggguugcguc

SEQ ID NO: 134703 - RNA, 19 nt, Artificial Sequence
  Synthetic
agccaguggggguugcguc

SEQ ID NO: 134704 - RNA, 20 nt, Artificial Sequence
  Synthetic
cagccaguggggguugcguc

SEQ ID NO: 134705 - RNA, 21 nt, Artificial Sequence
  Synthetic
ccagccaguggggguugcguc

SEQ ID NO: 134706 - RNA, 22 nt, Artificial Sequence
  Synthetic
cccagccaguggggguugcguc

SEQ ID NO: 134707 - RNA, 23 nt, Artificial Sequence
  Synthetic
ccccagccaguggggguugcguc

SEQ ID NO: 134708 - RNA, 24 nt, Artificial Sequence
  Synthetic
gccccagccaguggggguugcguc

SEQ ID NO: 134709 - RNA, 18 nt, Artificial Sequence
  Synthetic
  misc_feature (14)..(14): n is a, c, g, or u
gcgauugagaucuncguc

SEQ ID NO: 134710 - RNA, 19 nt, Artificial Sequence
  Synthetic
  misc_feature (15)..(15): n is a, c, g, or u
ggcgauugagaucuncguc

SEQ ID NO: 134711 - RNA, 20 nt, Artificial Sequence
  Synthetic
  misc_feature (16)..(16): n is a, c, g, or u
cggcgauugagaucuncguc

SEQ ID NO: 134712 - RNA, 21 nt, Artificial Sequence
  Synthetic
  misc_feature (17)..(17): n is a, c, g, or u
gcggcgauugagaucuncguc

SEQ ID NO: 134713 - RNA, 22 nt, Artificial Sequence
  Synthetic
  misc_feature (18)..(18): n is a, c, g, or u
cgcggcgauugagaucuncguc

SEQ ID NO: 134714 - RNA, 23 nt, Artificial Sequence
  Synthetic
  misc_feature (19)..(19): n is a, c, g, or u
acgcggcgauugagaucuncguc

SEQ ID NO: 134715 - RNA, 24 nt, Artificial Sequence
  Synthetic
  misc_feature (20)..(20): n is a, c, g, or u
gacgcggcgauugagaucuncguc

SEQ ID NO: 134716 - RNA, 18 nt, Artificial Sequence
  Synthetic
  misc_feature (7)..(7): n is a, c, g, or u
gccccgngaggggucguc

SEQ ID NO: 134717 - RNA, 19 nt, Artificial Sequence
  Synthetic
  misc_feature (8)..(8): n is a, c, g, or u
ggccccgngaggggucguc

SEQ ID NO: 134718 - RNA, 20 nt, Artificial Sequence
  Synthetic
  misc_feature (9)..(9): n is a, c, g, or u
cggccccgngaggggucguc

SEQ ID NO: 134719 - RNA, 21 nt, Artificial Sequence
  Synthetic
  misc_feature (10)..(10): n is a, c, g, or u
gcggccccgngaggggucguc

SEQ ID NO: 134720 - RNA, 22 nt, Artificial Sequence
  Synthetic
  misc_feature (11)..(11): n is a, c, g, or u
agcggccccgngaggggucguc

SEQ ID NO: 134721 - RNA, 23 nt, Artificial Sequence
  Synthetic
  misc_feature (12)..(12): n is a, c, g, or u
aagcggccccgngaggggucguc

SEQ ID NO: 134722 - RNA, 24 nt, Artificial Sequence
  Synthetic
  misc_feature (13)..(13): n is a, c, g, or u
caagcggccccgngaggggucguc

SEQ ID NO: 134723 - RNA, 18 nt, Artificial Sequence
  Synthetic
uaggccucaaggucgguc

SEQ ID NO: 134724 - RNA, 19 nt, Artificial Sequence
  Synthetic
guaggccucaaggucgguc

SEQ ID NO: 134725 - RNA, 20 nt, Artificial Sequence
  Synthetic
aguaggccucaaggucgguc

SEQ ID NO: 134726 - RNA, 21 nt, Artificial Sequence
  Synthetic
aaguaggccucaaggucgguc

SEQ ID NO: 134727 - RNA, 22 nt, Artificial Sequence
  Synthetic
gaaguaggccucaaggucgguc

SEQ ID NO: 134728 - RNA, 23 nt, Artificial Sequence
  Synthetic
ugaaguaggccucaaggucgguc

SEQ ID NO: 134729 - RNA, 24 nt, Artificial Sequence
  Synthetic
uugaaguaggccucaaggucgguc

SEQ ID NO: 134730 - RNA, 18 nt, Artificial Sequence
  Synthetic
guaacacgagcagggguc

SEQ ID NO: 134731 - RNA, 19 nt, Artificial Sequence
  Synthetic
uguaacacgagcagggguc

SEQ ID NO: 134732 - RNA, 20 nt, Artificial Sequence
  Synthetic
cuguaacacgagcagggguc

SEQ ID NO: 134733 - RNA, 21 nt, Artificial Sequence
  Synthetic
ccuguaacacgagcagggguc

SEQ ID NO: 134734 - RNA, 22 nt, Artificial Sequence
  Synthetic
gccuguaacacgagcagggguc

SEQ ID NO: 134735 - RNA, 23 nt, Artificial Sequence
  Synthetic
cgccuguaacacgagcagggguc

SEQ ID NO: 134736 - RNA, 24 nt, Artificial Sequence
  Synthetic
ccgccuguaacacgagcagggguc

SEQ ID NO: 134737 - RNA, 18 nt, Artificial Sequence
  Synthetic
uaggggcauuuggugguc

SEQ ID NO: 134738 - RNA, 19 nt, Artificial Sequence
  Synthetic
auaggggcauuuggugguc

SEQ ID NO: 134739 - RNA, 20 nt, Artificial Sequence
  Synthetic
gauaggggcauuuggugguc

SEQ ID NO: 134740 - RNA, 21 nt, Artificial Sequence
  Synthetic
agauaggggcauuuggugguc

SEQ ID NO: 134741 - RNA, 22 nt, Artificial Sequence
  Synthetic
aagauaggggcauuuggugguc

SEQ ID NO: 134742 - RNA, 23 nt, Artificial Sequence
  Synthetic
uaagauaggggcauuuggugguc

SEQ ID NO: 134743 - RNA, 24 nt, Artificial Sequence
  Synthetic
auaagauaggggcauuuggugguc

SEQ ID NO: 134744 - RNA, 18 nt, Artificial Sequence
  Synthetic
auugugaggauucuuguc

SEQ ID NO: 134745 - RNA, 19 nt, Artificial Sequence
  Synthetic
uauugugaggauucuuguc

SEQ ID NO: 134746 - RNA, 20 nt, Artificial Sequence
  Synthetic
guauugugaggauucuuguc

SEQ ID NO: 134747 - RNA, 21 nt, Artificial Sequence
  Synthetic
gguauugugaggauucuuguc

SEQ ID NO: 134748 - RNA, 22 nt, Artificial Sequence
  Synthetic
cgguauugugaggauucuuguc

SEQ ID NO: 134749 - RNA, 23 nt, Artificial Sequence
  Synthetic
gcgguauugugaggauucuuguc

SEQ ID NO: 134750 - RNA, 24 nt, Artificial Sequence
  Synthetic
ugcgguauugugaggauucuuguc

SEQ ID NO: 134751 - RNA, 18 nt, Artificial Sequence
  Synthetic
auacuaacauugagauuc

SEQ ID NO: 134752 - RNA, 19 nt, Artificial Sequence
  Synthetic
aauacuaacauugagauuc

SEQ ID NO: 134753 - RNA, 20 nt, Artificial Sequence
  Synthetic
gaauacuaacauugagauuc

SEQ ID NO: 134754 - RNA, 21 nt, Artificial Sequence
  Synthetic
ggaauacuaacauugagauuc

SEQ ID NO: 134755 - RNA, 22 nt, Artificial Sequence
  Synthetic
aggaauacuaacauugagauuc

SEQ ID NO: 134756 - RNA, 23 nt, Artificial Sequence
  Synthetic
aaggaauacuaacauugagauuc

SEQ ID NO: 134757 - RNA, 24 nt, Artificial Sequence
  Synthetic
caaggaauacuaacauugagauuc

SEQ ID NO: 134758 - RNA, 18 nt, Artificial Sequence
  Synthetic
  misc_feature (9)..(9): n is a, c, g, or u
uauagaaunccagccuuc

SEQ ID NO: 134759 - RNA, 19 nt, Artificial Sequence
  Synthetic
  misc_feature (10)..(10): n is a, c, g, or u
auauagaaunccagccuuc

SEQ ID NO: 134760 - RNA, 20 nt, Artificial Sequence
  Synthetic
  misc_feature (11)..(11): n is a, c, g, or u
uauauagaaunccagccuuc

SEQ ID NO: 134761 - RNA, 21 nt, Artificial Sequence
  Synthetic
  misc_feature (12)..(12): n is a, c, g, or u
uuauauagaaunccagccuuc

SEQ ID NO: 134762 - RNA, 22 nt, Artificial Sequence
  Synthetic
  misc_feature (13)..(13): n is a, c, g, or u
cuuauauagaaunccagccuuc

SEQ ID NO: 134763 - RNA, 23 nt, Artificial Sequence
  Synthetic
  misc_feature (14)..(14): n is a, c, g, or u
ucuuauauagaaunccagccuuc

SEQ ID NO: 134764 - RNA, 24 nt, Artificial Sequence
  Synthetic
  misc_feature (15)..(15): n is a, c, g, or u
cucuuauauagaaunccagccuuc

SEQ ID NO: 134765 - RNA, 18 nt, Artificial Sequence
  Synthetic
cccgagauugagaucuuc

SEQ ID NO: 134766 - RNA, 19 nt, Artificial Sequence
  Synthetic
ucccgagauugagaucuuc

SEQ ID NO: 134767 - RNA, 20 nt, Artificial Sequence
  Synthetic
uucccgagauugagaucuuc

SEQ ID NO: 134768 - RNA, 21 nt, Artificial Sequence
  Synthetic
auucccgagauugagaucuuc

SEQ ID NO: 134769 - RNA, 22 nt, Artificial Sequence
  Synthetic
gauucccgagauugagaucuuc

SEQ ID NO: 134770 - RNA, 23 nt, Artificial Sequence
  Synthetic
agauucccgagauugagaucuuc

SEQ ID NO: 134771 - RNA, 24 nt, Artificial Sequence
  Synthetic
gagauucccgagauugagaucuuc

SEQ ID NO: 134772 - RNA, 18 nt, Artificial Sequence
  Synthetic
  misc_feature (5)..(5): n is a, c, g, or u
  misc_feature (11)..(11): n is a, c, g, or u
caagnacagunucucuuc

SEQ ID NO: 134773 - RNA, 19 nt, Artificial Sequence
  Synthetic
  misc_feature (6)..(6): n is a, c, g, or u
  misc_feature (12)..(12): n is a, c, g, or u
ucaagnacagunucucuuc

SEQ ID NO: 134774 - RNA, 20 nt, Artificial Sequence
  Synthetic
  misc_feature (1)..(1): n is a, c, g, or u
  misc_feature (7)..(7): n is a, c, g, or u
  misc_feature (13)..(13): n is a, c, g, or u
nucaagnacagunucucuuc

SEQ ID NO: 134775 - RNA, 21 nt, Artificial Sequence
  Synthetic
  misc_feature (2)..(2): n is a, c, g, or u
  misc_feature (8)..(8): n is a, c, g, or u
  misc_feature (14)..(14): n is a, c, g, or u
anucaagnacagunucucuuc

SEQ ID NO: 134776 - RNA, 22 nt, Artificial Sequence
  Synthetic
  misc_feature (3)..(3): n is a, c, g, or u
  misc_feature (9)..(9): n is a, c, g, or u
  misc_feature (15)..(15): n is a, c, g, or u
uanucaagnacagunucucuuc

SEQ ID NO: 134777 - RNA, 23 nt, Artificial Sequence
  Synthetic
  misc_feature (4)..(4): n is a, c, g, or u
  misc_feature (10)..(10): n is a, c, g, or u
  misc_feature (16)..(16): n is a, c, g, or u
auanucaagnacagunucucuuc

SEQ ID NO: 134778 - RNA, 24 nt, Artificial Sequence
  Synthetic
  misc_feature (5)..(5): n is a, c, g, or u
  misc_feature (11)..(11): n is a, c, g, or u
  misc_feature (17)..(17): n is a, c, g, or u
aauanucaagnacagunucucuuc

SEQ ID NO: 134779 - RNA, 18 nt, Artificial Sequence
  Synthetic
gcgagggaguucuucuuc

SEQ ID NO: 134780 - RNA, 19 nt, Artificial Sequence
  Synthetic
ggcgagggaguucuucuuc

SEQ ID NO: 134781 - RNA, 20 nt, Artificial Sequence
  Synthetic
aggcgagggaguucuucuuc

SEQ ID NO: 134782 - RNA, 21 nt, Artificial Sequence
  Synthetic
gaggcgagggaguucuucuuc

SEQ ID NO: 134783 - RNA, 22 nt, Artificial Sequence
  Synthetic
cgaggcgagggaguucuucuuc

SEQ ID NO: 134784 - RNA, 23 nt, Artificial Sequence
  Synthetic
gcgaggcgagggaguucuucuuc

SEQ ID NO: 134785 - RNA, 24 nt, Artificial Sequence
  Synthetic
ugcgaggcgagggaguucuucuuc

SEQ ID NO: 134786 - RNA, 18 nt, Artificial Sequence
  Synthetic
  misc_feature (3)..(3): n is a, c, g, or u
  misc_feature (11)..(11): n is a, c, g, or u
  misc_feature (13)..(13): n is a, c, g, or u
gancaggguunanuguuc

SEQ ID NO: 134787 - RNA, 19 nt, Artificial Sequence
  Synthetic
  misc_feature (4)..(4): n is a, c, g, or u
  misc_feature (12)..(12): n is a, c, g, or u
  misc_feature (14)..(14): n is a, c, g, or u
ggancaggguunanuguuc

SEQ ID NO: 134788 - RNA, 20 nt, Artificial Sequence
  Synthetic
  misc_feature (1)..(1): n is a, c, g, or u
  misc_feature (5)..(5): n is a, c, g, or u
  misc_feature (13)..(13): n is a, c, g, or u
  misc_feature (15)..(15): n is a, c, g, or u
nggancaggguunanuguuc

SEQ ID NO: 134789 - RNA, 21 nt, Artificial Sequence
  Synthetic
  misc_feature (2)..(2): n is a, c, g, or u
  misc_feature (6)..(6): n is a, c, g, or u
  misc_feature (14)..(14): n is a, c, g, or u
  misc_feature (16)..(16): n is a, c, g, or u
unggancaggguunanuguuc

SEQ ID NO: 134790 - RNA, 22 nt, Artificial Sequence
  Synthetic
  misc_feature (3)..(3): n is a, c, g, or u
  misc_feature (7)..(7): n is a, c, g, or u
  misc_feature (15)..(15): n is a, c, g, or u
  misc_feature (17)..(17): n is a, c, g, or u
uunggancaggguunanuguuc

SEQ ID NO: 134791 - RNA, 23 nt, Artificial Sequence
  Synthetic
  misc_feature (4)..(4): n is a, c, g, or u
  misc_feature (8)..(8): n is a, c, g, or u
  misc_feature (16)..(16): n is a, c, g, or u
  misc_feature (18)..(18): n is a, c, g, or u
auunggancaggguunanuguuc

SEQ ID NO: 134792 - RNA, 24 nt, Artificial Sequence
  Synthetic
  misc_feature (5)..(5): n is a, c, g, or u
  misc_feature (9)..(9): n is a, c, g, or u
  misc_feature (17)..(17): n is a, c, g, or u
  misc_feature (19)..(19): n is a, c, g, or u
uauunggancaggguunanuguuc

SEQ ID NO: 134793 - RNA, 18 nt, Artificial Sequence
  Synthetic
  misc_feature (4)..(4): n is a, c, g, or u
augnuguagcucuuguuc

SEQ ID NO: 134794 - RNA, 19 nt, Artificial Sequence
  Synthetic
  misc_feature (5)..(5): n is a, c, g, or u
caugnuguagcucuuguuc

SEQ ID NO: 134795 - RNA, 20 nt, Artificial Sequence
  Synthetic
  misc_feature (6)..(6): n is a, c, g, or u
ccaugnuguagcucuuguuc

SEQ ID NO: 134796 - RNA, 21 nt, Artificial Sequence
  Synthetic
  misc_feature (7)..(7): n is a, c, g, or u
cccaugnuguagcucuuguuc

SEQ ID NO: 134797 - RNA, 22 nt, Artificial Sequence
  Synthetic
  misc_feature (8)..(8): n is a, c, g, or u
ucccaugnuguagcucuuguuc

SEQ ID NO: 134798 - RNA, 23 nt, Artificial Sequence
  Synthetic
  misc_feature (9)..(9): n is a, c, g, or u
cucccaugnuguagcucuuguuc

SEQ ID NO: 134799 - RNA, 24 nt, Artificial Sequence
  Synthetic
  misc_feature (10)..(10): n is a, c, g, or u
ccucccaugnuguagcucuuguuc

SEQ ID NO: 134800 - RNA, 18 nt, Artificial Sequence
  Synthetic
  misc_feature (6)..(6): n is a, c, g, or u
ggaaangauguauauuuc

SEQ ID NO: 134801 - RNA, 19 nt, Artificial Sequence
  Synthetic
  misc_feature (7)..(7): n is a, c, g, or u
uggaaangauguauauuuc

SEQ ID NO: 134802 - RNA, 20 nt, Artificial Sequence
  Synthetic
  misc_feature (8)..(8): n is a, c, g, or u
auggaaangauguauauuuc

SEQ ID NO: 134803 - RNA, 21 nt, Artificial Sequence
  Synthetic
  misc_feature (9)..(9): n is a, c, g, or u
cauggaaangauguauauuuc

SEQ ID NO: 134804 - RNA, 22 nt, Artificial Sequence
  Synthetic
  misc_feature (10)..(10): n is a, c, g, or u
ccauggaaangauguauauuuc

SEQ ID NO: 134805 - RNA, 23 nt, Artificial Sequence
  Synthetic
  misc_feature (11)..(11): n is a, c, g, or u
gccauggaaangauguauauuuc

SEQ ID NO: 134806 - RNA, 24 nt, Artificial Sequence
  Synthetic
  misc_feature (12)..(12): n is a, c, g, or u
agccauggaaangauguauauuuc

SEQ ID NO: 134807 - RNA, 18 nt, Artificial Sequence
  Synthetic
ucuaacaacaguaguuuc

SEQ ID NO: 134808 - RNA, 19 nt, Artificial Sequence
  Synthetic
gucuaacaacaguaguuuc

SEQ ID NO: 134809 - RNA, 20 nt, Artificial Sequence
  Synthetic
cgucuaacaacaguaguuuc

SEQ ID NO: 134810 - RNA, 21 nt, Artificial Sequence
  Synthetic
ucgucuaacaacaguaguuuc

SEQ ID NO: 134811 - RNA, 22 nt, Artificial Sequence
  Synthetic
gucgucuaacaacaguaguuuc

SEQ ID NO: 134812 - RNA, 23 nt, Artificial Sequence
  Synthetic
cgucgucuaacaacaguaguuuc

SEQ ID NO: 134813 - RNA, 24 nt, Artificial Sequence
  Synthetic
  misc_feature (1)..(1): n is a, c, g, or u
ncgucgucuaacaacaguaguuuc

SEQ ID NO: 134814 - RNA, 18 nt, Artificial Sequence
  Synthetic
  misc_feature (1)..(2): n is a, c, g, or u
  misc_feature (5)..(5): n is a, c, g, or u
nnuunacaggaaguuuuc

SEQ ID NO: 134815 - RNA, 19 nt, Artificial Sequence
  Synthetic
  misc_feature (2)..(3): n is a, c, g, or u
  misc_feature (6)..(6): n is a, c, g, or u
cnnuunacaggaaguuuuc

SEQ ID NO: 134816 - RNA, 20 nt, Artificial Sequence
  Synthetic
  misc_feature (1)..(1): n is a, c, g, or u
  misc_feature (3)..(4): n is a, c, g, or u
  misc_feature (7)..(7): n is a, c, g, or u
ncnnuunacaggaaguuuuc

SEQ ID NO: 134817 - RNA, 21 nt, Artificial Sequence
  Synthetic
  misc_feature (2)..(2): n is a, c, g, or u
  misc_feature (4)..(5): n is a, c, g, or u
  misc_feature (8)..(8): n is a, c, g, or u
gncnnuunacaggaaguuuuc

SEQ ID NO: 134818 - RNA, 22 nt, Artificial Sequence
  Synthetic
  misc_feature (3)..(3): n is a, c, g, or u
  misc_feature (5)..(6): n is a, c, g, or u
  misc_feature (9)..(9): n is a, c, g, or u
ggncnnuunacaggaaguuuuc

SEQ ID NO: 134819 - RNA, 23 nt, Artificial Sequence
  Synthetic
  misc_feature (4)..(4): n is a, c, g, or u
  misc_feature (6)..(7): n is a, c, g, or u
  misc_feature (10)..(10): n is a, c, g, or u
aggncnnuunacaggaaguuuuc

SEQ ID NO: 134820 - RNA, 24 nt, Artificial Sequence
  Synthetic
  misc_feature (5)..(5): n is a, c, g, or u
  misc_feature (7)..(8): n is a, c, g, or u
  misc_feature (11)..(11): n is a, c, g, or u
uaggncnnuunacaggaaguuuuc

SEQ ID NO: 134821 - RNA, 18 nt, Artificial Sequence
  Synthetic
  misc_feature (5)..(5): n is a, c, g, or u
cagunucucuuccaaaag

SEQ ID NO: 134822 - RNA, 19 nt, Artificial Sequence
  Synthetic
  misc_feature (6)..(6): n is a, c, g, or u
acagunucucuuccaaaag

SEQ ID NO: 134823 - RNA, 20 nt, Artificial Sequence
  Synthetic
  misc_feature (1)..(1): n is a, c, g, or u
  misc_feature (7)..(7): n is a, c, g, or u
nacagunucucuuccaaaag

SEQ ID NO: 134824 - RNA, 21 nt, Artificial Sequence
  Synthetic
  misc_feature (2)..(2): n is a, c, g, or u
  misc_feature (8)..(8): n is a, c, g, or u
gnacagunucucuuccaaaag

SEQ ID NO: 134825 - RNA, 22 nt, Artificial Sequence
  Synthetic
  misc_feature (3)..(3): n is a, c, g, or u
  misc_feature (9)..(9): n is a, c, g, or u
agnacagunucucuuccaaaag

SEQ ID NO: 134826 - RNA, 23 nt, Artificial Sequence
  Synthetic
  misc_feature (4)..(4): n is a, c, g, or u
  misc_feature (10)..(10): n is a, c, g, or u
aagnacagunucucuuccaaaag

SEQ ID NO: 134827 - RNA, 24 nt, Artificial Sequence
  Synthetic
  misc_feature (5)..(5): n is a, c, g, or u
  misc_feature (11)..(11): n is a, c, g, or u
caagnacagunucucuuccaaaag

SEQ ID NO: 134828 - RNA, 18 nt, Artificial Sequence
  Synthetic
  misc_feature (12)..(12): n is a, c, g, or u
guaaauggagcngcaaag

SEQ ID NO: 134829 - RNA, 19 nt, Artificial Sequence
  Synthetic
  misc_feature (13)..(13): n is a, c, g, or u
uguaaauggagcngcaaag

SEQ ID NO: 134830 - RNA, 20 nt, Artificial Sequence
  Synthetic
  misc_feature (14)..(14): n is a, c, g, or u
guguaaauggagcngcaaag

SEQ ID NO: 134831 - RNA, 21 nt, Artificial Sequence
  Synthetic
  misc_feature (15)..(15): n is a, c, g, or u
uguguaaauggagcngcaaag

SEQ ID NO: 134832 - RNA, 22 nt, Artificial Sequence
  Synthetic
  misc_feature (16)..(16): n is a, c, g, or u
uuguguaaauggagcngcaaag

SEQ ID NO: 134833 - RNA, 23 nt, Artificial Sequence
  Synthetic
  misc_feature (17)..(17): n is a, c, g, or u
auuguguaaauggagcngcaaag

SEQ ID NO: 134834 - RNA, 24 nt, Artificial Sequence
  Synthetic
  misc_feature (18)..(18): n is a, c, g, or u
cauuguguaaauggagcngcaaag

SEQ ID NO: 134835 - RNA, 18 nt, Artificial Sequence
  Synthetic
uguaaguuggcgagaaag

SEQ ID NO: 134836 - RNA, 19 nt, Artificial Sequence
  Synthetic
uuguaaguuggcgagaaag

SEQ ID NO: 134837 - RNA, 20 nt, Artificial Sequence
  Synthetic
cuuguaaguuggcgagaaag

SEQ ID NO: 134838 - RNA, 21 nt, Artificial Sequence
  Synthetic
ccuuguaaguuggcgagaaag

SEQ ID NO: 134839 - RNA, 22 nt, Artificial Sequence
  Synthetic
gccuuguaaguuggcgagaaag

SEQ ID NO: 134840 - RNA, 23 nt, Artificial Sequence
  Synthetic
ggccuuguaaguuggcgagaaag

SEQ ID NO: 134841 - RNA, 24 nt, Artificial Sequence
  Synthetic
aggccuuguaaguuggcgagaaag

SEQ ID NO: 134842 - RNA, 18 nt, Artificial Sequence
  Synthetic
  misc_feature (11)..(11): n is a, c, g, or u
cauccauauancugaaag

SEQ ID NO: 134843 - RNA, 19 nt, Artificial Sequence
  Synthetic
  misc_feature (12)..(12): n is a, c, g, or u
ucauccauauancugaaag

SEQ ID NO: 134844 - RNA, 20 nt, Artificial Sequence
  Synthetic
  misc_feature (13)..(13): n is a, c, g, or u
aucauccauauancugaaag

SEQ ID NO: 134845 - RNA, 21 nt, Artificial Sequence
  Synthetic
  misc_feature (14)..(14): n is a, c, g, or u
caucauccauauancugaaag

SEQ ID NO: 134846 - RNA, 22 nt, Artificial Sequence
  Synthetic
  misc_feature (15)..(15): n is a, c, g, or u
acaucauccauauancugaaag

SEQ ID NO: 134847 - RNA, 23 nt, Artificial Sequence
  Synthetic
  misc_feature (16)..(16): n is a, c, g, or u
cacaucauccauauancugaaag

SEQ ID NO: 134848 - RNA, 24 nt, Artificial Sequence
  Synthetic
  misc_feature (17)..(17): n is a, c, g, or u
ccacaucauccauauancugaaag

SEQ ID NO: 134849 - RNA, 18 nt, Artificial Sequence
  Synthetic
ugccauucaggauuaaag

SEQ ID NO: 134850 - RNA, 19 nt, Artificial Sequence
  Synthetic
uugccauucaggauuaaag

SEQ ID NO: 134851 - RNA, 20 nt, Artificial Sequence
  Synthetic
uuugccauucaggauuaaag

SEQ ID NO: 134852 - RNA, 21 nt, Artificial Sequence
  Synthetic
guuugccauucaggauuaaag

SEQ ID NO: 134853 - RNA, 22 nt, Artificial Sequence
  Synthetic
aguuugccauucaggauuaaag

SEQ ID NO: 134854 - RNA, 23 nt, Artificial Sequence
  Synthetic
gaguuugccauucaggauuaaag

SEQ ID NO: 134855 - RNA, 24 nt, Artificial Sequence
  Synthetic
ggaguuugccauucaggauuaaag

SEQ ID NO: 134856 - RNA, 18 nt, Artificial Sequence
  Synthetic
aggauucuugucaacaag

SEQ ID NO: 134857 - RNA, 19 nt, Artificial Sequence
  Synthetic
gaggauucuugucaacaag

SEQ ID NO: 134858 - RNA, 20 nt, Artificial Sequence
  Synthetic
ugaggauucuugucaacaag

SEQ ID NO: 134859 - RNA, 21 nt, Artificial Sequence
  Synthetic
gugaggauucuugucaacaag

SEQ ID NO: 134860 - RNA, 22 nt, Artificial Sequence
  Synthetic
ugugaggauucuugucaacaag

SEQ ID NO: 134861 - RNA, 23 nt, Artificial Sequence
  Synthetic
uugugaggauucuugucaacaag

SEQ ID NO: 134862 - RNA, 24 nt, Artificial Sequence
  Synthetic
auugugaggauucuugucaacaag

SEQ ID NO: 134863 - RNA, 18 nt, Artificial Sequence
  Synthetic
  misc_feature (2)..(2): n is a, c, g, or u
cngacggaaggaaagaag

SEQ ID NO: 134864 - RNA, 19 nt, Artificial Sequence
  Synthetic
  misc_feature (1)..(1): n is a, c, g, or u
  misc_feature (3)..(3): n is a, c, g, or u
ncngacggaaggaaagaag

SEQ ID NO: 134865 - RNA, 20 nt, Artificial Sequence
  Synthetic
  misc_feature (2)..(2): n is a, c, g, or u
  misc_feature (4)..(4): n is a, c, g, or u
cncngacggaaggaaagaag

SEQ ID NO: 134866 - RNA, 21 nt, Artificial Sequence
  Synthetic
  misc_feature (3)..(3): n is a, c, g, or u
  misc_feature (5)..(5): n is a, c, g, or u
ucncngacggaaggaaagaag

SEQ ID NO: 134867 - RNA, 22 nt, Artificial Sequence
  Synthetic
  misc_feature (4)..(4): n is a, c, g, or u
  misc_feature (6)..(6): n is a, c, g, or u
aucncngacggaaggaaagaag

SEQ ID NO: 134868 - RNA, 23 nt, Artificial Sequence
  Synthetic
  misc_feature (5)..(5): n is a, c, g, or u
  misc_feature (7)..(7): n is a, c, g, or u
gaucncngacggaaggaaagaag

SEQ ID NO: 134869 - RNA, 24 nt, Artificial Sequence
  Synthetic
  misc_feature (6)..(6): n is a, c, g, or u
  misc_feature (8)..(8): n is a, c, g, or u
agaucncngacggaaggaaagaag

SEQ ID NO: 134870 - RNA, 18 nt, Artificial Sequence
  Synthetic
agaagaaccaauaagaag

SEQ ID NO: 134871 - RNA, 19 nt, Artificial Sequence
  Synthetic
cagaagaaccaauaagaag

SEQ ID NO: 134872 - RNA, 20 nt, Artificial Sequence
  Synthetic
ccagaagaaccaauaagaag

SEQ ID NO: 134873 - RNA, 21 nt, Artificial Sequence
  Synthetic
uccagaagaaccaauaagaag

SEQ ID NO: 134874 - RNA, 22 nt, Artificial Sequence
  Synthetic
auccagaagaaccaauaagaag

SEQ ID NO: 134875 - RNA, 23 nt, Artificial Sequence
  Synthetic
aauccagaagaaccaauaagaag

SEQ ID NO: 134876 - RNA, 24 nt, Artificial Sequence
  Synthetic
uaauccagaagaaccaauaagaag

SEQ ID NO: 134877 - RNA, 18 nt, Artificial Sequence
  Synthetic
aaggaaagaagucagaag

SEQ ID NO: 134878 - RNA, 19 nt, Artificial Sequence
  Synthetic
gaaggaaagaagucagaag

SEQ ID NO: 134879 - RNA, 20 nt, Artificial Sequence
  Synthetic
ggaaggaaagaagucagaag

SEQ ID NO: 134880 - RNA, 21 nt, Artificial Sequence
  Synthetic
cggaaggaaagaagucagaag

SEQ ID NO: 134881 - RNA, 22 nt, Artificial Sequence
  Synthetic
acggaaggaaagaagucagaag

SEQ ID NO: 134882 - RNA, 23 nt, Artificial Sequence
  Synthetic
gacggaaggaaagaagucagaag

SEQ ID NO: 134883 - RNA, 24 nt, Artificial Sequence
  Synthetic
  misc_feature (1)..(1): n is a, c, g, or u
ngacggaaggaaagaagucagaag

SEQ ID NO: 134884 - RNA, 18 nt, Artificial Sequence
  Synthetic
  misc_feature (2)..(2): n is a, c, g, or u
  misc_feature (8)..(8): n is a, c, g, or u
  misc_feature (10)..(10): n is a, c, g, or u
gnagaucncngacggaag

SEQ ID NO: 134885 - RNA, 19 nt, Artificial Sequence
  Synthetic
  misc_feature (3)..(3): n is a, c, g, or u
  misc_feature (9)..(9): n is a, c, g, or u
  misc_feature (11)..(11): n is a, c, g, or u
agnagaucncngacggaag

SEQ ID NO: 134886 - RNA, 20 nt, Artificial Sequence
  Synthetic
  misc_feature (1)..(1): n is a, c, g, or u
  misc_feature (4)..(4): n is a, c, g, or u
  misc_feature (10)..(10): n is a, c, g, or u
  misc_feature (12)..(12): n is a, c, g, or u
nagnagaucncngacggaag

SEQ ID NO: 134887 - RNA, 21 nt, Artificial Sequence
  Synthetic
  misc_feature (2)..(2): n is a, c, g, or u
  misc_feature (5)..(5): n is a, c, g, or u
  misc_feature (11)..(11): n is a, c, g, or u
  misc_feature (13)..(13): n is a, c, g, or u
cnagnagaucncngacggaag

SEQ ID NO: 134888 - RNA, 22 nt, Artificial Sequence
  Synthetic
  misc_feature (3)..(3): n is a, c, g, or u
  misc_feature (6)..(6): n is a, c, g, or u
  misc_feature (12)..(12): n is a, c, g, or u
  misc_feature (14)..(14): n is a, c, g, or u
ucnagnagaucncngacggaag

SEQ ID NO: 134889 - RNA, 23 nt, Artificial Sequence
  Synthetic
  misc_feature (1)..(1): n is a, c, g, or u
  misc_feature (4)..(4): n is a, c, g, or u
  misc_feature (7)..(7): n is a, c, g, or u
  misc_feature (13)..(13): n is a, c, g, or u
  misc_feature (15)..(15): n is a, c, g, or u
nucnagnagaucncngacggaag

SEQ ID NO: 134890 - RNA, 24 nt, Artificial Sequence
  Synthetic
  misc_feature (2)..(2): n is a, c, g, or u
  misc_feature (5)..(5): n is a, c, g, or u
  misc_feature (8)..(8): n is a, c, g, or u
  misc_feature (14)..(14): n is a, c, g, or u
  misc_feature (16)..(16): n is a, c, g, or u
unucnagnagaucncngacggaag

SEQ ID NO: 134891 - RNA, 18 nt, Artificial Sequence
  Synthetic
uccggaaguguugauaag

SEQ ID NO: 134892 - RNA, 19 nt, Artificial Sequence
  Synthetic
uuccggaaguguugauaag

SEQ ID NO: 134893 - RNA, 20 nt, Artificial Sequence
  Synthetic
uuuccggaaguguugauaag

SEQ ID NO: 134894 - RNA, 21 nt, Artificial Sequence
  Synthetic
guuuccggaaguguugauaag

SEQ ID NO: 134895 - RNA, 22 nt, Artificial Sequence
  Synthetic
aguuuccggaaguguugauaag

SEQ ID NO: 134896 - RNA, 23 nt, Artificial Sequence
  Synthetic
uaguuuccggaaguguugauaag

SEQ ID NO: 134897 - RNA, 24 nt, Artificial Sequence
  Synthetic
guaguuuccggaaguguugauaag

SEQ ID NO: 134898 - RNA, 18 nt, Artificial Sequence
  Synthetic
  misc_feature (1)..(1): n is a, c, g, or u
nucucuuccaaaaguaag

SEQ ID NO: 134899 - RNA, 19 nt, Artificial Sequence
  Synthetic
  misc_feature (2)..(2): n is a, c, g, or u
unucucuuccaaaaguaag

SEQ ID NO: 134900 - RNA, 20 nt, Artificial Sequence
  Synthetic
  misc_feature (3)..(3): n is a, c, g, or u
gunucucuuccaaaaguaag

SEQ ID NO: 134901 - RNA, 21 nt, Artificial Sequence
  Synthetic
  misc_feature (4)..(4): n is a, c, g, or u
agunucucuuccaaaaguaag

SEQ ID NO: 134902 - RNA, 22 nt, Artificial Sequence
  Synthetic
  misc_feature (5)..(5): n is a, c, g, or u
cagunucucuuccaaaaguaag

SEQ ID NO: 134903 - RNA, 23 nt, Artificial Sequence
  Synthetic
  misc_feature (6)..(6): n is a, c, g, or u
acagunucucuuccaaaaguaag

SEQ ID NO: 134904 - RNA, 24 nt, Artificial Sequence
  Synthetic
  misc_feature (1)..(1): n is a, c, g, or u
  misc_feature (7)..(7): n is a, c, g, or u
nacagunucucuuccaaaaguaag

SEQ ID NO: 134905 - RNA, 18 nt, Artificial Sequence
  Synthetic
  misc_feature (3)..(3): n is a, c, g, or u
uancugaaagccaaacag

SEQ ID NO: 134906 - RNA, 19 nt, Artificial Sequence
  Synthetic
  misc_feature (4)..(4): n is a, c, g, or u
auancugaaagccaaacag

SEQ ID NO: 134907 - RNA, 20 nt, Artificial Sequence
  Synthetic
  misc_feature (5)..(5): n is a, c, g, or u
uauancugaaagccaaacag

SEQ ID NO: 134908 - RNA, 21 nt, Artificial Sequence
  Synthetic
  misc_feature (6)..(6): n is a, c, g, or u
auauancugaaagccaaacag

SEQ ID NO: 134909 - RNA, 22 nt, Artificial Sequence
  Synthetic
  misc_feature (7)..(7): n is a, c, g, or u
cauauancugaaagccaaacag

SEQ ID NO: 134910 - RNA, 23 nt, Artificial Sequence
  Synthetic
  misc_feature (8)..(8): n is a, c, g, or u
ccauauancugaaagccaaacag

SEQ ID NO: 134911 - RNA, 24 nt, Artificial Sequence
  Synthetic
  misc_feature (9)..(9): n is a, c, g, or u
uccauauancugaaagccaaacag

SEQ ID NO: 134912 - RNA, 18 nt, Artificial Sequence
  Synthetic
  misc_feature (7)..(7): n is a, c, g, or u
aagccanccaaggcacag

SEQ ID NO: 134913 - RNA, 19 nt, Artificial Sequence
  Synthetic
  misc_feature (8)..(8): n is a, c, g, or u
aaagccanccaaggcacag

SEQ ID NO: 134914 - RNA, 20 nt, Artificial Sequence
  Synthetic
  misc_feature (9)..(9): n is a, c, g, or u
caaagccanccaaggcacag

SEQ ID NO: 134915 - RNA, 21 nt, Artificial Sequence
  Synthetic
  misc_feature (10)..(10): n is a, c, g, or u
ccaaagccanccaaggcacag

SEQ ID NO: 134916 - RNA, 22 nt, Artificial Sequence
  Synthetic
  misc_feature (11)..(11): n is a, c, g, or u
cccaaagccanccaaggcacag

SEQ ID NO: 134917 - RNA, 23 nt, Artificial Sequence
  Synthetic
  misc_feature (12)..(12): n is a, c, g, or u
ccccaaagccanccaaggcacag

SEQ ID NO: 134918 - RNA, 24 nt, Artificial Sequence
  Synthetic
  misc_feature (13)..(13): n is a, c, g, or u
gccccaaagccanccaaggcacag

SEQ ID NO: 134919 - RNA, 18 nt, Artificial Sequence
  Synthetic
gcagaugagaaggcacag

SEQ ID NO: 134920 - RNA, 19 nt, Artificial Sequence
  Synthetic
ggcagaugagaaggcacag

SEQ ID NO: 134921 - RNA, 20 nt, Artificial Sequence
  Synthetic
cggcagaugagaaggcacag

SEQ ID NO: 134922 - RNA, 21 nt, Artificial Sequence
  Synthetic
ccggcagaugagaaggcacag

SEQ ID NO: 134923 - RNA, 22 nt, Artificial Sequence
  Synthetic
accggcagaugagaaggcacag

SEQ ID NO: 134924 - RNA, 23 nt, Artificial Sequence
  Synthetic
gaccggcagaugagaaggcacag

SEQ ID NO: 134925 - RNA, 24 nt, Artificial Sequence
  Synthetic
ggaccggcagaugagaaggcacag

SEQ ID NO: 134926 - RNA, 18 nt, Artificial Sequence
  Synthetic
agcaaacacuuggcacag

SEQ ID NO: 134927 - RNA, 19 nt, Artificial Sequence
  Synthetic
cagcaaacacuuggcacag

SEQ ID NO: 134928 - RNA, 20 nt, Artificial Sequence
  Synthetic
ucagcaaacacuuggcacag

SEQ ID NO: 134929 - RNA, 21 nt, Artificial Sequence
  Synthetic
gucagcaaacacuuggcacag

SEQ ID NO: 134930 - RNA, 22 nt, Artificial Sequence
  Synthetic
cgucagcaaacacuuggcacag

SEQ ID NO: 134931 - RNA, 23 nt, Artificial Sequence
  Synthetic
gcgucagcaaacacuuggcacag

SEQ ID NO: 134932 - RNA, 24 nt, Artificial Sequence
  Synthetic
ugcgucagcaaacacuuggcacag

SEQ ID NO: 134933 - RNA, 18 nt, Artificial Sequence
  Synthetic
  misc_feature (5)..(5): n is a, c, g, or u
uucunuuuucauuuacag

SEQ ID NO: 134934 - RNA, 19 nt, Artificial Sequence
  Synthetic
  misc_feature (6)..(6): n is a, c, g, or u
cuucunuuuucauuuacag

SEQ ID NO: 134935 - RNA, 20 nt, Artificial Sequence
  Synthetic
  misc_feature (7)..(7): n is a, c, g, or u
ucuucunuuuucauuuacag

SEQ ID NO: 134936 - RNA, 21 nt, Artificial Sequence
  Synthetic
  misc_feature (8)..(8): n is a, c, g, or u
aucuucunuuuucauuuacag

SEQ ID NO: 134937 - RNA, 22 nt, Artificial Sequence
  Synthetic
  misc_feature (9)..(9): n is a, c, g, or u
aaucuucunuuuucauuuacag

SEQ ID NO: 134938 - RNA, 23 nt, Artificial Sequence
  Synthetic
  misc_feature (1)..(1): n is a, c, g, or u
  misc_feature (10)..(10): n is a, c, g, or u
naaucuucunuuuucauuuacag

SEQ ID NO: 134939 - RNA, 24 nt, Artificial Sequence
  Synthetic
  misc_feature (2)..(2): n is a, c, g, or u
  misc_feature (11)..(11): n is a, c, g, or u
unaaucuucunuuuucauuuacag

SEQ ID NO: 134940 - RNA, 18 nt, Artificial Sequence
  Synthetic
acauccagcgauaaccag

SEQ ID NO: 134941 - RNA, 19 nt, Artificial Sequence
  Synthetic
cacauccagcgauaaccag

SEQ ID NO: 134942 - RNA, 20 nt, Artificial Sequence
  Synthetic
acacauccagcgauaaccag

SEQ ID NO: 134943 - RNA, 21 nt, Artificial Sequence
  Synthetic
gacacauccagcgauaaccag

SEQ ID NO: 134944 - RNA, 22 nt, Artificial Sequence
  Synthetic
agacacauccagcgauaaccag

SEQ ID NO: 134945 - RNA, 23 nt, Artificial Sequence
  Synthetic
cagacacauccagcgauaaccag

SEQ ID NO: 134946 - RNA, 24 nt, Artificial Sequence
  Synthetic
gcagacacauccagcgauaaccag

SEQ ID NO: 134947 - RNA, 18 nt, Artificial Sequence
  Synthetic
cugaacuggagccaccag

SEQ ID NO: 134948 - RNA, 19 nt, Artificial Sequence
  Synthetic
ccugaacuggagccaccag

SEQ ID NO: 134949 - RNA, 20 nt, Artificial Sequence
  Synthetic
uccugaacuggagccaccag

SEQ ID NO: 134950 - RNA, 21 nt, Artificial Sequence
  Synthetic
uuccugaacuggagccaccag

SEQ ID NO: 134951 - RNA, 22 nt, Artificial Sequence
  Synthetic
guuccugaacuggagccaccag

SEQ ID NO: 134952 - RNA, 23 nt, Artificial Sequence
  Synthetic
uguuccugaacuggagccaccag

SEQ ID NO: 134953 - RNA, 24 nt, Artificial Sequence
  Synthetic
  misc_feature (1)..(1): n is a, c, g, or u
nuguuccugaacuggagccaccag

SEQ ID NO: 134954 - RNA, 18 nt, Artificial Sequence
  Synthetic
  misc_feature (6)..(6): n is a, c, g, or u
gucaunaauuccccccag

SEQ ID NO: 134955 - RNA, 19 nt, Artificial Sequence
  Synthetic
  misc_feature (7)..(7): n is a, c, g, or u
agucaunaauuccccccag

SEQ ID NO: 134956 - RNA, 20 nt, Artificial Sequence
  Synthetic
  misc_feature (8)..(8): n is a, c, g, or u
gagucaunaauuccccccag

SEQ ID NO: 134957 - RNA, 21 nt, Artificial Sequence
  Synthetic
  misc_feature (9)..(9): n is a, c, g, or u
agagucaunaauuccccccag

SEQ ID NO: 134958 - RNA, 22 nt, Artificial Sequence
  Synthetic
  misc_feature (10)..(10): n is a, c, g, or u
uagagucaunaauuccccccag

SEQ ID NO: 134959 - RNA, 23 nt, Artificial Sequence
  Synthetic
  misc_feature (11)..(11): n is a, c, g, or u
cuagagucaunaauuccccccag

SEQ ID NO: 134960 - RNA, 24 nt, Artificial Sequence
  Synthetic
  misc_feature (12)..(12): n is a, c, g, or u
gcuagagucaunaauuccccccag

SEQ ID NO: 134961 - RNA, 18 nt, Artificial Sequence
  Synthetic
  misc_feature (2)..(2): n is a, c, g, or u
ungccaagccccagccag

SEQ ID NO: 134962 - RNA, 19 nt, Artificial Sequence
  Synthetic
  misc_feature (3)..(3): n is a, c, g, or u
aungccaagccccagccag

SEQ ID NO: 134963 - RNA, 20 nt, Artificial Sequence
  Synthetic
  misc_feature (1)..(1): n is a, c, g, or u
  misc_feature (4)..(4): n is a, c, g, or u
naungccaagccccagccag

SEQ ID NO: 134964 - RNA, 21 nt, Artificial Sequence
  Synthetic
  misc_feature (2)..(2): n is a, c, g, or u
  misc_feature (5)..(5): n is a, c, g, or u
cnaungccaagccccagccag

SEQ ID NO: 134965 - RNA, 22 nt, Artificial Sequence
  Synthetic
  misc_feature (3)..(3): n is a, c, g, or u
  misc_feature (6)..(6): n is a, c, g, or u
ccnaungccaagccccagccag

SEQ ID NO: 134966 - RNA, 23 nt, Artificial Sequence
  Synthetic
  misc_feature (4)..(4): n is a, c, g, or u
  misc_feature (7)..(7): n is a, c, g, or u
gccnaungccaagccccagccag

SEQ ID NO: 134967 - RNA, 24 nt, Artificial Sequence
  Synthetic
  misc_feature (5)..(5): n is a, c, g, or u
  misc_feature (8)..(8): n is a, c, g, or u
ggccnaungccaagccccagccag

SEQ ID NO: 134968 - RNA, 18 nt, Artificial Sequence
  Synthetic
cauaccuugauaauccag

SEQ ID NO: 134969 - RNA, 19 nt, Artificial Sequence
  Synthetic
acauaccuugauaauccag

SEQ ID NO: 134970 - RNA, 20 nt, Artificial Sequence
  Synthetic
aacauaccuugauaauccag

SEQ ID NO: 134971 - RNA, 21 nt, Artificial Sequence
  Synthetic
caacauaccuugauaauccag

SEQ ID NO: 134972 - RNA, 22 nt, Artificial Sequence
  Synthetic
gcaacauaccuugauaauccag

SEQ ID NO: 134973 - RNA, 23 nt, Artificial Sequence
  Synthetic
ggcaacauaccuugauaauccag

SEQ ID NO: 134974 - RNA, 24 nt, Artificial Sequence
  Synthetic
gggcaacauaccuugauaauccag

SEQ ID NO: 134975 - RNA, 18 nt, Artificial Sequence
  Synthetic
  misc_feature (2)..(2): n is a, c, g, or u
  misc_feature (8)..(8): n is a, c, g, or u
cnaugagnuuugcuccag

SEQ ID NO: 134976 - RNA, 19 nt, Artificial Sequence
  Synthetic
  misc_feature (3)..(3): n is a, c, g, or u
  misc_feature (9)..(9): n is a, c, g, or u
ccnaugagnuuugcuccag

SEQ ID NO: 134977 - RNA, 20 nt, Artificial Sequence
  Synthetic
  misc_feature (1)..(1): n is a, c, g, or u
  misc_feature (4)..(4): n is a, c, g, or u
  misc_feature (10)..(10): n is a, c, g, or u
nccnaugagnuuugcuccag

SEQ ID NO: 134978 - RNA, 21 nt, Artificial Sequence
  Synthetic
  misc_feature (2)..(2): n is a, c, g, or u
  misc_feature (5)..(5): n is a, c, g, or u
  misc_feature (11)..(11): n is a, c, g, or u
unccnaugagnuuugcuccag

SEQ ID NO: 134979 - RNA, 22 nt, Artificial Sequence
  Synthetic
  misc_feature (3)..(3): n is a, c, g, or u
  misc_feature (6)..(6): n is a, c, g, or u
  misc_feature (12)..(12): n is a, c, g, or u
gunccnaugagnuuugcuccag

SEQ ID NO: 134980 - RNA, 23 nt, Artificial Sequence
  Synthetic
  misc_feature (4)..(4): n is a, c, g, or u
  misc_feature (7)..(7): n is a, c, g, or u
  misc_feature (13)..(13): n is a, c, g, or u
agunccnaugagnuuugcuccag

SEQ ID NO: 134981 - RNA, 24 nt, Artificial Sequence
  Synthetic
  misc_feature (5)..(5): n is a, c, g, or u
  misc_feature (8)..(8): n is a, c, g, or u
  misc_feature (14)..(14): n is a, c, g, or u
cagunccnaugagnuuugcuccag

SEQ ID NO: 134982 - RNA, 18 nt, Artificial Sequence
  Synthetic
gaugaggcauagcagcag

SEQ ID NO: 134983 - RNA, 19 nt, Artificial Sequence
  Synthetic
agaugaggcauagcagcag

SEQ ID NO: 134984 - RNA, 20 nt, Artificial Sequence
  Synthetic
aagaugaggcauagcagcag

SEQ ID NO: 134985 - RNA, 21 nt, Artificial Sequence
  Synthetic
gaagaugaggcauagcagcag

SEQ ID NO: 134986 - RNA, 22 nt, Artificial Sequence
  Synthetic
agaagaugaggcauagcagcag

SEQ ID NO: 134987 - RNA, 23 nt, Artificial Sequence
  Synthetic
aagaagaugaggcauagcagcag

SEQ ID NO: 134988 - RNA, 24 nt, Artificial Sequence
  Synthetic
uaagaagaugaggcauagcagcag

SEQ ID NO: 134989 - RNA, 18 nt, Artificial Sequence
  Synthetic
cggcuaggaguuccgcag

SEQ ID NO: 134990 - RNA, 19 nt, Artificial Sequence
  Synthetic
gcggcuaggaguuccgcag

SEQ ID NO: 134991 - RNA, 20 nt, Artificial Sequence
  Synthetic
agcggcuaggaguuccgcag

SEQ ID NO: 134992 - RNA, 21 nt, Artificial Sequence
  Synthetic
aagcggcuaggaguuccgcag

SEQ ID NO: 134993 - RNA, 22 nt, Artificial Sequence
  Synthetic
caagcggcuaggaguuccgcag

SEQ ID NO: 134994 - RNA, 23 nt, Artificial Sequence
  Synthetic
acaagcggcuaggaguuccgcag

SEQ ID NO: 134995 - RNA, 24 nt, Artificial Sequence
  Synthetic
aacaagcggcuaggaguuccgcag

SEQ ID NO: 134996 - RNA, 18 nt, Artificial Sequence
  Synthetic
gccgauugguggaggcag

SEQ ID NO: 134997 - RNA, 19 nt, Artificial Sequence
  Synthetic
ugccgauugguggaggcag

SEQ ID NO: 134998 - RNA, 20 nt, Artificial Sequence
  Synthetic
cugccgauugguggaggcag

SEQ ID NO: 134999 - RNA, 21 nt, Artificial Sequence
  Synthetic
acugccgauugguggaggcag

SEQ ID NO: 135000 - RNA, 22 nt, Artificial Sequence
  Synthetic
gacugccgauugguggaggcag

SEQ ID NO: 135001 - RNA, 23 nt, Artificial Sequence
  Synthetic
ugacugccgauugguggaggcag

SEQ ID NO: 135002 - RNA, 24 nt, Artificial Sequence
  Synthetic
cugacugccgauugguggaggcag

SEQ ID NO: 135003 - RNA, 18 nt, Artificial Sequence
  Synthetic
  misc_feature (7)..(8): n is a, c, g, or u
  misc_feature (11)..(11): n is a, c, g, or u
ggucggnnggnacggcag

SEQ ID NO: 135004 - RNA, 19 nt, Artificial Sequence
  Synthetic
  misc_feature (8)..(9): n is a, c, g, or u
  misc_feature (12)..(12): n is a, c, g, or u
uggucggnnggnacggcag

SEQ ID NO: 135005 - RNA, 20 nt, Artificial Sequence
  Synthetic
  misc_feature (9)..(10): n is a, c, g, or u
  misc_feature (13)..(13): n is a, c, g, or u
guggucggnnggnacggcag

SEQ ID NO: 135006 - RNA, 21 nt, Artificial Sequence
  Synthetic
  misc_feature (10)..(11): n is a, c, g, or u
  misc_feature (14)..(14): n is a, c, g, or u
cguggucggnnggnacggcag

SEQ ID NO: 135007 - RNA, 22 nt, Artificial Sequence
  Synthetic
  misc_feature (11)..(12): n is a, c, g, or u
  misc_feature (15)..(15): n is a, c, g, or u
ccguggucggnnggnacggcag

SEQ ID NO: 135008 - RNA, 23 nt, Artificial Sequence
  Synthetic
  misc_feature (12)..(13): n is a, c, g, or u
  misc_feature (16)..(16): n is a, c, g, or u
cccguggucggnnggnacggcag

SEQ ID NO: 135009 - RNA, 24 nt, Artificial Sequence
  Synthetic
  misc_feature (13)..(14): n is a, c, g, or u
  misc_feature (17)..(17): n is a, c, g, or u
ccccguggucggnnggnacggcag

SEQ ID NO: 135010 - RNA, 18 nt, Artificial Sequence
  Synthetic
gugcacacggaccggcag

SEQ ID NO: 135011 - RNA, 19 nt, Artificial Sequence
  Synthetic
agugcacacggaccggcag

SEQ ID NO: 135012 - RNA, 20 nt, Artificial Sequence
  Synthetic
aagugcacacggaccggcag

SEQ ID NO: 135013 - RNA, 21 nt, Artificial Sequence
  Synthetic
gaagugcacacggaccggcag

SEQ ID NO: 135014 - RNA, 22 nt, Artificial Sequence
  Synthetic
cgaagugcacacggaccggcag

SEQ ID NO: 135015 - RNA, 23 nt, Artificial Sequence
  Synthetic
gcgaagugcacacggaccggcag

SEQ ID NO: 135016 - RNA, 24 nt, Artificial Sequence
  Synthetic
agcgaagugcacacggaccggcag

SEQ ID NO: 135017 - RNA, 18 nt, Artificial Sequence
  Synthetic
cgcaguauggaucggcag

SEQ ID NO: 135018 - RNA, 19 nt, Artificial Sequence
  Synthetic
ccgcaguauggaucggcag

SEQ ID NO: 135019 - RNA, 20 nt, Artificial Sequence
  Synthetic
uccgcaguauggaucggcag

SEQ ID NO: 135020 - RNA, 21 nt, Artificial Sequence
  Synthetic
uuccgcaguauggaucggcag

SEQ ID NO: 135021 - RNA, 22 nt, Artificial Sequence
  Synthetic
guuccgcaguauggaucggcag

SEQ ID NO: 135022 - RNA, 23 nt, Artificial Sequence
  Synthetic
aguuccgcaguauggaucggcag

SEQ ID NO: 135023 - RNA, 24 nt, Artificial Sequence
  Synthetic
gaguuccgcaguauggaucggcag

SEQ ID NO: 135024 - RNA, 18 nt, Artificial Sequence
  Synthetic
auccacacuccgaaagag

SEQ ID NO: 135025 - RNA, 19 nt, Artificial Sequence
  Synthetic
aauccacacuccgaaagag

SEQ ID NO: 135026 - RNA, 20 nt, Artificial Sequence
  Synthetic
gaauccacacuccgaaagag

SEQ ID NO: 135027 - RNA, 21 nt, Artificial Sequence
  Synthetic
cgaauccacacuccgaaagag

SEQ ID NO: 135028 - RNA, 22 nt, Artificial Sequence
  Synthetic
gcgaauccacacuccgaaagag

SEQ ID NO: 135029 - RNA, 23 nt, Artificial Sequence
  Synthetic
ugcgaauccacacuccgaaagag

SEQ ID NO: 135030 - RNA, 24 nt, Artificial Sequence
  Synthetic
gugcgaauccacacuccgaaagag

SEQ ID NO: 135031 - RNA, 18 nt, Artificial Sequence
  Synthetic
  misc_feature (8)..(8): n is a, c, g, or u
aggcuucncgauacagag

SEQ ID NO: 135032 - RNA, 19 nt, Artificial Sequence
  Synthetic
  misc_feature (9)..(9): n is a, c, g, or u
aaggcuucncgauacagag

SEQ ID NO: 135033 - RNA, 20 nt, Artificial Sequence
  Synthetic
  misc_feature (10)..(10): n is a, c, g, or u
uaaggcuucncgauacagag

SEQ ID NO: 135034 - RNA, 21 nt, Artificial Sequence
  Synthetic
  misc_feature (11)..(11): n is a, c, g, or u
cuaaggcuucncgauacagag

SEQ ID NO: 135035 - RNA, 22 nt, Artificial Sequence
  Synthetic
  misc_feature (12)..(12): n is a, c, g, or u
ucuaaggcuucncgauacagag

SEQ ID NO: 135036 - RNA, 23 nt, Artificial Sequence
  Synthetic
  misc_feature (13)..(13): n is a, c, g, or u
cucuaaggcuucncgauacagag

SEQ ID NO: 135037 - RNA, 24 nt, Artificial Sequence
  Synthetic
  misc_feature (14)..(14): n is a, c, g, or u
acucuaaggcuucncgauacagag

SEQ ID NO: 135038 - RNA, 18 nt, Artificial Sequence
  Synthetic
  misc_feature (1)..(1): n is a, c, g, or u
naauuccccccagcagag

SEQ ID NO: 135039 - RNA, 19 nt, Artificial Sequence
  Synthetic
  misc_feature (2)..(2): n is a, c, g, or u
unaauuccccccagcagag

SEQ ID NO: 135040 - RNA, 20 nt, Artificial Sequence
  Synthetic
  misc_feature (3)..(3): n is a, c, g, or u
aunaauuccccccagcagag

SEQ ID NO: 135041 - RNA, 21 nt, Artificial Sequence
  Synthetic
  misc_feature (4)..(4): n is a, c, g, or u
caunaauuccccccagcagag

SEQ ID NO: 135042 - RNA, 22 nt, Artificial Sequence
  Synthetic
  misc_feature (5)..(5): n is a, c, g, or u
ucaunaauuccccccagcagag

SEQ ID NO: 135043 - RNA, 23 nt, Artificial Sequence
  Synthetic
  misc_feature (6)..(6): n is a, c, g, or u
gucaunaauuccccccagcagag

SEQ ID NO: 135044 - RNA, 24 nt, Artificial Sequence
  Synthetic
  misc_feature (7)..(7): n is a, c, g, or u
agucaunaauuccccccagcagag

SEQ ID NO: 135045 - RNA, 18 nt, Artificial Sequence
  Synthetic
agagaugauuaggcagag

SEQ ID NO: 135046 - RNA, 19 nt, Artificial Sequence
  Synthetic
aagagaugauuaggcagag

SEQ ID NO: 135047 - RNA, 20 nt, Artificial Sequence
  Synthetic
caagagaugauuaggcagag

SEQ ID NO: 135048 - RNA, 21 nt, Artificial Sequence
  Synthetic
acaagagaugauuaggcagag

SEQ ID NO: 135049 - RNA, 22 nt, Artificial Sequence
  Synthetic
  misc_feature (1)..(1): n is a, c, g, or u
nacaagagaugauuaggcagag

SEQ ID NO: 135050 - RNA, 23 nt, Artificial Sequence
  Synthetic
  misc_feature (2)..(2): n is a, c, g, or u
gnacaagagaugauuaggcagag

SEQ ID NO: 135051 - RNA, 24 nt, Artificial Sequence
  Synthetic
  misc_feature (3)..(3): n is a, c, g, or u
ugnacaagagaugauuaggcagag

SEQ ID NO: 135052 - RNA, 18 nt, Artificial Sequence
  Synthetic
uccaugcaacgugcagag

SEQ ID NO: 135053 - RNA, 19 nt, Artificial Sequence
  Synthetic
cuccaugcaacgugcagag

SEQ ID NO: 135054 - RNA, 20 nt, Artificial Sequence
  Synthetic
ucuccaugcaacgugcagag

SEQ ID NO: 135055 - RNA, 21 nt, Artificial Sequence
  Synthetic
gucuccaugcaacgugcagag

SEQ ID NO: 135056 - RNA, 22 nt, Artificial Sequence
  Synthetic
ggucuccaugcaacgugcagag

SEQ ID NO: 135057 - RNA, 23 nt, Artificial Sequence
  Synthetic
uggucuccaugcaacgugcagag

SEQ ID NO: 135058 - RNA, 24 nt, Artificial Sequence
  Synthetic
guggucuccaugcaacgugcagag

SEQ ID NO: 135059 - RNA, 18 nt, Artificial Sequence
  Synthetic
ucucuuagagguggagag

SEQ ID NO: 135060 - RNA, 19 nt, Artificial Sequence
  Synthetic
gucucuuagagguggagag

SEQ ID NO: 135061 - RNA, 20 nt, Artificial Sequence
  Synthetic
ugucucuuagagguggagag

SEQ ID NO: 135062 - RNA, 21 nt, Artificial Sequence
  Synthetic
cugucucuuagagguggagag

SEQ ID NO: 135063 - RNA, 22 nt, Artificial Sequence
  Synthetic
acugucucuuagagguggagag

SEQ ID NO: 135064 - RNA, 23 nt, Artificial Sequence
  Synthetic
gacugucucuuagagguggagag

SEQ ID NO: 135065 - RNA, 24 nt, Artificial Sequence
  Synthetic
ugacugucucuuagagguggagag

SEQ ID NO: 135066 - RNA, 18 nt, Artificial Sequence
  Synthetic
  misc_feature (2)..(2): n is a, c, g, or u
ungauccuggaauuagag

SEQ ID NO: 135067 - RNA, 19 nt, Artificial Sequence
  Synthetic
  misc_feature (3)..(3): n is a, c, g, or u
gungauccuggaauuagag

SEQ ID NO: 135068 - RNA, 20 nt, Artificial Sequence
  Synthetic
  misc_feature (4)..(4): n is a, c, g, or u
ugungauccuggaauuagag

SEQ ID NO: 135069 - RNA, 21 nt, Artificial Sequence
  Synthetic
  misc_feature (5)..(5): n is a, c, g, or u
uugungauccuggaauuagag

SEQ ID NO: 135070 - RNA, 22 nt, Artificial Sequence
  Synthetic
  misc_feature (6)..(6): n is a, c, g, or u
guugungauccuggaauuagag

SEQ ID NO: 135071 - RNA, 23 nt, Artificial Sequence
  Synthetic
  misc_feature (7)..(7): n is a, c, g, or u
uguugungauccuggaauuagag

SEQ ID NO: 135072 - RNA, 24 nt, Artificial Sequence
  Synthetic
  misc_feature (8)..(8): n is a, c, g, or u
uuguugungauccuggaauuagag

SEQ ID NO: 135073 - RNA, 18 nt, Artificial Sequence
  Synthetic
gaugacugucucuuagag

SEQ ID NO: 135074 - RNA, 19 nt, Artificial Sequence
  Synthetic
ggaugacugucucuuagag

SEQ ID NO: 135075 - RNA, 20 nt, Artificial Sequence
  Synthetic
aggaugacugucucuuagag

SEQ ID NO: 135076 - RNA, 21 nt, Artificial Sequence
  Synthetic
gaggaugacugucucuuagag

SEQ ID NO: 135077 - RNA, 22 nt, Artificial Sequence
  Synthetic
ugaggaugacugucucuuagag

SEQ ID NO: 135078 - RNA, 23 nt, Artificial Sequence
  Synthetic
cugaggaugacugucucuuagag

SEQ ID NO: 135079 - RNA, 24 nt, Artificial Sequence
  Synthetic
ccugaggaugacugucucuuagag

SEQ ID NO: 135080 - RNA, 18 nt, Artificial Sequence
  Synthetic
ccccgccuguaacacgag

SEQ ID NO: 135081 - RNA, 19 nt, Artificial Sequence
  Synthetic
accccgccuguaacacgag

SEQ ID NO: 135082 - RNA, 20 nt, Artificial Sequence
  Synthetic
aaccccgccuguaacacgag

SEQ ID NO: 135083 - RNA, 18 nt, Artificial Sequence
  Synthetic
agagaaguccaccacgag

SEQ ID NO: 135084 - RNA, 19 nt, Artificial Sequence
  Synthetic
gagagaaguccaccacgag

SEQ ID NO: 135085 - RNA, 20 nt, Artificial Sequence
  Synthetic
ugagagaaguccaccacgag

SEQ ID NO: 135086 - RNA, 21 nt, Artificial Sequence
  Synthetic
uugagagaaguccaccacgag

SEQ ID NO: 135087 - RNA, 22 nt, Artificial Sequence
  Synthetic
auugagagaaguccaccacgag

SEQ ID NO: 135088 - RNA, 23 nt, Artificial Sequence
  Synthetic
aauugagagaaguccaccacgag

SEQ ID NO: 135089 - RNA, 24 nt, Artificial Sequence
  Synthetic
aaauugagagaaguccaccacgag

SEQ ID NO: 135090 - RNA, 18 nt, Artificial Sequence
  Synthetic
aacauugagauucccgag

SEQ ID NO: 135091 - RNA, 19 nt, Artificial Sequence
  Synthetic
uaacauugagauucccgag

SEQ ID NO: 135092 - RNA, 20 nt, Artificial Sequence
  Synthetic
cuaacauugagauucccgag

SEQ ID NO: 135093 - RNA, 21 nt, Artificial Sequence
  Synthetic
acuaacauugagauucccgag

SEQ ID NO: 135094 - RNA, 22 nt, Artificial Sequence
  Synthetic
uacuaacauugagauucccgag

SEQ ID NO: 135095 - RNA, 23 nt, Artificial Sequence
  Synthetic
auacuaacauugagauucccgag

SEQ ID NO: 135096 - RNA, 24 nt, Artificial Sequence
  Synthetic
aauacuaacauugagauucccgag

SEQ ID NO: 135097 - RNA, 18 nt, Artificial Sequence
  Synthetic
cuccagaccggcugcgag

SEQ ID NO: 135098 - RNA, 19 nt, Artificial Sequence
  Synthetic
gcuccagaccggcugcgag

SEQ ID NO: 135099 - RNA, 20 nt, Artificial Sequence
  Synthetic
ugcuccagaccggcugcgag

SEQ ID NO: 135100 - RNA, 21 nt, Artificial Sequence
  Synthetic
uugcuccagaccggcugcgag

SEQ ID NO: 135101 - RNA, 22 nt, Artificial Sequence
  Synthetic
uuugcuccagaccggcugcgag

SEQ ID NO: 135102 - RNA, 23 nt, Artificial Sequence
  Synthetic
  misc_feature (1)..(1): n is a, c, g, or u
nuuugcuccagaccggcugcgag

SEQ ID NO: 135103 - RNA, 24 nt, Artificial Sequence
  Synthetic
  misc_feature (2)..(2): n is a, c, g, or u
gnuuugcuccagaccggcugcgag

SEQ ID NO: 135104 - RNA, 18 nt, Artificial Sequence
  Synthetic
  misc_feature (8)..(8): n is a, c, g, or u
gagaucuncgucugcgag

SEQ ID NO: 135105 - RNA, 19 nt, Artificial Sequence
  Synthetic
  misc_feature (9)..(9): n is a, c, g, or u
ugagaucuncgucugcgag

SEQ ID NO: 135106 - RNA, 20 nt, Artificial Sequence
  Synthetic
  misc_feature (10)..(10): n is a, c, g, or u
uugagaucuncgucugcgag

SEQ ID NO: 135107 - RNA, 21 nt, Artificial Sequence
  Synthetic
  misc_feature (11)..(11): n is a, c, g, or u
auugagaucuncgucugcgag

SEQ ID NO: 135108 - RNA, 22 nt, Artificial Sequence
  Synthetic
  misc_feature (12)..(12): n is a, c, g, or u
gauugagaucuncgucugcgag

SEQ ID NO: 135109 - RNA, 23 nt, Artificial Sequence
  Synthetic
  misc_feature (13)..(13): n is a, c, g, or u
cgauugagaucuncgucugcgag

SEQ ID NO: 135110 - RNA, 24 nt, Artificial Sequence
  Synthetic
  misc_feature (14)..(14): n is a, c, g, or u
gcgauugagaucuncgucugcgag

SEQ ID NO: 135111 - RNA, 18 nt, Artificial Sequence
  Synthetic
gauugguggaggcaggag

SEQ ID NO: 135112 - RNA, 19 nt, Artificial Sequence
  Synthetic
cgauugguggaggcaggag

SEQ ID NO: 135113 - RNA, 20 nt, Artificial Sequence
  Synthetic
ccgauugguggaggcaggag

SEQ ID NO: 135114 - RNA, 21 nt, Artificial Sequence
  Synthetic
gccgauugguggaggcaggag

SEQ ID NO: 135115 - RNA, 22 nt, Artificial Sequence
  Synthetic
ugccgauugguggaggcaggag

SEQ ID NO: 135116 - RNA, 23 nt, Artificial Sequence
  Synthetic
cugccgauugguggaggcaggag

SEQ ID NO: 135117 - RNA, 24 nt, Artificial Sequence
  Synthetic
acugccgauugguggaggcaggag

SEQ ID NO: 135118 - RNA, 18 nt, Artificial Sequence
  Synthetic
gucuauaggcuggaggag

SEQ ID NO: 135119 - RNA, 19 nt, Artificial Sequence
  Synthetic
ggucuauaggcuggaggag

SEQ ID NO: 135120 - RNA, 20 nt, Artificial Sequence
  Synthetic
uggucuauaggcuggaggag

SEQ ID NO: 135121 - RNA, 21 nt, Artificial Sequence
  Synthetic
guggucuauaggcuggaggag

SEQ ID NO: 135122 - RNA, 22 nt, Artificial Sequence
  Synthetic
gguggucuauaggcuggaggag

SEQ ID NO: 135123 - RNA, 23 nt, Artificial Sequence
  Synthetic
ugguggucuauaggcuggaggag

SEQ ID NO: 135124 - RNA, 24 nt, Artificial Sequence
  Synthetic
uugguggucuauaggcuggaggag

SEQ ID NO: 135125 - RNA, 18 nt, Artificial Sequence
  Synthetic
  misc_feature (1)..(2): n is a, c, g, or u
  misc_feature (5)..(5): n is a, c, g, or u
nnggnacggcagacggag

SEQ ID NO: 135126 - RNA, 19 nt, Artificial Sequence
  Synthetic
  misc_feature (2)..(3): n is a, c, g, or u
  misc_feature (6)..(6): n is a, c, g, or u
gnnggnacggcagacggag

SEQ ID NO: 135127 - RNA, 20 nt, Artificial Sequence
  Synthetic
  misc_feature (3)..(4): n is a, c, g, or u
  misc_feature (7)..(7): n is a, c, g, or u
ggnnggnacggcagacggag

SEQ ID NO: 135128 - RNA, 21 nt, Artificial Sequence
  Synthetic
  misc_feature (4)..(5): n is a, c, g, or u
  misc_feature (8)..(8): n is a, c, g, or u
cggnnggnacggcagacggag

SEQ ID NO: 135129 - RNA, 22 nt, Artificial Sequence
  Synthetic
  misc_feature (5)..(6): n is a, c, g, or u
  misc_feature (9)..(9): n is a, c, g, or u
ucggnnggnacggcagacggag

SEQ ID NO: 135130 - RNA, 23 nt, Artificial Sequence
  Synthetic
  misc_feature (6)..(7): n is a, c, g, or u
  misc_feature (10)..(10): n is a, c, g, or u
gucggnnggnacggcagacggag

SEQ ID NO: 135131 - RNA, 24 nt, Artificial Sequence
  Synthetic
  misc_feature (7)..(8): n is a, c, g, or u
  misc_feature (11)..(11): n is a, c, g, or u
ggucggnnggnacggcagacggag

SEQ ID NO: 135132 - RNA, 18 nt, Artificial Sequence
  Synthetic
cguugacauugcugggag

SEQ ID NO: 135133 - RNA, 19 nt, Artificial Sequence
  Synthetic
ucguugacauugcugggag

SEQ ID NO: 135134 - RNA, 20 nt, Artificial Sequence
  Synthetic
gucguugacauugcugggag

SEQ ID NO: 135135 - RNA, 21 nt, Artificial Sequence
  Synthetic
ggucguugacauugcugggag

SEQ ID NO: 135136 - RNA, 22 nt, Artificial Sequence
  Synthetic
cggucguugacauugcugggag

SEQ ID NO: 135137 - RNA, 23 nt, Artificial Sequence
  Synthetic
ucggucguugacauugcugggag

SEQ ID NO: 135138 - RNA, 24 nt, Artificial Sequence
  Synthetic
gucggucguugacauugcugggag

SEQ ID NO: 135139 - RNA, 18 nt, Artificial Sequence
  Synthetic
  misc_feature (14)..(14): n is a, c, g, or u
uccccaguccucgnggag

SEQ ID NO: 135140 - RNA, 19 nt, Artificial Sequence
  Synthetic
  misc_feature (15)..(15): n is a, c, g, or u
guccccaguccucgnggag

SEQ ID NO: 135141 - RNA, 20 nt, Artificial Sequence
  Synthetic
  misc_feature (16)..(16): n is a, c, g, or u
gguccccaguccucgnggag

SEQ ID NO: 135142 - RNA, 21 nt, Artificial Sequence
  Synthetic
  misc_feature (17)..(17): n is a, c, g, or u
ggguccccaguccucgnggag

SEQ ID NO: 135143 - RNA, 22 nt, Artificial Sequence
  Synthetic
  misc_feature (18)..(18): n is a, c, g, or u
aggguccccaguccucgnggag

SEQ ID NO: 135144 - RNA, 23 nt, Artificial Sequence
  Synthetic
  misc_feature (19)..(19): n is a, c, g, or u
caggguccccaguccucgnggag

SEQ ID NO: 135145 - RNA, 24 nt, Artificial Sequence
  Synthetic
  misc_feature (1)..(1): n is a, c, g, or u
  misc_feature (20)..(20): n is a, c, g, or u
ncaggguccccaguccucgnggag

SEQ ID NO: 135146 - RNA, 18 nt, Artificial Sequence
  Synthetic
gacugccgauugguggag

SEQ ID NO: 135147 - RNA, 19 nt, Artificial Sequence
  Synthetic
ugacugccgauugguggag

SEQ ID NO: 135148 - RNA, 20 nt, Artificial Sequence
  Synthetic
cugacugccgauugguggag

SEQ ID NO: 135149 - RNA, 21 nt, Artificial Sequence
  Synthetic
ccugacugccgauugguggag

SEQ ID NO: 135150 - RNA, 22 nt, Artificial Sequence
  Synthetic
uccugacugccgauugguggag

SEQ ID NO: 135151 - RNA, 23 nt, Artificial Sequence
  Synthetic
uuccugacugccgauugguggag

SEQ ID NO: 135152 - RNA, 24 nt, Artificial Sequence
  Synthetic
cuuccugacugccgauugguggag

SEQ ID NO: 135153 - RNA, 18 nt, Artificial Sequence
  Synthetic
aaccaggacaaauuggag

SEQ ID NO: 135154 - RNA, 19 nt, Artificial Sequence
  Synthetic
uaaccaggacaaauuggag

SEQ ID NO: 135155 - RNA, 20 nt, Artificial Sequence
  Synthetic
auaaccaggacaaauuggag

SEQ ID NO: 135156 - RNA, 21 nt, Artificial Sequence
  Synthetic
gauaaccaggacaaauuggag

SEQ ID NO: 135157 - RNA, 22 nt, Artificial Sequence
  Synthetic
cgauaaccaggacaaauuggag

SEQ ID NO: 135158 - RNA, 23 nt, Artificial Sequence
  Synthetic
gcgauaaccaggacaaauuggag

SEQ ID NO: 135159 - RNA, 24 nt, Artificial Sequence
  Synthetic
agcgauaaccaggacaaauuggag

SEQ ID NO: 135160 - RNA, 18 nt, Artificial Sequence
  Synthetic
guuggugagugauuggag

SEQ ID NO: 135161 - RNA, 19 nt, Artificial Sequence
  Synthetic
gguuggugagugauuggag

SEQ ID NO: 135162 - RNA, 20 nt, Artificial Sequence
  Synthetic
agguuggugagugauuggag

SEQ ID NO: 135163 - RNA, 21 nt, Artificial Sequence
  Synthetic
gagguuggugagugauuggag

SEQ ID NO: 135164 - RNA, 22 nt, Artificial Sequence
  Synthetic
ggagguuggugagugauuggag

SEQ ID NO: 135165 - RNA, 23 nt, Artificial Sequence
  Synthetic
aggagguuggugagugauuggag

SEQ ID NO: 135166 - RNA, 24 nt, Artificial Sequence
  Synthetic
caggagguuggugagugauuggag

SEQ ID NO: 135167 - RNA, 18 nt, Artificial Sequence
  Synthetic
  misc_feature (15)..(15): n is a, c, g, or u
ucagaaggcaaaaangag

SEQ ID NO: 135168 - RNA, 19 nt, Artificial Sequence
  Synthetic
  misc_feature (16)..(16): n is a, c, g, or u
gucagaaggcaaaaangag

SEQ ID NO: 135169 - RNA, 20 nt, Artificial Sequence
  Synthetic
  misc_feature (17)..(17): n is a, c, g, or u
agucagaaggcaaaaangag

SEQ ID NO: 135170 - RNA, 21 nt, Artificial Sequence
  Synthetic
  misc_feature (18)..(18): n is a, c, g, or u
aagucagaaggcaaaaangag

SEQ ID NO: 135171 - RNA, 22 nt, Artificial Sequence
  Synthetic
  misc_feature (19)..(19): n is a, c, g, or u
gaagucagaaggcaaaaangag

SEQ ID NO: 135172 - RNA, 23 nt, Artificial Sequence
  Synthetic
  misc_feature (20)..(20): n is a, c, g, or u
agaagucagaaggcaaaaangag

SEQ ID NO: 135173 - RNA, 24 nt, Artificial Sequence
  Synthetic
  misc_feature (21)..(21): n is a, c, g, or u
aagaagucagaaggcaaaaangag

SEQ ID NO: 135174 - RNA, 18 nt, Artificial Sequence
  Synthetic
uuuguacagcaacaugag

SEQ ID NO: 135175 - RNA, 19 nt, Artificial Sequence
  Synthetic
uuuuguacagcaacaugag

SEQ ID NO: 135176 - RNA, 20 nt, Artificial Sequence
  Synthetic
guuuuguacagcaacaugag

SEQ ID NO: 135177 - RNA, 21 nt, Artificial Sequence
  Synthetic
gguuuuguacagcaacaugag

SEQ ID NO: 135178 - RNA, 22 nt, Artificial Sequence
  Synthetic
agguuuuguacagcaacaugag

SEQ ID NO: 135179 - RNA, 23 nt, Artificial Sequence
  Synthetic
uagguuuuguacagcaacaugag

SEQ ID NO: 135180 - RNA, 24 nt, Artificial Sequence
  Synthetic
guagguuuuguacagcaacaugag

SEQ ID NO: 135181 - RNA, 18 nt, Artificial Sequence
  Synthetic
  misc_feature (2)..(2): n is a, c, g, or u
anuuucccaccuuaugag

SEQ ID NO: 135182 - RNA, 19 nt, Artificial Sequence
  Synthetic
  misc_feature (3)..(3): n is a, c, g, or u
aanuuucccaccuuaugag

SEQ ID NO: 135183 - RNA, 20 nt, Artificial Sequence
  Synthetic
  misc_feature (1)..(1): n is a, c, g, or u
  misc_feature (4)..(4): n is a, c, g, or u
naanuuucccaccuuaugag

SEQ ID NO: 135184 - RNA, 21 nt, Artificial Sequence
  Synthetic
  misc_feature (2)..(2): n is a, c, g, or u
  misc_feature (5)..(5): n is a, c, g, or u
unaanuuucccaccuuaugag

SEQ ID NO: 135185 - RNA, 22 nt, Artificial Sequence
  Synthetic
  misc_feature (3)..(3): n is a, c, g, or u
  misc_feature (6)..(6): n is a, c, g, or u
gunaanuuucccaccuuaugag

SEQ ID NO: 135186 - RNA, 23 nt, Artificial Sequence
  Synthetic
  misc_feature (1)..(1): n is a, c, g, or u
  misc_feature (4)..(4): n is a, c, g, or u
  misc_feature (7)..(7): n is a, c, g, or u
ngunaanuuucccaccuuaugag

SEQ ID NO: 135187 - RNA, 24 nt, Artificial Sequence
  Synthetic
  misc_feature (2)..(2): n is a, c, g, or u
  misc_feature (5)..(5): n is a, c, g, or u
  misc_feature (8)..(8): n is a, c, g, or u
cngunaanuuucccaccuuaugag

SEQ ID NO: 135188 - RNA, 18 nt, Artificial Sequence
  Synthetic
  misc_feature (2)..(2): n is a, c, g, or u
  misc_feature (4)..(4): n is a, c, g, or u
ungncaauaugcccugag

SEQ ID NO: 135189 - RNA, 19 nt, Artificial Sequence
  Synthetic
  misc_feature (3)..(3): n is a, c, g, or u
  misc_feature (5)..(5): n is a, c, g, or u
gungncaauaugcccugag

SEQ ID NO: 135190 - RNA, 20 nt, Artificial Sequence
  Synthetic
  misc_feature (4)..(4): n is a, c, g, or u
  misc_feature (6)..(6): n is a, c, g, or u
ugungncaauaugcccugag

SEQ ID NO: 135191 - RNA, 21 nt, Artificial Sequence
  Synthetic
  misc_feature (5)..(5): n is a, c, g, or u
  misc_feature (7)..(7): n is a, c, g, or u
cugungncaauaugcccugag

SEQ ID NO: 135192 - RNA, 22 nt, Artificial Sequence
  Synthetic
  misc_feature (6)..(6): n is a, c, g, or u
  misc_feature (8)..(8): n is a, c, g, or u
acugungncaauaugcccugag

SEQ ID NO: 135193 - RNA, 23 nt, Artificial Sequence
  Synthetic
  misc_feature (7)..(7): n is a, c, g, or u
  misc_feature (9)..(9): n is a, c, g, or u
cacugungncaauaugcccugag

SEQ ID NO: 135194 - RNA, 24 nt, Artificial Sequence
  Synthetic
  misc_feature (1)..(1): n is a, c, g, or u
  misc_feature (8)..(8): n is a, c, g, or u
  misc_feature (10)..(10): n is a, c, g, or u
ncacugungncaauaugcccugag

SEQ ID NO: 135195 - RNA, 18 nt, Artificial Sequence
  Synthetic
  misc_feature (8)..(8): n is a, c, g, or u
ugagugcnguauggugag

SEQ ID NO: 135196 - RNA, 19 nt, Artificial Sequence
  Synthetic
  misc_feature (9)..(9): n is a, c, g, or u
cugagugcnguauggugag

SEQ ID NO: 135197 - RNA, 20 nt, Artificial Sequence
  Synthetic
  misc_feature (10)..(10): n is a, c, g, or u
ccugagugcnguauggugag

SEQ ID NO: 135198 - RNA, 21 nt, Artificial Sequence
  Synthetic
  misc_feature (11)..(11): n is a, c, g, or u
gccugagugcnguauggugag

SEQ ID NO: 135199 - RNA, 22 nt, Artificial Sequence
  Synthetic
  misc_feature (12)..(12): n is a, c, g, or u
ugccugagugcnguauggugag

SEQ ID NO: 135200 - RNA, 23 nt, Artificial Sequence
  Synthetic
  misc_feature (13)..(13): n is a, c, g, or u
uugccugagugcnguauggugag

SEQ ID NO: 135201 - RNA, 24 nt, Artificial Sequence
  Synthetic
  misc_feature (14)..(14): n is a, c, g, or u
cuugccugagugcnguauggugag

SEQ ID NO: 135202 - RNA, 18 nt, Artificial Sequence
  Synthetic
acauagaguugccuugag

SEQ ID NO: 135203 - RNA, 19 nt, Artificial Sequence
  Synthetic
aacauagaguugccuugag

SEQ ID NO: 135204 - RNA, 20 nt, Artificial Sequence
  Synthetic
aaacauagaguugccuugag

SEQ ID NO: 135205 - RNA, 21 nt, Artificial Sequence
  Synthetic
gaaacauagaguugccuugag

SEQ ID NO: 135206 - RNA, 22 nt, Artificial Sequence
  Synthetic
ggaaacauagaguugccuugag

SEQ ID NO: 135207 - RNA, 23 nt, Artificial Sequence
  Synthetic
gggaaacauagaguugccuugag

SEQ ID NO: 135208 - RNA, 24 nt, Artificial Sequence
  Synthetic
agggaaacauagaguugccuugag

SEQ ID NO: 135209 - RNA, 18 nt, Artificial Sequence
  Synthetic
  misc_feature (16)..(16): n is a, c, g, or u
gcuuggaggcuugaanag

SEQ ID NO: 135210 - RNA, 19 nt, Artificial Sequence
  Synthetic
  misc_feature (17)..(17): n is a, c, g, or u
agcuuggaggcuugaanag

SEQ ID NO: 135211 - RNA, 20 nt, Artificial Sequence
  Synthetic
  misc_feature (18)..(18): n is a, c, g, or u
cagcuuggaggcuugaanag

SEQ ID NO: 135212 - RNA, 21 nt, Artificial Sequence
  Synthetic
  misc_feature (19)..(19): n is a, c, g, or u
acagcuuggaggcuugaanag

SEQ ID NO: 135213 - RNA, 22 nt, Artificial Sequence
  Synthetic
  misc_feature (20)..(20): n is a, c, g, or u
cacagcuuggaggcuugaanag

SEQ ID NO: 135214 - RNA, 23 nt, Artificial Sequence
  Synthetic
  misc_feature (21)..(21): n is a, c, g, or u
gcacagcuuggaggcuugaanag

SEQ ID NO: 135215 - RNA, 24 nt, Artificial Sequence
  Synthetic
  misc_feature (22)..(22): n is a, c, g, or u
ggcacagcuuggaggcuugaanag

SEQ ID NO: 135216 - RNA, 18 nt, Artificial Sequence
  Synthetic
  misc_feature (16)..(16): n is a, c, g, or u
uuaaauguauacccanag

SEQ ID NO: 135217 - RNA, 19 nt, Artificial Sequence
  Synthetic
  misc_feature (17)..(17): n is a, c, g, or u
uuuaaauguauacccanag

SEQ ID NO: 135218 - RNA, 20 nt, Artificial Sequence
  Synthetic
  misc_feature (18)..(18): n is a, c, g, or u
guuuaaauguauacccanag

SEQ ID NO: 135219 - RNA, 21 nt, Artificial Sequence
  Synthetic
  misc_feature (19)..(19): n is a, c, g, or u
gguuuaaauguauacccanag

SEQ ID NO: 135220 - RNA, 22 nt, Artificial Sequence
  Synthetic
  misc_feature (20)..(20): n is a, c, g, or u
ggguuuaaauguauacccanag

SEQ ID NO: 135221 - RNA, 23 nt, Artificial Sequence
  Synthetic
  misc_feature (21)..(21): n is a, c, g, or u
aggguuuaaauguauacccanag

SEQ ID NO: 135222 - RNA, 24 nt, Artificial Sequence
  Synthetic
  misc_feature (22)..(22): n is a, c, g, or u
uaggguuuaaauguauacccanag

SEQ ID NO: 135223 - RNA, 18 nt, Artificial Sequence
  Synthetic
  misc_feature (13)..(13): n is a, c, g, or u
  misc_feature (16)..(16): n is a, c, g, or u
uguauauuuccgnganag

SEQ ID NO: 135224 - RNA, 19 nt, Artificial Sequence
  Synthetic
  misc_feature (14)..(14): n is a, c, g, or u
  misc_feature (17)..(17): n is a, c, g, or u
auguauauuuccgnganag

SEQ ID NO: 135225 - RNA, 20 nt, Artificial Sequence
  Synthetic
  misc_feature (15)..(15): n is a, c, g, or u
  misc_feature (18)..(18): n is a, c, g, or u
gauguauauuuccgnganag

SEQ ID NO: 135226 - RNA, 21 nt, Artificial Sequence
  Synthetic
  misc_feature (1)..(1): n is a, c, g, or u
  misc_feature (16)..(16): n is a, c, g, or u
  misc_feature (19)..(19): n is a, c, g, or u
ngauguauauuuccgnganag

SEQ ID NO: 135227 - RNA, 22 nt, Artificial Sequence
  Synthetic
  misc_feature (2)..(2): n is a, c, g, or u
  misc_feature (17)..(17): n is a, c, g, or u
  misc_feature (20)..(20): n is a, c, g, or u
angauguauauuuccgnganag

SEQ ID NO: 135228 - RNA, 23 nt, Artificial Sequence
  Synthetic
  misc_feature (3)..(3): n is a, c, g, or u
  misc_feature (18)..(18): n is a, c, g, or u
  misc_feature (21)..(21): n is a, c, g, or u
aangauguauauuuccgnganag

SEQ ID NO: 135229 - RNA, 24 nt, Artificial Sequence
  Synthetic
  misc_feature (4)..(4): n is a, c, g, or u
  misc_feature (19)..(19): n is a, c, g, or u
  misc_feature (22)..(22): n is a, c, g, or u
aaangauguauauuuccgnganag

SEQ ID NO: 135230 - RNA, 18 nt, Artificial Sequence
  Synthetic
gcauuugguggucuauag

SEQ ID NO: 135231 - RNA, 19 nt, Artificial Sequence
  Synthetic
ggcauuugguggucuauag

SEQ ID NO: 135232 - RNA, 20 nt, Artificial Sequence
  Synthetic
gggcauuugguggucuauag

SEQ ID NO: 135233 - RNA, 21 nt, Artificial Sequence
  Synthetic
ggggcauuugguggucuauag

SEQ ID NO: 135234 - RNA, 22 nt, Artificial Sequence
  Synthetic
aggggcauuugguggucuauag

SEQ ID NO: 135235 - RNA, 23 nt, Artificial Sequence
  Synthetic
uaggggcauuugguggucuauag

SEQ ID NO: 135236 - RNA, 24 nt, Artificial Sequence
  Synthetic
auaggggcauuugguggucuauag

SEQ ID NO: 135237 - RNA, 18 nt, Artificial Sequence
  Synthetic
uauuacccacccagguag

SEQ ID NO: 135238 - RNA, 19 nt, Artificial Sequence
  Synthetic
uuauuacccacccagguag

SEQ ID NO: 135239 - RNA, 20 nt, Artificial Sequence
  Synthetic
auuauuacccacccagguag

SEQ ID NO: 135240 - RNA, 21 nt, Artificial Sequence
  Synthetic
aauuauuacccacccagguag

SEQ ID NO: 135241 - RNA, 22 nt, Artificial Sequence
  Synthetic
aaauuauuacccacccagguag

SEQ ID NO: 135242 - RNA, 23 nt, Artificial Sequence
  Synthetic
caaauuauuacccacccagguag

SEQ ID NO: 135243 - RNA, 24 nt, Artificial Sequence
  Synthetic
  misc_feature (1)..(1): n is a, c, g, or u
ncaaauuauuacccacccagguag

SEQ ID NO: 135244 - RNA, 18 nt, Artificial Sequence
  Synthetic
  misc_feature (3)..(3): n is a, c, g, or u
ugnacaagagaugauuag

SEQ ID NO: 135245 - RNA, 19 nt, Artificial Sequence
  Synthetic
  misc_feature (4)..(4): n is a, c, g, or u
augnacaagagaugauuag

SEQ ID NO: 135246 - RNA, 20 nt, Artificial Sequence
  Synthetic
  misc_feature (5)..(5): n is a, c, g, or u
caugnacaagagaugauuag

SEQ ID NO: 135247 - RNA, 21 nt, Artificial Sequence
  Synthetic
  misc_feature (6)..(6): n is a, c, g, or u
acaugnacaagagaugauuag

SEQ ID NO: 135248 - RNA, 22 nt, Artificial Sequence
  Synthetic
  misc_feature (7)..(7): n is a, c, g, or u
gacaugnacaagagaugauuag

SEQ ID NO: 135249 - RNA, 23 nt, Artificial Sequence
  Synthetic
  misc_feature (8)..(8): n is a, c, g, or u
ggacaugnacaagagaugauuag

SEQ ID NO: 135250 - RNA, 24 nt, Artificial Sequence
  Synthetic
  misc_feature (9)..(9): n is a, c, g, or u
gggacaugnacaagagaugauuag

SEQ ID NO: 135251 - RNA, 18 nt, Artificial Sequence
  Synthetic
  misc_feature (4)..(4): n is a, c, g, or u
caunuacuguuuacuuag

SEQ ID NO: 135252 - RNA, 19 nt, Artificial Sequence
  Synthetic
  misc_feature (5)..(5): n is a, c, g, or u
ucaunuacuguuuacuuag

SEQ ID NO: 135253 - RNA, 20 nt, Artificial Sequence
  Synthetic
  misc_feature (6)..(6): n is a, c, g, or u
uucaunuacuguuuacuuag

SEQ ID NO: 135254 - RNA, 21 nt, Artificial Sequence
  Synthetic
  misc_feature (7)..(7): n is a, c, g, or u
guucaunuacuguuuacuuag

SEQ ID NO: 135255 - RNA, 22 nt, Artificial Sequence
  Synthetic
  misc_feature (8)..(8): n is a, c, g, or u
gguucaunuacuguuuacuuag

SEQ ID NO: 135256 - RNA, 23 nt, Artificial Sequence
  Synthetic
  misc_feature (9)..(9): n is a, c, g, or u
agguucaunuacuguuuacuuag

SEQ ID NO: 135257 - RNA, 24 nt, Artificial Sequence
  Synthetic
  misc_feature (10)..(10): n is a, c, g, or u
aagguucaunuacuguuuacuuag

SEQ ID NO: 135258 - RNA, 18 nt, Artificial Sequence
  Synthetic
ggaauuagaggacaaacg

SEQ ID NO: 135259 - RNA, 19 nt, Artificial Sequence
  Synthetic
uggaauuagaggacaaacg

SEQ ID NO: 135260 - RNA, 20 nt, Artificial Sequence
  Synthetic
cuggaauuagaggacaaacg

SEQ ID NO: 135261 - RNA, 21 nt, Artificial Sequence
  Synthetic
ccuggaauuagaggacaaacg

SEQ ID NO: 135262 - RNA, 22 nt, Artificial Sequence
  Synthetic
uccuggaauuagaggacaaacg

SEQ ID NO: 135263 - RNA, 23 nt, Artificial Sequence
  Synthetic
auccuggaauuagaggacaaacg

SEQ ID NO: 135264 - RNA, 24 nt, Artificial Sequence
  Synthetic
gauccuggaauuagaggacaaacg

SEQ ID NO: 135265 - RNA, 18 nt, Artificial Sequence
  Synthetic
gguggucuccaugcaacg

SEQ ID NO: 135266 - RNA, 19 nt, Artificial Sequence
  Synthetic
cgguggucuccaugcaacg

SEQ ID NO: 135267 - RNA, 20 nt, Artificial Sequence
  Synthetic
acgguggucuccaugcaacg

SEQ ID NO: 135268 - RNA, 21 nt, Artificial Sequence
  Synthetic
cacgguggucuccaugcaacg

SEQ ID NO: 135269 - RNA, 22 nt, Artificial Sequence
  Synthetic
ucacgguggucuccaugcaacg

SEQ ID NO: 135270 - RNA, 23 nt, Artificial Sequence
  Synthetic
uucacgguggucuccaugcaacg

SEQ ID NO: 135271 - RNA, 24 nt, Artificial Sequence
  Synthetic
guucacgguggucuccaugcaacg

SEQ ID NO: 135272 - RNA, 18 nt, Artificial Sequence
  Synthetic
aaccccgccuguaacacg

SEQ ID NO: 135273 - RNA, 19 nt, Artificial Sequence
  Synthetic
aaaccccgccuguaacacg

SEQ ID NO: 135274 - RNA, 20 nt, Artificial Sequence
  Synthetic
aaaaccccgccuguaacacg

SEQ ID NO: 135275 - RNA, 21 nt, Artificial Sequence
  Synthetic
aaaaaccccgccuguaacacg

SEQ ID NO: 135276 - RNA, 22 nt, Artificial Sequence
  Synthetic
gaaaaaccccgccuguaacacg

SEQ ID NO: 135277 - RNA, 23 nt, Artificial Sequence
  Synthetic
agaaaaaccccgccuguaacacg

SEQ ID NO: 135278 - RNA, 24 nt, Artificial Sequence
  Synthetic
aagaaaaaccccgccuguaacacg

SEQ ID NO: 135279 - RNA, 18 nt, Artificial Sequence
  Synthetic
gaugagaaggcacagacg

SEQ ID NO: 135280 - RNA, 19 nt, Artificial Sequence
  Synthetic
agaugagaaggcacagacg

SEQ ID NO: 135281 - RNA, 20 nt, Artificial Sequence
  Synthetic
cagaugagaaggcacagacg

SEQ ID NO: 135282 - RNA, 21 nt, Artificial Sequence
  Synthetic
gcagaugagaaggcacagacg

SEQ ID NO: 135283 - RNA, 22 nt, Artificial Sequence
  Synthetic
ggcagaugagaaggcacagacg

SEQ ID NO: 135284 - RNA, 23 nt, Artificial Sequence
  Synthetic
cggcagaugagaaggcacagacg

SEQ ID NO: 135285 - RNA, 24 nt, Artificial Sequence
  Synthetic
ccggcagaugagaaggcacagacg

SEQ ID NO: 135286 - RNA, 18 nt, Artificial Sequence
  Synthetic
  misc_feature (4)..(5): n is a, c, g, or u
  misc_feature (8)..(8): n is a, c, g, or u
cggnnggnacggcagacg

SEQ ID NO: 135287 - RNA, 19 nt, Artificial Sequence
  Synthetic
  misc_feature (5)..(6): n is a, c, g, or u
  misc_feature (9)..(9): n is a, c, g, or u
ucggnnggnacggcagacg

SEQ ID NO: 135288 - RNA, 20 nt, Artificial Sequence
  Synthetic
  misc_feature (6)..(7): n is a, c, g, or u
  misc_feature (10)..(10): n is a, c, g, or u
gucggnnggnacggcagacg

SEQ ID NO: 135289 - RNA, 21 nt, Artificial Sequence
  Synthetic
  misc_feature (7)..(8): n is a, c, g, or u
  misc_feature (11)..(11): n is a, c, g, or u
ggucggnnggnacggcagacg

SEQ ID NO: 135290 - RNA, 22 nt, Artificial Sequence
  Synthetic
  misc_feature (8)..(9): n is a, c, g, or u
  misc_feature (12)..(12): n is a, c, g, or u
uggucggnnggnacggcagacg

SEQ ID NO: 135291 - RNA, 23 nt, Artificial Sequence
  Synthetic
  misc_feature (9)..(10): n is a, c, g, or u
  misc_feature (13)..(13): n is a, c, g, or u
guggucggnnggnacggcagacg

SEQ ID NO: 135292 - RNA, 24 nt, Artificial Sequence
  Synthetic
  misc_feature (10)..(11): n is a, c, g, or u
  misc_feature (14)..(14): n is a, c, g, or u
cguggucggnnggnacggcagacg

SEQ ID NO: 135293 - RNA, 18 nt, Artificial Sequence
  Synthetic
  misc_feature (9)..(9): n is a, c, g, or u
  misc_feature (12)..(12): n is a, c, g, or u
uauuuccgnganaggacg

SEQ ID NO: 135294 - RNA, 19 nt, Artificial Sequence
  Synthetic
  misc_feature (10)..(10): n is a, c, g, or u
  misc_feature (13)..(13): n is a, c, g, or u
auauuuccgnganaggacg

SEQ ID NO: 135295 - RNA, 20 nt, Artificial Sequence
  Synthetic
  misc_feature (11)..(11): n is a, c, g, or u
  misc_feature (14)..(14): n is a, c, g, or u
uauauuuccgnganaggacg

SEQ ID NO: 135296 - RNA, 21 nt, Artificial Sequence
  Synthetic
  misc_feature (12)..(12): n is a, c, g, or u
  misc_feature (15)..(15): n is a, c, g, or u
guauauuuccgnganaggacg

SEQ ID NO: 135297 - RNA, 22 nt, Artificial Sequence
  Synthetic
  misc_feature (13)..(13): n is a, c, g, or u
  misc_feature (16)..(16): n is a, c, g, or u
uguauauuuccgnganaggacg

SEQ ID NO: 135298 - RNA, 23 nt, Artificial Sequence
  Synthetic
  misc_feature (14)..(14): n is a, c, g, or u
  misc_feature (17)..(17): n is a, c, g, or u
auguauauuuccgnganaggacg

SEQ ID NO: 135299 - RNA, 24 nt, Artificial Sequence
  Synthetic
  misc_feature (15)..(15): n is a, c, g, or u
  misc_feature (18)..(18): n is a, c, g, or u
gauguauauuuccgnganaggacg

SEQ ID NO: 135300 - RNA, 18 nt, Artificial Sequence
  Synthetic
cagacggagaaggggacg

SEQ ID NO: 135301 - RNA, 19 nt, Artificial Sequence
  Synthetic
gcagacggagaaggggacg

SEQ ID NO: 135302 - RNA, 20 nt, Artificial Sequence
  Synthetic
ggcagacggagaaggggacg

SEQ ID NO: 135303 - RNA, 21 nt, Artificial Sequence
  Synthetic
cggcagacggagaaggggacg

SEQ ID NO: 135304 - RNA, 22 nt, Artificial Sequence
  Synthetic
acggcagacggagaaggggacg

SEQ ID NO: 135305 - RNA, 23 nt, Artificial Sequence
  Synthetic
  misc_feature (1)..(1): n is a, c, g, or u
nacggcagacggagaaggggacg

SEQ ID NO: 135306 - RNA, 24 nt, Artificial Sequence
  Synthetic
  misc_feature (2)..(2): n is a, c, g, or u
gnacggcagacggagaaggggacg

SEQ ID NO: 135307 - RNA, 18 nt, Artificial Sequence
  Synthetic
  misc_feature (3)..(3): n is a, c, g, or u
  misc_feature (6)..(6): n is a, c, g, or u
  misc_feature (12)..(12): n is a, c, g, or u
  misc_feature (14)..(14): n is a, c, g, or u
ucnagnagaucncngacg

SEQ ID NO: 135308 - RNA, 19 nt, Artificial Sequence
  Synthetic
  misc_feature (1)..(1): n is a, c, g, or u
  misc_feature (4)..(4): n is a, c, g, or u
  misc_feature (7)..(7): n is a, c, g, or u
  misc_feature (13)..(13): n is a, c, g, or u
  misc_feature (15)..(15): n is a, c, g, or u
nucnagnagaucncngacg

SEQ ID NO: 135309 - RNA, 20 nt, Artificial Sequence
  Synthetic
  misc_feature (2)..(2): n is a, c, g, or u
  misc_feature (5)..(5): n is a, c, g, or u
  misc_feature (8)..(8): n is a, c, g, or u
  misc_feature (14)..(14): n is a, c, g, or u
  misc_feature (16)..(16): n is a, c, g, or u
unucnagnagaucncngacg

SEQ ID NO: 135310 - RNA, 21 nt, Artificial Sequence
  Synthetic
  misc_feature (3)..(3): n is a, c, g, or u
  misc_feature (6)..(6): n is a, c, g, or u
  misc_feature (9)..(9): n is a, c, g, or u
  misc_feature (15)..(15): n is a, c, g, or u
  misc_feature (17)..(17): n is a, c, g, or u
gunucnagnagaucncngacg

SEQ ID NO: 135311 - RNA, 22 nt, Artificial Sequence
  Synthetic
  misc_feature (1)..(1): n is a, c, g, or u
  misc_feature (4)..(4): n is a, c, g, or u
  misc_feature (7)..(7): n is a, c, g, or u
  misc_feature (10)..(10): n is a, c, g, or u
  misc_feature (16)..(16): n is a, c, g, or u
  misc_feature (18)..(18): n is a, c, g, or u
ngunucnagnagaucncngacg

SEQ ID NO: 135312 - RNA, 23 nt, Artificial Sequence
  Synthetic
  misc_feature (2)..(2): n is a, c, g, or u
  misc_feature (5)..(5): n is a, c, g, or u
  misc_feature (8)..(8): n is a, c, g, or u
  misc_feature (11)..(11): n is a, c, g, or u
  misc_feature (17)..(17): n is a, c, g, or u
  misc_feature (19)..(19): n is a, c, g, or u
cngunucnagnagaucncngacg

SEQ ID NO: 135313 - RNA, 24 nt, Artificial Sequence
  Synthetic
  misc_feature (3)..(3): n is a, c, g, or u
  misc_feature (6)..(6): n is a, c, g, or u
  misc_feature (9)..(9): n is a, c, g, or u
  misc_feature (12)..(12): n is a, c, g, or u
  misc_feature (18)..(18): n is a, c, g, or u
  misc_feature (20)..(20): n is a, c, g, or u
gcngunucnagnagaucncngacg

SEQ ID NO: 135314 - RNA, 18 nt, Artificial Sequence
  Synthetic
  misc_feature (11)..(12): n is a, c, g, or u
  misc_feature (15)..(15): n is a, c, g, or u
ccguggucggnnggnacg

SEQ ID NO: 135315 - RNA, 19 nt, Artificial Sequence
  Synthetic
  misc_feature (12)..(13): n is a, c, g, or u
  misc_feature (16)..(16): n is a, c, g, or u
cccguggucggnnggnacg

SEQ ID NO: 135316 - RNA, 20 nt, Artificial Sequence
  Synthetic
  misc_feature (13)..(14): n is a, c, g, or u
  misc_feature (17)..(17): n is a, c, g, or u
ccccguggucggnnggnacg

SEQ ID NO: 135317 - RNA, 21 nt, Artificial Sequence
  Synthetic
  misc_feature (14)..(15): n is a, c, g, or u
  misc_feature (18)..(18): n is a, c, g, or u
gccccguggucggnnggnacg

SEQ ID NO: 135318 - RNA, 22 nt, Artificial Sequence
  Synthetic
  misc_feature (15)..(16): n is a, c, g, or u
  misc_feature (19)..(19): n is a, c, g, or u
cgccccguggucggnnggnacg

SEQ ID NO: 135319 - RNA, 23 nt, Artificial Sequence
  Synthetic
  misc_feature (16)..(17): n is a, c, g, or u
  misc_feature (20)..(20): n is a, c, g, or u
gcgccccguggucggnnggnacg

SEQ ID NO: 135320 - RNA, 24 nt, Artificial Sequence
  Synthetic
  misc_feature (17)..(18): n is a, c, g, or u
  misc_feature (21)..(21): n is a, c, g, or u
ugcgccccguggucggnnggnacg

SEQ ID NO: 135321 - RNA, 18 nt, Artificial Sequence
  Synthetic
gcacagacggggagaccg

SEQ ID NO: 135322 - RNA, 19 nt, Artificial Sequence
  Synthetic
ggcacagacggggagaccg

SEQ ID NO: 135323 - RNA, 20 nt, Artificial Sequence
  Synthetic
aggcacagacggggagaccg

SEQ ID NO: 135324 - RNA, 21 nt, Artificial Sequence
  Synthetic
aaggcacagacggggagaccg

SEQ ID NO: 135325 - RNA, 22 nt, Artificial Sequence
  Synthetic
gaaggcacagacggggagaccg

SEQ ID NO: 135326 - RNA, 23 nt, Artificial Sequence
  Synthetic
agaaggcacagacggggagaccg

SEQ ID NO: 135327 - RNA, 24 nt, Artificial Sequence
  Synthetic
gagaaggcacagacggggagaccg

SEQ ID NO: 135328 - RNA, 18 nt, Artificial Sequence
  Synthetic
gagucccaagcggccccg

SEQ ID NO: 135329 - RNA, 19 nt, Artificial Sequence
  Synthetic
agagucccaagcggccccg

SEQ ID NO: 135330 - RNA, 20 nt, Artificial Sequence
  Synthetic
  misc_feature (1)..(1): n is a, c, g, or u
nagagucccaagcggccccg

SEQ ID NO: 135331 - RNA, 21 nt, Artificial Sequence
  Synthetic
  misc_feature (2)..(2): n is a, c, g, or u
anagagucccaagcggccccg

SEQ ID NO: 135332 - RNA, 22 nt, Artificial Sequence
  Synthetic
  misc_feature (3)..(3): n is a, c, g, or u
ganagagucccaagcggccccg

SEQ ID NO: 135333 - RNA, 23 nt, Artificial Sequence
  Synthetic
  misc_feature (4)..(4): n is a, c, g, or u
cganagagucccaagcggccccg

SEQ ID NO: 135334 - RNA, 24 nt, Artificial Sequence
  Synthetic
  misc_feature (5)..(5): n is a, c, g, or u
acganagagucccaagcggccccg

SEQ ID NO: 135335 - RNA, 18 nt, Artificial Sequence
  Synthetic
uaaacaaaggacgucccg

SEQ ID NO: 135336 - RNA, 19 nt, Artificial Sequence
  Synthetic
guaaacaaaggacgucccg

SEQ ID NO: 135337 - RNA, 20 nt, Artificial Sequence
  Synthetic
cguaaacaaaggacgucccg

SEQ ID NO: 135338 - RNA, 21 nt, Artificial Sequence
  Synthetic
acguaaacaaaggacgucccg

SEQ ID NO: 135339 - RNA, 22 nt, Artificial Sequence
  Synthetic
gacguaaacaaaggacgucccg

SEQ ID NO: 135340 - RNA, 23 nt, Artificial Sequence
  Synthetic
ggacguaaacaaaggacgucccg

SEQ ID NO: 135341 - RNA, 24 nt, Artificial Sequence
  Synthetic
gggacguaaacaaaggacgucccg

SEQ ID NO: 135342 - RNA, 18 nt, Artificial Sequence
  Synthetic
ccgcgggauucagcgccg

SEQ ID NO: 135343 - RNA, 19 nt, Artificial Sequence
  Synthetic
uccgcgggauucagcgccg

SEQ ID NO: 135344 - RNA, 20 nt, Artificial Sequence
  Synthetic
guccgcgggauucagcgccg

SEQ ID NO: 135345 - RNA, 21 nt, Artificial Sequence
  Synthetic
cguccgcgggauucagcgccg

SEQ ID NO: 135346 - RNA, 22 nt, Artificial Sequence
  Synthetic
ucguccgcgggauucagcgccg

SEQ ID NO: 135347 - RNA, 23 nt, Artificial Sequence
  Synthetic
gucguccgcgggauucagcgccg

SEQ ID NO: 135348 - RNA, 24 nt, Artificial Sequence
  Synthetic
ggucguccgcgggauucagcgccg

SEQ ID NO: 135349 - RNA, 18 nt, Artificial Sequence
  Synthetic
cagaccaggccguugccg

SEQ ID NO: 135350 - RNA, 19 nt, Artificial Sequence
  Synthetic
acagaccaggccguugccg

SEQ ID NO: 135351 - RNA, 20 nt, Artificial Sequence
  Synthetic
cacagaccaggccguugccg

SEQ ID NO: 135352 - RNA, 21 nt, Artificial Sequence
  Synthetic
gcacagaccaggccguugccg

SEQ ID NO: 135353 - RNA, 22 nt, Artificial Sequence
  Synthetic
ggcacagaccaggccguugccg

SEQ ID NO: 135354 - RNA, 23 nt, Artificial Sequence
  Synthetic
uggcacagaccaggccguugccg

SEQ ID NO: 135355 - RNA, 24 nt, Artificial Sequence
  Synthetic
uuggcacagaccaggccguugccg

SEQ ID NO: 135356 - RNA, 18 nt, Artificial Sequence
  Synthetic
  misc_feature (11)..(11): n is a, c, g, or u
  misc_feature (15)..(15): n is a, c, g, or u
caccccaaaanaccnccg

SEQ ID NO: 135357 - RNA, 19 nt, Artificial Sequence
  Synthetic
  misc_feature (12)..(12): n is a, c, g, or u
  misc_feature (16)..(16): n is a, c, g, or u
ccaccccaaaanaccnccg

SEQ ID NO: 135358 - RNA, 20 nt, Artificial Sequence
  Synthetic
  misc_feature (13)..(13): n is a, c, g, or u
  misc_feature (17)..(17): n is a, c, g, or u
uccaccccaaaanaccnccg

SEQ ID NO: 135359 - RNA, 21 nt, Artificial Sequence
  Synthetic
  misc_feature (14)..(14): n is a, c, g, or u
  misc_feature (18)..(18): n is a, c, g, or u
cuccaccccaaaanaccnccg

SEQ ID NO: 135360 - RNA, 22 nt, Artificial Sequence
  Synthetic
  misc_feature (15)..(15): n is a, c, g, or u
  misc_feature (19)..(19): n is a, c, g, or u
gcuccaccccaaaanaccnccg

SEQ ID NO: 135361 - RNA, 23 nt, Artificial Sequence
  Synthetic
  misc_feature (16)..(16): n is a, c, g, or u
  misc_feature (20)..(20): n is a, c, g, or u
ggcuccaccccaaaanaccnccg

SEQ ID NO: 135362 - RNA, 24 nt, Artificial Sequence
  Synthetic
  misc_feature (17)..(17): n is a, c, g, or u
  misc_feature (21)..(21): n is a, c, g, or u
gggcuccaccccaaaanaccnccg

SEQ ID NO: 135363 - RNA, 18 nt, Artificial Sequence
  Synthetic
gugcgaauccacacuccg

SEQ ID NO: 135364 - RNA, 19 nt, Artificial Sequence
  Synthetic
agugcgaauccacacuccg

SEQ ID NO: 135365 - RNA, 20 nt, Artificial Sequence
  Synthetic
gagugcgaauccacacuccg

SEQ ID NO: 135366 - RNA, 18 nt, Artificial Sequence
  Synthetic
cugcgagcaaaacaagcg

SEQ ID NO: 135367 - RNA, 19 nt, Artificial Sequence
  Synthetic
gcugcgagcaaaacaagcg

SEQ ID NO: 135368 - RNA, 20 nt, Artificial Sequence
  Synthetic
ggcugcgagcaaaacaagcg

SEQ ID NO: 135369 - RNA, 21 nt, Artificial Sequence
  Synthetic
cggcugcgagcaaaacaagcg

SEQ ID NO: 135370 - RNA, 22 nt, Artificial Sequence
  Synthetic
ccggcugcgagcaaaacaagcg

SEQ ID NO: 135371 - RNA, 23 nt, Artificial Sequence
  Synthetic
accggcugcgagcaaaacaagcg

SEQ ID NO: 135372 - RNA, 24 nt, Artificial Sequence
  Synthetic
gaccggcugcgagcaaaacaagcg

SEQ ID NO: 135373 - RNA, 18 nt, Artificial Sequence
  Synthetic
acagacggggagaccgcg

SEQ ID NO: 135374 - RNA, 19 nt, Artificial Sequence
  Synthetic
cacagacggggagaccgcg

SEQ ID NO: 135375 - RNA, 20 nt, Artificial Sequence
  Synthetic
gcacagacggggagaccgcg

SEQ ID NO: 135376 - RNA, 21 nt, Artificial Sequence
  Synthetic
ggcacagacggggagaccgcg

SEQ ID NO: 135377 - RNA, 22 nt, Artificial Sequence
  Synthetic
aggcacagacggggagaccgcg

SEQ ID NO: 135378 - RNA, 23 nt, Artificial Sequence
  Synthetic
aaggcacagacggggagaccgcg

SEQ ID NO: 135379 - RNA, 24 nt, Artificial Sequence
  Synthetic
gaaggcacagacggggagaccgcg

SEQ ID NO: 135380 - RNA, 18 nt, Artificial Sequence
  Synthetic
  misc_feature (5)..(5): n is a, c, g, or u
aucuncgucugcgaggcg

SEQ ID NO: 135381 - RNA, 19 nt, Artificial Sequence
  Synthetic
  misc_feature (6)..(6): n is a, c, g, or u
gaucuncgucugcgaggcg

SEQ ID NO: 135382 - RNA, 20 nt, Artificial Sequence
  Synthetic
  misc_feature (7)..(7): n is a, c, g, or u
agaucuncgucugcgaggcg

SEQ ID NO: 135383 - RNA, 21 nt, Artificial Sequence
  Synthetic
  misc_feature (8)..(8): n is a, c, g, or u
gagaucuncgucugcgaggcg

SEQ ID NO: 135384 - RNA, 22 nt, Artificial Sequence
  Synthetic
  misc_feature (9)..(9): n is a, c, g, or u
ugagaucuncgucugcgaggcg

SEQ ID NO: 135385 - RNA, 23 nt, Artificial Sequence
  Synthetic
  misc_feature (10)..(10): n is a, c, g, or u
uugagaucuncgucugcgaggcg

SEQ ID NO: 135386 - RNA, 24 nt, Artificial Sequence
  Synthetic
  misc_feature (11)..(11): n is a, c, g, or u
auugagaucuncgucugcgaggcg

SEQ ID NO: 135387 - RNA, 18 nt, Artificial Sequence
  Synthetic
aucuucugcgacgcggcg

SEQ ID NO: 135388 - RNA, 19 nt, Artificial Sequence
  Synthetic
gaucuucugcgacgcggcg

SEQ ID NO: 135389 - RNA, 20 nt, Artificial Sequence
  Synthetic
agaucuucugcgacgcggcg

SEQ ID NO: 135390 - RNA, 18 nt, Artificial Sequence
  Synthetic
aggccuuguaaguuggcg

SEQ ID NO: 135391 - RNA, 19 nt, Artificial Sequence
  Synthetic
aaggccuuguaaguuggcg

SEQ ID NO: 135392 - RNA, 20 nt, Artificial Sequence
  Synthetic
aaaggccuuguaaguuggcg

SEQ ID NO: 135393 - RNA, 21 nt, Artificial Sequence
  Synthetic
gaaaggccuuguaaguuggcg

SEQ ID NO: 135394 - RNA, 22 nt, Artificial Sequence
  Synthetic
agaaaggccuuguaaguuggcg

SEQ ID NO: 135395 - RNA, 23 nt, Artificial Sequence
  Synthetic
uagaaaggccuuguaaguuggcg

SEQ ID NO: 135396 - RNA, 24 nt, Artificial Sequence
  Synthetic
uuagaaaggccuuguaaguuggcg

SEQ ID NO: 135397 - RNA, 18 nt, Artificial Sequence
  Synthetic
ugcuccagaccggcugcg

SEQ ID NO: 135398 - RNA, 19 nt, Artificial Sequence
  Synthetic
uugcuccagaccggcugcg

SEQ ID NO: 135399 - RNA, 20 nt, Artificial Sequence
  Synthetic
uuugcuccagaccggcugcg

SEQ ID NO: 135400 - RNA, 21 nt, Artificial Sequence
  Synthetic
  misc_feature (1)..(1): n is a, c, g, or u
nuuugcuccagaccggcugcg

SEQ ID NO: 135401 - RNA, 22 nt, Artificial Sequence
  Synthetic
  misc_feature (2)..(2): n is a, c, g, or u
gnuuugcuccagaccggcugcg

SEQ ID NO: 135402 - RNA, 23 nt, Artificial Sequence
  Synthetic
  misc_feature (3)..(3): n is a, c, g, or u
agnuuugcuccagaccggcugcg

SEQ ID NO: 135403 - RNA, 24 nt, Artificial Sequence
  Synthetic
  misc_feature (4)..(4): n is a, c, g, or u
gagnuuugcuccagaccggcugcg

SEQ ID NO: 135404 - RNA, 18 nt, Artificial Sequence
  Synthetic
guuccgcaguauggaucg

SEQ ID NO: 135405 - RNA, 19 nt, Artificial Sequence
  Synthetic
aguuccgcaguauggaucg

SEQ ID NO: 135406 - RNA, 20 nt, Artificial Sequence
  Synthetic
gaguuccgcaguauggaucg

SEQ ID NO: 135407 - RNA, 21 nt, Artificial Sequence
  Synthetic
ggaguuccgcaguauggaucg

SEQ ID NO: 135408 - RNA, 22 nt, Artificial Sequence
  Synthetic
aggaguuccgcaguauggaucg

SEQ ID NO: 135409 - RNA, 23 nt, Artificial Sequence
  Synthetic
uaggaguuccgcaguauggaucg

SEQ ID NO: 135410 - RNA, 24 nt, Artificial Sequence
  Synthetic
cuaggaguuccgcaguauggaucg

SEQ ID NO: 135411 - RNA, 18 nt, Artificial Sequence
  Synthetic
ggguccaacugaugaucg

SEQ ID NO: 135412 - RNA, 19 nt, Artificial Sequence
  Synthetic
aggguccaacugaugaucg

SEQ ID NO: 135413 - RNA, 20 nt, Artificial Sequence
  Synthetic
caggguccaacugaugaucg

SEQ ID NO: 135414 - RNA, 21 nt, Artificial Sequence
  Synthetic
gcaggguccaacugaugaucg

SEQ ID NO: 135415 - RNA, 22 nt, Artificial Sequence
  Synthetic
ugcaggguccaacugaugaucg

SEQ ID NO: 135416 - RNA, 23 nt, Artificial Sequence
  Synthetic
augcaggguccaacugaugaucg

SEQ ID NO: 135417 - RNA, 24 nt, Artificial Sequence
  Synthetic
aaugcaggguccaacugaugaucg

SEQ ID NO: 135418 - RNA, 18 nt, Artificial Sequence
  Synthetic
caggguccccaguccucg

SEQ ID NO: 135419 - RNA, 19 nt, Artificial Sequence
  Synthetic
  misc_feature (1)..(1): n is a, c, g, or u
ncaggguccccaguccucg

SEQ ID NO: 135420 - RNA, 20 nt, Artificial Sequence
  Synthetic
  misc_feature (2)..(2): n is a, c, g, or u
cncaggguccccaguccucg

SEQ ID NO: 135421 - RNA, 21 nt, Artificial Sequence
  Synthetic
  misc_feature (1)..(1): n is a, c, g, or u
  misc_feature (3)..(3): n is a, c, g, or u
ncncaggguccccaguccucg

SEQ ID NO: 135422 - RNA, 22 nt, Artificial Sequence
  Synthetic
  misc_feature (2)..(2): n is a, c, g, or u
  misc_feature (4)..(4): n is a, c, g, or u
gncncaggguccccaguccucg

SEQ ID NO: 135423 - RNA, 23 nt, Artificial Sequence
  Synthetic
  misc_feature (3)..(3): n is a, c, g, or u
  misc_feature (5)..(5): n is a, c, g, or u
cgncncaggguccccaguccucg

SEQ ID NO: 135424 - RNA, 24 nt, Artificial Sequence
  Synthetic
  misc_feature (4)..(4): n is a, c, g, or u
  misc_feature (6)..(6): n is a, c, g, or u
ucgncncaggguccccaguccucg

SEQ ID NO: 135425 - RNA, 18 nt, Artificial Sequence
  Synthetic
ugccuugagcaggagucg

SEQ ID NO: 135426 - RNA, 19 nt, Artificial Sequence
  Synthetic
uugccuugagcaggagucg

SEQ ID NO: 135427 - RNA, 20 nt, Artificial Sequence
  Synthetic
guugccuugagcaggagucg

SEQ ID NO: 135428 - RNA, 21 nt, Artificial Sequence
  Synthetic
aguugccuugagcaggagucg

SEQ ID NO: 135429 - RNA, 22 nt, Artificial Sequence
  Synthetic
gaguugccuugagcaggagucg

SEQ ID NO: 135430 - RNA, 23 nt, Artificial Sequence
  Synthetic
agaguugccuugagcaggagucg

SEQ ID NO: 135431 - RNA, 24 nt, Artificial Sequence
  Synthetic
uagaguugccuugagcaggagucg

SEQ ID NO: 135432 - RNA, 18 nt, Artificial Sequence
  Synthetic
  misc_feature (13)..(13): n is a, c, g, or u
ccugccucggucncgucg

SEQ ID NO: 135433 - RNA, 19 nt, Artificial Sequence
  Synthetic
  misc_feature (14)..(14): n is a, c, g, or u
accugccucggucncgucg

SEQ ID NO: 135434 - RNA, 20 nt, Artificial Sequence
  Synthetic
  misc_feature (15)..(15): n is a, c, g, or u
gaccugccucggucncgucg

SEQ ID NO: 135435 - RNA, 21 nt, Artificial Sequence
  Synthetic
  misc_feature (16)..(16): n is a, c, g, or u
ggaccugccucggucncgucg

SEQ ID NO: 135436 - RNA, 22 nt, Artificial Sequence
  Synthetic
  misc_feature (17)..(17): n is a, c, g, or u
gggaccugccucggucncgucg

SEQ ID NO: 135437 - RNA, 23 nt, Artificial Sequence
  Synthetic
  misc_feature (18)..(18): n is a, c, g, or u
ggggaccugccucggucncgucg

SEQ ID NO: 135438 - RNA, 24 nt, Artificial Sequence
  Synthetic
  misc_feature (19)..(19): n is a, c, g, or u
aggggaccugccucggucncgucg

SEQ ID NO: 135439 - RNA, 18 nt, Artificial Sequence
  Synthetic
aggugcgccccguggucg

SEQ ID NO: 135440 - RNA, 19 nt, Artificial Sequence
  Synthetic
gaggugcgccccguggucg

SEQ ID NO: 135441 - RNA, 20 nt, Artificial Sequence
  Synthetic
agaggugcgccccguggucg

SEQ ID NO: 135442 - RNA, 21 nt, Artificial Sequence
  Synthetic
gagaggugcgccccguggucg

SEQ ID NO: 135443 - RNA, 22 nt, Artificial Sequence
  Synthetic
agagaggugcgccccguggucg

SEQ ID NO: 135444 - RNA, 23 nt, Artificial Sequence
  Synthetic
aagagaggugcgccccguggucg

SEQ ID NO: 135445 - RNA, 24 nt, Artificial Sequence
  Synthetic
aaagagaggugcgccccguggucg

SEQ ID NO: 135446 - RNA, 18 nt, Artificial Sequence
  Synthetic
  misc_feature (12)..(12): n is a, c, g, or u
ccccaaagccanccaagg

SEQ ID NO: 135447 - RNA, 19 nt, Artificial Sequence
  Synthetic
  misc_feature (13)..(13): n is a, c, g, or u
gccccaaagccanccaagg

SEQ ID NO: 135448 - RNA, 20 nt, Artificial Sequence
  Synthetic
  misc_feature (14)..(14): n is a, c, g, or u
ugccccaaagccanccaagg

SEQ ID NO: 135449 - RNA, 21 nt, Artificial Sequence
  Synthetic
  misc_feature (15)..(15): n is a, c, g, or u
augccccaaagccanccaagg

SEQ ID NO: 135450 - RNA, 22 nt, Artificial Sequence
  Synthetic
  misc_feature (16)..(16): n is a, c, g, or u
caugccccaaagccanccaagg

SEQ ID NO: 135451 - RNA, 23 nt, Artificial Sequence
  Synthetic
  misc_feature (17)..(17): n is a, c, g, or u
ccaugccccaaagccanccaagg

SEQ ID NO: 135452 - RNA, 24 nt, Artificial Sequence
  Synthetic
  misc_feature (18)..(18): n is a, c, g, or u
uccaugccccaaagccanccaagg

SEQ ID NO: 135453 - RNA, 18 nt, Artificial Sequence
  Synthetic
aggaaagaagucagaagg

SEQ ID NO: 135454 - RNA, 19 nt, Artificial Sequence
  Synthetic
aaggaaagaagucagaagg

SEQ ID NO: 135455 - RNA, 20 nt, Artificial Sequence
  Synthetic
gaaggaaagaagucagaagg

SEQ ID NO: 135456 - RNA, 21 nt, Artificial Sequence
  Synthetic
ggaaggaaagaagucagaagg

SEQ ID NO: 135457 - RNA, 22 nt, Artificial Sequence
  Synthetic
cggaaggaaagaagucagaagg

SEQ ID NO: 135458 - RNA, 23 nt, Artificial Sequence
  Synthetic
acggaaggaaagaagucagaagg

SEQ ID NO: 135459 - RNA, 24 nt, Artificial Sequence
  Synthetic
gacggaaggaaagaagucagaagg

SEQ ID NO: 135460 - RNA, 18 nt, Artificial Sequence
  Synthetic
gaccggcagaugagaagg

SEQ ID NO: 135461 - RNA, 19 nt, Artificial Sequence
  Synthetic
ggaccggcagaugagaagg

SEQ ID NO: 135462 - RNA, 20 nt, Artificial Sequence
  Synthetic
cggaccggcagaugagaagg

SEQ ID NO: 135463 - RNA, 21 nt, Artificial Sequence
  Synthetic
acggaccggcagaugagaagg

SEQ ID NO: 135464 - RNA, 22 nt, Artificial Sequence
  Synthetic
cacggaccggcagaugagaagg

SEQ ID NO: 135465 - RNA, 23 nt, Artificial Sequence
  Synthetic
acacggaccggcagaugagaagg

SEQ ID NO: 135466 - RNA, 24 nt, Artificial Sequence
  Synthetic
cacacggaccggcagaugagaagg

SEQ ID NO: 135467 - RNA, 18 nt, Artificial Sequence
  Synthetic
  misc_feature (1)..(1): n is a, c, g, or u
  misc_feature (7)..(7): n is a, c, g, or u
  misc_feature (9)..(9): n is a, c, g, or u
nagaucncngacggaagg

SEQ ID NO: 135468 - RNA, 19 nt, Artificial Sequence
  Synthetic
  misc_feature (2)..(2): n is a, c, g, or u
  misc_feature (8)..(8): n is a, c, g, or u
  misc_feature (10)..(10): n is a, c, g, or u
gnagaucncngacggaagg

SEQ ID NO: 135469 - RNA, 20 nt, Artificial Sequence
  Synthetic
  misc_feature (3)..(3): n is a, c, g, or u
  misc_feature (9)..(9): n is a, c, g, or u
  misc_feature (11)..(11): n is a, c, g, or u
agnagaucncngacggaagg

SEQ ID NO: 135470 - RNA, 21 nt, Artificial Sequence
  Synthetic
  misc_feature (1)..(1): n is a, c, g, or u
  misc_feature (4)..(4): n is a, c, g, or u
  misc_feature (10)..(10): n is a, c, g, or u
  misc_feature (12)..(12): n is a, c, g, or u
nagnagaucncngacggaagg

SEQ ID NO: 135471 - RNA, 22 nt, Artificial Sequence
  Synthetic
  misc_feature (2)..(2): n is a, c, g, or u
  misc_feature (5)..(5): n is a, c, g, or u
  misc_feature (11)..(11): n is a, c, g, or u
  misc_feature (13)..(13): n is a, c, g, or u
cnagnagaucncngacggaagg

SEQ ID NO: 135472 - RNA, 23 nt, Artificial Sequence
  Synthetic
  misc_feature (3)..(3): n is a, c, g, or u
  misc_feature (6)..(6): n is a, c, g, or u
  misc_feature (12)..(12): n is a, c, g, or u
  misc_feature (14)..(14): n is a, c, g, or u
ucnagnagaucncngacggaagg

SEQ ID NO: 135473 - RNA, 24 nt, Artificial Sequence
  Synthetic
  misc_feature (1)..(1): n is a, c, g, or u
  misc_feature (4)..(4): n is a, c, g, or u
  misc_feature (7)..(7): n is a, c, g, or u
  misc_feature (13)..(13): n is a, c, g, or u
  misc_feature (15)..(15): n is a, c, g, or u
nucnagnagaucncngacggaagg

SEQ ID NO: 135474 - RNA, 18 nt, Artificial Sequence
  Synthetic
ucucuuccaaaaguaagg

SEQ ID NO: 135475 - RNA, 19 nt, Artificial Sequence
  Synthetic
  misc_feature (1)..(1): n is a, c, g, or u
nucucuuccaaaaguaagg

SEQ ID NO: 135476 - RNA, 20 nt, Artificial Sequence
  Synthetic
  misc_feature (2)..(2): n is a, c, g, or u
unucucuuccaaaaguaagg

SEQ ID NO: 135477 - RNA, 21 nt, Artificial Sequence
  Synthetic
  misc_feature (3)..(3): n is a, c, g, or u
gunucucuuccaaaaguaagg

SEQ ID NO: 135478 - RNA, 22 nt, Artificial Sequence
  Synthetic
  misc_feature (4)..(4): n is a, c, g, or u
agunucucuuccaaaaguaagg

SEQ ID NO: 135479 - RNA, 23 nt, Artificial Sequence
  Synthetic
  misc_feature (5)..(5): n is a, c, g, or u
cagunucucuuccaaaaguaagg

SEQ ID NO: 135480 - RNA, 24 nt, Artificial Sequence
  Synthetic
  misc_feature (6)..(6): n is a, c, g, or u
acagunucucuuccaaaaguaagg

SEQ ID NO: 135481 - RNA, 18 nt, Artificial Sequence
  Synthetic
augaggcauagcagcagg

SEQ ID NO: 135482 - RNA, 19 nt, Artificial Sequence
  Synthetic
gaugaggcauagcagcagg

SEQ ID NO: 135483 - RNA, 20 nt, Artificial Sequence
  Synthetic
agaugaggcauagcagcagg

SEQ ID NO: 135484 - RNA, 21 nt, Artificial Sequence
  Synthetic
aagaugaggcauagcagcagg

SEQ ID NO: 135485 - RNA, 22 nt, Artificial Sequence
  Synthetic
gaagaugaggcauagcagcagg

SEQ ID NO: 135486 - RNA, 23 nt, Artificial Sequence
  Synthetic
agaagaugaggcauagcagcagg

SEQ ID NO: 135487 - RNA, 24 nt, Artificial Sequence
  Synthetic
aagaagaugaggcauagcagcagg

SEQ ID NO: 135488 - RNA, 18 nt, Artificial Sequence
  Synthetic
ccgauugguggaggcagg

SEQ ID NO: 135489 - RNA, 19 nt, Artificial Sequence
  Synthetic
gccgauugguggaggcagg

SEQ ID NO: 135490 - RNA, 20 nt, Artificial Sequence
  Synthetic
ugccgauugguggaggcagg

SEQ ID NO: 135491 - RNA, 21 nt, Artificial Sequence
  Synthetic
cugccgauugguggaggcagg

SEQ ID NO: 135492 - RNA, 22 nt, Artificial Sequence
  Synthetic
acugccgauugguggaggcagg

SEQ ID NO: 135493 - RNA, 23 nt, Artificial Sequence
  Synthetic
gacugccgauugguggaggcagg

SEQ ID NO: 135494 - RNA, 24 nt, Artificial Sequence
  Synthetic
ugacugccgauugguggaggcagg

SEQ ID NO: 135495 - RNA, 18 nt, Artificial Sequence
  Synthetic
aggaguuugccauucagg

SEQ ID NO: 135496 - RNA, 19 nt, Artificial Sequence
  Synthetic
aaggaguuugccauucagg

SEQ ID NO: 135497 - RNA, 20 nt, Artificial Sequence
  Synthetic
gaaggaguuugccauucagg

SEQ ID NO: 135498 - RNA, 21 nt, Artificial Sequence
  Synthetic
  misc_feature (1)..(1): n is a, c, g, or u
ngaaggaguuugccauucagg

SEQ ID NO: 135499 - RNA, 22 nt, Artificial Sequence
  Synthetic
  misc_feature (2)..(2): n is a, c, g, or u
angaaggaguuugccauucagg

SEQ ID NO: 135500 - RNA, 23 nt, Artificial Sequence
  Synthetic
  misc_feature (3)..(3): n is a, c, g, or u
aangaaggaguuugccauucagg

SEQ ID NO: 135501 - RNA, 24 nt, Artificial Sequence
  Synthetic
  misc_feature (4)..(4): n is a, c, g, or u
aaangaaggaguuugccauucagg

SEQ ID NO: 135502 - RNA, 18 nt, Artificial Sequence
  Synthetic
gggaaagaaucccagagg

SEQ ID NO: 135503 - RNA, 19 nt, Artificial Sequence
  Synthetic
cgggaaagaaucccagagg

SEQ ID NO: 135504 - RNA, 20 nt, Artificial Sequence
  Synthetic
ucgggaaagaaucccagagg

SEQ ID NO: 135505 - RNA, 21 nt, Artificial Sequence
  Synthetic
aucgggaaagaaucccagagg

SEQ ID NO: 135506 - RNA, 22 nt, Artificial Sequence
  Synthetic
gaucgggaaagaaucccagagg

SEQ ID NO: 135507 - RNA, 23 nt, Artificial Sequence
  Synthetic
ugaucgggaaagaaucccagagg

SEQ ID NO: 135508 - RNA, 24 nt, Artificial Sequence
  Synthetic
augaucgggaaagaaucccagagg

SEQ ID NO: 135509 - RNA, 18 nt, Artificial Sequence
  Synthetic
gagaugauuaggcagagg

SEQ ID NO: 135510 - RNA, 19 nt, Artificial Sequence
  Synthetic
agagaugauuaggcagagg

SEQ ID NO: 135511 - RNA, 20 nt, Artificial Sequence
  Synthetic
aagagaugauuaggcagagg

SEQ ID NO: 135512 - RNA, 21 nt, Artificial Sequence
  Synthetic
caagagaugauuaggcagagg

SEQ ID NO: 135513 - RNA, 22 nt, Artificial Sequence
  Synthetic
acaagagaugauuaggcagagg

SEQ ID NO: 135514 - RNA, 23 nt, Artificial Sequence
  Synthetic
  misc_feature (1)..(1): n is a, c, g, or u
nacaagagaugauuaggcagagg

SEQ ID NO: 135515 - RNA, 24 nt, Artificial Sequence
  Synthetic
  misc_feature (2)..(2): n is a, c, g, or u
gnacaagagaugauuaggcagagg

SEQ ID NO: 135516 - RNA, 18 nt, Artificial Sequence
  Synthetic
ccaugcaacgugcagagg

SEQ ID NO: 135517 - RNA, 19 nt, Artificial Sequence
  Synthetic
uccaugcaacgugcagagg

SEQ ID NO: 135518 - RNA, 20 nt, Artificial Sequence
  Synthetic
cuccaugcaacgugcagagg

SEQ ID NO: 135519 - RNA, 21 nt, Artificial Sequence
  Synthetic
ucuccaugcaacgugcagagg

SEQ ID NO: 135520 - RNA, 22 nt, Artificial Sequence
  Synthetic
gucuccaugcaacgugcagagg

SEQ ID NO: 135521 - RNA, 23 nt, Artificial Sequence
  Synthetic
ggucuccaugcaacgugcagagg

SEQ ID NO: 135522 - RNA, 24 nt, Artificial Sequence
  Synthetic
uggucuccaugcaacgugcagagg

SEQ ID NO: 135523 - RNA, 18 nt, Artificial Sequence
  Synthetic
  misc_feature (1)..(1): n is a, c, g, or u
ngauccuggaauuagagg

SEQ ID NO: 135524 - RNA, 19 nt, Artificial Sequence
  Synthetic
  misc_feature (2)..(2): n is a, c, g, or u
ungauccuggaauuagagg

SEQ ID NO: 135525 - RNA, 20 nt, Artificial Sequence
  Synthetic
  misc_feature (3)..(3): n is a, c, g, or u
gungauccuggaauuagagg

SEQ ID NO: 135526 - RNA, 21 nt, Artificial Sequence
  Synthetic
  misc_feature (4)..(4): n is a, c, g, or u
ugungauccuggaauuagagg

SEQ ID NO: 135527 - RNA, 22 nt, Artificial Sequence
  Synthetic
  misc_feature (5)..(5): n is a, c, g, or u
uugungauccuggaauuagagg

SEQ ID NO: 135528 - RNA, 23 nt, Artificial Sequence
  Synthetic
  misc_feature (6)..(6): n is a, c, g, or u
guugungauccuggaauuagagg

SEQ ID NO: 135529 - RNA, 24 nt, Artificial Sequence
  Synthetic
  misc_feature (7)..(7): n is a, c, g, or u
uguugungauccuggaauuagagg

SEQ ID NO: 135530 - RNA, 18 nt, Artificial Sequence
  Synthetic
augacugucucuuagagg

SEQ ID NO: 135531 - RNA, 19 nt, Artificial Sequence
  Synthetic
gaugacugucucuuagagg

SEQ ID NO: 135532 - RNA, 20 nt, Artificial Sequence
  Synthetic
ggaugacugucucuuagagg

SEQ ID NO: 135533 - RNA, 21 nt, Artificial Sequence
  Synthetic
aggaugacugucucuuagagg

SEQ ID NO: 135534 - RNA, 22 nt, Artificial Sequence
  Synthetic
gaggaugacugucucuuagagg

SEQ ID NO: 135535 - RNA, 23 nt, Artificial Sequence
  Synthetic
ugaggaugacugucucuuagagg

SEQ ID NO: 135536 - RNA, 24 nt, Artificial Sequence
  Synthetic
cugaggaugacugucucuuagagg

SEQ ID NO: 135537 - RNA, 18 nt, Artificial Sequence
  Synthetic
  misc_feature (7)..(7): n is a, c, g, or u
agaucuncgucugcgagg

SEQ ID NO: 135538 - RNA, 19 nt, Artificial Sequence
  Synthetic
  misc_feature (8)..(8): n is a, c, g, or u
gagaucuncgucugcgagg

SEQ ID NO: 135539 - RNA, 20 nt, Artificial Sequence
  Synthetic
  misc_feature (9)..(9): n is a, c, g, or u
ugagaucuncgucugcgagg

SEQ ID NO: 135540 - RNA, 21 nt, Artificial Sequence
  Synthetic
  misc_feature (10)..(10): n is a, c, g, or u
uugagaucuncgucugcgagg

SEQ ID NO: 135541 - RNA, 22 nt, Artificial Sequence
  Synthetic
  misc_feature (11)..(11): n is a, c, g, or u
auugagaucuncgucugcgagg

SEQ ID NO: 135542 - RNA, 23 nt, Artificial Sequence
  Synthetic
  misc_feature (12)..(12): n is a, c, g, or u
gauugagaucuncgucugcgagg

SEQ ID NO: 135543 - RNA, 24 nt, Artificial Sequence
  Synthetic
  misc_feature (13)..(13): n is a, c, g, or u
cgauugagaucuncgucugcgagg

SEQ ID NO: 135544 - RNA, 18 nt, Artificial Sequence
  Synthetic
auugguggaggcaggagg

SEQ ID NO: 135545 - RNA, 19 nt, Artificial Sequence
  Synthetic
gauugguggaggcaggagg

SEQ ID NO: 135546 - RNA, 20 nt, Artificial Sequence
  Synthetic
cgauugguggaggcaggagg

SEQ ID NO: 135547 - RNA, 21 nt, Artificial Sequence
  Synthetic
ccgauugguggaggcaggagg

SEQ ID NO: 135548 - RNA, 22 nt, Artificial Sequence
  Synthetic
gccgauugguggaggcaggagg

SEQ ID NO: 135549 - RNA, 23 nt, Artificial Sequence
  Synthetic
ugccgauugguggaggcaggagg

SEQ ID NO: 135550 - RNA, 24 nt, Artificial Sequence
  Synthetic
cugccgauugguggaggcaggagg

SEQ ID NO: 135551 - RNA, 18 nt, Artificial Sequence
  Synthetic
acugccgauugguggagg

SEQ ID NO: 135552 - RNA, 19 nt, Artificial Sequence
  Synthetic
gacugccgauugguggagg

SEQ ID NO: 135553 - RNA, 20 nt, Artificial Sequence
  Synthetic
ugacugccgauugguggagg

SEQ ID NO: 135554 - RNA, 21 nt, Artificial Sequence
  Synthetic
cugacugccgauugguggagg

SEQ ID NO: 135555 - RNA, 22 nt, Artificial Sequence
  Synthetic
ccugacugccgauugguggagg

SEQ ID NO: 135556 - RNA, 23 nt, Artificial Sequence
  Synthetic
uccugacugccgauugguggagg

SEQ ID NO: 135557 - RNA, 24 nt, Artificial Sequence
  Synthetic
uuccugacugccgauugguggagg

SEQ ID NO: 135558 - RNA, 18 nt, Artificial Sequence
  Synthetic
accaggacaaauuggagg

SEQ ID NO: 135559 - RNA, 19 nt, Artificial Sequence
  Synthetic
aaccaggacaaauuggagg

SEQ ID NO: 135560 - RNA, 20 nt, Artificial Sequence
  Synthetic
uaaccaggacaaauuggagg

SEQ ID NO: 135561 - RNA, 21 nt, Artificial Sequence
  Synthetic
auaaccaggacaaauuggagg

SEQ ID NO: 135562 - RNA, 22 nt, Artificial Sequence
  Synthetic
gauaaccaggacaaauuggagg

SEQ ID NO: 135563 - RNA, 23 nt, Artificial Sequence
  Synthetic
cgauaaccaggacaaauuggagg

SEQ ID NO: 135564 - RNA, 24 nt, Artificial Sequence
  Synthetic
gcgauaaccaggacaaauuggagg

SEQ ID NO: 135565 - RNA, 18 nt, Artificial Sequence
  Synthetic
uuggugagugauuggagg

SEQ ID NO: 135566 - RNA, 19 nt, Artificial Sequence
  Synthetic
guuggugagugauuggagg

SEQ ID NO: 135567 - RNA, 20 nt, Artificial Sequence
  Synthetic
gguuggugagugauuggagg

SEQ ID NO: 135568 - RNA, 21 nt, Artificial Sequence
  Synthetic
agguuggugagugauuggagg

SEQ ID NO: 135569 - RNA, 22 nt, Artificial Sequence
  Synthetic
gagguuggugagugauuggagg

SEQ ID NO: 135570 - RNA, 23 nt, Artificial Sequence
  Synthetic
ggagguuggugagugauuggagg

SEQ ID NO: 135571 - RNA, 24 nt, Artificial Sequence
  Synthetic
aggagguuggugagugauuggagg

SEQ ID NO: 135572 - RNA, 18 nt, Artificial Sequence
  Synthetic
caaggcacagcuuggagg

SEQ ID NO: 135573 - RNA, 19 nt, Artificial Sequence
  Synthetic
ccaaggcacagcuuggagg

SEQ ID NO: 135574 - RNA, 20 nt, Artificial Sequence
  Synthetic
  misc_feature (1)..(1): n is a, c, g, or u
nccaaggcacagcuuggagg

SEQ ID NO: 135575 - RNA, 21 nt, Artificial Sequence
  Synthetic
  misc_feature (2)..(2): n is a, c, g, or u
anccaaggcacagcuuggagg

SEQ ID NO: 135576 - RNA, 22 nt, Artificial Sequence
  Synthetic
  misc_feature (3)..(3): n is a, c, g, or u
canccaaggcacagcuuggagg

SEQ ID NO: 135577 - RNA, 23 nt, Artificial Sequence
  Synthetic
  misc_feature (4)..(4): n is a, c, g, or u
ccanccaaggcacagcuuggagg

SEQ ID NO: 135578 - RNA, 24 nt, Artificial Sequence
  Synthetic
  misc_feature (5)..(5): n is a, c, g, or u
gccanccaaggcacagcuuggagg

SEQ ID NO: 135579 - RNA, 18 nt, Artificial Sequence
  Synthetic
accaauaagaagaugagg

SEQ ID NO: 135580 - RNA, 19 nt, Artificial Sequence
  Synthetic
aaccaauaagaagaugagg

SEQ ID NO: 135581 - RNA, 20 nt, Artificial Sequence
  Synthetic
gaaccaauaagaagaugagg

SEQ ID NO: 135582 - RNA, 21 nt, Artificial Sequence
  Synthetic
agaaccaauaagaagaugagg

SEQ ID NO: 135583 - RNA, 22 nt, Artificial Sequence
  Synthetic
aagaaccaauaagaagaugagg

SEQ ID NO: 135584 - RNA, 23 nt, Artificial Sequence
  Synthetic
gaagaaccaauaagaagaugagg

SEQ ID NO: 135585 - RNA, 24 nt, Artificial Sequence
  Synthetic
agaagaaccaauaagaagaugagg

SEQ ID NO: 135586 - RNA, 18 nt, Artificial Sequence
  Synthetic
cauuugguggucuauagg

SEQ ID NO: 135587 - RNA, 19 nt, Artificial Sequence
  Synthetic
gcauuugguggucuauagg

SEQ ID NO: 135588 - RNA, 20 nt, Artificial Sequence
  Synthetic
ggcauuugguggucuauagg

SEQ ID NO: 135589 - RNA, 21 nt, Artificial Sequence
  Synthetic
gggcauuugguggucuauagg

SEQ ID NO: 135590 - RNA, 22 nt, Artificial Sequence
  Synthetic
ggggcauuugguggucuauagg

SEQ ID NO: 135591 - RNA, 23 nt, Artificial Sequence
  Synthetic
aggggcauuugguggucuauagg

SEQ ID NO: 135592 - RNA, 24 nt, Artificial Sequence
  Synthetic
uaggggcauuugguggucuauagg

SEQ ID NO: 135593 - RNA, 18 nt, Artificial Sequence
  Synthetic
  misc_feature (2)..(2): n is a, c, g, or u
gnacaagagaugauuagg

SEQ ID NO: 135594 - RNA, 19 nt, Artificial Sequence
  Synthetic
  misc_feature (3)..(3): n is a, c, g, or u
ugnacaagagaugauuagg

SEQ ID NO: 135595 - RNA, 20 nt, Artificial Sequence
  Synthetic
  misc_feature (4)..(4): n is a, c, g, or u
augnacaagagaugauuagg

SEQ ID NO: 135596 - RNA, 21 nt, Artificial Sequence
  Synthetic
  misc_feature (5)..(5): n is a, c, g, or u
caugnacaagagaugauuagg

SEQ ID NO: 135597 - RNA, 22 nt, Artificial Sequence
  Synthetic
  misc_feature (6)..(6): n is a, c, g, or u
acaugnacaagagaugauuagg

SEQ ID NO: 135598 - RNA, 23 nt, Artificial Sequence
  Synthetic
  misc_feature (7)..(7): n is a, c, g, or u
gacaugnacaagagaugauuagg

SEQ ID NO: 135599 - RNA, 24 nt, Artificial Sequence
  Synthetic
  misc_feature (8)..(8): n is a, c, g, or u
ggacaugnacaagagaugauuagg

SEQ ID NO: 135600 - RNA, 18 nt, Artificial Sequence
  Synthetic
  misc_feature (9)..(9): n is a, c, g, or u
cugagccangagaaacgg

SEQ ID NO: 135601 - RNA, 19 nt, Artificial Sequence
  Synthetic
  misc_feature (10)..(10): n is a, c, g, or u
acugagccangagaaacgg

SEQ ID NO: 135602 - RNA, 20 nt, Artificial Sequence
  Synthetic
  misc_feature (11)..(11): n is a, c, g, or u
aacugagccangagaaacgg

SEQ ID NO: 135603 - RNA, 21 nt, Artificial Sequence
  Synthetic
  misc_feature (12)..(12): n is a, c, g, or u
aaacugagccangagaaacgg

SEQ ID NO: 135604 - RNA, 22 nt, Artificial Sequence
  Synthetic
  misc_feature (13)..(13): n is a, c, g, or u
uaaacugagccangagaaacgg

SEQ ID NO: 135605 - RNA, 23 nt, Artificial Sequence
  Synthetic
  misc_feature (14)..(14): n is a, c, g, or u
guaaacugagccangagaaacgg

SEQ ID NO: 135606 - RNA, 24 nt, Artificial Sequence
  Synthetic
  misc_feature (15)..(15): n is a, c, g, or u
aguaaacugagccangagaaacgg

SEQ ID NO: 135607 - RNA, 18 nt, Artificial Sequence
  Synthetic
  misc_feature (11)..(11): n is a, c, g, or u
gccguugccgngcaacgg

SEQ ID NO: 135608 - RNA, 19 nt, Artificial Sequence
  Synthetic
  misc_feature (12)..(12): n is a, c, g, or u
ggccguugccgngcaacgg

SEQ ID NO: 135609 - RNA, 20 nt, Artificial Sequence
  Synthetic
  misc_feature (13)..(13): n is a, c, g, or u
aggccguugccgngcaacgg

SEQ ID NO: 135610 - RNA, 21 nt, Artificial Sequence
  Synthetic
  misc_feature (14)..(14): n is a, c, g, or u
caggccguugccgngcaacgg

SEQ ID NO: 135611 - RNA, 22 nt, Artificial Sequence
  Synthetic
  misc_feature (15)..(15): n is a, c, g, or u
ccaggccguugccgngcaacgg

SEQ ID NO: 135612 - RNA, 23 nt, Artificial Sequence
  Synthetic
  misc_feature (16)..(16): n is a, c, g, or u
accaggccguugccgngcaacgg

SEQ ID NO: 135613 - RNA, 24 nt, Artificial Sequence
  Synthetic
  misc_feature (17)..(17): n is a, c, g, or u
gaccaggccguugccgngcaacgg

SEQ ID NO: 135614 - RNA, 18 nt, Artificial Sequence
  Synthetic
gaagcgaagugcacacgg

SEQ ID NO: 135615 - RNA, 19 nt, Artificial Sequence
  Synthetic
ugaagcgaagugcacacgg

SEQ ID NO: 135616 - RNA, 20 nt, Artificial Sequence
  Synthetic
gugaagcgaagugcacacgg

SEQ ID NO: 135617 - RNA, 21 nt, Artificial Sequence
  Synthetic
ggugaagcgaagugcacacgg

SEQ ID NO: 135618 - RNA, 22 nt, Artificial Sequence
  Synthetic
aggugaagcgaagugcacacgg

SEQ ID NO: 135619 - RNA, 23 nt, Artificial Sequence
  Synthetic
gaggugaagcgaagugcacacgg

SEQ ID NO: 135620 - RNA, 24 nt, Artificial Sequence
  Synthetic
agaggugaagcgaagugcacacgg

SEQ ID NO: 135621 - RNA, 18 nt, Artificial Sequence
  Synthetic
augagaaggcacagacgg

SEQ ID NO: 135622 - RNA, 19 nt, Artificial Sequence
  Synthetic
gaugagaaggcacagacgg

SEQ ID NO: 135623 - RNA, 20 nt, Artificial Sequence
  Synthetic
agaugagaaggcacagacgg

SEQ ID NO: 135624 - RNA, 21 nt, Artificial Sequence
  Synthetic
cagaugagaaggcacagacgg

SEQ ID NO: 135625 - RNA, 22 nt, Artificial Sequence
  Synthetic
gcagaugagaaggcacagacgg

SEQ ID NO: 135626 - RNA, 23 nt, Artificial Sequence
  Synthetic
ggcagaugagaaggcacagacgg

SEQ ID NO: 135627 - RNA, 24 nt, Artificial Sequence
  Synthetic
cggcagaugagaaggcacagacgg

SEQ ID NO: 135628 - RNA, 18 nt, Artificial Sequence
  Synthetic
  misc_feature (3)..(4): n is a, c, g, or u
  misc_feature (7)..(7): n is a, c, g, or u
ggnnggnacggcagacgg

SEQ ID NO: 135629 - RNA, 19 nt, Artificial Sequence
  Synthetic
  misc_feature (4)..(5): n is a, c, g, or u
  misc_feature (8)..(8): n is a, c, g, or u
cggnnggnacggcagacgg

SEQ ID NO: 135630 - RNA, 20 nt, Artificial Sequence
  Synthetic
  misc_feature (5)..(6): n is a, c, g, or u
  misc_feature (9)..(9): n is a, c, g, or u
ucggnnggnacggcagacgg

SEQ ID NO: 135631 - RNA, 21 nt, Artificial Sequence
  Synthetic
  misc_feature (6)..(7): n is a, c, g, or u
  misc_feature (10)..(10): n is a, c, g, or u
gucggnnggnacggcagacgg

SEQ ID NO: 135632 - RNA, 22 nt, Artificial Sequence
  Synthetic
  misc_feature (7)..(8): n is a, c, g, or u
  misc_feature (11)..(11): n is a, c, g, or u
ggucggnnggnacggcagacgg

SEQ ID NO: 135633 - RNA, 23 nt, Artificial Sequence
  Synthetic
  misc_feature (8)..(9): n is a, c, g, or u
  misc_feature (12)..(12): n is a, c, g, or u
uggucggnnggnacggcagacgg

SEQ ID NO: 135634 - RNA, 24 nt, Artificial Sequence
  Synthetic
  misc_feature (9)..(10): n is a, c, g, or u
  misc_feature (13)..(13): n is a, c, g, or u
guggucggnnggnacggcagacgg

SEQ ID NO: 135635 - RNA, 18 nt, Artificial Sequence
  Synthetic
  misc_feature (2)..(2): n is a, c, g, or u
  misc_feature (5)..(5): n is a, c, g, or u
  misc_feature (11)..(11): n is a, c, g, or u
  misc_feature (13)..(13): n is a, c, g, or u
cnagnagaucncngacgg

SEQ ID NO: 135636 - RNA, 19 nt, Artificial Sequence
  Synthetic
  misc_feature (3)..(3): n is a, c, g, or u
  misc_feature (6)..(6): n is a, c, g, or u
  misc_feature (12)..(12): n is a, c, g, or u
  misc_feature (14)..(14): n is a, c, g, or u
ucnagnagaucncngacgg

SEQ ID NO: 135637 - RNA, 20 nt, Artificial Sequence
  Synthetic
  misc_feature (1)..(1): n is a, c, g, or u
  misc_feature (4)..(4): n is a, c, g, or u
  misc_feature (7)..(7): n is a, c, g, or u
  misc_feature (13)..(13): n is a, c, g, or u
  misc_feature (15)..(15): n is a, c, g, or u
nucnagnagaucncngacgg

SEQ ID NO: 135638 - RNA, 21 nt, Artificial Sequence
  Synthetic
  misc_feature (2)..(2): n is a, c, g, or u
  misc_feature (5)..(5): n is a, c, g, or u
  misc_feature (8)..(8): n is a, c, g, or u
  misc_feature (14)..(14): n is a, c, g, or u
  misc_feature (16)..(16): n is a, c, g, or u
unucnagnagaucncngacgg

SEQ ID NO: 135639 - RNA, 22 nt, Artificial Sequence
  Synthetic
  misc_feature (3)..(3): n is a, c, g, or u
  misc_feature (6)..(6): n is a, c, g, or u
  misc_feature (9)..(9): n is a, c, g, or u
  misc_feature (15)..(15): n is a, c, g, or u
  misc_feature (17)..(17): n is a, c, g, or u
gunucnagnagaucncngacgg

SEQ ID NO: 135640 - RNA, 23 nt, Artificial Sequence
  Synthetic
  misc_feature (1)..(1): n is a, c, g, or u
  misc_feature (4)..(4): n is a, c, g, or u
  misc_feature (7)..(7): n is a, c, g, or u
  misc_feature (10)..(10): n is a, c, g, or u
  misc_feature (16)..(16): n is a, c, g, or u
  misc_feature (18)..(18): n is a, c, g, or u
ngunucnagnagaucncngacgg

SEQ ID NO: 135641 - RNA, 24 nt, Artificial Sequence
  Synthetic
  misc_feature (2)..(2): n is a, c, g, or u
  misc_feature (5)..(5): n is a, c, g, or u
  misc_feature (8)..(8): n is a, c, g, or u
  misc_feature (11)..(11): n is a, c, g, or u
  misc_feature (17)..(17): n is a, c, g, or u
  misc_feature (19)..(19): n is a, c, g, or u
cngunucnagnagaucncngacgg

SEQ ID NO: 135642 - RNA, 18 nt, Artificial Sequence
  Synthetic
ugcgagcaaaacaagcgg

SEQ ID NO: 135643 - RNA, 19 nt, Artificial Sequence
  Synthetic
cugcgagcaaaacaagcgg

SEQ ID NO: 135644 - RNA, 20 nt, Artificial Sequence
  Synthetic
gcugcgagcaaaacaagcgg

SEQ ID NO: 135645 - RNA, 21 nt, Artificial Sequence
  Synthetic
ggcugcgagcaaaacaagcgg

SEQ ID NO: 135646 - RNA, 22 nt, Artificial Sequence
  Synthetic
cggcugcgagcaaaacaagcgg

SEQ ID NO: 135647 - RNA, 23 nt, Artificial Sequence
  Synthetic
ccggcugcgagcaaaacaagcgg

SEQ ID NO: 135648 - RNA, 24 nt, Artificial Sequence
  Synthetic
accggcugcgagcaaaacaagcgg

SEQ ID NO: 135649 - RNA, 18 nt, Artificial Sequence
  Synthetic
gaaaauugguaacagcgg

SEQ ID NO: 135650 - RNA, 19 nt, Artificial Sequence
  Synthetic
agaaaauugguaacagcgg

SEQ ID NO: 135651 - RNA, 20 nt, Artificial Sequence
  Synthetic
aagaaaauugguaacagcgg

SEQ ID NO: 135652 - RNA, 21 nt, Artificial Sequence
  Synthetic
aaagaaaauugguaacagcgg

SEQ ID NO: 135653 - RNA, 22 nt, Artificial Sequence
  Synthetic
aaaagaaaauugguaacagcgg

SEQ ID NO: 135654 - RNA, 23 nt, Artificial Sequence
  Synthetic
caaaagaaaauugguaacagcgg

SEQ ID NO: 135655 - RNA, 24 nt, Artificial Sequence
  Synthetic
acaaaagaaaauugguaacagcgg

SEQ ID NO: 135656 - RNA, 18 nt, Artificial Sequence
  Synthetic
uuccgcaguauggaucgg

SEQ ID NO: 135657 - RNA, 19 nt, Artificial Sequence
  Synthetic
guuccgcaguauggaucgg

SEQ ID NO: 135658 - RNA, 20 nt, Artificial Sequence
  Synthetic
aguuccgcaguauggaucgg

SEQ ID NO: 135659 - RNA, 18 nt, Artificial Sequence
  Synthetic
gguccaacugaugaucgg

SEQ ID NO: 135660 - RNA, 19 nt, Artificial Sequence
  Synthetic
ggguccaacugaugaucgg

SEQ ID NO: 135661 - RNA, 20 nt, Artificial Sequence
  Synthetic
aggguccaacugaugaucgg

SEQ ID NO: 135662 - RNA, 21 nt, Artificial Sequence
  Synthetic
caggguccaacugaugaucgg

SEQ ID NO: 135663 - RNA, 22 nt, Artificial Sequence
  Synthetic
gcaggguccaacugaugaucgg

SEQ ID NO: 135664 - RNA, 23 nt, Artificial Sequence
  Synthetic
ugcaggguccaacugaugaucgg

SEQ ID NO: 135665 - RNA, 24 nt, Artificial Sequence
  Synthetic
augcaggguccaacugaugaucgg

SEQ ID NO: 135666 - RNA, 18 nt, Artificial Sequence
  Synthetic
acggcagacggagaaggg

SEQ ID NO: 135667 - RNA, 19 nt, Artificial Sequence
  Synthetic
  misc_feature (1)..(1): n is a, c, g, or u
nacggcagacggagaaggg

SEQ ID NO: 135668 - RNA, 20 nt, Artificial Sequence
  Synthetic
  misc_feature (2)..(2): n is a, c, g, or u
gnacggcagacggagaaggg

SEQ ID NO: 135669 - RNA, 21 nt, Artificial Sequence
  Synthetic
  misc_feature (3)..(3): n is a, c, g, or u
ggnacggcagacggagaaggg

SEQ ID NO: 135670 - RNA, 22 nt, Artificial Sequence
  Synthetic
  misc_feature (1)..(1): n is a, c, g, or u
  misc_feature (4)..(4): n is a, c, g, or u
nggnacggcagacggagaaggg

SEQ ID NO: 135671 - RNA, 23 nt, Artificial Sequence
  Synthetic
  misc_feature (1)..(2): n is a, c, g, or u
  misc_feature (5)..(5): n is a, c, g, or u
nnggnacggcagacggagaaggg

SEQ ID NO: 135672 - RNA, 24 nt, Artificial Sequence
  Synthetic
  misc_feature (2)..(3): n is a, c, g, or u
  misc_feature (6)..(6): n is a, c, g, or u
gnnggnacggcagacggagaaggg

SEQ ID NO: 135673 - RNA, 18 nt, Artificial Sequence
  Synthetic
uuggcuccgaaugcaggg

SEQ ID NO: 135674 - RNA, 19 nt, Artificial Sequence
  Synthetic
  misc_feature (1)..(1): n is a, c, g, or u
nuuggcuccgaaugcaggg

SEQ ID NO: 135675 - RNA, 20 nt, Artificial Sequence
  Synthetic
  misc_feature (2)..(2): n is a, c, g, or u
anuuggcuccgaaugcaggg

SEQ ID NO: 135676 - RNA, 21 nt, Artificial Sequence
  Synthetic
  misc_feature (3)..(3): n is a, c, g, or u
ganuuggcuccgaaugcaggg

SEQ ID NO: 135677 - RNA, 22 nt, Artificial Sequence
  Synthetic
  misc_feature (4)..(4): n is a, c, g, or u
uganuuggcuccgaaugcaggg

SEQ ID NO: 135678 - RNA, 23 nt, Artificial Sequence
  Synthetic
  misc_feature (5)..(5): n is a, c, g, or u
uuganuuggcuccgaaugcaggg

SEQ ID NO: 135679 - RNA, 24 nt, Artificial Sequence
  Synthetic
  misc_feature (6)..(6): n is a, c, g, or u
uuuganuuggcuccgaaugcaggg

SEQ ID NO: 135680 - RNA, 18 nt, Artificial Sequence
  Synthetic
  misc_feature (3)..(3): n is a, c, g, or u
cunuuuguuuuguuaggg

SEQ ID NO: 135681 - RNA, 19 nt, Artificial Sequence
  Synthetic
  misc_feature (4)..(4): n is a, c, g, or u
ucunuuuguuuuguuaggg

SEQ ID NO: 135682 - RNA, 20 nt, Artificial Sequence
  Synthetic
  misc_feature (5)..(5): n is a, c, g, or u
aucunuuuguuuuguuaggg

SEQ ID NO: 135683 - RNA, 21 nt, Artificial Sequence
  Synthetic
  misc_feature (6)..(6): n is a, c, g, or u
caucunuuuguuuuguuaggg

SEQ ID NO: 135684 - RNA, 22 nt, Artificial Sequence
  Synthetic
  misc_feature (7)..(7): n is a, c, g, or u
ccaucunuuuguuuuguuaggg

SEQ ID NO: 135685 - RNA, 23 nt, Artificial Sequence
  Synthetic
  misc_feature (8)..(8): n is a, c, g, or u
cccaucunuuuguuuuguuaggg

SEQ ID NO: 135686 - RNA, 24 nt, Artificial Sequence
  Synthetic
  misc_feature (9)..(9): n is a, c, g, or u
ccccaucunuuuguuuuguuaggg

SEQ ID NO: 135687 - RNA, 18 nt, Artificial Sequence
  Synthetic
  misc_feature (2)..(2): n is a, c, g, or u
  misc_feature (11)..(11): n is a, c, g, or u
ancccaugaanuuuaggg

SEQ ID NO: 135688 - RNA, 19 nt, Artificial Sequence
  Synthetic
  misc_feature (3)..(3): n is a, c, g, or u
  misc_feature (12)..(12): n is a, c, g, or u
uancccaugaanuuuaggg

SEQ ID NO: 135689 - RNA, 20 nt, Artificial Sequence
  Synthetic
  misc_feature (1)..(1): n is a, c, g, or u
  misc_feature (4)..(4): n is a, c, g, or u
  misc_feature (13)..(13): n is a, c, g, or u
nuancccaugaanuuuaggg

SEQ ID NO: 135690 - RNA, 21 nt, Artificial Sequence
  Synthetic
  misc_feature (1)..(2): n is a, c, g, or u
  misc_feature (5)..(5): n is a, c, g, or u
  misc_feature (14)..(14): n is a, c, g, or u
nnuancccaugaanuuuaggg

SEQ ID NO: 135691 - RNA, 22 nt, Artificial Sequence
  Synthetic
  misc_feature (2)..(3): n is a, c, g, or u
  misc_feature (6)..(6): n is a, c, g, or u
  misc_feature (15)..(15): n is a, c, g, or u
annuancccaugaanuuuaggg

SEQ ID NO: 135692 - RNA, 23 nt, Artificial Sequence
  Synthetic
  misc_feature (3)..(4): n is a, c, g, or u
  misc_feature (7)..(7): n is a, c, g, or u
  misc_feature (16)..(16): n is a, c, g, or u
uannuancccaugaanuuuaggg

SEQ ID NO: 135693 - RNA, 24 nt, Artificial Sequence
  Synthetic
  misc_feature (4)..(5): n is a, c, g, or u
  misc_feature (8)..(8): n is a, c, g, or u
  misc_feature (17)..(17): n is a, c, g, or u
uuannuancccaugaanuuuaggg

SEQ ID NO: 135694 - RNA, 18 nt, Artificial Sequence
  Synthetic
  misc_feature (10)..(10): n is a, c, g, or u
ccguugccgngcaacggg

SEQ ID NO: 135695 - RNA, 19 nt, Artificial Sequence
  Synthetic
  misc_feature (11)..(11): n is a, c, g, or u
gccguugccgngcaacggg

SEQ ID NO: 135696 - RNA, 20 nt, Artificial Sequence
  Synthetic
  misc_feature (12)..(12): n is a, c, g, or u
ggccguugccgngcaacggg

SEQ ID NO: 135697 - RNA, 21 nt, Artificial Sequence
  Synthetic
  misc_feature (13)..(13): n is a, c, g, or u
aggccguugccgngcaacggg

SEQ ID NO: 135698 - RNA, 22 nt, Artificial Sequence
  Synthetic
  misc_feature (14)..(14): n is a, c, g, or u
caggccguugccgngcaacggg

SEQ ID NO: 135699 - RNA, 23 nt, Artificial Sequence
  Synthetic
  misc_feature (15)..(15): n is a, c, g, or u
ccaggccguugccgngcaacggg

SEQ ID NO: 135700 - RNA, 24 nt, Artificial Sequence
  Synthetic
  misc_feature (16)..(16): n is a, c, g, or u
accaggccguugccgngcaacggg

SEQ ID NO: 135701 - RNA, 18 nt, Artificial Sequence
  Synthetic
guccaacugaugaucggg

SEQ ID NO: 135702 - RNA, 19 nt, Artificial Sequence
  Synthetic
gguccaacugaugaucggg

SEQ ID NO: 135703 - RNA, 20 nt, Artificial Sequence
  Synthetic
ggguccaacugaugaucggg

SEQ ID NO: 135704 - RNA, 21 nt, Artificial Sequence
  Synthetic
aggguccaacugaugaucggg

SEQ ID NO: 135705 - RNA, 22 nt, Artificial Sequence
  Synthetic
caggguccaacugaugaucggg

SEQ ID NO: 135706 - RNA, 23 nt, Artificial Sequence
  Synthetic
gcaggguccaacugaugaucggg

SEQ ID NO: 135707 - RNA, 24 nt, Artificial Sequence
  Synthetic
ugcaggguccaacugaugaucggg

SEQ ID NO: 135708 - RNA, 18 nt, Artificial Sequence
  Synthetic
  misc_feature (9)..(9): n is a, c, g, or u
cguugccgngcaacgggg

SEQ ID NO: 135709 - RNA, 19 nt, Artificial Sequence
  Synthetic
  misc_feature (10)..(10): n is a, c, g, or u
ccguugccgngcaacgggg

SEQ ID NO: 135710 - RNA, 20 nt, Artificial Sequence
  Synthetic
  misc_feature (11)..(11): n is a, c, g, or u
gccguugccgngcaacgggg

SEQ ID NO: 135711 - RNA, 21 nt, Artificial Sequence
  Synthetic
  misc_feature (12)..(12): n is a, c, g, or u
ggccguugccgngcaacgggg

SEQ ID NO: 135712 - RNA, 22 nt, Artificial Sequence
  Synthetic
  misc_feature (13)..(13): n is a, c, g, or u
aggccguugccgngcaacgggg

SEQ ID NO: 135713 - RNA, 23 nt, Artificial Sequence
  Synthetic
  misc_feature (14)..(14): n is a, c, g, or u
caggccguugccgngcaacgggg

SEQ ID NO: 135714 - RNA, 24 nt, Artificial Sequence
  Synthetic
  misc_feature (15)..(15): n is a, c, g, or u
ccaggccguugccgngcaacgggg

SEQ ID NO: 135715 - RNA, 18 nt, Artificial Sequence
  Synthetic
cagugguccuugaugggg

SEQ ID NO: 135716 - RNA, 19 nt, Artificial Sequence
  Synthetic
ccagugguccuugaugggg

SEQ ID NO: 135717 - RNA, 20 nt, Artificial Sequence
  Synthetic
gccagugguccuugaugggg

SEQ ID NO: 135718 - RNA, 21 nt, Artificial Sequence
  Synthetic
ggccagugguccuugaugggg

SEQ ID NO: 135719 - RNA, 22 nt, Artificial Sequence
  Synthetic
uggccagugguccuugaugggg

SEQ ID NO: 135720 - RNA, 23 nt, Artificial Sequence
  Synthetic
  misc_feature (1)..(1): n is a, c, g, or u
nuggccagugguccuugaugggg

SEQ ID NO: 135721 - RNA, 24 nt, Artificial Sequence
  Synthetic
  misc_feature (1)..(2): n is a, c, g, or u
nnuggccagugguccuugaugggg

SEQ ID NO: 135722 - RNA, 18 nt, Artificial Sequence
  Synthetic
gaaagccaaacagugggg

SEQ ID NO: 135723 - RNA, 19 nt, Artificial Sequence
  Synthetic
ugaaagccaaacagugggg

SEQ ID NO: 135724 - RNA, 20 nt, Artificial Sequence
  Synthetic
cugaaagccaaacagugggg

SEQ ID NO: 135725 - RNA, 21 nt, Artificial Sequence
  Synthetic
  misc_feature (1)..(1): n is a, c, g, or u
ncugaaagccaaacagugggg

SEQ ID NO: 135726 - RNA, 22 nt, Artificial Sequence
  Synthetic
  misc_feature (2)..(2): n is a, c, g, or u
ancugaaagccaaacagugggg

SEQ ID NO: 135727 - RNA, 23 nt, Artificial Sequence
  Synthetic
  misc_feature (3)..(3): n is a, c, g, or u
uancugaaagccaaacagugggg

SEQ ID NO: 135728 - RNA, 24 nt, Artificial Sequence
  Synthetic
  misc_feature (4)..(4): n is a, c, g, or u
auancugaaagccaaacagugggg

SEQ ID NO: 135729 - RNA, 18 nt, Artificial Sequence
  Synthetic
uagagguggagagauggg

SEQ ID NO: 135730 - RNA, 19 nt, Artificial Sequence
  Synthetic
uuagagguggagagauggg

SEQ ID NO: 135731 - RNA, 20 nt, Artificial Sequence
  Synthetic
cuuagagguggagagauggg

SEQ ID NO: 135732 - RNA, 21 nt, Artificial Sequence
  Synthetic
ucuuagagguggagagauggg

SEQ ID NO: 135733 - RNA, 22 nt, Artificial Sequence
  Synthetic
cucuuagagguggagagauggg

SEQ ID NO: 135734 - RNA, 23 nt, Artificial Sequence
  Synthetic
ucucuuagagguggagagauggg

SEQ ID NO: 135735 - RNA, 24 nt, Artificial Sequence
  Synthetic
gucucuuagagguggagagauggg

SEQ ID NO: 135736 - RNA, 18 nt, Artificial Sequence
  Synthetic
  misc_feature (9)..(9): n is a, c, g, or u
  misc_feature (12)..(12): n is a, c, g, or u
aaagcccangangauggg

SEQ ID NO: 135737 - RNA, 19 nt, Artificial Sequence
  Synthetic
  misc_feature (10)..(10): n is a, c, g, or u
  misc_feature (13)..(13): n is a, c, g, or u
gaaagcccangangauggg

SEQ ID NO: 135738 - RNA, 20 nt, Artificial Sequence
  Synthetic
  misc_feature (11)..(11): n is a, c, g, or u
  misc_feature (14)..(14): n is a, c, g, or u
cgaaagcccangangauggg

SEQ ID NO: 135739 - RNA, 21 nt, Artificial Sequence
  Synthetic
  misc_feature (12)..(12): n is a, c, g, or u
  misc_feature (15)..(15): n is a, c, g, or u
gcgaaagcccangangauggg

SEQ ID NO: 135740 - RNA, 22 nt, Artificial Sequence
  Synthetic
  misc_feature (13)..(13): n is a, c, g, or u
  misc_feature (16)..(16): n is a, c, g, or u
ugcgaaagcccangangauggg

SEQ ID NO: 135741 - RNA, 23 nt, Artificial Sequence
  Synthetic
  misc_feature (14)..(14): n is a, c, g, or u
  misc_feature (17)..(17): n is a, c, g, or u
uugcgaaagcccangangauggg

SEQ ID NO: 135742 - RNA, 24 nt, Artificial Sequence
  Synthetic
  misc_feature (15)..(15): n is a, c, g, or u
  misc_feature (18)..(18): n is a, c, g, or u
uuugcgaaagcccangangauggg

SEQ ID NO: 135743 - RNA, 18 nt, Artificial Sequence
  Synthetic
ccagugguccuugauggg

SEQ ID NO: 135744 - RNA, 19 nt, Artificial Sequence
  Synthetic
gccagugguccuugauggg

SEQ ID NO: 135745 - RNA, 20 nt, Artificial Sequence
  Synthetic
ggccagugguccuugauggg

SEQ ID NO: 135746 - RNA, 21 nt, Artificial Sequence
  Synthetic
uggccagugguccuugauggg

SEQ ID NO: 135747 - RNA, 22 nt, Artificial Sequence
  Synthetic
  misc_feature (1)..(1): n is a, c, g, or u
nuggccagugguccuugauggg

SEQ ID NO: 135748 - RNA, 23 nt, Artificial Sequence
  Synthetic
  misc_feature (1)..(2): n is a, c, g, or u
nnuggccagugguccuugauggg

SEQ ID NO: 135749 - RNA, 24 nt, Artificial Sequence
  Synthetic
  misc_feature (2)..(3): n is a, c, g, or u
unnuggccagugguccuugauggg

SEQ ID NO: 135750 - RNA, 18 nt, Artificial Sequence
  Synthetic
ugaaagccaaacaguggg

SEQ ID NO: 135751 - RNA, 19 nt, Artificial Sequence
  Synthetic
cugaaagccaaacaguggg

SEQ ID NO: 135752 - RNA, 20 nt, Artificial Sequence
  Synthetic
  misc_feature (1)..(1): n is a, c, g, or u
ncugaaagccaaacaguggg

SEQ ID NO: 135753 - RNA, 21 nt, Artificial Sequence
  Synthetic
  misc_feature (2)..(2): n is a, c, g, or u
ancugaaagccaaacaguggg

SEQ ID NO: 135754 - RNA, 22 nt, Artificial Sequence
  Synthetic
  misc_feature (3)..(3): n is a, c, g, or u
uancugaaagccaaacaguggg

SEQ ID NO: 135755 - RNA, 23 nt, Artificial Sequence
  Synthetic
  misc_feature (4)..(4): n is a, c, g, or u
auancugaaagccaaacaguggg

SEQ ID NO: 135756 - RNA, 24 nt, Artificial Sequence
  Synthetic
  misc_feature (5)..(5): n is a, c, g, or u
uauancugaaagccaaacaguggg

SEQ ID NO: 135757 - RNA, 18 nt, Artificial Sequence
  Synthetic
  misc_feature (13)..(13): n is a, c, g, or u
gaaucccagaggnuuggg

SEQ ID NO: 135758 - RNA, 19 nt, Artificial Sequence
  Synthetic
  misc_feature (14)..(14): n is a, c, g, or u
agaaucccagaggnuuggg

SEQ ID NO: 135759 - RNA, 20 nt, Artificial Sequence
  Synthetic
  misc_feature (15)..(15): n is a, c, g, or u
aagaaucccagaggnuuggg

SEQ ID NO: 135760 - RNA, 21 nt, Artificial Sequence
  Synthetic
  misc_feature (16)..(16): n is a, c, g, or u
aaagaaucccagaggnuuggg

SEQ ID NO: 135761 - RNA, 22 nt, Artificial Sequence
  Synthetic
  misc_feature (17)..(17): n is a, c, g, or u
gaaagaaucccagaggnuuggg

SEQ ID NO: 135762 - RNA, 23 nt, Artificial Sequence
  Synthetic
  misc_feature (18)..(18): n is a, c, g, or u
ggaaagaaucccagaggnuuggg

SEQ ID NO: 135763 - RNA, 24 nt, Artificial Sequence
  Synthetic
  misc_feature (19)..(19): n is a, c, g, or u
gggaaagaaucccagaggnuuggg

SEQ ID NO: 135764 - RNA, 18 nt, Artificial Sequence
  Synthetic
  misc_feature (3)..(3): n is a, c, g, or u
  misc_feature (7)..(7): n is a, c, g, or u
  misc_feature (16)..(16): n is a, c, g, or u
aanaccnccguguggngg

SEQ ID NO: 135765 - RNA, 19 nt, Artificial Sequence
  Synthetic
  misc_feature (4)..(4): n is a, c, g, or u
  misc_feature (8)..(8): n is a, c, g, or u
  misc_feature (17)..(17): n is a, c, g, or u
aaanaccnccguguggngg

SEQ ID NO: 135766 - RNA, 20 nt, Artificial Sequence
  Synthetic
  misc_feature (5)..(5): n is a, c, g, or u
  misc_feature (9)..(9): n is a, c, g, or u
  misc_feature (18)..(18): n is a, c, g, or u
aaaanaccnccguguggngg

SEQ ID NO: 135767 - RNA, 21 nt, Artificial Sequence
  Synthetic
  misc_feature (6)..(6): n is a, c, g, or u
  misc_feature (10)..(10): n is a, c, g, or u
  misc_feature (19)..(19): n is a, c, g, or u
caaaanaccnccguguggngg

SEQ ID NO: 135768 - RNA, 22 nt, Artificial Sequence
  Synthetic
  misc_feature (7)..(7): n is a, c, g, or u
  misc_feature (11)..(11): n is a, c, g, or u
  misc_feature (20)..(20): n is a, c, g, or u
ccaaaanaccnccguguggngg

SEQ ID NO: 135769 - RNA, 23 nt, Artificial Sequence
  Synthetic
  misc_feature (8)..(8): n is a, c, g, or u
  misc_feature (12)..(12): n is a, c, g, or u
  misc_feature (21)..(21): n is a, c, g, or u
cccaaaanaccnccguguggngg

SEQ ID NO: 135770 - RNA, 24 nt, Artificial Sequence
  Synthetic
  misc_feature (9)..(9): n is a, c, g, or u
  misc_feature (13)..(13): n is a, c, g, or u
  misc_feature (22)..(22): n is a, c, g, or u
ccccaaaanaccnccguguggngg

SEQ ID NO: 135771 - RNA, 18 nt, Artificial Sequence
  Synthetic
  misc_feature (15)..(16): n is a, c, g, or u
cgccccguggucggnngg

SEQ ID NO: 135772 - RNA, 19 nt, Artificial Sequence
  Synthetic
  misc_feature (16)..(17): n is a, c, g, or u
gcgccccguggucggnngg

SEQ ID NO: 135773 - RNA, 20 nt, Artificial Sequence
  Synthetic
  misc_feature (17)..(18): n is a, c, g, or u
ugcgccccguggucggnngg

SEQ ID NO: 135774 - RNA, 21 nt, Artificial Sequence
  Synthetic
  misc_feature (18)..(19): n is a, c, g, or u
gugcgccccguggucggnngg

SEQ ID NO: 135775 - RNA, 22 nt, Artificial Sequence
  Synthetic
  misc_feature (19)..(20): n is a, c, g, or u
ggugcgccccguggucggnngg

SEQ ID NO: 135776 - RNA, 23 nt, Artificial Sequence
  Synthetic
  misc_feature (20)..(21): n is a, c, g, or u
aggugcgccccguggucggnngg

SEQ ID NO: 135777 - RNA, 24 nt, Artificial Sequence
  Synthetic
  misc_feature (21)..(22): n is a, c, g, or u
gaggugcgccccguggucggnngg

SEQ ID NO: 135778 - RNA, 18 nt, Artificial Sequence
  Synthetic
  misc_feature (16)..(16): n is a, c, g, or u
gugagaggcaauauungg

SEQ ID NO: 135779 - RNA, 19 nt, Artificial Sequence
  Synthetic
  misc_feature (17)..(17): n is a, c, g, or u
ugugagaggcaauauungg

SEQ ID NO: 135780 - RNA, 20 nt, Artificial Sequence
  Synthetic
  misc_feature (18)..(18): n is a, c, g, or u
augugagaggcaauauungg

SEQ ID NO: 135781 - RNA, 21 nt, Artificial Sequence
  Synthetic
  misc_feature (19)..(19): n is a, c, g, or u
gaugugagaggcaauauungg

SEQ ID NO: 135782 - RNA, 22 nt, Artificial Sequence
  Synthetic
  misc_feature (20)..(20): n is a, c, g, or u
agaugugagaggcaauauungg

SEQ ID NO: 135783 - RNA, 23 nt, Artificial Sequence
  Synthetic
  misc_feature (21)..(21): n is a, c, g, or u
gagaugugagaggcaauauungg

SEQ ID NO: 135784 - RNA, 24 nt, Artificial Sequence
  Synthetic
  misc_feature (22)..(22): n is a, c, g, or u
cgagaugugagaggcaauauungg

SEQ ID NO: 135785 - RNA, 18 nt, Artificial Sequence
  Synthetic
  misc_feature (10)..(10): n is a, c, g, or u
  misc_feature (13)..(13): n is a, c, g, or u
gaaagcccangangaugg

SEQ ID NO: 135786 - RNA, 19 nt, Artificial Sequence
  Synthetic
  misc_feature (11)..(11): n is a, c, g, or u
  misc_feature (14)..(14): n is a, c, g, or u
cgaaagcccangangaugg

SEQ ID NO: 135787 - RNA, 20 nt, Artificial Sequence
  Synthetic
  misc_feature (12)..(12): n is a, c, g, or u
  misc_feature (15)..(15): n is a, c, g, or u
gcgaaagcccangangaugg

SEQ ID NO: 135788 - RNA, 21 nt, Artificial Sequence
  Synthetic
  misc_feature (13)..(13): n is a, c, g, or u
  misc_feature (16)..(16): n is a, c, g, or u
ugcgaaagcccangangaugg

SEQ ID NO: 135789 - RNA, 22 nt, Artificial Sequence
  Synthetic
  misc_feature (14)..(14): n is a, c, g, or u
  misc_feature (17)..(17): n is a, c, g, or u
uugcgaaagcccangangaugg

SEQ ID NO: 135790 - RNA, 23 nt, Artificial Sequence
  Synthetic
  misc_feature (15)..(15): n is a, c, g, or u
  misc_feature (18)..(18): n is a, c, g, or u
uuugcgaaagcccangangaugg

SEQ ID NO: 135791 - RNA, 24 nt, Artificial Sequence
  Synthetic
  misc_feature (16)..(16): n is a, c, g, or u
  misc_feature (19)..(19): n is a, c, g, or u
uuuugcgaaagcccangangaugg

SEQ ID NO: 135792 - RNA, 18 nt, Artificial Sequence
  Synthetic
aggaguuccgcaguaugg

SEQ ID NO: 135793 - RNA, 19 nt, Artificial Sequence
  Synthetic
uaggaguuccgcaguaugg

SEQ ID NO: 135794 - RNA, 20 nt, Artificial Sequence
  Synthetic
cuaggaguuccgcaguaugg

SEQ ID NO: 135795 - RNA, 18 nt, Artificial Sequence
  Synthetic
  misc_feature (4)..(4): n is a, c, g, or u
  misc_feature (7)..(7): n is a, c, g, or u
  misc_feature (12)..(12): n is a, c, g, or u
uggnggngugancccugg

SEQ ID NO: 135796 - RNA, 19 nt, Artificial Sequence
  Synthetic
  misc_feature (5)..(5): n is a, c, g, or u
  misc_feature (8)..(8): n is a, c, g, or u
  misc_feature (13)..(13): n is a, c, g, or u
guggnggngugancccugg

SEQ ID NO: 135797 - RNA, 20 nt, Artificial Sequence
  Synthetic
  misc_feature (6)..(6): n is a, c, g, or u
  misc_feature (9)..(9): n is a, c, g, or u
  misc_feature (14)..(14): n is a, c, g, or u
uguggnggngugancccugg

SEQ ID NO: 135798 - RNA, 21 nt, Artificial Sequence
  Synthetic
  misc_feature (7)..(7): n is a, c, g, or u
  misc_feature (10)..(10): n is a, c, g, or u
  misc_feature (15)..(15): n is a, c, g, or u
guguggnggngugancccugg

SEQ ID NO: 135799 - RNA, 22 nt, Artificial Sequence
  Synthetic
  misc_feature (8)..(8): n is a, c, g, or u
  misc_feature (11)..(11): n is a, c, g, or u
  misc_feature (16)..(16): n is a, c, g, or u
cguguggnggngugancccugg

SEQ ID NO: 135800 - RNA, 23 nt, Artificial Sequence
  Synthetic
  misc_feature (9)..(9): n is a, c, g, or u
  misc_feature (12)..(12): n is a, c, g, or u
  misc_feature (17)..(17): n is a, c, g, or u
ccguguggnggngugancccugg

SEQ ID NO: 135801 - RNA, 24 nt, Artificial Sequence
  Synthetic
  misc_feature (1)..(1): n is a, c, g, or u
  misc_feature (10)..(10): n is a, c, g, or u
  misc_feature (13)..(13): n is a, c, g, or u
  misc_feature (18)..(18): n is a, c, g, or u
nccguguggnggngugancccugg

SEQ ID NO: 135802 - RNA, 18 nt, Artificial Sequence
  Synthetic
cugaaagccaaacagugg

SEQ ID NO: 135803 - RNA, 19 nt, Artificial Sequence
  Synthetic
  misc_feature (1)..(1): n is a, c, g, or u
ncugaaagccaaacagugg

SEQ ID NO: 135804 - RNA, 20 nt, Artificial Sequence
  Synthetic
  misc_feature (2)..(2): n is a, c, g, or u
ancugaaagccaaacagugg

SEQ ID NO: 135805 - RNA, 21 nt, Artificial Sequence
  Synthetic
  misc_feature (3)..(3): n is a, c, g, or u
uancugaaagccaaacagugg

SEQ ID NO: 135806 - RNA, 22 nt, Artificial Sequence
  Synthetic
  misc_feature (4)..(4): n is a, c, g, or u
auancugaaagccaaacagugg

SEQ ID NO: 135807 - RNA, 23 nt, Artificial Sequence
  Synthetic
  misc_feature (5)..(5): n is a, c, g, or u
uauancugaaagccaaacagugg

SEQ ID NO: 135808 - RNA, 24 nt, Artificial Sequence
  Synthetic
  misc_feature (6)..(6): n is a, c, g, or u
auauancugaaagccaaacagugg

SEQ ID NO: 135809 - RNA, 18 nt, Artificial Sequence
  Synthetic
uuccugacugccgauugg

SEQ ID NO: 135810 - RNA, 19 nt, Artificial Sequence
  Synthetic
cuuccugacugccgauugg

SEQ ID NO: 135811 - RNA, 20 nt, Artificial Sequence
  Synthetic
ccuuccugacugccgauugg

SEQ ID NO: 135812 - RNA, 21 nt, Artificial Sequence
  Synthetic
gccuuccugacugccgauugg

SEQ ID NO: 135813 - RNA, 22 nt, Artificial Sequence
  Synthetic
ugccuuccugacugccgauugg

SEQ ID NO: 135814 - RNA, 23 nt, Artificial Sequence
  Synthetic
cugccuuccugacugccgauugg

SEQ ID NO: 135815 - RNA, 24 nt, Artificial Sequence
  Synthetic
gcugccuuccugacugccgauugg

SEQ ID NO: 135816 - RNA, 18 nt, Artificial Sequence
  Synthetic
gcgucagcaaacacuugg

SEQ ID NO: 135817 - RNA, 19 nt, Artificial Sequence
  Synthetic
ugcgucagcaaacacuugg

SEQ ID NO: 135818 - RNA, 20 nt, Artificial Sequence
  Synthetic
uugcgucagcaaacacuugg

SEQ ID NO: 135819 - RNA, 21 nt, Artificial Sequence
  Synthetic
guugcgucagcaaacacuugg

SEQ ID NO: 135820 - RNA, 22 nt, Artificial Sequence
  Synthetic
gguugcgucagcaaacacuugg

SEQ ID NO: 135821 - RNA, 23 nt, Artificial Sequence
  Synthetic
ggguugcgucagcaaacacuugg

SEQ ID NO: 135822 - RNA, 24 nt, Artificial Sequence
  Synthetic
gggguugcgucagcaaacacuugg

SEQ ID NO: 135823 - RNA, 18 nt, Artificial Sequence
  Synthetic
ucuuauguaagaccuugg

SEQ ID NO: 135824 - RNA, 19 nt, Artificial Sequence
  Synthetic
cucuuauguaagaccuugg

SEQ ID NO: 135825 - RNA, 20 nt, Artificial Sequence
  Synthetic
ccucuuauguaagaccuugg

SEQ ID NO: 135826 - RNA, 21 nt, Artificial Sequence
  Synthetic
uccucuuauguaagaccuugg

SEQ ID NO: 135827 - RNA, 22 nt, Artificial Sequence
  Synthetic
guccucuuauguaagaccuugg

SEQ ID NO: 135828 - RNA, 23 nt, Artificial Sequence
  Synthetic
aguccucuuauguaagaccuugg

SEQ ID NO: 135829 - RNA, 24 nt, Artificial Sequence
  Synthetic
gaguccucuuauguaagaccuugg

SEQ ID NO: 135830 - RNA, 18 nt, Artificial Sequence
  Synthetic
  misc_feature (6)..(6): n is a, c, g, or u
ggaucnugcagagcuugg

SEQ ID NO: 135831 - RNA, 19 nt, Artificial Sequence
  Synthetic
  misc_feature (7)..(7): n is a, c, g, or u
gggaucnugcagagcuugg

SEQ ID NO: 135832 - RNA, 20 nt, Artificial Sequence
  Synthetic
  misc_feature (8)..(8): n is a, c, g, or u
ugggaucnugcagagcuugg

SEQ ID NO: 135833 - RNA, 21 nt, Artificial Sequence
  Synthetic
  misc_feature (9)..(9): n is a, c, g, or u
cugggaucnugcagagcuugg

SEQ ID NO: 135834 - RNA, 22 nt, Artificial Sequence
  Synthetic
  misc_feature (10)..(10): n is a, c, g, or u
ucugggaucnugcagagcuugg

SEQ ID NO: 135835 - RNA, 23 nt, Artificial Sequence
  Synthetic
  misc_feature (11)..(11): n is a, c, g, or u
cucugggaucnugcagagcuugg

SEQ ID NO: 135836 - RNA, 24 nt, Artificial Sequence
  Synthetic
  misc_feature (12)..(12): n is a, c, g, or u
acucugggaucnugcagagcuugg

SEQ ID NO: 135837 - RNA, 18 nt, Artificial Sequence
  Synthetic
aaaggccuuguaaguugg

SEQ ID NO: 135838 - RNA, 19 nt, Artificial Sequence
  Synthetic
gaaaggccuuguaaguugg

SEQ ID NO: 135839 - RNA, 20 nt, Artificial Sequence
  Synthetic
agaaaggccuuguaaguugg

SEQ ID NO: 135840 - RNA, 21 nt, Artificial Sequence
  Synthetic
uagaaaggccuuguaaguugg

SEQ ID NO: 135841 - RNA, 22 nt, Artificial Sequence
  Synthetic
uuagaaaggccuuguaaguugg

SEQ ID NO: 135842 - RNA, 23 nt, Artificial Sequence
  Synthetic
cuuagaaaggccuuguaaguugg

SEQ ID NO: 135843 - RNA, 24 nt, Artificial Sequence
  Synthetic
acuuagaaaggccuuguaaguugg

SEQ ID NO: 135844 - RNA, 18 nt, Artificial Sequence
  Synthetic
ggggacugcgaauuuugg

SEQ ID NO: 135845 - RNA, 19 nt, Artificial Sequence
  Synthetic
uggggacugcgaauuuugg

SEQ ID NO: 135846 - RNA, 20 nt, Artificial Sequence
  Synthetic
uuggggacugcgaauuuugg

SEQ ID NO: 135847 - RNA, 21 nt, Artificial Sequence
  Synthetic
guuggggacugcgaauuuugg

SEQ ID NO: 135848 - RNA, 22 nt, Artificial Sequence
  Synthetic
gguuggggacugcgaauuuugg

SEQ ID NO: 135849 - RNA, 23 nt, Artificial Sequence
  Synthetic
agguuggggacugcgaauuuugg

SEQ ID NO: 135850 - RNA, 24 nt, Artificial Sequence
  Synthetic
gagguuggggacugcgaauuuugg

SEQ ID NO: 135851 - RNA, 18 nt, Artificial Sequence
  Synthetic
  misc_feature (8)..(8): n is a, c, g, or u
  misc_feature (17)..(17): n is a, c, g, or u
aaugaaunuuaggaaang

SEQ ID NO: 135852 - RNA, 19 nt, Artificial Sequence
  Synthetic
  misc_feature (9)..(9): n is a, c, g, or u
  misc_feature (18)..(18): n is a, c, g, or u
aaaugaaunuuaggaaang

SEQ ID NO: 135853 - RNA, 20 nt, Artificial Sequence
  Synthetic
  misc_feature (10)..(10): n is a, c, g, or u
  misc_feature (19)..(19): n is a, c, g, or u
uaaaugaaunuuaggaaang

SEQ ID NO: 135854 - RNA, 21 nt, Artificial Sequence
  Synthetic
  misc_feature (11)..(11): n is a, c, g, or u
  misc_feature (20)..(20): n is a, c, g, or u
guaaaugaaunuuaggaaang

SEQ ID NO: 135855 - RNA, 22 nt, Artificial Sequence
  Synthetic
  misc_feature (12)..(12): n is a, c, g, or u
  misc_feature (21)..(21): n is a, c, g, or u
uguaaaugaaunuuaggaaang

SEQ ID NO: 135856 - RNA, 23 nt, Artificial Sequence
  Synthetic
  misc_feature (1)..(1): n is a, c, g, or u
  misc_feature (13)..(13): n is a, c, g, or u
  misc_feature (22)..(22): n is a, c, g, or u
nuguaaaugaaunuuaggaaang

SEQ ID NO: 135857 - RNA, 24 nt, Artificial Sequence
  Synthetic
  misc_feature (2)..(2): n is a, c, g, or u
  misc_feature (14)..(14): n is a, c, g, or u
  misc_feature (23)..(23): n is a, c, g, or u
cnuguaaaugaaunuuaggaaang

SEQ ID NO: 135858 - RNA, 18 nt, Artificial Sequence
  Synthetic
  misc_feature (17)..(17): n is a, c, g, or u
cuaguaaacugagccang

SEQ ID NO: 135859 - RNA, 19 nt, Artificial Sequence
  Synthetic
  misc_feature (18)..(18): n is a, c, g, or u
acuaguaaacugagccang

SEQ ID NO: 135860 - RNA, 20 nt, Artificial Sequence
  Synthetic
  misc_feature (19)..(19): n is a, c, g, or u
cacuaguaaacugagccang

SEQ ID NO: 135861 - RNA, 21 nt, Artificial Sequence
  Synthetic
  misc_feature (20)..(20): n is a, c, g, or u
gcacuaguaaacugagccang

SEQ ID NO: 135862 - RNA, 22 nt, Artificial Sequence
  Synthetic
  misc_feature (21)..(21): n is a, c, g, or u
ggcacuaguaaacugagccang

SEQ ID NO: 135863 - RNA, 23 nt, Artificial Sequence
  Synthetic
  misc_feature (22)..(22): n is a, c, g, or u
uggcacuaguaaacugagccang

SEQ ID NO: 135864 - RNA, 24 nt, Artificial Sequence
  Synthetic
  misc_feature (23)..(23): n is a, c, g, or u
auggcacuaguaaacugagccang

SEQ ID NO: 135865 - RNA, 18 nt, Artificial Sequence
  Synthetic
  misc_feature (8)..(8): n is a, c, g, or u
  misc_feature (11)..(11): n is a, c, g, or u
  misc_feature (17)..(17): n is a, c, g, or u
agauaggnacnguagang

SEQ ID NO: 135866 - RNA, 19 nt, Artificial Sequence
  Synthetic
  misc_feature (9)..(9): n is a, c, g, or u
  misc_feature (12)..(12): n is a, c, g, or u
  misc_feature (18)..(18): n is a, c, g, or u
aagauaggnacnguagang

SEQ ID NO: 135867 - RNA, 20 nt, Artificial Sequence
  Synthetic
  misc_feature (10)..(10): n is a, c, g, or u
  misc_feature (13)..(13): n is a, c, g, or u
  misc_feature (19)..(19): n is a, c, g, or u
aaagauaggnacnguagang

SEQ ID NO: 135868 - RNA, 21 nt, Artificial Sequence
  Synthetic
  misc_feature (11)..(11): n is a, c, g, or u
  misc_feature (14)..(14): n is a, c, g, or u
  misc_feature (20)..(20): n is a, c, g, or u
uaaagauaggnacnguagang

SEQ ID NO: 135869 - RNA, 22 nt, Artificial Sequence
  Synthetic
  misc_feature (12)..(12): n is a, c, g, or u
  misc_feature (15)..(15): n is a, c, g, or u
  misc_feature (21)..(21): n is a, c, g, or u
uuaaagauaggnacnguagang

SEQ ID NO: 135870 - RNA, 23 nt, Artificial Sequence
  Synthetic
  misc_feature (13)..(13): n is a, c, g, or u
  misc_feature (16)..(16): n is a, c, g, or u
  misc_feature (22)..(22): n is a, c, g, or u
auuaaagauaggnacnguagang

SEQ ID NO: 135871 - RNA, 24 nt, Artificial Sequence
  Synthetic
  misc_feature (14)..(14): n is a, c, g, or u
  misc_feature (17)..(17): n is a, c, g, or u
  misc_feature (23)..(23): n is a, c, g, or u
gauuaaagauaggnacnguagang

SEQ ID NO: 135872 - RNA, 18 nt, Artificial Sequence
  Synthetic
  misc_feature (14)..(14): n is a, c, g, or u
  misc_feature (17)..(17): n is a, c, g, or u
uugcgaaagcccangang

SEQ ID NO: 135873 - RNA, 19 nt, Artificial Sequence
  Synthetic
  misc_feature (15)..(15): n is a, c, g, or u
  misc_feature (18)..(18): n is a, c, g, or u
uuugcgaaagcccangang

SEQ ID NO: 135874 - RNA, 20 nt, Artificial Sequence
  Synthetic
  misc_feature (16)..(16): n is a, c, g, or u
  misc_feature (19)..(19): n is a, c, g, or u
uuuugcgaaagcccangang

SEQ ID NO: 135875 - RNA, 21 nt, Artificial Sequence
  Synthetic
  misc_feature (17)..(17): n is a, c, g, or u
  misc_feature (20)..(20): n is a, c, g, or u
auuuugcgaaagcccangang

SEQ ID NO: 135876 - RNA, 22 nt, Artificial Sequence
  Synthetic
  misc_feature (18)..(18): n is a, c, g, or u
  misc_feature (21)..(21): n is a, c, g, or u
uauuuugcgaaagcccangang

SEQ ID NO: 135877 - RNA, 23 nt, Artificial Sequence
  Synthetic
  misc_feature (19)..(19): n is a, c, g, or u
  misc_feature (22)..(22): n is a, c, g, or u
guauuuugcgaaagcccangang

SEQ ID NO: 135878 - RNA, 24 nt, Artificial Sequence
  Synthetic
  misc_feature (20)..(20): n is a, c, g, or u
  misc_feature (23)..(23): n is a, c, g, or u
gguauuuugcgaaagcccangang

SEQ ID NO: 135879 - RNA, 18 nt, Artificial Sequence
  Synthetic
  misc_feature (17)..(17): n is a, c, g, or u
auuguguaaauggagcng

SEQ ID NO: 135880 - RNA, 19 nt, Artificial Sequence
  Synthetic
  misc_feature (18)..(18): n is a, c, g, or u
cauuguguaaauggagcng

SEQ ID NO: 135881 - RNA, 20 nt, Artificial Sequence
  Synthetic
  misc_feature (19)..(19): n is a, c, g, or u
acauuguguaaauggagcng

SEQ ID NO: 135882 - RNA, 21 nt, Artificial Sequence
  Synthetic
  misc_feature (20)..(20): n is a, c, g, or u
cacauuguguaaauggagcng

SEQ ID NO: 135883 - RNA, 22 nt, Artificial Sequence
  Synthetic
  misc_feature (21)..(21): n is a, c, g, or u
ccacauuguguaaauggagcng

SEQ ID NO: 135884 - RNA, 23 nt, Artificial Sequence
  Synthetic
  misc_feature (1)..(1): n is a, c, g, or u
  misc_feature (22)..(22): n is a, c, g, or u
nccacauuguguaaauggagcng

SEQ ID NO: 135885 - RNA, 24 nt, Artificial Sequence
  Synthetic
  misc_feature (2)..(2): n is a, c, g, or u
  misc_feature (23)..(23): n is a, c, g, or u
anccacauuguguaaauggagcng

SEQ ID NO: 135886 - RNA, 18 nt, Artificial Sequence
  Synthetic
  misc_feature (14)..(14): n is a, c, g, or u
  misc_feature (17)..(17): n is a, c, g, or u
gagcuugguggaangcng

SEQ ID NO: 135887 - RNA, 19 nt, Artificial Sequence
  Synthetic
  misc_feature (15)..(15): n is a, c, g, or u
  misc_feature (18)..(18): n is a, c, g, or u
agagcuugguggaangcng

SEQ ID NO: 135888 - RNA, 20 nt, Artificial Sequence
  Synthetic
  misc_feature (16)..(16): n is a, c, g, or u
  misc_feature (19)..(19): n is a, c, g, or u
cagagcuugguggaangcng

SEQ ID NO: 135889 - RNA, 21 nt, Artificial Sequence
  Synthetic
  misc_feature (17)..(17): n is a, c, g, or u
  misc_feature (20)..(20): n is a, c, g, or u
gcagagcuugguggaangcng

SEQ ID NO: 135890 - RNA, 22 nt, Artificial Sequence
  Synthetic
  misc_feature (18)..(18): n is a, c, g, or u
  misc_feature (21)..(21): n is a, c, g, or u
ugcagagcuugguggaangcng

SEQ ID NO: 135891 - RNA, 23 nt, Artificial Sequence
  Synthetic
  misc_feature (1)..(1): n is a, c, g, or u
  misc_feature (19)..(19): n is a, c, g, or u
  misc_feature (22)..(22): n is a, c, g, or u
nugcagagcuugguggaangcng

SEQ ID NO: 135892 - RNA, 24 nt, Artificial Sequence
  Synthetic
  misc_feature (2)..(2): n is a, c, g, or u
  misc_feature (20)..(20): n is a, c, g, or u
  misc_feature (23)..(23): n is a, c, g, or u
cnugcagagcuugguggaangcng

SEQ ID NO: 135893 - RNA, 18 nt, Artificial Sequence
  Synthetic
  misc_feature (3)..(3): n is a, c, g, or u
  misc_feature (6)..(6): n is a, c, g, or u
  misc_feature (9)..(9): n is a, c, g, or u
  misc_feature (15)..(15): n is a, c, g, or u
  misc_feature (17)..(17): n is a, c, g, or u
gunucnagnagaucncng

SEQ ID NO: 135894 - RNA, 19 nt, Artificial Sequence
  Synthetic
  misc_feature (1)..(1): n is a, c, g, or u
  misc_feature (4)..(4): n is a, c, g, or u
  misc_feature (7)..(7): n is a, c, g, or u
  misc_feature (10)..(10): n is a, c, g, or u
  misc_feature (16)..(16): n is a, c, g, or u
  misc_feature (18)..(18): n is a, c, g, or u
ngunucnagnagaucncng

SEQ ID NO: 135895 - RNA, 20 nt, Artificial Sequence
  Synthetic
  misc_feature (2)..(2): n is a, c, g, or u
  misc_feature (5)..(5): n is a, c, g, or u
  misc_feature (8)..(8): n is a, c, g, or u
  misc_feature (11)..(11): n is a, c, g, or u
  misc_feature (17)..(17): n is a, c, g, or u
  misc_feature (19)..(19): n is a, c, g, or u
cngunucnagnagaucncng

SEQ ID NO: 135896 - RNA, 21 nt, Artificial Sequence
  Synthetic
  misc_feature (3)..(3): n is a, c, g, or u
  misc_feature (6)..(6): n is a, c, g, or u
  misc_feature (9)..(9): n is a, c, g, or u
  misc_feature (12)..(12): n is a, c, g, or u
  misc_feature (18)..(18): n is a, c, g, or u
  misc_feature (20)..(20): n is a, c, g, or u
gcngunucnagnagaucncng

SEQ ID NO: 135897 - RNA, 22 nt, Artificial Sequence
  Synthetic
  misc_feature (4)..(4): n is a, c, g, or u
  misc_feature (7)..(7): n is a, c, g, or u
  misc_feature (10)..(10): n is a, c, g, or u
  misc_feature (13)..(13): n is a, c, g, or u
  misc_feature (19)..(19): n is a, c, g, or u
  misc_feature (21)..(21): n is a, c, g, or u
ggcngunucnagnagaucncng

SEQ ID NO: 135898 - RNA, 23 nt, Artificial Sequence
  Synthetic
  misc_feature (5)..(5): n is a, c, g, or u
  misc_feature (8)..(8): n is a, c, g, or u
  misc_feature (11)..(11): n is a, c, g, or u
  misc_feature (14)..(14): n is a, c, g, or u
  misc_feature (20)..(20): n is a, c, g, or u
  misc_feature (22)..(22): n is a, c, g, or u
aggcngunucnagnagaucncng

SEQ ID NO: 135899 - RNA, 24 nt, Artificial Sequence
  Synthetic
  misc_feature (6)..(6): n is a, c, g, or u
  misc_feature (9)..(9): n is a, c, g, or u
  misc_feature (12)..(12): n is a, c, g, or u
  misc_feature (15)..(15): n is a, c, g, or u
  misc_feature (21)..(21): n is a, c, g, or u
  misc_feature (23)..(23): n is a, c, g, or u
gaggcngunucnagnagaucncng

SEQ ID NO: 135900 - RNA, 18 nt, Artificial Sequence
  Synthetic
  misc_feature (2)..(2): n is a, c, g, or u
  misc_feature (17)..(17): n is a, c, g, or u
angauguauauuuccgng

SEQ ID NO: 135901 - RNA, 19 nt, Artificial Sequence
  Synthetic
  misc_feature (3)..(3): n is a, c, g, or u
  misc_feature (18)..(18): n is a, c, g, or u
aangauguauauuuccgng

SEQ ID NO: 135902 - RNA, 20 nt, Artificial Sequence
  Synthetic
  misc_feature (4)..(4): n is a, c, g, or u
  misc_feature (19)..(19): n is a, c, g, or u
aaangauguauauuuccgng

SEQ ID NO: 135903 - RNA, 21 nt, Artificial Sequence
  Synthetic
  misc_feature (5)..(5): n is a, c, g, or u
  misc_feature (20)..(20): n is a, c, g, or u
gaaangauguauauuuccgng

SEQ ID NO: 135904 - RNA, 22 nt, Artificial Sequence
  Synthetic
  misc_feature (6)..(6): n is a, c, g, or u
  misc_feature (21)..(21): n is a, c, g, or u
ggaaangauguauauuuccgng

SEQ ID NO: 135905 - RNA, 23 nt, Artificial Sequence
  Synthetic
  misc_feature (7)..(7): n is a, c, g, or u
  misc_feature (22)..(22): n is a, c, g, or u
uggaaangauguauauuuccgng

SEQ ID NO: 135906 - RNA, 24 nt, Artificial Sequence
  Synthetic
  misc_feature (8)..(8): n is a, c, g, or u
  misc_feature (23)..(23): n is a, c, g, or u
auggaaangauguauauuuccgng

SEQ ID NO: 135907 - RNA, 18 nt, Artificial Sequence
  Synthetic
  misc_feature (3)..(3): n is a, c, g, or u
  misc_feature (16)..(17): n is a, c, g, or u
ggnaaauauuuagugnng

SEQ ID NO: 135908 - RNA, 19 nt, Artificial Sequence
  Synthetic
  misc_feature (1)..(1): n is a, c, g, or u
  misc_feature (4)..(4): n is a, c, g, or u
  misc_feature (17)..(18): n is a, c, g, or u
nggnaaauauuuagugnng

SEQ ID NO: 135909 - RNA, 20 nt, Artificial Sequence
  Synthetic
  misc_feature (1)..(2): n is a, c, g, or u
  misc_feature (5)..(5): n is a, c, g, or u
  misc_feature (18)..(19): n is a, c, g, or u
nnggnaaauauuuagugnng

SEQ ID NO: 135910 - RNA, 21 nt, Artificial Sequence
  Synthetic
  misc_feature (2)..(3): n is a, c, g, or u
  misc_feature (6)..(6): n is a, c, g, or u
  misc_feature (19)..(20): n is a, c, g, or u
annggnaaauauuuagugnng

SEQ ID NO: 135911 - RNA, 22 nt, Artificial Sequence
  Synthetic
  misc_feature (3)..(4): n is a, c, g, or u
  misc_feature (7)..(7): n is a, c, g, or u
  misc_feature (20)..(21): n is a, c, g, or u
uannggnaaauauuuagugnng

SEQ ID NO: 135912 - RNA, 23 nt, Artificial Sequence
  Synthetic
  misc_feature (4)..(5): n is a, c, g, or u
  misc_feature (8)..(8): n is a, c, g, or u
  misc_feature (21)..(22): n is a, c, g, or u
cuannggnaaauauuuagugnng

SEQ ID NO: 135913 - RNA, 24 nt, Artificial Sequence
  Synthetic
  misc_feature (5)..(6): n is a, c, g, or u
  misc_feature (9)..(9): n is a, c, g, or u
  misc_feature (22)..(23): n is a, c, g, or u
ucuannggnaaauauuuagugnng

SEQ ID NO: 135914 - RNA, 18 nt, Artificial Sequence
  Synthetic
  misc_feature (14)..(14): n is a, c, g, or u
  misc_feature (17)..(17): n is a, c, g, or u
ugcgcugauggccnaung

SEQ ID NO: 135915 - RNA, 19 nt, Artificial Sequence
  Synthetic
  misc_feature (15)..(15): n is a, c, g, or u
  misc_feature (18)..(18): n is a, c, g, or u
augcgcugauggccnaung

SEQ ID NO: 135916 - RNA, 20 nt, Artificial Sequence
  Synthetic
  misc_feature (16)..(16): n is a, c, g, or u
  misc_feature (19)..(19): n is a, c, g, or u
caugcgcugauggccnaung

SEQ ID NO: 135917 - RNA, 21 nt, Artificial Sequence
  Synthetic
  misc_feature (17)..(17): n is a, c, g, or u
  misc_feature (20)..(20): n is a, c, g, or u
gcaugcgcugauggccnaung

SEQ ID NO: 135918 - RNA, 22 nt, Artificial Sequence
  Synthetic
  misc_feature (18)..(18): n is a, c, g, or u
  misc_feature (21)..(21): n is a, c, g, or u
cgcaugcgcugauggccnaung

SEQ ID NO: 135919 - RNA, 23 nt, Artificial Sequence
  Synthetic
  misc_feature (19)..(19): n is a, c, g, or u
  misc_feature (22)..(22): n is a, c, g, or u
acgcaugcgcugauggccnaung

SEQ ID NO: 135920 - RNA, 24 nt, Artificial Sequence
  Synthetic
  misc_feature (20)..(20): n is a, c, g, or u
  misc_feature (23)..(23): n is a, c, g, or u
cacgcaugcgcugauggccnaung

SEQ ID NO: 135921 - RNA, 18 nt, Artificial Sequence
  Synthetic
auggugaggugagcaaug

SEQ ID NO: 135922 - RNA, 19 nt, Artificial Sequence
  Synthetic
uauggugaggugagcaaug

SEQ ID NO: 135923 - RNA, 20 nt, Artificial Sequence
  Synthetic
guauggugaggugagcaaug

SEQ ID NO: 135924 - RNA, 21 nt, Artificial Sequence
  Synthetic
  misc_feature (1)..(1): n is a, c, g, or u
nguauggugaggugagcaaug

SEQ ID NO: 135925 - RNA, 22 nt, Artificial Sequence
  Synthetic
  misc_feature (2)..(2): n is a, c, g, or u
cnguauggugaggugagcaaug

SEQ ID NO: 135926 - RNA, 23 nt, Artificial Sequence
  Synthetic
  misc_feature (3)..(3): n is a, c, g, or u
gcnguauggugaggugagcaaug

SEQ ID NO: 135927 - RNA, 24 nt, Artificial Sequence
  Synthetic
  misc_feature (4)..(4): n is a, c, g, or u
ugcnguauggugaggugagcaaug

SEQ ID NO: 135928 - RNA, 18 nt, Artificial Sequence
  Synthetic
  misc_feature (3)..(3): n is a, c, g, or u
  misc_feature (7)..(7): n is a, c, g, or u
  misc_feature (10)..(10): n is a, c, g, or u
ucnggunugnaaguaaug

SEQ ID NO: 135929 - RNA, 19 nt, Artificial Sequence
  Synthetic
  misc_feature (4)..(4): n is a, c, g, or u
  misc_feature (8)..(8): n is a, c, g, or u
  misc_feature (11)..(11): n is a, c, g, or u
gucnggunugnaaguaaug

SEQ ID NO: 135930 - RNA, 20 nt, Artificial Sequence
  Synthetic
  misc_feature (5)..(5): n is a, c, g, or u
  misc_feature (9)..(9): n is a, c, g, or u
  misc_feature (12)..(12): n is a, c, g, or u
ugucnggunugnaaguaaug

SEQ ID NO: 135931 - RNA, 21 nt, Artificial Sequence
  Synthetic
  misc_feature (6)..(6): n is a, c, g, or u
  misc_feature (10)..(10): n is a, c, g, or u
  misc_feature (13)..(13): n is a, c, g, or u
augucnggunugnaaguaaug

SEQ ID NO: 135932 - RNA, 22 nt, Artificial Sequence
  Synthetic
  misc_feature (7)..(7): n is a, c, g, or u
  misc_feature (11)..(11): n is a, c, g, or u
  misc_feature (14)..(14): n is a, c, g, or u
aaugucnggunugnaaguaaug

SEQ ID NO: 135933 - RNA, 23 nt, Artificial Sequence
  Synthetic
  misc_feature (8)..(8): n is a, c, g, or u
  misc_feature (12)..(12): n is a, c, g, or u
  misc_feature (15)..(15): n is a, c, g, or u
uaaugucnggunugnaaguaaug

SEQ ID NO: 135934 - RNA, 24 nt, Artificial Sequence
  Synthetic
  misc_feature (9)..(9): n is a, c, g, or u
  misc_feature (13)..(13): n is a, c, g, or u
  misc_feature (16)..(16): n is a, c, g, or u
auaaugucnggunugnaaguaaug

SEQ ID NO: 135935 - RNA, 18 nt, Artificial Sequence
  Synthetic
guuuuguacagcaacaug

SEQ ID NO: 135936 - RNA, 19 nt, Artificial Sequence
  Synthetic
gguuuuguacagcaacaug

SEQ ID NO: 135937 - RNA, 20 nt, Artificial Sequence
  Synthetic
agguuuuguacagcaacaug

SEQ ID NO: 135938 - RNA, 18 nt, Artificial Sequence
  Synthetic
  misc_feature (7)..(7): n is a, c, g, or u
cuugaanagugggacaug

SEQ ID NO: 135939 - RNA, 19 nt, Artificial Sequence
  Synthetic
  misc_feature (8)..(8): n is a, c, g, or u
gcuugaanagugggacaug

SEQ ID NO: 135940 - RNA, 20 nt, Artificial Sequence
  Synthetic
  misc_feature (9)..(9): n is a, c, g, or u
ggcuugaanagugggacaug

SEQ ID NO: 135941 - RNA, 21 nt, Artificial Sequence
  Synthetic
  misc_feature (10)..(10): n is a, c, g, or u
aggcuugaanagugggacaug

SEQ ID NO: 135942 - RNA, 22 nt, Artificial Sequence
  Synthetic
  misc_feature (11)..(11): n is a, c, g, or u
gaggcuugaanagugggacaug

SEQ ID NO: 135943 - RNA, 23 nt, Artificial Sequence
  Synthetic
  misc_feature (12)..(12): n is a, c, g, or u
ggaggcuugaanagugggacaug

SEQ ID NO: 135944 - RNA, 24 nt, Artificial Sequence
  Synthetic
  misc_feature (13)..(13): n is a, c, g, or u
uggaggcuugaanagugggacaug

SEQ ID NO: 135945 - RNA, 18 nt, Artificial Sequence
  Synthetic
cacacggaccggcagaug

SEQ ID NO: 135946 - RNA, 19 nt, Artificial Sequence
  Synthetic
gcacacggaccggcagaug

SEQ ID NO: 135947 - RNA, 20 nt, Artificial Sequence
  Synthetic
ugcacacggaccggcagaug

SEQ ID NO: 135948 - RNA, 21 nt, Artificial Sequence
  Synthetic
gugcacacggaccggcagaug

SEQ ID NO: 135949 - RNA, 22 nt, Artificial Sequence
  Synthetic
agugcacacggaccggcagaug

SEQ ID NO: 135950 - RNA, 23 nt, Artificial Sequence
  Synthetic
aagugcacacggaccggcagaug

SEQ ID NO: 135951 - RNA, 24 nt, Artificial Sequence
  Synthetic
gaagugcacacggaccggcagaug

SEQ ID NO: 135952 - RNA, 18 nt, Artificial Sequence
  Synthetic
  misc_feature (8)..(8): n is a, c, g, or u
ggacaugnacaagagaug

SEQ ID NO: 135953 - RNA, 19 nt, Artificial Sequence
  Synthetic
  misc_feature (9)..(9): n is a, c, g, or u
gggacaugnacaagagaug

SEQ ID NO: 135954 - RNA, 20 nt, Artificial Sequence
  Synthetic
  misc_feature (10)..(10): n is a, c, g, or u
ugggacaugnacaagagaug

SEQ ID NO: 135955 - RNA, 21 nt, Artificial Sequence
  Synthetic
  misc_feature (11)..(11): n is a, c, g, or u
gugggacaugnacaagagaug

SEQ ID NO: 135956 - RNA, 22 nt, Artificial Sequence
  Synthetic
  misc_feature (12)..(12): n is a, c, g, or u
agugggacaugnacaagagaug

SEQ ID NO: 135957 - RNA, 23 nt, Artificial Sequence
  Synthetic
  misc_feature (1)..(1): n is a, c, g, or u
  misc_feature (13)..(13): n is a, c, g, or u
nagugggacaugnacaagagaug

SEQ ID NO: 135958 - RNA, 24 nt, Artificial Sequence
  Synthetic
  misc_feature (2)..(2): n is a, c, g, or u
  misc_feature (14)..(14): n is a, c, g, or u
anagugggacaugnacaagagaug

SEQ ID NO: 135959 - RNA, 18 nt, Artificial Sequence
  Synthetic
  misc_feature (2)..(2): n is a, c, g, or u
gnggagauugacgagaug

SEQ ID NO: 135960 - RNA, 19 nt, Artificial Sequence
  Synthetic
  misc_feature (3)..(3): n is a, c, g, or u
cgnggagauugacgagaug

SEQ ID NO: 135961 - RNA, 20 nt, Artificial Sequence
  Synthetic
  misc_feature (4)..(4): n is a, c, g, or u
ucgnggagauugacgagaug

SEQ ID NO: 135962 - RNA, 21 nt, Artificial Sequence
  Synthetic
  misc_feature (5)..(5): n is a, c, g, or u
cucgnggagauugacgagaug

SEQ ID NO: 135963 - RNA, 22 nt, Artificial Sequence
  Synthetic
  misc_feature (6)..(6): n is a, c, g, or u
ccucgnggagauugacgagaug

SEQ ID NO: 135964 - RNA, 23 nt, Artificial Sequence
  Synthetic
  misc_feature (7)..(7): n is a, c, g, or u
uccucgnggagauugacgagaug

SEQ ID NO: 135965 - RNA, 24 nt, Artificial Sequence
  Synthetic
  misc_feature (8)..(8): n is a, c, g, or u
guccucgnggagauugacgagaug

SEQ ID NO: 135966 - RNA, 18 nt, Artificial Sequence
  Synthetic
aggcauagcagcaggaug

SEQ ID NO: 135967 - RNA, 19 nt, Artificial Sequence
  Synthetic
gaggcauagcagcaggaug

SEQ ID NO: 135968 - RNA, 20 nt, Artificial Sequence
  Synthetic
ugaggcauagcagcaggaug

SEQ ID NO: 135969 - RNA, 21 nt, Artificial Sequence
  Synthetic
augaggcauagcagcaggaug

SEQ ID NO: 135970 - RNA, 22 nt, Artificial Sequence
  Synthetic
gaugaggcauagcagcaggaug

SEQ ID NO: 135971 - RNA, 23 nt, Artificial Sequence
  Synthetic
agaugaggcauagcagcaggaug

SEQ ID NO: 135972 - RNA, 24 nt, Artificial Sequence
  Synthetic
aagaugaggcauagcagcaggaug

SEQ ID NO: 135973 - RNA, 18 nt, Artificial Sequence
  Synthetic
ugcaggguccaacugaug

SEQ ID NO: 135974 - RNA, 19 nt, Artificial Sequence
  Synthetic
augcaggguccaacugaug

SEQ ID NO: 135975 - RNA, 20 nt, Artificial Sequence
  Synthetic
aaugcaggguccaacugaug

SEQ ID NO: 135976 - RNA, 21 nt, Artificial Sequence
  Synthetic
gaaugcaggguccaacugaug

SEQ ID NO: 135977 - RNA, 22 nt, Artificial Sequence
  Synthetic
cgaaugcaggguccaacugaug

SEQ ID NO: 135978 - RNA, 23 nt, Artificial Sequence
  Synthetic
ccgaaugcaggguccaacugaug

SEQ ID NO: 135979 - RNA, 24 nt, Artificial Sequence
  Synthetic
uccgaaugcaggguccaacugaug

SEQ ID NO: 135980 - RNA, 18 nt, Artificial Sequence
  Synthetic
cuuugcgagguuuugaug

SEQ ID NO: 135981 - RNA, 19 nt, Artificial Sequence
  Synthetic
ccuuugcgagguuuugaug

SEQ ID NO: 135982 - RNA, 20 nt, Artificial Sequence
  Synthetic
gccuuugcgagguuuugaug

SEQ ID NO: 135983 - RNA, 21 nt, Artificial Sequence
  Synthetic
ugccuuugcgagguuuugaug

SEQ ID NO: 135984 - RNA, 22 nt, Artificial Sequence
  Synthetic
augccuuugcgagguuuugaug

SEQ ID NO: 135985 - RNA, 23 nt, Artificial Sequence
  Synthetic
caugccuuugcgagguuuugaug

SEQ ID NO: 135986 - RNA, 24 nt, Artificial Sequence
  Synthetic
ccaugccuuugcgagguuuugaug

SEQ ID NO: 135987 - RNA, 18 nt, Artificial Sequence
  Synthetic
aggaugaagaggaauaug

SEQ ID NO: 135988 - RNA, 19 nt, Artificial Sequence
  Synthetic
caggaugaagaggaauaug

SEQ ID NO: 135989 - RNA, 20 nt, Artificial Sequence
  Synthetic
gcaggaugaagaggaauaug

SEQ ID NO: 135990 - RNA, 21 nt, Artificial Sequence
  Synthetic
agcaggaugaagaggaauaug

SEQ ID NO: 135991 - RNA, 22 nt, Artificial Sequence
  Synthetic
cagcaggaugaagaggaauaug

SEQ ID NO: 135992 - RNA, 23 nt, Artificial Sequence
  Synthetic
gcagcaggaugaagaggaauaug

SEQ ID NO: 135993 - RNA, 24 nt, Artificial Sequence
  Synthetic
agcagcaggaugaagaggaauaug

SEQ ID NO: 135994 - RNA, 18 nt, Artificial Sequence
  Synthetic
  misc_feature (13)..(13): n is a, c, g, or u
uugccugagugcnguaug

SEQ ID NO: 135995 - RNA, 19 nt, Artificial Sequence
  Synthetic
  misc_feature (14)..(14): n is a, c, g, or u
cuugccugagugcnguaug

SEQ ID NO: 135996 - RNA, 20 nt, Artificial Sequence
  Synthetic
  misc_feature (15)..(15): n is a, c, g, or u
gcuugccugagugcnguaug

SEQ ID NO: 135997 - RNA, 21 nt, Artificial Sequence
  Synthetic
  misc_feature (16)..(16): n is a, c, g, or u
ggcuugccugagugcnguaug

SEQ ID NO: 135998 - RNA, 22 nt, Artificial Sequence
  Synthetic
  misc_feature (17)..(17): n is a, c, g, or u
uggcuugccugagugcnguaug

SEQ ID NO: 135999 - RNA, 23 nt, Artificial Sequence
  Synthetic
  misc_feature (18)..(18): n is a, c, g, or u
auggcuugccugagugcnguaug

SEQ ID NO: 136000 - RNA, 24 nt, Artificial Sequence
  Synthetic
  misc_feature (19)..(19): n is a, c, g, or u
aauggcuugccugagugcnguaug

SEQ ID NO: 136001 - RNA, 18 nt, Artificial Sequence
  Synthetic
uccaagaguccucuuaug

SEQ ID NO: 136002 - RNA, 19 nt, Artificial Sequence
  Synthetic
guccaagaguccucuuaug

SEQ ID NO: 136003 - RNA, 20 nt, Artificial Sequence
  Synthetic
aguccaagaguccucuuaug

SEQ ID NO: 136004 - RNA, 21 nt, Artificial Sequence
  Synthetic
gaguccaagaguccucuuaug

SEQ ID NO: 136005 - RNA, 22 nt, Artificial Sequence
  Synthetic
ggaguccaagaguccucuuaug

SEQ ID NO: 136006 - RNA, 23 nt, Artificial Sequence
  Synthetic
gggaguccaagaguccucuuaug

SEQ ID NO: 136007 - RNA, 24 nt, Artificial Sequence
  Synthetic
ugggaguccaagaguccucuuaug

SEQ ID NO: 136008 - RNA, 18 nt, Artificial Sequence
  Synthetic
aagcccuacgaaccacug

SEQ ID NO: 136009 - RNA, 19 nt, Artificial Sequence
  Synthetic
aaagcccuacgaaccacug

SEQ ID NO: 136010 - RNA, 20 nt, Artificial Sequence
  Synthetic
gaaagcccuacgaaccacug

SEQ ID NO: 136011 - RNA, 21 nt, Artificial Sequence
  Synthetic
ggaaagcccuacgaaccacug

SEQ ID NO: 136012 - RNA, 22 nt, Artificial Sequence
  Synthetic
gggaaagcccuacgaaccacug

SEQ ID NO: 136013 - RNA, 23 nt, Artificial Sequence
  Synthetic
ggggaaagcccuacgaaccacug

SEQ ID NO: 136014 - RNA, 24 nt, Artificial Sequence
  Synthetic
gggggaaagcccuacgaaccacug

SEQ ID NO: 136015 - RNA, 18 nt, Artificial Sequence
  Synthetic
ugcucccacuccuaccug

SEQ ID NO: 136016 - RNA, 19 nt, Artificial Sequence
  Synthetic
augcucccacuccuaccug

SEQ ID NO: 136017 - RNA, 20 nt, Artificial Sequence
  Synthetic
aaugcucccacuccuaccug

SEQ ID NO: 136018 - RNA, 21 nt, Artificial Sequence
  Synthetic
gaaugcucccacuccuaccug

SEQ ID NO: 136019 - RNA, 22 nt, Artificial Sequence
  Synthetic
cgaaugcucccacuccuaccug

SEQ ID NO: 136020 - RNA, 23 nt, Artificial Sequence
  Synthetic
ccgaaugcucccacuccuaccug

SEQ ID NO: 136021 - RNA, 24 nt, Artificial Sequence
  Synthetic
cccgaaugcucccacuccuaccug

SEQ ID NO: 136022 - RNA, 18 nt, Artificial Sequence
  Synthetic
uugguggucuauaggcug

SEQ ID NO: 136023 - RNA, 19 nt, Artificial Sequence
  Synthetic
uuugguggucuauaggcug

SEQ ID NO: 136024 - RNA, 20 nt, Artificial Sequence
  Synthetic
auuugguggucuauaggcug

SEQ ID NO: 136025 - RNA, 21 nt, Artificial Sequence
  Synthetic
cauuugguggucuauaggcug

SEQ ID NO: 136026 - RNA, 22 nt, Artificial Sequence
  Synthetic
gcauuugguggucuauaggcug

SEQ ID NO: 136027 - RNA, 23 nt, Artificial Sequence
  Synthetic
ggcauuugguggucuauaggcug

SEQ ID NO: 136028 - RNA, 24 nt, Artificial Sequence
  Synthetic
gggcauuugguggucuauaggcug

SEQ ID NO: 136029 - RNA, 18 nt, Artificial Sequence
  Synthetic
gaccuugggcaggaucug

SEQ ID NO: 136030 - RNA, 19 nt, Artificial Sequence
  Synthetic
agaccuugggcaggaucug

SEQ ID NO: 136031 - RNA, 20 nt, Artificial Sequence
  Synthetic
aagaccuugggcaggaucug

SEQ ID NO: 136032 - RNA, 21 nt, Artificial Sequence
  Synthetic
uaagaccuugggcaggaucug

SEQ ID NO: 136033 - RNA, 22 nt, Artificial Sequence
  Synthetic
guaagaccuugggcaggaucug

SEQ ID NO: 136034 - RNA, 23 nt, Artificial Sequence
  Synthetic
uguaagaccuugggcaggaucug

SEQ ID NO: 136035 - RNA, 24 nt, Artificial Sequence
  Synthetic
auguaagaccuugggcaggaucug

SEQ ID NO: 136036 - RNA, 18 nt, Artificial Sequence
  Synthetic
  misc_feature (12)..(12): n is a, c, g, or u
gauugagaucuncgucug

SEQ ID NO: 136037 - RNA, 19 nt, Artificial Sequence
  Synthetic
  misc_feature (13)..(13): n is a, c, g, or u
cgauugagaucuncgucug

SEQ ID NO: 136038 - RNA, 20 nt, Artificial Sequence
  Synthetic
  misc_feature (14)..(14): n is a, c, g, or u
gcgauugagaucuncgucug

SEQ ID NO: 136039 - RNA, 21 nt, Artificial Sequence
  Synthetic
  misc_feature (15)..(15): n is a, c, g, or u
ggcgauugagaucuncgucug

SEQ ID NO: 136040 - RNA, 22 nt, Artificial Sequence
  Synthetic
  misc_feature (16)..(16): n is a, c, g, or u
cggcgauugagaucuncgucug

SEQ ID NO: 136041 - RNA, 23 nt, Artificial Sequence
  Synthetic
  misc_feature (17)..(17): n is a, c, g, or u
gcggcgauugagaucuncgucug

SEQ ID NO: 136042 - RNA, 24 nt, Artificial Sequence
  Synthetic
  misc_feature (18)..(18): n is a, c, g, or u
cgcggcgauugagaucuncgucug

SEQ ID NO: 136043 - RNA, 18 nt, Artificial Sequence
  Synthetic
  misc_feature (1)..(1): n is a, c, g, or u
ncugaaagccaaacagug

SEQ ID NO: 136044 - RNA, 19 nt, Artificial Sequence
  Synthetic
  misc_feature (2)..(2): n is a, c, g, or u
ancugaaagccaaacagug

SEQ ID NO: 136045 - RNA, 20 nt, Artificial Sequence
  Synthetic
  misc_feature (3)..(3): n is a, c, g, or u
uancugaaagccaaacagug

SEQ ID NO: 136046 - RNA, 21 nt, Artificial Sequence
  Synthetic
  misc_feature (4)..(4): n is a, c, g, or u
auancugaaagccaaacagug

SEQ ID NO: 136047 - RNA, 22 nt, Artificial Sequence
  Synthetic
  misc_feature (5)..(5): n is a, c, g, or u
uauancugaaagccaaacagug

SEQ ID NO: 136048 - RNA, 23 nt, Artificial Sequence
  Synthetic
  misc_feature (6)..(6): n is a, c, g, or u
auauancugaaagccaaacagug

SEQ ID NO: 136049 - RNA, 24 nt, Artificial Sequence
  Synthetic
  misc_feature (7)..(7): n is a, c, g, or u
cauauancugaaagccaaacagug

SEQ ID NO: 136050 - RNA, 18 nt, Artificial Sequence
  Synthetic
  misc_feature (3)..(3): n is a, c, g, or u
cunuuuucauuuacagug

SEQ ID NO: 136051 - RNA, 19 nt, Artificial Sequence
  Synthetic
  misc_feature (4)..(4): n is a, c, g, or u
ucunuuuucauuuacagug

SEQ ID NO: 136052 - RNA, 20 nt, Artificial Sequence
  Synthetic
  misc_feature (5)..(5): n is a, c, g, or u
uucunuuuucauuuacagug

SEQ ID NO: 136053 - RNA, 21 nt, Artificial Sequence
  Synthetic
  misc_feature (6)..(6): n is a, c, g, or u
cuucunuuuucauuuacagug

SEQ ID NO: 136054 - RNA, 22 nt, Artificial Sequence
  Synthetic
  misc_feature (7)..(7): n is a, c, g, or u
ucuucunuuuucauuuacagug

SEQ ID NO: 136055 - RNA, 23 nt, Artificial Sequence
  Synthetic
  misc_feature (8)..(8): n is a, c, g, or u
aucuucunuuuucauuuacagug

SEQ ID NO: 136056 - RNA, 24 nt, Artificial Sequence
  Synthetic
  misc_feature (9)..(9): n is a, c, g, or u
aaucuucunuuuucauuuacagug

SEQ ID NO: 136057 - RNA, 18 nt, Artificial Sequence
  Synthetic
acaggagguuggugagug

SEQ ID NO: 136058 - RNA, 19 nt, Artificial Sequence
  Synthetic
gacaggagguuggugagug

SEQ ID NO: 136059 - RNA, 20 nt, Artificial Sequence
  Synthetic
ggacaggagguuggugagug

SEQ ID NO: 136060 - RNA, 21 nt, Artificial Sequence
  Synthetic
aggacaggagguuggugagug

SEQ ID NO: 136061 - RNA, 22 nt, Artificial Sequence
  Synthetic
gaggacaggagguuggugagug

SEQ ID NO: 136062 - RNA, 23 nt, Artificial Sequence
  Synthetic
ggaggacaggagguuggugagug

SEQ ID NO: 136063 - RNA, 24 nt, Artificial Sequence
  Synthetic
uggaggacaggagguuggugagug

SEQ ID NO: 136064 - RNA, 18 nt, Artificial Sequence
  Synthetic
uggucuccaugcaacgug

SEQ ID NO: 136065 - RNA, 19 nt, Artificial Sequence
  Synthetic
guggucuccaugcaacgug

SEQ ID NO: 136066 - RNA, 20 nt, Artificial Sequence
  Synthetic
gguggucuccaugcaacgug

SEQ ID NO: 136067 - RNA, 21 nt, Artificial Sequence
  Synthetic
cgguggucuccaugcaacgug

SEQ ID NO: 136068 - RNA, 22 nt, Artificial Sequence
  Synthetic
acgguggucuccaugcaacgug

SEQ ID NO: 136069 - RNA, 23 nt, Artificial Sequence
  Synthetic
cacgguggucuccaugcaacgug

SEQ ID NO: 136070 - RNA, 24 nt, Artificial Sequence
  Synthetic
ucacgguggucuccaugcaacgug

SEQ ID NO: 136071 - RNA, 18 nt, Artificial Sequence
  Synthetic
agagaggugcgccccgug

SEQ ID NO: 136072 - RNA, 19 nt, Artificial Sequence
  Synthetic
aagagaggugcgccccgug

SEQ ID NO: 136073 - RNA, 20 nt, Artificial Sequence
  Synthetic
aaagagaggugcgccccgug

SEQ ID NO: 136074 - RNA, 18 nt, Artificial Sequence
  Synthetic
gaugauuaggcagaggug

SEQ ID NO: 136075 - RNA, 19 nt, Artificial Sequence
  Synthetic
agaugauuaggcagaggug

SEQ ID NO: 136076 - RNA, 20 nt, Artificial Sequence
  Synthetic
gagaugauuaggcagaggug

SEQ ID NO: 136077 - RNA, 21 nt, Artificial Sequence
  Synthetic
agagaugauuaggcagaggug

SEQ ID NO: 136078 - RNA, 22 nt, Artificial Sequence
  Synthetic
aagagaugauuaggcagaggug

SEQ ID NO: 136079 - RNA, 23 nt, Artificial Sequence
  Synthetic
caagagaugauuaggcagaggug

SEQ ID NO: 136080 - RNA, 24 nt, Artificial Sequence
  Synthetic
acaagagaugauuaggcagaggug

SEQ ID NO: 136081 - RNA, 18 nt, Artificial Sequence
  Synthetic
gacugucucuuagaggug

SEQ ID NO: 136082 - RNA, 19 nt, Artificial Sequence
  Synthetic
ugacugucucuuagaggug

SEQ ID NO: 136083 - RNA, 20 nt, Artificial Sequence
  Synthetic
augacugucucuuagaggug

SEQ ID NO: 136084 - RNA, 21 nt, Artificial Sequence
  Synthetic
gaugacugucucuuagaggug

SEQ ID NO: 136085 - RNA, 22 nt, Artificial Sequence
  Synthetic
ggaugacugucucuuagaggug

SEQ ID NO: 136086 - RNA, 23 nt, Artificial Sequence
  Synthetic
aggaugacugucucuuagaggug

SEQ ID NO: 136087 - RNA, 24 nt, Artificial Sequence
  Synthetic
gaggaugacugucucuuagaggug

SEQ ID NO: 136088 - RNA, 18 nt, Artificial Sequence
  Synthetic
  misc_feature (10)..(10): n is a, c, g, or u
  misc_feature (13)..(13): n is a, c, g, or u
aguugcaugnugnuggug

SEQ ID NO: 136089 - RNA, 19 nt, Artificial Sequence
  Synthetic
  misc_feature (11)..(11): n is a, c, g, or u
  misc_feature (14)..(14): n is a, c, g, or u
aaguugcaugnugnuggug

SEQ ID NO: 136090 - RNA, 20 nt, Artificial Sequence
  Synthetic
  misc_feature (12)..(12): n is a, c, g, or u
  misc_feature (15)..(15): n is a, c, g, or u
aaaguugcaugnugnuggug

SEQ ID NO: 136091 - RNA, 21 nt, Artificial Sequence
  Synthetic
  misc_feature (13)..(13): n is a, c, g, or u
  misc_feature (16)..(16): n is a, c, g, or u
aaaaguugcaugnugnuggug

SEQ ID NO: 136092 - RNA, 22 nt, Artificial Sequence
  Synthetic
  misc_feature (14)..(14): n is a, c, g, or u
  misc_feature (17)..(17): n is a, c, g, or u
aaaaaguugcaugnugnuggug

SEQ ID NO: 136093 - RNA, 23 nt, Artificial Sequence
  Synthetic
  misc_feature (15)..(15): n is a, c, g, or u
  misc_feature (18)..(18): n is a, c, g, or u
gaaaaaguugcaugnugnuggug

SEQ ID NO: 136094 - RNA, 24 nt, Artificial Sequence
  Synthetic
  misc_feature (16)..(16): n is a, c, g, or u
  misc_feature (19)..(19): n is a, c, g, or u
ugaaaaaguugcaugnugnuggug

SEQ ID NO: 136095 - RNA, 18 nt, Artificial Sequence
  Synthetic
ggagauugacgagaugug

SEQ ID NO: 136096 - RNA, 19 nt, Artificial Sequence
  Synthetic
  misc_feature (1)..(1): n is a, c, g, or u
nggagauugacgagaugug

SEQ ID NO: 136097 - RNA, 20 nt, Artificial Sequence
  Synthetic
  misc_feature (2)..(2): n is a, c, g, or u
gnggagauugacgagaugug

SEQ ID NO: 136098 - RNA, 21 nt, Artificial Sequence
  Synthetic
  misc_feature (3)..(3): n is a, c, g, or u
cgnggagauugacgagaugug

SEQ ID NO: 136099 - RNA, 22 nt, Artificial Sequence
  Synthetic
  misc_feature (4)..(4): n is a, c, g, or u
ucgnggagauugacgagaugug

SEQ ID NO: 136100 - RNA, 23 nt, Artificial Sequence
  Synthetic
  misc_feature (5)..(5): n is a, c, g, or u
cucgnggagauugacgagaugug

SEQ ID NO: 136101 - RNA, 24 nt, Artificial Sequence
  Synthetic
  misc_feature (6)..(6): n is a, c, g, or u
ccucgnggagauugacgagaugug

SEQ ID NO: 136102 - RNA, 18 nt, Artificial Sequence
  Synthetic
  misc_feature (16)..(16): n is a, c, g, or u
ccugacucugggaucnug

SEQ ID NO: 136103 - RNA, 19 nt, Artificial Sequence
  Synthetic
  misc_feature (17)..(17): n is a, c, g, or u
cccugacucugggaucnug

SEQ ID NO: 136104 - RNA, 20 nt, Artificial Sequence
  Synthetic
  misc_feature (18)..(18): n is a, c, g, or u
ccccugacucugggaucnug

SEQ ID NO: 136105 - RNA, 21 nt, Artificial Sequence
  Synthetic
  misc_feature (1)..(1): n is a, c, g, or u
  misc_feature (19)..(19): n is a, c, g, or u
nccccugacucugggaucnug

SEQ ID NO: 136106 - RNA, 22 nt, Artificial Sequence
  Synthetic
  misc_feature (2)..(2): n is a, c, g, or u
  misc_feature (20)..(20): n is a, c, g, or u
gnccccugacucugggaucnug

SEQ ID NO: 136107 - RNA, 23 nt, Artificial Sequence
  Synthetic
  misc_feature (3)..(3): n is a, c, g, or u
  misc_feature (21)..(21): n is a, c, g, or u
agnccccugacucugggaucnug

SEQ ID NO: 136108 - RNA, 24 nt, Artificial Sequence
  Synthetic
  misc_feature (4)..(4): n is a, c, g, or u
  misc_feature (22)..(22): n is a, c, g, or u
cagnccccugacucugggaucnug

SEQ ID NO: 136109 - RNA, 18 nt, Artificial Sequence
  Synthetic
  misc_feature (6)..(6): n is a, c, g, or u
  misc_feature (11)..(11): n is a, c, g, or u
  misc_feature (16)..(16): n is a, c, g, or u
aagggncucangaugnug

SEQ ID NO: 136110 - RNA, 19 nt, Artificial Sequence
  Synthetic
  misc_feature (7)..(7): n is a, c, g, or u
  misc_feature (12)..(12): n is a, c, g, or u
  misc_feature (17)..(17): n is a, c, g, or u
aaagggncucangaugnug

SEQ ID NO: 136111 - RNA, 20 nt, Artificial Sequence
  Synthetic
  misc_feature (8)..(8): n is a, c, g, or u
  misc_feature (13)..(13): n is a, c, g, or u
  misc_feature (18)..(18): n is a, c, g, or u
uaaagggncucangaugnug

SEQ ID NO: 136112 - RNA, 21 nt, Artificial Sequence
  Synthetic
  misc_feature (9)..(9): n is a, c, g, or u
  misc_feature (14)..(14): n is a, c, g, or u
  misc_feature (19)..(19): n is a, c, g, or u
auaaagggncucangaugnug

SEQ ID NO: 136113 - RNA, 22 nt, Artificial Sequence
  Synthetic
  misc_feature (10)..(10): n is a, c, g, or u
  misc_feature (15)..(15): n is a, c, g, or u
  misc_feature (20)..(20): n is a, c, g, or u
uauaaagggncucangaugnug

SEQ ID NO: 136114 - RNA, 23 nt, Artificial Sequence
  Synthetic
  misc_feature (11)..(11): n is a, c, g, or u
  misc_feature (16)..(16): n is a, c, g, or u
  misc_feature (21)..(21): n is a, c, g, or u
guauaaagggncucangaugnug

SEQ ID NO: 136115 - RNA, 24 nt, Artificial Sequence
  Synthetic
  misc_feature (12)..(12): n is a, c, g, or u
  misc_feature (17)..(17): n is a, c, g, or u
  misc_feature (22)..(22): n is a, c, g, or u
gguauaaagggncucangaugnug

SEQ ID NO: 136116 - RNA, 18 nt, Artificial Sequence
  Synthetic
  misc_feature (2)..(2): n is a, c, g, or u
gnucccccuagaaaauug

SEQ ID NO: 136117 - RNA, 19 nt, Artificial Sequence
  Synthetic
  misc_feature (3)..(3): n is a, c, g, or u
ugnucccccuagaaaauug

SEQ ID NO: 136118 - RNA, 20 nt, Artificial Sequence
  Synthetic
  misc_feature (4)..(4): n is a, c, g, or u
gugnucccccuagaaaauug

SEQ ID NO: 136119 - RNA, 21 nt, Artificial Sequence
  Synthetic
  misc_feature (5)..(5): n is a, c, g, or u
ggugnucccccuagaaaauug

SEQ ID NO: 136120 - RNA, 22 nt, Artificial Sequence
  Synthetic
  misc_feature (6)..(6): n is a, c, g, or u
gggugnucccccuagaaaauug

SEQ ID NO: 136121 - RNA, 23 nt, Artificial Sequence
  Synthetic
  misc_feature (7)..(7): n is a, c, g, or u
cgggugnucccccuagaaaauug

SEQ ID NO: 136122 - RNA, 24 nt, Artificial Sequence
  Synthetic
  misc_feature (8)..(8): n is a, c, g, or u
acgggugnucccccuagaaaauug

SEQ ID NO: 136123 - RNA, 18 nt, Artificial Sequence
  Synthetic
gauaaccaggacaaauug

SEQ ID NO: 136124 - RNA, 19 nt, Artificial Sequence
  Synthetic
cgauaaccaggacaaauug

SEQ ID NO: 136125 - RNA, 20 nt, Artificial Sequence
  Synthetic
gcgauaaccaggacaaauug

SEQ ID NO: 136126 - RNA, 21 nt, Artificial Sequence
  Synthetic
agcgauaaccaggacaaauug

SEQ ID NO: 136127 - RNA, 22 nt, Artificial Sequence
  Synthetic
cagcgauaaccaggacaaauug

SEQ ID NO: 136128 - RNA, 23 nt, Artificial Sequence
  Synthetic
ccagcgauaaccaggacaaauug

SEQ ID NO: 136129 - RNA, 24 nt, Artificial Sequence
  Synthetic
uccagcgauaaccaggacaaauug

SEQ ID NO: 136130 - RNA, 18 nt, Artificial Sequence
  Synthetic
  misc_feature (1)..(1): n is a, c, g, or u
  misc_feature (7)..(7): n is a, c, g, or u
  misc_feature (10)..(10): n is a, c, g, or u
ngcaggnuanccacauug

SEQ ID NO: 136131 - RNA, 19 nt, Artificial Sequence
  Synthetic
  misc_feature (2)..(2): n is a, c, g, or u
  misc_feature (8)..(8): n is a, c, g, or u
  misc_feature (11)..(11): n is a, c, g, or u
angcaggnuanccacauug

SEQ ID NO: 136132 - RNA, 20 nt, Artificial Sequence
  Synthetic
  misc_feature (3)..(3): n is a, c, g, or u
  misc_feature (9)..(9): n is a, c, g, or u
  misc_feature (12)..(12): n is a, c, g, or u
aangcaggnuanccacauug

SEQ ID NO: 136133 - RNA, 21 nt, Artificial Sequence
  Synthetic
  misc_feature (4)..(4): n is a, c, g, or u
  misc_feature (10)..(10): n is a, c, g, or u
  misc_feature (13)..(13): n is a, c, g, or u
uaangcaggnuanccacauug

SEQ ID NO: 136134 - RNA, 22 nt, Artificial Sequence
  Synthetic
  misc_feature (5)..(5): n is a, c, g, or u
  misc_feature (11)..(11): n is a, c, g, or u
  misc_feature (14)..(14): n is a, c, g, or u
uuaangcaggnuanccacauug

SEQ ID NO: 136135 - RNA, 23 nt, Artificial Sequence
  Synthetic
  misc_feature (6)..(6): n is a, c, g, or u
  misc_feature (12)..(12): n is a, c, g, or u
  misc_feature (15)..(15): n is a, c, g, or u
auuaangcaggnuanccacauug

SEQ ID NO: 136136 - RNA, 24 nt, Artificial Sequence
  Synthetic
  misc_feature (7)..(7): n is a, c, g, or u
  misc_feature (13)..(13): n is a, c, g, or u
  misc_feature (16)..(16): n is a, c, g, or u
cauuaangcaggnuanccacauug

SEQ ID NO: 136137 - RNA, 18 nt, Artificial Sequence
  Synthetic
ggucggucguugacauug

SEQ ID NO: 136138 - RNA, 19 nt, Artificial Sequence
  Synthetic
aggucggucguugacauug

SEQ ID NO: 136139 - RNA, 20 nt, Artificial Sequence
  Synthetic
aaggucggucguugacauug

SEQ ID NO: 136140 - RNA, 18 nt, Artificial Sequence
  Synthetic
  misc_feature (10)..(10): n is a, c, g, or u
caguccucgnggagauug

SEQ ID NO: 136141 - RNA, 19 nt, Artificial Sequence
  Synthetic
  misc_feature (11)..(11): n is a, c, g, or u
ccaguccucgnggagauug

SEQ ID NO: 136142 - RNA, 20 nt, Artificial Sequence
  Synthetic
  misc_feature (12)..(12): n is a, c, g, or u
cccaguccucgnggagauug

SEQ ID NO: 136143 - RNA, 21 nt, Artificial Sequence
  Synthetic
  misc_feature (13)..(13): n is a, c, g, or u
ccccaguccucgnggagauug

SEQ ID NO: 136144 - RNA, 22 nt, Artificial Sequence
  Synthetic
  misc_feature (14)..(14): n is a, c, g, or u
uccccaguccucgnggagauug

SEQ ID NO: 136145 - RNA, 23 nt, Artificial Sequence
  Synthetic
  misc_feature (15)..(15): n is a, c, g, or u
guccccaguccucgnggagauug

SEQ ID NO: 136146 - RNA, 24 nt, Artificial Sequence
  Synthetic
  misc_feature (16)..(16): n is a, c, g, or u
gguccccaguccucgnggagauug

SEQ ID NO: 136147 - RNA, 18 nt, Artificial Sequence
  Synthetic
cuuccugacugccgauug

SEQ ID NO: 136148 - RNA, 19 nt, Artificial Sequence
  Synthetic
ccuuccugacugccgauug

SEQ ID NO: 136149 - RNA, 20 nt, Artificial Sequence
  Synthetic
gccuuccugacugccgauug

SEQ ID NO: 136150 - RNA, 21 nt, Artificial Sequence
  Synthetic
ugccuuccugacugccgauug

SEQ ID NO: 136151 - RNA, 22 nt, Artificial Sequence
  Synthetic
cugccuuccugacugccgauug

SEQ ID NO: 136152 - RNA, 23 nt, Artificial Sequence
  Synthetic
gcugccuuccugacugccgauug

SEQ ID NO: 136153 - RNA, 24 nt, Artificial Sequence
  Synthetic
ggcugccuuccugacugccgauug

SEQ ID NO: 136154 - RNA, 18 nt, Artificial Sequence
  Synthetic
aagucccaaucuggauug

SEQ ID NO: 136155 - RNA, 19 nt, Artificial Sequence
  Synthetic
gaagucccaaucuggauug

SEQ ID NO: 136156 - RNA, 20 nt, Artificial Sequence
  Synthetic
ugaagucccaaucuggauug

SEQ ID NO: 136157 - RNA, 21 nt, Artificial Sequence
  Synthetic
uugaagucccaaucuggauug

SEQ ID NO: 136158 - RNA, 22 nt, Artificial Sequence
  Synthetic
guugaagucccaaucuggauug

SEQ ID NO: 136159 - RNA, 23 nt, Artificial Sequence
  Synthetic
gguugaagucccaaucuggauug

SEQ ID NO: 136160 - RNA, 24 nt, Artificial Sequence
  Synthetic
ggguugaagucccaaucuggauug

SEQ ID NO: 136161 - RNA, 18 nt, Artificial Sequence
  Synthetic
cuagacucugcgguauug

SEQ ID NO: 136162 - RNA, 19 nt, Artificial Sequence
  Synthetic
ucuagacucugcgguauug

SEQ ID NO: 136163 - RNA, 20 nt, Artificial Sequence
  Synthetic
gucuagacucugcgguauug

SEQ ID NO: 136164 - RNA, 21 nt, Artificial Sequence
  Synthetic
agucuagacucugcgguauug

SEQ ID NO: 136165 - RNA, 22 nt, Artificial Sequence
  Synthetic
gagucuagacucugcgguauug

SEQ ID NO: 136166 - RNA, 23 nt, Artificial Sequence
  Synthetic
cgagucuagacucugcgguauug

SEQ ID NO: 136167 - RNA, 24 nt, Artificial Sequence
  Synthetic
acgagucuagacucugcgguauug

SEQ ID NO: 136168 - RNA, 18 nt, Artificial Sequence
  Synthetic
cucuuauguaagaccuug

SEQ ID NO: 136169 - RNA, 19 nt, Artificial Sequence
  Synthetic
ccucuuauguaagaccuug

SEQ ID NO: 136170 - RNA, 20 nt, Artificial Sequence
  Synthetic
uccucuuauguaagaccuug

SEQ ID NO: 136171 - RNA, 21 nt, Artificial Sequence
  Synthetic
guccucuuauguaagaccuug

SEQ ID NO: 136172 - RNA, 22 nt, Artificial Sequence
  Synthetic
aguccucuuauguaagaccuug

SEQ ID NO: 136173 - RNA, 23 nt, Artificial Sequence
  Synthetic
gaguccucuuauguaagaccuug

SEQ ID NO: 136174 - RNA, 24 nt, Artificial Sequence
  Synthetic
agaguccucuuauguaagaccuug

SEQ ID NO: 136175 - RNA, 18 nt, Artificial Sequence
  Synthetic
aaacauagaguugccuug

SEQ ID NO: 136176 - RNA, 19 nt, Artificial Sequence
  Synthetic
gaaacauagaguugccuug

SEQ ID NO: 136177 - RNA, 20 nt, Artificial Sequence
  Synthetic
ggaaacauagaguugccuug

SEQ ID NO: 136178 - RNA, 21 nt, Artificial Sequence
  Synthetic
gggaaacauagaguugccuug

SEQ ID NO: 136179 - RNA, 22 nt, Artificial Sequence
  Synthetic
agggaaacauagaguugccuug

SEQ ID NO: 136180 - RNA, 23 nt, Artificial Sequence
  Synthetic
gagggaaacauagaguugccuug

SEQ ID NO: 136181 - RNA, 24 nt, Artificial Sequence
  Synthetic
ugagggaaacauagaguugccuug

SEQ ID NO: 136182 - RNA, 18 nt, Artificial Sequence
  Synthetic
  misc_feature (1)..(2): n is a, c, g, or u
nnuggccagugguccuug

SEQ ID NO: 136183 - RNA, 19 nt, Artificial Sequence
  Synthetic
  misc_feature (2)..(3): n is a, c, g, or u
unnuggccagugguccuug

SEQ ID NO: 136184 - RNA, 20 nt, Artificial Sequence
  Synthetic
  misc_feature (3)..(4): n is a, c, g, or u
cunnuggccagugguccuug

SEQ ID NO: 136185 - RNA, 21 nt, Artificial Sequence
  Synthetic
  misc_feature (4)..(5): n is a, c, g, or u
gcunnuggccagugguccuug

SEQ ID NO: 136186 - RNA, 22 nt, Artificial Sequence
  Synthetic
  misc_feature (5)..(6): n is a, c, g, or u
ggcunnuggccagugguccuug

SEQ ID NO: 136187 - RNA, 23 nt, Artificial Sequence
  Synthetic
  misc_feature (6)..(7): n is a, c, g, or u
uggcunnuggccagugguccuug

SEQ ID NO: 136188 - RNA, 24 nt, Artificial Sequence
  Synthetic
  misc_feature (7)..(8): n is a, c, g, or u
uuggcunnuggccagugguccuug

SEQ ID NO: 136189 - RNA, 18 nt, Artificial Sequence
  Synthetic
  misc_feature (7)..(7): n is a, c, g, or u
gggaucnugcagagcuug

SEQ ID NO: 136190 - RNA, 19 nt, Artificial Sequence
  Synthetic
  misc_feature (8)..(8): n is a, c, g, or u
ugggaucnugcagagcuug

SEQ ID NO: 136191 - RNA, 20 nt, Artificial Sequence
  Synthetic
  misc_feature (9)..(9): n is a, c, g, or u
cugggaucnugcagagcuug

SEQ ID NO: 136192 - RNA, 21 nt, Artificial Sequence
  Synthetic
  misc_feature (10)..(10): n is a, c, g, or u
ucugggaucnugcagagcuug

SEQ ID NO: 136193 - RNA, 22 nt, Artificial Sequence
  Synthetic
  misc_feature (11)..(11): n is a, c, g, or u
cucugggaucnugcagagcuug

SEQ ID NO: 136194 - RNA, 23 nt, Artificial Sequence
  Synthetic
  misc_feature (12)..(12): n is a, c, g, or u
acucugggaucnugcagagcuug

SEQ ID NO: 136195 - RNA, 24 nt, Artificial Sequence
  Synthetic
  misc_feature (13)..(13): n is a, c, g, or u
gacucugggaucnugcagagcuug

SEQ ID NO: 136196 - RNA, 18 nt, Artificial Sequence
  Synthetic
ccagcagagaauggcuug

SEQ ID NO: 136197 - RNA, 19 nt, Artificial Sequence
  Synthetic
cccagcagagaauggcuug

SEQ ID NO: 136198 - RNA, 20 nt, Artificial Sequence
  Synthetic
ccccagcagagaauggcuug

SEQ ID NO: 136199 - RNA, 21 nt, Artificial Sequence
  Synthetic
cccccagcagagaauggcuug

SEQ ID NO: 136200 - RNA, 22 nt, Artificial Sequence
  Synthetic
ccccccagcagagaauggcuug

SEQ ID NO: 136201 - RNA, 23 nt, Artificial Sequence
  Synthetic
uccccccagcagagaauggcuug

SEQ ID NO: 136202 - RNA, 24 nt, Artificial Sequence
  Synthetic
uuccccccagcagagaauggcuug

SEQ ID NO: 136203 - RNA, 18 nt, Artificial Sequence
  Synthetic
gaaaggccuuguaaguug

SEQ ID NO: 136204 - RNA, 19 nt, Artificial Sequence
  Synthetic
agaaaggccuuguaaguug

SEQ ID NO: 136205 - RNA, 20 nt, Artificial Sequence
  Synthetic
uagaaaggccuuguaaguug

SEQ ID NO: 136206 - RNA, 21 nt, Artificial Sequence
  Synthetic
uuagaaaggccuuguaaguug

SEQ ID NO: 136207 - RNA, 22 nt, Artificial Sequence
  Synthetic
cuuagaaaggccuuguaaguug

SEQ ID NO: 136208 - RNA, 23 nt, Artificial Sequence
  Synthetic
acuuagaaaggccuuguaaguug

SEQ ID NO: 136209 - RNA, 24 nt, Artificial Sequence
  Synthetic
uacuuagaaaggccuuguaaguug

SEQ ID NO: 136210 - RNA, 18 nt, Artificial Sequence
  Synthetic
uaguuuccggaaguguug

SEQ ID NO: 136211 - RNA, 19 nt, Artificial Sequence
  Synthetic
guaguuuccggaaguguug

SEQ ID NO: 136212 - RNA, 20 nt, Artificial Sequence
  Synthetic
aguaguuuccggaaguguug

SEQ ID NO: 136213 - RNA, 21 nt, Artificial Sequence
  Synthetic
caguaguuuccggaaguguug

SEQ ID NO: 136214 - RNA, 22 nt, Artificial Sequence
  Synthetic
acaguaguuuccggaaguguug

SEQ ID NO: 136215 - RNA, 23 nt, Artificial Sequence
  Synthetic
aacaguaguuuccggaaguguug

SEQ ID NO: 136216 - RNA, 24 nt, Artificial Sequence
  Synthetic
caacaguaguuuccggaaguguug

SEQ ID NO: 136217 - RNA, 18 nt, Artificial Sequence
  Synthetic
uggggacugcgaauuuug

SEQ ID NO: 136218 - RNA, 19 nt, Artificial Sequence
  Synthetic
uuggggacugcgaauuuug

SEQ ID NO: 136219 - RNA, 20 nt, Artificial Sequence
  Synthetic
guuggggacugcgaauuuug

SEQ ID NO: 136220 - RNA, 21 nt, Artificial Sequence
  Synthetic
gguuggggacugcgaauuuug

SEQ ID NO: 136221 - RNA, 22 nt, Artificial Sequence
  Synthetic
agguuggggacugcgaauuuug

SEQ ID NO: 136222 - RNA, 23 nt, Artificial Sequence
  Synthetic
gagguuggggacugcgaauuuug

SEQ ID NO: 136223 - RNA, 24 nt, Artificial Sequence
  Synthetic
ggagguuggggacugcgaauuuug

SEQ ID NO: 136224 - RNA, 18 nt, Artificial Sequence
  Synthetic
acucccauagguauuuug

SEQ ID NO: 136225 - RNA, 19 nt, Artificial Sequence
  Synthetic
cacucccauagguauuuug

SEQ ID NO: 136226 - RNA, 20 nt, Artificial Sequence
  Synthetic
ccacucccauagguauuuug

SEQ ID NO: 136227 - RNA, 21 nt, Artificial Sequence
  Synthetic
cccacucccauagguauuuug

SEQ ID NO: 136228 - RNA, 22 nt, Artificial Sequence
  Synthetic
gcccacucccauagguauuuug

SEQ ID NO: 136229 - RNA, 23 nt, Artificial Sequence
  Synthetic
ggcccacucccauagguauuuug

SEQ ID NO: 136230 - RNA, 24 nt, Artificial Sequence
  Synthetic
aggcccacucccauagguauuuug

SEQ ID NO: 136231 - RNA, 18 nt, Artificial Sequence
  Synthetic
uuccauccguagguuuug

SEQ ID NO: 136232 - RNA, 19 nt, Artificial Sequence
  Synthetic
uuuccauccguagguuuug

SEQ ID NO: 136233 - RNA, 20 nt, Artificial Sequence
  Synthetic
auuuccauccguagguuuug

SEQ ID NO: 136234 - RNA, 21 nt, Artificial Sequence
  Synthetic
aauuuccauccguagguuuug

SEQ ID NO: 136235 - RNA, 22 nt, Artificial Sequence
  Synthetic
caauuuccauccguagguuuug

SEQ ID NO: 136236 - RNA, 23 nt, Artificial Sequence
  Synthetic
gcaauuuccauccguagguuuug

SEQ ID NO: 136237 - RNA, 24 nt, Artificial Sequence
  Synthetic
ugcaauuuccauccguagguuuug

SEQ ID NO: 136238 - RNA, 18 nt, Artificial Sequence
  Synthetic
  misc_feature (9)..(9): n is a, c, g, or u
ccccaucunuuuguuuug

SEQ ID NO: 136239 - RNA, 19 nt, Artificial Sequence
  Synthetic
  misc_feature (10)..(10): n is a, c, g, or u
accccaucunuuuguuuug

SEQ ID NO: 136240 - RNA, 20 nt, Artificial Sequence
  Synthetic
  misc_feature (11)..(11): n is a, c, g, or u
aaccccaucunuuuguuuug

SEQ ID NO: 136241 - RNA, 21 nt, Artificial Sequence
  Synthetic
  misc_feature (12)..(12): n is a, c, g, or u
uaaccccaucunuuuguuuug

SEQ ID NO: 136242 - RNA, 22 nt, Artificial Sequence
  Synthetic
  misc_feature (13)..(13): n is a, c, g, or u
auaaccccaucunuuuguuuug

SEQ ID NO: 136243 - RNA, 23 nt, Artificial Sequence
  Synthetic
  misc_feature (14)..(14): n is a, c, g, or u
aauaaccccaucunuuuguuuug

SEQ ID NO: 136244 - RNA, 24 nt, Artificial Sequence
  Synthetic
  misc_feature (15)..(15): n is a, c, g, or u
gaauaaccccaucunuuuguuuug

SEQ ID NO: 136245 - RNA, 18 nt, Artificial Sequence
  Synthetic
  misc_feature (9)..(9): n is a, c, g, or u
  misc_feature (18)..(18): n is a, c, g, or u
aaaugaaunuuaggaaan

SEQ ID NO: 136246 - RNA, 19 nt, Artificial Sequence
  Synthetic
  misc_feature (10)..(10): n is a, c, g, or u
  misc_feature (19)..(19): n is a, c, g, or u
uaaaugaaunuuaggaaan

SEQ ID NO: 136247 - RNA, 20 nt, Artificial Sequence
  Synthetic
  misc_feature (11)..(11): n is a, c, g, or u
  misc_feature (20)..(20): n is a, c, g, or u
guaaaugaaunuuaggaaan

SEQ ID NO: 136248 - RNA, 21 nt, Artificial Sequence
  Synthetic
  misc_feature (12)..(12): n is a, c, g, or u
  misc_feature (21)..(21): n is a, c, g, or u
uguaaaugaaunuuaggaaan

SEQ ID NO: 136249 - RNA, 22 nt, Artificial Sequence
  Synthetic
  misc_feature (1)..(1): n is a, c, g, or u
  misc_feature (13)..(13): n is a, c, g, or u
  misc_feature (22)..(22): n is a, c, g, or u
nuguaaaugaaunuuaggaaan

SEQ ID NO: 136250 - RNA, 23 nt, Artificial Sequence
  Synthetic
  misc_feature (2)..(2): n is a, c, g, or u
  misc_feature (14)..(14): n is a, c, g, or u
  misc_feature (23)..(23): n is a, c, g, or u
cnuguaaaugaaunuuaggaaan

SEQ ID NO: 136251 - RNA, 24 nt, Artificial Sequence
  Synthetic
  misc_feature (3)..(3): n is a, c, g, or u
  misc_feature (15)..(15): n is a, c, g, or u
  misc_feature (24)..(24): n is a, c, g, or u
ucnuguaaaugaaunuuaggaaan

SEQ ID NO: 136252 - RNA, 18 nt, Artificial Sequence
  Synthetic
  misc_feature (5)..(6): n is a, c, g, or u
  misc_feature (9)..(9): n is a, c, g, or u
  misc_feature (18)..(18): n is a, c, g, or u
auuannuancccaugaan

SEQ ID NO: 136253 - RNA, 19 nt, Artificial Sequence
  Synthetic
  misc_feature (6)..(7): n is a, c, g, or u
  misc_feature (10)..(10): n is a, c, g, or u
  misc_feature (19)..(19): n is a, c, g, or u
aauuannuancccaugaan

SEQ ID NO: 136254 - RNA, 20 nt, Artificial Sequence
  Synthetic
  misc_feature (7)..(8): n is a, c, g, or u
  misc_feature (11)..(11): n is a, c, g, or u
  misc_feature (20)..(20): n is a, c, g, or u
caauuannuancccaugaan

SEQ ID NO: 136255 - RNA, 21 nt, Artificial Sequence
  Synthetic
  misc_feature (8)..(9): n is a, c, g, or u
  misc_feature (12)..(12): n is a, c, g, or u
  misc_feature (21)..(21): n is a, c, g, or u
ccaauuannuancccaugaan

SEQ ID NO: 136256 - RNA, 22 nt, Artificial Sequence
  Synthetic
  misc_feature (9)..(10): n is a, c, g, or u
  misc_feature (13)..(13): n is a, c, g, or u
  misc_feature (22)..(22): n is a, c, g, or u
uccaauuannuancccaugaan

SEQ ID NO: 136257 - RNA, 23 nt, Artificial Sequence
  Synthetic
  misc_feature (10)..(11): n is a, c, g, or u
  misc_feature (14)..(14): n is a, c, g, or u
  misc_feature (23)..(23): n is a, c, g, or u
uuccaauuannuancccaugaan

SEQ ID NO: 136258 - RNA, 24 nt, Artificial Sequence
  Synthetic
  misc_feature (11)..(12): n is a, c, g, or u
  misc_feature (15)..(15): n is a, c, g, or u
  misc_feature (24)..(24): n is a, c, g, or u
cuuccaauuannuancccaugaan

SEQ ID NO: 136259 - RNA, 18 nt, Artificial Sequence
  Synthetic
  misc_feature (18)..(18): n is a, c, g, or u
cagcuuggaggcuugaan

SEQ ID NO: 136260 - RNA, 19 nt, Artificial Sequence
  Synthetic
  misc_feature (19)..(19): n is a, c, g, or u
acagcuuggaggcuugaan

SEQ ID NO: 136261 - RNA, 20 nt, Artificial Sequence
  Synthetic
  misc_feature (20)..(20): n is a, c, g, or u
cacagcuuggaggcuugaan

SEQ ID NO: 136262 - RNA, 21 nt, Artificial Sequence
  Synthetic
  misc_feature (21)..(21): n is a, c, g, or u
gcacagcuuggaggcuugaan

SEQ ID NO: 136263 - RNA, 22 nt, Artificial Sequence
  Synthetic
  misc_feature (22)..(22): n is a, c, g, or u
ggcacagcuuggaggcuugaan

SEQ ID NO: 136264 - RNA, 23 nt, Artificial Sequence
  Synthetic
  misc_feature (23)..(23): n is a, c, g, or u
aggcacagcuuggaggcuugaan

SEQ ID NO: 136265 - RNA, 24 nt, Artificial Sequence
  Synthetic
  misc_feature (24)..(24): n is a, c, g, or u
aaggcacagcuuggaggcuugaan

SEQ ID NO: 136266 - RNA, 18 nt, Artificial Sequence
  Synthetic
  misc_feature (18)..(18): n is a, c, g, or u
gcauacaaaggcauuaan

SEQ ID NO: 136267 - RNA, 19 nt, Artificial Sequence
  Synthetic
  misc_feature (19)..(19): n is a, c, g, or u
ugcauacaaaggcauuaan

SEQ ID NO: 136268 - RNA, 20 nt, Artificial Sequence
  Synthetic
  misc_feature (20)..(20): n is a, c, g, or u
augcauacaaaggcauuaan

SEQ ID NO: 136269 - RNA, 21 nt, Artificial Sequence
  Synthetic
  misc_feature (21)..(21): n is a, c, g, or u
caugcauacaaaggcauuaan

SEQ ID NO: 136270 - RNA, 22 nt, Artificial Sequence
  Synthetic
  misc_feature (22)..(22): n is a, c, g, or u
acaugcauacaaaggcauuaan

SEQ ID NO: 136271 - RNA, 23 nt, Artificial Sequence
  Synthetic
  misc_feature (23)..(23): n is a, c, g, or u
uacaugcauacaaaggcauuaan

SEQ ID NO: 136272 - RNA, 24 nt, Artificial Sequence
  Synthetic
  misc_feature (24)..(24): n is a, c, g, or u
auacaugcauacaaaggcauuaan

SEQ ID NO: 136273 - RNA, 18 nt, Artificial Sequence
  Synthetic
  misc_feature (18)..(18): n is a, c, g, or u
auccaguuggcaguacan

SEQ ID NO: 136274 - RNA, 19 nt, Artificial Sequence
  Synthetic
  misc_feature (1)..(1): n is a, c, g, or u
  misc_feature (19)..(19): n is a, c, g, or u
nauccaguuggcaguacan

SEQ ID NO: 136275 - RNA, 20 nt, Artificial Sequence
  Synthetic
  misc_feature (2)..(2): n is a, c, g, or u
  misc_feature (20)..(20): n is a, c, g, or u
gnauccaguuggcaguacan

SEQ ID NO: 136276 - RNA, 21 nt, Artificial Sequence
  Synthetic
  misc_feature (3)..(3): n is a, c, g, or u
  misc_feature (21)..(21): n is a, c, g, or u
agnauccaguuggcaguacan

SEQ ID NO: 136277 - RNA, 22 nt, Artificial Sequence
  Synthetic
  misc_feature (4)..(4): n is a, c, g, or u
  misc_feature (22)..(22): n is a, c, g, or u
aagnauccaguuggcaguacan

SEQ ID NO: 136278 - RNA, 23 nt, Artificial Sequence
  Synthetic
  misc_feature (5)..(5): n is a, c, g, or u
  misc_feature (23)..(23): n is a, c, g, or u
gaagnauccaguuggcaguacan

SEQ ID NO: 136279 - RNA, 24 nt, Artificial Sequence
  Synthetic
  misc_feature (6)..(6): n is a, c, g, or u
  misc_feature (24)..(24): n is a, c, g, or u
cgaagnauccaguuggcaguacan

SEQ ID NO: 136280 - RNA, 18 nt, Artificial Sequence
  Synthetic
  misc_feature (18)..(18): n is a, c, g, or u
uccaugccccaaagccan

SEQ ID NO: 136281 - RNA, 19 nt, Artificial Sequence
  Synthetic
  misc_feature (19)..(19): n is a, c, g, or u
guccaugccccaaagccan

SEQ ID NO: 136282 - RNA, 20 nt, Artificial Sequence
  Synthetic
  misc_feature (20)..(20): n is a, c, g, or u
uguccaugccccaaagccan

SEQ ID NO: 136283 - RNA, 21 nt, Artificial Sequence
  Synthetic
  misc_feature (21)..(21): n is a, c, g, or u
auguccaugccccaaagccan

SEQ ID NO: 136284 - RNA, 22 nt, Artificial Sequence
  Synthetic
  misc_feature (22)..(22): n is a, c, g, or u
aauguccaugccccaaagccan

SEQ ID NO: 136285 - RNA, 23 nt, Artificial Sequence
  Synthetic
  misc_feature (23)..(23): n is a, c, g, or u
caauguccaugccccaaagccan

SEQ ID NO: 136286 - RNA, 24 nt, Artificial Sequence
  Synthetic
  misc_feature (24)..(24): n is a, c, g, or u
ucaauguccaugccccaaagccan

SEQ ID NO: 136287 - RNA, 18 nt, Artificial Sequence
  Synthetic
  misc_feature (18)..(18): n is a, c, g, or u
acuaguaaacugagccan

SEQ ID NO: 136288 - RNA, 19 nt, Artificial Sequence
  Synthetic
  misc_feature (19)..(19): n is a, c, g, or u
cacuaguaaacugagccan

SEQ ID NO: 136289 - RNA, 20 nt, Artificial Sequence
  Synthetic
  misc_feature (20)..(20): n is a, c, g, or u
gcacuaguaaacugagccan

SEQ ID NO: 136290 - RNA, 21 nt, Artificial Sequence
  Synthetic
  misc_feature (21)..(21): n is a, c, g, or u
ggcacuaguaaacugagccan

SEQ ID NO: 136291 - RNA, 22 nt, Artificial Sequence
  Synthetic
  misc_feature (22)..(22): n is a, c, g, or u
uggcacuaguaaacugagccan

SEQ ID NO: 136292 - RNA, 23 nt, Artificial Sequence
  Synthetic
  misc_feature (23)..(23): n is a, c, g, or u
auggcacuaguaaacugagccan

SEQ ID NO: 136293 - RNA, 24 nt, Artificial Sequence
  Synthetic
  misc_feature (24)..(24): n is a, c, g, or u
aauggcacuaguaaacugagccan

SEQ ID NO: 136294 - RNA, 18 nt, Artificial Sequence
  Synthetic
  misc_feature (15)..(15): n is a, c, g, or u
  misc_feature (18)..(18): n is a, c, g, or u
uuugcgaaagcccangan

SEQ ID NO: 136295 - RNA, 19 nt, Artificial Sequence
  Synthetic
  misc_feature (16)..(16): n is a, c, g, or u
  misc_feature (19)..(19): n is a, c, g, or u
uuuugcgaaagcccangan

SEQ ID NO: 136296 - RNA, 20 nt, Artificial Sequence
  Synthetic
  misc_feature (17)..(17): n is a, c, g, or u
  misc_feature (20)..(20): n is a, c, g, or u
auuuugcgaaagcccangan

SEQ ID NO: 136297 - RNA, 21 nt, Artificial Sequence
  Synthetic
  misc_feature (18)..(18): n is a, c, g, or u
  misc_feature (21)..(21): n is a, c, g, or u
uauuuugcgaaagcccangan

SEQ ID NO: 136298 - RNA, 22 nt, Artificial Sequence
  Synthetic
  misc_feature (19)..(19): n is a, c, g, or u
  misc_feature (22)..(22): n is a, c, g, or u
guauuuugcgaaagcccangan

SEQ ID NO: 136299 - RNA, 23 nt, Artificial Sequence
  Synthetic
  misc_feature (20)..(20): n is a, c, g, or u
  misc_feature (23)..(23): n is a, c, g, or u
gguauuuugcgaaagcccangan

SEQ ID NO: 136300 - RNA, 24 nt, Artificial Sequence
  Synthetic
  misc_feature (21)..(21): n is a, c, g, or u
  misc_feature (24)..(24): n is a, c, g, or u
agguauuuugcgaaagcccangan

SEQ ID NO: 136301 - RNA, 18 nt, Artificial Sequence
  Synthetic
  misc_feature (18)..(18): n is a, c, g, or u
ccgaaagagaccaaauan

SEQ ID NO: 136302 - RNA, 19 nt, Artificial Sequence
  Synthetic
  misc_feature (19)..(19): n is a, c, g, or u
uccgaaagagaccaaauan

SEQ ID NO: 136303 - RNA, 20 nt, Artificial Sequence
  Synthetic
  misc_feature (20)..(20): n is a, c, g, or u
cuccgaaagagaccaaauan

SEQ ID NO: 136304 - RNA, 21 nt, Artificial Sequence
  Synthetic
  misc_feature (21)..(21): n is a, c, g, or u
acuccgaaagagaccaaauan

SEQ ID NO: 136305 - RNA, 22 nt, Artificial Sequence
  Synthetic
  misc_feature (22)..(22): n is a, c, g, or u
cacuccgaaagagaccaaauan

SEQ ID NO: 136306 - RNA, 23 nt, Artificial Sequence
  Synthetic
  misc_feature (23)..(23): n is a, c, g, or u
acacuccgaaagagaccaaauan

SEQ ID NO: 136307 - RNA, 24 nt, Artificial Sequence
  Synthetic
  misc_feature (24)..(24): n is a, c, g, or u
cacacuccgaaagagaccaaauan

SEQ ID NO: 136308 - RNA, 18 nt, Artificial Sequence
  Synthetic
  misc_feature (18)..(18): n is a, c, g, or u
accacaucauccauauan

SEQ ID NO: 136309 - RNA, 19 nt, Artificial Sequence
  Synthetic
  misc_feature (19)..(19): n is a, c, g, or u
uaccacaucauccauauan

SEQ ID NO: 136310 - RNA, 20 nt, Artificial Sequence
  Synthetic
  misc_feature (20)..(20): n is a, c, g, or u
auaccacaucauccauauan

SEQ ID NO: 136311 - RNA, 21 nt, Artificial Sequence
  Synthetic
  misc_feature (21)..(21): n is a, c, g, or u
aauaccacaucauccauauan

SEQ ID NO: 136312 - RNA, 22 nt, Artificial Sequence
  Synthetic
  misc_feature (22)..(22): n is a, c, g, or u
caauaccacaucauccauauan

SEQ ID NO: 136313 - RNA, 23 nt, Artificial Sequence
  Synthetic
  misc_feature (23)..(23): n is a, c, g, or u
ccaauaccacaucauccauauan

SEQ ID NO: 136314 - RNA, 24 nt, Artificial Sequence
  Synthetic
  misc_feature (24)..(24): n is a, c, g, or u
cccaauaccacaucauccauauan

SEQ ID NO: 136315 - RNA, 18 nt, Artificial Sequence
  Synthetic
  misc_feature (15)..(15): n is a, c, g, or u
  misc_feature (18)..(18): n is a, c, g, or u
ggauuaaagauaggnacn

SEQ ID NO: 136316 - RNA, 19 nt, Artificial Sequence
  Synthetic
  misc_feature (16)..(16): n is a, c, g, or u
  misc_feature (19)..(19): n is a, c, g, or u
aggauuaaagauaggnacn

SEQ ID NO: 136317 - RNA, 20 nt, Artificial Sequence
  Synthetic
  misc_feature (17)..(17): n is a, c, g, or u
  misc_feature (20)..(20): n is a, c, g, or u
caggauuaaagauaggnacn

SEQ ID NO: 136318 - RNA, 21 nt, Artificial Sequence
  Synthetic
  misc_feature (18)..(18): n is a, c, g, or u
  misc_feature (21)..(21): n is a, c, g, or u
ucaggauuaaagauaggnacn

SEQ ID NO: 136319 - RNA, 22 nt, Artificial Sequence
  Synthetic
  misc_feature (19)..(19): n is a, c, g, or u
  misc_feature (22)..(22): n is a, c, g, or u
uucaggauuaaagauaggnacn

SEQ ID NO: 136320 - RNA, 23 nt, Artificial Sequence
  Synthetic
  misc_feature (20)..(20): n is a, c, g, or u
  misc_feature (23)..(23): n is a, c, g, or u
auucaggauuaaagauaggnacn

SEQ ID NO: 136321 - RNA, 24 nt, Artificial Sequence
  Synthetic
  misc_feature (21)..(21): n is a, c, g, or u
  misc_feature (24)..(24): n is a, c, g, or u
cauucaggauuaaagauaggnacn

SEQ ID NO: 136322 - RNA, 18 nt, Artificial Sequence
  Synthetic
  misc_feature (6)..(6): n is a, c, g, or u
  misc_feature (18)..(18): n is a, c, g, or u
guagangaauaaagcccn

SEQ ID NO: 136323 - RNA, 19 nt, Artificial Sequence
  Synthetic
  misc_feature (1)..(1): n is a, c, g, or u
  misc_feature (7)..(7): n is a, c, g, or u
  misc_feature (19)..(19): n is a, c, g, or u
nguagangaauaaagcccn

SEQ ID NO: 136324 - RNA, 20 nt, Artificial Sequence
  Synthetic
  misc_feature (2)..(2): n is a, c, g, or u
  misc_feature (8)..(8): n is a, c, g, or u
  misc_feature (20)..(20): n is a, c, g, or u
cnguagangaauaaagcccn

SEQ ID NO: 136325 - RNA, 21 nt, Artificial Sequence
  Synthetic
  misc_feature (3)..(3): n is a, c, g, or u
  misc_feature (9)..(9): n is a, c, g, or u
  misc_feature (21)..(21): n is a, c, g, or u
acnguagangaauaaagcccn

SEQ ID NO: 136326 - RNA, 22 nt, Artificial Sequence
  Synthetic
  misc_feature (1)..(1): n is a, c, g, or u
  misc_feature (4)..(4): n is a, c, g, or u
  misc_feature (10)..(10): n is a, c, g, or u
  misc_feature (22)..(22): n is a, c, g, or u
nacnguagangaauaaagcccn

SEQ ID NO: 136327 - RNA, 23 nt, Artificial Sequence
  Synthetic
  misc_feature (2)..(2): n is a, c, g, or u
  misc_feature (5)..(5): n is a, c, g, or u
  misc_feature (11)..(11): n is a, c, g, or u
  misc_feature (23)..(23): n is a, c, g, or u
gnacnguagangaauaaagcccn

SEQ ID NO: 136328 - RNA, 24 nt, Artificial Sequence
  Synthetic
  misc_feature (3)..(3): n is a, c, g, or u
  misc_feature (6)..(6): n is a, c, g, or u
  misc_feature (12)..(12): n is a, c, g, or u
  misc_feature (24)..(24): n is a, c, g, or u
ggnacnguagangaauaaagcccn

SEQ ID NO: 136329 - RNA, 18 nt, Artificial Sequence
  Synthetic
  misc_feature (9)..(9): n is a, c, g, or u
  misc_feature (15)..(15): n is a, c, g, or u
  misc_feature (18)..(18): n is a, c, g, or u
acagaauunucagunccn

SEQ ID NO: 136330 - RNA, 19 nt, Artificial Sequence
  Synthetic
  misc_feature (10)..(10): n is a, c, g, or u
  misc_feature (16)..(16): n is a, c, g, or u
  misc_feature (19)..(19): n is a, c, g, or u
gacagaauunucagunccn

SEQ ID NO: 136331 - RNA, 20 nt, Artificial Sequence
  Synthetic
  misc_feature (11)..(11): n is a, c, g, or u
  misc_feature (17)..(17): n is a, c, g, or u
  misc_feature (20)..(20): n is a, c, g, or u
cgacagaauunucagunccn

SEQ ID NO: 136332 - RNA, 21 nt, Artificial Sequence
  Synthetic
  misc_feature (12)..(12): n is a, c, g, or u
  misc_feature (18)..(18): n is a, c, g, or u
  misc_feature (21)..(21): n is a, c, g, or u
acgacagaauunucagunccn

SEQ ID NO: 136333 - RNA, 22 nt, Artificial Sequence
  Synthetic
  misc_feature (13)..(13): n is a, c, g, or u
  misc_feature (19)..(19): n is a, c, g, or u
  misc_feature (22)..(22): n is a, c, g, or u
gacgacagaauunucagunccn

SEQ ID NO: 136334 - RNA, 23 nt, Artificial Sequence
  Synthetic
  misc_feature (14)..(14): n is a, c, g, or u
  misc_feature (20)..(20): n is a, c, g, or u
  misc_feature (23)..(23): n is a, c, g, or u
ggacgacagaauunucagunccn

SEQ ID NO: 136335 - RNA, 24 nt, Artificial Sequence
  Synthetic
  misc_feature (15)..(15): n is a, c, g, or u
  misc_feature (21)..(21): n is a, c, g, or u
  misc_feature (24)..(24): n is a, c, g, or u
aggacgacagaauunucagunccn

SEQ ID NO: 136336 - RNA, 18 nt, Artificial Sequence
  Synthetic
  misc_feature (18)..(18): n is a, c, g, or u
cauuguguaaauggagcn

SEQ ID NO: 136337 - RNA, 19 nt, Artificial Sequence
  Synthetic
  misc_feature (19)..(19): n is a, c, g, or u
acauuguguaaauggagcn

SEQ ID NO: 136338 - RNA, 20 nt, Artificial Sequence
  Synthetic
  misc_feature (20)..(20): n is a, c, g, or u
cacauuguguaaauggagcn

SEQ ID NO: 136339 - RNA, 21 nt, Artificial Sequence
  Synthetic
  misc_feature (21)..(21): n is a, c, g, or u
ccacauuguguaaauggagcn

SEQ ID NO: 136340 - RNA, 22 nt, Artificial Sequence
  Synthetic
  misc_feature (1)..(1): n is a, c, g, or u
  misc_feature (22)..(22): n is a, c, g, or u
nccacauuguguaaauggagcn

SEQ ID NO: 136341 - RNA, 23 nt, Artificial Sequence
  Synthetic
  misc_feature (2)..(2): n is a, c, g, or u
  misc_feature (23)..(23): n is a, c, g, or u
anccacauuguguaaauggagcn

SEQ ID NO: 136342 - RNA, 24 nt, Artificial Sequence
  Synthetic
  misc_feature (3)..(3): n is a, c, g, or u
  misc_feature (24)..(24): n is a, c, g, or u
uanccacauuguguaaauggagcn

SEQ ID NO: 136343 - RNA, 18 nt, Artificial Sequence
  Synthetic
  misc_feature (15)..(15): n is a, c, g, or u
  misc_feature (18)..(18): n is a, c, g, or u
agagcuugguggaangcn

SEQ ID NO: 136344 - RNA, 19 nt, Artificial Sequence
  Synthetic
  misc_feature (16)..(16): n is a, c, g, or u
  misc_feature (19)..(19): n is a, c, g, or u
cagagcuugguggaangcn

SEQ ID NO: 136345 - RNA, 20 nt, Artificial Sequence
  Synthetic
  misc_feature (17)..(17): n is a, c, g, or u
  misc_feature (20)..(20): n is a, c, g, or u
gcagagcuugguggaangcn

SEQ ID NO: 136346 - RNA, 21 nt, Artificial Sequence
  Synthetic
  misc_feature (18)..(18): n is a, c, g, or u
  misc_feature (21)..(21): n is a, c, g, or u
ugcagagcuugguggaangcn

SEQ ID NO: 136347 - RNA, 22 nt, Artificial Sequence
  Synthetic
  misc_feature (1)..(1): n is a, c, g, or u
  misc_feature (19)..(19): n is a, c, g, or u
  misc_feature (22)..(22): n is a, c, g, or u
nugcagagcuugguggaangcn

SEQ ID NO: 136348 - RNA, 23 nt, Artificial Sequence
  Synthetic
  misc_feature (2)..(2): n is a, c, g, or u
  misc_feature (20)..(20): n is a, c, g, or u
  misc_feature (23)..(23): n is a, c, g, or u
cnugcagagcuugguggaangcn

SEQ ID NO: 136349 - RNA, 24 nt, Artificial Sequence
  Synthetic
  misc_feature (3)..(3): n is a, c, g, or u
  misc_feature (21)..(21): n is a, c, g, or u
  misc_feature (24)..(24): n is a, c, g, or u
ucnugcagagcuugguggaangcn

SEQ ID NO: 136350 - RNA, 18 nt, Artificial Sequence
  Synthetic
  misc_feature (1)..(1): n is a, c, g, or u
  misc_feature (4)..(4): n is a, c, g, or u
  misc_feature (7)..(7): n is a, c, g, or u
  misc_feature (10)..(10): n is a, c, g, or u
  misc_feature (16)..(16): n is a, c, g, or u
  misc_feature (18)..(18): n is a, c, g, or u
ngunucnagnagaucncn

SEQ ID NO: 136351 - RNA, 19 nt, Artificial Sequence
  Synthetic
  misc_feature (2)..(2): n is a, c, g, or u
  misc_feature (5)..(5): n is a, c, g, or u
  misc_feature (8)..(8): n is a, c, g, or u
  misc_feature (11)..(11): n is a, c, g, or u
  misc_feature (17)..(17): n is a, c, g, or u
  misc_feature (19)..(19): n is a, c, g, or u
cngunucnagnagaucncn

SEQ ID NO: 136352 - RNA, 20 nt, Artificial Sequence
  Synthetic
  misc_feature (3)..(3): n is a, c, g, or u
  misc_feature (6)..(6): n is a, c, g, or u
  misc_feature (9)..(9): n is a, c, g, or u
  misc_feature (12)..(12): n is a, c, g, or u
  misc_feature (18)..(18): n is a, c, g, or u
  misc_feature (20)..(20): n is a, c, g, or u
gcngunucnagnagaucncn

SEQ ID NO: 136353 - RNA, 21 nt, Artificial Sequence
  Synthetic
  misc_feature (4)..(4): n is a, c, g, or u
  misc_feature (7)..(7): n is a, c, g, or u
  misc_feature (10)..(10): n is a, c, g, or u
  misc_feature (13)..(13): n is a, c, g, or u
  misc_feature (19)..(19): n is a, c, g, or u
  misc_feature (21)..(21): n is a, c, g, or u
ggcngunucnagnagaucncn

SEQ ID NO: 136354 - RNA, 22 nt, Artificial Sequence
  Synthetic
  misc_feature (5)..(5): n is a, c, g, or u
  misc_feature (8)..(8): n is a, c, g, or u
  misc_feature (11)..(11): n is a, c, g, or u
  misc_feature (14)..(14): n is a, c, g, or u
  misc_feature (20)..(20): n is a, c, g, or u
  misc_feature (22)..(22): n is a, c, g, or u
aggcngunucnagnagaucncn

SEQ ID NO: 136355 - RNA, 23 nt, Artificial Sequence
  Synthetic
  misc_feature (6)..(6): n is a, c, g, or u
  misc_feature (9)..(9): n is a, c, g, or u
  misc_feature (12)..(12): n is a, c, g, or u
  misc_feature (15)..(15): n is a, c, g, or u
  misc_feature (21)..(21): n is a, c, g, or u
  misc_feature (23)..(23): n is a, c, g, or u
gaggcngunucnagnagaucncn

SEQ ID NO: 136356 - RNA, 24 nt, Artificial Sequence
  Synthetic
  misc_feature (7)..(7): n is a, c, g, or u
  misc_feature (10)..(10): n is a, c, g, or u
  misc_feature (13)..(13): n is a, c, g, or u
  misc_feature (16)..(16): n is a, c, g, or u
  misc_feature (22)..(22): n is a, c, g, or u
  misc_feature (24)..(24): n is a, c, g, or u
ugaggcngunucnagnagaucncn

SEQ ID NO: 136357 - RNA, 18 nt, Artificial Sequence
  Synthetic
  misc_feature (18)..(18): n is a, c, g, or u
ccccugacucugggaucn

SEQ ID NO: 136358 - RNA, 19 nt, Artificial Sequence
  Synthetic
  misc_feature (1)..(1): n is a, c, g, or u
  misc_feature (19)..(19): n is a, c, g, or u
nccccugacucugggaucn

SEQ ID NO: 136359 - RNA, 20 nt, Artificial Sequence
  Synthetic
  misc_feature (2)..(2): n is a, c, g, or u
  misc_feature (20)..(20): n is a, c, g, or u
gnccccugacucugggaucn

SEQ ID NO: 136360 - RNA, 21 nt, Artificial Sequence
  Synthetic
  misc_feature (3)..(3): n is a, c, g, or u
  misc_feature (21)..(21): n is a, c, g, or u
agnccccugacucugggaucn

SEQ ID NO: 136361 - RNA, 22 nt, Artificial Sequence
  Synthetic
  misc_feature (4)..(4): n is a, c, g, or u
  misc_feature (22)..(22): n is a, c, g, or u
cagnccccugacucugggaucn

SEQ ID NO: 136362 - RNA, 23 nt, Artificial Sequence
  Synthetic
  misc_feature (5)..(5): n is a, c, g, or u
  misc_feature (23)..(23): n is a, c, g, or u
acagnccccugacucugggaucn

SEQ ID NO: 136363 - RNA, 24 nt, Artificial Sequence
  Synthetic
  misc_feature (6)..(6): n is a, c, g, or u
  misc_feature (24)..(24): n is a, c, g, or u
uacagnccccugacucugggaucn

SEQ ID NO: 136364 - RNA, 18 nt, Artificial Sequence
  Synthetic
  misc_feature (18)..(18): n is a, c, g, or u
uuuuguacaauaugaucn

SEQ ID NO: 136365 - RNA, 19 nt, Artificial Sequence
  Synthetic
  misc_feature (1)..(1): n is a, c, g, or u
  misc_feature (19)..(19): n is a, c, g, or u
nuuuuguacaauaugaucn

SEQ ID NO: 136366 - RNA, 20 nt, Artificial Sequence
  Synthetic
  misc_feature (2)..(2): n is a, c, g, or u
  misc_feature (20)..(20): n is a, c, g, or u
unuuuuguacaauaugaucn

SEQ ID NO: 136367 - RNA, 21 nt, Artificial Sequence
  Synthetic
  misc_feature (3)..(3): n is a, c, g, or u
  misc_feature (21)..(21): n is a, c, g, or u
aunuuuuguacaauaugaucn

SEQ ID NO: 136368 - RNA, 22 nt, Artificial Sequence
  Synthetic
  misc_feature (4)..(4): n is a, c, g, or u
  misc_feature (22)..(22): n is a, c, g, or u
gaunuuuuguacaauaugaucn

SEQ ID NO: 136369 - RNA, 23 nt, Artificial Sequence
  Synthetic
  misc_feature (5)..(5): n is a, c, g, or u
  misc_feature (23)..(23): n is a, c, g, or u
ugaunuuuuguacaauaugaucn

SEQ ID NO: 136370 - RNA, 24 nt, Artificial Sequence
  Synthetic
  misc_feature (6)..(6): n is a, c, g, or u
  misc_feature (24)..(24): n is a, c, g, or u
uugaunuuuuguacaauaugaucn

SEQ ID NO: 136371 - RNA, 18 nt, Artificial Sequence
  Synthetic
  misc_feature (5)..(5): n is a, c, g, or u
  misc_feature (18)..(18): n is a, c, g, or u
cccancuccucccagucn

SEQ ID NO: 136372 - RNA, 19 nt, Artificial Sequence
  Synthetic
  misc_feature (6)..(6): n is a, c, g, or u
  misc_feature (19)..(19): n is a, c, g, or u
ccccancuccucccagucn

SEQ ID NO: 136373 - RNA, 20 nt, Artificial Sequence
  Synthetic
  misc_feature (7)..(7): n is a, c, g, or u
  misc_feature (20)..(20): n is a, c, g, or u
cccccancuccucccagucn

SEQ ID NO: 136374 - RNA, 21 nt, Artificial Sequence
  Synthetic
  misc_feature (8)..(8): n is a, c, g, or u
  misc_feature (21)..(21): n is a, c, g, or u
ucccccancuccucccagucn

SEQ ID NO: 136375 - RNA, 22 nt, Artificial Sequence
  Synthetic
  misc_feature (9)..(9): n is a, c, g, or u
  misc_feature (22)..(22): n is a, c, g, or u
cucccccancuccucccagucn

SEQ ID NO: 136376 - RNA, 23 nt, Artificial Sequence
  Synthetic
  misc_feature (10)..(10): n is a, c, g, or u
  misc_feature (23)..(23): n is a, c, g, or u
ccucccccancuccucccagucn

SEQ ID NO: 136377 - RNA, 24 nt, Artificial Sequence
  Synthetic
  misc_feature (11)..(11): n is a, c, g, or u
  misc_feature (24)..(24): n is a, c, g, or u
uccucccccancuccucccagucn

SEQ ID NO: 136378 - RNA, 18 nt, Artificial Sequence
  Synthetic
  misc_feature (15)..(15): n is a, c, g, or u
  misc_feature (18)..(18): n is a, c, g, or u
cuauuaauaaugucnucn

SEQ ID NO: 136379 - RNA, 19 nt, Artificial Sequence
  Synthetic
  misc_feature (16)..(16): n is a, c, g, or u
  misc_feature (19)..(19): n is a, c, g, or u
ccuauuaauaaugucnucn

SEQ ID NO: 136380 - RNA, 20 nt, Artificial Sequence
  Synthetic
  misc_feature (17)..(17): n is a, c, g, or u
  misc_feature (20)..(20): n is a, c, g, or u
accuauuaauaaugucnucn

SEQ ID NO: 136381 - RNA, 21 nt, Artificial Sequence
  Synthetic
  misc_feature (18)..(18): n is a, c, g, or u
  misc_feature (21)..(21): n is a, c, g, or u
caccuauuaauaaugucnucn

SEQ ID NO: 136382 - RNA, 22 nt, Artificial Sequence
  Synthetic
  misc_feature (19)..(19): n is a, c, g, or u
  misc_feature (22)..(22): n is a, c, g, or u
acaccuauuaauaaugucnucn

SEQ ID NO: 136383 - RNA, 23 nt, Artificial Sequence
  Synthetic
  misc_feature (20)..(20): n is a, c, g, or u
  misc_feature (23)..(23): n is a, c, g, or u
gacaccuauuaauaaugucnucn

SEQ ID NO: 136384 - RNA, 24 nt, Artificial Sequence
  Synthetic
  misc_feature (21)..(21): n is a, c, g, or u
  misc_feature (24)..(24): n is a, c, g, or u
ugacaccuauuaauaaugucnucn

SEQ ID NO: 136385 - RNA, 18 nt, Artificial Sequence
  Synthetic
  misc_feature (12)..(12): n is a, c, g, or u
  misc_feature (15)..(15): n is a, c, g, or u
  misc_feature (18)..(18): n is a, c, g, or u
agagcugaggcngunucn

SEQ ID NO: 136386 - RNA, 19 nt, Artificial Sequence
  Synthetic
  misc_feature (13)..(13): n is a, c, g, or u
  misc_feature (16)..(16): n is a, c, g, or u
  misc_feature (19)..(19): n is a, c, g, or u
cagagcugaggcngunucn

SEQ ID NO: 136387 - RNA, 20 nt, Artificial Sequence
  Synthetic
  misc_feature (14)..(14): n is a, c, g, or u
  misc_feature (17)..(17): n is a, c, g, or u
  misc_feature (20)..(20): n is a, c, g, or u
acagagcugaggcngunucn

SEQ ID NO: 136388 - RNA, 21 nt, Artificial Sequence
  Synthetic
  misc_feature (15)..(15): n is a, c, g, or u
  misc_feature (18)..(18): n is a, c, g, or u
  misc_feature (21)..(21): n is a, c, g, or u
uacagagcugaggcngunucn

SEQ ID NO: 136389 - RNA, 22 nt, Artificial Sequence
  Synthetic
  misc_feature (16)..(16): n is a, c, g, or u
  misc_feature (19)..(19): n is a, c, g, or u
  misc_feature (22)..(22): n is a, c, g, or u
auacagagcugaggcngunucn

SEQ ID NO: 136390 - RNA, 23 nt, Artificial Sequence
  Synthetic
  misc_feature (17)..(17): n is a, c, g, or u
  misc_feature (20)..(20): n is a, c, g, or u
  misc_feature (23)..(23): n is a, c, g, or u
gauacagagcugaggcngunucn

SEQ ID NO: 136391 - RNA, 24 nt, Artificial Sequence
  Synthetic
  misc_feature (18)..(18): n is a, c, g, or u
  misc_feature (21)..(21): n is a, c, g, or u
  misc_feature (24)..(24): n is a, c, g, or u
cgauacagagcugaggcngunucn

SEQ ID NO: 136392 - RNA, 18 nt, Artificial Sequence
  Synthetic
  misc_feature (18)..(18): n is a, c, g, or u
agucccaagcggccccgn

SEQ ID NO: 136393 - RNA, 19 nt, Artificial Sequence
  Synthetic
  misc_feature (19)..(19): n is a, c, g, or u
gagucccaagcggccccgn

SEQ ID NO: 136394 - RNA, 20 nt, Artificial Sequence
  Synthetic
  misc_feature (20)..(20): n is a, c, g, or u
agagucccaagcggccccgn

SEQ ID NO: 136395 - RNA, 21 nt, Artificial Sequence
  Synthetic
  misc_feature (1)..(1): n is a, c, g, or u
  misc_feature (21)..(21): n is a, c, g, or u
nagagucccaagcggccccgn

SEQ ID NO: 136396 - RNA, 22 nt, Artificial Sequence
  Synthetic
  misc_feature (2)..(2): n is a, c, g, or u
  misc_feature (22)..(22): n is a, c, g, or u
anagagucccaagcggccccgn

SEQ ID NO: 136397 - RNA, 23 nt, Artificial Sequence
  Synthetic
  misc_feature (3)..(3): n is a, c, g, or u
  misc_feature (23)..(23): n is a, c, g, or u
ganagagucccaagcggccccgn

SEQ ID NO: 136398 - RNA, 24 nt, Artificial Sequence
  Synthetic
  misc_feature (4)..(4): n is a, c, g, or u
  misc_feature (24)..(24): n is a, c, g, or u
cganagagucccaagcggccccgn

SEQ ID NO: 136399 - RNA, 18 nt, Artificial Sequence
  Synthetic
  misc_feature (3)..(3): n is a, c, g, or u
  misc_feature (18)..(18): n is a, c, g, or u
aangauguauauuuccgn

SEQ ID NO: 136400 - RNA, 19 nt, Artificial Sequence
  Synthetic
  misc_feature (4)..(4): n is a, c, g, or u
  misc_feature (19)..(19): n is a, c, g, or u
aaangauguauauuuccgn

SEQ ID NO: 136401 - RNA, 20 nt, Artificial Sequence
  Synthetic
  misc_feature (5)..(5): n is a, c, g, or u
  misc_feature (20)..(20): n is a, c, g, or u
gaaangauguauauuuccgn

SEQ ID NO: 136402 - RNA, 21 nt, Artificial Sequence
  Synthetic
  misc_feature (6)..(6): n is a, c, g, or u
  misc_feature (21)..(21): n is a, c, g, or u
ggaaangauguauauuuccgn

SEQ ID NO: 136403 - RNA, 22 nt, Artificial Sequence
  Synthetic
  misc_feature (7)..(7): n is a, c, g, or u
  misc_feature (22)..(22): n is a, c, g, or u
uggaaangauguauauuuccgn

SEQ ID NO: 136404 - RNA, 23 nt, Artificial Sequence
  Synthetic
  misc_feature (8)..(8): n is a, c, g, or u
  misc_feature (23)..(23): n is a, c, g, or u
auggaaangauguauauuuccgn

SEQ ID NO: 136405 - RNA, 24 nt, Artificial Sequence
  Synthetic
  misc_feature (9)..(9): n is a, c, g, or u
  misc_feature (24)..(24): n is a, c, g, or u
cauggaaangauguauauuuccgn

SEQ ID NO: 136406 - RNA, 18 nt, Artificial Sequence
  Synthetic
  misc_feature (18)..(18): n is a, c, g, or u
gauguucuccauguucgn

SEQ ID NO: 136407 - RNA, 19 nt, Artificial Sequence
  Synthetic
  misc_feature (19)..(19): n is a, c, g, or u
ugauguucuccauguucgn

SEQ ID NO: 136408 - RNA, 20 nt, Artificial Sequence
  Synthetic
  misc_feature (20)..(20): n is a, c, g, or u
gugauguucuccauguucgn

SEQ ID NO: 136409 - RNA, 21 nt, Artificial Sequence
  Synthetic
  misc_feature (21)..(21): n is a, c, g, or u
ugugauguucuccauguucgn

SEQ ID NO: 136410 - RNA, 22 nt, Artificial Sequence
  Synthetic
  misc_feature (22)..(22): n is a, c, g, or u
augugauguucuccauguucgn

SEQ ID NO: 136411 - RNA, 23 nt, Artificial Sequence
  Synthetic
  misc_feature (23)..(23): n is a, c, g, or u
gaugugauguucuccauguucgn

SEQ ID NO: 136412 - RNA, 24 nt, Artificial Sequence
  Synthetic
  misc_feature (24)..(24): n is a, c, g, or u
ugaugugauguucuccauguucgn

SEQ ID NO: 136413 - RNA, 18 nt, Artificial Sequence
  Synthetic
  misc_feature (18)..(18): n is a, c, g, or u
ggaaagaaucccagaggn

SEQ ID NO: 136414 - RNA, 19 nt, Artificial Sequence
  Synthetic
  misc_feature (19)..(19): n is a, c, g, or u
gggaaagaaucccagaggn

SEQ ID NO: 136415 - RNA, 20 nt, Artificial Sequence
  Synthetic
  misc_feature (20)..(20): n is a, c, g, or u
cgggaaagaaucccagaggn

SEQ ID NO: 136416 - RNA, 21 nt, Artificial Sequence
  Synthetic
  misc_feature (21)..(21): n is a, c, g, or u
ucgggaaagaaucccagaggn

SEQ ID NO: 136417 - RNA, 22 nt, Artificial Sequence
  Synthetic
  misc_feature (22)..(22): n is a, c, g, or u
aucgggaaagaaucccagaggn

SEQ ID NO: 136418 - RNA, 23 nt, Artificial Sequence
  Synthetic
  misc_feature (23)..(23): n is a, c, g, or u
gaucgggaaagaaucccagaggn

SEQ ID NO: 136419 - RNA, 24 nt, Artificial Sequence
  Synthetic
  misc_feature (24)..(24): n is a, c, g, or u
ugaucgggaaagaaucccagaggn

SEQ ID NO: 136420 - RNA, 18 nt, Artificial Sequence
  Synthetic
  misc_feature (6)..(6): n is a, c, g, or u
  misc_feature (18)..(18): n is a, c, g, or u
uugaanagugggacaugn

SEQ ID NO: 136421 - RNA, 19 nt, Artificial Sequence
  Synthetic
  misc_feature (7)..(7): n is a, c, g, or u
  misc_feature (19)..(19): n is a, c, g, or u
cuugaanagugggacaugn

SEQ ID NO: 136422 - RNA, 20 nt, Artificial Sequence
  Synthetic
  misc_feature (8)..(8): n is a, c, g, or u
  misc_feature (20)..(20): n is a, c, g, or u
gcuugaanagugggacaugn

SEQ ID NO: 136423 - RNA, 21 nt, Artificial Sequence
  Synthetic
  misc_feature (9)..(9): n is a, c, g, or u
  misc_feature (21)..(21): n is a, c, g, or u
ggcuugaanagugggacaugn

SEQ ID NO: 136424 - RNA, 22 nt, Artificial Sequence
  Synthetic
  misc_feature (10)..(10): n is a, c, g, or u
  misc_feature (22)..(22): n is a, c, g, or u
aggcuugaanagugggacaugn

SEQ ID NO: 136425 - RNA, 23 nt, Artificial Sequence
  Synthetic
  misc_feature (11)..(11): n is a, c, g, or u
  misc_feature (23)..(23): n is a, c, g, or u
gaggcuugaanagugggacaugn

SEQ ID NO: 136426 - RNA, 24 nt, Artificial Sequence
  Synthetic
  misc_feature (12)..(12): n is a, c, g, or u
  misc_feature (24)..(24): n is a, c, g, or u
ggaggcuugaanagugggacaugn

SEQ ID NO: 136427 - RNA, 18 nt, Artificial Sequence
  Synthetic
  misc_feature (18)..(18): n is a, c, g, or u
augaccaaccucccaugn

SEQ ID NO: 136428 - RNA, 19 nt, Artificial Sequence
  Synthetic
  misc_feature (19)..(19): n is a, c, g, or u
gaugaccaaccucccaugn

SEQ ID NO: 136429 - RNA, 20 nt, Artificial Sequence
  Synthetic
  misc_feature (20)..(20): n is a, c, g, or u
ugaugaccaaccucccaugn

SEQ ID NO: 136430 - RNA, 21 nt, Artificial Sequence
  Synthetic
  misc_feature (21)..(21): n is a, c, g, or u
uugaugaccaaccucccaugn

SEQ ID NO: 136431 - RNA, 22 nt, Artificial Sequence
  Synthetic
  misc_feature (22)..(22): n is a, c, g, or u
uuugaugaccaaccucccaugn

SEQ ID NO: 136432 - RNA, 23 nt, Artificial Sequence
  Synthetic
  misc_feature (23)..(23): n is a, c, g, or u
uuuugaugaccaaccucccaugn

SEQ ID NO: 136433 - RNA, 24 nt, Artificial Sequence
  Synthetic
  misc_feature (24)..(24): n is a, c, g, or u
guuuugaugaccaaccucccaugn

SEQ ID NO: 136434 - RNA, 18 nt, Artificial Sequence
  Synthetic
  misc_feature (6)..(6): n is a, c, g, or u
  misc_feature (17)..(18): n is a, c, g, or u
uuaaunccuuugucuann

SEQ ID NO: 136435 - RNA, 19 nt, Artificial Sequence
  Synthetic
  misc_feature (7)..(7): n is a, c, g, or u
  misc_feature (18)..(19): n is a, c, g, or u
uuuaaunccuuugucuann

SEQ ID NO: 136436 - RNA, 20 nt, Artificial Sequence
  Synthetic
  misc_feature (8)..(8): n is a, c, g, or u
  misc_feature (19)..(20): n is a, c, g, or u
guuuaaunccuuugucuann

SEQ ID NO: 136437 - RNA, 21 nt, Artificial Sequence
  Synthetic
  misc_feature (9)..(9): n is a, c, g, or u
  misc_feature (20)..(21): n is a, c, g, or u
gguuuaaunccuuugucuann

SEQ ID NO: 136438 - RNA, 22 nt, Artificial Sequence
  Synthetic
  misc_feature (10)..(10): n is a, c, g, or u
  misc_feature (21)..(22): n is a, c, g, or u
agguuuaaunccuuugucuann

SEQ ID NO: 136439 - RNA, 23 nt, Artificial Sequence
  Synthetic
  misc_feature (11)..(11): n is a, c, g, or u
  misc_feature (22)..(23): n is a, c, g, or u
aagguuuaaunccuuugucuann

SEQ ID NO: 136440 - RNA, 24 nt, Artificial Sequence
  Synthetic
  misc_feature (12)..(12): n is a, c, g, or u
  misc_feature (23)..(24): n is a, c, g, or u
uaagguuuaaunccuuugucuann

SEQ ID NO: 136441 - RNA, 18 nt, Artificial Sequence
  Synthetic
  misc_feature (1)..(1): n is a, c, g, or u
  misc_feature (4)..(4): n is a, c, g, or u
  misc_feature (17)..(18): n is a, c, g, or u
nggnaaauauuuagugnn

SEQ ID NO: 136442 - RNA, 19 nt, Artificial Sequence
  Synthetic
  misc_feature (1)..(2): n is a, c, g, or u
  misc_feature (5)..(5): n is a, c, g, or u
  misc_feature (18)..(19): n is a, c, g, or u
nnggnaaauauuuagugnn

SEQ ID NO: 136443 - RNA, 20 nt, Artificial Sequence
  Synthetic
  misc_feature (2)..(3): n is a, c, g, or u
  misc_feature (6)..(6): n is a, c, g, or u
  misc_feature (19)..(20): n is a, c, g, or u
annggnaaauauuuagugnn

SEQ ID NO: 136444 - RNA, 21 nt, Artificial Sequence
  Synthetic
  misc_feature (3)..(4): n is a, c, g, or u
  misc_feature (7)..(7): n is a, c, g, or u
  misc_feature (20)..(21): n is a, c, g, or u
uannggnaaauauuuagugnn

SEQ ID NO: 136445 - RNA, 22 nt, Artificial Sequence
  Synthetic
  misc_feature (4)..(5): n is a, c, g, or u
  misc_feature (8)..(8): n is a, c, g, or u
  misc_feature (21)..(22): n is a, c, g, or u
cuannggnaaauauuuagugnn

SEQ ID NO: 136446 - RNA, 23 nt, Artificial Sequence
  Synthetic
  misc_feature (5)..(6): n is a, c, g, or u
  misc_feature (9)..(9): n is a, c, g, or u
  misc_feature (22)..(23): n is a, c, g, or u
ucuannggnaaauauuuagugnn

SEQ ID NO: 136447 - RNA, 24 nt, Artificial Sequence
  Synthetic
  misc_feature (6)..(7): n is a, c, g, or u
  misc_feature (10)..(10): n is a, c, g, or u
  misc_feature (23)..(24): n is a, c, g, or u
gucuannggnaaauauuuagugnn

SEQ ID NO: 136448 - RNA, 18 nt, Artificial Sequence
  Synthetic
  misc_feature (3)..(3): n is a, c, g, or u
  misc_feature (6)..(6): n is a, c, g, or u
  misc_feature (18)..(18): n is a, c, g, or u
ucnucnuguaaaugaaun

SEQ ID NO: 136449 - RNA, 19 nt, Artificial Sequence
  Synthetic
  misc_feature (4)..(4): n is a, c, g, or u
  misc_feature (7)..(7): n is a, c, g, or u
  misc_feature (19)..(19): n is a, c, g, or u
gucnucnuguaaaugaaun

SEQ ID NO: 136450 - RNA, 20 nt, Artificial Sequence
  Synthetic
  misc_feature (5)..(5): n is a, c, g, or u
  misc_feature (8)..(8): n is a, c, g, or u
  misc_feature (20)..(20): n is a, c, g, or u
ugucnucnuguaaaugaaun

SEQ ID NO: 136451 - RNA, 21 nt, Artificial Sequence
  Synthetic
  misc_feature (6)..(6): n is a, c, g, or u
  misc_feature (9)..(9): n is a, c, g, or u
  misc_feature (21)..(21): n is a, c, g, or u
augucnucnuguaaaugaaun

SEQ ID NO: 136452 - RNA, 22 nt, Artificial Sequence
  Synthetic
  misc_feature (7)..(7): n is a, c, g, or u
  misc_feature (10)..(10): n is a, c, g, or u
  misc_feature (22)..(22): n is a, c, g, or u
aaugucnucnuguaaaugaaun

SEQ ID NO: 136453 - RNA, 23 nt, Artificial Sequence
  Synthetic
  misc_feature (8)..(8): n is a, c, g, or u
  misc_feature (11)..(11): n is a, c, g, or u
  misc_feature (23)..(23): n is a, c, g, or u
uaaugucnucnuguaaaugaaun

SEQ ID NO: 136454 - RNA, 24 nt, Artificial Sequence
  Synthetic
  misc_feature (9)..(9): n is a, c, g, or u
  misc_feature (12)..(12): n is a, c, g, or u
  misc_feature (24)..(24): n is a, c, g, or u
auaaugucnucnuguaaaugaaun

SEQ ID NO: 136455 - RNA, 18 nt, Artificial Sequence
  Synthetic
  misc_feature (15)..(15): n is a, c, g, or u
  misc_feature (18)..(18): n is a, c, g, or u
augcgcugauggccnaun

SEQ ID NO: 136456 - RNA, 19 nt, Artificial Sequence
  Synthetic
  misc_feature (16)..(16): n is a, c, g, or u
  misc_feature (19)..(19): n is a, c, g, or u
caugcgcugauggccnaun

SEQ ID NO: 136457 - RNA, 20 nt, Artificial Sequence
  Synthetic
  misc_feature (17)..(17): n is a, c, g, or u
  misc_feature (20)..(20): n is a, c, g, or u
gcaugcgcugauggccnaun

SEQ ID NO: 136458 - RNA, 21 nt, Artificial Sequence
  Synthetic
  misc_feature (18)..(18): n is a, c, g, or u
  misc_feature (21)..(21): n is a, c, g, or u
cgcaugcgcugauggccnaun

SEQ ID NO: 136459 - RNA, 22 nt, Artificial Sequence
  Synthetic
  misc_feature (19)..(19): n is a, c, g, or u
  misc_feature (22)..(22): n is a, c, g, or u
acgcaugcgcugauggccnaun

SEQ ID NO: 136460 - RNA, 23 nt, Artificial Sequence
  Synthetic
  misc_feature (20)..(20): n is a, c, g, or u
  misc_feature (23)..(23): n is a, c, g, or u
cacgcaugcgcugauggccnaun

SEQ ID NO: 136461 - RNA, 24 nt, Artificial Sequence
  Synthetic
  misc_feature (21)..(21): n is a, c, g, or u
  misc_feature (24)..(24): n is a, c, g, or u
ccacgcaugcgcugauggccnaun

SEQ ID NO: 136462 - RNA, 18 nt, Artificial Sequence
  Synthetic
  misc_feature (14)..(14): n is a, c, g, or u
  misc_feature (18)..(18): n is a, c, g, or u
uguaaauaaugucnggun

SEQ ID NO: 136463 - RNA, 19 nt, Artificial Sequence
  Synthetic
  misc_feature (15)..(15): n is a, c, g, or u
  misc_feature (19)..(19): n is a, c, g, or u
auguaaauaaugucnggun

SEQ ID NO: 136464 - RNA, 20 nt, Artificial Sequence
  Synthetic
  misc_feature (16)..(16): n is a, c, g, or u
  misc_feature (20)..(20): n is a, c, g, or u
uauguaaauaaugucnggun

SEQ ID NO: 136465 - RNA, 21 nt, Artificial Sequence
  Synthetic
  misc_feature (17)..(17): n is a, c, g, or u
  misc_feature (21)..(21): n is a, c, g, or u
guauguaaauaaugucnggun

SEQ ID NO: 136466 - RNA, 22 nt, Artificial Sequence
  Synthetic
  misc_feature (18)..(18): n is a, c, g, or u
  misc_feature (22)..(22): n is a, c, g, or u
aguauguaaauaaugucnggun

SEQ ID NO: 136467 - RNA, 23 nt, Artificial Sequence
  Synthetic
  misc_feature (19)..(19): n is a, c, g, or u
  misc_feature (23)..(23): n is a, c, g, or u
gaguauguaaauaaugucnggun

SEQ ID NO: 136468 - RNA, 24 nt, Artificial Sequence
  Synthetic
  misc_feature (20)..(20): n is a, c, g, or u
  misc_feature (24)..(24): n is a, c, g, or u
agaguauguaaauaaugucnggun

SEQ ID NO: 136469 - RNA, 18 nt, Artificial Sequence
  Synthetic
  misc_feature (15)..(15): n is a, c, g, or u
  misc_feature (18)..(18): n is a, c, g, or u
uacagagcugaggcngun

SEQ ID NO: 136470 - RNA, 19 nt, Artificial Sequence
  Synthetic
  misc_feature (16)..(16): n is a, c, g, or u
  misc_feature (19)..(19): n is a, c, g, or u
auacagagcugaggcngun

SEQ ID NO: 136471 - RNA, 20 nt, Artificial Sequence
  Synthetic
  misc_feature (17)..(17): n is a, c, g, or u
  misc_feature (20)..(20): n is a, c, g, or u
gauacagagcugaggcngun

SEQ ID NO: 136472 - RNA, 21 nt, Artificial Sequence
  Synthetic
  misc_feature (18)..(18): n is a, c, g, or u
  misc_feature (21)..(21): n is a, c, g, or u
cgauacagagcugaggcngun

SEQ ID NO: 136473 - RNA, 22 nt, Artificial Sequence
  Synthetic
  misc_feature (1)..(1): n is a, c, g, or u
  misc_feature (19)..(19): n is a, c, g, or u
  misc_feature (22)..(22): n is a, c, g, or u
ncgauacagagcugaggcngun

SEQ ID NO: 136474 - RNA, 23 nt, Artificial Sequence
  Synthetic
  misc_feature (2)..(2): n is a, c, g, or u
  misc_feature (20)..(20): n is a, c, g, or u
  misc_feature (23)..(23): n is a, c, g, or u
cncgauacagagcugaggcngun

SEQ ID NO: 136475 - RNA, 24 nt, Artificial Sequence
  Synthetic
  misc_feature (3)..(3): n is a, c, g, or u
  misc_feature (21)..(21): n is a, c, g, or u
  misc_feature (24)..(24): n is a, c, g, or u
ucncgauacagagcugaggcngun

SEQ ID NO: 136476 - RNA, 18 nt, Artificial Sequence
  Synthetic
  misc_feature (12)..(12): n is a, c, g, or u
  misc_feature (14)..(15): n is a, c, g, or u
  misc_feature (18)..(18): n is a, c, g, or u
caaucaauaggncnnuun

SEQ ID NO: 136477 - RNA, 19 nt, Artificial Sequence
  Synthetic
  misc_feature (13)..(13): n is a, c, g, or u
  misc_feature (15)..(16): n is a, c, g, or u
  misc_feature (19)..(19): n is a, c, g, or u
ccaaucaauaggncnnuun

SEQ ID NO: 136478 - RNA, 20 nt, Artificial Sequence
  Synthetic
  misc_feature (14)..(14): n is a, c, g, or u
  misc_feature (16)..(17): n is a, c, g, or u
  misc_feature (20)..(20): n is a, c, g, or u
uccaaucaauaggncnnuun

SEQ ID NO: 136479 - RNA, 21 nt, Artificial Sequence
  Synthetic
  misc_feature (15)..(15): n is a, c, g, or u
  misc_feature (17)..(18): n is a, c, g, or u
  misc_feature (21)..(21): n is a, c, g, or u
uuccaaucaauaggncnnuun

SEQ ID NO: 136480 - RNA, 22 nt, Artificial Sequence
  Synthetic
  misc_feature (16)..(16): n is a, c, g, or u
  misc_feature (18)..(19): n is a, c, g, or u
  misc_feature (22)..(22): n is a, c, g, or u
uuuccaaucaauaggncnnuun

SEQ ID NO: 136481 - RNA, 23 nt, Artificial Sequence
  Synthetic
  misc_feature (17)..(17): n is a, c, g, or u
  misc_feature (19)..(20): n is a, c, g, or u
  misc_feature (23)..(23): n is a, c, g, or u
cuuuccaaucaauaggncnnuun

SEQ ID NO: 136482 - RNA, 24 nt, Artificial Sequence
  Synthetic
  misc_feature (18)..(18): n is a, c, g, or u
  misc_feature (20)..(21): n is a, c, g, or u
  misc_feature (24)..(24): n is a, c, g, or u
acuuuccaaucaauaggncnnuun

SEQ ID NO: 136483 - RNA, 18 nt, Artificial Sequence
  Synthetic
  misc_feature (4)..(4): n is a, c, g, or u
gugnucccccuagaaaau

SEQ ID NO: 136484 - RNA, 19 nt, Artificial Sequence
  Synthetic
  misc_feature (5)..(5): n is a, c, g, or u
ggugnucccccuagaaaau

SEQ ID NO: 136485 - RNA, 20 nt, Artificial Sequence
  Synthetic
  misc_feature (6)..(6): n is a, c, g, or u
gggugnucccccuagaaaau

SEQ ID NO: 136486 - RNA, 21 nt, Artificial Sequence
  Synthetic
  misc_feature (7)..(7): n is a, c, g, or u
cgggugnucccccuagaaaau

SEQ ID NO: 136487 - RNA, 22 nt, Artificial Sequence
  Synthetic
  misc_feature (8)..(8): n is a, c, g, or u
acgggugnucccccuagaaaau

SEQ ID NO: 136488 - RNA, 23 nt, Artificial Sequence
  Synthetic
  misc_feature (9)..(9): n is a, c, g, or u
cacgggugnucccccuagaaaau

SEQ ID NO: 136489 - RNA, 24 nt, Artificial Sequence
  Synthetic
  misc_feature (10)..(10): n is a, c, g, or u
acacgggugnucccccuagaaaau

SEQ ID NO: 136490 - RNA, 18 nt, Artificial Sequence
  Synthetic
gcgauaaccaggacaaau

SEQ ID NO: 136491 - RNA, 19 nt, Artificial Sequence
  Synthetic
agcgauaaccaggacaaau

SEQ ID NO: 136492 - RNA, 20 nt, Artificial Sequence
  Synthetic
cagcgauaaccaggacaaau

SEQ ID NO: 136493 - RNA, 21 nt, Artificial Sequence
  Synthetic
ccagcgauaaccaggacaaau

SEQ ID NO: 136494 - RNA, 22 nt, Artificial Sequence
  Synthetic
uccagcgauaaccaggacaaau

SEQ ID NO: 136495 - RNA, 23 nt, Artificial Sequence
  Synthetic
auccagcgauaaccaggacaaau

SEQ ID NO: 136496 - RNA, 24 nt, Artificial Sequence
  Synthetic
cauccagcgauaaccaggacaaau

SEQ ID NO: 136497 - RNA, 18 nt, Artificial Sequence
  Synthetic
uaauccagaagaaccaau

SEQ ID NO: 136498 - RNA, 19 nt, Artificial Sequence
  Synthetic
auaauccagaagaaccaau

SEQ ID NO: 136499 - RNA, 20 nt, Artificial Sequence
  Synthetic
gauaauccagaagaaccaau

SEQ ID NO: 136500 - RNA, 21 nt, Artificial Sequence
  Synthetic
ugauaauccagaagaaccaau

SEQ ID NO: 136501 - RNA, 22 nt, Artificial Sequence
  Synthetic
uugauaauccagaagaaccaau

SEQ ID NO: 136502 - RNA, 23 nt, Artificial Sequence
  Synthetic
cuugauaauccagaagaaccaau

SEQ ID NO: 136503 - RNA, 24 nt, Artificial Sequence
  Synthetic
ccuugauaauccagaagaaccaau

SEQ ID NO: 136504 - RNA, 18 nt, Artificial Sequence
  Synthetic
ugaugaucgggaaagaau

SEQ ID NO: 136505 - RNA, 19 nt, Artificial Sequence
  Synthetic
cugaugaucgggaaagaau

SEQ ID NO: 136506 - RNA, 20 nt, Artificial Sequence
  Synthetic
acugaugaucgggaaagaau

SEQ ID NO: 136507 - RNA, 21 nt, Artificial Sequence
  Synthetic
aacugaugaucgggaaagaau

SEQ ID NO: 136508 - RNA, 22 nt, Artificial Sequence
  Synthetic
caacugaugaucgggaaagaau

SEQ ID NO: 136509 - RNA, 23 nt, Artificial Sequence
  Synthetic
ccaacugaugaucgggaaagaau

SEQ ID NO: 136510 - RNA, 24 nt, Artificial Sequence
  Synthetic
uccaacugaugaucgggaaagaau

SEQ ID NO: 136511 - RNA, 18 nt, Artificial Sequence
  Synthetic
uucccucuuauauagaau

SEQ ID NO: 136512 - RNA, 19 nt, Artificial Sequence
  Synthetic
uuucccucuuauauagaau

SEQ ID NO: 136513 - RNA, 20 nt, Artificial Sequence
  Synthetic
guuucccucuuauauagaau

SEQ ID NO: 136514 - RNA, 21 nt, Artificial Sequence
  Synthetic
  misc_feature (1)..(1): n is a, c, g, or u
nguuucccucuuauauagaau

SEQ ID NO: 136515 - RNA, 22 nt, Artificial Sequence
  Synthetic
  misc_feature (2)..(2): n is a, c, g, or u
unguuucccucuuauauagaau

SEQ ID NO: 136516 - RNA, 23 nt, Artificial Sequence
  Synthetic
  misc_feature (3)..(3): n is a, c, g, or u
gunguuucccucuuauauagaau

SEQ ID NO: 136517 - RNA, 24 nt, Artificial Sequence
  Synthetic
  misc_feature (4)..(4): n is a, c, g, or u
ugunguuucccucuuauauagaau

SEQ ID NO: 136518 - RNA, 18 nt, Artificial Sequence
  Synthetic
  misc_feature (6)..(6): n is a, c, g, or u
uuuganuuggcuccgaau

SEQ ID NO: 136519 - RNA, 19 nt, Artificial Sequence
  Synthetic
  misc_feature (7)..(7): n is a, c, g, or u
guuuganuuggcuccgaau

SEQ ID NO: 136520 - RNA, 20 nt, Artificial Sequence
  Synthetic
  misc_feature (8)..(8): n is a, c, g, or u
uguuuganuuggcuccgaau

SEQ ID NO: 136521 - RNA, 21 nt, Artificial Sequence
  Synthetic
  misc_feature (9)..(9): n is a, c, g, or u
uuguuuganuuggcuccgaau

SEQ ID NO: 136522 - RNA, 22 nt, Artificial Sequence
  Synthetic
  misc_feature (10)..(10): n is a, c, g, or u
auuguuuganuuggcuccgaau

SEQ ID NO: 136523 - RNA, 23 nt, Artificial Sequence
  Synthetic
  misc_feature (11)..(11): n is a, c, g, or u
gauuguuuganuuggcuccgaau

SEQ ID NO: 136524 - RNA, 24 nt, Artificial Sequence
  Synthetic
  misc_feature (12)..(12): n is a, c, g, or u
ggauuguuuganuuggcuccgaau

SEQ ID NO: 136525 - RNA, 18 nt, Artificial Sequence
  Synthetic
agguuggggacugcgaau

SEQ ID NO: 136526 - RNA, 19 nt, Artificial Sequence
  Synthetic
gagguuggggacugcgaau

SEQ ID NO: 136527 - RNA, 20 nt, Artificial Sequence
  Synthetic
ggagguuggggacugcgaau

SEQ ID NO: 136528 - RNA, 21 nt, Artificial Sequence
  Synthetic
uggagguuggggacugcgaau

SEQ ID NO: 136529 - RNA, 22 nt, Artificial Sequence
  Synthetic
uuggagguuggggacugcgaau

SEQ ID NO: 136530 - RNA, 23 nt, Artificial Sequence
  Synthetic
auuggagguuggggacugcgaau

SEQ ID NO: 136531 - RNA, 24 nt, Artificial Sequence
  Synthetic
gauuggagguuggggacugcgaau

SEQ ID NO: 136532 - RNA, 18 nt, Artificial Sequence
  Synthetic
cuuaugaguccaaggaau

SEQ ID NO: 136533 - RNA, 19 nt, Artificial Sequence
  Synthetic
ccuuaugaguccaaggaau

SEQ ID NO: 136534 - RNA, 20 nt, Artificial Sequence
  Synthetic
accuuaugaguccaaggaau

SEQ ID NO: 136535 - RNA, 21 nt, Artificial Sequence
  Synthetic
caccuuaugaguccaaggaau

SEQ ID NO: 136536 - RNA, 22 nt, Artificial Sequence
  Synthetic
ccaccuuaugaguccaaggaau

SEQ ID NO: 136537 - RNA, 23 nt, Artificial Sequence
  Synthetic
cccaccuuaugaguccaaggaau

SEQ ID NO: 136538 - RNA, 24 nt, Artificial Sequence
  Synthetic
ucccaccuuaugaguccaaggaau

SEQ ID NO: 136539 - RNA, 18 nt, Artificial Sequence
  Synthetic
  misc_feature (7)..(7): n is a, c, g, or u
uguugungauccuggaau

SEQ ID NO: 136540 - RNA, 19 nt, Artificial Sequence
  Synthetic
  misc_feature (8)..(8): n is a, c, g, or u
uuguugungauccuggaau

SEQ ID NO: 136541 - RNA, 20 nt, Artificial Sequence
  Synthetic
  misc_feature (9)..(9): n is a, c, g, or u
guuguugungauccuggaau

SEQ ID NO: 136542 - RNA, 21 nt, Artificial Sequence
  Synthetic
  misc_feature (10)..(10): n is a, c, g, or u
gguuguugungauccuggaau

SEQ ID NO: 136543 - RNA, 22 nt, Artificial Sequence
  Synthetic
  misc_feature (11)..(11): n is a, c, g, or u
ugguuguugungauccuggaau

SEQ ID NO: 136544 - RNA, 23 nt, Artificial Sequence
  Synthetic
  misc_feature (12)..(12): n is a, c, g, or u
cugguuguugungauccuggaau

SEQ ID NO: 136545 - RNA, 24 nt, Artificial Sequence
  Synthetic
  misc_feature (13)..(13): n is a, c, g, or u
acugguuguugungauccuggaau

SEQ ID NO: 136546 - RNA, 18 nt, Artificial Sequence
  Synthetic
  misc_feature (4)..(4): n is a, c, g, or u
  misc_feature (7)..(7): n is a, c, g, or u
gucnucnuguaaaugaau

SEQ ID NO: 136547 - RNA, 19 nt, Artificial Sequence
  Synthetic
  misc_feature (5)..(5): n is a, c, g, or u
  misc_feature (8)..(8): n is a, c, g, or u
ugucnucnuguaaaugaau

SEQ ID NO: 136548 - RNA, 20 nt, Artificial Sequence
  Synthetic
  misc_feature (6)..(6): n is a, c, g, or u
  misc_feature (9)..(9): n is a, c, g, or u
augucnucnuguaaaugaau

SEQ ID NO: 136549 - RNA, 21 nt, Artificial Sequence
  Synthetic
  misc_feature (7)..(7): n is a, c, g, or u
  misc_feature (10)..(10): n is a, c, g, or u
aaugucnucnuguaaaugaau

SEQ ID NO: 136550 - RNA, 22 nt, Artificial Sequence
  Synthetic
  misc_feature (8)..(8): n is a, c, g, or u
  misc_feature (11)..(11): n is a, c, g, or u
uaaugucnucnuguaaaugaau

SEQ ID NO: 136551 - RNA, 23 nt, Artificial Sequence
  Synthetic
  misc_feature (9)..(9): n is a, c, g, or u
  misc_feature (12)..(12): n is a, c, g, or u
auaaugucnucnuguaaaugaau

SEQ ID NO: 136552 - RNA, 24 nt, Artificial Sequence
  Synthetic
  misc_feature (10)..(10): n is a, c, g, or u
  misc_feature (13)..(13): n is a, c, g, or u
aauaaugucnucnuguaaaugaau

SEQ ID NO: 136553 - RNA, 18 nt, Artificial Sequence
  Synthetic
gcaacauaccuugauaau

SEQ ID NO: 136554 - RNA, 19 nt, Artificial Sequence
  Synthetic
ggcaacauaccuugauaau

SEQ ID NO: 136555 - RNA, 20 nt, Artificial Sequence
  Synthetic
gggcaacauaccuugauaau

SEQ ID NO: 136556 - RNA, 21 nt, Artificial Sequence
  Synthetic
cgggcaacauaccuugauaau

SEQ ID NO: 136557 - RNA, 22 nt, Artificial Sequence
  Synthetic
acgggcaacauaccuugauaau

SEQ ID NO: 136558 - RNA, 23 nt, Artificial Sequence
  Synthetic
aacgggcaacauaccuugauaau

SEQ ID NO: 136559 - RNA, 24 nt, Artificial Sequence
  Synthetic
aaacgggcaacauaccuugauaau

SEQ ID NO: 136560 - RNA, 18 nt, Artificial Sequence
  Synthetic
ugccuacagccuccuaau

SEQ ID NO: 136561 - RNA, 19 nt, Artificial Sequence
  Synthetic
  misc_feature (1)..(1): n is a, c, g, or u
nugccuacagccuccuaau

SEQ ID NO: 136562 - RNA, 20 nt, Artificial Sequence
  Synthetic
  misc_feature (2)..(2): n is a, c, g, or u
unugccuacagccuccuaau

SEQ ID NO: 136563 - RNA, 21 nt, Artificial Sequence
  Synthetic
  misc_feature (3)..(3): n is a, c, g, or u
uunugccuacagccuccuaau

SEQ ID NO: 136564 - RNA, 22 nt, Artificial Sequence
  Synthetic
  misc_feature (4)..(4): n is a, c, g, or u
uuunugccuacagccuccuaau

SEQ ID NO: 136565 - RNA, 23 nt, Artificial Sequence
  Synthetic
  misc_feature (5)..(5): n is a, c, g, or u
auuunugccuacagccuccuaau

SEQ ID NO: 136566 - RNA, 24 nt, Artificial Sequence
  Synthetic
  misc_feature (6)..(6): n is a, c, g, or u
aauuunugccuacagccuccuaau

SEQ ID NO: 136567 - RNA, 18 nt, Artificial Sequence
  Synthetic
gguuuuguacagcaacau

SEQ ID NO: 136568 - RNA, 19 nt, Artificial Sequence
  Synthetic
agguuuuguacagcaacau

SEQ ID NO: 136569 - RNA, 20 nt, Artificial Sequence
  Synthetic
uagguuuuguacagcaacau

SEQ ID NO: 136570 - RNA, 21 nt, Artificial Sequence
  Synthetic
guagguuuuguacagcaacau

SEQ ID NO: 136571 - RNA, 22 nt, Artificial Sequence
  Synthetic
cguagguuuuguacagcaacau

SEQ ID NO: 136572 - RNA, 23 nt, Artificial Sequence
  Synthetic
ccguagguuuuguacagcaacau

SEQ ID NO: 136573 - RNA, 24 nt, Artificial Sequence
  Synthetic
uccguagguuuuguacagcaacau

SEQ ID NO: 136574 - RNA, 18 nt, Artificial Sequence
  Synthetic
  misc_feature (6)..(6): n is a, c, g, or u
guacanccuagcagccau

SEQ ID NO: 136575 - RNA, 19 nt, Artificial Sequence
  Synthetic
  misc_feature (7)..(7): n is a, c, g, or u
aguacanccuagcagccau

SEQ ID NO: 136576 - RNA, 20 nt, Artificial Sequence
  Synthetic
  misc_feature (8)..(8): n is a, c, g, or u
caguacanccuagcagccau

SEQ ID NO: 136577 - RNA, 21 nt, Artificial Sequence
  Synthetic
  misc_feature (9)..(9): n is a, c, g, or u
gcaguacanccuagcagccau

SEQ ID NO: 136578 - RNA, 22 nt, Artificial Sequence
  Synthetic
  misc_feature (10)..(10): n is a, c, g, or u
ggcaguacanccuagcagccau

SEQ ID NO: 136579 - RNA, 23 nt, Artificial Sequence
  Synthetic
  misc_feature (11)..(11): n is a, c, g, or u
uggcaguacanccuagcagccau

SEQ ID NO: 136580 - RNA, 24 nt, Artificial Sequence
  Synthetic
  misc_feature (12)..(12): n is a, c, g, or u
uuggcaguacanccuagcagccau

SEQ ID NO: 136581 - RNA, 18 nt, Artificial Sequence
  Synthetic
  misc_feature (3)..(3): n is a, c, g, or u
aangaaggaguuugccau

SEQ ID NO: 136582 - RNA, 19 nt, Artificial Sequence
  Synthetic
  misc_feature (4)..(4): n is a, c, g, or u
aaangaaggaguuugccau

SEQ ID NO: 136583 - RNA, 20 nt, Artificial Sequence
  Synthetic
  misc_feature (5)..(5): n is a, c, g, or u
gaaangaaggaguuugccau

SEQ ID NO: 136584 - RNA, 21 nt, Artificial Sequence
  Synthetic
  misc_feature (6)..(6): n is a, c, g, or u
ggaaangaaggaguuugccau

SEQ ID NO: 136585 - RNA, 22 nt, Artificial Sequence
  Synthetic
  misc_feature (7)..(7): n is a, c, g, or u
aggaaangaaggaguuugccau

SEQ ID NO: 136586 - RNA, 23 nt, Artificial Sequence
  Synthetic
  misc_feature (8)..(8): n is a, c, g, or u
uaggaaangaaggaguuugccau

SEQ ID NO: 136587 - RNA, 24 nt, Artificial Sequence
  Synthetic
  misc_feature (9)..(9): n is a, c, g, or u
uuaggaaangaaggaguuugccau

SEQ ID NO: 136588 - RNA, 18 nt, Artificial Sequence
  Synthetic
aauaagaagaugaggcau

SEQ ID NO: 136589 - RNA, 19 nt, Artificial Sequence
  Synthetic
caauaagaagaugaggcau

SEQ ID NO: 136590 - RNA, 20 nt, Artificial Sequence
  Synthetic
ccaauaagaagaugaggcau

SEQ ID NO: 136591 - RNA, 21 nt, Artificial Sequence
  Synthetic
accaauaagaagaugaggcau

SEQ ID NO: 136592 - RNA, 22 nt, Artificial Sequence
  Synthetic
aaccaauaagaagaugaggcau

SEQ ID NO: 136593 - RNA, 23 nt, Artificial Sequence
  Synthetic
gaaccaauaagaagaugaggcau

SEQ ID NO: 136594 - RNA, 24 nt, Artificial Sequence
  Synthetic
agaaccaauaagaagaugaggcau

SEQ ID NO: 136595 - RNA, 18 nt, Artificial Sequence
  Synthetic
  misc_feature (2)..(2): n is a, c, g, or u
ungcuuguauacaugcau

SEQ ID NO: 136596 - RNA, 19 nt, Artificial Sequence
  Synthetic
  misc_feature (3)..(3): n is a, c, g, or u
uungcuuguauacaugcau

SEQ ID NO: 136597 - RNA, 20 nt, Artificial Sequence
  Synthetic
  misc_feature (4)..(4): n is a, c, g, or u
uuungcuuguauacaugcau

SEQ ID NO: 136598 - RNA, 21 nt, Artificial Sequence
  Synthetic
  misc_feature (5)..(5): n is a, c, g, or u
guuungcuuguauacaugcau

SEQ ID NO: 136599 - RNA, 22 nt, Artificial Sequence
  Synthetic
  misc_feature (6)..(6): n is a, c, g, or u
uguuungcuuguauacaugcau

SEQ ID NO: 136600 - RNA, 23 nt, Artificial Sequence
  Synthetic
  misc_feature (7)..(7): n is a, c, g, or u
cuguuungcuuguauacaugcau

SEQ ID NO: 136601 - RNA, 24 nt, Artificial Sequence
  Synthetic
  misc_feature (8)..(8): n is a, c, g, or u
ccuguuungcuuguauacaugcau

SEQ ID NO: 136602 - RNA, 18 nt, Artificial Sequence
  Synthetic
cggaaguguugauaagau

SEQ ID NO: 136603 - RNA, 19 nt, Artificial Sequence
  Synthetic
ccggaaguguugauaagau

SEQ ID NO: 136604 - RNA, 20 nt, Artificial Sequence
  Synthetic
uccggaaguguugauaagau

SEQ ID NO: 136605 - RNA, 21 nt, Artificial Sequence
  Synthetic
uuccggaaguguugauaagau

SEQ ID NO: 136606 - RNA, 22 nt, Artificial Sequence
  Synthetic
uuuccggaaguguugauaagau

SEQ ID NO: 136607 - RNA, 23 nt, Artificial Sequence
  Synthetic
guuuccggaaguguugauaagau

SEQ ID NO: 136608 - RNA, 24 nt, Artificial Sequence
  Synthetic
aguuuccggaaguguugauaagau

SEQ ID NO: 136609 - RNA, 18 nt, Artificial Sequence
  Synthetic
gcacacggaccggcagau

SEQ ID NO: 136610 - RNA, 19 nt, Artificial Sequence
  Synthetic
ugcacacggaccggcagau

SEQ ID NO: 136611 - RNA, 20 nt, Artificial Sequence
  Synthetic
gugcacacggaccggcagau

SEQ ID NO: 136612 - RNA, 18 nt, Artificial Sequence
  Synthetic
  misc_feature (3)..(3): n is a, c, g, or u
cgnggagauugacgagau

SEQ ID NO: 136613 - RNA, 19 nt, Artificial Sequence
  Synthetic
  misc_feature (4)..(4): n is a, c, g, or u
ucgnggagauugacgagau

SEQ ID NO: 136614 - RNA, 20 nt, Artificial Sequence
  Synthetic
  misc_feature (5)..(5): n is a, c, g, or u
cucgnggagauugacgagau

SEQ ID NO: 136615 - RNA, 21 nt, Artificial Sequence
  Synthetic
  misc_feature (6)..(6): n is a, c, g, or u
ccucgnggagauugacgagau

SEQ ID NO: 136616 - RNA, 22 nt, Artificial Sequence
  Synthetic
  misc_feature (7)..(7): n is a, c, g, or u
uccucgnggagauugacgagau

SEQ ID NO: 136617 - RNA, 23 nt, Artificial Sequence
  Synthetic
  misc_feature (8)..(8): n is a, c, g, or u
guccucgnggagauugacgagau

SEQ ID NO: 136618 - RNA, 24 nt, Artificial Sequence
  Synthetic
  misc_feature (9)..(9): n is a, c, g, or u
aguccucgnggagauugacgagau

SEQ ID NO: 136619 - RNA, 18 nt, Artificial Sequence
  Synthetic
  misc_feature (14)..(14): n is a, c, g, or u
acucuaaggcuucncgau

SEQ ID NO: 136620 - RNA, 19 nt, Artificial Sequence
  Synthetic
  misc_feature (15)..(15): n is a, c, g, or u
gacucuaaggcuucncgau

SEQ ID NO: 136621 - RNA, 20 nt, Artificial Sequence
  Synthetic
  misc_feature (16)..(16): n is a, c, g, or u
agacucuaaggcuucncgau

SEQ ID NO: 136622 - RNA, 21 nt, Artificial Sequence
  Synthetic
  misc_feature (17)..(17): n is a, c, g, or u
gagacucuaaggcuucncgau

SEQ ID NO: 136623 - RNA, 22 nt, Artificial Sequence
  Synthetic
  misc_feature (18)..(18): n is a, c, g, or u
ggagacucuaaggcuucncgau

SEQ ID NO: 136624 - RNA, 23 nt, Artificial Sequence
  Synthetic
  misc_feature (19)..(19): n is a, c, g, or u
aggagacucuaaggcuucncgau

SEQ ID NO: 136625 - RNA, 24 nt, Artificial Sequence
  Synthetic
  misc_feature (20)..(20): n is a, c, g, or u
caggagacucuaaggcuucncgau

SEQ ID NO: 136626 - RNA, 18 nt, Artificial Sequence
  Synthetic
gaggcauagcagcaggau

SEQ ID NO: 136627 - RNA, 19 nt, Artificial Sequence
  Synthetic
ugaggcauagcagcaggau

SEQ ID NO: 136628 - RNA, 20 nt, Artificial Sequence
  Synthetic
augaggcauagcagcaggau

SEQ ID NO: 136629 - RNA, 21 nt, Artificial Sequence
  Synthetic
gaugaggcauagcagcaggau

SEQ ID NO: 136630 - RNA, 22 nt, Artificial Sequence
  Synthetic
agaugaggcauagcagcaggau

SEQ ID NO: 136631 - RNA, 23 nt, Artificial Sequence
  Synthetic
aagaugaggcauagcagcaggau

SEQ ID NO: 136632 - RNA, 24 nt, Artificial Sequence
  Synthetic
gaagaugaggcauagcagcaggau

SEQ ID NO: 136633 - RNA, 18 nt, Artificial Sequence
  Synthetic
gaguuugccauucaggau

SEQ ID NO: 136634 - RNA, 19 nt, Artificial Sequence
  Synthetic
ggaguuugccauucaggau

SEQ ID NO: 136635 - RNA, 20 nt, Artificial Sequence
  Synthetic
aggaguuugccauucaggau

SEQ ID NO: 136636 - RNA, 21 nt, Artificial Sequence
  Synthetic
aaggaguuugccauucaggau

SEQ ID NO: 136637 - RNA, 22 nt, Artificial Sequence
  Synthetic
gaaggaguuugccauucaggau

SEQ ID NO: 136638 - RNA, 23 nt, Artificial Sequence
  Synthetic
  misc_feature (1)..(1): n is a, c, g, or u
ngaaggaguuugccauucaggau

SEQ ID NO: 136639 - RNA, 24 nt, Artificial Sequence
  Synthetic
  misc_feature (2)..(2): n is a, c, g, or u
angaaggaguuugccauucaggau

SEQ ID NO: 136640 - RNA, 18 nt, Artificial Sequence
  Synthetic
  misc_feature (8)..(8): n is a, c, g, or u
  misc_feature (14)..(14): n is a, c, g, or u
uaacuacnugaucnggau

SEQ ID NO: 136641 - RNA, 19 nt, Artificial Sequence
  Synthetic
  misc_feature (9)..(9): n is a, c, g, or u
  misc_feature (15)..(15): n is a, c, g, or u
uuaacuacnugaucnggau

SEQ ID NO: 136642 - RNA, 20 nt, Artificial Sequence
  Synthetic
  misc_feature (10)..(10): n is a, c, g, or u
  misc_feature (16)..(16): n is a, c, g, or u
auuaacuacnugaucnggau

SEQ ID NO: 136643 - RNA, 21 nt, Artificial Sequence
  Synthetic
  misc_feature (11)..(11): n is a, c, g, or u
  misc_feature (17)..(17): n is a, c, g, or u
gauuaacuacnugaucnggau

SEQ ID NO: 136644 - RNA, 22 nt, Artificial Sequence
  Synthetic
  misc_feature (12)..(12): n is a, c, g, or u
  misc_feature (18)..(18): n is a, c, g, or u
ugauuaacuacnugaucnggau

SEQ ID NO: 136645 - RNA, 23 nt, Artificial Sequence
  Synthetic
  misc_feature (13)..(13): n is a, c, g, or u
  misc_feature (19)..(19): n is a, c, g, or u
augauuaacuacnugaucnggau

SEQ ID NO: 136646 - RNA, 24 nt, Artificial Sequence
  Synthetic
  misc_feature (14)..(14): n is a, c, g, or u
  misc_feature (20)..(20): n is a, c, g, or u
aaugauuaacuacnugaucnggau

SEQ ID NO: 136647 - RNA, 18 nt, Artificial Sequence
  Synthetic
  misc_feature (15)..(15): n is a, c, g, or u
acuacuagaucccungau

SEQ ID NO: 136648 - RNA, 19 nt, Artificial Sequence
  Synthetic
  misc_feature (16)..(16): n is a, c, g, or u
gacuacuagaucccungau

SEQ ID NO: 136649 - RNA, 20 nt, Artificial Sequence
  Synthetic
  misc_feature (17)..(17): n is a, c, g, or u
ugacuacuagaucccungau

SEQ ID NO: 136650 - RNA, 21 nt, Artificial Sequence
  Synthetic
  misc_feature (18)..(18): n is a, c, g, or u
uugacuacuagaucccungau

SEQ ID NO: 136651 - RNA, 22 nt, Artificial Sequence
  Synthetic
  misc_feature (19)..(19): n is a, c, g, or u
auugacuacuagaucccungau

SEQ ID NO: 136652 - RNA, 23 nt, Artificial Sequence
  Synthetic
  misc_feature (20)..(20): n is a, c, g, or u
aauugacuacuagaucccungau

SEQ ID NO: 136653 - RNA, 24 nt, Artificial Sequence
  Synthetic
  misc_feature (21)..(21): n is a, c, g, or u
uaauugacuacuagaucccungau

SEQ ID NO: 136654 - RNA, 18 nt, Artificial Sequence
  Synthetic
  misc_feature (15)..(15): n is a, c, g, or u
guacugguuguugungau

SEQ ID NO: 136655 - RNA, 19 nt, Artificial Sequence
  Synthetic
  misc_feature (16)..(16): n is a, c, g, or u
cguacugguuguugungau

SEQ ID NO: 136656 - RNA, 20 nt, Artificial Sequence
  Synthetic
  misc_feature (17)..(17): n is a, c, g, or u
ccguacugguuguugungau

SEQ ID NO: 136657 - RNA, 21 nt, Artificial Sequence
  Synthetic
  misc_feature (18)..(18): n is a, c, g, or u
cccguacugguuguugungau

SEQ ID NO: 136658 - RNA, 22 nt, Artificial Sequence
  Synthetic
  misc_feature (19)..(19): n is a, c, g, or u
ucccguacugguuguugungau

SEQ ID NO: 136659 - RNA, 23 nt, Artificial Sequence
  Synthetic
  misc_feature (20)..(20): n is a, c, g, or u
gucccguacugguuguugungau

SEQ ID NO: 136660 - RNA, 24 nt, Artificial Sequence
  Synthetic
  misc_feature (21)..(21): n is a, c, g, or u
ggucccguacugguuguugungau

SEQ ID NO: 136661 - RNA, 18 nt, Artificial Sequence
  Synthetic
caggguccaacugaugau

SEQ ID NO: 136662 - RNA, 19 nt, Artificial Sequence
  Synthetic
gcaggguccaacugaugau

SEQ ID NO: 136663 - RNA, 20 nt, Artificial Sequence
  Synthetic
ugcaggguccaacugaugau

SEQ ID NO: 136664 - RNA, 21 nt, Artificial Sequence
  Synthetic
augcaggguccaacugaugau

SEQ ID NO: 136665 - RNA, 22 nt, Artificial Sequence
  Synthetic
aaugcaggguccaacugaugau

SEQ ID NO: 136666 - RNA, 23 nt, Artificial Sequence
  Synthetic
gaaugcaggguccaacugaugau

SEQ ID NO: 136667 - RNA, 24 nt, Artificial Sequence
  Synthetic
cgaaugcaggguccaacugaugau

SEQ ID NO: 136668 - RNA, 18 nt, Artificial Sequence
  Synthetic
aggagguuggugagugau

SEQ ID NO: 136669 - RNA, 19 nt, Artificial Sequence
  Synthetic
caggagguuggugagugau

SEQ ID NO: 136670 - RNA, 20 nt, Artificial Sequence
  Synthetic
acaggagguuggugagugau

SEQ ID NO: 136671 - RNA, 21 nt, Artificial Sequence
  Synthetic
gacaggagguuggugagugau

SEQ ID NO: 136672 - RNA, 22 nt, Artificial Sequence
  Synthetic
ggacaggagguuggugagugau

SEQ ID NO: 136673 - RNA, 23 nt, Artificial Sequence
  Synthetic
aggacaggagguuggugagugau

SEQ ID NO: 136674 - RNA, 24 nt, Artificial Sequence
  Synthetic
gaggacaggagguuggugagugau

SEQ ID NO: 136675 - RNA, 18 nt, Artificial Sequence
  Synthetic
  misc_feature (16)..(16): n is a, c, g, or u
aaaaguaaggcaaganau

SEQ ID NO: 136676 - RNA, 19 nt, Artificial Sequence
  Synthetic
  misc_feature (17)..(17): n is a, c, g, or u
caaaaguaaggcaaganau

SEQ ID NO: 136677 - RNA, 20 nt, Artificial Sequence
  Synthetic
  misc_feature (18)..(18): n is a, c, g, or u
ccaaaaguaaggcaaganau

SEQ ID NO: 136678 - RNA, 21 nt, Artificial Sequence
  Synthetic
  misc_feature (19)..(19): n is a, c, g, or u
uccaaaaguaaggcaaganau

SEQ ID NO: 136679 - RNA, 22 nt, Artificial Sequence
  Synthetic
  misc_feature (20)..(20): n is a, c, g, or u
uuccaaaaguaaggcaaganau

SEQ ID NO: 136680 - RNA, 23 nt, Artificial Sequence
  Synthetic
  misc_feature (21)..(21): n is a, c, g, or u
cuuccaaaaguaaggcaaganau

SEQ ID NO: 136681 - RNA, 24 nt, Artificial Sequence
  Synthetic
  misc_feature (22)..(22): n is a, c, g, or u
ucuuccaaaaguaaggcaaganau

SEQ ID NO: 136682 - RNA, 18 nt, Artificial Sequence
  Synthetic
agaugugagaggcaauau

SEQ ID NO: 136683 - RNA, 19 nt, Artificial Sequence
  Synthetic
gagaugugagaggcaauau

SEQ ID NO: 136684 - RNA, 20 nt, Artificial Sequence
  Synthetic
cgagaugugagaggcaauau

SEQ ID NO: 136685 - RNA, 21 nt, Artificial Sequence
  Synthetic
acgagaugugagaggcaauau

SEQ ID NO: 136686 - RNA, 22 nt, Artificial Sequence
  Synthetic
gacgagaugugagaggcaauau

SEQ ID NO: 136687 - RNA, 23 nt, Artificial Sequence
  Synthetic
ugacgagaugugagaggcaauau

SEQ ID NO: 136688 - RNA, 24 nt, Artificial Sequence
  Synthetic
uugacgagaugugagaggcaauau

SEQ ID NO: 136689 - RNA, 18 nt, Artificial Sequence
  Synthetic
ucuuguucccaagaauau

SEQ ID NO: 136690 - RNA, 19 nt, Artificial Sequence
  Synthetic
cucuuguucccaagaauau

SEQ ID NO: 136691 - RNA, 20 nt, Artificial Sequence
  Synthetic
gcucuuguucccaagaauau

SEQ ID NO: 136692 - RNA, 21 nt, Artificial Sequence
  Synthetic
agcucuuguucccaagaauau

SEQ ID NO: 136693 - RNA, 22 nt, Artificial Sequence
  Synthetic
uagcucuuguucccaagaauau

SEQ ID NO: 136694 - RNA, 23 nt, Artificial Sequence
  Synthetic
guagcucuuguucccaagaauau

SEQ ID NO: 136695 - RNA, 24 nt, Artificial Sequence
  Synthetic
uguagcucuuguucccaagaauau

SEQ ID NO: 136696 - RNA, 18 nt, Artificial Sequence
  Synthetic
caggaugaagaggaauau

SEQ ID NO: 136697 - RNA, 19 nt, Artificial Sequence
  Synthetic
gcaggaugaagaggaauau

SEQ ID NO: 136698 - RNA, 20 nt, Artificial Sequence
  Synthetic
agcaggaugaagaggaauau

SEQ ID NO: 136699 - RNA, 21 nt, Artificial Sequence
  Synthetic
cagcaggaugaagaggaauau

SEQ ID NO: 136700 - RNA, 22 nt, Artificial Sequence
  Synthetic
gcagcaggaugaagaggaauau

SEQ ID NO: 136701 - RNA, 23 nt, Artificial Sequence
  Synthetic
agcagcaggaugaagaggaauau

SEQ ID NO: 136702 - RNA, 24 nt, Artificial Sequence
  Synthetic
uagcagcaggaugaagaggaauau

SEQ ID NO: 136703 - RNA, 18 nt, Artificial Sequence
  Synthetic
aauugguaacagcgguau

SEQ ID NO: 136704 - RNA, 19 nt, Artificial Sequence
  Synthetic
aaauugguaacagcgguau

SEQ ID NO: 136705 - RNA, 20 nt, Artificial Sequence
  Synthetic
aaaauugguaacagcgguau

SEQ ID NO: 136706 - RNA, 21 nt, Artificial Sequence
  Synthetic
gaaaauugguaacagcgguau

SEQ ID NO: 136707 - RNA, 22 nt, Artificial Sequence
  Synthetic
agaaaauugguaacagcgguau

SEQ ID NO: 136708 - RNA, 23 nt, Artificial Sequence
  Synthetic
aagaaaauugguaacagcgguau

SEQ ID NO: 136709 - RNA, 24 nt, Artificial Sequence
  Synthetic
aaagaaaauugguaacagcgguau

SEQ ID NO: 136710 - RNA, 18 nt, Artificial Sequence
  Synthetic
gucuagacucugcgguau

SEQ ID NO: 136711 - RNA, 19 nt, Artificial Sequence
  Synthetic
agucuagacucugcgguau

SEQ ID NO: 136712 - RNA, 20 nt, Artificial Sequence
  Synthetic
gagucuagacucugcgguau

SEQ ID NO: 136713 - RNA, 21 nt, Artificial Sequence
  Synthetic
cgagucuagacucugcgguau

SEQ ID NO: 136714 - RNA, 22 nt, Artificial Sequence
  Synthetic
acgagucuagacucugcgguau

SEQ ID NO: 136715 - RNA, 23 nt, Artificial Sequence
  Synthetic
cacgagucuagacucugcgguau

SEQ ID NO: 136716 - RNA, 24 nt, Artificial Sequence
  Synthetic
ccacgagucuagacucugcgguau

SEQ ID NO: 136717 - RNA, 18 nt, Artificial Sequence
  Synthetic
  misc_feature (14)..(14): n is a, c, g, or u
cuugccugagugcnguau

SEQ ID NO: 136718 - RNA, 19 nt, Artificial Sequence
  Synthetic
  misc_feature (15)..(15): n is a, c, g, or u
gcuugccugagugcnguau

SEQ ID NO: 136719 - RNA, 20 nt, Artificial Sequence
  Synthetic
  misc_feature (16)..(16): n is a, c, g, or u
ggcuugccugagugcnguau

SEQ ID NO: 136720 - RNA, 21 nt, Artificial Sequence
  Synthetic
  misc_feature (17)..(17): n is a, c, g, or u
uggcuugccugagugcnguau

SEQ ID NO: 136721 - RNA, 22 nt, Artificial Sequence
  Synthetic
  misc_feature (18)..(18): n is a, c, g, or u
auggcuugccugagugcnguau

SEQ ID NO: 136722 - RNA, 23 nt, Artificial Sequence
  Synthetic
  misc_feature (19)..(19): n is a, c, g, or u
aauggcuugccugagugcnguau

SEQ ID NO: 136723 - RNA, 24 nt, Artificial Sequence
  Synthetic
  misc_feature (20)..(20): n is a, c, g, or u
gaauggcuugccugagugcnguau

SEQ ID NO: 136724 - RNA, 18 nt, Artificial Sequence
  Synthetic
  misc_feature (5)..(5): n is a, c, g, or u
gugunguuucccucuuau

SEQ ID NO: 136725 - RNA, 19 nt, Artificial Sequence
  Synthetic
  misc_feature (6)..(6): n is a, c, g, or u
cgugunguuucccucuuau

SEQ ID NO: 136726 - RNA, 20 nt, Artificial Sequence
  Synthetic
  misc_feature (7)..(7): n is a, c, g, or u
acgugunguuucccucuuau

SEQ ID NO: 136727 - RNA, 21 nt, Artificial Sequence
  Synthetic
  misc_feature (8)..(8): n is a, c, g, or u
uacgugunguuucccucuuau

SEQ ID NO: 136728 - RNA, 22 nt, Artificial Sequence
  Synthetic
  misc_feature (9)..(9): n is a, c, g, or u
cuacgugunguuucccucuuau

SEQ ID NO: 136729 - RNA, 23 nt, Artificial Sequence
  Synthetic
  misc_feature (10)..(10): n is a, c, g, or u
gcuacgugunguuucccucuuau

SEQ ID NO: 136730 - RNA, 24 nt, Artificial Sequence
  Synthetic
  misc_feature (11)..(11): n is a, c, g, or u
cgcuacgugunguuucccucuuau

SEQ ID NO: 136731 - RNA, 18 nt, Artificial Sequence
  Synthetic
guccaagaguccucuuau

SEQ ID NO: 136732 - RNA, 19 nt, Artificial Sequence
  Synthetic
aguccaagaguccucuuau

SEQ ID NO: 136733 - RNA, 20 nt, Artificial Sequence
  Synthetic
gaguccaagaguccucuuau

SEQ ID NO: 136734 - RNA, 21 nt, Artificial Sequence
  Synthetic
ggaguccaagaguccucuuau

SEQ ID NO: 136735 - RNA, 22 nt, Artificial Sequence
  Synthetic
gggaguccaagaguccucuuau

SEQ ID NO: 136736 - RNA, 23 nt, Artificial Sequence
  Synthetic
ugggaguccaagaguccucuuau

SEQ ID NO: 136737 - RNA, 24 nt, Artificial Sequence
  Synthetic
cugggaguccaagaguccucuuau

SEQ ID NO: 136738 - RNA, 18 nt, Artificial Sequence
  Synthetic
ggagugcgaauccacacu

SEQ ID NO: 136739 - RNA, 19 nt, Artificial Sequence
  Synthetic
aggagugcgaauccacacu

SEQ ID NO: 136740 - RNA, 20 nt, Artificial Sequence
  Synthetic
gaggagugcgaauccacacu

SEQ ID NO: 136741 - RNA, 21 nt, Artificial Sequence
  Synthetic
ggaggagugcgaauccacacu

SEQ ID NO: 136742 - RNA, 22 nt, Artificial Sequence
  Synthetic
uggaggagugcgaauccacacu

SEQ ID NO: 136743 - RNA, 23 nt, Artificial Sequence
  Synthetic
cuggaggagugcgaauccacacu

SEQ ID NO: 136744 - RNA, 24 nt, Artificial Sequence
  Synthetic
gcuggaggagugcgaauccacacu

SEQ ID NO: 136745 - RNA, 18 nt, Artificial Sequence
  Synthetic
cacugaacaaauggcacu

SEQ ID NO: 136746 - RNA, 19 nt, Artificial Sequence
  Synthetic
ccacugaacaaauggcacu

SEQ ID NO: 136747 - RNA, 20 nt, Artificial Sequence
  Synthetic
accacugaacaaauggcacu

SEQ ID NO: 136748 - RNA, 21 nt, Artificial Sequence
  Synthetic
aaccacugaacaaauggcacu

SEQ ID NO: 136749 - RNA, 22 nt, Artificial Sequence
  Synthetic
gaaccacugaacaaauggcacu

SEQ ID NO: 136750 - RNA, 23 nt, Artificial Sequence
  Synthetic
cgaaccacugaacaaauggcacu

SEQ ID NO: 136751 - RNA, 24 nt, Artificial Sequence
  Synthetic
acgaaccacugaacaaauggcacu

SEQ ID NO: 136752 - RNA, 18 nt, Artificial Sequence
  Synthetic
agcaaugcucaggagacu

SEQ ID NO: 136753 - RNA, 19 nt, Artificial Sequence
  Synthetic
gagcaaugcucaggagacu

SEQ ID NO: 136754 - RNA, 20 nt, Artificial Sequence
  Synthetic
ugagcaaugcucaggagacu

SEQ ID NO: 136755 - RNA, 21 nt, Artificial Sequence
  Synthetic
gugagcaaugcucaggagacu

SEQ ID NO: 136756 - RNA, 22 nt, Artificial Sequence
  Synthetic
ggugagcaaugcucaggagacu

SEQ ID NO: 136757 - RNA, 23 nt, Artificial Sequence
  Synthetic
aggugagcaaugcucaggagacu

SEQ ID NO: 136758 - RNA, 24 nt, Artificial Sequence
  Synthetic
gaggugagcaaugcucaggagacu

SEQ ID NO: 136759 - RNA, 18 nt, Artificial Sequence
  Synthetic
  misc_feature (9)..(9): n is a, c, g, or u
aaauacagnccccugacu

SEQ ID NO: 136760 - RNA, 19 nt, Artificial Sequence
  Synthetic
  misc_feature (10)..(10): n is a, c, g, or u
aaaauacagnccccugacu

SEQ ID NO: 136761 - RNA, 20 nt, Artificial Sequence
  Synthetic
  misc_feature (11)..(11): n is a, c, g, or u
gaaaauacagnccccugacu

SEQ ID NO: 136762 - RNA, 21 nt, Artificial Sequence
  Synthetic
  misc_feature (12)..(12): n is a, c, g, or u
ggaaaauacagnccccugacu

SEQ ID NO: 136763 - RNA, 22 nt, Artificial Sequence
  Synthetic
  misc_feature (13)..(13): n is a, c, g, or u
aggaaaauacagnccccugacu

SEQ ID NO: 136764 - RNA, 23 nt, Artificial Sequence
  Synthetic
  misc_feature (14)..(14): n is a, c, g, or u
caggaaaauacagnccccugacu

SEQ ID NO: 136765 - RNA, 24 nt, Artificial Sequence
  Synthetic
  misc_feature (15)..(15): n is a, c, g, or u
gcaggaaaauacagnccccugacu

SEQ ID NO: 136766 - RNA, 18 nt, Artificial Sequence
  Synthetic
guauuaacauaauugacu

SEQ ID NO: 136767 - RNA, 19 nt, Artificial Sequence
  Synthetic
aguauuaacauaauugacu

SEQ ID NO: 136768 - RNA, 20 nt, Artificial Sequence
  Synthetic
uaguauuaacauaauugacu

SEQ ID NO: 136769 - RNA, 21 nt, Artificial Sequence
  Synthetic
uuaguauuaacauaauugacu

SEQ ID NO: 136770 - RNA, 22 nt, Artificial Sequence
  Synthetic
guuaguauuaacauaauugacu

SEQ ID NO: 136771 - RNA, 23 nt, Artificial Sequence
  Synthetic
uguuaguauuaacauaauugacu

SEQ ID NO: 136772 - RNA, 24 nt, Artificial Sequence
  Synthetic
auguuaguauuaacauaauugacu

SEQ ID NO: 136773 - RNA, 18 nt, Artificial Sequence
  Synthetic
  misc_feature (7)..(7): n is a, c, g, or u
guucaunuacuguuuacu

SEQ ID NO: 136774 - RNA, 19 nt, Artificial Sequence
  Synthetic
  misc_feature (8)..(8): n is a, c, g, or u
gguucaunuacuguuuacu

SEQ ID NO: 136775 - RNA, 20 nt, Artificial Sequence
  Synthetic
  misc_feature (9)..(9): n is a, c, g, or u
agguucaunuacuguuuacu

SEQ ID NO: 136776 - RNA, 21 nt, Artificial Sequence
  Synthetic
  misc_feature (10)..(10): n is a, c, g, or u
aagguucaunuacuguuuacu

SEQ ID NO: 136777 - RNA, 22 nt, Artificial Sequence
  Synthetic
  misc_feature (11)..(11): n is a, c, g, or u
aaagguucaunuacuguuuacu

SEQ ID NO: 136778 - RNA, 23 nt, Artificial Sequence
  Synthetic
  misc_feature (12)..(12): n is a, c, g, or u
uaaagguucaunuacuguuuacu

SEQ ID NO: 136779 - RNA, 24 nt, Artificial Sequence
  Synthetic
  misc_feature (13)..(13): n is a, c, g, or u
guaaagguucaunuacuguuuacu

SEQ ID NO: 136780 - RNA, 18 nt, Artificial Sequence
  Synthetic
  misc_feature (2)..(2): n is a, c, g, or u
  misc_feature (5)..(5): n is a, c, g, or u
  misc_feature (8)..(8): n is a, c, g, or u
cngunaanuuucccaccu

SEQ ID NO: 136781 - RNA, 19 nt, Artificial Sequence
  Synthetic
  misc_feature (3)..(3): n is a, c, g, or u
  misc_feature (6)..(6): n is a, c, g, or u
  misc_feature (9)..(9): n is a, c, g, or u
ccngunaanuuucccaccu

SEQ ID NO: 136782 - RNA, 20 nt, Artificial Sequence
  Synthetic
  misc_feature (4)..(4): n is a, c, g, or u
  misc_feature (7)..(7): n is a, c, g, or u
  misc_feature (10)..(10): n is a, c, g, or u
cccngunaanuuucccaccu

SEQ ID NO: 136783 - RNA, 21 nt, Artificial Sequence
  Synthetic
  misc_feature (5)..(5): n is a, c, g, or u
  misc_feature (8)..(8): n is a, c, g, or u
  misc_feature (11)..(11): n is a, c, g, or u
gcccngunaanuuucccaccu

SEQ ID NO: 136784 - RNA, 22 nt, Artificial Sequence
  Synthetic
  misc_feature (6)..(6): n is a, c, g, or u
  misc_feature (9)..(9): n is a, c, g, or u
  misc_feature (12)..(12): n is a, c, g, or u
agcccngunaanuuucccaccu

SEQ ID NO: 136785 - RNA, 23 nt, Artificial Sequence
  Synthetic
  misc_feature (7)..(7): n is a, c, g, or u
  misc_feature (10)..(10): n is a, c, g, or u
  misc_feature (13)..(13): n is a, c, g, or u
aagcccngunaanuuucccaccu

SEQ ID NO: 136786 - RNA, 24 nt, Artificial Sequence
  Synthetic
  misc_feature (8)..(8): n is a, c, g, or u
  misc_feature (11)..(11): n is a, c, g, or u
  misc_feature (14)..(14): n is a, c, g, or u
aaagcccngunaanuuucccaccu

SEQ ID NO: 136787 - RNA, 18 nt, Artificial Sequence
  Synthetic
  misc_feature (11)..(11): n is a, c, g, or u
cacacgggugnucccccu

SEQ ID NO: 136788 - RNA, 19 nt, Artificial Sequence
  Synthetic
  misc_feature (12)..(12): n is a, c, g, or u
acacacgggugnucccccu

SEQ ID NO: 136789 - RNA, 20 nt, Artificial Sequence
  Synthetic
  misc_feature (13)..(13): n is a, c, g, or u
gacacacgggugnucccccu

SEQ ID NO: 136790 - RNA, 21 nt, Artificial Sequence
  Synthetic
  misc_feature (14)..(14): n is a, c, g, or u
agacacacgggugnucccccu

SEQ ID NO: 136791 - RNA, 22 nt, Artificial Sequence
  Synthetic
  misc_feature (15)..(15): n is a, c, g, or u
aagacacacgggugnucccccu

SEQ ID NO: 136792 - RNA, 23 nt, Artificial Sequence
  Synthetic
  misc_feature (16)..(16): n is a, c, g, or u
caagacacacgggugnucccccu

SEQ ID NO: 136793 - RNA, 24 nt, Artificial Sequence
  Synthetic
  misc_feature (17)..(17): n is a, c, g, or u
ccaagacacacgggugnucccccu

SEQ ID NO: 136794 - RNA, 18 nt, Artificial Sequence
  Synthetic
acagugggggaaagcccu

SEQ ID NO: 136795 - RNA, 19 nt, Artificial Sequence
  Synthetic
aacagugggggaaagcccu

SEQ ID NO: 136796 - RNA, 20 nt, Artificial Sequence
  Synthetic
aaacagugggggaaagcccu

SEQ ID NO: 136797 - RNA, 21 nt, Artificial Sequence
  Synthetic
caaacagugggggaaagcccu

SEQ ID NO: 136798 - RNA, 22 nt, Artificial Sequence
  Synthetic
ccaaacagugggggaaagcccu

SEQ ID NO: 136799 - RNA, 23 nt, Artificial Sequence
  Synthetic
gccaaacagugggggaaagcccu

SEQ ID NO: 136800 - RNA, 24 nt, Artificial Sequence
  Synthetic
agccaaacagugggggaaagcccu

SEQ ID NO: 136801 - RNA, 18 nt, Artificial Sequence
  Synthetic
  misc_feature (11)..(11): n is a, c, g, or u
uauauagaaunccagccu

SEQ ID NO: 136802 - RNA, 19 nt, Artificial Sequence
  Synthetic
  misc_feature (12)..(12): n is a, c, g, or u
uuauauagaaunccagccu

SEQ ID NO: 136803 - RNA, 20 nt, Artificial Sequence
  Synthetic
  misc_feature (13)..(13): n is a, c, g, or u
cuuauauagaaunccagccu

SEQ ID NO: 136804 - RNA, 21 nt, Artificial Sequence
  Synthetic
  misc_feature (14)..(14): n is a, c, g, or u
ucuuauauagaaunccagccu

SEQ ID NO: 136805 - RNA, 22 nt, Artificial Sequence
  Synthetic
  misc_feature (15)..(15): n is a, c, g, or u
cucuuauauagaaunccagccu

SEQ ID NO: 136806 - RNA, 23 nt, Artificial Sequence
  Synthetic
  misc_feature (16)..(16): n is a, c, g, or u
ccucuuauauagaaunccagccu

SEQ ID NO: 136807 - RNA, 24 nt, Artificial Sequence
  Synthetic
  misc_feature (17)..(17): n is a, c, g, or u
cccucuuauauagaaunccagccu

SEQ ID NO: 136808 - RNA, 18 nt, Artificial Sequence
  Synthetic
  misc_feature (1)..(1): n is a, c, g, or u
ncaauaugcccugagccu

SEQ ID NO: 136809 - RNA, 19 nt, Artificial Sequence
  Synthetic
  misc_feature (2)..(2): n is a, c, g, or u
gncaauaugcccugagccu

SEQ ID NO: 136810 - RNA, 20 nt, Artificial Sequence
  Synthetic
  misc_feature (1)..(1): n is a, c, g, or u
  misc_feature (3)..(3): n is a, c, g, or u
ngncaauaugcccugagccu

SEQ ID NO: 136811 - RNA, 21 nt, Artificial Sequence
  Synthetic
  misc_feature (2)..(2): n is a, c, g, or u
  misc_feature (4)..(4): n is a, c, g, or u
ungncaauaugcccugagccu

SEQ ID NO: 136812 - RNA, 22 nt, Artificial Sequence
  Synthetic
  misc_feature (3)..(3): n is a, c, g, or u
  misc_feature (5)..(5): n is a, c, g, or u
gungncaauaugcccugagccu

SEQ ID NO: 136813 - RNA, 23 nt, Artificial Sequence
  Synthetic
  misc_feature (4)..(4): n is a, c, g, or u
  misc_feature (6)..(6): n is a, c, g, or u
ugungncaauaugcccugagccu

SEQ ID NO: 136814 - RNA, 24 nt, Artificial Sequence
  Synthetic
  misc_feature (5)..(5): n is a, c, g, or u
  misc_feature (7)..(7): n is a, c, g, or u
cugungncaauaugcccugagccu

SEQ ID NO: 136815 - RNA, 18 nt, Artificial Sequence
  Synthetic
guuuacuuagaaaggccu

SEQ ID NO: 136816 - RNA, 19 nt, Artificial Sequence
  Synthetic
uguuuacuuagaaaggccu

SEQ ID NO: 136817 - RNA, 20 nt, Artificial Sequence
  Synthetic
cuguuuacuuagaaaggccu

SEQ ID NO: 136818 - RNA, 21 nt, Artificial Sequence
  Synthetic
acuguuuacuuagaaaggccu

SEQ ID NO: 136819 - RNA, 22 nt, Artificial Sequence
  Synthetic
uacuguuuacuuagaaaggccu

SEQ ID NO: 136820 - RNA, 23 nt, Artificial Sequence
  Synthetic
  misc_feature (1)..(1): n is a, c, g, or u
nuacuguuuacuuagaaaggccu

SEQ ID NO: 136821 - RNA, 24 nt, Artificial Sequence
  Synthetic
  misc_feature (2)..(2): n is a, c, g, or u
unuacuguuuacuuagaaaggccu

SEQ ID NO: 136822 - RNA, 18 nt, Artificial Sequence
  Synthetic
  misc_feature (15)..(15): n is a, c, g, or u
caguuggcaguacanccu

SEQ ID NO: 136823 - RNA, 19 nt, Artificial Sequence
  Synthetic
  misc_feature (16)..(16): n is a, c, g, or u
ccaguuggcaguacanccu

SEQ ID NO: 136824 - RNA, 20 nt, Artificial Sequence
  Synthetic
  misc_feature (17)..(17): n is a, c, g, or u
uccaguuggcaguacanccu

SEQ ID NO: 136825 - RNA, 21 nt, Artificial Sequence
  Synthetic
  misc_feature (18)..(18): n is a, c, g, or u
auccaguuggcaguacanccu

SEQ ID NO: 136826 - RNA, 22 nt, Artificial Sequence
  Synthetic
  misc_feature (1)..(1): n is a, c, g, or u
  misc_feature (19)..(19): n is a, c, g, or u
nauccaguuggcaguacanccu

SEQ ID NO: 136827 - RNA, 23 nt, Artificial Sequence
  Synthetic
  misc_feature (2)..(2): n is a, c, g, or u
  misc_feature (20)..(20): n is a, c, g, or u
gnauccaguuggcaguacanccu

SEQ ID NO: 136828 - RNA, 24 nt, Artificial Sequence
  Synthetic
  misc_feature (3)..(3): n is a, c, g, or u
  misc_feature (21)..(21): n is a, c, g, or u
agnauccaguuggcaguacanccu

SEQ ID NO: 136829 - RNA, 18 nt, Artificial Sequence
  Synthetic
  misc_feature (2)..(2): n is a, c, g, or u
cncaggguccccaguccu

SEQ ID NO: 136830 - RNA, 19 nt, Artificial Sequence
  Synthetic
  misc_feature (1)..(1): n is a, c, g, or u
  misc_feature (3)..(3): n is a, c, g, or u
ncncaggguccccaguccu

SEQ ID NO: 136831 - RNA, 20 nt, Artificial Sequence
  Synthetic
  misc_feature (2)..(2): n is a, c, g, or u
  misc_feature (4)..(4): n is a, c, g, or u
gncncaggguccccaguccu

SEQ ID NO: 136832 - RNA, 21 nt, Artificial Sequence
  Synthetic
  misc_feature (3)..(3): n is a, c, g, or u
  misc_feature (5)..(5): n is a, c, g, or u
cgncncaggguccccaguccu

SEQ ID NO: 136833 - RNA, 22 nt, Artificial Sequence
  Synthetic
  misc_feature (4)..(4): n is a, c, g, or u
  misc_feature (6)..(6): n is a, c, g, or u
ucgncncaggguccccaguccu

SEQ ID NO: 136834 - RNA, 23 nt, Artificial Sequence
  Synthetic
  misc_feature (5)..(5): n is a, c, g, or u
  misc_feature (7)..(7): n is a, c, g, or u
uucgncncaggguccccaguccu

SEQ ID NO: 136835 - RNA, 24 nt, Artificial Sequence
  Synthetic
  misc_feature (6)..(6): n is a, c, g, or u
  misc_feature (8)..(8): n is a, c, g, or u
guucgncncaggguccccaguccu

SEQ ID NO: 136836 - RNA, 18 nt, Artificial Sequence
  Synthetic
  misc_feature (5)..(5): n is a, c, g, or u
gccanccaaggcacagcu

SEQ ID NO: 136837 - RNA, 19 nt, Artificial Sequence
  Synthetic
  misc_feature (6)..(6): n is a, c, g, or u
agccanccaaggcacagcu

SEQ ID NO: 136838 - RNA, 20 nt, Artificial Sequence
  Synthetic
  misc_feature (7)..(7): n is a, c, g, or u
aagccanccaaggcacagcu

SEQ ID NO: 136839 - RNA, 21 nt, Artificial Sequence
  Synthetic
  misc_feature (8)..(8): n is a, c, g, or u
aaagccanccaaggcacagcu

SEQ ID NO: 136840 - RNA, 22 nt, Artificial Sequence
  Synthetic
  misc_feature (9)..(9): n is a, c, g, or u
caaagccanccaaggcacagcu

SEQ ID NO: 136841 - RNA, 23 nt, Artificial Sequence
  Synthetic
  misc_feature (10)..(10): n is a, c, g, or u
ccaaagccanccaaggcacagcu

SEQ ID NO: 136842 - RNA, 24 nt, Artificial Sequence
  Synthetic
  misc_feature (11)..(11): n is a, c, g, or u
cccaaagccanccaaggcacagcu

SEQ ID NO: 136843 - RNA, 18 nt, Artificial Sequence
  Synthetic
agguuccacgcaugcgcu

SEQ ID NO: 136844 - RNA, 19 nt, Artificial Sequence
  Synthetic
aagguuccacgcaugcgcu

SEQ ID NO: 136845 - RNA, 20 nt, Artificial Sequence
  Synthetic
aaagguuccacgcaugcgcu

SEQ ID NO: 136846 - RNA, 18 nt, Artificial Sequence
  Synthetic
uuugguggucuauaggcu

SEQ ID NO: 136847 - RNA, 19 nt, Artificial Sequence
  Synthetic
auuugguggucuauaggcu

SEQ ID NO: 136848 - RNA, 20 nt, Artificial Sequence
  Synthetic
cauuugguggucuauaggcu

SEQ ID NO: 136849 - RNA, 21 nt, Artificial Sequence
  Synthetic
gcauuugguggucuauaggcu

SEQ ID NO: 136850 - RNA, 22 nt, Artificial Sequence
  Synthetic
ggcauuugguggucuauaggcu

SEQ ID NO: 136851 - RNA, 23 nt, Artificial Sequence
  Synthetic
gggcauuugguggucuauaggcu

SEQ ID NO: 136852 - RNA, 24 nt, Artificial Sequence
  Synthetic
ggggcauuugguggucuauaggcu

SEQ ID NO: 136853 - RNA, 18 nt, Artificial Sequence
  Synthetic
  misc_feature (1)..(1): n is a, c, g, or u
nuuugcuccagaccggcu

SEQ ID NO: 136854 - RNA, 19 nt, Artificial Sequence
  Synthetic
  misc_feature (2)..(2): n is a, c, g, or u
gnuuugcuccagaccggcu

SEQ ID NO: 136855 - RNA, 20 nt, Artificial Sequence
  Synthetic
  misc_feature (3)..(3): n is a, c, g, or u
agnuuugcuccagaccggcu

SEQ ID NO: 136856 - RNA, 21 nt, Artificial Sequence
  Synthetic
  misc_feature (4)..(4): n is a, c, g, or u
gagnuuugcuccagaccggcu

SEQ ID NO: 136857 - RNA, 22 nt, Artificial Sequence
  Synthetic
  misc_feature (5)..(5): n is a, c, g, or u
ugagnuuugcuccagaccggcu

SEQ ID NO: 136858 - RNA, 23 nt, Artificial Sequence
  Synthetic
  misc_feature (6)..(6): n is a, c, g, or u
augagnuuugcuccagaccggcu

SEQ ID NO: 136859 - RNA, 24 nt, Artificial Sequence
  Synthetic
  misc_feature (1)..(1): n is a, c, g, or u
  misc_feature (7)..(7): n is a, c, g, or u
naugagnuuugcuccagaccggcu

SEQ ID NO: 136860 - RNA, 18 nt, Artificial Sequence
  Synthetic
acuccuaccugguuggcu

SEQ ID NO: 136861 - RNA, 19 nt, Artificial Sequence
  Synthetic
cacuccuaccugguuggcu

SEQ ID NO: 136862 - RNA, 20 nt, Artificial Sequence
  Synthetic
ccacuccuaccugguuggcu

SEQ ID NO: 136863 - RNA, 21 nt, Artificial Sequence
  Synthetic
cccacuccuaccugguuggcu

SEQ ID NO: 136864 - RNA, 22 nt, Artificial Sequence
  Synthetic
ucccacuccuaccugguuggcu

SEQ ID NO: 136865 - RNA, 23 nt, Artificial Sequence
  Synthetic
cucccacuccuaccugguuggcu

SEQ ID NO: 136866 - RNA, 24 nt, Artificial Sequence
  Synthetic
gcucccacuccuaccugguuggcu

SEQ ID NO: 136867 - RNA, 18 nt, Artificial Sequence
  Synthetic
ggugaggugagcaaugcu

SEQ ID NO: 136868 - RNA, 19 nt, Artificial Sequence
  Synthetic
uggugaggugagcaaugcu

SEQ ID NO: 136869 - RNA, 20 nt, Artificial Sequence
  Synthetic
auggugaggugagcaaugcu

SEQ ID NO: 136870 - RNA, 21 nt, Artificial Sequence
  Synthetic
uauggugaggugagcaaugcu

SEQ ID NO: 136871 - RNA, 22 nt, Artificial Sequence
  Synthetic
guauggugaggugagcaaugcu

SEQ ID NO: 136872 - RNA, 23 nt, Artificial Sequence
  Synthetic
  misc_feature (1)..(1): n is a, c, g, or u
nguauggugaggugagcaaugcu

SEQ ID NO: 136873 - RNA, 24 nt, Artificial Sequence
  Synthetic
  misc_feature (2)..(2): n is a, c, g, or u
cnguauggugaggugagcaaugcu

SEQ ID NO: 136874 - RNA, 18 nt, Artificial Sequence
  Synthetic
  misc_feature (3)..(3): n is a, c, g, or u
  misc_feature (6)..(6): n is a, c, g, or u
  misc_feature (12)..(12): n is a, c, g, or u
gunccnaugagnuuugcu

SEQ ID NO: 136875 - RNA, 19 nt, Artificial Sequence
  Synthetic
  misc_feature (4)..(4): n is a, c, g, or u
  misc_feature (7)..(7): n is a, c, g, or u
  misc_feature (13)..(13): n is a, c, g, or u
agunccnaugagnuuugcu

SEQ ID NO: 136876 - RNA, 20 nt, Artificial Sequence
  Synthetic
  misc_feature (5)..(5): n is a, c, g, or u
  misc_feature (8)..(8): n is a, c, g, or u
  misc_feature (14)..(14): n is a, c, g, or u
cagunccnaugagnuuugcu

SEQ ID NO: 136877 - RNA, 21 nt, Artificial Sequence
  Synthetic
  misc_feature (6)..(6): n is a, c, g, or u
  misc_feature (9)..(9): n is a, c, g, or u
  misc_feature (15)..(15): n is a, c, g, or u
ucagunccnaugagnuuugcu

SEQ ID NO: 136878 - RNA, 22 nt, Artificial Sequence
  Synthetic
  misc_feature (1)..(1): n is a, c, g, or u
  misc_feature (7)..(7): n is a, c, g, or u
  misc_feature (10)..(10): n is a, c, g, or u
  misc_feature (16)..(16): n is a, c, g, or u
nucagunccnaugagnuuugcu

SEQ ID NO: 136879 - RNA, 23 nt, Artificial Sequence
  Synthetic
  misc_feature (2)..(2): n is a, c, g, or u
  misc_feature (8)..(8): n is a, c, g, or u
  misc_feature (11)..(11): n is a, c, g, or u
  misc_feature (17)..(17): n is a, c, g, or u
unucagunccnaugagnuuugcu

SEQ ID NO: 136880 - RNA, 24 nt, Artificial Sequence
  Synthetic
  misc_feature (3)..(3): n is a, c, g, or u
  misc_feature (9)..(9): n is a, c, g, or u
  misc_feature (12)..(12): n is a, c, g, or u
  misc_feature (18)..(18): n is a, c, g, or u
uunucagunccnaugagnuuugcu

SEQ ID NO: 136881 - RNA, 18 nt, Artificial Sequence
  Synthetic
  misc_feature (16)..(16): n is a, c, g, or u
cacaucauccauauancu

SEQ ID NO: 136882 - RNA, 19 nt, Artificial Sequence
  Synthetic
  misc_feature (17)..(17): n is a, c, g, or u
ccacaucauccauauancu

SEQ ID NO: 136883 - RNA, 20 nt, Artificial Sequence
  Synthetic
  misc_feature (18)..(18): n is a, c, g, or u
accacaucauccauauancu

SEQ ID NO: 136884 - RNA, 21 nt, Artificial Sequence
  Synthetic
  misc_feature (19)..(19): n is a, c, g, or u
uaccacaucauccauauancu

SEQ ID NO: 136885 - RNA, 22 nt, Artificial Sequence
  Synthetic
  misc_feature (20)..(20): n is a, c, g, or u
auaccacaucauccauauancu

SEQ ID NO: 136886 - RNA, 23 nt, Artificial Sequence
  Synthetic
  misc_feature (21)..(21): n is a, c, g, or u
aauaccacaucauccauauancu

SEQ ID NO: 136887 - RNA, 24 nt, Artificial Sequence
  Synthetic
  misc_feature (22)..(22): n is a, c, g, or u
caauaccacaucauccauauancu

SEQ ID NO: 136888 - RNA, 18 nt, Artificial Sequence
  Synthetic
  misc_feature (2)..(3): n is a, c, g, or u
  misc_feature (5)..(5): n is a, c, g, or u
  misc_feature (13)..(13): n is a, c, g, or u
gnngnuaggauanaaucu

SEQ ID NO: 136889 - RNA, 19 nt, Artificial Sequence
  Synthetic
  misc_feature (3)..(4): n is a, c, g, or u
  misc_feature (6)..(6): n is a, c, g, or u
  misc_feature (14)..(14): n is a, c, g, or u
ugnngnuaggauanaaucu

SEQ ID NO: 136890 - RNA, 20 nt, Artificial Sequence
  Synthetic
  misc_feature (4)..(5): n is a, c, g, or u
  misc_feature (7)..(7): n is a, c, g, or u
  misc_feature (15)..(15): n is a, c, g, or u
gugnngnuaggauanaaucu

SEQ ID NO: 136891 - RNA, 21 nt, Artificial Sequence
  Synthetic
  misc_feature (5)..(6): n is a, c, g, or u
  misc_feature (8)..(8): n is a, c, g, or u
  misc_feature (16)..(16): n is a, c, g, or u
agugnngnuaggauanaaucu

SEQ ID NO: 136892 - RNA, 22 nt, Artificial Sequence
  Synthetic
  misc_feature (6)..(7): n is a, c, g, or u
  misc_feature (9)..(9): n is a, c, g, or u
  misc_feature (17)..(17): n is a, c, g, or u
uagugnngnuaggauanaaucu

SEQ ID NO: 136893 - RNA, 23 nt, Artificial Sequence
  Synthetic
  misc_feature (7)..(8): n is a, c, g, or u
  misc_feature (10)..(10): n is a, c, g, or u
  misc_feature (18)..(18): n is a, c, g, or u
uuagugnngnuaggauanaaucu

SEQ ID NO: 136894 - RNA, 24 nt, Artificial Sequence
  Synthetic
  misc_feature (8)..(9): n is a, c, g, or u
  misc_feature (11)..(11): n is a, c, g, or u
  misc_feature (19)..(19): n is a, c, g, or u
uuuagugnngnuaggauanaaucu

SEQ ID NO: 136895 - RNA, 18 nt, Artificial Sequence
  Synthetic
agaccuugggcaggaucu

SEQ ID NO: 136896 - RNA, 19 nt, Artificial Sequence
  Synthetic
aagaccuugggcaggaucu

SEQ ID NO: 136897 - RNA, 20 nt, Artificial Sequence
  Synthetic
uaagaccuugggcaggaucu

SEQ ID NO: 136898 - RNA, 21 nt, Artificial Sequence
  Synthetic
guaagaccuugggcaggaucu

SEQ ID NO: 136899 - RNA, 22 nt, Artificial Sequence
  Synthetic
uguaagaccuugggcaggaucu

SEQ ID NO: 136900 - RNA, 23 nt, Artificial Sequence
  Synthetic
auguaagaccuugggcaggaucu

SEQ ID NO: 136901 - RNA, 24 nt, Artificial Sequence
  Synthetic
uauguaagaccuugggcaggaucu

SEQ ID NO: 136902 - RNA, 18 nt, Artificial Sequence
  Synthetic
  misc_feature (6)..(6): n is a, c, g, or u
ucccungaugcuggaucu

SEQ ID NO: 136903 - RNA, 19 nt, Artificial Sequence
  Synthetic
  misc_feature (7)..(7): n is a, c, g, or u
aucccungaugcuggaucu

SEQ ID NO: 136904 - RNA, 20 nt, Artificial Sequence
  Synthetic
  misc_feature (8)..(8): n is a, c, g, or u
gaucccungaugcuggaucu

SEQ ID NO: 136905 - RNA, 21 nt, Artificial Sequence
  Synthetic
  misc_feature (9)..(9): n is a, c, g, or u
agaucccungaugcuggaucu

SEQ ID NO: 136906 - RNA, 22 nt, Artificial Sequence
  Synthetic
  misc_feature (10)..(10): n is a, c, g, or u
uagaucccungaugcuggaucu

SEQ ID NO: 136907 - RNA, 23 nt, Artificial Sequence
  Synthetic
  misc_feature (11)..(11): n is a, c, g, or u
cuagaucccungaugcuggaucu

SEQ ID NO: 136908 - RNA, 24 nt, Artificial Sequence
  Synthetic
  misc_feature (12)..(12): n is a, c, g, or u
acuagaucccungaugcuggaucu

SEQ ID NO: 136909 - RNA, 18 nt, Artificial Sequence
  Synthetic
cugaggaugacugucucu

SEQ ID NO: 136910 - RNA, 19 nt, Artificial Sequence
  Synthetic
ccugaggaugacugucucu

SEQ ID NO: 136911 - RNA, 20 nt, Artificial Sequence
  Synthetic
gccugaggaugacugucucu

SEQ ID NO: 136912 - RNA, 21 nt, Artificial Sequence
  Synthetic
ggccugaggaugacugucucu

SEQ ID NO: 136913 - RNA, 22 nt, Artificial Sequence
  Synthetic
uggccugaggaugacugucucu

SEQ ID NO: 136914 - RNA, 23 nt, Artificial Sequence
  Synthetic
auggccugaggaugacugucucu

SEQ ID NO: 136915 - RNA, 24 nt, Artificial Sequence
  Synthetic
cauggccugaggaugacugucucu

SEQ ID NO: 136916 - RNA, 18 nt, Artificial Sequence
  Synthetic
  misc_feature (1)..(1): n is a, c, g, or u
  misc_feature (7)..(7): n is a, c, g, or u
  misc_feature (13)..(13): n is a, c, g, or u
nucaagnacagunucucu

SEQ ID NO: 136917 - RNA, 19 nt, Artificial Sequence
  Synthetic
  misc_feature (2)..(2): n is a, c, g, or u
  misc_feature (8)..(8): n is a, c, g, or u
  misc_feature (14)..(14): n is a, c, g, or u
anucaagnacagunucucu

SEQ ID NO: 136918 - RNA, 20 nt, Artificial Sequence
  Synthetic
  misc_feature (3)..(3): n is a, c, g, or u
  misc_feature (9)..(9): n is a, c, g, or u
  misc_feature (15)..(15): n is a, c, g, or u
uanucaagnacagunucucu

SEQ ID NO: 136919 - RNA, 21 nt, Artificial Sequence
  Synthetic
  misc_feature (4)..(4): n is a, c, g, or u
  misc_feature (10)..(10): n is a, c, g, or u
  misc_feature (16)..(16): n is a, c, g, or u
auanucaagnacagunucucu

SEQ ID NO: 136920 - RNA, 22 nt, Artificial Sequence
  Synthetic
  misc_feature (5)..(5): n is a, c, g, or u
  misc_feature (11)..(11): n is a, c, g, or u
  misc_feature (17)..(17): n is a, c, g, or u
aauanucaagnacagunucucu

SEQ ID NO: 136921 - RNA, 23 nt, Artificial Sequence
  Synthetic
  misc_feature (6)..(6): n is a, c, g, or u
  misc_feature (12)..(12): n is a, c, g, or u
  misc_feature (18)..(18): n is a, c, g, or u
aaauanucaagnacagunucucu

SEQ ID NO: 136922 - RNA, 24 nt, Artificial Sequence
  Synthetic
  misc_feature (7)..(7): n is a, c, g, or u
  misc_feature (13)..(13): n is a, c, g, or u
  misc_feature (19)..(19): n is a, c, g, or u
caaauanucaagnacagunucucu

SEQ ID NO: 136923 - RNA, 18 nt, Artificial Sequence
  Synthetic
  misc_feature (3)..(3): n is a, c, g, or u
ucnuuaaacacacagucu

SEQ ID NO: 136924 - RNA, 19 nt, Artificial Sequence
  Synthetic
  misc_feature (4)..(4): n is a, c, g, or u
gucnuuaaacacacagucu

SEQ ID NO: 136925 - RNA, 20 nt, Artificial Sequence
  Synthetic
  misc_feature (5)..(5): n is a, c, g, or u
agucnuuaaacacacagucu

SEQ ID NO: 136926 - RNA, 21 nt, Artificial Sequence
  Synthetic
  misc_feature (6)..(6): n is a, c, g, or u
cagucnuuaaacacacagucu

SEQ ID NO: 136927 - RNA, 22 nt, Artificial Sequence
  Synthetic
  misc_feature (7)..(7): n is a, c, g, or u
ccagucnuuaaacacacagucu

SEQ ID NO: 136928 - RNA, 23 nt, Artificial Sequence
  Synthetic
  misc_feature (8)..(8): n is a, c, g, or u
cccagucnuuaaacacacagucu

SEQ ID NO: 136929 - RNA, 24 nt, Artificial Sequence
  Synthetic
  misc_feature (9)..(9): n is a, c, g, or u
ucccagucnuuaaacacacagucu

SEQ ID NO: 136930 - RNA, 18 nt, Artificial Sequence
  Synthetic
  misc_feature (13)..(13): n is a, c, g, or u
cgauugagaucuncgucu

SEQ ID NO: 136931 - RNA, 19 nt, Artificial Sequence
  Synthetic
  misc_feature (14)..(14): n is a, c, g, or u
gcgauugagaucuncgucu

SEQ ID NO: 136932 - RNA, 20 nt, Artificial Sequence
  Synthetic
  misc_feature (15)..(15): n is a, c, g, or u
ggcgauugagaucuncgucu

SEQ ID NO: 136933 - RNA, 21 nt, Artificial Sequence
  Synthetic
  misc_feature (16)..(16): n is a, c, g, or u
cggcgauugagaucuncgucu

SEQ ID NO: 136934 - RNA, 22 nt, Artificial Sequence
  Synthetic
  misc_feature (17)..(17): n is a, c, g, or u
gcggcgauugagaucuncgucu

SEQ ID NO: 136935 - RNA, 23 nt, Artificial Sequence
  Synthetic
  misc_feature (18)..(18): n is a, c, g, or u
cgcggcgauugagaucuncgucu

SEQ ID NO: 136936 - RNA, 24 nt, Artificial Sequence
  Synthetic
  misc_feature (19)..(19): n is a, c, g, or u
acgcggcgauugagaucuncgucu

SEQ ID NO: 136937 - RNA, 18 nt, Artificial Sequence
  Synthetic
  misc_feature (10)..(10): n is a, c, g, or u
gccucggucncgucgucu

SEQ ID NO: 136938 - RNA, 19 nt, Artificial Sequence
  Synthetic
  misc_feature (11)..(11): n is a, c, g, or u
ugccucggucncgucgucu

SEQ ID NO: 136939 - RNA, 20 nt, Artificial Sequence
  Synthetic
  misc_feature (12)..(12): n is a, c, g, or u
cugccucggucncgucgucu

SEQ ID NO: 136940 - RNA, 21 nt, Artificial Sequence
  Synthetic
  misc_feature (13)..(13): n is a, c, g, or u
ccugccucggucncgucgucu

SEQ ID NO: 136941 - RNA, 22 nt, Artificial Sequence
  Synthetic
  misc_feature (14)..(14): n is a, c, g, or u
accugccucggucncgucgucu

SEQ ID NO: 136942 - RNA, 23 nt, Artificial Sequence
  Synthetic
  misc_feature (15)..(15): n is a, c, g, or u
gaccugccucggucncgucgucu

SEQ ID NO: 136943 - RNA, 24 nt, Artificial Sequence
  Synthetic
  misc_feature (16)..(16): n is a, c, g, or u
ggaccugccucggucncgucgucu

SEQ ID NO: 136944 - RNA, 18 nt, Artificial Sequence
  Synthetic
aggggcauuugguggucu

SEQ ID NO: 136945 - RNA, 19 nt, Artificial Sequence
  Synthetic
uaggggcauuugguggucu

SEQ ID NO: 136946 - RNA, 20 nt, Artificial Sequence
  Synthetic
auaggggcauuugguggucu

SEQ ID NO: 136947 - RNA, 21 nt, Artificial Sequence
  Synthetic
gauaggggcauuugguggucu

SEQ ID NO: 136948 - RNA, 22 nt, Artificial Sequence
  Synthetic
agauaggggcauuugguggucu

SEQ ID NO: 136949 - RNA, 23 nt, Artificial Sequence
  Synthetic
aagauaggggcauuugguggucu

SEQ ID NO: 136950 - RNA, 24 nt, Artificial Sequence
  Synthetic
uaagauaggggcauuugguggucu

SEQ ID NO: 136951 - RNA, 18 nt, Artificial Sequence
  Synthetic
gccugaggaugacugucu

SEQ ID NO: 136952 - RNA, 19 nt, Artificial Sequence
  Synthetic
ggccugaggaugacugucu

SEQ ID NO: 136953 - RNA, 20 nt, Artificial Sequence
  Synthetic
uggccugaggaugacugucu

SEQ ID NO: 136954 - RNA, 21 nt, Artificial Sequence
  Synthetic
auggccugaggaugacugucu

SEQ ID NO: 136955 - RNA, 22 nt, Artificial Sequence
  Synthetic
cauggccugaggaugacugucu

SEQ ID NO: 136956 - RNA, 23 nt, Artificial Sequence
  Synthetic
gcauggccugaggaugacugucu

SEQ ID NO: 136957 - RNA, 24 nt, Artificial Sequence
  Synthetic
ugcauggccugaggaugacugucu

SEQ ID NO: 136958 - RNA, 18 nt, Artificial Sequence
  Synthetic
  misc_feature (9)..(9): n is a, c, g, or u
gguuuaaunccuuugucu

SEQ ID NO: 136959 - RNA, 19 nt, Artificial Sequence
  Synthetic
  misc_feature (10)..(10): n is a, c, g, or u
agguuuaaunccuuugucu

SEQ ID NO: 136960 - RNA, 20 nt, Artificial Sequence
  Synthetic
  misc_feature (11)..(11): n is a, c, g, or u
aagguuuaaunccuuugucu

SEQ ID NO: 136961 - RNA, 21 nt, Artificial Sequence
  Synthetic
  misc_feature (12)..(12): n is a, c, g, or u
uaagguuuaaunccuuugucu

SEQ ID NO: 136962 - RNA, 22 nt, Artificial Sequence
  Synthetic
  misc_feature (13)..(13): n is a, c, g, or u
auaagguuuaaunccuuugucu

SEQ ID NO: 136963 - RNA, 23 nt, Artificial Sequence
  Synthetic
  misc_feature (14)..(14): n is a, c, g, or u
aauaagguuuaaunccuuugucu

SEQ ID NO: 136964 - RNA, 24 nt, Artificial Sequence
  Synthetic
  misc_feature (15)..(15): n is a, c, g, or u
uaauaagguuuaaunccuuugucu

SEQ ID NO: 136965 - RNA, 18 nt, Artificial Sequence
  Synthetic
cgagggaguucuucuucu

SEQ ID NO: 136966 - RNA, 19 nt, Artificial Sequence
  Synthetic
gcgagggaguucuucuucu

SEQ ID NO: 136967 - RNA, 20 nt, Artificial Sequence
  Synthetic
ggcgagggaguucuucuucu

SEQ ID NO: 136968 - RNA, 21 nt, Artificial Sequence
  Synthetic
aggcgagggaguucuucuucu

SEQ ID NO: 136969 - RNA, 22 nt, Artificial Sequence
  Synthetic
gaggcgagggaguucuucuucu

SEQ ID NO: 136970 - RNA, 23 nt, Artificial Sequence
  Synthetic
cgaggcgagggaguucuucuucu

SEQ ID NO: 136971 - RNA, 24 nt, Artificial Sequence
  Synthetic
gcgaggcgagggaguucuucuucu

SEQ ID NO: 136972 - RNA, 18 nt, Artificial Sequence
  Synthetic
aggcgagggaguucuucu

SEQ ID NO: 136973 - RNA, 19 nt, Artificial Sequence
  Synthetic
gaggcgagggaguucuucu

SEQ ID NO: 136974 - RNA, 20 nt, Artificial Sequence
  Synthetic
cgaggcgagggaguucuucu

SEQ ID NO: 136975 - RNA, 21 nt, Artificial Sequence
  Synthetic
gcgaggcgagggaguucuucu

SEQ ID NO: 136976 - RNA, 22 nt, Artificial Sequence
  Synthetic
ugcgaggcgagggaguucuucu

SEQ ID NO: 136977 - RNA, 23 nt, Artificial Sequence
  Synthetic
cugcgaggcgagggaguucuucu

SEQ ID NO: 136978 - RNA, 24 nt, Artificial Sequence
  Synthetic
ucugcgaggcgagggaguucuucu

SEQ ID NO: 136979 - RNA, 18 nt, Artificial Sequence
  Synthetic
guaaguuggcgagaaagu

SEQ ID NO: 136980 - RNA, 19 nt, Artificial Sequence
  Synthetic
uguaaguuggcgagaaagu

SEQ ID NO: 136981 - RNA, 20 nt, Artificial Sequence
  Synthetic
uuguaaguuggcgagaaagu

SEQ ID NO: 136982 - RNA, 21 nt, Artificial Sequence
  Synthetic
cuuguaaguuggcgagaaagu

SEQ ID NO: 136983 - RNA, 22 nt, Artificial Sequence
  Synthetic
ccuuguaaguuggcgagaaagu

SEQ ID NO: 136984 - RNA, 23 nt, Artificial Sequence
  Synthetic
gccuuguaaguuggcgagaaagu

SEQ ID NO: 136985 - RNA, 24 nt, Artificial Sequence
  Synthetic
ggccuuguaaguuggcgagaaagu

SEQ ID NO: 136986 - RNA, 18 nt, Artificial Sequence
  Synthetic
  misc_feature (1)..(1): n is a, c, g, or u
ngacggaaggaaagaagu

SEQ ID NO: 136987 - RNA, 19 nt, Artificial Sequence
  Synthetic
  misc_feature (2)..(2): n is a, c, g, or u
cngacggaaggaaagaagu

SEQ ID NO: 136988 - RNA, 20 nt, Artificial Sequence
  Synthetic
  misc_feature (1)..(1): n is a, c, g, or u
  misc_feature (3)..(3): n is a, c, g, or u
ncngacggaaggaaagaagu

SEQ ID NO: 136989 - RNA, 21 nt, Artificial Sequence
  Synthetic
  misc_feature (2)..(2): n is a, c, g, or u
  misc_feature (4)..(4): n is a, c, g, or u
cncngacggaaggaaagaagu

SEQ ID NO: 136990 - RNA, 22 nt, Artificial Sequence
  Synthetic
  misc_feature (3)..(3): n is a, c, g, or u
  misc_feature (5)..(5): n is a, c, g, or u
ucncngacggaaggaaagaagu

SEQ ID NO: 136991 - RNA, 23 nt, Artificial Sequence
  Synthetic
  misc_feature (4)..(4): n is a, c, g, or u
  misc_feature (6)..(6): n is a, c, g, or u
aucncngacggaaggaaagaagu

SEQ ID NO: 136992 - RNA, 24 nt, Artificial Sequence
  Synthetic
  misc_feature (5)..(5): n is a, c, g, or u
  misc_feature (7)..(7): n is a, c, g, or u
gaucncngacggaaggaaagaagu

SEQ ID NO: 136993 - RNA, 18 nt, Artificial Sequence
  Synthetic
  misc_feature (2)..(2): n is a, c, g, or u
ancugaaagccaaacagu

SEQ ID NO: 136994 - RNA, 19 nt, Artificial Sequence
  Synthetic
  misc_feature (3)..(3): n is a, c, g, or u
uancugaaagccaaacagu

SEQ ID NO: 136995 - RNA, 20 nt, Artificial Sequence
  Synthetic
  misc_feature (4)..(4): n is a, c, g, or u
auancugaaagccaaacagu

SEQ ID NO: 136996 - RNA, 21 nt, Artificial Sequence
  Synthetic
  misc_feature (5)..(5): n is a, c, g, or u
uauancugaaagccaaacagu

SEQ ID NO: 136997 - RNA, 22 nt, Artificial Sequence
  Synthetic
  misc_feature (6)..(6): n is a, c, g, or u
auauancugaaagccaaacagu

SEQ ID NO: 136998 - RNA, 23 nt, Artificial Sequence
  Synthetic
  misc_feature (7)..(7): n is a, c, g, or u
cauauancugaaagccaaacagu

SEQ ID NO: 136999 - RNA, 24 nt, Artificial Sequence
  Synthetic
  misc_feature (8)..(8): n is a, c, g, or u
ccauauancugaaagccaaacagu

SEQ ID NO: 137000 - RNA, 18 nt, Artificial Sequence
  Synthetic
  misc_feature (4)..(4): n is a, c, g, or u
ucunuuuucauuuacagu

SEQ ID NO: 137001 - RNA, 19 nt, Artificial Sequence
  Synthetic
  misc_feature (5)..(5): n is a, c, g, or u
uucunuuuucauuuacagu

SEQ ID NO: 137002 - RNA, 20 nt, Artificial Sequence
  Synthetic
  misc_feature (6)..(6): n is a, c, g, or u
cuucunuuuucauuuacagu

SEQ ID NO: 137003 - RNA, 21 nt, Artificial Sequence
  Synthetic
  misc_feature (7)..(7): n is a, c, g, or u
ucuucunuuuucauuuacagu

SEQ ID NO: 137004 - RNA, 22 nt, Artificial Sequence
  Synthetic
  misc_feature (8)..(8): n is a, c, g, or u
aucuucunuuuucauuuacagu

SEQ ID NO: 137005 - RNA, 23 nt, Artificial Sequence
  Synthetic
  misc_feature (9)..(9): n is a, c, g, or u
aaucuucunuuuucauuuacagu

SEQ ID NO: 137006 - RNA, 24 nt, Artificial Sequence
  Synthetic
  misc_feature (1)..(1): n is a, c, g, or u
  misc_feature (10)..(10): n is a, c, g, or u
naaucuucunuuuucauuuacagu

SEQ ID NO: 137007 - RNA, 18 nt, Artificial Sequence
  Synthetic
  misc_feature (13)..(13): n is a, c, g, or u
agaaggggacganagagu

SEQ ID NO: 137008 - RNA, 19 nt, Artificial Sequence
  Synthetic
  misc_feature (14)..(14): n is a, c, g, or u
gagaaggggacganagagu

SEQ ID NO: 137009 - RNA, 20 nt, Artificial Sequence
  Synthetic
  misc_feature (15)..(15): n is a, c, g, or u
ggagaaggggacganagagu

SEQ ID NO: 137010 - RNA, 21 nt, Artificial Sequence
  Synthetic
  misc_feature (16)..(16): n is a, c, g, or u
cggagaaggggacganagagu

SEQ ID NO: 137011 - RNA, 22 nt, Artificial Sequence
  Synthetic
  misc_feature (17)..(17): n is a, c, g, or u
acggagaaggggacganagagu

SEQ ID NO: 137012 - RNA, 23 nt, Artificial Sequence
  Synthetic
  misc_feature (18)..(18): n is a, c, g, or u
gacggagaaggggacganagagu

SEQ ID NO: 137013 - RNA, 24 nt, Artificial Sequence
  Synthetic
  misc_feature (19)..(19): n is a, c, g, or u
agacggagaaggggacganagagu

SEQ ID NO: 137014 - RNA, 18 nt, Artificial Sequence
  Synthetic
gagaaguccaccacgagu

SEQ ID NO: 137015 - RNA, 19 nt, Artificial Sequence
  Synthetic
agagaaguccaccacgagu

SEQ ID NO: 137016 - RNA, 20 nt, Artificial Sequence
  Synthetic
gagagaaguccaccacgagu

SEQ ID NO: 137017 - RNA, 21 nt, Artificial Sequence
  Synthetic
ugagagaaguccaccacgagu

SEQ ID NO: 137018 - RNA, 22 nt, Artificial Sequence
  Synthetic
uugagagaaguccaccacgagu

SEQ ID NO: 137019 - RNA, 23 nt, Artificial Sequence
  Synthetic
auugagagaaguccaccacgagu

SEQ ID NO: 137020 - RNA, 24 nt, Artificial Sequence
  Synthetic
aauugagagaaguccaccacgagu

SEQ ID NO: 137021 - RNA, 18 nt, Artificial Sequence
  Synthetic
guugacauugcugggagu

SEQ ID NO: 137022 - RNA, 19 nt, Artificial Sequence
  Synthetic
cguugacauugcugggagu

SEQ ID NO: 137023 - RNA, 20 nt, Artificial Sequence
  Synthetic
ucguugacauugcugggagu

SEQ ID NO: 137024 - RNA, 21 nt, Artificial Sequence
  Synthetic
gucguugacauugcugggagu

SEQ ID NO: 137025 - RNA, 22 nt, Artificial Sequence
  Synthetic
ggucguugacauugcugggagu

SEQ ID NO: 137026 - RNA, 23 nt, Artificial Sequence
  Synthetic
cggucguugacauugcugggagu

SEQ ID NO: 137027 - RNA, 24 nt, Artificial Sequence
  Synthetic
ucggucguugacauugcugggagu

SEQ ID NO: 137028 - RNA, 18 nt, Artificial Sequence
  Synthetic
  misc_feature (1)..(1): n is a, c, g, or u
nuuucccaccuuaugagu

SEQ ID NO: 137029 - RNA, 19 nt, Artificial Sequence
  Synthetic
  misc_feature (2)..(2): n is a, c, g, or u
anuuucccaccuuaugagu

SEQ ID NO: 137030 - RNA, 20 nt, Artificial Sequence
  Synthetic
  misc_feature (3)..(3): n is a, c, g, or u
aanuuucccaccuuaugagu

SEQ ID NO: 137031 - RNA, 21 nt, Artificial Sequence
  Synthetic
  misc_feature (1)..(1): n is a, c, g, or u
  misc_feature (4)..(4): n is a, c, g, or u
naanuuucccaccuuaugagu

SEQ ID NO: 137032 - RNA, 22 nt, Artificial Sequence
  Synthetic
  misc_feature (2)..(2): n is a, c, g, or u
  misc_feature (5)..(5): n is a, c, g, or u
unaanuuucccaccuuaugagu

SEQ ID NO: 137033 - RNA, 23 nt, Artificial Sequence
  Synthetic
  misc_feature (3)..(3): n is a, c, g, or u
  misc_feature (6)..(6): n is a, c, g, or u
gunaanuuucccaccuuaugagu

SEQ ID NO: 137034 - RNA, 24 nt, Artificial Sequence
  Synthetic
  misc_feature (1)..(1): n is a, c, g, or u
  misc_feature (4)..(4): n is a, c, g, or u
  misc_feature (7)..(7): n is a, c, g, or u
ngunaanuuucccaccuuaugagu

SEQ ID NO: 137035 - RNA, 18 nt, Artificial Sequence
  Synthetic
  misc_feature (1)..(1): n is a, c, g, or u
  misc_feature (6)..(7): n is a, c, g, or u
nuuuanncccauguuagu

SEQ ID NO: 137036 - RNA, 19 nt, Artificial Sequence
  Synthetic
  misc_feature (2)..(2): n is a, c, g, or u
  misc_feature (7)..(8): n is a, c, g, or u
unuuuanncccauguuagu

SEQ ID NO: 137037 - RNA, 20 nt, Artificial Sequence
  Synthetic
  misc_feature (3)..(3): n is a, c, g, or u
  misc_feature (8)..(9): n is a, c, g, or u
aunuuuanncccauguuagu

SEQ ID NO: 137038 - RNA, 21 nt, Artificial Sequence
  Synthetic
  misc_feature (1)..(1): n is a, c, g, or u
  misc_feature (4)..(4): n is a, c, g, or u
  misc_feature (9)..(10): n is a, c, g, or u
naunuuuanncccauguuagu

SEQ ID NO: 137039 - RNA, 22 nt, Artificial Sequence
  Synthetic
  misc_feature (2)..(2): n is a, c, g, or u
  misc_feature (5)..(5): n is a, c, g, or u
  misc_feature (10)..(11): n is a, c, g, or u
unaunuuuanncccauguuagu

SEQ ID NO: 137040 - RNA, 23 nt, Artificial Sequence
  Synthetic
  misc_feature (3)..(3): n is a, c, g, or u
  misc_feature (6)..(6): n is a, c, g, or u
  misc_feature (11)..(12): n is a, c, g, or u
cunaunuuuanncccauguuagu

SEQ ID NO: 137041 - RNA, 24 nt, Artificial Sequence
  Synthetic
  misc_feature (4)..(4): n is a, c, g, or u
  misc_feature (7)..(7): n is a, c, g, or u
  misc_feature (12)..(13): n is a, c, g, or u
ccunaunuuuanncccauguuagu

SEQ ID NO: 137042 - RNA, 18 nt, Artificial Sequence
  Synthetic
guggucuccaugcaacgu

SEQ ID NO: 137043 - RNA, 19 nt, Artificial Sequence
  Synthetic
gguggucuccaugcaacgu

SEQ ID NO: 137044 - RNA, 20 nt, Artificial Sequence
  Synthetic
cgguggucuccaugcaacgu

SEQ ID NO: 137045 - RNA, 21 nt, Artificial Sequence
  Synthetic
acgguggucuccaugcaacgu

SEQ ID NO: 137046 - RNA, 22 nt, Artificial Sequence
  Synthetic
cacgguggucuccaugcaacgu

SEQ ID NO: 137047 - RNA, 23 nt, Artificial Sequence
  Synthetic
ucacgguggucuccaugcaacgu

SEQ ID NO: 137048 - RNA, 24 nt, Artificial Sequence
  Synthetic
uucacgguggucuccaugcaacgu

SEQ ID NO: 137049 - RNA, 18 nt, Artificial Sequence
  Synthetic
cagacggggagaccgcgu

SEQ ID NO: 137050 - RNA, 19 nt, Artificial Sequence
  Synthetic
acagacggggagaccgcgu

SEQ ID NO: 137051 - RNA, 20 nt, Artificial Sequence
  Synthetic
cacagacggggagaccgcgu

SEQ ID NO: 137052 - RNA, 21 nt, Artificial Sequence
  Synthetic
gcacagacggggagaccgcgu

SEQ ID NO: 137053 - RNA, 22 nt, Artificial Sequence
  Synthetic
ggcacagacggggagaccgcgu

SEQ ID NO: 137054 - RNA, 23 nt, Artificial Sequence
  Synthetic
aggcacagacggggagaccgcgu

SEQ ID NO: 137055 - RNA, 24 nt, Artificial Sequence
  Synthetic
aaggcacagacggggagaccgcgu

SEQ ID NO: 137056 - RNA, 18 nt, Artificial Sequence
  Synthetic
agaugauuaggcagaggu

SEQ ID NO: 137057 - RNA, 19 nt, Artificial Sequence
  Synthetic
gagaugauuaggcagaggu

SEQ ID NO: 137058 - RNA, 20 nt, Artificial Sequence
  Synthetic
agagaugauuaggcagaggu

SEQ ID NO: 137059 - RNA, 21 nt, Artificial Sequence
  Synthetic
aagagaugauuaggcagaggu

SEQ ID NO: 137060 - RNA, 22 nt, Artificial Sequence
  Synthetic
caagagaugauuaggcagaggu

SEQ ID NO: 137061 - RNA, 23 nt, Artificial Sequence
  Synthetic
acaagagaugauuaggcagaggu

SEQ ID NO: 137062 - RNA, 24 nt, Artificial Sequence
  Synthetic
  misc_feature (1)..(1): n is a, c, g, or u
nacaagagaugauuaggcagaggu

SEQ ID NO: 137063 - RNA, 18 nt, Artificial Sequence
  Synthetic
ugacugucucuuagaggu

SEQ ID NO: 137064 - RNA, 19 nt, Artificial Sequence
  Synthetic
augacugucucuuagaggu

SEQ ID NO: 137065 - RNA, 20 nt, Artificial Sequence
  Synthetic
gaugacugucucuuagaggu

SEQ ID NO: 137066 - RNA, 21 nt, Artificial Sequence
  Synthetic
ggaugacugucucuuagaggu

SEQ ID NO: 137067 - RNA, 22 nt, Artificial Sequence
  Synthetic
aggaugacugucucuuagaggu

SEQ ID NO: 137068 - RNA, 23 nt, Artificial Sequence
  Synthetic
gaggaugacugucucuuagaggu

SEQ ID NO: 137069 - RNA, 24 nt, Artificial Sequence
  Synthetic
ugaggaugacugucucuuagaggu

SEQ ID NO: 137070 - RNA, 18 nt, Artificial Sequence
  Synthetic
uggugagugauuggaggu

SEQ ID NO: 137071 - RNA, 19 nt, Artificial Sequence
  Synthetic
uuggugagugauuggaggu

SEQ ID NO: 137072 - RNA, 20 nt, Artificial Sequence
  Synthetic
guuggugagugauuggaggu

SEQ ID NO: 137073 - RNA, 21 nt, Artificial Sequence
  Synthetic
gguuggugagugauuggaggu

SEQ ID NO: 137074 - RNA, 22 nt, Artificial Sequence
  Synthetic
agguuggugagugauuggaggu

SEQ ID NO: 137075 - RNA, 23 nt, Artificial Sequence
  Synthetic
gagguuggugagugauuggaggu

SEQ ID NO: 137076 - RNA, 24 nt, Artificial Sequence
  Synthetic
ggagguuggugagugauuggaggu

SEQ ID NO: 137077 - RNA, 18 nt, Artificial Sequence
  Synthetic
aaaauugguaacagcggu

SEQ ID NO: 137078 - RNA, 19 nt, Artificial Sequence
  Synthetic
gaaaauugguaacagcggu

SEQ ID NO: 137079 - RNA, 20 nt, Artificial Sequence
  Synthetic
agaaaauugguaacagcggu

SEQ ID NO: 137080 - RNA, 21 nt, Artificial Sequence
  Synthetic
aagaaaauugguaacagcggu

SEQ ID NO: 137081 - RNA, 22 nt, Artificial Sequence
  Synthetic
aaagaaaauugguaacagcggu

SEQ ID NO: 137082 - RNA, 23 nt, Artificial Sequence
  Synthetic
aaaagaaaauugguaacagcggu

SEQ ID NO: 137083 - RNA, 24 nt, Artificial Sequence
  Synthetic
caaaagaaaauugguaacagcggu

SEQ ID NO: 137084 - RNA, 18 nt, Artificial Sequence
  Synthetic
uguaacacgagcaggggu

SEQ ID NO: 137085 - RNA, 19 nt, Artificial Sequence
  Synthetic
cuguaacacgagcaggggu

SEQ ID NO: 137086 - RNA, 20 nt, Artificial Sequence
  Synthetic
ccuguaacacgagcaggggu

SEQ ID NO: 137087 - RNA, 21 nt, Artificial Sequence
  Synthetic
gccuguaacacgagcaggggu

SEQ ID NO: 137088 - RNA, 22 nt, Artificial Sequence
  Synthetic
cgccuguaacacgagcaggggu

SEQ ID NO: 137089 - RNA, 23 nt, Artificial Sequence
  Synthetic
ccgccuguaacacgagcaggggu

SEQ ID NO: 137090 - RNA, 24 nt, Artificial Sequence
  Synthetic
cccgccuguaacacgagcaggggu

SEQ ID NO: 137091 - RNA, 18 nt, Artificial Sequence
  Synthetic
agacaaaagaaaauuggu

SEQ ID NO: 137092 - RNA, 19 nt, Artificial Sequence
  Synthetic
  misc_feature (1)..(1): n is a, c, g, or u
nagacaaaagaaaauuggu

SEQ ID NO: 137093 - RNA, 20 nt, Artificial Sequence
  Synthetic
  misc_feature (2)..(2): n is a, c, g, or u
anagacaaaagaaaauuggu

SEQ ID NO: 137094 - RNA, 21 nt, Artificial Sequence
  Synthetic
  misc_feature (3)..(3): n is a, c, g, or u
canagacaaaagaaaauuggu

SEQ ID NO: 137095 - RNA, 22 nt, Artificial Sequence
  Synthetic
  misc_feature (4)..(4): n is a, c, g, or u
ccanagacaaaagaaaauuggu

SEQ ID NO: 137096 - RNA, 23 nt, Artificial Sequence
  Synthetic
  misc_feature (5)..(5): n is a, c, g, or u
cccanagacaaaagaaaauuggu

SEQ ID NO: 137097 - RNA, 24 nt, Artificial Sequence
  Synthetic
  misc_feature (6)..(6): n is a, c, g, or u
acccanagacaaaagaaaauuggu

SEQ ID NO: 137098 - RNA, 18 nt, Artificial Sequence
  Synthetic
uccugacugccgauuggu

SEQ ID NO: 137099 - RNA, 19 nt, Artificial Sequence
  Synthetic
uuccugacugccgauuggu

SEQ ID NO: 137100 - RNA, 20 nt, Artificial Sequence
  Synthetic
cuuccugacugccgauuggu

SEQ ID NO: 137101 - RNA, 21 nt, Artificial Sequence
  Synthetic
ccuuccugacugccgauuggu

SEQ ID NO: 137102 - RNA, 22 nt, Artificial Sequence
  Synthetic
gccuuccugacugccgauuggu

SEQ ID NO: 137103 - RNA, 23 nt, Artificial Sequence
  Synthetic
ugccuuccugacugccgauuggu

SEQ ID NO: 137104 - RNA, 24 nt, Artificial Sequence
  Synthetic
cugccuuccugacugccgauuggu

SEQ ID NO: 137105 - RNA, 18 nt, Artificial Sequence
  Synthetic
  misc_feature (1)..(1): n is a, c, g, or u
nggagauugacgagaugu

SEQ ID NO: 137106 - RNA, 19 nt, Artificial Sequence
  Synthetic
  misc_feature (2)..(2): n is a, c, g, or u
gnggagauugacgagaugu

SEQ ID NO: 137107 - RNA, 20 nt, Artificial Sequence
  Synthetic
  misc_feature (3)..(3): n is a, c, g, or u
cgnggagauugacgagaugu

SEQ ID NO: 137108 - RNA, 21 nt, Artificial Sequence
  Synthetic
  misc_feature (4)..(4): n is a, c, g, or u
ucgnggagauugacgagaugu

SEQ ID NO: 137109 - RNA, 22 nt, Artificial Sequence
  Synthetic
  misc_feature (5)..(5): n is a, c, g, or u
cucgnggagauugacgagaugu

SEQ ID NO: 137110 - RNA, 23 nt, Artificial Sequence
  Synthetic
  misc_feature (6)..(6): n is a, c, g, or u
ccucgnggagauugacgagaugu

SEQ ID NO: 137111 - RNA, 24 nt, Artificial Sequence
  Synthetic
  misc_feature (7)..(7): n is a, c, g, or u
uccucgnggagauugacgagaugu

SEQ ID NO: 137112 - RNA, 18 nt, Artificial Sequence
  Synthetic
  misc_feature (8)..(8): n is a, c, g, or u
  misc_feature (12)..(12): n is a, c, g, or u
cccaaaanaccnccgugu

SEQ ID NO: 137113 - RNA, 19 nt, Artificial Sequence
  Synthetic
  misc_feature (9)..(9): n is a, c, g, or u
  misc_feature (13)..(13): n is a, c, g, or u
ccccaaaanaccnccgugu

SEQ ID NO: 137114 - RNA, 20 nt, Artificial Sequence
  Synthetic
  misc_feature (10)..(10): n is a, c, g, or u
  misc_feature (14)..(14): n is a, c, g, or u
accccaaaanaccnccgugu

SEQ ID NO: 137115 - RNA, 21 nt, Artificial Sequence
  Synthetic
  misc_feature (11)..(11): n is a, c, g, or u
  misc_feature (15)..(15): n is a, c, g, or u
caccccaaaanaccnccgugu

SEQ ID NO: 137116 - RNA, 22 nt, Artificial Sequence
  Synthetic
  misc_feature (12)..(12): n is a, c, g, or u
  misc_feature (16)..(16): n is a, c, g, or u
ccaccccaaaanaccnccgugu

SEQ ID NO: 137117 - RNA, 23 nt, Artificial Sequence
  Synthetic
  misc_feature (13)..(13): n is a, c, g, or u
  misc_feature (17)..(17): n is a, c, g, or u
uccaccccaaaanaccnccgugu

SEQ ID NO: 137118 - RNA, 24 nt, Artificial Sequence
  Synthetic
  misc_feature (14)..(14): n is a, c, g, or u
  misc_feature (18)..(18): n is a, c, g, or u
cuccaccccaaaanaccnccgugu

SEQ ID NO: 137119 - RNA, 18 nt, Artificial Sequence
  Synthetic
  misc_feature (15)..(15): n is a, c, g, or u
uguacaauaugaucnugu

SEQ ID NO: 137120 - RNA, 19 nt, Artificial Sequence
  Synthetic
  misc_feature (16)..(16): n is a, c, g, or u
uuguacaauaugaucnugu

SEQ ID NO: 137121 - RNA, 20 nt, Artificial Sequence
  Synthetic
  misc_feature (17)..(17): n is a, c, g, or u
uuuguacaauaugaucnugu

SEQ ID NO: 137122 - RNA, 21 nt, Artificial Sequence
  Synthetic
  misc_feature (18)..(18): n is a, c, g, or u
uuuuguacaauaugaucnugu

SEQ ID NO: 137123 - RNA, 22 nt, Artificial Sequence
  Synthetic
  misc_feature (1)..(1): n is a, c, g, or u
  misc_feature (19)..(19): n is a, c, g, or u
nuuuuguacaauaugaucnugu

SEQ ID NO: 137124 - RNA, 23 nt, Artificial Sequence
  Synthetic
  misc_feature (2)..(2): n is a, c, g, or u
  misc_feature (20)..(20): n is a, c, g, or u
unuuuuguacaauaugaucnugu

SEQ ID NO: 137125 - RNA, 24 nt, Artificial Sequence
  Synthetic
  misc_feature (3)..(3): n is a, c, g, or u
  misc_feature (21)..(21): n is a, c, g, or u
aunuuuuguacaauaugaucnugu

SEQ ID NO: 137126 - RNA, 18 nt, Artificial Sequence
  Synthetic
  misc_feature (5)..(5): n is a, c, g, or u
  misc_feature (10)..(10): n is a, c, g, or u
  misc_feature (15)..(15): n is a, c, g, or u
agggncucangaugnugu

SEQ ID NO: 137127 - RNA, 19 nt, Artificial Sequence
  Synthetic
  misc_feature (6)..(6): n is a, c, g, or u
  misc_feature (11)..(11): n is a, c, g, or u
  misc_feature (16)..(16): n is a, c, g, or u
aagggncucangaugnugu

SEQ ID NO: 137128 - RNA, 20 nt, Artificial Sequence
  Synthetic
  misc_feature (7)..(7): n is a, c, g, or u
  misc_feature (12)..(12): n is a, c, g, or u
  misc_feature (17)..(17): n is a, c, g, or u
aaagggncucangaugnugu

SEQ ID NO: 137129 - RNA, 21 nt, Artificial Sequence
  Synthetic
  misc_feature (8)..(8): n is a, c, g, or u
  misc_feature (13)..(13): n is a, c, g, or u
  misc_feature (18)..(18): n is a, c, g, or u
uaaagggncucangaugnugu

SEQ ID NO: 137130 - RNA, 22 nt, Artificial Sequence
  Synthetic
  misc_feature (9)..(9): n is a, c, g, or u
  misc_feature (14)..(14): n is a, c, g, or u
  misc_feature (19)..(19): n is a, c, g, or u
auaaagggncucangaugnugu

SEQ ID NO: 137131 - RNA, 23 nt, Artificial Sequence
  Synthetic
  misc_feature (10)..(10): n is a, c, g, or u
  misc_feature (15)..(15): n is a, c, g, or u
  misc_feature (20)..(20): n is a, c, g, or u
uauaaagggncucangaugnugu

SEQ ID NO: 137132 - RNA, 24 nt, Artificial Sequence
  Synthetic
  misc_feature (11)..(11): n is a, c, g, or u
  misc_feature (16)..(16): n is a, c, g, or u
  misc_feature (21)..(21): n is a, c, g, or u
guauaaagggncucangaugnugu

SEQ ID NO: 137133 - RNA, 18 nt, Artificial Sequence
  Synthetic
  misc_feature (4)..(5): n is a, c, g, or u
  misc_feature (8)..(8): n is a, c, g, or u
  misc_feature (17)..(17): n is a, c, g, or u
uuannuancccaugaanu

SEQ ID NO: 137134 - RNA, 19 nt, Artificial Sequence
  Synthetic
  misc_feature (5)..(6): n is a, c, g, or u
  misc_feature (9)..(9): n is a, c, g, or u
  misc_feature (18)..(18): n is a, c, g, or u
auuannuancccaugaanu

SEQ ID NO: 137135 - RNA, 20 nt, Artificial Sequence
  Synthetic
  misc_feature (6)..(7): n is a, c, g, or u
  misc_feature (10)..(10): n is a, c, g, or u
  misc_feature (19)..(19): n is a, c, g, or u
aauuannuancccaugaanu

SEQ ID NO: 137136 - RNA, 21 nt, Artificial Sequence
  Synthetic
  misc_feature (7)..(8): n is a, c, g, or u
  misc_feature (11)..(11): n is a, c, g, or u
  misc_feature (20)..(20): n is a, c, g, or u
caauuannuancccaugaanu

SEQ ID NO: 137137 - RNA, 22 nt, Artificial Sequence
  Synthetic
  misc_feature (8)..(9): n is a, c, g, or u
  misc_feature (12)..(12): n is a, c, g, or u
  misc_feature (21)..(21): n is a, c, g, or u
ccaauuannuancccaugaanu

SEQ ID NO: 137138 - RNA, 23 nt, Artificial Sequence
  Synthetic
  misc_feature (9)..(10): n is a, c, g, or u
  misc_feature (13)..(13): n is a, c, g, or u
  misc_feature (22)..(22): n is a, c, g, or u
uccaauuannuancccaugaanu

SEQ ID NO: 137139 - RNA, 24 nt, Artificial Sequence
  Synthetic
  misc_feature (10)..(11): n is a, c, g, or u
  misc_feature (14)..(14): n is a, c, g, or u
  misc_feature (23)..(23): n is a, c, g, or u
uuccaauuannuancccaugaanu

SEQ ID NO: 137140 - RNA, 18 nt, Artificial Sequence
  Synthetic
  misc_feature (17)..(17): n is a, c, g, or u
cccugacucugggaucnu

SEQ ID NO: 137141 - RNA, 19 nt, Artificial Sequence
  Synthetic
  misc_feature (18)..(18): n is a, c, g, or u
ccccugacucugggaucnu

SEQ ID NO: 137142 - RNA, 20 nt, Artificial Sequence
  Synthetic
  misc_feature (1)..(1): n is a, c, g, or u
  misc_feature (19)..(19): n is a, c, g, or u
nccccugacucugggaucnu

SEQ ID NO: 137143 - RNA, 21 nt, Artificial Sequence
  Synthetic
  misc_feature (2)..(2): n is a, c, g, or u
  misc_feature (20)..(20): n is a, c, g, or u
gnccccugacucugggaucnu

SEQ ID NO: 137144 - RNA, 22 nt, Artificial Sequence
  Synthetic
  misc_feature (3)..(3): n is a, c, g, or u
  misc_feature (21)..(21): n is a, c, g, or u
agnccccugacucugggaucnu

SEQ ID NO: 137145 - RNA, 23 nt, Artificial Sequence
  Synthetic
  misc_feature (4)..(4): n is a, c, g, or u
  misc_feature (22)..(22): n is a, c, g, or u
cagnccccugacucugggaucnu

SEQ ID NO: 137146 - RNA, 24 nt, Artificial Sequence
  Synthetic
  misc_feature (5)..(5): n is a, c, g, or u
  misc_feature (23)..(23): n is a, c, g, or u
acagnccccugacucugggaucnu

SEQ ID NO: 137147 - RNA, 18 nt, Artificial Sequence
  Synthetic
  misc_feature (17)..(17): n is a, c, g, or u
gaaagaaucccagaggnu

SEQ ID NO: 137148 - RNA, 19 nt, Artificial Sequence
  Synthetic
  misc_feature (18)..(18): n is a, c, g, or u
ggaaagaaucccagaggnu

SEQ ID NO: 137149 - RNA, 20 nt, Artificial Sequence
  Synthetic
  misc_feature (19)..(19): n is a, c, g, or u
gggaaagaaucccagaggnu

SEQ ID NO: 137150 - RNA, 21 nt, Artificial Sequence
  Synthetic
  misc_feature (20)..(20): n is a, c, g, or u
cgggaaagaaucccagaggnu

SEQ ID NO: 137151 - RNA, 22 nt, Artificial Sequence
  Synthetic
  misc_feature (21)..(21): n is a, c, g, or u
ucgggaaagaaucccagaggnu

SEQ ID NO: 137152 - RNA, 23 nt, Artificial Sequence
  Synthetic
  misc_feature (22)..(22): n is a, c, g, or u
aucgggaaagaaucccagaggnu

SEQ ID NO: 137153 - RNA, 24 nt, Artificial Sequence
  Synthetic
  misc_feature (23)..(23): n is a, c, g, or u
gaucgggaaagaaucccagaggnu

SEQ ID NO: 137154 - RNA, 18 nt, Artificial Sequence
  Synthetic
  misc_feature (2)..(2): n is a, c, g, or u
  misc_feature (5)..(5): n is a, c, g, or u
  misc_feature (17)..(17): n is a, c, g, or u
cnucnuguaaaugaaunu

SEQ ID NO: 137155 - RNA, 19 nt, Artificial Sequence
  Synthetic
  misc_feature (3)..(3): n is a, c, g, or u
  misc_feature (6)..(6): n is a, c, g, or u
  misc_feature (18)..(18): n is a, c, g, or u
ucnucnuguaaaugaaunu

SEQ ID NO: 137156 - RNA, 20 nt, Artificial Sequence
  Synthetic
  misc_feature (4)..(4): n is a, c, g, or u
  misc_feature (7)..(7): n is a, c, g, or u
  misc_feature (19)..(19): n is a, c, g, or u
gucnucnuguaaaugaaunu

SEQ ID NO: 137157 - RNA, 21 nt, Artificial Sequence
  Synthetic
  misc_feature (5)..(5): n is a, c, g, or u
  misc_feature (8)..(8): n is a, c, g, or u
  misc_feature (20)..(20): n is a, c, g, or u
ugucnucnuguaaaugaaunu

SEQ ID NO: 137158 - RNA, 22 nt, Artificial Sequence
  Synthetic
  misc_feature (6)..(6): n is a, c, g, or u
  misc_feature (9)..(9): n is a, c, g, or u
  misc_feature (21)..(21): n is a, c, g, or u
augucnucnuguaaaugaaunu

SEQ ID NO: 137159 - RNA, 23 nt, Artificial Sequence
  Synthetic
  misc_feature (7)..(7): n is a, c, g, or u
  misc_feature (10)..(10): n is a, c, g, or u
  misc_feature (22)..(22): n is a, c, g, or u
aaugucnucnuguaaaugaaunu

SEQ ID NO: 137160 - RNA, 24 nt, Artificial Sequence
  Synthetic
  misc_feature (8)..(8): n is a, c, g, or u
  misc_feature (11)..(11): n is a, c, g, or u
  misc_feature (23)..(23): n is a, c, g, or u
uaaugucnucnuguaaaugaaunu

SEQ ID NO: 137161 - RNA, 18 nt, Artificial Sequence
  Synthetic
  misc_feature (3)..(3): n is a, c, g, or u
canagacaaaagaaaauu

SEQ ID NO: 137162 - RNA, 19 nt, Artificial Sequence
  Synthetic
  misc_feature (4)..(4): n is a, c, g, or u
ccanagacaaaagaaaauu

SEQ ID NO: 137163 - RNA, 20 nt, Artificial Sequence
  Synthetic
  misc_feature (5)..(5): n is a, c, g, or u
cccanagacaaaagaaaauu

SEQ ID NO: 137164 - RNA, 21 nt, Artificial Sequence
  Synthetic
  misc_feature (6)..(6): n is a, c, g, or u
acccanagacaaaagaaaauu

SEQ ID NO: 137165 - RNA, 22 nt, Artificial Sequence
  Synthetic
  misc_feature (7)..(7): n is a, c, g, or u
uacccanagacaaaagaaaauu

SEQ ID NO: 137166 - RNA, 23 nt, Artificial Sequence
  Synthetic
  misc_feature (8)..(8): n is a, c, g, or u
auacccanagacaaaagaaaauu

SEQ ID NO: 137167 - RNA, 24 nt, Artificial Sequence
  Synthetic
  misc_feature (9)..(9): n is a, c, g, or u
uauacccanagacaaaagaaaauu

SEQ ID NO: 137168 - RNA, 18 nt, Artificial Sequence
  Synthetic
  misc_feature (3)..(3): n is a, c, g, or u
ugnucccccuagaaaauu

SEQ ID NO: 137169 - RNA, 19 nt, Artificial Sequence
  Synthetic
  misc_feature (4)..(4): n is a, c, g, or u
gugnucccccuagaaaauu

SEQ ID NO: 137170 - RNA, 20 nt, Artificial Sequence
  Synthetic
  misc_feature (5)..(5): n is a, c, g, or u
ggugnucccccuagaaaauu

SEQ ID NO: 137171 - RNA, 21 nt, Artificial Sequence
  Synthetic
  misc_feature (6)..(6): n is a, c, g, or u
gggugnucccccuagaaaauu

SEQ ID NO: 137172 - RNA, 22 nt, Artificial Sequence
  Synthetic
  misc_feature (7)..(7): n is a, c, g, or u
cgggugnucccccuagaaaauu

SEQ ID NO: 137173 - RNA, 23 nt, Artificial Sequence
  Synthetic
  misc_feature (8)..(8): n is a, c, g, or u
acgggugnucccccuagaaaauu

SEQ ID NO: 137174 - RNA, 24 nt, Artificial Sequence
  Synthetic
  misc_feature (9)..(9): n is a, c, g, or u
cacgggugnucccccuagaaaauu

SEQ ID NO: 137175 - RNA, 18 nt, Artificial Sequence
  Synthetic
cgauaaccaggacaaauu

SEQ ID NO: 137176 - RNA, 19 nt, Artificial Sequence
  Synthetic
gcgauaaccaggacaaauu

SEQ ID NO: 137177 - RNA, 20 nt, Artificial Sequence
  Synthetic
agcgauaaccaggacaaauu

SEQ ID NO: 137178 - RNA, 21 nt, Artificial Sequence
  Synthetic
cagcgauaaccaggacaaauu

SEQ ID NO: 137179 - RNA, 22 nt, Artificial Sequence
  Synthetic
ccagcgauaaccaggacaaauu

SEQ ID NO: 137180 - RNA, 23 nt, Artificial Sequence
  Synthetic
uccagcgauaaccaggacaaauu

SEQ ID NO: 137181 - RNA, 24 nt, Artificial Sequence
  Synthetic
auccagcgauaaccaggacaaauu

SEQ ID NO: 137182 - RNA, 18 nt, Artificial Sequence
  Synthetic
  misc_feature (11)..(11): n is a, c, g, or u
ugagagggccnacaaauu

SEQ ID NO: 137183 - RNA, 19 nt, Artificial Sequence
  Synthetic
  misc_feature (12)..(12): n is a, c, g, or u
gugagagggccnacaaauu

SEQ ID NO: 137184 - RNA, 20 nt, Artificial Sequence
  Synthetic
  misc_feature (13)..(13): n is a, c, g, or u
agugagagggccnacaaauu

SEQ ID NO: 137185 - RNA, 21 nt, Artificial Sequence
  Synthetic
  misc_feature (14)..(14): n is a, c, g, or u
cagugagagggccnacaaauu

SEQ ID NO: 137186 - RNA, 22 nt, Artificial Sequence
  Synthetic
  misc_feature (15)..(15): n is a, c, g, or u
acagugagagggccnacaaauu

SEQ ID NO: 137187 - RNA, 23 nt, Artificial Sequence
  Synthetic
  misc_feature (16)..(16): n is a, c, g, or u
uacagugagagggccnacaaauu

SEQ ID NO: 137188 - RNA, 24 nt, Artificial Sequence
  Synthetic
  misc_feature (17)..(17): n is a, c, g, or u
uuacagugagagggccnacaaauu

SEQ ID NO: 137189 - RNA, 18 nt, Artificial Sequence
  Synthetic
  misc_feature (6)..(6): n is a, c, g, or u
guugungauccuggaauu

SEQ ID NO: 137190 - RNA, 19 nt, Artificial Sequence
  Synthetic
  misc_feature (7)..(7): n is a, c, g, or u
uguugungauccuggaauu

SEQ ID NO: 137191 - RNA, 20 nt, Artificial Sequence
  Synthetic
  misc_feature (8)..(8): n is a, c, g, or u
uuguugungauccuggaauu

SEQ ID NO: 137192 - RNA, 21 nt, Artificial Sequence
  Synthetic
  misc_feature (9)..(9): n is a, c, g, or u
guuguugungauccuggaauu

SEQ ID NO: 137193 - RNA, 22 nt, Artificial Sequence
  Synthetic
  misc_feature (10)..(10): n is a, c, g, or u
gguuguugungauccuggaauu

SEQ ID NO: 137194 - RNA, 23 nt, Artificial Sequence
  Synthetic
  misc_feature (11)..(11): n is a, c, g, or u
ugguuguugungauccuggaauu

SEQ ID NO: 137195 - RNA, 24 nt, Artificial Sequence
  Synthetic
  misc_feature (12)..(12): n is a, c, g, or u
cugguuguugungauccuggaauu

SEQ ID NO: 137196 - RNA, 18 nt, Artificial Sequence
  Synthetic
aggucggucguugacauu

SEQ ID NO: 137197 - RNA, 19 nt, Artificial Sequence
  Synthetic
aaggucggucguugacauu

SEQ ID NO: 137198 - RNA, 20 nt, Artificial Sequence
  Synthetic
caaggucggucguugacauu

SEQ ID NO: 137199 - RNA, 18 nt, Artificial Sequence
  Synthetic
  misc_feature (11)..(11): n is a, c, g, or u
ccaguccucgnggagauu

SEQ ID NO: 137200 - RNA, 19 nt, Artificial Sequence
  Synthetic
  misc_feature (12)..(12): n is a, c, g, or u
cccaguccucgnggagauu

SEQ ID NO: 137201 - RNA, 20 nt, Artificial Sequence
  Synthetic
  misc_feature (13)..(13): n is a, c, g, or u
ccccaguccucgnggagauu

SEQ ID NO: 137202 - RNA, 21 nt, Artificial Sequence
  Synthetic
  misc_feature (14)..(14): n is a, c, g, or u
uccccaguccucgnggagauu

SEQ ID NO: 137203 - RNA, 22 nt, Artificial Sequence
  Synthetic
  misc_feature (15)..(15): n is a, c, g, or u
guccccaguccucgnggagauu

SEQ ID NO: 137204 - RNA, 23 nt, Artificial Sequence
  Synthetic
  misc_feature (16)..(16): n is a, c, g, or u
gguccccaguccucgnggagauu

SEQ ID NO: 137205 - RNA, 24 nt, Artificial Sequence
  Synthetic
  misc_feature (17)..(17): n is a, c, g, or u
ggguccccaguccucgnggagauu

SEQ ID NO: 137206 - RNA, 18 nt, Artificial Sequence
  Synthetic
aauacuaacauugagauu

SEQ ID NO: 137207 - RNA, 19 nt, Artificial Sequence
  Synthetic
gaauacuaacauugagauu

SEQ ID NO: 137208 - RNA, 20 nt, Artificial Sequence
  Synthetic
ggaauacuaacauugagauu

SEQ ID NO: 137209 - RNA, 21 nt, Artificial Sequence
  Synthetic
aggaauacuaacauugagauu

SEQ ID NO: 137210 - RNA, 22 nt, Artificial Sequence
  Synthetic
aaggaauacuaacauugagauu

SEQ ID NO: 137211 - RNA, 23 nt, Artificial Sequence
  Synthetic
caaggaauacuaacauugagauu

SEQ ID NO: 137212 - RNA, 24 nt, Artificial Sequence
  Synthetic
ccaaggaauacuaacauugagauu

SEQ ID NO: 137213 - RNA, 18 nt, Artificial Sequence
  Synthetic
ccuuccugacugccgauu

SEQ ID NO: 137214 - RNA, 19 nt, Artificial Sequence
  Synthetic
gccuuccugacugccgauu

SEQ ID NO: 137215 - RNA, 20 nt, Artificial Sequence
  Synthetic
ugccuuccugacugccgauu

SEQ ID NO: 137216 - RNA, 21 nt, Artificial Sequence
  Synthetic
cugccuuccugacugccgauu

SEQ ID NO: 137217 - RNA, 22 nt, Artificial Sequence
  Synthetic
gcugccuuccugacugccgauu

SEQ ID NO: 137218 - RNA, 23 nt, Artificial Sequence
  Synthetic
ggcugccuuccugacugccgauu

SEQ ID NO: 137219 - RNA, 24 nt, Artificial Sequence
  Synthetic
aggcugccuuccugacugccgauu

SEQ ID NO: 137220 - RNA, 18 nt, Artificial Sequence
  Synthetic
ucuagacucugcgguauu

SEQ ID NO: 137221 - RNA, 19 nt, Artificial Sequence
  Synthetic
gucuagacucugcgguauu

SEQ ID NO: 137222 - RNA, 20 nt, Artificial Sequence
  Synthetic
agucuagacucugcgguauu

SEQ ID NO: 137223 - RNA, 21 nt, Artificial Sequence
  Synthetic
gagucuagacucugcgguauu

SEQ ID NO: 137224 - RNA, 22 nt, Artificial Sequence
  Synthetic
cgagucuagacucugcgguauu

SEQ ID NO: 137225 - RNA, 23 nt, Artificial Sequence
  Synthetic
acgagucuagacucugcgguauu

SEQ ID NO: 137226 - RNA, 24 nt, Artificial Sequence
  Synthetic
cacgagucuagacucugcgguauu

SEQ ID NO: 137227 - RNA, 18 nt, Artificial Sequence
  Synthetic
  misc_feature (6)..(6): n is a, c, g, or u
uucaunuacuguuuacuu

SEQ ID NO: 137228 - RNA, 19 nt, Artificial Sequence
  Synthetic
  misc_feature (7)..(7): n is a, c, g, or u
guucaunuacuguuuacuu

SEQ ID NO: 137229 - RNA, 20 nt, Artificial Sequence
  Synthetic
  misc_feature (8)..(8): n is a, c, g, or u
gguucaunuacuguuuacuu

SEQ ID NO: 137230 - RNA, 21 nt, Artificial Sequence
  Synthetic
  misc_feature (9)..(9): n is a, c, g, or u
agguucaunuacuguuuacuu

SEQ ID NO: 137231 - RNA, 22 nt, Artificial Sequence
  Synthetic
  misc_feature (10)..(10): n is a, c, g, or u
aagguucaunuacuguuuacuu

SEQ ID NO: 137232 - RNA, 23 nt, Artificial Sequence
  Synthetic
  misc_feature (11)..(11): n is a, c, g, or u
aaagguucaunuacuguuuacuu

SEQ ID NO: 137233 - RNA, 24 nt, Artificial Sequence
  Synthetic
  misc_feature (12)..(12): n is a, c, g, or u
uaaagguucaunuacuguuuacuu

SEQ ID NO: 137234 - RNA, 18 nt, Artificial Sequence
  Synthetic
  misc_feature (10)..(10): n is a, c, g, or u
auauagaaunccagccuu

SEQ ID NO: 137235 - RNA, 19 nt, Artificial Sequence
  Synthetic
  misc_feature (11)..(11): n is a, c, g, or u
uauauagaaunccagccuu

SEQ ID NO: 137236 - RNA, 20 nt, Artificial Sequence
  Synthetic
  misc_feature (12)..(12): n is a, c, g, or u
uuauauagaaunccagccuu

SEQ ID NO: 137237 - RNA, 21 nt, Artificial Sequence
  Synthetic
  misc_feature (13)..(13): n is a, c, g, or u
cuuauauagaaunccagccuu

SEQ ID NO: 137238 - RNA, 22 nt, Artificial Sequence
  Synthetic
  misc_feature (14)..(14): n is a, c, g, or u
ucuuauauagaaunccagccuu

SEQ ID NO: 137239 - RNA, 23 nt, Artificial Sequence
  Synthetic
  misc_feature (15)..(15): n is a, c, g, or u
cucuuauauagaaunccagccuu

SEQ ID NO: 137240 - RNA, 24 nt, Artificial Sequence
  Synthetic
  misc_feature (16)..(16): n is a, c, g, or u
ccucuuauauagaaunccagccuu

SEQ ID NO: 137241 - RNA, 18 nt, Artificial Sequence
  Synthetic
gauucguccccaugccuu

SEQ ID NO: 137242 - RNA, 19 nt, Artificial Sequence
  Synthetic
agauucguccccaugccuu

SEQ ID NO: 137243 - RNA, 20 nt, Artificial Sequence
  Synthetic
aagauucguccccaugccuu

SEQ ID NO: 137244 - RNA, 21 nt, Artificial Sequence
  Synthetic
aaagauucguccccaugccuu

SEQ ID NO: 137245 - RNA, 22 nt, Artificial Sequence
  Synthetic
gaaagauucguccccaugccuu

SEQ ID NO: 137246 - RNA, 23 nt, Artificial Sequence
  Synthetic
agaaagauucguccccaugccuu

SEQ ID NO: 137247 - RNA, 24 nt, Artificial Sequence
  Synthetic
cagaaagauucguccccaugccuu

SEQ ID NO: 137248 - RNA, 18 nt, Artificial Sequence
  Synthetic
augggaguaggcugccuu

SEQ ID NO: 137249 - RNA, 19 nt, Artificial Sequence
  Synthetic
gaugggaguaggcugccuu

SEQ ID NO: 137250 - RNA, 20 nt, Artificial Sequence
  Synthetic
agaugggaguaggcugccuu

SEQ ID NO: 137251 - RNA, 21 nt, Artificial Sequence
  Synthetic
gagaugggaguaggcugccuu

SEQ ID NO: 137252 - RNA, 22 nt, Artificial Sequence
  Synthetic
agagaugggaguaggcugccuu

SEQ ID NO: 137253 - RNA, 23 nt, Artificial Sequence
  Synthetic
gagagaugggaguaggcugccuu

SEQ ID NO: 137254 - RNA, 24 nt, Artificial Sequence
  Synthetic
ggagagaugggaguaggcugccuu

SEQ ID NO: 137255 - RNA, 18 nt, Artificial Sequence
  Synthetic
  misc_feature (2)..(3): n is a, c, g, or u
unnuggccagugguccuu

SEQ ID NO: 137256 - RNA, 19 nt, Artificial Sequence
  Synthetic
  misc_feature (3)..(4): n is a, c, g, or u
cunnuggccagugguccuu

SEQ ID NO: 137257 - RNA, 20 nt, Artificial Sequence
  Synthetic
  misc_feature (4)..(5): n is a, c, g, or u
gcunnuggccagugguccuu

SEQ ID NO: 137258 - RNA, 21 nt, Artificial Sequence
  Synthetic
  misc_feature (5)..(6): n is a, c, g, or u
ggcunnuggccagugguccuu

SEQ ID NO: 137259 - RNA, 22 nt, Artificial Sequence
  Synthetic
  misc_feature (6)..(7): n is a, c, g, or u
uggcunnuggccagugguccuu

SEQ ID NO: 137260 - RNA, 23 nt, Artificial Sequence
  Synthetic
  misc_feature (7)..(8): n is a, c, g, or u
uuggcunnuggccagugguccuu

SEQ ID NO: 137261 - RNA, 24 nt, Artificial Sequence
  Synthetic
  misc_feature (8)..(9): n is a, c, g, or u
guuggcunnuggccagugguccuu

SEQ ID NO: 137262 - RNA, 18 nt, Artificial Sequence
  Synthetic
  misc_feature (4)..(4): n is a, c, g, or u
ccanccaaggcacagcuu

SEQ ID NO: 137263 - RNA, 19 nt, Artificial Sequence
  Synthetic
  misc_feature (5)..(5): n is a, c, g, or u
gccanccaaggcacagcuu

SEQ ID NO: 137264 - RNA, 20 nt, Artificial Sequence
  Synthetic
  misc_feature (6)..(6): n is a, c, g, or u
agccanccaaggcacagcuu

SEQ ID NO: 137265 - RNA, 21 nt, Artificial Sequence
  Synthetic
  misc_feature (7)..(7): n is a, c, g, or u
aagccanccaaggcacagcuu

SEQ ID NO: 137266 - RNA, 22 nt, Artificial Sequence
  Synthetic
  misc_feature (8)..(8): n is a, c, g, or u
aaagccanccaaggcacagcuu

SEQ ID NO: 137267 - RNA, 23 nt, Artificial Sequence
  Synthetic
  misc_feature (9)..(9): n is a, c, g, or u
caaagccanccaaggcacagcuu

SEQ ID NO: 137268 - RNA, 24 nt, Artificial Sequence
  Synthetic
  misc_feature (10)..(10): n is a, c, g, or u
ccaaagccanccaaggcacagcuu

SEQ ID NO: 137269 - RNA, 18 nt, Artificial Sequence
  Synthetic
  misc_feature (8)..(8): n is a, c, g, or u
ugggaucnugcagagcuu

SEQ ID NO: 137270 - RNA, 19 nt, Artificial Sequence
  Synthetic
  misc_feature (9)..(9): n is a, c, g, or u
cugggaucnugcagagcuu

SEQ ID NO: 137271 - RNA, 20 nt, Artificial Sequence
  Synthetic
  misc_feature (10)..(10): n is a, c, g, or u
ucugggaucnugcagagcuu

SEQ ID NO: 137272 - RNA, 21 nt, Artificial Sequence
  Synthetic
  misc_feature (11)..(11): n is a, c, g, or u
cucugggaucnugcagagcuu

SEQ ID NO: 137273 - RNA, 22 nt, Artificial Sequence
  Synthetic
  misc_feature (12)..(12): n is a, c, g, or u
acucugggaucnugcagagcuu

SEQ ID NO: 137274 - RNA, 23 nt, Artificial Sequence
  Synthetic
  misc_feature (13)..(13): n is a, c, g, or u
gacucugggaucnugcagagcuu

SEQ ID NO: 137275 - RNA, 24 nt, Artificial Sequence
  Synthetic
  misc_feature (14)..(14): n is a, c, g, or u
ugacucugggaucnugcagagcuu

SEQ ID NO: 137276 - RNA, 18 nt, Artificial Sequence
  Synthetic
  misc_feature (6)..(6): n is a, c, g, or u
  misc_feature (12)..(12): n is a, c, g, or u
ucaagnacagunucucuu

SEQ ID NO: 137277 - RNA, 19 nt, Artificial Sequence
  Synthetic
  misc_feature (1)..(1): n is a, c, g, or u
  misc_feature (7)..(7): n is a, c, g, or u
  misc_feature (13)..(13): n is a, c, g, or u
nucaagnacagunucucuu

SEQ ID NO: 137278 - RNA, 20 nt, Artificial Sequence
  Synthetic
  misc_feature (2)..(2): n is a, c, g, or u
  misc_feature (8)..(8): n is a, c, g, or u
  misc_feature (14)..(14): n is a, c, g, or u
anucaagnacagunucucuu

SEQ ID NO: 137279 - RNA, 21 nt, Artificial Sequence
  Synthetic
  misc_feature (3)..(3): n is a, c, g, or u
  misc_feature (9)..(9): n is a, c, g, or u
  misc_feature (15)..(15): n is a, c, g, or u
uanucaagnacagunucucuu

SEQ ID NO: 137280 - RNA, 22 nt, Artificial Sequence
  Synthetic
  misc_feature (4)..(4): n is a, c, g, or u
  misc_feature (10)..(10): n is a, c, g, or u
  misc_feature (16)..(16): n is a, c, g, or u
auanucaagnacagunucucuu

SEQ ID NO: 137281 - RNA, 23 nt, Artificial Sequence
  Synthetic
  misc_feature (5)..(5): n is a, c, g, or u
  misc_feature (11)..(11): n is a, c, g, or u
  misc_feature (17)..(17): n is a, c, g, or u
aauanucaagnacagunucucuu

SEQ ID NO: 137282 - RNA, 24 nt, Artificial Sequence
  Synthetic
  misc_feature (6)..(6): n is a, c, g, or u
  misc_feature (12)..(12): n is a, c, g, or u
  misc_feature (18)..(18): n is a, c, g, or u
aaauanucaagnacagunucucuu

SEQ ID NO: 137283 - RNA, 18 nt, Artificial Sequence
  Synthetic
caguagcuccaaauucuu

SEQ ID NO: 137284 - RNA, 19 nt, Artificial Sequence
  Synthetic
acaguagcuccaaauucuu

SEQ ID NO: 137285 - RNA, 20 nt, Artificial Sequence
  Synthetic
cacaguagcuccaaauucuu

SEQ ID NO: 137286 - RNA, 21 nt, Artificial Sequence
  Synthetic
ccacaguagcuccaaauucuu

SEQ ID NO: 137287 - RNA, 22 nt, Artificial Sequence
  Synthetic
uccacaguagcuccaaauucuu

SEQ ID NO: 137288 - RNA, 23 nt, Artificial Sequence
  Synthetic
cuccacaguagcuccaaauucuu

SEQ ID NO: 137289 - RNA, 24 nt, Artificial Sequence
  Synthetic
acuccacaguagcuccaaauucuu

SEQ ID NO: 137290 - RNA, 18 nt, Artificial Sequence
  Synthetic
gguauugugaggauucuu

SEQ ID NO: 137291 - RNA, 19 nt, Artificial Sequence
  Synthetic
cgguauugugaggauucuu

SEQ ID NO: 137292 - RNA, 20 nt, Artificial Sequence
  Synthetic
gcgguauugugaggauucuu

SEQ ID NO: 137293 - RNA, 21 nt, Artificial Sequence
  Synthetic
ugcgguauugugaggauucuu

SEQ ID NO: 137294 - RNA, 22 nt, Artificial Sequence
  Synthetic
cugcgguauugugaggauucuu

SEQ ID NO: 137295 - RNA, 23 nt, Artificial Sequence
  Synthetic
ucugcgguauugugaggauucuu

SEQ ID NO: 137296 - RNA, 24 nt, Artificial Sequence
  Synthetic
cucugcgguauugugaggauucuu

SEQ ID NO: 137297 - RNA, 18 nt, Artificial Sequence
  Synthetic
ggcgagggaguucuucuu

SEQ ID NO: 137298 - RNA, 19 nt, Artificial Sequence
  Synthetic
aggcgagggaguucuucuu

SEQ ID NO: 137299 - RNA, 20 nt, Artificial Sequence
  Synthetic
gaggcgagggaguucuucuu

SEQ ID NO: 137300 - RNA, 21 nt, Artificial Sequence
  Synthetic
cgaggcgagggaguucuucuu

SEQ ID NO: 137301 - RNA, 22 nt, Artificial Sequence
  Synthetic
gcgaggcgagggaguucuucuu

SEQ ID NO: 137302 - RNA, 23 nt, Artificial Sequence
  Synthetic
ugcgaggcgagggaguucuucuu

SEQ ID NO: 137303 - RNA, 24 nt, Artificial Sequence
  Synthetic
cugcgaggcgagggaguucuucuu

SEQ ID NO: 137304 - RNA, 18 nt, Artificial Sequence
  Synthetic
agaaaggccuuguaaguu

SEQ ID NO: 137305 - RNA, 19 nt, Artificial Sequence
  Synthetic
uagaaaggccuuguaaguu

SEQ ID NO: 137306 - RNA, 20 nt, Artificial Sequence
  Synthetic
uuagaaaggccuuguaaguu

SEQ ID NO: 137307 - RNA, 21 nt, Artificial Sequence
  Synthetic
cuuagaaaggccuuguaaguu

SEQ ID NO: 137308 - RNA, 22 nt, Artificial Sequence
  Synthetic
acuuagaaaggccuuguaaguu

SEQ ID NO: 137309 - RNA, 23 nt, Artificial Sequence
  Synthetic
uacuuagaaaggccuuguaaguu

SEQ ID NO: 137310 - RNA, 24 nt, Artificial Sequence
  Synthetic
uuacuuagaaaggccuuguaaguu

SEQ ID NO: 137311 - RNA, 18 nt, Artificial Sequence
  Synthetic
cgucuaacaacaguaguu

SEQ ID NO: 137312 - RNA, 19 nt, Artificial Sequence
  Synthetic
ucgucuaacaacaguaguu

SEQ ID NO: 137313 - RNA, 20 nt, Artificial Sequence
  Synthetic
gucgucuaacaacaguaguu

SEQ ID NO: 137314 - RNA, 21 nt, Artificial Sequence
  Synthetic
cgucgucuaacaacaguaguu

SEQ ID NO: 137315 - RNA, 22 nt, Artificial Sequence
  Synthetic
  misc_feature (1)..(1): n is a, c, g, or u
ncgucgucuaacaacaguaguu

SEQ ID NO: 137316 - RNA, 23 nt, Artificial Sequence
  Synthetic
  misc_feature (2)..(2): n is a, c, g, or u
cncgucgucuaacaacaguaguu

SEQ ID NO: 137317 - RNA, 24 nt, Artificial Sequence
  Synthetic
  misc_feature (3)..(3): n is a, c, g, or u
ucncgucgucuaacaacaguaguu

SEQ ID NO: 137318 - RNA, 18 nt, Artificial Sequence
  Synthetic
auuggaggacaggagguu

SEQ ID NO: 137319 - RNA, 19 nt, Artificial Sequence
  Synthetic
aauuggaggacaggagguu

SEQ ID NO: 137320 - RNA, 20 nt, Artificial Sequence
  Synthetic
aaauuggaggacaggagguu

SEQ ID NO: 137321 - RNA, 21 nt, Artificial Sequence
  Synthetic
caaauuggaggacaggagguu

SEQ ID NO: 137322 - RNA, 22 nt, Artificial Sequence
  Synthetic
acaaauuggaggacaggagguu

SEQ ID NO: 137323 - RNA, 23 nt, Artificial Sequence
  Synthetic
gacaaauuggaggacaggagguu

SEQ ID NO: 137324 - RNA, 24 nt, Artificial Sequence
  Synthetic
ggacaaauuggaggacaggagguu

SEQ ID NO: 137325 - RNA, 18 nt, Artificial Sequence
  Synthetic
ggugagugauuggagguu

SEQ ID NO: 137326 - RNA, 19 nt, Artificial Sequence
  Synthetic
uggugagugauuggagguu

SEQ ID NO: 137327 - RNA, 20 nt, Artificial Sequence
  Synthetic
uuggugagugauuggagguu

SEQ ID NO: 137328 - RNA, 21 nt, Artificial Sequence
  Synthetic
guuggugagugauuggagguu

SEQ ID NO: 137329 - RNA, 22 nt, Artificial Sequence
  Synthetic
gguuggugagugauuggagguu

SEQ ID NO: 137330 - RNA, 23 nt, Artificial Sequence
  Synthetic
agguuggugagugauuggagguu

SEQ ID NO: 137331 - RNA, 24 nt, Artificial Sequence
  Synthetic
gagguuggugagugauuggagguu

SEQ ID NO: 137332 - RNA, 18 nt, Artificial Sequence
  Synthetic
guaguuuccggaaguguu

SEQ ID NO: 137333 - RNA, 19 nt, Artificial Sequence
  Synthetic
aguaguuuccggaaguguu

SEQ ID NO: 137334 - RNA, 20 nt, Artificial Sequence
  Synthetic
caguaguuuccggaaguguu

SEQ ID NO: 137335 - RNA, 21 nt, Artificial Sequence
  Synthetic
acaguaguuuccggaaguguu

SEQ ID NO: 137336 - RNA, 22 nt, Artificial Sequence
  Synthetic
aacaguaguuuccggaaguguu

SEQ ID NO: 137337 - RNA, 23 nt, Artificial Sequence
  Synthetic
caacaguaguuuccggaaguguu

SEQ ID NO: 137338 - RNA, 24 nt, Artificial Sequence
  Synthetic
acaacaguaguuuccggaaguguu

SEQ ID NO: 137339 - RNA, 18 nt, Artificial Sequence
  Synthetic
  misc_feature (4)..(4): n is a, c, g, or u
  misc_feature (12)..(12): n is a, c, g, or u
  misc_feature (14)..(14): n is a, c, g, or u
ggancaggguunanuguu

SEQ ID NO: 137340 - RNA, 19 nt, Artificial Sequence
  Synthetic
  misc_feature (1)..(1): n is a, c, g, or u
  misc_feature (5)..(5): n is a, c, g, or u
  misc_feature (13)..(13): n is a, c, g, or u
  misc_feature (15)..(15): n is a, c, g, or u
nggancaggguunanuguu

SEQ ID NO: 137341 - RNA, 20 nt, Artificial Sequence
  Synthetic
  misc_feature (2)..(2): n is a, c, g, or u
  misc_feature (6)..(6): n is a, c, g, or u
  misc_feature (14)..(14): n is a, c, g, or u
  misc_feature (16)..(16): n is a, c, g, or u
unggancaggguunanuguu

SEQ ID NO: 137342 - RNA, 21 nt, Artificial Sequence
  Synthetic
  misc_feature (3)..(3): n is a, c, g, or u
  misc_feature (7)..(7): n is a, c, g, or u
  misc_feature (15)..(15): n is a, c, g, or u
  misc_feature (17)..(17): n is a, c, g, or u
uunggancaggguunanuguu

SEQ ID NO: 137343 - RNA, 22 nt, Artificial Sequence
  Synthetic
  misc_feature (4)..(4): n is a, c, g, or u
  misc_feature (8)..(8): n is a, c, g, or u
  misc_feature (16)..(16): n is a, c, g, or u
  misc_feature (18)..(18): n is a, c, g, or u
auunggancaggguunanuguu

SEQ ID NO: 137344 - RNA, 23 nt, Artificial Sequence
  Synthetic
  misc_feature (5)..(5): n is a, c, g, or u
  misc_feature (9)..(9): n is a, c, g, or u
  misc_feature (17)..(17): n is a, c, g, or u
  misc_feature (19)..(19): n is a, c, g, or u
uauunggancaggguunanuguu

SEQ ID NO: 137345 - RNA, 24 nt, Artificial Sequence
  Synthetic
  misc_feature (6)..(6): n is a, c, g, or u
  misc_feature (10)..(10): n is a, c, g, or u
  misc_feature (18)..(18): n is a, c, g, or u
  misc_feature (20)..(20): n is a, c, g, or u
auauunggancaggguunanuguu

SEQ ID NO: 137346 - RNA, 18 nt, Artificial Sequence
  Synthetic
  misc_feature (5)..(5): n is a, c, g, or u
caugnuguagcucuuguu

SEQ ID NO: 137347 - RNA, 19 nt, Artificial Sequence
  Synthetic
  misc_feature (6)..(6): n is a, c, g, or u
ccaugnuguagcucuuguu

SEQ ID NO: 137348 - RNA, 20 nt, Artificial Sequence
  Synthetic
  misc_feature (7)..(7): n is a, c, g, or u
cccaugnuguagcucuuguu

SEQ ID NO: 137349 - RNA, 21 nt, Artificial Sequence
  Synthetic
  misc_feature (8)..(8): n is a, c, g, or u
ucccaugnuguagcucuuguu

SEQ ID NO: 137350 - RNA, 22 nt, Artificial Sequence
  Synthetic
  misc_feature (9)..(9): n is a, c, g, or u
cucccaugnuguagcucuuguu

SEQ ID NO: 137351 - RNA, 23 nt, Artificial Sequence
  Synthetic
  misc_feature (10)..(10): n is a, c, g, or u
ccucccaugnuguagcucuuguu

SEQ ID NO: 137352 - RNA, 24 nt, Artificial Sequence
  Synthetic
  misc_feature (11)..(11): n is a, c, g, or u
accucccaugnuguagcucuuguu

SEQ ID NO: 137353 - RNA, 18 nt, Artificial Sequence
  Synthetic
  misc_feature (3)..(4): n is a, c, g, or u
  misc_feature (7)..(7): n is a, c, g, or u
  misc_feature (16)..(16): n is a, c, g, or u
uannuancccaugaanuu

SEQ ID NO: 137354 - RNA, 19 nt, Artificial Sequence
  Synthetic
  misc_feature (4)..(5): n is a, c, g, or u
  misc_feature (8)..(8): n is a, c, g, or u
  misc_feature (17)..(17): n is a, c, g, or u
uuannuancccaugaanuu

SEQ ID NO: 137355 - RNA, 20 nt, Artificial Sequence
  Synthetic
  misc_feature (5)..(6): n is a, c, g, or u
  misc_feature (9)..(9): n is a, c, g, or u
  misc_feature (18)..(18): n is a, c, g, or u
auuannuancccaugaanuu

SEQ ID NO: 137356 - RNA, 21 nt, Artificial Sequence
  Synthetic
  misc_feature (6)..(7): n is a, c, g, or u
  misc_feature (10)..(10): n is a, c, g, or u
  misc_feature (19)..(19): n is a, c, g, or u
aauuannuancccaugaanuu

SEQ ID NO: 137357 - RNA, 22 nt, Artificial Sequence
  Synthetic
  misc_feature (7)..(8): n is a, c, g, or u
  misc_feature (11)..(11): n is a, c, g, or u
  misc_feature (20)..(20): n is a, c, g, or u
caauuannuancccaugaanuu

SEQ ID NO: 137358 - RNA, 23 nt, Artificial Sequence
  Synthetic
  misc_feature (8)..(9): n is a, c, g, or u
  misc_feature (12)..(12): n is a, c, g, or u
  misc_feature (21)..(21): n is a, c, g, or u
ccaauuannuancccaugaanuu

SEQ ID NO: 137359 - RNA, 24 nt, Artificial Sequence
  Synthetic
  misc_feature (9)..(10): n is a, c, g, or u
  misc_feature (13)..(13): n is a, c, g, or u
  misc_feature (22)..(22): n is a, c, g, or u
uccaauuannuancccaugaanuu

SEQ ID NO: 137360 - RNA, 18 nt, Artificial Sequence
  Synthetic
  misc_feature (16)..(16): n is a, c, g, or u
aaagaaucccagaggnuu

SEQ ID NO: 137361 - RNA, 19 nt, Artificial Sequence
  Synthetic
  misc_feature (17)..(17): n is a, c, g, or u
gaaagaaucccagaggnuu

SEQ ID NO: 137362 - RNA, 20 nt, Artificial Sequence
  Synthetic
  misc_feature (18)..(18): n is a, c, g, or u
ggaaagaaucccagaggnuu

SEQ ID NO: 137363 - RNA, 21 nt, Artificial Sequence
  Synthetic
  misc_feature (19)..(19): n is a, c, g, or u
gggaaagaaucccagaggnuu

SEQ ID NO: 137364 - RNA, 22 nt, Artificial Sequence
  Synthetic
  misc_feature (20)..(20): n is a, c, g, or u
cgggaaagaaucccagaggnuu

SEQ ID NO: 137365 - RNA, 23 nt, Artificial Sequence
  Synthetic
  misc_feature (21)..(21): n is a, c, g, or u
ucgggaaagaaucccagaggnuu

SEQ ID NO: 137366 - RNA, 24 nt, Artificial Sequence
  Synthetic
  misc_feature (22)..(22): n is a, c, g, or u
aucgggaaagaaucccagaggnuu

SEQ ID NO: 137367 - RNA, 18 nt, Artificial Sequence
  Synthetic
  misc_feature (13)..(13): n is a, c, g, or u
  misc_feature (15)..(16): n is a, c, g, or u
ccaaucaauaggncnnuu

SEQ ID NO: 137368 - RNA, 19 nt, Artificial Sequence
  Synthetic
  misc_feature (14)..(14): n is a, c, g, or u
  misc_feature (16)..(17): n is a, c, g, or u
uccaaucaauaggncnnuu

SEQ ID NO: 137369 - RNA, 20 nt, Artificial Sequence
  Synthetic
  misc_feature (15)..(15): n is a, c, g, or u
  misc_feature (17)..(18): n is a, c, g, or u
uuccaaucaauaggncnnuu

SEQ ID NO: 137370 - RNA, 21 nt, Artificial Sequence
  Synthetic
  misc_feature (16)..(16): n is a, c, g, or u
  misc_feature (18)..(19): n is a, c, g, or u
uuuccaaucaauaggncnnuu

SEQ ID NO: 137371 - RNA, 22 nt, Artificial Sequence
  Synthetic
  misc_feature (17)..(17): n is a, c, g, or u
  misc_feature (19)..(20): n is a, c, g, or u
cuuuccaaucaauaggncnnuu

SEQ ID NO: 137372 - RNA, 23 nt, Artificial Sequence
  Synthetic
  misc_feature (18)..(18): n is a, c, g, or u
  misc_feature (20)..(21): n is a, c, g, or u
acuuuccaaucaauaggncnnuu

SEQ ID NO: 137373 - RNA, 24 nt, Artificial Sequence
  Synthetic
  misc_feature (19)..(19): n is a, c, g, or u
  misc_feature (21)..(22): n is a, c, g, or u
uacuuuccaaucaauaggncnnuu

SEQ ID NO: 137374 - RNA, 18 nt, Artificial Sequence
  Synthetic
  misc_feature (1)..(1): n is a, c, g, or u
  misc_feature (4)..(4): n is a, c, g, or u
  misc_feature (16)..(16): n is a, c, g, or u
nucnuguaaaugaaunuu

SEQ ID NO: 137375 - RNA, 19 nt, Artificial Sequence
  Synthetic
  misc_feature (2)..(2): n is a, c, g, or u
  misc_feature (5)..(5): n is a, c, g, or u
  misc_feature (17)..(17): n is a, c, g, or u
cnucnuguaaaugaaunuu

SEQ ID NO: 137376 - RNA, 20 nt, Artificial Sequence
  Synthetic
  misc_feature (3)..(3): n is a, c, g, or u
  misc_feature (6)..(6): n is a, c, g, or u
  misc_feature (18)..(18): n is a, c, g, or u
ucnucnuguaaaugaaunuu

SEQ ID NO: 137377 - RNA, 21 nt, Artificial Sequence
  Synthetic
  misc_feature (4)..(4): n is a, c, g, or u
  misc_feature (7)..(7): n is a, c, g, or u
  misc_feature (19)..(19): n is a, c, g, or u
gucnucnuguaaaugaaunuu

SEQ ID NO: 137378 - RNA, 22 nt, Artificial Sequence
  Synthetic
  misc_feature (5)..(5): n is a, c, g, or u
  misc_feature (8)..(8): n is a, c, g, or u
  misc_feature (20)..(20): n is a, c, g, or u
ugucnucnuguaaaugaaunuu

SEQ ID NO: 137379 - RNA, 23 nt, Artificial Sequence
  Synthetic
  misc_feature (6)..(6): n is a, c, g, or u
  misc_feature (9)..(9): n is a, c, g, or u
  misc_feature (21)..(21): n is a, c, g, or u
augucnucnuguaaaugaaunuu

SEQ ID NO: 137380 - RNA, 24 nt, Artificial Sequence
  Synthetic
  misc_feature (7)..(7): n is a, c, g, or u
  misc_feature (10)..(10): n is a, c, g, or u
  misc_feature (22)..(22): n is a, c, g, or u
aaugucnucnuguaaaugaaunuu

SEQ ID NO: 137381 - RNA, 18 nt, Artificial Sequence
  Synthetic
ccacucccauagguauuu

SEQ ID NO: 137382 - RNA, 19 nt, Artificial Sequence
  Synthetic
cccacucccauagguauuu

SEQ ID NO: 137383 - RNA, 20 nt, Artificial Sequence
  Synthetic
gcccacucccauagguauuu

SEQ ID NO: 137384 - RNA, 21 nt, Artificial Sequence
  Synthetic
ggcccacucccauagguauuu

SEQ ID NO: 137385 - RNA, 22 nt, Artificial Sequence
  Synthetic
aggcccacucccauagguauuu

SEQ ID NO: 137386 - RNA, 23 nt, Artificial Sequence
  Synthetic
gaggcccacucccauagguauuu

SEQ ID NO: 137387 - RNA, 24 nt, Artificial Sequence
  Synthetic
ugaggcccacucccauagguauuu

SEQ ID NO: 137388 - RNA, 18 nt, Artificial Sequence
  Synthetic
auucguccccaugccuuu

SEQ ID NO: 137389 - RNA, 19 nt, Artificial Sequence
  Synthetic
gauucguccccaugccuuu

SEQ ID NO: 137390 - RNA, 20 nt, Artificial Sequence
  Synthetic
agauucguccccaugccuuu

SEQ ID NO: 137391 - RNA, 21 nt, Artificial Sequence
  Synthetic
aagauucguccccaugccuuu

SEQ ID NO: 137392 - RNA, 22 nt, Artificial Sequence
  Synthetic
aaagauucguccccaugccuuu

SEQ ID NO: 137393 - RNA, 23 nt, Artificial Sequence
  Synthetic
gaaagauucguccccaugccuuu

SEQ ID NO: 137394 - RNA, 24 nt, Artificial Sequence
  Synthetic
agaaagauucguccccaugccuuu

SEQ ID NO: 137395 - RNA, 18 nt, Artificial Sequence
  Synthetic
aguagcuccaaauucuuu

SEQ ID NO: 137396 - RNA, 19 nt, Artificial Sequence
  Synthetic
caguagcuccaaauucuuu

SEQ ID NO: 137397 - RNA, 20 nt, Artificial Sequence
  Synthetic
acaguagcuccaaauucuuu

SEQ ID NO: 137398 - RNA, 21 nt, Artificial Sequence
  Synthetic
cacaguagcuccaaauucuuu

SEQ ID NO: 137399 - RNA, 22 nt, Artificial Sequence
  Synthetic
ccacaguagcuccaaauucuuu

SEQ ID NO: 137400 - RNA, 23 nt, Artificial Sequence
  Synthetic
uccacaguagcuccaaauucuuu

SEQ ID NO: 137401 - RNA, 24 nt, Artificial Sequence
  Synthetic
cuccacaguagcuccaaauucuuu

SEQ ID NO: 137402 - RNA, 18 nt, Artificial Sequence
  Synthetic
  misc_feature (1)..(1): n is a, c, g, or u
  misc_feature (3)..(4): n is a, c, g, or u
  misc_feature (7)..(7): n is a, c, g, or u
ncnnuunacaggaaguuu

SEQ ID NO: 137403 - RNA, 19 nt, Artificial Sequence
  Synthetic
  misc_feature (2)..(2): n is a, c, g, or u
  misc_feature (4)..(5): n is a, c, g, or u
  misc_feature (8)..(8): n is a, c, g, or u
gncnnuunacaggaaguuu

SEQ ID NO: 137404 - RNA, 20 nt, Artificial Sequence
  Synthetic
  misc_feature (3)..(3): n is a, c, g, or u
  misc_feature (5)..(6): n is a, c, g, or u
  misc_feature (9)..(9): n is a, c, g, or u
ggncnnuunacaggaaguuu

SEQ ID NO: 137405 - RNA, 21 nt, Artificial Sequence
  Synthetic
  misc_feature (4)..(4): n is a, c, g, or u
  misc_feature (6)..(7): n is a, c, g, or u
  misc_feature (10)..(10): n is a, c, g, or u
aggncnnuunacaggaaguuu

SEQ ID NO: 137406 - RNA, 22 nt, Artificial Sequence
  Synthetic
  misc_feature (5)..(5): n is a, c, g, or u
  misc_feature (7)..(8): n is a, c, g, or u
  misc_feature (11)..(11): n is a, c, g, or u
uaggncnnuunacaggaaguuu

SEQ ID NO: 137407 - RNA, 23 nt, Artificial Sequence
  Synthetic
  misc_feature (6)..(6): n is a, c, g, or u
  misc_feature (8)..(9): n is a, c, g, or u
  misc_feature (12)..(12): n is a, c, g, or u
auaggncnnuunacaggaaguuu

SEQ ID NO: 137408 - RNA, 24 nt, Artificial Sequence
  Synthetic
  misc_feature (7)..(7): n is a, c, g, or u
  misc_feature (9)..(10): n is a, c, g, or u
  misc_feature (13)..(13): n is a, c, g, or u
aauaggncnnuunacaggaaguuu

SEQ ID NO: 137409 - RNA, 18 nt, Artificial Sequence
  Synthetic
gucuaacaacaguaguuu

SEQ ID NO: 137410 - RNA, 19 nt, Artificial Sequence
  Synthetic
cgucuaacaacaguaguuu

SEQ ID NO: 137411 - RNA, 20 nt, Artificial Sequence
  Synthetic
ucgucuaacaacaguaguuu

SEQ ID NO: 137412 - RNA, 21 nt, Artificial Sequence
  Synthetic
gucgucuaacaacaguaguuu

SEQ ID NO: 137413 - RNA, 22 nt, Artificial Sequence
  Synthetic
cgucgucuaacaacaguaguuu

SEQ ID NO: 137414 - RNA, 23 nt, Artificial Sequence
  Synthetic
  misc_feature (1)..(1): n is a, c, g, or u
ncgucgucuaacaacaguaguuu

SEQ ID NO: 137415 - RNA, 24 nt, Artificial Sequence
  Synthetic
  misc_feature (2)..(2): n is a, c, g, or u
cncgucgucuaacaacaguaguuu

SEQ ID NO: 137416 - RNA, 18 nt, Artificial Sequence
  Synthetic
  misc_feature (2)..(3): n is a, c, g, or u
  misc_feature (6)..(6): n is a, c, g, or u
  misc_feature (15)..(15): n is a, c, g, or u
annuancccaugaanuuu

SEQ ID NO: 137417 - RNA, 19 nt, Artificial Sequence
  Synthetic
  misc_feature (3)..(4): n is a, c, g, or u
  misc_feature (7)..(7): n is a, c, g, or u
  misc_feature (16)..(16): n is a, c, g, or u
uannuancccaugaanuuu

SEQ ID NO: 137418 - RNA, 20 nt, Artificial Sequence
  Synthetic
  misc_feature (4)..(5): n is a, c, g, or u
  misc_feature (8)..(8): n is a, c, g, or u
  misc_feature (17)..(17): n is a, c, g, or u
uuannuancccaugaanuuu

SEQ ID NO: 137419 - RNA, 21 nt, Artificial Sequence
  Synthetic
  misc_feature (5)..(6): n is a, c, g, or u
  misc_feature (9)..(9): n is a, c, g, or u
  misc_feature (18)..(18): n is a, c, g, or u
auuannuancccaugaanuuu

SEQ ID NO: 137420 - RNA, 22 nt, Artificial Sequence
  Synthetic
  misc_feature (6)..(7): n is a, c, g, or u
  misc_feature (10)..(10): n is a, c, g, or u
  misc_feature (19)..(19): n is a, c, g, or u
aauuannuancccaugaanuuu

SEQ ID NO: 137421 - RNA, 23 nt, Artificial Sequence
  Synthetic
  misc_feature (7)..(8): n is a, c, g, or u
  misc_feature (11)..(11): n is a, c, g, or u
  misc_feature (20)..(20): n is a, c, g, or u
caauuannuancccaugaanuuu

SEQ ID NO: 137422 - RNA, 24 nt, Artificial Sequence
  Synthetic
  misc_feature (8)..(9): n is a, c, g, or u
  misc_feature (12)..(12): n is a, c, g, or u
  misc_feature (21)..(21): n is a, c, g, or u
ccaauuannuancccaugaanuuu

SEQ ID NO: 137423 - RNA, 18 nt, Artificial Sequence
  Synthetic
cacucccauagguauuuu

SEQ ID NO: 137424 - RNA, 19 nt, Artificial Sequence
  Synthetic
ccacucccauagguauuuu

SEQ ID NO: 137425 - RNA, 20 nt, Artificial Sequence
  Synthetic
cccacucccauagguauuuu

SEQ ID NO: 137426 - RNA, 21 nt, Artificial Sequence
  Synthetic
gcccacucccauagguauuuu

SEQ ID NO: 137427 - RNA, 22 nt, Artificial Sequence
  Synthetic
ggcccacucccauagguauuuu

SEQ ID NO: 137428 - RNA, 23 nt, Artificial Sequence
  Synthetic
aggcccacucccauagguauuuu

SEQ ID NO: 137429 - RNA, 24 nt, Artificial Sequence
  Synthetic
gaggcccacucccauagguauuuu

SEQ ID NO: 137430 - RNA, 18 nt, Artificial Sequence
  Synthetic
  misc_feature (2)..(3): n is a, c, g, or u
  misc_feature (6)..(6): n is a, c, g, or u
cnnuunacaggaaguuuu

SEQ ID NO: 137431 - RNA, 19 nt, Artificial Sequence
  Synthetic
  misc_feature (1)..(1): n is a, c, g, or u
  misc_feature (3)..(4): n is a, c, g, or u
  misc_feature (7)..(7): n is a, c, g, or u
ncnnuunacaggaaguuuu

SEQ ID NO: 137432 - RNA, 20 nt, Artificial Sequence
  Synthetic
  misc_feature (2)..(2): n is a, c, g, or u
  misc_feature (4)..(5): n is a, c, g, or u
  misc_feature (8)..(8): n is a, c, g, or u
gncnnuunacaggaaguuuu

SEQ ID NO: 137433 - RNA, 21 nt, Artificial Sequence
  Synthetic
  misc_feature (3)..(3): n is a, c, g, or u
  misc_feature (5)..(6): n is a, c, g, or u
  misc_feature (9)..(9): n is a, c, g, or u
ggncnnuunacaggaaguuuu

SEQ ID NO: 137434 - RNA, 22 nt, Artificial Sequence
  Synthetic
  misc_feature (4)..(4): n is a, c, g, or u
  misc_feature (6)..(7): n is a, c, g, or u
  misc_feature (10)..(10): n is a, c, g, or u
aggncnnuunacaggaaguuuu

SEQ ID NO: 137435 - RNA, 23 nt, Artificial Sequence
  Synthetic
  misc_feature (5)..(5): n is a, c, g, or u
  misc_feature (7)..(8): n is a, c, g, or u
  misc_feature (11)..(11): n is a, c, g, or u
uaggncnnuunacaggaaguuuu

SEQ ID NO: 137436 - RNA, 24 nt, Artificial Sequence
  Synthetic
  misc_feature (6)..(6): n is a, c, g, or u
  misc_feature (8)..(9): n is a, c, g, or u
  misc_feature (12)..(12): n is a, c, g, or u
auaggncnnuunacaggaaguuuu

SEQ ID NO: 137437 - RNA, 18 nt, Artificial Sequence
  Synthetic
augccuuugcgagguuuu

SEQ ID NO: 137438 - RNA, 19 nt, Artificial Sequence
  Synthetic
caugccuuugcgagguuuu

SEQ ID NO: 137439 - RNA, 20 nt, Artificial Sequence
  Synthetic
ccaugccuuugcgagguuuu

SEQ ID NO: 137440 - RNA, 21 nt, Artificial Sequence
  Synthetic
cccaugccuuugcgagguuuu

SEQ ID NO: 137441 - RNA, 22 nt, Artificial Sequence
  Synthetic
ccccaugccuuugcgagguuuu

SEQ ID NO: 137442 - RNA, 23 nt, Artificial Sequence
  Synthetic
uccccaugccuuugcgagguuuu

SEQ ID NO: 137443 - RNA, 24 nt, Artificial Sequence
  Synthetic
guccccaugccuuugcgagguuuu

SEQ ID NO: 137444 - RNA, 18 nt, Artificial Sequence
  Synthetic
  misc_feature (10)..(10): n is a, c, g, or u
accccaucunuuuguuuu

SEQ ID NO: 137445 - RNA, 19 nt, Artificial Sequence
  Synthetic
  misc_feature (11)..(11): n is a, c, g, or u
aaccccaucunuuuguuuu

SEQ ID NO: 137446 - RNA, 20 nt, Artificial Sequence
  Synthetic
  misc_feature (12)..(12): n is a, c, g, or u
uaaccccaucunuuuguuuu

SEQ ID NO: 137447 - RNA, 21 nt, Artificial Sequence
  Synthetic
  misc_feature (13)..(13): n is a, c, g, or u
auaaccccaucunuuuguuuu

SEQ ID NO: 137448 - RNA, 22 nt, Artificial Sequence
  Synthetic
  misc_feature (14)..(14): n is a, c, g, or u
aauaaccccaucunuuuguuuu

SEQ ID NO: 137449 - RNA, 23 nt, Artificial Sequence
  Synthetic
  misc_feature (15)..(15): n is a, c, g, or u
gaauaaccccaucunuuuguuuu

SEQ ID NO: 137450 - RNA, 24 nt, Artificial Sequence
  Synthetic
  misc_feature (16)..(16): n is a, c, g, or u
ggaauaaccccaucunuuuguuuu

SEQ ID NO: 137451 - RNA, 18 nt, Artificial Sequence
  Synthetic
ucucacuguaaaugaaaa

SEQ ID NO: 137452 - RNA, 19 nt, Artificial Sequence
  Synthetic
cucucacuguaaaugaaaa

SEQ ID NO: 137453 - RNA, 20 nt, Artificial Sequence
  Synthetic
ccucucacuguaaaugaaaa

SEQ ID NO: 137454 - RNA, 21 nt, Artificial Sequence
  Synthetic
cccucucacuguaaaugaaaa

SEQ ID NO: 137455 - RNA, 22 nt, Artificial Sequence
  Synthetic
gcccucucacuguaaaugaaaa

SEQ ID NO: 137456 - RNA, 23 nt, Artificial Sequence
  Synthetic
ggcccucucacuguaaaugaaaa

SEQ ID NO: 137457 - RNA, 24 nt, Artificial Sequence
  Synthetic
  misc_feature (1)..(1): n is a, c, g, or u
nggcccucucacuguaaaugaaaa

SEQ ID NO: 137458 - RNA, 18 nt, Artificial Sequence
  Synthetic
cauuuaaacccuaacaaa

SEQ ID NO: 137459 - RNA, 19 nt, Artificial Sequence
  Synthetic
acauuuaaacccuaacaaa

SEQ ID NO: 137460 - RNA, 20 nt, Artificial Sequence
  Synthetic
uacauuuaaacccuaacaaa

SEQ ID NO: 137461 - RNA, 21 nt, Artificial Sequence
  Synthetic
auacauuuaaacccuaacaaa

SEQ ID NO: 137462 - RNA, 22 nt, Artificial Sequence
  Synthetic
uauacauuuaaacccuaacaaa

SEQ ID NO: 137463 - RNA, 23 nt, Artificial Sequence
  Synthetic
guauacauuuaaacccuaacaaa

SEQ ID NO: 137464 - RNA, 24 nt, Artificial Sequence
  Synthetic
gguauacauuuaaacccuaacaaa

SEQ ID NO: 137465 - RNA, 18 nt, Artificial Sequence
  Synthetic
cucucacuguaaaugaaa

SEQ ID NO: 137466 - RNA, 19 nt, Artificial Sequence
  Synthetic
ccucucacuguaaaugaaa

SEQ ID NO: 137467 - RNA, 20 nt, Artificial Sequence
  Synthetic
cccucucacuguaaaugaaa

SEQ ID NO: 137468 - RNA, 21 nt, Artificial Sequence
  Synthetic
gcccucucacuguaaaugaaa

SEQ ID NO: 137469 - RNA, 22 nt, Artificial Sequence
  Synthetic
ggcccucucacuguaaaugaaa

SEQ ID NO: 137470 - RNA, 23 nt, Artificial Sequence
  Synthetic
  misc_feature (1)..(1): n is a, c, g, or u
nggcccucucacuguaaaugaaa

SEQ ID NO: 137471 - RNA, 24 nt, Artificial Sequence
  Synthetic
  misc_feature (2)..(2): n is a, c, g, or u
unggcccucucacuguaaaugaaa

SEQ ID NO: 137472 - RNA, 18 nt, Artificial Sequence
  Synthetic
  misc_feature (1)..(1): n is a, c, g, or u
nggcccucucacuguaaa

SEQ ID NO: 137473 - RNA, 19 nt, Artificial Sequence
  Synthetic
  misc_feature (2)..(2): n is a, c, g, or u
unggcccucucacuguaaa

SEQ ID NO: 137474 - RNA, 20 nt, Artificial Sequence
  Synthetic
  misc_feature (3)..(3): n is a, c, g, or u
gunggcccucucacuguaaa

SEQ ID NO: 137475 - RNA, 21 nt, Artificial Sequence
  Synthetic
  misc_feature (4)..(4): n is a, c, g, or u
ugunggcccucucacuguaaa

SEQ ID NO: 137476 - RNA, 22 nt, Artificial Sequence
  Synthetic
  misc_feature (5)..(5): n is a, c, g, or u
uugunggcccucucacuguaaa

SEQ ID NO: 137477 - RNA, 23 nt, Artificial Sequence
  Synthetic
  misc_feature (6)..(6): n is a, c, g, or u
uuugunggcccucucacuguaaa

SEQ ID NO: 137478 - RNA, 24 nt, Artificial Sequence
  Synthetic
  misc_feature (7)..(7): n is a, c, g, or u
auuugunggcccucucacuguaaa

SEQ ID NO: 137479 - RNA, 18 nt, Artificial Sequence
  Synthetic
  misc_feature (10)..(10): n is a, c, g, or u
cggagccaanucaaacaa

SEQ ID NO: 137480 - RNA, 19 nt, Artificial Sequence
  Synthetic
  misc_feature (11)..(11): n is a, c, g, or u
ucggagccaanucaaacaa

SEQ ID NO: 137481 - RNA, 20 nt, Artificial Sequence
  Synthetic
  misc_feature (12)..(12): n is a, c, g, or u
uucggagccaanucaaacaa

SEQ ID NO: 137482 - RNA, 21 nt, Artificial Sequence
  Synthetic
  misc_feature (13)..(13): n is a, c, g, or u
auucggagccaanucaaacaa

SEQ ID NO: 137483 - RNA, 22 nt, Artificial Sequence
  Synthetic
  misc_feature (14)..(14): n is a, c, g, or u
cauucggagccaanucaaacaa

SEQ ID NO: 137484 - RNA, 23 nt, Artificial Sequence
  Synthetic
  misc_feature (15)..(15): n is a, c, g, or u
gcauucggagccaanucaaacaa

SEQ ID NO: 137485 - RNA, 24 nt, Artificial Sequence
  Synthetic
  misc_feature (16)..(16): n is a, c, g, or u
ugcauucggagccaanucaaacaa

SEQ ID NO: 137486 - RNA, 18 nt, Artificial Sequence
  Synthetic
acauuuaaacccuaacaa

SEQ ID NO: 137487 - RNA, 19 nt, Artificial Sequence
  Synthetic
uacauuuaaacccuaacaa

SEQ ID NO: 137488 - RNA, 20 nt, Artificial Sequence
  Synthetic
auacauuuaaacccuaacaa

SEQ ID NO: 137489 - RNA, 21 nt, Artificial Sequence
  Synthetic
uauacauuuaaacccuaacaa

SEQ ID NO: 137490 - RNA, 22 nt, Artificial Sequence
  Synthetic
guauacauuuaaacccuaacaa

SEQ ID NO: 137491 - RNA, 23 nt, Artificial Sequence
  Synthetic
gguauacauuuaaacccuaacaa

SEQ ID NO: 137492 - RNA, 24 nt, Artificial Sequence
  Synthetic
ggguauacauuuaaacccuaacaa

SEQ ID NO: 137493 - RNA, 18 nt, Artificial Sequence
  Synthetic
  misc_feature (3)..(3): n is a, c, g, or u
gcngcuccauuuacacaa

SEQ ID NO: 137494 - RNA, 19 nt, Artificial Sequence
  Synthetic
  misc_feature (4)..(4): n is a, c, g, or u
ugcngcuccauuuacacaa

SEQ ID NO: 137495 - RNA, 20 nt, Artificial Sequence
  Synthetic
  misc_feature (5)..(5): n is a, c, g, or u
uugcngcuccauuuacacaa

SEQ ID NO: 137496 - RNA, 21 nt, Artificial Sequence
  Synthetic
  misc_feature (6)..(6): n is a, c, g, or u
uuugcngcuccauuuacacaa

SEQ ID NO: 137497 - RNA, 22 nt, Artificial Sequence
  Synthetic
  misc_feature (7)..(7): n is a, c, g, or u
cuuugcngcuccauuuacacaa

SEQ ID NO: 137498 - RNA, 23 nt, Artificial Sequence
  Synthetic
  misc_feature (8)..(8): n is a, c, g, or u
gcuuugcngcuccauuuacacaa

SEQ ID NO: 137499 - RNA, 24 nt, Artificial Sequence
  Synthetic
  misc_feature (9)..(9): n is a, c, g, or u
ggcuuugcngcuccauuuacacaa

SEQ ID NO: 137500 - RNA, 18 nt, Artificial Sequence
  Synthetic
uuguaugcauguauacaa

SEQ ID NO: 137501 - RNA, 19 nt, Artificial Sequence
  Synthetic
uuuguaugcauguauacaa

SEQ ID NO: 137502 - RNA, 20 nt, Artificial Sequence
  Synthetic
cuuuguaugcauguauacaa

SEQ ID NO: 137503 - RNA, 21 nt, Artificial Sequence
  Synthetic
ccuuuguaugcauguauacaa

SEQ ID NO: 137504 - RNA, 22 nt, Artificial Sequence
  Synthetic
gccuuuguaugcauguauacaa

SEQ ID NO: 137505 - RNA, 23 nt, Artificial Sequence
  Synthetic
ugccuuuguaugcauguauacaa

SEQ ID NO: 137506 - RNA, 24 nt, Artificial Sequence
  Synthetic
augccuuuguaugcauguauacaa

SEQ ID NO: 137507 - RNA, 18 nt, Artificial Sequence
  Synthetic
cccugcauucggagccaa

SEQ ID NO: 137508 - RNA, 19 nt, Artificial Sequence
  Synthetic
acccugcauucggagccaa

SEQ ID NO: 137509 - RNA, 20 nt, Artificial Sequence
  Synthetic
gacccugcauucggagccaa

SEQ ID NO: 137510 - RNA, 18 nt, Artificial Sequence
  Synthetic
ugcacgacuccugcucaa

SEQ ID NO: 137511 - RNA, 19 nt, Artificial Sequence
  Synthetic
cugcacgacuccugcucaa

SEQ ID NO: 137512 - RNA, 20 nt, Artificial Sequence
  Synthetic
ccugcacgacuccugcucaa

SEQ ID NO: 137513 - RNA, 21 nt, Artificial Sequence
  Synthetic
accugcacgacuccugcucaa

SEQ ID NO: 137514 - RNA, 22 nt, Artificial Sequence
  Synthetic
aaccugcacgacuccugcucaa

SEQ ID NO: 137515 - RNA, 23 nt, Artificial Sequence
  Synthetic
aaaccugcacgacuccugcucaa

SEQ ID NO: 137516 - RNA, 24 nt, Artificial Sequence
  Synthetic
aaaaccugcacgacuccugcucaa

SEQ ID NO: 137517 - RNA, 18 nt, Artificial Sequence
  Synthetic
auugacccuuauaaagaa

SEQ ID NO: 137518 - RNA, 19 nt, Artificial Sequence
  Synthetic
cauugacccuuauaaagaa

SEQ ID NO: 137519 - RNA, 20 nt, Artificial Sequence
  Synthetic
acauugacccuuauaaagaa

SEQ ID NO: 137520 - RNA, 21 nt, Artificial Sequence
  Synthetic
gacauugacccuuauaaagaa

SEQ ID NO: 137521 - RNA, 22 nt, Artificial Sequence
  Synthetic
ggacauugacccuuauaaagaa

SEQ ID NO: 137522 - RNA, 23 nt, Artificial Sequence
  Synthetic
uggacauugacccuuauaaagaa

SEQ ID NO: 137523 - RNA, 24 nt, Artificial Sequence
  Synthetic
auggacauugacccuuauaaagaa

SEQ ID NO: 137524 - RNA, 18 nt, Artificial Sequence
  Synthetic
gaggcagguccccuagaa

SEQ ID NO: 137525 - RNA, 19 nt, Artificial Sequence
  Synthetic
cgaggcagguccccuagaa

SEQ ID NO: 137526 - RNA, 20 nt, Artificial Sequence
  Synthetic
ccgaggcagguccccuagaa

SEQ ID NO: 137527 - RNA, 21 nt, Artificial Sequence
  Synthetic
accgaggcagguccccuagaa

SEQ ID NO: 137528 - RNA, 22 nt, Artificial Sequence
  Synthetic
gaccgaggcagguccccuagaa

SEQ ID NO: 137529 - RNA, 23 nt, Artificial Sequence
  Synthetic
  misc_feature (1)..(1): n is a, c, g, or u
ngaccgaggcagguccccuagaa

SEQ ID NO: 137530 - RNA, 24 nt, Artificial Sequence
  Synthetic
  misc_feature (2)..(2): n is a, c, g, or u
gngaccgaggcagguccccuagaa

SEQ ID NO: 137531 - RNA, 18 nt, Artificial Sequence
  Synthetic
  misc_feature (12)..(12): n is a, c, g, or u
  misc_feature (14)..(14): n is a, c, g, or u
uggggacccugngncgaa

SEQ ID NO: 137532 - RNA, 19 nt, Artificial Sequence
  Synthetic
  misc_feature (13)..(13): n is a, c, g, or u
  misc_feature (15)..(15): n is a, c, g, or u
cuggggacccugngncgaa

SEQ ID NO: 137533 - RNA, 20 nt, Artificial Sequence
  Synthetic
  misc_feature (14)..(14): n is a, c, g, or u
  misc_feature (16)..(16): n is a, c, g, or u
acuggggacccugngncgaa

SEQ ID NO: 137534 - RNA, 21 nt, Artificial Sequence
  Synthetic
  misc_feature (15)..(15): n is a, c, g, or u
  misc_feature (17)..(17): n is a, c, g, or u
gacuggggacccugngncgaa

SEQ ID NO: 137535 - RNA, 22 nt, Artificial Sequence
  Synthetic
  misc_feature (16)..(16): n is a, c, g, or u
  misc_feature (18)..(18): n is a, c, g, or u
ggacuggggacccugngncgaa

SEQ ID NO: 137536 - RNA, 23 nt, Artificial Sequence
  Synthetic
  misc_feature (17)..(17): n is a, c, g, or u
  misc_feature (19)..(19): n is a, c, g, or u
aggacuggggacccugngncgaa

SEQ ID NO: 137537 - RNA, 24 nt, Artificial Sequence
  Synthetic
  misc_feature (18)..(18): n is a, c, g, or u
  misc_feature (20)..(20): n is a, c, g, or u
gaggacuggggacccugngncgaa

SEQ ID NO: 137538 - RNA, 18 nt, Artificial Sequence
  Synthetic
ccaaucggcagucaggaa

SEQ ID NO: 137539 - RNA, 19 nt, Artificial Sequence
  Synthetic
accaaucggcagucaggaa

SEQ ID NO: 137540 - RNA, 20 nt, Artificial Sequence
  Synthetic
caccaaucggcagucaggaa

SEQ ID NO: 137541 - RNA, 21 nt, Artificial Sequence
  Synthetic
ccaccaaucggcagucaggaa

SEQ ID NO: 137542 - RNA, 22 nt, Artificial Sequence
  Synthetic
uccaccaaucggcagucaggaa

SEQ ID NO: 137543 - RNA, 23 nt, Artificial Sequence
  Synthetic
cuccaccaaucggcagucaggaa

SEQ ID NO: 137544 - RNA, 24 nt, Artificial Sequence
  Synthetic
ccuccaccaaucggcagucaggaa

SEQ ID NO: 137545 - RNA, 18 nt, Artificial Sequence
  Synthetic
ucaccauauucuugggaa

SEQ ID NO: 137546 - RNA, 19 nt, Artificial Sequence
  Synthetic
gucaccauauucuugggaa

SEQ ID NO: 137547 - RNA, 20 nt, Artificial Sequence
  Synthetic
ggucaccauauucuugggaa

SEQ ID NO: 137548 - RNA, 18 nt, Artificial Sequence
  Synthetic
  misc_feature (5)..(5): n is a, c, g, or u
  misc_feature (8)..(9): n is a, c, g, or u
ugggnuannuaauuggaa

SEQ ID NO: 137549 - RNA, 19 nt, Artificial Sequence
  Synthetic
  misc_feature (6)..(6): n is a, c, g, or u
  misc_feature (9)..(10): n is a, c, g, or u
augggnuannuaauuggaa

SEQ ID NO: 137550 - RNA, 20 nt, Artificial Sequence
  Synthetic
  misc_feature (7)..(7): n is a, c, g, or u
  misc_feature (10)..(11): n is a, c, g, or u
caugggnuannuaauuggaa

SEQ ID NO: 137551 - RNA, 21 nt, Artificial Sequence
  Synthetic
  misc_feature (8)..(8): n is a, c, g, or u
  misc_feature (11)..(12): n is a, c, g, or u
ucaugggnuannuaauuggaa

SEQ ID NO: 137552 - RNA, 22 nt, Artificial Sequence
  Synthetic
  misc_feature (9)..(9): n is a, c, g, or u
  misc_feature (12)..(13): n is a, c, g, or u
uucaugggnuannuaauuggaa

SEQ ID NO: 137553 - RNA, 23 nt, Artificial Sequence
  Synthetic
  misc_feature (1)..(1): n is a, c, g, or u
  misc_feature (10)..(10): n is a, c, g, or u
  misc_feature (13)..(14): n is a, c, g, or u
nuucaugggnuannuaauuggaa

SEQ ID NO: 137554 - RNA, 24 nt, Artificial Sequence
  Synthetic
  misc_feature (2)..(2): n is a, c, g, or u
  misc_feature (11)..(11): n is a, c, g, or u
  misc_feature (14)..(15): n is a, c, g, or u
anuucaugggnuannuaauuggaa

SEQ ID NO: 137555 - RNA, 18 nt, Artificial Sequence
  Synthetic
ccucucacuguaaaugaa

SEQ ID NO: 137556 - RNA, 19 nt, Artificial Sequence
  Synthetic
cccucucacuguaaaugaa

SEQ ID NO: 137557 - RNA, 20 nt, Artificial Sequence
  Synthetic
gcccucucacuguaaaugaa

SEQ ID NO: 137558 - RNA, 21 nt, Artificial Sequence
  Synthetic
ggcccucucacuguaaaugaa

SEQ ID NO: 137559 - RNA, 22 nt, Artificial Sequence
  Synthetic
  misc_feature (1)..(1): n is a, c, g, or u
nggcccucucacuguaaaugaa

SEQ ID NO: 137560 - RNA, 23 nt, Artificial Sequence
  Synthetic
  misc_feature (2)..(2): n is a, c, g, or u
unggcccucucacuguaaaugaa

SEQ ID NO: 137561 - RNA, 24 nt, Artificial Sequence
  Synthetic
  misc_feature (3)..(3): n is a, c, g, or u
gunggcccucucacuguaaaugaa

SEQ ID NO: 137562 - RNA, 18 nt, Artificial Sequence
  Synthetic
  misc_feature (16)..(16): n is a, c, g, or u
ugcauguauacaagcnaa

SEQ ID NO: 137563 - RNA, 19 nt, Artificial Sequence
  Synthetic
  misc_feature (17)..(17): n is a, c, g, or u
augcauguauacaagcnaa

SEQ ID NO: 137564 - RNA, 20 nt, Artificial Sequence
  Synthetic
  misc_feature (18)..(18): n is a, c, g, or u
uaugcauguauacaagcnaa

SEQ ID NO: 137565 - RNA, 21 nt, Artificial Sequence
  Synthetic
  misc_feature (19)..(19): n is a, c, g, or u
guaugcauguauacaagcnaa

SEQ ID NO: 137566 - RNA, 22 nt, Artificial Sequence
  Synthetic
  misc_feature (20)..(20): n is a, c, g, or u
uguaugcauguauacaagcnaa

SEQ ID NO: 137567 - RNA, 23 nt, Artificial Sequence
  Synthetic
  misc_feature (21)..(21): n is a, c, g, or u
uuguaugcauguauacaagcnaa

SEQ ID NO: 137568 - RNA, 24 nt, Artificial Sequence
  Synthetic
  misc_feature (22)..(22): n is a, c, g, or u
uuuguaugcauguauacaagcnaa

SEQ ID NO: 137569 - RNA, 18 nt, Artificial Sequence
  Synthetic
gcccaaggucuuacauaa

SEQ ID NO: 137570 - RNA, 19 nt, Artificial Sequence
  Synthetic
ugcccaaggucuuacauaa

SEQ ID NO: 137571 - RNA, 20 nt, Artificial Sequence
  Synthetic
cugcccaaggucuuacauaa

SEQ ID NO: 137572 - RNA, 21 nt, Artificial Sequence
  Synthetic
ccugcccaaggucuuacauaa

SEQ ID NO: 137573 - RNA, 22 nt, Artificial Sequence
  Synthetic
uccugcccaaggucuuacauaa

SEQ ID NO: 137574 - RNA, 23 nt, Artificial Sequence
  Synthetic
auccugcccaaggucuuacauaa

SEQ ID NO: 137575 - RNA, 24 nt, Artificial Sequence
  Synthetic
gauccugcccaaggucuuacauaa

SEQ ID NO: 137576 - RNA, 18 nt, Artificial Sequence
  Synthetic
uauuccuuggacucauaa

SEQ ID NO: 137577 - RNA, 19 nt, Artificial Sequence
  Synthetic
guauuccuuggacucauaa

SEQ ID NO: 137578 - RNA, 20 nt, Artificial Sequence
  Synthetic
aguauuccuuggacucauaa

SEQ ID NO: 137579 - RNA, 21 nt, Artificial Sequence
  Synthetic
uaguauuccuuggacucauaa

SEQ ID NO: 137580 - RNA, 22 nt, Artificial Sequence
  Synthetic
uuaguauuccuuggacucauaa

SEQ ID NO: 137581 - RNA, 23 nt, Artificial Sequence
  Synthetic
guuaguauuccuuggacucauaa

SEQ ID NO: 137582 - RNA, 24 nt, Artificial Sequence
  Synthetic
uguuaguauuccuuggacucauaa

SEQ ID NO: 137583 - RNA, 18 nt, Artificial Sequence
  Synthetic
  misc_feature (7)..(7): n is a, c, g, or u
ggcuggnauucuauauaa

SEQ ID NO: 137584 - RNA, 19 nt, Artificial Sequence
  Synthetic
  misc_feature (8)..(8): n is a, c, g, or u
aggcuggnauucuauauaa

SEQ ID NO: 137585 - RNA, 20 nt, Artificial Sequence
  Synthetic
  misc_feature (9)..(9): n is a, c, g, or u
aaggcuggnauucuauauaa

SEQ ID NO: 137586 - RNA, 21 nt, Artificial Sequence
  Synthetic
  misc_feature (10)..(10): n is a, c, g, or u
gaaggcuggnauucuauauaa

SEQ ID NO: 137587 - RNA, 22 nt, Artificial Sequence
  Synthetic
  misc_feature (11)..(11): n is a, c, g, or u
ggaaggcuggnauucuauauaa

SEQ ID NO: 137588 - RNA, 23 nt, Artificial Sequence
  Synthetic
  misc_feature (12)..(12): n is a, c, g, or u
uggaaggcuggnauucuauauaa

SEQ ID NO: 137589 - RNA, 24 nt, Artificial Sequence
  Synthetic
  misc_feature (13)..(13): n is a, c, g, or u
uuggaaggcuggnauucuauauaa

SEQ ID NO: 137590 - RNA, 18 nt, Artificial Sequence
  Synthetic
caauuauguuaauacuaa

SEQ ID NO: 137591 - RNA, 19 nt, Artificial Sequence
  Synthetic
ucaauuauguuaauacuaa

SEQ ID NO: 137592 - RNA, 20 nt, Artificial Sequence
  Synthetic
gucaauuauguuaauacuaa

SEQ ID NO: 137593 - RNA, 21 nt, Artificial Sequence
  Synthetic
agucaauuauguuaauacuaa

SEQ ID NO: 137594 - RNA, 22 nt, Artificial Sequence
  Synthetic
uagucaauuauguuaauacuaa

SEQ ID NO: 137595 - RNA, 23 nt, Artificial Sequence
  Synthetic
guagucaauuauguuaauacuaa

SEQ ID NO: 137596 - RNA, 24 nt, Artificial Sequence
  Synthetic
aguagucaauuauguuaauacuaa

SEQ ID NO: 137597 - RNA, 18 nt, Artificial Sequence
  Synthetic
uauacauuuaaacccuaa

SEQ ID NO: 137598 - RNA, 19 nt, Artificial Sequence
  Synthetic
guauacauuuaaacccuaa

SEQ ID NO: 137599 - RNA, 20 nt, Artificial Sequence
  Synthetic
gguauacauuuaaacccuaa

SEQ ID NO: 137600 - RNA, 21 nt, Artificial Sequence
  Synthetic
ggguauacauuuaaacccuaa

SEQ ID NO: 137601 - RNA, 22 nt, Artificial Sequence
  Synthetic
uggguauacauuuaaacccuaa

SEQ ID NO: 137602 - RNA, 23 nt, Artificial Sequence
  Synthetic
  misc_feature (1)..(1): n is a, c, g, or u
nuggguauacauuuaaacccuaa

SEQ ID NO: 137603 - RNA, 24 nt, Artificial Sequence
  Synthetic
  misc_feature (2)..(2): n is a, c, g, or u
unuggguauacauuuaaacccuaa

SEQ ID NO: 137604 - RNA, 18 nt, Artificial Sequence
  Synthetic
cuuacaaggccuuucuaa

SEQ ID NO: 137605 - RNA, 19 nt, Artificial Sequence
  Synthetic
acuuacaaggccuuucuaa

SEQ ID NO: 137606 - RNA, 20 nt, Artificial Sequence
  Synthetic
aacuuacaaggccuuucuaa

SEQ ID NO: 137607 - RNA, 21 nt, Artificial Sequence
  Synthetic
caacuuacaaggccuuucuaa

SEQ ID NO: 137608 - RNA, 22 nt, Artificial Sequence
  Synthetic
ccaacuuacaaggccuuucuaa

SEQ ID NO: 137609 - RNA, 23 nt, Artificial Sequence
  Synthetic
gccaacuuacaaggccuuucuaa

SEQ ID NO: 137610 - RNA, 24 nt, Artificial Sequence
  Synthetic
cgccaacuuacaaggccuuucuaa

SEQ ID NO: 137611 - RNA, 18 nt, Artificial Sequence
  Synthetic
  misc_feature (2)..(2): n is a, c, g, or u
unggcccucucacuguaa

SEQ ID NO: 137612 - RNA, 19 nt, Artificial Sequence
  Synthetic
  misc_feature (3)..(3): n is a, c, g, or u
gunggcccucucacuguaa

SEQ ID NO: 137613 - RNA, 20 nt, Artificial Sequence
  Synthetic
  misc_feature (4)..(4): n is a, c, g, or u
ugunggcccucucacuguaa

SEQ ID NO: 137614 - RNA, 21 nt, Artificial Sequence
  Synthetic
  misc_feature (5)..(5): n is a, c, g, or u
uugunggcccucucacuguaa

SEQ ID NO: 137615 - RNA, 22 nt, Artificial Sequence
  Synthetic
  misc_feature (6)..(6): n is a, c, g, or u
uuugunggcccucucacuguaa

SEQ ID NO: 137616 - RNA, 23 nt, Artificial Sequence
  Synthetic
  misc_feature (7)..(7): n is a, c, g, or u
auuugunggcccucucacuguaa

SEQ ID NO: 137617 - RNA, 24 nt, Artificial Sequence
  Synthetic
  misc_feature (8)..(8): n is a, c, g, or u
aauuugunggcccucucacuguaa

SEQ ID NO: 137618 - RNA, 18 nt, Artificial Sequence
  Synthetic
  misc_feature (2)..(2): n is a, c, g, or u
  misc_feature (11)..(11): n is a, c, g, or u
  misc_feature (14)..(15): n is a, c, g, or u
anuucaugggnuannuaa

SEQ ID NO: 137619 - RNA, 19 nt, Artificial Sequence
  Synthetic
  misc_feature (3)..(3): n is a, c, g, or u
  misc_feature (12)..(12): n is a, c, g, or u
  misc_feature (15)..(16): n is a, c, g, or u
aanuucaugggnuannuaa

SEQ ID NO: 137620 - RNA, 20 nt, Artificial Sequence
  Synthetic
  misc_feature (4)..(4): n is a, c, g, or u
  misc_feature (13)..(13): n is a, c, g, or u
  misc_feature (16)..(17): n is a, c, g, or u
aaanuucaugggnuannuaa

SEQ ID NO: 137621 - RNA, 21 nt, Artificial Sequence
  Synthetic
  misc_feature (5)..(5): n is a, c, g, or u
  misc_feature (14)..(14): n is a, c, g, or u
  misc_feature (17)..(18): n is a, c, g, or u
uaaanuucaugggnuannuaa

SEQ ID NO: 137622 - RNA, 22 nt, Artificial Sequence
  Synthetic
  misc_feature (6)..(6): n is a, c, g, or u
  misc_feature (15)..(15): n is a, c, g, or u
  misc_feature (18)..(19): n is a, c, g, or u
cuaaanuucaugggnuannuaa

SEQ ID NO: 137623 - RNA, 23 nt, Artificial Sequence
  Synthetic
  misc_feature (7)..(7): n is a, c, g, or u
  misc_feature (16)..(16): n is a, c, g, or u
  misc_feature (19)..(20): n is a, c, g, or u
ccuaaanuucaugggnuannuaa

SEQ ID NO: 137624 - RNA, 24 nt, Artificial Sequence
  Synthetic
  misc_feature (8)..(8): n is a, c, g, or u
  misc_feature (17)..(17): n is a, c, g, or u
  misc_feature (20)..(21): n is a, c, g, or u
cccuaaanuucaugggnuannuaa

SEQ ID NO: 137625 - RNA, 18 nt, Artificial Sequence
  Synthetic
uuaaacccuaacaaaaca

SEQ ID NO: 137626 - RNA, 19 nt, Artificial Sequence
  Synthetic
uuuaaacccuaacaaaaca

SEQ ID NO: 137627 - RNA, 20 nt, Artificial Sequence
  Synthetic
auuuaaacccuaacaaaaca

SEQ ID NO: 137628 - RNA, 21 nt, Artificial Sequence
  Synthetic
cauuuaaacccuaacaaaaca

SEQ ID NO: 137629 - RNA, 22 nt, Artificial Sequence
  Synthetic
acauuuaaacccuaacaaaaca

SEQ ID NO: 137630 - RNA, 23 nt, Artificial Sequence
  Synthetic
uacauuuaaacccuaacaaaaca

SEQ ID NO: 137631 - RNA, 24 nt, Artificial Sequence
  Synthetic
auacauuuaaacccuaacaaaaca

SEQ ID NO: 137632 - RNA, 18 nt, Artificial Sequence
  Synthetic
  misc_feature (10)..(10): n is a, c, g, or u
  misc_feature (12)..(12): n is a, c, g, or u
gggacccugngncgaaca

SEQ ID NO: 137633 - RNA, 19 nt, Artificial Sequence
  Synthetic
  misc_feature (11)..(11): n is a, c, g, or u
  misc_feature (13)..(13): n is a, c, g, or u
ggggacccugngncgaaca

SEQ ID NO: 137634 - RNA, 20 nt, Artificial Sequence
  Synthetic
  misc_feature (12)..(12): n is a, c, g, or u
  misc_feature (14)..(14): n is a, c, g, or u
uggggacccugngncgaaca

SEQ ID NO: 137635 - RNA, 21 nt, Artificial Sequence
  Synthetic
  misc_feature (13)..(13): n is a, c, g, or u
  misc_feature (15)..(15): n is a, c, g, or u
cuggggacccugngncgaaca

SEQ ID NO: 137636 - RNA, 22 nt, Artificial Sequence
  Synthetic
  misc_feature (14)..(14): n is a, c, g, or u
  misc_feature (16)..(16): n is a, c, g, or u
acuggggacccugngncgaaca

SEQ ID NO: 137637 - RNA, 23 nt, Artificial Sequence
  Synthetic
  misc_feature (15)..(15): n is a, c, g, or u
  misc_feature (17)..(17): n is a, c, g, or u
gacuggggacccugngncgaaca

SEQ ID NO: 137638 - RNA, 24 nt, Artificial Sequence
  Synthetic
  misc_feature (16)..(16): n is a, c, g, or u
  misc_feature (18)..(18): n is a, c, g, or u
ggacuggggacccugngncgaaca

SEQ ID NO: 137639 - RNA, 18 nt, Artificial Sequence
  Synthetic
ggcuccaguucaggaaca

SEQ ID NO: 137640 - RNA, 19 nt, Artificial Sequence
  Synthetic
uggcuccaguucaggaaca

SEQ ID NO: 137641 - RNA, 20 nt, Artificial Sequence
  Synthetic
guggcuccaguucaggaaca

SEQ ID NO: 137642 - RNA, 21 nt, Artificial Sequence
  Synthetic
gguggcuccaguucaggaaca

SEQ ID NO: 137643 - RNA, 22 nt, Artificial Sequence
  Synthetic
ugguggcuccaguucaggaaca

SEQ ID NO: 137644 - RNA, 23 nt, Artificial Sequence
  Synthetic
cugguggcuccaguucaggaaca

SEQ ID NO: 137645 - RNA, 24 nt, Artificial Sequence
  Synthetic
gcugguggcuccaguucaggaaca

SEQ ID NO: 137646 - RNA, 18 nt, Artificial Sequence
  Synthetic
aacauggagaacaucaca

SEQ ID NO: 137647 - RNA, 19 nt, Artificial Sequence
  Synthetic
gaacauggagaacaucaca

SEQ ID NO: 137648 - RNA, 20 nt, Artificial Sequence
  Synthetic
cgaacauggagaacaucaca

SEQ ID NO: 137649 - RNA, 21 nt, Artificial Sequence
  Synthetic
  misc_feature (1)..(1): n is a, c, g, or u
ncgaacauggagaacaucaca

SEQ ID NO: 137650 - RNA, 22 nt, Artificial Sequence
  Synthetic
  misc_feature (2)..(2): n is a, c, g, or u
gncgaacauggagaacaucaca

SEQ ID NO: 137651 - RNA, 23 nt, Artificial Sequence
  Synthetic
  misc_feature (1)..(1): n is a, c, g, or u
  misc_feature (3)..(3): n is a, c, g, or u
ngncgaacauggagaacaucaca

SEQ ID NO: 137652 - RNA, 24 nt, Artificial Sequence
  Synthetic
  misc_feature (2)..(2): n is a, c, g, or u
  misc_feature (4)..(4): n is a, c, g, or u
gngncgaacauggagaacaucaca

SEQ ID NO: 137653 - RNA, 18 nt, Artificial Sequence
  Synthetic
  misc_feature (15)..(15): n is a, c, g, or u
uauaagagggaaacnaca

SEQ ID NO: 137654 - RNA, 19 nt, Artificial Sequence
  Synthetic
  misc_feature (16)..(16): n is a, c, g, or u
auauaagagggaaacnaca

SEQ ID NO: 137655 - RNA, 20 nt, Artificial Sequence
  Synthetic
  misc_feature (17)..(17): n is a, c, g, or u
uauauaagagggaaacnaca

SEQ ID NO: 137656 - RNA, 21 nt, Artificial Sequence
  Synthetic
  misc_feature (18)..(18): n is a, c, g, or u
cuauauaagagggaaacnaca

SEQ ID NO: 137657 - RNA, 22 nt, Artificial Sequence
  Synthetic
  misc_feature (19)..(19): n is a, c, g, or u
ucuauauaagagggaaacnaca

SEQ ID NO: 137658 - RNA, 23 nt, Artificial Sequence
  Synthetic
  misc_feature (20)..(20): n is a, c, g, or u
uucuauauaagagggaaacnaca

SEQ ID NO: 137659 - RNA, 24 nt, Artificial Sequence
  Synthetic
  misc_feature (21)..(21): n is a, c, g, or u
auucuauauaagagggaaacnaca

SEQ ID NO: 137660 - RNA, 18 nt, Artificial Sequence
  Synthetic
  misc_feature (8)..(8): n is a, c, g, or u
uuugucunuggguauaca

SEQ ID NO: 137661 - RNA, 19 nt, Artificial Sequence
  Synthetic
  misc_feature (9)..(9): n is a, c, g, or u
uuuugucunuggguauaca

SEQ ID NO: 137662 - RNA, 20 nt, Artificial Sequence
  Synthetic
  misc_feature (10)..(10): n is a, c, g, or u
cuuuugucunuggguauaca

SEQ ID NO: 137663 - RNA, 21 nt, Artificial Sequence
  Synthetic
  misc_feature (11)..(11): n is a, c, g, or u
ucuuuugucunuggguauaca

SEQ ID NO: 137664 - RNA, 22 nt, Artificial Sequence
  Synthetic
  misc_feature (12)..(12): n is a, c, g, or u
uucuuuugucunuggguauaca

SEQ ID NO: 137665 - RNA, 23 nt, Artificial Sequence
  Synthetic
  misc_feature (13)..(13): n is a, c, g, or u
uuucuuuugucunuggguauaca

SEQ ID NO: 137666 - RNA, 24 nt, Artificial Sequence
  Synthetic
  misc_feature (14)..(14): n is a, c, g, or u
uuuucuuuugucunuggguauaca

SEQ ID NO: 137667 - RNA, 18 nt, Artificial Sequence
  Synthetic
ccugcccaaggucuuaca

SEQ ID NO: 137668 - RNA, 19 nt, Artificial Sequence
  Synthetic
uccugcccaaggucuuaca

SEQ ID NO: 137669 - RNA, 20 nt, Artificial Sequence
  Synthetic
auccugcccaaggucuuaca

SEQ ID NO: 137670 - RNA, 21 nt, Artificial Sequence
  Synthetic
gauccugcccaaggucuuaca

SEQ ID NO: 137671 - RNA, 22 nt, Artificial Sequence
  Synthetic
agauccugcccaaggucuuaca

SEQ ID NO: 137672 - RNA, 23 nt, Artificial Sequence
  Synthetic
cagauccugcccaaggucuuaca

SEQ ID NO: 137673 - RNA, 24 nt, Artificial Sequence
  Synthetic
ucagauccugcccaaggucuuaca

SEQ ID NO: 137674 - RNA, 18 nt, Artificial Sequence
  Synthetic
accccugcucguguuaca

SEQ ID NO: 137675 - RNA, 19 nt, Artificial Sequence
  Synthetic
gaccccugcucguguuaca

SEQ ID NO: 137676 - RNA, 20 nt, Artificial Sequence
  Synthetic
ggaccccugcucguguuaca

SEQ ID NO: 137677 - RNA, 21 nt, Artificial Sequence
  Synthetic
aggaccccugcucguguuaca

SEQ ID NO: 137678 - RNA, 22 nt, Artificial Sequence
  Synthetic
uaggaccccugcucguguuaca

SEQ ID NO: 137679 - RNA, 23 nt, Artificial Sequence
  Synthetic
cuaggaccccugcucguguuaca

SEQ ID NO: 137680 - RNA, 24 nt, Artificial Sequence
  Synthetic
ccuaggaccccugcucguguuaca

SEQ ID NO: 137681 - RNA, 18 nt, Artificial Sequence
  Synthetic
  misc_feature (8)..(9): n is a, c, g, or u
cuggccannagccaacca

SEQ ID NO: 137682 - RNA, 19 nt, Artificial Sequence
  Synthetic
  misc_feature (9)..(10): n is a, c, g, or u
acuggccannagccaacca

SEQ ID NO: 137683 - RNA, 20 nt, Artificial Sequence
  Synthetic
  misc_feature (10)..(11): n is a, c, g, or u
cacuggccannagccaacca

SEQ ID NO: 137684 - RNA, 21 nt, Artificial Sequence
  Synthetic
  misc_feature (11)..(12): n is a, c, g, or u
ccacuggccannagccaacca

SEQ ID NO: 137685 - RNA, 22 nt, Artificial Sequence
  Synthetic
  misc_feature (12)..(13): n is a, c, g, or u
accacuggccannagccaacca

SEQ ID NO: 137686 - RNA, 23 nt, Artificial Sequence
  Synthetic
  misc_feature (13)..(14): n is a, c, g, or u
gaccacuggccannagccaacca

SEQ ID NO: 137687 - RNA, 24 nt, Artificial Sequence
  Synthetic
  misc_feature (14)..(15): n is a, c, g, or u
ggaccacuggccannagccaacca

SEQ ID NO: 137688 - RNA, 18 nt, Artificial Sequence
  Synthetic
cuccuccugccuccacca

SEQ ID NO: 137689 - RNA, 19 nt, Artificial Sequence
  Synthetic
ccuccuccugccuccacca

SEQ ID NO: 137690 - RNA, 20 nt, Artificial Sequence
  Synthetic
uccuccuccugccuccacca

SEQ ID NO: 137691 - RNA, 21 nt, Artificial Sequence
  Synthetic
uuccuccuccugccuccacca

SEQ ID NO: 137692 - RNA, 22 nt, Artificial Sequence
  Synthetic
  misc_feature (1)..(1): n is a, c, g, or u
nuuccuccuccugccuccacca

SEQ ID NO: 137693 - RNA, 23 nt, Artificial Sequence
  Synthetic
  misc_feature (2)..(2): n is a, c, g, or u
anuuccuccuccugccuccacca

SEQ ID NO: 137694 - RNA, 24 nt, Artificial Sequence
  Synthetic
  misc_feature (3)..(3): n is a, c, g, or u
canuuccuccuccugccuccacca

SEQ ID NO: 137695 - RNA, 18 nt, Artificial Sequence
  Synthetic
  misc_feature (7)..(7): n is a, c, g, or u
  misc_feature (10)..(11): n is a, c, g, or u
ugccgunccnnccgacca

SEQ ID NO: 137696 - RNA, 19 nt, Artificial Sequence
  Synthetic
  misc_feature (8)..(8): n is a, c, g, or u
  misc_feature (11)..(12): n is a, c, g, or u
cugccgunccnnccgacca

SEQ ID NO: 137697 - RNA, 20 nt, Artificial Sequence
  Synthetic
  misc_feature (9)..(9): n is a, c, g, or u
  misc_feature (12)..(13): n is a, c, g, or u
ucugccgunccnnccgacca

SEQ ID NO: 137698 - RNA, 21 nt, Artificial Sequence
  Synthetic
  misc_feature (10)..(10): n is a, c, g, or u
  misc_feature (13)..(14): n is a, c, g, or u
gucugccgunccnnccgacca

SEQ ID NO: 137699 - RNA, 22 nt, Artificial Sequence
  Synthetic
  misc_feature (11)..(11): n is a, c, g, or u
  misc_feature (14)..(15): n is a, c, g, or u
cgucugccgunccnnccgacca

SEQ ID NO: 137700 - RNA, 23 nt, Artificial Sequence
  Synthetic
  misc_feature (12)..(12): n is a, c, g, or u
  misc_feature (15)..(16): n is a, c, g, or u
ccgucugccgunccnnccgacca

SEQ ID NO: 137701 - RNA, 24 nt, Artificial Sequence
  Synthetic
  misc_feature (13)..(13): n is a, c, g, or u
  misc_feature (16)..(17): n is a, c, g, or u
uccgucugccgunccnnccgacca

SEQ ID NO: 137702 - RNA, 18 nt, Artificial Sequence
  Synthetic
auugggacuucaacccca

SEQ ID NO: 137703 - RNA, 19 nt, Artificial Sequence
  Synthetic
gauugggacuucaacccca

SEQ ID NO: 137704 - RNA, 20 nt, Artificial Sequence
  Synthetic
agauugggacuucaacccca

SEQ ID NO: 137705 - RNA, 21 nt, Artificial Sequence
  Synthetic
cagauugggacuucaacccca

SEQ ID NO: 137706 - RNA, 22 nt, Artificial Sequence
  Synthetic
ccagauugggacuucaacccca

SEQ ID NO: 137707 - RNA, 23 nt, Artificial Sequence
  Synthetic
uccagauugggacuucaacccca

SEQ ID NO: 137708 - RNA, 24 nt, Artificial Sequence
  Synthetic
auccagauugggacuucaacccca

SEQ ID NO: 137709 - RNA, 18 nt, Artificial Sequence
  Synthetic
  misc_feature (12)..(13): n is a, c, g, or u
accacuggccannagcca

SEQ ID NO: 137710 - RNA, 19 nt, Artificial Sequence
  Synthetic
  misc_feature (13)..(14): n is a, c, g, or u
gaccacuggccannagcca

SEQ ID NO: 137711 - RNA, 20 nt, Artificial Sequence
  Synthetic
  misc_feature (14)..(15): n is a, c, g, or u
ggaccacuggccannagcca

SEQ ID NO: 137712 - RNA, 21 nt, Artificial Sequence
  Synthetic
  misc_feature (15)..(16): n is a, c, g, or u
aggaccacuggccannagcca

SEQ ID NO: 137713 - RNA, 22 nt, Artificial Sequence
  Synthetic
  misc_feature (16)..(17): n is a, c, g, or u
aaggaccacuggccannagcca

SEQ ID NO: 137714 - RNA, 23 nt, Artificial Sequence
  Synthetic
  misc_feature (17)..(18): n is a, c, g, or u
caaggaccacuggccannagcca

SEQ ID NO: 137715 - RNA, 24 nt, Artificial Sequence
  Synthetic
  misc_feature (18)..(19): n is a, c, g, or u
ucaaggaccacuggccannagcca

SEQ ID NO: 137716 - RNA, 18 nt, Artificial Sequence
  Synthetic
  misc_feature (8)..(8): n is a, c, g, or u
ugcuaggnuguacugcca

SEQ ID NO: 137717 - RNA, 19 nt, Artificial Sequence
  Synthetic
  misc_feature (9)..(9): n is a, c, g, or u
cugcuaggnuguacugcca

SEQ ID NO: 137718 - RNA, 20 nt, Artificial Sequence
  Synthetic
  misc_feature (10)..(10): n is a, c, g, or u
gcugcuaggnuguacugcca

SEQ ID NO: 137719 - RNA, 21 nt, Artificial Sequence
  Synthetic
  misc_feature (11)..(11): n is a, c, g, or u
ggcugcuaggnuguacugcca

SEQ ID NO: 137720 - RNA, 22 nt, Artificial Sequence
  Synthetic
  misc_feature (12)..(12): n is a, c, g, or u
uggcugcuaggnuguacugcca

SEQ ID NO: 137721 - RNA, 23 nt, Artificial Sequence
  Synthetic
  misc_feature (13)..(13): n is a, c, g, or u
auggcugcuaggnuguacugcca

SEQ ID NO: 137722 - RNA, 24 nt, Artificial Sequence
  Synthetic
  misc_feature (14)..(14): n is a, c, g, or u
cauggcugcuaggnuguacugcca

SEQ ID NO: 137723 - RNA, 18 nt, Artificial Sequence
  Synthetic
  misc_feature (7)..(7): n is a, c, g, or u
  misc_feature (12)..(12): n is a, c, g, or u
  misc_feature (15)..(15): n is a, c, g, or u
ccagggnucacnccncca

SEQ ID NO: 137724 - RNA, 19 nt, Artificial Sequence
  Synthetic
  misc_feature (8)..(8): n is a, c, g, or u
  misc_feature (13)..(13): n is a, c, g, or u
  misc_feature (16)..(16): n is a, c, g, or u
gccagggnucacnccncca

SEQ ID NO: 137725 - RNA, 20 nt, Artificial Sequence
  Synthetic
  misc_feature (9)..(9): n is a, c, g, or u
  misc_feature (14)..(14): n is a, c, g, or u
  misc_feature (17)..(17): n is a, c, g, or u
ggccagggnucacnccncca

SEQ ID NO: 137726 - RNA, 21 nt, Artificial Sequence
  Synthetic
  misc_feature (10)..(10): n is a, c, g, or u
  misc_feature (15)..(15): n is a, c, g, or u
  misc_feature (18)..(18): n is a, c, g, or u
gggccagggnucacnccncca

SEQ ID NO: 137727 - RNA, 22 nt, Artificial Sequence
  Synthetic
  misc_feature (11)..(11): n is a, c, g, or u
  misc_feature (16)..(16): n is a, c, g, or u
  misc_feature (19)..(19): n is a, c, g, or u
cgggccagggnucacnccncca

SEQ ID NO: 137728 - RNA, 23 nt, Artificial Sequence
  Synthetic
  misc_feature (12)..(12): n is a, c, g, or u
  misc_feature (17)..(17): n is a, c, g, or u
  misc_feature (20)..(20): n is a, c, g, or u
ucgggccagggnucacnccncca

SEQ ID NO: 137729 - RNA, 24 nt, Artificial Sequence
  Synthetic
  misc_feature (13)..(13): n is a, c, g, or u
  misc_feature (18)..(18): n is a, c, g, or u
  misc_feature (21)..(21): n is a, c, g, or u
uucgggccagggnucacnccncca

SEQ ID NO: 137730 - RNA, 18 nt, Artificial Sequence
  Synthetic
  misc_feature (7)..(7): n is a, c, g, or u
aauuugnaagauccagca

SEQ ID NO: 137731 - RNA, 19 nt, Artificial Sequence
  Synthetic
  misc_feature (8)..(8): n is a, c, g, or u
uaauuugnaagauccagca

SEQ ID NO: 137732 - RNA, 20 nt, Artificial Sequence
  Synthetic
  misc_feature (9)..(9): n is a, c, g, or u
auaauuugnaagauccagca

SEQ ID NO: 137733 - RNA, 21 nt, Artificial Sequence
  Synthetic
  misc_feature (10)..(10): n is a, c, g, or u
aauaauuugnaagauccagca

SEQ ID NO: 137734 - RNA, 22 nt, Artificial Sequence
  Synthetic
  misc_feature (11)..(11): n is a, c, g, or u
uaauaauuugnaagauccagca

SEQ ID NO: 137735 - RNA, 23 nt, Artificial Sequence
  Synthetic
  misc_feature (12)..(12): n is a, c, g, or u
guaauaauuugnaagauccagca

SEQ ID NO: 137736 - RNA, 24 nt, Artificial Sequence
  Synthetic
  misc_feature (13)..(13): n is a, c, g, or u
gguaauaauuugnaagauccagca

SEQ ID NO: 137737 - RNA, 18 nt, Artificial Sequence
  Synthetic
cagguaggagugggagca

SEQ ID NO: 137738 - RNA, 19 nt, Artificial Sequence
  Synthetic
ccagguaggagugggagca

SEQ ID NO: 137739 - RNA, 20 nt, Artificial Sequence
  Synthetic
accagguaggagugggagca

SEQ ID NO: 137740 - RNA, 21 nt, Artificial Sequence
  Synthetic
aaccagguaggagugggagca

SEQ ID NO: 137741 - RNA, 22 nt, Artificial Sequence
  Synthetic
caaccagguaggagugggagca

SEQ ID NO: 137742 - RNA, 23 nt, Artificial Sequence
  Synthetic
ccaaccagguaggagugggagca

SEQ ID NO: 137743 - RNA, 24 nt, Artificial Sequence
  Synthetic
gccaaccagguaggagugggagca

SEQ ID NO: 137744 - RNA, 18 nt, Artificial Sequence
  Synthetic
caaaaccucgcaaaggca

SEQ ID NO: 137745 - RNA, 19 nt, Artificial Sequence
  Synthetic
ucaaaaccucgcaaaggca

SEQ ID NO: 137746 - RNA, 20 nt, Artificial Sequence
  Synthetic
aucaaaaccucgcaaaggca

SEQ ID NO: 137747 - RNA, 21 nt, Artificial Sequence
  Synthetic
caucaaaaccucgcaaaggca

SEQ ID NO: 137748 - RNA, 22 nt, Artificial Sequence
  Synthetic
ucaucaaaaccucgcaaaggca

SEQ ID NO: 137749 - RNA, 23 nt, Artificial Sequence
  Synthetic
gucaucaaaaccucgcaaaggca

SEQ ID NO: 137750 - RNA, 24 nt, Artificial Sequence
  Synthetic
ggucaucaaaaccucgcaaaggca

SEQ ID NO: 137751 - RNA, 18 nt, Artificial Sequence
  Synthetic
ugccuccaccaaucggca

SEQ ID NO: 137752 - RNA, 19 nt, Artificial Sequence
  Synthetic
cugccuccaccaaucggca

SEQ ID NO: 137753 - RNA, 20 nt, Artificial Sequence
  Synthetic
ccugccuccaccaaucggca

SEQ ID NO: 137754 - RNA, 21 nt, Artificial Sequence
  Synthetic
uccugccuccaccaaucggca

SEQ ID NO: 137755 - RNA, 22 nt, Artificial Sequence
  Synthetic
cuccugccuccaccaaucggca

SEQ ID NO: 137756 - RNA, 23 nt, Artificial Sequence
  Synthetic
ccuccugccuccaccaaucggca

SEQ ID NO: 137757 - RNA, 24 nt, Artificial Sequence
  Synthetic
uccuccugccuccaccaaucggca

SEQ ID NO: 137758 - RNA, 18 nt, Artificial Sequence
  Synthetic
  misc_feature (15)..(15): n is a, c, g, or u
ucaccucaccauacngca

SEQ ID NO: 137759 - RNA, 19 nt, Artificial Sequence
  Synthetic
  misc_feature (16)..(16): n is a, c, g, or u
cucaccucaccauacngca

SEQ ID NO: 137760 - RNA, 20 nt, Artificial Sequence
  Synthetic
  misc_feature (17)..(17): n is a, c, g, or u
gcucaccucaccauacngca

SEQ ID NO: 137761 - RNA, 21 nt, Artificial Sequence
  Synthetic
  misc_feature (18)..(18): n is a, c, g, or u
ugcucaccucaccauacngca

SEQ ID NO: 137762 - RNA, 22 nt, Artificial Sequence
  Synthetic
  misc_feature (19)..(19): n is a, c, g, or u
uugcucaccucaccauacngca

SEQ ID NO: 137763 - RNA, 23 nt, Artificial Sequence
  Synthetic
  misc_feature (20)..(20): n is a, c, g, or u
auugcucaccucaccauacngca

SEQ ID NO: 137764 - RNA, 24 nt, Artificial Sequence
  Synthetic
  misc_feature (21)..(21): n is a, c, g, or u
cauugcucaccucaccauacngca

SEQ ID NO: 137765 - RNA, 18 nt, Artificial Sequence
  Synthetic
ucauccucaggccaugca

SEQ ID NO: 137766 - RNA, 19 nt, Artificial Sequence
  Synthetic
gucauccucaggccaugca

SEQ ID NO: 137767 - RNA, 20 nt, Artificial Sequence
  Synthetic
agucauccucaggccaugca

SEQ ID NO: 137768 - RNA, 21 nt, Artificial Sequence
  Synthetic
cagucauccucaggccaugca

SEQ ID NO: 137769 - RNA, 22 nt, Artificial Sequence
  Synthetic
acagucauccucaggccaugca

SEQ ID NO: 137770 - RNA, 23 nt, Artificial Sequence
  Synthetic
gacagucauccucaggccaugca

SEQ ID NO: 137771 - RNA, 24 nt, Artificial Sequence
  Synthetic
agacagucauccucaggccaugca

SEQ ID NO: 137772 - RNA, 18 nt, Artificial Sequence
  Synthetic
caucaguuggacccugca

SEQ ID NO: 137773 - RNA, 19 nt, Artificial Sequence
  Synthetic
ucaucaguuggacccugca

SEQ ID NO: 137774 - RNA, 20 nt, Artificial Sequence
  Synthetic
aucaucaguuggacccugca

SEQ ID NO: 137775 - RNA, 21 nt, Artificial Sequence
  Synthetic
gaucaucaguuggacccugca

SEQ ID NO: 137776 - RNA, 22 nt, Artificial Sequence
  Synthetic
cgaucaucaguuggacccugca

SEQ ID NO: 137777 - RNA, 23 nt, Artificial Sequence
  Synthetic
ccgaucaucaguuggacccugca

SEQ ID NO: 137778 - RNA, 24 nt, Artificial Sequence
  Synthetic
cccgaucaucaguuggacccugca

SEQ ID NO: 137779 - RNA, 18 nt, Artificial Sequence
  Synthetic
ucaccucugcacguugca

SEQ ID NO: 137780 - RNA, 19 nt, Artificial Sequence
  Synthetic
uucaccucugcacguugca

SEQ ID NO: 137781 - RNA, 20 nt, Artificial Sequence
  Synthetic
cuucaccucugcacguugca

SEQ ID NO: 137782 - RNA, 21 nt, Artificial Sequence
  Synthetic
gcuucaccucugcacguugca

SEQ ID NO: 137783 - RNA, 22 nt, Artificial Sequence
  Synthetic
cgcuucaccucugcacguugca

SEQ ID NO: 137784 - RNA, 23 nt, Artificial Sequence
  Synthetic
ucgcuucaccucugcacguugca

SEQ ID NO: 137785 - RNA, 24 nt, Artificial Sequence
  Synthetic
uucgcuucaccucugcacguugca

SEQ ID NO: 137786 - RNA, 18 nt, Artificial Sequence
  Synthetic
  misc_feature (16)..(16): n is a, c, g, or u
ggaacaagagcuacanca

SEQ ID NO: 137787 - RNA, 19 nt, Artificial Sequence
  Synthetic
  misc_feature (17)..(17): n is a, c, g, or u
gggaacaagagcuacanca

SEQ ID NO: 137788 - RNA, 20 nt, Artificial Sequence
  Synthetic
  misc_feature (18)..(18): n is a, c, g, or u
ugggaacaagagcuacanca

SEQ ID NO: 137789 - RNA, 21 nt, Artificial Sequence
  Synthetic
  misc_feature (19)..(19): n is a, c, g, or u
uugggaacaagagcuacanca

SEQ ID NO: 137790 - RNA, 22 nt, Artificial Sequence
  Synthetic
  misc_feature (20)..(20): n is a, c, g, or u
cuugggaacaagagcuacanca

SEQ ID NO: 137791 - RNA, 23 nt, Artificial Sequence
  Synthetic
  misc_feature (21)..(21): n is a, c, g, or u
ucuugggaacaagagcuacanca

SEQ ID NO: 137792 - RNA, 24 nt, Artificial Sequence
  Synthetic
  misc_feature (22)..(22): n is a, c, g, or u
uucuugggaacaagagcuacanca

SEQ ID NO: 137793 - RNA, 18 nt, Artificial Sequence
  Synthetic
  misc_feature (13)..(13): n is a, c, g, or u
  misc_feature (16)..(16): n is a, c, g, or u
gucugcgcaccancanca

SEQ ID NO: 137794 - RNA, 19 nt, Artificial Sequence
  Synthetic
  misc_feature (14)..(14): n is a, c, g, or u
  misc_feature (17)..(17): n is a, c, g, or u
ggucugcgcaccancanca

SEQ ID NO: 137795 - RNA, 20 nt, Artificial Sequence
  Synthetic
  misc_feature (15)..(15): n is a, c, g, or u
  misc_feature (18)..(18): n is a, c, g, or u
uggucugcgcaccancanca

SEQ ID NO: 137796 - RNA, 21 nt, Artificial Sequence
  Synthetic
  misc_feature (16)..(16): n is a, c, g, or u
  misc_feature (19)..(19): n is a, c, g, or u
uuggucugcgcaccancanca

SEQ ID NO: 137797 - RNA, 22 nt, Artificial Sequence
  Synthetic
  misc_feature (17)..(17): n is a, c, g, or u
  misc_feature (20)..(20): n is a, c, g, or u
auuggucugcgcaccancanca

SEQ ID NO: 137798 - RNA, 23 nt, Artificial Sequence
  Synthetic
  misc_feature (18)..(18): n is a, c, g, or u
  misc_feature (21)..(21): n is a, c, g, or u
aauuggucugcgcaccancanca

SEQ ID NO: 137799 - RNA, 24 nt, Artificial Sequence
  Synthetic
  misc_feature (19)..(19): n is a, c, g, or u
  misc_feature (22)..(22): n is a, c, g, or u
aaauuggucugcgcaccancanca

SEQ ID NO: 137800 - RNA, 18 nt, Artificial Sequence
  Synthetic
auucuuucccgaucauca

SEQ ID NO: 137801 - RNA, 19 nt, Artificial Sequence
  Synthetic
gauucuuucccgaucauca

SEQ ID NO: 137802 - RNA, 20 nt, Artificial Sequence
  Synthetic
ggauucuuucccgaucauca

SEQ ID NO: 137803 - RNA, 21 nt, Artificial Sequence
  Synthetic
gggauucuuucccgaucauca

SEQ ID NO: 137804 - RNA, 22 nt, Artificial Sequence
  Synthetic
ugggauucuuucccgaucauca

SEQ ID NO: 137805 - RNA, 23 nt, Artificial Sequence
  Synthetic
cugggauucuuucccgaucauca

SEQ ID NO: 137806 - RNA, 24 nt, Artificial Sequence
  Synthetic
ucugggauucuuucccgaucauca

SEQ ID NO: 137807 - RNA, 18 nt, Artificial Sequence
  Synthetic
  misc_feature (11)..(11): n is a, c, g, or u
cucaccauacngcacuca

SEQ ID NO: 137808 - RNA, 19 nt, Artificial Sequence
  Synthetic
  misc_feature (12)..(12): n is a, c, g, or u
ccucaccauacngcacuca

SEQ ID NO: 137809 - RNA, 20 nt, Artificial Sequence
  Synthetic
  misc_feature (13)..(13): n is a, c, g, or u
accucaccauacngcacuca

SEQ ID NO: 137810 - RNA, 21 nt, Artificial Sequence
  Synthetic
  misc_feature (14)..(14): n is a, c, g, or u
caccucaccauacngcacuca

SEQ ID NO: 137811 - RNA, 22 nt, Artificial Sequence
  Synthetic
  misc_feature (15)..(15): n is a, c, g, or u
ucaccucaccauacngcacuca

SEQ ID NO: 137812 - RNA, 23 nt, Artificial Sequence
  Synthetic
  misc_feature (16)..(16): n is a, c, g, or u
cucaccucaccauacngcacuca

SEQ ID NO: 137813 - RNA, 24 nt, Artificial Sequence
  Synthetic
  misc_feature (17)..(17): n is a, c, g, or u
gcucaccucaccauacngcacuca

SEQ ID NO: 137814 - RNA, 18 nt, Artificial Sequence
  Synthetic
uccaccaaucggcaguca

SEQ ID NO: 137815 - RNA, 19 nt, Artificial Sequence
  Synthetic
cuccaccaaucggcaguca

SEQ ID NO: 137816 - RNA, 20 nt, Artificial Sequence
  Synthetic
ccuccaccaaucggcaguca

SEQ ID NO: 137817 - RNA, 21 nt, Artificial Sequence
  Synthetic
gccuccaccaaucggcaguca

SEQ ID NO: 137818 - RNA, 22 nt, Artificial Sequence
  Synthetic
ugccuccaccaaucggcaguca

SEQ ID NO: 137819 - RNA, 23 nt, Artificial Sequence
  Synthetic
cugccuccaccaaucggcaguca

SEQ ID NO: 137820 - RNA, 24 nt, Artificial Sequence
  Synthetic
ccugccuccaccaaucggcaguca

SEQ ID NO: 137821 - RNA, 18 nt, Artificial Sequence
  Synthetic
  misc_feature (2)..(2): n is a, c, g, or u
ancaugggagguugguca

SEQ ID NO: 137822 - RNA, 19 nt, Artificial Sequence
  Synthetic
  misc_feature (3)..(3): n is a, c, g, or u
cancaugggagguugguca

SEQ ID NO: 137823 - RNA, 20 nt, Artificial Sequence
  Synthetic
  misc_feature (4)..(4): n is a, c, g, or u
acancaugggagguugguca

SEQ ID NO: 137824 - RNA, 21 nt, Artificial Sequence
  Synthetic
  misc_feature (5)..(5): n is a, c, g, or u
uacancaugggagguugguca

SEQ ID NO: 137825 - RNA, 22 nt, Artificial Sequence
  Synthetic
  misc_feature (6)..(6): n is a, c, g, or u
cuacancaugggagguugguca

SEQ ID NO: 137826 - RNA, 23 nt, Artificial Sequence
  Synthetic
  misc_feature (7)..(7): n is a, c, g, or u
gcuacancaugggagguugguca

SEQ ID NO: 137827 - RNA, 24 nt, Artificial Sequence
  Synthetic
  misc_feature (8)..(8): n is a, c, g, or u
agcuacancaugggagguugguca

SEQ ID NO: 137828 - RNA, 18 nt, Artificial Sequence
  Synthetic
  misc_feature (12)..(12): n is a, c, g, or u
guaaaugaaaanagaaga

SEQ ID NO: 137829 - RNA, 19 nt, Artificial Sequence
  Synthetic
  misc_feature (13)..(13): n is a, c, g, or u
uguaaaugaaaanagaaga

SEQ ID NO: 137830 - RNA, 20 nt, Artificial Sequence
  Synthetic
  misc_feature (14)..(14): n is a, c, g, or u
cuguaaaugaaaanagaaga

SEQ ID NO: 137831 - RNA, 21 nt, Artificial Sequence
  Synthetic
  misc_feature (15)..(15): n is a, c, g, or u
acuguaaaugaaaanagaaga

SEQ ID NO: 137832 - RNA, 22 nt, Artificial Sequence
  Synthetic
  misc_feature (16)..(16): n is a, c, g, or u
cacuguaaaugaaaanagaaga

SEQ ID NO: 137833 - RNA, 23 nt, Artificial Sequence
  Synthetic
  misc_feature (17)..(17): n is a, c, g, or u
ucacuguaaaugaaaanagaaga

SEQ ID NO: 137834 - RNA, 24 nt, Artificial Sequence
  Synthetic
  misc_feature (18)..(18): n is a, c, g, or u
cucacuguaaaugaaaanagaaga

SEQ ID NO: 137835 - RNA, 18 nt, Artificial Sequence
  Synthetic
  misc_feature (14)..(14): n is a, c, g, or u
ggguaauaauuugnaaga

SEQ ID NO: 137836 - RNA, 19 nt, Artificial Sequence
  Synthetic
  misc_feature (15)..(15): n is a, c, g, or u
uggguaauaauuugnaaga

SEQ ID NO: 137837 - RNA, 20 nt, Artificial Sequence
  Synthetic
  misc_feature (16)..(16): n is a, c, g, or u
guggguaauaauuugnaaga

SEQ ID NO: 137838 - RNA, 21 nt, Artificial Sequence
  Synthetic
  misc_feature (17)..(17): n is a, c, g, or u
gguggguaauaauuugnaaga

SEQ ID NO: 137839 - RNA, 22 nt, Artificial Sequence
  Synthetic
  misc_feature (18)..(18): n is a, c, g, or u
ggguggguaauaauuugnaaga

SEQ ID NO: 137840 - RNA, 23 nt, Artificial Sequence
  Synthetic
  misc_feature (19)..(19): n is a, c, g, or u
uggguggguaauaauuugnaaga

SEQ ID NO: 137841 - RNA, 24 nt, Artificial Sequence
  Synthetic
  misc_feature (20)..(20): n is a, c, g, or u
cuggguggguaauaauuugnaaga

SEQ ID NO: 137842 - RNA, 18 nt, Artificial Sequence
  Synthetic
  misc_feature (5)..(5): n is a, c, g, or u
cuggnauucuauauaaga

SEQ ID NO: 137843 - RNA, 19 nt, Artificial Sequence
  Synthetic
  misc_feature (6)..(6): n is a, c, g, or u
gcuggnauucuauauaaga

SEQ ID NO: 137844 - RNA, 20 nt, Artificial Sequence
  Synthetic
  misc_feature (7)..(7): n is a, c, g, or u
ggcuggnauucuauauaaga

SEQ ID NO: 137845 - RNA, 21 nt, Artificial Sequence
  Synthetic
  misc_feature (8)..(8): n is a, c, g, or u
aggcuggnauucuauauaaga

SEQ ID NO: 137846 - RNA, 22 nt, Artificial Sequence
  Synthetic
  misc_feature (9)..(9): n is a, c, g, or u
aaggcuggnauucuauauaaga

SEQ ID NO: 137847 - RNA, 23 nt, Artificial Sequence
  Synthetic
  misc_feature (10)..(10): n is a, c, g, or u
gaaggcuggnauucuauauaaga

SEQ ID NO: 137848 - RNA, 24 nt, Artificial Sequence
  Synthetic
  misc_feature (11)..(11): n is a, c, g, or u
ggaaggcuggnauucuauauaaga

SEQ ID NO: 137849 - RNA, 18 nt, Artificial Sequence
  Synthetic
  misc_feature (9)..(9): n is a, c, g, or u
gcucugcangaucccaga

SEQ ID NO: 137850 - RNA, 19 nt, Artificial Sequence
  Synthetic
  misc_feature (10)..(10): n is a, c, g, or u
agcucugcangaucccaga

SEQ ID NO: 137851 - RNA, 20 nt, Artificial Sequence
  Synthetic
  misc_feature (11)..(11): n is a, c, g, or u
aagcucugcangaucccaga

SEQ ID NO: 137852 - RNA, 21 nt, Artificial Sequence
  Synthetic
  misc_feature (12)..(12): n is a, c, g, or u
caagcucugcangaucccaga

SEQ ID NO: 137853 - RNA, 22 nt, Artificial Sequence
  Synthetic
  misc_feature (13)..(13): n is a, c, g, or u
ccaagcucugcangaucccaga

SEQ ID NO: 137854 - RNA, 23 nt, Artificial Sequence
  Synthetic
  misc_feature (14)..(14): n is a, c, g, or u
accaagcucugcangaucccaga

SEQ ID NO: 137855 - RNA, 24 nt, Artificial Sequence
  Synthetic
  misc_feature (15)..(15): n is a, c, g, or u
caccaagcucugcangaucccaga

SEQ ID NO: 137856 - RNA, 18 nt, Artificial Sequence
  Synthetic
  misc_feature (4)..(4): n is a, c, g, or u
caanucaaacaauccaga

SEQ ID NO: 137857 - RNA, 19 nt, Artificial Sequence
  Synthetic
  misc_feature (5)..(5): n is a, c, g, or u
ccaanucaaacaauccaga

SEQ ID NO: 137858 - RNA, 20 nt, Artificial Sequence
  Synthetic
  misc_feature (6)..(6): n is a, c, g, or u
gccaanucaaacaauccaga

SEQ ID NO: 137859 - RNA, 21 nt, Artificial Sequence
  Synthetic
  misc_feature (7)..(7): n is a, c, g, or u
agccaanucaaacaauccaga

SEQ ID NO: 137860 - RNA, 22 nt, Artificial Sequence
  Synthetic
  misc_feature (8)..(8): n is a, c, g, or u
gagccaanucaaacaauccaga

SEQ ID NO: 137861 - RNA, 23 nt, Artificial Sequence
  Synthetic
  misc_feature (9)..(9): n is a, c, g, or u
ggagccaanucaaacaauccaga

SEQ ID NO: 137862 - RNA, 24 nt, Artificial Sequence
  Synthetic
  misc_feature (10)..(10): n is a, c, g, or u
cggagccaanucaaacaauccaga

SEQ ID NO: 137863 - RNA, 18 nt, Artificial Sequence
  Synthetic
acucccucgccucgcaga

SEQ ID NO: 137864 - RNA, 19 nt, Artificial Sequence
  Synthetic
aacucccucgccucgcaga

SEQ ID NO: 137865 - RNA, 20 nt, Artificial Sequence
  Synthetic
gaacucccucgccucgcaga

SEQ ID NO: 137866 - RNA, 21 nt, Artificial Sequence
  Synthetic
agaacucccucgccucgcaga

SEQ ID NO: 137867 - RNA, 22 nt, Artificial Sequence
  Synthetic
aagaacucccucgccucgcaga

SEQ ID NO: 137868 - RNA, 23 nt, Artificial Sequence
  Synthetic
gaagaacucccucgccucgcaga

SEQ ID NO: 137869 - RNA, 24 nt, Artificial Sequence
  Synthetic
agaagaacucccucgccucgcaga

SEQ ID NO: 137870 - RNA, 18 nt, Artificial Sequence
  Synthetic
cgaggcagguccccuaga

SEQ ID NO: 137871 - RNA, 19 nt, Artificial Sequence
  Synthetic
ccgaggcagguccccuaga

SEQ ID NO: 137872 - RNA, 20 nt, Artificial Sequence
  Synthetic
accgaggcagguccccuaga

SEQ ID NO: 137873 - RNA, 21 nt, Artificial Sequence
  Synthetic
gaccgaggcagguccccuaga

SEQ ID NO: 137874 - RNA, 22 nt, Artificial Sequence
  Synthetic
  misc_feature (1)..(1): n is a, c, g, or u
ngaccgaggcagguccccuaga

SEQ ID NO: 137875 - RNA, 23 nt, Artificial Sequence
  Synthetic
  misc_feature (2)..(2): n is a, c, g, or u
gngaccgaggcagguccccuaga

SEQ ID NO: 137876 - RNA, 24 nt, Artificial Sequence
  Synthetic
  misc_feature (3)..(3): n is a, c, g, or u
cgngaccgaggcagguccccuaga

SEQ ID NO: 137877 - RNA, 18 nt, Artificial Sequence
  Synthetic
  misc_feature (10)..(10): n is a, c, g, or u
  misc_feature (13)..(14): n is a, c, g, or u
uaaauauuunccnnuaga

SEQ ID NO: 137878 - RNA, 19 nt, Artificial Sequence
  Synthetic
  misc_feature (11)..(11): n is a, c, g, or u
  misc_feature (14)..(15): n is a, c, g, or u
cuaaauauuunccnnuaga

SEQ ID NO: 137879 - RNA, 20 nt, Artificial Sequence
  Synthetic
  misc_feature (12)..(12): n is a, c, g, or u
  misc_feature (15)..(16): n is a, c, g, or u
acuaaauauuunccnnuaga

SEQ ID NO: 137880 - RNA, 21 nt, Artificial Sequence
  Synthetic
  misc_feature (13)..(13): n is a, c, g, or u
  misc_feature (16)..(17): n is a, c, g, or u
cacuaaauauuunccnnuaga

SEQ ID NO: 137881 - RNA, 22 nt, Artificial Sequence
  Synthetic
  misc_feature (1)..(1): n is a, c, g, or u
  misc_feature (14)..(14): n is a, c, g, or u
  misc_feature (17)..(18): n is a, c, g, or u
ncacuaaauauuunccnnuaga

SEQ ID NO: 137882 - RNA, 23 nt, Artificial Sequence
  Synthetic
  misc_feature (1)..(2): n is a, c, g, or u
  misc_feature (15)..(15): n is a, c, g, or u
  misc_feature (18)..(19): n is a, c, g, or u
nncacuaaauauuunccnnuaga

SEQ ID NO: 137883 - RNA, 24 nt, Artificial Sequence
  Synthetic
  misc_feature (2)..(3): n is a, c, g, or u
  misc_feature (16)..(16): n is a, c, g, or u
  misc_feature (19)..(20): n is a, c, g, or u
cnncacuaaauauuunccnnuaga

SEQ ID NO: 137884 - RNA, 18 nt, Artificial Sequence
  Synthetic
acuacuguuguuagacga

SEQ ID NO: 137885 - RNA, 19 nt, Artificial Sequence
  Synthetic
aacuacuguuguuagacga

SEQ ID NO: 137886 - RNA, 20 nt, Artificial Sequence
  Synthetic
aaacuacuguuguuagacga

SEQ ID NO: 137887 - RNA, 21 nt, Artificial Sequence
  Synthetic
gaaacuacuguuguuagacga

SEQ ID NO: 137888 - RNA, 22 nt, Artificial Sequence
  Synthetic
ggaaacuacuguuguuagacga

SEQ ID NO: 137889 - RNA, 23 nt, Artificial Sequence
  Synthetic
cggaaacuacuguuguuagacga

SEQ ID NO: 137890 - RNA, 24 nt, Artificial Sequence
  Synthetic
ccggaaacuacuguuguuagacga

SEQ ID NO: 137891 - RNA, 18 nt, Artificial Sequence
  Synthetic
  misc_feature (12)..(12): n is a, c, g, or u
guuagacgacgngaccga

SEQ ID NO: 137892 - RNA, 19 nt, Artificial Sequence
  Synthetic
  misc_feature (13)..(13): n is a, c, g, or u
uguuagacgacgngaccga

SEQ ID NO: 137893 - RNA, 20 nt, Artificial Sequence
  Synthetic
  misc_feature (14)..(14): n is a, c, g, or u
uuguuagacgacgngaccga

SEQ ID NO: 137894 - RNA, 21 nt, Artificial Sequence
  Synthetic
  misc_feature (15)..(15): n is a, c, g, or u
guuguuagacgacgngaccga

SEQ ID NO: 137895 - RNA, 22 nt, Artificial Sequence
  Synthetic
  misc_feature (16)..(16): n is a, c, g, or u
uguuguuagacgacgngaccga

SEQ ID NO: 137896 - RNA, 23 nt, Artificial Sequence
  Synthetic
  misc_feature (17)..(17): n is a, c, g, or u
cuguuguuagacgacgngaccga

SEQ ID NO: 137897 - RNA, 24 nt, Artificial Sequence
  Synthetic
  misc_feature (18)..(18): n is a, c, g, or u
acuguuguuagacgacgngaccga

SEQ ID NO: 137898 - RNA, 18 nt, Artificial Sequence
  Synthetic
  misc_feature (12)..(12): n is a, c, g, or u
cgucaaucuccncgagga

SEQ ID NO: 137899 - RNA, 19 nt, Artificial Sequence
  Synthetic
  misc_feature (13)..(13): n is a, c, g, or u
ucgucaaucuccncgagga

SEQ ID NO: 137900 - RNA, 20 nt, Artificial Sequence
  Synthetic
  misc_feature (14)..(14): n is a, c, g, or u
cucgucaaucuccncgagga

SEQ ID NO: 137901 - RNA, 21 nt, Artificial Sequence
  Synthetic
  misc_feature (15)..(15): n is a, c, g, or u
ucucgucaaucuccncgagga

SEQ ID NO: 137902 - RNA, 22 nt, Artificial Sequence
  Synthetic
  misc_feature (16)..(16): n is a, c, g, or u
aucucgucaaucuccncgagga

SEQ ID NO: 137903 - RNA, 23 nt, Artificial Sequence
  Synthetic
  misc_feature (17)..(17): n is a, c, g, or u
caucucgucaaucuccncgagga

SEQ ID NO: 137904 - RNA, 24 nt, Artificial Sequence
  Synthetic
  misc_feature (18)..(18): n is a, c, g, or u
acaucucgucaaucuccncgagga

SEQ ID NO: 137905 - RNA, 18 nt, Artificial Sequence
  Synthetic
  misc_feature (7)..(7): n is a, c, g, or u
guuuaangacugggagga

SEQ ID NO: 137906 - RNA, 19 nt, Artificial Sequence
  Synthetic
  misc_feature (8)..(8): n is a, c, g, or u
uguuuaangacugggagga

SEQ ID NO: 137907 - RNA, 20 nt, Artificial Sequence
  Synthetic
  misc_feature (9)..(9): n is a, c, g, or u
guguuuaangacugggagga

SEQ ID NO: 137908 - RNA, 21 nt, Artificial Sequence
  Synthetic
  misc_feature (10)..(10): n is a, c, g, or u
uguguuuaangacugggagga

SEQ ID NO: 137909 - RNA, 22 nt, Artificial Sequence
  Synthetic
  misc_feature (11)..(11): n is a, c, g, or u
guguguuuaangacugggagga

SEQ ID NO: 137910 - RNA, 23 nt, Artificial Sequence
  Synthetic
  misc_feature (12)..(12): n is a, c, g, or u
uguguguuuaangacugggagga

SEQ ID NO: 137911 - RNA, 24 nt, Artificial Sequence
  Synthetic
  misc_feature (13)..(13): n is a, c, g, or u
cuguguguuuaangacugggagga

SEQ ID NO: 137912 - RNA, 18 nt, Artificial Sequence
  Synthetic
  misc_feature (1)..(2): n is a, c, g, or u
nnagccaaccagguagga

SEQ ID NO: 137913 - RNA, 19 nt, Artificial Sequence
  Synthetic
  misc_feature (2)..(3): n is a, c, g, or u
annagccaaccagguagga

SEQ ID NO: 137914 - RNA, 20 nt, Artificial Sequence
  Synthetic
  misc_feature (3)..(4): n is a, c, g, or u
cannagccaaccagguagga

SEQ ID NO: 137915 - RNA, 21 nt, Artificial Sequence
  Synthetic
  misc_feature (4)..(5): n is a, c, g, or u
ccannagccaaccagguagga

SEQ ID NO: 137916 - RNA, 22 nt, Artificial Sequence
  Synthetic
  misc_feature (5)..(6): n is a, c, g, or u
gccannagccaaccagguagga

SEQ ID NO: 137917 - RNA, 23 nt, Artificial Sequence
  Synthetic
  misc_feature (6)..(7): n is a, c, g, or u
ggccannagccaaccagguagga

SEQ ID NO: 137918 - RNA, 24 nt, Artificial Sequence
  Synthetic
  misc_feature (7)..(8): n is a, c, g, or u
uggccannagccaaccagguagga

SEQ ID NO: 137919 - RNA, 18 nt, Artificial Sequence
  Synthetic
cuguacaaaaccuacgga

SEQ ID NO: 137920 - RNA, 19 nt, Artificial Sequence
  Synthetic
gcuguacaaaaccuacgga

SEQ ID NO: 137921 - RNA, 20 nt, Artificial Sequence
  Synthetic
ugcuguacaaaaccuacgga

SEQ ID NO: 137922 - RNA, 21 nt, Artificial Sequence
  Synthetic
uugcuguacaaaaccuacgga

SEQ ID NO: 137923 - RNA, 22 nt, Artificial Sequence
  Synthetic
guugcuguacaaaaccuacgga

SEQ ID NO: 137924 - RNA, 23 nt, Artificial Sequence
  Synthetic
uguugcuguacaaaaccuacgga

SEQ ID NO: 137925 - RNA, 24 nt, Artificial Sequence
  Synthetic
auguugcuguacaaaaccuacgga

SEQ ID NO: 137926 - RNA, 18 nt, Artificial Sequence
  Synthetic
uuggacccugcauucgga

SEQ ID NO: 137927 - RNA, 19 nt, Artificial Sequence
  Synthetic
guuggacccugcauucgga

SEQ ID NO: 137928 - RNA, 20 nt, Artificial Sequence
  Synthetic
aguuggacccugcauucgga

SEQ ID NO: 137929 - RNA, 21 nt, Artificial Sequence
  Synthetic
caguuggacccugcauucgga

SEQ ID NO: 137930 - RNA, 22 nt, Artificial Sequence
  Synthetic
ucaguuggacccugcauucgga

SEQ ID NO: 137931 - RNA, 23 nt, Artificial Sequence
  Synthetic
aucaguuggacccugcauucgga

SEQ ID NO: 137932 - RNA, 24 nt, Artificial Sequence
  Synthetic
caucaguuggacccugcauucgga

SEQ ID NO: 137933 - RNA, 18 nt, Artificial Sequence
  Synthetic
cgcaaaauaccuauggga

SEQ ID NO: 137934 - RNA, 19 nt, Artificial Sequence
  Synthetic
ucgcaaaauaccuauggga

SEQ ID NO: 137935 - RNA, 20 nt, Artificial Sequence
  Synthetic
uucgcaaaauaccuauggga

SEQ ID NO: 137936 - RNA, 21 nt, Artificial Sequence
  Synthetic
uuucgcaaaauaccuauggga

SEQ ID NO: 137937 - RNA, 22 nt, Artificial Sequence
  Synthetic
cuuucgcaaaauaccuauggga

SEQ ID NO: 137938 - RNA, 23 nt, Artificial Sequence
  Synthetic
gcuuucgcaaaauaccuauggga

SEQ ID NO: 137939 - RNA, 24 nt, Artificial Sequence
  Synthetic
ggcuuucgcaaaauaccuauggga

SEQ ID NO: 137940 - RNA, 18 nt, Artificial Sequence
  Synthetic
gucaccauauucuuggga

SEQ ID NO: 137941 - RNA, 19 nt, Artificial Sequence
  Synthetic
ggucaccauauucuuggga

SEQ ID NO: 137942 - RNA, 20 nt, Artificial Sequence
  Synthetic
gggucaccauauucuuggga

SEQ ID NO: 137943 - RNA, 21 nt, Artificial Sequence
  Synthetic
cgggucaccauauucuuggga

SEQ ID NO: 137944 - RNA, 22 nt, Artificial Sequence
  Synthetic
gcgggucaccauauucuuggga

SEQ ID NO: 137945 - RNA, 23 nt, Artificial Sequence
  Synthetic
ugcgggucaccauauucuuggga

SEQ ID NO: 137946 - RNA, 24 nt, Artificial Sequence
  Synthetic
uugcgggucaccauauucuuggga

SEQ ID NO: 137947 - RNA, 18 nt, Artificial Sequence
  Synthetic
gcucgcagccggucugga

SEQ ID NO: 137948 - RNA, 19 nt, Artificial Sequence
  Synthetic
ugcucgcagccggucugga

SEQ ID NO: 137949 - RNA, 20 nt, Artificial Sequence
  Synthetic
uugcucgcagccggucugga

SEQ ID NO: 137950 - RNA, 21 nt, Artificial Sequence
  Synthetic
uuugcucgcagccggucugga

SEQ ID NO: 137951 - RNA, 22 nt, Artificial Sequence
  Synthetic
uuuugcucgcagccggucugga

SEQ ID NO: 137952 - RNA, 23 nt, Artificial Sequence
  Synthetic
guuuugcucgcagccggucugga

SEQ ID NO: 137953 - RNA, 24 nt, Artificial Sequence
  Synthetic
uguuuugcucgcagccggucugga

SEQ ID NO: 137954 - RNA, 18 nt, Artificial Sequence
  Synthetic
ucuugccuuacuuuugga

SEQ ID NO: 137955 - RNA, 19 nt, Artificial Sequence
  Synthetic
  misc_feature (1)..(1): n is a, c, g, or u
nucuugccuuacuuuugga

SEQ ID NO: 137956 - RNA, 20 nt, Artificial Sequence
  Synthetic
  misc_feature (2)..(2): n is a, c, g, or u
unucuugccuuacuuuugga

SEQ ID NO: 137957 - RNA, 21 nt, Artificial Sequence
  Synthetic
  misc_feature (3)..(3): n is a, c, g, or u
aunucuugccuuacuuuugga

SEQ ID NO: 137958 - RNA, 22 nt, Artificial Sequence
  Synthetic
  misc_feature (4)..(4): n is a, c, g, or u
uaunucuugccuuacuuuugga

SEQ ID NO: 137959 - RNA, 23 nt, Artificial Sequence
  Synthetic
  misc_feature (5)..(5): n is a, c, g, or u
auaunucuugccuuacuuuugga

SEQ ID NO: 137960 - RNA, 24 nt, Artificial Sequence
  Synthetic
  misc_feature (6)..(6): n is a, c, g, or u
cauaunucuugccuuacuuuugga

SEQ ID NO: 137961 - RNA, 18 nt, Artificial Sequence
  Synthetic
  misc_feature (16)..(16): n is a, c, g, or u
agacuguguguuuaanga

SEQ ID NO: 137962 - RNA, 19 nt, Artificial Sequence
  Synthetic
  misc_feature (17)..(17): n is a, c, g, or u
aagacuguguguuuaanga

SEQ ID NO: 137963 - RNA, 20 nt, Artificial Sequence
  Synthetic
  misc_feature (18)..(18): n is a, c, g, or u
aaagacuguguguuuaanga

SEQ ID NO: 137964 - RNA, 21 nt, Artificial Sequence
  Synthetic
  misc_feature (19)..(19): n is a, c, g, or u
caaagacuguguguuuaanga

SEQ ID NO: 137965 - RNA, 22 nt, Artificial Sequence
  Synthetic
  misc_feature (20)..(20): n is a, c, g, or u
ucaaagacuguguguuuaanga

SEQ ID NO: 137966 - RNA, 23 nt, Artificial Sequence
  Synthetic
  misc_feature (21)..(21): n is a, c, g, or u
uucaaagacuguguguuuaanga

SEQ ID NO: 137967 - RNA, 24 nt, Artificial Sequence
  Synthetic
  misc_feature (22)..(22): n is a, c, g, or u
cuucaaagacuguguguuuaanga

SEQ ID NO: 137968 - RNA, 18 nt, Artificial Sequence
  Synthetic
  misc_feature (16)..(16): n is a, c, g, or u
uguuguuagacgacgnga

SEQ ID NO: 137969 - RNA, 19 nt, Artificial Sequence
  Synthetic
  misc_feature (17)..(17): n is a, c, g, or u
cuguuguuagacgacgnga

SEQ ID NO: 137970 - RNA, 20 nt, Artificial Sequence
  Synthetic
  misc_feature (18)..(18): n is a, c, g, or u
acuguuguuagacgacgnga

SEQ ID NO: 137971 - RNA, 21 nt, Artificial Sequence
  Synthetic
  misc_feature (19)..(19): n is a, c, g, or u
uacuguuguuagacgacgnga

SEQ ID NO: 137972 - RNA, 22 nt, Artificial Sequence
  Synthetic
  misc_feature (20)..(20): n is a, c, g, or u
cuacuguuguuagacgacgnga

SEQ ID NO: 137973 - RNA, 23 nt, Artificial Sequence
  Synthetic
  misc_feature (21)..(21): n is a, c, g, or u
acuacuguuguuagacgacgnga

SEQ ID NO: 137974 - RNA, 24 nt, Artificial Sequence
  Synthetic
  misc_feature (22)..(22): n is a, c, g, or u
aacuacuguuguuagacgacgnga

SEQ ID NO: 137975 - RNA, 18 nt, Artificial Sequence
  Synthetic
gugccaaguguuugcuga

SEQ ID NO: 137976 - RNA, 19 nt, Artificial Sequence
  Synthetic
ugugccaaguguuugcuga

SEQ ID NO: 137977 - RNA, 20 nt, Artificial Sequence
  Synthetic
cugugccaaguguuugcuga

SEQ ID NO: 137978 - RNA, 21 nt, Artificial Sequence
  Synthetic
ucugugccaaguguuugcuga

SEQ ID NO: 137979 - RNA, 22 nt, Artificial Sequence
  Synthetic
gucugugccaaguguuugcuga

SEQ ID NO: 137980 - RNA, 23 nt, Artificial Sequence
  Synthetic
ggucugugccaaguguuugcuga

SEQ ID NO: 137981 - RNA, 24 nt, Artificial Sequence
  Synthetic
uggucugugccaaguguuugcuga

SEQ ID NO: 137982 - RNA, 18 nt, Artificial Sequence
  Synthetic
  misc_feature (4)..(4): n is a, c, g, or u
  misc_feature (7)..(8): n is a, c, g, or u
  misc_feature (10)..(10): n is a, c, g, or u
ugunaanngnccuauuga

SEQ ID NO: 137983 - RNA, 19 nt, Artificial Sequence
  Synthetic
  misc_feature (5)..(5): n is a, c, g, or u
  misc_feature (8)..(9): n is a, c, g, or u
  misc_feature (11)..(11): n is a, c, g, or u
cugunaanngnccuauuga

SEQ ID NO: 137984 - RNA, 20 nt, Artificial Sequence
  Synthetic
  misc_feature (6)..(6): n is a, c, g, or u
  misc_feature (9)..(10): n is a, c, g, or u
  misc_feature (12)..(12): n is a, c, g, or u
ccugunaanngnccuauuga

SEQ ID NO: 137985 - RNA, 21 nt, Artificial Sequence
  Synthetic
  misc_feature (7)..(7): n is a, c, g, or u
  misc_feature (10)..(11): n is a, c, g, or u
  misc_feature (13)..(13): n is a, c, g, or u
uccugunaanngnccuauuga

SEQ ID NO: 137986 - RNA, 22 nt, Artificial Sequence
  Synthetic
  misc_feature (8)..(8): n is a, c, g, or u
  misc_feature (11)..(12): n is a, c, g, or u
  misc_feature (14)..(14): n is a, c, g, or u
uuccugunaanngnccuauuga

SEQ ID NO: 137987 - RNA, 23 nt, Artificial Sequence
  Synthetic
  misc_feature (9)..(9): n is a, c, g, or u
  misc_feature (12)..(13): n is a, c, g, or u
  misc_feature (15)..(15): n is a, c, g, or u
cuuccugunaanngnccuauuga

SEQ ID NO: 137988 - RNA, 24 nt, Artificial Sequence
  Synthetic
  misc_feature (10)..(10): n is a, c, g, or u
  misc_feature (13)..(14): n is a, c, g, or u
  misc_feature (16)..(16): n is a, c, g, or u
acuuccugunaanngnccuauuga

SEQ ID NO: 137989 - RNA, 18 nt, Artificial Sequence
  Synthetic
cgggguuuuucuuguuga

SEQ ID NO: 137990 - RNA, 19 nt, Artificial Sequence
  Synthetic
gcgggguuuuucuuguuga

SEQ ID NO: 137991 - RNA, 20 nt, Artificial Sequence
  Synthetic
ggcgggguuuuucuuguuga

SEQ ID NO: 137992 - RNA, 21 nt, Artificial Sequence
  Synthetic
aggcgggguuuuucuuguuga

SEQ ID NO: 137993 - RNA, 22 nt, Artificial Sequence
  Synthetic
caggcgggguuuuucuuguuga

SEQ ID NO: 137994 - RNA, 23 nt, Artificial Sequence
  Synthetic
acaggcgggguuuuucuuguuga

SEQ ID NO: 137995 - RNA, 24 nt, Artificial Sequence
  Synthetic
uacaggcgggguuuuucuuguuga

SEQ ID NO: 137996 - RNA, 18 nt, Artificial Sequence
  Synthetic
  misc_feature (17)..(17): n is a, c, g, or u
aucauauuguacaaaana

SEQ ID NO: 137997 - RNA, 19 nt, Artificial Sequence
  Synthetic
  misc_feature (18)..(18): n is a, c, g, or u
gaucauauuguacaaaana

SEQ ID NO: 137998 - RNA, 20 nt, Artificial Sequence
  Synthetic
  misc_feature (1)..(1): n is a, c, g, or u
  misc_feature (19)..(19): n is a, c, g, or u
ngaucauauuguacaaaana

SEQ ID NO: 137999 - RNA, 21 nt, Artificial Sequence
  Synthetic
  misc_feature (2)..(2): n is a, c, g, or u
  misc_feature (20)..(20): n is a, c, g, or u
angaucauauuguacaaaana

SEQ ID NO: 138000 - RNA, 22 nt, Artificial Sequence
  Synthetic
  misc_feature (3)..(3): n is a, c, g, or u
  misc_feature (21)..(21): n is a, c, g, or u
cangaucauauuguacaaaana

SEQ ID NO: 138001 - RNA, 23 nt, Artificial Sequence
  Synthetic
  misc_feature (4)..(4): n is a, c, g, or u
  misc_feature (22)..(22): n is a, c, g, or u
acangaucauauuguacaaaana

SEQ ID NO: 138002 - RNA, 24 nt, Artificial Sequence
  Synthetic
  misc_feature (5)..(5): n is a, c, g, or u
  misc_feature (23)..(23): n is a, c, g, or u
cacangaucauauuguacaaaana

SEQ ID NO: 138003 - RNA, 18 nt, Artificial Sequence
  Synthetic
  misc_feature (17)..(17): n is a, c, g, or u
acccuaacaaaacaaana

SEQ ID NO: 138004 - RNA, 19 nt, Artificial Sequence
  Synthetic
  misc_feature (18)..(18): n is a, c, g, or u
aacccuaacaaaacaaana

SEQ ID NO: 138005 - RNA, 20 nt, Artificial Sequence
  Synthetic
  misc_feature (19)..(19): n is a, c, g, or u
aaacccuaacaaaacaaana

SEQ ID NO: 138006 - RNA, 21 nt, Artificial Sequence
  Synthetic
  misc_feature (20)..(20): n is a, c, g, or u
uaaacccuaacaaaacaaana

SEQ ID NO: 138007 - RNA, 22 nt, Artificial Sequence
  Synthetic
  misc_feature (21)..(21): n is a, c, g, or u
uuaaacccuaacaaaacaaana

SEQ ID NO: 138008 - RNA, 23 nt, Artificial Sequence
  Synthetic
  misc_feature (22)..(22): n is a, c, g, or u
uuuaaacccuaacaaaacaaana

SEQ ID NO: 138009 - RNA, 24 nt, Artificial Sequence
  Synthetic
  misc_feature (23)..(23): n is a, c, g, or u
auuuaaacccuaacaaaacaaana

SEQ ID NO: 138010 - RNA, 18 nt, Artificial Sequence
  Synthetic
  misc_feature (11)..(12): n is a, c, g, or u
  misc_feature (17)..(17): n is a, c, g, or u
cuaacaugggnnuaaana

SEQ ID NO: 138011 - RNA, 19 nt, Artificial Sequence
  Synthetic
  misc_feature (12)..(13): n is a, c, g, or u
  misc_feature (18)..(18): n is a, c, g, or u
acuaacaugggnnuaaana

SEQ ID NO: 138012 - RNA, 20 nt, Artificial Sequence
  Synthetic
  misc_feature (13)..(14): n is a, c, g, or u
  misc_feature (19)..(19): n is a, c, g, or u
uacuaacaugggnnuaaana

SEQ ID NO: 138013 - RNA, 21 nt, Artificial Sequence
  Synthetic
  misc_feature (14)..(15): n is a, c, g, or u
  misc_feature (20)..(20): n is a, c, g, or u
auacuaacaugggnnuaaana

SEQ ID NO: 138014 - RNA, 22 nt, Artificial Sequence
  Synthetic
  misc_feature (15)..(16): n is a, c, g, or u
  misc_feature (21)..(21): n is a, c, g, or u
aauacuaacaugggnnuaaana

SEQ ID NO: 138015 - RNA, 23 nt, Artificial Sequence
  Synthetic
  misc_feature (16)..(17): n is a, c, g, or u
  misc_feature (22)..(22): n is a, c, g, or u
uaauacuaacaugggnnuaaana

SEQ ID NO: 138016 - RNA, 24 nt, Artificial Sequence
  Synthetic
  misc_feature (17)..(18): n is a, c, g, or u
  misc_feature (23)..(23): n is a, c, g, or u
uuaauacuaacaugggnnuaaana

SEQ ID NO: 138017 - RNA, 18 nt, Artificial Sequence
  Synthetic
  misc_feature (14)..(14): n is a, c, g, or u
  misc_feature (17)..(17): n is a, c, g, or u
uuaaucauuacuuncana

SEQ ID NO: 138018 - RNA, 19 nt, Artificial Sequence
  Synthetic
  misc_feature (15)..(15): n is a, c, g, or u
  misc_feature (18)..(18): n is a, c, g, or u
guuaaucauuacuuncana

SEQ ID NO: 138019 - RNA, 20 nt, Artificial Sequence
  Synthetic
  misc_feature (16)..(16): n is a, c, g, or u
  misc_feature (19)..(19): n is a, c, g, or u
aguuaaucauuacuuncana

SEQ ID NO: 138020 - RNA, 21 nt, Artificial Sequence
  Synthetic
  misc_feature (17)..(17): n is a, c, g, or u
  misc_feature (20)..(20): n is a, c, g, or u
uaguuaaucauuacuuncana

SEQ ID NO: 138021 - RNA, 22 nt, Artificial Sequence
  Synthetic
  misc_feature (18)..(18): n is a, c, g, or u
  misc_feature (21)..(21): n is a, c, g, or u
guaguuaaucauuacuuncana

SEQ ID NO: 138022 - RNA, 23 nt, Artificial Sequence
  Synthetic
  misc_feature (1)..(1): n is a, c, g, or u
  misc_feature (19)..(19): n is a, c, g, or u
  misc_feature (22)..(22): n is a, c, g, or u
nguaguuaaucauuacuuncana

SEQ ID NO: 138023 - RNA, 24 nt, Artificial Sequence
  Synthetic
  misc_feature (2)..(2): n is a, c, g, or u
  misc_feature (20)..(20): n is a, c, g, or u
  misc_feature (23)..(23): n is a, c, g, or u
anguaguuaaucauuacuuncana

SEQ ID NO: 138024 - RNA, 18 nt, Artificial Sequence
  Synthetic
  misc_feature (17)..(17): n is a, c, g, or u
augcauguauacaagcna

SEQ ID NO: 138025 - RNA, 19 nt, Artificial Sequence
  Synthetic
  misc_feature (18)..(18): n is a, c, g, or u
uaugcauguauacaagcna

SEQ ID NO: 138026 - RNA, 20 nt, Artificial Sequence
  Synthetic
  misc_feature (19)..(19): n is a, c, g, or u
guaugcauguauacaagcna

SEQ ID NO: 138027 - RNA, 21 nt, Artificial Sequence
  Synthetic
  misc_feature (20)..(20): n is a, c, g, or u
uguaugcauguauacaagcna

SEQ ID NO: 138028 - RNA, 22 nt, Artificial Sequence
  Synthetic
  misc_feature (21)..(21): n is a, c, g, or u
uuguaugcauguauacaagcna

SEQ ID NO: 138029 - RNA, 23 nt, Artificial Sequence
  Synthetic
  misc_feature (22)..(22): n is a, c, g, or u
uuuguaugcauguauacaagcna

SEQ ID NO: 138030 - RNA, 24 nt, Artificial Sequence
  Synthetic
  misc_feature (23)..(23): n is a, c, g, or u
cuuuguaugcauguauacaagcna

SEQ ID NO: 138031 - RNA, 18 nt, Artificial Sequence
  Synthetic
  misc_feature (2)..(2): n is a, c, g, or u
  misc_feature (5)..(6): n is a, c, g, or u
  misc_feature (17)..(17): n is a, c, g, or u
unccnnuagacaaaggna

SEQ ID NO: 138032 - RNA, 19 nt, Artificial Sequence
  Synthetic
  misc_feature (3)..(3): n is a, c, g, or u
  misc_feature (6)..(7): n is a, c, g, or u
  misc_feature (18)..(18): n is a, c, g, or u
uunccnnuagacaaaggna

SEQ ID NO: 138033 - RNA, 20 nt, Artificial Sequence
  Synthetic
  misc_feature (4)..(4): n is a, c, g, or u
  misc_feature (7)..(8): n is a, c, g, or u
  misc_feature (19)..(19): n is a, c, g, or u
uuunccnnuagacaaaggna

SEQ ID NO: 138034 - RNA, 21 nt, Artificial Sequence
  Synthetic
  misc_feature (5)..(5): n is a, c, g, or u
  misc_feature (8)..(9): n is a, c, g, or u
  misc_feature (20)..(20): n is a, c, g, or u
auuunccnnuagacaaaggna

SEQ ID NO: 138035 - RNA, 22 nt, Artificial Sequence
  Synthetic
  misc_feature (6)..(6): n is a, c, g, or u
  misc_feature (9)..(10): n is a, c, g, or u
  misc_feature (21)..(21): n is a, c, g, or u
uauuunccnnuagacaaaggna

SEQ ID NO: 138036 - RNA, 23 nt, Artificial Sequence
  Synthetic
  misc_feature (7)..(7): n is a, c, g, or u
  misc_feature (10)..(11): n is a, c, g, or u
  misc_feature (22)..(22): n is a, c, g, or u
auauuunccnnuagacaaaggna

SEQ ID NO: 138037 - RNA, 24 nt, Artificial Sequence
  Synthetic
  misc_feature (8)..(8): n is a, c, g, or u
  misc_feature (11)..(12): n is a, c, g, or u
  misc_feature (23)..(23): n is a, c, g, or u
aauauuunccnnuagacaaaggna

SEQ ID NO: 138038 - RNA, 18 nt, Artificial Sequence
  Synthetic
  misc_feature (16)..(17): n is a, c, g, or u
aaggaccacuggccanna

SEQ ID NO: 138039 - RNA, 19 nt, Artificial Sequence
  Synthetic
  misc_feature (17)..(18): n is a, c, g, or u
caaggaccacuggccanna

SEQ ID NO: 138040 - RNA, 20 nt, Artificial Sequence
  Synthetic
  misc_feature (18)..(19): n is a, c, g, or u
ucaaggaccacuggccanna

SEQ ID NO: 138041 - RNA, 21 nt, Artificial Sequence
  Synthetic
  misc_feature (19)..(20): n is a, c, g, or u
aucaaggaccacuggccanna

SEQ ID NO: 138042 - RNA, 22 nt, Artificial Sequence
  Synthetic
  misc_feature (20)..(21): n is a, c, g, or u
caucaaggaccacuggccanna

SEQ ID NO: 138043 - RNA, 23 nt, Artificial Sequence
  Synthetic
  misc_feature (21)..(22): n is a, c, g, or u
ccaucaaggaccacuggccanna

SEQ ID NO: 138044 - RNA, 24 nt, Artificial Sequence
  Synthetic
  misc_feature (22)..(23): n is a, c, g, or u
cccaucaaggaccacuggccanna

SEQ ID NO: 138045 - RNA, 18 nt, Artificial Sequence
  Synthetic
  misc_feature (8)..(9): n is a, c, g, or u
  misc_feature (14)..(14): n is a, c, g, or u
  misc_feature (17)..(17): n is a, c, g, or u
acaugggnnuaaanauna

SEQ ID NO: 138046 - RNA, 19 nt, Artificial Sequence
  Synthetic
  misc_feature (9)..(10): n is a, c, g, or u
  misc_feature (15)..(15): n is a, c, g, or u
  misc_feature (18)..(18): n is a, c, g, or u
aacaugggnnuaaanauna

SEQ ID NO: 138047 - RNA, 20 nt, Artificial Sequence
  Synthetic
  misc_feature (10)..(11): n is a, c, g, or u
  misc_feature (16)..(16): n is a, c, g, or u
  misc_feature (19)..(19): n is a, c, g, or u
uaacaugggnnuaaanauna

SEQ ID NO: 138048 - RNA, 21 nt, Artificial Sequence
  Synthetic
  misc_feature (11)..(12): n is a, c, g, or u
  misc_feature (17)..(17): n is a, c, g, or u
  misc_feature (20)..(20): n is a, c, g, or u
cuaacaugggnnuaaanauna

SEQ ID NO: 138049 - RNA, 22 nt, Artificial Sequence
  Synthetic
  misc_feature (12)..(13): n is a, c, g, or u
  misc_feature (18)..(18): n is a, c, g, or u
  misc_feature (21)..(21): n is a, c, g, or u
acuaacaugggnnuaaanauna

SEQ ID NO: 138050 - RNA, 23 nt, Artificial Sequence
  Synthetic
  misc_feature (13)..(14): n is a, c, g, or u
  misc_feature (19)..(19): n is a, c, g, or u
  misc_feature (22)..(22): n is a, c, g, or u
uacuaacaugggnnuaaanauna

SEQ ID NO: 138051 - RNA, 24 nt, Artificial Sequence
  Synthetic
  misc_feature (14)..(15): n is a, c, g, or u
  misc_feature (20)..(20): n is a, c, g, or u
  misc_feature (23)..(23): n is a, c, g, or u
auacuaacaugggnnuaaanauna

SEQ ID NO: 138052 - RNA, 18 nt, Artificial Sequence
  Synthetic
  misc_feature (14)..(14): n is a, c, g, or u
  misc_feature (17)..(17): n is a, c, g, or u
auaaggugggaaanuuna

SEQ ID NO: 138053 - RNA, 19 nt, Artificial Sequence
  Synthetic
  misc_feature (15)..(15): n is a, c, g, or u
  misc_feature (18)..(18): n is a, c, g, or u
cauaaggugggaaanuuna

SEQ ID NO: 138054 - RNA, 20 nt, Artificial Sequence
  Synthetic
  misc_feature (16)..(16): n is a, c, g, or u
  misc_feature (19)..(19): n is a, c, g, or u
ucauaaggugggaaanuuna

SEQ ID NO: 138055 - RNA, 21 nt, Artificial Sequence
  Synthetic
  misc_feature (17)..(17): n is a, c, g, or u
  misc_feature (20)..(20): n is a, c, g, or u
cucauaaggugggaaanuuna

SEQ ID NO: 138056 - RNA, 22 nt, Artificial Sequence
  Synthetic
  misc_feature (18)..(18): n is a, c, g, or u
  misc_feature (21)..(21): n is a, c, g, or u
acucauaaggugggaaanuuna

SEQ ID NO: 138057 - RNA, 23 nt, Artificial Sequence
  Synthetic
  misc_feature (19)..(19): n is a, c, g, or u
  misc_feature (22)..(22): n is a, c, g, or u
gacucauaaggugggaaanuuna

SEQ ID NO: 138058 - RNA, 24 nt, Artificial Sequence
  Synthetic
  misc_feature (20)..(20): n is a, c, g, or u
  misc_feature (23)..(23): n is a, c, g, or u
ggacucauaaggugggaaanuuna

SEQ ID NO: 138059 - RNA, 18 nt, Artificial Sequence
  Synthetic
ugcccaaggucuuacaua

SEQ ID NO: 138060 - RNA, 19 nt, Artificial Sequence
  Synthetic
cugcccaaggucuuacaua

SEQ ID NO: 138061 - RNA, 20 nt, Artificial Sequence
  Synthetic
ccugcccaaggucuuacaua

SEQ ID NO: 138062 - RNA, 21 nt, Artificial Sequence
  Synthetic
uccugcccaaggucuuacaua

SEQ ID NO: 138063 - RNA, 22 nt, Artificial Sequence
  Synthetic
auccugcccaaggucuuacaua

SEQ ID NO: 138064 - RNA, 23 nt, Artificial Sequence
  Synthetic
gauccugcccaaggucuuacaua

SEQ ID NO: 138065 - RNA, 24 nt, Artificial Sequence
  Synthetic
agauccugcccaaggucuuacaua

SEQ ID NO: 138066 - RNA, 18 nt, Artificial Sequence
  Synthetic
  misc_feature (8)..(8): n is a, c, g, or u
aggcuggnauucuauaua

SEQ ID NO: 138067 - RNA, 19 nt, Artificial Sequence
  Synthetic
  misc_feature (9)..(9): n is a, c, g, or u
aaggcuggnauucuauaua

SEQ ID NO: 138068 - RNA, 20 nt, Artificial Sequence
  Synthetic
  misc_feature (10)..(10): n is a, c, g, or u
gaaggcuggnauucuauaua

SEQ ID NO: 138069 - RNA, 21 nt, Artificial Sequence
  Synthetic
  misc_feature (11)..(11): n is a, c, g, or u
ggaaggcuggnauucuauaua

SEQ ID NO: 138070 - RNA, 22 nt, Artificial Sequence
  Synthetic
  misc_feature (12)..(12): n is a, c, g, or u
uggaaggcuggnauucuauaua

SEQ ID NO: 138071 - RNA, 23 nt, Artificial Sequence
  Synthetic
  misc_feature (13)..(13): n is a, c, g, or u
uuggaaggcuggnauucuauaua

SEQ ID NO: 138072 - RNA, 24 nt, Artificial Sequence
  Synthetic
  misc_feature (14)..(14): n is a, c, g, or u
uuuggaaggcuggnauucuauaua

SEQ ID NO: 138073 - RNA, 18 nt, Artificial Sequence
  Synthetic
  misc_feature (10)..(10): n is a, c, g, or u
gaaggcuggnauucuaua

SEQ ID NO: 138074 - RNA, 19 nt, Artificial Sequence
  Synthetic
  misc_feature (11)..(11): n is a, c, g, or u
ggaaggcuggnauucuaua

SEQ ID NO: 138075 - RNA, 20 nt, Artificial Sequence
  Synthetic
  misc_feature (12)..(12): n is a, c, g, or u
uggaaggcuggnauucuaua

SEQ ID NO: 138076 - RNA, 21 nt, Artificial Sequence
  Synthetic
  misc_feature (13)..(13): n is a, c, g, or u
uuggaaggcuggnauucuaua

SEQ ID NO: 138077 - RNA, 22 nt, Artificial Sequence
  Synthetic
  misc_feature (14)..(14): n is a, c, g, or u
uuuggaaggcuggnauucuaua

SEQ ID NO: 138078 - RNA, 23 nt, Artificial Sequence
  Synthetic
  misc_feature (15)..(15): n is a, c, g, or u
cuuuggaaggcuggnauucuaua

SEQ ID NO: 138079 - RNA, 24 nt, Artificial Sequence
  Synthetic
  misc_feature (16)..(16): n is a, c, g, or u
ucuuuggaaggcuggnauucuaua

SEQ ID NO: 138080 - RNA, 18 nt, Artificial Sequence
  Synthetic
gcuuucgcaaaauaccua

SEQ ID NO: 138081 - RNA, 19 nt, Artificial Sequence
  Synthetic
ggcuuucgcaaaauaccua

SEQ ID NO: 138082 - RNA, 20 nt, Artificial Sequence
  Synthetic
gggcuuucgcaaaauaccua

SEQ ID NO: 138083 - RNA, 21 nt, Artificial Sequence
  Synthetic
ugggcuuucgcaaaauaccua

SEQ ID NO: 138084 - RNA, 22 nt, Artificial Sequence
  Synthetic
  misc_feature (1)..(1): n is a, c, g, or u
nugggcuuucgcaaaauaccua

SEQ ID NO: 138085 - RNA, 23 nt, Artificial Sequence
  Synthetic
  misc_feature (2)..(2): n is a, c, g, or u
cnugggcuuucgcaaaauaccua

SEQ ID NO: 138086 - RNA, 24 nt, Artificial Sequence
  Synthetic
  misc_feature (3)..(3): n is a, c, g, or u
ucnugggcuuucgcaaaauaccua

SEQ ID NO: 138087 - RNA, 18 nt, Artificial Sequence
  Synthetic
guauacauuuaaacccua

SEQ ID NO: 138088 - RNA, 19 nt, Artificial Sequence
  Synthetic
gguauacauuuaaacccua

SEQ ID NO: 138089 - RNA, 20 nt, Artificial Sequence
  Synthetic
ggguauacauuuaaacccua

SEQ ID NO: 138090 - RNA, 21 nt, Artificial Sequence
  Synthetic
uggguauacauuuaaacccua

SEQ ID NO: 138091 - RNA, 22 nt, Artificial Sequence
  Synthetic
  misc_feature (1)..(1): n is a, c, g, or u
nuggguauacauuuaaacccua

SEQ ID NO: 138092 - RNA, 23 nt, Artificial Sequence
  Synthetic
  misc_feature (2)..(2): n is a, c, g, or u
unuggguauacauuuaaacccua

SEQ ID NO: 138093 - RNA, 24 nt, Artificial Sequence
  Synthetic
  misc_feature (3)..(3): n is a, c, g, or u
cunuggguauacauuuaaacccua

SEQ ID NO: 138094 - RNA, 18 nt, Artificial Sequence
  Synthetic
accgaggcagguccccua

SEQ ID NO: 138095 - RNA, 19 nt, Artificial Sequence
  Synthetic
gaccgaggcagguccccua

SEQ ID NO: 138096 - RNA, 20 nt, Artificial Sequence
  Synthetic
  misc_feature (1)..(1): n is a, c, g, or u
ngaccgaggcagguccccua

SEQ ID NO: 138097 - RNA, 21 nt, Artificial Sequence
  Synthetic
  misc_feature (2)..(2): n is a, c, g, or u
gngaccgaggcagguccccua

SEQ ID NO: 138098 - RNA, 22 nt, Artificial Sequence
  Synthetic
  misc_feature (3)..(3): n is a, c, g, or u
cgngaccgaggcagguccccua

SEQ ID NO: 138099 - RNA, 23 nt, Artificial Sequence
  Synthetic
  misc_feature (4)..(4): n is a, c, g, or u
acgngaccgaggcagguccccua

SEQ ID NO: 138100 - RNA, 24 nt, Artificial Sequence
  Synthetic
  misc_feature (5)..(5): n is a, c, g, or u
gacgngaccgaggcagguccccua

SEQ ID NO: 138101 - RNA, 18 nt, Artificial Sequence
  Synthetic
  misc_feature (5)..(5): n is a, c, g, or u
aauunaugacucuagcua

SEQ ID NO: 138102 - RNA, 19 nt, Artificial Sequence
  Synthetic
  misc_feature (6)..(6): n is a, c, g, or u
gaauunaugacucuagcua

SEQ ID NO: 138103 - RNA, 20 nt, Artificial Sequence
  Synthetic
  misc_feature (7)..(7): n is a, c, g, or u
ggaauunaugacucuagcua

SEQ ID NO: 138104 - RNA, 21 nt, Artificial Sequence
  Synthetic
  misc_feature (8)..(8): n is a, c, g, or u
gggaauunaugacucuagcua

SEQ ID NO: 138105 - RNA, 22 nt, Artificial Sequence
  Synthetic
  misc_feature (9)..(9): n is a, c, g, or u
ggggaauunaugacucuagcua

SEQ ID NO: 138106 - RNA, 23 nt, Artificial Sequence
  Synthetic
  misc_feature (10)..(10): n is a, c, g, or u
gggggaauunaugacucuagcua

SEQ ID NO: 138107 - RNA, 24 nt, Artificial Sequence
  Synthetic
  misc_feature (11)..(11): n is a, c, g, or u
ggggggaauunaugacucuagcua

SEQ ID NO: 138108 - RNA, 18 nt, Artificial Sequence
  Synthetic
cccaucucuccaccucua

SEQ ID NO: 138109 - RNA, 19 nt, Artificial Sequence
  Synthetic
ucccaucucuccaccucua

SEQ ID NO: 138110 - RNA, 20 nt, Artificial Sequence
  Synthetic
cucccaucucuccaccucua

SEQ ID NO: 138111 - RNA, 21 nt, Artificial Sequence
  Synthetic
acucccaucucuccaccucua

SEQ ID NO: 138112 - RNA, 22 nt, Artificial Sequence
  Synthetic
uacucccaucucuccaccucua

SEQ ID NO: 138113 - RNA, 23 nt, Artificial Sequence
  Synthetic
cuacucccaucucuccaccucua

SEQ ID NO: 138114 - RNA, 24 nt, Artificial Sequence
  Synthetic
ccuacucccaucucuccaccucua

SEQ ID NO: 138115 - RNA, 18 nt, Artificial Sequence
  Synthetic
  misc_feature (12)..(12): n is a, c, g, or u
uggaaggcuggnauucua

SEQ ID NO: 138116 - RNA, 19 nt, Artificial Sequence
  Synthetic
  misc_feature (13)..(13): n is a, c, g, or u
uuggaaggcuggnauucua

SEQ ID NO: 138117 - RNA, 20 nt, Artificial Sequence
  Synthetic
  misc_feature (14)..(14): n is a, c, g, or u
uuuggaaggcuggnauucua

SEQ ID NO: 138118 - RNA, 21 nt, Artificial Sequence
  Synthetic
  misc_feature (15)..(15): n is a, c, g, or u
cuuuggaaggcuggnauucua

SEQ ID NO: 138119 - RNA, 22 nt, Artificial Sequence
  Synthetic
  misc_feature (16)..(16): n is a, c, g, or u
ucuuuggaaggcuggnauucua

SEQ ID NO: 138120 - RNA, 23 nt, Artificial Sequence
  Synthetic
  misc_feature (17)..(17): n is a, c, g, or u
cucuuuggaaggcuggnauucua

SEQ ID NO: 138121 - RNA, 24 nt, Artificial Sequence
  Synthetic
  misc_feature (18)..(18): n is a, c, g, or u
acucuuuggaaggcuggnauucua

SEQ ID NO: 138122 - RNA, 18 nt, Artificial Sequence
  Synthetic
acuuacaaggccuuucua

SEQ ID NO: 138123 - RNA, 19 nt, Artificial Sequence
  Synthetic
aacuuacaaggccuuucua

SEQ ID NO: 138124 - RNA, 20 nt, Artificial Sequence
  Synthetic
caacuuacaaggccuuucua

SEQ ID NO: 138125 - RNA, 21 nt, Artificial Sequence
  Synthetic
ccaacuuacaaggccuuucua

SEQ ID NO: 138126 - RNA, 22 nt, Artificial Sequence
  Synthetic
gccaacuuacaaggccuuucua

SEQ ID NO: 138127 - RNA, 23 nt, Artificial Sequence
  Synthetic
cgccaacuuacaaggccuuucua

SEQ ID NO: 138128 - RNA, 24 nt, Artificial Sequence
  Synthetic
ucgccaacuuacaaggccuuucua

SEQ ID NO: 138129 - RNA, 18 nt, Artificial Sequence
  Synthetic
acuucucucaauuuucua

SEQ ID NO: 138130 - RNA, 19 nt, Artificial Sequence
  Synthetic
gacuucucucaauuuucua

SEQ ID NO: 138131 - RNA, 20 nt, Artificial Sequence
  Synthetic
ggacuucucucaauuuucua

SEQ ID NO: 138132 - RNA, 21 nt, Artificial Sequence
  Synthetic
uggacuucucucaauuuucua

SEQ ID NO: 138133 - RNA, 22 nt, Artificial Sequence
  Synthetic
guggacuucucucaauuuucua

SEQ ID NO: 138134 - RNA, 23 nt, Artificial Sequence
  Synthetic
gguggacuucucucaauuuucua

SEQ ID NO: 138135 - RNA, 24 nt, Artificial Sequence
  Synthetic
ugguggacuucucucaauuuucua

SEQ ID NO: 138136 - RNA, 18 nt, Artificial Sequence
  Synthetic
cuuucuaaguaaacagua

SEQ ID NO: 138137 - RNA, 19 nt, Artificial Sequence
  Synthetic
ccuuucuaaguaaacagua

SEQ ID NO: 138138 - RNA, 20 nt, Artificial Sequence
  Synthetic
gccuuucuaaguaaacagua

SEQ ID NO: 138139 - RNA, 21 nt, Artificial Sequence
  Synthetic
ggccuuucuaaguaaacagua

SEQ ID NO: 138140 - RNA, 22 nt, Artificial Sequence
  Synthetic
aggccuuucuaaguaaacagua

SEQ ID NO: 138141 - RNA, 23 nt, Artificial Sequence
  Synthetic
aaggccuuucuaaguaaacagua

SEQ ID NO: 138142 - RNA, 24 nt, Artificial Sequence
  Synthetic
caaggccuuucuaaguaaacagua

SEQ ID NO: 138143 - RNA, 18 nt, Artificial Sequence
  Synthetic
  misc_feature (5)..(5): n is a, c, g, or u
gaucnacaacaaccagua

SEQ ID NO: 138144 - RNA, 19 nt, Artificial Sequence
  Synthetic
  misc_feature (6)..(6): n is a, c, g, or u
ggaucnacaacaaccagua

SEQ ID NO: 138145 - RNA, 20 nt, Artificial Sequence
  Synthetic
  misc_feature (7)..(7): n is a, c, g, or u
aggaucnacaacaaccagua

SEQ ID NO: 138146 - RNA, 21 nt, Artificial Sequence
  Synthetic
  misc_feature (8)..(8): n is a, c, g, or u
caggaucnacaacaaccagua

SEQ ID NO: 138147 - RNA, 22 nt, Artificial Sequence
  Synthetic
  misc_feature (9)..(9): n is a, c, g, or u
ccaggaucnacaacaaccagua

SEQ ID NO: 138148 - RNA, 23 nt, Artificial Sequence
  Synthetic
  misc_feature (10)..(10): n is a, c, g, or u
uccaggaucnacaacaaccagua

SEQ ID NO: 138149 - RNA, 24 nt, Artificial Sequence
  Synthetic
  misc_feature (11)..(11): n is a, c, g, or u
uuccaggaucnacaacaaccagua

SEQ ID NO: 138150 - RNA, 18 nt, Artificial Sequence
  Synthetic
uauauggaugauguggua

SEQ ID NO: 138151 - RNA, 19 nt, Artificial Sequence
  Synthetic
  misc_feature (1)..(1): n is a, c, g, or u
nuauauggaugauguggua

SEQ ID NO: 138152 - RNA, 20 nt, Artificial Sequence
  Synthetic
  misc_feature (2)..(2): n is a, c, g, or u
gnuauauggaugauguggua

SEQ ID NO: 138153 - RNA, 21 nt, Artificial Sequence
  Synthetic
  misc_feature (3)..(3): n is a, c, g, or u
agnuauauggaugauguggua

SEQ ID NO: 138154 - RNA, 22 nt, Artificial Sequence
  Synthetic
  misc_feature (4)..(4): n is a, c, g, or u
cagnuauauggaugauguggua

SEQ ID NO: 138155 - RNA, 23 nt, Artificial Sequence
  Synthetic
  misc_feature (5)..(5): n is a, c, g, or u
ucagnuauauggaugauguggua

SEQ ID NO: 138156 - RNA, 24 nt, Artificial Sequence
  Synthetic
  misc_feature (6)..(6): n is a, c, g, or u
uucagnuauauggaugauguggua

SEQ ID NO: 138157 - RNA, 18 nt, Artificial Sequence
  Synthetic
ugccuuuguaugcaugua

SEQ ID NO: 138158 - RNA, 19 nt, Artificial Sequence
  Synthetic
augccuuuguaugcaugua

SEQ ID NO: 138159 - RNA, 20 nt, Artificial Sequence
  Synthetic
aaugccuuuguaugcaugua

SEQ ID NO: 138160 - RNA, 21 nt, Artificial Sequence
  Synthetic
uaaugccuuuguaugcaugua

SEQ ID NO: 138161 - RNA, 22 nt, Artificial Sequence
  Synthetic
uuaaugccuuuguaugcaugua

SEQ ID NO: 138162 - RNA, 23 nt, Artificial Sequence
  Synthetic
  misc_feature (1)..(1): n is a, c, g, or u
nuuaaugccuuuguaugcaugua

SEQ ID NO: 138163 - RNA, 24 nt, Artificial Sequence
  Synthetic
  misc_feature (2)..(2): n is a, c, g, or u
cnuuaaugccuuuguaugcaugua

SEQ ID NO: 138164 - RNA, 18 nt, Artificial Sequence
  Synthetic
  misc_feature (3)..(3): n is a, c, g, or u
gunggcccucucacugua

SEQ ID NO: 138165 - RNA, 19 nt, Artificial Sequence
  Synthetic
  misc_feature (4)..(4): n is a, c, g, or u
ugunggcccucucacugua

SEQ ID NO: 138166 - RNA, 20 nt, Artificial Sequence
  Synthetic
  misc_feature (5)..(5): n is a, c, g, or u
uugunggcccucucacugua

SEQ ID NO: 138167 - RNA, 21 nt, Artificial Sequence
  Synthetic
  misc_feature (6)..(6): n is a, c, g, or u
uuugunggcccucucacugua

SEQ ID NO: 138168 - RNA, 22 nt, Artificial Sequence
  Synthetic
  misc_feature (7)..(7): n is a, c, g, or u
auuugunggcccucucacugua

SEQ ID NO: 138169 - RNA, 23 nt, Artificial Sequence
  Synthetic
  misc_feature (8)..(8): n is a, c, g, or u
aauuugunggcccucucacugua

SEQ ID NO: 138170 - RNA, 24 nt, Artificial Sequence
  Synthetic
  misc_feature (9)..(9): n is a, c, g, or u
caauuugunggcccucucacugua

SEQ ID NO: 138171 - RNA, 18 nt, Artificial Sequence
  Synthetic
uucccucauguugcugua

SEQ ID NO: 138172 - RNA, 19 nt, Artificial Sequence
  Synthetic
uuucccucauguugcugua

SEQ ID NO: 138173 - RNA, 20 nt, Artificial Sequence
  Synthetic
guuucccucauguugcugua

SEQ ID NO: 138174 - RNA, 21 nt, Artificial Sequence
  Synthetic
uguuucccucauguugcugua

SEQ ID NO: 138175 - RNA, 22 nt, Artificial Sequence
  Synthetic
auguuucccucauguugcugua

SEQ ID NO: 138176 - RNA, 23 nt, Artificial Sequence
  Synthetic
uauguuucccucauguugcugua

SEQ ID NO: 138177 - RNA, 24 nt, Artificial Sequence
  Synthetic
cuauguuucccucauguugcugua

SEQ ID NO: 138178 - RNA, 18 nt, Artificial Sequence
  Synthetic
  misc_feature (6)..(6): n is a, c, g, or u
ccacangaucauauugua

SEQ ID NO: 138179 - RNA, 19 nt, Artificial Sequence
  Synthetic
  misc_feature (7)..(7): n is a, c, g, or u
gccacangaucauauugua

SEQ ID NO: 138180 - RNA, 20 nt, Artificial Sequence
  Synthetic
  misc_feature (8)..(8): n is a, c, g, or u
ugccacangaucauauugua

SEQ ID NO: 138181 - RNA, 21 nt, Artificial Sequence
  Synthetic
  misc_feature (9)..(9): n is a, c, g, or u
uugccacangaucauauugua

SEQ ID NO: 138182 - RNA, 22 nt, Artificial Sequence
  Synthetic
  misc_feature (1)..(1): n is a, c, g, or u
  misc_feature (10)..(10): n is a, c, g, or u
nuugccacangaucauauugua

SEQ ID NO: 138183 - RNA, 23 nt, Artificial Sequence
  Synthetic
  misc_feature (2)..(2): n is a, c, g, or u
  misc_feature (11)..(11): n is a, c, g, or u
cnuugccacangaucauauugua

SEQ ID NO: 138184 - RNA, 24 nt, Artificial Sequence
  Synthetic
  misc_feature (3)..(3): n is a, c, g, or u
  misc_feature (12)..(12): n is a, c, g, or u
acnuugccacangaucauauugua

SEQ ID NO: 138185 - RNA, 18 nt, Artificial Sequence
  Synthetic
  misc_feature (8)..(8): n is a, c, g, or u
  misc_feature (10)..(10): n is a, c, g, or u
agguuaangnucuuugua

SEQ ID NO: 138186 - RNA, 19 nt, Artificial Sequence
  Synthetic
  misc_feature (9)..(9): n is a, c, g, or u
  misc_feature (11)..(11): n is a, c, g, or u
uagguuaangnucuuugua

SEQ ID NO: 138187 - RNA, 20 nt, Artificial Sequence
  Synthetic
  misc_feature (10)..(10): n is a, c, g, or u
  misc_feature (12)..(12): n is a, c, g, or u
uuagguuaangnucuuugua

SEQ ID NO: 138188 - RNA, 21 nt, Artificial Sequence
  Synthetic
  misc_feature (11)..(11): n is a, c, g, or u
  misc_feature (13)..(13): n is a, c, g, or u
auuagguuaangnucuuugua

SEQ ID NO: 138189 - RNA, 22 nt, Artificial Sequence
  Synthetic
  misc_feature (12)..(12): n is a, c, g, or u
  misc_feature (14)..(14): n is a, c, g, or u
gauuagguuaangnucuuugua

SEQ ID NO: 138190 - RNA, 23 nt, Artificial Sequence
  Synthetic
  misc_feature (13)..(13): n is a, c, g, or u
  misc_feature (15)..(15): n is a, c, g, or u
agauuagguuaangnucuuugua

SEQ ID NO: 138191 - RNA, 24 nt, Artificial Sequence
  Synthetic
  misc_feature (14)..(14): n is a, c, g, or u
  misc_feature (16)..(16): n is a, c, g, or u
gagauuagguuaangnucuuugua

SEQ ID NO: 138192 - RNA, 18 nt, Artificial Sequence
  Synthetic
  misc_feature (16)..(16): n is a, c, g, or u
cuguuuggcuuucagnua

SEQ ID NO: 138193 - RNA, 19 nt, Artificial Sequence
  Synthetic
  misc_feature (17)..(17): n is a, c, g, or u
acuguuuggcuuucagnua

SEQ ID NO: 138194 - RNA, 20 nt, Artificial Sequence
  Synthetic
  misc_feature (18)..(18): n is a, c, g, or u
cacuguuuggcuuucagnua

SEQ ID NO: 138195 - RNA, 21 nt, Artificial Sequence
  Synthetic
  misc_feature (19)..(19): n is a, c, g, or u
ccacuguuuggcuuucagnua

SEQ ID NO: 138196 - RNA, 22 nt, Artificial Sequence
  Synthetic
  misc_feature (20)..(20): n is a, c, g, or u
cccacuguuuggcuuucagnua

SEQ ID NO: 138197 - RNA, 23 nt, Artificial Sequence
  Synthetic
  misc_feature (21)..(21): n is a, c, g, or u
ccccacuguuuggcuuucagnua

SEQ ID NO: 138198 - RNA, 24 nt, Artificial Sequence
  Synthetic
  misc_feature (22)..(22): n is a, c, g, or u
cccccacuguuuggcuuucagnua

SEQ ID NO: 138199 - RNA, 18 nt, Artificial Sequence
  Synthetic
  misc_feature (3)..(3): n is a, c, g, or u
  misc_feature (12)..(12): n is a, c, g, or u
  misc_feature (15)..(16): n is a, c, g, or u
aanuucaugggnuannua

SEQ ID NO: 138200 - RNA, 19 nt, Artificial Sequence
  Synthetic
  misc_feature (4)..(4): n is a, c, g, or u
  misc_feature (13)..(13): n is a, c, g, or u
  misc_feature (16)..(17): n is a, c, g, or u
aaanuucaugggnuannua

SEQ ID NO: 138201 - RNA, 20 nt, Artificial Sequence
  Synthetic
  misc_feature (5)..(5): n is a, c, g, or u
  misc_feature (14)..(14): n is a, c, g, or u
  misc_feature (17)..(18): n is a, c, g, or u
uaaanuucaugggnuannua

SEQ ID NO: 138202 - RNA, 21 nt, Artificial Sequence
  Synthetic
  misc_feature (6)..(6): n is a, c, g, or u
  misc_feature (15)..(15): n is a, c, g, or u
  misc_feature (18)..(19): n is a, c, g, or u
cuaaanuucaugggnuannua

SEQ ID NO: 138203 - RNA, 22 nt, Artificial Sequence
  Synthetic
  misc_feature (7)..(7): n is a, c, g, or u
  misc_feature (16)..(16): n is a, c, g, or u
  misc_feature (19)..(20): n is a, c, g, or u
ccuaaanuucaugggnuannua

SEQ ID NO: 138204 - RNA, 23 nt, Artificial Sequence
  Synthetic
  misc_feature (8)..(8): n is a, c, g, or u
  misc_feature (17)..(17): n is a, c, g, or u
  misc_feature (20)..(21): n is a, c, g, or u
cccuaaanuucaugggnuannua

SEQ ID NO: 138205 - RNA, 24 nt, Artificial Sequence
  Synthetic
  misc_feature (9)..(9): n is a, c, g, or u
  misc_feature (18)..(18): n is a, c, g, or u
  misc_feature (21)..(22): n is a, c, g, or u
ucccuaaanuucaugggnuannua

SEQ ID NO: 138206 - RNA, 18 nt, Artificial Sequence
  Synthetic
  misc_feature (12)..(12): n is a, c, g, or u
  misc_feature (15)..(16): n is a, c, g, or u
acuaaauauuunccnnua

SEQ ID NO: 138207 - RNA, 19 nt, Artificial Sequence
  Synthetic
  misc_feature (13)..(13): n is a, c, g, or u
  misc_feature (16)..(17): n is a, c, g, or u
cacuaaauauuunccnnua

SEQ ID NO: 138208 - RNA, 20 nt, Artificial Sequence
  Synthetic
  misc_feature (1)..(1): n is a, c, g, or u
  misc_feature (14)..(14): n is a, c, g, or u
  misc_feature (17)..(18): n is a, c, g, or u
ncacuaaauauuunccnnua

SEQ ID NO: 138209 - RNA, 21 nt, Artificial Sequence
  Synthetic
  misc_feature (1)..(2): n is a, c, g, or u
  misc_feature (15)..(15): n is a, c, g, or u
  misc_feature (18)..(19): n is a, c, g, or u
nncacuaaauauuunccnnua

SEQ ID NO: 138210 - RNA, 22 nt, Artificial Sequence
  Synthetic
  misc_feature (2)..(3): n is a, c, g, or u
  misc_feature (16)..(16): n is a, c, g, or u
  misc_feature (19)..(20): n is a, c, g, or u
cnncacuaaauauuunccnnua

SEQ ID NO: 138211 - RNA, 23 nt, Artificial Sequence
  Synthetic
  misc_feature (1)..(1): n is a, c, g, or u
  misc_feature (3)..(4): n is a, c, g, or u
  misc_feature (17)..(17): n is a, c, g, or u
  misc_feature (20)..(21): n is a, c, g, or u
ncnncacuaaauauuunccnnua

SEQ ID NO: 138212 - RNA, 24 nt, Artificial Sequence
  Synthetic
  misc_feature (2)..(2): n is a, c, g, or u
  misc_feature (4)..(5): n is a, c, g, or u
  misc_feature (18)..(18): n is a, c, g, or u
  misc_feature (21)..(22): n is a, c, g, or u
ancnncacuaaauauuunccnnua

SEQ ID NO: 138213 - RNA, 18 nt, Artificial Sequence
  Synthetic
auugguucuucuggauua

SEQ ID NO: 138214 - RNA, 19 nt, Artificial Sequence
  Synthetic
uauugguucuucuggauua

SEQ ID NO: 138215 - RNA, 20 nt, Artificial Sequence
  Synthetic
uuauugguucuucuggauua

SEQ ID NO: 138216 - RNA, 21 nt, Artificial Sequence
  Synthetic
cuuauugguucuucuggauua

SEQ ID NO: 138217 - RNA, 22 nt, Artificial Sequence
  Synthetic
ucuuauugguucuucuggauua

SEQ ID NO: 138218 - RNA, 23 nt, Artificial Sequence
  Synthetic
uucuuauugguucuucuggauua

SEQ ID NO: 138219 - RNA, 24 nt, Artificial Sequence
  Synthetic
cuucuuauugguucuucuggauua

SEQ ID NO: 138220 - RNA, 18 nt, Artificial Sequence
  Synthetic
  misc_feature (5)..(5): n is a, c, g, or u
  misc_feature (7)..(7): n is a, c, g, or u
uuaangnucuuuguauua

SEQ ID NO: 138221 - RNA, 19 nt, Artificial Sequence
  Synthetic
  misc_feature (6)..(6): n is a, c, g, or u
  misc_feature (8)..(8): n is a, c, g, or u
guuaangnucuuuguauua

SEQ ID NO: 138222 - RNA, 20 nt, Artificial Sequence
  Synthetic
  misc_feature (7)..(7): n is a, c, g, or u
  misc_feature (9)..(9): n is a, c, g, or u
gguuaangnucuuuguauua

SEQ ID NO: 138223 - RNA, 21 nt, Artificial Sequence
  Synthetic
  misc_feature (8)..(8): n is a, c, g, or u
  misc_feature (10)..(10): n is a, c, g, or u
agguuaangnucuuuguauua

SEQ ID NO: 138224 - RNA, 22 nt, Artificial Sequence
  Synthetic
  misc_feature (9)..(9): n is a, c, g, or u
  misc_feature (11)..(11): n is a, c, g, or u
uagguuaangnucuuuguauua

SEQ ID NO: 138225 - RNA, 23 nt, Artificial Sequence
  Synthetic
  misc_feature (10)..(10): n is a, c, g, or u
  misc_feature (12)..(12): n is a, c, g, or u
uuagguuaangnucuuuguauua

SEQ ID NO: 138226 - RNA, 24 nt, Artificial Sequence
  Synthetic
  misc_feature (11)..(11): n is a, c, g, or u
  misc_feature (13)..(13): n is a, c, g, or u
auuagguuaangnucuuuguauua

SEQ ID NO: 138227 - RNA, 18 nt, Artificial Sequence
  Synthetic
  misc_feature (1)..(1): n is a, c, g, or u
nacuuucucgccaacuua

SEQ ID NO: 138228 - RNA, 19 nt, Artificial Sequence
  Synthetic
  misc_feature (2)..(2): n is a, c, g, or u
unacuuucucgccaacuua

SEQ ID NO: 138229 - RNA, 20 nt, Artificial Sequence
  Synthetic
  misc_feature (3)..(3): n is a, c, g, or u
uunacuuucucgccaacuua

SEQ ID NO: 138230 - RNA, 21 nt, Artificial Sequence
  Synthetic
  misc_feature (4)..(4): n is a, c, g, or u
uuunacuuucucgccaacuua

SEQ ID NO: 138231 - RNA, 22 nt, Artificial Sequence
  Synthetic
  misc_feature (5)..(5): n is a, c, g, or u
cuuunacuuucucgccaacuua

SEQ ID NO: 138232 - RNA, 23 nt, Artificial Sequence
  Synthetic
  misc_feature (6)..(6): n is a, c, g, or u
gcuuunacuuucucgccaacuua

SEQ ID NO: 138233 - RNA, 24 nt, Artificial Sequence
  Synthetic
  misc_feature (7)..(7): n is a, c, g, or u
ggcuuunacuuucucgccaacuua

SEQ ID NO: 138234 - RNA, 18 nt, Artificial Sequence
  Synthetic
cauggacauugacccuua

SEQ ID NO: 138235 - RNA, 19 nt, Artificial Sequence
  Synthetic
gcauggacauugacccuua

SEQ ID NO: 138236 - RNA, 20 nt, Artificial Sequence
  Synthetic
ggcauggacauugacccuua

SEQ ID NO: 138237 - RNA, 21 nt, Artificial Sequence
  Synthetic
gggcauggacauugacccuua

SEQ ID NO: 138238 - RNA, 22 nt, Artificial Sequence
  Synthetic
ggggcauggacauugacccuua

SEQ ID NO: 138239 - RNA, 23 nt, Artificial Sequence
  Synthetic
uggggcauggacauugacccuua

SEQ ID NO: 138240 - RNA, 24 nt, Artificial Sequence
  Synthetic
uuggggcauggacauugacccuua

SEQ ID NO: 138241 - RNA, 18 nt, Artificial Sequence
  Synthetic
auccugcccaaggucuua

SEQ ID NO: 138242 - RNA, 19 nt, Artificial Sequence
  Synthetic
gauccugcccaaggucuua

SEQ ID NO: 138243 - RNA, 20 nt, Artificial Sequence
  Synthetic
agauccugcccaaggucuua

SEQ ID NO: 138244 - RNA, 21 nt, Artificial Sequence
  Synthetic
cagauccugcccaaggucuua

SEQ ID NO: 138245 - RNA, 22 nt, Artificial Sequence
  Synthetic
ucagauccugcccaaggucuua

SEQ ID NO: 138246 - RNA, 23 nt, Artificial Sequence
  Synthetic
aucagauccugcccaaggucuua

SEQ ID NO: 138247 - RNA, 24 nt, Artificial Sequence
  Synthetic
caucagauccugcccaaggucuua

SEQ ID NO: 138248 - RNA, 18 nt, Artificial Sequence
  Synthetic
cggaaacuacuguuguua

SEQ ID NO: 138249 - RNA, 19 nt, Artificial Sequence
  Synthetic
ccggaaacuacuguuguua

SEQ ID NO: 138250 - RNA, 20 nt, Artificial Sequence
  Synthetic
uccggaaacuacuguuguua

SEQ ID NO: 138251 - RNA, 21 nt, Artificial Sequence
  Synthetic
uuccggaaacuacuguuguua

SEQ ID NO: 138252 - RNA, 22 nt, Artificial Sequence
  Synthetic
cuuccggaaacuacuguuguua

SEQ ID NO: 138253 - RNA, 23 nt, Artificial Sequence
  Synthetic
acuuccggaaacuacuguuguua

SEQ ID NO: 138254 - RNA, 24 nt, Artificial Sequence
  Synthetic
cacuuccggaaacuacuguuguua

SEQ ID NO: 138255 - RNA, 18 nt, Artificial Sequence
  Synthetic
  misc_feature (9)..(9): n is a, c, g, or u
uuuccuaanauucauuua

SEQ ID NO: 138256 - RNA, 19 nt, Artificial Sequence
  Synthetic
  misc_feature (1)..(1): n is a, c, g, or u
  misc_feature (10)..(10): n is a, c, g, or u
nuuuccuaanauucauuua

SEQ ID NO: 138257 - RNA, 20 nt, Artificial Sequence
  Synthetic
  misc_feature (2)..(2): n is a, c, g, or u
  misc_feature (11)..(11): n is a, c, g, or u
cnuuuccuaanauucauuua

SEQ ID NO: 138258 - RNA, 21 nt, Artificial Sequence
  Synthetic
  misc_feature (3)..(3): n is a, c, g, or u
  misc_feature (12)..(12): n is a, c, g, or u
ucnuuuccuaanauucauuua

SEQ ID NO: 138259 - RNA, 22 nt, Artificial Sequence
  Synthetic
  misc_feature (4)..(4): n is a, c, g, or u
  misc_feature (13)..(13): n is a, c, g, or u
uucnuuuccuaanauucauuua

SEQ ID NO: 138260 - RNA, 23 nt, Artificial Sequence
  Synthetic
  misc_feature (5)..(5): n is a, c, g, or u
  misc_feature (14)..(14): n is a, c, g, or u
cuucnuuuccuaanauucauuua

SEQ ID NO: 138261 - RNA, 24 nt, Artificial Sequence
  Synthetic
  misc_feature (6)..(6): n is a, c, g, or u
  misc_feature (15)..(15): n is a, c, g, or u
ccuucnuuuccuaanauucauuua

SEQ ID NO: 138262 - RNA, 18 nt, Artificial Sequence
  Synthetic
  misc_feature (2)..(2): n is a, c, g, or u
anaucaaacacuguuuua

SEQ ID NO: 138263 - RNA, 19 nt, Artificial Sequence
  Synthetic
  misc_feature (3)..(3): n is a, c, g, or u
aanaucaaacacuguuuua

SEQ ID NO: 138264 - RNA, 20 nt, Artificial Sequence
  Synthetic
  misc_feature (4)..(4): n is a, c, g, or u
aaanaucaaacacuguuuua

SEQ ID NO: 138265 - RNA, 21 nt, Artificial Sequence
  Synthetic
  misc_feature (5)..(5): n is a, c, g, or u
aaaanaucaaacacuguuuua

SEQ ID NO: 138266 - RNA, 22 nt, Artificial Sequence
  Synthetic
  misc_feature (6)..(6): n is a, c, g, or u
caaaanaucaaacacuguuuua

SEQ ID NO: 138267 - RNA, 23 nt, Artificial Sequence
  Synthetic
  misc_feature (7)..(7): n is a, c, g, or u
acaaaanaucaaacacuguuuua

SEQ ID NO: 138268 - RNA, 24 nt, Artificial Sequence
  Synthetic
  misc_feature (8)..(8): n is a, c, g, or u
uacaaaanaucaaacacuguuuua

SEQ ID NO: 138269 - RNA, 18 nt, Artificial Sequence
  Synthetic
  misc_feature (1)..(1): n is a, c, g, or u
nuggguauacauuuaaac

SEQ ID NO: 138270 - RNA, 19 nt, Artificial Sequence
  Synthetic
  misc_feature (2)..(2): n is a, c, g, or u
unuggguauacauuuaaac

SEQ ID NO: 138271 - RNA, 20 nt, Artificial Sequence
  Synthetic
  misc_feature (3)..(3): n is a, c, g, or u
cunuggguauacauuuaaac

SEQ ID NO: 138272 - RNA, 21 nt, Artificial Sequence
  Synthetic
  misc_feature (4)..(4): n is a, c, g, or u
ucunuggguauacauuuaaac

SEQ ID NO: 138273 - RNA, 22 nt, Artificial Sequence
  Synthetic
  misc_feature (5)..(5): n is a, c, g, or u
gucunuggguauacauuuaaac

SEQ ID NO: 138274 - RNA, 23 nt, Artificial Sequence
  Synthetic
  misc_feature (6)..(6): n is a, c, g, or u
ugucunuggguauacauuuaaac

SEQ ID NO: 138275 - RNA, 24 nt, Artificial Sequence
  Synthetic
  misc_feature (7)..(7): n is a, c, g, or u
uugucunuggguauacauuuaaac

SEQ ID NO: 138276 - RNA, 18 nt, Artificial Sequence
  Synthetic
  misc_feature (11)..(11): n is a, c, g, or u
  misc_feature (13)..(13): n is a, c, g, or u
ggggacccugngncgaac

SEQ ID NO: 138277 - RNA, 19 nt, Artificial Sequence
  Synthetic
  misc_feature (12)..(12): n is a, c, g, or u
  misc_feature (14)..(14): n is a, c, g, or u
uggggacccugngncgaac

SEQ ID NO: 138278 - RNA, 20 nt, Artificial Sequence
  Synthetic
  misc_feature (13)..(13): n is a, c, g, or u
  misc_feature (15)..(15): n is a, c, g, or u
cuggggacccugngncgaac

SEQ ID NO: 138279 - RNA, 21 nt, Artificial Sequence
  Synthetic
  misc_feature (14)..(14): n is a, c, g, or u
  misc_feature (16)..(16): n is a, c, g, or u
acuggggacccugngncgaac

SEQ ID NO: 138280 - RNA, 22 nt, Artificial Sequence
  Synthetic
  misc_feature (15)..(15): n is a, c, g, or u
  misc_feature (17)..(17): n is a, c, g, or u
gacuggggacccugngncgaac

SEQ ID NO: 138281 - RNA, 23 nt, Artificial Sequence
  Synthetic
  misc_feature (16)..(16): n is a, c, g, or u
  misc_feature (18)..(18): n is a, c, g, or u
ggacuggggacccugngncgaac

SEQ ID NO: 138282 - RNA, 24 nt, Artificial Sequence
  Synthetic
  misc_feature (17)..(17): n is a, c, g, or u
  misc_feature (19)..(19): n is a, c, g, or u
aggacuggggacccugngncgaac

SEQ ID NO: 138283 - RNA, 18 nt, Artificial Sequence
  Synthetic
caccauauucuugggaac

SEQ ID NO: 138284 - RNA, 19 nt, Artificial Sequence
  Synthetic
ucaccauauucuugggaac

SEQ ID NO: 138285 - RNA, 20 nt, Artificial Sequence
  Synthetic
gucaccauauucuugggaac

SEQ ID NO: 138286 - RNA, 21 nt, Artificial Sequence
  Synthetic
ggucaccauauucuugggaac

SEQ ID NO: 138287 - RNA, 22 nt, Artificial Sequence
  Synthetic
gggucaccauauucuugggaac

SEQ ID NO: 138288 - RNA, 23 nt, Artificial Sequence
  Synthetic
cgggucaccauauucuugggaac

SEQ ID NO: 138289 - RNA, 24 nt, Artificial Sequence
  Synthetic
gcgggucaccauauucuugggaac

SEQ ID NO: 138290 - RNA, 18 nt, Artificial Sequence
  Synthetic
aauuauguuaauacuaac

SEQ ID NO: 138291 - RNA, 19 nt, Artificial Sequence
  Synthetic
caauuauguuaauacuaac

SEQ ID NO: 138292 - RNA, 20 nt, Artificial Sequence
  Synthetic
ucaauuauguuaauacuaac

SEQ ID NO: 138293 - RNA, 21 nt, Artificial Sequence
  Synthetic
gucaauuauguuaauacuaac

SEQ ID NO: 138294 - RNA, 22 nt, Artificial Sequence
  Synthetic
agucaauuauguuaauacuaac

SEQ ID NO: 138295 - RNA, 23 nt, Artificial Sequence
  Synthetic
uagucaauuauguuaauacuaac

SEQ ID NO: 138296 - RNA, 24 nt, Artificial Sequence
  Synthetic
guagucaauuauguuaauacuaac

SEQ ID NO: 138297 - RNA, 18 nt, Artificial Sequence
  Synthetic
acguugcauggagaccac

SEQ ID NO: 138298 - RNA, 19 nt, Artificial Sequence
  Synthetic
cacguugcauggagaccac

SEQ ID NO: 138299 - RNA, 20 nt, Artificial Sequence
  Synthetic
gcacguugcauggagaccac

SEQ ID NO: 138300 - RNA, 21 nt, Artificial Sequence
  Synthetic
ugcacguugcauggagaccac

SEQ ID NO: 138301 - RNA, 22 nt, Artificial Sequence
  Synthetic
cugcacguugcauggagaccac

SEQ ID NO: 138302 - RNA, 23 nt, Artificial Sequence
  Synthetic
ucugcacguugcauggagaccac

SEQ ID NO: 138303 - RNA, 24 nt, Artificial Sequence
  Synthetic
cucugcacguugcauggagaccac

SEQ ID NO: 138304 - RNA, 18 nt, Artificial Sequence
  Synthetic
  misc_feature (14)..(14): n is a, c, g, or u
caccucaccauacngcac

SEQ ID NO: 138305 - RNA, 19 nt, Artificial Sequence
  Synthetic
  misc_feature (15)..(15): n is a, c, g, or u
ucaccucaccauacngcac

SEQ ID NO: 138306 - RNA, 20 nt, Artificial Sequence
  Synthetic
  misc_feature (16)..(16): n is a, c, g, or u
cucaccucaccauacngcac

SEQ ID NO: 138307 - RNA, 21 nt, Artificial Sequence
  Synthetic
  misc_feature (17)..(17): n is a, c, g, or u
gcucaccucaccauacngcac

SEQ ID NO: 138308 - RNA, 22 nt, Artificial Sequence
  Synthetic
  misc_feature (18)..(18): n is a, c, g, or u
ugcucaccucaccauacngcac

SEQ ID NO: 138309 - RNA, 23 nt, Artificial Sequence
  Synthetic
  misc_feature (19)..(19): n is a, c, g, or u
uugcucaccucaccauacngcac

SEQ ID NO: 138310 - RNA, 24 nt, Artificial Sequence
  Synthetic
  misc_feature (20)..(20): n is a, c, g, or u
auugcucaccucaccauacngcac

SEQ ID NO: 138311 - RNA, 18 nt, Artificial Sequence
  Synthetic
gaacauggagaacaucac

SEQ ID NO: 138312 - RNA, 19 nt, Artificial Sequence
  Synthetic
cgaacauggagaacaucac

SEQ ID NO: 138313 - RNA, 20 nt, Artificial Sequence
  Synthetic
  misc_feature (1)..(1): n is a, c, g, or u
ncgaacauggagaacaucac

SEQ ID NO: 138314 - RNA, 21 nt, Artificial Sequence
  Synthetic
  misc_feature (2)..(2): n is a, c, g, or u
gncgaacauggagaacaucac

SEQ ID NO: 138315 - RNA, 22 nt, Artificial Sequence
  Synthetic
  misc_feature (1)..(1): n is a, c, g, or u
  misc_feature (3)..(3): n is a, c, g, or u
ngncgaacauggagaacaucac

SEQ ID NO: 138316 - RNA, 23 nt, Artificial Sequence
  Synthetic
  misc_feature (2)..(2): n is a, c, g, or u
  misc_feature (4)..(4): n is a, c, g, or u
gngncgaacauggagaacaucac

SEQ ID NO: 138317 - RNA, 24 nt, Artificial Sequence
  Synthetic
  misc_feature (3)..(3): n is a, c, g, or u
  misc_feature (5)..(5): n is a, c, g, or u
ugngncgaacauggagaacaucac

SEQ ID NO: 138318 - RNA, 18 nt, Artificial Sequence
  Synthetic
  misc_feature (7)..(7): n is a, c, g, or u
auuugunggcccucucac

SEQ ID NO: 138319 - RNA, 19 nt, Artificial Sequence
  Synthetic
  misc_feature (8)..(8): n is a, c, g, or u
aauuugunggcccucucac

SEQ ID NO: 138320 - RNA, 20 nt, Artificial Sequence
  Synthetic
  misc_feature (9)..(9): n is a, c, g, or u
caauuugunggcccucucac

SEQ ID NO: 138321 - RNA, 21 nt, Artificial Sequence
  Synthetic
  misc_feature (1)..(1): n is a, c, g, or u
  misc_feature (10)..(10): n is a, c, g, or u
ncaauuugunggcccucucac

SEQ ID NO: 138322 - RNA, 22 nt, Artificial Sequence
  Synthetic
  misc_feature (2)..(2): n is a, c, g, or u
  misc_feature (11)..(11): n is a, c, g, or u
ancaauuugunggcccucucac

SEQ ID NO: 138323 - RNA, 23 nt, Artificial Sequence
  Synthetic
  misc_feature (3)..(3): n is a, c, g, or u
  misc_feature (12)..(12): n is a, c, g, or u
cancaauuugunggcccucucac

SEQ ID NO: 138324 - RNA, 24 nt, Artificial Sequence
  Synthetic
  misc_feature (4)..(4): n is a, c, g, or u
  misc_feature (13)..(13): n is a, c, g, or u
ucancaauuugunggcccucucac

SEQ ID NO: 138325 - RNA, 18 nt, Artificial Sequence
  Synthetic
  misc_feature (9)..(9): n is a, c, g, or u
  misc_feature (12)..(13): n is a, c, g, or u
aaauauuunccnnuagac

SEQ ID NO: 138326 - RNA, 19 nt, Artificial Sequence
  Synthetic
  misc_feature (10)..(10): n is a, c, g, or u
  misc_feature (13)..(14): n is a, c, g, or u
uaaauauuunccnnuagac

SEQ ID NO: 138327 - RNA, 20 nt, Artificial Sequence
  Synthetic
  misc_feature (11)..(11): n is a, c, g, or u
  misc_feature (14)..(15): n is a, c, g, or u
cuaaauauuunccnnuagac

SEQ ID NO: 138328 - RNA, 21 nt, Artificial Sequence
  Synthetic
  misc_feature (12)..(12): n is a, c, g, or u
  misc_feature (15)..(16): n is a, c, g, or u
acuaaauauuunccnnuagac

SEQ ID NO: 138329 - RNA, 22 nt, Artificial Sequence
  Synthetic
  misc_feature (13)..(13): n is a, c, g, or u
  misc_feature (16)..(17): n is a, c, g, or u
cacuaaauauuunccnnuagac

SEQ ID NO: 138330 - RNA, 23 nt, Artificial Sequence
  Synthetic
  misc_feature (1)..(1): n is a, c, g, or u
  misc_feature (14)..(14): n is a, c, g, or u
  misc_feature (17)..(18): n is a, c, g, or u
ncacuaaauauuunccnnuagac

SEQ ID NO: 138331 - RNA, 24 nt, Artificial Sequence
  Synthetic
  misc_feature (1)..(2): n is a, c, g, or u
  misc_feature (15)..(15): n is a, c, g, or u
  misc_feature (18)..(19): n is a, c, g, or u
nncacuaaauauuunccnnuagac

SEQ ID NO: 138332 - RNA, 18 nt, Artificial Sequence
  Synthetic
gcaaugucaacgaccgac

SEQ ID NO: 138333 - RNA, 19 nt, Artificial Sequence
  Synthetic
agcaaugucaacgaccgac

SEQ ID NO: 138334 - RNA, 20 nt, Artificial Sequence
  Synthetic
cagcaaugucaacgaccgac

SEQ ID NO: 138335 - RNA, 21 nt, Artificial Sequence
  Synthetic
ccagcaaugucaacgaccgac

SEQ ID NO: 138336 - RNA, 22 nt, Artificial Sequence
  Synthetic
cccagcaaugucaacgaccgac

SEQ ID NO: 138337 - RNA, 23 nt, Artificial Sequence
  Synthetic
ucccagcaaugucaacgaccgac

SEQ ID NO: 138338 - RNA, 24 nt, Artificial Sequence
  Synthetic
cucccagcaaugucaacgaccgac

SEQ ID NO: 138339 - RNA, 18 nt, Artificial Sequence
  Synthetic
  misc_feature (9)..(9): n is a, c, g, or u
  misc_feature (12)..(13): n is a, c, g, or u
ucugccgunccnnccgac

SEQ ID NO: 138340 - RNA, 19 nt, Artificial Sequence
  Synthetic
  misc_feature (10)..(10): n is a, c, g, or u
  misc_feature (13)..(14): n is a, c, g, or u
gucugccgunccnnccgac

SEQ ID NO: 138341 - RNA, 20 nt, Artificial Sequence
  Synthetic
  misc_feature (11)..(11): n is a, c, g, or u
  misc_feature (14)..(15): n is a, c, g, or u
cgucugccgunccnnccgac

SEQ ID NO: 138342 - RNA, 21 nt, Artificial Sequence
  Synthetic
  misc_feature (12)..(12): n is a, c, g, or u
  misc_feature (15)..(16): n is a, c, g, or u
ccgucugccgunccnnccgac

SEQ ID NO: 138343 - RNA, 22 nt, Artificial Sequence
  Synthetic
  misc_feature (13)..(13): n is a, c, g, or u
  misc_feature (16)..(17): n is a, c, g, or u
uccgucugccgunccnnccgac

SEQ ID NO: 138344 - RNA, 23 nt, Artificial Sequence
  Synthetic
  misc_feature (14)..(14): n is a, c, g, or u
  misc_feature (17)..(18): n is a, c, g, or u
cuccgucugccgunccnnccgac

SEQ ID NO: 138345 - RNA, 24 nt, Artificial Sequence
  Synthetic
  misc_feature (15)..(15): n is a, c, g, or u
  misc_feature (18)..(19): n is a, c, g, or u
ucuccgucugccgunccnnccgac

SEQ ID NO: 138346 - RNA, 18 nt, Artificial Sequence
  Synthetic
  misc_feature (11)..(11): n is a, c, g, or u
gucaaucuccncgaggac

SEQ ID NO: 138347 - RNA, 19 nt, Artificial Sequence
  Synthetic
  misc_feature (12)..(12): n is a, c, g, or u
cgucaaucuccncgaggac

SEQ ID NO: 138348 - RNA, 20 nt, Artificial Sequence
  Synthetic
  misc_feature (13)..(13): n is a, c, g, or u
ucgucaaucuccncgaggac

SEQ ID NO: 138349 - RNA, 21 nt, Artificial Sequence
  Synthetic
  misc_feature (14)..(14): n is a, c, g, or u
cucgucaaucuccncgaggac

SEQ ID NO: 138350 - RNA, 22 nt, Artificial Sequence
  Synthetic
  misc_feature (15)..(15): n is a, c, g, or u
ucucgucaaucuccncgaggac

SEQ ID NO: 138351 - RNA, 23 nt, Artificial Sequence
  Synthetic
  misc_feature (16)..(16): n is a, c, g, or u
aucucgucaaucuccncgaggac

SEQ ID NO: 138352 - RNA, 24 nt, Artificial Sequence
  Synthetic
  misc_feature (17)..(17): n is a, c, g, or u
caucucgucaaucuccncgaggac

SEQ ID NO: 138353 - RNA, 18 nt, Artificial Sequence
  Synthetic
aacaauccagauugggac

SEQ ID NO: 138354 - RNA, 19 nt, Artificial Sequence
  Synthetic
aaacaauccagauugggac

SEQ ID NO: 138355 - RNA, 20 nt, Artificial Sequence
  Synthetic
caaacaauccagauugggac

SEQ ID NO: 138356 - RNA, 21 nt, Artificial Sequence
  Synthetic
ucaaacaauccagauugggac

SEQ ID NO: 138357 - RNA, 22 nt, Artificial Sequence
  Synthetic
  misc_feature (1)..(1): n is a, c, g, or u
nucaaacaauccagauugggac

SEQ ID NO: 138358 - RNA, 23 nt, Artificial Sequence
  Synthetic
  misc_feature (2)..(2): n is a, c, g, or u
anucaaacaauccagauugggac

SEQ ID NO: 138359 - RNA, 24 nt, Artificial Sequence
  Synthetic
  misc_feature (3)..(3): n is a, c, g, or u
aanucaaacaauccagauugggac

SEQ ID NO: 138360 - RNA, 18 nt, Artificial Sequence
  Synthetic
uggcuuuggggcauggac

SEQ ID NO: 138361 - RNA, 19 nt, Artificial Sequence
  Synthetic
  misc_feature (1)..(1): n is a, c, g, or u
nuggcuuuggggcauggac

SEQ ID NO: 138362 - RNA, 20 nt, Artificial Sequence
  Synthetic
  misc_feature (2)..(2): n is a, c, g, or u
gnuggcuuuggggcauggac

SEQ ID NO: 138363 - RNA, 21 nt, Artificial Sequence
  Synthetic
  misc_feature (3)..(3): n is a, c, g, or u
ggnuggcuuuggggcauggac

SEQ ID NO: 138364 - RNA, 22 nt, Artificial Sequence
  Synthetic
  misc_feature (4)..(4): n is a, c, g, or u
uggnuggcuuuggggcauggac

SEQ ID NO: 138365 - RNA, 23 nt, Artificial Sequence
  Synthetic
  misc_feature (5)..(5): n is a, c, g, or u
uuggnuggcuuuggggcauggac

SEQ ID NO: 138366 - RNA, 24 nt, Artificial Sequence
  Synthetic
  misc_feature (6)..(6): n is a, c, g, or u
cuuggnuggcuuuggggcauggac

SEQ ID NO: 138367 - RNA, 18 nt, Artificial Sequence
  Synthetic
  misc_feature (15)..(15): n is a, c, g, or u
gacuguguguuuaangac

SEQ ID NO: 138368 - RNA, 19 nt, Artificial Sequence
  Synthetic
  misc_feature (16)..(16): n is a, c, g, or u
agacuguguguuuaangac

SEQ ID NO: 138369 - RNA, 20 nt, Artificial Sequence
  Synthetic
  misc_feature (17)..(17): n is a, c, g, or u
aagacuguguguuuaangac

SEQ ID NO: 138370 - RNA, 21 nt, Artificial Sequence
  Synthetic
  misc_feature (18)..(18): n is a, c, g, or u
aaagacuguguguuuaangac

SEQ ID NO: 138371 - RNA, 22 nt, Artificial Sequence
  Synthetic
  misc_feature (19)..(19): n is a, c, g, or u
caaagacuguguguuuaangac

SEQ ID NO: 138372 - RNA, 23 nt, Artificial Sequence
  Synthetic
  misc_feature (20)..(20): n is a, c, g, or u
ucaaagacuguguguuuaangac

SEQ ID NO: 138373 - RNA, 24 nt, Artificial Sequence
  Synthetic
  misc_feature (21)..(21): n is a, c, g, or u
uucaaagacuguguguuuaangac

SEQ ID NO: 138374 - RNA, 18 nt, Artificial Sequence
  Synthetic
  misc_feature (15)..(15): n is a, c, g, or u
guuguuagacgacgngac

SEQ ID NO: 138375 - RNA, 19 nt, Artificial Sequence
  Synthetic
  misc_feature (16)..(16): n is a, c, g, or u
uguuguuagacgacgngac

SEQ ID NO: 138376 - RNA, 20 nt, Artificial Sequence
  Synthetic
  misc_feature (17)..(17): n is a, c, g, or u
cuguuguuagacgacgngac

SEQ ID NO: 138377 - RNA, 21 nt, Artificial Sequence
  Synthetic
  misc_feature (18)..(18): n is a, c, g, or u
acuguuguuagacgacgngac

SEQ ID NO: 138378 - RNA, 22 nt, Artificial Sequence
  Synthetic
  misc_feature (19)..(19): n is a, c, g, or u
uacuguuguuagacgacgngac

SEQ ID NO: 138379 - RNA, 23 nt, Artificial Sequence
  Synthetic
  misc_feature (20)..(20): n is a, c, g, or u
cuacuguuguuagacgacgngac

SEQ ID NO: 138380 - RNA, 24 nt, Artificial Sequence
  Synthetic
  misc_feature (21)..(21): n is a, c, g, or u
acuacuguuguuagacgacgngac

SEQ ID NO: 138381 - RNA, 18 nt, Artificial Sequence
  Synthetic
  misc_feature (13)..(13): n is a, c, g, or u
cuggggggaauunaugac

SEQ ID NO: 138382 - RNA, 19 nt, Artificial Sequence
  Synthetic
  misc_feature (14)..(14): n is a, c, g, or u
gcuggggggaauunaugac

SEQ ID NO: 138383 - RNA, 20 nt, Artificial Sequence
  Synthetic
  misc_feature (15)..(15): n is a, c, g, or u
ugcuggggggaauunaugac

SEQ ID NO: 138384 - RNA, 21 nt, Artificial Sequence
  Synthetic
  misc_feature (16)..(16): n is a, c, g, or u
cugcuggggggaauunaugac

SEQ ID NO: 138385 - RNA, 22 nt, Artificial Sequence
  Synthetic
  misc_feature (17)..(17): n is a, c, g, or u
ucugcuggggggaauunaugac

SEQ ID NO: 138386 - RNA, 23 nt, Artificial Sequence
  Synthetic
  misc_feature (18)..(18): n is a, c, g, or u
cucugcuggggggaauunaugac

SEQ ID NO: 138387 - RNA, 24 nt, Artificial Sequence
  Synthetic
  misc_feature (19)..(19): n is a, c, g, or u
ucucugcuggggggaauunaugac

SEQ ID NO: 138388 - RNA, 18 nt, Artificial Sequence
  Synthetic
  misc_feature (16)..(16): n is a, c, g, or u
ucuaauuccaggaucnac

SEQ ID NO: 138389 - RNA, 19 nt, Artificial Sequence
  Synthetic
  misc_feature (17)..(17): n is a, c, g, or u
cucuaauuccaggaucnac

SEQ ID NO: 138390 - RNA, 20 nt, Artificial Sequence
  Synthetic
  misc_feature (18)..(18): n is a, c, g, or u
ccucuaauuccaggaucnac

SEQ ID NO: 138391 - RNA, 21 nt, Artificial Sequence
  Synthetic
  misc_feature (19)..(19): n is a, c, g, or u
uccucuaauuccaggaucnac

SEQ ID NO: 138392 - RNA, 22 nt, Artificial Sequence
  Synthetic
  misc_feature (20)..(20): n is a, c, g, or u
guccucuaauuccaggaucnac

SEQ ID NO: 138393 - RNA, 23 nt, Artificial Sequence
  Synthetic
  misc_feature (21)..(21): n is a, c, g, or u
uguccucuaauuccaggaucnac

SEQ ID NO: 138394 - RNA, 24 nt, Artificial Sequence
  Synthetic
  misc_feature (22)..(22): n is a, c, g, or u
uuguccucuaauuccaggaucnac

SEQ ID NO: 138395 - RNA, 18 nt, Artificial Sequence
  Synthetic
caagaauccucacaauac

SEQ ID NO: 138396 - RNA, 19 nt, Artificial Sequence
  Synthetic
acaagaauccucacaauac

SEQ ID NO: 138397 - RNA, 20 nt, Artificial Sequence
  Synthetic
gacaagaauccucacaauac

SEQ ID NO: 138398 - RNA, 21 nt, Artificial Sequence
  Synthetic
ugacaagaauccucacaauac

SEQ ID NO: 138399 - RNA, 22 nt, Artificial Sequence
  Synthetic
uugacaagaauccucacaauac

SEQ ID NO: 138400 - RNA, 23 nt, Artificial Sequence
  Synthetic
guugacaagaauccucacaauac

SEQ ID NO: 138401 - RNA, 24 nt, Artificial Sequence
  Synthetic
uguugacaagaauccucacaauac

SEQ ID NO: 138402 - RNA, 18 nt, Artificial Sequence
  Synthetic
uccucugccgauccauac

SEQ ID NO: 138403 - RNA, 19 nt, Artificial Sequence
  Synthetic
cuccucugccgauccauac

SEQ ID NO: 138404 - RNA, 20 nt, Artificial Sequence
  Synthetic
gcuccucugccgauccauac

SEQ ID NO: 138405 - RNA, 21 nt, Artificial Sequence
  Synthetic
ggcuccucugccgauccauac

SEQ ID NO: 138406 - RNA, 22 nt, Artificial Sequence
  Synthetic
uggcuccucugccgauccauac

SEQ ID NO: 138407 - RNA, 23 nt, Artificial Sequence
  Synthetic
guggcuccucugccgauccauac

SEQ ID NO: 138408 - RNA, 24 nt, Artificial Sequence
  Synthetic
uguggcuccucugccgauccauac

SEQ ID NO: 138409 - RNA, 18 nt, Artificial Sequence
  Synthetic
accgaccuugaggccuac

SEQ ID NO: 138410 - RNA, 19 nt, Artificial Sequence
  Synthetic
gaccgaccuugaggccuac

SEQ ID NO: 138411 - RNA, 20 nt, Artificial Sequence
  Synthetic
cgaccgaccuugaggccuac

SEQ ID NO: 138412 - RNA, 21 nt, Artificial Sequence
  Synthetic
acgaccgaccuugaggccuac

SEQ ID NO: 138413 - RNA, 22 nt, Artificial Sequence
  Synthetic
aacgaccgaccuugaggccuac

SEQ ID NO: 138414 - RNA, 23 nt, Artificial Sequence
  Synthetic
caacgaccgaccuugaggccuac

SEQ ID NO: 138415 - RNA, 24 nt, Artificial Sequence
  Synthetic
ucaacgaccgaccuugaggccuac

SEQ ID NO: 138416 - RNA, 18 nt, Artificial Sequence
  Synthetic
uaaagaauuuggagcuac

SEQ ID NO: 138417 - RNA, 19 nt, Artificial Sequence
  Synthetic
auaaagaauuuggagcuac

SEQ ID NO: 138418 - RNA, 20 nt, Artificial Sequence
  Synthetic
uauaaagaauuuggagcuac

SEQ ID NO: 138419 - RNA, 21 nt, Artificial Sequence
  Synthetic
uuauaaagaauuuggagcuac

SEQ ID NO: 138420 - RNA, 22 nt, Artificial Sequence
  Synthetic
cuuauaaagaauuuggagcuac

SEQ ID NO: 138421 - RNA, 23 nt, Artificial Sequence
  Synthetic
ccuuauaaagaauuuggagcuac

SEQ ID NO: 138422 - RNA, 24 nt, Artificial Sequence
  Synthetic
cccuuauaaagaauuuggagcuac

SEQ ID NO: 138423 - RNA, 18 nt, Artificial Sequence
  Synthetic
uccugcccaaggucuuac

SEQ ID NO: 138424 - RNA, 19 nt, Artificial Sequence
  Synthetic
auccugcccaaggucuuac

SEQ ID NO: 138425 - RNA, 20 nt, Artificial Sequence
  Synthetic
gauccugcccaaggucuuac

SEQ ID NO: 138426 - RNA, 21 nt, Artificial Sequence
  Synthetic
agauccugcccaaggucuuac

SEQ ID NO: 138427 - RNA, 22 nt, Artificial Sequence
  Synthetic
cagauccugcccaaggucuuac

SEQ ID NO: 138428 - RNA, 23 nt, Artificial Sequence
  Synthetic
ucagauccugcccaaggucuuac

SEQ ID NO: 138429 - RNA, 24 nt, Artificial Sequence
  Synthetic
aucagauccugcccaaggucuuac

SEQ ID NO: 138430 - RNA, 18 nt, Artificial Sequence
  Synthetic
auguugcuguacaaaacc

SEQ ID NO: 138431 - RNA, 19 nt, Artificial Sequence
  Synthetic
cauguugcuguacaaaacc

SEQ ID NO: 138432 - RNA, 20 nt, Artificial Sequence
  Synthetic
ucauguugcuguacaaaacc

SEQ ID NO: 138433 - RNA, 21 nt, Artificial Sequence
  Synthetic
cucauguugcuguacaaaacc

SEQ ID NO: 138434 - RNA, 22 nt, Artificial Sequence
  Synthetic
ccucauguugcuguacaaaacc

SEQ ID NO: 138435 - RNA, 23 nt, Artificial Sequence
  Synthetic
cccucauguugcuguacaaaacc

SEQ ID NO: 138436 - RNA, 24 nt, Artificial Sequence
  Synthetic
ucccucauguugcuguacaaaacc

SEQ ID NO: 138437 - RNA, 18 nt, Artificial Sequence
  Synthetic
cguugcauggagaccacc

SEQ ID NO: 138438 - RNA, 19 nt, Artificial Sequence
  Synthetic
acguugcauggagaccacc

SEQ ID NO: 138439 - RNA, 20 nt, Artificial Sequence
  Synthetic
cacguugcauggagaccacc

SEQ ID NO: 138440 - RNA, 21 nt, Artificial Sequence
  Synthetic
gcacguugcauggagaccacc

SEQ ID NO: 138441 - RNA, 22 nt, Artificial Sequence
  Synthetic
ugcacguugcauggagaccacc

SEQ ID NO: 138442 - RNA, 23 nt, Artificial Sequence
  Synthetic
cugcacguugcauggagaccacc

SEQ ID NO: 138443 - RNA, 24 nt, Artificial Sequence
  Synthetic
ucugcacguugcauggagaccacc

SEQ ID NO: 138444 - RNA, 18 nt, Artificial Sequence
  Synthetic
uacucccaucucuccacc

SEQ ID NO: 138445 - RNA, 19 nt, Artificial Sequence
  Synthetic
cuacucccaucucuccacc

SEQ ID NO: 138446 - RNA, 20 nt, Artificial Sequence
  Synthetic
ccuacucccaucucuccacc

SEQ ID NO: 138447 - RNA, 21 nt, Artificial Sequence
  Synthetic
gccuacucccaucucuccacc

SEQ ID NO: 138448 - RNA, 22 nt, Artificial Sequence
  Synthetic
agccuacucccaucucuccacc

SEQ ID NO: 138449 - RNA, 23 nt, Artificial Sequence
  Synthetic
cagccuacucccaucucuccacc

SEQ ID NO: 138450 - RNA, 24 nt, Artificial Sequence
  Synthetic
gcagccuacucccaucucuccacc

SEQ ID NO: 138451 - RNA, 18 nt, Artificial Sequence
  Synthetic
uccuccagccuauagacc

SEQ ID NO: 138452 - RNA, 19 nt, Artificial Sequence
  Synthetic
cuccuccagccuauagacc

SEQ ID NO: 138453 - RNA, 20 nt, Artificial Sequence
  Synthetic
acuccuccagccuauagacc

SEQ ID NO: 138454 - RNA, 21 nt, Artificial Sequence
  Synthetic
cacuccuccagccuauagacc

SEQ ID NO: 138455 - RNA, 22 nt, Artificial Sequence
  Synthetic
gcacuccuccagccuauagacc

SEQ ID NO: 138456 - RNA, 23 nt, Artificial Sequence
  Synthetic
cgcacuccuccagccuauagacc

SEQ ID NO: 138457 - RNA, 24 nt, Artificial Sequence
  Synthetic
ucgcacuccuccagccuauagacc

SEQ ID NO: 138458 - RNA, 18 nt, Artificial Sequence
  Synthetic
caaugucaacgaccgacc

SEQ ID NO: 138459 - RNA, 19 nt, Artificial Sequence
  Synthetic
gcaaugucaacgaccgacc

SEQ ID NO: 138460 - RNA, 20 nt, Artificial Sequence
  Synthetic
agcaaugucaacgaccgacc

SEQ ID NO: 138461 - RNA, 21 nt, Artificial Sequence
  Synthetic
cagcaaugucaacgaccgacc

SEQ ID NO: 138462 - RNA, 22 nt, Artificial Sequence
  Synthetic
ccagcaaugucaacgaccgacc

SEQ ID NO: 138463 - RNA, 23 nt, Artificial Sequence
  Synthetic
cccagcaaugucaacgaccgacc

SEQ ID NO: 138464 - RNA, 24 nt, Artificial Sequence
  Synthetic
ucccagcaaugucaacgaccgacc

SEQ ID NO: 138465 - RNA, 18 nt, Artificial Sequence
  Synthetic
  misc_feature (8)..(8): n is a, c, g, or u
  misc_feature (11)..(12): n is a, c, g, or u
cugccgunccnnccgacc

SEQ ID NO: 138466 - RNA, 19 nt, Artificial Sequence
  Synthetic
  misc_feature (9)..(9): n is a, c, g, or u
  misc_feature (12)..(13): n is a, c, g, or u
ucugccgunccnnccgacc

SEQ ID NO: 138467 - RNA, 20 nt, Artificial Sequence
  Synthetic
  misc_feature (10)..(10): n is a, c, g, or u
  misc_feature (13)..(14): n is a, c, g, or u
gucugccgunccnnccgacc

SEQ ID NO: 138468 - RNA, 21 nt, Artificial Sequence
  Synthetic
  misc_feature (11)..(11): n is a, c, g, or u
  misc_feature (14)..(15): n is a, c, g, or u
cgucugccgunccnnccgacc

SEQ ID NO: 138469 - RNA, 22 nt, Artificial Sequence
  Synthetic
  misc_feature (12)..(12): n is a, c, g, or u
  misc_feature (15)..(16): n is a, c, g, or u
ccgucugccgunccnnccgacc

SEQ ID NO: 138470 - RNA, 23 nt, Artificial Sequence
  Synthetic
  misc_feature (13)..(13): n is a, c, g, or u
  misc_feature (16)..(17): n is a, c, g, or u
uccgucugccgunccnnccgacc

SEQ ID NO: 138471 - RNA, 24 nt, Artificial Sequence
  Synthetic
  misc_feature (14)..(14): n is a, c, g, or u
  misc_feature (17)..(18): n is a, c, g, or u
cuccgucugccgunccnnccgacc

SEQ ID NO: 138472 - RNA, 18 nt, Artificial Sequence
  Synthetic
ucaaccccaucaaggacc

SEQ ID NO: 138473 - RNA, 19 nt, Artificial Sequence
  Synthetic
uucaaccccaucaaggacc

SEQ ID NO: 138474 - RNA, 20 nt, Artificial Sequence
  Synthetic
cuucaaccccaucaaggacc

SEQ ID NO: 138475 - RNA, 21 nt, Artificial Sequence
  Synthetic
acuucaaccccaucaaggacc

SEQ ID NO: 138476 - RNA, 22 nt, Artificial Sequence
  Synthetic
gacuucaaccccaucaaggacc

SEQ ID NO: 138477 - RNA, 23 nt, Artificial Sequence
  Synthetic
ggacuucaaccccaucaaggacc

SEQ ID NO: 138478 - RNA, 24 nt, Artificial Sequence
  Synthetic
gggacuucaaccccaucaaggacc

SEQ ID NO: 138479 - RNA, 18 nt, Artificial Sequence
  Synthetic
gggcuuucgcaaaauacc

SEQ ID NO: 138480 - RNA, 19 nt, Artificial Sequence
  Synthetic
ugggcuuucgcaaaauacc

SEQ ID NO: 138481 - RNA, 20 nt, Artificial Sequence
  Synthetic
  misc_feature (1)..(1): n is a, c, g, or u
nugggcuuucgcaaaauacc

SEQ ID NO: 138482 - RNA, 21 nt, Artificial Sequence
  Synthetic
  misc_feature (2)..(2): n is a, c, g, or u
cnugggcuuucgcaaaauacc

SEQ ID NO: 138483 - RNA, 22 nt, Artificial Sequence
  Synthetic
  misc_feature (3)..(3): n is a, c, g, or u
ucnugggcuuucgcaaaauacc

SEQ ID NO: 138484 - RNA, 23 nt, Artificial Sequence
  Synthetic
  misc_feature (1)..(1): n is a, c, g, or u
  misc_feature (4)..(4): n is a, c, g, or u
nucnugggcuuucgcaaaauacc

SEQ ID NO: 138485 - RNA, 24 nt, Artificial Sequence
  Synthetic
  misc_feature (2)..(2): n is a, c, g, or u
  misc_feature (5)..(5): n is a, c, g, or u
cnucnugggcuuucgcaaaauacc

SEQ ID NO: 138486 - RNA, 18 nt, Artificial Sequence
  Synthetic
aagaauccucacaauacc

SEQ ID NO: 138487 - RNA, 19 nt, Artificial Sequence
  Synthetic
caagaauccucacaauacc

SEQ ID NO: 138488 - RNA, 20 nt, Artificial Sequence
  Synthetic
acaagaauccucacaauacc

SEQ ID NO: 138489 - RNA, 21 nt, Artificial Sequence
  Synthetic
gacaagaauccucacaauacc

SEQ ID NO: 138490 - RNA, 22 nt, Artificial Sequence
  Synthetic
ugacaagaauccucacaauacc

SEQ ID NO: 138491 - RNA, 23 nt, Artificial Sequence
  Synthetic
uugacaagaauccucacaauacc

SEQ ID NO: 138492 - RNA, 24 nt, Artificial Sequence
  Synthetic
guugacaagaauccucacaauacc

SEQ ID NO: 138493 - RNA, 18 nt, Artificial Sequence
  Synthetic
gauugggacuucaacccc

SEQ ID NO: 138494 - RNA, 19 nt, Artificial Sequence
  Synthetic
agauugggacuucaacccc

SEQ ID NO: 138495 - RNA, 20 nt, Artificial Sequence
  Synthetic
cagauugggacuucaacccc

SEQ ID NO: 138496 - RNA, 21 nt, Artificial Sequence
  Synthetic
ccagauugggacuucaacccc

SEQ ID NO: 138497 - RNA, 22 nt, Artificial Sequence
  Synthetic
uccagauugggacuucaacccc

SEQ ID NO: 138498 - RNA, 23 nt, Artificial Sequence
  Synthetic
auccagauugggacuucaacccc

SEQ ID NO: 138499 - RNA, 24 nt, Artificial Sequence
  Synthetic
aauccagauugggacuucaacccc

SEQ ID NO: 138500 - RNA, 18 nt, Artificial Sequence
  Synthetic
uuugcugacgcaaccccc

SEQ ID NO: 138501 - RNA, 19 nt, Artificial Sequence
  Synthetic
guuugcugacgcaaccccc

SEQ ID NO: 138502 - RNA, 20 nt, Artificial Sequence
  Synthetic
uguuugcugacgcaaccccc

SEQ ID NO: 138503 - RNA, 21 nt, Artificial Sequence
  Synthetic
guguuugcugacgcaaccccc

SEQ ID NO: 138504 - RNA, 22 nt, Artificial Sequence
  Synthetic
aguguuugcugacgcaaccccc

SEQ ID NO: 138505 - RNA, 23 nt, Artificial Sequence
  Synthetic
aaguguuugcugacgcaaccccc

SEQ ID NO: 138506 - RNA, 24 nt, Artificial Sequence
  Synthetic
caaguguuugcugacgcaaccccc

SEQ ID NO: 138507 - RNA, 18 nt, Artificial Sequence
  Synthetic
  misc_feature (1)..(1): n is a, c, g, or u
ngaccgaggcaggucccc

SEQ ID NO: 138508 - RNA, 19 nt, Artificial Sequence
  Synthetic
  misc_feature (2)..(2): n is a, c, g, or u
gngaccgaggcaggucccc

SEQ ID NO: 138509 - RNA, 20 nt, Artificial Sequence
  Synthetic
  misc_feature (3)..(3): n is a, c, g, or u
cgngaccgaggcaggucccc

SEQ ID NO: 138510 - RNA, 21 nt, Artificial Sequence
  Synthetic
  misc_feature (4)..(4): n is a, c, g, or u
acgngaccgaggcaggucccc

SEQ ID NO: 138511 - RNA, 22 nt, Artificial Sequence
  Synthetic
  misc_feature (5)..(5): n is a, c, g, or u
gacgngaccgaggcaggucccc

SEQ ID NO: 138512 - RNA, 23 nt, Artificial Sequence
  Synthetic
  misc_feature (6)..(6): n is a, c, g, or u
cgacgngaccgaggcaggucccc

SEQ ID NO: 138513 - RNA, 24 nt, Artificial Sequence
  Synthetic
  misc_feature (7)..(7): n is a, c, g, or u
acgacgngaccgaggcaggucccc

SEQ ID NO: 138514 - RNA, 18 nt, Artificial Sequence
  Synthetic
  misc_feature (2)..(2): n is a, c, g, or u
unuuuugggguggagccc

SEQ ID NO: 138515 - RNA, 19 nt, Artificial Sequence
  Synthetic
  misc_feature (3)..(3): n is a, c, g, or u
gunuuuugggguggagccc

SEQ ID NO: 138516 - RNA, 20 nt, Artificial Sequence
  Synthetic
  misc_feature (4)..(4): n is a, c, g, or u
ggunuuuugggguggagccc

SEQ ID NO: 138517 - RNA, 21 nt, Artificial Sequence
  Synthetic
  misc_feature (1)..(1): n is a, c, g, or u
  misc_feature (5)..(5): n is a, c, g, or u
nggunuuuugggguggagccc

SEQ ID NO: 138518 - RNA, 22 nt, Artificial Sequence
  Synthetic
  misc_feature (2)..(2): n is a, c, g, or u
  misc_feature (6)..(6): n is a, c, g, or u
gnggunuuuugggguggagccc

SEQ ID NO: 138519 - RNA, 23 nt, Artificial Sequence
  Synthetic
  misc_feature (3)..(3): n is a, c, g, or u
  misc_feature (7)..(7): n is a, c, g, or u
ggnggunuuuugggguggagccc

SEQ ID NO: 138520 - RNA, 24 nt, Artificial Sequence
  Synthetic
  misc_feature (4)..(4): n is a, c, g, or u
  misc_feature (8)..(8): n is a, c, g, or u
cggnggunuuuugggguggagccc

SEQ ID NO: 138521 - RNA, 18 nt, Artificial Sequence
  Synthetic
agaccaccgugaacgccc

SEQ ID NO: 138522 - RNA, 19 nt, Artificial Sequence
  Synthetic
gagaccaccgugaacgccc

SEQ ID NO: 138523 - RNA, 20 nt, Artificial Sequence
  Synthetic
ggagaccaccgugaacgccc

SEQ ID NO: 138524 - RNA, 21 nt, Artificial Sequence
  Synthetic
uggagaccaccgugaacgccc

SEQ ID NO: 138525 - RNA, 22 nt, Artificial Sequence
  Synthetic
auggagaccaccgugaacgccc

SEQ ID NO: 138526 - RNA, 23 nt, Artificial Sequence
  Synthetic
cauggagaccaccgugaacgccc

SEQ ID NO: 138527 - RNA, 24 nt, Artificial Sequence
  Synthetic
gcauggagaccaccgugaacgccc

SEQ ID NO: 138528 - RNA, 18 nt, Artificial Sequence
  Synthetic
ccgucggcgcugaauccc

SEQ ID NO: 138529 - RNA, 19 nt, Artificial Sequence
  Synthetic
cccgucggcgcugaauccc

SEQ ID NO: 138530 - RNA, 20 nt, Artificial Sequence
  Synthetic
ucccgucggcgcugaauccc

SEQ ID NO: 138531 - RNA, 18 nt, Artificial Sequence
  Synthetic
guccuuuguuuacguccc

SEQ ID NO: 138532 - RNA, 19 nt, Artificial Sequence
  Synthetic
cguccuuuguuuacguccc

SEQ ID NO: 138533 - RNA, 20 nt, Artificial Sequence
  Synthetic
acguccuuuguuuacguccc

SEQ ID NO: 138534 - RNA, 21 nt, Artificial Sequence
  Synthetic
gacguccuuuguuuacguccc

SEQ ID NO: 138535 - RNA, 22 nt, Artificial Sequence
  Synthetic
ggacguccuuuguuuacguccc

SEQ ID NO: 138536 - RNA, 23 nt, Artificial Sequence
  Synthetic
gggacguccuuuguuuacguccc

SEQ ID NO: 138537 - RNA, 24 nt, Artificial Sequence
  Synthetic
cgggacguccuuuguuuacguccc

SEQ ID NO: 138538 - RNA, 18 nt, Artificial Sequence
  Synthetic
  misc_feature (2)..(2): n is a, c, g, or u
gngaccgaggcagguccc

SEQ ID NO: 138539 - RNA, 19 nt, Artificial Sequence
  Synthetic
  misc_feature (3)..(3): n is a, c, g, or u
cgngaccgaggcagguccc

SEQ ID NO: 138540 - RNA, 20 nt, Artificial Sequence
  Synthetic
  misc_feature (4)..(4): n is a, c, g, or u
acgngaccgaggcagguccc

SEQ ID NO: 138541 - RNA, 21 nt, Artificial Sequence
  Synthetic
  misc_feature (5)..(5): n is a, c, g, or u
gacgngaccgaggcagguccc

SEQ ID NO: 138542 - RNA, 22 nt, Artificial Sequence
  Synthetic
  misc_feature (6)..(6): n is a, c, g, or u
cgacgngaccgaggcagguccc

SEQ ID NO: 138543 - RNA, 23 nt, Artificial Sequence
  Synthetic
  misc_feature (7)..(7): n is a, c, g, or u
acgacgngaccgaggcagguccc

SEQ ID NO: 138544 - RNA, 24 nt, Artificial Sequence
  Synthetic
  misc_feature (8)..(8): n is a, c, g, or u
gacgacgngaccgaggcagguccc

SEQ ID NO: 138545 - RNA, 18 nt, Artificial Sequence
  Synthetic
  misc_feature (10)..(10): n is a, c, g, or u
ugucccacunuucaagcc

SEQ ID NO: 138546 - RNA, 19 nt, Artificial Sequence
  Synthetic
  misc_feature (11)..(11): n is a, c, g, or u
augucccacunuucaagcc

SEQ ID NO: 138547 - RNA, 20 nt, Artificial Sequence
  Synthetic
  misc_feature (12)..(12): n is a, c, g, or u
caugucccacunuucaagcc

SEQ ID NO: 138548 - RNA, 21 nt, Artificial Sequence
  Synthetic
  misc_feature (1)..(1): n is a, c, g, or u
  misc_feature (13)..(13): n is a, c, g, or u
ncaugucccacunuucaagcc

SEQ ID NO: 138549 - RNA, 22 nt, Artificial Sequence
  Synthetic
  misc_feature (2)..(2): n is a, c, g, or u
  misc_feature (14)..(14): n is a, c, g, or u
uncaugucccacunuucaagcc

SEQ ID NO: 138550 - RNA, 23 nt, Artificial Sequence
  Synthetic
  misc_feature (3)..(3): n is a, c, g, or u
  misc_feature (15)..(15): n is a, c, g, or u
guncaugucccacunuucaagcc

SEQ ID NO: 138551 - RNA, 24 nt, Artificial Sequence
  Synthetic
  misc_feature (4)..(4): n is a, c, g, or u
  misc_feature (16)..(16): n is a, c, g, or u
uguncaugucccacunuucaagcc

SEQ ID NO: 138552 - RNA, 18 nt, Artificial Sequence
  Synthetic
  misc_feature (12)..(12): n is a, c, g, or u
gcucuguaucgngaagcc

SEQ ID NO: 138553 - RNA, 19 nt, Artificial Sequence
  Synthetic
  misc_feature (13)..(13): n is a, c, g, or u
agcucuguaucgngaagcc

SEQ ID NO: 138554 - RNA, 20 nt, Artificial Sequence
  Synthetic
  misc_feature (14)..(14): n is a, c, g, or u
cagcucuguaucgngaagcc

SEQ ID NO: 138555 - RNA, 21 nt, Artificial Sequence
  Synthetic
  misc_feature (15)..(15): n is a, c, g, or u
ucagcucuguaucgngaagcc

SEQ ID NO: 138556 - RNA, 22 nt, Artificial Sequence
  Synthetic
  misc_feature (16)..(16): n is a, c, g, or u
cucagcucuguaucgngaagcc

SEQ ID NO: 138557 - RNA, 23 nt, Artificial Sequence
  Synthetic
  misc_feature (17)..(17): n is a, c, g, or u
ccucagcucuguaucgngaagcc

SEQ ID NO: 138558 - RNA, 24 nt, Artificial Sequence
  Synthetic
  misc_feature (18)..(18): n is a, c, g, or u
gccucagcucuguaucgngaagcc

SEQ ID NO: 138559 - RNA, 18 nt, Artificial Sequence
  Synthetic
auucgcacuccuccagcc

SEQ ID NO: 138560 - RNA, 19 nt, Artificial Sequence
  Synthetic
gauucgcacuccuccagcc

SEQ ID NO: 138561 - RNA, 20 nt, Artificial Sequence
  Synthetic
ggauucgcacuccuccagcc

SEQ ID NO: 138562 - RNA, 21 nt, Artificial Sequence
  Synthetic
uggauucgcacuccuccagcc

SEQ ID NO: 138563 - RNA, 22 nt, Artificial Sequence
  Synthetic
guggauucgcacuccuccagcc

SEQ ID NO: 138564 - RNA, 23 nt, Artificial Sequence
  Synthetic
uguggauucgcacuccuccagcc

SEQ ID NO: 138565 - RNA, 24 nt, Artificial Sequence
  Synthetic
guguggauucgcacuccuccagcc

SEQ ID NO: 138566 - RNA, 18 nt, Artificial Sequence
  Synthetic
  misc_feature (3)..(3): n is a, c, g, or u
gunuuuugggguggagcc

SEQ ID NO: 138567 - RNA, 19 nt, Artificial Sequence
  Synthetic
  misc_feature (4)..(4): n is a, c, g, or u
ggunuuuugggguggagcc

SEQ ID NO: 138568 - RNA, 20 nt, Artificial Sequence
  Synthetic
  misc_feature (1)..(1): n is a, c, g, or u
  misc_feature (5)..(5): n is a, c, g, or u
nggunuuuugggguggagcc

SEQ ID NO: 138569 - RNA, 21 nt, Artificial Sequence
  Synthetic
  misc_feature (2)..(2): n is a, c, g, or u
  misc_feature (6)..(6): n is a, c, g, or u
gnggunuuuugggguggagcc

SEQ ID NO: 138570 - RNA, 22 nt, Artificial Sequence
  Synthetic
  misc_feature (3)..(3): n is a, c, g, or u
  misc_feature (7)..(7): n is a, c, g, or u
ggnggunuuuugggguggagcc

SEQ ID NO: 138571 - RNA, 23 nt, Artificial Sequence
  Synthetic
  misc_feature (4)..(4): n is a, c, g, or u
  misc_feature (8)..(8): n is a, c, g, or u
cggnggunuuuugggguggagcc

SEQ ID NO: 138572 - RNA, 24 nt, Artificial Sequence
  Synthetic
  misc_feature (5)..(5): n is a, c, g, or u
  misc_feature (9)..(9): n is a, c, g, or u
acggnggunuuuugggguggagcc

SEQ ID NO: 138573 - RNA, 18 nt, Artificial Sequence
  Synthetic
  misc_feature (11)..(11): n is a, c, g, or u
  misc_feature (14)..(14): n is a, c, g, or u
ggggcuuggcnaunggcc

SEQ ID NO: 138574 - RNA, 19 nt, Artificial Sequence
  Synthetic
  misc_feature (12)..(12): n is a, c, g, or u
  misc_feature (15)..(15): n is a, c, g, or u
uggggcuuggcnaunggcc

SEQ ID NO: 138575 - RNA, 20 nt, Artificial Sequence
  Synthetic
  misc_feature (13)..(13): n is a, c, g, or u
  misc_feature (16)..(16): n is a, c, g, or u
cuggggcuuggcnaunggcc

SEQ ID NO: 138576 - RNA, 21 nt, Artificial Sequence
  Synthetic
  misc_feature (14)..(14): n is a, c, g, or u
  misc_feature (17)..(17): n is a, c, g, or u
gcuggggcuuggcnaunggcc

SEQ ID NO: 138577 - RNA, 22 nt, Artificial Sequence
  Synthetic
  misc_feature (15)..(15): n is a, c, g, or u
  misc_feature (18)..(18): n is a, c, g, or u
ggcuggggcuuggcnaunggcc

SEQ ID NO: 138578 - RNA, 23 nt, Artificial Sequence
  Synthetic
  misc_feature (16)..(16): n is a, c, g, or u
  misc_feature (19)..(19): n is a, c, g, or u
uggcuggggcuuggcnaunggcc

SEQ ID NO: 138579 - RNA, 24 nt, Artificial Sequence
  Synthetic
  misc_feature (17)..(17): n is a, c, g, or u
  misc_feature (20)..(20): n is a, c, g, or u
cuggcuggggcuuggcnaunggcc

SEQ ID NO: 138580 - RNA, 18 nt, Artificial Sequence
  Synthetic
caucaaggaccacuggcc

SEQ ID NO: 138581 - RNA, 19 nt, Artificial Sequence
  Synthetic
ccaucaaggaccacuggcc

SEQ ID NO: 138582 - RNA, 20 nt, Artificial Sequence
  Synthetic
cccaucaaggaccacuggcc

SEQ ID NO: 138583 - RNA, 21 nt, Artificial Sequence
  Synthetic
ccccaucaaggaccacuggcc

SEQ ID NO: 138584 - RNA, 22 nt, Artificial Sequence
  Synthetic
accccaucaaggaccacuggcc

SEQ ID NO: 138585 - RNA, 23 nt, Artificial Sequence
  Synthetic
aaccccaucaaggaccacuggcc

SEQ ID NO: 138586 - RNA, 24 nt, Artificial Sequence
  Synthetic
caaccccaucaaggaccacuggcc

SEQ ID NO: 138587 - RNA, 18 nt, Artificial Sequence
  Synthetic
  misc_feature (16)..(16): n is a, c, g, or u
ucuuucuguucccaancc

SEQ ID NO: 138588 - RNA, 19 nt, Artificial Sequence
  Synthetic
  misc_feature (17)..(17): n is a, c, g, or u
aucuuucuguucccaancc

SEQ ID NO: 138589 - RNA, 20 nt, Artificial Sequence
  Synthetic
  misc_feature (18)..(18): n is a, c, g, or u
aaucuuucuguucccaancc

SEQ ID NO: 138590 - RNA, 21 nt, Artificial Sequence
  Synthetic
  misc_feature (19)..(19): n is a, c, g, or u
gaaucuuucuguucccaancc

SEQ ID NO: 138591 - RNA, 22 nt, Artificial Sequence
  Synthetic
  misc_feature (20)..(20): n is a, c, g, or u
cgaaucuuucuguucccaancc

SEQ ID NO: 138592 - RNA, 23 nt, Artificial Sequence
  Synthetic
  misc_feature (21)..(21): n is a, c, g, or u
acgaaucuuucuguucccaancc

SEQ ID NO: 138593 - RNA, 24 nt, Artificial Sequence
  Synthetic
  misc_feature (22)..(22): n is a, c, g, or u
gacgaaucuuucuguucccaancc

SEQ ID NO: 138594 - RNA, 18 nt, Artificial Sequence
  Synthetic
  misc_feature (2)..(3): n is a, c, g, or u
  misc_feature (16)..(16): n is a, c, g, or u
cnncacuaaauauuuncc

SEQ ID NO: 138595 - RNA, 19 nt, Artificial Sequence
  Synthetic
  misc_feature (1)..(1): n is a, c, g, or u
  misc_feature (3)..(4): n is a, c, g, or u
  misc_feature (17)..(17): n is a, c, g, or u
ncnncacuaaauauuuncc

SEQ ID NO: 138596 - RNA, 20 nt, Artificial Sequence
  Synthetic
  misc_feature (2)..(2): n is a, c, g, or u
  misc_feature (4)..(5): n is a, c, g, or u
  misc_feature (18)..(18): n is a, c, g, or u
ancnncacuaaauauuuncc

SEQ ID NO: 138597 - RNA, 21 nt, Artificial Sequence
  Synthetic
  misc_feature (3)..(3): n is a, c, g, or u
  misc_feature (5)..(6): n is a, c, g, or u
  misc_feature (19)..(19): n is a, c, g, or u
uancnncacuaaauauuuncc

SEQ ID NO: 138598 - RNA, 22 nt, Artificial Sequence
  Synthetic
  misc_feature (4)..(4): n is a, c, g, or u
  misc_feature (6)..(7): n is a, c, g, or u
  misc_feature (20)..(20): n is a, c, g, or u
cuancnncacuaaauauuuncc

SEQ ID NO: 138599 - RNA, 23 nt, Artificial Sequence
  Synthetic
  misc_feature (5)..(5): n is a, c, g, or u
  misc_feature (7)..(8): n is a, c, g, or u
  misc_feature (21)..(21): n is a, c, g, or u
ccuancnncacuaaauauuuncc

SEQ ID NO: 138600 - RNA, 24 nt, Artificial Sequence
  Synthetic
  misc_feature (6)..(6): n is a, c, g, or u
  misc_feature (8)..(9): n is a, c, g, or u
  misc_feature (22)..(22): n is a, c, g, or u
uccuancnncacuaaauauuuncc

SEQ ID NO: 138601 - RNA, 18 nt, Artificial Sequence
  Synthetic
cccgucggcgcugaaucc

SEQ ID NO: 138602 - RNA, 19 nt, Artificial Sequence
  Synthetic
ucccgucggcgcugaaucc

SEQ ID NO: 138603 - RNA, 20 nt, Artificial Sequence
  Synthetic
gucccgucggcgcugaaucc

SEQ ID NO: 138604 - RNA, 18 nt, Artificial Sequence
  Synthetic
ucuaagagacagucaucc

SEQ ID NO: 138605 - RNA, 19 nt, Artificial Sequence
  Synthetic
cucuaagagacagucaucc

SEQ ID NO: 138606 - RNA, 20 nt, Artificial Sequence
  Synthetic
ccucuaagagacagucaucc

SEQ ID NO: 138607 - RNA, 21 nt, Artificial Sequence
  Synthetic
accucuaagagacagucaucc

SEQ ID NO: 138608 - RNA, 22 nt, Artificial Sequence
  Synthetic
caccucuaagagacagucaucc

SEQ ID NO: 138609 - RNA, 23 nt, Artificial Sequence
  Synthetic
ccaccucuaagagacagucaucc

SEQ ID NO: 138610 - RNA, 24 nt, Artificial Sequence
  Synthetic
uccaccucuaagagacagucaucc

SEQ ID NO: 138611 - RNA, 18 nt, Artificial Sequence
  Synthetic
aguguggauucgcacucc

SEQ ID NO: 138612 - RNA, 19 nt, Artificial Sequence
  Synthetic
gaguguggauucgcacucc

SEQ ID NO: 138613 - RNA, 20 nt, Artificial Sequence
  Synthetic
ggaguguggauucgcacucc

SEQ ID NO: 138614 - RNA, 18 nt, Artificial Sequence
  Synthetic
cacaucucgucaaucucc

SEQ ID NO: 138615 - RNA, 19 nt, Artificial Sequence
  Synthetic
ucacaucucgucaaucucc

SEQ ID NO: 138616 - RNA, 20 nt, Artificial Sequence
  Synthetic
cucacaucucgucaaucucc

SEQ ID NO: 138617 - RNA, 18 nt, Artificial Sequence
  Synthetic
  misc_feature (3)..(3): n is a, c, g, or u
cgngaccgaggcaggucc

SEQ ID NO: 138618 - RNA, 19 nt, Artificial Sequence
  Synthetic
  misc_feature (4)..(4): n is a, c, g, or u
acgngaccgaggcaggucc

SEQ ID NO: 138619 - RNA, 20 nt, Artificial Sequence
  Synthetic
  misc_feature (5)..(5): n is a, c, g, or u
gacgngaccgaggcaggucc

SEQ ID NO: 138620 - RNA, 21 nt, Artificial Sequence
  Synthetic
  misc_feature (6)..(6): n is a, c, g, or u
cgacgngaccgaggcaggucc

SEQ ID NO: 138621 - RNA, 22 nt, Artificial Sequence
  Synthetic
  misc_feature (7)..(7): n is a, c, g, or u
acgacgngaccgaggcaggucc

SEQ ID NO: 138622 - RNA, 23 nt, Artificial Sequence
  Synthetic
  misc_feature (8)..(8): n is a, c, g, or u
gacgacgngaccgaggcaggucc

SEQ ID NO: 138623 - RNA, 24 nt, Artificial Sequence
  Synthetic
  misc_feature (9)..(9): n is a, c, g, or u
agacgacgngaccgaggcaggucc

SEQ ID NO: 138624 - RNA, 18 nt, Artificial Sequence
  Synthetic
acaucacaucaggauucc

SEQ ID NO: 138625 - RNA, 19 nt, Artificial Sequence
  Synthetic
aacaucacaucaggauucc

SEQ ID NO: 138626 - RNA, 20 nt, Artificial Sequence
  Synthetic
gaacaucacaucaggauucc

SEQ ID NO: 138627 - RNA, 21 nt, Artificial Sequence
  Synthetic
agaacaucacaucaggauucc

SEQ ID NO: 138628 - RNA, 22 nt, Artificial Sequence
  Synthetic
gagaacaucacaucaggauucc

SEQ ID NO: 138629 - RNA, 23 nt, Artificial Sequence
  Synthetic
ggagaacaucacaucaggauucc

SEQ ID NO: 138630 - RNA, 24 nt, Artificial Sequence
  Synthetic
uggagaacaucacaucaggauucc

SEQ ID NO: 138631 - RNA, 18 nt, Artificial Sequence
  Synthetic
ucucaauguuaguauucc

SEQ ID NO: 138632 - RNA, 19 nt, Artificial Sequence
  Synthetic
aucucaauguuaguauucc

SEQ ID NO: 138633 - RNA, 20 nt, Artificial Sequence
  Synthetic
aaucucaauguuaguauucc

SEQ ID NO: 138634 - RNA, 21 nt, Artificial Sequence
  Synthetic
gaaucucaauguuaguauucc

SEQ ID NO: 138635 - RNA, 22 nt, Artificial Sequence
  Synthetic
ggaaucucaauguuaguauucc

SEQ ID NO: 138636 - RNA, 23 nt, Artificial Sequence
  Synthetic
gggaaucucaauguuaguauucc

SEQ ID NO: 138637 - RNA, 24 nt, Artificial Sequence
  Synthetic
cgggaaucucaauguuaguauucc

SEQ ID NO: 138638 - RNA, 18 nt, Artificial Sequence
  Synthetic
  misc_feature (3)..(3): n is a, c, g, or u
aanagaugggguuauucc

SEQ ID NO: 138639 - RNA, 19 nt, Artificial Sequence
  Synthetic
  misc_feature (4)..(4): n is a, c, g, or u
aaanagaugggguuauucc

SEQ ID NO: 138640 - RNA, 20 nt, Artificial Sequence
  Synthetic
  misc_feature (5)..(5): n is a, c, g, or u
caaanagaugggguuauucc

SEQ ID NO: 138641 - RNA, 21 nt, Artificial Sequence
  Synthetic
  misc_feature (6)..(6): n is a, c, g, or u
acaaanagaugggguuauucc

SEQ ID NO: 138642 - RNA, 22 nt, Artificial Sequence
  Synthetic
  misc_feature (7)..(7): n is a, c, g, or u
aacaaanagaugggguuauucc

SEQ ID NO: 138643 - RNA, 23 nt, Artificial Sequence
  Synthetic
  misc_feature (8)..(8): n is a, c, g, or u
aaacaaanagaugggguuauucc

SEQ ID NO: 138644 - RNA, 24 nt, Artificial Sequence
  Synthetic
  misc_feature (9)..(9): n is a, c, g, or u
aaaacaaanagaugggguuauucc

SEQ ID NO: 138645 - RNA, 18 nt, Artificial Sequence
  Synthetic
uaucuuaucaacacuucc

SEQ ID NO: 138646 - RNA, 19 nt, Artificial Sequence
  Synthetic
cuaucuuaucaacacuucc

SEQ ID NO: 138647 - RNA, 20 nt, Artificial Sequence
  Synthetic
ccuaucuuaucaacacuucc

SEQ ID NO: 138648 - RNA, 21 nt, Artificial Sequence
  Synthetic
cccuaucuuaucaacacuucc

SEQ ID NO: 138649 - RNA, 22 nt, Artificial Sequence
  Synthetic
ccccuaucuuaucaacacuucc

SEQ ID NO: 138650 - RNA, 23 nt, Artificial Sequence
  Synthetic
gccccuaucuuaucaacacuucc

SEQ ID NO: 138651 - RNA, 24 nt, Artificial Sequence
  Synthetic
ugccccuaucuuaucaacacuucc

SEQ ID NO: 138652 - RNA, 18 nt, Artificial Sequence
  Synthetic
  misc_feature (13)..(13): n is a, c, g, or u
agcucuguaucgngaagc

SEQ ID NO: 138653 - RNA, 19 nt, Artificial Sequence
  Synthetic
  misc_feature (14)..(14): n is a, c, g, or u
cagcucuguaucgngaagc

SEQ ID NO: 138654 - RNA, 20 nt, Artificial Sequence
  Synthetic
  misc_feature (15)..(15): n is a, c, g, or u
ucagcucuguaucgngaagc

SEQ ID NO: 138655 - RNA, 21 nt, Artificial Sequence
  Synthetic
  misc_feature (16)..(16): n is a, c, g, or u
cucagcucuguaucgngaagc

SEQ ID NO: 138656 - RNA, 22 nt, Artificial Sequence
  Synthetic
  misc_feature (17)..(17): n is a, c, g, or u
ccucagcucuguaucgngaagc

SEQ ID NO: 138657 - RNA, 23 nt, Artificial Sequence
  Synthetic
  misc_feature (18)..(18): n is a, c, g, or u
gccucagcucuguaucgngaagc

SEQ ID NO: 138658 - RNA, 24 nt, Artificial Sequence
  Synthetic
  misc_feature (1)..(1): n is a, c, g, or u
  misc_feature (19)..(19): n is a, c, g, or u
ngccucagcucuguaucgngaagc

SEQ ID NO: 138659 - RNA, 18 nt, Artificial Sequence
  Synthetic
  misc_feature (9)..(9): n is a, c, g, or u
gaccccucncggggccgc

SEQ ID NO: 138660 - RNA, 19 nt, Artificial Sequence
  Synthetic
  misc_feature (10)..(10): n is a, c, g, or u
cgaccccucncggggccgc

SEQ ID NO: 138661 - RNA, 20 nt, Artificial Sequence
  Synthetic
  misc_feature (11)..(11): n is a, c, g, or u
acgaccccucncggggccgc

SEQ ID NO: 138662 - RNA, 21 nt, Artificial Sequence
  Synthetic
  misc_feature (12)..(12): n is a, c, g, or u
gacgaccccucncggggccgc

SEQ ID NO: 138663 - RNA, 22 nt, Artificial Sequence
  Synthetic
  misc_feature (13)..(13): n is a, c, g, or u
ggacgaccccucncggggccgc

SEQ ID NO: 138664 - RNA, 23 nt, Artificial Sequence
  Synthetic
  misc_feature (14)..(14): n is a, c, g, or u
cggacgaccccucncggggccgc

SEQ ID NO: 138665 - RNA, 24 nt, Artificial Sequence
  Synthetic
  misc_feature (15)..(15): n is a, c, g, or u
gcggacgaccccucncggggccgc

SEQ ID NO: 138666 - RNA, 18 nt, Artificial Sequence
  Synthetic
uggucaucaaaaccucgc

SEQ ID NO: 138667 - RNA, 19 nt, Artificial Sequence
  Synthetic
uuggucaucaaaaccucgc

SEQ ID NO: 138668 - RNA, 20 nt, Artificial Sequence
  Synthetic
guuggucaucaaaaccucgc

SEQ ID NO: 138669 - RNA, 21 nt, Artificial Sequence
  Synthetic
gguuggucaucaaaaccucgc

SEQ ID NO: 138670 - RNA, 22 nt, Artificial Sequence
  Synthetic
agguuggucaucaaaaccucgc

SEQ ID NO: 138671 - RNA, 23 nt, Artificial Sequence
  Synthetic
gagguuggucaucaaaaccucgc

SEQ ID NO: 138672 - RNA, 24 nt, Artificial Sequence
  Synthetic
ggagguuggucaucaaaaccucgc

SEQ ID NO: 138673 - RNA, 18 nt, Artificial Sequence
  Synthetic
ucucaaucgccgcgucgc

SEQ ID NO: 138674 - RNA, 19 nt, Artificial Sequence
  Synthetic
aucucaaucgccgcgucgc

SEQ ID NO: 138675 - RNA, 20 nt, Artificial Sequence
  Synthetic
gaucucaaucgccgcgucgc

SEQ ID NO: 138676 - RNA, 18 nt, Artificial Sequence
  Synthetic
ucaaaaccucgcaaaggc

SEQ ID NO: 138677 - RNA, 19 nt, Artificial Sequence
  Synthetic
aucaaaaccucgcaaaggc

SEQ ID NO: 138678 - RNA, 20 nt, Artificial Sequence
  Synthetic
caucaaaaccucgcaaaggc

SEQ ID NO: 138679 - RNA, 21 nt, Artificial Sequence
  Synthetic
ucaucaaaaccucgcaaaggc

SEQ ID NO: 138680 - RNA, 22 nt, Artificial Sequence
  Synthetic
gucaucaaaaccucgcaaaggc

SEQ ID NO: 138681 - RNA, 23 nt, Artificial Sequence
  Synthetic
ggucaucaaaaccucgcaaaggc

SEQ ID NO: 138682 - RNA, 24 nt, Artificial Sequence
  Synthetic
uggucaucaaaaccucgcaaaggc

SEQ ID NO: 138683 - RNA, 18 nt, Artificial Sequence
  Synthetic
gggguggagcccucaggc

SEQ ID NO: 138684 - RNA, 19 nt, Artificial Sequence
  Synthetic
ugggguggagcccucaggc

SEQ ID NO: 138685 - RNA, 20 nt, Artificial Sequence
  Synthetic
uugggguggagcccucaggc

SEQ ID NO: 138686 - RNA, 21 nt, Artificial Sequence
  Synthetic
uuugggguggagcccucaggc

SEQ ID NO: 138687 - RNA, 22 nt, Artificial Sequence
  Synthetic
uuuugggguggagcccucaggc

SEQ ID NO: 138688 - RNA, 23 nt, Artificial Sequence
  Synthetic
  misc_feature (1)..(1): n is a, c, g, or u
nuuuugggguggagcccucaggc

SEQ ID NO: 138689 - RNA, 24 nt, Artificial Sequence
  Synthetic
  misc_feature (2)..(2): n is a, c, g, or u
unuuuugggguggagcccucaggc

SEQ ID NO: 138690 - RNA, 18 nt, Artificial Sequence
  Synthetic
  misc_feature (1)..(1): n is a, c, g, or u
nucuuuguauuaggaggc

SEQ ID NO: 138691 - RNA, 19 nt, Artificial Sequence
  Synthetic
  misc_feature (2)..(2): n is a, c, g, or u
gnucuuuguauuaggaggc

SEQ ID NO: 138692 - RNA, 20 nt, Artificial Sequence
  Synthetic
  misc_feature (1)..(1): n is a, c, g, or u
  misc_feature (3)..(3): n is a, c, g, or u
ngnucuuuguauuaggaggc

SEQ ID NO: 138693 - RNA, 21 nt, Artificial Sequence
  Synthetic
  misc_feature (2)..(2): n is a, c, g, or u
  misc_feature (4)..(4): n is a, c, g, or u
angnucuuuguauuaggaggc

SEQ ID NO: 138694 - RNA, 22 nt, Artificial Sequence
  Synthetic
  misc_feature (3)..(3): n is a, c, g, or u
  misc_feature (5)..(5): n is a, c, g, or u
aangnucuuuguauuaggaggc

SEQ ID NO: 138695 - RNA, 23 nt, Artificial Sequence
  Synthetic
  misc_feature (4)..(4): n is a, c, g, or u
  misc_feature (6)..(6): n is a, c, g, or u
uaangnucuuuguauuaggaggc

SEQ ID NO: 138696 - RNA, 24 nt, Artificial Sequence
  Synthetic
  misc_feature (5)..(5): n is a, c, g, or u
  misc_feature (7)..(7): n is a, c, g, or u
uuaangnucuuuguauuaggaggc

SEQ ID NO: 138697 - RNA, 18 nt, Artificial Sequence
  Synthetic
  misc_feature (14)..(14): n is a, c, g, or u
uuuaccccguugcncggc

SEQ ID NO: 138698 - RNA, 19 nt, Artificial Sequence
  Synthetic
  misc_feature (15)..(15): n is a, c, g, or u
cuuuaccccguugcncggc

SEQ ID NO: 138699 - RNA, 20 nt, Artificial Sequence
  Synthetic
  misc_feature (16)..(16): n is a, c, g, or u
ccuuuaccccguugcncggc

SEQ ID NO: 138700 - RNA, 18 nt, Artificial Sequence
  Synthetic
uguuuacgucccgucggc

SEQ ID NO: 138701 - RNA, 19 nt, Artificial Sequence
  Synthetic
uuguuuacgucccgucggc

SEQ ID NO: 138702 - RNA, 20 nt, Artificial Sequence
  Synthetic
uuuguuuacgucccgucggc

SEQ ID NO: 138703 - RNA, 21 nt, Artificial Sequence
  Synthetic
cuuuguuuacgucccgucggc

SEQ ID NO: 138704 - RNA, 22 nt, Artificial Sequence
  Synthetic
ccuuuguuuacgucccgucggc

SEQ ID NO: 138705 - RNA, 23 nt, Artificial Sequence
  Synthetic
uccuuuguuuacgucccgucggc

SEQ ID NO: 138706 - RNA, 24 nt, Artificial Sequence
  Synthetic
guccuuuguuuacgucccgucggc

SEQ ID NO: 138707 - RNA, 18 nt, Artificial Sequence
  Synthetic
gagugggagcauucgggc

SEQ ID NO: 138708 - RNA, 19 nt, Artificial Sequence
  Synthetic
ggagugggagcauucgggc

SEQ ID NO: 138709 - RNA, 20 nt, Artificial Sequence
  Synthetic
aggagugggagcauucgggc

SEQ ID NO: 138710 - RNA, 21 nt, Artificial Sequence
  Synthetic
uaggagugggagcauucgggc

SEQ ID NO: 138711 - RNA, 22 nt, Artificial Sequence
  Synthetic
guaggagugggagcauucgggc

SEQ ID NO: 138712 - RNA, 23 nt, Artificial Sequence
  Synthetic
gguaggagugggagcauucgggc

SEQ ID NO: 138713 - RNA, 24 nt, Artificial Sequence
  Synthetic
agguaggagugggagcauucgggc

SEQ ID NO: 138714 - RNA, 18 nt, Artificial Sequence
  Synthetic
  misc_feature (6)..(6): n is a, c, g, or u
cuuggnuggcuuuggggc

SEQ ID NO: 138715 - RNA, 19 nt, Artificial Sequence
  Synthetic
  misc_feature (7)..(7): n is a, c, g, or u
ccuuggnuggcuuuggggc

SEQ ID NO: 138716 - RNA, 20 nt, Artificial Sequence
  Synthetic
  misc_feature (8)..(8): n is a, c, g, or u
gccuuggnuggcuuuggggc

SEQ ID NO: 138717 - RNA, 21 nt, Artificial Sequence
  Synthetic
  misc_feature (9)..(9): n is a, c, g, or u
ugccuuggnuggcuuuggggc

SEQ ID NO: 138718 - RNA, 22 nt, Artificial Sequence
  Synthetic
  misc_feature (10)..(10): n is a, c, g, or u
gugccuuggnuggcuuuggggc

SEQ ID NO: 138719 - RNA, 23 nt, Artificial Sequence
  Synthetic
  misc_feature (11)..(11): n is a, c, g, or u
ugugccuuggnuggcuuuggggc

SEQ ID NO: 138720 - RNA, 24 nt, Artificial Sequence
  Synthetic
  misc_feature (12)..(12): n is a, c, g, or u
cugugccuuggnuggcuuuggggc

SEQ ID NO: 138721 - RNA, 18 nt, Artificial Sequence
  Synthetic
gacgcaacccccacuggc

SEQ ID NO: 138722 - RNA, 19 nt, Artificial Sequence
  Synthetic
ugacgcaacccccacuggc

SEQ ID NO: 138723 - RNA, 20 nt, Artificial Sequence
  Synthetic
cugacgcaacccccacuggc

SEQ ID NO: 138724 - RNA, 21 nt, Artificial Sequence
  Synthetic
gcugacgcaacccccacuggc

SEQ ID NO: 138725 - RNA, 22 nt, Artificial Sequence
  Synthetic
ugcugacgcaacccccacuggc

SEQ ID NO: 138726 - RNA, 23 nt, Artificial Sequence
  Synthetic
uugcugacgcaacccccacuggc

SEQ ID NO: 138727 - RNA, 24 nt, Artificial Sequence
  Synthetic
uuugcugacgcaacccccacuggc

SEQ ID NO: 138728 - RNA, 18 nt, Artificial Sequence
  Synthetic
  misc_feature (14)..(14): n is a, c, g, or u
agcugugccuuggnuggc

SEQ ID NO: 138729 - RNA, 19 nt, Artificial Sequence
  Synthetic
  misc_feature (15)..(15): n is a, c, g, or u
aagcugugccuuggnuggc

SEQ ID NO: 138730 - RNA, 20 nt, Artificial Sequence
  Synthetic
  misc_feature (16)..(16): n is a, c, g, or u
caagcugugccuuggnuggc

SEQ ID NO: 138731 - RNA, 21 nt, Artificial Sequence
  Synthetic
  misc_feature (17)..(17): n is a, c, g, or u
ccaagcugugccuuggnuggc

SEQ ID NO: 138732 - RNA, 22 nt, Artificial Sequence
  Synthetic
  misc_feature (18)..(18): n is a, c, g, or u
uccaagcugugccuuggnuggc

SEQ ID NO: 138733 - RNA, 23 nt, Artificial Sequence
  Synthetic
  misc_feature (19)..(19): n is a, c, g, or u
cuccaagcugugccuuggnuggc

SEQ ID NO: 138734 - RNA, 24 nt, Artificial Sequence
  Synthetic
  misc_feature (20)..(20): n is a, c, g, or u
ccuccaagcugugccuuggnuggc

SEQ ID NO: 138735 - RNA, 18 nt, Artificial Sequence
  Synthetic
  misc_feature (1)..(1): n is a, c, g, or u
  misc_feature (7)..(7): n is a, c, g, or u
  misc_feature (10)..(10): n is a, c, g, or u
  misc_feature (13)..(13): n is a, c, g, or u
  misc_feature (16)..(16): n is a, c, g, or u
ngaucuncunganacngc

SEQ ID NO: 138736 - RNA, 19 nt, Artificial Sequence
  Synthetic
  misc_feature (2)..(2): n is a, c, g, or u
  misc_feature (8)..(8): n is a, c, g, or u
  misc_feature (11)..(11): n is a, c, g, or u
  misc_feature (14)..(14): n is a, c, g, or u
  misc_feature (17)..(17): n is a, c, g, or u
gngaucuncunganacngc

SEQ ID NO: 138737 - RNA, 20 nt, Artificial Sequence
  Synthetic
  misc_feature (1)..(1): n is a, c, g, or u
  misc_feature (3)..(3): n is a, c, g, or u
  misc_feature (9)..(9): n is a, c, g, or u
  misc_feature (12)..(12): n is a, c, g, or u
  misc_feature (15)..(15): n is a, c, g, or u
  misc_feature (18)..(18): n is a, c, g, or u
ngngaucuncunganacngc

SEQ ID NO: 138738 - RNA, 21 nt, Artificial Sequence
  Synthetic
  misc_feature (2)..(2): n is a, c, g, or u
  misc_feature (4)..(4): n is a, c, g, or u
  misc_feature (10)..(10): n is a, c, g, or u
  misc_feature (13)..(13): n is a, c, g, or u
  misc_feature (16)..(16): n is a, c, g, or u
  misc_feature (19)..(19): n is a, c, g, or u
cngngaucuncunganacngc

SEQ ID NO: 138739 - RNA, 22 nt, Artificial Sequence
  Synthetic
  misc_feature (3)..(3): n is a, c, g, or u
  misc_feature (5)..(5): n is a, c, g, or u
  misc_feature (11)..(11): n is a, c, g, or u
  misc_feature (14)..(14): n is a, c, g, or u
  misc_feature (17)..(17): n is a, c, g, or u
  misc_feature (20)..(20): n is a, c, g, or u
ucngngaucuncunganacngc

SEQ ID NO: 138740 - RNA, 23 nt, Artificial Sequence
  Synthetic
  misc_feature (4)..(4): n is a, c, g, or u
  misc_feature (6)..(6): n is a, c, g, or u
  misc_feature (12)..(12): n is a, c, g, or u
  misc_feature (15)..(15): n is a, c, g, or u
  misc_feature (18)..(18): n is a, c, g, or u
  misc_feature (21)..(21): n is a, c, g, or u
gucngngaucuncunganacngc

SEQ ID NO: 138741 - RNA, 24 nt, Artificial Sequence
  Synthetic
  misc_feature (5)..(5): n is a, c, g, or u
  misc_feature (7)..(7): n is a, c, g, or u
  misc_feature (13)..(13): n is a, c, g, or u
  misc_feature (16)..(16): n is a, c, g, or u
  misc_feature (19)..(19): n is a, c, g, or u
  misc_feature (22)..(22): n is a, c, g, or u
cgucngngaucuncunganacngc

SEQ ID NO: 138742 - RNA, 18 nt, Artificial Sequence
  Synthetic
gucauccucaggccaugc

SEQ ID NO: 138743 - RNA, 19 nt, Artificial Sequence
  Synthetic
agucauccucaggccaugc

SEQ ID NO: 138744 - RNA, 20 nt, Artificial Sequence
  Synthetic
cagucauccucaggccaugc

SEQ ID NO: 138745 - RNA, 21 nt, Artificial Sequence
  Synthetic
acagucauccucaggccaugc

SEQ ID NO: 138746 - RNA, 22 nt, Artificial Sequence
  Synthetic
gacagucauccucaggccaugc

SEQ ID NO: 138747 - RNA, 23 nt, Artificial Sequence
  Synthetic
agacagucauccucaggccaugc

SEQ ID NO: 138748 - RNA, 24 nt, Artificial Sequence
  Synthetic
gagacagucauccucaggccaugc

SEQ ID NO: 138749 - RNA, 18 nt, Artificial Sequence
  Synthetic
  misc_feature (2)..(2): n is a, c, g, or u
unggccaucagcgcaugc

SEQ ID NO: 138750 - RNA, 19 nt, Artificial Sequence
  Synthetic
  misc_feature (3)..(3): n is a, c, g, or u
aunggccaucagcgcaugc

SEQ ID NO: 138751 - RNA, 20 nt, Artificial Sequence
  Synthetic
  misc_feature (1)..(1): n is a, c, g, or u
  misc_feature (4)..(4): n is a, c, g, or u
naunggccaucagcgcaugc

SEQ ID NO: 138752 - RNA, 21 nt, Artificial Sequence
  Synthetic
  misc_feature (2)..(2): n is a, c, g, or u
  misc_feature (5)..(5): n is a, c, g, or u
cnaunggccaucagcgcaugc

SEQ ID NO: 138753 - RNA, 22 nt, Artificial Sequence
  Synthetic
  misc_feature (3)..(3): n is a, c, g, or u
  misc_feature (6)..(6): n is a, c, g, or u
gcnaunggccaucagcgcaugc

SEQ ID NO: 138754 - RNA, 23 nt, Artificial Sequence
  Synthetic
  misc_feature (4)..(4): n is a, c, g, or u
  misc_feature (7)..(7): n is a, c, g, or u
ggcnaunggccaucagcgcaugc

SEQ ID NO: 138755 - RNA, 24 nt, Artificial Sequence
  Synthetic
  misc_feature (5)..(5): n is a, c, g, or u
  misc_feature (8)..(8): n is a, c, g, or u
uggcnaunggccaucagcgcaugc

SEQ ID NO: 138756 - RNA, 18 nt, Artificial Sequence
  Synthetic
acgcccaucagauccugc

SEQ ID NO: 138757 - RNA, 19 nt, Artificial Sequence
  Synthetic
aacgcccaucagauccugc

SEQ ID NO: 138758 - RNA, 20 nt, Artificial Sequence
  Synthetic
gaacgcccaucagauccugc

SEQ ID NO: 138759 - RNA, 21 nt, Artificial Sequence
  Synthetic
ugaacgcccaucagauccugc

SEQ ID NO: 138760 - RNA, 22 nt, Artificial Sequence
  Synthetic
gugaacgcccaucagauccugc

SEQ ID NO: 138761 - RNA, 23 nt, Artificial Sequence
  Synthetic
cgugaacgcccaucagauccugc

SEQ ID NO: 138762 - RNA, 24 nt, Artificial Sequence
  Synthetic
ccgugaacgcccaucagauccugc

SEQ ID NO: 138763 - RNA, 18 nt, Artificial Sequence
  Synthetic
aaccugcacgacuccugc

SEQ ID NO: 138764 - RNA, 19 nt, Artificial Sequence
  Synthetic
aaaccugcacgacuccugc

SEQ ID NO: 138765 - RNA, 20 nt, Artificial Sequence
  Synthetic
aaaaccugcacgacuccugc

SEQ ID NO: 138766 - RNA, 21 nt, Artificial Sequence
  Synthetic
caaaaccugcacgacuccugc

SEQ ID NO: 138767 - RNA, 22 nt, Artificial Sequence
  Synthetic
gcaaaaccugcacgacuccugc

SEQ ID NO: 138768 - RNA, 23 nt, Artificial Sequence
  Synthetic
ugcaaaaccugcacgacuccugc

SEQ ID NO: 138769 - RNA, 24 nt, Artificial Sequence
  Synthetic
  misc_feature (1)..(1): n is a, c, g, or u
nugcaaaaccugcacgacuccugc

SEQ ID NO: 138770 - RNA, 18 nt, Artificial Sequence
  Synthetic
aggcaagccauucucugc

SEQ ID NO: 138771 - RNA, 19 nt, Artificial Sequence
  Synthetic
caggcaagccauucucugc

SEQ ID NO: 138772 - RNA, 20 nt, Artificial Sequence
  Synthetic
ucaggcaagccauucucugc

SEQ ID NO: 138773 - RNA, 21 nt, Artificial Sequence
  Synthetic
cucaggcaagccauucucugc

SEQ ID NO: 138774 - RNA, 22 nt, Artificial Sequence
  Synthetic
acucaggcaagccauucucugc

SEQ ID NO: 138775 - RNA, 23 nt, Artificial Sequence
  Synthetic
cacucaggcaagccauucucugc

SEQ ID NO: 138776 - RNA, 24 nt, Artificial Sequence
  Synthetic
gcacucaggcaagccauucucugc

SEQ ID NO: 138777 - RNA, 18 nt, Artificial Sequence
  Synthetic
caagccuccaagcugugc

SEQ ID NO: 138778 - RNA, 19 nt, Artificial Sequence
  Synthetic
ucaagccuccaagcugugc

SEQ ID NO: 138779 - RNA, 20 nt, Artificial Sequence
  Synthetic
uucaagccuccaagcugugc

SEQ ID NO: 138780 - RNA, 21 nt, Artificial Sequence
  Synthetic
  misc_feature (1)..(1): n is a, c, g, or u
nuucaagccuccaagcugugc

SEQ ID NO: 138781 - RNA, 22 nt, Artificial Sequence
  Synthetic
  misc_feature (2)..(2): n is a, c, g, or u
unuucaagccuccaagcugugc

SEQ ID NO: 138782 - RNA, 23 nt, Artificial Sequence
  Synthetic
  misc_feature (3)..(3): n is a, c, g, or u
cunuucaagccuccaagcugugc

SEQ ID NO: 138783 - RNA, 24 nt, Artificial Sequence
  Synthetic
  misc_feature (4)..(4): n is a, c, g, or u
acunuucaagccuccaagcugugc

SEQ ID NO: 138784 - RNA, 18 nt, Artificial Sequence
  Synthetic
uucaccucugcacguugc

SEQ ID NO: 138785 - RNA, 19 nt, Artificial Sequence
  Synthetic
cuucaccucugcacguugc

SEQ ID NO: 138786 - RNA, 20 nt, Artificial Sequence
  Synthetic
gcuucaccucugcacguugc

SEQ ID NO: 138787 - RNA, 21 nt, Artificial Sequence
  Synthetic
cgcuucaccucugcacguugc

SEQ ID NO: 138788 - RNA, 22 nt, Artificial Sequence
  Synthetic
ucgcuucaccucugcacguugc

SEQ ID NO: 138789 - RNA, 23 nt, Artificial Sequence
  Synthetic
uucgcuucaccucugcacguugc

SEQ ID NO: 138790 - RNA, 24 nt, Artificial Sequence
  Synthetic
cuucgcuucaccucugcacguugc

SEQ ID NO: 138791 - RNA, 18 nt, Artificial Sequence
  Synthetic
  misc_feature (17)..(17): n is a, c, g, or u
gggaacaagagcuacanc

SEQ ID NO: 138792 - RNA, 19 nt, Artificial Sequence
  Synthetic
  misc_feature (18)..(18): n is a, c, g, or u
ugggaacaagagcuacanc

SEQ ID NO: 138793 - RNA, 20 nt, Artificial Sequence
  Synthetic
  misc_feature (19)..(19): n is a, c, g, or u
uugggaacaagagcuacanc

SEQ ID NO: 138794 - RNA, 21 nt, Artificial Sequence
  Synthetic
  misc_feature (20)..(20): n is a, c, g, or u
cuugggaacaagagcuacanc

SEQ ID NO: 138795 - RNA, 22 nt, Artificial Sequence
  Synthetic
  misc_feature (21)..(21): n is a, c, g, or u
ucuugggaacaagagcuacanc

SEQ ID NO: 138796 - RNA, 23 nt, Artificial Sequence
  Synthetic
  misc_feature (22)..(22): n is a, c, g, or u
uucuugggaacaagagcuacanc

SEQ ID NO: 138797 - RNA, 24 nt, Artificial Sequence
  Synthetic
  misc_feature (23)..(23): n is a, c, g, or u
auucuugggaacaagagcuacanc

SEQ ID NO: 138798 - RNA, 18 nt, Artificial Sequence
  Synthetic
  misc_feature (17)..(17): n is a, c, g, or u
caucucgucaaucuccnc

SEQ ID NO: 138799 - RNA, 19 nt, Artificial Sequence
  Synthetic
  misc_feature (18)..(18): n is a, c, g, or u
acaucucgucaaucuccnc

SEQ ID NO: 138800 - RNA, 20 nt, Artificial Sequence
  Synthetic
  misc_feature (19)..(19): n is a, c, g, or u
cacaucucgucaaucuccnc

SEQ ID NO: 138801 - RNA, 21 nt, Artificial Sequence
  Synthetic
  misc_feature (20)..(20): n is a, c, g, or u
ucacaucucgucaaucuccnc

SEQ ID NO: 138802 - RNA, 22 nt, Artificial Sequence
  Synthetic
  misc_feature (21)..(21): n is a, c, g, or u
cucacaucucgucaaucuccnc

SEQ ID NO: 138803 - RNA, 23 nt, Artificial Sequence
  Synthetic
  misc_feature (22)..(22): n is a, c, g, or u
ucucacaucucgucaaucuccnc

SEQ ID NO: 138804 - RNA, 24 nt, Artificial Sequence
  Synthetic
  misc_feature (23)..(23): n is a, c, g, or u
cucucacaucucgucaaucuccnc

SEQ ID NO: 138805 - RNA, 18 nt, Artificial Sequence
  Synthetic
  misc_feature (17)..(17): n is a, c, g, or u
accuuuaccccguugcnc

SEQ ID NO: 138806 - RNA, 19 nt, Artificial Sequence
  Synthetic
  misc_feature (18)..(18): n is a, c, g, or u
aaccuuuaccccguugcnc

SEQ ID NO: 138807 - RNA, 20 nt, Artificial Sequence
  Synthetic
  misc_feature (19)..(19): n is a, c, g, or u
gaaccuuuaccccguugcnc

SEQ ID NO: 138808 - RNA, 21 nt, Artificial Sequence
  Synthetic
  misc_feature (20)..(20): n is a, c, g, or u
ugaaccuuuaccccguugcnc

SEQ ID NO: 138809 - RNA, 22 nt, Artificial Sequence
  Synthetic
  misc_feature (21)..(21): n is a, c, g, or u
augaaccuuuaccccguugcnc

SEQ ID NO: 138810 - RNA, 23 nt, Artificial Sequence
  Synthetic
  misc_feature (1)..(1): n is a, c, g, or u
  misc_feature (22)..(22): n is a, c, g, or u
naugaaccuuuaccccguugcnc

SEQ ID NO: 138811 - RNA, 24 nt, Artificial Sequence
  Synthetic
  misc_feature (2)..(2): n is a, c, g, or u
  misc_feature (23)..(23): n is a, c, g, or u
anaugaaccuuuaccccguugcnc

SEQ ID NO: 138812 - RNA, 18 nt, Artificial Sequence
  Synthetic
  misc_feature (6)..(6): n is a, c, g, or u
  misc_feature (14)..(14): n is a, c, g, or u
  misc_feature (16)..(17): n is a, c, g, or u
agauunuauccuancnnc

SEQ ID NO: 138813 - RNA, 19 nt, Artificial Sequence
  Synthetic
  misc_feature (7)..(7): n is a, c, g, or u
  misc_feature (15)..(15): n is a, c, g, or u
  misc_feature (17)..(18): n is a, c, g, or u
uagauunuauccuancnnc

SEQ ID NO: 138814 - RNA, 20 nt, Artificial Sequence
  Synthetic
  misc_feature (8)..(8): n is a, c, g, or u
  misc_feature (16)..(16): n is a, c, g, or u
  misc_feature (18)..(19): n is a, c, g, or u
cuagauunuauccuancnnc

SEQ ID NO: 138815 - RNA, 21 nt, Artificial Sequence
  Synthetic
  misc_feature (9)..(9): n is a, c, g, or u
  misc_feature (17)..(17): n is a, c, g, or u
  misc_feature (19)..(20): n is a, c, g, or u
gcuagauunuauccuancnnc

SEQ ID NO: 138816 - RNA, 22 nt, Artificial Sequence
  Synthetic
  misc_feature (10)..(10): n is a, c, g, or u
  misc_feature (18)..(18): n is a, c, g, or u
  misc_feature (20)..(21): n is a, c, g, or u
ugcuagauunuauccuancnnc

SEQ ID NO: 138817 - RNA, 23 nt, Artificial Sequence
  Synthetic
  misc_feature (11)..(11): n is a, c, g, or u
  misc_feature (19)..(19): n is a, c, g, or u
  misc_feature (21)..(22): n is a, c, g, or u
cugcuagauunuauccuancnnc

SEQ ID NO: 138818 - RNA, 24 nt, Artificial Sequence
  Synthetic
  misc_feature (12)..(12): n is a, c, g, or u
  misc_feature (20)..(20): n is a, c, g, or u
  misc_feature (22)..(23): n is a, c, g, or u
ccugcuagauunuauccuancnnc

SEQ ID NO: 138819 - RNA, 18 nt, Artificial Sequence
  Synthetic
ucgcagaagaucucaauc

SEQ ID NO: 138820 - RNA, 19 nt, Artificial Sequence
  Synthetic
gucgcagaagaucucaauc

SEQ ID NO: 138821 - RNA, 20 nt, Artificial Sequence
  Synthetic
cgucgcagaagaucucaauc

SEQ ID NO: 138822 - RNA, 18 nt, Artificial Sequence
  Synthetic
ugggacuucaaccccauc

SEQ ID NO: 138823 - RNA, 19 nt, Artificial Sequence
  Synthetic
uugggacuucaaccccauc

SEQ ID NO: 138824 - RNA, 20 nt, Artificial Sequence
  Synthetic
auugggacuucaaccccauc

SEQ ID NO: 138825 - RNA, 21 nt, Artificial Sequence
  Synthetic
gauugggacuucaaccccauc

SEQ ID NO: 138826 - RNA, 22 nt, Artificial Sequence
  Synthetic
agauugggacuucaaccccauc

SEQ ID NO: 138827 - RNA, 23 nt, Artificial Sequence
  Synthetic
cagauugggacuucaaccccauc

SEQ ID NO: 138828 - RNA, 24 nt, Artificial Sequence
  Synthetic
ccagauugggacuucaaccccauc

SEQ ID NO: 138829 - RNA, 18 nt, Artificial Sequence
  Synthetic
  misc_feature (5)..(5): n is a, c, g, or u
uuugnaagauccagcauc

SEQ ID NO: 138830 - RNA, 19 nt, Artificial Sequence
  Synthetic
  misc_feature (6)..(6): n is a, c, g, or u
auuugnaagauccagcauc

SEQ ID NO: 138831 - RNA, 20 nt, Artificial Sequence
  Synthetic
  misc_feature (7)..(7): n is a, c, g, or u
aauuugnaagauccagcauc

SEQ ID NO: 138832 - RNA, 21 nt, Artificial Sequence
  Synthetic
  misc_feature (8)..(8): n is a, c, g, or u
uaauuugnaagauccagcauc

SEQ ID NO: 138833 - RNA, 22 nt, Artificial Sequence
  Synthetic
  misc_feature (9)..(9): n is a, c, g, or u
auaauuugnaagauccagcauc

SEQ ID NO: 138834 - RNA, 23 nt, Artificial Sequence
  Synthetic
  misc_feature (10)..(10): n is a, c, g, or u
aauaauuugnaagauccagcauc

SEQ ID NO: 138835 - RNA, 24 nt, Artificial Sequence
  Synthetic
  misc_feature (11)..(11): n is a, c, g, or u
uaauaauuugnaagauccagcauc

SEQ ID NO: 138836 - RNA, 18 nt, Artificial Sequence
  Synthetic
  misc_feature (14)..(14): n is a, c, g, or u
ccaagucuguacancauc

SEQ ID NO: 138837 - RNA, 19 nt, Artificial Sequence
  Synthetic
  misc_feature (15)..(15): n is a, c, g, or u
gccaagucuguacancauc

SEQ ID NO: 138838 - RNA, 20 nt, Artificial Sequence
  Synthetic
  misc_feature (16)..(16): n is a, c, g, or u
ggccaagucuguacancauc

SEQ ID NO: 138839 - RNA, 21 nt, Artificial Sequence
  Synthetic
  misc_feature (17)..(17): n is a, c, g, or u
gggccaagucuguacancauc

SEQ ID NO: 138840 - RNA, 22 nt, Artificial Sequence
  Synthetic
  misc_feature (18)..(18): n is a, c, g, or u
ggggccaagucuguacancauc

SEQ ID NO: 138841 - RNA, 23 nt, Artificial Sequence
  Synthetic
  misc_feature (19)..(19): n is a, c, g, or u
gggggccaagucuguacancauc

SEQ ID NO: 138842 - RNA, 24 nt, Artificial Sequence
  Synthetic
  misc_feature (20)..(20): n is a, c, g, or u
ugggggccaagucuguacancauc

SEQ ID NO: 138843 - RNA, 18 nt, Artificial Sequence
  Synthetic
cucuaagagacagucauc

SEQ ID NO: 138844 - RNA, 19 nt, Artificial Sequence
  Synthetic
ccucuaagagacagucauc

SEQ ID NO: 138845 - RNA, 20 nt, Artificial Sequence
  Synthetic
accucuaagagacagucauc

SEQ ID NO: 138846 - RNA, 21 nt, Artificial Sequence
  Synthetic
caccucuaagagacagucauc

SEQ ID NO: 138847 - RNA, 22 nt, Artificial Sequence
  Synthetic
ccaccucuaagagacagucauc

SEQ ID NO: 138848 - RNA, 23 nt, Artificial Sequence
  Synthetic
uccaccucuaagagacagucauc

SEQ ID NO: 138849 - RNA, 24 nt, Artificial Sequence
  Synthetic
cuccaccucuaagagacagucauc

SEQ ID NO: 138850 - RNA, 18 nt, Artificial Sequence
  Synthetic
uccucuaauuccaggauc

SEQ ID NO: 138851 - RNA, 19 nt, Artificial Sequence
  Synthetic
guccucuaauuccaggauc

SEQ ID NO: 138852 - RNA, 20 nt, Artificial Sequence
  Synthetic
uguccucuaauuccaggauc

SEQ ID NO: 138853 - RNA, 21 nt, Artificial Sequence
  Synthetic
uuguccucuaauuccaggauc

SEQ ID NO: 138854 - RNA, 22 nt, Artificial Sequence
  Synthetic
uuuguccucuaauuccaggauc

SEQ ID NO: 138855 - RNA, 23 nt, Artificial Sequence
  Synthetic
guuuguccucuaauuccaggauc

SEQ ID NO: 138856 - RNA, 24 nt, Artificial Sequence
  Synthetic
cguuuguccucuaauuccaggauc

SEQ ID NO: 138857 - RNA, 18 nt, Artificial Sequence
  Synthetic
  misc_feature (14)..(14): n is a, c, g, or u
accaagcucugcangauc

SEQ ID NO: 138858 - RNA, 19 nt, Artificial Sequence
  Synthetic
  misc_feature (15)..(15): n is a, c, g, or u
caccaagcucugcangauc

SEQ ID NO: 138859 - RNA, 20 nt, Artificial Sequence
  Synthetic
  misc_feature (16)..(16): n is a, c, g, or u
ccaccaagcucugcangauc

SEQ ID NO: 138860 - RNA, 21 nt, Artificial Sequence
  Synthetic
  misc_feature (17)..(17): n is a, c, g, or u
uccaccaagcucugcangauc

SEQ ID NO: 138861 - RNA, 22 nt, Artificial Sequence
  Synthetic
  misc_feature (18)..(18): n is a, c, g, or u
uuccaccaagcucugcangauc

SEQ ID NO: 138862 - RNA, 23 nt, Artificial Sequence
  Synthetic
  misc_feature (1)..(1): n is a, c, g, or u
  misc_feature (19)..(19): n is a, c, g, or u
nuuccaccaagcucugcangauc

SEQ ID NO: 138863 - RNA, 24 nt, Artificial Sequence
  Synthetic
  misc_feature (2)..(2): n is a, c, g, or u
  misc_feature (20)..(20): n is a, c, g, or u
cnuuccaccaagcucugcangauc

SEQ ID NO: 138864 - RNA, 18 nt, Artificial Sequence
  Synthetic
  misc_feature (2)..(2): n is a, c, g, or u
cngccucagcucuguauc

SEQ ID NO: 138865 - RNA, 19 nt, Artificial Sequence
  Synthetic
  misc_feature (3)..(3): n is a, c, g, or u
acngccucagcucuguauc

SEQ ID NO: 138866 - RNA, 20 nt, Artificial Sequence
  Synthetic
  misc_feature (1)..(1): n is a, c, g, or u
  misc_feature (4)..(4): n is a, c, g, or u
nacngccucagcucuguauc

SEQ ID NO: 138867 - RNA, 21 nt, Artificial Sequence
  Synthetic
  misc_feature (2)..(2): n is a, c, g, or u
  misc_feature (5)..(5): n is a, c, g, or u
anacngccucagcucuguauc

SEQ ID NO: 138868 - RNA, 22 nt, Artificial Sequence
  Synthetic
  misc_feature (3)..(3): n is a, c, g, or u
  misc_feature (6)..(6): n is a, c, g, or u
ganacngccucagcucuguauc

SEQ ID NO: 138869 - RNA, 23 nt, Artificial Sequence
  Synthetic
  misc_feature (1)..(1): n is a, c, g, or u
  misc_feature (4)..(4): n is a, c, g, or u
  misc_feature (7)..(7): n is a, c, g, or u
nganacngccucagcucuguauc

SEQ ID NO: 138870 - RNA, 24 nt, Artificial Sequence
  Synthetic
  misc_feature (2)..(2): n is a, c, g, or u
  misc_feature (5)..(5): n is a, c, g, or u
  misc_feature (8)..(8): n is a, c, g, or u
unganacngccucagcucuguauc

SEQ ID NO: 138871 - RNA, 18 nt, Artificial Sequence
  Synthetic
caauuuguccugguuauc

SEQ ID NO: 138872 - RNA, 19 nt, Artificial Sequence
  Synthetic
ccaauuuguccugguuauc

SEQ ID NO: 138873 - RNA, 20 nt, Artificial Sequence
  Synthetic
uccaauuuguccugguuauc

SEQ ID NO: 138874 - RNA, 21 nt, Artificial Sequence
  Synthetic
cuccaauuuguccugguuauc

SEQ ID NO: 138875 - RNA, 22 nt, Artificial Sequence
  Synthetic
ccuccaauuuguccugguuauc

SEQ ID NO: 138876 - RNA, 23 nt, Artificial Sequence
  Synthetic
uccuccaauuuguccugguuauc

SEQ ID NO: 138877 - RNA, 24 nt, Artificial Sequence
  Synthetic
guccuccaauuuguccugguuauc

SEQ ID NO: 138878 - RNA, 18 nt, Artificial Sequence
  Synthetic
cccaaccuccaaucacuc

SEQ ID NO: 138879 - RNA, 19 nt, Artificial Sequence
  Synthetic
ccccaaccuccaaucacuc

SEQ ID NO: 138880 - RNA, 20 nt, Artificial Sequence
  Synthetic
uccccaaccuccaaucacuc

SEQ ID NO: 138881 - RNA, 21 nt, Artificial Sequence
  Synthetic
guccccaaccuccaaucacuc

SEQ ID NO: 138882 - RNA, 22 nt, Artificial Sequence
  Synthetic
aguccccaaccuccaaucacuc

SEQ ID NO: 138883 - RNA, 23 nt, Artificial Sequence
  Synthetic
caguccccaaccuccaaucacuc

SEQ ID NO: 138884 - RNA, 24 nt, Artificial Sequence
  Synthetic
gcaguccccaaccuccaaucacuc

SEQ ID NO: 138885 - RNA, 18 nt, Artificial Sequence
  Synthetic
ucuuacauaagaggacuc

SEQ ID NO: 138886 - RNA, 19 nt, Artificial Sequence
  Synthetic
gucuuacauaagaggacuc

SEQ ID NO: 138887 - RNA, 20 nt, Artificial Sequence
  Synthetic
ggucuuacauaagaggacuc

SEQ ID NO: 138888 - RNA, 21 nt, Artificial Sequence
  Synthetic
aggucuuacauaagaggacuc

SEQ ID NO: 138889 - RNA, 22 nt, Artificial Sequence
  Synthetic
aaggucuuacauaagaggacuc

SEQ ID NO: 138890 - RNA, 23 nt, Artificial Sequence
  Synthetic
caaggucuuacauaagaggacuc

SEQ ID NO: 138891 - RNA, 24 nt, Artificial Sequence
  Synthetic
ccaaggucuuacauaagaggacuc

SEQ ID NO: 138892 - RNA, 18 nt, Artificial Sequence
  Synthetic
uuaguauuccuuggacuc

SEQ ID NO: 138893 - RNA, 19 nt, Artificial Sequence
  Synthetic
guuaguauuccuuggacuc

SEQ ID NO: 138894 - RNA, 20 nt, Artificial Sequence
  Synthetic
uguuaguauuccuuggacuc

SEQ ID NO: 138895 - RNA, 21 nt, Artificial Sequence
  Synthetic
auguuaguauuccuuggacuc

SEQ ID NO: 138896 - RNA, 22 nt, Artificial Sequence
  Synthetic
aauguuaguauuccuuggacuc

SEQ ID NO: 138897 - RNA, 23 nt, Artificial Sequence
  Synthetic
caauguuaguauuccuuggacuc

SEQ ID NO: 138898 - RNA, 24 nt, Artificial Sequence
  Synthetic
ucaauguuaguauuccuuggacuc

SEQ ID NO: 138899 - RNA, 18 nt, Artificial Sequence
  Synthetic
gacauuauuuacauacuc

SEQ ID NO: 138900 - RNA, 19 nt, Artificial Sequence
  Synthetic
  misc_feature (1)..(1): n is a, c, g, or u
ngacauuauuuacauacuc

SEQ ID NO: 138901 - RNA, 20 nt, Artificial Sequence
  Synthetic
  misc_feature (2)..(2): n is a, c, g, or u
cngacauuauuuacauacuc

SEQ ID NO: 138902 - RNA, 21 nt, Artificial Sequence
  Synthetic
  misc_feature (3)..(3): n is a, c, g, or u
ccngacauuauuuacauacuc

SEQ ID NO: 138903 - RNA, 22 nt, Artificial Sequence
  Synthetic
  misc_feature (4)..(4): n is a, c, g, or u
accngacauuauuuacauacuc

SEQ ID NO: 138904 - RNA, 23 nt, Artificial Sequence
  Synthetic
  misc_feature (1)..(1): n is a, c, g, or u
  misc_feature (5)..(5): n is a, c, g, or u
naccngacauuauuuacauacuc

SEQ ID NO: 138905 - RNA, 24 nt, Artificial Sequence
  Synthetic
  misc_feature (2)..(2): n is a, c, g, or u
  misc_feature (6)..(6): n is a, c, g, or u
anaccngacauuauuuacauacuc

SEQ ID NO: 138906 - RNA, 18 nt, Artificial Sequence
  Synthetic
guuggucaucaaaaccuc

SEQ ID NO: 138907 - RNA, 19 nt, Artificial Sequence
  Synthetic
gguuggucaucaaaaccuc

SEQ ID NO: 138908 - RNA, 20 nt, Artificial Sequence
  Synthetic
agguuggucaucaaaaccuc

SEQ ID NO: 138909 - RNA, 18 nt, Artificial Sequence
  Synthetic
cucccaucucuccaccuc

SEQ ID NO: 138910 - RNA, 19 nt, Artificial Sequence
  Synthetic
acucccaucucuccaccuc

SEQ ID NO: 138911 - RNA, 20 nt, Artificial Sequence
  Synthetic
uacucccaucucuccaccuc

SEQ ID NO: 138912 - RNA, 21 nt, Artificial Sequence
  Synthetic
cuacucccaucucuccaccuc

SEQ ID NO: 138913 - RNA, 22 nt, Artificial Sequence
  Synthetic
ccuacucccaucucuccaccuc

SEQ ID NO: 138914 - RNA, 23 nt, Artificial Sequence
  Synthetic
gccuacucccaucucuccaccuc

SEQ ID NO: 138915 - RNA, 24 nt, Artificial Sequence
  Synthetic
agccuacucccaucucuccaccuc

SEQ ID NO: 138916 - RNA, 18 nt, Artificial Sequence
  Synthetic
ucccgcggacgaccccuc

SEQ ID NO: 138917 - RNA, 19 nt, Artificial Sequence
  Synthetic
aucccgcggacgaccccuc

SEQ ID NO: 138918 - RNA, 20 nt, Artificial Sequence
  Synthetic
aaucccgcggacgaccccuc

SEQ ID NO: 138919 - RNA, 18 nt, Artificial Sequence
  Synthetic
gaagaacucccucgccuc

SEQ ID NO: 138920 - RNA, 19 nt, Artificial Sequence
  Synthetic
agaagaacucccucgccuc

SEQ ID NO: 138921 - RNA, 20 nt, Artificial Sequence
  Synthetic
aagaagaacucccucgccuc

SEQ ID NO: 138922 - RNA, 21 nt, Artificial Sequence
  Synthetic
gaagaagaacucccucgccuc

SEQ ID NO: 138923 - RNA, 22 nt, Artificial Sequence
  Synthetic
agaagaagaacucccucgccuc

SEQ ID NO: 138924 - RNA, 23 nt, Artificial Sequence
  Synthetic
uagaagaagaacucccucgccuc

SEQ ID NO: 138925 - RNA, 24 nt, Artificial Sequence
  Synthetic
cuagaagaagaacucccucgccuc

SEQ ID NO: 138926 - RNA, 18 nt, Artificial Sequence
  Synthetic
  misc_feature (15)..(15): n is a, c, g, or u
cggucuggagcaaancuc

SEQ ID NO: 138927 - RNA, 19 nt, Artificial Sequence
  Synthetic
  misc_feature (16)..(16): n is a, c, g, or u
ccggucuggagcaaancuc

SEQ ID NO: 138928 - RNA, 20 nt, Artificial Sequence
  Synthetic
  misc_feature (17)..(17): n is a, c, g, or u
gccggucuggagcaaancuc

SEQ ID NO: 138929 - RNA, 21 nt, Artificial Sequence
  Synthetic
  misc_feature (18)..(18): n is a, c, g, or u
agccggucuggagcaaancuc

SEQ ID NO: 138930 - RNA, 22 nt, Artificial Sequence
  Synthetic
  misc_feature (19)..(19): n is a, c, g, or u
cagccggucuggagcaaancuc

SEQ ID NO: 138931 - RNA, 23 nt, Artificial Sequence
  Synthetic
  misc_feature (20)..(20): n is a, c, g, or u
gcagccggucuggagcaaancuc

SEQ ID NO: 138932 - RNA, 24 nt, Artificial Sequence
  Synthetic
  misc_feature (21)..(21): n is a, c, g, or u
cgcagccggucuggagcaaancuc

SEQ ID NO: 138933 - RNA, 18 nt, Artificial Sequence
  Synthetic
ucacaucucgucaaucuc

SEQ ID NO: 138934 - RNA, 19 nt, Artificial Sequence
  Synthetic
cucacaucucgucaaucuc

SEQ ID NO: 138935 - RNA, 20 nt, Artificial Sequence
  Synthetic
ucucacaucucgucaaucuc

SEQ ID NO: 138936 - RNA, 21 nt, Artificial Sequence
  Synthetic
cucucacaucucgucaaucuc

SEQ ID NO: 138937 - RNA, 22 nt, Artificial Sequence
  Synthetic
ccucucacaucucgucaaucuc

SEQ ID NO: 138938 - RNA, 23 nt, Artificial Sequence
  Synthetic
gccucucacaucucgucaaucuc

SEQ ID NO: 138939 - RNA, 24 nt, Artificial Sequence
  Synthetic
ugccucucacaucucgucaaucuc

SEQ ID NO: 138940 - RNA, 18 nt, Artificial Sequence
  Synthetic
  misc_feature (2)..(2): n is a, c, g, or u
gngaagccuuagagucuc

SEQ ID NO: 138941 - RNA, 19 nt, Artificial Sequence
  Synthetic
  misc_feature (3)..(3): n is a, c, g, or u
cgngaagccuuagagucuc

SEQ ID NO: 138942 - RNA, 20 nt, Artificial Sequence
  Synthetic
  misc_feature (4)..(4): n is a, c, g, or u
ucgngaagccuuagagucuc

SEQ ID NO: 138943 - RNA, 21 nt, Artificial Sequence
  Synthetic
  misc_feature (5)..(5): n is a, c, g, or u
aucgngaagccuuagagucuc

SEQ ID NO: 138944 - RNA, 22 nt, Artificial Sequence
  Synthetic
  misc_feature (6)..(6): n is a, c, g, or u
uaucgngaagccuuagagucuc

SEQ ID NO: 138945 - RNA, 23 nt, Artificial Sequence
  Synthetic
  misc_feature (7)..(7): n is a, c, g, or u
guaucgngaagccuuagagucuc

SEQ ID NO: 138946 - RNA, 24 nt, Artificial Sequence
  Synthetic
  misc_feature (8)..(8): n is a, c, g, or u
uguaucgngaagccuuagagucuc

SEQ ID NO: 138947 - RNA, 18 nt, Artificial Sequence
  Synthetic
  misc_feature (10)..(10): n is a, c, g, or u
acaggcuuunacuuucuc

SEQ ID NO: 138948 - RNA, 19 nt, Artificial Sequence
  Synthetic
  misc_feature (11)..(11): n is a, c, g, or u
aacaggcuuunacuuucuc

SEQ ID NO: 138949 - RNA, 20 nt, Artificial Sequence
  Synthetic
  misc_feature (12)..(12): n is a, c, g, or u
aaacaggcuuunacuuucuc

SEQ ID NO: 138950 - RNA, 21 nt, Artificial Sequence
  Synthetic
  misc_feature (1)..(1): n is a, c, g, or u
  misc_feature (13)..(13): n is a, c, g, or u
naaacaggcuuunacuuucuc

SEQ ID NO: 138951 - RNA, 22 nt, Artificial Sequence
  Synthetic
  misc_feature (2)..(2): n is a, c, g, or u
  misc_feature (14)..(14): n is a, c, g, or u
cnaaacaggcuuunacuuucuc

SEQ ID NO: 138952 - RNA, 23 nt, Artificial Sequence
  Synthetic
  misc_feature (3)..(3): n is a, c, g, or u
  misc_feature (15)..(15): n is a, c, g, or u
gcnaaacaggcuuunacuuucuc

SEQ ID NO: 138953 - RNA, 24 nt, Artificial Sequence
  Synthetic
  misc_feature (4)..(4): n is a, c, g, or u
  misc_feature (16)..(16): n is a, c, g, or u
agcnaaacaggcuuunacuuucuc

SEQ ID NO: 138954 - RNA, 18 nt, Artificial Sequence
  Synthetic
uggccaaaauucgcaguc

SEQ ID NO: 138955 - RNA, 19 nt, Artificial Sequence
  Synthetic
uuggccaaaauucgcaguc

SEQ ID NO: 138956 - RNA, 20 nt, Artificial Sequence
  Synthetic
cuuggccaaaauucgcaguc

SEQ ID NO: 138957 - RNA, 21 nt, Artificial Sequence
  Synthetic
ucuuggccaaaauucgcaguc

SEQ ID NO: 138958 - RNA, 22 nt, Artificial Sequence
  Synthetic
gucuuggccaaaauucgcaguc

SEQ ID NO: 138959 - RNA, 23 nt, Artificial Sequence
  Synthetic
ugucuuggccaaaauucgcaguc

SEQ ID NO: 138960 - RNA, 24 nt, Artificial Sequence
  Synthetic
gugucuuggccaaaauucgcaguc

SEQ ID NO: 138961 - RNA, 18 nt, Artificial Sequence
  Synthetic
cuccaccaaucggcaguc

SEQ ID NO: 138962 - RNA, 19 nt, Artificial Sequence
  Synthetic
ccuccaccaaucggcaguc

SEQ ID NO: 138963 - RNA, 20 nt, Artificial Sequence
  Synthetic
gccuccaccaaucggcaguc

SEQ ID NO: 138964 - RNA, 21 nt, Artificial Sequence
  Synthetic
ugccuccaccaaucggcaguc

SEQ ID NO: 138965 - RNA, 22 nt, Artificial Sequence
  Synthetic
cugccuccaccaaucggcaguc

SEQ ID NO: 138966 - RNA, 23 nt, Artificial Sequence
  Synthetic
ccugccuccaccaaucggcaguc

SEQ ID NO: 138967 - RNA, 24 nt, Artificial Sequence
  Synthetic
uccugccuccaccaaucggcaguc

SEQ ID NO: 138968 - RNA, 18 nt, Artificial Sequence
  Synthetic
  misc_feature (6)..(6): n is a, c, g, or u
cugcangaucccagaguc

SEQ ID NO: 138969 - RNA, 19 nt, Artificial Sequence
  Synthetic
  misc_feature (7)..(7): n is a, c, g, or u
ucugcangaucccagaguc

SEQ ID NO: 138970 - RNA, 20 nt, Artificial Sequence
  Synthetic
  misc_feature (8)..(8): n is a, c, g, or u
cucugcangaucccagaguc

SEQ ID NO: 138971 - RNA, 21 nt, Artificial Sequence
  Synthetic
  misc_feature (9)..(9): n is a, c, g, or u
gcucugcangaucccagaguc

SEQ ID NO: 138972 - RNA, 22 nt, Artificial Sequence
  Synthetic
  misc_feature (10)..(10): n is a, c, g, or u
agcucugcangaucccagaguc

SEQ ID NO: 138973 - RNA, 23 nt, Artificial Sequence
  Synthetic
  misc_feature (11)..(11): n is a, c, g, or u
aagcucugcangaucccagaguc

SEQ ID NO: 138974 - RNA, 24 nt, Artificial Sequence
  Synthetic
  misc_feature (12)..(12): n is a, c, g, or u
caagcucugcangaucccagaguc

SEQ ID NO: 138975 - RNA, 18 nt, Artificial Sequence
  Synthetic
gaucucaaucgccgcguc

SEQ ID NO: 138976 - RNA, 19 nt, Artificial Sequence
  Synthetic
agaucucaaucgccgcguc

SEQ ID NO: 138977 - RNA, 20 nt, Artificial Sequence
  Synthetic
  misc_feature (1)..(1): n is a, c, g, or u
nagaucucaaucgccgcguc

SEQ ID NO: 138978 - RNA, 18 nt, Artificial Sequence
  Synthetic
uuuugcucgcagccgguc

SEQ ID NO: 138979 - RNA, 19 nt, Artificial Sequence
  Synthetic
guuuugcucgcagccgguc

SEQ ID NO: 138980 - RNA, 20 nt, Artificial Sequence
  Synthetic
uguuuugcucgcagccgguc

SEQ ID NO: 138981 - RNA, 18 nt, Artificial Sequence
  Synthetic
  misc_feature (3)..(3): n is a, c, g, or u
cancaugggagguugguc

SEQ ID NO: 138982 - RNA, 19 nt, Artificial Sequence
  Synthetic
  misc_feature (4)..(4): n is a, c, g, or u
acancaugggagguugguc

SEQ ID NO: 138983 - RNA, 20 nt, Artificial Sequence
  Synthetic
  misc_feature (5)..(5): n is a, c, g, or u
uacancaugggagguugguc

SEQ ID NO: 138984 - RNA, 21 nt, Artificial Sequence
  Synthetic
  misc_feature (6)..(6): n is a, c, g, or u
cuacancaugggagguugguc

SEQ ID NO: 138985 - RNA, 22 nt, Artificial Sequence
  Synthetic
  misc_feature (7)..(7): n is a, c, g, or u
gcuacancaugggagguugguc

SEQ ID NO: 138986 - RNA, 23 nt, Artificial Sequence
  Synthetic
  misc_feature (8)..(8): n is a, c, g, or u
agcuacancaugggagguugguc

SEQ ID NO: 138987 - RNA, 24 nt, Artificial Sequence
  Synthetic
  misc_feature (9)..(9): n is a, c, g, or u
gagcuacancaugggagguugguc

SEQ ID NO: 138988 - RNA, 18 nt, Artificial Sequence
  Synthetic
uggacucccagcaauguc

SEQ ID NO: 138989 - RNA, 19 nt, Artificial Sequence
  Synthetic
uuggacucccagcaauguc

SEQ ID NO: 138990 - RNA, 20 nt, Artificial Sequence
  Synthetic
cuuggacucccagcaauguc

SEQ ID NO: 138991 - RNA, 21 nt, Artificial Sequence
  Synthetic
ucuuggacucccagcaauguc

SEQ ID NO: 138992 - RNA, 22 nt, Artificial Sequence
  Synthetic
cucuuggacucccagcaauguc

SEQ ID NO: 138993 - RNA, 23 nt, Artificial Sequence
  Synthetic
acucuuggacucccagcaauguc

SEQ ID NO: 138994 - RNA, 24 nt, Artificial Sequence
  Synthetic
gacucuuggacucccagcaauguc

SEQ ID NO: 138995 - RNA, 18 nt, Artificial Sequence
  Synthetic
guuaucgcuggauguguc

SEQ ID NO: 138996 - RNA, 19 nt, Artificial Sequence
  Synthetic
gguuaucgcuggauguguc

SEQ ID NO: 138997 - RNA, 20 nt, Artificial Sequence
  Synthetic
ugguuaucgcuggauguguc

SEQ ID NO: 138998 - RNA, 21 nt, Artificial Sequence
  Synthetic
cugguuaucgcuggauguguc

SEQ ID NO: 138999 - RNA, 22 nt, Artificial Sequence
  Synthetic
ccugguuaucgcuggauguguc

SEQ ID NO: 139000 - RNA, 23 nt, Artificial Sequence
  Synthetic
uccugguuaucgcuggauguguc

SEQ ID NO: 139001 - RNA, 24 nt, Artificial Sequence
  Synthetic
guccugguuaucgcuggauguguc

SEQ ID NO: 139002 - RNA, 18 nt, Artificial Sequence
  Synthetic
uaccaauuuucuuuuguc

SEQ ID NO: 139003 - RNA, 19 nt, Artificial Sequence
  Synthetic
uuaccaauuuucuuuuguc

SEQ ID NO: 139004 - RNA, 20 nt, Artificial Sequence
  Synthetic
guuaccaauuuucuuuuguc

SEQ ID NO: 139005 - RNA, 21 nt, Artificial Sequence
  Synthetic
uguuaccaauuuucuuuuguc

SEQ ID NO: 139006 - RNA, 22 nt, Artificial Sequence
  Synthetic
cuguuaccaauuuucuuuuguc

SEQ ID NO: 139007 - RNA, 23 nt, Artificial Sequence
  Synthetic
gcuguuaccaauuuucuuuuguc

SEQ ID NO: 139008 - RNA, 24 nt, Artificial Sequence
  Synthetic
cgcuguuaccaauuuucuuuuguc

SEQ ID NO: 139009 - RNA, 18 nt, Artificial Sequence
  Synthetic
  misc_feature (16)..(16): n is a, c, g, or u
uauucccaucccaucnuc

SEQ ID NO: 139010 - RNA, 19 nt, Artificial Sequence
  Synthetic
  misc_feature (17)..(17): n is a, c, g, or u
guauucccaucccaucnuc

SEQ ID NO: 139011 - RNA, 20 nt, Artificial Sequence
  Synthetic
  misc_feature (18)..(18): n is a, c, g, or u
uguauucccaucccaucnuc

SEQ ID NO: 139012 - RNA, 21 nt, Artificial Sequence
  Synthetic
  misc_feature (19)..(19): n is a, c, g, or u
cuguauucccaucccaucnuc

SEQ ID NO: 139013 - RNA, 22 nt, Artificial Sequence
  Synthetic
  misc_feature (20)..(20): n is a, c, g, or u
ccuguauucccaucccaucnuc

SEQ ID NO: 139014 - RNA, 23 nt, Artificial Sequence
  Synthetic
  misc_feature (21)..(21): n is a, c, g, or u
accuguauucccaucccaucnuc

SEQ ID NO: 139015 - RNA, 24 nt, Artificial Sequence
  Synthetic
  misc_feature (22)..(22): n is a, c, g, or u
caccuguauucccaucccaucnuc

SEQ ID NO: 139016 - RNA, 18 nt, Artificial Sequence
  Synthetic
  misc_feature (1)..(1): n is a, c, g, or u
  misc_feature (16)..(16): n is a, c, g, or u
naauucugucguccunuc

SEQ ID NO: 139017 - RNA, 19 nt, Artificial Sequence
  Synthetic
  misc_feature (2)..(2): n is a, c, g, or u
  misc_feature (17)..(17): n is a, c, g, or u
anaauucugucguccunuc

SEQ ID NO: 139018 - RNA, 20 nt, Artificial Sequence
  Synthetic
  misc_feature (3)..(3): n is a, c, g, or u
  misc_feature (18)..(18): n is a, c, g, or u
ganaauucugucguccunuc

SEQ ID NO: 139019 - RNA, 21 nt, Artificial Sequence
  Synthetic
  misc_feature (4)..(4): n is a, c, g, or u
  misc_feature (19)..(19): n is a, c, g, or u
uganaauucugucguccunuc

SEQ ID NO: 139020 - RNA, 22 nt, Artificial Sequence
  Synthetic
  misc_feature (5)..(5): n is a, c, g, or u
  misc_feature (20)..(20): n is a, c, g, or u
cuganaauucugucguccunuc

SEQ ID NO: 139021 - RNA, 23 nt, Artificial Sequence
  Synthetic
  misc_feature (6)..(6): n is a, c, g, or u
  misc_feature (21)..(21): n is a, c, g, or u
acuganaauucugucguccunuc

SEQ ID NO: 139022 - RNA, 24 nt, Artificial Sequence
  Synthetic
  misc_feature (1)..(1): n is a, c, g, or u
  misc_feature (7)..(7): n is a, c, g, or u
  misc_feature (22)..(22): n is a, c, g, or u
nacuganaauucugucguccunuc

SEQ ID NO: 139023 - RNA, 18 nt, Artificial Sequence
  Synthetic
aacaucacaucaggauuc

SEQ ID NO: 139024 - RNA, 19 nt, Artificial Sequence
  Synthetic
gaacaucacaucaggauuc

SEQ ID NO: 139025 - RNA, 20 nt, Artificial Sequence
  Synthetic
agaacaucacaucaggauuc

SEQ ID NO: 139026 - RNA, 21 nt, Artificial Sequence
  Synthetic
gagaacaucacaucaggauuc

SEQ ID NO: 139027 - RNA, 22 nt, Artificial Sequence
  Synthetic
ggagaacaucacaucaggauuc

SEQ ID NO: 139028 - RNA, 23 nt, Artificial Sequence
  Synthetic
uggagaacaucacaucaggauuc

SEQ ID NO: 139029 - RNA, 24 nt, Artificial Sequence
  Synthetic
auggagaacaucacaucaggauuc

SEQ ID NO: 139030 - RNA, 18 nt, Artificial Sequence
  Synthetic
uugcgggucaccauauuc

SEQ ID NO: 139031 - RNA, 19 nt, Artificial Sequence
  Synthetic
uuugcgggucaccauauuc

SEQ ID NO: 139032 - RNA, 20 nt, Artificial Sequence
  Synthetic
uuuugcgggucaccauauuc

SEQ ID NO: 139033 - RNA, 21 nt, Artificial Sequence
  Synthetic
auuuugcgggucaccauauuc

SEQ ID NO: 139034 - RNA, 22 nt, Artificial Sequence
  Synthetic
cauuuugcgggucaccauauuc

SEQ ID NO: 139035 - RNA, 23 nt, Artificial Sequence
  Synthetic
ucauuuugcgggucaccauauuc

SEQ ID NO: 139036 - RNA, 24 nt, Artificial Sequence
  Synthetic
  misc_feature (1)..(1): n is a, c, g, or u
nucauuuugcgggucaccauauuc

SEQ ID NO: 139037 - RNA, 18 nt, Artificial Sequence
  Synthetic
aucucaauguuaguauuc

SEQ ID NO: 139038 - RNA, 19 nt, Artificial Sequence
  Synthetic
aaucucaauguuaguauuc

SEQ ID NO: 139039 - RNA, 20 nt, Artificial Sequence
  Synthetic
gaaucucaauguuaguauuc

SEQ ID NO: 139040 - RNA, 21 nt, Artificial Sequence
  Synthetic
ggaaucucaauguuaguauuc

SEQ ID NO: 139041 - RNA, 22 nt, Artificial Sequence
  Synthetic
gggaaucucaauguuaguauuc

SEQ ID NO: 139042 - RNA, 23 nt, Artificial Sequence
  Synthetic
cgggaaucucaauguuaguauuc

SEQ ID NO: 139043 - RNA, 24 nt, Artificial Sequence
  Synthetic
ucgggaaucucaauguuaguauuc

SEQ ID NO: 139044 - RNA, 18 nt, Artificial Sequence
  Synthetic
  misc_feature (4)..(4): n is a, c, g, or u
aaanagaugggguuauuc

SEQ ID NO: 139045 - RNA, 19 nt, Artificial Sequence
  Synthetic
  misc_feature (5)..(5): n is a, c, g, or u
caaanagaugggguuauuc

SEQ ID NO: 139046 - RNA, 20 nt, Artificial Sequence
  Synthetic
  misc_feature (6)..(6): n is a, c, g, or u
acaaanagaugggguuauuc

SEQ ID NO: 139047 - RNA, 21 nt, Artificial Sequence
  Synthetic
  misc_feature (7)..(7): n is a, c, g, or u
aacaaanagaugggguuauuc

SEQ ID NO: 139048 - RNA, 22 nt, Artificial Sequence
  Synthetic
  misc_feature (8)..(8): n is a, c, g, or u
aaacaaanagaugggguuauuc

SEQ ID NO: 139049 - RNA, 23 nt, Artificial Sequence
  Synthetic
  misc_feature (9)..(9): n is a, c, g, or u
aaaacaaanagaugggguuauuc

SEQ ID NO: 139050 - RNA, 24 nt, Artificial Sequence
  Synthetic
  misc_feature (10)..(10): n is a, c, g, or u
caaaacaaanagaugggguuauuc

SEQ ID NO: 139051 - RNA, 18 nt, Artificial Sequence
  Synthetic
cuaucuuaucaacacuuc

SEQ ID NO: 139052 - RNA, 19 nt, Artificial Sequence
  Synthetic
ccuaucuuaucaacacuuc

SEQ ID NO: 139053 - RNA, 20 nt, Artificial Sequence
  Synthetic
cccuaucuuaucaacacuuc

SEQ ID NO: 139054 - RNA, 21 nt, Artificial Sequence
  Synthetic
ccccuaucuuaucaacacuuc

SEQ ID NO: 139055 - RNA, 22 nt, Artificial Sequence
  Synthetic
gccccuaucuuaucaacacuuc

SEQ ID NO: 139056 - RNA, 23 nt, Artificial Sequence
  Synthetic
ugccccuaucuuaucaacacuuc

SEQ ID NO: 139057 - RNA, 24 nt, Artificial Sequence
  Synthetic
augccccuaucuuaucaacacuuc

SEQ ID NO: 139058 - RNA, 18 nt, Artificial Sequence
  Synthetic
gaccuugaggccuacuuc

SEQ ID NO: 139059 - RNA, 19 nt, Artificial Sequence
  Synthetic
cgaccuugaggccuacuuc

SEQ ID NO: 139060 - RNA, 20 nt, Artificial Sequence
  Synthetic
ccgaccuugaggccuacuuc

SEQ ID NO: 139061 - RNA, 21 nt, Artificial Sequence
  Synthetic
accgaccuugaggccuacuuc

SEQ ID NO: 139062 - RNA, 22 nt, Artificial Sequence
  Synthetic
gaccgaccuugaggccuacuuc

SEQ ID NO: 139063 - RNA, 23 nt, Artificial Sequence
  Synthetic
cgaccgaccuugaggccuacuuc

SEQ ID NO: 139064 - RNA, 24 nt, Artificial Sequence
  Synthetic
acgaccgaccuugaggccuacuuc

SEQ ID NO: 139065 - RNA, 18 nt, Artificial Sequence
  Synthetic
  misc_feature (14)..(14): n is a, c, g, or u
cugccaacuggauncuuc

SEQ ID NO: 139066 - RNA, 19 nt, Artificial Sequence
  Synthetic
  misc_feature (15)..(15): n is a, c, g, or u
acugccaacuggauncuuc

SEQ ID NO: 139067 - RNA, 20 nt, Artificial Sequence
  Synthetic
  misc_feature (16)..(16): n is a, c, g, or u
uacugccaacuggauncuuc

SEQ ID NO: 139068 - RNA, 21 nt, Artificial Sequence
  Synthetic
  misc_feature (17)..(17): n is a, c, g, or u
guacugccaacuggauncuuc

SEQ ID NO: 139069 - RNA, 22 nt, Artificial Sequence
  Synthetic
  misc_feature (18)..(18): n is a, c, g, or u
uguacugccaacuggauncuuc

SEQ ID NO: 139070 - RNA, 23 nt, Artificial Sequence
  Synthetic
  misc_feature (1)..(1): n is a, c, g, or u
  misc_feature (19)..(19): n is a, c, g, or u
nuguacugccaacuggauncuuc

SEQ ID NO: 139071 - RNA, 24 nt, Artificial Sequence
  Synthetic
  misc_feature (2)..(2): n is a, c, g, or u
  misc_feature (20)..(20): n is a, c, g, or u
gnuguacugccaacuggauncuuc

SEQ ID NO: 139072 - RNA, 18 nt, Artificial Sequence
  Synthetic
ugcugguggcuccaguuc

SEQ ID NO: 139073 - RNA, 19 nt, Artificial Sequence
  Synthetic
cugcugguggcuccaguuc

SEQ ID NO: 139074 - RNA, 20 nt, Artificial Sequence
  Synthetic
ccugcugguggcuccaguuc

SEQ ID NO: 139075 - RNA, 21 nt, Artificial Sequence
  Synthetic
uccugcugguggcuccaguuc

SEQ ID NO: 139076 - RNA, 22 nt, Artificial Sequence
  Synthetic
uuccugcugguggcuccaguuc

SEQ ID NO: 139077 - RNA, 23 nt, Artificial Sequence
  Synthetic
uuuccugcugguggcuccaguuc

SEQ ID NO: 139078 - RNA, 24 nt, Artificial Sequence
  Synthetic
uuuuccugcugguggcuccaguuc

SEQ ID NO: 139079 - RNA, 18 nt, Artificial Sequence
  Synthetic
ccauuuguucagugguuc

SEQ ID NO: 139080 - RNA, 19 nt, Artificial Sequence
  Synthetic
gccauuuguucagugguuc

SEQ ID NO: 139081 - RNA, 20 nt, Artificial Sequence
  Synthetic
ugccauuuguucagugguuc

SEQ ID NO: 139082 - RNA, 21 nt, Artificial Sequence
  Synthetic
gugccauuuguucagugguuc

SEQ ID NO: 139083 - RNA, 22 nt, Artificial Sequence
  Synthetic
agugccauuuguucagugguuc

SEQ ID NO: 139084 - RNA, 23 nt, Artificial Sequence
  Synthetic
uagugccauuuguucagugguuc

SEQ ID NO: 139085 - RNA, 24 nt, Artificial Sequence
  Synthetic
cuagugccauuuguucagugguuc

SEQ ID NO: 139086 - RNA, 18 nt, Artificial Sequence
  Synthetic
  misc_feature (15)..(15): n is a, c, g, or u
gguuauucccuaaanuuc

SEQ ID NO: 139087 - RNA, 19 nt, Artificial Sequence
  Synthetic
  misc_feature (16)..(16): n is a, c, g, or u
ggguuauucccuaaanuuc

SEQ ID NO: 139088 - RNA, 20 nt, Artificial Sequence
  Synthetic
  misc_feature (17)..(17): n is a, c, g, or u
gggguuauucccuaaanuuc

SEQ ID NO: 139089 - RNA, 21 nt, Artificial Sequence
  Synthetic
  misc_feature (18)..(18): n is a, c, g, or u
ugggguuauucccuaaanuuc

SEQ ID NO: 139090 - RNA, 22 nt, Artificial Sequence
  Synthetic
  misc_feature (19)..(19): n is a, c, g, or u
augggguuauucccuaaanuuc

SEQ ID NO: 139091 - RNA, 23 nt, Artificial Sequence
  Synthetic
  misc_feature (20)..(20): n is a, c, g, or u
gaugggguuauucccuaaanuuc

SEQ ID NO: 139092 - RNA, 24 nt, Artificial Sequence
  Synthetic
  misc_feature (21)..(21): n is a, c, g, or u
agaugggguuauucccuaaanuuc

SEQ ID NO: 139093 - RNA, 18 nt, Artificial Sequence
  Synthetic
  misc_feature (6)..(6): n is a, c, g, or u
  misc_feature (9)..(9): n is a, c, g, or u
ccaucnucnugggcuuuc

SEQ ID NO: 139094 - RNA, 19 nt, Artificial Sequence
  Synthetic
  misc_feature (7)..(7): n is a, c, g, or u
  misc_feature (10)..(10): n is a, c, g, or u
cccaucnucnugggcuuuc

SEQ ID NO: 139095 - RNA, 20 nt, Artificial Sequence
  Synthetic
  misc_feature (8)..(8): n is a, c, g, or u
  misc_feature (11)..(11): n is a, c, g, or u
ucccaucnucnugggcuuuc

SEQ ID NO: 139096 - RNA, 21 nt, Artificial Sequence
  Synthetic
  misc_feature (9)..(9): n is a, c, g, or u
  misc_feature (12)..(12): n is a, c, g, or u
aucccaucnucnugggcuuuc

SEQ ID NO: 139097 - RNA, 22 nt, Artificial Sequence
  Synthetic
  misc_feature (10)..(10): n is a, c, g, or u
  misc_feature (13)..(13): n is a, c, g, or u
caucccaucnucnugggcuuuc

SEQ ID NO: 139098 - RNA, 23 nt, Artificial Sequence
  Synthetic
  misc_feature (11)..(11): n is a, c, g, or u
  misc_feature (14)..(14): n is a, c, g, or u
ccaucccaucnucnugggcuuuc

SEQ ID NO: 139099 - RNA, 24 nt, Artificial Sequence
  Synthetic
  misc_feature (12)..(12): n is a, c, g, or u
  misc_feature (15)..(15): n is a, c, g, or u
cccaucccaucnucnugggcuuuc

SEQ ID NO: 139100 - RNA, 18 nt, Artificial Sequence
  Synthetic
  misc_feature (14)..(14): n is a, c, g, or u
ggaaauauacaucnuuuc

SEQ ID NO: 139101 - RNA, 19 nt, Artificial Sequence
  Synthetic
  misc_feature (15)..(15): n is a, c, g, or u
cggaaauauacaucnuuuc

SEQ ID NO: 139102 - RNA, 20 nt, Artificial Sequence
  Synthetic
  misc_feature (1)..(1): n is a, c, g, or u
  misc_feature (16)..(16): n is a, c, g, or u
ncggaaauauacaucnuuuc

SEQ ID NO: 139103 - RNA, 21 nt, Artificial Sequence
  Synthetic
  misc_feature (2)..(2): n is a, c, g, or u
  misc_feature (17)..(17): n is a, c, g, or u
cncggaaauauacaucnuuuc

SEQ ID NO: 139104 - RNA, 22 nt, Artificial Sequence
  Synthetic
  misc_feature (3)..(3): n is a, c, g, or u
  misc_feature (18)..(18): n is a, c, g, or u
ucncggaaauauacaucnuuuc

SEQ ID NO: 139105 - RNA, 23 nt, Artificial Sequence
  Synthetic
  misc_feature (1)..(1): n is a, c, g, or u
  misc_feature (4)..(4): n is a, c, g, or u
  misc_feature (19)..(19): n is a, c, g, or u
nucncggaaauauacaucnuuuc

SEQ ID NO: 139106 - RNA, 24 nt, Artificial Sequence
  Synthetic
  misc_feature (2)..(2): n is a, c, g, or u
  misc_feature (5)..(5): n is a, c, g, or u
  misc_feature (20)..(20): n is a, c, g, or u
unucncggaaauauacaucnuuuc

SEQ ID NO: 139107 - RNA, 18 nt, Artificial Sequence
  Synthetic
ggacuucucucaauuuuc

SEQ ID NO: 139108 - RNA, 19 nt, Artificial Sequence
  Synthetic
uggacuucucucaauuuuc

SEQ ID NO: 139109 - RNA, 20 nt, Artificial Sequence
  Synthetic
guggacuucucucaauuuuc

SEQ ID NO: 139110 - RNA, 21 nt, Artificial Sequence
  Synthetic
gguggacuucucucaauuuuc

SEQ ID NO: 139111 - RNA, 22 nt, Artificial Sequence
  Synthetic
ugguggacuucucucaauuuuc

SEQ ID NO: 139112 - RNA, 23 nt, Artificial Sequence
  Synthetic
gugguggacuucucucaauuuuc

SEQ ID NO: 139113 - RNA, 24 nt, Artificial Sequence
  Synthetic
cgugguggacuucucucaauuuuc

SEQ ID NO: 139114 - RNA, 18 nt, Artificial Sequence
  Synthetic
uguaugcauguauacaag

SEQ ID NO: 139115 - RNA, 19 nt, Artificial Sequence
  Synthetic
uuguaugcauguauacaag

SEQ ID NO: 139116 - RNA, 20 nt, Artificial Sequence
  Synthetic
uuuguaugcauguauacaag

SEQ ID NO: 139117 - RNA, 21 nt, Artificial Sequence
  Synthetic
cuuuguaugcauguauacaag

SEQ ID NO: 139118 - RNA, 22 nt, Artificial Sequence
  Synthetic
ccuuuguaugcauguauacaag

SEQ ID NO: 139119 - RNA, 23 nt, Artificial Sequence
  Synthetic
gccuuuguaugcauguauacaag

SEQ ID NO: 139120 - RNA, 24 nt, Artificial Sequence
  Synthetic
ugccuuuguaugcauguauacaag

SEQ ID NO: 139121 - RNA, 18 nt, Artificial Sequence
  Synthetic
aggcagguccccuagaag

SEQ ID NO: 139122 - RNA, 19 nt, Artificial Sequence
  Synthetic
gaggcagguccccuagaag

SEQ ID NO: 139123 - RNA, 20 nt, Artificial Sequence
  Synthetic
cgaggcagguccccuagaag

SEQ ID NO: 139124 - RNA, 21 nt, Artificial Sequence
  Synthetic
ccgaggcagguccccuagaag

SEQ ID NO: 139125 - RNA, 22 nt, Artificial Sequence
  Synthetic
accgaggcagguccccuagaag

SEQ ID NO: 139126 - RNA, 23 nt, Artificial Sequence
  Synthetic
gaccgaggcagguccccuagaag

SEQ ID NO: 139127 - RNA, 24 nt, Artificial Sequence
  Synthetic
  misc_feature (1)..(1): n is a, c, g, or u
ngaccgaggcagguccccuagaag

SEQ ID NO: 139128 - RNA, 18 nt, Artificial Sequence
  Synthetic
  misc_feature (4)..(4): n is a, c, g, or u
  misc_feature (7)..(8): n is a, c, g, or u
gggnuannuaauuggaag

SEQ ID NO: 139129 - RNA, 19 nt, Artificial Sequence
  Synthetic
  misc_feature (5)..(5): n is a, c, g, or u
  misc_feature (8)..(9): n is a, c, g, or u
ugggnuannuaauuggaag

SEQ ID NO: 139130 - RNA, 20 nt, Artificial Sequence
  Synthetic
  misc_feature (6)..(6): n is a, c, g, or u
  misc_feature (9)..(10): n is a, c, g, or u
augggnuannuaauuggaag

SEQ ID NO: 139131 - RNA, 21 nt, Artificial Sequence
  Synthetic
  misc_feature (7)..(7): n is a, c, g, or u
  misc_feature (10)..(11): n is a, c, g, or u
caugggnuannuaauuggaag

SEQ ID NO: 139132 - RNA, 22 nt, Artificial Sequence
  Synthetic
  misc_feature (8)..(8): n is a, c, g, or u
  misc_feature (11)..(12): n is a, c, g, or u
ucaugggnuannuaauuggaag

SEQ ID NO: 139133 - RNA, 23 nt, Artificial Sequence
  Synthetic
  misc_feature (9)..(9): n is a, c, g, or u
  misc_feature (12)..(13): n is a, c, g, or u
uucaugggnuannuaauuggaag

SEQ ID NO: 139134 - RNA, 24 nt, Artificial Sequence
  Synthetic
  misc_feature (1)..(1): n is a, c, g, or u
  misc_feature (10)..(10): n is a, c, g, or u
  misc_feature (13)..(14): n is a, c, g, or u
nuucaugggnuannuaauuggaag

SEQ ID NO: 139135 - RNA, 18 nt, Artificial Sequence
  Synthetic
uuacauacucuuuggaag

SEQ ID NO: 139136 - RNA, 19 nt, Artificial Sequence
  Synthetic
uuuacauacucuuuggaag

SEQ ID NO: 139137 - RNA, 20 nt, Artificial Sequence
  Synthetic
auuuacauacucuuuggaag

SEQ ID NO: 139138 - RNA, 21 nt, Artificial Sequence
  Synthetic
uauuuacauacucuuuggaag

SEQ ID NO: 139139 - RNA, 22 nt, Artificial Sequence
  Synthetic
uuauuuacauacucuuuggaag

SEQ ID NO: 139140 - RNA, 23 nt, Artificial Sequence
  Synthetic
auuauuuacauacucuuuggaag

SEQ ID NO: 139141 - RNA, 24 nt, Artificial Sequence
  Synthetic
cauuauuuacauacucuuuggaag

SEQ ID NO: 139142 - RNA, 18 nt, Artificial Sequence
  Synthetic
auuccuuggacucauaag

SEQ ID NO: 139143 - RNA, 19 nt, Artificial Sequence
  Synthetic
uauuccuuggacucauaag

SEQ ID NO: 139144 - RNA, 20 nt, Artificial Sequence
  Synthetic
guauuccuuggacucauaag

SEQ ID NO: 139145 - RNA, 21 nt, Artificial Sequence
  Synthetic
aguauuccuuggacucauaag

SEQ ID NO: 139146 - RNA, 22 nt, Artificial Sequence
  Synthetic
uaguauuccuuggacucauaag

SEQ ID NO: 139147 - RNA, 23 nt, Artificial Sequence
  Synthetic
uuaguauuccuuggacucauaag

SEQ ID NO: 139148 - RNA, 24 nt, Artificial Sequence
  Synthetic
guuaguauuccuuggacucauaag

SEQ ID NO: 139149 - RNA, 18 nt, Artificial Sequence
  Synthetic
  misc_feature (6)..(6): n is a, c, g, or u
gcuggnauucuauauaag

SEQ ID NO: 139150 - RNA, 19 nt, Artificial Sequence
  Synthetic
  misc_feature (7)..(7): n is a, c, g, or u
ggcuggnauucuauauaag

SEQ ID NO: 139151 - RNA, 20 nt, Artificial Sequence
  Synthetic
  misc_feature (8)..(8): n is a, c, g, or u
aggcuggnauucuauauaag

SEQ ID NO: 139152 - RNA, 21 nt, Artificial Sequence
  Synthetic
  misc_feature (9)..(9): n is a, c, g, or u
aaggcuggnauucuauauaag

SEQ ID NO: 139153 - RNA, 22 nt, Artificial Sequence
  Synthetic
  misc_feature (10)..(10): n is a, c, g, or u
gaaggcuggnauucuauauaag

SEQ ID NO: 139154 - RNA, 23 nt, Artificial Sequence
  Synthetic
  misc_feature (11)..(11): n is a, c, g, or u
ggaaggcuggnauucuauauaag

SEQ ID NO: 139155 - RNA, 24 nt, Artificial Sequence
  Synthetic
  misc_feature (12)..(12): n is a, c, g, or u
uggaaggcuggnauucuauauaag

SEQ ID NO: 139156 - RNA, 18 nt, Artificial Sequence
  Synthetic
ccccugcucguguuacag

SEQ ID NO: 139157 - RNA, 19 nt, Artificial Sequence
  Synthetic
accccugcucguguuacag

SEQ ID NO: 139158 - RNA, 20 nt, Artificial Sequence
  Synthetic
gaccccugcucguguuacag

SEQ ID NO: 139159 - RNA, 21 nt, Artificial Sequence
  Synthetic
ggaccccugcucguguuacag

SEQ ID NO: 139160 - RNA, 22 nt, Artificial Sequence
  Synthetic
aggaccccugcucguguuacag

SEQ ID NO: 139161 - RNA, 23 nt, Artificial Sequence
  Synthetic
uaggaccccugcucguguuacag

SEQ ID NO: 139162 - RNA, 24 nt, Artificial Sequence
  Synthetic
cuaggaccccugcucguguuacag

SEQ ID NO: 139163 - RNA, 18 nt, Artificial Sequence
  Synthetic
  misc_feature (7)..(7): n is a, c, g, or u
aggaucnacaacaaccag

SEQ ID NO: 139164 - RNA, 19 nt, Artificial Sequence
  Synthetic
  misc_feature (8)..(8): n is a, c, g, or u
caggaucnacaacaaccag

SEQ ID NO: 139165 - RNA, 20 nt, Artificial Sequence
  Synthetic
  misc_feature (9)..(9): n is a, c, g, or u
ccaggaucnacaacaaccag

SEQ ID NO: 139166 - RNA, 21 nt, Artificial Sequence
  Synthetic
  misc_feature (10)..(10): n is a, c, g, or u
uccaggaucnacaacaaccag

SEQ ID NO: 139167 - RNA, 22 nt, Artificial Sequence
  Synthetic
  misc_feature (11)..(11): n is a, c, g, or u
uuccaggaucnacaacaaccag

SEQ ID NO: 139168 - RNA, 23 nt, Artificial Sequence
  Synthetic
  misc_feature (12)..(12): n is a, c, g, or u
auuccaggaucnacaacaaccag

SEQ ID NO: 139169 - RNA, 24 nt, Artificial Sequence
  Synthetic
  misc_feature (13)..(13): n is a, c, g, or u
aauuccaggaucnacaacaaccag

SEQ ID NO: 139170 - RNA, 18 nt, Artificial Sequence
  Synthetic
  misc_feature (7)..(8): n is a, c, g, or u
uggccannagccaaccag

SEQ ID NO: 139171 - RNA, 19 nt, Artificial Sequence
  Synthetic
  misc_feature (8)..(9): n is a, c, g, or u
cuggccannagccaaccag

SEQ ID NO: 139172 - RNA, 20 nt, Artificial Sequence
  Synthetic
  misc_feature (9)..(10): n is a, c, g, or u
acuggccannagccaaccag

SEQ ID NO: 139173 - RNA, 21 nt, Artificial Sequence
  Synthetic
  misc_feature (10)..(11): n is a, c, g, or u
cacuggccannagccaaccag

SEQ ID NO: 139174 - RNA, 22 nt, Artificial Sequence
  Synthetic
  misc_feature (11)..(12): n is a, c, g, or u
ccacuggccannagccaaccag

SEQ ID NO: 139175 - RNA, 23 nt, Artificial Sequence
  Synthetic
  misc_feature (12)..(13): n is a, c, g, or u
accacuggccannagccaaccag

SEQ ID NO: 139176 - RNA, 24 nt, Artificial Sequence
  Synthetic
  misc_feature (13)..(14): n is a, c, g, or u
gaccacuggccannagccaaccag

SEQ ID NO: 139177 - RNA, 18 nt, Artificial Sequence
  Synthetic
  misc_feature (5)..(5): n is a, c, g, or u
ccaanucaaacaauccag

SEQ ID NO: 139178 - RNA, 19 nt, Artificial Sequence
  Synthetic
  misc_feature (6)..(6): n is a, c, g, or u
gccaanucaaacaauccag

SEQ ID NO: 139179 - RNA, 20 nt, Artificial Sequence
  Synthetic
  misc_feature (7)..(7): n is a, c, g, or u
agccaanucaaacaauccag

SEQ ID NO: 139180 - RNA, 21 nt, Artificial Sequence
  Synthetic
  misc_feature (8)..(8): n is a, c, g, or u
gagccaanucaaacaauccag

SEQ ID NO: 139181 - RNA, 22 nt, Artificial Sequence
  Synthetic
  misc_feature (9)..(9): n is a, c, g, or u
ggagccaanucaaacaauccag

SEQ ID NO: 139182 - RNA, 23 nt, Artificial Sequence
  Synthetic
  misc_feature (10)..(10): n is a, c, g, or u
cggagccaanucaaacaauccag

SEQ ID NO: 139183 - RNA, 24 nt, Artificial Sequence
  Synthetic
  misc_feature (11)..(11): n is a, c, g, or u
ucggagccaanucaaacaauccag

SEQ ID NO: 139184 - RNA, 18 nt, Artificial Sequence
  Synthetic
uccugcugguggcuccag

SEQ ID NO: 139185 - RNA, 19 nt, Artificial Sequence
  Synthetic
uuccugcugguggcuccag

SEQ ID NO: 139186 - RNA, 20 nt, Artificial Sequence
  Synthetic
uuuccugcugguggcuccag

SEQ ID NO: 139187 - RNA, 21 nt, Artificial Sequence
  Synthetic
uuuuccugcugguggcuccag

SEQ ID NO: 139188 - RNA, 22 nt, Artificial Sequence
  Synthetic
auuuuccugcugguggcuccag

SEQ ID NO: 139189 - RNA, 23 nt, Artificial Sequence
  Synthetic
uauuuuccugcugguggcuccag

SEQ ID NO: 139190 - RNA, 24 nt, Artificial Sequence
  Synthetic
guauuuuccugcugguggcuccag

SEQ ID NO: 139191 - RNA, 18 nt, Artificial Sequence
  Synthetic
gccuccaccaaucggcag

SEQ ID NO: 139192 - RNA, 19 nt, Artificial Sequence
  Synthetic
ugccuccaccaaucggcag

SEQ ID NO: 139193 - RNA, 20 nt, Artificial Sequence
  Synthetic
cugccuccaccaaucggcag

SEQ ID NO: 139194 - RNA, 21 nt, Artificial Sequence
  Synthetic
ccugccuccaccaaucggcag

SEQ ID NO: 139195 - RNA, 22 nt, Artificial Sequence
  Synthetic
uccugccuccaccaaucggcag

SEQ ID NO: 139196 - RNA, 23 nt, Artificial Sequence
  Synthetic
cuccugccuccaccaaucggcag

SEQ ID NO: 139197 - RNA, 24 nt, Artificial Sequence
  Synthetic
ccuccugccuccaccaaucggcag

SEQ ID NO: 139198 - RNA, 18 nt, Artificial Sequence
  Synthetic
cauccucaggccaugcag

SEQ ID NO: 139199 - RNA, 19 nt, Artificial Sequence
  Synthetic
ucauccucaggccaugcag

SEQ ID NO: 139200 - RNA, 20 nt, Artificial Sequence
  Synthetic
gucauccucaggccaugcag

SEQ ID NO: 139201 - RNA, 21 nt, Artificial Sequence
  Synthetic
agucauccucaggccaugcag

SEQ ID NO: 139202 - RNA, 22 nt, Artificial Sequence
  Synthetic
cagucauccucaggccaugcag

SEQ ID NO: 139203 - RNA, 23 nt, Artificial Sequence
  Synthetic
acagucauccucaggccaugcag

SEQ ID NO: 139204 - RNA, 24 nt, Artificial Sequence
  Synthetic
gacagucauccucaggccaugcag

SEQ ID NO: 139205 - RNA, 18 nt, Artificial Sequence
  Synthetic
uucuuucccgaucaucag

SEQ ID NO: 139206 - RNA, 19 nt, Artificial Sequence
  Synthetic
auucuuucccgaucaucag

SEQ ID NO: 139207 - RNA, 20 nt, Artificial Sequence
  Synthetic
gauucuuucccgaucaucag

SEQ ID NO: 139208 - RNA, 21 nt, Artificial Sequence
  Synthetic
ggauucuuucccgaucaucag

SEQ ID NO: 139209 - RNA, 22 nt, Artificial Sequence
  Synthetic
gggauucuuucccgaucaucag

SEQ ID NO: 139210 - RNA, 23 nt, Artificial Sequence
  Synthetic
ugggauucuuucccgaucaucag

SEQ ID NO: 139211 - RNA, 24 nt, Artificial Sequence
  Synthetic
cugggauucuuucccgaucaucag

SEQ ID NO: 139212 - RNA, 18 nt, Artificial Sequence
  Synthetic
  misc_feature (10)..(10): n is a, c, g, or u
ucaccauacngcacucag

SEQ ID NO: 139213 - RNA, 19 nt, Artificial Sequence
  Synthetic
  misc_feature (11)..(11): n is a, c, g, or u
cucaccauacngcacucag

SEQ ID NO: 139214 - RNA, 20 nt, Artificial Sequence
  Synthetic
  misc_feature (12)..(12): n is a, c, g, or u
ccucaccauacngcacucag

SEQ ID NO: 139215 - RNA, 21 nt, Artificial Sequence
  Synthetic
  misc_feature (13)..(13): n is a, c, g, or u
accucaccauacngcacucag

SEQ ID NO: 139216 - RNA, 22 nt, Artificial Sequence
  Synthetic
  misc_feature (14)..(14): n is a, c, g, or u
caccucaccauacngcacucag

SEQ ID NO: 139217 - RNA, 23 nt, Artificial Sequence
  Synthetic
  misc_feature (15)..(15): n is a, c, g, or u
ucaccucaccauacngcacucag

SEQ ID NO: 139218 - RNA, 24 nt, Artificial Sequence
  Synthetic
  misc_feature (16)..(16): n is a, c, g, or u
cucaccucaccauacngcacucag

SEQ ID NO: 139219 - RNA, 18 nt, Artificial Sequence
  Synthetic
ccaccaaucggcagucag

SEQ ID NO: 139220 - RNA, 19 nt, Artificial Sequence
  Synthetic
uccaccaaucggcagucag

SEQ ID NO: 139221 - RNA, 20 nt, Artificial Sequence
  Synthetic
cuccaccaaucggcagucag

SEQ ID NO: 139222 - RNA, 21 nt, Artificial Sequence
  Synthetic
ccuccaccaaucggcagucag

SEQ ID NO: 139223 - RNA, 22 nt, Artificial Sequence
  Synthetic
gccuccaccaaucggcagucag

SEQ ID NO: 139224 - RNA, 23 nt, Artificial Sequence
  Synthetic
ugccuccaccaaucggcagucag

SEQ ID NO: 139225 - RNA, 24 nt, Artificial Sequence
  Synthetic
cugccuccaccaaucggcagucag

SEQ ID NO: 139226 - RNA, 18 nt, Artificial Sequence
  Synthetic
  misc_feature (4)..(4): n is a, c, g, or u
uggnauucuauauaagag

SEQ ID NO: 139227 - RNA, 19 nt, Artificial Sequence
  Synthetic
  misc_feature (5)..(5): n is a, c, g, or u
cuggnauucuauauaagag

SEQ ID NO: 139228 - RNA, 20 nt, Artificial Sequence
  Synthetic
  misc_feature (6)..(6): n is a, c, g, or u
gcuggnauucuauauaagag

SEQ ID NO: 139229 - RNA, 21 nt, Artificial Sequence
  Synthetic
  misc_feature (7)..(7): n is a, c, g, or u
ggcuggnauucuauauaagag

SEQ ID NO: 139230 - RNA, 22 nt, Artificial Sequence
  Synthetic
  misc_feature (8)..(8): n is a, c, g, or u
aggcuggnauucuauauaagag

SEQ ID NO: 139231 - RNA, 23 nt, Artificial Sequence
  Synthetic
  misc_feature (9)..(9): n is a, c, g, or u
aaggcuggnauucuauauaagag

SEQ ID NO: 139232 - RNA, 24 nt, Artificial Sequence
  Synthetic
  misc_feature (10)..(10): n is a, c, g, or u
gaaggcuggnauucuauauaagag

SEQ ID NO: 139233 - RNA, 18 nt, Artificial Sequence
  Synthetic
  misc_feature (8)..(8): n is a, c, g, or u
cucugcangaucccagag

SEQ ID NO: 139234 - RNA, 19 nt, Artificial Sequence
  Synthetic
  misc_feature (9)..(9): n is a, c, g, or u
gcucugcangaucccagag

SEQ ID NO: 139235 - RNA, 20 nt, Artificial Sequence
  Synthetic
  misc_feature (10)..(10): n is a, c, g, or u
agcucugcangaucccagag

SEQ ID NO: 139236 - RNA, 21 nt, Artificial Sequence
  Synthetic
  misc_feature (11)..(11): n is a, c, g, or u
aagcucugcangaucccagag

SEQ ID NO: 139237 - RNA, 22 nt, Artificial Sequence
  Synthetic
  misc_feature (12)..(12): n is a, c, g, or u
caagcucugcangaucccagag

SEQ ID NO: 139238 - RNA, 23 nt, Artificial Sequence
  Synthetic
  misc_feature (13)..(13): n is a, c, g, or u
ccaagcucugcangaucccagag

SEQ ID NO: 139239 - RNA, 24 nt, Artificial Sequence
  Synthetic
  misc_feature (14)..(14): n is a, c, g, or u
accaagcucugcangaucccagag

SEQ ID NO: 139240 - RNA, 18 nt, Artificial Sequence
  Synthetic
ccucacaauaccgcagag

SEQ ID NO: 139241 - RNA, 19 nt, Artificial Sequence
  Synthetic
uccucacaauaccgcagag

SEQ ID NO: 139242 - RNA, 20 nt, Artificial Sequence
  Synthetic
auccucacaauaccgcagag

SEQ ID NO: 139243 - RNA, 21 nt, Artificial Sequence
  Synthetic
aauccucacaauaccgcagag

SEQ ID NO: 139244 - RNA, 22 nt, Artificial Sequence
  Synthetic
gaauccucacaauaccgcagag

SEQ ID NO: 139245 - RNA, 23 nt, Artificial Sequence
  Synthetic
agaauccucacaauaccgcagag

SEQ ID NO: 139246 - RNA, 24 nt, Artificial Sequence
  Synthetic
aagaauccucacaauaccgcagag

SEQ ID NO: 139247 - RNA, 18 nt, Artificial Sequence
  Synthetic
  misc_feature (7)..(7): n is a, c, g, or u
gaggagnugggggaggag

SEQ ID NO: 139248 - RNA, 19 nt, Artificial Sequence
  Synthetic
  misc_feature (8)..(8): n is a, c, g, or u
ggaggagnugggggaggag

SEQ ID NO: 139249 - RNA, 20 nt, Artificial Sequence
  Synthetic
  misc_feature (9)..(9): n is a, c, g, or u
gggaggagnugggggaggag

SEQ ID NO: 139250 - RNA, 21 nt, Artificial Sequence
  Synthetic
  misc_feature (10)..(10): n is a, c, g, or u
ugggaggagnugggggaggag

SEQ ID NO: 139251 - RNA, 22 nt, Artificial Sequence
  Synthetic
  misc_feature (11)..(11): n is a, c, g, or u
cugggaggagnugggggaggag

SEQ ID NO: 139252 - RNA, 23 nt, Artificial Sequence
  Synthetic
  misc_feature (12)..(12): n is a, c, g, or u
acugggaggagnugggggaggag

SEQ ID NO: 139253 - RNA, 24 nt, Artificial Sequence
  Synthetic
  misc_feature (13)..(13): n is a, c, g, or u
gacugggaggagnugggggaggag

SEQ ID NO: 139254 - RNA, 18 nt, Artificial Sequence
  Synthetic
  misc_feature (6)..(6): n is a, c, g, or u
uuuaangacugggaggag

SEQ ID NO: 139255 - RNA, 19 nt, Artificial Sequence
  Synthetic
  misc_feature (7)..(7): n is a, c, g, or u
guuuaangacugggaggag

SEQ ID NO: 139256 - RNA, 20 nt, Artificial Sequence
  Synthetic
  misc_feature (8)..(8): n is a, c, g, or u
uguuuaangacugggaggag

SEQ ID NO: 139257 - RNA, 21 nt, Artificial Sequence
  Synthetic
  misc_feature (9)..(9): n is a, c, g, or u
guguuuaangacugggaggag

SEQ ID NO: 139258 - RNA, 22 nt, Artificial Sequence
  Synthetic
  misc_feature (10)..(10): n is a, c, g, or u
uguguuuaangacugggaggag

SEQ ID NO: 139259 - RNA, 23 nt, Artificial Sequence
  Synthetic
  misc_feature (11)..(11): n is a, c, g, or u
guguguuuaangacugggaggag

SEQ ID NO: 139260 - RNA, 24 nt, Artificial Sequence
  Synthetic
  misc_feature (12)..(12): n is a, c, g, or u
uguguguuuaangacugggaggag

SEQ ID NO: 139261 - RNA, 18 nt, Artificial Sequence
  Synthetic
  misc_feature (1)..(1): n is a, c, g, or u
nagccaaccagguaggag

SEQ ID NO: 139262 - RNA, 19 nt, Artificial Sequence
  Synthetic
  misc_feature (1)..(2): n is a, c, g, or u
nnagccaaccagguaggag

SEQ ID NO: 139263 - RNA, 20 nt, Artificial Sequence
  Synthetic
  misc_feature (2)..(3): n is a, c, g, or u
annagccaaccagguaggag

SEQ ID NO: 139264 - RNA, 21 nt, Artificial Sequence
  Synthetic
  misc_feature (3)..(4): n is a, c, g, or u
cannagccaaccagguaggag

SEQ ID NO: 139265 - RNA, 22 nt, Artificial Sequence
  Synthetic
  misc_feature (4)..(5): n is a, c, g, or u
ccannagccaaccagguaggag

SEQ ID NO: 139266 - RNA, 23 nt, Artificial Sequence
  Synthetic
  misc_feature (5)..(6): n is a, c, g, or u
gccannagccaaccagguaggag

SEQ ID NO: 139267 - RNA, 24 nt, Artificial Sequence
  Synthetic
  misc_feature (6)..(7): n is a, c, g, or u
ggccannagccaaccagguaggag

SEQ ID NO: 139268 - RNA, 18 nt, Artificial Sequence
  Synthetic
auuuggucucuuucggag

SEQ ID NO: 139269 - RNA, 19 nt, Artificial Sequence
  Synthetic
uauuuggucucuuucggag

SEQ ID NO: 139270 - RNA, 20 nt, Artificial Sequence
  Synthetic
  misc_feature (1)..(1): n is a, c, g, or u
nuauuuggucucuuucggag

SEQ ID NO: 139271 - RNA, 21 nt, Artificial Sequence
  Synthetic
  misc_feature (2)..(2): n is a, c, g, or u
anuauuuggucucuuucggag

SEQ ID NO: 139272 - RNA, 22 nt, Artificial Sequence
  Synthetic
  misc_feature (3)..(3): n is a, c, g, or u
ganuauuuggucucuuucggag

SEQ ID NO: 139273 - RNA, 23 nt, Artificial Sequence
  Synthetic
  misc_feature (4)..(4): n is a, c, g, or u
uganuauuuggucucuuucggag

SEQ ID NO: 139274 - RNA, 24 nt, Artificial Sequence
  Synthetic
  misc_feature (5)..(5): n is a, c, g, or u
uuganuauuuggucucuuucggag

SEQ ID NO: 139275 - RNA, 18 nt, Artificial Sequence
  Synthetic
  misc_feature (16)..(16): n is a, c, g, or u
cccuaacaaaacaaanag

SEQ ID NO: 139276 - RNA, 19 nt, Artificial Sequence
  Synthetic
  misc_feature (17)..(17): n is a, c, g, or u
acccuaacaaaacaaanag

SEQ ID NO: 139277 - RNA, 20 nt, Artificial Sequence
  Synthetic
  misc_feature (18)..(18): n is a, c, g, or u
aacccuaacaaaacaaanag

SEQ ID NO: 139278 - RNA, 21 nt, Artificial Sequence
  Synthetic
  misc_feature (19)..(19): n is a, c, g, or u
aaacccuaacaaaacaaanag

SEQ ID NO: 139279 - RNA, 22 nt, Artificial Sequence
  Synthetic
  misc_feature (20)..(20): n is a, c, g, or u
uaaacccuaacaaaacaaanag

SEQ ID NO: 139280 - RNA, 23 nt, Artificial Sequence
  Synthetic
  misc_feature (21)..(21): n is a, c, g, or u
uuaaacccuaacaaaacaaanag

SEQ ID NO: 139281 - RNA, 24 nt, Artificial Sequence
  Synthetic
  misc_feature (22)..(22): n is a, c, g, or u
uuuaaacccuaacaaaacaaanag

SEQ ID NO: 139282 - RNA, 18 nt, Artificial Sequence
  Synthetic
ccgaggcagguccccuag

SEQ ID NO: 139283 - RNA, 19 nt, Artificial Sequence
  Synthetic
accgaggcagguccccuag

SEQ ID NO: 139284 - RNA, 20 nt, Artificial Sequence
  Synthetic
gaccgaggcagguccccuag

SEQ ID NO: 139285 - RNA, 21 nt, Artificial Sequence
  Synthetic
  misc_feature (1)..(1): n is a, c, g, or u
ngaccgaggcagguccccuag

SEQ ID NO: 139286 - RNA, 22 nt, Artificial Sequence
  Synthetic
  misc_feature (2)..(2): n is a, c, g, or u
gngaccgaggcagguccccuag

SEQ ID NO: 139287 - RNA, 23 nt, Artificial Sequence
  Synthetic
  misc_feature (3)..(3): n is a, c, g, or u
cgngaccgaggcagguccccuag

SEQ ID NO: 139288 - RNA, 24 nt, Artificial Sequence
  Synthetic
  misc_feature (4)..(4): n is a, c, g, or u
acgngaccgaggcagguccccuag

SEQ ID NO: 139289 - RNA, 18 nt, Artificial Sequence
  Synthetic
cuucucucaauuuucuag

SEQ ID NO: 139290 - RNA, 19 nt, Artificial Sequence
  Synthetic
acuucucucaauuuucuag

SEQ ID NO: 139291 - RNA, 20 nt, Artificial Sequence
  Synthetic
gacuucucucaauuuucuag

SEQ ID NO: 139292 - RNA, 21 nt, Artificial Sequence
  Synthetic
ggacuucucucaauuuucuag

SEQ ID NO: 139293 - RNA, 22 nt, Artificial Sequence
  Synthetic
uggacuucucucaauuuucuag

SEQ ID NO: 139294 - RNA, 23 nt, Artificial Sequence
  Synthetic
guggacuucucucaauuuucuag

SEQ ID NO: 139295 - RNA, 24 nt, Artificial Sequence
  Synthetic
gguggacuucucucaauuuucuag

SEQ ID NO: 139296 - RNA, 18 nt, Artificial Sequence
  Synthetic
  misc_feature (11)..(11): n is a, c, g, or u
  misc_feature (14)..(15): n is a, c, g, or u
cuaaauauuunccnnuag

SEQ ID NO: 139297 - RNA, 19 nt, Artificial Sequence
  Synthetic
  misc_feature (12)..(12): n is a, c, g, or u
  misc_feature (15)..(16): n is a, c, g, or u
acuaaauauuunccnnuag

SEQ ID NO: 139298 - RNA, 20 nt, Artificial Sequence
  Synthetic
  misc_feature (13)..(13): n is a, c, g, or u
  misc_feature (16)..(17): n is a, c, g, or u
cacuaaauauuunccnnuag

SEQ ID NO: 139299 - RNA, 21 nt, Artificial Sequence
  Synthetic
  misc_feature (1)..(1): n is a, c, g, or u
  misc_feature (14)..(14): n is a, c, g, or u
  misc_feature (17)..(18): n is a, c, g, or u
ncacuaaauauuunccnnuag

SEQ ID NO: 139300 - RNA, 22 nt, Artificial Sequence
  Synthetic
  misc_feature (1)..(2): n is a, c, g, or u
  misc_feature (15)..(15): n is a, c, g, or u
  misc_feature (18)..(19): n is a, c, g, or u
nncacuaaauauuunccnnuag

SEQ ID NO: 139301 - RNA, 23 nt, Artificial Sequence
  Synthetic
  misc_feature (2)..(3): n is a, c, g, or u
  misc_feature (16)..(16): n is a, c, g, or u
  misc_feature (19)..(20): n is a, c, g, or u
cnncacuaaauauuunccnnuag

SEQ ID NO: 139302 - RNA, 24 nt, Artificial Sequence
  Synthetic
  misc_feature (1)..(1): n is a, c, g, or u
  misc_feature (3)..(4): n is a, c, g, or u
  misc_feature (17)..(17): n is a, c, g, or u
  misc_feature (20)..(21): n is a, c, g, or u
ncnncacuaaauauuunccnnuag

SEQ ID NO: 139303 - RNA, 18 nt, Artificial Sequence
  Synthetic
  misc_feature (2)..(2): n is a, c, g, or u
gnugggggaggagauuag

SEQ ID NO: 139304 - RNA, 19 nt, Artificial Sequence
  Synthetic
  misc_feature (3)..(3): n is a, c, g, or u
agnugggggaggagauuag

SEQ ID NO: 139305 - RNA, 20 nt, Artificial Sequence
  Synthetic
  misc_feature (4)..(4): n is a, c, g, or u
gagnugggggaggagauuag

SEQ ID NO: 139306 - RNA, 21 nt, Artificial Sequence
  Synthetic
  misc_feature (5)..(5): n is a, c, g, or u
ggagnugggggaggagauuag

SEQ ID NO: 139307 - RNA, 22 nt, Artificial Sequence
  Synthetic
  misc_feature (6)..(6): n is a, c, g, or u
aggagnugggggaggagauuag

SEQ ID NO: 139308 - RNA, 23 nt, Artificial Sequence
  Synthetic
  misc_feature (7)..(7): n is a, c, g, or u
gaggagnugggggaggagauuag

SEQ ID NO: 139309 - RNA, 24 nt, Artificial Sequence
  Synthetic
  misc_feature (8)..(8): n is a, c, g, or u
ggaggagnugggggaggagauuag

SEQ ID NO: 139310 - RNA, 18 nt, Artificial Sequence
  Synthetic
cucccagcaaugucaacg

SEQ ID NO: 139311 - RNA, 19 nt, Artificial Sequence
  Synthetic
acucccagcaaugucaacg

SEQ ID NO: 139312 - RNA, 20 nt, Artificial Sequence
  Synthetic
gacucccagcaaugucaacg

SEQ ID NO: 139313 - RNA, 21 nt, Artificial Sequence
  Synthetic
ggacucccagcaaugucaacg

SEQ ID NO: 139314 - RNA, 22 nt, Artificial Sequence
  Synthetic
uggacucccagcaaugucaacg

SEQ ID NO: 139315 - RNA, 23 nt, Artificial Sequence
  Synthetic
uuggacucccagcaaugucaacg

SEQ ID NO: 139316 - RNA, 24 nt, Artificial Sequence
  Synthetic
cuuggacucccagcaaugucaacg

SEQ ID NO: 139317 - RNA, 18 nt, Artificial Sequence
  Synthetic
ugcuguacaaaaccuacg

SEQ ID NO: 139318 - RNA, 19 nt, Artificial Sequence
  Synthetic
uugcuguacaaaaccuacg

SEQ ID NO: 139319 - RNA, 20 nt, Artificial Sequence
  Synthetic
guugcuguacaaaaccuacg

SEQ ID NO: 139320 - RNA, 21 nt, Artificial Sequence
  Synthetic
uguugcuguacaaaaccuacg

SEQ ID NO: 139321 - RNA, 22 nt, Artificial Sequence
  Synthetic
auguugcuguacaaaaccuacg

SEQ ID NO: 139322 - RNA, 23 nt, Artificial Sequence
  Synthetic
cauguugcuguacaaaaccuacg

SEQ ID NO: 139323 - RNA, 24 nt, Artificial Sequence
  Synthetic
ucauguugcuguacaaaaccuacg

SEQ ID NO: 139324 - RNA, 18 nt, Artificial Sequence
  Synthetic
  misc_feature (10)..(10): n is a, c, g, or u
cgaccccucncggggccg

SEQ ID NO: 139325 - RNA, 19 nt, Artificial Sequence
  Synthetic
  misc_feature (11)..(11): n is a, c, g, or u
acgaccccucncggggccg

SEQ ID NO: 139326 - RNA, 20 nt, Artificial Sequence
  Synthetic
  misc_feature (12)..(12): n is a, c, g, or u
gacgaccccucncggggccg

SEQ ID NO: 139327 - RNA, 21 nt, Artificial Sequence
  Synthetic
  misc_feature (13)..(13): n is a, c, g, or u
ggacgaccccucncggggccg

SEQ ID NO: 139328 - RNA, 22 nt, Artificial Sequence
  Synthetic
  misc_feature (14)..(14): n is a, c, g, or u
cggacgaccccucncggggccg

SEQ ID NO: 139329 - RNA, 23 nt, Artificial Sequence
  Synthetic
  misc_feature (15)..(15): n is a, c, g, or u
gcggacgaccccucncggggccg

SEQ ID NO: 139330 - RNA, 24 nt, Artificial Sequence
  Synthetic
  misc_feature (16)..(16): n is a, c, g, or u
cgcggacgaccccucncggggccg

SEQ ID NO: 139331 - RNA, 18 nt, Artificial Sequence
  Synthetic
ucggcgcugaaucccgcg

SEQ ID NO: 139332 - RNA, 19 nt, Artificial Sequence
  Synthetic
gucggcgcugaaucccgcg

SEQ ID NO: 139333 - RNA, 20 nt, Artificial Sequence
  Synthetic
cgucggcgcugaaucccgcg

SEQ ID NO: 139334 - RNA, 18 nt, Artificial Sequence
  Synthetic
  misc_feature (1)..(1): n is a, c, g, or u
nggccaucagcgcaugcg

SEQ ID NO: 139335 - RNA, 19 nt, Artificial Sequence
  Synthetic
  misc_feature (2)..(2): n is a, c, g, or u
unggccaucagcgcaugcg

SEQ ID NO: 139336 - RNA, 20 nt, Artificial Sequence
  Synthetic
  misc_feature (3)..(3): n is a, c, g, or u
aunggccaucagcgcaugcg

SEQ ID NO: 139337 - RNA, 21 nt, Artificial Sequence
  Synthetic
  misc_feature (1)..(1): n is a, c, g, or u
  misc_feature (4)..(4): n is a, c, g, or u
naunggccaucagcgcaugcg

SEQ ID NO: 139338 - RNA, 22 nt, Artificial Sequence
  Synthetic
  misc_feature (2)..(2): n is a, c, g, or u
  misc_feature (5)..(5): n is a, c, g, or u
cnaunggccaucagcgcaugcg

SEQ ID NO: 139339 - RNA, 23 nt, Artificial Sequence
  Synthetic
  misc_feature (3)..(3): n is a, c, g, or u
  misc_feature (6)..(6): n is a, c, g, or u
gcnaunggccaucagcgcaugcg

SEQ ID NO: 139340 - RNA, 24 nt, Artificial Sequence
  Synthetic
  misc_feature (4)..(4): n is a, c, g, or u
  misc_feature (7)..(7): n is a, c, g, or u
ggcnaunggccaucagcgcaugcg

SEQ ID NO: 139341 - RNA, 18 nt, Artificial Sequence
  Synthetic
  misc_feature (1)..(1): n is a, c, g, or u
ngccucagcucuguaucg

SEQ ID NO: 139342 - RNA, 19 nt, Artificial Sequence
  Synthetic
  misc_feature (2)..(2): n is a, c, g, or u
cngccucagcucuguaucg

SEQ ID NO: 139343 - RNA, 20 nt, Artificial Sequence
  Synthetic
  misc_feature (3)..(3): n is a, c, g, or u
acngccucagcucuguaucg

SEQ ID NO: 139344 - RNA, 21 nt, Artificial Sequence
  Synthetic
  misc_feature (1)..(1): n is a, c, g, or u
  misc_feature (4)..(4): n is a, c, g, or u
nacngccucagcucuguaucg

SEQ ID NO: 139345 - RNA, 22 nt, Artificial Sequence
  Synthetic
  misc_feature (2)..(2): n is a, c, g, or u
  misc_feature (5)..(5): n is a, c, g, or u
anacngccucagcucuguaucg

SEQ ID NO: 139346 - RNA, 23 nt, Artificial Sequence
  Synthetic
  misc_feature (3)..(3): n is a, c, g, or u
  misc_feature (6)..(6): n is a, c, g, or u
ganacngccucagcucuguaucg

SEQ ID NO: 139347 - RNA, 24 nt, Artificial Sequence
  Synthetic
  misc_feature (1)..(1): n is a, c, g, or u
  misc_feature (4)..(4): n is a, c, g, or u
  misc_feature (7)..(7): n is a, c, g, or u
nganacngccucagcucuguaucg

SEQ ID NO: 139348 - RNA, 18 nt, Artificial Sequence
  Synthetic
uuggucaucaaaaccucg

SEQ ID NO: 139349 - RNA, 19 nt, Artificial Sequence
  Synthetic
guuggucaucaaaaccucg

SEQ ID NO: 139350 - RNA, 20 nt, Artificial Sequence
  Synthetic
gguuggucaucaaaaccucg

SEQ ID NO: 139351 - RNA, 18 nt, Artificial Sequence
  Synthetic
aucucaaucgccgcgucg

SEQ ID NO: 139352 - RNA, 19 nt, Artificial Sequence
  Synthetic
gaucucaaucgccgcgucg

SEQ ID NO: 139353 - RNA, 20 nt, Artificial Sequence
  Synthetic
agaucucaaucgccgcgucg

SEQ ID NO: 139354 - RNA, 18 nt, Artificial Sequence
  Synthetic
  misc_feature (13)..(13): n is a, c, g, or u
ugccaacuggauncuucg

SEQ ID NO: 139355 - RNA, 19 nt, Artificial Sequence
  Synthetic
  misc_feature (14)..(14): n is a, c, g, or u
cugccaacuggauncuucg

SEQ ID NO: 139356 - RNA, 20 nt, Artificial Sequence
  Synthetic
  misc_feature (15)..(15): n is a, c, g, or u
acugccaacuggauncuucg

SEQ ID NO: 139357 - RNA, 21 nt, Artificial Sequence
  Synthetic
  misc_feature (16)..(16): n is a, c, g, or u
uacugccaacuggauncuucg

SEQ ID NO: 139358 - RNA, 22 nt, Artificial Sequence
  Synthetic
  misc_feature (17)..(17): n is a, c, g, or u
guacugccaacuggauncuucg

SEQ ID NO: 139359 - RNA, 23 nt, Artificial Sequence
  Synthetic
  misc_feature (18)..(18): n is a, c, g, or u
uguacugccaacuggauncuucg

SEQ ID NO: 139360 - RNA, 24 nt, Artificial Sequence
  Synthetic
  misc_feature (1)..(1): n is a, c, g, or u
  misc_feature (19)..(19): n is a, c, g, or u
nuguacugccaacuggauncuucg

SEQ ID NO: 139361 - RNA, 18 nt, Artificial Sequence
  Synthetic
cauuuguucagugguucg

SEQ ID NO: 139362 - RNA, 19 nt, Artificial Sequence
  Synthetic
ccauuuguucagugguucg

SEQ ID NO: 139363 - RNA, 20 nt, Artificial Sequence
  Synthetic
gccauuuguucagugguucg

SEQ ID NO: 139364 - RNA, 21 nt, Artificial Sequence
  Synthetic
ugccauuuguucagugguucg

SEQ ID NO: 139365 - RNA, 22 nt, Artificial Sequence
  Synthetic
gugccauuuguucagugguucg

SEQ ID NO: 139366 - RNA, 23 nt, Artificial Sequence
  Synthetic
agugccauuuguucagugguucg

SEQ ID NO: 139367 - RNA, 24 nt, Artificial Sequence
  Synthetic
uagugccauuuguucagugguucg

SEQ ID NO: 139368 - RNA, 18 nt, Artificial Sequence
  Synthetic
aucaaaaccucgcaaagg

SEQ ID NO: 139369 - RNA, 19 nt, Artificial Sequence
  Synthetic
caucaaaaccucgcaaagg

SEQ ID NO: 139370 - RNA, 20 nt, Artificial Sequence
  Synthetic
ucaucaaaaccucgcaaagg

SEQ ID NO: 139371 - RNA, 21 nt, Artificial Sequence
  Synthetic
gucaucaaaaccucgcaaagg

SEQ ID NO: 139372 - RNA, 22 nt, Artificial Sequence
  Synthetic
ggucaucaaaaccucgcaaagg

SEQ ID NO: 139373 - RNA, 23 nt, Artificial Sequence
  Synthetic
uggucaucaaaaccucgcaaagg

SEQ ID NO: 139374 - RNA, 24 nt, Artificial Sequence
  Synthetic
uuggucaucaaaaccucgcaaagg

SEQ ID NO: 139375 - RNA, 18 nt, Artificial Sequence
  Synthetic
uuccuuggacucauaagg

SEQ ID NO: 139376 - RNA, 19 nt, Artificial Sequence
  Synthetic
auuccuuggacucauaagg

SEQ ID NO: 139377 - RNA, 20 nt, Artificial Sequence
  Synthetic
uauuccuuggacucauaagg

SEQ ID NO: 139378 - RNA, 21 nt, Artificial Sequence
  Synthetic
guauuccuuggacucauaagg

SEQ ID NO: 139379 - RNA, 22 nt, Artificial Sequence
  Synthetic
aguauuccuuggacucauaagg

SEQ ID NO: 139380 - RNA, 23 nt, Artificial Sequence
  Synthetic
uaguauuccuuggacucauaagg

SEQ ID NO: 139381 - RNA, 24 nt, Artificial Sequence
  Synthetic
uuaguauuccuuggacucauaagg

SEQ ID NO: 139382 - RNA, 18 nt, Artificial Sequence
  Synthetic
  misc_feature (6)..(7): n is a, c, g, or u
ggccannagccaaccagg

SEQ ID NO: 139383 - RNA, 19 nt, Artificial Sequence
  Synthetic
  misc_feature (7)..(8): n is a, c, g, or u
uggccannagccaaccagg

SEQ ID NO: 139384 - RNA, 20 nt, Artificial Sequence
  Synthetic
  misc_feature (8)..(9): n is a, c, g, or u
cuggccannagccaaccagg

SEQ ID NO: 139385 - RNA, 21 nt, Artificial Sequence
  Synthetic
  misc_feature (9)..(10): n is a, c, g, or u
acuggccannagccaaccagg

SEQ ID NO: 139386 - RNA, 22 nt, Artificial Sequence
  Synthetic
  misc_feature (10)..(11): n is a, c, g, or u
cacuggccannagccaaccagg

SEQ ID NO: 139387 - RNA, 23 nt, Artificial Sequence
  Synthetic
  misc_feature (11)..(12): n is a, c, g, or u
ccacuggccannagccaaccagg

SEQ ID NO: 139388 - RNA, 24 nt, Artificial Sequence
  Synthetic
  misc_feature (12)..(13): n is a, c, g, or u
accacuggccannagccaaccagg

SEQ ID NO: 139389 - RNA, 18 nt, Artificial Sequence
  Synthetic
ugggguggagcccucagg

SEQ ID NO: 139390 - RNA, 19 nt, Artificial Sequence
  Synthetic
uugggguggagcccucagg

SEQ ID NO: 139391 - RNA, 20 nt, Artificial Sequence
  Synthetic
uuugggguggagcccucagg

SEQ ID NO: 139392 - RNA, 21 nt, Artificial Sequence
  Synthetic
uuuugggguggagcccucagg

SEQ ID NO: 139393 - RNA, 22 nt, Artificial Sequence
  Synthetic
  misc_feature (1)..(1): n is a, c, g, or u
nuuuugggguggagcccucagg

SEQ ID NO: 139394 - RNA, 23 nt, Artificial Sequence
  Synthetic
  misc_feature (2)..(2): n is a, c, g, or u
unuuuugggguggagcccucagg

SEQ ID NO: 139395 - RNA, 24 nt, Artificial Sequence
  Synthetic
  misc_feature (3)..(3): n is a, c, g, or u
gunuuuugggguggagcccucagg

SEQ ID NO: 139396 - RNA, 18 nt, Artificial Sequence
  Synthetic
  misc_feature (13)..(13): n is a, c, g, or u
ucgucaaucuccncgagg

SEQ ID NO: 139397 - RNA, 19 nt, Artificial Sequence
  Synthetic
  misc_feature (14)..(14): n is a, c, g, or u
cucgucaaucuccncgagg

SEQ ID NO: 139398 - RNA, 20 nt, Artificial Sequence
  Synthetic
  misc_feature (15)..(15): n is a, c, g, or u
ucucgucaaucuccncgagg

SEQ ID NO: 139399 - RNA, 21 nt, Artificial Sequence
  Synthetic
  misc_feature (16)..(16): n is a, c, g, or u
aucucgucaaucuccncgagg

SEQ ID NO: 139400 - RNA, 22 nt, Artificial Sequence
  Synthetic
  misc_feature (17)..(17): n is a, c, g, or u
caucucgucaaucuccncgagg

SEQ ID NO: 139401 - RNA, 23 nt, Artificial Sequence
  Synthetic
  misc_feature (18)..(18): n is a, c, g, or u
acaucucgucaaucuccncgagg

SEQ ID NO: 139402 - RNA, 24 nt, Artificial Sequence
  Synthetic
  misc_feature (19)..(19): n is a, c, g, or u
cacaucucgucaaucuccncgagg

SEQ ID NO: 139403 - RNA, 18 nt, Artificial Sequence
  Synthetic
  misc_feature (2)..(3): n is a, c, g, or u
annagccaaccagguagg

SEQ ID NO: 139404 - RNA, 19 nt, Artificial Sequence
  Synthetic
  misc_feature (3)..(4): n is a, c, g, or u
cannagccaaccagguagg

SEQ ID NO: 139405 - RNA, 20 nt, Artificial Sequence
  Synthetic
  misc_feature (4)..(5): n is a, c, g, or u
ccannagccaaccagguagg

SEQ ID NO: 139406 - RNA, 21 nt, Artificial Sequence
  Synthetic
  misc_feature (5)..(6): n is a, c, g, or u
gccannagccaaccagguagg

SEQ ID NO: 139407 - RNA, 22 nt, Artificial Sequence
  Synthetic
  misc_feature (6)..(7): n is a, c, g, or u
ggccannagccaaccagguagg

SEQ ID NO: 139408 - RNA, 23 nt, Artificial Sequence
  Synthetic
  misc_feature (7)..(8): n is a, c, g, or u
uggccannagccaaccagguagg

SEQ ID NO: 139409 - RNA, 24 nt, Artificial Sequence
  Synthetic
  misc_feature (8)..(9): n is a, c, g, or u
cuggccannagccaaccagguagg

SEQ ID NO: 139410 - RNA, 18 nt, Artificial Sequence
  Synthetic
guauuaggaggcuguagg

SEQ ID NO: 139411 - RNA, 19 nt, Artificial Sequence
  Synthetic
uguauuaggaggcuguagg

SEQ ID NO: 139412 - RNA, 20 nt, Artificial Sequence
  Synthetic
uuguauuaggaggcuguagg

SEQ ID NO: 139413 - RNA, 21 nt, Artificial Sequence
  Synthetic
uuuguauuaggaggcuguagg

SEQ ID NO: 139414 - RNA, 22 nt, Artificial Sequence
  Synthetic
cuuuguauuaggaggcuguagg

SEQ ID NO: 139415 - RNA, 23 nt, Artificial Sequence
  Synthetic
ucuuuguauuaggaggcuguagg

SEQ ID NO: 139416 - RNA, 24 nt, Artificial Sequence
  Synthetic
  misc_feature (1)..(1): n is a, c, g, or u
nucuuuguauuaggaggcuguagg

SEQ ID NO: 139417 - RNA, 18 nt, Artificial Sequence
  Synthetic
gcuguacaaaaccuacgg

SEQ ID NO: 139418 - RNA, 19 nt, Artificial Sequence
  Synthetic
ugcuguacaaaaccuacgg

SEQ ID NO: 139419 - RNA, 20 nt, Artificial Sequence
  Synthetic
uugcuguacaaaaccuacgg

SEQ ID NO: 139420 - RNA, 21 nt, Artificial Sequence
  Synthetic
guugcuguacaaaaccuacgg

SEQ ID NO: 139421 - RNA, 22 nt, Artificial Sequence
  Synthetic
uguugcuguacaaaaccuacgg

SEQ ID NO: 139422 - RNA, 23 nt, Artificial Sequence
  Synthetic
auguugcuguacaaaaccuacgg

SEQ ID NO: 139423 - RNA, 24 nt, Artificial Sequence
  Synthetic
cauguugcuguacaaaaccuacgg

SEQ ID NO: 139424 - RNA, 18 nt, Artificial Sequence
  Synthetic
uguuuugcucgcagccgg

SEQ ID NO: 139425 - RNA, 19 nt, Artificial Sequence
  Synthetic
uuguuuugcucgcagccgg

SEQ ID NO: 139426 - RNA, 20 nt, Artificial Sequence
  Synthetic
cuuguuuugcucgcagccgg

SEQ ID NO: 139427 - RNA, 21 nt, Artificial Sequence
  Synthetic
gcuuguuuugcucgcagccgg

SEQ ID NO: 139428 - RNA, 22 nt, Artificial Sequence
  Synthetic
cgcuuguuuugcucgcagccgg

SEQ ID NO: 139429 - RNA, 23 nt, Artificial Sequence
  Synthetic
ccgcuuguuuugcucgcagccgg

SEQ ID NO: 139430 - RNA, 24 nt, Artificial Sequence
  Synthetic
gccgcuuguuuugcucgcagccgg

SEQ ID NO: 139431 - RNA, 18 nt, Artificial Sequence
  Synthetic
aggagugggagcauucgg

SEQ ID NO: 139432 - RNA, 19 nt, Artificial Sequence
  Synthetic
uaggagugggagcauucgg

SEQ ID NO: 139433 - RNA, 20 nt, Artificial Sequence
  Synthetic
guaggagugggagcauucgg

SEQ ID NO: 139434 - RNA, 21 nt, Artificial Sequence
  Synthetic
gguaggagugggagcauucgg

SEQ ID NO: 139435 - RNA, 22 nt, Artificial Sequence
  Synthetic
agguaggagugggagcauucgg

SEQ ID NO: 139436 - RNA, 23 nt, Artificial Sequence
  Synthetic
cagguaggagugggagcauucgg

SEQ ID NO: 139437 - RNA, 24 nt, Artificial Sequence
  Synthetic
ccagguaggagugggagcauucgg

SEQ ID NO: 139438 - RNA, 18 nt, Artificial Sequence
  Synthetic
ggagugggagcauucggg

SEQ ID NO: 139439 - RNA, 19 nt, Artificial Sequence
  Synthetic
aggagugggagcauucggg

SEQ ID NO: 139440 - RNA, 20 nt, Artificial Sequence
  Synthetic
uaggagugggagcauucggg

SEQ ID NO: 139441 - RNA, 21 nt, Artificial Sequence
  Synthetic
guaggagugggagcauucggg

SEQ ID NO: 139442 - RNA, 22 nt, Artificial Sequence
  Synthetic
gguaggagugggagcauucggg

SEQ ID NO: 139443 - RNA, 23 nt, Artificial Sequence
  Synthetic
agguaggagugggagcauucggg

SEQ ID NO: 139444 - RNA, 24 nt, Artificial Sequence
  Synthetic
cagguaggagugggagcauucggg

SEQ ID NO: 139445 - RNA, 18 nt, Artificial Sequence
  Synthetic
  misc_feature (12)..(12): n is a, c, g, or u
acugggaggagnuggggg

SEQ ID NO: 139446 - RNA, 19 nt, Artificial Sequence
  Synthetic
  misc_feature (13)..(13): n is a, c, g, or u
gacugggaggagnuggggg

SEQ ID NO: 139447 - RNA, 20 nt, Artificial Sequence
  Synthetic
  misc_feature (1)..(1): n is a, c, g, or u
  misc_feature (14)..(14): n is a, c, g, or u
ngacugggaggagnuggggg

SEQ ID NO: 139448 - RNA, 21 nt, Artificial Sequence
  Synthetic
  misc_feature (2)..(2): n is a, c, g, or u
  misc_feature (15)..(15): n is a, c, g, or u
angacugggaggagnuggggg

SEQ ID NO: 139449 - RNA, 22 nt, Artificial Sequence
  Synthetic
  misc_feature (3)..(3): n is a, c, g, or u
  misc_feature (16)..(16): n is a, c, g, or u
aangacugggaggagnuggggg

SEQ ID NO: 139450 - RNA, 23 nt, Artificial Sequence
  Synthetic
  misc_feature (4)..(4): n is a, c, g, or u
  misc_feature (17)..(17): n is a, c, g, or u
uaangacugggaggagnuggggg

SEQ ID NO: 139451 - RNA, 24 nt, Artificial Sequence
  Synthetic
  misc_feature (5)..(5): n is a, c, g, or u
  misc_feature (18)..(18): n is a, c, g, or u
uuaangacugggaggagnuggggg

SEQ ID NO: 139452 - RNA, 18 nt, Artificial Sequence
  Synthetic
aacccccacuggcugggg

SEQ ID NO: 139453 - RNA, 19 nt, Artificial Sequence
  Synthetic
caacccccacuggcugggg

SEQ ID NO: 139454 - RNA, 20 nt, Artificial Sequence
  Synthetic
gcaacccccacuggcugggg

SEQ ID NO: 139455 - RNA, 21 nt, Artificial Sequence
  Synthetic
cgcaacccccacuggcugggg

SEQ ID NO: 139456 - RNA, 22 nt, Artificial Sequence
  Synthetic
acgcaacccccacuggcugggg

SEQ ID NO: 139457 - RNA, 23 nt, Artificial Sequence
  Synthetic
gacgcaacccccacuggcugggg

SEQ ID NO: 139458 - RNA, 24 nt, Artificial Sequence
  Synthetic
ugacgcaacccccacuggcugggg

SEQ ID NO: 139459 - RNA, 18 nt, Artificial Sequence
  Synthetic
  misc_feature (13)..(13): n is a, c, g, or u
gacugggaggagnugggg

SEQ ID NO: 139460 - RNA, 19 nt, Artificial Sequence
  Synthetic
  misc_feature (1)..(1): n is a, c, g, or u
  misc_feature (14)..(14): n is a, c, g, or u
ngacugggaggagnugggg

SEQ ID NO: 139461 - RNA, 20 nt, Artificial Sequence
  Synthetic
  misc_feature (2)..(2): n is a, c, g, or u
  misc_feature (15)..(15): n is a, c, g, or u
angacugggaggagnugggg

SEQ ID NO: 139462 - RNA, 21 nt, Artificial Sequence
  Synthetic
  misc_feature (3)..(3): n is a, c, g, or u
  misc_feature (16)..(16): n is a, c, g, or u
aangacugggaggagnugggg

SEQ ID NO: 139463 - RNA, 22 nt, Artificial Sequence
  Synthetic
  misc_feature (4)..(4): n is a, c, g, or u
  misc_feature (17)..(17): n is a, c, g, or u
uaangacugggaggagnugggg

SEQ ID NO: 139464 - RNA, 23 nt, Artificial Sequence
  Synthetic
  misc_feature (5)..(5): n is a, c, g, or u
  misc_feature (18)..(18): n is a, c, g, or u
uuaangacugggaggagnugggg

SEQ ID NO: 139465 - RNA, 24 nt, Artificial Sequence
  Synthetic
  misc_feature (6)..(6): n is a, c, g, or u
  misc_feature (19)..(19): n is a, c, g, or u
uuuaangacugggaggagnugggg

SEQ ID NO: 139466 - RNA, 18 nt, Artificial Sequence
  Synthetic
gaugaugugguauugggg

SEQ ID NO: 139467 - RNA, 19 nt, Artificial Sequence
  Synthetic
ggaugaugugguauugggg

SEQ ID NO: 139468 - RNA, 20 nt, Artificial Sequence
  Synthetic
uggaugaugugguauugggg

SEQ ID NO: 139469 - RNA, 21 nt, Artificial Sequence
  Synthetic
auggaugaugugguauugggg

SEQ ID NO: 139470 - RNA, 22 nt, Artificial Sequence
  Synthetic
uauggaugaugugguauugggg

SEQ ID NO: 139471 - RNA, 23 nt, Artificial Sequence
  Synthetic
auauggaugaugugguauugggg

SEQ ID NO: 139472 - RNA, 24 nt, Artificial Sequence
  Synthetic
uauauggaugaugugguauugggg

SEQ ID NO: 139473 - RNA, 18 nt, Artificial Sequence
  Synthetic
  misc_feature (7)..(7): n is a, c, g, or u
ccuuggnuggcuuugggg

SEQ ID NO: 139474 - RNA, 19 nt, Artificial Sequence
  Synthetic
  misc_feature (8)..(8): n is a, c, g, or u
gccuuggnuggcuuugggg

SEQ ID NO: 139475 - RNA, 20 nt, Artificial Sequence
  Synthetic
  misc_feature (9)..(9): n is a, c, g, or u
ugccuuggnuggcuuugggg

SEQ ID NO: 139476 - RNA, 21 nt, Artificial Sequence
  Synthetic
  misc_feature (10)..(10): n is a, c, g, or u
gugccuuggnuggcuuugggg

SEQ ID NO: 139477 - RNA, 22 nt, Artificial Sequence
  Synthetic
  misc_feature (11)..(11): n is a, c, g, or u
ugugccuuggnuggcuuugggg

SEQ ID NO: 139478 - RNA, 23 nt, Artificial Sequence
  Synthetic
  misc_feature (12)..(12): n is a, c, g, or u
cugugccuuggnuggcuuugggg

SEQ ID NO: 139479 - RNA, 24 nt, Artificial Sequence
  Synthetic
  misc_feature (13)..(13): n is a, c, g, or u
gcugugccuuggnuggcuuugggg

SEQ ID NO: 139480 - RNA, 18 nt, Artificial Sequence
  Synthetic
  misc_feature (6)..(6): n is a, c, g, or u
  misc_feature (10)..(10): n is a, c, g, or u
cacggnggunuuuugggg

SEQ ID NO: 139481 - RNA, 19 nt, Artificial Sequence
  Synthetic
  misc_feature (7)..(7): n is a, c, g, or u
  misc_feature (11)..(11): n is a, c, g, or u
acacggnggunuuuugggg

SEQ ID NO: 139482 - RNA, 20 nt, Artificial Sequence
  Synthetic
  misc_feature (8)..(8): n is a, c, g, or u
  misc_feature (12)..(12): n is a, c, g, or u
cacacggnggunuuuugggg

SEQ ID NO: 139483 - RNA, 21 nt, Artificial Sequence
  Synthetic
  misc_feature (9)..(9): n is a, c, g, or u
  misc_feature (13)..(13): n is a, c, g, or u
ccacacggnggunuuuugggg

SEQ ID NO: 139484 - RNA, 22 nt, Artificial Sequence
  Synthetic
  misc_feature (1)..(1): n is a, c, g, or u
  misc_feature (10)..(10): n is a, c, g, or u
  misc_feature (14)..(14): n is a, c, g, or u
nccacacggnggunuuuugggg

SEQ ID NO: 139485 - RNA, 23 nt, Artificial Sequence
  Synthetic
  misc_feature (2)..(2): n is a, c, g, or u
  misc_feature (11)..(11): n is a, c, g, or u
  misc_feature (15)..(15): n is a, c, g, or u
cnccacacggnggunuuuugggg

SEQ ID NO: 139486 - RNA, 24 nt, Artificial Sequence
  Synthetic
  misc_feature (3)..(3): n is a, c, g, or u
  misc_feature (12)..(12): n is a, c, g, or u
  misc_feature (16)..(16): n is a, c, g, or u
ccnccacacggnggunuuuugggg

SEQ ID NO: 139487 - RNA, 18 nt, Artificial Sequence
  Synthetic
uguuaauacuaacauggg

SEQ ID NO: 139488 - RNA, 19 nt, Artificial Sequence
  Synthetic
auguuaauacuaacauggg

SEQ ID NO: 139489 - RNA, 20 nt, Artificial Sequence
  Synthetic
uauguuaauacuaacauggg

SEQ ID NO: 139490 - RNA, 21 nt, Artificial Sequence
  Synthetic
uuauguuaauacuaacauggg

SEQ ID NO: 139491 - RNA, 22 nt, Artificial Sequence
  Synthetic
auuauguuaauacuaacauggg

SEQ ID NO: 139492 - RNA, 23 nt, Artificial Sequence
  Synthetic
aauuauguuaauacuaacauggg

SEQ ID NO: 139493 - RNA, 24 nt, Artificial Sequence
  Synthetic
caauuauguuaauacuaacauggg

SEQ ID NO: 139494 - RNA, 18 nt, Artificial Sequence
  Synthetic
accucgcaaaggcauggg

SEQ ID NO: 139495 - RNA, 19 nt, Artificial Sequence
  Synthetic
aaccucgcaaaggcauggg

SEQ ID NO: 139496 - RNA, 20 nt, Artificial Sequence
  Synthetic
aaaccucgcaaaggcauggg

SEQ ID NO: 139497 - RNA, 21 nt, Artificial Sequence
  Synthetic
aaaaccucgcaaaggcauggg

SEQ ID NO: 139498 - RNA, 22 nt, Artificial Sequence
  Synthetic
caaaaccucgcaaaggcauggg

SEQ ID NO: 139499 - RNA, 23 nt, Artificial Sequence
  Synthetic
ucaaaaccucgcaaaggcauggg

SEQ ID NO: 139500 - RNA, 24 nt, Artificial Sequence
  Synthetic
aucaaaaccucgcaaaggcauggg

SEQ ID NO: 139501 - RNA, 18 nt, Artificial Sequence
  Synthetic
ucgcaaaauaccuauggg

SEQ ID NO: 139502 - RNA, 19 nt, Artificial Sequence
  Synthetic
uucgcaaaauaccuauggg

SEQ ID NO: 139503 - RNA, 20 nt, Artificial Sequence
  Synthetic
uuucgcaaaauaccuauggg

SEQ ID NO: 139504 - RNA, 21 nt, Artificial Sequence
  Synthetic
cuuucgcaaaauaccuauggg

SEQ ID NO: 139505 - RNA, 22 nt, Artificial Sequence
  Synthetic
gcuuucgcaaaauaccuauggg

SEQ ID NO: 139506 - RNA, 23 nt, Artificial Sequence
  Synthetic
ggcuuucgcaaaauaccuauggg

SEQ ID NO: 139507 - RNA, 24 nt, Artificial Sequence
  Synthetic
gggcuuucgcaaaauaccuauggg

SEQ ID NO: 139508 - RNA, 18 nt, Artificial Sequence
  Synthetic
  misc_feature (11)..(11): n is a, c, g, or u
guguguuuaangacuggg

SEQ ID NO: 139509 - RNA, 19 nt, Artificial Sequence
  Synthetic
  misc_feature (12)..(12): n is a, c, g, or u
uguguguuuaangacuggg

SEQ ID NO: 139510 - RNA, 20 nt, Artificial Sequence
  Synthetic
  misc_feature (13)..(13): n is a, c, g, or u
cuguguguuuaangacuggg

SEQ ID NO: 139511 - RNA, 21 nt, Artificial Sequence
  Synthetic
  misc_feature (14)..(14): n is a, c, g, or u
acuguguguuuaangacuggg

SEQ ID NO: 139512 - RNA, 22 nt, Artificial Sequence
  Synthetic
  misc_feature (15)..(15): n is a, c, g, or u
gacuguguguuuaangacuggg

SEQ ID NO: 139513 - RNA, 23 nt, Artificial Sequence
  Synthetic
  misc_feature (16)..(16): n is a, c, g, or u
agacuguguguuuaangacuggg

SEQ ID NO: 139514 - RNA, 24 nt, Artificial Sequence
  Synthetic
  misc_feature (17)..(17): n is a, c, g, or u
aagacuguguguuuaangacuggg

SEQ ID NO: 139515 - RNA, 18 nt, Artificial Sequence
  Synthetic
  misc_feature (1)..(1): n is a, c, g, or u
  misc_feature (14)..(14): n is a, c, g, or u
ngacugggaggagnuggg

SEQ ID NO: 139516 - RNA, 19 nt, Artificial Sequence
  Synthetic
  misc_feature (2)..(2): n is a, c, g, or u
  misc_feature (15)..(15): n is a, c, g, or u
angacugggaggagnuggg

SEQ ID NO: 139517 - RNA, 20 nt, Artificial Sequence
  Synthetic
  misc_feature (3)..(3): n is a, c, g, or u
  misc_feature (16)..(16): n is a, c, g, or u
aangacugggaggagnuggg

SEQ ID NO: 139518 - RNA, 21 nt, Artificial Sequence
  Synthetic
  misc_feature (4)..(4): n is a, c, g, or u
  misc_feature (17)..(17): n is a, c, g, or u
uaangacugggaggagnuggg

SEQ ID NO: 139519 - RNA, 22 nt, Artificial Sequence
  Synthetic
  misc_feature (5)..(5): n is a, c, g, or u
  misc_feature (18)..(18): n is a, c, g, or u
uuaangacugggaggagnuggg

SEQ ID NO: 139520 - RNA, 23 nt, Artificial Sequence
  Synthetic
  misc_feature (6)..(6): n is a, c, g, or u
  misc_feature (19)..(19): n is a, c, g, or u
uuuaangacugggaggagnuggg

SEQ ID NO: 139521 - RNA, 24 nt, Artificial Sequence
  Synthetic
  misc_feature (7)..(7): n is a, c, g, or u
  misc_feature (20)..(20): n is a, c, g, or u
guuuaangacugggaggagnuggg

SEQ ID NO: 139522 - RNA, 18 nt, Artificial Sequence
  Synthetic
ggucaccauauucuuggg

SEQ ID NO: 139523 - RNA, 19 nt, Artificial Sequence
  Synthetic
gggucaccauauucuuggg

SEQ ID NO: 139524 - RNA, 20 nt, Artificial Sequence
  Synthetic
cgggucaccauauucuuggg

SEQ ID NO: 139525 - RNA, 18 nt, Artificial Sequence
  Synthetic
  misc_feature (7)..(7): n is a, c, g, or u
  misc_feature (11)..(11): n is a, c, g, or u
acacggnggunuuuuggg

SEQ ID NO: 139526 - RNA, 19 nt, Artificial Sequence
  Synthetic
  misc_feature (8)..(8): n is a, c, g, or u
  misc_feature (12)..(12): n is a, c, g, or u
cacacggnggunuuuuggg

SEQ ID NO: 139527 - RNA, 20 nt, Artificial Sequence
  Synthetic
  misc_feature (9)..(9): n is a, c, g, or u
  misc_feature (13)..(13): n is a, c, g, or u
ccacacggnggunuuuuggg

SEQ ID NO: 139528 - RNA, 21 nt, Artificial Sequence
  Synthetic
  misc_feature (1)..(1): n is a, c, g, or u
  misc_feature (10)..(10): n is a, c, g, or u
  misc_feature (14)..(14): n is a, c, g, or u
nccacacggnggunuuuuggg

SEQ ID NO: 139529 - RNA, 22 nt, Artificial Sequence
  Synthetic
  misc_feature (2)..(2): n is a, c, g, or u
  misc_feature (11)..(11): n is a, c, g, or u
  misc_feature (15)..(15): n is a, c, g, or u
cnccacacggnggunuuuuggg

SEQ ID NO: 139530 - RNA, 23 nt, Artificial Sequence
  Synthetic
  misc_feature (3)..(3): n is a, c, g, or u
  misc_feature (12)..(12): n is a, c, g, or u
  misc_feature (16)..(16): n is a, c, g, or u
ccnccacacggnggunuuuuggg

SEQ ID NO: 139531 - RNA, 24 nt, Artificial Sequence
  Synthetic
  misc_feature (1)..(1): n is a, c, g, or u
  misc_feature (4)..(4): n is a, c, g, or u
  misc_feature (13)..(13): n is a, c, g, or u
  misc_feature (17)..(17): n is a, c, g, or u
nccnccacacggnggunuuuuggg

SEQ ID NO: 139532 - RNA, 18 nt, Artificial Sequence
  Synthetic
ugacgcaacccccacugg

SEQ ID NO: 139533 - RNA, 19 nt, Artificial Sequence
  Synthetic
cugacgcaacccccacugg

SEQ ID NO: 139534 - RNA, 20 nt, Artificial Sequence
  Synthetic
gcugacgcaacccccacugg

SEQ ID NO: 139535 - RNA, 21 nt, Artificial Sequence
  Synthetic
ugcugacgcaacccccacugg

SEQ ID NO: 139536 - RNA, 22 nt, Artificial Sequence
  Synthetic
uugcugacgcaacccccacugg

SEQ ID NO: 139537 - RNA, 23 nt, Artificial Sequence
  Synthetic
uuugcugacgcaacccccacugg

SEQ ID NO: 139538 - RNA, 24 nt, Artificial Sequence
  Synthetic
guuugcugacgcaacccccacugg

SEQ ID NO: 139539 - RNA, 18 nt, Artificial Sequence
  Synthetic
  misc_feature (12)..(12): n is a, c, g, or u
uguguguuuaangacugg

SEQ ID NO: 139540 - RNA, 19 nt, Artificial Sequence
  Synthetic
  misc_feature (13)..(13): n is a, c, g, or u
cuguguguuuaangacugg

SEQ ID NO: 139541 - RNA, 20 nt, Artificial Sequence
  Synthetic
  misc_feature (14)..(14): n is a, c, g, or u
acuguguguuuaangacugg

SEQ ID NO: 139542 - RNA, 21 nt, Artificial Sequence
  Synthetic
  misc_feature (15)..(15): n is a, c, g, or u
gacuguguguuuaangacugg

SEQ ID NO: 139543 - RNA, 22 nt, Artificial Sequence
  Synthetic
  misc_feature (16)..(16): n is a, c, g, or u
agacuguguguuuaangacugg

SEQ ID NO: 139544 - RNA, 23 nt, Artificial Sequence
  Synthetic
  misc_feature (17)..(17): n is a, c, g, or u
aagacuguguguuuaangacugg

SEQ ID NO: 139545 - RNA, 24 nt, Artificial Sequence
  Synthetic
  misc_feature (18)..(18): n is a, c, g, or u
aaagacuguguguuuaangacugg

SEQ ID NO: 139546 - RNA, 18 nt, Artificial Sequence
  Synthetic
caagccauucucugcugg

SEQ ID NO: 139547 - RNA, 19 nt, Artificial Sequence
  Synthetic
gcaagccauucucugcugg

SEQ ID NO: 139548 - RNA, 20 nt, Artificial Sequence
  Synthetic
ggcaagccauucucugcugg

SEQ ID NO: 139549 - RNA, 21 nt, Artificial Sequence
  Synthetic
aggcaagccauucucugcugg

SEQ ID NO: 139550 - RNA, 22 nt, Artificial Sequence
  Synthetic
caggcaagccauucucugcugg

SEQ ID NO: 139551 - RNA, 23 nt, Artificial Sequence
  Synthetic
ucaggcaagccauucucugcugg

SEQ ID NO: 139552 - RNA, 24 nt, Artificial Sequence
  Synthetic
cucaggcaagccauucucugcugg

SEQ ID NO: 139553 - RNA, 18 nt, Artificial Sequence
  Synthetic
ugcucgcagccggucugg

SEQ ID NO: 139554 - RNA, 19 nt, Artificial Sequence
  Synthetic
uugcucgcagccggucugg

SEQ ID NO: 139555 - RNA, 20 nt, Artificial Sequence
  Synthetic
uuugcucgcagccggucugg

SEQ ID NO: 139556 - RNA, 21 nt, Artificial Sequence
  Synthetic
uuuugcucgcagccggucugg

SEQ ID NO: 139557 - RNA, 22 nt, Artificial Sequence
  Synthetic
guuuugcucgcagccggucugg

SEQ ID NO: 139558 - RNA, 23 nt, Artificial Sequence
  Synthetic
uguuuugcucgcagccggucugg

SEQ ID NO: 139559 - RNA, 24 nt, Artificial Sequence
  Synthetic
uuguuuugcucgcagccggucugg

SEQ ID NO: 139560 - RNA, 18 nt, Artificial Sequence
  Synthetic
  misc_feature (2)..(2): n is a, c, g, or u
  misc_feature (15)..(15): n is a, c, g, or u
angacugggaggagnugg

SEQ ID NO: 139561 - RNA, 19 nt, Artificial Sequence
  Synthetic
  misc_feature (3)..(3): n is a, c, g, or u
  misc_feature (16)..(16): n is a, c, g, or u
aangacugggaggagnugg

SEQ ID NO: 139562 - RNA, 20 nt, Artificial Sequence
  Synthetic
  misc_feature (4)..(4): n is a, c, g, or u
  misc_feature (17)..(17): n is a, c, g, or u
uaangacugggaggagnugg

SEQ ID NO: 139563 - RNA, 21 nt, Artificial Sequence
  Synthetic
  misc_feature (5)..(5): n is a, c, g, or u
  misc_feature (18)..(18): n is a, c, g, or u
uuaangacugggaggagnugg

SEQ ID NO: 139564 - RNA, 22 nt, Artificial Sequence
  Synthetic
  misc_feature (6)..(6): n is a, c, g, or u
  misc_feature (19)..(19): n is a, c, g, or u
uuuaangacugggaggagnugg

SEQ ID NO: 139565 - RNA, 23 nt, Artificial Sequence
  Synthetic
  misc_feature (7)..(7): n is a, c, g, or u
  misc_feature (20)..(20): n is a, c, g, or u
guuuaangacugggaggagnugg

SEQ ID NO: 139566 - RNA, 24 nt, Artificial Sequence
  Synthetic
  misc_feature (8)..(8): n is a, c, g, or u
  misc_feature (21)..(21): n is a, c, g, or u
uguuuaangacugggaggagnugg

SEQ ID NO: 139567 - RNA, 18 nt, Artificial Sequence
  Synthetic
  misc_feature (2)..(2): n is a, c, g, or u
ancacccgugugucuugg

SEQ ID NO: 139568 - RNA, 19 nt, Artificial Sequence
  Synthetic
  misc_feature (3)..(3): n is a, c, g, or u
gancacccgugugucuugg

SEQ ID NO: 139569 - RNA, 20 nt, Artificial Sequence
  Synthetic
  misc_feature (4)..(4): n is a, c, g, or u
ggancacccgugugucuugg

SEQ ID NO: 139570 - RNA, 21 nt, Artificial Sequence
  Synthetic
  misc_feature (5)..(5): n is a, c, g, or u
gggancacccgugugucuugg

SEQ ID NO: 139571 - RNA, 22 nt, Artificial Sequence
  Synthetic
  misc_feature (6)..(6): n is a, c, g, or u
ggggancacccgugugucuugg

SEQ ID NO: 139572 - RNA, 23 nt, Artificial Sequence
  Synthetic
  misc_feature (7)..(7): n is a, c, g, or u
gggggancacccgugugucuugg

SEQ ID NO: 139573 - RNA, 24 nt, Artificial Sequence
  Synthetic
  misc_feature (8)..(8): n is a, c, g, or u
agggggancacccgugugucuugg

SEQ ID NO: 139574 - RNA, 18 nt, Artificial Sequence
  Synthetic
  misc_feature (1)..(1): n is a, c, g, or u
nucuugccuuacuuuugg

SEQ ID NO: 139575 - RNA, 19 nt, Artificial Sequence
  Synthetic
  misc_feature (2)..(2): n is a, c, g, or u
unucuugccuuacuuuugg

SEQ ID NO: 139576 - RNA, 20 nt, Artificial Sequence
  Synthetic
  misc_feature (3)..(3): n is a, c, g, or u
aunucuugccuuacuuuugg

SEQ ID NO: 139577 - RNA, 21 nt, Artificial Sequence
  Synthetic
  misc_feature (4)..(4): n is a, c, g, or u
uaunucuugccuuacuuuugg

SEQ ID NO: 139578 - RNA, 22 nt, Artificial Sequence
  Synthetic
  misc_feature (5)..(5): n is a, c, g, or u
auaunucuugccuuacuuuugg

SEQ ID NO: 139579 - RNA, 23 nt, Artificial Sequence
  Synthetic
  misc_feature (6)..(6): n is a, c, g, or u
cauaunucuugccuuacuuuugg

SEQ ID NO: 139580 - RNA, 24 nt, Artificial Sequence
  Synthetic
  misc_feature (7)..(7): n is a, c, g, or u
ucauaunucuugccuuacuuuugg

SEQ ID NO: 139581 - RNA, 18 nt, Artificial Sequence
  Synthetic
  misc_feature (8)..(8): n is a, c, g, or u
  misc_feature (12)..(12): n is a, c, g, or u
cacacggnggunuuuugg

SEQ ID NO: 139582 - RNA, 19 nt, Artificial Sequence
  Synthetic
  misc_feature (9)..(9): n is a, c, g, or u
  misc_feature (13)..(13): n is a, c, g, or u
ccacacggnggunuuuugg

SEQ ID NO: 139583 - RNA, 20 nt, Artificial Sequence
  Synthetic
  misc_feature (1)..(1): n is a, c, g, or u
  misc_feature (10)..(10): n is a, c, g, or u
  misc_feature (14)..(14): n is a, c, g, or u
nccacacggnggunuuuugg

SEQ ID NO: 139584 - RNA, 21 nt, Artificial Sequence
  Synthetic
  misc_feature (2)..(2): n is a, c, g, or u
  misc_feature (11)..(11): n is a, c, g, or u
  misc_feature (15)..(15): n is a, c, g, or u
cnccacacggnggunuuuugg

SEQ ID NO: 139585 - RNA, 22 nt, Artificial Sequence
  Synthetic
  misc_feature (3)..(3): n is a, c, g, or u
  misc_feature (12)..(12): n is a, c, g, or u
  misc_feature (16)..(16): n is a, c, g, or u
ccnccacacggnggunuuuugg

SEQ ID NO: 139586 - RNA, 23 nt, Artificial Sequence
  Synthetic
  misc_feature (1)..(1): n is a, c, g, or u
  misc_feature (4)..(4): n is a, c, g, or u
  misc_feature (13)..(13): n is a, c, g, or u
  misc_feature (17)..(17): n is a, c, g, or u
nccnccacacggnggunuuuugg

SEQ ID NO: 139587 - RNA, 24 nt, Artificial Sequence
  Synthetic
  misc_feature (2)..(2): n is a, c, g, or u
  misc_feature (5)..(5): n is a, c, g, or u
  misc_feature (14)..(14): n is a, c, g, or u
  misc_feature (18)..(18): n is a, c, g, or u
cnccnccacacggnggunuuuugg

SEQ ID NO: 139588 - RNA, 18 nt, Artificial Sequence
  Synthetic
  misc_feature (17)..(17): n is a, c, g, or u
aagacuguguguuuaang

SEQ ID NO: 139589 - RNA, 19 nt, Artificial Sequence
  Synthetic
  misc_feature (18)..(18): n is a, c, g, or u
aaagacuguguguuuaang

SEQ ID NO: 139590 - RNA, 20 nt, Artificial Sequence
  Synthetic
  misc_feature (19)..(19): n is a, c, g, or u
caaagacuguguguuuaang

SEQ ID NO: 139591 - RNA, 21 nt, Artificial Sequence
  Synthetic
  misc_feature (20)..(20): n is a, c, g, or u
ucaaagacuguguguuuaang

SEQ ID NO: 139592 - RNA, 22 nt, Artificial Sequence
  Synthetic
  misc_feature (21)..(21): n is a, c, g, or u
uucaaagacuguguguuuaang

SEQ ID NO: 139593 - RNA, 23 nt, Artificial Sequence
  Synthetic
  misc_feature (22)..(22): n is a, c, g, or u
cuucaaagacuguguguuuaang

SEQ ID NO: 139594 - RNA, 24 nt, Artificial Sequence
  Synthetic
  misc_feature (23)..(23): n is a, c, g, or u
acuucaaagacuguguguuuaang

SEQ ID NO: 139595 - RNA, 18 nt, Artificial Sequence
  Synthetic
  misc_feature (17)..(17): n is a, c, g, or u
cuguuguuagacgacgng

SEQ ID NO: 139596 - RNA, 19 nt, Artificial Sequence
  Synthetic
  misc_feature (18)..(18): n is a, c, g, or u
acuguuguuagacgacgng

SEQ ID NO: 139597 - RNA, 20 nt, Artificial Sequence
  Synthetic
  misc_feature (19)..(19): n is a, c, g, or u
uacuguuguuagacgacgng

SEQ ID NO: 139598 - RNA, 21 nt, Artificial Sequence
  Synthetic
  misc_feature (20)..(20): n is a, c, g, or u
cuacuguuguuagacgacgng

SEQ ID NO: 139599 - RNA, 22 nt, Artificial Sequence
  Synthetic
  misc_feature (21)..(21): n is a, c, g, or u
acuacuguuguuagacgacgng

SEQ ID NO: 139600 - RNA, 23 nt, Artificial Sequence
  Synthetic
  misc_feature (22)..(22): n is a, c, g, or u
aacuacuguuguuagacgacgng

SEQ ID NO: 139601 - RNA, 24 nt, Artificial Sequence
  Synthetic
  misc_feature (23)..(23): n is a, c, g, or u
aaacuacuguuguuagacgacgng

SEQ ID NO: 139602 - RNA, 18 nt, Artificial Sequence
  Synthetic
  misc_feature (17)..(17): n is a, c, g, or u
aggacuggggacccugng

SEQ ID NO: 139603 - RNA, 19 nt, Artificial Sequence
  Synthetic
  misc_feature (18)..(18): n is a, c, g, or u
gaggacuggggacccugng

SEQ ID NO: 139604 - RNA, 20 nt, Artificial Sequence
  Synthetic
  misc_feature (19)..(19): n is a, c, g, or u
cgaggacuggggacccugng

SEQ ID NO: 139605 - RNA, 21 nt, Artificial Sequence
  Synthetic
  misc_feature (1)..(1): n is a, c, g, or u
  misc_feature (20)..(20): n is a, c, g, or u
ncgaggacuggggacccugng

SEQ ID NO: 139606 - RNA, 22 nt, Artificial Sequence
  Synthetic
  misc_feature (2)..(2): n is a, c, g, or u
  misc_feature (21)..(21): n is a, c, g, or u
cncgaggacuggggacccugng

SEQ ID NO: 139607 - RNA, 23 nt, Artificial Sequence
  Synthetic
  misc_feature (3)..(3): n is a, c, g, or u
  misc_feature (22)..(22): n is a, c, g, or u
ccncgaggacuggggacccugng

SEQ ID NO: 139608 - RNA, 24 nt, Artificial Sequence
  Synthetic
  misc_feature (4)..(4): n is a, c, g, or u
  misc_feature (23)..(23): n is a, c, g, or u
uccncgaggacuggggacccugng

SEQ ID NO: 139609 - RNA, 18 nt, Artificial Sequence
  Synthetic
uaucuuuaauccugaaug

SEQ ID NO: 139610 - RNA, 19 nt, Artificial Sequence
  Synthetic
cuaucuuuaauccugaaug

SEQ ID NO: 139611 - RNA, 20 nt, Artificial Sequence
  Synthetic
ccuaucuuuaauccugaaug

SEQ ID NO: 139612 - RNA, 21 nt, Artificial Sequence
  Synthetic
  misc_feature (1)..(1): n is a, c, g, or u
nccuaucuuuaauccugaaug

SEQ ID NO: 139613 - RNA, 22 nt, Artificial Sequence
  Synthetic
  misc_feature (2)..(2): n is a, c, g, or u
unccuaucuuuaauccugaaug

SEQ ID NO: 139614 - RNA, 23 nt, Artificial Sequence
  Synthetic
  misc_feature (3)..(3): n is a, c, g, or u
gunccuaucuuuaauccugaaug

SEQ ID NO: 139615 - RNA, 24 nt, Artificial Sequence
  Synthetic
  misc_feature (1)..(1): n is a, c, g, or u
  misc_feature (4)..(4): n is a, c, g, or u
ngunccuaucuuuaauccugaaug

SEQ ID NO: 139616 - RNA, 18 nt, Artificial Sequence
  Synthetic
  misc_feature (8)..(8): n is a, c, g, or u
  misc_feature (10)..(10): n is a, c, g, or u
gacccugngncgaacaug

SEQ ID NO: 139617 - RNA, 19 nt, Artificial Sequence
  Synthetic
  misc_feature (9)..(9): n is a, c, g, or u
  misc_feature (11)..(11): n is a, c, g, or u
ggacccugngncgaacaug

SEQ ID NO: 139618 - RNA, 20 nt, Artificial Sequence
  Synthetic
  misc_feature (10)..(10): n is a, c, g, or u
  misc_feature (12)..(12): n is a, c, g, or u
gggacccugngncgaacaug

SEQ ID NO: 139619 - RNA, 21 nt, Artificial Sequence
  Synthetic
  misc_feature (11)..(11): n is a, c, g, or u
  misc_feature (13)..(13): n is a, c, g, or u
ggggacccugngncgaacaug

SEQ ID NO: 139620 - RNA, 22 nt, Artificial Sequence
  Synthetic
  misc_feature (12)..(12): n is a, c, g, or u
  misc_feature (14)..(14): n is a, c, g, or u
uggggacccugngncgaacaug

SEQ ID NO: 139621 - RNA, 23 nt, Artificial Sequence
  Synthetic
  misc_feature (13)..(13): n is a, c, g, or u
  misc_feature (15)..(15): n is a, c, g, or u
cuggggacccugngncgaacaug

SEQ ID NO: 139622 - RNA, 24 nt, Artificial Sequence
  Synthetic
  misc_feature (14)..(14): n is a, c, g, or u
  misc_feature (16)..(16): n is a, c, g, or u
acuggggacccugngncgaacaug

SEQ ID NO: 139623 - RNA, 18 nt, Artificial Sequence
  Synthetic
  misc_feature (3)..(3): n is a, c, g, or u
aunggccaucagcgcaug

SEQ ID NO: 139624 - RNA, 19 nt, Artificial Sequence
  Synthetic
  misc_feature (1)..(1): n is a, c, g, or u
  misc_feature (4)..(4): n is a, c, g, or u
naunggccaucagcgcaug

SEQ ID NO: 139625 - RNA, 20 nt, Artificial Sequence
  Synthetic
  misc_feature (2)..(2): n is a, c, g, or u
  misc_feature (5)..(5): n is a, c, g, or u
cnaunggccaucagcgcaug

SEQ ID NO: 139626 - RNA, 21 nt, Artificial Sequence
  Synthetic
  misc_feature (3)..(3): n is a, c, g, or u
  misc_feature (6)..(6): n is a, c, g, or u
gcnaunggccaucagcgcaug

SEQ ID NO: 139627 - RNA, 22 nt, Artificial Sequence
  Synthetic
  misc_feature (4)..(4): n is a, c, g, or u
  misc_feature (7)..(7): n is a, c, g, or u
ggcnaunggccaucagcgcaug

SEQ ID NO: 139628 - RNA, 23 nt, Artificial Sequence
  Synthetic
  misc_feature (5)..(5): n is a, c, g, or u
  misc_feature (8)..(8): n is a, c, g, or u
uggcnaunggccaucagcgcaug

SEQ ID NO: 139629 - RNA, 24 nt, Artificial Sequence
  Synthetic
  misc_feature (6)..(6): n is a, c, g, or u
  misc_feature (9)..(9): n is a, c, g, or u
uuggcnaunggccaucagcgcaug

SEQ ID NO: 139630 - RNA, 18 nt, Artificial Sequence
  Synthetic
uauugauuggaaaguaug

SEQ ID NO: 139631 - RNA, 19 nt, Artificial Sequence
  Synthetic
cuauugauuggaaaguaug

SEQ ID NO: 139632 - RNA, 20 nt, Artificial Sequence
  Synthetic
ccuauugauuggaaaguaug

SEQ ID NO: 139633 - RNA, 21 nt, Artificial Sequence
  Synthetic
  misc_feature (1)..(1): n is a, c, g, or u
nccuauugauuggaaaguaug

SEQ ID NO: 139634 - RNA, 22 nt, Artificial Sequence
  Synthetic
  misc_feature (2)..(2): n is a, c, g, or u
gnccuauugauuggaaaguaug

SEQ ID NO: 139635 - RNA, 23 nt, Artificial Sequence
  Synthetic
  misc_feature (1)..(1): n is a, c, g, or u
  misc_feature (3)..(3): n is a, c, g, or u
ngnccuauugauuggaaaguaug

SEQ ID NO: 139636 - RNA, 24 nt, Artificial Sequence
  Synthetic
  misc_feature (1)..(2): n is a, c, g, or u
  misc_feature (4)..(4): n is a, c, g, or u
nngnccuauugauuggaaaguaug

SEQ ID NO: 139637 - RNA, 18 nt, Artificial Sequence
  Synthetic
cugacgcaacccccacug

SEQ ID NO: 139638 - RNA, 19 nt, Artificial Sequence
  Synthetic
gcugacgcaacccccacug

SEQ ID NO: 139639 - RNA, 20 nt, Artificial Sequence
  Synthetic
ugcugacgcaacccccacug

SEQ ID NO: 139640 - RNA, 18 nt, Artificial Sequence
  Synthetic
uagggcuuucccccacug

SEQ ID NO: 139641 - RNA, 19 nt, Artificial Sequence
  Synthetic
guagggcuuucccccacug

SEQ ID NO: 139642 - RNA, 20 nt, Artificial Sequence
  Synthetic
cguagggcuuucccccacug

SEQ ID NO: 139643 - RNA, 21 nt, Artificial Sequence
  Synthetic
ucguagggcuuucccccacug

SEQ ID NO: 139644 - RNA, 22 nt, Artificial Sequence
  Synthetic
uucguagggcuuucccccacug

SEQ ID NO: 139645 - RNA, 23 nt, Artificial Sequence
  Synthetic
guucguagggcuuucccccacug

SEQ ID NO: 139646 - RNA, 24 nt, Artificial Sequence
  Synthetic
gguucguagggcuuucccccacug

SEQ ID NO: 139647 - RNA, 18 nt, Artificial Sequence
  Synthetic
  misc_feature (13)..(13): n is a, c, g, or u
cuguguguuuaangacug

SEQ ID NO: 139648 - RNA, 19 nt, Artificial Sequence
  Synthetic
  misc_feature (14)..(14): n is a, c, g, or u
acuguguguuuaangacug

SEQ ID NO: 139649 - RNA, 20 nt, Artificial Sequence
  Synthetic
  misc_feature (15)..(15): n is a, c, g, or u
gacuguguguuuaangacug

SEQ ID NO: 139650 - RNA, 21 nt, Artificial Sequence
  Synthetic
  misc_feature (16)..(16): n is a, c, g, or u
agacuguguguuuaangacug

SEQ ID NO: 139651 - RNA, 22 nt, Artificial Sequence
  Synthetic
  misc_feature (17)..(17): n is a, c, g, or u
aagacuguguguuuaangacug

SEQ ID NO: 139652 - RNA, 23 nt, Artificial Sequence
  Synthetic
  misc_feature (18)..(18): n is a, c, g, or u
aaagacuguguguuuaangacug

SEQ ID NO: 139653 - RNA, 24 nt, Artificial Sequence
  Synthetic
  misc_feature (19)..(19): n is a, c, g, or u
caaagacuguguguuuaangacug

SEQ ID NO: 139654 - RNA, 18 nt, Artificial Sequence
  Synthetic
cucugccgauccauacug

SEQ ID NO: 139655 - RNA, 19 nt, Artificial Sequence
  Synthetic
ccucugccgauccauacug

SEQ ID NO: 139656 - RNA, 20 nt, Artificial Sequence
  Synthetic
uccucugccgauccauacug

SEQ ID NO: 139657 - RNA, 21 nt, Artificial Sequence
  Synthetic
cuccucugccgauccauacug

SEQ ID NO: 139658 - RNA, 22 nt, Artificial Sequence
  Synthetic
gcuccucugccgauccauacug

SEQ ID NO: 139659 - RNA, 23 nt, Artificial Sequence
  Synthetic
ggcuccucugccgauccauacug

SEQ ID NO: 139660 - RNA, 24 nt, Artificial Sequence
  Synthetic
uggcuccucugccgauccauacug

SEQ ID NO: 139661 - RNA, 18 nt, Artificial Sequence
  Synthetic
  misc_feature (7)..(7): n is a, c, g, or u
gggaccnugcaaaaccug

SEQ ID NO: 139662 - RNA, 19 nt, Artificial Sequence
  Synthetic
  misc_feature (8)..(8): n is a, c, g, or u
cgggaccnugcaaaaccug

SEQ ID NO: 139663 - RNA, 20 nt, Artificial Sequence
  Synthetic
  misc_feature (9)..(9): n is a, c, g, or u
acgggaccnugcaaaaccug

SEQ ID NO: 139664 - RNA, 21 nt, Artificial Sequence
  Synthetic
  misc_feature (10)..(10): n is a, c, g, or u
uacgggaccnugcaaaaccug

SEQ ID NO: 139665 - RNA, 22 nt, Artificial Sequence
  Synthetic
  misc_feature (11)..(11): n is a, c, g, or u
guacgggaccnugcaaaaccug

SEQ ID NO: 139666 - RNA, 23 nt, Artificial Sequence
  Synthetic
  misc_feature (12)..(12): n is a, c, g, or u
aguacgggaccnugcaaaaccug

SEQ ID NO: 139667 - RNA, 24 nt, Artificial Sequence
  Synthetic
  misc_feature (13)..(13): n is a, c, g, or u
caguacgggaccnugcaaaaccug

SEQ ID NO: 139668 - RNA, 18 nt, Artificial Sequence
  Synthetic
  misc_feature (1)..(1): n is a, c, g, or u
naugacucuagcuaccug

SEQ ID NO: 139669 - RNA, 19 nt, Artificial Sequence
  Synthetic
  misc_feature (2)..(2): n is a, c, g, or u
unaugacucuagcuaccug

SEQ ID NO: 139670 - RNA, 20 nt, Artificial Sequence
  Synthetic
  misc_feature (3)..(3): n is a, c, g, or u
uunaugacucuagcuaccug

SEQ ID NO: 139671 - RNA, 21 nt, Artificial Sequence
  Synthetic
  misc_feature (4)..(4): n is a, c, g, or u
auunaugacucuagcuaccug

SEQ ID NO: 139672 - RNA, 22 nt, Artificial Sequence
  Synthetic
  misc_feature (5)..(5): n is a, c, g, or u
aauunaugacucuagcuaccug

SEQ ID NO: 139673 - RNA, 23 nt, Artificial Sequence
  Synthetic
  misc_feature (6)..(6): n is a, c, g, or u
gaauunaugacucuagcuaccug

SEQ ID NO: 139674 - RNA, 24 nt, Artificial Sequence
  Synthetic
  misc_feature (7)..(7): n is a, c, g, or u
ggaauunaugacucuagcuaccug

SEQ ID NO: 139675 - RNA, 18 nt, Artificial Sequence
  Synthetic
  misc_feature (2)..(2): n is a, c, g, or u
unccuaucuuuaauccug

SEQ ID NO: 139676 - RNA, 19 nt, Artificial Sequence
  Synthetic
  misc_feature (3)..(3): n is a, c, g, or u
gunccuaucuuuaauccug

SEQ ID NO: 139677 - RNA, 20 nt, Artificial Sequence
  Synthetic
  misc_feature (1)..(1): n is a, c, g, or u
  misc_feature (4)..(4): n is a, c, g, or u
ngunccuaucuuuaauccug

SEQ ID NO: 139678 - RNA, 21 nt, Artificial Sequence
  Synthetic
  misc_feature (2)..(2): n is a, c, g, or u
  misc_feature (5)..(5): n is a, c, g, or u
cngunccuaucuuuaauccug

SEQ ID NO: 139679 - RNA, 22 nt, Artificial Sequence
  Synthetic
  misc_feature (3)..(3): n is a, c, g, or u
  misc_feature (6)..(6): n is a, c, g, or u
acngunccuaucuuuaauccug

SEQ ID NO: 139680 - RNA, 23 nt, Artificial Sequence
  Synthetic
  misc_feature (4)..(4): n is a, c, g, or u
  misc_feature (7)..(7): n is a, c, g, or u
uacngunccuaucuuuaauccug

SEQ ID NO: 139681 - RNA, 24 nt, Artificial Sequence
  Synthetic
  misc_feature (5)..(5): n is a, c, g, or u
  misc_feature (8)..(8): n is a, c, g, or u
cuacngunccuaucuuuaauccug

SEQ ID NO: 139682 - RNA, 18 nt, Artificial Sequence
  Synthetic
aacgcccaucagauccug

SEQ ID NO: 139683 - RNA, 19 nt, Artificial Sequence
  Synthetic
gaacgcccaucagauccug

SEQ ID NO: 139684 - RNA, 20 nt, Artificial Sequence
  Synthetic
ugaacgcccaucagauccug

SEQ ID NO: 139685 - RNA, 21 nt, Artificial Sequence
  Synthetic
gugaacgcccaucagauccug

SEQ ID NO: 139686 - RNA, 22 nt, Artificial Sequence
  Synthetic
cgugaacgcccaucagauccug

SEQ ID NO: 139687 - RNA, 23 nt, Artificial Sequence
  Synthetic
ccgugaacgcccaucagauccug

SEQ ID NO: 139688 - RNA, 24 nt, Artificial Sequence
  Synthetic
accgugaacgcccaucagauccug

SEQ ID NO: 139689 - RNA, 18 nt, Artificial Sequence
  Synthetic
aaaccugcacgacuccug

SEQ ID NO: 139690 - RNA, 19 nt, Artificial Sequence
  Synthetic
aaaaccugcacgacuccug

SEQ ID NO: 139691 - RNA, 20 nt, Artificial Sequence
  Synthetic
caaaaccugcacgacuccug

SEQ ID NO: 139692 - RNA, 21 nt, Artificial Sequence
  Synthetic
gcaaaaccugcacgacuccug

SEQ ID NO: 139693 - RNA, 22 nt, Artificial Sequence
  Synthetic
ugcaaaaccugcacgacuccug

SEQ ID NO: 139694 - RNA, 23 nt, Artificial Sequence
  Synthetic
  misc_feature (1)..(1): n is a, c, g, or u
nugcaaaaccugcacgacuccug

SEQ ID NO: 139695 - RNA, 24 nt, Artificial Sequence
  Synthetic
  misc_feature (2)..(2): n is a, c, g, or u
cnugcaaaaccugcacgacuccug

SEQ ID NO: 139696 - RNA, 18 nt, Artificial Sequence
  Synthetic
  misc_feature (6)..(6): n is a, c, g, or u
acaucnuuuccauggcug

SEQ ID NO: 139697 - RNA, 19 nt, Artificial Sequence
  Synthetic
  misc_feature (7)..(7): n is a, c, g, or u
uacaucnuuuccauggcug

SEQ ID NO: 139698 - RNA, 20 nt, Artificial Sequence
  Synthetic
  misc_feature (8)..(8): n is a, c, g, or u
auacaucnuuuccauggcug

SEQ ID NO: 139699 - RNA, 21 nt, Artificial Sequence
  Synthetic
  misc_feature (9)..(9): n is a, c, g, or u
uauacaucnuuuccauggcug

SEQ ID NO: 139700 - RNA, 22 nt, Artificial Sequence
  Synthetic
  misc_feature (10)..(10): n is a, c, g, or u
auauacaucnuuuccauggcug

SEQ ID NO: 139701 - RNA, 23 nt, Artificial Sequence
  Synthetic
  misc_feature (11)..(11): n is a, c, g, or u
aauauacaucnuuuccauggcug

SEQ ID NO: 139702 - RNA, 24 nt, Artificial Sequence
  Synthetic
  misc_feature (12)..(12): n is a, c, g, or u
aaauauacaucnuuuccauggcug

SEQ ID NO: 139703 - RNA, 18 nt, Artificial Sequence
  Synthetic
gcaagccauucucugcug

SEQ ID NO: 139704 - RNA, 19 nt, Artificial Sequence
  Synthetic
ggcaagccauucucugcug

SEQ ID NO: 139705 - RNA, 20 nt, Artificial Sequence
  Synthetic
aggcaagccauucucugcug

SEQ ID NO: 139706 - RNA, 21 nt, Artificial Sequence
  Synthetic
caggcaagccauucucugcug

SEQ ID NO: 139707 - RNA, 22 nt, Artificial Sequence
  Synthetic
ucaggcaagccauucucugcug

SEQ ID NO: 139708 - RNA, 23 nt, Artificial Sequence
  Synthetic
cucaggcaagccauucucugcug

SEQ ID NO: 139709 - RNA, 24 nt, Artificial Sequence
  Synthetic
acucaggcaagccauucucugcug

SEQ ID NO: 139710 - RNA, 18 nt, Artificial Sequence
  Synthetic
guuucccucauguugcug

SEQ ID NO: 139711 - RNA, 19 nt, Artificial Sequence
  Synthetic
uguuucccucauguugcug

SEQ ID NO: 139712 - RNA, 20 nt, Artificial Sequence
  Synthetic
auguuucccucauguugcug

SEQ ID NO: 139713 - RNA, 21 nt, Artificial Sequence
  Synthetic
uauguuucccucauguugcug

SEQ ID NO: 139714 - RNA, 22 nt, Artificial Sequence
  Synthetic
cuauguuucccucauguugcug

SEQ ID NO: 139715 - RNA, 23 nt, Artificial Sequence
  Synthetic
ucuauguuucccucauguugcug

SEQ ID NO: 139716 - RNA, 24 nt, Artificial Sequence
  Synthetic
cucuauguuucccucauguugcug

SEQ ID NO: 139717 - RNA, 18 nt, Artificial Sequence
  Synthetic
caggcaagccauucucug

SEQ ID NO: 139718 - RNA, 19 nt, Artificial Sequence
  Synthetic
ucaggcaagccauucucug

SEQ ID NO: 139719 - RNA, 20 nt, Artificial Sequence
  Synthetic
cucaggcaagccauucucug

SEQ ID NO: 139720 - RNA, 21 nt, Artificial Sequence
  Synthetic
acucaggcaagccauucucug

SEQ ID NO: 139721 - RNA, 22 nt, Artificial Sequence
  Synthetic
cacucaggcaagccauucucug

SEQ ID NO: 139722 - RNA, 23 nt, Artificial Sequence
  Synthetic
gcacucaggcaagccauucucug

SEQ ID NO: 139723 - RNA, 24 nt, Artificial Sequence
  Synthetic
  misc_feature (1)..(1): n is a, c, g, or u
ngcacucaggcaagccauucucug

SEQ ID NO: 139724 - RNA, 18 nt, Artificial Sequence
  Synthetic
gcagagucuagacucgug

SEQ ID NO: 139725 - RNA, 19 nt, Artificial Sequence
  Synthetic
cgcagagucuagacucgug

SEQ ID NO: 139726 - RNA, 20 nt, Artificial Sequence
  Synthetic
ccgcagagucuagacucgug

SEQ ID NO: 139727 - RNA, 21 nt, Artificial Sequence
  Synthetic
accgcagagucuagacucgug

SEQ ID NO: 139728 - RNA, 22 nt, Artificial Sequence
  Synthetic
uaccgcagagucuagacucgug

SEQ ID NO: 139729 - RNA, 23 nt, Artificial Sequence
  Synthetic
auaccgcagagucuagacucgug

SEQ ID NO: 139730 - RNA, 24 nt, Artificial Sequence
  Synthetic
aauaccgcagagucuagacucgug

SEQ ID NO: 139731 - RNA, 18 nt, Artificial Sequence
  Synthetic
ccuuggacucauaaggug

SEQ ID NO: 139732 - RNA, 19 nt, Artificial Sequence
  Synthetic
uccuuggacucauaaggug

SEQ ID NO: 139733 - RNA, 20 nt, Artificial Sequence
  Synthetic
uuccuuggacucauaaggug

SEQ ID NO: 139734 - RNA, 21 nt, Artificial Sequence
  Synthetic
auuccuuggacucauaaggug

SEQ ID NO: 139735 - RNA, 22 nt, Artificial Sequence
  Synthetic
uauuccuuggacucauaaggug

SEQ ID NO: 139736 - RNA, 23 nt, Artificial Sequence
  Synthetic
guauuccuuggacucauaaggug

SEQ ID NO: 139737 - RNA, 24 nt, Artificial Sequence
  Synthetic
aguauuccuuggacucauaaggug

SEQ ID NO: 139738 - RNA, 18 nt, Artificial Sequence
  Synthetic
uacuucaaagacugugug

SEQ ID NO: 139739 - RNA, 19 nt, Artificial Sequence
  Synthetic
cuacuucaaagacugugug

SEQ ID NO: 139740 - RNA, 20 nt, Artificial Sequence
  Synthetic
ccuacuucaaagacugugug

SEQ ID NO: 139741 - RNA, 21 nt, Artificial Sequence
  Synthetic
gccuacuucaaagacugugug

SEQ ID NO: 139742 - RNA, 22 nt, Artificial Sequence
  Synthetic
ggccuacuucaaagacugugug

SEQ ID NO: 139743 - RNA, 23 nt, Artificial Sequence
  Synthetic
aggccuacuucaaagacugugug

SEQ ID NO: 139744 - RNA, 24 nt, Artificial Sequence
  Synthetic
gaggccuacuucaaagacugugug

SEQ ID NO: 139745 - RNA, 18 nt, Artificial Sequence
  Synthetic
  misc_feature (16)..(16): n is a, c, g, or u
aaccaguacgggaccnug

SEQ ID NO: 139746 - RNA, 19 nt, Artificial Sequence
  Synthetic
  misc_feature (17)..(17): n is a, c, g, or u
caaccaguacgggaccnug

SEQ ID NO: 139747 - RNA, 20 nt, Artificial Sequence
  Synthetic
  misc_feature (18)..(18): n is a, c, g, or u
acaaccaguacgggaccnug

SEQ ID NO: 139748 - RNA, 21 nt, Artificial Sequence
  Synthetic
  misc_feature (19)..(19): n is a, c, g, or u
aacaaccaguacgggaccnug

SEQ ID NO: 139749 - RNA, 22 nt, Artificial Sequence
  Synthetic
  misc_feature (20)..(20): n is a, c, g, or u
caacaaccaguacgggaccnug

SEQ ID NO: 139750 - RNA, 23 nt, Artificial Sequence
  Synthetic
  misc_feature (21)..(21): n is a, c, g, or u
acaacaaccaguacgggaccnug

SEQ ID NO: 139751 - RNA, 24 nt, Artificial Sequence
  Synthetic
  misc_feature (1)..(1): n is a, c, g, or u
  misc_feature (22)..(22): n is a, c, g, or u
nacaacaaccaguacgggaccnug

SEQ ID NO: 139752 - RNA, 18 nt, Artificial Sequence
  Synthetic
  misc_feature (3)..(3): n is a, c, g, or u
  misc_feature (16)..(16): n is a, c, g, or u
aangacugggaggagnug

SEQ ID NO: 139753 - RNA, 19 nt, Artificial Sequence
  Synthetic
  misc_feature (4)..(4): n is a, c, g, or u
  misc_feature (17)..(17): n is a, c, g, or u
uaangacugggaggagnug

SEQ ID NO: 139754 - RNA, 20 nt, Artificial Sequence
  Synthetic
  misc_feature (5)..(5): n is a, c, g, or u
  misc_feature (18)..(18): n is a, c, g, or u
uuaangacugggaggagnug

SEQ ID NO: 139755 - RNA, 21 nt, Artificial Sequence
  Synthetic
  misc_feature (6)..(6): n is a, c, g, or u
  misc_feature (19)..(19): n is a, c, g, or u
uuuaangacugggaggagnug

SEQ ID NO: 139756 - RNA, 22 nt, Artificial Sequence
  Synthetic
  misc_feature (7)..(7): n is a, c, g, or u
  misc_feature (20)..(20): n is a, c, g, or u
guuuaangacugggaggagnug

SEQ ID NO: 139757 - RNA, 23 nt, Artificial Sequence
  Synthetic
  misc_feature (8)..(8): n is a, c, g, or u
  misc_feature (21)..(21): n is a, c, g, or u
uguuuaangacugggaggagnug

SEQ ID NO: 139758 - RNA, 24 nt, Artificial Sequence
  Synthetic
  misc_feature (9)..(9): n is a, c, g, or u
  misc_feature (22)..(22): n is a, c, g, or u
guguuuaangacugggaggagnug

SEQ ID NO: 139759 - RNA, 18 nt, Artificial Sequence
  Synthetic
  misc_feature (8)..(8): n is a, c, g, or u
ugccacangaucauauug

SEQ ID NO: 139760 - RNA, 19 nt, Artificial Sequence
  Synthetic
  misc_feature (9)..(9): n is a, c, g, or u
uugccacangaucauauug

SEQ ID NO: 139761 - RNA, 20 nt, Artificial Sequence
  Synthetic
  misc_feature (1)..(1): n is a, c, g, or u
  misc_feature (10)..(10): n is a, c, g, or u
nuugccacangaucauauug

SEQ ID NO: 139762 - RNA, 21 nt, Artificial Sequence
  Synthetic
  misc_feature (2)..(2): n is a, c, g, or u
  misc_feature (11)..(11): n is a, c, g, or u
cnuugccacangaucauauug

SEQ ID NO: 139763 - RNA, 22 nt, Artificial Sequence
  Synthetic
  misc_feature (3)..(3): n is a, c, g, or u
  misc_feature (12)..(12): n is a, c, g, or u
acnuugccacangaucauauug

SEQ ID NO: 139764 - RNA, 23 nt, Artificial Sequence
  Synthetic
  misc_feature (1)..(1): n is a, c, g, or u
  misc_feature (4)..(4): n is a, c, g, or u
  misc_feature (13)..(13): n is a, c, g, or u
nacnuugccacangaucauauug

SEQ ID NO: 139765 - RNA, 24 nt, Artificial Sequence
  Synthetic
  misc_feature (2)..(2): n is a, c, g, or u
  misc_feature (5)..(5): n is a, c, g, or u
  misc_feature (14)..(14): n is a, c, g, or u
gnacnuugccacangaucauauug

SEQ ID NO: 139766 - RNA, 18 nt, Artificial Sequence
  Synthetic
  misc_feature (5)..(5): n is a, c, g, or u
  misc_feature (8)..(9): n is a, c, g, or u
  misc_feature (11)..(11): n is a, c, g, or u
cugunaanngnccuauug

SEQ ID NO: 139767 - RNA, 19 nt, Artificial Sequence
  Synthetic
  misc_feature (6)..(6): n is a, c, g, or u
  misc_feature (9)..(10): n is a, c, g, or u
  misc_feature (12)..(12): n is a, c, g, or u
ccugunaanngnccuauug

SEQ ID NO: 139768 - RNA, 20 nt, Artificial Sequence
  Synthetic
  misc_feature (7)..(7): n is a, c, g, or u
  misc_feature (10)..(11): n is a, c, g, or u
  misc_feature (13)..(13): n is a, c, g, or u
uccugunaanngnccuauug

SEQ ID NO: 139769 - RNA, 21 nt, Artificial Sequence
  Synthetic
  misc_feature (8)..(8): n is a, c, g, or u
  misc_feature (11)..(12): n is a, c, g, or u
  misc_feature (14)..(14): n is a, c, g, or u
uuccugunaanngnccuauug

SEQ ID NO: 139770 - RNA, 22 nt, Artificial Sequence
  Synthetic
  misc_feature (9)..(9): n is a, c, g, or u
  misc_feature (12)..(13): n is a, c, g, or u
  misc_feature (15)..(15): n is a, c, g, or u
cuuccugunaanngnccuauug

SEQ ID NO: 139771 - RNA, 23 nt, Artificial Sequence
  Synthetic
  misc_feature (10)..(10): n is a, c, g, or u
  misc_feature (13)..(14): n is a, c, g, or u
  misc_feature (16)..(16): n is a, c, g, or u
acuuccugunaanngnccuauug

SEQ ID NO: 139772 - RNA, 24 nt, Artificial Sequence
  Synthetic
  misc_feature (11)..(11): n is a, c, g, or u
  misc_feature (14)..(15): n is a, c, g, or u
  misc_feature (17)..(17): n is a, c, g, or u
aacuuccugunaanngnccuauug

SEQ ID NO: 139773 - RNA, 18 nt, Artificial Sequence
  Synthetic
ccuccaagcugugccuug

SEQ ID NO: 139774 - RNA, 19 nt, Artificial Sequence
  Synthetic
gccuccaagcugugccuug

SEQ ID NO: 139775 - RNA, 20 nt, Artificial Sequence
  Synthetic
agccuccaagcugugccuug

SEQ ID NO: 139776 - RNA, 21 nt, Artificial Sequence
  Synthetic
aagccuccaagcugugccuug

SEQ ID NO: 139777 - RNA, 22 nt, Artificial Sequence
  Synthetic
caagccuccaagcugugccuug

SEQ ID NO: 139778 - RNA, 23 nt, Artificial Sequence
  Synthetic
ucaagccuccaagcugugccuug

SEQ ID NO: 139779 - RNA, 24 nt, Artificial Sequence
  Synthetic
uucaagccuccaagcugugccuug

SEQ ID NO: 139780 - RNA, 18 nt, Artificial Sequence
  Synthetic
  misc_feature (3)..(3): n is a, c, g, or u
gancacccgugugucuug

SEQ ID NO: 139781 - RNA, 19 nt, Artificial Sequence
  Synthetic
  misc_feature (4)..(4): n is a, c, g, or u
ggancacccgugugucuug

SEQ ID NO: 139782 - RNA, 20 nt, Artificial Sequence
  Synthetic
  misc_feature (5)..(5): n is a, c, g, or u
gggancacccgugugucuug

SEQ ID NO: 139783 - RNA, 21 nt, Artificial Sequence
  Synthetic
  misc_feature (6)..(6): n is a, c, g, or u
ggggancacccgugugucuug

SEQ ID NO: 139784 - RNA, 22 nt, Artificial Sequence
  Synthetic
  misc_feature (7)..(7): n is a, c, g, or u
gggggancacccgugugucuug

SEQ ID NO: 139785 - RNA, 23 nt, Artificial Sequence
  Synthetic
  misc_feature (8)..(8): n is a, c, g, or u
agggggancacccgugugucuug

SEQ ID NO: 139786 - RNA, 24 nt, Artificial Sequence
  Synthetic
  misc_feature (9)..(9): n is a, c, g, or u
uagggggancacccgugugucuug

SEQ ID NO: 139787 - RNA, 18 nt, Artificial Sequence
  Synthetic
cuucaccucugcacguug

SEQ ID NO: 139788 - RNA, 19 nt, Artificial Sequence
  Synthetic
gcuucaccucugcacguug

SEQ ID NO: 139789 - RNA, 20 nt, Artificial Sequence
  Synthetic
cgcuucaccucugcacguug

SEQ ID NO: 139790 - RNA, 21 nt, Artificial Sequence
  Synthetic
ucgcuucaccucugcacguug

SEQ ID NO: 139791 - RNA, 22 nt, Artificial Sequence
  Synthetic
uucgcuucaccucugcacguug

SEQ ID NO: 139792 - RNA, 23 nt, Artificial Sequence
  Synthetic
cuucgcuucaccucugcacguug

SEQ ID NO: 139793 - RNA, 24 nt, Artificial Sequence
  Synthetic
acuucgcuucaccucugcacguug

SEQ ID NO: 139794 - RNA, 18 nt, Artificial Sequence
  Synthetic
ugaaccuuuaccccguug

SEQ ID NO: 139795 - RNA, 19 nt, Artificial Sequence
  Synthetic
augaaccuuuaccccguug

SEQ ID NO: 139796 - RNA, 20 nt, Artificial Sequence
  Synthetic
  misc_feature (1)..(1): n is a, c, g, or u
naugaaccuuuaccccguug

SEQ ID NO: 139797 - RNA, 21 nt, Artificial Sequence
  Synthetic
  misc_feature (2)..(2): n is a, c, g, or u
anaugaaccuuuaccccguug

SEQ ID NO: 139798 - RNA, 22 nt, Artificial Sequence
  Synthetic
  misc_feature (3)..(3): n is a, c, g, or u
uanaugaaccuuuaccccguug

SEQ ID NO: 139799 - RNA, 23 nt, Artificial Sequence
  Synthetic
  misc_feature (4)..(4): n is a, c, g, or u
guanaugaaccuuuaccccguug

SEQ ID NO: 139800 - RNA, 24 nt, Artificial Sequence
  Synthetic
  misc_feature (5)..(5): n is a, c, g, or u
aguanaugaaccuuuaccccguug

SEQ ID NO: 139801 - RNA, 18 nt, Artificial Sequence
  Synthetic
uuccggaaacuacuguug

SEQ ID NO: 139802 - RNA, 19 nt, Artificial Sequence
  Synthetic
cuuccggaaacuacuguug

SEQ ID NO: 139803 - RNA, 20 nt, Artificial Sequence
  Synthetic
acuuccggaaacuacuguug

SEQ ID NO: 139804 - RNA, 21 nt, Artificial Sequence
  Synthetic
cacuuccggaaacuacuguug

SEQ ID NO: 139805 - RNA, 22 nt, Artificial Sequence
  Synthetic
acacuuccggaaacuacuguug

SEQ ID NO: 139806 - RNA, 23 nt, Artificial Sequence
  Synthetic
aacacuuccggaaacuacuguug

SEQ ID NO: 139807 - RNA, 24 nt, Artificial Sequence
  Synthetic
caacacuuccggaaacuacuguug

SEQ ID NO: 139808 - RNA, 18 nt, Artificial Sequence
  Synthetic
gcgggguuuuucuuguug

SEQ ID NO: 139809 - RNA, 19 nt, Artificial Sequence
  Synthetic
ggcgggguuuuucuuguug

SEQ ID NO: 139810 - RNA, 20 nt, Artificial Sequence
  Synthetic
aggcgggguuuuucuuguug

SEQ ID NO: 139811 - RNA, 21 nt, Artificial Sequence
  Synthetic
caggcgggguuuuucuuguug

SEQ ID NO: 139812 - RNA, 22 nt, Artificial Sequence
  Synthetic
acaggcgggguuuuucuuguug

SEQ ID NO: 139813 - RNA, 23 nt, Artificial Sequence
  Synthetic
uacaggcgggguuuuucuuguug

SEQ ID NO: 139814 - RNA, 24 nt, Artificial Sequence
  Synthetic
uuacaggcgggguuuuucuuguug

SEQ ID NO: 139815 - RNA, 18 nt, Artificial Sequence
  Synthetic
uuauuuacauacucuuug

SEQ ID NO: 139816 - RNA, 19 nt, Artificial Sequence
  Synthetic
auuauuuacauacucuuug

SEQ ID NO: 139817 - RNA, 20 nt, Artificial Sequence
  Synthetic
cauuauuuacauacucuuug

SEQ ID NO: 139818 - RNA, 21 nt, Artificial Sequence
  Synthetic
acauuauuuacauacucuuug

SEQ ID NO: 139819 - RNA, 22 nt, Artificial Sequence
  Synthetic
gacauuauuuacauacucuuug

SEQ ID NO: 139820 - RNA, 23 nt, Artificial Sequence
  Synthetic
  misc_feature (1)..(1): n is a, c, g, or u
ngacauuauuuacauacucuuug

SEQ ID NO: 139821 - RNA, 24 nt, Artificial Sequence
  Synthetic
  misc_feature (2)..(2): n is a, c, g, or u
cngacauuauuuacauacucuuug

SEQ ID NO: 139822 - RNA, 18 nt, Artificial Sequence
  Synthetic
  misc_feature (2)..(2): n is a, c, g, or u
unucuugccuuacuuuug

SEQ ID NO: 139823 - RNA, 19 nt, Artificial Sequence
  Synthetic
  misc_feature (3)..(3): n is a, c, g, or u
aunucuugccuuacuuuug

SEQ ID NO: 139824 - RNA, 20 nt, Artificial Sequence
  Synthetic
  misc_feature (4)..(4): n is a, c, g, or u
uaunucuugccuuacuuuug

SEQ ID NO: 139825 - RNA, 21 nt, Artificial Sequence
  Synthetic
  misc_feature (5)..(5): n is a, c, g, or u
auaunucuugccuuacuuuug

SEQ ID NO: 139826 - RNA, 22 nt, Artificial Sequence
  Synthetic
  misc_feature (6)..(6): n is a, c, g, or u
cauaunucuugccuuacuuuug

SEQ ID NO: 139827 - RNA, 23 nt, Artificial Sequence
  Synthetic
  misc_feature (7)..(7): n is a, c, g, or u
ucauaunucuugccuuacuuuug

SEQ ID NO: 139828 - RNA, 24 nt, Artificial Sequence
  Synthetic
  misc_feature (8)..(8): n is a, c, g, or u
uucauaunucuugccuuacuuuug

SEQ ID NO: 139829 - RNA, 18 nt, Artificial Sequence
  Synthetic
  misc_feature (18)..(18): n is a, c, g, or u
gaucauauuguacaaaan

SEQ ID NO: 139830 - RNA, 19 nt, Artificial Sequence
  Synthetic
  misc_feature (1)..(1): n is a, c, g, or u
  misc_feature (19)..(19): n is a, c, g, or u
ngaucauauuguacaaaan

SEQ ID NO: 139831 - RNA, 20 nt, Artificial Sequence
  Synthetic
  misc_feature (2)..(2): n is a, c, g, or u
  misc_feature (20)..(20): n is a, c, g, or u
angaucauauuguacaaaan

SEQ ID NO: 139832 - RNA, 21 nt, Artificial Sequence
  Synthetic
  misc_feature (3)..(3): n is a, c, g, or u
  misc_feature (21)..(21): n is a, c, g, or u
cangaucauauuguacaaaan

SEQ ID NO: 139833 - RNA, 22 nt, Artificial Sequence
  Synthetic
  misc_feature (4)..(4): n is a, c, g, or u
  misc_feature (22)..(22): n is a, c, g, or u
acangaucauauuguacaaaan

SEQ ID NO: 139834 - RNA, 23 nt, Artificial Sequence
  Synthetic
  misc_feature (5)..(5): n is a, c, g, or u
  misc_feature (23)..(23): n is a, c, g, or u
cacangaucauauuguacaaaan

SEQ ID NO: 139835 - RNA, 24 nt, Artificial Sequence
  Synthetic
  misc_feature (6)..(6): n is a, c, g, or u
  misc_feature (24)..(24): n is a, c, g, or u
ccacangaucauauuguacaaaan

SEQ ID NO: 139836 - RNA, 18 nt, Artificial Sequence
  Synthetic
  misc_feature (18)..(18): n is a, c, g, or u
cucacuguaaaugaaaan

SEQ ID NO: 139837 - RNA, 19 nt, Artificial Sequence
  Synthetic
  misc_feature (19)..(19): n is a, c, g, or u
ucucacuguaaaugaaaan

SEQ ID NO: 139838 - RNA, 20 nt, Artificial Sequence
  Synthetic
  misc_feature (20)..(20): n is a, c, g, or u
cucucacuguaaaugaaaan

SEQ ID NO: 139839 - RNA, 21 nt, Artificial Sequence
  Synthetic
  misc_feature (21)..(21): n is a, c, g, or u
ccucucacuguaaaugaaaan

SEQ ID NO: 139840 - RNA, 22 nt, Artificial Sequence
  Synthetic
  misc_feature (22)..(22): n is a, c, g, or u
cccucucacuguaaaugaaaan

SEQ ID NO: 139841 - RNA, 23 nt, Artificial Sequence
  Synthetic
  misc_feature (23)..(23): n is a, c, g, or u
gcccucucacuguaaaugaaaan

SEQ ID NO: 139842 - RNA, 24 nt, Artificial Sequence
  Synthetic
  misc_feature (24)..(24): n is a, c, g, or u
ggcccucucacuguaaaugaaaan

SEQ ID NO: 139843 - RNA, 18 nt, Artificial Sequence
  Synthetic
  misc_feature (12)..(13): n is a, c, g, or u
  misc_feature (18)..(18): n is a, c, g, or u
acuaacaugggnnuaaan

SEQ ID NO: 139844 - RNA, 19 nt, Artificial Sequence
  Synthetic
  misc_feature (13)..(14): n is a, c, g, or u
  misc_feature (19)..(19): n is a, c, g, or u
uacuaacaugggnnuaaan

SEQ ID NO: 139845 - RNA, 20 nt, Artificial Sequence
  Synthetic
  misc_feature (14)..(15): n is a, c, g, or u
  misc_feature (20)..(20): n is a, c, g, or u
auacuaacaugggnnuaaan

SEQ ID NO: 139846 - RNA, 21 nt, Artificial Sequence
  Synthetic
  misc_feature (15)..(16): n is a, c, g, or u
  misc_feature (21)..(21): n is a, c, g, or u
aauacuaacaugggnnuaaan

SEQ ID NO: 139847 - RNA, 22 nt, Artificial Sequence
  Synthetic
  misc_feature (16)..(17): n is a, c, g, or u
  misc_feature (22)..(22): n is a, c, g, or u
uaauacuaacaugggnnuaaan

SEQ ID NO: 139848 - RNA, 23 nt, Artificial Sequence
  Synthetic
  misc_feature (17)..(18): n is a, c, g, or u
  misc_feature (23)..(23): n is a, c, g, or u
uuaauacuaacaugggnnuaaan

SEQ ID NO: 139849 - RNA, 24 nt, Artificial Sequence
  Synthetic
  misc_feature (18)..(19): n is a, c, g, or u
  misc_feature (24)..(24): n is a, c, g, or u
guuaauacuaacaugggnnuaaan

SEQ ID NO: 139850 - RNA, 18 nt, Artificial Sequence
  Synthetic
  misc_feature (18)..(18): n is a, c, g, or u
ccugcauucggagccaan

SEQ ID NO: 139851 - RNA, 19 nt, Artificial Sequence
  Synthetic
  misc_feature (19)..(19): n is a, c, g, or u
cccugcauucggagccaan

SEQ ID NO: 139852 - RNA, 20 nt, Artificial Sequence
  Synthetic
  misc_feature (20)..(20): n is a, c, g, or u
acccugcauucggagccaan

SEQ ID NO: 139853 - RNA, 21 nt, Artificial Sequence
  Synthetic
  misc_feature (21)..(21): n is a, c, g, or u
gacccugcauucggagccaan

SEQ ID NO: 139854 - RNA, 22 nt, Artificial Sequence
  Synthetic
  misc_feature (22)..(22): n is a, c, g, or u
ggacccugcauucggagccaan

SEQ ID NO: 139855 - RNA, 23 nt, Artificial Sequence
  Synthetic
  misc_feature (23)..(23): n is a, c, g, or u
uggacccugcauucggagccaan

SEQ ID NO: 139856 - RNA, 24 nt, Artificial Sequence
  Synthetic
  misc_feature (24)..(24): n is a, c, g, or u
uuggacccugcauucggagccaan

SEQ ID NO: 139857 - RNA, 18 nt, Artificial Sequence
  Synthetic
  misc_feature (18)..(18): n is a, c, g, or u
ugggaacaagagcuacan

SEQ ID NO: 139858 - RNA, 19 nt, Artificial Sequence
  Synthetic
  misc_feature (19)..(19): n is a, c, g, or u
uugggaacaagagcuacan

SEQ ID NO: 139859 - RNA, 20 nt, Artificial Sequence
  Synthetic
  misc_feature (20)..(20): n is a, c, g, or u
cuugggaacaagagcuacan

SEQ ID NO: 139860 - RNA, 21 nt, Artificial Sequence
  Synthetic
  misc_feature (21)..(21): n is a, c, g, or u
ucuugggaacaagagcuacan

SEQ ID NO: 139861 - RNA, 22 nt, Artificial Sequence
  Synthetic
  misc_feature (22)..(22): n is a, c, g, or u
uucuugggaacaagagcuacan

SEQ ID NO: 139862 - RNA, 23 nt, Artificial Sequence
  Synthetic
  misc_feature (23)..(23): n is a, c, g, or u
auucuugggaacaagagcuacan

SEQ ID NO: 139863 - RNA, 24 nt, Artificial Sequence
  Synthetic
  misc_feature (24)..(24): n is a, c, g, or u
uauucuugggaacaagagcuacan

SEQ ID NO: 139864 - RNA, 18 nt, Artificial Sequence
  Synthetic
  misc_feature (6)..(6): n is a, c, g, or u
  misc_feature (18)..(18): n is a, c, g, or u
ccuaanauucauuuacan

SEQ ID NO: 139865 - RNA, 19 nt, Artificial Sequence
  Synthetic
  misc_feature (7)..(7): n is a, c, g, or u
  misc_feature (19)..(19): n is a, c, g, or u
uccuaanauucauuuacan

SEQ ID NO: 139866 - RNA, 20 nt, Artificial Sequence
  Synthetic
  misc_feature (8)..(8): n is a, c, g, or u
  misc_feature (20)..(20): n is a, c, g, or u
uuccuaanauucauuuacan

SEQ ID NO: 139867 - RNA, 21 nt, Artificial Sequence
  Synthetic
  misc_feature (9)..(9): n is a, c, g, or u
  misc_feature (21)..(21): n is a, c, g, or u
uuuccuaanauucauuuacan

SEQ ID NO: 139868 - RNA, 22 nt, Artificial Sequence
  Synthetic
  misc_feature (1)..(1): n is a, c, g, or u
  misc_feature (10)..(10): n is a, c, g, or u
  misc_feature (22)..(22): n is a, c, g, or u
nuuuccuaanauucauuuacan

SEQ ID NO: 139869 - RNA, 23 nt, Artificial Sequence
  Synthetic
  misc_feature (2)..(2): n is a, c, g, or u
  misc_feature (11)..(11): n is a, c, g, or u
  misc_feature (23)..(23): n is a, c, g, or u
cnuuuccuaanauucauuuacan

SEQ ID NO: 139870 - RNA, 24 nt, Artificial Sequence
  Synthetic
  misc_feature (3)..(3): n is a, c, g, or u
  misc_feature (12)..(12): n is a, c, g, or u
  misc_feature (24)..(24): n is a, c, g, or u
ucnuuuccuaanauucauuuacan

SEQ ID NO: 139871 - RNA, 18 nt, Artificial Sequence
  Synthetic
  misc_feature (18)..(18): n is a, c, g, or u
uuucuaaguaaacaguan

SEQ ID NO: 139872 - RNA, 19 nt, Artificial Sequence
  Synthetic
  misc_feature (19)..(19): n is a, c, g, or u
cuuucuaaguaaacaguan

SEQ ID NO: 139873 - RNA, 20 nt, Artificial Sequence
  Synthetic
  misc_feature (20)..(20): n is a, c, g, or u
ccuuucuaaguaaacaguan

SEQ ID NO: 139874 - RNA, 21 nt, Artificial Sequence
  Synthetic
  misc_feature (21)..(21): n is a, c, g, or u
gccuuucuaaguaaacaguan

SEQ ID NO: 139875 - RNA, 22 nt, Artificial Sequence
  Synthetic
  misc_feature (22)..(22): n is a, c, g, or u
ggccuuucuaaguaaacaguan

SEQ ID NO: 139876 - RNA, 23 nt, Artificial Sequence
  Synthetic
  misc_feature (23)..(23): n is a, c, g, or u
aggccuuucuaaguaaacaguan

SEQ ID NO: 139877 - RNA, 24 nt, Artificial Sequence
  Synthetic
  misc_feature (24)..(24): n is a, c, g, or u
aaggccuuucuaaguaaacaguan

SEQ ID NO: 139878 - RNA, 18 nt, Artificial Sequence
  Synthetic
  misc_feature (18)..(18): n is a, c, g, or u
acaaccaguacgggaccn

SEQ ID NO: 139879 - RNA, 19 nt, Artificial Sequence
  Synthetic
  misc_feature (19)..(19): n is a, c, g, or u
aacaaccaguacgggaccn

SEQ ID NO: 139880 - RNA, 20 nt, Artificial Sequence
  Synthetic
  misc_feature (20)..(20): n is a, c, g, or u
caacaaccaguacgggaccn

SEQ ID NO: 139881 - RNA, 21 nt, Artificial Sequence
  Synthetic
  misc_feature (21)..(21): n is a, c, g, or u
acaacaaccaguacgggaccn

SEQ ID NO: 139882 - RNA, 22 nt, Artificial Sequence
  Synthetic
  misc_feature (1)..(1): n is a, c, g, or u
  misc_feature (22)..(22): n is a, c, g, or u
nacaacaaccaguacgggaccn

SEQ ID NO: 139883 - RNA, 23 nt, Artificial Sequence
  Synthetic
  misc_feature (2)..(2): n is a, c, g, or u
  misc_feature (23)..(23): n is a, c, g, or u
cnacaacaaccaguacgggaccn

SEQ ID NO: 139884 - RNA, 24 nt, Artificial Sequence
  Synthetic
  misc_feature (3)..(3): n is a, c, g, or u
  misc_feature (24)..(24): n is a, c, g, or u
ucnacaacaaccaguacgggaccn

SEQ ID NO: 139885 - RNA, 18 nt, Artificial Sequence
  Synthetic
  misc_feature (15)..(15): n is a, c, g, or u
  misc_feature (18)..(18): n is a, c, g, or u
ucuccgucugccgunccn

SEQ ID NO: 139886 - RNA, 19 nt, Artificial Sequence
  Synthetic
  misc_feature (16)..(16): n is a, c, g, or u
  misc_feature (19)..(19): n is a, c, g, or u
uucuccgucugccgunccn

SEQ ID NO: 139887 - RNA, 20 nt, Artificial Sequence
  Synthetic
  misc_feature (17)..(17): n is a, c, g, or u
  misc_feature (20)..(20): n is a, c, g, or u
cuucuccgucugccgunccn

SEQ ID NO: 139888 - RNA, 21 nt, Artificial Sequence
  Synthetic
  misc_feature (18)..(18): n is a, c, g, or u
  misc_feature (21)..(21): n is a, c, g, or u
ccuucuccgucugccgunccn

SEQ ID NO: 139889 - RNA, 22 nt, Artificial Sequence
  Synthetic
  misc_feature (19)..(19): n is a, c, g, or u
  misc_feature (22)..(22): n is a, c, g, or u
cccuucuccgucugccgunccn

SEQ ID NO: 139890 - RNA, 23 nt, Artificial Sequence
  Synthetic
  misc_feature (20)..(20): n is a, c, g, or u
  misc_feature (23)..(23): n is a, c, g, or u
ccccuucuccgucugccgunccn

SEQ ID NO: 139891 - RNA, 24 nt, Artificial Sequence
  Synthetic
  misc_feature (21)..(21): n is a, c, g, or u
  misc_feature (24)..(24): n is a, c, g, or u
uccccuucuccgucugccgunccn

SEQ ID NO: 139892 - RNA, 18 nt, Artificial Sequence
  Synthetic
  misc_feature (1)..(2): n is a, c, g, or u
  misc_feature (15)..(15): n is a, c, g, or u
  misc_feature (18)..(18): n is a, c, g, or u
nncacuaaauauuunccn

SEQ ID NO: 139893 - RNA, 19 nt, Artificial Sequence
  Synthetic
  misc_feature (2)..(3): n is a, c, g, or u
  misc_feature (16)..(16): n is a, c, g, or u
  misc_feature (19)..(19): n is a, c, g, or u
cnncacuaaauauuunccn

SEQ ID NO: 139894 - RNA, 20 nt, Artificial Sequence
  Synthetic
  misc_feature (1)..(1): n is a, c, g, or u
  misc_feature (3)..(4): n is a, c, g, or u
  misc_feature (17)..(17): n is a, c, g, or u
  misc_feature (20)..(20): n is a, c, g, or u
ncnncacuaaauauuunccn

SEQ ID NO: 139895 - RNA, 21 nt, Artificial Sequence
  Synthetic
  misc_feature (2)..(2): n is a, c, g, or u
  misc_feature (4)..(5): n is a, c, g, or u
  misc_feature (18)..(18): n is a, c, g, or u
  misc_feature (21)..(21): n is a, c, g, or u
ancnncacuaaauauuunccn

SEQ ID NO: 139896 - RNA, 22 nt, Artificial Sequence
  Synthetic
  misc_feature (3)..(3): n is a, c, g, or u
  misc_feature (5)..(6): n is a, c, g, or u
  misc_feature (19)..(19): n is a, c, g, or u
  misc_feature (22)..(22): n is a, c, g, or u
uancnncacuaaauauuunccn

SEQ ID NO: 139897 - RNA, 23 nt, Artificial Sequence
  Synthetic
  misc_feature (4)..(4): n is a, c, g, or u
  misc_feature (6)..(7): n is a, c, g, or u
  misc_feature (20)..(20): n is a, c, g, or u
  misc_feature (23)..(23): n is a, c, g, or u
cuancnncacuaaauauuunccn

SEQ ID NO: 139898 - RNA, 24 nt, Artificial Sequence
  Synthetic
  misc_feature (5)..(5): n is a, c, g, or u
  misc_feature (7)..(8): n is a, c, g, or u
  misc_feature (21)..(21): n is a, c, g, or u
  misc_feature (24)..(24): n is a, c, g, or u
ccuancnncacuaaauauuunccn

SEQ ID NO: 139899 - RNA, 18 nt, Artificial Sequence
  Synthetic
  misc_feature (18)..(18): n is a, c, g, or u
acaucucgucaaucuccn

SEQ ID NO: 139900 - RNA, 19 nt, Artificial Sequence
  Synthetic
  misc_feature (19)..(19): n is a, c, g, or u
cacaucucgucaaucuccn

SEQ ID NO: 139901 - RNA, 20 nt, Artificial Sequence
  Synthetic
  misc_feature (20)..(20): n is a, c, g, or u
ucacaucucgucaaucuccn

SEQ ID NO: 139902 - RNA, 21 nt, Artificial Sequence
  Synthetic
  misc_feature (21)..(21): n is a, c, g, or u
cucacaucucgucaaucuccn

SEQ ID NO: 139903 - RNA, 22 nt, Artificial Sequence
  Synthetic
  misc_feature (22)..(22): n is a, c, g, or u
ucucacaucucgucaaucuccn

SEQ ID NO: 139904 - RNA, 23 nt, Artificial Sequence
  Synthetic
  misc_feature (23)..(23): n is a, c, g, or u
cucucacaucucgucaaucuccn

SEQ ID NO: 139905 - RNA, 24 nt, Artificial Sequence
  Synthetic
  misc_feature (24)..(24): n is a, c, g, or u
ccucucacaucucgucaaucuccn

SEQ ID NO: 139906 - RNA, 18 nt, Artificial Sequence
  Synthetic
  misc_feature (18)..(18): n is a, c, g, or u
acuggcuggggcuuggcn

SEQ ID NO: 139907 - RNA, 19 nt, Artificial Sequence
  Synthetic
  misc_feature (19)..(19): n is a, c, g, or u
cacuggcuggggcuuggcn

SEQ ID NO: 139908 - RNA, 20 nt, Artificial Sequence
  Synthetic
  misc_feature (20)..(20): n is a, c, g, or u
ccacuggcuggggcuuggcn

SEQ ID NO: 139909 - RNA, 21 nt, Artificial Sequence
  Synthetic
  misc_feature (21)..(21): n is a, c, g, or u
cccacuggcuggggcuuggcn

SEQ ID NO: 139910 - RNA, 22 nt, Artificial Sequence
  Synthetic
  misc_feature (22)..(22): n is a, c, g, or u
ccccacuggcuggggcuuggcn

SEQ ID NO: 139911 - RNA, 23 nt, Artificial Sequence
  Synthetic
  misc_feature (23)..(23): n is a, c, g, or u
cccccacuggcuggggcuuggcn

SEQ ID NO: 139912 - RNA, 24 nt, Artificial Sequence
  Synthetic
  misc_feature (24)..(24): n is a, c, g, or u
acccccacuggcuggggcuuggcn

SEQ ID NO: 139913 - RNA, 18 nt, Artificial Sequence
  Synthetic
  misc_feature (18)..(18): n is a, c, g, or u
cccgcggacgaccccucn

SEQ ID NO: 139914 - RNA, 19 nt, Artificial Sequence
  Synthetic
  misc_feature (19)..(19): n is a, c, g, or u
ucccgcggacgaccccucn

SEQ ID NO: 139915 - RNA, 20 nt, Artificial Sequence
  Synthetic
  misc_feature (20)..(20): n is a, c, g, or u
aucccgcggacgaccccucn

SEQ ID NO: 139916 - RNA, 21 nt, Artificial Sequence
  Synthetic
  misc_feature (21)..(21): n is a, c, g, or u
aaucccgcggacgaccccucn

SEQ ID NO: 139917 - RNA, 22 nt, Artificial Sequence
  Synthetic
  misc_feature (22)..(22): n is a, c, g, or u
gaaucccgcggacgaccccucn

SEQ ID NO: 139918 - RNA, 23 nt, Artificial Sequence
  Synthetic
  misc_feature (23)..(23): n is a, c, g, or u
ugaaucccgcggacgaccccucn

SEQ ID NO: 139919 - RNA, 24 nt, Artificial Sequence
  Synthetic
  misc_feature (24)..(24): n is a, c, g, or u
cugaaucccgcggacgaccccucn

SEQ ID NO: 139920 - RNA, 18 nt, Artificial Sequence
  Synthetic
  misc_feature (15)..(15): n is a, c, g, or u
  misc_feature (18)..(18): n is a, c, g, or u
aauucugucguccunucn

SEQ ID NO: 139921 - RNA, 19 nt, Artificial Sequence
  Synthetic
  misc_feature (1)..(1): n is a, c, g, or u
  misc_feature (16)..(16): n is a, c, g, or u
  misc_feature (19)..(19): n is a, c, g, or u
naauucugucguccunucn

SEQ ID NO: 139922 - RNA, 20 nt, Artificial Sequence
  Synthetic
  misc_feature (2)..(2): n is a, c, g, or u
  misc_feature (17)..(17): n is a, c, g, or u
  misc_feature (20)..(20): n is a, c, g, or u
anaauucugucguccunucn

SEQ ID NO: 139923 - RNA, 21 nt, Artificial Sequence
  Synthetic
  misc_feature (3)..(3): n is a, c, g, or u
  misc_feature (18)..(18): n is a, c, g, or u
  misc_feature (21)..(21): n is a, c, g, or u
ganaauucugucguccunucn

SEQ ID NO: 139924 - RNA, 22 nt, Artificial Sequence
  Synthetic
  misc_feature (4)..(4): n is a, c, g, or u
  misc_feature (19)..(19): n is a, c, g, or u
  misc_feature (22)..(22): n is a, c, g, or u
uganaauucugucguccunucn

SEQ ID NO: 139925 - RNA, 23 nt, Artificial Sequence
  Synthetic
  misc_feature (5)..(5): n is a, c, g, or u
  misc_feature (20)..(20): n is a, c, g, or u
  misc_feature (23)..(23): n is a, c, g, or u
cuganaauucugucguccunucn

SEQ ID NO: 139926 - RNA, 24 nt, Artificial Sequence
  Synthetic
  misc_feature (6)..(6): n is a, c, g, or u
  misc_feature (21)..(21): n is a, c, g, or u
  misc_feature (24)..(24): n is a, c, g, or u
acuganaauucugucguccunucn

SEQ ID NO: 139927 - RNA, 18 nt, Artificial Sequence
  Synthetic
  misc_feature (5)..(5): n is a, c, g, or u
  misc_feature (18)..(18): n is a, c, g, or u
uuaangacugggaggagn

SEQ ID NO: 139928 - RNA, 19 nt, Artificial Sequence
  Synthetic
  misc_feature (6)..(6): n is a, c, g, or u
  misc_feature (19)..(19): n is a, c, g, or u
uuuaangacugggaggagn

SEQ ID NO: 139929 - RNA, 20 nt, Artificial Sequence
  Synthetic
  misc_feature (7)..(7): n is a, c, g, or u
  misc_feature (20)..(20): n is a, c, g, or u
guuuaangacugggaggagn

SEQ ID NO: 139930 - RNA, 21 nt, Artificial Sequence
  Synthetic
  misc_feature (8)..(8): n is a, c, g, or u
  misc_feature (21)..(21): n is a, c, g, or u
uguuuaangacugggaggagn

SEQ ID NO: 139931 - RNA, 22 nt, Artificial Sequence
  Synthetic
  misc_feature (9)..(9): n is a, c, g, or u
  misc_feature (22)..(22): n is a, c, g, or u
guguuuaangacugggaggagn

SEQ ID NO: 139932 - RNA, 23 nt, Artificial Sequence
  Synthetic
  misc_feature (10)..(10): n is a, c, g, or u
  misc_feature (23)..(23): n is a, c, g, or u
uguguuuaangacugggaggagn

SEQ ID NO: 139933 - RNA, 24 nt, Artificial Sequence
  Synthetic
  misc_feature (11)..(11): n is a, c, g, or u
  misc_feature (24)..(24): n is a, c, g, or u
guguguuuaangacugggaggagn

SEQ ID NO: 139934 - RNA, 18 nt, Artificial Sequence
  Synthetic
  misc_feature (3)..(3): n is a, c, g, or u
  misc_feature (6)..(7): n is a, c, g, or u
  misc_feature (18)..(18): n is a, c, g, or u
uunccnnuagacaaaggn

SEQ ID NO: 139935 - RNA, 19 nt, Artificial Sequence
  Synthetic
  misc_feature (4)..(4): n is a, c, g, or u
  misc_feature (7)..(8): n is a, c, g, or u
  misc_feature (19)..(19): n is a, c, g, or u
uuunccnnuagacaaaggn

SEQ ID NO: 139936 - RNA, 20 nt, Artificial Sequence
  Synthetic
  misc_feature (5)..(5): n is a, c, g, or u
  misc_feature (8)..(9): n is a, c, g, or u
  misc_feature (20)..(20): n is a, c, g, or u
auuunccnnuagacaaaggn

SEQ ID NO: 139937 - RNA, 21 nt, Artificial Sequence
  Synthetic
  misc_feature (6)..(6): n is a, c, g, or u
  misc_feature (9)..(10): n is a, c, g, or u
  misc_feature (21)..(21): n is a, c, g, or u
uauuunccnnuagacaaaggn

SEQ ID NO: 139938 - RNA, 22 nt, Artificial Sequence
  Synthetic
  misc_feature (7)..(7): n is a, c, g, or u
  misc_feature (10)..(11): n is a, c, g, or u
  misc_feature (22)..(22): n is a, c, g, or u
auauuunccnnuagacaaaggn

SEQ ID NO: 139939 - RNA, 23 nt, Artificial Sequence
  Synthetic
  misc_feature (8)..(8): n is a, c, g, or u
  misc_feature (11)..(12): n is a, c, g, or u
  misc_feature (23)..(23): n is a, c, g, or u
aauauuunccnnuagacaaaggn

SEQ ID NO: 139940 - RNA, 24 nt, Artificial Sequence
  Synthetic
  misc_feature (9)..(9): n is a, c, g, or u
  misc_feature (12)..(13): n is a, c, g, or u
  misc_feature (24)..(24): n is a, c, g, or u
aaauauuunccnnuagacaaaggn

SEQ ID NO: 139941 - RNA, 18 nt, Artificial Sequence
  Synthetic
  misc_feature (18)..(18): n is a, c, g, or u
guuaauacuaacaugggn

SEQ ID NO: 139942 - RNA, 19 nt, Artificial Sequence
  Synthetic
  misc_feature (19)..(19): n is a, c, g, or u
uguuaauacuaacaugggn

SEQ ID NO: 139943 - RNA, 20 nt, Artificial Sequence
  Synthetic
  misc_feature (20)..(20): n is a, c, g, or u
auguuaauacuaacaugggn

SEQ ID NO: 139944 - RNA, 21 nt, Artificial Sequence
  Synthetic
  misc_feature (21)..(21): n is a, c, g, or u
uauguuaauacuaacaugggn

SEQ ID NO: 139945 - RNA, 22 nt, Artificial Sequence
  Synthetic
  misc_feature (22)..(22): n is a, c, g, or u
uuauguuaauacuaacaugggn

SEQ ID NO: 139946 - RNA, 23 nt, Artificial Sequence
  Synthetic
  misc_feature (23)..(23): n is a, c, g, or u
auuauguuaauacuaacaugggn

SEQ ID NO: 139947 - RNA, 24 nt, Artificial Sequence
  Synthetic
  misc_feature (24)..(24): n is a, c, g, or u
aauuauguuaauacuaacaugggn

SEQ ID NO: 139948 - RNA, 18 nt, Artificial Sequence
  Synthetic
  misc_feature (9)..(9): n is a, c, g, or u
  misc_feature (15)..(15): n is a, c, g, or u
  misc_feature (18)..(18): n is a, c, g, or u
ggagcaaancucaunggn

SEQ ID NO: 139949 - RNA, 19 nt, Artificial Sequence
  Synthetic
  misc_feature (10)..(10): n is a, c, g, or u
  misc_feature (16)..(16): n is a, c, g, or u
  misc_feature (19)..(19): n is a, c, g, or u
uggagcaaancucaunggn

SEQ ID NO: 139950 - RNA, 20 nt, Artificial Sequence
  Synthetic
  misc_feature (11)..(11): n is a, c, g, or u
  misc_feature (17)..(17): n is a, c, g, or u
  misc_feature (20)..(20): n is a, c, g, or u
cuggagcaaancucaunggn

SEQ ID NO: 139951 - RNA, 21 nt, Artificial Sequence
  Synthetic
  misc_feature (12)..(12): n is a, c, g, or u
  misc_feature (18)..(18): n is a, c, g, or u
  misc_feature (21)..(21): n is a, c, g, or u
ucuggagcaaancucaunggn

SEQ ID NO: 139952 - RNA, 22 nt, Artificial Sequence
  Synthetic
  misc_feature (13)..(13): n is a, c, g, or u
  misc_feature (19)..(19): n is a, c, g, or u
  misc_feature (22)..(22): n is a, c, g, or u
gucuggagcaaancucaunggn

SEQ ID NO: 139953 - RNA, 23 nt, Artificial Sequence
  Synthetic
  misc_feature (14)..(14): n is a, c, g, or u
  misc_feature (20)..(20): n is a, c, g, or u
  misc_feature (23)..(23): n is a, c, g, or u
ggucuggagcaaancucaunggn

SEQ ID NO: 139954 - RNA, 24 nt, Artificial Sequence
  Synthetic
  misc_feature (15)..(15): n is a, c, g, or u
  misc_feature (21)..(21): n is a, c, g, or u
  misc_feature (24)..(24): n is a, c, g, or u
cggucuggagcaaancucaunggn

SEQ ID NO: 139955 - RNA, 18 nt, Artificial Sequence
  Synthetic
  misc_feature (18)..(18): n is a, c, g, or u
gaggacuggggacccugn

SEQ ID NO: 139956 - RNA, 19 nt, Artificial Sequence
  Synthetic
  misc_feature (19)..(19): n is a, c, g, or u
cgaggacuggggacccugn

SEQ ID NO: 139957 - RNA, 20 nt, Artificial Sequence
  Synthetic
  misc_feature (1)..(1): n is a, c, g, or u
  misc_feature (20)..(20): n is a, c, g, or u
ncgaggacuggggacccugn

SEQ ID NO: 139958 - RNA, 21 nt, Artificial Sequence
  Synthetic
  misc_feature (2)..(2): n is a, c, g, or u
  misc_feature (21)..(21): n is a, c, g, or u
cncgaggacuggggacccugn

SEQ ID NO: 139959 - RNA, 22 nt, Artificial Sequence
  Synthetic
  misc_feature (3)..(3): n is a, c, g, or u
  misc_feature (22)..(22): n is a, c, g, or u
ccncgaggacuggggacccugn

SEQ ID NO: 139960 - RNA, 23 nt, Artificial Sequence
  Synthetic
  misc_feature (4)..(4): n is a, c, g, or u
  misc_feature (23)..(23): n is a, c, g, or u
uccncgaggacuggggacccugn

SEQ ID NO: 139961 - RNA, 24 nt, Artificial Sequence
  Synthetic
  misc_feature (5)..(5): n is a, c, g, or u
  misc_feature (24)..(24): n is a, c, g, or u
cuccncgaggacuggggacccugn

SEQ ID NO: 139962 - RNA, 18 nt, Artificial Sequence
  Synthetic
  misc_feature (6)..(6): n is a, c, g, or u
  misc_feature (18)..(18): n is a, c, g, or u
cuuguncaugucccacun

SEQ ID NO: 139963 - RNA, 19 nt, Artificial Sequence
  Synthetic
  misc_feature (7)..(7): n is a, c, g, or u
  misc_feature (19)..(19): n is a, c, g, or u
ucuuguncaugucccacun

SEQ ID NO: 139964 - RNA, 20 nt, Artificial Sequence
  Synthetic
  misc_feature (8)..(8): n is a, c, g, or u
  misc_feature (20)..(20): n is a, c, g, or u
cucuuguncaugucccacun

SEQ ID NO: 139965 - RNA, 21 nt, Artificial Sequence
  Synthetic
  misc_feature (9)..(9): n is a, c, g, or u
  misc_feature (21)..(21): n is a, c, g, or u
ucucuuguncaugucccacun

SEQ ID NO: 139966 - RNA, 22 nt, Artificial Sequence
  Synthetic
  misc_feature (10)..(10): n is a, c, g, or u
  misc_feature (22)..(22): n is a, c, g, or u
aucucuuguncaugucccacun

SEQ ID NO: 139967 - RNA, 23 nt, Artificial Sequence
  Synthetic
  misc_feature (11)..(11): n is a, c, g, or u
  misc_feature (23)..(23): n is a, c, g, or u
caucucuuguncaugucccacun

SEQ ID NO: 139968 - RNA, 24 nt, Artificial Sequence
  Synthetic
  misc_feature (12)..(12): n is a, c, g, or u
  misc_feature (24)..(24): n is a, c, g, or u
ucaucucuuguncaugucccacun

SEQ ID NO: 139969 - RNA, 18 nt, Artificial Sequence
  Synthetic
  misc_feature (10)..(10): n is a, c, g, or u
  misc_feature (12)..(12): n is a, c, g, or u
  misc_feature (18)..(18): n is a, c, g, or u
ccuuccgucngngaucun

SEQ ID NO: 139970 - RNA, 19 nt, Artificial Sequence
  Synthetic
  misc_feature (11)..(11): n is a, c, g, or u
  misc_feature (13)..(13): n is a, c, g, or u
  misc_feature (19)..(19): n is a, c, g, or u
uccuuccgucngngaucun

SEQ ID NO: 139971 - RNA, 20 nt, Artificial Sequence
  Synthetic
  misc_feature (12)..(12): n is a, c, g, or u
  misc_feature (14)..(14): n is a, c, g, or u
  misc_feature (20)..(20): n is a, c, g, or u
uuccuuccgucngngaucun

SEQ ID NO: 139972 - RNA, 21 nt, Artificial Sequence
  Synthetic
  misc_feature (13)..(13): n is a, c, g, or u
  misc_feature (15)..(15): n is a, c, g, or u
  misc_feature (21)..(21): n is a, c, g, or u
uuuccuuccgucngngaucun

SEQ ID NO: 139973 - RNA, 22 nt, Artificial Sequence
  Synthetic
  misc_feature (14)..(14): n is a, c, g, or u
  misc_feature (16)..(16): n is a, c, g, or u
  misc_feature (22)..(22): n is a, c, g, or u
cuuuccuuccgucngngaucun

SEQ ID NO: 139974 - RNA, 23 nt, Artificial Sequence
  Synthetic
  misc_feature (15)..(15): n is a, c, g, or u
  misc_feature (17)..(17): n is a, c, g, or u
  misc_feature (23)..(23): n is a, c, g, or u
ucuuuccuuccgucngngaucun

SEQ ID NO: 139975 - RNA, 24 nt, Artificial Sequence
  Synthetic
  misc_feature (16)..(16): n is a, c, g, or u
  misc_feature (18)..(18): n is a, c, g, or u
  misc_feature (24)..(24): n is a, c, g, or u
uucuuuccuuccgucngngaucun

SEQ ID NO: 139976 - RNA, 18 nt, Artificial Sequence
  Synthetic
  misc_feature (12)..(12): n is a, c, g, or u
  misc_feature (18)..(18): n is a, c, g, or u
uuuggaagaganacugun

SEQ ID NO: 139977 - RNA, 19 nt, Artificial Sequence
  Synthetic
  misc_feature (13)..(13): n is a, c, g, or u
  misc_feature (19)..(19): n is a, c, g, or u
uuuuggaagaganacugun

SEQ ID NO: 139978 - RNA, 20 nt, Artificial Sequence
  Synthetic
  misc_feature (14)..(14): n is a, c, g, or u
  misc_feature (20)..(20): n is a, c, g, or u
cuuuuggaagaganacugun

SEQ ID NO: 139979 - RNA, 21 nt, Artificial Sequence
  Synthetic
  misc_feature (15)..(15): n is a, c, g, or u
  misc_feature (21)..(21): n is a, c, g, or u
acuuuuggaagaganacugun

SEQ ID NO: 139980 - RNA, 22 nt, Artificial Sequence
  Synthetic
  misc_feature (16)..(16): n is a, c, g, or u
  misc_feature (22)..(22): n is a, c, g, or u
uacuuuuggaagaganacugun

SEQ ID NO: 139981 - RNA, 23 nt, Artificial Sequence
  Synthetic
  misc_feature (17)..(17): n is a, c, g, or u
  misc_feature (23)..(23): n is a, c, g, or u
uuacuuuuggaagaganacugun

SEQ ID NO: 139982 - RNA, 24 nt, Artificial Sequence
  Synthetic
  misc_feature (18)..(18): n is a, c, g, or u
  misc_feature (24)..(24): n is a, c, g, or u
cuuacuuuuggaagaganacugun

SEQ ID NO: 139983 - RNA, 18 nt, Artificial Sequence
  Synthetic
  misc_feature (15)..(15): n is a, c, g, or u
  misc_feature (18)..(18): n is a, c, g, or u
cauaaggugggaaanuun

SEQ ID NO: 139984 - RNA, 19 nt, Artificial Sequence
  Synthetic
  misc_feature (16)..(16): n is a, c, g, or u
  misc_feature (19)..(19): n is a, c, g, or u
ucauaaggugggaaanuun

SEQ ID NO: 139985 - RNA, 20 nt, Artificial Sequence
  Synthetic
  misc_feature (17)..(17): n is a, c, g, or u
  misc_feature (20)..(20): n is a, c, g, or u
cucauaaggugggaaanuun

SEQ ID NO: 139986 - RNA, 21 nt, Artificial Sequence
  Synthetic
  misc_feature (18)..(18): n is a, c, g, or u
  misc_feature (21)..(21): n is a, c, g, or u
acucauaaggugggaaanuun

SEQ ID NO: 139987 - RNA, 22 nt, Artificial Sequence
  Synthetic
  misc_feature (19)..(19): n is a, c, g, or u
  misc_feature (22)..(22): n is a, c, g, or u
gacucauaaggugggaaanuun

SEQ ID NO: 139988 - RNA, 23 nt, Artificial Sequence
  Synthetic
  misc_feature (20)..(20): n is a, c, g, or u
  misc_feature (23)..(23): n is a, c, g, or u
ggacucauaaggugggaaanuun

SEQ ID NO: 139989 - RNA, 24 nt, Artificial Sequence
  Synthetic
  misc_feature (21)..(21): n is a, c, g, or u
  misc_feature (24)..(24): n is a, c, g, or u
uggacucauaaggugggaaanuun

SEQ ID NO: 139990 - RNA, 18 nt, Artificial Sequence
  Synthetic
ggcccucucacuguaaau

SEQ ID NO: 139991 - RNA, 19 nt, Artificial Sequence
  Synthetic
  misc_feature (1)..(1): n is a, c, g, or u
nggcccucucacuguaaau

SEQ ID NO: 139992 - RNA, 20 nt, Artificial Sequence
  Synthetic
  misc_feature (2)..(2): n is a, c, g, or u
unggcccucucacuguaaau

SEQ ID NO: 139993 - RNA, 21 nt, Artificial Sequence
  Synthetic
  misc_feature (3)..(3): n is a, c, g, or u
gunggcccucucacuguaaau

SEQ ID NO: 139994 - RNA, 22 nt, Artificial Sequence
  Synthetic
  misc_feature (4)..(4): n is a, c, g, or u
ugunggcccucucacuguaaau

SEQ ID NO: 139995 - RNA, 23 nt, Artificial Sequence
  Synthetic
  misc_feature (5)..(5): n is a, c, g, or u
uugunggcccucucacuguaaau

SEQ ID NO: 139996 - RNA, 24 nt, Artificial Sequence
  Synthetic
  misc_feature (6)..(6): n is a, c, g, or u
uuugunggcccucucacuguaaau

SEQ ID NO: 139997 - RNA, 18 nt, Artificial Sequence
  Synthetic
ucuuggacucccagcaau

SEQ ID NO: 139998 - RNA, 19 nt, Artificial Sequence
  Synthetic
cucuuggacucccagcaau

SEQ ID NO: 139999 - RNA, 20 nt, Artificial Sequence
  Synthetic
acucuuggacucccagcaau

SEQ ID NO: 140000 - RNA, 21 nt, Artificial Sequence
  Synthetic
gacucuuggacucccagcaau

SEQ ID NO: 140001 - RNA, 22 nt, Artificial Sequence
  Synthetic
ggacucuuggacucccagcaau

SEQ ID NO: 140002 - RNA, 23 nt, Artificial Sequence
  Synthetic
aggacucuuggacucccagcaau

SEQ ID NO: 140003 - RNA, 24 nt, Artificial Sequence
  Synthetic
gaggacucuuggacucccagcaau

SEQ ID NO: 140004 - RNA, 18 nt, Artificial Sequence
  Synthetic
gucgcagaagaucucaau

SEQ ID NO: 140005 - RNA, 19 nt, Artificial Sequence
  Synthetic
cgucgcagaagaucucaau

SEQ ID NO: 140006 - RNA, 20 nt, Artificial Sequence
  Synthetic
gcgucgcagaagaucucaau

SEQ ID NO: 140007 - RNA, 18 nt, Artificial Sequence
  Synthetic
uugacccuuauaaagaau

SEQ ID NO: 140008 - RNA, 19 nt, Artificial Sequence
  Synthetic
auugacccuuauaaagaau

SEQ ID NO: 140009 - RNA, 20 nt, Artificial Sequence
  Synthetic
cauugacccuuauaaagaau

SEQ ID NO: 140010 - RNA, 21 nt, Artificial Sequence
  Synthetic
acauugacccuuauaaagaau

SEQ ID NO: 140011 - RNA, 22 nt, Artificial Sequence
  Synthetic
gacauugacccuuauaaagaau

SEQ ID NO: 140012 - RNA, 23 nt, Artificial Sequence
  Synthetic
ggacauugacccuuauaaagaau

SEQ ID NO: 140013 - RNA, 24 nt, Artificial Sequence
  Synthetic
uggacauugacccuuauaaagaau

SEQ ID NO: 140014 - RNA, 18 nt, Artificial Sequence
  Synthetic
cuaucuuuaauccugaau

SEQ ID NO: 140015 - RNA, 19 nt, Artificial Sequence
  Synthetic
ccuaucuuuaauccugaau

SEQ ID NO: 140016 - RNA, 20 nt, Artificial Sequence
  Synthetic
  misc_feature (1)..(1): n is a, c, g, or u
nccuaucuuuaauccugaau

SEQ ID NO: 140017 - RNA, 21 nt, Artificial Sequence
  Synthetic
  misc_feature (2)..(2): n is a, c, g, or u
unccuaucuuuaauccugaau

SEQ ID NO: 140018 - RNA, 22 nt, Artificial Sequence
  Synthetic
  misc_feature (3)..(3): n is a, c, g, or u
gunccuaucuuuaauccugaau

SEQ ID NO: 140019 - RNA, 23 nt, Artificial Sequence
  Synthetic
  misc_feature (1)..(1): n is a, c, g, or u
  misc_feature (4)..(4): n is a, c, g, or u
ngunccuaucuuuaauccugaau

SEQ ID NO: 140020 - RNA, 24 nt, Artificial Sequence
  Synthetic
  misc_feature (2)..(2): n is a, c, g, or u
  misc_feature (5)..(5): n is a, c, g, or u
cngunccuaucuuuaauccugaau

SEQ ID NO: 140021 - RNA, 18 nt, Artificial Sequence
  Synthetic
gcccguuuguccucuaau

SEQ ID NO: 140022 - RNA, 19 nt, Artificial Sequence
  Synthetic
ugcccguuuguccucuaau

SEQ ID NO: 140023 - RNA, 20 nt, Artificial Sequence
  Synthetic
uugcccguuuguccucuaau

SEQ ID NO: 140024 - RNA, 21 nt, Artificial Sequence
  Synthetic
guugcccguuuguccucuaau

SEQ ID NO: 140025 - RNA, 22 nt, Artificial Sequence
  Synthetic
uguugcccguuuguccucuaau

SEQ ID NO: 140026 - RNA, 23 nt, Artificial Sequence
  Synthetic
auguugcccguuuguccucuaau

SEQ ID NO: 140027 - RNA, 24 nt, Artificial Sequence
  Synthetic
uauguugcccguuuguccucuaau

SEQ ID NO: 140028 - RNA, 18 nt, Artificial Sequence
  Synthetic
  misc_feature (1)..(1): n is a, c, g, or u
  misc_feature (10)..(10): n is a, c, g, or u
  misc_feature (13)..(14): n is a, c, g, or u
nuucaugggnuannuaau

SEQ ID NO: 140029 - RNA, 19 nt, Artificial Sequence
  Synthetic
  misc_feature (2)..(2): n is a, c, g, or u
  misc_feature (11)..(11): n is a, c, g, or u
  misc_feature (14)..(15): n is a, c, g, or u
anuucaugggnuannuaau

SEQ ID NO: 140030 - RNA, 20 nt, Artificial Sequence
  Synthetic
  misc_feature (3)..(3): n is a, c, g, or u
  misc_feature (12)..(12): n is a, c, g, or u
  misc_feature (15)..(16): n is a, c, g, or u
aanuucaugggnuannuaau

SEQ ID NO: 140031 - RNA, 21 nt, Artificial Sequence
  Synthetic
  misc_feature (4)..(4): n is a, c, g, or u
  misc_feature (13)..(13): n is a, c, g, or u
  misc_feature (16)..(17): n is a, c, g, or u
aaanuucaugggnuannuaau

SEQ ID NO: 140032 - RNA, 22 nt, Artificial Sequence
  Synthetic
  misc_feature (5)..(5): n is a, c, g, or u
  misc_feature (14)..(14): n is a, c, g, or u
  misc_feature (17)..(18): n is a, c, g, or u
uaaanuucaugggnuannuaau

SEQ ID NO: 140033 - RNA, 23 nt, Artificial Sequence
  Synthetic
  misc_feature (6)..(6): n is a, c, g, or u
  misc_feature (15)..(15): n is a, c, g, or u
  misc_feature (18)..(19): n is a, c, g, or u
cuaaanuucaugggnuannuaau

SEQ ID NO: 140034 - RNA, 24 nt, Artificial Sequence
  Synthetic
  misc_feature (7)..(7): n is a, c, g, or u
  misc_feature (16)..(16): n is a, c, g, or u
  misc_feature (19)..(20): n is a, c, g, or u
ccuaaanuucaugggnuannuaau

SEQ ID NO: 140035 - RNA, 18 nt, Artificial Sequence
  Synthetic
guagucaauuauguuaau

SEQ ID NO: 140036 - RNA, 19 nt, Artificial Sequence
  Synthetic
aguagucaauuauguuaau

SEQ ID NO: 140037 - RNA, 20 nt, Artificial Sequence
  Synthetic
uaguagucaauuauguuaau

SEQ ID NO: 140038 - RNA, 21 nt, Artificial Sequence
  Synthetic
cuaguagucaauuauguuaau

SEQ ID NO: 140039 - RNA, 22 nt, Artificial Sequence
  Synthetic
ucuaguagucaauuauguuaau

SEQ ID NO: 140040 - RNA, 23 nt, Artificial Sequence
  Synthetic
aucuaguagucaauuauguuaau

SEQ ID NO: 140041 - RNA, 24 nt, Artificial Sequence
  Synthetic
gaucuaguagucaauuauguuaau

SEQ ID NO: 140042 - RNA, 18 nt, Artificial Sequence
  Synthetic
  misc_feature (3)..(3): n is a, c, g, or u
  misc_feature (6)..(6): n is a, c, g, or u
acngunccuaucuuuaau

SEQ ID NO: 140043 - RNA, 19 nt, Artificial Sequence
  Synthetic
  misc_feature (4)..(4): n is a, c, g, or u
  misc_feature (7)..(7): n is a, c, g, or u
uacngunccuaucuuuaau

SEQ ID NO: 140044 - RNA, 20 nt, Artificial Sequence
  Synthetic
  misc_feature (5)..(5): n is a, c, g, or u
  misc_feature (8)..(8): n is a, c, g, or u
cuacngunccuaucuuuaau

SEQ ID NO: 140045 - RNA, 21 nt, Artificial Sequence
  Synthetic
  misc_feature (6)..(6): n is a, c, g, or u
  misc_feature (9)..(9): n is a, c, g, or u
ucuacngunccuaucuuuaau

SEQ ID NO: 140046 - RNA, 22 nt, Artificial Sequence
  Synthetic
  misc_feature (1)..(1): n is a, c, g, or u
  misc_feature (7)..(7): n is a, c, g, or u
  misc_feature (10)..(10): n is a, c, g, or u
nucuacngunccuaucuuuaau

SEQ ID NO: 140047 - RNA, 23 nt, Artificial Sequence
  Synthetic
  misc_feature (2)..(2): n is a, c, g, or u
  misc_feature (8)..(8): n is a, c, g, or u
  misc_feature (11)..(11): n is a, c, g, or u
cnucuacngunccuaucuuuaau

SEQ ID NO: 140048 - RNA, 24 nt, Artificial Sequence
  Synthetic
  misc_feature (3)..(3): n is a, c, g, or u
  misc_feature (9)..(9): n is a, c, g, or u
  misc_feature (12)..(12): n is a, c, g, or u
ucnucuacngunccuaucuuuaau

SEQ ID NO: 140049 - RNA, 18 nt, Artificial Sequence
  Synthetic
  misc_feature (9)..(9): n is a, c, g, or u
  misc_feature (11)..(11): n is a, c, g, or u
ggacccugngncgaacau

SEQ ID NO: 140050 - RNA, 19 nt, Artificial Sequence
  Synthetic
  misc_feature (10)..(10): n is a, c, g, or u
  misc_feature (12)..(12): n is a, c, g, or u
gggacccugngncgaacau

SEQ ID NO: 140051 - RNA, 20 nt, Artificial Sequence
  Synthetic
  misc_feature (11)..(11): n is a, c, g, or u
  misc_feature (13)..(13): n is a, c, g, or u
ggggacccugngncgaacau

SEQ ID NO: 140052 - RNA, 21 nt, Artificial Sequence
  Synthetic
  misc_feature (12)..(12): n is a, c, g, or u
  misc_feature (14)..(14): n is a, c, g, or u
uggggacccugngncgaacau

SEQ ID NO: 140053 - RNA, 22 nt, Artificial Sequence
  Synthetic
  misc_feature (13)..(13): n is a, c, g, or u
  misc_feature (15)..(15): n is a, c, g, or u
cuggggacccugngncgaacau

SEQ ID NO: 140054 - RNA, 23 nt, Artificial Sequence
  Synthetic
  misc_feature (14)..(14): n is a, c, g, or u
  misc_feature (16)..(16): n is a, c, g, or u
acuggggacccugngncgaacau

SEQ ID NO: 140055 - RNA, 24 nt, Artificial Sequence
  Synthetic
  misc_feature (15)..(15): n is a, c, g, or u
  misc_feature (17)..(17): n is a, c, g, or u
gacuggggacccugngncgaacau

SEQ ID NO: 140056 - RNA, 18 nt, Artificial Sequence
  Synthetic
  misc_feature (7)..(7): n is a, c, g, or u
uugucunuggguauacau

SEQ ID NO: 140057 - RNA, 19 nt, Artificial Sequence
  Synthetic
  misc_feature (8)..(8): n is a, c, g, or u
uuugucunuggguauacau

SEQ ID NO: 140058 - RNA, 20 nt, Artificial Sequence
  Synthetic
  misc_feature (9)..(9): n is a, c, g, or u
uuuugucunuggguauacau

SEQ ID NO: 140059 - RNA, 21 nt, Artificial Sequence
  Synthetic
  misc_feature (10)..(10): n is a, c, g, or u
cuuuugucunuggguauacau

SEQ ID NO: 140060 - RNA, 22 nt, Artificial Sequence
  Synthetic
  misc_feature (11)..(11): n is a, c, g, or u
ucuuuugucunuggguauacau

SEQ ID NO: 140061 - RNA, 23 nt, Artificial Sequence
  Synthetic
  misc_feature (12)..(12): n is a, c, g, or u
uucuuuugucunuggguauacau

SEQ ID NO: 140062 - RNA, 24 nt, Artificial Sequence
  Synthetic
  misc_feature (13)..(13): n is a, c, g, or u
uuucuuuugucunuggguauacau

SEQ ID NO: 140063 - RNA, 18 nt, Artificial Sequence
  Synthetic
cugcccaaggucuuacau

SEQ ID NO: 140064 - RNA, 19 nt, Artificial Sequence
  Synthetic
ccugcccaaggucuuacau

SEQ ID NO: 140065 - RNA, 20 nt, Artificial Sequence
  Synthetic
uccugcccaaggucuuacau

SEQ ID NO: 140066 - RNA, 21 nt, Artificial Sequence
  Synthetic
auccugcccaaggucuuacau

SEQ ID NO: 140067 - RNA, 22 nt, Artificial Sequence
  Synthetic
gauccugcccaaggucuuacau

SEQ ID NO: 140068 - RNA, 23 nt, Artificial Sequence
  Synthetic
agauccugcccaaggucuuacau

SEQ ID NO: 140069 - RNA, 24 nt, Artificial Sequence
  Synthetic
cagauccugcccaaggucuuacau

SEQ ID NO: 140070 - RNA, 18 nt, Artificial Sequence
  Synthetic
uugggacuucaaccccau

SEQ ID NO: 140071 - RNA, 19 nt, Artificial Sequence
  Synthetic
auugggacuucaaccccau

SEQ ID NO: 140072 - RNA, 20 nt, Artificial Sequence
  Synthetic
gauugggacuucaaccccau

SEQ ID NO: 140073 - RNA, 21 nt, Artificial Sequence
  Synthetic
agauugggacuucaaccccau

SEQ ID NO: 140074 - RNA, 22 nt, Artificial Sequence
  Synthetic
cagauugggacuucaaccccau

SEQ ID NO: 140075 - RNA, 23 nt, Artificial Sequence
  Synthetic
ccagauugggacuucaaccccau

SEQ ID NO: 140076 - RNA, 24 nt, Artificial Sequence
  Synthetic
uccagauugggacuucaaccccau

SEQ ID NO: 140077 - RNA, 18 nt, Artificial Sequence
  Synthetic
  misc_feature (6)..(6): n is a, c, g, or u
auuugnaagauccagcau

SEQ ID NO: 140078 - RNA, 19 nt, Artificial Sequence
  Synthetic
  misc_feature (7)..(7): n is a, c, g, or u
aauuugnaagauccagcau

SEQ ID NO: 140079 - RNA, 20 nt, Artificial Sequence
  Synthetic
  misc_feature (8)..(8): n is a, c, g, or u
uaauuugnaagauccagcau

SEQ ID NO: 140080 - RNA, 21 nt, Artificial Sequence
  Synthetic
  misc_feature (9)..(9): n is a, c, g, or u
auaauuugnaagauccagcau

SEQ ID NO: 140081 - RNA, 22 nt, Artificial Sequence
  Synthetic
  misc_feature (10)..(10): n is a, c, g, or u
aauaauuugnaagauccagcau

SEQ ID NO: 140082 - RNA, 23 nt, Artificial Sequence
  Synthetic
  misc_feature (11)..(11): n is a, c, g, or u
uaauaauuugnaagauccagcau

SEQ ID NO: 140083 - RNA, 24 nt, Artificial Sequence
  Synthetic
  misc_feature (12)..(12): n is a, c, g, or u
guaauaauuugnaagauccagcau

SEQ ID NO: 140084 - RNA, 18 nt, Artificial Sequence
  Synthetic
agguaggagugggagcau

SEQ ID NO: 140085 - RNA, 19 nt, Artificial Sequence
  Synthetic
cagguaggagugggagcau

SEQ ID NO: 140086 - RNA, 20 nt, Artificial Sequence
  Synthetic
ccagguaggagugggagcau

SEQ ID NO: 140087 - RNA, 21 nt, Artificial Sequence
  Synthetic
accagguaggagugggagcau

SEQ ID NO: 140088 - RNA, 22 nt, Artificial Sequence
  Synthetic
aaccagguaggagugggagcau

SEQ ID NO: 140089 - RNA, 23 nt, Artificial Sequence
  Synthetic
caaccagguaggagugggagcau

SEQ ID NO: 140090 - RNA, 24 nt, Artificial Sequence
  Synthetic
ccaaccagguaggagugggagcau

SEQ ID NO: 140091 - RNA, 18 nt, Artificial Sequence
  Synthetic
aaaaccucgcaaaggcau

SEQ ID NO: 140092 - RNA, 19 nt, Artificial Sequence
  Synthetic
caaaaccucgcaaaggcau

SEQ ID NO: 140093 - RNA, 20 nt, Artificial Sequence
  Synthetic
ucaaaaccucgcaaaggcau

SEQ ID NO: 140094 - RNA, 21 nt, Artificial Sequence
  Synthetic
aucaaaaccucgcaaaggcau

SEQ ID NO: 140095 - RNA, 22 nt, Artificial Sequence
  Synthetic
caucaaaaccucgcaaaggcau

SEQ ID NO: 140096 - RNA, 23 nt, Artificial Sequence
  Synthetic
ucaucaaaaccucgcaaaggcau

SEQ ID NO: 140097 - RNA, 24 nt, Artificial Sequence
  Synthetic
gucaucaaaaccucgcaaaggcau

SEQ ID NO: 140098 - RNA, 18 nt, Artificial Sequence
  Synthetic
aucaguuggacccugcau

SEQ ID NO: 140099 - RNA, 19 nt, Artificial Sequence
  Synthetic
caucaguuggacccugcau

SEQ ID NO: 140100 - RNA, 20 nt, Artificial Sequence
  Synthetic
ucaucaguuggacccugcau

SEQ ID NO: 140101 - RNA, 21 nt, Artificial Sequence
  Synthetic
aucaucaguuggacccugcau

SEQ ID NO: 140102 - RNA, 22 nt, Artificial Sequence
  Synthetic
gaucaucaguuggacccugcau

SEQ ID NO: 140103 - RNA, 23 nt, Artificial Sequence
  Synthetic
cgaucaucaguuggacccugcau

SEQ ID NO: 140104 - RNA, 24 nt, Artificial Sequence
  Synthetic
ccgaucaucaguuggacccugcau

SEQ ID NO: 140105 - RNA, 18 nt, Artificial Sequence
  Synthetic
caccucugcacguugcau

SEQ ID NO: 140106 - RNA, 19 nt, Artificial Sequence
  Synthetic
ucaccucugcacguugcau

SEQ ID NO: 140107 - RNA, 20 nt, Artificial Sequence
  Synthetic
uucaccucugcacguugcau

SEQ ID NO: 140108 - RNA, 21 nt, Artificial Sequence
  Synthetic
cuucaccucugcacguugcau

SEQ ID NO: 140109 - RNA, 22 nt, Artificial Sequence
  Synthetic
gcuucaccucugcacguugcau

SEQ ID NO: 140110 - RNA, 23 nt, Artificial Sequence
  Synthetic
cgcuucaccucugcacguugcau

SEQ ID NO: 140111 - RNA, 24 nt, Artificial Sequence
  Synthetic
ucgcuucaccucugcacguugcau

SEQ ID NO: 140112 - RNA, 18 nt, Artificial Sequence
  Synthetic
  misc_feature (15)..(15): n is a, c, g, or u
gaacaagagcuacancau

SEQ ID NO: 140113 - RNA, 19 nt, Artificial Sequence
  Synthetic
  misc_feature (16)..(16): n is a, c, g, or u
ggaacaagagcuacancau

SEQ ID NO: 140114 - RNA, 20 nt, Artificial Sequence
  Synthetic
  misc_feature (17)..(17): n is a, c, g, or u
gggaacaagagcuacancau

SEQ ID NO: 140115 - RNA, 21 nt, Artificial Sequence
  Synthetic
  misc_feature (18)..(18): n is a, c, g, or u
ugggaacaagagcuacancau

SEQ ID NO: 140116 - RNA, 22 nt, Artificial Sequence
  Synthetic
  misc_feature (19)..(19): n is a, c, g, or u
uugggaacaagagcuacancau

SEQ ID NO: 140117 - RNA, 23 nt, Artificial Sequence
  Synthetic
  misc_feature (20)..(20): n is a, c, g, or u
cuugggaacaagagcuacancau

SEQ ID NO: 140118 - RNA, 24 nt, Artificial Sequence
  Synthetic
  misc_feature (21)..(21): n is a, c, g, or u
ucuugggaacaagagcuacancau

SEQ ID NO: 140119 - RNA, 18 nt, Artificial Sequence
  Synthetic
  misc_feature (15)..(15): n is a, c, g, or u
gccaagucuguacancau

SEQ ID NO: 140120 - RNA, 19 nt, Artificial Sequence
  Synthetic
  misc_feature (16)..(16): n is a, c, g, or u
ggccaagucuguacancau

SEQ ID NO: 140121 - RNA, 20 nt, Artificial Sequence
  Synthetic
  misc_feature (17)..(17): n is a, c, g, or u
gggccaagucuguacancau

SEQ ID NO: 140122 - RNA, 21 nt, Artificial Sequence
  Synthetic
  misc_feature (18)..(18): n is a, c, g, or u
ggggccaagucuguacancau

SEQ ID NO: 140123 - RNA, 22 nt, Artificial Sequence
  Synthetic
  misc_feature (19)..(19): n is a, c, g, or u
gggggccaagucuguacancau

SEQ ID NO: 140124 - RNA, 23 nt, Artificial Sequence
  Synthetic
  misc_feature (20)..(20): n is a, c, g, or u
ugggggccaagucuguacancau

SEQ ID NO: 140125 - RNA, 24 nt, Artificial Sequence
  Synthetic
  misc_feature (21)..(21): n is a, c, g, or u
uugggggccaagucuguacancau

SEQ ID NO: 140126 - RNA, 18 nt, Artificial Sequence
  Synthetic
  misc_feature (1)..(1): n is a, c, g, or u
ncaugggagguuggucau

SEQ ID NO: 140127 - RNA, 19 nt, Artificial Sequence
  Synthetic
  misc_feature (2)..(2): n is a, c, g, or u
ancaugggagguuggucau

SEQ ID NO: 140128 - RNA, 20 nt, Artificial Sequence
  Synthetic
  misc_feature (3)..(3): n is a, c, g, or u
cancaugggagguuggucau

SEQ ID NO: 140129 - RNA, 21 nt, Artificial Sequence
  Synthetic
  misc_feature (4)..(4): n is a, c, g, or u
acancaugggagguuggucau

SEQ ID NO: 140130 - RNA, 22 nt, Artificial Sequence
  Synthetic
  misc_feature (5)..(5): n is a, c, g, or u
uacancaugggagguuggucau

SEQ ID NO: 140131 - RNA, 23 nt, Artificial Sequence
  Synthetic
  misc_feature (6)..(6): n is a, c, g, or u
cuacancaugggagguuggucau

SEQ ID NO: 140132 - RNA, 24 nt, Artificial Sequence
  Synthetic
  misc_feature (7)..(7): n is a, c, g, or u
gcuacancaugggagguuggucau

SEQ ID NO: 140133 - RNA, 18 nt, Artificial Sequence
  Synthetic
  misc_feature (3)..(3): n is a, c, g, or u
aanucaaacaauccagau

SEQ ID NO: 140134 - RNA, 19 nt, Artificial Sequence
  Synthetic
  misc_feature (4)..(4): n is a, c, g, or u
caanucaaacaauccagau

SEQ ID NO: 140135 - RNA, 20 nt, Artificial Sequence
  Synthetic
  misc_feature (5)..(5): n is a, c, g, or u
ccaanucaaacaauccagau

SEQ ID NO: 140136 - RNA, 21 nt, Artificial Sequence
  Synthetic
  misc_feature (6)..(6): n is a, c, g, or u
gccaanucaaacaauccagau

SEQ ID NO: 140137 - RNA, 22 nt, Artificial Sequence
  Synthetic
  misc_feature (7)..(7): n is a, c, g, or u
agccaanucaaacaauccagau

SEQ ID NO: 140138 - RNA, 23 nt, Artificial Sequence
  Synthetic
  misc_feature (8)..(8): n is a, c, g, or u
gagccaanucaaacaauccagau

SEQ ID NO: 140139 - RNA, 24 nt, Artificial Sequence
  Synthetic
  misc_feature (9)..(9): n is a, c, g, or u
ggagccaanucaaacaauccagau

SEQ ID NO: 140140 - RNA, 18 nt, Artificial Sequence
  Synthetic
  misc_feature (15)..(15): n is a, c, g, or u
caccaagcucugcangau

SEQ ID NO: 140141 - RNA, 19 nt, Artificial Sequence
  Synthetic
  misc_feature (16)..(16): n is a, c, g, or u
ccaccaagcucugcangau

SEQ ID NO: 140142 - RNA, 20 nt, Artificial Sequence
  Synthetic
  misc_feature (17)..(17): n is a, c, g, or u
uccaccaagcucugcangau

SEQ ID NO: 140143 - RNA, 21 nt, Artificial Sequence
  Synthetic
  misc_feature (18)..(18): n is a, c, g, or u
uuccaccaagcucugcangau

SEQ ID NO: 140144 - RNA, 22 nt, Artificial Sequence
  Synthetic
  misc_feature (1)..(1): n is a, c, g, or u
  misc_feature (19)..(19): n is a, c, g, or u
nuuccaccaagcucugcangau

SEQ ID NO: 140145 - RNA, 23 nt, Artificial Sequence
  Synthetic
  misc_feature (2)..(2): n is a, c, g, or u
  misc_feature (20)..(20): n is a, c, g, or u
cnuuccaccaagcucugcangau

SEQ ID NO: 140146 - RNA, 24 nt, Artificial Sequence
  Synthetic
  misc_feature (3)..(3): n is a, c, g, or u
  misc_feature (21)..(21): n is a, c, g, or u
gcnuuccaccaagcucugcangau

SEQ ID NO: 140147 - RNA, 18 nt, Artificial Sequence
  Synthetic
  misc_feature (3)..(3): n is a, c, g, or u
  misc_feature (6)..(7): n is a, c, g, or u
  misc_feature (9)..(9): n is a, c, g, or u
gunaanngnccuauugau

SEQ ID NO: 140148 - RNA, 19 nt, Artificial Sequence
  Synthetic
  misc_feature (4)..(4): n is a, c, g, or u
  misc_feature (7)..(8): n is a, c, g, or u
  misc_feature (10)..(10): n is a, c, g, or u
ugunaanngnccuauugau

SEQ ID NO: 140149 - RNA, 20 nt, Artificial Sequence
  Synthetic
  misc_feature (5)..(5): n is a, c, g, or u
  misc_feature (8)..(9): n is a, c, g, or u
  misc_feature (11)..(11): n is a, c, g, or u
cugunaanngnccuauugau

SEQ ID NO: 140150 - RNA, 21 nt, Artificial Sequence
  Synthetic
  misc_feature (6)..(6): n is a, c, g, or u
  misc_feature (9)..(10): n is a, c, g, or u
  misc_feature (12)..(12): n is a, c, g, or u
ccugunaanngnccuauugau

SEQ ID NO: 140151 - RNA, 22 nt, Artificial Sequence
  Synthetic
  misc_feature (7)..(7): n is a, c, g, or u
  misc_feature (10)..(11): n is a, c, g, or u
  misc_feature (13)..(13): n is a, c, g, or u
uccugunaanngnccuauugau

SEQ ID NO: 140152 - RNA, 23 nt, Artificial Sequence
  Synthetic
  misc_feature (8)..(8): n is a, c, g, or u
  misc_feature (11)..(12): n is a, c, g, or u
  misc_feature (14)..(14): n is a, c, g, or u
uuccugunaanngnccuauugau

SEQ ID NO: 140153 - RNA, 24 nt, Artificial Sequence
  Synthetic
  misc_feature (9)..(9): n is a, c, g, or u
  misc_feature (12)..(13): n is a, c, g, or u
  misc_feature (15)..(15): n is a, c, g, or u
cuuccugunaanngnccuauugau

SEQ ID NO: 140154 - RNA, 18 nt, Artificial Sequence
  Synthetic
  misc_feature (16)..(16): n is a, c, g, or u
gaaaguaugucaaagnau

SEQ ID NO: 140155 - RNA, 19 nt, Artificial Sequence
  Synthetic
  misc_feature (17)..(17): n is a, c, g, or u
ggaaaguaugucaaagnau

SEQ ID NO: 140156 - RNA, 20 nt, Artificial Sequence
  Synthetic
  misc_feature (18)..(18): n is a, c, g, or u
uggaaaguaugucaaagnau

SEQ ID NO: 140157 - RNA, 21 nt, Artificial Sequence
  Synthetic
  misc_feature (19)..(19): n is a, c, g, or u
uuggaaaguaugucaaagnau

SEQ ID NO: 140158 - RNA, 22 nt, Artificial Sequence
  Synthetic
  misc_feature (20)..(20): n is a, c, g, or u
auuggaaaguaugucaaagnau

SEQ ID NO: 140159 - RNA, 23 nt, Artificial Sequence
  Synthetic
  misc_feature (21)..(21): n is a, c, g, or u
gauuggaaaguaugucaaagnau

SEQ ID NO: 140160 - RNA, 24 nt, Artificial Sequence
  Synthetic
  misc_feature (22)..(22): n is a, c, g, or u
ugauuggaaaguaugucaaagnau

SEQ ID NO: 140161 - RNA, 18 nt, Artificial Sequence
  Synthetic
  misc_feature (9)..(9): n is a, c, g, or u
aaggcuggnauucuauau

SEQ ID NO: 140162 - RNA, 19 nt, Artificial Sequence
  Synthetic
  misc_feature (10)..(10): n is a, c, g, or u
gaaggcuggnauucuauau

SEQ ID NO: 140163 - RNA, 20 nt, Artificial Sequence
  Synthetic
  misc_feature (11)..(11): n is a, c, g, or u
ggaaggcuggnauucuauau

SEQ ID NO: 140164 - RNA, 21 nt, Artificial Sequence
  Synthetic
  misc_feature (12)..(12): n is a, c, g, or u
uggaaggcuggnauucuauau

SEQ ID NO: 140165 - RNA, 22 nt, Artificial Sequence
  Synthetic
  misc_feature (13)..(13): n is a, c, g, or u
uuggaaggcuggnauucuauau

SEQ ID NO: 140166 - RNA, 23 nt, Artificial Sequence
  Synthetic
  misc_feature (14)..(14): n is a, c, g, or u
uuuggaaggcuggnauucuauau

SEQ ID NO: 140167 - RNA, 24 nt, Artificial Sequence
  Synthetic
  misc_feature (15)..(15): n is a, c, g, or u
cuuuggaaggcuggnauucuauau

SEQ ID NO: 140168 - RNA, 18 nt, Artificial Sequence
  Synthetic
  misc_feature (11)..(11): n is a, c, g, or u
ggaaggcuggnauucuau

SEQ ID NO: 140169 - RNA, 19 nt, Artificial Sequence
  Synthetic
  misc_feature (12)..(12): n is a, c, g, or u
uggaaggcuggnauucuau

SEQ ID NO: 140170 - RNA, 20 nt, Artificial Sequence
  Synthetic
  misc_feature (13)..(13): n is a, c, g, or u
uuggaaggcuggnauucuau

SEQ ID NO: 140171 - RNA, 21 nt, Artificial Sequence
  Synthetic
  misc_feature (14)..(14): n is a, c, g, or u
uuuggaaggcuggnauucuau

SEQ ID NO: 140172 - RNA, 22 nt, Artificial Sequence
  Synthetic
  misc_feature (15)..(15): n is a, c, g, or u
cuuuggaaggcuggnauucuau

SEQ ID NO: 140173 - RNA, 23 nt, Artificial Sequence
  Synthetic
  misc_feature (16)..(16): n is a, c, g, or u
ucuuuggaaggcuggnauucuau

SEQ ID NO: 140174 - RNA, 24 nt, Artificial Sequence
  Synthetic
  misc_feature (17)..(17): n is a, c, g, or u
cucuuuggaaggcuggnauucuau

SEQ ID NO: 140175 - RNA, 18 nt, Artificial Sequence
  Synthetic
cuauugauuggaaaguau

SEQ ID NO: 140176 - RNA, 19 nt, Artificial Sequence
  Synthetic
ccuauugauuggaaaguau

SEQ ID NO: 140177 - RNA, 20 nt, Artificial Sequence
  Synthetic
  misc_feature (1)..(1): n is a, c, g, or u
nccuauugauuggaaaguau

SEQ ID NO: 140178 - RNA, 21 nt, Artificial Sequence
  Synthetic
  misc_feature (2)..(2): n is a, c, g, or u
gnccuauugauuggaaaguau

SEQ ID NO: 140179 - RNA, 22 nt, Artificial Sequence
  Synthetic
  misc_feature (1)..(1): n is a, c, g, or u
  misc_feature (3)..(3): n is a, c, g, or u
ngnccuauugauuggaaaguau

SEQ ID NO: 140180 - RNA, 23 nt, Artificial Sequence
  Synthetic
  misc_feature (1)..(2): n is a, c, g, or u
  misc_feature (4)..(4): n is a, c, g, or u
nngnccuauugauuggaaaguau

SEQ ID NO: 140181 - RNA, 24 nt, Artificial Sequence
  Synthetic
  misc_feature (2)..(3): n is a, c, g, or u
  misc_feature (5)..(5): n is a, c, g, or u
anngnccuauugauuggaaaguau

SEQ ID NO: 140182 - RNA, 18 nt, Artificial Sequence
  Synthetic
auauggaugaugugguau

SEQ ID NO: 140183 - RNA, 19 nt, Artificial Sequence
  Synthetic
uauauggaugaugugguau

SEQ ID NO: 140184 - RNA, 20 nt, Artificial Sequence
  Synthetic
  misc_feature (1)..(1): n is a, c, g, or u
nuauauggaugaugugguau

SEQ ID NO: 140185 - RNA, 21 nt, Artificial Sequence
  Synthetic
  misc_feature (2)..(2): n is a, c, g, or u
gnuauauggaugaugugguau

SEQ ID NO: 140186 - RNA, 22 nt, Artificial Sequence
  Synthetic
  misc_feature (3)..(3): n is a, c, g, or u
agnuauauggaugaugugguau

SEQ ID NO: 140187 - RNA, 23 nt, Artificial Sequence
  Synthetic
  misc_feature (4)..(4): n is a, c, g, or u
cagnuauauggaugaugugguau

SEQ ID NO: 140188 - RNA, 24 nt, Artificial Sequence
  Synthetic
  misc_feature (5)..(5): n is a, c, g, or u
ucagnuauauggaugaugugguau

SEQ ID NO: 140189 - RNA, 18 nt, Artificial Sequence
  Synthetic
gccuuuguaugcauguau

SEQ ID NO: 140190 - RNA, 19 nt, Artificial Sequence
  Synthetic
ugccuuuguaugcauguau

SEQ ID NO: 140191 - RNA, 20 nt, Artificial Sequence
  Synthetic
augccuuuguaugcauguau

SEQ ID NO: 140192 - RNA, 21 nt, Artificial Sequence
  Synthetic
aaugccuuuguaugcauguau

SEQ ID NO: 140193 - RNA, 22 nt, Artificial Sequence
  Synthetic
uaaugccuuuguaugcauguau

SEQ ID NO: 140194 - RNA, 23 nt, Artificial Sequence
  Synthetic
uuaaugccuuuguaugcauguau

SEQ ID NO: 140195 - RNA, 24 nt, Artificial Sequence
  Synthetic
  misc_feature (1)..(1): n is a, c, g, or u
nuuaaugccuuuguaugcauguau

SEQ ID NO: 140196 - RNA, 18 nt, Artificial Sequence
  Synthetic
  misc_feature (3)..(3): n is a, c, g, or u
acngccucagcucuguau

SEQ ID NO: 140197 - RNA, 19 nt, Artificial Sequence
  Synthetic
  misc_feature (1)..(1): n is a, c, g, or u
  misc_feature (4)..(4): n is a, c, g, or u
nacngccucagcucuguau

SEQ ID NO: 140198 - RNA, 20 nt, Artificial Sequence
  Synthetic
  misc_feature (2)..(2): n is a, c, g, or u
  misc_feature (5)..(5): n is a, c, g, or u
anacngccucagcucuguau

SEQ ID NO: 140199 - RNA, 21 nt, Artificial Sequence
  Synthetic
  misc_feature (3)..(3): n is a, c, g, or u
  misc_feature (6)..(6): n is a, c, g, or u
ganacngccucagcucuguau

SEQ ID NO: 140200 - RNA, 22 nt, Artificial Sequence
  Synthetic
  misc_feature (1)..(1): n is a, c, g, or u
  misc_feature (4)..(4): n is a, c, g, or u
  misc_feature (7)..(7): n is a, c, g, or u
nganacngccucagcucuguau

SEQ ID NO: 140201 - RNA, 23 nt, Artificial Sequence
  Synthetic
  misc_feature (2)..(2): n is a, c, g, or u
  misc_feature (5)..(5): n is a, c, g, or u
  misc_feature (8)..(8): n is a, c, g, or u
unganacngccucagcucuguau

SEQ ID NO: 140202 - RNA, 24 nt, Artificial Sequence
  Synthetic
  misc_feature (3)..(3): n is a, c, g, or u
  misc_feature (6)..(6): n is a, c, g, or u
  misc_feature (9)..(9): n is a, c, g, or u
cunganacngccucagcucuguau

SEQ ID NO: 140203 - RNA, 18 nt, Artificial Sequence
  Synthetic
  misc_feature (7)..(7): n is a, c, g, or u
  misc_feature (9)..(9): n is a, c, g, or u
gguuaangnucuuuguau

SEQ ID NO: 140204 - RNA, 19 nt, Artificial Sequence
  Synthetic
  misc_feature (8)..(8): n is a, c, g, or u
  misc_feature (10)..(10): n is a, c, g, or u
agguuaangnucuuuguau

SEQ ID NO: 140205 - RNA, 20 nt, Artificial Sequence
  Synthetic
  misc_feature (9)..(9): n is a, c, g, or u
  misc_feature (11)..(11): n is a, c, g, or u
uagguuaangnucuuuguau

SEQ ID NO: 140206 - RNA, 21 nt, Artificial Sequence
  Synthetic
  misc_feature (10)..(10): n is a, c, g, or u
  misc_feature (12)..(12): n is a, c, g, or u
uuagguuaangnucuuuguau

SEQ ID NO: 140207 - RNA, 22 nt, Artificial Sequence
  Synthetic
  misc_feature (11)..(11): n is a, c, g, or u
  misc_feature (13)..(13): n is a, c, g, or u
auuagguuaangnucuuuguau

SEQ ID NO: 140208 - RNA, 23 nt, Artificial Sequence
  Synthetic
  misc_feature (12)..(12): n is a, c, g, or u
  misc_feature (14)..(14): n is a, c, g, or u
gauuagguuaangnucuuuguau

SEQ ID NO: 140209 - RNA, 24 nt, Artificial Sequence
  Synthetic
  misc_feature (13)..(13): n is a, c, g, or u
  misc_feature (15)..(15): n is a, c, g, or u
agauuagguuaangnucuuuguau

SEQ ID NO: 140210 - RNA, 18 nt, Artificial Sequence
  Synthetic
auggacauugacccuuau

SEQ ID NO: 140211 - RNA, 19 nt, Artificial Sequence
  Synthetic
cauggacauugacccuuau

SEQ ID NO: 140212 - RNA, 20 nt, Artificial Sequence
  Synthetic
gcauggacauugacccuuau

SEQ ID NO: 140213 - RNA, 21 nt, Artificial Sequence
  Synthetic
ggcauggacauugacccuuau

SEQ ID NO: 140214 - RNA, 22 nt, Artificial Sequence
  Synthetic
gggcauggacauugacccuuau

SEQ ID NO: 140215 - RNA, 23 nt, Artificial Sequence
  Synthetic
ggggcauggacauugacccuuau

SEQ ID NO: 140216 - RNA, 24 nt, Artificial Sequence
  Synthetic
uggggcauggacauugacccuuau

SEQ ID NO: 140217 - RNA, 18 nt, Artificial Sequence
  Synthetic
  misc_feature (3)..(3): n is a, c, g, or u
uunacuuucucgccaacu

SEQ ID NO: 140218 - RNA, 19 nt, Artificial Sequence
  Synthetic
  misc_feature (4)..(4): n is a, c, g, or u
uuunacuuucucgccaacu

SEQ ID NO: 140219 - RNA, 20 nt, Artificial Sequence
  Synthetic
  misc_feature (5)..(5): n is a, c, g, or u
cuuunacuuucucgccaacu

SEQ ID NO: 140220 - RNA, 21 nt, Artificial Sequence
  Synthetic
  misc_feature (6)..(6): n is a, c, g, or u
gcuuunacuuucucgccaacu

SEQ ID NO: 140221 - RNA, 22 nt, Artificial Sequence
  Synthetic
  misc_feature (7)..(7): n is a, c, g, or u
ggcuuunacuuucucgccaacu

SEQ ID NO: 140222 - RNA, 23 nt, Artificial Sequence
  Synthetic
  misc_feature (8)..(8): n is a, c, g, or u
aggcuuunacuuucucgccaacu

SEQ ID NO: 140223 - RNA, 24 nt, Artificial Sequence
  Synthetic
  misc_feature (9)..(9): n is a, c, g, or u
caggcuuunacuuucucgccaacu

SEQ ID NO: 140224 - RNA, 18 nt, Artificial Sequence
  Synthetic
gauccauacugcggaacu

SEQ ID NO: 140225 - RNA, 19 nt, Artificial Sequence
  Synthetic
cgauccauacugcggaacu

SEQ ID NO: 140226 - RNA, 20 nt, Artificial Sequence
  Synthetic
ccgauccauacugcggaacu

SEQ ID NO: 140227 - RNA, 18 nt, Artificial Sequence
  Synthetic
cccuaucuuaucaacacu

SEQ ID NO: 140228 - RNA, 19 nt, Artificial Sequence
  Synthetic
ccccuaucuuaucaacacu

SEQ ID NO: 140229 - RNA, 20 nt, Artificial Sequence
  Synthetic
gccccuaucuuaucaacacu

SEQ ID NO: 140230 - RNA, 21 nt, Artificial Sequence
  Synthetic
ugccccuaucuuaucaacacu

SEQ ID NO: 140231 - RNA, 22 nt, Artificial Sequence
  Synthetic
augccccuaucuuaucaacacu

SEQ ID NO: 140232 - RNA, 23 nt, Artificial Sequence
  Synthetic
aaugccccuaucuuaucaacacu

SEQ ID NO: 140233 - RNA, 24 nt, Artificial Sequence
  Synthetic
aaaugccccuaucuuaucaacacu

SEQ ID NO: 140234 - RNA, 18 nt, Artificial Sequence
  Synthetic
gucuuacauaagaggacu

SEQ ID NO: 140235 - RNA, 19 nt, Artificial Sequence
  Synthetic
ggucuuacauaagaggacu

SEQ ID NO: 140236 - RNA, 20 nt, Artificial Sequence
  Synthetic
aggucuuacauaagaggacu

SEQ ID NO: 140237 - RNA, 21 nt, Artificial Sequence
  Synthetic
aaggucuuacauaagaggacu

SEQ ID NO: 140238 - RNA, 22 nt, Artificial Sequence
  Synthetic
caaggucuuacauaagaggacu

SEQ ID NO: 140239 - RNA, 23 nt, Artificial Sequence
  Synthetic
ccaaggucuuacauaagaggacu

SEQ ID NO: 140240 - RNA, 24 nt, Artificial Sequence
  Synthetic
cccaaggucuuacauaagaggacu

SEQ ID NO: 140241 - RNA, 18 nt, Artificial Sequence
  Synthetic
  misc_feature (10)..(10): n is a, c, g, or u
ucaaucuccncgaggacu

SEQ ID NO: 140242 - RNA, 19 nt, Artificial Sequence
  Synthetic
  misc_feature (11)..(11): n is a, c, g, or u
gucaaucuccncgaggacu

SEQ ID NO: 140243 - RNA, 20 nt, Artificial Sequence
  Synthetic
  misc_feature (12)..(12): n is a, c, g, or u
cgucaaucuccncgaggacu

SEQ ID NO: 140244 - RNA, 21 nt, Artificial Sequence
  Synthetic
  misc_feature (13)..(13): n is a, c, g, or u
ucgucaaucuccncgaggacu

SEQ ID NO: 140245 - RNA, 22 nt, Artificial Sequence
  Synthetic
  misc_feature (14)..(14): n is a, c, g, or u
cucgucaaucuccncgaggacu

SEQ ID NO: 140246 - RNA, 23 nt, Artificial Sequence
  Synthetic
  misc_feature (15)..(15): n is a, c, g, or u
ucucgucaaucuccncgaggacu

SEQ ID NO: 140247 - RNA, 24 nt, Artificial Sequence
  Synthetic
  misc_feature (16)..(16): n is a, c, g, or u
aucucgucaaucuccncgaggacu

SEQ ID NO: 140248 - RNA, 18 nt, Artificial Sequence
  Synthetic
guuaguauuccuuggacu

SEQ ID NO: 140249 - RNA, 19 nt, Artificial Sequence
  Synthetic
uguuaguauuccuuggacu

SEQ ID NO: 140250 - RNA, 20 nt, Artificial Sequence
  Synthetic
auguuaguauuccuuggacu

SEQ ID NO: 140251 - RNA, 21 nt, Artificial Sequence
  Synthetic
aauguuaguauuccuuggacu

SEQ ID NO: 140252 - RNA, 22 nt, Artificial Sequence
  Synthetic
caauguuaguauuccuuggacu

SEQ ID NO: 140253 - RNA, 23 nt, Artificial Sequence
  Synthetic
ucaauguuaguauuccuuggacu

SEQ ID NO: 140254 - RNA, 24 nt, Artificial Sequence
  Synthetic
cucaauguuaguauuccuuggacu

SEQ ID NO: 140255 - RNA, 18 nt, Artificial Sequence
  Synthetic
uaagaggacucuuggacu

SEQ ID NO: 140256 - RNA, 19 nt, Artificial Sequence
  Synthetic
auaagaggacucuuggacu

SEQ ID NO: 140257 - RNA, 20 nt, Artificial Sequence
  Synthetic
cauaagaggacucuuggacu

SEQ ID NO: 140258 - RNA, 21 nt, Artificial Sequence
  Synthetic
acauaagaggacucuuggacu

SEQ ID NO: 140259 - RNA, 22 nt, Artificial Sequence
  Synthetic
uacauaagaggacucuuggacu

SEQ ID NO: 140260 - RNA, 23 nt, Artificial Sequence
  Synthetic
uuacauaagaggacucuuggacu

SEQ ID NO: 140261 - RNA, 24 nt, Artificial Sequence
  Synthetic
cuuacauaagaggacucuuggacu

SEQ ID NO: 140262 - RNA, 18 nt, Artificial Sequence
  Synthetic
  misc_feature (14)..(14): n is a, c, g, or u
acuguguguuuaangacu

SEQ ID NO: 140263 - RNA, 19 nt, Artificial Sequence
  Synthetic
  misc_feature (15)..(15): n is a, c, g, or u
gacuguguguuuaangacu

SEQ ID NO: 140264 - RNA, 20 nt, Artificial Sequence
  Synthetic
  misc_feature (16)..(16): n is a, c, g, or u
agacuguguguuuaangacu

SEQ ID NO: 140265 - RNA, 21 nt, Artificial Sequence
  Synthetic
  misc_feature (17)..(17): n is a, c, g, or u
aagacuguguguuuaangacu

SEQ ID NO: 140266 - RNA, 22 nt, Artificial Sequence
  Synthetic
  misc_feature (18)..(18): n is a, c, g, or u
aaagacuguguguuuaangacu

SEQ ID NO: 140267 - RNA, 23 nt, Artificial Sequence
  Synthetic
  misc_feature (19)..(19): n is a, c, g, or u
caaagacuguguguuuaangacu

SEQ ID NO: 140268 - RNA, 24 nt, Artificial Sequence
  Synthetic
  misc_feature (20)..(20): n is a, c, g, or u
ucaaagacuguguguuuaangacu

SEQ ID NO: 140269 - RNA, 18 nt, Artificial Sequence
  Synthetic
ccucugccgauccauacu

SEQ ID NO: 140270 - RNA, 19 nt, Artificial Sequence
  Synthetic
uccucugccgauccauacu

SEQ ID NO: 140271 - RNA, 20 nt, Artificial Sequence
  Synthetic
cuccucugccgauccauacu

SEQ ID NO: 140272 - RNA, 21 nt, Artificial Sequence
  Synthetic
gcuccucugccgauccauacu

SEQ ID NO: 140273 - RNA, 22 nt, Artificial Sequence
  Synthetic
ggcuccucugccgauccauacu

SEQ ID NO: 140274 - RNA, 23 nt, Artificial Sequence
  Synthetic
uggcuccucugccgauccauacu

SEQ ID NO: 140275 - RNA, 24 nt, Artificial Sequence
  Synthetic
guggcuccucugccgauccauacu

SEQ ID NO: 140276 - RNA, 18 nt, Artificial Sequence
  Synthetic
ccgaccuugaggccuacu

SEQ ID NO: 140277 - RNA, 19 nt, Artificial Sequence
  Synthetic
accgaccuugaggccuacu

SEQ ID NO: 140278 - RNA, 20 nt, Artificial Sequence
  Synthetic
gaccgaccuugaggccuacu

SEQ ID NO: 140279 - RNA, 21 nt, Artificial Sequence
  Synthetic
cgaccgaccuugaggccuacu

SEQ ID NO: 140280 - RNA, 22 nt, Artificial Sequence
  Synthetic
acgaccgaccuugaggccuacu

SEQ ID NO: 140281 - RNA, 23 nt, Artificial Sequence
  Synthetic
aacgaccgaccuugaggccuacu

SEQ ID NO: 140282 - RNA, 24 nt, Artificial Sequence
  Synthetic
caacgaccgaccuugaggccuacu

SEQ ID NO: 140283 - RNA, 18 nt, Artificial Sequence
  Synthetic
aaagaauuuggagcuacu

SEQ ID NO: 140284 - RNA, 19 nt, Artificial Sequence
  Synthetic
uaaagaauuuggagcuacu

SEQ ID NO: 140285 - RNA, 20 nt, Artificial Sequence
  Synthetic
auaaagaauuuggagcuacu

SEQ ID NO: 140286 - RNA, 21 nt, Artificial Sequence
  Synthetic
uauaaagaauuuggagcuacu

SEQ ID NO: 140287 - RNA, 22 nt, Artificial Sequence
  Synthetic
uuauaaagaauuuggagcuacu

SEQ ID NO: 140288 - RNA, 23 nt, Artificial Sequence
  Synthetic
cuuauaaagaauuuggagcuacu

SEQ ID NO: 140289 - RNA, 24 nt, Artificial Sequence
  Synthetic
ccuuauaaagaauuuggagcuacu

SEQ ID NO: 140290 - RNA, 18 nt, Artificial Sequence
  Synthetic
  misc_feature (12)..(12): n is a, c, g, or u
uggcugcuaggnuguacu

SEQ ID NO: 140291 - RNA, 19 nt, Artificial Sequence
  Synthetic
  misc_feature (13)..(13): n is a, c, g, or u
auggcugcuaggnuguacu

SEQ ID NO: 140292 - RNA, 20 nt, Artificial Sequence
  Synthetic
  misc_feature (14)..(14): n is a, c, g, or u
cauggcugcuaggnuguacu

SEQ ID NO: 140293 - RNA, 21 nt, Artificial Sequence
  Synthetic
  misc_feature (15)..(15): n is a, c, g, or u
ccauggcugcuaggnuguacu

SEQ ID NO: 140294 - RNA, 22 nt, Artificial Sequence
  Synthetic
  misc_feature (16)..(16): n is a, c, g, or u
uccauggcugcuaggnuguacu

SEQ ID NO: 140295 - RNA, 23 nt, Artificial Sequence
  Synthetic
  misc_feature (17)..(17): n is a, c, g, or u
uuccauggcugcuaggnuguacu

SEQ ID NO: 140296 - RNA, 24 nt, Artificial Sequence
  Synthetic
  misc_feature (18)..(18): n is a, c, g, or u
uuuccauggcugcuaggnuguacu

SEQ ID NO: 140297 - RNA, 18 nt, Artificial Sequence
  Synthetic
  misc_feature (6)..(6): n is a, c, g, or u
cauaunucuugccuuacu

SEQ ID NO: 140298 - RNA, 19 nt, Artificial Sequence
  Synthetic
  misc_feature (7)..(7): n is a, c, g, or u
ucauaunucuugccuuacu

SEQ ID NO: 140299 - RNA, 20 nt, Artificial Sequence
  Synthetic
  misc_feature (8)..(8): n is a, c, g, or u
uucauaunucuugccuuacu

SEQ ID NO: 140300 - RNA, 21 nt, Artificial Sequence
  Synthetic
  misc_feature (9)..(9): n is a, c, g, or u
uuucauaunucuugccuuacu

SEQ ID NO: 140301 - RNA, 22 nt, Artificial Sequence
  Synthetic
  misc_feature (10)..(10): n is a, c, g, or u
guuucauaunucuugccuuacu

SEQ ID NO: 140302 - RNA, 23 nt, Artificial Sequence
  Synthetic
  misc_feature (11)..(11): n is a, c, g, or u
gguuucauaunucuugccuuacu

SEQ ID NO: 140303 - RNA, 24 nt, Artificial Sequence
  Synthetic
  misc_feature (12)..(12): n is a, c, g, or u
ugguuucauaunucuugccuuacu

SEQ ID NO: 140304 - RNA, 18 nt, Artificial Sequence
  Synthetic
gguuggucaucaaaaccu

SEQ ID NO: 140305 - RNA, 19 nt, Artificial Sequence
  Synthetic
agguuggucaucaaaaccu

SEQ ID NO: 140306 - RNA, 20 nt, Artificial Sequence
  Synthetic
gagguuggucaucaaaaccu

SEQ ID NO: 140307 - RNA, 21 nt, Artificial Sequence
  Synthetic
ggagguuggucaucaaaaccu

SEQ ID NO: 140308 - RNA, 22 nt, Artificial Sequence
  Synthetic
gggagguuggucaucaaaaccu

SEQ ID NO: 140309 - RNA, 23 nt, Artificial Sequence
  Synthetic
ugggagguuggucaucaaaaccu

SEQ ID NO: 140310 - RNA, 24 nt, Artificial Sequence
  Synthetic
augggagguuggucaucaaaaccu

SEQ ID NO: 140311 - RNA, 18 nt, Artificial Sequence
  Synthetic
acucccaucucuccaccu

SEQ ID NO: 140312 - RNA, 19 nt, Artificial Sequence
  Synthetic
uacucccaucucuccaccu

SEQ ID NO: 140313 - RNA, 20 nt, Artificial Sequence
  Synthetic
cuacucccaucucuccaccu

SEQ ID NO: 140314 - RNA, 21 nt, Artificial Sequence
  Synthetic
ccuacucccaucucuccaccu

SEQ ID NO: 140315 - RNA, 22 nt, Artificial Sequence
  Synthetic
gccuacucccaucucuccaccu

SEQ ID NO: 140316 - RNA, 23 nt, Artificial Sequence
  Synthetic
agccuacucccaucucuccaccu

SEQ ID NO: 140317 - RNA, 24 nt, Artificial Sequence
  Synthetic
cagccuacucccaucucuccaccu

SEQ ID NO: 140318 - RNA, 18 nt, Artificial Sequence
  Synthetic
aaugucaacgaccgaccu

SEQ ID NO: 140319 - RNA, 19 nt, Artificial Sequence
  Synthetic
caaugucaacgaccgaccu

SEQ ID NO: 140320 - RNA, 20 nt, Artificial Sequence
  Synthetic
gcaaugucaacgaccgaccu

SEQ ID NO: 140321 - RNA, 18 nt, Artificial Sequence
  Synthetic
ggcuuucgcaaaauaccu

SEQ ID NO: 140322 - RNA, 19 nt, Artificial Sequence
  Synthetic
gggcuuucgcaaaauaccu

SEQ ID NO: 140323 - RNA, 20 nt, Artificial Sequence
  Synthetic
ugggcuuucgcaaaauaccu

SEQ ID NO: 140324 - RNA, 21 nt, Artificial Sequence
  Synthetic
  misc_feature (1)..(1): n is a, c, g, or u
nugggcuuucgcaaaauaccu

SEQ ID NO: 140325 - RNA, 22 nt, Artificial Sequence
  Synthetic
  misc_feature (2)..(2): n is a, c, g, or u
cnugggcuuucgcaaaauaccu

SEQ ID NO: 140326 - RNA, 23 nt, Artificial Sequence
  Synthetic
  misc_feature (3)..(3): n is a, c, g, or u
ucnugggcuuucgcaaaauaccu

SEQ ID NO: 140327 - RNA, 24 nt, Artificial Sequence
  Synthetic
  misc_feature (1)..(1): n is a, c, g, or u
  misc_feature (4)..(4): n is a, c, g, or u
nucnugggcuuucgcaaaauaccu

SEQ ID NO: 140328 - RNA, 18 nt, Artificial Sequence
  Synthetic
gguauacauuuaaacccu

SEQ ID NO: 140329 - RNA, 19 nt, Artificial Sequence
  Synthetic
ggguauacauuuaaacccu

SEQ ID NO: 140330 - RNA, 20 nt, Artificial Sequence
  Synthetic
uggguauacauuuaaacccu

SEQ ID NO: 140331 - RNA, 21 nt, Artificial Sequence
  Synthetic
  misc_feature (1)..(1): n is a, c, g, or u
nuggguauacauuuaaacccu

SEQ ID NO: 140332 - RNA, 22 nt, Artificial Sequence
  Synthetic
  misc_feature (2)..(2): n is a, c, g, or u
unuggguauacauuuaaacccu

SEQ ID NO: 140333 - RNA, 23 nt, Artificial Sequence
  Synthetic
  misc_feature (3)..(3): n is a, c, g, or u
cunuggguauacauuuaaacccu

SEQ ID NO: 140334 - RNA, 24 nt, Artificial Sequence
  Synthetic
  misc_feature (4)..(4): n is a, c, g, or u
ucunuggguauacauuuaaacccu

SEQ ID NO: 140335 - RNA, 18 nt, Artificial Sequence
  Synthetic
ggcauggacauugacccu

SEQ ID NO: 140336 - RNA, 19 nt, Artificial Sequence
  Synthetic
gggcauggacauugacccu

SEQ ID NO: 140337 - RNA, 20 nt, Artificial Sequence
  Synthetic
ggggcauggacauugacccu

SEQ ID NO: 140338 - RNA, 21 nt, Artificial Sequence
  Synthetic
uggggcauggacauugacccu

SEQ ID NO: 140339 - RNA, 22 nt, Artificial Sequence
  Synthetic
uuggggcauggacauugacccu

SEQ ID NO: 140340 - RNA, 23 nt, Artificial Sequence
  Synthetic
uuuggggcauggacauugacccu

SEQ ID NO: 140341 - RNA, 24 nt, Artificial Sequence
  Synthetic
cuuuggggcauggacauugacccu

SEQ ID NO: 140342 - RNA, 18 nt, Artificial Sequence
  Synthetic
aucccgcggacgaccccu

SEQ ID NO: 140343 - RNA, 19 nt, Artificial Sequence
  Synthetic
aaucccgcggacgaccccu

SEQ ID NO: 140344 - RNA, 20 nt, Artificial Sequence
  Synthetic
gaaucccgcggacgaccccu

SEQ ID NO: 140345 - RNA, 18 nt, Artificial Sequence
  Synthetic
gaccgaggcagguccccu

SEQ ID NO: 140346 - RNA, 19 nt, Artificial Sequence
  Synthetic
  misc_feature (1)..(1): n is a, c, g, or u
ngaccgaggcagguccccu

SEQ ID NO: 140347 - RNA, 20 nt, Artificial Sequence
  Synthetic
  misc_feature (2)..(2): n is a, c, g, or u
gngaccgaggcagguccccu

SEQ ID NO: 140348 - RNA, 21 nt, Artificial Sequence
  Synthetic
  misc_feature (3)..(3): n is a, c, g, or u
cgngaccgaggcagguccccu

SEQ ID NO: 140349 - RNA, 22 nt, Artificial Sequence
  Synthetic
  misc_feature (4)..(4): n is a, c, g, or u
acgngaccgaggcagguccccu

SEQ ID NO: 140350 - RNA, 23 nt, Artificial Sequence
  Synthetic
  misc_feature (5)..(5): n is a, c, g, or u
gacgngaccgaggcagguccccu

SEQ ID NO: 140351 - RNA, 24 nt, Artificial Sequence
  Synthetic
  misc_feature (6)..(6): n is a, c, g, or u
cgacgngaccgaggcagguccccu

SEQ ID NO: 140352 - RNA, 18 nt, Artificial Sequence
  Synthetic
  misc_feature (9)..(9): n is a, c, g, or u
gucccacunuucaagccu

SEQ ID NO: 140353 - RNA, 19 nt, Artificial Sequence
  Synthetic
  misc_feature (10)..(10): n is a, c, g, or u
ugucccacunuucaagccu

SEQ ID NO: 140354 - RNA, 20 nt, Artificial Sequence
  Synthetic
  misc_feature (11)..(11): n is a, c, g, or u
augucccacunuucaagccu

SEQ ID NO: 140355 - RNA, 21 nt, Artificial Sequence
  Synthetic
  misc_feature (12)..(12): n is a, c, g, or u
caugucccacunuucaagccu

SEQ ID NO: 140356 - RNA, 22 nt, Artificial Sequence
  Synthetic
  misc_feature (1)..(1): n is a, c, g, or u
  misc_feature (13)..(13): n is a, c, g, or u
ncaugucccacunuucaagccu

SEQ ID NO: 140357 - RNA, 23 nt, Artificial Sequence
  Synthetic
  misc_feature (2)..(2): n is a, c, g, or u
  misc_feature (14)..(14): n is a, c, g, or u
uncaugucccacunuucaagccu

SEQ ID NO: 140358 - RNA, 24 nt, Artificial Sequence
  Synthetic
  misc_feature (3)..(3): n is a, c, g, or u
  misc_feature (15)..(15): n is a, c, g, or u
guncaugucccacunuucaagccu

SEQ ID NO: 140359 - RNA, 18 nt, Artificial Sequence
  Synthetic
uucgcacuccuccagccu

SEQ ID NO: 140360 - RNA, 19 nt, Artificial Sequence
  Synthetic
auucgcacuccuccagccu

SEQ ID NO: 140361 - RNA, 20 nt, Artificial Sequence
  Synthetic
gauucgcacuccuccagccu

SEQ ID NO: 140362 - RNA, 21 nt, Artificial Sequence
  Synthetic
ggauucgcacuccuccagccu

SEQ ID NO: 140363 - RNA, 22 nt, Artificial Sequence
  Synthetic
uggauucgcacuccuccagccu

SEQ ID NO: 140364 - RNA, 23 nt, Artificial Sequence
  Synthetic
guggauucgcacuccuccagccu

SEQ ID NO: 140365 - RNA, 24 nt, Artificial Sequence
  Synthetic
uguggauucgcacuccuccagccu

SEQ ID NO: 140366 - RNA, 18 nt, Artificial Sequence
  Synthetic
agaagaacucccucgccu

SEQ ID NO: 140367 - RNA, 19 nt, Artificial Sequence
  Synthetic
aagaagaacucccucgccu

SEQ ID NO: 140368 - RNA, 20 nt, Artificial Sequence
  Synthetic
gaagaagaacucccucgccu

SEQ ID NO: 140369 - RNA, 21 nt, Artificial Sequence
  Synthetic
agaagaagaacucccucgccu

SEQ ID NO: 140370 - RNA, 22 nt, Artificial Sequence
  Synthetic
uagaagaagaacucccucgccu

SEQ ID NO: 140371 - RNA, 23 nt, Artificial Sequence
  Synthetic
cuagaagaagaacucccucgccu

SEQ ID NO: 140372 - RNA, 24 nt, Artificial Sequence
  Synthetic
ccuagaagaagaacucccucgccu

SEQ ID NO: 140373 - RNA, 18 nt, Artificial Sequence
  Synthetic
  misc_feature (3)..(3): n is a, c, g, or u
uunaaauuaauuaugccu

SEQ ID NO: 140374 - RNA, 19 nt, Artificial Sequence
  Synthetic
  misc_feature (4)..(4): n is a, c, g, or u
auunaaauuaauuaugccu

SEQ ID NO: 140375 - RNA, 20 nt, Artificial Sequence
  Synthetic
  misc_feature (5)..(5): n is a, c, g, or u
gauunaaauuaauuaugccu

SEQ ID NO: 140376 - RNA, 21 nt, Artificial Sequence
  Synthetic
  misc_feature (6)..(6): n is a, c, g, or u
agauunaaauuaauuaugccu

SEQ ID NO: 140377 - RNA, 22 nt, Artificial Sequence
  Synthetic
  misc_feature (7)..(7): n is a, c, g, or u
aagauunaaauuaauuaugccu

SEQ ID NO: 140378 - RNA, 23 nt, Artificial Sequence
  Synthetic
  misc_feature (8)..(8): n is a, c, g, or u
gaagauunaaauuaauuaugccu

SEQ ID NO: 140379 - RNA, 24 nt, Artificial Sequence
  Synthetic
  misc_feature (9)..(9): n is a, c, g, or u
agaagauunaaauuaauuaugccu

SEQ ID NO: 140380 - RNA, 18 nt, Artificial Sequence
  Synthetic
  misc_feature (9)..(9): n is a, c, g, or u
uuacucucnuuuuugccu

SEQ ID NO: 140381 - RNA, 19 nt, Artificial Sequence
  Synthetic
  misc_feature (10)..(10): n is a, c, g, or u
guuacucucnuuuuugccu

SEQ ID NO: 140382 - RNA, 20 nt, Artificial Sequence
  Synthetic
  misc_feature (11)..(11): n is a, c, g, or u
aguuacucucnuuuuugccu

SEQ ID NO: 140383 - RNA, 21 nt, Artificial Sequence
  Synthetic
  misc_feature (12)..(12): n is a, c, g, or u
gaguuacucucnuuuuugccu

SEQ ID NO: 140384 - RNA, 22 nt, Artificial Sequence
  Synthetic
  misc_feature (13)..(13): n is a, c, g, or u
ggaguuacucucnuuuuugccu

SEQ ID NO: 140385 - RNA, 23 nt, Artificial Sequence
  Synthetic
  misc_feature (14)..(14): n is a, c, g, or u
uggaguuacucucnuuuuugccu

SEQ ID NO: 140386 - RNA, 24 nt, Artificial Sequence
  Synthetic
  misc_feature (15)..(15): n is a, c, g, or u
guggaguuacucucnuuuuugccu

SEQ ID NO: 140387 - RNA, 18 nt, Artificial Sequence
  Synthetic
  misc_feature (15)..(15): n is a, c, g, or u
cuuucuguucccaanccu

SEQ ID NO: 140388 - RNA, 19 nt, Artificial Sequence
  Synthetic
  misc_feature (16)..(16): n is a, c, g, or u
ucuuucuguucccaanccu

SEQ ID NO: 140389 - RNA, 20 nt, Artificial Sequence
  Synthetic
  misc_feature (17)..(17): n is a, c, g, or u
aucuuucuguucccaanccu

SEQ ID NO: 140390 - RNA, 21 nt, Artificial Sequence
  Synthetic
  misc_feature (18)..(18): n is a, c, g, or u
aaucuuucuguucccaanccu

SEQ ID NO: 140391 - RNA, 22 nt, Artificial Sequence
  Synthetic
  misc_feature (19)..(19): n is a, c, g, or u
gaaucuuucuguucccaanccu

SEQ ID NO: 140392 - RNA, 23 nt, Artificial Sequence
  Synthetic
  misc_feature (20)..(20): n is a, c, g, or u
cgaaucuuucuguucccaanccu

SEQ ID NO: 140393 - RNA, 24 nt, Artificial Sequence
  Synthetic
  misc_feature (21)..(21): n is a, c, g, or u
acgaaucuuucuguucccaanccu

SEQ ID NO: 140394 - RNA, 18 nt, Artificial Sequence
  Synthetic
uguuuuagaaaacuuccu

SEQ ID NO: 140395 - RNA, 19 nt, Artificial Sequence
  Synthetic
cuguuuuagaaaacuuccu

SEQ ID NO: 140396 - RNA, 20 nt, Artificial Sequence
  Synthetic
acuguuuuagaaaacuuccu

SEQ ID NO: 140397 - RNA, 21 nt, Artificial Sequence
  Synthetic
cacuguuuuagaaaacuuccu

SEQ ID NO: 140398 - RNA, 22 nt, Artificial Sequence
  Synthetic
acacuguuuuagaaaacuuccu

SEQ ID NO: 140399 - RNA, 23 nt, Artificial Sequence
  Synthetic
aacacuguuuuagaaaacuuccu

SEQ ID NO: 140400 - RNA, 24 nt, Artificial Sequence
  Synthetic
aaacacuguuuuagaaaacuuccu

SEQ ID NO: 140401 - RNA, 18 nt, Artificial Sequence
  Synthetic
  misc_feature (8)..(8): n is a, c, g, or u
accccucncggggccgcu

SEQ ID NO: 140402 - RNA, 19 nt, Artificial Sequence
  Synthetic
  misc_feature (9)..(9): n is a, c, g, or u
gaccccucncggggccgcu

SEQ ID NO: 140403 - RNA, 20 nt, Artificial Sequence
  Synthetic
  misc_feature (10)..(10): n is a, c, g, or u
cgaccccucncggggccgcu

SEQ ID NO: 140404 - RNA, 21 nt, Artificial Sequence
  Synthetic
  misc_feature (11)..(11): n is a, c, g, or u
acgaccccucncggggccgcu

SEQ ID NO: 140405 - RNA, 22 nt, Artificial Sequence
  Synthetic
  misc_feature (12)..(12): n is a, c, g, or u
gacgaccccucncggggccgcu

SEQ ID NO: 140406 - RNA, 23 nt, Artificial Sequence
  Synthetic
  misc_feature (13)..(13): n is a, c, g, or u
ggacgaccccucncggggccgcu

SEQ ID NO: 140407 - RNA, 24 nt, Artificial Sequence
  Synthetic
  misc_feature (14)..(14): n is a, c, g, or u
cggacgaccccucncggggccgcu

SEQ ID NO: 140408 - RNA, 18 nt, Artificial Sequence
  Synthetic
ggguggagcccucaggcu

SEQ ID NO: 140409 - RNA, 19 nt, Artificial Sequence
  Synthetic
gggguggagcccucaggcu

SEQ ID NO: 140410 - RNA, 20 nt, Artificial Sequence
  Synthetic
ugggguggagcccucaggcu

SEQ ID NO: 140411 - RNA, 21 nt, Artificial Sequence
  Synthetic
uugggguggagcccucaggcu

SEQ ID NO: 140412 - RNA, 22 nt, Artificial Sequence
  Synthetic
uuugggguggagcccucaggcu

SEQ ID NO: 140413 - RNA, 23 nt, Artificial Sequence
  Synthetic
uuuugggguggagcccucaggcu

SEQ ID NO: 140414 - RNA, 24 nt, Artificial Sequence
  Synthetic
  misc_feature (1)..(1): n is a, c, g, or u
nuuuugggguggagcccucaggcu

SEQ ID NO: 140415 - RNA, 18 nt, Artificial Sequence
  Synthetic
ucuuuguauuaggaggcu

SEQ ID NO: 140416 - RNA, 19 nt, Artificial Sequence
  Synthetic
  misc_feature (1)..(1): n is a, c, g, or u
nucuuuguauuaggaggcu

SEQ ID NO: 140417 - RNA, 20 nt, Artificial Sequence
  Synthetic
  misc_feature (2)..(2): n is a, c, g, or u
gnucuuuguauuaggaggcu

SEQ ID NO: 140418 - RNA, 21 nt, Artificial Sequence
  Synthetic
  misc_feature (1)..(1): n is a, c, g, or u
  misc_feature (3)..(3): n is a, c, g, or u
ngnucuuuguauuaggaggcu

SEQ ID NO: 140419 - RNA, 22 nt, Artificial Sequence
  Synthetic
  misc_feature (2)..(2): n is a, c, g, or u
  misc_feature (4)..(4): n is a, c, g, or u
angnucuuuguauuaggaggcu

SEQ ID NO: 140420 - RNA, 23 nt, Artificial Sequence
  Synthetic
  misc_feature (3)..(3): n is a, c, g, or u
  misc_feature (5)..(5): n is a, c, g, or u
aangnucuuuguauuaggaggcu

SEQ ID NO: 140421 - RNA, 24 nt, Artificial Sequence
  Synthetic
  misc_feature (4)..(4): n is a, c, g, or u
  misc_feature (6)..(6): n is a, c, g, or u
uaangnucuuuguauuaggaggcu

SEQ ID NO: 140422 - RNA, 18 nt, Artificial Sequence
  Synthetic
  misc_feature (7)..(7): n is a, c, g, or u
uacaucnuuuccauggcu

SEQ ID NO: 140423 - RNA, 19 nt, Artificial Sequence
  Synthetic
  misc_feature (8)..(8): n is a, c, g, or u
auacaucnuuuccauggcu

SEQ ID NO: 140424 - RNA, 20 nt, Artificial Sequence
  Synthetic
  misc_feature (9)..(9): n is a, c, g, or u
uauacaucnuuuccauggcu

SEQ ID NO: 140425 - RNA, 21 nt, Artificial Sequence
  Synthetic
  misc_feature (10)..(10): n is a, c, g, or u
auauacaucnuuuccauggcu

SEQ ID NO: 140426 - RNA, 22 nt, Artificial Sequence
  Synthetic
  misc_feature (11)..(11): n is a, c, g, or u
aauauacaucnuuuccauggcu

SEQ ID NO: 140427 - RNA, 23 nt, Artificial Sequence
  Synthetic
  misc_feature (12)..(12): n is a, c, g, or u
aaauauacaucnuuuccauggcu

SEQ ID NO: 140428 - RNA, 24 nt, Artificial Sequence
  Synthetic
  misc_feature (13)..(13): n is a, c, g, or u
gaaauauacaucnuuuccauggcu

SEQ ID NO: 140429 - RNA, 18 nt, Artificial Sequence
  Synthetic
  misc_feature (13)..(13): n is a, c, g, or u
gcugugccuuggnuggcu

SEQ ID NO: 140430 - RNA, 19 nt, Artificial Sequence
  Synthetic
  misc_feature (14)..(14): n is a, c, g, or u
agcugugccuuggnuggcu

SEQ ID NO: 140431 - RNA, 20 nt, Artificial Sequence
  Synthetic
  misc_feature (15)..(15): n is a, c, g, or u
aagcugugccuuggnuggcu

SEQ ID NO: 140432 - RNA, 21 nt, Artificial Sequence
  Synthetic
  misc_feature (16)..(16): n is a, c, g, or u
caagcugugccuuggnuggcu

SEQ ID NO: 140433 - RNA, 22 nt, Artificial Sequence
  Synthetic
  misc_feature (17)..(17): n is a, c, g, or u
ccaagcugugccuuggnuggcu

SEQ ID NO: 140434 - RNA, 23 nt, Artificial Sequence
  Synthetic
  misc_feature (18)..(18): n is a, c, g, or u
uccaagcugugccuuggnuggcu

SEQ ID NO: 140435 - RNA, 24 nt, Artificial Sequence
  Synthetic
  misc_feature (19)..(19): n is a, c, g, or u
cuccaagcugugccuuggnuggcu

SEQ ID NO: 140436 - RNA, 18 nt, Artificial Sequence
  Synthetic
uucccccacuguuuggcu

SEQ ID NO: 140437 - RNA, 19 nt, Artificial Sequence
  Synthetic
uuucccccacuguuuggcu

SEQ ID NO: 140438 - RNA, 20 nt, Artificial Sequence
  Synthetic
cuuucccccacuguuuggcu

SEQ ID NO: 140439 - RNA, 21 nt, Artificial Sequence
  Synthetic
gcuuucccccacuguuuggcu

SEQ ID NO: 140440 - RNA, 22 nt, Artificial Sequence
  Synthetic
ggcuuucccccacuguuuggcu

SEQ ID NO: 140441 - RNA, 23 nt, Artificial Sequence
  Synthetic
gggcuuucccccacuguuuggcu

SEQ ID NO: 140442 - RNA, 24 nt, Artificial Sequence
  Synthetic
agggcuuucccccacuguuuggcu

SEQ ID NO: 140443 - RNA, 18 nt, Artificial Sequence
  Synthetic
accugcacgacuccugcu

SEQ ID NO: 140444 - RNA, 19 nt, Artificial Sequence
  Synthetic
aaccugcacgacuccugcu

SEQ ID NO: 140445 - RNA, 20 nt, Artificial Sequence
  Synthetic
aaaccugcacgacuccugcu

SEQ ID NO: 140446 - RNA, 21 nt, Artificial Sequence
  Synthetic
aaaaccugcacgacuccugcu

SEQ ID NO: 140447 - RNA, 22 nt, Artificial Sequence
  Synthetic
caaaaccugcacgacuccugcu

SEQ ID NO: 140448 - RNA, 23 nt, Artificial Sequence
  Synthetic
gcaaaaccugcacgacuccugcu

SEQ ID NO: 140449 - RNA, 24 nt, Artificial Sequence
  Synthetic
ugcaaaaccugcacgacuccugcu

SEQ ID NO: 140450 - RNA, 18 nt, Artificial Sequence
  Synthetic
  misc_feature (3)..(3): n is a, c, g, or u
ggncuguauuuuccugcu

SEQ ID NO: 140451 - RNA, 19 nt, Artificial Sequence
  Synthetic
  misc_feature (4)..(4): n is a, c, g, or u
gggncuguauuuuccugcu

SEQ ID NO: 140452 - RNA, 20 nt, Artificial Sequence
  Synthetic
  misc_feature (5)..(5): n is a, c, g, or u
ggggncuguauuuuccugcu

SEQ ID NO: 140453 - RNA, 21 nt, Artificial Sequence
  Synthetic
  misc_feature (6)..(6): n is a, c, g, or u
aggggncuguauuuuccugcu

SEQ ID NO: 140454 - RNA, 22 nt, Artificial Sequence
  Synthetic
  misc_feature (7)..(7): n is a, c, g, or u
caggggncuguauuuuccugcu

SEQ ID NO: 140455 - RNA, 23 nt, Artificial Sequence
  Synthetic
  misc_feature (8)..(8): n is a, c, g, or u
ucaggggncuguauuuuccugcu

SEQ ID NO: 140456 - RNA, 24 nt, Artificial Sequence
  Synthetic
  misc_feature (9)..(9): n is a, c, g, or u
gucaggggncuguauuuuccugcu

SEQ ID NO: 140457 - RNA, 18 nt, Artificial Sequence
  Synthetic
ggcaagccauucucugcu

SEQ ID NO: 140458 - RNA, 19 nt, Artificial Sequence
  Synthetic
aggcaagccauucucugcu

SEQ ID NO: 140459 - RNA, 20 nt, Artificial Sequence
  Synthetic
caggcaagccauucucugcu

SEQ ID NO: 140460 - RNA, 21 nt, Artificial Sequence
  Synthetic
ucaggcaagccauucucugcu

SEQ ID NO: 140461 - RNA, 22 nt, Artificial Sequence
  Synthetic
cucaggcaagccauucucugcu

SEQ ID NO: 140462 - RNA, 23 nt, Artificial Sequence
  Synthetic
acucaggcaagccauucucugcu

SEQ ID NO: 140463 - RNA, 24 nt, Artificial Sequence
  Synthetic
cacucaggcaagccauucucugcu

SEQ ID NO: 140464 - RNA, 18 nt, Artificial Sequence
  Synthetic
cuagccgcuuguuuugcu

SEQ ID NO: 140465 - RNA, 19 nt, Artificial Sequence
  Synthetic
ccuagccgcuuguuuugcu

SEQ ID NO: 140466 - RNA, 20 nt, Artificial Sequence
  Synthetic
uccuagccgcuuguuuugcu

SEQ ID NO: 140467 - RNA, 21 nt, Artificial Sequence
  Synthetic
cuccuagccgcuuguuuugcu

SEQ ID NO: 140468 - RNA, 22 nt, Artificial Sequence
  Synthetic
acuccuagccgcuuguuuugcu

SEQ ID NO: 140469 - RNA, 23 nt, Artificial Sequence
  Synthetic
aacuccuagccgcuuguuuugcu

SEQ ID NO: 140470 - RNA, 24 nt, Artificial Sequence
  Synthetic
gaacuccuagccgcuuguuuugcu

SEQ ID NO: 140471 - RNA, 18 nt, Artificial Sequence
  Synthetic
cgcagaagaucucaaucu

SEQ ID NO: 140472 - RNA, 19 nt, Artificial Sequence
  Synthetic
ucgcagaagaucucaaucu

SEQ ID NO: 140473 - RNA, 20 nt, Artificial Sequence
  Synthetic
gucgcagaagaucucaaucu

SEQ ID NO: 140474 - RNA, 18 nt, Artificial Sequence
  Synthetic
acauuauuuacauacucu

SEQ ID NO: 140475 - RNA, 19 nt, Artificial Sequence
  Synthetic
gacauuauuuacauacucu

SEQ ID NO: 140476 - RNA, 20 nt, Artificial Sequence
  Synthetic
  misc_feature (1)..(1): n is a, c, g, or u
ngacauuauuuacauacucu

SEQ ID NO: 140477 - RNA, 21 nt, Artificial Sequence
  Synthetic
  misc_feature (2)..(2): n is a, c, g, or u
cngacauuauuuacauacucu

SEQ ID NO: 140478 - RNA, 22 nt, Artificial Sequence
  Synthetic
  misc_feature (3)..(3): n is a, c, g, or u
ccngacauuauuuacauacucu

SEQ ID NO: 140479 - RNA, 23 nt, Artificial Sequence
  Synthetic
  misc_feature (4)..(4): n is a, c, g, or u
accngacauuauuuacauacucu

SEQ ID NO: 140480 - RNA, 24 nt, Artificial Sequence
  Synthetic
  misc_feature (1)..(1): n is a, c, g, or u
  misc_feature (5)..(5): n is a, c, g, or u
naccngacauuauuuacauacucu

SEQ ID NO: 140481 - RNA, 18 nt, Artificial Sequence
  Synthetic
ucccaucucuccaccucu

SEQ ID NO: 140482 - RNA, 19 nt, Artificial Sequence
  Synthetic
cucccaucucuccaccucu

SEQ ID NO: 140483 - RNA, 20 nt, Artificial Sequence
  Synthetic
acucccaucucuccaccucu

SEQ ID NO: 140484 - RNA, 21 nt, Artificial Sequence
  Synthetic
uacucccaucucuccaccucu

SEQ ID NO: 140485 - RNA, 22 nt, Artificial Sequence
  Synthetic
cuacucccaucucuccaccucu

SEQ ID NO: 140486 - RNA, 23 nt, Artificial Sequence
  Synthetic
ccuacucccaucucuccaccucu

SEQ ID NO: 140487 - RNA, 24 nt, Artificial Sequence
  Synthetic
gccuacucccaucucuccaccucu

SEQ ID NO: 140488 - RNA, 18 nt, Artificial Sequence
  Synthetic
  misc_feature (6)..(6): n is a, c, g, or u
cuuganuauuuggucucu

SEQ ID NO: 140489 - RNA, 19 nt, Artificial Sequence
  Synthetic
  misc_feature (1)..(1): n is a, c, g, or u
  misc_feature (7)..(7): n is a, c, g, or u
ncuuganuauuuggucucu

SEQ ID NO: 140490 - RNA, 20 nt, Artificial Sequence
  Synthetic
  misc_feature (2)..(2): n is a, c, g, or u
  misc_feature (8)..(8): n is a, c, g, or u
uncuuganuauuuggucucu

SEQ ID NO: 140491 - RNA, 21 nt, Artificial Sequence
  Synthetic
  misc_feature (3)..(3): n is a, c, g, or u
  misc_feature (9)..(9): n is a, c, g, or u
guncuuganuauuuggucucu

SEQ ID NO: 140492 - RNA, 22 nt, Artificial Sequence
  Synthetic
  misc_feature (4)..(4): n is a, c, g, or u
  misc_feature (10)..(10): n is a, c, g, or u
uguncuuganuauuuggucucu

SEQ ID NO: 140493 - RNA, 23 nt, Artificial Sequence
  Synthetic
  misc_feature (5)..(5): n is a, c, g, or u
  misc_feature (11)..(11): n is a, c, g, or u
cuguncuuganuauuuggucucu

SEQ ID NO: 140494 - RNA, 24 nt, Artificial Sequence
  Synthetic
  misc_feature (6)..(6): n is a, c, g, or u
  misc_feature (12)..(12): n is a, c, g, or u
acuguncuuganuauuuggucucu

SEQ ID NO: 140495 - RNA, 18 nt, Artificial Sequence
  Synthetic
ucaggcaagccauucucu

SEQ ID NO: 140496 - RNA, 19 nt, Artificial Sequence
  Synthetic
cucaggcaagccauucucu

SEQ ID NO: 140497 - RNA, 20 nt, Artificial Sequence
  Synthetic
acucaggcaagccauucucu

SEQ ID NO: 140498 - RNA, 21 nt, Artificial Sequence
  Synthetic
cacucaggcaagccauucucu

SEQ ID NO: 140499 - RNA, 22 nt, Artificial Sequence
  Synthetic
gcacucaggcaagccauucucu

SEQ ID NO: 140500 - RNA, 23 nt, Artificial Sequence
  Synthetic
  misc_feature (1)..(1): n is a, c, g, or u
ngcacucaggcaagccauucucu

SEQ ID NO: 140501 - RNA, 24 nt, Artificial Sequence
  Synthetic
  misc_feature (2)..(2): n is a, c, g, or u
cngcacucaggcaagccauucucu

SEQ ID NO: 140502 - RNA, 18 nt, Artificial Sequence
  Synthetic
  misc_feature (3)..(3): n is a, c, g, or u
cgngaagccuuagagucu

SEQ ID NO: 140503 - RNA, 19 nt, Artificial Sequence
  Synthetic
  misc_feature (4)..(4): n is a, c, g, or u
ucgngaagccuuagagucu

SEQ ID NO: 140504 - RNA, 20 nt, Artificial Sequence
  Synthetic
  misc_feature (5)..(5): n is a, c, g, or u
aucgngaagccuuagagucu

SEQ ID NO: 140505 - RNA, 21 nt, Artificial Sequence
  Synthetic
  misc_feature (6)..(6): n is a, c, g, or u
uaucgngaagccuuagagucu

SEQ ID NO: 140506 - RNA, 22 nt, Artificial Sequence
  Synthetic
  misc_feature (7)..(7): n is a, c, g, or u
guaucgngaagccuuagagucu

SEQ ID NO: 140507 - RNA, 23 nt, Artificial Sequence
  Synthetic
  misc_feature (8)..(8): n is a, c, g, or u
uguaucgngaagccuuagagucu

SEQ ID NO: 140508 - RNA, 24 nt, Artificial Sequence
  Synthetic
  misc_feature (9)..(9): n is a, c, g, or u
cuguaucgngaagccuuagagucu

SEQ ID NO: 140509 - RNA, 18 nt, Artificial Sequence
  Synthetic
  misc_feature (7)..(7): n is a, c, g, or u
ucaaagnauugugggucu

SEQ ID NO: 140510 - RNA, 19 nt, Artificial Sequence
  Synthetic
  misc_feature (8)..(8): n is a, c, g, or u
gucaaagnauugugggucu

SEQ ID NO: 140511 - RNA, 20 nt, Artificial Sequence
  Synthetic
  misc_feature (9)..(9): n is a, c, g, or u
ugucaaagnauugugggucu

SEQ ID NO: 140512 - RNA, 21 nt, Artificial Sequence
  Synthetic
  misc_feature (10)..(10): n is a, c, g, or u
augucaaagnauugugggucu

SEQ ID NO: 140513 - RNA, 22 nt, Artificial Sequence
  Synthetic
  misc_feature (11)..(11): n is a, c, g, or u
uaugucaaagnauugugggucu

SEQ ID NO: 140514 - RNA, 23 nt, Artificial Sequence
  Synthetic
  misc_feature (12)..(12): n is a, c, g, or u
guaugucaaagnauugugggucu

SEQ ID NO: 140515 - RNA, 24 nt, Artificial Sequence
  Synthetic
  misc_feature (13)..(13): n is a, c, g, or u
aguaugucaaagnauugugggucu

SEQ ID NO: 140516 - RNA, 18 nt, Artificial Sequence
  Synthetic
ugcgggucaccauauucu

SEQ ID NO: 140517 - RNA, 19 nt, Artificial Sequence
  Synthetic
uugcgggucaccauauucu

SEQ ID NO: 140518 - RNA, 20 nt, Artificial Sequence
  Synthetic
uuugcgggucaccauauucu

SEQ ID NO: 140519 - RNA, 21 nt, Artificial Sequence
  Synthetic
uuuugcgggucaccauauucu

SEQ ID NO: 140520 - RNA, 22 nt, Artificial Sequence
  Synthetic
auuuugcgggucaccauauucu

SEQ ID NO: 140521 - RNA, 23 nt, Artificial Sequence
  Synthetic
cauuuugcgggucaccauauucu

SEQ ID NO: 140522 - RNA, 24 nt, Artificial Sequence
  Synthetic
ucauuuugcgggucaccauauucu

SEQ ID NO: 140523 - RNA, 18 nt, Artificial Sequence
  Synthetic
caucuucuuauugguucu

SEQ ID NO: 140524 - RNA, 19 nt, Artificial Sequence
  Synthetic
ucaucuucuuauugguucu

SEQ ID NO: 140525 - RNA, 20 nt, Artificial Sequence
  Synthetic
cucaucuucuuauugguucu

SEQ ID NO: 140526 - RNA, 21 nt, Artificial Sequence
  Synthetic
ccucaucuucuuauugguucu

SEQ ID NO: 140527 - RNA, 22 nt, Artificial Sequence
  Synthetic
gccucaucuucuuauugguucu

SEQ ID NO: 140528 - RNA, 23 nt, Artificial Sequence
  Synthetic
ugccucaucuucuuauugguucu

SEQ ID NO: 140529 - RNA, 24 nt, Artificial Sequence
  Synthetic
augccucaucuucuuauugguucu

SEQ ID NO: 140530 - RNA, 18 nt, Artificial Sequence
  Synthetic
gggccucaguccguuucu

SEQ ID NO: 140531 - RNA, 19 nt, Artificial Sequence
  Synthetic
ugggccucaguccguuucu

SEQ ID NO: 140532 - RNA, 20 nt, Artificial Sequence
  Synthetic
gugggccucaguccguuucu

SEQ ID NO: 140533 - RNA, 21 nt, Artificial Sequence
  Synthetic
agugggccucaguccguuucu

SEQ ID NO: 140534 - RNA, 22 nt, Artificial Sequence
  Synthetic
gagugggccucaguccguuucu

SEQ ID NO: 140535 - RNA, 23 nt, Artificial Sequence
  Synthetic
ggagugggccucaguccguuucu

SEQ ID NO: 140536 - RNA, 24 nt, Artificial Sequence
  Synthetic
gggagugggccucaguccguuucu

SEQ ID NO: 140537 - RNA, 18 nt, Artificial Sequence
  Synthetic
gacuucucucaauuuucu

SEQ ID NO: 140538 - RNA, 19 nt, Artificial Sequence
  Synthetic
ggacuucucucaauuuucu

SEQ ID NO: 140539 - RNA, 20 nt, Artificial Sequence
  Synthetic
uggacuucucucaauuuucu

SEQ ID NO: 140540 - RNA, 21 nt, Artificial Sequence
  Synthetic
guggacuucucucaauuuucu

SEQ ID NO: 140541 - RNA, 22 nt, Artificial Sequence
  Synthetic
gguggacuucucucaauuuucu

SEQ ID NO: 140542 - RNA, 23 nt, Artificial Sequence
  Synthetic
ugguggacuucucucaauuuucu

SEQ ID NO: 140543 - RNA, 24 nt, Artificial Sequence
  Synthetic
gugguggacuucucucaauuuucu

SEQ ID NO: 140544 - RNA, 18 nt, Artificial Sequence
  Synthetic
  misc_feature (3)..(3): n is a, c, g, or u
  misc_feature (6)..(7): n is a, c, g, or u
ggnuannuaauuggaagu

SEQ ID NO: 140545 - RNA, 19 nt, Artificial Sequence
  Synthetic
  misc_feature (4)..(4): n is a, c, g, or u
  misc_feature (7)..(8): n is a, c, g, or u
gggnuannuaauuggaagu

SEQ ID NO: 140546 - RNA, 20 nt, Artificial Sequence
  Synthetic
  misc_feature (5)..(5): n is a, c, g, or u
  misc_feature (8)..(9): n is a, c, g, or u
ugggnuannuaauuggaagu

SEQ ID NO: 140547 - RNA, 21 nt, Artificial Sequence
  Synthetic
  misc_feature (6)..(6): n is a, c, g, or u
  misc_feature (9)..(10): n is a, c, g, or u
augggnuannuaauuggaagu

SEQ ID NO: 140548 - RNA, 22 nt, Artificial Sequence
  Synthetic
  misc_feature (7)..(7): n is a, c, g, or u
  misc_feature (10)..(11): n is a, c, g, or u
caugggnuannuaauuggaagu

SEQ ID NO: 140549 - RNA, 23 nt, Artificial Sequence
  Synthetic
  misc_feature (8)..(8): n is a, c, g, or u
  misc_feature (11)..(12): n is a, c, g, or u
ucaugggnuannuaauuggaagu

SEQ ID NO: 140550 - RNA, 24 nt, Artificial Sequence
  Synthetic
  misc_feature (9)..(9): n is a, c, g, or u
  misc_feature (12)..(13): n is a, c, g, or u
uucaugggnuannuaauuggaagu

SEQ ID NO: 140551 - RNA, 18 nt, Artificial Sequence
  Synthetic
  misc_feature (6)..(6): n is a, c, g, or u
ggaucnacaacaaccagu

SEQ ID NO: 140552 - RNA, 19 nt, Artificial Sequence
  Synthetic
  misc_feature (7)..(7): n is a, c, g, or u
aggaucnacaacaaccagu

SEQ ID NO: 140553 - RNA, 20 nt, Artificial Sequence
  Synthetic
  misc_feature (8)..(8): n is a, c, g, or u
caggaucnacaacaaccagu

SEQ ID NO: 140554 - RNA, 21 nt, Artificial Sequence
  Synthetic
  misc_feature (9)..(9): n is a, c, g, or u
ccaggaucnacaacaaccagu

SEQ ID NO: 140555 - RNA, 22 nt, Artificial Sequence
  Synthetic
  misc_feature (10)..(10): n is a, c, g, or u
uccaggaucnacaacaaccagu

SEQ ID NO: 140556 - RNA, 23 nt, Artificial Sequence
  Synthetic
  misc_feature (11)..(11): n is a, c, g, or u
uuccaggaucnacaacaaccagu

SEQ ID NO: 140557 - RNA, 24 nt, Artificial Sequence
  Synthetic
  misc_feature (12)..(12): n is a, c, g, or u
auuccaggaucnacaacaaccagu

SEQ ID NO: 140558 - RNA, 18 nt, Artificial Sequence
  Synthetic
ccugcugguggcuccagu

SEQ ID NO: 140559 - RNA, 19 nt, Artificial Sequence
  Synthetic
uccugcugguggcuccagu

SEQ ID NO: 140560 - RNA, 20 nt, Artificial Sequence
  Synthetic
uuccugcugguggcuccagu

SEQ ID NO: 140561 - RNA, 21 nt, Artificial Sequence
  Synthetic
uuuccugcugguggcuccagu

SEQ ID NO: 140562 - RNA, 22 nt, Artificial Sequence
  Synthetic
uuuuccugcugguggcuccagu

SEQ ID NO: 140563 - RNA, 23 nt, Artificial Sequence
  Synthetic
auuuuccugcugguggcuccagu

SEQ ID NO: 140564 - RNA, 24 nt, Artificial Sequence
  Synthetic
uauuuuccugcugguggcuccagu

SEQ ID NO: 140565 - RNA, 18 nt, Artificial Sequence
  Synthetic
ccuccaccaaucggcagu

SEQ ID NO: 140566 - RNA, 19 nt, Artificial Sequence
  Synthetic
gccuccaccaaucggcagu

SEQ ID NO: 140567 - RNA, 20 nt, Artificial Sequence
  Synthetic
ugccuccaccaaucggcagu

SEQ ID NO: 140568 - RNA, 21 nt, Artificial Sequence
  Synthetic
cugccuccaccaaucggcagu

SEQ ID NO: 140569 - RNA, 22 nt, Artificial Sequence
  Synthetic
ccugccuccaccaaucggcagu

SEQ ID NO: 140570 - RNA, 23 nt, Artificial Sequence
  Synthetic
uccugccuccaccaaucggcagu

SEQ ID NO: 140571 - RNA, 24 nt, Artificial Sequence
  Synthetic
cuccugccuccaccaaucggcagu

SEQ ID NO: 140572 - RNA, 18 nt, Artificial Sequence
  Synthetic
  misc_feature (7)..(7): n is a, c, g, or u
ucugcangaucccagagu

SEQ ID NO: 140573 - RNA, 19 nt, Artificial Sequence
  Synthetic
  misc_feature (8)..(8): n is a, c, g, or u
cucugcangaucccagagu

SEQ ID NO: 140574 - RNA, 20 nt, Artificial Sequence
  Synthetic
  misc_feature (9)..(9): n is a, c, g, or u
gcucugcangaucccagagu

SEQ ID NO: 140575 - RNA, 21 nt, Artificial Sequence
  Synthetic
  misc_feature (10)..(10): n is a, c, g, or u
agcucugcangaucccagagu

SEQ ID NO: 140576 - RNA, 22 nt, Artificial Sequence
  Synthetic
  misc_feature (11)..(11): n is a, c, g, or u
aagcucugcangaucccagagu

SEQ ID NO: 140577 - RNA, 23 nt, Artificial Sequence
  Synthetic
  misc_feature (12)..(12): n is a, c, g, or u
caagcucugcangaucccagagu

SEQ ID NO: 140578 - RNA, 24 nt, Artificial Sequence
  Synthetic
  misc_feature (13)..(13): n is a, c, g, or u
ccaagcucugcangaucccagagu

SEQ ID NO: 140579 - RNA, 18 nt, Artificial Sequence
  Synthetic
cucacaauaccgcagagu

SEQ ID NO: 140580 - RNA, 19 nt, Artificial Sequence
  Synthetic
ccucacaauaccgcagagu

SEQ ID NO: 140581 - RNA, 20 nt, Artificial Sequence
  Synthetic
uccucacaauaccgcagagu

SEQ ID NO: 140582 - RNA, 21 nt, Artificial Sequence
  Synthetic
auccucacaauaccgcagagu

SEQ ID NO: 140583 - RNA, 22 nt, Artificial Sequence
  Synthetic
aauccucacaauaccgcagagu

SEQ ID NO: 140584 - RNA, 23 nt, Artificial Sequence
  Synthetic
gaauccucacaauaccgcagagu

SEQ ID NO: 140585 - RNA, 24 nt, Artificial Sequence
  Synthetic
agaauccucacaauaccgcagagu

SEQ ID NO: 140586 - RNA, 18 nt, Artificial Sequence
  Synthetic
agccaaccagguaggagu

SEQ ID NO: 140587 - RNA, 19 nt, Artificial Sequence
  Synthetic
  misc_feature (1)..(1): n is a, c, g, or u
nagccaaccagguaggagu

SEQ ID NO: 140588 - RNA, 20 nt, Artificial Sequence
  Synthetic
  misc_feature (1)..(2): n is a, c, g, or u
nnagccaaccagguaggagu

SEQ ID NO: 140589 - RNA, 21 nt, Artificial Sequence
  Synthetic
  misc_feature (2)..(3): n is a, c, g, or u
annagccaaccagguaggagu

SEQ ID NO: 140590 - RNA, 22 nt, Artificial Sequence
  Synthetic
  misc_feature (3)..(4): n is a, c, g, or u
cannagccaaccagguaggagu

SEQ ID NO: 140591 - RNA, 23 nt, Artificial Sequence
  Synthetic
  misc_feature (4)..(5): n is a, c, g, or u
ccannagccaaccagguaggagu

SEQ ID NO: 140592 - RNA, 24 nt, Artificial Sequence
  Synthetic
  misc_feature (5)..(6): n is a, c, g, or u
gccannagccaaccagguaggagu

SEQ ID NO: 140593 - RNA, 18 nt, Artificial Sequence
  Synthetic
agaucucaaucgccgcgu

SEQ ID NO: 140594 - RNA, 19 nt, Artificial Sequence
  Synthetic
  misc_feature (1)..(1): n is a, c, g, or u
nagaucucaaucgccgcgu

SEQ ID NO: 140595 - RNA, 20 nt, Artificial Sequence
  Synthetic
  misc_feature (2)..(2): n is a, c, g, or u
gnagaucucaaucgccgcgu

SEQ ID NO: 140596 - RNA, 18 nt, Artificial Sequence
  Synthetic
cgcagagucuagacucgu

SEQ ID NO: 140597 - RNA, 19 nt, Artificial Sequence
  Synthetic
ccgcagagucuagacucgu

SEQ ID NO: 140598 - RNA, 20 nt, Artificial Sequence
  Synthetic
accgcagagucuagacucgu

SEQ ID NO: 140599 - RNA, 21 nt, Artificial Sequence
  Synthetic
uaccgcagagucuagacucgu

SEQ ID NO: 140600 - RNA, 22 nt, Artificial Sequence
  Synthetic
auaccgcagagucuagacucgu

SEQ ID NO: 140601 - RNA, 23 nt, Artificial Sequence
  Synthetic
aauaccgcagagucuagacucgu

SEQ ID NO: 140602 - RNA, 24 nt, Artificial Sequence
  Synthetic
caauaccgcagagucuagacucgu

SEQ ID NO: 140603 - RNA, 18 nt, Artificial Sequence
  Synthetic
uccuuggacucauaaggu

SEQ ID NO: 140604 - RNA, 19 nt, Artificial Sequence
  Synthetic
uuccuuggacucauaaggu

SEQ ID NO: 140605 - RNA, 20 nt, Artificial Sequence
  Synthetic
auuccuuggacucauaaggu

SEQ ID NO: 140606 - RNA, 21 nt, Artificial Sequence
  Synthetic
uauuccuuggacucauaaggu

SEQ ID NO: 140607 - RNA, 22 nt, Artificial Sequence
  Synthetic
guauuccuuggacucauaaggu

SEQ ID NO: 140608 - RNA, 23 nt, Artificial Sequence
  Synthetic
aguauuccuuggacucauaaggu

SEQ ID NO: 140609 - RNA, 24 nt, Artificial Sequence
  Synthetic
uaguauuccuuggacucauaaggu

SEQ ID NO: 140610 - RNA, 18 nt, Artificial Sequence
  Synthetic
guuuugcucgcagccggu

SEQ ID NO: 140611 - RNA, 19 nt, Artificial Sequence
  Synthetic
uguuuugcucgcagccggu

SEQ ID NO: 140612 - RNA, 20 nt, Artificial Sequence
  Synthetic
uuguuuugcucgcagccggu

SEQ ID NO: 140613 - RNA, 21 nt, Artificial Sequence
  Synthetic
cuuguuuugcucgcagccggu

SEQ ID NO: 140614 - RNA, 22 nt, Artificial Sequence
  Synthetic
gcuuguuuugcucgcagccggu

SEQ ID NO: 140615 - RNA, 23 nt, Artificial Sequence
  Synthetic
cgcuuguuuugcucgcagccggu

SEQ ID NO: 140616 - RNA, 24 nt, Artificial Sequence
  Synthetic
ccgcuuguuuugcucgcagccggu

SEQ ID NO: 140617 - RNA, 18 nt, Artificial Sequence
  Synthetic
  misc_feature (1)..(1): n is a, c, g, or u
nuauauggaugauguggu

SEQ ID NO: 140618 - RNA, 19 nt, Artificial Sequence
  Synthetic
  misc_feature (2)..(2): n is a, c, g, or u
gnuauauggaugauguggu

SEQ ID NO: 140619 - RNA, 20 nt, Artificial Sequence
  Synthetic
  misc_feature (3)..(3): n is a, c, g, or u
agnuauauggaugauguggu

SEQ ID NO: 140620 - RNA, 21 nt, Artificial Sequence
  Synthetic
  misc_feature (4)..(4): n is a, c, g, or u
cagnuauauggaugauguggu

SEQ ID NO: 140621 - RNA, 22 nt, Artificial Sequence
  Synthetic
  misc_feature (5)..(5): n is a, c, g, or u
ucagnuauauggaugauguggu

SEQ ID NO: 140622 - RNA, 23 nt, Artificial Sequence
  Synthetic
  misc_feature (6)..(6): n is a, c, g, or u
uucagnuauauggaugauguggu

SEQ ID NO: 140623 - RNA, 24 nt, Artificial Sequence
  Synthetic
  misc_feature (7)..(7): n is a, c, g, or u
uuucagnuauauggaugauguggu

SEQ ID NO: 140624 - RNA, 18 nt, Artificial Sequence
  Synthetic
auugauuggaaaguaugu

SEQ ID NO: 140625 - RNA, 19 nt, Artificial Sequence
  Synthetic
uauugauuggaaaguaugu

SEQ ID NO: 140626 - RNA, 20 nt, Artificial Sequence
  Synthetic
cuauugauuggaaaguaugu

SEQ ID NO: 140627 - RNA, 21 nt, Artificial Sequence
  Synthetic
ccuauugauuggaaaguaugu

SEQ ID NO: 140628 - RNA, 22 nt, Artificial Sequence
  Synthetic
  misc_feature (1)..(1): n is a, c, g, or u
nccuauugauuggaaaguaugu

SEQ ID NO: 140629 - RNA, 23 nt, Artificial Sequence
  Synthetic
  misc_feature (2)..(2): n is a, c, g, or u
gnccuauugauuggaaaguaugu

SEQ ID NO: 140630 - RNA, 24 nt, Artificial Sequence
  Synthetic
  misc_feature (1)..(1): n is a, c, g, or u
  misc_feature (3)..(3): n is a, c, g, or u
ngnccuauugauuggaaaguaugu

SEQ ID NO: 140631 - RNA, 18 nt, Artificial Sequence
  Synthetic
  misc_feature (6)..(6): n is a, c, g, or u
caaaanaucaaacacugu

SEQ ID NO: 140632 - RNA, 19 nt, Artificial Sequence
  Synthetic
  misc_feature (7)..(7): n is a, c, g, or u
acaaaanaucaaacacugu

SEQ ID NO: 140633 - RNA, 20 nt, Artificial Sequence
  Synthetic
  misc_feature (8)..(8): n is a, c, g, or u
uacaaaanaucaaacacugu

SEQ ID NO: 140634 - RNA, 21 nt, Artificial Sequence
  Synthetic
  misc_feature (9)..(9): n is a, c, g, or u
guacaaaanaucaaacacugu

SEQ ID NO: 140635 - RNA, 22 nt, Artificial Sequence
  Synthetic
  misc_feature (10)..(10): n is a, c, g, or u
uguacaaaanaucaaacacugu

SEQ ID NO: 140636 - RNA, 23 nt, Artificial Sequence
  Synthetic
  misc_feature (11)..(11): n is a, c, g, or u
uuguacaaaanaucaaacacugu

SEQ ID NO: 140637 - RNA, 24 nt, Artificial Sequence
  Synthetic
  misc_feature (12)..(12): n is a, c, g, or u
auuguacaaaanaucaaacacugu

SEQ ID NO: 140638 - RNA, 18 nt, Artificial Sequence
  Synthetic
uuucccucauguugcugu

SEQ ID NO: 140639 - RNA, 19 nt, Artificial Sequence
  Synthetic
guuucccucauguugcugu

SEQ ID NO: 140640 - RNA, 20 nt, Artificial Sequence
  Synthetic
uguuucccucauguugcugu

SEQ ID NO: 140641 - RNA, 21 nt, Artificial Sequence
  Synthetic
auguuucccucauguugcugu

SEQ ID NO: 140642 - RNA, 22 nt, Artificial Sequence
  Synthetic
uauguuucccucauguugcugu

SEQ ID NO: 140643 - RNA, 23 nt, Artificial Sequence
  Synthetic
cuauguuucccucauguugcugu

SEQ ID NO: 140644 - RNA, 24 nt, Artificial Sequence
  Synthetic
ucuauguuucccucauguugcugu

SEQ ID NO: 140645 - RNA, 18 nt, Artificial Sequence
  Synthetic
ggcaacggccuggucugu

SEQ ID NO: 140646 - RNA, 19 nt, Artificial Sequence
  Synthetic
cggcaacggccuggucugu

SEQ ID NO: 140647 - RNA, 20 nt, Artificial Sequence
  Synthetic
  misc_feature (1)..(1): n is a, c, g, or u
ncggcaacggccuggucugu

SEQ ID NO: 140648 - RNA, 21 nt, Artificial Sequence
  Synthetic
  misc_feature (2)..(2): n is a, c, g, or u
cncggcaacggccuggucugu

SEQ ID NO: 140649 - RNA, 22 nt, Artificial Sequence
  Synthetic
  misc_feature (3)..(3): n is a, c, g, or u
gcncggcaacggccuggucugu

SEQ ID NO: 140650 - RNA, 23 nt, Artificial Sequence
  Synthetic
  misc_feature (4)..(4): n is a, c, g, or u
ugcncggcaacggccuggucugu

SEQ ID NO: 140651 - RNA, 24 nt, Artificial Sequence
  Synthetic
  misc_feature (5)..(5): n is a, c, g, or u
uugcncggcaacggccuggucugu

SEQ ID NO: 140652 - RNA, 18 nt, Artificial Sequence
  Synthetic
uaggaccccugcucgugu

SEQ ID NO: 140653 - RNA, 19 nt, Artificial Sequence
  Synthetic
cuaggaccccugcucgugu

SEQ ID NO: 140654 - RNA, 20 nt, Artificial Sequence
  Synthetic
ccuaggaccccugcucgugu

SEQ ID NO: 140655 - RNA, 21 nt, Artificial Sequence
  Synthetic
uccuaggaccccugcucgugu

SEQ ID NO: 140656 - RNA, 22 nt, Artificial Sequence
  Synthetic
uuccuaggaccccugcucgugu

SEQ ID NO: 140657 - RNA, 23 nt, Artificial Sequence
  Synthetic
auuccuaggaccccugcucgugu

SEQ ID NO: 140658 - RNA, 24 nt, Artificial Sequence
  Synthetic
gauuccuaggaccccugcucgugu

SEQ ID NO: 140659 - RNA, 18 nt, Artificial Sequence
  Synthetic
  misc_feature (7)..(7): n is a, c, g, or u
gggggancacccgugugu

SEQ ID NO: 140660 - RNA, 19 nt, Artificial Sequence
  Synthetic
  misc_feature (8)..(8): n is a, c, g, or u
agggggancacccgugugu

SEQ ID NO: 140661 - RNA, 20 nt, Artificial Sequence
  Synthetic
  misc_feature (9)..(9): n is a, c, g, or u
uagggggancacccgugugu

SEQ ID NO: 140662 - RNA, 21 nt, Artificial Sequence
  Synthetic
  misc_feature (10)..(10): n is a, c, g, or u
cuagggggancacccgugugu

SEQ ID NO: 140663 - RNA, 22 nt, Artificial Sequence
  Synthetic
  misc_feature (11)..(11): n is a, c, g, or u
ucuagggggancacccgugugu

SEQ ID NO: 140664 - RNA, 23 nt, Artificial Sequence
  Synthetic
  misc_feature (12)..(12): n is a, c, g, or u
uucuagggggancacccgugugu

SEQ ID NO: 140665 - RNA, 24 nt, Artificial Sequence
  Synthetic
  misc_feature (13)..(13): n is a, c, g, or u
uuucuagggggancacccgugugu

SEQ ID NO: 140666 - RNA, 18 nt, Artificial Sequence
  Synthetic
  misc_feature (7)..(7): n is a, c, g, or u
gccacangaucauauugu

SEQ ID NO: 140667 - RNA, 19 nt, Artificial Sequence
  Synthetic
  misc_feature (8)..(8): n is a, c, g, or u
ugccacangaucauauugu

SEQ ID NO: 140668 - RNA, 20 nt, Artificial Sequence
  Synthetic
  misc_feature (9)..(9): n is a, c, g, or u
uugccacangaucauauugu

SEQ ID NO: 140669 - RNA, 21 nt, Artificial Sequence
  Synthetic
  misc_feature (1)..(1): n is a, c, g, or u
  misc_feature (10)..(10): n is a, c, g, or u
nuugccacangaucauauugu

SEQ ID NO: 140670 - RNA, 22 nt, Artificial Sequence
  Synthetic
  misc_feature (2)..(2): n is a, c, g, or u
  misc_feature (11)..(11): n is a, c, g, or u
cnuugccacangaucauauugu

SEQ ID NO: 140671 - RNA, 23 nt, Artificial Sequence
  Synthetic
  misc_feature (3)..(3): n is a, c, g, or u
  misc_feature (12)..(12): n is a, c, g, or u
acnuugccacangaucauauugu

SEQ ID NO: 140672 - RNA, 24 nt, Artificial Sequence
  Synthetic
  misc_feature (1)..(1): n is a, c, g, or u
  misc_feature (4)..(4): n is a, c, g, or u
  misc_feature (13)..(13): n is a, c, g, or u
nacnuugccacangaucauauugu

SEQ ID NO: 140673 - RNA, 18 nt, Artificial Sequence
  Synthetic
  misc_feature (9)..(9): n is a, c, g, or u
  misc_feature (11)..(11): n is a, c, g, or u
uagguuaangnucuuugu

SEQ ID NO: 140674 - RNA, 19 nt, Artificial Sequence
  Synthetic
  misc_feature (10)..(10): n is a, c, g, or u
  misc_feature (12)..(12): n is a, c, g, or u
uuagguuaangnucuuugu

SEQ ID NO: 140675 - RNA, 20 nt, Artificial Sequence
  Synthetic
  misc_feature (11)..(11): n is a, c, g, or u
  misc_feature (13)..(13): n is a, c, g, or u
auuagguuaangnucuuugu

SEQ ID NO: 140676 - RNA, 21 nt, Artificial Sequence
  Synthetic
  misc_feature (12)..(12): n is a, c, g, or u
  misc_feature (14)..(14): n is a, c, g, or u
gauuagguuaangnucuuugu

SEQ ID NO: 140677 - RNA, 22 nt, Artificial Sequence
  Synthetic
  misc_feature (13)..(13): n is a, c, g, or u
  misc_feature (15)..(15): n is a, c, g, or u
agauuagguuaangnucuuugu

SEQ ID NO: 140678 - RNA, 23 nt, Artificial Sequence
  Synthetic
  misc_feature (14)..(14): n is a, c, g, or u
  misc_feature (16)..(16): n is a, c, g, or u
gagauuagguuaangnucuuugu

SEQ ID NO: 140679 - RNA, 24 nt, Artificial Sequence
  Synthetic
  misc_feature (15)..(15): n is a, c, g, or u
  misc_feature (17)..(17): n is a, c, g, or u
ggagauuagguuaangnucuuugu

SEQ ID NO: 140680 - RNA, 18 nt, Artificial Sequence
  Synthetic
  misc_feature (17)..(17): n is a, c, g, or u
caaccaguacgggaccnu

SEQ ID NO: 140681 - RNA, 19 nt, Artificial Sequence
  Synthetic
  misc_feature (18)..(18): n is a, c, g, or u
acaaccaguacgggaccnu

SEQ ID NO: 140682 - RNA, 20 nt, Artificial Sequence
  Synthetic
  misc_feature (19)..(19): n is a, c, g, or u
aacaaccaguacgggaccnu

SEQ ID NO: 140683 - RNA, 21 nt, Artificial Sequence
  Synthetic
  misc_feature (20)..(20): n is a, c, g, or u
caacaaccaguacgggaccnu

SEQ ID NO: 140684 - RNA, 22 nt, Artificial Sequence
  Synthetic
  misc_feature (21)..(21): n is a, c, g, or u
acaacaaccaguacgggaccnu

SEQ ID NO: 140685 - RNA, 23 nt, Artificial Sequence
  Synthetic
  misc_feature (1)..(1): n is a, c, g, or u
  misc_feature (22)..(22): n is a, c, g, or u
nacaacaaccaguacgggaccnu

SEQ ID NO: 140686 - RNA, 24 nt, Artificial Sequence
  Synthetic
  misc_feature (2)..(2): n is a, c, g, or u
  misc_feature (23)..(23): n is a, c, g, or u
cnacaacaaccaguacgggaccnu

SEQ ID NO: 140687 - RNA, 18 nt, Artificial Sequence
  Synthetic
  misc_feature (17)..(17): n is a, c, g, or u
guauucccaucccaucnu

SEQ ID NO: 140688 - RNA, 19 nt, Artificial Sequence
  Synthetic
  misc_feature (18)..(18): n is a, c, g, or u
uguauucccaucccaucnu

SEQ ID NO: 140689 - RNA, 20 nt, Artificial Sequence
  Synthetic
  misc_feature (19)..(19): n is a, c, g, or u
cuguauucccaucccaucnu

SEQ ID NO: 140690 - RNA, 21 nt, Artificial Sequence
  Synthetic
  misc_feature (20)..(20): n is a, c, g, or u
ccuguauucccaucccaucnu

SEQ ID NO: 140691 - RNA, 22 nt, Artificial Sequence
  Synthetic
  misc_feature (21)..(21): n is a, c, g, or u
accuguauucccaucccaucnu

SEQ ID NO: 140692 - RNA, 23 nt, Artificial Sequence
  Synthetic
  misc_feature (22)..(22): n is a, c, g, or u
caccuguauucccaucccaucnu

SEQ ID NO: 140693 - RNA, 24 nt, Artificial Sequence
  Synthetic
  misc_feature (23)..(23): n is a, c, g, or u
gcaccuguauucccaucccaucnu

SEQ ID NO: 140694 - RNA, 18 nt, Artificial Sequence
  Synthetic
  misc_feature (4)..(4): n is a, c, g, or u
  misc_feature (17)..(17): n is a, c, g, or u
uaangacugggaggagnu

SEQ ID NO: 140695 - RNA, 19 nt, Artificial Sequence
  Synthetic
  misc_feature (5)..(5): n is a, c, g, or u
  misc_feature (18)..(18): n is a, c, g, or u
uuaangacugggaggagnu

SEQ ID NO: 140696 - RNA, 20 nt, Artificial Sequence
  Synthetic
  misc_feature (6)..(6): n is a, c, g, or u
  misc_feature (19)..(19): n is a, c, g, or u
uuuaangacugggaggagnu

SEQ ID NO: 140697 - RNA, 21 nt, Artificial Sequence
  Synthetic
  misc_feature (7)..(7): n is a, c, g, or u
  misc_feature (20)..(20): n is a, c, g, or u
guuuaangacugggaggagnu

SEQ ID NO: 140698 - RNA, 22 nt, Artificial Sequence
  Synthetic
  misc_feature (8)..(8): n is a, c, g, or u
  misc_feature (21)..(21): n is a, c, g, or u
uguuuaangacugggaggagnu

SEQ ID NO: 140699 - RNA, 23 nt, Artificial Sequence
  Synthetic
  misc_feature (9)..(9): n is a, c, g, or u
  misc_feature (22)..(22): n is a, c, g, or u
guguuuaangacugggaggagnu

SEQ ID NO: 140700 - RNA, 24 nt, Artificial Sequence
  Synthetic
  misc_feature (10)..(10): n is a, c, g, or u
  misc_feature (23)..(23): n is a, c, g, or u
uguguuuaangacugggaggagnu

SEQ ID NO: 140701 - RNA, 18 nt, Artificial Sequence
  Synthetic
  misc_feature (5)..(5): n is a, c, g, or u
  misc_feature (17)..(17): n is a, c, g, or u
uuguncaugucccacunu

SEQ ID NO: 140702 - RNA, 19 nt, Artificial Sequence
  Synthetic
  misc_feature (6)..(6): n is a, c, g, or u
  misc_feature (18)..(18): n is a, c, g, or u
cuuguncaugucccacunu

SEQ ID NO: 140703 - RNA, 20 nt, Artificial Sequence
  Synthetic
  misc_feature (7)..(7): n is a, c, g, or u
  misc_feature (19)..(19): n is a, c, g, or u
ucuuguncaugucccacunu

SEQ ID NO: 140704 - RNA, 21 nt, Artificial Sequence
  Synthetic
  misc_feature (8)..(8): n is a, c, g, or u
  misc_feature (20)..(20): n is a, c, g, or u
cucuuguncaugucccacunu

SEQ ID NO: 140705 - RNA, 22 nt, Artificial Sequence
  Synthetic
  misc_feature (9)..(9): n is a, c, g, or u
  misc_feature (21)..(21): n is a, c, g, or u
ucucuuguncaugucccacunu

SEQ ID NO: 140706 - RNA, 23 nt, Artificial Sequence
  Synthetic
  misc_feature (10)..(10): n is a, c, g, or u
  misc_feature (22)..(22): n is a, c, g, or u
aucucuuguncaugucccacunu

SEQ ID NO: 140707 - RNA, 24 nt, Artificial Sequence
  Synthetic
  misc_feature (11)..(11): n is a, c, g, or u
  misc_feature (23)..(23): n is a, c, g, or u
caucucuuguncaugucccacunu

SEQ ID NO: 140708 - RNA, 18 nt, Artificial Sequence
  Synthetic
  misc_feature (2)..(2): n is a, c, g, or u
  misc_feature (17)..(17): n is a, c, g, or u
anaauucugucguccunu

SEQ ID NO: 140709 - RNA, 19 nt, Artificial Sequence
  Synthetic
  misc_feature (3)..(3): n is a, c, g, or u
  misc_feature (18)..(18): n is a, c, g, or u
ganaauucugucguccunu

SEQ ID NO: 140710 - RNA, 20 nt, Artificial Sequence
  Synthetic
  misc_feature (4)..(4): n is a, c, g, or u
  misc_feature (19)..(19): n is a, c, g, or u
uganaauucugucguccunu

SEQ ID NO: 140711 - RNA, 21 nt, Artificial Sequence
  Synthetic
  misc_feature (5)..(5): n is a, c, g, or u
  misc_feature (20)..(20): n is a, c, g, or u
cuganaauucugucguccunu

SEQ ID NO: 140712 - RNA, 22 nt, Artificial Sequence
  Synthetic
  misc_feature (6)..(6): n is a, c, g, or u
  misc_feature (21)..(21): n is a, c, g, or u
acuganaauucugucguccunu

SEQ ID NO: 140713 - RNA, 23 nt, Artificial Sequence
  Synthetic
  misc_feature (1)..(1): n is a, c, g, or u
  misc_feature (7)..(7): n is a, c, g, or u
  misc_feature (22)..(22): n is a, c, g, or u
nacuganaauucugucguccunu

SEQ ID NO: 140714 - RNA, 24 nt, Artificial Sequence
  Synthetic
  misc_feature (2)..(2): n is a, c, g, or u
  misc_feature (8)..(8): n is a, c, g, or u
  misc_feature (23)..(23): n is a, c, g, or u
gnacuganaauucugucguccunu

SEQ ID NO: 140715 - RNA, 18 nt, Artificial Sequence
  Synthetic
  misc_feature (1)..(1): n is a, c, g, or u
  misc_feature (4)..(4): n is a, c, g, or u
  misc_feature (13)..(13): n is a, c, g, or u
  misc_feature (17)..(17): n is a, c, g, or u
nccnccacacggnggunu

SEQ ID NO: 140716 - RNA, 19 nt, Artificial Sequence
  Synthetic
  misc_feature (2)..(2): n is a, c, g, or u
  misc_feature (5)..(5): n is a, c, g, or u
  misc_feature (14)..(14): n is a, c, g, or u
  misc_feature (18)..(18): n is a, c, g, or u
cnccnccacacggnggunu

SEQ ID NO: 140717 - RNA, 20 nt, Artificial Sequence
  Synthetic
  misc_feature (3)..(3): n is a, c, g, or u
  misc_feature (6)..(6): n is a, c, g, or u
  misc_feature (15)..(15): n is a, c, g, or u
  misc_feature (19)..(19): n is a, c, g, or u
acnccnccacacggnggunu

SEQ ID NO: 140718 - RNA, 21 nt, Artificial Sequence
  Synthetic
  misc_feature (4)..(4): n is a, c, g, or u
  misc_feature (7)..(7): n is a, c, g, or u
  misc_feature (16)..(16): n is a, c, g, or u
  misc_feature (20)..(20): n is a, c, g, or u
cacnccnccacacggnggunu

SEQ ID NO: 140719 - RNA, 22 nt, Artificial Sequence
  Synthetic
  misc_feature (5)..(5): n is a, c, g, or u
  misc_feature (8)..(8): n is a, c, g, or u
  misc_feature (17)..(17): n is a, c, g, or u
  misc_feature (21)..(21): n is a, c, g, or u
ucacnccnccacacggnggunu

SEQ ID NO: 140720 - RNA, 23 nt, Artificial Sequence
  Synthetic
  misc_feature (1)..(1): n is a, c, g, or u
  misc_feature (6)..(6): n is a, c, g, or u
  misc_feature (9)..(9): n is a, c, g, or u
  misc_feature (18)..(18): n is a, c, g, or u
  misc_feature (22)..(22): n is a, c, g, or u
nucacnccnccacacggnggunu

SEQ ID NO: 140721 - RNA, 24 nt, Artificial Sequence
  Synthetic
  misc_feature (2)..(2): n is a, c, g, or u
  misc_feature (7)..(7): n is a, c, g, or u
  misc_feature (10)..(10): n is a, c, g, or u
  misc_feature (19)..(19): n is a, c, g, or u
  misc_feature (23)..(23): n is a, c, g, or u
gnucacnccnccacacggnggunu

SEQ ID NO: 140722 - RNA, 18 nt, Artificial Sequence
  Synthetic
ugacccuuauaaagaauu

SEQ ID NO: 140723 - RNA, 19 nt, Artificial Sequence
  Synthetic
uugacccuuauaaagaauu

SEQ ID NO: 140724 - RNA, 20 nt, Artificial Sequence
  Synthetic
auugacccuuauaaagaauu

SEQ ID NO: 140725 - RNA, 21 nt, Artificial Sequence
  Synthetic
cauugacccuuauaaagaauu

SEQ ID NO: 140726 - RNA, 22 nt, Artificial Sequence
  Synthetic
acauugacccuuauaaagaauu

SEQ ID NO: 140727 - RNA, 23 nt, Artificial Sequence
  Synthetic
gacauugacccuuauaaagaauu

SEQ ID NO: 140728 - RNA, 24 nt, Artificial Sequence
  Synthetic
ggacauugacccuuauaaagaauu

SEQ ID NO: 140729 - RNA, 18 nt, Artificial Sequence
  Synthetic
ucucugcuggggggaauu

SEQ ID NO: 140730 - RNA, 19 nt, Artificial Sequence
  Synthetic
uucucugcuggggggaauu

SEQ ID NO: 140731 - RNA, 20 nt, Artificial Sequence
  Synthetic
auucucugcuggggggaauu

SEQ ID NO: 140732 - RNA, 21 nt, Artificial Sequence
  Synthetic
cauucucugcuggggggaauu

SEQ ID NO: 140733 - RNA, 22 nt, Artificial Sequence
  Synthetic
ccauucucugcuggggggaauu

SEQ ID NO: 140734 - RNA, 23 nt, Artificial Sequence
  Synthetic
gccauucucugcuggggggaauu

SEQ ID NO: 140735 - RNA, 24 nt, Artificial Sequence
  Synthetic
agccauucucugcuggggggaauu

SEQ ID NO: 140736 - RNA, 18 nt, Artificial Sequence
  Synthetic
ccuggguggguaauaauu

SEQ ID NO: 140737 - RNA, 19 nt, Artificial Sequence
  Synthetic
accuggguggguaauaauu

SEQ ID NO: 140738 - RNA, 20 nt, Artificial Sequence
  Synthetic
uaccuggguggguaauaauu

SEQ ID NO: 140739 - RNA, 21 nt, Artificial Sequence
  Synthetic
cuaccuggguggguaauaauu

SEQ ID NO: 140740 - RNA, 22 nt, Artificial Sequence
  Synthetic
gcuaccuggguggguaauaauu

SEQ ID NO: 140741 - RNA, 23 nt, Artificial Sequence
  Synthetic
agcuaccuggguggguaauaauu

SEQ ID NO: 140742 - RNA, 24 nt, Artificial Sequence
  Synthetic
uagcuaccuggguggguaauaauu

SEQ ID NO: 140743 - RNA, 18 nt, Artificial Sequence
  Synthetic
cccguuuguccucuaauu

SEQ ID NO: 140744 - RNA, 19 nt, Artificial Sequence
  Synthetic
gcccguuuguccucuaauu

SEQ ID NO: 140745 - RNA, 20 nt, Artificial Sequence
  Synthetic
ugcccguuuguccucuaauu

SEQ ID NO: 140746 - RNA, 21 nt, Artificial Sequence
  Synthetic
uugcccguuuguccucuaauu

SEQ ID NO: 140747 - RNA, 22 nt, Artificial Sequence
  Synthetic
guugcccguuuguccucuaauu

SEQ ID NO: 140748 - RNA, 23 nt, Artificial Sequence
  Synthetic
uguugcccguuuguccucuaauu

SEQ ID NO: 140749 - RNA, 24 nt, Artificial Sequence
  Synthetic
auguugcccguuuguccucuaauu

SEQ ID NO: 140750 - RNA, 18 nt, Artificial Sequence
  Synthetic
ucaguuggacccugcauu

SEQ ID NO: 140751 - RNA, 19 nt, Artificial Sequence
  Synthetic
aucaguuggacccugcauu

SEQ ID NO: 140752 - RNA, 20 nt, Artificial Sequence
  Synthetic
caucaguuggacccugcauu

SEQ ID NO: 140753 - RNA, 21 nt, Artificial Sequence
  Synthetic
ucaucaguuggacccugcauu

SEQ ID NO: 140754 - RNA, 22 nt, Artificial Sequence
  Synthetic
aucaucaguuggacccugcauu

SEQ ID NO: 140755 - RNA, 23 nt, Artificial Sequence
  Synthetic
gaucaucaguuggacccugcauu

SEQ ID NO: 140756 - RNA, 24 nt, Artificial Sequence
  Synthetic
cgaucaucaguuggacccugcauu

SEQ ID NO: 140757 - RNA, 18 nt, Artificial Sequence
  Synthetic
gaacaucacaucaggauu

SEQ ID NO: 140758 - RNA, 19 nt, Artificial Sequence
  Synthetic
agaacaucacaucaggauu

SEQ ID NO: 140759 - RNA, 20 nt, Artificial Sequence
  Synthetic
gagaacaucacaucaggauu

SEQ ID NO: 140760 - RNA, 21 nt, Artificial Sequence
  Synthetic
ggagaacaucacaucaggauu

SEQ ID NO: 140761 - RNA, 22 nt, Artificial Sequence
  Synthetic
uggagaacaucacaucaggauu

SEQ ID NO: 140762 - RNA, 23 nt, Artificial Sequence
  Synthetic
auggagaacaucacaucaggauu

SEQ ID NO: 140763 - RNA, 24 nt, Artificial Sequence
  Synthetic
cauggagaacaucacaucaggauu

SEQ ID NO: 140764 - RNA, 18 nt, Artificial Sequence
  Synthetic
uauugguucuucuggauu

SEQ ID NO: 140765 - RNA, 19 nt, Artificial Sequence
  Synthetic
uuauugguucuucuggauu

SEQ ID NO: 140766 - RNA, 20 nt, Artificial Sequence
  Synthetic
cuuauugguucuucuggauu

SEQ ID NO: 140767 - RNA, 21 nt, Artificial Sequence
  Synthetic
ucuuauugguucuucuggauu

SEQ ID NO: 140768 - RNA, 22 nt, Artificial Sequence
  Synthetic
uucuuauugguucuucuggauu

SEQ ID NO: 140769 - RNA, 23 nt, Artificial Sequence
  Synthetic
cuucuuauugguucuucuggauu

SEQ ID NO: 140770 - RNA, 24 nt, Artificial Sequence
  Synthetic
ucuucuuauugguucuucuggauu

SEQ ID NO: 140771 - RNA, 18 nt, Artificial Sequence
  Synthetic
  misc_feature (2)..(2): n is a, c, g, or u
  misc_feature (5)..(6): n is a, c, g, or u
  misc_feature (8)..(8): n is a, c, g, or u
unaanngnccuauugauu

SEQ ID NO: 140772 - RNA, 19 nt, Artificial Sequence
  Synthetic
  misc_feature (3)..(3): n is a, c, g, or u
  misc_feature (6)..(7): n is a, c, g, or u
  misc_feature (9)..(9): n is a, c, g, or u
gunaanngnccuauugauu

SEQ ID NO: 140773 - RNA, 20 nt, Artificial Sequence
  Synthetic
  misc_feature (4)..(4): n is a, c, g, or u
  misc_feature (7)..(8): n is a, c, g, or u
  misc_feature (10)..(10): n is a, c, g, or u
ugunaanngnccuauugauu

SEQ ID NO: 140774 - RNA, 21 nt, Artificial Sequence
  Synthetic
  misc_feature (5)..(5): n is a, c, g, or u
  misc_feature (8)..(9): n is a, c, g, or u
  misc_feature (11)..(11): n is a, c, g, or u
cugunaanngnccuauugauu

SEQ ID NO: 140775 - RNA, 22 nt, Artificial Sequence
  Synthetic
  misc_feature (6)..(6): n is a, c, g, or u
  misc_feature (9)..(10): n is a, c, g, or u
  misc_feature (12)..(12): n is a, c, g, or u
ccugunaanngnccuauugauu

SEQ ID NO: 140776 - RNA, 23 nt, Artificial Sequence
  Synthetic
  misc_feature (7)..(7): n is a, c, g, or u
  misc_feature (10)..(11): n is a, c, g, or u
  misc_feature (13)..(13): n is a, c, g, or u
uccugunaanngnccuauugauu

SEQ ID NO: 140777 - RNA, 24 nt, Artificial Sequence
  Synthetic
  misc_feature (8)..(8): n is a, c, g, or u
  misc_feature (11)..(12): n is a, c, g, or u
  misc_feature (14)..(14): n is a, c, g, or u
uuccugunaanngnccuauugauu

SEQ ID NO: 140778 - RNA, 18 nt, Artificial Sequence
  Synthetic
uuugcgggucaccauauu

SEQ ID NO: 140779 - RNA, 19 nt, Artificial Sequence
  Synthetic
uuuugcgggucaccauauu

SEQ ID NO: 140780 - RNA, 20 nt, Artificial Sequence
  Synthetic
auuuugcgggucaccauauu

SEQ ID NO: 140781 - RNA, 21 nt, Artificial Sequence
  Synthetic
cauuuugcgggucaccauauu

SEQ ID NO: 140782 - RNA, 22 nt, Artificial Sequence
  Synthetic
ucauuuugcgggucaccauauu

SEQ ID NO: 140783 - RNA, 23 nt, Artificial Sequence
  Synthetic
  misc_feature (1)..(1): n is a, c, g, or u
nucauuuugcgggucaccauauu

SEQ ID NO: 140784 - RNA, 24 nt, Artificial Sequence
  Synthetic
  misc_feature (2)..(2): n is a, c, g, or u
cnucauuuugcgggucaccauauu

SEQ ID NO: 140785 - RNA, 18 nt, Artificial Sequence
  Synthetic
uauggaugaugugguauu

SEQ ID NO: 140786 - RNA, 19 nt, Artificial Sequence
  Synthetic
auauggaugaugugguauu

SEQ ID NO: 140787 - RNA, 20 nt, Artificial Sequence
  Synthetic
uauauggaugaugugguauu

SEQ ID NO: 140788 - RNA, 21 nt, Artificial Sequence
  Synthetic
  misc_feature (1)..(1): n is a, c, g, or u
nuauauggaugaugugguauu

SEQ ID NO: 140789 - RNA, 22 nt, Artificial Sequence
  Synthetic
  misc_feature (2)..(2): n is a, c, g, or u
gnuauauggaugaugugguauu

SEQ ID NO: 140790 - RNA, 23 nt, Artificial Sequence
  Synthetic
  misc_feature (3)..(3): n is a, c, g, or u
agnuauauggaugaugugguauu

SEQ ID NO: 140791 - RNA, 24 nt, Artificial Sequence
  Synthetic
  misc_feature (4)..(4): n is a, c, g, or u
cagnuauauggaugaugugguauu

SEQ ID NO: 140792 - RNA, 18 nt, Artificial Sequence
  Synthetic
  misc_feature (6)..(6): n is a, c, g, or u
  misc_feature (8)..(8): n is a, c, g, or u
guuaangnucuuuguauu

SEQ ID NO: 140793 - RNA, 19 nt, Artificial Sequence
  Synthetic
  misc_feature (7)..(7): n is a, c, g, or u
  misc_feature (9)..(9): n is a, c, g, or u
gguuaangnucuuuguauu

SEQ ID NO: 140794 - RNA, 20 nt, Artificial Sequence
  Synthetic
  misc_feature (8)..(8): n is a, c, g, or u
  misc_feature (10)..(10): n is a, c, g, or u
agguuaangnucuuuguauu

SEQ ID NO: 140795 - RNA, 21 nt, Artificial Sequence
  Synthetic
  misc_feature (9)..(9): n is a, c, g, or u
  misc_feature (11)..(11): n is a, c, g, or u
uagguuaangnucuuuguauu

SEQ ID NO: 140796 - RNA, 22 nt, Artificial Sequence
  Synthetic
  misc_feature (10)..(10): n is a, c, g, or u
  misc_feature (12)..(12): n is a, c, g, or u
uuagguuaangnucuuuguauu

SEQ ID NO: 140797 - RNA, 23 nt, Artificial Sequence
  Synthetic
  misc_feature (11)..(11): n is a, c, g, or u
  misc_feature (13)..(13): n is a, c, g, or u
auuagguuaangnucuuuguauu

SEQ ID NO: 140798 - RNA, 24 nt, Artificial Sequence
  Synthetic
  misc_feature (12)..(12): n is a, c, g, or u
  misc_feature (14)..(14): n is a, c, g, or u
gauuagguuaangnucuuuguauu

SEQ ID NO: 140799 - RNA, 18 nt, Artificial Sequence
  Synthetic
  misc_feature (6)..(6): n is a, c, g, or u
  misc_feature (9)..(9): n is a, c, g, or u
uuacangangacauuauu

SEQ ID NO: 140800 - RNA, 19 nt, Artificial Sequence
  Synthetic
  misc_feature (7)..(7): n is a, c, g, or u
  misc_feature (10)..(10): n is a, c, g, or u
uuuacangangacauuauu

SEQ ID NO: 140801 - RNA, 20 nt, Artificial Sequence
  Synthetic
  misc_feature (8)..(8): n is a, c, g, or u
  misc_feature (11)..(11): n is a, c, g, or u
auuuacangangacauuauu

SEQ ID NO: 140802 - RNA, 21 nt, Artificial Sequence
  Synthetic
  misc_feature (9)..(9): n is a, c, g, or u
  misc_feature (12)..(12): n is a, c, g, or u
cauuuacangangacauuauu

SEQ ID NO: 140803 - RNA, 22 nt, Artificial Sequence
  Synthetic
  misc_feature (10)..(10): n is a, c, g, or u
  misc_feature (13)..(13): n is a, c, g, or u
ucauuuacangangacauuauu

SEQ ID NO: 140804 - RNA, 23 nt, Artificial Sequence
  Synthetic
  misc_feature (11)..(11): n is a, c, g, or u
  misc_feature (14)..(14): n is a, c, g, or u
uucauuuacangangacauuauu

SEQ ID NO: 140805 - RNA, 24 nt, Artificial Sequence
  Synthetic
  misc_feature (12)..(12): n is a, c, g, or u
  misc_feature (15)..(15): n is a, c, g, or u
auucauuuacangangacauuauu

SEQ ID NO: 140806 - RNA, 18 nt, Artificial Sequence
  Synthetic
  misc_feature (2)..(2): n is a, c, g, or u
unacuuucucgccaacuu
